United States Patent Application Publication US 2004/0241651 A1 - sequence listing, part 12

SEQ ID NO: 322601 - DNA, 12 bp, Artificial Sequence
  Oligonucleotide primer for the detection of SNP TSC0030957
ctttataaaaat

SEQ ID NO: 322602 - DNA, 12 bp, Artificial Sequence
  Oligonucleotide primer for the detection of SNP TSC0030957
agaattgtgtta

SEQ ID NO: 322603 - DNA, 12 bp, Artificial Sequence
  Oligonucleotide primer for the detection of SNP TSC0030960
cctaaactttca

SEQ ID NO: 322604 - DNA, 12 bp, Artificial Sequence
  Oligonucleotide primer for the detection of SNP TSC0030960
tgttgtaagttt

SEQ ID NO: 322605 - DNA, 12 bp, Artificial Sequence
  Oligonucleotide primer for the detection of SNP TSC0030960
tattacaaatcc

SEQ ID NO: 322606 - DNA, 12 bp, Artificial Sequence
  Oligonucleotide primer for the detection of SNP TSC0030960
tttggattttta

SEQ ID NO: 322607 - DNA, 12 bp, Artificial Sequence
  Oligonucleotide primer for the detection of SNP TSC0030961
cctctaattaac

SEQ ID NO: 322608 - DNA, 12 bp, Artificial Sequence
  Oligonucleotide primer for the detection of SNP TSC0030961
ttagattttaga

SEQ ID NO: 322609 - DNA, 12 bp, Artificial Sequence
  Oligonucleotide primer for the detection of SNP TSC0030962
tttcccaaacct

SEQ ID NO: 322610 - DNA, 12 bp, Artificial Sequence
  Oligonucleotide primer for the detection of SNP TSC0030962
aaggtttttttg

SEQ ID NO: 322611 - DNA, 12 bp, Artificial Sequence
  Oligonucleotide primer for the detection of SNP TSC0030964
tccccacaatca

SEQ ID NO: 322612 - DNA, 12 bp, Artificial Sequence
  Oligonucleotide primer for the detection of SNP TSC0030964
gtatgttattta

SEQ ID NO: 322613 - DNA, 12 bp, Artificial Sequence
  Oligonucleotide primer for the detection of SNP TSC0030968
acctacaaaatt

SEQ ID NO: 322614 - DNA, 12 bp, Artificial Sequence
  Oligonucleotide primer for the detection of SNP TSC0030968
agagaaagagaa

SEQ ID NO: 322615 - DNA, 12 bp, Artificial Sequence
  Oligonucleotide primer for the detection of SNP TSC0030969
tcacaaaaactt

SEQ ID NO: 322616 - DNA, 12 bp, Artificial Sequence
  Oligonucleotide primer for the detection of SNP TSC0030969
gtgaaaatagta

SEQ ID NO: 322617 - DNA, 12 bp, Artificial Sequence
  Oligonucleotide primer for the detection of SNP TSC0030971
ctaccttcctct

SEQ ID NO: 322618 - DNA, 12 bp, Artificial Sequence
  Oligonucleotide primer for the detection of SNP TSC0030971
agtatttttaag

SEQ ID NO: 322619 - DNA, 12 bp, Artificial Sequence
  Oligonucleotide primer for the detection of SNP TSC0030972
aacctacaccat

SEQ ID NO: 322620 - DNA, 12 bp, Artificial Sequence
  Oligonucleotide primer for the detection of SNP TSC0030972
aacctacaccgt

SEQ ID NO: 322621 - DNA, 12 bp, Artificial Sequence
  Oligonucleotide primer for the detection of SNP TSC0030972
tgtatttatgtg

SEQ ID NO: 322622 - DNA, 12 bp, Artificial Sequence
  Oligonucleotide primer for the detection of SNP TSC0030976
aacttactctca

SEQ ID NO: 322623 - DNA, 12 bp, Artificial Sequence
  Oligonucleotide primer for the detection of SNP TSC0030976
aacttactctcg

SEQ ID NO: 322624 - DNA, 12 bp, Artificial Sequence
  Oligonucleotide primer for the detection of SNP TSC0030976
gtaggagttttt

SEQ ID NO: 322625 - DNA, 12 bp, Artificial Sequence
  Oligonucleotide primer for the detection of SNP TSC0030976
ataaaaactttt

SEQ ID NO: 322626 - DNA, 12 bp, Artificial Sequence
  Oligonucleotide primer for the detection of SNP TSC0030977
ccacaaacacta

SEQ ID NO: 322627 - DNA, 12 bp, Artificial Sequence
  Oligonucleotide primer for the detection of SNP TSC0030977
aggaagaaatat

SEQ ID NO: 322628 - DNA, 12 bp, Artificial Sequence
  Oligonucleotide primer for the detection of SNP TSC0030977
ttataaatattg

SEQ ID NO: 322629 - DNA, 12 bp, Artificial Sequence
  Oligonucleotide primer for the detection of SNP TSC0030978
attttcatcatc

SEQ ID NO: 322630 - DNA, 12 bp, Artificial Sequence
  Oligonucleotide primer for the detection of SNP TSC0030978
tgtttgataata

SEQ ID NO: 322631 - DNA, 12 bp, Artificial Sequence
  Oligonucleotide primer for the detection of SNP TSC0030979
accttaaaactc

SEQ ID NO: 322632 - DNA, 12 bp, Artificial Sequence
  Oligonucleotide primer for the detection of SNP TSC0030979
aatattgtttta

SEQ ID NO: 322633 - DNA, 12 bp, Artificial Sequence
  Oligonucleotide primer for the detection of SNP TSC0030980
tttaagagtttt

SEQ ID NO: 322634 - DNA, 12 bp, Artificial Sequence
  Oligonucleotide primer for the detection of SNP TSC0030980
atgagttagtgt

SEQ ID NO: 322635 - DNA, 12 bp, Artificial Sequence
  Oligonucleotide primer for the detection of SNP TSC0030983
atttcatcctca

SEQ ID NO: 322636 - DNA, 12 bp, Artificial Sequence
  Oligonucleotide primer for the detection of SNP TSC0030983
atttcatcctcg

SEQ ID NO: 322637 - DNA, 12 bp, Artificial Sequence
  Oligonucleotide primer for the detection of SNP TSC0030983
agataagagagt

SEQ ID NO: 322638 - DNA, 12 bp, Artificial Sequence
  Oligonucleotide primer for the detection of SNP TSC0030983
attttattttcg

SEQ ID NO: 322639 - DNA, 12 bp, Artificial Sequence
  Oligonucleotide primer for the detection of SNP TSC0030984
accttcccatcc

SEQ ID NO: 322640 - DNA, 12 bp, Artificial Sequence
  Oligonucleotide primer for the detection of SNP TSC0030984
ctacctcccaat

SEQ ID NO: 322641 - DNA, 12 bp, Artificial Sequence
  Oligonucleotide primer for the detection of SNP TSC0030985
tcttaatttttt

SEQ ID NO: 322642 - DNA, 12 bp, Artificial Sequence
  Oligonucleotide primer for the detection of SNP TSC0030985
taattatattag

SEQ ID NO: 322643 - DNA, 12 bp, Artificial Sequence
  Oligonucleotide primer for the detection of SNP TSC0030986
acccaccaccac

SEQ ID NO: 322644 - DNA, 12 bp, Artificial Sequence
  Oligonucleotide primer for the detection of SNP TSC0030986
acccaccaccgc

SEQ ID NO: 322645 - DNA, 12 bp, Artificial Sequence
  Oligonucleotide primer for the detection of SNP TSC0030986
acccgccaccac

SEQ ID NO: 322646 - DNA, 12 bp, Artificial Sequence
  Oligonucleotide primer for the detection of SNP TSC0030986
acccgccaccgc

SEQ ID NO: 322647 - DNA, 12 bp, Artificial Sequence
  Oligonucleotide primer for the detection of SNP TSC0030986
ttaaggtggggg

SEQ ID NO: 322648 - DNA, 12 bp, Artificial Sequence
  Oligonucleotide primer for the detection of SNP TSC0030986
ccaaaataaaaa

SEQ ID NO: 322649 - DNA, 12 bp, Artificial Sequence
  Oligonucleotide primer for the detection of SNP TSC0030986
gtttgttattgt

SEQ ID NO: 322650 - DNA, 12 bp, Artificial Sequence
  Oligonucleotide primer for the detection of SNP TSC0030986
gttcgttattgt

SEQ ID NO: 322651 - DNA, 12 bp, Artificial Sequence
  Oligonucleotide primer for the detection of SNP TSC0030986
gtttgttatcgt

SEQ ID NO: 322652 - DNA, 12 bp, Artificial Sequence
  Oligonucleotide primer for the detection of SNP TSC0030986
gtttgttattgc

SEQ ID NO: 322653 - DNA, 12 bp, Artificial Sequence
  Oligonucleotide primer for the detection of SNP TSC0030986
gttcgttatcgt

SEQ ID NO: 322654 - DNA, 12 bp, Artificial Sequence
  Oligonucleotide primer for the detection of SNP TSC0030986
gttcgttattgc

SEQ ID NO: 322655 - DNA, 12 bp, Artificial Sequence
  Oligonucleotide primer for the detection of SNP TSC0030986
gtttgttatcgc

SEQ ID NO: 322656 - DNA, 12 bp, Artificial Sequence
  Oligonucleotide primer for the detection of SNP TSC0030986
gttcgttatcgc

SEQ ID NO: 322657 - DNA, 12 bp, Artificial Sequence
  Oligonucleotide primer for the detection of SNP TSC0030988
acactaaaaaaa

SEQ ID NO: 322658 - DNA, 12 bp, Artificial Sequence
  Oligonucleotide primer for the detection of SNP TSC0030988
tgaaaattatgg

SEQ ID NO: 322659 - DNA, 12 bp, Artificial Sequence
  Oligonucleotide primer for the detection of SNP TSC0030988
taaaaatcataa

SEQ ID NO: 322660 - DNA, 12 bp, Artificial Sequence
  Oligonucleotide primer for the detection of SNP TSC0030988
atattagagaaa

SEQ ID NO: 322661 - DNA, 12 bp, Artificial Sequence
  Oligonucleotide primer for the detection of SNP TSC0030989
aacctaaatttt

SEQ ID NO: 322662 - DNA, 12 bp, Artificial Sequence
  Oligonucleotide primer for the detection of SNP TSC0030989
aatataaaggag

SEQ ID NO: 322663 - DNA, 12 bp, Artificial Sequence
  Oligonucleotide primer for the detection of SNP TSC0030993
ctctaatttctt

SEQ ID NO: 322664 - DNA, 12 bp, Artificial Sequence
  Oligonucleotide primer for the detection of SNP TSC0030993
taaagggagtgg

SEQ ID NO: 322665 - DNA, 12 bp, Artificial Sequence
  Oligonucleotide primer for the detection of SNP TSC0030994
aaatataccatc

SEQ ID NO: 322666 - DNA, 12 bp, Artificial Sequence
  Oligonucleotide primer for the detection of SNP TSC0030994
aaatataccgtc

SEQ ID NO: 322667 - DNA, 12 bp, Artificial Sequence
  Oligonucleotide primer for the detection of SNP TSC0030994
tgtttgggtttt

SEQ ID NO: 322668 - DNA, 12 bp, Artificial Sequence
  Oligonucleotide primer for the detection of SNP TSC0030994
tgttcgggtttt

SEQ ID NO: 322669 - DNA, 12 bp, Artificial Sequence
  Oligonucleotide primer for the detection of SNP TSC0030994
atacccaaattc

SEQ ID NO: 322670 - DNA, 12 bp, Artificial Sequence
  Oligonucleotide primer for the detection of SNP TSC0030994
atacccgaattc

SEQ ID NO: 322671 - DNA, 12 bp, Artificial Sequence
  Oligonukleotid-Primer
gtacccaaattc

SEQ ID NO: 322672 - DNA, 12 bp, Artificial Sequence
  Oligonucleotide primer for the detection of SNP TSC0030994
gtacccgaattc

SEQ ID NO: 322673 - DNA, 12 bp, Artificial Sequence
  Oligonucleotide primer for the detection of SNP TSC0030994
gatgtgttgttt

SEQ ID NO: 322674 - DNA, 12 bp, Artificial Sequence
  Oligonucleotide primer for the detection of SNP TSC0030994
gatgtgtcgttt

SEQ ID NO: 322675 - DNA, 12 bp, Artificial Sequence
  Oligonucleotide primer for the detection of SNP TSC0030995
ctacttaaacat

SEQ ID NO: 322676 - DNA, 12 bp, Artificial Sequence
  Oligonucleotide primer for the detection of SNP TSC0030995
tatattttttaa

SEQ ID NO: 322677 - DNA, 12 bp, Artificial Sequence
  Oligonucleotide primer for the detection of SNP TSC0030996
cttctcaattct

SEQ ID NO: 322678 - DNA, 12 bp, Artificial Sequence
  Oligonucleotide primer for the detection of SNP TSC0030998
actccctactat

SEQ ID NO: 322679 - DNA, 12 bp, Artificial Sequence
  Oligonucleotide primer for the detection of SNP TSC0030998
gaatagtgggga

SEQ ID NO: 322680 - DNA, 12 bp, Artificial Sequence
  Oligonucleotide primer for the detection of SNP TSC0031000
ttataacaacaa

SEQ ID NO: 322681 - DNA, 12 bp, Artificial Sequence
  Oligonucleotide primer for the detection of SNP TSC0031000
attgattttttt

SEQ ID NO: 322682 - DNA, 12 bp, Artificial Sequence
  Oligonucleotide primer for the detection of SNP TSC0031000
ttgtaataataa

SEQ ID NO: 322683 - DNA, 12 bp, Artificial Sequence
  Oligonucleotide primer for the detection of SNP TSC0031002
catttttatcat

SEQ ID NO: 322684 - DNA, 12 bp, Artificial Sequence
  Oligonucleotide primer for the detection of SNP TSC0031003
aataaaaaatac

SEQ ID NO: 322685 - DNA, 12 bp, Artificial Sequence
  Oligonucleotide primer for the detection of SNP TSC0031003
ttgatagtaata

SEQ ID NO: 322686 - DNA, 12 bp, Artificial Sequence
  Oligonucleotide primer for the detection of SNP TSC0031005
ccattataaaaa

SEQ ID NO: 322687 - DNA, 12 bp, Artificial Sequence
  Oligonucleotide primer for the detection of SNP TSC0031005
ttaattattata

SEQ ID NO: 322688 - DNA, 12 bp, Artificial Sequence
  Oligonucleotide primer for the detection of SNP TSC0031005
tcaaccatcaca

SEQ ID NO: 322689 - DNA, 12 bp, Artificial Sequence
  Oligonucleotide primer for the detection of SNP TSC0031005
ttattatagggg

SEQ ID NO: 322690 - DNA, 12 bp, Artificial Sequence
  Oligonucleotide primer for the detection of SNP TSC0031006
tttcacataaaa

SEQ ID NO: 322691 - DNA, 12 bp, Artificial Sequence
  Oligonucleotide primer for the detection of SNP TSC0031006
agatatattatt

SEQ ID NO: 322692 - DNA, 12 bp, Artificial Sequence
  Oligonucleotide primer for the detection of SNP TSC0031006
aaaaatacatca

SEQ ID NO: 322693 - DNA, 12 bp, Artificial Sequence
  Oligonucleotide primer for the detection of SNP TSC0031006
aatattttatat

SEQ ID NO: 322694 - DNA, 12 bp, Artificial Sequence
  Oligonucleotide primer for the detection of SNP TSC0031007
taaaatttaaac

SEQ ID NO: 322695 - DNA, 12 bp, Artificial Sequence
  Oligonucleotide primer for the detection of SNP TSC0031007
tatagattagta

SEQ ID NO: 322696 - DNA, 12 bp, Artificial Sequence
  Oligonucleotide primer for the detection of SNP TSC0031015
aaccaccctacc

SEQ ID NO: 322697 - DNA, 12 bp, Artificial Sequence
  Oligonucleotide primer for the detection of SNP TSC0031015
tgaagttagagg

SEQ ID NO: 322698 - DNA, 12 bp, Artificial Sequence
  Oligonucleotide primer for the detection of SNP TSC0031016
acaattttttta

SEQ ID NO: 322699 - DNA, 12 bp, Artificial Sequence
  Oligonucleotide primer for the detection of SNP TSC0031016
gtaatttttttg

SEQ ID NO: 322700 - DNA, 12 bp, Artificial Sequence
  Oligonucleotide primer for the detection of SNP TSC0031017
attatctacatt

SEQ ID NO: 322701 - DNA, 12 bp, Artificial Sequence
  Oligonucleotide primer for the detection of SNP TSC0031017
attatctacgtt

SEQ ID NO: 322702 - DNA, 12 bp, Artificial Sequence
  Oligonucleotide primer for the detection of SNP TSC0031017
tttgtaaaatgg

SEQ ID NO: 322703 - DNA, 12 bp, Artificial Sequence
  Oligonucleotide primer for the detection of SNP TSC0031018
tgttatgttatt

SEQ ID NO: 322704 - DNA, 12 bp, Artificial Sequence
  Oligonucleotide primer for the detection of SNP TSC0031018
cgttatgttatt

SEQ ID NO: 322705 - DNA, 12 bp, Artificial Sequence
  Oligonucleotide primer for the detection of SNP TSC0031018
acatcataccac

SEQ ID NO: 322706 - DNA, 12 bp, Artificial Sequence
  Oligonucleotide primer for the detection of SNP TSC0031018
acgtcataccac

SEQ ID NO: 322707 - DNA, 12 bp, Artificial Sequence
  Oligonucleotide primer for the detection of SNP TSC0031018
atagagatagag

SEQ ID NO: 322708 - DNA, 12 bp, Artificial Sequence
  Oligonucleotide primer for the detection of SNP TSC0031019
ctacatctcttt

SEQ ID NO: 322709 - DNA, 12 bp, Artificial Sequence
  Oligonucleotide primer for the detection of SNP TSC0031019
gttagagtaaag

SEQ ID NO: 322710 - DNA, 12 bp, Artificial Sequence
  Oligonucleotide primer for the detection of SNP TSC0031020
gaaataaaaacc

SEQ ID NO: 322711 - DNA, 12 bp, Artificial Sequence
  Oligonucleotide primer for the detection of SNP TSC0031020
ttttattttcga

SEQ ID NO: 322712 - DNA, 12 bp, Artificial Sequence
  Oligonucleotide primer for the detection of SNP TSC0031023
aatcaatataat

SEQ ID NO: 322713 - DNA, 12 bp, Artificial Sequence
  Oligonucleotide primer for the detection of SNP TSC0031023
ttttttggttga

SEQ ID NO: 322714 - DNA, 12 bp, Artificial Sequence
  Oligonucleotide primer for the detection of SNP TSC0031025
tcttttttcttt

SEQ ID NO: 322715 - DNA, 12 bp, Artificial Sequence
  Oligonucleotide primer for the detection of SNP TSC0031026
tgaaggtattta

SEQ ID NO: 322716 - DNA, 12 bp, Artificial Sequence
  Oligonucleotide primer for the detection of SNP TSC0031026
cgaaggtattta

SEQ ID NO: 322717 - DNA, 12 bp, Artificial Sequence
  Oligonucleotide primer for the detection of SNP TSC0031026
aaaaatactcaa

SEQ ID NO: 322718 - DNA, 12 bp, Artificial Sequence
  Oligonucleotide primer for the detection of SNP TSC0031026
gaaaatactcaa

SEQ ID NO: 322719 - DNA, 12 bp, Artificial Sequence
  Oligonucleotide primer for the detection of SNP TSC0031026
aggtaggaatat

SEQ ID NO: 322720 - DNA, 12 bp, Artificial Sequence
  Oligonucleotide primer for the detection of SNP TSC0031027
tcttatcatttt

SEQ ID NO: 322721 - DNA, 12 bp, Artificial Sequence
  Oligonucleotide primer for the detection of SNP TSC0031027
gtatatataagt

SEQ ID NO: 322722 - DNA, 12 bp, Artificial Sequence
  Oligonucleotide primer for the detection of SNP TSC0031027
atacacacaaat

SEQ ID NO: 322723 - DNA, 12 bp, Artificial Sequence
  Oligonucleotide primer for the detection of SNP TSC0031028
ctaaaatttacc

SEQ ID NO: 322724 - DNA, 12 bp, Artificial Sequence
  Oligonucleotide primer for the detection of SNP TSC0031028
tggatgggtttg

SEQ ID NO: 322725 - DNA, 12 bp, Artificial Sequence
  Oligonucleotide primer for the detection of SNP TSC0031029
aaaccaaaacac

SEQ ID NO: 322726 - DNA, 12 bp, Artificial Sequence
  Oligonucleotide primer for the detection of SNP TSC0031029
aaaccaaaacgc

SEQ ID NO: 322727 - DNA, 12 bp, Artificial Sequence
  Oligonucleotide primer for the detection of SNP TSC0031029
aaaccgaaacac

SEQ ID NO: 322728 - DNA, 12 bp, Artificial Sequence
  Oligonucleotide primer for the detection of SNP TSC0031029
aaaccgaaacgc

SEQ ID NO: 322729 - DNA, 12 bp, Artificial Sequence
  Oligonucleotide primer for the detection of SNP TSC0031029
gagagttgtata

SEQ ID NO: 322730 - DNA, 12 bp, Artificial Sequence
  Oligonucleotide primer for the detection of SNP TSC0031030
caacctacttct

SEQ ID NO: 322731 - DNA, 12 bp, Artificial Sequence
  Oligonucleotide primer for the detection of SNP TSC0031030
atagtttagttg

SEQ ID NO: 322732 - DNA, 12 bp, Artificial Sequence
  Oligonucleotide primer for the detection of SNP TSC0031031
gggtaatttttt

SEQ ID NO: 322733 - DNA, 12 bp, Artificial Sequence
  Oligonucleotide primer for the detection of SNP TSC0031031
aaataatttttt

SEQ ID NO: 322734 - DNA, 12 bp, Artificial Sequence
  Oligonucleotide primer for the detection of SNP TSC0031032
acaccccctccc

SEQ ID NO: 322735 - DNA, 12 bp, Artificial Sequence
  Oligonucleotide primer for the detection of SNP TSC0031032
agtttagggaag

SEQ ID NO: 322736 - DNA, 12 bp, Artificial Sequence
  Oligonucleotide primer for the detection of SNP TSC0031032
aatccaaaaaaa

SEQ ID NO: 322737 - DNA, 12 bp, Artificial Sequence
  Oligonucleotide primer for the detection of SNP TSC0031033
aaaattaaacct

SEQ ID NO: 322738 - DNA, 12 bp, Artificial Sequence
  Oligonucleotide primer for the detection of SNP TSC0031033
aggaataggatg

SEQ ID NO: 322739 - DNA, 12 bp, Artificial Sequence
  Oligonucleotide primer for the detection of SNP TSC0031034
gttggttttggg

SEQ ID NO: 322740 - DNA, 12 bp, Artificial Sequence
  Oligonucleotide primer for the detection of SNP TSC0031038
tcaaaaaaacac

SEQ ID NO: 322741 - DNA, 12 bp, Artificial Sequence
  Oligonucleotide primer for the detection of SNP TSC0031038
ggtgggagggta

SEQ ID NO: 322742 - DNA, 12 bp, Artificial Sequence
  Oligonucleotide primer for the detection of SNP TSC0031041
taaaaatttatc

SEQ ID NO: 322743 - DNA, 12 bp, Artificial Sequence
  Oligonucleotide primer for the detection of SNP TSC0031041
attttagtttta

SEQ ID NO: 322744 - DNA, 12 bp, Artificial Sequence
  Oligonucleotide primer for the detection of SNP TSC0031041
atttcaatccca

SEQ ID NO: 322745 - DNA, 12 bp, Artificial Sequence
  Oligonucleotide primer for the detection of SNP TSC0031041
tggaagtttgtt

SEQ ID NO: 322746 - DNA, 12 bp, Artificial Sequence
  Oligonucleotide primer for the detection of SNP TSC0031043
gtttaaatttta

SEQ ID NO: 322747 - DNA, 12 bp, Artificial Sequence
  Oligonucleotide primer for the detection of SNP TSC0031043
atttaaatccca

SEQ ID NO: 322748 - DNA, 12 bp, Artificial Sequence
  Oligonucleotide primer for the detection of SNP TSC0031043
aaaggtttttgt

SEQ ID NO: 322749 - DNA, 12 bp, Artificial Sequence
  Oligonucleotide primer for the detection of SNP TSC0031045
tcctacaataaa

SEQ ID NO: 322750 - DNA, 12 bp, Artificial Sequence
  Oligonucleotide primer for the detection of SNP TSC0031045
agtggggtttag

SEQ ID NO: 322751 - DNA, 12 bp, Artificial Sequence
  Oligonucleotide primer for the detection of SNP TSC0031045
taaaattcaaaa

SEQ ID NO: 322752 - DNA, 12 bp, Artificial Sequence
  Oligonucleotide primer for the detection of SNP TSC0031045
ttgtaataaatt

SEQ ID NO: 322753 - DNA, 12 bp, Artificial Sequence
  Oligonucleotide primer for the detection of SNP TSC0031046
acccaatatact

SEQ ID NO: 322754 - DNA, 12 bp, Artificial Sequence
  Oligonucleotide primer for the detection of SNP TSC0031046
aatatttattta

SEQ ID NO: 322755 - DNA, 12 bp, Artificial Sequence
  Oligonucleotide primer for the detection of SNP TSC0031047
accatacccaac

SEQ ID NO: 322756 - DNA, 12 bp, Artificial Sequence
  Oligonucleotide primer for the detection of SNP TSC0031047
accgtacccaac

SEQ ID NO: 322757 - DNA, 12 bp, Artificial Sequence
  Oligonucleotide primer for the detection of SNP TSC0031047
aaaagaagtgat

SEQ ID NO: 322758 - DNA, 12 bp, Artificial Sequence
  Oligonucleotide primer for the detection of SNP TSC0031047
attgtgtttagt

SEQ ID NO: 322759 - DNA, 12 bp, Artificial Sequence
  Oligonucleotide primer for the detection of SNP TSC0031047
atcgtgtttagt

SEQ ID NO: 322760 - DNA, 12 bp, Artificial Sequence
  Oligonucleotide primer for the detection of SNP TSC0031048
gggaggttgggt

SEQ ID NO: 322761 - DNA, 12 bp, Artificial Sequence
  Oligonucleotide primer for the detection of SNP TSC0031048
gaaaaactaaac

SEQ ID NO: 322762 - DNA, 12 bp, Artificial Sequence
  Oligonucleotide primer for the detection of SNP TSC0031048
aggtataagtta

SEQ ID NO: 322763 - DNA, 12 bp, Artificial Sequence
  Oligonucleotide primer for the detection of SNP TSC0031049
aactctctatat

SEQ ID NO: 322764 - DNA, 12 bp, Artificial Sequence
  Oligonucleotide primer for the detection of SNP TSC0031049
aggttaggtata

SEQ ID NO: 322765 - DNA, 12 bp, Artificial Sequence
  Oligonucleotide primer for the detection of SNP TSC0031050
aaacatcctcct

SEQ ID NO: 322766 - DNA, 12 bp, Artificial Sequence
  Oligonucleotide primer for the detection of SNP TSC0031050
aaacgtcctcct

SEQ ID NO: 322767 - DNA, 12 bp, Artificial Sequence
  Oligonucleotide primer for the detection of SNP TSC0031051
caactctataaa

SEQ ID NO: 322768 - DNA, 12 bp, Artificial Sequence
  Oligonucleotide primer for the detection of SNP TSC0031051
ttcgattttttt

SEQ ID NO: 322769 - DNA, 12 bp, Artificial Sequence
  Oligonucleotide primer for the detection of SNP TSC0031051
ttcaatcctctc

SEQ ID NO: 322770 - DNA, 12 bp, Artificial Sequence
  Oligonucleotide primer for the detection of SNP TSC0031051
ttcgatcctctc

SEQ ID NO: 322771 - DNA, 12 bp, Artificial Sequence
  Oligonucleotide primer for the detection of SNP TSC0031051
tagttttgtaga

SEQ ID NO: 322772 - DNA, 12 bp, Artificial Sequence
  Oligonucleotide primer for the detection of SNP TSC0031054
aattccaaaacc

SEQ ID NO: 322773 - DNA, 12 bp, Artificial Sequence
  Oligonucleotide primer for the detection of SNP TSC0031054
gtgagtattttg

SEQ ID NO: 322774 - DNA, 12 bp, Artificial Sequence
  Oligonucleotide primer for the detection of SNP TSC0031054
gtaaacatccta

SEQ ID NO: 322775 - DNA, 12 bp, Artificial Sequence
  Oligonucleotide primer for the detection of SNP TSC0031054
aattttagggtt

SEQ ID NO: 322776 - DNA, 12 bp, Artificial Sequence
  Oligonucleotide primer for the detection of SNP TSC0031055
cttcaaccttcc

SEQ ID NO: 322777 - DNA, 12 bp, Artificial Sequence
  Oligonucleotide primer for the detection of SNP TSC0031055
ggtatggggtag

SEQ ID NO: 322778 - DNA, 12 bp, Artificial Sequence
  Oligonucleotide primer for the detection of SNP TSC0031055
ggtacggggtag

SEQ ID NO: 322779 - DNA, 12 bp, Artificial Sequence
  Oligonucleotide primer for the detection of SNP TSC0031055
aacacgaaacaa

SEQ ID NO: 322780 - DNA, 12 bp, Artificial Sequence
  Oligonukleotid-Primer
gacacaaaacaa

SEQ ID NO: 322781 - DNA, 12 bp, Artificial Sequence
  Oligonucleotide primer for the detection of SNP TSC0031055
gacacgaaacaa

SEQ ID NO: 322782 - DNA, 12 bp, Artificial Sequence
  Oligonucleotide primer for the detection of SNP TSC0031060
atttataattag

SEQ ID NO: 322783 - DNA, 12 bp, Artificial Sequence
  Oligonucleotide primer for the detection of SNP TSC0031060
acttacaaccaa

SEQ ID NO: 322784 - DNA, 12 bp, Artificial Sequence
  Oligonucleotide primer for the detection of SNP TSC0031060
taaatggaagaa

SEQ ID NO: 322785 - DNA, 12 bp, Artificial Sequence
  Oligonucleotide primer for the detection of SNP TSC0031061
ccaaactttatc

SEQ ID NO: 322786 - DNA, 12 bp, Artificial Sequence
  Oligonucleotide primer for the detection of SNP TSC0031061
gtatttattgtg

SEQ ID NO: 322787 - DNA, 12 bp, Artificial Sequence
  Oligonucleotide primer for the detection of SNP TSC0031061
gtatttatcgtg

SEQ ID NO: 322788 - DNA, 12 bp, Artificial Sequence
  Oligonucleotide primer for the detection of SNP TSC0031066
catcccctacac

SEQ ID NO: 322789 - DNA, 12 bp, Artificial Sequence
  Oligonucleotide primer for the detection of SNP TSC0031066
ggggatagagta

SEQ ID NO: 322790 - DNA, 12 bp, Artificial Sequence
  Oligonucleotide primer for the detection of SNP TSC0031068
caacaaccctcc

SEQ ID NO: 322791 - DNA, 12 bp, Artificial Sequence
  Oligonucleotide primer for the detection of SNP TSC0031068
cgacaaccctcc

SEQ ID NO: 322792 - DNA, 12 bp, Artificial Sequence
  Oligonucleotide primer for the detection of SNP TSC0031068
aagaaggggtga

SEQ ID NO: 322793 - DNA, 12 bp, Artificial Sequence
  Oligonucleotide primer for the detection of SNP TSC0031070
acccctccccca

SEQ ID NO: 322794 - DNA, 12 bp, Artificial Sequence
  Oligonucleotide primer for the detection of SNP TSC0031070
agggagattggg

SEQ ID NO: 322795 - DNA, 12 bp, Artificial Sequence
  Oligonucleotide primer for the detection of SNP TSC0031073
aaataaactaat

SEQ ID NO: 322796 - DNA, 12 bp, Artificial Sequence
  Oligonucleotide primer for the detection of SNP TSC0031073
ttttgatttaag

SEQ ID NO: 322797 - DNA, 12 bp, Artificial Sequence
  Oligonucleotide primer for the detection of SNP TSC0031074
acaacaactctt

SEQ ID NO: 322798 - DNA, 12 bp, Artificial Sequence
  Oligonucleotide primer for the detection of SNP TSC0031074
agaaagttgttg

SEQ ID NO: 322799 - DNA, 12 bp, Artificial Sequence
  Oligonucleotide primer for the detection of SNP TSC0031075
tttaaacatcac

SEQ ID NO: 322800 - DNA, 12 bp, Artificial Sequence
  Oligonucleotide primer for the detection of SNP TSC0031076
attcttaaaaac

SEQ ID NO: 322801 - DNA, 12 bp, Artificial Sequence
  Oligonucleotide primer for the detection of SNP TSC0031076
ggtttgtgaagg

SEQ ID NO: 322802 - DNA, 12 bp, Artificial Sequence
  Oligonucleotide primer for the detection of SNP TSC0031080
attattattttt

SEQ ID NO: 322803 - DNA, 12 bp, Artificial Sequence
  Oligonucleotide primer for the detection of SNP TSC0031082
actaaatttaaa

SEQ ID NO: 322804 - DNA, 12 bp, Artificial Sequence
  Oligonucleotide primer for the detection of SNP TSC0031082
atggaaaatgat

SEQ ID NO: 322805 - DNA, 12 bp, Artificial Sequence
  Oligonucleotide primer for the detection of SNP TSC0031082
attaaatttaaa

SEQ ID NO: 322806 - DNA, 12 bp, Artificial Sequence
  Oligonucleotide primer for the detection of SNP TSC0031084
cacaacaaacgc

SEQ ID NO: 322807 - DNA, 12 bp, Artificial Sequence
  Oligonucleotide primer for the detection of SNP TSC0031084
cacaacgaacac

SEQ ID NO: 322808 - DNA, 12 bp, Artificial Sequence
  Oligonukleotid-Primer
cgcaacaaacac

SEQ ID NO: 322809 - DNA, 12 bp, Artificial Sequence
  Oligonucleotide primer for the detection of SNP TSC0031084
cacaacgaacgc

SEQ ID NO: 322810 - DNA, 12 bp, Artificial Sequence
  Oligonucleotide primer for the detection of SNP TSC0031084
cacgacaaacgc

SEQ ID NO: 322811 - DNA, 12 bp, Artificial Sequence
  Oligonucleotide primer for the detection of SNP TSC0031084
cgcaacaaacgc

SEQ ID NO: 322812 - DNA, 12 bp, Artificial Sequence
  Oligonucleotide primer for the detection of SNP TSC0031084
cacgacgaacac

SEQ ID NO: 322813 - DNA, 12 bp, Artificial Sequence
  Oligonucleotide primer for the detection of SNP TSC0031084
cgcaacgaacac

SEQ ID NO: 322814 - DNA, 12 bp, Artificial Sequence
  Oligonucleotide primer for the detection of SNP TSC0031084
cgcgacaaacac

SEQ ID NO: 322815 - DNA, 12 bp, Artificial Sequence
  Oligonucleotide primer for the detection of SNP TSC0031084
cacgacgaacgc

SEQ ID NO: 322816 - DNA, 12 bp, Artificial Sequence
  Oligonucleotide primer for the detection of SNP TSC0031084
cgcaacgaacgc

SEQ ID NO: 322817 - DNA, 12 bp, Artificial Sequence
  Oligonucleotide primer for the detection of SNP TSC0031084
cgcgacaaacgc

SEQ ID NO: 322818 - DNA, 12 bp, Artificial Sequence
  Oligonucleotide primer for the detection of SNP TSC0031084
cgcgacgaacac

SEQ ID NO: 322819 - DNA, 12 bp, Artificial Sequence
  Oligonucleotide primer for the detection of SNP TSC0031084
cgcgacgaacgc

SEQ ID NO: 322820 - DNA, 12 bp, Artificial Sequence
  Oligonucleotide primer for the detection of SNP TSC0031084
atgtttttttga

SEQ ID NO: 322821 - DNA, 12 bp, Artificial Sequence
  Oligonucleotide primer for the detection of SNP TSC0031084
acgtttttttga

SEQ ID NO: 322822 - DNA, 12 bp, Artificial Sequence
  Oligonucleotide primer for the detection of SNP TSC0031084
atgttttttcga

SEQ ID NO: 322823 - DNA, 12 bp, Artificial Sequence
  Oligonucleotide primer for the detection of SNP TSC0031084
acgttttttcga

SEQ ID NO: 322824 - DNA, 12 bp, Artificial Sequence
  Oligonucleotide primer for the detection of SNP TSC0031084
acactctctcaa

SEQ ID NO: 322825 - DNA, 12 bp, Artificial Sequence
  Oligonucleotide primer for the detection of SNP TSC0031084
acactctctcga

SEQ ID NO: 322826 - DNA, 12 bp, Artificial Sequence
  Oligonucleotide primer for the detection of SNP TSC0031084
acgctctctcaa

SEQ ID NO: 322827 - DNA, 12 bp, Artificial Sequence
  Oligonucleotide primer for the detection of SNP TSC0031084
acgctctctcga

SEQ ID NO: 322828 - DNA, 12 bp, Artificial Sequence
  Oligonucleotide primer for the detection of SNP TSC0031084
tgtggtgggtgt

SEQ ID NO: 322829 - DNA, 12 bp, Artificial Sequence
  Oligonucleotide primer for the detection of SNP TSC0031084
cgtggtgggtgt

SEQ ID NO: 322830 - DNA, 12 bp, Artificial Sequence
  Oligonucleotide primer for the detection of SNP TSC0031084
tgcggtgggtgt

SEQ ID NO: 322831 - DNA, 12 bp, Artificial Sequence
  Oligonucleotide primer for the detection of SNP TSC0031084
tgtggcgggtgt

SEQ ID NO: 322832 - DNA, 12 bp, Artificial Sequence
  Oligonucleotide primer for the detection of SNP TSC0031084
tgtggtgggcgt

SEQ ID NO: 322833 - DNA, 12 bp, Artificial Sequence
  Oligonucleotide primer for the detection of SNP TSC0031084
tgtggtgggtgc

SEQ ID NO: 322834 - DNA, 12 bp, Artificial Sequence
  Oligonucleotide primer for the detection of SNP TSC0031084
cgcggtgggtgt

SEQ ID NO: 322835 - DNA, 12 bp, Artificial Sequence
  Oligonucleotide primer for the detection of SNP TSC0031084
cgtggcgggtgt

SEQ ID NO: 322836 - DNA, 12 bp, Artificial Sequence
  Oligonucleotide primer for the detection of SNP TSC0031084
cgtggtgggcgt

SEQ ID NO: 322837 - DNA, 12 bp, Artificial Sequence
  Oligonucleotide primer for the detection of SNP TSC0031084
cgtggtgggtgc

SEQ ID NO: 322838 - DNA, 12 bp, Artificial Sequence
  Oligonucleotide primer for the detection of SNP TSC0031084
tgcggcgggtgt

SEQ ID NO: 322839 - DNA, 12 bp, Artificial Sequence
  Oligonucleotide primer for the detection of SNP TSC0031084
tgcggtgggcgt

SEQ ID NO: 322840 - DNA, 12 bp, Artificial Sequence
  Oligonucleotide primer for the detection of SNP TSC0031084
tgcggtgggtgc

SEQ ID NO: 322841 - DNA, 12 bp, Artificial Sequence
  Oligonukleotid-Primer
tgtggcgggcgt

SEQ ID NO: 322842 - DNA, 12 bp, Artificial Sequence
  Oligonucleotide primer for the detection of SNP TSC0031084
tgtggcgggtgc

SEQ ID NO: 322843 - DNA, 12 bp, Artificial Sequence
  Oligonucleotide primer for the detection of SNP TSC0031084
tgtggtgggcgc

SEQ ID NO: 322844 - DNA, 12 bp, Artificial Sequence
  Oligonucleotide primer for the detection of SNP TSC0031084
cgcggcgggtgt

SEQ ID NO: 322845 - DNA, 12 bp, Artificial Sequence
  Oligonucleotide primer for the detection of SNP TSC0031084
cgcggtgggcgt

SEQ ID NO: 322846 - DNA, 12 bp, Artificial Sequence
  Oligonucleotide primer for the detection of SNP TSC0031084
cgcggtgggtgc

SEQ ID NO: 322847 - DNA, 12 bp, Artificial Sequence
  Oligonucleotide primer for the detection of SNP TSC0031084
cgtggcgggcgt

SEQ ID NO: 322848 - DNA, 12 bp, Artificial Sequence
  Oligonucleotide primer for the detection of SNP TSC0031084
cgtggcgggtgc

SEQ ID NO: 322849 - DNA, 12 bp, Artificial Sequence
  Oligonucleotide primer for the detection of SNP TSC0031084
cgtggtgggcgc

SEQ ID NO: 322850 - DNA, 12 bp, Artificial Sequence
  Oligonucleotide primer for the detection of SNP TSC0031084
tgcggcgggcgt

SEQ ID NO: 322851 - DNA, 12 bp, Artificial Sequence
  Oligonucleotide primer for the detection of SNP TSC0031084
tgcggcgggtgc

SEQ ID NO: 322852 - DNA, 12 bp, Artificial Sequence
  Oligonucleotide primer for the detection of SNP TSC0031084
tgcggtgggcgc

SEQ ID NO: 322853 - DNA, 12 bp, Artificial Sequence
  Oligonucleotide primer for the detection of SNP TSC0031084
tgtggcgggcgc

SEQ ID NO: 322854 - DNA, 12 bp, Artificial Sequence
  Oligonucleotide primer for the detection of SNP TSC0031084
cgcggcgggcgt

SEQ ID NO: 322855 - DNA, 12 bp, Artificial Sequence
  Oligonucleotide primer for the detection of SNP TSC0031084
cgcggcgggtgc

SEQ ID NO: 322856 - DNA, 12 bp, Artificial Sequence
  Oligonucleotide primer for the detection of SNP TSC0031084
cgcggtgggcgc

SEQ ID NO: 322857 - DNA, 12 bp, Artificial Sequence
  Oligonucleotide primer for the detection of SNP TSC0031084
cgtggcgggcgc

SEQ ID NO: 322858 - DNA, 12 bp, Artificial Sequence
  Oligonucleotide primer for the detection of SNP TSC0031084
tgcggcgggcgc

SEQ ID NO: 322859 - DNA, 12 bp, Artificial Sequence
  Oligonucleotide primer for the detection of SNP TSC0031084
cgcggcgggcgc

SEQ ID NO: 322860 - DNA, 12 bp, Artificial Sequence
  Oligonucleotide primer for the detection of SNP TSC0031086
aacaaaatcttt

SEQ ID NO: 322861 - DNA, 12 bp, Artificial Sequence
  Oligonucleotide primer for the detection of SNP TSC0031086
aagtaatataga

SEQ ID NO: 322862 - DNA, 12 bp, Artificial Sequence
  Oligonucleotide primer for the detection of SNP TSC0031086
aaacaatacaaa

SEQ ID NO: 322863 - DNA, 12 bp, Artificial Sequence
  Oligonucleotide primer for the detection of SNP TSC0031086
gataaggttttt

SEQ ID NO: 322864 - DNA, 12 bp, Artificial Sequence
  Oligonucleotide primer for the detection of SNP TSC0031088
atcataacaatc

SEQ ID NO: 322865 - DNA, 12 bp, Artificial Sequence
  Oligonucleotide primer for the detection of SNP TSC0031088
atcataacgatc

SEQ ID NO: 322866 - DNA, 12 bp, Artificial Sequence
  Oligonucleotide primer for the detection of SNP TSC0031088
tttttaagatgg

SEQ ID NO: 322867 - DNA, 12 bp, Artificial Sequence
  Oligonucleotide primer for the detection of SNP TSC0031090
cctataaaaaat

SEQ ID NO: 322868 - DNA, 12 bp, Artificial Sequence
  Oligonucleotide primer for the detection of SNP TSC0031090
tgatatttaggg

SEQ ID NO: 322869 - DNA, 12 bp, Artificial Sequence
  Oligonucleotide primer for the detection of SNP TSC0031091
atataatactca

SEQ ID NO: 322870 - DNA, 12 bp, Artificial Sequence
  Oligonucleotide primer for the detection of SNP TSC0031091
atgaaggatttt

SEQ ID NO: 322871 - DNA, 12 bp, Artificial Sequence
  Oligonucleotide primer for the detection of SNP TSC0031091
atgaaggatttc

SEQ ID NO: 322872 - DNA, 12 bp, Artificial Sequence
  Oligonucleotide primer for the detection of SNP TSC0031091
ataaaaaatccc

SEQ ID NO: 322873 - DNA, 12 bp, Artificial Sequence
  Oligonucleotide primer for the detection of SNP TSC0031091
tatgtgatattt

SEQ ID NO: 322874 - DNA, 12 bp, Artificial Sequence
  Oligonucleotide primer for the detection of SNP TSC0031092
cctataccaaaa

SEQ ID NO: 322875 - DNA, 12 bp, Artificial Sequence
  Oligonucleotide primer for the detection of SNP TSC0031092
cctataccgaaa

SEQ ID NO: 322876 - DNA, 12 bp, Artificial Sequence
  Oligonucleotide primer for the detection of SNP TSC0031092
gttttttgtttc

SEQ ID NO: 322877 - DNA, 12 bp, Artificial Sequence
  Oligonucleotide primer for the detection of SNP TSC0031092
atcctttacctc

SEQ ID NO: 322878 - DNA, 12 bp, Artificial Sequence
  Oligonucleotide primer for the detection of SNP TSC0031092
tttgtgttgggg

SEQ ID NO: 322879 - DNA, 12 bp, Artificial Sequence
  Oligonucleotide primer for the detection of SNP TSC0031092
tttgtgtcgggg

SEQ ID NO: 322880 - DNA, 12 bp, Artificial Sequence
  Oligonucleotide primer for the detection of SNP TSC0031093
ctattttatttt

SEQ ID NO: 322881 - DNA, 12 bp, Artificial Sequence
  Oligonucleotide primer for the detection of SNP TSC0031094
ttattttgttac

SEQ ID NO: 322882 - DNA, 12 bp, Artificial Sequence
  Oligonucleotide primer for the detection of SNP TSC0031094
ccaccttaccac

SEQ ID NO: 322883 - DNA, 12 bp, Artificial Sequence
  Oligonucleotide primer for the detection of SNP TSC0031094
ggtagagggagg

SEQ ID NO: 322884 - DNA, 12 bp, Artificial Sequence
  Oligonucleotide primer for the detection of SNP TSC0031095
agtagaaggtgt

SEQ ID NO: 322885 - DNA, 12 bp, Artificial Sequence
  Oligonucleotide primer for the detection of SNP TSC0031095
agtagaaggtgc

SEQ ID NO: 322886 - DNA, 12 bp, Artificial Sequence
  Oligonucleotide primer for the detection of SNP TSC0031095
taaaaaatacaa

SEQ ID NO: 322887 - DNA, 12 bp, Artificial Sequence
  Oligonucleotide primer for the detection of SNP TSC0031095
taaaaaatacga

SEQ ID NO: 322888 - DNA, 12 bp, Artificial Sequence
  Oligonucleotide primer for the detection of SNP TSC0031096
aactaaaattat

SEQ ID NO: 322889 - DNA, 12 bp, Artificial Sequence
  Oligonucleotide primer for the detection of SNP TSC0031096
tggtagtgggta

SEQ ID NO: 322890 - DNA, 12 bp, Artificial Sequence
  Oligonucleotide primer for the detection of SNP TSC0031100
cctaacattcta

SEQ ID NO: 322891 - DNA, 12 bp, Artificial Sequence
  Oligonucleotide primer for the detection of SNP TSC0031100
gaggtgggagtt

SEQ ID NO: 322892 - DNA, 12 bp, Artificial Sequence
  Oligonucleotide primer for the detection of SNP TSC0031101
aactacaccatc

SEQ ID NO: 322893 - DNA, 12 bp, Artificial Sequence
  Oligonucleotide primer for the detection of SNP TSC0031101
atagatttttgg

SEQ ID NO: 322894 - DNA, 12 bp, Artificial Sequence
  Oligonucleotide primer for the detection of SNP TSC0031102
aattcaacattc

SEQ ID NO: 322895 - DNA, 12 bp, Artificial Sequence
  Oligonucleotide primer for the detection of SNP TSC0031102
ataaatattgga

SEQ ID NO: 322896 - DNA, 12 bp, Artificial Sequence
  Oligonucleotide primer for the detection of SNP TSC0031102
acaaacactaaa

SEQ ID NO: 322897 - DNA, 12 bp, Artificial Sequence
  Oligonucleotide primer for the detection of SNP TSC0031103
ataaataacaat

SEQ ID NO: 322898 - DNA, 12 bp, Artificial Sequence
  Oligonucleotide primer for the detection of SNP TSC0031103
tatatttaatag

SEQ ID NO: 322899 - DNA, 12 bp, Artificial Sequence
  Oligonucleotide primer for the detection of SNP TSC0031103
cacacccaacaa

SEQ ID NO: 322900 - DNA, 12 bp, Artificial Sequence
  Oligonucleotide primer for the detection of SNP TSC0031103
atggatgatagt

SEQ ID NO: 322901 - DNA, 12 bp, Artificial Sequence
  Oligonucleotide primer for the detection of SNP TSC0031104
aatgtttgtgag

SEQ ID NO: 322902 - DNA, 12 bp, Artificial Sequence
  Oligonukleotid-Primer
aatgttcgtgag

SEQ ID NO: 322903 - DNA, 12 bp, Artificial Sequence
  Oligonucleotide primer for the detection of SNP TSC0031105
ttgtgggaaggt

SEQ ID NO: 322904 - DNA, 12 bp, Artificial Sequence
  Oligonucleotide primer for the detection of SNP TSC0031105
tataaaaaaata

SEQ ID NO: 322905 - DNA, 12 bp, Artificial Sequence
  Oligonucleotide primer for the detection of SNP TSC0031105
ggaaataaagtt

SEQ ID NO: 322906 - DNA, 12 bp, Artificial Sequence
  Oligonukleotid-Primer
cccaaaataaat

SEQ ID NO: 322907 - DNA, 12 bp, Artificial Sequence
  Oligonucleotide primer for the detection of SNP TSC0031108
atttggtgattg

SEQ ID NO: 322908 - DNA, 12 bp, Artificial Sequence
  Oligonucleotide primer for the detection of SNP TSC0031108
atttggcgattg

SEQ ID NO: 322909 - DNA, 12 bp, Artificial Sequence
  Oligonucleotide primer for the detection of SNP TSC0031109
aatattaaatca

SEQ ID NO: 322910 - DNA, 12 bp, Artificial Sequence
  Oligonucleotide primer for the detection of SNP TSC0031109
gttttttaagat

SEQ ID NO: 322911 - DNA, 12 bp, Artificial Sequence
  Oligonucleotide primer for the detection of SNP TSC0031109
caccctccaaaa

SEQ ID NO: 322912 - DNA, 12 bp, Artificial Sequence
  Oligonucleotide primer for the detection of SNP TSC0031109
cgccctccaaaa

SEQ ID NO: 322913 - DNA, 12 bp, Artificial Sequence
  Oligonucleotide primer for the detection of SNP TSC0031109
atattaagttat

SEQ ID NO: 322914 - DNA, 12 bp, Artificial Sequence
  Oligonucleotide primer for the detection of SNP TSC0031110
ttagttttattg

SEQ ID NO: 322915 - DNA, 12 bp, Artificial Sequence
  Oligonucleotide primer for the detection of SNP TSC0031110
tcaacttcatta

SEQ ID NO: 322916 - DNA, 12 bp, Artificial Sequence
  Oligonucleotide primer for the detection of SNP TSC0031110
atttgttattag

SEQ ID NO: 322917 - DNA, 12 bp, Artificial Sequence
  Oligonucleotide primer for the detection of SNP TSC0031111
ttccactacccc

SEQ ID NO: 322918 - DNA, 12 bp, Artificial Sequence
  Oligonucleotide primer for the detection of SNP TSC0031111
gagggtagggta

SEQ ID NO: 322919 - DNA, 12 bp, Artificial Sequence
  Oligonucleotide primer for the detection of SNP TSC0031113
tgaattagtgga

SEQ ID NO: 322920 - DNA, 12 bp, Artificial Sequence
  Oligonucleotide primer for the detection of SNP TSC0031113
cgaattagtgga

SEQ ID NO: 322921 - DNA, 12 bp, Artificial Sequence
  Oligonucleotide primer for the detection of SNP TSC0031114
tcataaatattt

SEQ ID NO: 322922 - DNA, 12 bp, Artificial Sequence
  Oligonucleotide primer for the detection of SNP TSC0031115
acgaataaaacc

SEQ ID NO: 322923 - DNA, 12 bp, Artificial Sequence
  Oligonucleotide primer for the detection of SNP TSC0031115
agggttttttgg

SEQ ID NO: 322924 - DNA, 12 bp, Artificial Sequence
  Oligonucleotide primer for the detection of SNP TSC0031117
taatactataaa

SEQ ID NO: 322925 - DNA, 12 bp, Artificial Sequence
  Oligonucleotide primer for the detection of SNP TSC0031117
ttatggagtttt

SEQ ID NO: 322926 - DNA, 12 bp, Artificial Sequence
  Oligonucleotide primer for the detection of SNP TSC0031117
ttacggagtttt

SEQ ID NO: 322927 - DNA, 12 bp, Artificial Sequence
  Oligonucleotide primer for the detection of SNP TSC0031117
acaaaactctaa

SEQ ID NO: 322928 - DNA, 12 bp, Artificial Sequence
  Oligonucleotide primer for the detection of SNP TSC0031117
acgaaactctaa

SEQ ID NO: 322929 - DNA, 12 bp, Artificial Sequence
  Oligonucleotide primer for the detection of SNP TSC0031117
ggtgttgtgagt

SEQ ID NO: 322930 - DNA, 12 bp, Artificial Sequence
  Oligonucleotide primer for the detection of SNP TSC0031117
ggtgttgtgagc

SEQ ID NO: 322931 - DNA, 12 bp, Artificial Sequence
  Oligonucleotide primer for the detection of SNP TSC0031121
tctcaaacttct

SEQ ID NO: 322932 - DNA, 12 bp, Artificial Sequence
  Oligonucleotide primer for the detection of SNP TSC0031121
tctcgaacttct

SEQ ID NO: 322933 - DNA, 12 bp, Artificial Sequence
  Oligonucleotide primer for the detection of SNP TSC0031126
taaccattaact

SEQ ID NO: 322934 - DNA, 12 bp, Artificial Sequence
  Oligonucleotide primer for the detection of SNP TSC0031126
atgtatagaaaa

SEQ ID NO: 322935 - DNA, 12 bp, Artificial Sequence
  Oligonucleotide primer for the detection of SNP TSC0031127
tagatgttgggt

SEQ ID NO: 322936 - DNA, 12 bp, Artificial Sequence
  Oligonucleotide primer for the detection of SNP TSC0031127
ctaaatattaaa

SEQ ID NO: 322937 - DNA, 12 bp, Artificial Sequence
  Oligonucleotide primer for the detection of SNP TSC0031129
gagagagatata

SEQ ID NO: 322938 - DNA, 12 bp, Artificial Sequence
  Oligonucleotide primer for the detection of SNP TSC0031135
atacacataata

SEQ ID NO: 322939 - DNA, 12 bp, Artificial Sequence
  Oligonucleotide primer for the detection of SNP TSC0031135
atttttatgttg

SEQ ID NO: 322940 - DNA, 12 bp, Artificial Sequence
  Oligonucleotide primer for the detection of SNP TSC0031136
cctaaaatcacc

SEQ ID NO: 322941 - DNA, 12 bp, Artificial Sequence
  Oligonucleotide primer for the detection of SNP TSC0031136
aaatggattatg

SEQ ID NO: 322942 - DNA, 12 bp, Artificial Sequence
  Oligonucleotide primer for the detection of SNP TSC0031137
tcataccacaac

SEQ ID NO: 322943 - DNA, 12 bp, Artificial Sequence
  Oligonucleotide primer for the detection of SNP TSC0031137
agttatgtttat

SEQ ID NO: 322944 - DNA, 12 bp, Artificial Sequence
  Oligonucleotide primer for the detection of SNP TSC0031137
aatcatacttat

SEQ ID NO: 322945 - DNA, 12 bp, Artificial Sequence
  Oligonucleotide primer for the detection of SNP TSC0031137
tgttataatttt

SEQ ID NO: 322946 - DNA, 12 bp, Artificial Sequence
  Oligonucleotide primer for the detection of SNP TSC0031138
atttaaaaaatc

SEQ ID NO: 322947 - DNA, 12 bp, Artificial Sequence
  Oligonucleotide primer for the detection of SNP TSC0031138
taaaatttagta

SEQ ID NO: 322948 - DNA, 12 bp, Artificial Sequence
  Oligonucleotide primer for the detection of SNP TSC0031139
ttttccataatc

SEQ ID NO: 322949 - DNA, 12 bp, Artificial Sequence
  Oligonucleotide primer for the detection of SNP TSC0031139
ggttttagatag

SEQ ID NO: 322950 - DNA, 12 bp, Artificial Sequence
  Oligonucleotide primer for the detection of SNP TSC0031142
cttaattctctt

SEQ ID NO: 322951 - DNA, 12 bp, Artificial Sequence
  Oligonucleotide primer for the detection of SNP TSC0031142
ttttggtgattg

SEQ ID NO: 322952 - DNA, 12 bp, Artificial Sequence
  Oligonucleotide primer for the detection of SNP TSC0031143
aaccaaaaacat

SEQ ID NO: 322953 - DNA, 12 bp, Artificial Sequence
  Oligonucleotide primer for the detection of SNP TSC0031143
aatgggtagtgg

SEQ ID NO: 322954 - DNA, 12 bp, Artificial Sequence
  Oligonucleotide primer for the detection of SNP TSC0031144
tccataaatcaa

SEQ ID NO: 322955 - DNA, 12 bp, Artificial Sequence
  Oligonucleotide primer for the detection of SNP TSC0031144
aaaccaaataaa

SEQ ID NO: 322956 - DNA, 12 bp, Artificial Sequence
  Oligonucleotide primer for the detection of SNP TSC0031144
ttttatgaatta

SEQ ID NO: 322957 - DNA, 12 bp, Artificial Sequence
  Oligonucleotide primer for the detection of SNP TSC0031145
ctaacaccaaat

SEQ ID NO: 322958 - DNA, 12 bp, Artificial Sequence
  Oligonucleotide primer for the detection of SNP TSC0031145
atttagtattta

SEQ ID NO: 322959 - DNA, 12 bp, Artificial Sequence
  Oligonucleotide primer for the detection of SNP TSC0031145
actcaacactta

SEQ ID NO: 322960 - DNA, 12 bp, Artificial Sequence
  Oligonucleotide primer for the detection of SNP TSC0031145
ttggtattagat

SEQ ID NO: 322961 - DNA, 12 bp, Artificial Sequence
  Oligonucleotide primer for the detection of SNP TSC0031146
acaaaatttcac

SEQ ID NO: 322962 - DNA, 12 bp, Artificial Sequence
  Oligonucleotide primer for the detection of SNP TSC0031146
acgaaatttcac

SEQ ID NO: 322963 - DNA, 12 bp, Artificial Sequence
  Oligonucleotide primer for the detection of SNP TSC0031146
ttttggttaata

SEQ ID NO: 322964 - DNA, 12 bp, Artificial Sequence
  Oligonucleotide primer for the detection of SNP TSC0031150
ataattaaaaat

SEQ ID NO: 322965 - DNA, 12 bp, Artificial Sequence
  Oligonucleotide primer for the detection of SNP TSC0031150
atatgaatatga

SEQ ID NO: 322966 - DNA, 12 bp, Artificial Sequence
  Oligonucleotide primer for the detection of SNP TSC0031152
aaaaccaaattc

SEQ ID NO: 322967 - DNA, 12 bp, Artificial Sequence
  Oligonucleotide primer for the detection of SNP TSC0031160
aaatattaatta

SEQ ID NO: 322968 - DNA, 12 bp, Artificial Sequence
  Oligonucleotide primer for the detection of SNP TSC0031160
tatagtaggtgt

SEQ ID NO: 322969 - DNA, 12 bp, Artificial Sequence
  Oligonucleotide primer for the detection of SNP TSC0031160
acataataaata

SEQ ID NO: 322970 - DNA, 12 bp, Artificial Sequence
  Oligonucleotide primer for the detection of SNP TSC0031160
taaatgttaatt

SEQ ID NO: 322971 - DNA, 12 bp, Artificial Sequence
  Oligonucleotide primer for the detection of SNP TSC0031161
ataatctatctt

SEQ ID NO: 322972 - DNA, 12 bp, Artificial Sequence
  Oligonucleotide primer for the detection of SNP TSC0031161
ttttgaggagga

SEQ ID NO: 322973 - DNA, 12 bp, Artificial Sequence
  Oligonucleotide primer for the detection of SNP TSC0031161
ataatttgtttt

SEQ ID NO: 322974 - DNA, 12 bp, Artificial Sequence
  Oligonucleotide primer for the detection of SNP TSC0031162
caaatcttcata

SEQ ID NO: 322975 - DNA, 12 bp, Artificial Sequence
  Oligonucleotide primer for the detection of SNP TSC0031162
cgaatcttcata

SEQ ID NO: 322976 - DNA, 12 bp, Artificial Sequence
  Oligonucleotide primer for the detection of SNP TSC0031162
acctaaaacttt

SEQ ID NO: 322977 - DNA, 12 bp, Artificial Sequence
  Oligonucleotide primer for the detection of SNP TSC0031162
cggatttttatg

SEQ ID NO: 322978 - DNA, 12 bp, Artificial Sequence
  Oligonucleotide primer for the detection of SNP TSC0031163
ccataatctcct

SEQ ID NO: 322979 - DNA, 12 bp, Artificial Sequence
  Oligonucleotide primer for the detection of SNP TSC0031163
ccgtaatctcct

SEQ ID NO: 322980 - DNA, 12 bp, Artificial Sequence
  Oligonucleotide primer for the detection of SNP TSC0031163
tgtttttagtta

SEQ ID NO: 322981 - DNA, 12 bp, Artificial Sequence
  Oligonucleotide primer for the detection of SNP TSC0031163
cgtttttagtta

SEQ ID NO: 322982 - DNA, 12 bp, Artificial Sequence
  Oligonucleotide primer for the detection of SNP TSC0031164
atctactcaacc

SEQ ID NO: 322983 - DNA, 12 bp, Artificial Sequence
  Oligonucleotide primer for the detection of SNP TSC0031164
tgttattatttg

SEQ ID NO: 322984 - DNA, 12 bp, Artificial Sequence
  Oligonucleotide primer for the detection of SNP TSC0031164
cgttattatttg

SEQ ID NO: 322985 - DNA, 12 bp, Artificial Sequence
  Oligonucleotide primer for the detection of SNP TSC0031164
cattattactta

SEQ ID NO: 322986 - DNA, 12 bp, Artificial Sequence
  Oligonucleotide primer for the detection of SNP TSC0031164
cgttattactta

SEQ ID NO: 322987 - DNA, 12 bp, Artificial Sequence
  Oligonucleotide primer for the detection of SNP TSC0031164
gtttgtttaatt

SEQ ID NO: 322988 - DNA, 12 bp, Artificial Sequence
  Oligonucleotide primer for the detection of SNP TSC0031165
acttcaaataca

SEQ ID NO: 322989 - DNA, 12 bp, Artificial Sequence
  Oligonucleotide primer for the detection of SNP TSC0031165
aagtttaatttc

SEQ ID NO: 322990 - DNA, 12 bp, Artificial Sequence
  Oligonucleotide primer for the detection of SNP TSC0031165
aaacttaactcc

SEQ ID NO: 322991 - DNA, 12 bp, Artificial Sequence
  Oligonucleotide primer for the detection of SNP TSC0031165
gttttaaatata

SEQ ID NO: 322992 - DNA, 12 bp, Artificial Sequence
  Oligonucleotide primer for the detection of SNP TSC0031166
tatatccattat

SEQ ID NO: 322993 - DNA, 12 bp, Artificial Sequence
  Oligonucleotide primer for the detection of SNP TSC0031166
gaggtggtatat

SEQ ID NO: 322994 - DNA, 12 bp, Artificial Sequence
  Oligonucleotide primer for the detection of SNP TSC0031166
gaggcggtatat

SEQ ID NO: 322995 - DNA, 12 bp, Artificial Sequence
  Oligonucleotide primer for the detection of SNP TSC0031166
aaaacaatacat

SEQ ID NO: 322996 - DNA, 12 bp, Artificial Sequence
  Oligonucleotide primer for the detection of SNP TSC0031166
aaaacgatacat

SEQ ID NO: 322997 - DNA, 12 bp, Artificial Sequence
  Oligonucleotide primer for the detection of SNP TSC0031167
aaccctatccta

SEQ ID NO: 322998 - DNA, 12 bp, Artificial Sequence
  Oligonucleotide primer for the detection of SNP TSC0031167
ttggatatagaa

SEQ ID NO: 322999 - DNA, 12 bp, Artificial Sequence
  Oligonucleotide primer for the detection of SNP TSC0031167
tcggatatagaa

SEQ ID NO: 323000 - DNA, 12 bp, Artificial Sequence
  Oligonucleotide primer for the detection of SNP TSC0031171
catttccacaat

SEQ ID NO: 323001 - DNA, 12 bp, Artificial Sequence
  Oligonucleotide primer for the detection of SNP TSC0031171
acaaacatccca

SEQ ID NO: 323002 - DNA, 12 bp, Artificial Sequence
  Oligonucleotide primer for the detection of SNP TSC0031171
tatttttatagt

SEQ ID NO: 323003 - DNA, 12 bp, Artificial Sequence
  Oligonucleotide primer for the detection of SNP TSC0031172
ttaatataaaaa

SEQ ID NO: 323004 - DNA, 12 bp, Artificial Sequence
  Oligonucleotide primer for the detection of SNP TSC0031172
ttatatatatgt

SEQ ID NO: 323005 - DNA, 12 bp, Artificial Sequence
  Oligonucleotide primer for the detection of SNP TSC0031172
ttatatatatgc

SEQ ID NO: 323006 - DNA, 12 bp, Artificial Sequence
  Oligonucleotide primer for the detection of SNP TSC0031172
ttcatatacata

SEQ ID NO: 323007 - DNA, 12 bp, Artificial Sequence
  Oligonucleotide primer for the detection of SNP TSC0031172
agtgtggaaatt

SEQ ID NO: 323008 - DNA, 12 bp, Artificial Sequence
  Oligonucleotide primer for the detection of SNP TSC0031173
aaccccatctat

SEQ ID NO: 323009 - DNA, 12 bp, Artificial Sequence
  Oligonucleotide primer for the detection of SNP TSC0031173
aaccccgtctat

SEQ ID NO: 323010 - DNA, 12 bp, Artificial Sequence
  Oligonucleotide primer for the detection of SNP TSC0031173
gtattaggtttg

SEQ ID NO: 323011 - DNA, 12 bp, Artificial Sequence
  Oligonucleotide primer for the detection of SNP TSC0031174
catccttcctcc

SEQ ID NO: 323012 - DNA, 12 bp, Artificial Sequence
  Oligonucleotide primer for the detection of SNP TSC0031174
agaggaagagag

SEQ ID NO: 323013 - DNA, 12 bp, Artificial Sequence
  Oligonucleotide primer for the detection of SNP TSC0031176
accacttccttc

SEQ ID NO: 323014 - DNA, 12 bp, Artificial Sequence
  Oligonucleotide primer for the detection of SNP TSC0031176
agttttggggag

SEQ ID NO: 323015 - DNA, 12 bp, Artificial Sequence
  Oligonucleotide primer for the detection of SNP TSC0031177
taaaatataaca

SEQ ID NO: 323016 - DNA, 12 bp, Artificial Sequence
  Oligonucleotide primer for the detection of SNP TSC0031177
aagtttggttat

SEQ ID NO: 323017 - DNA, 12 bp, Artificial Sequence
  Oligonucleotide primer for the detection of SNP TSC0031177
atgtaatatttt

SEQ ID NO: 323018 - DNA, 12 bp, Artificial Sequence
  Oligonucleotide primer for the detection of SNP TSC0031178
taataaattaca

SEQ ID NO: 323019 - DNA, 12 bp, Artificial Sequence
  Oligonucleotide primer for the detection of SNP TSC0031178
atcacaactcca

SEQ ID NO: 323020 - DNA, 12 bp, Artificial Sequence
  Oligonucleotide primer for the detection of SNP TSC0031178
gtggtaagttat

SEQ ID NO: 323021 - DNA, 12 bp, Artificial Sequence
  Oligonucleotide primer for the detection of SNP TSC0031179
tgttttggttga

SEQ ID NO: 323022 - DNA, 12 bp, Artificial Sequence
  Oligonucleotide primer for the detection of SNP TSC0031180
tttatgaaaaat

SEQ ID NO: 323023 - DNA, 12 bp, Artificial Sequence
  Oligonucleotide primer for the detection of SNP TSC0031180
tccataaaaaat

SEQ ID NO: 323024 - DNA, 12 bp, Artificial Sequence
  Oligonucleotide primer for the detection of SNP TSC0031180
ataaggataata

SEQ ID NO: 323025 - DNA, 12 bp, Artificial Sequence
  Oligonucleotide primer for the detection of SNP TSC0031181
ccacaaaactaa

SEQ ID NO: 323026 - DNA, 12 bp, Artificial Sequence
  Oligonucleotide primer for the detection of SNP TSC0031181
gtttttgtgttt

SEQ ID NO: 323027 - DNA, 12 bp, Artificial Sequence
  Oligonucleotide primer for the detection of SNP TSC0031181
atccttataccc

SEQ ID NO: 323028 - DNA, 12 bp, Artificial Sequence
  Oligonucleotide primer for the detection of SNP TSC0031181
ttatagaattga

SEQ ID NO: 323029 - DNA, 12 bp, Artificial Sequence
  Oligonucleotide primer for the detection of SNP TSC0031185
aacataaaccaa

SEQ ID NO: 323030 - DNA, 12 bp, Artificial Sequence
  Oligonucleotide primer for the detection of SNP TSC0031185
ttagtgttatag

SEQ ID NO: 323031 - DNA, 12 bp, Artificial Sequence
  Oligonucleotide primer for the detection of SNP TSC0031185
ccaatatcacaa

SEQ ID NO: 323032 - DNA, 12 bp, Artificial Sequence
  Oligonucleotide primer for the detection of SNP TSC0031185
ggtatgggttag

SEQ ID NO: 323033 - DNA, 12 bp, Artificial Sequence
  Oligonucleotide primer for the detection of SNP TSC0031187
tcaaattaccct

SEQ ID NO: 323034 - DNA, 12 bp, Artificial Sequence
  Oligonucleotide primer for the detection of SNP TSC0031187
tcgaattaccct

SEQ ID NO: 323035 - DNA, 12 bp, Artificial Sequence
  Oligonucleotide primer for the detection of SNP TSC0031187
actttttctata

SEQ ID NO: 323036 - DNA, 12 bp, Artificial Sequence
  Oligonucleotide primer for the detection of SNP TSC0031187
tcgagttatttt

SEQ ID NO: 323037 - DNA, 12 bp, Artificial Sequence
  Oligonucleotide primer for the detection of SNP TSC0031188
ttttactcatac

SEQ ID NO: 323038 - DNA, 12 bp, Artificial Sequence
  Oligonucleotide primer for the detection of SNP TSC0031188
gtttttataagg

SEQ ID NO: 323039 - DNA, 12 bp, Artificial Sequence
  Oligonucleotide primer for the detection of SNP TSC0031188
atctttataaaa

SEQ ID NO: 323040 - DNA, 12 bp, Artificial Sequence
  Oligonucleotide primer for the detection of SNP TSC0031190
tctcaataaaaa

SEQ ID NO: 323041 - DNA, 12 bp, Artificial Sequence
  Oligonucleotide primer for the detection of SNP TSC0031190
taatgaatgtgg

SEQ ID NO: 323042 - DNA, 12 bp, Artificial Sequence
  Oligonucleotide primer for the detection of SNP TSC0031190
taatgaacgtgg

SEQ ID NO: 323043 - DNA, 12 bp, Artificial Sequence
  Oligonucleotide primer for the detection of SNP TSC0031190
aataaacgtaaa

SEQ ID NO: 323044 - DNA, 12 bp, Artificial Sequence
  Oligonucleotide primer for the detection of SNP TSC0031190
tagtaggaattt

SEQ ID NO: 323045 - DNA, 12 bp, Artificial Sequence
  Oligonucleotide primer for the detection of SNP TSC0031191
ctcacccatact

SEQ ID NO: 323046 - DNA, 12 bp, Artificial Sequence
  Oligonucleotide primer for the detection of SNP TSC0031192
taacctctacta

SEQ ID NO: 323047 - DNA, 12 bp, Artificial Sequence
  Oligonucleotide primer for the detection of SNP TSC0031192
ttggggtagagt

SEQ ID NO: 323048 - DNA, 12 bp, Artificial Sequence
  Oligonucleotide primer for the detection of SNP TSC0031192
ctaaaacaaaat

SEQ ID NO: 323049 - DNA, 12 bp, Artificial Sequence
  Oligonucleotide primer for the detection of SNP TSC0031192
tggtttttgttg

SEQ ID NO: 323050 - DNA, 12 bp, Artificial Sequence
  Oligonucleotide primer for the detection of SNP TSC0031193
ctttaactaact

SEQ ID NO: 323051 - DNA, 12 bp, Artificial Sequence
  Oligonucleotide primer for the detection of SNP TSC0031200
aaattttaacta

SEQ ID NO: 323052 - DNA, 12 bp, Artificial Sequence
  Oligonucleotide primer for the detection of SNP TSC0031200
ggttttaagtat

SEQ ID NO: 323053 - DNA, 12 bp, Artificial Sequence
  Oligonucleotide primer for the detection of SNP TSC0031200
actccaaacaca

SEQ ID NO: 323054 - DNA, 12 bp, Artificial Sequence
  Oligonucleotide primer for the detection of SNP TSC0031200
tgggttttaatt

SEQ ID NO: 323055 - DNA, 12 bp, Artificial Sequence
  Oligonucleotide primer for the detection of SNP TSC0031201
acccacattatt

SEQ ID NO: 323056 - DNA, 12 bp, Artificial Sequence
  Oligonucleotide primer for the detection of SNP TSC0031201
acccacgttatt

SEQ ID NO: 323057 - DNA, 12 bp, Artificial Sequence
  Oligonucleotide primer for the detection of SNP TSC0031202
tccaaaaaacgc

SEQ ID NO: 323058 - DNA, 12 bp, Artificial Sequence
  Oligonucleotide primer for the detection of SNP TSC0031202
aattttttaacg

SEQ ID NO: 323059 - DNA, 12 bp, Artificial Sequence
  Oligonucleotide primer for the detection of SNP TSC0031203
tttatatcaata

SEQ ID NO: 323060 - DNA, 12 bp, Artificial Sequence
  Oligonucleotide primer for the detection of SNP TSC0031203
gtaaaatattat

SEQ ID NO: 323061 - DNA, 12 bp, Artificial Sequence
  Oligonucleotide primer for the detection of SNP TSC0031203
acaaaacatcat

SEQ ID NO: 323062 - DNA, 12 bp, Artificial Sequence
  Oligonucleotide primer for the detection of SNP TSC0031203
tttgtgttagta

SEQ ID NO: 323063 - DNA, 12 bp, Artificial Sequence
  Oligonucleotide primer for the detection of SNP TSC0031205
taactccataaa

SEQ ID NO: 323064 - DNA, 12 bp, Artificial Sequence
  Oligonucleotide primer for the detection of SNP TSC0031205
gagaagttattt

SEQ ID NO: 323065 - DNA, 12 bp, Artificial Sequence
  Oligonucleotide primer for the detection of SNP TSC0031205
aaaaaattactc

SEQ ID NO: 323066 - DNA, 12 bp, Artificial Sequence
  Oligonucleotide primer for the detection of SNP TSC0031205
tgattttatgaa

SEQ ID NO: 323067 - DNA, 12 bp, Artificial Sequence
  Oligonucleotide primer for the detection of SNP TSC0031206
taaacacaaaac

SEQ ID NO: 323068 - DNA, 12 bp, Artificial Sequence
  Oligonucleotide primer for the detection of SNP TSC0031206
atttgtaattta

SEQ ID NO: 323069 - DNA, 12 bp, Artificial Sequence
  Oligonucleotide primer for the detection of SNP TSC0031207
aatccatcccct

SEQ ID NO: 323070 - DNA, 12 bp, Artificial Sequence
  Oligonucleotide primer for the detection of SNP TSC0031207
ttaggggaagag

SEQ ID NO: 323071 - DNA, 12 bp, Artificial Sequence
  Oligonucleotide primer for the detection of SNP TSC0031208
ttaaacaacttc

SEQ ID NO: 323072 - DNA, 12 bp, Artificial Sequence
  Oligonucleotide primer for the detection of SNP TSC0031208
gaagtagggaaa

SEQ ID NO: 323073 - DNA, 12 bp, Artificial Sequence
  Oligonucleotide primer for the detection of SNP TSC0031209
taaactaaatac

SEQ ID NO: 323074 - DNA, 12 bp, Artificial Sequence
  Oligonucleotide primer for the detection of SNP TSC0031209
tagtgtttagga

SEQ ID NO: 323075 - DNA, 12 bp, Artificial Sequence
  Oligonucleotide primer for the detection of SNP TSC0031210
acacatctccca

SEQ ID NO: 323076 - DNA, 12 bp, Artificial Sequence
  Oligonucleotide primer for the detection of SNP TSC0031210
tgtgggatggga

SEQ ID NO: 323077 - DNA, 12 bp, Artificial Sequence
  Oligonucleotide primer for the detection of SNP TSC0031210
atatatttttta

SEQ ID NO: 323078 - DNA, 12 bp, Artificial Sequence
  Oligonucleotide primer for the detection of SNP TSC0031211
caaaaaccaaac

SEQ ID NO: 323079 - DNA, 12 bp, Artificial Sequence
  Oligonucleotide primer for the detection of SNP TSC0031211
caaaaaccgaac

SEQ ID NO: 323080 - DNA, 12 bp, Artificial Sequence
  Oligonucleotide primer for the detection of SNP TSC0031211
cgaaaaccaaac

SEQ ID NO: 323081 - DNA, 12 bp, Artificial Sequence
  Oligonucleotide primer for the detection of SNP TSC0031211
cgaaaaccgaac

SEQ ID NO: 323082 - DNA, 12 bp, Artificial Sequence
  Oligonucleotide primer for the detection of SNP TSC0031211
agtgtttgttcg

SEQ ID NO: 323083 - DNA, 12 bp, Artificial Sequence
  Oligonucleotide primer for the detection of SNP TSC0031212
acctaacattct

SEQ ID NO: 323084 - DNA, 12 bp, Artificial Sequence
  Oligonucleotide primer for the detection of SNP TSC0031212
gttttaggaaga

SEQ ID NO: 323085 - DNA, 12 bp, Artificial Sequence
  Oligonucleotide primer for the detection of SNP TSC0031213
caatatatataa

SEQ ID NO: 323086 - DNA, 12 bp, Artificial Sequence
  Oligonucleotide primer for the detection of SNP TSC0031213
cgatatatataa

SEQ ID NO: 323087 - DNA, 12 bp, Artificial Sequence
  Oligonucleotide primer for the detection of SNP TSC0031213
atatttgttttt

SEQ ID NO: 323088 - DNA, 12 bp, Artificial Sequence
  Oligonucleotide primer for the detection of SNP TSC0031213
atatttgttttc

SEQ ID NO: 323089 - DNA, 12 bp, Artificial Sequence
  Oligonucleotide primer for the detection of SNP TSC0031213
atacctaccccc

SEQ ID NO: 323090 - DNA, 12 bp, Artificial Sequence
  Oligonucleotide primer for the detection of SNP TSC0031213
tggtgtgtgtag

SEQ ID NO: 323091 - DNA, 12 bp, Artificial Sequence
  Oligonucleotide primer for the detection of SNP TSC0031213
cggtgtgtgtag

SEQ ID NO: 323092 - DNA, 12 bp, Artificial Sequence
  Oligonucleotide primer for the detection of SNP TSC0031217
caaatcaaaaac

SEQ ID NO: 323093 - DNA, 12 bp, Artificial Sequence
  Oligonucleotide primer for the detection of SNP TSC0031217
tatgtagttgag

SEQ ID NO: 323094 - DNA, 12 bp, Artificial Sequence
  Oligonucleotide primer for the detection of SNP TSC0031218
caataaactcct

SEQ ID NO: 323095 - DNA, 12 bp, Artificial Sequence
  Oligonucleotide primer for the detection of SNP TSC0031218
aatgttttagag

SEQ ID NO: 323096 - DNA, 12 bp, Artificial Sequence
  Oligonucleotide primer for the detection of SNP TSC0031219
ccttcctcacaa

SEQ ID NO: 323097 - DNA, 12 bp, Artificial Sequence
  Oligonucleotide primer for the detection of SNP TSC0031219
ttgttggaaatt

SEQ ID NO: 323098 - DNA, 12 bp, Artificial Sequence
  Oligonucleotide primer for the detection of SNP TSC0031219
ttgttggaaatc

SEQ ID NO: 323099 - DNA, 12 bp, Artificial Sequence
  Oligonucleotide primer for the detection of SNP TSC0031220
atactataaata

SEQ ID NO: 323100 - DNA, 12 bp, Artificial Sequence
  Oligonucleotide primer for the detection of SNP TSC0031220
atttttgttagt

SEQ ID NO: 323101 - DNA, 12 bp, Artificial Sequence
  Oligonucleotide primer for the detection of SNP TSC0031220
aactcttaccaa

SEQ ID NO: 323102 - DNA, 12 bp, Artificial Sequence
  Oligonucleotide primer for the detection of SNP TSC0031220
tatattgtaaat

SEQ ID NO: 323103 - DNA, 12 bp, Artificial Sequence
  Oligonucleotide primer for the detection of SNP TSC0031221
tatttgttttag

SEQ ID NO: 323104 - DNA, 12 bp, Artificial Sequence
  Oligonucleotide primer for the detection of SNP TSC0031221
cacctacctcaa

SEQ ID NO: 323105 - DNA, 12 bp, Artificial Sequence
  Oligonucleotide primer for the detection of SNP TSC0031222
taatctcctata

SEQ ID NO: 323106 - DNA, 12 bp, Artificial Sequence
  Oligonucleotide primer for the detection of SNP TSC0031222
ctaaacttctta

SEQ ID NO: 323107 - DNA, 12 bp, Artificial Sequence
  Oligonucleotide primer for the detection of SNP TSC0031222
tagttttttata

SEQ ID NO: 323108 - DNA, 12 bp, Artificial Sequence
  Oligonucleotide primer for the detection of SNP TSC0031223
cacccttaaccc

SEQ ID NO: 323109 - DNA, 12 bp, Artificial Sequence
  Oligonucleotide primer for the detection of SNP TSC0031223
gataaaattttg

SEQ ID NO: 323110 - DNA, 12 bp, Artificial Sequence
  Oligonucleotide primer for the detection of SNP TSC0031224
acaaaaccatcc

SEQ ID NO: 323111 - DNA, 12 bp, Artificial Sequence
  Oligonucleotide primer for the detection of SNP TSC0031224
gtagggttagtg

SEQ ID NO: 323112 - DNA, 12 bp, Artificial Sequence
  Oligonukleotid-Primer
gtagggttagcg

SEQ ID NO: 323113 - DNA, 12 bp, Artificial Sequence
  Oligonucleotide primer for the detection of SNP TSC0031226
tccaatactttc

SEQ ID NO: 323114 - DNA, 12 bp, Artificial Sequence
  Oligonucleotide primer for the detection of SNP TSC0031226
tttttattaaag

SEQ ID NO: 323115 - DNA, 12 bp, Artificial Sequence
  Oligonucleotide primer for the detection of SNP TSC0031227
cataataaaaaa

SEQ ID NO: 323116 - DNA, 12 bp, Artificial Sequence
  Oligonukleotid-Primer
tagggttttatt

SEQ ID NO: 323117 - DNA, 12 bp, Artificial Sequence
  Oligonucleotide primer for the detection of SNP TSC0031227
tagggttttatc

SEQ ID NO: 323118 - DNA, 12 bp, Artificial Sequence
  Oligonucleotide primer for the detection of SNP TSC0031227
taaaacttcatc

SEQ ID NO: 323119 - DNA, 12 bp, Artificial Sequence
  Oligonucleotide primer for the detection of SNP TSC0031227
agttatgatgag

SEQ ID NO: 323120 - DNA, 12 bp, Artificial Sequence
  Oligonucleotide primer for the detection of SNP TSC0031228
caataaccttct

SEQ ID NO: 323121 - DNA, 12 bp, Artificial Sequence
  Oligonucleotide primer for the detection of SNP TSC0031228
tagggagattgg

SEQ ID NO: 323122 - DNA, 12 bp, Artificial Sequence
  Oligonucleotide primer for the detection of SNP TSC0031229
caactccaaaaa

SEQ ID NO: 323123 - DNA, 12 bp, Artificial Sequence
  Oligonucleotide primer for the detection of SNP TSC0031229
ttggaggatttt

SEQ ID NO: 323124 - DNA, 12 bp, Artificial Sequence
  Oligonucleotide primer for the detection of SNP TSC0031229
ttaaaaaaccct

SEQ ID NO: 323125 - DNA, 12 bp, Artificial Sequence
  Oligonucleotide primer for the detection of SNP TSC0031229
tagttttaggga

SEQ ID NO: 323126 - DNA, 12 bp, Artificial Sequence
  Oligonucleotide primer for the detection of SNP TSC0031231
aacccctactcc

SEQ ID NO: 323127 - DNA, 12 bp, Artificial Sequence
  Oligonucleotide primer for the detection of SNP TSC0031231
gtagggataggg

SEQ ID NO: 323128 - DNA, 12 bp, Artificial Sequence
  Oligonucleotide primer for the detection of SNP TSC0031232
ttcaactcacac

SEQ ID NO: 323129 - DNA, 12 bp, Artificial Sequence
  Oligonucleotide primer for the detection of SNP TSC0031232
ttcaactcacgc

SEQ ID NO: 323130 - DNA, 12 bp, Artificial Sequence
  Oligonucleotide primer for the detection of SNP TSC0031232
ttcaactcgcac

SEQ ID NO: 323131 - DNA, 12 bp, Artificial Sequence
  Oligonucleotide primer for the detection of SNP TSC0031232
ttcgactcacac

SEQ ID NO: 323132 - DNA, 12 bp, Artificial Sequence
  Oligonucleotide primer for the detection of SNP TSC0031232
ttcaactcgcgc

SEQ ID NO: 323133 - DNA, 12 bp, Artificial Sequence
  Oligonucleotide primer for the detection of SNP TSC0031232
ttcgactcacgc

SEQ ID NO: 323134 - DNA, 12 bp, Artificial Sequence
  Oligonucleotide primer for the detection of SNP TSC0031232
ttcgactcgcac

SEQ ID NO: 323135 - DNA, 12 bp, Artificial Sequence
  Oligonucleotide primer for the detection of SNP TSC0031232
ttcgactcgcgc

SEQ ID NO: 323136 - DNA, 12 bp, Artificial Sequence
  Oligonucleotide primer for the detection of SNP TSC0031232
tgggtgtgtata

SEQ ID NO: 323137 - DNA, 12 bp, Artificial Sequence
  Oligonucleotide primer for the detection of SNP TSC0031232
tgggtgcgtata

SEQ ID NO: 323138 - DNA, 12 bp, Artificial Sequence
  Oligonucleotide primer for the detection of SNP TSC0031232
taaatacacaca

SEQ ID NO: 323139 - DNA, 12 bp, Artificial Sequence
  Oligonucleotide primer for the detection of SNP TSC0031232
taaatacgcaca

SEQ ID NO: 323140 - DNA, 12 bp, Artificial Sequence
  Oligonucleotide primer for the detection of SNP TSC0031232
tttggtttgtgt

SEQ ID NO: 323141 - DNA, 12 bp, Artificial Sequence
  Oligonucleotide primer for the detection of SNP TSC0031232
ttcggtttgtgt

SEQ ID NO: 323142 - DNA, 12 bp, Artificial Sequence
  Oligonucleotide primer for the detection of SNP TSC0031232
tttggttcgtgt

SEQ ID NO: 323143 - DNA, 12 bp, Artificial Sequence
  Oligonucleotide primer for the detection of SNP TSC0031232
tttggtttgcgt

SEQ ID NO: 323144 - DNA, 12 bp, Artificial Sequence
  Oligonucleotide primer for the detection of SNP TSC0031232
ttcggttcgtgt

SEQ ID NO: 323145 - DNA, 12 bp, Artificial Sequence
  Oligonucleotide primer for the detection of SNP TSC0031232
ttcggtttgcgt

SEQ ID NO: 323146 - DNA, 12 bp, Artificial Sequence
  Oligonucleotide primer for the detection of SNP TSC0031232
tttggttcgcgt

SEQ ID NO: 323147 - DNA, 12 bp, Artificial Sequence
  Oligonucleotide primer for the detection of SNP TSC0031232
ttcggttcgcgt

SEQ ID NO: 323148 - DNA, 12 bp, Artificial Sequence
  Oligonucleotide primer for the detection of SNP TSC0031233
tctcaattctca

SEQ ID NO: 323149 - DNA, 12 bp, Artificial Sequence
  Oligonucleotide primer for the detection of SNP TSC0031233
tttgtggagata

SEQ ID NO: 323150 - DNA, 12 bp, Artificial Sequence
  Oligonucleotide primer for the detection of SNP TSC0031235
ttctcttccacc

SEQ ID NO: 323151 - DNA, 12 bp, Artificial Sequence
  Oligonucleotide primer for the detection of SNP TSC0031235
tggaatatggtg

SEQ ID NO: 323152 - DNA, 12 bp, Artificial Sequence
  Oligonucleotide primer for the detection of SNP TSC0031238
ccaacacactcc

SEQ ID NO: 323153 - DNA, 12 bp, Artificial Sequence
  Oligonucleotide primer for the detection of SNP TSC0031238
gggtatttgaag

SEQ ID NO: 323154 - DNA, 12 bp, Artificial Sequence
  Oligonucleotide primer for the detection of SNP TSC0031239
ctttccacttaa

SEQ ID NO: 323155 - DNA, 12 bp, Artificial Sequence
  Oligonucleotide primer for the detection of SNP TSC0031239
ttgagttgaggt

SEQ ID NO: 323156 - DNA, 12 bp, Artificial Sequence
  Oligonucleotide primer for the detection of SNP TSC0031240
ctctttaaaaaa

SEQ ID NO: 323157 - DNA, 12 bp, Artificial Sequence
  Oligonucleotide primer for the detection of SNP TSC0031240
ttatcttcactt

SEQ ID NO: 323158 - DNA, 12 bp, Artificial Sequence
  Oligonucleotide primer for the detection of SNP TSC0031240
tttttttaaaaa

SEQ ID NO: 323159 - DNA, 12 bp, Artificial Sequence
  Oligonucleotide primer for the detection of SNP TSC0031241
aataaacaacaa

SEQ ID NO: 323160 - DNA, 12 bp, Artificial Sequence
  Oligonucleotide primer for the detection of SNP TSC0031241
tcatacactttt

SEQ ID NO: 323161 - DNA, 12 bp, Artificial Sequence
  Oligonucleotide primer for the detection of SNP TSC0031241
gatagataatag

SEQ ID NO: 323162 - DNA, 12 bp, Artificial Sequence
  Oligonucleotide primer for the detection of SNP TSC0031242
taaataccatta

SEQ ID NO: 323163 - DNA, 12 bp, Artificial Sequence
  Oligonucleotide primer for the detection of SNP TSC0031242
atttattatggt

SEQ ID NO: 323164 - DNA, 12 bp, Artificial Sequence
  Oligonucleotide primer for the detection of SNP TSC0031242
acttattataat

SEQ ID NO: 323165 - DNA, 12 bp, Artificial Sequence
  Oligonucleotide primer for the detection of SNP TSC0031242
tgaatattatta

SEQ ID NO: 323166 - DNA, 12 bp, Artificial Sequence
  Oligonucleotide primer for the detection of SNP TSC0031243
aatcatatattt

SEQ ID NO: 323167 - DNA, 12 bp, Artificial Sequence
  Oligonucleotide primer for the detection of SNP TSC0031243
aattaagagttg

SEQ ID NO: 323168 - DNA, 12 bp, Artificial Sequence
  Oligonucleotide primer for the detection of SNP TSC0031244
acaaaattaaac

SEQ ID NO: 323169 - DNA, 12 bp, Artificial Sequence
  Oligonucleotide primer for the detection of SNP TSC0031244
acgaaattaaac

SEQ ID NO: 323170 - DNA, 12 bp, Artificial Sequence
  Oligonucleotide primer for the detection of SNP TSC0031244
ttaaatgttgta

SEQ ID NO: 323171 - DNA, 12 bp, Artificial Sequence
  Oligonucleotide primer for the detection of SNP TSC0031245
ccaaataatatt

SEQ ID NO: 323172 - DNA, 12 bp, Artificial Sequence
  Oligonucleotide primer for the detection of SNP TSC0031245
gtaagtttaaaa

SEQ ID NO: 323173 - DNA, 12 bp, Artificial Sequence
  Oligonucleotide primer for the detection of SNP TSC0031246
taaacaaacgac

SEQ ID NO: 323174 - DNA, 12 bp, Artificial Sequence
  Oligonucleotide primer for the detection of SNP TSC0031246
ttttgtgggtta

SEQ ID NO: 323175 - DNA, 12 bp, Artificial Sequence
  Oligonucleotide primer for the detection of SNP TSC0031246
tttcgtgggtta

SEQ ID NO: 323176 - DNA, 12 bp, Artificial Sequence
  Oligonucleotide primer for the detection of SNP TSC0031246
ttttgcgggtta

SEQ ID NO: 323177 - DNA, 12 bp, Artificial Sequence
  Oligonucleotide primer for the detection of SNP TSC0031246
tttcgcgggtta

SEQ ID NO: 323178 - DNA, 12 bp, Artificial Sequence
  Oligonucleotide primer for the detection of SNP TSC0031246
ccccacaaacca

SEQ ID NO: 323179 - DNA, 12 bp, Artificial Sequence
  Oligonucleotide primer for the detection of SNP TSC0031246
ccccacgaacca

SEQ ID NO: 323180 - DNA, 12 bp, Artificial Sequence
  Oligonucleotide primer for the detection of SNP TSC0031246
ccccgcaaacca

SEQ ID NO: 323181 - DNA, 12 bp, Artificial Sequence
  Oligonucleotide primer for the detection of SNP TSC0031246
ccccgcgaacca

SEQ ID NO: 323182 - DNA, 12 bp, Artificial Sequence
  Oligonucleotide primer for the detection of SNP TSC0031246
tgagtaggtggt

SEQ ID NO: 323183 - DNA, 12 bp, Artificial Sequence
  Oligonucleotide primer for the detection of SNP TSC0031246
tgagtaggcggt

SEQ ID NO: 323184 - DNA, 12 bp, Artificial Sequence
  Oligonucleotide primer for the detection of SNP TSC0031247
cccaatcacccc

SEQ ID NO: 323185 - DNA, 12 bp, Artificial Sequence
  Oligonucleotide primer for the detection of SNP TSC0031247
cccaatcgcccc

SEQ ID NO: 323186 - DNA, 12 bp, Artificial Sequence
  Oligonucleotide primer for the detection of SNP TSC0031247
cccgatcacccc

SEQ ID NO: 323187 - DNA, 12 bp, Artificial Sequence
  Oligonucleotide primer for the detection of SNP TSC0031247
cccgatcgcccc

SEQ ID NO: 323188 - DNA, 12 bp, Artificial Sequence
  Oligonucleotide primer for the detection of SNP TSC0031247
ttgaggtagagt

SEQ ID NO: 323189 - DNA, 12 bp, Artificial Sequence
  Oligonucleotide primer for the detection of SNP TSC0031247
tcgaggtagagt

SEQ ID NO: 323190 - DNA, 12 bp, Artificial Sequence
  Oligonucleotide primer for the detection of SNP TSC0031247
ttgaggtagagc

SEQ ID NO: 323191 - DNA, 12 bp, Artificial Sequence
  Oligonucleotide primer for the detection of SNP TSC0031247
tcgaggtagagc

SEQ ID NO: 323192 - DNA, 12 bp, Artificial Sequence
  Oligonucleotide primer for the detection of SNP TSC0031247
cccgaaacaaaa

SEQ ID NO: 323193 - DNA, 12 bp, Artificial Sequence
  Oligonucleotide primer for the detection of SNP TSC0031247
tttggtcgtttt

SEQ ID NO: 323194 - DNA, 12 bp, Artificial Sequence
  Oligonucleotide primer for the detection of SNP TSC0031247
ttcggtcgtttt

SEQ ID NO: 323195 - DNA, 12 bp, Artificial Sequence
  Oligonucleotide primer for the detection of SNP TSC0031248
tgaatgaattag

SEQ ID NO: 323196 - DNA, 12 bp, Artificial Sequence
  Oligonucleotide primer for the detection of SNP TSC0031253
ctataaacaaac

SEQ ID NO: 323197 - DNA, 12 bp, Artificial Sequence
  Oligonucleotide primer for the detection of SNP TSC0031253
taagagggtaag

SEQ ID NO: 323198 - DNA, 12 bp, Artificial Sequence
  Oligonucleotide primer for the detection of SNP TSC0031253
tgtgggtaagtt

SEQ ID NO: 323199 - DNA, 12 bp, Artificial Sequence
  Oligonucleotide primer for the detection of SNP TSC0031257
ttccatctattt

SEQ ID NO: 323200 - DNA, 12 bp, Artificial Sequence
  Oligonucleotide primer for the detection of SNP TSC0031257
tgagggaggttg

SEQ ID NO: 323201 - DNA, 12 bp, Artificial Sequence
  Oligonucleotide primer for the detection of SNP TSC0031258
tattacctaaac

SEQ ID NO: 323202 - DNA, 12 bp, Artificial Sequence
  Oligonucleotide primer for the detection of SNP TSC0031258
tgtgttattgta

SEQ ID NO: 323203 - DNA, 12 bp, Artificial Sequence
  Oligonucleotide primer for the detection of SNP TSC0031258
tgcgttattgta

SEQ ID NO: 323204 - DNA, 12 bp, Artificial Sequence
  Oligonucleotide primer for the detection of SNP TSC0031258
tacaccattaca

SEQ ID NO: 323205 - DNA, 12 bp, Artificial Sequence
  Oligonucleotide primer for the detection of SNP TSC0031258
tacgccattaca

SEQ ID NO: 323206 - DNA, 12 bp, Artificial Sequence
  Oligonucleotide primer for the detection of SNP TSC0031258
tgttgtttaggt

SEQ ID NO: 323207 - DNA, 12 bp, Artificial Sequence
  Oligonucleotide primer for the detection of SNP TSC0031259
tctttactcaca

SEQ ID NO: 323208 - DNA, 12 bp, Artificial Sequence
  Oligonucleotide primer for the detection of SNP TSC0031259
tctttactcacg

SEQ ID NO: 323209 - DNA, 12 bp, Artificial Sequence
  Oligonucleotide primer for the detection of SNP TSC0031259
cctaaaaatccc

SEQ ID NO: 323210 - DNA, 12 bp, Artificial Sequence
  Oligonucleotide primer for the detection of SNP TSC0031259
tttttgtttacg

SEQ ID NO: 323211 - DNA, 12 bp, Artificial Sequence
  Oligonucleotide primer for the detection of SNP TSC0031261
aatttcctcccc

SEQ ID NO: 323212 - DNA, 12 bp, Artificial Sequence
  Oligonucleotide primer for the detection of SNP TSC0031261
agaggagaggag

SEQ ID NO: 323213 - DNA, 12 bp, Artificial Sequence
  Oligonucleotide primer for the detection of SNP TSC0031262
aaataaaatcat

SEQ ID NO: 323214 - DNA, 12 bp, Artificial Sequence
  Oligonucleotide primer for the detection of SNP TSC0031262
aaaaatattgat

SEQ ID NO: 323215 - DNA, 12 bp, Artificial Sequence
  Oligonucleotide primer for the detection of SNP TSC0031262
aaaaatatcgat

SEQ ID NO: 323216 - DNA, 12 bp, Artificial Sequence
  Oligonucleotide primer for the detection of SNP TSC0031262
aaaaataccaat

SEQ ID NO: 323217 - DNA, 12 bp, Artificial Sequence
  Oligonucleotide primer for the detection of SNP TSC0031262
aaaaataccgat

SEQ ID NO: 323218 - DNA, 12 bp, Artificial Sequence
  Oligonucleotide primer for the detection of SNP TSC0031262
aagtgaggttat

SEQ ID NO: 323219 - DNA, 12 bp, Artificial Sequence
  Oligonucleotide primer for the detection of SNP TSC0031267
tatatattttat

SEQ ID NO: 323220 - DNA, 12 bp, Artificial Sequence
  Oligonucleotide primer for the detection of SNP TSC0031267
cacacaccctac

SEQ ID NO: 323221 - DNA, 12 bp, Artificial Sequence
  Oligonucleotide primer for the detection of SNP TSC0031267
tagatagatgtg

SEQ ID NO: 323222 - DNA, 12 bp, Artificial Sequence
  Oligonucleotide primer for the detection of SNP TSC0031270
tactttctctcc

SEQ ID NO: 323223 - DNA, 12 bp, Artificial Sequence
  Oligonucleotide primer for the detection of SNP TSC0031270
ttttggtggtag

SEQ ID NO: 323224 - DNA, 12 bp, Artificial Sequence
  Oligonucleotide primer for the detection of SNP TSC0031272
taacaacaaaaa

SEQ ID NO: 323225 - DNA, 12 bp, Artificial Sequence
  Oligonucleotide primer for the detection of SNP TSC0031272
taacaacgaaaa

SEQ ID NO: 323226 - DNA, 12 bp, Artificial Sequence
  Oligonucleotide primer for the detection of SNP TSC0031272
tcccccaccccc

SEQ ID NO: 323227 - DNA, 12 bp, Artificial Sequence
  Oligonucleotide primer for the detection of SNP TSC0031272
tcccccgccccc

SEQ ID NO: 323228 - DNA, 12 bp, Artificial Sequence
  Oligonucleotide primer for the detection of SNP TSC0031272
ggtagtgagggt

SEQ ID NO: 323229 - DNA, 12 bp, Artificial Sequence
  Oligonucleotide primer for the detection of SNP TSC0031272
ggtagcgagggt

SEQ ID NO: 323230 - DNA, 12 bp, Artificial Sequence
  Oligonucleotide primer for the detection of SNP TSC0031274
acaaaatcccta

SEQ ID NO: 323231 - DNA, 12 bp, Artificial Sequence
  Oligonucleotide primer for the detection of SNP TSC0031274
gcaaaatcccta

SEQ ID NO: 323232 - DNA, 12 bp, Artificial Sequence
  Oligonucleotide primer for the detection of SNP TSC0031274
ggagagtgtgtt

SEQ ID NO: 323233 - DNA, 12 bp, Artificial Sequence
  Oligonucleotide primer for the detection of SNP TSC0031274
gtagggtttttg

SEQ ID NO: 323234 - DNA, 12 bp, Artificial Sequence
  Oligonucleotide primer for the detection of SNP TSC0031275
atcccactatat

SEQ ID NO: 323235 - DNA, 12 bp, Artificial Sequence
  Oligonucleotide primer for the detection of SNP TSC0031276
ctcaaaataaac

SEQ ID NO: 323236 - DNA, 12 bp, Artificial Sequence
  Oligonucleotide primer for the detection of SNP TSC0031276
tgttttgaggga

SEQ ID NO: 323237 - DNA, 12 bp, Artificial Sequence
  Oligonucleotide primer for the detection of SNP TSC0031278
acctactccccc

SEQ ID NO: 323238 - DNA, 12 bp, Artificial Sequence
  Oligonucleotide primer for the detection of SNP TSC0031278
ttgggagggtag

SEQ ID NO: 323239 - DNA, 12 bp, Artificial Sequence
  Oligonucleotide primer for the detection of SNP TSC0031280
tttacttaaatt

SEQ ID NO: 323240 - DNA, 12 bp, Artificial Sequence
  Oligonucleotide primer for the detection of SNP TSC0031280
tatatgatgttg

SEQ ID NO: 323241 - DNA, 12 bp, Artificial Sequence
  Oligonucleotide primer for the detection of SNP TSC0031282
attcctccactc

SEQ ID NO: 323242 - DNA, 12 bp, Artificial Sequence
  Oligonucleotide primer for the detection of SNP TSC0031282
aagagtaaatgg

SEQ ID NO: 323243 - DNA, 12 bp, Artificial Sequence
  Oligonucleotide primer for the detection of SNP TSC0031283
tctctttttttt

SEQ ID NO: 323244 - DNA, 12 bp, Artificial Sequence
  Oligonucleotide primer for the detection of SNP TSC0031284
attctcttcccc

SEQ ID NO: 323245 - DNA, 12 bp, Artificial Sequence
  Oligonucleotide primer for the detection of SNP TSC0031284
ttatgttgtagg

SEQ ID NO: 323246 - DNA, 12 bp, Artificial Sequence
  Oligonucleotide primer for the detection of SNP TSC0031284
ttacgttgtagg

SEQ ID NO: 323247 - DNA, 12 bp, Artificial Sequence
  Oligonucleotide primer for the detection of SNP TSC0031285
ttattaggatgg

SEQ ID NO: 323248 - DNA, 12 bp, Artificial Sequence
  Oligonucleotide primer for the detection of SNP TSC0031289
tactaaaaaaat

SEQ ID NO: 323249 - DNA, 12 bp, Artificial Sequence
  Oligonucleotide primer for the detection of SNP TSC0031289
tatatgttataa

SEQ ID NO: 323250 - DNA, 12 bp, Artificial Sequence
  Oligonucleotide primer for the detection of SNP TSC0031292
ttaaaatacaaa

SEQ ID NO: 323251 - DNA, 12 bp, Artificial Sequence
  Oligonucleotide primer for the detection of SNP TSC0031292
tgaatttttttt

SEQ ID NO: 323252 - DNA, 12 bp, Artificial Sequence
  Oligonucleotide primer for the detection of SNP TSC0031292
gatataggtttt

SEQ ID NO: 323253 - DNA, 12 bp, Artificial Sequence
  Oligonucleotide primer for the detection of SNP TSC0031293
ctcttcctctct

SEQ ID NO: 323254 - DNA, 12 bp, Artificial Sequence
  Oligonucleotide primer for the detection of SNP TSC0031295
cctttacaatca

SEQ ID NO: 323255 - DNA, 12 bp, Artificial Sequence
  Oligonucleotide primer for the detection of SNP TSC0031295
ataatagggagg

SEQ ID NO: 323256 - DNA, 12 bp, Artificial Sequence
  Oligonucleotide primer for the detection of SNP TSC0031295
ttttgtaattat

SEQ ID NO: 323257 - DNA, 12 bp, Artificial Sequence
  Oligonucleotide primer for the detection of SNP TSC0031298
ccttacatacat

SEQ ID NO: 323258 - DNA, 12 bp, Artificial Sequence
  Oligonucleotide primer for the detection of SNP TSC0031298
taaaatttttat

SEQ ID NO: 323259 - DNA, 12 bp, Artificial Sequence
  Oligonucleotide primer for the detection of SNP TSC0031298
ccaaaatcctta

SEQ ID NO: 323260 - DNA, 12 bp, Artificial Sequence
  Oligonucleotide primer for the detection of SNP TSC0031299
taatgatatata

SEQ ID NO: 323261 - DNA, 12 bp, Artificial Sequence
  Oligonucleotide primer for the detection of SNP TSC0031299
caataacacaca

SEQ ID NO: 323262 - DNA, 12 bp, Artificial Sequence
  Oligonucleotide primer for the detection of SNP TSC0031299
gtgaatttaggg

SEQ ID NO: 323263 - DNA, 12 bp, Artificial Sequence
  Oligonucleotide primer for the detection of SNP TSC0031301
atttttaaaaca

SEQ ID NO: 323264 - DNA, 12 bp, Artificial Sequence
  Oligonucleotide primer for the detection of SNP TSC0031301
taatagagtaat

SEQ ID NO: 323265 - DNA, 12 bp, Artificial Sequence
  Oligonucleotide primer for the detection of SNP TSC0031301
tgtttttgaaat

SEQ ID NO: 323266 - DNA, 12 bp, Artificial Sequence
  Oligonucleotide primer for the detection of SNP TSC0031302
gaaataaaaaca

SEQ ID NO: 323267 - DNA, 12 bp, Artificial Sequence
  Oligonucleotide primer for the detection of SNP TSC0031302
gaaataaaaacg

SEQ ID NO: 323268 - DNA, 12 bp, Artificial Sequence
  Oligonucleotide primer for the detection of SNP TSC0031302
tagtgtttggtt

SEQ ID NO: 323269 - DNA, 12 bp, Artificial Sequence
  Oligonucleotide primer for the detection of SNP TSC0031302
tagcgtttggtt

SEQ ID NO: 323270 - DNA, 12 bp, Artificial Sequence
  Oligonukleotid-Primer
tagtgttcggtt

SEQ ID NO: 323271 - DNA, 12 bp, Artificial Sequence
  Oligonucleotide primer for the detection of SNP TSC0031302
tagcgttcggtt

SEQ ID NO: 323272 - DNA, 12 bp, Artificial Sequence
  Oligonucleotide primer for the detection of SNP TSC0031302
caacatccaacc

SEQ ID NO: 323273 - DNA, 12 bp, Artificial Sequence
  Oligonucleotide primer for the detection of SNP TSC0031302
caacatccgacc

SEQ ID NO: 323274 - DNA, 12 bp, Artificial Sequence
  Oligonucleotide primer for the detection of SNP TSC0031302
caacgtccaacc

SEQ ID NO: 323275 - DNA, 12 bp, Artificial Sequence
  Oligonucleotide primer for the detection of SNP TSC0031302
caacgtccgacc

SEQ ID NO: 323276 - DNA, 12 bp, Artificial Sequence
  Oligonucleotide primer for the detection of SNP TSC0031302
gggatgagggtg

SEQ ID NO: 323277 - DNA, 12 bp, Artificial Sequence
  Oligonucleotide primer for the detection of SNP TSC0031302
gggatgagggcg

SEQ ID NO: 323278 - DNA, 12 bp, Artificial Sequence
  Oligonucleotide primer for the detection of SNP TSC0031303
aacactcacctt

SEQ ID NO: 323279 - DNA, 12 bp, Artificial Sequence
  Oligonucleotide primer for the detection of SNP TSC0031303
aacactcgcctt

SEQ ID NO: 323280 - DNA, 12 bp, Artificial Sequence
  Oligonucleotide primer for the detection of SNP TSC0031303
aacgctcacctt

SEQ ID NO: 323281 - DNA, 12 bp, Artificial Sequence
  Oligonucleotide primer for the detection of SNP TSC0031303
aacgctcgcctt

SEQ ID NO: 323282 - DNA, 12 bp, Artificial Sequence
  Oligonucleotide primer for the detection of SNP TSC0031303
gtggtttgtatg

SEQ ID NO: 323283 - DNA, 12 bp, Artificial Sequence
  Oligonucleotide primer for the detection of SNP TSC0031303
gcggtttgtatg

SEQ ID NO: 323284 - DNA, 12 bp, Artificial Sequence
  Oligonucleotide primer for the detection of SNP TSC0031303
gtggttcgtatg

SEQ ID NO: 323285 - DNA, 12 bp, Artificial Sequence
  Oligonucleotide primer for the detection of SNP TSC0031303
gcggttcgtatg

SEQ ID NO: 323286 - DNA, 12 bp, Artificial Sequence
  Oligonucleotide primer for the detection of SNP TSC0031304
ctctctttctcc

SEQ ID NO: 323287 - DNA, 12 bp, Artificial Sequence
  Oligonucleotide primer for the detection of SNP TSC0031304
tgggtagggaga

SEQ ID NO: 323288 - DNA, 12 bp, Artificial Sequence
  Oligonucleotide primer for the detection of SNP TSC0031304
cgggtagggaga

SEQ ID NO: 323289 - DNA, 12 bp, Artificial Sequence
  Oligonucleotide primer for the detection of SNP TSC0031305
cccaatcactac

SEQ ID NO: 323290 - DNA, 12 bp, Artificial Sequence
  Oligonucleotide primer for the detection of SNP TSC0031305
tagaggtggttg

SEQ ID NO: 323291 - DNA, 12 bp, Artificial Sequence
  Oligonucleotide primer for the detection of SNP TSC0031307
caaacaaaaacc

SEQ ID NO: 323292 - DNA, 12 bp, Artificial Sequence
  Oligonucleotide primer for the detection of SNP TSC0031307
aaggatgtattg

SEQ ID NO: 323293 - DNA, 12 bp, Artificial Sequence
  Oligonucleotide primer for the detection of SNP TSC0031307
taaataaaagtt

SEQ ID NO: 323294 - DNA, 12 bp, Artificial Sequence
  Oligonucleotide primer for the detection of SNP TSC0031308
acaaaaatctat

SEQ ID NO: 323295 - DNA, 12 bp, Artificial Sequence
  Oligonucleotide primer for the detection of SNP TSC0031310
aacaaaattccc

SEQ ID NO: 323296 - DNA, 12 bp, Artificial Sequence
  Oligonucleotide primer for the detection of SNP TSC0031310
ttgggtaatatg

SEQ ID NO: 323297 - DNA, 12 bp, Artificial Sequence
  Oligonucleotide primer for the detection of SNP TSC0031311
aaacaaaattcc

SEQ ID NO: 323298 - DNA, 12 bp, Artificial Sequence
  Oligonucleotide primer for the detection of SNP TSC0031311
agatagggtttt

SEQ ID NO: 323299 - DNA, 12 bp, Artificial Sequence
  Oligonucleotide primer for the detection of SNP TSC0031316
aatccttaatat

SEQ ID NO: 323300 - DNA, 12 bp, Artificial Sequence
  Oligonucleotide primer for the detection of SNP TSC0031316
gagtatagtagg

SEQ ID NO: 323301 - DNA, 12 bp, Artificial Sequence
  Oligonucleotide primer for the detection of SNP TSC0031318
acttcccaaaat

SEQ ID NO: 323302 - DNA, 12 bp, Artificial Sequence
  Oligonucleotide primer for the detection of SNP TSC0031318
attttttaaagt

SEQ ID NO: 323303 - DNA, 12 bp, Artificial Sequence
  Oligonucleotide primer for the detection of SNP TSC0031319
tatatctacaat

SEQ ID NO: 323304 - DNA, 12 bp, Artificial Sequence
  Oligonucleotide primer for the detection of SNP TSC0031319
aagatgatgaaa

SEQ ID NO: 323305 - DNA, 12 bp, Artificial Sequence
  Oligonucleotide primer for the detection of SNP TSC0031319
tgtatttatagt

SEQ ID NO: 323306 - DNA, 12 bp, Artificial Sequence
  Oligonucleotide primer for the detection of SNP TSC0031320
ctccctaactct

SEQ ID NO: 323307 - DNA, 12 bp, Artificial Sequence
  Oligonucleotide primer for the detection of SNP TSC0031320
gtttaggagaat

SEQ ID NO: 323308 - DNA, 12 bp, Artificial Sequence
  Oligonucleotide primer for the detection of SNP TSC0031323
cttaccttattc

SEQ ID NO: 323309 - DNA, 12 bp, Artificial Sequence
  Oligonucleotide primer for the detection of SNP TSC0031323
ggagaataagag

SEQ ID NO: 323310 - DNA, 12 bp, Artificial Sequence
  Oligonucleotide primer for the detection of SNP TSC0031324
accaattccaaa

SEQ ID NO: 323311 - DNA, 12 bp, Artificial Sequence
  Oligonucleotide primer for the detection of SNP TSC0031324
ttccactttctc

SEQ ID NO: 323312 - DNA, 12 bp, Artificial Sequence
  Oligonucleotide primer for the detection of SNP TSC0031324
ttccgctttctc

SEQ ID NO: 323313 - DNA, 12 bp, Artificial Sequence
  Oligonucleotide primer for the detection of SNP TSC0031324
tgttaattttag

SEQ ID NO: 323314 - DNA, 12 bp, Artificial Sequence
  Oligonucleotide primer for the detection of SNP TSC0031326
aaaaacctcaat

SEQ ID NO: 323315 - DNA, 12 bp, Artificial Sequence
  Oligonucleotide primer for the detection of SNP TSC0031326
aaaaacctcgat

SEQ ID NO: 323316 - DNA, 12 bp, Artificial Sequence
  Oligonucleotide primer for the detection of SNP TSC0031326
aggtggtgtatg

SEQ ID NO: 323317 - DNA, 12 bp, Artificial Sequence
  Oligonucleotide primer for the detection of SNP TSC0031327
caaatatttccc

SEQ ID NO: 323318 - DNA, 12 bp, Artificial Sequence
  Oligonucleotide primer for the detection of SNP TSC0031327
cgaatatttccc

SEQ ID NO: 323319 - DNA, 12 bp, Artificial Sequence
  Oligonucleotide primer for the detection of SNP TSC0031327
gggtatgtgtta

SEQ ID NO: 323320 - DNA, 12 bp, Artificial Sequence
  Oligonucleotide primer for the detection of SNP TSC0031327
aaacatatatca

SEQ ID NO: 323321 - DNA, 12 bp, Artificial Sequence
  Oligonucleotide primer for the detection of SNP TSC0031327
gaacatatatca

SEQ ID NO: 323322 - DNA, 12 bp, Artificial Sequence
  Oligonucleotide primer for the detection of SNP TSC0031327
cgggtatttttt

SEQ ID NO: 323323 - DNA, 12 bp, Artificial Sequence
  Oligonucleotide primer for the detection of SNP TSC0031331
aaattatttatt

SEQ ID NO: 323324 - DNA, 12 bp, Artificial Sequence
  Oligonucleotide primer for the detection of SNP TSC0031331
tcctttcctcaa

SEQ ID NO: 323325 - DNA, 12 bp, Artificial Sequence
  Oligonucleotide primer for the detection of SNP TSC0031331
gggttatttatt

SEQ ID NO: 323326 - DNA, 12 bp, Artificial Sequence
  Oligonucleotide primer for the detection of SNP TSC0031332
tattcattaacc

SEQ ID NO: 323327 - DNA, 12 bp, Artificial Sequence
  Oligonucleotide primer for the detection of SNP TSC0031332
tagaagagttaa

SEQ ID NO: 323328 - DNA, 12 bp, Artificial Sequence
  Oligonucleotide primer for the detection of SNP TSC0031336
attacaccacta

SEQ ID NO: 323329 - DNA, 12 bp, Artificial Sequence
  Oligonucleotide primer for the detection of SNP TSC0031336
attacgccacta

SEQ ID NO: 323330 - DNA, 12 bp, Artificial Sequence
  Oligonucleotide primer for the detection of SNP TSC0031336
gttatttaagtt

SEQ ID NO: 323331 - DNA, 12 bp, Artificial Sequence
  Oligonucleotide primer for the detection of SNP TSC0031336
attgcgttattg

SEQ ID NO: 323332 - DNA, 12 bp, Artificial Sequence
  Oligonucleotide primer for the detection of SNP TSC0031337
atataataacac

SEQ ID NO: 323333 - DNA, 12 bp, Artificial Sequence
  Oligonucleotide primer for the detection of SNP TSC0031337
atataataacgc

SEQ ID NO: 323334 - DNA, 12 bp, Artificial Sequence
  Oligonucleotide primer for the detection of SNP TSC0031337
gtgtggtggtgt

SEQ ID NO: 323335 - DNA, 12 bp, Artificial Sequence
  Oligonucleotide primer for the detection of SNP TSC0031337
gtgtggtggcgt

SEQ ID NO: 323336 - DNA, 12 bp, Artificial Sequence
  Oligonucleotide primer for the detection of SNP TSC0031339
tacctacaaacc

SEQ ID NO: 323337 - DNA, 12 bp, Artificial Sequence
  Oligonucleotide primer for the detection of SNP TSC0031339
gatgtggtgaga

SEQ ID NO: 323338 - DNA, 12 bp, Artificial Sequence
  Oligonucleotide primer for the detection of SNP TSC0031339
gatgcggtgaga

SEQ ID NO: 323339 - DNA, 12 bp, Artificial Sequence
  Oligonucleotide primer for the detection of SNP TSC0031340
ttatttctccac

SEQ ID NO: 323340 - DNA, 12 bp, Artificial Sequence
  Oligonucleotide primer for the detection of SNP TSC0031340
gttgtatgatag

SEQ ID NO: 323341 - DNA, 12 bp, Artificial Sequence
  Oligonucleotide primer for the detection of SNP TSC0031340
gttgtacgatag

SEQ ID NO: 323342 - DNA, 12 bp, Artificial Sequence
  Oligonucleotide primer for the detection of SNP TSC0031340
attacacaataa

SEQ ID NO: 323343 - DNA, 12 bp, Artificial Sequence
  Oligonucleotide primer for the detection of SNP TSC0031340
attacacgataa

SEQ ID NO: 323344 - DNA, 12 bp, Artificial Sequence
  Oligonucleotide primer for the detection of SNP TSC0031341
aatttccttatc

SEQ ID NO: 323345 - DNA, 12 bp, Artificial Sequence
  Oligonucleotide primer for the detection of SNP TSC0031341
ttctctattaca

SEQ ID NO: 323346 - DNA, 12 bp, Artificial Sequence
  Oligonucleotide primer for the detection of SNP TSC0031342
tatgtgtagggg

SEQ ID NO: 323347 - DNA, 12 bp, Artificial Sequence
  Oligonucleotide primer for the detection of SNP TSC0031342
tacgtgtagggg

SEQ ID NO: 323348 - DNA, 12 bp, Artificial Sequence
  Oligonucleotide primer for the detection of SNP TSC0031342
tatgcgtagggg

SEQ ID NO: 323349 - DNA, 12 bp, Artificial Sequence
  Oligonucleotide primer for the detection of SNP TSC0031342
tacgcgtagggg

SEQ ID NO: 323350 - DNA, 12 bp, Artificial Sequence
  Oligonucleotide primer for the detection of SNP TSC0031343
aacaaccttttt

SEQ ID NO: 323351 - DNA, 12 bp, Artificial Sequence
  Oligonukleotid-Primer
aacgaccttttt

SEQ ID NO: 323352 - DNA, 12 bp, Artificial Sequence
  Oligonucleotide primer for the detection of SNP TSC0031343
attgttgtagga

SEQ ID NO: 323353 - DNA, 12 bp, Artificial Sequence
  Oligonucleotide primer for the detection of SNP TSC0031349
aaaataccaata

SEQ ID NO: 323354 - DNA, 12 bp, Artificial Sequence
  Oligonucleotide primer for the detection of SNP TSC0031349
ttgttttaaagg

SEQ ID NO: 323355 - DNA, 12 bp, Artificial Sequence
  Oligonucleotide primer for the detection of SNP TSC0031349
ctatcttaaaaa

SEQ ID NO: 323356 - DNA, 12 bp, Artificial Sequence
  Oligonucleotide primer for the detection of SNP TSC0031349
gagtgttagtgt

SEQ ID NO: 323357 - DNA, 12 bp, Artificial Sequence
  Oligonucleotide primer for the detection of SNP TSC0031350
ctcttaaatttt

SEQ ID NO: 323358 - DNA, 12 bp, Artificial Sequence
  Oligonucleotide primer for the detection of SNP TSC0031350
taggatttgtgg

SEQ ID NO: 323359 - DNA, 12 bp, Artificial Sequence
  Oligonucleotide primer for the detection of SNP TSC0031351
caaactaaaccc

SEQ ID NO: 323360 - DNA, 12 bp, Artificial Sequence
  Oligonucleotide primer for the detection of SNP TSC0031351
atgtttttagta

SEQ ID NO: 323361 - DNA, 12 bp, Artificial Sequence
  Oligonucleotide primer for the detection of SNP TSC0031353
aatttaaactct

SEQ ID NO: 323362 - DNA, 12 bp, Artificial Sequence
  Oligonucleotide primer for the detection of SNP TSC0031353
aaaccctcccca

SEQ ID NO: 323363 - DNA, 12 bp, Artificial Sequence
  Oligonucleotide primer for the detection of SNP TSC0031353
ggtttgggtttt

SEQ ID NO: 323364 - DNA, 12 bp, Artificial Sequence
  Oligonucleotide primer for the detection of SNP TSC0031356
tcctcccccccc

SEQ ID NO: 323365 - DNA, 12 bp, Artificial Sequence
  Oligonucleotide primer for the detection of SNP TSC0031356
aagaggaggggg

SEQ ID NO: 323366 - DNA, 12 bp, Artificial Sequence
  Oligonucleotide primer for the detection of SNP TSC0031358
tacaatactctc

SEQ ID NO: 323367 - DNA, 12 bp, Artificial Sequence
  Oligonucleotide primer for the detection of SNP TSC0031358
agttttaattag

SEQ ID NO: 323368 - DNA, 12 bp, Artificial Sequence
  Oligonucleotide primer for the detection of SNP TSC0031361
aatcacctaatc

SEQ ID NO: 323369 - DNA, 12 bp, Artificial Sequence
  Oligonucleotide primer for the detection of SNP TSC0031361
taaggtaaattg

SEQ ID NO: 323370 - DNA, 12 bp, Artificial Sequence
  Oligonucleotide primer for the detection of SNP TSC0031361
taaggtaaatcg

SEQ ID NO: 323371 - DNA, 12 bp, Artificial Sequence
  Oligonucleotide primer for the detection of SNP TSC0031362
tctaaaaattcc

SEQ ID NO: 323372 - DNA, 12 bp, Artificial Sequence
  Oligonucleotide primer for the detection of SNP TSC0031362
ttgggatgtttt

SEQ ID NO: 323373 - DNA, 12 bp, Artificial Sequence
  Oligonucleotide primer for the detection of SNP TSC0031362
ctaaaatacccc

SEQ ID NO: 323374 - DNA, 12 bp, Artificial Sequence
  Oligonucleotide primer for the detection of SNP TSC0031363
agaatttatgta

SEQ ID NO: 323375 - DNA, 12 bp, Artificial Sequence
  Oligonucleotide primer for the detection of SNP TSC0031368
atccttaataat

SEQ ID NO: 323376 - DNA, 12 bp, Artificial Sequence
  Oligonucleotide primer for the detection of SNP TSC0031368
gagagtgtttta

SEQ ID NO: 323377 - DNA, 12 bp, Artificial Sequence
  Oligonucleotide primer for the detection of SNP TSC0031368
gagagcgtttta

SEQ ID NO: 323378 - DNA, 12 bp, Artificial Sequence
  Oligonucleotide primer for the detection of SNP TSC0031369
ttgattgaatta

SEQ ID NO: 323379 - DNA, 12 bp, Artificial Sequence
  Oligonucleotide primer for the detection of SNP TSC0031370
tcatcaaaaatt

SEQ ID NO: 323380 - DNA, 12 bp, Artificial Sequence
  Oligonucleotide primer for the detection of SNP TSC0031370
tcgtcaaaaatt

SEQ ID NO: 323381 - DNA, 12 bp, Artificial Sequence
  Oligonucleotide primer for the detection of SNP TSC0031370
ttataatattgg

SEQ ID NO: 323382 - DNA, 12 bp, Artificial Sequence
  Oligonucleotide primer for the detection of SNP TSC0031370
ttataatatcgg

SEQ ID NO: 323383 - DNA, 12 bp, Artificial Sequence
  Oligonucleotide primer for the detection of SNP TSC0031371
ctcaaaccctat

SEQ ID NO: 323384 - DNA, 12 bp, Artificial Sequence
  Oligonucleotide primer for the detection of SNP TSC0031371
ctcgaaccctat

SEQ ID NO: 323385 - DNA, 12 bp, Artificial Sequence
  Oligonucleotide primer for the detection of SNP TSC0031371
atagtatggata

SEQ ID NO: 323386 - DNA, 12 bp, Artificial Sequence
  Oligonucleotide primer for the detection of SNP TSC0031371
atagtacggata

SEQ ID NO: 323387 - DNA, 12 bp, Artificial Sequence
  Oligonucleotide primer for the detection of SNP TSC0031371
acaacacaaaca

SEQ ID NO: 323388 - DNA, 12 bp, Artificial Sequence
  Oligonucleotide primer for the detection of SNP TSC0031371
acaacacgaaca

SEQ ID NO: 323389 - DNA, 12 bp, Artificial Sequence
  Oligonucleotide primer for the detection of SNP TSC0031371
ttcggattttgt

SEQ ID NO: 323390 - DNA, 12 bp, Artificial Sequence
  Oligonucleotide primer for the detection of SNP TSC0031372
tataccaccttc

SEQ ID NO: 323391 - DNA, 12 bp, Artificial Sequence
  Oligonucleotide primer for the detection of SNP TSC0031372
tggtggttaggg

SEQ ID NO: 323392 - DNA, 12 bp, Artificial Sequence
  Oligonucleotide primer for the detection of SNP TSC0031375
catctaaaaatc

SEQ ID NO: 323393 - DNA, 12 bp, Artificial Sequence
  Oligonucleotide primer for the detection of SNP TSC0031375
tatagatatatg

SEQ ID NO: 323394 - DNA, 12 bp, Artificial Sequence
  Oligonucleotide primer for the detection of SNP TSC0031376
ttatattcattt

SEQ ID NO: 323395 - DNA, 12 bp, Artificial Sequence
  Oligonucleotide primer for the detection of SNP TSC0031376
taataatttgga

SEQ ID NO: 323396 - DNA, 12 bp, Artificial Sequence
  Oligonucleotide primer for the detection of SNP TSC0031378
ccatatcctcaa

SEQ ID NO: 323397 - DNA, 12 bp, Artificial Sequence
  Oligonucleotide primer for the detection of SNP TSC0031378
atggatgtttgt

SEQ ID NO: 323398 - DNA, 12 bp, Artificial Sequence
  Oligonucleotide primer for the detection of SNP TSC0031378
ataaatacctat

SEQ ID NO: 323399 - DNA, 12 bp, Artificial Sequence
  Oligonucleotide primer for the detection of SNP TSC0031378
ttatgtttttag

SEQ ID NO: 323400 - DNA, 12 bp, Artificial Sequence
  Oligonucleotide primer for the detection of SNP TSC0031379
atttaattcaca

SEQ ID NO: 323401 - DNA, 12 bp, Artificial Sequence
  Oligonucleotide primer for the detection of SNP TSC0031379
ggatatgagtgg

SEQ ID NO: 323402 - DNA, 12 bp, Artificial Sequence
  Oligonucleotide primer for the detection of SNP TSC0031379
ttagtttatatt

SEQ ID NO: 323403 - DNA, 12 bp, Artificial Sequence
  Oligonucleotide primer for the detection of SNP TSC0031380
tcctaaacccac

SEQ ID NO: 323404 - DNA, 12 bp, Artificial Sequence
  Oligonucleotide primer for the detection of SNP TSC0031380
taggagattgag

SEQ ID NO: 323405 - DNA, 12 bp, Artificial Sequence
  Oligonucleotide primer for the detection of SNP TSC0031380
caaaaaactaaa

SEQ ID NO: 323406 - DNA, 12 bp, Artificial Sequence
  Oligonucleotide primer for the detection of SNP TSC0031382
taaaaatataac

SEQ ID NO: 323407 - DNA, 12 bp, Artificial Sequence
  Oligonucleotide primer for the detection of SNP TSC0031382
taccacctccct

SEQ ID NO: 323408 - DNA, 12 bp, Artificial Sequence
  Oligonucleotide primer for the detection of SNP TSC0031382
tagggatgtgat

SEQ ID NO: 323409 - DNA, 12 bp, Artificial Sequence
  Oligonucleotide primer for the detection of SNP TSC0031383
cctctaaaaaac

SEQ ID NO: 323410 - DNA, 12 bp, Artificial Sequence
  Oligonucleotide primer for the detection of SNP TSC0031383
ggtttgtttatt

SEQ ID NO: 323411 - DNA, 12 bp, Artificial Sequence
  Oligonucleotide primer for the detection of SNP TSC0031383
aatttatttatt

SEQ ID NO: 323412 - DNA, 12 bp, Artificial Sequence
  Oligonucleotide primer for the detection of SNP TSC0031383
tttttggaaggt

SEQ ID NO: 323413 - DNA, 12 bp, Artificial Sequence
  Oligonucleotide primer for the detection of SNP TSC0031384
ataacaaaaacc

SEQ ID NO: 323414 - DNA, 12 bp, Artificial Sequence
  Oligonucleotide primer for the detection of SNP TSC0031384
ttttaagagata

SEQ ID NO: 323415 - DNA, 12 bp, Artificial Sequence
  Oligonucleotide primer for the detection of SNP TSC0031385
tctactcccccc

SEQ ID NO: 323416 - DNA, 12 bp, Artificial Sequence
  Oligonucleotide primer for the detection of SNP TSC0031386
taaataataact

SEQ ID NO: 323417 - DNA, 12 bp, Artificial Sequence
  Oligonucleotide primer for the detection of SNP TSC0031386
attatataattg

SEQ ID NO: 323418 - DNA, 12 bp, Artificial Sequence
  Oligonucleotide primer for the detection of SNP TSC0031387
tcacccctccat

SEQ ID NO: 323419 - DNA, 12 bp, Artificial Sequence
  Oligonucleotide primer for the detection of SNP TSC0031387
tcacccctccgt

SEQ ID NO: 323420 - DNA, 12 bp, Artificial Sequence
  Oligonucleotide primer for the detection of SNP TSC0031387
gtaagggtatgg

SEQ ID NO: 323421 - DNA, 12 bp, Artificial Sequence
  Oligonucleotide primer for the detection of SNP TSC0031388
ttctttcttcct

SEQ ID NO: 323422 - DNA, 12 bp, Artificial Sequence
  Oligonucleotide primer for the detection of SNP TSC0031388
atttttattatg

SEQ ID NO: 323423 - DNA, 12 bp, Artificial Sequence
  Oligonucleotide primer for the detection of SNP TSC0031389
tcccatcctttc

SEQ ID NO: 323424 - DNA, 12 bp, Artificial Sequence
  Oligonucleotide primer for the detection of SNP TSC0031390
aaaccattatac

SEQ ID NO: 323425 - DNA, 12 bp, Artificial Sequence
  Oligonucleotide primer for the detection of SNP TSC0031390
tatatgttaatg

SEQ ID NO: 323426 - DNA, 12 bp, Artificial Sequence
  Oligonucleotide primer for the detection of SNP TSC0031395
gaaaaaaactcc

SEQ ID NO: 323427 - DNA, 12 bp, Artificial Sequence
  Oligonucleotide primer for the detection of SNP TSC0031395
agttttgggtta

SEQ ID NO: 323428 - DNA, 12 bp, Artificial Sequence
  Oligonucleotide primer for the detection of SNP TSC0031395
agtttcgggtta

SEQ ID NO: 323429 - DNA, 12 bp, Artificial Sequence
  Oligonucleotide primer for the detection of SNP TSC0031395
aacctcaaacca

SEQ ID NO: 323430 - DNA, 12 bp, Artificial Sequence
  Oligonucleotide primer for the detection of SNP TSC0031395
aacctcgaacca

SEQ ID NO: 323431 - DNA, 12 bp, Artificial Sequence
  Oligonucleotide primer for the detection of SNP TSC0031395
gggaaaagtttt

SEQ ID NO: 323432 - DNA, 12 bp, Artificial Sequence
  Oligonucleotide primer for the detection of SNP TSC0031398
aacccatctcat

SEQ ID NO: 323433 - DNA, 12 bp, Artificial Sequence
  Oligonucleotide primer for the detection of SNP TSC0031398
tttaaatagaaa

SEQ ID NO: 323434 - DNA, 12 bp, Artificial Sequence
  Oligonucleotide primer for the detection of SNP TSC0031398
ctcaaacaaaaa

SEQ ID NO: 323435 - DNA, 12 bp, Artificial Sequence
  Oligonucleotide primer for the detection of SNP TSC0031398
gtttattttatc

SEQ ID NO: 323436 - DNA, 12 bp, Artificial Sequence
  Oligonucleotide primer for the detection of SNP TSC0031399
aaactataacaa

SEQ ID NO: 323437 - DNA, 12 bp, Artificial Sequence
  Oligonucleotide primer for the detection of SNP TSC0031399
aaactataacga

SEQ ID NO: 323438 - DNA, 12 bp, Artificial Sequence
  Oligonucleotide primer for the detection of SNP TSC0031399
tttttttatgaa

SEQ ID NO: 323439 - DNA, 12 bp, Artificial Sequence
  Oligonucleotide primer for the detection of SNP TSC0031399
tttttttacgaa

SEQ ID NO: 323440 - DNA, 12 bp, Artificial Sequence
  Oligonucleotide primer for the detection of SNP TSC0031399
ctctcccacaaa

SEQ ID NO: 323441 - DNA, 12 bp, Artificial Sequence
  Oligonucleotide primer for the detection of SNP TSC0031399
ctctcccacgaa

SEQ ID NO: 323442 - DNA, 12 bp, Artificial Sequence
  Oligonucleotide primer for the detection of SNP TSC0031399
gaattgtggtgg

SEQ ID NO: 323443 - DNA, 12 bp, Artificial Sequence
  Oligonucleotide primer for the detection of SNP TSC0031399
gaattgtggcgg

SEQ ID NO: 323444 - DNA, 12 bp, Artificial Sequence
  Oligonucleotide primer for the detection of SNP TSC0031402
aaggtatagagt

SEQ ID NO: 323445 - DNA, 12 bp, Artificial Sequence
  Oligonucleotide primer for the detection of SNP TSC0031402
agaataagataa

SEQ ID NO: 323446 - DNA, 12 bp, Artificial Sequence
  Oligonucleotide primer for the detection of SNP TSC0031407
taaatctacttc

SEQ ID NO: 323447 - DNA, 12 bp, Artificial Sequence
  Oligonucleotide primer for the detection of SNP TSC0031407
gtaatttgaagg

SEQ ID NO: 323448 - DNA, 12 bp, Artificial Sequence
  Oligonucleotide primer for the detection of SNP TSC0031407
tgaatttatttt

SEQ ID NO: 323449 - DNA, 12 bp, Artificial Sequence
  Oligonucleotide primer for the detection of SNP TSC0031407
tgaatttatttc

SEQ ID NO: 323450 - DNA, 12 bp, Artificial Sequence
  Oligonucleotide primer for the detection of SNP TSC0031408
acttctcttccc

SEQ ID NO: 323451 - DNA, 12 bp, Artificial Sequence
  Oligonucleotide primer for the detection of SNP TSC0031408
aatttaggggga

SEQ ID NO: 323452 - DNA, 12 bp, Artificial Sequence
  Oligonucleotide primer for the detection of SNP TSC0031409
attattgtttga

SEQ ID NO: 323453 - DNA, 12 bp, Artificial Sequence
  Oligonucleotide primer for the detection of SNP TSC0031409
accattacttaa

SEQ ID NO: 323454 - DNA, 12 bp, Artificial Sequence
  Oligonucleotide primer for the detection of SNP TSC0031409
ttaaagtaagat

SEQ ID NO: 323455 - DNA, 12 bp, Artificial Sequence
  Oligonucleotide primer for the detection of SNP TSC0031410
aggtatgagaat

SEQ ID NO: 323456 - DNA, 12 bp, Artificial Sequence
  Oligonucleotide primer for the detection of SNP TSC0031412
acaaaaaataaa

SEQ ID NO: 323457 - DNA, 12 bp, Artificial Sequence
  Oligonucleotide primer for the detection of SNP TSC0031412
agttggaatttt

SEQ ID NO: 323458 - DNA, 12 bp, Artificial Sequence
  Oligonucleotide primer for the detection of SNP TSC0031412
aattaaaatttt

SEQ ID NO: 323459 - DNA, 12 bp, Artificial Sequence
  Oligonucleotide primer for the detection of SNP TSC0031412
gtaaggggtaaa

SEQ ID NO: 323460 - DNA, 12 bp, Artificial Sequence
  Oligonucleotide primer for the detection of SNP TSC0031413
ctctactccacc

SEQ ID NO: 323461 - DNA, 12 bp, Artificial Sequence
  Oligonucleotide primer for the detection of SNP TSC0031413
tttaggatttta

SEQ ID NO: 323462 - DNA, 12 bp, Artificial Sequence
  Oligonucleotide primer for the detection of SNP TSC0031413
cccaaaatctca

SEQ ID NO: 323463 - DNA, 12 bp, Artificial Sequence
  Oligonucleotide primer for the detection of SNP TSC0031414
aatataacattt

SEQ ID NO: 323464 - DNA, 12 bp, Artificial Sequence
  Oligonukleotid-Primer
taagttttttgg

SEQ ID NO: 323465 - DNA, 12 bp, Artificial Sequence
  Oligonucleotide primer for the detection of SNP TSC0031416
taatttttatat

SEQ ID NO: 323466 - DNA, 12 bp, Artificial Sequence
  Oligonucleotide primer for the detection of SNP TSC0031417
cctataccacct

SEQ ID NO: 323467 - DNA, 12 bp, Artificial Sequence
  Oligonucleotide primer for the detection of SNP TSC0031417
cctataccgcct

SEQ ID NO: 323468 - DNA, 12 bp, Artificial Sequence
  Oligonukleotid-Primer
gtaaattttatg

SEQ ID NO: 323469 - DNA, 12 bp, Artificial Sequence
  Oligonucleotide primer for the detection of SNP TSC0031420
ataatttcaaat

SEQ ID NO: 323470 - DNA, 12 bp, Artificial Sequence
  Oligonucleotide primer for the detection of SNP TSC0031422
ccatctctacta

SEQ ID NO: 323471 - DNA, 12 bp, Artificial Sequence
  Oligonucleotide primer for the detection of SNP TSC0031422
aattttgtattt

SEQ ID NO: 323472 - DNA, 12 bp, Artificial Sequence
  Oligonukleotid-Primer
aattttatattt

SEQ ID NO: 323473 - DNA, 12 bp, Artificial Sequence
  Oligonucleotide primer for the detection of SNP TSC0031422
ttatttttatta

SEQ ID NO: 323474 - DNA, 12 bp, Artificial Sequence
  Oligonucleotide primer for the detection of SNP TSC0031424
tgaaaatgatat

SEQ ID NO: 323475 - DNA, 12 bp, Artificial Sequence
  Oligonucleotide primer for the detection of SNP TSC0031424
tagggtaggaat

SEQ ID NO: 323476 - DNA, 12 bp, Artificial Sequence
  Oligonukleotid-Primer
tcaaatacatca

SEQ ID NO: 323477 - DNA, 12 bp, Artificial Sequence
  Oligonucleotide primer for the detection of SNP TSC0031425
gatttatgtgat

SEQ ID NO: 323478 - DNA, 12 bp, Artificial Sequence
  Oligonucleotide primer for the detection of SNP TSC0031425
aattcatataat

SEQ ID NO: 323479 - DNA, 12 bp, Artificial Sequence
  Oligonucleotide primer for the detection of SNP TSC0031425
ttaagtatatta

SEQ ID NO: 323480 - DNA, 12 bp, Artificial Sequence
  Oligonucleotide primer for the detection of SNP TSC0031426
ctttactaaata

SEQ ID NO: 323481 - DNA, 12 bp, Artificial Sequence
  Oligonucleotide primer for the detection of SNP TSC0031426
ataattgagtat

SEQ ID NO: 323482 - DNA, 12 bp, Artificial Sequence
  Oligonucleotide primer for the detection of SNP TSC0031426
tacaattaaaca

SEQ ID NO: 323483 - DNA, 12 bp, Artificial Sequence
  Oligonucleotide primer for the detection of SNP TSC0031426
attttgttgagt

SEQ ID NO: 323484 - DNA, 12 bp, Artificial Sequence
  Oligonucleotide primer for the detection of SNP TSC0031428
ttagttagttat

SEQ ID NO: 323485 - DNA, 12 bp, Artificial Sequence
  Oligonucleotide primer for the detection of SNP TSC0031428
ccaaccaactac

SEQ ID NO: 323486 - DNA, 12 bp, Artificial Sequence
  Oligonucleotide primer for the detection of SNP TSC0031428
ggagtaaagtgg

SEQ ID NO: 323487 - DNA, 12 bp, Artificial Sequence
  Oligonucleotide primer for the detection of SNP TSC0031432
tattagtttggg

SEQ ID NO: 323488 - DNA, 12 bp, Artificial Sequence
  Oligonucleotide primer for the detection of SNP TSC0031434
cttactacaaac

SEQ ID NO: 323489 - DNA, 12 bp, Artificial Sequence
  Oligonucleotide primer for the detection of SNP TSC0031434
atttttgatttg

SEQ ID NO: 323490 - DNA, 12 bp, Artificial Sequence
  Oligonucleotide primer for the detection of SNP TSC0031435
tttttataaata

SEQ ID NO: 323491 - DNA, 12 bp, Artificial Sequence
  Oligonucleotide primer for the detection of SNP TSC0031435
tgatggatgatt

SEQ ID NO: 323492 - DNA, 12 bp, Artificial Sequence
  Oligonucleotide primer for the detection of SNP TSC0031435
cgatggatgatt

SEQ ID NO: 323493 - DNA, 12 bp, Artificial Sequence
  Oligonucleotide primer for the detection of SNP TSC0031435
acaataaataac

SEQ ID NO: 323494 - DNA, 12 bp, Artificial Sequence
  Oligonucleotide primer for the detection of SNP TSC0031435
acgataaataac

SEQ ID NO: 323495 - DNA, 12 bp, Artificial Sequence
  Oligonucleotide primer for the detection of SNP TSC0031435
atttttatgaat

SEQ ID NO: 323496 - DNA, 12 bp, Artificial Sequence
  Oligonucleotide primer for the detection of SNP TSC0031436
tcttcttttttt

SEQ ID NO: 323497 - DNA, 12 bp, Artificial Sequence
  Oligonucleotide primer for the detection of SNP TSC0031436
gaattaaaaaaa

SEQ ID NO: 323498 - DNA, 12 bp, Artificial Sequence
  Oligonucleotide primer for the detection of SNP TSC0031437
caccaaccaacc

SEQ ID NO: 323499 - DNA, 12 bp, Artificial Sequence
  Oligonucleotide primer for the detection of SNP TSC0031437
caccaaccgacc

SEQ ID NO: 323500 - DNA, 12 bp, Artificial Sequence
  Oligonucleotide primer for the detection of SNP TSC0031437
caccgaccaacc

SEQ ID NO: 323501 - DNA, 12 bp, Artificial Sequence
  Oligonucleotide primer for the detection of SNP TSC0031437
cgccaaccaacc

SEQ ID NO: 323502 - DNA, 12 bp, Artificial Sequence
  Oligonucleotide primer for the detection of SNP TSC0031437
caccgaccgacc

SEQ ID NO: 323503 - DNA, 12 bp, Artificial Sequence
  Oligonucleotide primer for the detection of SNP TSC0031437
cgccaaccgacc

SEQ ID NO: 323504 - DNA, 12 bp, Artificial Sequence
  Oligonucleotide primer for the detection of SNP TSC0031437
cgccgaccaacc

SEQ ID NO: 323505 - DNA, 12 bp, Artificial Sequence
  Oligonucleotide primer for the detection of SNP TSC0031437
cgccgaccgacc

SEQ ID NO: 323506 - DNA, 12 bp, Artificial Sequence
  Oligonucleotide primer for the detection of SNP TSC0031437
tttttattgttc

SEQ ID NO: 323507 - DNA, 12 bp, Artificial Sequence
  Oligonucleotide primer for the detection of SNP TSC0031437
aacccctcacta

SEQ ID NO: 323508 - DNA, 12 bp, Artificial Sequence
  Oligonucleotide primer for the detection of SNP TSC0031437
tgttggttggtt

SEQ ID NO: 323509 - DNA, 12 bp, Artificial Sequence
  Oligonucleotide primer for the detection of SNP TSC0031437
cgttggttggtt

SEQ ID NO: 323510 - DNA, 12 bp, Artificial Sequence
  Oligonucleotide primer for the detection of SNP TSC0031437
tgtcggttggtt

SEQ ID NO: 323511 - DNA, 12 bp, Artificial Sequence
  Oligonucleotide primer for the detection of SNP TSC0031437
tgttggtcggtt

SEQ ID NO: 323512 - DNA, 12 bp, Artificial Sequence
  Oligonucleotide primer for the detection of SNP TSC0031437
cgtcggttggtt

SEQ ID NO: 323513 - DNA, 12 bp, Artificial Sequence
  Oligonucleotide primer for the detection of SNP TSC0031437
cgttggtcggtt

SEQ ID NO: 323514 - DNA, 12 bp, Artificial Sequence
  Oligonucleotide primer for the detection of SNP TSC0031437
tgtcggtcggtt

SEQ ID NO: 323515 - DNA, 12 bp, Artificial Sequence
  Oligonucleotide primer for the detection of SNP TSC0031437
cgtcggtcggtt

SEQ ID NO: 323516 - DNA, 12 bp, Artificial Sequence
  Oligonucleotide primer for the detection of SNP TSC0031438
caaaccccacac

SEQ ID NO: 323517 - DNA, 12 bp, Artificial Sequence
  Oligonucleotide primer for the detection of SNP TSC0031438
caaaccccgcac

SEQ ID NO: 323518 - DNA, 12 bp, Artificial Sequence
  Oligonucleotide primer for the detection of SNP TSC0031438
cgaaccccacac

SEQ ID NO: 323519 - DNA, 12 bp, Artificial Sequence
  Oligonucleotide primer for the detection of SNP TSC0031438
cgaaccccgcac

SEQ ID NO: 323520 - DNA, 12 bp, Artificial Sequence
  Oligonucleotide primer for the detection of SNP TSC0031438
gttggtggtttt

SEQ ID NO: 323521 - DNA, 12 bp, Artificial Sequence
  Oligonucleotide primer for the detection of SNP TSC0031438
gtcggtggtttt

SEQ ID NO: 323522 - DNA, 12 bp, Artificial Sequence
  Oligonucleotide primer for the detection of SNP TSC0031438
gttggcggtttt

SEQ ID NO: 323523 - DNA, 12 bp, Artificial Sequence
  Oligonucleotide primer for the detection of SNP TSC0031438
gtcggcggtttt

SEQ ID NO: 323524 - DNA, 12 bp, Artificial Sequence
  Oligonucleotide primer for the detection of SNP TSC0031438
gttggtggtttc

SEQ ID NO: 323525 - DNA, 12 bp, Artificial Sequence
  Oligonucleotide primer for the detection of SNP TSC0031438
gtcggtggtttc

SEQ ID NO: 323526 - DNA, 12 bp, Artificial Sequence
  Oligonucleotide primer for the detection of SNP TSC0031438
gttggcggtttc

SEQ ID NO: 323527 - DNA, 12 bp, Artificial Sequence
  Oligonucleotide primer for the detection of SNP TSC0031438
gtcggcggtttc

SEQ ID NO: 323528 - DNA, 12 bp, Artificial Sequence
  Oligonucleotide primer for the detection of SNP TSC0031438
accaacaactcc

SEQ ID NO: 323529 - DNA, 12 bp, Artificial Sequence
  Oligonucleotide primer for the detection of SNP TSC0031438
accaacgactcc

SEQ ID NO: 323530 - DNA, 12 bp, Artificial Sequence
  Oligonucleotide primer for the detection of SNP TSC0031438
accgacaactcc

SEQ ID NO: 323531 - DNA, 12 bp, Artificial Sequence
  Oligonucleotide primer for the detection of SNP TSC0031438
accgacgactcc

SEQ ID NO: 323532 - DNA, 12 bp, Artificial Sequence
  Oligonucleotide primer for the detection of SNP TSC0031438
gggttttgtatt

SEQ ID NO: 323533 - DNA, 12 bp, Artificial Sequence
  Oligonucleotide primer for the detection of SNP TSC0031438
gggtttcgtatt

SEQ ID NO: 323534 - DNA, 12 bp, Artificial Sequence
  Oligonucleotide primer for the detection of SNP TSC0031439
aacccacaaaac

SEQ ID NO: 323535 - DNA, 12 bp, Artificial Sequence
  Oligonucleotide primer for the detection of SNP TSC0031439
agatttggtttg

SEQ ID NO: 323536 - DNA, 12 bp, Artificial Sequence
  Oligonucleotide primer for the detection of SNP TSC0031439
aaacttaaccta

SEQ ID NO: 323537 - DNA, 12 bp, Artificial Sequence
  Oligonucleotide primer for the detection of SNP TSC0031439
aatttatagaat

SEQ ID NO: 323538 - DNA, 12 bp, Artificial Sequence
  Oligonucleotide primer for the detection of SNP TSC0031439
aatttatagaac

SEQ ID NO: 323539 - DNA, 12 bp, Artificial Sequence
  Oligonucleotide primer for the detection of SNP TSC0031441
taatgttgttta

SEQ ID NO: 323540 - DNA, 12 bp, Artificial Sequence
  Oligonucleotide primer for the detection of SNP TSC0031441
taacgttgttta

SEQ ID NO: 323541 - DNA, 12 bp, Artificial Sequence
  Oligonucleotide primer for the detection of SNP TSC0031441
caacactatcca

SEQ ID NO: 323542 - DNA, 12 bp, Artificial Sequence
  Oligonucleotide primer for the detection of SNP TSC0031441
caacgctatcca

SEQ ID NO: 323543 - DNA, 12 bp, Artificial Sequence
  Oligonucleotide primer for the detection of SNP TSC0031441
tttttagaaaag

SEQ ID NO: 323544 - DNA, 12 bp, Artificial Sequence
  Oligonucleotide primer for the detection of SNP TSC0031442
gaatgatataat

SEQ ID NO: 323545 - DNA, 12 bp, Artificial Sequence
  Oligonucleotide primer for the detection of SNP TSC0031442
ataatacaataa

SEQ ID NO: 323546 - DNA, 12 bp, Artificial Sequence
  Oligonucleotide primer for the detection of SNP TSC0031442
aagttttttaaa

SEQ ID NO: 323547 - DNA, 12 bp, Artificial Sequence
  Oligonucleotide primer for the detection of SNP TSC0031443
taacaaatccca

SEQ ID NO: 323548 - DNA, 12 bp, Artificial Sequence
  Oligonucleotide primer for the detection of SNP TSC0031443
taacgaatccca

SEQ ID NO: 323549 - DNA, 12 bp, Artificial Sequence
  Oligonucleotide primer for the detection of SNP TSC0031443
ctactcctcctc

SEQ ID NO: 323550 - DNA, 12 bp, Artificial Sequence
  Oligonucleotide primer for the detection of SNP TSC0031443
taatgaatttta

SEQ ID NO: 323551 - DNA, 12 bp, Artificial Sequence
  Oligonucleotide primer for the detection of SNP TSC0031443
taacgaatttta

SEQ ID NO: 323552 - DNA, 12 bp, Artificial Sequence
  Oligonucleotide primer for the detection of SNP TSC0031444
aacttaacccaa

SEQ ID NO: 323553 - DNA, 12 bp, Artificial Sequence
  Oligonucleotide primer for the detection of SNP TSC0031444
aagtgtttttga

SEQ ID NO: 323554 - DNA, 12 bp, Artificial Sequence
  Oligonucleotide primer for the detection of SNP TSC0031444
aagcgtttttga

SEQ ID NO: 323555 - DNA, 12 bp, Artificial Sequence
  Oligonucleotide primer for the detection of SNP TSC0031444
aaacacttctaa

SEQ ID NO: 323556 - DNA, 12 bp, Artificial Sequence
  Oligonucleotide primer for the detection of SNP TSC0031444
aaacgcttctaa

SEQ ID NO: 323557 - DNA, 12 bp, Artificial Sequence
  Oligonucleotide primer for the detection of SNP TSC0031444
tttggtttagtc

SEQ ID NO: 323558 - DNA, 12 bp, Artificial Sequence
  Oligonucleotide primer for the detection of SNP TSC0031445
acccctctaccc

SEQ ID NO: 323559 - DNA, 12 bp, Artificial Sequence
  Oligonucleotide primer for the detection of SNP TSC0031445
ggtgttttttta

SEQ ID NO: 323560 - DNA, 12 bp, Artificial Sequence
  Oligonucleotide primer for the detection of SNP TSC0031448
aacctcccaatc

SEQ ID NO: 323561 - DNA, 12 bp, Artificial Sequence
  Oligonucleotide primer for the detection of SNP TSC0031448
gtatatagtata

SEQ ID NO: 323562 - DNA, 12 bp, Artificial Sequence
  Oligonucleotide primer for the detection of SNP TSC0031448
atacacaataca

SEQ ID NO: 323563 - DNA, 12 bp, Artificial Sequence
  Oligonucleotide primer for the detection of SNP TSC0031448
agttttttagtt

SEQ ID NO: 323564 - DNA, 12 bp, Artificial Sequence
  Oligonucleotide primer for the detection of SNP TSC0031449
accaactaaaac

SEQ ID NO: 323565 - DNA, 12 bp, Artificial Sequence
  Oligonucleotide primer for the detection of SNP TSC0031449
aaaaggtggtgg

SEQ ID NO: 323566 - DNA, 12 bp, Artificial Sequence
  Oligonucleotide primer for the detection of SNP TSC0031451
ataaaaacattt

SEQ ID NO: 323567 - DNA, 12 bp, Artificial Sequence
  Oligonucleotide primer for the detection of SNP TSC0031451
ataaaaacgttt

SEQ ID NO: 323568 - DNA, 12 bp, Artificial Sequence
  Oligonucleotide primer for the detection of SNP TSC0031451
agaaaatgttta

SEQ ID NO: 323569 - DNA, 12 bp, Artificial Sequence
  Oligonucleotide primer for the detection of SNP TSC0031455
tcaaatcaattc

SEQ ID NO: 323570 - DNA, 12 bp, Artificial Sequence
  Oligonucleotide primer for the detection of SNP TSC0031456
aactccgctttc

SEQ ID NO: 323571 - DNA, 12 bp, Artificial Sequence
  Oligonucleotide primer for the detection of SNP TSC0031456
gaatggcgtgaa

SEQ ID NO: 323572 - DNA, 12 bp, Artificial Sequence
  Oligonucleotide primer for the detection of SNP TSC0031456
aaataacgtaaa

SEQ ID NO: 323573 - DNA, 12 bp, Artificial Sequence
  Oligonucleotide primer for the detection of SNP TSC0031463
ttttttaaaggg

SEQ ID NO: 323574 - DNA, 12 bp, Artificial Sequence
  Oligonucleotide primer for the detection of SNP TSC0031464
tctatctctact

SEQ ID NO: 323575 - DNA, 12 bp, Artificial Sequence
  Oligonucleotide primer for the detection of SNP TSC0031464
gaattgagtgga

SEQ ID NO: 323576 - DNA, 12 bp, Artificial Sequence
  Oligonucleotide primer for the detection of SNP TSC0031465
tttattatataa

SEQ ID NO: 323577 - DNA, 12 bp, Artificial Sequence
  Oligonucleotide primer for the detection of SNP TSC0031465
cccaccacataa

SEQ ID NO: 323578 - DNA, 12 bp, Artificial Sequence
  Oligonucleotide primer for the detection of SNP TSC0031465
gtagtagtaggg

SEQ ID NO: 323579 - DNA, 12 bp, Artificial Sequence
  Oligonucleotide primer for the detection of SNP TSC0031466
ttctttttctac

SEQ ID NO: 323580 - DNA, 12 bp, Artificial Sequence
  Oligonucleotide primer for the detection of SNP TSC0031466
tgattagtttaa

SEQ ID NO: 323581 - DNA, 12 bp, Artificial Sequence
  Oligonucleotide primer for the detection of SNP TSC0031467
tatattataaaa

SEQ ID NO: 323582 - DNA, 12 bp, Artificial Sequence
  Oligonucleotide primer for the detection of SNP TSC0031467
catcctaccctt

SEQ ID NO: 323583 - DNA, 12 bp, Artificial Sequence
  Oligonucleotide primer for the detection of SNP TSC0031467
tatattatgggg

SEQ ID NO: 323584 - DNA, 12 bp, Artificial Sequence
  Oligonucleotide primer for the detection of SNP TSC0031469
atcttactacct

SEQ ID NO: 323585 - DNA, 12 bp, Artificial Sequence
  Oligonucleotide primer for the detection of SNP TSC0031469
gggatgaaggag

SEQ ID NO: 323586 - DNA, 12 bp, Artificial Sequence
  Oligonucleotide primer for the detection of SNP TSC0031470
aatcccccacta

SEQ ID NO: 323587 - DNA, 12 bp, Artificial Sequence
  Oligonucleotide primer for the detection of SNP TSC0031470
tcttacataaat

SEQ ID NO: 323588 - DNA, 12 bp, Artificial Sequence
  Oligonucleotide primer for the detection of SNP TSC0031470
attttttattgt

SEQ ID NO: 323589 - DNA, 12 bp, Artificial Sequence
  Oligonucleotide primer for the detection of SNP TSC0031476
tccacaacctct

SEQ ID NO: 323590 - DNA, 12 bp, Artificial Sequence
  Oligonucleotide primer for the detection of SNP TSC0031476
tccgcaacctct

SEQ ID NO: 323591 - DNA, 12 bp, Artificial Sequence
  Oligonucleotide primer for the detection of SNP TSC0031476
tttttttaggag

SEQ ID NO: 323592 - DNA, 12 bp, Artificial Sequence
  Oligonucleotide primer for the detection of SNP TSC0031477
aatttggggtag

SEQ ID NO: 323593 - DNA, 12 bp, Artificial Sequence
  Oligonucleotide primer for the detection of SNP TSC0031477
aacctaaaacaa

SEQ ID NO: 323594 - DNA, 12 bp, Artificial Sequence
  Oligonucleotide primer for the detection of SNP TSC0031477
gtggggaaggta

SEQ ID NO: 323595 - DNA, 12 bp, Artificial Sequence
  Oligonucleotide primer for the detection of SNP TSC0031478
tacttaaaccca

SEQ ID NO: 323596 - DNA, 12 bp, Artificial Sequence
  Oligonucleotide primer for the detection of SNP TSC0031478
aactcaccacaa

SEQ ID NO: 323597 - DNA, 12 bp, Artificial Sequence
  Oligonucleotide primer for the detection of SNP TSC0031478
gactcaccacaa

SEQ ID NO: 323598 - DNA, 12 bp, Artificial Sequence
  Oligonucleotide primer for the detection of SNP TSC0031478
tgtttgaattta

SEQ ID NO: 323599 - DNA, 12 bp, Artificial Sequence
  Oligonucleotide primer for the detection of SNP TSC0031483
aaaaccttccca

SEQ ID NO: 323600 - DNA, 12 bp, Artificial Sequence
  Oligonucleotide primer for the detection of SNP TSC0031483
agaaatttagat

SEQ ID NO: 323601 - DNA, 12 bp, Artificial Sequence
  Oligonucleotide primer for the detection of SNP TSC0031483
aaaatccaaaca

SEQ ID NO: 323602 - DNA, 12 bp, Artificial Sequence
  Oligonucleotide primer for the detection of SNP TSC0031483
taaaattttttt

SEQ ID NO: 323603 - DNA, 12 bp, Artificial Sequence
  Oligonucleotide primer for the detection of SNP TSC0031485
ccattaaaatac

SEQ ID NO: 323604 - DNA, 12 bp, Artificial Sequence
  Oligonucleotide primer for the detection of SNP TSC0031485
attcaaccccaa

SEQ ID NO: 323605 - DNA, 12 bp, Artificial Sequence
  Oligonucleotide primer for the detection of SNP TSC0031485
ttattgagatgt

SEQ ID NO: 323606 - DNA, 12 bp, Artificial Sequence
  Oligonucleotide primer for the detection of SNP TSC0031492
tcatttaatcca

SEQ ID NO: 323607 - DNA, 12 bp, Artificial Sequence
  Oligonucleotide primer for the detection of SNP TSC0031492
taataaaatggg

SEQ ID NO: 323608 - DNA, 12 bp, Artificial Sequence
  Oligonucleotide primer for the detection of SNP TSC0031492
tatttaatttat

SEQ ID NO: 323609 - DNA, 12 bp, Artificial Sequence
  Oligonucleotide primer for the detection of SNP TSC0031493
ccctttcacccc

SEQ ID NO: 323610 - DNA, 12 bp, Artificial Sequence
  Oligonukleotid-Primer
tagtgttttttg

SEQ ID NO: 323611 - DNA, 12 bp, Artificial Sequence
  Oligonucleotide primer for the detection of SNP TSC0031496
ctcacctcaccc

SEQ ID NO: 323612 - DNA, 12 bp, Artificial Sequence
  Oligonucleotide primer for the detection of SNP TSC0031496
ttttggtttata

SEQ ID NO: 323613 - DNA, 12 bp, Artificial Sequence
  Oligonucleotide primer for the detection of SNP TSC0031497
cccaaatctact

SEQ ID NO: 323614 - DNA, 12 bp, Artificial Sequence
  Oligonukleotid-Primer
aattttagtgga

SEQ ID NO: 323615 - DNA, 12 bp, Artificial Sequence
  Oligonucleotide primer for the detection of SNP TSC0031497
aaccctaataaa

SEQ ID NO: 323616 - DNA, 12 bp, Artificial Sequence
  Oligonucleotide primer for the detection of SNP TSC0031498
ctaaaatctatc

SEQ ID NO: 323617 - DNA, 12 bp, Artificial Sequence
  Oligonucleotide primer for the detection of SNP TSC0031498
taatattagaag

SEQ ID NO: 323618 - DNA, 12 bp, Artificial Sequence
  Oligonukleotid-Primer
accaacatcctc

SEQ ID NO: 323619 - DNA, 12 bp, Artificial Sequence
  Oligonucleotide primer for the detection of SNP TSC0031500
attaaactacta

SEQ ID NO: 323620 - DNA, 12 bp, Artificial Sequence
  Oligonucleotide primer for the detection of SNP TSC0031500
ggaaatagattg

SEQ ID NO: 323621 - DNA, 12 bp, Artificial Sequence
  Oligonucleotide primer for the detection of SNP TSC0031500
aaaaacaaatta

SEQ ID NO: 323622 - DNA, 12 bp, Artificial Sequence
  Oligonucleotide primer for the detection of SNP TSC0031500
taagttgttgtt

SEQ ID NO: 323623 - DNA, 12 bp, Artificial Sequence
  Oligonucleotide primer for the detection of SNP TSC0031503
taaaatatcaat

SEQ ID NO: 323624 - DNA, 12 bp, Artificial Sequence
  Oligonucleotide primer for the detection of SNP TSC0031503
tgaaaagtaatg

SEQ ID NO: 323625 - DNA, 12 bp, Artificial Sequence
  Oligonucleotide primer for the detection of SNP TSC0031504
aaataaaaccct

SEQ ID NO: 323626 - DNA, 12 bp, Artificial Sequence
  Oligonucleotide primer for the detection of SNP TSC0031504
aacttcaaaacc

SEQ ID NO: 323627 - DNA, 12 bp, Artificial Sequence
  Oligonucleotide primer for the detection of SNP TSC0031504
gaatggaatttt

SEQ ID NO: 323628 - DNA, 12 bp, Artificial Sequence
  Oligonucleotide primer for the detection of SNP TSC0031505
aaacttaaaatt

SEQ ID NO: 323629 - DNA, 12 bp, Artificial Sequence
  Oligonucleotide primer for the detection of SNP TSC0031508
cccaaaacaaac

SEQ ID NO: 323630 - DNA, 12 bp, Artificial Sequence
  Oligonucleotide primer for the detection of SNP TSC0031508
cccaaaacgaac

SEQ ID NO: 323631 - DNA, 12 bp, Artificial Sequence
  Oligonucleotide primer for the detection of SNP TSC0031508
ggatgggttagg

SEQ ID NO: 323632 - DNA, 12 bp, Artificial Sequence
  Oligonucleotide primer for the detection of SNP TSC0031510
gtatgttattag

SEQ ID NO: 323633 - DNA, 12 bp, Artificial Sequence
  Oligonucleotide primer for the detection of SNP TSC0031511
taatcacaaaat

SEQ ID NO: 323634 - DNA, 12 bp, Artificial Sequence
  Oligonucleotide primer for the detection of SNP TSC0031511
taatcacgaaat

SEQ ID NO: 323635 - DNA, 12 bp, Artificial Sequence
  Oligonucleotide primer for the detection of SNP TSC0031513
aattaaagttta

SEQ ID NO: 323636 - DNA, 12 bp, Artificial Sequence
  Oligonucleotide primer for the detection of SNP TSC0031516
atccttccataa

SEQ ID NO: 323637 - DNA, 12 bp, Artificial Sequence
  Oligonucleotide primer for the detection of SNP TSC0031516
gttaagttagag

SEQ ID NO: 323638 - DNA, 12 bp, Artificial Sequence
  Oligonucleotide primer for the detection of SNP TSC0031516
accaaatcaaaa

SEQ ID NO: 323639 - DNA, 12 bp, Artificial Sequence
  Oligonucleotide primer for the detection of SNP TSC0031517
ctattccctatc

SEQ ID NO: 323640 - DNA, 12 bp, Artificial Sequence
  Oligonucleotide primer for the detection of SNP TSC0031517
aaagttggagag

SEQ ID NO: 323641 - DNA, 12 bp, Artificial Sequence
  Oligonucleotide primer for the detection of SNP TSC0031518
tatcatacttct

SEQ ID NO: 323642 - DNA, 12 bp, Artificial Sequence
  Oligonucleotide primer for the detection of SNP TSC0031518
gaaggggtgtgg

SEQ ID NO: 323643 - DNA, 12 bp, Artificial Sequence
  Oligonucleotide primer for the detection of SNP TSC0031518
gaaggggcgtgg

SEQ ID NO: 323644 - DNA, 12 bp, Artificial Sequence
  Oligonucleotide primer for the detection of SNP TSC0031519
tacttaaaccta

SEQ ID NO: 323645 - DNA, 12 bp, Artificial Sequence
  Oligonucleotide primer for the detection of SNP TSC0031519
aatttttgtttc

SEQ ID NO: 323646 - DNA, 12 bp, Artificial Sequence
  Oligonucleotide primer for the detection of SNP TSC0031520
ataacattaact

SEQ ID NO: 323647 - DNA, 12 bp, Artificial Sequence
  Oligonucleotide primer for the detection of SNP TSC0031520
atttattagatg

SEQ ID NO: 323648 - DNA, 12 bp, Artificial Sequence
  Oligonucleotide primer for the detection of SNP TSC0031520
acccatcaaata

SEQ ID NO: 323649 - DNA, 12 bp, Artificial Sequence
  Oligonucleotide primer for the detection of SNP TSC0031520
atgatattaatt

SEQ ID NO: 323650 - DNA, 12 bp, Artificial Sequence
  Oligonucleotide primer for the detection of SNP TSC0031523
cactatcaccca

SEQ ID NO: 323651 - DNA, 12 bp, Artificial Sequence
  Oligonucleotide primer for the detection of SNP TSC0031523
cactatcgccca

SEQ ID NO: 323652 - DNA, 12 bp, Artificial Sequence
  Oligonucleotide primer for the detection of SNP TSC0031523
ttattgttgttt

SEQ ID NO: 323653 - DNA, 12 bp, Artificial Sequence
  Oligonucleotide primer for the detection of SNP TSC0031523
ttattgtcgttt

SEQ ID NO: 323654 - DNA, 12 bp, Artificial Sequence
  Oligonucleotide primer for the detection of SNP TSC0031524
tattaaaatttc

SEQ ID NO: 323655 - DNA, 12 bp, Artificial Sequence
  Oligonucleotide primer for the detection of SNP TSC0031524
acatttaaccta

SEQ ID NO: 323656 - DNA, 12 bp, Artificial Sequence
  Oligonucleotide primer for the detection of SNP TSC0031524
tattggaatttt

SEQ ID NO: 323657 - DNA, 12 bp, Artificial Sequence
  Oligonucleotide primer for the detection of SNP TSC0031525
ataattttaaac

SEQ ID NO: 323658 - DNA, 12 bp, Artificial Sequence
  Oligonucleotide primer for the detection of SNP TSC0031525
ggaagaagttaa

SEQ ID NO: 323659 - DNA, 12 bp, Artificial Sequence
  Oligonucleotide primer for the detection of SNP TSC0031525
ataattttagat

SEQ ID NO: 323660 - DNA, 12 bp, Artificial Sequence
  Oligonucleotide primer for the detection of SNP TSC0031526
aacaatttcaaa

SEQ ID NO: 323661 - DNA, 12 bp, Artificial Sequence
  Oligonucleotide primer for the detection of SNP TSC0031526
ttatgttttgtg

SEQ ID NO: 323662 - DNA, 12 bp, Artificial Sequence
  Oligonucleotide primer for the detection of SNP TSC0031526
ccatattctata

SEQ ID NO: 323663 - DNA, 12 bp, Artificial Sequence
  Oligonucleotide primer for the detection of SNP TSC0031526
taagtaatttta

SEQ ID NO: 323664 - DNA, 12 bp, Artificial Sequence
  Oligonucleotide primer for the detection of SNP TSC0031527
cataattcttac

SEQ ID NO: 323665 - DNA, 12 bp, Artificial Sequence
  Oligonucleotide primer for the detection of SNP TSC0031527
gttgtaaaaaat

SEQ ID NO: 323666 - DNA, 12 bp, Artificial Sequence
  Oligonucleotide primer for the detection of SNP TSC0031527
gttgtaaaaaac

SEQ ID NO: 323667 - DNA, 12 bp, Artificial Sequence
  Oligonucleotide primer for the detection of SNP TSC0031534
cccaacctaacc

SEQ ID NO: 323668 - DNA, 12 bp, Artificial Sequence
  Oligonucleotide primer for the detection of SNP TSC0031534
taggagttagtg

SEQ ID NO: 323669 - DNA, 12 bp, Artificial Sequence
  Oligonucleotide primer for the detection of SNP TSC0031534
caaaaaccaata

SEQ ID NO: 323670 - DNA, 12 bp, Artificial Sequence
  Oligonucleotide primer for the detection of SNP TSC0031535
aaatttatgtag

SEQ ID NO: 323671 - DNA, 12 bp, Artificial Sequence
  Oligonucleotide primer for the detection of SNP TSC0031536
atcaatccaaca

SEQ ID NO: 323672 - DNA, 12 bp, Artificial Sequence
  Oligonucleotide primer for the detection of SNP TSC0031536
tgtgtttatatt

SEQ ID NO: 323673 - DNA, 12 bp, Artificial Sequence
  Oligonucleotide primer for the detection of SNP TSC0031536
tatactcacatt

SEQ ID NO: 323674 - DNA, 12 bp, Artificial Sequence
  Oligonucleotide primer for the detection of SNP TSC0031536
gttagtttaata

SEQ ID NO: 323675 - DNA, 12 bp, Artificial Sequence
  Oligonucleotide primer for the detection of SNP TSC0031537
ataaacataaca

SEQ ID NO: 323676 - DNA, 12 bp, Artificial Sequence
  Oligonucleotide primer for the detection of SNP TSC0031537
ttcggatttgtt

SEQ ID NO: 323677 - DNA, 12 bp, Artificial Sequence
  Oligonucleotide primer for the detection of SNP TSC0031537
tttggatttgtc

SEQ ID NO: 323678 - DNA, 12 bp, Artificial Sequence
  Oligonucleotide primer for the detection of SNP TSC0031537
ttcggatttgtc

SEQ ID NO: 323679 - DNA, 12 bp, Artificial Sequence
  Oligonucleotide primer for the detection of SNP TSC0031537
tactcaaattta

SEQ ID NO: 323680 - DNA, 12 bp, Artificial Sequence
  Oligonucleotide primer for the detection of SNP TSC0031537
tactcgaattta

SEQ ID NO: 323681 - DNA, 12 bp, Artificial Sequence
  Oligonucleotide primer for the detection of SNP TSC0031537
tggatatgatat

SEQ ID NO: 323682 - DNA, 12 bp, Artificial Sequence
  Oligonucleotide primer for the detection of SNP TSC0031544
taacctaataac

SEQ ID NO: 323683 - DNA, 12 bp, Artificial Sequence
  Oligonucleotide primer for the detection of SNP TSC0031544
gaggaaaaggtg

SEQ ID NO: 323684 - DNA, 12 bp, Artificial Sequence
  Oligonucleotide primer for the detection of SNP TSC0031545
caaatattaact

SEQ ID NO: 323685 - DNA, 12 bp, Artificial Sequence
  Oligonucleotide primer for the detection of SNP TSC0031546
aacaaatattaa

SEQ ID NO: 323686 - DNA, 12 bp, Artificial Sequence
  Oligonucleotide primer for the detection of SNP TSC0031546
ttagttttatat

SEQ ID NO: 323687 - DNA, 12 bp, Artificial Sequence
  Oligonucleotide primer for the detection of SNP TSC0031546
taatttcatata

SEQ ID NO: 323688 - DNA, 12 bp, Artificial Sequence
  Oligonucleotide primer for the detection of SNP TSC0031546
aataaatattga

SEQ ID NO: 323689 - DNA, 12 bp, Artificial Sequence
  Oligonucleotide primer for the detection of SNP TSC0031547
aaatttcactct

SEQ ID NO: 323690 - DNA, 12 bp, Artificial Sequence
  Oligonucleotide primer for the detection of SNP TSC0031547
gagttttatttt

SEQ ID NO: 323691 - DNA, 12 bp, Artificial Sequence
  Oligonucleotide primer for the detection of SNP TSC0031548
ctacaaacatac

SEQ ID NO: 323692 - DNA, 12 bp, Artificial Sequence
  Oligonucleotide primer for the detection of SNP TSC0031548
ctacaaacgtac

SEQ ID NO: 323693 - DNA, 12 bp, Artificial Sequence
  Oligonucleotide primer for the detection of SNP TSC0031548
ttgggtgtagtg

SEQ ID NO: 323694 - DNA, 12 bp, Artificial Sequence
  Oligonucleotide primer for the detection of SNP TSC0031548
ttgggcgtagtg

SEQ ID NO: 323695 - DNA, 12 bp, Artificial Sequence
  Oligonucleotide primer for the detection of SNP TSC0031549
ctcacataacat

SEQ ID NO: 323696 - DNA, 12 bp, Artificial Sequence
  Oligonucleotide primer for the detection of SNP TSC0031549
ctcgcataacat

SEQ ID NO: 323697 - DNA, 12 bp, Artificial Sequence
  Oligonucleotide primer for the detection of SNP TSC0031549
gttaatttgtga

SEQ ID NO: 323698 - DNA, 12 bp, Artificial Sequence
  Oligonucleotide primer for the detection of SNP TSC0031549
tttgtatggtat

SEQ ID NO: 323699 - DNA, 12 bp, Artificial Sequence
  Oligonucleotide primer for the detection of SNP TSC0031549
ttcgtatggtat

SEQ ID NO: 323700 - DNA, 12 bp, Artificial Sequence
  Oligonucleotide primer for the detection of SNP TSC0031550
aatatttaccac

SEQ ID NO: 323701 - DNA, 12 bp, Artificial Sequence
  Oligonucleotide primer for the detection of SNP TSC0031550
gattaatgttat

SEQ ID NO: 323702 - DNA, 12 bp, Artificial Sequence
  Oligonucleotide primer for the detection of SNP TSC0031550
aatcaataccat

SEQ ID NO: 323703 - DNA, 12 bp, Artificial Sequence
  Oligonucleotide primer for the detection of SNP TSC0031550
agtatttgttat

SEQ ID NO: 323704 - DNA, 12 bp, Artificial Sequence
  Oligonucleotide primer for the detection of SNP TSC0031551
tctatccacatt

SEQ ID NO: 323705 - DNA, 12 bp, Artificial Sequence
  Oligonucleotide primer for the detection of SNP TSC0031551
ataaacacttaa

SEQ ID NO: 323706 - DNA, 12 bp, Artificial Sequence
  Oligonucleotide primer for the detection of SNP TSC0031552
tcatcaaccaac

SEQ ID NO: 323707 - DNA, 12 bp, Artificial Sequence
  Oligonucleotide primer for the detection of SNP TSC0031552
tttgagaggtag

SEQ ID NO: 323708 - DNA, 12 bp, Artificial Sequence
  Oligonucleotide primer for the detection of SNP TSC0031555
ctctaaactaat

SEQ ID NO: 323709 - DNA, 12 bp, Artificial Sequence
  Oligonucleotide primer for the detection of SNP TSC0031555
tggatagagagt

SEQ ID NO: 323710 - DNA, 12 bp, Artificial Sequence
  Oligonucleotide primer for the detection of SNP TSC0031555
ttttggattggt

SEQ ID NO: 323711 - DNA, 12 bp, Artificial Sequence
  Oligonucleotide primer for the detection of SNP TSC0031560
ttaaacacacct

SEQ ID NO: 323712 - DNA, 12 bp, Artificial Sequence
  Oligonucleotide primer for the detection of SNP TSC0031560
agtagtgtggaa

SEQ ID NO: 323713 - DNA, 12 bp, Artificial Sequence
  Oligonucleotide primer for the detection of SNP TSC0031561
tcaacacaaact

SEQ ID NO: 323714 - DNA, 12 bp, Artificial Sequence
  Oligonucleotide primer for the detection of SNP TSC0031562
aaatattctaac

SEQ ID NO: 323715 - DNA, 12 bp, Artificial Sequence
  Oligonucleotide primer for the detection of SNP TSC0031562
aggtaatgttgg

SEQ ID NO: 323716 - DNA, 12 bp, Artificial Sequence
  Oligonucleotide primer for the detection of SNP TSC0031562
aggtaacgttgg

SEQ ID NO: 323717 - DNA, 12 bp, Artificial Sequence
  Oligonucleotide primer for the detection of SNP TSC0031563
aataaactttac

SEQ ID NO: 323718 - DNA, 12 bp, Artificial Sequence
  Oligonucleotide primer for the detection of SNP TSC0031563
ttagtaagttta

SEQ ID NO: 323719 - DNA, 12 bp, Artificial Sequence
  Oligonucleotide primer for the detection of SNP TSC0031564
ttgtagtttgat

SEQ ID NO: 323720 - DNA, 12 bp, Artificial Sequence
  Oligonucleotide primer for the detection of SNP TSC0031564
ttacaacttaat

SEQ ID NO: 323721 - DNA, 12 bp, Artificial Sequence
  Oligonucleotide primer for the detection of SNP TSC0031564
taaagagtagat

SEQ ID NO: 323722 - DNA, 12 bp, Artificial Sequence
  Oligonucleotide primer for the detection of SNP TSC0031565
tcccttttaaaa

SEQ ID NO: 323723 - DNA, 12 bp, Artificial Sequence
  Oligonucleotide primer for the detection of SNP TSC0031565
taattttttggg

SEQ ID NO: 323724 - DNA, 12 bp, Artificial Sequence
  Oligonucleotide primer for the detection of SNP TSC0031571
ctataaaatttc

SEQ ID NO: 323725 - DNA, 12 bp, Artificial Sequence
  Oligonucleotide primer for the detection of SNP TSC0031571
ggaaatggggtg

SEQ ID NO: 323726 - DNA, 12 bp, Artificial Sequence
  Oligonucleotide primer for the detection of SNP TSC0031572
tttaaggtttgg

SEQ ID NO: 323727 - DNA, 12 bp, Artificial Sequence
  Oligonucleotide primer for the detection of SNP TSC0031572
tctaaaacctaa

SEQ ID NO: 323728 - DNA, 12 bp, Artificial Sequence
  Oligonucleotide primer for the detection of SNP TSC0031572
gtaggggtaagt

SEQ ID NO: 323729 - DNA, 12 bp, Artificial Sequence
  Oligonucleotide primer for the detection of SNP TSC0031572
gtaggggtaagc

SEQ ID NO: 323730 - DNA, 12 bp, Artificial Sequence
  Oligonucleotide primer for the detection of SNP TSC0031574
cccctcacccac

SEQ ID NO: 323731 - DNA, 12 bp, Artificial Sequence
  Oligonucleotide primer for the detection of SNP TSC0031574
tagagtttttag

SEQ ID NO: 323732 - DNA, 12 bp, Artificial Sequence
  Oligonucleotide primer for the detection of SNP TSC0031576
tatacatttttc

SEQ ID NO: 323733 - DNA, 12 bp, Artificial Sequence
  Oligonucleotide primer for the detection of SNP TSC0031576
ttttaatgttag

SEQ ID NO: 323734 - DNA, 12 bp, Artificial Sequence
  Oligonucleotide primer for the detection of SNP TSC0031577
cctaaacaacaa

SEQ ID NO: 323735 - DNA, 12 bp, Artificial Sequence
  Oligonucleotide primer for the detection of SNP TSC0031577
atagagtttgat

SEQ ID NO: 323736 - DNA, 12 bp, Artificial Sequence
  Oligonucleotide primer for the detection of SNP TSC0031577
tttgggtaataa

SEQ ID NO: 323737 - DNA, 12 bp, Artificial Sequence
  Oligonucleotide primer for the detection of SNP TSC0031578
tcaacccacctt

SEQ ID NO: 323738 - DNA, 12 bp, Artificial Sequence
  Oligonucleotide primer for the detection of SNP TSC0031578
tcaacccgcctt

SEQ ID NO: 323739 - DNA, 12 bp, Artificial Sequence
  Oligonukleotid-Primer
aattttgggagg

SEQ ID NO: 323740 - DNA, 12 bp, Artificial Sequence
  Oligonucleotide primer for the detection of SNP TSC0031579
aattaaaaaccc

SEQ ID NO: 323741 - DNA, 12 bp, Artificial Sequence
  Oligonucleotide primer for the detection of SNP TSC0031580
cccacaaaactc

SEQ ID NO: 323742 - DNA, 12 bp, Artificial Sequence
  Oligonucleotide primer for the detection of SNP TSC0031580
tgtaggtgtagg

SEQ ID NO: 323743 - DNA, 12 bp, Artificial Sequence
  Oligonucleotide primer for the detection of SNP TSC0031581
aaacctaaaata

SEQ ID NO: 323744 - DNA, 12 bp, Artificial Sequence
  Oligonucleotide primer for the detection of SNP TSC0031581
aatgtgagtatt

SEQ ID NO: 323745 - DNA, 12 bp, Artificial Sequence
  Oligonucleotide primer for the detection of SNP TSC0031581
tataaacattaa

SEQ ID NO: 323746 - DNA, 12 bp, Artificial Sequence
  Oligonucleotide primer for the detection of SNP TSC0031581
aaagtttggagt

SEQ ID NO: 323747 - DNA, 12 bp, Artificial Sequence
  Oligonukleotid-Primer
cctaaaataact

SEQ ID NO: 323748 - DNA, 12 bp, Artificial Sequence
  Oligonucleotide primer for the detection of SNP TSC0031585
ggataaaaggaa

SEQ ID NO: 323749 - DNA, 12 bp, Artificial Sequence
  Oligonucleotide primer for the detection of SNP TSC0031586
atattacccaaa

SEQ ID NO: 323750 - DNA, 12 bp, Artificial Sequence
  Oligonucleotide primer for the detection of SNP TSC0031586
atattacccgaa

SEQ ID NO: 323751 - DNA, 12 bp, Artificial Sequence
  Oligonucleotide primer for the detection of SNP TSC0031586
atgttgttcgaa

SEQ ID NO: 323752 - DNA, 12 bp, Artificial Sequence
  Oligonucleotide primer for the detection of SNP TSC0031587
tacaaaatccat

SEQ ID NO: 323753 - DNA, 12 bp, Artificial Sequence
  Oligonucleotide primer for the detection of SNP TSC0031587
agatttgggtaa

SEQ ID NO: 323754 - DNA, 12 bp, Artificial Sequence
  Oligonucleotide primer for the detection of SNP TSC0031587
agattcgggtaa

SEQ ID NO: 323755 - DNA, 12 bp, Artificial Sequence
  Oligonucleotide primer for the detection of SNP TSC0031587
aaattcgaacaa

SEQ ID NO: 323756 - DNA, 12 bp, Artificial Sequence
  Oligonucleotide primer for the detection of SNP TSC0031587
tgtaggatttat

SEQ ID NO: 323757 - DNA, 12 bp, Artificial Sequence
  Oligonucleotide primer for the detection of SNP TSC0031588
aaatctaactct

SEQ ID NO: 323758 - DNA, 12 bp, Artificial Sequence
  Oligonucleotide primer for the detection of SNP TSC0031588
aatgtgaattta

SEQ ID NO: 323759 - DNA, 12 bp, Artificial Sequence
  Oligonucleotide primer for the detection of SNP TSC0031591
tttacttactta

SEQ ID NO: 323760 - DNA, 12 bp, Artificial Sequence
  Oligonucleotide primer for the detection of SNP TSC0031591
tttatggatagt

SEQ ID NO: 323761 - DNA, 12 bp, Artificial Sequence
  Oligonucleotide primer for the detection of SNP TSC0031591
atttataaataa

SEQ ID NO: 323762 - DNA, 12 bp, Artificial Sequence
  Oligonucleotide primer for the detection of SNP TSC0031591
ttgtttgtttat

SEQ ID NO: 323763 - DNA, 12 bp, Artificial Sequence
  Oligonucleotide primer for the detection of SNP TSC0031592
atcctatatact

SEQ ID NO: 323764 - DNA, 12 bp, Artificial Sequence
  Oligonucleotide primer for the detection of SNP TSC0031592
agaaagtgagta

SEQ ID NO: 323765 - DNA, 12 bp, Artificial Sequence
  Oligonucleotide primer for the detection of SNP TSC0031594
ctaccattcatt

SEQ ID NO: 323766 - DNA, 12 bp, Artificial Sequence
  Oligonucleotide primer for the detection of SNP TSC0031594
aagttgttaggg

SEQ ID NO: 323767 - DNA, 12 bp, Artificial Sequence
  Oligonucleotide primer for the detection of SNP TSC0031595
gtaatggcgtga

SEQ ID NO: 323768 - DNA, 12 bp, Artificial Sequence
  Oligonucleotide primer for the detection of SNP TSC0031599
aataaataacat

SEQ ID NO: 323769 - DNA, 12 bp, Artificial Sequence
  Oligonucleotide primer for the detection of SNP TSC0031599
gagaatgttata

SEQ ID NO: 323770 - DNA, 12 bp, Artificial Sequence
  Oligonucleotide primer for the detection of SNP TSC0031602
tcataaaatact

SEQ ID NO: 323771 - DNA, 12 bp, Artificial Sequence
  Oligonucleotide primer for the detection of SNP TSC0031602
gtggttttagta

SEQ ID NO: 323772 - DNA, 12 bp, Artificial Sequence
  Oligonucleotide primer for the detection of SNP TSC0031602
ttatagggtatt

SEQ ID NO: 323773 - DNA, 12 bp, Artificial Sequence
  Oligonucleotide primer for the detection of SNP TSC0031607
agggttttaggt

SEQ ID NO: 323774 - DNA, 12 bp, Artificial Sequence
  Oligonucleotide primer for the detection of SNP TSC0031607
aaaacttcaaat

SEQ ID NO: 323775 - DNA, 12 bp, Artificial Sequence
  Oligonucleotide primer for the detection of SNP TSC0031607
ggtgtagtggta

SEQ ID NO: 323776 - DNA, 12 bp, Artificial Sequence
  Oligonucleotide primer for the detection of SNP TSC0031608
tgggttgtgaga

SEQ ID NO: 323777 - DNA, 12 bp, Artificial Sequence
  Oligonucleotide primer for the detection of SNP TSC0031608
cgggttgtgaga

SEQ ID NO: 323778 - DNA, 12 bp, Artificial Sequence
  Oligonucleotide primer for the detection of SNP TSC0031608
tgggtcgtgaga

SEQ ID NO: 323779 - DNA, 12 bp, Artificial Sequence
  Oligonucleotide primer for the detection of SNP TSC0031608
cgggtcgtgaga

SEQ ID NO: 323780 - DNA, 12 bp, Artificial Sequence
  Oligonucleotide primer for the detection of SNP TSC0031609
actccactcccc

SEQ ID NO: 323781 - DNA, 12 bp, Artificial Sequence
  Oligonucleotide primer for the detection of SNP TSC0031609
ttgaaaataggg

SEQ ID NO: 323782 - DNA, 12 bp, Artificial Sequence
  Oligonucleotide primer for the detection of SNP TSC0031610
ttatatacaaaa

SEQ ID NO: 323783 - DNA, 12 bp, Artificial Sequence
  Oligonucleotide primer for the detection of SNP TSC0031610
gattttaaatgt

SEQ ID NO: 323784 - DNA, 12 bp, Artificial Sequence
  Oligonucleotide primer for the detection of SNP TSC0031610
gattttaaacgt

SEQ ID NO: 323785 - DNA, 12 bp, Artificial Sequence
  Oligonucleotide primer for the detection of SNP TSC0031610
aacctcaaacac

SEQ ID NO: 323786 - DNA, 12 bp, Artificial Sequence
  Oligonucleotide primer for the detection of SNP TSC0031610
aacctcaaacgc

SEQ ID NO: 323787 - DNA, 12 bp, Artificial Sequence
  Oligonucleotide primer for the detection of SNP TSC0031610
gacctcaaacac

SEQ ID NO: 323788 - DNA, 12 bp, Artificial Sequence
  Oligonucleotide primer for the detection of SNP TSC0031610
gacctcaaacgc

SEQ ID NO: 323789 - DNA, 12 bp, Artificial Sequence
  Oligonucleotide primer for the detection of SNP TSC0031610
ttatgtataagg

SEQ ID NO: 323790 - DNA, 12 bp, Artificial Sequence
  Oligonucleotide primer for the detection of SNP TSC0031611
ttattaaaccac

SEQ ID NO: 323791 - DNA, 12 bp, Artificial Sequence
  Oligonucleotide primer for the detection of SNP TSC0031612
cccaactcccct

SEQ ID NO: 323792 - DNA, 12 bp, Artificial Sequence
  Oligonucleotide primer for the detection of SNP TSC0031612
taaaattagttg

SEQ ID NO: 323793 - DNA, 12 bp, Artificial Sequence
  Oligonucleotide primer for the detection of SNP TSC0031613
tatcttctacat

SEQ ID NO: 323794 - DNA, 12 bp, Artificial Sequence
  Oligonucleotide primer for the detection of SNP TSC0031613
taggtatagatt

SEQ ID NO: 323795 - DNA, 12 bp, Artificial Sequence
  Oligonucleotide primer for the detection of SNP TSC0031613
taggtatagatc

SEQ ID NO: 323796 - DNA, 12 bp, Artificial Sequence
  Oligonucleotide primer for the detection of SNP TSC0031613
aaatacaaacca

SEQ ID NO: 323797 - DNA, 12 bp, Artificial Sequence
  Oligonucleotide primer for the detection of SNP TSC0031613
aaatacaaaccg

SEQ ID NO: 323798 - DNA, 12 bp, Artificial Sequence
  Oligonucleotide primer for the detection of SNP TSC0031615
tcattcctccct

SEQ ID NO: 323799 - DNA, 12 bp, Artificial Sequence
  Oligonucleotide primer for the detection of SNP TSC0031615
tcgttcctccct

SEQ ID NO: 323800 - DNA, 12 bp, Artificial Sequence
  Oligonucleotide primer for the detection of SNP TSC0031615
agaataggttta

SEQ ID NO: 323801 - DNA, 12 bp, Artificial Sequence
  Oligonucleotide primer for the detection of SNP TSC0031616
catactccataa

SEQ ID NO: 323802 - DNA, 12 bp, Artificial Sequence
  Oligonucleotide primer for the detection of SNP TSC0031616
gaaaatgattat

SEQ ID NO: 323803 - DNA, 12 bp, Artificial Sequence
  Oligonucleotide primer for the detection of SNP TSC0031616
aaaaataactat

SEQ ID NO: 323804 - DNA, 12 bp, Artificial Sequence
  Oligonucleotide primer for the detection of SNP TSC0031616
atgttttatagt

SEQ ID NO: 323805 - DNA, 12 bp, Artificial Sequence
  Oligonucleotide primer for the detection of SNP TSC0031617
atactaaacaaa

SEQ ID NO: 323806 - DNA, 12 bp, Artificial Sequence
  Oligonucleotide primer for the detection of SNP TSC0031617
agtttgagatta

SEQ ID NO: 323807 - DNA, 12 bp, Artificial Sequence
  Oligonucleotide primer for the detection of SNP TSC0031617
aatttaaaacca

SEQ ID NO: 323808 - DNA, 12 bp, Artificial Sequence
  Oligonucleotide primer for the detection of SNP TSC0031617
atgttggatagg

SEQ ID NO: 323809 - DNA, 12 bp, Artificial Sequence
  Oligonucleotide primer for the detection of SNP TSC0031618
atgtgtttgtag

SEQ ID NO: 323810 - DNA, 12 bp, Artificial Sequence
  Oligonucleotide primer for the detection of SNP TSC0031618
acgtgtttgtag

SEQ ID NO: 323811 - DNA, 12 bp, Artificial Sequence
  Oligonucleotide primer for the detection of SNP TSC0031618
atgcgtttgtag

SEQ ID NO: 323812 - DNA, 12 bp, Artificial Sequence
  Oligonucleotide primer for the detection of SNP TSC0031618
acgcgtttgtag

SEQ ID NO: 323813 - DNA, 12 bp, Artificial Sequence
  Oligonucleotide primer for the detection of SNP TSC0031618
acacacctataa

SEQ ID NO: 323814 - DNA, 12 bp, Artificial Sequence
  Oligonucleotide primer for the detection of SNP TSC0031618
acacgcctataa

SEQ ID NO: 323815 - DNA, 12 bp, Artificial Sequence
  Oligonucleotide primer for the detection of SNP TSC0031618
acgcacctataa

SEQ ID NO: 323816 - DNA, 12 bp, Artificial Sequence
  Oligonucleotide primer for the detection of SNP TSC0031618
acgcgcctataa

SEQ ID NO: 323817 - DNA, 12 bp, Artificial Sequence
  Oligonucleotide primer for the detection of SNP TSC0031620
aacaacaaatca

SEQ ID NO: 323818 - DNA, 12 bp, Artificial Sequence
  Oligonucleotide primer for the detection of SNP TSC0031620
gtaaattaaaat

SEQ ID NO: 323819 - DNA, 12 bp, Artificial Sequence
  Oligonucleotide primer for the detection of SNP TSC0031620
acaaattaaaac

SEQ ID NO: 323820 - DNA, 12 bp, Artificial Sequence
  Oligonucleotide primer for the detection of SNP TSC0031620
aatagtagatta

SEQ ID NO: 323821 - DNA, 12 bp, Artificial Sequence
  Oligonucleotide primer for the detection of SNP TSC0031623
tatctcaatttc

SEQ ID NO: 323822 - DNA, 12 bp, Artificial Sequence
  Oligonucleotide primer for the detection of SNP TSC0031623
ttttatggatga

SEQ ID NO: 323823 - DNA, 12 bp, Artificial Sequence
  Oligonucleotide primer for the detection of SNP TSC0031624
ggttaagtttgt

SEQ ID NO: 323824 - DNA, 12 bp, Artificial Sequence
  Oligonucleotide primer for the detection of SNP TSC0031624
aaccaaacctat

SEQ ID NO: 323825 - DNA, 12 bp, Artificial Sequence
  Oligonucleotide primer for the detection of SNP TSC0031624
gaggagtttttt

SEQ ID NO: 323826 - DNA, 12 bp, Artificial Sequence
  Oligonucleotide primer for the detection of SNP TSC0031625
tattctcaaact

SEQ ID NO: 323827 - DNA, 12 bp, Artificial Sequence
  Oligonucleotide primer for the detection of SNP TSC0031625
tattctcgaact

SEQ ID NO: 323828 - DNA, 12 bp, Artificial Sequence
  Oligonucleotide primer for the detection of SNP TSC0031626
tataaacacaaa

SEQ ID NO: 323829 - DNA, 12 bp, Artificial Sequence
  Oligonucleotide primer for the detection of SNP TSC0031626
tataaacacgaa

SEQ ID NO: 323830 - DNA, 12 bp, Artificial Sequence
  Oligonucleotide primer for the detection of SNP TSC0031626
ttagttgggtgt

SEQ ID NO: 323831 - DNA, 12 bp, Artificial Sequence
  Oligonucleotide primer for the detection of SNP TSC0031626
taggtatgggtt

SEQ ID NO: 323832 - DNA, 12 bp, Artificial Sequence
  Oligonucleotide primer for the detection of SNP TSC0031626
taggtacgggtt

SEQ ID NO: 323833 - DNA, 12 bp, Artificial Sequence
  Oligonucleotide primer for the detection of SNP TSC0031627
tgagttaagatt

SEQ ID NO: 323834 - DNA, 12 bp, Artificial Sequence
  Oligonucleotide primer for the detection of SNP TSC0031627
tgagttaagatc

SEQ ID NO: 323835 - DNA, 12 bp, Artificial Sequence
  Oligonucleotide primer for the detection of SNP TSC0031627
ggagtgtagtga

SEQ ID NO: 323836 - DNA, 12 bp, Artificial Sequence
  Oligonucleotide primer for the detection of SNP TSC0031628
atactcttacct

SEQ ID NO: 323837 - DNA, 12 bp, Artificial Sequence
  Oligonucleotide primer for the detection of SNP TSC0031628
atgtggatgata

SEQ ID NO: 323838 - DNA, 12 bp, Artificial Sequence
  Oligonucleotide primer for the detection of SNP TSC0031628
atataaataaca

SEQ ID NO: 323839 - DNA, 12 bp, Artificial Sequence
  Oligonucleotide primer for the detection of SNP TSC0031628
gtatttttgttt

SEQ ID NO: 323840 - DNA, 12 bp, Artificial Sequence
  Oligonucleotide primer for the detection of SNP TSC0031629
aaatcctacccc

SEQ ID NO: 323841 - DNA, 12 bp, Artificial Sequence
  Oligonucleotide primer for the detection of SNP TSC0031629
aggtgtttttag

SEQ ID NO: 323842 - DNA, 12 bp, Artificial Sequence
  Oligonucleotide primer for the detection of SNP TSC0031637
tggaagaggtta

SEQ ID NO: 323843 - DNA, 12 bp, Artificial Sequence
  Oligonucleotide primer for the detection of SNP TSC0031638
tcaacatttaac

SEQ ID NO: 323844 - DNA, 12 bp, Artificial Sequence
  Oligonukleotid-Primer
aacaactaaaac

SEQ ID NO: 323845 - DNA, 12 bp, Artificial Sequence
  Oligonucleotide primer for the detection of SNP TSC0031640
gattgtagttta

SEQ ID NO: 323846 - DNA, 12 bp, Artificial Sequence
  Oligonucleotide primer for the detection of SNP TSC0031643
ttaaaatttcac

SEQ ID NO: 323847 - DNA, 12 bp, Artificial Sequence
  Oligonucleotide primer for the detection of SNP TSC0031644
tactataaattt

SEQ ID NO: 323848 - DNA, 12 bp, Artificial Sequence
  Oligonucleotide primer for the detection of SNP TSC0031645
caataactccct

SEQ ID NO: 323849 - DNA, 12 bp, Artificial Sequence
  Oligonucleotide primer for the detection of SNP TSC0031645
agatattaggga

SEQ ID NO: 323850 - DNA, 12 bp, Artificial Sequence
  Oligonucleotide primer for the detection of SNP TSC0031646
ttttaacctccc

SEQ ID NO: 323851 - DNA, 12 bp, Artificial Sequence
  Oligonucleotide primer for the detection of SNP TSC0031646
ttgttgagttga

SEQ ID NO: 323852 - DNA, 12 bp, Artificial Sequence
  Oligonukleotid-Primer
ttgtcgagttga

SEQ ID NO: 323853 - DNA, 12 bp, Artificial Sequence
  Oligonucleotide primer for the detection of SNP TSC0031646
ttaccaaactaa

SEQ ID NO: 323854 - DNA, 12 bp, Artificial Sequence
  Oligonucleotide primer for the detection of SNP TSC0031646
ttaccgaactaa

SEQ ID NO: 323855 - DNA, 12 bp, Artificial Sequence
  Oligonucleotide primer for the detection of SNP TSC0031647
atcaacctcaac

SEQ ID NO: 323856 - DNA, 12 bp, Artificial Sequence
  Oligonucleotide primer for the detection of SNP TSC0031647
atcgacctcaac

SEQ ID NO: 323857 - DNA, 12 bp, Artificial Sequence
  Oligonucleotide primer for the detection of SNP TSC0031647
tttgtgttgagt

SEQ ID NO: 323858 - DNA, 12 bp, Artificial Sequence
  Oligonucleotide primer for the detection of SNP TSC0031647
cctatattaaat

SEQ ID NO: 323859 - DNA, 12 bp, Artificial Sequence
  Oligonucleotide primer for the detection of SNP TSC0031647
attgattttagt

SEQ ID NO: 323860 - DNA, 12 bp, Artificial Sequence
  Oligonucleotide primer for the detection of SNP TSC0031647
atcgattttagt

SEQ ID NO: 323861 - DNA, 12 bp, Artificial Sequence
  Oligonucleotide primer for the detection of SNP TSC0031648
ataataaatcta

SEQ ID NO: 323862 - DNA, 12 bp, Artificial Sequence
  Oligonucleotide primer for the detection of SNP TSC0031648
agagaagaagga

SEQ ID NO: 323863 - DNA, 12 bp, Artificial Sequence
  Oligonucleotide primer for the detection of SNP TSC0031648
aatggtaggttt

SEQ ID NO: 323864 - DNA, 12 bp, Artificial Sequence
  Oligonucleotide primer for the detection of SNP TSC0031649
aatctaactcta

SEQ ID NO: 323865 - DNA, 12 bp, Artificial Sequence
  Oligonucleotide primer for the detection of SNP TSC0031649
attggtaaatag

SEQ ID NO: 323866 - DNA, 12 bp, Artificial Sequence
  Oligonucleotide primer for the detection of SNP TSC0031649
actaacaaataa

SEQ ID NO: 323867 - DNA, 12 bp, Artificial Sequence
  Oligonucleotide primer for the detection of SNP TSC0031650
cactttcttctt

SEQ ID NO: 323868 - DNA, 12 bp, Artificial Sequence
  Oligonucleotide primer for the detection of SNP TSC0031652
caaaacccttcc

SEQ ID NO: 323869 - DNA, 12 bp, Artificial Sequence
  Oligonucleotide primer for the detection of SNP TSC0031652
ttggatagtgat

SEQ ID NO: 323870 - DNA, 12 bp, Artificial Sequence
  Oligonucleotide primer for the detection of SNP TSC0031652
ttggatagtgac

SEQ ID NO: 323871 - DNA, 12 bp, Artificial Sequence
  Oligonucleotide primer for the detection of SNP TSC0031654
ataaaactactt

SEQ ID NO: 323872 - DNA, 12 bp, Artificial Sequence
  Oligonucleotide primer for the detection of SNP TSC0031654
taattagtttta

SEQ ID NO: 323873 - DNA, 12 bp, Artificial Sequence
  Oligonucleotide primer for the detection of SNP TSC0031657
taaaataaccca

SEQ ID NO: 323874 - DNA, 12 bp, Artificial Sequence
  Oligonucleotide primer for the detection of SNP TSC0031657
cctttcaactca

SEQ ID NO: 323875 - DNA, 12 bp, Artificial Sequence
  Oligonucleotide primer for the detection of SNP TSC0031657
ggggtggtttat

SEQ ID NO: 323876 - DNA, 12 bp, Artificial Sequence
  Oligonucleotide primer for the detection of SNP TSC0031658
accaatacaaac

SEQ ID NO: 323877 - DNA, 12 bp, Artificial Sequence
  Oligonucleotide primer for the detection of SNP TSC0031658
accaatacgaac

SEQ ID NO: 323878 - DNA, 12 bp, Artificial Sequence
  Oligonucleotide primer for the detection of SNP TSC0031658
accgatacaaac

SEQ ID NO: 323879 - DNA, 12 bp, Artificial Sequence
  Oligonucleotide primer for the detection of SNP TSC0031658
accgatacgaac

SEQ ID NO: 323880 - DNA, 12 bp, Artificial Sequence
  Oligonucleotide primer for the detection of SNP TSC0031658
tttttttaagta

SEQ ID NO: 323881 - DNA, 12 bp, Artificial Sequence
  Oligonucleotide primer for the detection of SNP TSC0031658
ctccttcaaaca

SEQ ID NO: 323882 - DNA, 12 bp, Artificial Sequence
  Oligonucleotide primer for the detection of SNP TSC0031658
gttgatgtgggt

SEQ ID NO: 323883 - DNA, 12 bp, Artificial Sequence
  Oligonucleotide primer for the detection of SNP TSC0031658
gtcgatgtgggt

SEQ ID NO: 323884 - DNA, 12 bp, Artificial Sequence
  Oligonucleotide primer for the detection of SNP TSC0031658
gttgatgcgggt

SEQ ID NO: 323885 - DNA, 12 bp, Artificial Sequence
  Oligonucleotide primer for the detection of SNP TSC0031658
gtcgatgcgggt

SEQ ID NO: 323886 - DNA, 12 bp, Artificial Sequence
  Oligonucleotide primer for the detection of SNP TSC0031661
ggtggggtttgg

SEQ ID NO: 323887 - DNA, 12 bp, Artificial Sequence
  Oligonucleotide primer for the detection of SNP TSC0031661
ggcggggtttgg

SEQ ID NO: 323888 - DNA, 12 bp, Artificial Sequence
  Oligonucleotide primer for the detection of SNP TSC0031669
cacaaactacac

SEQ ID NO: 323889 - DNA, 12 bp, Artificial Sequence
  Oligonucleotide primer for the detection of SNP TSC0031670
cacacacacact

SEQ ID NO: 323890 - DNA, 12 bp, Artificial Sequence
  Oligonucleotide primer for the detection of SNP TSC0031670
cacacacacgct

SEQ ID NO: 323891 - DNA, 12 bp, Artificial Sequence
  Oligonucleotide primer for the detection of SNP TSC0031670
cacacacgcact

SEQ ID NO: 323892 - DNA, 12 bp, Artificial Sequence
  Oligonucleotide primer for the detection of SNP TSC0031670
cacacgcacact

SEQ ID NO: 323893 - DNA, 12 bp, Artificial Sequence
  Oligonucleotide primer for the detection of SNP TSC0031670
cgcacacacact

SEQ ID NO: 323894 - DNA, 12 bp, Artificial Sequence
  Oligonucleotide primer for the detection of SNP TSC0031670
cacacacgcgct

SEQ ID NO: 323895 - DNA, 12 bp, Artificial Sequence
  Oligonucleotide primer for the detection of SNP TSC0031670
cacacgcacgct

SEQ ID NO: 323896 - DNA, 12 bp, Artificial Sequence
  Oligonucleotide primer for the detection of SNP TSC0031670
cgcacacacgct

SEQ ID NO: 323897 - DNA, 12 bp, Artificial Sequence
  Oligonucleotide primer for the detection of SNP TSC0031670
cacacgcgcact

SEQ ID NO: 323898 - DNA, 12 bp, Artificial Sequence
  Oligonucleotide primer for the detection of SNP TSC0031670
cgcacacgcact

SEQ ID NO: 323899 - DNA, 12 bp, Artificial Sequence
  Oligonucleotide primer for the detection of SNP TSC0031670
cgcacgcacact

SEQ ID NO: 323900 - DNA, 12 bp, Artificial Sequence
  Oligonucleotide primer for the detection of SNP TSC0031670
cacacgcgcgct

SEQ ID NO: 323901 - DNA, 12 bp, Artificial Sequence
  Oligonucleotide primer for the detection of SNP TSC0031670
cgcacacgcgct

SEQ ID NO: 323902 - DNA, 12 bp, Artificial Sequence
  Oligonucleotide primer for the detection of SNP TSC0031670
cgcacgcacgct

SEQ ID NO: 323903 - DNA, 12 bp, Artificial Sequence
  Oligonucleotide primer for the detection of SNP TSC0031670
cgcacgcgcact

SEQ ID NO: 323904 - DNA, 12 bp, Artificial Sequence
  Oligonucleotide primer for the detection of SNP TSC0031670
cgcacgcgcgct

SEQ ID NO: 323905 - DNA, 12 bp, Artificial Sequence
  Oligonucleotide primer for the detection of SNP TSC0031670
tagtgaagggtg

SEQ ID NO: 323906 - DNA, 12 bp, Artificial Sequence
  Oligonucleotide primer for the detection of SNP TSC0031670
tagcgaagggtg

SEQ ID NO: 323907 - DNA, 12 bp, Artificial Sequence
  Oligonucleotide primer for the detection of SNP TSC0031670
tagtgaagggcg

SEQ ID NO: 323908 - DNA, 12 bp, Artificial Sequence
  Oligonucleotide primer for the detection of SNP TSC0031670
tagcgaagggcg

SEQ ID NO: 323909 - DNA, 12 bp, Artificial Sequence
  Oligonukleotid-Primer
caacaaaaaaca

SEQ ID NO: 323910 - DNA, 12 bp, Artificial Sequence
  Oligonucleotide primer for the detection of SNP TSC0031670
caacaaaaaacg

SEQ ID NO: 323911 - DNA, 12 bp, Artificial Sequence
  Oligonucleotide primer for the detection of SNP TSC0031670
caacgaaaaaca

SEQ ID NO: 323912 - DNA, 12 bp, Artificial Sequence
  Oligonucleotide primer for the detection of SNP TSC0031670
caacgaaaaacg

SEQ ID NO: 323913 - DNA, 12 bp, Artificial Sequence
  Oligonucleotide primer for the detection of SNP TSC0031670
tgtatgtgtgtt

SEQ ID NO: 323914 - DNA, 12 bp, Artificial Sequence
  Oligonucleotide primer for the detection of SNP TSC0031670
cgtatgtgtgtt

SEQ ID NO: 323915 - DNA, 12 bp, Artificial Sequence
  Oligonucleotide primer for the detection of SNP TSC0031670
tgtacgtgtgtt

SEQ ID NO: 323916 - DNA, 12 bp, Artificial Sequence
  Oligonucleotide primer for the detection of SNP TSC0031670
tgtatgcgtgtt

SEQ ID NO: 323917 - DNA, 12 bp, Artificial Sequence
  Oligonucleotide primer for the detection of SNP TSC0031670
tgtatgtgcgtt

SEQ ID NO: 323918 - DNA, 12 bp, Artificial Sequence
  Oligonucleotide primer for the detection of SNP TSC0031670
cgtacgtgtgtt

SEQ ID NO: 323919 - DNA, 12 bp, Artificial Sequence
  Oligonucleotide primer for the detection of SNP TSC0031670
cgtatgcgtgtt

SEQ ID NO: 323920 - DNA, 12 bp, Artificial Sequence
  Oligonucleotide primer for the detection of SNP TSC0031670
cgtatgtgcgtt

SEQ ID NO: 323921 - DNA, 12 bp, Artificial Sequence
  Oligonucleotide primer for the detection of SNP TSC0031670
tgtacgcgtgtt

SEQ ID NO: 323922 - DNA, 12 bp, Artificial Sequence
  Oligonucleotide primer for the detection of SNP TSC0031670
tgtacgtgcgtt

SEQ ID NO: 323923 - DNA, 12 bp, Artificial Sequence
  Oligonucleotide primer for the detection of SNP TSC0031670
tgtatgcgcgtt

SEQ ID NO: 323924 - DNA, 12 bp, Artificial Sequence
  Oligonucleotide primer for the detection of SNP TSC0031670
cgtacgcgtgtt

SEQ ID NO: 323925 - DNA, 12 bp, Artificial Sequence
  Oligonucleotide primer for the detection of SNP TSC0031670
cgtacgtgcgtt

SEQ ID NO: 323926 - DNA, 12 bp, Artificial Sequence
  Oligonucleotide primer for the detection of SNP TSC0031670
cgtatgcgcgtt

SEQ ID NO: 323927 - DNA, 12 bp, Artificial Sequence
  Oligonucleotide primer for the detection of SNP TSC0031670
tgtacgcgcgtt

SEQ ID NO: 323928 - DNA, 12 bp, Artificial Sequence
  Oligonucleotide primer for the detection of SNP TSC0031670
cgtacgcgcgtt

SEQ ID NO: 323929 - DNA, 12 bp, Artificial Sequence
  Oligonucleotide primer for the detection of SNP TSC0031671
taccctctaaat

SEQ ID NO: 323930 - DNA, 12 bp, Artificial Sequence
  Oligonucleotide primer for the detection of SNP TSC0031672
tataatactaca

SEQ ID NO: 323931 - DNA, 12 bp, Artificial Sequence
  Oligonucleotide primer for the detection of SNP TSC0031672
tataatactacg

SEQ ID NO: 323932 - DNA, 12 bp, Artificial Sequence
  Oligonucleotide primer for the detection of SNP TSC0031672
ctctttccactt

SEQ ID NO: 323933 - DNA, 12 bp, Artificial Sequence
  Oligonucleotide primer for the detection of SNP TSC0031672
ttgtggtattat

SEQ ID NO: 323934 - DNA, 12 bp, Artificial Sequence
  Oligonucleotide primer for the detection of SNP TSC0031672
ttgtggtattac

SEQ ID NO: 323935 - DNA, 12 bp, Artificial Sequence
  Oligonucleotide primer for the detection of SNP TSC0031673
gtagtattataa

SEQ ID NO: 323936 - DNA, 12 bp, Artificial Sequence
  Oligonucleotide primer for the detection of SNP TSC0031674
agtggtgtaatt

SEQ ID NO: 323937 - DNA, 12 bp, Artificial Sequence
  Oligonucleotide primer for the detection of SNP TSC0031675
taaaataccctt

SEQ ID NO: 323938 - DNA, 12 bp, Artificial Sequence
  Oligonucleotide primer for the detection of SNP TSC0031675
gataaaagattt

SEQ ID NO: 323939 - DNA, 12 bp, Artificial Sequence
  Oligonucleotide primer for the detection of SNP TSC0031675
aacaaaaaacct

SEQ ID NO: 323940 - DNA, 12 bp, Artificial Sequence
  Oligonucleotide primer for the detection of SNP TSC0031675
tgaaatgttttt

SEQ ID NO: 323941 - DNA, 12 bp, Artificial Sequence
  Oligonucleotide primer for the detection of SNP TSC0031678
gttgtggaggta

SEQ ID NO: 323942 - DNA, 12 bp, Artificial Sequence
  Oligonucleotide primer for the detection of SNP TSC0031679
aactactccacc

SEQ ID NO: 323943 - DNA, 12 bp, Artificial Sequence
  Oligonucleotide primer for the detection of SNP TSC0031679
gttaatttggtg

SEQ ID NO: 323944 - DNA, 12 bp, Artificial Sequence
  Oligonucleotide primer for the detection of SNP TSC0031680
cttcccataaaa

SEQ ID NO: 323945 - DNA, 12 bp, Artificial Sequence
  Oligonucleotide primer for the detection of SNP TSC0031680
tatgtttgtttt

SEQ ID NO: 323946 - DNA, 12 bp, Artificial Sequence
  Oligonucleotide primer for the detection of SNP TSC0031680
catatctacctt

SEQ ID NO: 323947 - DNA, 12 bp, Artificial Sequence
  Oligonucleotide primer for the detection of SNP TSC0031680
ttttttatgggg

SEQ ID NO: 323948 - DNA, 12 bp, Artificial Sequence
  Oligonucleotide primer for the detection of SNP TSC0031682
tatatcccactt

SEQ ID NO: 323949 - DNA, 12 bp, Artificial Sequence
  Oligonucleotide primer for the detection of SNP TSC0031682
taatattgaaaa

SEQ ID NO: 323950 - DNA, 12 bp, Artificial Sequence
  Oligonucleotide primer for the detection of SNP TSC0031682
tgtattttattt

SEQ ID NO: 323951 - DNA, 12 bp, Artificial Sequence
  Oligonucleotide primer for the detection of SNP TSC0031683
caaaaaaacaac

SEQ ID NO: 323952 - DNA, 12 bp, Artificial Sequence
  Oligonucleotide primer for the detection of SNP TSC0031683
ggtattaatata

SEQ ID NO: 323953 - DNA, 12 bp, Artificial Sequence
  Oligonucleotide primer for the detection of SNP TSC0031690
ccacaataacta

SEQ ID NO: 323954 - DNA, 12 bp, Artificial Sequence
  Oligonucleotide primer for the detection of SNP TSC0031690
ccgcaataacta

SEQ ID NO: 323955 - DNA, 12 bp, Artificial Sequence
  Oligonucleotide primer for the detection of SNP TSC0031690
agggagttttgt

SEQ ID NO: 323956 - DNA, 12 bp, Artificial Sequence
  Oligonucleotide primer for the detection of SNP TSC0031691
acactatcctac

SEQ ID NO: 323957 - DNA, 12 bp, Artificial Sequence
  Oligonucleotide primer for the detection of SNP TSC0031691
acgctatcctac

SEQ ID NO: 323958 - DNA, 12 bp, Artificial Sequence
  Oligonucleotide primer for the detection of SNP TSC0031691
gcactatcctac

SEQ ID NO: 323959 - DNA, 12 bp, Artificial Sequence
  Oligonucleotide primer for the detection of SNP TSC0031691
gcgctatcctac

SEQ ID NO: 323960 - DNA, 12 bp, Artificial Sequence
  Oligonucleotide primer for the detection of SNP TSC0031691
ttattgtaggga

SEQ ID NO: 323961 - DNA, 12 bp, Artificial Sequence
  Oligonucleotide primer for the detection of SNP TSC0031691
ttatcgtaggga

SEQ ID NO: 323962 - DNA, 12 bp, Artificial Sequence
  Oligonucleotide primer for the detection of SNP TSC0031691
ctaccacaaaaa

SEQ ID NO: 323963 - DNA, 12 bp, Artificial Sequence
  Oligonucleotide primer for the detection of SNP TSC0031691
ctaccgcaaaaa

SEQ ID NO: 323964 - DNA, 12 bp, Artificial Sequence
  Oligonucleotide primer for the detection of SNP TSC0031691
gtgttgttttgt

SEQ ID NO: 323965 - DNA, 12 bp, Artificial Sequence
  Oligonucleotide primer for the detection of SNP TSC0031691
gcgttgttttgt

SEQ ID NO: 323966 - DNA, 12 bp, Artificial Sequence
  Oligonucleotide primer for the detection of SNP TSC0031694
ataattaataag

SEQ ID NO: 323967 - DNA, 12 bp, Artificial Sequence
  Oligonucleotide primer for the detection of SNP TSC0031695
aattacattttt

SEQ ID NO: 323968 - DNA, 12 bp, Artificial Sequence
  Oligonucleotide primer for the detection of SNP TSC0031695
tatttttgatta

SEQ ID NO: 323969 - DNA, 12 bp, Artificial Sequence
  Oligonucleotide primer for the detection of SNP TSC0031700
ctatcaaccctt

SEQ ID NO: 323970 - DNA, 12 bp, Artificial Sequence
  Oligonucleotide primer for the detection of SNP TSC0031700
agaaagaattcg

SEQ ID NO: 323971 - DNA, 12 bp, Artificial Sequence
  Oligonucleotide primer for the detection of SNP TSC0031703
ccaaattaatta

SEQ ID NO: 323972 - DNA, 12 bp, Artificial Sequence
  Oligonucleotide primer for the detection of SNP TSC0031703
ccgaattaatta

SEQ ID NO: 323973 - DNA, 12 bp, Artificial Sequence
  Oligonucleotide primer for the detection of SNP TSC0031703
ttttctaaatac

SEQ ID NO: 323974 - DNA, 12 bp, Artificial Sequence
  Oligonukleotid-Primer
ttgagttgattg

SEQ ID NO: 323975 - DNA, 12 bp, Artificial Sequence
  Oligonucleotide primer for the detection of SNP TSC0031703
tcgagttgattg

SEQ ID NO: 323976 - DNA, 12 bp, Artificial Sequence
  Oligonucleotide primer for the detection of SNP TSC0031704
tggttgaagaaa

SEQ ID NO: 323977 - DNA, 12 bp, Artificial Sequence
  Oligonucleotide primer for the detection of SNP TSC0031705
cataaccttata

SEQ ID NO: 323978 - DNA, 12 bp, Artificial Sequence
  Oligonukleotid-Primer
agatttaattgt

SEQ ID NO: 323979 - DNA, 12 bp, Artificial Sequence
  Oligonucleotide primer for the detection of SNP TSC0031705
aaaatctaatta

SEQ ID NO: 323980 - DNA, 12 bp, Artificial Sequence
  Oligonucleotide primer for the detection of SNP TSC0031705
tataattttgtg

SEQ ID NO: 323981 - DNA, 12 bp, Artificial Sequence
  Oligonucleotide primer for the detection of SNP TSC0031707
cctaatcaacat

SEQ ID NO: 323982 - DNA, 12 bp, Artificial Sequence
  Oligonukleotid-Primer
ctctacctcaaa

SEQ ID NO: 323983 - DNA, 12 bp, Artificial Sequence
  Oligonucleotide primer for the detection of SNP TSC0031709
tttaaaaatatt

SEQ ID NO: 323984 - DNA, 12 bp, Artificial Sequence
  Oligonucleotide primer for the detection of SNP TSC0031709
atttagatttta

SEQ ID NO: 323985 - DNA, 12 bp, Artificial Sequence
  Oligonucleotide primer for the detection of SNP TSC0031713
tccctctctaac

SEQ ID NO: 323986 - DNA, 12 bp, Artificial Sequence
  Oligonukleotid-Primer
gagagtaagaag

SEQ ID NO: 323987 - DNA, 12 bp, Artificial Sequence
  Oligonucleotide primer for the detection of SNP TSC0031716
agtttttgtata

SEQ ID NO: 323988 - DNA, 12 bp, Artificial Sequence
  Oligonucleotide primer for the detection of SNP TSC0031717
acccaaacacaa

SEQ ID NO: 323989 - DNA, 12 bp, Artificial Sequence
  Oligonucleotide primer for the detection of SNP TSC0031717
gcccaaacacaa

SEQ ID NO: 323990 - DNA, 12 bp, Artificial Sequence
  Oligonukleotid-Primer
ggtgtttgtagt

SEQ ID NO: 323991 - DNA, 12 bp, Artificial Sequence
  Oligonucleotide primer for the detection of SNP TSC0031717
aatacctacaac

SEQ ID NO: 323992 - DNA, 12 bp, Artificial Sequence
  Oligonucleotide primer for the detection of SNP TSC0031717
gtttaggtatag

SEQ ID NO: 323993 - DNA, 12 bp, Artificial Sequence
  Oligonucleotide primer for the detection of SNP TSC0031718
tatattaaaatc

SEQ ID NO: 323994 - DNA, 12 bp, Artificial Sequence
  Oligonukleotid-Primer
caataataaacc

SEQ ID NO: 323995 - DNA, 12 bp, Artificial Sequence
  Oligonucleotide primer for the detection of SNP TSC0031720
tggtttgagttg

SEQ ID NO: 323996 - DNA, 12 bp, Artificial Sequence
  Oligonucleotide primer for the detection of SNP TSC0031722
atccatccatcc

SEQ ID NO: 323997 - DNA, 12 bp, Artificial Sequence
  Oligonucleotide primer for the detection of SNP TSC0031722
gtgttgtaatta

SEQ ID NO: 323998 - DNA, 12 bp, Artificial Sequence
  Oligonucleotide primer for the detection of SNP TSC0031722
gcgttgtaatta

SEQ ID NO: 323999 - DNA, 12 bp, Artificial Sequence
  Oligonucleotide primer for the detection of SNP TSC0031723
ctcccctacccc

SEQ ID NO: 324000 - DNA, 12 bp, Artificial Sequence
  Oligonucleotide primer for the detection of SNP TSC0031723
gttaggtagggg

SEQ ID NO: 324001 - DNA, 12 bp, Artificial Sequence
  Oligonucleotide primer for the detection of SNP TSC0031723
actaaacaaaaa

SEQ ID NO: 324002 - DNA, 12 bp, Artificial Sequence
  Oligonucleotide primer for the detection of SNP TSC0031728
aaatttctaata

SEQ ID NO: 324003 - DNA, 12 bp, Artificial Sequence
  Oligonucleotide primer for the detection of SNP TSC0031728
gtatagtgatgt

SEQ ID NO: 324004 - DNA, 12 bp, Artificial Sequence
  Oligonucleotide primer for the detection of SNP TSC0031728
atataataatat

SEQ ID NO: 324005 - DNA, 12 bp, Artificial Sequence
  Oligonucleotide primer for the detection of SNP TSC0031728
aaatttttgatg

SEQ ID NO: 324006 - DNA, 12 bp, Artificial Sequence
  Oligonucleotide primer for the detection of SNP TSC0031729
caaaaaaaccat

SEQ ID NO: 324007 - DNA, 12 bp, Artificial Sequence
  Oligonucleotide primer for the detection of SNP TSC0031729
ataatatataga

SEQ ID NO: 324008 - DNA, 12 bp, Artificial Sequence
  Oligonucleotide primer for the detection of SNP TSC0031730
tacaaaaaatta

SEQ ID NO: 324009 - DNA, 12 bp, Artificial Sequence
  Oligonucleotide primer for the detection of SNP TSC0031730
attatgtttggt

SEQ ID NO: 324010 - DNA, 12 bp, Artificial Sequence
  Oligonucleotide primer for the detection of SNP TSC0031730
attacgtttggt

SEQ ID NO: 324011 - DNA, 12 bp, Artificial Sequence
  Oligonucleotide primer for the detection of SNP TSC0031730
attatgttcggt

SEQ ID NO: 324012 - DNA, 12 bp, Artificial Sequence
  Oligonucleotide primer for the detection of SNP TSC0031730
attacgttcggt

SEQ ID NO: 324013 - DNA, 12 bp, Artificial Sequence
  Oligonucleotide primer for the detection of SNP TSC0031730
attatgtttggc

SEQ ID NO: 324014 - DNA, 12 bp, Artificial Sequence
  Oligonucleotide primer for the detection of SNP TSC0031730
attacgtttggc

SEQ ID NO: 324015 - DNA, 12 bp, Artificial Sequence
  Oligonucleotide primer for the detection of SNP TSC0031730
attatgttcggc

SEQ ID NO: 324016 - DNA, 12 bp, Artificial Sequence
  Oligonucleotide primer for the detection of SNP TSC0031730
attacgttcggc

SEQ ID NO: 324017 - DNA, 12 bp, Artificial Sequence
  Oligonucleotide primer for the detection of SNP TSC0031735
cttcactcactc

SEQ ID NO: 324018 - DNA, 12 bp, Artificial Sequence
  Oligonucleotide primer for the detection of SNP TSC0031735
cttcactcgctc

SEQ ID NO: 324019 - DNA, 12 bp, Artificial Sequence
  Oligonucleotide primer for the detection of SNP TSC0031735
cttcgctcactc

SEQ ID NO: 324020 - DNA, 12 bp, Artificial Sequence
  Oligonucleotide primer for the detection of SNP TSC0031735
cttcgctcgctc

SEQ ID NO: 324021 - DNA, 12 bp, Artificial Sequence
  Oligonucleotide primer for the detection of SNP TSC0031735
tagttggtatat

SEQ ID NO: 324022 - DNA, 12 bp, Artificial Sequence
  Oligonucleotide primer for the detection of SNP TSC0031735
aactaacacaca

SEQ ID NO: 324023 - DNA, 12 bp, Artificial Sequence
  Oligonucleotide primer for the detection of SNP TSC0031736
ctatctccataa

SEQ ID NO: 324024 - DNA, 12 bp, Artificial Sequence
  Oligonucleotide primer for the detection of SNP TSC0031736
ctatctccgtaa

SEQ ID NO: 324025 - DNA, 12 bp, Artificial Sequence
  Oligonucleotide primer for the detection of SNP TSC0031736
agatttattttt

SEQ ID NO: 324026 - DNA, 12 bp, Artificial Sequence
  Oligonucleotide primer for the detection of SNP TSC0031736
aaatttactctc

SEQ ID NO: 324027 - DNA, 12 bp, Artificial Sequence
  Oligonucleotide primer for the detection of SNP TSC0031736
ttattttcgtaa

SEQ ID NO: 324028 - DNA, 12 bp, Artificial Sequence
  Oligonucleotide primer for the detection of SNP TSC0031738
caccaccgtacc

SEQ ID NO: 324029 - DNA, 12 bp, Artificial Sequence
  Oligonucleotide primer for the detection of SNP TSC0031738
cgccaccgtacc

SEQ ID NO: 324030 - DNA, 12 bp, Artificial Sequence
  Oligonucleotide primer for the detection of SNP TSC0031738
agtttggtgatt

SEQ ID NO: 324031 - DNA, 12 bp, Artificial Sequence
  Oligonucleotide primer for the detection of SNP TSC0031738
aaatttaataac

SEQ ID NO: 324032 - DNA, 12 bp, Artificial Sequence
  Oligonucleotide primer for the detection of SNP TSC0031738
tgttattgtgtc

SEQ ID NO: 324033 - DNA, 12 bp, Artificial Sequence
  Oligonucleotide primer for the detection of SNP TSC0031738
cgttattgtgtc

SEQ ID NO: 324034 - DNA, 12 bp, Artificial Sequence
  Oligonucleotide primer for the detection of SNP TSC0031738
tgttatcgtgtc

SEQ ID NO: 324035 - DNA, 12 bp, Artificial Sequence
  Oligonucleotide primer for the detection of SNP TSC0031738
cgttatcgtgtc

SEQ ID NO: 324036 - DNA, 12 bp, Artificial Sequence
  Oligonucleotide primer for the detection of SNP TSC0031740
aatctatttttt

SEQ ID NO: 324037 - DNA, 12 bp, Artificial Sequence
  Oligonucleotide primer for the detection of SNP TSC0031740
ataaaataaatt

SEQ ID NO: 324038 - DNA, 12 bp, Artificial Sequence
  Oligonucleotide primer for the detection of SNP TSC0031741
aaaatctttccc

SEQ ID NO: 324039 - DNA, 12 bp, Artificial Sequence
  Oligonucleotide primer for the detection of SNP TSC0031741
ttagatatggag

SEQ ID NO: 324040 - DNA, 12 bp, Artificial Sequence
  Oligonucleotide primer for the detection of SNP TSC0031745
tacaattatact

SEQ ID NO: 324041 - DNA, 12 bp, Artificial Sequence
  Oligonucleotide primer for the detection of SNP TSC0031745
tgtttaaataga

SEQ ID NO: 324042 - DNA, 12 bp, Artificial Sequence
  Oligonucleotide primer for the detection of SNP TSC0031746
aatatagaggaa

SEQ ID NO: 324043 - DNA, 12 bp, Artificial Sequence
  Oligonucleotide primer for the detection of SNP TSC0031748
ctctaaccaaca

SEQ ID NO: 324044 - DNA, 12 bp, Artificial Sequence
  Oligonucleotide primer for the detection of SNP TSC0031748
aaatagaggtgt

SEQ ID NO: 324045 - DNA, 12 bp, Artificial Sequence
  Oligonucleotide primer for the detection of SNP TSC0031748
ttttgattaata

SEQ ID NO: 324046 - DNA, 12 bp, Artificial Sequence
  Oligonucleotide primer for the detection of SNP TSC0031751
tactttttaaaa

SEQ ID NO: 324047 - DNA, 12 bp, Artificial Sequence
  Oligonucleotide primer for the detection of SNP TSC0031751
ttgaataagttt

SEQ ID NO: 324048 - DNA, 12 bp, Artificial Sequence
  Oligonucleotide primer for the detection of SNP TSC0031751
ttaaataaatct

SEQ ID NO: 324049 - DNA, 12 bp, Artificial Sequence
  Oligonucleotide primer for the detection of SNP TSC0031751
tattttttaaaa

SEQ ID NO: 324050 - DNA, 12 bp, Artificial Sequence
  Oligonucleotide primer for the detection of SNP TSC0031760
ttttaaacaccc

SEQ ID NO: 324051 - DNA, 12 bp, Artificial Sequence
  Oligonucleotide primer for the detection of SNP TSC0031760
tttttatagtag

SEQ ID NO: 324052 - DNA, 12 bp, Artificial Sequence
  Oligonucleotide primer for the detection of SNP TSC0031760
ccctcacaacaa

SEQ ID NO: 324053 - DNA, 12 bp, Artificial Sequence
  Oligonucleotide primer for the detection of SNP TSC0031761
aataaacattaa

SEQ ID NO: 324054 - DNA, 12 bp, Artificial Sequence
  Oligonucleotide primer for the detection of SNP TSC0031761
gttgaattaaat

SEQ ID NO: 324055 - DNA, 12 bp, Artificial Sequence
  Oligonucleotide primer for the detection of SNP TSC0031761
ctaaattaaata

SEQ ID NO: 324056 - DNA, 12 bp, Artificial Sequence
  Oligonucleotide primer for the detection of SNP TSC0031761
aataagtattaa

SEQ ID NO: 324057 - DNA, 12 bp, Artificial Sequence
  Oligonucleotide primer for the detection of SNP TSC0031768
aaatactaatct

SEQ ID NO: 324058 - DNA, 12 bp, Artificial Sequence
  Oligonucleotide primer for the detection of SNP TSC0031768
ttgtgtatgagg

SEQ ID NO: 324059 - DNA, 12 bp, Artificial Sequence
  Oligonucleotide primer for the detection of SNP TSC0031769
aatcctctaaaa

SEQ ID NO: 324060 - DNA, 12 bp, Artificial Sequence
  Oligonucleotide primer for the detection of SNP TSC0031769
acctctctattc

SEQ ID NO: 324061 - DNA, 12 bp, Artificial Sequence
  Oligonucleotide primer for the detection of SNP TSC0031773
accaaaaaattt

SEQ ID NO: 324062 - DNA, 12 bp, Artificial Sequence
  Oligonucleotide primer for the detection of SNP TSC0031773
accgaaaaattt

SEQ ID NO: 324063 - DNA, 12 bp, Artificial Sequence
  Oligonucleotide primer for the detection of SNP TSC0031773
tttacctaatta

SEQ ID NO: 324064 - DNA, 12 bp, Artificial Sequence
  Oligonucleotide primer for the detection of SNP TSC0031773
ttggagaatttt

SEQ ID NO: 324065 - DNA, 12 bp, Artificial Sequence
  Oligonucleotide primer for the detection of SNP TSC0031773
tcggagaatttt

SEQ ID NO: 324066 - DNA, 12 bp, Artificial Sequence
  Oligonucleotide primer for the detection of SNP TSC0031773
ttggagaatttc

SEQ ID NO: 324067 - DNA, 12 bp, Artificial Sequence
  Oligonukleotid-Primer
tcggagaatttc

SEQ ID NO: 324068 - DNA, 12 bp, Artificial Sequence
  Oligonucleotide primer for the detection of SNP TSC0031774
ccctaaacatta

SEQ ID NO: 324069 - DNA, 12 bp, Artificial Sequence
  Oligonucleotide primer for the detection of SNP TSC0031774
gtagaaattttt

SEQ ID NO: 324070 - DNA, 12 bp, Artificial Sequence
  Oligonucleotide primer for the detection of SNP TSC0031774
ataaaaattctc

SEQ ID NO: 324071 - DNA, 12 bp, Artificial Sequence
  Oligonucleotide primer for the detection of SNP TSC0031774
ttttgaatattg

SEQ ID NO: 324072 - DNA, 12 bp, Artificial Sequence
  Oligonucleotide primer for the detection of SNP TSC0031781
tgataaagttta

SEQ ID NO: 324073 - DNA, 12 bp, Artificial Sequence
  Oligonucleotide primer for the detection of SNP TSC0031782
ttctttaataaa

SEQ ID NO: 324074 - DNA, 12 bp, Artificial Sequence
  Oligonucleotide primer for the detection of SNP TSC0031782
taatagtgtaat

SEQ ID NO: 324075 - DNA, 12 bp, Artificial Sequence
  Oligonucleotide primer for the detection of SNP TSC0031782
caataatataac

SEQ ID NO: 324076 - DNA, 12 bp, Artificial Sequence
  Oligonucleotide primer for the detection of SNP TSC0031782
ttttttgataag

SEQ ID NO: 324077 - DNA, 12 bp, Artificial Sequence
  Oligonucleotide primer for the detection of SNP TSC0031783
aaataaatccac

SEQ ID NO: 324078 - DNA, 12 bp, Artificial Sequence
  Oligonucleotide primer for the detection of SNP TSC0031783
tgttttaattaa

SEQ ID NO: 324079 - DNA, 12 bp, Artificial Sequence
  Oligonucleotide primer for the detection of SNP TSC0031784
ttaccattaatt

SEQ ID NO: 324080 - DNA, 12 bp, Artificial Sequence
  Oligonucleotide primer for the detection of SNP TSC0031784
tattataaaaat

SEQ ID NO: 324081 - DNA, 12 bp, Artificial Sequence
  Oligonucleotide primer for the detection of SNP TSC0031784
ttgttattgatt

SEQ ID NO: 324082 - DNA, 12 bp, Artificial Sequence
  Oligonucleotide primer for the detection of SNP TSC0031792
acctcaaaatct

SEQ ID NO: 324083 - DNA, 12 bp, Artificial Sequence
  Oligonukleotid-Primer
tttgtttgatta

SEQ ID NO: 324084 - DNA, 12 bp, Artificial Sequence
  Oligonucleotide primer for the detection of SNP TSC0031793
aacaaaaaacaa

SEQ ID NO: 324085 - DNA, 12 bp, Artificial Sequence
  Oligonucleotide primer for the detection of SNP TSC0031793
tttagagaattt

SEQ ID NO: 324086 - DNA, 12 bp, Artificial Sequence
  Oligonucleotide primer for the detection of SNP TSC0031793
tacccaaaaaac

SEQ ID NO: 324087 - DNA, 12 bp, Artificial Sequence
  Oligonucleotide primer for the detection of SNP TSC0031793
tgggtaagaggt

SEQ ID NO: 324088 - DNA, 12 bp, Artificial Sequence
  Oligonucleotide primer for the detection of SNP TSC0031793
cgggtaagaggt

SEQ ID NO: 324089 - DNA, 12 bp, Artificial Sequence
  Oligonucleotide primer for the detection of SNP TSC0031794
ttctctatcaat

SEQ ID NO: 324090 - DNA, 12 bp, Artificial Sequence
  Oligonucleotide primer for the detection of SNP TSC0031794
tttaagtttaag

SEQ ID NO: 324091 - DNA, 12 bp, Artificial Sequence
  Oligonucleotide primer for the detection of SNP TSC0031795
ctaatataaaac

SEQ ID NO: 324092 - DNA, 12 bp, Artificial Sequence
  Oligonucleotide primer for the detection of SNP TSC0031795
gtattgtataaa

SEQ ID NO: 324093 - DNA, 12 bp, Artificial Sequence
  Oligonucleotide primer for the detection of SNP TSC0031795
gtatcgtataaa

SEQ ID NO: 324094 - DNA, 12 bp, Artificial Sequence
  Oligonucleotide primer for the detection of SNP TSC0031795
acatcgtataaa

SEQ ID NO: 324095 - DNA, 12 bp, Artificial Sequence
  Oligonucleotide primer for the detection of SNP TSC0031795
ttgatgtgaggt

SEQ ID NO: 324096 - DNA, 12 bp, Artificial Sequence
  Oligonucleotide primer for the detection of SNP TSC0031795
ttgatgtgaggc

SEQ ID NO: 324097 - DNA, 12 bp, Artificial Sequence
  Oligonucleotide primer for the detection of SNP TSC0031797
caaactaattca

SEQ ID NO: 324098 - DNA, 12 bp, Artificial Sequence
  Oligonucleotide primer for the detection of SNP TSC0031797
tttaattagttt

SEQ ID NO: 324099 - DNA, 12 bp, Artificial Sequence
  Oligonucleotide primer for the detection of SNP TSC0031797
tcctaaccaatc

SEQ ID NO: 324100 - DNA, 12 bp, Artificial Sequence
  Oligonucleotide primer for the detection of SNP TSC0031797
ttaggttgattt

SEQ ID NO: 324101 - DNA, 12 bp, Artificial Sequence
  Oligonucleotide primer for the detection of SNP TSC0031798
attaataacatc

SEQ ID NO: 324102 - DNA, 12 bp, Artificial Sequence
  Oligonucleotide primer for the detection of SNP TSC0031798
aaggagtaggga

SEQ ID NO: 324103 - DNA, 12 bp, Artificial Sequence
  Oligonucleotide primer for the detection of SNP TSC0031802
tcaaaattaata

SEQ ID NO: 324104 - DNA, 12 bp, Artificial Sequence
  Oligonucleotide primer for the detection of SNP TSC0031802
taattttctttt

SEQ ID NO: 324105 - DNA, 12 bp, Artificial Sequence
  Oligonucleotide primer for the detection of SNP TSC0031802
ttaaagttgatg

SEQ ID NO: 324106 - DNA, 12 bp, Artificial Sequence
  Oligonucleotide primer for the detection of SNP TSC0031803
ctcaaaaaacaa

SEQ ID NO: 324107 - DNA, 12 bp, Artificial Sequence
  Oligonucleotide primer for the detection of SNP TSC0031803
tttgtttagtag

SEQ ID NO: 324108 - DNA, 12 bp, Artificial Sequence
  Oligonucleotide primer for the detection of SNP TSC0031803
ctacccaacaaa

SEQ ID NO: 324109 - DNA, 12 bp, Artificial Sequence
  Oligonucleotide primer for the detection of SNP TSC0031803
gttttaaggagt

SEQ ID NO: 324110 - DNA, 12 bp, Artificial Sequence
  Oligonucleotide primer for the detection of SNP TSC0031804
ataaagaaagag

SEQ ID NO: 324111 - DNA, 12 bp, Artificial Sequence
  Oligonucleotide primer for the detection of SNP TSC0031804
ggatataagtat

SEQ ID NO: 324112 - DNA, 12 bp, Artificial Sequence
  Oligonucleotide primer for the detection of SNP TSC0031805
tttcttccatcc

SEQ ID NO: 324113 - DNA, 12 bp, Artificial Sequence
  Oligonucleotide primer for the detection of SNP TSC0031806
taaaatcaaaac

SEQ ID NO: 324114 - DNA, 12 bp, Artificial Sequence
  Oligonucleotide primer for the detection of SNP TSC0031806
ttttgggatagg

SEQ ID NO: 324115 - DNA, 12 bp, Artificial Sequence
  Oligonucleotide primer for the detection of SNP TSC0031806
tgagattagaat

SEQ ID NO: 324116 - DNA, 12 bp, Artificial Sequence
  Oligonucleotide primer for the detection of SNP TSC0031807
ctcctaacaatc

SEQ ID NO: 324117 - DNA, 12 bp, Artificial Sequence
  Oligonucleotide primer for the detection of SNP TSC0031807
atgtggaaagta

SEQ ID NO: 324118 - DNA, 12 bp, Artificial Sequence
  Oligonucleotide primer for the detection of SNP TSC0031810
aagtagagttag

SEQ ID NO: 324119 - DNA, 12 bp, Artificial Sequence
  Oligonucleotide primer for the detection of SNP TSC0031811
tcttactcttta

SEQ ID NO: 324120 - DNA, 12 bp, Artificial Sequence
  Oligonucleotide primer for the detection of SNP TSC0031811
attttaccccct

SEQ ID NO: 324121 - DNA, 12 bp, Artificial Sequence
  Oligonucleotide primer for the detection of SNP TSC0031812
tagatgagttat

SEQ ID NO: 324122 - DNA, 12 bp, Artificial Sequence
  Oligonucleotide primer for the detection of SNP TSC0031812
caaataaatcac

SEQ ID NO: 324123 - DNA, 12 bp, Artificial Sequence
  Oligonucleotide primer for the detection of SNP TSC0031812
gatagaggtttg

SEQ ID NO: 324124 - DNA, 12 bp, Artificial Sequence
  Oligonucleotide primer for the detection of SNP TSC0031812
gatagaggttcg

SEQ ID NO: 324125 - DNA, 12 bp, Artificial Sequence
  Oligonucleotide primer for the detection of SNP TSC0031813
tattatctatac

SEQ ID NO: 324126 - DNA, 12 bp, Artificial Sequence
  Oligonucleotide primer for the detection of SNP TSC0031813
tgtttggttgga

SEQ ID NO: 324127 - DNA, 12 bp, Artificial Sequence
  Oligonucleotide primer for the detection of SNP TSC0031814
aatatacaaaat

SEQ ID NO: 324128 - DNA, 12 bp, Artificial Sequence
  Oligonucleotide primer for the detection of SNP TSC0031814
aataagtttata

SEQ ID NO: 324129 - DNA, 12 bp, Artificial Sequence
  Oligonucleotide primer for the detection of SNP TSC0031815
ccacctaaaaat

SEQ ID NO: 324130 - DNA, 12 bp, Artificial Sequence
  Oligonucleotide primer for the detection of SNP TSC0031815
tgtagtggatag

SEQ ID NO: 324131 - DNA, 12 bp, Artificial Sequence
  Oligonucleotide primer for the detection of SNP TSC0031818
ccttccctaaac

SEQ ID NO: 324132 - DNA, 12 bp, Artificial Sequence
  Oligonucleotide primer for the detection of SNP TSC0031818
gtaggggaagtg

SEQ ID NO: 324133 - DNA, 12 bp, Artificial Sequence
  Oligonucleotide primer for the detection of SNP TSC0031819
ccaaccaaaacc

SEQ ID NO: 324134 - DNA, 12 bp, Artificial Sequence
  Oligonucleotide primer for the detection of SNP TSC0031819
aggttttggtta

SEQ ID NO: 324135 - DNA, 12 bp, Artificial Sequence
  Oligonucleotide primer for the detection of SNP TSC0031819
aaatcttaatta

SEQ ID NO: 324136 - DNA, 12 bp, Artificial Sequence
  Oligonucleotide primer for the detection of SNP TSC0031819
ttaattaagatt

SEQ ID NO: 324137 - DNA, 12 bp, Artificial Sequence
  Oligonucleotide primer for the detection of SNP TSC0031820
aaaaaaatcaac

SEQ ID NO: 324138 - DNA, 12 bp, Artificial Sequence
  Oligonucleotide primer for the detection of SNP TSC0031820
gtgtttgaggaa

SEQ ID NO: 324139 - DNA, 12 bp, Artificial Sequence
  Oligonucleotide primer for the detection of SNP TSC0031821
aggtgtttgagg

SEQ ID NO: 324140 - DNA, 12 bp, Artificial Sequence
  Oligonucleotide primer for the detection of SNP TSC0031821
tggagggggtta

SEQ ID NO: 324141 - DNA, 12 bp, Artificial Sequence
  Oligonucleotide primer for the detection of SNP TSC0031822
tttcctaacaaa

SEQ ID NO: 324142 - DNA, 12 bp, Artificial Sequence
  Oligonucleotide primer for the detection of SNP TSC0031822
tttattttaatc

SEQ ID NO: 324143 - DNA, 12 bp, Artificial Sequence
  Oligonucleotide primer for the detection of SNP TSC0031822
ttttttaatagg

SEQ ID NO: 324144 - DNA, 12 bp, Artificial Sequence
  Oligonucleotide primer for the detection of SNP TSC0031823
aaacccaaatct

SEQ ID NO: 324145 - DNA, 12 bp, Artificial Sequence
  Oligonucleotide primer for the detection of SNP TSC0031823
ggaaaagagtgg

SEQ ID NO: 324146 - DNA, 12 bp, Artificial Sequence
  Oligonucleotide primer for the detection of SNP TSC0031827
aggtttaagtga

SEQ ID NO: 324147 - DNA, 12 bp, Artificial Sequence
  Oligonucleotide primer for the detection of SNP TSC0031827
aggtttaagcga

SEQ ID NO: 324148 - DNA, 12 bp, Artificial Sequence
  Oligonucleotide primer for the detection of SNP TSC0031827
tgaggtaggaga

SEQ ID NO: 324149 - DNA, 12 bp, Artificial Sequence
  Oligonucleotide primer for the detection of SNP TSC0031831
catttcaattta

SEQ ID NO: 324150 - DNA, 12 bp, Artificial Sequence
  Oligonucleotide primer for the detection of SNP TSC0031831
aaaaaagtttta

SEQ ID NO: 324151 - DNA, 12 bp, Artificial Sequence
  Oligonucleotide primer for the detection of SNP TSC0031831
tattttaattta

SEQ ID NO: 324152 - DNA, 12 bp, Artificial Sequence
  Oligonucleotide primer for the detection of SNP TSC0031833
gtgagttatgat

SEQ ID NO: 324153 - DNA, 12 bp, Artificial Sequence
  Oligonucleotide primer for the detection of SNP TSC0031833
ataaaccataat

SEQ ID NO: 324154 - DNA, 12 bp, Artificial Sequence
  Oligonucleotide primer for the detection of SNP TSC0031834
caacccaataat

SEQ ID NO: 324155 - DNA, 12 bp, Artificial Sequence
  Oligonucleotide primer for the detection of SNP TSC0031834
cgacccaataat

SEQ ID NO: 324156 - DNA, 12 bp, Artificial Sequence
  Oligonucleotide primer for the detection of SNP TSC0031834
gtgtttttagga

SEQ ID NO: 324157 - DNA, 12 bp, Artificial Sequence
  Oligonucleotide primer for the detection of SNP TSC0031834
atatccccaaaa

SEQ ID NO: 324158 - DNA, 12 bp, Artificial Sequence
  Oligonucleotide primer for the detection of SNP TSC0031834
tggtttagtggt

SEQ ID NO: 324159 - DNA, 12 bp, Artificial Sequence
  Oligonucleotide primer for the detection of SNP TSC0031834
cggtttagtggt

SEQ ID NO: 324160 - DNA, 12 bp, Artificial Sequence
  Oligonucleotide primer for the detection of SNP TSC0031835
taattaactcca

SEQ ID NO: 324161 - DNA, 12 bp, Artificial Sequence
  Oligonucleotide primer for the detection of SNP TSC0031835
tatgtaggtttt

SEQ ID NO: 324162 - DNA, 12 bp, Artificial Sequence
  Oligonucleotide primer for the detection of SNP TSC0031835
tatacaaatcct

SEQ ID NO: 324163 - DNA, 12 bp, Artificial Sequence
  Oligonucleotide primer for the detection of SNP TSC0031835
tagttggtttta

SEQ ID NO: 324164 - DNA, 12 bp, Artificial Sequence
  Oligonucleotide primer for the detection of SNP TSC0031842
ccttcctaaacc

SEQ ID NO: 324165 - DNA, 12 bp, Artificial Sequence
  Oligonucleotide primer for the detection of SNP TSC0031842
aaatagttaggg

SEQ ID NO: 324166 - DNA, 12 bp, Artificial Sequence
  Oligonucleotide primer for the detection of SNP TSC0031843
tcattaattttt

SEQ ID NO: 324167 - DNA, 12 bp, Artificial Sequence
  Oligonucleotide primer for the detection of SNP TSC0031843
agttaagtgttg

SEQ ID NO: 324168 - DNA, 12 bp, Artificial Sequence
  Oligonucleotide primer for the detection of SNP TSC0031843
agttaagcgttg

SEQ ID NO: 324169 - DNA, 12 bp, Artificial Sequence
  Oligonucleotide primer for the detection of SNP TSC0031844
cctaaaattttt

SEQ ID NO: 324170 - DNA, 12 bp, Artificial Sequence
  Oligonucleotide primer for the detection of SNP TSC0031844
attttagataaa

SEQ ID NO: 324171 - DNA, 12 bp, Artificial Sequence
  Oligonucleotide primer for the detection of SNP TSC0031845
aattttcaaacc

SEQ ID NO: 324172 - DNA, 12 bp, Artificial Sequence
  Oligonucleotide primer for the detection of SNP TSC0031845
taaagttttttt

SEQ ID NO: 324173 - DNA, 12 bp, Artificial Sequence
  Oligonucleotide primer for the detection of SNP TSC0031845
taaagttttttc

SEQ ID NO: 324174 - DNA, 12 bp, Artificial Sequence
  Oligonucleotide primer for the detection of SNP TSC0031845
tacacaaaactt

SEQ ID NO: 324175 - DNA, 12 bp, Artificial Sequence
  Oligonucleotide primer for the detection of SNP TSC0031845
agtttttaagtt

SEQ ID NO: 324176 - DNA, 12 bp, Artificial Sequence
  Oligonucleotide primer for the detection of SNP TSC0031846
aatttaattcct

SEQ ID NO: 324177 - DNA, 12 bp, Artificial Sequence
  Oligonucleotide primer for the detection of SNP TSC0031846
attttttataga

SEQ ID NO: 324178 - DNA, 12 bp, Artificial Sequence
  Oligonucleotide primer for the detection of SNP TSC0031847
ggataattttta

SEQ ID NO: 324179 - DNA, 12 bp, Artificial Sequence
  Oligonucleotide primer for the detection of SNP TSC0031850
ctatactcttcc

SEQ ID NO: 324180 - DNA, 12 bp, Artificial Sequence
  Oligonucleotide primer for the detection of SNP TSC0031850
tttttagggaga

SEQ ID NO: 324181 - DNA, 12 bp, Artificial Sequence
  Oligonucleotide primer for the detection of SNP TSC0031851
actaaaaaatcc

SEQ ID NO: 324182 - DNA, 12 bp, Artificial Sequence
  Oligonucleotide primer for the detection of SNP TSC0031851
atgagtattttg

SEQ ID NO: 324183 - DNA, 12 bp, Artificial Sequence
  Oligonucleotide primer for the detection of SNP TSC0031852
aatatcacatct

SEQ ID NO: 324184 - DNA, 12 bp, Artificial Sequence
  Oligonucleotide primer for the detection of SNP TSC0031852
aatatcgcatct

SEQ ID NO: 324185 - DNA, 12 bp, Artificial Sequence
  Oligonucleotide primer for the detection of SNP TSC0031852
aagattaaggtg

SEQ ID NO: 324186 - DNA, 12 bp, Artificial Sequence
  Oligonucleotide primer for the detection of SNP TSC0031852
gatgtcgtattt

SEQ ID NO: 324187 - DNA, 12 bp, Artificial Sequence
  Oligonucleotide primer for the detection of SNP TSC0031854
attattttaatg

SEQ ID NO: 324188 - DNA, 12 bp, Artificial Sequence
  Oligonucleotide primer for the detection of SNP TSC0031854
attattttaata

SEQ ID NO: 324189 - DNA, 12 bp, Artificial Sequence
  Oligonucleotide primer for the detection of SNP TSC0031855
aacaaaaccact

SEQ ID NO: 324190 - DNA, 12 bp, Artificial Sequence
  Oligonucleotide primer for the detection of SNP TSC0031855
aattttttagta

SEQ ID NO: 324191 - DNA, 12 bp, Artificial Sequence
  Oligonucleotide primer for the detection of SNP TSC0031856
attctataaaaa

SEQ ID NO: 324192 - DNA, 12 bp, Artificial Sequence
  Oligonucleotide primer for the detection of SNP TSC0031856
agatataaagtt

SEQ ID NO: 324193 - DNA, 12 bp, Artificial Sequence
  Oligonucleotide primer for the detection of SNP TSC0031856
aaacacaaaact

SEQ ID NO: 324194 - DNA, 12 bp, Artificial Sequence
  Oligonucleotide primer for the detection of SNP TSC0031857
aaaaaacccctt

SEQ ID NO: 324195 - DNA, 12 bp, Artificial Sequence
  Oligonucleotide primer for the detection of SNP TSC0031857
agagaaaaagaa

SEQ ID NO: 324196 - DNA, 12 bp, Artificial Sequence
  Oligonucleotide primer for the detection of SNP TSC0031858
tcaaaaaaacct

SEQ ID NO: 324197 - DNA, 12 bp, Artificial Sequence
  Oligonucleotide primer for the detection of SNP TSC0031858
tcgaaaaaacct

SEQ ID NO: 324198 - DNA, 12 bp, Artificial Sequence
  Oligonucleotide primer for the detection of SNP TSC0031858
aggatttggagg

SEQ ID NO: 324199 - DNA, 12 bp, Artificial Sequence
  Oligonucleotide primer for the detection of SNP TSC0031859
ggtataggaagt

SEQ ID NO: 324200 - DNA, 12 bp, Artificial Sequence
  Oligonucleotide primer for the detection of SNP TSC0031859
ggtataggaagc

SEQ ID NO: 324201 - DNA, 12 bp, Artificial Sequence
  Oligonucleotide primer for the detection of SNP TSC0031859
atacaaaaaaca

SEQ ID NO: 324202 - DNA, 12 bp, Artificial Sequence
  Oligonucleotide primer for the detection of SNP TSC0031859
atacaaaaaacg

SEQ ID NO: 324203 - DNA, 12 bp, Artificial Sequence
  Oligonucleotide primer for the detection of SNP TSC0031859
aaatgtaaagag

SEQ ID NO: 324204 - DNA, 12 bp, Artificial Sequence
  Oligonucleotide primer for the detection of SNP TSC0031860
ggatttgtgatg

SEQ ID NO: 324205 - DNA, 12 bp, Artificial Sequence
  Oligonucleotide primer for the detection of SNP TSC0031862
tgaaaaaaaaaa

SEQ ID NO: 324206 - DNA, 12 bp, Artificial Sequence
  Oligonucleotide primer for the detection of SNP TSC0031863
ttttaattagtt

SEQ ID NO: 324207 - DNA, 12 bp, Artificial Sequence
  Oligonucleotide primer for the detection of SNP TSC0031868
ttatccaatcaa

SEQ ID NO: 324208 - DNA, 12 bp, Artificial Sequence
  Oligonucleotide primer for the detection of SNP TSC0031869
aacaacaccaaa

SEQ ID NO: 324209 - DNA, 12 bp, Artificial Sequence
  Oligonucleotide primer for the detection of SNP TSC0031869
cccctacttttc

SEQ ID NO: 324210 - DNA, 12 bp, Artificial Sequence
  Oligonucleotide primer for the detection of SNP TSC0031869
gatagtattaag

SEQ ID NO: 324211 - DNA, 12 bp, Artificial Sequence
  Oligonucleotide primer for the detection of SNP TSC0031870
tcctccaaaaaa

SEQ ID NO: 324212 - DNA, 12 bp, Artificial Sequence
  Oligonucleotide primer for the detection of SNP TSC0031870
tcctccgaaaaa

SEQ ID NO: 324213 - DNA, 12 bp, Artificial Sequence
  Oligonucleotide primer for the detection of SNP TSC0031870
taatggttttat

SEQ ID NO: 324214 - DNA, 12 bp, Artificial Sequence
  Oligonucleotide primer for the detection of SNP TSC0031870
caataaccccac

SEQ ID NO: 324215 - DNA, 12 bp, Artificial Sequence
  Oligonucleotide primer for the detection of SNP TSC0031870
tttttcgggagg

SEQ ID NO: 324216 - DNA, 12 bp, Artificial Sequence
  Oligonucleotide primer for the detection of SNP TSC0031873
tacccaccatct

SEQ ID NO: 324217 - DNA, 12 bp, Artificial Sequence
  Oligonucleotide primer for the detection of SNP TSC0031873
gagatttttaga

SEQ ID NO: 324218 - DNA, 12 bp, Artificial Sequence
  Oligonucleotide primer for the detection of SNP TSC0031876
taatattaaaat

SEQ ID NO: 324219 - DNA, 12 bp, Artificial Sequence
  Oligonucleotide primer for the detection of SNP TSC0031876
gtggttatatgg

SEQ ID NO: 324220 - DNA, 12 bp, Artificial Sequence
  Oligonucleotide primer for the detection of SNP TSC0031879
tcctacaaaatc

SEQ ID NO: 324221 - DNA, 12 bp, Artificial Sequence
  Oligonucleotide primer for the detection of SNP TSC0031879
gattgattttga

SEQ ID NO: 324222 - DNA, 12 bp, Artificial Sequence
  Oligonucleotide primer for the detection of SNP TSC0031880
ataactaaccct

SEQ ID NO: 324223 - DNA, 12 bp, Artificial Sequence
  Oligonucleotide primer for the detection of SNP TSC0031880
tttgtagagtta

SEQ ID NO: 324224 - DNA, 12 bp, Artificial Sequence
  Oligonucleotide primer for the detection of SNP TSC0031880
cctacaaaatca

SEQ ID NO: 324225 - DNA, 12 bp, Artificial Sequence
  Oligonucleotide primer for the detection of SNP TSC0031880
gtgattgatttt

SEQ ID NO: 324226 - DNA, 12 bp, Artificial Sequence
  Oligonucleotide primer for the detection of SNP TSC0031882
caaacaactcac

SEQ ID NO: 324227 - DNA, 12 bp, Artificial Sequence
  Oligonucleotide primer for the detection of SNP TSC0031882
gagtttttttaa

SEQ ID NO: 324228 - DNA, 12 bp, Artificial Sequence
  Oligonukleotid-Primer
aaacctcttcaa

SEQ ID NO: 324229 - DNA, 12 bp, Artificial Sequence
  Oligonucleotide primer for the detection of SNP TSC0031882
taaataatttat

SEQ ID NO: 324230 - DNA, 12 bp, Artificial Sequence
  Oligonucleotide primer for the detection of SNP TSC0031883
tgtgttttatga

SEQ ID NO: 324231 - DNA, 12 bp, Artificial Sequence
  Oligonucleotide primer for the detection of SNP TSC0031883
cgtgttttatga

SEQ ID NO: 324232 - DNA, 12 bp, Artificial Sequence
  Oligonucleotide primer for the detection of SNP TSC0031883
tgcgttttatga

SEQ ID NO: 324233 - DNA, 12 bp, Artificial Sequence
  Oligonucleotide primer for the detection of SNP TSC0031883
tgtgttttacga

SEQ ID NO: 324234 - DNA, 12 bp, Artificial Sequence
  Oligonucleotide primer for the detection of SNP TSC0031883
cgcgttttatga

SEQ ID NO: 324235 - DNA, 12 bp, Artificial Sequence
  Oligonucleotide primer for the detection of SNP TSC0031883
cgtgttttacga

SEQ ID NO: 324236 - DNA, 12 bp, Artificial Sequence
  Oligonucleotide primer for the detection of SNP TSC0031883
tgcgttttacga

SEQ ID NO: 324237 - DNA, 12 bp, Artificial Sequence
  Oligonucleotide primer for the detection of SNP TSC0031883
cgcgttttacga

SEQ ID NO: 324238 - DNA, 12 bp, Artificial Sequence
  Oligonucleotide primer for the detection of SNP TSC0031885
atcctaaaaaat

SEQ ID NO: 324239 - DNA, 12 bp, Artificial Sequence
  Oligonucleotide primer for the detection of SNP TSC0031889
attaactacacc

SEQ ID NO: 324240 - DNA, 12 bp, Artificial Sequence
  Oligonucleotide primer for the detection of SNP TSC0031889
tatttttattag

SEQ ID NO: 324241 - DNA, 12 bp, Artificial Sequence
  Oligonucleotide primer for the detection of SNP TSC0031895
aatataaacatt

SEQ ID NO: 324242 - DNA, 12 bp, Artificial Sequence
  Oligonucleotide primer for the detection of SNP TSC0031895
tttgagaattga

SEQ ID NO: 324243 - DNA, 12 bp, Artificial Sequence
  Oligonucleotide primer for the detection of SNP TSC0031898
tctccataatcc

SEQ ID NO: 324244 - DNA, 12 bp, Artificial Sequence
  Oligonucleotide primer for the detection of SNP TSC0031898
tctccgtaatcc

SEQ ID NO: 324245 - DNA, 12 bp, Artificial Sequence
  Oligonucleotide primer for the detection of SNP TSC0031898
ggaggtttgggg

SEQ ID NO: 324246 - DNA, 12 bp, Artificial Sequence
  Oligonucleotide primer for the detection of SNP TSC0031898
aaaaatctaaaa

SEQ ID NO: 324247 - DNA, 12 bp, Artificial Sequence
  Oligonucleotide primer for the detection of SNP TSC0031898
ttttcgtgattt

SEQ ID NO: 324248 - DNA, 12 bp, Artificial Sequence
  Oligonucleotide primer for the detection of SNP TSC0031899
ataaaatacaat

SEQ ID NO: 324249 - DNA, 12 bp, Artificial Sequence
  Oligonucleotide primer for the detection of SNP TSC0031899
ataaaatacgat

SEQ ID NO: 324250 - DNA, 12 bp, Artificial Sequence
  Oligonucleotide primer for the detection of SNP TSC0031899
aaagttttattt

SEQ ID NO: 324251 - DNA, 12 bp, Artificial Sequence
  Oligonucleotide primer for the detection of SNP TSC0031899
aaaaccccacct

SEQ ID NO: 324252 - DNA, 12 bp, Artificial Sequence
  Oligonucleotide primer for the detection of SNP TSC0031899
gtggggtatggt

SEQ ID NO: 324253 - DNA, 12 bp, Artificial Sequence
  Oligonucleotide primer for the detection of SNP TSC0031899
gtggggtacggt

SEQ ID NO: 324254 - DNA, 12 bp, Artificial Sequence
  Oligonucleotide primer for the detection of SNP TSC0031900
ttaaaataaaac

SEQ ID NO: 324255 - DNA, 12 bp, Artificial Sequence
  Oligonucleotide primer for the detection of SNP TSC0031900
atattttgtaaa

SEQ ID NO: 324256 - DNA, 12 bp, Artificial Sequence
  Oligonucleotide primer for the detection of SNP TSC0031900
acaccttacaaa

SEQ ID NO: 324257 - DNA, 12 bp, Artificial Sequence
  Oligonucleotide primer for the detection of SNP TSC0031900
ttagggtgagat

SEQ ID NO: 324258 - DNA, 12 bp, Artificial Sequence
  Oligonucleotide primer for the detection of SNP TSC0031902
tcccttcctccc

SEQ ID NO: 324259 - DNA, 12 bp, Artificial Sequence
  Oligonucleotide primer for the detection of SNP TSC0031916
tttactaaaaat

SEQ ID NO: 324260 - DNA, 12 bp, Artificial Sequence
  Oligonucleotide primer for the detection of SNP TSC0031916
gggaatttttta

SEQ ID NO: 324261 - DNA, 12 bp, Artificial Sequence
  Oligonucleotide primer for the detection of SNP TSC0031917
aaaccctattta

SEQ ID NO: 324262 - DNA, 12 bp, Artificial Sequence
  Oligonucleotide primer for the detection of SNP TSC0031917
gtaggtgggtga

SEQ ID NO: 324263 - DNA, 12 bp, Artificial Sequence
  Oligonucleotide primer for the detection of SNP TSC0031917
agttttgtttgt

SEQ ID NO: 324264 - DNA, 12 bp, Artificial Sequence
  Oligonucleotide primer for the detection of SNP TSC0031921
atcttactctat

SEQ ID NO: 324265 - DNA, 12 bp, Artificial Sequence
  Oligonucleotide primer for the detection of SNP TSC0031921
attttgtatggg

SEQ ID NO: 324266 - DNA, 12 bp, Artificial Sequence
  Oligonucleotide primer for the detection of SNP TSC0031921
atcctatataaa

SEQ ID NO: 324267 - DNA, 12 bp, Artificial Sequence
  Oligonucleotide primer for the detection of SNP TSC0031921
gttttgttttgt

SEQ ID NO: 324268 - DNA, 12 bp, Artificial Sequence
  Oligonucleotide primer for the detection of SNP TSC0031922
acaaaaaaactc

SEQ ID NO: 324269 - DNA, 12 bp, Artificial Sequence
  Oligonucleotide primer for the detection of SNP TSC0031922
ttttttagtata

SEQ ID NO: 324270 - DNA, 12 bp, Artificial Sequence
  Oligonucleotide primer for the detection of SNP TSC0031924
aatcttaaactc

SEQ ID NO: 324271 - DNA, 12 bp, Artificial Sequence
  Oligonucleotide primer for the detection of SNP TSC0031924
ttatttgaggtt

SEQ ID NO: 324272 - DNA, 12 bp, Artificial Sequence
  Oligonucleotide primer for the detection of SNP TSC0031924
cacctaaaatca

SEQ ID NO: 324273 - DNA, 12 bp, Artificial Sequence
  Oligonucleotide primer for the detection of SNP TSC0031924
ggttttgaattt

SEQ ID NO: 324274 - DNA, 12 bp, Artificial Sequence
  Oligonucleotide primer for the detection of SNP TSC0031924
ggttttgaattc

SEQ ID NO: 324275 - DNA, 12 bp, Artificial Sequence
  Oligonucleotide primer for the detection of SNP TSC0031925
tggggaatatta

SEQ ID NO: 324276 - DNA, 12 bp, Artificial Sequence
  Oligonucleotide primer for the detection of SNP TSC0031925
taaaaaatacca

SEQ ID NO: 324277 - DNA, 12 bp, Artificial Sequence
  Oligonucleotide primer for the detection of SNP TSC0031926
ttttgtgattag

SEQ ID NO: 324278 - DNA, 12 bp, Artificial Sequence
  Oligonucleotide primer for the detection of SNP TSC0031927
ttttacaaccac

SEQ ID NO: 324279 - DNA, 12 bp, Artificial Sequence
  Oligonucleotide primer for the detection of SNP TSC0031927
aagtgagtttag

SEQ ID NO: 324280 - DNA, 12 bp, Artificial Sequence
  Oligonucleotide primer for the detection of SNP TSC0031928
aaaacactaccc

SEQ ID NO: 324281 - DNA, 12 bp, Artificial Sequence
  Oligonucleotide primer for the detection of SNP TSC0031928
ggttgattgttg

SEQ ID NO: 324282 - DNA, 12 bp, Artificial Sequence
  Oligonucleotide primer for the detection of SNP TSC0031928
aactaactatta

SEQ ID NO: 324283 - DNA, 12 bp, Artificial Sequence
  Oligonucleotide primer for the detection of SNP TSC0031928
agggtattgttt

SEQ ID NO: 324284 - DNA, 12 bp, Artificial Sequence
  Oligonucleotide primer for the detection of SNP TSC0031931
gtgggtttttga

SEQ ID NO: 324285 - DNA, 12 bp, Artificial Sequence
  Oligonucleotide primer for the detection of SNP TSC0031931
ataaatccctaa

SEQ ID NO: 324286 - DNA, 12 bp, Artificial Sequence
  Oligonucleotide primer for the detection of SNP TSC0031931
tgataggtttta

SEQ ID NO: 324287 - DNA, 12 bp, Artificial Sequence
  Oligonucleotide primer for the detection of SNP TSC0031936
cataattacaat

SEQ ID NO: 324288 - DNA, 12 bp, Artificial Sequence
  Oligonucleotide primer for the detection of SNP TSC0031936
tttttaagatat

SEQ ID NO: 324289 - DNA, 12 bp, Artificial Sequence
  Oligonucleotide primer for the detection of SNP TSC0031936
ccccttaaaata

SEQ ID NO: 324290 - DNA, 12 bp, Artificial Sequence
  Oligonucleotide primer for the detection of SNP TSC0031936
ataattatagtt

SEQ ID NO: 324291 - DNA, 12 bp, Artificial Sequence
  Oligonucleotide primer for the detection of SNP TSC0031936
ataattatagtc

SEQ ID NO: 324292 - DNA, 12 bp, Artificial Sequence
  Oligonucleotide primer for the detection of SNP TSC0031937
tttcaaccataa

SEQ ID NO: 324293 - DNA, 12 bp, Artificial Sequence
  Oligonucleotide primer for the detection of SNP TSC0031937
caactctactct

SEQ ID NO: 324294 - DNA, 12 bp, Artificial Sequence
  Oligonucleotide primer for the detection of SNP TSC0031937
cgactctactct

SEQ ID NO: 324295 - DNA, 12 bp, Artificial Sequence
  Oligonucleotide primer for the detection of SNP TSC0031937
ttttaattatga

SEQ ID NO: 324296 - DNA, 12 bp, Artificial Sequence
  Oligonucleotide primer for the detection of SNP TSC0031939
ctctaccaccca

SEQ ID NO: 324297 - DNA, 12 bp, Artificial Sequence
  Oligonucleotide primer for the detection of SNP TSC0031939
agggttgggttg

SEQ ID NO: 324298 - DNA, 12 bp, Artificial Sequence
  Oligonucleotide primer for the detection of SNP TSC0031939
aaactaaactaa

SEQ ID NO: 324299 - DNA, 12 bp, Artificial Sequence
  Oligonucleotide primer for the detection of SNP TSC0031940
ctaccataccta

SEQ ID NO: 324300 - DNA, 12 bp, Artificial Sequence
  Oligonucleotide primer for the detection of SNP TSC0031940
agtggttgaggg

SEQ ID NO: 324301 - DNA, 12 bp, Artificial Sequence
  Oligonucleotide primer for the detection of SNP TSC0031941
attttacaacct

SEQ ID NO: 324302 - DNA, 12 bp, Artificial Sequence
  Oligonucleotide primer for the detection of SNP TSC0031942
caaacttttaat

SEQ ID NO: 324303 - DNA, 12 bp, Artificial Sequence
  Oligonucleotide primer for the detection of SNP TSC0031942
ttgataattata

SEQ ID NO: 324304 - DNA, 12 bp, Artificial Sequence
  Oligonucleotide primer for the detection of SNP TSC0031943
taatttccctac

SEQ ID NO: 324305 - DNA, 12 bp, Artificial Sequence
  Oligonucleotide primer for the detection of SNP TSC0031943
gttgtgagttgg

SEQ ID NO: 324306 - DNA, 12 bp, Artificial Sequence
  Oligonucleotide primer for the detection of SNP TSC0031944
tacacttaaata

SEQ ID NO: 324307 - DNA, 12 bp, Artificial Sequence
  Oligonucleotide primer for the detection of SNP TSC0031944
tttagaaaaaaa

SEQ ID NO: 324308 - DNA, 12 bp, Artificial Sequence
  Oligonucleotide primer for the detection of SNP TSC0031944
tgtatttgggtg

SEQ ID NO: 324309 - DNA, 12 bp, Artificial Sequence
  Oligonucleotide primer for the detection of SNP TSC0031948
acaaaaacttaa

SEQ ID NO: 324310 - DNA, 12 bp, Artificial Sequence
  Oligonucleotide primer for the detection of SNP TSC0031948
aaaaatacctca

SEQ ID NO: 324311 - DNA, 12 bp, Artificial Sequence
  Oligonucleotide primer for the detection of SNP TSC0031948
atagggatttga

SEQ ID NO: 324312 - DNA, 12 bp, Artificial Sequence
  Oligonucleotide primer for the detection of SNP TSC0031949
caaaaaaacacg

SEQ ID NO: 324313 - DNA, 12 bp, Artificial Sequence
  Oligonucleotide primer for the detection of SNP TSC0031949
caaaaaaacgca

SEQ ID NO: 324314 - DNA, 12 bp, Artificial Sequence
  Oligonucleotide primer for the detection of SNP TSC0031949
cgaaaaaacaca

SEQ ID NO: 324315 - DNA, 12 bp, Artificial Sequence
  Oligonucleotide primer for the detection of SNP TSC0031949
caaaaaaacgcg

SEQ ID NO: 324316 - DNA, 12 bp, Artificial Sequence
  Oligonucleotide primer for the detection of SNP TSC0031949
cgaaaaaacacg

SEQ ID NO: 324317 - DNA, 12 bp, Artificial Sequence
  Oligonucleotide primer for the detection of SNP TSC0031949
cgaaaaaacgca

SEQ ID NO: 324318 - DNA, 12 bp, Artificial Sequence
  Oligonucleotide primer for the detection of SNP TSC0031949
cgaaaaaacgcg

SEQ ID NO: 324319 - DNA, 12 bp, Artificial Sequence
  Oligonucleotide primer for the detection of SNP TSC0031949
gtgggtggtgtt

SEQ ID NO: 324320 - DNA, 12 bp, Artificial Sequence
  Oligonucleotide primer for the detection of SNP TSC0031949
ataaataatatc

SEQ ID NO: 324321 - DNA, 12 bp, Artificial Sequence
  Oligonucleotide primer for the detection of SNP TSC0031949
tgagggggtgtg

SEQ ID NO: 324322 - DNA, 12 bp, Artificial Sequence
  Oligonucleotide primer for the detection of SNP TSC0031949
cgagggggtgtg

SEQ ID NO: 324323 - DNA, 12 bp, Artificial Sequence
  Oligonucleotide primer for the detection of SNP TSC0031949
tgagggggcgtg

SEQ ID NO: 324324 - DNA, 12 bp, Artificial Sequence
  Oligonucleotide primer for the detection of SNP TSC0031949
tgagggggtgcg

SEQ ID NO: 324325 - DNA, 12 bp, Artificial Sequence
  Oligonucleotide primer for the detection of SNP TSC0031949
cgagggggcgtg

SEQ ID NO: 324326 - DNA, 12 bp, Artificial Sequence
  Oligonucleotide primer for the detection of SNP TSC0031949
cgagggggtgcg

SEQ ID NO: 324327 - DNA, 12 bp, Artificial Sequence
  Oligonucleotide primer for the detection of SNP TSC0031949
tgagggggcgcg

SEQ ID NO: 324328 - DNA, 12 bp, Artificial Sequence
  Oligonucleotide primer for the detection of SNP TSC0031949
cgagggggcgcg

SEQ ID NO: 324329 - DNA, 12 bp, Artificial Sequence
  Oligonucleotide primer for the detection of SNP TSC0031951
tagtatatttag

SEQ ID NO: 324330 - DNA, 12 bp, Artificial Sequence
  Oligonucleotide primer for the detection of SNP TSC0031951
caacatacccaa

SEQ ID NO: 324331 - DNA, 12 bp, Artificial Sequence
  Oligonucleotide primer for the detection of SNP TSC0031951
tagggaaatggg

SEQ ID NO: 324332 - DNA, 12 bp, Artificial Sequence
  Oligonucleotide primer for the detection of SNP TSC0031952
acctaactatta

SEQ ID NO: 324333 - DNA, 12 bp, Artificial Sequence
  Oligonucleotide primer for the detection of SNP TSC0031952
tattgtgatggt

SEQ ID NO: 324334 - DNA, 12 bp, Artificial Sequence
  Oligonucleotide primer for the detection of SNP TSC0031952
cactataataac

SEQ ID NO: 324335 - DNA, 12 bp, Artificial Sequence
  Oligonucleotide primer for the detection of SNP TSC0031952
atttaattgttg

SEQ ID NO: 324336 - DNA, 12 bp, Artificial Sequence
  Oligonucleotide primer for the detection of SNP TSC0031954
cctcaattttct

SEQ ID NO: 324337 - DNA, 12 bp, Artificial Sequence
  Oligonucleotide primer for the detection of SNP TSC0031954
tattgtgtagag

SEQ ID NO: 324338 - DNA, 12 bp, Artificial Sequence
  Oligonucleotide primer for the detection of SNP TSC0031955
tatactcaacaa

SEQ ID NO: 324339 - DNA, 12 bp, Artificial Sequence
  Oligonucleotide primer for the detection of SNP TSC0031955
ttaccttaccca

SEQ ID NO: 324340 - DNA, 12 bp, Artificial Sequence
  Oligonucleotide primer for the detection of SNP TSC0031955
tgtgtttaatag

SEQ ID NO: 324341 - DNA, 12 bp, Artificial Sequence
  Oligonucleotide primer for the detection of SNP TSC0031956
accatacctacc

SEQ ID NO: 324342 - DNA, 12 bp, Artificial Sequence
  Oligonucleotide primer for the detection of SNP TSC0031957
ccctctaaacac

SEQ ID NO: 324343 - DNA, 12 bp, Artificial Sequence
  Oligonucleotide primer for the detection of SNP TSC0031957
aaatataaagtg

SEQ ID NO: 324344 - DNA, 12 bp, Artificial Sequence
  Oligonucleotide primer for the detection of SNP TSC0031957
aaacacaaaata

SEQ ID NO: 324345 - DNA, 12 bp, Artificial Sequence
  Oligonucleotide primer for the detection of SNP TSC0031958
ctttataaacaa

SEQ ID NO: 324346 - DNA, 12 bp, Artificial Sequence
  Oligonucleotide primer for the detection of SNP TSC0031958
aaaaagtaggat

SEQ ID NO: 324347 - DNA, 12 bp, Artificial Sequence
  Oligonucleotide primer for the detection of SNP TSC0031965
taaactcccaaa

SEQ ID NO: 324348 - DNA, 12 bp, Artificial Sequence
  Oligonucleotide primer for the detection of SNP TSC0031965
agattttaagta

SEQ ID NO: 324349 - DNA, 12 bp, Artificial Sequence
  Oligonucleotide primer for the detection of SNP TSC0031965
aaattctaaaca

SEQ ID NO: 324350 - DNA, 12 bp, Artificial Sequence
  Oligonucleotide primer for the detection of SNP TSC0031965
tgagtttttaag

SEQ ID NO: 324351 - DNA, 12 bp, Artificial Sequence
  Oligonucleotide primer for the detection of SNP TSC0031966
ttagttattttg

SEQ ID NO: 324352 - DNA, 12 bp, Artificial Sequence
  Oligonucleotide primer for the detection of SNP TSC0031966
ctaattacttta

SEQ ID NO: 324353 - DNA, 12 bp, Artificial Sequence
  Oligonucleotide primer for the detection of SNP TSC0031966
aaatgagataat

SEQ ID NO: 324354 - DNA, 12 bp, Artificial Sequence
  Oligonucleotide primer for the detection of SNP TSC0031970
ttctattcaatc

SEQ ID NO: 324355 - DNA, 12 bp, Artificial Sequence
  Oligonucleotide primer for the detection of SNP TSC0031970
ggtaaaattagg

SEQ ID NO: 324356 - DNA, 12 bp, Artificial Sequence
  Oligonucleotide primer for the detection of SNP TSC0031971
ctccatacaacc

SEQ ID NO: 324357 - DNA, 12 bp, Artificial Sequence
  Oligonucleotide primer for the detection of SNP TSC0031971
ctccatacgacc

SEQ ID NO: 324358 - DNA, 12 bp, Artificial Sequence
  Oligonucleotide primer for the detection of SNP TSC0031971
atataatttata

SEQ ID NO: 324359 - DNA, 12 bp, Artificial Sequence
  Oligonucleotide primer for the detection of SNP TSC0031973
taatactattcc

SEQ ID NO: 324360 - DNA, 12 bp, Artificial Sequence
  Oligonucleotide primer for the detection of SNP TSC0031973
gtggataggttg

SEQ ID NO: 324361 - DNA, 12 bp, Artificial Sequence
  Oligonucleotide primer for the detection of SNP TSC0031973
gtggataggtcg

SEQ ID NO: 324362 - DNA, 12 bp, Artificial Sequence
  Oligonucleotide primer for the detection of SNP TSC0031975
atcattcttaca

SEQ ID NO: 324363 - DNA, 12 bp, Artificial Sequence
  Oligonucleotide primer for the detection of SNP TSC0031975
gtatggggagat

SEQ ID NO: 324364 - DNA, 12 bp, Artificial Sequence
  Oligonucleotide primer for the detection of SNP TSC0031975
gtacggggagat

SEQ ID NO: 324365 - DNA, 12 bp, Artificial Sequence
  Oligonucleotide primer for the detection of SNP TSC0031976
aaccaaatctca

SEQ ID NO: 324366 - DNA, 12 bp, Artificial Sequence
  Oligonucleotide primer for the detection of SNP TSC0031976
gaccaaatctca

SEQ ID NO: 324367 - DNA, 12 bp, Artificial Sequence
  Oligonucleotide primer for the detection of SNP TSC0031976
tgtggaagattt

SEQ ID NO: 324368 - DNA, 12 bp, Artificial Sequence
  Oligonucleotide primer for the detection of SNP TSC0031976
tataaaaaactc

SEQ ID NO: 324369 - DNA, 12 bp, Artificial Sequence
  Oligonucleotide primer for the detection of SNP TSC0031976
tggttagatttt

SEQ ID NO: 324370 - DNA, 12 bp, Artificial Sequence
  Oligonucleotide primer for the detection of SNP TSC0031976
cggttagatttt

SEQ ID NO: 324371 - DNA, 12 bp, Artificial Sequence
  Oligonucleotide primer for the detection of SNP TSC0031977
cctactataccc

SEQ ID NO: 324372 - DNA, 12 bp, Artificial Sequence
  Oligonucleotide primer for the detection of SNP TSC0031980
ttcttctaaaaa

SEQ ID NO: 324373 - DNA, 12 bp, Artificial Sequence
  Oligonucleotide primer for the detection of SNP TSC0031980
tttttttgatta

SEQ ID NO: 324374 - DNA, 12 bp, Artificial Sequence
  Oligonucleotide primer for the detection of SNP TSC0031981
tattatatattg

SEQ ID NO: 324375 - DNA, 12 bp, Artificial Sequence
  Oligonucleotide primer for the detection of SNP TSC0031981
cattacatacta

SEQ ID NO: 324376 - DNA, 12 bp, Artificial Sequence
  Oligonucleotide primer for the detection of SNP TSC0031981
aaaagttatttt

SEQ ID NO: 324377 - DNA, 12 bp, Artificial Sequence
  Oligonucleotide primer for the detection of SNP TSC0031982
atccaattaaac

SEQ ID NO: 324378 - DNA, 12 bp, Artificial Sequence
  Oligonucleotide primer for the detection of SNP TSC0031982
tatcctacccta

SEQ ID NO: 324379 - DNA, 12 bp, Artificial Sequence
  Oligonucleotide primer for the detection of SNP TSC0031982
gtttagttggat

SEQ ID NO: 324380 - DNA, 12 bp, Artificial Sequence
  Oligonucleotide primer for the detection of SNP TSC0031982
gtttagttggac

SEQ ID NO: 324381 - DNA, 12 bp, Artificial Sequence
  Oligonucleotide primer for the detection of SNP TSC0031983
aaaaacacatac

SEQ ID NO: 324382 - DNA, 12 bp, Artificial Sequence
  Oligonucleotide primer for the detection of SNP TSC0031983
aataaatataag

SEQ ID NO: 324383 - DNA, 12 bp, Artificial Sequence
  Oligonucleotide primer for the detection of SNP TSC0031984
aactaccttcct

SEQ ID NO: 324384 - DNA, 12 bp, Artificial Sequence
  Oligonucleotide primer for the detection of SNP TSC0031988
tatttattgtgt

SEQ ID NO: 324385 - DNA, 12 bp, Artificial Sequence
  Oligonucleotide primer for the detection of SNP TSC0031988
tatttattgcgt

SEQ ID NO: 324386 - DNA, 12 bp, Artificial Sequence
  Oligonucleotide primer for the detection of SNP TSC0031988
catccactacac

SEQ ID NO: 324387 - DNA, 12 bp, Artificial Sequence
  Oligonucleotide primer for the detection of SNP TSC0031988
catccactacgc

SEQ ID NO: 324388 - DNA, 12 bp, Artificial Sequence
  Oligonucleotide primer for the detection of SNP TSC0031988
tttagggtagag

SEQ ID NO: 324389 - DNA, 12 bp, Artificial Sequence
  Oligonucleotide primer for the detection of SNP TSC0031989
cctctacaaaac

SEQ ID NO: 324390 - DNA, 12 bp, Artificial Sequence
  Oligonucleotide primer for the detection of SNP TSC0031989
cctctacgaaac

SEQ ID NO: 324391 - DNA, 12 bp, Artificial Sequence
  Oligonucleotide primer for the detection of SNP TSC0031989
tatgtttaggag

SEQ ID NO: 324392 - DNA, 12 bp, Artificial Sequence
  Oligonucleotide primer for the detection of SNP TSC0031989
tacgtttaggag

SEQ ID NO: 324393 - DNA, 12 bp, Artificial Sequence
  Oligonucleotide primer for the detection of SNP TSC0031989
cacacctaaaaa

SEQ ID NO: 324394 - DNA, 12 bp, Artificial Sequence
  Oligonucleotide primer for the detection of SNP TSC0031989
cacgcctaaaaa

SEQ ID NO: 324395 - DNA, 12 bp, Artificial Sequence
  Oligonucleotide primer for the detection of SNP TSC0031989
tttttgtgggat

SEQ ID NO: 324396 - DNA, 12 bp, Artificial Sequence
  Oligonucleotide primer for the detection of SNP TSC0031989
tttttgcgggat

SEQ ID NO: 324397 - DNA, 12 bp, Artificial Sequence
  Oligonucleotide primer for the detection of SNP TSC0031993
ggaggtttaaaa

SEQ ID NO: 324398 - DNA, 12 bp, Artificial Sequence
  Oligonucleotide primer for the detection of SNP TSC0031993
aaaaagttttgt

SEQ ID NO: 324399 - DNA, 12 bp, Artificial Sequence
  Oligonucleotide primer for the detection of SNP TSC0031997
catctttaaaat

SEQ ID NO: 324400 - DNA, 12 bp, Artificial Sequence
  Oligonucleotide primer for the detection of SNP TSC0031998
cctcctatcttc

SEQ ID NO: 324401 - DNA, 12 bp, Artificial Sequence
  Oligonucleotide primer for the detection of SNP TSC0031998
atttttaaagtg

SEQ ID NO: 324402 - DNA, 12 bp, Artificial Sequence
  Oligonucleotide primer for the detection of SNP TSC0031999
acaacttaacaa

SEQ ID NO: 324403 - DNA, 12 bp, Artificial Sequence
  Oligonucleotide primer for the detection of SNP TSC0031999
tagatgtgaggt

SEQ ID NO: 324404 - DNA, 12 bp, Artificial Sequence
  Oligonucleotide primer for the detection of SNP TSC0031999
tagatgcgaggt

SEQ ID NO: 324405 - DNA, 12 bp, Artificial Sequence
  Oligonucleotide primer for the detection of SNP TSC0031999
caaatacgaaac

SEQ ID NO: 324406 - DNA, 12 bp, Artificial Sequence
  Oligonucleotide primer for the detection of SNP TSC0031999
gtagtttggtag

SEQ ID NO: 324407 - DNA, 12 bp, Artificial Sequence
  Oligonucleotide primer for the detection of SNP TSC0032000
accattcttcta

SEQ ID NO: 324408 - DNA, 12 bp, Artificial Sequence
  Oligonucleotide primer for the detection of SNP TSC0032000
aaaaagagagtt

SEQ ID NO: 324409 - DNA, 12 bp, Artificial Sequence
  Oligonucleotide primer for the detection of SNP TSC0032002
taccactaccta

SEQ ID NO: 324410 - DNA, 12 bp, Artificial Sequence
  Oligonucleotide primer for the detection of SNP TSC0032002
cttattctaaaa

SEQ ID NO: 324411 - DNA, 12 bp, Artificial Sequence
  Oligonucleotide primer for the detection of SNP TSC0032003
tttataggtttt

SEQ ID NO: 324412 - DNA, 12 bp, Artificial Sequence
  Oligonucleotide primer for the detection of SNP TSC0032003
tttataggtttc

SEQ ID NO: 324413 - DNA, 12 bp, Artificial Sequence
  Oligonucleotide primer for the detection of SNP TSC0032003
tcccacaaacct

SEQ ID NO: 324414 - DNA, 12 bp, Artificial Sequence
  Oligonukleotid-Primer
tattgaggaaga

SEQ ID NO: 324415 - DNA, 12 bp, Artificial Sequence
  Oligonucleotide primer for the detection of SNP TSC0032007
aaactaacaaca

SEQ ID NO: 324416 - DNA, 12 bp, Artificial Sequence
  Oligonucleotide primer for the detection of SNP TSC0032007
tataggttgagt

SEQ ID NO: 324417 - DNA, 12 bp, Artificial Sequence
  Oligonucleotide primer for the detection of SNP TSC0032007
tacaaactaaat

SEQ ID NO: 324418 - DNA, 12 bp, Artificial Sequence
  Oligonucleotide primer for the detection of SNP TSC0032007
aaattgatagta

SEQ ID NO: 324419 - DNA, 12 bp, Artificial Sequence
  Oligonucleotide primer for the detection of SNP TSC0032008
ttacttcaaaca

SEQ ID NO: 324420 - DNA, 12 bp, Artificial Sequence
  Oligonucleotide primer for the detection of SNP TSC0032008
tttgtgattgtt

SEQ ID NO: 324421 - DNA, 12 bp, Artificial Sequence
  Oligonucleotide primer for the detection of SNP TSC0032008
cctttataacta

SEQ ID NO: 324422 - DNA, 12 bp, Artificial Sequence
  Oligonucleotide primer for the detection of SNP TSC0032009
ttatttctattt

SEQ ID NO: 324423 - DNA, 12 bp, Artificial Sequence
  Oligonucleotide primer for the detection of SNP TSC0032010
catataaccatc

SEQ ID NO: 324424 - DNA, 12 bp, Artificial Sequence
  Oligonucleotide primer for the detection of SNP TSC0032010
atggaaagtaag

SEQ ID NO: 324425 - DNA, 12 bp, Artificial Sequence
  Oligonucleotide primer for the detection of SNP TSC0032010
tatataattatt

SEQ ID NO: 324426 - DNA, 12 bp, Artificial Sequence
  Oligonucleotide primer for the detection of SNP TSC0032010
tatataattatc

SEQ ID NO: 324427 - DNA, 12 bp, Artificial Sequence
  Oligonucleotide primer for the detection of SNP TSC0032011
tggaaagtaagt

SEQ ID NO: 324428 - DNA, 12 bp, Artificial Sequence
  Oligonucleotide primer for the detection of SNP TSC0032011
tggaaagtaagc

SEQ ID NO: 324429 - DNA, 12 bp, Artificial Sequence
  Oligonucleotide primer for the detection of SNP TSC0032011
gtatataattat

SEQ ID NO: 324430 - DNA, 12 bp, Artificial Sequence
  Oligonucleotide primer for the detection of SNP TSC0032013
taaccctaaaaa

SEQ ID NO: 324431 - DNA, 12 bp, Artificial Sequence
  Oligonucleotide primer for the detection of SNP TSC0032013
ggttttttggga

SEQ ID NO: 324432 - DNA, 12 bp, Artificial Sequence
  Oligonucleotide primer for the detection of SNP TSC0032013
ggtttttcggga

SEQ ID NO: 324433 - DNA, 12 bp, Artificial Sequence
  Oligonucleotide primer for the detection of SNP TSC0032013
acttcccaaaaa

SEQ ID NO: 324434 - DNA, 12 bp, Artificial Sequence
  Oligonucleotide primer for the detection of SNP TSC0032013
acttcccgaaaa

SEQ ID NO: 324435 - DNA, 12 bp, Artificial Sequence
  Oligonucleotide primer for the detection of SNP TSC0032013
tggttttagggg

SEQ ID NO: 324436 - DNA, 12 bp, Artificial Sequence
  Oligonucleotide primer for the detection of SNP TSC0032014
taggtttaagag

SEQ ID NO: 324437 - DNA, 12 bp, Artificial Sequence
  Oligonucleotide primer for the detection of SNP TSC0032016
tttttcttctaa

SEQ ID NO: 324438 - DNA, 12 bp, Artificial Sequence
  Oligonucleotide primer for the detection of SNP TSC0032016
agaggaatattg

SEQ ID NO: 324439 - DNA, 12 bp, Artificial Sequence
  Oligonucleotide primer for the detection of SNP TSC0032017
acttcaccctac

SEQ ID NO: 324440 - DNA, 12 bp, Artificial Sequence
  Oligonucleotide primer for the detection of SNP TSC0032017
acttcgccctac

SEQ ID NO: 324441 - DNA, 12 bp, Artificial Sequence
  Oligonucleotide primer for the detection of SNP TSC0032017
ttttagtatttc

SEQ ID NO: 324442 - DNA, 12 bp, Artificial Sequence
  Oligonucleotide primer for the detection of SNP TSC0032017
tcccaacacttc

SEQ ID NO: 324443 - DNA, 12 bp, Artificial Sequence
  Oligonucleotide primer for the detection of SNP TSC0032017
gtttcgttttgt

SEQ ID NO: 324444 - DNA, 12 bp, Artificial Sequence
  Oligonucleotide primer for the detection of SNP TSC0032017
gttttgttttgc

SEQ ID NO: 324445 - DNA, 12 bp, Artificial Sequence
  Oligonucleotide primer for the detection of SNP TSC0032017
gtttcgttttgc

SEQ ID NO: 324446 - DNA, 12 bp, Artificial Sequence
  Oligonucleotide primer for the detection of SNP TSC0032018
aaactccctcat

SEQ ID NO: 324447 - DNA, 12 bp, Artificial Sequence
  Oligonucleotide primer for the detection of SNP TSC0032018
tatatggtttta

SEQ ID NO: 324448 - DNA, 12 bp, Artificial Sequence
  Oligonucleotide primer for the detection of SNP TSC0032019
taaaacaaaaac

SEQ ID NO: 324449 - DNA, 12 bp, Artificial Sequence
  Oligonucleotide primer for the detection of SNP TSC0032019
gggttttataaa

SEQ ID NO: 324450 - DNA, 12 bp, Artificial Sequence
  Oligonucleotide primer for the detection of SNP TSC0032020
tttttggttttc

SEQ ID NO: 324451 - DNA, 12 bp, Artificial Sequence
  Oligonucleotide primer for the detection of SNP TSC0032020
tattcctaacct

SEQ ID NO: 324452 - DNA, 12 bp, Artificial Sequence
  Oligonucleotide primer for the detection of SNP TSC0032020
tttggtggtggt

SEQ ID NO: 324453 - DNA, 12 bp, Artificial Sequence
  Oligonucleotide primer for the detection of SNP TSC0032022
ctactttctaat

SEQ ID NO: 324454 - DNA, 12 bp, Artificial Sequence
  Oligonucleotide primer for the detection of SNP TSC0032022
aaaattaaaatg

SEQ ID NO: 324455 - DNA, 12 bp, Artificial Sequence
  Oligonucleotide primer for the detection of SNP TSC0032022
ttgttttttaat

SEQ ID NO: 324456 - DNA, 12 bp, Artificial Sequence
  Oligonucleotide primer for the detection of SNP TSC0032024
ttaattaatact

SEQ ID NO: 324457 - DNA, 12 bp, Artificial Sequence
  Oligonucleotide primer for the detection of SNP TSC0032024
tttaatatttag

SEQ ID NO: 324458 - DNA, 12 bp, Artificial Sequence
  Oligonucleotide primer for the detection of SNP TSC0032025
taacatttatct

SEQ ID NO: 324459 - DNA, 12 bp, Artificial Sequence
  Oligonucleotide primer for the detection of SNP TSC0032025
gttttgggaatg

SEQ ID NO: 324460 - DNA, 12 bp, Artificial Sequence
  Oligonucleotide primer for the detection of SNP TSC0032026
cccctcccctcc

SEQ ID NO: 324461 - DNA, 12 bp, Artificial Sequence
  Oligonucleotide primer for the detection of SNP TSC0032026
aagggaaaagaa

SEQ ID NO: 324462 - DNA, 12 bp, Artificial Sequence
  Oligonucleotide primer for the detection of SNP TSC0032030
atccaaccaaaa

SEQ ID NO: 324463 - DNA, 12 bp, Artificial Sequence
  Oligonucleotide primer for the detection of SNP TSC0032030
aatgaagttttt

SEQ ID NO: 324464 - DNA, 12 bp, Artificial Sequence
  Oligonucleotide primer for the detection of SNP TSC0032030
aataaaattttc

SEQ ID NO: 324465 - DNA, 12 bp, Artificial Sequence
  Oligonucleotide primer for the detection of SNP TSC0032030
atttagttaaga

SEQ ID NO: 324466 - DNA, 12 bp, Artificial Sequence
  Oligonucleotide primer for the detection of SNP TSC0032031
caatatctttcc

SEQ ID NO: 324467 - DNA, 12 bp, Artificial Sequence
  Oligonucleotide primer for the detection of SNP TSC0032031
tttaatgtgtta

SEQ ID NO: 324468 - DNA, 12 bp, Artificial Sequence
  Oligonucleotide primer for the detection of SNP TSC0032032
attatggtaggt

SEQ ID NO: 324469 - DNA, 12 bp, Artificial Sequence
  Oligonucleotide primer for the detection of SNP TSC0032032
accataacaaat

SEQ ID NO: 324470 - DNA, 12 bp, Artificial Sequence
  Oligonucleotide primer for the detection of SNP TSC0032032
gggagatagata

SEQ ID NO: 324471 - DNA, 12 bp, Artificial Sequence
  Oligonucleotide primer for the detection of SNP TSC0032035
gtttttatgtgt

SEQ ID NO: 324472 - DNA, 12 bp, Artificial Sequence
  Oligonucleotide primer for the detection of SNP TSC0032035
acttccatatat

SEQ ID NO: 324473 - DNA, 12 bp, Artificial Sequence
  Oligonucleotide primer for the detection of SNP TSC0032035
agagtgagtgta

SEQ ID NO: 324474 - DNA, 12 bp, Artificial Sequence
  Oligonucleotide primer for the detection of SNP TSC0032036
tgggatggagaa

SEQ ID NO: 324475 - DNA, 12 bp, Artificial Sequence
  Oligonucleotide primer for the detection of SNP TSC0032036
tgggacggagaa

SEQ ID NO: 324476 - DNA, 12 bp, Artificial Sequence
  Oligonucleotide primer for the detection of SNP TSC0032036
taaaacgaaaaa

SEQ ID NO: 324477 - DNA, 12 bp, Artificial Sequence
  Oligonucleotide primer for the detection of SNP TSC0032036
tttgtgggttgt

SEQ ID NO: 324478 - DNA, 12 bp, Artificial Sequence
  Oligonucleotide primer for the detection of SNP TSC0032037
aaacaatcttcc

SEQ ID NO: 324479 - DNA, 12 bp, Artificial Sequence
  Oligonucleotide primer for the detection of SNP TSC0032037
gggagaatgaag

SEQ ID NO: 324480 - DNA, 12 bp, Artificial Sequence
  Oligonucleotide primer for the detection of SNP TSC0032037
aagtaatttttt

SEQ ID NO: 324481 - DNA, 12 bp, Artificial Sequence
  Oligonucleotide primer for the detection of SNP TSC0032044
tccaaattttta

SEQ ID NO: 324482 - DNA, 12 bp, Artificial Sequence
  Oligonucleotide primer for the detection of SNP TSC0032044
gttatatttaat

SEQ ID NO: 324483 - DNA, 12 bp, Artificial Sequence
  Oligonucleotide primer for the detection of SNP TSC0032044
attacatctaat

SEQ ID NO: 324484 - DNA, 12 bp, Artificial Sequence
  Oligonucleotide primer for the detection of SNP TSC0032044
tttaggttttta

SEQ ID NO: 324485 - DNA, 12 bp, Artificial Sequence
  Oligonucleotide primer for the detection of SNP TSC0032052
aacacacacaca

SEQ ID NO: 324486 - DNA, 12 bp, Artificial Sequence
  Oligonucleotide primer for the detection of SNP TSC0032052
aaaaaatgttat

SEQ ID NO: 324487 - DNA, 12 bp, Artificial Sequence
  Oligonucleotide primer for the detection of SNP TSC0032053
tacaacaactac

SEQ ID NO: 324488 - DNA, 12 bp, Artificial Sequence
  Oligonucleotide primer for the detection of SNP TSC0032053
gagtatgttttg

SEQ ID NO: 324489 - DNA, 12 bp, Artificial Sequence
  Oligonucleotide primer for the detection of SNP TSC0032053
gagtacgttttg

SEQ ID NO: 324490 - DNA, 12 bp, Artificial Sequence
  Oligonucleotide primer for the detection of SNP TSC0032054
aatttctataat

SEQ ID NO: 324491 - DNA, 12 bp, Artificial Sequence
  Oligonucleotide primer for the detection of SNP TSC0032054
gttttttttatg

SEQ ID NO: 324492 - DNA, 12 bp, Artificial Sequence
  Oligonucleotide primer for the detection of SNP TSC0032055
tcttcattcccc

SEQ ID NO: 324493 - DNA, 12 bp, Artificial Sequence
  Oligonucleotide primer for the detection of SNP TSC0032055
ttagttttatta

SEQ ID NO: 324494 - DNA, 12 bp, Artificial Sequence
  Oligonucleotide primer for the detection of SNP TSC0032055
ttaatcttatta

SEQ ID NO: 324495 - DNA, 12 bp, Artificial Sequence
  Oligonucleotide primer for the detection of SNP TSC0032056
ttatatataacc

SEQ ID NO: 324496 - DNA, 12 bp, Artificial Sequence
  Oligonucleotide primer for the detection of SNP TSC0032056
taattgaaaata

SEQ ID NO: 324497 - DNA, 12 bp, Artificial Sequence
  Oligonucleotide primer for the detection of SNP TSC0032056
taatcgaaaata

SEQ ID NO: 324498 - DNA, 12 bp, Artificial Sequence
  Oligonucleotide primer for the detection of SNP TSC0032058
aattacttaaat

SEQ ID NO: 324499 - DNA, 12 bp, Artificial Sequence
  Oligonucleotide primer for the detection of SNP TSC0032058
ttttgtttttcg

SEQ ID NO: 324500 - DNA, 12 bp, Artificial Sequence
  Oligonucleotide primer for the detection of SNP TSC0032059
cacctaccctct

SEQ ID NO: 324501 - DNA, 12 bp, Artificial Sequence
  Oligonucleotide primer for the detection of SNP TSC0032059
cgcctaccctct

SEQ ID NO: 324502 - DNA, 12 bp, Artificial Sequence
  Oligonucleotide primer for the detection of SNP TSC0032059
taggatttttga

SEQ ID NO: 324503 - DNA, 12 bp, Artificial Sequence
  Oligonucleotide primer for the detection of SNP TSC0032061
tctaactacctc

SEQ ID NO: 324504 - DNA, 12 bp, Artificial Sequence
  Oligonucleotide primer for the detection of SNP TSC0032061
aataagagtttt

SEQ ID NO: 324505 - DNA, 12 bp, Artificial Sequence
  Oligonucleotide primer for the detection of SNP TSC0032061
aataagagtttc

SEQ ID NO: 324506 - DNA, 12 bp, Artificial Sequence
  Oligonucleotide primer for the detection of SNP TSC0032061
tttggttgtttc

SEQ ID NO: 324507 - DNA, 12 bp, Artificial Sequence
  Oligonucleotide primer for the detection of SNP TSC0032062
ccaaacaatcaa

SEQ ID NO: 324508 - DNA, 12 bp, Artificial Sequence
  Oligonucleotide primer for the detection of SNP TSC0032062
tgggtttttaag

SEQ ID NO: 324509 - DNA, 12 bp, Artificial Sequence
  Oligonucleotide primer for the detection of SNP TSC0032062
taaatttctaaa

SEQ ID NO: 324510 - DNA, 12 bp, Artificial Sequence
  Oligonucleotide primer for the detection of SNP TSC0032062
gttaagtagtta

SEQ ID NO: 324511 - DNA, 12 bp, Artificial Sequence
  Oligonucleotide primer for the detection of SNP TSC0032063
tattaaatacct

SEQ ID NO: 324512 - DNA, 12 bp, Artificial Sequence
  Oligonucleotide primer for the detection of SNP TSC0032063
atggtgttattt

SEQ ID NO: 324513 - DNA, 12 bp, Artificial Sequence
  Oligonucleotide primer for the detection of SNP TSC0032063
ataatatcacct

SEQ ID NO: 324514 - DNA, 12 bp, Artificial Sequence
  Oligonucleotide primer for the detection of SNP TSC0032063
tattaagtattt

SEQ ID NO: 324515 - DNA, 12 bp, Artificial Sequence
  Oligonucleotide primer for the detection of SNP TSC0032067
ctcctaaatatc

SEQ ID NO: 324516 - DNA, 12 bp, Artificial Sequence
  Oligonucleotide primer for the detection of SNP TSC0032067
taaagtaagggg

SEQ ID NO: 324517 - DNA, 12 bp, Artificial Sequence
  Oligonucleotide primer for the detection of SNP TSC0032070
agtttgttaaaa

SEQ ID NO: 324518 - DNA, 12 bp, Artificial Sequence
  Oligonucleotide primer for the detection of SNP TSC0032071
catcctcataat

SEQ ID NO: 324519 - DNA, 12 bp, Artificial Sequence
  Oligonucleotide primer for the detection of SNP TSC0032071
gtggatattttg

SEQ ID NO: 324520 - DNA, 12 bp, Artificial Sequence
  Oligonucleotide primer for the detection of SNP TSC0032072
ttgagggattga

SEQ ID NO: 324521 - DNA, 12 bp, Artificial Sequence
  Oligonucleotide primer for the detection of SNP TSC0032073
tgtaatggtgtg

SEQ ID NO: 324522 - DNA, 12 bp, Artificial Sequence
  Oligonucleotide primer for the detection of SNP TSC0032073
tgtaatggcgtg

SEQ ID NO: 324523 - DNA, 12 bp, Artificial Sequence
  Oligonucleotide primer for the detection of SNP TSC0032073
tgtaatggtgcg

SEQ ID NO: 324524 - DNA, 12 bp, Artificial Sequence
  Oligonucleotide primer for the detection of SNP TSC0032073
tgtaatggcgcg

SEQ ID NO: 324525 - DNA, 12 bp, Artificial Sequence
  Oligonucleotide primer for the detection of SNP TSC0032076
ctcaacaccccc

SEQ ID NO: 324526 - DNA, 12 bp, Artificial Sequence
  Oligonucleotide primer for the detection of SNP TSC0032077
acatacaccacc

SEQ ID NO: 324527 - DNA, 12 bp, Artificial Sequence
  Oligonucleotide primer for the detection of SNP TSC0032077
acatacgccacc

SEQ ID NO: 324528 - DNA, 12 bp, Artificial Sequence
  Oligonucleotide primer for the detection of SNP TSC0032077
gtatgcgttatt

SEQ ID NO: 324529 - DNA, 12 bp, Artificial Sequence
  Oligonucleotide primer for the detection of SNP TSC0032085
aaatcctacaac

SEQ ID NO: 324530 - DNA, 12 bp, Artificial Sequence
  Oligonucleotide primer for the detection of SNP TSC0032085
gaatagttaggg

SEQ ID NO: 324531 - DNA, 12 bp, Artificial Sequence
  Oligonucleotide primer for the detection of SNP TSC0032086
tccaaatatccc

SEQ ID NO: 324532 - DNA, 12 bp, Artificial Sequence
  Oligonucleotide primer for the detection of SNP TSC0032086
tgggtttaaaga

SEQ ID NO: 324533 - DNA, 12 bp, Artificial Sequence
  Oligonucleotide primer for the detection of SNP TSC0032087
tcacttctaaaa

SEQ ID NO: 324534 - DNA, 12 bp, Artificial Sequence
  Oligonucleotide primer for the detection of SNP TSC0032087
gaggatagtagg

SEQ ID NO: 324535 - DNA, 12 bp, Artificial Sequence
  Oligonucleotide primer for the detection of SNP TSC0032087
tgatttattttt

SEQ ID NO: 324536 - DNA, 12 bp, Artificial Sequence
  Oligonucleotide primer for the detection of SNP TSC0032093
tttgttggggag

SEQ ID NO: 324537 - DNA, 12 bp, Artificial Sequence
  Oligonucleotide primer for the detection of SNP TSC0032093
tttgtcggggag

SEQ ID NO: 324538 - DNA, 12 bp, Artificial Sequence
  Oligonucleotide primer for the detection of SNP TSC0032093
ctatcaaaaaaa

SEQ ID NO: 324539 - DNA, 12 bp, Artificial Sequence
  Oligonukleotid-Primer
ctatcgaaaaaa

SEQ ID NO: 324540 - DNA, 12 bp, Artificial Sequence
  Oligonucleotide primer for the detection of SNP TSC0032093
tagtaaatgaat

SEQ ID NO: 324541 - DNA, 12 bp, Artificial Sequence
  Oligonucleotide primer for the detection of SNP TSC0032094
cactttacccac

SEQ ID NO: 324542 - DNA, 12 bp, Artificial Sequence
  Oligonucleotide primer for the detection of SNP TSC0032094
atggaaaattga

SEQ ID NO: 324543 - DNA, 12 bp, Artificial Sequence
  Oligonukleotid-Primer
aatttgtgatgt

SEQ ID NO: 324544 - DNA, 12 bp, Artificial Sequence
  Oligonucleotide primer for the detection of SNP TSC0032096
aatttgcgatgt

SEQ ID NO: 324545 - DNA, 12 bp, Artificial Sequence
  Oligonucleotide primer for the detection of SNP TSC0032096
aatttgtgacgt

SEQ ID NO: 324546 - DNA, 12 bp, Artificial Sequence
  Oligonucleotide primer for the detection of SNP TSC0032096
aatttgcgacgt

SEQ ID NO: 324547 - DNA, 12 bp, Artificial Sequence
  Oligonucleotide primer for the detection of SNP TSC0032096
aatctacaacac

SEQ ID NO: 324548 - DNA, 12 bp, Artificial Sequence
  Oligonucleotide primer for the detection of SNP TSC0032096
aatctacaacgc

SEQ ID NO: 324549 - DNA, 12 bp, Artificial Sequence
  Oligonucleotide primer for the detection of SNP TSC0032096
aatctacgacac

SEQ ID NO: 324550 - DNA, 12 bp, Artificial Sequence
  Oligonucleotide primer for the detection of SNP TSC0032096
aatctacgacgc

SEQ ID NO: 324551 - DNA, 12 bp, Artificial Sequence
  Oligonucleotide primer for the detection of SNP TSC0032096
gtttatgatgag

SEQ ID NO: 324552 - DNA, 12 bp, Artificial Sequence
  Oligonucleotide primer for the detection of SNP TSC0032096
gtttacgatgag

SEQ ID NO: 324553 - DNA, 12 bp, Artificial Sequence
  Oligonucleotide primer for the detection of SNP TSC0032096
gtttatgacgag

SEQ ID NO: 324554 - DNA, 12 bp, Artificial Sequence
  Oligonucleotide primer for the detection of SNP TSC0032096
gtttacgacgag

SEQ ID NO: 324555 - DNA, 12 bp, Artificial Sequence
  Oligonucleotide primer for the detection of SNP TSC0032097
cttccaaccaaa

SEQ ID NO: 324556 - DNA, 12 bp, Artificial Sequence
  Oligonucleotide primer for the detection of SNP TSC0032097
ttaattagtttt

SEQ ID NO: 324557 - DNA, 12 bp, Artificial Sequence
  Oligonucleotide primer for the detection of SNP TSC0032097
taatcaacttta

SEQ ID NO: 324558 - DNA, 12 bp, Artificial Sequence
  Oligonucleotide primer for the detection of SNP TSC0032098
ctcccaaatctt

SEQ ID NO: 324559 - DNA, 12 bp, Artificial Sequence
  Oligonucleotide primer for the detection of SNP TSC0032099
cttcaacaaccc

SEQ ID NO: 324560 - DNA, 12 bp, Artificial Sequence
  Oligonucleotide primer for the detection of SNP TSC0032100
ttaaaaccccaa

SEQ ID NO: 324561 - DNA, 12 bp, Artificial Sequence
  Oligonucleotide primer for the detection of SNP TSC0032100
ttttgtggggga

SEQ ID NO: 324562 - DNA, 12 bp, Artificial Sequence
  Oligonucleotide primer for the detection of SNP TSC0032100
ctctataaaaaa

SEQ ID NO: 324563 - DNA, 12 bp, Artificial Sequence
  Oligonucleotide primer for the detection of SNP TSC0032107
actaaaatcaaa

SEQ ID NO: 324564 - DNA, 12 bp, Artificial Sequence
  Oligonucleotide primer for the detection of SNP TSC0032107
agaatagatatt

SEQ ID NO: 324565 - DNA, 12 bp, Artificial Sequence
  Oligonucleotide primer for the detection of SNP TSC0032107
aaacaaatacca

SEQ ID NO: 324566 - DNA, 12 bp, Artificial Sequence
  Oligonucleotide primer for the detection of SNP TSC0032107
ttaagattaagt

SEQ ID NO: 324567 - DNA, 12 bp, Artificial Sequence
  Oligonucleotide primer for the detection of SNP TSC0032108
tattttcttccc

SEQ ID NO: 324568 - DNA, 12 bp, Artificial Sequence
  Oligonucleotide primer for the detection of SNP TSC0032108
ttttttgttaag

SEQ ID NO: 324569 - DNA, 12 bp, Artificial Sequence
  Oligonucleotide primer for the detection of SNP TSC0032110
tgtgttttgaaa

SEQ ID NO: 324570 - DNA, 12 bp, Artificial Sequence
  Oligonucleotide primer for the detection of SNP TSC0032112
tttcatacaaaa

SEQ ID NO: 324571 - DNA, 12 bp, Artificial Sequence
  Oligonucleotide primer for the detection of SNP TSC0032112
ttatattatgag

SEQ ID NO: 324572 - DNA, 12 bp, Artificial Sequence
  Oligonucleotide primer for the detection of SNP TSC0032112
ttatattataaa

SEQ ID NO: 324573 - DNA, 12 bp, Artificial Sequence
  Oligonucleotide primer for the detection of SNP TSC0032114
aataccaaaacc

SEQ ID NO: 324574 - DNA, 12 bp, Artificial Sequence
  Oligonucleotide primer for the detection of SNP TSC0032114
ttttcaaaacta

SEQ ID NO: 324575 - DNA, 12 bp, Artificial Sequence
  Oligonucleotide primer for the detection of SNP TSC0032114
aatgttaaagtt

SEQ ID NO: 324576 - DNA, 12 bp, Artificial Sequence
  Oligonucleotide primer for the detection of SNP TSC0032118
gtatttttgtgt

SEQ ID NO: 324577 - DNA, 12 bp, Artificial Sequence
  Oligonucleotide primer for the detection of SNP TSC0032119
acaactctcaaa

SEQ ID NO: 324578 - DNA, 12 bp, Artificial Sequence
  Oligonucleotide primer for the detection of SNP TSC0032119
acgactctcaaa

SEQ ID NO: 324579 - DNA, 12 bp, Artificial Sequence
  Oligonucleotide primer for the detection of SNP TSC0032119
taatgtgtggtt

SEQ ID NO: 324580 - DNA, 12 bp, Artificial Sequence
  Oligonucleotide primer for the detection of SNP TSC0032119
taacgtgtggtt

SEQ ID NO: 324581 - DNA, 12 bp, Artificial Sequence
  Oligonucleotide primer for the detection of SNP TSC0032119
taatgtgcggtt

SEQ ID NO: 324582 - DNA, 12 bp, Artificial Sequence
  Oligonucleotide primer for the detection of SNP TSC0032119
taacgtgcggtt

SEQ ID NO: 324583 - DNA, 12 bp, Artificial Sequence
  Oligonucleotide primer for the detection of SNP TSC0032119
caacatacaatc

SEQ ID NO: 324584 - DNA, 12 bp, Artificial Sequence
  Oligonucleotide primer for the detection of SNP TSC0032119
caacatacgatc

SEQ ID NO: 324585 - DNA, 12 bp, Artificial Sequence
  Oligonucleotide primer for the detection of SNP TSC0032119
caacgtacaatc

SEQ ID NO: 324586 - DNA, 12 bp, Artificial Sequence
  Oligonucleotide primer for the detection of SNP TSC0032119
caacgtacgatc

SEQ ID NO: 324587 - DNA, 12 bp, Artificial Sequence
  Oligonucleotide primer for the detection of SNP TSC0032119
gtgatttttaga

SEQ ID NO: 324588 - DNA, 12 bp, Artificial Sequence
  Oligonucleotide primer for the detection of SNP TSC0032119
gcgatttttaga

SEQ ID NO: 324589 - DNA, 12 bp, Artificial Sequence
  Oligonucleotide primer for the detection of SNP TSC0032120
actatataaaat

SEQ ID NO: 324590 - DNA, 12 bp, Artificial Sequence
  Oligonucleotide primer for the detection of SNP TSC0032120
ttttggtaaatg

SEQ ID NO: 324591 - DNA, 12 bp, Artificial Sequence
  Oligonucleotide primer for the detection of SNP TSC0032121
cccattatacaa

SEQ ID NO: 324592 - DNA, 12 bp, Artificial Sequence
  Oligonucleotide primer for the detection of SNP TSC0032121
cctatttcccca

SEQ ID NO: 324593 - DNA, 12 bp, Artificial Sequence
  Oligonucleotide primer for the detection of SNP TSC0032121
ttttattgtata

SEQ ID NO: 324594 - DNA, 12 bp, Artificial Sequence
  Oligonucleotide primer for the detection of SNP TSC0032122
ttttagtagttg

SEQ ID NO: 324595 - DNA, 12 bp, Artificial Sequence
  Oligonucleotide primer for the detection of SNP TSC0032123
tataccacttcc

SEQ ID NO: 324596 - DNA, 12 bp, Artificial Sequence
  Oligonucleotide primer for the detection of SNP TSC0032123
attattagatag

SEQ ID NO: 324597 - DNA, 12 bp, Artificial Sequence
  Oligonucleotide primer for the detection of SNP TSC0032127
aaaacattaatc

SEQ ID NO: 324598 - DNA, 12 bp, Artificial Sequence
  Oligonucleotide primer for the detection of SNP TSC0032127
aaaacgttaatc

SEQ ID NO: 324599 - DNA, 12 bp, Artificial Sequence
  Oligonucleotide primer for the detection of SNP TSC0032127
tttgaggtttga

SEQ ID NO: 324600 - DNA, 12 bp, Artificial Sequence
  Oligonucleotide primer for the detection of SNP TSC0032127
ttcgaggtttga

SEQ ID NO: 324601 - DNA, 12 bp, Artificial Sequence
  Oligonucleotide primer for the detection of SNP TSC0032127
tttgaggttcga

SEQ ID NO: 324602 - DNA, 12 bp, Artificial Sequence
  Oligonucleotide primer for the detection of SNP TSC0032127
ttcgaggttcga

SEQ ID NO: 324603 - DNA, 12 bp, Artificial Sequence
  Oligonucleotide primer for the detection of SNP TSC0032133
aaacaccccccc

SEQ ID NO: 324604 - DNA, 12 bp, Artificial Sequence
  Oligonucleotide primer for the detection of SNP TSC0032133
aaacgccccccc

SEQ ID NO: 324605 - DNA, 12 bp, Artificial Sequence
  Oligonucleotide primer for the detection of SNP TSC0032133
gggttgggtagg

SEQ ID NO: 324606 - DNA, 12 bp, Artificial Sequence
  Oligonucleotide primer for the detection of SNP TSC0032133
aggtgttttttt

SEQ ID NO: 324607 - DNA, 12 bp, Artificial Sequence
  Oligonucleotide primer for the detection of SNP TSC0032133
aggcgttttttt

SEQ ID NO: 324608 - DNA, 12 bp, Artificial Sequence
  Oligonucleotide primer for the detection of SNP TSC0032134
aaaacacccccc

SEQ ID NO: 324609 - DNA, 12 bp, Artificial Sequence
  Oligonucleotide primer for the detection of SNP TSC0032134
aaaacgcccccc

SEQ ID NO: 324610 - DNA, 12 bp, Artificial Sequence
  Oligonucleotide primer for the detection of SNP TSC0032134
gaaacacccccc

SEQ ID NO: 324611 - DNA, 12 bp, Artificial Sequence
  Oligonucleotide primer for the detection of SNP TSC0032134
gaaacgcccccc

SEQ ID NO: 324612 - DNA, 12 bp, Artificial Sequence
  Oligonukleotid-Primer
ggttgggtaggg

SEQ ID NO: 324613 - DNA, 12 bp, Artificial Sequence
  Oligonucleotide primer for the detection of SNP TSC0032134
gaggtgtttttt

SEQ ID NO: 324614 - DNA, 12 bp, Artificial Sequence
  Oligonucleotide primer for the detection of SNP TSC0032134
gaggcgtttttt

SEQ ID NO: 324615 - DNA, 12 bp, Artificial Sequence
  Oligonucleotide primer for the detection of SNP TSC0032135
taaataactacc

SEQ ID NO: 324616 - DNA, 12 bp, Artificial Sequence
  Oligonucleotide primer for the detection of SNP TSC0032135
agtagtgtttgg

SEQ ID NO: 324617 - DNA, 12 bp, Artificial Sequence
  Oligonucleotide primer for the detection of SNP TSC0032141
tttttaaaatcc

SEQ ID NO: 324618 - DNA, 12 bp, Artificial Sequence
  Oligonucleotide primer for the detection of SNP TSC0032144
attaattgtttt

SEQ ID NO: 324619 - DNA, 12 bp, Artificial Sequence
  Oligonucleotide primer for the detection of SNP TSC0032144
taattatcttaa

SEQ ID NO: 324620 - DNA, 12 bp, Artificial Sequence
  Oligonucleotide primer for the detection of SNP TSC0032144
tagaagttggtt

SEQ ID NO: 324621 - DNA, 12 bp, Artificial Sequence
  Oligonucleotide primer for the detection of SNP TSC0032146
accaactaaatt

SEQ ID NO: 324622 - DNA, 12 bp, Artificial Sequence
  Oligonucleotide primer for the detection of SNP TSC0032146
accgactaaatt

SEQ ID NO: 324623 - DNA, 12 bp, Artificial Sequence
  Oligonucleotide primer for the detection of SNP TSC0032146
tttgggttgtta

SEQ ID NO: 324624 - DNA, 12 bp, Artificial Sequence
  Oligonucleotide primer for the detection of SNP TSC0032146
tttgggtcgtta

SEQ ID NO: 324625 - DNA, 12 bp, Artificial Sequence
  Oligonucleotide primer for the detection of SNP TSC0032148
aactaatctttt

SEQ ID NO: 324626 - DNA, 12 bp, Artificial Sequence
  Oligonucleotide primer for the detection of SNP TSC0032148
tgggagaaagaa

SEQ ID NO: 324627 - DNA, 12 bp, Artificial Sequence
  Oligonucleotide primer for the detection of SNP TSC0032149
cactttaaatac

SEQ ID NO: 324628 - DNA, 12 bp, Artificial Sequence
  Oligonucleotide primer for the detection of SNP TSC0032149
attttaagaaag

SEQ ID NO: 324629 - DNA, 12 bp, Artificial Sequence
  Oligonucleotide primer for the detection of SNP TSC0032149
attctaaaaaaa

SEQ ID NO: 324630 - DNA, 12 bp, Artificial Sequence
  Oligonucleotide primer for the detection of SNP TSC0032149
tattttagatat

SEQ ID NO: 324631 - DNA, 12 bp, Artificial Sequence
  Oligonucleotide primer for the detection of SNP TSC0032151
aaactttataat

SEQ ID NO: 324632 - DNA, 12 bp, Artificial Sequence
  Oligonucleotide primer for the detection of SNP TSC0032151
taataattggag

SEQ ID NO: 324633 - DNA, 12 bp, Artificial Sequence
  Oligonucleotide primer for the detection of SNP TSC0032152
tacacataaaaa

SEQ ID NO: 324634 - DNA, 12 bp, Artificial Sequence
  Oligonucleotide primer for the detection of SNP TSC0032152
ctatacctcact

SEQ ID NO: 324635 - DNA, 12 bp, Artificial Sequence
  Oligonucleotide primer for the detection of SNP TSC0032152
tatatatgagga

SEQ ID NO: 324636 - DNA, 12 bp, Artificial Sequence
  Oligonucleotide primer for the detection of SNP TSC0032153
ttctctatacat

SEQ ID NO: 324637 - DNA, 12 bp, Artificial Sequence
  Oligonucleotide primer for the detection of SNP TSC0032153
ttttttgtgtat

SEQ ID NO: 324638 - DNA, 12 bp, Artificial Sequence
  Oligonucleotide primer for the detection of SNP TSC0032154
aaactataaact

SEQ ID NO: 324639 - DNA, 12 bp, Artificial Sequence
  Oligonucleotide primer for the detection of SNP TSC0032154
tttgtgtgtgga

SEQ ID NO: 324640 - DNA, 12 bp, Artificial Sequence
  Oligonucleotide primer for the detection of SNP TSC0032154
cttatatataaa

SEQ ID NO: 324641 - DNA, 12 bp, Artificial Sequence
  Oligonucleotide primer for the detection of SNP TSC0032154
gggttgtaggtt

SEQ ID NO: 324642 - DNA, 12 bp, Artificial Sequence
  Oligonucleotide primer for the detection of SNP TSC0032155
cggtggtttatg

SEQ ID NO: 324643 - DNA, 12 bp, Artificial Sequence
  Oligonucleotide primer for the detection of SNP TSC0032156
atctcaaataat

SEQ ID NO: 324644 - DNA, 12 bp, Artificial Sequence
  Oligonucleotide primer for the detection of SNP TSC0032156
ggaggttatggt

SEQ ID NO: 324645 - DNA, 12 bp, Artificial Sequence
  Oligonucleotide primer for the detection of SNP TSC0032156
ggaggttacggt

SEQ ID NO: 324646 - DNA, 12 bp, Artificial Sequence
  Oligonucleotide primer for the detection of SNP TSC0032156
aaccacaataaa

SEQ ID NO: 324647 - DNA, 12 bp, Artificial Sequence
  Oligonucleotide primer for the detection of SNP TSC0032156
aaccacgataaa

SEQ ID NO: 324648 - DNA, 12 bp, Artificial Sequence
  Oligonucleotide primer for the detection of SNP TSC0032156
tttaagtgattc

SEQ ID NO: 324649 - DNA, 12 bp, Artificial Sequence
  Oligonucleotide primer for the detection of SNP TSC0032157
ttgattaagttg

SEQ ID NO: 324650 - DNA, 12 bp, Artificial Sequence
  Oligonucleotide primer for the detection of SNP TSC0032158
tgtattttatta

SEQ ID NO: 324651 - DNA, 12 bp, Artificial Sequence
  Oligonucleotide primer for the detection of SNP TSC0032160
acaaatccctaa

SEQ ID NO: 324652 - DNA, 12 bp, Artificial Sequence
  Oligonucleotide primer for the detection of SNP TSC0032160
atatttggagtt

SEQ ID NO: 324653 - DNA, 12 bp, Artificial Sequence
  Oligonucleotide primer for the detection of SNP TSC0032160
acacttaaaatt

SEQ ID NO: 324654 - DNA, 12 bp, Artificial Sequence
  Oligonucleotide primer for the detection of SNP TSC0032162
tataacctccca

SEQ ID NO: 324655 - DNA, 12 bp, Artificial Sequence
  Oligonucleotide primer for the detection of SNP TSC0032162
tgttatgggtgt

SEQ ID NO: 324656 - DNA, 12 bp, Artificial Sequence
  Oligonucleotide primer for the detection of SNP TSC0032162
tgttacgggtgt

SEQ ID NO: 324657 - DNA, 12 bp, Artificial Sequence
  Oligonucleotide primer for the detection of SNP TSC0032162
ctatcacaaata

SEQ ID NO: 324658 - DNA, 12 bp, Artificial Sequence
  Oligonucleotide primer for the detection of SNP TSC0032162
ctatcacgaata

SEQ ID NO: 324659 - DNA, 12 bp, Artificial Sequence
  Oligonucleotide primer for the detection of SNP TSC0032163
caaaaaaccata

SEQ ID NO: 324660 - DNA, 12 bp, Artificial Sequence
  Oligonucleotide primer for the detection of SNP TSC0032163
caaaaaaccgta

SEQ ID NO: 324661 - DNA, 12 bp, Artificial Sequence
  Oligonucleotide primer for the detection of SNP TSC0032163
cattcccttaaa

SEQ ID NO: 324662 - DNA, 12 bp, Artificial Sequence
  Oligonucleotide primer for the detection of SNP TSC0032163
cgttcccttaaa

SEQ ID NO: 324663 - DNA, 12 bp, Artificial Sequence
  Oligonucleotide primer for the detection of SNP TSC0032163
aaagagttgtat

SEQ ID NO: 324664 - DNA, 12 bp, Artificial Sequence
  Oligonucleotide primer for the detection of SNP TSC0032163
aaagagtcgtat

SEQ ID NO: 324665 - DNA, 12 bp, Artificial Sequence
  Oligonucleotide primer for the detection of SNP TSC0032164
ttttacatttta

SEQ ID NO: 324666 - DNA, 12 bp, Artificial Sequence
  Oligonucleotide primer for the detection of SNP TSC0032164
actcttccctcc

SEQ ID NO: 324667 - DNA, 12 bp, Artificial Sequence
  Oligonucleotide primer for the detection of SNP TSC0032164
ttttgtattttg

SEQ ID NO: 324668 - DNA, 12 bp, Artificial Sequence
  Oligonucleotide primer for the detection of SNP TSC0032169
cacaaactaccc

SEQ ID NO: 324669 - DNA, 12 bp, Artificial Sequence
  Oligonucleotide primer for the detection of SNP TSC0032169
aaggtttattta

SEQ ID NO: 324670 - DNA, 12 bp, Artificial Sequence
  Oligonucleotide primer for the detection of SNP TSC0032169
aaaattcaccca

SEQ ID NO: 324671 - DNA, 12 bp, Artificial Sequence
  Oligonucleotide primer for the detection of SNP TSC0032169
tataggttattt

SEQ ID NO: 324672 - DNA, 12 bp, Artificial Sequence
  Oligonucleotide primer for the detection of SNP TSC0032171
caaaaatcataa

SEQ ID NO: 324673 - DNA, 12 bp, Artificial Sequence
  Oligonucleotide primer for the detection of SNP TSC0032171
ttttattttatg

SEQ ID NO: 324674 - DNA, 12 bp, Artificial Sequence
  Oligonucleotide primer for the detection of SNP TSC0032171
ctctatttcata

SEQ ID NO: 324675 - DNA, 12 bp, Artificial Sequence
  Oligonucleotide primer for the detection of SNP TSC0032171
aattatgatttt

SEQ ID NO: 324676 - DNA, 12 bp, Artificial Sequence
  Oligonucleotide primer for the detection of SNP TSC0032172
ttttatgtaaaa

SEQ ID NO: 324677 - DNA, 12 bp, Artificial Sequence
  Oligonucleotide primer for the detection of SNP TSC0032172
agattaaaaatt

SEQ ID NO: 324678 - DNA, 12 bp, Artificial Sequence
  Oligonucleotide primer for the detection of SNP TSC0032173
ttacatttattt

SEQ ID NO: 324679 - DNA, 12 bp, Artificial Sequence
  Oligonucleotide primer for the detection of SNP TSC0032174
acacattttatt

SEQ ID NO: 324680 - DNA, 12 bp, Artificial Sequence
  Oligonucleotide primer for the detection of SNP TSC0032174
taattgtgaaga

SEQ ID NO: 324681 - DNA, 12 bp, Artificial Sequence
  Oligonucleotide primer for the detection of SNP TSC0032174
taattataaaaa

SEQ ID NO: 324682 - DNA, 12 bp, Artificial Sequence
  Oligonucleotide primer for the detection of SNP TSC0032174
atatattttgtt

SEQ ID NO: 324683 - DNA, 12 bp, Artificial Sequence
  Oligonucleotide primer for the detection of SNP TSC0032177
gatactaaacac

SEQ ID NO: 324684 - DNA, 12 bp, Artificial Sequence
  Oligonucleotide primer for the detection of SNP TSC0032177
ttttaggtttgg

SEQ ID NO: 324685 - DNA, 12 bp, Artificial Sequence
  Oligonucleotide primer for the detection of SNP TSC0032177
ctctaaacctaa

SEQ ID NO: 324686 - DNA, 12 bp, Artificial Sequence
  Oligonucleotide primer for the detection of SNP TSC0032177
ggtgttgagtat

SEQ ID NO: 324687 - DNA, 12 bp, Artificial Sequence
  Oligonucleotide primer for the detection of SNP TSC0032178
aaaacaaaatat

SEQ ID NO: 324688 - DNA, 12 bp, Artificial Sequence
  Oligonucleotide primer for the detection of SNP TSC0032178
aaaacgaaatat

SEQ ID NO: 324689 - DNA, 12 bp, Artificial Sequence
  Oligonucleotide primer for the detection of SNP TSC0032178
ttattagtatgg

SEQ ID NO: 324690 - DNA, 12 bp, Artificial Sequence
  Oligonucleotide primer for the detection of SNP TSC0032180
attctatctttc

SEQ ID NO: 324691 - DNA, 12 bp, Artificial Sequence
  Oligonucleotide primer for the detection of SNP TSC0032180
gttctatctttc

SEQ ID NO: 324692 - DNA, 12 bp, Artificial Sequence
  Oligonucleotide primer for the detection of SNP TSC0032180
caactttatata

SEQ ID NO: 324693 - DNA, 12 bp, Artificial Sequence
  Oligonucleotide primer for the detection of SNP TSC0032181
tcctaaaaattt

SEQ ID NO: 324694 - DNA, 12 bp, Artificial Sequence
  Oligonucleotide primer for the detection of SNP TSC0032181
ttaggtgagtat

SEQ ID NO: 324695 - DNA, 12 bp, Artificial Sequence
  Oligonucleotide primer for the detection of SNP TSC0032181
tcaaataaacat

SEQ ID NO: 324696 - DNA, 12 bp, Artificial Sequence
  Oligonucleotide primer for the detection of SNP TSC0032181
ttttggaaattt

SEQ ID NO: 324697 - DNA, 12 bp, Artificial Sequence
  Oligonucleotide primer for the detection of SNP TSC0032184
atttgatttagg

SEQ ID NO: 324698 - DNA, 12 bp, Artificial Sequence
  Oligonucleotide primer for the detection of SNP TSC0032184
acttaacccaaa

SEQ ID NO: 324699 - DNA, 12 bp, Artificial Sequence
  Oligonucleotide primer for the detection of SNP TSC0032184
ggttgggtggtt

SEQ ID NO: 324700 - DNA, 12 bp, Artificial Sequence
  Oligonucleotide primer for the detection of SNP TSC0032185
taacaaatacca

SEQ ID NO: 324701 - DNA, 12 bp, Artificial Sequence
  Oligonucleotide primer for the detection of SNP TSC0032185
taacaaataccg

SEQ ID NO: 324702 - DNA, 12 bp, Artificial Sequence
  Oligonucleotide primer for the detection of SNP TSC0032185
cctccccctttt

SEQ ID NO: 324703 - DNA, 12 bp, Artificial Sequence
  Oligonucleotide primer for the detection of SNP TSC0032185
gtgataggtgtt

SEQ ID NO: 324704 - DNA, 12 bp, Artificial Sequence
  Oligonucleotide primer for the detection of SNP TSC0032185
gtgataggtgtc

SEQ ID NO: 324705 - DNA, 12 bp, Artificial Sequence
  Oligonukleotid-Primer
ccaaacctaaat

SEQ ID NO: 324706 - DNA, 12 bp, Artificial Sequence
  Oligonucleotide primer for the detection of SNP TSC0032186
gtagtagatata

SEQ ID NO: 324707 - DNA, 12 bp, Artificial Sequence
  Oligonucleotide primer for the detection of SNP TSC0032186
acaataaacaca

SEQ ID NO: 324708 - DNA, 12 bp, Artificial Sequence
  Oligonucleotide primer for the detection of SNP TSC0032186
ttaggtttgagt

SEQ ID NO: 324709 - DNA, 12 bp, Artificial Sequence
  Oligonucleotide primer for the detection of SNP TSC0032187
ataacacaaaac

SEQ ID NO: 324710 - DNA, 12 bp, Artificial Sequence
  Oligonucleotide primer for the detection of SNP TSC0032187
ataacacgaaac

SEQ ID NO: 324711 - DNA, 12 bp, Artificial Sequence
  Oligonucleotide primer for the detection of SNP TSC0032187
tggattgttatg

SEQ ID NO: 324712 - DNA, 12 bp, Artificial Sequence
  Oligonucleotide primer for the detection of SNP TSC0032189
ctaaaccaaaaa

SEQ ID NO: 324713 - DNA, 12 bp, Artificial Sequence
  Oligonucleotide primer for the detection of SNP TSC0032189
gtggggttattt

SEQ ID NO: 324714 - DNA, 12 bp, Artificial Sequence
  Oligonucleotide primer for the detection of SNP TSC0032189
gtggggttattc

SEQ ID NO: 324715 - DNA, 12 bp, Artificial Sequence
  Oligonucleotide primer for the detection of SNP TSC0032189
ataaaactaccc

SEQ ID NO: 324716 - DNA, 12 bp, Artificial Sequence
  Oligonucleotide primer for the detection of SNP TSC0032189
tggattaggggt

SEQ ID NO: 324717 - DNA, 12 bp, Artificial Sequence
  Oligonucleotide primer for the detection of SNP TSC0032191
cattaacctctt

SEQ ID NO: 324718 - DNA, 12 bp, Artificial Sequence
  Oligonucleotide primer for the detection of SNP TSC0032191
ggttttttttgg

SEQ ID NO: 324719 - DNA, 12 bp, Artificial Sequence
  Oligonucleotide primer for the detection of SNP TSC0032193
caaaaatatcac

SEQ ID NO: 324720 - DNA, 12 bp, Artificial Sequence
  Oligonucleotide primer for the detection of SNP TSC0032193
attagagtttta

SEQ ID NO: 324721 - DNA, 12 bp, Artificial Sequence
  Oligonucleotide primer for the detection of SNP TSC0032194
aaatcaacaaac

SEQ ID NO: 324722 - DNA, 12 bp, Artificial Sequence
  Oligonucleotide primer for the detection of SNP TSC0032194
taaagtggtggg

SEQ ID NO: 324723 - DNA, 12 bp, Artificial Sequence
  Oligonucleotide primer for the detection of SNP TSC0032195
aataaacaatac

SEQ ID NO: 324724 - DNA, 12 bp, Artificial Sequence
  Oligonucleotide primer for the detection of SNP TSC0032195
taaatttttagt

SEQ ID NO: 324725 - DNA, 12 bp, Artificial Sequence
  Oligonucleotide primer for the detection of SNP TSC0032195
aaacttctaaca

SEQ ID NO: 324726 - DNA, 12 bp, Artificial Sequence
  Oligonucleotide primer for the detection of SNP TSC0032195
gtgaataatatt

SEQ ID NO: 324727 - DNA, 12 bp, Artificial Sequence
  Oligonucleotide primer for the detection of SNP TSC0032198
gatgtttagatt

SEQ ID NO: 324728 - DNA, 12 bp, Artificial Sequence
  Oligonucleotide primer for the detection of SNP TSC0032199
tttactatacaa

SEQ ID NO: 324729 - DNA, 12 bp, Artificial Sequence
  Oligonucleotide primer for the detection of SNP TSC0032199
tttattgtgtga

SEQ ID NO: 324730 - DNA, 12 bp, Artificial Sequence
  Oligonucleotide primer for the detection of SNP TSC0032199
tttatcgtgtga

SEQ ID NO: 324731 - DNA, 12 bp, Artificial Sequence
  Oligonucleotide primer for the detection of SNP TSC0032199
cccatcatataa

SEQ ID NO: 324732 - DNA, 12 bp, Artificial Sequence
  Oligonucleotide primer for the detection of SNP TSC0032199
cccatcgtataa

SEQ ID NO: 324733 - DNA, 12 bp, Artificial Sequence
  Oligonucleotide primer for the detection of SNP TSC0032200
tctcaaaataat

SEQ ID NO: 324734 - DNA, 12 bp, Artificial Sequence
  Oligonucleotide primer for the detection of SNP TSC0032200
agatataaatta

SEQ ID NO: 324735 - DNA, 12 bp, Artificial Sequence
  Oligonucleotide primer for the detection of SNP TSC0032201
tatgtagtatta

SEQ ID NO: 324736 - DNA, 12 bp, Artificial Sequence
  Oligonucleotide primer for the detection of SNP TSC0032202
tacccaaaacat

SEQ ID NO: 324737 - DNA, 12 bp, Artificial Sequence
  Oligonucleotide primer for the detection of SNP TSC0032202
gatattggttgg

SEQ ID NO: 324738 - DNA, 12 bp, Artificial Sequence
  Oligonucleotide primer for the detection of SNP TSC0032203
aaaaaccttaaa

SEQ ID NO: 324739 - DNA, 12 bp, Artificial Sequence
  Oligonucleotide primer for the detection of SNP TSC0032203
tggaataaaaag

SEQ ID NO: 324740 - DNA, 12 bp, Artificial Sequence
  Oligonucleotide primer for the detection of SNP TSC0032203
ggaaattttaag

SEQ ID NO: 324741 - DNA, 12 bp, Artificial Sequence
  Oligonucleotide primer for the detection of SNP TSC0032204
aatctatactcc

SEQ ID NO: 324742 - DNA, 12 bp, Artificial Sequence
  Oligonucleotide primer for the detection of SNP TSC0032204
gtgttatttgta

SEQ ID NO: 324743 - DNA, 12 bp, Artificial Sequence
  Oligonucleotide primer for the detection of SNP TSC0032206
aaccacaaacga

SEQ ID NO: 324744 - DNA, 12 bp, Artificial Sequence
  Oligonucleotide primer for the detection of SNP TSC0032206
aaccgcaaacaa

SEQ ID NO: 324745 - DNA, 12 bp, Artificial Sequence
  Oligonucleotide primer for the detection of SNP TSC0032206
aaccgcaaacga

SEQ ID NO: 324746 - DNA, 12 bp, Artificial Sequence
  Oligonucleotide primer for the detection of SNP TSC0032206
ttgttgtggggt

SEQ ID NO: 324747 - DNA, 12 bp, Artificial Sequence
  Oligonucleotide primer for the detection of SNP TSC0032206
ctactataaaac

SEQ ID NO: 324748 - DNA, 12 bp, Artificial Sequence
  Oligonucleotide primer for the detection of SNP TSC0032206
ggttgtaggtgg

SEQ ID NO: 324749 - DNA, 12 bp, Artificial Sequence
  Oligonucleotide primer for the detection of SNP TSC0032206
ggtcgtaggtgg

SEQ ID NO: 324750 - DNA, 12 bp, Artificial Sequence
  Oligonucleotide primer for the detection of SNP TSC0032206
ggttgtaggcgg

SEQ ID NO: 324751 - DNA, 12 bp, Artificial Sequence
  Oligonucleotide primer for the detection of SNP TSC0032206
ggtcgtaggcgg

SEQ ID NO: 324752 - DNA, 12 bp, Artificial Sequence
  Oligonucleotide primer for the detection of SNP TSC0032207
ttataatccctc

SEQ ID NO: 324753 - DNA, 12 bp, Artificial Sequence
  Oligonucleotide primer for the detection of SNP TSC0032207
ccttttacttta

SEQ ID NO: 324754 - DNA, 12 bp, Artificial Sequence
  Oligonucleotide primer for the detection of SNP TSC0032207
ttgtgatttttc

SEQ ID NO: 324755 - DNA, 12 bp, Artificial Sequence
  Oligonucleotide primer for the detection of SNP TSC0032208
acaccaaaccct

SEQ ID NO: 324756 - DNA, 12 bp, Artificial Sequence
  Oligonucleotide primer for the detection of SNP TSC0032208
aataataagtag

SEQ ID NO: 324757 - DNA, 12 bp, Artificial Sequence
  Oligonucleotide primer for the detection of SNP TSC0032209
atacccaaaacc

SEQ ID NO: 324758 - DNA, 12 bp, Artificial Sequence
  Oligonucleotide primer for the detection of SNP TSC0032209
atggtttttaga

SEQ ID NO: 324759 - DNA, 12 bp, Artificial Sequence
  Oligonucleotide primer for the detection of SNP TSC0032210
tctattaactaa

SEQ ID NO: 324760 - DNA, 12 bp, Artificial Sequence
  Oligonucleotide primer for the detection of SNP TSC0032210
tgggggttgtat

SEQ ID NO: 324761 - DNA, 12 bp, Artificial Sequence
  Oligonucleotide primer for the detection of SNP TSC0032210
cgggggttgtat

SEQ ID NO: 324762 - DNA, 12 bp, Artificial Sequence
  Oligonucleotide primer for the detection of SNP TSC0032210
aaaaactacata

SEQ ID NO: 324763 - DNA, 12 bp, Artificial Sequence
  Oligonucleotide primer for the detection of SNP TSC0032210
gaaaactacata

SEQ ID NO: 324764 - DNA, 12 bp, Artificial Sequence
  Oligonucleotide primer for the detection of SNP TSC0032210
ttgttagttgat

SEQ ID NO: 324765 - DNA, 12 bp, Artificial Sequence
  Oligonucleotide primer for the detection of SNP TSC0032210
ttgttagttgac

SEQ ID NO: 324766 - DNA, 12 bp, Artificial Sequence
  Oligonucleotide primer for the detection of SNP TSC0032211
caaccccccact

SEQ ID NO: 324767 - DNA, 12 bp, Artificial Sequence
  Oligonucleotide primer for the detection of SNP TSC0032211
cgaccccccact

SEQ ID NO: 324768 - DNA, 12 bp, Artificial Sequence
  Oligonucleotide primer for the detection of SNP TSC0032211
agggaaggttgg

SEQ ID NO: 324769 - DNA, 12 bp, Artificial Sequence
  Oligonucleotide primer for the detection of SNP TSC0032213
aacaaataacaa

SEQ ID NO: 324770 - DNA, 12 bp, Artificial Sequence
  Oligonucleotide primer for the detection of SNP TSC0032213
tttccttcataa

SEQ ID NO: 324771 - DNA, 12 bp, Artificial Sequence
  Oligonucleotide primer for the detection of SNP TSC0032213
agatagatggta

SEQ ID NO: 324772 - DNA, 12 bp, Artificial Sequence
  Oligonucleotide primer for the detection of SNP TSC0032214
aatcttacaaaa

SEQ ID NO: 324773 - DNA, 12 bp, Artificial Sequence
  Oligonucleotide primer for the detection of SNP TSC0032214
gtattaaaattg

SEQ ID NO: 324774 - DNA, 12 bp, Artificial Sequence
  Oligonucleotide primer for the detection of SNP TSC0032214
acatcaaaacta

SEQ ID NO: 324775 - DNA, 12 bp, Artificial Sequence
  Oligonucleotide primer for the detection of SNP TSC0032214
tggttttataga

SEQ ID NO: 324776 - DNA, 12 bp, Artificial Sequence
  Oligonucleotide primer for the detection of SNP TSC0032215
taccccaatact

SEQ ID NO: 324777 - DNA, 12 bp, Artificial Sequence
  Oligonucleotide primer for the detection of SNP TSC0032215
taagatttgttg

SEQ ID NO: 324778 - DNA, 12 bp, Artificial Sequence
  Oligonucleotide primer for the detection of SNP TSC0032215
taagattcgttg

SEQ ID NO: 324779 - DNA, 12 bp, Artificial Sequence
  Oligonucleotide primer for the detection of SNP TSC0032216
tatccaaaaacc

SEQ ID NO: 324780 - DNA, 12 bp, Artificial Sequence
  Oligonucleotide primer for the detection of SNP TSC0032216
tatccgaaaacc

SEQ ID NO: 324781 - DNA, 12 bp, Artificial Sequence
  Oligonucleotide primer for the detection of SNP TSC0032216
gaagtattgggg

SEQ ID NO: 324782 - DNA, 12 bp, Artificial Sequence
  Oligonucleotide primer for the detection of SNP TSC0032217
catcaatctctt

SEQ ID NO: 324783 - DNA, 12 bp, Artificial Sequence
  Oligonucleotide primer for the detection of SNP TSC0032217
tattatttggga

SEQ ID NO: 324784 - DNA, 12 bp, Artificial Sequence
  Oligonucleotide primer for the detection of SNP TSC0032220
taaaaacgaaaa

SEQ ID NO: 324785 - DNA, 12 bp, Artificial Sequence
  Oligonucleotide primer for the detection of SNP TSC0032220
tattataggatt

SEQ ID NO: 324786 - DNA, 12 bp, Artificial Sequence
  Oligonucleotide primer for the detection of SNP TSC0032220
catcacaaaacc

SEQ ID NO: 324787 - DNA, 12 bp, Artificial Sequence
  Oligonucleotide primer for the detection of SNP TSC0032220
tggagatgggga

SEQ ID NO: 324788 - DNA, 12 bp, Artificial Sequence
  Oligonucleotide primer for the detection of SNP TSC0032220
tggagacgggga

SEQ ID NO: 324789 - DNA, 12 bp, Artificial Sequence
  Oligonucleotide primer for the detection of SNP TSC0032221
ttttattctcac

SEQ ID NO: 324790 - DNA, 12 bp, Artificial Sequence
  Oligonucleotide primer for the detection of SNP TSC0032221
ttttattctcgc

SEQ ID NO: 324791 - DNA, 12 bp, Artificial Sequence
  Oligonucleotide primer for the detection of SNP TSC0032221
tatttatggttg

SEQ ID NO: 324792 - DNA, 12 bp, Artificial Sequence
  Oligonucleotide primer for the detection of SNP TSC0032221
cacccataacta

SEQ ID NO: 324793 - DNA, 12 bp, Artificial Sequence
  Oligonucleotide primer for the detection of SNP TSC0032223
aaactaatcccc

SEQ ID NO: 324794 - DNA, 12 bp, Artificial Sequence
  Oligonucleotide primer for the detection of SNP TSC0032223
tagtttttggag

SEQ ID NO: 324795 - DNA, 12 bp, Artificial Sequence
  Oligonucleotide primer for the detection of SNP TSC0032223
aagttggttttt

SEQ ID NO: 324796 - DNA, 12 bp, Artificial Sequence
  Oligonucleotide primer for the detection of SNP TSC0032223
aagttggttttc

SEQ ID NO: 324797 - DNA, 12 bp, Artificial Sequence
  Oligonucleotide primer for the detection of SNP TSC0032226
ataaatctaaaa

SEQ ID NO: 324798 - DNA, 12 bp, Artificial Sequence
  Oligonukleotid-Primer
gttttagtattt

SEQ ID NO: 324799 - DNA, 12 bp, Artificial Sequence
  Oligonucleotide primer for the detection of SNP TSC0032226
attccaacattc

SEQ ID NO: 324800 - DNA, 12 bp, Artificial Sequence
  Oligonucleotide primer for the detection of SNP TSC0032226
ataaatttggag

SEQ ID NO: 324801 - DNA, 12 bp, Artificial Sequence
  Oligonucleotide primer for the detection of SNP TSC0032227
tctaaacctata

SEQ ID NO: 324802 - DNA, 12 bp, Artificial Sequence
  Oligonucleotide primer for the detection of SNP TSC0032227
aatagaggatga

SEQ ID NO: 324803 - DNA, 12 bp, Artificial Sequence
  Oligonucleotide primer for the detection of SNP TSC0032227
ttttgggtttgt

SEQ ID NO: 324804 - DNA, 12 bp, Artificial Sequence
  Oligonucleotide primer for the detection of SNP TSC0032229
tattccaatcct

SEQ ID NO: 324805 - DNA, 12 bp, Artificial Sequence
  Oligonucleotide primer for the detection of SNP TSC0032229
tattccgatcct

SEQ ID NO: 324806 - DNA, 12 bp, Artificial Sequence
  Oligonucleotide primer for the detection of SNP TSC0032229
gatgatggtgta

SEQ ID NO: 324807 - DNA, 12 bp, Artificial Sequence
  Oligonucleotide primer for the detection of SNP TSC0032230
cttccaaattcc

SEQ ID NO: 324808 - DNA, 12 bp, Artificial Sequence
  Oligonucleotide primer for the detection of SNP TSC0032230
atttttaaaatg

SEQ ID NO: 324809 - DNA, 12 bp, Artificial Sequence
  Oligonucleotide primer for the detection of SNP TSC0032231
ctaactcctaca

SEQ ID NO: 324810 - DNA, 12 bp, Artificial Sequence
  Oligonucleotide primer for the detection of SNP TSC0032231
gttggttatatt

SEQ ID NO: 324811 - DNA, 12 bp, Artificial Sequence
  Oligonucleotide primer for the detection of SNP TSC0032231
actaaccacacc

SEQ ID NO: 324812 - DNA, 12 bp, Artificial Sequence
  Oligonucleotide primer for the detection of SNP TSC0032231
ttgatttttgta

SEQ ID NO: 324813 - DNA, 12 bp, Artificial Sequence
  Oligonucleotide primer for the detection of SNP TSC0032232
cttccttaccta

SEQ ID NO: 324814 - DNA, 12 bp, Artificial Sequence
  Oligonucleotide primer for the detection of SNP TSC0032232
ggggttttggtt

SEQ ID NO: 324815 - DNA, 12 bp, Artificial Sequence
  Oligonucleotide primer for the detection of SNP TSC0032232
aaactctaacta

SEQ ID NO: 324816 - DNA, 12 bp, Artificial Sequence
  Oligonucleotide primer for the detection of SNP TSC0032233
catattatcaaa

SEQ ID NO: 324817 - DNA, 12 bp, Artificial Sequence
  Oligonucleotide primer for the detection of SNP TSC0032233
tttagggaagtt

SEQ ID NO: 324818 - DNA, 12 bp, Artificial Sequence
  Oligonucleotide primer for the detection of SNP TSC0032233
ttcaaaaaaatc

SEQ ID NO: 324819 - DNA, 12 bp, Artificial Sequence
  Oligonucleotide primer for the detection of SNP TSC0032233
ttatgttattag

SEQ ID NO: 324820 - DNA, 12 bp, Artificial Sequence
  Oligonucleotide primer for the detection of SNP TSC0032234
attggtattaag

SEQ ID NO: 324821 - DNA, 12 bp, Artificial Sequence
  Oligonucleotide primer for the detection of SNP TSC0032235
catacctcctcc

SEQ ID NO: 324822 - DNA, 12 bp, Artificial Sequence
  Oligonucleotide primer for the detection of SNP TSC0032235
aggaaatatagg

SEQ ID NO: 324823 - DNA, 12 bp, Artificial Sequence
  Oligonucleotide primer for the detection of SNP TSC0032242
aaattaaaaatc

SEQ ID NO: 324824 - DNA, 12 bp, Artificial Sequence
  Oligonucleotide primer for the detection of SNP TSC0032242
tggatggtagga

SEQ ID NO: 324825 - DNA, 12 bp, Artificial Sequence
  Oligonucleotide primer for the detection of SNP TSC0032243
attaatataatt

SEQ ID NO: 324826 - DNA, 12 bp, Artificial Sequence
  Oligonucleotide primer for the detection of SNP TSC0032243
tatattaatata

SEQ ID NO: 324827 - DNA, 12 bp, Artificial Sequence
  Oligonucleotide primer for the detection of SNP TSC0032246
caaaaatacacc

SEQ ID NO: 324828 - DNA, 12 bp, Artificial Sequence
  Oligonucleotide primer for the detection of SNP TSC0032246
caaaaatacgcc

SEQ ID NO: 324829 - DNA, 12 bp, Artificial Sequence
  Oligonucleotide primer for the detection of SNP TSC0032246
tagttgggtatg

SEQ ID NO: 324830 - DNA, 12 bp, Artificial Sequence
  Oligonucleotide primer for the detection of SNP TSC0032246
tagtcgggtatg

SEQ ID NO: 324831 - DNA, 12 bp, Artificial Sequence
  Oligonucleotide primer for the detection of SNP TSC0032247
cttaataaaaac

SEQ ID NO: 324832 - DNA, 12 bp, Artificial Sequence
  Oligonucleotide primer for the detection of SNP TSC0032247
ttattttatatg

SEQ ID NO: 324833 - DNA, 12 bp, Artificial Sequence
  Oligonucleotide primer for the detection of SNP TSC0032247
ttattttatacg

SEQ ID NO: 324834 - DNA, 12 bp, Artificial Sequence
  Oligonucleotide primer for the detection of SNP TSC0032247
ccacttcacaca

SEQ ID NO: 324835 - DNA, 12 bp, Artificial Sequence
  Oligonucleotide primer for the detection of SNP TSC0032247
ccacttcacacg

SEQ ID NO: 324836 - DNA, 12 bp, Artificial Sequence
  Oligonucleotide primer for the detection of SNP TSC0032247
tttggtgagggt

SEQ ID NO: 324837 - DNA, 12 bp, Artificial Sequence
  Oligonucleotide primer for the detection of SNP TSC0032252
ctccaccacatc

SEQ ID NO: 324838 - DNA, 12 bp, Artificial Sequence
  Oligonucleotide primer for the detection of SNP TSC0032252
ctccgccacatc

SEQ ID NO: 324839 - DNA, 12 bp, Artificial Sequence
  Oligonucleotide primer for the detection of SNP TSC0032252
agaggagtagtg

SEQ ID NO: 324840 - DNA, 12 bp, Artificial Sequence
  Oligonucleotide primer for the detection of SNP TSC0032253
tcatttactccc

SEQ ID NO: 324841 - DNA, 12 bp, Artificial Sequence
  Oligonucleotide primer for the detection of SNP TSC0032253
tcgtttactccc

SEQ ID NO: 324842 - DNA, 12 bp, Artificial Sequence
  Oligonucleotide primer for the detection of SNP TSC0032253
tttagaatgttg

SEQ ID NO: 324843 - DNA, 12 bp, Artificial Sequence
  Oligonucleotide primer for the detection of SNP TSC0032253
ctcaaaatatta

SEQ ID NO: 324844 - DNA, 12 bp, Artificial Sequence
  Oligonucleotide primer for the detection of SNP TSC0032253
tcgtttgttttt

SEQ ID NO: 324845 - DNA, 12 bp, Artificial Sequence
  Oligonucleotide primer for the detection of SNP TSC0032254
aaaccccttcac

SEQ ID NO: 324846 - DNA, 12 bp, Artificial Sequence
  Oligonucleotide primer for the detection of SNP TSC0032254
attgagtggtgg

SEQ ID NO: 324847 - DNA, 12 bp, Artificial Sequence
  Oligonucleotide primer for the detection of SNP TSC0032254
attgagcggtgg

SEQ ID NO: 324848 - DNA, 12 bp, Artificial Sequence
  Oligonucleotide primer for the detection of SNP TSC0032254
attgagtggcgg

SEQ ID NO: 324849 - DNA, 12 bp, Artificial Sequence
  Oligonucleotide primer for the detection of SNP TSC0032254
attgagcggcgg

SEQ ID NO: 324850 - DNA, 12 bp, Artificial Sequence
  Oligonucleotide primer for the detection of SNP TSC0032261
agaaaagagaat

SEQ ID NO: 324851 - DNA, 12 bp, Artificial Sequence
  Oligonucleotide primer for the detection of SNP TSC0032261
tgagttattata

SEQ ID NO: 324852 - DNA, 12 bp, Artificial Sequence
  Oligonucleotide primer for the detection of SNP TSC0032262
taccaaaattct

SEQ ID NO: 324853 - DNA, 12 bp, Artificial Sequence
  Oligonucleotide primer for the detection of SNP TSC0032262
atatttgggaaa

SEQ ID NO: 324854 - DNA, 12 bp, Artificial Sequence
  Oligonucleotide primer for the detection of SNP TSC0032263
aactaattttta

SEQ ID NO: 324855 - DNA, 12 bp, Artificial Sequence
  Oligonucleotide primer for the detection of SNP TSC0032266
ctatcctttcct

SEQ ID NO: 324856 - DNA, 12 bp, Artificial Sequence
  Oligonucleotide primer for the detection of SNP TSC0032267
taattttttgtt

SEQ ID NO: 324857 - DNA, 12 bp, Artificial Sequence
  Oligonucleotide primer for the detection of SNP TSC0032267
ctcaacctctta

SEQ ID NO: 324858 - DNA, 12 bp, Artificial Sequence
  Oligonucleotide primer for the detection of SNP TSC0032267
agattttgtagt

SEQ ID NO: 324859 - DNA, 12 bp, Artificial Sequence
  Oligonucleotide primer for the detection of SNP TSC0032267
agattttgtagc

SEQ ID NO: 324860 - DNA, 12 bp, Artificial Sequence
  Oligonucleotide primer for the detection of SNP TSC0032268
cacaaaattaaa

SEQ ID NO: 324861 - DNA, 12 bp, Artificial Sequence
  Oligonucleotide primer for the detection of SNP TSC0032268
ttattagtagtt

SEQ ID NO: 324862 - DNA, 12 bp, Artificial Sequence
  Oligonucleotide primer for the detection of SNP TSC0032268
ttatcaataatc

SEQ ID NO: 324863 - DNA, 12 bp, Artificial Sequence
  Oligonucleotide primer for the detection of SNP TSC0032268
tataaagttgaa

SEQ ID NO: 324864 - DNA, 12 bp, Artificial Sequence
  Oligonucleotide primer for the detection of SNP TSC0032269
attttaaaatat

SEQ ID NO: 324865 - DNA, 12 bp, Artificial Sequence
  Oligonucleotide primer for the detection of SNP TSC0032269
tatagtaatgta

SEQ ID NO: 324866 - DNA, 12 bp, Artificial Sequence
  Oligonucleotide primer for the detection of SNP TSC0032270
aaataatatccc

SEQ ID NO: 324867 - DNA, 12 bp, Artificial Sequence
  Oligonucleotide primer for the detection of SNP TSC0032270
ttttaaaggaga

SEQ ID NO: 324868 - DNA, 12 bp, Artificial Sequence
  Oligonucleotide primer for the detection of SNP TSC0032271
taaataatatta

SEQ ID NO: 324869 - DNA, 12 bp, Artificial Sequence
  Oligonucleotide primer for the detection of SNP TSC0032271
caaacaatatca

SEQ ID NO: 324870 - DNA, 12 bp, Artificial Sequence
  Oligonucleotide primer for the detection of SNP TSC0032271
agaatttaaaat

SEQ ID NO: 324871 - DNA, 12 bp, Artificial Sequence
  Oligonucleotide primer for the detection of SNP TSC0032272
ccttcactaaac

SEQ ID NO: 324872 - DNA, 12 bp, Artificial Sequence
  Oligonucleotide primer for the detection of SNP TSC0032272
ccttcgctaaac

SEQ ID NO: 324873 - DNA, 12 bp, Artificial Sequence
  Oligonucleotide primer for the detection of SNP TSC0032272
attgtagtagtg

SEQ ID NO: 324874 - DNA, 12 bp, Artificial Sequence
  Oligonucleotide primer for the detection of SNP TSC0032272
attgtagtagcg

SEQ ID NO: 324875 - DNA, 12 bp, Artificial Sequence
  Oligonucleotide primer for the detection of SNP TSC0032274
attaataaacta

SEQ ID NO: 324876 - DNA, 12 bp, Artificial Sequence
  Oligonucleotide primer for the detection of SNP TSC0032274
tgttgataagtt

SEQ ID NO: 324877 - DNA, 12 bp, Artificial Sequence
  Oligonucleotide primer for the detection of SNP TSC0032277
aaattaacaccc

SEQ ID NO: 324878 - DNA, 12 bp, Artificial Sequence
  Oligonucleotide primer for the detection of SNP TSC0032277
tttaagttattg

SEQ ID NO: 324879 - DNA, 12 bp, Artificial Sequence
  Oligonucleotide primer for the detection of SNP TSC0032277
ctcaaattatta

SEQ ID NO: 324880 - DNA, 12 bp, Artificial Sequence
  Oligonucleotide primer for the detection of SNP TSC0032278
aaatcaaataca

SEQ ID NO: 324881 - DNA, 12 bp, Artificial Sequence
  Oligonucleotide primer for the detection of SNP TSC0032278
aaatcaaatacg

SEQ ID NO: 324882 - DNA, 12 bp, Artificial Sequence
  Oligonucleotide primer for the detection of SNP TSC0032278
ggagttagagag

SEQ ID NO: 324883 - DNA, 12 bp, Artificial Sequence
  Oligonucleotide primer for the detection of SNP TSC0032278
gttagatgtgtt

SEQ ID NO: 324884 - DNA, 12 bp, Artificial Sequence
  Oligonucleotide primer for the detection of SNP TSC0032278
gttagatgcgtt

SEQ ID NO: 324885 - DNA, 12 bp, Artificial Sequence
  Oligonucleotide primer for the detection of SNP TSC0032279
aaaacaacacat

SEQ ID NO: 324886 - DNA, 12 bp, Artificial Sequence
  Oligonucleotide primer for the detection of SNP TSC0032279
aaaacaacgcat

SEQ ID NO: 324887 - DNA, 12 bp, Artificial Sequence
  Oligonucleotide primer for the detection of SNP TSC0032279
tgatgtgagtta

SEQ ID NO: 324888 - DNA, 12 bp, Artificial Sequence
  Oligonucleotide primer for the detection of SNP TSC0032279
cgatgtgagtta

SEQ ID NO: 324889 - DNA, 12 bp, Artificial Sequence
  Oligonucleotide primer for the detection of SNP TSC0032280
ccaattaaaaat

SEQ ID NO: 324890 - DNA, 12 bp, Artificial Sequence
  Oligonucleotide primer for the detection of SNP TSC0032280
agaggaagagga

SEQ ID NO: 324891 - DNA, 12 bp, Artificial Sequence
  Oligonucleotide primer for the detection of SNP TSC0032280
ttagttaggagt

SEQ ID NO: 324892 - DNA, 12 bp, Artificial Sequence
  Oligonucleotide primer for the detection of SNP TSC0032281
aaaaaaaaccac

SEQ ID NO: 324893 - DNA, 12 bp, Artificial Sequence
  Oligonucleotide primer for the detection of SNP TSC0032281
tttagttaggag

SEQ ID NO: 324894 - DNA, 12 bp, Artificial Sequence
  Oligonucleotide primer for the detection of SNP TSC0032282
taccactaaatc

SEQ ID NO: 324895 - DNA, 12 bp, Artificial Sequence
  Oligonucleotide primer for the detection of SNP TSC0032282
gttaggaaggaa

SEQ ID NO: 324896 - DNA, 12 bp, Artificial Sequence
  Oligonucleotide primer for the detection of SNP TSC0032283
taccaataaaac

SEQ ID NO: 324897 - DNA, 12 bp, Artificial Sequence
  Oligonucleotide primer for the detection of SNP TSC0032284
agtagtagatat

SEQ ID NO: 324898 - DNA, 12 bp, Artificial Sequence
  Oligonucleotide primer for the detection of SNP TSC0032284
aacaacaaacac

SEQ ID NO: 324899 - DNA, 12 bp, Artificial Sequence
  Oligonucleotide primer for the detection of SNP TSC0032284
ggggaggatatg

SEQ ID NO: 324900 - DNA, 12 bp, Artificial Sequence
  Oligonucleotide primer for the detection of SNP TSC0032286
cttactttatat

SEQ ID NO: 324901 - DNA, 12 bp, Artificial Sequence
  Oligonucleotide primer for the detection of SNP TSC0032286
taattaagtaga

SEQ ID NO: 324902 - DNA, 12 bp, Artificial Sequence
  Oligonucleotide primer for the detection of SNP TSC0032287
ttcccacactcc

SEQ ID NO: 324903 - DNA, 12 bp, Artificial Sequence
  Oligonucleotide primer for the detection of SNP TSC0032287
ttcccacgctcc

SEQ ID NO: 324904 - DNA, 12 bp, Artificial Sequence
  Oligonucleotide primer for the detection of SNP TSC0032287
ttcccgcactcc

SEQ ID NO: 324905 - DNA, 12 bp, Artificial Sequence
  Oligonucleotide primer for the detection of SNP TSC0032287
ttcccgcgctcc

SEQ ID NO: 324906 - DNA, 12 bp, Artificial Sequence
  Oligonucleotide primer for the detection of SNP TSC0032287
tatatttatgag

SEQ ID NO: 324907 - DNA, 12 bp, Artificial Sequence
  Oligonucleotide primer for the detection of SNP TSC0032287
tacatctataaa

SEQ ID NO: 324908 - DNA, 12 bp, Artificial Sequence
  Oligonucleotide primer for the detection of SNP TSC0032287
ttttcgtgtttt

SEQ ID NO: 324909 - DNA, 12 bp, Artificial Sequence
  Oligonucleotide primer for the detection of SNP TSC0032287
tttttgcgtttt

SEQ ID NO: 324910 - DNA, 12 bp, Artificial Sequence
  Oligonucleotide primer for the detection of SNP TSC0032287
ttttcgcgtttt

SEQ ID NO: 324911 - DNA, 12 bp, Artificial Sequence
  Oligonucleotide primer for the detection of SNP TSC0032288
acacttcttcac

SEQ ID NO: 324912 - DNA, 12 bp, Artificial Sequence
  Oligonucleotide primer for the detection of SNP TSC0032288
aatgttatagag

SEQ ID NO: 324913 - DNA, 12 bp, Artificial Sequence
  Oligonucleotide primer for the detection of SNP TSC0032288
aacgttatagag

SEQ ID NO: 324914 - DNA, 12 bp, Artificial Sequence
  Oligonucleotide primer for the detection of SNP TSC0032294
tttctactccaa

SEQ ID NO: 324915 - DNA, 12 bp, Artificial Sequence
  Oligonucleotide primer for the detection of SNP TSC0032294
ttggaaaataat

SEQ ID NO: 324916 - DNA, 12 bp, Artificial Sequence
  Oligonucleotide primer for the detection of SNP TSC0032294
ttggaaaataac

SEQ ID NO: 324917 - DNA, 12 bp, Artificial Sequence
  Oligonucleotide primer for the detection of SNP TSC0032294
ctaaaaaataac

SEQ ID NO: 324918 - DNA, 12 bp, Artificial Sequence
  Oligonucleotide primer for the detection of SNP TSC0032298
aatattactaaa

SEQ ID NO: 324919 - DNA, 12 bp, Artificial Sequence
  Oligonucleotide primer for the detection of SNP TSC0032298
tttttattattg

SEQ ID NO: 324920 - DNA, 12 bp, Artificial Sequence
  Oligonucleotide primer for the detection of SNP TSC0032298
ctttcattatta

SEQ ID NO: 324921 - DNA, 12 bp, Artificial Sequence
  Oligonucleotide primer for the detection of SNP TSC0032299
gatatatgtaag

SEQ ID NO: 324922 - DNA, 12 bp, Artificial Sequence
  Oligonucleotide primer for the detection of SNP TSC0032300
tctcaataaaat

SEQ ID NO: 324923 - DNA, 12 bp, Artificial Sequence
  Oligonucleotide primer for the detection of SNP TSC0032300
tgtttaaggaag

SEQ ID NO: 324924 - DNA, 12 bp, Artificial Sequence
  Oligonucleotide primer for the detection of SNP TSC0032301
aattttaataaa

SEQ ID NO: 324925 - DNA, 12 bp, Artificial Sequence
  Oligonucleotide primer for the detection of SNP TSC0032301
ttggtttatata

SEQ ID NO: 324926 - DNA, 12 bp, Artificial Sequence
  Oligonucleotide primer for the detection of SNP TSC0032301
ctaacctatata

SEQ ID NO: 324927 - DNA, 12 bp, Artificial Sequence
  Oligonucleotide primer for the detection of SNP TSC0032301
agttttaataag

SEQ ID NO: 324928 - DNA, 12 bp, Artificial Sequence
  Oligonucleotide primer for the detection of SNP TSC0032304
acatactaatac

SEQ ID NO: 324929 - DNA, 12 bp, Artificial Sequence
  Oligonucleotide primer for the detection of SNP TSC0032304
agtagggatgta

SEQ ID NO: 324930 - DNA, 12 bp, Artificial Sequence
  Oligonucleotide primer for the detection of SNP TSC0032304
agtagggacgta

SEQ ID NO: 324931 - DNA, 12 bp, Artificial Sequence
  Oligonucleotide primer for the detection of SNP TSC0032305
ttttaaaaacaa

SEQ ID NO: 324932 - DNA, 12 bp, Artificial Sequence
  Oligonucleotide primer for the detection of SNP TSC0032305
tttgtttttaaa

SEQ ID NO: 324933 - DNA, 12 bp, Artificial Sequence
  Oligonucleotide primer for the detection of SNP TSC0032306
ttttaaaattta

SEQ ID NO: 324934 - DNA, 12 bp, Artificial Sequence
  Oligonucleotide primer for the detection of SNP TSC0032307
tattaataaaaa

SEQ ID NO: 324935 - DNA, 12 bp, Artificial Sequence
  Oligonucleotide primer for the detection of SNP TSC0032307
aatttaataaaa

SEQ ID NO: 324936 - DNA, 12 bp, Artificial Sequence
  Oligonucleotide primer for the detection of SNP TSC0032307
aactcaacaaaa

SEQ ID NO: 324937 - DNA, 12 bp, Artificial Sequence
  Oligonucleotide primer for the detection of SNP TSC0032307
tgttagtaaagg

SEQ ID NO: 324938 - DNA, 12 bp, Artificial Sequence
  Oligonucleotide primer for the detection of SNP TSC0032308
aaaaattctatc

SEQ ID NO: 324939 - DNA, 12 bp, Artificial Sequence
  Oligonucleotide primer for the detection of SNP TSC0032308
ttttattttaag

SEQ ID NO: 324940 - DNA, 12 bp, Artificial Sequence
  Oligonucleotide primer for the detection of SNP TSC0032309
aaatttaatata

SEQ ID NO: 324941 - DNA, 12 bp, Artificial Sequence
  Oligonucleotide primer for the detection of SNP TSC0032309
tagttgaagaat

SEQ ID NO: 324942 - DNA, 12 bp, Artificial Sequence
  Oligonucleotide primer for the detection of SNP TSC0032309
aaatttagtatg

SEQ ID NO: 324943 - DNA, 12 bp, Artificial Sequence
  Oligonucleotide primer for the detection of SNP TSC0032311
ttaattatttaa

SEQ ID NO: 324944 - DNA, 12 bp, Artificial Sequence
  Oligonucleotide primer for the detection of SNP TSC0032312
ccttaaaaacac

SEQ ID NO: 324945 - DNA, 12 bp, Artificial Sequence
  Oligonucleotide primer for the detection of SNP TSC0032312
tggaagtaaaga

SEQ ID NO: 324946 - DNA, 12 bp, Artificial Sequence
  Oligonucleotide primer for the detection of SNP TSC0032313
ttctaaaaactt

SEQ ID NO: 324947 - DNA, 12 bp, Artificial Sequence
  Oligonucleotide primer for the detection of SNP TSC0032313
atgattattatt

SEQ ID NO: 324948 - DNA, 12 bp, Artificial Sequence
  Oligonucleotide primer for the detection of SNP TSC0032313
ccataaccacca

SEQ ID NO: 324949 - DNA, 12 bp, Artificial Sequence
  Oligonucleotide primer for the detection of SNP TSC0032314
ctataaaattaa

SEQ ID NO: 324950 - DNA, 12 bp, Artificial Sequence
  Oligonucleotide primer for the detection of SNP TSC0032314
ttgttttgatag

SEQ ID NO: 324951 - DNA, 12 bp, Artificial Sequence
  Oligonucleotide primer for the detection of SNP TSC0032315
ggttataaaggt

SEQ ID NO: 324952 - DNA, 12 bp, Artificial Sequence
  Oligonucleotide primer for the detection of SNP TSC0032315
gttgtaagaaaa

SEQ ID NO: 324953 - DNA, 12 bp, Artificial Sequence
  Oligonucleotide primer for the detection of SNP TSC0032319
aaataaatataa

SEQ ID NO: 324954 - DNA, 12 bp, Artificial Sequence
  Oligonucleotide primer for the detection of SNP TSC0032319
tgttgtttggtt

SEQ ID NO: 324955 - DNA, 12 bp, Artificial Sequence
  Oligonucleotide primer for the detection of SNP TSC0032319
tactacctaact

SEQ ID NO: 324956 - DNA, 12 bp, Artificial Sequence
  Oligonucleotide primer for the detection of SNP TSC0032319
ggatgaatgtgg

SEQ ID NO: 324957 - DNA, 12 bp, Artificial Sequence
  Oligonucleotide primer for the detection of SNP TSC0032320
taaataactaca

SEQ ID NO: 324958 - DNA, 12 bp, Artificial Sequence
  Oligonucleotide primer for the detection of SNP TSC0032320
gttgagtagttt

SEQ ID NO: 324959 - DNA, 12 bp, Artificial Sequence
  Oligonucleotide primer for the detection of SNP TSC0032320
attaaacaaccc

SEQ ID NO: 324960 - DNA, 12 bp, Artificial Sequence
  Oligonucleotide primer for the detection of SNP TSC0032320
gttaaacaaccc

SEQ ID NO: 324961 - DNA, 12 bp, Artificial Sequence
  Oligonucleotide primer for the detection of SNP TSC0032320
tggatggttata

SEQ ID NO: 324962 - DNA, 12 bp, Artificial Sequence
  Oligonucleotide primer for the detection of SNP TSC0032321
taattccatata

SEQ ID NO: 324963 - DNA, 12 bp, Artificial Sequence
  Oligonucleotide primer for the detection of SNP TSC0032321
atgatgatttat

SEQ ID NO: 324964 - DNA, 12 bp, Artificial Sequence
  Oligonucleotide primer for the detection of SNP TSC0032321
cataataactta

SEQ ID NO: 324965 - DNA, 12 bp, Artificial Sequence
  Oligonucleotide primer for the detection of SNP TSC0032321
tgattttatata

SEQ ID NO: 324966 - DNA, 12 bp, Artificial Sequence
  Oligonucleotide primer for the detection of SNP TSC0032322
ttagagaagagg

SEQ ID NO: 324967 - DNA, 12 bp, Artificial Sequence
  Oligonucleotide primer for the detection of SNP TSC0032323
cacaaatttaac

SEQ ID NO: 324968 - DNA, 12 bp, Artificial Sequence
  Oligonucleotide primer for the detection of SNP TSC0032323
aatgggagagta

SEQ ID NO: 324969 - DNA, 12 bp, Artificial Sequence
  Oligonucleotide primer for the detection of SNP TSC0032326
acaaaaatatat

SEQ ID NO: 324970 - DNA, 12 bp, Artificial Sequence
  Oligonucleotide primer for the detection of SNP TSC0032326
ataggttgttgg

SEQ ID NO: 324971 - DNA, 12 bp, Artificial Sequence
  Oligonucleotide primer for the detection of SNP TSC0032330
tcctacacaccc

SEQ ID NO: 324972 - DNA, 12 bp, Artificial Sequence
  Oligonucleotide primer for the detection of SNP TSC0032330
tcctacacgccc

SEQ ID NO: 324973 - DNA, 12 bp, Artificial Sequence
  Oligonucleotide primer for the detection of SNP TSC0032330
tcctacgcaccc

SEQ ID NO: 324974 - DNA, 12 bp, Artificial Sequence
  Oligonucleotide primer for the detection of SNP TSC0032330
tcctacgcgccc

SEQ ID NO: 324975 - DNA, 12 bp, Artificial Sequence
  Oligonucleotide primer for the detection of SNP TSC0032330
tggaagtgtgtg

SEQ ID NO: 324976 - DNA, 12 bp, Artificial Sequence
  Oligonucleotide primer for the detection of SNP TSC0032330
tggaagtgcgtg

SEQ ID NO: 324977 - DNA, 12 bp, Artificial Sequence
  Oligonucleotide primer for the detection of SNP TSC0032336
cttcccaccatc

SEQ ID NO: 324978 - DNA, 12 bp, Artificial Sequence
  Oligonucleotide primer for the detection of SNP TSC0032336
cttcccaccgtc

SEQ ID NO: 324979 - DNA, 12 bp, Artificial Sequence
  Oligonucleotide primer for the detection of SNP TSC0032336
ggatttaggatg

SEQ ID NO: 324980 - DNA, 12 bp, Artificial Sequence
  Oligonucleotide primer for the detection of SNP TSC0032336
ggatttaggacg

SEQ ID NO: 324981 - DNA, 12 bp, Artificial Sequence
  Oligonucleotide primer for the detection of SNP TSC0032336
aaacccaaaaca

SEQ ID NO: 324982 - DNA, 12 bp, Artificial Sequence
  Oligonucleotide primer for the detection of SNP TSC0032336
aaacccaaaacg

SEQ ID NO: 324983 - DNA, 12 bp, Artificial Sequence
  Oligonucleotide primer for the detection of SNP TSC0032336
ttttttatcgtt

SEQ ID NO: 324984 - DNA, 12 bp, Artificial Sequence
  Oligonucleotide primer for the detection of SNP TSC0032337
aacatttatttc

SEQ ID NO: 324985 - DNA, 12 bp, Artificial Sequence
  Oligonucleotide primer for the detection of SNP TSC0032337
tattttaaattg

SEQ ID NO: 324986 - DNA, 12 bp, Artificial Sequence
  Oligonucleotide primer for the detection of SNP TSC0032337
tattttaaatcg

SEQ ID NO: 324987 - DNA, 12 bp, Artificial Sequence
  Oligonucleotide primer for the detection of SNP TSC0032337
ctttaaatcaaa

SEQ ID NO: 324988 - DNA, 12 bp, Artificial Sequence
  Oligonucleotide primer for the detection of SNP TSC0032337
ctttaaatcgaa

SEQ ID NO: 324989 - DNA, 12 bp, Artificial Sequence
  Oligonucleotide primer for the detection of SNP TSC0032337
gatatttatttt

SEQ ID NO: 324990 - DNA, 12 bp, Artificial Sequence
  Oligonucleotide primer for the detection of SNP TSC0032337
gatatttatttc

SEQ ID NO: 324991 - DNA, 12 bp, Artificial Sequence
  Oligonucleotide primer for the detection of SNP TSC0032338
aaaatattattc

SEQ ID NO: 324992 - DNA, 12 bp, Artificial Sequence
  Oligonucleotide primer for the detection of SNP TSC0032338
ggttttttatag

SEQ ID NO: 324993 - DNA, 12 bp, Artificial Sequence
  Oligonucleotide primer for the detection of SNP TSC0032338
aattttttacaa

SEQ ID NO: 324994 - DNA, 12 bp, Artificial Sequence
  Oligonucleotide primer for the detection of SNP TSC0032338
aaagtattattt

SEQ ID NO: 324995 - DNA, 12 bp, Artificial Sequence
  Oligonucleotide primer for the detection of SNP TSC0032339
ttcctctttaat

SEQ ID NO: 324996 - DNA, 12 bp, Artificial Sequence
  Oligonucleotide primer for the detection of SNP TSC0032339
ttttttaaagaa

SEQ ID NO: 324997 - DNA, 12 bp, Artificial Sequence
  Oligonucleotide primer for the detection of SNP TSC0032340
tactataaactc

SEQ ID NO: 324998 - DNA, 12 bp, Artificial Sequence
  Oligonucleotide primer for the detection of SNP TSC0032340
agataatattgg

SEQ ID NO: 324999 - DNA, 12 bp, Artificial Sequence
  Oligonucleotide primer for the detection of SNP TSC0032340
agataatatcgg

SEQ ID NO: 325000 - DNA, 12 bp, Artificial Sequence
  Oligonucleotide primer for the detection of SNP TSC0032341
attttcaacaat

SEQ ID NO: 325001 - DNA, 12 bp, Artificial Sequence
  Oligonucleotide primer for the detection of SNP TSC0032341
ttataatataga

SEQ ID NO: 325002 - DNA, 12 bp, Artificial Sequence
  Oligonucleotide primer for the detection of SNP TSC0032342
tctttcccacct

SEQ ID NO: 325003 - DNA, 12 bp, Artificial Sequence
  Oligonucleotide primer for the detection of SNP TSC0032342
aaggtagggtta

SEQ ID NO: 325004 - DNA, 12 bp, Artificial Sequence
  Oligonucleotide primer for the detection of SNP TSC0032343
atatataaccac

SEQ ID NO: 325005 - DNA, 12 bp, Artificial Sequence
  Oligonucleotide primer for the detection of SNP TSC0032343
tgtttattttgg

SEQ ID NO: 325006 - DNA, 12 bp, Artificial Sequence
  Oligonucleotide primer for the detection of SNP TSC0032344
aaaaaaatatct

SEQ ID NO: 325007 - DNA, 12 bp, Artificial Sequence
  Oligonucleotide primer for the detection of SNP TSC0032344
agagagatttgg

SEQ ID NO: 325008 - DNA, 12 bp, Artificial Sequence
  Oligonucleotide primer for the detection of SNP TSC0032345
aacaccttcatc

SEQ ID NO: 325009 - DNA, 12 bp, Artificial Sequence
  Oligonucleotide primer for the detection of SNP TSC0032345
aacgccttcatc

SEQ ID NO: 325010 - DNA, 12 bp, Artificial Sequence
  Oligonucleotide primer for the detection of SNP TSC0032345
ggttagaagtta

SEQ ID NO: 325011 - DNA, 12 bp, Artificial Sequence
  Oligonucleotide primer for the detection of SNP TSC0032346
ttcttataacta

SEQ ID NO: 325012 - DNA, 12 bp, Artificial Sequence
  Oligonukleotid-Primer
aatttctaaacc

SEQ ID NO: 325013 - DNA, 12 bp, Artificial Sequence
  Oligonucleotide primer for the detection of SNP TSC0032346
tttttatgattg

SEQ ID NO: 325014 - DNA, 12 bp, Artificial Sequence
  Oligonucleotide primer for the detection of SNP TSC0032347
cctccacttttt

SEQ ID NO: 325015 - DNA, 12 bp, Artificial Sequence
  Oligonucleotide primer for the detection of SNP TSC0032347
tatgatatatag

SEQ ID NO: 325016 - DNA, 12 bp, Artificial Sequence
  Oligonucleotide primer for the detection of SNP TSC0032347
cataacacacaa

SEQ ID NO: 325017 - DNA, 12 bp, Artificial Sequence
  Oligonucleotide primer for the detection of SNP TSC0032348
aaggtgtttttt

SEQ ID NO: 325018 - DNA, 12 bp, Artificial Sequence
  Oligonucleotide primer for the detection of SNP TSC0032349
atcacccataat

SEQ ID NO: 325019 - DNA, 12 bp, Artificial Sequence
  Oligonucleotide primer for the detection of SNP TSC0032349
atcgcccataat

SEQ ID NO: 325020 - DNA, 12 bp, Artificial Sequence
  Oligonucleotide primer for the detection of SNP TSC0032349
ttctaaaaaatt

SEQ ID NO: 325021 - DNA, 12 bp, Artificial Sequence
  Oligonucleotide primer for the detection of SNP TSC0032349
tgtttataattt

SEQ ID NO: 325022 - DNA, 12 bp, Artificial Sequence
  Oligonucleotide primer for the detection of SNP TSC0032349
cgtttataattt

SEQ ID NO: 325023 - DNA, 12 bp, Artificial Sequence
  Oligonucleotide primer for the detection of SNP TSC0032350
ccccaacaaaaa

SEQ ID NO: 325024 - DNA, 12 bp, Artificial Sequence
  Oligonucleotide primer for the detection of SNP TSC0032350
atggattgaatt

SEQ ID NO: 325025 - DNA, 12 bp, Artificial Sequence
  Oligonucleotide primer for the detection of SNP TSC0032350
ttttaatagggg

SEQ ID NO: 325026 - DNA, 12 bp, Artificial Sequence
  Oligonucleotide primer for the detection of SNP TSC0032351
acaccttacacc

SEQ ID NO: 325027 - DNA, 12 bp, Artificial Sequence
  Oligonucleotide primer for the detection of SNP TSC0032351
acaccttacgcc

SEQ ID NO: 325028 - DNA, 12 bp, Artificial Sequence
  Oligonucleotide primer for the detection of SNP TSC0032351
gtgtgggatgtt

SEQ ID NO: 325029 - DNA, 12 bp, Artificial Sequence
  Oligonucleotide primer for the detection of SNP TSC0032351
gcgtgggatgtt

SEQ ID NO: 325030 - DNA, 12 bp, Artificial Sequence
  Oligonucleotide primer for the detection of SNP TSC0032351
gtgcgggatgtt

SEQ ID NO: 325031 - DNA, 12 bp, Artificial Sequence
  Oligonucleotide primer for the detection of SNP TSC0032351
gcgcgggatgtt

SEQ ID NO: 325032 - DNA, 12 bp, Artificial Sequence
  Oligonucleotide primer for the detection of SNP TSC0032351
gtgtgggatgtc

SEQ ID NO: 325033 - DNA, 12 bp, Artificial Sequence
  Oligonucleotide primer for the detection of SNP TSC0032351
gcgtgggatgtc

SEQ ID NO: 325034 - DNA, 12 bp, Artificial Sequence
  Oligonucleotide primer for the detection of SNP TSC0032351
gtgcgggatgtc

SEQ ID NO: 325035 - DNA, 12 bp, Artificial Sequence
  Oligonucleotide primer for the detection of SNP TSC0032351
gcgcgggatgtc

SEQ ID NO: 325036 - DNA, 12 bp, Artificial Sequence
  Oligonucleotide primer for the detection of SNP TSC0032351
acacaaaatacc

SEQ ID NO: 325037 - DNA, 12 bp, Artificial Sequence
  Oligonucleotide primer for the detection of SNP TSC0032351
acacgaaatacc

SEQ ID NO: 325038 - DNA, 12 bp, Artificial Sequence
  Oligonucleotide primer for the detection of SNP TSC0032351
acgcaaaatacc

SEQ ID NO: 325039 - DNA, 12 bp, Artificial Sequence
  Oligonucleotide primer for the detection of SNP TSC0032351
acgcgaaatacc

SEQ ID NO: 325040 - DNA, 12 bp, Artificial Sequence
  Oligonucleotide primer for the detection of SNP TSC0032351
gtattttgtgtt

SEQ ID NO: 325041 - DNA, 12 bp, Artificial Sequence
  Oligonucleotide primer for the detection of SNP TSC0032351
gtattttgcgtt

SEQ ID NO: 325042 - DNA, 12 bp, Artificial Sequence
  Oligonucleotide primer for the detection of SNP TSC0032351
gtattttgtgtc

SEQ ID NO: 325043 - DNA, 12 bp, Artificial Sequence
  Oligonucleotide primer for the detection of SNP TSC0032351
gtattttgcgtc

SEQ ID NO: 325044 - DNA, 12 bp, Artificial Sequence
  Oligonucleotide primer for the detection of SNP TSC0032352
actcaatactat

SEQ ID NO: 325045 - DNA, 12 bp, Artificial Sequence
  Oligonucleotide primer for the detection of SNP TSC0032354
cttttaatctat

SEQ ID NO: 325046 - DNA, 12 bp, Artificial Sequence
  Oligonucleotide primer for the detection of SNP TSC0032354
tatgtttggtaa

SEQ ID NO: 325047 - DNA, 12 bp, Artificial Sequence
  Oligonucleotide primer for the detection of SNP TSC0032356
atataaaactca

SEQ ID NO: 325048 - DNA, 12 bp, Artificial Sequence
  Oligonucleotide primer for the detection of SNP TSC0032356
agaggatatggt

SEQ ID NO: 325049 - DNA, 12 bp, Artificial Sequence
  Oligonucleotide primer for the detection of SNP TSC0032356
agaggatacggt

SEQ ID NO: 325050 - DNA, 12 bp, Artificial Sequence
  Oligonucleotide primer for the detection of SNP TSC0032356
aaaaaacacgac

SEQ ID NO: 325051 - DNA, 12 bp, Artificial Sequence
  Oligonucleotide primer for the detection of SNP TSC0032356
gtgtggagttta

SEQ ID NO: 325052 - DNA, 12 bp, Artificial Sequence
  Oligonucleotide primer for the detection of SNP TSC0032357
tacacccccaaa

SEQ ID NO: 325053 - DNA, 12 bp, Artificial Sequence
  Oligonucleotide primer for the detection of SNP TSC0032357
gtgagtgtagtt

SEQ ID NO: 325054 - DNA, 12 bp, Artificial Sequence
  Oligonucleotide primer for the detection of SNP TSC0032357
ataaatataacc

SEQ ID NO: 325055 - DNA, 12 bp, Artificial Sequence
  Oligonucleotide primer for the detection of SNP TSC0032357
gtaaatataacc

SEQ ID NO: 325056 - DNA, 12 bp, Artificial Sequence
  Oligonucleotide primer for the detection of SNP TSC0032357
tgtatttttaga

SEQ ID NO: 325057 - DNA, 12 bp, Artificial Sequence
  Oligonucleotide primer for the detection of SNP TSC0032360
atcaccaatatt

SEQ ID NO: 325058 - DNA, 12 bp, Artificial Sequence
  Oligonucleotide primer for the detection of SNP TSC0032360
aaatttgtatta

SEQ ID NO: 325059 - DNA, 12 bp, Artificial Sequence
  Oligonucleotide primer for the detection of SNP TSC0032361
ctcccaatcttc

SEQ ID NO: 325060 - DNA, 12 bp, Artificial Sequence
  Oligonucleotide primer for the detection of SNP TSC0032361
ctcccgatcttc

SEQ ID NO: 325061 - DNA, 12 bp, Artificial Sequence
  Oligonucleotide primer for the detection of SNP TSC0032361
gtatgtataata

SEQ ID NO: 325062 - DNA, 12 bp, Artificial Sequence
  Oligonucleotide primer for the detection of SNP TSC0032361
gtacgtataata

SEQ ID NO: 325063 - DNA, 12 bp, Artificial Sequence
  Oligonucleotide primer for the detection of SNP TSC0032361
acacgtacaaca

SEQ ID NO: 325064 - DNA, 12 bp, Artificial Sequence
  Oligonucleotide primer for the detection of SNP TSC0032361
ttttcggttttt

SEQ ID NO: 325065 - DNA, 12 bp, Artificial Sequence
  Oligonucleotide primer for the detection of SNP TSC0032371
ttggaggttgta

SEQ ID NO: 325066 - DNA, 12 bp, Artificial Sequence
  Oligonucleotide primer for the detection of SNP TSC0032371
tcggaggttgta

SEQ ID NO: 325067 - DNA, 12 bp, Artificial Sequence
  Oligonucleotide primer for the detection of SNP TSC0032372
atcccaaatact

SEQ ID NO: 325068 - DNA, 12 bp, Artificial Sequence
  Oligonucleotide primer for the detection of SNP TSC0032372
attttagatgtt

SEQ ID NO: 325069 - DNA, 12 bp, Artificial Sequence
  Oligonucleotide primer for the detection of SNP TSC0032377
tctattactaaa

SEQ ID NO: 325070 - DNA, 12 bp, Artificial Sequence
  Oligonucleotide primer for the detection of SNP TSC0032377
agagtgtatttt

SEQ ID NO: 325071 - DNA, 12 bp, Artificial Sequence
  Oligonucleotide primer for the detection of SNP TSC0032377
aaatacatccta

SEQ ID NO: 325072 - DNA, 12 bp, Artificial Sequence
  Oligonucleotide primer for the detection of SNP TSC0032377
tgttattggatt

SEQ ID NO: 325073 - DNA, 12 bp, Artificial Sequence
  Oligonucleotide primer for the detection of SNP TSC0032378
gggttgttttgg

SEQ ID NO: 325074 - DNA, 12 bp, Artificial Sequence
  Oligonucleotide primer for the detection of SNP TSC0032378
gggtcgttttgg

SEQ ID NO: 325075 - DNA, 12 bp, Artificial Sequence
  Oligonucleotide primer for the detection of SNP TSC0032378
aaaccatcctaa

SEQ ID NO: 325076 - DNA, 12 bp, Artificial Sequence
  Oligonucleotide primer for the detection of SNP TSC0032378
aaaccgtcctaa

SEQ ID NO: 325077 - DNA, 12 bp, Artificial Sequence
  Oligonucleotide primer for the detection of SNP TSC0032378
ggagtgatgttt

SEQ ID NO: 325078 - DNA, 12 bp, Artificial Sequence
  Oligonucleotide primer for the detection of SNP TSC0032382
tgttattaaggt

SEQ ID NO: 325079 - DNA, 12 bp, Artificial Sequence
  Oligonucleotide primer for the detection of SNP TSC0032382
atcactaaaata

SEQ ID NO: 325080 - DNA, 12 bp, Artificial Sequence
  Oligonucleotide primer for the detection of SNP TSC0032382
tgtttatttaag

SEQ ID NO: 325081 - DNA, 12 bp, Artificial Sequence
  Oligonucleotide primer for the detection of SNP TSC0032383
acttccccactc

SEQ ID NO: 325082 - DNA, 12 bp, Artificial Sequence
  Oligonucleotide primer for the detection of SNP TSC0032383
acttccccgctc

SEQ ID NO: 325083 - DNA, 12 bp, Artificial Sequence
  Oligonucleotide primer for the detection of SNP TSC0032383
gcttccccactc

SEQ ID NO: 325084 - DNA, 12 bp, Artificial Sequence
  Oligonucleotide primer for the detection of SNP TSC0032383
gcttccccgctc

SEQ ID NO: 325085 - DNA, 12 bp, Artificial Sequence
  Oligonucleotide primer for the detection of SNP TSC0032383
gtaggagttgag

SEQ ID NO: 325086 - DNA, 12 bp, Artificial Sequence
  Oligonucleotide primer for the detection of SNP TSC0032383
gttttttcgttt

SEQ ID NO: 325087 - DNA, 12 bp, Artificial Sequence
  Oligonucleotide primer for the detection of SNP TSC0032384
gagattgaggtg

SEQ ID NO: 325088 - DNA, 12 bp, Artificial Sequence
  Oligonucleotide primer for the detection of SNP TSC0032385
accaaaacaccc

SEQ ID NO: 325089 - DNA, 12 bp, Artificial Sequence
  Oligonucleotide primer for the detection of SNP TSC0032385
gagttgggaggt

SEQ ID NO: 325090 - DNA, 12 bp, Artificial Sequence
  Oligonucleotide primer for the detection of SNP TSC0032385
gagttgggaggc

SEQ ID NO: 325091 - DNA, 12 bp, Artificial Sequence
  Oligonucleotide primer for the detection of SNP TSC0032385
attagagtattt

SEQ ID NO: 325092 - DNA, 12 bp, Artificial Sequence
  Oligonucleotide primer for the detection of SNP TSC0032386
caaaaacccaaa

SEQ ID NO: 325093 - DNA, 12 bp, Artificial Sequence
  Oligonucleotide primer for the detection of SNP TSC0032386
caaaaacccgaa

SEQ ID NO: 325094 - DNA, 12 bp, Artificial Sequence
  Oligonucleotide primer for the detection of SNP TSC0032386
ttgaaagttagg

SEQ ID NO: 325095 - DNA, 12 bp, Artificial Sequence
  Oligonucleotide primer for the detection of SNP TSC0032389
tcaaaactataa

SEQ ID NO: 325096 - DNA, 12 bp, Artificial Sequence
  Oligonucleotide primer for the detection of SNP TSC0032389
ttgattgttttt

SEQ ID NO: 325097 - DNA, 12 bp, Artificial Sequence
  Oligonucleotide primer for the detection of SNP TSC0032389
atctaattatct

SEQ ID NO: 325098 - DNA, 12 bp, Artificial Sequence
  Oligonucleotide primer for the detection of SNP TSC0032389
atttagggttgt

SEQ ID NO: 325099 - DNA, 12 bp, Artificial Sequence
  Oligonucleotide primer for the detection of SNP TSC0032390
acaaataaacta

SEQ ID NO: 325100 - DNA, 12 bp, Artificial Sequence
  Oligonucleotide primer for the detection of SNP TSC0032390
acgaataaacta

SEQ ID NO: 325101 - DNA, 12 bp, Artificial Sequence
  Oligonucleotide primer for the detection of SNP TSC0032390
gttagtttattt

SEQ ID NO: 325102 - DNA, 12 bp, Artificial Sequence
  Oligonucleotide primer for the detection of SNP TSC0032390
accaattcacct

SEQ ID NO: 325103 - DNA, 12 bp, Artificial Sequence
  Oligonucleotide primer for the detection of SNP TSC0032390
gtgggtgggttg

SEQ ID NO: 325104 - DNA, 12 bp, Artificial Sequence
  Oligonucleotide primer for the detection of SNP TSC0032390
gcgggtgggttg

SEQ ID NO: 325105 - DNA, 12 bp, Artificial Sequence
  Oligonucleotide primer for the detection of SNP TSC0032391
ccaacaaccctc

SEQ ID NO: 325106 - DNA, 12 bp, Artificial Sequence
  Oligonucleotide primer for the detection of SNP TSC0032391
tgataaagggtt

SEQ ID NO: 325107 - DNA, 12 bp, Artificial Sequence
  Oligonucleotide primer for the detection of SNP TSC0032391
taacaaaaaact

SEQ ID NO: 325108 - DNA, 12 bp, Artificial Sequence
  Oligonucleotide primer for the detection of SNP TSC0032391
ttagtagttttt

SEQ ID NO: 325109 - DNA, 12 bp, Artificial Sequence
  Oligonucleotide primer for the detection of SNP TSC0032392
acaaaaattccc

SEQ ID NO: 325110 - DNA, 12 bp, Artificial Sequence
  Oligonucleotide primer for the detection of SNP TSC0032392
gagtgtatatga

SEQ ID NO: 325111 - DNA, 12 bp, Artificial Sequence
  Oligonucleotide primer for the detection of SNP TSC0032392
gagtgtatacga

SEQ ID NO: 325112 - DNA, 12 bp, Artificial Sequence
  Oligonucleotide primer for the detection of SNP TSC0032393
actttttttatt

SEQ ID NO: 325113 - DNA, 12 bp, Artificial Sequence
  Oligonucleotide primer for the detection of SNP TSC0032394
ggtttagttttg

SEQ ID NO: 325114 - DNA, 12 bp, Artificial Sequence
  Oligonucleotide primer for the detection of SNP TSC0032397
tatacactatct

SEQ ID NO: 325115 - DNA, 12 bp, Artificial Sequence
  Oligonucleotide primer for the detection of SNP TSC0032398
aaggttgtttag

SEQ ID NO: 325116 - DNA, 12 bp, Artificial Sequence
  Oligonucleotide primer for the detection of SNP TSC0032399
tttcaaaaaact

SEQ ID NO: 325117 - DNA, 12 bp, Artificial Sequence
  Oligonucleotide primer for the detection of SNP TSC0032399
ttattatataaa

SEQ ID NO: 325118 - DNA, 12 bp, Artificial Sequence
  Oligonucleotide primer for the detection of SNP TSC0032400
tcctctataacc

SEQ ID NO: 325119 - DNA, 12 bp, Artificial Sequence
  Oligonucleotide primer for the detection of SNP TSC0032400
gaggtgggtata

SEQ ID NO: 325120 - DNA, 12 bp, Artificial Sequence
  Oligonucleotide primer for the detection of SNP TSC0032400
gaggcgggtata

SEQ ID NO: 325121 - DNA, 12 bp, Artificial Sequence
  Oligonucleotide primer for the detection of SNP TSC0032401
ttaggtaagaag

SEQ ID NO: 325122 - DNA, 12 bp, Artificial Sequence
  Oligonucleotide primer for the detection of SNP TSC0032402
ttacaaaattat

SEQ ID NO: 325123 - DNA, 12 bp, Artificial Sequence
  Oligonucleotide primer for the detection of SNP TSC0032402
ttattgttttaa

SEQ ID NO: 325124 - DNA, 12 bp, Artificial Sequence
  Oligonucleotide primer for the detection of SNP TSC0032402
tcactatctcaa

SEQ ID NO: 325125 - DNA, 12 bp, Artificial Sequence
  Oligonucleotide primer for the detection of SNP TSC0032402
ttgtaaaattat

SEQ ID NO: 325126 - DNA, 12 bp, Artificial Sequence
  Oligonucleotide primer for the detection of SNP TSC0032403
ctttacaaaatt

SEQ ID NO: 325127 - DNA, 12 bp, Artificial Sequence
  Oligonucleotide primer for the detection of SNP TSC0032403
ttgttttaatta

SEQ ID NO: 325128 - DNA, 12 bp, Artificial Sequence
  Oligonucleotide primer for the detection of SNP TSC0032403
ctatctcaatca

SEQ ID NO: 325129 - DNA, 12 bp, Artificial Sequence
  Oligonucleotide primer for the detection of SNP TSC0032404
atatttaaacat

SEQ ID NO: 325130 - DNA, 12 bp, Artificial Sequence
  Oligonucleotide primer for the detection of SNP TSC0032404
atatttaaacgt

SEQ ID NO: 325131 - DNA, 12 bp, Artificial Sequence
  Oligonucleotide primer for the detection of SNP TSC0032404
tttgatatatta

SEQ ID NO: 325132 - DNA, 12 bp, Artificial Sequence
  Oligonucleotide primer for the detection of SNP TSC0032405
gttttagtttat

SEQ ID NO: 325133 - DNA, 12 bp, Artificial Sequence
  Oligonucleotide primer for the detection of SNP TSC0032405
gttttagtttac

SEQ ID NO: 325134 - DNA, 12 bp, Artificial Sequence
  Oligonucleotide primer for the detection of SNP TSC0032405
aactccaattta

SEQ ID NO: 325135 - DNA, 12 bp, Artificial Sequence
  Oligonucleotide primer for the detection of SNP TSC0032405
gactccaattta

SEQ ID NO: 325136 - DNA, 12 bp, Artificial Sequence
  Oligonucleotide primer for the detection of SNP TSC0032405
tagaggaatttt

SEQ ID NO: 325137 - DNA, 12 bp, Artificial Sequence
  Oligonucleotide primer for the detection of SNP TSC0032412
agtaaggaaata

SEQ ID NO: 325138 - DNA, 12 bp, Artificial Sequence
  Oligonucleotide primer for the detection of SNP TSC0032414
taactaattaac

SEQ ID NO: 325139 - DNA, 12 bp, Artificial Sequence
  Oligonucleotide primer for the detection of SNP TSC0032415
ataatactaaat

SEQ ID NO: 325140 - DNA, 12 bp, Artificial Sequence
  Oligonucleotide primer for the detection of SNP TSC0032417
gtggttgtatag

SEQ ID NO: 325141 - DNA, 12 bp, Artificial Sequence
  Oligonucleotide primer for the detection of SNP TSC0032418
aataactacaca

SEQ ID NO: 325142 - DNA, 12 bp, Artificial Sequence
  Oligonucleotide primer for the detection of SNP TSC0032418
agaaatgttatt

SEQ ID NO: 325143 - DNA, 12 bp, Artificial Sequence
  Oligonucleotide primer for the detection of SNP TSC0032418
aaaatatcacca

SEQ ID NO: 325144 - DNA, 12 bp, Artificial Sequence
  Oligonucleotide primer for the detection of SNP TSC0032418
tggtggttgtat

SEQ ID NO: 325145 - DNA, 12 bp, Artificial Sequence
  Oligonucleotide primer for the detection of SNP TSC0032419
acaaatcaccct

SEQ ID NO: 325146 - DNA, 12 bp, Artificial Sequence
  Oligonucleotide primer for the detection of SNP TSC0032419
acaaatcgccct

SEQ ID NO: 325147 - DNA, 12 bp, Artificial Sequence
  Oligonucleotide primer for the detection of SNP TSC0032419
ctaaaaccctct

SEQ ID NO: 325148 - DNA, 12 bp, Artificial Sequence
  Oligonucleotide primer for the detection of SNP TSC0032419
ataggttgtttt

SEQ ID NO: 325149 - DNA, 12 bp, Artificial Sequence
  Oligonucleotide primer for the detection of SNP TSC0032419
ataggtcgtttt

SEQ ID NO: 325150 - DNA, 12 bp, Artificial Sequence
  Oligonucleotide primer for the detection of SNP TSC0032420
tataaacatatt

SEQ ID NO: 325151 - DNA, 12 bp, Artificial Sequence
  Oligonucleotide primer for the detection of SNP TSC0032420
agagtattttaa

SEQ ID NO: 325152 - DNA, 12 bp, Artificial Sequence
  Oligonucleotide primer for the detection of SNP TSC0032421
gttaggattggt

SEQ ID NO: 325153 - DNA, 12 bp, Artificial Sequence
  Oligonucleotide primer for the detection of SNP TSC0032421
ccaaaattaaca

SEQ ID NO: 325154 - DNA, 12 bp, Artificial Sequence
  Oligonucleotide primer for the detection of SNP TSC0032421
ggagaaaaaaga

SEQ ID NO: 325155 - DNA, 12 bp, Artificial Sequence
  Oligonucleotide primer for the detection of SNP TSC0032422
ataaaaacctac

SEQ ID NO: 325156 - DNA, 12 bp, Artificial Sequence
  Oligonucleotide primer for the detection of SNP TSC0032422
atttatttgtag

SEQ ID NO: 325157 - DNA, 12 bp, Artificial Sequence
  Oligonucleotide primer for the detection of SNP TSC0032424
tagaattttttt

SEQ ID NO: 325158 - DNA, 12 bp, Artificial Sequence
  Oligonucleotide primer for the detection of SNP TSC0032425
atacaacctact

SEQ ID NO: 325159 - DNA, 12 bp, Artificial Sequence
  Oligonucleotide primer for the detection of SNP TSC0032425
ttaagtatagta

SEQ ID NO: 325160 - DNA, 12 bp, Artificial Sequence
  Oligonucleotide primer for the detection of SNP TSC0032426
caaaattaccct

SEQ ID NO: 325161 - DNA, 12 bp, Artificial Sequence
  Oligonucleotide primer for the detection of SNP TSC0032426
tggaaatatagg

SEQ ID NO: 325162 - DNA, 12 bp, Artificial Sequence
  Oligonucleotide primer for the detection of SNP TSC0032428
ttaatactttac

SEQ ID NO: 325163 - DNA, 12 bp, Artificial Sequence
  Oligonucleotide primer for the detection of SNP TSC0032428
gagagagaagtg

SEQ ID NO: 325164 - DNA, 12 bp, Artificial Sequence
  Oligonucleotide primer for the detection of SNP TSC0032429
ccataatctaac

SEQ ID NO: 325165 - DNA, 12 bp, Artificial Sequence
  Oligonucleotide primer for the detection of SNP TSC0032429
ccgtaatctaac

SEQ ID NO: 325166 - DNA, 12 bp, Artificial Sequence
  Oligonucleotide primer for the detection of SNP TSC0032429
tgtgtgtatata

SEQ ID NO: 325167 - DNA, 12 bp, Artificial Sequence
  Oligonucleotide primer for the detection of SNP TSC0032430
tcttctataaac

SEQ ID NO: 325168 - DNA, 12 bp, Artificial Sequence
  Oligonucleotide primer for the detection of SNP TSC0032430
tttttggggggg

SEQ ID NO: 325169 - DNA, 12 bp, Artificial Sequence
  Oligonucleotide primer for the detection of SNP TSC0032430
ttttcggggggg

SEQ ID NO: 325170 - DNA, 12 bp, Artificial Sequence
  Oligonucleotide primer for the detection of SNP TSC0032430
ttttcgaaaaaa

SEQ ID NO: 325171 - DNA, 12 bp, Artificial Sequence
  Oligonucleotide primer for the detection of SNP TSC0032432
tttattaagtta

SEQ ID NO: 325172 - DNA, 12 bp, Artificial Sequence
  Oligonucleotide primer for the detection of SNP TSC0032434
tatattattcta

SEQ ID NO: 325173 - DNA, 12 bp, Artificial Sequence
  Oligonucleotide primer for the detection of SNP TSC0032434
gaagatggagat

SEQ ID NO: 325174 - DNA, 12 bp, Artificial Sequence
  Oligonucleotide primer for the detection of SNP TSC0032436
ttctaataatct

SEQ ID NO: 325175 - DNA, 12 bp, Artificial Sequence
  Oligonucleotide primer for the detection of SNP TSC0032436
gttgggttggta

SEQ ID NO: 325176 - DNA, 12 bp, Artificial Sequence
  Oligonucleotide primer for the detection of SNP TSC0032436
gttgggtcggta

SEQ ID NO: 325177 - DNA, 12 bp, Artificial Sequence
  Oligonucleotide primer for the detection of SNP TSC0032436
attaaaccaaca

SEQ ID NO: 325178 - DNA, 12 bp, Artificial Sequence
  Oligonucleotide primer for the detection of SNP TSC0032436
attaaaccgaca

SEQ ID NO: 325179 - DNA, 12 bp, Artificial Sequence
  Oligonucleotide primer for the detection of SNP TSC0032436
ttttggtgattt

SEQ ID NO: 325180 - DNA, 12 bp, Artificial Sequence
  Oligonucleotide primer for the detection of SNP TSC0032437
tttatttaacca

SEQ ID NO: 325181 - DNA, 12 bp, Artificial Sequence
  Oligonucleotide primer for the detection of SNP TSC0032437
tttcggtttgtt

SEQ ID NO: 325182 - DNA, 12 bp, Artificial Sequence
  Oligonucleotide primer for the detection of SNP TSC0032437
cctcaacctatc

SEQ ID NO: 325183 - DNA, 12 bp, Artificial Sequence
  Oligonucleotide primer for the detection of SNP TSC0032437
cctcgacctatc

SEQ ID NO: 325184 - DNA, 12 bp, Artificial Sequence
  Oligonucleotide primer for the detection of SNP TSC0032437
tttatttaatta

SEQ ID NO: 325185 - DNA, 12 bp, Artificial Sequence
  Oligonucleotide primer for the detection of SNP TSC0032438
ttgtcggttttt

SEQ ID NO: 325186 - DNA, 12 bp, Artificial Sequence
  Oligonucleotide primer for the detection of SNP TSC0032438
ctatcaactctt

SEQ ID NO: 325187 - DNA, 12 bp, Artificial Sequence
  Oligonucleotide primer for the detection of SNP TSC0032438
ctatcgactctt

SEQ ID NO: 325188 - DNA, 12 bp, Artificial Sequence
  Oligonucleotide primer for the detection of SNP TSC0032439
ttaaaaaaaaat

SEQ ID NO: 325189 - DNA, 12 bp, Artificial Sequence
  Oligonucleotide primer for the detection of SNP TSC0032439
ttaaaaagaaat

SEQ ID NO: 325190 - DNA, 12 bp, Artificial Sequence
  Oligonucleotide primer for the detection of SNP TSC0032442
catcaattctat

SEQ ID NO: 325191 - DNA, 12 bp, Artificial Sequence
  Oligonucleotide primer for the detection of SNP TSC0032442
tattgggagtta

SEQ ID NO: 325192 - DNA, 12 bp, Artificial Sequence
  Oligonucleotide primer for the detection of SNP TSC0032447
atttatattcac

SEQ ID NO: 325193 - DNA, 12 bp, Artificial Sequence
  Oligonucleotide primer for the detection of SNP TSC0032447
ttaattatataa

SEQ ID NO: 325194 - DNA, 12 bp, Artificial Sequence
  Oligonucleotide primer for the detection of SNP TSC0032450
acattttcttta

SEQ ID NO: 325195 - DNA, 12 bp, Artificial Sequence
  Oligonucleotide primer for the detection of SNP TSC0032450
tagagggagtaa

SEQ ID NO: 325196 - DNA, 12 bp, Artificial Sequence
  Oligonucleotide primer for the detection of SNP TSC0032451
ttaaattacttc

SEQ ID NO: 325197 - DNA, 12 bp, Artificial Sequence
  Oligonucleotide primer for the detection of SNP TSC0032451
aaaaagtagaaa

SEQ ID NO: 325198 - DNA, 12 bp, Artificial Sequence
  Oligonucleotide primer for the detection of SNP TSC0032452
acttttctccaa

SEQ ID NO: 325199 - DNA, 12 bp, Artificial Sequence
  Oligonucleotide primer for the detection of SNP TSC0032452
tgtgtggggttt

SEQ ID NO: 325200 - DNA, 12 bp, Artificial Sequence
  Oligonucleotide primer for the detection of SNP TSC0032452
tgcgtggggttt

SEQ ID NO: 325201 - DNA, 12 bp, Artificial Sequence
  Oligonucleotide primer for the detection of SNP TSC0032452
tgtgcggggttt

SEQ ID NO: 325202 - DNA, 12 bp, Artificial Sequence
  Oligonucleotide primer for the detection of SNP TSC0032452
tgcgcggggttt

SEQ ID NO: 325203 - DNA, 12 bp, Artificial Sequence
  Oligonucleotide primer for the detection of SNP TSC0032452
tacacaaaactc

SEQ ID NO: 325204 - DNA, 12 bp, Artificial Sequence
  Oligonucleotide primer for the detection of SNP TSC0032452
tacacgaaactc

SEQ ID NO: 325205 - DNA, 12 bp, Artificial Sequence
  Oligonucleotide primer for the detection of SNP TSC0032452
tacgcaaaactc

SEQ ID NO: 325206 - DNA, 12 bp, Artificial Sequence
  Oligonucleotide primer for the detection of SNP TSC0032452
tacgcgaaactc

SEQ ID NO: 325207 - DNA, 12 bp, Artificial Sequence
  Oligonucleotide primer for the detection of SNP TSC0032453
catctctaaaac

SEQ ID NO: 325208 - DNA, 12 bp, Artificial Sequence
  Oligonucleotide primer for the detection of SNP TSC0032453
ttttggggttag

SEQ ID NO: 325209 - DNA, 12 bp, Artificial Sequence
  Oligonucleotide primer for the detection of SNP TSC0032453
ttctaaaatcaa

SEQ ID NO: 325210 - DNA, 12 bp, Artificial Sequence
  Oligonucleotide primer for the detection of SNP TSC0032453
tatttttagggt

SEQ ID NO: 325211 - DNA, 12 bp, Artificial Sequence
  Oligonucleotide primer for the detection of SNP TSC0032453
tatttttagggc

SEQ ID NO: 325212 - DNA, 12 bp, Artificial Sequence
  Oligonucleotide primer for the detection of SNP TSC0032455
ttaaacctaaca

SEQ ID NO: 325213 - DNA, 12 bp, Artificial Sequence
  Oligonucleotide primer for the detection of SNP TSC0032455
atggtaagttgt

SEQ ID NO: 325214 - DNA, 12 bp, Artificial Sequence
  Oligonucleotide primer for the detection of SNP TSC0032455
ataacaaactat

SEQ ID NO: 325215 - DNA, 12 bp, Artificial Sequence
  Oligonucleotide primer for the detection of SNP TSC0032455
ttggatttgata

SEQ ID NO: 325216 - DNA, 12 bp, Artificial Sequence
  Oligonucleotide primer for the detection of SNP TSC0032456
gttttgattgat

SEQ ID NO: 325217 - DNA, 12 bp, Artificial Sequence
  Oligonucleotide primer for the detection of SNP TSC0032456
gttttgatcgat

SEQ ID NO: 325218 - DNA, 12 bp, Artificial Sequence
  Oligonucleotide primer for the detection of SNP TSC0032456
actttaatcaat

SEQ ID NO: 325219 - DNA, 12 bp, Artificial Sequence
  Oligonucleotide primer for the detection of SNP TSC0032456
actttaatcgat

SEQ ID NO: 325220 - DNA, 12 bp, Artificial Sequence
  Oligonucleotide primer for the detection of SNP TSC0032456
aggaaagaataa

SEQ ID NO: 325221 - DNA, 12 bp, Artificial Sequence
  Oligonucleotide primer for the detection of SNP TSC0032457
tttgttagtttg

SEQ ID NO: 325222 - DNA, 12 bp, Artificial Sequence
  Oligonucleotide primer for the detection of SNP TSC0032459
acctcaacattt

SEQ ID NO: 325223 - DNA, 12 bp, Artificial Sequence
  Oligonucleotide primer for the detection of SNP TSC0032459
acctcaacgttt

SEQ ID NO: 325224 - DNA, 12 bp, Artificial Sequence
  Oligonucleotide primer for the detection of SNP TSC0032459
acctcgacattt

SEQ ID NO: 325225 - DNA, 12 bp, Artificial Sequence
  Oligonucleotide primer for the detection of SNP TSC0032459
acctcgacgttt

SEQ ID NO: 325226 - DNA, 12 bp, Artificial Sequence
  Oligonucleotide primer for the detection of SNP TSC0032459
gcggtttttggg

SEQ ID NO: 325227 - DNA, 12 bp, Artificial Sequence
  Oligonucleotide primer for the detection of SNP TSC0032459
acaacttctaaa

SEQ ID NO: 325228 - DNA, 12 bp, Artificial Sequence
  Oligonucleotide primer for the detection of SNP TSC0032459
acgacttctaaa

SEQ ID NO: 325229 - DNA, 12 bp, Artificial Sequence
  Oligonucleotide primer for the detection of SNP TSC0032459
attttggtgttt

SEQ ID NO: 325230 - DNA, 12 bp, Artificial Sequence
  Oligonucleotide primer for the detection of SNP TSC0032459
atttcggtgttt

SEQ ID NO: 325231 - DNA, 12 bp, Artificial Sequence
  Oligonucleotide primer for the detection of SNP TSC0032459
attttggcgttt

SEQ ID NO: 325232 - DNA, 12 bp, Artificial Sequence
  Oligonucleotide primer for the detection of SNP TSC0032459
atttcggcgttt

SEQ ID NO: 325233 - DNA, 12 bp, Artificial Sequence
  Oligonucleotide primer for the detection of SNP TSC0032461
tccaacattcta

SEQ ID NO: 325234 - DNA, 12 bp, Artificial Sequence
  Oligonucleotide primer for the detection of SNP TSC0032461
tccgacattcta

SEQ ID NO: 325235 - DNA, 12 bp, Artificial Sequence
  Oligonucleotide primer for the detection of SNP TSC0032461
gaagatataagt

SEQ ID NO: 325236 - DNA, 12 bp, Artificial Sequence
  Oligonucleotide primer for the detection of SNP TSC0032461
gaagatataagc

SEQ ID NO: 325237 - DNA, 12 bp, Artificial Sequence
  Oligonucleotide primer for the detection of SNP TSC0032461
aaaaacacaaac

SEQ ID NO: 325238 - DNA, 12 bp, Artificial Sequence
  Oligonucleotide primer for the detection of SNP TSC0032461
tttggtattttg

SEQ ID NO: 325239 - DNA, 12 bp, Artificial Sequence
  Oligonucleotide primer for the detection of SNP TSC0032461
ttcggtattttg

SEQ ID NO: 325240 - DNA, 12 bp, Artificial Sequence
  Oligonucleotide primer for the detection of SNP TSC0032462
tattcttttaac

SEQ ID NO: 325241 - DNA, 12 bp, Artificial Sequence
  Oligonucleotide primer for the detection of SNP TSC0032463
ccccaatctata

SEQ ID NO: 325242 - DNA, 12 bp, Artificial Sequence
  Oligonucleotide primer for the detection of SNP TSC0032463
ccccgatctata

SEQ ID NO: 325243 - DNA, 12 bp, Artificial Sequence
  Oligonucleotide primer for the detection of SNP TSC0032463
aggttatgttgt

SEQ ID NO: 325244 - DNA, 12 bp, Artificial Sequence
  Oligonucleotide primer for the detection of SNP TSC0032463
aaatcatactac

SEQ ID NO: 325245 - DNA, 12 bp, Artificial Sequence
  Oligonucleotide primer for the detection of SNP TSC0032463
gttttgatttgt

SEQ ID NO: 325246 - DNA, 12 bp, Artificial Sequence
  Oligonucleotide primer for the detection of SNP TSC0032463
gtttcgatttgt

SEQ ID NO: 325247 - DNA, 12 bp, Artificial Sequence
  Oligonucleotide primer for the detection of SNP TSC0032466
attatatatata

SEQ ID NO: 325248 - DNA, 12 bp, Artificial Sequence
  Oligonucleotide primer for the detection of SNP TSC0032466
atatataggtat

SEQ ID NO: 325249 - DNA, 12 bp, Artificial Sequence
  Oligonucleotide primer for the detection of SNP TSC0032466
atatataaatac

SEQ ID NO: 325250 - DNA, 12 bp, Artificial Sequence
  Oligonucleotide primer for the detection of SNP TSC0032466
tattatatatat

SEQ ID NO: 325251 - DNA, 12 bp, Artificial Sequence
  Oligonucleotide primer for the detection of SNP TSC0032469
tttttttgagtt

SEQ ID NO: 325252 - DNA, 12 bp, Artificial Sequence
  Oligonucleotide primer for the detection of SNP TSC0032471
tttcaaaactta

SEQ ID NO: 325253 - DNA, 12 bp, Artificial Sequence
  Oligonucleotide primer for the detection of SNP TSC0032471
accattccaatt

SEQ ID NO: 325254 - DNA, 12 bp, Artificial Sequence
  Oligonucleotide primer for the detection of SNP TSC0032471
tttttaggattt

SEQ ID NO: 325255 - DNA, 12 bp, Artificial Sequence
  Oligonucleotide primer for the detection of SNP TSC0032473
tatttttaattg

SEQ ID NO: 325256 - DNA, 12 bp, Artificial Sequence
  Oligonucleotide primer for the detection of SNP TSC0032473
catccccaacta

SEQ ID NO: 325257 - DNA, 12 bp, Artificial Sequence
  Oligonucleotide primer for the detection of SNP TSC0032473
tttgttgaaaat

SEQ ID NO: 325258 - DNA, 12 bp, Artificial Sequence
  Oligonucleotide primer for the detection of SNP TSC0032475
aataaaaacact

SEQ ID NO: 325259 - DNA, 12 bp, Artificial Sequence
  Oligonucleotide primer for the detection of SNP TSC0032475
tttgaaattaga

SEQ ID NO: 325260 - DNA, 12 bp, Artificial Sequence
  Oligonucleotide primer for the detection of SNP TSC0032476
actcataataca

SEQ ID NO: 325261 - DNA, 12 bp, Artificial Sequence
  Oligonucleotide primer for the detection of SNP TSC0032476
taaggatagaag

SEQ ID NO: 325262 - DNA, 12 bp, Artificial Sequence
  Oligonucleotide primer for the detection of SNP TSC0032476
tgtttatggtgt

SEQ ID NO: 325263 - DNA, 12 bp, Artificial Sequence
  Oligonucleotide primer for the detection of SNP TSC0032477
aaaacctttccc

SEQ ID NO: 325264 - DNA, 12 bp, Artificial Sequence
  Oligonucleotide primer for the detection of SNP TSC0032477
gtaggagtttta

SEQ ID NO: 325265 - DNA, 12 bp, Artificial Sequence
  Oligonucleotide primer for the detection of SNP TSC0032479
taactttatctc

SEQ ID NO: 325266 - DNA, 12 bp, Artificial Sequence
  Oligonucleotide primer for the detection of SNP TSC0032479
ttgtatttaggg

SEQ ID NO: 325267 - DNA, 12 bp, Artificial Sequence
  Oligonucleotide primer for the detection of SNP TSC0032480
aacactattttc

SEQ ID NO: 325268 - DNA, 12 bp, Artificial Sequence
  Oligonucleotide primer for the detection of SNP TSC0032480
ttagaaatatta

SEQ ID NO: 325269 - DNA, 12 bp, Artificial Sequence
  Oligonucleotide primer for the detection of SNP TSC0032481
ctataaatccaa

SEQ ID NO: 325270 - DNA, 12 bp, Artificial Sequence
  Oligonucleotide primer for the detection of SNP TSC0032481
atttgggggttt

SEQ ID NO: 325271 - DNA, 12 bp, Artificial Sequence
  Oligonukleotid-Primer
atctaaaaacct

SEQ ID NO: 325272 - DNA, 12 bp, Artificial Sequence
  Oligonucleotide primer for the detection of SNP TSC0032481
ttgtaaatttag

SEQ ID NO: 325273 - DNA, 12 bp, Artificial Sequence
  Oligonucleotide primer for the detection of SNP TSC0032482
aaacccatataa

SEQ ID NO: 325274 - DNA, 12 bp, Artificial Sequence
  Oligonucleotide primer for the detection of SNP TSC0032482
tttattttggat

SEQ ID NO: 325275 - DNA, 12 bp, Artificial Sequence
  Oligonucleotide primer for the detection of SNP TSC0032482
tctaccctaaac

SEQ ID NO: 325276 - DNA, 12 bp, Artificial Sequence
  Oligonucleotide primer for the detection of SNP TSC0032482
gaagtttatgtg

SEQ ID NO: 325277 - DNA, 12 bp, Artificial Sequence
  Oligonucleotide primer for the detection of SNP TSC0032485
atttttggtgtg

SEQ ID NO: 325278 - DNA, 12 bp, Artificial Sequence
  Oligonucleotide primer for the detection of SNP TSC0032486
ccctataaaaat

SEQ ID NO: 325279 - DNA, 12 bp, Artificial Sequence
  Oligonucleotide primer for the detection of SNP TSC0032486
taaatttaaaag

SEQ ID NO: 325280 - DNA, 12 bp, Artificial Sequence
  Oligonucleotide primer for the detection of SNP TSC0032487
tttcaaaacaac

SEQ ID NO: 325281 - DNA, 12 bp, Artificial Sequence
  Oligonucleotide primer for the detection of SNP TSC0032487
gggtaggtttgg

SEQ ID NO: 325282 - DNA, 12 bp, Artificial Sequence
  Oligonucleotide primer for the detection of SNP TSC0032488
ctaacctaccat

SEQ ID NO: 325283 - DNA, 12 bp, Artificial Sequence
  Oligonucleotide primer for the detection of SNP TSC0032488
ctaacctaccgt

SEQ ID NO: 325284 - DNA, 12 bp, Artificial Sequence
  Oligonucleotide primer for the detection of SNP TSC0032488
agatggagtgat

SEQ ID NO: 325285 - DNA, 12 bp, Artificial Sequence
  Oligonucleotide primer for the detection of SNP TSC0032488
agacggagtgat

SEQ ID NO: 325286 - DNA, 12 bp, Artificial Sequence
  Oligonucleotide primer for the detection of SNP TSC0032488
agatggagcgat

SEQ ID NO: 325287 - DNA, 12 bp, Artificial Sequence
  Oligonucleotide primer for the detection of SNP TSC0032488
agacggagcgat

SEQ ID NO: 325288 - DNA, 12 bp, Artificial Sequence
  Oligonucleotide primer for the detection of SNP TSC0032488
aaacaaaacgac

SEQ ID NO: 325289 - DNA, 12 bp, Artificial Sequence
  Oligonucleotide primer for the detection of SNP TSC0032488
aaacgaaacaac

SEQ ID NO: 325290 - DNA, 12 bp, Artificial Sequence
  Oligonucleotide primer for the detection of SNP TSC0032488
aaacgaaacgac

SEQ ID NO: 325291 - DNA, 12 bp, Artificial Sequence
  Oligonucleotide primer for the detection of SNP TSC0032488
tggtttattgtt

SEQ ID NO: 325292 - DNA, 12 bp, Artificial Sequence
  Oligonucleotide primer for the detection of SNP TSC0032488
tggtttatcgtt

SEQ ID NO: 325293 - DNA, 12 bp, Artificial Sequence
  Oligonucleotide primer for the detection of SNP TSC0032488
tggtttattgtc

SEQ ID NO: 325294 - DNA, 12 bp, Artificial Sequence
  Oligonucleotide primer for the detection of SNP TSC0032488
tggtttatcgtc

SEQ ID NO: 325295 - DNA, 12 bp, Artificial Sequence
  Oligonucleotide primer for the detection of SNP TSC0032491
atttcattcaaa

SEQ ID NO: 325296 - DNA, 12 bp, Artificial Sequence
  Oligonucleotide primer for the detection of SNP TSC0032491
tcacactttcta

SEQ ID NO: 325297 - DNA, 12 bp, Artificial Sequence
  Oligonucleotide primer for the detection of SNP TSC0032491
attttatttagg

SEQ ID NO: 325298 - DNA, 12 bp, Artificial Sequence
  Oligonucleotide primer for the detection of SNP TSC0032492
tttaaaaacctt

SEQ ID NO: 325299 - DNA, 12 bp, Artificial Sequence
  Oligonucleotide primer for the detection of SNP TSC0032492
aattgttattta

SEQ ID NO: 325300 - DNA, 12 bp, Artificial Sequence
  Oligonucleotide primer for the detection of SNP TSC0032493
ccaatcccaaac

SEQ ID NO: 325301 - DNA, 12 bp, Artificial Sequence
  Oligonucleotide primer for the detection of SNP TSC0032493
gagggaatatga

SEQ ID NO: 325302 - DNA, 12 bp, Artificial Sequence
  Oligonucleotide primer for the detection of SNP TSC0032493
gagggaatacga

SEQ ID NO: 325303 - DNA, 12 bp, Artificial Sequence
  Oligonucleotide primer for the detection of SNP TSC0032493
ttagttttaggt

SEQ ID NO: 325304 - DNA, 12 bp, Artificial Sequence
  Oligonucleotide primer for the detection of SNP TSC0032494
catatacttcca

SEQ ID NO: 325305 - DNA, 12 bp, Artificial Sequence
  Oligonucleotide primer for the detection of SNP TSC0032494
atttataattat

SEQ ID NO: 325306 - DNA, 12 bp, Artificial Sequence
  Oligonucleotide primer for the detection of SNP TSC0032494
acccacaatcat

SEQ ID NO: 325307 - DNA, 12 bp, Artificial Sequence
  Oligonucleotide primer for the detection of SNP TSC0032494
tatgtgttttta

SEQ ID NO: 325308 - DNA, 12 bp, Artificial Sequence
  Oligonucleotide primer for the detection of SNP TSC0032495
gaaaaagagatg

SEQ ID NO: 325309 - DNA, 12 bp, Artificial Sequence
  Oligonucleotide primer for the detection of SNP TSC0032499
ctccccttatac

SEQ ID NO: 325310 - DNA, 12 bp, Artificial Sequence
  Oligonucleotide primer for the detection of SNP TSC0032499
gaaagtttgagg

SEQ ID NO: 325311 - DNA, 12 bp, Artificial Sequence
  Oligonucleotide primer for the detection of SNP TSC0032500
aaataatataac

SEQ ID NO: 325312 - DNA, 12 bp, Artificial Sequence
  Oligonucleotide primer for the detection of SNP TSC0032500
gaataatataac

SEQ ID NO: 325313 - DNA, 12 bp, Artificial Sequence
  Oligonucleotide primer for the detection of SNP TSC0032500
ttgttttatttg

SEQ ID NO: 325314 - DNA, 12 bp, Artificial Sequence
  Oligonucleotide primer for the detection of SNP TSC0032500
ctatcccatcta

SEQ ID NO: 325315 - DNA, 12 bp, Artificial Sequence
  Oligonucleotide primer for the detection of SNP TSC0032500
gagtagtgtggt

SEQ ID NO: 325316 - DNA, 12 bp, Artificial Sequence
  Oligonucleotide primer for the detection of SNP TSC0032504
catataaaaata

SEQ ID NO: 325317 - DNA, 12 bp, Artificial Sequence
  Oligonucleotide primer for the detection of SNP TSC0032504
tgaaatgtagat

SEQ ID NO: 325318 - DNA, 12 bp, Artificial Sequence
  Oligonucleotide primer for the detection of SNP TSC0032504
tgaaatgtagac

SEQ ID NO: 325319 - DNA, 12 bp, Artificial Sequence
  Oligonucleotide primer for the detection of SNP TSC0032504
ataaaatacaaa

SEQ ID NO: 325320 - DNA, 12 bp, Artificial Sequence
  Oligonucleotide primer for the detection of SNP TSC0032504
gtatgtaaaaat

SEQ ID NO: 325321 - DNA, 12 bp, Artificial Sequence
  Oligonucleotide primer for the detection of SNP TSC0032505
ggttgtggtgag

SEQ ID NO: 325322 - DNA, 12 bp, Artificial Sequence
  Oligonucleotide primer for the detection of SNP TSC0032505
aattataataaa

SEQ ID NO: 325323 - DNA, 12 bp, Artificial Sequence
  Oligonucleotide primer for the detection of SNP TSC0032506
ttctctataact

SEQ ID NO: 325324 - DNA, 12 bp, Artificial Sequence
  Oligonucleotide primer for the detection of SNP TSC0032506
agtagggtgtgg

SEQ ID NO: 325325 - DNA, 12 bp, Artificial Sequence
  Oligonucleotide primer for the detection of SNP TSC0032506
agtagggtgcgg

SEQ ID NO: 325326 - DNA, 12 bp, Artificial Sequence
  Oligonucleotide primer for the detection of SNP TSC0032508
ctcctccaaact

SEQ ID NO: 325327 - DNA, 12 bp, Artificial Sequence
  Oligonucleotide primer for the detection of SNP TSC0032508
taggaaaatgat

SEQ ID NO: 325328 - DNA, 12 bp, Artificial Sequence
  Oligonucleotide primer for the detection of SNP TSC0032508
taggaaaatgac

SEQ ID NO: 325329 - DNA, 12 bp, Artificial Sequence
  Oligonucleotide primer for the detection of SNP TSC0032509
aaactacaccta

SEQ ID NO: 325330 - DNA, 12 bp, Artificial Sequence
  Oligonucleotide primer for the detection of SNP TSC0032509
ataatagtgtat

SEQ ID NO: 325331 - DNA, 12 bp, Artificial Sequence
  Oligonucleotide primer for the detection of SNP TSC0032509
aagttgtattta

SEQ ID NO: 325332 - DNA, 12 bp, Artificial Sequence
  Oligonucleotide primer for the detection of SNP TSC0032510
gagattttggga

SEQ ID NO: 325333 - DNA, 12 bp, Artificial Sequence
  Oligonucleotide primer for the detection of SNP TSC0032511
cacctcccctaa

SEQ ID NO: 325334 - DNA, 12 bp, Artificial Sequence
  Oligonucleotide primer for the detection of SNP TSC0032511
attttgtgggtt

SEQ ID NO: 325335 - DNA, 12 bp, Artificial Sequence
  Oligonucleotide primer for the detection of SNP TSC0032511
accctataaacc

SEQ ID NO: 325336 - DNA, 12 bp, Artificial Sequence
  Oligonucleotide primer for the detection of SNP TSC0032512
ccacttcttaca

SEQ ID NO: 325337 - DNA, 12 bp, Artificial Sequence
  Oligonucleotide primer for the detection of SNP TSC0032512
gaatgaaagttt

SEQ ID NO: 325338 - DNA, 12 bp, Artificial Sequence
  Oligonucleotide primer for the detection of SNP TSC0032512
gaatgaaagttc

SEQ ID NO: 325339 - DNA, 12 bp, Artificial Sequence
  Oligonucleotide primer for the detection of SNP TSC0032513
ttttttcataaa

SEQ ID NO: 325340 - DNA, 12 bp, Artificial Sequence
  Oligonucleotide primer for the detection of SNP TSC0032513
gttttgtttgtt

SEQ ID NO: 325341 - DNA, 12 bp, Artificial Sequence
  Oligonucleotide primer for the detection of SNP TSC0032513
actctatctact

SEQ ID NO: 325342 - DNA, 12 bp, Artificial Sequence
  Oligonucleotide primer for the detection of SNP TSC0032513
tttttttatgag

SEQ ID NO: 325343 - DNA, 12 bp, Artificial Sequence
  Oligonucleotide primer for the detection of SNP TSC0032516
caataataaata

SEQ ID NO: 325344 - DNA, 12 bp, Artificial Sequence
  Oligonucleotide primer for the detection of SNP TSC0032516
aaatatatgaag

SEQ ID NO: 325345 - DNA, 12 bp, Artificial Sequence
  Oligonucleotide primer for the detection of SNP TSC0032516
aaatatacgaag

SEQ ID NO: 325346 - DNA, 12 bp, Artificial Sequence
  Oligonucleotide primer for the detection of SNP TSC0032516
aaacacacaaaa

SEQ ID NO: 325347 - DNA, 12 bp, Artificial Sequence
  Oligonucleotide primer for the detection of SNP TSC0032516
aaacacacgaaa

SEQ ID NO: 325348 - DNA, 12 bp, Artificial Sequence
  Oligonucleotide primer for the detection of SNP TSC0032516
tagtggtaaatg

SEQ ID NO: 325349 - DNA, 12 bp, Artificial Sequence
  Oligonucleotide primer for the detection of SNP TSC0032517
aactccaaaata

SEQ ID NO: 325350 - DNA, 12 bp, Artificial Sequence
  Oligonucleotide primer for the detection of SNP TSC0032517
aattttgttagt

SEQ ID NO: 325351 - DNA, 12 bp, Artificial Sequence
  Oligonucleotide primer for the detection of SNP TSC0032517
aatcctattaac

SEQ ID NO: 325352 - DNA, 12 bp, Artificial Sequence
  Oligonucleotide primer for the detection of SNP TSC0032518
tcgtggatttta

SEQ ID NO: 325353 - DNA, 12 bp, Artificial Sequence
  Oligonucleotide primer for the detection of SNP TSC0032518
ccataaacttta

SEQ ID NO: 325354 - DNA, 12 bp, Artificial Sequence
  Oligonucleotide primer for the detection of SNP TSC0032518
ccgtaaacttta

SEQ ID NO: 325355 - DNA, 12 bp, Artificial Sequence
  Oligonucleotide primer for the detection of SNP TSC0032518
attgtagatgag

SEQ ID NO: 325356 - DNA, 12 bp, Artificial Sequence
  Oligonukleotid-Primer
ctaaaattcgaa

SEQ ID NO: 325357 - DNA, 12 bp, Artificial Sequence
  Oligonucleotide primer for the detection of SNP TSC0032519
ggtaggagaatc

SEQ ID NO: 325358 - DNA, 12 bp, Artificial Sequence
  Oligonucleotide primer for the detection of SNP TSC0032519
ttggggtttgag

SEQ ID NO: 325359 - DNA, 12 bp, Artificial Sequence
  Oligonucleotide primer for the detection of SNP TSC0032519
ttggggttcgag

SEQ ID NO: 325360 - DNA, 12 bp, Artificial Sequence
  Oligonucleotide primer for the detection of SNP TSC0032520
aacaacactaac

SEQ ID NO: 325361 - DNA, 12 bp, Artificial Sequence
  Oligonucleotide primer for the detection of SNP TSC0032520
gggatgtttggg

SEQ ID NO: 325362 - DNA, 12 bp, Artificial Sequence
  Oligonucleotide primer for the detection of SNP TSC0032520
gggacgtttggg

SEQ ID NO: 325363 - DNA, 12 bp, Artificial Sequence
  Oligonucleotide primer for the detection of SNP TSC0032520
aaaacacctaaa

SEQ ID NO: 325364 - DNA, 12 bp, Artificial Sequence
  Oligonucleotide primer for the detection of SNP TSC0032520
aaaacgcctaaa

SEQ ID NO: 325365 - DNA, 12 bp, Artificial Sequence
  Oligonucleotide primer for the detection of SNP TSC0032520
gaaacacctaaa

SEQ ID NO: 325366 - DNA, 12 bp, Artificial Sequence
  Oligonucleotide primer for the detection of SNP TSC0032520
gaaacgcctaaa

SEQ ID NO: 325367 - DNA, 12 bp, Artificial Sequence
  Oligonucleotide primer for the detection of SNP TSC0032520
agtagtattaat

SEQ ID NO: 325368 - DNA, 12 bp, Artificial Sequence
  Oligonucleotide primer for the detection of SNP TSC0032521
caacaaatccat

SEQ ID NO: 325369 - DNA, 12 bp, Artificial Sequence
  Oligonucleotide primer for the detection of SNP TSC0032521
cgacaaatccat

SEQ ID NO: 325370 - DNA, 12 bp, Artificial Sequence
  Oligonucleotide primer for the detection of SNP TSC0032521
ttatatgggttg

SEQ ID NO: 325371 - DNA, 12 bp, Artificial Sequence
  Oligonucleotide primer for the detection of SNP TSC0032523
ataaatccctta

SEQ ID NO: 325372 - DNA, 12 bp, Artificial Sequence
  Oligonucleotide primer for the detection of SNP TSC0032523
aaagtatatttt

SEQ ID NO: 325373 - DNA, 12 bp, Artificial Sequence
  Oligonucleotide primer for the detection of SNP TSC0032523
aaaatacacttt

SEQ ID NO: 325374 - DNA, 12 bp, Artificial Sequence
  Oligonucleotide primer for the detection of SNP TSC0032524
tataaaaaattt

SEQ ID NO: 325375 - DNA, 12 bp, Artificial Sequence
  Oligonucleotide primer for the detection of SNP TSC0032524
gtaataagagga

SEQ ID NO: 325376 - DNA, 12 bp, Artificial Sequence
  Oligonucleotide primer for the detection of SNP TSC0032526
atttaatccatc

SEQ ID NO: 325377 - DNA, 12 bp, Artificial Sequence
  Oligonucleotide primer for the detection of SNP TSC0032526
atggggggaaga

SEQ ID NO: 325378 - DNA, 12 bp, Artificial Sequence
  Oligonucleotide primer for the detection of SNP TSC0032527
taaccaaaaatc

SEQ ID NO: 325379 - DNA, 12 bp, Artificial Sequence
  Oligonucleotide primer for the detection of SNP TSC0032527
taaccgaaaatc

SEQ ID NO: 325380 - DNA, 12 bp, Artificial Sequence
  Oligonucleotide primer for the detection of SNP TSC0032527
gtagtaagttta

SEQ ID NO: 325381 - DNA, 12 bp, Artificial Sequence
  Oligonucleotide primer for the detection of SNP TSC0032528
tttatagttatt

SEQ ID NO: 325382 - DNA, 12 bp, Artificial Sequence
  Oligonucleotide primer for the detection of SNP TSC0032528
ccacaaccacca

SEQ ID NO: 325383 - DNA, 12 bp, Artificial Sequence
  Oligonucleotide primer for the detection of SNP TSC0032528
gaggaggagatt

SEQ ID NO: 325384 - DNA, 12 bp, Artificial Sequence
  Oligonucleotide primer for the detection of SNP TSC0032529
ccaccaaaatct

SEQ ID NO: 325385 - DNA, 12 bp, Artificial Sequence
  Oligonucleotide primer for the detection of SNP TSC0032529
atttttgaggag

SEQ ID NO: 325386 - DNA, 12 bp, Artificial Sequence
  Oligonucleotide primer for the detection of SNP TSC0032531
actactttctaa

SEQ ID NO: 325387 - DNA, 12 bp, Artificial Sequence
  Oligonucleotide primer for the detection of SNP TSC0032531
taggaatatttg

SEQ ID NO: 325388 - DNA, 12 bp, Artificial Sequence
  Oligonucleotide primer for the detection of SNP TSC0032531
taggaatattcg

SEQ ID NO: 325389 - DNA, 12 bp, Artificial Sequence
  Oligonucleotide primer for the detection of SNP TSC0032531
caaaaacactca

SEQ ID NO: 325390 - DNA, 12 bp, Artificial Sequence
  Oligonucleotide primer for the detection of SNP TSC0032531
caaaaacactcg

SEQ ID NO: 325391 - DNA, 12 bp, Artificial Sequence
  Oligonucleotide primer for the detection of SNP TSC0032532
ttcgttttgttg

SEQ ID NO: 325392 - DNA, 12 bp, Artificial Sequence
  Oligonucleotide primer for the detection of SNP TSC0032532
ttcgttttgtcg

SEQ ID NO: 325393 - DNA, 12 bp, Artificial Sequence
  Oligonucleotide primer for the detection of SNP TSC0032532
ctcactctatca

SEQ ID NO: 325394 - DNA, 12 bp, Artificial Sequence
  Oligonucleotide primer for the detection of SNP TSC0032532
ctcactctatcg

SEQ ID NO: 325395 - DNA, 12 bp, Artificial Sequence
  Oligonucleotide primer for the detection of SNP TSC0032532
ctcgctctatca

SEQ ID NO: 325396 - DNA, 12 bp, Artificial Sequence
  Oligonucleotide primer for the detection of SNP TSC0032532
ctcgctctatcg

SEQ ID NO: 325397 - DNA, 12 bp, Artificial Sequence
  Oligonucleotide primer for the detection of SNP TSC0032533
cctctaacacca

SEQ ID NO: 325398 - DNA, 12 bp, Artificial Sequence
  Oligonucleotide primer for the detection of SNP TSC0032533
cctctaacaccg

SEQ ID NO: 325399 - DNA, 12 bp, Artificial Sequence
  Oligonucleotide primer for the detection of SNP TSC0032533
cctctaacgcca

SEQ ID NO: 325400 - DNA, 12 bp, Artificial Sequence
  Oligonucleotide primer for the detection of SNP TSC0032533
cctctaacgccg

SEQ ID NO: 325401 - DNA, 12 bp, Artificial Sequence
  Oligonucleotide primer for the detection of SNP TSC0032533
tttattgtgggt

SEQ ID NO: 325402 - DNA, 12 bp, Artificial Sequence
  Oligonucleotide primer for the detection of SNP TSC0032533
tttatcgtgggt

SEQ ID NO: 325403 - DNA, 12 bp, Artificial Sequence
  Oligonucleotide primer for the detection of SNP TSC0032533
tttattgcgggt

SEQ ID NO: 325404 - DNA, 12 bp, Artificial Sequence
  Oligonucleotide primer for the detection of SNP TSC0032533
tttattgtgggc

SEQ ID NO: 325405 - DNA, 12 bp, Artificial Sequence
  Oligonucleotide primer for the detection of SNP TSC0032533
tttatcgcgggt

SEQ ID NO: 325406 - DNA, 12 bp, Artificial Sequence
  Oligonucleotide primer for the detection of SNP TSC0032533
tttatcgtgggc

SEQ ID NO: 325407 - DNA, 12 bp, Artificial Sequence
  Oligonucleotide primer for the detection of SNP TSC0032533
tttattgcgggc

SEQ ID NO: 325408 - DNA, 12 bp, Artificial Sequence
  Oligonucleotide primer for the detection of SNP TSC0032533
tttatcgcgggc

SEQ ID NO: 325409 - DNA, 12 bp, Artificial Sequence
  Oligonucleotide primer for the detection of SNP TSC0032533
caccacaaacaa

SEQ ID NO: 325410 - DNA, 12 bp, Artificial Sequence
  Oligonucleotide primer for the detection of SNP TSC0032533
caccacaaacga

SEQ ID NO: 325411 - DNA, 12 bp, Artificial Sequence
  Oligonucleotide primer for the detection of SNP TSC0032533
caccacgaacaa

SEQ ID NO: 325412 - DNA, 12 bp, Artificial Sequence
  Oligonucleotide primer for the detection of SNP TSC0032533
caccgcaaacaa

SEQ ID NO: 325413 - DNA, 12 bp, Artificial Sequence
  Oligonukleotid-Primer
caccacgaacga

SEQ ID NO: 325414 - DNA, 12 bp, Artificial Sequence
  Oligonucleotide primer for the detection of SNP TSC0032533
caccgcaaacga

SEQ ID NO: 325415 - DNA, 12 bp, Artificial Sequence
  Oligonucleotide primer for the detection of SNP TSC0032533
caccgcgaacaa

SEQ ID NO: 325416 - DNA, 12 bp, Artificial Sequence
  Oligonucleotide primer for the detection of SNP TSC0032533
caccgcgaacga

SEQ ID NO: 325417 - DNA, 12 bp, Artificial Sequence
  Oligonucleotide primer for the detection of SNP TSC0032533
tttttggtgttg

SEQ ID NO: 325418 - DNA, 12 bp, Artificial Sequence
  Oligonucleotide primer for the detection of SNP TSC0032533
tttttggcgttg

SEQ ID NO: 325419 - DNA, 12 bp, Artificial Sequence
  Oligonucleotide primer for the detection of SNP TSC0032533
tttttggtgtcg

SEQ ID NO: 325420 - DNA, 12 bp, Artificial Sequence
  Oligonucleotide primer for the detection of SNP TSC0032533
tttttggcgtcg

SEQ ID NO: 325421 - DNA, 12 bp, Artificial Sequence
  Oligonucleotide primer for the detection of SNP TSC0032535
gatggttgtgta

SEQ ID NO: 325422 - DNA, 12 bp, Artificial Sequence
  Oligonucleotide primer for the detection of SNP TSC0032535
tataggggattt

SEQ ID NO: 325423 - DNA, 12 bp, Artificial Sequence
  Oligonucleotide primer for the detection of SNP TSC0032536
aaaaaaccaccc

SEQ ID NO: 325424 - DNA, 12 bp, Artificial Sequence
  Oligonucleotide primer for the detection of SNP TSC0032536
aaaaaaccgccc

SEQ ID NO: 325425 - DNA, 12 bp, Artificial Sequence
  Oligonucleotide primer for the detection of SNP TSC0032536
ggttgtgtttgg

SEQ ID NO: 325426 - DNA, 12 bp, Artificial Sequence
  Oligonucleotide primer for the detection of SNP TSC0032536
aactatacctaa

SEQ ID NO: 325427 - DNA, 12 bp, Artificial Sequence
  Oligonucleotide primer for the detection of SNP TSC0032536
ggaaaattgttt

SEQ ID NO: 325428 - DNA, 12 bp, Artificial Sequence
  Oligonucleotide primer for the detection of SNP TSC0032536
ggaaaatcgttt

SEQ ID NO: 325429 - DNA, 12 bp, Artificial Sequence
  Oligonucleotide primer for the detection of SNP TSC0032538
aaaaataatatc

SEQ ID NO: 325430 - DNA, 12 bp, Artificial Sequence
  Oligonucleotide primer for the detection of SNP TSC0032538
ttaggtaaggat

SEQ ID NO: 325431 - DNA, 12 bp, Artificial Sequence
  Oligonucleotide primer for the detection of SNP TSC0032538
aaaggtagtgtt

SEQ ID NO: 325432 - DNA, 12 bp, Artificial Sequence
  Oligonucleotide primer for the detection of SNP TSC0032539
acgtaaactccc

SEQ ID NO: 325433 - DNA, 12 bp, Artificial Sequence
  Oligonucleotide primer for the detection of SNP TSC0032539
tatggatgaata

SEQ ID NO: 325434 - DNA, 12 bp, Artificial Sequence
  Oligonucleotide primer for the detection of SNP TSC0032541
cctttaaaacaa

SEQ ID NO: 325435 - DNA, 12 bp, Artificial Sequence
  Oligonucleotide primer for the detection of SNP TSC0032541
cctttaaaacga

SEQ ID NO: 325436 - DNA, 12 bp, Artificial Sequence
  Oligonucleotide primer for the detection of SNP TSC0032541
atagagtgagat

SEQ ID NO: 325437 - DNA, 12 bp, Artificial Sequence
  Oligonucleotide primer for the detection of SNP TSC0032541
atagagcgagat

SEQ ID NO: 325438 - DNA, 12 bp, Artificial Sequence
  Oligonucleotide primer for the detection of SNP TSC0032541
tttttttaagac

SEQ ID NO: 325439 - DNA, 12 bp, Artificial Sequence
  Oligonucleotide primer for the detection of SNP TSC0032542
cactatcaaatc

SEQ ID NO: 325440 - DNA, 12 bp, Artificial Sequence
  Oligonucleotide primer for the detection of SNP TSC0032542
tttgagtggttg

SEQ ID NO: 325441 - DNA, 12 bp, Artificial Sequence
  Oligonucleotide primer for the detection of SNP TSC0032542
tttgagcggttg

SEQ ID NO: 325442 - DNA, 12 bp, Artificial Sequence
  Oligonucleotide primer for the detection of SNP TSC0032544
accaataccaaa

SEQ ID NO: 325443 - DNA, 12 bp, Artificial Sequence
  Oligonucleotide primer for the detection of SNP TSC0032544
accaataccgaa

SEQ ID NO: 325444 - DNA, 12 bp, Artificial Sequence
  Oligonucleotide primer for the detection of SNP TSC0032544
tttgtggttgtt

SEQ ID NO: 325445 - DNA, 12 bp, Artificial Sequence
  Oligonucleotide primer for the detection of SNP TSC0032544
tttgcggttgtt

SEQ ID NO: 325446 - DNA, 12 bp, Artificial Sequence
  Oligonucleotide primer for the detection of SNP TSC0032544
ctacaactacta

SEQ ID NO: 325447 - DNA, 12 bp, Artificial Sequence
  Oligonucleotide primer for the detection of SNP TSC0032544
ctacgactacta

SEQ ID NO: 325448 - DNA, 12 bp, Artificial Sequence
  Oligonucleotide primer for the detection of SNP TSC0032544
ggttagtgttga

SEQ ID NO: 325449 - DNA, 12 bp, Artificial Sequence
  Oligonucleotide primer for the detection of SNP TSC0032544
ggttagtgtcga

SEQ ID NO: 325450 - DNA, 12 bp, Artificial Sequence
  Oligonucleotide primer for the detection of SNP TSC0032545
caaaaaaactat

SEQ ID NO: 325451 - DNA, 12 bp, Artificial Sequence
  Oligonucleotide primer for the detection of SNP TSC0032545
ttgaatattgtg

SEQ ID NO: 325452 - DNA, 12 bp, Artificial Sequence
  Oligonucleotide primer for the detection of SNP TSC0032546
aaatactatttt

SEQ ID NO: 325453 - DNA, 12 bp, Artificial Sequence
  Oligonucleotide primer for the detection of SNP TSC0032546
ttaatgagttaa

SEQ ID NO: 325454 - DNA, 12 bp, Artificial Sequence
  Oligonucleotide primer for the detection of SNP TSC0032547
tatgttatttat

SEQ ID NO: 325455 - DNA, 12 bp, Artificial Sequence
  Oligonucleotide primer for the detection of SNP TSC0032547
atactatttata

SEQ ID NO: 325456 - DNA, 12 bp, Artificial Sequence
  Oligonucleotide primer for the detection of SNP TSC0032547
tatatgtggtat

SEQ ID NO: 325457 - DNA, 12 bp, Artificial Sequence
  Oligonucleotide primer for the detection of SNP TSC0032547
tatatgtggtac

SEQ ID NO: 325458 - DNA, 12 bp, Artificial Sequence
  Oligonucleotide primer for the detection of SNP TSC0032548
aataccacatat

SEQ ID NO: 325459 - DNA, 12 bp, Artificial Sequence
  Oligonucleotide primer for the detection of SNP TSC0032548
agatttgagtta

SEQ ID NO: 325460 - DNA, 12 bp, Artificial Sequence
  Oligonucleotide primer for the detection of SNP TSC0032549
aataaatctaaa

SEQ ID NO: 325461 - DNA, 12 bp, Artificial Sequence
  Oligonucleotide primer for the detection of SNP TSC0032549
aatgaagtggtt

SEQ ID NO: 325462 - DNA, 12 bp, Artificial Sequence
  Oligonucleotide primer for the detection of SNP TSC0032549
agtgagtttagg

SEQ ID NO: 325463 - DNA, 12 bp, Artificial Sequence
  Oligonucleotide primer for the detection of SNP TSC0032550
agaggtaggggg

SEQ ID NO: 325464 - DNA, 12 bp, Artificial Sequence
  Oligonucleotide primer for the detection of SNP TSC0032551
tagtttggagaa

SEQ ID NO: 325465 - DNA, 12 bp, Artificial Sequence
  Oligonucleotide primer for the detection of SNP TSC0032553
acaccaatatct

SEQ ID NO: 325466 - DNA, 12 bp, Artificial Sequence
  Oligonucleotide primer for the detection of SNP TSC0032553
gtgagtgaatgg

SEQ ID NO: 325467 - DNA, 12 bp, Artificial Sequence
  Oligonucleotide primer for the detection of SNP TSC0032554
aattaaaataac

SEQ ID NO: 325468 - DNA, 12 bp, Artificial Sequence
  Oligonucleotide primer for the detection of SNP TSC0032554
ggtgtattaatg

SEQ ID NO: 325469 - DNA, 12 bp, Artificial Sequence
  Oligonucleotide primer for the detection of SNP TSC0032555
ctaataaattat

SEQ ID NO: 325470 - DNA, 12 bp, Artificial Sequence
  Oligonucleotide primer for the detection of SNP TSC0032555
ttgtagaattgg

SEQ ID NO: 325471 - DNA, 12 bp, Artificial Sequence
  Oligonucleotide primer for the detection of SNP TSC0032556
aatggatttgga

SEQ ID NO: 325472 - DNA, 12 bp, Artificial Sequence
  Oligonucleotide primer for the detection of SNP TSC0032556
tgaagttagaga

SEQ ID NO: 325473 - DNA, 12 bp, Artificial Sequence
  Oligonucleotide primer for the detection of SNP TSC0032557
tacaaataattc

SEQ ID NO: 325474 - DNA, 12 bp, Artificial Sequence
  Oligonucleotide primer for the detection of SNP TSC0032557
tacgaataattc

SEQ ID NO: 325475 - DNA, 12 bp, Artificial Sequence
  Oligonucleotide primer for the detection of SNP TSC0032557
attgtatgggta

SEQ ID NO: 325476 - DNA, 12 bp, Artificial Sequence
  Oligonucleotide primer for the detection of SNP TSC0032557
atcgtatgggta

SEQ ID NO: 325477 - DNA, 12 bp, Artificial Sequence
  Oligonucleotide primer for the detection of SNP TSC0032558
atcaaatttaaa

SEQ ID NO: 325478 - DNA, 12 bp, Artificial Sequence
  Oligonucleotide primer for the detection of SNP TSC0032558
ttcctaactctt

SEQ ID NO: 325479 - DNA, 12 bp, Artificial Sequence
  Oligonucleotide primer for the detection of SNP TSC0032558
gttaagtttaaa

SEQ ID NO: 325480 - DNA, 12 bp, Artificial Sequence
  Oligonucleotide primer for the detection of SNP TSC0032559
gttttagtgtat

SEQ ID NO: 325481 - DNA, 12 bp, Artificial Sequence
  Oligonucleotide primer for the detection of SNP TSC0032559
gttttagtgtac

SEQ ID NO: 325482 - DNA, 12 bp, Artificial Sequence
  Oligonucleotide primer for the detection of SNP TSC0032559
actttaatacac

SEQ ID NO: 325483 - DNA, 12 bp, Artificial Sequence
  Oligonucleotide primer for the detection of SNP TSC0032559
aaggaatatgag

SEQ ID NO: 325484 - DNA, 12 bp, Artificial Sequence
  Oligonucleotide primer for the detection of SNP TSC0032562
aacaaaaatcac

SEQ ID NO: 325485 - DNA, 12 bp, Artificial Sequence
  Oligonucleotide primer for the detection of SNP TSC0032562
ataatgtttttg

SEQ ID NO: 325486 - DNA, 12 bp, Artificial Sequence
  Oligonucleotide primer for the detection of SNP TSC0032563
taaattatccct

SEQ ID NO: 325487 - DNA, 12 bp, Artificial Sequence
  Oligonucleotide primer for the detection of SNP TSC0032563
atagtagttatt

SEQ ID NO: 325488 - DNA, 12 bp, Artificial Sequence
  Oligonucleotide primer for the detection of SNP TSC0032563
caacaattatta

SEQ ID NO: 325489 - DNA, 12 bp, Artificial Sequence
  Oligonucleotide primer for the detection of SNP TSC0032564
ttgaatgggaga

SEQ ID NO: 325490 - DNA, 12 bp, Artificial Sequence
  Oligonucleotide primer for the detection of SNP TSC0032564
ttgaacgggaga

SEQ ID NO: 325491 - DNA, 12 bp, Artificial Sequence
  Oligonucleotide primer for the detection of SNP TSC0032564
ctaaacaaaaaa

SEQ ID NO: 325492 - DNA, 12 bp, Artificial Sequence
  Oligonucleotide primer for the detection of SNP TSC0032564
ctaaacgaaaaa

SEQ ID NO: 325493 - DNA, 12 bp, Artificial Sequence
  Oligonucleotide primer for the detection of SNP TSC0032564
gtagaggtttgt

SEQ ID NO: 325494 - DNA, 12 bp, Artificial Sequence
  Oligonucleotide primer for the detection of SNP TSC0032568
tcataaacttaa

SEQ ID NO: 325495 - DNA, 12 bp, Artificial Sequence
  Oligonucleotide primer for the detection of SNP TSC0032568
gtgattagagat

SEQ ID NO: 325496 - DNA, 12 bp, Artificial Sequence
  Oligonucleotide primer for the detection of SNP TSC0032568
ttttataagttt

SEQ ID NO: 325497 - DNA, 12 bp, Artificial Sequence
  Oligonucleotide primer for the detection of SNP TSC0032569
actctactcaaa

SEQ ID NO: 325498 - DNA, 12 bp, Artificial Sequence
  Oligonucleotide primer for the detection of SNP TSC0032569
atgaaggtggta

SEQ ID NO: 325499 - DNA, 12 bp, Artificial Sequence
  Oligonucleotide primer for the detection of SNP TSC0032569
attttgtttaga

SEQ ID NO: 325500 - DNA, 12 bp, Artificial Sequence
  Oligonucleotide primer for the detection of SNP TSC0032570
attctaaaacaa

SEQ ID NO: 325501 - DNA, 12 bp, Artificial Sequence
  Oligonucleotide primer for the detection of SNP TSC0032570
attatatgagtt

SEQ ID NO: 325502 - DNA, 12 bp, Artificial Sequence
  Oligonukleotid-Primer
attatatgagtc

SEQ ID NO: 325503 - DNA, 12 bp, Artificial Sequence
  Oligonucleotide primer for the detection of SNP TSC0032570
aattatataaat

SEQ ID NO: 325504 - DNA, 12 bp, Artificial Sequence
  Oligonucleotide primer for the detection of SNP TSC0032570
attttgaggtaa

SEQ ID NO: 325505 - DNA, 12 bp, Artificial Sequence
  Oligonucleotide primer for the detection of SNP TSC0032571
aaacacaactac

SEQ ID NO: 325506 - DNA, 12 bp, Artificial Sequence
  Oligonucleotide primer for the detection of SNP TSC0032571
agagtggggagg

SEQ ID NO: 325507 - DNA, 12 bp, Artificial Sequence
  Oligonucleotide primer for the detection of SNP TSC0032572
atttttctcttt

SEQ ID NO: 325508 - DNA, 12 bp, Artificial Sequence
  Oligonucleotide primer for the detection of SNP TSC0032572
taaaatgtaata

SEQ ID NO: 325509 - DNA, 12 bp, Artificial Sequence
  Oligonucleotide primer for the detection of SNP TSC0032573
tttgttttaaaa

SEQ ID NO: 325510 - DNA, 12 bp, Artificial Sequence
  Oligonucleotide primer for the detection of SNP TSC0032573
tctacctcaaaa

SEQ ID NO: 325511 - DNA, 12 bp, Artificial Sequence
  Oligonucleotide primer for the detection of SNP TSC0032578
atcaaataaatc

SEQ ID NO: 325512 - DNA, 12 bp, Artificial Sequence
  Oligonucleotide primer for the detection of SNP TSC0032578
atatttttatag

SEQ ID NO: 325513 - DNA, 12 bp, Artificial Sequence
  Oligonucleotide primer for the detection of SNP TSC0032578
acactttcacaa

SEQ ID NO: 325514 - DNA, 12 bp, Artificial Sequence
  Oligonucleotide primer for the detection of SNP TSC0032578
attaaataagtt

SEQ ID NO: 325515 - DNA, 12 bp, Artificial Sequence
  Oligonucleotide primer for the detection of SNP TSC0032581
ttatattctaaa

SEQ ID NO: 325516 - DNA, 12 bp, Artificial Sequence
  Oligonucleotide primer for the detection of SNP TSC0032581
tttttttggata

SEQ ID NO: 325517 - DNA, 12 bp, Artificial Sequence
  Oligonucleotide primer for the detection of SNP TSC0032581
cttctttaaata

SEQ ID NO: 325518 - DNA, 12 bp, Artificial Sequence
  Oligonucleotide primer for the detection of SNP TSC0032582
attaacctcatt

SEQ ID NO: 325519 - DNA, 12 bp, Artificial Sequence
  Oligonucleotide primer for the detection of SNP TSC0032582
attttttatgta

SEQ ID NO: 325520 - DNA, 12 bp, Artificial Sequence
  Oligonucleotide primer for the detection of SNP TSC0032582
acctcctatata

SEQ ID NO: 325521 - DNA, 12 bp, Artificial Sequence
  Oligonucleotide primer for the detection of SNP TSC0032582
attggttttatt

SEQ ID NO: 325522 - DNA, 12 bp, Artificial Sequence
  Oligonukleotid-Primer
taataatccata

SEQ ID NO: 325523 - DNA, 12 bp, Artificial Sequence
  Oligonucleotide primer for the detection of SNP TSC0032585
aaatcttatttc

SEQ ID NO: 325524 - DNA, 12 bp, Artificial Sequence
  Oligonucleotide primer for the detection of SNP TSC0032585
tggtaatttatg

SEQ ID NO: 325525 - DNA, 12 bp, Artificial Sequence
  Oligonucleotide primer for the detection of SNP TSC0032586
ccgaaataaaaa

SEQ ID NO: 325526 - DNA, 12 bp, Artificial Sequence
  Oligonucleotide primer for the detection of SNP TSC0032586
ggtttttgtagt

SEQ ID NO: 325527 - DNA, 12 bp, Artificial Sequence
  Oligonucleotide primer for the detection of SNP TSC0032586
acccctacaata

SEQ ID NO: 325528 - DNA, 12 bp, Artificial Sequence
  Oligonucleotide primer for the detection of SNP TSC0032586
ttggggtgggag

SEQ ID NO: 325529 - DNA, 12 bp, Artificial Sequence
  Oligonucleotide primer for the detection of SNP TSC0032586
tcggggtgggag

SEQ ID NO: 325530 - DNA, 12 bp, Artificial Sequence
  Oligonucleotide primer for the detection of SNP TSC0032588
cacaacaaacat

SEQ ID NO: 325531 - DNA, 12 bp, Artificial Sequence
  Oligonucleotide primer for the detection of SNP TSC0032588
gtttaggtttaa

SEQ ID NO: 325532 - DNA, 12 bp, Artificial Sequence
  Oligonucleotide primer for the detection of SNP TSC0032588
tatagtaaatat

SEQ ID NO: 325533 - DNA, 12 bp, Artificial Sequence
  Oligonucleotide primer for the detection of SNP TSC0032589
ccaacaaacatt

SEQ ID NO: 325534 - DNA, 12 bp, Artificial Sequence
  Oligonucleotide primer for the detection of SNP TSC0032589
tttagtgtaagg

SEQ ID NO: 325535 - DNA, 12 bp, Artificial Sequence
  Oligonucleotide primer for the detection of SNP TSC0032591
atttaaaatcaa

SEQ ID NO: 325536 - DNA, 12 bp, Artificial Sequence
  Oligonucleotide primer for the detection of SNP TSC0032591
aggtattgttta

SEQ ID NO: 325537 - DNA, 12 bp, Artificial Sequence
  Oligonucleotide primer for the detection of SNP TSC0032593
atctcatcactt

SEQ ID NO: 325538 - DNA, 12 bp, Artificial Sequence
  Oligonucleotide primer for the detection of SNP TSC0032593
aagatgttttta

SEQ ID NO: 325539 - DNA, 12 bp, Artificial Sequence
  Oligonucleotide primer for the detection of SNP TSC0032595
aaataaatatat

SEQ ID NO: 325540 - DNA, 12 bp, Artificial Sequence
  Oligonucleotide primer for the detection of SNP TSC0032595
tagttttaaata

SEQ ID NO: 325541 - DNA, 12 bp, Artificial Sequence
  Oligonucleotide primer for the detection of SNP TSC0032597
aatcccccaacc

SEQ ID NO: 325542 - DNA, 12 bp, Artificial Sequence
  Oligonucleotide primer for the detection of SNP TSC0032597
ggttggttaggg

SEQ ID NO: 325543 - DNA, 12 bp, Artificial Sequence
  Oligonucleotide primer for the detection of SNP TSC0032597
aactaaccaaaa

SEQ ID NO: 325544 - DNA, 12 bp, Artificial Sequence
  Oligonucleotide primer for the detection of SNP TSC0032598
agggttttgttt

SEQ ID NO: 325545 - DNA, 12 bp, Artificial Sequence
  Oligonucleotide primer for the detection of SNP TSC0032598
aaaactctaccc

SEQ ID NO: 325546 - DNA, 12 bp, Artificial Sequence
  Oligonucleotide primer for the detection of SNP TSC0032598
tgggggtggatg

SEQ ID NO: 325547 - DNA, 12 bp, Artificial Sequence
  Oligonucleotide primer for the detection of SNP TSC0032599
aatcacccttct

SEQ ID NO: 325548 - DNA, 12 bp, Artificial Sequence
  Oligonucleotide primer for the detection of SNP TSC0032599
gggtttagggag

SEQ ID NO: 325549 - DNA, 12 bp, Artificial Sequence
  Oligonucleotide primer for the detection of SNP TSC0032600
tatcttcaccat

SEQ ID NO: 325550 - DNA, 12 bp, Artificial Sequence
  Oligonucleotide primer for the detection of SNP TSC0032600
tatcttcaccgt

SEQ ID NO: 325551 - DNA, 12 bp, Artificial Sequence
  Oligonucleotide primer for the detection of SNP TSC0032600
tatcttcgccat

SEQ ID NO: 325552 - DNA, 12 bp, Artificial Sequence
  Oligonucleotide primer for the detection of SNP TSC0032600
tatcttcgccgt

SEQ ID NO: 325553 - DNA, 12 bp, Artificial Sequence
  Oligonucleotide primer for the detection of SNP TSC0032600
tgttaagaagta

SEQ ID NO: 325554 - DNA, 12 bp, Artificial Sequence
  Oligonucleotide primer for the detection of SNP TSC0032600
cgttaagaagta

SEQ ID NO: 325555 - DNA, 12 bp, Artificial Sequence
  Oligonucleotide primer for the detection of SNP TSC0032600
cgccaaaaaaca

SEQ ID NO: 325556 - DNA, 12 bp, Artificial Sequence
  Oligonucleotide primer for the detection of SNP TSC0032600
tgttttcgttgt

SEQ ID NO: 325557 - DNA, 12 bp, Artificial Sequence
  Oligonucleotide primer for the detection of SNP TSC0032600
tgtttttgtcgt

SEQ ID NO: 325558 - DNA, 12 bp, Artificial Sequence
  Oligonucleotide primer for the detection of SNP TSC0032600
tgttttcgtcgt

SEQ ID NO: 325559 - DNA, 12 bp, Artificial Sequence
  Oligonucleotide primer for the detection of SNP TSC0032603
ggttaagtattt

SEQ ID NO: 325560 - DNA, 12 bp, Artificial Sequence
  Oligonucleotide primer for the detection of SNP TSC0032603
aatcaaacattt

SEQ ID NO: 325561 - DNA, 12 bp, Artificial Sequence
  Oligonucleotide primer for the detection of SNP TSC0032603
gtaagaaggtga

SEQ ID NO: 325562 - DNA, 12 bp, Artificial Sequence
  Oligonucleotide primer for the detection of SNP TSC0032607
aaatatactctt

SEQ ID NO: 325563 - DNA, 12 bp, Artificial Sequence
  Oligonucleotide primer for the detection of SNP TSC0032607
ggatgtattatt

SEQ ID NO: 325564 - DNA, 12 bp, Artificial Sequence
  Oligonucleotide primer for the detection of SNP TSC0032607
aatatattacta

SEQ ID NO: 325565 - DNA, 12 bp, Artificial Sequence
  Oligonucleotide primer for the detection of SNP TSC0032607
gaatgtgttttt

SEQ ID NO: 325566 - DNA, 12 bp, Artificial Sequence
  Oligonucleotide primer for the detection of SNP TSC0032608
gtattattgaaa

SEQ ID NO: 325567 - DNA, 12 bp, Artificial Sequence
  Oligonucleotide primer for the detection of SNP TSC0032608
tattactaaaaa

SEQ ID NO: 325568 - DNA, 12 bp, Artificial Sequence
  Oligonucleotide primer for the detection of SNP TSC0032608
ggatgaatgtgt

SEQ ID NO: 325569 - DNA, 12 bp, Artificial Sequence
  Oligonucleotide primer for the detection of SNP TSC0032608
ggatgaatgtgc

SEQ ID NO: 325570 - DNA, 12 bp, Artificial Sequence
  Oligonucleotide primer for the detection of SNP TSC0032609
tgtttatagtat

SEQ ID NO: 325571 - DNA, 12 bp, Artificial Sequence
  Oligonucleotide primer for the detection of SNP TSC0032609
cgtttatagtat

SEQ ID NO: 325572 - DNA, 12 bp, Artificial Sequence
  Oligonucleotide primer for the detection of SNP TSC0032609
cgtccacaacac

SEQ ID NO: 325573 - DNA, 12 bp, Artificial Sequence
  Oligonucleotide primer for the detection of SNP TSC0032609
gagttaataaag

SEQ ID NO: 325574 - DNA, 12 bp, Artificial Sequence
  Oligonucleotide primer for the detection of SNP TSC0032610
tcacccaaacta

SEQ ID NO: 325575 - DNA, 12 bp, Artificial Sequence
  Oligonucleotide primer for the detection of SNP TSC0032610
attattgtaata

SEQ ID NO: 325576 - DNA, 12 bp, Artificial Sequence
  Oligonucleotide primer for the detection of SNP TSC0032610
accactacaata

SEQ ID NO: 325577 - DNA, 12 bp, Artificial Sequence
  Oligonucleotide primer for the detection of SNP TSC0032611
aattcaaataat

SEQ ID NO: 325578 - DNA, 12 bp, Artificial Sequence
  Oligonucleotide primer for the detection of SNP TSC0032611
gttgaagtatga

SEQ ID NO: 325579 - DNA, 12 bp, Artificial Sequence
  Oligonucleotide primer for the detection of SNP TSC0032611
ggtttaagtgat

SEQ ID NO: 325580 - DNA, 12 bp, Artificial Sequence
  Oligonucleotide primer for the detection of SNP TSC0032615
aatctaaaaaaa

SEQ ID NO: 325581 - DNA, 12 bp, Artificial Sequence
  Oligonucleotide primer for the detection of SNP TSC0032615
tttttgggttgt

SEQ ID NO: 325582 - DNA, 12 bp, Artificial Sequence
  Oligonucleotide primer for the detection of SNP TSC0032615
tctctaaattac

SEQ ID NO: 325583 - DNA, 12 bp, Artificial Sequence
  Oligonucleotide primer for the detection of SNP TSC0032615
agtttgggaaag

SEQ ID NO: 325584 - DNA, 12 bp, Artificial Sequence
  Oligonucleotide primer for the detection of SNP TSC0032616
ttaaccactata

SEQ ID NO: 325585 - DNA, 12 bp, Artificial Sequence
  Oligonucleotide primer for the detection of SNP TSC0032616
taattaagagat

SEQ ID NO: 325586 - DNA, 12 bp, Artificial Sequence
  Oligonucleotide primer for the detection of SNP TSC0032616
caattaaaaaat

SEQ ID NO: 325587 - DNA, 12 bp, Artificial Sequence
  Oligonucleotide primer for the detection of SNP TSC0032616
ttaattattgtg

SEQ ID NO: 325588 - DNA, 12 bp, Artificial Sequence
  Oligonucleotide primer for the detection of SNP TSC0032617
ttaaccaacata

SEQ ID NO: 325589 - DNA, 12 bp, Artificial Sequence
  Oligonucleotide primer for the detection of SNP TSC0032618
ttattaaaaata

SEQ ID NO: 325590 - DNA, 12 bp, Artificial Sequence
  Oligonucleotide primer for the detection of SNP TSC0032618
ctattaaaaata

SEQ ID NO: 325591 - DNA, 12 bp, Artificial Sequence
  Oligonucleotide primer for the detection of SNP TSC0032619
tcccaaacaatt

SEQ ID NO: 325592 - DNA, 12 bp, Artificial Sequence
  Oligonucleotide primer for the detection of SNP TSC0032619
tcccaaacgatt

SEQ ID NO: 325593 - DNA, 12 bp, Artificial Sequence
  Oligonucleotide primer for the detection of SNP TSC0032620
ttaattgtttgt

SEQ ID NO: 325594 - DNA, 12 bp, Artificial Sequence
  Oligonucleotide primer for the detection of SNP TSC0032620
ttaattgtttgc

SEQ ID NO: 325595 - DNA, 12 bp, Artificial Sequence
  Oligonucleotide primer for the detection of SNP TSC0032620
attaactactta

SEQ ID NO: 325596 - DNA, 12 bp, Artificial Sequence
  Oligonucleotide primer for the detection of SNP TSC0032620
ttagattggtta

SEQ ID NO: 325597 - DNA, 12 bp, Artificial Sequence
  Oligonucleotide primer for the detection of SNP TSC0032622
ttaccacaaccc

SEQ ID NO: 325598 - DNA, 12 bp, Artificial Sequence
  Oligonucleotide primer for the detection of SNP TSC0032622
gtttggattttg

SEQ ID NO: 325599 - DNA, 12 bp, Artificial Sequence
  Oligonucleotide primer for the detection of SNP TSC0032622
gtttggatttcg

SEQ ID NO: 325600 - DNA, 12 bp, Artificial Sequence
  Oligonucleotide primer for the detection of SNP TSC0032622
acctaaatccca

SEQ ID NO: 325601 - DNA, 12 bp, Artificial Sequence
  Oligonucleotide primer for the detection of SNP TSC0032622
acctaaatcccg

SEQ ID NO: 325602 - DNA, 12 bp, Artificial Sequence
  Oligonucleotide primer for the detection of SNP TSC0032623
tttagaggtaag

SEQ ID NO: 325603 - DNA, 12 bp, Artificial Sequence
  Oligonucleotide primer for the detection of SNP TSC0032624
agtggattggta

SEQ ID NO: 325604 - DNA, 12 bp, Artificial Sequence
  Oligonucleotide primer for the detection of SNP TSC0032625
tcttacaactac

SEQ ID NO: 325605 - DNA, 12 bp, Artificial Sequence
  Oligonucleotide primer for the detection of SNP TSC0032625
ataaaggtaatg

SEQ ID NO: 325606 - DNA, 12 bp, Artificial Sequence
  Oligonucleotide primer for the detection of SNP TSC0032625
ttttatagttat

SEQ ID NO: 325607 - DNA, 12 bp, Artificial Sequence
  Oligonucleotide primer for the detection of SNP TSC0032626
aaaaaataccaa

SEQ ID NO: 325608 - DNA, 12 bp, Artificial Sequence
  Oligonucleotide primer for the detection of SNP TSC0032626
aaaaaataccga

SEQ ID NO: 325609 - DNA, 12 bp, Artificial Sequence
  Oligonucleotide primer for the detection of SNP TSC0032626
tgtttgttagtt

SEQ ID NO: 325610 - DNA, 12 bp, Artificial Sequence
  Oligonucleotide primer for the detection of SNP TSC0032626
tatctaccaacc

SEQ ID NO: 325611 - DNA, 12 bp, Artificial Sequence
  Oligonucleotide primer for the detection of SNP TSC0032626
agaggatgttgg

SEQ ID NO: 325612 - DNA, 12 bp, Artificial Sequence
  Oligonucleotide primer for the detection of SNP TSC0032626
agaggatgtcgg

SEQ ID NO: 325613 - DNA, 12 bp, Artificial Sequence
  Oligonucleotide primer for the detection of SNP TSC0032631
aactaattaaaa

SEQ ID NO: 325614 - DNA, 12 bp, Artificial Sequence
  Oligonucleotide primer for the detection of SNP TSC0032631
ataggagtagaa

SEQ ID NO: 325615 - DNA, 12 bp, Artificial Sequence
  Oligonucleotide primer for the detection of SNP TSC0032631
ttgattgagatt

SEQ ID NO: 325616 - DNA, 12 bp, Artificial Sequence
  Oligonucleotide primer for the detection of SNP TSC0032632
ttatttcttaac

SEQ ID NO: 325617 - DNA, 12 bp, Artificial Sequence
  Oligonucleotide primer for the detection of SNP TSC0032633
agttaggtgtag

SEQ ID NO: 325618 - DNA, 12 bp, Artificial Sequence
  Oligonucleotide primer for the detection of SNP TSC0032633
agttaggcgtag

SEQ ID NO: 325619 - DNA, 12 bp, Artificial Sequence
  Oligonucleotide primer for the detection of SNP TSC0032633
tagatatgagtt

SEQ ID NO: 325620 - DNA, 12 bp, Artificial Sequence
  Oligonucleotide primer for the detection of SNP TSC0032634
tataatcccaac

SEQ ID NO: 325621 - DNA, 12 bp, Artificial Sequence
  Oligonucleotide primer for the detection of SNP TSC0032636
aaaaattatctt

SEQ ID NO: 325622 - DNA, 12 bp, Artificial Sequence
  Oligonucleotide primer for the detection of SNP TSC0032636
gggattggtttt

SEQ ID NO: 325623 - DNA, 12 bp, Artificial Sequence
  Oligonucleotide primer for the detection of SNP TSC0032636
gggatcggtttt

SEQ ID NO: 325624 - DNA, 12 bp, Artificial Sequence
  Oligonucleotide primer for the detection of SNP TSC0032636
aaaccaatttta

SEQ ID NO: 325625 - DNA, 12 bp, Artificial Sequence
  Oligonucleotide primer for the detection of SNP TSC0032636
aaaccgatttta

SEQ ID NO: 325626 - DNA, 12 bp, Artificial Sequence
  Oligonucleotide primer for the detection of SNP TSC0032636
aaattgtttttt

SEQ ID NO: 325627 - DNA, 12 bp, Artificial Sequence
  Oligonucleotide primer for the detection of SNP TSC0032637
ccccctacttct

SEQ ID NO: 325628 - DNA, 12 bp, Artificial Sequence
  Oligonucleotide primer for the detection of SNP TSC0032637
atgtgataggga

SEQ ID NO: 325629 - DNA, 12 bp, Artificial Sequence
  Oligonucleotide primer for the detection of SNP TSC0032638
atctcacaacct

SEQ ID NO: 325630 - DNA, 12 bp, Artificial Sequence
  Oligonucleotide primer for the detection of SNP TSC0032638
atctcacgacct

SEQ ID NO: 325631 - DNA, 12 bp, Artificial Sequence
  Oligonukleotid-Primer
atctcgcaacct

SEQ ID NO: 325632 - DNA, 12 bp, Artificial Sequence
  Oligonucleotide primer for the detection of SNP TSC0032638
atctcgcgacct

SEQ ID NO: 325633 - DNA, 12 bp, Artificial Sequence
  Oligonucleotide primer for the detection of SNP TSC0032638
agagggagttag

SEQ ID NO: 325634 - DNA, 12 bp, Artificial Sequence
  Oligonucleotide primer for the detection of SNP TSC0032639
tgtggttttttg

SEQ ID NO: 325635 - DNA, 12 bp, Artificial Sequence
  Oligonucleotide primer for the detection of SNP TSC0032639
cgtggttttttg

SEQ ID NO: 325636 - DNA, 12 bp, Artificial Sequence
  Oligonucleotide primer for the detection of SNP TSC0032639
tgcggttttttg

SEQ ID NO: 325637 - DNA, 12 bp, Artificial Sequence
  Oligonucleotide primer for the detection of SNP TSC0032639
cgcggttttttg

SEQ ID NO: 325638 - DNA, 12 bp, Artificial Sequence
  Oligonucleotide primer for the detection of SNP TSC0032639
cacaacctccta

SEQ ID NO: 325639 - DNA, 12 bp, Artificial Sequence
  Oligonucleotide primer for the detection of SNP TSC0032639
cacgacctccta

SEQ ID NO: 325640 - DNA, 12 bp, Artificial Sequence
  Oligonucleotide primer for the detection of SNP TSC0032639
cgcaacctccta

SEQ ID NO: 325641 - DNA, 12 bp, Artificial Sequence
  Oligonucleotide primer for the detection of SNP TSC0032639
cgcgacctccta

SEQ ID NO: 325642 - DNA, 12 bp, Artificial Sequence
  Oligonucleotide primer for the detection of SNP TSC0032639
gttagagaggga

SEQ ID NO: 325643 - DNA, 12 bp, Artificial Sequence
  Oligonucleotide primer for the detection of SNP TSC0032640
agggattttttt

SEQ ID NO: 325644 - DNA, 12 bp, Artificial Sequence
  Oligonucleotide primer for the detection of SNP TSC0032640
aaaaaaccctcc

SEQ ID NO: 325645 - DNA, 12 bp, Artificial Sequence
  Oligonucleotide primer for the detection of SNP TSC0032640
ttaggttgtgtt

SEQ ID NO: 325646 - DNA, 12 bp, Artificial Sequence
  Oligonucleotide primer for the detection of SNP TSC0032642
acatacctataa

SEQ ID NO: 325647 - DNA, 12 bp, Artificial Sequence
  Oligonucleotide primer for the detection of SNP TSC0032642
gtatatgtttgt

SEQ ID NO: 325648 - DNA, 12 bp, Artificial Sequence
  Oligonucleotide primer for the detection of SNP TSC0032646
ggggtggggggg

SEQ ID NO: 325649 - DNA, 12 bp, Artificial Sequence
  Oligonucleotide primer for the detection of SNP TSC0032646
ggggcggggggg

SEQ ID NO: 325650 - DNA, 12 bp, Artificial Sequence
  Oligonucleotide primer for the detection of SNP TSC0032647
aatgatgagttg

SEQ ID NO: 325651 - DNA, 12 bp, Artificial Sequence
  Oligonucleotide primer for the detection of SNP TSC0032648
aaacaccaccta

SEQ ID NO: 325652 - DNA, 12 bp, Artificial Sequence
  Oligonucleotide primer for the detection of SNP TSC0032648
atattgataaag

SEQ ID NO: 325653 - DNA, 12 bp, Artificial Sequence
  Oligonucleotide primer for the detection of SNP TSC0032649
ctcccaaatcac

SEQ ID NO: 325654 - DNA, 12 bp, Artificial Sequence
  Oligonucleotide primer for the detection of SNP TSC0032649
ctcccaaatcgc

SEQ ID NO: 325655 - DNA, 12 bp, Artificial Sequence
  Oligonucleotide primer for the detection of SNP TSC0032649
ctcccgaatcac

SEQ ID NO: 325656 - DNA, 12 bp, Artificial Sequence
  Oligonucleotide primer for the detection of SNP TSC0032649
ctcccgaatcgc

SEQ ID NO: 325657 - DNA, 12 bp, Artificial Sequence
  Oligonucleotide primer for the detection of SNP TSC0032649
tttgtggtgagg

SEQ ID NO: 325658 - DNA, 12 bp, Artificial Sequence
  Oligonucleotide primer for the detection of SNP TSC0032649
tttgcggtgagg

SEQ ID NO: 325659 - DNA, 12 bp, Artificial Sequence
  Oligonucleotide primer for the detection of SNP TSC0032649
tttgtggcgagg

SEQ ID NO: 325660 - DNA, 12 bp, Artificial Sequence
  Oligonucleotide primer for the detection of SNP TSC0032649
tttgcggcgagg

SEQ ID NO: 325661 - DNA, 12 bp, Artificial Sequence
  Oligonucleotide primer for the detection of SNP TSC0032649
cctacaacaaaa

SEQ ID NO: 325662 - DNA, 12 bp, Artificial Sequence
  Oligonucleotide primer for the detection of SNP TSC0032649
cctacaacgaaa

SEQ ID NO: 325663 - DNA, 12 bp, Artificial Sequence
  Oligonucleotide primer for the detection of SNP TSC0032649
cctacgacaaaa

SEQ ID NO: 325664 - DNA, 12 bp, Artificial Sequence
  Oligonucleotide primer for the detection of SNP TSC0032649
cctacgacgaaa

SEQ ID NO: 325665 - DNA, 12 bp, Artificial Sequence
  Oligonucleotide primer for the detection of SNP TSC0032649
ttttcgggttgt

SEQ ID NO: 325666 - DNA, 12 bp, Artificial Sequence
  Oligonucleotide primer for the detection of SNP TSC0032649
tttttgggtcgt

SEQ ID NO: 325667 - DNA, 12 bp, Artificial Sequence
  Oligonucleotide primer for the detection of SNP TSC0032649
tttttgggttgc

SEQ ID NO: 325668 - DNA, 12 bp, Artificial Sequence
  Oligonucleotide primer for the detection of SNP TSC0032649
ttttcgggtcgt

SEQ ID NO: 325669 - DNA, 12 bp, Artificial Sequence
  Oligonucleotide primer for the detection of SNP TSC0032649
ttttcgggttgc

SEQ ID NO: 325670 - DNA, 12 bp, Artificial Sequence
  Oligonucleotide primer for the detection of SNP TSC0032649
tttttgggtcgc

SEQ ID NO: 325671 - DNA, 12 bp, Artificial Sequence
  Oligonucleotide primer for the detection of SNP TSC0032649
ttttcgggtcgc

SEQ ID NO: 325672 - DNA, 12 bp, Artificial Sequence
  Oligonucleotide primer for the detection of SNP TSC0032652
taatgaagatta

SEQ ID NO: 325673 - DNA, 12 bp, Artificial Sequence
  Oligonucleotide primer for the detection of SNP TSC0032653
attaaaaactat

SEQ ID NO: 325674 - DNA, 12 bp, Artificial Sequence
  Oligonucleotide primer for the detection of SNP TSC0032653
gattgtttgtaa

SEQ ID NO: 325675 - DNA, 12 bp, Artificial Sequence
  Oligonucleotide primer for the detection of SNP TSC0032653
gattgttcgtaa

SEQ ID NO: 325676 - DNA, 12 bp, Artificial Sequence
  Oligonucleotide primer for the detection of SNP TSC0032653
aactatccataa

SEQ ID NO: 325677 - DNA, 12 bp, Artificial Sequence
  Oligonucleotide primer for the detection of SNP TSC0032653
aactatccgtaa

SEQ ID NO: 325678 - DNA, 12 bp, Artificial Sequence
  Oligonucleotide primer for the detection of SNP TSC0032653
attgaagattat

SEQ ID NO: 325679 - DNA, 12 bp, Artificial Sequence
  Oligonucleotide primer for the detection of SNP TSC0032654
accccacaatac

SEQ ID NO: 325680 - DNA, 12 bp, Artificial Sequence
  Oligonucleotide primer for the detection of SNP TSC0032654
ttggttttgata

SEQ ID NO: 325681 - DNA, 12 bp, Artificial Sequence
  Oligonucleotide primer for the detection of SNP TSC0032655
tgataagagtgg

SEQ ID NO: 325682 - DNA, 12 bp, Artificial Sequence
  Oligonucleotide primer for the detection of SNP TSC0032657
atacattttttt

SEQ ID NO: 325683 - DNA, 12 bp, Artificial Sequence
  Oligonucleotide primer for the detection of SNP TSC0032657
aaaggttttttt

SEQ ID NO: 325684 - DNA, 12 bp, Artificial Sequence
  Oligonucleotide primer for the detection of SNP TSC0032658
aatataaataaa

SEQ ID NO: 325685 - DNA, 12 bp, Artificial Sequence
  Oligonucleotide primer for the detection of SNP TSC0032658
aatataaacaaa

SEQ ID NO: 325686 - DNA, 12 bp, Artificial Sequence
  Oligonucleotide primer for the detection of SNP TSC0032658
tttagataaaat

SEQ ID NO: 325687 - DNA, 12 bp, Artificial Sequence
  Oligonucleotide primer for the detection of SNP TSC0032659
aaagatttattt

SEQ ID NO: 325688 - DNA, 12 bp, Artificial Sequence
  Oligonucleotide primer for the detection of SNP TSC0032659
aaagatttattc

SEQ ID NO: 325689 - DNA, 12 bp, Artificial Sequence
  Oligonucleotide primer for the detection of SNP TSC0032659
aaaaatctaccc

SEQ ID NO: 325690 - DNA, 12 bp, Artificial Sequence
  Oligonucleotide primer for the detection of SNP TSC0032659
tgggaggttaag

SEQ ID NO: 325691 - DNA, 12 bp, Artificial Sequence
  Oligonucleotide primer for the detection of SNP TSC0032660
acataaaatcta

SEQ ID NO: 325692 - DNA, 12 bp, Artificial Sequence
  Oligonucleotide primer for the detection of SNP TSC0032660
atttggatgttt

SEQ ID NO: 325693 - DNA, 12 bp, Artificial Sequence
  Oligonucleotide primer for the detection of SNP TSC0032660
tacctaaatatc

SEQ ID NO: 325694 - DNA, 12 bp, Artificial Sequence
  Oligonucleotide primer for the detection of SNP TSC0032660
gtatggggtttg

SEQ ID NO: 325695 - DNA, 12 bp, Artificial Sequence
  Oligonucleotide primer for the detection of SNP TSC0032661
tggggttgggtg

SEQ ID NO: 325696 - DNA, 12 bp, Artificial Sequence
  Oligonucleotide primer for the detection of SNP TSC0032663
aatctataattt

SEQ ID NO: 325697 - DNA, 12 bp, Artificial Sequence
  Oligonucleotide primer for the detection of SNP TSC0032663
gataattatttg

SEQ ID NO: 325698 - DNA, 12 bp, Artificial Sequence
  Oligonucleotide primer for the detection of SNP TSC0032666
aaaaaaaaccgc

SEQ ID NO: 325699 - DNA, 12 bp, Artificial Sequence
  Oligonucleotide primer for the detection of SNP TSC0032666
tttttttttgtc

SEQ ID NO: 325700 - DNA, 12 bp, Artificial Sequence
  Oligonukleotid-Primer
accccttcccta

SEQ ID NO: 325701 - DNA, 12 bp, Artificial Sequence
  Oligonucleotide primer for the detection of SNP TSC0032666
aggagaggttgt

SEQ ID NO: 325702 - DNA, 12 bp, Artificial Sequence
  Oligonucleotide primer for the detection of SNP TSC0032666
aggagaggtcgt

SEQ ID NO: 325703 - DNA, 12 bp, Artificial Sequence
  Oligonucleotide primer for the detection of SNP TSC0032668
aactttttttta

SEQ ID NO: 325704 - DNA, 12 bp, Artificial Sequence
  Oligonucleotide primer for the detection of SNP TSC0032668
agtgattttggg

SEQ ID NO: 325705 - DNA, 12 bp, Artificial Sequence
  Oligonucleotide primer for the detection of SNP TSC0032668
atttttttttgt

SEQ ID NO: 325706 - DNA, 12 bp, Artificial Sequence
  Oligonucleotide primer for the detection of SNP TSC0032669
tctaacttatat

SEQ ID NO: 325707 - DNA, 12 bp, Artificial Sequence
  Oligonucleotide primer for the detection of SNP TSC0032669
taggattgtaag

SEQ ID NO: 325708 - DNA, 12 bp, Artificial Sequence
  Oligonucleotide primer for the detection of SNP TSC0032670
cctaaatttatt

SEQ ID NO: 325709 - DNA, 12 bp, Artificial Sequence
  Oligonucleotide primer for the detection of SNP TSC0032670
gtgtgatgagag

SEQ ID NO: 325710 - DNA, 12 bp, Artificial Sequence
  Oligonucleotide primer for the detection of SNP TSC0032671
cctcaaataatt

SEQ ID NO: 325711 - DNA, 12 bp, Artificial Sequence
  Oligonucleotide primer for the detection of SNP TSC0032671
ggttgaggtggg

SEQ ID NO: 325712 - DNA, 12 bp, Artificial Sequence
  Oligonucleotide primer for the detection of SNP TSC0032673
gaagtgagttag

SEQ ID NO: 325713 - DNA, 12 bp, Artificial Sequence
  Oligonucleotide primer for the detection of SNP TSC0032674
aaaccaacttac

SEQ ID NO: 325714 - DNA, 12 bp, Artificial Sequence
  Oligonucleotide primer for the detection of SNP TSC0032674
tggtgggtaata

SEQ ID NO: 325715 - DNA, 12 bp, Artificial Sequence
  Oligonucleotide primer for the detection of SNP TSC0032674
cggtgggtaata

SEQ ID NO: 325716 - DNA, 12 bp, Artificial Sequence
  Oligonucleotide primer for the detection of SNP TSC0032675
tacatttccaac

SEQ ID NO: 325717 - DNA, 12 bp, Artificial Sequence
  Oligonucleotide primer for the detection of SNP TSC0032675
aattttagaaag

SEQ ID NO: 325718 - DNA, 12 bp, Artificial Sequence
  Oligonucleotide primer for the detection of SNP TSC0032676
ccctaaaaccta

SEQ ID NO: 325719 - DNA, 12 bp, Artificial Sequence
  Oligonucleotide primer for the detection of SNP TSC0032676
tgtaagtataat

SEQ ID NO: 325720 - DNA, 12 bp, Artificial Sequence
  Oligonucleotide primer for the detection of SNP TSC0032676
tataaatataac

SEQ ID NO: 325721 - DNA, 12 bp, Artificial Sequence
  Oligonucleotide primer for the detection of SNP TSC0032676
ttttgaaatttg

SEQ ID NO: 325722 - DNA, 12 bp, Artificial Sequence
  Oligonucleotide primer for the detection of SNP TSC0032677
cccaatctcctc

SEQ ID NO: 325723 - DNA, 12 bp, Artificial Sequence
  Oligonucleotide primer for the detection of SNP TSC0032677
cccgatctcctc

SEQ ID NO: 325724 - DNA, 12 bp, Artificial Sequence
  Oligonucleotide primer for the detection of SNP TSC0032677
aagtaagagtag

SEQ ID NO: 325725 - DNA, 12 bp, Artificial Sequence
  Oligonucleotide primer for the detection of SNP TSC0032680
atctatctcaat

SEQ ID NO: 325726 - DNA, 12 bp, Artificial Sequence
  Oligonucleotide primer for the detection of SNP TSC0032680
ggataagggtgg

SEQ ID NO: 325727 - DNA, 12 bp, Artificial Sequence
  Oligonucleotide primer for the detection of SNP TSC0032680
atttattttaat

SEQ ID NO: 325728 - DNA, 12 bp, Artificial Sequence
  Oligonucleotide primer for the detection of SNP TSC0032681
tcacatacctca

SEQ ID NO: 325729 - DNA, 12 bp, Artificial Sequence
  Oligonucleotide primer for the detection of SNP TSC0032681
tcacatacctcg

SEQ ID NO: 325730 - DNA, 12 bp, Artificial Sequence
  Oligonucleotide primer for the detection of SNP TSC0032681
tgagtagtagat

SEQ ID NO: 325731 - DNA, 12 bp, Artificial Sequence
  Oligonucleotide primer for the detection of SNP TSC0032681
ttatatattttg

SEQ ID NO: 325732 - DNA, 12 bp, Artificial Sequence
  Oligonucleotide primer for the detection of SNP TSC0032681
ttatatatttcg

SEQ ID NO: 325733 - DNA, 12 bp, Artificial Sequence
  Oligonucleotide primer for the detection of SNP TSC0032682
ttaataaaatat

SEQ ID NO: 325734 - DNA, 12 bp, Artificial Sequence
  Oligonucleotide primer for the detection of SNP TSC0032682
tatgtaggatta

SEQ ID NO: 325735 - DNA, 12 bp, Artificial Sequence
  Oligonucleotide primer for the detection of SNP TSC0032688
cctccccccccc

SEQ ID NO: 325736 - DNA, 12 bp, Artificial Sequence
  Oligonucleotide primer for the detection of SNP TSC0032690
aattatatcaat

SEQ ID NO: 325737 - DNA, 12 bp, Artificial Sequence
  Oligonucleotide primer for the detection of SNP TSC0032690
ctttaaaaataa

SEQ ID NO: 325738 - DNA, 12 bp, Artificial Sequence
  Oligonucleotide primer for the detection of SNP TSC0032690
agttatgttaat

SEQ ID NO: 325739 - DNA, 12 bp, Artificial Sequence
  Oligonucleotide primer for the detection of SNP TSC0032691
tccaatacacat

SEQ ID NO: 325740 - DNA, 12 bp, Artificial Sequence
  Oligonucleotide primer for the detection of SNP TSC0032692
gggtaaagttat

SEQ ID NO: 325741 - DNA, 12 bp, Artificial Sequence
  Oligonucleotide primer for the detection of SNP TSC0032692
ggaggataaagg

SEQ ID NO: 325742 - DNA, 12 bp, Artificial Sequence
  Oligonucleotide primer for the detection of SNP TSC0032693
ccttaactctct

SEQ ID NO: 325743 - DNA, 12 bp, Artificial Sequence
  Oligonucleotide primer for the detection of SNP TSC0032693
gagtatgttggg

SEQ ID NO: 325744 - DNA, 12 bp, Artificial Sequence
  Oligonucleotide primer for the detection of SNP TSC0032693
gagtatgtcggg

SEQ ID NO: 325745 - DNA, 12 bp, Artificial Sequence
  Oligonucleotide primer for the detection of SNP TSC0032694
ctaaaacccact

SEQ ID NO: 325746 - DNA, 12 bp, Artificial Sequence
  Oligonucleotide primer for the detection of SNP TSC0032694
aaatatagtttg

SEQ ID NO: 325747 - DNA, 12 bp, Artificial Sequence
  Oligonucleotide primer for the detection of SNP TSC0032694
aaatacaatcta

SEQ ID NO: 325748 - DNA, 12 bp, Artificial Sequence
  Oligonucleotide primer for the detection of SNP TSC0032694
ttgaggtttatt

SEQ ID NO: 325749 - DNA, 12 bp, Artificial Sequence
  Oligonucleotide primer for the detection of SNP TSC0032695
attaaataatat

SEQ ID NO: 325750 - DNA, 12 bp, Artificial Sequence
  Oligonucleotide primer for the detection of SNP TSC0032695
gtttgtattatt

SEQ ID NO: 325751 - DNA, 12 bp, Artificial Sequence
  Oligonucleotide primer for the detection of SNP TSC0032695
aaatctatatca

SEQ ID NO: 325752 - DNA, 12 bp, Artificial Sequence
  Oligonucleotide primer for the detection of SNP TSC0032695
gttaagtaatat

SEQ ID NO: 325753 - DNA, 12 bp, Artificial Sequence
  Oligonucleotide primer for the detection of SNP TSC0032696
acaaacttcctc

SEQ ID NO: 325754 - DNA, 12 bp, Artificial Sequence
  Oligonucleotide primer for the detection of SNP TSC0032696
gaagtgagaggg

SEQ ID NO: 325755 - DNA, 12 bp, Artificial Sequence
  Oligonucleotide primer for the detection of SNP TSC0032697
ccctctacctaa

SEQ ID NO: 325756 - DNA, 12 bp, Artificial Sequence
  Oligonucleotide primer for the detection of SNP TSC0032697
tttgtacggttt

SEQ ID NO: 325757 - DNA, 12 bp, Artificial Sequence
  Oligonucleotide primer for the detection of SNP TSC0032697
aacctacacaac

SEQ ID NO: 325758 - DNA, 12 bp, Artificial Sequence
  Oligonucleotide primer for the detection of SNP TSC0032697
aacctacacgac

SEQ ID NO: 325759 - DNA, 12 bp, Artificial Sequence
  Oligonucleotide primer for the detection of SNP TSC0032698
ttacaaattatc

SEQ ID NO: 325760 - DNA, 12 bp, Artificial Sequence
  Oligonucleotide primer for the detection of SNP TSC0032698
agggttaaataa

SEQ ID NO: 325761 - DNA, 12 bp, Artificial Sequence
  Oligonucleotide primer for the detection of SNP TSC0032701
aaaactatcaat

SEQ ID NO: 325762 - DNA, 12 bp, Artificial Sequence
  Oligonucleotide primer for the detection of SNP TSC0032705
ataacaaaatac

SEQ ID NO: 325763 - DNA, 12 bp, Artificial Sequence
  Oligonucleotide primer for the detection of SNP TSC0032705
ataacgaaatac

SEQ ID NO: 325764 - DNA, 12 bp, Artificial Sequence
  Oligonucleotide primer for the detection of SNP TSC0032705
atgtgaaaatag

SEQ ID NO: 325765 - DNA, 12 bp, Artificial Sequence
  Oligonucleotide primer for the detection of SNP TSC0032705
acgtgaaaatag

SEQ ID NO: 325766 - DNA, 12 bp, Artificial Sequence
  Oligonucleotide primer for the detection of SNP TSC0032705
acataaaaacaa

SEQ ID NO: 325767 - DNA, 12 bp, Artificial Sequence
  Oligonucleotide primer for the detection of SNP TSC0032705
acgtaaaaacaa

SEQ ID NO: 325768 - DNA, 12 bp, Artificial Sequence
  Oligonucleotide primer for the detection of SNP TSC0032705
atggtgggatat

SEQ ID NO: 325769 - DNA, 12 bp, Artificial Sequence
  Oligonucleotide primer for the detection of SNP TSC0032705
atggcgggatat

SEQ ID NO: 325770 - DNA, 12 bp, Artificial Sequence
  Oligonucleotide primer for the detection of SNP TSC0032707
aaatcactaatt

SEQ ID NO: 325771 - DNA, 12 bp, Artificial Sequence
  Oligonucleotide primer for the detection of SNP TSC0032707
tggtttttttta

SEQ ID NO: 325772 - DNA, 12 bp, Artificial Sequence
  Oligonucleotide primer for the detection of SNP TSC0032708
atttttttgggt

SEQ ID NO: 325773 - DNA, 12 bp, Artificial Sequence
  Oligonucleotide primer for the detection of SNP TSC0032708
attcccctaaac

SEQ ID NO: 325774 - DNA, 12 bp, Artificial Sequence
  Oligonucleotide primer for the detection of SNP TSC0032708
agttgtgaaagg

SEQ ID NO: 325775 - DNA, 12 bp, Artificial Sequence
  Oligonucleotide primer for the detection of SNP TSC0032709
tactataccaaa

SEQ ID NO: 325776 - DNA, 12 bp, Artificial Sequence
  Oligonucleotide primer for the detection of SNP TSC0032709
acctaaaaacct

SEQ ID NO: 325777 - DNA, 12 bp, Artificial Sequence
  Oligonucleotide primer for the detection of SNP TSC0032709
gcctaaaaacct

SEQ ID NO: 325778 - DNA, 12 bp, Artificial Sequence
  Oligonucleotide primer for the detection of SNP TSC0032709
tgttgtgttaag

SEQ ID NO: 325779 - DNA, 12 bp, Artificial Sequence
  Oligonucleotide primer for the detection of SNP TSC0032710
atttctcatcaa

SEQ ID NO: 325780 - DNA, 12 bp, Artificial Sequence
  Oligonucleotide primer for the detection of SNP TSC0032710
cttctttcttct

SEQ ID NO: 325781 - DNA, 12 bp, Artificial Sequence
  Oligonucleotide primer for the detection of SNP TSC0032711
tccctatacaaa

SEQ ID NO: 325782 - DNA, 12 bp, Artificial Sequence
  Oligonucleotide primer for the detection of SNP TSC0032711
attttgggtggt

SEQ ID NO: 325783 - DNA, 12 bp, Artificial Sequence
  Oligonucleotide primer for the detection of SNP TSC0032713
tttacaacaacc

SEQ ID NO: 325784 - DNA, 12 bp, Artificial Sequence
  Oligonucleotide primer for the detection of SNP TSC0032713
tttacaacgacc

SEQ ID NO: 325785 - DNA, 12 bp, Artificial Sequence
  Oligonucleotide primer for the detection of SNP TSC0032713
tatgtttgattg

SEQ ID NO: 325786 - DNA, 12 bp, Artificial Sequence
  Oligonucleotide primer for the detection of SNP TSC0032713
tacgtttgattg

SEQ ID NO: 325787 - DNA, 12 bp, Artificial Sequence
  Oligonucleotide primer for the detection of SNP TSC0032713
tatgttcgattg

SEQ ID NO: 325788 - DNA, 12 bp, Artificial Sequence
  Oligonucleotide primer for the detection of SNP TSC0032713
tacgttcgattg

SEQ ID NO: 325789 - DNA, 12 bp, Artificial Sequence
  Oligonucleotide primer for the detection of SNP TSC0032714
taaaccaccgcg

SEQ ID NO: 325790 - DNA, 12 bp, Artificial Sequence
  Oligonucleotide primer for the detection of SNP TSC0032714
agtagaattggt

SEQ ID NO: 325791 - DNA, 12 bp, Artificial Sequence
  Oligonucleotide primer for the detection of SNP TSC0032714
agtagaatcggt

SEQ ID NO: 325792 - DNA, 12 bp, Artificial Sequence
  Oligonucleotide primer for the detection of SNP TSC0032714
aacaaaatcaac

SEQ ID NO: 325793 - DNA, 12 bp, Artificial Sequence
  Oligonucleotide primer for the detection of SNP TSC0032714
aacaaaatcgac

SEQ ID NO: 325794 - DNA, 12 bp, Artificial Sequence
  Oligonucleotide primer for the detection of SNP TSC0032714
tgagttatcgtg

SEQ ID NO: 325795 - DNA, 12 bp, Artificial Sequence
  Oligonucleotide primer for the detection of SNP TSC0032714
tgagttatcgcg

SEQ ID NO: 325796 - DNA, 12 bp, Artificial Sequence
  Oligonucleotide primer for the detection of SNP TSC0032715
gtagaattggtt

SEQ ID NO: 325797 - DNA, 12 bp, Artificial Sequence
  Oligonukleotid-Primer
gtagaatcggtt

SEQ ID NO: 325798 - DNA, 12 bp, Artificial Sequence
  Oligonucleotide primer for the detection of SNP TSC0032715
gtagaattggtc

SEQ ID NO: 325799 - DNA, 12 bp, Artificial Sequence
  Oligonucleotide primer for the detection of SNP TSC0032715
gtagaatcggtc

SEQ ID NO: 325800 - DNA, 12 bp, Artificial Sequence
  Oligonucleotide primer for the detection of SNP TSC0032715
acaaaatcaacc

SEQ ID NO: 325801 - DNA, 12 bp, Artificial Sequence
  Oligonucleotide primer for the detection of SNP TSC0032715
acaaaatcgacc

SEQ ID NO: 325802 - DNA, 12 bp, Artificial Sequence
  Oligonucleotide primer for the detection of SNP TSC0032716
gttttaattttt

SEQ ID NO: 325803 - DNA, 12 bp, Artificial Sequence
  Oligonucleotide primer for the detection of SNP TSC0032719
ttaaataataca

SEQ ID NO: 325804 - DNA, 12 bp, Artificial Sequence
  Oligonucleotide primer for the detection of SNP TSC0032719
tatataaataat

SEQ ID NO: 325805 - DNA, 12 bp, Artificial Sequence
  Oligonucleotide primer for the detection of SNP TSC0032719
tacacaaataat

SEQ ID NO: 325806 - DNA, 12 bp, Artificial Sequence
  Oligonucleotide primer for the detection of SNP TSC0032720
catacttcacac

SEQ ID NO: 325807 - DNA, 12 bp, Artificial Sequence
  Oligonucleotide primer for the detection of SNP TSC0032720
cgtacttcacac

SEQ ID NO: 325808 - DNA, 12 bp, Artificial Sequence
  Oligonucleotide primer for the detection of SNP TSC0032722
ccacaataacac

SEQ ID NO: 325809 - DNA, 12 bp, Artificial Sequence
  Oligonucleotide primer for the detection of SNP TSC0032722
tgttgggaatag

SEQ ID NO: 325810 - DNA, 12 bp, Artificial Sequence
  Oligonucleotide primer for the detection of SNP TSC0032726
acttaatactat

SEQ ID NO: 325811 - DNA, 12 bp, Artificial Sequence
  Oligonucleotide primer for the detection of SNP TSC0032726
tggtatttagtg

SEQ ID NO: 325812 - DNA, 12 bp, Artificial Sequence
  Oligonucleotide primer for the detection of SNP TSC0032726
cggtatttagtg

SEQ ID NO: 325813 - DNA, 12 bp, Artificial Sequence
  Oligonucleotide primer for the detection of SNP TSC0032727
cgacatctactc

SEQ ID NO: 325814 - DNA, 12 bp, Artificial Sequence
  Oligonucleotide primer for the detection of SNP TSC0032727
ttggaagggaaa

SEQ ID NO: 325815 - DNA, 12 bp, Artificial Sequence
  Oligonucleotide primer for the detection of SNP TSC0032730
gatgtttgtaat

SEQ ID NO: 325816 - DNA, 12 bp, Artificial Sequence
  Oligonucleotide primer for the detection of SNP TSC0032734
ccaccaaaatca

SEQ ID NO: 325817 - DNA, 12 bp, Artificial Sequence
  Oligonucleotide primer for the detection of SNP TSC0032734
tgtttagttaat

SEQ ID NO: 325818 - DNA, 12 bp, Artificial Sequence
  Oligonucleotide primer for the detection of SNP TSC0032734
tatccaaccaac

SEQ ID NO: 325819 - DNA, 12 bp, Artificial Sequence
  Oligonucleotide primer for the detection of SNP TSC0032734
ttattaaaatta

SEQ ID NO: 325820 - DNA, 12 bp, Artificial Sequence
  Oligonucleotide primer for the detection of SNP TSC0032735
ttaaaaataatt

SEQ ID NO: 325821 - DNA, 12 bp, Artificial Sequence
  Oligonucleotide primer for the detection of SNP TSC0032735
gaatttttatta

SEQ ID NO: 325822 - DNA, 12 bp, Artificial Sequence
  Oligonucleotide primer for the detection of SNP TSC0032735
aaattcttatca

SEQ ID NO: 325823 - DNA, 12 bp, Artificial Sequence
  Oligonucleotide primer for the detection of SNP TSC0032735
ttaagaataatt

SEQ ID NO: 325824 - DNA, 12 bp, Artificial Sequence
  Oligonucleotide primer for the detection of SNP TSC0032737
ataaatatcacc

SEQ ID NO: 325825 - DNA, 12 bp, Artificial Sequence
  Oligonucleotide primer for the detection of SNP TSC0032737
ataaatatcgcc

SEQ ID NO: 325826 - DNA, 12 bp, Artificial Sequence
  Oligonucleotide primer for the detection of SNP TSC0032737
ggtggtggtaaa

SEQ ID NO: 325827 - DNA, 12 bp, Artificial Sequence
  Oligonucleotide primer for the detection of SNP TSC0032741
aaaatactctat

SEQ ID NO: 325828 - DNA, 12 bp, Artificial Sequence
  Oligonucleotide primer for the detection of SNP TSC0032741
gtgtgttaatat

SEQ ID NO: 325829 - DNA, 12 bp, Artificial Sequence
  Oligonucleotide primer for the detection of SNP TSC0032741
agagtgttttat

SEQ ID NO: 325830 - DNA, 12 bp, Artificial Sequence
  Oligonucleotide primer for the detection of SNP TSC0032742
aaatcacatacc

SEQ ID NO: 325831 - DNA, 12 bp, Artificial Sequence
  Oligonucleotide primer for the detection of SNP TSC0032743
aaaaaaaacatt

SEQ ID NO: 325832 - DNA, 12 bp, Artificial Sequence
  Oligonucleotide primer for the detection of SNP TSC0032743
tgagtgattaga

SEQ ID NO: 325833 - DNA, 12 bp, Artificial Sequence
  Oligonucleotide primer for the detection of SNP TSC0032744
tataatttatag

SEQ ID NO: 325834 - DNA, 12 bp, Artificial Sequence
  Oligonucleotide primer for the detection of SNP TSC0032744
tataatttataa

SEQ ID NO: 325835 - DNA, 12 bp, Artificial Sequence
  Oligonucleotide primer for the detection of SNP TSC0032744
aaaaaaggtgaa

SEQ ID NO: 325836 - DNA, 12 bp, Artificial Sequence
  Oligonucleotide primer for the detection of SNP TSC0032745
aatcccacaaaa

SEQ ID NO: 325837 - DNA, 12 bp, Artificial Sequence
  Oligonucleotide primer for the detection of SNP TSC0032745
taataatttccc

SEQ ID NO: 325838 - DNA, 12 bp, Artificial Sequence
  Oligonucleotide primer for the detection of SNP TSC0032745
aaaattttatag

SEQ ID NO: 325839 - DNA, 12 bp, Artificial Sequence
  Oligonucleotide primer for the detection of SNP TSC0032746
aaacctccatac

SEQ ID NO: 325840 - DNA, 12 bp, Artificial Sequence
  Oligonucleotide primer for the detection of SNP TSC0032746
aaacctccgtac

SEQ ID NO: 325841 - DNA, 12 bp, Artificial Sequence
  Oligonucleotide primer for the detection of SNP TSC0032746
atagggaaggtg

SEQ ID NO: 325842 - DNA, 12 bp, Artificial Sequence
  Oligonucleotide primer for the detection of SNP TSC0032754
caaacaattaaa

SEQ ID NO: 325843 - DNA, 12 bp, Artificial Sequence
  Oligonucleotide primer for the detection of SNP TSC0032754
tttgaattttta

SEQ ID NO: 325844 - DNA, 12 bp, Artificial Sequence
  Oligonucleotide primer for the detection of SNP TSC0032754
ctaaacctccaa

SEQ ID NO: 325845 - DNA, 12 bp, Artificial Sequence
  Oligonucleotide primer for the detection of SNP TSC0032754
gttaggtagttg

SEQ ID NO: 325846 - DNA, 12 bp, Artificial Sequence
  Oligonucleotide primer for the detection of SNP TSC0032755
aacccacatccc

SEQ ID NO: 325847 - DNA, 12 bp, Artificial Sequence
  Oligonucleotide primer for the detection of SNP TSC0032755
taaatgtttttg

SEQ ID NO: 325848 - DNA, 12 bp, Artificial Sequence
  Oligonucleotide primer for the detection of SNP TSC0032755
caaatatcccta

SEQ ID NO: 325849 - DNA, 12 bp, Artificial Sequence
  Oligonucleotide primer for the detection of SNP TSC0032755
ggtttatatttt

SEQ ID NO: 325850 - DNA, 12 bp, Artificial Sequence
  Oligonucleotide primer for the detection of SNP TSC0032755
ggtttatatttc

SEQ ID NO: 325851 - DNA, 12 bp, Artificial Sequence
  Oligonucleotide primer for the detection of SNP TSC0032758
ccccaaaaactc

SEQ ID NO: 325852 - DNA, 12 bp, Artificial Sequence
  Oligonucleotide primer for the detection of SNP TSC0032758
ggagggggttgg

SEQ ID NO: 325853 - DNA, 12 bp, Artificial Sequence
  Oligonucleotide primer for the detection of SNP TSC0032760
taaaaatcaaat

SEQ ID NO: 325854 - DNA, 12 bp, Artificial Sequence
  Oligonucleotide primer for the detection of SNP TSC0032760
aagataaatata

SEQ ID NO: 325855 - DNA, 12 bp, Artificial Sequence
  Oligonucleotide primer for the detection of SNP TSC0032765
ataaaagttatg

SEQ ID NO: 325856 - DNA, 12 bp, Artificial Sequence
  Oligonucleotide primer for the detection of SNP TSC0032765
acaaaaactata

SEQ ID NO: 325857 - DNA, 12 bp, Artificial Sequence
  Oligonucleotide primer for the detection of SNP TSC0032767
cacccaaaacat

SEQ ID NO: 325858 - DNA, 12 bp, Artificial Sequence
  Oligonucleotide primer for the detection of SNP TSC0032767
gttgttgataaa

SEQ ID NO: 325859 - DNA, 12 bp, Artificial Sequence
  Oligonucleotide primer for the detection of SNP TSC0032768
cataaataaacc

SEQ ID NO: 325860 - DNA, 12 bp, Artificial Sequence
  Oligonucleotide primer for the detection of SNP TSC0032768
cgtaaataaacc

SEQ ID NO: 325861 - DNA, 12 bp, Artificial Sequence
  Oligonucleotide primer for the detection of SNP TSC0032768
ataagtaatatg

SEQ ID NO: 325862 - DNA, 12 bp, Artificial Sequence
  Oligonucleotide primer for the detection of SNP TSC0032769
tctttcttaaac

SEQ ID NO: 325863 - DNA, 12 bp, Artificial Sequence
  Oligonucleotide primer for the detection of SNP TSC0032769
tgttttttgata

SEQ ID NO: 325864 - DNA, 12 bp, Artificial Sequence
  Oligonucleotide primer for the detection of SNP TSC0032770
cttaaaaactac

SEQ ID NO: 325865 - DNA, 12 bp, Artificial Sequence
  Oligonucleotide primer for the detection of SNP TSC0032770
tgattttataag

SEQ ID NO: 325866 - DNA, 12 bp, Artificial Sequence
  Oligonucleotide primer for the detection of SNP TSC0032772
acttacaacatt

SEQ ID NO: 325867 - DNA, 12 bp, Artificial Sequence
  Oligonucleotide primer for the detection of SNP TSC0032772
gaatagttagta

SEQ ID NO: 325868 - DNA, 12 bp, Artificial Sequence
  Oligonucleotide primer for the detection of SNP TSC0032773
atccccataaac

SEQ ID NO: 325869 - DNA, 12 bp, Artificial Sequence
  Oligonucleotide primer for the detection of SNP TSC0032773
agtttttatata

SEQ ID NO: 325870 - DNA, 12 bp, Artificial Sequence
  Oligonucleotide primer for the detection of SNP TSC0032774
ctcaatttccac

SEQ ID NO: 325871 - DNA, 12 bp, Artificial Sequence
  Oligonucleotide primer for the detection of SNP TSC0032776
tacctttaacat

SEQ ID NO: 325872 - DNA, 12 bp, Artificial Sequence
  Oligonucleotide primer for the detection of SNP TSC0032776
tatgttttagta

SEQ ID NO: 325873 - DNA, 12 bp, Artificial Sequence
  Oligonucleotide primer for the detection of SNP TSC0032777
aatataaaacta

SEQ ID NO: 325874 - DNA, 12 bp, Artificial Sequence
  Oligonucleotide primer for the detection of SNP TSC0032777
gtggaattaaga

SEQ ID NO: 325875 - DNA, 12 bp, Artificial Sequence
  Oligonucleotide primer for the detection of SNP TSC0032777
gagtgtggagtt

SEQ ID NO: 325876 - DNA, 12 bp, Artificial Sequence
  Oligonucleotide primer for the detection of SNP TSC0032778
acctcataactc

SEQ ID NO: 325877 - DNA, 12 bp, Artificial Sequence
  Oligonucleotide primer for the detection of SNP TSC0032778
ttttagtagtta

SEQ ID NO: 325878 - DNA, 12 bp, Artificial Sequence
  Oligonucleotide primer for the detection of SNP TSC0032780
aacgaaacaaaa

SEQ ID NO: 325879 - DNA, 12 bp, Artificial Sequence
  Oligonucleotide primer for the detection of SNP TSC0032780
ttttaagatagg

SEQ ID NO: 325880 - DNA, 12 bp, Artificial Sequence
  Oligonucleotide primer for the detection of SNP TSC0032782
acaaactacctt

SEQ ID NO: 325881 - DNA, 12 bp, Artificial Sequence
  Oligonucleotide primer for the detection of SNP TSC0032782
gaatgtaaaatg

SEQ ID NO: 325882 - DNA, 12 bp, Artificial Sequence
  Oligonucleotide primer for the detection of SNP TSC0032782
gaacgtaaaatg

SEQ ID NO: 325883 - DNA, 12 bp, Artificial Sequence
  Oligonucleotide primer for the detection of SNP TSC0032782
aaacataaaata

SEQ ID NO: 325884 - DNA, 12 bp, Artificial Sequence
  Oligonucleotide primer for the detection of SNP TSC0032782
aaacgtaaaata

SEQ ID NO: 325885 - DNA, 12 bp, Artificial Sequence
  Oligonucleotide primer for the detection of SNP TSC0032782
gaacataaaata

SEQ ID NO: 325886 - DNA, 12 bp, Artificial Sequence
  Oligonucleotide primer for the detection of SNP TSC0032782
gaacgtaaaata

SEQ ID NO: 325887 - DNA, 12 bp, Artificial Sequence
  Oligonucleotide primer for the detection of SNP TSC0032783
aaaatatccttc

SEQ ID NO: 325888 - DNA, 12 bp, Artificial Sequence
  Oligonucleotide primer for the detection of SNP TSC0032783
tagttatgaaga

SEQ ID NO: 325889 - DNA, 12 bp, Artificial Sequence
  Oligonucleotide primer for the detection of SNP TSC0032785
tcccataacaac

SEQ ID NO: 325890 - DNA, 12 bp, Artificial Sequence
  Oligonucleotide primer for the detection of SNP TSC0032785
taaaatgtttgg

SEQ ID NO: 325891 - DNA, 12 bp, Artificial Sequence
  Oligonucleotide primer for the detection of SNP TSC0032788
acccttattaaa

SEQ ID NO: 325892 - DNA, 12 bp, Artificial Sequence
  Oligonucleotide primer for the detection of SNP TSC0032788
gaggttttataa

SEQ ID NO: 325893 - DNA, 12 bp, Artificial Sequence
  Oligonucleotide primer for the detection of SNP TSC0032791
cactaactctct

SEQ ID NO: 325894 - DNA, 12 bp, Artificial Sequence
  Oligonucleotide primer for the detection of SNP TSC0032791
aggtatatttaa

SEQ ID NO: 325895 - DNA, 12 bp, Artificial Sequence
  Oligonucleotide primer for the detection of SNP TSC0032791
aaacacatttaa

SEQ ID NO: 325896 - DNA, 12 bp, Artificial Sequence
  Oligonucleotide primer for the detection of SNP TSC0032791
tattggtttttt

SEQ ID NO: 325897 - DNA, 12 bp, Artificial Sequence
  Oligonucleotide primer for the detection of SNP TSC0032794
acctcaccctaa

SEQ ID NO: 325898 - DNA, 12 bp, Artificial Sequence
  Oligonucleotide primer for the detection of SNP TSC0032794
ttgagagtgagt

SEQ ID NO: 325899 - DNA, 12 bp, Artificial Sequence
  Oligonucleotide primer for the detection of SNP TSC0032794
tcgagagtgagt

SEQ ID NO: 325900 - DNA, 12 bp, Artificial Sequence
  Oligonucleotide primer for the detection of SNP TSC0032794
tcaaaaataaac

SEQ ID NO: 325901 - DNA, 12 bp, Artificial Sequence
  Oligonucleotide primer for the detection of SNP TSC0032794
tcgaaaataaac

SEQ ID NO: 325902 - DNA, 12 bp, Artificial Sequence
  Oligonucleotide primer for the detection of SNP TSC0032794
attttattttgg

SEQ ID NO: 325903 - DNA, 12 bp, Artificial Sequence
  Oligonucleotide primer for the detection of SNP TSC0032796
attcactactca

SEQ ID NO: 325904 - DNA, 12 bp, Artificial Sequence
  Oligonucleotide primer for the detection of SNP TSC0032796
gttttataaaaa

SEQ ID NO: 325905 - DNA, 12 bp, Artificial Sequence
  Oligonucleotide primer for the detection of SNP TSC0032797
ataaacactatt

SEQ ID NO: 325906 - DNA, 12 bp, Artificial Sequence
  Oligonucleotide primer for the detection of SNP TSC0032797
ataaacgctatt

SEQ ID NO: 325907 - DNA, 12 bp, Artificial Sequence
  Oligonucleotide primer for the detection of SNP TSC0032797
aagtgaatagta

SEQ ID NO: 325908 - DNA, 12 bp, Artificial Sequence
  Oligonucleotide primer for the detection of SNP TSC0032798
aactctccttcc

SEQ ID NO: 325909 - DNA, 12 bp, Artificial Sequence
  Oligonucleotide primer for the detection of SNP TSC0032798
ttttgttgattt

SEQ ID NO: 325910 - DNA, 12 bp, Artificial Sequence
  Oligonucleotide primer for the detection of SNP TSC0032798
cttactaaccca

SEQ ID NO: 325911 - DNA, 12 bp, Artificial Sequence
  Oligonucleotide primer for the detection of SNP TSC0032798
gatttttttttc

SEQ ID NO: 325912 - DNA, 12 bp, Artificial Sequence
  Oligonucleotide primer for the detection of SNP TSC0032799
actaatataatc

SEQ ID NO: 325913 - DNA, 12 bp, Artificial Sequence
  Oligonucleotide primer for the detection of SNP TSC0032800
aatctatatcct

SEQ ID NO: 325914 - DNA, 12 bp, Artificial Sequence
  Oligonucleotide primer for the detection of SNP TSC0032800
agttttgtgttg

SEQ ID NO: 325915 - DNA, 12 bp, Artificial Sequence
  Oligonucleotide primer for the detection of SNP TSC0032800
agtttcgtgttg

SEQ ID NO: 325916 - DNA, 12 bp, Artificial Sequence
  Oligonucleotide primer for the detection of SNP TSC0032800
agttttgcgttg

SEQ ID NO: 325917 - DNA, 12 bp, Artificial Sequence
  Oligonucleotide primer for the detection of SNP TSC0032800
agtttcgcgttg

SEQ ID NO: 325918 - DNA, 12 bp, Artificial Sequence
  Oligonucleotide primer for the detection of SNP TSC0032801
ctcacattatct

SEQ ID NO: 325919 - DNA, 12 bp, Artificial Sequence
  Oligonucleotide primer for the detection of SNP TSC0032801
ctcacgttatct

SEQ ID NO: 325920 - DNA, 12 bp, Artificial Sequence
  Oligonucleotide primer for the detection of SNP TSC0032801
ctcgcattatct

SEQ ID NO: 325921 - DNA, 12 bp, Artificial Sequence
  Oligonucleotide primer for the detection of SNP TSC0032801
ctcgcgttatct

SEQ ID NO: 325922 - DNA, 12 bp, Artificial Sequence
  Oligonukleotid-Primer
atttgtgttttg

SEQ ID NO: 325923 - DNA, 12 bp, Artificial Sequence
  Oligonucleotide primer for the detection of SNP TSC0032801
atctatatccta

SEQ ID NO: 325924 - DNA, 12 bp, Artificial Sequence
  Oligonucleotide primer for the detection of SNP TSC0032801
ttcgtgttgttt

SEQ ID NO: 325925 - DNA, 12 bp, Artificial Sequence
  Oligonucleotide primer for the detection of SNP TSC0032801
tttgcgttgttt

SEQ ID NO: 325926 - DNA, 12 bp, Artificial Sequence
  Oligonucleotide primer for the detection of SNP TSC0032801
ttcgcgttgttt

SEQ ID NO: 325927 - DNA, 12 bp, Artificial Sequence
  Oligonucleotide primer for the detection of SNP TSC0032802
accataacctca

SEQ ID NO: 325928 - DNA, 12 bp, Artificial Sequence
  Oligonucleotide primer for the detection of SNP TSC0032802
accataacctcg

SEQ ID NO: 325929 - DNA, 12 bp, Artificial Sequence
  Oligonucleotide primer for the detection of SNP TSC0032802
gttttgtaagat

SEQ ID NO: 325930 - DNA, 12 bp, Artificial Sequence
  Oligonucleotide primer for the detection of SNP TSC0032802
atcctacaaaac

SEQ ID NO: 325931 - DNA, 12 bp, Artificial Sequence
  Oligonucleotide primer for the detection of SNP TSC0032802
attatagttttg

SEQ ID NO: 325932 - DNA, 12 bp, Artificial Sequence
  Oligonucleotide primer for the detection of SNP TSC0032802
attatagtttcg

SEQ ID NO: 325933 - DNA, 12 bp, Artificial Sequence
  Oligonucleotide primer for the detection of SNP TSC0032807
taaatgatgttg

SEQ ID NO: 325934 - DNA, 12 bp, Artificial Sequence
  Oligonucleotide primer for the detection of SNP TSC0032807
taaatgacgttg

SEQ ID NO: 325935 - DNA, 12 bp, Artificial Sequence
  Oligonucleotide primer for the detection of SNP TSC0032808
acaataaataat

SEQ ID NO: 325936 - DNA, 12 bp, Artificial Sequence
  Oligonucleotide primer for the detection of SNP TSC0032808
gataggaggttg

SEQ ID NO: 325937 - DNA, 12 bp, Artificial Sequence
  Oligonucleotide primer for the detection of SNP TSC0032808
gataggaggtcg

SEQ ID NO: 325938 - DNA, 12 bp, Artificial Sequence
  Oligonucleotide primer for the detection of SNP TSC0032808
aacaaaaaaccg

SEQ ID NO: 325939 - DNA, 12 bp, Artificial Sequence
  Oligonucleotide primer for the detection of SNP TSC0032808
gtaatgggtagt

SEQ ID NO: 325940 - DNA, 12 bp, Artificial Sequence
  Oligonucleotide primer for the detection of SNP TSC0032809
tagaaattttag

SEQ ID NO: 325941 - DNA, 12 bp, Artificial Sequence
  Oligonucleotide primer for the detection of SNP TSC0032813
aaaataatattt

SEQ ID NO: 325942 - DNA, 12 bp, Artificial Sequence
  Oligonucleotide primer for the detection of SNP TSC0032814
aacattaacatt

SEQ ID NO: 325943 - DNA, 12 bp, Artificial Sequence
  Oligonucleotide primer for the detection of SNP TSC0032814
aacattaacgtt

SEQ ID NO: 325944 - DNA, 12 bp, Artificial Sequence
  Oligonucleotide primer for the detection of SNP TSC0032814
aagaaaaagaaa

SEQ ID NO: 325945 - DNA, 12 bp, Artificial Sequence
  Oligonucleotide primer for the detection of SNP TSC0032814
gatattaacgtt

SEQ ID NO: 325946 - DNA, 12 bp, Artificial Sequence
  Oligonucleotide primer for the detection of SNP TSC0032815
aaattattttaa

SEQ ID NO: 325947 - DNA, 12 bp, Artificial Sequence
  Oligonucleotide primer for the detection of SNP TSC0032815
taattattgaag

SEQ ID NO: 325948 - DNA, 12 bp, Artificial Sequence
  Oligonucleotide primer for the detection of SNP TSC0032817
atactattataa

SEQ ID NO: 325949 - DNA, 12 bp, Artificial Sequence
  Oligonucleotide primer for the detection of SNP TSC0032817
tcaaaataatcc

SEQ ID NO: 325950 - DNA, 12 bp, Artificial Sequence
  Oligonucleotide primer for the detection of SNP TSC0032818
ataataactttt

SEQ ID NO: 325951 - DNA, 12 bp, Artificial Sequence
  Oligonucleotide primer for the detection of SNP TSC0032819
ttagtatatttg

SEQ ID NO: 325952 - DNA, 12 bp, Artificial Sequence
  Oligonucleotide primer for the detection of SNP TSC0032822
aaaataacacct

SEQ ID NO: 325953 - DNA, 12 bp, Artificial Sequence
  Oligonucleotide primer for the detection of SNP TSC0032822
taaaagaagtga

SEQ ID NO: 325954 - DNA, 12 bp, Artificial Sequence
  Oligonucleotide primer for the detection of SNP TSC0032822
gagatagtattt

SEQ ID NO: 325955 - DNA, 12 bp, Artificial Sequence
  Oligonucleotide primer for the detection of SNP TSC0032823
ttcaaaatttac

SEQ ID NO: 325956 - DNA, 12 bp, Artificial Sequence
  Oligonucleotide primer for the detection of SNP TSC0032823
ttcgaaatttac

SEQ ID NO: 325957 - DNA, 12 bp, Artificial Sequence
  Oligonucleotide primer for the detection of SNP TSC0032823
ttttagagtaaa

SEQ ID NO: 325958 - DNA, 12 bp, Artificial Sequence
  Oligonucleotide primer for the detection of SNP TSC0032828
gtatttattatt

SEQ ID NO: 325959 - DNA, 12 bp, Artificial Sequence
  Oligonucleotide primer for the detection of SNP TSC0032828
acatttattatt

SEQ ID NO: 325960 - DNA, 12 bp, Artificial Sequence
  Oligonucleotide primer for the detection of SNP TSC0032829
aatattaccact

SEQ ID NO: 325961 - DNA, 12 bp, Artificial Sequence
  Oligonucleotide primer for the detection of SNP TSC0032829
attagtataata

SEQ ID NO: 325962 - DNA, 12 bp, Artificial Sequence
  Oligonucleotide primer for the detection of SNP TSC0032834
ccaaatcaaact

SEQ ID NO: 325963 - DNA, 12 bp, Artificial Sequence
  Oligonucleotide primer for the detection of SNP TSC0032834
aagaaaatggga

SEQ ID NO: 325964 - DNA, 12 bp, Artificial Sequence
  Oligonucleotide primer for the detection of SNP TSC0032835
aaatccttccta

SEQ ID NO: 325965 - DNA, 12 bp, Artificial Sequence
  Oligonucleotide primer for the detection of SNP TSC0032835
aattgatattta

SEQ ID NO: 325966 - DNA, 12 bp, Artificial Sequence
  Oligonucleotide primer for the detection of SNP TSC0032835
attaatatccaa

SEQ ID NO: 325967 - DNA, 12 bp, Artificial Sequence
  Oligonucleotide primer for the detection of SNP TSC0032835
gaatttttttta

SEQ ID NO: 325968 - DNA, 12 bp, Artificial Sequence
  Oligonucleotide primer for the detection of SNP TSC0032836
tcaaatatttac

SEQ ID NO: 325969 - DNA, 12 bp, Artificial Sequence
  Oligonucleotide primer for the detection of SNP TSC0032836
gatgttagattg

SEQ ID NO: 325970 - DNA, 12 bp, Artificial Sequence
  Oligonucleotide primer for the detection of SNP TSC0032839
ctaaaaaccaac

SEQ ID NO: 325971 - DNA, 12 bp, Artificial Sequence
  Oligonucleotide primer for the detection of SNP TSC0032839
aaggtttattgg

SEQ ID NO: 325972 - DNA, 12 bp, Artificial Sequence
  Oligonucleotide primer for the detection of SNP TSC0032840
tctatatttaaa

SEQ ID NO: 325973 - DNA, 12 bp, Artificial Sequence
  Oligonucleotide primer for the detection of SNP TSC0032840
acaattcattct

SEQ ID NO: 325974 - DNA, 12 bp, Artificial Sequence
  Oligonucleotide primer for the detection of SNP TSC0032840
gtatttgagttt

SEQ ID NO: 325975 - DNA, 12 bp, Artificial Sequence
  Oligonucleotide primer for the detection of SNP TSC0032841
caaaactcaaat

SEQ ID NO: 325976 - DNA, 12 bp, Artificial Sequence
  Oligonucleotide primer for the detection of SNP TSC0032841
aaggattttgta

SEQ ID NO: 325977 - DNA, 12 bp, Artificial Sequence
  Oligonucleotide primer for the detection of SNP TSC0032841
aaggatttcgta

SEQ ID NO: 325978 - DNA, 12 bp, Artificial Sequence
  Oligonucleotide primer for the detection of SNP TSC0032842
aaactaactctc

SEQ ID NO: 325979 - DNA, 12 bp, Artificial Sequence
  Oligonucleotide primer for the detection of SNP TSC0032842
tggtgagtgagt

SEQ ID NO: 325980 - DNA, 12 bp, Artificial Sequence
  Oligonucleotide primer for the detection of SNP TSC0032842
tggcgagtgagt

SEQ ID NO: 325981 - DNA, 12 bp, Artificial Sequence
  Oligonucleotide primer for the detection of SNP TSC0032842
taacaaataaat

SEQ ID NO: 325982 - DNA, 12 bp, Artificial Sequence
  Oligonucleotide primer for the detection of SNP TSC0032842
taacgaataaat

SEQ ID NO: 325983 - DNA, 12 bp, Artificial Sequence
  Oligonucleotide primer for the detection of SNP TSC0032842
gagttggttttt

SEQ ID NO: 325984 - DNA, 12 bp, Artificial Sequence
  Oligonucleotide primer for the detection of SNP TSC0032843
ctacataataac

SEQ ID NO: 325985 - DNA, 12 bp, Artificial Sequence
  Oligonucleotide primer for the detection of SNP TSC0032843
ctacgtaataac

SEQ ID NO: 325986 - DNA, 12 bp, Artificial Sequence
  Oligonucleotide primer for the detection of SNP TSC0032844
cacaaccactta

SEQ ID NO: 325987 - DNA, 12 bp, Artificial Sequence
  Oligonucleotide primer for the detection of SNP TSC0032844
ctaaatcactct

SEQ ID NO: 325988 - DNA, 12 bp, Artificial Sequence
  Oligonucleotide primer for the detection of SNP TSC0032844
tatagttatttg

SEQ ID NO: 325989 - DNA, 12 bp, Artificial Sequence
  Oligonucleotide primer for the detection of SNP TSC0032845
acaacatcacta

SEQ ID NO: 325990 - DNA, 12 bp, Artificial Sequence
  Oligonucleotide primer for the detection of SNP TSC0032845
gcaacatcacta

SEQ ID NO: 325991 - DNA, 12 bp, Artificial Sequence
  Oligonucleotide primer for the detection of SNP TSC0032845
acccattttccc

SEQ ID NO: 325992 - DNA, 12 bp, Artificial Sequence
  Oligonucleotide primer for the detection of SNP TSC0032845
gtaatattattg

SEQ ID NO: 325993 - DNA, 12 bp, Artificial Sequence
  Oligonucleotide primer for the detection of SNP TSC0032846
aaaacacccatc

SEQ ID NO: 325994 - DNA, 12 bp, Artificial Sequence
  Oligonucleotide primer for the detection of SNP TSC0032846
gaaacacccatc

SEQ ID NO: 325995 - DNA, 12 bp, Artificial Sequence
  Oligonucleotide primer for the detection of SNP TSC0032846
tgttttttgttg

SEQ ID NO: 325996 - DNA, 12 bp, Artificial Sequence
  Oligonucleotide primer for the detection of SNP TSC0032846
tatcttttacta

SEQ ID NO: 325997 - DNA, 12 bp, Artificial Sequence
  Oligonucleotide primer for the detection of SNP TSC0032847
caacaataccta

SEQ ID NO: 325998 - DNA, 12 bp, Artificial Sequence
  Oligonucleotide primer for the detection of SNP TSC0032847
ggttgagtgtgg

SEQ ID NO: 325999 - DNA, 12 bp, Artificial Sequence
  Oligonucleotide primer for the detection of SNP TSC0032847
ggttgagtgcgg

SEQ ID NO: 326000 - DNA, 12 bp, Artificial Sequence
  Oligonucleotide primer for the detection of SNP TSC0032847
aactaaatacaa

SEQ ID NO: 326001 - DNA, 12 bp, Artificial Sequence
  Oligonucleotide primer for the detection of SNP TSC0032847
aactaaatacga

SEQ ID NO: 326002 - DNA, 12 bp, Artificial Sequence
  Oligonucleotide primer for the detection of SNP TSC0032848
tatacaccctac

SEQ ID NO: 326003 - DNA, 12 bp, Artificial Sequence
  Oligonucleotide primer for the detection of SNP TSC0032848
tatacgccctac

SEQ ID NO: 326004 - DNA, 12 bp, Artificial Sequence
  Oligonucleotide primer for the detection of SNP TSC0032848
agtggtatgttg

SEQ ID NO: 326005 - DNA, 12 bp, Artificial Sequence
  Oligonucleotide primer for the detection of SNP TSC0032848
aataacatatta

SEQ ID NO: 326006 - DNA, 12 bp, Artificial Sequence
  Oligonucleotide primer for the detection of SNP TSC0032848
gtgcgttttgtt

SEQ ID NO: 326007 - DNA, 12 bp, Artificial Sequence
  Oligonucleotide primer for the detection of SNP TSC0032850
gagattttgtgt

SEQ ID NO: 326008 - DNA, 12 bp, Artificial Sequence
  Oligonucleotide primer for the detection of SNP TSC0032850
aaaattttatat

SEQ ID NO: 326009 - DNA, 12 bp, Artificial Sequence
  Oligonucleotide primer for the detection of SNP TSC0032850
gttttaaaatat

SEQ ID NO: 326010 - DNA, 12 bp, Artificial Sequence
  Oligonucleotide primer for the detection of SNP TSC0032853
aaaaccctctct

SEQ ID NO: 326011 - DNA, 12 bp, Artificial Sequence
  Oligonucleotide primer for the detection of SNP TSC0032853
tagggaaattgt

SEQ ID NO: 326012 - DNA, 12 bp, Artificial Sequence
  Oligonucleotide primer for the detection of SNP TSC0032853
ccaaaaaaatta

SEQ ID NO: 326013 - DNA, 12 bp, Artificial Sequence
  Oligonucleotide primer for the detection of SNP TSC0032854
aaaccattttac

SEQ ID NO: 326014 - DNA, 12 bp, Artificial Sequence
  Oligonucleotide primer for the detection of SNP TSC0032854
aggttttgggaa

SEQ ID NO: 326015 - DNA, 12 bp, Artificial Sequence
  Oligonucleotide primer for the detection of SNP TSC0032854
gaattattttat

SEQ ID NO: 326016 - DNA, 12 bp, Artificial Sequence
  Oligonucleotide primer for the detection of SNP TSC0032855
aaattattcttc

SEQ ID NO: 326017 - DNA, 12 bp, Artificial Sequence
  Oligonucleotide primer for the detection of SNP TSC0032855
tattatattgtt

SEQ ID NO: 326018 - DNA, 12 bp, Artificial Sequence
  Oligonucleotide primer for the detection of SNP TSC0032855
accacactacca

SEQ ID NO: 326019 - DNA, 12 bp, Artificial Sequence
  Oligonucleotide primer for the detection of SNP TSC0032856
attattcttctt

SEQ ID NO: 326020 - DNA, 12 bp, Artificial Sequence
  Oligonucleotide primer for the detection of SNP TSC0032856
ttatattgttag

SEQ ID NO: 326021 - DNA, 12 bp, Artificial Sequence
  Oligonucleotide primer for the detection of SNP TSC0032857
ttaaattttata

SEQ ID NO: 326022 - DNA, 12 bp, Artificial Sequence
  Oligonucleotide primer for the detection of SNP TSC0032859
tgattattaata

SEQ ID NO: 326023 - DNA, 12 bp, Artificial Sequence
  Oligonucleotide primer for the detection of SNP TSC0032859
cgattattaata

SEQ ID NO: 326024 - DNA, 12 bp, Artificial Sequence
  Oligonucleotide primer for the detection of SNP TSC0032859
caactattaaca

SEQ ID NO: 326025 - DNA, 12 bp, Artificial Sequence
  Oligonucleotide primer for the detection of SNP TSC0032859
cgactattaaca

SEQ ID NO: 326026 - DNA, 12 bp, Artificial Sequence
  Oligonucleotide primer for the detection of SNP TSC0032859
gaataaataatt

SEQ ID NO: 326027 - DNA, 12 bp, Artificial Sequence
  Oligonucleotide primer for the detection of SNP TSC0032860
tttctatctatt

SEQ ID NO: 326028 - DNA, 12 bp, Artificial Sequence
  Oligonucleotide primer for the detection of SNP TSC0032860
atagttgtttgt

SEQ ID NO: 326029 - DNA, 12 bp, Artificial Sequence
  Oligonucleotide primer for the detection of SNP TSC0032860
ataactacttat

SEQ ID NO: 326030 - DNA, 12 bp, Artificial Sequence
  Oligonucleotide primer for the detection of SNP TSC0032861
ttaatacgatta

SEQ ID NO: 326031 - DNA, 12 bp, Artificial Sequence
  Oligonucleotide primer for the detection of SNP TSC0032861
ccctacccttcc

SEQ ID NO: 326032 - DNA, 12 bp, Artificial Sequence
  Oligonucleotide primer for the detection of SNP TSC0032861
ttggtatggttg

SEQ ID NO: 326033 - DNA, 12 bp, Artificial Sequence
  Oligonucleotide primer for the detection of SNP TSC0032861
ttggtacggttg

SEQ ID NO: 326034 - DNA, 12 bp, Artificial Sequence
  Oligonucleotide primer for the detection of SNP TSC0032863
aatctaaaactt

SEQ ID NO: 326035 - DNA, 12 bp, Artificial Sequence
  Oligonukleotid-Primer
tatttgggtttg

SEQ ID NO: 326036 - DNA, 12 bp, Artificial Sequence
  Oligonucleotide primer for the detection of SNP TSC0032864
taagtttagtat

SEQ ID NO: 326037 - DNA, 12 bp, Artificial Sequence
  Oligonucleotide primer for the detection of SNP TSC0032865
ctcctcctccct

SEQ ID NO: 326038 - DNA, 12 bp, Artificial Sequence
  Oligonucleotide primer for the detection of SNP TSC0032865
aaggagggagaa

SEQ ID NO: 326039 - DNA, 12 bp, Artificial Sequence
  Oligonucleotide primer for the detection of SNP TSC0032866
ttacgaggttag

SEQ ID NO: 326040 - DNA, 12 bp, Artificial Sequence
  Oligonucleotide primer for the detection of SNP TSC0032866
tcacaaaatcaa

SEQ ID NO: 326041 - DNA, 12 bp, Artificial Sequence
  Oligonucleotide primer for the detection of SNP TSC0032866
tcacgaaatcaa

SEQ ID NO: 326042 - DNA, 12 bp, Artificial Sequence
  Oligonucleotide primer for the detection of SNP TSC0032867
tgaattgagatt

SEQ ID NO: 326043 - DNA, 12 bp, Artificial Sequence
  Oligonukleotid-Primer
tgaatcgagatt

SEQ ID NO: 326044 - DNA, 12 bp, Artificial Sequence
  Oligonucleotide primer for the detection of SNP TSC0032867
ggaatgtaatgg

SEQ ID NO: 326045 - DNA, 12 bp, Artificial Sequence
  Oligonucleotide primer for the detection of SNP TSC0032868
actaaatttcca

SEQ ID NO: 326046 - DNA, 12 bp, Artificial Sequence
  Oligonucleotide primer for the detection of SNP TSC0032868
tgtggtttgtgt

SEQ ID NO: 326047 - DNA, 12 bp, Artificial Sequence
  Oligonucleotide primer for the detection of SNP TSC0032868
tataacttatat

SEQ ID NO: 326048 - DNA, 12 bp, Artificial Sequence
  Oligonucleotide primer for the detection of SNP TSC0032868
gttgaattttta

SEQ ID NO: 326049 - DNA, 12 bp, Artificial Sequence
  Oligonucleotide primer for the detection of SNP TSC0032872
actaatttttat

SEQ ID NO: 326050 - DNA, 12 bp, Artificial Sequence
  Oligonucleotide primer for the detection of SNP TSC0032872
atctccacaaaa

SEQ ID NO: 326051 - DNA, 12 bp, Artificial Sequence
  Oligonucleotide primer for the detection of SNP TSC0032873
ccacccccataa

SEQ ID NO: 326052 - DNA, 12 bp, Artificial Sequence
  Oligonucleotide primer for the detection of SNP TSC0032873
ccgcccccataa

SEQ ID NO: 326053 - DNA, 12 bp, Artificial Sequence
  Oligonucleotide primer for the detection of SNP TSC0032873
tgggaggtaatt

SEQ ID NO: 326054 - DNA, 12 bp, Artificial Sequence
  Oligonucleotide primer for the detection of SNP TSC0032873
gtttttatgatt

SEQ ID NO: 326055 - DNA, 12 bp, Artificial Sequence
  Oligonucleotide primer for the detection of SNP TSC0032874
gcccaaaccaaa

SEQ ID NO: 326056 - DNA, 12 bp, Artificial Sequence
  Oligonucleotide primer for the detection of SNP TSC0032874
ttatattattgt

SEQ ID NO: 326057 - DNA, 12 bp, Artificial Sequence
  Oligonucleotide primer for the detection of SNP TSC0032874
cacaccactaca

SEQ ID NO: 326058 - DNA, 12 bp, Artificial Sequence
  Oligonucleotide primer for the detection of SNP TSC0032874
tgtttaggttag

SEQ ID NO: 326059 - DNA, 12 bp, Artificial Sequence
  Oligonucleotide primer for the detection of SNP TSC0032874
cgtttaggttag

SEQ ID NO: 326060 - DNA, 12 bp, Artificial Sequence
  Oligonucleotide primer for the detection of SNP TSC0032876
cctaaataacac

SEQ ID NO: 326061 - DNA, 12 bp, Artificial Sequence
  Oligonucleotide primer for the detection of SNP TSC0032876
tattgttttaaa

SEQ ID NO: 326062 - DNA, 12 bp, Artificial Sequence
  Oligonucleotide primer for the detection of SNP TSC0032877
ccttacaaaaca

SEQ ID NO: 326063 - DNA, 12 bp, Artificial Sequence
  Oligonucleotide primer for the detection of SNP TSC0032878
ttaaaatataac

SEQ ID NO: 326064 - DNA, 12 bp, Artificial Sequence
  Oligonucleotide primer for the detection of SNP TSC0032878
atattttagtta

SEQ ID NO: 326065 - DNA, 12 bp, Artificial Sequence
  Oligonucleotide primer for the detection of SNP TSC0032879
taacattaaaat

SEQ ID NO: 326066 - DNA, 12 bp, Artificial Sequence
  Oligonucleotide primer for the detection of SNP TSC0032879
ggttgaatataa

SEQ ID NO: 326067 - DNA, 12 bp, Artificial Sequence
  Oligonucleotide primer for the detection of SNP TSC0032881
taaaaatccttt

SEQ ID NO: 326068 - DNA, 12 bp, Artificial Sequence
  Oligonucleotide primer for the detection of SNP TSC0032881
tttggttatata

SEQ ID NO: 326069 - DNA, 12 bp, Artificial Sequence
  Oligonucleotide primer for the detection of SNP TSC0032883
ctatctcccatc

SEQ ID NO: 326070 - DNA, 12 bp, Artificial Sequence
  Oligonucleotide primer for the detection of SNP TSC0032883
agttatgtttga

SEQ ID NO: 326071 - DNA, 12 bp, Artificial Sequence
  Oligonucleotide primer for the detection of SNP TSC0032886
acatttataaat

SEQ ID NO: 326072 - DNA, 12 bp, Artificial Sequence
  Oligonucleotide primer for the detection of SNP TSC0032886
gtggagtatgag

SEQ ID NO: 326073 - DNA, 12 bp, Artificial Sequence
  Oligonucleotide primer for the detection of SNP TSC0032890
aacaacataata

SEQ ID NO: 326074 - DNA, 12 bp, Artificial Sequence
  Oligonucleotide primer for the detection of SNP TSC0032890
aacaacgtaata

SEQ ID NO: 326075 - DNA, 12 bp, Artificial Sequence
  Oligonucleotide primer for the detection of SNP TSC0032890
tgattttaagtt

SEQ ID NO: 326076 - DNA, 12 bp, Artificial Sequence
  Oligonucleotide primer for the detection of SNP TSC0032890
taatctcaaacc

SEQ ID NO: 326077 - DNA, 12 bp, Artificial Sequence
  Oligonucleotide primer for the detection of SNP TSC0032890
ggtagtgtggtg

SEQ ID NO: 326078 - DNA, 12 bp, Artificial Sequence
  Oligonucleotide primer for the detection of SNP TSC0032890
ggtagcgtggtg

SEQ ID NO: 326079 - DNA, 12 bp, Artificial Sequence
  Oligonucleotide primer for the detection of SNP TSC0032892
gattgaagggaa

SEQ ID NO: 326080 - DNA, 12 bp, Artificial Sequence
  Oligonucleotide primer for the detection of SNP TSC0032893
aataactataaa

SEQ ID NO: 326081 - DNA, 12 bp, Artificial Sequence
  Oligonucleotide primer for the detection of SNP TSC0032893
gttagtttaaat

SEQ ID NO: 326082 - DNA, 12 bp, Artificial Sequence
  Oligonucleotide primer for the detection of SNP TSC0032893
accaacccaaat

SEQ ID NO: 326083 - DNA, 12 bp, Artificial Sequence
  Oligonucleotide primer for the detection of SNP TSC0032893
gatggttatgaa

SEQ ID NO: 326084 - DNA, 12 bp, Artificial Sequence
  Oligonucleotide primer for the detection of SNP TSC0032894
tacaaaaatact

SEQ ID NO: 326085 - DNA, 12 bp, Artificial Sequence
  Oligonucleotide primer for the detection of SNP TSC0032894
ttaaattataaa

SEQ ID NO: 326086 - DNA, 12 bp, Artificial Sequence
  Oligonucleotide primer for the detection of SNP TSC0032895
tctcaatctatt

SEQ ID NO: 326087 - DNA, 12 bp, Artificial Sequence
  Oligonucleotide primer for the detection of SNP TSC0032895
tttagtttggga

SEQ ID NO: 326088 - DNA, 12 bp, Artificial Sequence
  Oligonucleotide primer for the detection of SNP TSC0032895
tccaatctaaaa

SEQ ID NO: 326089 - DNA, 12 bp, Artificial Sequence
  Oligonucleotide primer for the detection of SNP TSC0032896
taaacaacctaa

SEQ ID NO: 326090 - DNA, 12 bp, Artificial Sequence
  Oligonucleotide primer for the detection of SNP TSC0032896
ggtttttaagtt

SEQ ID NO: 326091 - DNA, 12 bp, Artificial Sequence
  Oligonucleotide primer for the detection of SNP TSC0032896
ggtttttaagtc

SEQ ID NO: 326092 - DNA, 12 bp, Artificial Sequence
  Oligonucleotide primer for the detection of SNP TSC0032896
aacctccaaacc

SEQ ID NO: 326093 - DNA, 12 bp, Artificial Sequence
  Oligonucleotide primer for the detection of SNP TSC0032896
gagtagtttgat

SEQ ID NO: 326094 - DNA, 12 bp, Artificial Sequence
  Oligonucleotide primer for the detection of SNP TSC0032897
ttttccatctcc

SEQ ID NO: 326095 - DNA, 12 bp, Artificial Sequence
  Oligonucleotide primer for the detection of SNP TSC0032897
atttggtatgag

SEQ ID NO: 326096 - DNA, 12 bp, Artificial Sequence
  Oligonucleotide primer for the detection of SNP TSC0032899
aatatcttcttt

SEQ ID NO: 326097 - DNA, 12 bp, Artificial Sequence
  Oligonucleotide primer for the detection of SNP TSC0032899
gaatttagagaa

SEQ ID NO: 326098 - DNA, 12 bp, Artificial Sequence
  Oligonucleotide primer for the detection of SNP TSC0032900
aaaaaaacccct

SEQ ID NO: 326099 - DNA, 12 bp, Artificial Sequence
  Oligonucleotide primer for the detection of SNP TSC0032900
agatttggagga

SEQ ID NO: 326100 - DNA, 12 bp, Artificial Sequence
  Oligonucleotide primer for the detection of SNP TSC0032906
cccatactcaac

SEQ ID NO: 326101 - DNA, 12 bp, Artificial Sequence
  Oligonucleotide primer for the detection of SNP TSC0032906
tttatggtgttt

SEQ ID NO: 326102 - DNA, 12 bp, Artificial Sequence
  Oligonucleotide primer for the detection of SNP TSC0032906
tttataatattt

SEQ ID NO: 326103 - DNA, 12 bp, Artificial Sequence
  Oligonucleotide primer for the detection of SNP TSC0032908
atctaaataaaa

SEQ ID NO: 326104 - DNA, 12 bp, Artificial Sequence
  Oligonucleotide primer for the detection of SNP TSC0032908
gaggttgagggt

SEQ ID NO: 326105 - DNA, 12 bp, Artificial Sequence
  Oligonucleotide primer for the detection of SNP TSC0032908
atttggatggga

SEQ ID NO: 326106 - DNA, 12 bp, Artificial Sequence
  Oligonucleotide primer for the detection of SNP TSC0032909
tggggtagagag

SEQ ID NO: 326107 - DNA, 12 bp, Artificial Sequence
  Oligonucleotide primer for the detection of SNP TSC0032911
aaataatttagc

SEQ ID NO: 326108 - DNA, 12 bp, Artificial Sequence
  Oligonucleotide primer for the detection of SNP TSC0032911
aaataattcaac

SEQ ID NO: 326109 - DNA, 12 bp, Artificial Sequence
  Oligonucleotide primer for the detection of SNP TSC0032911
aggaaatggatg

SEQ ID NO: 326110 - DNA, 12 bp, Artificial Sequence
  Oligonucleotide primer for the detection of SNP TSC0032912
tatataaaccac

SEQ ID NO: 326111 - DNA, 12 bp, Artificial Sequence
  Oligonucleotide primer for the detection of SNP TSC0032912
tgttaattttta

SEQ ID NO: 326112 - DNA, 12 bp, Artificial Sequence
  Oligonucleotide primer for the detection of SNP TSC0032913
aaaaaaatctat

SEQ ID NO: 326113 - DNA, 12 bp, Artificial Sequence
  Oligonucleotide primer for the detection of SNP TSC0032913
ttttgttttagg

SEQ ID NO: 326114 - DNA, 12 bp, Artificial Sequence
  Oligonucleotide primer for the detection of SNP TSC0032914
cttcctatttct

SEQ ID NO: 326115 - DNA, 12 bp, Artificial Sequence
  Oligonucleotide primer for the detection of SNP TSC0032914
atagtttatata

SEQ ID NO: 326116 - DNA, 12 bp, Artificial Sequence
  Oligonucleotide primer for the detection of SNP TSC0032915
ttaatactttcc

SEQ ID NO: 326117 - DNA, 12 bp, Artificial Sequence
  Oligonucleotide primer for the detection of SNP TSC0032915
aaggttgtaaag

SEQ ID NO: 326118 - DNA, 12 bp, Artificial Sequence
  Oligonucleotide primer for the detection of SNP TSC0032916
ctaaatactttt

SEQ ID NO: 326119 - DNA, 12 bp, Artificial Sequence
  Oligonucleotide primer for the detection of SNP TSC0032916
gaaataatgtaa

SEQ ID NO: 326120 - DNA, 12 bp, Artificial Sequence
  Oligonucleotide primer for the detection of SNP TSC0032921
ttattgatagag

SEQ ID NO: 326121 - DNA, 12 bp, Artificial Sequence
  Oligonucleotide primer for the detection of SNP TSC0032922
ttttttttagtg

SEQ ID NO: 326122 - DNA, 12 bp, Artificial Sequence
  Oligonucleotide primer for the detection of SNP TSC0032923
atattaaaataa

SEQ ID NO: 326123 - DNA, 12 bp, Artificial Sequence
  Oligonucleotide primer for the detection of SNP TSC0032923
ttgagatttgta

SEQ ID NO: 326124 - DNA, 12 bp, Artificial Sequence
  Oligonucleotide primer for the detection of SNP TSC0032923
ctaaaatctaca

SEQ ID NO: 326125 - DNA, 12 bp, Artificial Sequence
  Oligonucleotide primer for the detection of SNP TSC0032923
gtattgaaataa

SEQ ID NO: 326126 - DNA, 12 bp, Artificial Sequence
  Oligonucleotide primer for the detection of SNP TSC0032924
cctaaatctatt

SEQ ID NO: 326127 - DNA, 12 bp, Artificial Sequence
  Oligonucleotide primer for the detection of SNP TSC0032924
ttaaacctttta

SEQ ID NO: 326128 - DNA, 12 bp, Artificial Sequence
  Oligonucleotide primer for the detection of SNP TSC0032924
ttgagtttattc

SEQ ID NO: 326129 - DNA, 12 bp, Artificial Sequence
  Oligonucleotide primer for the detection of SNP TSC0032925
cttaaatcacac

SEQ ID NO: 326130 - DNA, 12 bp, Artificial Sequence
  Oligonucleotide primer for the detection of SNP TSC0032925
taattgatgtta

SEQ ID NO: 326131 - DNA, 12 bp, Artificial Sequence
  Oligonucleotide primer for the detection of SNP TSC0032929
caaactaatctc

SEQ ID NO: 326132 - DNA, 12 bp, Artificial Sequence
  Oligonucleotide primer for the detection of SNP TSC0032929
gagtttaggaag

SEQ ID NO: 326133 - DNA, 12 bp, Artificial Sequence
  Oligonucleotide primer for the detection of SNP TSC0032930
tgaaaatatttg

SEQ ID NO: 326134 - DNA, 12 bp, Artificial Sequence
  Oligonucleotide primer for the detection of SNP TSC0032930
cgaaaatatttg

SEQ ID NO: 326135 - DNA, 12 bp, Artificial Sequence
  Oligonucleotide primer for the detection of SNP TSC0032930
tgaaaatattcg

SEQ ID NO: 326136 - DNA, 12 bp, Artificial Sequence
  Oligonucleotide primer for the detection of SNP TSC0032930
cgaaaatattcg

SEQ ID NO: 326137 - DNA, 12 bp, Artificial Sequence
  Oligonucleotide primer for the detection of SNP TSC0032930
aaaatacccgaa

SEQ ID NO: 326138 - DNA, 12 bp, Artificial Sequence
  Oligonucleotide primer for the detection of SNP TSC0032931
aaataatattaa

SEQ ID NO: 326139 - DNA, 12 bp, Artificial Sequence
  Oligonucleotide primer for the detection of SNP TSC0032931
taggaggttatt

SEQ ID NO: 326140 - DNA, 12 bp, Artificial Sequence
  Oligonucleotide primer for the detection of SNP TSC0032931
taggtggtatta

SEQ ID NO: 326141 - DNA, 12 bp, Artificial Sequence
  Oligonucleotide primer for the detection of SNP TSC0032934
aactttcataat

SEQ ID NO: 326142 - DNA, 12 bp, Artificial Sequence
  Oligonucleotide primer for the detection of SNP TSC0032934
ttttgaattgag

SEQ ID NO: 326143 - DNA, 12 bp, Artificial Sequence
  Oligonucleotide primer for the detection of SNP TSC0032934
tttcgaattgag

SEQ ID NO: 326144 - DNA, 12 bp, Artificial Sequence
  Oligonucleotide primer for the detection of SNP TSC0032935
acctataaaaca

SEQ ID NO: 326145 - DNA, 12 bp, Artificial Sequence
  Oligonucleotide primer for the detection of SNP TSC0032935
tttttggtataa

SEQ ID NO: 326146 - DNA, 12 bp, Artificial Sequence
  Oligonucleotide primer for the detection of SNP TSC0032936
aatcacaatttc

SEQ ID NO: 326147 - DNA, 12 bp, Artificial Sequence
  Oligonucleotide primer for the detection of SNP TSC0032936
tttatattttaa

SEQ ID NO: 326148 - DNA, 12 bp, Artificial Sequence
  Oligonucleotide primer for the detection of SNP TSC0032936
cccacatcctaa

SEQ ID NO: 326149 - DNA, 12 bp, Artificial Sequence
  Oligonucleotide primer for the detection of SNP TSC0032937
aatgatatagaa

SEQ ID NO: 326150 - DNA, 12 bp, Artificial Sequence
  Oligonucleotide primer for the detection of SNP TSC0032938
tctataaaattt

SEQ ID NO: 326151 - DNA, 12 bp, Artificial Sequence
  Oligonucleotide primer for the detection of SNP TSC0032938
aagtttgtaatg

SEQ ID NO: 326152 - DNA, 12 bp, Artificial Sequence
  Oligonucleotide primer for the detection of SNP TSC0032938
aagtttgtaacg

SEQ ID NO: 326153 - DNA, 12 bp, Artificial Sequence
  Oligonucleotide primer for the detection of SNP TSC0032938
aaacctataaca

SEQ ID NO: 326154 - DNA, 12 bp, Artificial Sequence
  Oligonucleotide primer for the detection of SNP TSC0032938
aaacctataacg

SEQ ID NO: 326155 - DNA, 12 bp, Artificial Sequence
  Oligonucleotide primer for the detection of SNP TSC0032938
tttgtggggttt

SEQ ID NO: 326156 - DNA, 12 bp, Artificial Sequence
  Oligonucleotide primer for the detection of SNP TSC0032939
cctcttaataaa

SEQ ID NO: 326157 - DNA, 12 bp, Artificial Sequence
  Oligonucleotide primer for the detection of SNP TSC0032939
aattcatcttct

SEQ ID NO: 326158 - DNA, 12 bp, Artificial Sequence
  Oligonucleotide primer for the detection of SNP TSC0032939
ttttttaatggg

SEQ ID NO: 326159 - DNA, 12 bp, Artificial Sequence
  Oligonucleotide primer for the detection of SNP TSC0032940
cactacctatct

SEQ ID NO: 326160 - DNA, 12 bp, Artificial Sequence
  Oligonucleotide primer for the detection of SNP TSC0032940
cgctacctatct

SEQ ID NO: 326161 - DNA, 12 bp, Artificial Sequence
  Oligonucleotide primer for the detection of SNP TSC0032940
ttagggtgtagg

SEQ ID NO: 326162 - DNA, 12 bp, Artificial Sequence
  Oligonucleotide primer for the detection of SNP TSC0032941
actacactctta

SEQ ID NO: 326163 - DNA, 12 bp, Artificial Sequence
  Oligonucleotide primer for the detection of SNP TSC0032941
aaactctcccca

SEQ ID NO: 326164 - DNA, 12 bp, Artificial Sequence
  Oligonucleotide primer for the detection of SNP TSC0032941
gttgtatttttg

SEQ ID NO: 326165 - DNA, 12 bp, Artificial Sequence
  Oligonucleotide primer for the detection of SNP TSC0032942
caaaacccttta

SEQ ID NO: 326166 - DNA, 12 bp, Artificial Sequence
  Oligonucleotide primer for the detection of SNP TSC0032942
gttaaatttaaa

SEQ ID NO: 326167 - DNA, 12 bp, Artificial Sequence
  Oligonucleotide primer for the detection of SNP TSC0032942
atcaaacctaaa

SEQ ID NO: 326168 - DNA, 12 bp, Artificial Sequence
  Oligonucleotide primer for the detection of SNP TSC0032942
gtagaatttttt

SEQ ID NO: 326169 - DNA, 12 bp, Artificial Sequence
  Oligonucleotide primer for the detection of SNP TSC0032943
cccaaaattcca

SEQ ID NO: 326170 - DNA, 12 bp, Artificial Sequence
  Oligonucleotide primer for the detection of SNP TSC0032943
tctaaacatttt

SEQ ID NO: 326171 - DNA, 12 bp, Artificial Sequence
  Oligonucleotide primer for the detection of SNP TSC0032943
tttaagatttta

SEQ ID NO: 326172 - DNA, 12 bp, Artificial Sequence
  Oligonucleotide primer for the detection of SNP TSC0032944
ctaacctactcc

SEQ ID NO: 326173 - DNA, 12 bp, Artificial Sequence
  Oligonucleotide primer for the detection of SNP TSC0032944
ggttcggggttg

SEQ ID NO: 326174 - DNA, 12 bp, Artificial Sequence
  Oligonucleotide primer for the detection of SNP TSC0032946
acctaatatatt

SEQ ID NO: 326175 - DNA, 12 bp, Artificial Sequence
  Oligonucleotide primer for the detection of SNP TSC0032946
attttatgaagt

SEQ ID NO: 326176 - DNA, 12 bp, Artificial Sequence
  Oligonucleotide primer for the detection of SNP TSC0032946
actccataaaac

SEQ ID NO: 326177 - DNA, 12 bp, Artificial Sequence
  Oligonucleotide primer for the detection of SNP TSC0032946
atttggtgtgtt

SEQ ID NO: 326178 - DNA, 12 bp, Artificial Sequence
  Oligonucleotide primer for the detection of SNP TSC0032947
atatttttcact

SEQ ID NO: 326179 - DNA, 12 bp, Artificial Sequence
  Oligonucleotide primer for the detection of SNP TSC0032947
agtttttatttg

SEQ ID NO: 326180 - DNA, 12 bp, Artificial Sequence
  Oligonucleotide primer for the detection of SNP TSC0032948
ataaaaaacttt

SEQ ID NO: 326181 - DNA, 12 bp, Artificial Sequence
  Oligonucleotide primer for the detection of SNP TSC0032948
ttattagtttag

SEQ ID NO: 326182 - DNA, 12 bp, Artificial Sequence
  Oligonucleotide primer for the detection of SNP TSC0032949
ttaaattaattt

SEQ ID NO: 326183 - DNA, 12 bp, Artificial Sequence
  Oligonucleotide primer for the detection of SNP TSC0032949
agaataatatta

SEQ ID NO: 326184 - DNA, 12 bp, Artificial Sequence
  Oligonucleotide primer for the detection of SNP TSC0032949
aaaacaatacca

SEQ ID NO: 326185 - DNA, 12 bp, Artificial Sequence
  Oligonucleotide primer for the detection of SNP TSC0032949
tggattaatttt

SEQ ID NO: 326186 - DNA, 12 bp, Artificial Sequence
  Oligonucleotide primer for the detection of SNP TSC0032949
tggattaatttc

SEQ ID NO: 326187 - DNA, 12 bp, Artificial Sequence
  Oligonucleotide primer for the detection of SNP TSC0032950
acaaattatacc

SEQ ID NO: 326188 - DNA, 12 bp, Artificial Sequence
  Oligonucleotide primer for the detection of SNP TSC0032951
atataaacaaaa

SEQ ID NO: 326189 - DNA, 12 bp, Artificial Sequence
  Oligonucleotide primer for the detection of SNP TSC0032951
actactttacat

SEQ ID NO: 326190 - DNA, 12 bp, Artificial Sequence
  Oligonucleotide primer for the detection of SNP TSC0032951
gtataaatagaa

SEQ ID NO: 326191 - DNA, 12 bp, Artificial Sequence
  Oligonucleotide primer for the detection of SNP TSC0032952
tcaaataatcct

SEQ ID NO: 326192 - DNA, 12 bp, Artificial Sequence
  Oligonukleotid-Primer
aggttgaggggg

SEQ ID NO: 326193 - DNA, 12 bp, Artificial Sequence
  Oligonucleotide primer for the detection of SNP TSC0032953
ttaaccttaaac

SEQ ID NO: 326194 - DNA, 12 bp, Artificial Sequence
  Oligonucleotide primer for the detection of SNP TSC0032953
tcggtagattag

SEQ ID NO: 326195 - DNA, 12 bp, Artificial Sequence
  Oligonucleotide primer for the detection of SNP TSC0032957
ttaaccaaatta

SEQ ID NO: 326196 - DNA, 12 bp, Artificial Sequence
  Oligonukleotid-Primer
ttaaccgaatta

SEQ ID NO: 326197 - DNA, 12 bp, Artificial Sequence
  Oligonucleotide primer for the detection of SNP TSC0032957
gggggttttggt

SEQ ID NO: 326198 - DNA, 12 bp, Artificial Sequence
  Oligonucleotide primer for the detection of SNP TSC0032957
gggggtttcggt

SEQ ID NO: 326199 - DNA, 12 bp, Artificial Sequence
  Oligonucleotide primer for the detection of SNP TSC0032957
aaaaatcccaac

SEQ ID NO: 326200 - DNA, 12 bp, Artificial Sequence
  Oligonucleotide primer for the detection of SNP TSC0032957
aaaaatcccgac

SEQ ID NO: 326201 - DNA, 12 bp, Artificial Sequence
  Oligonucleotide primer for the detection of SNP TSC0032957
gaaaatcccaac

SEQ ID NO: 326202 - DNA, 12 bp, Artificial Sequence
  Oligonucleotide primer for the detection of SNP TSC0032957
gaaaatcccgac

SEQ ID NO: 326203 - DNA, 12 bp, Artificial Sequence
  Oligonucleotide primer for the detection of SNP TSC0032957
ttgattgagttg

SEQ ID NO: 326204 - DNA, 12 bp, Artificial Sequence
  Oligonucleotide primer for the detection of SNP TSC0032957
ttgatcgagttg

SEQ ID NO: 326205 - DNA, 12 bp, Artificial Sequence
  Oligonucleotide primer for the detection of SNP TSC0032958
acacaactcaat

SEQ ID NO: 326206 - DNA, 12 bp, Artificial Sequence
  Oligonucleotide primer for the detection of SNP TSC0032958
acacaactcgat

SEQ ID NO: 326207 - DNA, 12 bp, Artificial Sequence
  Oligonucleotide primer for the detection of SNP TSC0032958
ttgtttggggtg

SEQ ID NO: 326208 - DNA, 12 bp, Artificial Sequence
  Oligonucleotide primer for the detection of SNP TSC0032959
atttaataaaca

SEQ ID NO: 326209 - DNA, 12 bp, Artificial Sequence
  Oligonucleotide primer for the detection of SNP TSC0032959
ttgatatatagt

SEQ ID NO: 326210 - DNA, 12 bp, Artificial Sequence
  Oligonucleotide primer for the detection of SNP TSC0032959
taacacacaata

SEQ ID NO: 326211 - DNA, 12 bp, Artificial Sequence
  Oligonucleotide primer for the detection of SNP TSC0032959
tttaatgagtat

SEQ ID NO: 326212 - DNA, 12 bp, Artificial Sequence
  Oligonucleotide primer for the detection of SNP TSC0032960
ataaaattattc

SEQ ID NO: 326213 - DNA, 12 bp, Artificial Sequence
  Oligonucleotide primer for the detection of SNP TSC0032960
gtaaaattattc

SEQ ID NO: 326214 - DNA, 12 bp, Artificial Sequence
  Oligonucleotide primer for the detection of SNP TSC0032961
aaatcgtaaaat

SEQ ID NO: 326215 - DNA, 12 bp, Artificial Sequence
  Oligonucleotide primer for the detection of SNP TSC0032961
agtagaaagaat

SEQ ID NO: 326216 - DNA, 12 bp, Artificial Sequence
  Oligonucleotide primer for the detection of SNP TSC0032961
aagttgtgaaat

SEQ ID NO: 326217 - DNA, 12 bp, Artificial Sequence
  Oligonucleotide primer for the detection of SNP TSC0032961
aagtcgtgaaat

SEQ ID NO: 326218 - DNA, 12 bp, Artificial Sequence
  Oligonucleotide primer for the detection of SNP TSC0032962
cataaccctatc

SEQ ID NO: 326219 - DNA, 12 bp, Artificial Sequence
  Oligonucleotide primer for the detection of SNP TSC0032962
attttagagatg

SEQ ID NO: 326220 - DNA, 12 bp, Artificial Sequence
  Oligonucleotide primer for the detection of SNP TSC0032963
acctcaatttca

SEQ ID NO: 326221 - DNA, 12 bp, Artificial Sequence
  Oligonucleotide primer for the detection of SNP TSC0032963
gaataaaaggta

SEQ ID NO: 326222 - DNA, 12 bp, Artificial Sequence
  Oligonucleotide primer for the detection of SNP TSC0032964
atatcctaatta

SEQ ID NO: 326223 - DNA, 12 bp, Artificial Sequence
  Oligonucleotide primer for the detection of SNP TSC0032964
taatagagatat

SEQ ID NO: 326224 - DNA, 12 bp, Artificial Sequence
  Oligonucleotide primer for the detection of SNP TSC0032964
caacaaaaatat

SEQ ID NO: 326225 - DNA, 12 bp, Artificial Sequence
  Oligonucleotide primer for the detection of SNP TSC0032964
gtgttttggttg

SEQ ID NO: 326226 - DNA, 12 bp, Artificial Sequence
  Oligonucleotide primer for the detection of SNP TSC0032965
caaacaaaactc

SEQ ID NO: 326227 - DNA, 12 bp, Artificial Sequence
  Oligonucleotide primer for the detection of SNP TSC0032965
ttttatgtatga

SEQ ID NO: 326228 - DNA, 12 bp, Artificial Sequence
  Oligonucleotide primer for the detection of SNP TSC0032966
aaactaaaaccc

SEQ ID NO: 326229 - DNA, 12 bp, Artificial Sequence
  Oligonucleotide primer for the detection of SNP TSC0032966
attaagggttgg

SEQ ID NO: 326230 - DNA, 12 bp, Artificial Sequence
  Oligonucleotide primer for the detection of SNP TSC0032967
aataacctacca

SEQ ID NO: 326231 - DNA, 12 bp, Artificial Sequence
  Oligonucleotide primer for the detection of SNP TSC0032967
tgtatgtttatt

SEQ ID NO: 326232 - DNA, 12 bp, Artificial Sequence
  Oligonucleotide primer for the detection of SNP TSC0032967
atacatacttac

SEQ ID NO: 326233 - DNA, 12 bp, Artificial Sequence
  Oligonucleotide primer for the detection of SNP TSC0032967
tagtagtttatt

SEQ ID NO: 326234 - DNA, 12 bp, Artificial Sequence
  Oligonucleotide primer for the detection of SNP TSC0032968
aaactattacct

SEQ ID NO: 326235 - DNA, 12 bp, Artificial Sequence
  Oligonucleotide primer for the detection of SNP TSC0032968
atggttaggata

SEQ ID NO: 326236 - DNA, 12 bp, Artificial Sequence
  Oligonucleotide primer for the detection of SNP TSC0032971
taatatcaactc

SEQ ID NO: 326237 - DNA, 12 bp, Artificial Sequence
  Oligonucleotide primer for the detection of SNP TSC0032971
aaggaaattgaa

SEQ ID NO: 326238 - DNA, 12 bp, Artificial Sequence
  Oligonucleotide primer for the detection of SNP TSC0032971
tggtgttaattt

SEQ ID NO: 326239 - DNA, 12 bp, Artificial Sequence
  Oligonucleotide primer for the detection of SNP TSC0032972
aattacactatt

SEQ ID NO: 326240 - DNA, 12 bp, Artificial Sequence
  Oligonucleotide primer for the detection of SNP TSC0032972
gaattttagtaa

SEQ ID NO: 326241 - DNA, 12 bp, Artificial Sequence
  Oligonucleotide primer for the detection of SNP TSC0032975
atctcttccatc

SEQ ID NO: 326242 - DNA, 12 bp, Artificial Sequence
  Oligonucleotide primer for the detection of SNP TSC0032975
aagtagaaaggg

SEQ ID NO: 326243 - DNA, 12 bp, Artificial Sequence
  Oligonucleotide primer for the detection of SNP TSC0032976
atctcaaaaatt

SEQ ID NO: 326244 - DNA, 12 bp, Artificial Sequence
  Oligonucleotide primer for the detection of SNP TSC0032978
ctcctctaaatc

SEQ ID NO: 326245 - DNA, 12 bp, Artificial Sequence
  Oligonucleotide primer for the detection of SNP TSC0032978
tataattatgtg

SEQ ID NO: 326246 - DNA, 12 bp, Artificial Sequence
  Oligonucleotide primer for the detection of SNP TSC0032978
tataattatgcg

SEQ ID NO: 326247 - DNA, 12 bp, Artificial Sequence
  Oligonucleotide primer for the detection of SNP TSC0032979
aattaaacaaaa

SEQ ID NO: 326248 - DNA, 12 bp, Artificial Sequence
  Oligonucleotide primer for the detection of SNP TSC0032979
aaattatttttt

SEQ ID NO: 326249 - DNA, 12 bp, Artificial Sequence
  Oligonucleotide primer for the detection of SNP TSC0032979
aactattttcta

SEQ ID NO: 326250 - DNA, 12 bp, Artificial Sequence
  Oligonucleotide primer for the detection of SNP TSC0032979
attaaataaaat

SEQ ID NO: 326251 - DNA, 12 bp, Artificial Sequence
  Oligonucleotide primer for the detection of SNP TSC0032980
cctttcccattc

SEQ ID NO: 326252 - DNA, 12 bp, Artificial Sequence
  Oligonucleotide primer for the detection of SNP TSC0032980
cctttcccgttc

SEQ ID NO: 326253 - DNA, 12 bp, Artificial Sequence
  Oligonucleotide primer for the detection of SNP TSC0032980
tttttgaaagag

SEQ ID NO: 326254 - DNA, 12 bp, Artificial Sequence
  Oligonucleotide primer for the detection of SNP TSC0032980
ttttttcgtttt

SEQ ID NO: 326255 - DNA, 12 bp, Artificial Sequence
  Oligonucleotide primer for the detection of SNP TSC0032981
ccactcctaact

SEQ ID NO: 326256 - DNA, 12 bp, Artificial Sequence
  Oligonucleotide primer for the detection of SNP TSC0032981
ccgctcctaact

SEQ ID NO: 326257 - DNA, 12 bp, Artificial Sequence
  Oligonucleotide primer for the detection of SNP TSC0032981
gtttaaggtggg

SEQ ID NO: 326258 - DNA, 12 bp, Artificial Sequence
  Oligonucleotide primer for the detection of SNP TSC0032982
ttatcatattac

SEQ ID NO: 326259 - DNA, 12 bp, Artificial Sequence
  Oligonucleotide primer for the detection of SNP TSC0032982
aagattaatttg

SEQ ID NO: 326260 - DNA, 12 bp, Artificial Sequence
  Oligonucleotide primer for the detection of SNP TSC0032982
aaaaccaaccta

SEQ ID NO: 326261 - DNA, 12 bp, Artificial Sequence
  Oligonucleotide primer for the detection of SNP TSC0032982
ttgttatgttgt

SEQ ID NO: 326262 - DNA, 12 bp, Artificial Sequence
  Oligonucleotide primer for the detection of SNP TSC0032983
ctatattaaaat

SEQ ID NO: 326263 - DNA, 12 bp, Artificial Sequence
  Oligonucleotide primer for the detection of SNP TSC0032983
ataattagttta

SEQ ID NO: 326264 - DNA, 12 bp, Artificial Sequence
  Oligonucleotide primer for the detection of SNP TSC0032983
ataattaactta

SEQ ID NO: 326265 - DNA, 12 bp, Artificial Sequence
  Oligonucleotide primer for the detection of SNP TSC0032983
ttgtattggaat

SEQ ID NO: 326266 - DNA, 12 bp, Artificial Sequence
  Oligonucleotide primer for the detection of SNP TSC0032984
taaaaaacaaat

SEQ ID NO: 326267 - DNA, 12 bp, Artificial Sequence
  Oligonucleotide primer for the detection of SNP TSC0032984
taaaaaacgaat

SEQ ID NO: 326268 - DNA, 12 bp, Artificial Sequence
  Oligonucleotide primer for the detection of SNP TSC0032985
ctcctttatatc

SEQ ID NO: 326269 - DNA, 12 bp, Artificial Sequence
  Oligonucleotide primer for the detection of SNP TSC0032988
aatcattatttc

SEQ ID NO: 326270 - DNA, 12 bp, Artificial Sequence
  Oligonucleotide primer for the detection of SNP TSC0032988
attatttgttaa

SEQ ID NO: 326271 - DNA, 12 bp, Artificial Sequence
  Oligonucleotide primer for the detection of SNP TSC0032989
cacacacacacc

SEQ ID NO: 326272 - DNA, 12 bp, Artificial Sequence
  Oligonucleotide primer for the detection of SNP TSC0032989
aaataggattag

SEQ ID NO: 326273 - DNA, 12 bp, Artificial Sequence
  Oligonucleotide primer for the detection of SNP TSC0032990
atggattttatt

SEQ ID NO: 326274 - DNA, 12 bp, Artificial Sequence
  Oligonucleotide primer for the detection of SNP TSC0032991
ttaatttgaatt

SEQ ID NO: 326275 - DNA, 12 bp, Artificial Sequence
  Oligonucleotide primer for the detection of SNP TSC0032991
caacttaaatta

SEQ ID NO: 326276 - DNA, 12 bp, Artificial Sequence
  Oligonucleotide primer for the detection of SNP TSC0032991
attttgggagat

SEQ ID NO: 326277 - DNA, 12 bp, Artificial Sequence
  Oligonucleotide primer for the detection of SNP TSC0032992
cacataaaaatt

SEQ ID NO: 326278 - DNA, 12 bp, Artificial Sequence
  Oligonucleotide primer for the detection of SNP TSC0032992
ttgaatttttta

SEQ ID NO: 326279 - DNA, 12 bp, Artificial Sequence
  Oligonucleotide primer for the detection of SNP TSC0032993
ataacaacctct

SEQ ID NO: 326280 - DNA, 12 bp, Artificial Sequence
  Oligonucleotide primer for the detection of SNP TSC0032994
atacatttaaaa

SEQ ID NO: 326281 - DNA, 12 bp, Artificial Sequence
  Oligonucleotide primer for the detection of SNP TSC0032994
atacgtttaaaa

SEQ ID NO: 326282 - DNA, 12 bp, Artificial Sequence
  Oligonucleotide primer for the detection of SNP TSC0032994
aaggttatattg

SEQ ID NO: 326283 - DNA, 12 bp, Artificial Sequence
  Oligonucleotide primer for the detection of SNP TSC0032994
aaaatcacacta

SEQ ID NO: 326284 - DNA, 12 bp, Artificial Sequence
  Oligonucleotide primer for the detection of SNP TSC0032994
tgtgtttggggt

SEQ ID NO: 326285 - DNA, 12 bp, Artificial Sequence
  Oligonucleotide primer for the detection of SNP TSC0032994
tgcgtttggggt

SEQ ID NO: 326286 - DNA, 12 bp, Artificial Sequence
  Oligonucleotide primer for the detection of SNP TSC0032995
atagaatggtta

SEQ ID NO: 326287 - DNA, 12 bp, Artificial Sequence
  Oligonucleotide primer for the detection of SNP TSC0032996
tggtgtgtttgg

SEQ ID NO: 326288 - DNA, 12 bp, Artificial Sequence
  Oligonucleotide primer for the detection of SNP TSC0032996
taatatacctaa

SEQ ID NO: 326289 - DNA, 12 bp, Artificial Sequence
  Oligonucleotide primer for the detection of SNP TSC0032996
gttattggggat

SEQ ID NO: 326290 - DNA, 12 bp, Artificial Sequence
  Oligonucleotide primer for the detection of SNP TSC0032997
ctaactcaaata

SEQ ID NO: 326291 - DNA, 12 bp, Artificial Sequence
  Oligonucleotide primer for the detection of SNP TSC0032997
tctccttcaata

SEQ ID NO: 326292 - DNA, 12 bp, Artificial Sequence
  Oligonucleotide primer for the detection of SNP TSC0032997
ggtttaaatgtt

SEQ ID NO: 326293 - DNA, 12 bp, Artificial Sequence
  Oligonucleotide primer for the detection of SNP TSC0033000
accaataaccac

SEQ ID NO: 326294 - DNA, 12 bp, Artificial Sequence
  Oligonucleotide primer for the detection of SNP TSC0033000
accaataaccgc

SEQ ID NO: 326295 - DNA, 12 bp, Artificial Sequence
  Oligonucleotide primer for the detection of SNP TSC0033000
atatttaataat

SEQ ID NO: 326296 - DNA, 12 bp, Artificial Sequence
  Oligonucleotide primer for the detection of SNP TSC0033000
atatttaataac

SEQ ID NO: 326297 - DNA, 12 bp, Artificial Sequence
  Oligonukleotid-Primer
acattcaacaac

SEQ ID NO: 326298 - DNA, 12 bp, Artificial Sequence
  Oligonucleotide primer for the detection of SNP TSC0033000
attagtggttgt

SEQ ID NO: 326299 - DNA, 12 bp, Artificial Sequence
  Oligonucleotide primer for the detection of SNP TSC0033000
attagtggtcgt

SEQ ID NO: 326300 - DNA, 12 bp, Artificial Sequence
  Oligonucleotide primer for the detection of SNP TSC0033001
aaataacatatt

SEQ ID NO: 326301 - DNA, 12 bp, Artificial Sequence
  Oligonukleotid-Primer
ttttttaaataa

SEQ ID NO: 326302 - DNA, 12 bp, Artificial Sequence
  Oligonucleotide primer for the detection of SNP TSC0033003
tctttctaaaaa

SEQ ID NO: 326303 - DNA, 12 bp, Artificial Sequence
  Oligonucleotide primer for the detection of SNP TSC0033003
attgagggagat

SEQ ID NO: 326304 - DNA, 12 bp, Artificial Sequence
  Oligonucleotide primer for the detection of SNP TSC0033004
ccttaaaaacaa

SEQ ID NO: 326305 - DNA, 12 bp, Artificial Sequence
  Oligonukleotid-Primer
tgggattagttt

SEQ ID NO: 326306 - DNA, 12 bp, Artificial Sequence
  Oligonucleotide primer for the detection of SNP TSC0033004
taaaaccaactt

SEQ ID NO: 326307 - DNA, 12 bp, Artificial Sequence
  Oligonucleotide primer for the detection of SNP TSC0033004
ttttggggataa

SEQ ID NO: 326308 - DNA, 12 bp, Artificial Sequence
  Oligonucleotide primer for the detection of SNP TSC0033005
ttcccaaacaat

SEQ ID NO: 326309 - DNA, 12 bp, Artificial Sequence
  Oligonucleotide primer for the detection of SNP TSC0033005
ataagatgaata

SEQ ID NO: 326310 - DNA, 12 bp, Artificial Sequence
  Oligonucleotide primer for the detection of SNP TSC0033005
tttttagatagt

SEQ ID NO: 326311 - DNA, 12 bp, Artificial Sequence
  Oligonucleotide primer for the detection of SNP TSC0033007
cccacaaacttt

SEQ ID NO: 326312 - DNA, 12 bp, Artificial Sequence
  Oligonucleotide primer for the detection of SNP TSC0033007
gttattgaaaaa

SEQ ID NO: 326313 - DNA, 12 bp, Artificial Sequence
  Oligonukleotid-Primer
atcataccatta

SEQ ID NO: 326314 - DNA, 12 bp, Artificial Sequence
  Oligonucleotide primer for the detection of SNP TSC0033010
atcgtaccatta

SEQ ID NO: 326315 - DNA, 12 bp, Artificial Sequence
  Oligonucleotide primer for the detection of SNP TSC0033010
aggttggagcgt

SEQ ID NO: 326316 - DNA, 12 bp, Artificial Sequence
  Oligonucleotide primer for the detection of SNP TSC0033010
aaactaaaacac

SEQ ID NO: 326317 - DNA, 12 bp, Artificial Sequence
  Oligonucleotide primer for the detection of SNP TSC0033010
aaactaaaacgc

SEQ ID NO: 326318 - DNA, 12 bp, Artificial Sequence
  Oligonucleotide primer for the detection of SNP TSC0033011
aaatctaccccc

SEQ ID NO: 326319 - DNA, 12 bp, Artificial Sequence
  Oligonucleotide primer for the detection of SNP TSC0033011
gaggaggtgggt

SEQ ID NO: 326320 - DNA, 12 bp, Artificial Sequence
  Oligonucleotide primer for the detection of SNP TSC0033011
agatttgttttt

SEQ ID NO: 326321 - DNA, 12 bp, Artificial Sequence
  Oligonucleotide primer for the detection of SNP TSC0033015
cccaaccaaaaa

SEQ ID NO: 326322 - DNA, 12 bp, Artificial Sequence
  Oligonucleotide primer for the detection of SNP TSC0033015
cccaaccgaaaa

SEQ ID NO: 326323 - DNA, 12 bp, Artificial Sequence
  Oligonucleotide primer for the detection of SNP TSC0033015
gtaggtagtggt

SEQ ID NO: 326324 - DNA, 12 bp, Artificial Sequence
  Oligonucleotide primer for the detection of SNP TSC0033015
gtaggtagcggt

SEQ ID NO: 326325 - DNA, 12 bp, Artificial Sequence
  Oligonucleotide primer for the detection of SNP TSC0033015
acaaataacaac

SEQ ID NO: 326326 - DNA, 12 bp, Artificial Sequence
  Oligonucleotide primer for the detection of SNP TSC0033015
acaaataacgac

SEQ ID NO: 326327 - DNA, 12 bp, Artificial Sequence
  Oligonucleotide primer for the detection of SNP TSC0033015
tttagttgaggg

SEQ ID NO: 326328 - DNA, 12 bp, Artificial Sequence
  Oligonucleotide primer for the detection of SNP TSC0033015
tttagtcgaggg

SEQ ID NO: 326329 - DNA, 12 bp, Artificial Sequence
  Oligonucleotide primer for the detection of SNP TSC0033016
ggaaaaaatgta

SEQ ID NO: 326330 - DNA, 12 bp, Artificial Sequence
  Oligonucleotide primer for the detection of SNP TSC0033018
cttcttcaaaac

SEQ ID NO: 326331 - DNA, 12 bp, Artificial Sequence
  Oligonucleotide primer for the detection of SNP TSC0033018
ttttatttgtgg

SEQ ID NO: 326332 - DNA, 12 bp, Artificial Sequence
  Oligonucleotide primer for the detection of SNP TSC0033018
ttttattcgtgg

SEQ ID NO: 326333 - DNA, 12 bp, Artificial Sequence
  Oligonucleotide primer for the detection of SNP TSC0033019
actaattccttc

SEQ ID NO: 326334 - DNA, 12 bp, Artificial Sequence
  Oligonucleotide primer for the detection of SNP TSC0033019
gctaattccttc

SEQ ID NO: 326335 - DNA, 12 bp, Artificial Sequence
  Oligonucleotide primer for the detection of SNP TSC0033019
ggttttgtttta

SEQ ID NO: 326336 - DNA, 12 bp, Artificial Sequence
  Oligonucleotide primer for the detection of SNP TSC0033023
ttattaagagta

SEQ ID NO: 326337 - DNA, 12 bp, Artificial Sequence
  Oligonucleotide primer for the detection of SNP TSC0033024
tatttcatataa

SEQ ID NO: 326338 - DNA, 12 bp, Artificial Sequence
  Oligonucleotide primer for the detection of SNP TSC0033024
tttaatataata

SEQ ID NO: 326339 - DNA, 12 bp, Artificial Sequence
  Oligonucleotide primer for the detection of SNP TSC0033024
cctaatataaca

SEQ ID NO: 326340 - DNA, 12 bp, Artificial Sequence
  Oligonucleotide primer for the detection of SNP TSC0033024
attttatgtaat

SEQ ID NO: 326341 - DNA, 12 bp, Artificial Sequence
  Oligonucleotide primer for the detection of SNP TSC0033024
attttatgtaac

SEQ ID NO: 326342 - DNA, 12 bp, Artificial Sequence
  Oligonucleotide primer for the detection of SNP TSC0033025
actttttcatat

SEQ ID NO: 326343 - DNA, 12 bp, Artificial Sequence
  Oligonucleotide primer for the detection of SNP TSC0033025
cttttttcaata

SEQ ID NO: 326344 - DNA, 12 bp, Artificial Sequence
  Oligonucleotide primer for the detection of SNP TSC0033027
acttccaccaac

SEQ ID NO: 326345 - DNA, 12 bp, Artificial Sequence
  Oligonucleotide primer for the detection of SNP TSC0033027
acttccaccgac

SEQ ID NO: 326346 - DNA, 12 bp, Artificial Sequence
  Oligonucleotide primer for the detection of SNP TSC0033027
tatatattttac

SEQ ID NO: 326347 - DNA, 12 bp, Artificial Sequence
  Oligonucleotide primer for the detection of SNP TSC0033027
cacatatcccac

SEQ ID NO: 326348 - DNA, 12 bp, Artificial Sequence
  Oligonucleotide primer for the detection of SNP TSC0033027
gtttttattggt

SEQ ID NO: 326349 - DNA, 12 bp, Artificial Sequence
  Oligonucleotide primer for the detection of SNP TSC0033027
gtttttatcggt

SEQ ID NO: 326350 - DNA, 12 bp, Artificial Sequence
  Oligonucleotide primer for the detection of SNP TSC0033027
gtttttattggc

SEQ ID NO: 326351 - DNA, 12 bp, Artificial Sequence
  Oligonucleotide primer for the detection of SNP TSC0033027
gtttttatcggc

SEQ ID NO: 326352 - DNA, 12 bp, Artificial Sequence
  Oligonucleotide primer for the detection of SNP TSC0033031
ctataaataatt

SEQ ID NO: 326353 - DNA, 12 bp, Artificial Sequence
  Oligonucleotide primer for the detection of SNP TSC0033031
gtggggggggga

SEQ ID NO: 326354 - DNA, 12 bp, Artificial Sequence
  Oligonucleotide primer for the detection of SNP TSC0033031
gcggggggggga

SEQ ID NO: 326355 - DNA, 12 bp, Artificial Sequence
  Oligonucleotide primer for the detection of SNP TSC0033033
aaaccctaaaaa

SEQ ID NO: 326356 - DNA, 12 bp, Artificial Sequence
  Oligonucleotide primer for the detection of SNP TSC0033033
atgtttttaaat

SEQ ID NO: 326357 - DNA, 12 bp, Artificial Sequence
  Oligonucleotide primer for the detection of SNP TSC0033033
acgtttttaaat

SEQ ID NO: 326358 - DNA, 12 bp, Artificial Sequence
  Oligonucleotide primer for the detection of SNP TSC0033033
actttcaaataa

SEQ ID NO: 326359 - DNA, 12 bp, Artificial Sequence
  Oligonucleotide primer for the detection of SNP TSC0033033
gctttcaaataa

SEQ ID NO: 326360 - DNA, 12 bp, Artificial Sequence
  Oligonucleotide primer for the detection of SNP TSC0033033
agttttgggagt

SEQ ID NO: 326361 - DNA, 12 bp, Artificial Sequence
  Oligonucleotide primer for the detection of SNP TSC0033035
tatctcccatta

SEQ ID NO: 326362 - DNA, 12 bp, Artificial Sequence
  Oligonucleotide primer for the detection of SNP TSC0033035
tatctcccgtta

SEQ ID NO: 326363 - DNA, 12 bp, Artificial Sequence
  Oligonucleotide primer for the detection of SNP TSC0033035
ttgtagattttg

SEQ ID NO: 326364 - DNA, 12 bp, Artificial Sequence
  Oligonucleotide primer for the detection of SNP TSC0033035
ttacaaacctta

SEQ ID NO: 326365 - DNA, 12 bp, Artificial Sequence
  Oligonucleotide primer for the detection of SNP TSC0033036
aacttctaaaac

SEQ ID NO: 326366 - DNA, 12 bp, Artificial Sequence
  Oligonucleotide primer for the detection of SNP TSC0033038
ctaaaaccaaat

SEQ ID NO: 326367 - DNA, 12 bp, Artificial Sequence
  Oligonucleotide primer for the detection of SNP TSC0033038
tgtttggtagag

SEQ ID NO: 326368 - DNA, 12 bp, Artificial Sequence
  Oligonucleotide primer for the detection of SNP TSC0033039
taactctctccc

SEQ ID NO: 326369 - DNA, 12 bp, Artificial Sequence
  Oligonucleotide primer for the detection of SNP TSC0033039
ttttagttgtta

SEQ ID NO: 326370 - DNA, 12 bp, Artificial Sequence
  Oligonucleotide primer for the detection of SNP TSC0033039
ctctaactacta

SEQ ID NO: 326371 - DNA, 12 bp, Artificial Sequence
  Oligonucleotide primer for the detection of SNP TSC0033040
tctactcttaat

SEQ ID NO: 326372 - DNA, 12 bp, Artificial Sequence
  Oligonucleotide primer for the detection of SNP TSC0033040
atataatgaaga

SEQ ID NO: 326373 - DNA, 12 bp, Artificial Sequence
  Oligonucleotide primer for the detection of SNP TSC0033044
aatacaaaccta

SEQ ID NO: 326374 - DNA, 12 bp, Artificial Sequence
  Oligonucleotide primer for the detection of SNP TSC0033044
aaattaggtatt

SEQ ID NO: 326375 - DNA, 12 bp, Artificial Sequence
  Oligonucleotide primer for the detection of SNP TSC0033044
aaactaaatact

SEQ ID NO: 326376 - DNA, 12 bp, Artificial Sequence
  Oligonucleotide primer for the detection of SNP TSC0033044
agtgtaagttta

SEQ ID NO: 326377 - DNA, 12 bp, Artificial Sequence
  Oligonucleotide primer for the detection of SNP TSC0033045
acttaaacccaa

SEQ ID NO: 326378 - DNA, 12 bp, Artificial Sequence
  Oligonucleotide primer for the detection of SNP TSC0033045
gcttaaacccaa

SEQ ID NO: 326379 - DNA, 12 bp, Artificial Sequence
  Oligonucleotide primer for the detection of SNP TSC0033048
tacaataaaaca

SEQ ID NO: 326380 - DNA, 12 bp, Artificial Sequence
  Oligonucleotide primer for the detection of SNP TSC0033048
taatattcatac

SEQ ID NO: 326381 - DNA, 12 bp, Artificial Sequence
  Oligonucleotide primer for the detection of SNP TSC0033048
atgtaatagggt

SEQ ID NO: 326382 - DNA, 12 bp, Artificial Sequence
  Oligonucleotide primer for the detection of SNP TSC0033049
taaatattacaa

SEQ ID NO: 326383 - DNA, 12 bp, Artificial Sequence
  Oligonucleotide primer for the detection of SNP TSC0033049
ggtttttatgat

SEQ ID NO: 326384 - DNA, 12 bp, Artificial Sequence
  Oligonucleotide primer for the detection of SNP TSC0033049
aattcttataat

SEQ ID NO: 326385 - DNA, 12 bp, Artificial Sequence
  Oligonucleotide primer for the detection of SNP TSC0033049
agatgttataat

SEQ ID NO: 326386 - DNA, 12 bp, Artificial Sequence
  Oligonucleotide primer for the detection of SNP TSC0033050
tagaaaaataaa

SEQ ID NO: 326387 - DNA, 12 bp, Artificial Sequence
  Oligonucleotide primer for the detection of SNP TSC0033051
taaacttccctc

SEQ ID NO: 326388 - DNA, 12 bp, Artificial Sequence
  Oligonucleotide primer for the detection of SNP TSC0033051
gtaagttttatg

SEQ ID NO: 326389 - DNA, 12 bp, Artificial Sequence
  Oligonucleotide primer for the detection of SNP TSC0033051
acaaattttata

SEQ ID NO: 326390 - DNA, 12 bp, Artificial Sequence
  Oligonucleotide primer for the detection of SNP TSC0033053
aaataactttac

SEQ ID NO: 326391 - DNA, 12 bp, Artificial Sequence
  Oligonucleotide primer for the detection of SNP TSC0033053
ttttgtttagtt

SEQ ID NO: 326392 - DNA, 12 bp, Artificial Sequence
  Oligonucleotide primer for the detection of SNP TSC0033053
tctatccaatca

SEQ ID NO: 326393 - DNA, 12 bp, Artificial Sequence
  Oligonucleotide primer for the detection of SNP TSC0033053
agatggttttgt

SEQ ID NO: 326394 - DNA, 12 bp, Artificial Sequence
  Oligonucleotide primer for the detection of SNP TSC0033053
agatggttttgc

SEQ ID NO: 326395 - DNA, 12 bp, Artificial Sequence
  Oligonucleotide primer for the detection of SNP TSC0033054
ggtttttattag

SEQ ID NO: 326396 - DNA, 12 bp, Artificial Sequence
  Oligonucleotide primer for the detection of SNP TSC0033055
aactcccatcta

SEQ ID NO: 326397 - DNA, 12 bp, Artificial Sequence
  Oligonucleotide primer for the detection of SNP TSC0033055
ccttttcctaca

SEQ ID NO: 326398 - DNA, 12 bp, Artificial Sequence
  Oligonucleotide primer for the detection of SNP TSC0033055
agatttttattt

SEQ ID NO: 326399 - DNA, 12 bp, Artificial Sequence
  Oligonucleotide primer for the detection of SNP TSC0033056
aactcctaccac

SEQ ID NO: 326400 - DNA, 12 bp, Artificial Sequence
  Oligonucleotide primer for the detection of SNP TSC0033056
gatgatggttag

SEQ ID NO: 326401 - DNA, 12 bp, Artificial Sequence
  Oligonucleotide primer for the detection of SNP TSC0033056
ataataattaaa

SEQ ID NO: 326402 - DNA, 12 bp, Artificial Sequence
  Oligonucleotide primer for the detection of SNP TSC0033057
tctacaataatt

SEQ ID NO: 326403 - DNA, 12 bp, Artificial Sequence
  Oligonucleotide primer for the detection of SNP TSC0033057
gttggtaaggta

SEQ ID NO: 326404 - DNA, 12 bp, Artificial Sequence
  Oligonucleotide primer for the detection of SNP TSC0033058
aacccattcctc

SEQ ID NO: 326405 - DNA, 12 bp, Artificial Sequence
  Oligonucleotide primer for the detection of SNP TSC0033058
taattattgtag

SEQ ID NO: 326406 - DNA, 12 bp, Artificial Sequence
  Oligonucleotide primer for the detection of SNP TSC0033059
ctctctccctcc

SEQ ID NO: 326407 - DNA, 12 bp, Artificial Sequence
  Oligonucleotide primer for the detection of SNP TSC0033059
gtggtggagatg

SEQ ID NO: 326408 - DNA, 12 bp, Artificial Sequence
  Oligonucleotide primer for the detection of SNP TSC0033059
gtggtggagacg

SEQ ID NO: 326409 - DNA, 12 bp, Artificial Sequence
  Oligonucleotide primer for the detection of SNP TSC0033060
ttatgttattgg

SEQ ID NO: 326410 - DNA, 12 bp, Artificial Sequence
  Oligonucleotide primer for the detection of SNP TSC0033060
ccataccactaa

SEQ ID NO: 326411 - DNA, 12 bp, Artificial Sequence
  Oligonucleotide primer for the detection of SNP TSC0033060
gaggtttgagat

SEQ ID NO: 326412 - DNA, 12 bp, Artificial Sequence
  Oligonucleotide primer for the detection of SNP TSC0033062
gttttatgtttt

SEQ ID NO: 326413 - DNA, 12 bp, Artificial Sequence
  Oligonucleotide primer for the detection of SNP TSC0033062
ctaaactctata

SEQ ID NO: 326414 - DNA, 12 bp, Artificial Sequence
  Oligonucleotide primer for the detection of SNP TSC0033062
atgaaaatgtat

SEQ ID NO: 326415 - DNA, 12 bp, Artificial Sequence
  Oligonucleotide primer for the detection of SNP TSC0033063
aagtatatgtaa

SEQ ID NO: 326416 - DNA, 12 bp, Artificial Sequence
  Oligonucleotide primer for the detection of SNP TSC0033068
acaatccctttc

SEQ ID NO: 326417 - DNA, 12 bp, Artificial Sequence
  Oligonucleotide primer for the detection of SNP TSC0033068
acgatccctttc

SEQ ID NO: 326418 - DNA, 12 bp, Artificial Sequence
  Oligonucleotide primer for the detection of SNP TSC0033068
ttaatagaaaga

SEQ ID NO: 326419 - DNA, 12 bp, Artificial Sequence
  Oligonucleotide primer for the detection of SNP TSC0033069
caaacacttata

SEQ ID NO: 326420 - DNA, 12 bp, Artificial Sequence
  Oligonucleotide primer for the detection of SNP TSC0033069
ttatttataaaa

SEQ ID NO: 326421 - DNA, 12 bp, Artificial Sequence
  Oligonucleotide primer for the detection of SNP TSC0033069
ctatccacaaaa

SEQ ID NO: 326422 - DNA, 12 bp, Artificial Sequence
  Oligonukleotid-Primer
gtagatatttgt

SEQ ID NO: 326423 - DNA, 12 bp, Artificial Sequence
  Oligonucleotide primer for the detection of SNP TSC0033071
tatctcctaaat

SEQ ID NO: 326424 - DNA, 12 bp, Artificial Sequence
  Oligonucleotide primer for the detection of SNP TSC0033071
ggagaattgttt

SEQ ID NO: 326425 - DNA, 12 bp, Artificial Sequence
  Oligonucleotide primer for the detection of SNP TSC0033072
ttaaaattagta

SEQ ID NO: 326426 - DNA, 12 bp, Artificial Sequence
  Oligonucleotide primer for the detection of SNP TSC0033073
tatataccacct

SEQ ID NO: 326427 - DNA, 12 bp, Artificial Sequence
  Oligonucleotide primer for the detection of SNP TSC0033073
atggttttttgg

SEQ ID NO: 326428 - DNA, 12 bp, Artificial Sequence
  Oligonucleotide primer for the detection of SNP TSC0033073
ataaccccttaa

SEQ ID NO: 326429 - DNA, 12 bp, Artificial Sequence
  Oligonucleotide primer for the detection of SNP TSC0033073
tgtatattattt

SEQ ID NO: 326430 - DNA, 12 bp, Artificial Sequence
  Oligonukleotid-Primer
accatctccacc

SEQ ID NO: 326431 - DNA, 12 bp, Artificial Sequence
  Oligonucleotide primer for the detection of SNP TSC0033074
gtttagggatga

SEQ ID NO: 326432 - DNA, 12 bp, Artificial Sequence
  Oligonucleotide primer for the detection of SNP TSC0033075
aacataaccaaa

SEQ ID NO: 326433 - DNA, 12 bp, Artificial Sequence
  Oligonucleotide primer for the detection of SNP TSC0033075
aacataaccgaa

SEQ ID NO: 326434 - DNA, 12 bp, Artificial Sequence
  Oligonucleotide primer for the detection of SNP TSC0033075
aacgtaaccaaa

SEQ ID NO: 326435 - DNA, 12 bp, Artificial Sequence
  Oligonucleotide primer for the detection of SNP TSC0033075
aacgtaaccgaa

SEQ ID NO: 326436 - DNA, 12 bp, Artificial Sequence
  Oligonucleotide primer for the detection of SNP TSC0033075
agtgtgttgagt

SEQ ID NO: 326437 - DNA, 12 bp, Artificial Sequence
  Oligonucleotide primer for the detection of SNP TSC0033075
aatatactaaat

SEQ ID NO: 326438 - DNA, 12 bp, Artificial Sequence
  Oligonucleotide primer for the detection of SNP TSC0033075
agtgtggttgag

SEQ ID NO: 326439 - DNA, 12 bp, Artificial Sequence
  Oligonucleotide primer for the detection of SNP TSC0033075
agcgtggttgag

SEQ ID NO: 326440 - DNA, 12 bp, Artificial Sequence
  Oligonucleotide primer for the detection of SNP TSC0033075
agtgtggtcgag

SEQ ID NO: 326441 - DNA, 12 bp, Artificial Sequence
  Oligonucleotide primer for the detection of SNP TSC0033075
agcgtggtcgag

SEQ ID NO: 326442 - DNA, 12 bp, Artificial Sequence
  Oligonucleotide primer for the detection of SNP TSC0033077
taactcttaact

SEQ ID NO: 326443 - DNA, 12 bp, Artificial Sequence
  Oligonucleotide primer for the detection of SNP TSC0033077
gttttaattgag

SEQ ID NO: 326444 - DNA, 12 bp, Artificial Sequence
  Oligonucleotide primer for the detection of SNP TSC0033078
ccttaaccaaaa

SEQ ID NO: 326445 - DNA, 12 bp, Artificial Sequence
  Oligonucleotide primer for the detection of SNP TSC0033078
tttggttaaagt

SEQ ID NO: 326446 - DNA, 12 bp, Artificial Sequence
  Oligonucleotide primer for the detection of SNP TSC0033080
ttatgtttagtt

SEQ ID NO: 326447 - DNA, 12 bp, Artificial Sequence
  Oligonucleotide primer for the detection of SNP TSC0033081
actatcccccac

SEQ ID NO: 326448 - DNA, 12 bp, Artificial Sequence
  Oligonucleotide primer for the detection of SNP TSC0033081
agaaatgggagg

SEQ ID NO: 326449 - DNA, 12 bp, Artificial Sequence
  Oligonucleotide primer for the detection of SNP TSC0033082
atataactatat

SEQ ID NO: 326450 - DNA, 12 bp, Artificial Sequence
  Oligonucleotide primer for the detection of SNP TSC0033082
aatttgtttgaa

SEQ ID NO: 326451 - DNA, 12 bp, Artificial Sequence
  Oligonucleotide primer for the detection of SNP TSC0033083
tctcaataactc

SEQ ID NO: 326452 - DNA, 12 bp, Artificial Sequence
  Oligonucleotide primer for the detection of SNP TSC0033083
tatgttttattg

SEQ ID NO: 326453 - DNA, 12 bp, Artificial Sequence
  Oligonucleotide primer for the detection of SNP TSC0033083
catatcttatta

SEQ ID NO: 326454 - DNA, 12 bp, Artificial Sequence
  Oligonucleotide primer for the detection of SNP TSC0033086
acaccttatcca

SEQ ID NO: 326455 - DNA, 12 bp, Artificial Sequence
  Oligonucleotide primer for the detection of SNP TSC0033086
ttgtatgtattt

SEQ ID NO: 326456 - DNA, 12 bp, Artificial Sequence
  Oligonucleotide primer for the detection of SNP TSC0033086
ttatatatatct

SEQ ID NO: 326457 - DNA, 12 bp, Artificial Sequence
  Oligonucleotide primer for the detection of SNP TSC0033086
gtattttattta

SEQ ID NO: 326458 - DNA, 12 bp, Artificial Sequence
  Oligonucleotide primer for the detection of SNP TSC0033088
acaacataccaa

SEQ ID NO: 326459 - DNA, 12 bp, Artificial Sequence
  Oligonucleotide primer for the detection of SNP TSC0033088
acaacataccga

SEQ ID NO: 326460 - DNA, 12 bp, Artificial Sequence
  Oligonucleotide primer for the detection of SNP TSC0033088
acaacgtaccaa

SEQ ID NO: 326461 - DNA, 12 bp, Artificial Sequence
  Oligonucleotide primer for the detection of SNP TSC0033088
acaacgtaccga

SEQ ID NO: 326462 - DNA, 12 bp, Artificial Sequence
  Oligonucleotide primer for the detection of SNP TSC0033088
tatagatatgtg

SEQ ID NO: 326463 - DNA, 12 bp, Artificial Sequence
  Oligonucleotide primer for the detection of SNP TSC0033088
tatagatacgtg

SEQ ID NO: 326464 - DNA, 12 bp, Artificial Sequence
  Oligonucleotide primer for the detection of SNP TSC0033088
tatagatatgcg

SEQ ID NO: 326465 - DNA, 12 bp, Artificial Sequence
  Oligonucleotide primer for the detection of SNP TSC0033088
tatagatacgcg

SEQ ID NO: 326466 - DNA, 12 bp, Artificial Sequence
  Oligonucleotide primer for the detection of SNP TSC0033088
cacaaacacacg

SEQ ID NO: 326467 - DNA, 12 bp, Artificial Sequence
  Oligonucleotide primer for the detection of SNP TSC0033088
cacaaacacgca

SEQ ID NO: 326468 - DNA, 12 bp, Artificial Sequence
  Oligonucleotide primer for the detection of SNP TSC0033088
cacaaacacgcg

SEQ ID NO: 326469 - DNA, 12 bp, Artificial Sequence
  Oligonucleotide primer for the detection of SNP TSC0033088
atagtgtgttga

SEQ ID NO: 326470 - DNA, 12 bp, Artificial Sequence
  Oligonucleotide primer for the detection of SNP TSC0033088
atagcgtgttga

SEQ ID NO: 326471 - DNA, 12 bp, Artificial Sequence
  Oligonucleotide primer for the detection of SNP TSC0033088
atagtgtgtcga

SEQ ID NO: 326472 - DNA, 12 bp, Artificial Sequence
  Oligonucleotide primer for the detection of SNP TSC0033088
atagcgtgtcga

SEQ ID NO: 326473 - DNA, 12 bp, Artificial Sequence
  Oligonucleotide primer for the detection of SNP TSC0033089
tatctactctct

SEQ ID NO: 326474 - DNA, 12 bp, Artificial Sequence
  Oligonucleotide primer for the detection of SNP TSC0033089
attggtatttta

SEQ ID NO: 326475 - DNA, 12 bp, Artificial Sequence
  Oligonucleotide primer for the detection of SNP TSC0033094
acctcatacaat

SEQ ID NO: 326476 - DNA, 12 bp, Artificial Sequence
  Oligonucleotide primer for the detection of SNP TSC0033094
ttataatttaaa

SEQ ID NO: 326477 - DNA, 12 bp, Artificial Sequence
  Oligonucleotide primer for the detection of SNP TSC0033095
tagagtatttgg

SEQ ID NO: 326478 - DNA, 12 bp, Artificial Sequence
  Oligonucleotide primer for the detection of SNP TSC0033096
aactccacaaac

SEQ ID NO: 326479 - DNA, 12 bp, Artificial Sequence
  Oligonucleotide primer for the detection of SNP TSC0033096
aactccacgaac

SEQ ID NO: 326480 - DNA, 12 bp, Artificial Sequence
  Oligonucleotide primer for the detection of SNP TSC0033096
aactccgcaaac

SEQ ID NO: 326481 - DNA, 12 bp, Artificial Sequence
  Oligonucleotide primer for the detection of SNP TSC0033096
aactccgcgaac

SEQ ID NO: 326482 - DNA, 12 bp, Artificial Sequence
  Oligonucleotide primer for the detection of SNP TSC0033096
attgatggatat

SEQ ID NO: 326483 - DNA, 12 bp, Artificial Sequence
  Oligonucleotide primer for the detection of SNP TSC0033096
atcgatggatat

SEQ ID NO: 326484 - DNA, 12 bp, Artificial Sequence
  Oligonucleotide primer for the detection of SNP TSC0033096
attgacggatat

SEQ ID NO: 326485 - DNA, 12 bp, Artificial Sequence
  Oligonucleotide primer for the detection of SNP TSC0033096
atcgacggatat

SEQ ID NO: 326486 - DNA, 12 bp, Artificial Sequence
  Oligonucleotide primer for the detection of SNP TSC0033096
ccaacaaacaca

SEQ ID NO: 326487 - DNA, 12 bp, Artificial Sequence
  Oligonucleotide primer for the detection of SNP TSC0033096
ccaacgaacaca

SEQ ID NO: 326488 - DNA, 12 bp, Artificial Sequence
  Oligonucleotide primer for the detection of SNP TSC0033096
ccgacaaacaca

SEQ ID NO: 326489 - DNA, 12 bp, Artificial Sequence
  Oligonucleotide primer for the detection of SNP TSC0033096
ccgacgaacaca

SEQ ID NO: 326490 - DNA, 12 bp, Artificial Sequence
  Oligonucleotide primer for the detection of SNP TSC0033096
tttcgtgggttt

SEQ ID NO: 326491 - DNA, 12 bp, Artificial Sequence
  Oligonucleotide primer for the detection of SNP TSC0033096
ttttgcgggttt

SEQ ID NO: 326492 - DNA, 12 bp, Artificial Sequence
  Oligonucleotide primer for the detection of SNP TSC0033096
tttcgcgggttt

SEQ ID NO: 326493 - DNA, 12 bp, Artificial Sequence
  Oligonucleotide primer for the detection of SNP TSC0033097
attgtgtagatg

SEQ ID NO: 326494 - DNA, 12 bp, Artificial Sequence
  Oligonucleotide primer for the detection of SNP TSC0033098
ggtattaaatag

SEQ ID NO: 326495 - DNA, 12 bp, Artificial Sequence
  Oligonukleotid-Primer
atatatcatcaa

SEQ ID NO: 326496 - DNA, 12 bp, Artificial Sequence
  Oligonucleotide primer for the detection of SNP TSC0033099
ttttggagaaat

SEQ ID NO: 326497 - DNA, 12 bp, Artificial Sequence
  Oligonucleotide primer for the detection of SNP TSC0033099
ttctaaaaaaat

SEQ ID NO: 326498 - DNA, 12 bp, Artificial Sequence
  Oligonucleotide primer for the detection of SNP TSC0033102
aaaattctaccc

SEQ ID NO: 326499 - DNA, 12 bp, Artificial Sequence
  Oligonukleotid-Primer
cctaaactcatc

SEQ ID NO: 326500 - DNA, 12 bp, Artificial Sequence
  Oligonucleotide primer for the detection of SNP TSC0033103
tatggttttttc

SEQ ID NO: 326501 - DNA, 12 bp, Artificial Sequence
  Oligonucleotide primer for the detection of SNP TSC0033103
cataacccttcc

SEQ ID NO: 326502 - DNA, 12 bp, Artificial Sequence
  Oligonucleotide primer for the detection of SNP TSC0033103
tggatttatttt

SEQ ID NO: 326503 - DNA, 12 bp, Artificial Sequence
  Oligonucleotide primer for the detection of SNP TSC0033104
attgttgggatt

SEQ ID NO: 326504 - DNA, 12 bp, Artificial Sequence
  Oligonucleotide primer for the detection of SNP TSC0033104
actattaaaatc

SEQ ID NO: 326505 - DNA, 12 bp, Artificial Sequence
  Oligonucleotide primer for the detection of SNP TSC0033104
atagtgagaaag

SEQ ID NO: 326506 - DNA, 12 bp, Artificial Sequence
  Oligonucleotide primer for the detection of SNP TSC0033105
attctattaacc

SEQ ID NO: 326507 - DNA, 12 bp, Artificial Sequence
  Oligonucleotide primer for the detection of SNP TSC0033105
gttctattaacc

SEQ ID NO: 326508 - DNA, 12 bp, Artificial Sequence
  Oligonucleotide primer for the detection of SNP TSC0033105
agatttaggtta

SEQ ID NO: 326509 - DNA, 12 bp, Artificial Sequence
  Oligonucleotide primer for the detection of SNP TSC0033105
aaatttaaacca

SEQ ID NO: 326510 - DNA, 12 bp, Artificial Sequence
  Oligonucleotide primer for the detection of SNP TSC0033105
gttttgttggtt

SEQ ID NO: 326511 - DNA, 12 bp, Artificial Sequence
  Oligonucleotide primer for the detection of SNP TSC0033106
taaatattttat

SEQ ID NO: 326512 - DNA, 12 bp, Artificial Sequence
  Oligonucleotide primer for the detection of SNP TSC0033106
tttaaatttaat

SEQ ID NO: 326513 - DNA, 12 bp, Artificial Sequence
  Oligonucleotide primer for the detection of SNP TSC0033106
ttaaatccaata

SEQ ID NO: 326514 - DNA, 12 bp, Artificial Sequence
  Oligonucleotide primer for the detection of SNP TSC0033106
tgaatgttttat

SEQ ID NO: 326515 - DNA, 12 bp, Artificial Sequence
  Oligonucleotide primer for the detection of SNP TSC0033107
tgtagtggtatt

SEQ ID NO: 326516 - DNA, 12 bp, Artificial Sequence
  Oligonucleotide primer for the detection of SNP TSC0033107
tgtagtggtatc

SEQ ID NO: 326517 - DNA, 12 bp, Artificial Sequence
  Oligonucleotide primer for the detection of SNP TSC0033107
agtgattaagat

SEQ ID NO: 326518 - DNA, 12 bp, Artificial Sequence
  Oligonucleotide primer for the detection of SNP TSC0033108
gtttgggagttt

SEQ ID NO: 326519 - DNA, 12 bp, Artificial Sequence
  Oligonucleotide primer for the detection of SNP TSC0033108
acctaaaaaccc

SEQ ID NO: 326520 - DNA, 12 bp, Artificial Sequence
  Oligonucleotide primer for the detection of SNP TSC0033108
gttttaaggaag

SEQ ID NO: 326521 - DNA, 12 bp, Artificial Sequence
  Oligonucleotide primer for the detection of SNP TSC0033109
tggttaggatgg

SEQ ID NO: 326522 - DNA, 12 bp, Artificial Sequence
  Oligonucleotide primer for the detection of SNP TSC0033109
taaccaaaataa

SEQ ID NO: 326523 - DNA, 12 bp, Artificial Sequence
  Oligonucleotide primer for the detection of SNP TSC0033109
aggttaagagat

SEQ ID NO: 326524 - DNA, 12 bp, Artificial Sequence
  Oligonucleotide primer for the detection of SNP TSC0033112
atcaacaataac

SEQ ID NO: 326525 - DNA, 12 bp, Artificial Sequence
  Oligonucleotide primer for the detection of SNP TSC0033112
attttatttaga

SEQ ID NO: 326526 - DNA, 12 bp, Artificial Sequence
  Oligonucleotide primer for the detection of SNP TSC0033116
taattccaaaaa

SEQ ID NO: 326527 - DNA, 12 bp, Artificial Sequence
  Oligonucleotide primer for the detection of SNP TSC0033116
ggaaggaaggtt

SEQ ID NO: 326528 - DNA, 12 bp, Artificial Sequence
  Oligonucleotide primer for the detection of SNP TSC0033116
taattttagaga

SEQ ID NO: 326529 - DNA, 12 bp, Artificial Sequence
  Oligonucleotide primer for the detection of SNP TSC0033117
tcttcttataaa

SEQ ID NO: 326530 - DNA, 12 bp, Artificial Sequence
  Oligonucleotide primer for the detection of SNP TSC0033117
ttatttgttaat

SEQ ID NO: 326531 - DNA, 12 bp, Artificial Sequence
  Oligonucleotide primer for the detection of SNP TSC0033117
tatctattaaca

SEQ ID NO: 326532 - DNA, 12 bp, Artificial Sequence
  Oligonucleotide primer for the detection of SNP TSC0033125
aattaacttcct

SEQ ID NO: 326533 - DNA, 12 bp, Artificial Sequence
  Oligonucleotide primer for the detection of SNP TSC0033126
atataattcctt

SEQ ID NO: 326534 - DNA, 12 bp, Artificial Sequence
  Oligonucleotide primer for the detection of SNP TSC0033129
cccaaaaaaatt

SEQ ID NO: 326535 - DNA, 12 bp, Artificial Sequence
  Oligonucleotide primer for the detection of SNP TSC0033129
gttgtattttta

SEQ ID NO: 326536 - DNA, 12 bp, Artificial Sequence
  Oligonucleotide primer for the detection of SNP TSC0033130
tttcccttcatt

SEQ ID NO: 326537 - DNA, 12 bp, Artificial Sequence
  Oligonucleotide primer for the detection of SNP TSC0033130
aagggtagtagt

SEQ ID NO: 326538 - DNA, 12 bp, Artificial Sequence
  Oligonucleotide primer for the detection of SNP TSC0033130
aaaaaacaacaa

SEQ ID NO: 326539 - DNA, 12 bp, Artificial Sequence
  Oligonucleotide primer for the detection of SNP TSC0033131
cttaactttact

SEQ ID NO: 326540 - DNA, 12 bp, Artificial Sequence
  Oligonucleotide primer for the detection of SNP TSC0033131
tttaagtgatta

SEQ ID NO: 326541 - DNA, 12 bp, Artificial Sequence
  Oligonucleotide primer for the detection of SNP TSC0033132
tcaatactactc

SEQ ID NO: 326542 - DNA, 12 bp, Artificial Sequence
  Oligonucleotide primer for the detection of SNP TSC0033132
tcgatactactc

SEQ ID NO: 326543 - DNA, 12 bp, Artificial Sequence
  Oligonucleotide primer for the detection of SNP TSC0033132
tttgaaaataga

SEQ ID NO: 326544 - DNA, 12 bp, Artificial Sequence
  Oligonucleotide primer for the detection of SNP TSC0033133
ccatccacatac

SEQ ID NO: 326545 - DNA, 12 bp, Artificial Sequence
  Oligonucleotide primer for the detection of SNP TSC0033133
atgttttaggta

SEQ ID NO: 326546 - DNA, 12 bp, Artificial Sequence
  Oligonucleotide primer for the detection of SNP TSC0033134
caactccccatc

SEQ ID NO: 326547 - DNA, 12 bp, Artificial Sequence
  Oligonucleotide primer for the detection of SNP TSC0033134
caactccccgtc

SEQ ID NO: 326548 - DNA, 12 bp, Artificial Sequence
  Oligonucleotide primer for the detection of SNP TSC0033134
ttggtaggaggg

SEQ ID NO: 326549 - DNA, 12 bp, Artificial Sequence
  Oligonucleotide primer for the detection of SNP TSC0033135
cacatataaaaa

SEQ ID NO: 326550 - DNA, 12 bp, Artificial Sequence
  Oligonucleotide primer for the detection of SNP TSC0033135
ttggtgattttg

SEQ ID NO: 326551 - DNA, 12 bp, Artificial Sequence
  Oligonucleotide primer for the detection of SNP TSC0033135
ctaataattcta

SEQ ID NO: 326552 - DNA, 12 bp, Artificial Sequence
  Oligonucleotide primer for the detection of SNP TSC0033135
agtatatatggg

SEQ ID NO: 326553 - DNA, 12 bp, Artificial Sequence
  Oligonucleotide primer for the detection of SNP TSC0033136
ataaataattcc

SEQ ID NO: 326554 - DNA, 12 bp, Artificial Sequence
  Oligonucleotide primer for the detection of SNP TSC0033136
atctacaaaaca

SEQ ID NO: 326555 - DNA, 12 bp, Artificial Sequence
  Oligonucleotide primer for the detection of SNP TSC0033136
taaatagttttt

SEQ ID NO: 326556 - DNA, 12 bp, Artificial Sequence
  Oligonucleotide primer for the detection of SNP TSC0033137
actcaaaaaaaa

SEQ ID NO: 326557 - DNA, 12 bp, Artificial Sequence
  Oligonucleotide primer for the detection of SNP TSC0033137
ggataaagaata

SEQ ID NO: 326558 - DNA, 12 bp, Artificial Sequence
  Oligonucleotide primer for the detection of SNP TSC0033137
tttaaaaaaagt

SEQ ID NO: 326559 - DNA, 12 bp, Artificial Sequence
  Oligonucleotide primer for the detection of SNP TSC0033138
acataacactca

SEQ ID NO: 326560 - DNA, 12 bp, Artificial Sequence
  Oligonucleotide primer for the detection of SNP TSC0033138
gtggagtggttt

SEQ ID NO: 326561 - DNA, 12 bp, Artificial Sequence
  Oligonucleotide primer for the detection of SNP TSC0033138
aaaataatttaa

SEQ ID NO: 326562 - DNA, 12 bp, Artificial Sequence
  Oligonucleotide primer for the detection of SNP TSC0033138
tatgatatttat

SEQ ID NO: 326563 - DNA, 12 bp, Artificial Sequence
  Oligonucleotide primer for the detection of SNP TSC0033138
tatgatatttac

SEQ ID NO: 326564 - DNA, 12 bp, Artificial Sequence
  Oligonucleotide primer for the detection of SNP TSC0033139
tttcgtttatta

SEQ ID NO: 326565 - DNA, 12 bp, Artificial Sequence
  Oligonucleotide primer for the detection of SNP TSC0033140
ttaaaaatatct

SEQ ID NO: 326566 - DNA, 12 bp, Artificial Sequence
  Oligonucleotide primer for the detection of SNP TSC0033140
agggattgatgg

SEQ ID NO: 326567 - DNA, 12 bp, Artificial Sequence
  Oligonucleotide primer for the detection of SNP TSC0033140
agggatcgatgg

SEQ ID NO: 326568 - DNA, 12 bp, Artificial Sequence
  Oligonucleotide primer for the detection of SNP TSC0033140
aaaaatcgataa

SEQ ID NO: 326569 - DNA, 12 bp, Artificial Sequence
  Oligonucleotide primer for the detection of SNP TSC0033140
ttaggaatgttt

SEQ ID NO: 326570 - DNA, 12 bp, Artificial Sequence
  Oligonucleotide primer for the detection of SNP TSC0033141
gtaaatagtatg

SEQ ID NO: 326571 - DNA, 12 bp, Artificial Sequence
  Oligonucleotide primer for the detection of SNP TSC0033141
caaataatataa

SEQ ID NO: 326572 - DNA, 12 bp, Artificial Sequence
  Oligonucleotide primer for the detection of SNP TSC0033141
gattgtttttaa

SEQ ID NO: 326573 - DNA, 12 bp, Artificial Sequence
  Oligonucleotide primer for the detection of SNP TSC0033142
tttaacctaatt

SEQ ID NO: 326574 - DNA, 12 bp, Artificial Sequence
  Oligonucleotide primer for the detection of SNP TSC0033145
aattcattatat

SEQ ID NO: 326575 - DNA, 12 bp, Artificial Sequence
  Oligonucleotide primer for the detection of SNP TSC0033145
gtaaaataaatt

SEQ ID NO: 326576 - DNA, 12 bp, Artificial Sequence
  Oligonucleotide primer for the detection of SNP TSC0033155
taggagatggtt

SEQ ID NO: 326577 - DNA, 12 bp, Artificial Sequence
  Oligonucleotide primer for the detection of SNP TSC0033157
atcattaaaaac

SEQ ID NO: 326578 - DNA, 12 bp, Artificial Sequence
  Oligonucleotide primer for the detection of SNP TSC0033157
aatttgttttgg

SEQ ID NO: 326579 - DNA, 12 bp, Artificial Sequence
  Oligonucleotide primer for the detection of SNP TSC0033157
aatctattctaa

SEQ ID NO: 326580 - DNA, 12 bp, Artificial Sequence
  Oligonucleotide primer for the detection of SNP TSC0033157
attattagaagt

SEQ ID NO: 326581 - DNA, 12 bp, Artificial Sequence
  Oligonucleotide primer for the detection of SNP TSC0033164
ttaacccttaac

SEQ ID NO: 326582 - DNA, 12 bp, Artificial Sequence
  Oligonucleotide primer for the detection of SNP TSC0033164
ttgggaatgaga

SEQ ID NO: 326583 - DNA, 12 bp, Artificial Sequence
  Oligonucleotide primer for the detection of SNP TSC0033166
ccctaattataa

SEQ ID NO: 326584 - DNA, 12 bp, Artificial Sequence
  Oligonucleotide primer for the detection of SNP TSC0033166
tgtgtaaggggt

SEQ ID NO: 326585 - DNA, 12 bp, Artificial Sequence
  Oligonucleotide primer for the detection of SNP TSC0033166
cgtgtaaggggt

SEQ ID NO: 326586 - DNA, 12 bp, Artificial Sequence
  Oligonucleotide primer for the detection of SNP TSC0033166
tgcgtaaggggt

SEQ ID NO: 326587 - DNA, 12 bp, Artificial Sequence
  Oligonucleotide primer for the detection of SNP TSC0033166
tgtgtaaggggc

SEQ ID NO: 326588 - DNA, 12 bp, Artificial Sequence
  Oligonucleotide primer for the detection of SNP TSC0033166
cgcgtaaggggt

SEQ ID NO: 326589 - DNA, 12 bp, Artificial Sequence
  Oligonucleotide primer for the detection of SNP TSC0033166
cgtgtaaggggc

SEQ ID NO: 326590 - DNA, 12 bp, Artificial Sequence
  Oligonucleotide primer for the detection of SNP TSC0033166
tgcgtaaggggc

SEQ ID NO: 326591 - DNA, 12 bp, Artificial Sequence
  Oligonucleotide primer for the detection of SNP TSC0033166
cgcgtaaggggc

SEQ ID NO: 326592 - DNA, 12 bp, Artificial Sequence
  Oligonucleotide primer for the detection of SNP TSC0033166
acataaaaaaca

SEQ ID NO: 326593 - DNA, 12 bp, Artificial Sequence
  Oligonucleotide primer for the detection of SNP TSC0033166
acataaaaaacg

SEQ ID NO: 326594 - DNA, 12 bp, Artificial Sequence
  Oligonucleotide primer for the detection of SNP TSC0033166
acgtaaaaaaca

SEQ ID NO: 326595 - DNA, 12 bp, Artificial Sequence
  Oligonucleotide primer for the detection of SNP TSC0033166
gcataaaaaaca

SEQ ID NO: 326596 - DNA, 12 bp, Artificial Sequence
  Oligonucleotide primer for the detection of SNP TSC0033166
acgtaaaaaacg

SEQ ID NO: 326597 - DNA, 12 bp, Artificial Sequence
  Oligonucleotide primer for the detection of SNP TSC0033166
gcataaaaaacg

SEQ ID NO: 326598 - DNA, 12 bp, Artificial Sequence
  Oligonucleotide primer for the detection of SNP TSC0033166
gcgtaaaaaaca

SEQ ID NO: 326599 - DNA, 12 bp, Artificial Sequence
  Oligonucleotide primer for the detection of SNP TSC0033166
gcgtaaaaaacg

SEQ ID NO: 326600 - DNA, 12 bp, Artificial Sequence
  Oligonucleotide primer for the detection of SNP TSC0033167
ccccacccctaa

SEQ ID NO: 326601 - DNA, 12 bp, Artificial Sequence
  Oligonucleotide primer for the detection of SNP TSC0033167
ccccgcccctaa

SEQ ID NO: 326602 - DNA, 12 bp, Artificial Sequence
  Oligonucleotide primer for the detection of SNP TSC0033167
ggtgaggttata

SEQ ID NO: 326603 - DNA, 12 bp, Artificial Sequence
  Oligonucleotide primer for the detection of SNP TSC0033167
ggcgaggttata

SEQ ID NO: 326604 - DNA, 12 bp, Artificial Sequence
  Oligonucleotide primer for the detection of SNP TSC0033167
aacgaaactata

SEQ ID NO: 326605 - DNA, 12 bp, Artificial Sequence
  Oligonucleotide primer for the detection of SNP TSC0033169
caactcaaaatc

SEQ ID NO: 326606 - DNA, 12 bp, Artificial Sequence
  Oligonucleotide primer for the detection of SNP TSC0033169
acttcctcaata

SEQ ID NO: 326607 - DNA, 12 bp, Artificial Sequence
  Oligonucleotide primer for the detection of SNP TSC0033172
aaactccttctc

SEQ ID NO: 326608 - DNA, 12 bp, Artificial Sequence
  Oligonucleotide primer for the detection of SNP TSC0033173
tattcacacatc

SEQ ID NO: 326609 - DNA, 12 bp, Artificial Sequence
  Oligonucleotide primer for the detection of SNP TSC0033173
tagtgtatgatg

SEQ ID NO: 326610 - DNA, 12 bp, Artificial Sequence
  Oligonucleotide primer for the detection of SNP TSC0033174
aaaaaaacttcc

SEQ ID NO: 326611 - DNA, 12 bp, Artificial Sequence
  Oligonucleotide primer for the detection of SNP TSC0033174
tttaaaagttat

SEQ ID NO: 326612 - DNA, 12 bp, Artificial Sequence
  Oligonucleotide primer for the detection of SNP TSC0033174
ttaaaaaccaca

SEQ ID NO: 326613 - DNA, 12 bp, Artificial Sequence
  Oligonucleotide primer for the detection of SNP TSC0033174
ggaaaatttttt

SEQ ID NO: 326614 - DNA, 12 bp, Artificial Sequence
  Oligonucleotide primer for the detection of SNP TSC0033175
acattcttctca

SEQ ID NO: 326615 - DNA, 12 bp, Artificial Sequence
  Oligonucleotide primer for the detection of SNP TSC0033175
attattttgaag

SEQ ID NO: 326616 - DNA, 12 bp, Artificial Sequence
  Oligonucleotide primer for the detection of SNP TSC0033176
ttccacctcctt

SEQ ID NO: 326617 - DNA, 12 bp, Artificial Sequence
  Oligonucleotide primer for the detection of SNP TSC0033177
aatctttctctc

SEQ ID NO: 326618 - DNA, 12 bp, Artificial Sequence
  Oligonucleotide primer for the detection of SNP TSC0033177
aaaggaggtgga

SEQ ID NO: 326619 - DNA, 12 bp, Artificial Sequence
  Oligonucleotide primer for the detection of SNP TSC0033178
atctttctctca

SEQ ID NO: 326620 - DNA, 12 bp, Artificial Sequence
  Oligonucleotide primer for the detection of SNP TSC0033178
gaaaggaggtgg

SEQ ID NO: 326621 - DNA, 12 bp, Artificial Sequence
  Oligonucleotide primer for the detection of SNP TSC0033179
tcacatttattc

SEQ ID NO: 326622 - DNA, 12 bp, Artificial Sequence
  Oligonucleotide primer for the detection of SNP TSC0033179
tatagatttaat

SEQ ID NO: 326623 - DNA, 12 bp, Artificial Sequence
  Oligonucleotide primer for the detection of SNP TSC0033179
ataaacctaata

SEQ ID NO: 326624 - DNA, 12 bp, Artificial Sequence
  Oligonucleotide primer for the detection of SNP TSC0033181
aactactaccct

SEQ ID NO: 326625 - DNA, 12 bp, Artificial Sequence
  Oligonucleotide primer for the detection of SNP TSC0033181
tattgtatatta

SEQ ID NO: 326626 - DNA, 12 bp, Artificial Sequence
  Oligonucleotide primer for the detection of SNP TSC0033181
tatcgtatatta

SEQ ID NO: 326627 - DNA, 12 bp, Artificial Sequence
  Oligonucleotide primer for the detection of SNP TSC0033182
aactaatccctc

SEQ ID NO: 326628 - DNA, 12 bp, Artificial Sequence
  Oligonucleotide primer for the detection of SNP TSC0033182
attgttttgaat

SEQ ID NO: 326629 - DNA, 12 bp, Artificial Sequence
  Oligonucleotide primer for the detection of SNP TSC0033182
ttactttaaata

SEQ ID NO: 326630 - DNA, 12 bp, Artificial Sequence
  Oligonucleotide primer for the detection of SNP TSC0033182
aattaatttttc

SEQ ID NO: 326631 - DNA, 12 bp, Artificial Sequence
  Oligonucleotide primer for the detection of SNP TSC0033183
aaataattataa

SEQ ID NO: 326632 - DNA, 12 bp, Artificial Sequence
  Oligonucleotide primer for the detection of SNP TSC0033183
ccctcaacccta

SEQ ID NO: 326633 - DNA, 12 bp, Artificial Sequence
  Oligonucleotide primer for the detection of SNP TSC0033183
gagtgattgtag

SEQ ID NO: 326634 - DNA, 12 bp, Artificial Sequence
  Oligonucleotide primer for the detection of SNP TSC0033184
tttttgtagaat

SEQ ID NO: 326635 - DNA, 12 bp, Artificial Sequence
  Oligonucleotide primer for the detection of SNP TSC0033184
tccttacaaaac

SEQ ID NO: 326636 - DNA, 12 bp, Artificial Sequence
  Oligonucleotide primer for the detection of SNP TSC0033184
tagtggagtaaa

SEQ ID NO: 326637 - DNA, 12 bp, Artificial Sequence
  Oligonucleotide primer for the detection of SNP TSC0033187
tcaataatccta

SEQ ID NO: 326638 - DNA, 12 bp, Artificial Sequence
  Oligonucleotide primer for the detection of SNP TSC0033187
ttatatttaaag

SEQ ID NO: 326639 - DNA, 12 bp, Artificial Sequence
  Oligonucleotide primer for the detection of SNP TSC0033187
ttatacttaaaa

SEQ ID NO: 326640 - DNA, 12 bp, Artificial Sequence
  Oligonucleotide primer for the detection of SNP TSC0033187
ttaataatttta

SEQ ID NO: 326641 - DNA, 12 bp, Artificial Sequence
  Oligonucleotide primer for the detection of SNP TSC0033190
aataaaatttac

SEQ ID NO: 326642 - DNA, 12 bp, Artificial Sequence
  Oligonucleotide primer for the detection of SNP TSC0033190
tgtatttttttg

SEQ ID NO: 326643 - DNA, 12 bp, Artificial Sequence
  Oligonucleotide primer for the detection of SNP TSC0033191
caaaccccacat

SEQ ID NO: 326644 - DNA, 12 bp, Artificial Sequence
  Oligonucleotide primer for the detection of SNP TSC0033191
cgaaccccacat

SEQ ID NO: 326645 - DNA, 12 bp, Artificial Sequence
  Oligonucleotide primer for the detection of SNP TSC0033191
ttttggggtagg

SEQ ID NO: 326646 - DNA, 12 bp, Artificial Sequence
  Oligonucleotide primer for the detection of SNP TSC0033196
taaccataatac

SEQ ID NO: 326647 - DNA, 12 bp, Artificial Sequence
  Oligonucleotide primer for the detection of SNP TSC0033196
tgtagatatgag

SEQ ID NO: 326648 - DNA, 12 bp, Artificial Sequence
  Oligonucleotide primer for the detection of SNP TSC0033200
ctcgcctttcca

SEQ ID NO: 326649 - DNA, 12 bp, Artificial Sequence
  Oligonucleotide primer for the detection of SNP TSC0033200
gagaaattagtt

SEQ ID NO: 326650 - DNA, 12 bp, Artificial Sequence
  Oligonucleotide primer for the detection of SNP TSC0033200
aaaaatcaacta

SEQ ID NO: 326651 - DNA, 12 bp, Artificial Sequence
  Oligonucleotide primer for the detection of SNP TSC0033201
ctttataaacct

SEQ ID NO: 326652 - DNA, 12 bp, Artificial Sequence
  Oligonucleotide primer for the detection of SNP TSC0033201
ttttgaaaaaag

SEQ ID NO: 326653 - DNA, 12 bp, Artificial Sequence
  Oligonucleotide primer for the detection of SNP TSC0033204
ccatcccccaac

SEQ ID NO: 326654 - DNA, 12 bp, Artificial Sequence
  Oligonucleotide primer for the detection of SNP TSC0033204
tggggtttggga

SEQ ID NO: 326655 - DNA, 12 bp, Artificial Sequence
  Oligonucleotide primer for the detection of SNP TSC0033204
tggggttcggga

SEQ ID NO: 326656 - DNA, 12 bp, Artificial Sequence
  Oligonucleotide primer for the detection of SNP TSC0033205
gttttttaatag

SEQ ID NO: 326657 - DNA, 12 bp, Artificial Sequence
  Oligonucleotide primer for the detection of SNP TSC0033205
atcctccaacaa

SEQ ID NO: 326658 - DNA, 12 bp, Artificial Sequence
  Oligonucleotide primer for the detection of SNP TSC0033205
gaaaaaatggtt

SEQ ID NO: 326659 - DNA, 12 bp, Artificial Sequence
  Oligonucleotide primer for the detection of SNP TSC0033206
ttatagaggttg

SEQ ID NO: 326660 - DNA, 12 bp, Artificial Sequence
  Oligonucleotide primer for the detection of SNP TSC0033207
ggttggaatagg

SEQ ID NO: 326661 - DNA, 12 bp, Artificial Sequence
  Oligonucleotide primer for the detection of SNP TSC0033207
atagaggttgtt

SEQ ID NO: 326662 - DNA, 12 bp, Artificial Sequence
  Oligonucleotide primer for the detection of SNP TSC0033208
aacaataccaaa

SEQ ID NO: 326663 - DNA, 12 bp, Artificial Sequence
  Oligonucleotide primer for the detection of SNP TSC0033208
tttaatcgtttt

SEQ ID NO: 326664 - DNA, 12 bp, Artificial Sequence
  Oligonucleotide primer for the detection of SNP TSC0033208
tccaaccaccct

SEQ ID NO: 326665 - DNA, 12 bp, Artificial Sequence
  Oligonucleotide primer for the detection of SNP TSC0033208
tccaaccgccct

SEQ ID NO: 326666 - DNA, 12 bp, Artificial Sequence
  Oligonucleotide primer for the detection of SNP TSC0033208
atgataatgtta

SEQ ID NO: 326667 - DNA, 12 bp, Artificial Sequence
  Oligonucleotide primer for the detection of SNP TSC0033211
ttacactcatct

SEQ ID NO: 326668 - DNA, 12 bp, Artificial Sequence
  Oligonucleotide primer for the detection of SNP TSC0033211
ttacactcgtct

SEQ ID NO: 326669 - DNA, 12 bp, Artificial Sequence
  Oligonucleotide primer for the detection of SNP TSC0033211
agttatgagtta

SEQ ID NO: 326670 - DNA, 12 bp, Artificial Sequence
  Oligonucleotide primer for the detection of SNP TSC0033214
atttttattttg

SEQ ID NO: 326671 - DNA, 12 bp, Artificial Sequence
  Oligonucleotide primer for the detection of SNP TSC0033215
ttaatcaaacct

SEQ ID NO: 326672 - DNA, 12 bp, Artificial Sequence
  Oligonucleotide primer for the detection of SNP TSC0033215
gtgatagtagaa

SEQ ID NO: 326673 - DNA, 12 bp, Artificial Sequence
  Oligonucleotide primer for the detection of SNP TSC0033216
tctctaactttt

SEQ ID NO: 326674 - DNA, 12 bp, Artificial Sequence
  Oligonucleotide primer for the detection of SNP TSC0033216
gaagattttaaa

SEQ ID NO: 326675 - DNA, 12 bp, Artificial Sequence
  Oligonucleotide primer for the detection of SNP TSC0033216
aaaaatcttaaa

SEQ ID NO: 326676 - DNA, 12 bp, Artificial Sequence
  Oligonucleotide primer for the detection of SNP TSC0033218
aaagtattgtat

SEQ ID NO: 326677 - DNA, 12 bp, Artificial Sequence
  Oligonucleotide primer for the detection of SNP TSC0033218
aaagtattgtac

SEQ ID NO: 326678 - DNA, 12 bp, Artificial Sequence
  Oligonucleotide primer for the detection of SNP TSC0033218
taaaacactata

SEQ ID NO: 326679 - DNA, 12 bp, Artificial Sequence
  Oligonucleotide primer for the detection of SNP TSC0033221
ataaaccctaat

SEQ ID NO: 326680 - DNA, 12 bp, Artificial Sequence
  Oligonucleotide primer for the detection of SNP TSC0033221
tatatataagaa

SEQ ID NO: 326681 - DNA, 12 bp, Artificial Sequence
  Oligonucleotide primer for the detection of SNP TSC0033222
ggtgatttgttt

SEQ ID NO: 326682 - DNA, 12 bp, Artificial Sequence
  Oligonucleotide primer for the detection of SNP TSC0033222
ggtgattcgttt

SEQ ID NO: 326683 - DNA, 12 bp, Artificial Sequence
  Oligonucleotide primer for the detection of SNP TSC0033222
tggaaggtagag

SEQ ID NO: 326684 - DNA, 12 bp, Artificial Sequence
  Oligonucleotide primer for the detection of SNP TSC0033228
taaactaataac

SEQ ID NO: 326685 - DNA, 12 bp, Artificial Sequence
  Oligonucleotide primer for the detection of SNP TSC0033228
ttgtgatttatt

SEQ ID NO: 326686 - DNA, 12 bp, Artificial Sequence
  Oligonucleotide primer for the detection of SNP TSC0033234
gcaaaacaaaaa

SEQ ID NO: 326687 - DNA, 12 bp, Artificial Sequence
  Oligonucleotide primer for the detection of SNP TSC0033234
gcaaaacgaaaa

SEQ ID NO: 326688 - DNA, 12 bp, Artificial Sequence
  Oligonucleotide primer for the detection of SNP TSC0033234
gcgaaacaaaaa

SEQ ID NO: 326689 - DNA, 12 bp, Artificial Sequence
  Oligonucleotide primer for the detection of SNP TSC0033234
gcgaaacgaaaa

SEQ ID NO: 326690 - DNA, 12 bp, Artificial Sequence
  Oligonucleotide primer for the detection of SNP TSC0033234
tggagtagtagt

SEQ ID NO: 326691 - DNA, 12 bp, Artificial Sequence
  Oligonucleotide primer for the detection of SNP TSC0033234
cggagtagtagt

SEQ ID NO: 326692 - DNA, 12 bp, Artificial Sequence
  Oligonucleotide primer for the detection of SNP TSC0033234
caaaacaacaac

SEQ ID NO: 326693 - DNA, 12 bp, Artificial Sequence
  Oligonucleotide primer for the detection of SNP TSC0033234
cgaaacaacaac

SEQ ID NO: 326694 - DNA, 12 bp, Artificial Sequence
  Oligonucleotide primer for the detection of SNP TSC0033234
gtggggtggggg

SEQ ID NO: 326695 - DNA, 12 bp, Artificial Sequence
  Oligonucleotide primer for the detection of SNP TSC0033234
gcggggtggggg

SEQ ID NO: 326696 - DNA, 12 bp, Artificial Sequence
  Oligonucleotide primer for the detection of SNP TSC0033234
gtggggcggggg

SEQ ID NO: 326697 - DNA, 12 bp, Artificial Sequence
  Oligonucleotide primer for the detection of SNP TSC0033234
gcggggcggggg

SEQ ID NO: 326698 - DNA, 12 bp, Artificial Sequence
  Oligonucleotide primer for the detection of SNP TSC0033235
aatcgcttaaac

SEQ ID NO: 326699 - DNA, 12 bp, Artificial Sequence
  Oligonucleotide primer for the detection of SNP TSC0033235
ctccacctccca

SEQ ID NO: 326700 - DNA, 12 bp, Artificial Sequence
  Oligonucleotide primer for the detection of SNP TSC0033235
ctccgcctccca

SEQ ID NO: 326701 - DNA, 12 bp, Artificial Sequence
  Oligonukleotid-Primer
aatcgtttgaat

SEQ ID NO: 326702 - DNA, 12 bp, Artificial Sequence
  Oligonucleotide primer for the detection of SNP TSC0033236
atatttttaata

SEQ ID NO: 326703 - DNA, 12 bp, Artificial Sequence
  Oligonucleotide primer for the detection of SNP TSC0033236
gaaatttcgttt

SEQ ID NO: 326704 - DNA, 12 bp, Artificial Sequence
  Oligonucleotide primer for the detection of SNP TSC0033237
aaaaatttatca

SEQ ID NO: 326705 - DNA, 12 bp, Artificial Sequence
  Oligonukleotid-Primer
aaggagttgggt

SEQ ID NO: 326706 - DNA, 12 bp, Artificial Sequence
  Oligonucleotide primer for the detection of SNP TSC0033237
aggggtttatta

SEQ ID NO: 326707 - DNA, 12 bp, Artificial Sequence
  Oligonucleotide primer for the detection of SNP TSC0033238
gtagtggagggt

SEQ ID NO: 326708 - DNA, 12 bp, Artificial Sequence
  Oligonucleotide primer for the detection of SNP TSC0033238
gtagcggagggt

SEQ ID NO: 326709 - DNA, 12 bp, Artificial Sequence
  Oligonucleotide primer for the detection of SNP TSC0033238
caacgaaaaata

SEQ ID NO: 326710 - DNA, 12 bp, Artificial Sequence
  Oligonucleotide primer for the detection of SNP TSC0033238
tgggtggttttt

SEQ ID NO: 326711 - DNA, 12 bp, Artificial Sequence
  Oligonucleotide primer for the detection of SNP TSC0033240
ccaatatccata

SEQ ID NO: 326712 - DNA, 12 bp, Artificial Sequence
  Oligonucleotide primer for the detection of SNP TSC0033240
ccaatatccgta

SEQ ID NO: 326713 - DNA, 12 bp, Artificial Sequence
  Oligonucleotide primer for the detection of SNP TSC0033240
taaagtataggt

SEQ ID NO: 326714 - DNA, 12 bp, Artificial Sequence
  Oligonucleotide primer for the detection of SNP TSC0033240
taaagtataggc

SEQ ID NO: 326715 - DNA, 12 bp, Artificial Sequence
  Oligonucleotide primer for the detection of SNP TSC0033240
caaaacacaaac

SEQ ID NO: 326716 - DNA, 12 bp, Artificial Sequence
  Oligonucleotide primer for the detection of SNP TSC0033240
ttagtgttcgta

SEQ ID NO: 326717 - DNA, 12 bp, Artificial Sequence
  Oligonucleotide primer for the detection of SNP TSC0033245
ccaaaaatctaa

SEQ ID NO: 326718 - DNA, 12 bp, Artificial Sequence
  Oligonucleotide primer for the detection of SNP TSC0033245
ttttattgaatt

SEQ ID NO: 326719 - DNA, 12 bp, Artificial Sequence
  Oligonucleotide primer for the detection of SNP TSC0033245
tcccattaaacc

SEQ ID NO: 326720 - DNA, 12 bp, Artificial Sequence
  Oligonucleotide primer for the detection of SNP TSC0033245
ttagggatttgg

SEQ ID NO: 326721 - DNA, 12 bp, Artificial Sequence
  Oligonucleotide primer for the detection of SNP TSC0033246
ttatcaaacatc

SEQ ID NO: 326722 - DNA, 12 bp, Artificial Sequence
  Oligonucleotide primer for the detection of SNP TSC0033246
ttatcaaacgtc

SEQ ID NO: 326723 - DNA, 12 bp, Artificial Sequence
  Oligonucleotide primer for the detection of SNP TSC0033246
taagggaagtaa

SEQ ID NO: 326724 - DNA, 12 bp, Artificial Sequence
  Oligonucleotide primer for the detection of SNP TSC0033247
aatattatcaaa

SEQ ID NO: 326725 - DNA, 12 bp, Artificial Sequence
  Oligonucleotide primer for the detection of SNP TSC0033247
gggaagtaattt

SEQ ID NO: 326726 - DNA, 12 bp, Artificial Sequence
  Oligonucleotide primer for the detection of SNP TSC0033247
aatgttattaga

SEQ ID NO: 326727 - DNA, 12 bp, Artificial Sequence
  Oligonucleotide primer for the detection of SNP TSC0033251
aaacaaccactt

SEQ ID NO: 326728 - DNA, 12 bp, Artificial Sequence
  Oligonucleotide primer for the detection of SNP TSC0033251
tattttttgtta

SEQ ID NO: 326729 - DNA, 12 bp, Artificial Sequence
  Oligonucleotide primer for the detection of SNP TSC0033251
cacctcctacca

SEQ ID NO: 326730 - DNA, 12 bp, Artificial Sequence
  Oligonucleotide primer for the detection of SNP TSC0033251
aagtagttattt

SEQ ID NO: 326731 - DNA, 12 bp, Artificial Sequence
  Oligonucleotide primer for the detection of SNP TSC0033252
aaagtgggtttt

SEQ ID NO: 326732 - DNA, 12 bp, Artificial Sequence
  Oligonucleotide primer for the detection of SNP TSC0033254
taacacttaatc

SEQ ID NO: 326733 - DNA, 12 bp, Artificial Sequence
  Oligonucleotide primer for the detection of SNP TSC0033254
agttttttttag

SEQ ID NO: 326734 - DNA, 12 bp, Artificial Sequence
  Oligonucleotide primer for the detection of SNP TSC0033254
aatttcttttaa

SEQ ID NO: 326735 - DNA, 12 bp, Artificial Sequence
  Oligonucleotide primer for the detection of SNP TSC0033254
tgatatttgatt

SEQ ID NO: 326736 - DNA, 12 bp, Artificial Sequence
  Oligonucleotide primer for the detection of SNP TSC0033255
taaaccctcttc

SEQ ID NO: 326737 - DNA, 12 bp, Artificial Sequence
  Oligonucleotide primer for the detection of SNP TSC0033255
gagtttttatta

SEQ ID NO: 326738 - DNA, 12 bp, Artificial Sequence
  Oligonucleotide primer for the detection of SNP TSC0033256
ccccctcttttc

SEQ ID NO: 326739 - DNA, 12 bp, Artificial Sequence
  Oligonucleotide primer for the detection of SNP TSC0033256
taagaagtggaa

SEQ ID NO: 326740 - DNA, 12 bp, Artificial Sequence
  Oligonucleotide primer for the detection of SNP TSC0033257
ccaaaaatttct

SEQ ID NO: 326741 - DNA, 12 bp, Artificial Sequence
  Oligonucleotide primer for the detection of SNP TSC0033257
gtgaagatatga

SEQ ID NO: 326742 - DNA, 12 bp, Artificial Sequence
  Oligonucleotide primer for the detection of SNP TSC0033258
cttactctatcg

SEQ ID NO: 326743 - DNA, 12 bp, Artificial Sequence
  Oligonucleotide primer for the detection of SNP TSC0033258
cactccaaccta

SEQ ID NO: 326744 - DNA, 12 bp, Artificial Sequence
  Oligonucleotide primer for the detection of SNP TSC0033259
ttttttggagtt

SEQ ID NO: 326745 - DNA, 12 bp, Artificial Sequence
  Oligonucleotide primer for the detection of SNP TSC0033259
ttcctcttaaaa

SEQ ID NO: 326746 - DNA, 12 bp, Artificial Sequence
  Oligonucleotide primer for the detection of SNP TSC0033259
gaatagagagga

SEQ ID NO: 326747 - DNA, 12 bp, Artificial Sequence
  Oligonucleotide primer for the detection of SNP TSC0033261
tgtttttttaat

SEQ ID NO: 326748 - DNA, 12 bp, Artificial Sequence
  Oligonucleotide primer for the detection of SNP TSC0033261
tgtttttttaac

SEQ ID NO: 326749 - DNA, 12 bp, Artificial Sequence
  Oligonucleotide primer for the detection of SNP TSC0033261
tacttcctcaac

SEQ ID NO: 326750 - DNA, 12 bp, Artificial Sequence
  Oligonucleotide primer for the detection of SNP TSC0033261
aaaaaataaaag

SEQ ID NO: 326751 - DNA, 12 bp, Artificial Sequence
  Oligonucleotide primer for the detection of SNP TSC0033263
acatacaactct

SEQ ID NO: 326752 - DNA, 12 bp, Artificial Sequence
  Oligonucleotide primer for the detection of SNP TSC0033263
ttattttttaag

SEQ ID NO: 326753 - DNA, 12 bp, Artificial Sequence
  Oligonucleotide primer for the detection of SNP TSC0033265
tttggtaagaag

SEQ ID NO: 326754 - DNA, 12 bp, Artificial Sequence
  Oligonucleotide primer for the detection of SNP TSC0033265
tctaacaaaaaa

SEQ ID NO: 326755 - DNA, 12 bp, Artificial Sequence
  Oligonucleotide primer for the detection of SNP TSC0033265
tatgagagaaat

SEQ ID NO: 326756 - DNA, 12 bp, Artificial Sequence
  Oligonucleotide primer for the detection of SNP TSC0033267
ctaattaatctt

SEQ ID NO: 326757 - DNA, 12 bp, Artificial Sequence
  Oligonucleotide primer for the detection of SNP TSC0033267
aatatgatttga

SEQ ID NO: 326758 - DNA, 12 bp, Artificial Sequence
  Oligonucleotide primer for the detection of SNP TSC0033267
aatataatctaa

SEQ ID NO: 326759 - DNA, 12 bp, Artificial Sequence
  Oligonucleotide primer for the detection of SNP TSC0033267
ttaattggtttt

SEQ ID NO: 326760 - DNA, 12 bp, Artificial Sequence
  Oligonucleotide primer for the detection of SNP TSC0033269
tacctaacatcc

SEQ ID NO: 326761 - DNA, 12 bp, Artificial Sequence
  Oligonucleotide primer for the detection of SNP TSC0033269
tacctaacgtcc

SEQ ID NO: 326762 - DNA, 12 bp, Artificial Sequence
  Oligonucleotide primer for the detection of SNP TSC0033269
tggttgggtttg

SEQ ID NO: 326763 - DNA, 12 bp, Artificial Sequence
  Oligonucleotide primer for the detection of SNP TSC0033269
tggttgggttcg

SEQ ID NO: 326764 - DNA, 12 bp, Artificial Sequence
  Oligonucleotide primer for the detection of SNP TSC0033270
taattatcattt

SEQ ID NO: 326765 - DNA, 12 bp, Artificial Sequence
  Oligonucleotide primer for the detection of SNP TSC0033271
ctttttaatata

SEQ ID NO: 326766 - DNA, 12 bp, Artificial Sequence
  Oligonucleotide primer for the detection of SNP TSC0033271
tagagatggtta

SEQ ID NO: 326767 - DNA, 12 bp, Artificial Sequence
  Oligonucleotide primer for the detection of SNP TSC0033271
taaaaataacca

SEQ ID NO: 326768 - DNA, 12 bp, Artificial Sequence
  Oligonucleotide primer for the detection of SNP TSC0033271
ttttaatgtatt

SEQ ID NO: 326769 - DNA, 12 bp, Artificial Sequence
  Oligonucleotide primer for the detection of SNP TSC0033272
tttttaatatac

SEQ ID NO: 326770 - DNA, 12 bp, Artificial Sequence
  Oligonucleotide primer for the detection of SNP TSC0033272
gtagagatggtt

SEQ ID NO: 326771 - DNA, 12 bp, Artificial Sequence
  Oligonucleotide primer for the detection of SNP TSC0033272
aaaaataaccaa

SEQ ID NO: 326772 - DNA, 12 bp, Artificial Sequence
  Oligonucleotide primer for the detection of SNP TSC0033272
tttttaatgtat

SEQ ID NO: 326773 - DNA, 12 bp, Artificial Sequence
  Oligonucleotide primer for the detection of SNP TSC0033273
ttttacacaaat

SEQ ID NO: 326774 - DNA, 12 bp, Artificial Sequence
  Oligonucleotide primer for the detection of SNP TSC0033273
tatagaaaatta

SEQ ID NO: 326775 - DNA, 12 bp, Artificial Sequence
  Oligonucleotide primer for the detection of SNP TSC0033274
catttataatac

SEQ ID NO: 326776 - DNA, 12 bp, Artificial Sequence
  Oligonucleotide primer for the detection of SNP TSC0033274
cgtttataatac

SEQ ID NO: 326777 - DNA, 12 bp, Artificial Sequence
  Oligonucleotide primer for the detection of SNP TSC0033274
aatagaaataaa

SEQ ID NO: 326778 - DNA, 12 bp, Artificial Sequence
  Oligonucleotide primer for the detection of SNP TSC0033275
caacaaaattcc

SEQ ID NO: 326779 - DNA, 12 bp, Artificial Sequence
  Oligonucleotide primer for the detection of SNP TSC0033275
caacgaaattcc

SEQ ID NO: 326780 - DNA, 12 bp, Artificial Sequence
  Oligonucleotide primer for the detection of SNP TSC0033275
ttggaagaatat

SEQ ID NO: 326781 - DNA, 12 bp, Artificial Sequence
  Oligonucleotide primer for the detection of SNP TSC0033276
aaaattactaaa

SEQ ID NO: 326782 - DNA, 12 bp, Artificial Sequence
  Oligonucleotide primer for the detection of SNP TSC0033276
ttaaattttggg

SEQ ID NO: 326783 - DNA, 12 bp, Artificial Sequence
  Oligonucleotide primer for the detection of SNP TSC0033276
tcaaatcctaaa

SEQ ID NO: 326784 - DNA, 12 bp, Artificial Sequence
  Oligonucleotide primer for the detection of SNP TSC0033276
aggaagattgtt

SEQ ID NO: 326785 - DNA, 12 bp, Artificial Sequence
  Oligonucleotide primer for the detection of SNP TSC0033277
tattgtagtata

SEQ ID NO: 326786 - DNA, 12 bp, Artificial Sequence
  Oligonucleotide primer for the detection of SNP TSC0033278
aaaataacttac

SEQ ID NO: 326787 - DNA, 12 bp, Artificial Sequence
  Oligonucleotide primer for the detection of SNP TSC0033278
tttataaaaata

SEQ ID NO: 326788 - DNA, 12 bp, Artificial Sequence
  Oligonucleotide primer for the detection of SNP TSC0033279
atatataaacac

SEQ ID NO: 326789 - DNA, 12 bp, Artificial Sequence
  Oligonucleotide primer for the detection of SNP TSC0033280
taaaatatatat

SEQ ID NO: 326790 - DNA, 12 bp, Artificial Sequence
  Oligonucleotide primer for the detection of SNP TSC0033280
taatttaaatta

SEQ ID NO: 326791 - DNA, 12 bp, Artificial Sequence
  Oligonucleotide primer for the detection of SNP TSC0033281
ataatcaaaata

SEQ ID NO: 326792 - DNA, 12 bp, Artificial Sequence
  Oligonucleotide primer for the detection of SNP TSC0033281
tgttgatttgtt

SEQ ID NO: 326793 - DNA, 12 bp, Artificial Sequence
  Oligonucleotide primer for the detection of SNP TSC0033281
tgttgattcgtt

SEQ ID NO: 326794 - DNA, 12 bp, Artificial Sequence
  Oligonucleotide primer for the detection of SNP TSC0033281
tactaactcatt

SEQ ID NO: 326795 - DNA, 12 bp, Artificial Sequence
  Oligonucleotide primer for the detection of SNP TSC0033281
tactaactcgtt

SEQ ID NO: 326796 - DNA, 12 bp, Artificial Sequence
  Oligonucleotide primer for the detection of SNP TSC0033281
gtagttagaata

SEQ ID NO: 326797 - DNA, 12 bp, Artificial Sequence
  Oligonucleotide primer for the detection of SNP TSC0033282
actacactctaa

SEQ ID NO: 326798 - DNA, 12 bp, Artificial Sequence
  Oligonucleotide primer for the detection of SNP TSC0033282
attttgttattt

SEQ ID NO: 326799 - DNA, 12 bp, Artificial Sequence
  Oligonucleotide primer for the detection of SNP TSC0033282
actctatcactc

SEQ ID NO: 326800 - DNA, 12 bp, Artificial Sequence
  Oligonucleotide primer for the detection of SNP TSC0033283
ttaataaaaaat

SEQ ID NO: 326801 - DNA, 12 bp, Artificial Sequence
  Oligonucleotide primer for the detection of SNP TSC0033283
gtggggaaggtg

SEQ ID NO: 326802 - DNA, 12 bp, Artificial Sequence
  Oligonucleotide primer for the detection of SNP TSC0033285
aacaaacttcta

SEQ ID NO: 326803 - DNA, 12 bp, Artificial Sequence
  Oligonucleotide primer for the detection of SNP TSC0033285
cttaccatactt

SEQ ID NO: 326804 - DNA, 12 bp, Artificial Sequence
  Oligonucleotide primer for the detection of SNP TSC0033285
aataaatttttg

SEQ ID NO: 326805 - DNA, 12 bp, Artificial Sequence
  Oligonucleotide primer for the detection of SNP TSC0033286
ttaggattatag

SEQ ID NO: 326806 - DNA, 12 bp, Artificial Sequence
  Oligonucleotide primer for the detection of SNP TSC0033287
aaaatctattac

SEQ ID NO: 326807 - DNA, 12 bp, Artificial Sequence
  Oligonucleotide primer for the detection of SNP TSC0033287
taggttttggag

SEQ ID NO: 326808 - DNA, 12 bp, Artificial Sequence
  Oligonucleotide primer for the detection of SNP TSC0033288
actaaaactact

SEQ ID NO: 326809 - DNA, 12 bp, Artificial Sequence
  Oligonucleotide primer for the detection of SNP TSC0033289
ccacaacatccc

SEQ ID NO: 326810 - DNA, 12 bp, Artificial Sequence
  Oligonucleotide primer for the detection of SNP TSC0033289
ccacaacgtccc

SEQ ID NO: 326811 - DNA, 12 bp, Artificial Sequence
  Oligonucleotide primer for the detection of SNP TSC0033289
ccacgacatccc

SEQ ID NO: 326812 - DNA, 12 bp, Artificial Sequence
  Oligonucleotide primer for the detection of SNP TSC0033289
ccgcaacatccc

SEQ ID NO: 326813 - DNA, 12 bp, Artificial Sequence
  Oligonucleotide primer for the detection of SNP TSC0033289
ccacgacgtccc

SEQ ID NO: 326814 - DNA, 12 bp, Artificial Sequence
  Oligonucleotide primer for the detection of SNP TSC0033289
ccgcaacgtccc

SEQ ID NO: 326815 - DNA, 12 bp, Artificial Sequence
  Oligonucleotide primer for the detection of SNP TSC0033289
ccgcgacatccc

SEQ ID NO: 326816 - DNA, 12 bp, Artificial Sequence
  Oligonucleotide primer for the detection of SNP TSC0033289
ccgcgacgtccc

SEQ ID NO: 326817 - DNA, 12 bp, Artificial Sequence
  Oligonucleotide primer for the detection of SNP TSC0033289
gaatggagtgat

SEQ ID NO: 326818 - DNA, 12 bp, Artificial Sequence
  Oligonukleotid-Primer
gaacggagtgat

SEQ ID NO: 326819 - DNA, 12 bp, Artificial Sequence
  Oligonucleotide primer for the detection of SNP TSC0033289
gaatggagcgat

SEQ ID NO: 326820 - DNA, 12 bp, Artificial Sequence
  Oligonucleotide primer for the detection of SNP TSC0033289
gaacggagcgat

SEQ ID NO: 326821 - DNA, 12 bp, Artificial Sequence
  Oligonucleotide primer for the detection of SNP TSC0033289
aaaacaaaacga

SEQ ID NO: 326822 - DNA, 12 bp, Artificial Sequence
  Oligonucleotide primer for the detection of SNP TSC0033289
aaaacgaaacaa

SEQ ID NO: 326823 - DNA, 12 bp, Artificial Sequence
  Oligonucleotide primer for the detection of SNP TSC0033289
aaaacgaaacga

SEQ ID NO: 326824 - DNA, 12 bp, Artificial Sequence
  Oligonucleotide primer for the detection of SNP TSC0033289
ttgtgatgtttt

SEQ ID NO: 326825 - DNA, 12 bp, Artificial Sequence
  Oligonucleotide primer for the detection of SNP TSC0033289
tcgtgatgtttt

SEQ ID NO: 326826 - DNA, 12 bp, Artificial Sequence
  Oligonucleotide primer for the detection of SNP TSC0033289
ttgcgatgtttt

SEQ ID NO: 326827 - DNA, 12 bp, Artificial Sequence
  Oligonucleotide primer for the detection of SNP TSC0033289
ttgtgacgtttt

SEQ ID NO: 326828 - DNA, 12 bp, Artificial Sequence
  Oligonucleotide primer for the detection of SNP TSC0033289
ttgtgatgtttc

SEQ ID NO: 326829 - DNA, 12 bp, Artificial Sequence
  Oligonucleotide primer for the detection of SNP TSC0033289
tcgcgatgtttt

SEQ ID NO: 326830 - DNA, 12 bp, Artificial Sequence
  Oligonucleotide primer for the detection of SNP TSC0033289
tcgtgacgtttt

SEQ ID NO: 326831 - DNA, 12 bp, Artificial Sequence
  Oligonucleotide primer for the detection of SNP TSC0033289
tcgtgatgtttc

SEQ ID NO: 326832 - DNA, 12 bp, Artificial Sequence
  Oligonucleotide primer for the detection of SNP TSC0033289
ttgcgacgtttt

SEQ ID NO: 326833 - DNA, 12 bp, Artificial Sequence
  Oligonucleotide primer for the detection of SNP TSC0033289
ttgcgatgtttc

SEQ ID NO: 326834 - DNA, 12 bp, Artificial Sequence
  Oligonucleotide primer for the detection of SNP TSC0033289
ttgtgacgtttc

SEQ ID NO: 326835 - DNA, 12 bp, Artificial Sequence
  Oligonucleotide primer for the detection of SNP TSC0033289
tcgcgacgtttt

SEQ ID NO: 326836 - DNA, 12 bp, Artificial Sequence
  Oligonucleotide primer for the detection of SNP TSC0033289
tcgcgatgtttc

SEQ ID NO: 326837 - DNA, 12 bp, Artificial Sequence
  Oligonucleotide primer for the detection of SNP TSC0033289
tcgtgacgtttc

SEQ ID NO: 326838 - DNA, 12 bp, Artificial Sequence
  Oligonucleotide primer for the detection of SNP TSC0033289
ttgcgacgtttc

SEQ ID NO: 326839 - DNA, 12 bp, Artificial Sequence
  Oligonucleotide primer for the detection of SNP TSC0033289
tcgcgacgtttc

SEQ ID NO: 326840 - DNA, 12 bp, Artificial Sequence
  Oligonucleotide primer for the detection of SNP TSC0033290
taattcaccact

SEQ ID NO: 326841 - DNA, 12 bp, Artificial Sequence
  Oligonucleotide primer for the detection of SNP TSC0033295
tttgagacggaa

SEQ ID NO: 326842 - DNA, 12 bp, Artificial Sequence
  Oligonucleotide primer for the detection of SNP TSC0033295
tttaaaacaaaa

SEQ ID NO: 326843 - DNA, 12 bp, Artificial Sequence
  Oligonucleotide primer for the detection of SNP TSC0033295
tttaaaacgaaa

SEQ ID NO: 326844 - DNA, 12 bp, Artificial Sequence
  Oligonucleotide primer for the detection of SNP TSC0033296
attgtgttaggt

SEQ ID NO: 326845 - DNA, 12 bp, Artificial Sequence
  Oligonucleotide primer for the detection of SNP TSC0033296
actataccaaac

SEQ ID NO: 326846 - DNA, 12 bp, Artificial Sequence
  Oligonucleotide primer for the detection of SNP TSC0033296
ataatggaaata

SEQ ID NO: 326847 - DNA, 12 bp, Artificial Sequence
  Oligonucleotide primer for the detection of SNP TSC0033298
ttatttattatt

SEQ ID NO: 326848 - DNA, 12 bp, Artificial Sequence
  Oligonucleotide primer for the detection of SNP TSC0033301
aatcctaattcc

SEQ ID NO: 326849 - DNA, 12 bp, Artificial Sequence
  Oligonucleotide primer for the detection of SNP TSC0033302
aaatatcatata

SEQ ID NO: 326850 - DNA, 12 bp, Artificial Sequence
  Oligonucleotide primer for the detection of SNP TSC0033302
taataaaaattt

SEQ ID NO: 326851 - DNA, 12 bp, Artificial Sequence
  Oligonucleotide primer for the detection of SNP TSC0033302
acaacaaaaact

SEQ ID NO: 326852 - DNA, 12 bp, Artificial Sequence
  Oligonucleotide primer for the detection of SNP TSC0033302
agtattatgtat

SEQ ID NO: 326853 - DNA, 12 bp, Artificial Sequence
  Oligonucleotide primer for the detection of SNP TSC0033309
cttcttaaaacc

SEQ ID NO: 326854 - DNA, 12 bp, Artificial Sequence
  Oligonucleotide primer for the detection of SNP TSC0033309
tgtaatataaat

SEQ ID NO: 326855 - DNA, 12 bp, Artificial Sequence
  Oligonucleotide primer for the detection of SNP TSC0033311
aaactccaaatc

SEQ ID NO: 326856 - DNA, 12 bp, Artificial Sequence
  Oligonucleotide primer for the detection of SNP TSC0033311
tttgtaggatga

SEQ ID NO: 326857 - DNA, 12 bp, Artificial Sequence
  Oligonucleotide primer for the detection of SNP TSC0033312
aaaatctatctt

SEQ ID NO: 326858 - DNA, 12 bp, Artificial Sequence
  Oligonucleotide primer for the detection of SNP TSC0033312
ggtgattatgag

SEQ ID NO: 326859 - DNA, 12 bp, Artificial Sequence
  Oligonucleotide primer for the detection of SNP TSC0033313
aaatctatcttc

SEQ ID NO: 326860 - DNA, 12 bp, Artificial Sequence
  Oligonucleotide primer for the detection of SNP TSC0033313
aggtgattatga

SEQ ID NO: 326861 - DNA, 12 bp, Artificial Sequence
  Oligonucleotide primer for the detection of SNP TSC0033314
caaatcaactat

SEQ ID NO: 326862 - DNA, 12 bp, Artificial Sequence
  Oligonucleotide primer for the detection of SNP TSC0033314
ataggtttttag

SEQ ID NO: 326863 - DNA, 12 bp, Artificial Sequence
  Oligonucleotide primer for the detection of SNP TSC0033315
atcaactctaaa

SEQ ID NO: 326864 - DNA, 12 bp, Artificial Sequence
  Oligonucleotide primer for the detection of SNP TSC0033315
tatttttagttc

SEQ ID NO: 326865 - DNA, 12 bp, Artificial Sequence
  Oligonucleotide primer for the detection of SNP TSC0033315
cacctccaactc

SEQ ID NO: 326866 - DNA, 12 bp, Artificial Sequence
  Oligonucleotide primer for the detection of SNP TSC0033315
ggattagttttg

SEQ ID NO: 326867 - DNA, 12 bp, Artificial Sequence
  Oligonucleotide primer for the detection of SNP TSC0033316
tttgggttgggg

SEQ ID NO: 326868 - DNA, 12 bp, Artificial Sequence
  Oligonucleotide primer for the detection of SNP TSC0033316
tctaaattaaaa

SEQ ID NO: 326869 - DNA, 12 bp, Artificial Sequence
  Oligonucleotide primer for the detection of SNP TSC0033316
attatagattat

SEQ ID NO: 326870 - DNA, 12 bp, Artificial Sequence
  Oligonucleotide primer for the detection of SNP TSC0033317
atcaccaatttt

SEQ ID NO: 326871 - DNA, 12 bp, Artificial Sequence
  Oligonucleotide primer for the detection of SNP TSC0033317
gtcaccaatttt

SEQ ID NO: 326872 - DNA, 12 bp, Artificial Sequence
  Oligonucleotide primer for the detection of SNP TSC0033317
agtagggaggaa

SEQ ID NO: 326873 - DNA, 12 bp, Artificial Sequence
  Oligonucleotide primer for the detection of SNP TSC0033319
cactacaaactc

SEQ ID NO: 326874 - DNA, 12 bp, Artificial Sequence
  Oligonucleotide primer for the detection of SNP TSC0033320
aaaatcacaact

SEQ ID NO: 326875 - DNA, 12 bp, Artificial Sequence
  Oligonucleotide primer for the detection of SNP TSC0033321
tatacaaaataa

SEQ ID NO: 326876 - DNA, 12 bp, Artificial Sequence
  Oligonucleotide primer for the detection of SNP TSC0033321
atccttacctcc

SEQ ID NO: 326877 - DNA, 12 bp, Artificial Sequence
  Oligonucleotide primer for the detection of SNP TSC0033321
tgtgtaaggtgg

SEQ ID NO: 326878 - DNA, 12 bp, Artificial Sequence
  Oligonucleotide primer for the detection of SNP TSC0033322
taaaactaccac

SEQ ID NO: 326879 - DNA, 12 bp, Artificial Sequence
  Oligonucleotide primer for the detection of SNP TSC0033322
taaaactaccgc

SEQ ID NO: 326880 - DNA, 12 bp, Artificial Sequence
  Oligonucleotide primer for the detection of SNP TSC0033322
ggttatttgttg

SEQ ID NO: 326881 - DNA, 12 bp, Artificial Sequence
  Oligonucleotide primer for the detection of SNP TSC0033322
aatcacctacta

SEQ ID NO: 326882 - DNA, 12 bp, Artificial Sequence
  Oligonucleotide primer for the detection of SNP TSC0033322
tgaggttgttgt

SEQ ID NO: 326883 - DNA, 12 bp, Artificial Sequence
  Oligonucleotide primer for the detection of SNP TSC0033322
tgaggttgtcgt

SEQ ID NO: 326884 - DNA, 12 bp, Artificial Sequence
  Oligonucleotide primer for the detection of SNP TSC0033323
tactaactaaac

SEQ ID NO: 326885 - DNA, 12 bp, Artificial Sequence
  Oligonucleotide primer for the detection of SNP TSC0033323
tggagtttttgg

SEQ ID NO: 326886 - DNA, 12 bp, Artificial Sequence
  Oligonucleotide primer for the detection of SNP TSC0033323
tggagttttcgg

SEQ ID NO: 326887 - DNA, 12 bp, Artificial Sequence
  Oligonucleotide primer for the detection of SNP TSC0033323
taaaattctcaa

SEQ ID NO: 326888 - DNA, 12 bp, Artificial Sequence
  Oligonucleotide primer for the detection of SNP TSC0033323
taaaattctcga

SEQ ID NO: 326889 - DNA, 12 bp, Artificial Sequence
  Oligonucleotide primer for the detection of SNP TSC0033323
tgttggttgagt

SEQ ID NO: 326890 - DNA, 12 bp, Artificial Sequence
  Oligonucleotide primer for the detection of SNP TSC0033323
tgttggttgagc

SEQ ID NO: 326891 - DNA, 12 bp, Artificial Sequence
  Oligonucleotide primer for the detection of SNP TSC0033326
acaaaaatcact

SEQ ID NO: 326892 - DNA, 12 bp, Artificial Sequence
  Oligonucleotide primer for the detection of SNP TSC0033326
aagaaagtttta

SEQ ID NO: 326893 - DNA, 12 bp, Artificial Sequence
  Oligonucleotide primer for the detection of SNP TSC0033326
ataaaaattatt

SEQ ID NO: 326894 - DNA, 12 bp, Artificial Sequence
  Oligonucleotide primer for the detection of SNP TSC0033327
ctccctataaac

SEQ ID NO: 326895 - DNA, 12 bp, Artificial Sequence
  Oligonukleotid-Primer
aattcctattaa

SEQ ID NO: 326896 - DNA, 12 bp, Artificial Sequence
  Oligonucleotide primer for the detection of SNP TSC0033327
tttttataagtt

SEQ ID NO: 326897 - DNA, 12 bp, Artificial Sequence
  Oligonucleotide primer for the detection of SNP TSC0033328
cttaaactaacc

SEQ ID NO: 326898 - DNA, 12 bp, Artificial Sequence
  Oligonucleotide primer for the detection of SNP TSC0033328
agtgagttgtta

SEQ ID NO: 326899 - DNA, 12 bp, Artificial Sequence
  Oligonucleotide primer for the detection of SNP TSC0033328
aataaactatta

SEQ ID NO: 326900 - DNA, 12 bp, Artificial Sequence
  Oligonucleotide primer for the detection of SNP TSC0033328
tttgagttaatt

SEQ ID NO: 326901 - DNA, 12 bp, Artificial Sequence
  Oligonucleotide primer for the detection of SNP TSC0033329
taaattaccaaa

SEQ ID NO: 326902 - DNA, 12 bp, Artificial Sequence
  Oligonucleotide primer for the detection of SNP TSC0033329
attgtatgattt

SEQ ID NO: 326903 - DNA, 12 bp, Artificial Sequence
  Oligonucleotide primer for the detection of SNP TSC0033329
attgtacgattt

SEQ ID NO: 326904 - DNA, 12 bp, Artificial Sequence
  Oligonucleotide primer for the detection of SNP TSC0033329
attatacaattc

SEQ ID NO: 326905 - DNA, 12 bp, Artificial Sequence
  Oligonucleotide primer for the detection of SNP TSC0033329
attatacgattc

SEQ ID NO: 326906 - DNA, 12 bp, Artificial Sequence
  Oligonucleotide primer for the detection of SNP TSC0033329
taataggttgtt

SEQ ID NO: 326907 - DNA, 12 bp, Artificial Sequence
  Oligonucleotide primer for the detection of SNP TSC0033330
tttgtggtgtta

SEQ ID NO: 326908 - DNA, 12 bp, Artificial Sequence
  Oligonucleotide primer for the detection of SNP TSC0033330
ctataatactaa

SEQ ID NO: 326909 - DNA, 12 bp, Artificial Sequence
  Oligonucleotide primer for the detection of SNP TSC0033330
taaggagattaa

SEQ ID NO: 326910 - DNA, 12 bp, Artificial Sequence
  Oligonucleotide primer for the detection of SNP TSC0033331
taacaatttaaa

SEQ ID NO: 326911 - DNA, 12 bp, Artificial Sequence
  Oligonucleotide primer for the detection of SNP TSC0033331
ttagattaattt

SEQ ID NO: 326912 - DNA, 12 bp, Artificial Sequence
  Oligonucleotide primer for the detection of SNP TSC0033331
actaaattaatc

SEQ ID NO: 326913 - DNA, 12 bp, Artificial Sequence
  Oligonucleotide primer for the detection of SNP TSC0033333
tacaaatatctt

SEQ ID NO: 326914 - DNA, 12 bp, Artificial Sequence
  Oligonucleotide primer for the detection of SNP TSC0033333
atattgataaaa

SEQ ID NO: 326915 - DNA, 12 bp, Artificial Sequence
  Oligonucleotide primer for the detection of SNP TSC0033333
atatcgataaaa

SEQ ID NO: 326916 - DNA, 12 bp, Artificial Sequence
  Oligonucleotide primer for the detection of SNP TSC0033333
acatcaataaaa

SEQ ID NO: 326917 - DNA, 12 bp, Artificial Sequence
  Oligonucleotide primer for the detection of SNP TSC0033333
acatcgataaaa

SEQ ID NO: 326918 - DNA, 12 bp, Artificial Sequence
  Oligonucleotide primer for the detection of SNP TSC0033333
tataaatatttt

SEQ ID NO: 326919 - DNA, 12 bp, Artificial Sequence
  Oligonucleotide primer for the detection of SNP TSC0033334
ttattgagttat

SEQ ID NO: 326920 - DNA, 12 bp, Artificial Sequence
  Oligonucleotide primer for the detection of SNP TSC0033334
accattaaatca

SEQ ID NO: 326921 - DNA, 12 bp, Artificial Sequence
  Oligonucleotide primer for the detection of SNP TSC0033334
ggtggggaggag

SEQ ID NO: 326922 - DNA, 12 bp, Artificial Sequence
  Oligonucleotide primer for the detection of SNP TSC0033339
actatccccaac

SEQ ID NO: 326923 - DNA, 12 bp, Artificial Sequence
  Oligonucleotide primer for the detection of SNP TSC0033339
acctcccaaaaa

SEQ ID NO: 326924 - DNA, 12 bp, Artificial Sequence
  Oligonucleotide primer for the detection of SNP TSC0033339
acctcccgaaaa

SEQ ID NO: 326925 - DNA, 12 bp, Artificial Sequence
  Oligonucleotide primer for the detection of SNP TSC0033339
gttgtttttagt

SEQ ID NO: 326926 - DNA, 12 bp, Artificial Sequence
  Oligonucleotide primer for the detection of SNP TSC0033339
gttgtttttagc

SEQ ID NO: 326927 - DNA, 12 bp, Artificial Sequence
  Oligonucleotide primer for the detection of SNP TSC0033341
atactaacacac

SEQ ID NO: 326928 - DNA, 12 bp, Artificial Sequence
  Oligonucleotide primer for the detection of SNP TSC0033341
ttgggtatatga

SEQ ID NO: 326929 - DNA, 12 bp, Artificial Sequence
  Oligonucleotide primer for the detection of SNP TSC0033342
aaataaaatccc

SEQ ID NO: 326930 - DNA, 12 bp, Artificial Sequence
  Oligonucleotide primer for the detection of SNP TSC0033342
atttagtgattt

SEQ ID NO: 326931 - DNA, 12 bp, Artificial Sequence
  Oligonucleotide primer for the detection of SNP TSC0033342
acttaataattt

SEQ ID NO: 326932 - DNA, 12 bp, Artificial Sequence
  Oligonucleotide primer for the detection of SNP TSC0033342
aaatagggtttt

SEQ ID NO: 326933 - DNA, 12 bp, Artificial Sequence
  Oligonucleotide primer for the detection of SNP TSC0033344
atatttcttcat

SEQ ID NO: 326934 - DNA, 12 bp, Artificial Sequence
  Oligonucleotide primer for the detection of SNP TSC0033344
attctcacatta

SEQ ID NO: 326935 - DNA, 12 bp, Artificial Sequence
  Oligonucleotide primer for the detection of SNP TSC0033347
taaacaaaaatc

SEQ ID NO: 326936 - DNA, 12 bp, Artificial Sequence
  Oligonucleotide primer for the detection of SNP TSC0033347
tgagtagagatt

SEQ ID NO: 326937 - DNA, 12 bp, Artificial Sequence
  Oligonucleotide primer for the detection of SNP TSC0033347
tgagtagagatc

SEQ ID NO: 326938 - DNA, 12 bp, Artificial Sequence
  Oligonucleotide primer for the detection of SNP TSC0033348
caaaacaccccc

SEQ ID NO: 326939 - DNA, 12 bp, Artificial Sequence
  Oligonucleotide primer for the detection of SNP TSC0033348
ttgtataaattt

SEQ ID NO: 326940 - DNA, 12 bp, Artificial Sequence
  Oligonucleotide primer for the detection of SNP TSC0033348
ctacataaattt

SEQ ID NO: 326941 - DNA, 12 bp, Artificial Sequence
  Oligonucleotide primer for the detection of SNP TSC0033352
ttttaatccatc

SEQ ID NO: 326942 - DNA, 12 bp, Artificial Sequence
  Oligonucleotide primer for the detection of SNP TSC0033352
aattgagatggt

SEQ ID NO: 326943 - DNA, 12 bp, Artificial Sequence
  Oligonucleotide primer for the detection of SNP TSC0033354
tttttaagatag

SEQ ID NO: 326944 - DNA, 12 bp, Artificial Sequence
  Oligonucleotide primer for the detection of SNP TSC0033363
ttttacattttt

SEQ ID NO: 326945 - DNA, 12 bp, Artificial Sequence
  Oligonucleotide primer for the detection of SNP TSC0033363
gaaggagttttt

SEQ ID NO: 326946 - DNA, 12 bp, Artificial Sequence
  Oligonucleotide primer for the detection of SNP TSC0033366
accttaaataat

SEQ ID NO: 326947 - DNA, 12 bp, Artificial Sequence
  Oligonucleotide primer for the detection of SNP TSC0033367
accttatcttct

SEQ ID NO: 326948 - DNA, 12 bp, Artificial Sequence
  Oligonucleotide primer for the detection of SNP TSC0033367
gtagaggttagg

SEQ ID NO: 326949 - DNA, 12 bp, Artificial Sequence
  Oligonucleotide primer for the detection of SNP TSC0033369
aaaccctaaaat

SEQ ID NO: 326950 - DNA, 12 bp, Artificial Sequence
  Oligonucleotide primer for the detection of SNP TSC0033369
gtattggttatt

SEQ ID NO: 326951 - DNA, 12 bp, Artificial Sequence
  Oligonucleotide primer for the detection of SNP TSC0033369
ctacactaacca

SEQ ID NO: 326952 - DNA, 12 bp, Artificial Sequence
  Oligonucleotide primer for the detection of SNP TSC0033369
aggttttggggt

SEQ ID NO: 326953 - DNA, 12 bp, Artificial Sequence
  Oligonucleotide primer for the detection of SNP TSC0033370
tataaaaatctc

SEQ ID NO: 326954 - DNA, 12 bp, Artificial Sequence
  Oligonucleotide primer for the detection of SNP TSC0033370
tgtttttggagg

SEQ ID NO: 326955 - DNA, 12 bp, Artificial Sequence
  Oligonucleotide primer for the detection of SNP TSC0033371
gtaacacataac

SEQ ID NO: 326956 - DNA, 12 bp, Artificial Sequence
  Oligonucleotide primer for the detection of SNP TSC0033372
acatacattaca

SEQ ID NO: 326957 - DNA, 12 bp, Artificial Sequence
  Oligonucleotide primer for the detection of SNP TSC0033372
atttaatatttt

SEQ ID NO: 326958 - DNA, 12 bp, Artificial Sequence
  Oligonucleotide primer for the detection of SNP TSC0033372
acttaacatttt

SEQ ID NO: 326959 - DNA, 12 bp, Artificial Sequence
  Oligonucleotide primer for the detection of SNP TSC0033372
atatatattgta

SEQ ID NO: 326960 - DNA, 12 bp, Artificial Sequence
  Oligonucleotide primer for the detection of SNP TSC0033373
atatcttctaac

SEQ ID NO: 326961 - DNA, 12 bp, Artificial Sequence
  Oligonucleotide primer for the detection of SNP TSC0033373
aagtaaatgtaa

SEQ ID NO: 326962 - DNA, 12 bp, Artificial Sequence
  Oligonucleotide primer for the detection of SNP TSC0033373
aaacaaatacaa

SEQ ID NO: 326963 - DNA, 12 bp, Artificial Sequence
  Oligonucleotide primer for the detection of SNP TSC0033374
tcactccaaaat

SEQ ID NO: 326964 - DNA, 12 bp, Artificial Sequence
  Oligonucleotide primer for the detection of SNP TSC0033374
tcactccgaaat

SEQ ID NO: 326965 - DNA, 12 bp, Artificial Sequence
  Oligonucleotide primer for the detection of SNP TSC0033374
agttagaagata

SEQ ID NO: 326966 - DNA, 12 bp, Artificial Sequence
  Oligonucleotide primer for the detection of SNP TSC0033377
ctctaaacccta

SEQ ID NO: 326967 - DNA, 12 bp, Artificial Sequence
  Oligonucleotide primer for the detection of SNP TSC0033377
tatttaggatgt

SEQ ID NO: 326968 - DNA, 12 bp, Artificial Sequence
  Oligonucleotide primer for the detection of SNP TSC0033379
atttctcccctc

SEQ ID NO: 326969 - DNA, 12 bp, Artificial Sequence
  Oligonucleotide primer for the detection of SNP TSC0033379
ttggaaaatgtt

SEQ ID NO: 326970 - DNA, 12 bp, Artificial Sequence
  Oligonucleotide primer for the detection of SNP TSC0033379
taaaaaatacta

SEQ ID NO: 326971 - DNA, 12 bp, Artificial Sequence
  Oligonucleotide primer for the detection of SNP TSC0033380
attaaatatata

SEQ ID NO: 326972 - DNA, 12 bp, Artificial Sequence
  Oligonucleotide primer for the detection of SNP TSC0033380
attaaatacaca

SEQ ID NO: 326973 - DNA, 12 bp, Artificial Sequence
  Oligonucleotide primer for the detection of SNP TSC0033380
aagttaatagat

SEQ ID NO: 326974 - DNA, 12 bp, Artificial Sequence
  Oligonucleotide primer for the detection of SNP TSC0033383
tttaaatcatta

SEQ ID NO: 326975 - DNA, 12 bp, Artificial Sequence
  Oligonucleotide primer for the detection of SNP TSC0033383
tttaaatcgtta

SEQ ID NO: 326976 - DNA, 12 bp, Artificial Sequence
  Oligonucleotide primer for the detection of SNP TSC0033383
caatctaaaacc

SEQ ID NO: 326977 - DNA, 12 bp, Artificial Sequence
  Oligonucleotide primer for the detection of SNP TSC0033383
tttagattgttg

SEQ ID NO: 326978 - DNA, 12 bp, Artificial Sequence
  Oligonucleotide primer for the detection of SNP TSC0033383
tttagatcgttg

SEQ ID NO: 326979 - DNA, 12 bp, Artificial Sequence
  Oligonucleotide primer for the detection of SNP TSC0033385
aattctaaacaa

SEQ ID NO: 326980 - DNA, 12 bp, Artificial Sequence
  Oligonucleotide primer for the detection of SNP TSC0033385
agaattttttta

SEQ ID NO: 326981 - DNA, 12 bp, Artificial Sequence
  Oligonucleotide primer for the detection of SNP TSC0033387
agtaagttgaga

SEQ ID NO: 326982 - DNA, 12 bp, Artificial Sequence
  Oligonucleotide primer for the detection of SNP TSC0033390
ctcaataaaaaa

SEQ ID NO: 326983 - DNA, 12 bp, Artificial Sequence
  Oligonucleotide primer for the detection of SNP TSC0033390
ggttttagagaa

SEQ ID NO: 326984 - DNA, 12 bp, Artificial Sequence
  Oligonucleotide primer for the detection of SNP TSC0033390
aatttcaaaaaa

SEQ ID NO: 326985 - DNA, 12 bp, Artificial Sequence
  Oligonucleotide primer for the detection of SNP TSC0033390
tttaatgagggg

SEQ ID NO: 326986 - DNA, 12 bp, Artificial Sequence
  Oligonucleotide primer for the detection of SNP TSC0033391
tcctcaatttcc

SEQ ID NO: 326987 - DNA, 12 bp, Artificial Sequence
  Oligonucleotide primer for the detection of SNP TSC0033391
ttaaaatttaat

SEQ ID NO: 326988 - DNA, 12 bp, Artificial Sequence
  Oligonucleotide primer for the detection of SNP TSC0033391
ccaaaactcaac

SEQ ID NO: 326989 - DNA, 12 bp, Artificial Sequence
  Oligonucleotide primer for the detection of SNP TSC0033392
ccactaataccc

SEQ ID NO: 326990 - DNA, 12 bp, Artificial Sequence
  Oligonucleotide primer for the detection of SNP TSC0033392
ttattaatgttt

SEQ ID NO: 326991 - DNA, 12 bp, Artificial Sequence
  Oligonucleotide primer for the detection of SNP TSC0033393
aacaacctaata

SEQ ID NO: 326992 - DNA, 12 bp, Artificial Sequence
  Oligonucleotide primer for the detection of SNP TSC0033393
aaacatccaaat

SEQ ID NO: 326993 - DNA, 12 bp, Artificial Sequence
  Oligonucleotide primer for the detection of SNP TSC0033393
ataatttgatat

SEQ ID NO: 326994 - DNA, 12 bp, Artificial Sequence
  Oligonucleotide primer for the detection of SNP TSC0033394
ttaaaacaactt

SEQ ID NO: 326995 - DNA, 12 bp, Artificial Sequence
  Oligonucleotide primer for the detection of SNP TSC0033394
tttaataaaaat

SEQ ID NO: 326996 - DNA, 12 bp, Artificial Sequence
  Oligonucleotide primer for the detection of SNP TSC0033394
ggggtaattttt

SEQ ID NO: 326997 - DNA, 12 bp, Artificial Sequence
  Oligonucleotide primer for the detection of SNP TSC0033395
aattttaccata

SEQ ID NO: 326998 - DNA, 12 bp, Artificial Sequence
  Oligonucleotide primer for the detection of SNP TSC0033395
ggttttgttata

SEQ ID NO: 326999 - DNA, 12 bp, Artificial Sequence
  Oligonucleotide primer for the detection of SNP TSC0033397
catttaaaaacc

SEQ ID NO: 327000 - DNA, 12 bp, Artificial Sequence
  Oligonucleotide primer for the detection of SNP TSC0033397
ggatgttttttg

SEQ ID NO: 327001 - DNA, 12 bp, Artificial Sequence
  Oligonucleotide primer for the detection of SNP TSC0033397
ggatgtttttcg

SEQ ID NO: 327002 - DNA, 12 bp, Artificial Sequence
  Oligonucleotide primer for the detection of SNP TSC0033400
tccaaatctaac

SEQ ID NO: 327003 - DNA, 12 bp, Artificial Sequence
  Oligonucleotide primer for the detection of SNP TSC0033400
tccgaatctaac

SEQ ID NO: 327004 - DNA, 12 bp, Artificial Sequence
  Oligonucleotide primer for the detection of SNP TSC0033400
gtttgtttatgg

SEQ ID NO: 327005 - DNA, 12 bp, Artificial Sequence
  Oligonucleotide primer for the detection of SNP TSC0033400
gttcgtttatgg

SEQ ID NO: 327006 - DNA, 12 bp, Artificial Sequence
  Oligonucleotide primer for the detection of SNP TSC0033400
attcattcataa

SEQ ID NO: 327007 - DNA, 12 bp, Artificial Sequence
  Oligonucleotide primer for the detection of SNP TSC0033400
attcgttcataa

SEQ ID NO: 327008 - DNA, 12 bp, Artificial Sequence
  Oligonucleotide primer for the detection of SNP TSC0033400
ttgagtttgatt

SEQ ID NO: 327009 - DNA, 12 bp, Artificial Sequence
  Oligonucleotide primer for the detection of SNP TSC0033400
tcgagtttgatt

SEQ ID NO: 327010 - DNA, 12 bp, Artificial Sequence
  Oligonucleotide primer for the detection of SNP TSC0033401
atcttaaacatt

SEQ ID NO: 327011 - DNA, 12 bp, Artificial Sequence
  Oligonucleotide primer for the detection of SNP TSC0033401
tttagaaattag

SEQ ID NO: 327012 - DNA, 12 bp, Artificial Sequence
  Oligonucleotide primer for the detection of SNP TSC0033403
ccacctaaccct

SEQ ID NO: 327013 - DNA, 12 bp, Artificial Sequence
  Oligonucleotide primer for the detection of SNP TSC0033405
ctactactttaa

SEQ ID NO: 327014 - DNA, 12 bp, Artificial Sequence
  Oligonucleotide primer for the detection of SNP TSC0033405
tagggtatttag

SEQ ID NO: 327015 - DNA, 12 bp, Artificial Sequence
  Oligonucleotide primer for the detection of SNP TSC0033407
aacttctctact

SEQ ID NO: 327016 - DNA, 12 bp, Artificial Sequence
  Oligonucleotide primer for the detection of SNP TSC0033407
ttgttaagggga

SEQ ID NO: 327017 - DNA, 12 bp, Artificial Sequence
  Oligonucleotide primer for the detection of SNP TSC0033408
ttaatatattta

SEQ ID NO: 327018 - DNA, 12 bp, Artificial Sequence
  Oligonucleotide primer for the detection of SNP TSC0033408
aatgtatagttg

SEQ ID NO: 327019 - DNA, 12 bp, Artificial Sequence
  Oligonucleotide primer for the detection of SNP TSC0033408
aatatataacta

SEQ ID NO: 327020 - DNA, 12 bp, Artificial Sequence
  Oligonucleotide primer for the detection of SNP TSC0033408
ttaatatgttta

SEQ ID NO: 327021 - DNA, 12 bp, Artificial Sequence
  Oligonucleotide primer for the detection of SNP TSC0033409
tctaaatatcca

SEQ ID NO: 327022 - DNA, 12 bp, Artificial Sequence
  Oligonucleotide primer for the detection of SNP TSC0033409
tctaaatatccg

SEQ ID NO: 327023 - DNA, 12 bp, Artificial Sequence
  Oligonucleotide primer for the detection of SNP TSC0033409
ttagtatatatt

SEQ ID NO: 327024 - DNA, 12 bp, Artificial Sequence
  Oligonukleotid-Primer
tccaatacatac

SEQ ID NO: 327025 - DNA, 12 bp, Artificial Sequence
  Oligonucleotide primer for the detection of SNP TSC0033409
gggtatttgttt

SEQ ID NO: 327026 - DNA, 12 bp, Artificial Sequence
  Oligonucleotide primer for the detection of SNP TSC0033409
gggtattcgttt

SEQ ID NO: 327027 - DNA, 12 bp, Artificial Sequence
  Oligonucleotide primer for the detection of SNP TSC0033412
aaacaatataac

SEQ ID NO: 327028 - DNA, 12 bp, Artificial Sequence
  Oligonucleotide primer for the detection of SNP TSC0033412
gagtaatatagt

SEQ ID NO: 327029 - DNA, 12 bp, Artificial Sequence
  Oligonucleotide primer for the detection of SNP TSC0033416
taaatttataaa

SEQ ID NO: 327030 - DNA, 12 bp, Artificial Sequence
  Oligonucleotide primer for the detection of SNP TSC0033416
tttgtgattatt

SEQ ID NO: 327031 - DNA, 12 bp, Artificial Sequence
  Oligonucleotide primer for the detection of SNP TSC0033416
tctataatcatt

SEQ ID NO: 327032 - DNA, 12 bp, Artificial Sequence
  Oligonucleotide primer for the detection of SNP TSC0033416
taaatttgtaga

SEQ ID NO: 327033 - DNA, 12 bp, Artificial Sequence
  Oligonucleotide primer for the detection of SNP TSC0033418
ctaccactttaa

SEQ ID NO: 327034 - DNA, 12 bp, Artificial Sequence
  Oligonucleotide primer for the detection of SNP TSC0033418
tatggtaggtaa

SEQ ID NO: 327035 - DNA, 12 bp, Artificial Sequence
  Oligonucleotide primer for the detection of SNP TSC0033418
cataataaataa

SEQ ID NO: 327036 - DNA, 12 bp, Artificial Sequence
  Oligonucleotide primer for the detection of SNP TSC0033418
tgttattttggt

SEQ ID NO: 327037 - DNA, 12 bp, Artificial Sequence
  Oligonucleotide primer for the detection of SNP TSC0033419
catatattaaaa

SEQ ID NO: 327038 - DNA, 12 bp, Artificial Sequence
  Oligonucleotide primer for the detection of SNP TSC0033419
aagagagaattt

SEQ ID NO: 327039 - DNA, 12 bp, Artificial Sequence
  Oligonucleotide primer for the detection of SNP TSC0033419
tatgtgttggaa

SEQ ID NO: 327040 - DNA, 12 bp, Artificial Sequence
  Oligonucleotide primer for the detection of SNP TSC0033420
cacctctaaccc

SEQ ID NO: 327041 - DNA, 12 bp, Artificial Sequence
  Oligonucleotide primer for the detection of SNP TSC0033420
gttttgggagaa

SEQ ID NO: 327042 - DNA, 12 bp, Artificial Sequence
  Oligonucleotide primer for the detection of SNP TSC0033420
accttaaaaaaa

SEQ ID NO: 327043 - DNA, 12 bp, Artificial Sequence
  Oligonucleotide primer for the detection of SNP TSC0033420
tatttttgattt

SEQ ID NO: 327044 - DNA, 12 bp, Artificial Sequence
  Oligonucleotide primer for the detection of SNP TSC0033421
taaacgaaaaaa

SEQ ID NO: 327045 - DNA, 12 bp, Artificial Sequence
  Oligonucleotide primer for the detection of SNP TSC0033421
ttatcttactct

SEQ ID NO: 327046 - DNA, 12 bp, Artificial Sequence
  Oligonucleotide primer for the detection of SNP TSC0033421
tgggtgaaggag

SEQ ID NO: 327047 - DNA, 12 bp, Artificial Sequence
  Oligonucleotide primer for the detection of SNP TSC0033421
tgggcgaaggag

SEQ ID NO: 327048 - DNA, 12 bp, Artificial Sequence
  Oligonucleotide primer for the detection of SNP TSC0033422
actctacaaaca

SEQ ID NO: 327049 - DNA, 12 bp, Artificial Sequence
  Oligonucleotide primer for the detection of SNP TSC0033422
gatttttatgat

SEQ ID NO: 327050 - DNA, 12 bp, Artificial Sequence
  Oligonucleotide primer for the detection of SNP TSC0033422
aacctccataac

SEQ ID NO: 327051 - DNA, 12 bp, Artificial Sequence
  Oligonucleotide primer for the detection of SNP TSC0033422
gttttgtagata

SEQ ID NO: 327052 - DNA, 12 bp, Artificial Sequence
  Oligonucleotide primer for the detection of SNP TSC0033423
cactacactaaa

SEQ ID NO: 327053 - DNA, 12 bp, Artificial Sequence
  Oligonucleotide primer for the detection of SNP TSC0033423
taggggtatagg

SEQ ID NO: 327054 - DNA, 12 bp, Artificial Sequence
  Oligonucleotide primer for the detection of SNP TSC0033423
attgtattgggt

SEQ ID NO: 327055 - DNA, 12 bp, Artificial Sequence
  Oligonucleotide primer for the detection of SNP TSC0033424
aaataataccaa

SEQ ID NO: 327056 - DNA, 12 bp, Artificial Sequence
  Oligonucleotide primer for the detection of SNP TSC0033424
tttagtgtagtg

SEQ ID NO: 327057 - DNA, 12 bp, Artificial Sequence
  Oligonucleotide primer for the detection of SNP TSC0033424
ccaatacaataa

SEQ ID NO: 327058 - DNA, 12 bp, Artificial Sequence
  Oligonucleotide primer for the detection of SNP TSC0033424
aggtggtgttag

SEQ ID NO: 327059 - DNA, 12 bp, Artificial Sequence
  Oligonucleotide primer for the detection of SNP TSC0033425
ataaacctacct

SEQ ID NO: 327060 - DNA, 12 bp, Artificial Sequence
  Oligonucleotide primer for the detection of SNP TSC0033425
ttatgttagttt

SEQ ID NO: 327061 - DNA, 12 bp, Artificial Sequence
  Oligonucleotide primer for the detection of SNP TSC0033426
acaattcccatt

SEQ ID NO: 327062 - DNA, 12 bp, Artificial Sequence
  Oligonucleotide primer for the detection of SNP TSC0033426
ggaaaaggttta

SEQ ID NO: 327063 - DNA, 12 bp, Artificial Sequence
  Oligonucleotide primer for the detection of SNP TSC0033428
acataaaaactt

SEQ ID NO: 327064 - DNA, 12 bp, Artificial Sequence
  Oligonucleotide primer for the detection of SNP TSC0033428
tggttatgtatt

SEQ ID NO: 327065 - DNA, 12 bp, Artificial Sequence
  Oligonucleotide primer for the detection of SNP TSC0033430
tcaaaacaattt

SEQ ID NO: 327066 - DNA, 12 bp, Artificial Sequence
  Oligonucleotide primer for the detection of SNP TSC0033430
agtttttgatta

SEQ ID NO: 327067 - DNA, 12 bp, Artificial Sequence
  Oligonucleotide primer for the detection of SNP TSC0033430
aattcctaatta

SEQ ID NO: 327068 - DNA, 12 bp, Artificial Sequence
  Oligonucleotide primer for the detection of SNP TSC0033431
ccaacatccctc

SEQ ID NO: 327069 - DNA, 12 bp, Artificial Sequence
  Oligonucleotide primer for the detection of SNP TSC0033431
agaagtagagat

SEQ ID NO: 327070 - DNA, 12 bp, Artificial Sequence
  Oligonucleotide primer for the detection of SNP TSC0033432
aactcaactcaa

SEQ ID NO: 327071 - DNA, 12 bp, Artificial Sequence
  Oligonucleotide primer for the detection of SNP TSC0033432
tttttgatggag

SEQ ID NO: 327072 - DNA, 12 bp, Artificial Sequence
  Oligonucleotide primer for the detection of SNP TSC0033432
ttttcgatggag

SEQ ID NO: 327073 - DNA, 12 bp, Artificial Sequence
  Oligonucleotide primer for the detection of SNP TSC0033432
ctcccaataaaa

SEQ ID NO: 327074 - DNA, 12 bp, Artificial Sequence
  Oligonucleotide primer for the detection of SNP TSC0033432
ctcccgataaaa

SEQ ID NO: 327075 - DNA, 12 bp, Artificial Sequence
  Oligonucleotide primer for the detection of SNP TSC0033432
agtttaatttag

SEQ ID NO: 327076 - DNA, 12 bp, Artificial Sequence
  Oligonucleotide primer for the detection of SNP TSC0033433
cttaaaaaaaca

SEQ ID NO: 327077 - DNA, 12 bp, Artificial Sequence
  Oligonucleotide primer for the detection of SNP TSC0033433
tactacctctcc

SEQ ID NO: 327078 - DNA, 12 bp, Artificial Sequence
  Oligonucleotide primer for the detection of SNP TSC0033433
gtttaaaggaat

SEQ ID NO: 327079 - DNA, 12 bp, Artificial Sequence
  Oligonucleotide primer for the detection of SNP TSC0033434
aacctacatttt

SEQ ID NO: 327080 - DNA, 12 bp, Artificial Sequence
  Oligonucleotide primer for the detection of SNP TSC0033434
aaaatagggata

SEQ ID NO: 327081 - DNA, 12 bp, Artificial Sequence
  Oligonucleotide primer for the detection of SNP TSC0033436
ttttactttttt

SEQ ID NO: 327082 - DNA, 12 bp, Artificial Sequence
  Oligonucleotide primer for the detection of SNP TSC0033437
aaaccaaaacat

SEQ ID NO: 327083 - DNA, 12 bp, Artificial Sequence
  Oligonucleotide primer for the detection of SNP TSC0033437
tatagagtatgt

SEQ ID NO: 327084 - DNA, 12 bp, Artificial Sequence
  Oligonucleotide primer for the detection of SNP TSC0033437
acaaaatatata

SEQ ID NO: 327085 - DNA, 12 bp, Artificial Sequence
  Oligonucleotide primer for the detection of SNP TSC0033437
aaattaaagtat

SEQ ID NO: 327086 - DNA, 12 bp, Artificial Sequence
  Oligonucleotide primer for the detection of SNP TSC0033438
cttctatacact

SEQ ID NO: 327087 - DNA, 12 bp, Artificial Sequence
  Oligonucleotide primer for the detection of SNP TSC0033438
ataggaaaaaaa

SEQ ID NO: 327088 - DNA, 12 bp, Artificial Sequence
  Oligonucleotide primer for the detection of SNP TSC0033439
tcaccacaaaaa

SEQ ID NO: 327089 - DNA, 12 bp, Artificial Sequence
  Oligonucleotide primer for the detection of SNP TSC0033439
tattttaaagga

SEQ ID NO: 327090 - DNA, 12 bp, Artificial Sequence
  Oligonucleotide primer for the detection of SNP TSC0033439
tatcttaaaaaa

SEQ ID NO: 327091 - DNA, 12 bp, Artificial Sequence
  Oligonucleotide primer for the detection of SNP TSC0033439
ttattattatag

SEQ ID NO: 327092 - DNA, 12 bp, Artificial Sequence
  Oligonucleotide primer for the detection of SNP TSC0033440
atttgatttttt

SEQ ID NO: 327093 - DNA, 12 bp, Artificial Sequence
  Oligonucleotide primer for the detection of SNP TSC0033440
attcgatttttt

SEQ ID NO: 327094 - DNA, 12 bp, Artificial Sequence
  Oligonucleotide primer for the detection of SNP TSC0033440
catccaacctcc

SEQ ID NO: 327095 - DNA, 12 bp, Artificial Sequence
  Oligonucleotide primer for the detection of SNP TSC0033440
catccgacctcc

SEQ ID NO: 327096 - DNA, 12 bp, Artificial Sequence
  Oligonucleotide primer for the detection of SNP TSC0033440
tagagagtgaat

SEQ ID NO: 327097 - DNA, 12 bp, Artificial Sequence
  Oligonucleotide primer for the detection of SNP TSC0033441
tttcacaaaaac

SEQ ID NO: 327098 - DNA, 12 bp, Artificial Sequence
  Oligonucleotide primer for the detection of SNP TSC0033441
ttgtatggtttg

SEQ ID NO: 327099 - DNA, 12 bp, Artificial Sequence
  Oligonucleotide primer for the detection of SNP TSC0033441
ttgtatggttcg

SEQ ID NO: 327100 - DNA, 12 bp, Artificial Sequence
  Oligonucleotide primer for the detection of SNP TSC0033442
tttaaacaacaa

SEQ ID NO: 327101 - DNA, 12 bp, Artificial Sequence
  Oligonucleotide primer for the detection of SNP TSC0033442
gttttgtttagt

SEQ ID NO: 327102 - DNA, 12 bp, Artificial Sequence
  Oligonucleotide primer for the detection of SNP TSC0033442
gtttcgtttagt

SEQ ID NO: 327103 - DNA, 12 bp, Artificial Sequence
  Oligonucleotide primer for the detection of SNP TSC0033442
ttcacctaacaa

SEQ ID NO: 327104 - DNA, 12 bp, Artificial Sequence
  Oligonucleotide primer for the detection of SNP TSC0033442
ttcgcctaacaa

SEQ ID NO: 327105 - DNA, 12 bp, Artificial Sequence
  Oligonukleotid-Primer
tttagataataa

SEQ ID NO: 327106 - DNA, 12 bp, Artificial Sequence
  Oligonucleotide primer for the detection of SNP TSC0033443
tttcacatctcc

SEQ ID NO: 327107 - DNA, 12 bp, Artificial Sequence
  Oligonucleotide primer for the detection of SNP TSC0033443
gtttgaggagag

SEQ ID NO: 327108 - DNA, 12 bp, Artificial Sequence
  Oligonucleotide primer for the detection of SNP TSC0033444
tattctacaaat

SEQ ID NO: 327109 - DNA, 12 bp, Artificial Sequence
  Oligonukleotid-Primer
atataagaataa

SEQ ID NO: 327110 - DNA, 12 bp, Artificial Sequence
  Oligonucleotide primer for the detection of SNP TSC0033446
ggtatgatttcg

SEQ ID NO: 327111 - DNA, 12 bp, Artificial Sequence
  Oligonucleotide primer for the detection of SNP TSC0033446
aacataatctca

SEQ ID NO: 327112 - DNA, 12 bp, Artificial Sequence
  Oligonucleotide primer for the detection of SNP TSC0033446
aacataatctcg

SEQ ID NO: 327113 - DNA, 12 bp, Artificial Sequence
  Oligonukleotid-Primer
atattcttaatt

SEQ ID NO: 327114 - DNA, 12 bp, Artificial Sequence
  Oligonucleotide primer for the detection of SNP TSC0033447
atatttttgatt

SEQ ID NO: 327115 - DNA, 12 bp, Artificial Sequence
  Oligonucleotide primer for the detection of SNP TSC0033448
atacaaattttt

SEQ ID NO: 327116 - DNA, 12 bp, Artificial Sequence
  Oligonucleotide primer for the detection of SNP TSC0033448
gtacaaattttt

SEQ ID NO: 327117 - DNA, 12 bp, Artificial Sequence
  Oligonucleotide primer for the detection of SNP TSC0033448
atttatgtggta

SEQ ID NO: 327118 - DNA, 12 bp, Artificial Sequence
  Oligonucleotide primer for the detection of SNP TSC0033448
atttacgtggta

SEQ ID NO: 327119 - DNA, 12 bp, Artificial Sequence
  Oligonucleotide primer for the detection of SNP TSC0033449
ctttctccctcc

SEQ ID NO: 327120 - DNA, 12 bp, Artificial Sequence
  Oligonucleotide primer for the detection of SNP TSC0033449
ggaagggagaga

SEQ ID NO: 327121 - DNA, 12 bp, Artificial Sequence
  Oligonucleotide primer for the detection of SNP TSC0033450
tccactacaccc

SEQ ID NO: 327122 - DNA, 12 bp, Artificial Sequence
  Oligonucleotide primer for the detection of SNP TSC0033450
tccactacgccc

SEQ ID NO: 327123 - DNA, 12 bp, Artificial Sequence
  Oligonucleotide primer for the detection of SNP TSC0033450
tccgctacaccc

SEQ ID NO: 327124 - DNA, 12 bp, Artificial Sequence
  Oligonucleotide primer for the detection of SNP TSC0033450
tccgctacgccc

SEQ ID NO: 327125 - DNA, 12 bp, Artificial Sequence
  Oligonucleotide primer for the detection of SNP TSC0033450
tattgtgggtgg

SEQ ID NO: 327126 - DNA, 12 bp, Artificial Sequence
  Oligonucleotide primer for the detection of SNP TSC0033452
acttataattcc

SEQ ID NO: 327127 - DNA, 12 bp, Artificial Sequence
  Oligonucleotide primer for the detection of SNP TSC0033452
gcttataattcc

SEQ ID NO: 327128 - DNA, 12 bp, Artificial Sequence
  Oligonucleotide primer for the detection of SNP TSC0033454
acatatctaaaa

SEQ ID NO: 327129 - DNA, 12 bp, Artificial Sequence
  Oligonucleotide primer for the detection of SNP TSC0033454
tttataaattac

SEQ ID NO: 327130 - DNA, 12 bp, Artificial Sequence
  Oligonucleotide primer for the detection of SNP TSC0033454
gtatatttgagg

SEQ ID NO: 327131 - DNA, 12 bp, Artificial Sequence
  Oligonucleotide primer for the detection of SNP TSC0033455
taaaaaaactat

SEQ ID NO: 327132 - DNA, 12 bp, Artificial Sequence
  Oligonucleotide primer for the detection of SNP TSC0033455
acatcttatata

SEQ ID NO: 327133 - DNA, 12 bp, Artificial Sequence
  Oligonucleotide primer for the detection of SNP TSC0033455
gaaaagttgttt

SEQ ID NO: 327134 - DNA, 12 bp, Artificial Sequence
  Oligonucleotide primer for the detection of SNP TSC0033456
aaaacattatct

SEQ ID NO: 327135 - DNA, 12 bp, Artificial Sequence
  Oligonucleotide primer for the detection of SNP TSC0033456
aagaaaggataa

SEQ ID NO: 327136 - DNA, 12 bp, Artificial Sequence
  Oligonucleotide primer for the detection of SNP TSC0033457
acaattacttat

SEQ ID NO: 327137 - DNA, 12 bp, Artificial Sequence
  Oligonucleotide primer for the detection of SNP TSC0033457
tttaggaaaaaa

SEQ ID NO: 327138 - DNA, 12 bp, Artificial Sequence
  Oligonucleotide primer for the detection of SNP TSC0033458
ttccaactaaca

SEQ ID NO: 327139 - DNA, 12 bp, Artificial Sequence
  Oligonucleotide primer for the detection of SNP TSC0033458
aacccctcctta

SEQ ID NO: 327140 - DNA, 12 bp, Artificial Sequence
  Oligonucleotide primer for the detection of SNP TSC0033458
gttttagttggt

SEQ ID NO: 327141 - DNA, 12 bp, Artificial Sequence
  Oligonucleotide primer for the detection of SNP TSC0033459
attcataccctt

SEQ ID NO: 327142 - DNA, 12 bp, Artificial Sequence
  Oligonucleotide primer for the detection of SNP TSC0033459
gagaagggatta

SEQ ID NO: 327143 - DNA, 12 bp, Artificial Sequence
  Oligonucleotide primer for the detection of SNP TSC0033461
ctatttaataaa

SEQ ID NO: 327144 - DNA, 12 bp, Artificial Sequence
  Oligonucleotide primer for the detection of SNP TSC0033461
ttttcccaacac

SEQ ID NO: 327145 - DNA, 12 bp, Artificial Sequence
  Oligonucleotide primer for the detection of SNP TSC0033461
tatttaataaat

SEQ ID NO: 327146 - DNA, 12 bp, Artificial Sequence
  Oligonucleotide primer for the detection of SNP TSC0033462
ccatataaactt

SEQ ID NO: 327147 - DNA, 12 bp, Artificial Sequence
  Oligonucleotide primer for the detection of SNP TSC0033462
tggaaaaaatta

SEQ ID NO: 327148 - DNA, 12 bp, Artificial Sequence
  Oligonucleotide primer for the detection of SNP TSC0033464
gttataatttta

SEQ ID NO: 327149 - DNA, 12 bp, Artificial Sequence
  Oligonucleotide primer for the detection of SNP TSC0033464
accacaacttca

SEQ ID NO: 327150 - DNA, 12 bp, Artificial Sequence
  Oligonucleotide primer for the detection of SNP TSC0033464
gccacaacttca

SEQ ID NO: 327151 - DNA, 12 bp, Artificial Sequence
  Oligonucleotide primer for the detection of SNP TSC0033464
tggtggtggaag

SEQ ID NO: 327152 - DNA, 12 bp, Artificial Sequence
  Oligonucleotide primer for the detection of SNP TSC0033465
ccaattcaactt

SEQ ID NO: 327153 - DNA, 12 bp, Artificial Sequence
  Oligonucleotide primer for the detection of SNP TSC0033465
ttataaagaaaa

SEQ ID NO: 327154 - DNA, 12 bp, Artificial Sequence
  Oligonucleotide primer for the detection of SNP TSC0033466
ataaaaaacata

SEQ ID NO: 327155 - DNA, 12 bp, Artificial Sequence
  Oligonucleotide primer for the detection of SNP TSC0033466
gtggagaatatg

SEQ ID NO: 327156 - DNA, 12 bp, Artificial Sequence
  Oligonucleotide primer for the detection of SNP TSC0033467
aacctactattc

SEQ ID NO: 327157 - DNA, 12 bp, Artificial Sequence
  Oligonucleotide primer for the detection of SNP TSC0033467
tattttattttg

SEQ ID NO: 327158 - DNA, 12 bp, Artificial Sequence
  Oligonucleotide primer for the detection of SNP TSC0033468
aactcccccaac

SEQ ID NO: 327159 - DNA, 12 bp, Artificial Sequence
  Oligonucleotide primer for the detection of SNP TSC0033468
ggtttgttagag

SEQ ID NO: 327160 - DNA, 12 bp, Artificial Sequence
  Oligonucleotide primer for the detection of SNP TSC0033469
atatcaaaaaca

SEQ ID NO: 327161 - DNA, 12 bp, Artificial Sequence
  Oligonucleotide primer for the detection of SNP TSC0033469
gatatgtgaatt

SEQ ID NO: 327162 - DNA, 12 bp, Artificial Sequence
  Oligonucleotide primer for the detection of SNP TSC0033469
aacatataaatc

SEQ ID NO: 327163 - DNA, 12 bp, Artificial Sequence
  Oligonucleotide primer for the detection of SNP TSC0033469
gacatataaatc

SEQ ID NO: 327164 - DNA, 12 bp, Artificial Sequence
  Oligonucleotide primer for the detection of SNP TSC0033469
aatgttaaaagt

SEQ ID NO: 327165 - DNA, 12 bp, Artificial Sequence
  Oligonucleotide primer for the detection of SNP TSC0033470
atatccactaaa

SEQ ID NO: 327166 - DNA, 12 bp, Artificial Sequence
  Oligonucleotide primer for the detection of SNP TSC0033470
tagttatatttt

SEQ ID NO: 327167 - DNA, 12 bp, Artificial Sequence
  Oligonucleotide primer for the detection of SNP TSC0033470
taaccacatttc

SEQ ID NO: 327168 - DNA, 12 bp, Artificial Sequence
  Oligonucleotide primer for the detection of SNP TSC0033470
gtgtttattggg

SEQ ID NO: 327169 - DNA, 12 bp, Artificial Sequence
  Oligonucleotide primer for the detection of SNP TSC0033471
tatatacacaac

SEQ ID NO: 327170 - DNA, 12 bp, Artificial Sequence
  Oligonucleotide primer for the detection of SNP TSC0033476
tttttgaaggtg

SEQ ID NO: 327171 - DNA, 12 bp, Artificial Sequence
  Oligonucleotide primer for the detection of SNP TSC0033476
tttctaaaaata

SEQ ID NO: 327172 - DNA, 12 bp, Artificial Sequence
  Oligonucleotide primer for the detection of SNP TSC0033476
gggtgttatatg

SEQ ID NO: 327173 - DNA, 12 bp, Artificial Sequence
  Oligonucleotide primer for the detection of SNP TSC0033479
ataaattataat

SEQ ID NO: 327174 - DNA, 12 bp, Artificial Sequence
  Oligonucleotide primer for the detection of SNP TSC0033479
aaaattttgaaa

SEQ ID NO: 327175 - DNA, 12 bp, Artificial Sequence
  Oligonucleotide primer for the detection of SNP TSC0033479
atgaattataat

SEQ ID NO: 327176 - DNA, 12 bp, Artificial Sequence
  Oligonucleotide primer for the detection of SNP TSC0033481
aaaacttaaaac

SEQ ID NO: 327177 - DNA, 12 bp, Artificial Sequence
  Oligonucleotide primer for the detection of SNP TSC0033481
gaggtgagtgag

SEQ ID NO: 327178 - DNA, 12 bp, Artificial Sequence
  Oligonucleotide primer for the detection of SNP TSC0033483
gggaattttata

SEQ ID NO: 327179 - DNA, 12 bp, Artificial Sequence
  Oligonucleotide primer for the detection of SNP TSC0033484
tcacttttcact

SEQ ID NO: 327180 - DNA, 12 bp, Artificial Sequence
  Oligonucleotide primer for the detection of SNP TSC0033484
tcacttttcgct

SEQ ID NO: 327181 - DNA, 12 bp, Artificial Sequence
  Oligonucleotide primer for the detection of SNP TSC0033484
tataattaagat

SEQ ID NO: 327182 - DNA, 12 bp, Artificial Sequence
  Oligonucleotide primer for the detection of SNP TSC0033484
cacaattaaaat

SEQ ID NO: 327183 - DNA, 12 bp, Artificial Sequence
  Oligonucleotide primer for the detection of SNP TSC0033485
ccaactcacaac

SEQ ID NO: 327184 - DNA, 12 bp, Artificial Sequence
  Oligonucleotide primer for the detection of SNP TSC0033485
ccgactcacaac

SEQ ID NO: 327185 - DNA, 12 bp, Artificial Sequence
  Oligonucleotide primer for the detection of SNP TSC0033485
aagattaaaata

SEQ ID NO: 327186 - DNA, 12 bp, Artificial Sequence
  Oligonucleotide primer for the detection of SNP TSC0033486
aacatttacata

SEQ ID NO: 327187 - DNA, 12 bp, Artificial Sequence
  Oligonucleotide primer for the detection of SNP TSC0033486
ttgattattttt

SEQ ID NO: 327188 - DNA, 12 bp, Artificial Sequence
  Oligonucleotide primer for the detection of SNP TSC0033486
attactcttaaa

SEQ ID NO: 327189 - DNA, 12 bp, Artificial Sequence
  Oligonucleotide primer for the detection of SNP TSC0033486
agtatttatata

SEQ ID NO: 327190 - DNA, 12 bp, Artificial Sequence
  Oligonucleotide primer for the detection of SNP TSC0033487
tcaacatatcat

SEQ ID NO: 327191 - DNA, 12 bp, Artificial Sequence
  Oligonucleotide primer for the detection of SNP TSC0033487
tcaacgtatcat

SEQ ID NO: 327192 - DNA, 12 bp, Artificial Sequence
  Oligonucleotide primer for the detection of SNP TSC0033487
aggattattaat

SEQ ID NO: 327193 - DNA, 12 bp, Artificial Sequence
  Oligonucleotide primer for the detection of SNP TSC0033487
ttagtgtattat

SEQ ID NO: 327194 - DNA, 12 bp, Artificial Sequence
  Oligonucleotide primer for the detection of SNP TSC0033487
ttagcgtattat

SEQ ID NO: 327195 - DNA, 12 bp, Artificial Sequence
  Oligonucleotide primer for the detection of SNP TSC0033490
caaaataactta

SEQ ID NO: 327196 - DNA, 12 bp, Artificial Sequence
  Oligonucleotide primer for the detection of SNP TSC0033490
tatttattcctt

SEQ ID NO: 327197 - DNA, 12 bp, Artificial Sequence
  Oligonucleotide primer for the detection of SNP TSC0033490
taaaatgattta

SEQ ID NO: 327198 - DNA, 12 bp, Artificial Sequence
  Oligonucleotide primer for the detection of SNP TSC0033491
ctacttacacaa

SEQ ID NO: 327199 - DNA, 12 bp, Artificial Sequence
  Oligonucleotide primer for the detection of SNP TSC0033491
gattggaatgtt

SEQ ID NO: 327200 - DNA, 12 bp, Artificial Sequence
  Oligonucleotide primer for the detection of SNP TSC0033491
aactaaaatacc

SEQ ID NO: 327201 - DNA, 12 bp, Artificial Sequence
  Oligonucleotide primer for the detection of SNP TSC0033491
ttgtttgtatag

SEQ ID NO: 327202 - DNA, 12 bp, Artificial Sequence
  Oligonucleotide primer for the detection of SNP TSC0033492
taaaaatcacaa

SEQ ID NO: 327203 - DNA, 12 bp, Artificial Sequence
  Oligonucleotide primer for the detection of SNP TSC0033492
atgttattttaa

SEQ ID NO: 327204 - DNA, 12 bp, Artificial Sequence
  Oligonucleotide primer for the detection of SNP TSC0033492
atatcatctcaa

SEQ ID NO: 327205 - DNA, 12 bp, Artificial Sequence
  Oligonucleotide primer for the detection of SNP TSC0033492
tggggattataa

SEQ ID NO: 327206 - DNA, 12 bp, Artificial Sequence
  Oligonucleotide primer for the detection of SNP TSC0033496
actctaataaat

SEQ ID NO: 327207 - DNA, 12 bp, Artificial Sequence
  Oligonucleotide primer for the detection of SNP TSC0033498
acttaaactttc

SEQ ID NO: 327208 - DNA, 12 bp, Artificial Sequence
  Oligonucleotide primer for the detection of SNP TSC0033500
gaatagtgtttt

SEQ ID NO: 327209 - DNA, 12 bp, Artificial Sequence
  Oligonucleotide primer for the detection of SNP TSC0033500
taaacaatattc

SEQ ID NO: 327210 - DNA, 12 bp, Artificial Sequence
  Oligonucleotide primer for the detection of SNP TSC0033501
accaaaaaacaa

SEQ ID NO: 327211 - DNA, 12 bp, Artificial Sequence
  Oligonucleotide primer for the detection of SNP TSC0033501
accgaaaaacaa

SEQ ID NO: 327212 - DNA, 12 bp, Artificial Sequence
  Oligonucleotide primer for the detection of SNP TSC0033501
ttaaatggaggt

SEQ ID NO: 327213 - DNA, 12 bp, Artificial Sequence
  Oligonucleotide primer for the detection of SNP TSC0033501
attgagggataa

SEQ ID NO: 327214 - DNA, 12 bp, Artificial Sequence
  Oligonucleotide primer for the detection of SNP TSC0033501
atcgagggataa

SEQ ID NO: 327215 - DNA, 12 bp, Artificial Sequence
  Oligonucleotide primer for the detection of SNP TSC0033502
ttaatttaacac

SEQ ID NO: 327216 - DNA, 12 bp, Artificial Sequence
  Oligonucleotide primer for the detection of SNP TSC0033502
aaattgttaagg

SEQ ID NO: 327217 - DNA, 12 bp, Artificial Sequence
  Oligonucleotide primer for the detection of SNP TSC0033503
aaccccctataa

SEQ ID NO: 327218 - DNA, 12 bp, Artificial Sequence
  Oligonucleotide primer for the detection of SNP TSC0033503
aataggagggtt

SEQ ID NO: 327219 - DNA, 12 bp, Artificial Sequence
  Oligonucleotide primer for the detection of SNP TSC0033503
agttttttgtag

SEQ ID NO: 327220 - DNA, 12 bp, Artificial Sequence
  Oligonucleotide primer for the detection of SNP TSC0033507
ttaagtgtgtat

SEQ ID NO: 327221 - DNA, 12 bp, Artificial Sequence
  Oligonucleotide primer for the detection of SNP TSC0033507
ttaagtgtgtac

SEQ ID NO: 327222 - DNA, 12 bp, Artificial Sequence
  Oligonucleotide primer for the detection of SNP TSC0033507
tcaaatatatac

SEQ ID NO: 327223 - DNA, 12 bp, Artificial Sequence
  Oligonucleotide primer for the detection of SNP TSC0033507
tggttaagaaag

SEQ ID NO: 327224 - DNA, 12 bp, Artificial Sequence
  Oligonucleotide primer for the detection of SNP TSC0033508
atcttactaaat

SEQ ID NO: 327225 - DNA, 12 bp, Artificial Sequence
  Oligonucleotide primer for the detection of SNP TSC0033508
tcacaacctaca

SEQ ID NO: 327226 - DNA, 12 bp, Artificial Sequence
  Oligonucleotide primer for the detection of SNP TSC0033508
attttgttaaat

SEQ ID NO: 327227 - DNA, 12 bp, Artificial Sequence
  Oligonucleotide primer for the detection of SNP TSC0033509
aattatctctcc

SEQ ID NO: 327228 - DNA, 12 bp, Artificial Sequence
  Oligonucleotide primer for the detection of SNP TSC0033509
tatataaaaaag

SEQ ID NO: 327229 - DNA, 12 bp, Artificial Sequence
  Oligonucleotide primer for the detection of SNP TSC0033510
tacaattaatta

SEQ ID NO: 327230 - DNA, 12 bp, Artificial Sequence
  Oligonucleotide primer for the detection of SNP TSC0033510
accaaaaacaaa

SEQ ID NO: 327231 - DNA, 12 bp, Artificial Sequence
  Oligonucleotide primer for the detection of SNP TSC0033510
gtagttgattgt

SEQ ID NO: 327232 - DNA, 12 bp, Artificial Sequence
  Oligonucleotide primer for the detection of SNP TSC0033512
acaaaaacctcc

SEQ ID NO: 327233 - DNA, 12 bp, Artificial Sequence
  Oligonucleotide primer for the detection of SNP TSC0033512
tagtgggatttg

SEQ ID NO: 327234 - DNA, 12 bp, Artificial Sequence
  Oligonucleotide primer for the detection of SNP TSC0033512
tagcgggatttg

SEQ ID NO: 327235 - DNA, 12 bp, Artificial Sequence
  Oligonucleotide primer for the detection of SNP TSC0033512
tagtgggattcg

SEQ ID NO: 327236 - DNA, 12 bp, Artificial Sequence
  Oligonucleotide primer for the detection of SNP TSC0033512
tagcgggattcg

SEQ ID NO: 327237 - DNA, 12 bp, Artificial Sequence
  Oligonucleotide primer for the detection of SNP TSC0033513
cttataaatact

SEQ ID NO: 327238 - DNA, 12 bp, Artificial Sequence
  Oligonucleotide primer for the detection of SNP TSC0033513
atgaatttggaa

SEQ ID NO: 327239 - DNA, 12 bp, Artificial Sequence
  Oligonucleotide primer for the detection of SNP TSC0033514
acaaactatata

SEQ ID NO: 327240 - DNA, 12 bp, Artificial Sequence
  Oligonucleotide primer for the detection of SNP TSC0033514
tgtagtatttgg

SEQ ID NO: 327241 - DNA, 12 bp, Artificial Sequence
  Oligonucleotide primer for the detection of SNP TSC0033514
tgtagtattcgg

SEQ ID NO: 327242 - DNA, 12 bp, Artificial Sequence
  Oligonukleotid-Primer
tacaatactcaa

SEQ ID NO: 327243 - DNA, 12 bp, Artificial Sequence
  Oligonucleotide primer for the detection of SNP TSC0033514
tacaatactcga

SEQ ID NO: 327244 - DNA, 12 bp, Artificial Sequence
  Oligonucleotide primer for the detection of SNP TSC0033514
agtaggttgtgt

SEQ ID NO: 327245 - DNA, 12 bp, Artificial Sequence
  Oligonucleotide primer for the detection of SNP TSC0033516
attaatcaataa

SEQ ID NO: 327246 - DNA, 12 bp, Artificial Sequence
  Oligonucleotide primer for the detection of SNP TSC0033516
atggttagtatt

SEQ ID NO: 327247 - DNA, 12 bp, Artificial Sequence
  Oligonucleotide primer for the detection of SNP TSC0033516
taactaacatta

SEQ ID NO: 327248 - DNA, 12 bp, Artificial Sequence
  Oligonucleotide primer for the detection of SNP TSC0033516
gttaattagtga

SEQ ID NO: 327249 - DNA, 12 bp, Artificial Sequence
  Oligonucleotide primer for the detection of SNP TSC0033517
aacccttattat

SEQ ID NO: 327250 - DNA, 12 bp, Artificial Sequence
  Oligonucleotide primer for the detection of SNP TSC0033517
atttaaggttag

SEQ ID NO: 327251 - DNA, 12 bp, Artificial Sequence
  Oligonucleotide primer for the detection of SNP TSC0033518
ttaacccttatt

SEQ ID NO: 327252 - DNA, 12 bp, Artificial Sequence
  Oligonucleotide primer for the detection of SNP TSC0033518
ttaaaaccaata

SEQ ID NO: 327253 - DNA, 12 bp, Artificial Sequence
  Oligonucleotide primer for the detection of SNP TSC0033518
ttagtttttatt

SEQ ID NO: 327254 - DNA, 12 bp, Artificial Sequence
  Oligonucleotide primer for the detection of SNP TSC0033519
tcaaattaattt

SEQ ID NO: 327255 - DNA, 12 bp, Artificial Sequence
  Oligonucleotide primer for the detection of SNP TSC0033519
agatgttaatta

SEQ ID NO: 327256 - DNA, 12 bp, Artificial Sequence
  Oligonucleotide primer for the detection of SNP TSC0033519
taaattgatttt

SEQ ID NO: 327257 - DNA, 12 bp, Artificial Sequence
  Oligonucleotide primer for the detection of SNP TSC0033524
aaatctcactat

SEQ ID NO: 327258 - DNA, 12 bp, Artificial Sequence
  Oligonucleotide primer for the detection of SNP TSC0033524
ttagtttgggtg

SEQ ID NO: 327259 - DNA, 12 bp, Artificial Sequence
  Oligonucleotide primer for the detection of SNP TSC0033525
aggtaaaatttt

SEQ ID NO: 327260 - DNA, 12 bp, Artificial Sequence
  Oligonucleotide primer for the detection of SNP TSC0033526
attcttttaatt

SEQ ID NO: 327261 - DNA, 12 bp, Artificial Sequence
  Oligonucleotide primer for the detection of SNP TSC0033526
atttttttggtt

SEQ ID NO: 327262 - DNA, 12 bp, Artificial Sequence
  Oligonucleotide primer for the detection of SNP TSC0033527
gtatttgaagga

SEQ ID NO: 327263 - DNA, 12 bp, Artificial Sequence
  Oligonucleotide primer for the detection of SNP TSC0033528
taaatatcataa

SEQ ID NO: 327264 - DNA, 12 bp, Artificial Sequence
  Oligonucleotide primer for the detection of SNP TSC0033528
ttgatggttgaa

SEQ ID NO: 327265 - DNA, 12 bp, Artificial Sequence
  Oligonucleotide primer for the detection of SNP TSC0033528
ctaataattaaa

SEQ ID NO: 327266 - DNA, 12 bp, Artificial Sequence
  Oligonucleotide primer for the detection of SNP TSC0033528
ttaaatgttata

SEQ ID NO: 327267 - DNA, 12 bp, Artificial Sequence
  Oligonucleotide primer for the detection of SNP TSC0033529
cctcatccctaa

SEQ ID NO: 327268 - DNA, 12 bp, Artificial Sequence
  Oligonucleotide primer for the detection of SNP TSC0033529
gtttttaagggg

SEQ ID NO: 327269 - DNA, 12 bp, Artificial Sequence
  Oligonucleotide primer for the detection of SNP TSC0033529
attcccaaaaaa

SEQ ID NO: 327270 - DNA, 12 bp, Artificial Sequence
  Oligonucleotide primer for the detection of SNP TSC0033529
gttcccaaaaaa

SEQ ID NO: 327271 - DNA, 12 bp, Artificial Sequence
  Oligonucleotide primer for the detection of SNP TSC0033529
tttatttttagt

SEQ ID NO: 327272 - DNA, 12 bp, Artificial Sequence
  Oligonucleotide primer for the detection of SNP TSC0033530
catttccatata

SEQ ID NO: 327273 - DNA, 12 bp, Artificial Sequence
  Oligonucleotide primer for the detection of SNP TSC0033530
cgtttccatata

SEQ ID NO: 327274 - DNA, 12 bp, Artificial Sequence
  Oligonucleotide primer for the detection of SNP TSC0033530
ggttatggatgt

SEQ ID NO: 327275 - DNA, 12 bp, Artificial Sequence
  Oligonucleotide primer for the detection of SNP TSC0033530
aaccataaatat

SEQ ID NO: 327276 - DNA, 12 bp, Artificial Sequence
  Oligonucleotide primer for the detection of SNP TSC0033530
tgtttttatgtg

SEQ ID NO: 327277 - DNA, 12 bp, Artificial Sequence
  Oligonucleotide primer for the detection of SNP TSC0033530
cgtttttatgtg

SEQ ID NO: 327278 - DNA, 12 bp, Artificial Sequence
  Oligonucleotide primer for the detection of SNP TSC0033532
ctttaaaacttt

SEQ ID NO: 327279 - DNA, 12 bp, Artificial Sequence
  Oligonucleotide primer for the detection of SNP TSC0033533
agatttttttaa

SEQ ID NO: 327280 - DNA, 12 bp, Artificial Sequence
  Oligonucleotide primer for the detection of SNP TSC0033533
tttccccaaaaa

SEQ ID NO: 327281 - DNA, 12 bp, Artificial Sequence
  Oligonucleotide primer for the detection of SNP TSC0033533
atagagagtata

SEQ ID NO: 327282 - DNA, 12 bp, Artificial Sequence
  Oligonucleotide primer for the detection of SNP TSC0033536
ttaatttaataa

SEQ ID NO: 327283 - DNA, 12 bp, Artificial Sequence
  Oligonucleotide primer for the detection of SNP TSC0033537
taatacaatctt

SEQ ID NO: 327284 - DNA, 12 bp, Artificial Sequence
  Oligonucleotide primer for the detection of SNP TSC0033537
taatacgatctt

SEQ ID NO: 327285 - DNA, 12 bp, Artificial Sequence
  Oligonucleotide primer for the detection of SNP TSC0033537
aggttgtagtaa

SEQ ID NO: 327286 - DNA, 12 bp, Artificial Sequence
  Oligonucleotide primer for the detection of SNP TSC0033538
cccatttctcaa

SEQ ID NO: 327287 - DNA, 12 bp, Artificial Sequence
  Oligonucleotide primer for the detection of SNP TSC0033538
aagagtaggttt

SEQ ID NO: 327288 - DNA, 12 bp, Artificial Sequence
  Oligonucleotide primer for the detection of SNP TSC0033539
ttctttatcttt

SEQ ID NO: 327289 - DNA, 12 bp, Artificial Sequence
  Oligonucleotide primer for the detection of SNP TSC0033539
gtagatttttaa

SEQ ID NO: 327290 - DNA, 12 bp, Artificial Sequence
  Oligonucleotide primer for the detection of SNP TSC0033539
ataaacctttaa

SEQ ID NO: 327291 - DNA, 12 bp, Artificial Sequence
  Oligonucleotide primer for the detection of SNP TSC0033541
taatcttaattc

SEQ ID NO: 327292 - DNA, 12 bp, Artificial Sequence
  Oligonucleotide primer for the detection of SNP TSC0033541
tggaggttgtag

SEQ ID NO: 327293 - DNA, 12 bp, Artificial Sequence
  Oligonucleotide primer for the detection of SNP TSC0033541
tgattttggttt

SEQ ID NO: 327294 - DNA, 12 bp, Artificial Sequence
  Oligonucleotide primer for the detection of SNP TSC0033545
tttcaattatac

SEQ ID NO: 327295 - DNA, 12 bp, Artificial Sequence
  Oligonucleotide primer for the detection of SNP TSC0033545
ttttggaatgta

SEQ ID NO: 327296 - DNA, 12 bp, Artificial Sequence
  Oligonucleotide primer for the detection of SNP TSC0033545
tcctaaaatata

SEQ ID NO: 327297 - DNA, 12 bp, Artificial Sequence
  Oligonucleotide primer for the detection of SNP TSC0033550
tcacactcaaaa

SEQ ID NO: 327298 - DNA, 12 bp, Artificial Sequence
  Oligonucleotide primer for the detection of SNP TSC0033550
tcacactcgaaa

SEQ ID NO: 327299 - DNA, 12 bp, Artificial Sequence
  Oligonucleotide primer for the detection of SNP TSC0033550
ttatatttgaaa

SEQ ID NO: 327300 - DNA, 12 bp, Artificial Sequence
  Oligonucleotide primer for the detection of SNP TSC0033550
ttatattcgaaa

SEQ ID NO: 327301 - DNA, 12 bp, Artificial Sequence
  Oligonucleotide primer for the detection of SNP TSC0033551
tttccactccat

SEQ ID NO: 327302 - DNA, 12 bp, Artificial Sequence
  Oligonucleotide primer for the detection of SNP TSC0033551
tttgaattaatg

SEQ ID NO: 327303 - DNA, 12 bp, Artificial Sequence
  Oligonucleotide primer for the detection of SNP TSC0033551
cctaaatcaata

SEQ ID NO: 327304 - DNA, 12 bp, Artificial Sequence
  Oligonucleotide primer for the detection of SNP TSC0033553
ttgggttgggta

SEQ ID NO: 327305 - DNA, 12 bp, Artificial Sequence
  Oligonucleotide primer for the detection of SNP TSC0033557
caactcactacc

SEQ ID NO: 327306 - DNA, 12 bp, Artificial Sequence
  Oligonucleotide primer for the detection of SNP TSC0033557
cgactcactacc

SEQ ID NO: 327307 - DNA, 12 bp, Artificial Sequence
  Oligonucleotide primer for the detection of SNP TSC0033557
tggggaggtgga

SEQ ID NO: 327308 - DNA, 12 bp, Artificial Sequence
  Oligonucleotide primer for the detection of SNP TSC0033557
cggggaggtgga

SEQ ID NO: 327309 - DNA, 12 bp, Artificial Sequence
  Oligonucleotide primer for the detection of SNP TSC0033557
tggggaggcgga

SEQ ID NO: 327310 - DNA, 12 bp, Artificial Sequence
  Oligonucleotide primer for the detection of SNP TSC0033557
cggggaggcgga

SEQ ID NO: 327311 - DNA, 12 bp, Artificial Sequence
  Oligonucleotide primer for the detection of SNP TSC0033561
taattcactact

SEQ ID NO: 327312 - DNA, 12 bp, Artificial Sequence
  Oligonucleotide primer for the detection of SNP TSC0033561
tgggaaatttta

SEQ ID NO: 327313 - DNA, 12 bp, Artificial Sequence
  Oligonucleotide primer for the detection of SNP TSC0033565
attaaaactatt

SEQ ID NO: 327314 - DNA, 12 bp, Artificial Sequence
  Oligonucleotide primer for the detection of SNP TSC0033565
gatttaggattg

SEQ ID NO: 327315 - DNA, 12 bp, Artificial Sequence
  Oligonucleotide primer for the detection of SNP TSC0033566
aaaatcccaatc

SEQ ID NO: 327316 - DNA, 12 bp, Artificial Sequence
  Oligonucleotide primer for the detection of SNP TSC0033566
aggagttagtgg

SEQ ID NO: 327317 - DNA, 12 bp, Artificial Sequence
  Oligonucleotide primer for the detection of SNP TSC0033567
aaactaacaaat

SEQ ID NO: 327318 - DNA, 12 bp, Artificial Sequence
  Oligonucleotide primer for the detection of SNP TSC0033567
ttttgagtttaa

SEQ ID NO: 327319 - DNA, 12 bp, Artificial Sequence
  Oligonucleotide primer for the detection of SNP TSC0033567
ggttggtagatt

SEQ ID NO: 327320 - DNA, 12 bp, Artificial Sequence
  Oligonucleotide primer for the detection of SNP TSC0033568
ctataaattatc

SEQ ID NO: 327321 - DNA, 12 bp, Artificial Sequence
  Oligonucleotide primer for the detection of SNP TSC0033568
aaatacctatac

SEQ ID NO: 327322 - DNA, 12 bp, Artificial Sequence
  Oligonucleotide primer for the detection of SNP TSC0033568
ttgtaagttatt

SEQ ID NO: 327323 - DNA, 12 bp, Artificial Sequence
  Oligonucleotide primer for the detection of SNP TSC0033568
ttgtaagttatc

SEQ ID NO: 327324 - DNA, 12 bp, Artificial Sequence
  Oligonucleotide primer for the detection of SNP TSC0033569
tataataatata

SEQ ID NO: 327325 - DNA, 12 bp, Artificial Sequence
  Oligonucleotide primer for the detection of SNP TSC0033569
gggattataaat

SEQ ID NO: 327326 - DNA, 12 bp, Artificial Sequence
  Oligonucleotide primer for the detection of SNP TSC0033571
cacctccaatac

SEQ ID NO: 327327 - DNA, 12 bp, Artificial Sequence
  Oligonucleotide primer for the detection of SNP TSC0033571
aggatggtatta

SEQ ID NO: 327328 - DNA, 12 bp, Artificial Sequence
  Oligonucleotide primer for the detection of SNP TSC0033572
accttcaaatct

SEQ ID NO: 327329 - DNA, 12 bp, Artificial Sequence
  Oligonucleotide primer for the detection of SNP TSC0033572
gttttaagaagg

SEQ ID NO: 327330 - DNA, 12 bp, Artificial Sequence
  Oligonucleotide primer for the detection of SNP TSC0033575
aataacttcttt

SEQ ID NO: 327331 - DNA, 12 bp, Artificial Sequence
  Oligonucleotide primer for the detection of SNP TSC0033575
taaatagaaaaa

SEQ ID NO: 327332 - DNA, 12 bp, Artificial Sequence
  Oligonucleotide primer for the detection of SNP TSC0033579
aaaacaaacgaa

SEQ ID NO: 327333 - DNA, 12 bp, Artificial Sequence
  Oligonucleotide primer for the detection of SNP TSC0033579
aaaacgaacaaa

SEQ ID NO: 327334 - DNA, 12 bp, Artificial Sequence
  Oligonucleotide primer for the detection of SNP TSC0033579
aaaacgaacgaa

SEQ ID NO: 327335 - DNA, 12 bp, Artificial Sequence
  Oligonucleotide primer for the detection of SNP TSC0033579
agaatgaatgaa

SEQ ID NO: 327336 - DNA, 12 bp, Artificial Sequence
  Oligonucleotide primer for the detection of SNP TSC0033579
agaacgaatgaa

SEQ ID NO: 327337 - DNA, 12 bp, Artificial Sequence
  Oligonucleotide primer for the detection of SNP TSC0033579
agaatgaacgaa

SEQ ID NO: 327338 - DNA, 12 bp, Artificial Sequence
  Oligonucleotide primer for the detection of SNP TSC0033579
agaacgaacgaa

SEQ ID NO: 327339 - DNA, 12 bp, Artificial Sequence
  Oligonucleotide primer for the detection of SNP TSC0033580
ctttctttcatt

SEQ ID NO: 327340 - DNA, 12 bp, Artificial Sequence
  Oligonucleotide primer for the detection of SNP TSC0033580
ctttctttcgtt

SEQ ID NO: 327341 - DNA, 12 bp, Artificial Sequence
  Oligonucleotide primer for the detection of SNP TSC0033580
agaaagaatgaa

SEQ ID NO: 327342 - DNA, 12 bp, Artificial Sequence
  Oligonucleotide primer for the detection of SNP TSC0033580
agaaagaacgaa

SEQ ID NO: 327343 - DNA, 12 bp, Artificial Sequence
  Oligonucleotide primer for the detection of SNP TSC0033582
aaaaaacgaaac

SEQ ID NO: 327344 - DNA, 12 bp, Artificial Sequence
  Oligonucleotide primer for the detection of SNP TSC0033582
gagattttttag

SEQ ID NO: 327345 - DNA, 12 bp, Artificial Sequence
  Oligonucleotide primer for the detection of SNP TSC0033582
aaaacctctcaa

SEQ ID NO: 327346 - DNA, 12 bp, Artificial Sequence
  Oligonucleotide primer for the detection of SNP TSC0033582
aagggatgggat

SEQ ID NO: 327347 - DNA, 12 bp, Artificial Sequence
  Oligonucleotide primer for the detection of SNP TSC0033582
aagggacgggat

SEQ ID NO: 327348 - DNA, 12 bp, Artificial Sequence
  Oligonucleotide primer for the detection of SNP TSC0033583
ctacctccaaac

SEQ ID NO: 327349 - DNA, 12 bp, Artificial Sequence
  Oligonucleotide primer for the detection of SNP TSC0033583
taattataagag

SEQ ID NO: 327350 - DNA, 12 bp, Artificial Sequence
  Oligonucleotide primer for the detection of SNP TSC0033583
caaccacaaaaa

SEQ ID NO: 327351 - DNA, 12 bp, Artificial Sequence
  Oligonucleotide primer for the detection of SNP TSC0033583
atttttaagttt

SEQ ID NO: 327352 - DNA, 12 bp, Artificial Sequence
  Oligonucleotide primer for the detection of SNP TSC0033585
tatttttaaata

SEQ ID NO: 327353 - DNA, 12 bp, Artificial Sequence
  Oligonucleotide primer for the detection of SNP TSC0033586
ctaactctacac

SEQ ID NO: 327354 - DNA, 12 bp, Artificial Sequence
  Oligonucleotide primer for the detection of SNP TSC0033586
ctaactctacgc

SEQ ID NO: 327355 - DNA, 12 bp, Artificial Sequence
  Oligonucleotide primer for the detection of SNP TSC0033586
ataggtgagaaa

SEQ ID NO: 327356 - DNA, 12 bp, Artificial Sequence
  Oligonucleotide primer for the detection of SNP TSC0033590
tataacaacaca

SEQ ID NO: 327357 - DNA, 12 bp, Artificial Sequence
  Oligonucleotide primer for the detection of SNP TSC0033590
ctatacttcccc

SEQ ID NO: 327358 - DNA, 12 bp, Artificial Sequence
  Oligonucleotide primer for the detection of SNP TSC0033590
atgtgatagtat

SEQ ID NO: 327359 - DNA, 12 bp, Artificial Sequence
  Oligonucleotide primer for the detection of SNP TSC0033593
aaaataaatcta

SEQ ID NO: 327360 - DNA, 12 bp, Artificial Sequence
  Oligonucleotide primer for the detection of SNP TSC0033593
ttatagataggg

SEQ ID NO: 327361 - DNA, 12 bp, Artificial Sequence
  Oligonucleotide primer for the detection of SNP TSC0033593
ctataaacaaaa

SEQ ID NO: 327362 - DNA, 12 bp, Artificial Sequence
  Oligonucleotide primer for the detection of SNP TSC0033593
aggtgggtttgt

SEQ ID NO: 327363 - DNA, 12 bp, Artificial Sequence
  Oligonucleotide primer for the detection of SNP TSC0033594
aaacttaaacta

SEQ ID NO: 327364 - DNA, 12 bp, Artificial Sequence
  Oligonucleotide primer for the detection of SNP TSC0033594
agtaatgtattt

SEQ ID NO: 327365 - DNA, 12 bp, Artificial Sequence
  Oligonucleotide primer for the detection of SNP TSC0033594
agtaacgtattt

SEQ ID NO: 327366 - DNA, 12 bp, Artificial Sequence
  Oligonucleotide primer for the detection of SNP TSC0033594
aacaacgcattc

SEQ ID NO: 327367 - DNA, 12 bp, Artificial Sequence
  Oligonucleotide primer for the detection of SNP TSC0033594
ggatttgagtta

SEQ ID NO: 327368 - DNA, 12 bp, Artificial Sequence
  Oligonucleotide primer for the detection of SNP TSC0033595
aaattcactatc

SEQ ID NO: 327369 - DNA, 12 bp, Artificial Sequence
  Oligonucleotide primer for the detection of SNP TSC0033596
taactttaaaac

SEQ ID NO: 327370 - DNA, 12 bp, Artificial Sequence
  Oligonucleotide primer for the detection of SNP TSC0033596
tttagttgtata

SEQ ID NO: 327371 - DNA, 12 bp, Artificial Sequence
  Oligonukleotid-Primer
acaacaaaacgc

SEQ ID NO: 327372 - DNA, 12 bp, Artificial Sequence
  Oligonucleotide primer for the detection of SNP TSC0033600
acaacgaaacgc

SEQ ID NO: 327373 - DNA, 12 bp, Artificial Sequence
  Oligonucleotide primer for the detection of SNP TSC0033600
gtagtgagatgt

SEQ ID NO: 327374 - DNA, 12 bp, Artificial Sequence
  Oligonucleotide primer for the detection of SNP TSC0033600
gtagcgagatgt

SEQ ID NO: 327375 - DNA, 12 bp, Artificial Sequence
  Oligonucleotide primer for the detection of SNP TSC0033600
gtagtgagacgt

SEQ ID NO: 327376 - DNA, 12 bp, Artificial Sequence
  Oligonucleotide primer for the detection of SNP TSC0033600
gtagcgagacgt

SEQ ID NO: 327377 - DNA, 12 bp, Artificial Sequence
  Oligonucleotide primer for the detection of SNP TSC0033602
acccttacaaaa

SEQ ID NO: 327378 - DNA, 12 bp, Artificial Sequence
  Oligonucleotide primer for the detection of SNP TSC0033602
attactcactct

SEQ ID NO: 327379 - DNA, 12 bp, Artificial Sequence
  Oligonucleotide primer for the detection of SNP TSC0033603
atctactataac

SEQ ID NO: 327380 - DNA, 12 bp, Artificial Sequence
  Oligonucleotide primer for the detection of SNP TSC0033603
tttgtgtgtatg

SEQ ID NO: 327381 - DNA, 12 bp, Artificial Sequence
  Oligonucleotide primer for the detection of SNP TSC0033603
tttgtgtgtacg

SEQ ID NO: 327382 - DNA, 12 bp, Artificial Sequence
  Oligonucleotide primer for the detection of SNP TSC0033605
aaacaaaacctc

SEQ ID NO: 327383 - DNA, 12 bp, Artificial Sequence
  Oligonucleotide primer for the detection of SNP TSC0033605
aaatagtggaag

SEQ ID NO: 327384 - DNA, 12 bp, Artificial Sequence
  Oligonucleotide primer for the detection of SNP TSC0033606
ccccaatttaat

SEQ ID NO: 327385 - DNA, 12 bp, Artificial Sequence
  Oligonucleotide primer for the detection of SNP TSC0033606
tattaatagaaa

SEQ ID NO: 327386 - DNA, 12 bp, Artificial Sequence
  Oligonucleotide primer for the detection of SNP TSC0033608
caataacaacca

SEQ ID NO: 327387 - DNA, 12 bp, Artificial Sequence
  Oligonucleotide primer for the detection of SNP TSC0033608
cgataacaacca

SEQ ID NO: 327388 - DNA, 12 bp, Artificial Sequence
  Oligonucleotide primer for the detection of SNP TSC0033608
tatggtttgaat

SEQ ID NO: 327389 - DNA, 12 bp, Artificial Sequence
  Oligonucleotide primer for the detection of SNP TSC0033608
cataacctaaat

SEQ ID NO: 327390 - DNA, 12 bp, Artificial Sequence
  Oligonucleotide primer for the detection of SNP TSC0033608
tgatggtagtta

SEQ ID NO: 327391 - DNA, 12 bp, Artificial Sequence
  Oligonucleotide primer for the detection of SNP TSC0033608
cgatggtagtta

SEQ ID NO: 327392 - DNA, 12 bp, Artificial Sequence
  Oligonucleotide primer for the detection of SNP TSC0033610
aacaaacatcat

SEQ ID NO: 327393 - DNA, 12 bp, Artificial Sequence
  Oligonucleotide primer for the detection of SNP TSC0033611
aataatttatac

SEQ ID NO: 327394 - DNA, 12 bp, Artificial Sequence
  Oligonucleotide primer for the detection of SNP TSC0033611
ggttggtggagg

SEQ ID NO: 327395 - DNA, 12 bp, Artificial Sequence
  Oligonucleotide primer for the detection of SNP TSC0033611
ggttggcggagg

SEQ ID NO: 327396 - DNA, 12 bp, Artificial Sequence
  Oligonucleotide primer for the detection of SNP TSC0033614
tccctatcaaaa

SEQ ID NO: 327397 - DNA, 12 bp, Artificial Sequence
  Oligonucleotide primer for the detection of SNP TSC0033614
tttgttaaaggg

SEQ ID NO: 327398 - DNA, 12 bp, Artificial Sequence
  Oligonucleotide primer for the detection of SNP TSC0033614
tctatcaaaaaa

SEQ ID NO: 327399 - DNA, 12 bp, Artificial Sequence
  Oligonucleotide primer for the detection of SNP TSC0033614
agttttttatta

SEQ ID NO: 327400 - DNA, 12 bp, Artificial Sequence
  Oligonucleotide primer for the detection of SNP TSC0033616
taataaaaaaat

SEQ ID NO: 327401 - DNA, 12 bp, Artificial Sequence
  Oligonucleotide primer for the detection of SNP TSC0033618
catcaactacaa

SEQ ID NO: 327402 - DNA, 12 bp, Artificial Sequence
  Oligonucleotide primer for the detection of SNP TSC0033618
tatccactcccc

SEQ ID NO: 327403 - DNA, 12 bp, Artificial Sequence
  Oligonucleotide primer for the detection of SNP TSC0033618
tattagttgtag

SEQ ID NO: 327404 - DNA, 12 bp, Artificial Sequence
  Oligonucleotide primer for the detection of SNP TSC0033622
ataacttctata

SEQ ID NO: 327405 - DNA, 12 bp, Artificial Sequence
  Oligonucleotide primer for the detection of SNP TSC0033622
tggttatttaat

SEQ ID NO: 327406 - DNA, 12 bp, Artificial Sequence
  Oligonucleotide primer for the detection of SNP TSC0033622
taattatctaat

SEQ ID NO: 327407 - DNA, 12 bp, Artificial Sequence
  Oligonucleotide primer for the detection of SNP TSC0033622
gtgatttttgta

SEQ ID NO: 327408 - DNA, 12 bp, Artificial Sequence
  Oligonucleotide primer for the detection of SNP TSC0033625
aaacatctatac

SEQ ID NO: 327409 - DNA, 12 bp, Artificial Sequence
  Oligonucleotide primer for the detection of SNP TSC0033625
tgattgatagta

SEQ ID NO: 327410 - DNA, 12 bp, Artificial Sequence
  Oligonucleotide primer for the detection of SNP TSC0033625
taactaacaaca

SEQ ID NO: 327411 - DNA, 12 bp, Artificial Sequence
  Oligonucleotide primer for the detection of SNP TSC0033625
gaatatttgtat

SEQ ID NO: 327412 - DNA, 12 bp, Artificial Sequence
  Oligonucleotide primer for the detection of SNP TSC0033626
ctctactacctc

SEQ ID NO: 327413 - DNA, 12 bp, Artificial Sequence
  Oligonucleotide primer for the detection of SNP TSC0033626
taattgaggtag

SEQ ID NO: 327414 - DNA, 12 bp, Artificial Sequence
  Oligonucleotide primer for the detection of SNP TSC0033627
atcataaaactt

SEQ ID NO: 327415 - DNA, 12 bp, Artificial Sequence
  Oligonucleotide primer for the detection of SNP TSC0033627
atcgtaaaactt

SEQ ID NO: 327416 - DNA, 12 bp, Artificial Sequence
  Oligonucleotide primer for the detection of SNP TSC0033627
ggataggtaata

SEQ ID NO: 327417 - DNA, 12 bp, Artificial Sequence
  Oligonucleotide primer for the detection of SNP TSC0033637
ataaaaccactc

SEQ ID NO: 327418 - DNA, 12 bp, Artificial Sequence
  Oligonucleotide primer for the detection of SNP TSC0033637
ataaaaccgctc

SEQ ID NO: 327419 - DNA, 12 bp, Artificial Sequence
  Oligonucleotide primer for the detection of SNP TSC0033637
gggtggtggtta

SEQ ID NO: 327420 - DNA, 12 bp, Artificial Sequence
  Oligonucleotide primer for the detection of SNP TSC0033637
aaataataatta

SEQ ID NO: 327421 - DNA, 12 bp, Artificial Sequence
  Oligonucleotide primer for the detection of SNP TSC0033637
gtaaggttgttt

SEQ ID NO: 327422 - DNA, 12 bp, Artificial Sequence
  Oligonucleotide primer for the detection of SNP TSC0033637
gtaaggtcgttt

SEQ ID NO: 327423 - DNA, 12 bp, Artificial Sequence
  Oligonucleotide primer for the detection of SNP TSC0033638
tactaaaaacat

SEQ ID NO: 327424 - DNA, 12 bp, Artificial Sequence
  Oligonucleotide primer for the detection of SNP TSC0033638
tatgatagaatg

SEQ ID NO: 327425 - DNA, 12 bp, Artificial Sequence
  Oligonucleotide primer for the detection of SNP TSC0033639
attcaaatcaca

SEQ ID NO: 327426 - DNA, 12 bp, Artificial Sequence
  Oligonucleotide primer for the detection of SNP TSC0033639
taatggtatatt

SEQ ID NO: 327427 - DNA, 12 bp, Artificial Sequence
  Oligonucleotide primer for the detection of SNP TSC0033639
caataatacact

SEQ ID NO: 327428 - DNA, 12 bp, Artificial Sequence
  Oligonucleotide primer for the detection of SNP TSC0033639
gtttaaattata

SEQ ID NO: 327429 - DNA, 12 bp, Artificial Sequence
  Oligonucleotide primer for the detection of SNP TSC0033641
taaatatcctac

SEQ ID NO: 327430 - DNA, 12 bp, Artificial Sequence
  Oligonucleotide primer for the detection of SNP TSC0033641
aaaactatccta

SEQ ID NO: 327431 - DNA, 12 bp, Artificial Sequence
  Oligonucleotide primer for the detection of SNP TSC0033641
taaatgttttat

SEQ ID NO: 327432 - DNA, 12 bp, Artificial Sequence
  Oligonucleotide primer for the detection of SNP TSC0033642
aatcctaacttc

SEQ ID NO: 327433 - DNA, 12 bp, Artificial Sequence
  Oligonucleotide primer for the detection of SNP TSC0033642
gaggtgggtgaa

SEQ ID NO: 327434 - DNA, 12 bp, Artificial Sequence
  Oligonucleotide primer for the detection of SNP TSC0033642
gaggcgggtgaa

SEQ ID NO: 327435 - DNA, 12 bp, Artificial Sequence
  Oligonucleotide primer for the detection of SNP TSC0033642
gaaacgaataaa

SEQ ID NO: 327436 - DNA, 12 bp, Artificial Sequence
  Oligonucleotide primer for the detection of SNP TSC0033642
aattttgatttt

SEQ ID NO: 327437 - DNA, 12 bp, Artificial Sequence
  Oligonucleotide primer for the detection of SNP TSC0033643
aacaaaaactct

SEQ ID NO: 327438 - DNA, 12 bp, Artificial Sequence
  Oligonucleotide primer for the detection of SNP TSC0033643
aacgaaaactct

SEQ ID NO: 327439 - DNA, 12 bp, Artificial Sequence
  Oligonucleotide primer for the detection of SNP TSC0033643
atgggataagga

SEQ ID NO: 327440 - DNA, 12 bp, Artificial Sequence
  Oligonucleotide primer for the detection of SNP TSC0033648
actctctcttac

SEQ ID NO: 327441 - DNA, 12 bp, Artificial Sequence
  Oligonucleotide primer for the detection of SNP TSC0033648
ttttggaattta

SEQ ID NO: 327442 - DNA, 12 bp, Artificial Sequence
  Oligonucleotide primer for the detection of SNP TSC0033649
gttttatatgta

SEQ ID NO: 327443 - DNA, 12 bp, Artificial Sequence
  Oligonucleotide primer for the detection of SNP TSC0033650
cctacccattta

SEQ ID NO: 327444 - DNA, 12 bp, Artificial Sequence
  Oligonucleotide primer for the detection of SNP TSC0033650
aattaattgatt

SEQ ID NO: 327445 - DNA, 12 bp, Artificial Sequence
  Oligonucleotide primer for the detection of SNP TSC0033650
aatcaattaact

SEQ ID NO: 327446 - DNA, 12 bp, Artificial Sequence
  Oligonucleotide primer for the detection of SNP TSC0033651
atttccaaaatt

SEQ ID NO: 327447 - DNA, 12 bp, Artificial Sequence
  Oligonucleotide primer for the detection of SNP TSC0033651
tttttatagtat

SEQ ID NO: 327448 - DNA, 12 bp, Artificial Sequence
  Oligonucleotide primer for the detection of SNP TSC0033651
ttttcacaatat

SEQ ID NO: 327449 - DNA, 12 bp, Artificial Sequence
  Oligonucleotide primer for the detection of SNP TSC0033651
atttttagaatt

SEQ ID NO: 327450 - DNA, 12 bp, Artificial Sequence
  Oligonucleotide primer for the detection of SNP TSC0033652
taaacactaaat

SEQ ID NO: 327451 - DNA, 12 bp, Artificial Sequence
  Oligonucleotide primer for the detection of SNP TSC0033652
aataaatggaaa

SEQ ID NO: 327452 - DNA, 12 bp, Artificial Sequence
  Oligonucleotide primer for the detection of SNP TSC0033658
actcaaatctat

SEQ ID NO: 327453 - DNA, 12 bp, Artificial Sequence
  Oligonucleotide primer for the detection of SNP TSC0033658
gctcaaatctat

SEQ ID NO: 327454 - DNA, 12 bp, Artificial Sequence
  Oligonucleotide primer for the detection of SNP TSC0033658
ctaacccccaac

SEQ ID NO: 327455 - DNA, 12 bp, Artificial Sequence
  Oligonucleotide primer for the detection of SNP TSC0033658
gtttaaatttgt

SEQ ID NO: 327456 - DNA, 12 bp, Artificial Sequence
  Oligonucleotide primer for the detection of SNP TSC0033659
ggagatagattt

SEQ ID NO: 327457 - DNA, 12 bp, Artificial Sequence
  Oligonucleotide primer for the detection of SNP TSC0033659
gataggaggaaa

SEQ ID NO: 327458 - DNA, 12 bp, Artificial Sequence
  Oligonucleotide primer for the detection of SNP TSC0033662
taccatcaccac

SEQ ID NO: 327459 - DNA, 12 bp, Artificial Sequence
  Oligonucleotide primer for the detection of SNP TSC0033662
tatgtataaaaa

SEQ ID NO: 327460 - DNA, 12 bp, Artificial Sequence
  Oligonucleotide primer for the detection of SNP TSC0033663
ctttcaaaatat

SEQ ID NO: 327461 - DNA, 12 bp, Artificial Sequence
  Oligonucleotide primer for the detection of SNP TSC0033663
attaatggaggg

SEQ ID NO: 327462 - DNA, 12 bp, Artificial Sequence
  Oligonucleotide primer for the detection of SNP TSC0033664
tcccctcatatc

SEQ ID NO: 327463 - DNA, 12 bp, Artificial Sequence
  Oligonucleotide primer for the detection of SNP TSC0033664
agataagatata

SEQ ID NO: 327464 - DNA, 12 bp, Artificial Sequence
  Oligonucleotide primer for the detection of SNP TSC0033667
tattccaaatca

SEQ ID NO: 327465 - DNA, 12 bp, Artificial Sequence
  Oligonucleotide primer for the detection of SNP TSC0033667
tattccgaatca

SEQ ID NO: 327466 - DNA, 12 bp, Artificial Sequence
  Oligonucleotide primer for the detection of SNP TSC0033667
aaaatattaatt

SEQ ID NO: 327467 - DNA, 12 bp, Artificial Sequence
  Oligonucleotide primer for the detection of SNP TSC0033667
aaaatatcaatt

SEQ ID NO: 327468 - DNA, 12 bp, Artificial Sequence
  Oligonucleotide primer for the detection of SNP TSC0033667
tatttcgagtta

SEQ ID NO: 327469 - DNA, 12 bp, Artificial Sequence
  Oligonucleotide primer for the detection of SNP TSC0033670
attaacacacat

SEQ ID NO: 327470 - DNA, 12 bp, Artificial Sequence
  Oligonucleotide primer for the detection of SNP TSC0033670
attaacgcacat

SEQ ID NO: 327471 - DNA, 12 bp, Artificial Sequence
  Oligonucleotide primer for the detection of SNP TSC0033671
caaaatacccaa

SEQ ID NO: 327472 - DNA, 12 bp, Artificial Sequence
  Oligonucleotide primer for the detection of SNP TSC0033671
caaaatacccga

SEQ ID NO: 327473 - DNA, 12 bp, Artificial Sequence
  Oligonucleotide primer for the detection of SNP TSC0033671
tttattttagat

SEQ ID NO: 327474 - DNA, 12 bp, Artificial Sequence
  Oligonucleotide primer for the detection of SNP TSC0033671
ctcattttaaac

SEQ ID NO: 327475 - DNA, 12 bp, Artificial Sequence
  Oligonucleotide primer for the detection of SNP TSC0033671
tagagtgtttga

SEQ ID NO: 327476 - DNA, 12 bp, Artificial Sequence
  Oligonucleotide primer for the detection of SNP TSC0033671
tagagtgttcga

SEQ ID NO: 327477 - DNA, 12 bp, Artificial Sequence
  Oligonucleotide primer for the detection of SNP TSC0033673
aataacccacac

SEQ ID NO: 327478 - DNA, 12 bp, Artificial Sequence
  Oligonucleotide primer for the detection of SNP TSC0033673
gtgggattatag

SEQ ID NO: 327479 - DNA, 12 bp, Artificial Sequence
  Oligonucleotide primer for the detection of SNP TSC0033676
cataattttctt

SEQ ID NO: 327480 - DNA, 12 bp, Artificial Sequence
  Oligonucleotide primer for the detection of SNP TSC0033676
gtaaaaattatg

SEQ ID NO: 327481 - DNA, 12 bp, Artificial Sequence
  Oligonucleotide primer for the detection of SNP TSC0033677
taaatatatttc

SEQ ID NO: 327482 - DNA, 12 bp, Artificial Sequence
  Oligonucleotide primer for the detection of SNP TSC0033677
ttattgaggaaa

SEQ ID NO: 327483 - DNA, 12 bp, Artificial Sequence
  Oligonucleotide primer for the detection of SNP TSC0033679
aatttcctctaa

SEQ ID NO: 327484 - DNA, 12 bp, Artificial Sequence
  Oligonukleotid-Primer
cactttctaatt

SEQ ID NO: 327485 - DNA, 12 bp, Artificial Sequence
  Oligonucleotide primer for the detection of SNP TSC0033680
tagttatattat

SEQ ID NO: 327486 - DNA, 12 bp, Artificial Sequence
  Oligonucleotide primer for the detection of SNP TSC0033680
aattatatcata

SEQ ID NO: 327487 - DNA, 12 bp, Artificial Sequence
  Oligonucleotide primer for the detection of SNP TSC0033681
atattttcactc

SEQ ID NO: 327488 - DNA, 12 bp, Artificial Sequence
  Oligonucleotide primer for the detection of SNP TSC0033681
gtagtttgaaag

SEQ ID NO: 327489 - DNA, 12 bp, Artificial Sequence
  Oligonucleotide primer for the detection of SNP TSC0033682
cttcccccctct

SEQ ID NO: 327490 - DNA, 12 bp, Artificial Sequence
  Oligonucleotide primer for the detection of SNP TSC0033682
ggaggaagaaga

SEQ ID NO: 327491 - DNA, 12 bp, Artificial Sequence
  Oligonucleotide primer for the detection of SNP TSC0033685
ccaacaacttaa

SEQ ID NO: 327492 - DNA, 12 bp, Artificial Sequence
  Oligonucleotide primer for the detection of SNP TSC0033685
tgatattttagt

SEQ ID NO: 327493 - DNA, 12 bp, Artificial Sequence
  Oligonucleotide primer for the detection of SNP TSC0033685
cgatattttagt

SEQ ID NO: 327494 - DNA, 12 bp, Artificial Sequence
  Oligonucleotide primer for the detection of SNP TSC0033685
caatattccaac

SEQ ID NO: 327495 - DNA, 12 bp, Artificial Sequence
  Oligonucleotide primer for the detection of SNP TSC0033685
cgatattccaac

SEQ ID NO: 327496 - DNA, 12 bp, Artificial Sequence
  Oligonucleotide primer for the detection of SNP TSC0033685
ttaatagtttgg

SEQ ID NO: 327497 - DNA, 12 bp, Artificial Sequence
  Oligonucleotide primer for the detection of SNP TSC0033686
accctacctcta

SEQ ID NO: 327498 - DNA, 12 bp, Artificial Sequence
  Oligonucleotide primer for the detection of SNP TSC0033686
aagtaggaaagt

SEQ ID NO: 327499 - DNA, 12 bp, Artificial Sequence
  Oligonucleotide primer for the detection of SNP TSC0033688
aaatctcatacc

SEQ ID NO: 327500 - DNA, 12 bp, Artificial Sequence
  Oligonucleotide primer for the detection of SNP TSC0033688
tccttctctata

SEQ ID NO: 327501 - DNA, 12 bp, Artificial Sequence
  Oligonucleotide primer for the detection of SNP TSC0033688
aggttttatatt

SEQ ID NO: 327502 - DNA, 12 bp, Artificial Sequence
  Oligonucleotide primer for the detection of SNP TSC0033690
ttttacttaacc

SEQ ID NO: 327503 - DNA, 12 bp, Artificial Sequence
  Oligonucleotide primer for the detection of SNP TSC0033690
agaggggtgagg

SEQ ID NO: 327504 - DNA, 12 bp, Artificial Sequence
  Oligonucleotide primer for the detection of SNP TSC0033691
ttataataaata

SEQ ID NO: 327505 - DNA, 12 bp, Artificial Sequence
  Oligonucleotide primer for the detection of SNP TSC0033691
caaaatttccca

SEQ ID NO: 327506 - DNA, 12 bp, Artificial Sequence
  Oligonucleotide primer for the detection of SNP TSC0033691
gttgtggtgggt

SEQ ID NO: 327507 - DNA, 12 bp, Artificial Sequence
  Oligonucleotide primer for the detection of SNP TSC0033692
aattctctaaaa

SEQ ID NO: 327508 - DNA, 12 bp, Artificial Sequence
  Oligonucleotide primer for the detection of SNP TSC0033692
cacatcattcca

SEQ ID NO: 327509 - DNA, 12 bp, Artificial Sequence
  Oligonucleotide primer for the detection of SNP TSC0033692
gggttttttaga

SEQ ID NO: 327510 - DNA, 12 bp, Artificial Sequence
  Oligonucleotide primer for the detection of SNP TSC0033693
caaactcctccc

SEQ ID NO: 327511 - DNA, 12 bp, Artificial Sequence
  Oligonucleotide primer for the detection of SNP TSC0033693
tttattgtgtgg

SEQ ID NO: 327512 - DNA, 12 bp, Artificial Sequence
  Oligonucleotide primer for the detection of SNP TSC0033693
tttatcgtgtgg

SEQ ID NO: 327513 - DNA, 12 bp, Artificial Sequence
  Oligonucleotide primer for the detection of SNP TSC0033693
cttaccgtataa

SEQ ID NO: 327514 - DNA, 12 bp, Artificial Sequence
  Oligonucleotide primer for the detection of SNP TSC0033698
tctataataccc

SEQ ID NO: 327515 - DNA, 12 bp, Artificial Sequence
  Oligonucleotide primer for the detection of SNP TSC0033698
tttgtggtttaa

SEQ ID NO: 327516 - DNA, 12 bp, Artificial Sequence
  Oligonucleotide primer for the detection of SNP TSC0033707
tataaatctctt

SEQ ID NO: 327517 - DNA, 12 bp, Artificial Sequence
  Oligonucleotide primer for the detection of SNP TSC0033707
ttatagtgttgg

SEQ ID NO: 327518 - DNA, 12 bp, Artificial Sequence
  Oligonucleotide primer for the detection of SNP TSC0033708
ttggaagaaagt

SEQ ID NO: 327519 - DNA, 12 bp, Artificial Sequence
  Oligonucleotide primer for the detection of SNP TSC0033708
gattggattttt

SEQ ID NO: 327520 - DNA, 12 bp, Artificial Sequence
  Oligonucleotide primer for the detection of SNP TSC0033712
aacaattattta

SEQ ID NO: 327521 - DNA, 12 bp, Artificial Sequence
  Oligonucleotide primer for the detection of SNP TSC0033712
aacgattattta

SEQ ID NO: 327522 - DNA, 12 bp, Artificial Sequence
  Oligonucleotide primer for the detection of SNP TSC0033712
tttgtgtttaat

SEQ ID NO: 327523 - DNA, 12 bp, Artificial Sequence
  Oligonucleotide primer for the detection of SNP TSC0033712
ttcgtgtttaat

SEQ ID NO: 327524 - DNA, 12 bp, Artificial Sequence
  Oligonucleotide primer for the detection of SNP TSC0033712
tttgcgtttaat

SEQ ID NO: 327525 - DNA, 12 bp, Artificial Sequence
  Oligonucleotide primer for the detection of SNP TSC0033712
ttcgcgtttaat

SEQ ID NO: 327526 - DNA, 12 bp, Artificial Sequence
  Oligonucleotide primer for the detection of SNP TSC0033712
tttgtgtttaac

SEQ ID NO: 327527 - DNA, 12 bp, Artificial Sequence
  Oligonucleotide primer for the detection of SNP TSC0033712
ttcgtgtttaac

SEQ ID NO: 327528 - DNA, 12 bp, Artificial Sequence
  Oligonucleotide primer for the detection of SNP TSC0033712
tttgcgtttaac

SEQ ID NO: 327529 - DNA, 12 bp, Artificial Sequence
  Oligonucleotide primer for the detection of SNP TSC0033712
ttcgcgtttaac

SEQ ID NO: 327530 - DNA, 12 bp, Artificial Sequence
  Oligonucleotide primer for the detection of SNP TSC0033712
tccacacccaac

SEQ ID NO: 327531 - DNA, 12 bp, Artificial Sequence
  Oligonucleotide primer for the detection of SNP TSC0033712
tccacgcccaac

SEQ ID NO: 327532 - DNA, 12 bp, Artificial Sequence
  Oligonucleotide primer for the detection of SNP TSC0033712
tccgcacccaac

SEQ ID NO: 327533 - DNA, 12 bp, Artificial Sequence
  Oligonucleotide primer for the detection of SNP TSC0033712
tccgcgcccaac

SEQ ID NO: 327534 - DNA, 12 bp, Artificial Sequence
  Oligonucleotide primer for the detection of SNP TSC0033712
agtgattatttg

SEQ ID NO: 327535 - DNA, 12 bp, Artificial Sequence
  Oligonucleotide primer for the detection of SNP TSC0033712
agcgattatttg

SEQ ID NO: 327536 - DNA, 12 bp, Artificial Sequence
  Oligonucleotide primer for the detection of SNP TSC0033713
accataataaat

SEQ ID NO: 327537 - DNA, 12 bp, Artificial Sequence
  Oligonucleotide primer for the detection of SNP TSC0033713
accgtaataaat

SEQ ID NO: 327538 - DNA, 12 bp, Artificial Sequence
  Oligonucleotide primer for the detection of SNP TSC0033715
acattcacctca

SEQ ID NO: 327539 - DNA, 12 bp, Artificial Sequence
  Oligonucleotide primer for the detection of SNP TSC0033715
acattcgcctca

SEQ ID NO: 327540 - DNA, 12 bp, Artificial Sequence
  Oligonucleotide primer for the detection of SNP TSC0033715
tgaggtgttatt

SEQ ID NO: 327541 - DNA, 12 bp, Artificial Sequence
  Oligonucleotide primer for the detection of SNP TSC0033715
cgaggtgttatt

SEQ ID NO: 327542 - DNA, 12 bp, Artificial Sequence
  Oligonucleotide primer for the detection of SNP TSC0033715
cgaaatatcacc

SEQ ID NO: 327543 - DNA, 12 bp, Artificial Sequence
  Oligonucleotide primer for the detection of SNP TSC0033715
atattcgtttta

SEQ ID NO: 327544 - DNA, 12 bp, Artificial Sequence
  Oligonucleotide primer for the detection of SNP TSC0033717
aattcaatacct

SEQ ID NO: 327545 - DNA, 12 bp, Artificial Sequence
  Oligonucleotide primer for the detection of SNP TSC0033717
ataaggaggata

SEQ ID NO: 327546 - DNA, 12 bp, Artificial Sequence
  Oligonucleotide primer for the detection of SNP TSC0033719
ttaatcccatac

SEQ ID NO: 327547 - DNA, 12 bp, Artificial Sequence
  Oligonucleotide primer for the detection of SNP TSC0033724
tacacaaaccac

SEQ ID NO: 327548 - DNA, 12 bp, Artificial Sequence
  Oligonucleotide primer for the detection of SNP TSC0033724
attgttgttttt

SEQ ID NO: 327549 - DNA, 12 bp, Artificial Sequence
  Oligonucleotide primer for the detection of SNP TSC0033725
acccacctataa

SEQ ID NO: 327550 - DNA, 12 bp, Artificial Sequence
  Oligonucleotide primer for the detection of SNP TSC0033725
ttttatagttgt

SEQ ID NO: 327551 - DNA, 12 bp, Artificial Sequence
  Oligonucleotide primer for the detection of SNP TSC0033725
tcccacaactac

SEQ ID NO: 327552 - DNA, 12 bp, Artificial Sequence
  Oligonucleotide primer for the detection of SNP TSC0033725
gtttatttatga

SEQ ID NO: 327553 - DNA, 12 bp, Artificial Sequence
  Oligonucleotide primer for the detection of SNP TSC0033729
ctcctacactac

SEQ ID NO: 327554 - DNA, 12 bp, Artificial Sequence
  Oligonucleotide primer for the detection of SNP TSC0033729
ttgggatttata

SEQ ID NO: 327555 - DNA, 12 bp, Artificial Sequence
  Oligonucleotide primer for the detection of SNP TSC0033730
catactcatttc

SEQ ID NO: 327556 - DNA, 12 bp, Artificial Sequence
  Oligonucleotide primer for the detection of SNP TSC0033730
tttttaaaaaag

SEQ ID NO: 327557 - DNA, 12 bp, Artificial Sequence
  Oligonucleotide primer for the detection of SNP TSC0033731
aacaaatattac

SEQ ID NO: 327558 - DNA, 12 bp, Artificial Sequence
  Oligonucleotide primer for the detection of SNP TSC0033731
aaataaatagaa

SEQ ID NO: 327559 - DNA, 12 bp, Artificial Sequence
  Oligonucleotide primer for the detection of SNP TSC0033734
aatatttataac

SEQ ID NO: 327560 - DNA, 12 bp, Artificial Sequence
  Oligonucleotide primer for the detection of SNP TSC0033734
aatatttatggt

SEQ ID NO: 327561 - DNA, 12 bp, Artificial Sequence
  Oligonucleotide primer for the detection of SNP TSC0033735
cttaaaaataac

SEQ ID NO: 327562 - DNA, 12 bp, Artificial Sequence
  Oligonucleotide primer for the detection of SNP TSC0033735
gattagatatag

SEQ ID NO: 327563 - DNA, 12 bp, Artificial Sequence
  Oligonucleotide primer for the detection of SNP TSC0033736
taacaatcatat

SEQ ID NO: 327564 - DNA, 12 bp, Artificial Sequence
  Oligonucleotide primer for the detection of SNP TSC0033736
taacgatcatat

SEQ ID NO: 327565 - DNA, 12 bp, Artificial Sequence
  Oligonucleotide primer for the detection of SNP TSC0033736
tagtaaaggtag

SEQ ID NO: 327566 - DNA, 12 bp, Artificial Sequence
  Oligonucleotide primer for the detection of SNP TSC0033737
caatctttttta

SEQ ID NO: 327567 - DNA, 12 bp, Artificial Sequence
  Oligonucleotide primer for the detection of SNP TSC0033737
tttttgttgtga

SEQ ID NO: 327568 - DNA, 12 bp, Artificial Sequence
  Oligonucleotide primer for the detection of SNP TSC0033737
cctttactataa

SEQ ID NO: 327569 - DNA, 12 bp, Artificial Sequence
  Oligonucleotide primer for the detection of SNP TSC0033738
aacctataaaac

SEQ ID NO: 327570 - DNA, 12 bp, Artificial Sequence
  Oligonucleotide primer for the detection of SNP TSC0033738
ttagtagtagga

SEQ ID NO: 327571 - DNA, 12 bp, Artificial Sequence
  Oligonucleotide primer for the detection of SNP TSC0033739
ctaaatcataat

SEQ ID NO: 327572 - DNA, 12 bp, Artificial Sequence
  Oligonucleotide primer for the detection of SNP TSC0033739
gtattttaattt

SEQ ID NO: 327573 - DNA, 12 bp, Artificial Sequence
  Oligonukleotid-Primer
atactctaattt

SEQ ID NO: 327574 - DNA, 12 bp, Artificial Sequence
  Oligonucleotide primer for the detection of SNP TSC0033739
ttaaattatagt

SEQ ID NO: 327575 - DNA, 12 bp, Artificial Sequence
  Oligonucleotide primer for the detection of SNP TSC0033743
tcaaaaaaaata

SEQ ID NO: 327576 - DNA, 12 bp, Artificial Sequence
  Oligonucleotide primer for the detection of SNP TSC0033745
tcactataacct

SEQ ID NO: 327577 - DNA, 12 bp, Artificial Sequence
  Oligonukleotid-Primer
gtttaggagttg

SEQ ID NO: 327578 - DNA, 12 bp, Artificial Sequence
  Oligonucleotide primer for the detection of SNP TSC0033746
actacattttaa

SEQ ID NO: 327579 - DNA, 12 bp, Artificial Sequence
  Oligonucleotide primer for the detection of SNP TSC0033746
gttatataaaaa

SEQ ID NO: 327580 - DNA, 12 bp, Artificial Sequence
  Oligonucleotide primer for the detection of SNP TSC0033747
ctccaccaacaa

SEQ ID NO: 327581 - DNA, 12 bp, Artificial Sequence
  Oligonukleotid-Primer
ttaaatttcttc

SEQ ID NO: 327582 - DNA, 12 bp, Artificial Sequence
  Oligonucleotide primer for the detection of SNP TSC0033747
ttttattaatag

SEQ ID NO: 327583 - DNA, 12 bp, Artificial Sequence
  Oligonucleotide primer for the detection of SNP TSC0033748
tttattcataat

SEQ ID NO: 327584 - DNA, 12 bp, Artificial Sequence
  Oligonucleotide primer for the detection of SNP TSC0033748
ttttaatttgaa

SEQ ID NO: 327585 - DNA, 12 bp, Artificial Sequence
  Oligonukleotid-Primer
aacacttaaacc

SEQ ID NO: 327586 - DNA, 12 bp, Artificial Sequence
  Oligonucleotide primer for the detection of SNP TSC0033749
tgtaatttttga

SEQ ID NO: 327587 - DNA, 12 bp, Artificial Sequence
  Oligonucleotide primer for the detection of SNP TSC0033749
aatatttgaatt

SEQ ID NO: 327588 - DNA, 12 bp, Artificial Sequence
  Oligonucleotide primer for the detection of SNP TSC0033752
tctctaaaaaat

SEQ ID NO: 327589 - DNA, 12 bp, Artificial Sequence
  Oligonucleotide primer for the detection of SNP TSC0033752
ttagaaggagta

SEQ ID NO: 327590 - DNA, 12 bp, Artificial Sequence
  Oligonucleotide primer for the detection of SNP TSC0033752
ctaaaaaaaata

SEQ ID NO: 327591 - DNA, 12 bp, Artificial Sequence
  Oligonucleotide primer for the detection of SNP TSC0033752
tttttagaaaat

SEQ ID NO: 327592 - DNA, 12 bp, Artificial Sequence
  Oligonucleotide primer for the detection of SNP TSC0033753
cttatcatcaaa

SEQ ID NO: 327593 - DNA, 12 bp, Artificial Sequence
  Oligonucleotide primer for the detection of SNP TSC0033753
ttaatgtttagt

SEQ ID NO: 327594 - DNA, 12 bp, Artificial Sequence
  Oligonucleotide primer for the detection of SNP TSC0033753
tccaatacccaa

SEQ ID NO: 327595 - DNA, 12 bp, Artificial Sequence
  Oligonucleotide primer for the detection of SNP TSC0033754
ttgtttatttac

SEQ ID NO: 327596 - DNA, 12 bp, Artificial Sequence
  Oligonucleotide primer for the detection of SNP TSC0033754
actatctactca

SEQ ID NO: 327597 - DNA, 12 bp, Artificial Sequence
  Oligonucleotide primer for the detection of SNP TSC0033754
ttaaagaaggaa

SEQ ID NO: 327598 - DNA, 12 bp, Artificial Sequence
  Oligonucleotide primer for the detection of SNP TSC0033756
ataatacttaca

SEQ ID NO: 327599 - DNA, 12 bp, Artificial Sequence
  Oligonucleotide primer for the detection of SNP TSC0033756
ttttaattatat

SEQ ID NO: 327600 - DNA, 12 bp, Artificial Sequence
  Oligonucleotide primer for the detection of SNP TSC0033756
ccccaaccatat

SEQ ID NO: 327601 - DNA, 12 bp, Artificial Sequence
  Oligonucleotide primer for the detection of SNP TSC0033756
ataatatttata

SEQ ID NO: 327602 - DNA, 12 bp, Artificial Sequence
  Oligonucleotide primer for the detection of SNP TSC0033757
acaaaactacta

SEQ ID NO: 327603 - DNA, 12 bp, Artificial Sequence
  Oligonucleotide primer for the detection of SNP TSC0033757
tagtagttgtag

SEQ ID NO: 327604 - DNA, 12 bp, Artificial Sequence
  Oligonucleotide primer for the detection of SNP TSC0033757
caacaactacaa

SEQ ID NO: 327605 - DNA, 12 bp, Artificial Sequence
  Oligonucleotide primer for the detection of SNP TSC0033757
gtagggttgttg

SEQ ID NO: 327606 - DNA, 12 bp, Artificial Sequence
  Oligonucleotide primer for the detection of SNP TSC0033759
tccctatctcat

SEQ ID NO: 327607 - DNA, 12 bp, Artificial Sequence
  Oligonucleotide primer for the detection of SNP TSC0033759
ggatttttttta

SEQ ID NO: 327608 - DNA, 12 bp, Artificial Sequence
  Oligonucleotide primer for the detection of SNP TSC0033761
ttatttactatt

SEQ ID NO: 327609 - DNA, 12 bp, Artificial Sequence
  Oligonucleotide primer for the detection of SNP TSC0033761
atgttggtagtg

SEQ ID NO: 327610 - DNA, 12 bp, Artificial Sequence
  Oligonucleotide primer for the detection of SNP TSC0033765
atggagaaattt

SEQ ID NO: 327611 - DNA, 12 bp, Artificial Sequence
  Oligonucleotide primer for the detection of SNP TSC0033765
ataaaaaaactc

SEQ ID NO: 327612 - DNA, 12 bp, Artificial Sequence
  Oligonucleotide primer for the detection of SNP TSC0033766
agtttgaatttg

SEQ ID NO: 327613 - DNA, 12 bp, Artificial Sequence
  Oligonucleotide primer for the detection of SNP TSC0033766
agtttgaattcg

SEQ ID NO: 327614 - DNA, 12 bp, Artificial Sequence
  Oligonucleotide primer for the detection of SNP TSC0033766
aacttaaaccca

SEQ ID NO: 327615 - DNA, 12 bp, Artificial Sequence
  Oligonucleotide primer for the detection of SNP TSC0033766
aacttaaacccg

SEQ ID NO: 327616 - DNA, 12 bp, Artificial Sequence
  Oligonucleotide primer for the detection of SNP TSC0033767
attcaactattt

SEQ ID NO: 327617 - DNA, 12 bp, Artificial Sequence
  Oligonucleotide primer for the detection of SNP TSC0033770
tatcttaatcac

SEQ ID NO: 327618 - DNA, 12 bp, Artificial Sequence
  Oligonucleotide primer for the detection of SNP TSC0033772
aaaaaaaacccc

SEQ ID NO: 327619 - DNA, 12 bp, Artificial Sequence
  Oligonucleotide primer for the detection of SNP TSC0033772
tggagttggttg

SEQ ID NO: 327620 - DNA, 12 bp, Artificial Sequence
  Oligonucleotide primer for the detection of SNP TSC0033772
tggagtcggttg

SEQ ID NO: 327621 - DNA, 12 bp, Artificial Sequence
  Oligonucleotide primer for the detection of SNP TSC0033773
atccctaacctc

SEQ ID NO: 327622 - DNA, 12 bp, Artificial Sequence
  Oligonucleotide primer for the detection of SNP TSC0033773
aggaggattgtt

SEQ ID NO: 327623 - DNA, 12 bp, Artificial Sequence
  Oligonucleotide primer for the detection of SNP TSC0033774
aattcactacaa

SEQ ID NO: 327624 - DNA, 12 bp, Artificial Sequence
  Oligonucleotide primer for the detection of SNP TSC0033774
agtttaggagtt

SEQ ID NO: 327625 - DNA, 12 bp, Artificial Sequence
  Oligonucleotide primer for the detection of SNP TSC0033774
aacccaaaaatt

SEQ ID NO: 327626 - DNA, 12 bp, Artificial Sequence
  Oligonucleotide primer for the detection of SNP TSC0033776
aactaaaaaaac

SEQ ID NO: 327627 - DNA, 12 bp, Artificial Sequence
  Oligonucleotide primer for the detection of SNP TSC0033776
ttatgattgtga

SEQ ID NO: 327628 - DNA, 12 bp, Artificial Sequence
  Oligonucleotide primer for the detection of SNP TSC0033777
aattgagtatta

SEQ ID NO: 327629 - DNA, 12 bp, Artificial Sequence
  Oligonucleotide primer for the detection of SNP TSC0033782
ttcatatccttt

SEQ ID NO: 327630 - DNA, 12 bp, Artificial Sequence
  Oligonucleotide primer for the detection of SNP TSC0033782
tagttatttatg

SEQ ID NO: 327631 - DNA, 12 bp, Artificial Sequence
  Oligonucleotide primer for the detection of SNP TSC0033784
tgttttattgat

SEQ ID NO: 327632 - DNA, 12 bp, Artificial Sequence
  Oligonucleotide primer for the detection of SNP TSC0033784
ctattccattaa

SEQ ID NO: 327633 - DNA, 12 bp, Artificial Sequence
  Oligonucleotide primer for the detection of SNP TSC0033784
aaatagagatat

SEQ ID NO: 327634 - DNA, 12 bp, Artificial Sequence
  Oligonucleotide primer for the detection of SNP TSC0033785
acacacatacac

SEQ ID NO: 327635 - DNA, 12 bp, Artificial Sequence
  Oligonucleotide primer for the detection of SNP TSC0033786
tcaccccaacct

SEQ ID NO: 327636 - DNA, 12 bp, Artificial Sequence
  Oligonucleotide primer for the detection of SNP TSC0033787
atatcctaccaa

SEQ ID NO: 327637 - DNA, 12 bp, Artificial Sequence
  Oligonucleotide primer for the detection of SNP TSC0033787
cactttcttact

SEQ ID NO: 327638 - DNA, 12 bp, Artificial Sequence
  Oligonucleotide primer for the detection of SNP TSC0033787
cgctttcttact

SEQ ID NO: 327639 - DNA, 12 bp, Artificial Sequence
  Oligonucleotide primer for the detection of SNP TSC0033787
atgttttgttaa

SEQ ID NO: 327640 - DNA, 12 bp, Artificial Sequence
  Oligonucleotide primer for the detection of SNP TSC0033789
atcctcccactt

SEQ ID NO: 327641 - DNA, 12 bp, Artificial Sequence
  Oligonucleotide primer for the detection of SNP TSC0033789
ttattttggagg

SEQ ID NO: 327642 - DNA, 12 bp, Artificial Sequence
  Oligonucleotide primer for the detection of SNP TSC0033789
ttatttcggagg

SEQ ID NO: 327643 - DNA, 12 bp, Artificial Sequence
  Oligonucleotide primer for the detection of SNP TSC0033790
acctttctaaac

SEQ ID NO: 327644 - DNA, 12 bp, Artificial Sequence
  Oligonucleotide primer for the detection of SNP TSC0033790
ggtaaagtttaa

SEQ ID NO: 327645 - DNA, 12 bp, Artificial Sequence
  Oligonucleotide primer for the detection of SNP TSC0033791
actttacctttc

SEQ ID NO: 327646 - DNA, 12 bp, Artificial Sequence
  Oligonucleotide primer for the detection of SNP TSC0033791
atagtttaggag

SEQ ID NO: 327647 - DNA, 12 bp, Artificial Sequence
  Oligonucleotide primer for the detection of SNP TSC0033792
acatatacaaat

SEQ ID NO: 327648 - DNA, 12 bp, Artificial Sequence
  Oligonucleotide primer for the detection of SNP TSC0033793
ataaaatataca

SEQ ID NO: 327649 - DNA, 12 bp, Artificial Sequence
  Oligonucleotide primer for the detection of SNP TSC0033793
atattaatatat

SEQ ID NO: 327650 - DNA, 12 bp, Artificial Sequence
  Oligonucleotide primer for the detection of SNP TSC0033793
ataagatatata

SEQ ID NO: 327651 - DNA, 12 bp, Artificial Sequence
  Oligonucleotide primer for the detection of SNP TSC0033794
gtatattatatg

SEQ ID NO: 327652 - DNA, 12 bp, Artificial Sequence
  Oligonucleotide primer for the detection of SNP TSC0033796
aaaatttttcct

SEQ ID NO: 327653 - DNA, 12 bp, Artificial Sequence
  Oligonucleotide primer for the detection of SNP TSC0033799
aaataatatcat

SEQ ID NO: 327654 - DNA, 12 bp, Artificial Sequence
  Oligonucleotide primer for the detection of SNP TSC0033799
tgattattttaa

SEQ ID NO: 327655 - DNA, 12 bp, Artificial Sequence
  Oligonucleotide primer for the detection of SNP TSC0033800
aattataaacat

SEQ ID NO: 327656 - DNA, 12 bp, Artificial Sequence
  Oligonucleotide primer for the detection of SNP TSC0033800
ttgggtgcggtg

SEQ ID NO: 327657 - DNA, 12 bp, Artificial Sequence
  Oligonucleotide primer for the detection of SNP TSC0033803
ggttgggtatgg

SEQ ID NO: 327658 - DNA, 12 bp, Artificial Sequence
  Oligonucleotide primer for the detection of SNP TSC0033814
ctttttttttcc

SEQ ID NO: 327659 - DNA, 12 bp, Artificial Sequence
  Oligonucleotide primer for the detection of SNP TSC0033814
tgtttggagaag

SEQ ID NO: 327660 - DNA, 12 bp, Artificial Sequence
  Oligonucleotide primer for the detection of SNP TSC0033814
cgtttggagaag

SEQ ID NO: 327661 - DNA, 12 bp, Artificial Sequence
  Oligonucleotide primer for the detection of SNP TSC0033815
tttccaactata

SEQ ID NO: 327662 - DNA, 12 bp, Artificial Sequence
  Oligonucleotide primer for the detection of SNP TSC0033815
taattgagaaat

SEQ ID NO: 327663 - DNA, 12 bp, Artificial Sequence
  Oligonucleotide primer for the detection of SNP TSC0033815
tcaattaaaaaa

SEQ ID NO: 327664 - DNA, 12 bp, Artificial Sequence
  Oligonucleotide primer for the detection of SNP TSC0033816
cttaatttctcc

SEQ ID NO: 327665 - DNA, 12 bp, Artificial Sequence
  Oligonucleotide primer for the detection of SNP TSC0033816
ttttaaaaatga

SEQ ID NO: 327666 - DNA, 12 bp, Artificial Sequence
  Oligonucleotide primer for the detection of SNP TSC0033817
acttaacacttc

SEQ ID NO: 327667 - DNA, 12 bp, Artificial Sequence
  Oligonucleotide primer for the detection of SNP TSC0033817
atttgttattta

SEQ ID NO: 327668 - DNA, 12 bp, Artificial Sequence
  Oligonucleotide primer for the detection of SNP TSC0033818
aaaactacaacc

SEQ ID NO: 327669 - DNA, 12 bp, Artificial Sequence
  Oligonucleotide primer for the detection of SNP TSC0033818
taataagattgg

SEQ ID NO: 327670 - DNA, 12 bp, Artificial Sequence
  Oligonucleotide primer for the detection of SNP TSC0033818
ggagttgtaatt

SEQ ID NO: 327671 - DNA, 12 bp, Artificial Sequence
  Oligonucleotide primer for the detection of SNP TSC0033819
cccctctcactc

SEQ ID NO: 327672 - DNA, 12 bp, Artificial Sequence
  Oligonucleotide primer for the detection of SNP TSC0033819
gtaaggagattg

SEQ ID NO: 327673 - DNA, 12 bp, Artificial Sequence
  Oligonucleotide primer for the detection of SNP TSC0033820
aaccaaccaaac

SEQ ID NO: 327674 - DNA, 12 bp, Artificial Sequence
  Oligonucleotide primer for the detection of SNP TSC0033820
ttttttggttcg

SEQ ID NO: 327675 - DNA, 12 bp, Artificial Sequence
  Oligonucleotide primer for the detection of SNP TSC0033821
atatggatttta

SEQ ID NO: 327676 - DNA, 12 bp, Artificial Sequence
  Oligonucleotide primer for the detection of SNP TSC0033822
caatatctttat

SEQ ID NO: 327677 - DNA, 12 bp, Artificial Sequence
  Oligonucleotide primer for the detection of SNP TSC0033822
ttggtttttgtg

SEQ ID NO: 327678 - DNA, 12 bp, Artificial Sequence
  Oligonucleotide primer for the detection of SNP TSC0033822
ttggttttcgtg

SEQ ID NO: 327679 - DNA, 12 bp, Artificial Sequence
  Oligonucleotide primer for the detection of SNP TSC0033822
ttggtttttgcg

SEQ ID NO: 327680 - DNA, 12 bp, Artificial Sequence
  Oligonucleotide primer for the detection of SNP TSC0033822
ttggttttcgcg

SEQ ID NO: 327681 - DNA, 12 bp, Artificial Sequence
  Oligonucleotide primer for the detection of SNP TSC0033823
tctttatattaa

SEQ ID NO: 327682 - DNA, 12 bp, Artificial Sequence
  Oligonucleotide primer for the detection of SNP TSC0033823
tatattctcatc

SEQ ID NO: 327683 - DNA, 12 bp, Artificial Sequence
  Oligonucleotide primer for the detection of SNP TSC0033823
tttttgtgttgg

SEQ ID NO: 327684 - DNA, 12 bp, Artificial Sequence
  Oligonucleotide primer for the detection of SNP TSC0033824
aaatttctaaat

SEQ ID NO: 327685 - DNA, 12 bp, Artificial Sequence
  Oligonucleotide primer for the detection of SNP TSC0033824
ataattataata

SEQ ID NO: 327686 - DNA, 12 bp, Artificial Sequence
  Oligonucleotide primer for the detection of SNP TSC0033826
tatatattactt

SEQ ID NO: 327687 - DNA, 12 bp, Artificial Sequence
  Oligonucleotide primer for the detection of SNP TSC0033826
gtttataatgta

SEQ ID NO: 327688 - DNA, 12 bp, Artificial Sequence
  Oligonucleotide primer for the detection of SNP TSC0033826
gtttataacgta

SEQ ID NO: 327689 - DNA, 12 bp, Artificial Sequence
  Oligonucleotide primer for the detection of SNP TSC0033827
cctaaacttact

SEQ ID NO: 327690 - DNA, 12 bp, Artificial Sequence
  Oligonucleotide primer for the detection of SNP TSC0033827
gatatagtaaag

SEQ ID NO: 327691 - DNA, 12 bp, Artificial Sequence
  Oligonucleotide primer for the detection of SNP TSC0033828
tttaacttttac

SEQ ID NO: 327692 - DNA, 12 bp, Artificial Sequence
  Oligonucleotide primer for the detection of SNP TSC0033828
gtgtggaggaaa

SEQ ID NO: 327693 - DNA, 12 bp, Artificial Sequence
  Oligonucleotide primer for the detection of SNP TSC0033828
gcgtggaggaaa

SEQ ID NO: 327694 - DNA, 12 bp, Artificial Sequence
  Oligonucleotide primer for the detection of SNP TSC0033829
tcaacaccaccc

SEQ ID NO: 327695 - DNA, 12 bp, Artificial Sequence
  Oligonucleotide primer for the detection of SNP TSC0033829
aggaggatgatg

SEQ ID NO: 327696 - DNA, 12 bp, Artificial Sequence
  Oligonucleotide primer for the detection of SNP TSC0033829
aggaggatgacg

SEQ ID NO: 327697 - DNA, 12 bp, Artificial Sequence
  Oligonucleotide primer for the detection of SNP TSC0033836
attctaaaaact

SEQ ID NO: 327698 - DNA, 12 bp, Artificial Sequence
  Oligonucleotide primer for the detection of SNP TSC0033836
agaagaaagatg

SEQ ID NO: 327699 - DNA, 12 bp, Artificial Sequence
  Oligonucleotide primer for the detection of SNP TSC0033837
aatcttcgatat

SEQ ID NO: 327700 - DNA, 12 bp, Artificial Sequence
  Oligonucleotide primer for the detection of SNP TSC0033837
ttaatgaaaatg

SEQ ID NO: 327701 - DNA, 12 bp, Artificial Sequence
  Oligonucleotide primer for the detection of SNP TSC0033837
ttaatgaaaacg

SEQ ID NO: 327702 - DNA, 12 bp, Artificial Sequence
  Oligonucleotide primer for the detection of SNP TSC0033838
gaaggtatatga

SEQ ID NO: 327703 - DNA, 12 bp, Artificial Sequence
  Oligonucleotide primer for the detection of SNP TSC0033839
acccaataacct

SEQ ID NO: 327704 - DNA, 12 bp, Artificial Sequence
  Oligonucleotide primer for the detection of SNP TSC0033839
gagttagaaaag

SEQ ID NO: 327705 - DNA, 12 bp, Artificial Sequence
  Oligonucleotide primer for the detection of SNP TSC0033840
ttttatattata

SEQ ID NO: 327706 - DNA, 12 bp, Artificial Sequence
  Oligonucleotide primer for the detection of SNP TSC0033840
atagtagtagat

SEQ ID NO: 327707 - DNA, 12 bp, Artificial Sequence
  Oligonucleotide primer for the detection of SNP TSC0033840
ataacaacaaac

SEQ ID NO: 327708 - DNA, 12 bp, Artificial Sequence
  Oligonucleotide primer for the detection of SNP TSC0033841
aatataacaacg

SEQ ID NO: 327709 - DNA, 12 bp, Artificial Sequence
  Oligonucleotide primer for the detection of SNP TSC0033841
tgtaaataagag

SEQ ID NO: 327710 - DNA, 12 bp, Artificial Sequence
  Oligonucleotide primer for the detection of SNP TSC0033841
tacaaacaaaaa

SEQ ID NO: 327711 - DNA, 12 bp, Artificial Sequence
  Oligonucleotide primer for the detection of SNP TSC0033841
ggatatgatagt

SEQ ID NO: 327712 - DNA, 12 bp, Artificial Sequence
  Oligonucleotide primer for the detection of SNP TSC0033841
ggatatgatagc

SEQ ID NO: 327713 - DNA, 12 bp, Artificial Sequence
  Oligonucleotide primer for the detection of SNP TSC0033842
atccctctaatt

SEQ ID NO: 327714 - DNA, 12 bp, Artificial Sequence
  Oligonucleotide primer for the detection of SNP TSC0033842
attttgtagaga

SEQ ID NO: 327715 - DNA, 12 bp, Artificial Sequence
  Oligonucleotide primer for the detection of SNP TSC0033843
aataaataaaac

SEQ ID NO: 327716 - DNA, 12 bp, Artificial Sequence
  Oligonucleotide primer for the detection of SNP TSC0033843
acatttcctaca

SEQ ID NO: 327717 - DNA, 12 bp, Artificial Sequence
  Oligonucleotide primer for the detection of SNP TSC0033843
agtaagtggagt

SEQ ID NO: 327718 - DNA, 12 bp, Artificial Sequence
  Oligonucleotide primer for the detection of SNP TSC0033845
aatcccaaaacc

SEQ ID NO: 327719 - DNA, 12 bp, Artificial Sequence
  Oligonucleotide primer for the detection of SNP TSC0033846
aataatccaccc

SEQ ID NO: 327720 - DNA, 12 bp, Artificial Sequence
  Oligonucleotide primer for the detection of SNP TSC0033846
aataatccgccc

SEQ ID NO: 327721 - DNA, 12 bp, Artificial Sequence
  Oligonucleotide primer for the detection of SNP TSC0033852
tatacctctacc

SEQ ID NO: 327722 - DNA, 12 bp, Artificial Sequence
  Oligonucleotide primer for the detection of SNP TSC0033852
gttgttttttag

SEQ ID NO: 327723 - DNA, 12 bp, Artificial Sequence
  Oligonucleotide primer for the detection of SNP TSC0033853
aaaccacaaaca

SEQ ID NO: 327724 - DNA, 12 bp, Artificial Sequence
  Oligonucleotide primer for the detection of SNP TSC0033853
aaaccacaaacg

SEQ ID NO: 327725 - DNA, 12 bp, Artificial Sequence
  Oligonucleotide primer for the detection of SNP TSC0033853
tgaggattggtt

SEQ ID NO: 327726 - DNA, 12 bp, Artificial Sequence
  Oligonucleotide primer for the detection of SNP TSC0033853
tgaggatcggtt

SEQ ID NO: 327727 - DNA, 12 bp, Artificial Sequence
  Oligonucleotide primer for the detection of SNP TSC0033853
taaaaatcaact

SEQ ID NO: 327728 - DNA, 12 bp, Artificial Sequence
  Oligonucleotide primer for the detection of SNP TSC0033853
taaaaatcgact

SEQ ID NO: 327729 - DNA, 12 bp, Artificial Sequence
  Oligonucleotide primer for the detection of SNP TSC0033853
agattataggtg

SEQ ID NO: 327730 - DNA, 12 bp, Artificial Sequence
  Oligonucleotide primer for the detection of SNP TSC0033853
agattataggcg

SEQ ID NO: 327731 - DNA, 12 bp, Artificial Sequence
  Oligonucleotide primer for the detection of SNP TSC0033854
caatacaccata

SEQ ID NO: 327732 - DNA, 12 bp, Artificial Sequence
  Oligonucleotide primer for the detection of SNP TSC0033854
aatatttagtgt

SEQ ID NO: 327733 - DNA, 12 bp, Artificial Sequence
  Oligonucleotide primer for the detection of SNP TSC0033854
taatatttaata

SEQ ID NO: 327734 - DNA, 12 bp, Artificial Sequence
  Oligonucleotide primer for the detection of SNP TSC0033854
taatgtattata

SEQ ID NO: 327735 - DNA, 12 bp, Artificial Sequence
  Oligonucleotide primer for the detection of SNP TSC0033855
catcaaattttc

SEQ ID NO: 327736 - DNA, 12 bp, Artificial Sequence
  Oligonucleotide primer for the detection of SNP TSC0033855
gagttaatttta

SEQ ID NO: 327737 - DNA, 12 bp, Artificial Sequence
  Oligonucleotide primer for the detection of SNP TSC0033860
ttggttaagaaa

SEQ ID NO: 327738 - DNA, 12 bp, Artificial Sequence
  Oligonucleotide primer for the detection of SNP TSC0033860
tcggttaagaaa

SEQ ID NO: 327739 - DNA, 12 bp, Artificial Sequence
  Oligonucleotide primer for the detection of SNP TSC0033861
aaaaataaatta

SEQ ID NO: 327740 - DNA, 12 bp, Artificial Sequence
  Oligonucleotide primer for the detection of SNP TSC0033861
gggtaatttatg

SEQ ID NO: 327741 - DNA, 12 bp, Artificial Sequence
  Oligonucleotide primer for the detection of SNP TSC0033861
ggaaataaattg

SEQ ID NO: 327742 - DNA, 12 bp, Artificial Sequence
  Oligonucleotide primer for the detection of SNP TSC0033862
caaccatattct

SEQ ID NO: 327743 - DNA, 12 bp, Artificial Sequence
  Oligonucleotide primer for the detection of SNP TSC0033862
tagtatagtatg

SEQ ID NO: 327744 - DNA, 12 bp, Artificial Sequence
  Oligonucleotide primer for the detection of SNP TSC0033863
tatactctttta

SEQ ID NO: 327745 - DNA, 12 bp, Artificial Sequence
  Oligonucleotide primer for the detection of SNP TSC0033863
agaattatttgt

SEQ ID NO: 327746 - DNA, 12 bp, Artificial Sequence
  Oligonucleotide primer for the detection of SNP TSC0033863
aaaaattatcta

SEQ ID NO: 327747 - DNA, 12 bp, Artificial Sequence
  Oligonucleotide primer for the detection of SNP TSC0033863
tgtgtttttttg

SEQ ID NO: 327748 - DNA, 12 bp, Artificial Sequence
  Oligonucleotide primer for the detection of SNP TSC0033866
acaacaaataac

SEQ ID NO: 327749 - DNA, 12 bp, Artificial Sequence
  Oligonucleotide primer for the detection of SNP TSC0033866
gtatgtttttag

SEQ ID NO: 327750 - DNA, 12 bp, Artificial Sequence
  Oligonucleotide primer for the detection of SNP TSC0033866
gtacgtttttag

SEQ ID NO: 327751 - DNA, 12 bp, Artificial Sequence
  Oligonucleotide primer for the detection of SNP TSC0033866
acacatccctaa

SEQ ID NO: 327752 - DNA, 12 bp, Artificial Sequence
  Oligonucleotide primer for the detection of SNP TSC0033866
acacgtccctaa

SEQ ID NO: 327753 - DNA, 12 bp, Artificial Sequence
  Oligonucleotide primer for the detection of SNP TSC0033866
gcacatccctaa

SEQ ID NO: 327754 - DNA, 12 bp, Artificial Sequence
  Oligonucleotide primer for the detection of SNP TSC0033866
gcacgtccctaa

SEQ ID NO: 327755 - DNA, 12 bp, Artificial Sequence
  Oligonucleotide primer for the detection of SNP TSC0033866
gtagtaagtagt

SEQ ID NO: 327756 - DNA, 12 bp, Artificial Sequence
  Oligonucleotide primer for the detection of SNP TSC0033869
atcaaactaatc

SEQ ID NO: 327757 - DNA, 12 bp, Artificial Sequence
  Oligonucleotide primer for the detection of SNP TSC0033869
tagatggtagtg

SEQ ID NO: 327758 - DNA, 12 bp, Artificial Sequence
  Oligonucleotide primer for the detection of SNP TSC0033870
ttttaaataaat

SEQ ID NO: 327759 - DNA, 12 bp, Artificial Sequence
  Oligonucleotide primer for the detection of SNP TSC0033870
ttggaaaatgga

SEQ ID NO: 327760 - DNA, 12 bp, Artificial Sequence
  Oligonucleotide primer for the detection of SNP TSC0033871
aataaactatac

SEQ ID NO: 327761 - DNA, 12 bp, Artificial Sequence
  Oligonucleotide primer for the detection of SNP TSC0033871
atgtaaaagata

SEQ ID NO: 327762 - DNA, 12 bp, Artificial Sequence
  Oligonucleotide primer for the detection of SNP TSC0033872
tggtggtatgtg

SEQ ID NO: 327763 - DNA, 12 bp, Artificial Sequence
  Oligonucleotide primer for the detection of SNP TSC0033873
taggtgattatt

SEQ ID NO: 327764 - DNA, 12 bp, Artificial Sequence
  Oligonucleotide primer for the detection of SNP TSC0033873
ccaaataactac

SEQ ID NO: 327765 - DNA, 12 bp, Artificial Sequence
  Oligonucleotide primer for the detection of SNP TSC0033874
cttcccacaact

SEQ ID NO: 327766 - DNA, 12 bp, Artificial Sequence
  Oligonucleotide primer for the detection of SNP TSC0033874
tatttaaatgag

SEQ ID NO: 327767 - DNA, 12 bp, Artificial Sequence
  Oligonucleotide primer for the detection of SNP TSC0033874
tacctaaataaa

SEQ ID NO: 327768 - DNA, 12 bp, Artificial Sequence
  Oligonucleotide primer for the detection of SNP TSC0033879
tacacaccacca

SEQ ID NO: 327769 - DNA, 12 bp, Artificial Sequence
  Oligonucleotide primer for the detection of SNP TSC0033880
ccaaccacaaaa

SEQ ID NO: 327770 - DNA, 12 bp, Artificial Sequence
  Oligonucleotide primer for the detection of SNP TSC0033880
ccgaccacaaaa

SEQ ID NO: 327771 - DNA, 12 bp, Artificial Sequence
  Oligonucleotide primer for the detection of SNP TSC0033880
ttggttataaag

SEQ ID NO: 327772 - DNA, 12 bp, Artificial Sequence
  Oligonucleotide primer for the detection of SNP TSC0033880
tcggttataaag

SEQ ID NO: 327773 - DNA, 12 bp, Artificial Sequence
  Oligonucleotide primer for the detection of SNP TSC0033881
gcgtatgtttgt

SEQ ID NO: 327774 - DNA, 12 bp, Artificial Sequence
  Oligonukleotid-Primer
aacgcataccta

SEQ ID NO: 327775 - DNA, 12 bp, Artificial Sequence
  Oligonucleotide primer for the detection of SNP TSC0033882
caacaacaacaa

SEQ ID NO: 327776 - DNA, 12 bp, Artificial Sequence
  Oligonucleotide primer for the detection of SNP TSC0033882
aggagttttttt

SEQ ID NO: 327777 - DNA, 12 bp, Artificial Sequence
  Oligonucleotide primer for the detection of SNP TSC0033885
accaaaaatccc

SEQ ID NO: 327778 - DNA, 12 bp, Artificial Sequence
  Oligonukleotid-Primer
ataggatatatg

SEQ ID NO: 327779 - DNA, 12 bp, Artificial Sequence
  Oligonucleotide primer for the detection of SNP TSC0033885
attaaaggtttt

SEQ ID NO: 327780 - DNA, 12 bp, Artificial Sequence
  Oligonucleotide primer for the detection of SNP TSC0033885
attaaaggtttc

SEQ ID NO: 327781 - DNA, 12 bp, Artificial Sequence
  Oligonucleotide primer for the detection of SNP TSC0033890
catacaaaatac

SEQ ID NO: 327782 - DNA, 12 bp, Artificial Sequence
  Oligonucleotide primer for the detection of SNP TSC0033890
gagttatatgta

SEQ ID NO: 327783 - DNA, 12 bp, Artificial Sequence
  Oligonucleotide primer for the detection of SNP TSC0033892
aatatttattac

SEQ ID NO: 327784 - DNA, 12 bp, Artificial Sequence
  Oligonucleotide primer for the detection of SNP TSC0033892
atttatttgata

SEQ ID NO: 327785 - DNA, 12 bp, Artificial Sequence
  Oligonucleotide primer for the detection of SNP TSC0033897
gagatgttgggg

SEQ ID NO: 327786 - DNA, 12 bp, Artificial Sequence
  Oligonucleotide primer for the detection of SNP TSC0033897
ataaaatttgat

SEQ ID NO: 327787 - DNA, 12 bp, Artificial Sequence
  Oligonucleotide primer for the detection of SNP TSC0033901
ataaaattaaca

SEQ ID NO: 327788 - DNA, 12 bp, Artificial Sequence
  Oligonucleotide primer for the detection of SNP TSC0033901
ccccatccatta

SEQ ID NO: 327789 - DNA, 12 bp, Artificial Sequence
  Oligonucleotide primer for the detection of SNP TSC0033901
gtggagttaata

SEQ ID NO: 327790 - DNA, 12 bp, Artificial Sequence
  Oligonucleotide primer for the detection of SNP TSC0033904
aataatccacct

SEQ ID NO: 327791 - DNA, 12 bp, Artificial Sequence
  Oligonucleotide primer for the detection of SNP TSC0033904
ttagaggttaaa

SEQ ID NO: 327792 - DNA, 12 bp, Artificial Sequence
  Oligonucleotide primer for the detection of SNP TSC0033905
tttaaccatatt

SEQ ID NO: 327793 - DNA, 12 bp, Artificial Sequence
  Oligonucleotide primer for the detection of SNP TSC0033907
aatttaaataac

SEQ ID NO: 327794 - DNA, 12 bp, Artificial Sequence
  Oligonucleotide primer for the detection of SNP TSC0033907
gatttttattga

SEQ ID NO: 327795 - DNA, 12 bp, Artificial Sequence
  Oligonucleotide primer for the detection of SNP TSC0033907
gatttttatcga

SEQ ID NO: 327796 - DNA, 12 bp, Artificial Sequence
  Oligonucleotide primer for the detection of SNP TSC0033909
aacactaaaaat

SEQ ID NO: 327797 - DNA, 12 bp, Artificial Sequence
  Oligonucleotide primer for the detection of SNP TSC0033909
gtattgtttgga

SEQ ID NO: 327798 - DNA, 12 bp, Artificial Sequence
  Oligonucleotide primer for the detection of SNP TSC0033909
acattacctaaa

SEQ ID NO: 327799 - DNA, 12 bp, Artificial Sequence
  Oligonucleotide primer for the detection of SNP TSC0033909
aatattaaagat

SEQ ID NO: 327800 - DNA, 12 bp, Artificial Sequence
  Oligonucleotide primer for the detection of SNP TSC0033910
actcactaacct

SEQ ID NO: 327801 - DNA, 12 bp, Artificial Sequence
  Oligonucleotide primer for the detection of SNP TSC0033910
actcgctaacct

SEQ ID NO: 327802 - DNA, 12 bp, Artificial Sequence
  Oligonucleotide primer for the detection of SNP TSC0033910
atagtatgaggg

SEQ ID NO: 327803 - DNA, 12 bp, Artificial Sequence
  Oligonucleotide primer for the detection of SNP TSC0033913
tttccaaaatac

SEQ ID NO: 327804 - DNA, 12 bp, Artificial Sequence
  Oligonucleotide primer for the detection of SNP TSC0033913
tagtgatattat

SEQ ID NO: 327805 - DNA, 12 bp, Artificial Sequence
  Oligonucleotide primer for the detection of SNP TSC0033913
taataatactat

SEQ ID NO: 327806 - DNA, 12 bp, Artificial Sequence
  Oligonucleotide primer for the detection of SNP TSC0033914
ttcctatcaccc

SEQ ID NO: 327807 - DNA, 12 bp, Artificial Sequence
  Oligonucleotide primer for the detection of SNP TSC0033914
aagtggttagtg

SEQ ID NO: 327808 - DNA, 12 bp, Artificial Sequence
  Oligonucleotide primer for the detection of SNP TSC0033915
tactaccactaa

SEQ ID NO: 327809 - DNA, 12 bp, Artificial Sequence
  Oligonucleotide primer for the detection of SNP TSC0033915
taagtatgtttt

SEQ ID NO: 327810 - DNA, 12 bp, Artificial Sequence
  Oligonucleotide primer for the detection of SNP TSC0033915
caaatatactcc

SEQ ID NO: 327811 - DNA, 12 bp, Artificial Sequence
  Oligonucleotide primer for the detection of SNP TSC0033916
acaccaatatcc

SEQ ID NO: 327812 - DNA, 12 bp, Artificial Sequence
  Oligonucleotide primer for the detection of SNP TSC0033916
atttaagtaaag

SEQ ID NO: 327813 - DNA, 12 bp, Artificial Sequence
  Oligonucleotide primer for the detection of SNP TSC0033917
aaatatttatac

SEQ ID NO: 327814 - DNA, 12 bp, Artificial Sequence
  Oligonucleotide primer for the detection of SNP TSC0033917
taagatgttata

SEQ ID NO: 327815 - DNA, 12 bp, Artificial Sequence
  Oligonucleotide primer for the detection of SNP TSC0033918
taatggatataa

SEQ ID NO: 327816 - DNA, 12 bp, Artificial Sequence
  Oligonucleotide primer for the detection of SNP TSC0033918
taataaatataa

SEQ ID NO: 327817 - DNA, 12 bp, Artificial Sequence
  Oligonucleotide primer for the detection of SNP TSC0033918
aatgttgtatat

SEQ ID NO: 327818 - DNA, 12 bp, Artificial Sequence
  Oligonucleotide primer for the detection of SNP TSC0033919
tactataaaact

SEQ ID NO: 327819 - DNA, 12 bp, Artificial Sequence
  Oligonucleotide primer for the detection of SNP TSC0033919
tttagagttttg

SEQ ID NO: 327820 - DNA, 12 bp, Artificial Sequence
  Oligonucleotide primer for the detection of SNP TSC0033920
tcaacttcccaa

SEQ ID NO: 327821 - DNA, 12 bp, Artificial Sequence
  Oligonucleotide primer for the detection of SNP TSC0033921
caataccatact

SEQ ID NO: 327822 - DNA, 12 bp, Artificial Sequence
  Oligonucleotide primer for the detection of SNP TSC0033921
atagtaattaaa

SEQ ID NO: 327823 - DNA, 12 bp, Artificial Sequence
  Oligonucleotide primer for the detection of SNP TSC0033922
gtgttgttttat

SEQ ID NO: 327824 - DNA, 12 bp, Artificial Sequence
  Oligonucleotide primer for the detection of SNP TSC0033922
gtgtcgttttat

SEQ ID NO: 327825 - DNA, 12 bp, Artificial Sequence
  Oligonucleotide primer for the detection of SNP TSC0033922
atatcactctat

SEQ ID NO: 327826 - DNA, 12 bp, Artificial Sequence
  Oligonucleotide primer for the detection of SNP TSC0033922
atatcgctctat

SEQ ID NO: 327827 - DNA, 12 bp, Artificial Sequence
  Oligonucleotide primer for the detection of SNP TSC0033923
taggatggtttc

SEQ ID NO: 327828 - DNA, 12 bp, Artificial Sequence
  Oligonucleotide primer for the detection of SNP TSC0033923
caaaataatctc

SEQ ID NO: 327829 - DNA, 12 bp, Artificial Sequence
  Oligonucleotide primer for the detection of SNP TSC0033923
aggttaggagat

SEQ ID NO: 327830 - DNA, 12 bp, Artificial Sequence
  Oligonucleotide primer for the detection of SNP TSC0033925
atcttaataact

SEQ ID NO: 327831 - DNA, 12 bp, Artificial Sequence
  Oligonucleotide primer for the detection of SNP TSC0033925
gagtgaggtgga

SEQ ID NO: 327832 - DNA, 12 bp, Artificial Sequence
  Oligonucleotide primer for the detection of SNP TSC0033926
taggtatgcgtt

SEQ ID NO: 327833 - DNA, 12 bp, Artificial Sequence
  Oligonucleotide primer for the detection of SNP TSC0033926
taaacatacacc

SEQ ID NO: 327834 - DNA, 12 bp, Artificial Sequence
  Oligonucleotide primer for the detection of SNP TSC0033926
taaacatacgcc

SEQ ID NO: 327835 - DNA, 12 bp, Artificial Sequence
  Oligonucleotide primer for the detection of SNP TSC0033927
accaattcaaat

SEQ ID NO: 327836 - DNA, 12 bp, Artificial Sequence
  Oligonucleotide primer for the detection of SNP TSC0033927
aaatccctttca

SEQ ID NO: 327837 - DNA, 12 bp, Artificial Sequence
  Oligonucleotide primer for the detection of SNP TSC0033927
attaatttaggt

SEQ ID NO: 327838 - DNA, 12 bp, Artificial Sequence
  Oligonucleotide primer for the detection of SNP TSC0033928
tcctatatctat

SEQ ID NO: 327839 - DNA, 12 bp, Artificial Sequence
  Oligonucleotide primer for the detection of SNP TSC0033928
tataaaggttaa

SEQ ID NO: 327840 - DNA, 12 bp, Artificial Sequence
  Oligonucleotide primer for the detection of SNP TSC0033930
tttgaatgtttt

SEQ ID NO: 327841 - DNA, 12 bp, Artificial Sequence
  Oligonucleotide primer for the detection of SNP TSC0033930
cctaaatacttc

SEQ ID NO: 327842 - DNA, 12 bp, Artificial Sequence
  Oligonucleotide primer for the detection of SNP TSC0033930
tgggtaggaagg

SEQ ID NO: 327843 - DNA, 12 bp, Artificial Sequence
  Oligonucleotide primer for the detection of SNP TSC0033931
accaaattttaa

SEQ ID NO: 327844 - DNA, 12 bp, Artificial Sequence
  Oligonucleotide primer for the detection of SNP TSC0033931
accgaattttaa

SEQ ID NO: 327845 - DNA, 12 bp, Artificial Sequence
  Oligonucleotide primer for the detection of SNP TSC0033931
gtagttattttg

SEQ ID NO: 327846 - DNA, 12 bp, Artificial Sequence
  Oligonucleotide primer for the detection of SNP TSC0033931
gtagttatttcg

SEQ ID NO: 327847 - DNA, 12 bp, Artificial Sequence
  Oligonucleotide primer for the detection of SNP TSC0033931
ataatcacctca

SEQ ID NO: 327848 - DNA, 12 bp, Artificial Sequence
  Oligonucleotide primer for the detection of SNP TSC0033931
ataatcacctcg

SEQ ID NO: 327849 - DNA, 12 bp, Artificial Sequence
  Oligonucleotide primer for the detection of SNP TSC0033931
aagttgggtttt

SEQ ID NO: 327850 - DNA, 12 bp, Artificial Sequence
  Oligonucleotide primer for the detection of SNP TSC0033931
aagtcgggtttt

SEQ ID NO: 327851 - DNA, 12 bp, Artificial Sequence
  Oligonucleotide primer for the detection of SNP TSC0033932
acataccaccac

SEQ ID NO: 327852 - DNA, 12 bp, Artificial Sequence
  Oligonucleotide primer for the detection of SNP TSC0033932
acgtaccaccac

SEQ ID NO: 327853 - DNA, 12 bp, Artificial Sequence
  Oligonucleotide primer for the detection of SNP TSC0033933
ttgatagtgtaa

SEQ ID NO: 327854 - DNA, 12 bp, Artificial Sequence
  Oligonucleotide primer for the detection of SNP TSC0033934
caaattacctta

SEQ ID NO: 327855 - DNA, 12 bp, Artificial Sequence
  Oligonucleotide primer for the detection of SNP TSC0033934
cgaattacctta

SEQ ID NO: 327856 - DNA, 12 bp, Artificial Sequence
  Oligonucleotide primer for the detection of SNP TSC0033934
aaaattttgttt

SEQ ID NO: 327857 - DNA, 12 bp, Artificial Sequence
  Oligonucleotide primer for the detection of SNP TSC0033934
aaaaccttacct

SEQ ID NO: 327858 - DNA, 12 bp, Artificial Sequence
  Oligonucleotide primer for the detection of SNP TSC0033934
tggattgttttg

SEQ ID NO: 327859 - DNA, 12 bp, Artificial Sequence
  Oligonucleotide primer for the detection of SNP TSC0033934
cggattgttttg

SEQ ID NO: 327860 - DNA, 12 bp, Artificial Sequence
  Oligonucleotide primer for the detection of SNP TSC0033935
aaattactacaa

SEQ ID NO: 327861 - DNA, 12 bp, Artificial Sequence
  Oligonucleotide primer for the detection of SNP TSC0033935
gattttaaatta

SEQ ID NO: 327862 - DNA, 12 bp, Artificial Sequence
  Oligonucleotide primer for the detection of SNP TSC0033936
aaaggtgagtaa

SEQ ID NO: 327863 - DNA, 12 bp, Artificial Sequence
  Oligonucleotide primer for the detection of SNP TSC0033941
actttttcttaa

SEQ ID NO: 327864 - DNA, 12 bp, Artificial Sequence
  Oligonucleotide primer for the detection of SNP TSC0033941
tatttgtaggtt

SEQ ID NO: 327865 - DNA, 12 bp, Artificial Sequence
  Oligonucleotide primer for the detection of SNP TSC0033941
tatttacaaatt

SEQ ID NO: 327866 - DNA, 12 bp, Artificial Sequence
  Oligonucleotide primer for the detection of SNP TSC0033942
gtgtggagttgg

SEQ ID NO: 327867 - DNA, 12 bp, Artificial Sequence
  Oligonucleotide primer for the detection of SNP TSC0033944
tctctcactcct

SEQ ID NO: 327868 - DNA, 12 bp, Artificial Sequence
  Oligonucleotide primer for the detection of SNP TSC0033944
atttttagagaa

SEQ ID NO: 327869 - DNA, 12 bp, Artificial Sequence
  Oligonucleotide primer for the detection of SNP TSC0033946
tacttaataaat

SEQ ID NO: 327870 - DNA, 12 bp, Artificial Sequence
  Oligonucleotide primer for the detection of SNP TSC0033946
gatgttagagtg

SEQ ID NO: 327871 - DNA, 12 bp, Artificial Sequence
  Oligonucleotide primer for the detection of SNP TSC0033951
aaaaatcataca

SEQ ID NO: 327872 - DNA, 12 bp, Artificial Sequence
  Oligonucleotide primer for the detection of SNP TSC0033951
tatttggttatt

SEQ ID NO: 327873 - DNA, 12 bp, Artificial Sequence
  Oligonucleotide primer for the detection of SNP TSC0033951
tatctaactact

SEQ ID NO: 327874 - DNA, 12 bp, Artificial Sequence
  Oligonucleotide primer for the detection of SNP TSC0033951
aaaaattatata

SEQ ID NO: 327875 - DNA, 12 bp, Artificial Sequence
  Oligonucleotide primer for the detection of SNP TSC0033952
tatttgatttat

SEQ ID NO: 327876 - DNA, 12 bp, Artificial Sequence
  Oligonucleotide primer for the detection of SNP TSC0033952
catttaactcat

SEQ ID NO: 327877 - DNA, 12 bp, Artificial Sequence
  Oligonucleotide primer for the detection of SNP TSC0033952
aaaaaagataaa

SEQ ID NO: 327878 - DNA, 12 bp, Artificial Sequence
  Oligonucleotide primer for the detection of SNP TSC0033953
catatatccatt

SEQ ID NO: 327879 - DNA, 12 bp, Artificial Sequence
  Oligonucleotide primer for the detection of SNP TSC0033953
ttttttagtagt

SEQ ID NO: 327880 - DNA, 12 bp, Artificial Sequence
  Oligonucleotide primer for the detection of SNP TSC0033953
atttctcaacaa

SEQ ID NO: 327881 - DNA, 12 bp, Artificial Sequence
  Oligonucleotide primer for the detection of SNP TSC0033953
tatatgtttatt

SEQ ID NO: 327882 - DNA, 12 bp, Artificial Sequence
  Oligonucleotide primer for the detection of SNP TSC0033954
tggtttatattt

SEQ ID NO: 327883 - DNA, 12 bp, Artificial Sequence
  Oligonucleotide primer for the detection of SNP TSC0033954
taatctacaccc

SEQ ID NO: 327884 - DNA, 12 bp, Artificial Sequence
  Oligonucleotide primer for the detection of SNP TSC0033954
tattgtttaagg

SEQ ID NO: 327885 - DNA, 12 bp, Artificial Sequence
  Oligonucleotide primer for the detection of SNP TSC0033956
tttcgggtttaa

SEQ ID NO: 327886 - DNA, 12 bp, Artificial Sequence
  Oligonucleotide primer for the detection of SNP TSC0033957
ttaatgtgatta

SEQ ID NO: 327887 - DNA, 12 bp, Artificial Sequence
  Oligonucleotide primer for the detection of SNP TSC0033957
ttaatgcgatta

SEQ ID NO: 327888 - DNA, 12 bp, Artificial Sequence
  Oligonucleotide primer for the detection of SNP TSC0033958
atttctattcca

SEQ ID NO: 327889 - DNA, 12 bp, Artificial Sequence
  Oligonucleotide primer for the detection of SNP TSC0033958
ttttggttgatt

SEQ ID NO: 327890 - DNA, 12 bp, Artificial Sequence
  Oligonucleotide primer for the detection of SNP TSC0033958
ccttaactaact

SEQ ID NO: 327891 - DNA, 12 bp, Artificial Sequence
  Oligonucleotide primer for the detection of SNP TSC0033959
tcatttacaaaa

SEQ ID NO: 327892 - DNA, 12 bp, Artificial Sequence
  Oligonucleotide primer for the detection of SNP TSC0033959
tagggatttgtg

SEQ ID NO: 327893 - DNA, 12 bp, Artificial Sequence
  Oligonucleotide primer for the detection of SNP TSC0033959
caaaaatctata

SEQ ID NO: 327894 - DNA, 12 bp, Artificial Sequence
  Oligonucleotide primer for the detection of SNP TSC0033960
taacaatccttc

SEQ ID NO: 327895 - DNA, 12 bp, Artificial Sequence
  Oligonucleotide primer for the detection of SNP TSC0033960
taacgatccttc

SEQ ID NO: 327896 - DNA, 12 bp, Artificial Sequence
  Oligonucleotide primer for the detection of SNP TSC0033960
ggaggttaagga

SEQ ID NO: 327897 - DNA, 12 bp, Artificial Sequence
  Oligonucleotide primer for the detection of SNP TSC0033961
aacttcccttaa

SEQ ID NO: 327898 - DNA, 12 bp, Artificial Sequence
  Oligonucleotide primer for the detection of SNP TSC0033961
attagttattgg

SEQ ID NO: 327899 - DNA, 12 bp, Artificial Sequence
  Oligonucleotide primer for the detection of SNP TSC0033966
aaattttttttc

SEQ ID NO: 327900 - DNA, 12 bp, Artificial Sequence
  Oligonucleotide primer for the detection of SNP TSC0033966
aaacctcctccc

SEQ ID NO: 327901 - DNA, 12 bp, Artificial Sequence
  Oligonucleotide primer for the detection of SNP TSC0033966
gtagaggtgaag

SEQ ID NO: 327902 - DNA, 12 bp, Artificial Sequence
  Oligonucleotide primer for the detection of SNP TSC0033967
aaaaacaaataa

SEQ ID NO: 327903 - DNA, 12 bp, Artificial Sequence
  Oligonucleotide primer for the detection of SNP TSC0033967
aaaaacgaataa

SEQ ID NO: 327904 - DNA, 12 bp, Artificial Sequence
  Oligonucleotide primer for the detection of SNP TSC0033967
tccttaacctca

SEQ ID NO: 327905 - DNA, 12 bp, Artificial Sequence
  Oligonucleotide primer for the detection of SNP TSC0033967
aagaagatgagt

SEQ ID NO: 327906 - DNA, 12 bp, Artificial Sequence
  Oligonucleotide primer for the detection of SNP TSC0033967
aagaagacgagt

SEQ ID NO: 327907 - DNA, 12 bp, Artificial Sequence
  Oligonucleotide primer for the detection of SNP TSC0033969
cacctaaaacac

SEQ ID NO: 327908 - DNA, 12 bp, Artificial Sequence
  Oligonucleotide primer for the detection of SNP TSC0033969
aaattttatagg

SEQ ID NO: 327909 - DNA, 12 bp, Artificial Sequence
  Oligonucleotide primer for the detection of SNP TSC0033970
aaaccacaatat

SEQ ID NO: 327910 - DNA, 12 bp, Artificial Sequence
  Oligonucleotide primer for the detection of SNP TSC0033970
aaaccgcaatat

SEQ ID NO: 327911 - DNA, 12 bp, Artificial Sequence
  Oligonukleotid-Primer
ataaagaggaga

SEQ ID NO: 327912 - DNA, 12 bp, Artificial Sequence
  Oligonucleotide primer for the detection of SNP TSC0033970
agattgtagtat

SEQ ID NO: 327913 - DNA, 12 bp, Artificial Sequence
  Oligonucleotide primer for the detection of SNP TSC0033970
agatcgtagtat

SEQ ID NO: 327914 - DNA, 12 bp, Artificial Sequence
  Oligonucleotide primer for the detection of SNP TSC0033971
tttaagattgta

SEQ ID NO: 327915 - DNA, 12 bp, Artificial Sequence
  Oligonucleotide primer for the detection of SNP TSC0033971
tttaagatcgta

SEQ ID NO: 327916 - DNA, 12 bp, Artificial Sequence
  Oligonucleotide primer for the detection of SNP TSC0033973
ccataaacaatt

SEQ ID NO: 327917 - DNA, 12 bp, Artificial Sequence
  Oligonucleotide primer for the detection of SNP TSC0033973
atattagttgtt

SEQ ID NO: 327918 - DNA, 12 bp, Artificial Sequence
  Oligonucleotide primer for the detection of SNP TSC0033973
acactaactatt

SEQ ID NO: 327919 - DNA, 12 bp, Artificial Sequence
  Oligonucleotide primer for the detection of SNP TSC0033973
atgaataatttt

SEQ ID NO: 327920 - DNA, 12 bp, Artificial Sequence
  Oligonucleotide primer for the detection of SNP TSC0033974
ttaacttttatc

SEQ ID NO: 327921 - DNA, 12 bp, Artificial Sequence
  Oligonucleotide primer for the detection of SNP TSC0033974
gatattggtgtg

SEQ ID NO: 327922 - DNA, 12 bp, Artificial Sequence
  Oligonucleotide primer for the detection of SNP TSC0033974
aacattaatata

SEQ ID NO: 327923 - DNA, 12 bp, Artificial Sequence
  Oligonucleotide primer for the detection of SNP TSC0033975
ttaaaatatatc

SEQ ID NO: 327924 - DNA, 12 bp, Artificial Sequence
  Oligonucleotide primer for the detection of SNP TSC0033975
ttatttgtagaa

SEQ ID NO: 327925 - DNA, 12 bp, Artificial Sequence
  Oligonucleotide primer for the detection of SNP TSC0033977
acttaatataca

SEQ ID NO: 327926 - DNA, 12 bp, Artificial Sequence
  Oligonucleotide primer for the detection of SNP TSC0033977
tatgtaagtaat

SEQ ID NO: 327927 - DNA, 12 bp, Artificial Sequence
  Oligonucleotide primer for the detection of SNP TSC0033977
tatacaaataac

SEQ ID NO: 327928 - DNA, 12 bp, Artificial Sequence
  Oligonucleotide primer for the detection of SNP TSC0033977
gtttagtatata

SEQ ID NO: 327929 - DNA, 12 bp, Artificial Sequence
  Oligonucleotide primer for the detection of SNP TSC0033980
tattaaaaaaat

SEQ ID NO: 327930 - DNA, 12 bp, Artificial Sequence
  Oligonucleotide primer for the detection of SNP TSC0033980
gaattattaatg

SEQ ID NO: 327931 - DNA, 12 bp, Artificial Sequence
  Oligonucleotide primer for the detection of SNP TSC0033981
aatcttatttcc

SEQ ID NO: 327932 - DNA, 12 bp, Artificial Sequence
  Oligonucleotide primer for the detection of SNP TSC0033981
taaatggggata

SEQ ID NO: 327933 - DNA, 12 bp, Artificial Sequence
  Oligonucleotide primer for the detection of SNP TSC0033982
tacattttaatt

SEQ ID NO: 327934 - DNA, 12 bp, Artificial Sequence
  Oligonucleotide primer for the detection of SNP TSC0033983
accccccaccca

SEQ ID NO: 327935 - DNA, 12 bp, Artificial Sequence
  Oligonucleotide primer for the detection of SNP TSC0033983
tggagatgggat

SEQ ID NO: 327936 - DNA, 12 bp, Artificial Sequence
  Oligonucleotide primer for the detection of SNP TSC0033984
tatcatcctcct

SEQ ID NO: 327937 - DNA, 12 bp, Artificial Sequence
  Oligonucleotide primer for the detection of SNP TSC0033984
tattgtgaggag

SEQ ID NO: 327938 - DNA, 12 bp, Artificial Sequence
  Oligonucleotide primer for the detection of SNP TSC0033985
acatttatatca

SEQ ID NO: 327939 - DNA, 12 bp, Artificial Sequence
  Oligonucleotide primer for the detection of SNP TSC0033985
tactaactcttc

SEQ ID NO: 327940 - DNA, 12 bp, Artificial Sequence
  Oligonucleotide primer for the detection of SNP TSC0033985
gtatttatgtta

SEQ ID NO: 327941 - DNA, 12 bp, Artificial Sequence
  Oligonucleotide primer for the detection of SNP TSC0033989
tcttaaattata

SEQ ID NO: 327942 - DNA, 12 bp, Artificial Sequence
  Oligonucleotide primer for the detection of SNP TSC0033989
gaaattatggga

SEQ ID NO: 327943 - DNA, 12 bp, Artificial Sequence
  Oligonucleotide primer for the detection of SNP TSC0033989
attttgaattgt

SEQ ID NO: 327944 - DNA, 12 bp, Artificial Sequence
  Oligonucleotide primer for the detection of SNP TSC0033990
caactaaataat

SEQ ID NO: 327945 - DNA, 12 bp, Artificial Sequence
  Oligonucleotide primer for the detection of SNP TSC0033990
tttaatttttta

SEQ ID NO: 327946 - DNA, 12 bp, Artificial Sequence
  Oligonucleotide primer for the detection of SNP TSC0033991
gaatattataga

SEQ ID NO: 327947 - DNA, 12 bp, Artificial Sequence
  Oligonucleotide primer for the detection of SNP TSC0033992
acccacaaaaat

SEQ ID NO: 327948 - DNA, 12 bp, Artificial Sequence
  Oligonucleotide primer for the detection of SNP TSC0033992
gttttggaaata

SEQ ID NO: 327949 - DNA, 12 bp, Artificial Sequence
  Oligonucleotide primer for the detection of SNP TSC0033992
atcctaaaaaca

SEQ ID NO: 327950 - DNA, 12 bp, Artificial Sequence
  Oligonucleotide primer for the detection of SNP TSC0033992
gtttataggggt

SEQ ID NO: 327951 - DNA, 12 bp, Artificial Sequence
  Oligonucleotide primer for the detection of SNP TSC0033993
ataacaacataa

SEQ ID NO: 327952 - DNA, 12 bp, Artificial Sequence
  Oligonucleotide primer for the detection of SNP TSC0033993
tgaggtataaag

SEQ ID NO: 327953 - DNA, 12 bp, Artificial Sequence
  Oligonucleotide primer for the detection of SNP TSC0033997
aaatttaaaact

SEQ ID NO: 327954 - DNA, 12 bp, Artificial Sequence
  Oligonucleotide primer for the detection of SNP TSC0033997
gtatattagtaa

SEQ ID NO: 327955 - DNA, 12 bp, Artificial Sequence
  Oligonucleotide primer for the detection of SNP TSC0033998
tttgttgttgtt

SEQ ID NO: 327956 - DNA, 12 bp, Artificial Sequence
  Oligonucleotide primer for the detection of SNP TSC0033999
ctataaaaaaaa

SEQ ID NO: 327957 - DNA, 12 bp, Artificial Sequence
  Oligonucleotide primer for the detection of SNP TSC0033999
ttgtaaaaaaaa

SEQ ID NO: 327958 - DNA, 12 bp, Artificial Sequence
  Oligonucleotide primer for the detection of SNP TSC0034000
taaaacctcatc

SEQ ID NO: 327959 - DNA, 12 bp, Artificial Sequence
  Oligonucleotide primer for the detection of SNP TSC0034000
gagattttattt

SEQ ID NO: 327960 - DNA, 12 bp, Artificial Sequence
  Oligonucleotide primer for the detection of SNP TSC0034001
ataaaaaaatct

SEQ ID NO: 327961 - DNA, 12 bp, Artificial Sequence
  Oligonucleotide primer for the detection of SNP TSC0034001
agaagtttgtaa

SEQ ID NO: 327962 - DNA, 12 bp, Artificial Sequence
  Oligonucleotide primer for the detection of SNP TSC0034002
taaatacatccc

SEQ ID NO: 327963 - DNA, 12 bp, Artificial Sequence
  Oligonucleotide primer for the detection of SNP TSC0034002
atgtttttggtg

SEQ ID NO: 327964 - DNA, 12 bp, Artificial Sequence
  Oligonucleotide primer for the detection of SNP TSC0034002
atgtttttggcg

SEQ ID NO: 327965 - DNA, 12 bp, Artificial Sequence
  Oligonucleotide primer for the detection of SNP TSC0034003
ctactcattact

SEQ ID NO: 327966 - DNA, 12 bp, Artificial Sequence
  Oligonucleotide primer for the detection of SNP TSC0034003
ataagaattgtg

SEQ ID NO: 327967 - DNA, 12 bp, Artificial Sequence
  Oligonucleotide primer for the detection of SNP TSC0034003
ataagaatcgtg

SEQ ID NO: 327968 - DNA, 12 bp, Artificial Sequence
  Oligonucleotide primer for the detection of SNP TSC0034004
tagtgtttgttt

SEQ ID NO: 327969 - DNA, 12 bp, Artificial Sequence
  Oligonucleotide primer for the detection of SNP TSC0034004
caatatctaccc

SEQ ID NO: 327970 - DNA, 12 bp, Artificial Sequence
  Oligonucleotide primer for the detection of SNP TSC0034004
aaaattaggtag

SEQ ID NO: 327971 - DNA, 12 bp, Artificial Sequence
  Oligonucleotide primer for the detection of SNP TSC0034005
ttacacataata

SEQ ID NO: 327972 - DNA, 12 bp, Artificial Sequence
  Oligonucleotide primer for the detection of SNP TSC0034005
tattttttcata

SEQ ID NO: 327973 - DNA, 12 bp, Artificial Sequence
  Oligonucleotide primer for the detection of SNP TSC0034005
attgtatatgat

SEQ ID NO: 327974 - DNA, 12 bp, Artificial Sequence
  Oligonucleotide primer for the detection of SNP TSC0034006
tatatatttgat

SEQ ID NO: 327975 - DNA, 12 bp, Artificial Sequence
  Oligonucleotide primer for the detection of SNP TSC0034006
atatacacctaa

SEQ ID NO: 327976 - DNA, 12 bp, Artificial Sequence
  Oligonucleotide primer for the detection of SNP TSC0034006
gtgaaaagggga

SEQ ID NO: 327977 - DNA, 12 bp, Artificial Sequence
  Oligonucleotide primer for the detection of SNP TSC0034007
taaataaaaact

SEQ ID NO: 327978 - DNA, 12 bp, Artificial Sequence
  Oligonucleotide primer for the detection of SNP TSC0034007
atttaaagaata

SEQ ID NO: 327979 - DNA, 12 bp, Artificial Sequence
  Oligonucleotide primer for the detection of SNP TSC0034007
acccaaaaaaca

SEQ ID NO: 327980 - DNA, 12 bp, Artificial Sequence
  Oligonucleotide primer for the detection of SNP TSC0034007
taaatgagggtt

SEQ ID NO: 327981 - DNA, 12 bp, Artificial Sequence
  Oligonucleotide primer for the detection of SNP TSC0034008
ctaacactaata

SEQ ID NO: 327982 - DNA, 12 bp, Artificial Sequence
  Oligonucleotide primer for the detection of SNP TSC0034008
ctaacgctaata

SEQ ID NO: 327983 - DNA, 12 bp, Artificial Sequence
  Oligonucleotide primer for the detection of SNP TSC0034008
ttaggtagagtt

SEQ ID NO: 327984 - DNA, 12 bp, Artificial Sequence
  Oligonucleotide primer for the detection of SNP TSC0034008
ccaaacaaaacc

SEQ ID NO: 327985 - DNA, 12 bp, Artificial Sequence
  Oligonucleotide primer for the detection of SNP TSC0034008
ttggtgttgatg

SEQ ID NO: 327986 - DNA, 12 bp, Artificial Sequence
  Oligonucleotide primer for the detection of SNP TSC0034008
ttggcgttgatg

SEQ ID NO: 327987 - DNA, 12 bp, Artificial Sequence
  Oligonucleotide primer for the detection of SNP TSC0034015
aaactaaaacaa

SEQ ID NO: 327988 - DNA, 12 bp, Artificial Sequence
  Oligonucleotide primer for the detection of SNP TSC0034015
tgggtttaagtg

SEQ ID NO: 327989 - DNA, 12 bp, Artificial Sequence
  Oligonucleotide primer for the detection of SNP TSC0034016
acaaaccacaac

SEQ ID NO: 327990 - DNA, 12 bp, Artificial Sequence
  Oligonucleotide primer for the detection of SNP TSC0034016
acgaaccacaac

SEQ ID NO: 327991 - DNA, 12 bp, Artificial Sequence
  Oligonucleotide primer for the detection of SNP TSC0034016
atataaagttag

SEQ ID NO: 327992 - DNA, 12 bp, Artificial Sequence
  Oligonucleotide primer for the detection of SNP TSC0034017
attgttgttttg

SEQ ID NO: 327993 - DNA, 12 bp, Artificial Sequence
  Oligonucleotide primer for the detection of SNP TSC0034018
ctaaatttcata

SEQ ID NO: 327994 - DNA, 12 bp, Artificial Sequence
  Oligonucleotide primer for the detection of SNP TSC0034018
gggagaaggaag

SEQ ID NO: 327995 - DNA, 12 bp, Artificial Sequence
  Oligonucleotide primer for the detection of SNP TSC0034022
taagttgtaatg

SEQ ID NO: 327996 - DNA, 12 bp, Artificial Sequence
  Oligonucleotide primer for the detection of SNP TSC0034024
tcttaactataa

SEQ ID NO: 327997 - DNA, 12 bp, Artificial Sequence
  Oligonucleotide primer for the detection of SNP TSC0034024
tagtttgttttt

SEQ ID NO: 327998 - DNA, 12 bp, Artificial Sequence
  Oligonucleotide primer for the detection of SNP TSC0034024
caacttattctt

SEQ ID NO: 327999 - DNA, 12 bp, Artificial Sequence
  Oligonucleotide primer for the detection of SNP TSC0034024
ttttgattgtgg

SEQ ID NO: 328000 - DNA, 12 bp, Artificial Sequence
  Oligonucleotide primer for the detection of SNP TSC0034025
acatcaaataaa

SEQ ID NO: 328001 - DNA, 12 bp, Artificial Sequence
  Oligonucleotide primer for the detection of SNP TSC0034025
acatcgaataaa

SEQ ID NO: 328002 - DNA, 12 bp, Artificial Sequence
  Oligonucleotide primer for the detection of SNP TSC0034025
tgatatttatag

SEQ ID NO: 328003 - DNA, 12 bp, Artificial Sequence
  Oligonucleotide primer for the detection of SNP TSC0034025
taacatccacaa

SEQ ID NO: 328004 - DNA, 12 bp, Artificial Sequence
  Oligonucleotide primer for the detection of SNP TSC0034025
gtattggatggg

SEQ ID NO: 328005 - DNA, 12 bp, Artificial Sequence
  Oligonucleotide primer for the detection of SNP TSC0034025
gtatcggatggg

SEQ ID NO: 328006 - DNA, 12 bp, Artificial Sequence
  Oligonucleotide primer for the detection of SNP TSC0034028
gttttatgaatt

SEQ ID NO: 328007 - DNA, 12 bp, Artificial Sequence
  Oligonucleotide primer for the detection of SNP TSC0034028
attccataaatt

SEQ ID NO: 328008 - DNA, 12 bp, Artificial Sequence
  Oligonucleotide primer for the detection of SNP TSC0034028
gttgggaaggat

SEQ ID NO: 328009 - DNA, 12 bp, Artificial Sequence
  Oligonucleotide primer for the detection of SNP TSC0034029
tctacaatttca

SEQ ID NO: 328010 - DNA, 12 bp, Artificial Sequence
  Oligonucleotide primer for the detection of SNP TSC0034029
ctaaacttttta

SEQ ID NO: 328011 - DNA, 12 bp, Artificial Sequence
  Oligonucleotide primer for the detection of SNP TSC0034029
tgtagttttatt

SEQ ID NO: 328012 - DNA, 12 bp, Artificial Sequence
  Oligonucleotide primer for the detection of SNP TSC0034031
tacttaaaaaat

SEQ ID NO: 328013 - DNA, 12 bp, Artificial Sequence
  Oligonucleotide primer for the detection of SNP TSC0034031
aaagttattttt

SEQ ID NO: 328014 - DNA, 12 bp, Artificial Sequence
  Oligonucleotide primer for the detection of SNP TSC0034031
aaaaccaccttt

SEQ ID NO: 328015 - DNA, 12 bp, Artificial Sequence
  Oligonucleotide primer for the detection of SNP TSC0034032
actaaaattccc

SEQ ID NO: 328016 - DNA, 12 bp, Artificial Sequence
  Oligonucleotide primer for the detection of SNP TSC0034033
gttttggtaata

SEQ ID NO: 328017 - DNA, 12 bp, Artificial Sequence
  Oligonucleotide primer for the detection of SNP TSC0034034
catttaaatcac

SEQ ID NO: 328018 - DNA, 12 bp, Artificial Sequence
  Oligonucleotide primer for the detection of SNP TSC0034034
aaaatttgtttt

SEQ ID NO: 328019 - DNA, 12 bp, Artificial Sequence
  Oligonucleotide primer for the detection of SNP TSC0034034
aaaatttgtttc

SEQ ID NO: 328020 - DNA, 12 bp, Artificial Sequence
  Oligonucleotide primer for the detection of SNP TSC0034034
aaaatctatccc

SEQ ID NO: 328021 - DNA, 12 bp, Artificial Sequence
  Oligonucleotide primer for the detection of SNP TSC0034034
atttaggttatt

SEQ ID NO: 328022 - DNA, 12 bp, Artificial Sequence
  Oligonucleotide primer for the detection of SNP TSC0034037
atatacctatat

SEQ ID NO: 328023 - DNA, 12 bp, Artificial Sequence
  Oligonucleotide primer for the detection of SNP TSC0034037
tttatatatgtg

SEQ ID NO: 328024 - DNA, 12 bp, Artificial Sequence
  Oligonucleotide primer for the detection of SNP TSC0034038
tctaaatataca

SEQ ID NO: 328025 - DNA, 12 bp, Artificial Sequence
  Oligonucleotide primer for the detection of SNP TSC0034038
gtatttgtttat

SEQ ID NO: 328026 - DNA, 12 bp, Artificial Sequence
  Oligonucleotide primer for the detection of SNP TSC0034038
acatttattcac

SEQ ID NO: 328027 - DNA, 12 bp, Artificial Sequence
  Oligonucleotide primer for the detection of SNP TSC0034038
tttgaatgtgta

SEQ ID NO: 328028 - DNA, 12 bp, Artificial Sequence
  Oligonucleotide primer for the detection of SNP TSC0034039
ctacacaataaa

SEQ ID NO: 328029 - DNA, 12 bp, Artificial Sequence
  Oligonucleotide primer for the detection of SNP TSC0034039
ctacacgataaa

SEQ ID NO: 328030 - DNA, 12 bp, Artificial Sequence
  Oligonucleotide primer for the detection of SNP TSC0034039
tcctcctctaac

SEQ ID NO: 328031 - DNA, 12 bp, Artificial Sequence
  Oligonucleotide primer for the detection of SNP TSC0034039
ggttgtatggtg

SEQ ID NO: 328032 - DNA, 12 bp, Artificial Sequence
  Oligonucleotide primer for the detection of SNP TSC0034039
ggttgtacggtg

SEQ ID NO: 328033 - DNA, 12 bp, Artificial Sequence
  Oligonucleotide primer for the detection of SNP TSC0034040
caacaaactctt

SEQ ID NO: 328034 - DNA, 12 bp, Artificial Sequence
  Oligonucleotide primer for the detection of SNP TSC0034040
tgtttaggagaa

SEQ ID NO: 328035 - DNA, 12 bp, Artificial Sequence
  Oligonucleotide primer for the detection of SNP TSC0034040
tattcaaaaaaa

SEQ ID NO: 328036 - DNA, 12 bp, Artificial Sequence
  Oligonucleotide primer for the detection of SNP TSC0034041
aaattagttttg

SEQ ID NO: 328037 - DNA, 12 bp, Artificial Sequence
  Oligonucleotide primer for the detection of SNP TSC0034042
aattaataatat

SEQ ID NO: 328038 - DNA, 12 bp, Artificial Sequence
  Oligonucleotide primer for the detection of SNP TSC0034044
actcatataata

SEQ ID NO: 328039 - DNA, 12 bp, Artificial Sequence
  Oligonucleotide primer for the detection of SNP TSC0034044
atttatataata

SEQ ID NO: 328040 - DNA, 12 bp, Artificial Sequence
  Oligonucleotide primer for the detection of SNP TSC0034046
ataactattatt

SEQ ID NO: 328041 - DNA, 12 bp, Artificial Sequence
  Oligonucleotide primer for the detection of SNP TSC0034046
aagtggtatgaa

SEQ ID NO: 328042 - DNA, 12 bp, Artificial Sequence
  Oligonucleotide primer for the detection of SNP TSC0034047
actactccccat

SEQ ID NO: 328043 - DNA, 12 bp, Artificial Sequence
  Oligonucleotide primer for the detection of SNP TSC0034047
actactccccgt

SEQ ID NO: 328044 - DNA, 12 bp, Artificial Sequence
  Oligonucleotide primer for the detection of SNP TSC0034047
tttttaggaaag

SEQ ID NO: 328045 - DNA, 12 bp, Artificial Sequence
  Oligonucleotide primer for the detection of SNP TSC0034047
ccttcaaaaaaa

SEQ ID NO: 328046 - DNA, 12 bp, Artificial Sequence
  Oligonucleotide primer for the detection of SNP TSC0034047
gttgttttttgt

SEQ ID NO: 328047 - DNA, 12 bp, Artificial Sequence
  Oligonucleotide primer for the detection of SNP TSC0034047
gttgtttttcgt

SEQ ID NO: 328048 - DNA, 12 bp, Artificial Sequence
  Oligonucleotide primer for the detection of SNP TSC0034049
taattatatttc

SEQ ID NO: 328049 - DNA, 12 bp, Artificial Sequence
  Oligonucleotide primer for the detection of SNP TSC0034049
agtatatattta

SEQ ID NO: 328050 - DNA, 12 bp, Artificial Sequence
  Oligonucleotide primer for the detection of SNP TSC0034052
cccaattacccc

SEQ ID NO: 328051 - DNA, 12 bp, Artificial Sequence
  Oligonucleotide primer for the detection of SNP TSC0034052
cccgattacccc

SEQ ID NO: 328052 - DNA, 12 bp, Artificial Sequence
  Oligonukleotid-Primer
tttggagaggag

SEQ ID NO: 328053 - DNA, 12 bp, Artificial Sequence
  Oligonucleotide primer for the detection of SNP TSC0034053
ccattacattca

SEQ ID NO: 328054 - DNA, 12 bp, Artificial Sequence
  Oligonucleotide primer for the detection of SNP TSC0034053
aagtaggaggtt

SEQ ID NO: 328055 - DNA, 12 bp, Artificial Sequence
  Oligonucleotide primer for the detection of SNP TSC0034053
caaacaaaaaac

SEQ ID NO: 328056 - DNA, 12 bp, Artificial Sequence
  Oligonukleotid-Primer
aactcataatcc

SEQ ID NO: 328057 - DNA, 12 bp, Artificial Sequence
  Oligonucleotide primer for the detection of SNP TSC0034054
taattagtttag

SEQ ID NO: 328058 - DNA, 12 bp, Artificial Sequence
  Oligonucleotide primer for the detection of SNP TSC0034054
taaccaacccaa

SEQ ID NO: 328059 - DNA, 12 bp, Artificial Sequence
  Oligonucleotide primer for the detection of SNP TSC0034054
agtttataattt

SEQ ID NO: 328060 - DNA, 12 bp, Artificial Sequence
  Oligonucleotide primer for the detection of SNP TSC0034055
caataaacccaa

SEQ ID NO: 328061 - DNA, 12 bp, Artificial Sequence
  Oligonucleotide primer for the detection of SNP TSC0034055
cgataaacccaa

SEQ ID NO: 328062 - DNA, 12 bp, Artificial Sequence
  Oligonucleotide primer for the detection of SNP TSC0034055
gtaaataaattt

SEQ ID NO: 328063 - DNA, 12 bp, Artificial Sequence
  Oligonucleotide primer for the detection of SNP TSC0034055
gtggtgaattta

SEQ ID NO: 328064 - DNA, 12 bp, Artificial Sequence
  Oligonucleotide primer for the detection of SNP TSC0034055
gcggtgaattta

SEQ ID NO: 328065 - DNA, 12 bp, Artificial Sequence
  Oligonucleotide primer for the detection of SNP TSC0034056
atccatttaatc

SEQ ID NO: 328066 - DNA, 12 bp, Artificial Sequence
  Oligonucleotide primer for the detection of SNP TSC0034056
aggagagaattt

SEQ ID NO: 328067 - DNA, 12 bp, Artificial Sequence
  Oligonucleotide primer for the detection of SNP TSC0034061
cctaaccattat

SEQ ID NO: 328068 - DNA, 12 bp, Artificial Sequence
  Oligonucleotide primer for the detection of SNP TSC0034061
attgatagttag

SEQ ID NO: 328069 - DNA, 12 bp, Artificial Sequence
  Oligonucleotide primer for the detection of SNP TSC0034062
ctctctaaccaa

SEQ ID NO: 328070 - DNA, 12 bp, Artificial Sequence
  Oligonucleotide primer for the detection of SNP TSC0034062
tttttattggga

SEQ ID NO: 328071 - DNA, 12 bp, Artificial Sequence
  Oligonucleotide primer for the detection of SNP TSC0034067
tcctaaaaatac

SEQ ID NO: 328072 - DNA, 12 bp, Artificial Sequence
  Oligonucleotide primer for the detection of SNP TSC0034067
gattttgagagt

SEQ ID NO: 328073 - DNA, 12 bp, Artificial Sequence
  Oligonucleotide primer for the detection of SNP TSC0034067
ttttgagaatgt

SEQ ID NO: 328074 - DNA, 12 bp, Artificial Sequence
  Oligonucleotide primer for the detection of SNP TSC0034069
tgtgttggttta

SEQ ID NO: 328075 - DNA, 12 bp, Artificial Sequence
  Oligonucleotide primer for the detection of SNP TSC0034069
tatactaatcta

SEQ ID NO: 328076 - DNA, 12 bp, Artificial Sequence
  Oligonucleotide primer for the detection of SNP TSC0034069
ttatgaagggta

SEQ ID NO: 328077 - DNA, 12 bp, Artificial Sequence
  Oligonucleotide primer for the detection of SNP TSC0034070
ctaaaaatctct

SEQ ID NO: 328078 - DNA, 12 bp, Artificial Sequence
  Oligonucleotide primer for the detection of SNP TSC0034070
ggggtaagagga

SEQ ID NO: 328079 - DNA, 12 bp, Artificial Sequence
  Oligonucleotide primer for the detection of SNP TSC0034073
cataaactaact

SEQ ID NO: 328080 - DNA, 12 bp, Artificial Sequence
  Oligonucleotide primer for the detection of SNP TSC0034073
aaggtaatttta

SEQ ID NO: 328081 - DNA, 12 bp, Artificial Sequence
  Oligonucleotide primer for the detection of SNP TSC0034081
ataggtatatat

SEQ ID NO: 328082 - DNA, 12 bp, Artificial Sequence
  Oligonucleotide primer for the detection of SNP TSC0034081
ataaacacacac

SEQ ID NO: 328083 - DNA, 12 bp, Artificial Sequence
  Oligonucleotide primer for the detection of SNP TSC0034081
agttgggggtag

SEQ ID NO: 328084 - DNA, 12 bp, Artificial Sequence
  Oligonucleotide primer for the detection of SNP TSC0034082
ttaaaaatacaa

SEQ ID NO: 328085 - DNA, 12 bp, Artificial Sequence
  Oligonucleotide primer for the detection of SNP TSC0034082
attggaaatgta

SEQ ID NO: 328086 - DNA, 12 bp, Artificial Sequence
  Oligonucleotide primer for the detection of SNP TSC0034089
acacctctaaaa

SEQ ID NO: 328087 - DNA, 12 bp, Artificial Sequence
  Oligonucleotide primer for the detection of SNP TSC0034089
taggttgtatgt

SEQ ID NO: 328088 - DNA, 12 bp, Artificial Sequence
  Oligonucleotide primer for the detection of SNP TSC0034089
caaactacatat

SEQ ID NO: 328089 - DNA, 12 bp, Artificial Sequence
  Oligonucleotide primer for the detection of SNP TSC0034089
atatttttgggg

SEQ ID NO: 328090 - DNA, 12 bp, Artificial Sequence
  Oligonucleotide primer for the detection of SNP TSC0034093
aacatacaccac

SEQ ID NO: 328091 - DNA, 12 bp, Artificial Sequence
  Oligonucleotide primer for the detection of SNP TSC0034093
ggtatgtattat

SEQ ID NO: 328092 - DNA, 12 bp, Artificial Sequence
  Oligonucleotide primer for the detection of SNP TSC0034093
ggtatgtattac

SEQ ID NO: 328093 - DNA, 12 bp, Artificial Sequence
  Oligonucleotide primer for the detection of SNP TSC0034094
taagttatttag

SEQ ID NO: 328094 - DNA, 12 bp, Artificial Sequence
  Oligonucleotide primer for the detection of SNP TSC0034094
caaattatttaa

SEQ ID NO: 328095 - DNA, 12 bp, Artificial Sequence
  Oligonucleotide primer for the detection of SNP TSC0034094
gaggaatttggt

SEQ ID NO: 328096 - DNA, 12 bp, Artificial Sequence
  Oligonucleotide primer for the detection of SNP TSC0034095
gtgtatatgtat

SEQ ID NO: 328097 - DNA, 12 bp, Artificial Sequence
  Oligonucleotide primer for the detection of SNP TSC0034095
gtgtatatgtac

SEQ ID NO: 328098 - DNA, 12 bp, Artificial Sequence
  Oligonucleotide primer for the detection of SNP TSC0034095
atatacatatac

SEQ ID NO: 328099 - DNA, 12 bp, Artificial Sequence
  Oligonucleotide primer for the detection of SNP TSC0034095
tttaagttttag

SEQ ID NO: 328100 - DNA, 12 bp, Artificial Sequence
  Oligonucleotide primer for the detection of SNP TSC0034100
tgggaaataagt

SEQ ID NO: 328101 - DNA, 12 bp, Artificial Sequence
  Oligonucleotide primer for the detection of SNP TSC0034101
aatataataaat

SEQ ID NO: 328102 - DNA, 12 bp, Artificial Sequence
  Oligonucleotide primer for the detection of SNP TSC0034102
taaaatatagtg

SEQ ID NO: 328103 - DNA, 12 bp, Artificial Sequence
  Oligonucleotide primer for the detection of SNP TSC0034103
tttacctataca

SEQ ID NO: 328104 - DNA, 12 bp, Artificial Sequence
  Oligonucleotide primer for the detection of SNP TSC0034103
atgtgtaggttt

SEQ ID NO: 328105 - DNA, 12 bp, Artificial Sequence
  Oligonucleotide primer for the detection of SNP TSC0034103
tatacaaattta

SEQ ID NO: 328106 - DNA, 12 bp, Artificial Sequence
  Oligonucleotide primer for the detection of SNP TSC0034103
gtttatttatgt

SEQ ID NO: 328107 - DNA, 12 bp, Artificial Sequence
  Oligonucleotide primer for the detection of SNP TSC0034105
tatattattata

SEQ ID NO: 328108 - DNA, 12 bp, Artificial Sequence
  Oligonucleotide primer for the detection of SNP TSC0034105
acaccaccacaa

SEQ ID NO: 328109 - DNA, 12 bp, Artificial Sequence
  Oligonucleotide primer for the detection of SNP TSC0034105
aaaaaataggtt

SEQ ID NO: 328110 - DNA, 12 bp, Artificial Sequence
  Oligonucleotide primer for the detection of SNP TSC0034106
taaaattaacaa

SEQ ID NO: 328111 - DNA, 12 bp, Artificial Sequence
  Oligonucleotide primer for the detection of SNP TSC0034106
catatatacact

SEQ ID NO: 328112 - DNA, 12 bp, Artificial Sequence
  Oligonucleotide primer for the detection of SNP TSC0034106
tagaattaatag

SEQ ID NO: 328113 - DNA, 12 bp, Artificial Sequence
  Oligonucleotide primer for the detection of SNP TSC0034107
ccatacataaaa

SEQ ID NO: 328114 - DNA, 12 bp, Artificial Sequence
  Oligonucleotide primer for the detection of SNP TSC0034107
ccatacgtaaaa

SEQ ID NO: 328115 - DNA, 12 bp, Artificial Sequence
  Oligonucleotide primer for the detection of SNP TSC0034107
gttggaaaaaaa

SEQ ID NO: 328116 - DNA, 12 bp, Artificial Sequence
  Oligonucleotide primer for the detection of SNP TSC0034107
ttatatgtaaaa

SEQ ID NO: 328117 - DNA, 12 bp, Artificial Sequence
  Oligonucleotide primer for the detection of SNP TSC0034107
ttatacgtaaaa

SEQ ID NO: 328118 - DNA, 12 bp, Artificial Sequence
  Oligonucleotide primer for the detection of SNP TSC0034109
tattctcctctt

SEQ ID NO: 328119 - DNA, 12 bp, Artificial Sequence
  Oligonucleotide primer for the detection of SNP TSC0034109
ctttttttttca

SEQ ID NO: 328120 - DNA, 12 bp, Artificial Sequence
  Oligonucleotide primer for the detection of SNP TSC0034110
cttactaactct

SEQ ID NO: 328121 - DNA, 12 bp, Artificial Sequence
  Oligonucleotide primer for the detection of SNP TSC0034110
tttatttagaaa

SEQ ID NO: 328122 - DNA, 12 bp, Artificial Sequence
  Oligonucleotide primer for the detection of SNP TSC0034116
cttactaacttt

SEQ ID NO: 328123 - DNA, 12 bp, Artificial Sequence
  Oligonucleotide primer for the detection of SNP TSC0034116
acttaaatttaa

SEQ ID NO: 328124 - DNA, 12 bp, Artificial Sequence
  Oligonucleotide primer for the detection of SNP TSC0034117
ctaaaaaattac

SEQ ID NO: 328125 - DNA, 12 bp, Artificial Sequence
  Oligonucleotide primer for the detection of SNP TSC0034117
gaaaattgataa

SEQ ID NO: 328126 - DNA, 12 bp, Artificial Sequence
  Oligonucleotide primer for the detection of SNP TSC0034118
aaaaaaaaccca

SEQ ID NO: 328127 - DNA, 12 bp, Artificial Sequence
  Oligonucleotide primer for the detection of SNP TSC0034118
ggtttggaggtt

SEQ ID NO: 328128 - DNA, 12 bp, Artificial Sequence
  Oligonucleotide primer for the detection of SNP TSC0034118
ggttcggaggtt

SEQ ID NO: 328129 - DNA, 12 bp, Artificial Sequence
  Oligonucleotide primer for the detection of SNP TSC0034118
ggtttggaggtc

SEQ ID NO: 328130 - DNA, 12 bp, Artificial Sequence
  Oligonucleotide primer for the detection of SNP TSC0034118
ggttcggaggtc

SEQ ID NO: 328131 - DNA, 12 bp, Artificial Sequence
  Oligonucleotide primer for the detection of SNP TSC0034118
aacccgaaaacc

SEQ ID NO: 328132 - DNA, 12 bp, Artificial Sequence
  Oligonucleotide primer for the detection of SNP TSC0034118
gggaaggagttt

SEQ ID NO: 328133 - DNA, 12 bp, Artificial Sequence
  Oligonucleotide primer for the detection of SNP TSC0034119
cataaaatcctt

SEQ ID NO: 328134 - DNA, 12 bp, Artificial Sequence
  Oligonucleotide primer for the detection of SNP TSC0034119
atataggtatgg

SEQ ID NO: 328135 - DNA, 12 bp, Artificial Sequence
  Oligonucleotide primer for the detection of SNP TSC0034122
acaacctaaccc

SEQ ID NO: 328136 - DNA, 12 bp, Artificial Sequence
  Oligonucleotide primer for the detection of SNP TSC0034122
attcaataattc

SEQ ID NO: 328137 - DNA, 12 bp, Artificial Sequence
  Oligonucleotide primer for the detection of SNP TSC0034122
atagtttggttt

SEQ ID NO: 328138 - DNA, 12 bp, Artificial Sequence
  Oligonucleotide primer for the detection of SNP TSC0034122
atagtttggttc

SEQ ID NO: 328139 - DNA, 12 bp, Artificial Sequence
  Oligonucleotide primer for the detection of SNP TSC0034123
caatattattct

SEQ ID NO: 328140 - DNA, 12 bp, Artificial Sequence
  Oligonucleotide primer for the detection of SNP TSC0034123
cgatattattct

SEQ ID NO: 328141 - DNA, 12 bp, Artificial Sequence
  Oligonucleotide primer for the detection of SNP TSC0034123
aggttgaggtaa

SEQ ID NO: 328142 - DNA, 12 bp, Artificial Sequence
  Oligonucleotide primer for the detection of SNP TSC0034124
ggttaatatggt

SEQ ID NO: 328143 - DNA, 12 bp, Artificial Sequence
  Oligonucleotide primer for the detection of SNP TSC0034129
ttttacatctat

SEQ ID NO: 328144 - DNA, 12 bp, Artificial Sequence
  Oligonucleotide primer for the detection of SNP TSC0034129
ttatgaaattta

SEQ ID NO: 328145 - DNA, 12 bp, Artificial Sequence
  Oligonucleotide primer for the detection of SNP TSC0034131
ctaaaccactat

SEQ ID NO: 328146 - DNA, 12 bp, Artificial Sequence
  Oligonucleotide primer for the detection of SNP TSC0034131
aagtaaggttag

SEQ ID NO: 328147 - DNA, 12 bp, Artificial Sequence
  Oligonucleotide primer for the detection of SNP TSC0034131
ttaaattattgt

SEQ ID NO: 328148 - DNA, 12 bp, Artificial Sequence
  Oligonucleotide primer for the detection of SNP TSC0034132
tctacaataccc

SEQ ID NO: 328149 - DNA, 12 bp, Artificial Sequence
  Oligonucleotide primer for the detection of SNP TSC0034132
tttttggggttg

SEQ ID NO: 328150 - DNA, 12 bp, Artificial Sequence
  Oligonucleotide primer for the detection of SNP TSC0034132
cctttaaaatta

SEQ ID NO: 328151 - DNA, 12 bp, Artificial Sequence
  Oligonucleotide primer for the detection of SNP TSC0034132
tttgtagtgttt

SEQ ID NO: 328152 - DNA, 12 bp, Artificial Sequence
  Oligonucleotide primer for the detection of SNP TSC0034132
tttgtagtgttc

SEQ ID NO: 328153 - DNA, 12 bp, Artificial Sequence
  Oligonucleotide primer for the detection of SNP TSC0034133
caataaaacata

SEQ ID NO: 328154 - DNA, 12 bp, Artificial Sequence
  Oligonucleotide primer for the detection of SNP TSC0034133
taagtttaaagt

SEQ ID NO: 328155 - DNA, 12 bp, Artificial Sequence
  Oligonucleotide primer for the detection of SNP TSC0034133
caaatttaaaac

SEQ ID NO: 328156 - DNA, 12 bp, Artificial Sequence
  Oligonucleotide primer for the detection of SNP TSC0034133
taatagagtata

SEQ ID NO: 328157 - DNA, 12 bp, Artificial Sequence
  Oligonucleotide primer for the detection of SNP TSC0034134
tatttactaaat

SEQ ID NO: 328158 - DNA, 12 bp, Artificial Sequence
  Oligonucleotide primer for the detection of SNP TSC0034134
gatatataagag

SEQ ID NO: 328159 - DNA, 12 bp, Artificial Sequence
  Oligonucleotide primer for the detection of SNP TSC0034135
taactaatttaa

SEQ ID NO: 328160 - DNA, 12 bp, Artificial Sequence
  Oligonucleotide primer for the detection of SNP TSC0034135
gagaataagatt

SEQ ID NO: 328161 - DNA, 12 bp, Artificial Sequence
  Oligonucleotide primer for the detection of SNP TSC0034138
aatcaaataatc

SEQ ID NO: 328162 - DNA, 12 bp, Artificial Sequence
  Oligonucleotide primer for the detection of SNP TSC0034138
ttttttgaagtt

SEQ ID NO: 328163 - DNA, 12 bp, Artificial Sequence
  Oligonucleotide primer for the detection of SNP TSC0034138
cttttaaaatca

SEQ ID NO: 328164 - DNA, 12 bp, Artificial Sequence
  Oligonucleotide primer for the detection of SNP TSC0034140
atataaaccaac

SEQ ID NO: 328165 - DNA, 12 bp, Artificial Sequence
  Oligonucleotide primer for the detection of SNP TSC0034140
ttattgtttgat

SEQ ID NO: 328166 - DNA, 12 bp, Artificial Sequence
  Oligonucleotide primer for the detection of SNP TSC0034140
ttattgtttgac

SEQ ID NO: 328167 - DNA, 12 bp, Artificial Sequence
  Oligonucleotide primer for the detection of SNP TSC0034140
atcactacctaa

SEQ ID NO: 328168 - DNA, 12 bp, Artificial Sequence
  Oligonucleotide primer for the detection of SNP TSC0034140
atatggattaat

SEQ ID NO: 328169 - DNA, 12 bp, Artificial Sequence
  Oligonukleotid-Primer
aacccctacccc

SEQ ID NO: 328170 - DNA, 12 bp, Artificial Sequence
  Oligonucleotide primer for the detection of SNP TSC0034141
attgagattttg

SEQ ID NO: 328171 - DNA, 12 bp, Artificial Sequence
  Oligonucleotide primer for the detection of SNP TSC0034141
actaaaattcta

SEQ ID NO: 328172 - DNA, 12 bp, Artificial Sequence
  Oligonucleotide primer for the detection of SNP TSC0034142
cccaaattaaaa

SEQ ID NO: 328173 - DNA, 12 bp, Artificial Sequence
  Oligonukleotid-Primer
ctcaacaaaact

SEQ ID NO: 328174 - DNA, 12 bp, Artificial Sequence
  Oligonucleotide primer for the detection of SNP TSC0034143
ttttttgtacgt

SEQ ID NO: 328175 - DNA, 12 bp, Artificial Sequence
  Oligonucleotide primer for the detection of SNP TSC0034143
tcttttatacat

SEQ ID NO: 328176 - DNA, 12 bp, Artificial Sequence
  Oligonucleotide primer for the detection of SNP TSC0034143
tcttttatacgt

SEQ ID NO: 328177 - DNA, 12 bp, Artificial Sequence
  Oligonucleotide primer for the detection of SNP TSC0034143
tttagtagggtt

SEQ ID NO: 328178 - DNA, 12 bp, Artificial Sequence
  Oligonucleotide primer for the detection of SNP TSC0034148
atcatcccactt

SEQ ID NO: 328179 - DNA, 12 bp, Artificial Sequence
  Oligonucleotide primer for the detection of SNP TSC0034148
gtagaattaaaa

SEQ ID NO: 328180 - DNA, 12 bp, Artificial Sequence
  Oligonucleotide primer for the detection of SNP TSC0034148
attattttattt

SEQ ID NO: 328181 - DNA, 12 bp, Artificial Sequence
  Oligonucleotide primer for the detection of SNP TSC0034149
ttagggttttag

SEQ ID NO: 328182 - DNA, 12 bp, Artificial Sequence
  Oligonucleotide primer for the detection of SNP TSC0034149
ccaaaattctaa

SEQ ID NO: 328183 - DNA, 12 bp, Artificial Sequence
  Oligonucleotide primer for the detection of SNP TSC0034149
tgggttaagggt

SEQ ID NO: 328184 - DNA, 12 bp, Artificial Sequence
  Oligonucleotide primer for the detection of SNP TSC0034151
ttatattactcc

SEQ ID NO: 328185 - DNA, 12 bp, Artificial Sequence
  Oligonucleotide primer for the detection of SNP TSC0034153
tatcaaaacccc

SEQ ID NO: 328186 - DNA, 12 bp, Artificial Sequence
  Oligonucleotide primer for the detection of SNP TSC0034153
tttttataagag

SEQ ID NO: 328187 - DNA, 12 bp, Artificial Sequence
  Oligonucleotide primer for the detection of SNP TSC0034154
atttactttata

SEQ ID NO: 328188 - DNA, 12 bp, Artificial Sequence
  Oligonucleotide primer for the detection of SNP TSC0034154
tatttattttat

SEQ ID NO: 328189 - DNA, 12 bp, Artificial Sequence
  Oligonucleotide primer for the detection of SNP TSC0034158
aaacaacacaaa

SEQ ID NO: 328190 - DNA, 12 bp, Artificial Sequence
  Oligonucleotide primer for the detection of SNP TSC0034158
gaaaaattattt

SEQ ID NO: 328191 - DNA, 12 bp, Artificial Sequence
  Oligonucleotide primer for the detection of SNP TSC0034159
tttgttttaata

SEQ ID NO: 328192 - DNA, 12 bp, Artificial Sequence
  Oligonucleotide primer for the detection of SNP TSC0034159
ttcgttttaata

SEQ ID NO: 328193 - DNA, 12 bp, Artificial Sequence
  Oligonucleotide primer for the detection of SNP TSC0034163
aaatacactacc

SEQ ID NO: 328194 - DNA, 12 bp, Artificial Sequence
  Oligonucleotide primer for the detection of SNP TSC0034163
gagtgtattatt

SEQ ID NO: 328195 - DNA, 12 bp, Artificial Sequence
  Oligonucleotide primer for the detection of SNP TSC0034165
ccttatcccttc

SEQ ID NO: 328196 - DNA, 12 bp, Artificial Sequence
  Oligonucleotide primer for the detection of SNP TSC0034165
tgtttaataggg

SEQ ID NO: 328197 - DNA, 12 bp, Artificial Sequence
  Oligonucleotide primer for the detection of SNP TSC0034166
ataataaaaatt

SEQ ID NO: 328198 - DNA, 12 bp, Artificial Sequence
  Oligonucleotide primer for the detection of SNP TSC0034166
tgaattagagag

SEQ ID NO: 328199 - DNA, 12 bp, Artificial Sequence
  Oligonucleotide primer for the detection of SNP TSC0034166
gtggtgagggtt

SEQ ID NO: 328200 - DNA, 12 bp, Artificial Sequence
  Oligonucleotide primer for the detection of SNP TSC0034172
ttttataaaaac

SEQ ID NO: 328201 - DNA, 12 bp, Artificial Sequence
  Oligonucleotide primer for the detection of SNP TSC0034172
tgttatggttta

SEQ ID NO: 328202 - DNA, 12 bp, Artificial Sequence
  Oligonucleotide primer for the detection of SNP TSC0034174
cctcccaaaata

SEQ ID NO: 328203 - DNA, 12 bp, Artificial Sequence
  Oligonucleotide primer for the detection of SNP TSC0034174
atttgttatttt

SEQ ID NO: 328204 - DNA, 12 bp, Artificial Sequence
  Oligonucleotide primer for the detection of SNP TSC0034174
cctatcatccca

SEQ ID NO: 328205 - DNA, 12 bp, Artificial Sequence
  Oligonucleotide primer for the detection of SNP TSC0034175
acttccccttac

SEQ ID NO: 328206 - DNA, 12 bp, Artificial Sequence
  Oligonucleotide primer for the detection of SNP TSC0034175
aattttaatttg

SEQ ID NO: 328207 - DNA, 12 bp, Artificial Sequence
  Oligonucleotide primer for the detection of SNP TSC0034175
aacctcaaccta

SEQ ID NO: 328208 - DNA, 12 bp, Artificial Sequence
  Oligonucleotide primer for the detection of SNP TSC0034177
aacaacctacct

SEQ ID NO: 328209 - DNA, 12 bp, Artificial Sequence
  Oligonucleotide primer for the detection of SNP TSC0034177
gagaaaattgag

SEQ ID NO: 328210 - DNA, 12 bp, Artificial Sequence
  Oligonucleotide primer for the detection of SNP TSC0034178
tccaacctaaac

SEQ ID NO: 328211 - DNA, 12 bp, Artificial Sequence
  Oligonucleotide primer for the detection of SNP TSC0034183
tttattgaaata

SEQ ID NO: 328212 - DNA, 12 bp, Artificial Sequence
  Oligonucleotide primer for the detection of SNP TSC0034183
ttcattaaaata

SEQ ID NO: 328213 - DNA, 12 bp, Artificial Sequence
  Oligonucleotide primer for the detection of SNP TSC0034183
tttaagtttgaa

SEQ ID NO: 328214 - DNA, 12 bp, Artificial Sequence
  Oligonucleotide primer for the detection of SNP TSC0034184
aattacaaacta

SEQ ID NO: 328215 - DNA, 12 bp, Artificial Sequence
  Oligonucleotide primer for the detection of SNP TSC0034184
gtgtgattagta

SEQ ID NO: 328216 - DNA, 12 bp, Artificial Sequence
  Oligonucleotide primer for the detection of SNP TSC0034184
tataatcaacaa

SEQ ID NO: 328217 - DNA, 12 bp, Artificial Sequence
  Oligonucleotide primer for the detection of SNP TSC0034184
agttgtaggtta

SEQ ID NO: 328218 - DNA, 12 bp, Artificial Sequence
  Oligonucleotide primer for the detection of SNP TSC0034185
aaatcaacacct

SEQ ID NO: 328219 - DNA, 12 bp, Artificial Sequence
  Oligonucleotide primer for the detection of SNP TSC0034185
tcaaccttccta

SEQ ID NO: 328220 - DNA, 12 bp, Artificial Sequence
  Oligonucleotide primer for the detection of SNP TSC0034185
gaattaatattt

SEQ ID NO: 328221 - DNA, 12 bp, Artificial Sequence
  Oligonucleotide primer for the detection of SNP TSC0034186
ataaataacact

SEQ ID NO: 328222 - DNA, 12 bp, Artificial Sequence
  Oligonucleotide primer for the detection of SNP TSC0034187
atacaattaaaa

SEQ ID NO: 328223 - DNA, 12 bp, Artificial Sequence
  Oligonucleotide primer for the detection of SNP TSC0034187
cgttgtttttat

SEQ ID NO: 328224 - DNA, 12 bp, Artificial Sequence
  Oligonucleotide primer for the detection of SNP TSC0034187
cactacctctat

SEQ ID NO: 328225 - DNA, 12 bp, Artificial Sequence
  Oligonucleotide primer for the detection of SNP TSC0034187
cgctacctctat

SEQ ID NO: 328226 - DNA, 12 bp, Artificial Sequence
  Oligonucleotide primer for the detection of SNP TSC0034187
atgtagttgaaa

SEQ ID NO: 328227 - DNA, 12 bp, Artificial Sequence
  Oligonucleotide primer for the detection of SNP TSC0034188
tttatccataaa

SEQ ID NO: 328228 - DNA, 12 bp, Artificial Sequence
  Oligonucleotide primer for the detection of SNP TSC0034188
tcatatctccaa

SEQ ID NO: 328229 - DNA, 12 bp, Artificial Sequence
  Oligonucleotide primer for the detection of SNP TSC0034189
taaaattctcta

SEQ ID NO: 328230 - DNA, 12 bp, Artificial Sequence
  Oligonucleotide primer for the detection of SNP TSC0034189
ttttttaagttg

SEQ ID NO: 328231 - DNA, 12 bp, Artificial Sequence
  Oligonucleotide primer for the detection of SNP TSC0034189
ttttttaagtcg

SEQ ID NO: 328232 - DNA, 12 bp, Artificial Sequence
  Oligonucleotide primer for the detection of SNP TSC0034190
acatccattaat

SEQ ID NO: 328233 - DNA, 12 bp, Artificial Sequence
  Oligonucleotide primer for the detection of SNP TSC0034191
caaaaccctccc

SEQ ID NO: 328234 - DNA, 12 bp, Artificial Sequence
  Oligonucleotide primer for the detection of SNP TSC0034191
cgaaaccctccc

SEQ ID NO: 328235 - DNA, 12 bp, Artificial Sequence
  Oligonucleotide primer for the detection of SNP TSC0034191
tttttttgagga

SEQ ID NO: 328236 - DNA, 12 bp, Artificial Sequence
  Oligonucleotide primer for the detection of SNP TSC0034196
aatttgtaggat

SEQ ID NO: 328237 - DNA, 12 bp, Artificial Sequence
  Oligonucleotide primer for the detection of SNP TSC0034196
taaaattgaaaa

SEQ ID NO: 328238 - DNA, 12 bp, Artificial Sequence
  Oligonucleotide primer for the detection of SNP TSC0034197
acaatcatcata

SEQ ID NO: 328239 - DNA, 12 bp, Artificial Sequence
  Oligonucleotide primer for the detection of SNP TSC0034197
acaatcgtcata

SEQ ID NO: 328240 - DNA, 12 bp, Artificial Sequence
  Oligonucleotide primer for the detection of SNP TSC0034197
taattgttatat

SEQ ID NO: 328241 - DNA, 12 bp, Artificial Sequence
  Oligonucleotide primer for the detection of SNP TSC0034197
taatcgttatat

SEQ ID NO: 328242 - DNA, 12 bp, Artificial Sequence
  Oligonucleotide primer for the detection of SNP TSC0034199
attcacctatat

SEQ ID NO: 328243 - DNA, 12 bp, Artificial Sequence
  Oligonucleotide primer for the detection of SNP TSC0034200
acttactattct

SEQ ID NO: 328244 - DNA, 12 bp, Artificial Sequence
  Oligonucleotide primer for the detection of SNP TSC0034200
atgataatggtg

SEQ ID NO: 328245 - DNA, 12 bp, Artificial Sequence
  Oligonucleotide primer for the detection of SNP TSC0034200
atgataacggtg

SEQ ID NO: 328246 - DNA, 12 bp, Artificial Sequence
  Oligonucleotide primer for the detection of SNP TSC0034200
atgataatggcg

SEQ ID NO: 328247 - DNA, 12 bp, Artificial Sequence
  Oligonucleotide primer for the detection of SNP TSC0034200
atgataacggcg

SEQ ID NO: 328248 - DNA, 12 bp, Artificial Sequence
  Oligonucleotide primer for the detection of SNP TSC0034201
ttaatatatgtg

SEQ ID NO: 328249 - DNA, 12 bp, Artificial Sequence
  Oligonucleotide primer for the detection of SNP TSC0034201
ttaatatacgtg

SEQ ID NO: 328250 - DNA, 12 bp, Artificial Sequence
  Oligonucleotide primer for the detection of SNP TSC0034201
ttaatatatgcg

SEQ ID NO: 328251 - DNA, 12 bp, Artificial Sequence
  Oligonucleotide primer for the detection of SNP TSC0034201
ttaatatacgcg

SEQ ID NO: 328252 - DNA, 12 bp, Artificial Sequence
  Oligonucleotide primer for the detection of SNP TSC0034201
ctaacacacacg

SEQ ID NO: 328253 - DNA, 12 bp, Artificial Sequence
  Oligonucleotide primer for the detection of SNP TSC0034201
ctaacacacgca

SEQ ID NO: 328254 - DNA, 12 bp, Artificial Sequence
  Oligonucleotide primer for the detection of SNP TSC0034201
ctaacacacgcg

SEQ ID NO: 328255 - DNA, 12 bp, Artificial Sequence
  Oligonucleotide primer for the detection of SNP TSC0034203
taatcactaata

SEQ ID NO: 328256 - DNA, 12 bp, Artificial Sequence
  Oligonucleotide primer for the detection of SNP TSC0034203
ttggttattaat

SEQ ID NO: 328257 - DNA, 12 bp, Artificial Sequence
  Oligonucleotide primer for the detection of SNP TSC0034204
tacacccatcaa

SEQ ID NO: 328258 - DNA, 12 bp, Artificial Sequence
  Oligonucleotide primer for the detection of SNP TSC0034204
taaaatttagat

SEQ ID NO: 328259 - DNA, 12 bp, Artificial Sequence
  Oligonucleotide primer for the detection of SNP TSC0034204
taaaacctaaat

SEQ ID NO: 328260 - DNA, 12 bp, Artificial Sequence
  Oligonucleotide primer for the detection of SNP TSC0034204
tgtatttattaa

SEQ ID NO: 328261 - DNA, 12 bp, Artificial Sequence
  Oligonucleotide primer for the detection of SNP TSC0034206
attcacctaaat

SEQ ID NO: 328262 - DNA, 12 bp, Artificial Sequence
  Oligonucleotide primer for the detection of SNP TSC0034206
ttattaattatg

SEQ ID NO: 328263 - DNA, 12 bp, Artificial Sequence
  Oligonucleotide primer for the detection of SNP TSC0034207
tgtaggaaaaat

SEQ ID NO: 328264 - DNA, 12 bp, Artificial Sequence
  Oligonucleotide primer for the detection of SNP TSC0034207
tgtaggaaaaac

SEQ ID NO: 328265 - DNA, 12 bp, Artificial Sequence
  Oligonucleotide primer for the detection of SNP TSC0034207
aatgtaaatagt

SEQ ID NO: 328266 - DNA, 12 bp, Artificial Sequence
  Oligonucleotide primer for the detection of SNP TSC0034208
aataaacgaaaa

SEQ ID NO: 328267 - DNA, 12 bp, Artificial Sequence
  Oligonucleotide primer for the detection of SNP TSC0034208
ttggggattaga

SEQ ID NO: 328268 - DNA, 12 bp, Artificial Sequence
  Oligonucleotide primer for the detection of SNP TSC0034208
ctaaaaattaaa

SEQ ID NO: 328269 - DNA, 12 bp, Artificial Sequence
  Oligonucleotide primer for the detection of SNP TSC0034208
gtagatggagat

SEQ ID NO: 328270 - DNA, 12 bp, Artificial Sequence
  Oligonucleotide primer for the detection of SNP TSC0034208
gtagacggagat

SEQ ID NO: 328271 - DNA, 12 bp, Artificial Sequence
  Oligonucleotide primer for the detection of SNP TSC0034208
gtagatggagac

SEQ ID NO: 328272 - DNA, 12 bp, Artificial Sequence
  Oligonucleotide primer for the detection of SNP TSC0034208
gtagacggagac

SEQ ID NO: 328273 - DNA, 12 bp, Artificial Sequence
  Oligonucleotide primer for the detection of SNP TSC0034209
aactaaacaact

SEQ ID NO: 328274 - DNA, 12 bp, Artificial Sequence
  Oligonucleotide primer for the detection of SNP TSC0034209
tgagatttgggt

SEQ ID NO: 328275 - DNA, 12 bp, Artificial Sequence
  Oligonucleotide primer for the detection of SNP TSC0034209
taaaacttaaac

SEQ ID NO: 328276 - DNA, 12 bp, Artificial Sequence
  Oligonucleotide primer for the detection of SNP TSC0034209
ggttaagtaatt

SEQ ID NO: 328277 - DNA, 12 bp, Artificial Sequence
  Oligonucleotide primer for the detection of SNP TSC0034210
tcactataccca

SEQ ID NO: 328278 - DNA, 12 bp, Artificial Sequence
  Oligonucleotide primer for the detection of SNP TSC0034210
tcgctataccca

SEQ ID NO: 328279 - DNA, 12 bp, Artificial Sequence
  Oligonucleotide primer for the detection of SNP TSC0034210
aaggttatgtgt

SEQ ID NO: 328280 - DNA, 12 bp, Artificial Sequence
  Oligonucleotide primer for the detection of SNP TSC0034210
aaaattatatac

SEQ ID NO: 328281 - DNA, 12 bp, Artificial Sequence
  Oligonucleotide primer for the detection of SNP TSC0034210
ttgttatgttta

SEQ ID NO: 328282 - DNA, 12 bp, Artificial Sequence
  Oligonukleotid-Primer
tcgttatgttta

SEQ ID NO: 328283 - DNA, 12 bp, Artificial Sequence
  Oligonucleotide primer for the detection of SNP TSC0034212
atcaccttaaat

SEQ ID NO: 328284 - DNA, 12 bp, Artificial Sequence
  Oligonucleotide primer for the detection of SNP TSC0034212
gggttgataatg

SEQ ID NO: 328285 - DNA, 12 bp, Artificial Sequence
  Oligonucleotide primer for the detection of SNP TSC0034213
aaataaaaacac

SEQ ID NO: 328286 - DNA, 12 bp, Artificial Sequence
  Oligonukleotid-Primer
ataattattatg

SEQ ID NO: 328287 - DNA, 12 bp, Artificial Sequence
  Oligonucleotide primer for the detection of SNP TSC0034214
aataacacacac

SEQ ID NO: 328288 - DNA, 12 bp, Artificial Sequence
  Oligonucleotide primer for the detection of SNP TSC0034214
aataacacgcac

SEQ ID NO: 328289 - DNA, 12 bp, Artificial Sequence
  Oligonucleotide primer for the detection of SNP TSC0034214
ttgttgtatgtg

SEQ ID NO: 328290 - DNA, 12 bp, Artificial Sequence
  Oligonukleotid-Primer
tattatgtttag

SEQ ID NO: 328291 - DNA, 12 bp, Artificial Sequence
  Oligonucleotide primer for the detection of SNP TSC0034219
acctcccaaata

SEQ ID NO: 328292 - DNA, 12 bp, Artificial Sequence
  Oligonucleotide primer for the detection of SNP TSC0034219
ttgtagttttaa

SEQ ID NO: 328293 - DNA, 12 bp, Artificial Sequence
  Oligonucleotide primer for the detection of SNP TSC0034220
gataaagaggaa

SEQ ID NO: 328294 - DNA, 12 bp, Artificial Sequence
  Oligonucleotide primer for the detection of SNP TSC0034221
gcaaaaaaaata

SEQ ID NO: 328295 - DNA, 12 bp, Artificial Sequence
  Oligonucleotide primer for the detection of SNP TSC0034221
atcctctcctat

SEQ ID NO: 328296 - DNA, 12 bp, Artificial Sequence
  Oligonucleotide primer for the detection of SNP TSC0034221
tgtagagagagt

SEQ ID NO: 328297 - DNA, 12 bp, Artificial Sequence
  Oligonucleotide primer for the detection of SNP TSC0034221
cgtagagagagt

SEQ ID NO: 328298 - DNA, 12 bp, Artificial Sequence
  Oligonukleotid-Primer
acaatatcatac

SEQ ID NO: 328299 - DNA, 12 bp, Artificial Sequence
  Oligonucleotide primer for the detection of SNP TSC0034223
atcccaaaaaca

SEQ ID NO: 328300 - DNA, 12 bp, Artificial Sequence
  Oligonucleotide primer for the detection of SNP TSC0034223
ctaaacatttca

SEQ ID NO: 328301 - DNA, 12 bp, Artificial Sequence
  Oligonucleotide primer for the detection of SNP TSC0034223
attttagggata

SEQ ID NO: 328302 - DNA, 12 bp, Artificial Sequence
  Oligonukleotid-Primer
attccataccta

SEQ ID NO: 328303 - DNA, 12 bp, Artificial Sequence
  Oligonucleotide primer for the detection of SNP TSC0034226
atctcctataca

SEQ ID NO: 328304 - DNA, 12 bp, Artificial Sequence
  Oligonucleotide primer for the detection of SNP TSC0034227
ctaattattaac

SEQ ID NO: 328305 - DNA, 12 bp, Artificial Sequence
  Oligonucleotide primer for the detection of SNP TSC0034227
tttgttagtata

SEQ ID NO: 328306 - DNA, 12 bp, Artificial Sequence
  Oligonukleotid-Primer
acttctaaacat

SEQ ID NO: 328307 - DNA, 12 bp, Artificial Sequence
  Oligonucleotide primer for the detection of SNP TSC0034228
ttattatatgag

SEQ ID NO: 328308 - DNA, 12 bp, Artificial Sequence
  Oligonucleotide primer for the detection of SNP TSC0034230
gggtttgaattt

SEQ ID NO: 328309 - DNA, 12 bp, Artificial Sequence
  Oligonucleotide primer for the detection of SNP TSC0034230
aaatttaaatcc

SEQ ID NO: 328310 - DNA, 12 bp, Artificial Sequence
  Oligonucleotide primer for the detection of SNP TSC0034230
taagtggaggag

SEQ ID NO: 328311 - DNA, 12 bp, Artificial Sequence
  Oligonucleotide primer for the detection of SNP TSC0034233
tggaagtttttt

SEQ ID NO: 328312 - DNA, 12 bp, Artificial Sequence
  Oligonucleotide primer for the detection of SNP TSC0034233
taaaaatcttct

SEQ ID NO: 328313 - DNA, 12 bp, Artificial Sequence
  Oligonucleotide primer for the detection of SNP TSC0034233
atttaaaaggta

SEQ ID NO: 328314 - DNA, 12 bp, Artificial Sequence
  Oligonucleotide primer for the detection of SNP TSC0034234
caataaataata

SEQ ID NO: 328315 - DNA, 12 bp, Artificial Sequence
  Oligonucleotide primer for the detection of SNP TSC0034234
tggaggagttta

SEQ ID NO: 328316 - DNA, 12 bp, Artificial Sequence
  Oligonucleotide primer for the detection of SNP TSC0034234
taaaaaaatcca

SEQ ID NO: 328317 - DNA, 12 bp, Artificial Sequence
  Oligonucleotide primer for the detection of SNP TSC0034234
aatggatgatgt

SEQ ID NO: 328318 - DNA, 12 bp, Artificial Sequence
  Oligonucleotide primer for the detection of SNP TSC0034234
aatggatgatgc

SEQ ID NO: 328319 - DNA, 12 bp, Artificial Sequence
  Oligonucleotide primer for the detection of SNP TSC0034235
tttggagaaagt

SEQ ID NO: 328320 - DNA, 12 bp, Artificial Sequence
  Oligonucleotide primer for the detection of SNP TSC0034235
ggaaggtggtat

SEQ ID NO: 328321 - DNA, 12 bp, Artificial Sequence
  Oligonucleotide primer for the detection of SNP TSC0034236
atcaaattaact

SEQ ID NO: 328322 - DNA, 12 bp, Artificial Sequence
  Oligonucleotide primer for the detection of SNP TSC0034236
tgaatttagatt

SEQ ID NO: 328323 - DNA, 12 bp, Artificial Sequence
  Oligonucleotide primer for the detection of SNP TSC0034236
taaacttaaacc

SEQ ID NO: 328324 - DNA, 12 bp, Artificial Sequence
  Oligonucleotide primer for the detection of SNP TSC0034236
attaaattagtt

SEQ ID NO: 328325 - DNA, 12 bp, Artificial Sequence
  Oligonucleotide primer for the detection of SNP TSC0034237
caaataattatt

SEQ ID NO: 328326 - DNA, 12 bp, Artificial Sequence
  Oligonucleotide primer for the detection of SNP TSC0034237
agttttggaagg

SEQ ID NO: 328327 - DNA, 12 bp, Artificial Sequence
  Oligonucleotide primer for the detection of SNP TSC0034238
caccaccataca

SEQ ID NO: 328328 - DNA, 12 bp, Artificial Sequence
  Oligonucleotide primer for the detection of SNP TSC0034238
aaataaattagt

SEQ ID NO: 328329 - DNA, 12 bp, Artificial Sequence
  Oligonucleotide primer for the detection of SNP TSC0034238
aaataaattaac

SEQ ID NO: 328330 - DNA, 12 bp, Artificial Sequence
  Oligonucleotide primer for the detection of SNP TSC0034238
tattattatata

SEQ ID NO: 328331 - DNA, 12 bp, Artificial Sequence
  Oligonucleotide primer for the detection of SNP TSC0034241
ccttaatacttt

SEQ ID NO: 328332 - DNA, 12 bp, Artificial Sequence
  Oligonucleotide primer for the detection of SNP TSC0034242
cccattttacac

SEQ ID NO: 328333 - DNA, 12 bp, Artificial Sequence
  Oligonucleotide primer for the detection of SNP TSC0034242
cactctactatt

SEQ ID NO: 328334 - DNA, 12 bp, Artificial Sequence
  Oligonucleotide primer for the detection of SNP TSC0034242
tttattttgtat

SEQ ID NO: 328335 - DNA, 12 bp, Artificial Sequence
  Oligonucleotide primer for the detection of SNP TSC0034243
aataatcttcta

SEQ ID NO: 328336 - DNA, 12 bp, Artificial Sequence
  Oligonucleotide primer for the detection of SNP TSC0034243
attattataaaa

SEQ ID NO: 328337 - DNA, 12 bp, Artificial Sequence
  Oligonucleotide primer for the detection of SNP TSC0034249
aaaatcccaaac

SEQ ID NO: 328338 - DNA, 12 bp, Artificial Sequence
  Oligonucleotide primer for the detection of SNP TSC0034249
aaaatcccgaac

SEQ ID NO: 328339 - DNA, 12 bp, Artificial Sequence
  Oligonucleotide primer for the detection of SNP TSC0034249
agagttttgggt

SEQ ID NO: 328340 - DNA, 12 bp, Artificial Sequence
  Oligonucleotide primer for the detection of SNP TSC0034249
agagtttcgggt

SEQ ID NO: 328341 - DNA, 12 bp, Artificial Sequence
  Oligonucleotide primer for the detection of SNP TSC0034249
agagttttgggc

SEQ ID NO: 328342 - DNA, 12 bp, Artificial Sequence
  Oligonucleotide primer for the detection of SNP TSC0034249
agagtttcgggc

SEQ ID NO: 328343 - DNA, 12 bp, Artificial Sequence
  Oligonucleotide primer for the detection of SNP TSC0034250
aaaccaccacac

SEQ ID NO: 328344 - DNA, 12 bp, Artificial Sequence
  Oligonucleotide primer for the detection of SNP TSC0034250
aaaccaccacgc

SEQ ID NO: 328345 - DNA, 12 bp, Artificial Sequence
  Oligonucleotide primer for the detection of SNP TSC0034250
tgtagagttttg

SEQ ID NO: 328346 - DNA, 12 bp, Artificial Sequence
  Oligonucleotide primer for the detection of SNP TSC0034250
cgtagagttttg

SEQ ID NO: 328347 - DNA, 12 bp, Artificial Sequence
  Oligonucleotide primer for the detection of SNP TSC0034250
tgtagagtttcg

SEQ ID NO: 328348 - DNA, 12 bp, Artificial Sequence
  Oligonucleotide primer for the detection of SNP TSC0034250
cgtagagtttcg

SEQ ID NO: 328349 - DNA, 12 bp, Artificial Sequence
  Oligonucleotide primer for the detection of SNP TSC0034251
taaggtttatta

SEQ ID NO: 328350 - DNA, 12 bp, Artificial Sequence
  Oligonucleotide primer for the detection of SNP TSC0034252
aaaatctaacta

SEQ ID NO: 328351 - DNA, 12 bp, Artificial Sequence
  Oligonucleotide primer for the detection of SNP TSC0034252
gggtttggttat

SEQ ID NO: 328352 - DNA, 12 bp, Artificial Sequence
  Oligonucleotide primer for the detection of SNP TSC0034253
ctaaaaacacaa

SEQ ID NO: 328353 - DNA, 12 bp, Artificial Sequence
  Oligonucleotide primer for the detection of SNP TSC0034253
tttttaattatt

SEQ ID NO: 328354 - DNA, 12 bp, Artificial Sequence
  Oligonucleotide primer for the detection of SNP TSC0034253
tttttaattatc

SEQ ID NO: 328355 - DNA, 12 bp, Artificial Sequence
  Oligonucleotide primer for the detection of SNP TSC0034253
cttccaaccacc

SEQ ID NO: 328356 - DNA, 12 bp, Artificial Sequence
  Oligonucleotide primer for the detection of SNP TSC0034253
ttggagatatag

SEQ ID NO: 328357 - DNA, 12 bp, Artificial Sequence
  Oligonucleotide primer for the detection of SNP TSC0034254
tatacaaaaaac

SEQ ID NO: 328358 - DNA, 12 bp, Artificial Sequence
  Oligonucleotide primer for the detection of SNP TSC0034254
tgttgtattgtt

SEQ ID NO: 328359 - DNA, 12 bp, Artificial Sequence
  Oligonucleotide primer for the detection of SNP TSC0034254
atattattaaaa

SEQ ID NO: 328360 - DNA, 12 bp, Artificial Sequence
  Oligonucleotide primer for the detection of SNP TSC0034254
tgtatagaaaat

SEQ ID NO: 328361 - DNA, 12 bp, Artificial Sequence
  Oligonucleotide primer for the detection of SNP TSC0034260
caccacacctaa

SEQ ID NO: 328362 - DNA, 12 bp, Artificial Sequence
  Oligonucleotide primer for the detection of SNP TSC0034260
caccacgcctaa

SEQ ID NO: 328363 - DNA, 12 bp, Artificial Sequence
  Oligonucleotide primer for the detection of SNP TSC0034260
caccgcacctaa

SEQ ID NO: 328364 - DNA, 12 bp, Artificial Sequence
  Oligonucleotide primer for the detection of SNP TSC0034260
cgccacacctaa

SEQ ID NO: 328365 - DNA, 12 bp, Artificial Sequence
  Oligonucleotide primer for the detection of SNP TSC0034260
caccgcgcctaa

SEQ ID NO: 328366 - DNA, 12 bp, Artificial Sequence
  Oligonucleotide primer for the detection of SNP TSC0034260
cgccacgcctaa

SEQ ID NO: 328367 - DNA, 12 bp, Artificial Sequence
  Oligonucleotide primer for the detection of SNP TSC0034260
cgccgcacctaa

SEQ ID NO: 328368 - DNA, 12 bp, Artificial Sequence
  Oligonucleotide primer for the detection of SNP TSC0034260
cgccgcgcctaa

SEQ ID NO: 328369 - DNA, 12 bp, Artificial Sequence
  Oligonucleotide primer for the detection of SNP TSC0034260
atataaaaactt

SEQ ID NO: 328370 - DNA, 12 bp, Artificial Sequence
  Oligonucleotide primer for the detection of SNP TSC0034261
atggttaggtgt

SEQ ID NO: 328371 - DNA, 12 bp, Artificial Sequence
  Oligonucleotide primer for the detection of SNP TSC0034261
acggttaggtgt

SEQ ID NO: 328372 - DNA, 12 bp, Artificial Sequence
  Oligonucleotide primer for the detection of SNP TSC0034261
atggttaggcgt

SEQ ID NO: 328373 - DNA, 12 bp, Artificial Sequence
  Oligonucleotide primer for the detection of SNP TSC0034261
atggttaggtgc

SEQ ID NO: 328374 - DNA, 12 bp, Artificial Sequence
  Oligonucleotide primer for the detection of SNP TSC0034261
acggttaggcgt

SEQ ID NO: 328375 - DNA, 12 bp, Artificial Sequence
  Oligonukleotid-Primer
acggttaggtgc

SEQ ID NO: 328376 - DNA, 12 bp, Artificial Sequence
  Oligonucleotide primer for the detection of SNP TSC0034261
atggttaggcgc

SEQ ID NO: 328377 - DNA, 12 bp, Artificial Sequence
  Oligonucleotide primer for the detection of SNP TSC0034261
acggttaggcgc

SEQ ID NO: 328378 - DNA, 12 bp, Artificial Sequence
  Oligonucleotide primer for the detection of SNP TSC0034261
acaaccaaacac

SEQ ID NO: 328379 - DNA, 12 bp, Artificial Sequence
  Oligonucleotide primer for the detection of SNP TSC0034261
acaaccaaacgc

SEQ ID NO: 328380 - DNA, 12 bp, Artificial Sequence
  Oligonucleotide primer for the detection of SNP TSC0034261
acgaccaaacac

SEQ ID NO: 328381 - DNA, 12 bp, Artificial Sequence
  Oligonucleotide primer for the detection of SNP TSC0034261
acgaccaaacgc

SEQ ID NO: 328382 - DNA, 12 bp, Artificial Sequence
  Oligonucleotide primer for the detection of SNP TSC0034262
atactacctaca

SEQ ID NO: 328383 - DNA, 12 bp, Artificial Sequence
  Oligonucleotide primer for the detection of SNP TSC0034262
gtttgagatatt

SEQ ID NO: 328384 - DNA, 12 bp, Artificial Sequence
  Oligonucleotide primer for the detection of SNP TSC0034262
acctaaaatatc

SEQ ID NO: 328385 - DNA, 12 bp, Artificial Sequence
  Oligonucleotide primer for the detection of SNP TSC0034262
gtgttgtttgta

SEQ ID NO: 328386 - DNA, 12 bp, Artificial Sequence
  Oligonucleotide primer for the detection of SNP TSC0034264
cattataaataa

SEQ ID NO: 328387 - DNA, 12 bp, Artificial Sequence
  Oligonucleotide primer for the detection of SNP TSC0034264
agaattagattt

SEQ ID NO: 328388 - DNA, 12 bp, Artificial Sequence
  Oligonucleotide primer for the detection of SNP TSC0034264
attgtgaatgat

SEQ ID NO: 328389 - DNA, 12 bp, Artificial Sequence
  Oligonucleotide primer for the detection of SNP TSC0034265
ttttaaacaaaa

SEQ ID NO: 328390 - DNA, 12 bp, Artificial Sequence
  Oligonucleotide primer for the detection of SNP TSC0034265
ttagattttata

SEQ ID NO: 328391 - DNA, 12 bp, Artificial Sequence
  Oligonucleotide primer for the detection of SNP TSC0034265
tcaaacttcata

SEQ ID NO: 328392 - DNA, 12 bp, Artificial Sequence
  Oligonucleotide primer for the detection of SNP TSC0034265
ttttaaataaaa

SEQ ID NO: 328393 - DNA, 12 bp, Artificial Sequence
  Oligonucleotide primer for the detection of SNP TSC0034266
taaggaagtagg

SEQ ID NO: 328394 - DNA, 12 bp, Artificial Sequence
  Oligonucleotide primer for the detection of SNP TSC0034267
cctctattttct

SEQ ID NO: 328395 - DNA, 12 bp, Artificial Sequence
  Oligonucleotide primer for the detection of SNP TSC0034267
ctttattttcca

SEQ ID NO: 328396 - DNA, 12 bp, Artificial Sequence
  Oligonucleotide primer for the detection of SNP TSC0034271
aaaacgcataaa

SEQ ID NO: 328397 - DNA, 12 bp, Artificial Sequence
  Oligonucleotide primer for the detection of SNP TSC0034271
tgaagtaatttt

SEQ ID NO: 328398 - DNA, 12 bp, Artificial Sequence
  Oligonucleotide primer for the detection of SNP TSC0034271
aaaacaacctta

SEQ ID NO: 328399 - DNA, 12 bp, Artificial Sequence
  Oligonucleotide primer for the detection of SNP TSC0034271
gaagatgtatag

SEQ ID NO: 328400 - DNA, 12 bp, Artificial Sequence
  Oligonucleotide primer for the detection of SNP TSC0034271
gaagacgtatag

SEQ ID NO: 328401 - DNA, 12 bp, Artificial Sequence
  Oligonucleotide primer for the detection of SNP TSC0034272
tgttgtttaagt

SEQ ID NO: 328402 - DNA, 12 bp, Artificial Sequence
  Oligonucleotide primer for the detection of SNP TSC0034272
tactatttaaac

SEQ ID NO: 328403 - DNA, 12 bp, Artificial Sequence
  Oligonucleotide primer for the detection of SNP TSC0034274
taatcacctcct

SEQ ID NO: 328404 - DNA, 12 bp, Artificial Sequence
  Oligonucleotide primer for the detection of SNP TSC0034274
gttaggtgtggg

SEQ ID NO: 328405 - DNA, 12 bp, Artificial Sequence
  Oligonucleotide primer for the detection of SNP TSC0034274
gttaggcgtggg

SEQ ID NO: 328406 - DNA, 12 bp, Artificial Sequence
  Oligonucleotide primer for the detection of SNP TSC0034276
aaaactctcatt

SEQ ID NO: 328407 - DNA, 12 bp, Artificial Sequence
  Oligonucleotide primer for the detection of SNP TSC0034276
aaaactctcgtt

SEQ ID NO: 328408 - DNA, 12 bp, Artificial Sequence
  Oligonucleotide primer for the detection of SNP TSC0034276
gagattagttga

SEQ ID NO: 328409 - DNA, 12 bp, Artificial Sequence
  Oligonucleotide primer for the detection of SNP TSC0034277
ataaaactaatt

SEQ ID NO: 328410 - DNA, 12 bp, Artificial Sequence
  Oligonucleotide primer for the detection of SNP TSC0034277
ttttgaagaaaa

SEQ ID NO: 328411 - DNA, 12 bp, Artificial Sequence
  Oligonucleotide primer for the detection of SNP TSC0034278
cttttaaaacta

SEQ ID NO: 328412 - DNA, 12 bp, Artificial Sequence
  Oligonucleotide primer for the detection of SNP TSC0034278
gtttgtttaagt

SEQ ID NO: 328413 - DNA, 12 bp, Artificial Sequence
  Oligonucleotide primer for the detection of SNP TSC0034279
aattaatattcc

SEQ ID NO: 328414 - DNA, 12 bp, Artificial Sequence
  Oligonucleotide primer for the detection of SNP TSC0034279
tagaaaaagata

SEQ ID NO: 328415 - DNA, 12 bp, Artificial Sequence
  Oligonucleotide primer for the detection of SNP TSC0034280
aaaatactaact

SEQ ID NO: 328416 - DNA, 12 bp, Artificial Sequence
  Oligonucleotide primer for the detection of SNP TSC0034280
ttgtggtattag

SEQ ID NO: 328417 - DNA, 12 bp, Artificial Sequence
  Oligonucleotide primer for the detection of SNP TSC0034284
acaataataaac

SEQ ID NO: 328418 - DNA, 12 bp, Artificial Sequence
  Oligonucleotide primer for the detection of SNP TSC0034284
ggtagaaaatat

SEQ ID NO: 328419 - DNA, 12 bp, Artificial Sequence
  Oligonucleotide primer for the detection of SNP TSC0034284
tagtgataagtt

SEQ ID NO: 328420 - DNA, 12 bp, Artificial Sequence
  Oligonucleotide primer for the detection of SNP TSC0034285
taattttctacc

SEQ ID NO: 328421 - DNA, 12 bp, Artificial Sequence
  Oligonucleotide primer for the detection of SNP TSC0034285
ttgattaattag

SEQ ID NO: 328422 - DNA, 12 bp, Artificial Sequence
  Oligonucleotide primer for the detection of SNP TSC0034286
tattaatagtaa

SEQ ID NO: 328423 - DNA, 12 bp, Artificial Sequence
  Oligonucleotide primer for the detection of SNP TSC0034287
ccaaaaataatc

SEQ ID NO: 328424 - DNA, 12 bp, Artificial Sequence
  Oligonucleotide primer for the detection of SNP TSC0034287
gtggattgttta

SEQ ID NO: 328425 - DNA, 12 bp, Artificial Sequence
  Oligonucleotide primer for the detection of SNP TSC0034287
ataaattatcca

SEQ ID NO: 328426 - DNA, 12 bp, Artificial Sequence
  Oligonucleotide primer for the detection of SNP TSC0034287
ttaaaaatagtt

SEQ ID NO: 328427 - DNA, 12 bp, Artificial Sequence
  Oligonucleotide primer for the detection of SNP TSC0034288
aaaatcaataac

SEQ ID NO: 328428 - DNA, 12 bp, Artificial Sequence
  Oligonucleotide primer for the detection of SNP TSC0034288
aaaaccttctct

SEQ ID NO: 328429 - DNA, 12 bp, Artificial Sequence
  Oligonucleotide primer for the detection of SNP TSC0034288
gaagttagtagt

SEQ ID NO: 328430 - DNA, 12 bp, Artificial Sequence
  Oligonucleotide primer for the detection of SNP TSC0034293
gagtagagaagt

SEQ ID NO: 328431 - DNA, 12 bp, Artificial Sequence
  Oligonucleotide primer for the detection of SNP TSC0034293
agagaggaatag

SEQ ID NO: 328432 - DNA, 12 bp, Artificial Sequence
  Oligonucleotide primer for the detection of SNP TSC0034297
cataatacatta

SEQ ID NO: 328433 - DNA, 12 bp, Artificial Sequence
  Oligonucleotide primer for the detection of SNP TSC0034297
tggttatatttg

SEQ ID NO: 328434 - DNA, 12 bp, Artificial Sequence
  Oligonucleotide primer for the detection of SNP TSC0034297
taaccatattta

SEQ ID NO: 328435 - DNA, 12 bp, Artificial Sequence
  Oligonucleotide primer for the detection of SNP TSC0034297
tatagtatatta

SEQ ID NO: 328436 - DNA, 12 bp, Artificial Sequence
  Oligonucleotide primer for the detection of SNP TSC0034298
cactaatctatt

SEQ ID NO: 328437 - DNA, 12 bp, Artificial Sequence
  Oligonucleotide primer for the detection of SNP TSC0034298
aaaaagaaaaaa

SEQ ID NO: 328438 - DNA, 12 bp, Artificial Sequence
  Oligonucleotide primer for the detection of SNP TSC0034302
attataacaaaa

SEQ ID NO: 328439 - DNA, 12 bp, Artificial Sequence
  Oligonucleotide primer for the detection of SNP TSC0034302
ccactactattt

SEQ ID NO: 328440 - DNA, 12 bp, Artificial Sequence
  Oligonucleotide primer for the detection of SNP TSC0034302
attgtggtagaa

SEQ ID NO: 328441 - DNA, 12 bp, Artificial Sequence
  Oligonucleotide primer for the detection of SNP TSC0034304
cttaaaccttaa

SEQ ID NO: 328442 - DNA, 12 bp, Artificial Sequence
  Oligonucleotide primer for the detection of SNP TSC0034304
agatatttattt

SEQ ID NO: 328443 - DNA, 12 bp, Artificial Sequence
  Oligonucleotide primer for the detection of SNP TSC0034304
caaacacccacc

SEQ ID NO: 328444 - DNA, 12 bp, Artificial Sequence
  Oligonucleotide primer for the detection of SNP TSC0034305
actaaattttaa

SEQ ID NO: 328445 - DNA, 12 bp, Artificial Sequence
  Oligonucleotide primer for the detection of SNP TSC0034305
tatttatagagt

SEQ ID NO: 328446 - DNA, 12 bp, Artificial Sequence
  Oligonucleotide primer for the detection of SNP TSC0034305
tatttatagagc

SEQ ID NO: 328447 - DNA, 12 bp, Artificial Sequence
  Oligonucleotide primer for the detection of SNP TSC0034305
ccacttacaaaa

SEQ ID NO: 328448 - DNA, 12 bp, Artificial Sequence
  Oligonucleotide primer for the detection of SNP TSC0034305
ttggattttaat

SEQ ID NO: 328449 - DNA, 12 bp, Artificial Sequence
  Oligonucleotide primer for the detection of SNP TSC0034308
accctcactatc

SEQ ID NO: 328450 - DNA, 12 bp, Artificial Sequence
  Oligonucleotide primer for the detection of SNP TSC0034308
ccttccccataa

SEQ ID NO: 328451 - DNA, 12 bp, Artificial Sequence
  Oligonucleotide primer for the detection of SNP TSC0034308
gtttttattgtc

SEQ ID NO: 328452 - DNA, 12 bp, Artificial Sequence
  Oligonucleotide primer for the detection of SNP TSC0034310
ttaatattttct

SEQ ID NO: 328453 - DNA, 12 bp, Artificial Sequence
  Oligonucleotide primer for the detection of SNP TSC0034310
ttaatgagggag

SEQ ID NO: 328454 - DNA, 12 bp, Artificial Sequence
  Oligonucleotide primer for the detection of SNP TSC0034311
ccctcatacccc

SEQ ID NO: 328455 - DNA, 12 bp, Artificial Sequence
  Oligonucleotide primer for the detection of SNP TSC0034312
caaaacaaaaca

SEQ ID NO: 328456 - DNA, 12 bp, Artificial Sequence
  Oligonucleotide primer for the detection of SNP TSC0034312
taggataaaata

SEQ ID NO: 328457 - DNA, 12 bp, Artificial Sequence
  Oligonucleotide primer for the detection of SNP TSC0034313
actatatccaat

SEQ ID NO: 328458 - DNA, 12 bp, Artificial Sequence
  Oligonucleotide primer for the detection of SNP TSC0034313
actatatccgat

SEQ ID NO: 328459 - DNA, 12 bp, Artificial Sequence
  Oligonucleotide primer for the detection of SNP TSC0034313
ttaggttgtagg

SEQ ID NO: 328460 - DNA, 12 bp, Artificial Sequence
  Oligonucleotide primer for the detection of SNP TSC0034314
aaaattaaaacc

SEQ ID NO: 328461 - DNA, 12 bp, Artificial Sequence
  Oligonucleotide primer for the detection of SNP TSC0034314
cccaccccctcc

SEQ ID NO: 328462 - DNA, 12 bp, Artificial Sequence
  Oligonucleotide primer for the detection of SNP TSC0034314
cccgccccctcc

SEQ ID NO: 328463 - DNA, 12 bp, Artificial Sequence
  Oligonucleotide primer for the detection of SNP TSC0034314
aagattggagtt

SEQ ID NO: 328464 - DNA, 12 bp, Artificial Sequence
  Oligonucleotide primer for the detection of SNP TSC0034314
aagattggagtc

SEQ ID NO: 328465 - DNA, 12 bp, Artificial Sequence
  Oligonucleotide primer for the detection of SNP TSC0034317
aacaccaacaaa

SEQ ID NO: 328466 - DNA, 12 bp, Artificial Sequence
  Oligonucleotide primer for the detection of SNP TSC0034317
ttggggaatttt

SEQ ID NO: 328467 - DNA, 12 bp, Artificial Sequence
  Oligonucleotide primer for the detection of SNP TSC0034317
tcggggaatttt

SEQ ID NO: 328468 - DNA, 12 bp, Artificial Sequence
  Oligonucleotide primer for the detection of SNP TSC0034317
ccgaaaaatttt

SEQ ID NO: 328469 - DNA, 12 bp, Artificial Sequence
  Oligonucleotide primer for the detection of SNP TSC0034317
aaaatattagta

SEQ ID NO: 328470 - DNA, 12 bp, Artificial Sequence
  Oligonucleotide primer for the detection of SNP TSC0034318
tataacaaacct

SEQ ID NO: 328471 - DNA, 12 bp, Artificial Sequence
  Oligonucleotide primer for the detection of SNP TSC0034318
agtatatagtta

SEQ ID NO: 328472 - DNA, 12 bp, Artificial Sequence
  Oligonucleotide primer for the detection of SNP TSC0034318
aacacacaacta

SEQ ID NO: 328473 - DNA, 12 bp, Artificial Sequence
  Oligonucleotide primer for the detection of SNP TSC0034318
tataataagttt

SEQ ID NO: 328474 - DNA, 12 bp, Artificial Sequence
  Oligonucleotide primer for the detection of SNP TSC0034319
ctcaaaaatttt

SEQ ID NO: 328475 - DNA, 12 bp, Artificial Sequence
  Oligonucleotide primer for the detection of SNP TSC0034321
acaaatcatccc

SEQ ID NO: 328476 - DNA, 12 bp, Artificial Sequence
  Oligonucleotide primer for the detection of SNP TSC0034321
ttggtatattag

SEQ ID NO: 328477 - DNA, 12 bp, Artificial Sequence
  Oligonucleotide primer for the detection of SNP TSC0034321
ctaatatattaa

SEQ ID NO: 328478 - DNA, 12 bp, Artificial Sequence
  Oligonucleotide primer for the detection of SNP TSC0034325
ccaaacaatccc

SEQ ID NO: 328479 - DNA, 12 bp, Artificial Sequence
  Oligonucleotide primer for the detection of SNP TSC0034325
ttatttttggaa

SEQ ID NO: 328480 - DNA, 12 bp, Artificial Sequence
  Oligonucleotide primer for the detection of SNP TSC0034326
ttatcactatct

SEQ ID NO: 328481 - DNA, 12 bp, Artificial Sequence
  Oligonucleotide primer for the detection of SNP TSC0034326
agtttatttagt

SEQ ID NO: 328482 - DNA, 12 bp, Artificial Sequence
  Oligonucleotide primer for the detection of SNP TSC0034326
aaattcacccaa

SEQ ID NO: 328483 - DNA, 12 bp, Artificial Sequence
  Oligonucleotide primer for the detection of SNP TSC0034333
taaatccccttt

SEQ ID NO: 328484 - DNA, 12 bp, Artificial Sequence
  Oligonucleotide primer for the detection of SNP TSC0034333
ggggttagaaga

SEQ ID NO: 328485 - DNA, 12 bp, Artificial Sequence
  Oligonucleotide primer for the detection of SNP TSC0034334
gtatttgaaatt

SEQ ID NO: 328486 - DNA, 12 bp, Artificial Sequence
  Oligonucleotide primer for the detection of SNP TSC0034334
ttatatttaaaa

SEQ ID NO: 328487 - DNA, 12 bp, Artificial Sequence
  Oligonucleotide primer for the detection of SNP TSC0034334
aattgtggaatg

SEQ ID NO: 328488 - DNA, 12 bp, Artificial Sequence
  Oligonucleotide primer for the detection of SNP TSC0034335
ccacttttctaa

SEQ ID NO: 328489 - DNA, 12 bp, Artificial Sequence
  Oligonucleotide primer for the detection of SNP TSC0034335
gttgtagtgtag

SEQ ID NO: 328490 - DNA, 12 bp, Artificial Sequence
  Oligonucleotide primer for the detection of SNP TSC0034335
actacaatacaa

SEQ ID NO: 328491 - DNA, 12 bp, Artificial Sequence
  Oligonucleotide primer for the detection of SNP TSC0034344
ctaaactacata

SEQ ID NO: 328492 - DNA, 12 bp, Artificial Sequence
  Oligonucleotide primer for the detection of SNP TSC0034344
taatttattgtt

SEQ ID NO: 328493 - DNA, 12 bp, Artificial Sequence
  Oligonucleotide primer for the detection of SNP TSC0034344
caacctattacc

SEQ ID NO: 328494 - DNA, 12 bp, Artificial Sequence
  Oligonucleotide primer for the detection of SNP TSC0034344
ttgggttgtatg

SEQ ID NO: 328495 - DNA, 12 bp, Artificial Sequence
  Oligonucleotide primer for the detection of SNP TSC0034347
gaaaaaaaataa

SEQ ID NO: 328496 - DNA, 12 bp, Artificial Sequence
  Oligonucleotide primer for the detection of SNP TSC0034347
ttggtttttatt

SEQ ID NO: 328497 - DNA, 12 bp, Artificial Sequence
  Oligonucleotide primer for the detection of SNP TSC0034347
ctaatttctacc

SEQ ID NO: 328498 - DNA, 12 bp, Artificial Sequence
  Oligonucleotide primer for the detection of SNP TSC0034347
gaagaggaatgg

SEQ ID NO: 328499 - DNA, 12 bp, Artificial Sequence
  Oligonucleotide primer for the detection of SNP TSC0034348
ccattcctcttc

SEQ ID NO: 328500 - DNA, 12 bp, Artificial Sequence
  Oligonucleotide primer for the detection of SNP TSC0034348
agaggatggagg

SEQ ID NO: 328501 - DNA, 12 bp, Artificial Sequence
  Oligonucleotide primer for the detection of SNP TSC0034353
tgggtttaagta

SEQ ID NO: 328502 - DNA, 12 bp, Artificial Sequence
  Oligonucleotide primer for the detection of SNP TSC0034359
taccaacaacac

SEQ ID NO: 328503 - DNA, 12 bp, Artificial Sequence
  Oligonucleotide primer for the detection of SNP TSC0034359
aattggttttta

SEQ ID NO: 328504 - DNA, 12 bp, Artificial Sequence
  Oligonucleotide primer for the detection of SNP TSC0034359
aatcggttttta

SEQ ID NO: 328505 - DNA, 12 bp, Artificial Sequence
  Oligonucleotide primer for the detection of SNP TSC0034359
aaccaatctcca

SEQ ID NO: 328506 - DNA, 12 bp, Artificial Sequence
  Oligonucleotide primer for the detection of SNP TSC0034359
aaccgatctcca

SEQ ID NO: 328507 - DNA, 12 bp, Artificial Sequence
  Oligonucleotide primer for the detection of SNP TSC0034359
tgttagtagtat

SEQ ID NO: 328508 - DNA, 12 bp, Artificial Sequence
  Oligonucleotide primer for the detection of SNP TSC0034362
ataaatattact

SEQ ID NO: 328509 - DNA, 12 bp, Artificial Sequence
  Oligonucleotide primer for the detection of SNP TSC0034362
ggtattttgagg

SEQ ID NO: 328510 - DNA, 12 bp, Artificial Sequence
  Oligonucleotide primer for the detection of SNP TSC0034363
aaataacacttt

SEQ ID NO: 328511 - DNA, 12 bp, Artificial Sequence
  Oligonucleotide primer for the detection of SNP TSC0034363
ggagaaaaagag

SEQ ID NO: 328512 - DNA, 12 bp, Artificial Sequence
  Oligonukleotid-Primer
gagtggtatttt

SEQ ID NO: 328513 - DNA, 12 bp, Artificial Sequence
  Oligonucleotide primer for the detection of SNP TSC0034364
tagtttttagtg

SEQ ID NO: 328514 - DNA, 12 bp, Artificial Sequence
  Oligonucleotide primer for the detection of SNP TSC0034365
actcatacaatc

SEQ ID NO: 328515 - DNA, 12 bp, Artificial Sequence
  Oligonucleotide primer for the detection of SNP TSC0034365
gtttgaggtggg

SEQ ID NO: 328516 - DNA, 12 bp, Artificial Sequence
  Oligonukleotid-Primer
gttcgaggtggg

SEQ ID NO: 328517 - DNA, 12 bp, Artificial Sequence
  Oligonucleotide primer for the detection of SNP TSC0034365
gtttgaggcggg

SEQ ID NO: 328518 - DNA, 12 bp, Artificial Sequence
  Oligonucleotide primer for the detection of SNP TSC0034365
gttcgaggcggg

SEQ ID NO: 328519 - DNA, 12 bp, Artificial Sequence
  Oligonucleotide primer for the detection of SNP TSC0034365
actcaaaacaaa

SEQ ID NO: 328520 - DNA, 12 bp, Artificial Sequence
  Oligonucleotide primer for the detection of SNP TSC0034365
actcaaaacgaa

SEQ ID NO: 328521 - DNA, 12 bp, Artificial Sequence
  Oligonucleotide primer for the detection of SNP TSC0034365
actcgaaacaaa

SEQ ID NO: 328522 - DNA, 12 bp, Artificial Sequence
  Oligonucleotide primer for the detection of SNP TSC0034365
actcgaaacgaa

SEQ ID NO: 328523 - DNA, 12 bp, Artificial Sequence
  Oligonucleotide primer for the detection of SNP TSC0034365
gtttatgtaatt

SEQ ID NO: 328524 - DNA, 12 bp, Artificial Sequence
  Oligonucleotide primer for the detection of SNP TSC0034366
cccaactaaatt

SEQ ID NO: 328525 - DNA, 12 bp, Artificial Sequence
  Oligonucleotide primer for the detection of SNP TSC0034366
cccgactaaatt

SEQ ID NO: 328526 - DNA, 12 bp, Artificial Sequence
  Oligonucleotide primer for the detection of SNP TSC0034366
tttggttaaatt

SEQ ID NO: 328527 - DNA, 12 bp, Artificial Sequence
  Oligonucleotide primer for the detection of SNP TSC0034366
ttcggttaaatt

SEQ ID NO: 328528 - DNA, 12 bp, Artificial Sequence
  Oligonucleotide primer for the detection of SNP TSC0034367
aatatccaaaaa

SEQ ID NO: 328529 - DNA, 12 bp, Artificial Sequence
  Oligonucleotide primer for the detection of SNP TSC0034367
taactcccctat

SEQ ID NO: 328530 - DNA, 12 bp, Artificial Sequence
  Oligonucleotide primer for the detection of SNP TSC0034367
ggataatgttta

SEQ ID NO: 328531 - DNA, 12 bp, Artificial Sequence
  Oligonucleotide primer for the detection of SNP TSC0034368
cttaatacaata

SEQ ID NO: 328532 - DNA, 12 bp, Artificial Sequence
  Oligonucleotide primer for the detection of SNP TSC0034368
tttagagatatg

SEQ ID NO: 328533 - DNA, 12 bp, Artificial Sequence
  Oligonucleotide primer for the detection of SNP TSC0034371
attacttaaacc

SEQ ID NO: 328534 - DNA, 12 bp, Artificial Sequence
  Oligonucleotide primer for the detection of SNP TSC0034371
tgtttttttgaa

SEQ ID NO: 328535 - DNA, 12 bp, Artificial Sequence
  Oligonucleotide primer for the detection of SNP TSC0034375
aataatacacac

SEQ ID NO: 328536 - DNA, 12 bp, Artificial Sequence
  Oligonucleotide primer for the detection of SNP TSC0034376
ttttcaaattac

SEQ ID NO: 328537 - DNA, 12 bp, Artificial Sequence
  Oligonucleotide primer for the detection of SNP TSC0034376
taattttttgag

SEQ ID NO: 328538 - DNA, 12 bp, Artificial Sequence
  Oligonucleotide primer for the detection of SNP TSC0034377
ttctctccctcc

SEQ ID NO: 328539 - DNA, 12 bp, Artificial Sequence
  Oligonucleotide primer for the detection of SNP TSC0034377
ggaagaaaagga

SEQ ID NO: 328540 - DNA, 12 bp, Artificial Sequence
  Oligonucleotide primer for the detection of SNP TSC0034378
atgtgtgggagg

SEQ ID NO: 328541 - DNA, 12 bp, Artificial Sequence
  Oligonucleotide primer for the detection of SNP TSC0034382
ataaatataaat

SEQ ID NO: 328542 - DNA, 12 bp, Artificial Sequence
  Oligonucleotide primer for the detection of SNP TSC0034382
tgaaaaagaaaa

SEQ ID NO: 328543 - DNA, 12 bp, Artificial Sequence
  Oligonucleotide primer for the detection of SNP TSC0034383
acccttaaaaaa

SEQ ID NO: 328544 - DNA, 12 bp, Artificial Sequence
  Oligonucleotide primer for the detection of SNP TSC0034383
taaaattttgtc

SEQ ID NO: 328545 - DNA, 12 bp, Artificial Sequence
  Oligonucleotide primer for the detection of SNP TSC0034383
aaaatcctaccg

SEQ ID NO: 328546 - DNA, 12 bp, Artificial Sequence
  Oligonucleotide primer for the detection of SNP TSC0034383
agttgattttta

SEQ ID NO: 328547 - DNA, 12 bp, Artificial Sequence
  Oligonucleotide primer for the detection of SNP TSC0034384
cacaaccaataa

SEQ ID NO: 328548 - DNA, 12 bp, Artificial Sequence
  Oligonucleotide primer for the detection of SNP TSC0034384
aaaccaatcttc

SEQ ID NO: 328549 - DNA, 12 bp, Artificial Sequence
  Oligonucleotide primer for the detection of SNP TSC0034384
agttagtgattt

SEQ ID NO: 328550 - DNA, 12 bp, Artificial Sequence
  Oligonucleotide primer for the detection of SNP TSC0034386
atataaacctcc

SEQ ID NO: 328551 - DNA, 12 bp, Artificial Sequence
  Oligonucleotide primer for the detection of SNP TSC0034386
gagaaatatatt

SEQ ID NO: 328552 - DNA, 12 bp, Artificial Sequence
  Oligonucleotide primer for the detection of SNP TSC0034386
gagaaatatatc

SEQ ID NO: 328553 - DNA, 12 bp, Artificial Sequence
  Oligonucleotide primer for the detection of SNP TSC0034386
aaaaaatatacc

SEQ ID NO: 328554 - DNA, 12 bp, Artificial Sequence
  Oligonucleotide primer for the detection of SNP TSC0034389
caaaatcacaat

SEQ ID NO: 328555 - DNA, 12 bp, Artificial Sequence
  Oligonucleotide primer for the detection of SNP TSC0034389
caaaatcacgat

SEQ ID NO: 328556 - DNA, 12 bp, Artificial Sequence
  Oligonucleotide primer for the detection of SNP TSC0034389
agtgtggttttg

SEQ ID NO: 328557 - DNA, 12 bp, Artificial Sequence
  Oligonucleotide primer for the detection of SNP TSC0034389
agcgtggttttg

SEQ ID NO: 328558 - DNA, 12 bp, Artificial Sequence
  Oligonucleotide primer for the detection of SNP TSC0034389
agtgcggttttg

SEQ ID NO: 328559 - DNA, 12 bp, Artificial Sequence
  Oligonucleotide primer for the detection of SNP TSC0034389
agcgcggttttg

SEQ ID NO: 328560 - DNA, 12 bp, Artificial Sequence
  Oligonucleotide primer for the detection of SNP TSC0034389
aacacaacctta

SEQ ID NO: 328561 - DNA, 12 bp, Artificial Sequence
  Oligonucleotide primer for the detection of SNP TSC0034389
aacacgacctta

SEQ ID NO: 328562 - DNA, 12 bp, Artificial Sequence
  Oligonucleotide primer for the detection of SNP TSC0034389
aacgcaacctta

SEQ ID NO: 328563 - DNA, 12 bp, Artificial Sequence
  Oligonucleotide primer for the detection of SNP TSC0034389
aacgcgacctta

SEQ ID NO: 328564 - DNA, 12 bp, Artificial Sequence
  Oligonucleotide primer for the detection of SNP TSC0034389
taagattatgat

SEQ ID NO: 328565 - DNA, 12 bp, Artificial Sequence
  Oligonucleotide primer for the detection of SNP TSC0034389
taagattacgat

SEQ ID NO: 328566 - DNA, 12 bp, Artificial Sequence
  Oligonucleotide primer for the detection of SNP TSC0034390
caatatttctat

SEQ ID NO: 328567 - DNA, 12 bp, Artificial Sequence
  Oligonucleotide primer for the detection of SNP TSC0034390
cgatatttctat

SEQ ID NO: 328568 - DNA, 12 bp, Artificial Sequence
  Oligonucleotide primer for the detection of SNP TSC0034390
tggtttgttgtg

SEQ ID NO: 328569 - DNA, 12 bp, Artificial Sequence
  Oligonucleotide primer for the detection of SNP TSC0034390
tggttcgttgtg

SEQ ID NO: 328570 - DNA, 12 bp, Artificial Sequence
  Oligonucleotide primer for the detection of SNP TSC0034390
tggtttgtcgtg

SEQ ID NO: 328571 - DNA, 12 bp, Artificial Sequence
  Oligonucleotide primer for the detection of SNP TSC0034390
tggttcgtcgtg

SEQ ID NO: 328572 - DNA, 12 bp, Artificial Sequence
  Oligonucleotide primer for the detection of SNP TSC0034391
tttacttccctt

SEQ ID NO: 328573 - DNA, 12 bp, Artificial Sequence
  Oligonucleotide primer for the detection of SNP TSC0034392
catttaaataac

SEQ ID NO: 328574 - DNA, 12 bp, Artificial Sequence
  Oligonucleotide primer for the detection of SNP TSC0034392
aatgttttgggg

SEQ ID NO: 328575 - DNA, 12 bp, Artificial Sequence
  Oligonucleotide primer for the detection of SNP TSC0034394
tatactaaatat

SEQ ID NO: 328576 - DNA, 12 bp, Artificial Sequence
  Oligonucleotide primer for the detection of SNP TSC0034395
acctaataaatc

SEQ ID NO: 328577 - DNA, 12 bp, Artificial Sequence
  Oligonucleotide primer for the detection of SNP TSC0034395
ggtttattttag

SEQ ID NO: 328578 - DNA, 12 bp, Artificial Sequence
  Oligonucleotide primer for the detection of SNP TSC0034395
atttagtaaatt

SEQ ID NO: 328579 - DNA, 12 bp, Artificial Sequence
  Oligonucleotide primer for the detection of SNP TSC0034400
tctaaactcatt

SEQ ID NO: 328580 - DNA, 12 bp, Artificial Sequence
  Oligonucleotide primer for the detection of SNP TSC0034400
atgttaattagt

SEQ ID NO: 328581 - DNA, 12 bp, Artificial Sequence
  Oligonucleotide primer for the detection of SNP TSC0034400
tactaattaata

SEQ ID NO: 328582 - DNA, 12 bp, Artificial Sequence
  Oligonucleotide primer for the detection of SNP TSC0034400
tttaaatttatt

SEQ ID NO: 328583 - DNA, 12 bp, Artificial Sequence
  Oligonucleotide primer for the detection of SNP TSC0034402
tcctcaaactat

SEQ ID NO: 328584 - DNA, 12 bp, Artificial Sequence
  Oligonucleotide primer for the detection of SNP TSC0034402
tttttttgaata

SEQ ID NO: 328585 - DNA, 12 bp, Artificial Sequence
  Oligonucleotide primer for the detection of SNP TSC0034403
taatactaaaac

SEQ ID NO: 328586 - DNA, 12 bp, Artificial Sequence
  Oligonucleotide primer for the detection of SNP TSC0034403
ataatttttagg

SEQ ID NO: 328587 - DNA, 12 bp, Artificial Sequence
  Oligonucleotide primer for the detection of SNP TSC0034403
ataatccttaaa

SEQ ID NO: 328588 - DNA, 12 bp, Artificial Sequence
  Oligonucleotide primer for the detection of SNP TSC0034404
aattatactttc

SEQ ID NO: 328589 - DNA, 12 bp, Artificial Sequence
  Oligonucleotide primer for the detection of SNP TSC0034404
tttagtattgga

SEQ ID NO: 328590 - DNA, 12 bp, Artificial Sequence
  Oligonucleotide primer for the detection of SNP TSC0034405
actttaaaaact

SEQ ID NO: 328591 - DNA, 12 bp, Artificial Sequence
  Oligonucleotide primer for the detection of SNP TSC0034405
atgtatataatg

SEQ ID NO: 328592 - DNA, 12 bp, Artificial Sequence
  Oligonucleotide primer for the detection of SNP TSC0034405
acgtatataatg

SEQ ID NO: 328593 - DNA, 12 bp, Artificial Sequence
  Oligonucleotide primer for the detection of SNP TSC0034407
aaactcatacta

SEQ ID NO: 328594 - DNA, 12 bp, Artificial Sequence
  Oligonucleotide primer for the detection of SNP TSC0034407
tggagttgattt

SEQ ID NO: 328595 - DNA, 12 bp, Artificial Sequence
  Oligonucleotide primer for the detection of SNP TSC0034407
tggagttgattc

SEQ ID NO: 328596 - DNA, 12 bp, Artificial Sequence
  Oligonucleotide primer for the detection of SNP TSC0034407
tagatttatgtt

SEQ ID NO: 328597 - DNA, 12 bp, Artificial Sequence
  Oligonucleotide primer for the detection of SNP TSC0034408
attgtttattag

SEQ ID NO: 328598 - DNA, 12 bp, Artificial Sequence
  Oligonucleotide primer for the detection of SNP TSC0034409
ggtattttgatg

SEQ ID NO: 328599 - DNA, 12 bp, Artificial Sequence
  Oligonucleotide primer for the detection of SNP TSC0034409
aacactctaata

SEQ ID NO: 328600 - DNA, 12 bp, Artificial Sequence
  Oligonucleotide primer for the detection of SNP TSC0034409
ttaggaataaag

SEQ ID NO: 328601 - DNA, 12 bp, Artificial Sequence
  Oligonucleotide primer for the detection of SNP TSC0034410
atttgtattgga

SEQ ID NO: 328602 - DNA, 12 bp, Artificial Sequence
  Oligonucleotide primer for the detection of SNP TSC0034411
ctaattcaacac

SEQ ID NO: 328603 - DNA, 12 bp, Artificial Sequence
  Oligonucleotide primer for the detection of SNP TSC0034411
ttgatttaatat

SEQ ID NO: 328604 - DNA, 12 bp, Artificial Sequence
  Oligonucleotide primer for the detection of SNP TSC0034412
cctcaaacaatc

SEQ ID NO: 328605 - DNA, 12 bp, Artificial Sequence
  Oligonucleotide primer for the detection of SNP TSC0034412
ggttgaggcggg

SEQ ID NO: 328606 - DNA, 12 bp, Artificial Sequence
  Oligonucleotide primer for the detection of SNP TSC0034412
ttttaggtaatt

SEQ ID NO: 328607 - DNA, 12 bp, Artificial Sequence
  Oligonucleotide primer for the detection of SNP TSC0034415
aaacgaaacaaa

SEQ ID NO: 328608 - DNA, 12 bp, Artificial Sequence
  Oligonucleotide primer for the detection of SNP TSC0034415
aaacgaaacgaa

SEQ ID NO: 328609 - DNA, 12 bp, Artificial Sequence
  Oligonucleotide primer for the detection of SNP TSC0034415
cccacttctccc

SEQ ID NO: 328610 - DNA, 12 bp, Artificial Sequence
  Oligonucleotide primer for the detection of SNP TSC0034415
gggtggggtgag

SEQ ID NO: 328611 - DNA, 12 bp, Artificial Sequence
  Oligonucleotide primer for the detection of SNP TSC0034415
gggcggggtgag

SEQ ID NO: 328612 - DNA, 12 bp, Artificial Sequence
  Oligonucleotide primer for the detection of SNP TSC0034415
gggtggggcgag

SEQ ID NO: 328613 - DNA, 12 bp, Artificial Sequence
  Oligonucleotide primer for the detection of SNP TSC0034415
gggcggggcgag

SEQ ID NO: 328614 - DNA, 12 bp, Artificial Sequence
  Oligonucleotide primer for the detection of SNP TSC0034416
ccccctcacccc

SEQ ID NO: 328615 - DNA, 12 bp, Artificial Sequence
  Oligonucleotide primer for the detection of SNP TSC0034416
ccccctcgcccc

SEQ ID NO: 328616 - DNA, 12 bp, Artificial Sequence
  Oligonucleotide primer for the detection of SNP TSC0034416
gtggaggtaggg

SEQ ID NO: 328617 - DNA, 12 bp, Artificial Sequence
  Oligonucleotide primer for the detection of SNP TSC0034416
gcggaggtaggg

SEQ ID NO: 328618 - DNA, 12 bp, Artificial Sequence
  Oligonucleotide primer for the detection of SNP TSC0034417
ttatgttgttat

SEQ ID NO: 328619 - DNA, 12 bp, Artificial Sequence
  Oligonucleotide primer for the detection of SNP TSC0034417
ttacgttgttat

SEQ ID NO: 328620 - DNA, 12 bp, Artificial Sequence
  Oligonucleotide primer for the detection of SNP TSC0034417
ttacactaccat

SEQ ID NO: 328621 - DNA, 12 bp, Artificial Sequence
  Oligonucleotide primer for the detection of SNP TSC0034417
ttacgctaccat

SEQ ID NO: 328622 - DNA, 12 bp, Artificial Sequence
  Oligonucleotide primer for the detection of SNP TSC0034417
aaggggtttgta

SEQ ID NO: 328623 - DNA, 12 bp, Artificial Sequence
  Oligonucleotide primer for the detection of SNP TSC0034418
ctatcacccacc

SEQ ID NO: 328624 - DNA, 12 bp, Artificial Sequence
  Oligonucleotide primer for the detection of SNP TSC0034418
gtaggtgttaag

SEQ ID NO: 328625 - DNA, 12 bp, Artificial Sequence
  Oligonucleotide primer for the detection of SNP TSC0034420
aactacttaaca

SEQ ID NO: 328626 - DNA, 12 bp, Artificial Sequence
  Oligonucleotide primer for the detection of SNP TSC0034420
attttttgatag

SEQ ID NO: 328627 - DNA, 12 bp, Artificial Sequence
  Oligonucleotide primer for the detection of SNP TSC0034420
aattgtttagta

SEQ ID NO: 328628 - DNA, 12 bp, Artificial Sequence
  Oligonucleotide primer for the detection of SNP TSC0034423
aaattcattctc

SEQ ID NO: 328629 - DNA, 12 bp, Artificial Sequence
  Oligonucleotide primer for the detection of SNP TSC0034423
aatatggattag

SEQ ID NO: 328630 - DNA, 12 bp, Artificial Sequence
  Oligonucleotide primer for the detection of SNP TSC0034426
acattcttccat

SEQ ID NO: 328631 - DNA, 12 bp, Artificial Sequence
  Oligonucleotide primer for the detection of SNP TSC0034426
acattcttccgt

SEQ ID NO: 328632 - DNA, 12 bp, Artificial Sequence
  Oligonucleotide primer for the detection of SNP TSC0034429
cattctaactcc

SEQ ID NO: 328633 - DNA, 12 bp, Artificial Sequence
  Oligonucleotide primer for the detection of SNP TSC0034429
agtttttagaga

SEQ ID NO: 328634 - DNA, 12 bp, Artificial Sequence
  Oligonucleotide primer for the detection of SNP TSC0034432
ataccccttcta

SEQ ID NO: 328635 - DNA, 12 bp, Artificial Sequence
  Oligonucleotide primer for the detection of SNP TSC0034432
aatgtgtttgga

SEQ ID NO: 328636 - DNA, 12 bp, Artificial Sequence
  Oligonucleotide primer for the detection of SNP TSC0034432
aacgtgtttgga

SEQ ID NO: 328637 - DNA, 12 bp, Artificial Sequence
  Oligonucleotide primer for the detection of SNP TSC0034432
aacgtacttaaa

SEQ ID NO: 328638 - DNA, 12 bp, Artificial Sequence
  Oligonucleotide primer for the detection of SNP TSC0034432
gtgttttttttg

SEQ ID NO: 328639 - DNA, 12 bp, Artificial Sequence
  Oligonucleotide primer for the detection of SNP TSC0034435
atactacatcac

SEQ ID NO: 328640 - DNA, 12 bp, Artificial Sequence
  Oligonucleotide primer for the detection of SNP TSC0034435
aggagagtagag

SEQ ID NO: 328641 - DNA, 12 bp, Artificial Sequence
  Oligonucleotide primer for the detection of SNP TSC0034436
tcacaaacaacc

SEQ ID NO: 328642 - DNA, 12 bp, Artificial Sequence
  Oligonucleotide primer for the detection of SNP TSC0034436
ggggagttaggg

SEQ ID NO: 328643 - DNA, 12 bp, Artificial Sequence
  Oligonucleotide primer for the detection of SNP TSC0034437
cacaatcataat

SEQ ID NO: 328644 - DNA, 12 bp, Artificial Sequence
  Oligonucleotide primer for the detection of SNP TSC0034437
tttaggttataa

SEQ ID NO: 328645 - DNA, 12 bp, Artificial Sequence
  Oligonucleotide primer for the detection of SNP TSC0034437
tccaaactataa

SEQ ID NO: 328646 - DNA, 12 bp, Artificial Sequence
  Oligonucleotide primer for the detection of SNP TSC0034437
tataattatggt

SEQ ID NO: 328647 - DNA, 12 bp, Artificial Sequence
  Oligonucleotide primer for the detection of SNP TSC0034438
tattttctattt

SEQ ID NO: 328648 - DNA, 12 bp, Artificial Sequence
  Oligonucleotide primer for the detection of SNP TSC0034438
gaaattttttta

SEQ ID NO: 328649 - DNA, 12 bp, Artificial Sequence
  Oligonucleotide primer for the detection of SNP TSC0034439
gaaaacaaatcc

SEQ ID NO: 328650 - DNA, 12 bp, Artificial Sequence
  Oligonucleotide primer for the detection of SNP TSC0034439
aagtggttgatg

SEQ ID NO: 328651 - DNA, 12 bp, Artificial Sequence
  Oligonucleotide primer for the detection of SNP TSC0034439
aagcggttgatg

SEQ ID NO: 328652 - DNA, 12 bp, Artificial Sequence
  Oligonucleotide primer for the detection of SNP TSC0034439
aagtggtcgatg

SEQ ID NO: 328653 - DNA, 12 bp, Artificial Sequence
  Oligonucleotide primer for the detection of SNP TSC0034439
aagtggttgacg

SEQ ID NO: 328654 - DNA, 12 bp, Artificial Sequence
  Oligonucleotide primer for the detection of SNP TSC0034439
aagcggtcgatg

SEQ ID NO: 328655 - DNA, 12 bp, Artificial Sequence
  Oligonucleotide primer for the detection of SNP TSC0034439
aagcggttgacg

SEQ ID NO: 328656 - DNA, 12 bp, Artificial Sequence
  Oligonucleotide primer for the detection of SNP TSC0034439
aagtggtcgacg

SEQ ID NO: 328657 - DNA, 12 bp, Artificial Sequence
  Oligonucleotide primer for the detection of SNP TSC0034439
aagcggtcgacg

SEQ ID NO: 328658 - DNA, 12 bp, Artificial Sequence
  Oligonucleotide primer for the detection of SNP TSC0034440
caaccaatcaat

SEQ ID NO: 328659 - DNA, 12 bp, Artificial Sequence
  Oligonucleotide primer for the detection of SNP TSC0034440
ttttttaagata

SEQ ID NO: 328660 - DNA, 12 bp, Artificial Sequence
  Oligonucleotide primer for the detection of SNP TSC0034441
gttttttaggtt

SEQ ID NO: 328661 - DNA, 12 bp, Artificial Sequence
  Oligonucleotide primer for the detection of SNP TSC0034441
ctacctcccaaa

SEQ ID NO: 328662 - DNA, 12 bp, Artificial Sequence
  Oligonucleotide primer for the detection of SNP TSC0034441
ggaaaattattt

SEQ ID NO: 328663 - DNA, 12 bp, Artificial Sequence
  Oligonucleotide primer for the detection of SNP TSC0034443
aaaagagagaag

SEQ ID NO: 328664 - DNA, 12 bp, Artificial Sequence
  Oligonucleotide primer for the detection of SNP TSC0034450
tcaaactaacct

SEQ ID NO: 328665 - DNA, 12 bp, Artificial Sequence
  Oligonucleotide primer for the detection of SNP TSC0034452
aaccaacacaac

SEQ ID NO: 328666 - DNA, 12 bp, Artificial Sequence
  Oligonucleotide primer for the detection of SNP TSC0034452
tgtgttgtgttg

SEQ ID NO: 328667 - DNA, 12 bp, Artificial Sequence
  Oligonucleotide primer for the detection of SNP TSC0034452
tatactatacta

SEQ ID NO: 328668 - DNA, 12 bp, Artificial Sequence
  Oligonucleotide primer for the detection of SNP TSC0034452
ggttaatatagt

SEQ ID NO: 328669 - DNA, 12 bp, Artificial Sequence
  Oligonucleotide primer for the detection of SNP TSC0034453
tatccctaaaat

SEQ ID NO: 328670 - DNA, 12 bp, Artificial Sequence
  Oligonucleotide primer for the detection of SNP TSC0034453
agggaaaggtgg

SEQ ID NO: 328671 - DNA, 12 bp, Artificial Sequence
  Oligonucleotide primer for the detection of SNP TSC0034458
atttcccatcaa

SEQ ID NO: 328672 - DNA, 12 bp, Artificial Sequence
  Oligonucleotide primer for the detection of SNP TSC0034458
gaaattaatttt

SEQ ID NO: 328673 - DNA, 12 bp, Artificial Sequence
  Oligonucleotide primer for the detection of SNP TSC0034458
taaaaattaatc

SEQ ID NO: 328674 - DNA, 12 bp, Artificial Sequence
  Oligonucleotide primer for the detection of SNP TSC0034458
tgattttttatt

SEQ ID NO: 328675 - DNA, 12 bp, Artificial Sequence
  Oligonucleotide primer for the detection of SNP TSC0034459
gggtttgggtaa

SEQ ID NO: 328676 - DNA, 12 bp, Artificial Sequence
  Oligonucleotide primer for the detection of SNP TSC0034462
actatatataca

SEQ ID NO: 328677 - DNA, 12 bp, Artificial Sequence
  Oligonucleotide primer for the detection of SNP TSC0034462
tttgggatatat

SEQ ID NO: 328678 - DNA, 12 bp, Artificial Sequence
  Oligonucleotide primer for the detection of SNP TSC0034462
tttgggatatac

SEQ ID NO: 328679 - DNA, 12 bp, Artificial Sequence
  Oligonucleotide primer for the detection of SNP TSC0034462
attgtgtgtgta

SEQ ID NO: 328680 - DNA, 12 bp, Artificial Sequence
  Oligonucleotide primer for the detection of SNP TSC0034465
aaattcaacatc

SEQ ID NO: 328681 - DNA, 12 bp, Artificial Sequence
  Oligonucleotide primer for the detection of SNP TSC0034465
aaaatttttatt

SEQ ID NO: 328682 - DNA, 12 bp, Artificial Sequence
  Oligonucleotide primer for the detection of SNP TSC0034465
aaatttaatatt

SEQ ID NO: 328683 - DNA, 12 bp, Artificial Sequence
  Oligonucleotide primer for the detection of SNP TSC0034468
caccacaaccaa

SEQ ID NO: 328684 - DNA, 12 bp, Artificial Sequence
  Oligonucleotide primer for the detection of SNP TSC0034468
caccacaaccga

SEQ ID NO: 328685 - DNA, 12 bp, Artificial Sequence
  Oligonucleotide primer for the detection of SNP TSC0034468
aaataaatattt

SEQ ID NO: 328686 - DNA, 12 bp, Artificial Sequence
  Oligonucleotide primer for the detection of SNP TSC0034468
aaacaaacattt

SEQ ID NO: 328687 - DNA, 12 bp, Artificial Sequence
  Oligonucleotide primer for the detection of SNP TSC0034468
tattatagttgg

SEQ ID NO: 328688 - DNA, 12 bp, Artificial Sequence
  Oligonucleotide primer for the detection of SNP TSC0034468
tattatagtcgg

SEQ ID NO: 328689 - DNA, 12 bp, Artificial Sequence
  Oligonucleotide primer for the detection of SNP TSC0034469
tgggttttttcg

SEQ ID NO: 328690 - DNA, 12 bp, Artificial Sequence
  Oligonucleotide primer for the detection of SNP TSC0034471
tgattgataagt

SEQ ID NO: 328691 - DNA, 12 bp, Artificial Sequence
  Oligonucleotide primer for the detection of SNP TSC0034471
cgattgataagt

SEQ ID NO: 328692 - DNA, 12 bp, Artificial Sequence
  Oligonucleotide primer for the detection of SNP TSC0034471
tgattgataagc

SEQ ID NO: 328693 - DNA, 12 bp, Artificial Sequence
  Oligonucleotide primer for the detection of SNP TSC0034471
cgattgataagc

SEQ ID NO: 328694 - DNA, 12 bp, Artificial Sequence
  Oligonucleotide primer for the detection of SNP TSC0034471
caactaataaac

SEQ ID NO: 328695 - DNA, 12 bp, Artificial Sequence
  Oligonucleotide primer for the detection of SNP TSC0034471
cgactaataaac

SEQ ID NO: 328696 - DNA, 12 bp, Artificial Sequence
  Oligonucleotide primer for the detection of SNP TSC0034471
taaggaggtttt

SEQ ID NO: 328697 - DNA, 12 bp, Artificial Sequence
  Oligonucleotide primer for the detection of SNP TSC0034473
tacttttatcat

SEQ ID NO: 328698 - DNA, 12 bp, Artificial Sequence
  Oligonucleotide primer for the detection of SNP TSC0034473
atatggaagaag

SEQ ID NO: 328699 - DNA, 12 bp, Artificial Sequence
  Oligonucleotide primer for the detection of SNP TSC0034474
aatactatacta

SEQ ID NO: 328700 - DNA, 12 bp, Artificial Sequence
  Oligonucleotide primer for the detection of SNP TSC0034474
gaagtgattagt

SEQ ID NO: 328701 - DNA, 12 bp, Artificial Sequence
  Oligonucleotide primer for the detection of SNP TSC0034474
agtattgtgttg

SEQ ID NO: 328702 - DNA, 12 bp, Artificial Sequence
  Oligonucleotide primer for the detection of SNP TSC0034481
tctcctaacctc

SEQ ID NO: 328703 - DNA, 12 bp, Artificial Sequence
  Oligonucleotide primer for the detection of SNP TSC0034481
ttttttgatttc

SEQ ID NO: 328704 - DNA, 12 bp, Artificial Sequence
  Oligonucleotide primer for the detection of SNP TSC0034482
ctactaaaaata

SEQ ID NO: 328705 - DNA, 12 bp, Artificial Sequence
  Oligonucleotide primer for the detection of SNP TSC0034483
aataaacaaatc

SEQ ID NO: 328706 - DNA, 12 bp, Artificial Sequence
  Oligonucleotide primer for the detection of SNP TSC0034484
aaaatatccctt

SEQ ID NO: 328707 - DNA, 12 bp, Artificial Sequence
  Oligonucleotide primer for the detection of SNP TSC0034484
ggtaaaatttaa

SEQ ID NO: 328708 - DNA, 12 bp, Artificial Sequence
  Oligonucleotide primer for the detection of SNP TSC0034488
ttccaaatcctt

SEQ ID NO: 328709 - DNA, 12 bp, Artificial Sequence
  Oligonucleotide primer for the detection of SNP TSC0034488
tgagtttatagg

SEQ ID NO: 328710 - DNA, 12 bp, Artificial Sequence
  Oligonucleotide primer for the detection of SNP TSC0034489
gttaacacatct

SEQ ID NO: 328711 - DNA, 12 bp, Artificial Sequence
  Oligonucleotide primer for the detection of SNP TSC0034489
agtagagaggta

SEQ ID NO: 328712 - DNA, 12 bp, Artificial Sequence
  Oligonucleotide primer for the detection of SNP TSC0034489
gttagtatattt

SEQ ID NO: 328713 - DNA, 12 bp, Artificial Sequence
  Oligonucleotide primer for the detection of SNP TSC0034491
aagaaaggaagg

SEQ ID NO: 328714 - DNA, 12 bp, Artificial Sequence
  Oligonucleotide primer for the detection of SNP TSC0034497
aaaaactaaact

SEQ ID NO: 328715 - DNA, 12 bp, Artificial Sequence
  Oligonucleotide primer for the detection of SNP TSC0034497
ttattgagagtg

SEQ ID NO: 328716 - DNA, 12 bp, Artificial Sequence
  Oligonucleotide primer for the detection of SNP TSC0034498
aatctttttttt

SEQ ID NO: 328717 - DNA, 12 bp, Artificial Sequence
  Oligonucleotide primer for the detection of SNP TSC0034499
ttagtaaggttt

SEQ ID NO: 328718 - DNA, 12 bp, Artificial Sequence
  Oligonucleotide primer for the detection of SNP TSC0034499
accaacaaaatc

SEQ ID NO: 328719 - DNA, 12 bp, Artificial Sequence
  Oligonucleotide primer for the detection of SNP TSC0034499
ttttgagagggc

SEQ ID NO: 328720 - DNA, 12 bp, Artificial Sequence
  Oligonucleotide primer for the detection of SNP TSC0034500
agggagggaatg

SEQ ID NO: 328721 - DNA, 12 bp, Artificial Sequence
  Oligonucleotide primer for the detection of SNP TSC0034501
taaaatttcttt

SEQ ID NO: 328722 - DNA, 12 bp, Artificial Sequence
  Oligonucleotide primer for the detection of SNP TSC0034506
attttaacattt

SEQ ID NO: 328723 - DNA, 12 bp, Artificial Sequence
  Oligonucleotide primer for the detection of SNP TSC0034506
tgaagagtaggg

SEQ ID NO: 328724 - DNA, 12 bp, Artificial Sequence
  Oligonucleotide primer for the detection of SNP TSC0034507
aaaaatctaaac

SEQ ID NO: 328725 - DNA, 12 bp, Artificial Sequence
  Oligonucleotide primer for the detection of SNP TSC0034507
atttttgtatat

SEQ ID NO: 328726 - DNA, 12 bp, Artificial Sequence
  Oligonucleotide primer for the detection of SNP TSC0034507
ttctacatacaa

SEQ ID NO: 328727 - DNA, 12 bp, Artificial Sequence
  Oligonucleotide primer for the detection of SNP TSC0034507
gggagtttaggt

SEQ ID NO: 328728 - DNA, 12 bp, Artificial Sequence
  Oligonucleotide primer for the detection of SNP TSC0034507
gggagtttaggc

SEQ ID NO: 328729 - DNA, 12 bp, Artificial Sequence
  Oligonucleotide primer for the detection of SNP TSC0034508
taaaaaataatc

SEQ ID NO: 328730 - DNA, 12 bp, Artificial Sequence
  Oligonucleotide primer for the detection of SNP TSC0034508
tattaataattg

SEQ ID NO: 328731 - DNA, 12 bp, Artificial Sequence
  Oligonucleotide primer for the detection of SNP TSC0034510
ttataaaatacc

SEQ ID NO: 328732 - DNA, 12 bp, Artificial Sequence
  Oligonucleotide primer for the detection of SNP TSC0034510
ttaggtgttata

SEQ ID NO: 328733 - DNA, 12 bp, Artificial Sequence
  Oligonucleotide primer for the detection of SNP TSC0034510
ttaggcgttata

SEQ ID NO: 328734 - DNA, 12 bp, Artificial Sequence
  Oligonucleotide primer for the detection of SNP TSC0034520
ctccaaacattt

SEQ ID NO: 328735 - DNA, 12 bp, Artificial Sequence
  Oligonucleotide primer for the detection of SNP TSC0034520
attacaattcta

SEQ ID NO: 328736 - DNA, 12 bp, Artificial Sequence
  Oligonucleotide primer for the detection of SNP TSC0034522
atcaatcccaca

SEQ ID NO: 328737 - DNA, 12 bp, Artificial Sequence
  Oligonucleotide primer for the detection of SNP TSC0034522
tatccatatatt

SEQ ID NO: 328738 - DNA, 12 bp, Artificial Sequence
  Oligonucleotide primer for the detection of SNP TSC0034522
attaattttata

SEQ ID NO: 328739 - DNA, 12 bp, Artificial Sequence
  Oligonucleotide primer for the detection of SNP TSC0034524
agtattatttgg

SEQ ID NO: 328740 - DNA, 12 bp, Artificial Sequence
  Oligonucleotide primer for the detection of SNP TSC0034525
ttatctatactt

SEQ ID NO: 328741 - DNA, 12 bp, Artificial Sequence
  Oligonucleotide primer for the detection of SNP TSC0034525
gggggtggagtt

SEQ ID NO: 328742 - DNA, 12 bp, Artificial Sequence
  Oligonucleotide primer for the detection of SNP TSC0034525
ttatttgtgttt

SEQ ID NO: 328743 - DNA, 12 bp, Artificial Sequence
  Oligonucleotide primer for the detection of SNP TSC0034528
ctactattattt

SEQ ID NO: 328744 - DNA, 12 bp, Artificial Sequence
  Oligonucleotide primer for the detection of SNP TSC0034528
aaatgtatgtta

SEQ ID NO: 328745 - DNA, 12 bp, Artificial Sequence
  Oligonucleotide primer for the detection of SNP TSC0034529
cccaccttacaa

SEQ ID NO: 328746 - DNA, 12 bp, Artificial Sequence
  Oligonucleotide primer for the detection of SNP TSC0034529
actctttaatca

SEQ ID NO: 328747 - DNA, 12 bp, Artificial Sequence
  Oligonucleotide primer for the detection of SNP TSC0034529
ttattttataat

SEQ ID NO: 328748 - DNA, 12 bp, Artificial Sequence
  Oligonucleotide primer for the detection of SNP TSC0034529
ttattttataac

SEQ ID NO: 328749 - DNA, 12 bp, Artificial Sequence
  Oligonucleotide primer for the detection of SNP TSC0034531
caatccaccccc

SEQ ID NO: 328750 - DNA, 12 bp, Artificial Sequence
  Oligonucleotide primer for the detection of SNP TSC0034531
caatccgccccc

SEQ ID NO: 328751 - DNA, 12 bp, Artificial Sequence
  Oligonucleotide primer for the detection of SNP TSC0034531
ttgggaggttga

SEQ ID NO: 328752 - DNA, 12 bp, Artificial Sequence
  Oligonucleotide primer for the detection of SNP TSC0034531
ttgggaggtcga

SEQ ID NO: 328753 - DNA, 12 bp, Artificial Sequence
  Oligonucleotide primer for the detection of SNP TSC0034532
atttattttatt

SEQ ID NO: 328754 - DNA, 12 bp, Artificial Sequence
  Oligonucleotide primer for the detection of SNP TSC0034532
atctactccatc

SEQ ID NO: 328755 - DNA, 12 bp, Artificial Sequence
  Oligonucleotide primer for the detection of SNP TSC0034532
ttgtgaatgaag

SEQ ID NO: 328756 - DNA, 12 bp, Artificial Sequence
  Oligonucleotide primer for the detection of SNP TSC0034534
aattatcatatt

SEQ ID NO: 328757 - DNA, 12 bp, Artificial Sequence
  Oligonucleotide primer for the detection of SNP TSC0034534
ttatgtaattaa

SEQ ID NO: 328758 - DNA, 12 bp, Artificial Sequence
  Oligonucleotide primer for the detection of SNP TSC0034536
ttaaaaccttta

SEQ ID NO: 328759 - DNA, 12 bp, Artificial Sequence
  Oligonucleotide primer for the detection of SNP TSC0034536
aatatttttatt

SEQ ID NO: 328760 - DNA, 12 bp, Artificial Sequence
  Oligonucleotide primer for the detection of SNP TSC0034536
aatacttctatt

SEQ ID NO: 328761 - DNA, 12 bp, Artificial Sequence
  Oligonucleotide primer for the detection of SNP TSC0034537
aaaatatatcct

SEQ ID NO: 328762 - DNA, 12 bp, Artificial Sequence
  Oligonucleotide primer for the detection of SNP TSC0034537
ttaatgtgtttg

SEQ ID NO: 328763 - DNA, 12 bp, Artificial Sequence
  Oligonucleotide primer for the detection of SNP TSC0034542
tacttacattaa

SEQ ID NO: 328764 - DNA, 12 bp, Artificial Sequence
  Oligonucleotide primer for the detection of SNP TSC0034542
tacttacgttaa

SEQ ID NO: 328765 - DNA, 12 bp, Artificial Sequence
  Oligonucleotide primer for the detection of SNP TSC0034542
gtttgatattat

SEQ ID NO: 328766 - DNA, 12 bp, Artificial Sequence
  Oligonucleotide primer for the detection of SNP TSC0034542
tatttaacatta

SEQ ID NO: 328767 - DNA, 12 bp, Artificial Sequence
  Oligonucleotide primer for the detection of SNP TSC0034542
atttatgttaat

SEQ ID NO: 328768 - DNA, 12 bp, Artificial Sequence
  Oligonucleotide primer for the detection of SNP TSC0034542
atttacgttaat

SEQ ID NO: 328769 - DNA, 12 bp, Artificial Sequence
  Oligonucleotide primer for the detection of SNP TSC0034544
gagagagagttt

SEQ ID NO: 328770 - DNA, 12 bp, Artificial Sequence
  Oligonucleotide primer for the detection of SNP TSC0034544
tggatgataaag

SEQ ID NO: 328771 - DNA, 12 bp, Artificial Sequence
  Oligonucleotide primer for the detection of SNP TSC0034550
ttttaattacat

SEQ ID NO: 328772 - DNA, 12 bp, Artificial Sequence
  Oligonucleotide primer for the detection of SNP TSC0034550
ttttaattacgt

SEQ ID NO: 328773 - DNA, 12 bp, Artificial Sequence
  Oligonucleotide primer for the detection of SNP TSC0034551
ttattaagttgt

SEQ ID NO: 328774 - DNA, 12 bp, Artificial Sequence
  Oligonucleotide primer for the detection of SNP TSC0034554
gttggttaggta

SEQ ID NO: 328775 - DNA, 12 bp, Artificial Sequence
  Oligonucleotide primer for the detection of SNP TSC0034554
actaatcaaaca

SEQ ID NO: 328776 - DNA, 12 bp, Artificial Sequence
  Oligonucleotide primer for the detection of SNP TSC0034556
tttatattaaaa

SEQ ID NO: 328777 - DNA, 12 bp, Artificial Sequence
  Oligonucleotide primer for the detection of SNP TSC0034556
tatatgtgatat

SEQ ID NO: 328778 - DNA, 12 bp, Artificial Sequence
  Oligonucleotide primer for the detection of SNP TSC0034556
tacatataatat

SEQ ID NO: 328779 - DNA, 12 bp, Artificial Sequence
  Oligonucleotide primer for the detection of SNP TSC0034556
tttgtattggaa

SEQ ID NO: 328780 - DNA, 12 bp, Artificial Sequence
  Oligonucleotide primer for the detection of SNP TSC0034559
taaaactatttc

SEQ ID NO: 328781 - DNA, 12 bp, Artificial Sequence
  Oligonucleotide primer for the detection of SNP TSC0034559
tgtttttggtag

SEQ ID NO: 328782 - DNA, 12 bp, Artificial Sequence
  Oligonucleotide primer for the detection of SNP TSC0034560
ttttacatacac

SEQ ID NO: 328783 - DNA, 12 bp, Artificial Sequence
  Oligonucleotide primer for the detection of SNP TSC0034560
atgtagagaaaa

SEQ ID NO: 328784 - DNA, 12 bp, Artificial Sequence
  Oligonucleotide primer for the detection of SNP TSC0034561
aaactacacaaa

SEQ ID NO: 328785 - DNA, 12 bp, Artificial Sequence
  Oligonucleotide primer for the detection of SNP TSC0034562
atcccaatattt

SEQ ID NO: 328786 - DNA, 12 bp, Artificial Sequence
  Oligonucleotide primer for the detection of SNP TSC0034564
gatggagttttg

SEQ ID NO: 328787 - DNA, 12 bp, Artificial Sequence
  Oligonucleotide primer for the detection of SNP TSC0034564
gacggagttttg

SEQ ID NO: 328788 - DNA, 12 bp, Artificial Sequence
  Oligonucleotide primer for the detection of SNP TSC0034564
gatggagtttcg

SEQ ID NO: 328789 - DNA, 12 bp, Artificial Sequence
  Oligonucleotide primer for the detection of SNP TSC0034564
gacggagtttcg

SEQ ID NO: 328790 - DNA, 12 bp, Artificial Sequence
  Oligonucleotide primer for the detection of SNP TSC0034565
taattggttatt

SEQ ID NO: 328791 - DNA, 12 bp, Artificial Sequence
  Oligonucleotide primer for the detection of SNP TSC0034566
aaaataatccac

SEQ ID NO: 328792 - DNA, 12 bp, Artificial Sequence
  Oligonucleotide primer for the detection of SNP TSC0034566
actaacactcta

SEQ ID NO: 328793 - DNA, 12 bp, Artificial Sequence
  Oligonucleotide primer for the detection of SNP TSC0034566
gaatggtttatt

SEQ ID NO: 328794 - DNA, 12 bp, Artificial Sequence
  Oligonucleotide primer for the detection of SNP TSC0034569
ctcaatttattt

SEQ ID NO: 328795 - DNA, 12 bp, Artificial Sequence
  Oligonucleotide primer for the detection of SNP TSC0034569
ttaattataaaa

SEQ ID NO: 328796 - DNA, 12 bp, Artificial Sequence
  Oligonucleotide primer for the detection of SNP TSC0034569
ttaatttatttc

SEQ ID NO: 328797 - DNA, 12 bp, Artificial Sequence
  Oligonucleotide primer for the detection of SNP TSC0034572
ctctcaatcaat

SEQ ID NO: 328798 - DNA, 12 bp, Artificial Sequence
  Oligonucleotide primer for the detection of SNP TSC0034572
ttttttgatgtt

SEQ ID NO: 328799 - DNA, 12 bp, Artificial Sequence
  Oligonucleotide primer for the detection of SNP TSC0034572
ctttctaatatt

SEQ ID NO: 328800 - DNA, 12 bp, Artificial Sequence
  Oligonucleotide primer for the detection of SNP TSC0034572
tttttaattagt

SEQ ID NO: 328801 - DNA, 12 bp, Artificial Sequence
  Oligonucleotide primer for the detection of SNP TSC0034576
aataattaattt

SEQ ID NO: 328802 - DNA, 12 bp, Artificial Sequence
  Oligonukleotid-Primer
tacttacttttt

SEQ ID NO: 328803 - DNA, 12 bp, Artificial Sequence
  Oligonucleotide primer for the detection of SNP TSC0034576
aatagttgattt

SEQ ID NO: 328804 - DNA, 12 bp, Artificial Sequence
  Oligonucleotide primer for the detection of SNP TSC0034579
taaattttaatc

SEQ ID NO: 328805 - DNA, 12 bp, Artificial Sequence
  Oligonucleotide primer for the detection of SNP TSC0034579
atgtatgaggaa

SEQ ID NO: 328806 - DNA, 12 bp, Artificial Sequence
  Oligonucleotide primer for the detection of SNP TSC0034579
acgtatgaggaa

SEQ ID NO: 328807 - DNA, 12 bp, Artificial Sequence
  Oligonucleotide primer for the detection of SNP TSC0034581
atttctttcaca

SEQ ID NO: 328808 - DNA, 12 bp, Artificial Sequence
  Oligonucleotide primer for the detection of SNP TSC0034581
gaatttttagat

SEQ ID NO: 328809 - DNA, 12 bp, Artificial Sequence
  Oligonucleotide primer for the detection of SNP TSC0034581
aaatttccaaat

SEQ ID NO: 328810 - DNA, 12 bp, Artificial Sequence
  Oligonucleotide primer for the detection of SNP TSC0034582
ctttatcatatt

SEQ ID NO: 328811 - DNA, 12 bp, Artificial Sequence
  Oligonucleotide primer for the detection of SNP TSC0034582
ataaaagaaaaa

SEQ ID NO: 328812 - DNA, 12 bp, Artificial Sequence
  Oligonucleotide primer for the detection of SNP TSC0034583
aataacttcaaa

SEQ ID NO: 328813 - DNA, 12 bp, Artificial Sequence
  Oligonucleotide primer for the detection of SNP TSC0034583
atttttctatca

SEQ ID NO: 328814 - DNA, 12 bp, Artificial Sequence
  Oligonucleotide primer for the detection of SNP TSC0034583
taaaatggtttt

SEQ ID NO: 328815 - DNA, 12 bp, Artificial Sequence
  Oligonucleotide primer for the detection of SNP TSC0034584
tgatttgtatac

SEQ ID NO: 328816 - DNA, 12 bp, Artificial Sequence
  Oligonucleotide primer for the detection of SNP TSC0034584
taacctacatac

SEQ ID NO: 328817 - DNA, 12 bp, Artificial Sequence
  Oligonucleotide primer for the detection of SNP TSC0034584
tgatgatgatat

SEQ ID NO: 328818 - DNA, 12 bp, Artificial Sequence
  Oligonucleotide primer for the detection of SNP TSC0034585
caaaaacataat

SEQ ID NO: 328819 - DNA, 12 bp, Artificial Sequence
  Oligonucleotide primer for the detection of SNP TSC0034585
aattaatatgta

SEQ ID NO: 328820 - DNA, 12 bp, Artificial Sequence
  Oligonucleotide primer for the detection of SNP TSC0034587
ccaaacctaaaa

SEQ ID NO: 328821 - DNA, 12 bp, Artificial Sequence
  Oligonucleotide primer for the detection of SNP TSC0034587
gtagtgatttgg

SEQ ID NO: 328822 - DNA, 12 bp, Artificial Sequence
  Oligonucleotide primer for the detection of SNP TSC0034587
ataataacctaa

SEQ ID NO: 328823 - DNA, 12 bp, Artificial Sequence
  Oligonucleotide primer for the detection of SNP TSC0034587
attaaatttgga

SEQ ID NO: 328824 - DNA, 12 bp, Artificial Sequence
  Oligonucleotide primer for the detection of SNP TSC0034588
cttataatccta

SEQ ID NO: 328825 - DNA, 12 bp, Artificial Sequence
  Oligonucleotide primer for the detection of SNP TSC0034588
cttcccaaataa

SEQ ID NO: 328826 - DNA, 12 bp, Artificial Sequence
  Oligonucleotide primer for the detection of SNP TSC0034588
gtttgtagtttt

SEQ ID NO: 328827 - DNA, 12 bp, Artificial Sequence
  Oligonucleotide primer for the detection of SNP TSC0034592
aataaacactat

SEQ ID NO: 328828 - DNA, 12 bp, Artificial Sequence
  Oligonucleotide primer for the detection of SNP TSC0034592
atcttaaaaaat

SEQ ID NO: 328829 - DNA, 12 bp, Artificial Sequence
  Oligonucleotide primer for the detection of SNP TSC0034592
agtaggtattgt

SEQ ID NO: 328830 - DNA, 12 bp, Artificial Sequence
  Oligonucleotide primer for the detection of SNP TSC0034593
aaccaacctcct

SEQ ID NO: 328831 - DNA, 12 bp, Artificial Sequence
  Oligonucleotide primer for the detection of SNP TSC0034593
ttgttttttaag

SEQ ID NO: 328832 - DNA, 12 bp, Artificial Sequence
  Oligonucleotide primer for the detection of SNP TSC0034594
ataatactattc

SEQ ID NO: 328833 - DNA, 12 bp, Artificial Sequence
  Oligonucleotide primer for the detection of SNP TSC0034594
agagaaatatgt

SEQ ID NO: 328834 - DNA, 12 bp, Artificial Sequence
  Oligonucleotide primer for the detection of SNP TSC0034594
aaaaaaacatat

SEQ ID NO: 328835 - DNA, 12 bp, Artificial Sequence
  Oligonucleotide primer for the detection of SNP TSC0034594
atggtgttgttt

SEQ ID NO: 328836 - DNA, 12 bp, Artificial Sequence
  Oligonucleotide primer for the detection of SNP TSC0034595
gttttagtgata

SEQ ID NO: 328837 - DNA, 12 bp, Artificial Sequence
  Oligonucleotide primer for the detection of SNP TSC0034595
attttaataata

SEQ ID NO: 328838 - DNA, 12 bp, Artificial Sequence
  Oligonucleotide primer for the detection of SNP TSC0034595
aggtttagaaaa

SEQ ID NO: 328839 - DNA, 12 bp, Artificial Sequence
  Oligonucleotide primer for the detection of SNP TSC0034599
atatgtttttat

SEQ ID NO: 328840 - DNA, 12 bp, Artificial Sequence
  Oligonucleotide primer for the detection of SNP TSC0034599
atatgtttttac

SEQ ID NO: 328841 - DNA, 12 bp, Artificial Sequence
  Oligonucleotide primer for the detection of SNP TSC0034599
cacataccctca

SEQ ID NO: 328842 - DNA, 12 bp, Artificial Sequence
  Oligonucleotide primer for the detection of SNP TSC0034599
aagtgtgggtgt

SEQ ID NO: 328843 - DNA, 12 bp, Artificial Sequence
  Oligonucleotide primer for the detection of SNP TSC0034601
ccaaacaccacc

SEQ ID NO: 328844 - DNA, 12 bp, Artificial Sequence
  Oligonucleotide primer for the detection of SNP TSC0034601
ccaaacaccgcc

SEQ ID NO: 328845 - DNA, 12 bp, Artificial Sequence
  Oligonucleotide primer for the detection of SNP TSC0034601
tttcgtgtgtgg

SEQ ID NO: 328846 - DNA, 12 bp, Artificial Sequence
  Oligonucleotide primer for the detection of SNP TSC0034601
ttttgcgtgtgg

SEQ ID NO: 328847 - DNA, 12 bp, Artificial Sequence
  Oligonucleotide primer for the detection of SNP TSC0034601
ttttgtgtgcgg

SEQ ID NO: 328848 - DNA, 12 bp, Artificial Sequence
  Oligonucleotide primer for the detection of SNP TSC0034601
tttcgcgtgtgg

SEQ ID NO: 328849 - DNA, 12 bp, Artificial Sequence
  Oligonucleotide primer for the detection of SNP TSC0034601
tttcgtgtgcgg

SEQ ID NO: 328850 - DNA, 12 bp, Artificial Sequence
  Oligonucleotide primer for the detection of SNP TSC0034601
ttttgcgtgcgg

SEQ ID NO: 328851 - DNA, 12 bp, Artificial Sequence
  Oligonucleotide primer for the detection of SNP TSC0034601
tttcgcgtgcgg

SEQ ID NO: 328852 - DNA, 12 bp, Artificial Sequence
  Oligonucleotide primer for the detection of SNP TSC0034602
aacttatctcaa

SEQ ID NO: 328853 - DNA, 12 bp, Artificial Sequence
  Oligonucleotide primer for the detection of SNP TSC0034602
ggtttgttttaa

SEQ ID NO: 328854 - DNA, 12 bp, Artificial Sequence
  Oligonucleotide primer for the detection of SNP TSC0034603
taaggttaggag

SEQ ID NO: 328855 - DNA, 12 bp, Artificial Sequence
  Oligonucleotide primer for the detection of SNP TSC0034606
taattaaaaatc

SEQ ID NO: 328856 - DNA, 12 bp, Artificial Sequence
  Oligonucleotide primer for the detection of SNP TSC0034606
ttattgtagata

SEQ ID NO: 328857 - DNA, 12 bp, Artificial Sequence
  Oligonucleotide primer for the detection of SNP TSC0034606
ttatcgtagata

SEQ ID NO: 328858 - DNA, 12 bp, Artificial Sequence
  Oligonucleotide primer for the detection of SNP TSC0034606
ttaccataaata

SEQ ID NO: 328859 - DNA, 12 bp, Artificial Sequence
  Oligonucleotide primer for the detection of SNP TSC0034606
ttaccgtaaata

SEQ ID NO: 328860 - DNA, 12 bp, Artificial Sequence
  Oligonucleotide primer for the detection of SNP TSC0034606
taattagaagtt

SEQ ID NO: 328861 - DNA, 12 bp, Artificial Sequence
  Oligonucleotide primer for the detection of SNP TSC0034607
tcattaatcaat

SEQ ID NO: 328862 - DNA, 12 bp, Artificial Sequence
  Oligonucleotide primer for the detection of SNP TSC0034607
tcgttaatcaat

SEQ ID NO: 328863 - DNA, 12 bp, Artificial Sequence
  Oligonucleotide primer for the detection of SNP TSC0034607
gaaagattgttg

SEQ ID NO: 328864 - DNA, 12 bp, Artificial Sequence
  Oligonucleotide primer for the detection of SNP TSC0034607
ttgttaattaat

SEQ ID NO: 328865 - DNA, 12 bp, Artificial Sequence
  Oligonucleotide primer for the detection of SNP TSC0034607
tcgttaattaat

SEQ ID NO: 328866 - DNA, 12 bp, Artificial Sequence
  Oligonucleotide primer for the detection of SNP TSC0034608
ttgttttggttg

SEQ ID NO: 328867 - DNA, 12 bp, Artificial Sequence
  Oligonucleotide primer for the detection of SNP TSC0034608
ttgttttggtcg

SEQ ID NO: 328868 - DNA, 12 bp, Artificial Sequence
  Oligonucleotide primer for the detection of SNP TSC0034609
taccctccctaa

SEQ ID NO: 328869 - DNA, 12 bp, Artificial Sequence
  Oligonucleotide primer for the detection of SNP TSC0034609
agaggtgagatt

SEQ ID NO: 328870 - DNA, 12 bp, Artificial Sequence
  Oligonucleotide primer for the detection of SNP TSC0034610
aacttaactatc

SEQ ID NO: 328871 - DNA, 12 bp, Artificial Sequence
  Oligonucleotide primer for the detection of SNP TSC0034612
aaaaatctaatc

SEQ ID NO: 328872 - DNA, 12 bp, Artificial Sequence
  Oligonucleotide primer for the detection of SNP TSC0034612
ctatttatactt

SEQ ID NO: 328873 - DNA, 12 bp, Artificial Sequence
  Oligonucleotide primer for the detection of SNP TSC0034612
aaaaatttgatt

SEQ ID NO: 328874 - DNA, 12 bp, Artificial Sequence
  Oligonucleotide primer for the detection of SNP TSC0034616
gatttagtatag

SEQ ID NO: 328875 - DNA, 12 bp, Artificial Sequence
  Oligonucleotide primer for the detection of SNP TSC0034618
ccctatctcaaa

SEQ ID NO: 328876 - DNA, 12 bp, Artificial Sequence
  Oligonucleotide primer for the detection of SNP TSC0034618
tctacctaaccc

SEQ ID NO: 328877 - DNA, 12 bp, Artificial Sequence
  Oligonucleotide primer for the detection of SNP TSC0034621
aattttattttc

SEQ ID NO: 328878 - DNA, 12 bp, Artificial Sequence
  Oligonucleotide primer for the detection of SNP TSC0034621
gaagaagtaaga

SEQ ID NO: 328879 - DNA, 12 bp, Artificial Sequence
  Oligonucleotide primer for the detection of SNP TSC0034622
aattactcctaa

SEQ ID NO: 328880 - DNA, 12 bp, Artificial Sequence
  Oligonucleotide primer for the detection of SNP TSC0034622
ttgttgatatgt

SEQ ID NO: 328881 - DNA, 12 bp, Artificial Sequence
  Oligonucleotide primer for the detection of SNP TSC0034622
ttactaacatac

SEQ ID NO: 328882 - DNA, 12 bp, Artificial Sequence
  Oligonucleotide primer for the detection of SNP TSC0034622
agttgtttttga

SEQ ID NO: 328883 - DNA, 12 bp, Artificial Sequence
  Oligonucleotide primer for the detection of SNP TSC0034623
taaaacttctat

SEQ ID NO: 328884 - DNA, 12 bp, Artificial Sequence
  Oligonucleotide primer for the detection of SNP TSC0034623
atagtttgagaa

SEQ ID NO: 328885 - DNA, 12 bp, Artificial Sequence
  Oligonucleotide primer for the detection of SNP TSC0034624
cattcttaatac

SEQ ID NO: 328886 - DNA, 12 bp, Artificial Sequence
  Oligonucleotide primer for the detection of SNP TSC0034624
tgttagatatta

SEQ ID NO: 328887 - DNA, 12 bp, Artificial Sequence
  Oligonucleotide primer for the detection of SNP TSC0034625
acatctaaaatc

SEQ ID NO: 328888 - DNA, 12 bp, Artificial Sequence
  Oligonucleotide primer for the detection of SNP TSC0034625
taatgggttttg

SEQ ID NO: 328889 - DNA, 12 bp, Artificial Sequence
  Oligonucleotide primer for the detection of SNP TSC0034625
caataaactcta

SEQ ID NO: 328890 - DNA, 12 bp, Artificial Sequence
  Oligonucleotide primer for the detection of SNP TSC0034625
atatttgaggtt

SEQ ID NO: 328891 - DNA, 12 bp, Artificial Sequence
  Oligonucleotide primer for the detection of SNP TSC0034626
tgatttttagtt

SEQ ID NO: 328892 - DNA, 12 bp, Artificial Sequence
  Oligonucleotide primer for the detection of SNP TSC0034626
ttaatttttaac

SEQ ID NO: 328893 - DNA, 12 bp, Artificial Sequence
  Oligonucleotide primer for the detection of SNP TSC0034626
agtgaaatggat

SEQ ID NO: 328894 - DNA, 12 bp, Artificial Sequence
  Oligonucleotide primer for the detection of SNP TSC0034633
tccctttcaacc

SEQ ID NO: 328895 - DNA, 12 bp, Artificial Sequence
  Oligonucleotide primer for the detection of SNP TSC0034633
gaatgtgtagta

SEQ ID NO: 328896 - DNA, 12 bp, Artificial Sequence
  Oligonucleotide primer for the detection of SNP TSC0034633
gaatgcgtagta

SEQ ID NO: 328897 - DNA, 12 bp, Artificial Sequence
  Oligonucleotide primer for the detection of SNP TSC0034642
aaagtgataatt

SEQ ID NO: 328898 - DNA, 12 bp, Artificial Sequence
  Oligonucleotide primer for the detection of SNP TSC0034642
aaaataacaatt

SEQ ID NO: 328899 - DNA, 12 bp, Artificial Sequence
  Oligonucleotide primer for the detection of SNP TSC0034643
gaaaaagtgtag

SEQ ID NO: 328900 - DNA, 12 bp, Artificial Sequence
  Oligonucleotide primer for the detection of SNP TSC0034646
tacacaattttt

SEQ ID NO: 328901 - DNA, 12 bp, Artificial Sequence
  Oligonucleotide primer for the detection of SNP TSC0034646
tacacgattttt

SEQ ID NO: 328902 - DNA, 12 bp, Artificial Sequence
  Oligonucleotide primer for the detection of SNP TSC0034646
tgtatggttttt

SEQ ID NO: 328903 - DNA, 12 bp, Artificial Sequence
  Oligonucleotide primer for the detection of SNP TSC0034646
tgtacggttttt

SEQ ID NO: 328904 - DNA, 12 bp, Artificial Sequence
  Oligonucleotide primer for the detection of SNP TSC0034647
attaaattaaaa

SEQ ID NO: 328905 - DNA, 12 bp, Artificial Sequence
  Oligonucleotide primer for the detection of SNP TSC0034647
agattttttagt

SEQ ID NO: 328906 - DNA, 12 bp, Artificial Sequence
  Oligonucleotide primer for the detection of SNP TSC0034647
aaacccttcaat

SEQ ID NO: 328907 - DNA, 12 bp, Artificial Sequence
  Oligonucleotide primer for the detection of SNP TSC0034647
gttaaattaaag

SEQ ID NO: 328908 - DNA, 12 bp, Artificial Sequence
  Oligonucleotide primer for the detection of SNP TSC0034650
taaaaacccact

SEQ ID NO: 328909 - DNA, 12 bp, Artificial Sequence
  Oligonucleotide primer for the detection of SNP TSC0034650
ttatttgtaggg

SEQ ID NO: 328910 - DNA, 12 bp, Artificial Sequence
  Oligonucleotide primer for the detection of SNP TSC0034650
ccatctacaaaa

SEQ ID NO: 328911 - DNA, 12 bp, Artificial Sequence
  Oligonucleotide primer for the detection of SNP TSC0034650
tggaagtttatt

SEQ ID NO: 328912 - DNA, 12 bp, Artificial Sequence
  Oligonucleotide primer for the detection of SNP TSC0034651
gtgtttttttgg

SEQ ID NO: 328913 - DNA, 12 bp, Artificial Sequence
  Oligonucleotide primer for the detection of SNP TSC0034654
atcctcaaccca

SEQ ID NO: 328914 - DNA, 12 bp, Artificial Sequence
  Oligonucleotide primer for the detection of SNP TSC0034654
atcctcaacccg

SEQ ID NO: 328915 - DNA, 12 bp, Artificial Sequence
  Oligonucleotide primer for the detection of SNP TSC0034654
tgtggttttttt

SEQ ID NO: 328916 - DNA, 12 bp, Artificial Sequence
  Oligonucleotide primer for the detection of SNP TSC0034654
tgcggttttttt

SEQ ID NO: 328917 - DNA, 12 bp, Artificial Sequence
  Oligonucleotide primer for the detection of SNP TSC0034654
tacaactccctc

SEQ ID NO: 328918 - DNA, 12 bp, Artificial Sequence
  Oligonucleotide primer for the detection of SNP TSC0034654
tacgactccctc

SEQ ID NO: 328919 - DNA, 12 bp, Artificial Sequence
  Oligonucleotide primer for the detection of SNP TSC0034654
atttttagttcg

SEQ ID NO: 328920 - DNA, 12 bp, Artificial Sequence
  Oligonucleotide primer for the detection of SNP TSC0034655
taattaaaatcc

SEQ ID NO: 328921 - DNA, 12 bp, Artificial Sequence
  Oligonucleotide primer for the detection of SNP TSC0034655
gtagtatttgag

SEQ ID NO: 328922 - DNA, 12 bp, Artificial Sequence
  Oligonucleotide primer for the detection of SNP TSC0034656
atataaaactat

SEQ ID NO: 328923 - DNA, 12 bp, Artificial Sequence
  Oligonucleotide primer for the detection of SNP TSC0034656
gttttttgagag

SEQ ID NO: 328924 - DNA, 12 bp, Artificial Sequence
  Oligonucleotide primer for the detection of SNP TSC0034657
ctcaaaactcta

SEQ ID NO: 328925 - DNA, 12 bp, Artificial Sequence
  Oligonucleotide primer for the detection of SNP TSC0034657
taaatataagtt

SEQ ID NO: 328926 - DNA, 12 bp, Artificial Sequence
  Oligonucleotide primer for the detection of SNP TSC0034657
caaatacaaact

SEQ ID NO: 328927 - DNA, 12 bp, Artificial Sequence
  Oligonukleotid-Primer
tagagttttatt

SEQ ID NO: 328928 - DNA, 12 bp, Artificial Sequence
  Oligonucleotide primer for the detection of SNP TSC0034659
acatccccaaac

SEQ ID NO: 328929 - DNA, 12 bp, Artificial Sequence
  Oligonucleotide primer for the detection of SNP TSC0034659
acgtccccaaac

SEQ ID NO: 328930 - DNA, 12 bp, Artificial Sequence
  Oligonucleotide primer for the detection of SNP TSC0034659
aggagtgtggtg

SEQ ID NO: 328931 - DNA, 12 bp, Artificial Sequence
  Oligonucleotide primer for the detection of SNP TSC0034659
aggagcgtggtg

SEQ ID NO: 328932 - DNA, 12 bp, Artificial Sequence
  Oligonucleotide primer for the detection of SNP TSC0034660
aacataatactc

SEQ ID NO: 328933 - DNA, 12 bp, Artificial Sequence
  Oligonucleotide primer for the detection of SNP TSC0034660
aacgtaatactc

SEQ ID NO: 328934 - DNA, 12 bp, Artificial Sequence
  Oligonucleotide primer for the detection of SNP TSC0034660
tatgtttttaag

SEQ ID NO: 328935 - DNA, 12 bp, Artificial Sequence
  Oligonucleotide primer for the detection of SNP TSC0034660
tacgtttttaag

SEQ ID NO: 328936 - DNA, 12 bp, Artificial Sequence
  Oligonucleotide primer for the detection of SNP TSC0034660
tacatccccaaa

SEQ ID NO: 328937 - DNA, 12 bp, Artificial Sequence
  Oligonucleotide primer for the detection of SNP TSC0034660
tacgtccccaaa

SEQ ID NO: 328938 - DNA, 12 bp, Artificial Sequence
  Oligonucleotide primer for the detection of SNP TSC0034660
agtgtggtgttt

SEQ ID NO: 328939 - DNA, 12 bp, Artificial Sequence
  Oligonucleotide primer for the detection of SNP TSC0034660
agcgtggtgttt

SEQ ID NO: 328940 - DNA, 12 bp, Artificial Sequence
  Oligonucleotide primer for the detection of SNP TSC0034661
acataaaaacat

SEQ ID NO: 328941 - DNA, 12 bp, Artificial Sequence
  Oligonucleotide primer for the detection of SNP TSC0034661
ttttgtttgtag

SEQ ID NO: 328942 - DNA, 12 bp, Artificial Sequence
  Oligonucleotide primer for the detection of SNP TSC0034661
tttcgtttgtag

SEQ ID NO: 328943 - DNA, 12 bp, Artificial Sequence
  Oligonucleotide primer for the detection of SNP TSC0034661
tcccacctataa

SEQ ID NO: 328944 - DNA, 12 bp, Artificial Sequence
  Oligonucleotide primer for the detection of SNP TSC0034661
tcccgcctataa

SEQ ID NO: 328945 - DNA, 12 bp, Artificial Sequence
  Oligonucleotide primer for the detection of SNP TSC0034661
gtatagagatat

SEQ ID NO: 328946 - DNA, 12 bp, Artificial Sequence
  Oligonucleotide primer for the detection of SNP TSC0034662
tgattgatattt

SEQ ID NO: 328947 - DNA, 12 bp, Artificial Sequence
  Oligonucleotide primer for the detection of SNP TSC0034662
cactaactaaca

SEQ ID NO: 328948 - DNA, 12 bp, Artificial Sequence
  Oligonucleotide primer for the detection of SNP TSC0034662
aagggtgagaag

SEQ ID NO: 328949 - DNA, 12 bp, Artificial Sequence
  Oligonucleotide primer for the detection of SNP TSC0034663
acacaaataaac

SEQ ID NO: 328950 - DNA, 12 bp, Artificial Sequence
  Oligonucleotide primer for the detection of SNP TSC0034663
ttccactactta

SEQ ID NO: 328951 - DNA, 12 bp, Artificial Sequence
  Oligonucleotide primer for the detection of SNP TSC0034663
atataagtgaat

SEQ ID NO: 328952 - DNA, 12 bp, Artificial Sequence
  Oligonucleotide primer for the detection of SNP TSC0034664
aaaaataatcat

SEQ ID NO: 328953 - DNA, 12 bp, Artificial Sequence
  Oligonucleotide primer for the detection of SNP TSC0034664
aaaaataatcgt

SEQ ID NO: 328954 - DNA, 12 bp, Artificial Sequence
  Oligonucleotide primer for the detection of SNP TSC0034664
gtaattaggttg

SEQ ID NO: 328955 - DNA, 12 bp, Artificial Sequence
  Oligonucleotide primer for the detection of SNP TSC0034665
acttatataact

SEQ ID NO: 328956 - DNA, 12 bp, Artificial Sequence
  Oligonucleotide primer for the detection of SNP TSC0034665
aatataatgtaa

SEQ ID NO: 328957 - DNA, 12 bp, Artificial Sequence
  Oligonucleotide primer for the detection of SNP TSC0034666
gtattgtaatgt

SEQ ID NO: 328958 - DNA, 12 bp, Artificial Sequence
  Oligonucleotide primer for the detection of SNP TSC0034666
atttatagataa

SEQ ID NO: 328959 - DNA, 12 bp, Artificial Sequence
  Oligonucleotide primer for the detection of SNP TSC0034670
ataatatcaact

SEQ ID NO: 328960 - DNA, 12 bp, Artificial Sequence
  Oligonucleotide primer for the detection of SNP TSC0034671
ccctttatcaat

SEQ ID NO: 328961 - DNA, 12 bp, Artificial Sequence
  Oligonucleotide primer for the detection of SNP TSC0034671
gatattaaatta

SEQ ID NO: 328962 - DNA, 12 bp, Artificial Sequence
  Oligonucleotide primer for the detection of SNP TSC0034672
gctaaaatataa

SEQ ID NO: 328963 - DNA, 12 bp, Artificial Sequence
  Oligonucleotide primer for the detection of SNP TSC0034672
ttatttagaagt

SEQ ID NO: 328964 - DNA, 12 bp, Artificial Sequence
  Oligonucleotide primer for the detection of SNP TSC0034672
tcatttaaaaat

SEQ ID NO: 328965 - DNA, 12 bp, Artificial Sequence
  Oligonucleotide primer for the detection of SNP TSC0034672
gttaaaatgtaa

SEQ ID NO: 328966 - DNA, 12 bp, Artificial Sequence
  Oligonucleotide primer for the detection of SNP TSC0034675
tcaactttaaca

SEQ ID NO: 328967 - DNA, 12 bp, Artificial Sequence
  Oligonucleotide primer for the detection of SNP TSC0034675
tagttagtagtt

SEQ ID NO: 328968 - DNA, 12 bp, Artificial Sequence
  Oligonucleotide primer for the detection of SNP TSC0034675
taatcaacaacc

SEQ ID NO: 328969 - DNA, 12 bp, Artificial Sequence
  Oligonucleotide primer for the detection of SNP TSC0034675
gttagttttgat

SEQ ID NO: 328970 - DNA, 12 bp, Artificial Sequence
  Oligonucleotide primer for the detection of SNP TSC0034676
ctacaaaccact

SEQ ID NO: 328971 - DNA, 12 bp, Artificial Sequence
  Oligonucleotide primer for the detection of SNP TSC0034676
agttggtttagg

SEQ ID NO: 328972 - DNA, 12 bp, Artificial Sequence
  Oligonucleotide primer for the detection of SNP TSC0034681
tacaataacttc

SEQ ID NO: 328973 - DNA, 12 bp, Artificial Sequence
  Oligonucleotide primer for the detection of SNP TSC0034682
gggtgtagtggt

SEQ ID NO: 328974 - DNA, 12 bp, Artificial Sequence
  Oligonucleotide primer for the detection of SNP TSC0034682
gggcgtagtggt

SEQ ID NO: 328975 - DNA, 12 bp, Artificial Sequence
  Oligonucleotide primer for the detection of SNP TSC0034682
gggtgtagtggc

SEQ ID NO: 328976 - DNA, 12 bp, Artificial Sequence
  Oligonucleotide primer for the detection of SNP TSC0034682
gggcgtagtggc

SEQ ID NO: 328977 - DNA, 12 bp, Artificial Sequence
  Oligonucleotide primer for the detection of SNP TSC0034687
tctaattaatct

SEQ ID NO: 328978 - DNA, 12 bp, Artificial Sequence
  Oligonucleotide primer for the detection of SNP TSC0034687
atttataagtaa

SEQ ID NO: 328979 - DNA, 12 bp, Artificial Sequence
  Oligonucleotide primer for the detection of SNP TSC0034691
acactccaaccc

SEQ ID NO: 328980 - DNA, 12 bp, Artificial Sequence
  Oligonucleotide primer for the detection of SNP TSC0034691
gatattgattga

SEQ ID NO: 328981 - DNA, 12 bp, Artificial Sequence
  Oligonucleotide primer for the detection of SNP TSC0034691
gatattgatcga

SEQ ID NO: 328982 - DNA, 12 bp, Artificial Sequence
  Oligonucleotide primer for the detection of SNP TSC0034692
cacctataaact

SEQ ID NO: 328983 - DNA, 12 bp, Artificial Sequence
  Oligonucleotide primer for the detection of SNP TSC0034692
ttgaggtttagt

SEQ ID NO: 328984 - DNA, 12 bp, Artificial Sequence
  Oligonucleotide primer for the detection of SNP TSC0034693
attacccaaaat

SEQ ID NO: 328985 - DNA, 12 bp, Artificial Sequence
  Oligonucleotide primer for the detection of SNP TSC0034693
tttaggagttta

SEQ ID NO: 328986 - DNA, 12 bp, Artificial Sequence
  Oligonucleotide primer for the detection of SNP TSC0034693
cccaaaaattca

SEQ ID NO: 328987 - DNA, 12 bp, Artificial Sequence
  Oligonucleotide primer for the detection of SNP TSC0034693
gttgtttaggat

SEQ ID NO: 328988 - DNA, 12 bp, Artificial Sequence
  Oligonucleotide primer for the detection of SNP TSC0034694
caacctccacct

SEQ ID NO: 328989 - DNA, 12 bp, Artificial Sequence
  Oligonucleotide primer for the detection of SNP TSC0034694
atttgaatttgg

SEQ ID NO: 328990 - DNA, 12 bp, Artificial Sequence
  Oligonucleotide primer for the detection of SNP TSC0034700
aaaactcaaaca

SEQ ID NO: 328991 - DNA, 12 bp, Artificial Sequence
  Oligonucleotide primer for the detection of SNP TSC0034700
atttagttgttt

SEQ ID NO: 328992 - DNA, 12 bp, Artificial Sequence
  Oligonucleotide primer for the detection of SNP TSC0034700
cttacctaacta

SEQ ID NO: 328993 - DNA, 12 bp, Artificial Sequence
  Oligonucleotide primer for the detection of SNP TSC0034700
aaggtttagata

SEQ ID NO: 328994 - DNA, 12 bp, Artificial Sequence
  Oligonucleotide primer for the detection of SNP TSC0034702
tctaccaaaaat

SEQ ID NO: 328995 - DNA, 12 bp, Artificial Sequence
  Oligonucleotide primer for the detection of SNP TSC0034702
ggatgagataga

SEQ ID NO: 328996 - DNA, 12 bp, Artificial Sequence
  Oligonucleotide primer for the detection of SNP TSC0034703
aatctctacacc

SEQ ID NO: 328997 - DNA, 12 bp, Artificial Sequence
  Oligonucleotide primer for the detection of SNP TSC0034703
atttttttatta

SEQ ID NO: 328998 - DNA, 12 bp, Artificial Sequence
  Oligonucleotide primer for the detection of SNP TSC0034706
ataaaatttacc

SEQ ID NO: 328999 - DNA, 12 bp, Artificial Sequence
  Oligonucleotide primer for the detection of SNP TSC0034706
agtggttaaata

SEQ ID NO: 329000 - DNA, 12 bp, Artificial Sequence
  Oligonucleotide primer for the detection of SNP TSC0034707
gtgtattttaat

SEQ ID NO: 329001 - DNA, 12 bp, Artificial Sequence
  Oligonucleotide primer for the detection of SNP TSC0034707
aatatacttcaa

SEQ ID NO: 329002 - DNA, 12 bp, Artificial Sequence
  Oligonucleotide primer for the detection of SNP TSC0034707
agaaagagaagg

SEQ ID NO: 329003 - DNA, 12 bp, Artificial Sequence
  Oligonucleotide primer for the detection of SNP TSC0034708
tataaatgatag

SEQ ID NO: 329004 - DNA, 12 bp, Artificial Sequence
  Oligonucleotide primer for the detection of SNP TSC0034708
tataaataacaa

SEQ ID NO: 329005 - DNA, 12 bp, Artificial Sequence
  Oligonucleotide primer for the detection of SNP TSC0034708
agtaagagaatt

SEQ ID NO: 329006 - DNA, 12 bp, Artificial Sequence
  Oligonucleotide primer for the detection of SNP TSC0034711
tccctaataact

SEQ ID NO: 329007 - DNA, 12 bp, Artificial Sequence
  Oligonucleotide primer for the detection of SNP TSC0034711
tgggtgtttgta

SEQ ID NO: 329008 - DNA, 12 bp, Artificial Sequence
  Oligonucleotide primer for the detection of SNP TSC0034711
cgggtgtttgta

SEQ ID NO: 329009 - DNA, 12 bp, Artificial Sequence
  Oligonucleotide primer for the detection of SNP TSC0034712
tattgtgttagt

SEQ ID NO: 329010 - DNA, 12 bp, Artificial Sequence
  Oligonucleotide primer for the detection of SNP TSC0034712
tatcgtgttagt

SEQ ID NO: 329011 - DNA, 12 bp, Artificial Sequence
  Oligonucleotide primer for the detection of SNP TSC0034712
caccatactaac

SEQ ID NO: 329012 - DNA, 12 bp, Artificial Sequence
  Oligonucleotide primer for the detection of SNP TSC0034712
caccgtactaac

SEQ ID NO: 329013 - DNA, 12 bp, Artificial Sequence
  Oligonucleotide primer for the detection of SNP TSC0034712
agattaagatta

SEQ ID NO: 329014 - DNA, 12 bp, Artificial Sequence
  Oligonucleotide primer for the detection of SNP TSC0034713
atatatacatat

SEQ ID NO: 329015 - DNA, 12 bp, Artificial Sequence
  Oligonucleotide primer for the detection of SNP TSC0034713
tatattaatatg

SEQ ID NO: 329016 - DNA, 12 bp, Artificial Sequence
  Oligonucleotide primer for the detection of SNP TSC0034714
ccaaataaaaac

SEQ ID NO: 329017 - DNA, 12 bp, Artificial Sequence
  Oligonucleotide primer for the detection of SNP TSC0034714
tactacttcccc

SEQ ID NO: 329018 - DNA, 12 bp, Artificial Sequence
  Oligonucleotide primer for the detection of SNP TSC0034714
ttaggtggagat

SEQ ID NO: 329019 - DNA, 12 bp, Artificial Sequence
  Oligonucleotide primer for the detection of SNP TSC0034714
ttaggtggagac

SEQ ID NO: 329020 - DNA, 12 bp, Artificial Sequence
  Oligonucleotide primer for the detection of SNP TSC0034715
caaaacctcaat

SEQ ID NO: 329021 - DNA, 12 bp, Artificial Sequence
  Oligonucleotide primer for the detection of SNP TSC0034715
caaaacctcgat

SEQ ID NO: 329022 - DNA, 12 bp, Artificial Sequence
  Oligonucleotide primer for the detection of SNP TSC0034715
ggtagtgtttgg

SEQ ID NO: 329023 - DNA, 12 bp, Artificial Sequence
  Oligonucleotide primer for the detection of SNP TSC0034716
ccaatacacata

SEQ ID NO: 329024 - DNA, 12 bp, Artificial Sequence
  Oligonukleotid-Primer
ccaatacgcata

SEQ ID NO: 329025 - DNA, 12 bp, Artificial Sequence
  Oligonucleotide primer for the detection of SNP TSC0034716
cgttggggtttt

SEQ ID NO: 329026 - DNA, 12 bp, Artificial Sequence
  Oligonucleotide primer for the detection of SNP TSC0034716
tgttggggtttc

SEQ ID NO: 329027 - DNA, 12 bp, Artificial Sequence
  Oligonucleotide primer for the detection of SNP TSC0034716
cgttggggtttc

SEQ ID NO: 329028 - DNA, 12 bp, Artificial Sequence
  Oligonucleotide primer for the detection of SNP TSC0034716
actaaaacctca

SEQ ID NO: 329029 - DNA, 12 bp, Artificial Sequence
  Oligonucleotide primer for the detection of SNP TSC0034716
actaaaacctcg

SEQ ID NO: 329030 - DNA, 12 bp, Artificial Sequence
  Oligonucleotide primer for the detection of SNP TSC0034716
gctaaaacctca

SEQ ID NO: 329031 - DNA, 12 bp, Artificial Sequence
  Oligonucleotide primer for the detection of SNP TSC0034716
gctaaaacctcg

SEQ ID NO: 329032 - DNA, 12 bp, Artificial Sequence
  Oligonucleotide primer for the detection of SNP TSC0034716
taatgtgtatgt

SEQ ID NO: 329033 - DNA, 12 bp, Artificial Sequence
  Oligonucleotide primer for the detection of SNP TSC0034716
taatgcgtatgt

SEQ ID NO: 329034 - DNA, 12 bp, Artificial Sequence
  Oligonucleotide primer for the detection of SNP TSC0034716
taatgtgtatgc

SEQ ID NO: 329035 - DNA, 12 bp, Artificial Sequence
  Oligonucleotide primer for the detection of SNP TSC0034716
taatgcgtatgc

SEQ ID NO: 329036 - DNA, 12 bp, Artificial Sequence
  Oligonucleotide primer for the detection of SNP TSC0034717
ttaactatcaca

SEQ ID NO: 329037 - DNA, 12 bp, Artificial Sequence
  Oligonucleotide primer for the detection of SNP TSC0034717
tttgagtaatat

SEQ ID NO: 329038 - DNA, 12 bp, Artificial Sequence
  Oligonucleotide primer for the detection of SNP TSC0034717
cctaaacaatac

SEQ ID NO: 329039 - DNA, 12 bp, Artificial Sequence
  Oligonucleotide primer for the detection of SNP TSC0034719
aaaatatatata

SEQ ID NO: 329040 - DNA, 12 bp, Artificial Sequence
  Oligonucleotide primer for the detection of SNP TSC0034719
agggtgtgtgtg

SEQ ID NO: 329041 - DNA, 12 bp, Artificial Sequence
  Oligonucleotide primer for the detection of SNP TSC0034720
tattttcataac

SEQ ID NO: 329042 - DNA, 12 bp, Artificial Sequence
  Oligonucleotide primer for the detection of SNP TSC0034720
tttaaaaagtta

SEQ ID NO: 329043 - DNA, 12 bp, Artificial Sequence
  Oligonucleotide primer for the detection of SNP TSC0034721
aaatattgttta

SEQ ID NO: 329044 - DNA, 12 bp, Artificial Sequence
  Oligonucleotide primer for the detection of SNP TSC0034722
aattaactattc

SEQ ID NO: 329045 - DNA, 12 bp, Artificial Sequence
  Oligonucleotide primer for the detection of SNP TSC0034722
tttaatatgaag

SEQ ID NO: 329046 - DNA, 12 bp, Artificial Sequence
  Oligonucleotide primer for the detection of SNP TSC0034722
tttaatacgaag

SEQ ID NO: 329047 - DNA, 12 bp, Artificial Sequence
  Oligonucleotide primer for the detection of SNP TSC0034723
aacaaataactc

SEQ ID NO: 329048 - DNA, 12 bp, Artificial Sequence
  Oligonucleotide primer for the detection of SNP TSC0034723
aacgaataactc

SEQ ID NO: 329049 - DNA, 12 bp, Artificial Sequence
  Oligonucleotide primer for the detection of SNP TSC0034723
ttttgattttgg

SEQ ID NO: 329050 - DNA, 12 bp, Artificial Sequence
  Oligonucleotide primer for the detection of SNP TSC0034723
ttttgatttcgg

SEQ ID NO: 329051 - DNA, 12 bp, Artificial Sequence
  Oligonucleotide primer for the detection of SNP TSC0034724
acctcccttact

SEQ ID NO: 329052 - DNA, 12 bp, Artificial Sequence
  Oligonucleotide primer for the detection of SNP TSC0034724
atggagaatgtg

SEQ ID NO: 329053 - DNA, 12 bp, Artificial Sequence
  Oligonucleotide primer for the detection of SNP TSC0034730
atttctttaata

SEQ ID NO: 329054 - DNA, 12 bp, Artificial Sequence
  Oligonucleotide primer for the detection of SNP TSC0034730
atatattttaat

SEQ ID NO: 329055 - DNA, 12 bp, Artificial Sequence
  Oligonucleotide primer for the detection of SNP TSC0034730
acatatttcaat

SEQ ID NO: 329056 - DNA, 12 bp, Artificial Sequence
  Oligonucleotide primer for the detection of SNP TSC0034730
gtttttttgata

SEQ ID NO: 329057 - DNA, 12 bp, Artificial Sequence
  Oligonucleotide primer for the detection of SNP TSC0034731
actaaccataac

SEQ ID NO: 329058 - DNA, 12 bp, Artificial Sequence
  Oligonucleotide primer for the detection of SNP TSC0034731
tggagtgagtgg

SEQ ID NO: 329059 - DNA, 12 bp, Artificial Sequence
  Oligonucleotide primer for the detection of SNP TSC0034733
taaaaagttaag

SEQ ID NO: 329060 - DNA, 12 bp, Artificial Sequence
  Oligonucleotide primer for the detection of SNP TSC0034733
ttgagggaattt

SEQ ID NO: 329061 - DNA, 12 bp, Artificial Sequence
  Oligonucleotide primer for the detection of SNP TSC0034736
ggtttgaaattg

SEQ ID NO: 329062 - DNA, 12 bp, Artificial Sequence
  Oligonucleotide primer for the detection of SNP TSC0034738
ctcccatcctaa

SEQ ID NO: 329063 - DNA, 12 bp, Artificial Sequence
  Oligonucleotide primer for the detection of SNP TSC0034738
ggagggaggagg

SEQ ID NO: 329064 - DNA, 12 bp, Artificial Sequence
  Oligonucleotide primer for the detection of SNP TSC0034739
tcccatttcctt

SEQ ID NO: 329065 - DNA, 12 bp, Artificial Sequence
  Oligonucleotide primer for the detection of SNP TSC0034739
atttggaaaggg

SEQ ID NO: 329066 - DNA, 12 bp, Artificial Sequence
  Oligonucleotide primer for the detection of SNP TSC0034739
attcggaaaggg

SEQ ID NO: 329067 - DNA, 12 bp, Artificial Sequence
  Oligonucleotide primer for the detection of SNP TSC0034740
cttttacataat

SEQ ID NO: 329068 - DNA, 12 bp, Artificial Sequence
  Oligonucleotide primer for the detection of SNP TSC0034740
aatagtataaaa

SEQ ID NO: 329069 - DNA, 12 bp, Artificial Sequence
  Oligonucleotide primer for the detection of SNP TSC0034743
acattaaccacc

SEQ ID NO: 329070 - DNA, 12 bp, Artificial Sequence
  Oligonucleotide primer for the detection of SNP TSC0034743
acgttaaccacc

SEQ ID NO: 329071 - DNA, 12 bp, Artificial Sequence
  Oligonucleotide primer for the detection of SNP TSC0034743
aagtaggttagg

SEQ ID NO: 329072 - DNA, 12 bp, Artificial Sequence
  Oligonucleotide primer for the detection of SNP TSC0034743
gtgttagttatt

SEQ ID NO: 329073 - DNA, 12 bp, Artificial Sequence
  Oligonucleotide primer for the detection of SNP TSC0034743
gcgttagttatt

SEQ ID NO: 329074 - DNA, 12 bp, Artificial Sequence
  Oligonucleotide primer for the detection of SNP TSC0034743
gtgttagttatc

SEQ ID NO: 329075 - DNA, 12 bp, Artificial Sequence
  Oligonucleotide primer for the detection of SNP TSC0034743
gcgttagttatc

SEQ ID NO: 329076 - DNA, 12 bp, Artificial Sequence
  Oligonucleotide primer for the detection of SNP TSC0034745
ataaacgataaa

SEQ ID NO: 329077 - DNA, 12 bp, Artificial Sequence
  Oligonucleotide primer for the detection of SNP TSC0034745
acatcatcacct

SEQ ID NO: 329078 - DNA, 12 bp, Artificial Sequence
  Oligonucleotide primer for the detection of SNP TSC0034745
gtaaatgatgga

SEQ ID NO: 329079 - DNA, 12 bp, Artificial Sequence
  Oligonucleotide primer for the detection of SNP TSC0034745
gtaaacgatgga

SEQ ID NO: 329080 - DNA, 12 bp, Artificial Sequence
  Oligonucleotide primer for the detection of SNP TSC0034750
atttagatggga

SEQ ID NO: 329081 - DNA, 12 bp, Artificial Sequence
  Oligonucleotide primer for the detection of SNP TSC0034750
aaagaggttttt

SEQ ID NO: 329082 - DNA, 12 bp, Artificial Sequence
  Oligonucleotide primer for the detection of SNP TSC0034752
taagttgttatt

SEQ ID NO: 329083 - DNA, 12 bp, Artificial Sequence
  Oligonucleotide primer for the detection of SNP TSC0034752
taaattactatt

SEQ ID NO: 329084 - DNA, 12 bp, Artificial Sequence
  Oligonucleotide primer for the detection of SNP TSC0034752
attagaaaatgt

SEQ ID NO: 329085 - DNA, 12 bp, Artificial Sequence
  Oligonucleotide primer for the detection of SNP TSC0034753
tatgaggatttt

SEQ ID NO: 329086 - DNA, 12 bp, Artificial Sequence
  Oligonucleotide primer for the detection of SNP TSC0034753
cataaaaacctt

SEQ ID NO: 329087 - DNA, 12 bp, Artificial Sequence
  Oligonucleotide primer for the detection of SNP TSC0034753
tagtgaggaggg

SEQ ID NO: 329088 - DNA, 12 bp, Artificial Sequence
  Oligonucleotide primer for the detection of SNP TSC0034754
ctaaaataactc

SEQ ID NO: 329089 - DNA, 12 bp, Artificial Sequence
  Oligonucleotide primer for the detection of SNP TSC0034754
tgtaggtttagg

SEQ ID NO: 329090 - DNA, 12 bp, Artificial Sequence
  Oligonucleotide primer for the detection of SNP TSC0034754
tataaactcaaa

SEQ ID NO: 329091 - DNA, 12 bp, Artificial Sequence
  Oligonucleotide primer for the detection of SNP TSC0034754
ttgaagtggttt

SEQ ID NO: 329092 - DNA, 12 bp, Artificial Sequence
  Oligonucleotide primer for the detection of SNP TSC0034757
agtagatgggta

SEQ ID NO: 329093 - DNA, 12 bp, Artificial Sequence
  Oligonucleotide primer for the detection of SNP TSC0034758
atataataaaaa

SEQ ID NO: 329094 - DNA, 12 bp, Artificial Sequence
  Oligonucleotide primer for the detection of SNP TSC0034758
tatgttttaaga

SEQ ID NO: 329095 - DNA, 12 bp, Artificial Sequence
  Oligonucleotide primer for the detection of SNP TSC0034758
tatatcccaaaa

SEQ ID NO: 329096 - DNA, 12 bp, Artificial Sequence
  Oligonucleotide primer for the detection of SNP TSC0034758
aagatatagtgg

SEQ ID NO: 329097 - DNA, 12 bp, Artificial Sequence
  Oligonucleotide primer for the detection of SNP TSC0034760
ataaaccaaact

SEQ ID NO: 329098 - DNA, 12 bp, Artificial Sequence
  Oligonucleotide primer for the detection of SNP TSC0034760
agagaagtggag

SEQ ID NO: 329099 - DNA, 12 bp, Artificial Sequence
  Oligonucleotide primer for the detection of SNP TSC0034761
taataacacgta

SEQ ID NO: 329100 - DNA, 12 bp, Artificial Sequence
  Oligonucleotide primer for the detection of SNP TSC0034761
aatgatatgtgt

SEQ ID NO: 329101 - DNA, 12 bp, Artificial Sequence
  Oligonucleotide primer for the detection of SNP TSC0034761
aatgatacgtgt

SEQ ID NO: 329102 - DNA, 12 bp, Artificial Sequence
  Oligonucleotide primer for the detection of SNP TSC0034762
agttgataaatt

SEQ ID NO: 329103 - DNA, 12 bp, Artificial Sequence
  Oligonucleotide primer for the detection of SNP TSC0034762
acaactaataaa

SEQ ID NO: 329104 - DNA, 12 bp, Artificial Sequence
  Oligonucleotide primer for the detection of SNP TSC0034762
ttgttgggtaga

SEQ ID NO: 329105 - DNA, 12 bp, Artificial Sequence
  Oligonucleotide primer for the detection of SNP TSC0034763
ttgttatggttt

SEQ ID NO: 329106 - DNA, 12 bp, Artificial Sequence
  Oligonucleotide primer for the detection of SNP TSC0034763
ttgttacggttt

SEQ ID NO: 329107 - DNA, 12 bp, Artificial Sequence
  Oligonucleotide primer for the detection of SNP TSC0034763
ttgttatggttc

SEQ ID NO: 329108 - DNA, 12 bp, Artificial Sequence
  Oligonucleotide primer for the detection of SNP TSC0034763
ttgttacggttc

SEQ ID NO: 329109 - DNA, 12 bp, Artificial Sequence
  Oligonucleotide primer for the detection of SNP TSC0034763
tccctattacaa

SEQ ID NO: 329110 - DNA, 12 bp, Artificial Sequence
  Oligonucleotide primer for the detection of SNP TSC0034763
tccctattacga

SEQ ID NO: 329111 - DNA, 12 bp, Artificial Sequence
  Oligonucleotide primer for the detection of SNP TSC0034763
ggaagttaatga

SEQ ID NO: 329112 - DNA, 12 bp, Artificial Sequence
  Oligonucleotide primer for the detection of SNP TSC0034764
actcaaaatcaa

SEQ ID NO: 329113 - DNA, 12 bp, Artificial Sequence
  Oligonucleotide primer for the detection of SNP TSC0034765
aactcacctaac

SEQ ID NO: 329114 - DNA, 12 bp, Artificial Sequence
  Oligonucleotide primer for the detection of SNP TSC0034765
tttaagtagagg

SEQ ID NO: 329115 - DNA, 12 bp, Artificial Sequence
  Oligonucleotide primer for the detection of SNP TSC0034765
ggtttatttggt

SEQ ID NO: 329116 - DNA, 12 bp, Artificial Sequence
  Oligonucleotide primer for the detection of SNP TSC0034765
ggtttatttggc

SEQ ID NO: 329117 - DNA, 12 bp, Artificial Sequence
  Oligonukleotid-Primer
acattcattatt

SEQ ID NO: 329118 - DNA, 12 bp, Artificial Sequence
  Oligonucleotide primer for the detection of SNP TSC0034766
ttataaagattg

SEQ ID NO: 329119 - DNA, 12 bp, Artificial Sequence
  Oligonucleotide primer for the detection of SNP TSC0034767
aaaatttcacac

SEQ ID NO: 329120 - DNA, 12 bp, Artificial Sequence
  Oligonucleotide primer for the detection of SNP TSC0034767
tatgtagaatat

SEQ ID NO: 329121 - DNA, 12 bp, Artificial Sequence
  Oligonucleotide primer for the detection of SNP TSC0034767
atataaaataca

SEQ ID NO: 329122 - DNA, 12 bp, Artificial Sequence
  Oligonucleotide primer for the detection of SNP TSC0034767
gaaattttatat

SEQ ID NO: 329123 - DNA, 12 bp, Artificial Sequence
  Oligonucleotide primer for the detection of SNP TSC0034767
gaaattttatac

SEQ ID NO: 329124 - DNA, 12 bp, Artificial Sequence
  Oligonucleotide primer for the detection of SNP TSC0034768
accaatacataa

SEQ ID NO: 329125 - DNA, 12 bp, Artificial Sequence
  Oligonucleotide primer for the detection of SNP TSC0034768
gaaattttaaat

SEQ ID NO: 329126 - DNA, 12 bp, Artificial Sequence
  Oligonucleotide primer for the detection of SNP TSC0034768
aaatttcaaaca

SEQ ID NO: 329127 - DNA, 12 bp, Artificial Sequence
  Oligonucleotide primer for the detection of SNP TSC0034768
gttaatatataa

SEQ ID NO: 329128 - DNA, 12 bp, Artificial Sequence
  Oligonucleotide primer for the detection of SNP TSC0034769
ataaacaaacac

SEQ ID NO: 329129 - DNA, 12 bp, Artificial Sequence
  Oligonucleotide primer for the detection of SNP TSC0034769
gttaggtatggt

SEQ ID NO: 329130 - DNA, 12 bp, Artificial Sequence
  Oligonucleotide primer for the detection of SNP TSC0034769
ataggtaagtat

SEQ ID NO: 329131 - DNA, 12 bp, Artificial Sequence
  Oligonucleotide primer for the detection of SNP TSC0034769
ataggtaagtac

SEQ ID NO: 329132 - DNA, 12 bp, Artificial Sequence
  Oligonucleotide primer for the detection of SNP TSC0034770
caatatcttcac

SEQ ID NO: 329133 - DNA, 12 bp, Artificial Sequence
  Oligonucleotide primer for the detection of SNP TSC0034770
agtgggagttta

SEQ ID NO: 329134 - DNA, 12 bp, Artificial Sequence
  Oligonucleotide primer for the detection of SNP TSC0034772
gaagaaagtttt

SEQ ID NO: 329135 - DNA, 12 bp, Artificial Sequence
  Oligonucleotide primer for the detection of SNP TSC0034772
gaagaaagtttc

SEQ ID NO: 329136 - DNA, 12 bp, Artificial Sequence
  Oligonucleotide primer for the detection of SNP TSC0034772
aaaaaaaattcc

SEQ ID NO: 329137 - DNA, 12 bp, Artificial Sequence
  Oligonucleotide primer for the detection of SNP TSC0034772
tttgaaggagag

SEQ ID NO: 329138 - DNA, 12 bp, Artificial Sequence
  Oligonucleotide primer for the detection of SNP TSC0034774
aaattcaactat

SEQ ID NO: 329139 - DNA, 12 bp, Artificial Sequence
  Oligonucleotide primer for the detection of SNP TSC0034774
aaattcgactat

SEQ ID NO: 329140 - DNA, 12 bp, Artificial Sequence
  Oligonucleotide primer for the detection of SNP TSC0034774
tggggtgtttgg

SEQ ID NO: 329141 - DNA, 12 bp, Artificial Sequence
  Oligonucleotide primer for the detection of SNP TSC0034774
cggggtgtttgg

SEQ ID NO: 329142 - DNA, 12 bp, Artificial Sequence
  Oligonucleotide primer for the detection of SNP TSC0034774
tggggtgttcgg

SEQ ID NO: 329143 - DNA, 12 bp, Artificial Sequence
  Oligonucleotide primer for the detection of SNP TSC0034774
cggggtgttcgg

SEQ ID NO: 329144 - DNA, 12 bp, Artificial Sequence
  Oligonucleotide primer for the detection of SNP TSC0034775
atcataaattat

SEQ ID NO: 329145 - DNA, 12 bp, Artificial Sequence
  Oligonucleotide primer for the detection of SNP TSC0034775
aatttaaatgag

SEQ ID NO: 329146 - DNA, 12 bp, Artificial Sequence
  Oligonucleotide primer for the detection of SNP TSC0034776
ctataaccactt

SEQ ID NO: 329147 - DNA, 12 bp, Artificial Sequence
  Oligonucleotide primer for the detection of SNP TSC0034776
ggattgaatgga

SEQ ID NO: 329148 - DNA, 12 bp, Artificial Sequence
  Oligonucleotide primer for the detection of SNP TSC0034782
aacttccacctt

SEQ ID NO: 329149 - DNA, 12 bp, Artificial Sequence
  Oligonucleotide primer for the detection of SNP TSC0034788
ataccacaaaca

SEQ ID NO: 329150 - DNA, 12 bp, Artificial Sequence
  Oligonucleotide primer for the detection of SNP TSC0034788
ggtgttataggt

SEQ ID NO: 329151 - DNA, 12 bp, Artificial Sequence
  Oligonucleotide primer for the detection of SNP TSC0034789
ccatttaaaaac

SEQ ID NO: 329152 - DNA, 12 bp, Artificial Sequence
  Oligonucleotide primer for the detection of SNP TSC0034789
gatttaaagtaa

SEQ ID NO: 329153 - DNA, 12 bp, Artificial Sequence
  Oligonucleotide primer for the detection of SNP TSC0034791
ataccctaccct

SEQ ID NO: 329154 - DNA, 12 bp, Artificial Sequence
  Oligonucleotide primer for the detection of SNP TSC0034791
ggttggttttgg

SEQ ID NO: 329155 - DNA, 12 bp, Artificial Sequence
  Oligonucleotide primer for the detection of SNP TSC0034791
ggttggtttcgg

SEQ ID NO: 329156 - DNA, 12 bp, Artificial Sequence
  Oligonucleotide primer for the detection of SNP TSC0034792
cctaaatataaa

SEQ ID NO: 329157 - DNA, 12 bp, Artificial Sequence
  Oligonucleotide primer for the detection of SNP TSC0034792
aattgtttaatt

SEQ ID NO: 329158 - DNA, 12 bp, Artificial Sequence
  Oligonucleotide primer for the detection of SNP TSC0034792
aactatccaatt

SEQ ID NO: 329159 - DNA, 12 bp, Artificial Sequence
  Oligonucleotide primer for the detection of SNP TSC0034792
tttaaatgtaag

SEQ ID NO: 329160 - DNA, 12 bp, Artificial Sequence
  Oligonucleotide primer for the detection of SNP TSC0034798
ctttaacaaata

SEQ ID NO: 329161 - DNA, 12 bp, Artificial Sequence
  Oligonucleotide primer for the detection of SNP TSC0034798
tttcatttcccc

SEQ ID NO: 329162 - DNA, 12 bp, Artificial Sequence
  Oligonucleotide primer for the detection of SNP TSC0034798
ttttggtaagtg

SEQ ID NO: 329163 - DNA, 12 bp, Artificial Sequence
  Oligonucleotide primer for the detection of SNP TSC0034799
tacactctacca

SEQ ID NO: 329164 - DNA, 12 bp, Artificial Sequence
  Oligonucleotide primer for the detection of SNP TSC0034799
ttttttatagga

SEQ ID NO: 329165 - DNA, 12 bp, Artificial Sequence
  Oligonucleotide primer for the detection of SNP TSC0034799
tccctcacaaaa

SEQ ID NO: 329166 - DNA, 12 bp, Artificial Sequence
  Oligonucleotide primer for the detection of SNP TSC0034799
tgtattttgtta

SEQ ID NO: 329167 - DNA, 12 bp, Artificial Sequence
  Oligonucleotide primer for the detection of SNP TSC0034802
ttatttttatcg

SEQ ID NO: 329168 - DNA, 12 bp, Artificial Sequence
  Oligonucleotide primer for the detection of SNP TSC0034802
ccatccccacca

SEQ ID NO: 329169 - DNA, 12 bp, Artificial Sequence
  Oligonucleotide primer for the detection of SNP TSC0034802
ccatccccaccg

SEQ ID NO: 329170 - DNA, 12 bp, Artificial Sequence
  Oligonucleotide primer for the detection of SNP TSC0034802
gaagatgaaagg

SEQ ID NO: 329171 - DNA, 12 bp, Artificial Sequence
  Oligonucleotide primer for the detection of SNP TSC0034802
gaagacgaaagg

SEQ ID NO: 329172 - DNA, 12 bp, Artificial Sequence
  Oligonucleotide primer for the detection of SNP TSC0034804
tattaatttatt

SEQ ID NO: 329173 - DNA, 12 bp, Artificial Sequence
  Oligonucleotide primer for the detection of SNP TSC0034804
ttatcaacccat

SEQ ID NO: 329174 - DNA, 12 bp, Artificial Sequence
  Oligonucleotide primer for the detection of SNP TSC0034804
tgaaaatatagt

SEQ ID NO: 329175 - DNA, 12 bp, Artificial Sequence
  Oligonucleotide primer for the detection of SNP TSC0034805
aaaatccatcct

SEQ ID NO: 329176 - DNA, 12 bp, Artificial Sequence
  Oligonucleotide primer for the detection of SNP TSC0034808
ccaaactacttt

SEQ ID NO: 329177 - DNA, 12 bp, Artificial Sequence
  Oligonucleotide primer for the detection of SNP TSC0034808
agggtttttatg

SEQ ID NO: 329178 - DNA, 12 bp, Artificial Sequence
  Oligonucleotide primer for the detection of SNP TSC0034808
ttaggttgtttt

SEQ ID NO: 329179 - DNA, 12 bp, Artificial Sequence
  Oligonucleotide primer for the detection of SNP TSC0034809
aactcttacctt

SEQ ID NO: 329180 - DNA, 12 bp, Artificial Sequence
  Oligonucleotide primer for the detection of SNP TSC0034811
ccctaaaaattc

SEQ ID NO: 329181 - DNA, 12 bp, Artificial Sequence
  Oligonucleotide primer for the detection of SNP TSC0034811
tggattttagta

SEQ ID NO: 329182 - DNA, 12 bp, Artificial Sequence
  Oligonucleotide primer for the detection of SNP TSC0034813
aacccaacacta

SEQ ID NO: 329183 - DNA, 12 bp, Artificial Sequence
  Oligonucleotide primer for the detection of SNP TSC0034813
aacccaacgcta

SEQ ID NO: 329184 - DNA, 12 bp, Artificial Sequence
  Oligonucleotide primer for the detection of SNP TSC0034813
aacccgacacta

SEQ ID NO: 329185 - DNA, 12 bp, Artificial Sequence
  Oligonucleotide primer for the detection of SNP TSC0034813
aacccgacgcta

SEQ ID NO: 329186 - DNA, 12 bp, Artificial Sequence
  Oligonucleotide primer for the detection of SNP TSC0034813
ttagtagtagtt

SEQ ID NO: 329187 - DNA, 12 bp, Artificial Sequence
  Oligonucleotide primer for the detection of SNP TSC0034813
ttagtagtagtc

SEQ ID NO: 329188 - DNA, 12 bp, Artificial Sequence
  Oligonucleotide primer for the detection of SNP TSC0034813
tcaacaacaacc

SEQ ID NO: 329189 - DNA, 12 bp, Artificial Sequence
  Oligonucleotide primer for the detection of SNP TSC0034813
ggtttggtgttg

SEQ ID NO: 329190 - DNA, 12 bp, Artificial Sequence
  Oligonucleotide primer for the detection of SNP TSC0034813
ggttcggtgttg

SEQ ID NO: 329191 - DNA, 12 bp, Artificial Sequence
  Oligonucleotide primer for the detection of SNP TSC0034813
ggtttggcgttg

SEQ ID NO: 329192 - DNA, 12 bp, Artificial Sequence
  Oligonucleotide primer for the detection of SNP TSC0034813
ggttcggcgttg

SEQ ID NO: 329193 - DNA, 12 bp, Artificial Sequence
  Oligonucleotide primer for the detection of SNP TSC0034814
acacaattactt

SEQ ID NO: 329194 - DNA, 12 bp, Artificial Sequence
  Oligonucleotide primer for the detection of SNP TSC0034814
acacgattactt

SEQ ID NO: 329195 - DNA, 12 bp, Artificial Sequence
  Oligonucleotide primer for the detection of SNP TSC0034814
ggttggatgtag

SEQ ID NO: 329196 - DNA, 12 bp, Artificial Sequence
  Oligonucleotide primer for the detection of SNP TSC0034814
ggtcggatgtag

SEQ ID NO: 329197 - DNA, 12 bp, Artificial Sequence
  Oligonucleotide primer for the detection of SNP TSC0034814
ggttggacgtag

SEQ ID NO: 329198 - DNA, 12 bp, Artificial Sequence
  Oligonucleotide primer for the detection of SNP TSC0034814
ggtcggacgtag

SEQ ID NO: 329199 - DNA, 12 bp, Artificial Sequence
  Oligonucleotide primer for the detection of SNP TSC0034815
caaaaactatta

SEQ ID NO: 329200 - DNA, 12 bp, Artificial Sequence
  Oligonucleotide primer for the detection of SNP TSC0034815
tttttgtttagt

SEQ ID NO: 329201 - DNA, 12 bp, Artificial Sequence
  Oligonucleotide primer for the detection of SNP TSC0034815
ctctacccaata

SEQ ID NO: 329202 - DNA, 12 bp, Artificial Sequence
  Oligonucleotide primer for the detection of SNP TSC0034815
tagaggttgtta

SEQ ID NO: 329203 - DNA, 12 bp, Artificial Sequence
  Oligonucleotide primer for the detection of SNP TSC0034816
aaaaaatcaatt

SEQ ID NO: 329204 - DNA, 12 bp, Artificial Sequence
  Oligonucleotide primer for the detection of SNP TSC0034819
ggttatgttaaa

SEQ ID NO: 329205 - DNA, 12 bp, Artificial Sequence
  Oligonucleotide primer for the detection of SNP TSC0034820
caaaattacaaa

SEQ ID NO: 329206 - DNA, 12 bp, Artificial Sequence
  Oligonucleotide primer for the detection of SNP TSC0034820
ttatttgtatag

SEQ ID NO: 329207 - DNA, 12 bp, Artificial Sequence
  Oligonucleotide primer for the detection of SNP TSC0034820
catttacataaa

SEQ ID NO: 329208 - DNA, 12 bp, Artificial Sequence
  Oligonucleotide primer for the detection of SNP TSC0034820
aggattgtaaat

SEQ ID NO: 329209 - DNA, 12 bp, Artificial Sequence
  Oligonucleotide primer for the detection of SNP TSC0034821
caactctaaata

SEQ ID NO: 329210 - DNA, 12 bp, Artificial Sequence
  Oligonucleotide primer for the detection of SNP TSC0034821
agattgaatttt

SEQ ID NO: 329211 - DNA, 12 bp, Artificial Sequence
  Oligonucleotide primer for the detection of SNP TSC0034821
aaactaaatcct

SEQ ID NO: 329212 - DNA, 12 bp, Artificial Sequence
  Oligonucleotide primer for the detection of SNP TSC0034821
taattttgagtg

SEQ ID NO: 329213 - DNA, 12 bp, Artificial Sequence
  Oligonucleotide primer for the detection of SNP TSC0034826
cacaaaaccaat

SEQ ID NO: 329214 - DNA, 12 bp, Artificial Sequence
  Oligonucleotide primer for the detection of SNP TSC0034826
cacaaaaccgat

SEQ ID NO: 329215 - DNA, 12 bp, Artificial Sequence
  Oligonucleotide primer for the detection of SNP TSC0034826
cacgaaaccaat

SEQ ID NO: 329216 - DNA, 12 bp, Artificial Sequence
  Oligonucleotide primer for the detection of SNP TSC0034826
cgcaaaaccaat

SEQ ID NO: 329217 - DNA, 12 bp, Artificial Sequence
  Oligonucleotide primer for the detection of SNP TSC0034826
cacgaaaccgat

SEQ ID NO: 329218 - DNA, 12 bp, Artificial Sequence
  Oligonucleotide primer for the detection of SNP TSC0034826
cgcaaaaccgat

SEQ ID NO: 329219 - DNA, 12 bp, Artificial Sequence
  Oligonucleotide primer for the detection of SNP TSC0034826
cgcgaaaccaat

SEQ ID NO: 329220 - DNA, 12 bp, Artificial Sequence
  Oligonucleotide primer for the detection of SNP TSC0034826
cgcgaaaccgat

SEQ ID NO: 329221 - DNA, 12 bp, Artificial Sequence
  Oligonucleotide primer for the detection of SNP TSC0034831
aattacaaactt

SEQ ID NO: 329222 - DNA, 12 bp, Artificial Sequence
  Oligonucleotide primer for the detection of SNP TSC0034831
tgatgggtatga

SEQ ID NO: 329223 - DNA, 12 bp, Artificial Sequence
  Oligonucleotide primer for the detection of SNP TSC0034831
taataaacataa

SEQ ID NO: 329224 - DNA, 12 bp, Artificial Sequence
  Oligonucleotide primer for the detection of SNP TSC0034831
aattataggttt

SEQ ID NO: 329225 - DNA, 12 bp, Artificial Sequence
  Oligonucleotide primer for the detection of SNP TSC0034832
gttttaaaattg

SEQ ID NO: 329226 - DNA, 12 bp, Artificial Sequence
  Oligonucleotide primer for the detection of SNP TSC0034832
actctaaaacta

SEQ ID NO: 329227 - DNA, 12 bp, Artificial Sequence
  Oligonucleotide primer for the detection of SNP TSC0034832
taatttgggggt

SEQ ID NO: 329228 - DNA, 12 bp, Artificial Sequence
  Oligonucleotide primer for the detection of SNP TSC0034834
accatcacccat

SEQ ID NO: 329229 - DNA, 12 bp, Artificial Sequence
  Oligonucleotide primer for the detection of SNP TSC0034834
gccatcacccat

SEQ ID NO: 329230 - DNA, 12 bp, Artificial Sequence
  Oligonucleotide primer for the detection of SNP TSC0034834
taaaatattagg

SEQ ID NO: 329231 - DNA, 12 bp, Artificial Sequence
  Oligonucleotide primer for the detection of SNP TSC0034834
caaaataccaaa

SEQ ID NO: 329232 - DNA, 12 bp, Artificial Sequence
  Oligonucleotide primer for the detection of SNP TSC0034835
acaacatctaaa

SEQ ID NO: 329233 - DNA, 12 bp, Artificial Sequence
  Oligonucleotide primer for the detection of SNP TSC0034835
ttttgttttata

SEQ ID NO: 329234 - DNA, 12 bp, Artificial Sequence
  Oligonucleotide primer for the detection of SNP TSC0034835
ttctatcctaca

SEQ ID NO: 329235 - DNA, 12 bp, Artificial Sequence
  Oligonucleotide primer for the detection of SNP TSC0034835
tgggtaatattt

SEQ ID NO: 329236 - DNA, 12 bp, Artificial Sequence
  Oligonucleotide primer for the detection of SNP TSC0034837
cttcctcctcct

SEQ ID NO: 329237 - DNA, 12 bp, Artificial Sequence
  Oligonucleotide primer for the detection of SNP TSC0034837
ttttttgttatg

SEQ ID NO: 329238 - DNA, 12 bp, Artificial Sequence
  Oligonucleotide primer for the detection of SNP TSC0034838
aaaacccaaatt

SEQ ID NO: 329239 - DNA, 12 bp, Artificial Sequence
  Oligonucleotide primer for the detection of SNP TSC0034838
gtttatgttggg

SEQ ID NO: 329240 - DNA, 12 bp, Artificial Sequence
  Oligonucleotide primer for the detection of SNP TSC0034839
aaaaaccactaa

SEQ ID NO: 329241 - DNA, 12 bp, Artificial Sequence
  Oligonucleotide primer for the detection of SNP TSC0034839
taatgtgtatat

SEQ ID NO: 329242 - DNA, 12 bp, Artificial Sequence
  Oligonucleotide primer for the detection of SNP TSC0034839
aaaaattattga

SEQ ID NO: 329243 - DNA, 12 bp, Artificial Sequence
  Oligonucleotide primer for the detection of SNP TSC0034840
aattaaaatact

SEQ ID NO: 329244 - DNA, 12 bp, Artificial Sequence
  Oligonucleotide primer for the detection of SNP TSC0034840
attgttatttaa

SEQ ID NO: 329245 - DNA, 12 bp, Artificial Sequence
  Oligonucleotide primer for the detection of SNP TSC0034840
atcgttatttaa

SEQ ID NO: 329246 - DNA, 12 bp, Artificial Sequence
  Oligonucleotide primer for the detection of SNP TSC0034840
accactatctaa

SEQ ID NO: 329247 - DNA, 12 bp, Artificial Sequence
  Oligonucleotide primer for the detection of SNP TSC0034840
accgctatctaa

SEQ ID NO: 329248 - DNA, 12 bp, Artificial Sequence
  Oligonucleotide primer for the detection of SNP TSC0034840
gattaaaatgtt

SEQ ID NO: 329249 - DNA, 12 bp, Artificial Sequence
  Oligonucleotide primer for the detection of SNP TSC0034842
ctccaaatataa

SEQ ID NO: 329250 - DNA, 12 bp, Artificial Sequence
  Oligonucleotide primer for the detection of SNP TSC0034842
ccctctactatc

SEQ ID NO: 329251 - DNA, 12 bp, Artificial Sequence
  Oligonucleotide primer for the detection of SNP TSC0034842
ttttaggtgtga

SEQ ID NO: 329252 - DNA, 12 bp, Artificial Sequence
  Oligonucleotide primer for the detection of SNP TSC0034844
ttgagatgaagt

SEQ ID NO: 329253 - DNA, 12 bp, Artificial Sequence
  Oligonucleotide primer for the detection of SNP TSC0034844
taataagagtaa

SEQ ID NO: 329254 - DNA, 12 bp, Artificial Sequence
  Oligonucleotide primer for the detection of SNP TSC0034845
ctttactaacct

SEQ ID NO: 329255 - DNA, 12 bp, Artificial Sequence
  Oligonucleotide primer for the detection of SNP TSC0034845
attctatcccca

SEQ ID NO: 329256 - DNA, 12 bp, Artificial Sequence
  Oligonucleotide primer for the detection of SNP TSC0034846
aacatcacaaaa

SEQ ID NO: 329257 - DNA, 12 bp, Artificial Sequence
  Oligonucleotide primer for the detection of SNP TSC0034846
cacttcaaacaa

SEQ ID NO: 329258 - DNA, 12 bp, Artificial Sequence
  Oligonucleotide primer for the detection of SNP TSC0034846
gatattataaag

SEQ ID NO: 329259 - DNA, 12 bp, Artificial Sequence
  Oligonucleotide primer for the detection of SNP TSC0034847
tggttagttatt

SEQ ID NO: 329260 - DNA, 12 bp, Artificial Sequence
  Oligonucleotide primer for the detection of SNP TSC0034847
taatcaattact

SEQ ID NO: 329261 - DNA, 12 bp, Artificial Sequence
  Oligonucleotide primer for the detection of SNP TSC0034847
aagagggtagag

SEQ ID NO: 329262 - DNA, 12 bp, Artificial Sequence
  Oligonucleotide primer for the detection of SNP TSC0034852
ttcccttccctc

SEQ ID NO: 329263 - DNA, 12 bp, Artificial Sequence
  Oligonucleotide primer for the detection of SNP TSC0034852
taggtggggttg

SEQ ID NO: 329264 - DNA, 12 bp, Artificial Sequence
  Oligonucleotide primer for the detection of SNP TSC0034853
taattcatcttc

SEQ ID NO: 329265 - DNA, 12 bp, Artificial Sequence
  Oligonucleotide primer for the detection of SNP TSC0034853
ttaggtaggttg

SEQ ID NO: 329266 - DNA, 12 bp, Artificial Sequence
  Oligonucleotide primer for the detection of SNP TSC0034853
ctaaataaacta

SEQ ID NO: 329267 - DNA, 12 bp, Artificial Sequence
  Oligonucleotide primer for the detection of SNP TSC0034854
tattaattcatc

SEQ ID NO: 329268 - DNA, 12 bp, Artificial Sequence
  Oligonucleotide primer for the detection of SNP TSC0034854
ggtaggttggga

SEQ ID NO: 329269 - DNA, 12 bp, Artificial Sequence
  Oligonucleotide primer for the detection of SNP TSC0034855
cattacaaaccc

SEQ ID NO: 329270 - DNA, 12 bp, Artificial Sequence
  Oligonucleotide primer for the detection of SNP TSC0034855
cattacgaaccc

SEQ ID NO: 329271 - DNA, 12 bp, Artificial Sequence
  Oligonucleotide primer for the detection of SNP TSC0034855
aaagagaggttg

SEQ ID NO: 329272 - DNA, 12 bp, Artificial Sequence
  Oligonucleotide primer for the detection of SNP TSC0034856
atctatctatct

SEQ ID NO: 329273 - DNA, 12 bp, Artificial Sequence
  Oligonucleotide primer for the detection of SNP TSC0034856
agaaatttttag

SEQ ID NO: 329274 - DNA, 12 bp, Artificial Sequence
  Oligonucleotide primer for the detection of SNP TSC0034857
attttattgtta

SEQ ID NO: 329275 - DNA, 12 bp, Artificial Sequence
  Oligonucleotide primer for the detection of SNP TSC0034857
attttatcgtta

SEQ ID NO: 329276 - DNA, 12 bp, Artificial Sequence
  Oligonucleotide primer for the detection of SNP TSC0034858
acaatccaacct

SEQ ID NO: 329277 - DNA, 12 bp, Artificial Sequence
  Oligonucleotide primer for the detection of SNP TSC0034858
acaatccgacct

SEQ ID NO: 329278 - DNA, 12 bp, Artificial Sequence
  Oligonucleotide primer for the detection of SNP TSC0034858
gcaatccaacct

SEQ ID NO: 329279 - DNA, 12 bp, Artificial Sequence
  Oligonucleotide primer for the detection of SNP TSC0034858
gcaatccgacct

SEQ ID NO: 329280 - DNA, 12 bp, Artificial Sequence
  Oligonucleotide primer for the detection of SNP TSC0034858
gtagtttggttt

SEQ ID NO: 329281 - DNA, 12 bp, Artificial Sequence
  Oligonucleotide primer for the detection of SNP TSC0034858
gtagttcggttt

SEQ ID NO: 329282 - DNA, 12 bp, Artificial Sequence
  Oligonucleotide primer for the detection of SNP TSC0034860
tcatacctataa

SEQ ID NO: 329283 - DNA, 12 bp, Artificial Sequence
  Oligonucleotide primer for the detection of SNP TSC0034861
aatccacctacc

SEQ ID NO: 329284 - DNA, 12 bp, Artificial Sequence
  Oligonucleotide primer for the detection of SNP TSC0034861
aatccgcctacc

SEQ ID NO: 329285 - DNA, 12 bp, Artificial Sequence
  Oligonucleotide primer for the detection of SNP TSC0034862
aaatctaaaatt

SEQ ID NO: 329286 - DNA, 12 bp, Artificial Sequence
  Oligonucleotide primer for the detection of SNP TSC0034862
aatgaatagggg

SEQ ID NO: 329287 - DNA, 12 bp, Artificial Sequence
  Oligonucleotide primer for the detection of SNP TSC0034862
ggatttggaatt

SEQ ID NO: 329288 - DNA, 12 bp, Artificial Sequence
  Oligonucleotide primer for the detection of SNP TSC0034866
taacatctacct

SEQ ID NO: 329289 - DNA, 12 bp, Artificial Sequence
  Oligonucleotide primer for the detection of SNP TSC0034866
tagttttatttg

SEQ ID NO: 329290 - DNA, 12 bp, Artificial Sequence
  Oligonucleotide primer for the detection of SNP TSC0034866
taatttcatcta

SEQ ID NO: 329291 - DNA, 12 bp, Artificial Sequence
  Oligonukleotid-Primer
tgatatttgttt

SEQ ID NO: 329292 - DNA, 12 bp, Artificial Sequence
  Oligonucleotide primer for the detection of SNP TSC0034867
caaaaactaaat

SEQ ID NO: 329293 - DNA, 12 bp, Artificial Sequence
  Oligonucleotide primer for the detection of SNP TSC0034867
ttttatatatgg

SEQ ID NO: 329294 - DNA, 12 bp, Artificial Sequence
  Oligonucleotide primer for the detection of SNP TSC0034867
ttttatatacgg

SEQ ID NO: 329295 - DNA, 12 bp, Artificial Sequence
  Oligonukleotid-Primer
ttattcgattta

SEQ ID NO: 329296 - DNA, 12 bp, Artificial Sequence
  Oligonucleotide primer for the detection of SNP TSC0034870
aaccaaaatcat

SEQ ID NO: 329297 - DNA, 12 bp, Artificial Sequence
  Oligonucleotide primer for the detection of SNP TSC0034870
ttaatgttaata

SEQ ID NO: 329298 - DNA, 12 bp, Artificial Sequence
  Oligonucleotide primer for the detection of SNP TSC0034873
aacacatcacaa

SEQ ID NO: 329299 - DNA, 12 bp, Artificial Sequence
  Oligonukleotid-Primer
aacacatcgcaa

SEQ ID NO: 329300 - DNA, 12 bp, Artificial Sequence
  Oligonucleotide primer for the detection of SNP TSC0034873
tgtttggtattt

SEQ ID NO: 329301 - DNA, 12 bp, Artificial Sequence
  Oligonucleotide primer for the detection of SNP TSC0034873
tatttaatactt

SEQ ID NO: 329302 - DNA, 12 bp, Artificial Sequence
  Oligonucleotide primer for the detection of SNP TSC0034873
agtatatcgtag

SEQ ID NO: 329303 - DNA, 12 bp, Artificial Sequence
  Oligonucleotide primer for the detection of SNP TSC0034874
atcctaaaacaa

SEQ ID NO: 329304 - DNA, 12 bp, Artificial Sequence
  Oligonucleotide primer for the detection of SNP TSC0034874
tttggaggtaga

SEQ ID NO: 329305 - DNA, 12 bp, Artificial Sequence
  Oligonucleotide primer for the detection of SNP TSC0034874
cctaaaaacaaa

SEQ ID NO: 329306 - DNA, 12 bp, Artificial Sequence
  Oligonucleotide primer for the detection of SNP TSC0034874
ggttttgaaata

SEQ ID NO: 329307 - DNA, 12 bp, Artificial Sequence
  Oligonucleotide primer for the detection of SNP TSC0034875
acacttactaat

SEQ ID NO: 329308 - DNA, 12 bp, Artificial Sequence
  Oligonucleotide primer for the detection of SNP TSC0034876
cttaaacttcta

SEQ ID NO: 329309 - DNA, 12 bp, Artificial Sequence
  Oligonucleotide primer for the detection of SNP TSC0034878
ctaccttttatc

SEQ ID NO: 329310 - DNA, 12 bp, Artificial Sequence
  Oligonucleotide primer for the detection of SNP TSC0034878
agtgttttagta

SEQ ID NO: 329311 - DNA, 12 bp, Artificial Sequence
  Oligonucleotide primer for the detection of SNP TSC0034878
agcgttttagta

SEQ ID NO: 329312 - DNA, 12 bp, Artificial Sequence
  Oligonucleotide primer for the detection of SNP TSC0034880
ccaccacaccca

SEQ ID NO: 329313 - DNA, 12 bp, Artificial Sequence
  Oligonucleotide primer for the detection of SNP TSC0034880
ccaccacacccg

SEQ ID NO: 329314 - DNA, 12 bp, Artificial Sequence
  Oligonucleotide primer for the detection of SNP TSC0034880
ccaccacgccca

SEQ ID NO: 329315 - DNA, 12 bp, Artificial Sequence
  Oligonucleotide primer for the detection of SNP TSC0034880
ccaccacgcccg

SEQ ID NO: 329316 - DNA, 12 bp, Artificial Sequence
  Oligonucleotide primer for the detection of SNP TSC0034880
tataaaaattgg

SEQ ID NO: 329317 - DNA, 12 bp, Artificial Sequence
  Oligonucleotide primer for the detection of SNP TSC0034880
ttattacgtttg

SEQ ID NO: 329318 - DNA, 12 bp, Artificial Sequence
  Oligonucleotide primer for the detection of SNP TSC0034880
ttattatgttcg

SEQ ID NO: 329319 - DNA, 12 bp, Artificial Sequence
  Oligonucleotide primer for the detection of SNP TSC0034880
ttattacgttcg

SEQ ID NO: 329320 - DNA, 12 bp, Artificial Sequence
  Oligonucleotide primer for the detection of SNP TSC0034881
tcaaacacctcc

SEQ ID NO: 329321 - DNA, 12 bp, Artificial Sequence
  Oligonucleotide primer for the detection of SNP TSC0034881
aggaagttagaa

SEQ ID NO: 329322 - DNA, 12 bp, Artificial Sequence
  Oligonucleotide primer for the detection of SNP TSC0034882
atacctaaccaa

SEQ ID NO: 329323 - DNA, 12 bp, Artificial Sequence
  Oligonucleotide primer for the detection of SNP TSC0034882
gtacctaaccaa

SEQ ID NO: 329324 - DNA, 12 bp, Artificial Sequence
  Oligonucleotide primer for the detection of SNP TSC0034882
gaaattttgtgt

SEQ ID NO: 329325 - DNA, 12 bp, Artificial Sequence
  Oligonucleotide primer for the detection of SNP TSC0034882
gaaattttgtgc

SEQ ID NO: 329326 - DNA, 12 bp, Artificial Sequence
  Oligonucleotide primer for the detection of SNP TSC0034882
gtgtttggttag

SEQ ID NO: 329327 - DNA, 12 bp, Artificial Sequence
  Oligonucleotide primer for the detection of SNP TSC0034884
aactatcctaaa

SEQ ID NO: 329328 - DNA, 12 bp, Artificial Sequence
  Oligonucleotide primer for the detection of SNP TSC0034884
tggtttagggtg

SEQ ID NO: 329329 - DNA, 12 bp, Artificial Sequence
  Oligonucleotide primer for the detection of SNP TSC0034884
taacccaaaata

SEQ ID NO: 329330 - DNA, 12 bp, Artificial Sequence
  Oligonucleotide primer for the detection of SNP TSC0034884
gattgttttgga

SEQ ID NO: 329331 - DNA, 12 bp, Artificial Sequence
  Oligonucleotide primer for the detection of SNP TSC0034887
aattaatcacca

SEQ ID NO: 329332 - DNA, 12 bp, Artificial Sequence
  Oligonucleotide primer for the detection of SNP TSC0034887
aattaatcaccg

SEQ ID NO: 329333 - DNA, 12 bp, Artificial Sequence
  Oligonucleotide primer for the detection of SNP TSC0034887
aattaatcgcca

SEQ ID NO: 329334 - DNA, 12 bp, Artificial Sequence
  Oligonucleotide primer for the detection of SNP TSC0034887
aattaatcgccg

SEQ ID NO: 329335 - DNA, 12 bp, Artificial Sequence
  Oligonucleotide primer for the detection of SNP TSC0034887
ggaaatatagat

SEQ ID NO: 329336 - DNA, 12 bp, Artificial Sequence
  Oligonucleotide primer for the detection of SNP TSC0034887
aaaaatacaaat

SEQ ID NO: 329337 - DNA, 12 bp, Artificial Sequence
  Oligonucleotide primer for the detection of SNP TSC0034887
ggttaattgttg

SEQ ID NO: 329338 - DNA, 12 bp, Artificial Sequence
  Oligonucleotide primer for the detection of SNP TSC0034887
ggttaatcgttg

SEQ ID NO: 329339 - DNA, 12 bp, Artificial Sequence
  Oligonucleotide primer for the detection of SNP TSC0034887
ggttaattgtcg

SEQ ID NO: 329340 - DNA, 12 bp, Artificial Sequence
  Oligonucleotide primer for the detection of SNP TSC0034887
ggttaatcgtcg

SEQ ID NO: 329341 - DNA, 12 bp, Artificial Sequence
  Oligonucleotide primer for the detection of SNP TSC0034889
cattcccacccc

SEQ ID NO: 329342 - DNA, 12 bp, Artificial Sequence
  Oligonucleotide primer for the detection of SNP TSC0034889
ttatggggtggg

SEQ ID NO: 329343 - DNA, 12 bp, Artificial Sequence
  Oligonucleotide primer for the detection of SNP TSC0034889
tcataaaataaa

SEQ ID NO: 329344 - DNA, 12 bp, Artificial Sequence
  Oligonucleotide primer for the detection of SNP TSC0034890
acctctccccac

SEQ ID NO: 329345 - DNA, 12 bp, Artificial Sequence
  Oligonucleotide primer for the detection of SNP TSC0034890
tagatggggagt

SEQ ID NO: 329346 - DNA, 12 bp, Artificial Sequence
  Oligonucleotide primer for the detection of SNP TSC0034890
tagatggggagc

SEQ ID NO: 329347 - DNA, 12 bp, Artificial Sequence
  Oligonucleotide primer for the detection of SNP TSC0034890
gtttttttttac

SEQ ID NO: 329348 - DNA, 12 bp, Artificial Sequence
  Oligonucleotide primer for the detection of SNP TSC0034891
caatattaacat

SEQ ID NO: 329349 - DNA, 12 bp, Artificial Sequence
  Oligonucleotide primer for the detection of SNP TSC0034891
ttgaagaaggaa

SEQ ID NO: 329350 - DNA, 12 bp, Artificial Sequence
  Oligonucleotide primer for the detection of SNP TSC0034891
taatgttaatat

SEQ ID NO: 329351 - DNA, 12 bp, Artificial Sequence
  Oligonucleotide primer for the detection of SNP TSC0034892
cttaaaaaatat

SEQ ID NO: 329352 - DNA, 12 bp, Artificial Sequence
  Oligonucleotide primer for the detection of SNP TSC0034892
ttgtaaaatata

SEQ ID NO: 329353 - DNA, 12 bp, Artificial Sequence
  Oligonucleotide primer for the detection of SNP TSC0034894
ctaaacccacaa

SEQ ID NO: 329354 - DNA, 12 bp, Artificial Sequence
  Oligonucleotide primer for the detection of SNP TSC0034894
ctaaacccacga

SEQ ID NO: 329355 - DNA, 12 bp, Artificial Sequence
  Oligonucleotide primer for the detection of SNP TSC0034894
tctttctaaccc

SEQ ID NO: 329356 - DNA, 12 bp, Artificial Sequence
  Oligonucleotide primer for the detection of SNP TSC0034894
ttgggtttatgg

SEQ ID NO: 329357 - DNA, 12 bp, Artificial Sequence
  Oligonucleotide primer for the detection of SNP TSC0034894
ttgggtttacgg

SEQ ID NO: 329358 - DNA, 12 bp, Artificial Sequence
  Oligonucleotide primer for the detection of SNP TSC0034896
ttccactccaaa

SEQ ID NO: 329359 - DNA, 12 bp, Artificial Sequence
  Oligonucleotide primer for the detection of SNP TSC0034896
tgagagtttttt

SEQ ID NO: 329360 - DNA, 12 bp, Artificial Sequence
  Oligonucleotide primer for the detection of SNP TSC0034896
ctaaaaactccc

SEQ ID NO: 329361 - DNA, 12 bp, Artificial Sequence
  Oligonucleotide primer for the detection of SNP TSC0034896
ttttattttagg

SEQ ID NO: 329362 - DNA, 12 bp, Artificial Sequence
  Oligonucleotide primer for the detection of SNP TSC0034897
ataaaacacaat

SEQ ID NO: 329363 - DNA, 12 bp, Artificial Sequence
  Oligonucleotide primer for the detection of SNP TSC0034897
gttatttttagg

SEQ ID NO: 329364 - DNA, 12 bp, Artificial Sequence
  Oligonucleotide primer for the detection of SNP TSC0034898
ataacaaattcc

SEQ ID NO: 329365 - DNA, 12 bp, Artificial Sequence
  Oligonucleotide primer for the detection of SNP TSC0034898
ttaaaaagttag

SEQ ID NO: 329366 - DNA, 12 bp, Artificial Sequence
  Oligonucleotide primer for the detection of SNP TSC0034899
tgtgagtttatt

SEQ ID NO: 329367 - DNA, 12 bp, Artificial Sequence
  Oligonucleotide primer for the detection of SNP TSC0034899
tataaactcacc

SEQ ID NO: 329368 - DNA, 12 bp, Artificial Sequence
  Oligonucleotide primer for the detection of SNP TSC0034899
ttagagaatgag

SEQ ID NO: 329369 - DNA, 12 bp, Artificial Sequence
  Oligonucleotide primer for the detection of SNP TSC0034900
tttactatttac

SEQ ID NO: 329370 - DNA, 12 bp, Artificial Sequence
  Oligonucleotide primer for the detection of SNP TSC0034903
ctatatactaac

SEQ ID NO: 329371 - DNA, 12 bp, Artificial Sequence
  Oligonucleotide primer for the detection of SNP TSC0034904
gggattttaaga

SEQ ID NO: 329372 - DNA, 12 bp, Artificial Sequence
  Oligonucleotide primer for the detection of SNP TSC0034904
gaataaggtaat

SEQ ID NO: 329373 - DNA, 12 bp, Artificial Sequence
  Oligonucleotide primer for the detection of SNP TSC0034905
tcaatatttcaa

SEQ ID NO: 329374 - DNA, 12 bp, Artificial Sequence
  Oligonucleotide primer for the detection of SNP TSC0034905
tcaatatttcga

SEQ ID NO: 329375 - DNA, 12 bp, Artificial Sequence
  Oligonucleotide primer for the detection of SNP TSC0034905
tcgatatttcaa

SEQ ID NO: 329376 - DNA, 12 bp, Artificial Sequence
  Oligonucleotide primer for the detection of SNP TSC0034905
tcgatatttcga

SEQ ID NO: 329377 - DNA, 12 bp, Artificial Sequence
  Oligonucleotide primer for the detection of SNP TSC0034905
agagatattatt

SEQ ID NO: 329378 - DNA, 12 bp, Artificial Sequence
  Oligonucleotide primer for the detection of SNP TSC0034905
taaaaacatcac

SEQ ID NO: 329379 - DNA, 12 bp, Artificial Sequence
  Oligonucleotide primer for the detection of SNP TSC0034905
tggtattttggt

SEQ ID NO: 329380 - DNA, 12 bp, Artificial Sequence
  Oligonukleotid-Primer
cggtattttggt

SEQ ID NO: 329381 - DNA, 12 bp, Artificial Sequence
  Oligonucleotide primer for the detection of SNP TSC0034905
tggtatttcggt

SEQ ID NO: 329382 - DNA, 12 bp, Artificial Sequence
  Oligonucleotide primer for the detection of SNP TSC0034905
cggtatttcggt

SEQ ID NO: 329383 - DNA, 12 bp, Artificial Sequence
  Oligonucleotide primer for the detection of SNP TSC0034906
cttcacaaaccc

SEQ ID NO: 329384 - DNA, 12 bp, Artificial Sequence
  Oligonucleotide primer for the detection of SNP TSC0034906
cttcgcaaaccc

SEQ ID NO: 329385 - DNA, 12 bp, Artificial Sequence
  Oligonucleotide primer for the detection of SNP TSC0034906
tataaggttttg

SEQ ID NO: 329386 - DNA, 12 bp, Artificial Sequence
  Oligonucleotide primer for the detection of SNP TSC0034906
caaaaccctaaa

SEQ ID NO: 329387 - DNA, 12 bp, Artificial Sequence
  Oligonucleotide primer for the detection of SNP TSC0034906
tttgtaggtttt

SEQ ID NO: 329388 - DNA, 12 bp, Artificial Sequence
  Oligonucleotide primer for the detection of SNP TSC0034906
ttcgtaggtttt

SEQ ID NO: 329389 - DNA, 12 bp, Artificial Sequence
  Oligonucleotide primer for the detection of SNP TSC0034908
ttataaaacttc

SEQ ID NO: 329390 - DNA, 12 bp, Artificial Sequence
  Oligonucleotide primer for the detection of SNP TSC0034908
ttatgtggttgg

SEQ ID NO: 329391 - DNA, 12 bp, Artificial Sequence
  Oligonucleotide primer for the detection of SNP TSC0034909
tctcctcttttc

SEQ ID NO: 329392 - DNA, 12 bp, Artificial Sequence
  Oligonucleotide primer for the detection of SNP TSC0034909
taaattggttaa

SEQ ID NO: 329393 - DNA, 12 bp, Artificial Sequence
  Oligonucleotide primer for the detection of SNP TSC0034913
ttctataaaaac

SEQ ID NO: 329394 - DNA, 12 bp, Artificial Sequence
  Oligonucleotide primer for the detection of SNP TSC0034913
aaagaaagaagg

SEQ ID NO: 329395 - DNA, 12 bp, Artificial Sequence
  Oligonucleotide primer for the detection of SNP TSC0034914
cattaatttaat

SEQ ID NO: 329396 - DNA, 12 bp, Artificial Sequence
  Oligonucleotide primer for the detection of SNP TSC0034914
aatggatatata

SEQ ID NO: 329397 - DNA, 12 bp, Artificial Sequence
  Oligonucleotide primer for the detection of SNP TSC0034926
aaaattcactat

SEQ ID NO: 329398 - DNA, 12 bp, Artificial Sequence
  Oligonucleotide primer for the detection of SNP TSC0034926
ttgagttagaaa

SEQ ID NO: 329399 - DNA, 12 bp, Artificial Sequence
  Oligonucleotide primer for the detection of SNP TSC0034927
cttccctctaaa

SEQ ID NO: 329400 - DNA, 12 bp, Artificial Sequence
  Oligonucleotide primer for the detection of SNP TSC0034928
aataacaaaata

SEQ ID NO: 329401 - DNA, 12 bp, Artificial Sequence
  Oligonucleotide primer for the detection of SNP TSC0034928
aacctaacatcc

SEQ ID NO: 329402 - DNA, 12 bp, Artificial Sequence
  Oligonucleotide primer for the detection of SNP TSC0034928
agtgataaaatg

SEQ ID NO: 329403 - DNA, 12 bp, Artificial Sequence
  Oligonucleotide primer for the detection of SNP TSC0034930
ctacacccttct

SEQ ID NO: 329404 - DNA, 12 bp, Artificial Sequence
  Oligonucleotide primer for the detection of SNP TSC0034930
tatagagaaaaa

SEQ ID NO: 329405 - DNA, 12 bp, Artificial Sequence
  Oligonucleotide primer for the detection of SNP TSC0034931
aattttggaggt

SEQ ID NO: 329406 - DNA, 12 bp, Artificial Sequence
  Oligonucleotide primer for the detection of SNP TSC0034931
aaccctaaaaac

SEQ ID NO: 329407 - DNA, 12 bp, Artificial Sequence
  Oligonucleotide primer for the detection of SNP TSC0034932
gaggttgaggtt

SEQ ID NO: 329408 - DNA, 12 bp, Artificial Sequence
  Oligonucleotide primer for the detection of SNP TSC0034932
gaggtcgaggtt

SEQ ID NO: 329409 - DNA, 12 bp, Artificial Sequence
  Oligonucleotide primer for the detection of SNP TSC0034932
aaaaccaaaatt

SEQ ID NO: 329410 - DNA, 12 bp, Artificial Sequence
  Oligonucleotide primer for the detection of SNP TSC0034932
aaaaccgaaatt

SEQ ID NO: 329411 - DNA, 12 bp, Artificial Sequence
  Oligonucleotide primer for the detection of SNP TSC0034933
aatatcaaatct

SEQ ID NO: 329412 - DNA, 12 bp, Artificial Sequence
  Oligonucleotide primer for the detection of SNP TSC0034933
tttggtatttgg

SEQ ID NO: 329413 - DNA, 12 bp, Artificial Sequence
  Oligonucleotide primer for the detection of SNP TSC0034934
ttaaaacatatc

SEQ ID NO: 329414 - DNA, 12 bp, Artificial Sequence
  Oligonucleotide primer for the detection of SNP TSC0034934
ttaaaacgtatc

SEQ ID NO: 329415 - DNA, 12 bp, Artificial Sequence
  Oligonucleotide primer for the detection of SNP TSC0034934
atttatttaaag

SEQ ID NO: 329416 - DNA, 12 bp, Artificial Sequence
  Oligonucleotide primer for the detection of SNP TSC0034934
atttacttaaaa

SEQ ID NO: 329417 - DNA, 12 bp, Artificial Sequence
  Oligonucleotide primer for the detection of SNP TSC0034934
ttaagatgtatt

SEQ ID NO: 329418 - DNA, 12 bp, Artificial Sequence
  Oligonucleotide primer for the detection of SNP TSC0034934
ttaagacgtatt

SEQ ID NO: 329419 - DNA, 12 bp, Artificial Sequence
  Oligonucleotide primer for the detection of SNP TSC0034935
gattgatttagt

SEQ ID NO: 329420 - DNA, 12 bp, Artificial Sequence
  Oligonucleotide primer for the detection of SNP TSC0034935
aaattaatccaa

SEQ ID NO: 329421 - DNA, 12 bp, Artificial Sequence
  Oligonucleotide primer for the detection of SNP TSC0034935
tgaaggaaggag

SEQ ID NO: 329422 - DNA, 12 bp, Artificial Sequence
  Oligonucleotide primer for the detection of SNP TSC0034937
tatactcaacac

SEQ ID NO: 329423 - DNA, 12 bp, Artificial Sequence
  Oligonucleotide primer for the detection of SNP TSC0034937
tatactcaacgc

SEQ ID NO: 329424 - DNA, 12 bp, Artificial Sequence
  Oligonucleotide primer for the detection of SNP TSC0034937
taaatgaatgaa

SEQ ID NO: 329425 - DNA, 12 bp, Artificial Sequence
  Oligonucleotide primer for the detection of SNP TSC0034938
atcttctactaa

SEQ ID NO: 329426 - DNA, 12 bp, Artificial Sequence
  Oligonucleotide primer for the detection of SNP TSC0034938
tgaaattatgtt

SEQ ID NO: 329427 - DNA, 12 bp, Artificial Sequence
  Oligonucleotide primer for the detection of SNP TSC0034938
tgaaattacgtt

SEQ ID NO: 329428 - DNA, 12 bp, Artificial Sequence
  Oligonucleotide primer for the detection of SNP TSC0034938
taaaattacact

SEQ ID NO: 329429 - DNA, 12 bp, Artificial Sequence
  Oligonucleotide primer for the detection of SNP TSC0034938
taaaattacgct

SEQ ID NO: 329430 - DNA, 12 bp, Artificial Sequence
  Oligonucleotide primer for the detection of SNP TSC0034938
tttttattgatt

SEQ ID NO: 329431 - DNA, 12 bp, Artificial Sequence
  Oligonucleotide primer for the detection of SNP TSC0034941
tttttttctaac

SEQ ID NO: 329432 - DNA, 12 bp, Artificial Sequence
  Oligonucleotide primer for the detection of SNP TSC0034941
tacaattctccc

SEQ ID NO: 329433 - DNA, 12 bp, Artificial Sequence
  Oligonucleotide primer for the detection of SNP TSC0034943
ttaaacaaaaaa

SEQ ID NO: 329434 - DNA, 12 bp, Artificial Sequence
  Oligonucleotide primer for the detection of SNP TSC0034943
agtagaagttga

SEQ ID NO: 329435 - DNA, 12 bp, Artificial Sequence
  Oligonucleotide primer for the detection of SNP TSC0034944
aaccttcttatt

SEQ ID NO: 329436 - DNA, 12 bp, Artificial Sequence
  Oligonucleotide primer for the detection of SNP TSC0034944
agtagatatata

SEQ ID NO: 329437 - DNA, 12 bp, Artificial Sequence
  Oligonucleotide primer for the detection of SNP TSC0034945
caaacaatttaa

SEQ ID NO: 329438 - DNA, 12 bp, Artificial Sequence
  Oligonucleotide primer for the detection of SNP TSC0034945
caaacgatttaa

SEQ ID NO: 329439 - DNA, 12 bp, Artificial Sequence
  Oligonucleotide primer for the detection of SNP TSC0034945
tggataaatttt

SEQ ID NO: 329440 - DNA, 12 bp, Artificial Sequence
  Oligonucleotide primer for the detection of SNP TSC0034945
taaatgatttag

SEQ ID NO: 329441 - DNA, 12 bp, Artificial Sequence
  Oligonucleotide primer for the detection of SNP TSC0034945
taaacgatttag

SEQ ID NO: 329442 - DNA, 12 bp, Artificial Sequence
  Oligonucleotide primer for the detection of SNP TSC0034946
ctctaactaacc

SEQ ID NO: 329443 - DNA, 12 bp, Artificial Sequence
  Oligonucleotide primer for the detection of SNP TSC0034946
aaatgatattga

SEQ ID NO: 329444 - DNA, 12 bp, Artificial Sequence
  Oligonucleotide primer for the detection of SNP TSC0034947
ataaaccacttt

SEQ ID NO: 329445 - DNA, 12 bp, Artificial Sequence
  Oligonucleotide primer for the detection of SNP TSC0034947
taatttataaag

SEQ ID NO: 329446 - DNA, 12 bp, Artificial Sequence
  Oligonucleotide primer for the detection of SNP TSC0034951
ctaaaacctttt

SEQ ID NO: 329447 - DNA, 12 bp, Artificial Sequence
  Oligonucleotide primer for the detection of SNP TSC0034951
tttgaggatttg

SEQ ID NO: 329448 - DNA, 12 bp, Artificial Sequence
  Oligonucleotide primer for the detection of SNP TSC0034952
aaatcaaccaca

SEQ ID NO: 329449 - DNA, 12 bp, Artificial Sequence
  Oligonucleotide primer for the detection of SNP TSC0034952
aaatcaaccacg

SEQ ID NO: 329450 - DNA, 12 bp, Artificial Sequence
  Oligonucleotide primer for the detection of SNP TSC0034952
aaatcgaccaca

SEQ ID NO: 329451 - DNA, 12 bp, Artificial Sequence
  Oligonucleotide primer for the detection of SNP TSC0034952
aaatcgaccacg

SEQ ID NO: 329452 - DNA, 12 bp, Artificial Sequence
  Oligonucleotide primer for the detection of SNP TSC0034952
caactcccactc

SEQ ID NO: 329453 - DNA, 12 bp, Artificial Sequence
  Oligonucleotide primer for the detection of SNP TSC0034952
caactcccgctc

SEQ ID NO: 329454 - DNA, 12 bp, Artificial Sequence
  Oligonucleotide primer for the detection of SNP TSC0034952
agattgattatg

SEQ ID NO: 329455 - DNA, 12 bp, Artificial Sequence
  Oligonucleotide primer for the detection of SNP TSC0034952
agatcgattatg

SEQ ID NO: 329456 - DNA, 12 bp, Artificial Sequence
  Oligonucleotide primer for the detection of SNP TSC0034952
agattgattacg

SEQ ID NO: 329457 - DNA, 12 bp, Artificial Sequence
  Oligonucleotide primer for the detection of SNP TSC0034952
agatcgattacg

SEQ ID NO: 329458 - DNA, 12 bp, Artificial Sequence
  Oligonucleotide primer for the detection of SNP TSC0034953
cctacctcctta

SEQ ID NO: 329459 - DNA, 12 bp, Artificial Sequence
  Oligonucleotide primer for the detection of SNP TSC0034953
tagtagatttaa

SEQ ID NO: 329460 - DNA, 12 bp, Artificial Sequence
  Oligonucleotide primer for the detection of SNP TSC0034954
atctttaacaat

SEQ ID NO: 329461 - DNA, 12 bp, Artificial Sequence
  Oligonucleotide primer for the detection of SNP TSC0034956
attaaaacacta

SEQ ID NO: 329462 - DNA, 12 bp, Artificial Sequence
  Oligonucleotide primer for the detection of SNP TSC0034956
tagaaatgaagt

SEQ ID NO: 329463 - DNA, 12 bp, Artificial Sequence
  Oligonucleotide primer for the detection of SNP TSC0034956
gttgggatattg

SEQ ID NO: 329464 - DNA, 12 bp, Artificial Sequence
  Oligonucleotide primer for the detection of SNP TSC0034957
ccaacatttcta

SEQ ID NO: 329465 - DNA, 12 bp, Artificial Sequence
  Oligonucleotide primer for the detection of SNP TSC0034957
aggttatgggtt

SEQ ID NO: 329466 - DNA, 12 bp, Artificial Sequence
  Oligonucleotide primer for the detection of SNP TSC0034958
tcaaataatcaa

SEQ ID NO: 329467 - DNA, 12 bp, Artificial Sequence
  Oligonucleotide primer for the detection of SNP TSC0034958
ttttttctttat

SEQ ID NO: 329468 - DNA, 12 bp, Artificial Sequence
  Oligonucleotide primer for the detection of SNP TSC0034958
ttaaatagttaa

SEQ ID NO: 329469 - DNA, 12 bp, Artificial Sequence
  Oligonucleotide primer for the detection of SNP TSC0034959
ttaaaggtatta

SEQ ID NO: 329470 - DNA, 12 bp, Artificial Sequence
  Oligonucleotide primer for the detection of SNP TSC0034960
aacttacaccct

SEQ ID NO: 329471 - DNA, 12 bp, Artificial Sequence
  Oligonucleotide primer for the detection of SNP TSC0034960
aaatatgtaggg

SEQ ID NO: 329472 - DNA, 12 bp, Artificial Sequence
  Oligonucleotide primer for the detection of SNP TSC0034961
cacttcctatac

SEQ ID NO: 329473 - DNA, 12 bp, Artificial Sequence
  Oligonucleotide primer for the detection of SNP TSC0034961
tgatttttgtta

SEQ ID NO: 329474 - DNA, 12 bp, Artificial Sequence
  Oligonucleotide primer for the detection of SNP TSC0034961
taacctctacca

SEQ ID NO: 329475 - DNA, 12 bp, Artificial Sequence
  Oligonucleotide primer for the detection of SNP TSC0034962
gtatatatatac

SEQ ID NO: 329476 - DNA, 12 bp, Artificial Sequence
  Oligonucleotide primer for the detection of SNP TSC0034963
acacaacaaaaa

SEQ ID NO: 329477 - DNA, 12 bp, Artificial Sequence
  Oligonucleotide primer for the detection of SNP TSC0034963
acacgacaaaaa

SEQ ID NO: 329478 - DNA, 12 bp, Artificial Sequence
  Oligonucleotide primer for the detection of SNP TSC0034963
taagggtaggat

SEQ ID NO: 329479 - DNA, 12 bp, Artificial Sequence
  Oligonucleotide primer for the detection of SNP TSC0034963
atatggtaggaa

SEQ ID NO: 329480 - DNA, 12 bp, Artificial Sequence
  Oligonucleotide primer for the detection of SNP TSC0034963
atacggtaggaa

SEQ ID NO: 329481 - DNA, 12 bp, Artificial Sequence
  Oligonucleotide primer for the detection of SNP TSC0034967
aacttcaaaaaa

SEQ ID NO: 329482 - DNA, 12 bp, Artificial Sequence
  Oligonucleotide primer for the detection of SNP TSC0034967
aggggtgattat

SEQ ID NO: 329483 - DNA, 12 bp, Artificial Sequence
  Oligonucleotide primer for the detection of SNP TSC0034967
aggttttaggga

SEQ ID NO: 329484 - DNA, 12 bp, Artificial Sequence
  Oligonucleotide primer for the detection of SNP TSC0034968
ttacctttctaa

SEQ ID NO: 329485 - DNA, 12 bp, Artificial Sequence
  Oligonucleotide primer for the detection of SNP TSC0034968
attaggaaatga

SEQ ID NO: 329486 - DNA, 12 bp, Artificial Sequence
  Oligonucleotide primer for the detection of SNP TSC0034969
atacacacacaa

SEQ ID NO: 329487 - DNA, 12 bp, Artificial Sequence
  Oligonucleotide primer for the detection of SNP TSC0034969
atacacacacga

SEQ ID NO: 329488 - DNA, 12 bp, Artificial Sequence
  Oligonucleotide primer for the detection of SNP TSC0034969
atacacacgcaa

SEQ ID NO: 329489 - DNA, 12 bp, Artificial Sequence
  Oligonukleotid-Primer
atacacgcacaa

SEQ ID NO: 329490 - DNA, 12 bp, Artificial Sequence
  Oligonucleotide primer for the detection of SNP TSC0034969
atacgcacacaa

SEQ ID NO: 329491 - DNA, 12 bp, Artificial Sequence
  Oligonucleotide primer for the detection of SNP TSC0034969
gtacacacacaa

SEQ ID NO: 329492 - DNA, 12 bp, Artificial Sequence
  Oligonucleotide primer for the detection of SNP TSC0034969
atacacacgcga

SEQ ID NO: 329493 - DNA, 12 bp, Artificial Sequence
  Oligonucleotide primer for the detection of SNP TSC0034969
atacacgcacga

SEQ ID NO: 329494 - DNA, 12 bp, Artificial Sequence
  Oligonucleotide primer for the detection of SNP TSC0034969
atacgcacacga

SEQ ID NO: 329495 - DNA, 12 bp, Artificial Sequence
  Oligonucleotide primer for the detection of SNP TSC0034969
gtacacacacga

SEQ ID NO: 329496 - DNA, 12 bp, Artificial Sequence
  Oligonucleotide primer for the detection of SNP TSC0034969
atacacgcgcaa

SEQ ID NO: 329497 - DNA, 12 bp, Artificial Sequence
  Oligonucleotide primer for the detection of SNP TSC0034969
atacgcacgcaa

SEQ ID NO: 329498 - DNA, 12 bp, Artificial Sequence
  Oligonucleotide primer for the detection of SNP TSC0034969
gtacacacgcaa

SEQ ID NO: 329499 - DNA, 12 bp, Artificial Sequence
  Oligonucleotide primer for the detection of SNP TSC0034969
atacgcgcacaa

SEQ ID NO: 329500 - DNA, 12 bp, Artificial Sequence
  Oligonucleotide primer for the detection of SNP TSC0034969
gtacacgcacaa

SEQ ID NO: 329501 - DNA, 12 bp, Artificial Sequence
  Oligonucleotide primer for the detection of SNP TSC0034969
gtacgcacacaa

SEQ ID NO: 329502 - DNA, 12 bp, Artificial Sequence
  Oligonucleotide primer for the detection of SNP TSC0034969
atacacgcgcga

SEQ ID NO: 329503 - DNA, 12 bp, Artificial Sequence
  Oligonucleotide primer for the detection of SNP TSC0034969
atacgcacgcga

SEQ ID NO: 329504 - DNA, 12 bp, Artificial Sequence
  Oligonucleotide primer for the detection of SNP TSC0034969
gtacacacgcga

SEQ ID NO: 329505 - DNA, 12 bp, Artificial Sequence
  Oligonucleotide primer for the detection of SNP TSC0034969
atacgcgcacga

SEQ ID NO: 329506 - DNA, 12 bp, Artificial Sequence
  Oligonucleotide primer for the detection of SNP TSC0034969
gtacacgcacga

SEQ ID NO: 329507 - DNA, 12 bp, Artificial Sequence
  Oligonucleotide primer for the detection of SNP TSC0034969
gtacgcacacga

SEQ ID NO: 329508 - DNA, 12 bp, Artificial Sequence
  Oligonucleotide primer for the detection of SNP TSC0034969
atacgcgcgcaa

SEQ ID NO: 329509 - DNA, 12 bp, Artificial Sequence
  Oligonucleotide primer for the detection of SNP TSC0034969
gtacacgcgcaa

SEQ ID NO: 329510 - DNA, 12 bp, Artificial Sequence
  Oligonucleotide primer for the detection of SNP TSC0034969
gtacgcacgcaa

SEQ ID NO: 329511 - DNA, 12 bp, Artificial Sequence
  Oligonucleotide primer for the detection of SNP TSC0034969
gtacgcgcacaa

SEQ ID NO: 329512 - DNA, 12 bp, Artificial Sequence
  Oligonucleotide primer for the detection of SNP TSC0034969
atacgcgcgcga

SEQ ID NO: 329513 - DNA, 12 bp, Artificial Sequence
  Oligonucleotide primer for the detection of SNP TSC0034969
gtacacgcgcga

SEQ ID NO: 329514 - DNA, 12 bp, Artificial Sequence
  Oligonucleotide primer for the detection of SNP TSC0034969
gtacgcacgcga

SEQ ID NO: 329515 - DNA, 12 bp, Artificial Sequence
  Oligonucleotide primer for the detection of SNP TSC0034969
gtacgcgcacga

SEQ ID NO: 329516 - DNA, 12 bp, Artificial Sequence
  Oligonucleotide primer for the detection of SNP TSC0034969
gtacgcgcgcaa

SEQ ID NO: 329517 - DNA, 12 bp, Artificial Sequence
  Oligonucleotide primer for the detection of SNP TSC0034969
gtacgcgcgcga

SEQ ID NO: 329518 - DNA, 12 bp, Artificial Sequence
  Oligonucleotide primer for the detection of SNP TSC0034969
gaatgtgttgtt

SEQ ID NO: 329519 - DNA, 12 bp, Artificial Sequence
  Oligonucleotide primer for the detection of SNP TSC0034969
gaatgcgttgtt

SEQ ID NO: 329520 - DNA, 12 bp, Artificial Sequence
  Oligonucleotide primer for the detection of SNP TSC0034969
aatacactacca

SEQ ID NO: 329521 - DNA, 12 bp, Artificial Sequence
  Oligonucleotide primer for the detection of SNP TSC0034969
aatacgctacca

SEQ ID NO: 329522 - DNA, 12 bp, Artificial Sequence
  Oligonucleotide primer for the detection of SNP TSC0034974
caatcaaacata

SEQ ID NO: 329523 - DNA, 12 bp, Artificial Sequence
  Oligonucleotide primer for the detection of SNP TSC0034974
tttttggagttt

SEQ ID NO: 329524 - DNA, 12 bp, Artificial Sequence
  Oligonucleotide primer for the detection of SNP TSC0034974
tagttagatatg

SEQ ID NO: 329525 - DNA, 12 bp, Artificial Sequence
  Oligonucleotide primer for the detection of SNP TSC0034975
ttaatttaaatt

SEQ ID NO: 329526 - DNA, 12 bp, Artificial Sequence
  Oligonukleotid-Primer
acgttttttttg

SEQ ID NO: 329527 - DNA, 12 bp, Artificial Sequence
  Oligonucleotide primer for the detection of SNP TSC0034977
tcacaaccaacc

SEQ ID NO: 329528 - DNA, 12 bp, Artificial Sequence
  Oligonucleotide primer for the detection of SNP TSC0034977
tattgtgttgtt

SEQ ID NO: 329529 - DNA, 12 bp, Artificial Sequence
  Oligonucleotide primer for the detection of SNP TSC0034977
tatcgtgttgtt

SEQ ID NO: 329530 - DNA, 12 bp, Artificial Sequence
  Oligonucleotide primer for the detection of SNP TSC0034977
tattgtgttgtc

SEQ ID NO: 329531 - DNA, 12 bp, Artificial Sequence
  Oligonucleotide primer for the detection of SNP TSC0034977
tatcgtgttgtc

SEQ ID NO: 329532 - DNA, 12 bp, Artificial Sequence
  Oligonucleotide primer for the detection of SNP TSC0034977
caccatattacc

SEQ ID NO: 329533 - DNA, 12 bp, Artificial Sequence
  Oligonucleotide primer for the detection of SNP TSC0034977
caccgtattacc

SEQ ID NO: 329534 - DNA, 12 bp, Artificial Sequence
  Oligonucleotide primer for the detection of SNP TSC0034977
tataattaattt

SEQ ID NO: 329535 - DNA, 12 bp, Artificial Sequence
  Oligonucleotide primer for the detection of SNP TSC0034978
tataggtttttg

SEQ ID NO: 329536 - DNA, 12 bp, Artificial Sequence
  Oligonucleotide primer for the detection of SNP TSC0034979
ctataatattat

SEQ ID NO: 329537 - DNA, 12 bp, Artificial Sequence
  Oligonucleotide primer for the detection of SNP TSC0034979
ttttaaatataa

SEQ ID NO: 329538 - DNA, 12 bp, Artificial Sequence
  Oligonucleotide primer for the detection of SNP TSC0034982
taccaatctctt

SEQ ID NO: 329539 - DNA, 12 bp, Artificial Sequence
  Oligonucleotide primer for the detection of SNP TSC0034982
attttgtaatag

SEQ ID NO: 329540 - DNA, 12 bp, Artificial Sequence
  Oligonucleotide primer for the detection of SNP TSC0034984
aactaaattccc

SEQ ID NO: 329541 - DNA, 12 bp, Artificial Sequence
  Oligonucleotide primer for the detection of SNP TSC0034984
ttgtttgtttgg

SEQ ID NO: 329542 - DNA, 12 bp, Artificial Sequence
  Oligonucleotide primer for the detection of SNP TSC0034984
tcgtttgtttgg

SEQ ID NO: 329543 - DNA, 12 bp, Artificial Sequence
  Oligonucleotide primer for the detection of SNP TSC0034985
cactacctctac

SEQ ID NO: 329544 - DNA, 12 bp, Artificial Sequence
  Oligonucleotide primer for the detection of SNP TSC0034985
tggtagtagagg

SEQ ID NO: 329545 - DNA, 12 bp, Artificial Sequence
  Oligonucleotide primer for the detection of SNP TSC0034986
atttaaccaaaa

SEQ ID NO: 329546 - DNA, 12 bp, Artificial Sequence
  Oligonucleotide primer for the detection of SNP TSC0034986
tgatttagagtt

SEQ ID NO: 329547 - DNA, 12 bp, Artificial Sequence
  Oligonucleotide primer for the detection of SNP TSC0034986
atttgattagaa

SEQ ID NO: 329548 - DNA, 12 bp, Artificial Sequence
  Oligonucleotide primer for the detection of SNP TSC0034989
aacttctttcaa

SEQ ID NO: 329549 - DNA, 12 bp, Artificial Sequence
  Oligonucleotide primer for the detection of SNP TSC0034989
aatggttggggt

SEQ ID NO: 329550 - DNA, 12 bp, Artificial Sequence
  Oligonucleotide primer for the detection of SNP TSC0034990
aacttaaatttc

SEQ ID NO: 329551 - DNA, 12 bp, Artificial Sequence
  Oligonucleotide primer for the detection of SNP TSC0034990
tttagttaagta

SEQ ID NO: 329552 - DNA, 12 bp, Artificial Sequence
  Oligonucleotide primer for the detection of SNP TSC0034995
aaactatactca

SEQ ID NO: 329553 - DNA, 12 bp, Artificial Sequence
  Oligonucleotide primer for the detection of SNP TSC0034995
aaactatactcg

SEQ ID NO: 329554 - DNA, 12 bp, Artificial Sequence
  Oligonucleotide primer for the detection of SNP TSC0034995
agggatatattt

SEQ ID NO: 329555 - DNA, 12 bp, Artificial Sequence
  Oligonucleotide primer for the detection of SNP TSC0034995
taggttgtgttt

SEQ ID NO: 329556 - DNA, 12 bp, Artificial Sequence
  Oligonucleotide primer for the detection of SNP TSC0034995
taggttgtgttc

SEQ ID NO: 329557 - DNA, 12 bp, Artificial Sequence
  Oligonucleotide primer for the detection of SNP TSC0035004
aaaaacctatat

SEQ ID NO: 329558 - DNA, 12 bp, Artificial Sequence
  Oligonucleotide primer for the detection of SNP TSC0035004
atattaggatga

SEQ ID NO: 329559 - DNA, 12 bp, Artificial Sequence
  Oligonucleotide primer for the detection of SNP TSC0035005
gagtttagatag

SEQ ID NO: 329560 - DNA, 12 bp, Artificial Sequence
  Oligonucleotide primer for the detection of SNP TSC0035007
tcactaaacctt

SEQ ID NO: 329561 - DNA, 12 bp, Artificial Sequence
  Oligonucleotide primer for the detection of SNP TSC0035007
tcgctaaacctt

SEQ ID NO: 329562 - DNA, 12 bp, Artificial Sequence
  Oligonucleotide primer for the detection of SNP TSC0035007
tgtgggatggta

SEQ ID NO: 329563 - DNA, 12 bp, Artificial Sequence
  Oligonucleotide primer for the detection of SNP TSC0035008
aacaaaccccac

SEQ ID NO: 329564 - DNA, 12 bp, Artificial Sequence
  Oligonucleotide primer for the detection of SNP TSC0035008
aacgaaccccac

SEQ ID NO: 329565 - DNA, 12 bp, Artificial Sequence
  Oligonucleotide primer for the detection of SNP TSC0035008
gacaaaccccac

SEQ ID NO: 329566 - DNA, 12 bp, Artificial Sequence
  Oligonucleotide primer for the detection of SNP TSC0035008
gacgaaccccac

SEQ ID NO: 329567 - DNA, 12 bp, Artificial Sequence
  Oligonucleotide primer for the detection of SNP TSC0035008
tggtggttttga

SEQ ID NO: 329568 - DNA, 12 bp, Artificial Sequence
  Oligonucleotide primer for the detection of SNP TSC0035008
cggtggttttga

SEQ ID NO: 329569 - DNA, 12 bp, Artificial Sequence
  Oligonucleotide primer for the detection of SNP TSC0035008
tggcggttttga

SEQ ID NO: 329570 - DNA, 12 bp, Artificial Sequence
  Oligonucleotide primer for the detection of SNP TSC0035008
tggtggtttcga

SEQ ID NO: 329571 - DNA, 12 bp, Artificial Sequence
  Oligonucleotide primer for the detection of SNP TSC0035008
cggcggttttga

SEQ ID NO: 329572 - DNA, 12 bp, Artificial Sequence
  Oligonucleotide primer for the detection of SNP TSC0035008
cggtggtttcga

SEQ ID NO: 329573 - DNA, 12 bp, Artificial Sequence
  Oligonucleotide primer for the detection of SNP TSC0035008
tggcggtttcga

SEQ ID NO: 329574 - DNA, 12 bp, Artificial Sequence
  Oligonucleotide primer for the detection of SNP TSC0035008
cggcggtttcga

SEQ ID NO: 329575 - DNA, 12 bp, Artificial Sequence
  Oligonucleotide primer for the detection of SNP TSC0035010
caattatcccac

SEQ ID NO: 329576 - DNA, 12 bp, Artificial Sequence
  Oligonucleotide primer for the detection of SNP TSC0035010
cgattatcccac

SEQ ID NO: 329577 - DNA, 12 bp, Artificial Sequence
  Oligonucleotide primer for the detection of SNP TSC0035010
gtgttttttgta

SEQ ID NO: 329578 - DNA, 12 bp, Artificial Sequence
  Oligonucleotide primer for the detection of SNP TSC0035012
tgttttttagtg

SEQ ID NO: 329579 - DNA, 12 bp, Artificial Sequence
  Oligonucleotide primer for the detection of SNP TSC0035012
cgttttttagtg

SEQ ID NO: 329580 - DNA, 12 bp, Artificial Sequence
  Oligonucleotide primer for the detection of SNP TSC0035013
tttcgtttttta

SEQ ID NO: 329581 - DNA, 12 bp, Artificial Sequence
  Oligonucleotide primer for the detection of SNP TSC0035017
tttagagatttt

SEQ ID NO: 329582 - DNA, 12 bp, Artificial Sequence
  Oligonucleotide primer for the detection of SNP TSC0035017
tttaaaaacccc

SEQ ID NO: 329583 - DNA, 12 bp, Artificial Sequence
  Oligonucleotide primer for the detection of SNP TSC0035017
taggtttttgat

SEQ ID NO: 329584 - DNA, 12 bp, Artificial Sequence
  Oligonucleotide primer for the detection of SNP TSC0035018
aaaacctcattt

SEQ ID NO: 329585 - DNA, 12 bp, Artificial Sequence
  Oligonucleotide primer for the detection of SNP TSC0035018
taaatatttgtg

SEQ ID NO: 329586 - DNA, 12 bp, Artificial Sequence
  Oligonucleotide primer for the detection of SNP TSC0035020
aaatcaaaactt

SEQ ID NO: 329587 - DNA, 12 bp, Artificial Sequence
  Oligonucleotide primer for the detection of SNP TSC0035020
gttatgtttttt

SEQ ID NO: 329588 - DNA, 12 bp, Artificial Sequence
  Oligonucleotide primer for the detection of SNP TSC0035020
actatactccct

SEQ ID NO: 329589 - DNA, 12 bp, Artificial Sequence
  Oligonucleotide primer for the detection of SNP TSC0035020
gagttaaagttt

SEQ ID NO: 329590 - DNA, 12 bp, Artificial Sequence
  Oligonucleotide primer for the detection of SNP TSC0035022
taatattttggt

SEQ ID NO: 329591 - DNA, 12 bp, Artificial Sequence
  Oligonucleotide primer for the detection of SNP TSC0035022
ataacactttaa

SEQ ID NO: 329592 - DNA, 12 bp, Artificial Sequence
  Oligonucleotide primer for the detection of SNP TSC0035022
ataaataaagat

SEQ ID NO: 329593 - DNA, 12 bp, Artificial Sequence
  Oligonucleotide primer for the detection of SNP TSC0035024
ctaaaataacac

SEQ ID NO: 329594 - DNA, 12 bp, Artificial Sequence
  Oligonucleotide primer for the detection of SNP TSC0035024
attggagtgtag

SEQ ID NO: 329595 - DNA, 12 bp, Artificial Sequence
  Oligonucleotide primer for the detection of SNP TSC0035025
attctacaaact

SEQ ID NO: 329596 - DNA, 12 bp, Artificial Sequence
  Oligonucleotide primer for the detection of SNP TSC0035025
ttgtgtttttta

SEQ ID NO: 329597 - DNA, 12 bp, Artificial Sequence
  Oligonucleotide primer for the detection of SNP TSC0035025
tcgtgtttttta

SEQ ID NO: 329598 - DNA, 12 bp, Artificial Sequence
  Oligonucleotide primer for the detection of SNP TSC0035029
taatatccctat

SEQ ID NO: 329599 - DNA, 12 bp, Artificial Sequence
  Oligonucleotide primer for the detection of SNP TSC0035030
actacaaaaaaa

SEQ ID NO: 329600 - DNA, 12 bp, Artificial Sequence
  Oligonucleotide primer for the detection of SNP TSC0035030
tagtaatttttt

SEQ ID NO: 329601 - DNA, 12 bp, Artificial Sequence
  Oligonucleotide primer for the detection of SNP TSC0035030
acaataacttcc

SEQ ID NO: 329602 - DNA, 12 bp, Artificial Sequence
  Oligonucleotide primer for the detection of SNP TSC0035030
tgtaaggagatt

SEQ ID NO: 329603 - DNA, 12 bp, Artificial Sequence
  Oligonucleotide primer for the detection of SNP TSC0035031
tacttcattaac

SEQ ID NO: 329604 - DNA, 12 bp, Artificial Sequence
  Oligonucleotide primer for the detection of SNP TSC0035031
ggatattattgg

SEQ ID NO: 329605 - DNA, 12 bp, Artificial Sequence
  Oligonucleotide primer for the detection of SNP TSC0035031
aaacattattaa

SEQ ID NO: 329606 - DNA, 12 bp, Artificial Sequence
  Oligonucleotide primer for the detection of SNP TSC0035031
tgttttattagt

SEQ ID NO: 329607 - DNA, 12 bp, Artificial Sequence
  Oligonucleotide primer for the detection of SNP TSC0035032
ctcaaacctttt

SEQ ID NO: 329608 - DNA, 12 bp, Artificial Sequence
  Oligonucleotide primer for the detection of SNP TSC0035032
ttttagttcgtg

SEQ ID NO: 329609 - DNA, 12 bp, Artificial Sequence
  Oligonucleotide primer for the detection of SNP TSC0035033
taatatccaaac

SEQ ID NO: 329610 - DNA, 12 bp, Artificial Sequence
  Oligonucleotide primer for the detection of SNP TSC0035033
taatatccgaac

SEQ ID NO: 329611 - DNA, 12 bp, Artificial Sequence
  Oligonucleotide primer for the detection of SNP TSC0035033
ccctcacaccta

SEQ ID NO: 329612 - DNA, 12 bp, Artificial Sequence
  Oligonucleotide primer for the detection of SNP TSC0035033
tgatatttgggt

SEQ ID NO: 329613 - DNA, 12 bp, Artificial Sequence
  Oligonucleotide primer for the detection of SNP TSC0035033
tgatattcgggt

SEQ ID NO: 329614 - DNA, 12 bp, Artificial Sequence
  Oligonucleotide primer for the detection of SNP TSC0035034
atctaacaccaa

SEQ ID NO: 329615 - DNA, 12 bp, Artificial Sequence
  Oligonucleotide primer for the detection of SNP TSC0035034
tattatgttgtt

SEQ ID NO: 329616 - DNA, 12 bp, Artificial Sequence
  Oligonucleotide primer for the detection of SNP TSC0035034
gtttgatattag

SEQ ID NO: 329617 - DNA, 12 bp, Artificial Sequence
  Oligonucleotide primer for the detection of SNP TSC0035036
tcctcctcttaa

SEQ ID NO: 329618 - DNA, 12 bp, Artificial Sequence
  Oligonucleotide primer for the detection of SNP TSC0035036
tttgtttttatc

SEQ ID NO: 329619 - DNA, 12 bp, Artificial Sequence
  Oligonukleotid-Primer
tctatctccacc

SEQ ID NO: 329620 - DNA, 12 bp, Artificial Sequence
  Oligonucleotide primer for the detection of SNP TSC0035038
taaaaaaaatcc

SEQ ID NO: 329621 - DNA, 12 bp, Artificial Sequence
  Oligonucleotide primer for the detection of SNP TSC0035038
gaattagagttg

SEQ ID NO: 329622 - DNA, 12 bp, Artificial Sequence
  Oligonucleotide primer for the detection of SNP TSC0035042
atactaaataat

SEQ ID NO: 329623 - DNA, 12 bp, Artificial Sequence
  Oligonucleotide primer for the detection of SNP TSC0035042
tatttatttttg

SEQ ID NO: 329624 - DNA, 12 bp, Artificial Sequence
  Oligonucleotide primer for the detection of SNP TSC0035044
taattacatata

SEQ ID NO: 329625 - DNA, 12 bp, Artificial Sequence
  Oligonucleotide primer for the detection of SNP TSC0035044
taattatatata

SEQ ID NO: 329626 - DNA, 12 bp, Artificial Sequence
  Oligonucleotide primer for the detection of SNP TSC0035046
ctactaatcttt

SEQ ID NO: 329627 - DNA, 12 bp, Artificial Sequence
  Oligonucleotide primer for the detection of SNP TSC0035051
ttacctcttcaa

SEQ ID NO: 329628 - DNA, 12 bp, Artificial Sequence
  Oligonucleotide primer for the detection of SNP TSC0035051
ggtagggatttg

SEQ ID NO: 329629 - DNA, 12 bp, Artificial Sequence
  Oligonucleotide primer for the detection of SNP TSC0035051
acaaaaatctaa

SEQ ID NO: 329630 - DNA, 12 bp, Artificial Sequence
  Oligonucleotide primer for the detection of SNP TSC0035052
tacatcttacct

SEQ ID NO: 329631 - DNA, 12 bp, Artificial Sequence
  Oligonucleotide primer for the detection of SNP TSC0035052
taatgttatcga

SEQ ID NO: 329632 - DNA, 12 bp, Artificial Sequence
  Oligonucleotide primer for the detection of SNP TSC0035052
caatattaccaa

SEQ ID NO: 329633 - DNA, 12 bp, Artificial Sequence
  Oligonucleotide primer for the detection of SNP TSC0035052
caatattaccga

SEQ ID NO: 329634 - DNA, 12 bp, Artificial Sequence
  Oligonucleotide primer for the detection of SNP TSC0035052
tgtattttgttt

SEQ ID NO: 329635 - DNA, 12 bp, Artificial Sequence
  Oligonucleotide primer for the detection of SNP TSC0035053
taccacaaccac

SEQ ID NO: 329636 - DNA, 12 bp, Artificial Sequence
  Oligonucleotide primer for the detection of SNP TSC0035053
tattggttgttt

SEQ ID NO: 329637 - DNA, 12 bp, Artificial Sequence
  Oligonucleotide primer for the detection of SNP TSC0035053
tattataattat

SEQ ID NO: 329638 - DNA, 12 bp, Artificial Sequence
  Oligonucleotide primer for the detection of SNP TSC0035057
tatataatatct

SEQ ID NO: 329639 - DNA, 12 bp, Artificial Sequence
  Oligonucleotide primer for the detection of SNP TSC0035057
tttaataaaatg

SEQ ID NO: 329640 - DNA, 12 bp, Artificial Sequence
  Oligonucleotide primer for the detection of SNP TSC0035061
ttttaattaact

SEQ ID NO: 329641 - DNA, 12 bp, Artificial Sequence
  Oligonucleotide primer for the detection of SNP TSC0035061
tgtgtgttatta

SEQ ID NO: 329642 - DNA, 12 bp, Artificial Sequence
  Oligonucleotide primer for the detection of SNP TSC0035061
cgtgtgttatta

SEQ ID NO: 329643 - DNA, 12 bp, Artificial Sequence
  Oligonukleotid-Primer
tgcgtgttatta

SEQ ID NO: 329644 - DNA, 12 bp, Artificial Sequence
  Oligonucleotide primer for the detection of SNP TSC0035061
cgcgtgttatta

SEQ ID NO: 329645 - DNA, 12 bp, Artificial Sequence
  Oligonucleotide primer for the detection of SNP TSC0035061
cacgtaccacca

SEQ ID NO: 329646 - DNA, 12 bp, Artificial Sequence
  Oligonucleotide primer for the detection of SNP TSC0035061
cgcataccacca

SEQ ID NO: 329647 - DNA, 12 bp, Artificial Sequence
  Oligonucleotide primer for the detection of SNP TSC0035061
cgcgtaccacca

SEQ ID NO: 329648 - DNA, 12 bp, Artificial Sequence
  Oligonucleotide primer for the detection of SNP TSC0035062
taaatttaaaaa

SEQ ID NO: 329649 - DNA, 12 bp, Artificial Sequence
  Oligonucleotide primer for the detection of SNP TSC0035062
tataaatttttt

SEQ ID NO: 329650 - DNA, 12 bp, Artificial Sequence
  Oligonucleotide primer for the detection of SNP TSC0035062
tacaaacttttt

SEQ ID NO: 329651 - DNA, 12 bp, Artificial Sequence
  Oligonucleotide primer for the detection of SNP TSC0035062
tgaatttggaaa

SEQ ID NO: 329652 - DNA, 12 bp, Artificial Sequence
  Oligonucleotide primer for the detection of SNP TSC0035064
aaattgtttata

SEQ ID NO: 329653 - DNA, 12 bp, Artificial Sequence
  Oligonucleotide primer for the detection of SNP TSC0035065
ttcctctaaccc

SEQ ID NO: 329654 - DNA, 12 bp, Artificial Sequence
  Oligonucleotide primer for the detection of SNP TSC0035065
agggtgtattag

SEQ ID NO: 329655 - DNA, 12 bp, Artificial Sequence
  Oligonucleotide primer for the detection of SNP TSC0035066
cattctatcata

SEQ ID NO: 329656 - DNA, 12 bp, Artificial Sequence
  Oligonucleotide primer for the detection of SNP TSC0035066
gtttgtatattt

SEQ ID NO: 329657 - DNA, 12 bp, Artificial Sequence
  Oligonucleotide primer for the detection of SNP TSC0035066
atttacatatct

SEQ ID NO: 329658 - DNA, 12 bp, Artificial Sequence
  Oligonucleotide primer for the detection of SNP TSC0035066
tattttattata

SEQ ID NO: 329659 - DNA, 12 bp, Artificial Sequence
  Oligonucleotide primer for the detection of SNP TSC0035067
tttccctataat

SEQ ID NO: 329660 - DNA, 12 bp, Artificial Sequence
  Oligonucleotide primer for the detection of SNP TSC0035067
ttaagtatttag

SEQ ID NO: 329661 - DNA, 12 bp, Artificial Sequence
  Oligonucleotide primer for the detection of SNP TSC0035068
taataatgttta

SEQ ID NO: 329662 - DNA, 12 bp, Artificial Sequence
  Oligonucleotide primer for the detection of SNP TSC0035068
caataataccca

SEQ ID NO: 329663 - DNA, 12 bp, Artificial Sequence
  Oligonucleotide primer for the detection of SNP TSC0035070
aaataaacatca

SEQ ID NO: 329664 - DNA, 12 bp, Artificial Sequence
  Oligonucleotide primer for the detection of SNP TSC0035070
tattggtaggat

SEQ ID NO: 329665 - DNA, 12 bp, Artificial Sequence
  Oligonucleotide primer for the detection of SNP TSC0035070
tatcggtaggat

SEQ ID NO: 329666 - DNA, 12 bp, Artificial Sequence
  Oligonucleotide primer for the detection of SNP TSC0035070
tatcaataaaac

SEQ ID NO: 329667 - DNA, 12 bp, Artificial Sequence
  Oligonucleotide primer for the detection of SNP TSC0035070
tatcgataaaac

SEQ ID NO: 329668 - DNA, 12 bp, Artificial Sequence
  Oligonucleotide primer for the detection of SNP TSC0035070
aggtgggtatta

SEQ ID NO: 329669 - DNA, 12 bp, Artificial Sequence
  Oligonucleotide primer for the detection of SNP TSC0035071
ttaaacaaatac

SEQ ID NO: 329670 - DNA, 12 bp, Artificial Sequence
  Oligonucleotide primer for the detection of SNP TSC0035071
atgattattaat

SEQ ID NO: 329671 - DNA, 12 bp, Artificial Sequence
  Oligonucleotide primer for the detection of SNP TSC0035071
ataactattaat

SEQ ID NO: 329672 - DNA, 12 bp, Artificial Sequence
  Oligonucleotide primer for the detection of SNP TSC0035071
ttgaataaatat

SEQ ID NO: 329673 - DNA, 12 bp, Artificial Sequence
  Oligonucleotide primer for the detection of SNP TSC0035072
ataaaatattaa

SEQ ID NO: 329674 - DNA, 12 bp, Artificial Sequence
  Oligonucleotide primer for the detection of SNP TSC0035072
aaccattacgcc

SEQ ID NO: 329675 - DNA, 12 bp, Artificial Sequence
  Oligonucleotide primer for the detection of SNP TSC0035072
gaaatattaatt

SEQ ID NO: 329676 - DNA, 12 bp, Artificial Sequence
  Oligonucleotide primer for the detection of SNP TSC0035072
gaaatattaatc

SEQ ID NO: 329677 - DNA, 12 bp, Artificial Sequence
  Oligonucleotide primer for the detection of SNP TSC0035077
taacttacttcc

SEQ ID NO: 329678 - DNA, 12 bp, Artificial Sequence
  Oligonucleotide primer for the detection of SNP TSC0035077
tcacttataaat

SEQ ID NO: 329679 - DNA, 12 bp, Artificial Sequence
  Oligonucleotide primer for the detection of SNP TSC0035078
aaatcaactaat

SEQ ID NO: 329680 - DNA, 12 bp, Artificial Sequence
  Oligonucleotide primer for the detection of SNP TSC0035078
gtaaaggatgtt

SEQ ID NO: 329681 - DNA, 12 bp, Artificial Sequence
  Oligonucleotide primer for the detection of SNP TSC0035078
ataaaaaatact

SEQ ID NO: 329682 - DNA, 12 bp, Artificial Sequence
  Oligonucleotide primer for the detection of SNP TSC0035078
aggttagttgat

SEQ ID NO: 329683 - DNA, 12 bp, Artificial Sequence
  Oligonucleotide primer for the detection of SNP TSC0035083
caaaacacccaa

SEQ ID NO: 329684 - DNA, 12 bp, Artificial Sequence
  Oligonucleotide primer for the detection of SNP TSC0035083
aagtataaaggt

SEQ ID NO: 329685 - DNA, 12 bp, Artificial Sequence
  Oligonucleotide primer for the detection of SNP TSC0035083
taggatatttag

SEQ ID NO: 329686 - DNA, 12 bp, Artificial Sequence
  Oligonucleotide primer for the detection of SNP TSC0035084
aacttaactttt

SEQ ID NO: 329687 - DNA, 12 bp, Artificial Sequence
  Oligonucleotide primer for the detection of SNP TSC0035084
ttttttattata

SEQ ID NO: 329688 - DNA, 12 bp, Artificial Sequence
  Oligonucleotide primer for the detection of SNP TSC0035091
aaaataaaccaa

SEQ ID NO: 329689 - DNA, 12 bp, Artificial Sequence
  Oligonucleotide primer for the detection of SNP TSC0035091
taaatatttatt

SEQ ID NO: 329690 - DNA, 12 bp, Artificial Sequence
  Oligonucleotide primer for the detection of SNP TSC0035091
aaaatgaattag

SEQ ID NO: 329691 - DNA, 12 bp, Artificial Sequence
  Oligonucleotide primer for the detection of SNP TSC0035092
acccctcaaaat

SEQ ID NO: 329692 - DNA, 12 bp, Artificial Sequence
  Oligonucleotide primer for the detection of SNP TSC0035092
acccctcgaaat

SEQ ID NO: 329693 - DNA, 12 bp, Artificial Sequence
  Oligonucleotide primer for the detection of SNP TSC0035092
cccacccccata

SEQ ID NO: 329694 - DNA, 12 bp, Artificial Sequence
  Oligonucleotide primer for the detection of SNP TSC0035092
gttttttgggat

SEQ ID NO: 329695 - DNA, 12 bp, Artificial Sequence
  Oligonucleotide primer for the detection of SNP TSC0035092
gtttttcgggat

SEQ ID NO: 329696 - DNA, 12 bp, Artificial Sequence
  Oligonucleotide primer for the detection of SNP TSC0035093
cccaaatatcac

SEQ ID NO: 329697 - DNA, 12 bp, Artificial Sequence
  Oligonucleotide primer for the detection of SNP TSC0035093
ggtttgtgggaa

SEQ ID NO: 329698 - DNA, 12 bp, Artificial Sequence
  Oligonucleotide primer for the detection of SNP TSC0035094
aaagggtttttt

SEQ ID NO: 329699 - DNA, 12 bp, Artificial Sequence
  Oligonucleotide primer for the detection of SNP TSC0035094
aaatttcctaaa

SEQ ID NO: 329700 - DNA, 12 bp, Artificial Sequence
  Oligonucleotide primer for the detection of SNP TSC0035094
gagtagggttgt

SEQ ID NO: 329701 - DNA, 12 bp, Artificial Sequence
  Oligonucleotide primer for the detection of SNP TSC0035095
ccctacctaaac

SEQ ID NO: 329702 - DNA, 12 bp, Artificial Sequence
  Oligonucleotide primer for the detection of SNP TSC0035095
ttttgagagttg

SEQ ID NO: 329703 - DNA, 12 bp, Artificial Sequence
  Oligonucleotide primer for the detection of SNP TSC0035096
tttttttgttta

SEQ ID NO: 329704 - DNA, 12 bp, Artificial Sequence
  Oligonucleotide primer for the detection of SNP TSC0035096
tcctcctaccca

SEQ ID NO: 329705 - DNA, 12 bp, Artificial Sequence
  Oligonucleotide primer for the detection of SNP TSC0035096
tggggaagaagg

SEQ ID NO: 329706 - DNA, 12 bp, Artificial Sequence
  Oligonucleotide primer for the detection of SNP TSC0035102
tagaattaatta

SEQ ID NO: 329707 - DNA, 12 bp, Artificial Sequence
  Oligonucleotide primer for the detection of SNP TSC0035102
gattaggggatt

SEQ ID NO: 329708 - DNA, 12 bp, Artificial Sequence
  Oligonucleotide primer for the detection of SNP TSC0035104
tacattatatcc

SEQ ID NO: 329709 - DNA, 12 bp, Artificial Sequence
  Oligonucleotide primer for the detection of SNP TSC0035104
aatgtagaaaag

SEQ ID NO: 329710 - DNA, 12 bp, Artificial Sequence
  Oligonucleotide primer for the detection of SNP TSC0035104
atattgtatttt

SEQ ID NO: 329711 - DNA, 12 bp, Artificial Sequence
  Oligonucleotide primer for the detection of SNP TSC0035106
aaaccccatact

SEQ ID NO: 329712 - DNA, 12 bp, Artificial Sequence
  Oligonucleotide primer for the detection of SNP TSC0035106
aggttgtgtaaa

SEQ ID NO: 329713 - DNA, 12 bp, Artificial Sequence
  Oligonucleotide primer for the detection of SNP TSC0035107
aaaaattactat

SEQ ID NO: 329714 - DNA, 12 bp, Artificial Sequence
  Oligonucleotide primer for the detection of SNP TSC0035107
gaaaattactat

SEQ ID NO: 329715 - DNA, 12 bp, Artificial Sequence
  Oligonucleotide primer for the detection of SNP TSC0035108
ttcaactaaaac

SEQ ID NO: 329716 - DNA, 12 bp, Artificial Sequence
  Oligonucleotide primer for the detection of SNP TSC0035108
gtgttttggtaa

SEQ ID NO: 329717 - DNA, 12 bp, Artificial Sequence
  Oligonucleotide primer for the detection of SNP TSC0035108
gtgtttcggtaa

SEQ ID NO: 329718 - DNA, 12 bp, Artificial Sequence
  Oligonucleotide primer for the detection of SNP TSC0035108
atactccaataa

SEQ ID NO: 329719 - DNA, 12 bp, Artificial Sequence
  Oligonucleotide primer for the detection of SNP TSC0035108
atactccgataa

SEQ ID NO: 329720 - DNA, 12 bp, Artificial Sequence
  Oligonucleotide primer for the detection of SNP TSC0035108
tttagttgggat

SEQ ID NO: 329721 - DNA, 12 bp, Artificial Sequence
  Oligonucleotide primer for the detection of SNP TSC0035109
acttctccacat

SEQ ID NO: 329722 - DNA, 12 bp, Artificial Sequence
  Oligonucleotide primer for the detection of SNP TSC0035109
aagaggaagaaa

SEQ ID NO: 329723 - DNA, 12 bp, Artificial Sequence
  Oligonucleotide primer for the detection of SNP TSC0035111
ttcatccatttt

SEQ ID NO: 329724 - DNA, 12 bp, Artificial Sequence
  Oligonucleotide primer for the detection of SNP TSC0035111
tttggatgtatg

SEQ ID NO: 329725 - DNA, 12 bp, Artificial Sequence
  Oligonucleotide primer for the detection of SNP TSC0035111
ttcggatgtatg

SEQ ID NO: 329726 - DNA, 12 bp, Artificial Sequence
  Oligonucleotide primer for the detection of SNP TSC0035112
acacccatatcc

SEQ ID NO: 329727 - DNA, 12 bp, Artificial Sequence
  Oligonucleotide primer for the detection of SNP TSC0035112
tgaataatgttg

SEQ ID NO: 329728 - DNA, 12 bp, Artificial Sequence
  Oligonucleotide primer for the detection of SNP TSC0035113
tttaactatttt

SEQ ID NO: 329729 - DNA, 12 bp, Artificial Sequence
  Oligonucleotide primer for the detection of SNP TSC0035113
aatgtaaaggag

SEQ ID NO: 329730 - DNA, 12 bp, Artificial Sequence
  Oligonucleotide primer for the detection of SNP TSC0035115
ccaacaatcctc

SEQ ID NO: 329731 - DNA, 12 bp, Artificial Sequence
  Oligonucleotide primer for the detection of SNP TSC0035115
gaggttgaggtg

SEQ ID NO: 329732 - DNA, 12 bp, Artificial Sequence
  Oligonucleotide primer for the detection of SNP TSC0035116
aaaactaaataa

SEQ ID NO: 329733 - DNA, 12 bp, Artificial Sequence
  Oligonucleotide primer for the detection of SNP TSC0035116
aaagggggaaag

SEQ ID NO: 329734 - DNA, 12 bp, Artificial Sequence
  Oligonucleotide primer for the detection of SNP TSC0035116
ataaagttaaat

SEQ ID NO: 329735 - DNA, 12 bp, Artificial Sequence
  Oligonucleotide primer for the detection of SNP TSC0035118
ttataataatcc

SEQ ID NO: 329736 - DNA, 12 bp, Artificial Sequence
  Oligonucleotide primer for the detection of SNP TSC0035118
ttcattctctta

SEQ ID NO: 329737 - DNA, 12 bp, Artificial Sequence
  Oligonucleotide primer for the detection of SNP TSC0035119
aataaggtgaaa

SEQ ID NO: 329738 - DNA, 12 bp, Artificial Sequence
  Oligonucleotide primer for the detection of SNP TSC0035119
ggtggagatagt

SEQ ID NO: 329739 - DNA, 12 bp, Artificial Sequence
  Oligonucleotide primer for the detection of SNP TSC0035119
ggtggagatagc

SEQ ID NO: 329740 - DNA, 12 bp, Artificial Sequence
  Oligonucleotide primer for the detection of SNP TSC0035122
cttttctttttc

SEQ ID NO: 329741 - DNA, 12 bp, Artificial Sequence
  Oligonucleotide primer for the detection of SNP TSC0035125
aaacacccacca

SEQ ID NO: 329742 - DNA, 12 bp, Artificial Sequence
  Oligonucleotide primer for the detection of SNP TSC0035125
aaacacccgcca

SEQ ID NO: 329743 - DNA, 12 bp, Artificial Sequence
  Oligonucleotide primer for the detection of SNP TSC0035125
aaacgcccacca

SEQ ID NO: 329744 - DNA, 12 bp, Artificial Sequence
  Oligonucleotide primer for the detection of SNP TSC0035125
aaacgcccgcca

SEQ ID NO: 329745 - DNA, 12 bp, Artificial Sequence
  Oligonucleotide primer for the detection of SNP TSC0035125
aattagtcgggt

SEQ ID NO: 329746 - DNA, 12 bp, Artificial Sequence
  Oligonucleotide primer for the detection of SNP TSC0035125
aattagtcgggc

SEQ ID NO: 329747 - DNA, 12 bp, Artificial Sequence
  Oligonucleotide primer for the detection of SNP TSC0035125
aattaaccgaac

SEQ ID NO: 329748 - DNA, 12 bp, Artificial Sequence
  Oligonucleotide primer for the detection of SNP TSC0035125
aggtgtttgtta

SEQ ID NO: 329749 - DNA, 12 bp, Artificial Sequence
  Oligonucleotide primer for the detection of SNP TSC0035125
aggcgtttgtta

SEQ ID NO: 329750 - DNA, 12 bp, Artificial Sequence
  Oligonucleotide primer for the detection of SNP TSC0035125
aggtgttcgtta

SEQ ID NO: 329751 - DNA, 12 bp, Artificial Sequence
  Oligonucleotide primer for the detection of SNP TSC0035125
aggcgttcgtta

SEQ ID NO: 329752 - DNA, 12 bp, Artificial Sequence
  Oligonucleotide primer for the detection of SNP TSC0035126
aaaccaccaaat

SEQ ID NO: 329753 - DNA, 12 bp, Artificial Sequence
  Oligonucleotide primer for the detection of SNP TSC0035126
gtgttgaatttg

SEQ ID NO: 329754 - DNA, 12 bp, Artificial Sequence
  Oligonucleotide primer for the detection of SNP TSC0035127
tttagagtttga

SEQ ID NO: 329755 - DNA, 12 bp, Artificial Sequence
  Oligonucleotide primer for the detection of SNP TSC0035127
aaatataggtgt

SEQ ID NO: 329756 - DNA, 12 bp, Artificial Sequence
  Oligonucleotide primer for the detection of SNP TSC0035128
ccaaatccccat

SEQ ID NO: 329757 - DNA, 12 bp, Artificial Sequence
  Oligonucleotide primer for the detection of SNP TSC0035128
taggaaggttaa

SEQ ID NO: 329758 - DNA, 12 bp, Artificial Sequence
  Oligonucleotide primer for the detection of SNP TSC0035129
cttatccaaaaa

SEQ ID NO: 329759 - DNA, 12 bp, Artificial Sequence
  Oligonucleotide primer for the detection of SNP TSC0035129
catttcctaact

SEQ ID NO: 329760 - DNA, 12 bp, Artificial Sequence
  Oligonukleotid-Primer
tttgtttaaaga

SEQ ID NO: 329761 - DNA, 12 bp, Artificial Sequence
  Oligonucleotide primer for the detection of SNP TSC0035130
agtgagttatga

SEQ ID NO: 329762 - DNA, 12 bp, Artificial Sequence
  Oligonucleotide primer for the detection of SNP TSC0035131
aaaataaactca

SEQ ID NO: 329763 - DNA, 12 bp, Artificial Sequence
  Oligonucleotide primer for the detection of SNP TSC0035131
tggagtttttat

SEQ ID NO: 329764 - DNA, 12 bp, Artificial Sequence
  Oligonukleotid-Primer
aaacctctataa

SEQ ID NO: 329765 - DNA, 12 bp, Artificial Sequence
  Oligonucleotide primer for the detection of SNP TSC0035131
taaaatagattt

SEQ ID NO: 329766 - DNA, 12 bp, Artificial Sequence
  Oligonucleotide primer for the detection of SNP TSC0035132
atacctaatatt

SEQ ID NO: 329767 - DNA, 12 bp, Artificial Sequence
  Oligonucleotide primer for the detection of SNP TSC0035132
tattattgatag

SEQ ID NO: 329768 - DNA, 12 bp, Artificial Sequence
  Oligonukleotid-Primer
acccaactctaa

SEQ ID NO: 329769 - DNA, 12 bp, Artificial Sequence
  Oligonucleotide primer for the detection of SNP TSC0035134
cacctactctaa

SEQ ID NO: 329770 - DNA, 12 bp, Artificial Sequence
  Oligonucleotide primer for the detection of SNP TSC0035134
gtttaattttgg

SEQ ID NO: 329771 - DNA, 12 bp, Artificial Sequence
  Oligonucleotide primer for the detection of SNP TSC0035135
cctacttataaa

SEQ ID NO: 329772 - DNA, 12 bp, Artificial Sequence
  Oligonucleotide primer for the detection of SNP TSC0035135
tctcatttttca

SEQ ID NO: 329773 - DNA, 12 bp, Artificial Sequence
  Oligonucleotide primer for the detection of SNP TSC0035135
tttatttgtaaa

SEQ ID NO: 329774 - DNA, 12 bp, Artificial Sequence
  Oligonucleotide primer for the detection of SNP TSC0035136
aattaatagttt

SEQ ID NO: 329775 - DNA, 12 bp, Artificial Sequence
  Oligonucleotide primer for the detection of SNP TSC0035136
aaccaataattt

SEQ ID NO: 329776 - DNA, 12 bp, Artificial Sequence
  Oligonucleotide primer for the detection of SNP TSC0035140
taataactcata

SEQ ID NO: 329777 - DNA, 12 bp, Artificial Sequence
  Oligonucleotide primer for the detection of SNP TSC0035140
tgttaagattat

SEQ ID NO: 329778 - DNA, 12 bp, Artificial Sequence
  Oligonucleotide primer for the detection of SNP TSC0035141
aatcctccctca

SEQ ID NO: 329779 - DNA, 12 bp, Artificial Sequence
  Oligonucleotide primer for the detection of SNP TSC0035141
tctaaaaaactc

SEQ ID NO: 329780 - DNA, 12 bp, Artificial Sequence
  Oligonucleotide primer for the detection of SNP TSC0035142
tccgaaataaaa

SEQ ID NO: 329781 - DNA, 12 bp, Artificial Sequence
  Oligonucleotide primer for the detection of SNP TSC0035142
tttttggatatg

SEQ ID NO: 329782 - DNA, 12 bp, Artificial Sequence
  Oligonucleotide primer for the detection of SNP TSC0035144
ggtgggtgtttg

SEQ ID NO: 329783 - DNA, 12 bp, Artificial Sequence
  Oligonucleotide primer for the detection of SNP TSC0035144
ggcgggtgtttg

SEQ ID NO: 329784 - DNA, 12 bp, Artificial Sequence
  Oligonucleotide primer for the detection of SNP TSC0035147
catctcaactct

SEQ ID NO: 329785 - DNA, 12 bp, Artificial Sequence
  Oligonucleotide primer for the detection of SNP TSC0035147
cgtctcaactct

SEQ ID NO: 329786 - DNA, 12 bp, Artificial Sequence
  Oligonucleotide primer for the detection of SNP TSC0035147
agttagtatgtg

SEQ ID NO: 329787 - DNA, 12 bp, Artificial Sequence
  Oligonucleotide primer for the detection of SNP TSC0035150
catacatctacc

SEQ ID NO: 329788 - DNA, 12 bp, Artificial Sequence
  Oligonucleotide primer for the detection of SNP TSC0035150
cgtacatctacc

SEQ ID NO: 329789 - DNA, 12 bp, Artificial Sequence
  Oligonucleotide primer for the detection of SNP TSC0035150
tggatgttgggg

SEQ ID NO: 329790 - DNA, 12 bp, Artificial Sequence
  Oligonucleotide primer for the detection of SNP TSC0035150
tggacgttgggg

SEQ ID NO: 329791 - DNA, 12 bp, Artificial Sequence
  Oligonucleotide primer for the detection of SNP TSC0035150
taaacactaaaa

SEQ ID NO: 329792 - DNA, 12 bp, Artificial Sequence
  Oligonucleotide primer for the detection of SNP TSC0035150
taaacgctaaaa

SEQ ID NO: 329793 - DNA, 12 bp, Artificial Sequence
  Oligonucleotide primer for the detection of SNP TSC0035150
tgtgtatttgtt

SEQ ID NO: 329794 - DNA, 12 bp, Artificial Sequence
  Oligonucleotide primer for the detection of SNP TSC0035150
cgtgtatttgtt

SEQ ID NO: 329795 - DNA, 12 bp, Artificial Sequence
  Oligonucleotide primer for the detection of SNP TSC0035151
ccaaacaaaaac

SEQ ID NO: 329796 - DNA, 12 bp, Artificial Sequence
  Oligonucleotide primer for the detection of SNP TSC0035151
ggaagtgaggag

SEQ ID NO: 329797 - DNA, 12 bp, Artificial Sequence
  Oligonucleotide primer for the detection of SNP TSC0035151
ttaggtagagat

SEQ ID NO: 329798 - DNA, 12 bp, Artificial Sequence
  Oligonucleotide primer for the detection of SNP TSC0035151
ttaggtagagac

SEQ ID NO: 329799 - DNA, 12 bp, Artificial Sequence
  Oligonucleotide primer for the detection of SNP TSC0035152
ctctcctttttt

SEQ ID NO: 329800 - DNA, 12 bp, Artificial Sequence
  Oligonucleotide primer for the detection of SNP TSC0035152
tttaagaaattt

SEQ ID NO: 329801 - DNA, 12 bp, Artificial Sequence
  Oligonucleotide primer for the detection of SNP TSC0035155
ccaaatacctac

SEQ ID NO: 329802 - DNA, 12 bp, Artificial Sequence
  Oligonucleotide primer for the detection of SNP TSC0035155
tgtggggtgtgg

SEQ ID NO: 329803 - DNA, 12 bp, Artificial Sequence
  Oligonucleotide primer for the detection of SNP TSC0035157
ctaataccattc

SEQ ID NO: 329804 - DNA, 12 bp, Artificial Sequence
  Oligonucleotide primer for the detection of SNP TSC0035157
aaagaatataat

SEQ ID NO: 329805 - DNA, 12 bp, Artificial Sequence
  Oligonucleotide primer for the detection of SNP TSC0035157
aaaaatataata

SEQ ID NO: 329806 - DNA, 12 bp, Artificial Sequence
  Oligonucleotide primer for the detection of SNP TSC0035157
tgatgttatttt

SEQ ID NO: 329807 - DNA, 12 bp, Artificial Sequence
  Oligonucleotide primer for the detection of SNP TSC0035159
ttgtgtatgtgt

SEQ ID NO: 329808 - DNA, 12 bp, Artificial Sequence
  Oligonucleotide primer for the detection of SNP TSC0035159
ttgtgtatgtgc

SEQ ID NO: 329809 - DNA, 12 bp, Artificial Sequence
  Oligonucleotide primer for the detection of SNP TSC0035159
ttatacatatac

SEQ ID NO: 329810 - DNA, 12 bp, Artificial Sequence
  Oligonucleotide primer for the detection of SNP TSC0035159
gtgtatatatat

SEQ ID NO: 329811 - DNA, 12 bp, Artificial Sequence
  Oligonucleotide primer for the detection of SNP TSC0035168
attcctaacatc

SEQ ID NO: 329812 - DNA, 12 bp, Artificial Sequence
  Oligonucleotide primer for the detection of SNP TSC0035168
gataattgaatg

SEQ ID NO: 329813 - DNA, 12 bp, Artificial Sequence
  Oligonucleotide primer for the detection of SNP TSC0035169
ttacttaaattc

SEQ ID NO: 329814 - DNA, 12 bp, Artificial Sequence
  Oligonucleotide primer for the detection of SNP TSC0035169
ttgggagtagag

SEQ ID NO: 329815 - DNA, 12 bp, Artificial Sequence
  Oligonucleotide primer for the detection of SNP TSC0035174
cttttatccaat

SEQ ID NO: 329816 - DNA, 12 bp, Artificial Sequence
  Oligonucleotide primer for the detection of SNP TSC0035174
ttgtatagaaaa

SEQ ID NO: 329817 - DNA, 12 bp, Artificial Sequence
  Oligonucleotide primer for the detection of SNP TSC0035176
gtgattttggtt

SEQ ID NO: 329818 - DNA, 12 bp, Artificial Sequence
  Oligonucleotide primer for the detection of SNP TSC0035176
gcgattttggtt

SEQ ID NO: 329819 - DNA, 12 bp, Artificial Sequence
  Oligonucleotide primer for the detection of SNP TSC0035176
gtgatttcggtt

SEQ ID NO: 329820 - DNA, 12 bp, Artificial Sequence
  Oligonucleotide primer for the detection of SNP TSC0035176
gcgatttcggtt

SEQ ID NO: 329821 - DNA, 12 bp, Artificial Sequence
  Oligonucleotide primer for the detection of SNP TSC0035176
tacaatctcaac

SEQ ID NO: 329822 - DNA, 12 bp, Artificial Sequence
  Oligonucleotide primer for the detection of SNP TSC0035176
tacaatctcgac

SEQ ID NO: 329823 - DNA, 12 bp, Artificial Sequence
  Oligonucleotide primer for the detection of SNP TSC0035176
tacgatctcaac

SEQ ID NO: 329824 - DNA, 12 bp, Artificial Sequence
  Oligonucleotide primer for the detection of SNP TSC0035176
tacgatctcgac

SEQ ID NO: 329825 - DNA, 12 bp, Artificial Sequence
  Oligonucleotide primer for the detection of SNP TSC0035176
agagggtgtagt

SEQ ID NO: 329826 - DNA, 12 bp, Artificial Sequence
  Oligonucleotide primer for the detection of SNP TSC0035179
aattaaatcact

SEQ ID NO: 329827 - DNA, 12 bp, Artificial Sequence
  Oligonucleotide primer for the detection of SNP TSC0035179
aattaaatcgct

SEQ ID NO: 329828 - DNA, 12 bp, Artificial Sequence
  Oligonucleotide primer for the detection of SNP TSC0035179
tttttaaattgg

SEQ ID NO: 329829 - DNA, 12 bp, Artificial Sequence
  Oligonucleotide primer for the detection of SNP TSC0035180
agtagtaatatt

SEQ ID NO: 329830 - DNA, 12 bp, Artificial Sequence
  Oligonucleotide primer for the detection of SNP TSC0035180
aacaacaacatc

SEQ ID NO: 329831 - DNA, 12 bp, Artificial Sequence
  Oligonucleotide primer for the detection of SNP TSC0035180
agattagaaaat

SEQ ID NO: 329832 - DNA, 12 bp, Artificial Sequence
  Oligonucleotide primer for the detection of SNP TSC0035181
aaatatatttct

SEQ ID NO: 329833 - DNA, 12 bp, Artificial Sequence
  Oligonucleotide primer for the detection of SNP TSC0035181
tggtttaaaata

SEQ ID NO: 329834 - DNA, 12 bp, Artificial Sequence
  Oligonucleotide primer for the detection of SNP TSC0035182
cctcccaaccct

SEQ ID NO: 329835 - DNA, 12 bp, Artificial Sequence
  Oligonucleotide primer for the detection of SNP TSC0035182
atgtataggata

SEQ ID NO: 329836 - DNA, 12 bp, Artificial Sequence
  Oligonucleotide primer for the detection of SNP TSC0035182
atatacaaaata

SEQ ID NO: 329837 - DNA, 12 bp, Artificial Sequence
  Oligonucleotide primer for the detection of SNP TSC0035187
ttaacgaaaaaa

SEQ ID NO: 329838 - DNA, 12 bp, Artificial Sequence
  Oligonucleotide primer for the detection of SNP TSC0035187
ttgttaaaaaag

SEQ ID NO: 329839 - DNA, 12 bp, Artificial Sequence
  Oligonucleotide primer for the detection of SNP TSC0035187
ttggtgggggga

SEQ ID NO: 329840 - DNA, 12 bp, Artificial Sequence
  Oligonucleotide primer for the detection of SNP TSC0035187
ttggcgggggga

SEQ ID NO: 329841 - DNA, 12 bp, Artificial Sequence
  Oligonucleotide primer for the detection of SNP TSC0035188
gttttgtaaaat

SEQ ID NO: 329842 - DNA, 12 bp, Artificial Sequence
  Oligonucleotide primer for the detection of SNP TSC0035188
gttttgtaaaac

SEQ ID NO: 329843 - DNA, 12 bp, Artificial Sequence
  Oligonucleotide primer for the detection of SNP TSC0035188
accctataaaac

SEQ ID NO: 329844 - DNA, 12 bp, Artificial Sequence
  Oligonucleotide primer for the detection of SNP TSC0035188
taggtaaagaat

SEQ ID NO: 329845 - DNA, 12 bp, Artificial Sequence
  Oligonucleotide primer for the detection of SNP TSC0035188
taggtaaagaac

SEQ ID NO: 329846 - DNA, 12 bp, Artificial Sequence
  Oligonucleotide primer for the detection of SNP TSC0035189
cctctatttatt

SEQ ID NO: 329847 - DNA, 12 bp, Artificial Sequence
  Oligonucleotide primer for the detection of SNP TSC0035189
tagtaataggaa

SEQ ID NO: 329848 - DNA, 12 bp, Artificial Sequence
  Oligonucleotide primer for the detection of SNP TSC0035192
tatatagaattg

SEQ ID NO: 329849 - DNA, 12 bp, Artificial Sequence
  Oligonucleotide primer for the detection of SNP TSC0035195
acctcttccaaa

SEQ ID NO: 329850 - DNA, 12 bp, Artificial Sequence
  Oligonucleotide primer for the detection of SNP TSC0035195
attgaggtagtg

SEQ ID NO: 329851 - DNA, 12 bp, Artificial Sequence
  Oligonucleotide primer for the detection of SNP TSC0035196
ataacttctccc

SEQ ID NO: 329852 - DNA, 12 bp, Artificial Sequence
  Oligonucleotide primer for the detection of SNP TSC0035196
ttatattgaata

SEQ ID NO: 329853 - DNA, 12 bp, Artificial Sequence
  Oligonucleotide primer for the detection of SNP TSC0035196
ccatactaaaca

SEQ ID NO: 329854 - DNA, 12 bp, Artificial Sequence
  Oligonucleotide primer for the detection of SNP TSC0035198
gttgtagattta

SEQ ID NO: 329855 - DNA, 12 bp, Artificial Sequence
  Oligonucleotide primer for the detection of SNP TSC0035199
tgtaatttttgt

SEQ ID NO: 329856 - DNA, 12 bp, Artificial Sequence
  Oligonucleotide primer for the detection of SNP TSC0035199
tgtaattttcgt

SEQ ID NO: 329857 - DNA, 12 bp, Artificial Sequence
  Oligonucleotide primer for the detection of SNP TSC0035199
tgtaatttttgc

SEQ ID NO: 329858 - DNA, 12 bp, Artificial Sequence
  Oligonucleotide primer for the detection of SNP TSC0035199
tgtaattttcgc

SEQ ID NO: 329859 - DNA, 12 bp, Artificial Sequence
  Oligonucleotide primer for the detection of SNP TSC0035199
aattatttgaat

SEQ ID NO: 329860 - DNA, 12 bp, Artificial Sequence
  Oligonucleotide primer for the detection of SNP TSC0035199
aattatttgaac

SEQ ID NO: 329861 - DNA, 12 bp, Artificial Sequence
  Oligonucleotide primer for the detection of SNP TSC0035200
accaaaacatac

SEQ ID NO: 329862 - DNA, 12 bp, Artificial Sequence
  Oligonucleotide primer for the detection of SNP TSC0035200
accgaaacatac

SEQ ID NO: 329863 - DNA, 12 bp, Artificial Sequence
  Oligonucleotide primer for the detection of SNP TSC0035200
ttgattgggagg

SEQ ID NO: 329864 - DNA, 12 bp, Artificial Sequence
  Oligonucleotide primer for the detection of SNP TSC0035203
caccaaacctcc

SEQ ID NO: 329865 - DNA, 12 bp, Artificial Sequence
  Oligonukleotid-Primer
tttggatgtagg

SEQ ID NO: 329866 - DNA, 12 bp, Artificial Sequence
  Oligonucleotide primer for the detection of SNP TSC0035208
ttaaattttatt

SEQ ID NO: 329867 - DNA, 12 bp, Artificial Sequence
  Oligonucleotide primer for the detection of SNP TSC0035208
aatattatggta

SEQ ID NO: 329868 - DNA, 12 bp, Artificial Sequence
  Oligonucleotide primer for the detection of SNP TSC0035214
taatctcacctc

SEQ ID NO: 329869 - DNA, 12 bp, Artificial Sequence
  Oligonukleotid-Primer
gttaatgtttta

SEQ ID NO: 329870 - DNA, 12 bp, Artificial Sequence
  Oligonucleotide primer for the detection of SNP TSC0035215
tttaagtaattt

SEQ ID NO: 329871 - DNA, 12 bp, Artificial Sequence
  Oligonucleotide primer for the detection of SNP TSC0035215
tttaagtaattc

SEQ ID NO: 329872 - DNA, 12 bp, Artificial Sequence
  Oligonucleotide primer for the detection of SNP TSC0035216
ttataccaccac

SEQ ID NO: 329873 - DNA, 12 bp, Artificial Sequence
  Oligonukleotid-Primer
ttataccaccgc

SEQ ID NO: 329874 - DNA, 12 bp, Artificial Sequence
  Oligonucleotide primer for the detection of SNP TSC0035216
ttgttagattgg

SEQ ID NO: 329875 - DNA, 12 bp, Artificial Sequence
  Oligonucleotide primer for the detection of SNP TSC0035217
aattacttaaac

SEQ ID NO: 329876 - DNA, 12 bp, Artificial Sequence
  Oligonucleotide primer for the detection of SNP TSC0035218
attcttataaat

SEQ ID NO: 329877 - DNA, 12 bp, Artificial Sequence
  Oligonukleotid-Primer
aactctccttaa

SEQ ID NO: 329878 - DNA, 12 bp, Artificial Sequence
  Oligonucleotide primer for the detection of SNP TSC0035218
atttttatagat

SEQ ID NO: 329879 - DNA, 12 bp, Artificial Sequence
  Oligonucleotide primer for the detection of SNP TSC0035222
caaccaacaaac

SEQ ID NO: 329880 - DNA, 12 bp, Artificial Sequence
  Oligonucleotide primer for the detection of SNP TSC0035222
tagtttggtagg

SEQ ID NO: 329881 - DNA, 12 bp, Artificial Sequence
  Oligonukleotid-Primer
tctctaaaaaca

SEQ ID NO: 329882 - DNA, 12 bp, Artificial Sequence
  Oligonucleotide primer for the detection of SNP TSC0035223
tatatgatgatt

SEQ ID NO: 329883 - DNA, 12 bp, Artificial Sequence
  Oligonucleotide primer for the detection of SNP TSC0035223
tatacgatgatt

SEQ ID NO: 329884 - DNA, 12 bp, Artificial Sequence
  Oligonucleotide primer for the detection of SNP TSC0035223
tatacaataacc

SEQ ID NO: 329885 - DNA, 12 bp, Artificial Sequence
  Oligonucleotide primer for the detection of SNP TSC0035223
tatacgataacc

SEQ ID NO: 329886 - DNA, 12 bp, Artificial Sequence
  Oligonucleotide primer for the detection of SNP TSC0035223
tttttggaaata

SEQ ID NO: 329887 - DNA, 12 bp, Artificial Sequence
  Oligonucleotide primer for the detection of SNP TSC0035228
tatactatataa

SEQ ID NO: 329888 - DNA, 12 bp, Artificial Sequence
  Oligonucleotide primer for the detection of SNP TSC0035228
tatttgtttagg

SEQ ID NO: 329889 - DNA, 12 bp, Artificial Sequence
  Oligonucleotide primer for the detection of SNP TSC0035228
cacctactcaaa

SEQ ID NO: 329890 - DNA, 12 bp, Artificial Sequence
  Oligonucleotide primer for the detection of SNP TSC0035228
tgtgttgtgtga

SEQ ID NO: 329891 - DNA, 12 bp, Artificial Sequence
  Oligonucleotide primer for the detection of SNP TSC0035229
tcaaacattact

SEQ ID NO: 329892 - DNA, 12 bp, Artificial Sequence
  Oligonucleotide primer for the detection of SNP TSC0035230
gaggaagagggt

SEQ ID NO: 329893 - DNA, 12 bp, Artificial Sequence
  Oligonucleotide primer for the detection of SNP TSC0035230
aagatattgggg

SEQ ID NO: 329894 - DNA, 12 bp, Artificial Sequence
  Oligonucleotide primer for the detection of SNP TSC0035231
aaccaccaaaac

SEQ ID NO: 329895 - DNA, 12 bp, Artificial Sequence
  Oligonucleotide primer for the detection of SNP TSC0035231
aaccgccaaaac

SEQ ID NO: 329896 - DNA, 12 bp, Artificial Sequence
  Oligonucleotide primer for the detection of SNP TSC0035231
tttgtgagtttt

SEQ ID NO: 329897 - DNA, 12 bp, Artificial Sequence
  Oligonucleotide primer for the detection of SNP TSC0035231
ttcgtgagtttt

SEQ ID NO: 329898 - DNA, 12 bp, Artificial Sequence
  Oligonucleotide primer for the detection of SNP TSC0035231
tttgcgagtttt

SEQ ID NO: 329899 - DNA, 12 bp, Artificial Sequence
  Oligonucleotide primer for the detection of SNP TSC0035231
tttgtgagtttc

SEQ ID NO: 329900 - DNA, 12 bp, Artificial Sequence
  Oligonucleotide primer for the detection of SNP TSC0035231
ttcgcgagtttt

SEQ ID NO: 329901 - DNA, 12 bp, Artificial Sequence
  Oligonucleotide primer for the detection of SNP TSC0035231
ttcgtgagtttc

SEQ ID NO: 329902 - DNA, 12 bp, Artificial Sequence
  Oligonucleotide primer for the detection of SNP TSC0035231
tttgcgagtttc

SEQ ID NO: 329903 - DNA, 12 bp, Artificial Sequence
  Oligonucleotide primer for the detection of SNP TSC0035231
ttcgcgagtttc

SEQ ID NO: 329904 - DNA, 12 bp, Artificial Sequence
  Oligonucleotide primer for the detection of SNP TSC0035231
actcacaaatct

SEQ ID NO: 329905 - DNA, 12 bp, Artificial Sequence
  Oligonucleotide primer for the detection of SNP TSC0035231
actcacgaatct

SEQ ID NO: 329906 - DNA, 12 bp, Artificial Sequence
  Oligonucleotide primer for the detection of SNP TSC0035231
actcgcaaatct

SEQ ID NO: 329907 - DNA, 12 bp, Artificial Sequence
  Oligonucleotide primer for the detection of SNP TSC0035231
actcgcgaatct

SEQ ID NO: 329908 - DNA, 12 bp, Artificial Sequence
  Oligonucleotide primer for the detection of SNP TSC0035231
aattgttaggat

SEQ ID NO: 329909 - DNA, 12 bp, Artificial Sequence
  Oligonucleotide primer for the detection of SNP TSC0035231
aatcgttaggat

SEQ ID NO: 329910 - DNA, 12 bp, Artificial Sequence
  Oligonucleotide primer for the detection of SNP TSC0035239
tattcaaaacat

SEQ ID NO: 329911 - DNA, 12 bp, Artificial Sequence
  Oligonucleotide primer for the detection of SNP TSC0035239
tattcaaaacgt

SEQ ID NO: 329912 - DNA, 12 bp, Artificial Sequence
  Oligonucleotide primer for the detection of SNP TSC0035240
aacaaatccaaa

SEQ ID NO: 329913 - DNA, 12 bp, Artificial Sequence
  Oligonucleotide primer for the detection of SNP TSC0035240
ttttggttatgt

SEQ ID NO: 329914 - DNA, 12 bp, Artificial Sequence
  Oligonucleotide primer for the detection of SNP TSC0035240
ctcttaaccata

SEQ ID NO: 329915 - DNA, 12 bp, Artificial Sequence
  Oligonucleotide primer for the detection of SNP TSC0035240
taataaatttag

SEQ ID NO: 329916 - DNA, 12 bp, Artificial Sequence
  Oligonucleotide primer for the detection of SNP TSC0035243
tacttaaaatta

SEQ ID NO: 329917 - DNA, 12 bp, Artificial Sequence
  Oligonucleotide primer for the detection of SNP TSC0035243
aacttcttattc

SEQ ID NO: 329918 - DNA, 12 bp, Artificial Sequence
  Oligonucleotide primer for the detection of SNP TSC0035243
gtatttggaatt

SEQ ID NO: 329919 - DNA, 12 bp, Artificial Sequence
  Oligonucleotide primer for the detection of SNP TSC0035244
ccacctttcttc

SEQ ID NO: 329920 - DNA, 12 bp, Artificial Sequence
  Oligonucleotide primer for the detection of SNP TSC0035244
ttagaagaaaag

SEQ ID NO: 329921 - DNA, 12 bp, Artificial Sequence
  Oligonucleotide primer for the detection of SNP TSC0035245
ccaaaacaccct

SEQ ID NO: 329922 - DNA, 12 bp, Artificial Sequence
  Oligonucleotide primer for the detection of SNP TSC0035245
ccaaaacgccct

SEQ ID NO: 329923 - DNA, 12 bp, Artificial Sequence
  Oligonucleotide primer for the detection of SNP TSC0035245
aaaaaatggtaa

SEQ ID NO: 329924 - DNA, 12 bp, Artificial Sequence
  Oligonucleotide primer for the detection of SNP TSC0035246
taaatttgtttt

SEQ ID NO: 329925 - DNA, 12 bp, Artificial Sequence
  Oligonucleotide primer for the detection of SNP TSC0035246
caaatttactcc

SEQ ID NO: 329926 - DNA, 12 bp, Artificial Sequence
  Oligonucleotide primer for the detection of SNP TSC0035246
agaataagaata

SEQ ID NO: 329927 - DNA, 12 bp, Artificial Sequence
  Oligonucleotide primer for the detection of SNP TSC0035247
aatcacaaacac

SEQ ID NO: 329928 - DNA, 12 bp, Artificial Sequence
  Oligonucleotide primer for the detection of SNP TSC0035247
aatcacaaacgc

SEQ ID NO: 329929 - DNA, 12 bp, Artificial Sequence
  Oligonucleotide primer for the detection of SNP TSC0035247
aatcacgaacac

SEQ ID NO: 329930 - DNA, 12 bp, Artificial Sequence
  Oligonucleotide primer for the detection of SNP TSC0035247
aatcgcaaacac

SEQ ID NO: 329931 - DNA, 12 bp, Artificial Sequence
  Oligonucleotide primer for the detection of SNP TSC0035247
aatcacgaacgc

SEQ ID NO: 329932 - DNA, 12 bp, Artificial Sequence
  Oligonucleotide primer for the detection of SNP TSC0035247
aatcgcaaacgc

SEQ ID NO: 329933 - DNA, 12 bp, Artificial Sequence
  Oligonucleotide primer for the detection of SNP TSC0035247
aatcgcgaacac

SEQ ID NO: 329934 - DNA, 12 bp, Artificial Sequence
  Oligonucleotide primer for the detection of SNP TSC0035247
aatcgcgaacgc

SEQ ID NO: 329935 - DNA, 12 bp, Artificial Sequence
  Oligonucleotide primer for the detection of SNP TSC0035247
ctataaatacac

SEQ ID NO: 329936 - DNA, 12 bp, Artificial Sequence
  Oligonucleotide primer for the detection of SNP TSC0035247
agttgtggatgt

SEQ ID NO: 329937 - DNA, 12 bp, Artificial Sequence
  Oligonucleotide primer for the detection of SNP TSC0035247
agtcgtggatgt

SEQ ID NO: 329938 - DNA, 12 bp, Artificial Sequence
  Oligonucleotide primer for the detection of SNP TSC0035247
agttgcggatgt

SEQ ID NO: 329939 - DNA, 12 bp, Artificial Sequence
  Oligonucleotide primer for the detection of SNP TSC0035247
agttgtggacgt

SEQ ID NO: 329940 - DNA, 12 bp, Artificial Sequence
  Oligonucleotide primer for the detection of SNP TSC0035247
agttgtggatgc

SEQ ID NO: 329941 - DNA, 12 bp, Artificial Sequence
  Oligonucleotide primer for the detection of SNP TSC0035247
agtcgcggatgt

SEQ ID NO: 329942 - DNA, 12 bp, Artificial Sequence
  Oligonucleotide primer for the detection of SNP TSC0035247
agtcgtggacgt

SEQ ID NO: 329943 - DNA, 12 bp, Artificial Sequence
  Oligonucleotide primer for the detection of SNP TSC0035247
agtcgtggatgc

SEQ ID NO: 329944 - DNA, 12 bp, Artificial Sequence
  Oligonucleotide primer for the detection of SNP TSC0035247
agttgcggacgt

SEQ ID NO: 329945 - DNA, 12 bp, Artificial Sequence
  Oligonucleotide primer for the detection of SNP TSC0035247
agttgcggatgc

SEQ ID NO: 329946 - DNA, 12 bp, Artificial Sequence
  Oligonucleotide primer for the detection of SNP TSC0035247
agttgtggacgc

SEQ ID NO: 329947 - DNA, 12 bp, Artificial Sequence
  Oligonucleotide primer for the detection of SNP TSC0035247
agtcgcggacgt

SEQ ID NO: 329948 - DNA, 12 bp, Artificial Sequence
  Oligonucleotide primer for the detection of SNP TSC0035247
agtcgcggatgc

SEQ ID NO: 329949 - DNA, 12 bp, Artificial Sequence
  Oligonucleotide primer for the detection of SNP TSC0035247
agtcgtggacgc

SEQ ID NO: 329950 - DNA, 12 bp, Artificial Sequence
  Oligonucleotide primer for the detection of SNP TSC0035247
agttgcggacgc

SEQ ID NO: 329951 - DNA, 12 bp, Artificial Sequence
  Oligonucleotide primer for the detection of SNP TSC0035247
agtcgcggacgc

SEQ ID NO: 329952 - DNA, 12 bp, Artificial Sequence
  Oligonucleotide primer for the detection of SNP TSC0035248
tatttaaaactc

SEQ ID NO: 329953 - DNA, 12 bp, Artificial Sequence
  Oligonucleotide primer for the detection of SNP TSC0035248
attataaattgg

SEQ ID NO: 329954 - DNA, 12 bp, Artificial Sequence
  Oligonucleotide primer for the detection of SNP TSC0035248
attataaactaa

SEQ ID NO: 329955 - DNA, 12 bp, Artificial Sequence
  Oligonucleotide primer for the detection of SNP TSC0035249
aaaaaaaacctc

SEQ ID NO: 329956 - DNA, 12 bp, Artificial Sequence
  Oligonucleotide primer for the detection of SNP TSC0035249
agaagttttagg

SEQ ID NO: 329957 - DNA, 12 bp, Artificial Sequence
  Oligonucleotide primer for the detection of SNP TSC0035253
ttattagtaggg

SEQ ID NO: 329958 - DNA, 12 bp, Artificial Sequence
  Oligonucleotide primer for the detection of SNP TSC0035254
actaaaaactca

SEQ ID NO: 329959 - DNA, 12 bp, Artificial Sequence
  Oligonucleotide primer for the detection of SNP TSC0035254
actaaaaactcg

SEQ ID NO: 329960 - DNA, 12 bp, Artificial Sequence
  Oligonucleotide primer for the detection of SNP TSC0035254
ttatgataaggt

SEQ ID NO: 329961 - DNA, 12 bp, Artificial Sequence
  Oligonucleotide primer for the detection of SNP TSC0035254
ttacgataaggt

SEQ ID NO: 329962 - DNA, 12 bp, Artificial Sequence
  Oligonucleotide primer for the detection of SNP TSC0035254
ccacaacaaaac

SEQ ID NO: 329963 - DNA, 12 bp, Artificial Sequence
  Oligonucleotide primer for the detection of SNP TSC0035254
ccacgacaaaac

SEQ ID NO: 329964 - DNA, 12 bp, Artificial Sequence
  Oligonucleotide primer for the detection of SNP TSC0035254
attgggggtttg

SEQ ID NO: 329965 - DNA, 12 bp, Artificial Sequence
  Oligonucleotide primer for the detection of SNP TSC0035254
attgggggttcg

SEQ ID NO: 329966 - DNA, 12 bp, Artificial Sequence
  Oligonucleotide primer for the detection of SNP TSC0035256
ttaatttgattt

SEQ ID NO: 329967 - DNA, 12 bp, Artificial Sequence
  Oligonucleotide primer for the detection of SNP TSC0035256
ttaatttgattc

SEQ ID NO: 329968 - DNA, 12 bp, Artificial Sequence
  Oligonucleotide primer for the detection of SNP TSC0035256
atattaacttaa

SEQ ID NO: 329969 - DNA, 12 bp, Artificial Sequence
  Oligonucleotide primer for the detection of SNP TSC0035256
agagggtttaat

SEQ ID NO: 329970 - DNA, 12 bp, Artificial Sequence
  Oligonucleotide primer for the detection of SNP TSC0035257
aacaaacacaaa

SEQ ID NO: 329971 - DNA, 12 bp, Artificial Sequence
  Oligonucleotide primer for the detection of SNP TSC0035257
aacgaacacaaa

SEQ ID NO: 329972 - DNA, 12 bp, Artificial Sequence
  Oligonucleotide primer for the detection of SNP TSC0035257
caaaaattacct

SEQ ID NO: 329973 - DNA, 12 bp, Artificial Sequence
  Oligonucleotide primer for the detection of SNP TSC0035257
cgaaaattacct

SEQ ID NO: 329974 - DNA, 12 bp, Artificial Sequence
  Oligonucleotide primer for the detection of SNP TSC0035257
aatggatataga

SEQ ID NO: 329975 - DNA, 12 bp, Artificial Sequence
  Oligonucleotide primer for the detection of SNP TSC0035257
aacggatataga

SEQ ID NO: 329976 - DNA, 12 bp, Artificial Sequence
  Oligonucleotide primer for the detection of SNP TSC0035258
aaatcacttaac

SEQ ID NO: 329977 - DNA, 12 bp, Artificial Sequence
  Oligonucleotide primer for the detection of SNP TSC0035258
gggtttagatga

SEQ ID NO: 329978 - DNA, 12 bp, Artificial Sequence
  Oligonucleotide primer for the detection of SNP TSC0035259
acttcattaaac

SEQ ID NO: 329979 - DNA, 12 bp, Artificial Sequence
  Oligonucleotide primer for the detection of SNP TSC0035259
acttcgttaaac

SEQ ID NO: 329980 - DNA, 12 bp, Artificial Sequence
  Oligonucleotide primer for the detection of SNP TSC0035259
aataggtttttt

SEQ ID NO: 329981 - DNA, 12 bp, Artificial Sequence
  Oligonucleotide primer for the detection of SNP TSC0035259
aaacaaatttcc

SEQ ID NO: 329982 - DNA, 12 bp, Artificial Sequence
  Oligonucleotide primer for the detection of SNP TSC0035259
ttttgttgaatt

SEQ ID NO: 329983 - DNA, 12 bp, Artificial Sequence
  Oligonucleotide primer for the detection of SNP TSC0035259
tttcgttgaatt

SEQ ID NO: 329984 - DNA, 12 bp, Artificial Sequence
  Oligonucleotide primer for the detection of SNP TSC0035260
ctaacaaacaac

SEQ ID NO: 329985 - DNA, 12 bp, Artificial Sequence
  Oligonucleotide primer for the detection of SNP TSC0035260
ggtaaaatatga

SEQ ID NO: 329986 - DNA, 12 bp, Artificial Sequence
  Oligonucleotide primer for the detection of SNP TSC0035260
aacaaaacataa

SEQ ID NO: 329987 - DNA, 12 bp, Artificial Sequence
  Oligonukleotid-Primer
ttgatagataat

SEQ ID NO: 329988 - DNA, 12 bp, Artificial Sequence
  Oligonucleotide primer for the detection of SNP TSC0035261
ataccatcaaca

SEQ ID NO: 329989 - DNA, 12 bp, Artificial Sequence
  Oligonucleotide primer for the detection of SNP TSC0035261
attttttaagag

SEQ ID NO: 329990 - DNA, 12 bp, Artificial Sequence
  Oligonucleotide primer for the detection of SNP TSC0035261
ccttttaaaaaa

SEQ ID NO: 329991 - DNA, 12 bp, Artificial Sequence
  Oligonucleotide primer for the detection of SNP TSC0035261
gatgttattaat

SEQ ID NO: 329992 - DNA, 12 bp, Artificial Sequence
  Oligonucleotide primer for the detection of SNP TSC0035264
aacaatacctct

SEQ ID NO: 329993 - DNA, 12 bp, Artificial Sequence
  Oligonucleotide primer for the detection of SNP TSC0035264
gagggttttaaa

SEQ ID NO: 329994 - DNA, 12 bp, Artificial Sequence
  Oligonucleotide primer for the detection of SNP TSC0035265
ctataacaaaaa

SEQ ID NO: 329995 - DNA, 12 bp, Artificial Sequence
  Oligonucleotide primer for the detection of SNP TSC0035265
ctataacgaaaa

SEQ ID NO: 329996 - DNA, 12 bp, Artificial Sequence
  Oligonucleotide primer for the detection of SNP TSC0035265
ttgtggtgggag

SEQ ID NO: 329997 - DNA, 12 bp, Artificial Sequence
  Oligonucleotide primer for the detection of SNP TSC0035265
ttgtggcgggag

SEQ ID NO: 329998 - DNA, 12 bp, Artificial Sequence
  Oligonucleotide primer for the detection of SNP TSC0035267
ataaataatgtg

SEQ ID NO: 329999 - DNA, 12 bp, Artificial Sequence
  Oligonucleotide primer for the detection of SNP TSC0035268
taataaataatg

SEQ ID NO: 330000 - DNA, 12 bp, Artificial Sequence
  Oligonucleotide primer for the detection of SNP TSC0035269
caaataaacccc

SEQ ID NO: 330001 - DNA, 12 bp, Artificial Sequence
  Oligonucleotide primer for the detection of SNP TSC0035269
ttggttggtgag

SEQ ID NO: 330002 - DNA, 12 bp, Artificial Sequence
  Oligonucleotide primer for the detection of SNP TSC0035269
ttggttggcgag

SEQ ID NO: 330003 - DNA, 12 bp, Artificial Sequence
  Oligonucleotide primer for the detection of SNP TSC0035269
tagatgagtttt

SEQ ID NO: 330004 - DNA, 12 bp, Artificial Sequence
  Oligonucleotide primer for the detection of SNP TSC0035270
agtagtgatttg

SEQ ID NO: 330005 - DNA, 12 bp, Artificial Sequence
  Oligonucleotide primer for the detection of SNP TSC0035270
aacaataaccta

SEQ ID NO: 330006 - DNA, 12 bp, Artificial Sequence
  Oligonucleotide primer for the detection of SNP TSC0035270
aggtgagggtgt

SEQ ID NO: 330007 - DNA, 12 bp, Artificial Sequence
  Oligonucleotide primer for the detection of SNP TSC0035270
aggtgagggcgt

SEQ ID NO: 330008 - DNA, 12 bp, Artificial Sequence
  Oligonucleotide primer for the detection of SNP TSC0035270
aggtgagggtgc

SEQ ID NO: 330009 - DNA, 12 bp, Artificial Sequence
  Oligonucleotide primer for the detection of SNP TSC0035270
aggtgagggcgc

SEQ ID NO: 330010 - DNA, 12 bp, Artificial Sequence
  Oligonucleotide primer for the detection of SNP TSC0035271
caaaaaattcac

SEQ ID NO: 330011 - DNA, 12 bp, Artificial Sequence
  Oligonucleotide primer for the detection of SNP TSC0035273
taggttggagtg

SEQ ID NO: 330012 - DNA, 12 bp, Artificial Sequence
  Oligonucleotide primer for the detection of SNP TSC0035274
ttaggttggagt

SEQ ID NO: 330013 - DNA, 12 bp, Artificial Sequence
  Oligonucleotide primer for the detection of SNP TSC0035275
tttaaaactata

SEQ ID NO: 330014 - DNA, 12 bp, Artificial Sequence
  Oligonucleotide primer for the detection of SNP TSC0035275
tagtaaaattta

SEQ ID NO: 330015 - DNA, 12 bp, Artificial Sequence
  Oligonucleotide primer for the detection of SNP TSC0035277
tatactctaata

SEQ ID NO: 330016 - DNA, 12 bp, Artificial Sequence
  Oligonucleotide primer for the detection of SNP TSC0035277
aaatgttatata

SEQ ID NO: 330017 - DNA, 12 bp, Artificial Sequence
  Oligonucleotide primer for the detection of SNP TSC0035278
tattattttggg

SEQ ID NO: 330018 - DNA, 12 bp, Artificial Sequence
  Oligonucleotide primer for the detection of SNP TSC0035279
aaactaacatta

SEQ ID NO: 330019 - DNA, 12 bp, Artificial Sequence
  Oligonucleotide primer for the detection of SNP TSC0035279
aaaagattttta

SEQ ID NO: 330020 - DNA, 12 bp, Artificial Sequence
  Oligonucleotide primer for the detection of SNP TSC0035279
gaaattagtatt

SEQ ID NO: 330021 - DNA, 12 bp, Artificial Sequence
  Oligonucleotide primer for the detection of SNP TSC0035280
atctacccgcct

SEQ ID NO: 330022 - DNA, 12 bp, Artificial Sequence
  Oligonucleotide primer for the detection of SNP TSC0035281
aaataaactaca

SEQ ID NO: 330023 - DNA, 12 bp, Artificial Sequence
  Oligonucleotide primer for the detection of SNP TSC0035281
gagtggtgattt

SEQ ID NO: 330024 - DNA, 12 bp, Artificial Sequence
  Oligonucleotide primer for the detection of SNP TSC0035281
acaaaataataa

SEQ ID NO: 330025 - DNA, 12 bp, Artificial Sequence
  Oligonucleotide primer for the detection of SNP TSC0035281
gaagtaaattgt

SEQ ID NO: 330026 - DNA, 12 bp, Artificial Sequence
  Oligonucleotide primer for the detection of SNP TSC0035282
actaaaaacaac

SEQ ID NO: 330027 - DNA, 12 bp, Artificial Sequence
  Oligonucleotide primer for the detection of SNP TSC0035282
gttgttagttgg

SEQ ID NO: 330028 - DNA, 12 bp, Artificial Sequence
  Oligonucleotide primer for the detection of SNP TSC0035282
actatcaactaa

SEQ ID NO: 330029 - DNA, 12 bp, Artificial Sequence
  Oligonucleotide primer for the detection of SNP TSC0035282
ttgagaatagtt

SEQ ID NO: 330030 - DNA, 12 bp, Artificial Sequence
  Oligonucleotide primer for the detection of SNP TSC0035285
aacacctatcct

SEQ ID NO: 330031 - DNA, 12 bp, Artificial Sequence
  Oligonucleotide primer for the detection of SNP TSC0035285
aggtttttggag

SEQ ID NO: 330032 - DNA, 12 bp, Artificial Sequence
  Oligonucleotide primer for the detection of SNP TSC0035289
ggttgttaagta

SEQ ID NO: 330033 - DNA, 12 bp, Artificial Sequence
  Oligonucleotide primer for the detection of SNP TSC0035289
ggtcgttaagta

SEQ ID NO: 330034 - DNA, 12 bp, Artificial Sequence
  Oligonucleotide primer for the detection of SNP TSC0035289
tttaagaaaatt

SEQ ID NO: 330035 - DNA, 12 bp, Artificial Sequence
  Oligonucleotide primer for the detection of SNP TSC0035290
cattataatata

SEQ ID NO: 330036 - DNA, 12 bp, Artificial Sequence
  Oligonucleotide primer for the detection of SNP TSC0035290
aaatttttattt

SEQ ID NO: 330037 - DNA, 12 bp, Artificial Sequence
  Oligonucleotide primer for the detection of SNP TSC0035290
aaacttctattc

SEQ ID NO: 330038 - DNA, 12 bp, Artificial Sequence
  Oligonucleotide primer for the detection of SNP TSC0035290
tattgtggtatg

SEQ ID NO: 330039 - DNA, 12 bp, Artificial Sequence
  Oligonucleotide primer for the detection of SNP TSC0035291
actctaaatcct

SEQ ID NO: 330040 - DNA, 12 bp, Artificial Sequence
  Oligonucleotide primer for the detection of SNP TSC0035291
gatgattttgta

SEQ ID NO: 330041 - DNA, 12 bp, Artificial Sequence
  Oligonucleotide primer for the detection of SNP TSC0035293
tttacaaaaaaa

SEQ ID NO: 330042 - DNA, 12 bp, Artificial Sequence
  Oligonucleotide primer for the detection of SNP TSC0035293
gtgaaagaaagt

SEQ ID NO: 330043 - DNA, 12 bp, Artificial Sequence
  Oligonucleotide primer for the detection of SNP TSC0035293
gtgaaagaaagc

SEQ ID NO: 330044 - DNA, 12 bp, Artificial Sequence
  Oligonucleotide primer for the detection of SNP TSC0035293
tttgtagaggga

SEQ ID NO: 330045 - DNA, 12 bp, Artificial Sequence
  Oligonucleotide primer for the detection of SNP TSC0035294
ccttatctaaaa

SEQ ID NO: 330046 - DNA, 12 bp, Artificial Sequence
  Oligonucleotide primer for the detection of SNP TSC0035295
tatctattacct

SEQ ID NO: 330047 - DNA, 12 bp, Artificial Sequence
  Oligonucleotide primer for the detection of SNP TSC0035295
aatgtttaaaaa

SEQ ID NO: 330048 - DNA, 12 bp, Artificial Sequence
  Oligonucleotide primer for the detection of SNP TSC0035297
aatactatctac

SEQ ID NO: 330049 - DNA, 12 bp, Artificial Sequence
  Oligonucleotide primer for the detection of SNP TSC0035297
gatactatctac

SEQ ID NO: 330050 - DNA, 12 bp, Artificial Sequence
  Oligonucleotide primer for the detection of SNP TSC0035297
ttggtgtttttt

SEQ ID NO: 330051 - DNA, 12 bp, Artificial Sequence
  Oligonucleotide primer for the detection of SNP TSC0035297
tcggtgtttttt

SEQ ID NO: 330052 - DNA, 12 bp, Artificial Sequence
  Oligonucleotide primer for the detection of SNP TSC0035297
ttggtgtttttc

SEQ ID NO: 330053 - DNA, 12 bp, Artificial Sequence
  Oligonucleotide primer for the detection of SNP TSC0035297
tcggtgtttttc

SEQ ID NO: 330054 - DNA, 12 bp, Artificial Sequence
  Oligonucleotide primer for the detection of SNP TSC0035297
ccaatacttccc

SEQ ID NO: 330055 - DNA, 12 bp, Artificial Sequence
  Oligonucleotide primer for the detection of SNP TSC0035297
ccgatacttccc

SEQ ID NO: 330056 - DNA, 12 bp, Artificial Sequence
  Oligonucleotide primer for the detection of SNP TSC0035297
ggtgttatttat

SEQ ID NO: 330057 - DNA, 12 bp, Artificial Sequence
  Oligonucleotide primer for the detection of SNP TSC0035297
ggtgttatttac

SEQ ID NO: 330058 - DNA, 12 bp, Artificial Sequence
  Oligonucleotide primer for the detection of SNP TSC0035299
tcttataattca

SEQ ID NO: 330059 - DNA, 12 bp, Artificial Sequence
  Oligonucleotide primer for the detection of SNP TSC0035299
aaaaactaatat

SEQ ID NO: 330060 - DNA, 12 bp, Artificial Sequence
  Oligonucleotide primer for the detection of SNP TSC0035302
caataattacat

SEQ ID NO: 330061 - DNA, 12 bp, Artificial Sequence
  Oligonucleotide primer for the detection of SNP TSC0035302
tgatttattata

SEQ ID NO: 330062 - DNA, 12 bp, Artificial Sequence
  Oligonucleotide primer for the detection of SNP TSC0035304
aaaacaaaaatc

SEQ ID NO: 330063 - DNA, 12 bp, Artificial Sequence
  Oligonucleotide primer for the detection of SNP TSC0035305
taaactattttt

SEQ ID NO: 330064 - DNA, 12 bp, Artificial Sequence
  Oligonucleotide primer for the detection of SNP TSC0035305
aaatagtaaaaa

SEQ ID NO: 330065 - DNA, 12 bp, Artificial Sequence
  Oligonucleotide primer for the detection of SNP TSC0035314
tttccctccttc

SEQ ID NO: 330066 - DNA, 12 bp, Artificial Sequence
  Oligonucleotide primer for the detection of SNP TSC0035314
atttttaggagg

SEQ ID NO: 330067 - DNA, 12 bp, Artificial Sequence
  Oligonucleotide primer for the detection of SNP TSC0035317
tttaaatttttc

SEQ ID NO: 330068 - DNA, 12 bp, Artificial Sequence
  Oligonucleotide primer for the detection of SNP TSC0035317
tctaaattcctc

SEQ ID NO: 330069 - DNA, 12 bp, Artificial Sequence
  Oligonucleotide primer for the detection of SNP TSC0035317
tggtattatttt

SEQ ID NO: 330070 - DNA, 12 bp, Artificial Sequence
  Oligonucleotide primer for the detection of SNP TSC0035320
catactactact

SEQ ID NO: 330071 - DNA, 12 bp, Artificial Sequence
  Oligonucleotide primer for the detection of SNP TSC0035320
tggagatatgaa

SEQ ID NO: 330072 - DNA, 12 bp, Artificial Sequence
  Oligonucleotide primer for the detection of SNP TSC0035320
tggagatacgaa

SEQ ID NO: 330073 - DNA, 12 bp, Artificial Sequence
  Oligonucleotide primer for the detection of SNP TSC0035320
aaaaatacgaaa

SEQ ID NO: 330074 - DNA, 12 bp, Artificial Sequence
  Oligonucleotide primer for the detection of SNP TSC0035320
tatgttgttgtt

SEQ ID NO: 330075 - DNA, 12 bp, Artificial Sequence
  Oligonucleotide primer for the detection of SNP TSC0035321
aaccccacaccc

SEQ ID NO: 330076 - DNA, 12 bp, Artificial Sequence
  Oligonucleotide primer for the detection of SNP TSC0035321
tgtggggggatg

SEQ ID NO: 330077 - DNA, 12 bp, Artificial Sequence
  Oligonucleotide primer for the detection of SNP TSC0035321
tgtggggggacg

SEQ ID NO: 330078 - DNA, 12 bp, Artificial Sequence
  Oligonucleotide primer for the detection of SNP TSC0035322
acttaacaaatt

SEQ ID NO: 330079 - DNA, 12 bp, Artificial Sequence
  Oligonucleotide primer for the detection of SNP TSC0035323
caaataaaacct

SEQ ID NO: 330080 - DNA, 12 bp, Artificial Sequence
  Oligonucleotide primer for the detection of SNP TSC0035323
tttggggtttta

SEQ ID NO: 330081 - DNA, 12 bp, Artificial Sequence
  Oligonucleotide primer for the detection of SNP TSC0035323
ttcggggtttta

SEQ ID NO: 330082 - DNA, 12 bp, Artificial Sequence
  Oligonucleotide primer for the detection of SNP TSC0035326
ctacaacccata

SEQ ID NO: 330083 - DNA, 12 bp, Artificial Sequence
  Oligonucleotide primer for the detection of SNP TSC0035326
ctacgacccata

SEQ ID NO: 330084 - DNA, 12 bp, Artificial Sequence
  Oligonucleotide primer for the detection of SNP TSC0035326
tgagattatttt

SEQ ID NO: 330085 - DNA, 12 bp, Artificial Sequence
  Oligonucleotide primer for the detection of SNP TSC0035326
aaatcatttcaa

SEQ ID NO: 330086 - DNA, 12 bp, Artificial Sequence
  Oligonucleotide primer for the detection of SNP TSC0035326
ttgtggtttata

SEQ ID NO: 330087 - DNA, 12 bp, Artificial Sequence
  Oligonucleotide primer for the detection of SNP TSC0035326
ttgcggtttata

SEQ ID NO: 330088 - DNA, 12 bp, Artificial Sequence
  Oligonucleotide primer for the detection of SNP TSC0035328
acttattttttt

SEQ ID NO: 330089 - DNA, 12 bp, Artificial Sequence
  Oligonucleotide primer for the detection of SNP TSC0035328
aattgtatataa

SEQ ID NO: 330090 - DNA, 12 bp, Artificial Sequence
  Oligonucleotide primer for the detection of SNP TSC0035329
tgtatataaaaa

SEQ ID NO: 330091 - DNA, 12 bp, Artificial Sequence
  Oligonucleotide primer for the detection of SNP TSC0035334
gtggtatgattt

SEQ ID NO: 330092 - DNA, 12 bp, Artificial Sequence
  Oligonucleotide primer for the detection of SNP TSC0035334
gtggtacgattt

SEQ ID NO: 330093 - DNA, 12 bp, Artificial Sequence
  Oligonucleotide primer for the detection of SNP TSC0035335
atacaacccccc

SEQ ID NO: 330094 - DNA, 12 bp, Artificial Sequence
  Oligonucleotide primer for the detection of SNP TSC0035335
aaatctccataa

SEQ ID NO: 330095 - DNA, 12 bp, Artificial Sequence
  Oligonucleotide primer for the detection of SNP TSC0035335
atgtaatttttt

SEQ ID NO: 330096 - DNA, 12 bp, Artificial Sequence
  Oligonucleotide primer for the detection of SNP TSC0035335
atgtaatttttc

SEQ ID NO: 330097 - DNA, 12 bp, Artificial Sequence
  Oligonucleotide primer for the detection of SNP TSC0035336
tggtaagtttat

SEQ ID NO: 330098 - DNA, 12 bp, Artificial Sequence
  Oligonucleotide primer for the detection of SNP TSC0035336
taacaaatctac

SEQ ID NO: 330099 - DNA, 12 bp, Artificial Sequence
  Oligonucleotide primer for the detection of SNP TSC0035336
gtaaaaagagta

SEQ ID NO: 330100 - DNA, 12 bp, Artificial Sequence
  Oligonucleotide primer for the detection of SNP TSC0035339
catcctctccct

SEQ ID NO: 330101 - DNA, 12 bp, Artificial Sequence
  Oligonucleotide primer for the detection of SNP TSC0035339
ggtatagataag

SEQ ID NO: 330102 - DNA, 12 bp, Artificial Sequence
  Oligonucleotide primer for the detection of SNP TSC0035341
ttccaaccactc

SEQ ID NO: 330103 - DNA, 12 bp, Artificial Sequence
  Oligonucleotide primer for the detection of SNP TSC0035341
gttgattttgag

SEQ ID NO: 330104 - DNA, 12 bp, Artificial Sequence
  Oligonucleotide primer for the detection of SNP TSC0035342
ttaaactacaaa

SEQ ID NO: 330105 - DNA, 12 bp, Artificial Sequence
  Oligonucleotide primer for the detection of SNP TSC0035342
ggtattggggga

SEQ ID NO: 330106 - DNA, 12 bp, Artificial Sequence
  Oligonucleotide primer for the detection of SNP TSC0035342
ttgggttgtagg

SEQ ID NO: 330107 - DNA, 12 bp, Artificial Sequence
  Oligonucleotide primer for the detection of SNP TSC0035343
tctatctccttt

SEQ ID NO: 330108 - DNA, 12 bp, Artificial Sequence
  Oligonucleotide primer for the detection of SNP TSC0035343
aaaatttttttg

SEQ ID NO: 330109 - DNA, 12 bp, Artificial Sequence
  Oligonucleotide primer for the detection of SNP TSC0035344
gggtttaaggtt

SEQ ID NO: 330110 - DNA, 12 bp, Artificial Sequence
  Oligonucleotide primer for the detection of SNP TSC0035345
acttaccccccc

SEQ ID NO: 330111 - DNA, 12 bp, Artificial Sequence
  Oligonucleotide primer for the detection of SNP TSC0035345
tggggtgggggg

SEQ ID NO: 330112 - DNA, 12 bp, Artificial Sequence
  Oligonucleotide primer for the detection of SNP TSC0035345
cggggtgggggg

SEQ ID NO: 330113 - DNA, 12 bp, Artificial Sequence
  Oligonucleotide primer for the detection of SNP TSC0035345
tggggcgggggg

SEQ ID NO: 330114 - DNA, 12 bp, Artificial Sequence
  Oligonucleotide primer for the detection of SNP TSC0035345
cggggcgggggg

SEQ ID NO: 330115 - DNA, 12 bp, Artificial Sequence
  Oligonucleotide primer for the detection of SNP TSC0035347
tttattagtttt

SEQ ID NO: 330116 - DNA, 12 bp, Artificial Sequence
  Oligonucleotide primer for the detection of SNP TSC0035347
ctcaccaatttt

SEQ ID NO: 330117 - DNA, 12 bp, Artificial Sequence
  Oligonucleotide primer for the detection of SNP TSC0035347
agtggtaaaggg

SEQ ID NO: 330118 - DNA, 12 bp, Artificial Sequence
  Oligonucleotide primer for the detection of SNP TSC0035348
caaactctacct

SEQ ID NO: 330119 - DNA, 12 bp, Artificial Sequence
  Oligonucleotide primer for the detection of SNP TSC0035348
gtgtgaatttag

SEQ ID NO: 330120 - DNA, 12 bp, Artificial Sequence
  Oligonucleotide primer for the detection of SNP TSC0035350
aataaacaaaac

SEQ ID NO: 330121 - DNA, 12 bp, Artificial Sequence
  Oligonucleotide primer for the detection of SNP TSC0035350
tttttacaaccc

SEQ ID NO: 330122 - DNA, 12 bp, Artificial Sequence
  Oligonucleotide primer for the detection of SNP TSC0035350
agtaggtaggat

SEQ ID NO: 330123 - DNA, 12 bp, Artificial Sequence
  Oligonucleotide primer for the detection of SNP TSC0035350
agtaggtaggac

SEQ ID NO: 330124 - DNA, 12 bp, Artificial Sequence
  Oligonucleotide primer for the detection of SNP TSC0035351
caatctctcaat

SEQ ID NO: 330125 - DNA, 12 bp, Artificial Sequence
  Oligonucleotide primer for the detection of SNP TSC0035351
ttttaaggaagt

SEQ ID NO: 330126 - DNA, 12 bp, Artificial Sequence
  Oligonucleotide primer for the detection of SNP TSC0035351
ttccaaaaaaat

SEQ ID NO: 330127 - DNA, 12 bp, Artificial Sequence
  Oligonucleotide primer for the detection of SNP TSC0035351
taattttttaat

SEQ ID NO: 330128 - DNA, 12 bp, Artificial Sequence
  Oligonucleotide primer for the detection of SNP TSC0035352
aaaataatacac

SEQ ID NO: 330129 - DNA, 12 bp, Artificial Sequence
  Oligonucleotide primer for the detection of SNP TSC0035352
aaaataatacgc

SEQ ID NO: 330130 - DNA, 12 bp, Artificial Sequence
  Oligonucleotide primer for the detection of SNP TSC0035352
agagattgaaag

SEQ ID NO: 330131 - DNA, 12 bp, Artificial Sequence
  Oligonucleotide primer for the detection of SNP TSC0035352
agaatggtatgt

SEQ ID NO: 330132 - DNA, 12 bp, Artificial Sequence
  Oligonukleotid-Primer
agaatggtacgt

SEQ ID NO: 330133 - DNA, 12 bp, Artificial Sequence
  Oligonucleotide primer for the detection of SNP TSC0035353
tctaaaccaaac

SEQ ID NO: 330134 - DNA, 12 bp, Artificial Sequence
  Oligonucleotide primer for the detection of SNP TSC0035353
ggaagttaatag

SEQ ID NO: 330135 - DNA, 12 bp, Artificial Sequence
  Oligonucleotide primer for the detection of SNP TSC0035353
tttagattagat

SEQ ID NO: 330136 - DNA, 12 bp, Artificial Sequence
  Oligonucleotide primer for the detection of SNP TSC0035356
aaatcctattcc

SEQ ID NO: 330137 - DNA, 12 bp, Artificial Sequence
  Oligonucleotide primer for the detection of SNP TSC0035356
tgggttggagga

SEQ ID NO: 330138 - DNA, 12 bp, Artificial Sequence
  Oligonucleotide primer for the detection of SNP TSC0035356
cgggttggagga

SEQ ID NO: 330139 - DNA, 12 bp, Artificial Sequence
  Oligonucleotide primer for the detection of SNP TSC0035356
cgaactaaaaaa

SEQ ID NO: 330140 - DNA, 12 bp, Artificial Sequence
  Oligonukleotid-Primer
aaaaactttacc

SEQ ID NO: 330141 - DNA, 12 bp, Artificial Sequence
  Oligonucleotide primer for the detection of SNP TSC0035360
aaaagatattag

SEQ ID NO: 330142 - DNA, 12 bp, Artificial Sequence
  Oligonucleotide primer for the detection of SNP TSC0035360
gaaattttattt

SEQ ID NO: 330143 - DNA, 12 bp, Artificial Sequence
  Oligonucleotide primer for the detection of SNP TSC0035361
atcatatcattt

SEQ ID NO: 330144 - DNA, 12 bp, Artificial Sequence
  Oligonucleotide primer for the detection of SNP TSC0035361
atcgtatcattt

SEQ ID NO: 330145 - DNA, 12 bp, Artificial Sequence
  Oligonucleotide primer for the detection of SNP TSC0035361
ttgtaagatata

SEQ ID NO: 330146 - DNA, 12 bp, Artificial Sequence
  Oligonucleotide primer for the detection of SNP TSC0035361
tcgtaagatata

SEQ ID NO: 330147 - DNA, 12 bp, Artificial Sequence
  Oligonucleotide primer for the detection of SNP TSC0035361
ccacaaaacaca

SEQ ID NO: 330148 - DNA, 12 bp, Artificial Sequence
  Oligonucleotide primer for the detection of SNP TSC0035361
ccgcaaaacaca

SEQ ID NO: 330149 - DNA, 12 bp, Artificial Sequence
  Oligonucleotide primer for the detection of SNP TSC0035361
attgtgttattt

SEQ ID NO: 330150 - DNA, 12 bp, Artificial Sequence
  Oligonucleotide primer for the detection of SNP TSC0035361
atcgtgttattt

SEQ ID NO: 330151 - DNA, 12 bp, Artificial Sequence
  Oligonucleotide primer for the detection of SNP TSC0035362
cgaaataactaa

SEQ ID NO: 330152 - DNA, 12 bp, Artificial Sequence
  Oligonucleotide primer for the detection of SNP TSC0035362
ggtgtttgtaat

SEQ ID NO: 330153 - DNA, 12 bp, Artificial Sequence
  Oligonucleotide primer for the detection of SNP TSC0035362
ggcgtttgtaat

SEQ ID NO: 330154 - DNA, 12 bp, Artificial Sequence
  Oligonucleotide primer for the detection of SNP TSC0035362
aaacacctataa

SEQ ID NO: 330155 - DNA, 12 bp, Artificial Sequence
  Oligonucleotide primer for the detection of SNP TSC0035362
aaacgcctataa

SEQ ID NO: 330156 - DNA, 12 bp, Artificial Sequence
  Oligonucleotide primer for the detection of SNP TSC0035362
gaacacctataa

SEQ ID NO: 330157 - DNA, 12 bp, Artificial Sequence
  Oligonucleotide primer for the detection of SNP TSC0035362
gaacgcctataa

SEQ ID NO: 330158 - DNA, 12 bp, Artificial Sequence
  Oligonucleotide primer for the detection of SNP TSC0035362
tgaagtagttgg

SEQ ID NO: 330159 - DNA, 12 bp, Artificial Sequence
  Oligonucleotide primer for the detection of SNP TSC0035362
cgaagtagttgg

SEQ ID NO: 330160 - DNA, 12 bp, Artificial Sequence
  Oligonucleotide primer for the detection of SNP TSC0035363
tagttgggtgtg

SEQ ID NO: 330161 - DNA, 12 bp, Artificial Sequence
  Oligonucleotide primer for the detection of SNP TSC0035363
tagtcgggtgtg

SEQ ID NO: 330162 - DNA, 12 bp, Artificial Sequence
  Oligonucleotide primer for the detection of SNP TSC0035363
tagttgggcgtg

SEQ ID NO: 330163 - DNA, 12 bp, Artificial Sequence
  Oligonucleotide primer for the detection of SNP TSC0035363
tagtcgggcgtg

SEQ ID NO: 330164 - DNA, 12 bp, Artificial Sequence
  Oligonucleotide primer for the detection of SNP TSC0035363
taaccaaacata

SEQ ID NO: 330165 - DNA, 12 bp, Artificial Sequence
  Oligonucleotide primer for the detection of SNP TSC0035363
taaccaaacgta

SEQ ID NO: 330166 - DNA, 12 bp, Artificial Sequence
  Oligonucleotide primer for the detection of SNP TSC0035363
taaccgaacata

SEQ ID NO: 330167 - DNA, 12 bp, Artificial Sequence
  Oligonucleotide primer for the detection of SNP TSC0035363
taaccgaacgta

SEQ ID NO: 330168 - DNA, 12 bp, Artificial Sequence
  Oligonucleotide primer for the detection of SNP TSC0035363
aggagtttgtta

SEQ ID NO: 330169 - DNA, 12 bp, Artificial Sequence
  Oligonucleotide primer for the detection of SNP TSC0035366
actctcaacaaa

SEQ ID NO: 330170 - DNA, 12 bp, Artificial Sequence
  Oligonucleotide primer for the detection of SNP TSC0035366
tagtataattat

SEQ ID NO: 330171 - DNA, 12 bp, Artificial Sequence
  Oligonucleotide primer for the detection of SNP TSC0035366
ccaacacaacca

SEQ ID NO: 330172 - DNA, 12 bp, Artificial Sequence
  Oligonucleotide primer for the detection of SNP TSC0035366
ttttagtaaatt

SEQ ID NO: 330173 - DNA, 12 bp, Artificial Sequence
  Oligonucleotide primer for the detection of SNP TSC0035370
ttcccttaatat

SEQ ID NO: 330174 - DNA, 12 bp, Artificial Sequence
  Oligonucleotide primer for the detection of SNP TSC0035370
aagtggggagag

SEQ ID NO: 330175 - DNA, 12 bp, Artificial Sequence
  Oligonucleotide primer for the detection of SNP TSC0035371
ttaaaacaaatc

SEQ ID NO: 330176 - DNA, 12 bp, Artificial Sequence
  Oligonucleotide primer for the detection of SNP TSC0035371
tagagagatgaa

SEQ ID NO: 330177 - DNA, 12 bp, Artificial Sequence
  Oligonucleotide primer for the detection of SNP TSC0035372
atctcaaaattt

SEQ ID NO: 330178 - DNA, 12 bp, Artificial Sequence
  Oligonucleotide primer for the detection of SNP TSC0035376
acctcactaaat

SEQ ID NO: 330179 - DNA, 12 bp, Artificial Sequence
  Oligonucleotide primer for the detection of SNP TSC0035376
agaaaagattta

SEQ ID NO: 330180 - DNA, 12 bp, Artificial Sequence
  Oligonucleotide primer for the detection of SNP TSC0035377
aataacaaccta

SEQ ID NO: 330181 - DNA, 12 bp, Artificial Sequence
  Oligonucleotide primer for the detection of SNP TSC0035377
agaattaaggag

SEQ ID NO: 330182 - DNA, 12 bp, Artificial Sequence
  Oligonucleotide primer for the detection of SNP TSC0035377
gtgataatttgt

SEQ ID NO: 330183 - DNA, 12 bp, Artificial Sequence
  Oligonucleotide primer for the detection of SNP TSC0035378
tctaaataaaac

SEQ ID NO: 330184 - DNA, 12 bp, Artificial Sequence
  Oligonucleotide primer for the detection of SNP TSC0035378
tgataattgtgt

SEQ ID NO: 330185 - DNA, 12 bp, Artificial Sequence
  Oligonucleotide primer for the detection of SNP TSC0035378
cgataattgtgt

SEQ ID NO: 330186 - DNA, 12 bp, Artificial Sequence
  Oligonucleotide primer for the detection of SNP TSC0035378
tgataattgcgt

SEQ ID NO: 330187 - DNA, 12 bp, Artificial Sequence
  Oligonucleotide primer for the detection of SNP TSC0035378
cgataattgcgt

SEQ ID NO: 330188 - DNA, 12 bp, Artificial Sequence
  Oligonucleotide primer for the detection of SNP TSC0035378
aacaactacaca

SEQ ID NO: 330189 - DNA, 12 bp, Artificial Sequence
  Oligonucleotide primer for the detection of SNP TSC0035378
aacaactacgca

SEQ ID NO: 330190 - DNA, 12 bp, Artificial Sequence
  Oligonucleotide primer for the detection of SNP TSC0035378
gacaactacaca

SEQ ID NO: 330191 - DNA, 12 bp, Artificial Sequence
  Oligonucleotide primer for the detection of SNP TSC0035378
gacaactacgca

SEQ ID NO: 330192 - DNA, 12 bp, Artificial Sequence
  Oligonucleotide primer for the detection of SNP TSC0035378
tttaagtgaagt

SEQ ID NO: 330193 - DNA, 12 bp, Artificial Sequence
  Oligonucleotide primer for the detection of SNP TSC0035379
actcactaaatc

SEQ ID NO: 330194 - DNA, 12 bp, Artificial Sequence
  Oligonucleotide primer for the detection of SNP TSC0035379
gtgggtgtttag

SEQ ID NO: 330195 - DNA, 12 bp, Artificial Sequence
  Oligonucleotide primer for the detection of SNP TSC0035379
gcgggtgtttag

SEQ ID NO: 330196 - DNA, 12 bp, Artificial Sequence
  Oligonucleotide primer for the detection of SNP TSC0035380
accttaaataac

SEQ ID NO: 330197 - DNA, 12 bp, Artificial Sequence
  Oligonukleotid-Primer
ggttaaggtagg

SEQ ID NO: 330198 - DNA, 12 bp, Artificial Sequence
  Oligonucleotide primer for the detection of SNP TSC0035380
attttaaatgat

SEQ ID NO: 330199 - DNA, 12 bp, Artificial Sequence
  Oligonucleotide primer for the detection of SNP TSC0035382
taacaaaacccc

SEQ ID NO: 330200 - DNA, 12 bp, Artificial Sequence
  Oligonucleotide primer for the detection of SNP TSC0035382
taacgaaacccc

SEQ ID NO: 330201 - DNA, 12 bp, Artificial Sequence
  Oligonucleotide primer for the detection of SNP TSC0035382
tattggtttttg

SEQ ID NO: 330202 - DNA, 12 bp, Artificial Sequence
  Oligonucleotide primer for the detection of SNP TSC0035385
tcaccatccttc

SEQ ID NO: 330203 - DNA, 12 bp, Artificial Sequence
  Oligonucleotide primer for the detection of SNP TSC0035385
gttgatattgga

SEQ ID NO: 330204 - DNA, 12 bp, Artificial Sequence
  Oligonucleotide primer for the detection of SNP TSC0035386
tgataataaatg

SEQ ID NO: 330205 - DNA, 12 bp, Artificial Sequence
  Oligonucleotide primer for the detection of SNP TSC0035386
ttttgagagagt

SEQ ID NO: 330206 - DNA, 12 bp, Artificial Sequence
  Oligonucleotide primer for the detection of SNP TSC0035387
ttctaaaataac

SEQ ID NO: 330207 - DNA, 12 bp, Artificial Sequence
  Oligonucleotide primer for the detection of SNP TSC0035387
aaaatataagta

SEQ ID NO: 330208 - DNA, 12 bp, Artificial Sequence
  Oligonucleotide primer for the detection of SNP TSC0035389
tttaagttattt

SEQ ID NO: 330209 - DNA, 12 bp, Artificial Sequence
  Oligonucleotide primer for the detection of SNP TSC0035389
ctaaatcactta

SEQ ID NO: 330210 - DNA, 12 bp, Artificial Sequence
  Oligonucleotide primer for the detection of SNP TSC0035389
ttgtgatattag

SEQ ID NO: 330211 - DNA, 12 bp, Artificial Sequence
  Oligonucleotide primer for the detection of SNP TSC0035390
cctatcaatttc

SEQ ID NO: 330212 - DNA, 12 bp, Artificial Sequence
  Oligonucleotide primer for the detection of SNP TSC0035390
attgtatagtgg

SEQ ID NO: 330213 - DNA, 12 bp, Artificial Sequence
  Oligonucleotide primer for the detection of SNP TSC0035390
ttatataataaa

SEQ ID NO: 330214 - DNA, 12 bp, Artificial Sequence
  Oligonucleotide primer for the detection of SNP TSC0035392
aaaaaccacttc

SEQ ID NO: 330215 - DNA, 12 bp, Artificial Sequence
  Oligonucleotide primer for the detection of SNP TSC0035392
aaaaaccgcttc

SEQ ID NO: 330216 - DNA, 12 bp, Artificial Sequence
  Oligonucleotide primer for the detection of SNP TSC0035392
aattgggtttgg

SEQ ID NO: 330217 - DNA, 12 bp, Artificial Sequence
  Oligonucleotide primer for the detection of SNP TSC0035396
ccaaaaaaccat

SEQ ID NO: 330218 - DNA, 12 bp, Artificial Sequence
  Oligonucleotide primer for the detection of SNP TSC0035396
ccaaaaaaccgt

SEQ ID NO: 330219 - DNA, 12 bp, Artificial Sequence
  Oligonucleotide primer for the detection of SNP TSC0035396
aggatggagggg

SEQ ID NO: 330220 - DNA, 12 bp, Artificial Sequence
  Oligonucleotide primer for the detection of SNP TSC0035397
acaccctctaat

SEQ ID NO: 330221 - DNA, 12 bp, Artificial Sequence
  Oligonucleotide primer for the detection of SNP TSC0035397
aaaaatagtaga

SEQ ID NO: 330222 - DNA, 12 bp, Artificial Sequence
  Oligonucleotide primer for the detection of SNP TSC0035399
tatgggtattat

SEQ ID NO: 330223 - DNA, 12 bp, Artificial Sequence
  Oligonucleotide primer for the detection of SNP TSC0035399
tataaacaccac

SEQ ID NO: 330224 - DNA, 12 bp, Artificial Sequence
  Oligonucleotide primer for the detection of SNP TSC0035399
tagtagagtagg

SEQ ID NO: 330225 - DNA, 12 bp, Artificial Sequence
  Oligonucleotide primer for the detection of SNP TSC0035400
tataaattatat

SEQ ID NO: 330226 - DNA, 12 bp, Artificial Sequence
  Oligonucleotide primer for the detection of SNP TSC0035400
ttgagtatagtg

SEQ ID NO: 330227 - DNA, 12 bp, Artificial Sequence
  Oligonucleotide primer for the detection of SNP TSC0035405
actttcatttat

SEQ ID NO: 330228 - DNA, 12 bp, Artificial Sequence
  Oligonucleotide primer for the detection of SNP TSC0035406
ataacataaaat

SEQ ID NO: 330229 - DNA, 12 bp, Artificial Sequence
  Oligonucleotide primer for the detection of SNP TSC0035406
agggaatatgag

SEQ ID NO: 330230 - DNA, 12 bp, Artificial Sequence
  Oligonucleotide primer for the detection of SNP TSC0035406
agggaatacgag

SEQ ID NO: 330231 - DNA, 12 bp, Artificial Sequence
  Oligonucleotide primer for the detection of SNP TSC0035406
aaaaaacacgaa

SEQ ID NO: 330232 - DNA, 12 bp, Artificial Sequence
  Oligonucleotide primer for the detection of SNP TSC0035406
gtggtatggagt

SEQ ID NO: 330233 - DNA, 12 bp, Artificial Sequence
  Oligonucleotide primer for the detection of SNP TSC0035407
accataacccta

SEQ ID NO: 330234 - DNA, 12 bp, Artificial Sequence
  Oligonucleotide primer for the detection of SNP TSC0035407
ttttggattgat

SEQ ID NO: 330235 - DNA, 12 bp, Artificial Sequence
  Oligonucleotide primer for the detection of SNP TSC0035407
ttttggatcgat

SEQ ID NO: 330236 - DNA, 12 bp, Artificial Sequence
  Oligonucleotide primer for the detection of SNP TSC0035407
ttttaaatcaac

SEQ ID NO: 330237 - DNA, 12 bp, Artificial Sequence
  Oligonucleotide primer for the detection of SNP TSC0035407
ttttaaatcgac

SEQ ID NO: 330238 - DNA, 12 bp, Artificial Sequence
  Oligonucleotide primer for the detection of SNP TSC0035407
gttatggttttg

SEQ ID NO: 330239 - DNA, 12 bp, Artificial Sequence
  Oligonucleotide primer for the detection of SNP TSC0035408
accacatcaacc

SEQ ID NO: 330240 - DNA, 12 bp, Artificial Sequence
  Oligonucleotide primer for the detection of SNP TSC0035408
gagatgggtgta

SEQ ID NO: 330241 - DNA, 12 bp, Artificial Sequence
  Oligonucleotide primer for the detection of SNP TSC0035408
gttatattagtt

SEQ ID NO: 330242 - DNA, 12 bp, Artificial Sequence
  Oligonucleotide primer for the detection of SNP TSC0035409
aaatactttcca

SEQ ID NO: 330243 - DNA, 12 bp, Artificial Sequence
  Oligonucleotide primer for the detection of SNP TSC0035409
gaatactttcca

SEQ ID NO: 330244 - DNA, 12 bp, Artificial Sequence
  Oligonucleotide primer for the detection of SNP TSC0035409
tttgtgtattag

SEQ ID NO: 330245 - DNA, 12 bp, Artificial Sequence
  Oligonucleotide primer for the detection of SNP TSC0035409
cctatatatcaa

SEQ ID NO: 330246 - DNA, 12 bp, Artificial Sequence
  Oligonucleotide primer for the detection of SNP TSC0035409
gagtgtttttta

SEQ ID NO: 330247 - DNA, 12 bp, Artificial Sequence
  Oligonucleotide primer for the detection of SNP TSC0035410
tcaaccctacct

SEQ ID NO: 330248 - DNA, 12 bp, Artificial Sequence
  Oligonucleotide primer for the detection of SNP TSC0035410
agatggaagaga

SEQ ID NO: 330249 - DNA, 12 bp, Artificial Sequence
  Oligonucleotide primer for the detection of SNP TSC0035411
aaccctacctct

SEQ ID NO: 330250 - DNA, 12 bp, Artificial Sequence
  Oligonucleotide primer for the detection of SNP TSC0035411
tgagatggaaga

SEQ ID NO: 330251 - DNA, 12 bp, Artificial Sequence
  Oligonucleotide primer for the detection of SNP TSC0035412
ttttgaattagg

SEQ ID NO: 330252 - DNA, 12 bp, Artificial Sequence
  Oligonucleotide primer for the detection of SNP TSC0035413
aaattccaaaat

SEQ ID NO: 330253 - DNA, 12 bp, Artificial Sequence
  Oligonucleotide primer for the detection of SNP TSC0035413
ttggaattatta

SEQ ID NO: 330254 - DNA, 12 bp, Artificial Sequence
  Oligonucleotide primer for the detection of SNP TSC0035416
tttcttctttca

SEQ ID NO: 330255 - DNA, 12 bp, Artificial Sequence
  Oligonucleotide primer for the detection of SNP TSC0035416
attgtatattgt

SEQ ID NO: 330256 - DNA, 12 bp, Artificial Sequence
  Oligonucleotide primer for the detection of SNP TSC0035416
attatacactat

SEQ ID NO: 330257 - DNA, 12 bp, Artificial Sequence
  Oligonucleotide primer for the detection of SNP TSC0035419
atggaaataaat

SEQ ID NO: 330258 - DNA, 12 bp, Artificial Sequence
  Oligonucleotide primer for the detection of SNP TSC0035420
caaaaataattt

SEQ ID NO: 330259 - DNA, 12 bp, Artificial Sequence
  Oligonucleotide primer for the detection of SNP TSC0035421
ttatacaaacac

SEQ ID NO: 330260 - DNA, 12 bp, Artificial Sequence
  Oligonucleotide primer for the detection of SNP TSC0035421
attgattgatta

SEQ ID NO: 330261 - DNA, 12 bp, Artificial Sequence
  Oligonucleotide primer for the detection of SNP TSC0035422
ctccataaacat

SEQ ID NO: 330262 - DNA, 12 bp, Artificial Sequence
  Oligonucleotide primer for the detection of SNP TSC0035424
caatcacttttt

SEQ ID NO: 330263 - DNA, 12 bp, Artificial Sequence
  Oligonucleotide primer for the detection of SNP TSC0035424
attaatatgtaa

SEQ ID NO: 330264 - DNA, 12 bp, Artificial Sequence
  Oligonucleotide primer for the detection of SNP TSC0035425
tcctccacaaca

SEQ ID NO: 330265 - DNA, 12 bp, Artificial Sequence
  Oligonucleotide primer for the detection of SNP TSC0035425
ttttggttattt

SEQ ID NO: 330266 - DNA, 12 bp, Artificial Sequence
  Oligonucleotide primer for the detection of SNP TSC0035425
accttaaccatc

SEQ ID NO: 330267 - DNA, 12 bp, Artificial Sequence
  Oligonucleotide primer for the detection of SNP TSC0035426
acattaaaatta

SEQ ID NO: 330268 - DNA, 12 bp, Artificial Sequence
  Oligonucleotide primer for the detection of SNP TSC0035426
ttggagtagtgt

SEQ ID NO: 330269 - DNA, 12 bp, Artificial Sequence
  Oligonucleotide primer for the detection of SNP TSC0035426
ttggagtagcgt

SEQ ID NO: 330270 - DNA, 12 bp, Artificial Sequence
  Oligonucleotide primer for the detection of SNP TSC0035426
ttaaaacaacac

SEQ ID NO: 330271 - DNA, 12 bp, Artificial Sequence
  Oligonucleotide primer for the detection of SNP TSC0035426
ttaaaacaacgc

SEQ ID NO: 330272 - DNA, 12 bp, Artificial Sequence
  Oligonucleotide primer for the detection of SNP TSC0035426
gtattgggatta

SEQ ID NO: 330273 - DNA, 12 bp, Artificial Sequence
  Oligonucleotide primer for the detection of SNP TSC0035427
aaaaatcacctt

SEQ ID NO: 330274 - DNA, 12 bp, Artificial Sequence
  Oligonucleotide primer for the detection of SNP TSC0035427
tttttattgtgg

SEQ ID NO: 330275 - DNA, 12 bp, Artificial Sequence
  Oligonucleotide primer for the detection of SNP TSC0035429
tctttctttctt

SEQ ID NO: 330276 - DNA, 12 bp, Artificial Sequence
  Oligonucleotide primer for the detection of SNP TSC0035429
gtaagaaagtaa

SEQ ID NO: 330277 - DNA, 12 bp, Artificial Sequence
  Oligonucleotide primer for the detection of SNP TSC0035430
tctttcttactt

SEQ ID NO: 330278 - DNA, 12 bp, Artificial Sequence
  Oligonucleotide primer for the detection of SNP TSC0035430
gaaagtaagaaa

SEQ ID NO: 330279 - DNA, 12 bp, Artificial Sequence
  Oligonucleotide primer for the detection of SNP TSC0035431
acttaaaaccaa

SEQ ID NO: 330280 - DNA, 12 bp, Artificial Sequence
  Oligonucleotide primer for the detection of SNP TSC0035431
tggttttaaatt

SEQ ID NO: 330281 - DNA, 12 bp, Artificial Sequence
  Oligonucleotide primer for the detection of SNP TSC0035432
tcaccaactatc

SEQ ID NO: 330282 - DNA, 12 bp, Artificial Sequence
  Oligonucleotide primer for the detection of SNP TSC0035432
tgtattgatgaa

SEQ ID NO: 330283 - DNA, 12 bp, Artificial Sequence
  Oligonucleotide primer for the detection of SNP TSC0035434
tttgatttattt

SEQ ID NO: 330284 - DNA, 12 bp, Artificial Sequence
  Oligonucleotide primer for the detection of SNP TSC0035434
ttcgatttattt

SEQ ID NO: 330285 - DNA, 12 bp, Artificial Sequence
  Oligonucleotide primer for the detection of SNP TSC0035434
cctcaacccacc

SEQ ID NO: 330286 - DNA, 12 bp, Artificial Sequence
  Oligonucleotide primer for the detection of SNP TSC0035434
cctcgacccacc

SEQ ID NO: 330287 - DNA, 12 bp, Artificial Sequence
  Oligonucleotide primer for the detection of SNP TSC0035434
gagggtgaggag

SEQ ID NO: 330288 - DNA, 12 bp, Artificial Sequence
  Oligonucleotide primer for the detection of SNP TSC0035434
gagggcgaggag

SEQ ID NO: 330289 - DNA, 12 bp, Artificial Sequence
  Oligonucleotide primer for the detection of SNP TSC0035435
aactccataaac

SEQ ID NO: 330290 - DNA, 12 bp, Artificial Sequence
  Oligonucleotide primer for the detection of SNP TSC0035435
ggatagatgtgg

SEQ ID NO: 330291 - DNA, 12 bp, Artificial Sequence
  Oligonucleotide primer for the detection of SNP TSC0035435
ggatagacgtgg

SEQ ID NO: 330292 - DNA, 12 bp, Artificial Sequence
  Oligonucleotide primer for the detection of SNP TSC0035436
taatacattacc

SEQ ID NO: 330293 - DNA, 12 bp, Artificial Sequence
  Oligonucleotide primer for the detection of SNP TSC0035439
ataaaataaacg

SEQ ID NO: 330294 - DNA, 12 bp, Artificial Sequence
  Oligonucleotide primer for the detection of SNP TSC0035439
gaatgaatgtat

SEQ ID NO: 330295 - DNA, 12 bp, Artificial Sequence
  Oligonucleotide primer for the detection of SNP TSC0035439
gtgaggtgggtg

SEQ ID NO: 330296 - DNA, 12 bp, Artificial Sequence
  Oligonucleotide primer for the detection of SNP TSC0035439
gtgaggtgggcg

SEQ ID NO: 330297 - DNA, 12 bp, Artificial Sequence
  Oligonucleotide primer for the detection of SNP TSC0035440
tagggataaaat

SEQ ID NO: 330298 - DNA, 12 bp, Artificial Sequence
  Oligonucleotide primer for the detection of SNP TSC0035440
agagaagttatt

SEQ ID NO: 330299 - DNA, 12 bp, Artificial Sequence
  Oligonucleotide primer for the detection of SNP TSC0035442
aatccattttaa

SEQ ID NO: 330300 - DNA, 12 bp, Artificial Sequence
  Oligonucleotide primer for the detection of SNP TSC0035442
agaaagatttgt

SEQ ID NO: 330301 - DNA, 12 bp, Artificial Sequence
  Oligonucleotide primer for the detection of SNP TSC0035442
ggtttattttaa

SEQ ID NO: 330302 - DNA, 12 bp, Artificial Sequence
  Oligonucleotide primer for the detection of SNP TSC0035443
ggataatttata

SEQ ID NO: 330303 - DNA, 12 bp, Artificial Sequence
  Oligonucleotide primer for the detection of SNP TSC0035443
aaacaacttaca

SEQ ID NO: 330304 - DNA, 12 bp, Artificial Sequence
  Oligonucleotide primer for the detection of SNP TSC0035443
gttttaaaaaat

SEQ ID NO: 330305 - DNA, 12 bp, Artificial Sequence
  Oligonucleotide primer for the detection of SNP TSC0035444
tccaaacgaaac

SEQ ID NO: 330306 - DNA, 12 bp, Artificial Sequence
  Oligonucleotide primer for the detection of SNP TSC0035444
ttgaggggtaaa

SEQ ID NO: 330307 - DNA, 12 bp, Artificial Sequence
  Oligonucleotide primer for the detection of SNP TSC0035444
tttaagtggggt

SEQ ID NO: 330308 - DNA, 12 bp, Artificial Sequence
  Oligonucleotide primer for the detection of SNP TSC0035444
tttaagcggggt

SEQ ID NO: 330309 - DNA, 12 bp, Artificial Sequence
  Oligonucleotide primer for the detection of SNP TSC0035446
tacaaaacacaa

SEQ ID NO: 330310 - DNA, 12 bp, Artificial Sequence
  Oligonucleotide primer for the detection of SNP TSC0035446
atttttagtatt

SEQ ID NO: 330311 - DNA, 12 bp, Artificial Sequence
  Oligonucleotide primer for the detection of SNP TSC0035446
actctcaatatc

SEQ ID NO: 330312 - DNA, 12 bp, Artificial Sequence
  Oligonucleotide primer for the detection of SNP TSC0035446
tttgtaaagtat

SEQ ID NO: 330313 - DNA, 12 bp, Artificial Sequence
  Oligonucleotide primer for the detection of SNP TSC0035447
cttaaaaaacgc

SEQ ID NO: 330314 - DNA, 12 bp, Artificial Sequence
  Oligonucleotide primer for the detection of SNP TSC0035447
tgagttagtagg

SEQ ID NO: 330315 - DNA, 12 bp, Artificial Sequence
  Oligonucleotide primer for the detection of SNP TSC0035447
taaattaacaaa

SEQ ID NO: 330316 - DNA, 12 bp, Artificial Sequence
  Oligonucleotide primer for the detection of SNP TSC0035447
tttgggaggtgt

SEQ ID NO: 330317 - DNA, 12 bp, Artificial Sequence
  Oligonucleotide primer for the detection of SNP TSC0035447
tttgggaggcgt

SEQ ID NO: 330318 - DNA, 12 bp, Artificial Sequence
  Oligonucleotide primer for the detection of SNP TSC0035448
ggaaagaatagt

SEQ ID NO: 330319 - DNA, 12 bp, Artificial Sequence
  Oligonucleotide primer for the detection of SNP TSC0035454
taaataaaacat

SEQ ID NO: 330320 - DNA, 12 bp, Artificial Sequence
  Oligonucleotide primer for the detection of SNP TSC0035454
gtttatgatgta

SEQ ID NO: 330321 - DNA, 12 bp, Artificial Sequence
  Oligonucleotide primer for the detection of SNP TSC0035454
atctataatata

SEQ ID NO: 330322 - DNA, 12 bp, Artificial Sequence
  Oligonukleotid-Primer
gtctataatata

SEQ ID NO: 330323 - DNA, 12 bp, Artificial Sequence
  Oligonucleotide primer for the detection of SNP TSC0035454
taaatgagatat

SEQ ID NO: 330324 - DNA, 12 bp, Artificial Sequence
  Oligonucleotide primer for the detection of SNP TSC0035455
tatcacaatata

SEQ ID NO: 330325 - DNA, 12 bp, Artificial Sequence
  Oligonucleotide primer for the detection of SNP TSC0035455
tatcacgatata

SEQ ID NO: 330326 - DNA, 12 bp, Artificial Sequence
  Oligonucleotide primer for the detection of SNP TSC0035455
agttatttagtt

SEQ ID NO: 330327 - DNA, 12 bp, Artificial Sequence
  Oligonucleotide primer for the detection of SNP TSC0035455
aaccattcaatt

SEQ ID NO: 330328 - DNA, 12 bp, Artificial Sequence
  Oligonucleotide primer for the detection of SNP TSC0035455
tattatgatata

SEQ ID NO: 330329 - DNA, 12 bp, Artificial Sequence
  Oligonucleotide primer for the detection of SNP TSC0035455
tattacgatata

SEQ ID NO: 330330 - DNA, 12 bp, Artificial Sequence
  Oligonucleotide primer for the detection of SNP TSC0035456
aaaaaaatatca

SEQ ID NO: 330331 - DNA, 12 bp, Artificial Sequence
  Oligonucleotide primer for the detection of SNP TSC0035456
agttatgtatat

SEQ ID NO: 330332 - DNA, 12 bp, Artificial Sequence
  Oligonucleotide primer for the detection of SNP TSC0035456
agttacgtatat

SEQ ID NO: 330333 - DNA, 12 bp, Artificial Sequence
  Oligonucleotide primer for the detection of SNP TSC0035456
aattacatatat

SEQ ID NO: 330334 - DNA, 12 bp, Artificial Sequence
  Oligonucleotide primer for the detection of SNP TSC0035456
aattacgtatat

SEQ ID NO: 330335 - DNA, 12 bp, Artificial Sequence
  Oligonucleotide primer for the detection of SNP TSC0035456
aaggagatatta

SEQ ID NO: 330336 - DNA, 12 bp, Artificial Sequence
  Oligonucleotide primer for the detection of SNP TSC0035457
acataaaaaata

SEQ ID NO: 330337 - DNA, 12 bp, Artificial Sequence
  Oligonucleotide primer for the detection of SNP TSC0035457
tttgttatttgt

SEQ ID NO: 330338 - DNA, 12 bp, Artificial Sequence
  Oligonucleotide primer for the detection of SNP TSC0035457
tttattatttat

SEQ ID NO: 330339 - DNA, 12 bp, Artificial Sequence
  Oligonucleotide primer for the detection of SNP TSC0035457
atataaagagta

SEQ ID NO: 330340 - DNA, 12 bp, Artificial Sequence
  Oligonucleotide primer for the detection of SNP TSC0035461
ttacataaacaa

SEQ ID NO: 330341 - DNA, 12 bp, Artificial Sequence
  Oligonucleotide primer for the detection of SNP TSC0035461
ttagttatgaag

SEQ ID NO: 330342 - DNA, 12 bp, Artificial Sequence
  Oligonucleotide primer for the detection of SNP TSC0035462
gttggttttagt

SEQ ID NO: 330343 - DNA, 12 bp, Artificial Sequence
  Oligonucleotide primer for the detection of SNP TSC0035462
actaattccaac

SEQ ID NO: 330344 - DNA, 12 bp, Artificial Sequence
  Oligonucleotide primer for the detection of SNP TSC0035462
gaagggtaggag

SEQ ID NO: 330345 - DNA, 12 bp, Artificial Sequence
  Oligonucleotide primer for the detection of SNP TSC0035463
aattacccatct

SEQ ID NO: 330346 - DNA, 12 bp, Artificial Sequence
  Oligonucleotide primer for the detection of SNP TSC0035463
ttggtgggtttt

SEQ ID NO: 330347 - DNA, 12 bp, Artificial Sequence
  Oligonucleotide primer for the detection of SNP TSC0035463
actaataaatct

SEQ ID NO: 330348 - DNA, 12 bp, Artificial Sequence
  Oligonucleotide primer for the detection of SNP TSC0035464
cctcccaaataa

SEQ ID NO: 330349 - DNA, 12 bp, Artificial Sequence
  Oligonucleotide primer for the detection of SNP TSC0035465
aatcaccacaat

SEQ ID NO: 330350 - DNA, 12 bp, Artificial Sequence
  Oligonucleotide primer for the detection of SNP TSC0035465
aatcaccgcaat

SEQ ID NO: 330351 - DNA, 12 bp, Artificial Sequence
  Oligonucleotide primer for the detection of SNP TSC0035465
tttttggtagta

SEQ ID NO: 330352 - DNA, 12 bp, Artificial Sequence
  Oligonucleotide primer for the detection of SNP TSC0035466
tttatataacta

SEQ ID NO: 330353 - DNA, 12 bp, Artificial Sequence
  Oligonucleotide primer for the detection of SNP TSC0035466
gtagaaaatttt

SEQ ID NO: 330354 - DNA, 12 bp, Artificial Sequence
  Oligonucleotide primer for the detection of SNP TSC0035466
tttatatggttg

SEQ ID NO: 330355 - DNA, 12 bp, Artificial Sequence
  Oligonucleotide primer for the detection of SNP TSC0035471
aaaaatcaatat

SEQ ID NO: 330356 - DNA, 12 bp, Artificial Sequence
  Oligonucleotide primer for the detection of SNP TSC0035471
atttttgaggaa

SEQ ID NO: 330357 - DNA, 12 bp, Artificial Sequence
  Oligonucleotide primer for the detection of SNP TSC0035471
atccctaaaaaa

SEQ ID NO: 330358 - DNA, 12 bp, Artificial Sequence
  Oligonucleotide primer for the detection of SNP TSC0035471
ggaagttagtgt

SEQ ID NO: 330359 - DNA, 12 bp, Artificial Sequence
  Oligonucleotide primer for the detection of SNP TSC0035473
ttcatacattca

SEQ ID NO: 330360 - DNA, 12 bp, Artificial Sequence
  Oligonucleotide primer for the detection of SNP TSC0035473
gataaaaatagt

SEQ ID NO: 330361 - DNA, 12 bp, Artificial Sequence
  Oligonucleotide primer for the detection of SNP TSC0035473
atttatatattt

SEQ ID NO: 330362 - DNA, 12 bp, Artificial Sequence
  Oligonucleotide primer for the detection of SNP TSC0035474
caccaaacaact

SEQ ID NO: 330363 - DNA, 12 bp, Artificial Sequence
  Oligonucleotide primer for the detection of SNP TSC0035474
gggtattagata

SEQ ID NO: 330364 - DNA, 12 bp, Artificial Sequence
  Oligonucleotide primer for the detection of SNP TSC0035476
cctacaaataaa

SEQ ID NO: 330365 - DNA, 12 bp, Artificial Sequence
  Oligonucleotide primer for the detection of SNP TSC0035476
ggagttattagt

SEQ ID NO: 330366 - DNA, 12 bp, Artificial Sequence
  Oligonucleotide primer for the detection of SNP TSC0035476
tttgtaaatggg

SEQ ID NO: 330367 - DNA, 12 bp, Artificial Sequence
  Oligonucleotide primer for the detection of SNP TSC0035479
ttcacaatattt

SEQ ID NO: 330368 - DNA, 12 bp, Artificial Sequence
  Oligonucleotide primer for the detection of SNP TSC0035479
tatggataattg

SEQ ID NO: 330369 - DNA, 12 bp, Artificial Sequence
  Oligonucleotide primer for the detection of SNP TSC0035479
tacggataattg

SEQ ID NO: 330370 - DNA, 12 bp, Artificial Sequence
  Oligonucleotide primer for the detection of SNP TSC0035479
cacaaacaatta

SEQ ID NO: 330371 - DNA, 12 bp, Artificial Sequence
  Oligonucleotide primer for the detection of SNP TSC0035479
cacgaacaatta

SEQ ID NO: 330372 - DNA, 12 bp, Artificial Sequence
  Oligonucleotide primer for the detection of SNP TSC0035480
cacaacatcacc

SEQ ID NO: 330373 - DNA, 12 bp, Artificial Sequence
  Oligonucleotide primer for the detection of SNP TSC0035480
cacaacgtcacc

SEQ ID NO: 330374 - DNA, 12 bp, Artificial Sequence
  Oligonucleotide primer for the detection of SNP TSC0035480
gtgtagaagtag

SEQ ID NO: 330375 - DNA, 12 bp, Artificial Sequence
  Oligonucleotide primer for the detection of SNP TSC0035483
ataggggtggga

SEQ ID NO: 330376 - DNA, 12 bp, Artificial Sequence
  Oligonucleotide primer for the detection of SNP TSC0035483
ataggggcggga

SEQ ID NO: 330377 - DNA, 12 bp, Artificial Sequence
  Oligonucleotide primer for the detection of SNP TSC0035484
taaaattatctc

SEQ ID NO: 330378 - DNA, 12 bp, Artificial Sequence
  Oligonucleotide primer for the detection of SNP TSC0035484
attgttttttat

SEQ ID NO: 330379 - DNA, 12 bp, Artificial Sequence
  Oligonucleotide primer for the detection of SNP TSC0035484
attgttttttac

SEQ ID NO: 330380 - DNA, 12 bp, Artificial Sequence
  Oligonucleotide primer for the detection of SNP TSC0035484
cactactcttca

SEQ ID NO: 330381 - DNA, 12 bp, Artificial Sequence
  Oligonucleotide primer for the detection of SNP TSC0035484
taggattatttt

SEQ ID NO: 330382 - DNA, 12 bp, Artificial Sequence
  Oligonucleotide primer for the detection of SNP TSC0035485
caccatccaaac

SEQ ID NO: 330383 - DNA, 12 bp, Artificial Sequence
  Oligonucleotide primer for the detection of SNP TSC0035485
taattaagaagg

SEQ ID NO: 330384 - DNA, 12 bp, Artificial Sequence
  Oligonucleotide primer for the detection of SNP TSC0035490
tcctacaaataa

SEQ ID NO: 330385 - DNA, 12 bp, Artificial Sequence
  Oligonucleotide primer for the detection of SNP TSC0035490
ccattatatttc

SEQ ID NO: 330386 - DNA, 12 bp, Artificial Sequence
  Oligonucleotide primer for the detection of SNP TSC0035490
ttttataggtga

SEQ ID NO: 330387 - DNA, 12 bp, Artificial Sequence
  Oligonucleotide primer for the detection of SNP TSC0035491
actaaaaaactc

SEQ ID NO: 330388 - DNA, 12 bp, Artificial Sequence
  Oligonucleotide primer for the detection of SNP TSC0035491
taaaacctattc

SEQ ID NO: 330389 - DNA, 12 bp, Artificial Sequence
  Oligonucleotide primer for the detection of SNP TSC0035491
attgagaagttt

SEQ ID NO: 330390 - DNA, 12 bp, Artificial Sequence
  Oligonucleotide primer for the detection of SNP TSC0035496
actaaaaaacaa

SEQ ID NO: 330391 - DNA, 12 bp, Artificial Sequence
  Oligonucleotide primer for the detection of SNP TSC0035496
cgtttttgtttt

SEQ ID NO: 330392 - DNA, 12 bp, Artificial Sequence
  Oligonucleotide primer for the detection of SNP TSC0035496
tgtttttgtttc

SEQ ID NO: 330393 - DNA, 12 bp, Artificial Sequence
  Oligonucleotide primer for the detection of SNP TSC0035496
cgtttttgtttc

SEQ ID NO: 330394 - DNA, 12 bp, Artificial Sequence
  Oligonucleotide primer for the detection of SNP TSC0035496
cactcttatccc

SEQ ID NO: 330395 - DNA, 12 bp, Artificial Sequence
  Oligonucleotide primer for the detection of SNP TSC0035496
cgctcttatccc

SEQ ID NO: 330396 - DNA, 12 bp, Artificial Sequence
  Oligonucleotide primer for the detection of SNP TSC0035496
gttgggagatag

SEQ ID NO: 330397 - DNA, 12 bp, Artificial Sequence
  Oligonucleotide primer for the detection of SNP TSC0035497
ataatatacaat

SEQ ID NO: 330398 - DNA, 12 bp, Artificial Sequence
  Oligonucleotide primer for the detection of SNP TSC0035497
ttgttattaagt

SEQ ID NO: 330399 - DNA, 12 bp, Artificial Sequence
  Oligonucleotide primer for the detection of SNP TSC0035497
ctaccatcaaat

SEQ ID NO: 330400 - DNA, 12 bp, Artificial Sequence
  Oligonucleotide primer for the detection of SNP TSC0035497
atgatgtgtagt

SEQ ID NO: 330401 - DNA, 12 bp, Artificial Sequence
  Oligonucleotide primer for the detection of SNP TSC0035501
aacacattcaat

SEQ ID NO: 330402 - DNA, 12 bp, Artificial Sequence
  Oligonucleotide primer for the detection of SNP TSC0035501
aggtgtgataga

SEQ ID NO: 330403 - DNA, 12 bp, Artificial Sequence
  Oligonucleotide primer for the detection of SNP TSC0035502
tataattacacc

SEQ ID NO: 330404 - DNA, 12 bp, Artificial Sequence
  Oligonucleotide primer for the detection of SNP TSC0035502
agtttggtgggg

SEQ ID NO: 330405 - DNA, 12 bp, Artificial Sequence
  Oligonucleotide primer for the detection of SNP TSC0035509
atactacataat

SEQ ID NO: 330406 - DNA, 12 bp, Artificial Sequence
  Oligonucleotide primer for the detection of SNP TSC0035509
atactacgtaat

SEQ ID NO: 330407 - DNA, 12 bp, Artificial Sequence
  Oligonucleotide primer for the detection of SNP TSC0035509
aatattttataa

SEQ ID NO: 330408 - DNA, 12 bp, Artificial Sequence
  Oligonucleotide primer for the detection of SNP TSC0035509
gtgttgtgtaat

SEQ ID NO: 330409 - DNA, 12 bp, Artificial Sequence
  Oligonucleotide primer for the detection of SNP TSC0035509
gtgttgcgtaat

SEQ ID NO: 330410 - DNA, 12 bp, Artificial Sequence
  Oligonucleotide primer for the detection of SNP TSC0035512
aaaaccctaccc

SEQ ID NO: 330411 - DNA, 12 bp, Artificial Sequence
  Oligonukleotid-Primer
ttatgttgtgta

SEQ ID NO: 330412 - DNA, 12 bp, Artificial Sequence
  Oligonucleotide primer for the detection of SNP TSC0035512
ttacgttgtgta

SEQ ID NO: 330413 - DNA, 12 bp, Artificial Sequence
  Oligonucleotide primer for the detection of SNP TSC0035513
taatcattcaaa

SEQ ID NO: 330414 - DNA, 12 bp, Artificial Sequence
  Oligonucleotide primer for the detection of SNP TSC0035513
aaataaattaca

SEQ ID NO: 330415 - DNA, 12 bp, Artificial Sequence
  Oligonucleotide primer for the detection of SNP TSC0035513
tagttatttaaa

SEQ ID NO: 330416 - DNA, 12 bp, Artificial Sequence
  Oligonucleotide primer for the detection of SNP TSC0035514
actatataccct

SEQ ID NO: 330417 - DNA, 12 bp, Artificial Sequence
  Oligonucleotide primer for the detection of SNP TSC0035514
gtaattttggat

SEQ ID NO: 330418 - DNA, 12 bp, Artificial Sequence
  Oligonucleotide primer for the detection of SNP TSC0035514
acaaccctaaat

SEQ ID NO: 330419 - DNA, 12 bp, Artificial Sequence
  Oligonucleotide primer for the detection of SNP TSC0035514
attatgtgtttt

SEQ ID NO: 330420 - DNA, 12 bp, Artificial Sequence
  Oligonucleotide primer for the detection of SNP TSC0035515
aacaataaacct

SEQ ID NO: 330421 - DNA, 12 bp, Artificial Sequence
  Oligonucleotide primer for the detection of SNP TSC0035516
cttcccatacac

SEQ ID NO: 330422 - DNA, 12 bp, Artificial Sequence
  Oligonucleotide primer for the detection of SNP TSC0035517
aataaatatcta

SEQ ID NO: 330423 - DNA, 12 bp, Artificial Sequence
  Oligonucleotide primer for the detection of SNP TSC0035517
attgggtggttt

SEQ ID NO: 330424 - DNA, 12 bp, Artificial Sequence
  Oligonucleotide primer for the detection of SNP TSC0035517
tgaatatttgtt

SEQ ID NO: 330425 - DNA, 12 bp, Artificial Sequence
  Oligonucleotide primer for the detection of SNP TSC0035518
ttaataaacttt

SEQ ID NO: 330426 - DNA, 12 bp, Artificial Sequence
  Oligonucleotide primer for the detection of SNP TSC0035518
gaaaataaaaag

SEQ ID NO: 330427 - DNA, 12 bp, Artificial Sequence
  Oligonucleotide primer for the detection of SNP TSC0035519
acaactaaccca

SEQ ID NO: 330428 - DNA, 12 bp, Artificial Sequence
  Oligonucleotide primer for the detection of SNP TSC0035519
tatagttggttt

SEQ ID NO: 330429 - DNA, 12 bp, Artificial Sequence
  Oligonucleotide primer for the detection of SNP TSC0035523
agggaagttggg

SEQ ID NO: 330430 - DNA, 12 bp, Artificial Sequence
  Oligonucleotide primer for the detection of SNP TSC0035524
tttaatttcttt

SEQ ID NO: 330431 - DNA, 12 bp, Artificial Sequence
  Oligonucleotide primer for the detection of SNP TSC0035524
aaaaaaaatgaa

SEQ ID NO: 330432 - DNA, 12 bp, Artificial Sequence
  Oligonucleotide primer for the detection of SNP TSC0035525
aaacaaaaatta

SEQ ID NO: 330433 - DNA, 12 bp, Artificial Sequence
  Oligonucleotide primer for the detection of SNP TSC0035525
attgagtttttt

SEQ ID NO: 330434 - DNA, 12 bp, Artificial Sequence
  Oligonucleotide primer for the detection of SNP TSC0035525
atcgagtttttt

SEQ ID NO: 330435 - DNA, 12 bp, Artificial Sequence
  Oligonucleotide primer for the detection of SNP TSC0035525
accaaactccct

SEQ ID NO: 330436 - DNA, 12 bp, Artificial Sequence
  Oligonucleotide primer for the detection of SNP TSC0035525
accgaactccct

SEQ ID NO: 330437 - DNA, 12 bp, Artificial Sequence
  Oligonucleotide primer for the detection of SNP TSC0035525
ggataggaattg

SEQ ID NO: 330438 - DNA, 12 bp, Artificial Sequence
  Oligonucleotide primer for the detection of SNP TSC0035526
gtattaattttg

SEQ ID NO: 330439 - DNA, 12 bp, Artificial Sequence
  Oligonucleotide primer for the detection of SNP TSC0035527
aattaacttaat

SEQ ID NO: 330440 - DNA, 12 bp, Artificial Sequence
  Oligonucleotide primer for the detection of SNP TSC0035528
tattaccacaaa

SEQ ID NO: 330441 - DNA, 12 bp, Artificial Sequence
  Oligonucleotide primer for the detection of SNP TSC0035528
tttatcacaaaa

SEQ ID NO: 330442 - DNA, 12 bp, Artificial Sequence
  Oligonucleotide primer for the detection of SNP TSC0035528
tagtgttattat

SEQ ID NO: 330443 - DNA, 12 bp, Artificial Sequence
  Oligonucleotide primer for the detection of SNP TSC0035529
tcaactcactac

SEQ ID NO: 330444 - DNA, 12 bp, Artificial Sequence
  Oligonucleotide primer for the detection of SNP TSC0035529
tcgactcactac

SEQ ID NO: 330445 - DNA, 12 bp, Artificial Sequence
  Oligonucleotide primer for the detection of SNP TSC0035529
ggagatggaggt

SEQ ID NO: 330446 - DNA, 12 bp, Artificial Sequence
  Oligonucleotide primer for the detection of SNP TSC0035529
ttggtttattgt

SEQ ID NO: 330447 - DNA, 12 bp, Artificial Sequence
  Oligonucleotide primer for the detection of SNP TSC0035529
tcggtttattgt

SEQ ID NO: 330448 - DNA, 12 bp, Artificial Sequence
  Oligonucleotide primer for the detection of SNP TSC0035530
aaacaaaaacta

SEQ ID NO: 330449 - DNA, 12 bp, Artificial Sequence
  Oligonucleotide primer for the detection of SNP TSC0035530
ttaaaatatgtg

SEQ ID NO: 330450 - DNA, 12 bp, Artificial Sequence
  Oligonucleotide primer for the detection of SNP TSC0035530
ttaaaatacgtg

SEQ ID NO: 330451 - DNA, 12 bp, Artificial Sequence
  Oligonucleotide primer for the detection of SNP TSC0035530
ctaaaatacata

SEQ ID NO: 330452 - DNA, 12 bp, Artificial Sequence
  Oligonucleotide primer for the detection of SNP TSC0035530
ctaaaatacgta

SEQ ID NO: 330453 - DNA, 12 bp, Artificial Sequence
  Oligonucleotide primer for the detection of SNP TSC0035530
tgagtaaaaatt

SEQ ID NO: 330454 - DNA, 12 bp, Artificial Sequence
  Oligonucleotide primer for the detection of SNP TSC0035533
accactatacta

SEQ ID NO: 330455 - DNA, 12 bp, Artificial Sequence
  Oligonucleotide primer for the detection of SNP TSC0035533
tttctttaaatt

SEQ ID NO: 330456 - DNA, 12 bp, Artificial Sequence
  Oligonucleotide primer for the detection of SNP TSC0035533
attattatgtta

SEQ ID NO: 330457 - DNA, 12 bp, Artificial Sequence
  Oligonucleotide primer for the detection of SNP TSC0035534
tatgtattaggt

SEQ ID NO: 330458 - DNA, 12 bp, Artificial Sequence
  Oligonucleotide primer for the detection of SNP TSC0035534
tatatatcaaat

SEQ ID NO: 330459 - DNA, 12 bp, Artificial Sequence
  Oligonucleotide primer for the detection of SNP TSC0035535
acaattttctta

SEQ ID NO: 330460 - DNA, 12 bp, Artificial Sequence
  Oligonucleotide primer for the detection of SNP TSC0035535
actaactatcct

SEQ ID NO: 330461 - DNA, 12 bp, Artificial Sequence
  Oligonucleotide primer for the detection of SNP TSC0035536
ctttattttaat

SEQ ID NO: 330462 - DNA, 12 bp, Artificial Sequence
  Oligonucleotide primer for the detection of SNP TSC0035536
tcctttctacaa

SEQ ID NO: 330463 - DNA, 12 bp, Artificial Sequence
  Oligonucleotide primer for the detection of SNP TSC0035536
ttttgttttgat

SEQ ID NO: 330464 - DNA, 12 bp, Artificial Sequence
  Oligonucleotide primer for the detection of SNP TSC0035540
acaaaattacat

SEQ ID NO: 330465 - DNA, 12 bp, Artificial Sequence
  Oligonucleotide primer for the detection of SNP TSC0035540
cactaatcttat

SEQ ID NO: 330466 - DNA, 12 bp, Artificial Sequence
  Oligonucleotide primer for the detection of SNP TSC0035540
gtagaattatat

SEQ ID NO: 330467 - DNA, 12 bp, Artificial Sequence
  Oligonucleotide primer for the detection of SNP TSC0035541
cccttaaattac

SEQ ID NO: 330468 - DNA, 12 bp, Artificial Sequence
  Oligonucleotide primer for the detection of SNP TSC0035541
aggttttgattg

SEQ ID NO: 330469 - DNA, 12 bp, Artificial Sequence
  Oligonucleotide primer for the detection of SNP TSC0035544
attgtaagtttt

SEQ ID NO: 330470 - DNA, 12 bp, Artificial Sequence
  Oligonucleotide primer for the detection of SNP TSC0035544
attgtaagtttc

SEQ ID NO: 330471 - DNA, 12 bp, Artificial Sequence
  Oligonucleotide primer for the detection of SNP TSC0035544
actacaaacccc

SEQ ID NO: 330472 - DNA, 12 bp, Artificial Sequence
  Oligonucleotide primer for the detection of SNP TSC0035547
aaataacttaac

SEQ ID NO: 330473 - DNA, 12 bp, Artificial Sequence
  Oligonucleotide primer for the detection of SNP TSC0035547
tgaagtttggag

SEQ ID NO: 330474 - DNA, 12 bp, Artificial Sequence
  Oligonucleotide primer for the detection of SNP TSC0035547
aagtgatttaat

SEQ ID NO: 330475 - DNA, 12 bp, Artificial Sequence
  Oligonucleotide primer for the detection of SNP TSC0035547
aagtgatttaac

SEQ ID NO: 330476 - DNA, 12 bp, Artificial Sequence
  Oligonucleotide primer for the detection of SNP TSC0035548
taaattcaatct

SEQ ID NO: 330477 - DNA, 12 bp, Artificial Sequence
  Oligonucleotide primer for the detection of SNP TSC0035548
agtgttaatata

SEQ ID NO: 330478 - DNA, 12 bp, Artificial Sequence
  Oligonucleotide primer for the detection of SNP TSC0035549
attacacccccc

SEQ ID NO: 330479 - DNA, 12 bp, Artificial Sequence
  Oligonucleotide primer for the detection of SNP TSC0035549
attggttattgt

SEQ ID NO: 330480 - DNA, 12 bp, Artificial Sequence
  Oligonucleotide primer for the detection of SNP TSC0035549
attaattactat

SEQ ID NO: 330481 - DNA, 12 bp, Artificial Sequence
  Oligonucleotide primer for the detection of SNP TSC0035550
attttatgattg

SEQ ID NO: 330482 - DNA, 12 bp, Artificial Sequence
  Oligonucleotide primer for the detection of SNP TSC0035552
ctccacaaaaaa

SEQ ID NO: 330483 - DNA, 12 bp, Artificial Sequence
  Oligonucleotide primer for the detection of SNP TSC0035552
ctccacgaaaaa

SEQ ID NO: 330484 - DNA, 12 bp, Artificial Sequence
  Oligonucleotide primer for the detection of SNP TSC0035552
gggtttaggtgt

SEQ ID NO: 330485 - DNA, 12 bp, Artificial Sequence
  Oligonucleotide primer for the detection of SNP TSC0035552
gggtttaggcgt

SEQ ID NO: 330486 - DNA, 12 bp, Artificial Sequence
  Oligonucleotide primer for the detection of SNP TSC0035552
aaacccaaacac

SEQ ID NO: 330487 - DNA, 12 bp, Artificial Sequence
  Oligonucleotide primer for the detection of SNP TSC0035552
aaacccaaacgc

SEQ ID NO: 330488 - DNA, 12 bp, Artificial Sequence
  Oligonucleotide primer for the detection of SNP TSC0035552
gaacccaaacac

SEQ ID NO: 330489 - DNA, 12 bp, Artificial Sequence
  Oligonucleotide primer for the detection of SNP TSC0035552
gaacccaaacgc

SEQ ID NO: 330490 - DNA, 12 bp, Artificial Sequence
  Oligonucleotide primer for the detection of SNP TSC0035552
ttttatgagggg

SEQ ID NO: 330491 - DNA, 12 bp, Artificial Sequence
  Oligonucleotide primer for the detection of SNP TSC0035552
ttttacgagggg

SEQ ID NO: 330492 - DNA, 12 bp, Artificial Sequence
  Oligonucleotide primer for the detection of SNP TSC0035553
gttgatttattt

SEQ ID NO: 330493 - DNA, 12 bp, Artificial Sequence
  Oligonucleotide primer for the detection of SNP TSC0035553
actaattcacct

SEQ ID NO: 330494 - DNA, 12 bp, Artificial Sequence
  Oligonucleotide primer for the detection of SNP TSC0035553
gaattgtaggtg

SEQ ID NO: 330495 - DNA, 12 bp, Artificial Sequence
  Oligonucleotide primer for the detection of SNP TSC0035554
acgctattttaa

SEQ ID NO: 330496 - DNA, 12 bp, Artificial Sequence
  Oligonucleotide primer for the detection of SNP TSC0035554
tattatgtttga

SEQ ID NO: 330497 - DNA, 12 bp, Artificial Sequence
  Oligonucleotide primer for the detection of SNP TSC0035554
tattacgtttga

SEQ ID NO: 330498 - DNA, 12 bp, Artificial Sequence
  Oligonucleotide primer for the detection of SNP TSC0035554
atgttattttgg

SEQ ID NO: 330499 - DNA, 12 bp, Artificial Sequence
  Oligonucleotide primer for the detection of SNP TSC0035554
acgttattttgg

SEQ ID NO: 330500 - DNA, 12 bp, Artificial Sequence
  Oligonucleotide primer for the detection of SNP TSC0035555
ttgaagaggttt

SEQ ID NO: 330501 - DNA, 12 bp, Artificial Sequence
  Oligonucleotide primer for the detection of SNP TSC0035555
ctaaaaaaattt

SEQ ID NO: 330502 - DNA, 12 bp, Artificial Sequence
  Oligonucleotide primer for the detection of SNP TSC0035556
caactaaaccta

SEQ ID NO: 330503 - DNA, 12 bp, Artificial Sequence
  Oligonucleotide primer for the detection of SNP TSC0035556
ggagatgaatgt

SEQ ID NO: 330504 - DNA, 12 bp, Artificial Sequence
  Oligonucleotide primer for the detection of SNP TSC0035556
tagttggattta

SEQ ID NO: 330505 - DNA, 12 bp, Artificial Sequence
  Oligonucleotide primer for the detection of SNP TSC0035557
aaactcaataac

SEQ ID NO: 330506 - DNA, 12 bp, Artificial Sequence
  Oligonucleotide primer for the detection of SNP TSC0035557
ataggagtaggt

SEQ ID NO: 330507 - DNA, 12 bp, Artificial Sequence
  Oligonucleotide primer for the detection of SNP TSC0035557
ataggagtaggc

SEQ ID NO: 330508 - DNA, 12 bp, Artificial Sequence
  Oligonucleotide primer for the detection of SNP TSC0035558
caaaccaaaaat

SEQ ID NO: 330509 - DNA, 12 bp, Artificial Sequence
  Oligonucleotide primer for the detection of SNP TSC0035559
tgttgtatattt

SEQ ID NO: 330510 - DNA, 12 bp, Artificial Sequence
  Oligonucleotide primer for the detection of SNP TSC0035559
tattacatactt

SEQ ID NO: 330511 - DNA, 12 bp, Artificial Sequence
  Oligonucleotide primer for the detection of SNP TSC0035559
atataggaatta

SEQ ID NO: 330512 - DNA, 12 bp, Artificial Sequence
  Oligonucleotide primer for the detection of SNP TSC0035560
atttcttcatct

SEQ ID NO: 330513 - DNA, 12 bp, Artificial Sequence
  Oligonucleotide primer for the detection of SNP TSC0035561
caaattcatata

SEQ ID NO: 330514 - DNA, 12 bp, Artificial Sequence
  Oligonucleotide primer for the detection of SNP TSC0035561
ttttattagtta

SEQ ID NO: 330515 - DNA, 12 bp, Artificial Sequence
  Oligonucleotide primer for the detection of SNP TSC0035561
ttttattaacta

SEQ ID NO: 330516 - DNA, 12 bp, Artificial Sequence
  Oligonukleotid-Primer
agatttatgtat

SEQ ID NO: 330517 - DNA, 12 bp, Artificial Sequence
  Oligonucleotide primer for the detection of SNP TSC0035562
aaatcccacatc

SEQ ID NO: 330518 - DNA, 12 bp, Artificial Sequence
  Oligonucleotide primer for the detection of SNP TSC0035562
aaatcccacgtc

SEQ ID NO: 330519 - DNA, 12 bp, Artificial Sequence
  Oligonucleotide primer for the detection of SNP TSC0035562
gaatcccacatc

SEQ ID NO: 330520 - DNA, 12 bp, Artificial Sequence
  Oligonucleotide primer for the detection of SNP TSC0035562
gaatcccacgtc

SEQ ID NO: 330521 - DNA, 12 bp, Artificial Sequence
  Oligonucleotide primer for the detection of SNP TSC0035562
gtttttggaggt

SEQ ID NO: 330522 - DNA, 12 bp, Artificial Sequence
  Oligonucleotide primer for the detection of SNP TSC0035562
gttttcggaggt

SEQ ID NO: 330523 - DNA, 12 bp, Artificial Sequence
  Oligonucleotide primer for the detection of SNP TSC0035562
gtttttggaggc

SEQ ID NO: 330524 - DNA, 12 bp, Artificial Sequence
  Oligonucleotide primer for the detection of SNP TSC0035562
gttttcggaggc

SEQ ID NO: 330525 - DNA, 12 bp, Artificial Sequence
  Oligonucleotide primer for the detection of SNP TSC0035562
attcccgaaaac

SEQ ID NO: 330526 - DNA, 12 bp, Artificial Sequence
  Oligonucleotide primer for the detection of SNP TSC0035562
ggttttatgttt

SEQ ID NO: 330527 - DNA, 12 bp, Artificial Sequence
  Oligonucleotide primer for the detection of SNP TSC0035562
ggttttacgttt

SEQ ID NO: 330528 - DNA, 12 bp, Artificial Sequence
  Oligonucleotide primer for the detection of SNP TSC0035564
ttacaaacataa

SEQ ID NO: 330529 - DNA, 12 bp, Artificial Sequence
  Oligonucleotide primer for the detection of SNP TSC0035564
ttacaaacgtaa

SEQ ID NO: 330530 - DNA, 12 bp, Artificial Sequence
  Oligonucleotide primer for the detection of SNP TSC0035564
tgggattggtgg

SEQ ID NO: 330531 - DNA, 12 bp, Artificial Sequence
  Oligonucleotide primer for the detection of SNP TSC0035564
cgggattggtgg

SEQ ID NO: 330532 - DNA, 12 bp, Artificial Sequence
  Oligonucleotide primer for the detection of SNP TSC0035564
cgaaactaataa

SEQ ID NO: 330533 - DNA, 12 bp, Artificial Sequence
  Oligonucleotide primer for the detection of SNP TSC0035564
attataggcgtg

SEQ ID NO: 330534 - DNA, 12 bp, Artificial Sequence
  Oligonucleotide primer for the detection of SNP TSC0035565
tttgaaatttta

SEQ ID NO: 330535 - DNA, 12 bp, Artificial Sequence
  Oligonucleotide primer for the detection of SNP TSC0035572
ataccactacct

SEQ ID NO: 330536 - DNA, 12 bp, Artificial Sequence
  Oligonucleotide primer for the detection of SNP TSC0035572
tttattgggtaa

SEQ ID NO: 330537 - DNA, 12 bp, Artificial Sequence
  Oligonucleotide primer for the detection of SNP TSC0035572
ctcattaaataa

SEQ ID NO: 330538 - DNA, 12 bp, Artificial Sequence
  Oligonucleotide primer for the detection of SNP TSC0035572
atgttattgttt

SEQ ID NO: 330539 - DNA, 12 bp, Artificial Sequence
  Oligonucleotide primer for the detection of SNP TSC0035573
aaaacctaaaat

SEQ ID NO: 330540 - DNA, 12 bp, Artificial Sequence
  Oligonucleotide primer for the detection of SNP TSC0035573
ttccttttatca

SEQ ID NO: 330541 - DNA, 12 bp, Artificial Sequence
  Oligonucleotide primer for the detection of SNP TSC0035573
ttccttttatcg

SEQ ID NO: 330542 - DNA, 12 bp, Artificial Sequence
  Oligonucleotide primer for the detection of SNP TSC0035573
ggggtttgagat

SEQ ID NO: 330543 - DNA, 12 bp, Artificial Sequence
  Oligonucleotide primer for the detection of SNP TSC0035574
tctatatttttc

SEQ ID NO: 330544 - DNA, 12 bp, Artificial Sequence
  Oligonucleotide primer for the detection of SNP TSC0035574
attaggggggga

SEQ ID NO: 330545 - DNA, 12 bp, Artificial Sequence
  Oligonucleotide primer for the detection of SNP TSC0035575
tctaaactcttt

SEQ ID NO: 330546 - DNA, 12 bp, Artificial Sequence
  Oligonucleotide primer for the detection of SNP TSC0035575
aaaaaggggaaa

SEQ ID NO: 330547 - DNA, 12 bp, Artificial Sequence
  Oligonucleotide primer for the detection of SNP TSC0035576
ggtggtttatgg

SEQ ID NO: 330548 - DNA, 12 bp, Artificial Sequence
  Oligonucleotide primer for the detection of SNP TSC0035576
ggtggtttacgg

SEQ ID NO: 330549 - DNA, 12 bp, Artificial Sequence
  Oligonucleotide primer for the detection of SNP TSC0035577
acatacccaacc

SEQ ID NO: 330550 - DNA, 12 bp, Artificial Sequence
  Oligonucleotide primer for the detection of SNP TSC0035577
acatacccgacc

SEQ ID NO: 330551 - DNA, 12 bp, Artificial Sequence
  Oligonucleotide primer for the detection of SNP TSC0035577
acgtacccaacc

SEQ ID NO: 330552 - DNA, 12 bp, Artificial Sequence
  Oligonucleotide primer for the detection of SNP TSC0035577
acgtacccgacc

SEQ ID NO: 330553 - DNA, 12 bp, Artificial Sequence
  Oligonucleotide primer for the detection of SNP TSC0035577
atgtgtttgatt

SEQ ID NO: 330554 - DNA, 12 bp, Artificial Sequence
  Oligonucleotide primer for the detection of SNP TSC0035577
acgtgtttgatt

SEQ ID NO: 330555 - DNA, 12 bp, Artificial Sequence
  Oligonucleotide primer for the detection of SNP TSC0035577
atgtgttcgatt

SEQ ID NO: 330556 - DNA, 12 bp, Artificial Sequence
  Oligonucleotide primer for the detection of SNP TSC0035577
acgtgttcgatt

SEQ ID NO: 330557 - DNA, 12 bp, Artificial Sequence
  Oligonucleotide primer for the detection of SNP TSC0035578
caaatccctaac

SEQ ID NO: 330558 - DNA, 12 bp, Artificial Sequence
  Oligonucleotide primer for the detection of SNP TSC0035578
aatgaggtgttt

SEQ ID NO: 330559 - DNA, 12 bp, Artificial Sequence
  Oligonucleotide primer for the detection of SNP TSC0035578
aatgaggtgttc

SEQ ID NO: 330560 - DNA, 12 bp, Artificial Sequence
  Oligonucleotide primer for the detection of SNP TSC0035579
ttgaatgaggga

SEQ ID NO: 330561 - DNA, 12 bp, Artificial Sequence
  Oligonucleotide primer for the detection of SNP TSC0035580
catatcaaaaac

SEQ ID NO: 330562 - DNA, 12 bp, Artificial Sequence
  Oligonucleotide primer for the detection of SNP TSC0035580
ataatctatcta

SEQ ID NO: 330563 - DNA, 12 bp, Artificial Sequence
  Oligonucleotide primer for the detection of SNP TSC0035580
tatgttaagggt

SEQ ID NO: 330564 - DNA, 12 bp, Artificial Sequence
  Oligonucleotide primer for the detection of SNP TSC0035581
aaatctaaatat

SEQ ID NO: 330565 - DNA, 12 bp, Artificial Sequence
  Oligonucleotide primer for the detection of SNP TSC0035581
taatatagttaa

SEQ ID NO: 330566 - DNA, 12 bp, Artificial Sequence
  Oligonucleotide primer for the detection of SNP TSC0035582
aatacaatcaat

SEQ ID NO: 330567 - DNA, 12 bp, Artificial Sequence
  Oligonucleotide primer for the detection of SNP TSC0035582
ttaaatgtagat

SEQ ID NO: 330568 - DNA, 12 bp, Artificial Sequence
  Oligonucleotide primer for the detection of SNP TSC0035582
aatatagttaat

SEQ ID NO: 330569 - DNA, 12 bp, Artificial Sequence
  Oligonucleotide primer for the detection of SNP TSC0035585
ctaaattatctc

SEQ ID NO: 330570 - DNA, 12 bp, Artificial Sequence
  Oligonucleotide primer for the detection of SNP TSC0035585
aagattatgata

SEQ ID NO: 330571 - DNA, 12 bp, Artificial Sequence
  Oligonucleotide primer for the detection of SNP TSC0035589
tatctataaatt

SEQ ID NO: 330572 - DNA, 12 bp, Artificial Sequence
  Oligonucleotide primer for the detection of SNP TSC0035589
agtagggaaatg

SEQ ID NO: 330573 - DNA, 12 bp, Artificial Sequence
  Oligonucleotide primer for the detection of SNP TSC0035591
atatataacatt

SEQ ID NO: 330574 - DNA, 12 bp, Artificial Sequence
  Oligonucleotide primer for the detection of SNP TSC0035591
tataattttata

SEQ ID NO: 330575 - DNA, 12 bp, Artificial Sequence
  Oligonucleotide primer for the detection of SNP TSC0035591
tacaatcttata

SEQ ID NO: 330576 - DNA, 12 bp, Artificial Sequence
  Oligonucleotide primer for the detection of SNP TSC0035591
gtatgtgatatt

SEQ ID NO: 330577 - DNA, 12 bp, Artificial Sequence
  Oligonucleotide primer for the detection of SNP TSC0035593
ataatcctccca

SEQ ID NO: 330578 - DNA, 12 bp, Artificial Sequence
  Oligonucleotide primer for the detection of SNP TSC0035593
cccaactactta

SEQ ID NO: 330579 - DNA, 12 bp, Artificial Sequence
  Oligonucleotide primer for the detection of SNP TSC0035593
gtgattttttta

SEQ ID NO: 330580 - DNA, 12 bp, Artificial Sequence
  Oligonucleotide primer for the detection of SNP TSC0035594
cattaatcaaaa

SEQ ID NO: 330581 - DNA, 12 bp, Artificial Sequence
  Oligonucleotide primer for the detection of SNP TSC0035594
tttatgtgattt

SEQ ID NO: 330582 - DNA, 12 bp, Artificial Sequence
  Oligonucleotide primer for the detection of SNP TSC0035594
ccatataactca

SEQ ID NO: 330583 - DNA, 12 bp, Artificial Sequence
  Oligonucleotide primer for the detection of SNP TSC0035594
tattaattagga

SEQ ID NO: 330584 - DNA, 12 bp, Artificial Sequence
  Oligonucleotide primer for the detection of SNP TSC0035599
aaaaacttactt

SEQ ID NO: 330585 - DNA, 12 bp, Artificial Sequence
  Oligonucleotide primer for the detection of SNP TSC0035600
ataagagaaaag

SEQ ID NO: 330586 - DNA, 12 bp, Artificial Sequence
  Oligonucleotide primer for the detection of SNP TSC0035607
aaaataaatacc

SEQ ID NO: 330587 - DNA, 12 bp, Artificial Sequence
  Oligonucleotide primer for the detection of SNP TSC0035607
attttattaaat

SEQ ID NO: 330588 - DNA, 12 bp, Artificial Sequence
  Oligonucleotide primer for the detection of SNP TSC0035607
attttattaaac

SEQ ID NO: 330589 - DNA, 12 bp, Artificial Sequence
  Oligonucleotide primer for the detection of SNP TSC0035607
aggataaatatt

SEQ ID NO: 330590 - DNA, 12 bp, Artificial Sequence
  Oligonucleotide primer for the detection of SNP TSC0035608
aaatatcactac

SEQ ID NO: 330591 - DNA, 12 bp, Artificial Sequence
  Oligonucleotide primer for the detection of SNP TSC0035608
tttatagaggga

SEQ ID NO: 330592 - DNA, 12 bp, Artificial Sequence
  Oligonucleotide primer for the detection of SNP TSC0035610
aaaataatttct

SEQ ID NO: 330593 - DNA, 12 bp, Artificial Sequence
  Oligonucleotide primer for the detection of SNP TSC0035610
tataggaaataa

SEQ ID NO: 330594 - DNA, 12 bp, Artificial Sequence
  Oligonucleotide primer for the detection of SNP TSC0035611
attaaataccaa

SEQ ID NO: 330595 - DNA, 12 bp, Artificial Sequence
  Oligonucleotide primer for the detection of SNP TSC0035611
atttggtatagt

SEQ ID NO: 330596 - DNA, 12 bp, Artificial Sequence
  Oligonucleotide primer for the detection of SNP TSC0035611
cctaacacaata

SEQ ID NO: 330597 - DNA, 12 bp, Artificial Sequence
  Oligonucleotide primer for the detection of SNP TSC0035611
attgagtattag

SEQ ID NO: 330598 - DNA, 12 bp, Artificial Sequence
  Oligonucleotide primer for the detection of SNP TSC0035612
atttatcatccc

SEQ ID NO: 330599 - DNA, 12 bp, Artificial Sequence
  Oligonucleotide primer for the detection of SNP TSC0035612
gggtttaggagg

SEQ ID NO: 330600 - DNA, 12 bp, Artificial Sequence
  Oligonucleotide primer for the detection of SNP TSC0035613
aaataaaacact

SEQ ID NO: 330601 - DNA, 12 bp, Artificial Sequence
  Oligonucleotide primer for the detection of SNP TSC0035613
tgttttagtata

SEQ ID NO: 330602 - DNA, 12 bp, Artificial Sequence
  Oligonucleotide primer for the detection of SNP TSC0035614
actcataaatta

SEQ ID NO: 330603 - DNA, 12 bp, Artificial Sequence
  Oligonucleotide primer for the detection of SNP TSC0035614
tataggaggtta

SEQ ID NO: 330604 - DNA, 12 bp, Artificial Sequence
  Oligonucleotide primer for the detection of SNP TSC0035614
cacaaaaaacta

SEQ ID NO: 330605 - DNA, 12 bp, Artificial Sequence
  Oligonucleotide primer for the detection of SNP TSC0035614
tttataagttac

SEQ ID NO: 330606 - DNA, 12 bp, Artificial Sequence
  Oligonucleotide primer for the detection of SNP TSC0035617
atttttcaacta

SEQ ID NO: 330607 - DNA, 12 bp, Artificial Sequence
  Oligonucleotide primer for the detection of SNP TSC0035617
aatatgggttag

SEQ ID NO: 330608 - DNA, 12 bp, Artificial Sequence
  Oligonucleotide primer for the detection of SNP TSC0035617
acataaatcaaa

SEQ ID NO: 330609 - DNA, 12 bp, Artificial Sequence
  Oligonucleotide primer for the detection of SNP TSC0035618
accacaacccta

SEQ ID NO: 330610 - DNA, 12 bp, Artificial Sequence
  Oligonucleotide primer for the detection of SNP TSC0035618
tatgttattgat

SEQ ID NO: 330611 - DNA, 12 bp, Artificial Sequence
  Oligonucleotide primer for the detection of SNP TSC0035618
tacgttattgat

SEQ ID NO: 330612 - DNA, 12 bp, Artificial Sequence
  Oligonucleotide primer for the detection of SNP TSC0035618
tatgttatcgat

SEQ ID NO: 330613 - DNA, 12 bp, Artificial Sequence
  Oligonucleotide primer for the detection of SNP TSC0035618
tacgttatcgat

SEQ ID NO: 330614 - DNA, 12 bp, Artificial Sequence
  Oligonucleotide primer for the detection of SNP TSC0035618
cacatcaccaac

SEQ ID NO: 330615 - DNA, 12 bp, Artificial Sequence
  Oligonucleotide primer for the detection of SNP TSC0035618
cacatcaccgac

SEQ ID NO: 330616 - DNA, 12 bp, Artificial Sequence
  Oligonucleotide primer for the detection of SNP TSC0035618
cacgtcaccaac

SEQ ID NO: 330617 - DNA, 12 bp, Artificial Sequence
  Oligonucleotide primer for the detection of SNP TSC0035618
cacgtcaccgac

SEQ ID NO: 330618 - DNA, 12 bp, Artificial Sequence
  Oligonucleotide primer for the detection of SNP TSC0035619
gtttattttaat

SEQ ID NO: 330619 - DNA, 12 bp, Artificial Sequence
  Oligonucleotide primer for the detection of SNP TSC0035619
gtttattttaac

SEQ ID NO: 330620 - DNA, 12 bp, Artificial Sequence
  Oligonucleotide primer for the detection of SNP TSC0035619
actcacttcaac

SEQ ID NO: 330621 - DNA, 12 bp, Artificial Sequence
  Oligonucleotide primer for the detection of SNP TSC0035619
gttgggaggtgg

SEQ ID NO: 330622 - DNA, 12 bp, Artificial Sequence
  Oligonucleotide primer for the detection of SNP TSC0035619
gtcgggaggtgg

SEQ ID NO: 330623 - DNA, 12 bp, Artificial Sequence
  Oligonucleotide primer for the detection of SNP TSC0035619
gttgggaggcgg

SEQ ID NO: 330624 - DNA, 12 bp, Artificial Sequence
  Oligonucleotide primer for the detection of SNP TSC0035619
gtcgggaggcgg

SEQ ID NO: 330625 - DNA, 12 bp, Artificial Sequence
  Oligonucleotide primer for the detection of SNP TSC0035620
taaccccccacc

SEQ ID NO: 330626 - DNA, 12 bp, Artificial Sequence
  Oligonucleotide primer for the detection of SNP TSC0035620
taaccccccgcc

SEQ ID NO: 330627 - DNA, 12 bp, Artificial Sequence
  Oligonucleotide primer for the detection of SNP TSC0035620
aggtttgttgtg

SEQ ID NO: 330628 - DNA, 12 bp, Artificial Sequence
  Oligonucleotide primer for the detection of SNP TSC0035620
aggtttgtcgtg

SEQ ID NO: 330629 - DNA, 12 bp, Artificial Sequence
  Oligonucleotide primer for the detection of SNP TSC0035621
aacattattttc

SEQ ID NO: 330630 - DNA, 12 bp, Artificial Sequence
  Oligonucleotide primer for the detection of SNP TSC0035621
ttttagaatagg

SEQ ID NO: 330631 - DNA, 12 bp, Artificial Sequence
  Oligonucleotide primer for the detection of SNP TSC0035622
ttaacatacacc

SEQ ID NO: 330632 - DNA, 12 bp, Artificial Sequence
  Oligonucleotide primer for the detection of SNP TSC0035622
tagtatgtattt

SEQ ID NO: 330633 - DNA, 12 bp, Artificial Sequence
  Oligonucleotide primer for the detection of SNP TSC0035623
aacctcataatc

SEQ ID NO: 330634 - DNA, 12 bp, Artificial Sequence
  Oligonucleotide primer for the detection of SNP TSC0035623
aacctcgtaatc

SEQ ID NO: 330635 - DNA, 12 bp, Artificial Sequence
  Oligonucleotide primer for the detection of SNP TSC0035623
gatttcgtgatt

SEQ ID NO: 330636 - DNA, 12 bp, Artificial Sequence
  Oligonucleotide primer for the detection of SNP TSC0035624
ataccatcccca

SEQ ID NO: 330637 - DNA, 12 bp, Artificial Sequence
  Oligonucleotide primer for the detection of SNP TSC0035624
ttgtttggttaa

SEQ ID NO: 330638 - DNA, 12 bp, Artificial Sequence
  Oligonucleotide primer for the detection of SNP TSC0035624
ctatttaatcaa

SEQ ID NO: 330639 - DNA, 12 bp, Artificial Sequence
  Oligonucleotide primer for the detection of SNP TSC0035624
tatattattttt

SEQ ID NO: 330640 - DNA, 12 bp, Artificial Sequence
  Oligonucleotide primer for the detection of SNP TSC0035626
aatttcaaaata

SEQ ID NO: 330641 - DNA, 12 bp, Artificial Sequence
  Oligonucleotide primer for the detection of SNP TSC0035626
aatttcgaaata

SEQ ID NO: 330642 - DNA, 12 bp, Artificial Sequence
  Oligonucleotide primer for the detection of SNP TSC0035626
aggagaattttc

SEQ ID NO: 330643 - DNA, 12 bp, Artificial Sequence
  Oligonucleotide primer for the detection of SNP TSC0035626
aaaaaaatctcc

SEQ ID NO: 330644 - DNA, 12 bp, Artificial Sequence
  Oligonucleotide primer for the detection of SNP TSC0035626
gattttgggatg

SEQ ID NO: 330645 - DNA, 12 bp, Artificial Sequence
  Oligonucleotide primer for the detection of SNP TSC0035626
gatttcgggatg

SEQ ID NO: 330646 - DNA, 12 bp, Artificial Sequence
  Oligonucleotide primer for the detection of SNP TSC0035627
tcctcatcatct

SEQ ID NO: 330647 - DNA, 12 bp, Artificial Sequence
  Oligonucleotide primer for the detection of SNP TSC0035627
atttaggatgta

SEQ ID NO: 330648 - DNA, 12 bp, Artificial Sequence
  Oligonucleotide primer for the detection of SNP TSC0035628
ccccacaaactc

SEQ ID NO: 330649 - DNA, 12 bp, Artificial Sequence
  Oligonucleotide primer for the detection of SNP TSC0035628
atttttgttttg

SEQ ID NO: 330650 - DNA, 12 bp, Artificial Sequence
  Oligonucleotide primer for the detection of SNP TSC0035629
ccacctacctat

SEQ ID NO: 330651 - DNA, 12 bp, Artificial Sequence
  Oligonucleotide primer for the detection of SNP TSC0035629
taatttgttaat

SEQ ID NO: 330652 - DNA, 12 bp, Artificial Sequence
  Oligonucleotide primer for the detection of SNP TSC0035629
taattcgttaat

SEQ ID NO: 330653 - DNA, 12 bp, Artificial Sequence
  Oligonucleotide primer for the detection of SNP TSC0035629
caactcactaat

SEQ ID NO: 330654 - DNA, 12 bp, Artificial Sequence
  Oligonucleotide primer for the detection of SNP TSC0035629
caactcgctaat

SEQ ID NO: 330655 - DNA, 12 bp, Artificial Sequence
  Oligonucleotide primer for the detection of SNP TSC0035629
ttatttgtttgt

SEQ ID NO: 330656 - DNA, 12 bp, Artificial Sequence
  Oligonucleotide primer for the detection of SNP TSC0035630
cttccacttaat

SEQ ID NO: 330657 - DNA, 12 bp, Artificial Sequence
  Oligonucleotide primer for the detection of SNP TSC0035630
aagaaaatatgt

SEQ ID NO: 330658 - DNA, 12 bp, Artificial Sequence
  Oligonucleotide primer for the detection of SNP TSC0035631
attgatgtttaa

SEQ ID NO: 330659 - DNA, 12 bp, Artificial Sequence
  Oligonucleotide primer for the detection of SNP TSC0035633
tcctaaaaataa

SEQ ID NO: 330660 - DNA, 12 bp, Artificial Sequence
  Oligonucleotide primer for the detection of SNP TSC0035633
aatatataaaga

SEQ ID NO: 330661 - DNA, 12 bp, Artificial Sequence
  Oligonucleotide primer for the detection of SNP TSC0035633
aatacataaaaa

SEQ ID NO: 330662 - DNA, 12 bp, Artificial Sequence
  Oligonucleotide primer for the detection of SNP TSC0035633
tttttgaggata

SEQ ID NO: 330663 - DNA, 12 bp, Artificial Sequence
  Oligonucleotide primer for the detection of SNP TSC0035643
gtatattattaa

SEQ ID NO: 330664 - DNA, 12 bp, Artificial Sequence
  Oligonucleotide primer for the detection of SNP TSC0035645
taccacctcaac

SEQ ID NO: 330665 - DNA, 12 bp, Artificial Sequence
  Oligonucleotide primer for the detection of SNP TSC0035645
gttttaattgtt

SEQ ID NO: 330666 - DNA, 12 bp, Artificial Sequence
  Oligonucleotide primer for the detection of SNP TSC0035647
actaaatacttc

SEQ ID NO: 330667 - DNA, 12 bp, Artificial Sequence
  Oligonucleotide primer for the detection of SNP TSC0035647
ttaaagtatttg

SEQ ID NO: 330668 - DNA, 12 bp, Artificial Sequence
  Oligonucleotide primer for the detection of SNP TSC0035647
attaaatatttt

SEQ ID NO: 330669 - DNA, 12 bp, Artificial Sequence
  Oligonucleotide primer for the detection of SNP TSC0035648
cttaataaaaca

SEQ ID NO: 330670 - DNA, 12 bp, Artificial Sequence
  Oligonucleotide primer for the detection of SNP TSC0035648
ggtattagttat

SEQ ID NO: 330671 - DNA, 12 bp, Artificial Sequence
  Oligonucleotide primer for the detection of SNP TSC0035648
tttggtagggta

SEQ ID NO: 330672 - DNA, 12 bp, Artificial Sequence
  Oligonucleotide primer for the detection of SNP TSC0035671
aaaactttcccc

SEQ ID NO: 330673 - DNA, 12 bp, Artificial Sequence
  Oligonucleotide primer for the detection of SNP TSC0035671
aatttttaatag

SEQ ID NO: 330674 - DNA, 12 bp, Artificial Sequence
  Oligonucleotide primer for the detection of SNP TSC0035674
tctataaaactc

SEQ ID NO: 330675 - DNA, 12 bp, Artificial Sequence
  Oligonucleotide primer for the detection of SNP TSC0035677
taattcatctat

SEQ ID NO: 330676 - DNA, 12 bp, Artificial Sequence
  Oligonucleotide primer for the detection of SNP TSC0035677
aggagagtggga

SEQ ID NO: 330677 - DNA, 12 bp, Artificial Sequence
  Oligonucleotide primer for the detection of SNP TSC0035678
tctttttaaata

SEQ ID NO: 330678 - DNA, 12 bp, Artificial Sequence
  Oligonucleotide primer for the detection of SNP TSC0035678
tatattatgatt

SEQ ID NO: 330679 - DNA, 12 bp, Artificial Sequence
  Oligonucleotide primer for the detection of SNP TSC0035678
tcataccataat

SEQ ID NO: 330680 - DNA, 12 bp, Artificial Sequence
  Oligonucleotide primer for the detection of SNP TSC0035678
atttttttaggt

SEQ ID NO: 330681 - DNA, 12 bp, Artificial Sequence
  Oligonucleotide primer for the detection of SNP TSC0035679
tcaaatatatat

SEQ ID NO: 330682 - DNA, 12 bp, Artificial Sequence
  Oligonucleotide primer for the detection of SNP TSC0035679
tttttagagaaa

SEQ ID NO: 330683 - DNA, 12 bp, Artificial Sequence
  Oligonucleotide primer for the detection of SNP TSC0035679
tccccaaaaaaa

SEQ ID NO: 330684 - DNA, 12 bp, Artificial Sequence
  Oligonucleotide primer for the detection of SNP TSC0035679
ttaaatgtatat

SEQ ID NO: 330685 - DNA, 12 bp, Artificial Sequence
  Oligonucleotide primer for the detection of SNP TSC0035680
taaaaaactaaa

SEQ ID NO: 330686 - DNA, 12 bp, Artificial Sequence
  Oligonucleotide primer for the detection of SNP TSC0035680
agtagttgtggt

SEQ ID NO: 330687 - DNA, 12 bp, Artificial Sequence
  Oligonucleotide primer for the detection of SNP TSC0035680
aacaattataac

SEQ ID NO: 330688 - DNA, 12 bp, Artificial Sequence
  Oligonucleotide primer for the detection of SNP TSC0035680
tgaggaattgaa

SEQ ID NO: 330689 - DNA, 12 bp, Artificial Sequence
  Oligonucleotide primer for the detection of SNP TSC0035681
taagtatattga

SEQ ID NO: 330690 - DNA, 12 bp, Artificial Sequence
  Oligonucleotide primer for the detection of SNP TSC0035681
taaacacactaa

SEQ ID NO: 330691 - DNA, 12 bp, Artificial Sequence
  Oligonucleotide primer for the detection of SNP TSC0035681
agagtagtaaat

SEQ ID NO: 330692 - DNA, 12 bp, Artificial Sequence
  Oligonucleotide primer for the detection of SNP TSC0035681
agagtagtaaac

SEQ ID NO: 330693 - DNA, 12 bp, Artificial Sequence
  Oligonucleotide primer for the detection of SNP TSC0035683
atatctaaactt

SEQ ID NO: 330694 - DNA, 12 bp, Artificial Sequence
  Oligonucleotide primer for the detection of SNP TSC0035683
ttgtgaagggtg

SEQ ID NO: 330695 - DNA, 12 bp, Artificial Sequence
  Oligonucleotide primer for the detection of SNP TSC0035684
cataaaaatacc

SEQ ID NO: 330696 - DNA, 12 bp, Artificial Sequence
  Oligonucleotide primer for the detection of SNP TSC0035684
ttcacaaattaa

SEQ ID NO: 330697 - DNA, 12 bp, Artificial Sequence
  Oligonucleotide primer for the detection of SNP TSC0035684
tatgggggtgtt

SEQ ID NO: 330698 - DNA, 12 bp, Artificial Sequence
  Oligonukleotid-Primer
tatgggggtgtc

SEQ ID NO: 330699 - DNA, 12 bp, Artificial Sequence
  Oligonucleotide primer for the detection of SNP TSC0035685
aaacttaacaat

SEQ ID NO: 330700 - DNA, 12 bp, Artificial Sequence
  Oligonucleotide primer for the detection of SNP TSC0035685
gtaataaagttg

SEQ ID NO: 330701 - DNA, 12 bp, Artificial Sequence
  Oligonucleotide primer for the detection of SNP TSC0035686
taaacaaaatat

SEQ ID NO: 330702 - DNA, 12 bp, Artificial Sequence
  Oligonukleotid-Primer
gtatttaatata

SEQ ID NO: 330703 - DNA, 12 bp, Artificial Sequence
  Oligonucleotide primer for the detection of SNP TSC0035689
ccaaacaataaa

SEQ ID NO: 330704 - DNA, 12 bp, Artificial Sequence
  Oligonucleotide primer for the detection of SNP TSC0035689
atttattgattt

SEQ ID NO: 330705 - DNA, 12 bp, Artificial Sequence
  Oligonucleotide primer for the detection of SNP TSC0035689
cccactaaccta

SEQ ID NO: 330706 - DNA, 12 bp, Artificial Sequence
  Oligonucleotide primer for the detection of SNP TSC0035689
tagatagtgggt

SEQ ID NO: 330707 - DNA, 12 bp, Artificial Sequence
  Oligonucleotide primer for the detection of SNP TSC0035689
tagatagtgggc

SEQ ID NO: 330708 - DNA, 12 bp, Artificial Sequence
  Oligonucleotide primer for the detection of SNP TSC0035690
atataaacatca

SEQ ID NO: 330709 - DNA, 12 bp, Artificial Sequence
  Oligonucleotide primer for the detection of SNP TSC0035690
ttgtttagaaag

SEQ ID NO: 330710 - DNA, 12 bp, Artificial Sequence
  Oligonucleotide primer for the detection of SNP TSC0035690
taaatattattt

SEQ ID NO: 330711 - DNA, 12 bp, Artificial Sequence
  Oligonucleotide primer for the detection of SNP TSC0035691
aagtaataagga

SEQ ID NO: 330712 - DNA, 12 bp, Artificial Sequence
  Oligonucleotide primer for the detection of SNP TSC0035691
attgtttaggtt

SEQ ID NO: 330713 - DNA, 12 bp, Artificial Sequence
  Oligonucleotide primer for the detection of SNP TSC0035692
aatattacacat

SEQ ID NO: 330714 - DNA, 12 bp, Artificial Sequence
  Oligonucleotide primer for the detection of SNP TSC0035693
cctaaccaccaa

SEQ ID NO: 330715 - DNA, 12 bp, Artificial Sequence
  Oligonucleotide primer for the detection of SNP TSC0035693
tttacttttaaa

SEQ ID NO: 330716 - DNA, 12 bp, Artificial Sequence
  Oligonucleotide primer for the detection of SNP TSC0035698
ccttccttcatc

SEQ ID NO: 330717 - DNA, 12 bp, Artificial Sequence
  Oligonucleotide primer for the detection of SNP TSC0035698
atattttcgtta

SEQ ID NO: 330718 - DNA, 12 bp, Artificial Sequence
  Oligonucleotide primer for the detection of SNP TSC0035698
acatccccacca

SEQ ID NO: 330719 - DNA, 12 bp, Artificial Sequence
  Oligonucleotide primer for the detection of SNP TSC0035698
acatccccgcca

SEQ ID NO: 330720 - DNA, 12 bp, Artificial Sequence
  Oligonucleotide primer for the detection of SNP TSC0035702
caacaacatcac

SEQ ID NO: 330721 - DNA, 12 bp, Artificial Sequence
  Oligonucleotide primer for the detection of SNP TSC0035702
caacgacatcac

SEQ ID NO: 330722 - DNA, 12 bp, Artificial Sequence
  Oligonucleotide primer for the detection of SNP TSC0035702
tggttagtagta

SEQ ID NO: 330723 - DNA, 12 bp, Artificial Sequence
  Oligonucleotide primer for the detection of SNP TSC0035702
taatcaataaca

SEQ ID NO: 330724 - DNA, 12 bp, Artificial Sequence
  Oligonucleotide primer for the detection of SNP TSC0035702
tagtggtattat

SEQ ID NO: 330725 - DNA, 12 bp, Artificial Sequence
  Oligonucleotide primer for the detection of SNP TSC0035702
tagcggtattat

SEQ ID NO: 330726 - DNA, 12 bp, Artificial Sequence
  Oligonucleotide primer for the detection of SNP TSC0035703
cccaaccaacca

SEQ ID NO: 330727 - DNA, 12 bp, Artificial Sequence
  Oligonucleotide primer for the detection of SNP TSC0035703
gaatagatgagt

SEQ ID NO: 330728 - DNA, 12 bp, Artificial Sequence
  Oligonucleotide primer for the detection of SNP TSC0035703
gaatagatgagc

SEQ ID NO: 330729 - DNA, 12 bp, Artificial Sequence
  Oligonucleotide primer for the detection of SNP TSC0035703
aaacaaataaac

SEQ ID NO: 330730 - DNA, 12 bp, Artificial Sequence
  Oligonucleotide primer for the detection of SNP TSC0035703
tttaattaatta

SEQ ID NO: 330731 - DNA, 12 bp, Artificial Sequence
  Oligonucleotide primer for the detection of SNP TSC0035704
accctatactac

SEQ ID NO: 330732 - DNA, 12 bp, Artificial Sequence
  Oligonucleotide primer for the detection of SNP TSC0035704
tgatttatagga

SEQ ID NO: 330733 - DNA, 12 bp, Artificial Sequence
  Oligonucleotide primer for the detection of SNP TSC0035707
tctcatcttaaa

SEQ ID NO: 330734 - DNA, 12 bp, Artificial Sequence
  Oligonucleotide primer for the detection of SNP TSC0035707
attatgggagtt

SEQ ID NO: 330735 - DNA, 12 bp, Artificial Sequence
  Oligonucleotide primer for the detection of SNP TSC0035707
attataaaaact

SEQ ID NO: 330736 - DNA, 12 bp, Artificial Sequence
  Oligonucleotide primer for the detection of SNP TSC0035708
ccccatctccac

SEQ ID NO: 330737 - DNA, 12 bp, Artificial Sequence
  Oligonucleotide primer for the detection of SNP TSC0035708
ttaatttttgta

SEQ ID NO: 330738 - DNA, 12 bp, Artificial Sequence
  Oligonucleotide primer for the detection of SNP TSC0035709
ggatgagggaga

SEQ ID NO: 330739 - DNA, 12 bp, Artificial Sequence
  Oligonucleotide primer for the detection of SNP TSC0035709
gatttagatgtt

SEQ ID NO: 330740 - DNA, 12 bp, Artificial Sequence
  Oligonucleotide primer for the detection of SNP TSC0035713
ctaaaaactatc

SEQ ID NO: 330741 - DNA, 12 bp, Artificial Sequence
  Oligonucleotide primer for the detection of SNP TSC0035713
gtgggggaggga

SEQ ID NO: 330742 - DNA, 12 bp, Artificial Sequence
  Oligonucleotide primer for the detection of SNP TSC0035714
tcctccctcccc

SEQ ID NO: 330743 - DNA, 12 bp, Artificial Sequence
  Oligonucleotide primer for the detection of SNP TSC0035714
atgaaggtttgg

SEQ ID NO: 330744 - DNA, 12 bp, Artificial Sequence
  Oligonucleotide primer for the detection of SNP TSC0035715
tatatcccatac

SEQ ID NO: 330745 - DNA, 12 bp, Artificial Sequence
  Oligonucleotide primer for the detection of SNP TSC0035715
ccctctaaacca

SEQ ID NO: 330746 - DNA, 12 bp, Artificial Sequence
  Oligonucleotide primer for the detection of SNP TSC0035715
tatattttatgt

SEQ ID NO: 330747 - DNA, 12 bp, Artificial Sequence
  Oligonucleotide primer for the detection of SNP TSC0035716
ttcttaaccaaa

SEQ ID NO: 330748 - DNA, 12 bp, Artificial Sequence
  Oligonucleotide primer for the detection of SNP TSC0035716
ttcttaaccgaa

SEQ ID NO: 330749 - DNA, 12 bp, Artificial Sequence
  Oligonucleotide primer for the detection of SNP TSC0035716
gtatgagttata

SEQ ID NO: 330750 - DNA, 12 bp, Artificial Sequence
  Oligonucleotide primer for the detection of SNP TSC0035716
cataaatcacaa

SEQ ID NO: 330751 - DNA, 12 bp, Artificial Sequence
  Oligonucleotide primer for the detection of SNP TSC0035716
ttttggttgggt

SEQ ID NO: 330752 - DNA, 12 bp, Artificial Sequence
  Oligonucleotide primer for the detection of SNP TSC0035716
ttttggtcgggt

SEQ ID NO: 330753 - DNA, 12 bp, Artificial Sequence
  Oligonucleotide primer for the detection of SNP TSC0035716
ttttggttgggc

SEQ ID NO: 330754 - DNA, 12 bp, Artificial Sequence
  Oligonucleotide primer for the detection of SNP TSC0035716
ttttggtcgggc

SEQ ID NO: 330755 - DNA, 12 bp, Artificial Sequence
  Oligonucleotide primer for the detection of SNP TSC0035718
aaaaaacatttc

SEQ ID NO: 330756 - DNA, 12 bp, Artificial Sequence
  Oligonucleotide primer for the detection of SNP TSC0035718
attgggaaagtt

SEQ ID NO: 330757 - DNA, 12 bp, Artificial Sequence
  Oligonucleotide primer for the detection of SNP TSC0035718
actaaaaaaacc

SEQ ID NO: 330758 - DNA, 12 bp, Artificial Sequence
  Oligonucleotide primer for the detection of SNP TSC0035718
aggggatatttt

SEQ ID NO: 330759 - DNA, 12 bp, Artificial Sequence
  Oligonucleotide primer for the detection of SNP TSC0035722
ctaaaaacttac

SEQ ID NO: 330760 - DNA, 12 bp, Artificial Sequence
  Oligonucleotide primer for the detection of SNP TSC0035722
gattttggtgag

SEQ ID NO: 330761 - DNA, 12 bp, Artificial Sequence
  Oligonucleotide primer for the detection of SNP TSC0035725
tgtgttttttgg

SEQ ID NO: 330762 - DNA, 12 bp, Artificial Sequence
  Oligonucleotide primer for the detection of SNP TSC0035729
taaactctaaac

SEQ ID NO: 330763 - DNA, 12 bp, Artificial Sequence
  Oligonucleotide primer for the detection of SNP TSC0035729
aggattaagaga

SEQ ID NO: 330764 - DNA, 12 bp, Artificial Sequence
  Oligonucleotide primer for the detection of SNP TSC0035729
tgggttttaggt

SEQ ID NO: 330765 - DNA, 12 bp, Artificial Sequence
  Oligonucleotide primer for the detection of SNP TSC0035730
tccaatacactc

SEQ ID NO: 330766 - DNA, 12 bp, Artificial Sequence
  Oligonucleotide primer for the detection of SNP TSC0035730
agaatgggagag

SEQ ID NO: 330767 - DNA, 12 bp, Artificial Sequence
  Oligonucleotide primer for the detection of SNP TSC0035733
tattaatatagt

SEQ ID NO: 330768 - DNA, 12 bp, Artificial Sequence
  Oligonucleotide primer for the detection of SNP TSC0035733
acattaatacaa

SEQ ID NO: 330769 - DNA, 12 bp, Artificial Sequence
  Oligonucleotide primer for the detection of SNP TSC0035733
tataatatgtgt

SEQ ID NO: 330770 - DNA, 12 bp, Artificial Sequence
  Oligonucleotide primer for the detection of SNP TSC0035734
cacactaaccct

SEQ ID NO: 330771 - DNA, 12 bp, Artificial Sequence
  Oligonucleotide primer for the detection of SNP TSC0035734
aaagagggtata

SEQ ID NO: 330772 - DNA, 12 bp, Artificial Sequence
  Oligonucleotide primer for the detection of SNP TSC0035735
aaaaaataatta

SEQ ID NO: 330773 - DNA, 12 bp, Artificial Sequence
  Oligonucleotide primer for the detection of SNP TSC0035735
ttttaaatatat

SEQ ID NO: 330774 - DNA, 12 bp, Artificial Sequence
  Oligonucleotide primer for the detection of SNP TSC0035735
ttttaaatatac

SEQ ID NO: 330775 - DNA, 12 bp, Artificial Sequence
  Oligonucleotide primer for the detection of SNP TSC0035735
ttaaatacacaa

SEQ ID NO: 330776 - DNA, 12 bp, Artificial Sequence
  Oligonucleotide primer for the detection of SNP TSC0035735
ttaaatacacga

SEQ ID NO: 330777 - DNA, 12 bp, Artificial Sequence
  Oligonucleotide primer for the detection of SNP TSC0035735
agggaaataatt

SEQ ID NO: 330778 - DNA, 12 bp, Artificial Sequence
  Oligonucleotide primer for the detection of SNP TSC0035736
tttttaaataat

SEQ ID NO: 330779 - DNA, 12 bp, Artificial Sequence
  Oligonucleotide primer for the detection of SNP TSC0035736
ttaaataacaaa

SEQ ID NO: 330780 - DNA, 12 bp, Artificial Sequence
  Oligonucleotide primer for the detection of SNP TSC0035737
tataacactacc

SEQ ID NO: 330781 - DNA, 12 bp, Artificial Sequence
  Oligonucleotide primer for the detection of SNP TSC0035737
gtttggtgtgaa

SEQ ID NO: 330782 - DNA, 12 bp, Artificial Sequence
  Oligonucleotide primer for the detection of SNP TSC0035737
acctaatataaa

SEQ ID NO: 330783 - DNA, 12 bp, Artificial Sequence
  Oligonucleotide primer for the detection of SNP TSC0035737
tgtggtattgtt

SEQ ID NO: 330784 - DNA, 12 bp, Artificial Sequence
  Oligonucleotide primer for the detection of SNP TSC0035742
ttttcttttcta

SEQ ID NO: 330785 - DNA, 12 bp, Artificial Sequence
  Oligonucleotide primer for the detection of SNP TSC0035742
atgttagaaatt

SEQ ID NO: 330786 - DNA, 12 bp, Artificial Sequence
  Oligonucleotide primer for the detection of SNP TSC0035742
atattaaaaacc

SEQ ID NO: 330787 - DNA, 12 bp, Artificial Sequence
  Oligonucleotide primer for the detection of SNP TSC0035744
ttttaattaata

SEQ ID NO: 330788 - DNA, 12 bp, Artificial Sequence
  Oligonucleotide primer for the detection of SNP TSC0035744
ttttaaaaagtt

SEQ ID NO: 330789 - DNA, 12 bp, Artificial Sequence
  Oligonucleotide primer for the detection of SNP TSC0035744
ttttaattgata

SEQ ID NO: 330790 - DNA, 12 bp, Artificial Sequence
  Oligonucleotide primer for the detection of SNP TSC0035745
atatatccccat

SEQ ID NO: 330791 - DNA, 12 bp, Artificial Sequence
  Oligonucleotide primer for the detection of SNP TSC0035745
ttttggtggtaa

SEQ ID NO: 330792 - DNA, 12 bp, Artificial Sequence
  Oligonucleotide primer for the detection of SNP TSC0035745
ttttaataacaa

SEQ ID NO: 330793 - DNA, 12 bp, Artificial Sequence
  Oligonucleotide primer for the detection of SNP TSC0035745
atgtatttttat

SEQ ID NO: 330794 - DNA, 12 bp, Artificial Sequence
  Oligonucleotide primer for the detection of SNP TSC0035748
ccccataatcca

SEQ ID NO: 330795 - DNA, 12 bp, Artificial Sequence
  Oligonukleotid-Primer
ccccataatccg

SEQ ID NO: 330796 - DNA, 12 bp, Artificial Sequence
  Oligonucleotide primer for the detection of SNP TSC0035749
aatacccaaaat

SEQ ID NO: 330797 - DNA, 12 bp, Artificial Sequence
  Oligonucleotide primer for the detection of SNP TSC0035749
ggtgtatattta

SEQ ID NO: 330798 - DNA, 12 bp, Artificial Sequence
  Oligonucleotide primer for the detection of SNP TSC0035750
aaactccctccc

SEQ ID NO: 330799 - DNA, 12 bp, Artificial Sequence
  Oligonucleotide primer for the detection of SNP TSC0035755
ccaaatacattt

SEQ ID NO: 330800 - DNA, 12 bp, Artificial Sequence
  Oligonucleotide primer for the detection of SNP TSC0035755
ttgtagtaggta

SEQ ID NO: 330801 - DNA, 12 bp, Artificial Sequence
  Oligonucleotide primer for the detection of SNP TSC0035758
aactcttaccta

SEQ ID NO: 330802 - DNA, 12 bp, Artificial Sequence
  Oligonucleotide primer for the detection of SNP TSC0035758
tgatttttttga

SEQ ID NO: 330803 - DNA, 12 bp, Artificial Sequence
  Oligonukleotid-Primer
aacccctttaaa

SEQ ID NO: 330804 - DNA, 12 bp, Artificial Sequence
  Oligonucleotide primer for the detection of SNP TSC0035759
aattaattaata

SEQ ID NO: 330805 - DNA, 12 bp, Artificial Sequence
  Oligonucleotide primer for the detection of SNP TSC0035759
ctttattttatt

SEQ ID NO: 330806 - DNA, 12 bp, Artificial Sequence
  Oligonucleotide primer for the detection of SNP TSC0035760
tcattaaaacac

SEQ ID NO: 330807 - DNA, 12 bp, Artificial Sequence
  Oligonukleotid-Primer
gtttggaaattt

SEQ ID NO: 330808 - DNA, 12 bp, Artificial Sequence
  Oligonucleotide primer for the detection of SNP TSC0035760
gttcggaaattt

SEQ ID NO: 330809 - DNA, 12 bp, Artificial Sequence
  Oligonucleotide primer for the detection of SNP TSC0035760
tccaaaaatcca

SEQ ID NO: 330810 - DNA, 12 bp, Artificial Sequence
  Oligonucleotide primer for the detection of SNP TSC0035760
tccgaaaatcca

SEQ ID NO: 330811 - DNA, 12 bp, Artificial Sequence
  Oligonucleotide primer for the detection of SNP TSC0035760
tattggagtatt

SEQ ID NO: 330812 - DNA, 12 bp, Artificial Sequence
  Oligonucleotide primer for the detection of SNP TSC0035761
tcttactatttc

SEQ ID NO: 330813 - DNA, 12 bp, Artificial Sequence
  Oligonucleotide primer for the detection of SNP TSC0035761
ttataaaaaaag

SEQ ID NO: 330814 - DNA, 12 bp, Artificial Sequence
  Oligonucleotide primer for the detection of SNP TSC0035770
tccaaataaatc

SEQ ID NO: 330815 - DNA, 12 bp, Artificial Sequence
  Oligonucleotide primer for the detection of SNP TSC0035770
tgagatggttta

SEQ ID NO: 330816 - DNA, 12 bp, Artificial Sequence
  Oligonucleotide primer for the detection of SNP TSC0035771
cttcaaaaaacc

SEQ ID NO: 330817 - DNA, 12 bp, Artificial Sequence
  Oligonucleotide primer for the detection of SNP TSC0035771
cttcgaaaaacc

SEQ ID NO: 330818 - DNA, 12 bp, Artificial Sequence
  Oligonucleotide primer for the detection of SNP TSC0035771
ttaggtgattcg

SEQ ID NO: 330819 - DNA, 12 bp, Artificial Sequence
  Oligonucleotide primer for the detection of SNP TSC0035771
tttcgggaggtt

SEQ ID NO: 330820 - DNA, 12 bp, Artificial Sequence
  Oligonucleotide primer for the detection of SNP TSC0035771
tttcgggaggtc

SEQ ID NO: 330821 - DNA, 12 bp, Artificial Sequence
  Oligonucleotide primer for the detection of SNP TSC0035777
ataaaattaatc

SEQ ID NO: 330822 - DNA, 12 bp, Artificial Sequence
  Oligonucleotide primer for the detection of SNP TSC0035777
ggttgtagtggg

SEQ ID NO: 330823 - DNA, 12 bp, Artificial Sequence
  Oligonucleotide primer for the detection of SNP TSC0035777
ctacaataaaaa

SEQ ID NO: 330824 - DNA, 12 bp, Artificial Sequence
  Oligonucleotide primer for the detection of SNP TSC0035777
ataaagttgatt

SEQ ID NO: 330825 - DNA, 12 bp, Artificial Sequence
  Oligonucleotide primer for the detection of SNP TSC0035780
acaatacaaatt

SEQ ID NO: 330826 - DNA, 12 bp, Artificial Sequence
  Oligonucleotide primer for the detection of SNP TSC0035780
acaatacgaatt

SEQ ID NO: 330827 - DNA, 12 bp, Artificial Sequence
  Oligonucleotide primer for the detection of SNP TSC0035780
tattgttttaga

SEQ ID NO: 330828 - DNA, 12 bp, Artificial Sequence
  Oligonucleotide primer for the detection of SNP TSC0035781
ttctaaccaaac

SEQ ID NO: 330829 - DNA, 12 bp, Artificial Sequence
  Oligonucleotide primer for the detection of SNP TSC0035781
aggtatgagata

SEQ ID NO: 330830 - DNA, 12 bp, Artificial Sequence
  Oligonucleotide primer for the detection of SNP TSC0035782
aatcaaaccttc

SEQ ID NO: 330831 - DNA, 12 bp, Artificial Sequence
  Oligonucleotide primer for the detection of SNP TSC0035782
gtttgttaaatg

SEQ ID NO: 330832 - DNA, 12 bp, Artificial Sequence
  Oligonucleotide primer for the detection of SNP TSC0035782
atttactaaata

SEQ ID NO: 330833 - DNA, 12 bp, Artificial Sequence
  Oligonucleotide primer for the detection of SNP TSC0035782
aattaggttttt

SEQ ID NO: 330834 - DNA, 12 bp, Artificial Sequence
  Oligonucleotide primer for the detection of SNP TSC0035783
agaaagagaaaa

SEQ ID NO: 330835 - DNA, 12 bp, Artificial Sequence
  Oligonucleotide primer for the detection of SNP TSC0035791
ttttctaccttc

SEQ ID NO: 330836 - DNA, 12 bp, Artificial Sequence
  Oligonucleotide primer for the detection of SNP TSC0035791
gggaatagggat

SEQ ID NO: 330837 - DNA, 12 bp, Artificial Sequence
  Oligonucleotide primer for the detection of SNP TSC0035792
gttttattgttt

SEQ ID NO: 330838 - DNA, 12 bp, Artificial Sequence
  Oligonucleotide primer for the detection of SNP TSC0035792
tctcattaccta

SEQ ID NO: 330839 - DNA, 12 bp, Artificial Sequence
  Oligonucleotide primer for the detection of SNP TSC0035792
gttagggagaga

SEQ ID NO: 330840 - DNA, 12 bp, Artificial Sequence
  Oligonucleotide primer for the detection of SNP TSC0035795
ggtaatggggta

SEQ ID NO: 330841 - DNA, 12 bp, Artificial Sequence
  Oligonucleotide primer for the detection of SNP TSC0035795
ggtaacggggta

SEQ ID NO: 330842 - DNA, 12 bp, Artificial Sequence
  Oligonucleotide primer for the detection of SNP TSC0035797
acacaaaaatac

SEQ ID NO: 330843 - DNA, 12 bp, Artificial Sequence
  Oligonucleotide primer for the detection of SNP TSC0035797
tgggtgtaaatg

SEQ ID NO: 330844 - DNA, 12 bp, Artificial Sequence
  Oligonucleotide primer for the detection of SNP TSC0035797
taaatacaaata

SEQ ID NO: 330845 - DNA, 12 bp, Artificial Sequence
  Oligonucleotide primer for the detection of SNP TSC0035797
atatagggatgt

SEQ ID NO: 330846 - DNA, 12 bp, Artificial Sequence
  Oligonucleotide primer for the detection of SNP TSC0035798
gagtggtaagta

SEQ ID NO: 330847 - DNA, 12 bp, Artificial Sequence
  Oligonucleotide primer for the detection of SNP TSC0035798
aaataataaaca

SEQ ID NO: 330848 - DNA, 12 bp, Artificial Sequence
  Oligonucleotide primer for the detection of SNP TSC0035800
aacttctctctc

SEQ ID NO: 330849 - DNA, 12 bp, Artificial Sequence
  Oligonucleotide primer for the detection of SNP TSC0035800
gttgaatatatt

SEQ ID NO: 330850 - DNA, 12 bp, Artificial Sequence
  Oligonucleotide primer for the detection of SNP TSC0035800
gtcgaatatatt

SEQ ID NO: 330851 - DNA, 12 bp, Artificial Sequence
  Oligonucleotide primer for the detection of SNP TSC0035800
ccaaacacatca

SEQ ID NO: 330852 - DNA, 12 bp, Artificial Sequence
  Oligonucleotide primer for the detection of SNP TSC0035800
ccgaacacatca

SEQ ID NO: 330853 - DNA, 12 bp, Artificial Sequence
  Oligonucleotide primer for the detection of SNP TSC0035801
aaatctaacccc

SEQ ID NO: 330854 - DNA, 12 bp, Artificial Sequence
  Oligonucleotide primer for the detection of SNP TSC0035801
aacctcttttca

SEQ ID NO: 330855 - DNA, 12 bp, Artificial Sequence
  Oligonucleotide primer for the detection of SNP TSC0035804
aatccttattca

SEQ ID NO: 330856 - DNA, 12 bp, Artificial Sequence
  Oligonucleotide primer for the detection of SNP TSC0035804
agttgttagatt

SEQ ID NO: 330857 - DNA, 12 bp, Artificial Sequence
  Oligonucleotide primer for the detection of SNP TSC0035804
agttgttagatc

SEQ ID NO: 330858 - DNA, 12 bp, Artificial Sequence
  Oligonucleotide primer for the detection of SNP TSC0035805
ccatcaaaacca

SEQ ID NO: 330859 - DNA, 12 bp, Artificial Sequence
  Oligonucleotide primer for the detection of SNP TSC0035805
tttggtaaagtt

SEQ ID NO: 330860 - DNA, 12 bp, Artificial Sequence
  Oligonucleotide primer for the detection of SNP TSC0035805
cctaataaaatt

SEQ ID NO: 330861 - DNA, 12 bp, Artificial Sequence
  Oligonucleotide primer for the detection of SNP TSC0035805
ttattagagtta

SEQ ID NO: 330862 - DNA, 12 bp, Artificial Sequence
  Oligonucleotide primer for the detection of SNP TSC0035806
aataatataatc

SEQ ID NO: 330863 - DNA, 12 bp, Artificial Sequence
  Oligonucleotide primer for the detection of SNP TSC0035806
tgtagtaagtta

SEQ ID NO: 330864 - DNA, 12 bp, Artificial Sequence
  Oligonucleotide primer for the detection of SNP TSC0035807
ttttattcgtta

SEQ ID NO: 330865 - DNA, 12 bp, Artificial Sequence
  Oligonucleotide primer for the detection of SNP TSC0035808
ttaatcattatt

SEQ ID NO: 330866 - DNA, 12 bp, Artificial Sequence
  Oligonucleotide primer for the detection of SNP TSC0035808
gaagttagttta

SEQ ID NO: 330867 - DNA, 12 bp, Artificial Sequence
  Oligonucleotide primer for the detection of SNP TSC0035817
acaccatcttca

SEQ ID NO: 330868 - DNA, 12 bp, Artificial Sequence
  Oligonucleotide primer for the detection of SNP TSC0035817
gggggaaagtgt

SEQ ID NO: 330869 - DNA, 12 bp, Artificial Sequence
  Oligonucleotide primer for the detection of SNP TSC0035817
gggggaaagcgt

SEQ ID NO: 330870 - DNA, 12 bp, Artificial Sequence
  Oligonucleotide primer for the detection of SNP TSC0035817
aaaaaaaaacgt

SEQ ID NO: 330871 - DNA, 12 bp, Artificial Sequence
  Oligonucleotide primer for the detection of SNP TSC0035817
gtattattttta

SEQ ID NO: 330872 - DNA, 12 bp, Artificial Sequence
  Oligonucleotide primer for the detection of SNP TSC0035818
ataactaacata

SEQ ID NO: 330873 - DNA, 12 bp, Artificial Sequence
  Oligonucleotide primer for the detection of SNP TSC0035818
atggaggaaaat

SEQ ID NO: 330874 - DNA, 12 bp, Artificial Sequence
  Oligonucleotide primer for the detection of SNP TSC0035818
ataattaatata

SEQ ID NO: 330875 - DNA, 12 bp, Artificial Sequence
  Oligonucleotide primer for the detection of SNP TSC0035819
ctaacctcataa

SEQ ID NO: 330876 - DNA, 12 bp, Artificial Sequence
  Oligonucleotide primer for the detection of SNP TSC0035819
ctaacctcgtaa

SEQ ID NO: 330877 - DNA, 12 bp, Artificial Sequence
  Oligonucleotide primer for the detection of SNP TSC0035819
ttgatttcgtga

SEQ ID NO: 330878 - DNA, 12 bp, Artificial Sequence
  Oligonucleotide primer for the detection of SNP TSC0035820
attaatctctat

SEQ ID NO: 330879 - DNA, 12 bp, Artificial Sequence
  Oligonucleotide primer for the detection of SNP TSC0035820
ggagaatgaatt

SEQ ID NO: 330880 - DNA, 12 bp, Artificial Sequence
  Oligonucleotide primer for the detection of SNP TSC0035824
aaaatatttagt

SEQ ID NO: 330881 - DNA, 12 bp, Artificial Sequence
  Oligonucleotide primer for the detection of SNP TSC0035825
aattcctaaccc

SEQ ID NO: 330882 - DNA, 12 bp, Artificial Sequence
  Oligonucleotide primer for the detection of SNP TSC0035825
aaggggtttggg

SEQ ID NO: 330883 - DNA, 12 bp, Artificial Sequence
  Oligonucleotide primer for the detection of SNP TSC0035826
caattctactac

SEQ ID NO: 330884 - DNA, 12 bp, Artificial Sequence
  Oligonucleotide primer for the detection of SNP TSC0035826
cgattctactac

SEQ ID NO: 330885 - DNA, 12 bp, Artificial Sequence
  Oligonucleotide primer for the detection of SNP TSC0035826
tcgggaggttga

SEQ ID NO: 330886 - DNA, 12 bp, Artificial Sequence
  Oligonucleotide primer for the detection of SNP TSC0035827
tattattatgtt

SEQ ID NO: 330887 - DNA, 12 bp, Artificial Sequence
  Oligonucleotide primer for the detection of SNP TSC0035828
aataccctataa

SEQ ID NO: 330888 - DNA, 12 bp, Artificial Sequence
  Oligonucleotide primer for the detection of SNP TSC0035828
agtatttatatt

SEQ ID NO: 330889 - DNA, 12 bp, Artificial Sequence
  Oligonucleotide primer for the detection of SNP TSC0035828
aatacttatacc

SEQ ID NO: 330890 - DNA, 12 bp, Artificial Sequence
  Oligonucleotide primer for the detection of SNP TSC0035828
aatgttttgtag

SEQ ID NO: 330891 - DNA, 12 bp, Artificial Sequence
  Oligonucleotide primer for the detection of SNP TSC0035831
aaaaaatataca

SEQ ID NO: 330892 - DNA, 12 bp, Artificial Sequence
  Oligonucleotide primer for the detection of SNP TSC0035831
ttttatatatgt

SEQ ID NO: 330893 - DNA, 12 bp, Artificial Sequence
  Oligonucleotide primer for the detection of SNP TSC0035831
aaagagtatgta

SEQ ID NO: 330894 - DNA, 12 bp, Artificial Sequence
  Oligonucleotide primer for the detection of SNP TSC0035832
ctacttctctcc

SEQ ID NO: 330895 - DNA, 12 bp, Artificial Sequence
  Oligonucleotide primer for the detection of SNP TSC0035832
atttggtaagaa

SEQ ID NO: 330896 - DNA, 12 bp, Artificial Sequence
  Oligonucleotide primer for the detection of SNP TSC0035832
atttaacaaaaa

SEQ ID NO: 330897 - DNA, 12 bp, Artificial Sequence
  Oligonucleotide primer for the detection of SNP TSC0035836
ctaatacttatt

SEQ ID NO: 330898 - DNA, 12 bp, Artificial Sequence
  Oligonucleotide primer for the detection of SNP TSC0035836
atagtaaatatg

SEQ ID NO: 330899 - DNA, 12 bp, Artificial Sequence
  Oligonucleotide primer for the detection of SNP TSC0035837
aaaaaattccat

SEQ ID NO: 330900 - DNA, 12 bp, Artificial Sequence
  Oligonucleotide primer for the detection of SNP TSC0035837
tggtaggtgtaa

SEQ ID NO: 330901 - DNA, 12 bp, Artificial Sequence
  Oligonucleotide primer for the detection of SNP TSC0035838
atatggtggttt

SEQ ID NO: 330902 - DNA, 12 bp, Artificial Sequence
  Oligonucleotide primer for the detection of SNP TSC0035839
caccaataaaac

SEQ ID NO: 330903 - DNA, 12 bp, Artificial Sequence
  Oligonucleotide primer for the detection of SNP TSC0035839
caccgataaaac

SEQ ID NO: 330904 - DNA, 12 bp, Artificial Sequence
  Oligonucleotide primer for the detection of SNP TSC0035839
ggtagttttatt

SEQ ID NO: 330905 - DNA, 12 bp, Artificial Sequence
  Oligonucleotide primer for the detection of SNP TSC0035839
ggtagttttatc

SEQ ID NO: 330906 - DNA, 12 bp, Artificial Sequence
  Oligonucleotide primer for the detection of SNP TSC0035839
aacaatcttatc

SEQ ID NO: 330907 - DNA, 12 bp, Artificial Sequence
  Oligonucleotide primer for the detection of SNP TSC0035839
tattgatgagat

SEQ ID NO: 330908 - DNA, 12 bp, Artificial Sequence
  Oligonucleotide primer for the detection of SNP TSC0035839
tatcgatgagat

SEQ ID NO: 330909 - DNA, 12 bp, Artificial Sequence
  Oligonucleotide primer for the detection of SNP TSC0035839
tattgatgagac

SEQ ID NO: 330910 - DNA, 12 bp, Artificial Sequence
  Oligonucleotide primer for the detection of SNP TSC0035839
tatcgatgagac

SEQ ID NO: 330911 - DNA, 12 bp, Artificial Sequence
  Oligonucleotide primer for the detection of SNP TSC0035841
aaacattttacc

SEQ ID NO: 330912 - DNA, 12 bp, Artificial Sequence
  Oligonucleotide primer for the detection of SNP TSC0035841
aggatggttgta

SEQ ID NO: 330913 - DNA, 12 bp, Artificial Sequence
  Oligonucleotide primer for the detection of SNP TSC0035841
aggatggtcgta

SEQ ID NO: 330914 - DNA, 12 bp, Artificial Sequence
  Oligonucleotide primer for the detection of SNP TSC0035842
ccaccttaactt

SEQ ID NO: 330915 - DNA, 12 bp, Artificial Sequence
  Oligonucleotide primer for the detection of SNP TSC0035842
ccgccttaactt

SEQ ID NO: 330916 - DNA, 12 bp, Artificial Sequence
  Oligonucleotide primer for the detection of SNP TSC0035842
gttttggttttc

SEQ ID NO: 330917 - DNA, 12 bp, Artificial Sequence
  Oligonucleotide primer for the detection of SNP TSC0035843
atatactttaaa

SEQ ID NO: 330918 - DNA, 12 bp, Artificial Sequence
  Oligonucleotide primer for the detection of SNP TSC0035843
taatatgttttg

SEQ ID NO: 330919 - DNA, 12 bp, Artificial Sequence
  Oligonucleotide primer for the detection of SNP TSC0035846
cgaaaataaact

SEQ ID NO: 330920 - DNA, 12 bp, Artificial Sequence
  Oligonucleotide primer for the detection of SNP TSC0035846
tatataccacca

SEQ ID NO: 330921 - DNA, 12 bp, Artificial Sequence
  Oligonucleotide primer for the detection of SNP TSC0035846
tgaaaataagtt

SEQ ID NO: 330922 - DNA, 12 bp, Artificial Sequence
  Oligonucleotide primer for the detection of SNP TSC0035846
cgaaaataagtt

SEQ ID NO: 330923 - DNA, 12 bp, Artificial Sequence
  Oligonucleotide primer for the detection of SNP TSC0035848
taaaaccaaaat

SEQ ID NO: 330924 - DNA, 12 bp, Artificial Sequence
  Oligonucleotide primer for the detection of SNP TSC0035850
acgcccaactaa

SEQ ID NO: 330925 - DNA, 12 bp, Artificial Sequence
  Oligonucleotide primer for the detection of SNP TSC0035850
gcacccaactaa

SEQ ID NO: 330926 - DNA, 12 bp, Artificial Sequence
  Oligonucleotide primer for the detection of SNP TSC0035850
acgcccgactaa

SEQ ID NO: 330927 - DNA, 12 bp, Artificial Sequence
  Oligonucleotide primer for the detection of SNP TSC0035850
gcacccgactaa

SEQ ID NO: 330928 - DNA, 12 bp, Artificial Sequence
  Oligonukleotid-Primer
gcgcccaactaa

SEQ ID NO: 330929 - DNA, 12 bp, Artificial Sequence
  Oligonucleotide primer for the detection of SNP TSC0035850
gcgcccgactaa

SEQ ID NO: 330930 - DNA, 12 bp, Artificial Sequence
  Oligonucleotide primer for the detection of SNP TSC0035850
ttaaaaattagt

SEQ ID NO: 330931 - DNA, 12 bp, Artificial Sequence
  Oligonucleotide primer for the detection of SNP TSC0035850
ttaaaaattaac

SEQ ID NO: 330932 - DNA, 12 bp, Artificial Sequence
  Oligonucleotide primer for the detection of SNP TSC0035850
gcgtttggttag

SEQ ID NO: 330933 - DNA, 12 bp, Artificial Sequence
  Oligonucleotide primer for the detection of SNP TSC0035850
gtgttcggttag

SEQ ID NO: 330934 - DNA, 12 bp, Artificial Sequence
  Oligonucleotide primer for the detection of SNP TSC0035850
gcgttcggttag

SEQ ID NO: 330935 - DNA, 12 bp, Artificial Sequence
  Oligonucleotide primer for the detection of SNP TSC0035855
ataacattctat

SEQ ID NO: 330936 - DNA, 12 bp, Artificial Sequence
  Oligonucleotide primer for the detection of SNP TSC0035855
aatgatatttta

SEQ ID NO: 330937 - DNA, 12 bp, Artificial Sequence
  Oligonucleotide primer for the detection of SNP TSC0035856
tataaaaaaact

SEQ ID NO: 330938 - DNA, 12 bp, Artificial Sequence
  Oligonucleotide primer for the detection of SNP TSC0035856
tagttgagtaga

SEQ ID NO: 330939 - DNA, 12 bp, Artificial Sequence
  Oligonucleotide primer for the detection of SNP TSC0035857
taggtttattag

SEQ ID NO: 330940 - DNA, 12 bp, Artificial Sequence
  Oligonucleotide primer for the detection of SNP TSC0035857
taaactcattaa

SEQ ID NO: 330941 - DNA, 12 bp, Artificial Sequence
  Oligonucleotide primer for the detection of SNP TSC0035857
tatgtggtttgt

SEQ ID NO: 330942 - DNA, 12 bp, Artificial Sequence
  Oligonucleotide primer for the detection of SNP TSC0035858
ctctaacaatct

SEQ ID NO: 330943 - DNA, 12 bp, Artificial Sequence
  Oligonucleotide primer for the detection of SNP TSC0035858
aaaattatagag

SEQ ID NO: 330944 - DNA, 12 bp, Artificial Sequence
  Oligonucleotide primer for the detection of SNP TSC0035859
ctacataatttc

SEQ ID NO: 330945 - DNA, 12 bp, Artificial Sequence
  Oligonucleotide primer for the detection of SNP TSC0035859
gtagttaggttt

SEQ ID NO: 330946 - DNA, 12 bp, Artificial Sequence
  Oligonucleotide primer for the detection of SNP TSC0035861
ctactcaacttc

SEQ ID NO: 330947 - DNA, 12 bp, Artificial Sequence
  Oligonucleotide primer for the detection of SNP TSC0035861
ctactcgacttc

SEQ ID NO: 330948 - DNA, 12 bp, Artificial Sequence
  Oligonucleotide primer for the detection of SNP TSC0035861
ttttggtgtagg

SEQ ID NO: 330949 - DNA, 12 bp, Artificial Sequence
  Oligonucleotide primer for the detection of SNP TSC0035861
tttcggtgtagg

SEQ ID NO: 330950 - DNA, 12 bp, Artificial Sequence
  Oligonucleotide primer for the detection of SNP TSC0035861
ttttggcgtagg

SEQ ID NO: 330951 - DNA, 12 bp, Artificial Sequence
  Oligonucleotide primer for the detection of SNP TSC0035861
tttcggcgtagg

SEQ ID NO: 330952 - DNA, 12 bp, Artificial Sequence
  Oligonucleotide primer for the detection of SNP TSC0035862
tcttcctcctct

SEQ ID NO: 330953 - DNA, 12 bp, Artificial Sequence
  Oligonucleotide primer for the detection of SNP TSC0035862
aaaaccccaaaa

SEQ ID NO: 330954 - DNA, 12 bp, Artificial Sequence
  Oligonucleotide primer for the detection of SNP TSC0035869
tttatttaccta

SEQ ID NO: 330955 - DNA, 12 bp, Artificial Sequence
  Oligonucleotide primer for the detection of SNP TSC0035869
tttcatcaataa

SEQ ID NO: 330956 - DNA, 12 bp, Artificial Sequence
  Oligonucleotide primer for the detection of SNP TSC0035870
ttttctctctct

SEQ ID NO: 330957 - DNA, 12 bp, Artificial Sequence
  Oligonucleotide primer for the detection of SNP TSC0035881
ctcaaaaactca

SEQ ID NO: 330958 - DNA, 12 bp, Artificial Sequence
  Oligonucleotide primer for the detection of SNP TSC0035881
tgatgtaatttt

SEQ ID NO: 330959 - DNA, 12 bp, Artificial Sequence
  Oligonucleotide primer for the detection of SNP TSC0035881
ataatacaatcc

SEQ ID NO: 330960 - DNA, 12 bp, Artificial Sequence
  Oligonucleotide primer for the detection of SNP TSC0035882
acaatccttcta

SEQ ID NO: 330961 - DNA, 12 bp, Artificial Sequence
  Oligonucleotide primer for the detection of SNP TSC0035882
taggaggttgag

SEQ ID NO: 330962 - DNA, 12 bp, Artificial Sequence
  Oligonucleotide primer for the detection of SNP TSC0035883
gaaacaaataca

SEQ ID NO: 330963 - DNA, 12 bp, Artificial Sequence
  Oligonucleotide primer for the detection of SNP TSC0035883
gaaacaaatacg

SEQ ID NO: 330964 - DNA, 12 bp, Artificial Sequence
  Oligonucleotide primer for the detection of SNP TSC0035883
agagattgaatt

SEQ ID NO: 330965 - DNA, 12 bp, Artificial Sequence
  Oligonucleotide primer for the detection of SNP TSC0035883
ggaatagatatg

SEQ ID NO: 330966 - DNA, 12 bp, Artificial Sequence
  Oligonucleotide primer for the detection of SNP TSC0035883
ggaatagatacg

SEQ ID NO: 330967 - DNA, 12 bp, Artificial Sequence
  Oligonucleotide primer for the detection of SNP TSC0035884
ctcccatcacca

SEQ ID NO: 330968 - DNA, 12 bp, Artificial Sequence
  Oligonucleotide primer for the detection of SNP TSC0035884
ctcccatcaccg

SEQ ID NO: 330969 - DNA, 12 bp, Artificial Sequence
  Oligonucleotide primer for the detection of SNP TSC0035884
ttggggtgggat

SEQ ID NO: 330970 - DNA, 12 bp, Artificial Sequence
  Oligonucleotide primer for the detection of SNP TSC0035884
ttggggcgggat

SEQ ID NO: 330971 - DNA, 12 bp, Artificial Sequence
  Oligonucleotide primer for the detection of SNP TSC0035884
ttggggtgggac

SEQ ID NO: 330972 - DNA, 12 bp, Artificial Sequence
  Oligonucleotide primer for the detection of SNP TSC0035884
ttggggcgggac

SEQ ID NO: 330973 - DNA, 12 bp, Artificial Sequence
  Oligonucleotide primer for the detection of SNP TSC0035884
ttaaaacaaaac

SEQ ID NO: 330974 - DNA, 12 bp, Artificial Sequence
  Oligonucleotide primer for the detection of SNP TSC0035884
ttaaaacgaaac

SEQ ID NO: 330975 - DNA, 12 bp, Artificial Sequence
  Oligonucleotide primer for the detection of SNP TSC0035884
tttttattatcg

SEQ ID NO: 330976 - DNA, 12 bp, Artificial Sequence
  Oligonucleotide primer for the detection of SNP TSC0035885
ttgttgttaatt

SEQ ID NO: 330977 - DNA, 12 bp, Artificial Sequence
  Oligonucleotide primer for the detection of SNP TSC0035885
ctattaccaatc

SEQ ID NO: 330978 - DNA, 12 bp, Artificial Sequence
  Oligonucleotide primer for the detection of SNP TSC0035885
ggaagaaagaag

SEQ ID NO: 330979 - DNA, 12 bp, Artificial Sequence
  Oligonucleotide primer for the detection of SNP TSC0035889
tacttatctaaa

SEQ ID NO: 330980 - DNA, 12 bp, Artificial Sequence
  Oligonucleotide primer for the detection of SNP TSC0035889
aaggaaataaag

SEQ ID NO: 330981 - DNA, 12 bp, Artificial Sequence
  Oligonucleotide primer for the detection of SNP TSC0035889
taatgtttattt

SEQ ID NO: 330982 - DNA, 12 bp, Artificial Sequence
  Oligonucleotide primer for the detection of SNP TSC0035890
accccttcttaa

SEQ ID NO: 330983 - DNA, 12 bp, Artificial Sequence
  Oligonucleotide primer for the detection of SNP TSC0035890
atatggagattt

SEQ ID NO: 330984 - DNA, 12 bp, Artificial Sequence
  Oligonucleotide primer for the detection of SNP TSC0035890
atacggagattt

SEQ ID NO: 330985 - DNA, 12 bp, Artificial Sequence
  Oligonucleotide primer for the detection of SNP TSC0035890
atatggagattc

SEQ ID NO: 330986 - DNA, 12 bp, Artificial Sequence
  Oligonucleotide primer for the detection of SNP TSC0035890
atacggagattc

SEQ ID NO: 330987 - DNA, 12 bp, Artificial Sequence
  Oligonucleotide primer for the detection of SNP TSC0035890
aaacacgaaaat

SEQ ID NO: 330988 - DNA, 12 bp, Artificial Sequence
  Oligonucleotide primer for the detection of SNP TSC0035891
cctatcttttaa

SEQ ID NO: 330989 - DNA, 12 bp, Artificial Sequence
  Oligonucleotide primer for the detection of SNP TSC0035891
tttttgggaagt

SEQ ID NO: 330990 - DNA, 12 bp, Artificial Sequence
  Oligonucleotide primer for the detection of SNP TSC0035892
tttctatacttt

SEQ ID NO: 330991 - DNA, 12 bp, Artificial Sequence
  Oligonucleotide primer for the detection of SNP TSC0035892
ctaaacatctct

SEQ ID NO: 330992 - DNA, 12 bp, Artificial Sequence
  Oligonucleotide primer for the detection of SNP TSC0035894
aaataaaaatac

SEQ ID NO: 330993 - DNA, 12 bp, Artificial Sequence
  Oligonucleotide primer for the detection of SNP TSC0035894
atatttgaaata

SEQ ID NO: 330994 - DNA, 12 bp, Artificial Sequence
  Oligonucleotide primer for the detection of SNP TSC0035894
atatttaaaaca

SEQ ID NO: 330995 - DNA, 12 bp, Artificial Sequence
  Oligonucleotide primer for the detection of SNP TSC0035894
ggatagaaatgt

SEQ ID NO: 330996 - DNA, 12 bp, Artificial Sequence
  Oligonucleotide primer for the detection of SNP TSC0035897
cctatctcccca

SEQ ID NO: 330997 - DNA, 12 bp, Artificial Sequence
  Oligonucleotide primer for the detection of SNP TSC0035897
gaaggagattat

SEQ ID NO: 330998 - DNA, 12 bp, Artificial Sequence
  Oligonucleotide primer for the detection of SNP TSC0035897
gaaggagattac

SEQ ID NO: 330999 - DNA, 12 bp, Artificial Sequence
  Oligonucleotide primer for the detection of SNP TSC0035899
tcctatctctat

SEQ ID NO: 331000 - DNA, 12 bp, Artificial Sequence
  Oligonucleotide primer for the detection of SNP TSC0035899
tttaaaaagaga

SEQ ID NO: 331001 - DNA, 12 bp, Artificial Sequence
  Oligonucleotide primer for the detection of SNP TSC0035902
catacatttttt

SEQ ID NO: 331002 - DNA, 12 bp, Artificial Sequence
  Oligonucleotide primer for the detection of SNP TSC0035902
atttatatttaa

SEQ ID NO: 331003 - DNA, 12 bp, Artificial Sequence
  Oligonucleotide primer for the detection of SNP TSC0035903
aattatttattc

SEQ ID NO: 331004 - DNA, 12 bp, Artificial Sequence
  Oligonucleotide primer for the detection of SNP TSC0035903
ttattagagatt

SEQ ID NO: 331005 - DNA, 12 bp, Artificial Sequence
  Oligonucleotide primer for the detection of SNP TSC0035903
caccaaaaatca

SEQ ID NO: 331006 - DNA, 12 bp, Artificial Sequence
  Oligonucleotide primer for the detection of SNP TSC0035904
gattagtgtaga

SEQ ID NO: 331007 - DNA, 12 bp, Artificial Sequence
  Oligonucleotide primer for the detection of SNP TSC0035905
ataatctatttc

SEQ ID NO: 331008 - DNA, 12 bp, Artificial Sequence
  Oligonucleotide primer for the detection of SNP TSC0035905
aaagtattggaa

SEQ ID NO: 331009 - DNA, 12 bp, Artificial Sequence
  Oligonucleotide primer for the detection of SNP TSC0035905
aaagtatcggaa

SEQ ID NO: 331010 - DNA, 12 bp, Artificial Sequence
  Oligonucleotide primer for the detection of SNP TSC0035906
tttcttatattc

SEQ ID NO: 331011 - DNA, 12 bp, Artificial Sequence
  Oligonucleotide primer for the detection of SNP TSC0035906
tgagatttttag

SEQ ID NO: 331012 - DNA, 12 bp, Artificial Sequence
  Oligonucleotide primer for the detection of SNP TSC0035907
ttccatattaca

SEQ ID NO: 331013 - DNA, 12 bp, Artificial Sequence
  Oligonucleotide primer for the detection of SNP TSC0035907
aaaacttttaca

SEQ ID NO: 331014 - DNA, 12 bp, Artificial Sequence
  Oligonucleotide primer for the detection of SNP TSC0035913
ttggtttgggcg

SEQ ID NO: 331015 - DNA, 12 bp, Artificial Sequence
  Oligonucleotide primer for the detection of SNP TSC0035913
tcggtttgggcg

SEQ ID NO: 331016 - DNA, 12 bp, Artificial Sequence
  Oligonucleotide primer for the detection of SNP TSC0035913
ccaacctaaaca

SEQ ID NO: 331017 - DNA, 12 bp, Artificial Sequence
  Oligonucleotide primer for the detection of SNP TSC0035913
ccaacctaaacg

SEQ ID NO: 331018 - DNA, 12 bp, Artificial Sequence
  Oligonucleotide primer for the detection of SNP TSC0035913
ccgacctaaaca

SEQ ID NO: 331019 - DNA, 12 bp, Artificial Sequence
  Oligonucleotide primer for the detection of SNP TSC0035913
ccgacctaaacg

SEQ ID NO: 331020 - DNA, 12 bp, Artificial Sequence
  Oligonucleotide primer for the detection of SNP TSC0035913
tttgagatggag

SEQ ID NO: 331021 - DNA, 12 bp, Artificial Sequence
  Oligonucleotide primer for the detection of SNP TSC0035913
tttgagacggag

SEQ ID NO: 331022 - DNA, 12 bp, Artificial Sequence
  Oligonucleotide primer for the detection of SNP TSC0035914
taaacaactata

SEQ ID NO: 331023 - DNA, 12 bp, Artificial Sequence
  Oligonucleotide primer for the detection of SNP TSC0035914
gtagtgatatta

SEQ ID NO: 331024 - DNA, 12 bp, Artificial Sequence
  Oligonucleotide primer for the detection of SNP TSC0035914
acaataacatta

SEQ ID NO: 331025 - DNA, 12 bp, Artificial Sequence
  Oligonukleotid-Primer
gtaaatagttat

SEQ ID NO: 331026 - DNA, 12 bp, Artificial Sequence
  Oligonucleotide primer for the detection of SNP TSC0035918
caccccttcccc

SEQ ID NO: 331027 - DNA, 12 bp, Artificial Sequence
  Oligonucleotide primer for the detection of SNP TSC0035918
aaatttaggggg

SEQ ID NO: 331028 - DNA, 12 bp, Artificial Sequence
  Oligonucleotide primer for the detection of SNP TSC0035919
atacctcaacca

SEQ ID NO: 331029 - DNA, 12 bp, Artificial Sequence
  Oligonukleotid-Primer
aagtagttagaa

SEQ ID NO: 331030 - DNA, 12 bp, Artificial Sequence
  Oligonucleotide primer for the detection of SNP TSC0035931
tcccaatcctcc

SEQ ID NO: 331031 - DNA, 12 bp, Artificial Sequence
  Oligonucleotide primer for the detection of SNP TSC0035931
tttgggtaaaag

SEQ ID NO: 331032 - DNA, 12 bp, Artificial Sequence
  Oligonucleotide primer for the detection of SNP TSC0035932
aaaccaaacacc

SEQ ID NO: 331033 - DNA, 12 bp, Artificial Sequence
  Oligonukleotid-Primer
ccctaccaacct

SEQ ID NO: 331034 - DNA, 12 bp, Artificial Sequence
  Oligonucleotide primer for the detection of SNP TSC0035932
gggttaggtatt

SEQ ID NO: 331035 - DNA, 12 bp, Artificial Sequence
  Oligonucleotide primer for the detection of SNP TSC0035935
caaccaaatatt

SEQ ID NO: 331036 - DNA, 12 bp, Artificial Sequence
  Oligonucleotide primer for the detection of SNP TSC0035935
ttttttcgtggg

SEQ ID NO: 331037 - DNA, 12 bp, Artificial Sequence
  Oligonucleotide primer for the detection of SNP TSC0035935
tttttttgcggg

SEQ ID NO: 331038 - DNA, 12 bp, Artificial Sequence
  Oligonucleotide primer for the detection of SNP TSC0035935
ttttttcgcggg

SEQ ID NO: 331039 - DNA, 12 bp, Artificial Sequence
  Oligonucleotide primer for the detection of SNP TSC0035936
aacaaaatcaaa

SEQ ID NO: 331040 - DNA, 12 bp, Artificial Sequence
  Oligonucleotide primer for the detection of SNP TSC0035936
aacaaaatcgaa

SEQ ID NO: 331041 - DNA, 12 bp, Artificial Sequence
  Oligonucleotide primer for the detection of SNP TSC0035936
aacgaaatcaaa

SEQ ID NO: 331042 - DNA, 12 bp, Artificial Sequence
  Oligonucleotide primer for the detection of SNP TSC0035936
aacgaaatcgaa

SEQ ID NO: 331043 - DNA, 12 bp, Artificial Sequence
  Oligonucleotide primer for the detection of SNP TSC0035936
atcgttttgttt

SEQ ID NO: 331044 - DNA, 12 bp, Artificial Sequence
  Oligonucleotide primer for the detection of SNP TSC0035936
accaccctaccc

SEQ ID NO: 331045 - DNA, 12 bp, Artificial Sequence
  Oligonucleotide primer for the detection of SNP TSC0035936
accgccctaccc

SEQ ID NO: 331046 - DNA, 12 bp, Artificial Sequence
  Oligonucleotide primer for the detection of SNP TSC0035936
gatggggttggg

SEQ ID NO: 331047 - DNA, 12 bp, Artificial Sequence
  Oligonucleotide primer for the detection of SNP TSC0035936
gacggggttggg

SEQ ID NO: 331048 - DNA, 12 bp, Artificial Sequence
  Oligonucleotide primer for the detection of SNP TSC0035936
gatggggtcggg

SEQ ID NO: 331049 - DNA, 12 bp, Artificial Sequence
  Oligonucleotide primer for the detection of SNP TSC0035936
gacggggtcggg

SEQ ID NO: 331050 - DNA, 12 bp, Artificial Sequence
  Oligonucleotide primer for the detection of SNP TSC0035938
acaacctcaaaa

SEQ ID NO: 331051 - DNA, 12 bp, Artificial Sequence
  Oligonucleotide primer for the detection of SNP TSC0035938
tagatttttggt

SEQ ID NO: 331052 - DNA, 12 bp, Artificial Sequence
  Oligonucleotide primer for the detection of SNP TSC0035938
aatttctaacaa

SEQ ID NO: 331053 - DNA, 12 bp, Artificial Sequence
  Oligonucleotide primer for the detection of SNP TSC0035938
ttgatagtttta

SEQ ID NO: 331054 - DNA, 12 bp, Artificial Sequence
  Oligonucleotide primer for the detection of SNP TSC0035940
aaaaccaaatac

SEQ ID NO: 331055 - DNA, 12 bp, Artificial Sequence
  Oligonucleotide primer for the detection of SNP TSC0035940
ccactcaatcta

SEQ ID NO: 331056 - DNA, 12 bp, Artificial Sequence
  Oligonucleotide primer for the detection of SNP TSC0035941
cattactttaat

SEQ ID NO: 331057 - DNA, 12 bp, Artificial Sequence
  Oligonucleotide primer for the detection of SNP TSC0035941
gggtttgggtta

SEQ ID NO: 331058 - DNA, 12 bp, Artificial Sequence
  Oligonucleotide primer for the detection of SNP TSC0035942
caataaaaatct

SEQ ID NO: 331059 - DNA, 12 bp, Artificial Sequence
  Oligonucleotide primer for the detection of SNP TSC0035942
aatgtgattgag

SEQ ID NO: 331060 - DNA, 12 bp, Artificial Sequence
  Oligonucleotide primer for the detection of SNP TSC0035942
aacgtgattgag

SEQ ID NO: 331061 - DNA, 12 bp, Artificial Sequence
  Oligonucleotide primer for the detection of SNP TSC0035943
cacaaatcctat

SEQ ID NO: 331062 - DNA, 12 bp, Artificial Sequence
  Oligonucleotide primer for the detection of SNP TSC0035943
gaaaagaaatat

SEQ ID NO: 331063 - DNA, 12 bp, Artificial Sequence
  Oligonucleotide primer for the detection of SNP TSC0035943
tatagattttat

SEQ ID NO: 331064 - DNA, 12 bp, Artificial Sequence
  Oligonucleotide primer for the detection of SNP TSC0035951
taaaaaaccctc

SEQ ID NO: 331065 - DNA, 12 bp, Artificial Sequence
  Oligonucleotide primer for the detection of SNP TSC0035951
tattggattaat

SEQ ID NO: 331066 - DNA, 12 bp, Artificial Sequence
  Oligonucleotide primer for the detection of SNP TSC0035951
cactaaattaat

SEQ ID NO: 331067 - DNA, 12 bp, Artificial Sequence
  Oligonucleotide primer for the detection of SNP TSC0035951
taagaaattttt

SEQ ID NO: 331068 - DNA, 12 bp, Artificial Sequence
  Oligonucleotide primer for the detection of SNP TSC0035954
aaaaaactattt

SEQ ID NO: 331069 - DNA, 12 bp, Artificial Sequence
  Oligonucleotide primer for the detection of SNP TSC0035954
ttgaatttttgg

SEQ ID NO: 331070 - DNA, 12 bp, Artificial Sequence
  Oligonucleotide primer for the detection of SNP TSC0035954
tcgaatttttgg

SEQ ID NO: 331071 - DNA, 12 bp, Artificial Sequence
  Oligonucleotide primer for the detection of SNP TSC0035956
gagttttaattg

SEQ ID NO: 331072 - DNA, 12 bp, Artificial Sequence
  Oligonucleotide primer for the detection of SNP TSC0035957
ctattttctcac

SEQ ID NO: 331073 - DNA, 12 bp, Artificial Sequence
  Oligonucleotide primer for the detection of SNP TSC0035959
tcactctctaac

SEQ ID NO: 331074 - DNA, 12 bp, Artificial Sequence
  Oligonucleotide primer for the detection of SNP TSC0035959
agaaggtaggaa

SEQ ID NO: 331075 - DNA, 12 bp, Artificial Sequence
  Oligonucleotide primer for the detection of SNP TSC0035960
caccaaataaca

SEQ ID NO: 331076 - DNA, 12 bp, Artificial Sequence
  Oligonucleotide primer for the detection of SNP TSC0035960
caccaaataacg

SEQ ID NO: 331077 - DNA, 12 bp, Artificial Sequence
  Oligonucleotide primer for the detection of SNP TSC0035960
cgccaaataaca

SEQ ID NO: 331078 - DNA, 12 bp, Artificial Sequence
  Oligonucleotide primer for the detection of SNP TSC0035960
cgccaaataacg

SEQ ID NO: 331079 - DNA, 12 bp, Artificial Sequence
  Oligonucleotide primer for the detection of SNP TSC0035960
tttggtgttatt

SEQ ID NO: 331080 - DNA, 12 bp, Artificial Sequence
  Oligonucleotide primer for the detection of SNP TSC0035960
tttggcgttatt

SEQ ID NO: 331081 - DNA, 12 bp, Artificial Sequence
  Oligonucleotide primer for the detection of SNP TSC0035960
cctaacatcacc

SEQ ID NO: 331082 - DNA, 12 bp, Artificial Sequence
  Oligonucleotide primer for the detection of SNP TSC0035960
cctaacgtcacc

SEQ ID NO: 331083 - DNA, 12 bp, Artificial Sequence
  Oligonucleotide primer for the detection of SNP TSC0035960
tgttaggtggtg

SEQ ID NO: 331084 - DNA, 12 bp, Artificial Sequence
  Oligonucleotide primer for the detection of SNP TSC0035960
cgttaggtggtg

SEQ ID NO: 331085 - DNA, 12 bp, Artificial Sequence
  Oligonucleotide primer for the detection of SNP TSC0035960
tgttaggtggcg

SEQ ID NO: 331086 - DNA, 12 bp, Artificial Sequence
  Oligonucleotide primer for the detection of SNP TSC0035960
cgttaggtggcg

SEQ ID NO: 331087 - DNA, 12 bp, Artificial Sequence
  Oligonucleotide primer for the detection of SNP TSC0035961
acatcttatcta

SEQ ID NO: 331088 - DNA, 12 bp, Artificial Sequence
  Oligonucleotide primer for the detection of SNP TSC0035961
tgtttatggaat

SEQ ID NO: 331089 - DNA, 12 bp, Artificial Sequence
  Oligonucleotide primer for the detection of SNP TSC0035961
tgtttatggaac

SEQ ID NO: 331090 - DNA, 12 bp, Artificial Sequence
  Oligonucleotide primer for the detection of SNP TSC0035961
tatttataaaac

SEQ ID NO: 331091 - DNA, 12 bp, Artificial Sequence
  Oligonucleotide primer for the detection of SNP TSC0035961
agtattttattt

SEQ ID NO: 331092 - DNA, 12 bp, Artificial Sequence
  Oligonucleotide primer for the detection of SNP TSC0035962
caaaaccttcaa

SEQ ID NO: 331093 - DNA, 12 bp, Artificial Sequence
  Oligonucleotide primer for the detection of SNP TSC0035962
agtaaattattt

SEQ ID NO: 331094 - DNA, 12 bp, Artificial Sequence
  Oligonucleotide primer for the detection of SNP TSC0035962
aacaaattatct

SEQ ID NO: 331095 - DNA, 12 bp, Artificial Sequence
  Oligonucleotide primer for the detection of SNP TSC0035962
taaagtttttaa

SEQ ID NO: 331096 - DNA, 12 bp, Artificial Sequence
  Oligonucleotide primer for the detection of SNP TSC0035963
catcctcatccc

SEQ ID NO: 331097 - DNA, 12 bp, Artificial Sequence
  Oligonucleotide primer for the detection of SNP TSC0035963
ttatgtttgttt

SEQ ID NO: 331098 - DNA, 12 bp, Artificial Sequence
  Oligonucleotide primer for the detection of SNP TSC0035963
tcatatctatcc

SEQ ID NO: 331099 - DNA, 12 bp, Artificial Sequence
  Oligonucleotide primer for the detection of SNP TSC0035964
tagttaattaaa

SEQ ID NO: 331100 - DNA, 12 bp, Artificial Sequence
  Oligonucleotide primer for the detection of SNP TSC0035966
aaatcctaccaa

SEQ ID NO: 331101 - DNA, 12 bp, Artificial Sequence
  Oligonucleotide primer for the detection of SNP TSC0035966
tattgtgtattt

SEQ ID NO: 331102 - DNA, 12 bp, Artificial Sequence
  Oligonucleotide primer for the detection of SNP TSC0035966
acattatacacc

SEQ ID NO: 331103 - DNA, 12 bp, Artificial Sequence
  Oligonucleotide primer for the detection of SNP TSC0035966
aagttttattag

SEQ ID NO: 331104 - DNA, 12 bp, Artificial Sequence
  Oligonucleotide primer for the detection of SNP TSC0035967
taacttaaacct

SEQ ID NO: 331105 - DNA, 12 bp, Artificial Sequence
  Oligonucleotide primer for the detection of SNP TSC0035968
cacttatccttc

SEQ ID NO: 331106 - DNA, 12 bp, Artificial Sequence
  Oligonucleotide primer for the detection of SNP TSC0035968
attatttagaaa

SEQ ID NO: 331107 - DNA, 12 bp, Artificial Sequence
  Oligonucleotide primer for the detection of SNP TSC0035969
ccacatctcact

SEQ ID NO: 331108 - DNA, 12 bp, Artificial Sequence
  Oligonucleotide primer for the detection of SNP TSC0035969
ccacatctcgct

SEQ ID NO: 331109 - DNA, 12 bp, Artificial Sequence
  Oligonucleotide primer for the detection of SNP TSC0035977
caattcaacaac

SEQ ID NO: 331110 - DNA, 12 bp, Artificial Sequence
  Oligonucleotide primer for the detection of SNP TSC0035977
cgattcaacaac

SEQ ID NO: 331111 - DNA, 12 bp, Artificial Sequence
  Oligonucleotide primer for the detection of SNP TSC0035977
aggaaatttaaa

SEQ ID NO: 331112 - DNA, 12 bp, Artificial Sequence
  Oligonucleotide primer for the detection of SNP TSC0035978
catcttcccaaa

SEQ ID NO: 331113 - DNA, 12 bp, Artificial Sequence
  Oligonucleotide primer for the detection of SNP TSC0035978
ttgttgttgaat

SEQ ID NO: 331114 - DNA, 12 bp, Artificial Sequence
  Oligonukleotid-Primer
ttactattaaat

SEQ ID NO: 331115 - DNA, 12 bp, Artificial Sequence
  Oligonucleotide primer for the detection of SNP TSC0035983
aatcaaatctcc

SEQ ID NO: 331116 - DNA, 12 bp, Artificial Sequence
  Oligonucleotide primer for the detection of SNP TSC0035983
ttaggtttttga

SEQ ID NO: 331117 - DNA, 12 bp, Artificial Sequence
  Oligonucleotide primer for the detection of SNP TSC0035984
attttgattttg

SEQ ID NO: 331118 - DNA, 12 bp, Artificial Sequence
  Oligonucleotide primer for the detection of SNP TSC0035986
taaaaaaaaatc

SEQ ID NO: 331119 - DNA, 12 bp, Artificial Sequence
  Oligonucleotide primer for the detection of SNP TSC0035986
ttgtggtttatg

SEQ ID NO: 331120 - DNA, 12 bp, Artificial Sequence
  Oligonucleotide primer for the detection of SNP TSC0035991
caataaattcct

SEQ ID NO: 331121 - DNA, 12 bp, Artificial Sequence
  Oligonucleotide primer for the detection of SNP TSC0035993
ctttaataatat

SEQ ID NO: 331122 - DNA, 12 bp, Artificial Sequence
  Oligonucleotide primer for the detection of SNP TSC0035993
tcgttagagtta

SEQ ID NO: 331123 - DNA, 12 bp, Artificial Sequence
  Oligonucleotide primer for the detection of SNP TSC0035994
atatacacaccc

SEQ ID NO: 331124 - DNA, 12 bp, Artificial Sequence
  Oligonucleotide primer for the detection of SNP TSC0035995
tattcttaaaat

SEQ ID NO: 331125 - DNA, 12 bp, Artificial Sequence
  Oligonucleotide primer for the detection of SNP TSC0035995
gtagatgtggaa

SEQ ID NO: 331126 - DNA, 12 bp, Artificial Sequence
  Oligonucleotide primer for the detection of SNP TSC0035995
gtagacgtggaa

SEQ ID NO: 331127 - DNA, 12 bp, Artificial Sequence
  Oligonucleotide primer for the detection of SNP TSC0035995
gtagatgcggaa

SEQ ID NO: 331128 - DNA, 12 bp, Artificial Sequence
  Oligonucleotide primer for the detection of SNP TSC0035995
gtagacgcggaa

SEQ ID NO: 331129 - DNA, 12 bp, Artificial Sequence
  Oligonucleotide primer for the detection of SNP TSC0035995
acaaacacaaaa

SEQ ID NO: 331130 - DNA, 12 bp, Artificial Sequence
  Oligonucleotide primer for the detection of SNP TSC0035995
acaaacacgaaa

SEQ ID NO: 331131 - DNA, 12 bp, Artificial Sequence
  Oligonucleotide primer for the detection of SNP TSC0035995
acaaacgcaaaa

SEQ ID NO: 331132 - DNA, 12 bp, Artificial Sequence
  Oligonucleotide primer for the detection of SNP TSC0035995
acaaacgcgaaa

SEQ ID NO: 331133 - DNA, 12 bp, Artificial Sequence
  Oligonucleotide primer for the detection of SNP TSC0036001
acacaatttcat

SEQ ID NO: 331134 - DNA, 12 bp, Artificial Sequence
  Oligonucleotide primer for the detection of SNP TSC0036001
ttggaagaatta

SEQ ID NO: 331135 - DNA, 12 bp, Artificial Sequence
  Oligonucleotide primer for the detection of SNP TSC0036002
ccataaactaaa

SEQ ID NO: 331136 - DNA, 12 bp, Artificial Sequence
  Oligonucleotide primer for the detection of SNP TSC0036002
tatatataaatt

SEQ ID NO: 331137 - DNA, 12 bp, Artificial Sequence
  Oligonucleotide primer for the detection of SNP TSC0036002
tttatagattag

SEQ ID NO: 331138 - DNA, 12 bp, Artificial Sequence
  Oligonucleotide primer for the detection of SNP TSC0036003
acaaacccctac

SEQ ID NO: 331139 - DNA, 12 bp, Artificial Sequence
  Oligonucleotide primer for the detection of SNP TSC0036003
gttgggggattg

SEQ ID NO: 331140 - DNA, 12 bp, Artificial Sequence
  Oligonucleotide primer for the detection of SNP TSC0036003
gtcgggggattg

SEQ ID NO: 331141 - DNA, 12 bp, Artificial Sequence
  Oligonucleotide primer for the detection of SNP TSC0036006
aaacaaaaaatc

SEQ ID NO: 331142 - DNA, 12 bp, Artificial Sequence
  Oligonucleotide primer for the detection of SNP TSC0036006
aaaatcctcttt

SEQ ID NO: 331143 - DNA, 12 bp, Artificial Sequence
  Oligonucleotide primer for the detection of SNP TSC0036006
aagtagagaatt

SEQ ID NO: 331144 - DNA, 12 bp, Artificial Sequence
  Oligonucleotide primer for the detection of SNP TSC0036009
aatacctaatcc

SEQ ID NO: 331145 - DNA, 12 bp, Artificial Sequence
  Oligonucleotide primer for the detection of SNP TSC0036009
tataatttttaa

SEQ ID NO: 331146 - DNA, 12 bp, Artificial Sequence
  Oligonucleotide primer for the detection of SNP TSC0036010
aaactactaaat

SEQ ID NO: 331147 - DNA, 12 bp, Artificial Sequence
  Oligonucleotide primer for the detection of SNP TSC0036010
gtttttttttga

SEQ ID NO: 331148 - DNA, 12 bp, Artificial Sequence
  Oligonucleotide primer for the detection of SNP TSC0036010
atttcttcctaa

SEQ ID NO: 331149 - DNA, 12 bp, Artificial Sequence
  Oligonucleotide primer for the detection of SNP TSC0036010
aggttattgaat

SEQ ID NO: 331150 - DNA, 12 bp, Artificial Sequence
  Oligonucleotide primer for the detection of SNP TSC0036011
aaacaaatatcc

SEQ ID NO: 331151 - DNA, 12 bp, Artificial Sequence
  Oligonucleotide primer for the detection of SNP TSC0036011
ggaaatgtggaa

SEQ ID NO: 331152 - DNA, 12 bp, Artificial Sequence
  Oligonucleotide primer for the detection of SNP TSC0036011
ggaaatgcggaa

SEQ ID NO: 331153 - DNA, 12 bp, Artificial Sequence
  Oligonucleotide primer for the detection of SNP TSC0036012
atgtggtatttt

SEQ ID NO: 331154 - DNA, 12 bp, Artificial Sequence
  Oligonucleotide primer for the detection of SNP TSC0036012
aaaatataatac

SEQ ID NO: 331155 - DNA, 12 bp, Artificial Sequence
  Oligonucleotide primer for the detection of SNP TSC0036012
gatatgatttat

SEQ ID NO: 331156 - DNA, 12 bp, Artificial Sequence
  Oligonucleotide primer for the detection of SNP TSC0036013
ataaaacataaa

SEQ ID NO: 331157 - DNA, 12 bp, Artificial Sequence
  Oligonucleotide primer for the detection of SNP TSC0036013
tcctcactcctt

SEQ ID NO: 331158 - DNA, 12 bp, Artificial Sequence
  Oligonucleotide primer for the detection of SNP TSC0036013
gtgaaatatgga

SEQ ID NO: 331159 - DNA, 12 bp, Artificial Sequence
  Oligonucleotide primer for the detection of SNP TSC0036018
atgaagtgatgg

SEQ ID NO: 331160 - DNA, 12 bp, Artificial Sequence
  Oligonucleotide primer for the detection of SNP TSC0036018
ataaaataataa

SEQ ID NO: 331161 - DNA, 12 bp, Artificial Sequence
  Oligonucleotide primer for the detection of SNP TSC0036019
tttctttattcc

SEQ ID NO: 331162 - DNA, 12 bp, Artificial Sequence
  Oligonucleotide primer for the detection of SNP TSC0036019
atagttagagaa

SEQ ID NO: 331163 - DNA, 12 bp, Artificial Sequence
  Oligonucleotide primer for the detection of SNP TSC0036024
attgtagatgaa

SEQ ID NO: 331164 - DNA, 12 bp, Artificial Sequence
  Oligonucleotide primer for the detection of SNP TSC0036025
ccactaaaacca

SEQ ID NO: 331165 - DNA, 12 bp, Artificial Sequence
  Oligonucleotide primer for the detection of SNP TSC0036025
tagtaagggaaa

SEQ ID NO: 331166 - DNA, 12 bp, Artificial Sequence
  Oligonucleotide primer for the detection of SNP TSC0036025
ttattgggatta

SEQ ID NO: 331167 - DNA, 12 bp, Artificial Sequence
  Oligonucleotide primer for the detection of SNP TSC0036027
acaattataaca

SEQ ID NO: 331168 - DNA, 12 bp, Artificial Sequence
  Oligonucleotide primer for the detection of SNP TSC0036027
ttttatagaatt

SEQ ID NO: 331169 - DNA, 12 bp, Artificial Sequence
  Oligonucleotide primer for the detection of SNP TSC0036027
ttttatagaatc

SEQ ID NO: 331170 - DNA, 12 bp, Artificial Sequence
  Oligonucleotide primer for the detection of SNP TSC0036027
cctcataaaatc

SEQ ID NO: 331171 - DNA, 12 bp, Artificial Sequence
  Oligonucleotide primer for the detection of SNP TSC0036027
tataattatgat

SEQ ID NO: 331172 - DNA, 12 bp, Artificial Sequence
  Oligonucleotide primer for the detection of SNP TSC0036028
cttctcattaat

SEQ ID NO: 331173 - DNA, 12 bp, Artificial Sequence
  Oligonucleotide primer for the detection of SNP TSC0036028
tagaggtaagaa

SEQ ID NO: 331174 - DNA, 12 bp, Artificial Sequence
  Oligonucleotide primer for the detection of SNP TSC0036029
ataaattcttat

SEQ ID NO: 331175 - DNA, 12 bp, Artificial Sequence
  Oligonucleotide primer for the detection of SNP TSC0036029
ttctttaattaa

SEQ ID NO: 331176 - DNA, 12 bp, Artificial Sequence
  Oligonucleotide primer for the detection of SNP TSC0036030
aattaacattaa

SEQ ID NO: 331177 - DNA, 12 bp, Artificial Sequence
  Oligonucleotide primer for the detection of SNP TSC0036030
ttattgttaagt

SEQ ID NO: 331178 - DNA, 12 bp, Artificial Sequence
  Oligonucleotide primer for the detection of SNP TSC0036030
tcactaccaaat

SEQ ID NO: 331179 - DNA, 12 bp, Artificial Sequence
  Oligonucleotide primer for the detection of SNP TSC0036030
aattggtattga

SEQ ID NO: 331180 - DNA, 12 bp, Artificial Sequence
  Oligonucleotide primer for the detection of SNP TSC0036032
tataccatcttt

SEQ ID NO: 331181 - DNA, 12 bp, Artificial Sequence
  Oligonucleotide primer for the detection of SNP TSC0036032
ttggaattttaa

SEQ ID NO: 331182 - DNA, 12 bp, Artificial Sequence
  Oligonucleotide primer for the detection of SNP TSC0036033
ttatatgtgttt

SEQ ID NO: 331183 - DNA, 12 bp, Artificial Sequence
  Oligonucleotide primer for the detection of SNP TSC0036033
tatccatatata

SEQ ID NO: 331184 - DNA, 12 bp, Artificial Sequence
  Oligonucleotide primer for the detection of SNP TSC0036033
aaaaaagtattc

SEQ ID NO: 331185 - DNA, 12 bp, Artificial Sequence
  Oligonucleotide primer for the detection of SNP TSC0036034
acaacaccaaat

SEQ ID NO: 331186 - DNA, 12 bp, Artificial Sequence
  Oligonucleotide primer for the detection of SNP TSC0036034
gatggaggtgga

SEQ ID NO: 331187 - DNA, 12 bp, Artificial Sequence
  Oligonucleotide primer for the detection of SNP TSC0036035
caaactaaatcc

SEQ ID NO: 331188 - DNA, 12 bp, Artificial Sequence
  Oligonucleotide primer for the detection of SNP TSC0036035
ggtggtatttta

SEQ ID NO: 331189 - DNA, 12 bp, Artificial Sequence
  Oligonucleotide primer for the detection of SNP TSC0036035
aataatacccca

SEQ ID NO: 331190 - DNA, 12 bp, Artificial Sequence
  Oligonucleotide primer for the detection of SNP TSC0036036
aaactaacacaa

SEQ ID NO: 331191 - DNA, 12 bp, Artificial Sequence
  Oligonucleotide primer for the detection of SNP TSC0036036
gaaggttgtagg

SEQ ID NO: 331192 - DNA, 12 bp, Artificial Sequence
  Oligonucleotide primer for the detection of SNP TSC0036036
agttgatataat

SEQ ID NO: 331193 - DNA, 12 bp, Artificial Sequence
  Oligonucleotide primer for the detection of SNP TSC0036037
cctaatataaat

SEQ ID NO: 331194 - DNA, 12 bp, Artificial Sequence
  Oligonucleotide primer for the detection of SNP TSC0036037
tgagtagagata

SEQ ID NO: 331195 - DNA, 12 bp, Artificial Sequence
  Oligonucleotide primer for the detection of SNP TSC0036037
tttagtgtgagt

SEQ ID NO: 331196 - DNA, 12 bp, Artificial Sequence
  Oligonucleotide primer for the detection of SNP TSC0036040
ttcttaaaaaaa

SEQ ID NO: 331197 - DNA, 12 bp, Artificial Sequence
  Oligonucleotide primer for the detection of SNP TSC0036040
tgagttttagtt

SEQ ID NO: 331198 - DNA, 12 bp, Artificial Sequence
  Oligonucleotide primer for the detection of SNP TSC0036040
ctaaacctcaac

SEQ ID NO: 331199 - DNA, 12 bp, Artificial Sequence
  Oligonucleotide primer for the detection of SNP TSC0036040
ttttttgaggag

SEQ ID NO: 331200 - DNA, 12 bp, Artificial Sequence
  Oligonucleotide primer for the detection of SNP TSC0036047
aaaagaatttga

SEQ ID NO: 331201 - DNA, 12 bp, Artificial Sequence
  Oligonucleotide primer for the detection of SNP TSC0036047
aaaaaaatctaa

SEQ ID NO: 331202 - DNA, 12 bp, Artificial Sequence
  Oligonucleotide primer for the detection of SNP TSC0036047
ggtatatttagt

SEQ ID NO: 331203 - DNA, 12 bp, Artificial Sequence
  Oligonucleotide primer for the detection of SNP TSC0036047
ggtatatttagc

SEQ ID NO: 331204 - DNA, 12 bp, Artificial Sequence
  Oligonucleotide primer for the detection of SNP TSC0036049
aactcttctaaa

SEQ ID NO: 331205 - DNA, 12 bp, Artificial Sequence
  Oligonucleotide primer for the detection of SNP TSC0036049
gaagtagagtag

SEQ ID NO: 331206 - DNA, 12 bp, Artificial Sequence
  Oligonucleotide primer for the detection of SNP TSC0036049
agtttttttaga

SEQ ID NO: 331207 - DNA, 12 bp, Artificial Sequence
  Oligonucleotide primer for the detection of SNP TSC0036050
ataacaatcttt

SEQ ID NO: 331208 - DNA, 12 bp, Artificial Sequence
  Oligonucleotide primer for the detection of SNP TSC0036050
ttataaagaatg

SEQ ID NO: 331209 - DNA, 12 bp, Artificial Sequence
  Oligonucleotide primer for the detection of SNP TSC0036050
atagtagttttt

SEQ ID NO: 331210 - DNA, 12 bp, Artificial Sequence
  Oligonucleotide primer for the detection of SNP TSC0036051
acctactatcat

SEQ ID NO: 331211 - DNA, 12 bp, Artificial Sequence
  Oligonucleotide primer for the detection of SNP TSC0036051
acctactatcgt

SEQ ID NO: 331212 - DNA, 12 bp, Artificial Sequence
  Oligonucleotide primer for the detection of SNP TSC0036051
atgtagatttaa

SEQ ID NO: 331213 - DNA, 12 bp, Artificial Sequence
  Oligonucleotide primer for the detection of SNP TSC0036051
acgtagatttaa

SEQ ID NO: 331214 - DNA, 12 bp, Artificial Sequence
  Oligonucleotide primer for the detection of SNP TSC0036052
ataaccataaaa

SEQ ID NO: 331215 - DNA, 12 bp, Artificial Sequence
  Oligonucleotide primer for the detection of SNP TSC0036052
ttaagatagaga

SEQ ID NO: 331216 - DNA, 12 bp, Artificial Sequence
  Oligonucleotide primer for the detection of SNP TSC0036052
tcaaaataaaaa

SEQ ID NO: 331217 - DNA, 12 bp, Artificial Sequence
  Oligonucleotide primer for the detection of SNP TSC0036052
gtgattatagga

SEQ ID NO: 331218 - DNA, 12 bp, Artificial Sequence
  Oligonucleotide primer for the detection of SNP TSC0036054
cttcctttcttc

SEQ ID NO: 331219 - DNA, 12 bp, Artificial Sequence
  Oligonucleotide primer for the detection of SNP TSC0036054
aaagatggtata

SEQ ID NO: 331220 - DNA, 12 bp, Artificial Sequence
  Oligonucleotide primer for the detection of SNP TSC0036057
acaaaaaaaatt

SEQ ID NO: 331221 - DNA, 12 bp, Artificial Sequence
  Oligonucleotide primer for the detection of SNP TSC0036057
tttcgattttta

SEQ ID NO: 331222 - DNA, 12 bp, Artificial Sequence
  Oligonucleotide primer for the detection of SNP TSC0036058
atatatccacct

SEQ ID NO: 331223 - DNA, 12 bp, Artificial Sequence
  Oligonucleotide primer for the detection of SNP TSC0036058
tttaagttaagg

SEQ ID NO: 331224 - DNA, 12 bp, Artificial Sequence
  Oligonucleotide primer for the detection of SNP TSC0036059
taaataatatat

SEQ ID NO: 331225 - DNA, 12 bp, Artificial Sequence
  Oligonucleotide primer for the detection of SNP TSC0036059
gtgtggtttata

SEQ ID NO: 331226 - DNA, 12 bp, Artificial Sequence
  Oligonucleotide primer for the detection of SNP TSC0036059
gcgtggtttata

SEQ ID NO: 331227 - DNA, 12 bp, Artificial Sequence
  Oligonucleotide primer for the detection of SNP TSC0036060
ttgtgatttgga

SEQ ID NO: 331228 - DNA, 12 bp, Artificial Sequence
  Oligonucleotide primer for the detection of SNP TSC0036061
ttatttatttgg

SEQ ID NO: 331229 - DNA, 12 bp, Artificial Sequence
  Oligonucleotide primer for the detection of SNP TSC0036063
ttctccctcacc

SEQ ID NO: 331230 - DNA, 12 bp, Artificial Sequence
  Oligonucleotide primer for the detection of SNP TSC0036063
tggaaaatgttg

SEQ ID NO: 331231 - DNA, 12 bp, Artificial Sequence
  Oligonucleotide primer for the detection of SNP TSC0036064
tccaactccctc

SEQ ID NO: 331232 - DNA, 12 bp, Artificial Sequence
  Oligonucleotide primer for the detection of SNP TSC0036064
tagtgggggtgg

SEQ ID NO: 331233 - DNA, 12 bp, Artificial Sequence
  Oligonucleotide primer for the detection of SNP TSC0036064
tagtgggggcgg

SEQ ID NO: 331234 - DNA, 12 bp, Artificial Sequence
  Oligonucleotide primer for the detection of SNP TSC0036066
aaaaatattctt

SEQ ID NO: 331235 - DNA, 12 bp, Artificial Sequence
  Oligonucleotide primer for the detection of SNP TSC0036066
gttattgtataa

SEQ ID NO: 331236 - DNA, 12 bp, Artificial Sequence
  Oligonucleotide primer for the detection of SNP TSC0036067
aaaaatacacac

SEQ ID NO: 331237 - DNA, 12 bp, Artificial Sequence
  Oligonucleotide primer for the detection of SNP TSC0036067
tgagaataattg

SEQ ID NO: 331238 - DNA, 12 bp, Artificial Sequence
  Oligonucleotide primer for the detection of SNP TSC0036067
cgagaataattg

SEQ ID NO: 331239 - DNA, 12 bp, Artificial Sequence
  Oligonucleotide primer for the detection of SNP TSC0036069
ttaaaaggataa

SEQ ID NO: 331240 - DNA, 12 bp, Artificial Sequence
  Oligonucleotide primer for the detection of SNP TSC0036070
atttacaaataa

SEQ ID NO: 331241 - DNA, 12 bp, Artificial Sequence
  Oligonucleotide primer for the detection of SNP TSC0036070
aaatataaaaac

SEQ ID NO: 331242 - DNA, 12 bp, Artificial Sequence
  Oligonucleotide primer for the detection of SNP TSC0036070
gtttgtagataa

SEQ ID NO: 331243 - DNA, 12 bp, Artificial Sequence
  Oligonucleotide primer for the detection of SNP TSC0036071
atcataaccttt

SEQ ID NO: 331244 - DNA, 12 bp, Artificial Sequence
  Oligonucleotide primer for the detection of SNP TSC0036071
tattattataga

SEQ ID NO: 331245 - DNA, 12 bp, Artificial Sequence
  Oligonucleotide primer for the detection of SNP TSC0036076
accatatcaaat

SEQ ID NO: 331246 - DNA, 12 bp, Artificial Sequence
  Oligonucleotide primer for the detection of SNP TSC0036076
ggtatgatttga

SEQ ID NO: 331247 - DNA, 12 bp, Artificial Sequence
  Oligonucleotide primer for the detection of SNP TSC0036076
attatgttagat

SEQ ID NO: 331248 - DNA, 12 bp, Artificial Sequence
  Oligonucleotide primer for the detection of SNP TSC0036082
aaataacttatc

SEQ ID NO: 331249 - DNA, 12 bp, Artificial Sequence
  Oligonucleotide primer for the detection of SNP TSC0036083
attttggttggg

SEQ ID NO: 331250 - DNA, 12 bp, Artificial Sequence
  Oligonucleotide primer for the detection of SNP TSC0036083
atttcggttggg

SEQ ID NO: 331251 - DNA, 12 bp, Artificial Sequence
  Oligonucleotide primer for the detection of SNP TSC0036083
acctcaactaaa

SEQ ID NO: 331252 - DNA, 12 bp, Artificial Sequence
  Oligonucleotide primer for the detection of SNP TSC0036083
acctcgactaaa

SEQ ID NO: 331253 - DNA, 12 bp, Artificial Sequence
  Oligonucleotide primer for the detection of SNP TSC0036083
gtgagttattgt

SEQ ID NO: 331254 - DNA, 12 bp, Artificial Sequence
  Oligonucleotide primer for the detection of SNP TSC0036083
gtgagttatcgt

SEQ ID NO: 331255 - DNA, 12 bp, Artificial Sequence
  Oligonucleotide primer for the detection of SNP TSC0036084
tacaattcacaa

SEQ ID NO: 331256 - DNA, 12 bp, Artificial Sequence
  Oligonucleotide primer for the detection of SNP TSC0036084
gagtgggaattt

SEQ ID NO: 331257 - DNA, 12 bp, Artificial Sequence
  Oligonucleotide primer for the detection of SNP TSC0036084
gtagtttataat

SEQ ID NO: 331258 - DNA, 12 bp, Artificial Sequence
  Oligonucleotide primer for the detection of SNP TSC0036085
aaaatactataa

SEQ ID NO: 331259 - DNA, 12 bp, Artificial Sequence
  Oligonucleotide primer for the detection of SNP TSC0036085
ttatagtgtttt

SEQ ID NO: 331260 - DNA, 12 bp, Artificial Sequence
  Oligonucleotide primer for the detection of SNP TSC0036085
aattcacaatac

SEQ ID NO: 331261 - DNA, 12 bp, Artificial Sequence
  Oligonucleotide primer for the detection of SNP TSC0036085
tagaggtgttgt

SEQ ID NO: 331262 - DNA, 12 bp, Artificial Sequence
  Oligonucleotide primer for the detection of SNP TSC0036086
tttaatatataa

SEQ ID NO: 331263 - DNA, 12 bp, Artificial Sequence
  Oligonucleotide primer for the detection of SNP TSC0036087
ccatatatactt

SEQ ID NO: 331264 - DNA, 12 bp, Artificial Sequence
  Oligonucleotide primer for the detection of SNP TSC0036087
tgtaatattatg

SEQ ID NO: 331265 - DNA, 12 bp, Artificial Sequence
  Oligonucleotide primer for the detection of SNP TSC0036088
tggggatttagt

SEQ ID NO: 331266 - DNA, 12 bp, Artificial Sequence
  Oligonucleotide primer for the detection of SNP TSC0036088
ctaaaaacccaa

SEQ ID NO: 331267 - DNA, 12 bp, Artificial Sequence
  Oligonucleotide primer for the detection of SNP TSC0036088
gattgaaggaga

SEQ ID NO: 331268 - DNA, 12 bp, Artificial Sequence
  Oligonucleotide primer for the detection of SNP TSC0036089
tctttattctca

SEQ ID NO: 331269 - DNA, 12 bp, Artificial Sequence
  Oligonucleotide primer for the detection of SNP TSC0036089
aatattttttgt

SEQ ID NO: 331270 - DNA, 12 bp, Artificial Sequence
  Oligonucleotide primer for the detection of SNP TSC0036089
aacattttttac

SEQ ID NO: 331271 - DNA, 12 bp, Artificial Sequence
  Oligonucleotide primer for the detection of SNP TSC0036090
accatatataaa

SEQ ID NO: 331272 - DNA, 12 bp, Artificial Sequence
  Oligonucleotide primer for the detection of SNP TSC0036090
tttatgatgtgt

SEQ ID NO: 331273 - DNA, 12 bp, Artificial Sequence
  Oligonucleotide primer for the detection of SNP TSC0036090
tctataatatac

SEQ ID NO: 331274 - DNA, 12 bp, Artificial Sequence
  Oligonucleotide primer for the detection of SNP TSC0036090
gttatgtgtgga

SEQ ID NO: 331275 - DNA, 12 bp, Artificial Sequence
  Oligonucleotide primer for the detection of SNP TSC0036091
tatatatatttc

SEQ ID NO: 331276 - DNA, 12 bp, Artificial Sequence
  Oligonucleotide primer for the detection of SNP TSC0036091
aaacgttttttt

SEQ ID NO: 331277 - DNA, 12 bp, Artificial Sequence
  Oligonucleotide primer for the detection of SNP TSC0036091
aaacactttctt

SEQ ID NO: 331278 - DNA, 12 bp, Artificial Sequence
  Oligonucleotide primer for the detection of SNP TSC0036091
aaacgctttctt

SEQ ID NO: 331279 - DNA, 12 bp, Artificial Sequence
  Oligonucleotide primer for the detection of SNP TSC0036091
tgtgtgtgtttt

SEQ ID NO: 331280 - DNA, 12 bp, Artificial Sequence
  Oligonucleotide primer for the detection of SNP TSC0036096
ctcaatctaaca

SEQ ID NO: 331281 - DNA, 12 bp, Artificial Sequence
  Oligonucleotide primer for the detection of SNP TSC0036096
ttaaaaattaca

SEQ ID NO: 331282 - DNA, 12 bp, Artificial Sequence
  Oligonucleotide primer for the detection of SNP TSC0036096
atttaatttagt

SEQ ID NO: 331283 - DNA, 12 bp, Artificial Sequence
  Oligonucleotide primer for the detection of SNP TSC0036097
taatgaatttat

SEQ ID NO: 331284 - DNA, 12 bp, Artificial Sequence
  Oligonucleotide primer for the detection of SNP TSC0036097
ttaataaactca

SEQ ID NO: 331285 - DNA, 12 bp, Artificial Sequence
  Oligonucleotide primer for the detection of SNP TSC0036097
gttatgtggaat

SEQ ID NO: 331286 - DNA, 12 bp, Artificial Sequence
  Oligonucleotide primer for the detection of SNP TSC0036098
aaaacataatat

SEQ ID NO: 331287 - DNA, 12 bp, Artificial Sequence
  Oligonucleotide primer for the detection of SNP TSC0036098
tattttggttta

SEQ ID NO: 331288 - DNA, 12 bp, Artificial Sequence
  Oligonucleotide primer for the detection of SNP TSC0036100
acttcttaacta

SEQ ID NO: 331289 - DNA, 12 bp, Artificial Sequence
  Oligonucleotide primer for the detection of SNP TSC0036100
ataaagtggaat

SEQ ID NO: 331290 - DNA, 12 bp, Artificial Sequence
  Oligonucleotide primer for the detection of SNP TSC0036100
ttttttaattac

SEQ ID NO: 331291 - DNA, 12 bp, Artificial Sequence
  Oligonucleotide primer for the detection of SNP TSC0036101
ttaaaagttttt

SEQ ID NO: 331292 - DNA, 12 bp, Artificial Sequence
  Oligonucleotide primer for the detection of SNP TSC0036101
ctaaaaactctc

SEQ ID NO: 331293 - DNA, 12 bp, Artificial Sequence
  Oligonucleotide primer for the detection of SNP TSC0036102
aaattattatgg

SEQ ID NO: 331294 - DNA, 12 bp, Artificial Sequence
  Oligonucleotide primer for the detection of SNP TSC0036102
aaaccactataa

SEQ ID NO: 331295 - DNA, 12 bp, Artificial Sequence
  Oligonucleotide primer for the detection of SNP TSC0036106
tcaaataaaaat

SEQ ID NO: 331296 - DNA, 12 bp, Artificial Sequence
  Oligonucleotide primer for the detection of SNP TSC0036106
tttgtttgataa

SEQ ID NO: 331297 - DNA, 12 bp, Artificial Sequence
  Oligonucleotide primer for the detection of SNP TSC0036106
tttgttcgataa

SEQ ID NO: 331298 - DNA, 12 bp, Artificial Sequence
  Oligonucleotide primer for the detection of SNP TSC0036106
cttactcaacaa

SEQ ID NO: 331299 - DNA, 12 bp, Artificial Sequence
  Oligonucleotide primer for the detection of SNP TSC0036106
cttactcgacaa

SEQ ID NO: 331300 - DNA, 12 bp, Artificial Sequence
  Oligonucleotide primer for the detection of SNP TSC0036107
ttttcttcctcc

SEQ ID NO: 331301 - DNA, 12 bp, Artificial Sequence
  Oligonucleotide primer for the detection of SNP TSC0036107
gaggaggaggag

SEQ ID NO: 331302 - DNA, 12 bp, Artificial Sequence
  Oligonucleotide primer for the detection of SNP TSC0036110
tttagttttagt

SEQ ID NO: 331303 - DNA, 12 bp, Artificial Sequence
  Oligonucleotide primer for the detection of SNP TSC0036110
tccaacctcaac

SEQ ID NO: 331304 - DNA, 12 bp, Artificial Sequence
  Oligonucleotide primer for the detection of SNP TSC0036112
agtttgggcgat

SEQ ID NO: 331305 - DNA, 12 bp, Artificial Sequence
  Oligonucleotide primer for the detection of SNP TSC0036112
aacctaaacgac

SEQ ID NO: 331306 - DNA, 12 bp, Artificial Sequence
  Oligonucleotide primer for the detection of SNP TSC0036116
gttgtagtattg

SEQ ID NO: 331307 - DNA, 12 bp, Artificial Sequence
  Oligonucleotide primer for the detection of SNP TSC0036118
aaaaattcacaa

SEQ ID NO: 331308 - DNA, 12 bp, Artificial Sequence
  Oligonucleotide primer for the detection of SNP TSC0036118
gtaatttttttt

SEQ ID NO: 331309 - DNA, 12 bp, Artificial Sequence
  Oligonucleotide primer for the detection of SNP TSC0036118
tacaattccctc

SEQ ID NO: 331310 - DNA, 12 bp, Artificial Sequence
  Oligonucleotide primer for the detection of SNP TSC0036118
gggagtttatag

SEQ ID NO: 331311 - DNA, 12 bp, Artificial Sequence
  Oligonucleotide primer for the detection of SNP TSC0036119
attctccaatat

SEQ ID NO: 331312 - DNA, 12 bp, Artificial Sequence
  Oligonucleotide primer for the detection of SNP TSC0036119
aagtttatgaat

SEQ ID NO: 331313 - DNA, 12 bp, Artificial Sequence
  Oligonucleotide primer for the detection of SNP TSC0036119
aaatccataaac

SEQ ID NO: 331314 - DNA, 12 bp, Artificial Sequence
  Oligonucleotide primer for the detection of SNP TSC0036119
gttttttaatgt

SEQ ID NO: 331315 - DNA, 12 bp, Artificial Sequence
  Oligonucleotide primer for the detection of SNP TSC0036120
caaacctcatca

SEQ ID NO: 331316 - DNA, 12 bp, Artificial Sequence
  Oligonucleotide primer for the detection of SNP TSC0036120
caaacctcatcg

SEQ ID NO: 331317 - DNA, 12 bp, Artificial Sequence
  Oligonucleotide primer for the detection of SNP TSC0036120
cgaacctcatca

SEQ ID NO: 331318 - DNA, 12 bp, Artificial Sequence
  Oligonucleotide primer for the detection of SNP TSC0036120
cgaacctcatcg

SEQ ID NO: 331319 - DNA, 12 bp, Artificial Sequence
  Oligonucleotide primer for the detection of SNP TSC0036120
ttattaagggat

SEQ ID NO: 331320 - DNA, 12 bp, Artificial Sequence
  Oligonucleotide primer for the detection of SNP TSC0036120
ttattaagggac

SEQ ID NO: 331321 - DNA, 12 bp, Artificial Sequence
  Oligonucleotide primer for the detection of SNP TSC0036120
gtgggttttatt

SEQ ID NO: 331322 - DNA, 12 bp, Artificial Sequence
  Oligonucleotide primer for the detection of SNP TSC0036120
gcgggttttatt

SEQ ID NO: 331323 - DNA, 12 bp, Artificial Sequence
  Oligonucleotide primer for the detection of SNP TSC0036120
gtgggttttatc

SEQ ID NO: 331324 - DNA, 12 bp, Artificial Sequence
  Oligonucleotide primer for the detection of SNP TSC0036120
gcgggttttatc

SEQ ID NO: 331325 - DNA, 12 bp, Artificial Sequence
  Oligonucleotide primer for the detection of SNP TSC0036121
aaaaaccataaa

SEQ ID NO: 331326 - DNA, 12 bp, Artificial Sequence
  Oligonucleotide primer for the detection of SNP TSC0036121
aaaaaccgtaaa

SEQ ID NO: 331327 - DNA, 12 bp, Artificial Sequence
  Oligonucleotide primer for the detection of SNP TSC0036121
aggtattagtat

SEQ ID NO: 331328 - DNA, 12 bp, Artificial Sequence
  Oligonucleotide primer for the detection of SNP TSC0036121
aatatcaataca

SEQ ID NO: 331329 - DNA, 12 bp, Artificial Sequence
  Oligonucleotide primer for the detection of SNP TSC0036121
aaaattgtgaat

SEQ ID NO: 331330 - DNA, 12 bp, Artificial Sequence
  Oligonucleotide primer for the detection of SNP TSC0036121
aaaatcgtgaat

SEQ ID NO: 331331 - DNA, 12 bp, Artificial Sequence
  Oligonucleotide primer for the detection of SNP TSC0036123
ccttaaaattct

SEQ ID NO: 331332 - DNA, 12 bp, Artificial Sequence
  Oligonucleotide primer for the detection of SNP TSC0036123
ttgggggtaagg

SEQ ID NO: 331333 - DNA, 12 bp, Artificial Sequence
  Oligonucleotide primer for the detection of SNP TSC0036124
gtatttttatgt

SEQ ID NO: 331334 - DNA, 12 bp, Artificial Sequence
  Oligonucleotide primer for the detection of SNP TSC0036124
acatcctcatat

SEQ ID NO: 331335 - DNA, 12 bp, Artificial Sequence
  Oligonucleotide primer for the detection of SNP TSC0036124
ttgtttttaaaa

SEQ ID NO: 331336 - DNA, 12 bp, Artificial Sequence
  Oligonucleotide primer for the detection of SNP TSC0036127
acctctcaccaa

SEQ ID NO: 331337 - DNA, 12 bp, Artificial Sequence
  Oligonucleotide primer for the detection of SNP TSC0036127
tagattagagag

SEQ ID NO: 331338 - DNA, 12 bp, Artificial Sequence
  Oligonucleotide primer for the detection of SNP TSC0036129
acctctaatata

SEQ ID NO: 331339 - DNA, 12 bp, Artificial Sequence
  Oligonucleotide primer for the detection of SNP TSC0036129
agatgttaggtt

SEQ ID NO: 331340 - DNA, 12 bp, Artificial Sequence
  Oligonucleotide primer for the detection of SNP TSC0036129
agacgttaggtt

SEQ ID NO: 331341 - DNA, 12 bp, Artificial Sequence
  Oligonucleotide primer for the detection of SNP TSC0036129
aaacaccaaact

SEQ ID NO: 331342 - DNA, 12 bp, Artificial Sequence
  Oligonucleotide primer for the detection of SNP TSC0036129
aaacgccaaact

SEQ ID NO: 331343 - DNA, 12 bp, Artificial Sequence
  Oligonucleotide primer for the detection of SNP TSC0036129
gtttttggtgtg

SEQ ID NO: 331344 - DNA, 12 bp, Artificial Sequence
  Oligonucleotide primer for the detection of SNP TSC0036131
tacttatctcac

SEQ ID NO: 331345 - DNA, 12 bp, Artificial Sequence
  Oligonucleotide primer for the detection of SNP TSC0036131
gtagtggaaaat

SEQ ID NO: 331346 - DNA, 12 bp, Artificial Sequence
  Oligonucleotide primer for the detection of SNP TSC0036139
ctactaataaat

SEQ ID NO: 331347 - DNA, 12 bp, Artificial Sequence
  Oligonucleotide primer for the detection of SNP TSC0036139
tttggaatgtat

SEQ ID NO: 331348 - DNA, 12 bp, Artificial Sequence
  Oligonucleotide primer for the detection of SNP TSC0036139
cctaaaatacac

SEQ ID NO: 331349 - DNA, 12 bp, Artificial Sequence
  Oligonucleotide primer for the detection of SNP TSC0036139
ttattaatagat

SEQ ID NO: 331350 - DNA, 12 bp, Artificial Sequence
  Oligonucleotide primer for the detection of SNP TSC0036140
ctcatacaatta

SEQ ID NO: 331351 - DNA, 12 bp, Artificial Sequence
  Oligonucleotide primer for the detection of SNP TSC0036140
acttctcatata

SEQ ID NO: 331352 - DNA, 12 bp, Artificial Sequence
  Oligonucleotide primer for the detection of SNP TSC0036140
ttttatataatt

SEQ ID NO: 331353 - DNA, 12 bp, Artificial Sequence
  Oligonucleotide primer for the detection of SNP TSC0036141
cctccctttctc

SEQ ID NO: 331354 - DNA, 12 bp, Artificial Sequence
  Oligonucleotide primer for the detection of SNP TSC0036141
agttatttaaaa

SEQ ID NO: 331355 - DNA, 12 bp, Artificial Sequence
  Oligonucleotide primer for the detection of SNP TSC0036141
aatcacccaaaa

SEQ ID NO: 331356 - DNA, 12 bp, Artificial Sequence
  Oligonucleotide primer for the detection of SNP TSC0036144
atcccctctccc

SEQ ID NO: 331357 - DNA, 12 bp, Artificial Sequence
  Oligonucleotide primer for the detection of SNP TSC0036144
taaattaaggag

SEQ ID NO: 331358 - DNA, 12 bp, Artificial Sequence
  Oligonucleotide primer for the detection of SNP TSC0036145
aaaatctataaa

SEQ ID NO: 331359 - DNA, 12 bp, Artificial Sequence
  Oligonucleotide primer for the detection of SNP TSC0036145
gagtatagttag

SEQ ID NO: 331360 - DNA, 12 bp, Artificial Sequence
  Oligonucleotide primer for the detection of SNP TSC0036145
tgaggtttgtaa

SEQ ID NO: 331361 - DNA, 12 bp, Artificial Sequence
  Oligonucleotide primer for the detection of SNP TSC0036151
aaccctaaactt

SEQ ID NO: 331362 - DNA, 12 bp, Artificial Sequence
  Oligonucleotide primer for the detection of SNP TSC0036151
tttatatatagt

SEQ ID NO: 331363 - DNA, 12 bp, Artificial Sequence
  Oligonucleotide primer for the detection of SNP TSC0036151
tttatacataac

SEQ ID NO: 331364 - DNA, 12 bp, Artificial Sequence
  Oligonukleotid-Primer
ggttttaaattt

SEQ ID NO: 331365 - DNA, 12 bp, Artificial Sequence
  Oligonucleotide primer for the detection of SNP TSC0036155
taaatttacacc

SEQ ID NO: 331366 - DNA, 12 bp, Artificial Sequence
  Oligonucleotide primer for the detection of SNP TSC0036159
atttaaaataac

SEQ ID NO: 331367 - DNA, 12 bp, Artificial Sequence
  Oligonucleotide primer for the detection of SNP TSC0036159
tttttgttggag

SEQ ID NO: 331368 - DNA, 12 bp, Artificial Sequence
  Oligonucleotide primer for the detection of SNP TSC0036160
gtaattagataa

SEQ ID NO: 331369 - DNA, 12 bp, Artificial Sequence
  Oligonucleotide primer for the detection of SNP TSC0036160
acaattaaacaa

SEQ ID NO: 331370 - DNA, 12 bp, Artificial Sequence
  Oligonucleotide primer for the detection of SNP TSC0036160
gcaattaaacaa

SEQ ID NO: 331371 - DNA, 12 bp, Artificial Sequence
  Oligonucleotide primer for the detection of SNP TSC0036160
taaggttttggt

SEQ ID NO: 331372 - DNA, 12 bp, Artificial Sequence
  Oligonukleotid-Primer
tatcctaaaata

SEQ ID NO: 331373 - DNA, 12 bp, Artificial Sequence
  Oligonucleotide primer for the detection of SNP TSC0036161
ttttgggtatat

SEQ ID NO: 331374 - DNA, 12 bp, Artificial Sequence
  Oligonucleotide primer for the detection of SNP TSC0036161
tttcgggtatat

SEQ ID NO: 331375 - DNA, 12 bp, Artificial Sequence
  Oligonucleotide primer for the detection of SNP TSC0036161
ctccaaacacat

SEQ ID NO: 331376 - DNA, 12 bp, Artificial Sequence
  Oligonucleotide primer for the detection of SNP TSC0036161
ctccgaacacat

SEQ ID NO: 331377 - DNA, 12 bp, Artificial Sequence
  Oligonucleotide primer for the detection of SNP TSC0036161
tgttttgggatg

SEQ ID NO: 331378 - DNA, 12 bp, Artificial Sequence
  Oligonucleotide primer for the detection of SNP TSC0036164
taacaaccttcc

SEQ ID NO: 331379 - DNA, 12 bp, Artificial Sequence
  Oligonucleotide primer for the detection of SNP TSC0036164
gttaaggatgtt

SEQ ID NO: 331380 - DNA, 12 bp, Artificial Sequence
  Oligonucleotide primer for the detection of SNP TSC0036164
gttaaggacgtt

SEQ ID NO: 331381 - DNA, 12 bp, Artificial Sequence
  Oligonucleotide primer for the detection of SNP TSC0036164
ccaaaaacacca

SEQ ID NO: 331382 - DNA, 12 bp, Artificial Sequence
  Oligonucleotide primer for the detection of SNP TSC0036164
ccaaaaacgcca

SEQ ID NO: 331383 - DNA, 12 bp, Artificial Sequence
  Oligonucleotide primer for the detection of SNP TSC0036164
tggtagtttttt

SEQ ID NO: 331384 - DNA, 12 bp, Artificial Sequence
  Oligonucleotide primer for the detection of SNP TSC0036164
tggtagtttttc

SEQ ID NO: 331385 - DNA, 12 bp, Artificial Sequence
  Oligonucleotide primer for the detection of SNP TSC0036165
ccaaaaactaaa

SEQ ID NO: 331386 - DNA, 12 bp, Artificial Sequence
  Oligonucleotide primer for the detection of SNP TSC0036165
gatatatggaag

SEQ ID NO: 331387 - DNA, 12 bp, Artificial Sequence
  Oligonucleotide primer for the detection of SNP TSC0036165
aacacataaaaa

SEQ ID NO: 331388 - DNA, 12 bp, Artificial Sequence
  Oligonucleotide primer for the detection of SNP TSC0036165
gttagaggttga

SEQ ID NO: 331389 - DNA, 12 bp, Artificial Sequence
  Oligonucleotide primer for the detection of SNP TSC0036166
tctccaaaccac

SEQ ID NO: 331390 - DNA, 12 bp, Artificial Sequence
  Oligonucleotide primer for the detection of SNP TSC0036166
ggaaattagggg

SEQ ID NO: 331391 - DNA, 12 bp, Artificial Sequence
  Oligonucleotide primer for the detection of SNP TSC0036168
aataccaaatct

SEQ ID NO: 331392 - DNA, 12 bp, Artificial Sequence
  Oligonucleotide primer for the detection of SNP TSC0036168
ggtggtgttaag

SEQ ID NO: 331393 - DNA, 12 bp, Artificial Sequence
  Oligonucleotide primer for the detection of SNP TSC0036168
ggcggtgttaag

SEQ ID NO: 331394 - DNA, 12 bp, Artificial Sequence
  Oligonucleotide primer for the detection of SNP TSC0036173
aaactaatttac

SEQ ID NO: 331395 - DNA, 12 bp, Artificial Sequence
  Oligonucleotide primer for the detection of SNP TSC0036173
attgttggtggg

SEQ ID NO: 331396 - DNA, 12 bp, Artificial Sequence
  Oligonucleotide primer for the detection of SNP TSC0036175
tcgggtttaagt

SEQ ID NO: 331397 - DNA, 12 bp, Artificial Sequence
  Oligonucleotide primer for the detection of SNP TSC0036175
tcgggtttaagc

SEQ ID NO: 331398 - DNA, 12 bp, Artificial Sequence
  Oligonucleotide primer for the detection of SNP TSC0036176
tgttagttagga

SEQ ID NO: 331399 - DNA, 12 bp, Artificial Sequence
  Oligonucleotide primer for the detection of SNP TSC0036177
catttcctaatt

SEQ ID NO: 331400 - DNA, 12 bp, Artificial Sequence
  Oligonucleotide primer for the detection of SNP TSC0036177
ttatattttagg

SEQ ID NO: 331401 - DNA, 12 bp, Artificial Sequence
  Oligonucleotide primer for the detection of SNP TSC0036177
ttacattctaaa

SEQ ID NO: 331402 - DNA, 12 bp, Artificial Sequence
  Oligonucleotide primer for the detection of SNP TSC0036178
acaatctcattt

SEQ ID NO: 331403 - DNA, 12 bp, Artificial Sequence
  Oligonucleotide primer for the detection of SNP TSC0036178
acgatctcattt

SEQ ID NO: 331404 - DNA, 12 bp, Artificial Sequence
  Oligonucleotide primer for the detection of SNP TSC0036178
attagtgttata

SEQ ID NO: 331405 - DNA, 12 bp, Artificial Sequence
  Oligonucleotide primer for the detection of SNP TSC0036180
cttactaaattc

SEQ ID NO: 331406 - DNA, 12 bp, Artificial Sequence
  Oligonucleotide primer for the detection of SNP TSC0036180
tgattaaattgg

SEQ ID NO: 331407 - DNA, 12 bp, Artificial Sequence
  Oligonucleotide primer for the detection of SNP TSC0036180
taaccaaattaa

SEQ ID NO: 331408 - DNA, 12 bp, Artificial Sequence
  Oligonucleotide primer for the detection of SNP TSC0036180
tttgttaggttt

SEQ ID NO: 331409 - DNA, 12 bp, Artificial Sequence
  Oligonucleotide primer for the detection of SNP TSC0036184
caacttaaaaaa

SEQ ID NO: 331410 - DNA, 12 bp, Artificial Sequence
  Oligonucleotide primer for the detection of SNP TSC0036184
tgtatagttata

SEQ ID NO: 331411 - DNA, 12 bp, Artificial Sequence
  Oligonucleotide primer for the detection of SNP TSC0036184
tacataattata

SEQ ID NO: 331412 - DNA, 12 bp, Artificial Sequence
  Oligonucleotide primer for the detection of SNP TSC0036184
tagtttaggaaa

SEQ ID NO: 331413 - DNA, 12 bp, Artificial Sequence
  Oligonucleotide primer for the detection of SNP TSC0036190
cacccaaaaaac

SEQ ID NO: 331414 - DNA, 12 bp, Artificial Sequence
  Oligonucleotide primer for the detection of SNP TSC0036190
cgcccaaaaaac

SEQ ID NO: 331415 - DNA, 12 bp, Artificial Sequence
  Oligonucleotide primer for the detection of SNP TSC0036190
tgtttaaagaat

SEQ ID NO: 331416 - DNA, 12 bp, Artificial Sequence
  Oligonucleotide primer for the detection of SNP TSC0036190
cgtttaaagaat

SEQ ID NO: 331417 - DNA, 12 bp, Artificial Sequence
  Oligonucleotide primer for the detection of SNP TSC0036190
tgtttaaagaac

SEQ ID NO: 331418 - DNA, 12 bp, Artificial Sequence
  Oligonucleotide primer for the detection of SNP TSC0036190
cgtttaaagaac

SEQ ID NO: 331419 - DNA, 12 bp, Artificial Sequence
  Oligonucleotide primer for the detection of SNP TSC0036191
ctaaaccttaac

SEQ ID NO: 331420 - DNA, 12 bp, Artificial Sequence
  Oligonucleotide primer for the detection of SNP TSC0036191
aatgttttgagg

SEQ ID NO: 331421 - DNA, 12 bp, Artificial Sequence
  Oligonucleotide primer for the detection of SNP TSC0036192
ccttaacccctc

SEQ ID NO: 331422 - DNA, 12 bp, Artificial Sequence
  Oligonucleotide primer for the detection of SNP TSC0036192
ggattgatataa

SEQ ID NO: 331423 - DNA, 12 bp, Artificial Sequence
  Oligonucleotide primer for the detection of SNP TSC0036193
aatggttgatta

SEQ ID NO: 331424 - DNA, 12 bp, Artificial Sequence
  Oligonucleotide primer for the detection of SNP TSC0036194
taaactaaaact

SEQ ID NO: 331425 - DNA, 12 bp, Artificial Sequence
  Oligonucleotide primer for the detection of SNP TSC0036194
tttttgttttaa

SEQ ID NO: 331426 - DNA, 12 bp, Artificial Sequence
  Oligonucleotide primer for the detection of SNP TSC0036195
ttataggagtgt

SEQ ID NO: 331427 - DNA, 12 bp, Artificial Sequence
  Oligonucleotide primer for the detection of SNP TSC0036195
ttataggagtgc

SEQ ID NO: 331428 - DNA, 12 bp, Artificial Sequence
  Oligonucleotide primer for the detection of SNP TSC0036195
tcataaaaatac

SEQ ID NO: 331429 - DNA, 12 bp, Artificial Sequence
  Oligonucleotide primer for the detection of SNP TSC0036195
gaaattgtgttg

SEQ ID NO: 331430 - DNA, 12 bp, Artificial Sequence
  Oligonucleotide primer for the detection of SNP TSC0036197
attagttatatg

SEQ ID NO: 331431 - DNA, 12 bp, Artificial Sequence
  Oligonucleotide primer for the detection of SNP TSC0036198
cctattccttac

SEQ ID NO: 331432 - DNA, 12 bp, Artificial Sequence
  Oligonucleotide primer for the detection of SNP TSC0036202
accaacctcaac

SEQ ID NO: 331433 - DNA, 12 bp, Artificial Sequence
  Oligonucleotide primer for the detection of SNP TSC0036202
tggaattttgtg

SEQ ID NO: 331434 - DNA, 12 bp, Artificial Sequence
  Oligonucleotide primer for the detection of SNP TSC0036203
ccaaattcttat

SEQ ID NO: 331435 - DNA, 12 bp, Artificial Sequence
  Oligonucleotide primer for the detection of SNP TSC0036203
ttttggatgtag

SEQ ID NO: 331436 - DNA, 12 bp, Artificial Sequence
  Oligonucleotide primer for the detection of SNP TSC0036204
ttccctaattat

SEQ ID NO: 331437 - DNA, 12 bp, Artificial Sequence
  Oligonucleotide primer for the detection of SNP TSC0036209
acttaaacttta

SEQ ID NO: 331438 - DNA, 12 bp, Artificial Sequence
  Oligonucleotide primer for the detection of SNP TSC0036209
ccctcttttctt

SEQ ID NO: 331439 - DNA, 12 bp, Artificial Sequence
  Oligonucleotide primer for the detection of SNP TSC0036210
atactcctcaaa

SEQ ID NO: 331440 - DNA, 12 bp, Artificial Sequence
  Oligonucleotide primer for the detection of SNP TSC0036210
agttttttattt

SEQ ID NO: 331441 - DNA, 12 bp, Artificial Sequence
  Oligonucleotide primer for the detection of SNP TSC0036210
aatttttcactc

SEQ ID NO: 331442 - DNA, 12 bp, Artificial Sequence
  Oligonucleotide primer for the detection of SNP TSC0036210
atgttttttaag

SEQ ID NO: 331443 - DNA, 12 bp, Artificial Sequence
  Oligonucleotide primer for the detection of SNP TSC0036211
aaagataatata

SEQ ID NO: 331444 - DNA, 12 bp, Artificial Sequence
  Oligonucleotide primer for the detection of SNP TSC0036213
aaaactaaacct

SEQ ID NO: 331445 - DNA, 12 bp, Artificial Sequence
  Oligonucleotide primer for the detection of SNP TSC0036213
tagaaattggaa

SEQ ID NO: 331446 - DNA, 12 bp, Artificial Sequence
  Oligonucleotide primer for the detection of SNP TSC0036213
caaaaactaaaa

SEQ ID NO: 331447 - DNA, 12 bp, Artificial Sequence
  Oligonucleotide primer for the detection of SNP TSC0036219
caacaattaaca

SEQ ID NO: 331448 - DNA, 12 bp, Artificial Sequence
  Oligonucleotide primer for the detection of SNP TSC0036219
caacaattaacg

SEQ ID NO: 331449 - DNA, 12 bp, Artificial Sequence
  Oligonucleotide primer for the detection of SNP TSC0036219
tccaccaacttc

SEQ ID NO: 331450 - DNA, 12 bp, Artificial Sequence
  Oligonucleotide primer for the detection of SNP TSC0036219
tagtagttaatg

SEQ ID NO: 331451 - DNA, 12 bp, Artificial Sequence
  Oligonucleotide primer for the detection of SNP TSC0036219
tagtagttaacg

SEQ ID NO: 331452 - DNA, 12 bp, Artificial Sequence
  Oligonucleotide primer for the detection of SNP TSC0036220
ttaaatttccta

SEQ ID NO: 331453 - DNA, 12 bp, Artificial Sequence
  Oligonucleotide primer for the detection of SNP TSC0036220
tttattttagag

SEQ ID NO: 331454 - DNA, 12 bp, Artificial Sequence
  Oligonucleotide primer for the detection of SNP TSC0036226
tatagggagatt

SEQ ID NO: 331455 - DNA, 12 bp, Artificial Sequence
  Oligonucleotide primer for the detection of SNP TSC0036226
tatagggagatc

SEQ ID NO: 331456 - DNA, 12 bp, Artificial Sequence
  Oligonucleotide primer for the detection of SNP TSC0036226
cataaaaaaatc

SEQ ID NO: 331457 - DNA, 12 bp, Artificial Sequence
  Oligonucleotide primer for the detection of SNP TSC0036226
ttggtagaggtg

SEQ ID NO: 331458 - DNA, 12 bp, Artificial Sequence
  Oligonucleotide primer for the detection of SNP TSC0036230
acctacatcttc

SEQ ID NO: 331459 - DNA, 12 bp, Artificial Sequence
  Oligonucleotide primer for the detection of SNP TSC0036230
atgtttttttgt

SEQ ID NO: 331460 - DNA, 12 bp, Artificial Sequence
  Oligonucleotide primer for the detection of SNP TSC0036230
tacttttctaca

SEQ ID NO: 331461 - DNA, 12 bp, Artificial Sequence
  Oligonucleotide primer for the detection of SNP TSC0036241
taaagaagaaaa

SEQ ID NO: 331462 - DNA, 12 bp, Artificial Sequence
  Oligonucleotide primer for the detection of SNP TSC0036246
caataaaccaaa

SEQ ID NO: 331463 - DNA, 12 bp, Artificial Sequence
  Oligonucleotide primer for the detection of SNP TSC0036247
ataataacatat

SEQ ID NO: 331464 - DNA, 12 bp, Artificial Sequence
  Oligonucleotide primer for the detection of SNP TSC0036248
aaaattttaatg

SEQ ID NO: 331465 - DNA, 12 bp, Artificial Sequence
  Oligonucleotide primer for the detection of SNP TSC0036250
tacaaaccacct

SEQ ID NO: 331466 - DNA, 12 bp, Artificial Sequence
  Oligonucleotide primer for the detection of SNP TSC0036250
aatatgaattaa

SEQ ID NO: 331467 - DNA, 12 bp, Artificial Sequence
  Oligonucleotide primer for the detection of SNP TSC0036253
atatattccaaa

SEQ ID NO: 331468 - DNA, 12 bp, Artificial Sequence
  Oligonucleotide primer for the detection of SNP TSC0036253
aacttcaaaact

SEQ ID NO: 331469 - DNA, 12 bp, Artificial Sequence
  Oligonucleotide primer for the detection of SNP TSC0036258
taataaatccat

SEQ ID NO: 331470 - DNA, 12 bp, Artificial Sequence
  Oligonucleotide primer for the detection of SNP TSC0036258
ttaaattagaag

SEQ ID NO: 331471 - DNA, 12 bp, Artificial Sequence
  Oligonucleotide primer for the detection of SNP TSC0036258
ccaaattaaaaa

SEQ ID NO: 331472 - DNA, 12 bp, Artificial Sequence
  Oligonucleotide primer for the detection of SNP TSC0036260
ggggaagtaagt

SEQ ID NO: 331473 - DNA, 12 bp, Artificial Sequence
  Oligonucleotide primer for the detection of SNP TSC0036260
tatgtgaagatg

SEQ ID NO: 331474 - DNA, 12 bp, Artificial Sequence
  Oligonucleotide primer for the detection of SNP TSC0036261
taaaatttaact

SEQ ID NO: 331475 - DNA, 12 bp, Artificial Sequence
  Oligonucleotide primer for the detection of SNP TSC0036262
gcgttaaattat

SEQ ID NO: 331476 - DNA, 12 bp, Artificial Sequence
  Oligonucleotide primer for the detection of SNP TSC0036262
caccaaaccata

SEQ ID NO: 331477 - DNA, 12 bp, Artificial Sequence
  Oligonucleotide primer for the detection of SNP TSC0036262
cgccaaaccata

SEQ ID NO: 331478 - DNA, 12 bp, Artificial Sequence
  Oligonucleotide primer for the detection of SNP TSC0036262
ggaaaggtatgt

SEQ ID NO: 331479 - DNA, 12 bp, Artificial Sequence
  Oligonucleotide primer for the detection of SNP TSC0036264
acctaactcaac

SEQ ID NO: 331480 - DNA, 12 bp, Artificial Sequence
  Oligonucleotide primer for the detection of SNP TSC0036264
aaaggaggttgg

SEQ ID NO: 331481 - DNA, 12 bp, Artificial Sequence
  Oligonucleotide primer for the detection of SNP TSC0036264
gtttggtttaat

SEQ ID NO: 331482 - DNA, 12 bp, Artificial Sequence
  Oligonucleotide primer for the detection of SNP TSC0036266
tcttcccccatc

SEQ ID NO: 331483 - DNA, 12 bp, Artificial Sequence
  Oligonucleotide primer for the detection of SNP TSC0036266
ttaagagtaatg

SEQ ID NO: 331484 - DNA, 12 bp, Artificial Sequence
  Oligonucleotide primer for the detection of SNP TSC0036266
ttaagagtaacg

SEQ ID NO: 331485 - DNA, 12 bp, Artificial Sequence
  Oligonucleotide primer for the detection of SNP TSC0036267
acataaaacctc

SEQ ID NO: 331486 - DNA, 12 bp, Artificial Sequence
  Oligonucleotide primer for the detection of SNP TSC0036267
tttaagagttga

SEQ ID NO: 331487 - DNA, 12 bp, Artificial Sequence
  Oligonucleotide primer for the detection of SNP TSC0036271
aattcaacttta

SEQ ID NO: 331488 - DNA, 12 bp, Artificial Sequence
  Oligonucleotide primer for the detection of SNP TSC0036271
taaaggttaaat

SEQ ID NO: 331489 - DNA, 12 bp, Artificial Sequence
  Oligonucleotide primer for the detection of SNP TSC0036271
gatttaattttg

SEQ ID NO: 331490 - DNA, 12 bp, Artificial Sequence
  Oligonucleotide primer for the detection of SNP TSC0036272
aatacacaacac

SEQ ID NO: 331491 - DNA, 12 bp, Artificial Sequence
  Oligonucleotide primer for the detection of SNP TSC0036272
agatgtgttttg

SEQ ID NO: 331492 - DNA, 12 bp, Artificial Sequence
  Oligonucleotide primer for the detection of SNP TSC0036272
aaatatacttta

SEQ ID NO: 331493 - DNA, 12 bp, Artificial Sequence
  Oligonucleotide primer for the detection of SNP TSC0036272
aatgtatagtat

SEQ ID NO: 331494 - DNA, 12 bp, Artificial Sequence
  Oligonucleotide primer for the detection of SNP TSC0036275
cattccttaaaa

SEQ ID NO: 331495 - DNA, 12 bp, Artificial Sequence
  Oligonucleotide primer for the detection of SNP TSC0036275
attcttaacctc

SEQ ID NO: 331496 - DNA, 12 bp, Artificial Sequence
  Oligonucleotide primer for the detection of SNP TSC0036275
tattttttggaa

SEQ ID NO: 331497 - DNA, 12 bp, Artificial Sequence
  Oligonucleotide primer for the detection of SNP TSC0036278
cataaaatttta

SEQ ID NO: 331498 - DNA, 12 bp, Artificial Sequence
  Oligonucleotide primer for the detection of SNP TSC0036278
agtttgggaaat

SEQ ID NO: 331499 - DNA, 12 bp, Artificial Sequence
  Oligonucleotide primer for the detection of SNP TSC0036278
tatagggttttg

SEQ ID NO: 331500 - DNA, 12 bp, Artificial Sequence
  Oligonucleotide primer for the detection of SNP TSC0036279
aacacacccacc

SEQ ID NO: 331501 - DNA, 12 bp, Artificial Sequence
  Oligonucleotide primer for the detection of SNP TSC0036279
aacacacccgcc

SEQ ID NO: 331502 - DNA, 12 bp, Artificial Sequence
  Oligonucleotide primer for the detection of SNP TSC0036279
agtgtgaaggtt

SEQ ID NO: 331503 - DNA, 12 bp, Artificial Sequence
  Oligonucleotide primer for the detection of SNP TSC0036279
agcgtgaaggtt

SEQ ID NO: 331504 - DNA, 12 bp, Artificial Sequence
  Oligonucleotide primer for the detection of SNP TSC0036279
agtgtgaaggtc

SEQ ID NO: 331505 - DNA, 12 bp, Artificial Sequence
  Oligonucleotide primer for the detection of SNP TSC0036279
agcgtgaaggtc

SEQ ID NO: 331506 - DNA, 12 bp, Artificial Sequence
  Oligonucleotide primer for the detection of SNP TSC0036279
taacataaaaat

SEQ ID NO: 331507 - DNA, 12 bp, Artificial Sequence
  Oligonucleotide primer for the detection of SNP TSC0036279
taacgtaaaaat

SEQ ID NO: 331508 - DNA, 12 bp, Artificial Sequence
  Oligonucleotide primer for the detection of SNP TSC0036279
gatatatttgtt

SEQ ID NO: 331509 - DNA, 12 bp, Artificial Sequence
  Oligonukleotid-Primer
gatatattcgtt

SEQ ID NO: 331510 - DNA, 12 bp, Artificial Sequence
  Oligonucleotide primer for the detection of SNP TSC0036284
tactattctttt

SEQ ID NO: 331511 - DNA, 12 bp, Artificial Sequence
  Oligonucleotide primer for the detection of SNP TSC0036284
gttattttaggg

SEQ ID NO: 331512 - DNA, 12 bp, Artificial Sequence
  Oligonucleotide primer for the detection of SNP TSC0036286
tttagttttcgg

SEQ ID NO: 331513 - DNA, 12 bp, Artificial Sequence
  Oligonucleotide primer for the detection of SNP TSC0036287
aatataacacat

SEQ ID NO: 331514 - DNA, 12 bp, Artificial Sequence
  Oligonucleotide primer for the detection of SNP TSC0036287
tattttatggtg

SEQ ID NO: 331515 - DNA, 12 bp, Artificial Sequence
  Oligonucleotide primer for the detection of SNP TSC0036295
aaatacatctta

SEQ ID NO: 331516 - DNA, 12 bp, Artificial Sequence
  Oligonucleotide primer for the detection of SNP TSC0036295
aaatacgtctta

SEQ ID NO: 331517 - DNA, 12 bp, Artificial Sequence
  Oligonucleotide primer for the detection of SNP TSC0036295
aaaatacaaatt

SEQ ID NO: 331518 - DNA, 12 bp, Artificial Sequence
  Oligonucleotide primer for the detection of SNP TSC0036295
aagtgtgtttta

SEQ ID NO: 331519 - DNA, 12 bp, Artificial Sequence
  Oligonucleotide primer for the detection of SNP TSC0036295
aagtgcgtttta

SEQ ID NO: 331520 - DNA, 12 bp, Artificial Sequence
  Oligonucleotide primer for the detection of SNP TSC0036296
cctaccctatcc

SEQ ID NO: 331521 - DNA, 12 bp, Artificial Sequence
  Oligonucleotide primer for the detection of SNP TSC0036296
tgtgtgtttatt

SEQ ID NO: 331522 - DNA, 12 bp, Artificial Sequence
  Oligonucleotide primer for the detection of SNP TSC0036296
tatatacccatc

SEQ ID NO: 331523 - DNA, 12 bp, Artificial Sequence
  Oligonucleotide primer for the detection of SNP TSC0036297
aaattccatcac

SEQ ID NO: 331524 - DNA, 12 bp, Artificial Sequence
  Oligonucleotide primer for the detection of SNP TSC0036297
ggattgtgataa

SEQ ID NO: 331525 - DNA, 12 bp, Artificial Sequence
  Oligonukleotid-Primer
agattttattat

SEQ ID NO: 331526 - DNA, 12 bp, Artificial Sequence
  Oligonucleotide primer for the detection of SNP TSC0036298
ataataaaatct

SEQ ID NO: 331527 - DNA, 12 bp, Artificial Sequence
  Oligonucleotide primer for the detection of SNP TSC0036299
ataaacaacatt

SEQ ID NO: 331528 - DNA, 12 bp, Artificial Sequence
  Oligonucleotide primer for the detection of SNP TSC0036299
tttatgaggtta

SEQ ID NO: 331529 - DNA, 12 bp, Artificial Sequence
  Oligonucleotide primer for the detection of SNP TSC0036302
ccctaaaattat

SEQ ID NO: 331530 - DNA, 12 bp, Artificial Sequence
  Oligonucleotide primer for the detection of SNP TSC0036302
atttttttggga

SEQ ID NO: 331531 - DNA, 12 bp, Artificial Sequence
  Oligonucleotide primer for the detection of SNP TSC0036302
ctcttttaaaaa

SEQ ID NO: 331532 - DNA, 12 bp, Artificial Sequence
  Oligonucleotide primer for the detection of SNP TSC0036302
ttttagaattgt

SEQ ID NO: 331533 - DNA, 12 bp, Artificial Sequence
  Oligonukleotid-Primer
tcaaataaaata

SEQ ID NO: 331534 - DNA, 12 bp, Artificial Sequence
  Oligonucleotide primer for the detection of SNP TSC0036303
tggttggggttt

SEQ ID NO: 331535 - DNA, 12 bp, Artificial Sequence
  Oligonucleotide primer for the detection of SNP TSC0036303
tggttggggttc

SEQ ID NO: 331536 - DNA, 12 bp, Artificial Sequence
  Oligonucleotide primer for the detection of SNP TSC0036303
ttagatgagatg

SEQ ID NO: 331537 - DNA, 12 bp, Artificial Sequence
  Oligonucleotide primer for the detection of SNP TSC0036304
acttttctttac

SEQ ID NO: 331538 - DNA, 12 bp, Artificial Sequence
  Oligonucleotide primer for the detection of SNP TSC0036304
cctttctacata

SEQ ID NO: 331539 - DNA, 12 bp, Artificial Sequence
  Oligonucleotide primer for the detection of SNP TSC0036306
aattagttattt

SEQ ID NO: 331540 - DNA, 12 bp, Artificial Sequence
  Oligonucleotide primer for the detection of SNP TSC0036306
aattagttattc

SEQ ID NO: 331541 - DNA, 12 bp, Artificial Sequence
  Oligonucleotide primer for the detection of SNP TSC0036306
ttaatcaatcat

SEQ ID NO: 331542 - DNA, 12 bp, Artificial Sequence
  Oligonucleotide primer for the detection of SNP TSC0036306
gatgttttttaa

SEQ ID NO: 331543 - DNA, 12 bp, Artificial Sequence
  Oligonucleotide primer for the detection of SNP TSC0036307
taagtaataata

SEQ ID NO: 331544 - DNA, 12 bp, Artificial Sequence
  Oligonucleotide primer for the detection of SNP TSC0036307
agtgataggtag

SEQ ID NO: 331545 - DNA, 12 bp, Artificial Sequence
  Oligonucleotide primer for the detection of SNP TSC0036308
ataattacaaac

SEQ ID NO: 331546 - DNA, 12 bp, Artificial Sequence
  Oligonucleotide primer for the detection of SNP TSC0036308
tataggatatga

SEQ ID NO: 331547 - DNA, 12 bp, Artificial Sequence
  Oligonucleotide primer for the detection of SNP TSC0036315
actaaaatttaa

SEQ ID NO: 331548 - DNA, 12 bp, Artificial Sequence
  Oligonucleotide primer for the detection of SNP TSC0036315
aaatgtggttat

SEQ ID NO: 331549 - DNA, 12 bp, Artificial Sequence
  Oligonucleotide primer for the detection of SNP TSC0036315
tataaccataaa

SEQ ID NO: 331550 - DNA, 12 bp, Artificial Sequence
  Oligonucleotide primer for the detection of SNP TSC0036315
gttaggatttag

SEQ ID NO: 331551 - DNA, 12 bp, Artificial Sequence
  Oligonucleotide primer for the detection of SNP TSC0036316
aaaaacctctac

SEQ ID NO: 331552 - DNA, 12 bp, Artificial Sequence
  Oligonucleotide primer for the detection of SNP TSC0036318
caaatccatttt

SEQ ID NO: 331553 - DNA, 12 bp, Artificial Sequence
  Oligonucleotide primer for the detection of SNP TSC0036318
attaggatgtta

SEQ ID NO: 331554 - DNA, 12 bp, Artificial Sequence
  Oligonucleotide primer for the detection of SNP TSC0036318
accaaaatacca

SEQ ID NO: 331555 - DNA, 12 bp, Artificial Sequence
  Oligonucleotide primer for the detection of SNP TSC0036319
ttatatacttct

SEQ ID NO: 331556 - DNA, 12 bp, Artificial Sequence
  Oligonucleotide primer for the detection of SNP TSC0036320
tgtgtttttgaa

SEQ ID NO: 331557 - DNA, 12 bp, Artificial Sequence
  Oligonucleotide primer for the detection of SNP TSC0036321
aataaaaatata

SEQ ID NO: 331558 - DNA, 12 bp, Artificial Sequence
  Oligonucleotide primer for the detection of SNP TSC0036321
gtaatgtatttt

SEQ ID NO: 331559 - DNA, 12 bp, Artificial Sequence
  Oligonucleotide primer for the detection of SNP TSC0036321
aataagaatgta

SEQ ID NO: 331560 - DNA, 12 bp, Artificial Sequence
  Oligonucleotide primer for the detection of SNP TSC0036322
aatttaatacaa

SEQ ID NO: 331561 - DNA, 12 bp, Artificial Sequence
  Oligonucleotide primer for the detection of SNP TSC0036322
tacattcttatt

SEQ ID NO: 331562 - DNA, 12 bp, Artificial Sequence
  Oligonucleotide primer for the detection of SNP TSC0036322
gatttagtataa

SEQ ID NO: 331563 - DNA, 12 bp, Artificial Sequence
  Oligonucleotide primer for the detection of SNP TSC0036324
aaaacacttact

SEQ ID NO: 331564 - DNA, 12 bp, Artificial Sequence
  Oligonucleotide primer for the detection of SNP TSC0036324
taagaaatattt

SEQ ID NO: 331565 - DNA, 12 bp, Artificial Sequence
  Oligonucleotide primer for the detection of SNP TSC0036324
ctataaaaaata

SEQ ID NO: 331566 - DNA, 12 bp, Artificial Sequence
  Oligonucleotide primer for the detection of SNP TSC0036325
tcccactaaaca

SEQ ID NO: 331567 - DNA, 12 bp, Artificial Sequence
  Oligonucleotide primer for the detection of SNP TSC0036325
ttttgttgttgt

SEQ ID NO: 331568 - DNA, 12 bp, Artificial Sequence
  Oligonucleotide primer for the detection of SNP TSC0036325
ttttgtcgttgt

SEQ ID NO: 331569 - DNA, 12 bp, Artificial Sequence
  Oligonucleotide primer for the detection of SNP TSC0036325
tcttaccattac

SEQ ID NO: 331570 - DNA, 12 bp, Artificial Sequence
  Oligonucleotide primer for the detection of SNP TSC0036325
tcttaccgttac

SEQ ID NO: 331571 - DNA, 12 bp, Artificial Sequence
  Oligonucleotide primer for the detection of SNP TSC0036325
tttttattggat

SEQ ID NO: 331572 - DNA, 12 bp, Artificial Sequence
  Oligonucleotide primer for the detection of SNP TSC0036326
tcactttcccac

SEQ ID NO: 331573 - DNA, 12 bp, Artificial Sequence
  Oligonucleotide primer for the detection of SNP TSC0036326
gtgatttatttt

SEQ ID NO: 331574 - DNA, 12 bp, Artificial Sequence
  Oligonucleotide primer for the detection of SNP TSC0036326
taactcatttta

SEQ ID NO: 331575 - DNA, 12 bp, Artificial Sequence
  Oligonucleotide primer for the detection of SNP TSC0036327
aactattataaa

SEQ ID NO: 331576 - DNA, 12 bp, Artificial Sequence
  Oligonucleotide primer for the detection of SNP TSC0036327
tttagtagtatt

SEQ ID NO: 331577 - DNA, 12 bp, Artificial Sequence
  Oligonucleotide primer for the detection of SNP TSC0036327
tttaacaacatt

SEQ ID NO: 331578 - DNA, 12 bp, Artificial Sequence
  Oligonucleotide primer for the detection of SNP TSC0036327
ggttattatgaa

SEQ ID NO: 331579 - DNA, 12 bp, Artificial Sequence
  Oligonucleotide primer for the detection of SNP TSC0036328
aaacatcaacta

SEQ ID NO: 331580 - DNA, 12 bp, Artificial Sequence
  Oligonucleotide primer for the detection of SNP TSC0036328
gggagtttattt

SEQ ID NO: 331581 - DNA, 12 bp, Artificial Sequence
  Oligonucleotide primer for the detection of SNP TSC0036328
aaaaactcactc

SEQ ID NO: 331582 - DNA, 12 bp, Artificial Sequence
  Oligonucleotide primer for the detection of SNP TSC0036328
gaatattagttg

SEQ ID NO: 331583 - DNA, 12 bp, Artificial Sequence
  Oligonucleotide primer for the detection of SNP TSC0036337
ttttgaatttaa

SEQ ID NO: 331584 - DNA, 12 bp, Artificial Sequence
  Oligonucleotide primer for the detection of SNP TSC0036337
tttcgaatttaa

SEQ ID NO: 331585 - DNA, 12 bp, Artificial Sequence
  Oligonucleotide primer for the detection of SNP TSC0036340
aacatattaatc

SEQ ID NO: 331586 - DNA, 12 bp, Artificial Sequence
  Oligonucleotide primer for the detection of SNP TSC0036340
aacgtattaatc

SEQ ID NO: 331587 - DNA, 12 bp, Artificial Sequence
  Oligonucleotide primer for the detection of SNP TSC0036341
tatctctactcc

SEQ ID NO: 331588 - DNA, 12 bp, Artificial Sequence
  Oligonucleotide primer for the detection of SNP TSC0036341
gtttttgaatga

SEQ ID NO: 331589 - DNA, 12 bp, Artificial Sequence
  Oligonucleotide primer for the detection of SNP TSC0036342
ataaaccttatt

SEQ ID NO: 331590 - DNA, 12 bp, Artificial Sequence
  Oligonucleotide primer for the detection of SNP TSC0036342
gtaagttgatga

SEQ ID NO: 331591 - DNA, 12 bp, Artificial Sequence
  Oligonucleotide primer for the detection of SNP TSC0036342
atagattttgtt

SEQ ID NO: 331592 - DNA, 12 bp, Artificial Sequence
  Oligonucleotide primer for the detection of SNP TSC0036343
tttaaaacatcc

SEQ ID NO: 331593 - DNA, 12 bp, Artificial Sequence
  Oligonucleotide primer for the detection of SNP TSC0036343
ttaggtatgttt

SEQ ID NO: 331594 - DNA, 12 bp, Artificial Sequence
  Oligonucleotide primer for the detection of SNP TSC0036343
atcaaatatacc

SEQ ID NO: 331595 - DNA, 12 bp, Artificial Sequence
  Oligonucleotide primer for the detection of SNP TSC0036343
tttaaagtattt

SEQ ID NO: 331596 - DNA, 12 bp, Artificial Sequence
  Oligonucleotide primer for the detection of SNP TSC0036343
tttaaagtattc

SEQ ID NO: 331597 - DNA, 12 bp, Artificial Sequence
  Oligonucleotide primer for the detection of SNP TSC0036348
cccaactcaaaa

SEQ ID NO: 331598 - DNA, 12 bp, Artificial Sequence
  Oligonucleotide primer for the detection of SNP TSC0036348
gtttttaaattt

SEQ ID NO: 331599 - DNA, 12 bp, Artificial Sequence
  Oligonucleotide primer for the detection of SNP TSC0036348
tttaatttaaga

SEQ ID NO: 331600 - DNA, 12 bp, Artificial Sequence
  Oligonucleotide primer for the detection of SNP TSC0036353
aattctcataaa

SEQ ID NO: 331601 - DNA, 12 bp, Artificial Sequence
  Oligonucleotide primer for the detection of SNP TSC0036353
tttttaaaatgt

SEQ ID NO: 331602 - DNA, 12 bp, Artificial Sequence
  Oligonucleotide primer for the detection of SNP TSC0036353
tttttaaaacgt

SEQ ID NO: 331603 - DNA, 12 bp, Artificial Sequence
  Oligonucleotide primer for the detection of SNP TSC0036353
tcctcaaaacat

SEQ ID NO: 331604 - DNA, 12 bp, Artificial Sequence
  Oligonucleotide primer for the detection of SNP TSC0036353
tcctcaaaacgt

SEQ ID NO: 331605 - DNA, 12 bp, Artificial Sequence
  Oligonucleotide primer for the detection of SNP TSC0036353
ggtttttatgga

SEQ ID NO: 331606 - DNA, 12 bp, Artificial Sequence
  Oligonucleotide primer for the detection of SNP TSC0036357
acactactcata

SEQ ID NO: 331607 - DNA, 12 bp, Artificial Sequence
  Oligonucleotide primer for the detection of SNP TSC0036357
gaaaattaatat

SEQ ID NO: 331608 - DNA, 12 bp, Artificial Sequence
  Oligonucleotide primer for the detection of SNP TSC0036358
acacacacccac

SEQ ID NO: 331609 - DNA, 12 bp, Artificial Sequence
  Oligonucleotide primer for the detection of SNP TSC0036358
acacacgcccac

SEQ ID NO: 331610 - DNA, 12 bp, Artificial Sequence
  Oligonucleotide primer for the detection of SNP TSC0036359
aattctttaaat

SEQ ID NO: 331611 - DNA, 12 bp, Artificial Sequence
  Oligonucleotide primer for the detection of SNP TSC0036359
aagggtttttta

SEQ ID NO: 331612 - DNA, 12 bp, Artificial Sequence
  Oligonucleotide primer for the detection of SNP TSC0036359
aaaaattctcca

SEQ ID NO: 331613 - DNA, 12 bp, Artificial Sequence
  Oligonucleotide primer for the detection of SNP TSC0036359
agttttttaagt

SEQ ID NO: 331614 - DNA, 12 bp, Artificial Sequence
  Oligonucleotide primer for the detection of SNP TSC0036362
cccctccaccct

SEQ ID NO: 331615 - DNA, 12 bp, Artificial Sequence
  Oligonucleotide primer for the detection of SNP TSC0036362
gtttgggggttg

SEQ ID NO: 331616 - DNA, 12 bp, Artificial Sequence
  Oligonucleotide primer for the detection of SNP TSC0036363
ttggaggaattt

SEQ ID NO: 331617 - DNA, 12 bp, Artificial Sequence
  Oligonucleotide primer for the detection of SNP TSC0036363
ttaaaaaaactt

SEQ ID NO: 331618 - DNA, 12 bp, Artificial Sequence
  Oligonucleotide primer for the detection of SNP TSC0036363
tgaatatatagg

SEQ ID NO: 331619 - DNA, 12 bp, Artificial Sequence
  Oligonucleotide primer for the detection of SNP TSC0036364
aatctctctaac

SEQ ID NO: 331620 - DNA, 12 bp, Artificial Sequence
  Oligonucleotide primer for the detection of SNP TSC0036364
agagaggatggg

SEQ ID NO: 331621 - DNA, 12 bp, Artificial Sequence
  Oligonucleotide primer for the detection of SNP TSC0036370
tcccaccaacaa

SEQ ID NO: 331622 - DNA, 12 bp, Artificial Sequence
  Oligonucleotide primer for the detection of SNP TSC0036370
tcccaccaacga

SEQ ID NO: 331623 - DNA, 12 bp, Artificial Sequence
  Oligonucleotide primer for the detection of SNP TSC0036370
tcccgccaacaa

SEQ ID NO: 331624 - DNA, 12 bp, Artificial Sequence
  Oligonucleotide primer for the detection of SNP TSC0036370
tcccgccaacga

SEQ ID NO: 331625 - DNA, 12 bp, Artificial Sequence
  Oligonucleotide primer for the detection of SNP TSC0036370
ggattttagggt

SEQ ID NO: 331626 - DNA, 12 bp, Artificial Sequence
  Oligonucleotide primer for the detection of SNP TSC0036370
ggattttagggc

SEQ ID NO: 331627 - DNA, 12 bp, Artificial Sequence
  Oligonucleotide primer for the detection of SNP TSC0036370
aaacctcaaaac

SEQ ID NO: 331628 - DNA, 12 bp, Artificial Sequence
  Oligonucleotide primer for the detection of SNP TSC0036370
tttttgttagtg

SEQ ID NO: 331629 - DNA, 12 bp, Artificial Sequence
  Oligonucleotide primer for the detection of SNP TSC0036370
ttttcgttagtg

SEQ ID NO: 331630 - DNA, 12 bp, Artificial Sequence
  Oligonucleotide primer for the detection of SNP TSC0036370
tttttgttagcg

SEQ ID NO: 331631 - DNA, 12 bp, Artificial Sequence
  Oligonucleotide primer for the detection of SNP TSC0036370
ttttcgttagcg

SEQ ID NO: 331632 - DNA, 12 bp, Artificial Sequence
  Oligonucleotide primer for the detection of SNP TSC0036372
tttggaagggag

SEQ ID NO: 331633 - DNA, 12 bp, Artificial Sequence
  Oligonucleotide primer for the detection of SNP TSC0036373
tacctaaacccc

SEQ ID NO: 331634 - DNA, 12 bp, Artificial Sequence
  Oligonucleotide primer for the detection of SNP TSC0036373
aaagtaaaatgg

SEQ ID NO: 331635 - DNA, 12 bp, Artificial Sequence
  Oligonucleotide primer for the detection of SNP TSC0036374
actccaaacaat

SEQ ID NO: 331636 - DNA, 12 bp, Artificial Sequence
  Oligonucleotide primer for the detection of SNP TSC0036374
gaatttttttag

SEQ ID NO: 331637 - DNA, 12 bp, Artificial Sequence
  Oligonucleotide primer for the detection of SNP TSC0036375
aaaaattccact

SEQ ID NO: 331638 - DNA, 12 bp, Artificial Sequence
  Oligonucleotide primer for the detection of SNP TSC0036375
tgatgaaatatg

SEQ ID NO: 331639 - DNA, 12 bp, Artificial Sequence
  Oligonucleotide primer for the detection of SNP TSC0036377
ctaatactatcc

SEQ ID NO: 331640 - DNA, 12 bp, Artificial Sequence
  Oligonucleotide primer for the detection of SNP TSC0036377
ggggagtgggga

SEQ ID NO: 331641 - DNA, 12 bp, Artificial Sequence
  Oligonucleotide primer for the detection of SNP TSC0036377
ggggagcgggga

SEQ ID NO: 331642 - DNA, 12 bp, Artificial Sequence
  Oligonucleotide primer for the detection of SNP TSC0036381
caaaataaacat

SEQ ID NO: 331643 - DNA, 12 bp, Artificial Sequence
  Oligonucleotide primer for the detection of SNP TSC0036381
tccacctattta

SEQ ID NO: 331644 - DNA, 12 bp, Artificial Sequence
  Oligonucleotide primer for the detection of SNP TSC0036381
aaaataaatatt

SEQ ID NO: 331645 - DNA, 12 bp, Artificial Sequence
  Oligonucleotide primer for the detection of SNP TSC0036382
aaaatattttct

SEQ ID NO: 331646 - DNA, 12 bp, Artificial Sequence
  Oligonucleotide primer for the detection of SNP TSC0036382
gtgaaagagtta

SEQ ID NO: 331647 - DNA, 12 bp, Artificial Sequence
  Oligonucleotide primer for the detection of SNP TSC0036386
ccaaatttttat

SEQ ID NO: 331648 - DNA, 12 bp, Artificial Sequence
  Oligonucleotide primer for the detection of SNP TSC0036386
tatgtgtagtga

SEQ ID NO: 331649 - DNA, 12 bp, Artificial Sequence
  Oligonucleotide primer for the detection of SNP TSC0036386
tatgtgtagcga

SEQ ID NO: 331650 - DNA, 12 bp, Artificial Sequence
  Oligonucleotide primer for the detection of SNP TSC0036388
cattcaactacc

SEQ ID NO: 331651 - DNA, 12 bp, Artificial Sequence
  Oligonucleotide primer for the detection of SNP TSC0036395
acctcaactttc

SEQ ID NO: 331652 - DNA, 12 bp, Artificial Sequence
  Oligonucleotide primer for the detection of SNP TSC0036396
ttttttaggtgt

SEQ ID NO: 331653 - DNA, 12 bp, Artificial Sequence
  Oligonucleotide primer for the detection of SNP TSC0036396
cttttcaaatac

SEQ ID NO: 331654 - DNA, 12 bp, Artificial Sequence
  Oligonucleotide primer for the detection of SNP TSC0036396
aattataggttg

SEQ ID NO: 331655 - DNA, 12 bp, Artificial Sequence
  Oligonucleotide primer for the detection of SNP TSC0036405
tcacccatccca

SEQ ID NO: 331656 - DNA, 12 bp, Artificial Sequence
  Oligonucleotide primer for the detection of SNP TSC0036405
ttaggatttatt

SEQ ID NO: 331657 - DNA, 12 bp, Artificial Sequence
  Oligonucleotide primer for the detection of SNP TSC0036405
tcaaaatttatt

SEQ ID NO: 331658 - DNA, 12 bp, Artificial Sequence
  Oligonucleotide primer for the detection of SNP TSC0036406
actcttccaatt

SEQ ID NO: 331659 - DNA, 12 bp, Artificial Sequence
  Oligonucleotide primer for the detection of SNP TSC0036406
attttgttttga

SEQ ID NO: 331660 - DNA, 12 bp, Artificial Sequence
  Oligonucleotide primer for the detection of SNP TSC0036410
ctacataacatt

SEQ ID NO: 331661 - DNA, 12 bp, Artificial Sequence
  Oligonucleotide primer for the detection of SNP TSC0036410
ataattagtagg

SEQ ID NO: 331662 - DNA, 12 bp, Artificial Sequence
  Oligonucleotide primer for the detection of SNP TSC0036410
acaattaataaa

SEQ ID NO: 331663 - DNA, 12 bp, Artificial Sequence
  Oligonucleotide primer for the detection of SNP TSC0036412
catatttccata

SEQ ID NO: 331664 - DNA, 12 bp, Artificial Sequence
  Oligonucleotide primer for the detection of SNP TSC0036412
taagtagttgat

SEQ ID NO: 331665 - DNA, 12 bp, Artificial Sequence
  Oligonucleotide primer for the detection of SNP TSC0036412
taagtagttgac

SEQ ID NO: 331666 - DNA, 12 bp, Artificial Sequence
  Oligonucleotide primer for the detection of SNP TSC0036412
ataaacaattaa

SEQ ID NO: 331667 - DNA, 12 bp, Artificial Sequence
  Oligonucleotide primer for the detection of SNP TSC0036412
ttatatttttat

SEQ ID NO: 331668 - DNA, 12 bp, Artificial Sequence
  Oligonucleotide primer for the detection of SNP TSC0036414
tctaacctaaat

SEQ ID NO: 331669 - DNA, 12 bp, Artificial Sequence
  Oligonucleotide primer for the detection of SNP TSC0036414
gacggagtttta

SEQ ID NO: 331670 - DNA, 12 bp, Artificial Sequence
  Oligonucleotide primer for the detection of SNP TSC0036417
aaatcaataact

SEQ ID NO: 331671 - DNA, 12 bp, Artificial Sequence
  Oligonucleotide primer for the detection of SNP TSC0036417
atttttttaatg

SEQ ID NO: 331672 - DNA, 12 bp, Artificial Sequence
  Oligonucleotide primer for the detection of SNP TSC0036417
aagttaatggtt

SEQ ID NO: 331673 - DNA, 12 bp, Artificial Sequence
  Oligonucleotide primer for the detection of SNP TSC0036419
ctaacctttact

SEQ ID NO: 331674 - DNA, 12 bp, Artificial Sequence
  Oligonucleotide primer for the detection of SNP TSC0036419
gtttagattaag

SEQ ID NO: 331675 - DNA, 12 bp, Artificial Sequence
  Oligonucleotide primer for the detection of SNP TSC0036421
aaacccactcac

SEQ ID NO: 331676 - DNA, 12 bp, Artificial Sequence
  Oligonucleotide primer for the detection of SNP TSC0036421
aaacccactcgc

SEQ ID NO: 331677 - DNA, 12 bp, Artificial Sequence
  Oligonucleotide primer for the detection of SNP TSC0036421
aaacccgctcac

SEQ ID NO: 331678 - DNA, 12 bp, Artificial Sequence
  Oligonucleotide primer for the detection of SNP TSC0036421
aaacccgctcgc

SEQ ID NO: 331679 - DNA, 12 bp, Artificial Sequence
  Oligonucleotide primer for the detection of SNP TSC0036421
gggatgtgtttg

SEQ ID NO: 331680 - DNA, 12 bp, Artificial Sequence
  Oligonucleotide primer for the detection of SNP TSC0036421
gggacgtgtttg

SEQ ID NO: 331681 - DNA, 12 bp, Artificial Sequence
  Oligonucleotide primer for the detection of SNP TSC0036421
gggatgcgtttg

SEQ ID NO: 331682 - DNA, 12 bp, Artificial Sequence
  Oligonucleotide primer for the detection of SNP TSC0036421
gggatgtgttcg

SEQ ID NO: 331683 - DNA, 12 bp, Artificial Sequence
  Oligonucleotide primer for the detection of SNP TSC0036421
gggacgcgtttg

SEQ ID NO: 331684 - DNA, 12 bp, Artificial Sequence
  Oligonucleotide primer for the detection of SNP TSC0036421
gggacgtgttcg

SEQ ID NO: 331685 - DNA, 12 bp, Artificial Sequence
  Oligonucleotide primer for the detection of SNP TSC0036421
gggatgcgttcg

SEQ ID NO: 331686 - DNA, 12 bp, Artificial Sequence
  Oligonucleotide primer for the detection of SNP TSC0036421
gggacgcgttcg

SEQ ID NO: 331687 - DNA, 12 bp, Artificial Sequence
  Oligonucleotide primer for the detection of SNP TSC0036421
aaaacacatcca

SEQ ID NO: 331688 - DNA, 12 bp, Artificial Sequence
  Oligonucleotide primer for the detection of SNP TSC0036421
aaaacacatccg

SEQ ID NO: 331689 - DNA, 12 bp, Artificial Sequence
  Oligonucleotide primer for the detection of SNP TSC0036421
aaaacacgtcca

SEQ ID NO: 331690 - DNA, 12 bp, Artificial Sequence
  Oligonucleotide primer for the detection of SNP TSC0036421
aaaacgcatcca

SEQ ID NO: 331691 - DNA, 12 bp, Artificial Sequence
  Oligonucleotide primer for the detection of SNP TSC0036421
aaaacacgtccg

SEQ ID NO: 331692 - DNA, 12 bp, Artificial Sequence
  Oligonucleotide primer for the detection of SNP TSC0036421
aaaacgcatccg

SEQ ID NO: 331693 - DNA, 12 bp, Artificial Sequence
  Oligonucleotide primer for the detection of SNP TSC0036421
aaaacgcgtcca

SEQ ID NO: 331694 - DNA, 12 bp, Artificial Sequence
  Oligonucleotide primer for the detection of SNP TSC0036421
aaaacgcgtccg

SEQ ID NO: 331695 - DNA, 12 bp, Artificial Sequence
  Oligonucleotide primer for the detection of SNP TSC0036421
aagtttgtttgt

SEQ ID NO: 331696 - DNA, 12 bp, Artificial Sequence
  Oligonucleotide primer for the detection of SNP TSC0036421
aagttcgtttgt

SEQ ID NO: 331697 - DNA, 12 bp, Artificial Sequence
  Oligonucleotide primer for the detection of SNP TSC0036421
aagtttgttcgt

SEQ ID NO: 331698 - DNA, 12 bp, Artificial Sequence
  Oligonucleotide primer for the detection of SNP TSC0036421
aagtttgtttgc

SEQ ID NO: 331699 - DNA, 12 bp, Artificial Sequence
  Oligonucleotide primer for the detection of SNP TSC0036421
aagttcgttcgt

SEQ ID NO: 331700 - DNA, 12 bp, Artificial Sequence
  Oligonucleotide primer for the detection of SNP TSC0036421
aagttcgtttgc

SEQ ID NO: 331701 - DNA, 12 bp, Artificial Sequence
  Oligonucleotide primer for the detection of SNP TSC0036421
aagtttgttcgc

SEQ ID NO: 331702 - DNA, 12 bp, Artificial Sequence
  Oligonucleotide primer for the detection of SNP TSC0036421
aagttcgttcgc

SEQ ID NO: 331703 - DNA, 12 bp, Artificial Sequence
  Oligonukleotid-Primer
tttcttaaatct

SEQ ID NO: 331704 - DNA, 12 bp, Artificial Sequence
  Oligonucleotide primer for the detection of SNP TSC0036422
tttttagagggg

SEQ ID NO: 331705 - DNA, 12 bp, Artificial Sequence
  Oligonucleotide primer for the detection of SNP TSC0036423
ccatacattctt

SEQ ID NO: 331706 - DNA, 12 bp, Artificial Sequence
  Oligonucleotide primer for the detection of SNP TSC0036423
ggaaggttttta

SEQ ID NO: 331707 - DNA, 12 bp, Artificial Sequence
  Oligonukleotid-Primer
aaacctcaacta

SEQ ID NO: 331708 - DNA, 12 bp, Artificial Sequence
  Oligonucleotide primer for the detection of SNP TSC0036424
tgttagttttgt

SEQ ID NO: 331709 - DNA, 12 bp, Artificial Sequence
  Oligonucleotide primer for the detection of SNP TSC0036424
taccaatcctat

SEQ ID NO: 331710 - DNA, 12 bp, Artificial Sequence
  Oligonucleotide primer for the detection of SNP TSC0036426
tttttttggaaa

SEQ ID NO: 331711 - DNA, 12 bp, Artificial Sequence
  Oligonucleotide primer for the detection of SNP TSC0036426
tccttttaaaaa

SEQ ID NO: 331712 - DNA, 12 bp, Artificial Sequence
  Oligonucleotide primer for the detection of SNP TSC0036426
atttgagaaaaa

SEQ ID NO: 331713 - DNA, 12 bp, Artificial Sequence
  Oligonucleotide primer for the detection of SNP TSC0036427
ttcaaatactta

SEQ ID NO: 331714 - DNA, 12 bp, Artificial Sequence
  Oligonucleotide primer for the detection of SNP TSC0036427
gtaagggataat

SEQ ID NO: 331715 - DNA, 12 bp, Artificial Sequence
  Oligonucleotide primer for the detection of SNP TSC0036427
acaaaaaacaat

SEQ ID NO: 331716 - DNA, 12 bp, Artificial Sequence
  Oligonucleotide primer for the detection of SNP TSC0036427
tttaaatgtttg

SEQ ID NO: 331717 - DNA, 12 bp, Artificial Sequence
  Oligonucleotide primer for the detection of SNP TSC0036432
tatttccttaaa

SEQ ID NO: 331718 - DNA, 12 bp, Artificial Sequence
  Oligonucleotide primer for the detection of SNP TSC0036432
actacaaaccac

SEQ ID NO: 331719 - DNA, 12 bp, Artificial Sequence
  Oligonucleotide primer for the detection of SNP TSC0036432
tatttttttgag

SEQ ID NO: 331720 - DNA, 12 bp, Artificial Sequence
  Oligonucleotide primer for the detection of SNP TSC0036433
ttttagtttgag

SEQ ID NO: 331721 - DNA, 12 bp, Artificial Sequence
  Oligonucleotide primer for the detection of SNP TSC0036433
tccaatttaaaa

SEQ ID NO: 331722 - DNA, 12 bp, Artificial Sequence
  Oligonucleotide primer for the detection of SNP TSC0036433
gtttagtgagtt

SEQ ID NO: 331723 - DNA, 12 bp, Artificial Sequence
  Oligonucleotide primer for the detection of SNP TSC0036433
gtttagtgagtc

SEQ ID NO: 331724 - DNA, 12 bp, Artificial Sequence
  Oligonucleotide primer for the detection of SNP TSC0036434
tattatccccat

SEQ ID NO: 331725 - DNA, 12 bp, Artificial Sequence
  Oligonucleotide primer for the detection of SNP TSC0036434
ttgagaagtgga

SEQ ID NO: 331726 - DNA, 12 bp, Artificial Sequence
  Oligonucleotide primer for the detection of SNP TSC0036435
catactactata

SEQ ID NO: 331727 - DNA, 12 bp, Artificial Sequence
  Oligonucleotide primer for the detection of SNP TSC0036435
ttgtattagttc

SEQ ID NO: 331728 - DNA, 12 bp, Artificial Sequence
  Oligonucleotide primer for the detection of SNP TSC0036435
ctacactaactc

SEQ ID NO: 331729 - DNA, 12 bp, Artificial Sequence
  Oligonucleotide primer for the detection of SNP TSC0036435
tatgttgttgtg

SEQ ID NO: 331730 - DNA, 12 bp, Artificial Sequence
  Oligonucleotide primer for the detection of SNP TSC0036436
ccaacaaccaat

SEQ ID NO: 331731 - DNA, 12 bp, Artificial Sequence
  Oligonucleotide primer for the detection of SNP TSC0036436
ccgacaaccaat

SEQ ID NO: 331732 - DNA, 12 bp, Artificial Sequence
  Oligonucleotide primer for the detection of SNP TSC0036437
aactccatttca

SEQ ID NO: 331733 - DNA, 12 bp, Artificial Sequence
  Oligonucleotide primer for the detection of SNP TSC0036437
ttttttttcttt

SEQ ID NO: 331734 - DNA, 12 bp, Artificial Sequence
  Oligonucleotide primer for the detection of SNP TSC0036439
aaaaaaccgaac

SEQ ID NO: 331735 - DNA, 12 bp, Artificial Sequence
  Oligonucleotide primer for the detection of SNP TSC0036439
attgaattatgg

SEQ ID NO: 331736 - DNA, 12 bp, Artificial Sequence
  Oligonucleotide primer for the detection of SNP TSC0036439
attgaattacgg

SEQ ID NO: 331737 - DNA, 12 bp, Artificial Sequence
  Oligonucleotide primer for the detection of SNP TSC0036442
ataaattaaatc

SEQ ID NO: 331738 - DNA, 12 bp, Artificial Sequence
  Oligonucleotide primer for the detection of SNP TSC0036443
cctccaaaacca

SEQ ID NO: 331739 - DNA, 12 bp, Artificial Sequence
  Oligonucleotide primer for the detection of SNP TSC0036443
ttgggttggaag

SEQ ID NO: 331740 - DNA, 12 bp, Artificial Sequence
  Oligonucleotide primer for the detection of SNP TSC0036443
taaactaaaaaa

SEQ ID NO: 331741 - DNA, 12 bp, Artificial Sequence
  Oligonucleotide primer for the detection of SNP TSC0036444
attttaatatta

SEQ ID NO: 331742 - DNA, 12 bp, Artificial Sequence
  Oligonucleotide primer for the detection of SNP TSC0036444
ttttagtgttat

SEQ ID NO: 331743 - DNA, 12 bp, Artificial Sequence
  Oligonucleotide primer for the detection of SNP TSC0036446
caaaacacaacc

SEQ ID NO: 331744 - DNA, 12 bp, Artificial Sequence
  Oligonucleotide primer for the detection of SNP TSC0036446
ttgatggatatg

SEQ ID NO: 331745 - DNA, 12 bp, Artificial Sequence
  Oligonucleotide primer for the detection of SNP TSC0036446
ctaataaatata

SEQ ID NO: 331746 - DNA, 12 bp, Artificial Sequence
  Oligonucleotide primer for the detection of SNP TSC0036446
taggatatagtt

SEQ ID NO: 331747 - DNA, 12 bp, Artificial Sequence
  Oligonucleotide primer for the detection of SNP TSC0036451
acatcccattct

SEQ ID NO: 331748 - DNA, 12 bp, Artificial Sequence
  Oligonucleotide primer for the detection of SNP TSC0036451
attgttatttgg

SEQ ID NO: 331749 - DNA, 12 bp, Artificial Sequence
  Oligonucleotide primer for the detection of SNP TSC0036454
tcttaatatttt

SEQ ID NO: 331750 - DNA, 12 bp, Artificial Sequence
  Oligonucleotide primer for the detection of SNP TSC0036454
aaatttgagggg

SEQ ID NO: 331751 - DNA, 12 bp, Artificial Sequence
  Oligonucleotide primer for the detection of SNP TSC0036455
caaaactactta

SEQ ID NO: 331752 - DNA, 12 bp, Artificial Sequence
  Oligonucleotide primer for the detection of SNP TSC0036455
caaaacaaaatc

SEQ ID NO: 331753 - DNA, 12 bp, Artificial Sequence
  Oligonucleotide primer for the detection of SNP TSC0036456
atattatagata

SEQ ID NO: 331754 - DNA, 12 bp, Artificial Sequence
  Oligonucleotide primer for the detection of SNP TSC0036456
taccataaacaa

SEQ ID NO: 331755 - DNA, 12 bp, Artificial Sequence
  Oligonucleotide primer for the detection of SNP TSC0036456
gagaaaagattt

SEQ ID NO: 331756 - DNA, 12 bp, Artificial Sequence
  Oligonucleotide primer for the detection of SNP TSC0036457
agttttagtgag

SEQ ID NO: 331757 - DNA, 12 bp, Artificial Sequence
  Oligonucleotide primer for the detection of SNP TSC0036462
aatctctttacc

SEQ ID NO: 331758 - DNA, 12 bp, Artificial Sequence
  Oligonucleotide primer for the detection of SNP TSC0036462
gtaaatatatta

SEQ ID NO: 331759 - DNA, 12 bp, Artificial Sequence
  Oligonucleotide primer for the detection of SNP TSC0036463
tcgattttgaga

SEQ ID NO: 331760 - DNA, 12 bp, Artificial Sequence
  Oligonucleotide primer for the detection of SNP TSC0036464
cacatacctata

SEQ ID NO: 331761 - DNA, 12 bp, Artificial Sequence
  Oligonucleotide primer for the detection of SNP TSC0036464
cgcatacctata

SEQ ID NO: 331762 - DNA, 12 bp, Artificial Sequence
  Oligonucleotide primer for the detection of SNP TSC0036464
tgagtagttggg

SEQ ID NO: 331763 - DNA, 12 bp, Artificial Sequence
  Oligonucleotide primer for the detection of SNP TSC0036464
tgtatgtttata

SEQ ID NO: 331764 - DNA, 12 bp, Artificial Sequence
  Oligonucleotide primer for the detection of SNP TSC0036464
cgtatgtttata

SEQ ID NO: 331765 - DNA, 12 bp, Artificial Sequence
  Oligonucleotide primer for the detection of SNP TSC0036465
cgtaataaaacc

SEQ ID NO: 331766 - DNA, 12 bp, Artificial Sequence
  Oligonucleotide primer for the detection of SNP TSC0036465
ttggtaaagatg

SEQ ID NO: 331767 - DNA, 12 bp, Artificial Sequence
  Oligonucleotide primer for the detection of SNP TSC0036466
ccaacctcattt

SEQ ID NO: 331768 - DNA, 12 bp, Artificial Sequence
  Oligonucleotide primer for the detection of SNP TSC0036466
ccaacctcgttt

SEQ ID NO: 331769 - DNA, 12 bp, Artificial Sequence
  Oligonucleotide primer for the detection of SNP TSC0036466
ccgacctcattt

SEQ ID NO: 331770 - DNA, 12 bp, Artificial Sequence
  Oligonucleotide primer for the detection of SNP TSC0036466
ccgacctcgttt

SEQ ID NO: 331771 - DNA, 12 bp, Artificial Sequence
  Oligonucleotide primer for the detection of SNP TSC0036466
ttgaaagatgaa

SEQ ID NO: 331772 - DNA, 12 bp, Artificial Sequence
  Oligonucleotide primer for the detection of SNP TSC0036470
cctccatcaccc

SEQ ID NO: 331773 - DNA, 12 bp, Artificial Sequence
  Oligonucleotide primer for the detection of SNP TSC0036470
cctccatcgccc

SEQ ID NO: 331774 - DNA, 12 bp, Artificial Sequence
  Oligonucleotide primer for the detection of SNP TSC0036470
tgtgtggagata

SEQ ID NO: 331775 - DNA, 12 bp, Artificial Sequence
  Oligonucleotide primer for the detection of SNP TSC0036472
taaaccaataac

SEQ ID NO: 331776 - DNA, 12 bp, Artificial Sequence
  Oligonucleotide primer for the detection of SNP TSC0036472
taaaccgataac

SEQ ID NO: 331777 - DNA, 12 bp, Artificial Sequence
  Oligonucleotide primer for the detection of SNP TSC0036472
attttggtggaa

SEQ ID NO: 331778 - DNA, 12 bp, Artificial Sequence
  Oligonucleotide primer for the detection of SNP TSC0036473
aatactcaaatt

SEQ ID NO: 331779 - DNA, 12 bp, Artificial Sequence
  Oligonucleotide primer for the detection of SNP TSC0036473
tggtggtttata

SEQ ID NO: 331780 - DNA, 12 bp, Artificial Sequence
  Oligonucleotide primer for the detection of SNP TSC0036473
agtgtttagatt

SEQ ID NO: 331781 - DNA, 12 bp, Artificial Sequence
  Oligonucleotide primer for the detection of SNP TSC0036480
ccaacattcaaa

SEQ ID NO: 331782 - DNA, 12 bp, Artificial Sequence
  Oligonucleotide primer for the detection of SNP TSC0036480
aaaataatttga

SEQ ID NO: 331783 - DNA, 12 bp, Artificial Sequence
  Oligonucleotide primer for the detection of SNP TSC0036480
gttaatatttaa

SEQ ID NO: 331784 - DNA, 12 bp, Artificial Sequence
  Oligonucleotide primer for the detection of SNP TSC0036481
ttccatacctaa

SEQ ID NO: 331785 - DNA, 12 bp, Artificial Sequence
  Oligonucleotide primer for the detection of SNP TSC0036481
ttccgtacctaa

SEQ ID NO: 331786 - DNA, 12 bp, Artificial Sequence
  Oligonucleotide primer for the detection of SNP TSC0036482
ctctaataacaa

SEQ ID NO: 331787 - DNA, 12 bp, Artificial Sequence
  Oligonucleotide primer for the detection of SNP TSC0036482
ggtagttatttt

SEQ ID NO: 331788 - DNA, 12 bp, Artificial Sequence
  Oligonucleotide primer for the detection of SNP TSC0036487
ccctcaacaatc

SEQ ID NO: 331789 - DNA, 12 bp, Artificial Sequence
  Oligonucleotide primer for the detection of SNP TSC0036487
taggttatagta

SEQ ID NO: 331790 - DNA, 12 bp, Artificial Sequence
  Oligonucleotide primer for the detection of SNP TSC0036489
tttataaaaaaa

SEQ ID NO: 331791 - DNA, 12 bp, Artificial Sequence
  Oligonucleotide primer for the detection of SNP TSC0036494
taaaaaccaaaa

SEQ ID NO: 331792 - DNA, 12 bp, Artificial Sequence
  Oligonucleotide primer for the detection of SNP TSC0036494
gatttagaaggg

SEQ ID NO: 331793 - DNA, 12 bp, Artificial Sequence
  Oligonucleotide primer for the detection of SNP TSC0036494
atgggagttaga

SEQ ID NO: 331794 - DNA, 12 bp, Artificial Sequence
  Oligonucleotide primer for the detection of SNP TSC0036495
ataataacctta

SEQ ID NO: 331795 - DNA, 12 bp, Artificial Sequence
  Oligonucleotide primer for the detection of SNP TSC0036495
ttttgagtaatt

SEQ ID NO: 331796 - DNA, 12 bp, Artificial Sequence
  Oligonucleotide primer for the detection of SNP TSC0036495
atggtggttttg

SEQ ID NO: 331797 - DNA, 12 bp, Artificial Sequence
  Oligonucleotide primer for the detection of SNP TSC0036496
actcccaactct

SEQ ID NO: 331798 - DNA, 12 bp, Artificial Sequence
  Oligonucleotide primer for the detection of SNP TSC0036496
gtttgtttttag

SEQ ID NO: 331799 - DNA, 12 bp, Artificial Sequence
  Oligonucleotide primer for the detection of SNP TSC0036504
gaggtttttgat

SEQ ID NO: 331800 - DNA, 12 bp, Artificial Sequence
  Oligonucleotide primer for the detection of SNP TSC0036504
taagtatgaggg

SEQ ID NO: 331801 - DNA, 12 bp, Artificial Sequence
  Oligonucleotide primer for the detection of SNP TSC0036505
aaaaacgaaaat

SEQ ID NO: 331802 - DNA, 12 bp, Artificial Sequence
  Oligonucleotide primer for the detection of SNP TSC0036505
ggtgtgttttga

SEQ ID NO: 331803 - DNA, 12 bp, Artificial Sequence
  Oligonucleotide primer for the detection of SNP TSC0036505
ggcgtgttttga

SEQ ID NO: 331804 - DNA, 12 bp, Artificial Sequence
  Oligonucleotide primer for the detection of SNP TSC0036507
aaaaataaaatc

SEQ ID NO: 331805 - DNA, 12 bp, Artificial Sequence
  Oligonucleotide primer for the detection of SNP TSC0036507
ggtttttgttga

SEQ ID NO: 331806 - DNA, 12 bp, Artificial Sequence
  Oligonucleotide primer for the detection of SNP TSC0036510
tcatccaaaaac

SEQ ID NO: 331807 - DNA, 12 bp, Artificial Sequence
  Oligonucleotide primer for the detection of SNP TSC0036510
gagtatttattt

SEQ ID NO: 331808 - DNA, 12 bp, Artificial Sequence
  Oligonucleotide primer for the detection of SNP TSC0036510
acactcactcaa

SEQ ID NO: 331809 - DNA, 12 bp, Artificial Sequence
  Oligonucleotide primer for the detection of SNP TSC0036510
ttatttaagaat

SEQ ID NO: 331810 - DNA, 12 bp, Artificial Sequence
  Oligonucleotide primer for the detection of SNP TSC0036512
cttcaaaacaaa

SEQ ID NO: 331811 - DNA, 12 bp, Artificial Sequence
  Oligonucleotide primer for the detection of SNP TSC0036512
aatagagtgaga

SEQ ID NO: 331812 - DNA, 12 bp, Artificial Sequence
  Oligonucleotide primer for the detection of SNP TSC0036513
aaccaatatcac

SEQ ID NO: 331813 - DNA, 12 bp, Artificial Sequence
  Oligonucleotide primer for the detection of SNP TSC0036513
tatttgtttggg

SEQ ID NO: 331814 - DNA, 12 bp, Artificial Sequence
  Oligonucleotide primer for the detection of SNP TSC0036514
acctcccaaatt

SEQ ID NO: 331815 - DNA, 12 bp, Artificial Sequence
  Oligonucleotide primer for the detection of SNP TSC0036514
acctcccgaatt

SEQ ID NO: 331816 - DNA, 12 bp, Artificial Sequence
  Oligonucleotide primer for the detection of SNP TSC0036514
ttatgagaatta

SEQ ID NO: 331817 - DNA, 12 bp, Artificial Sequence
  Oligonucleotide primer for the detection of SNP TSC0036515
aaactcttcaat

SEQ ID NO: 331818 - DNA, 12 bp, Artificial Sequence
  Oligonucleotide primer for the detection of SNP TSC0036515
taggttgtgttg

SEQ ID NO: 331819 - DNA, 12 bp, Artificial Sequence
  Oligonucleotide primer for the detection of SNP TSC0036515
taggttgtgtcg

SEQ ID NO: 331820 - DNA, 12 bp, Artificial Sequence
  Oligonucleotide primer for the detection of SNP TSC0036515
caaactatacca

SEQ ID NO: 331821 - DNA, 12 bp, Artificial Sequence
  Oligonucleotide primer for the detection of SNP TSC0036515
caaactataccg

SEQ ID NO: 331822 - DNA, 12 bp, Artificial Sequence
  Oligonucleotide primer for the detection of SNP TSC0036515
aggttttttaat

SEQ ID NO: 331823 - DNA, 12 bp, Artificial Sequence
  Oligonucleotide primer for the detection of SNP TSC0036516
tctcttataaaa

SEQ ID NO: 331824 - DNA, 12 bp, Artificial Sequence
  Oligonucleotide primer for the detection of SNP TSC0036516
agaattttttgt

SEQ ID NO: 331825 - DNA, 12 bp, Artificial Sequence
  Oligonucleotide primer for the detection of SNP TSC0036516
agaattttttgc

SEQ ID NO: 331826 - DNA, 12 bp, Artificial Sequence
  Oligonucleotide primer for the detection of SNP TSC0036517
tataacactcac

SEQ ID NO: 331827 - DNA, 12 bp, Artificial Sequence
  Oligonucleotide primer for the detection of SNP TSC0036517
tatggattttgg

SEQ ID NO: 331828 - DNA, 12 bp, Artificial Sequence
  Oligonucleotide primer for the detection of SNP TSC0036517
tacggattttgg

SEQ ID NO: 331829 - DNA, 12 bp, Artificial Sequence
  Oligonucleotide primer for the detection of SNP TSC0036517
cacaaaccctaa

SEQ ID NO: 331830 - DNA, 12 bp, Artificial Sequence
  Oligonucleotide primer for the detection of SNP TSC0036517
cacgaaccctaa

SEQ ID NO: 331831 - DNA, 12 bp, Artificial Sequence
  Oligonucleotide primer for the detection of SNP TSC0036518
gaatattagaag

SEQ ID NO: 331832 - DNA, 12 bp, Artificial Sequence
  Oligonucleotide primer for the detection of SNP TSC0036519
aaaatcttcatt

SEQ ID NO: 331833 - DNA, 12 bp, Artificial Sequence
  Oligonucleotide primer for the detection of SNP TSC0036519
gagtttaattga

SEQ ID NO: 331834 - DNA, 12 bp, Artificial Sequence
  Oligonucleotide primer for the detection of SNP TSC0036524
aacaaaactatc

SEQ ID NO: 331835 - DNA, 12 bp, Artificial Sequence
  Oligonucleotide primer for the detection of SNP TSC0036529
tttgaggtattt

SEQ ID NO: 331836 - DNA, 12 bp, Artificial Sequence
  Oligonucleotide primer for the detection of SNP TSC0036529
cctaaaacattc

SEQ ID NO: 331837 - DNA, 12 bp, Artificial Sequence
  Oligonucleotide primer for the detection of SNP TSC0036529
aaattagagtgg

SEQ ID NO: 331838 - DNA, 12 bp, Artificial Sequence
  Oligonucleotide primer for the detection of SNP TSC0036530
catctcaaaatt

SEQ ID NO: 331839 - DNA, 12 bp, Artificial Sequence
  Oligonucleotide primer for the detection of SNP TSC0036530
cgtctcaaaatt

SEQ ID NO: 331840 - DNA, 12 bp, Artificial Sequence
  Oligonucleotide primer for the detection of SNP TSC0036530
tgttttaaaatt

SEQ ID NO: 331841 - DNA, 12 bp, Artificial Sequence
  Oligonucleotide primer for the detection of SNP TSC0036530
cgttttaaaatt

SEQ ID NO: 331842 - DNA, 12 bp, Artificial Sequence
  Oligonucleotide primer for the detection of SNP TSC0036531
ctcctaactata

SEQ ID NO: 331843 - DNA, 12 bp, Artificial Sequence
  Oligonucleotide primer for the detection of SNP TSC0036531
tttattagagtt

SEQ ID NO: 331844 - DNA, 12 bp, Artificial Sequence
  Oligonucleotide primer for the detection of SNP TSC0036531
tcaccaaaacta

SEQ ID NO: 331845 - DNA, 12 bp, Artificial Sequence
  Oligonucleotide primer for the detection of SNP TSC0036531
ttttggttgtgt

SEQ ID NO: 331846 - DNA, 12 bp, Artificial Sequence
  Oligonucleotide primer for the detection of SNP TSC0036532
atattactaaac

SEQ ID NO: 331847 - DNA, 12 bp, Artificial Sequence
  Oligonucleotide primer for the detection of SNP TSC0036534
aaacaaacaacc

SEQ ID NO: 331848 - DNA, 12 bp, Artificial Sequence
  Oligonucleotide primer for the detection of SNP TSC0036534
tgtttttatttg

SEQ ID NO: 331849 - DNA, 12 bp, Artificial Sequence
  Oligonucleotide primer for the detection of SNP TSC0036534
tgtttttattcg

SEQ ID NO: 331850 - DNA, 12 bp, Artificial Sequence
  Oligonucleotide primer for the detection of SNP TSC0036534
cctctattcaaa

SEQ ID NO: 331851 - DNA, 12 bp, Artificial Sequence
  Oligonucleotide primer for the detection of SNP TSC0036534
cctctattcgaa

SEQ ID NO: 331852 - DNA, 12 bp, Artificial Sequence
  Oligonucleotide primer for the detection of SNP TSC0036534
ggataaataatt

SEQ ID NO: 331853 - DNA, 12 bp, Artificial Sequence
  Oligonucleotide primer for the detection of SNP TSC0036535
atatataacccc

SEQ ID NO: 331854 - DNA, 12 bp, Artificial Sequence
  Oligonucleotide primer for the detection of SNP TSC0036535
tgggaaatgtga

SEQ ID NO: 331855 - DNA, 12 bp, Artificial Sequence
  Oligonucleotide primer for the detection of SNP TSC0036535
tgggaaacgtga

SEQ ID NO: 331856 - DNA, 12 bp, Artificial Sequence
  Oligonucleotide primer for the detection of SNP TSC0036539
acacaataattt

SEQ ID NO: 331857 - DNA, 12 bp, Artificial Sequence
  Oligonucleotide primer for the detection of SNP TSC0036539
agtaaaggttaa

SEQ ID NO: 331858 - DNA, 12 bp, Artificial Sequence
  Oligonucleotide primer for the detection of SNP TSC0036541
ccataatcaact

SEQ ID NO: 331859 - DNA, 12 bp, Artificial Sequence
  Oligonucleotide primer for the detection of SNP TSC0036541
ccgtaatcaact

SEQ ID NO: 331860 - DNA, 12 bp, Artificial Sequence
  Oligonucleotide primer for the detection of SNP TSC0036541
ttagaaaagaag

SEQ ID NO: 331861 - DNA, 12 bp, Artificial Sequence
  Oligonucleotide primer for the detection of SNP TSC0036542
aaaatctctacc

SEQ ID NO: 331862 - DNA, 12 bp, Artificial Sequence
  Oligonucleotide primer for the detection of SNP TSC0036542
tttagggagaaa

SEQ ID NO: 331863 - DNA, 12 bp, Artificial Sequence
  Oligonucleotide primer for the detection of SNP TSC0036543
tcctataccttc

SEQ ID NO: 331864 - DNA, 12 bp, Artificial Sequence
  Oligonucleotide primer for the detection of SNP TSC0036543
agtagtaagttt

SEQ ID NO: 331865 - DNA, 12 bp, Artificial Sequence
  Oligonucleotide primer for the detection of SNP TSC0036543
agtagtaagttc

SEQ ID NO: 331866 - DNA, 12 bp, Artificial Sequence
  Oligonucleotide primer for the detection of SNP TSC0036545
aattttaattta

SEQ ID NO: 331867 - DNA, 12 bp, Artificial Sequence
  Oligonucleotide primer for the detection of SNP TSC0036545
aattattagggt

SEQ ID NO: 331868 - DNA, 12 bp, Artificial Sequence
  Oligonucleotide primer for the detection of SNP TSC0036545
aatcatcaaaat

SEQ ID NO: 331869 - DNA, 12 bp, Artificial Sequence
  Oligonucleotide primer for the detection of SNP TSC0036545
ggttttgatttg

SEQ ID NO: 331870 - DNA, 12 bp, Artificial Sequence
  Oligonucleotide primer for the detection of SNP TSC0036546
ccataataacta

SEQ ID NO: 331871 - DNA, 12 bp, Artificial Sequence
  Oligonucleotide primer for the detection of SNP TSC0036546
atgtaagttagt

SEQ ID NO: 331872 - DNA, 12 bp, Artificial Sequence
  Oligonucleotide primer for the detection of SNP TSC0036546
tttatagtggtt

SEQ ID NO: 331873 - DNA, 12 bp, Artificial Sequence
  Oligonucleotide primer for the detection of SNP TSC0036547
tcttccaataca

SEQ ID NO: 331874 - DNA, 12 bp, Artificial Sequence
  Oligonucleotide primer for the detection of SNP TSC0036547
acccctatctcc

SEQ ID NO: 331875 - DNA, 12 bp, Artificial Sequence
  Oligonucleotide primer for the detection of SNP TSC0036547
attttttagtgt

SEQ ID NO: 331876 - DNA, 12 bp, Artificial Sequence
  Oligonucleotide primer for the detection of SNP TSC0036548
ttaataattata

SEQ ID NO: 331877 - DNA, 12 bp, Artificial Sequence
  Oligonucleotide primer for the detection of SNP TSC0036548
aaagtttttttc

SEQ ID NO: 331878 - DNA, 12 bp, Artificial Sequence
  Oligonucleotide primer for the detection of SNP TSC0036548
ataattatattt

SEQ ID NO: 331879 - DNA, 12 bp, Artificial Sequence
  Oligonucleotide primer for the detection of SNP TSC0036550
taacaactaaat

SEQ ID NO: 331880 - DNA, 12 bp, Artificial Sequence
  Oligonucleotide primer for the detection of SNP TSC0036550
tattaatattag

SEQ ID NO: 331881 - DNA, 12 bp, Artificial Sequence
  Oligonucleotide primer for the detection of SNP TSC0036550
caccaacattaa

SEQ ID NO: 331882 - DNA, 12 bp, Artificial Sequence
  Oligonucleotide primer for the detection of SNP TSC0036550
tgataattgaat

SEQ ID NO: 331883 - DNA, 12 bp, Artificial Sequence
  Oligonucleotide primer for the detection of SNP TSC0036552
ctccaacttttc

SEQ ID NO: 331884 - DNA, 12 bp, Artificial Sequence
  Oligonucleotide primer for the detection of SNP TSC0036552
gtgttataaaga

SEQ ID NO: 331885 - DNA, 12 bp, Artificial Sequence
  Oligonucleotide primer for the detection of SNP TSC0036553
gattatttaaat

SEQ ID NO: 331886 - DNA, 12 bp, Artificial Sequence
  Oligonucleotide primer for the detection of SNP TSC0036553
aattatttaaat

SEQ ID NO: 331887 - DNA, 12 bp, Artificial Sequence
  Oligonucleotide primer for the detection of SNP TSC0036554
taacttacttct

SEQ ID NO: 331888 - DNA, 12 bp, Artificial Sequence
  Oligonucleotide primer for the detection of SNP TSC0036554
gaaaaaatgtta

SEQ ID NO: 331889 - DNA, 12 bp, Artificial Sequence
  Oligonucleotide primer for the detection of SNP TSC0036554
taatttgttttt

SEQ ID NO: 331890 - DNA, 12 bp, Artificial Sequence
  Oligonucleotide primer for the detection of SNP TSC0036555
ttaaacacttat

SEQ ID NO: 331891 - DNA, 12 bp, Artificial Sequence
  Oligonucleotide primer for the detection of SNP TSC0036555
taaaaaatagta

SEQ ID NO: 331892 - DNA, 12 bp, Artificial Sequence
  Oligonucleotide primer for the detection of SNP TSC0036556
actaaaatcata

SEQ ID NO: 331893 - DNA, 12 bp, Artificial Sequence
  Oligonucleotide primer for the detection of SNP TSC0036556
taagaaaggagg

SEQ ID NO: 331894 - DNA, 12 bp, Artificial Sequence
  Oligonucleotide primer for the detection of SNP TSC0036556
aaaattatattt

SEQ ID NO: 331895 - DNA, 12 bp, Artificial Sequence
  Oligonucleotide primer for the detection of SNP TSC0036565
aactaaaaacaa

SEQ ID NO: 331896 - DNA, 12 bp, Artificial Sequence
  Oligonucleotide primer for the detection of SNP TSC0036565
ctccacaaccac

SEQ ID NO: 331897 - DNA, 12 bp, Artificial Sequence
  Oligonucleotide primer for the detection of SNP TSC0036565
agttaaaagtaa

SEQ ID NO: 331898 - DNA, 12 bp, Artificial Sequence
  Oligonucleotide primer for the detection of SNP TSC0036566
caatcataatca

SEQ ID NO: 331899 - DNA, 12 bp, Artificial Sequence
  Oligonucleotide primer for the detection of SNP TSC0036566
aaaacttaacac

SEQ ID NO: 331900 - DNA, 12 bp, Artificial Sequence
  Oligonucleotide primer for the detection of SNP TSC0036566
taattatgatta

SEQ ID NO: 331901 - DNA, 12 bp, Artificial Sequence
  Oligonucleotide primer for the detection of SNP TSC0036567
gggttaatgaat

SEQ ID NO: 331902 - DNA, 12 bp, Artificial Sequence
  Oligonucleotide primer for the detection of SNP TSC0036568
accttttaacac

SEQ ID NO: 331903 - DNA, 12 bp, Artificial Sequence
  Oligonucleotide primer for the detection of SNP TSC0036568
taagttaatata

SEQ ID NO: 331904 - DNA, 12 bp, Artificial Sequence
  Oligonucleotide primer for the detection of SNP TSC0036569
attttaatattt

SEQ ID NO: 331905 - DNA, 12 bp, Artificial Sequence
  Oligonucleotide primer for the detection of SNP TSC0036571
gatatgattggg

SEQ ID NO: 331906 - DNA, 12 bp, Artificial Sequence
  Oligonucleotide primer for the detection of SNP TSC0036572
cttctctatccc

SEQ ID NO: 331907 - DNA, 12 bp, Artificial Sequence
  Oligonucleotide primer for the detection of SNP TSC0036572
taaagtaggtag

SEQ ID NO: 331908 - DNA, 12 bp, Artificial Sequence
  Oligonucleotide primer for the detection of SNP TSC0036581
tagaattggaaa

SEQ ID NO: 331909 - DNA, 12 bp, Artificial Sequence
  Oligonucleotide primer for the detection of SNP TSC0036583
aaatccaaaatt

SEQ ID NO: 331910 - DNA, 12 bp, Artificial Sequence
  Oligonucleotide primer for the detection of SNP TSC0036583
taaaaatttata

SEQ ID NO: 331911 - DNA, 12 bp, Artificial Sequence
  Oligonucleotide primer for the detection of SNP TSC0036584
ctaaccaaacaa

SEQ ID NO: 331912 - DNA, 12 bp, Artificial Sequence
  Oligonucleotide primer for the detection of SNP TSC0036584
ctaaccaaacga

SEQ ID NO: 331913 - DNA, 12 bp, Artificial Sequence
  Oligonucleotide primer for the detection of SNP TSC0036584
tatagggttttt

SEQ ID NO: 331914 - DNA, 12 bp, Artificial Sequence
  Oligonucleotide primer for the detection of SNP TSC0036584
cacaaaaccctc

SEQ ID NO: 331915 - DNA, 12 bp, Artificial Sequence
  Oligonucleotide primer for the detection of SNP TSC0036584
ttggttaggtga

SEQ ID NO: 331916 - DNA, 12 bp, Artificial Sequence
  Oligonucleotide primer for the detection of SNP TSC0036584
ttggttaggcga

SEQ ID NO: 331917 - DNA, 12 bp, Artificial Sequence
  Oligonucleotide primer for the detection of SNP TSC0036586
atttactaccta

SEQ ID NO: 331918 - DNA, 12 bp, Artificial Sequence
  Oligonucleotide primer for the detection of SNP TSC0036586
cattcttcacct

SEQ ID NO: 331919 - DNA, 12 bp, Artificial Sequence
  Oligonucleotide primer for the detection of SNP TSC0036586
gtttgttatttg

SEQ ID NO: 331920 - DNA, 12 bp, Artificial Sequence
  Oligonucleotide primer for the detection of SNP TSC0036589
taatttttaact

SEQ ID NO: 331921 - DNA, 12 bp, Artificial Sequence
  Oligonucleotide primer for the detection of SNP TSC0036589
agaattttaaaa

SEQ ID NO: 331922 - DNA, 12 bp, Artificial Sequence
  Oligonucleotide primer for the detection of SNP TSC0036590
caaactaatcca

SEQ ID NO: 331923 - DNA, 12 bp, Artificial Sequence
  Oligonucleotide primer for the detection of SNP TSC0036590
gttattgatagt

SEQ ID NO: 331924 - DNA, 12 bp, Artificial Sequence
  Oligonucleotide primer for the detection of SNP TSC0036590
accactaacaac

SEQ ID NO: 331925 - DNA, 12 bp, Artificial Sequence
  Oligonucleotide primer for the detection of SNP TSC0036590
tagattagttta

SEQ ID NO: 331926 - DNA, 12 bp, Artificial Sequence
  Oligonucleotide primer for the detection of SNP TSC0036591
tcattaataaac

SEQ ID NO: 331927 - DNA, 12 bp, Artificial Sequence
  Oligonucleotide primer for the detection of SNP TSC0036591
gaagttagaggt

SEQ ID NO: 331928 - DNA, 12 bp, Artificial Sequence
  Oligonucleotide primer for the detection of SNP TSC0036591
ttattaataaat

SEQ ID NO: 331929 - DNA, 12 bp, Artificial Sequence
  Oligonucleotide primer for the detection of SNP TSC0036592
agtggttttttt

SEQ ID NO: 331930 - DNA, 12 bp, Artificial Sequence
  Oligonucleotide primer for the detection of SNP TSC0036592
acaccaataact

SEQ ID NO: 331931 - DNA, 12 bp, Artificial Sequence
  Oligonucleotide primer for the detection of SNP TSC0036592
taaataagaggg

SEQ ID NO: 331932 - DNA, 12 bp, Artificial Sequence
  Oligonucleotide primer for the detection of SNP TSC0036593
agatttaaatag

SEQ ID NO: 331933 - DNA, 12 bp, Artificial Sequence
  Oligonucleotide primer for the detection of SNP TSC0036600
ccatacctaccc

SEQ ID NO: 331934 - DNA, 12 bp, Artificial Sequence
  Oligonucleotide primer for the detection of SNP TSC0036600
ccgtacctaccc

SEQ ID NO: 331935 - DNA, 12 bp, Artificial Sequence
  Oligonucleotide primer for the detection of SNP TSC0036600
agggtaggtgtg

SEQ ID NO: 331936 - DNA, 12 bp, Artificial Sequence
  Oligonucleotide primer for the detection of SNP TSC0036600
ttgtgtttgttt

SEQ ID NO: 331937 - DNA, 12 bp, Artificial Sequence
  Oligonucleotide primer for the detection of SNP TSC0036600
tcgtgtttgttt

SEQ ID NO: 331938 - DNA, 12 bp, Artificial Sequence
  Oligonucleotide primer for the detection of SNP TSC0036601
actcaacccaaa

SEQ ID NO: 331939 - DNA, 12 bp, Artificial Sequence
  Oligonucleotide primer for the detection of SNP TSC0036601
tagggagagggt

SEQ ID NO: 331940 - DNA, 12 bp, Artificial Sequence
  Oligonucleotide primer for the detection of SNP TSC0036601
gtttagtttagg

SEQ ID NO: 331941 - DNA, 12 bp, Artificial Sequence
  Oligonucleotide primer for the detection of SNP TSC0036602
ctaacaccctaa

SEQ ID NO: 331942 - DNA, 12 bp, Artificial Sequence
  Oligonucleotide primer for the detection of SNP TSC0036602
gaggggtggtat

SEQ ID NO: 331943 - DNA, 12 bp, Artificial Sequence
  Oligonucleotide primer for the detection of SNP TSC0036602
aaaaataacata

SEQ ID NO: 331944 - DNA, 12 bp, Artificial Sequence
  Oligonucleotide primer for the detection of SNP TSC0036602
ttaatattttgg

SEQ ID NO: 331945 - DNA, 12 bp, Artificial Sequence
  Oligonucleotide primer for the detection of SNP TSC0036606
ctttttaactaa

SEQ ID NO: 331946 - DNA, 12 bp, Artificial Sequence
  Oligonucleotide primer for the detection of SNP TSC0036606
ttttttttaaat

SEQ ID NO: 331947 - DNA, 12 bp, Artificial Sequence
  Oligonucleotide primer for the detection of SNP TSC0036606
cccctctccaaa

SEQ ID NO: 331948 - DNA, 12 bp, Artificial Sequence
  Oligonucleotide primer for the detection of SNP TSC0036608
ccaaactcacat

SEQ ID NO: 331949 - DNA, 12 bp, Artificial Sequence
  Oligonucleotide primer for the detection of SNP TSC0036608
ccaaactcgcat

SEQ ID NO: 331950 - DNA, 12 bp, Artificial Sequence
  Oligonucleotide primer for the detection of SNP TSC0036608
tttggtataagg

SEQ ID NO: 331951 - DNA, 12 bp, Artificial Sequence
  Oligonucleotide primer for the detection of SNP TSC0036609
actaatctaaaa

SEQ ID NO: 331952 - DNA, 12 bp, Artificial Sequence
  Oligonucleotide primer for the detection of SNP TSC0036609
tttaggtagaat

SEQ ID NO: 331953 - DNA, 12 bp, Artificial Sequence
  Oligonucleotide primer for the detection of SNP TSC0036609
ttattagtttgg

SEQ ID NO: 331954 - DNA, 12 bp, Artificial Sequence
  Oligonucleotide primer for the detection of SNP TSC0036610
tatttatctaat

SEQ ID NO: 331955 - DNA, 12 bp, Artificial Sequence
  Oligonucleotide primer for the detection of SNP TSC0036610
aatatagagatg

SEQ ID NO: 331956 - DNA, 12 bp, Artificial Sequence
  Oligonucleotide primer for the detection of SNP TSC0036611
aaatcctatccc

SEQ ID NO: 331957 - DNA, 12 bp, Artificial Sequence
  Oligonucleotide primer for the detection of SNP TSC0036611
tttttgtgttta

SEQ ID NO: 331958 - DNA, 12 bp, Artificial Sequence
  Oligonucleotide primer for the detection of SNP TSC0036615
actccaccaacc

SEQ ID NO: 331959 - DNA, 12 bp, Artificial Sequence
  Oligonucleotide primer for the detection of SNP TSC0036615
ttggtattttgg

SEQ ID NO: 331960 - DNA, 12 bp, Artificial Sequence
  Oligonucleotide primer for the detection of SNP TSC0036615
tcggtattttgg

SEQ ID NO: 331961 - DNA, 12 bp, Artificial Sequence
  Oligonucleotide primer for the detection of SNP TSC0036616
tgatttaatatt

SEQ ID NO: 331962 - DNA, 12 bp, Artificial Sequence
  Oligonucleotide primer for the detection of SNP TSC0036616
cgatttaatatt

SEQ ID NO: 331963 - DNA, 12 bp, Artificial Sequence
  Oligonucleotide primer for the detection of SNP TSC0036616
tgatttaatatc

SEQ ID NO: 331964 - DNA, 12 bp, Artificial Sequence
  Oligonucleotide primer for the detection of SNP TSC0036616
cgatttaatatc

SEQ ID NO: 331965 - DNA, 12 bp, Artificial Sequence
  Oligonucleotide primer for the detection of SNP TSC0036616
caacctaatacc

SEQ ID NO: 331966 - DNA, 12 bp, Artificial Sequence
  Oligonucleotide primer for the detection of SNP TSC0036616
cgacctaatacc

SEQ ID NO: 331967 - DNA, 12 bp, Artificial Sequence
  Oligonucleotide primer for the detection of SNP TSC0036616
aattgtaggagg

SEQ ID NO: 331968 - DNA, 12 bp, Artificial Sequence
  Oligonucleotide primer for the detection of SNP TSC0036625
ccaacactctac

SEQ ID NO: 331969 - DNA, 12 bp, Artificial Sequence
  Oligonukleotid-Primer
ccaacgctctac

SEQ ID NO: 331970 - DNA, 12 bp, Artificial Sequence
  Oligonucleotide primer for the detection of SNP TSC0036625
ttaggttttttc

SEQ ID NO: 331971 - DNA, 12 bp, Artificial Sequence
  Oligonucleotide primer for the detection of SNP TSC0036625
ccaaatcccctc

SEQ ID NO: 331972 - DNA, 12 bp, Artificial Sequence
  Oligonucleotide primer for the detection of SNP TSC0036625
ttagtgttttat

SEQ ID NO: 331973 - DNA, 12 bp, Artificial Sequence
  Oligonucleotide primer for the detection of SNP TSC0036625
ttagcgttttat

SEQ ID NO: 331974 - DNA, 12 bp, Artificial Sequence
  Oligonucleotide primer for the detection of SNP TSC0036625
ttagtgttttac

SEQ ID NO: 331975 - DNA, 12 bp, Artificial Sequence
  Oligonucleotide primer for the detection of SNP TSC0036625
ttagcgttttac

SEQ ID NO: 331976 - DNA, 12 bp, Artificial Sequence
  Oligonucleotide primer for the detection of SNP TSC0036626
agtattgttata

SEQ ID NO: 331977 - DNA, 12 bp, Artificial Sequence
  Oligonucleotide primer for the detection of SNP TSC0036627
agttagtaagtg

SEQ ID NO: 331978 - DNA, 12 bp, Artificial Sequence
  Oligonucleotide primer for the detection of SNP TSC0036628
aaagtaggtaag

SEQ ID NO: 331979 - DNA, 12 bp, Artificial Sequence
  Oligonucleotide primer for the detection of SNP TSC0036629
aaaattctcaat

SEQ ID NO: 331980 - DNA, 12 bp, Artificial Sequence
  Oligonucleotide primer for the detection of SNP TSC0036629
gatttttataga

SEQ ID NO: 331981 - DNA, 12 bp, Artificial Sequence
  Oligonucleotide primer for the detection of SNP TSC0036631
cctcaaaaattc

SEQ ID NO: 331982 - DNA, 12 bp, Artificial Sequence
  Oligonucleotide primer for the detection of SNP TSC0036631
ggtttttatttg

SEQ ID NO: 331983 - DNA, 12 bp, Artificial Sequence
  Oligonucleotide primer for the detection of SNP TSC0036632
ccaaaaactact

SEQ ID NO: 331984 - DNA, 12 bp, Artificial Sequence
  Oligonucleotide primer for the detection of SNP TSC0036632
ttggttgtgtat

SEQ ID NO: 331985 - DNA, 12 bp, Artificial Sequence
  Oligonucleotide primer for the detection of SNP TSC0036632
tcggttgtgtat

SEQ ID NO: 331986 - DNA, 12 bp, Artificial Sequence
  Oligonucleotide primer for the detection of SNP TSC0036632
ttggtcgtgtat

SEQ ID NO: 331987 - DNA, 12 bp, Artificial Sequence
  Oligonucleotide primer for the detection of SNP TSC0036632
tcggtcgtgtat

SEQ ID NO: 331988 - DNA, 12 bp, Artificial Sequence
  Oligonucleotide primer for the detection of SNP TSC0036632
ccaaccatacac

SEQ ID NO: 331989 - DNA, 12 bp, Artificial Sequence
  Oligonucleotide primer for the detection of SNP TSC0036632
ccaaccgtacac

SEQ ID NO: 331990 - DNA, 12 bp, Artificial Sequence
  Oligonucleotide primer for the detection of SNP TSC0036632
ccgaccatacac

SEQ ID NO: 331991 - DNA, 12 bp, Artificial Sequence
  Oligonucleotide primer for the detection of SNP TSC0036632
ccgaccgtacac

SEQ ID NO: 331992 - DNA, 12 bp, Artificial Sequence
  Oligonucleotide primer for the detection of SNP TSC0036632
ttaggaattgtt

SEQ ID NO: 331993 - DNA, 12 bp, Artificial Sequence
  Oligonucleotide primer for the detection of SNP TSC0036633
ttttaggtgtgt

SEQ ID NO: 331994 - DNA, 12 bp, Artificial Sequence
  Oligonucleotide primer for the detection of SNP TSC0036633
ttttaggtgcgt

SEQ ID NO: 331995 - DNA, 12 bp, Artificial Sequence
  Oligonucleotide primer for the detection of SNP TSC0036633
cttcaaatacac

SEQ ID NO: 331996 - DNA, 12 bp, Artificial Sequence
  Oligonucleotide primer for the detection of SNP TSC0036633
cttcaaatacgc

SEQ ID NO: 331997 - DNA, 12 bp, Artificial Sequence
  Oligonucleotide primer for the detection of SNP TSC0036633
aagaattgggtg

SEQ ID NO: 331998 - DNA, 12 bp, Artificial Sequence
  Oligonucleotide primer for the detection of SNP TSC0036634
tcaccaactccc

SEQ ID NO: 331999 - DNA, 12 bp, Artificial Sequence
  Oligonucleotide primer for the detection of SNP TSC0036634
tcgccaactccc

SEQ ID NO: 332000 - DNA, 12 bp, Artificial Sequence
  Oligonucleotide primer for the detection of SNP TSC0036634
ttgaaggtgttg

SEQ ID NO: 332001 - DNA, 12 bp, Artificial Sequence
  Oligonucleotide primer for the detection of SNP TSC0036634
ttgaaggcgttg

SEQ ID NO: 332002 - DNA, 12 bp, Artificial Sequence
  Oligonucleotide primer for the detection of SNP TSC0036634
ctaaaaacacta

SEQ ID NO: 332003 - DNA, 12 bp, Artificial Sequence
  Oligonucleotide primer for the detection of SNP TSC0036634
ctaaaaacgcta

SEQ ID NO: 332004 - DNA, 12 bp, Artificial Sequence
  Oligonucleotide primer for the detection of SNP TSC0036634
ttgttagttttt

SEQ ID NO: 332005 - DNA, 12 bp, Artificial Sequence
  Oligonucleotide primer for the detection of SNP TSC0036634
tcgttagttttt

SEQ ID NO: 332006 - DNA, 12 bp, Artificial Sequence
  Oligonucleotide primer for the detection of SNP TSC0036636
aataatacactc

SEQ ID NO: 332007 - DNA, 12 bp, Artificial Sequence
  Oligonucleotide primer for the detection of SNP TSC0036636
ttggagtggatg

SEQ ID NO: 332008 - DNA, 12 bp, Artificial Sequence
  Oligonucleotide primer for the detection of SNP TSC0036638
acaaatatttct

SEQ ID NO: 332009 - DNA, 12 bp, Artificial Sequence
  Oligonucleotide primer for the detection of SNP TSC0036638
aggatgaggtag

SEQ ID NO: 332010 - DNA, 12 bp, Artificial Sequence
  Oligonucleotide primer for the detection of SNP TSC0036641
attcatatttta

SEQ ID NO: 332011 - DNA, 12 bp, Artificial Sequence
  Oligonucleotide primer for the detection of SNP TSC0036641
gatgaattgtta

SEQ ID NO: 332012 - DNA, 12 bp, Artificial Sequence
  Oligonucleotide primer for the detection of SNP TSC0036642
tactaaaaaatc

SEQ ID NO: 332013 - DNA, 12 bp, Artificial Sequence
  Oligonucleotide primer for the detection of SNP TSC0036642
aggtttttgtag

SEQ ID NO: 332014 - DNA, 12 bp, Artificial Sequence
  Oligonucleotide primer for the detection of SNP TSC0036643
aataaccacatc

SEQ ID NO: 332015 - DNA, 12 bp, Artificial Sequence
  Oligonucleotide primer for the detection of SNP TSC0036643
tcccttaaccct

SEQ ID NO: 332016 - DNA, 12 bp, Artificial Sequence
  Oligonucleotide primer for the detection of SNP TSC0036643
agtgattatatt

SEQ ID NO: 332017 - DNA, 12 bp, Artificial Sequence
  Oligonucleotide primer for the detection of SNP TSC0036647
tatttataacca

SEQ ID NO: 332018 - DNA, 12 bp, Artificial Sequence
  Oligonucleotide primer for the detection of SNP TSC0036647
aaggtgtgtggt

SEQ ID NO: 332019 - DNA, 12 bp, Artificial Sequence
  Oligonucleotide primer for the detection of SNP TSC0036647
tatttatggtta

SEQ ID NO: 332020 - DNA, 12 bp, Artificial Sequence
  Oligonucleotide primer for the detection of SNP TSC0036648
gaaatgtaaaga

SEQ ID NO: 332021 - DNA, 12 bp, Artificial Sequence
  Oligonucleotide primer for the detection of SNP TSC0036649
cccaacacttct

SEQ ID NO: 332022 - DNA, 12 bp, Artificial Sequence
  Oligonucleotide primer for the detection of SNP TSC0036649
tatggtgtgtaa

SEQ ID NO: 332023 - DNA, 12 bp, Artificial Sequence
  Oligonucleotide primer for the detection of SNP TSC0036652
acataaaactat

SEQ ID NO: 332024 - DNA, 12 bp, Artificial Sequence
  Oligonucleotide primer for the detection of SNP TSC0036652
gatgtttttgta

SEQ ID NO: 332025 - DNA, 12 bp, Artificial Sequence
  Oligonucleotide primer for the detection of SNP TSC0036653
ctaatcttcaaa

SEQ ID NO: 332026 - DNA, 12 bp, Artificial Sequence
  Oligonucleotide primer for the detection of SNP TSC0036653
atagatagttgt

SEQ ID NO: 332027 - DNA, 12 bp, Artificial Sequence
  Oligonucleotide primer for the detection of SNP TSC0036653
acaaacaactac

SEQ ID NO: 332028 - DNA, 12 bp, Artificial Sequence
  Oligonucleotide primer for the detection of SNP TSC0036654
ctttatatattt

SEQ ID NO: 332029 - DNA, 12 bp, Artificial Sequence
  Oligonucleotide primer for the detection of SNP TSC0036654
tttgaagattag

SEQ ID NO: 332030 - DNA, 12 bp, Artificial Sequence
  Oligonucleotide primer for the detection of SNP TSC0036654
cctaaaaaccaa

SEQ ID NO: 332031 - DNA, 12 bp, Artificial Sequence
  Oligonucleotide primer for the detection of SNP TSC0036656
tgtatgagtatg

SEQ ID NO: 332032 - DNA, 12 bp, Artificial Sequence
  Oligonucleotide primer for the detection of SNP TSC0036656
cgtatgagtatg

SEQ ID NO: 332033 - DNA, 12 bp, Artificial Sequence
  Oligonucleotide primer for the detection of SNP TSC0036660
aatacatcaaat

SEQ ID NO: 332034 - DNA, 12 bp, Artificial Sequence
  Oligonucleotide primer for the detection of SNP TSC0036660
atttttgaggta

SEQ ID NO: 332035 - DNA, 12 bp, Artificial Sequence
  Oligonucleotide primer for the detection of SNP TSC0036661
ccctaaaaaatc

SEQ ID NO: 332036 - DNA, 12 bp, Artificial Sequence
  Oligonucleotide primer for the detection of SNP TSC0036661
taaattttagtt

SEQ ID NO: 332037 - DNA, 12 bp, Artificial Sequence
  Oligonucleotide primer for the detection of SNP TSC0036662
ttcacaaatcct

SEQ ID NO: 332038 - DNA, 12 bp, Artificial Sequence
  Oligonucleotide primer for the detection of SNP TSC0036662
ataatatttgta

SEQ ID NO: 332039 - DNA, 12 bp, Artificial Sequence
  Oligonucleotide primer for the detection of SNP TSC0036664
ttttttttcgtt

SEQ ID NO: 332040 - DNA, 12 bp, Artificial Sequence
  Oligonucleotide primer for the detection of SNP TSC0036664
ttttttttcgtc

SEQ ID NO: 332041 - DNA, 12 bp, Artificial Sequence
  Oligonucleotide primer for the detection of SNP TSC0036664
caccctccctca

SEQ ID NO: 332042 - DNA, 12 bp, Artificial Sequence
  Oligonucleotide primer for the detection of SNP TSC0036664
caccctccctcg

SEQ ID NO: 332043 - DNA, 12 bp, Artificial Sequence
  Oligonucleotide primer for the detection of SNP TSC0036664
ggaagtagtagt

SEQ ID NO: 332044 - DNA, 12 bp, Artificial Sequence
  Oligonucleotide primer for the detection of SNP TSC0036665
cacacaactata

SEQ ID NO: 332045 - DNA, 12 bp, Artificial Sequence
  Oligonucleotide primer for the detection of SNP TSC0036665
tggttggaaaat

SEQ ID NO: 332046 - DNA, 12 bp, Artificial Sequence
  Oligonucleotide primer for the detection of SNP TSC0036665
taactaaaaaat

SEQ ID NO: 332047 - DNA, 12 bp, Artificial Sequence
  Oligonucleotide primer for the detection of SNP TSC0036665
atatatagttat

SEQ ID NO: 332048 - DNA, 12 bp, Artificial Sequence
  Oligonucleotide primer for the detection of SNP TSC0036666
acaatcttaact

SEQ ID NO: 332049 - DNA, 12 bp, Artificial Sequence
  Oligonucleotide primer for the detection of SNP TSC0036667
acattccaacct

SEQ ID NO: 332050 - DNA, 12 bp, Artificial Sequence
  Oligonucleotide primer for the detection of SNP TSC0036667
ggtttggtttta

SEQ ID NO: 332051 - DNA, 12 bp, Artificial Sequence
  Oligonucleotide primer for the detection of SNP TSC0036668
attttaacaaat

SEQ ID NO: 332052 - DNA, 12 bp, Artificial Sequence
  Oligonucleotide primer for the detection of SNP TSC0036668
gatagaggatta

SEQ ID NO: 332053 - DNA, 12 bp, Artificial Sequence
  Oligonucleotide primer for the detection of SNP TSC0036670
ttgagtagatta

SEQ ID NO: 332054 - DNA, 12 bp, Artificial Sequence
  Oligonucleotide primer for the detection of SNP TSC0036672
acaacaatacta

SEQ ID NO: 332055 - DNA, 12 bp, Artificial Sequence
  Oligonucleotide primer for the detection of SNP TSC0036672
ttgtaaagagtt

SEQ ID NO: 332056 - DNA, 12 bp, Artificial Sequence
  Oligonucleotide primer for the detection of SNP TSC0036672
ataaaaaatcaa

SEQ ID NO: 332057 - DNA, 12 bp, Artificial Sequence
  Oligonucleotide primer for the detection of SNP TSC0036672
agtaataatgtt

SEQ ID NO: 332058 - DNA, 12 bp, Artificial Sequence
  Oligonucleotide primer for the detection of SNP TSC0036674
tacctacccaac

SEQ ID NO: 332059 - DNA, 12 bp, Artificial Sequence
  Oligonucleotide primer for the detection of SNP TSC0036674
ggtgtttttatg

SEQ ID NO: 332060 - DNA, 12 bp, Artificial Sequence
  Oligonucleotide primer for the detection of SNP TSC0036674
ggtgtttttacg

SEQ ID NO: 332061 - DNA, 12 bp, Artificial Sequence
  Oligonucleotide primer for the detection of SNP TSC0036674
aatacctccaca

SEQ ID NO: 332062 - DNA, 12 bp, Artificial Sequence
  Oligonucleotide primer for the detection of SNP TSC0036674
aatacctccacg

SEQ ID NO: 332063 - DNA, 12 bp, Artificial Sequence
  Oligonucleotide primer for the detection of SNP TSC0036674
tgtttgtttagt

SEQ ID NO: 332064 - DNA, 12 bp, Artificial Sequence
  Oligonucleotide primer for the detection of SNP TSC0036675
aagaagtgatat

SEQ ID NO: 332065 - DNA, 12 bp, Artificial Sequence
  Oligonucleotide primer for the detection of SNP TSC0036677
ttgattatttta

SEQ ID NO: 332066 - DNA, 12 bp, Artificial Sequence
  Oligonucleotide primer for the detection of SNP TSC0036682
ctctcttactcc

SEQ ID NO: 332067 - DNA, 12 bp, Artificial Sequence
  Oligonucleotide primer for the detection of SNP TSC0036684
aacaaactcacc

SEQ ID NO: 332068 - DNA, 12 bp, Artificial Sequence
  Oligonucleotide primer for the detection of SNP TSC0036684
ttatatttatga

SEQ ID NO: 332069 - DNA, 12 bp, Artificial Sequence
  Oligonucleotide primer for the detection of SNP TSC0036685
ccatctaaaaat

SEQ ID NO: 332070 - DNA, 12 bp, Artificial Sequence
  Oligonucleotide primer for the detection of SNP TSC0036689
aaacaacaacaa

SEQ ID NO: 332071 - DNA, 12 bp, Artificial Sequence
  Oligonucleotide primer for the detection of SNP TSC0036689
ggtatatttttt

SEQ ID NO: 332072 - DNA, 12 bp, Artificial Sequence
  Oligonucleotide primer for the detection of SNP TSC0036689
aacatatttttt

SEQ ID NO: 332073 - DNA, 12 bp, Artificial Sequence
  Oligonucleotide primer for the detection of SNP TSC0036689
gacatatttttt

SEQ ID NO: 332074 - DNA, 12 bp, Artificial Sequence
  Oligonucleotide primer for the detection of SNP TSC0036690
ataaactctatc

SEQ ID NO: 332075 - DNA, 12 bp, Artificial Sequence
  Oligonucleotide primer for the detection of SNP TSC0036690
ggaaattttaga

SEQ ID NO: 332076 - DNA, 12 bp, Artificial Sequence
  Oligonucleotide primer for the detection of SNP TSC0036692
taactactaccc

SEQ ID NO: 332077 - DNA, 12 bp, Artificial Sequence
  Oligonucleotide primer for the detection of SNP TSC0036692
ttttttgaggga

SEQ ID NO: 332078 - DNA, 12 bp, Artificial Sequence
  Oligonucleotide primer for the detection of SNP TSC0036693
aagtagaaattt

SEQ ID NO: 332079 - DNA, 12 bp, Artificial Sequence
  Oligonucleotide primer for the detection of SNP TSC0036693
aaaataaaaatc

SEQ ID NO: 332080 - DNA, 12 bp, Artificial Sequence
  Oligonucleotide primer for the detection of SNP TSC0036693
aataaatgaatt

SEQ ID NO: 332081 - DNA, 12 bp, Artificial Sequence
  Oligonucleotide primer for the detection of SNP TSC0036694
acccaacaaaac

SEQ ID NO: 332082 - DNA, 12 bp, Artificial Sequence
  Oligonucleotide primer for the detection of SNP TSC0036694
tagttgtgttta

SEQ ID NO: 332083 - DNA, 12 bp, Artificial Sequence
  Oligonucleotide primer for the detection of SNP TSC0036697
atcactttatct

SEQ ID NO: 332084 - DNA, 12 bp, Artificial Sequence
  Oligonucleotide primer for the detection of SNP TSC0036698
atcaaaacataa

SEQ ID NO: 332085 - DNA, 12 bp, Artificial Sequence
  Oligonucleotide primer for the detection of SNP TSC0036698
atcaaaacgtaa

SEQ ID NO: 332086 - DNA, 12 bp, Artificial Sequence
  Oligonucleotide primer for the detection of SNP TSC0036698
agtaatagaagg

SEQ ID NO: 332087 - DNA, 12 bp, Artificial Sequence
  Oligonucleotide primer for the detection of SNP TSC0036698
aaaacgtaattt

SEQ ID NO: 332088 - DNA, 12 bp, Artificial Sequence
  Oligonucleotide primer for the detection of SNP TSC0036700
atccaaaatcta

SEQ ID NO: 332089 - DNA, 12 bp, Artificial Sequence
  Oligonucleotide primer for the detection of SNP TSC0036700
gaatgatgtttg

SEQ ID NO: 332090 - DNA, 12 bp, Artificial Sequence
  Oligonucleotide primer for the detection of SNP TSC0036700
aaataatatcta

SEQ ID NO: 332091 - DNA, 12 bp, Artificial Sequence
  Oligonucleotide primer for the detection of SNP TSC0036700
gtttaaggttta

SEQ ID NO: 332092 - DNA, 12 bp, Artificial Sequence
  Oligonucleotide primer for the detection of SNP TSC0036701
ctaatccaaaat

SEQ ID NO: 332093 - DNA, 12 bp, Artificial Sequence
  Oligonucleotide primer for the detection of SNP TSC0036701
atgatgtttggt

SEQ ID NO: 332094 - DNA, 12 bp, Artificial Sequence
  Oligonucleotide primer for the detection of SNP TSC0036701
ataatatctaat

SEQ ID NO: 332095 - DNA, 12 bp, Artificial Sequence
  Oligonucleotide primer for the detection of SNP TSC0036701
tggtttaaggtt

SEQ ID NO: 332096 - DNA, 12 bp, Artificial Sequence
  Oligonucleotide primer for the detection of SNP TSC0036702
tatgtaaatata

SEQ ID NO: 332097 - DNA, 12 bp, Artificial Sequence
  Oligonucleotide primer for the detection of SNP TSC0036703
atattacctaac

SEQ ID NO: 332098 - DNA, 12 bp, Artificial Sequence
  Oligonucleotide primer for the detection of SNP TSC0036703
attatttatata

SEQ ID NO: 332099 - DNA, 12 bp, Artificial Sequence
  Oligonucleotide primer for the detection of SNP TSC0036705
aaaacgaaacta

SEQ ID NO: 332100 - DNA, 12 bp, Artificial Sequence
  Oligonucleotide primer for the detection of SNP TSC0036705
gtaaagttagat

SEQ ID NO: 332101 - DNA, 12 bp, Artificial Sequence
  Oligonucleotide primer for the detection of SNP TSC0036705
tacaaaattaaa

SEQ ID NO: 332102 - DNA, 12 bp, Artificial Sequence
  Oligonukleotid-Primer
gaaagtggggtt

SEQ ID NO: 332103 - DNA, 12 bp, Artificial Sequence
  Oligonucleotide primer for the detection of SNP TSC0036705
gaaagcggggtt

SEQ ID NO: 332104 - DNA, 12 bp, Artificial Sequence
  Oligonucleotide primer for the detection of SNP TSC0036706
ataattcttcat

SEQ ID NO: 332105 - DNA, 12 bp, Artificial Sequence
  Oligonucleotide primer for the detection of SNP TSC0036706
ttgaaaattgtt

SEQ ID NO: 332106 - DNA, 12 bp, Artificial Sequence
  Oligonukleotid-Primer
cttaccttctta

SEQ ID NO: 332107 - DNA, 12 bp, Artificial Sequence
  Oligonucleotide primer for the detection of SNP TSC0036709
ggtaaataaggg

SEQ ID NO: 332108 - DNA, 12 bp, Artificial Sequence
  Oligonucleotide primer for the detection of SNP TSC0036711
atttttctctac

SEQ ID NO: 332109 - DNA, 12 bp, Artificial Sequence
  Oligonucleotide primer for the detection of SNP TSC0036711
agagaagattta

SEQ ID NO: 332110 - DNA, 12 bp, Artificial Sequence
  Oligonucleotide primer for the detection of SNP TSC0036711
aaaaaaaactta

SEQ ID NO: 332111 - DNA, 12 bp, Artificial Sequence
  Oligonucleotide primer for the detection of SNP TSC0036712
tgtgataatttt

SEQ ID NO: 332112 - DNA, 12 bp, Artificial Sequence
  Oligonucleotide primer for the detection of SNP TSC0036712
tataataatttt

SEQ ID NO: 332113 - DNA, 12 bp, Artificial Sequence
  Oligonucleotide primer for the detection of SNP TSC0036712
gaatattataaa

SEQ ID NO: 332114 - DNA, 12 bp, Artificial Sequence
  Oligonucleotide primer for the detection of SNP TSC0036715
tacatatacaaa

SEQ ID NO: 332115 - DNA, 12 bp, Artificial Sequence
  Oligonucleotide primer for the detection of SNP TSC0036716
taacttaataac

SEQ ID NO: 332116 - DNA, 12 bp, Artificial Sequence
  Oligonucleotide primer for the detection of SNP TSC0036717
atgatagaaagg

SEQ ID NO: 332117 - DNA, 12 bp, Artificial Sequence
  Oligonucleotide primer for the detection of SNP TSC0036717
aattaaaattaa

SEQ ID NO: 332118 - DNA, 12 bp, Artificial Sequence
  Oligonucleotide primer for the detection of SNP TSC0036718
ccactcaaaata

SEQ ID NO: 332119 - DNA, 12 bp, Artificial Sequence
  Oligonucleotide primer for the detection of SNP TSC0036718
agaatattttga

SEQ ID NO: 332120 - DNA, 12 bp, Artificial Sequence
  Oligonucleotide primer for the detection of SNP TSC0036718
aaacaccctaaa

SEQ ID NO: 332121 - DNA, 12 bp, Artificial Sequence
  Oligonucleotide primer for the detection of SNP TSC0036718
tatttaaaatgt

SEQ ID NO: 332122 - DNA, 12 bp, Artificial Sequence
  Oligonucleotide primer for the detection of SNP TSC0036722
gatgtataaagt

SEQ ID NO: 332123 - DNA, 12 bp, Artificial Sequence
  Oligonucleotide primer for the detection of SNP TSC0036723
caactttaaacc

SEQ ID NO: 332124 - DNA, 12 bp, Artificial Sequence
  Oligonucleotide primer for the detection of SNP TSC0036723
tgtgtttaagag

SEQ ID NO: 332125 - DNA, 12 bp, Artificial Sequence
  Oligonucleotide primer for the detection of SNP TSC0036723
tgcgtttaagag

SEQ ID NO: 332126 - DNA, 12 bp, Artificial Sequence
  Oligonucleotide primer for the detection of SNP TSC0036723
tacacttaaaaa

SEQ ID NO: 332127 - DNA, 12 bp, Artificial Sequence
  Oligonucleotide primer for the detection of SNP TSC0036723
tacgcttaaaaa

SEQ ID NO: 332128 - DNA, 12 bp, Artificial Sequence
  Oligonucleotide primer for the detection of SNP TSC0036723
tagttttgaatt

SEQ ID NO: 332129 - DNA, 12 bp, Artificial Sequence
  Oligonucleotide primer for the detection of SNP TSC0036724
tacctatcttct

SEQ ID NO: 332130 - DNA, 12 bp, Artificial Sequence
  Oligonukleotid-Primer
gtggtaaggtaa

SEQ ID NO: 332131 - DNA, 12 bp, Artificial Sequence
  Oligonucleotide primer for the detection of SNP TSC0036727
tacaactcttac

SEQ ID NO: 332132 - DNA, 12 bp, Artificial Sequence
  Oligonucleotide primer for the detection of SNP TSC0036727
tacgactcttac

SEQ ID NO: 332133 - DNA, 12 bp, Artificial Sequence
  Oligonucleotide primer for the detection of SNP TSC0036727
tattgagattta

SEQ ID NO: 332134 - DNA, 12 bp, Artificial Sequence
  Oligonucleotide primer for the detection of SNP TSC0036727
cattaaaactta

SEQ ID NO: 332135 - DNA, 12 bp, Artificial Sequence
  Oligonucleotide primer for the detection of SNP TSC0036727
tgtgatttttgt

SEQ ID NO: 332136 - DNA, 12 bp, Artificial Sequence
  Oligonucleotide primer for the detection of SNP TSC0036727
tgcgatttttgt

SEQ ID NO: 332137 - DNA, 12 bp, Artificial Sequence
  Oligonucleotide primer for the detection of SNP TSC0036729
acatataaaaaa

SEQ ID NO: 332138 - DNA, 12 bp, Artificial Sequence
  Oligonucleotide primer for the detection of SNP TSC0036729
aatctctactct

SEQ ID NO: 332139 - DNA, 12 bp, Artificial Sequence
  Oligonucleotide primer for the detection of SNP TSC0036729
tatatggggggt

SEQ ID NO: 332140 - DNA, 12 bp, Artificial Sequence
  Oligonucleotide primer for the detection of SNP TSC0036730
aacatccataat

SEQ ID NO: 332141 - DNA, 12 bp, Artificial Sequence
  Oligonucleotide primer for the detection of SNP TSC0036730
ggttggaaaagt

SEQ ID NO: 332142 - DNA, 12 bp, Artificial Sequence
  Oligonucleotide primer for the detection of SNP TSC0036730
aattaaaaaaat

SEQ ID NO: 332143 - DNA, 12 bp, Artificial Sequence
  Oligonucleotide primer for the detection of SNP TSC0036731
tcttataaattt

SEQ ID NO: 332144 - DNA, 12 bp, Artificial Sequence
  Oligonucleotide primer for the detection of SNP TSC0036731
taatgaatttaa

SEQ ID NO: 332145 - DNA, 12 bp, Artificial Sequence
  Oligonucleotide primer for the detection of SNP TSC0036732
atctttaaaata

SEQ ID NO: 332146 - DNA, 12 bp, Artificial Sequence
  Oligonucleotide primer for the detection of SNP TSC0036732
tggttattagag

SEQ ID NO: 332147 - DNA, 12 bp, Artificial Sequence
  Oligonucleotide primer for the detection of SNP TSC0036732
taaccatcaaaa

SEQ ID NO: 332148 - DNA, 12 bp, Artificial Sequence
  Oligonucleotide primer for the detection of SNP TSC0036732
gtttttgaaatg

SEQ ID NO: 332149 - DNA, 12 bp, Artificial Sequence
  Oligonucleotide primer for the detection of SNP TSC0036735
aacatatacaat

SEQ ID NO: 332150 - DNA, 12 bp, Artificial Sequence
  Oligonucleotide primer for the detection of SNP TSC0036735
tatttaattata

SEQ ID NO: 332151 - DNA, 12 bp, Artificial Sequence
  Oligonucleotide primer for the detection of SNP TSC0036736
taaaaaaactct

SEQ ID NO: 332152 - DNA, 12 bp, Artificial Sequence
  Oligonucleotide primer for the detection of SNP TSC0036736
tagatggaagaa

SEQ ID NO: 332153 - DNA, 12 bp, Artificial Sequence
  Oligonucleotide primer for the detection of SNP TSC0036737
tccataacatta

SEQ ID NO: 332154 - DNA, 12 bp, Artificial Sequence
  Oligonucleotide primer for the detection of SNP TSC0036737
tattgattatgg

SEQ ID NO: 332155 - DNA, 12 bp, Artificial Sequence
  Oligonucleotide primer for the detection of SNP TSC0036738
tataacatttat

SEQ ID NO: 332156 - DNA, 12 bp, Artificial Sequence
  Oligonucleotide primer for the detection of SNP TSC0036738
ttatagttatta

SEQ ID NO: 332157 - DNA, 12 bp, Artificial Sequence
  Oligonucleotide primer for the detection of SNP TSC0036740
gggggttttata

SEQ ID NO: 332158 - DNA, 12 bp, Artificial Sequence
  Oligonucleotide primer for the detection of SNP TSC0036741
caaaaactttat

SEQ ID NO: 332159 - DNA, 12 bp, Artificial Sequence
  Oligonucleotide primer for the detection of SNP TSC0036741
atatataattaa

SEQ ID NO: 332160 - DNA, 12 bp, Artificial Sequence
  Oligonucleotide primer for the detection of SNP TSC0036742
aaaccctacatt

SEQ ID NO: 332161 - DNA, 12 bp, Artificial Sequence
  Oligonucleotide primer for the detection of SNP TSC0036743
gatgttttttgt

SEQ ID NO: 332162 - DNA, 12 bp, Artificial Sequence
  Oligonucleotide primer for the detection of SNP TSC0036743
gacgttttttgt

SEQ ID NO: 332163 - DNA, 12 bp, Artificial Sequence
  Oligonucleotide primer for the detection of SNP TSC0036743
gatgttttttgc

SEQ ID NO: 332164 - DNA, 12 bp, Artificial Sequence
  Oligonucleotide primer for the detection of SNP TSC0036743
gacgttttttgc

SEQ ID NO: 332165 - DNA, 12 bp, Artificial Sequence
  Oligonucleotide primer for the detection of SNP TSC0036743
aaacaccttcta

SEQ ID NO: 332166 - DNA, 12 bp, Artificial Sequence
  Oligonucleotide primer for the detection of SNP TSC0036743
aaacgccttcta

SEQ ID NO: 332167 - DNA, 12 bp, Artificial Sequence
  Oligonucleotide primer for the detection of SNP TSC0036743
ggaagtgatgtt

SEQ ID NO: 332168 - DNA, 12 bp, Artificial Sequence
  Oligonucleotide primer for the detection of SNP TSC0036744
ctcaccttactc

SEQ ID NO: 332169 - DNA, 12 bp, Artificial Sequence
  Oligonucleotide primer for the detection of SNP TSC0036744
ttggtgtaggtg

SEQ ID NO: 332170 - DNA, 12 bp, Artificial Sequence
  Oligonucleotide primer for the detection of SNP TSC0036745
tgagagagaaat

SEQ ID NO: 332171 - DNA, 12 bp, Artificial Sequence
  Oligonucleotide primer for the detection of SNP TSC0036745
cgagagagaaat

SEQ ID NO: 332172 - DNA, 12 bp, Artificial Sequence
  Oligonucleotide primer for the detection of SNP TSC0036745
gtaagagtttat

SEQ ID NO: 332173 - DNA, 12 bp, Artificial Sequence
  Oligonucleotide primer for the detection of SNP TSC0036746
cccctaacacct

SEQ ID NO: 332174 - DNA, 12 bp, Artificial Sequence
  Oligonucleotide primer for the detection of SNP TSC0036746
gtttaggagtta

SEQ ID NO: 332175 - DNA, 12 bp, Artificial Sequence
  Oligonucleotide primer for the detection of SNP TSC0036747
atgttttatgaa

SEQ ID NO: 332176 - DNA, 12 bp, Artificial Sequence
  Oligonucleotide primer for the detection of SNP TSC0036749
cctacaaaacac

SEQ ID NO: 332177 - DNA, 12 bp, Artificial Sequence
  Oligonucleotide primer for the detection of SNP TSC0036749
gtagagtgggtt

SEQ ID NO: 332178 - DNA, 12 bp, Artificial Sequence
  Oligonucleotide primer for the detection of SNP TSC0036749
gtagagcgggtt

SEQ ID NO: 332179 - DNA, 12 bp, Artificial Sequence
  Oligonucleotide primer for the detection of SNP TSC0036749
tacaaaacgaac

SEQ ID NO: 332180 - DNA, 12 bp, Artificial Sequence
  Oligonucleotide primer for the detection of SNP TSC0036749
ttgtagggtatt

SEQ ID NO: 332181 - DNA, 12 bp, Artificial Sequence
  Oligonucleotide primer for the detection of SNP TSC0036750
caaacctacata

SEQ ID NO: 332182 - DNA, 12 bp, Artificial Sequence
  Oligonucleotide primer for the detection of SNP TSC0036750
tatttttaggtt

SEQ ID NO: 332183 - DNA, 12 bp, Artificial Sequence
  Oligonucleotide primer for the detection of SNP TSC0036750
catttccaaatt

SEQ ID NO: 332184 - DNA, 12 bp, Artificial Sequence
  Oligonucleotide primer for the detection of SNP TSC0036753
tcttccaataac

SEQ ID NO: 332185 - DNA, 12 bp, Artificial Sequence
  Oligonucleotide primer for the detection of SNP TSC0036753
aatttgtaagtg

SEQ ID NO: 332186 - DNA, 12 bp, Artificial Sequence
  Oligonucleotide primer for the detection of SNP TSC0036754
caataacaaacc

SEQ ID NO: 332187 - DNA, 12 bp, Artificial Sequence
  Oligonucleotide primer for the detection of SNP TSC0036754
gaaaatttgtaa

SEQ ID NO: 332188 - DNA, 12 bp, Artificial Sequence
  Oligonucleotide primer for the detection of SNP TSC0036756
aactaacattac

SEQ ID NO: 332189 - DNA, 12 bp, Artificial Sequence
  Oligonucleotide primer for the detection of SNP TSC0036756
tttggtgaatat

SEQ ID NO: 332190 - DNA, 12 bp, Artificial Sequence
  Oligonucleotide primer for the detection of SNP TSC0036756
aattaatattgt

SEQ ID NO: 332191 - DNA, 12 bp, Artificial Sequence
  Oligonucleotide primer for the detection of SNP TSC0036757
cttaacaccttc

SEQ ID NO: 332192 - DNA, 12 bp, Artificial Sequence
  Oligonucleotide primer for the detection of SNP TSC0036758
cctacattaact

SEQ ID NO: 332193 - DNA, 12 bp, Artificial Sequence
  Oligonucleotide primer for the detection of SNP TSC0036758
gggtataggtaa

SEQ ID NO: 332194 - DNA, 12 bp, Artificial Sequence
  Oligonucleotide primer for the detection of SNP TSC0036759
tggagtgggagg

SEQ ID NO: 332195 - DNA, 12 bp, Artificial Sequence
  Oligonucleotide primer for the detection of SNP TSC0036759
cggagtgggagg

SEQ ID NO: 332196 - DNA, 12 bp, Artificial Sequence
  Oligonucleotide primer for the detection of SNP TSC0036760
ttacattaatat

SEQ ID NO: 332197 - DNA, 12 bp, Artificial Sequence
  Oligonucleotide primer for the detection of SNP TSC0036762
aacccctaacta

SEQ ID NO: 332198 - DNA, 12 bp, Artificial Sequence
  Oligonucleotide primer for the detection of SNP TSC0036762
ttagttagtttt

SEQ ID NO: 332199 - DNA, 12 bp, Artificial Sequence
  Oligonucleotide primer for the detection of SNP TSC0036762
ccaaccaatccc

SEQ ID NO: 332200 - DNA, 12 bp, Artificial Sequence
  Oligonucleotide primer for the detection of SNP TSC0036762
agtttttaattg

SEQ ID NO: 332201 - DNA, 12 bp, Artificial Sequence
  Oligonucleotide primer for the detection of SNP TSC0036764
ctccacctaaac

SEQ ID NO: 332202 - DNA, 12 bp, Artificial Sequence
  Oligonucleotide primer for the detection of SNP TSC0036764
ctccgcctaaac

SEQ ID NO: 332203 - DNA, 12 bp, Artificial Sequence
  Oligonucleotide primer for the detection of SNP TSC0036764
attgtattgtga

SEQ ID NO: 332204 - DNA, 12 bp, Artificial Sequence
  Oligonucleotide primer for the detection of SNP TSC0036765
actataacctcc

SEQ ID NO: 332205 - DNA, 12 bp, Artificial Sequence
  Oligonucleotide primer for the detection of SNP TSC0036765
gctataacctcc

SEQ ID NO: 332206 - DNA, 12 bp, Artificial Sequence
  Oligonucleotide primer for the detection of SNP TSC0036765
gaaggtgttttg

SEQ ID NO: 332207 - DNA, 12 bp, Artificial Sequence
  Oligonucleotide primer for the detection of SNP TSC0036765
gaaggcgttttg

SEQ ID NO: 332208 - DNA, 12 bp, Artificial Sequence
  Oligonucleotide primer for the detection of SNP TSC0036767
tctacaacccta

SEQ ID NO: 332209 - DNA, 12 bp, Artificial Sequence
  Oligonucleotide primer for the detection of SNP TSC0036767
agggttaagatt

SEQ ID NO: 332210 - DNA, 12 bp, Artificial Sequence
  Oligonucleotide primer for the detection of SNP TSC0036767
aaattaaaacta

SEQ ID NO: 332211 - DNA, 12 bp, Artificial Sequence
  Oligonucleotide primer for the detection of SNP TSC0036768
aaatatatctat

SEQ ID NO: 332212 - DNA, 12 bp, Artificial Sequence
  Oligonucleotide primer for the detection of SNP TSC0036768
tgttgaggaaga

SEQ ID NO: 332213 - DNA, 12 bp, Artificial Sequence
  Oligonucleotide primer for the detection of SNP TSC0036769
atatttactaaa

SEQ ID NO: 332214 - DNA, 12 bp, Artificial Sequence
  Oligonucleotide primer for the detection of SNP TSC0036769
ctatattatttt

SEQ ID NO: 332215 - DNA, 12 bp, Artificial Sequence
  Oligonucleotide primer for the detection of SNP TSC0036773
aaacttaaactc

SEQ ID NO: 332216 - DNA, 12 bp, Artificial Sequence
  Oligonucleotide primer for the detection of SNP TSC0036773
gattaaggaggg

SEQ ID NO: 332217 - DNA, 12 bp, Artificial Sequence
  Oligonucleotide primer for the detection of SNP TSC0036776
aaaccataatat

SEQ ID NO: 332218 - DNA, 12 bp, Artificial Sequence
  Oligonucleotide primer for the detection of SNP TSC0036776
atatatttggta

SEQ ID NO: 332219 - DNA, 12 bp, Artificial Sequence
  Oligonucleotide primer for the detection of SNP TSC0036777
ttttcccccttt

SEQ ID NO: 332220 - DNA, 12 bp, Artificial Sequence
  Oligonucleotide primer for the detection of SNP TSC0036778
tttctaataaac

SEQ ID NO: 332221 - DNA, 12 bp, Artificial Sequence
  Oligonucleotide primer for the detection of SNP TSC0036778
tttttgtgtaag

SEQ ID NO: 332222 - DNA, 12 bp, Artificial Sequence
  Oligonucleotide primer for the detection of SNP TSC0036778
tttctatacaaa

SEQ ID NO: 332223 - DNA, 12 bp, Artificial Sequence
  Oligonucleotide primer for the detection of SNP TSC0036778
ttttgataaatt

SEQ ID NO: 332224 - DNA, 12 bp, Artificial Sequence
  Oligonucleotide primer for the detection of SNP TSC0036779
agatggtgaagg

SEQ ID NO: 332225 - DNA, 12 bp, Artificial Sequence
  Oligonucleotide primer for the detection of SNP TSC0036780
aattctattttc

SEQ ID NO: 332226 - DNA, 12 bp, Artificial Sequence
  Oligonucleotide primer for the detection of SNP TSC0036783
catacaattttt

SEQ ID NO: 332227 - DNA, 12 bp, Artificial Sequence
  Oligonucleotide primer for the detection of SNP TSC0036783
agtagaataata

SEQ ID NO: 332228 - DNA, 12 bp, Artificial Sequence
  Oligonucleotide primer for the detection of SNP TSC0036784
tcctaataaata

SEQ ID NO: 332229 - DNA, 12 bp, Artificial Sequence
  Oligonucleotide primer for the detection of SNP TSC0036784
atttttaggttt

SEQ ID NO: 332230 - DNA, 12 bp, Artificial Sequence
  Oligonucleotide primer for the detection of SNP TSC0036784
acttttaaatcc

SEQ ID NO: 332231 - DNA, 12 bp, Artificial Sequence
  Oligonucleotide primer for the detection of SNP TSC0036784
tttttggtgaat

SEQ ID NO: 332232 - DNA, 12 bp, Artificial Sequence
  Oligonucleotide primer for the detection of SNP TSC0036785
taaacaatctcc

SEQ ID NO: 332233 - DNA, 12 bp, Artificial Sequence
  Oligonucleotide primer for the detection of SNP TSC0036787
aacactaatcat

SEQ ID NO: 332234 - DNA, 12 bp, Artificial Sequence
  Oligonucleotide primer for the detection of SNP TSC0036787
gtttaggattaa

SEQ ID NO: 332235 - DNA, 12 bp, Artificial Sequence
  Oligonucleotide primer for the detection of SNP TSC0036789
agttaatgtatt

SEQ ID NO: 332236 - DNA, 12 bp, Artificial Sequence
  Oligonucleotide primer for the detection of SNP TSC0036789
agttaacgtatt

SEQ ID NO: 332237 - DNA, 12 bp, Artificial Sequence
  Oligonucleotide primer for the detection of SNP TSC0036789
aaccaacacacc

SEQ ID NO: 332238 - DNA, 12 bp, Artificial Sequence
  Oligonucleotide primer for the detection of SNP TSC0036789
aaccaacgcacc

SEQ ID NO: 332239 - DNA, 12 bp, Artificial Sequence
  Oligonucleotide primer for the detection of SNP TSC0036789
aggaagggtggg

SEQ ID NO: 332240 - DNA, 12 bp, Artificial Sequence
  Oligonucleotide primer for the detection of SNP TSC0036790
actaaatactca

SEQ ID NO: 332241 - DNA, 12 bp, Artificial Sequence
  Oligonucleotide primer for the detection of SNP TSC0036790
actaaatactcg

SEQ ID NO: 332242 - DNA, 12 bp, Artificial Sequence
  Oligonucleotide primer for the detection of SNP TSC0036790
gtggggtatttt

SEQ ID NO: 332243 - DNA, 12 bp, Artificial Sequence
  Oligonucleotide primer for the detection of SNP TSC0036790
gcggggtatttt

SEQ ID NO: 332244 - DNA, 12 bp, Artificial Sequence
  Oligonucleotide primer for the detection of SNP TSC0036790
gtggggtatttc

SEQ ID NO: 332245 - DNA, 12 bp, Artificial Sequence
  Oligonucleotide primer for the detection of SNP TSC0036790
gcggggtatttc

SEQ ID NO: 332246 - DNA, 12 bp, Artificial Sequence
  Oligonucleotide primer for the detection of SNP TSC0036790
aacgaaacattt

SEQ ID NO: 332247 - DNA, 12 bp, Artificial Sequence
  Oligonucleotide primer for the detection of SNP TSC0036790
tgttgagtgttt

SEQ ID NO: 332248 - DNA, 12 bp, Artificial Sequence
  Oligonucleotide primer for the detection of SNP TSC0036790
tgttgagtgttc

SEQ ID NO: 332249 - DNA, 12 bp, Artificial Sequence
  Oligonucleotide primer for the detection of SNP TSC0036792
aaaaaatattct

SEQ ID NO: 332250 - DNA, 12 bp, Artificial Sequence
  Oligonucleotide primer for the detection of SNP TSC0036792
tttatttcgatt

SEQ ID NO: 332251 - DNA, 12 bp, Artificial Sequence
  Oligonucleotide primer for the detection of SNP TSC0036792
tcattccaatta

SEQ ID NO: 332252 - DNA, 12 bp, Artificial Sequence
  Oligonucleotide primer for the detection of SNP TSC0036792
tcattccgatta

SEQ ID NO: 332253 - DNA, 12 bp, Artificial Sequence
  Oligonucleotide primer for the detection of SNP TSC0036792
aagggtattttt

SEQ ID NO: 332254 - DNA, 12 bp, Artificial Sequence
  Oligonucleotide primer for the detection of SNP TSC0036793
ttaaaaaatatt

SEQ ID NO: 332255 - DNA, 12 bp, Artificial Sequence
  Oligonucleotide primer for the detection of SNP TSC0036793
tattttgattga

SEQ ID NO: 332256 - DNA, 12 bp, Artificial Sequence
  Oligonucleotide primer for the detection of SNP TSC0036793
tatttcgattga

SEQ ID NO: 332257 - DNA, 12 bp, Artificial Sequence
  Oligonucleotide primer for the detection of SNP TSC0036793
attccaattaaa

SEQ ID NO: 332258 - DNA, 12 bp, Artificial Sequence
  Oligonucleotide primer for the detection of SNP TSC0036793
attccgattaaa

SEQ ID NO: 332259 - DNA, 12 bp, Artificial Sequence
  Oligonucleotide primer for the detection of SNP TSC0036793
taaagggtattt

SEQ ID NO: 332260 - DNA, 12 bp, Artificial Sequence
  Oligonucleotide primer for the detection of SNP TSC0036794
gagagaggttta

SEQ ID NO: 332261 - DNA, 12 bp, Artificial Sequence
  Oligonucleotide primer for the detection of SNP TSC0036794
tattattggaat

SEQ ID NO: 332262 - DNA, 12 bp, Artificial Sequence
  Oligonucleotide primer for the detection of SNP TSC0036795
aaccctaaatcc

SEQ ID NO: 332263 - DNA, 12 bp, Artificial Sequence
  Oligonucleotide primer for the detection of SNP TSC0036795
tagtagtgatta

SEQ ID NO: 332264 - DNA, 12 bp, Artificial Sequence
  Oligonucleotide primer for the detection of SNP TSC0036796
tccttcaaaatt

SEQ ID NO: 332265 - DNA, 12 bp, Artificial Sequence
  Oligonucleotide primer for the detection of SNP TSC0036796
aaaattgagaga

SEQ ID NO: 332266 - DNA, 12 bp, Artificial Sequence
  Oligonucleotide primer for the detection of SNP TSC0036796
aaaatcgagaga

SEQ ID NO: 332267 - DNA, 12 bp, Artificial Sequence
  Oligonucleotide primer for the detection of SNP TSC0036796
aaatcgaaaaaa

SEQ ID NO: 332268 - DNA, 12 bp, Artificial Sequence
  Oligonucleotide primer for the detection of SNP TSC0036797
catctctccatc

SEQ ID NO: 332269 - DNA, 12 bp, Artificial Sequence
  Oligonucleotide primer for the detection of SNP TSC0036797
cgtctctccatc

SEQ ID NO: 332270 - DNA, 12 bp, Artificial Sequence
  Oligonucleotide primer for the detection of SNP TSC0036797
ttatgtttattt

SEQ ID NO: 332271 - DNA, 12 bp, Artificial Sequence
  Oligonucleotide primer for the detection of SNP TSC0036797
ttatacccattt

SEQ ID NO: 332272 - DNA, 12 bp, Artificial Sequence
  Oligonucleotide primer for the detection of SNP TSC0036798
tctattaacaca

SEQ ID NO: 332273 - DNA, 12 bp, Artificial Sequence
  Oligonucleotide primer for the detection of SNP TSC0036798
aaatgttagtag

SEQ ID NO: 332274 - DNA, 12 bp, Artificial Sequence
  Oligonucleotide primer for the detection of SNP TSC0036798
ttttattagtat

SEQ ID NO: 332275 - DNA, 12 bp, Artificial Sequence
  Oligonucleotide primer for the detection of SNP TSC0036799
catttacataac

SEQ ID NO: 332276 - DNA, 12 bp, Artificial Sequence
  Oligonucleotide primer for the detection of SNP TSC0036799
ccaacttcttta

SEQ ID NO: 332277 - DNA, 12 bp, Artificial Sequence
  Oligonucleotide primer for the detection of SNP TSC0036799
tatttgtatagt

SEQ ID NO: 332278 - DNA, 12 bp, Artificial Sequence
  Oligonucleotide primer for the detection of SNP TSC0036800
attataataatt

SEQ ID NO: 332279 - DNA, 12 bp, Artificial Sequence
  Oligonucleotide primer for the detection of SNP TSC0036800
atggtatgtgga

SEQ ID NO: 332280 - DNA, 12 bp, Artificial Sequence
  Oligonucleotide primer for the detection of SNP TSC0036801
tctaaaacttat

SEQ ID NO: 332281 - DNA, 12 bp, Artificial Sequence
  Oligonucleotide primer for the detection of SNP TSC0036801
tatttagttagt

SEQ ID NO: 332282 - DNA, 12 bp, Artificial Sequence
  Oligonucleotide primer for the detection of SNP TSC0036801
cacccaattaac

SEQ ID NO: 332283 - DNA, 12 bp, Artificial Sequence
  Oligonucleotide primer for the detection of SNP TSC0036801
tttgaggtttat

SEQ ID NO: 332284 - DNA, 12 bp, Artificial Sequence
  Oligonucleotide primer for the detection of SNP TSC0036802
accaaaaaaatc

SEQ ID NO: 332285 - DNA, 12 bp, Artificial Sequence
  Oligonucleotide primer for the detection of SNP TSC0036802
atatggttaatg

SEQ ID NO: 332286 - DNA, 12 bp, Artificial Sequence
  Oligonucleotide primer for the detection of SNP TSC0036803
taaataaaaatc

SEQ ID NO: 332287 - DNA, 12 bp, Artificial Sequence
  Oligonucleotide primer for the detection of SNP TSC0036803
ggtatgtgatgg

SEQ ID NO: 332288 - DNA, 12 bp, Artificial Sequence
  Oligonucleotide primer for the detection of SNP TSC0036803
aacatataataa

SEQ ID NO: 332289 - DNA, 12 bp, Artificial Sequence
  Oligonucleotide primer for the detection of SNP TSC0036803
taggtgagagtt

SEQ ID NO: 332290 - DNA, 12 bp, Artificial Sequence
  Oligonucleotide primer for the detection of SNP TSC0036804
ccttccttacct

SEQ ID NO: 332291 - DNA, 12 bp, Artificial Sequence
  Oligonucleotide primer for the detection of SNP TSC0036805
aaaatatttctc

SEQ ID NO: 332292 - DNA, 12 bp, Artificial Sequence
  Oligonucleotide primer for the detection of SNP TSC0036805
tggttgttttta

SEQ ID NO: 332293 - DNA, 12 bp, Artificial Sequence
  Oligonucleotide primer for the detection of SNP TSC0036808
ttatttaaaaac

SEQ ID NO: 332294 - DNA, 12 bp, Artificial Sequence
  Oligonucleotide primer for the detection of SNP TSC0036808
tatgatattaaa

SEQ ID NO: 332295 - DNA, 12 bp, Artificial Sequence
  Oligonucleotide primer for the detection of SNP TSC0036809
tatgaatttgag

SEQ ID NO: 332296 - DNA, 12 bp, Artificial Sequence
  Oligonucleotide primer for the detection of SNP TSC0036809
tacgaatttgag

SEQ ID NO: 332297 - DNA, 12 bp, Artificial Sequence
  Oligonucleotide primer for the detection of SNP TSC0036811
tcctcccacctc

SEQ ID NO: 332298 - DNA, 12 bp, Artificial Sequence
  Oligonucleotide primer for the detection of SNP TSC0036811
tatttgggaggt

SEQ ID NO: 332299 - DNA, 12 bp, Artificial Sequence
  Oligonucleotide primer for the detection of SNP TSC0036811
tattcgggaggt

SEQ ID NO: 332300 - DNA, 12 bp, Artificial Sequence
  Oligonucleotide primer for the detection of SNP TSC0036811
tatttgggaggc

SEQ ID NO: 332301 - DNA, 12 bp, Artificial Sequence
  Oligonucleotide primer for the detection of SNP TSC0036811
tattcgggaggc

SEQ ID NO: 332302 - DNA, 12 bp, Artificial Sequence
  Oligonucleotide primer for the detection of SNP TSC0036812
ttataactcact

SEQ ID NO: 332303 - DNA, 12 bp, Artificial Sequence
  Oligonucleotide primer for the detection of SNP TSC0036815
taaatggttaag

SEQ ID NO: 332304 - DNA, 12 bp, Artificial Sequence
  Oligonucleotide primer for the detection of SNP TSC0036816
acaaaactttaa

SEQ ID NO: 332305 - DNA, 12 bp, Artificial Sequence
  Oligonucleotide primer for the detection of SNP TSC0036816
agttaattagtt

SEQ ID NO: 332306 - DNA, 12 bp, Artificial Sequence
  Oligonucleotide primer for the detection of SNP TSC0036816
caactaaccaac

SEQ ID NO: 332307 - DNA, 12 bp, Artificial Sequence
  Oligonucleotide primer for the detection of SNP TSC0036816
agggttttgatt

SEQ ID NO: 332308 - DNA, 12 bp, Artificial Sequence
  Oligonucleotide primer for the detection of SNP TSC0036819
ttatgatattaa

SEQ ID NO: 332309 - DNA, 12 bp, Artificial Sequence
  Oligonucleotide primer for the detection of SNP TSC0036820
aaacacaatttt

SEQ ID NO: 332310 - DNA, 12 bp, Artificial Sequence
  Oligonucleotide primer for the detection of SNP TSC0036820
aaacacgatttt

SEQ ID NO: 332311 - DNA, 12 bp, Artificial Sequence
  Oligonucleotide primer for the detection of SNP TSC0036820
taagttagagga

SEQ ID NO: 332312 - DNA, 12 bp, Artificial Sequence
  Oligonucleotide primer for the detection of SNP TSC0036821
atatcatataca

SEQ ID NO: 332313 - DNA, 12 bp, Artificial Sequence
  Oligonucleotide primer for the detection of SNP TSC0036821
tgtatgtgtttt

SEQ ID NO: 332314 - DNA, 12 bp, Artificial Sequence
  Oligonucleotide primer for the detection of SNP TSC0036821
tatatatacttt

SEQ ID NO: 332315 - DNA, 12 bp, Artificial Sequence
  Oligonucleotide primer for the detection of SNP TSC0036821
atgttatgtata

SEQ ID NO: 332316 - DNA, 12 bp, Artificial Sequence
  Oligonucleotide primer for the detection of SNP TSC0036825
tagggaatttaa

SEQ ID NO: 332317 - DNA, 12 bp, Artificial Sequence
  Oligonucleotide primer for the detection of SNP TSC0036825
caaaaaatctaa

SEQ ID NO: 332318 - DNA, 12 bp, Artificial Sequence
  Oligonucleotide primer for the detection of SNP TSC0036825
aaattaaagttt

SEQ ID NO: 332319 - DNA, 12 bp, Artificial Sequence
  Oligonucleotide primer for the detection of SNP TSC0036828
atagatattaat

SEQ ID NO: 332320 - DNA, 12 bp, Artificial Sequence
  Oligonucleotide primer for the detection of SNP TSC0036828
acaaatactaac

SEQ ID NO: 332321 - DNA, 12 bp, Artificial Sequence
  Oligonucleotide primer for the detection of SNP TSC0036828
ttgggggtgatt

SEQ ID NO: 332322 - DNA, 12 bp, Artificial Sequence
  Oligonucleotide primer for the detection of SNP TSC0036829
atctccaaaaaa

SEQ ID NO: 332323 - DNA, 12 bp, Artificial Sequence
  Oligonucleotide primer for the detection of SNP TSC0036829
ttaatagagtat

SEQ ID NO: 332324 - DNA, 12 bp, Artificial Sequence
  Oligonucleotide primer for the detection of SNP TSC0036829
actaataaaata

SEQ ID NO: 332325 - DNA, 12 bp, Artificial Sequence
  Oligonucleotide primer for the detection of SNP TSC0036829
tgtttttaaaga

SEQ ID NO: 332326 - DNA, 12 bp, Artificial Sequence
  Oligonucleotide primer for the detection of SNP TSC0036833
tttaaaaatcct

SEQ ID NO: 332327 - DNA, 12 bp, Artificial Sequence
  Oligonucleotide primer for the detection of SNP TSC0036835
taccaaataaat

SEQ ID NO: 332328 - DNA, 12 bp, Artificial Sequence
  Oligonucleotide primer for the detection of SNP TSC0036835
atatataaagga

SEQ ID NO: 332329 - DNA, 12 bp, Artificial Sequence
  Oligonucleotide primer for the detection of SNP TSC0036835
tgttagatgaat

SEQ ID NO: 332330 - DNA, 12 bp, Artificial Sequence
  Oligonucleotide primer for the detection of SNP TSC0036836
agtgtttagtaa

SEQ ID NO: 332331 - DNA, 12 bp, Artificial Sequence
  Oligonucleotide primer for the detection of SNP TSC0036837
ttctctttttat

SEQ ID NO: 332332 - DNA, 12 bp, Artificial Sequence
  Oligonucleotide primer for the detection of SNP TSC0036838
tccacacaataa

SEQ ID NO: 332333 - DNA, 12 bp, Artificial Sequence
  Oligonucleotide primer for the detection of SNP TSC0036838
tattttaataat

SEQ ID NO: 332334 - DNA, 12 bp, Artificial Sequence
  Oligonucleotide primer for the detection of SNP TSC0036838
catttcaataat

SEQ ID NO: 332335 - DNA, 12 bp, Artificial Sequence
  Oligonucleotide primer for the detection of SNP TSC0036838
ttatataatggt

SEQ ID NO: 332336 - DNA, 12 bp, Artificial Sequence
  Oligonucleotide primer for the detection of SNP TSC0036839
cctatacttcaa

SEQ ID NO: 332337 - DNA, 12 bp, Artificial Sequence
  Oligonucleotide primer for the detection of SNP TSC0036839
tattgtgtggat

SEQ ID NO: 332338 - DNA, 12 bp, Artificial Sequence
  Oligonucleotide primer for the detection of SNP TSC0036839
cattatataaat

SEQ ID NO: 332339 - DNA, 12 bp, Artificial Sequence
  Oligonucleotide primer for the detection of SNP TSC0036839
tttgtattttag

SEQ ID NO: 332340 - DNA, 12 bp, Artificial Sequence
  Oligonucleotide primer for the detection of SNP TSC0036842
acgcttcaaaaa

SEQ ID NO: 332341 - DNA, 12 bp, Artificial Sequence
  Oligonucleotide primer for the detection of SNP TSC0036842
gcacttcaaaaa

SEQ ID NO: 332342 - DNA, 12 bp, Artificial Sequence
  Oligonucleotide primer for the detection of SNP TSC0036842
acgcttcgaaaa

SEQ ID NO: 332343 - DNA, 12 bp, Artificial Sequence
  Oligonucleotide primer for the detection of SNP TSC0036842
gcacttcgaaaa

SEQ ID NO: 332344 - DNA, 12 bp, Artificial Sequence
  Oligonucleotide primer for the detection of SNP TSC0036842
gcgcttcaaaaa

SEQ ID NO: 332345 - DNA, 12 bp, Artificial Sequence
  Oligonucleotide primer for the detection of SNP TSC0036842
gcgcttcgaaaa

SEQ ID NO: 332346 - DNA, 12 bp, Artificial Sequence
  Oligonucleotide primer for the detection of SNP TSC0036842
tgtagttttttg

SEQ ID NO: 332347 - DNA, 12 bp, Artificial Sequence
  Oligonucleotide primer for the detection of SNP TSC0036842
cgtagttttttg

SEQ ID NO: 332348 - DNA, 12 bp, Artificial Sequence
  Oligonucleotide primer for the detection of SNP TSC0036842
cataatccctta

SEQ ID NO: 332349 - DNA, 12 bp, Artificial Sequence
  Oligonucleotide primer for the detection of SNP TSC0036842
cgtaatccctta

SEQ ID NO: 332350 - DNA, 12 bp, Artificial Sequence
  Oligonucleotide primer for the detection of SNP TSC0036842
gtgttttgagag

SEQ ID NO: 332351 - DNA, 12 bp, Artificial Sequence
  Oligonucleotide primer for the detection of SNP TSC0036842
gcgttttgagag

SEQ ID NO: 332352 - DNA, 12 bp, Artificial Sequence
  Oligonukleotid-Primer
gtgtttcgagag

SEQ ID NO: 332353 - DNA, 12 bp, Artificial Sequence
  Oligonucleotide primer for the detection of SNP TSC0036842
gcgtttcgagag

SEQ ID NO: 332354 - DNA, 12 bp, Artificial Sequence
  Oligonucleotide primer for the detection of SNP TSC0036843
aaaatttaaact

SEQ ID NO: 332355 - DNA, 12 bp, Artificial Sequence
  Oligonucleotide primer for the detection of SNP TSC0036843
ttttaaatttgg

SEQ ID NO: 332356 - DNA, 12 bp, Artificial Sequence
  Oligonukleotid-Primer
accatactccac

SEQ ID NO: 332357 - DNA, 12 bp, Artificial Sequence
  Oligonucleotide primer for the detection of SNP TSC0036844
accatactccgc

SEQ ID NO: 332358 - DNA, 12 bp, Artificial Sequence
  Oligonucleotide primer for the detection of SNP TSC0036844
accgtactccac

SEQ ID NO: 332359 - DNA, 12 bp, Artificial Sequence
  Oligonucleotide primer for the detection of SNP TSC0036844
accgtactccgc

SEQ ID NO: 332360 - DNA, 12 bp, Artificial Sequence
  Oligonucleotide primer for the detection of SNP TSC0036844
aaataaagttta

SEQ ID NO: 332361 - DNA, 12 bp, Artificial Sequence
  Oligonucleotide primer for the detection of SNP TSC0036845
gttgaggtagat

SEQ ID NO: 332362 - DNA, 12 bp, Artificial Sequence
  Oligonucleotide primer for the detection of SNP TSC0036845
gtcgaggtagat

SEQ ID NO: 332363 - DNA, 12 bp, Artificial Sequence
  Oligonucleotide primer for the detection of SNP TSC0036845
ccaaaacaaaca

SEQ ID NO: 332364 - DNA, 12 bp, Artificial Sequence
  Oligonucleotide primer for the detection of SNP TSC0036845
ccgaaacaaaca

SEQ ID NO: 332365 - DNA, 12 bp, Artificial Sequence
  Oligonucleotide primer for the detection of SNP TSC0036845
attttaagtgat

SEQ ID NO: 332366 - DNA, 12 bp, Artificial Sequence
  Oligonucleotide primer for the detection of SNP TSC0036846
tataacaaaccc

SEQ ID NO: 332367 - DNA, 12 bp, Artificial Sequence
  Oligonucleotide primer for the detection of SNP TSC0036846
atatgggatttg

SEQ ID NO: 332368 - DNA, 12 bp, Artificial Sequence
  Oligonucleotide primer for the detection of SNP TSC0036847
ttgatagagagt

SEQ ID NO: 332369 - DNA, 12 bp, Artificial Sequence
  Oligonucleotide primer for the detection of SNP TSC0036847
tcgatagagagt

SEQ ID NO: 332370 - DNA, 12 bp, Artificial Sequence
  Oligonucleotide primer for the detection of SNP TSC0036847
tcaacaaaaaat

SEQ ID NO: 332371 - DNA, 12 bp, Artificial Sequence
  Oligonucleotide primer for the detection of SNP TSC0036847
tcgacaaaaaat

SEQ ID NO: 332372 - DNA, 12 bp, Artificial Sequence
  Oligonucleotide primer for the detection of SNP TSC0036847
tgttgtggggag

SEQ ID NO: 332373 - DNA, 12 bp, Artificial Sequence
  Oligonucleotide primer for the detection of SNP TSC0036849
ataatttctacc

SEQ ID NO: 332374 - DNA, 12 bp, Artificial Sequence
  Oligonucleotide primer for the detection of SNP TSC0036849
gatttagataaa

SEQ ID NO: 332375 - DNA, 12 bp, Artificial Sequence
  Oligonucleotide primer for the detection of SNP TSC0036850
tagatttttttg

SEQ ID NO: 332376 - DNA, 12 bp, Artificial Sequence
  Oligonucleotide primer for the detection of SNP TSC0036851
cttaaaaccccc

SEQ ID NO: 332377 - DNA, 12 bp, Artificial Sequence
  Oligonucleotide primer for the detection of SNP TSC0036851
ggaggatggtgg

SEQ ID NO: 332378 - DNA, 12 bp, Artificial Sequence
  Oligonucleotide primer for the detection of SNP TSC0036852
ctactcctcccc

SEQ ID NO: 332379 - DNA, 12 bp, Artificial Sequence
  Oligonucleotide primer for the detection of SNP TSC0036852
aggtgggtaagg

SEQ ID NO: 332380 - DNA, 12 bp, Artificial Sequence
  Oligonucleotide primer for the detection of SNP TSC0036853
ccttaacccttc

SEQ ID NO: 332381 - DNA, 12 bp, Artificial Sequence
  Oligonucleotide primer for the detection of SNP TSC0036853
ggggtttgtttg

SEQ ID NO: 332382 - DNA, 12 bp, Artificial Sequence
  Oligonucleotide primer for the detection of SNP TSC0036853
aaaacctaccta

SEQ ID NO: 332383 - DNA, 12 bp, Artificial Sequence
  Oligonucleotide primer for the detection of SNP TSC0036854
ccaaactactct

SEQ ID NO: 332384 - DNA, 12 bp, Artificial Sequence
  Oligonucleotide primer for the detection of SNP TSC0036854
taggttgttttt

SEQ ID NO: 332385 - DNA, 12 bp, Artificial Sequence
  Oligonucleotide primer for the detection of SNP TSC0036855
ttcatcatccaa

SEQ ID NO: 332386 - DNA, 12 bp, Artificial Sequence
  Oligonucleotide primer for the detection of SNP TSC0036855
ttttttaattag

SEQ ID NO: 332387 - DNA, 12 bp, Artificial Sequence
  Oligonucleotide primer for the detection of SNP TSC0036855
ttctctaatcaa

SEQ ID NO: 332388 - DNA, 12 bp, Artificial Sequence
  Oligonucleotide primer for the detection of SNP TSC0036855
tttattatttaa

SEQ ID NO: 332389 - DNA, 12 bp, Artificial Sequence
  Oligonucleotide primer for the detection of SNP TSC0036862
aataaatatcca

SEQ ID NO: 332390 - DNA, 12 bp, Artificial Sequence
  Oligonucleotide primer for the detection of SNP TSC0036862
tggtagaggttt

SEQ ID NO: 332391 - DNA, 12 bp, Artificial Sequence
  Oligonucleotide primer for the detection of SNP TSC0036862
aacaaaaactca

SEQ ID NO: 332392 - DNA, 12 bp, Artificial Sequence
  Oligonucleotide primer for the detection of SNP TSC0036862
taataaatattt

SEQ ID NO: 332393 - DNA, 12 bp, Artificial Sequence
  Oligonucleotide primer for the detection of SNP TSC0036864
aaaaatttttct

SEQ ID NO: 332394 - DNA, 12 bp, Artificial Sequence
  Oligonucleotide primer for the detection of SNP TSC0036864
aaattaagtatt

SEQ ID NO: 332395 - DNA, 12 bp, Artificial Sequence
  Oligonucleotide primer for the detection of SNP TSC0036867
catttattcctc

SEQ ID NO: 332396 - DNA, 12 bp, Artificial Sequence
  Oligonucleotide primer for the detection of SNP TSC0036867
tatttttaggta

SEQ ID NO: 332397 - DNA, 12 bp, Artificial Sequence
  Oligonucleotide primer for the detection of SNP TSC0036868
acaactataacc

SEQ ID NO: 332398 - DNA, 12 bp, Artificial Sequence
  Oligonucleotide primer for the detection of SNP TSC0036868
taaatgtgagtg

SEQ ID NO: 332399 - DNA, 12 bp, Artificial Sequence
  Oligonucleotide primer for the detection of SNP TSC0036869
ctctctaataat

SEQ ID NO: 332400 - DNA, 12 bp, Artificial Sequence
  Oligonucleotide primer for the detection of SNP TSC0036873
acaacaattctc

SEQ ID NO: 332401 - DNA, 12 bp, Artificial Sequence
  Oligonucleotide primer for the detection of SNP TSC0036873
gagatagtaatg

SEQ ID NO: 332402 - DNA, 12 bp, Artificial Sequence
  Oligonucleotide primer for the detection of SNP TSC0036875
atatctattcta

SEQ ID NO: 332403 - DNA, 12 bp, Artificial Sequence
  Oligonucleotide primer for the detection of SNP TSC0036875
ttagaatgagat

SEQ ID NO: 332404 - DNA, 12 bp, Artificial Sequence
  Oligonucleotide primer for the detection of SNP TSC0036875
atgtttatttta

SEQ ID NO: 332405 - DNA, 12 bp, Artificial Sequence
  Oligonucleotide primer for the detection of SNP TSC0036876
ataacactacat

SEQ ID NO: 332406 - DNA, 12 bp, Artificial Sequence
  Oligonucleotide primer for the detection of SNP TSC0036876
taaatttattta

SEQ ID NO: 332407 - DNA, 12 bp, Artificial Sequence
  Oligonucleotide primer for the detection of SNP TSC0036878
aatttatatcac

SEQ ID NO: 332408 - DNA, 12 bp, Artificial Sequence
  Oligonucleotide primer for the detection of SNP TSC0036878
aaatggttgggg

SEQ ID NO: 332409 - DNA, 12 bp, Artificial Sequence
  Oligonucleotide primer for the detection of SNP TSC0036879
taaattcctacc

SEQ ID NO: 332410 - DNA, 12 bp, Artificial Sequence
  Oligonucleotide primer for the detection of SNP TSC0036879
gagtttagtaaa

SEQ ID NO: 332411 - DNA, 12 bp, Artificial Sequence
  Oligonucleotide primer for the detection of SNP TSC0036883
taaactcacata

SEQ ID NO: 332412 - DNA, 12 bp, Artificial Sequence
  Oligonucleotide primer for the detection of SNP TSC0036883
taaactcacgta

SEQ ID NO: 332413 - DNA, 12 bp, Artificial Sequence
  Oligonucleotide primer for the detection of SNP TSC0036883
atgagtttttgg

SEQ ID NO: 332414 - DNA, 12 bp, Artificial Sequence
  Oligonucleotide primer for the detection of SNP TSC0036883
ataaatctctaa

SEQ ID NO: 332415 - DNA, 12 bp, Artificial Sequence
  Oligonucleotide primer for the detection of SNP TSC0036883
tggatttatgtg

SEQ ID NO: 332416 - DNA, 12 bp, Artificial Sequence
  Oligonucleotide primer for the detection of SNP TSC0036883
tggatttacgtg

SEQ ID NO: 332417 - DNA, 12 bp, Artificial Sequence
  Oligonucleotide primer for the detection of SNP TSC0036884
ctacccttcttt

SEQ ID NO: 332418 - DNA, 12 bp, Artificial Sequence
  Oligonucleotide primer for the detection of SNP TSC0036884
tttatggaagag

SEQ ID NO: 332419 - DNA, 12 bp, Artificial Sequence
  Oligonucleotide primer for the detection of SNP TSC0036884
tttacggaagag

SEQ ID NO: 332420 - DNA, 12 bp, Artificial Sequence
  Oligonucleotide primer for the detection of SNP TSC0036884
ttcacaaaaaaa

SEQ ID NO: 332421 - DNA, 12 bp, Artificial Sequence
  Oligonucleotide primer for the detection of SNP TSC0036884
ttcacgaaaaaa

SEQ ID NO: 332422 - DNA, 12 bp, Artificial Sequence
  Oligonucleotide primer for the detection of SNP TSC0036885
taagttagataa

SEQ ID NO: 332423 - DNA, 12 bp, Artificial Sequence
  Oligonucleotide primer for the detection of SNP TSC0036895
taaacttctttc

SEQ ID NO: 332424 - DNA, 12 bp, Artificial Sequence
  Oligonucleotide primer for the detection of SNP TSC0036902
taacaaaacact

SEQ ID NO: 332425 - DNA, 12 bp, Artificial Sequence
  Oligonucleotide primer for the detection of SNP TSC0036902
taccataatatt

SEQ ID NO: 332426 - DNA, 12 bp, Artificial Sequence
  Oligonucleotide primer for the detection of SNP TSC0036902
tgataaaatatt

SEQ ID NO: 332427 - DNA, 12 bp, Artificial Sequence
  Oligonucleotide primer for the detection of SNP TSC0036904
actttattaacc

SEQ ID NO: 332428 - DNA, 12 bp, Artificial Sequence
  Oligonucleotide primer for the detection of SNP TSC0036904
agtttttgtatg

SEQ ID NO: 332429 - DNA, 12 bp, Artificial Sequence
  Oligonucleotide primer for the detection of SNP TSC0036904
attttattggtt

SEQ ID NO: 332430 - DNA, 12 bp, Artificial Sequence
  Oligonucleotide primer for the detection of SNP TSC0036905
acttattaattt

SEQ ID NO: 332431 - DNA, 12 bp, Artificial Sequence
  Oligonucleotide primer for the detection of SNP TSC0036905
aaattaaattaa

SEQ ID NO: 332432 - DNA, 12 bp, Artificial Sequence
  Oligonucleotide primer for the detection of SNP TSC0036906
aattcctataac

SEQ ID NO: 332433 - DNA, 12 bp, Artificial Sequence
  Oligonucleotide primer for the detection of SNP TSC0036906
attatattagtg

SEQ ID NO: 332434 - DNA, 12 bp, Artificial Sequence
  Oligonucleotide primer for the detection of SNP TSC0036908
tctttcaaaaca

SEQ ID NO: 332435 - DNA, 12 bp, Artificial Sequence
  Oligonucleotide primer for the detection of SNP TSC0036908
tgttgttgtttt

SEQ ID NO: 332436 - DNA, 12 bp, Artificial Sequence
  Oligonucleotide primer for the detection of SNP TSC0036909
aatctaacctaa

SEQ ID NO: 332437 - DNA, 12 bp, Artificial Sequence
  Oligonucleotide primer for the detection of SNP TSC0036909
gtttagtttggt

SEQ ID NO: 332438 - DNA, 12 bp, Artificial Sequence
  Oligonucleotide primer for the detection of SNP TSC0036911
taccaaaaaaaa

SEQ ID NO: 332439 - DNA, 12 bp, Artificial Sequence
  Oligonucleotide primer for the detection of SNP TSC0036911
aaataccttttt

SEQ ID NO: 332440 - DNA, 12 bp, Artificial Sequence
  Oligonucleotide primer for the detection of SNP TSC0036911
tgttaaaaaaaa

SEQ ID NO: 332441 - DNA, 12 bp, Artificial Sequence
  Oligonucleotide primer for the detection of SNP TSC0036912
aaaccccatctc

SEQ ID NO: 332442 - DNA, 12 bp, Artificial Sequence
  Oligonucleotide primer for the detection of SNP TSC0036912
agtaaatagaga

SEQ ID NO: 332443 - DNA, 12 bp, Artificial Sequence
  Oligonucleotide primer for the detection of SNP TSC0036913
aactcttaaaac

SEQ ID NO: 332444 - DNA, 12 bp, Artificial Sequence
  Oligonucleotide primer for the detection of SNP TSC0036913
ttttgtaatggg

SEQ ID NO: 332445 - DNA, 12 bp, Artificial Sequence
  Oligonucleotide primer for the detection of SNP TSC0036920
taattaactaaa

SEQ ID NO: 332446 - DNA, 12 bp, Artificial Sequence
  Oligonucleotide primer for the detection of SNP TSC0036920
ttattgtgtatt

SEQ ID NO: 332447 - DNA, 12 bp, Artificial Sequence
  Oligonucleotide primer for the detection of SNP TSC0036920
ataattgattag

SEQ ID NO: 332448 - DNA, 12 bp, Artificial Sequence
  Oligonucleotide primer for the detection of SNP TSC0036924
aaactatcaatc

SEQ ID NO: 332449 - DNA, 12 bp, Artificial Sequence
  Oligonucleotide primer for the detection of SNP TSC0036926
aatctttacaaa

SEQ ID NO: 332450 - DNA, 12 bp, Artificial Sequence
  Oligonucleotide primer for the detection of SNP TSC0036926
atatgaagttat

SEQ ID NO: 332451 - DNA, 12 bp, Artificial Sequence
  Oligonucleotide primer for the detection of SNP TSC0036926
aatttttataaa

SEQ ID NO: 332452 - DNA, 12 bp, Artificial Sequence
  Oligonucleotide primer for the detection of SNP TSC0036930
ataggaatgttt

SEQ ID NO: 332453 - DNA, 12 bp, Artificial Sequence
  Oligonucleotide primer for the detection of SNP TSC0036930
acaaaaatattc

SEQ ID NO: 332454 - DNA, 12 bp, Artificial Sequence
  Oligonucleotide primer for the detection of SNP TSC0036930
aatagggtaggg

SEQ ID NO: 332455 - DNA, 12 bp, Artificial Sequence
  Oligonucleotide primer for the detection of SNP TSC0036932
taattttttttc

SEQ ID NO: 332456 - DNA, 12 bp, Artificial Sequence
  Oligonucleotide primer for the detection of SNP TSC0036932
attggatgggaa

SEQ ID NO: 332457 - DNA, 12 bp, Artificial Sequence
  Oligonucleotide primer for the detection of SNP TSC0036935
gaattaatttta

SEQ ID NO: 332458 - DNA, 12 bp, Artificial Sequence
  Oligonucleotide primer for the detection of SNP TSC0036936
tcaaaatcacac

SEQ ID NO: 332459 - DNA, 12 bp, Artificial Sequence
  Oligonucleotide primer for the detection of SNP TSC0036936
tcgaaatcacac

SEQ ID NO: 332460 - DNA, 12 bp, Artificial Sequence
  Oligonucleotide primer for the detection of SNP TSC0036936
actaaaatacaa

SEQ ID NO: 332461 - DNA, 12 bp, Artificial Sequence
  Oligonucleotide primer for the detection of SNP TSC0036936
ttgagattatat

SEQ ID NO: 332462 - DNA, 12 bp, Artificial Sequence
  Oligonucleotide primer for the detection of SNP TSC0036936
tcgagattatat

SEQ ID NO: 332463 - DNA, 12 bp, Artificial Sequence
  Oligonucleotide primer for the detection of SNP TSC0036937
aatcaacaacat

SEQ ID NO: 332464 - DNA, 12 bp, Artificial Sequence
  Oligonucleotide primer for the detection of SNP TSC0036937
aatcaacgacat

SEQ ID NO: 332465 - DNA, 12 bp, Artificial Sequence
  Oligonucleotide primer for the detection of SNP TSC0036937
aatcgacaacat

SEQ ID NO: 332466 - DNA, 12 bp, Artificial Sequence
  Oligonucleotide primer for the detection of SNP TSC0036937
aatcgacgacat

SEQ ID NO: 332467 - DNA, 12 bp, Artificial Sequence
  Oligonucleotide primer for the detection of SNP TSC0036937
atctctccatta

SEQ ID NO: 332468 - DNA, 12 bp, Artificial Sequence
  Oligonucleotide primer for the detection of SNP TSC0036937
attgatggtatt

SEQ ID NO: 332469 - DNA, 12 bp, Artificial Sequence
  Oligonucleotide primer for the detection of SNP TSC0036937
atcgatggtatt

SEQ ID NO: 332470 - DNA, 12 bp, Artificial Sequence
  Oligonucleotide primer for the detection of SNP TSC0036937
attgacggtatt

SEQ ID NO: 332471 - DNA, 12 bp, Artificial Sequence
  Oligonucleotide primer for the detection of SNP TSC0036937
atcgacggtatt

SEQ ID NO: 332472 - DNA, 12 bp, Artificial Sequence
  Oligonucleotide primer for the detection of SNP TSC0036937
attgatggtatc

SEQ ID NO: 332473 - DNA, 12 bp, Artificial Sequence
  Oligonukleotid-Primer
atcgatggtatc

SEQ ID NO: 332474 - DNA, 12 bp, Artificial Sequence
  Oligonucleotide primer for the detection of SNP TSC0036937
attgacggtatc

SEQ ID NO: 332475 - DNA, 12 bp, Artificial Sequence
  Oligonucleotide primer for the detection of SNP TSC0036937
atcgacggtatc

SEQ ID NO: 332476 - DNA, 12 bp, Artificial Sequence
  Oligonucleotide primer for the detection of SNP TSC0036938
ctatatcatcac

SEQ ID NO: 332477 - DNA, 12 bp, Artificial Sequence
  Oligonucleotide primer for the detection of SNP TSC0036938
aaccaccctctt

SEQ ID NO: 332478 - DNA, 12 bp, Artificial Sequence
  Oligonucleotide primer for the detection of SNP TSC0036938
ttgtattattat

SEQ ID NO: 332479 - DNA, 12 bp, Artificial Sequence
  Oligonucleotide primer for the detection of SNP TSC0036939
ctaaaaaacctc

SEQ ID NO: 332480 - DNA, 12 bp, Artificial Sequence
  Oligonucleotide primer for the detection of SNP TSC0036939
tggagtttgggg

SEQ ID NO: 332481 - DNA, 12 bp, Artificial Sequence
  Oligonucleotide primer for the detection of SNP TSC0036940
aaccatcccccc

SEQ ID NO: 332482 - DNA, 12 bp, Artificial Sequence
  Oligonucleotide primer for the detection of SNP TSC0036940
agtggaggagat

SEQ ID NO: 332483 - DNA, 12 bp, Artificial Sequence
  Oligonucleotide primer for the detection of SNP TSC0036940
ggttattttttc

SEQ ID NO: 332484 - DNA, 12 bp, Artificial Sequence
  Oligonucleotide primer for the detection of SNP TSC0036942
acttttcaaatt

SEQ ID NO: 332485 - DNA, 12 bp, Artificial Sequence
  Oligonucleotide primer for the detection of SNP TSC0036942
aattaagttata

SEQ ID NO: 332486 - DNA, 12 bp, Artificial Sequence
  Oligonucleotide primer for the detection of SNP TSC0036944
aataattttatt

SEQ ID NO: 332487 - DNA, 12 bp, Artificial Sequence
  Oligonucleotide primer for the detection of SNP TSC0036944
ttttaaagaaat

SEQ ID NO: 332488 - DNA, 12 bp, Artificial Sequence
  Oligonucleotide primer for the detection of SNP TSC0036945
cacactactttc

SEQ ID NO: 332489 - DNA, 12 bp, Artificial Sequence
  Oligonucleotide primer for the detection of SNP TSC0036945
tgttaagatgtt

SEQ ID NO: 332490 - DNA, 12 bp, Artificial Sequence
  Oligonucleotide primer for the detection of SNP TSC0036945
tgttaagatgtc

SEQ ID NO: 332491 - DNA, 12 bp, Artificial Sequence
  Oligonucleotide primer for the detection of SNP TSC0036945
aatattaaaata

SEQ ID NO: 332492 - DNA, 12 bp, Artificial Sequence
  Oligonucleotide primer for the detection of SNP TSC0036946
caacaaacaaat

SEQ ID NO: 332493 - DNA, 12 bp, Artificial Sequence
  Oligonucleotide primer for the detection of SNP TSC0036946
caacaaacgaat

SEQ ID NO: 332494 - DNA, 12 bp, Artificial Sequence
  Oligonucleotide primer for the detection of SNP TSC0036947
ctcctaaaataa

SEQ ID NO: 332495 - DNA, 12 bp, Artificial Sequence
  Oligonucleotide primer for the detection of SNP TSC0036947
ggatttttaggt

SEQ ID NO: 332496 - DNA, 12 bp, Artificial Sequence
  Oligonucleotide primer for the detection of SNP TSC0036947
caaatttccaaa

SEQ ID NO: 332497 - DNA, 12 bp, Artificial Sequence
  Oligonucleotide primer for the detection of SNP TSC0036947
cgaatttccaaa

SEQ ID NO: 332498 - DNA, 12 bp, Artificial Sequence
  Oligonucleotide primer for the detection of SNP TSC0036947
tttttgaggtgg

SEQ ID NO: 332499 - DNA, 12 bp, Artificial Sequence
  Oligonucleotide primer for the detection of SNP TSC0036948
ttaacaacaatt

SEQ ID NO: 332500 - DNA, 12 bp, Artificial Sequence
  Oligonucleotide primer for the detection of SNP TSC0036948
atttaaataggg

SEQ ID NO: 332501 - DNA, 12 bp, Artificial Sequence
  Oligonucleotide primer for the detection of SNP TSC0036949
ttacaattaaaa

SEQ ID NO: 332502 - DNA, 12 bp, Artificial Sequence
  Oligonucleotide primer for the detection of SNP TSC0036949
atttgggatttt

SEQ ID NO: 332503 - DNA, 12 bp, Artificial Sequence
  Oligonucleotide primer for the detection of SNP TSC0036949
ctaacttaaaac

SEQ ID NO: 332504 - DNA, 12 bp, Artificial Sequence
  Oligonucleotide primer for the detection of SNP TSC0036949
tgtagttgaaat

SEQ ID NO: 332505 - DNA, 12 bp, Artificial Sequence
  Oligonucleotide primer for the detection of SNP TSC0036953
aacctcccaaat

SEQ ID NO: 332506 - DNA, 12 bp, Artificial Sequence
  Oligonucleotide primer for the detection of SNP TSC0036953
tttatagtttta

SEQ ID NO: 332507 - DNA, 12 bp, Artificial Sequence
  Oligonucleotide primer for the detection of SNP TSC0036954
acttcttctacc

SEQ ID NO: 332508 - DNA, 12 bp, Artificial Sequence
  Oligonucleotide primer for the detection of SNP TSC0036954
ttatgtagtttg

SEQ ID NO: 332509 - DNA, 12 bp, Artificial Sequence
  Oligonucleotide primer for the detection of SNP TSC0036954
ttacgtagtttg

SEQ ID NO: 332510 - DNA, 12 bp, Artificial Sequence
  Oligonucleotide primer for the detection of SNP TSC0036955
ccaaattaatat

SEQ ID NO: 332511 - DNA, 12 bp, Artificial Sequence
  Oligonucleotide primer for the detection of SNP TSC0036955
cttattctttaa

SEQ ID NO: 332512 - DNA, 12 bp, Artificial Sequence
  Oligonucleotide primer for the detection of SNP TSC0036955
ttagattagtat

SEQ ID NO: 332513 - DNA, 12 bp, Artificial Sequence
  Oligonucleotide primer for the detection of SNP TSC0036956
ttcccctaaaaa

SEQ ID NO: 332514 - DNA, 12 bp, Artificial Sequence
  Oligonucleotide primer for the detection of SNP TSC0036956
tttttttgaaaa

SEQ ID NO: 332515 - DNA, 12 bp, Artificial Sequence
  Oligonucleotide primer for the detection of SNP TSC0036959
taatttctaaat

SEQ ID NO: 332516 - DNA, 12 bp, Artificial Sequence
  Oligonucleotide primer for the detection of SNP TSC0036959
ggtgttattata

SEQ ID NO: 332517 - DNA, 12 bp, Artificial Sequence
  Oligonucleotide primer for the detection of SNP TSC0036966
taatctatattc

SEQ ID NO: 332518 - DNA, 12 bp, Artificial Sequence
  Oligonucleotide primer for the detection of SNP TSC0036966
attgagaataaa

SEQ ID NO: 332519 - DNA, 12 bp, Artificial Sequence
  Oligonucleotide primer for the detection of SNP TSC0036967
aggttaggggta

SEQ ID NO: 332520 - DNA, 12 bp, Artificial Sequence
  Oligonucleotide primer for the detection of SNP TSC0036967
aaaccaaaaaca

SEQ ID NO: 332521 - DNA, 12 bp, Artificial Sequence
  Oligonucleotide primer for the detection of SNP TSC0036967
ttttgggagggt

SEQ ID NO: 332522 - DNA, 12 bp, Artificial Sequence
  Oligonucleotide primer for the detection of SNP TSC0036968
ataaccctatat

SEQ ID NO: 332523 - DNA, 12 bp, Artificial Sequence
  Oligonucleotide primer for the detection of SNP TSC0036968
gaattaggtttg

SEQ ID NO: 332524 - DNA, 12 bp, Artificial Sequence
  Oligonucleotide primer for the detection of SNP TSC0036968
gaattaggttcg

SEQ ID NO: 332525 - DNA, 12 bp, Artificial Sequence
  Oligonucleotide primer for the detection of SNP TSC0036969
tcaaccaaaata

SEQ ID NO: 332526 - DNA, 12 bp, Artificial Sequence
  Oligonucleotide primer for the detection of SNP TSC0036969
tttgatatatgt

SEQ ID NO: 332527 - DNA, 12 bp, Artificial Sequence
  Oligonucleotide primer for the detection of SNP TSC0036969
tttgatatacgt

SEQ ID NO: 332528 - DNA, 12 bp, Artificial Sequence
  Oligonucleotide primer for the detection of SNP TSC0036969
cctaatacacat

SEQ ID NO: 332529 - DNA, 12 bp, Artificial Sequence
  Oligonucleotide primer for the detection of SNP TSC0036969
cctaatacacgt

SEQ ID NO: 332530 - DNA, 12 bp, Artificial Sequence
  Oligonucleotide primer for the detection of SNP TSC0036969
ttaattaagata

SEQ ID NO: 332531 - DNA, 12 bp, Artificial Sequence
  Oligonucleotide primer for the detection of SNP TSC0036970
atggttatattg

SEQ ID NO: 332532 - DNA, 12 bp, Artificial Sequence
  Oligonucleotide primer for the detection of SNP TSC0036970
ataattatacta

SEQ ID NO: 332533 - DNA, 12 bp, Artificial Sequence
  Oligonucleotide primer for the detection of SNP TSC0036970
tgaaaatttaaa

SEQ ID NO: 332534 - DNA, 12 bp, Artificial Sequence
  Oligonucleotide primer for the detection of SNP TSC0036971
accaccatcccc

SEQ ID NO: 332535 - DNA, 12 bp, Artificial Sequence
  Oligonucleotide primer for the detection of SNP TSC0036971
ttatgtagttgg

SEQ ID NO: 332536 - DNA, 12 bp, Artificial Sequence
  Oligonucleotide primer for the detection of SNP TSC0036979
acctaatattcc

SEQ ID NO: 332537 - DNA, 12 bp, Artificial Sequence
  Oligonucleotide primer for the detection of SNP TSC0036979
gcctaatattcc

SEQ ID NO: 332538 - DNA, 12 bp, Artificial Sequence
  Oligonucleotide primer for the detection of SNP TSC0036979
tgttatttattg

SEQ ID NO: 332539 - DNA, 12 bp, Artificial Sequence
  Oligonucleotide primer for the detection of SNP TSC0036979
taccatccacta

SEQ ID NO: 332540 - DNA, 12 bp, Artificial Sequence
  Oligonucleotide primer for the detection of SNP TSC0036979
gtttggtgtttt

SEQ ID NO: 332541 - DNA, 12 bp, Artificial Sequence
  Oligonucleotide primer for the detection of SNP TSC0036980
gattaaatattg

SEQ ID NO: 332542 - DNA, 12 bp, Artificial Sequence
  Oligonucleotide primer for the detection of SNP TSC0036981
attttaaaataa

SEQ ID NO: 332543 - DNA, 12 bp, Artificial Sequence
  Oligonucleotide primer for the detection of SNP TSC0036981
tgaaaatagttt

SEQ ID NO: 332544 - DNA, 12 bp, Artificial Sequence
  Oligonucleotide primer for the detection of SNP TSC0036982
acctataaattt

SEQ ID NO: 332545 - DNA, 12 bp, Artificial Sequence
  Oligonucleotide primer for the detection of SNP TSC0036982
agtttttggtgg

SEQ ID NO: 332546 - DNA, 12 bp, Artificial Sequence
  Oligonucleotide primer for the detection of SNP TSC0036985
tctccctactaa

SEQ ID NO: 332547 - DNA, 12 bp, Artificial Sequence
  Oligonucleotide primer for the detection of SNP TSC0036985
gatagtaaagag

SEQ ID NO: 332548 - DNA, 12 bp, Artificial Sequence
  Oligonucleotide primer for the detection of SNP TSC0036986
attccctctctt

SEQ ID NO: 332549 - DNA, 12 bp, Artificial Sequence
  Oligonucleotide primer for the detection of SNP TSC0036986
gggataattgat

SEQ ID NO: 332550 - DNA, 12 bp, Artificial Sequence
  Oligonucleotide primer for the detection of SNP TSC0036986
aaaataattaac

SEQ ID NO: 332551 - DNA, 12 bp, Artificial Sequence
  Oligonucleotide primer for the detection of SNP TSC0036987
aacactttcctt

SEQ ID NO: 332552 - DNA, 12 bp, Artificial Sequence
  Oligonucleotide primer for the detection of SNP TSC0036988
aactacctccac

SEQ ID NO: 332553 - DNA, 12 bp, Artificial Sequence
  Oligonucleotide primer for the detection of SNP TSC0036988
aactacctccgc

SEQ ID NO: 332554 - DNA, 12 bp, Artificial Sequence
  Oligonucleotide primer for the detection of SNP TSC0036988
gaggttttatag

SEQ ID NO: 332555 - DNA, 12 bp, Artificial Sequence
  Oligonucleotide primer for the detection of SNP TSC0036989
agatggtttggt

SEQ ID NO: 332556 - DNA, 12 bp, Artificial Sequence
  Oligonucleotide primer for the detection of SNP TSC0036989
agatggtttggc

SEQ ID NO: 332557 - DNA, 12 bp, Artificial Sequence
  Oligonucleotide primer for the detection of SNP TSC0036989
ttaaaaaattga

SEQ ID NO: 332558 - DNA, 12 bp, Artificial Sequence
  Oligonucleotide primer for the detection of SNP TSC0036990
aaaaacaaaact

SEQ ID NO: 332559 - DNA, 12 bp, Artificial Sequence
  Oligonucleotide primer for the detection of SNP TSC0036990
aatcaatatcaa

SEQ ID NO: 332560 - DNA, 12 bp, Artificial Sequence
  Oligonucleotide primer for the detection of SNP TSC0036990
aaggatagagtt

SEQ ID NO: 332561 - DNA, 12 bp, Artificial Sequence
  Oligonucleotide primer for the detection of SNP TSC0036993
aacaataataaa

SEQ ID NO: 332562 - DNA, 12 bp, Artificial Sequence
  Oligonucleotide primer for the detection of SNP TSC0036993
attgaaatatat

SEQ ID NO: 332563 - DNA, 12 bp, Artificial Sequence
  Oligonucleotide primer for the detection of SNP TSC0036993
agtaatagtgaa

SEQ ID NO: 332564 - DNA, 12 bp, Artificial Sequence
  Oligonucleotide primer for the detection of SNP TSC0036994
ctccaacttcaa

SEQ ID NO: 332565 - DNA, 12 bp, Artificial Sequence
  Oligonucleotide primer for the detection of SNP TSC0036994
attgttaatatt

SEQ ID NO: 332566 - DNA, 12 bp, Artificial Sequence
  Oligonucleotide primer for the detection of SNP TSC0036994
attatcaatact

SEQ ID NO: 332567 - DNA, 12 bp, Artificial Sequence
  Oligonucleotide primer for the detection of SNP TSC0036998
ttgggttagtag

SEQ ID NO: 332568 - DNA, 12 bp, Artificial Sequence
  Oligonucleotide primer for the detection of SNP TSC0036999
ctcccaatatct

SEQ ID NO: 332569 - DNA, 12 bp, Artificial Sequence
  Oligonucleotide primer for the detection of SNP TSC0036999
gtgtataatttt

SEQ ID NO: 332570 - DNA, 12 bp, Artificial Sequence
  Oligonucleotide primer for the detection of SNP TSC0037000
ttaaaaatactc

SEQ ID NO: 332571 - DNA, 12 bp, Artificial Sequence
  Oligonucleotide primer for the detection of SNP TSC0037001
tcccttcatcaa

SEQ ID NO: 332572 - DNA, 12 bp, Artificial Sequence
  Oligonucleotide primer for the detection of SNP TSC0037001
tggtaagaaaag

SEQ ID NO: 332573 - DNA, 12 bp, Artificial Sequence
  Oligonucleotide primer for the detection of SNP TSC0037002
taaattttactt

SEQ ID NO: 332574 - DNA, 12 bp, Artificial Sequence
  Oligonucleotide primer for the detection of SNP TSC0037002
ttttgagaatta

SEQ ID NO: 332575 - DNA, 12 bp, Artificial Sequence
  Oligonucleotide primer for the detection of SNP TSC0037003
attttttttgag

SEQ ID NO: 332576 - DNA, 12 bp, Artificial Sequence
  Oligonucleotide primer for the detection of SNP TSC0037005
atacactaaaac

SEQ ID NO: 332577 - DNA, 12 bp, Artificial Sequence
  Oligonucleotide primer for the detection of SNP TSC0037005
tcccattctccc

SEQ ID NO: 332578 - DNA, 12 bp, Artificial Sequence
  Oligonucleotide primer for the detection of SNP TSC0037005
tattgaggtttt

SEQ ID NO: 332579 - DNA, 12 bp, Artificial Sequence
  Oligonucleotide primer for the detection of SNP TSC0037006
actattcatcct

SEQ ID NO: 332580 - DNA, 12 bp, Artificial Sequence
  Oligonucleotide primer for the detection of SNP TSC0037006
gctattcatcct

SEQ ID NO: 332581 - DNA, 12 bp, Artificial Sequence
  Oligonucleotide primer for the detection of SNP TSC0037006
gttttagtatta

SEQ ID NO: 332582 - DNA, 12 bp, Artificial Sequence
  Oligonucleotide primer for the detection of SNP TSC0037012
taacaaatcatt

SEQ ID NO: 332583 - DNA, 12 bp, Artificial Sequence
  Oligonucleotide primer for the detection of SNP TSC0037012
attattagtaga

SEQ ID NO: 332584 - DNA, 12 bp, Artificial Sequence
  Oligonucleotide primer for the detection of SNP TSC0037012
tgataaattatt

SEQ ID NO: 332585 - DNA, 12 bp, Artificial Sequence
  Oligonucleotide primer for the detection of SNP TSC0037016
caaaactttttt

SEQ ID NO: 332586 - DNA, 12 bp, Artificial Sequence
  Oligonucleotide primer for the detection of SNP TSC0037017
tatacactaatt

SEQ ID NO: 332587 - DNA, 12 bp, Artificial Sequence
  Oligonucleotide primer for the detection of SNP TSC0037017
gtgtttgatttg

SEQ ID NO: 332588 - DNA, 12 bp, Artificial Sequence
  Oligonucleotide primer for the detection of SNP TSC0037018
ttagttgtttta

SEQ ID NO: 332589 - DNA, 12 bp, Artificial Sequence
  Oligonucleotide primer for the detection of SNP TSC0037018
ccaactacttca

SEQ ID NO: 332590 - DNA, 12 bp, Artificial Sequence
  Oligonucleotide primer for the detection of SNP TSC0037018
gaattttaaggt

SEQ ID NO: 332591 - DNA, 12 bp, Artificial Sequence
  Oligonucleotide primer for the detection of SNP TSC0037019
cttttatcttaa

SEQ ID NO: 332592 - DNA, 12 bp, Artificial Sequence
  Oligonucleotide primer for the detection of SNP TSC0037019
tggaaatataag

SEQ ID NO: 332593 - DNA, 12 bp, Artificial Sequence
  Oligonucleotide primer for the detection of SNP TSC0037020
acctaaataaaa

SEQ ID NO: 332594 - DNA, 12 bp, Artificial Sequence
  Oligonucleotide primer for the detection of SNP TSC0037020
atctcttcatct

SEQ ID NO: 332595 - DNA, 12 bp, Artificial Sequence
  Oligonucleotide primer for the detection of SNP TSC0037020
tttagtttgaat

SEQ ID NO: 332596 - DNA, 12 bp, Artificial Sequence
  Oligonucleotide primer for the detection of SNP TSC0037021
cttaacacaaac

SEQ ID NO: 332597 - DNA, 12 bp, Artificial Sequence
  Oligonucleotide primer for the detection of SNP TSC0037021
atttaaagtaga

SEQ ID NO: 332598 - DNA, 12 bp, Artificial Sequence
  Oligonucleotide primer for the detection of SNP TSC0037022
taacaactaaca

SEQ ID NO: 332599 - DNA, 12 bp, Artificial Sequence
  Oligonucleotide primer for the detection of SNP TSC0037022
tgtgtgaagttt

SEQ ID NO: 332600 - DNA, 12 bp, Artificial Sequence
  Oligonucleotide primer for the detection of SNP TSC0037022
tatataaaacct

SEQ ID NO: 332601 - DNA, 12 bp, Artificial Sequence
  Oligonucleotide primer for the detection of SNP TSC0037022
tggtagttgata

SEQ ID NO: 332602 - DNA, 12 bp, Artificial Sequence
  Oligonucleotide primer for the detection of SNP TSC0037024
atttggtgatta

SEQ ID NO: 332603 - DNA, 12 bp, Artificial Sequence
  Oligonucleotide primer for the detection of SNP TSC0037025
ataaacaatacc

SEQ ID NO: 332604 - DNA, 12 bp, Artificial Sequence
  Oligonucleotide primer for the detection of SNP TSC0037025
tttgtagttttt

SEQ ID NO: 332605 - DNA, 12 bp, Artificial Sequence
  Oligonucleotide primer for the detection of SNP TSC0037025
ctacaactctca

SEQ ID NO: 332606 - DNA, 12 bp, Artificial Sequence
  Oligonucleotide primer for the detection of SNP TSC0037025
gtgagtagtatt

SEQ ID NO: 332607 - DNA, 12 bp, Artificial Sequence
  Oligonucleotide primer for the detection of SNP TSC0037026
tcctttttaaat

SEQ ID NO: 332608 - DNA, 12 bp, Artificial Sequence
  Oligonucleotide primer for the detection of SNP TSC0037026
tttaatatattt

SEQ ID NO: 332609 - DNA, 12 bp, Artificial Sequence
  Oligonucleotide primer for the detection of SNP TSC0037026
atttttaatata

SEQ ID NO: 332610 - DNA, 12 bp, Artificial Sequence
  Oligonucleotide primer for the detection of SNP TSC0037027
accaacttacaa

SEQ ID NO: 332611 - DNA, 12 bp, Artificial Sequence
  Oligonucleotide primer for the detection of SNP TSC0037027
cctcaaaacaca

SEQ ID NO: 332612 - DNA, 12 bp, Artificial Sequence
  Oligonucleotide primer for the detection of SNP TSC0037027
gttagtttgtag

SEQ ID NO: 332613 - DNA, 12 bp, Artificial Sequence
  Oligonucleotide primer for the detection of SNP TSC0037029
tccctaccaacc

SEQ ID NO: 332614 - DNA, 12 bp, Artificial Sequence
  Oligonucleotide primer for the detection of SNP TSC0037029
attcaaattaaa

SEQ ID NO: 332615 - DNA, 12 bp, Artificial Sequence
  Oligonucleotide primer for the detection of SNP TSC0037030
attacttaaata

SEQ ID NO: 332616 - DNA, 12 bp, Artificial Sequence
  Oligonucleotide primer for the detection of SNP TSC0037030
ctatctcctccc

SEQ ID NO: 332617 - DNA, 12 bp, Artificial Sequence
  Oligonucleotide primer for the detection of SNP TSC0037030
ttgtttgaatgt

SEQ ID NO: 332618 - DNA, 12 bp, Artificial Sequence
  Oligonukleotid-Primer
ttgtttgaatgc

SEQ ID NO: 332619 - DNA, 12 bp, Artificial Sequence
  Oligonucleotide primer for the detection of SNP TSC0037031
atctcctcccaa

SEQ ID NO: 332620 - DNA, 12 bp, Artificial Sequence
  Oligonucleotide primer for the detection of SNP TSC0037035
actaatccacta

SEQ ID NO: 332621 - DNA, 12 bp, Artificial Sequence
  Oligonucleotide primer for the detection of SNP TSC0037035
tgttaaaaagtt

SEQ ID NO: 332622 - DNA, 12 bp, Artificial Sequence
  Oligonukleotid-Primer
taccaaaaaact

SEQ ID NO: 332623 - DNA, 12 bp, Artificial Sequence
  Oligonucleotide primer for the detection of SNP TSC0037037
tcttcttctttt

SEQ ID NO: 332624 - DNA, 12 bp, Artificial Sequence
  Oligonucleotide primer for the detection of SNP TSC0037037
gggtgatattaa

SEQ ID NO: 332625 - DNA, 12 bp, Artificial Sequence
  Oligonucleotide primer for the detection of SNP TSC0037038
aaattaatattt

SEQ ID NO: 332626 - DNA, 12 bp, Artificial Sequence
  Oligonukleotid-Primer
aaatcaatattt

SEQ ID NO: 332627 - DNA, 12 bp, Artificial Sequence
  Oligonucleotide primer for the detection of SNP TSC0037039
taaatgattttg

SEQ ID NO: 332628 - DNA, 12 bp, Artificial Sequence
  Oligonucleotide primer for the detection of SNP TSC0037039
taaatgatttcg

SEQ ID NO: 332629 - DNA, 12 bp, Artificial Sequence
  Oligonucleotide primer for the detection of SNP TSC0037039
taaataactcca

SEQ ID NO: 332630 - DNA, 12 bp, Artificial Sequence
  Oligonucleotide primer for the detection of SNP TSC0037039
taaataactccg

SEQ ID NO: 332631 - DNA, 12 bp, Artificial Sequence
  Oligonucleotide primer for the detection of SNP TSC0037039
agtagtaaaatt

SEQ ID NO: 332632 - DNA, 12 bp, Artificial Sequence
  Oligonucleotide primer for the detection of SNP TSC0037040
cctttcccaata

SEQ ID NO: 332633 - DNA, 12 bp, Artificial Sequence
  Oligonucleotide primer for the detection of SNP TSC0037040
tgatgtgtagat

SEQ ID NO: 332634 - DNA, 12 bp, Artificial Sequence
  Oligonucleotide primer for the detection of SNP TSC0037042
taaaatctacct

SEQ ID NO: 332635 - DNA, 12 bp, Artificial Sequence
  Oligonucleotide primer for the detection of SNP TSC0037042
atggatgtagat

SEQ ID NO: 332636 - DNA, 12 bp, Artificial Sequence
  Oligonucleotide primer for the detection of SNP TSC0037042
acggatgtagat

SEQ ID NO: 332637 - DNA, 12 bp, Artificial Sequence
  Oligonucleotide primer for the detection of SNP TSC0037042
aacgaatataaa

SEQ ID NO: 332638 - DNA, 12 bp, Artificial Sequence
  Oligonucleotide primer for the detection of SNP TSC0037042
gaatttgttttt

SEQ ID NO: 332639 - DNA, 12 bp, Artificial Sequence
  Oligonucleotide primer for the detection of SNP TSC0037043
actaccaatctt

SEQ ID NO: 332640 - DNA, 12 bp, Artificial Sequence
  Oligonucleotide primer for the detection of SNP TSC0037043
tgagtattttga

SEQ ID NO: 332641 - DNA, 12 bp, Artificial Sequence
  Oligonucleotide primer for the detection of SNP TSC0037050
tttgatttttaa

SEQ ID NO: 332642 - DNA, 12 bp, Artificial Sequence
  Oligonucleotide primer for the detection of SNP TSC0037059
aaaaacatcaaa

SEQ ID NO: 332643 - DNA, 12 bp, Artificial Sequence
  Oligonucleotide primer for the detection of SNP TSC0037059
ttgatttgggtt

SEQ ID NO: 332644 - DNA, 12 bp, Artificial Sequence
  Oligonucleotide primer for the detection of SNP TSC0037059
ctaatctaaatt

SEQ ID NO: 332645 - DNA, 12 bp, Artificial Sequence
  Oligonucleotide primer for the detection of SNP TSC0037059
gaaaatattaga

SEQ ID NO: 332646 - DNA, 12 bp, Artificial Sequence
  Oligonucleotide primer for the detection of SNP TSC0037060
tattatttccat

SEQ ID NO: 332647 - DNA, 12 bp, Artificial Sequence
  Oligonucleotide primer for the detection of SNP TSC0037060
gtatggattgta

SEQ ID NO: 332648 - DNA, 12 bp, Artificial Sequence
  Oligonucleotide primer for the detection of SNP TSC0037061
aataaaactaac

SEQ ID NO: 332649 - DNA, 12 bp, Artificial Sequence
  Oligonucleotide primer for the detection of SNP TSC0037061
ataaggtaattg

SEQ ID NO: 332650 - DNA, 12 bp, Artificial Sequence
  Oligonucleotide primer for the detection of SNP TSC0037061
ataaggtaatcg

SEQ ID NO: 332651 - DNA, 12 bp, Artificial Sequence
  Oligonucleotide primer for the detection of SNP TSC0037061
acaaaacaaccg

SEQ ID NO: 332652 - DNA, 12 bp, Artificial Sequence
  Oligonucleotide primer for the detection of SNP TSC0037061
agtaaaattggt

SEQ ID NO: 332653 - DNA, 12 bp, Artificial Sequence
  Oligonucleotide primer for the detection of SNP TSC0037062
cctcaactacat

SEQ ID NO: 332654 - DNA, 12 bp, Artificial Sequence
  Oligonucleotide primer for the detection of SNP TSC0037062
tttttattagtg

SEQ ID NO: 332655 - DNA, 12 bp, Artificial Sequence
  Oligonucleotide primer for the detection of SNP TSC0037064
aaacaccaattt

SEQ ID NO: 332656 - DNA, 12 bp, Artificial Sequence
  Oligonucleotide primer for the detection of SNP TSC0037064
tgattttaataa

SEQ ID NO: 332657 - DNA, 12 bp, Artificial Sequence
  Oligonucleotide primer for the detection of SNP TSC0037066
ttacccaaaaaa

SEQ ID NO: 332658 - DNA, 12 bp, Artificial Sequence
  Oligonucleotide primer for the detection of SNP TSC0037066
ttgatgtttatt

SEQ ID NO: 332659 - DNA, 12 bp, Artificial Sequence
  Oligonucleotide primer for the detection of SNP TSC0037066
tcgatgtttatt

SEQ ID NO: 332660 - DNA, 12 bp, Artificial Sequence
  Oligonucleotide primer for the detection of SNP TSC0037066
ccaatactcacc

SEQ ID NO: 332661 - DNA, 12 bp, Artificial Sequence
  Oligonucleotide primer for the detection of SNP TSC0037066
ccgatactcacc

SEQ ID NO: 332662 - DNA, 12 bp, Artificial Sequence
  Oligonucleotide primer for the detection of SNP TSC0037066
ttatttaggggg

SEQ ID NO: 332663 - DNA, 12 bp, Artificial Sequence
  Oligonucleotide primer for the detection of SNP TSC0037067
tatatcttttct

SEQ ID NO: 332664 - DNA, 12 bp, Artificial Sequence
  Oligonucleotide primer for the detection of SNP TSC0037067
agataatgtgaa

SEQ ID NO: 332665 - DNA, 12 bp, Artificial Sequence
  Oligonucleotide primer for the detection of SNP TSC0037068
caaaaaaccaac

SEQ ID NO: 332666 - DNA, 12 bp, Artificial Sequence
  Oligonucleotide primer for the detection of SNP TSC0037069
attcaattattt

SEQ ID NO: 332667 - DNA, 12 bp, Artificial Sequence
  Oligonucleotide primer for the detection of SNP TSC0037070
ttaaaattaatc

SEQ ID NO: 332668 - DNA, 12 bp, Artificial Sequence
  Oligonucleotide primer for the detection of SNP TSC0037070
tttaatgaattt

SEQ ID NO: 332669 - DNA, 12 bp, Artificial Sequence
  Oligonucleotide primer for the detection of SNP TSC0037070
ctaataaaccca

SEQ ID NO: 332670 - DNA, 12 bp, Artificial Sequence
  Oligonucleotide primer for the detection of SNP TSC0037070
ttaaagttagtt

SEQ ID NO: 332671 - DNA, 12 bp, Artificial Sequence
  Oligonucleotide primer for the detection of SNP TSC0037070
ttaaagttagtc

SEQ ID NO: 332672 - DNA, 12 bp, Artificial Sequence
  Oligonucleotide primer for the detection of SNP TSC0037071
tcaatccatttc

SEQ ID NO: 332673 - DNA, 12 bp, Artificial Sequence
  Oligonucleotide primer for the detection of SNP TSC0037075
tattttaagtat

SEQ ID NO: 332674 - DNA, 12 bp, Artificial Sequence
  Oligonucleotide primer for the detection of SNP TSC0037075
tattttaagtac

SEQ ID NO: 332675 - DNA, 12 bp, Artificial Sequence
  Oligonucleotide primer for the detection of SNP TSC0037075
aataattgaagt

SEQ ID NO: 332676 - DNA, 12 bp, Artificial Sequence
  Oligonucleotide primer for the detection of SNP TSC0037076
atataaaataac

SEQ ID NO: 332677 - DNA, 12 bp, Artificial Sequence
  Oligonucleotide primer for the detection of SNP TSC0037076
ttttaagtatgg

SEQ ID NO: 332678 - DNA, 12 bp, Artificial Sequence
  Oligonucleotide primer for the detection of SNP TSC0037076
ttttaagtacgg

SEQ ID NO: 332679 - DNA, 12 bp, Artificial Sequence
  Oligonucleotide primer for the detection of SNP TSC0037076
ctctaaatacaa

SEQ ID NO: 332680 - DNA, 12 bp, Artificial Sequence
  Oligonucleotide primer for the detection of SNP TSC0037076
ctctaaatacga

SEQ ID NO: 332681 - DNA, 12 bp, Artificial Sequence
  Oligonucleotide primer for the detection of SNP TSC0037076
atgtaaaataat

SEQ ID NO: 332682 - DNA, 12 bp, Artificial Sequence
  Oligonucleotide primer for the detection of SNP TSC0037077
ttaaaataaaaa

SEQ ID NO: 332683 - DNA, 12 bp, Artificial Sequence
  Oligonucleotide primer for the detection of SNP TSC0037077
ttgattggtaat

SEQ ID NO: 332684 - DNA, 12 bp, Artificial Sequence
  Oligonucleotide primer for the detection of SNP TSC0037077
ttgatcggtaat

SEQ ID NO: 332685 - DNA, 12 bp, Artificial Sequence
  Oligonucleotide primer for the detection of SNP TSC0037077
attaatcgataa

SEQ ID NO: 332686 - DNA, 12 bp, Artificial Sequence
  Oligonucleotide primer for the detection of SNP TSC0037077
tgaattaaaatg

SEQ ID NO: 332687 - DNA, 12 bp, Artificial Sequence
  Oligonucleotide primer for the detection of SNP TSC0037078
tctcatatcttc

SEQ ID NO: 332688 - DNA, 12 bp, Artificial Sequence
  Oligonucleotide primer for the detection of SNP TSC0037078
tagaaggtatga

SEQ ID NO: 332689 - DNA, 12 bp, Artificial Sequence
  Oligonucleotide primer for the detection of SNP TSC0037087
ttactcttaaat

SEQ ID NO: 332690 - DNA, 12 bp, Artificial Sequence
  Oligonucleotide primer for the detection of SNP TSC0037087
taaattagatga

SEQ ID NO: 332691 - DNA, 12 bp, Artificial Sequence
  Oligonucleotide primer for the detection of SNP TSC0037088
aaaaatacttat

SEQ ID NO: 332692 - DNA, 12 bp, Artificial Sequence
  Oligonucleotide primer for the detection of SNP TSC0037088
agattattttaa

SEQ ID NO: 332693 - DNA, 12 bp, Artificial Sequence
  Oligonucleotide primer for the detection of SNP TSC0037089
taaaatacttct

SEQ ID NO: 332694 - DNA, 12 bp, Artificial Sequence
  Oligonucleotide primer for the detection of SNP TSC0037089
ttgttgaaagat

SEQ ID NO: 332695 - DNA, 12 bp, Artificial Sequence
  Oligonucleotide primer for the detection of SNP TSC0037089
ctactaaaaaac

SEQ ID NO: 332696 - DNA, 12 bp, Artificial Sequence
  Oligonucleotide primer for the detection of SNP TSC0037089
tgagatattttt

SEQ ID NO: 332697 - DNA, 12 bp, Artificial Sequence
  Oligonucleotide primer for the detection of SNP TSC0037093
cttcttactttc

SEQ ID NO: 332698 - DNA, 12 bp, Artificial Sequence
  Oligonucleotide primer for the detection of SNP TSC0037101
ttttagaagata

SEQ ID NO: 332699 - DNA, 12 bp, Artificial Sequence
  Oligonucleotide primer for the detection of SNP TSC0037102
attaaaggagta

SEQ ID NO: 332700 - DNA, 12 bp, Artificial Sequence
  Oligonucleotide primer for the detection of SNP TSC0037103
tcaacaatccac

SEQ ID NO: 332701 - DNA, 12 bp, Artificial Sequence
  Oligonucleotide primer for the detection of SNP TSC0037103
tgagtatagaag

SEQ ID NO: 332702 - DNA, 12 bp, Artificial Sequence
  Oligonucleotide primer for the detection of SNP TSC0037106
cccaaaatcata

SEQ ID NO: 332703 - DNA, 12 bp, Artificial Sequence
  Oligonucleotide primer for the detection of SNP TSC0037106
tatttagttgtt

SEQ ID NO: 332704 - DNA, 12 bp, Artificial Sequence
  Oligonucleotide primer for the detection of SNP TSC0037106
ccacttaattac

SEQ ID NO: 332705 - DNA, 12 bp, Artificial Sequence
  Oligonucleotide primer for the detection of SNP TSC0037106
gtttaaggttat

SEQ ID NO: 332706 - DNA, 12 bp, Artificial Sequence
  Oligonucleotide primer for the detection of SNP TSC0037111
tcaaaaataaaa

SEQ ID NO: 332707 - DNA, 12 bp, Artificial Sequence
  Oligonucleotide primer for the detection of SNP TSC0037111
tattgttcgtat

SEQ ID NO: 332708 - DNA, 12 bp, Artificial Sequence
  Oligonucleotide primer for the detection of SNP TSC0037111
tatcgttcgtat

SEQ ID NO: 332709 - DNA, 12 bp, Artificial Sequence
  Oligonucleotide primer for the detection of SNP TSC0037111
catcatccacat

SEQ ID NO: 332710 - DNA, 12 bp, Artificial Sequence
  Oligonucleotide primer for the detection of SNP TSC0037111
catcatccgcat

SEQ ID NO: 332711 - DNA, 12 bp, Artificial Sequence
  Oligonucleotide primer for the detection of SNP TSC0037111
catcgtccacat

SEQ ID NO: 332712 - DNA, 12 bp, Artificial Sequence
  Oligonucleotide primer for the detection of SNP TSC0037111
catcgtccgcat

SEQ ID NO: 332713 - DNA, 12 bp, Artificial Sequence
  Oligonucleotide primer for the detection of SNP TSC0037111
ttaggggtggga

SEQ ID NO: 332714 - DNA, 12 bp, Artificial Sequence
  Oligonucleotide primer for the detection of SNP TSC0037113
acaaatcatcct

SEQ ID NO: 332715 - DNA, 12 bp, Artificial Sequence
  Oligonucleotide primer for the detection of SNP TSC0037113
gaggtgatgtgg

SEQ ID NO: 332716 - DNA, 12 bp, Artificial Sequence
  Oligonucleotide primer for the detection of SNP TSC0037114
aataaataagag

SEQ ID NO: 332717 - DNA, 12 bp, Artificial Sequence
  Oligonucleotide primer for the detection of SNP TSC0037115
aggtatgggtaa

SEQ ID NO: 332718 - DNA, 12 bp, Artificial Sequence
  Oligonucleotide primer for the detection of SNP TSC0037118
aacacaacaaaa

SEQ ID NO: 332719 - DNA, 12 bp, Artificial Sequence
  Oligonucleotide primer for the detection of SNP TSC0037118
aacacaacgaaa

SEQ ID NO: 332720 - DNA, 12 bp, Artificial Sequence
  Oligonucleotide primer for the detection of SNP TSC0037118
tttaaacaccta

SEQ ID NO: 332721 - DNA, 12 bp, Artificial Sequence
  Oligonucleotide primer for the detection of SNP TSC0037118
gtatagtgagat

SEQ ID NO: 332722 - DNA, 12 bp, Artificial Sequence
  Oligonucleotide primer for the detection of SNP TSC0037118
gtatagcgagat

SEQ ID NO: 332723 - DNA, 12 bp, Artificial Sequence
  Oligonucleotide primer for the detection of SNP TSC0037130
aaactcaatttt

SEQ ID NO: 332724 - DNA, 12 bp, Artificial Sequence
  Oligonucleotide primer for the detection of SNP TSC0037130
tgaagttatgaa

SEQ ID NO: 332725 - DNA, 12 bp, Artificial Sequence
  Oligonucleotide primer for the detection of SNP TSC0037134
atgtgttaaata

SEQ ID NO: 332726 - DNA, 12 bp, Artificial Sequence
  Oligonucleotide primer for the detection of SNP TSC0037134
atatatcaaaca

SEQ ID NO: 332727 - DNA, 12 bp, Artificial Sequence
  Oligonucleotide primer for the detection of SNP TSC0037134
ggaagggtgagt

SEQ ID NO: 332728 - DNA, 12 bp, Artificial Sequence
  Oligonucleotide primer for the detection of SNP TSC0037139
aaattacaactc

SEQ ID NO: 332729 - DNA, 12 bp, Artificial Sequence
  Oligonucleotide primer for the detection of SNP TSC0037139
tgggtgaggaaa

SEQ ID NO: 332730 - DNA, 12 bp, Artificial Sequence
  Oligonucleotide primer for the detection of SNP TSC0037140
cataccaacaca

SEQ ID NO: 332731 - DNA, 12 bp, Artificial Sequence
  Oligonucleotide primer for the detection of SNP TSC0037140
aaaaaaattagt

SEQ ID NO: 332732 - DNA, 12 bp, Artificial Sequence
  Oligonucleotide primer for the detection of SNP TSC0037140
tatgttagtata

SEQ ID NO: 332733 - DNA, 12 bp, Artificial Sequence
  Oligonucleotide primer for the detection of SNP TSC0037144
aaatcacaaaat

SEQ ID NO: 332734 - DNA, 12 bp, Artificial Sequence
  Oligonucleotide primer for the detection of SNP TSC0037144
aaatcacgaaat

SEQ ID NO: 332735 - DNA, 12 bp, Artificial Sequence
  Oligonucleotide primer for the detection of SNP TSC0037145
tatatatctata

SEQ ID NO: 332736 - DNA, 12 bp, Artificial Sequence
  Oligonucleotide primer for the detection of SNP TSC0037145
gttaatatttgt

SEQ ID NO: 332737 - DNA, 12 bp, Artificial Sequence
  Oligonucleotide primer for the detection of SNP TSC0037145
aattaacattta

SEQ ID NO: 332738 - DNA, 12 bp, Artificial Sequence
  Oligonucleotide primer for the detection of SNP TSC0037146
ataaacatctat

SEQ ID NO: 332739 - DNA, 12 bp, Artificial Sequence
  Oligonucleotide primer for the detection of SNP TSC0037146
ttaggtaataaa

SEQ ID NO: 332740 - DNA, 12 bp, Artificial Sequence
  Oligonucleotide primer for the detection of SNP TSC0037146
ttaaacaacaaa

SEQ ID NO: 332741 - DNA, 12 bp, Artificial Sequence
  Oligonucleotide primer for the detection of SNP TSC0037147
tcttaaatcact

SEQ ID NO: 332742 - DNA, 12 bp, Artificial Sequence
  Oligonucleotide primer for the detection of SNP TSC0037147
tatttttttgta

SEQ ID NO: 332743 - DNA, 12 bp, Artificial Sequence
  Oligonucleotide primer for the detection of SNP TSC0037148
cataaaaaaaat

SEQ ID NO: 332744 - DNA, 12 bp, Artificial Sequence
  Oligonucleotide primer for the detection of SNP TSC0037148
agtttttagtgg

SEQ ID NO: 332745 - DNA, 12 bp, Artificial Sequence
  Oligonucleotide primer for the detection of SNP TSC0037149
caattaaacatt

SEQ ID NO: 332746 - DNA, 12 bp, Artificial Sequence
  Oligonucleotide primer for the detection of SNP TSC0037150
ttcaaccttaac

SEQ ID NO: 332747 - DNA, 12 bp, Artificial Sequence
  Oligonucleotide primer for the detection of SNP TSC0037151
taaaatcaatta

SEQ ID NO: 332748 - DNA, 12 bp, Artificial Sequence
  Oligonucleotide primer for the detection of SNP TSC0037151
tgagaaggttat

SEQ ID NO: 332749 - DNA, 12 bp, Artificial Sequence
  Oligonucleotide primer for the detection of SNP TSC0037151
taaaaaaattat

SEQ ID NO: 332750 - DNA, 12 bp, Artificial Sequence
  Oligonucleotide primer for the detection of SNP TSC0037152
ctaatattattc

SEQ ID NO: 332751 - DNA, 12 bp, Artificial Sequence
  Oligonucleotide primer for the detection of SNP TSC0037153
aattataatttt

SEQ ID NO: 332752 - DNA, 12 bp, Artificial Sequence
  Oligonucleotide primer for the detection of SNP TSC0037153
ttaattttgttg

SEQ ID NO: 332753 - DNA, 12 bp, Artificial Sequence
  Oligonucleotide primer for the detection of SNP TSC0037153
ttaattttatta

SEQ ID NO: 332754 - DNA, 12 bp, Artificial Sequence
  Oligonucleotide primer for the detection of SNP TSC0037153
agttataatttt

SEQ ID NO: 332755 - DNA, 12 bp, Artificial Sequence
  Oligonucleotide primer for the detection of SNP TSC0037157
cccttaaatatc

SEQ ID NO: 332756 - DNA, 12 bp, Artificial Sequence
  Oligonucleotide primer for the detection of SNP TSC0037157
tgatttatatag

SEQ ID NO: 332757 - DNA, 12 bp, Artificial Sequence
  Oligonucleotide primer for the detection of SNP TSC0037159
aaggtttgtatt

SEQ ID NO: 332758 - DNA, 12 bp, Artificial Sequence
  Oligonucleotide primer for the detection of SNP TSC0037159
taaaatctacat

SEQ ID NO: 332759 - DNA, 12 bp, Artificial Sequence
  Oligonucleotide primer for the detection of SNP TSC0037159
tattgataaaat

SEQ ID NO: 332760 - DNA, 12 bp, Artificial Sequence
  Oligonucleotide primer for the detection of SNP TSC0037160
ataatttaaaat

SEQ ID NO: 332761 - DNA, 12 bp, Artificial Sequence
  Oligonucleotide primer for the detection of SNP TSC0037160
tatataaaatag

SEQ ID NO: 332762 - DNA, 12 bp, Artificial Sequence
  Oligonucleotide primer for the detection of SNP TSC0037160
gtgatttaaaat

SEQ ID NO: 332763 - DNA, 12 bp, Artificial Sequence
  Oligonucleotide primer for the detection of SNP TSC0037166
acacttccaatc

SEQ ID NO: 332764 - DNA, 12 bp, Artificial Sequence
  Oligonucleotide primer for the detection of SNP TSC0037166
acacttccgatc

SEQ ID NO: 332765 - DNA, 12 bp, Artificial Sequence
  Oligonucleotide primer for the detection of SNP TSC0037166
gatttatagtag

SEQ ID NO: 332766 - DNA, 12 bp, Artificial Sequence
  Oligonucleotide primer for the detection of SNP TSC0037169
tattagttatat

SEQ ID NO: 332767 - DNA, 12 bp, Artificial Sequence
  Oligonucleotide primer for the detection of SNP TSC0037169
atatcaattata

SEQ ID NO: 332768 - DNA, 12 bp, Artificial Sequence
  Oligonucleotide primer for the detection of SNP TSC0037169
taagtgaagaaa

SEQ ID NO: 332769 - DNA, 12 bp, Artificial Sequence
  Oligonucleotide primer for the detection of SNP TSC0037170
aaaaaccattct

SEQ ID NO: 332770 - DNA, 12 bp, Artificial Sequence
  Oligonucleotide primer for the detection of SNP TSC0037170
aaataaagagaa

SEQ ID NO: 332771 - DNA, 12 bp, Artificial Sequence
  Oligonucleotide primer for the detection of SNP TSC0037171
aatttttacatt

SEQ ID NO: 332772 - DNA, 12 bp, Artificial Sequence
  Oligonucleotide primer for the detection of SNP TSC0037171
tccttttaatta

SEQ ID NO: 332773 - DNA, 12 bp, Artificial Sequence
  Oligonucleotide primer for the detection of SNP TSC0037172
ggagtgtggatg

SEQ ID NO: 332774 - DNA, 12 bp, Artificial Sequence
  Oligonucleotide primer for the detection of SNP TSC0037173
actaaaatattt

SEQ ID NO: 332775 - DNA, 12 bp, Artificial Sequence
  Oligonucleotide primer for the detection of SNP TSC0037173
gggagttggtgg

SEQ ID NO: 332776 - DNA, 12 bp, Artificial Sequence
  Oligonucleotide primer for the detection of SNP TSC0037175
caataactatac

SEQ ID NO: 332777 - DNA, 12 bp, Artificial Sequence
  Oligonucleotide primer for the detection of SNP TSC0037175
tagggtttggta

SEQ ID NO: 332778 - DNA, 12 bp, Artificial Sequence
  Oligonucleotide primer for the detection of SNP TSC0037176
gagtgagtgtat

SEQ ID NO: 332779 - DNA, 12 bp, Artificial Sequence
  Oligonucleotide primer for the detection of SNP TSC0037176
taaataaataca

SEQ ID NO: 332780 - DNA, 12 bp, Artificial Sequence
  Oligonucleotide primer for the detection of SNP TSC0037176
atggaaaggatt

SEQ ID NO: 332781 - DNA, 12 bp, Artificial Sequence
  Oligonucleotide primer for the detection of SNP TSC0037179
tttcctaacact

SEQ ID NO: 332782 - DNA, 12 bp, Artificial Sequence
  Oligonucleotide primer for the detection of SNP TSC0037179
ttggttgtgaaa

SEQ ID NO: 332783 - DNA, 12 bp, Artificial Sequence
  Oligonukleotid-Primer
tcggttgtgaaa

SEQ ID NO: 332784 - DNA, 12 bp, Artificial Sequence
  Oligonucleotide primer for the detection of SNP TSC0037180
aattacaccctc

SEQ ID NO: 332785 - DNA, 12 bp, Artificial Sequence
  Oligonucleotide primer for the detection of SNP TSC0037180
gatgggattagg

SEQ ID NO: 332786 - DNA, 12 bp, Artificial Sequence
  Oligonucleotide primer for the detection of SNP TSC0037180
gacgggattagg

SEQ ID NO: 332787 - DNA, 12 bp, Artificial Sequence
  Oligonukleotid-Primer
caaacaaccaac

SEQ ID NO: 332788 - DNA, 12 bp, Artificial Sequence
  Oligonucleotide primer for the detection of SNP TSC0037181
agaagagaggag

SEQ ID NO: 332789 - DNA, 12 bp, Artificial Sequence
  Oligonucleotide primer for the detection of SNP TSC0037182
tttttagttgag

SEQ ID NO: 332790 - DNA, 12 bp, Artificial Sequence
  Oligonucleotide primer for the detection of SNP TSC0037183
gaggttgagttt

SEQ ID NO: 332791 - DNA, 12 bp, Artificial Sequence
  Oligonukleotid-Primer
gaggttgagttc

SEQ ID NO: 332792 - DNA, 12 bp, Artificial Sequence
  Oligonucleotide primer for the detection of SNP TSC0037183
tgggtttaggga

SEQ ID NO: 332793 - DNA, 12 bp, Artificial Sequence
  Oligonucleotide primer for the detection of SNP TSC0037187
actcaatcttaa

SEQ ID NO: 332794 - DNA, 12 bp, Artificial Sequence
  Oligonucleotide primer for the detection of SNP TSC0037187
tgaatatttatt

SEQ ID NO: 332795 - DNA, 12 bp, Artificial Sequence
  Oligonucleotide primer for the detection of SNP TSC0037187
taaatatccatt

SEQ ID NO: 332796 - DNA, 12 bp, Artificial Sequence
  Oligonucleotide primer for the detection of SNP TSC0037187
taattttggttt

SEQ ID NO: 332797 - DNA, 12 bp, Artificial Sequence
  Oligonucleotide primer for the detection of SNP TSC0037189
atctaaaatatc

SEQ ID NO: 332798 - DNA, 12 bp, Artificial Sequence
  Oligonucleotide primer for the detection of SNP TSC0037189
atttagaaaata

SEQ ID NO: 332799 - DNA, 12 bp, Artificial Sequence
  Oligonucleotide primer for the detection of SNP TSC0037190
caaactaatcaa

SEQ ID NO: 332800 - DNA, 12 bp, Artificial Sequence
  Oligonucleotide primer for the detection of SNP TSC0037190
aatatttgttat

SEQ ID NO: 332801 - DNA, 12 bp, Artificial Sequence
  Oligonucleotide primer for the detection of SNP TSC0037190
aatattcgttat

SEQ ID NO: 332802 - DNA, 12 bp, Artificial Sequence
  Oligonucleotide primer for the detection of SNP TSC0037190
aacattcattat

SEQ ID NO: 332803 - DNA, 12 bp, Artificial Sequence
  Oligonucleotide primer for the detection of SNP TSC0037190
aacattcgttat

SEQ ID NO: 332804 - DNA, 12 bp, Artificial Sequence
  Oligonucleotide primer for the detection of SNP TSC0037190
tagattaattaa

SEQ ID NO: 332805 - DNA, 12 bp, Artificial Sequence
  Oligonucleotide primer for the detection of SNP TSC0037191
aattttccaaaa

SEQ ID NO: 332806 - DNA, 12 bp, Artificial Sequence
  Oligonucleotide primer for the detection of SNP TSC0037191
tattaaattttg

SEQ ID NO: 332807 - DNA, 12 bp, Artificial Sequence
  Oligonucleotide primer for the detection of SNP TSC0037191
ccaaattttaaa

SEQ ID NO: 332808 - DNA, 12 bp, Artificial Sequence
  Oligonucleotide primer for the detection of SNP TSC0037191
tagtagtttttt

SEQ ID NO: 332809 - DNA, 12 bp, Artificial Sequence
  Oligonucleotide primer for the detection of SNP TSC0037194
atctcccttttc

SEQ ID NO: 332810 - DNA, 12 bp, Artificial Sequence
  Oligonucleotide primer for the detection of SNP TSC0037194
gtttagtaattt

SEQ ID NO: 332811 - DNA, 12 bp, Artificial Sequence
  Oligonucleotide primer for the detection of SNP TSC0037194
taacaatccaaa

SEQ ID NO: 332812 - DNA, 12 bp, Artificial Sequence
  Oligonucleotide primer for the detection of SNP TSC0037196
aaggtatagtaa

SEQ ID NO: 332813 - DNA, 12 bp, Artificial Sequence
  Oligonucleotide primer for the detection of SNP TSC0037197
tagatttttgtt

SEQ ID NO: 332814 - DNA, 12 bp, Artificial Sequence
  Oligonucleotide primer for the detection of SNP TSC0037197
taaatttctact

SEQ ID NO: 332815 - DNA, 12 bp, Artificial Sequence
  Oligonucleotide primer for the detection of SNP TSC0037197
taagatgaagga

SEQ ID NO: 332816 - DNA, 12 bp, Artificial Sequence
  Oligonucleotide primer for the detection of SNP TSC0037198
cctctataacaa

SEQ ID NO: 332817 - DNA, 12 bp, Artificial Sequence
  Oligonucleotide primer for the detection of SNP TSC0037198
aatttccttaca

SEQ ID NO: 332818 - DNA, 12 bp, Artificial Sequence
  Oligonucleotide primer for the detection of SNP TSC0037198
ttttatggtagt

SEQ ID NO: 332819 - DNA, 12 bp, Artificial Sequence
  Oligonucleotide primer for the detection of SNP TSC0037199
actaccaaacaa

SEQ ID NO: 332820 - DNA, 12 bp, Artificial Sequence
  Oligonucleotide primer for the detection of SNP TSC0037199
aagtgggatttt

SEQ ID NO: 332821 - DNA, 12 bp, Artificial Sequence
  Oligonucleotide primer for the detection of SNP TSC0037199
aaataaaacctc

SEQ ID NO: 332822 - DNA, 12 bp, Artificial Sequence
  Oligonucleotide primer for the detection of SNP TSC0037199
gttgttaagtag

SEQ ID NO: 332823 - DNA, 12 bp, Artificial Sequence
  Oligonucleotide primer for the detection of SNP TSC0037201
ataacacaaata

SEQ ID NO: 332824 - DNA, 12 bp, Artificial Sequence
  Oligonucleotide primer for the detection of SNP TSC0037201
tgggtaaaaatt

SEQ ID NO: 332825 - DNA, 12 bp, Artificial Sequence
  Oligonucleotide primer for the detection of SNP TSC0037201
tggtataaatat

SEQ ID NO: 332826 - DNA, 12 bp, Artificial Sequence
  Oligonucleotide primer for the detection of SNP TSC0037201
tggtataaatac

SEQ ID NO: 332827 - DNA, 12 bp, Artificial Sequence
  Oligonucleotide primer for the detection of SNP TSC0037202
tataaaattaca

SEQ ID NO: 332828 - DNA, 12 bp, Artificial Sequence
  Oligonucleotide primer for the detection of SNP TSC0037202
tatggtaatgtt

SEQ ID NO: 332829 - DNA, 12 bp, Artificial Sequence
  Oligonucleotide primer for the detection of SNP TSC0037202
tataataatatt

SEQ ID NO: 332830 - DNA, 12 bp, Artificial Sequence
  Oligonucleotide primer for the detection of SNP TSC0037202
tatggaattata

SEQ ID NO: 332831 - DNA, 12 bp, Artificial Sequence
  Oligonucleotide primer for the detection of SNP TSC0037206
aatttatttaaa

SEQ ID NO: 332832 - DNA, 12 bp, Artificial Sequence
  Oligonucleotide primer for the detection of SNP TSC0037206
tacttttcttaa

SEQ ID NO: 332833 - DNA, 12 bp, Artificial Sequence
  Oligonucleotide primer for the detection of SNP TSC0037206
aatttatttggg

SEQ ID NO: 332834 - DNA, 12 bp, Artificial Sequence
  Oligonucleotide primer for the detection of SNP TSC0037209
tataacaacaaa

SEQ ID NO: 332835 - DNA, 12 bp, Artificial Sequence
  Oligonucleotide primer for the detection of SNP TSC0037209
agtagttgttta

SEQ ID NO: 332836 - DNA, 12 bp, Artificial Sequence
  Oligonucleotide primer for the detection of SNP TSC0037211
acaacatttttc

SEQ ID NO: 332837 - DNA, 12 bp, Artificial Sequence
  Oligonucleotide primer for the detection of SNP TSC0037211
acgacatttttc

SEQ ID NO: 332838 - DNA, 12 bp, Artificial Sequence
  Oligonucleotide primer for the detection of SNP TSC0037211
aatggttgtttt

SEQ ID NO: 332839 - DNA, 12 bp, Artificial Sequence
  Oligonucleotide primer for the detection of SNP TSC0037211
cgatattttttt

SEQ ID NO: 332840 - DNA, 12 bp, Artificial Sequence
  Oligonucleotide primer for the detection of SNP TSC0037212
attttattctat

SEQ ID NO: 332841 - DNA, 12 bp, Artificial Sequence
  Oligonucleotide primer for the detection of SNP TSC0037212
tattatgaaaaa

SEQ ID NO: 332842 - DNA, 12 bp, Artificial Sequence
  Oligonucleotide primer for the detection of SNP TSC0037213
ttagaagttttt

SEQ ID NO: 332843 - DNA, 12 bp, Artificial Sequence
  Oligonucleotide primer for the detection of SNP TSC0037214
atattaaatatt

SEQ ID NO: 332844 - DNA, 12 bp, Artificial Sequence
  Oligonucleotide primer for the detection of SNP TSC0037214
aaaaagtttttg

SEQ ID NO: 332845 - DNA, 12 bp, Artificial Sequence
  Oligonucleotide primer for the detection of SNP TSC0037216
tatcaatcccta

SEQ ID NO: 332846 - DNA, 12 bp, Artificial Sequence
  Oligonucleotide primer for the detection of SNP TSC0037216
tatcgatcccta

SEQ ID NO: 332847 - DNA, 12 bp, Artificial Sequence
  Oligonucleotide primer for the detection of SNP TSC0037216
taaggaagtata

SEQ ID NO: 332848 - DNA, 12 bp, Artificial Sequence
  Oligonucleotide primer for the detection of SNP TSC0037219
ctcttcttaact

SEQ ID NO: 332849 - DNA, 12 bp, Artificial Sequence
  Oligonucleotide primer for the detection of SNP TSC0037219
tatttattgata

SEQ ID NO: 332850 - DNA, 12 bp, Artificial Sequence
  Oligonucleotide primer for the detection of SNP TSC0037220
attaaccccatc

SEQ ID NO: 332851 - DNA, 12 bp, Artificial Sequence
  Oligonucleotide primer for the detection of SNP TSC0037220
attaaccccgtc

SEQ ID NO: 332852 - DNA, 12 bp, Artificial Sequence
  Oligonucleotide primer for the detection of SNP TSC0037221
agtaatttagag

SEQ ID NO: 332853 - DNA, 12 bp, Artificial Sequence
  Oligonucleotide primer for the detection of SNP TSC0037222
atttataattaa

SEQ ID NO: 332854 - DNA, 12 bp, Artificial Sequence
  Oligonucleotide primer for the detection of SNP TSC0037222
tttatttagggc

SEQ ID NO: 332855 - DNA, 12 bp, Artificial Sequence
  Oligonucleotide primer for the detection of SNP TSC0037222
ctcatttaaaac

SEQ ID NO: 332856 - DNA, 12 bp, Artificial Sequence
  Oligonucleotide primer for the detection of SNP TSC0037222
tttatggttggt

SEQ ID NO: 332857 - DNA, 12 bp, Artificial Sequence
  Oligonucleotide primer for the detection of SNP TSC0037224
tttcaataaaca

SEQ ID NO: 332858 - DNA, 12 bp, Artificial Sequence
  Oligonucleotide primer for the detection of SNP TSC0037224
tggtggtttgat

SEQ ID NO: 332859 - DNA, 12 bp, Artificial Sequence
  Oligonucleotide primer for the detection of SNP TSC0037224
taataacctaat

SEQ ID NO: 332860 - DNA, 12 bp, Artificial Sequence
  Oligonucleotide primer for the detection of SNP TSC0037225
caaatcccaaac

SEQ ID NO: 332861 - DNA, 12 bp, Artificial Sequence
  Oligonucleotide primer for the detection of SNP TSC0037225
gtttaaagaagt

SEQ ID NO: 332862 - DNA, 12 bp, Artificial Sequence
  Oligonucleotide primer for the detection of SNP TSC0037225
tttaaaaaaaca

SEQ ID NO: 332863 - DNA, 12 bp, Artificial Sequence
  Oligonucleotide primer for the detection of SNP TSC0037227
tggtggattatg

SEQ ID NO: 332864 - DNA, 12 bp, Artificial Sequence
  Oligonucleotide primer for the detection of SNP TSC0037230
atagttttgagg

SEQ ID NO: 332865 - DNA, 12 bp, Artificial Sequence
  Oligonucleotide primer for the detection of SNP TSC0037230
atagtttcgagg

SEQ ID NO: 332866 - DNA, 12 bp, Artificial Sequence
  Oligonucleotide primer for the detection of SNP TSC0037231
actaaccttact

SEQ ID NO: 332867 - DNA, 12 bp, Artificial Sequence
  Oligonucleotide primer for the detection of SNP TSC0037238
ttaatatacttc

SEQ ID NO: 332868 - DNA, 12 bp, Artificial Sequence
  Oligonucleotide primer for the detection of SNP TSC0037238
gaaaataaagtt

SEQ ID NO: 332869 - DNA, 12 bp, Artificial Sequence
  Oligonucleotide primer for the detection of SNP TSC0037238
ttgatgtgtttt

SEQ ID NO: 332870 - DNA, 12 bp, Artificial Sequence
  Oligonucleotide primer for the detection of SNP TSC0037242
ataaattatatt

SEQ ID NO: 332871 - DNA, 12 bp, Artificial Sequence
  Oligonucleotide primer for the detection of SNP TSC0037243
tcttcccctaat

SEQ ID NO: 332872 - DNA, 12 bp, Artificial Sequence
  Oligonucleotide primer for the detection of SNP TSC0037243
ataaaataggat

SEQ ID NO: 332873 - DNA, 12 bp, Artificial Sequence
  Oligonucleotide primer for the detection of SNP TSC0037244
atcaataaccta

SEQ ID NO: 332874 - DNA, 12 bp, Artificial Sequence
  Oligonucleotide primer for the detection of SNP TSC0037244
attagaaggatt

SEQ ID NO: 332875 - DNA, 12 bp, Artificial Sequence
  Oligonucleotide primer for the detection of SNP TSC0037244
aattagtagttt

SEQ ID NO: 332876 - DNA, 12 bp, Artificial Sequence
  Oligonucleotide primer for the detection of SNP TSC0037245
aatcccttaaca

SEQ ID NO: 332877 - DNA, 12 bp, Artificial Sequence
  Oligonucleotide primer for the detection of SNP TSC0037245
ttatttaggttt

SEQ ID NO: 332878 - DNA, 12 bp, Artificial Sequence
  Oligonucleotide primer for the detection of SNP TSC0037245
ctattcaaactc

SEQ ID NO: 332879 - DNA, 12 bp, Artificial Sequence
  Oligonucleotide primer for the detection of SNP TSC0037246
atacatataaat

SEQ ID NO: 332880 - DNA, 12 bp, Artificial Sequence
  Oligonucleotide primer for the detection of SNP TSC0037246
aatttttatgag

SEQ ID NO: 332881 - DNA, 12 bp, Artificial Sequence
  Oligonucleotide primer for the detection of SNP TSC0037246
aatctttataaa

SEQ ID NO: 332882 - DNA, 12 bp, Artificial Sequence
  Oligonucleotide primer for the detection of SNP TSC0037246
atatatatagat

SEQ ID NO: 332883 - DNA, 12 bp, Artificial Sequence
  Oligonucleotide primer for the detection of SNP TSC0037247
aattcactccta

SEQ ID NO: 332884 - DNA, 12 bp, Artificial Sequence
  Oligonucleotide primer for the detection of SNP TSC0037247
acctctaaaccc

SEQ ID NO: 332885 - DNA, 12 bp, Artificial Sequence
  Oligonucleotide primer for the detection of SNP TSC0037248
acgactcaaaac

SEQ ID NO: 332886 - DNA, 12 bp, Artificial Sequence
  Oligonucleotide primer for the detection of SNP TSC0037248
atttagttttga

SEQ ID NO: 332887 - DNA, 12 bp, Artificial Sequence
  Oligonucleotide primer for the detection of SNP TSC0037249
tatcaaacactc

SEQ ID NO: 332888 - DNA, 12 bp, Artificial Sequence
  Oligonucleotide primer for the detection of SNP TSC0037249
atttttaatagt

SEQ ID NO: 332889 - DNA, 12 bp, Artificial Sequence
  Oligonucleotide primer for the detection of SNP TSC0037249
cctaataataaa

SEQ ID NO: 332890 - DNA, 12 bp, Artificial Sequence
  Oligonucleotide primer for the detection of SNP TSC0037249
gttaggtatttt

SEQ ID NO: 332891 - DNA, 12 bp, Artificial Sequence
  Oligonucleotide primer for the detection of SNP TSC0037250
tattcaaataac

SEQ ID NO: 332892 - DNA, 12 bp, Artificial Sequence
  Oligonucleotide primer for the detection of SNP TSC0037250
gagaaagattag

SEQ ID NO: 332893 - DNA, 12 bp, Artificial Sequence
  Oligonucleotide primer for the detection of SNP TSC0037254
acataaacacat

SEQ ID NO: 332894 - DNA, 12 bp, Artificial Sequence
  Oligonucleotide primer for the detection of SNP TSC0037254
acgtaaacacat

SEQ ID NO: 332895 - DNA, 12 bp, Artificial Sequence
  Oligonucleotide primer for the detection of SNP TSC0037254
agtgttgggtat

SEQ ID NO: 332896 - DNA, 12 bp, Artificial Sequence
  Oligonucleotide primer for the detection of SNP TSC0037254
caatactaaata

SEQ ID NO: 332897 - DNA, 12 bp, Artificial Sequence
  Oligonucleotide primer for the detection of SNP TSC0037254
atgtggatatat

SEQ ID NO: 332898 - DNA, 12 bp, Artificial Sequence
  Oligonucleotide primer for the detection of SNP TSC0037254
acgtggatatat

SEQ ID NO: 332899 - DNA, 12 bp, Artificial Sequence
  Oligonucleotide primer for the detection of SNP TSC0037255
aacaacccaccc

SEQ ID NO: 332900 - DNA, 12 bp, Artificial Sequence
  Oligonucleotide primer for the detection of SNP TSC0037255
agttattttggg

SEQ ID NO: 332901 - DNA, 12 bp, Artificial Sequence
  Oligonucleotide primer for the detection of SNP TSC0037255
aaccatcctaaa

SEQ ID NO: 332902 - DNA, 12 bp, Artificial Sequence
  Oligonucleotide primer for the detection of SNP TSC0037255
aatagtttattt

SEQ ID NO: 332903 - DNA, 12 bp, Artificial Sequence
  Oligonucleotide primer for the detection of SNP TSC0037256
aaacaacccacc

SEQ ID NO: 332904 - DNA, 12 bp, Artificial Sequence
  Oligonucleotide primer for the detection of SNP TSC0037256
gttattttgggg

SEQ ID NO: 332905 - DNA, 12 bp, Artificial Sequence
  Oligonucleotide primer for the detection of SNP TSC0037256
accatcctaaaa

SEQ ID NO: 332906 - DNA, 12 bp, Artificial Sequence
  Oligonucleotide primer for the detection of SNP TSC0037256
aaatagtttatt

SEQ ID NO: 332907 - DNA, 12 bp, Artificial Sequence
  Oligonucleotide primer for the detection of SNP TSC0037257
ttcaaaataatc

SEQ ID NO: 332908 - DNA, 12 bp, Artificial Sequence
  Oligonucleotide primer for the detection of SNP TSC0037257
tgtgtttttaaa

SEQ ID NO: 332909 - DNA, 12 bp, Artificial Sequence
  Oligonucleotide primer for the detection of SNP TSC0037257
tttaaaatgatt

SEQ ID NO: 332910 - DNA, 12 bp, Artificial Sequence
  Oligonucleotide primer for the detection of SNP TSC0037259
actttataatct

SEQ ID NO: 332911 - DNA, 12 bp, Artificial Sequence
  Oligonucleotide primer for the detection of SNP TSC0037259
ttagatttggta

SEQ ID NO: 332912 - DNA, 12 bp, Artificial Sequence
  Oligonucleotide primer for the detection of SNP TSC0037260
ggagattatttt

SEQ ID NO: 332913 - DNA, 12 bp, Artificial Sequence
  Oligonucleotide primer for the detection of SNP TSC0037260
aaaaattactcc

SEQ ID NO: 332914 - DNA, 12 bp, Artificial Sequence
  Oligonucleotide primer for the detection of SNP TSC0037260
aatttttttagg

SEQ ID NO: 332915 - DNA, 12 bp, Artificial Sequence
  Oligonucleotide primer for the detection of SNP TSC0037263
aaaaatttcccc

SEQ ID NO: 332916 - DNA, 12 bp, Artificial Sequence
  Oligonukleotid-Primer
atatattttatg

SEQ ID NO: 332917 - DNA, 12 bp, Artificial Sequence
  Oligonucleotide primer for the detection of SNP TSC0037264
tttttggatgga

SEQ ID NO: 332918 - DNA, 12 bp, Artificial Sequence
  Oligonucleotide primer for the detection of SNP TSC0037268
caaaactaaatc

SEQ ID NO: 332919 - DNA, 12 bp, Artificial Sequence
  Oligonucleotide primer for the detection of SNP TSC0037269
ttcctttccaaa

SEQ ID NO: 332920 - DNA, 12 bp, Artificial Sequence
  Oligonucleotide primer for the detection of SNP TSC0037269
tccttcattcct

SEQ ID NO: 332921 - DNA, 12 bp, Artificial Sequence
  Oligonucleotide primer for the detection of SNP TSC0037270
acaaaactacca

SEQ ID NO: 332922 - DNA, 12 bp, Artificial Sequence
  Oligonucleotide primer for the detection of SNP TSC0037270
acaaaactaccg

SEQ ID NO: 332923 - DNA, 12 bp, Artificial Sequence
  Oligonucleotide primer for the detection of SNP TSC0037270
ttgttgaatttt

SEQ ID NO: 332924 - DNA, 12 bp, Artificial Sequence
  Oligonukleotid-Primer
cctattaaattc

SEQ ID NO: 332925 - DNA, 12 bp, Artificial Sequence
  Oligonucleotide primer for the detection of SNP TSC0037270
taaggttgttgt

SEQ ID NO: 332926 - DNA, 12 bp, Artificial Sequence
  Oligonucleotide primer for the detection of SNP TSC0037270
taaggttgtcgt

SEQ ID NO: 332927 - DNA, 12 bp, Artificial Sequence
  Oligonucleotide primer for the detection of SNP TSC0037271
ttatttcccaat

SEQ ID NO: 332928 - DNA, 12 bp, Artificial Sequence
  Oligonucleotide primer for the detection of SNP TSC0037271
agttaaagattt

SEQ ID NO: 332929 - DNA, 12 bp, Artificial Sequence
  Oligonucleotide primer for the detection of SNP TSC0037271
tgttttttagtt

SEQ ID NO: 332930 - DNA, 12 bp, Artificial Sequence
  Oligonucleotide primer for the detection of SNP TSC0037272
attttaaattat

SEQ ID NO: 332931 - DNA, 12 bp, Artificial Sequence
  Oligonucleotide primer for the detection of SNP TSC0037275
taataaattctc

SEQ ID NO: 332932 - DNA, 12 bp, Artificial Sequence
  Oligonucleotide primer for the detection of SNP TSC0037275
taaaaagtatta

SEQ ID NO: 332933 - DNA, 12 bp, Artificial Sequence
  Oligonucleotide primer for the detection of SNP TSC0037276
aaaactaactta

SEQ ID NO: 332934 - DNA, 12 bp, Artificial Sequence
  Oligonucleotide primer for the detection of SNP TSC0037276
aaaaagagtatt

SEQ ID NO: 332935 - DNA, 12 bp, Artificial Sequence
  Oligonucleotide primer for the detection of SNP TSC0037277
atcaaaatttat

SEQ ID NO: 332936 - DNA, 12 bp, Artificial Sequence
  Oligonucleotide primer for the detection of SNP TSC0037277
gatatattatag

SEQ ID NO: 332937 - DNA, 12 bp, Artificial Sequence
  Oligonucleotide primer for the detection of SNP TSC0037279
aatatttcaact

SEQ ID NO: 332938 - DNA, 12 bp, Artificial Sequence
  Oligonucleotide primer for the detection of SNP TSC0037279
tagtgagtagtt

SEQ ID NO: 332939 - DNA, 12 bp, Artificial Sequence
  Oligonucleotide primer for the detection of SNP TSC0037279
caataaataacc

SEQ ID NO: 332940 - DNA, 12 bp, Artificial Sequence
  Oligonucleotide primer for the detection of SNP TSC0037280
tttatttacctt

SEQ ID NO: 332941 - DNA, 12 bp, Artificial Sequence
  Oligonucleotide primer for the detection of SNP TSC0037280
atttgtttaagg

SEQ ID NO: 332942 - DNA, 12 bp, Artificial Sequence
  Oligonucleotide primer for the detection of SNP TSC0037281
ctcaaaatccct

SEQ ID NO: 332943 - DNA, 12 bp, Artificial Sequence
  Oligonucleotide primer for the detection of SNP TSC0037281
gtagggaagaga

SEQ ID NO: 332944 - DNA, 12 bp, Artificial Sequence
  Oligonucleotide primer for the detection of SNP TSC0037284
aaaatcttaccc

SEQ ID NO: 332945 - DNA, 12 bp, Artificial Sequence
  Oligonucleotide primer for the detection of SNP TSC0037284
gttttgtaaatt

SEQ ID NO: 332946 - DNA, 12 bp, Artificial Sequence
  Oligonucleotide primer for the detection of SNP TSC0037284
actttataaact

SEQ ID NO: 332947 - DNA, 12 bp, Artificial Sequence
  Oligonucleotide primer for the detection of SNP TSC0037284
aaagttttgttt

SEQ ID NO: 332948 - DNA, 12 bp, Artificial Sequence
  Oligonucleotide primer for the detection of SNP TSC0037285
actttttcactt

SEQ ID NO: 332949 - DNA, 12 bp, Artificial Sequence
  Oligonucleotide primer for the detection of SNP TSC0037285
ggaagaataaga

SEQ ID NO: 332950 - DNA, 12 bp, Artificial Sequence
  Oligonucleotide primer for the detection of SNP TSC0037287
cctatacattca

SEQ ID NO: 332951 - DNA, 12 bp, Artificial Sequence
  Oligonucleotide primer for the detection of SNP TSC0037287
actttcctatca

SEQ ID NO: 332952 - DNA, 12 bp, Artificial Sequence
  Oligonucleotide primer for the detection of SNP TSC0037287
tttatgtattta

SEQ ID NO: 332953 - DNA, 12 bp, Artificial Sequence
  Oligonucleotide primer for the detection of SNP TSC0037288
ttaataaaacat

SEQ ID NO: 332954 - DNA, 12 bp, Artificial Sequence
  Oligonucleotide primer for the detection of SNP TSC0037290
atatttttaaat

SEQ ID NO: 332955 - DNA, 12 bp, Artificial Sequence
  Oligonucleotide primer for the detection of SNP TSC0037290
tatattctcaaa

SEQ ID NO: 332956 - DNA, 12 bp, Artificial Sequence
  Oligonucleotide primer for the detection of SNP TSC0037290
ttgtggaaataa

SEQ ID NO: 332957 - DNA, 12 bp, Artificial Sequence
  Oligonucleotide primer for the detection of SNP TSC0037291
aattaaatgtat

SEQ ID NO: 332958 - DNA, 12 bp, Artificial Sequence
  Oligonucleotide primer for the detection of SNP TSC0037291
aaattaaatata

SEQ ID NO: 332959 - DNA, 12 bp, Artificial Sequence
  Oligonucleotide primer for the detection of SNP TSC0037291
agattagaaaag

SEQ ID NO: 332960 - DNA, 12 bp, Artificial Sequence
  Oligonucleotide primer for the detection of SNP TSC0037294
tgatgagttttt

SEQ ID NO: 332961 - DNA, 12 bp, Artificial Sequence
  Oligonucleotide primer for the detection of SNP TSC0037295
ccctctatatct

SEQ ID NO: 332962 - DNA, 12 bp, Artificial Sequence
  Oligonucleotide primer for the detection of SNP TSC0037295
tagaaagtataa

SEQ ID NO: 332963 - DNA, 12 bp, Artificial Sequence
  Oligonucleotide primer for the detection of SNP TSC0037298
atttcaaaaccc

SEQ ID NO: 332964 - DNA, 12 bp, Artificial Sequence
  Oligonucleotide primer for the detection of SNP TSC0037298
aataatgattta

SEQ ID NO: 332965 - DNA, 12 bp, Artificial Sequence
  Oligonucleotide primer for the detection of SNP TSC0037298
aacaataattca

SEQ ID NO: 332966 - DNA, 12 bp, Artificial Sequence
  Oligonucleotide primer for the detection of SNP TSC0037298
gttttaaagttt

SEQ ID NO: 332967 - DNA, 12 bp, Artificial Sequence
  Oligonucleotide primer for the detection of SNP TSC0037300
tggtataattat

SEQ ID NO: 332968 - DNA, 12 bp, Artificial Sequence
  Oligonucleotide primer for the detection of SNP TSC0037300
aacacaatcata

SEQ ID NO: 332969 - DNA, 12 bp, Artificial Sequence
  Oligonucleotide primer for the detection of SNP TSC0037302
tccaaatcacac

SEQ ID NO: 332970 - DNA, 12 bp, Artificial Sequence
  Oligonucleotide primer for the detection of SNP TSC0037302
tccaaatcacgc

SEQ ID NO: 332971 - DNA, 12 bp, Artificial Sequence
  Oligonucleotide primer for the detection of SNP TSC0037302
tgatttttgttt

SEQ ID NO: 332972 - DNA, 12 bp, Artificial Sequence
  Oligonucleotide primer for the detection of SNP TSC0037303
aaaatcttaaca

SEQ ID NO: 332973 - DNA, 12 bp, Artificial Sequence
  Oligonucleotide primer for the detection of SNP TSC0037303
taagttttagtt

SEQ ID NO: 332974 - DNA, 12 bp, Artificial Sequence
  Oligonucleotide primer for the detection of SNP TSC0037303
aataaacttcaa

SEQ ID NO: 332975 - DNA, 12 bp, Artificial Sequence
  Oligonucleotide primer for the detection of SNP TSC0037308
taattccactat

SEQ ID NO: 332976 - DNA, 12 bp, Artificial Sequence
  Oligonucleotide primer for the detection of SNP TSC0037308
tgtattttgttg

SEQ ID NO: 332977 - DNA, 12 bp, Artificial Sequence
  Oligonucleotide primer for the detection of SNP TSC0037308
tacatcttacta

SEQ ID NO: 332978 - DNA, 12 bp, Artificial Sequence
  Oligonucleotide primer for the detection of SNP TSC0037309
cctacaaccttc

SEQ ID NO: 332979 - DNA, 12 bp, Artificial Sequence
  Oligonucleotide primer for the detection of SNP TSC0037309
cctacgaccttc

SEQ ID NO: 332980 - DNA, 12 bp, Artificial Sequence
  Oligonucleotide primer for the detection of SNP TSC0037309
tataaatattgt

SEQ ID NO: 332981 - DNA, 12 bp, Artificial Sequence
  Oligonucleotide primer for the detection of SNP TSC0037309
tataaatattgc

SEQ ID NO: 332982 - DNA, 12 bp, Artificial Sequence
  Oligonucleotide primer for the detection of SNP TSC0037309
acacaaacacta

SEQ ID NO: 332983 - DNA, 12 bp, Artificial Sequence
  Oligonucleotide primer for the detection of SNP TSC0037310
aaatataacttt

SEQ ID NO: 332984 - DNA, 12 bp, Artificial Sequence
  Oligonucleotide primer for the detection of SNP TSC0037310
attagaaataga

SEQ ID NO: 332985 - DNA, 12 bp, Artificial Sequence
  Oligonucleotide primer for the detection of SNP TSC0037311
ataatctcaatt

SEQ ID NO: 332986 - DNA, 12 bp, Artificial Sequence
  Oligonucleotide primer for the detection of SNP TSC0037311
gtagtaagggta

SEQ ID NO: 332987 - DNA, 12 bp, Artificial Sequence
  Oligonucleotide primer for the detection of SNP TSC0037311
acaacaaaaata

SEQ ID NO: 332988 - DNA, 12 bp, Artificial Sequence
  Oligonucleotide primer for the detection of SNP TSC0037311
atgattttaatt

SEQ ID NO: 332989 - DNA, 12 bp, Artificial Sequence
  Oligonucleotide primer for the detection of SNP TSC0037312
aatttctacaca

SEQ ID NO: 332990 - DNA, 12 bp, Artificial Sequence
  Oligonucleotide primer for the detection of SNP TSC0037312
aaggggaaatat

SEQ ID NO: 332991 - DNA, 12 bp, Artificial Sequence
  Oligonucleotide primer for the detection of SNP TSC0037312
aaggggaaatac

SEQ ID NO: 332992 - DNA, 12 bp, Artificial Sequence
  Oligonucleotide primer for the detection of SNP TSC0037314
ttacacacaaat

SEQ ID NO: 332993 - DNA, 12 bp, Artificial Sequence
  Oligonucleotide primer for the detection of SNP TSC0037314
ttacacacgaat

SEQ ID NO: 332994 - DNA, 12 bp, Artificial Sequence
  Oligonucleotide primer for the detection of SNP TSC0037314
agtatttttgta

SEQ ID NO: 332995 - DNA, 12 bp, Artificial Sequence
  Oligonucleotide primer for the detection of SNP TSC0037314
aatatccttaca

SEQ ID NO: 332996 - DNA, 12 bp, Artificial Sequence
  Oligonucleotide primer for the detection of SNP TSC0037314
ttgtatatgggt

SEQ ID NO: 332997 - DNA, 12 bp, Artificial Sequence
  Oligonucleotide primer for the detection of SNP TSC0037314
ttgtatacgggt

SEQ ID NO: 332998 - DNA, 12 bp, Artificial Sequence
  Oligonucleotide primer for the detection of SNP TSC0037315
ctttattatcca

SEQ ID NO: 332999 - DNA, 12 bp, Artificial Sequence
  Oligonucleotide primer for the detection of SNP TSC0037315
gagtttgagatt

SEQ ID NO: 333000 - DNA, 12 bp, Artificial Sequence
  Oligonucleotide primer for the detection of SNP TSC0037315
aaatttaaaacc

SEQ ID NO: 333001 - DNA, 12 bp, Artificial Sequence
  Oligonucleotide primer for the detection of SNP TSC0037316
ctaaaataaaat

SEQ ID NO: 333002 - DNA, 12 bp, Artificial Sequence
  Oligonucleotide primer for the detection of SNP TSC0037316
gaattatattta

SEQ ID NO: 333003 - DNA, 12 bp, Artificial Sequence
  Oligonucleotide primer for the detection of SNP TSC0037316
aaaccatattca

SEQ ID NO: 333004 - DNA, 12 bp, Artificial Sequence
  Oligonucleotide primer for the detection of SNP TSC0037316
ttggagtggagt

SEQ ID NO: 333005 - DNA, 12 bp, Artificial Sequence
  Oligonucleotide primer for the detection of SNP TSC0037317
aggattataggt

SEQ ID NO: 333006 - DNA, 12 bp, Artificial Sequence
  Oligonucleotide primer for the detection of SNP TSC0037318
taaacacattac

SEQ ID NO: 333007 - DNA, 12 bp, Artificial Sequence
  Oligonucleotide primer for the detection of SNP TSC0037318
aatttatttgta

SEQ ID NO: 333008 - DNA, 12 bp, Artificial Sequence
  Oligonucleotide primer for the detection of SNP TSC0037318
aatttacctata

SEQ ID NO: 333009 - DNA, 12 bp, Artificial Sequence
  Oligonucleotide primer for the detection of SNP TSC0037318
taaatatattgt

SEQ ID NO: 333010 - DNA, 12 bp, Artificial Sequence
  Oligonucleotide primer for the detection of SNP TSC0037319
cccaacctaaaa

SEQ ID NO: 333011 - DNA, 12 bp, Artificial Sequence
  Oligonucleotide primer for the detection of SNP TSC0037319
cccgacctaaaa

SEQ ID NO: 333012 - DNA, 12 bp, Artificial Sequence
  Oligonucleotide primer for the detection of SNP TSC0037319
tgttaaaaagta

SEQ ID NO: 333013 - DNA, 12 bp, Artificial Sequence
  Oligonucleotide primer for the detection of SNP TSC0037319
tttggtttagaa

SEQ ID NO: 333014 - DNA, 12 bp, Artificial Sequence
  Oligonucleotide primer for the detection of SNP TSC0037319
ttcggtttagaa

SEQ ID NO: 333015 - DNA, 12 bp, Artificial Sequence
  Oligonucleotide primer for the detection of SNP TSC0037320
ctcaaacgaaaa

SEQ ID NO: 333016 - DNA, 12 bp, Artificial Sequence
  Oligonucleotide primer for the detection of SNP TSC0037320
ctcgaacaaaaa

SEQ ID NO: 333017 - DNA, 12 bp, Artificial Sequence
  Oligonucleotide primer for the detection of SNP TSC0037320
ctcgaacgaaaa

SEQ ID NO: 333018 - DNA, 12 bp, Artificial Sequence
  Oligonucleotide primer for the detection of SNP TSC0037320
tagtgttattgt

SEQ ID NO: 333019 - DNA, 12 bp, Artificial Sequence
  Oligonucleotide primer for the detection of SNP TSC0037320
tagcgttattgt

SEQ ID NO: 333020 - DNA, 12 bp, Artificial Sequence
  Oligonucleotide primer for the detection of SNP TSC0037320
taacaccactac

SEQ ID NO: 333021 - DNA, 12 bp, Artificial Sequence
  Oligonucleotide primer for the detection of SNP TSC0037320
taacgccactac

SEQ ID NO: 333022 - DNA, 12 bp, Artificial Sequence
  Oligonucleotide primer for the detection of SNP TSC0037320
tttgggtgagag

SEQ ID NO: 333023 - DNA, 12 bp, Artificial Sequence
  Oligonucleotide primer for the detection of SNP TSC0037320
ttcgggtgagag

SEQ ID NO: 333024 - DNA, 12 bp, Artificial Sequence
  Oligonucleotide primer for the detection of SNP TSC0037320
tttgggcgagag

SEQ ID NO: 333025 - DNA, 12 bp, Artificial Sequence
  Oligonukleotid-Primer
ttcgggcgagag

SEQ ID NO: 333026 - DNA, 12 bp, Artificial Sequence
  Oligonucleotide primer for the detection of SNP TSC0037321
ataaaacgacca

SEQ ID NO: 333027 - DNA, 12 bp, Artificial Sequence
  Oligonucleotide primer for the detection of SNP TSC0037321
tttttattagtt

SEQ ID NO: 333028 - DNA, 12 bp, Artificial Sequence
  Oligonucleotide primer for the detection of SNP TSC0037321
tctttactaacc

SEQ ID NO: 333029 - DNA, 12 bp, Artificial Sequence
  Oligonucleotide primer for the detection of SNP TSC0037321
agtgaaatgatt

SEQ ID NO: 333030 - DNA, 12 bp, Artificial Sequence
  Oligonucleotide primer for the detection of SNP TSC0037321
agtgaaacgatt

SEQ ID NO: 333031 - DNA, 12 bp, Artificial Sequence
  Oligonucleotide primer for the detection of SNP TSC0037322
tctttctttaat

SEQ ID NO: 333032 - DNA, 12 bp, Artificial Sequence
  Oligonucleotide primer for the detection of SNP TSC0037322
gtgaaaatattg

SEQ ID NO: 333033 - DNA, 12 bp, Artificial Sequence
  Oligonucleotide primer for the detection of SNP TSC0037323
tcaaaacaaaac

SEQ ID NO: 333034 - DNA, 12 bp, Artificial Sequence
  Oligonucleotide primer for the detection of SNP TSC0037323
gatataaaagaa

SEQ ID NO: 333035 - DNA, 12 bp, Artificial Sequence
  Oligonucleotide primer for the detection of SNP TSC0037324
tacacaaaccgc

SEQ ID NO: 333036 - DNA, 12 bp, Artificial Sequence
  Oligonucleotide primer for the detection of SNP TSC0037324
tacacgaaccac

SEQ ID NO: 333037 - DNA, 12 bp, Artificial Sequence
  Oligonucleotide primer for the detection of SNP TSC0037324
tacacgaaccgc

SEQ ID NO: 333038 - DNA, 12 bp, Artificial Sequence
  Oligonucleotide primer for the detection of SNP TSC0037324
ttaaggtttttg

SEQ ID NO: 333039 - DNA, 12 bp, Artificial Sequence
  Oligonucleotide primer for the detection of SNP TSC0037324
ttaaggttttcg

SEQ ID NO: 333040 - DNA, 12 bp, Artificial Sequence
  Oligonucleotide primer for the detection of SNP TSC0037326
aaaataaccaac

SEQ ID NO: 333041 - DNA, 12 bp, Artificial Sequence
  Oligonucleotide primer for the detection of SNP TSC0037326
gaatatagtttg

SEQ ID NO: 333042 - DNA, 12 bp, Artificial Sequence
  Oligonucleotide primer for the detection of SNP TSC0037326
acacaatttaaa

SEQ ID NO: 333043 - DNA, 12 bp, Artificial Sequence
  Oligonucleotide primer for the detection of SNP TSC0037326
aggtgattaatt

SEQ ID NO: 333044 - DNA, 12 bp, Artificial Sequence
  Oligonucleotide primer for the detection of SNP TSC0037328
aatcataaatat

SEQ ID NO: 333045 - DNA, 12 bp, Artificial Sequence
  Oligonucleotide primer for the detection of SNP TSC0037328
tgatattattag

SEQ ID NO: 333046 - DNA, 12 bp, Artificial Sequence
  Oligonucleotide primer for the detection of SNP TSC0037328
taacaccatcaa

SEQ ID NO: 333047 - DNA, 12 bp, Artificial Sequence
  Oligonucleotide primer for the detection of SNP TSC0037329
tcaatcccattc

SEQ ID NO: 333048 - DNA, 12 bp, Artificial Sequence
  Oligonucleotide primer for the detection of SNP TSC0037329
tcaatcccgttc

SEQ ID NO: 333049 - DNA, 12 bp, Artificial Sequence
  Oligonucleotide primer for the detection of SNP TSC0037329
tgtagtggggaa

SEQ ID NO: 333050 - DNA, 12 bp, Artificial Sequence
  Oligonucleotide primer for the detection of SNP TSC0037329
tgtagcggggaa

SEQ ID NO: 333051 - DNA, 12 bp, Artificial Sequence
  Oligonucleotide primer for the detection of SNP TSC0037331
tgtgattttttt

SEQ ID NO: 333052 - DNA, 12 bp, Artificial Sequence
  Oligonucleotide primer for the detection of SNP TSC0037331
tgcgattttttt

SEQ ID NO: 333053 - DNA, 12 bp, Artificial Sequence
  Oligonucleotide primer for the detection of SNP TSC0037331
tgtgattttttc

SEQ ID NO: 333054 - DNA, 12 bp, Artificial Sequence
  Oligonucleotide primer for the detection of SNP TSC0037331
tgcgattttttc

SEQ ID NO: 333055 - DNA, 12 bp, Artificial Sequence
  Oligonucleotide primer for the detection of SNP TSC0037331
atacaacctttt

SEQ ID NO: 333056 - DNA, 12 bp, Artificial Sequence
  Oligonucleotide primer for the detection of SNP TSC0037331
atacgacctttt

SEQ ID NO: 333057 - DNA, 12 bp, Artificial Sequence
  Oligonucleotide primer for the detection of SNP TSC0037331
tggaaagtaaaa

SEQ ID NO: 333058 - DNA, 12 bp, Artificial Sequence
  Oligonucleotide primer for the detection of SNP TSC0037332
tcaatcttttct

SEQ ID NO: 333059 - DNA, 12 bp, Artificial Sequence
  Oligonucleotide primer for the detection of SNP TSC0037333
tatataactatt

SEQ ID NO: 333060 - DNA, 12 bp, Artificial Sequence
  Oligonucleotide primer for the detection of SNP TSC0037333
ggaggaggtaga

SEQ ID NO: 333061 - DNA, 12 bp, Artificial Sequence
  Oligonucleotide primer for the detection of SNP TSC0037333
tgtgtagttgtt

SEQ ID NO: 333062 - DNA, 12 bp, Artificial Sequence
  Oligonucleotide primer for the detection of SNP TSC0037334
ctaaacacacta

SEQ ID NO: 333063 - DNA, 12 bp, Artificial Sequence
  Oligonucleotide primer for the detection of SNP TSC0037334
tataatagttat

SEQ ID NO: 333064 - DNA, 12 bp, Artificial Sequence
  Oligonucleotide primer for the detection of SNP TSC0037334
cataacaactac

SEQ ID NO: 333065 - DNA, 12 bp, Artificial Sequence
  Oligonucleotide primer for the detection of SNP TSC0037334
ttggatatattg

SEQ ID NO: 333066 - DNA, 12 bp, Artificial Sequence
  Oligonucleotide primer for the detection of SNP TSC0037335
ctcaatacatca

SEQ ID NO: 333067 - DNA, 12 bp, Artificial Sequence
  Oligonucleotide primer for the detection of SNP TSC0037335
ttctacaaacaa

SEQ ID NO: 333068 - DNA, 12 bp, Artificial Sequence
  Oligonucleotide primer for the detection of SNP TSC0037335
tttagtgtatta

SEQ ID NO: 333069 - DNA, 12 bp, Artificial Sequence
  Oligonucleotide primer for the detection of SNP TSC0037336
ctaaacctctat

SEQ ID NO: 333070 - DNA, 12 bp, Artificial Sequence
  Oligonucleotide primer for the detection of SNP TSC0037336
gtttttaattgg

SEQ ID NO: 333071 - DNA, 12 bp, Artificial Sequence
  Oligonucleotide primer for the detection of SNP TSC0037340
accaacaactac

SEQ ID NO: 333072 - DNA, 12 bp, Artificial Sequence
  Oligonucleotide primer for the detection of SNP TSC0037340
accaacgactac

SEQ ID NO: 333073 - DNA, 12 bp, Artificial Sequence
  Oligonucleotide primer for the detection of SNP TSC0037340
accgacaactac

SEQ ID NO: 333074 - DNA, 12 bp, Artificial Sequence
  Oligonucleotide primer for the detection of SNP TSC0037340
accgacgactac

SEQ ID NO: 333075 - DNA, 12 bp, Artificial Sequence
  Oligonucleotide primer for the detection of SNP TSC0037341
cttactaaacca

SEQ ID NO: 333076 - DNA, 12 bp, Artificial Sequence
  Oligonucleotide primer for the detection of SNP TSC0037341
cttactaaaccg

SEQ ID NO: 333077 - DNA, 12 bp, Artificial Sequence
  Oligonucleotide primer for the detection of SNP TSC0037341
tggttaatattt

SEQ ID NO: 333078 - DNA, 12 bp, Artificial Sequence
  Oligonucleotide primer for the detection of SNP TSC0037341
ttaaccaatact

SEQ ID NO: 333079 - DNA, 12 bp, Artificial Sequence
  Oligonucleotide primer for the detection of SNP TSC0037341
atttattgaatc

SEQ ID NO: 333080 - DNA, 12 bp, Artificial Sequence
  Oligonucleotide primer for the detection of SNP TSC0037342
ccacttactaaa

SEQ ID NO: 333081 - DNA, 12 bp, Artificial Sequence
  Oligonucleotide primer for the detection of SNP TSC0037342
taaccaatactc

SEQ ID NO: 333082 - DNA, 12 bp, Artificial Sequence
  Oligonucleotide primer for the detection of SNP TSC0037342
ttatttattgaa

SEQ ID NO: 333083 - DNA, 12 bp, Artificial Sequence
  Oligonucleotide primer for the detection of SNP TSC0037343
atttctatttat

SEQ ID NO: 333084 - DNA, 12 bp, Artificial Sequence
  Oligonucleotide primer for the detection of SNP TSC0037343
tgaatgttaagt

SEQ ID NO: 333085 - DNA, 12 bp, Artificial Sequence
  Oligonucleotide primer for the detection of SNP TSC0037343
taaatatcaaat

SEQ ID NO: 333086 - DNA, 12 bp, Artificial Sequence
  Oligonucleotide primer for the detection of SNP TSC0037345
ctatactatatt

SEQ ID NO: 333087 - DNA, 12 bp, Artificial Sequence
  Oligonucleotide primer for the detection of SNP TSC0037345
tataaggtgttt

SEQ ID NO: 333088 - DNA, 12 bp, Artificial Sequence
  Oligonucleotide primer for the detection of SNP TSC0037345
tataaaatattt

SEQ ID NO: 333089 - DNA, 12 bp, Artificial Sequence
  Oligonucleotide primer for the detection of SNP TSC0037345
ttgtgttgtatt

SEQ ID NO: 333090 - DNA, 12 bp, Artificial Sequence
  Oligonucleotide primer for the detection of SNP TSC0037346
catattaaatat

SEQ ID NO: 333091 - DNA, 12 bp, Artificial Sequence
  Oligonucleotide primer for the detection of SNP TSC0037346
ggtaagagttgg

SEQ ID NO: 333092 - DNA, 12 bp, Artificial Sequence
  Oligonucleotide primer for the detection of SNP TSC0037347
ctttttttttat

SEQ ID NO: 333093 - DNA, 12 bp, Artificial Sequence
  Oligonucleotide primer for the detection of SNP TSC0037347
taaataaataag

SEQ ID NO: 333094 - DNA, 12 bp, Artificial Sequence
  Oligonucleotide primer for the detection of SNP TSC0037350
aaaaaaacgtta

SEQ ID NO: 333095 - DNA, 12 bp, Artificial Sequence
  Oligonucleotide primer for the detection of SNP TSC0037350
ttgtttggaaat

SEQ ID NO: 333096 - DNA, 12 bp, Artificial Sequence
  Oligonucleotide primer for the detection of SNP TSC0037350
attacctaaaaa

SEQ ID NO: 333097 - DNA, 12 bp, Artificial Sequence
  Oligonucleotide primer for the detection of SNP TSC0037350
gaggaagatgtt

SEQ ID NO: 333098 - DNA, 12 bp, Artificial Sequence
  Oligonucleotide primer for the detection of SNP TSC0037350
gaggaagacgtt

SEQ ID NO: 333099 - DNA, 12 bp, Artificial Sequence
  Oligonucleotide primer for the detection of SNP TSC0037351
attgtttttatg

SEQ ID NO: 333100 - DNA, 12 bp, Artificial Sequence
  Oligonucleotide primer for the detection of SNP TSC0037352
taactattacat

SEQ ID NO: 333101 - DNA, 12 bp, Artificial Sequence
  Oligonucleotide primer for the detection of SNP TSC0037352
atattttatttg

SEQ ID NO: 333102 - DNA, 12 bp, Artificial Sequence
  Oligonucleotide primer for the detection of SNP TSC0037352
acattttatcta

SEQ ID NO: 333103 - DNA, 12 bp, Artificial Sequence
  Oligonucleotide primer for the detection of SNP TSC0037352
tggttgttatat

SEQ ID NO: 333104 - DNA, 12 bp, Artificial Sequence
  Oligonucleotide primer for the detection of SNP TSC0037353
cctctaccaacc

SEQ ID NO: 333105 - DNA, 12 bp, Artificial Sequence
  Oligonucleotide primer for the detection of SNP TSC0037353
aagtattttaat

SEQ ID NO: 333106 - DNA, 12 bp, Artificial Sequence
  Oligonucleotide primer for the detection of SNP TSC0037353
aaaacatcttaa

SEQ ID NO: 333107 - DNA, 12 bp, Artificial Sequence
  Oligonucleotide primer for the detection of SNP TSC0037353
ttgttaattttt

SEQ ID NO: 333108 - DNA, 12 bp, Artificial Sequence
  Oligonucleotide primer for the detection of SNP TSC0037354
ataatataaaac

SEQ ID NO: 333109 - DNA, 12 bp, Artificial Sequence
  Oligonucleotide primer for the detection of SNP TSC0037354
atataagatttt

SEQ ID NO: 333110 - DNA, 12 bp, Artificial Sequence
  Oligonucleotide primer for the detection of SNP TSC0037356
gaatgaatatat

SEQ ID NO: 333111 - DNA, 12 bp, Artificial Sequence
  Oligonucleotide primer for the detection of SNP TSC0037356
aaataaacatac

SEQ ID NO: 333112 - DNA, 12 bp, Artificial Sequence
  Oligonucleotide primer for the detection of SNP TSC0037356
ggttttaaagta

SEQ ID NO: 333113 - DNA, 12 bp, Artificial Sequence
  Oligonucleotide primer for the detection of SNP TSC0037358
ataggtatgagt

SEQ ID NO: 333114 - DNA, 12 bp, Artificial Sequence
  Oligonucleotide primer for the detection of SNP TSC0037358
ataggtatgagc

SEQ ID NO: 333115 - DNA, 12 bp, Artificial Sequence
  Oligonucleotide primer for the detection of SNP TSC0037359
tccccctcaaaa

SEQ ID NO: 333116 - DNA, 12 bp, Artificial Sequence
  Oligonucleotide primer for the detection of SNP TSC0037359
ttgtatttattt

SEQ ID NO: 333117 - DNA, 12 bp, Artificial Sequence
  Oligonucleotide primer for the detection of SNP TSC0037359
ctacatccactt

SEQ ID NO: 333118 - DNA, 12 bp, Artificial Sequence
  Oligonucleotide primer for the detection of SNP TSC0037363
ttggggatatag

SEQ ID NO: 333119 - DNA, 12 bp, Artificial Sequence
  Oligonucleotide primer for the detection of SNP TSC0037363
ataaaatagtgt

SEQ ID NO: 333120 - DNA, 12 bp, Artificial Sequence
  Oligonucleotide primer for the detection of SNP TSC0037364
aaataactaccc

SEQ ID NO: 333121 - DNA, 12 bp, Artificial Sequence
  Oligonucleotide primer for the detection of SNP TSC0037364
gaatgagtagta

SEQ ID NO: 333122 - DNA, 12 bp, Artificial Sequence
  Oligonucleotide primer for the detection of SNP TSC0037368
ctaacactaaac

SEQ ID NO: 333123 - DNA, 12 bp, Artificial Sequence
  Oligonucleotide primer for the detection of SNP TSC0037369
acccttaaactt

SEQ ID NO: 333124 - DNA, 12 bp, Artificial Sequence
  Oligonucleotide primer for the detection of SNP TSC0037369
atggtatatata

SEQ ID NO: 333125 - DNA, 12 bp, Artificial Sequence
  Oligonucleotide primer for the detection of SNP TSC0037370
aacttactcccc

SEQ ID NO: 333126 - DNA, 12 bp, Artificial Sequence
  Oligonucleotide primer for the detection of SNP TSC0037370
taaattggtaag

SEQ ID NO: 333127 - DNA, 12 bp, Artificial Sequence
  Oligonucleotide primer for the detection of SNP TSC0037370
caaactaacaaa

SEQ ID NO: 333128 - DNA, 12 bp, Artificial Sequence
  Oligonucleotide primer for the detection of SNP TSC0037370
ggtttgtttttc

SEQ ID NO: 333129 - DNA, 12 bp, Artificial Sequence
  Oligonucleotide primer for the detection of SNP TSC0037372
atcgcccaaact

SEQ ID NO: 333130 - DNA, 12 bp, Artificial Sequence
  Oligonucleotide primer for the detection of SNP TSC0037372
attatattattg

SEQ ID NO: 333131 - DNA, 12 bp, Artificial Sequence
  Oligonucleotide primer for the detection of SNP TSC0037373
gtattgggtgtt

SEQ ID NO: 333132 - DNA, 12 bp, Artificial Sequence
  Oligonucleotide primer for the detection of SNP TSC0037373
cattaaatatta

SEQ ID NO: 333133 - DNA, 12 bp, Artificial Sequence
  Oligonucleotide primer for the detection of SNP TSC0037373
gaatattaggga

SEQ ID NO: 333134 - DNA, 12 bp, Artificial Sequence
  Oligonucleotide primer for the detection of SNP TSC0037376
aaaaaaatcatc

SEQ ID NO: 333135 - DNA, 12 bp, Artificial Sequence
  Oligonucleotide primer for the detection of SNP TSC0037377
tcctatattcct

SEQ ID NO: 333136 - DNA, 12 bp, Artificial Sequence
  Oligonucleotide primer for the detection of SNP TSC0037377
ttaagatgttag

SEQ ID NO: 333137 - DNA, 12 bp, Artificial Sequence
  Oligonucleotide primer for the detection of SNP TSC0037378
ctattttatatt

SEQ ID NO: 333138 - DNA, 12 bp, Artificial Sequence
  Oligonucleotide primer for the detection of SNP TSC0037378
agataataggga

SEQ ID NO: 333139 - DNA, 12 bp, Artificial Sequence
  Oligonucleotide primer for the detection of SNP TSC0037382
taaactttacta

SEQ ID NO: 333140 - DNA, 12 bp, Artificial Sequence
  Oligonucleotide primer for the detection of SNP TSC0037382
gtgttggaattt

SEQ ID NO: 333141 - DNA, 12 bp, Artificial Sequence
  Oligonucleotide primer for the detection of SNP TSC0037382
gcgttggaattt

SEQ ID NO: 333142 - DNA, 12 bp, Artificial Sequence
  Oligonukleotid-Primer
acattaaaactt

SEQ ID NO: 333143 - DNA, 12 bp, Artificial Sequence
  Oligonucleotide primer for the detection of SNP TSC0037382
acgttaaaactt

SEQ ID NO: 333144 - DNA, 12 bp, Artificial Sequence
  Oligonucleotide primer for the detection of SNP TSC0037382
tggattttatta

SEQ ID NO: 333145 - DNA, 12 bp, Artificial Sequence
  Oligonucleotide primer for the detection of SNP TSC0037384
atgttgtttaat

SEQ ID NO: 333146 - DNA, 12 bp, Artificial Sequence
  Oligonucleotide primer for the detection of SNP TSC0037384
atattattcaat

SEQ ID NO: 333147 - DNA, 12 bp, Artificial Sequence
  Oligonucleotide primer for the detection of SNP TSC0037384
agttagtggtta

SEQ ID NO: 333148 - DNA, 12 bp, Artificial Sequence
  Oligonucleotide primer for the detection of SNP TSC0037386
aacctaaacact

SEQ ID NO: 333149 - DNA, 12 bp, Artificial Sequence
  Oligonucleotide primer for the detection of SNP TSC0037386
ttaattatttag

SEQ ID NO: 333150 - DNA, 12 bp, Artificial Sequence
  Oligonucleotide primer for the detection of SNP TSC0037386
ccaactatctaa

SEQ ID NO: 333151 - DNA, 12 bp, Artificial Sequence
  Oligonucleotide primer for the detection of SNP TSC0037386
agtttgagtatt

SEQ ID NO: 333152 - DNA, 12 bp, Artificial Sequence
  Oligonucleotide primer for the detection of SNP TSC0037389
caatacaaaact

SEQ ID NO: 333153 - DNA, 12 bp, Artificial Sequence
  Oligonucleotide primer for the detection of SNP TSC0037389
cgatacaaaact

SEQ ID NO: 333154 - DNA, 12 bp, Artificial Sequence
  Oligonucleotide primer for the detection of SNP TSC0037389
attaaattattg

SEQ ID NO: 333155 - DNA, 12 bp, Artificial Sequence
  Oligonucleotide primer for the detection of SNP TSC0037390
aactcaacatat

SEQ ID NO: 333156 - DNA, 12 bp, Artificial Sequence
  Oligonucleotide primer for the detection of SNP TSC0037390
aactcaacgtat

SEQ ID NO: 333157 - DNA, 12 bp, Artificial Sequence
  Oligonucleotide primer for the detection of SNP TSC0037390
ttaagttgtttg

SEQ ID NO: 333158 - DNA, 12 bp, Artificial Sequence
  Oligonucleotide primer for the detection of SNP TSC0037390
tcaaattactta

SEQ ID NO: 333159 - DNA, 12 bp, Artificial Sequence
  Oligonucleotide primer for the detection of SNP TSC0037390
agtttagtgtat

SEQ ID NO: 333160 - DNA, 12 bp, Artificial Sequence
  Oligonucleotide primer for the detection of SNP TSC0037390
agtttagcgtat

SEQ ID NO: 333161 - DNA, 12 bp, Artificial Sequence
  Oligonucleotide primer for the detection of SNP TSC0037391
cacatttttttt

SEQ ID NO: 333162 - DNA, 12 bp, Artificial Sequence
  Oligonucleotide primer for the detection of SNP TSC0037392
tcccaaatacaa

SEQ ID NO: 333163 - DNA, 12 bp, Artificial Sequence
  Oligonucleotide primer for the detection of SNP TSC0037392
attttctcacct

SEQ ID NO: 333164 - DNA, 12 bp, Artificial Sequence
  Oligonucleotide primer for the detection of SNP TSC0037394
aaatattccatt

SEQ ID NO: 333165 - DNA, 12 bp, Artificial Sequence
  Oligonucleotide primer for the detection of SNP TSC0037394
agttttttcgtt

SEQ ID NO: 333166 - DNA, 12 bp, Artificial Sequence
  Oligonucleotide primer for the detection of SNP TSC0037394
aatcttctcatt

SEQ ID NO: 333167 - DNA, 12 bp, Artificial Sequence
  Oligonucleotide primer for the detection of SNP TSC0037394
aatcttctcgtt

SEQ ID NO: 333168 - DNA, 12 bp, Artificial Sequence
  Oligonucleotide primer for the detection of SNP TSC0037394
aagtgttttatt

SEQ ID NO: 333169 - DNA, 12 bp, Artificial Sequence
  Oligonucleotide primer for the detection of SNP TSC0037396
catacttaaaat

SEQ ID NO: 333170 - DNA, 12 bp, Artificial Sequence
  Oligonucleotide primer for the detection of SNP TSC0037396
aagaaattatta

SEQ ID NO: 333171 - DNA, 12 bp, Artificial Sequence
  Oligonucleotide primer for the detection of SNP TSC0037397
taatattttaag

SEQ ID NO: 333172 - DNA, 12 bp, Artificial Sequence
  Oligonucleotide primer for the detection of SNP TSC0037399
tattaactcctt

SEQ ID NO: 333173 - DNA, 12 bp, Artificial Sequence
  Oligonucleotide primer for the detection of SNP TSC0037399
atgaaatgaagg

SEQ ID NO: 333174 - DNA, 12 bp, Artificial Sequence
  Oligonucleotide primer for the detection of SNP TSC0037399
atgaaacgaagg

SEQ ID NO: 333175 - DNA, 12 bp, Artificial Sequence
  Oligonucleotide primer for the detection of SNP TSC0037400
aataaacacctc

SEQ ID NO: 333176 - DNA, 12 bp, Artificial Sequence
  Oligonucleotide primer for the detection of SNP TSC0037400
atagttttaggt

SEQ ID NO: 333177 - DNA, 12 bp, Artificial Sequence
  Oligonucleotide primer for the detection of SNP TSC0037400
acaattccaaat

SEQ ID NO: 333178 - DNA, 12 bp, Artificial Sequence
  Oligonucleotide primer for the detection of SNP TSC0037402
aaaactcccccc

SEQ ID NO: 333179 - DNA, 12 bp, Artificial Sequence
  Oligonucleotide primer for the detection of SNP TSC0037402
tagttatttgtt

SEQ ID NO: 333180 - DNA, 12 bp, Artificial Sequence
  Oligonucleotide primer for the detection of SNP TSC0037403
ccaactctataa

SEQ ID NO: 333181 - DNA, 12 bp, Artificial Sequence
  Oligonucleotide primer for the detection of SNP TSC0037403
ttttctccaact

SEQ ID NO: 333182 - DNA, 12 bp, Artificial Sequence
  Oligonucleotide primer for the detection of SNP TSC0037404
accacaaaaaac

SEQ ID NO: 333183 - DNA, 12 bp, Artificial Sequence
  Oligonucleotide primer for the detection of SNP TSC0037404
gatagtgttgta

SEQ ID NO: 333184 - DNA, 12 bp, Artificial Sequence
  Oligonucleotide primer for the detection of SNP TSC0037405
atacaaaatccc

SEQ ID NO: 333185 - DNA, 12 bp, Artificial Sequence
  Oligonucleotide primer for the detection of SNP TSC0037405
gggtatagggta

SEQ ID NO: 333186 - DNA, 12 bp, Artificial Sequence
  Oligonucleotide primer for the detection of SNP TSC0037407
tatttctaattt

SEQ ID NO: 333187 - DNA, 12 bp, Artificial Sequence
  Oligonucleotide primer for the detection of SNP TSC0037407
ttaatattaggg

SEQ ID NO: 333188 - DNA, 12 bp, Artificial Sequence
  Oligonucleotide primer for the detection of SNP TSC0037408
aaaattcaccaa

SEQ ID NO: 333189 - DNA, 12 bp, Artificial Sequence
  Oligonucleotide primer for the detection of SNP TSC0037408
tatatgttattt

SEQ ID NO: 333190 - DNA, 12 bp, Artificial Sequence
  Oligonucleotide primer for the detection of SNP TSC0037408
tacatatcattt

SEQ ID NO: 333191 - DNA, 12 bp, Artificial Sequence
  Oligonucleotide primer for the detection of SNP TSC0037408
agagtttattaa

SEQ ID NO: 333192 - DNA, 12 bp, Artificial Sequence
  Oligonucleotide primer for the detection of SNP TSC0037409
taaatctctacc

SEQ ID NO: 333193 - DNA, 12 bp, Artificial Sequence
  Oligonucleotide primer for the detection of SNP TSC0037409
tattttataaga

SEQ ID NO: 333194 - DNA, 12 bp, Artificial Sequence
  Oligonucleotide primer for the detection of SNP TSC0037409
cattttataaaa

SEQ ID NO: 333195 - DNA, 12 bp, Artificial Sequence
  Oligonucleotide primer for the detection of SNP TSC0037409
taaatttttgtt

SEQ ID NO: 333196 - DNA, 12 bp, Artificial Sequence
  Oligonucleotide primer for the detection of SNP TSC0037410
cattaaaaaact

SEQ ID NO: 333197 - DNA, 12 bp, Artificial Sequence
  Oligonucleotide primer for the detection of SNP TSC0037411
aaacctttccca

SEQ ID NO: 333198 - DNA, 12 bp, Artificial Sequence
  Oligonucleotide primer for the detection of SNP TSC0037411
ttttttagtaag

SEQ ID NO: 333199 - DNA, 12 bp, Artificial Sequence
  Oligonucleotide primer for the detection of SNP TSC0037411
agatttttttta

SEQ ID NO: 333200 - DNA, 12 bp, Artificial Sequence
  Oligonucleotide primer for the detection of SNP TSC0037413
tctaaaataaaa

SEQ ID NO: 333201 - DNA, 12 bp, Artificial Sequence
  Oligonucleotide primer for the detection of SNP TSC0037413
ttataatttcaa

SEQ ID NO: 333202 - DNA, 12 bp, Artificial Sequence
  Oligonucleotide primer for the detection of SNP TSC0037413
tgaatttaaaat

SEQ ID NO: 333203 - DNA, 12 bp, Artificial Sequence
  Oligonucleotide primer for the detection of SNP TSC0037416
aattattaaaat

SEQ ID NO: 333204 - DNA, 12 bp, Artificial Sequence
  Oligonucleotide primer for the detection of SNP TSC0037416
tatttagtgtta

SEQ ID NO: 333205 - DNA, 12 bp, Artificial Sequence
  Oligonucleotide primer for the detection of SNP TSC0037416
catctaatacca

SEQ ID NO: 333206 - DNA, 12 bp, Artificial Sequence
  Oligonucleotide primer for the detection of SNP TSC0037416
aattattaaagt

SEQ ID NO: 333207 - DNA, 12 bp, Artificial Sequence
  Oligonucleotide primer for the detection of SNP TSC0037417
aaatgtagtttt

SEQ ID NO: 333208 - DNA, 12 bp, Artificial Sequence
  Oligonucleotide primer for the detection of SNP TSC0037419
aatttacaactc

SEQ ID NO: 333209 - DNA, 12 bp, Artificial Sequence
  Oligonucleotide primer for the detection of SNP TSC0037419
tttgtgaaaatg

SEQ ID NO: 333210 - DNA, 12 bp, Artificial Sequence
  Oligonucleotide primer for the detection of SNP TSC0037419
cttataaaaata

SEQ ID NO: 333211 - DNA, 12 bp, Artificial Sequence
  Oligonucleotide primer for the detection of SNP TSC0037420
aaaaagaaatag

SEQ ID NO: 333212 - DNA, 12 bp, Artificial Sequence
  Oligonucleotide primer for the detection of SNP TSC0037420
aaatatgttttt

SEQ ID NO: 333213 - DNA, 12 bp, Artificial Sequence
  Oligonucleotide primer for the detection of SNP TSC0037420
aaatatgttttc

SEQ ID NO: 333214 - DNA, 12 bp, Artificial Sequence
  Oligonucleotide primer for the detection of SNP TSC0037421
aaaaaaattatc

SEQ ID NO: 333215 - DNA, 12 bp, Artificial Sequence
  Oligonucleotide primer for the detection of SNP TSC0037421
ggatataatata

SEQ ID NO: 333216 - DNA, 12 bp, Artificial Sequence
  Oligonucleotide primer for the detection of SNP TSC0037422
ataacttataaa

SEQ ID NO: 333217 - DNA, 12 bp, Artificial Sequence
  Oligonucleotide primer for the detection of SNP TSC0037422
accatctttcaa

SEQ ID NO: 333218 - DNA, 12 bp, Artificial Sequence
  Oligonucleotide primer for the detection of SNP TSC0037422
attgtgatttat

SEQ ID NO: 333219 - DNA, 12 bp, Artificial Sequence
  Oligonucleotide primer for the detection of SNP TSC0037423
aatttttggtta

SEQ ID NO: 333220 - DNA, 12 bp, Artificial Sequence
  Oligonucleotide primer for the detection of SNP TSC0037426
taacttattact

SEQ ID NO: 333221 - DNA, 12 bp, Artificial Sequence
  Oligonucleotide primer for the detection of SNP TSC0037426
agttttatattg

SEQ ID NO: 333222 - DNA, 12 bp, Artificial Sequence
  Oligonucleotide primer for the detection of SNP TSC0037427
catcataactaa

SEQ ID NO: 333223 - DNA, 12 bp, Artificial Sequence
  Oligonucleotide primer for the detection of SNP TSC0037427
agtattatgttt

SEQ ID NO: 333224 - DNA, 12 bp, Artificial Sequence
  Oligonucleotide primer for the detection of SNP TSC0037427
aaatattatatc

SEQ ID NO: 333225 - DNA, 12 bp, Artificial Sequence
  Oligonucleotide primer for the detection of SNP TSC0037427
tattatagttag

SEQ ID NO: 333226 - DNA, 12 bp, Artificial Sequence
  Oligonucleotide primer for the detection of SNP TSC0037430
atatggttaaaa

SEQ ID NO: 333227 - DNA, 12 bp, Artificial Sequence
  Oligonucleotide primer for the detection of SNP TSC0037431
atatatctctaa

SEQ ID NO: 333228 - DNA, 12 bp, Artificial Sequence
  Oligonucleotide primer for the detection of SNP TSC0037431
agagtgtaagat

SEQ ID NO: 333229 - DNA, 12 bp, Artificial Sequence
  Oligonucleotide primer for the detection of SNP TSC0037431
atgtgtttttgg

SEQ ID NO: 333230 - DNA, 12 bp, Artificial Sequence
  Oligonucleotide primer for the detection of SNP TSC0037432
tcataaaacacc

SEQ ID NO: 333231 - DNA, 12 bp, Artificial Sequence
  Oligonucleotide primer for the detection of SNP TSC0037433
ttcaaaaacttt

SEQ ID NO: 333232 - DNA, 12 bp, Artificial Sequence
  Oligonucleotide primer for the detection of SNP TSC0037433
atggaatagtaa

SEQ ID NO: 333233 - DNA, 12 bp, Artificial Sequence
  Oligonucleotide primer for the detection of SNP TSC0037433
acggaatagtaa

SEQ ID NO: 333234 - DNA, 12 bp, Artificial Sequence
  Oligonucleotide primer for the detection of SNP TSC0037434
tataataacata

SEQ ID NO: 333235 - DNA, 12 bp, Artificial Sequence
  Oligonucleotide primer for the detection of SNP TSC0037434
ataaatttgtat

SEQ ID NO: 333236 - DNA, 12 bp, Artificial Sequence
  Oligonucleotide primer for the detection of SNP TSC0037434
caaacctataca

SEQ ID NO: 333237 - DNA, 12 bp, Artificial Sequence
  Oligonucleotide primer for the detection of SNP TSC0037434
tatagtaatatg

SEQ ID NO: 333238 - DNA, 12 bp, Artificial Sequence
  Oligonucleotide primer for the detection of SNP TSC0037435
aacctatatttc

SEQ ID NO: 333239 - DNA, 12 bp, Artificial Sequence
  Oligonucleotide primer for the detection of SNP TSC0037436
atgtgagaaggt

SEQ ID NO: 333240 - DNA, 12 bp, Artificial Sequence
  Oligonucleotide primer for the detection of SNP TSC0037436
ttgtggtagtgt

SEQ ID NO: 333241 - DNA, 12 bp, Artificial Sequence
  Oligonucleotide primer for the detection of SNP TSC0037439
ctaactctatat

SEQ ID NO: 333242 - DNA, 12 bp, Artificial Sequence
  Oligonucleotide primer for the detection of SNP TSC0037439
aaatgaaaatta

SEQ ID NO: 333243 - DNA, 12 bp, Artificial Sequence
  Oligonucleotide primer for the detection of SNP TSC0037440
taatctatccaa

SEQ ID NO: 333244 - DNA, 12 bp, Artificial Sequence
  Oligonucleotide primer for the detection of SNP TSC0037440
ttgaatggagag

SEQ ID NO: 333245 - DNA, 12 bp, Artificial Sequence
  Oligonucleotide primer for the detection of SNP TSC0037440
tgatttgtttaa

SEQ ID NO: 333246 - DNA, 12 bp, Artificial Sequence
  Oligonucleotide primer for the detection of SNP TSC0037442
attccccctaac

SEQ ID NO: 333247 - DNA, 12 bp, Artificial Sequence
  Oligonucleotide primer for the detection of SNP TSC0037442
taataagtttgg

SEQ ID NO: 333248 - DNA, 12 bp, Artificial Sequence
  Oligonucleotide primer for the detection of SNP TSC0037443
accaatcaataa

SEQ ID NO: 333249 - DNA, 12 bp, Artificial Sequence
  Oligonucleotide primer for the detection of SNP TSC0037443
gaaagatgtagt

SEQ ID NO: 333250 - DNA, 12 bp, Artificial Sequence
  Oligonucleotide primer for the detection of SNP TSC0037443
gattagttagtg

SEQ ID NO: 333251 - DNA, 12 bp, Artificial Sequence
  Oligonucleotide primer for the detection of SNP TSC0037444
atacataaatct

SEQ ID NO: 333252 - DNA, 12 bp, Artificial Sequence
  Oligonucleotide primer for the detection of SNP TSC0037444
ttaaggtattga

SEQ ID NO: 333253 - DNA, 12 bp, Artificial Sequence
  Oligonucleotide primer for the detection of SNP TSC0037444
atgtatggattt

SEQ ID NO: 333254 - DNA, 12 bp, Artificial Sequence
  Oligonucleotide primer for the detection of SNP TSC0037445
ccaaccccaaaa

SEQ ID NO: 333255 - DNA, 12 bp, Artificial Sequence
  Oligonucleotide primer for the detection of SNP TSC0037445
tagaggaagttt

SEQ ID NO: 333256 - DNA, 12 bp, Artificial Sequence
  Oligonucleotide primer for the detection of SNP TSC0037445
ttagttttagaa

SEQ ID NO: 333257 - DNA, 12 bp, Artificial Sequence
  Oligonucleotide primer for the detection of SNP TSC0037446
taacctactaaa

SEQ ID NO: 333258 - DNA, 12 bp, Artificial Sequence
  Oligonucleotide primer for the detection of SNP TSC0037446
gtgtttttatat

SEQ ID NO: 333259 - DNA, 12 bp, Artificial Sequence
  Oligonucleotide primer for the detection of SNP TSC0037446
tatatttctaca

SEQ ID NO: 333260 - DNA, 12 bp, Artificial Sequence
  Oligonucleotide primer for the detection of SNP TSC0037446
taatttgttaag

SEQ ID NO: 333261 - DNA, 12 bp, Artificial Sequence
  Oligonucleotide primer for the detection of SNP TSC0037447
taaataatccta

SEQ ID NO: 333262 - DNA, 12 bp, Artificial Sequence
  Oligonucleotide primer for the detection of SNP TSC0037447
tgagattatgat

SEQ ID NO: 333263 - DNA, 12 bp, Artificial Sequence
  Oligonucleotide primer for the detection of SNP TSC0037447
taaaatcataat

SEQ ID NO: 333264 - DNA, 12 bp, Artificial Sequence
  Oligonucleotide primer for the detection of SNP TSC0037448
ataaaatatcac

SEQ ID NO: 333265 - DNA, 12 bp, Artificial Sequence
  Oligonucleotide primer for the detection of SNP TSC0037448
ttgagagtagta

SEQ ID NO: 333266 - DNA, 12 bp, Artificial Sequence
  Oligonucleotide primer for the detection of SNP TSC0037448
gtagaatattat

SEQ ID NO: 333267 - DNA, 12 bp, Artificial Sequence
  Oligonucleotide primer for the detection of SNP TSC0037449
aatatctataca

SEQ ID NO: 333268 - DNA, 12 bp, Artificial Sequence
  Oligonucleotide primer for the detection of SNP TSC0037449
ttgttggtttat

SEQ ID NO: 333269 - DNA, 12 bp, Artificial Sequence
  Oligonucleotide primer for the detection of SNP TSC0037449
ctactaatctat

SEQ ID NO: 333270 - DNA, 12 bp, Artificial Sequence
  Oligonucleotide primer for the detection of SNP TSC0037449
agtgtttgtata

SEQ ID NO: 333271 - DNA, 12 bp, Artificial Sequence
  Oligonucleotide primer for the detection of SNP TSC0037450
ttaaaaattcaa

SEQ ID NO: 333272 - DNA, 12 bp, Artificial Sequence
  Oligonucleotide primer for the detection of SNP TSC0037450
ggaagttaataa

SEQ ID NO: 333273 - DNA, 12 bp, Artificial Sequence
  Oligonucleotide primer for the detection of SNP TSC0037450
aaaaattaataa

SEQ ID NO: 333274 - DNA, 12 bp, Artificial Sequence
  Oligonucleotide primer for the detection of SNP TSC0037450
taaagatttagt

SEQ ID NO: 333275 - DNA, 12 bp, Artificial Sequence
  Oligonucleotide primer for the detection of SNP TSC0037451
aatactacataa

SEQ ID NO: 333276 - DNA, 12 bp, Artificial Sequence
  Oligonucleotide primer for the detection of SNP TSC0037451
ttcattcatact

SEQ ID NO: 333277 - DNA, 12 bp, Artificial Sequence
  Oligonucleotide primer for the detection of SNP TSC0037451
agtattgtatag

SEQ ID NO: 333278 - DNA, 12 bp, Artificial Sequence
  Oligonucleotide primer for the detection of SNP TSC0037452
aacaaacctaaa

SEQ ID NO: 333279 - DNA, 12 bp, Artificial Sequence
  Oligonucleotide primer for the detection of SNP TSC0037453
accattataaca

SEQ ID NO: 333280 - DNA, 12 bp, Artificial Sequence
  Oligonucleotide primer for the detection of SNP TSC0037453
atgggtattttt

SEQ ID NO: 333281 - DNA, 12 bp, Artificial Sequence
  Oligonucleotide primer for the detection of SNP TSC0037453
ataaatattttc

SEQ ID NO: 333282 - DNA, 12 bp, Artificial Sequence
  Oligonucleotide primer for the detection of SNP TSC0037453
tgttattgtagt

SEQ ID NO: 333283 - DNA, 12 bp, Artificial Sequence
  Oligonucleotide primer for the detection of SNP TSC0037454
taggtgggagga

SEQ ID NO: 333284 - DNA, 12 bp, Artificial Sequence
  Oligonucleotide primer for the detection of SNP TSC0037455
tttgttattagt

SEQ ID NO: 333285 - DNA, 12 bp, Artificial Sequence
  Oligonucleotide primer for the detection of SNP TSC0037455
atctatcattaa

SEQ ID NO: 333286 - DNA, 12 bp, Artificial Sequence
  Oligonucleotide primer for the detection of SNP TSC0037455
aaatatattaag

SEQ ID NO: 333287 - DNA, 12 bp, Artificial Sequence
  Oligonucleotide primer for the detection of SNP TSC0037456
caacataactac

SEQ ID NO: 333288 - DNA, 12 bp, Artificial Sequence
  Oligonucleotide primer for the detection of SNP TSC0037456
agaagtaggtaa

SEQ ID NO: 333289 - DNA, 12 bp, Artificial Sequence
  Oligonucleotide primer for the detection of SNP TSC0037458
taaactttctat

SEQ ID NO: 333290 - DNA, 12 bp, Artificial Sequence
  Oligonucleotide primer for the detection of SNP TSC0037458
gtatgtttaaag

SEQ ID NO: 333291 - DNA, 12 bp, Artificial Sequence
  Oligonucleotide primer for the detection of SNP TSC0037461
tatattccctat

SEQ ID NO: 333292 - DNA, 12 bp, Artificial Sequence
  Oligonucleotide primer for the detection of SNP TSC0037461
gttgaaaagaaa

SEQ ID NO: 333293 - DNA, 12 bp, Artificial Sequence
  Oligonucleotide primer for the detection of SNP TSC0037462
cacatacacaca

SEQ ID NO: 333294 - DNA, 12 bp, Artificial Sequence
  Oligonucleotide primer for the detection of SNP TSC0037463
gtagaaatgtat

SEQ ID NO: 333295 - DNA, 12 bp, Artificial Sequence
  Oligonucleotide primer for the detection of SNP TSC0037463
atgtattgaagt

SEQ ID NO: 333296 - DNA, 12 bp, Artificial Sequence
  Oligonucleotide primer for the detection of SNP TSC0037463
acgtattgaagt

SEQ ID NO: 333297 - DNA, 12 bp, Artificial Sequence
  Oligonucleotide primer for the detection of SNP TSC0037464
tataacttaaac

SEQ ID NO: 333298 - DNA, 12 bp, Artificial Sequence
  Oligonucleotide primer for the detection of SNP TSC0037464
ttagtgtgttgg

SEQ ID NO: 333299 - DNA, 12 bp, Artificial Sequence
  Oligonucleotide primer for the detection of SNP TSC0037464
ttagtgcgttgg

SEQ ID NO: 333300 - DNA, 12 bp, Artificial Sequence
  Oligonucleotide primer for the detection of SNP TSC0037465
tatgtttgtaaa

SEQ ID NO: 333301 - DNA, 12 bp, Artificial Sequence
  Oligonucleotide primer for the detection of SNP TSC0037465
tacgtttgtaaa

SEQ ID NO: 333302 - DNA, 12 bp, Artificial Sequence
  Oligonucleotide primer for the detection of SNP TSC0037468
catcctaataaa

SEQ ID NO: 333303 - DNA, 12 bp, Artificial Sequence
  Oligonucleotide primer for the detection of SNP TSC0037468
aatgtttaagat

SEQ ID NO: 333304 - DNA, 12 bp, Artificial Sequence
  Oligonucleotide primer for the detection of SNP TSC0037469
tatcccactcaa

SEQ ID NO: 333305 - DNA, 12 bp, Artificial Sequence
  Oligonucleotide primer for the detection of SNP TSC0037469
ttgtaaatgaat

SEQ ID NO: 333306 - DNA, 12 bp, Artificial Sequence
  Oligonucleotide primer for the detection of SNP TSC0037469
ttgtaaatgaac

SEQ ID NO: 333307 - DNA, 12 bp, Artificial Sequence
  Oligonucleotide primer for the detection of SNP TSC0037469
ttataaataaac

SEQ ID NO: 333308 - DNA, 12 bp, Artificial Sequence
  Oligonucleotide primer for the detection of SNP TSC0037471
tccaaaaaattt

SEQ ID NO: 333309 - DNA, 12 bp, Artificial Sequence
  Oligonucleotide primer for the detection of SNP TSC0037471
ttggagtttata

SEQ ID NO: 333310 - DNA, 12 bp, Artificial Sequence
  Oligonucleotide primer for the detection of SNP TSC0037472
atagttgtgaga

SEQ ID NO: 333311 - DNA, 12 bp, Artificial Sequence
  Oligonucleotide primer for the detection of SNP TSC0037472
acaattataaaa

SEQ ID NO: 333312 - DNA, 12 bp, Artificial Sequence
  Oligonucleotide primer for the detection of SNP TSC0037472
aagaagttagag

SEQ ID NO: 333313 - DNA, 12 bp, Artificial Sequence
  Oligonucleotide primer for the detection of SNP TSC0037477
ttctatttaaaa

SEQ ID NO: 333314 - DNA, 12 bp, Artificial Sequence
  Oligonucleotide primer for the detection of SNP TSC0037477
tataaatggtat

SEQ ID NO: 333315 - DNA, 12 bp, Artificial Sequence
  Oligonucleotide primer for the detection of SNP TSC0037477
cacaaataacac

SEQ ID NO: 333316 - DNA, 12 bp, Artificial Sequence
  Oligonucleotide primer for the detection of SNP TSC0037477
ttttatttgggg

SEQ ID NO: 333317 - DNA, 12 bp, Artificial Sequence
  Oligonucleotide primer for the detection of SNP TSC0037478
tagaataaaagt

SEQ ID NO: 333318 - DNA, 12 bp, Artificial Sequence
  unsure (1): Oligonucleotide primer for the detection of SNP TSC0037478
ncaaaacaaaaa

SEQ ID NO: 333319 - DNA, 12 bp, Artificial Sequence
  Oligonucleotide primer for the detection of SNP TSC0037479
atttagtttagt

SEQ ID NO: 333320 - DNA, 12 bp, Artificial Sequence
  Oligonucleotide primer for the detection of SNP TSC0037479
ttcaattcaata

SEQ ID NO: 333321 - DNA, 12 bp, Artificial Sequence
  Oligonucleotide primer for the detection of SNP TSC0037479
tatggagaaagt

SEQ ID NO: 333322 - DNA, 12 bp, Artificial Sequence
  Oligonucleotide primer for the detection of SNP TSC0037480
caataatacttt

SEQ ID NO: 333323 - DNA, 12 bp, Artificial Sequence
  Oligonukleotid-Primer
aagttttatgga

SEQ ID NO: 333324 - DNA, 12 bp, Artificial Sequence
  Oligonucleotide primer for the detection of SNP TSC0037482
ttaaatatttat

SEQ ID NO: 333325 - DNA, 12 bp, Artificial Sequence
  Oligonucleotide primer for the detection of SNP TSC0037484
atcaacaaaaaa

SEQ ID NO: 333326 - DNA, 12 bp, Artificial Sequence
  Oligonucleotide primer for the detection of SNP TSC0037484
gtgtgggaatta

SEQ ID NO: 333327 - DNA, 12 bp, Artificial Sequence
  Oligonukleotid-Primer
gcgtgggaatta

SEQ ID NO: 333328 - DNA, 12 bp, Artificial Sequence
  Oligonucleotide primer for the detection of SNP TSC0037484
gtgcgggaatta

SEQ ID NO: 333329 - DNA, 12 bp, Artificial Sequence
  Oligonucleotide primer for the detection of SNP TSC0037484
gcgcgggaatta

SEQ ID NO: 333330 - DNA, 12 bp, Artificial Sequence
  Oligonucleotide primer for the detection of SNP TSC0037484
cacgaaaaccaa

SEQ ID NO: 333331 - DNA, 12 bp, Artificial Sequence
  Oligonucleotide primer for the detection of SNP TSC0037484
cgcgaaaaccaa

SEQ ID NO: 333332 - DNA, 12 bp, Artificial Sequence
  Oligonucleotide primer for the detection of SNP TSC0037484
ttagtagagagt

SEQ ID NO: 333333 - DNA, 12 bp, Artificial Sequence
  Oligonucleotide primer for the detection of SNP TSC0037485
taaattcaacaa

SEQ ID NO: 333334 - DNA, 12 bp, Artificial Sequence
  Oligonucleotide primer for the detection of SNP TSC0037485
taaattcaacga

SEQ ID NO: 333335 - DNA, 12 bp, Artificial Sequence
  Oligonucleotide primer for the detection of SNP TSC0037485
cgtttttgttgt

SEQ ID NO: 333336 - DNA, 12 bp, Artificial Sequence
  Oligonucleotide primer for the detection of SNP TSC0037485
cacccttactac

SEQ ID NO: 333337 - DNA, 12 bp, Artificial Sequence
  Oligonucleotide primer for the detection of SNP TSC0037485
cgcccttactac

SEQ ID NO: 333338 - DNA, 12 bp, Artificial Sequence
  Oligonucleotide primer for the detection of SNP TSC0037485
tgaatttaatgg

SEQ ID NO: 333339 - DNA, 12 bp, Artificial Sequence
  Oligonucleotide primer for the detection of SNP TSC0037485
tgaatttaacgg

SEQ ID NO: 333340 - DNA, 12 bp, Artificial Sequence
  Oligonucleotide primer for the detection of SNP TSC0037486
acaaaaataact

SEQ ID NO: 333341 - DNA, 12 bp, Artificial Sequence
  Oligonucleotide primer for the detection of SNP TSC0037486
ttttatgtgaaa

SEQ ID NO: 333342 - DNA, 12 bp, Artificial Sequence
  Oligonucleotide primer for the detection of SNP TSC0037486
ttttacgtgaaa

SEQ ID NO: 333343 - DNA, 12 bp, Artificial Sequence
  Oligonucleotide primer for the detection of SNP TSC0037486
tttacataaaaa

SEQ ID NO: 333344 - DNA, 12 bp, Artificial Sequence
  Oligonucleotide primer for the detection of SNP TSC0037486
tttacgtaaaaa

SEQ ID NO: 333345 - DNA, 12 bp, Artificial Sequence
  Oligonucleotide primer for the detection of SNP TSC0037486
atagaaatagtt

SEQ ID NO: 333346 - DNA, 12 bp, Artificial Sequence
  Oligonucleotide primer for the detection of SNP TSC0037487
cataatctcccc

SEQ ID NO: 333347 - DNA, 12 bp, Artificial Sequence
  Oligonucleotide primer for the detection of SNP TSC0037487
ttttattaaggt

SEQ ID NO: 333348 - DNA, 12 bp, Artificial Sequence
  Oligonucleotide primer for the detection of SNP TSC0037487
ccctatcaaaat

SEQ ID NO: 333349 - DNA, 12 bp, Artificial Sequence
  Oligonucleotide primer for the detection of SNP TSC0037489
tataccttcttc

SEQ ID NO: 333350 - DNA, 12 bp, Artificial Sequence
  Oligonucleotide primer for the detection of SNP TSC0037492
ctaccttcaaaa

SEQ ID NO: 333351 - DNA, 12 bp, Artificial Sequence
  Oligonucleotide primer for the detection of SNP TSC0037492
tggtgattttgt

SEQ ID NO: 333352 - DNA, 12 bp, Artificial Sequence
  Oligonucleotide primer for the detection of SNP TSC0037492
cggtgattttgt

SEQ ID NO: 333353 - DNA, 12 bp, Artificial Sequence
  Oligonucleotide primer for the detection of SNP TSC0037492
tggtgattttgc

SEQ ID NO: 333354 - DNA, 12 bp, Artificial Sequence
  Oligonucleotide primer for the detection of SNP TSC0037492
cggtgattttgc

SEQ ID NO: 333355 - DNA, 12 bp, Artificial Sequence
  Oligonucleotide primer for the detection of SNP TSC0037492
tcaataattcta

SEQ ID NO: 333356 - DNA, 12 bp, Artificial Sequence
  Oligonucleotide primer for the detection of SNP TSC0037492
tcgataattcta

SEQ ID NO: 333357 - DNA, 12 bp, Artificial Sequence
  Oligonucleotide primer for the detection of SNP TSC0037493
gaatatggatta

SEQ ID NO: 333358 - DNA, 12 bp, Artificial Sequence
  Oligonucleotide primer for the detection of SNP TSC0037497
acacctcccacc

SEQ ID NO: 333359 - DNA, 12 bp, Artificial Sequence
  Oligonucleotide primer for the detection of SNP TSC0037497
atgttggaggtg

SEQ ID NO: 333360 - DNA, 12 bp, Artificial Sequence
  Oligonucleotide primer for the detection of SNP TSC0037501
acatcttaatat

SEQ ID NO: 333361 - DNA, 12 bp, Artificial Sequence
  Oligonucleotide primer for the detection of SNP TSC0037502
acatataacccc

SEQ ID NO: 333362 - DNA, 12 bp, Artificial Sequence
  Oligonucleotide primer for the detection of SNP TSC0037502
tagttatgggag

SEQ ID NO: 333363 - DNA, 12 bp, Artificial Sequence
  Oligonucleotide primer for the detection of SNP TSC0037505
gctataatattt

SEQ ID NO: 333364 - DNA, 12 bp, Artificial Sequence
  Oligonucleotide primer for the detection of SNP TSC0037505
ttggttgtttaa

SEQ ID NO: 333365 - DNA, 12 bp, Artificial Sequence
  Oligonucleotide primer for the detection of SNP TSC0037506
attattattaat

SEQ ID NO: 333366 - DNA, 12 bp, Artificial Sequence
  Oligonucleotide primer for the detection of SNP TSC0037506
agttgttattta

SEQ ID NO: 333367 - DNA, 12 bp, Artificial Sequence
  Oligonucleotide primer for the detection of SNP TSC0037507
aaataatcccta

SEQ ID NO: 333368 - DNA, 12 bp, Artificial Sequence
  Oligonucleotide primer for the detection of SNP TSC0037507
tattattttgaa

SEQ ID NO: 333369 - DNA, 12 bp, Artificial Sequence
  Oligonucleotide primer for the detection of SNP TSC0037507
caccatcttaaa

SEQ ID NO: 333370 - DNA, 12 bp, Artificial Sequence
  Oligonucleotide primer for the detection of SNP TSC0037507
aagtagtttttg

SEQ ID NO: 333371 - DNA, 12 bp, Artificial Sequence
  Oligonucleotide primer for the detection of SNP TSC0037508
acctaaaatcct

SEQ ID NO: 333372 - DNA, 12 bp, Artificial Sequence
  Oligonucleotide primer for the detection of SNP TSC0037508
ttgaggaggagg

SEQ ID NO: 333373 - DNA, 12 bp, Artificial Sequence
  Oligonucleotide primer for the detection of SNP TSC0037509
cttattaatttt

SEQ ID NO: 333374 - DNA, 12 bp, Artificial Sequence
  Oligonucleotide primer for the detection of SNP TSC0037509
atggggagtgtg

SEQ ID NO: 333375 - DNA, 12 bp, Artificial Sequence
  Oligonucleotide primer for the detection of SNP TSC0037509
atggggagcgtg

SEQ ID NO: 333376 - DNA, 12 bp, Artificial Sequence
  Oligonucleotide primer for the detection of SNP TSC0037510
tacatttctacc

SEQ ID NO: 333377 - DNA, 12 bp, Artificial Sequence
  Oligonucleotide primer for the detection of SNP TSC0037510
agttaaaaagaa

SEQ ID NO: 333378 - DNA, 12 bp, Artificial Sequence
  Oligonucleotide primer for the detection of SNP TSC0037512
aaaccataaccc

SEQ ID NO: 333379 - DNA, 12 bp, Artificial Sequence
  Oligonucleotide primer for the detection of SNP TSC0037512
ttaaggtgttag

SEQ ID NO: 333380 - DNA, 12 bp, Artificial Sequence
  Oligonucleotide primer for the detection of SNP TSC0037512
ttaaaatatcaa

SEQ ID NO: 333381 - DNA, 12 bp, Artificial Sequence
  Oligonucleotide primer for the detection of SNP TSC0037512
agattatggttt

SEQ ID NO: 333382 - DNA, 12 bp, Artificial Sequence
  Oligonucleotide primer for the detection of SNP TSC0037513
ttagtagttagg

SEQ ID NO: 333383 - DNA, 12 bp, Artificial Sequence
  Oligonucleotide primer for the detection of SNP TSC0037513
tcaacaaccaaa

SEQ ID NO: 333384 - DNA, 12 bp, Artificial Sequence
  Oligonucleotide primer for the detection of SNP TSC0037514
ttcctatacccc

SEQ ID NO: 333385 - DNA, 12 bp, Artificial Sequence
  Oligonucleotide primer for the detection of SNP TSC0037514
tatttatgatgg

SEQ ID NO: 333386 - DNA, 12 bp, Artificial Sequence
  Oligonucleotide primer for the detection of SNP TSC0037514
catccataataa

SEQ ID NO: 333387 - DNA, 12 bp, Artificial Sequence
  Oligonucleotide primer for the detection of SNP TSC0037515
acaacaatacct

SEQ ID NO: 333388 - DNA, 12 bp, Artificial Sequence
  Oligonucleotide primer for the detection of SNP TSC0037515
attggttgtttg

SEQ ID NO: 333389 - DNA, 12 bp, Artificial Sequence
  Oligonucleotide primer for the detection of SNP TSC0037515
actaactatcta

SEQ ID NO: 333390 - DNA, 12 bp, Artificial Sequence
  Oligonucleotide primer for the detection of SNP TSC0037515
gtaatagtgttt

SEQ ID NO: 333391 - DNA, 12 bp, Artificial Sequence
  Oligonucleotide primer for the detection of SNP TSC0037520
ttcccaccacat

SEQ ID NO: 333392 - DNA, 12 bp, Artificial Sequence
  Oligonucleotide primer for the detection of SNP TSC0037520
agtgggttatgg

SEQ ID NO: 333393 - DNA, 12 bp, Artificial Sequence
  Oligonucleotide primer for the detection of SNP TSC0037521
tcctaccttaat

SEQ ID NO: 333394 - DNA, 12 bp, Artificial Sequence
  Oligonucleotide primer for the detection of SNP TSC0037522
ttaaataattat

SEQ ID NO: 333395 - DNA, 12 bp, Artificial Sequence
  Oligonucleotide primer for the detection of SNP TSC0037522
tataggttgtag

SEQ ID NO: 333396 - DNA, 12 bp, Artificial Sequence
  Oligonucleotide primer for the detection of SNP TSC0037525
aatccatataaa

SEQ ID NO: 333397 - DNA, 12 bp, Artificial Sequence
  Oligonucleotide primer for the detection of SNP TSC0037525
atgattttgggg

SEQ ID NO: 333398 - DNA, 12 bp, Artificial Sequence
  Oligonucleotide primer for the detection of SNP TSC0037525
ataaccctaaaa

SEQ ID NO: 333399 - DNA, 12 bp, Artificial Sequence
  Oligonucleotide primer for the detection of SNP TSC0037525
agtttatgtgag

SEQ ID NO: 333400 - DNA, 12 bp, Artificial Sequence
  Oligonucleotide primer for the detection of SNP TSC0037526
atataaaattag

SEQ ID NO: 333401 - DNA, 12 bp, Artificial Sequence
  Oligonucleotide primer for the detection of SNP TSC0037526
acacaaaattaa

SEQ ID NO: 333402 - DNA, 12 bp, Artificial Sequence
  Oligonucleotide primer for the detection of SNP TSC0037526
cgttattatatt

SEQ ID NO: 333403 - DNA, 12 bp, Artificial Sequence
  Oligonucleotide primer for the detection of SNP TSC0037534
accccaatttac

SEQ ID NO: 333404 - DNA, 12 bp, Artificial Sequence
  Oligonucleotide primer for the detection of SNP TSC0037535
agaaatttatat

SEQ ID NO: 333405 - DNA, 12 bp, Artificial Sequence
  Oligonucleotide primer for the detection of SNP TSC0037536
gatataaatgtt

SEQ ID NO: 333406 - DNA, 12 bp, Artificial Sequence
  Oligonucleotide primer for the detection of SNP TSC0037536
aacataaatatt

SEQ ID NO: 333407 - DNA, 12 bp, Artificial Sequence
  Oligonucleotide primer for the detection of SNP TSC0037536
taaaataaaaga

SEQ ID NO: 333408 - DNA, 12 bp, Artificial Sequence
  Oligonucleotide primer for the detection of SNP TSC0037537
catcacttctaa

SEQ ID NO: 333409 - DNA, 12 bp, Artificial Sequence
  Oligonucleotide primer for the detection of SNP TSC0037537
catcgcttctaa

SEQ ID NO: 333410 - DNA, 12 bp, Artificial Sequence
  Oligonucleotide primer for the detection of SNP TSC0037537
ggtaggtagtat

SEQ ID NO: 333411 - DNA, 12 bp, Artificial Sequence
  Oligonucleotide primer for the detection of SNP TSC0037537
aacaaataacat

SEQ ID NO: 333412 - DNA, 12 bp, Artificial Sequence
  Oligonucleotide primer for the detection of SNP TSC0037537
tatcgtttttaa

SEQ ID NO: 333413 - DNA, 12 bp, Artificial Sequence
  Oligonucleotide primer for the detection of SNP TSC0037538
taggagaatgat

SEQ ID NO: 333414 - DNA, 12 bp, Artificial Sequence
  Oligonucleotide primer for the detection of SNP TSC0037538
gggatttgaaag

SEQ ID NO: 333415 - DNA, 12 bp, Artificial Sequence
  Oligonucleotide primer for the detection of SNP TSC0037539
ataaaaacaccc

SEQ ID NO: 333416 - DNA, 12 bp, Artificial Sequence
  Oligonucleotide primer for the detection of SNP TSC0037539
ataaaaacgccc

SEQ ID NO: 333417 - DNA, 12 bp, Artificial Sequence
  Oligonucleotide primer for the detection of SNP TSC0037539
tggggaaatagg

SEQ ID NO: 333418 - DNA, 12 bp, Artificial Sequence
  Oligonucleotide primer for the detection of SNP TSC0037540
attaagttttat

SEQ ID NO: 333419 - DNA, 12 bp, Artificial Sequence
  Oligonucleotide primer for the detection of SNP TSC0037540
attaaacctcac

SEQ ID NO: 333420 - DNA, 12 bp, Artificial Sequence
  Oligonucleotide primer for the detection of SNP TSC0037540
agtgtttttgaa

SEQ ID NO: 333421 - DNA, 12 bp, Artificial Sequence
  Oligonucleotide primer for the detection of SNP TSC0037541
atttaactaaac

SEQ ID NO: 333422 - DNA, 12 bp, Artificial Sequence
  Oligonucleotide primer for the detection of SNP TSC0037541
aatatttatagg

SEQ ID NO: 333423 - DNA, 12 bp, Artificial Sequence
  Oligonucleotide primer for the detection of SNP TSC0037542
aaacaacccaac

SEQ ID NO: 333424 - DNA, 12 bp, Artificial Sequence
  Oligonucleotide primer for the detection of SNP TSC0037542
aaacgacccaac

SEQ ID NO: 333425 - DNA, 12 bp, Artificial Sequence
  Oligonucleotide primer for the detection of SNP TSC0037542
tgggtgtagatg

SEQ ID NO: 333426 - DNA, 12 bp, Artificial Sequence
  Oligonucleotide primer for the detection of SNP TSC0037542
cgggtgtagatg

SEQ ID NO: 333427 - DNA, 12 bp, Artificial Sequence
  Oligonucleotide primer for the detection of SNP TSC0037543
ctataccaacaa

SEQ ID NO: 333428 - DNA, 12 bp, Artificial Sequence
  Oligonucleotide primer for the detection of SNP TSC0037543
ctataccgacaa

SEQ ID NO: 333429 - DNA, 12 bp, Artificial Sequence
  Oligonucleotide primer for the detection of SNP TSC0037543
ggagtgtgatgt

SEQ ID NO: 333430 - DNA, 12 bp, Artificial Sequence
  Oligonucleotide primer for the detection of SNP TSC0037543
aaaatataatat

SEQ ID NO: 333431 - DNA, 12 bp, Artificial Sequence
  Oligonucleotide primer for the detection of SNP TSC0037543
ttgtgttggtaa

SEQ ID NO: 333432 - DNA, 12 bp, Artificial Sequence
  Oligonucleotide primer for the detection of SNP TSC0037543
ttgtgtcggtaa

SEQ ID NO: 333433 - DNA, 12 bp, Artificial Sequence
  Oligonucleotide primer for the detection of SNP TSC0037544
aagttaattgaa

SEQ ID NO: 333434 - DNA, 12 bp, Artificial Sequence
  Oligonucleotide primer for the detection of SNP TSC0037544
aagttaatcgaa

SEQ ID NO: 333435 - DNA, 12 bp, Artificial Sequence
  Oligonucleotide primer for the detection of SNP TSC0037545
aaattacccaac

SEQ ID NO: 333436 - DNA, 12 bp, Artificial Sequence
  Oligonucleotide primer for the detection of SNP TSC0037545
tatacaccatca

SEQ ID NO: 333437 - DNA, 12 bp, Artificial Sequence
  Oligonucleotide primer for the detection of SNP TSC0037545
aaattatttagt

SEQ ID NO: 333438 - DNA, 12 bp, Artificial Sequence
  Oligonucleotide primer for the detection of SNP TSC0037546
atttaacaaaat

SEQ ID NO: 333439 - DNA, 12 bp, Artificial Sequence
  Oligonucleotide primer for the detection of SNP TSC0037546
ttggtttgaaga

SEQ ID NO: 333440 - DNA, 12 bp, Artificial Sequence
  Oligonucleotide primer for the detection of SNP TSC0037547
gtttttataata

SEQ ID NO: 333441 - DNA, 12 bp, Artificial Sequence
  Oligonucleotide primer for the detection of SNP TSC0037548
tataacaaaaca

SEQ ID NO: 333442 - DNA, 12 bp, Artificial Sequence
  Oligonucleotide primer for the detection of SNP TSC0037548
tgtgtaaattat

SEQ ID NO: 333443 - DNA, 12 bp, Artificial Sequence
  Oligonucleotide primer for the detection of SNP TSC0037548
tatataaatcat

SEQ ID NO: 333444 - DNA, 12 bp, Artificial Sequence
  Oligonucleotide primer for the detection of SNP TSC0037548
tataataaggta

SEQ ID NO: 333445 - DNA, 12 bp, Artificial Sequence
  Oligonucleotide primer for the detection of SNP TSC0037549
taatccaaccac

SEQ ID NO: 333446 - DNA, 12 bp, Artificial Sequence
  Oligonucleotide primer for the detection of SNP TSC0037549
gttttttataag

SEQ ID NO: 333447 - DNA, 12 bp, Artificial Sequence
  Oligonucleotide primer for the detection of SNP TSC0037550
aacatacccctt

SEQ ID NO: 333448 - DNA, 12 bp, Artificial Sequence
  Oligonucleotide primer for the detection of SNP TSC0037550
ataatgtggtga

SEQ ID NO: 333449 - DNA, 12 bp, Artificial Sequence
  Oligonucleotide primer for the detection of SNP TSC0037550
caatataataaa

SEQ ID NO: 333450 - DNA, 12 bp, Artificial Sequence
  Oligonucleotide primer for the detection of SNP TSC0037550
gatatgtttttt

SEQ ID NO: 333451 - DNA, 12 bp, Artificial Sequence
  Oligonucleotide primer for the detection of SNP TSC0037551
gattgatttaaa

SEQ ID NO: 333452 - DNA, 12 bp, Artificial Sequence
  Oligonucleotide primer for the detection of SNP TSC0037552
tacattaaatac

SEQ ID NO: 333453 - DNA, 12 bp, Artificial Sequence
  Oligonucleotide primer for the detection of SNP TSC0037552
tatatgttaata

SEQ ID NO: 333454 - DNA, 12 bp, Artificial Sequence
  Oligonucleotide primer for the detection of SNP TSC0037553
actactcactac

SEQ ID NO: 333455 - DNA, 12 bp, Artificial Sequence
  Oligonucleotide primer for the detection of SNP TSC0037553
taggagtttgag

SEQ ID NO: 333456 - DNA, 12 bp, Artificial Sequence
  Oligonucleotide primer for the detection of SNP TSC0037554
cataacatatca

SEQ ID NO: 333457 - DNA, 12 bp, Artificial Sequence
  Oligonucleotide primer for the detection of SNP TSC0037554
agaaaaagaaaa

SEQ ID NO: 333458 - DNA, 12 bp, Artificial Sequence
  Oligonucleotide primer for the detection of SNP TSC0037554
tatggtatgtta

SEQ ID NO: 333459 - DNA, 12 bp, Artificial Sequence
  Oligonucleotide primer for the detection of SNP TSC0037555
acattcaaaaat

SEQ ID NO: 333460 - DNA, 12 bp, Artificial Sequence
  Oligonucleotide primer for the detection of SNP TSC0037556
cacctctatact

SEQ ID NO: 333461 - DNA, 12 bp, Artificial Sequence
  Oligonucleotide primer for the detection of SNP TSC0037556
gaggagttgaaa

SEQ ID NO: 333462 - DNA, 12 bp, Artificial Sequence
  Oligonucleotide primer for the detection of SNP TSC0037558
tactatttcaaa

SEQ ID NO: 333463 - DNA, 12 bp, Artificial Sequence
  Oligonucleotide primer for the detection of SNP TSC0037558
tatgtatttagt

SEQ ID NO: 333464 - DNA, 12 bp, Artificial Sequence
  Oligonucleotide primer for the detection of SNP TSC0037558
tacgtatttagt

SEQ ID NO: 333465 - DNA, 12 bp, Artificial Sequence
  Oligonucleotide primer for the detection of SNP TSC0037558
cacacatttaac

SEQ ID NO: 333466 - DNA, 12 bp, Artificial Sequence
  Oligonucleotide primer for the detection of SNP TSC0037558
cacgcatttaac

SEQ ID NO: 333467 - DNA, 12 bp, Artificial Sequence
  Oligonucleotide primer for the detection of SNP TSC0037558
attgttttaagt

SEQ ID NO: 333468 - DNA, 12 bp, Artificial Sequence
  Oligonucleotide primer for the detection of SNP TSC0037558
attgttttaagc

SEQ ID NO: 333469 - DNA, 12 bp, Artificial Sequence
  Oligonucleotide primer for the detection of SNP TSC0037559
cctcaatcacct

SEQ ID NO: 333470 - DNA, 12 bp, Artificial Sequence
  Oligonucleotide primer for the detection of SNP TSC0037559
aattgtattggg

SEQ ID NO: 333471 - DNA, 12 bp, Artificial Sequence
  Oligonucleotide primer for the detection of SNP TSC0037559
aattacactaaa

SEQ ID NO: 333472 - DNA, 12 bp, Artificial Sequence
  Oligonucleotide primer for the detection of SNP TSC0037562
aatatatataaa

SEQ ID NO: 333473 - DNA, 12 bp, Artificial Sequence
  Oligonucleotide primer for the detection of SNP TSC0037562
aaaacaacactc

SEQ ID NO: 333474 - DNA, 12 bp, Artificial Sequence
  Oligonucleotide primer for the detection of SNP TSC0037562
agtgtatgtgag

SEQ ID NO: 333475 - DNA, 12 bp, Artificial Sequence
  Oligonucleotide primer for the detection of SNP TSC0037564
atctaattaata

SEQ ID NO: 333476 - DNA, 12 bp, Artificial Sequence
  Oligonucleotide primer for the detection of SNP TSC0037564
aaatatttatag

SEQ ID NO: 333477 - DNA, 12 bp, Artificial Sequence
  Oligonucleotide primer for the detection of SNP TSC0037565
acccaactaacc

SEQ ID NO: 333478 - DNA, 12 bp, Artificial Sequence
  Oligonucleotide primer for the detection of SNP TSC0037565
gagttttggggg

SEQ ID NO: 333479 - DNA, 12 bp, Artificial Sequence
  Oligonucleotide primer for the detection of SNP TSC0037566
taccctcaccta

SEQ ID NO: 333480 - DNA, 12 bp, Artificial Sequence
  Oligonucleotide primer for the detection of SNP TSC0037566
ttagtagggatt

SEQ ID NO: 333481 - DNA, 12 bp, Artificial Sequence
  Oligonucleotide primer for the detection of SNP TSC0037566
ctaacaaaaacc

SEQ ID NO: 333482 - DNA, 12 bp, Artificial Sequence
  Oligonucleotide primer for the detection of SNP TSC0037567
aaacaaccgcta

SEQ ID NO: 333483 - DNA, 12 bp, Artificial Sequence
  Oligonucleotide primer for the detection of SNP TSC0037567
atcgagtgttta

SEQ ID NO: 333484 - DNA, 12 bp, Artificial Sequence
  Oligonucleotide primer for the detection of SNP TSC0037567
attgagcgttta

SEQ ID NO: 333485 - DNA, 12 bp, Artificial Sequence
  Oligonucleotide primer for the detection of SNP TSC0037567
atcgagcgttta

SEQ ID NO: 333486 - DNA, 12 bp, Artificial Sequence
  Oligonucleotide primer for the detection of SNP TSC0037567
accaaacattca

SEQ ID NO: 333487 - DNA, 12 bp, Artificial Sequence
  Oligonucleotide primer for the detection of SNP TSC0037567
accaaacgttca

SEQ ID NO: 333488 - DNA, 12 bp, Artificial Sequence
  Oligonucleotide primer for the detection of SNP TSC0037567
accgaacattca

SEQ ID NO: 333489 - DNA, 12 bp, Artificial Sequence
  Oligonucleotide primer for the detection of SNP TSC0037567
accgaacgttca

SEQ ID NO: 333490 - DNA, 12 bp, Artificial Sequence
  Oligonucleotide primer for the detection of SNP TSC0037567
gaatagttgttg

SEQ ID NO: 333491 - DNA, 12 bp, Artificial Sequence
  Oligonucleotide primer for the detection of SNP TSC0037567
gaatagtcgttg

SEQ ID NO: 333492 - DNA, 12 bp, Artificial Sequence
  Oligonucleotide primer for the detection of SNP TSC0037569
aatctttatcac

SEQ ID NO: 333493 - DNA, 12 bp, Artificial Sequence
  Oligonucleotide primer for the detection of SNP TSC0037569
gggaaaaagggg

SEQ ID NO: 333494 - DNA, 12 bp, Artificial Sequence
  Oligonucleotide primer for the detection of SNP TSC0037569
gatttttattat

SEQ ID NO: 333495 - DNA, 12 bp, Artificial Sequence
  Oligonucleotide primer for the detection of SNP TSC0037570
gaaatattaata

SEQ ID NO: 333496 - DNA, 12 bp, Artificial Sequence
  Oligonucleotide primer for the detection of SNP TSC0037570
aattaaggattt

SEQ ID NO: 333497 - DNA, 12 bp, Artificial Sequence
  Oligonucleotide primer for the detection of SNP TSC0037570
aactaaaaaccc

SEQ ID NO: 333498 - DNA, 12 bp, Artificial Sequence
  Oligonucleotide primer for the detection of SNP TSC0037570
ggaatattggtg

SEQ ID NO: 333499 - DNA, 12 bp, Artificial Sequence
  Oligonucleotide primer for the detection of SNP TSC0037573
attaaaatttat

SEQ ID NO: 333500 - DNA, 12 bp, Artificial Sequence
  Oligonucleotide primer for the detection of SNP TSC0037573
aaatttaaatta

SEQ ID NO: 333501 - DNA, 12 bp, Artificial Sequence
  Oligonucleotide primer for the detection of SNP TSC0037574
gaagttaaatag

SEQ ID NO: 333502 - DNA, 12 bp, Artificial Sequence
  Oligonucleotide primer for the detection of SNP TSC0037574
atagttgtgggg

SEQ ID NO: 333503 - DNA, 12 bp, Artificial Sequence
  Oligonucleotide primer for the detection of SNP TSC0037575
acccaacatcac

SEQ ID NO: 333504 - DNA, 12 bp, Artificial Sequence
  Oligonucleotide primer for the detection of SNP TSC0037575
gttatattttga

SEQ ID NO: 333505 - DNA, 12 bp, Artificial Sequence
  Oligonucleotide primer for the detection of SNP TSC0037577
ataataaccctt

SEQ ID NO: 333506 - DNA, 12 bp, Artificial Sequence
  Oligonucleotide primer for the detection of SNP TSC0037577
tagagaagtaga

SEQ ID NO: 333507 - DNA, 12 bp, Artificial Sequence
  Oligonucleotide primer for the detection of SNP TSC0037578
aaaaaatatttt

SEQ ID NO: 333508 - DNA, 12 bp, Artificial Sequence
  Oligonucleotide primer for the detection of SNP TSC0037578
gaaaaatatttt

SEQ ID NO: 333509 - DNA, 12 bp, Artificial Sequence
  Oligonucleotide primer for the detection of SNP TSC0037578
ggtgaaattttg

SEQ ID NO: 333510 - DNA, 12 bp, Artificial Sequence
  Oligonucleotide primer for the detection of SNP TSC0037579
ataaccaaaatt

SEQ ID NO: 333511 - DNA, 12 bp, Artificial Sequence
  Oligonucleotide primer for the detection of SNP TSC0037579
tatattgattga

SEQ ID NO: 333512 - DNA, 12 bp, Artificial Sequence
  Oligonucleotide primer for the detection of SNP TSC0037580
attaattccaaa

SEQ ID NO: 333513 - DNA, 12 bp, Artificial Sequence
  Oligonucleotide primer for the detection of SNP TSC0037580
aatttttttgga

SEQ ID NO: 333514 - DNA, 12 bp, Artificial Sequence
  Oligonucleotide primer for the detection of SNP TSC0037581
atgggttttgag

SEQ ID NO: 333515 - DNA, 12 bp, Artificial Sequence
  Oligonucleotide primer for the detection of SNP TSC0037581
ataaatcctaaa

SEQ ID NO: 333516 - DNA, 12 bp, Artificial Sequence
  Oligonucleotide primer for the detection of SNP TSC0037581
ggaagggtataa

SEQ ID NO: 333517 - DNA, 12 bp, Artificial Sequence
  Oligonucleotide primer for the detection of SNP TSC0037582
cccataatctat

SEQ ID NO: 333518 - DNA, 12 bp, Artificial Sequence
  Oligonucleotide primer for the detection of SNP TSC0037582
tgtttttgagaa

SEQ ID NO: 333519 - DNA, 12 bp, Artificial Sequence
  Oligonucleotide primer for the detection of SNP TSC0037583
aggtagtgtaat

SEQ ID NO: 333520 - DNA, 12 bp, Artificial Sequence
  Oligonucleotide primer for the detection of SNP TSC0037583
aggtagcgtaat

SEQ ID NO: 333521 - DNA, 12 bp, Artificial Sequence
  Oligonucleotide primer for the detection of SNP TSC0037583
aaacaacgtaat

SEQ ID NO: 333522 - DNA, 12 bp, Artificial Sequence
  Oligonucleotide primer for the detection of SNP TSC0037583
aaaggaaagtta

SEQ ID NO: 333523 - DNA, 12 bp, Artificial Sequence
  Oligonucleotide primer for the detection of SNP TSC0037584
cctaactcttcc

SEQ ID NO: 333524 - DNA, 12 bp, Artificial Sequence
  Oligonucleotide primer for the detection of SNP TSC0037584
tatagttgataa

SEQ ID NO: 333525 - DNA, 12 bp, Artificial Sequence
  Oligonucleotide primer for the detection of SNP TSC0037585
tcaaaaacaaat

SEQ ID NO: 333526 - DNA, 12 bp, Artificial Sequence
  Oligonucleotide primer for the detection of SNP TSC0037585
atttggtttatg

SEQ ID NO: 333527 - DNA, 12 bp, Artificial Sequence
  Oligonucleotide primer for the detection of SNP TSC0037585
acctaacccata

SEQ ID NO: 333528 - DNA, 12 bp, Artificial Sequence
  Oligonucleotide primer for the detection of SNP TSC0037585
ttaagggtaggt

SEQ ID NO: 333529 - DNA, 12 bp, Artificial Sequence
  Oligonucleotide primer for the detection of SNP TSC0037589
atatgatgtatg

SEQ ID NO: 333530 - DNA, 12 bp, Artificial Sequence
  Oligonucleotide primer for the detection of SNP TSC0037589
acataatatata

SEQ ID NO: 333531 - DNA, 12 bp, Artificial Sequence
  Oligonucleotide primer for the detection of SNP TSC0037589
aaagtattggtt

SEQ ID NO: 333532 - DNA, 12 bp, Artificial Sequence
  Oligonucleotide primer for the detection of SNP TSC0037590
aaaatatctcca

SEQ ID NO: 333533 - DNA, 12 bp, Artificial Sequence
  Oligonucleotide primer for the detection of SNP TSC0037590
atatttgataat

SEQ ID NO: 333534 - DNA, 12 bp, Artificial Sequence
  Oligonucleotide primer for the detection of SNP TSC0037590
catttaacaata

SEQ ID NO: 333535 - DNA, 12 bp, Artificial Sequence
  Oligonucleotide primer for the detection of SNP TSC0037590
aaatgtttttat

SEQ ID NO: 333536 - DNA, 12 bp, Artificial Sequence
  Oligonucleotide primer for the detection of SNP TSC0037595
ctatattaaata

SEQ ID NO: 333537 - DNA, 12 bp, Artificial Sequence
  Oligonucleotide primer for the detection of SNP TSC0037595
tttagagttgta

SEQ ID NO: 333538 - DNA, 12 bp, Artificial Sequence
  Oligonucleotide primer for the detection of SNP TSC0037595
tccaaaactaca

SEQ ID NO: 333539 - DNA, 12 bp, Artificial Sequence
  Oligonucleotide primer for the detection of SNP TSC0037595
attgtattggat

SEQ ID NO: 333540 - DNA, 12 bp, Artificial Sequence
  Oligonucleotide primer for the detection of SNP TSC0037596
tttcctataaaa

SEQ ID NO: 333541 - DNA, 12 bp, Artificial Sequence
  Oligonucleotide primer for the detection of SNP TSC0037596
aacctcctccca

SEQ ID NO: 333542 - DNA, 12 bp, Artificial Sequence
  Oligonucleotide primer for the detection of SNP TSC0037596
tttttgtggaat

SEQ ID NO: 333543 - DNA, 12 bp, Artificial Sequence
  Oligonucleotide primer for the detection of SNP TSC0037598
ttttcttttctt

SEQ ID NO: 333544 - DNA, 12 bp, Artificial Sequence
  Oligonucleotide primer for the detection of SNP TSC0037598
gaggtgtttttg

SEQ ID NO: 333545 - DNA, 12 bp, Artificial Sequence
  Oligonucleotide primer for the detection of SNP TSC0037599
ttaaaaaccaat

SEQ ID NO: 333546 - DNA, 12 bp, Artificial Sequence
  Oligonucleotide primer for the detection of SNP TSC0037599
tctactccacta

SEQ ID NO: 333547 - DNA, 12 bp, Artificial Sequence
  Oligonucleotide primer for the detection of SNP TSC0037599
ttgggggttaat

SEQ ID NO: 333548 - DNA, 12 bp, Artificial Sequence
  Oligonucleotide primer for the detection of SNP TSC0037600
atttaaatataa

SEQ ID NO: 333549 - DNA, 12 bp, Artificial Sequence
  Oligonucleotide primer for the detection of SNP TSC0037600
gagttttttgat

SEQ ID NO: 333550 - DNA, 12 bp, Artificial Sequence
  Oligonucleotide primer for the detection of SNP TSC0037600
gagttttttgac

SEQ ID NO: 333551 - DNA, 12 bp, Artificial Sequence
  Oligonucleotide primer for the detection of SNP TSC0037600
aaaactttctaa

SEQ ID NO: 333552 - DNA, 12 bp, Artificial Sequence
  Oligonucleotide primer for the detection of SNP TSC0037600
gtttaagtgtga

SEQ ID NO: 333553 - DNA, 12 bp, Artificial Sequence
  Oligonucleotide primer for the detection of SNP TSC0037601
atatgtgtatga

SEQ ID NO: 333554 - DNA, 12 bp, Artificial Sequence
  Oligonucleotide primer for the detection of SNP TSC0037601
atatgtgtacga

SEQ ID NO: 333555 - DNA, 12 bp, Artificial Sequence
  Oligonucleotide primer for the detection of SNP TSC0037601
acatatacacaa

SEQ ID NO: 333556 - DNA, 12 bp, Artificial Sequence
  Oligonucleotide primer for the detection of SNP TSC0037601
acatatacacga

SEQ ID NO: 333557 - DNA, 12 bp, Artificial Sequence
  Oligonukleotid-Primer
ataatcactaaa

SEQ ID NO: 333558 - DNA, 12 bp, Artificial Sequence
  Oligonucleotide primer for the detection of SNP TSC0037602
gaaattttattc

SEQ ID NO: 333559 - DNA, 12 bp, Artificial Sequence
  Oligonucleotide primer for the detection of SNP TSC0037602
aaatcccaccca

SEQ ID NO: 333560 - DNA, 12 bp, Artificial Sequence
  Oligonucleotide primer for the detection of SNP TSC0037602
aaatcccacccg

SEQ ID NO: 333561 - DNA, 12 bp, Artificial Sequence
  Oligonucleotide primer for the detection of SNP TSC0037602
gtggttattggg

SEQ ID NO: 333562 - DNA, 12 bp, Artificial Sequence
  Oligonucleotide primer for the detection of SNP TSC0037603
acattaaaacat

SEQ ID NO: 333563 - DNA, 12 bp, Artificial Sequence
  Oligonucleotide primer for the detection of SNP TSC0037603
acattaaaacgt

SEQ ID NO: 333564 - DNA, 12 bp, Artificial Sequence
  Oligonucleotide primer for the detection of SNP TSC0037603
acgttaaaacat

SEQ ID NO: 333565 - DNA, 12 bp, Artificial Sequence
  Oligonucleotide primer for the detection of SNP TSC0037603
acgttaaaacgt

SEQ ID NO: 333566 - DNA, 12 bp, Artificial Sequence
  Oligonucleotide primer for the detection of SNP TSC0037603
gtatattaatta

SEQ ID NO: 333567 - DNA, 12 bp, Artificial Sequence
  Oligonucleotide primer for the detection of SNP TSC0037604
aaattcccaaac

SEQ ID NO: 333568 - DNA, 12 bp, Artificial Sequence
  Oligonucleotide primer for the detection of SNP TSC0037605
ccaaaatatcac

SEQ ID NO: 333569 - DNA, 12 bp, Artificial Sequence
  Oligonucleotide primer for the detection of SNP TSC0037605
ctttatctctca

SEQ ID NO: 333570 - DNA, 12 bp, Artificial Sequence
  Oligonucleotide primer for the detection of SNP TSC0037605
ttagaatgttat

SEQ ID NO: 333571 - DNA, 12 bp, Artificial Sequence
  Oligonucleotide primer for the detection of SNP TSC0037606
tatattcatctc

SEQ ID NO: 333572 - DNA, 12 bp, Artificial Sequence
  Oligonucleotide primer for the detection of SNP TSC0037606
tagtggttgttt

SEQ ID NO: 333573 - DNA, 12 bp, Artificial Sequence
  Oligonucleotide primer for the detection of SNP TSC0037608
tttgtagatttt

SEQ ID NO: 333574 - DNA, 12 bp, Artificial Sequence
  Oligonucleotide primer for the detection of SNP TSC0037608
tataaattctaa

SEQ ID NO: 333575 - DNA, 12 bp, Artificial Sequence
  Oligonucleotide primer for the detection of SNP TSC0037608
taaagggttaat

SEQ ID NO: 333576 - DNA, 12 bp, Artificial Sequence
  Oligonucleotide primer for the detection of SNP TSC0037609
tactctcttcat

SEQ ID NO: 333577 - DNA, 12 bp, Artificial Sequence
  Oligonucleotide primer for the detection of SNP TSC0037609
cttaaatctctt

SEQ ID NO: 333578 - DNA, 12 bp, Artificial Sequence
  Oligonucleotide primer for the detection of SNP TSC0037611
tttcacttcaac

SEQ ID NO: 333579 - DNA, 12 bp, Artificial Sequence
  Oligonucleotide primer for the detection of SNP TSC0037611
ataggataggga

SEQ ID NO: 333580 - DNA, 12 bp, Artificial Sequence
  Oligonucleotide primer for the detection of SNP TSC0037612
aatctaaaacca

SEQ ID NO: 333581 - DNA, 12 bp, Artificial Sequence
  Oligonucleotide primer for the detection of SNP TSC0037614
tattattattac

SEQ ID NO: 333582 - DNA, 12 bp, Artificial Sequence
  Oligonucleotide primer for the detection of SNP TSC0037614
ataggaaattag

SEQ ID NO: 333583 - DNA, 12 bp, Artificial Sequence
  Oligonucleotide primer for the detection of SNP TSC0037616
actaaaactaac

SEQ ID NO: 333584 - DNA, 12 bp, Artificial Sequence
  Oligonucleotide primer for the detection of SNP TSC0037616
gctaaaactaac

SEQ ID NO: 333585 - DNA, 12 bp, Artificial Sequence
  Oligonucleotide primer for the detection of SNP TSC0037616
gttgggattggt

SEQ ID NO: 333586 - DNA, 12 bp, Artificial Sequence
  Oligonucleotide primer for the detection of SNP TSC0037617
aatataacaacc

SEQ ID NO: 333587 - DNA, 12 bp, Artificial Sequence
  Oligonucleotide primer for the detection of SNP TSC0037618
aaaacaaaatac

SEQ ID NO: 333588 - DNA, 12 bp, Artificial Sequence
  Oligonucleotide primer for the detection of SNP TSC0037618
gggagggttaga

SEQ ID NO: 333589 - DNA, 12 bp, Artificial Sequence
  Oligonucleotide primer for the detection of SNP TSC0037618
agagtagaatgt

SEQ ID NO: 333590 - DNA, 12 bp, Artificial Sequence
  Oligonucleotide primer for the detection of SNP TSC0037623
actcccaaactt

SEQ ID NO: 333591 - DNA, 12 bp, Artificial Sequence
  Oligonucleotide primer for the detection of SNP TSC0037623
ataaaagaagtg

SEQ ID NO: 333592 - DNA, 12 bp, Artificial Sequence
  Oligonucleotide primer for the detection of SNP TSC0037623
ataaaagaagcg

SEQ ID NO: 333593 - DNA, 12 bp, Artificial Sequence
  Oligonucleotide primer for the detection of SNP TSC0037624
ttgtgagtgttg

SEQ ID NO: 333594 - DNA, 12 bp, Artificial Sequence
  Oligonucleotide primer for the detection of SNP TSC0037624
tcgtgagtgttg

SEQ ID NO: 333595 - DNA, 12 bp, Artificial Sequence
  Oligonucleotide primer for the detection of SNP TSC0037624
tcataaatatta

SEQ ID NO: 333596 - DNA, 12 bp, Artificial Sequence
  Oligonucleotide primer for the detection of SNP TSC0037624
tcgtaaatatta

SEQ ID NO: 333597 - DNA, 12 bp, Artificial Sequence
  Oligonucleotide primer for the detection of SNP TSC0037624
ataaggtaaagt

SEQ ID NO: 333598 - DNA, 12 bp, Artificial Sequence
  Oligonucleotide primer for the detection of SNP TSC0037625
ctcttttctatt

SEQ ID NO: 333599 - DNA, 12 bp, Artificial Sequence
  Oligonucleotide primer for the detection of SNP TSC0037625
attgtttggagg

SEQ ID NO: 333600 - DNA, 12 bp, Artificial Sequence
  Oligonucleotide primer for the detection of SNP TSC0037625
atcgtttggagg

SEQ ID NO: 333601 - DNA, 12 bp, Artificial Sequence
  Oligonucleotide primer for the detection of SNP TSC0037626
aattcccaacca

SEQ ID NO: 333602 - DNA, 12 bp, Artificial Sequence
  Oligonucleotide primer for the detection of SNP TSC0037626
aattcccgacca

SEQ ID NO: 333603 - DNA, 12 bp, Artificial Sequence
  Oligonucleotide primer for the detection of SNP TSC0037626
ataattatgtgt

SEQ ID NO: 333604 - DNA, 12 bp, Artificial Sequence
  Oligonucleotide primer for the detection of SNP TSC0037626
ataattacgtgt

SEQ ID NO: 333605 - DNA, 12 bp, Artificial Sequence
  Oligonucleotide primer for the detection of SNP TSC0037626
caaccacataca

SEQ ID NO: 333606 - DNA, 12 bp, Artificial Sequence
  Oligonucleotide primer for the detection of SNP TSC0037626
caaccacgtaca

SEQ ID NO: 333607 - DNA, 12 bp, Artificial Sequence
  Oligonucleotide primer for the detection of SNP TSC0037626
aattttcggtta

SEQ ID NO: 333608 - DNA, 12 bp, Artificial Sequence
  Oligonucleotide primer for the detection of SNP TSC0037627
taaaataatatg

SEQ ID NO: 333609 - DNA, 12 bp, Artificial Sequence
  Oligonucleotide primer for the detection of SNP TSC0037634
tacaaattaaca

SEQ ID NO: 333610 - DNA, 12 bp, Artificial Sequence
  Oligonucleotide primer for the detection of SNP TSC0037634
tacgaattaaca

SEQ ID NO: 333611 - DNA, 12 bp, Artificial Sequence
  Oligonucleotide primer for the detection of SNP TSC0037634
tgtagttttttt

SEQ ID NO: 333612 - DNA, 12 bp, Artificial Sequence
  Oligonucleotide primer for the detection of SNP TSC0037634
tataactctttt

SEQ ID NO: 333613 - DNA, 12 bp, Artificial Sequence
  Oligonucleotide primer for the detection of SNP TSC0037634
tatgggttgata

SEQ ID NO: 333614 - DNA, 12 bp, Artificial Sequence
  Oligonucleotide primer for the detection of SNP TSC0037634
tacgggttgata

SEQ ID NO: 333615 - DNA, 12 bp, Artificial Sequence
  Oligonucleotide primer for the detection of SNP TSC0037637
aaaataacacac

SEQ ID NO: 333616 - DNA, 12 bp, Artificial Sequence
  Oligonucleotide primer for the detection of SNP TSC0037637
gaggtagtatat

SEQ ID NO: 333617 - DNA, 12 bp, Artificial Sequence
  Oligonucleotide primer for the detection of SNP TSC0037639
aaatcttactac

SEQ ID NO: 333618 - DNA, 12 bp, Artificial Sequence
  Oligonucleotide primer for the detection of SNP TSC0037639
ttgagtatagga

SEQ ID NO: 333619 - DNA, 12 bp, Artificial Sequence
  Oligonucleotide primer for the detection of SNP TSC0037646
atataattaaca

SEQ ID NO: 333620 - DNA, 12 bp, Artificial Sequence
  Oligonucleotide primer for the detection of SNP TSC0037646
atattaatatga

SEQ ID NO: 333621 - DNA, 12 bp, Artificial Sequence
  Oligonucleotide primer for the detection of SNP TSC0037646
atattaacataa

SEQ ID NO: 333622 - DNA, 12 bp, Artificial Sequence
  Oligonucleotide primer for the detection of SNP TSC0037646
tatgtggttgat

SEQ ID NO: 333623 - DNA, 12 bp, Artificial Sequence
  Oligonucleotide primer for the detection of SNP TSC0037647
tttttgataaat

SEQ ID NO: 333624 - DNA, 12 bp, Artificial Sequence
  Oligonucleotide primer for the detection of SNP TSC0037647
cttctaataaat

SEQ ID NO: 333625 - DNA, 12 bp, Artificial Sequence
  Oligonucleotide primer for the detection of SNP TSC0037647
gatgttagaaag

SEQ ID NO: 333626 - DNA, 12 bp, Artificial Sequence
  Oligonucleotide primer for the detection of SNP TSC0037648
aaacatctaaaa

SEQ ID NO: 333627 - DNA, 12 bp, Artificial Sequence
  Oligonucleotide primer for the detection of SNP TSC0037648
caaaccatttac

SEQ ID NO: 333628 - DNA, 12 bp, Artificial Sequence
  Oligonucleotide primer for the detection of SNP TSC0037648
gaggatatttgg

SEQ ID NO: 333629 - DNA, 12 bp, Artificial Sequence
  Oligonucleotide primer for the detection of SNP TSC0037653
aaatttctccat

SEQ ID NO: 333630 - DNA, 12 bp, Artificial Sequence
  Oligonucleotide primer for the detection of SNP TSC0037653
tagtttgattaa

SEQ ID NO: 333631 - DNA, 12 bp, Artificial Sequence
  Oligonucleotide primer for the detection of SNP TSC0037653
gggtttttttat

SEQ ID NO: 333632 - DNA, 12 bp, Artificial Sequence
  Oligonucleotide primer for the detection of SNP TSC0037655
caacctcaaatt

SEQ ID NO: 333633 - DNA, 12 bp, Artificial Sequence
  Oligonucleotide primer for the detection of SNP TSC0037655
cttctttacaaa

SEQ ID NO: 333634 - DNA, 12 bp, Artificial Sequence
  Oligonucleotide primer for the detection of SNP TSC0037655
tagttttaaatt

SEQ ID NO: 333635 - DNA, 12 bp, Artificial Sequence
  Oligonucleotide primer for the detection of SNP TSC0037656
caaaaataattc

SEQ ID NO: 333636 - DNA, 12 bp, Artificial Sequence
  Oligonucleotide primer for the detection of SNP TSC0037659
aaattatttgga

SEQ ID NO: 333637 - DNA, 12 bp, Artificial Sequence
  Oligonucleotide primer for the detection of SNP TSC0037659
aaatcatttaaa

SEQ ID NO: 333638 - DNA, 12 bp, Artificial Sequence
  Oligonucleotide primer for the detection of SNP TSC0037659
atttaaggtttt

SEQ ID NO: 333639 - DNA, 12 bp, Artificial Sequence
  Oligonucleotide primer for the detection of SNP TSC0037660
agatattttaga

SEQ ID NO: 333640 - DNA, 12 bp, Artificial Sequence
  Oligonucleotide primer for the detection of SNP TSC0037661
ccccacacttca

SEQ ID NO: 333641 - DNA, 12 bp, Artificial Sequence
  Oligonucleotide primer for the detection of SNP TSC0037661
ttggaattaaat

SEQ ID NO: 333642 - DNA, 12 bp, Artificial Sequence
  Oligonucleotide primer for the detection of SNP TSC0037662
ccacaataaaac

SEQ ID NO: 333643 - DNA, 12 bp, Artificial Sequence
  Oligonucleotide primer for the detection of SNP TSC0037665
atcaaaaccaaa

SEQ ID NO: 333644 - DNA, 12 bp, Artificial Sequence
  Oligonucleotide primer for the detection of SNP TSC0037665
gtaagagtaaat

SEQ ID NO: 333645 - DNA, 12 bp, Artificial Sequence
  Oligonucleotide primer for the detection of SNP TSC0037665
aattaagattag

SEQ ID NO: 333646 - DNA, 12 bp, Artificial Sequence
  Oligonucleotide primer for the detection of SNP TSC0037666
caaatataaaat

SEQ ID NO: 333647 - DNA, 12 bp, Artificial Sequence
  Oligonucleotide primer for the detection of SNP TSC0037666
tttatgttttta

SEQ ID NO: 333648 - DNA, 12 bp, Artificial Sequence
  Oligonucleotide primer for the detection of SNP TSC0037667
ctaaaaatctta

SEQ ID NO: 333649 - DNA, 12 bp, Artificial Sequence
  Oligonucleotide primer for the detection of SNP TSC0037667
aagtttggattt

SEQ ID NO: 333650 - DNA, 12 bp, Artificial Sequence
  Oligonucleotide primer for the detection of SNP TSC0037667
aaacctaaactt

SEQ ID NO: 333651 - DNA, 12 bp, Artificial Sequence
  Oligonucleotide primer for the detection of SNP TSC0037674
taatgattttta

SEQ ID NO: 333652 - DNA, 12 bp, Artificial Sequence
  Oligonucleotide primer for the detection of SNP TSC0037675
taatataaaccc

SEQ ID NO: 333653 - DNA, 12 bp, Artificial Sequence
  Oligonucleotide primer for the detection of SNP TSC0037675
tttgagttaaaa

SEQ ID NO: 333654 - DNA, 12 bp, Artificial Sequence
  Oligonucleotide primer for the detection of SNP TSC0037683
tgttaggagtaa

SEQ ID NO: 333655 - DNA, 12 bp, Artificial Sequence
  Oligonucleotide primer for the detection of SNP TSC0037684
aaaacaaataat

SEQ ID NO: 333656 - DNA, 12 bp, Artificial Sequence
  Oligonucleotide primer for the detection of SNP TSC0037684
taatatttgtaa

SEQ ID NO: 333657 - DNA, 12 bp, Artificial Sequence
  Oligonucleotide primer for the detection of SNP TSC0037684
taacatttataa

SEQ ID NO: 333658 - DNA, 12 bp, Artificial Sequence
  Oligonucleotide primer for the detection of SNP TSC0037684
aaaataaatagt

SEQ ID NO: 333659 - DNA, 12 bp, Artificial Sequence
  Oligonucleotide primer for the detection of SNP TSC0037685
tatccattttca

SEQ ID NO: 333660 - DNA, 12 bp, Artificial Sequence
  Oligonucleotide primer for the detection of SNP TSC0037688
aaaaaccgaaac

SEQ ID NO: 333661 - DNA, 12 bp, Artificial Sequence
  Oligonucleotide primer for the detection of SNP TSC0037688
ttgattttatga

SEQ ID NO: 333662 - DNA, 12 bp, Artificial Sequence
  Oligonucleotide primer for the detection of SNP TSC0037688
ggaagttgagat

SEQ ID NO: 333663 - DNA, 12 bp, Artificial Sequence
  Oligonucleotide primer for the detection of SNP TSC0037688
ggaagtcgagat

SEQ ID NO: 333664 - DNA, 12 bp, Artificial Sequence
  Oligonucleotide primer for the detection of SNP TSC0037688
ggaagttgagac

SEQ ID NO: 333665 - DNA, 12 bp, Artificial Sequence
  Oligonucleotide primer for the detection of SNP TSC0037688
ggaagtcgagac

SEQ ID NO: 333666 - DNA, 12 bp, Artificial Sequence
  Oligonucleotide primer for the detection of SNP TSC0037689
atttttaataac

SEQ ID NO: 333667 - DNA, 12 bp, Artificial Sequence
  Oligonucleotide primer for the detection of SNP TSC0037689
ctttctaatcca

SEQ ID NO: 333668 - DNA, 12 bp, Artificial Sequence
  Oligonucleotide primer for the detection of SNP TSC0037689
tttttggtaatt

SEQ ID NO: 333669 - DNA, 12 bp, Artificial Sequence
  Oligonucleotide primer for the detection of SNP TSC0037690
actaaatatcaa

SEQ ID NO: 333670 - DNA, 12 bp, Artificial Sequence
  Oligonucleotide primer for the detection of SNP TSC0037690
gtaaaaaatttg

SEQ ID NO: 333671 - DNA, 12 bp, Artificial Sequence
  Oligonucleotide primer for the detection of SNP TSC0037690
attgagtgttag

SEQ ID NO: 333672 - DNA, 12 bp, Artificial Sequence
  Oligonucleotide primer for the detection of SNP TSC0037691
aatacctcccca

SEQ ID NO: 333673 - DNA, 12 bp, Artificial Sequence
  Oligonucleotide primer for the detection of SNP TSC0037691
aatacctccccg

SEQ ID NO: 333674 - DNA, 12 bp, Artificial Sequence
  Oligonucleotide primer for the detection of SNP TSC0037691
atttgtgttttt

SEQ ID NO: 333675 - DNA, 12 bp, Artificial Sequence
  Oligonucleotide primer for the detection of SNP TSC0037691
attcgtgttttt

SEQ ID NO: 333676 - DNA, 12 bp, Artificial Sequence
  Oligonucleotide primer for the detection of SNP TSC0037691
attcatatctcc

SEQ ID NO: 333677 - DNA, 12 bp, Artificial Sequence
  Oligonucleotide primer for the detection of SNP TSC0037691
attcgtatctcc

SEQ ID NO: 333678 - DNA, 12 bp, Artificial Sequence
  Oligonucleotide primer for the detection of SNP TSC0037691
aatgtttttttg

SEQ ID NO: 333679 - DNA, 12 bp, Artificial Sequence
  Oligonucleotide primer for the detection of SNP TSC0037691
aatgttttttcg

SEQ ID NO: 333680 - DNA, 12 bp, Artificial Sequence
  Oligonucleotide primer for the detection of SNP TSC0037692
ctcctcattccc

SEQ ID NO: 333681 - DNA, 12 bp, Artificial Sequence
  Oligonucleotide primer for the detection of SNP TSC0037692
taggataggaaa

SEQ ID NO: 333682 - DNA, 12 bp, Artificial Sequence
  Oligonucleotide primer for the detection of SNP TSC0037695
attccaacaaca

SEQ ID NO: 333683 - DNA, 12 bp, Artificial Sequence
  Oligonucleotide primer for the detection of SNP TSC0037695
ttgtttatatat

SEQ ID NO: 333684 - DNA, 12 bp, Artificial Sequence
  Oligonucleotide primer for the detection of SNP TSC0037695
ttgtttatatac

SEQ ID NO: 333685 - DNA, 12 bp, Artificial Sequence
  Oligonucleotide primer for the detection of SNP TSC0037695
attacttataca

SEQ ID NO: 333686 - DNA, 12 bp, Artificial Sequence
  Oligonukleotid-Primer
tagaaagttgta

SEQ ID NO: 333687 - DNA, 12 bp, Artificial Sequence
  Oligonucleotide primer for the detection of SNP TSC0037701
ccttccctaaca

SEQ ID NO: 333688 - DNA, 12 bp, Artificial Sequence
  Oligonucleotide primer for the detection of SNP TSC0037701
atatgtgggttg

SEQ ID NO: 333689 - DNA, 12 bp, Artificial Sequence
  unsure (1..2, 7): Oligonucleotide primer for the detection of SNP TSC0037702
nnncacncacac

SEQ ID NO: 333690 - DNA, 12 bp, Artificial Sequence
  Oligonucleotide primer for the detection of SNP TSC0037703
aatcaatccaaa

SEQ ID NO: 333691 - DNA, 12 bp, Artificial Sequence
  Oligonucleotide primer for the detection of SNP TSC0037703
agaaggaattgt

SEQ ID NO: 333692 - DNA, 12 bp, Artificial Sequence
  Oligonucleotide primer for the detection of SNP TSC0037703
agttagtttagg

SEQ ID NO: 333693 - DNA, 12 bp, Artificial Sequence
  Oligonucleotide primer for the detection of SNP TSC0037707
ccatttaattta

SEQ ID NO: 333694 - DNA, 12 bp, Artificial Sequence
  Oligonukleotid-Primer
cacataccttac

SEQ ID NO: 333695 - DNA, 12 bp, Artificial Sequence
  Oligonucleotide primer for the detection of SNP TSC0037707
ttatttaatttg

SEQ ID NO: 333696 - DNA, 12 bp, Artificial Sequence
  Oligonucleotide primer for the detection of SNP TSC0037708
atcattatacta

SEQ ID NO: 333697 - DNA, 12 bp, Artificial Sequence
  Oligonucleotide primer for the detection of SNP TSC0037708
taaaaattatct

SEQ ID NO: 333698 - DNA, 12 bp, Artificial Sequence
  Oligonucleotide primer for the detection of SNP TSC0037708
attattgtgttg

SEQ ID NO: 333699 - DNA, 12 bp, Artificial Sequence
  Oligonucleotide primer for the detection of SNP TSC0037710
atcaaaaccact

SEQ ID NO: 333700 - DNA, 12 bp, Artificial Sequence
  Oligonucleotide primer for the detection of SNP TSC0037710
atcaaaaccgct

SEQ ID NO: 333701 - DNA, 12 bp, Artificial Sequence
  Oligonucleotide primer for the detection of SNP TSC0037710
agtatagttgga

SEQ ID NO: 333702 - DNA, 12 bp, Artificial Sequence
  Oligonucleotide primer for the detection of SNP TSC0037711
aaattaacaaat

SEQ ID NO: 333703 - DNA, 12 bp, Artificial Sequence
  Oligonucleotide primer for the detection of SNP TSC0037711
gttagaatatta

SEQ ID NO: 333704 - DNA, 12 bp, Artificial Sequence
  Oligonucleotide primer for the detection of SNP TSC0037713
attcacccattc

SEQ ID NO: 333705 - DNA, 12 bp, Artificial Sequence
  Oligonucleotide primer for the detection of SNP TSC0037713
attcacccgttc

SEQ ID NO: 333706 - DNA, 12 bp, Artificial Sequence
  Oligonucleotide primer for the detection of SNP TSC0037713
gttttatgatag

SEQ ID NO: 333707 - DNA, 12 bp, Artificial Sequence
  Oligonucleotide primer for the detection of SNP TSC0037714
aactctaactat

SEQ ID NO: 333708 - DNA, 12 bp, Artificial Sequence
  Oligonucleotide primer for the detection of SNP TSC0037715
aaacctaacttt

SEQ ID NO: 333709 - DNA, 12 bp, Artificial Sequence
  Oligonucleotide primer for the detection of SNP TSC0037715
tttgatagaata

SEQ ID NO: 333710 - DNA, 12 bp, Artificial Sequence
  Oligonukleotid-Primer
tatatcaaaatt

SEQ ID NO: 333711 - DNA, 12 bp, Artificial Sequence
  Oligonucleotide primer for the detection of SNP TSC0037716
gaagtagatgta

SEQ ID NO: 333712 - DNA, 12 bp, Artificial Sequence
  Oligonucleotide primer for the detection of SNP TSC0037718
aaccaaaccaat

SEQ ID NO: 333713 - DNA, 12 bp, Artificial Sequence
  Oligonucleotide primer for the detection of SNP TSC0037718
ttaggtatgagt

SEQ ID NO: 333714 - DNA, 12 bp, Artificial Sequence
  Oligonukleotid-Primer
tcaaatataaac

SEQ ID NO: 333715 - DNA, 12 bp, Artificial Sequence
  Oligonucleotide primer for the detection of SNP TSC0037718
ggttaggttaat

SEQ ID NO: 333716 - DNA, 12 bp, Artificial Sequence
  Oligonucleotide primer for the detection of SNP TSC0037719
tctccatatata

SEQ ID NO: 333717 - DNA, 12 bp, Artificial Sequence
  Oligonucleotide primer for the detection of SNP TSC0037720
aaaactataatt

SEQ ID NO: 333718 - DNA, 12 bp, Artificial Sequence
  Oligonukleotid-Primer
ttgttttaataa

SEQ ID NO: 333719 - DNA, 12 bp, Artificial Sequence
  Oligonucleotide primer for the detection of SNP TSC0037721
cctaatatcata

SEQ ID NO: 333720 - DNA, 12 bp, Artificial Sequence
  Oligonucleotide primer for the detection of SNP TSC0037721
attttagaggtt

SEQ ID NO: 333721 - DNA, 12 bp, Artificial Sequence
  Oligonucleotide primer for the detection of SNP TSC0037721
ttccaaaaatca

SEQ ID NO: 333722 - DNA, 12 bp, Artificial Sequence
  Oligonucleotide primer for the detection of SNP TSC0037721
ttggtattatgt

SEQ ID NO: 333723 - DNA, 12 bp, Artificial Sequence
  Oligonucleotide primer for the detection of SNP TSC0037725
tctctatcaatc

SEQ ID NO: 333724 - DNA, 12 bp, Artificial Sequence
  Oligonucleotide primer for the detection of SNP TSC0037725
tgagttatagga

SEQ ID NO: 333725 - DNA, 12 bp, Artificial Sequence
  Oligonucleotide primer for the detection of SNP TSC0037726
catttataaaat

SEQ ID NO: 333726 - DNA, 12 bp, Artificial Sequence
  Oligonukleotid-Primer
tagaaatgatgg

SEQ ID NO: 333727 - DNA, 12 bp, Artificial Sequence
  Oligonucleotide primer for the detection of SNP TSC0037726
tagaaacgatgg

SEQ ID NO: 333728 - DNA, 12 bp, Artificial Sequence
  Oligonucleotide primer for the detection of SNP TSC0037728
acaacatcatca

SEQ ID NO: 333729 - DNA, 12 bp, Artificial Sequence
  Oligonucleotide primer for the detection of SNP TSC0037728
gtaaagttgtat

SEQ ID NO: 333730 - DNA, 12 bp, Artificial Sequence
  Oligonucleotide primer for the detection of SNP TSC0037728
acaaaactacac

SEQ ID NO: 333731 - DNA, 12 bp, Artificial Sequence
  Oligonucleotide primer for the detection of SNP TSC0037728
ggtagtattatt

SEQ ID NO: 333732 - DNA, 12 bp, Artificial Sequence
  Oligonucleotide primer for the detection of SNP TSC0037729
aatacatactca

SEQ ID NO: 333733 - DNA, 12 bp, Artificial Sequence
  Oligonucleotide primer for the detection of SNP TSC0037729
gatacatactca

SEQ ID NO: 333734 - DNA, 12 bp, Artificial Sequence
  Oligonucleotide primer for the detection of SNP TSC0037729
gttttagtatgt

SEQ ID NO: 333735 - DNA, 12 bp, Artificial Sequence
  Oligonucleotide primer for the detection of SNP TSC0037729
actccaacatac

SEQ ID NO: 333736 - DNA, 12 bp, Artificial Sequence
  Oligonucleotide primer for the detection of SNP TSC0037729
ggtgtatgttta

SEQ ID NO: 333737 - DNA, 12 bp, Artificial Sequence
  Oligonucleotide primer for the detection of SNP TSC0037731
aaactaaaccct

SEQ ID NO: 333738 - DNA, 12 bp, Artificial Sequence
  Oligonucleotide primer for the detection of SNP TSC0037731
ttttatatagaa

SEQ ID NO: 333739 - DNA, 12 bp, Artificial Sequence
  Oligonucleotide primer for the detection of SNP TSC0037732
aaaacacctttt

SEQ ID NO: 333740 - DNA, 12 bp, Artificial Sequence
  Oligonucleotide primer for the detection of SNP TSC0037732
tattaatttagg

SEQ ID NO: 333741 - DNA, 12 bp, Artificial Sequence
  Oligonucleotide primer for the detection of SNP TSC0037733
acttttctaatc

SEQ ID NO: 333742 - DNA, 12 bp, Artificial Sequence
  Oligonucleotide primer for the detection of SNP TSC0037734
aaatcaaactat

SEQ ID NO: 333743 - DNA, 12 bp, Artificial Sequence
  Oligonucleotide primer for the detection of SNP TSC0037734
gaatcaaactat

SEQ ID NO: 333744 - DNA, 12 bp, Artificial Sequence
  Oligonucleotide primer for the detection of SNP TSC0037734
taggagaatttt

SEQ ID NO: 333745 - DNA, 12 bp, Artificial Sequence
  Oligonucleotide primer for the detection of SNP TSC0037738
gttagattagtt

SEQ ID NO: 333746 - DNA, 12 bp, Artificial Sequence
  Oligonucleotide primer for the detection of SNP TSC0037738
atcaaatcaatc

SEQ ID NO: 333747 - DNA, 12 bp, Artificial Sequence
  Oligonucleotide primer for the detection of SNP TSC0037738
ataggtgaaggg

SEQ ID NO: 333748 - DNA, 12 bp, Artificial Sequence
  Oligonucleotide primer for the detection of SNP TSC0037739
aaatctacaccc

SEQ ID NO: 333749 - DNA, 12 bp, Artificial Sequence
  Oligonucleotide primer for the detection of SNP TSC0037739
aaatctacgccc

SEQ ID NO: 333750 - DNA, 12 bp, Artificial Sequence
  Oligonucleotide primer for the detection of SNP TSC0037739
tgtgtgaggagg

SEQ ID NO: 333751 - DNA, 12 bp, Artificial Sequence
  Oligonucleotide primer for the detection of SNP TSC0037740
aattatatacac

SEQ ID NO: 333752 - DNA, 12 bp, Artificial Sequence
  Oligonucleotide primer for the detection of SNP TSC0037740
tttaagagttgg

SEQ ID NO: 333753 - DNA, 12 bp, Artificial Sequence
  Oligonucleotide primer for the detection of SNP TSC0037741
ttcactatattt

SEQ ID NO: 333754 - DNA, 12 bp, Artificial Sequence
  Oligonucleotide primer for the detection of SNP TSC0037741
ttcgctatattt

SEQ ID NO: 333755 - DNA, 12 bp, Artificial Sequence
  Oligonucleotide primer for the detection of SNP TSC0037741
aaagatggtagt

SEQ ID NO: 333756 - DNA, 12 bp, Artificial Sequence
  Oligonucleotide primer for the detection of SNP TSC0037741
aaagacggtagt

SEQ ID NO: 333757 - DNA, 12 bp, Artificial Sequence
  Oligonucleotide primer for the detection of SNP TSC0037742
agttttgagtta

SEQ ID NO: 333758 - DNA, 12 bp, Artificial Sequence
  Oligonucleotide primer for the detection of SNP TSC0037742
aaccctaaacca

SEQ ID NO: 333759 - DNA, 12 bp, Artificial Sequence
  Oligonucleotide primer for the detection of SNP TSC0037742
ttaggattttgc

SEQ ID NO: 333760 - DNA, 12 bp, Artificial Sequence
  Oligonucleotide primer for the detection of SNP TSC0037743
taatatatatac

SEQ ID NO: 333761 - DNA, 12 bp, Artificial Sequence
  Oligonucleotide primer for the detection of SNP TSC0037743
ggatgtaatatg

SEQ ID NO: 333762 - DNA, 12 bp, Artificial Sequence
  Oligonucleotide primer for the detection of SNP TSC0037743
aaatacaacata

SEQ ID NO: 333763 - DNA, 12 bp, Artificial Sequence
  Oligonucleotide primer for the detection of SNP TSC0037743
tggtgtgtgtgt

SEQ ID NO: 333764 - DNA, 12 bp, Artificial Sequence
  Oligonucleotide primer for the detection of SNP TSC0037744
taaacaaaaacc

SEQ ID NO: 333765 - DNA, 12 bp, Artificial Sequence
  Oligonucleotide primer for the detection of SNP TSC0037744
aaccctctatca

SEQ ID NO: 333766 - DNA, 12 bp, Artificial Sequence
  Oligonucleotide primer for the detection of SNP TSC0037744
tgagtaaaggtt

SEQ ID NO: 333767 - DNA, 12 bp, Artificial Sequence
  Oligonucleotide primer for the detection of SNP TSC0037745
tctttttcttta

SEQ ID NO: 333768 - DNA, 12 bp, Artificial Sequence
  Oligonucleotide primer for the detection of SNP TSC0037745
aagaaatgtgtt

SEQ ID NO: 333769 - DNA, 12 bp, Artificial Sequence
  Oligonucleotide primer for the detection of SNP TSC0037746
tgtagagacggg

SEQ ID NO: 333770 - DNA, 12 bp, Artificial Sequence
  Oligonucleotide primer for the detection of SNP TSC0037747
tcaaacaacttt

SEQ ID NO: 333771 - DNA, 12 bp, Artificial Sequence
  Oligonucleotide primer for the detection of SNP TSC0037747
tcaaacgacttt

SEQ ID NO: 333772 - DNA, 12 bp, Artificial Sequence
  Oligonucleotide primer for the detection of SNP TSC0037747
aggttgaggtag

SEQ ID NO: 333773 - DNA, 12 bp, Artificial Sequence
  Oligonucleotide primer for the detection of SNP TSC0037749
tattatcaaatc

SEQ ID NO: 333774 - DNA, 12 bp, Artificial Sequence
  Oligonucleotide primer for the detection of SNP TSC0037749
tattatcgaatc

SEQ ID NO: 333775 - DNA, 12 bp, Artificial Sequence
  Oligonucleotide primer for the detection of SNP TSC0037749
gttattgattga

SEQ ID NO: 333776 - DNA, 12 bp, Artificial Sequence
  Oligonucleotide primer for the detection of SNP TSC0037750
ttaaccacaata

SEQ ID NO: 333777 - DNA, 12 bp, Artificial Sequence
  Oligonucleotide primer for the detection of SNP TSC0037750
aatgatttgata

SEQ ID NO: 333778 - DNA, 12 bp, Artificial Sequence
  Oligonucleotide primer for the detection of SNP TSC0037750
aatgattcgata

SEQ ID NO: 333779 - DNA, 12 bp, Artificial Sequence
  Oligonucleotide primer for the detection of SNP TSC0037750
aataactcaaca

SEQ ID NO: 333780 - DNA, 12 bp, Artificial Sequence
  Oligonucleotide primer for the detection of SNP TSC0037750
aataactcgaca

SEQ ID NO: 333781 - DNA, 12 bp, Artificial Sequence
  Oligonucleotide primer for the detection of SNP TSC0037750
gttagttataat

SEQ ID NO: 333782 - DNA, 12 bp, Artificial Sequence
  Oligonucleotide primer for the detection of SNP TSC0037752
aatatatcaccc

SEQ ID NO: 333783 - DNA, 12 bp, Artificial Sequence
  Oligonucleotide primer for the detection of SNP TSC0037752
aatatatcgccc

SEQ ID NO: 333784 - DNA, 12 bp, Artificial Sequence
  Oligonucleotide primer for the detection of SNP TSC0037752
tgttgtttttta

SEQ ID NO: 333785 - DNA, 12 bp, Artificial Sequence
  Oligonucleotide primer for the detection of SNP TSC0037754
aaaaaaaactac

SEQ ID NO: 333786 - DNA, 12 bp, Artificial Sequence
  Oligonucleotide primer for the detection of SNP TSC0037755
aatacataaacc

SEQ ID NO: 333787 - DNA, 12 bp, Artificial Sequence
  Oligonucleotide primer for the detection of SNP TSC0037755
ttataattaggg

SEQ ID NO: 333788 - DNA, 12 bp, Artificial Sequence
  Oligonucleotide primer for the detection of SNP TSC0037758
ttaaactataac

SEQ ID NO: 333789 - DNA, 12 bp, Artificial Sequence
  Oligonucleotide primer for the detection of SNP TSC0037758
tgtttgattata

SEQ ID NO: 333790 - DNA, 12 bp, Artificial Sequence
  Oligonucleotide primer for the detection of SNP TSC0037758
cgtttgattata

SEQ ID NO: 333791 - DNA, 12 bp, Artificial Sequence
  Oligonucleotide primer for the detection of SNP TSC0037758
tgttcgattata

SEQ ID NO: 333792 - DNA, 12 bp, Artificial Sequence
  Oligonucleotide primer for the detection of SNP TSC0037758
cgttcgattata

SEQ ID NO: 333793 - DNA, 12 bp, Artificial Sequence
  Oligonucleotide primer for the detection of SNP TSC0037759
tttccatctttc

SEQ ID NO: 333794 - DNA, 12 bp, Artificial Sequence
  Oligonucleotide primer for the detection of SNP TSC0037759
tatgaaaaataa

SEQ ID NO: 333795 - DNA, 12 bp, Artificial Sequence
  Oligonucleotide primer for the detection of SNP TSC0037760
attagtatatat

SEQ ID NO: 333796 - DNA, 12 bp, Artificial Sequence
  Oligonucleotide primer for the detection of SNP TSC0037760
ttaacatacata

SEQ ID NO: 333797 - DNA, 12 bp, Artificial Sequence
  Oligonucleotide primer for the detection of SNP TSC0037760
attacgtttagt

SEQ ID NO: 333798 - DNA, 12 bp, Artificial Sequence
  Oligonucleotide primer for the detection of SNP TSC0037760
attatgtttagc

SEQ ID NO: 333799 - DNA, 12 bp, Artificial Sequence
  Oligonucleotide primer for the detection of SNP TSC0037760
attacgtttagc

SEQ ID NO: 333800 - DNA, 12 bp, Artificial Sequence
  Oligonucleotide primer for the detection of SNP TSC0037762
aaaaaaactcaa

SEQ ID NO: 333801 - DNA, 12 bp, Artificial Sequence
  Oligonucleotide primer for the detection of SNP TSC0037762
ttaggtaagtta

SEQ ID NO: 333802 - DNA, 12 bp, Artificial Sequence
  Oligonucleotide primer for the detection of SNP TSC0037762
ttaaacaaatca

SEQ ID NO: 333803 - DNA, 12 bp, Artificial Sequence
  Oligonucleotide primer for the detection of SNP TSC0037762
aaagaggtttag

SEQ ID NO: 333804 - DNA, 12 bp, Artificial Sequence
  Oligonucleotide primer for the detection of SNP TSC0037765
attttaccactt

SEQ ID NO: 333805 - DNA, 12 bp, Artificial Sequence
  Oligonucleotide primer for the detection of SNP TSC0037765
ttgtatagttag

SEQ ID NO: 333806 - DNA, 12 bp, Artificial Sequence
  Oligonucleotide primer for the detection of SNP TSC0037766
gaggtttgagtg

SEQ ID NO: 333807 - DNA, 12 bp, Artificial Sequence
  Oligonucleotide primer for the detection of SNP TSC0037766
gaggttcgagtg

SEQ ID NO: 333808 - DNA, 12 bp, Artificial Sequence
  Oligonucleotide primer for the detection of SNP TSC0037766
gaggtttgagcg

SEQ ID NO: 333809 - DNA, 12 bp, Artificial Sequence
  Oligonucleotide primer for the detection of SNP TSC0037766
gaggttcgagcg

SEQ ID NO: 333810 - DNA, 12 bp, Artificial Sequence
  Oligonucleotide primer for the detection of SNP TSC0037766
aaaacccaaaca

SEQ ID NO: 333811 - DNA, 12 bp, Artificial Sequence
  Oligonucleotide primer for the detection of SNP TSC0037766
aaaacccaaacg

SEQ ID NO: 333812 - DNA, 12 bp, Artificial Sequence
  Oligonucleotide primer for the detection of SNP TSC0037766
aaaacccgaaca

SEQ ID NO: 333813 - DNA, 12 bp, Artificial Sequence
  Oligonucleotide primer for the detection of SNP TSC0037766
aaaacccgaacg

SEQ ID NO: 333814 - DNA, 12 bp, Artificial Sequence
  Oligonucleotide primer for the detection of SNP TSC0037766
ggtgatttattt

SEQ ID NO: 333815 - DNA, 12 bp, Artificial Sequence
  Oligonukleotid-Primer
ggtgatttattc

SEQ ID NO: 333816 - DNA, 12 bp, Artificial Sequence
  Oligonucleotide primer for the detection of SNP TSC0037768
tatttataaaat

SEQ ID NO: 333817 - DNA, 12 bp, Artificial Sequence
  Oligonucleotide primer for the detection of SNP TSC0037768
tgtttataaggt

SEQ ID NO: 333818 - DNA, 12 bp, Artificial Sequence
  Oligonucleotide primer for the detection of SNP TSC0037769
catttctcactc

SEQ ID NO: 333819 - DNA, 12 bp, Artificial Sequence
  Oligonucleotide primer for the detection of SNP TSC0037769
ggattaagaatg

SEQ ID NO: 333820 - DNA, 12 bp, Artificial Sequence
  Oligonucleotide primer for the detection of SNP TSC0037770
tatttcctacaa

SEQ ID NO: 333821 - DNA, 12 bp, Artificial Sequence
  Oligonucleotide primer for the detection of SNP TSC0037770
tatttcctacga

SEQ ID NO: 333822 - DNA, 12 bp, Artificial Sequence
  Oligonucleotide primer for the detection of SNP TSC0037770
tagttgtgtgga

SEQ ID NO: 333823 - DNA, 12 bp, Artificial Sequence
  Oligonucleotide primer for the detection of SNP TSC0037771
aaatactacata

SEQ ID NO: 333824 - DNA, 12 bp, Artificial Sequence
  Oligonucleotide primer for the detection of SNP TSC0037771
ttttagtaggag

SEQ ID NO: 333825 - DNA, 12 bp, Artificial Sequence
  Oligonucleotide primer for the detection of SNP TSC0037771
tcccaacaaaaa

SEQ ID NO: 333826 - DNA, 12 bp, Artificial Sequence
  Oligonucleotide primer for the detection of SNP TSC0037771
aagtgttatatg

SEQ ID NO: 333827 - DNA, 12 bp, Artificial Sequence
  Oligonukleotid-Primer
tcaaattaataa

SEQ ID NO: 333828 - DNA, 12 bp, Artificial Sequence
  Oligonucleotide primer for the detection of SNP TSC0037772
aagggaggagag

SEQ ID NO: 333829 - DNA, 12 bp, Artificial Sequence
  Oligonucleotide primer for the detection of SNP TSC0037772
gttagattagta

SEQ ID NO: 333830 - DNA, 12 bp, Artificial Sequence
  Oligonucleotide primer for the detection of SNP TSC0037774
cttcaactcaca

SEQ ID NO: 333831 - DNA, 12 bp, Artificial Sequence
  Oligonukleotid-Primer
cttcgactcaca

SEQ ID NO: 333832 - DNA, 12 bp, Artificial Sequence
  Oligonucleotide primer for the detection of SNP TSC0037774
cgtgtagtttat

SEQ ID NO: 333833 - DNA, 12 bp, Artificial Sequence
  Oligonucleotide primer for the detection of SNP TSC0037774
catacaacccac

SEQ ID NO: 333834 - DNA, 12 bp, Artificial Sequence
  Oligonucleotide primer for the detection of SNP TSC0037774
cgtacaacccac

SEQ ID NO: 333835 - DNA, 12 bp, Artificial Sequence
  Oligonucleotide primer for the detection of SNP TSC0037774
tttcggtttata

SEQ ID NO: 333836 - DNA, 12 bp, Artificial Sequence
  Oligonucleotide primer for the detection of SNP TSC0037777
aaattaacaacc

SEQ ID NO: 333837 - DNA, 12 bp, Artificial Sequence
  Oligonucleotide primer for the detection of SNP TSC0037777
aaattaacgacc

SEQ ID NO: 333838 - DNA, 12 bp, Artificial Sequence
  Oligonucleotide primer for the detection of SNP TSC0037777
tagtaaagataa

SEQ ID NO: 333839 - DNA, 12 bp, Artificial Sequence
  Oligonucleotide primer for the detection of SNP TSC0037777
agattaatgatt

SEQ ID NO: 333840 - DNA, 12 bp, Artificial Sequence
  Oligonucleotide primer for the detection of SNP TSC0037777
agattaacgatt

SEQ ID NO: 333841 - DNA, 12 bp, Artificial Sequence
  Oligonucleotide primer for the detection of SNP TSC0037778
attataacactt

SEQ ID NO: 333842 - DNA, 12 bp, Artificial Sequence
  Oligonucleotide primer for the detection of SNP TSC0037778
atatatagttta

SEQ ID NO: 333843 - DNA, 12 bp, Artificial Sequence
  Oligonucleotide primer for the detection of SNP TSC0037779
atcaataattaa

SEQ ID NO: 333844 - DNA, 12 bp, Artificial Sequence
  Oligonucleotide primer for the detection of SNP TSC0037779
gagaagtaatta

SEQ ID NO: 333845 - DNA, 12 bp, Artificial Sequence
  Oligonucleotide primer for the detection of SNP TSC0037779
aaaaaacaatca

SEQ ID NO: 333846 - DNA, 12 bp, Artificial Sequence
  Oligonucleotide primer for the detection of SNP TSC0037779
tattagtgattg

SEQ ID NO: 333847 - DNA, 12 bp, Artificial Sequence
  Oligonucleotide primer for the detection of SNP TSC0037781
aacactcacact

SEQ ID NO: 333848 - DNA, 12 bp, Artificial Sequence
  Oligonucleotide primer for the detection of SNP TSC0037781
aaagtagataaa

SEQ ID NO: 333849 - DNA, 12 bp, Artificial Sequence
  Oligonucleotide primer for the detection of SNP TSC0037782
caaattaaaacc

SEQ ID NO: 333850 - DNA, 12 bp, Artificial Sequence
  Oligonucleotide primer for the detection of SNP TSC0037782
attaccacaacc

SEQ ID NO: 333851 - DNA, 12 bp, Artificial Sequence
  Oligonucleotide primer for the detection of SNP TSC0037782
tagattagaatt

SEQ ID NO: 333852 - DNA, 12 bp, Artificial Sequence
  Oligonucleotide primer for the detection of SNP TSC0037782
tagattagaatc

SEQ ID NO: 333853 - DNA, 12 bp, Artificial Sequence
  Oligonucleotide primer for the detection of SNP TSC0037783
aaaactcaattt

SEQ ID NO: 333854 - DNA, 12 bp, Artificial Sequence
  Oligonucleotide primer for the detection of SNP TSC0037783
atgataagtaaa

SEQ ID NO: 333855 - DNA, 12 bp, Artificial Sequence
  Oligonucleotide primer for the detection of SNP TSC0037792
taccttcaactt

SEQ ID NO: 333856 - DNA, 12 bp, Artificial Sequence
  Oligonucleotide primer for the detection of SNP TSC0037792
ttttgaaatata

SEQ ID NO: 333857 - DNA, 12 bp, Artificial Sequence
  Oligonucleotide primer for the detection of SNP TSC0037792
tcctaaaacaca

SEQ ID NO: 333858 - DNA, 12 bp, Artificial Sequence
  Oligonucleotide primer for the detection of SNP TSC0037793
catatattaact

SEQ ID NO: 333859 - DNA, 12 bp, Artificial Sequence
  Oligonucleotide primer for the detection of SNP TSC0037793
atgaggattaaa

SEQ ID NO: 333860 - DNA, 12 bp, Artificial Sequence
  Oligonucleotide primer for the detection of SNP TSC0037795
acactccatcac

SEQ ID NO: 333861 - DNA, 12 bp, Artificial Sequence
  Oligonucleotide primer for the detection of SNP TSC0037795
atattttattat

SEQ ID NO: 333862 - DNA, 12 bp, Artificial Sequence
  Oligonucleotide primer for the detection of SNP TSC0037796
gatgattttttt

SEQ ID NO: 333863 - DNA, 12 bp, Artificial Sequence
  Oligonucleotide primer for the detection of SNP TSC0037796
aataattttctc

SEQ ID NO: 333864 - DNA, 12 bp, Artificial Sequence
  Oligonucleotide primer for the detection of SNP TSC0037796
gaaaagatgaaa

SEQ ID NO: 333865 - DNA, 12 bp, Artificial Sequence
  Oligonucleotide primer for the detection of SNP TSC0037797
ataacatcaacc

SEQ ID NO: 333866 - DNA, 12 bp, Artificial Sequence
  Oligonucleotide primer for the detection of SNP TSC0037797
gtggggatgata

SEQ ID NO: 333867 - DNA, 12 bp, Artificial Sequence
  Oligonucleotide primer for the detection of SNP TSC0037797
ataaaaataata

SEQ ID NO: 333868 - DNA, 12 bp, Artificial Sequence
  Oligonucleotide primer for the detection of SNP TSC0037797
atggtattaatt

SEQ ID NO: 333869 - DNA, 12 bp, Artificial Sequence
  Oligonucleotide primer for the detection of SNP TSC0037798
ttatactcaaac

SEQ ID NO: 333870 - DNA, 12 bp, Artificial Sequence
  Oligonucleotide primer for the detection of SNP TSC0037798
tagggatttttg

SEQ ID NO: 333871 - DNA, 12 bp, Artificial Sequence
  Oligonucleotide primer for the detection of SNP TSC0037798
tagggattttcg

SEQ ID NO: 333872 - DNA, 12 bp, Artificial Sequence
  Oligonucleotide primer for the detection of SNP TSC0037799
aatcttttacct

SEQ ID NO: 333873 - DNA, 12 bp, Artificial Sequence
  Oligonucleotide primer for the detection of SNP TSC0037799
tgattgatttaa

SEQ ID NO: 333874 - DNA, 12 bp, Artificial Sequence
  Oligonucleotide primer for the detection of SNP TSC0037800
tggatagtggta

SEQ ID NO: 333875 - DNA, 12 bp, Artificial Sequence
  Oligonucleotide primer for the detection of SNP TSC0037800
cggatagtggta

SEQ ID NO: 333876 - DNA, 12 bp, Artificial Sequence
  Oligonucleotide primer for the detection of SNP TSC0037800
tggttatttaag

SEQ ID NO: 333877 - DNA, 12 bp, Artificial Sequence
  Oligonucleotide primer for the detection of SNP TSC0037801
taccttcttttc

SEQ ID NO: 333878 - DNA, 12 bp, Artificial Sequence
  Oligonucleotide primer for the detection of SNP TSC0037801
ttaggggattgg

SEQ ID NO: 333879 - DNA, 12 bp, Artificial Sequence
  Oligonucleotide primer for the detection of SNP TSC0037804
atatatggaaag

SEQ ID NO: 333880 - DNA, 12 bp, Artificial Sequence
  Oligonucleotide primer for the detection of SNP TSC0037804
atagttgaaatt

SEQ ID NO: 333881 - DNA, 12 bp, Artificial Sequence
  Oligonucleotide primer for the detection of SNP TSC0037805
aactcctactta

SEQ ID NO: 333882 - DNA, 12 bp, Artificial Sequence
  Oligonucleotide primer for the detection of SNP TSC0037805
tggttagagttt

SEQ ID NO: 333883 - DNA, 12 bp, Artificial Sequence
  Oligonucleotide primer for the detection of SNP TSC0037810
tttctcctaata

SEQ ID NO: 333884 - DNA, 12 bp, Artificial Sequence
  Oligonucleotide primer for the detection of SNP TSC0037810
taggggagggat

SEQ ID NO: 333885 - DNA, 12 bp, Artificial Sequence
  Oligonucleotide primer for the detection of SNP TSC0037812
ctaaaatcaatt

SEQ ID NO: 333886 - DNA, 12 bp, Artificial Sequence
  Oligonucleotide primer for the detection of SNP TSC0037813
cccctcctttcc

SEQ ID NO: 333887 - DNA, 12 bp, Artificial Sequence
  Oligonucleotide primer for the detection of SNP TSC0037813
ttttattaatgg

SEQ ID NO: 333888 - DNA, 12 bp, Artificial Sequence
  Oligonucleotide primer for the detection of SNP TSC0037814
ataaacataaac

SEQ ID NO: 333889 - DNA, 12 bp, Artificial Sequence
  Oligonucleotide primer for the detection of SNP TSC0037817
aaactctatacc

SEQ ID NO: 333890 - DNA, 12 bp, Artificial Sequence
  Oligonucleotide primer for the detection of SNP TSC0037817
attgtagtagta

SEQ ID NO: 333891 - DNA, 12 bp, Artificial Sequence
  Oligonucleotide primer for the detection of SNP TSC0037817
atcgtagtagta

SEQ ID NO: 333892 - DNA, 12 bp, Artificial Sequence
  Oligonucleotide primer for the detection of SNP TSC0037817
gagttttgtgtt

SEQ ID NO: 333893 - DNA, 12 bp, Artificial Sequence
  Oligonucleotide primer for the detection of SNP TSC0037820
acaaatatactc

SEQ ID NO: 333894 - DNA, 12 bp, Artificial Sequence
  Oligonucleotide primer for the detection of SNP TSC0037820
aatttaagtggg

SEQ ID NO: 333895 - DNA, 12 bp, Artificial Sequence
  Oligonucleotide primer for the detection of SNP TSC0037822
tgtttggaattt

SEQ ID NO: 333896 - DNA, 12 bp, Artificial Sequence
  Oligonucleotide primer for the detection of SNP TSC0037822
tatctaaaattc

SEQ ID NO: 333897 - DNA, 12 bp, Artificial Sequence
  Oligonucleotide primer for the detection of SNP TSC0037822
taagtaaggagg

SEQ ID NO: 333898 - DNA, 12 bp, Artificial Sequence
  Oligonucleotide primer for the detection of SNP TSC0037823
tattctttatta

SEQ ID NO: 333899 - DNA, 12 bp, Artificial Sequence
  Oligonucleotide primer for the detection of SNP TSC0037823
aaactttcacat

SEQ ID NO: 333900 - DNA, 12 bp, Artificial Sequence
  Oligonucleotide primer for the detection of SNP TSC0037824
aacaaaacccca

SEQ ID NO: 333901 - DNA, 12 bp, Artificial Sequence
  Oligonucleotide primer for the detection of SNP TSC0037824
gatgattaggtt

SEQ ID NO: 333902 - DNA, 12 bp, Artificial Sequence
  Oligonucleotide primer for the detection of SNP TSC0037824
aataaccaaatc

SEQ ID NO: 333903 - DNA, 12 bp, Artificial Sequence
  Oligonucleotide primer for the detection of SNP TSC0037824
agtaggatttta

SEQ ID NO: 333904 - DNA, 12 bp, Artificial Sequence
  Oligonucleotide primer for the detection of SNP TSC0037825
aacatctcatac

SEQ ID NO: 333905 - DNA, 12 bp, Artificial Sequence
  Oligonucleotide primer for the detection of SNP TSC0037825
ttgggagtggtg

SEQ ID NO: 333906 - DNA, 12 bp, Artificial Sequence
  Oligonucleotide primer for the detection of SNP TSC0037825
ttgggagtggcg

SEQ ID NO: 333907 - DNA, 12 bp, Artificial Sequence
  Oligonucleotide primer for the detection of SNP TSC0037826
ttaaacaactaa

SEQ ID NO: 333908 - DNA, 12 bp, Artificial Sequence
  Oligonucleotide primer for the detection of SNP TSC0037826
tatagttattta

SEQ ID NO: 333909 - DNA, 12 bp, Artificial Sequence
  Oligonucleotide primer for the detection of SNP TSC0037826
cacaactattca

SEQ ID NO: 333910 - DNA, 12 bp, Artificial Sequence
  Oligonucleotide primer for the detection of SNP TSC0037826
ttgggtagttgg

SEQ ID NO: 333911 - DNA, 12 bp, Artificial Sequence
  Oligonucleotide primer for the detection of SNP TSC0037827
gttttttaggta

SEQ ID NO: 333912 - DNA, 12 bp, Artificial Sequence
  Oligonucleotide primer for the detection of SNP TSC0037827
tcctccaaacaa

SEQ ID NO: 333913 - DNA, 12 bp, Artificial Sequence
  Oligonucleotide primer for the detection of SNP TSC0037827
ggttgttgatgt

SEQ ID NO: 333914 - DNA, 12 bp, Artificial Sequence
  Oligonucleotide primer for the detection of SNP TSC0037827
ggttgttgatgc

SEQ ID NO: 333915 - DNA, 12 bp, Artificial Sequence
  Oligonucleotide primer for the detection of SNP TSC0037828
ctaatacaaaaa

SEQ ID NO: 333916 - DNA, 12 bp, Artificial Sequence
  Oligonucleotide primer for the detection of SNP TSC0037828
attggtaattat

SEQ ID NO: 333917 - DNA, 12 bp, Artificial Sequence
  Oligonucleotide primer for the detection of SNP TSC0037828
ttaacaattata

SEQ ID NO: 333918 - DNA, 12 bp, Artificial Sequence
  Oligonucleotide primer for the detection of SNP TSC0037828
ttggtgtagaag

SEQ ID NO: 333919 - DNA, 12 bp, Artificial Sequence
  Oligonucleotide primer for the detection of SNP TSC0037833
atccacaaccca

SEQ ID NO: 333920 - DNA, 12 bp, Artificial Sequence
  Oligonucleotide primer for the detection of SNP TSC0037833
aatatttggatt

SEQ ID NO: 333921 - DNA, 12 bp, Artificial Sequence
  Oligonucleotide primer for the detection of SNP TSC0037833
aatatttggatc

SEQ ID NO: 333922 - DNA, 12 bp, Artificial Sequence
  Oligonucleotide primer for the detection of SNP TSC0037833
acaacacctaaa

SEQ ID NO: 333923 - DNA, 12 bp, Artificial Sequence
  Oligonucleotide primer for the detection of SNP TSC0037833
gtttatagttta

SEQ ID NO: 333924 - DNA, 12 bp, Artificial Sequence
  Oligonucleotide primer for the detection of SNP TSC0037834
gtgagttttttt

SEQ ID NO: 333925 - DNA, 12 bp, Artificial Sequence
  Oligonucleotide primer for the detection of SNP TSC0037834
gtgagttttttc

SEQ ID NO: 333926 - DNA, 12 bp, Artificial Sequence
  Oligonucleotide primer for the detection of SNP TSC0037834
ataaattctctc

SEQ ID NO: 333927 - DNA, 12 bp, Artificial Sequence
  Oligonucleotide primer for the detection of SNP TSC0037834
taattagatttt

SEQ ID NO: 333928 - DNA, 12 bp, Artificial Sequence
  Oligonucleotide primer for the detection of SNP TSC0037836
aaatccaatatt

SEQ ID NO: 333929 - DNA, 12 bp, Artificial Sequence
  Oligonucleotide primer for the detection of SNP TSC0037836
tattagtagtgg

SEQ ID NO: 333930 - DNA, 12 bp, Artificial Sequence
  Oligonucleotide primer for the detection of SNP TSC0037837
ctaaccataaac

SEQ ID NO: 333931 - DNA, 12 bp, Artificial Sequence
  Oligonucleotide primer for the detection of SNP TSC0037837
gtgaatagtgtg

SEQ ID NO: 333932 - DNA, 12 bp, Artificial Sequence
  Oligonucleotide primer for the detection of SNP TSC0037839
tgaatgaatgaa

SEQ ID NO: 333933 - DNA, 12 bp, Artificial Sequence
  Oligonucleotide primer for the detection of SNP TSC0037844
caacaattcatt

SEQ ID NO: 333934 - DNA, 12 bp, Artificial Sequence
  Oligonucleotide primer for the detection of SNP TSC0037844
tttgattgtgtg

SEQ ID NO: 333935 - DNA, 12 bp, Artificial Sequence
  Oligonucleotide primer for the detection of SNP TSC0037845
tatatttttagt

SEQ ID NO: 333936 - DNA, 12 bp, Artificial Sequence
  Oligonucleotide primer for the detection of SNP TSC0037848
gttttggtatgg

SEQ ID NO: 333937 - DNA, 12 bp, Artificial Sequence
  Oligonucleotide primer for the detection of SNP TSC0037851
tttaaacactct

SEQ ID NO: 333938 - DNA, 12 bp, Artificial Sequence
  Oligonucleotide primer for the detection of SNP TSC0037851
tatgtttttata

SEQ ID NO: 333939 - DNA, 12 bp, Artificial Sequence
  Oligonucleotide primer for the detection of SNP TSC0037852
gttatgtgtttg

SEQ ID NO: 333940 - DNA, 12 bp, Artificial Sequence
  Oligonucleotide primer for the detection of SNP TSC0037852
gttacgtgtttg

SEQ ID NO: 333941 - DNA, 12 bp, Artificial Sequence
  Oligonucleotide primer for the detection of SNP TSC0037854
cacatcaaaaaa

SEQ ID NO: 333942 - DNA, 12 bp, Artificial Sequence
  Oligonucleotide primer for the detection of SNP TSC0037854
tgtaatttggtt

SEQ ID NO: 333943 - DNA, 12 bp, Artificial Sequence
  Oligonucleotide primer for the detection of SNP TSC0037854
tgtaatttggtc

SEQ ID NO: 333944 - DNA, 12 bp, Artificial Sequence
  Oligonucleotide primer for the detection of SNP TSC0037854
aatacaatctaa

SEQ ID NO: 333945 - DNA, 12 bp, Artificial Sequence
  Oligonucleotide primer for the detection of SNP TSC0037854
tatattaaggaa

SEQ ID NO: 333946 - DNA, 12 bp, Artificial Sequence
  Oligonucleotide primer for the detection of SNP TSC0037855
caaaaataatta

SEQ ID NO: 333947 - DNA, 12 bp, Artificial Sequence
  Oligonucleotide primer for the detection of SNP TSC0037855
ttttaataagtt

SEQ ID NO: 333948 - DNA, 12 bp, Artificial Sequence
  Oligonucleotide primer for the detection of SNP TSC0037855
ttaacaaattaa

SEQ ID NO: 333949 - DNA, 12 bp, Artificial Sequence
  Oligonucleotide primer for the detection of SNP TSC0037855
aaaaatagttat

SEQ ID NO: 333950 - DNA, 12 bp, Artificial Sequence
  Oligonucleotide primer for the detection of SNP TSC0037856
tacaccaaaata

SEQ ID NO: 333951 - DNA, 12 bp, Artificial Sequence
  Oligonucleotide primer for the detection of SNP TSC0037856
tacgccaaaata

SEQ ID NO: 333952 - DNA, 12 bp, Artificial Sequence
  Oligonucleotide primer for the detection of SNP TSC0037856
tgggggttgttt

SEQ ID NO: 333953 - DNA, 12 bp, Artificial Sequence
  Oligonucleotide primer for the detection of SNP TSC0037856
cgggggttgttt

SEQ ID NO: 333954 - DNA, 12 bp, Artificial Sequence
  Oligonucleotide primer for the detection of SNP TSC0037856
tgggggtcgttt

SEQ ID NO: 333955 - DNA, 12 bp, Artificial Sequence
  Oligonucleotide primer for the detection of SNP TSC0037856
cgggggtcgttt

SEQ ID NO: 333956 - DNA, 12 bp, Artificial Sequence
  Oligonukleotid-Primer
caaaaaccactt

SEQ ID NO: 333957 - DNA, 12 bp, Artificial Sequence
  Oligonucleotide primer for the detection of SNP TSC0037856
caaaaaccgctt

SEQ ID NO: 333958 - DNA, 12 bp, Artificial Sequence
  Oligonucleotide primer for the detection of SNP TSC0037856
cgaaaaccactt

SEQ ID NO: 333959 - DNA, 12 bp, Artificial Sequence
  Oligonucleotide primer for the detection of SNP TSC0037856
cgaaaaccgctt

SEQ ID NO: 333960 - DNA, 12 bp, Artificial Sequence
  Oligonucleotide primer for the detection of SNP TSC0037856
tgtgttagggtg

SEQ ID NO: 333961 - DNA, 12 bp, Artificial Sequence
  Oligonucleotide primer for the detection of SNP TSC0037856
tgcgttagggtg

SEQ ID NO: 333962 - DNA, 12 bp, Artificial Sequence
  Oligonucleotide primer for the detection of SNP TSC0037858
tattaacatctt

SEQ ID NO: 333963 - DNA, 12 bp, Artificial Sequence
  Oligonucleotide primer for the detection of SNP TSC0037858
tattaacgtctt

SEQ ID NO: 333964 - DNA, 12 bp, Artificial Sequence
  Oligonucleotide primer for the detection of SNP TSC0037858
tatataataata

SEQ ID NO: 333965 - DNA, 12 bp, Artificial Sequence
  Oligonucleotide primer for the detection of SNP TSC0037858
acacaataataa

SEQ ID NO: 333966 - DNA, 12 bp, Artificial Sequence
  Oligonucleotide primer for the detection of SNP TSC0037858
ttgacgtttttt

SEQ ID NO: 333967 - DNA, 12 bp, Artificial Sequence
  Oligonucleotide primer for the detection of SNP TSC0037860
atcttataacac

SEQ ID NO: 333968 - DNA, 12 bp, Artificial Sequence
  Oligonucleotide primer for the detection of SNP TSC0037860
agttaataattt

SEQ ID NO: 333969 - DNA, 12 bp, Artificial Sequence
  Oligonucleotide primer for the detection of SNP TSC0037860
aaccaacaattt

SEQ ID NO: 333970 - DNA, 12 bp, Artificial Sequence
  Oligonucleotide primer for the detection of SNP TSC0037860
gttttgtgatat

SEQ ID NO: 333971 - DNA, 12 bp, Artificial Sequence
  Oligonucleotide primer for the detection of SNP TSC0037861
ccctcacctaac

SEQ ID NO: 333972 - DNA, 12 bp, Artificial Sequence
  Oligonucleotide primer for the detection of SNP TSC0037861
attgaagttgaa

SEQ ID NO: 333973 - DNA, 12 bp, Artificial Sequence
  Oligonucleotide primer for the detection of SNP TSC0037871
acattacatcca

SEQ ID NO: 333974 - DNA, 12 bp, Artificial Sequence
  Oligonucleotide primer for the detection of SNP TSC0037871
acattacgtcca

SEQ ID NO: 333975 - DNA, 12 bp, Artificial Sequence
  Oligonucleotide primer for the detection of SNP TSC0037871
tttgttggttat

SEQ ID NO: 333976 - DNA, 12 bp, Artificial Sequence
  Oligonucleotide primer for the detection of SNP TSC0037871
tctactaatcat

SEQ ID NO: 333977 - DNA, 12 bp, Artificial Sequence
  Oligonucleotide primer for the detection of SNP TSC0037871
atattatgttta

SEQ ID NO: 333978 - DNA, 12 bp, Artificial Sequence
  Oligonucleotide primer for the detection of SNP TSC0037871
atattacgttta

SEQ ID NO: 333979 - DNA, 12 bp, Artificial Sequence
  Oligonucleotide primer for the detection of SNP TSC0037872
aaaacaatatac

SEQ ID NO: 333980 - DNA, 12 bp, Artificial Sequence
  Oligonucleotide primer for the detection of SNP TSC0037872
aaaacgatatac

SEQ ID NO: 333981 - DNA, 12 bp, Artificial Sequence
  Oligonucleotide primer for the detection of SNP TSC0037872
tggttttttagt

SEQ ID NO: 333982 - DNA, 12 bp, Artificial Sequence
  Oligonucleotide primer for the detection of SNP TSC0037872
taacctctcaat

SEQ ID NO: 333983 - DNA, 12 bp, Artificial Sequence
  Oligonucleotide primer for the detection of SNP TSC0037872
aaagtggtgtat

SEQ ID NO: 333984 - DNA, 12 bp, Artificial Sequence
  Oligonucleotide primer for the detection of SNP TSC0037872
aaagcggtgtat

SEQ ID NO: 333985 - DNA, 12 bp, Artificial Sequence
  Oligonucleotide primer for the detection of SNP TSC0037873
actcatataaaa

SEQ ID NO: 333986 - DNA, 12 bp, Artificial Sequence
  Oligonucleotide primer for the detection of SNP TSC0037873
tgaggatatagt

SEQ ID NO: 333987 - DNA, 12 bp, Artificial Sequence
  Oligonucleotide primer for the detection of SNP TSC0037873
atttatatagaa

SEQ ID NO: 333988 - DNA, 12 bp, Artificial Sequence
  Oligonucleotide primer for the detection of SNP TSC0037874
tattgagttagt

SEQ ID NO: 333989 - DNA, 12 bp, Artificial Sequence
  Oligonucleotide primer for the detection of SNP TSC0037874
ttattaaaccaa

SEQ ID NO: 333990 - DNA, 12 bp, Artificial Sequence
  Oligonucleotide primer for the detection of SNP TSC0037874
tgtaaagaaagt

SEQ ID NO: 333991 - DNA, 12 bp, Artificial Sequence
  Oligonucleotide primer for the detection of SNP TSC0037877
tttgtttatttc

SEQ ID NO: 333992 - DNA, 12 bp, Artificial Sequence
  Oligonucleotide primer for the detection of SNP TSC0037877
tttacccatccc

SEQ ID NO: 333993 - DNA, 12 bp, Artificial Sequence
  Oligonucleotide primer for the detection of SNP TSC0037877
tttgtgagaagt

SEQ ID NO: 333994 - DNA, 12 bp, Artificial Sequence
  Oligonucleotide primer for the detection of SNP TSC0037877
tttgtgagaagc

SEQ ID NO: 333995 - DNA, 12 bp, Artificial Sequence
  Oligonucleotide primer for the detection of SNP TSC0037879
acactcattaat

SEQ ID NO: 333996 - DNA, 12 bp, Artificial Sequence
  Oligonucleotide primer for the detection of SNP TSC0037883
tctccttccaat

SEQ ID NO: 333997 - DNA, 12 bp, Artificial Sequence
  Oligonucleotide primer for the detection of SNP TSC0037883
ggtatgtgtgtg

SEQ ID NO: 333998 - DNA, 12 bp, Artificial Sequence
  Oligonucleotide primer for the detection of SNP TSC0037884
ccaataacaaac

SEQ ID NO: 333999 - DNA, 12 bp, Artificial Sequence
  Oligonucleotide primer for the detection of SNP TSC0037884
taatggtatgtg

SEQ ID NO: 334000 - DNA, 12 bp, Artificial Sequence
  Oligonucleotide primer for the detection of SNP TSC0037885
caatatctcata

SEQ ID NO: 334001 - DNA, 12 bp, Artificial Sequence
  Oligonucleotide primer for the detection of SNP TSC0037885
ggagagaggggt

SEQ ID NO: 334002 - DNA, 12 bp, Artificial Sequence
  Oligonucleotide primer for the detection of SNP TSC0037889
gtgttattttag

SEQ ID NO: 334003 - DNA, 12 bp, Artificial Sequence
  Oligonucleotide primer for the detection of SNP TSC0037892
ctacaacttttt

SEQ ID NO: 334004 - DNA, 12 bp, Artificial Sequence
  Oligonucleotide primer for the detection of SNP TSC0037892
ttgtattgttag

SEQ ID NO: 334005 - DNA, 12 bp, Artificial Sequence
  Oligonucleotide primer for the detection of SNP TSC0037893
ccacatccaaac

SEQ ID NO: 334006 - DNA, 12 bp, Artificial Sequence
  Oligonucleotide primer for the detection of SNP TSC0037893
aatagtgtagag

SEQ ID NO: 334007 - DNA, 12 bp, Artificial Sequence
  Oligonucleotide primer for the detection of SNP TSC0037893
ttatatttaagt

SEQ ID NO: 334008 - DNA, 12 bp, Artificial Sequence
  Oligonucleotide primer for the detection of SNP TSC0037894
caacataccaat

SEQ ID NO: 334009 - DNA, 12 bp, Artificial Sequence
  Oligonucleotide primer for the detection of SNP TSC0037894
agtgtaatatag

SEQ ID NO: 334010 - DNA, 12 bp, Artificial Sequence
  Oligonucleotide primer for the detection of SNP TSC0037895
atatttatcccc

SEQ ID NO: 334011 - DNA, 12 bp, Artificial Sequence
  Oligonucleotide primer for the detection of SNP TSC0037895
tgatattggtag

SEQ ID NO: 334012 - DNA, 12 bp, Artificial Sequence
  Oligonucleotide primer for the detection of SNP TSC0037896
tagaaaatttga

SEQ ID NO: 334013 - DNA, 12 bp, Artificial Sequence
  Oligonucleotide primer for the detection of SNP TSC0037896
gtaaaagaaagg

SEQ ID NO: 334014 - DNA, 12 bp, Artificial Sequence
  Oligonucleotide primer for the detection of SNP TSC0037897
atataatttatc

SEQ ID NO: 334015 - DNA, 12 bp, Artificial Sequence
  Oligonucleotide primer for the detection of SNP TSC0037897
ggtagaatatag

SEQ ID NO: 334016 - DNA, 12 bp, Artificial Sequence
  Oligonucleotide primer for the detection of SNP TSC0037898
tattgggaatat

SEQ ID NO: 334017 - DNA, 12 bp, Artificial Sequence
  Oligonucleotide primer for the detection of SNP TSC0037898
tattaaaaatat

SEQ ID NO: 334018 - DNA, 12 bp, Artificial Sequence
  Oligonucleotide primer for the detection of SNP TSC0037899
atcttcattacc

SEQ ID NO: 334019 - DNA, 12 bp, Artificial Sequence
  Oligonucleotide primer for the detection of SNP TSC0037899
ataggaattaga

SEQ ID NO: 334020 - DNA, 12 bp, Artificial Sequence
  Oligonucleotide primer for the detection of SNP TSC0037903
cttttccattct

SEQ ID NO: 334021 - DNA, 12 bp, Artificial Sequence
  Oligonucleotide primer for the detection of SNP TSC0037903
atgggagaatga

SEQ ID NO: 334022 - DNA, 12 bp, Artificial Sequence
  Oligonucleotide primer for the detection of SNP TSC0037906
agaatatatttt

SEQ ID NO: 334023 - DNA, 12 bp, Artificial Sequence
  Oligonucleotide primer for the detection of SNP TSC0037906
aaacatatctta

SEQ ID NO: 334024 - DNA, 12 bp, Artificial Sequence
  Oligonucleotide primer for the detection of SNP TSC0037907
tcattcatatat

SEQ ID NO: 334025 - DNA, 12 bp, Artificial Sequence
  Oligonucleotide primer for the detection of SNP TSC0037907
ggtattagagta

SEQ ID NO: 334026 - DNA, 12 bp, Artificial Sequence
  Oligonucleotide primer for the detection of SNP TSC0037908
ataaaaacactc

SEQ ID NO: 334027 - DNA, 12 bp, Artificial Sequence
  Oligonucleotide primer for the detection of SNP TSC0037908
gttattaggtat

SEQ ID NO: 334028 - DNA, 12 bp, Artificial Sequence
  Oligonucleotide primer for the detection of SNP TSC0037908
ctaccaaacaca

SEQ ID NO: 334029 - DNA, 12 bp, Artificial Sequence
  Oligonucleotide primer for the detection of SNP TSC0037908
tgaaaatatttt

SEQ ID NO: 334030 - DNA, 12 bp, Artificial Sequence
  Oligonucleotide primer for the detection of SNP TSC0037909
taaataacacaa

SEQ ID NO: 334031 - DNA, 12 bp, Artificial Sequence
  Oligonucleotide primer for the detection of SNP TSC0037909
taaataacacga

SEQ ID NO: 334032 - DNA, 12 bp, Artificial Sequence
  Oligonucleotide primer for the detection of SNP TSC0037909
aattaatgtgtt

SEQ ID NO: 334033 - DNA, 12 bp, Artificial Sequence
  Oligonucleotide primer for the detection of SNP TSC0037909
aactaatatact

SEQ ID NO: 334034 - DNA, 12 bp, Artificial Sequence
  Oligonucleotide primer for the detection of SNP TSC0037909
tgggtaatatga

SEQ ID NO: 334035 - DNA, 12 bp, Artificial Sequence
  Oligonucleotide primer for the detection of SNP TSC0037909
tgggtaatacga

SEQ ID NO: 334036 - DNA, 12 bp, Artificial Sequence
  Oligonucleotide primer for the detection of SNP TSC0037910
tatttctactat

SEQ ID NO: 334037 - DNA, 12 bp, Artificial Sequence
  Oligonucleotide primer for the detection of SNP TSC0037910
ataggtttggga

SEQ ID NO: 334038 - DNA, 12 bp, Artificial Sequence
  Oligonucleotide primer for the detection of SNP TSC0037911
cttctattataa

SEQ ID NO: 334039 - DNA, 12 bp, Artificial Sequence
  Oligonucleotide primer for the detection of SNP TSC0037911
gttaaaagaaat

SEQ ID NO: 334040 - DNA, 12 bp, Artificial Sequence
  Oligonucleotide primer for the detection of SNP TSC0037911
tttttattgtaa

SEQ ID NO: 334041 - DNA, 12 bp, Artificial Sequence
  Oligonucleotide primer for the detection of SNP TSC0037912
ctaaactataca

SEQ ID NO: 334042 - DNA, 12 bp, Artificial Sequence
  Oligonucleotide primer for the detection of SNP TSC0037912
taaggaggtggt

SEQ ID NO: 334043 - DNA, 12 bp, Artificial Sequence
  Oligonucleotide primer for the detection of SNP TSC0037912
ttaagttatata

SEQ ID NO: 334044 - DNA, 12 bp, Artificial Sequence
  Oligonucleotide primer for the detection of SNP TSC0037913
ttattttaatga

SEQ ID NO: 334045 - DNA, 12 bp, Artificial Sequence
  Oligonucleotide primer for the detection of SNP TSC0037913
ttattttaataa

SEQ ID NO: 334046 - DNA, 12 bp, Artificial Sequence
  Oligonucleotide primer for the detection of SNP TSC0037913
aaatgtatatgt

SEQ ID NO: 334047 - DNA, 12 bp, Artificial Sequence
  Oligonucleotide primer for the detection of SNP TSC0037914
ataataatataa

SEQ ID NO: 334048 - DNA, 12 bp, Artificial Sequence
  Oligonucleotide primer for the detection of SNP TSC0037914
caacctacaact

SEQ ID NO: 334049 - DNA, 12 bp, Artificial Sequence
  Oligonucleotide primer for the detection of SNP TSC0037914
gtggtggtatga

SEQ ID NO: 334050 - DNA, 12 bp, Artificial Sequence
  Oligonucleotide primer for the detection of SNP TSC0037917
cattctccaatc

SEQ ID NO: 334051 - DNA, 12 bp, Artificial Sequence
  Oligonucleotide primer for the detection of SNP TSC0037917
ttatggaaatta

SEQ ID NO: 334052 - DNA, 12 bp, Artificial Sequence
  Oligonucleotide primer for the detection of SNP TSC0037918
tatttaaatact

SEQ ID NO: 334053 - DNA, 12 bp, Artificial Sequence
  Oligonucleotide primer for the detection of SNP TSC0037918
tagtgtattttg

SEQ ID NO: 334054 - DNA, 12 bp, Artificial Sequence
  Oligonucleotide primer for the detection of SNP TSC0037919
ttactcacaaaa

SEQ ID NO: 334055 - DNA, 12 bp, Artificial Sequence
  Oligonucleotide primer for the detection of SNP TSC0037919
tagttagtggtt

SEQ ID NO: 334056 - DNA, 12 bp, Artificial Sequence
  Oligonucleotide primer for the detection of SNP TSC0037919
ttgtttatagaa

SEQ ID NO: 334057 - DNA, 12 bp, Artificial Sequence
  Oligonucleotide primer for the detection of SNP TSC0037920
tgttagaataaa

SEQ ID NO: 334058 - DNA, 12 bp, Artificial Sequence
  Oligonucleotide primer for the detection of SNP TSC0037920
taccaaaataaa

SEQ ID NO: 334059 - DNA, 12 bp, Artificial Sequence
  Oligonucleotide primer for the detection of SNP TSC0037920
gtggagtatgtg

SEQ ID NO: 334060 - DNA, 12 bp, Artificial Sequence
  Oligonucleotide primer for the detection of SNP TSC0037923
attcttcttacc

SEQ ID NO: 334061 - DNA, 12 bp, Artificial Sequence
  Oligonucleotide primer for the detection of SNP TSC0037923
aatgaaagttaa

SEQ ID NO: 334062 - DNA, 12 bp, Artificial Sequence
  Oligonucleotide primer for the detection of SNP TSC0037924
caattatctatt

SEQ ID NO: 334063 - DNA, 12 bp, Artificial Sequence
  Oligonucleotide primer for the detection of SNP TSC0037924
ttttattgggag

SEQ ID NO: 334064 - DNA, 12 bp, Artificial Sequence
  Oligonucleotide primer for the detection of SNP TSC0037925
catttaattatt

SEQ ID NO: 334065 - DNA, 12 bp, Artificial Sequence
  Oligonucleotide primer for the detection of SNP TSC0037925
tgagtgatagta

SEQ ID NO: 334066 - DNA, 12 bp, Artificial Sequence
  Oligonucleotide primer for the detection of SNP TSC0037926
tattaaaatatt

SEQ ID NO: 334067 - DNA, 12 bp, Artificial Sequence
  Oligonucleotide primer for the detection of SNP TSC0037926
tattaaaacatt

SEQ ID NO: 334068 - DNA, 12 bp, Artificial Sequence
  Oligonucleotide primer for the detection of SNP TSC0037926
agttgtatgtaa

SEQ ID NO: 334069 - DNA, 12 bp, Artificial Sequence
  Oligonucleotide primer for the detection of SNP TSC0037927
aaacaattactc

SEQ ID NO: 334070 - DNA, 12 bp, Artificial Sequence
  Oligonucleotide primer for the detection of SNP TSC0037927
aggttaaatagg

SEQ ID NO: 334071 - DNA, 12 bp, Artificial Sequence
  Oligonucleotide primer for the detection of SNP TSC0037929
gagtttagttag

SEQ ID NO: 334072 - DNA, 12 bp, Artificial Sequence
  Oligonucleotide primer for the detection of SNP TSC0037931
cactcaaatctc

SEQ ID NO: 334073 - DNA, 12 bp, Artificial Sequence
  Oligonucleotide primer for the detection of SNP TSC0037931
ttataatttaag

SEQ ID NO: 334074 - DNA, 12 bp, Artificial Sequence
  Oligonucleotide primer for the detection of SNP TSC0037931
tacaattcaaaa

SEQ ID NO: 334075 - DNA, 12 bp, Artificial Sequence
  Oligonucleotide primer for the detection of SNP TSC0037932
catttattacac

SEQ ID NO: 334076 - DNA, 12 bp, Artificial Sequence
  Oligonucleotide primer for the detection of SNP TSC0037932
tgattttgttta

SEQ ID NO: 334077 - DNA, 12 bp, Artificial Sequence
  Oligonucleotide primer for the detection of SNP TSC0037933
caaaaaactcat

SEQ ID NO: 334078 - DNA, 12 bp, Artificial Sequence
  Oligonucleotide primer for the detection of SNP TSC0037933
cgaaaaactcat

SEQ ID NO: 334079 - DNA, 12 bp, Artificial Sequence
  Oligonucleotide primer for the detection of SNP TSC0037933
taatgtagatat

SEQ ID NO: 334080 - DNA, 12 bp, Artificial Sequence
  Oligonucleotide primer for the detection of SNP TSC0037933
taatacaaacac

SEQ ID NO: 334081 - DNA, 12 bp, Artificial Sequence
  Oligonucleotide primer for the detection of SNP TSC0037933
tgggaggtttat

SEQ ID NO: 334082 - DNA, 12 bp, Artificial Sequence
  Oligonucleotide primer for the detection of SNP TSC0037933
cgggaggtttat

SEQ ID NO: 334083 - DNA, 12 bp, Artificial Sequence
  Oligonucleotide primer for the detection of SNP TSC0037934
tttgggagttga

SEQ ID NO: 334084 - DNA, 12 bp, Artificial Sequence
  Oligonucleotide primer for the detection of SNP TSC0037934
ttcgggagttga

SEQ ID NO: 334085 - DNA, 12 bp, Artificial Sequence
  Oligonucleotide primer for the detection of SNP TSC0037934
tttgggagtcga

SEQ ID NO: 334086 - DNA, 12 bp, Artificial Sequence
  Oligonucleotide primer for the detection of SNP TSC0037934
ttcgggagtcga

SEQ ID NO: 334087 - DNA, 12 bp, Artificial Sequence
  Oligonucleotide primer for the detection of SNP TSC0037934
cccaaaaatcaa

SEQ ID NO: 334088 - DNA, 12 bp, Artificial Sequence
  Oligonucleotide primer for the detection of SNP TSC0037934
cccaaaaatcga

SEQ ID NO: 334089 - DNA, 12 bp, Artificial Sequence
  Oligonucleotide primer for the detection of SNP TSC0037934
cccgaaaatcaa

SEQ ID NO: 334090 - DNA, 12 bp, Artificial Sequence
  Oligonucleotide primer for the detection of SNP TSC0037934
cccgaaaatcga

SEQ ID NO: 334091 - DNA, 12 bp, Artificial Sequence
  Oligonucleotide primer for the detection of SNP TSC0037934
aaggaaggtata

SEQ ID NO: 334092 - DNA, 12 bp, Artificial Sequence
  Oligonucleotide primer for the detection of SNP TSC0037936
tacttcctctcc

SEQ ID NO: 334093 - DNA, 12 bp, Artificial Sequence
  Oligonucleotide primer for the detection of SNP TSC0037936
tagtaaggagaa

SEQ ID NO: 334094 - DNA, 12 bp, Artificial Sequence
  Oligonucleotide primer for the detection of SNP TSC0037937
tacttctaatct

SEQ ID NO: 334095 - DNA, 12 bp, Artificial Sequence
  Oligonucleotide primer for the detection of SNP TSC0037937
agatttttttga

SEQ ID NO: 334096 - DNA, 12 bp, Artificial Sequence
  Oligonucleotide primer for the detection of SNP TSC0037939
ttacttctcaaa

SEQ ID NO: 334097 - DNA, 12 bp, Artificial Sequence
  Oligonucleotide primer for the detection of SNP TSC0037939
ttacttctcgaa

SEQ ID NO: 334098 - DNA, 12 bp, Artificial Sequence
  Oligonucleotide primer for the detection of SNP TSC0037939
actctcctatct

SEQ ID NO: 334099 - DNA, 12 bp, Artificial Sequence
  Oligonucleotide primer for the detection of SNP TSC0037939
ttgtttttcgaa

SEQ ID NO: 334100 - DNA, 12 bp, Artificial Sequence
  Oligonucleotide primer for the detection of SNP TSC0037940
tatttaaaaaac

SEQ ID NO: 334101 - DNA, 12 bp, Artificial Sequence
  Oligonucleotide primer for the detection of SNP TSC0037940
tagatatattgt

SEQ ID NO: 334102 - DNA, 12 bp, Artificial Sequence
  Oligonucleotide primer for the detection of SNP TSC0037941
aaatggtaggga

SEQ ID NO: 334103 - DNA, 12 bp, Artificial Sequence
  Oligonucleotide primer for the detection of SNP TSC0037942
ttataataacat

SEQ ID NO: 334104 - DNA, 12 bp, Artificial Sequence
  Oligonucleotide primer for the detection of SNP TSC0037942
ttaagaatgtta

SEQ ID NO: 334105 - DNA, 12 bp, Artificial Sequence
  Oligonucleotide primer for the detection of SNP TSC0037943
cacaattttaac

SEQ ID NO: 334106 - DNA, 12 bp, Artificial Sequence
  Oligonucleotide primer for the detection of SNP TSC0037943
atgtaagtttga

SEQ ID NO: 334107 - DNA, 12 bp, Artificial Sequence
  Oligonucleotide primer for the detection of SNP TSC0037944
cttaaaccctta

SEQ ID NO: 334108 - DNA, 12 bp, Artificial Sequence
  Oligonucleotide primer for the detection of SNP TSC0037944
tattatatagat

SEQ ID NO: 334109 - DNA, 12 bp, Artificial Sequence
  Oligonucleotide primer for the detection of SNP TSC0037944
tattatatagac

SEQ ID NO: 334110 - DNA, 12 bp, Artificial Sequence
  Oligonucleotide primer for the detection of SNP TSC0037944
tattatacaaac

SEQ ID NO: 334111 - DNA, 12 bp, Artificial Sequence
  Oligonucleotide primer for the detection of SNP TSC0037948
gagatgttaagg

SEQ ID NO: 334112 - DNA, 12 bp, Artificial Sequence
  Oligonucleotide primer for the detection of SNP TSC0037951
ttttcctaattc

SEQ ID NO: 334113 - DNA, 12 bp, Artificial Sequence
  Oligonucleotide primer for the detection of SNP TSC0037951
aaaattatgtag

SEQ ID NO: 334114 - DNA, 12 bp, Artificial Sequence
  Oligonucleotide primer for the detection of SNP TSC0037952
aaaatcaacaat

SEQ ID NO: 334115 - DNA, 12 bp, Artificial Sequence
  Oligonucleotide primer for the detection of SNP TSC0037952
tgtagagtttaa

SEQ ID NO: 334116 - DNA, 12 bp, Artificial Sequence
  Oligonucleotide primer for the detection of SNP TSC0037952
acaaaatccaaa

SEQ ID NO: 334117 - DNA, 12 bp, Artificial Sequence
  Oligonucleotide primer for the detection of SNP TSC0037952
gagattaatagt

SEQ ID NO: 334118 - DNA, 12 bp, Artificial Sequence
  Oligonucleotide primer for the detection of SNP TSC0037954
ccacacccgact

SEQ ID NO: 334119 - DNA, 12 bp, Artificial Sequence
  Oligonucleotide primer for the detection of SNP TSC0037954
ccacgcccgact

SEQ ID NO: 334120 - DNA, 12 bp, Artificial Sequence
  Oligonucleotide primer for the detection of SNP TSC0037956
tttagtatataa

SEQ ID NO: 334121 - DNA, 12 bp, Artificial Sequence
  Oligonucleotide primer for the detection of SNP TSC0037956
cccaacacacaa

SEQ ID NO: 334122 - DNA, 12 bp, Artificial Sequence
  Oligonucleotide primer for the detection of SNP TSC0037956
aaatagagagga

SEQ ID NO: 334123 - DNA, 12 bp, Artificial Sequence
  Oligonucleotide primer for the detection of SNP TSC0037958
actaattcaaac

SEQ ID NO: 334124 - DNA, 12 bp, Artificial Sequence
  Oligonucleotide primer for the detection of SNP TSC0037958
gtgttttatatt

SEQ ID NO: 334125 - DNA, 12 bp, Artificial Sequence
  Oligonucleotide primer for the detection of SNP TSC0037958
atattttacact

SEQ ID NO: 334126 - DNA, 12 bp, Artificial Sequence
  Oligonucleotide primer for the detection of SNP TSC0037958
attagtttagat

SEQ ID NO: 334127 - DNA, 12 bp, Artificial Sequence
  Oligonucleotide primer for the detection of SNP TSC0037959
caataacacctc

SEQ ID NO: 334128 - DNA, 12 bp, Artificial Sequence
  Oligonucleotide primer for the detection of SNP TSC0037959
tttttttgaaag

SEQ ID NO: 334129 - DNA, 12 bp, Artificial Sequence
  Oligonucleotide primer for the detection of SNP TSC0037961
attcctatcact

SEQ ID NO: 334130 - DNA, 12 bp, Artificial Sequence
  Oligonucleotide primer for the detection of SNP TSC0037961
aaatttattgta

SEQ ID NO: 334131 - DNA, 12 bp, Artificial Sequence
  Oligonucleotide primer for the detection of SNP TSC0037962
ataccctttatc

SEQ ID NO: 334132 - DNA, 12 bp, Artificial Sequence
  Oligonucleotide primer for the detection of SNP TSC0037962
ttgtaaagaata

SEQ ID NO: 334133 - DNA, 12 bp, Artificial Sequence
  Oligonucleotide primer for the detection of SNP TSC0037965
aaatctctacat

SEQ ID NO: 334134 - DNA, 12 bp, Artificial Sequence
  Oligonucleotide primer for the detection of SNP TSC0037965
aaatctctacgt

SEQ ID NO: 334135 - DNA, 12 bp, Artificial Sequence
  Oligonucleotide primer for the detection of SNP TSC0037965
tttgtttagtaa

SEQ ID NO: 334136 - DNA, 12 bp, Artificial Sequence
  Oligonucleotide primer for the detection of SNP TSC0037965
tctatctaataa

SEQ ID NO: 334137 - DNA, 12 bp, Artificial Sequence
  Oligonucleotide primer for the detection of SNP TSC0037965
aaatttttatgt

SEQ ID NO: 334138 - DNA, 12 bp, Artificial Sequence
  Oligonucleotide primer for the detection of SNP TSC0037965
aaatttttacgt

SEQ ID NO: 334139 - DNA, 12 bp, Artificial Sequence
  Oligonucleotide primer for the detection of SNP TSC0037966
aactaaattcca

SEQ ID NO: 334140 - DNA, 12 bp, Artificial Sequence
  Oligonucleotide primer for the detection of SNP TSC0037966
taagtattgtgt

SEQ ID NO: 334141 - DNA, 12 bp, Artificial Sequence
  Oligonucleotide primer for the detection of SNP TSC0037966
aaacactataca

SEQ ID NO: 334142 - DNA, 12 bp, Artificial Sequence
  Oligonucleotide primer for the detection of SNP TSC0037966
agttgggtttta

SEQ ID NO: 334143 - DNA, 12 bp, Artificial Sequence
  Oligonucleotide primer for the detection of SNP TSC0037967
tttatcttcata

SEQ ID NO: 334144 - DNA, 12 bp, Artificial Sequence
  Oligonucleotide primer for the detection of SNP TSC0037967
ttagagttggta

SEQ ID NO: 334145 - DNA, 12 bp, Artificial Sequence
  Oligonucleotide primer for the detection of SNP TSC0037967
caaaattaataa

SEQ ID NO: 334146 - DNA, 12 bp, Artificial Sequence
  Oligonucleotide primer for the detection of SNP TSC0037968
tctcttttattt

SEQ ID NO: 334147 - DNA, 12 bp, Artificial Sequence
  Oligonucleotide primer for the detection of SNP TSC0037969
atatcaaaaaaa

SEQ ID NO: 334148 - DNA, 12 bp, Artificial Sequence
  Oligonucleotide primer for the detection of SNP TSC0037969
gtattaaaaaaa

SEQ ID NO: 334149 - DNA, 12 bp, Artificial Sequence
  Oligonucleotide primer for the detection of SNP TSC0037970
catccaaaatct

SEQ ID NO: 334150 - DNA, 12 bp, Artificial Sequence
  Oligonucleotide primer for the detection of SNP TSC0037971
atacaataacat

SEQ ID NO: 334151 - DNA, 12 bp, Artificial Sequence
  Oligonucleotide primer for the detection of SNP TSC0037971
atacaataacgt

SEQ ID NO: 334152 - DNA, 12 bp, Artificial Sequence
  Oligonucleotide primer for the detection of SNP TSC0037971
tagtgaattgag

SEQ ID NO: 334153 - DNA, 12 bp, Artificial Sequence
  Oligonucleotide primer for the detection of SNP TSC0037971
tagtgaatcgag

SEQ ID NO: 334154 - DNA, 12 bp, Artificial Sequence
  Oligonucleotide primer for the detection of SNP TSC0037972
ttggtatttttg

SEQ ID NO: 334155 - DNA, 12 bp, Artificial Sequence
  Oligonucleotide primer for the detection of SNP TSC0037973
aaaaatatacat

SEQ ID NO: 334156 - DNA, 12 bp, Artificial Sequence
  Oligonucleotide primer for the detection of SNP TSC0037973
gaatttgttaga

SEQ ID NO: 334157 - DNA, 12 bp, Artificial Sequence
  Oligonucleotide primer for the detection of SNP TSC0037975
ataaattaacta

SEQ ID NO: 334158 - DNA, 12 bp, Artificial Sequence
  Oligonucleotide primer for the detection of SNP TSC0037975
gataatgagtta

SEQ ID NO: 334159 - DNA, 12 bp, Artificial Sequence
  Oligonucleotide primer for the detection of SNP TSC0037975
tgggttaattgt

SEQ ID NO: 334160 - DNA, 12 bp, Artificial Sequence
  Oligonucleotide primer for the detection of SNP TSC0037979
tttcaccaactt

SEQ ID NO: 334161 - DNA, 12 bp, Artificial Sequence
  Oligonucleotide primer for the detection of SNP TSC0037979
gttgtttgtata

SEQ ID NO: 334162 - DNA, 12 bp, Artificial Sequence
  Oligonucleotide primer for the detection of SNP TSC0037980
tttatagttttg

SEQ ID NO: 334163 - DNA, 12 bp, Artificial Sequence
  Oligonucleotide primer for the detection of SNP TSC0037980
cccacaattcta

SEQ ID NO: 334164 - DNA, 12 bp, Artificial Sequence
  Oligonucleotide primer for the detection of SNP TSC0037980
ttagaagagtgt

SEQ ID NO: 334165 - DNA, 12 bp, Artificial Sequence
  Oligonucleotide primer for the detection of SNP TSC0037980
ttagaagagcgt

SEQ ID NO: 334166 - DNA, 12 bp, Artificial Sequence
  Oligonucleotide primer for the detection of SNP TSC0037981
cctttctttcta

SEQ ID NO: 334167 - DNA, 12 bp, Artificial Sequence
  Oligonucleotide primer for the detection of SNP TSC0037981
ttttcaactttc

SEQ ID NO: 334168 - DNA, 12 bp, Artificial Sequence
  Oligonucleotide primer for the detection of SNP TSC0037982
ttataagtttta

SEQ ID NO: 334169 - DNA, 12 bp, Artificial Sequence
  Oligonucleotide primer for the detection of SNP TSC0037982
ctacaaacttta

SEQ ID NO: 334170 - DNA, 12 bp, Artificial Sequence
  Oligonucleotide primer for the detection of SNP TSC0037983
actaataaatcc

SEQ ID NO: 334171 - DNA, 12 bp, Artificial Sequence
  Oligonucleotide primer for the detection of SNP TSC0037983
ggtttttttgat

SEQ ID NO: 334172 - DNA, 12 bp, Artificial Sequence
  Oligonucleotide primer for the detection of SNP TSC0037983
aaactttcctaa

SEQ ID NO: 334173 - DNA, 12 bp, Artificial Sequence
  Oligonucleotide primer for the detection of SNP TSC0037984
ataaaatcaaac

SEQ ID NO: 334174 - DNA, 12 bp, Artificial Sequence
  Oligonucleotide primer for the detection of SNP TSC0037989
aaaattacacaa

SEQ ID NO: 334175 - DNA, 12 bp, Artificial Sequence
  Oligonucleotide primer for the detection of SNP TSC0037989
tctaaccctaac

SEQ ID NO: 334176 - DNA, 12 bp, Artificial Sequence
  Oligonucleotide primer for the detection of SNP TSC0037989
gaagttgtatag

SEQ ID NO: 334177 - DNA, 12 bp, Artificial Sequence
  Oligonucleotide primer for the detection of SNP TSC0037990
atttattctatt

SEQ ID NO: 334178 - DNA, 12 bp, Artificial Sequence
  Oligonucleotide primer for the detection of SNP TSC0037990
gagatttttttg

SEQ ID NO: 334179 - DNA, 12 bp, Artificial Sequence
  Oligonucleotide primer for the detection of SNP TSC0037991
taccctaatatt

SEQ ID NO: 334180 - DNA, 12 bp, Artificial Sequence
  Oligonucleotide primer for the detection of SNP TSC0037991
gatattaaaagg

SEQ ID NO: 334181 - DNA, 12 bp, Artificial Sequence
  Oligonucleotide primer for the detection of SNP TSC0037993
attaataataat

SEQ ID NO: 334182 - DNA, 12 bp, Artificial Sequence
  Oligonucleotide primer for the detection of SNP TSC0037993
tccctctaacta

SEQ ID NO: 334183 - DNA, 12 bp, Artificial Sequence
  Oligonucleotide primer for the detection of SNP TSC0037993
gttggtggtgat

SEQ ID NO: 334184 - DNA, 12 bp, Artificial Sequence
  Oligonucleotide primer for the detection of SNP TSC0037994
tcctttattttt

SEQ ID NO: 334185 - DNA, 12 bp, Artificial Sequence
  Oligonucleotide primer for the detection of SNP TSC0037995
ctccactctcta

SEQ ID NO: 334186 - DNA, 12 bp, Artificial Sequence
  Oligonucleotide primer for the detection of SNP TSC0037995
atatatattggg

SEQ ID NO: 334187 - DNA, 12 bp, Artificial Sequence
  Oligonucleotide primer for the detection of SNP TSC0037996
tttccccttccc

SEQ ID NO: 334188 - DNA, 12 bp, Artificial Sequence
  Oligonucleotide primer for the detection of SNP TSC0037996
ttatactcattc

SEQ ID NO: 334189 - DNA, 12 bp, Artificial Sequence
  Oligonucleotide primer for the detection of SNP TSC0038000
ttaatggatatt

SEQ ID NO: 334190 - DNA, 12 bp, Artificial Sequence
  Oligonucleotide primer for the detection of SNP TSC0038000
ttaataaacatt

SEQ ID NO: 334191 - DNA, 12 bp, Artificial Sequence
  Oligonucleotide primer for the detection of SNP TSC0038000
tggaaatgattt

SEQ ID NO: 334192 - DNA, 12 bp, Artificial Sequence
  Oligonucleotide primer for the detection of SNP TSC0038001
tcaacacatact

SEQ ID NO: 334193 - DNA, 12 bp, Artificial Sequence
  Oligonucleotide primer for the detection of SNP TSC0038001
aatagtggttag

SEQ ID NO: 334194 - DNA, 12 bp, Artificial Sequence
  Oligonucleotide primer for the detection of SNP TSC0038002
caacacatactc

SEQ ID NO: 334195 - DNA, 12 bp, Artificial Sequence
  Oligonucleotide primer for the detection of SNP TSC0038002
taatagtggtta

SEQ ID NO: 334196 - DNA, 12 bp, Artificial Sequence
  Oligonucleotide primer for the detection of SNP TSC0038003
tataacaatatt

SEQ ID NO: 334197 - DNA, 12 bp, Artificial Sequence
  Oligonucleotide primer for the detection of SNP TSC0038003
taattggtgtga

SEQ ID NO: 334198 - DNA, 12 bp, Artificial Sequence
  Oligonucleotide primer for the detection of SNP TSC0038003
taactaatataa

SEQ ID NO: 334199 - DNA, 12 bp, Artificial Sequence
  Oligonucleotide primer for the detection of SNP TSC0038004
catataccctcc

SEQ ID NO: 334200 - DNA, 12 bp, Artificial Sequence
  Oligonucleotide primer for the detection of SNP TSC0038004
taatttagtata

SEQ ID NO: 334201 - DNA, 12 bp, Artificial Sequence
  Oligonucleotide primer for the detection of SNP TSC0038004
caactcaatata

SEQ ID NO: 334202 - DNA, 12 bp, Artificial Sequence
  Oligonucleotide primer for the detection of SNP TSC0038005
ataaataatacc

SEQ ID NO: 334203 - DNA, 12 bp, Artificial Sequence
  Oligonucleotide primer for the detection of SNP TSC0038010
ttacctttcaat

SEQ ID NO: 334204 - DNA, 12 bp, Artificial Sequence
  Oligonucleotide primer for the detection of SNP TSC0038010
agttatttaaga

SEQ ID NO: 334205 - DNA, 12 bp, Artificial Sequence
  Oligonucleotide primer for the detection of SNP TSC0038010
aaccatccaaaa

SEQ ID NO: 334206 - DNA, 12 bp, Artificial Sequence
  Oligonucleotide primer for the detection of SNP TSC0038013
acttcctacatt

SEQ ID NO: 334207 - DNA, 12 bp, Artificial Sequence
  Oligonucleotide primer for the detection of SNP TSC0038013
gttaagaaattg

SEQ ID NO: 334208 - DNA, 12 bp, Artificial Sequence
  Oligonucleotide primer for the detection of SNP TSC0038014
atttggttttta

SEQ ID NO: 334209 - DNA, 12 bp, Artificial Sequence
  Oligonucleotide primer for the detection of SNP TSC0038014
atttaatttcta

SEQ ID NO: 334210 - DNA, 12 bp, Artificial Sequence
  Oligonucleotide primer for the detection of SNP TSC0038014
ggaaagaaattt

SEQ ID NO: 334211 - DNA, 12 bp, Artificial Sequence
  Oligonucleotide primer for the detection of SNP TSC0038015
tcaaaataccaa

SEQ ID NO: 334212 - DNA, 12 bp, Artificial Sequence
  Oligonucleotide primer for the detection of SNP TSC0038015
gatattgaattt

SEQ ID NO: 334213 - DNA, 12 bp, Artificial Sequence
  Oligonucleotide primer for the detection of SNP TSC0038015
aaacactaaatc

SEQ ID NO: 334214 - DNA, 12 bp, Artificial Sequence
  Oligonucleotide primer for the detection of SNP TSC0038016
taaaatattaca

SEQ ID NO: 334215 - DNA, 12 bp, Artificial Sequence
  Oligonucleotide primer for the detection of SNP TSC0038016
ctccattcatct

SEQ ID NO: 334216 - DNA, 12 bp, Artificial Sequence
  Oligonucleotide primer for the detection of SNP TSC0038016
taagatattata

SEQ ID NO: 334217 - DNA, 12 bp, Artificial Sequence
  Oligonucleotide primer for the detection of SNP TSC0038017
tccccaaataaa

SEQ ID NO: 334218 - DNA, 12 bp, Artificial Sequence
  Oligonucleotide primer for the detection of SNP TSC0038017
gtattaaattag

SEQ ID NO: 334219 - DNA, 12 bp, Artificial Sequence
  Oligonucleotide primer for the detection of SNP TSC0038017
tatcaaattaaa

SEQ ID NO: 334220 - DNA, 12 bp, Artificial Sequence
  Oligonucleotide primer for the detection of SNP TSC0038017
aattttttaggt

SEQ ID NO: 334221 - DNA, 12 bp, Artificial Sequence
  Oligonucleotide primer for the detection of SNP TSC0038019
catactaaaaaa

SEQ ID NO: 334222 - DNA, 12 bp, Artificial Sequence
  Oligonucleotide primer for the detection of SNP TSC0038019
gttttgagtatt

SEQ ID NO: 334223 - DNA, 12 bp, Artificial Sequence
  Oligonucleotide primer for the detection of SNP TSC0038019
actttaaacacc

SEQ ID NO: 334224 - DNA, 12 bp, Artificial Sequence
  Oligonucleotide primer for the detection of SNP TSC0038019
tatgttggagga

SEQ ID NO: 334225 - DNA, 12 bp, Artificial Sequence
  Oligonucleotide primer for the detection of SNP TSC0038020
ccacaaacccac

SEQ ID NO: 334226 - DNA, 12 bp, Artificial Sequence
  Oligonucleotide primer for the detection of SNP TSC0038020
ttataggtttat

SEQ ID NO: 334227 - DNA, 12 bp, Artificial Sequence
  Oligonucleotide primer for the detection of SNP TSC0038021
tcccaacaaaat

SEQ ID NO: 334228 - DNA, 12 bp, Artificial Sequence
  Oligonucleotide primer for the detection of SNP TSC0038021
tcccaacgaaat

SEQ ID NO: 334229 - DNA, 12 bp, Artificial Sequence
  Oligonucleotide primer for the detection of SNP TSC0038021
ataaggagttta

SEQ ID NO: 334230 - DNA, 12 bp, Artificial Sequence
  Oligonucleotide primer for the detection of SNP TSC0038022
aaaacatataaa

SEQ ID NO: 334231 - DNA, 12 bp, Artificial Sequence
  Oligonucleotide primer for the detection of SNP TSC0038022
tattgggttgat

SEQ ID NO: 334232 - DNA, 12 bp, Artificial Sequence
  Oligonucleotide primer for the detection of SNP TSC0038022
tattaaattaac

SEQ ID NO: 334233 - DNA, 12 bp, Artificial Sequence
  Oligonucleotide primer for the detection of SNP TSC0038022
aaagggatatat

SEQ ID NO: 334234 - DNA, 12 bp, Artificial Sequence
  Oligonucleotide primer for the detection of SNP TSC0038023
tatatttcctcc

SEQ ID NO: 334235 - DNA, 12 bp, Artificial Sequence
  Oligonucleotide primer for the detection of SNP TSC0038023
gaaattttatta

SEQ ID NO: 334236 - DNA, 12 bp, Artificial Sequence
  Oligonucleotide primer for the detection of SNP TSC0038025
tgagtgtgtgtg

SEQ ID NO: 334237 - DNA, 12 bp, Artificial Sequence
  Oligonucleotide primer for the detection of SNP TSC0038026
agtgtgtgtgta

SEQ ID NO: 334238 - DNA, 12 bp, Artificial Sequence
  Oligonucleotide primer for the detection of SNP TSC0038027
ccctccccacct

SEQ ID NO: 334239 - DNA, 12 bp, Artificial Sequence
  Oligonucleotide primer for the detection of SNP TSC0038027
ggtttgagtttt

SEQ ID NO: 334240 - DNA, 12 bp, Artificial Sequence
  Oligonucleotide primer for the detection of SNP TSC0038027
aacctaaacttc

SEQ ID NO: 334241 - DNA, 12 bp, Artificial Sequence
  Oligonucleotide primer for the detection of SNP TSC0038028
caaaacccaaat

SEQ ID NO: 334242 - DNA, 12 bp, Artificial Sequence
  Oligonucleotide primer for the detection of SNP TSC0038028
gtttgggataaa

SEQ ID NO: 334243 - DNA, 12 bp, Artificial Sequence
  Oligonucleotide primer for the detection of SNP TSC0038029
cactaaaataca

SEQ ID NO: 334244 - DNA, 12 bp, Artificial Sequence
  Oligonucleotide primer for the detection of SNP TSC0038029
aagagatagagt

SEQ ID NO: 334245 - DNA, 12 bp, Artificial Sequence
  Oligonucleotide primer for the detection of SNP TSC0038029
attgagatgtat

SEQ ID NO: 334246 - DNA, 12 bp, Artificial Sequence
  Oligonucleotide primer for the detection of SNP TSC0038030
ttatttctaaaa

SEQ ID NO: 334247 - DNA, 12 bp, Artificial Sequence
  Oligonucleotide primer for the detection of SNP TSC0038030
aaaggttaattt

SEQ ID NO: 334248 - DNA, 12 bp, Artificial Sequence
  Oligonucleotide primer for the detection of SNP TSC0038030
caaaaactaatc

SEQ ID NO: 334249 - DNA, 12 bp, Artificial Sequence
  Oligonucleotide primer for the detection of SNP TSC0038030
agttgtttttgg

SEQ ID NO: 334250 - DNA, 12 bp, Artificial Sequence
  Oligonucleotide primer for the detection of SNP TSC0038031
aaaaacaaacat

SEQ ID NO: 334251 - DNA, 12 bp, Artificial Sequence
  Oligonucleotide primer for the detection of SNP TSC0038031
aaaaacaaacgt

SEQ ID NO: 334252 - DNA, 12 bp, Artificial Sequence
  Oligonucleotide primer for the detection of SNP TSC0038031
aaaaacgaacat

SEQ ID NO: 334253 - DNA, 12 bp, Artificial Sequence
  Oligonucleotide primer for the detection of SNP TSC0038031
aaaaacgaacgt

SEQ ID NO: 334254 - DNA, 12 bp, Artificial Sequence
  Oligonucleotide primer for the detection of SNP TSC0038031
atatattaatgg

SEQ ID NO: 334255 - DNA, 12 bp, Artificial Sequence
  Oligonucleotide primer for the detection of SNP TSC0038032
tatgtatgttaa

SEQ ID NO: 334256 - DNA, 12 bp, Artificial Sequence
  Oligonucleotide primer for the detection of SNP TSC0038033
cccaaatatata

SEQ ID NO: 334257 - DNA, 12 bp, Artificial Sequence
  Oligonucleotide primer for the detection of SNP TSC0038033
gtagttattaaa

SEQ ID NO: 334258 - DNA, 12 bp, Artificial Sequence
  Oligonucleotide primer for the detection of SNP TSC0038033
ataattattaaa

SEQ ID NO: 334259 - DNA, 12 bp, Artificial Sequence
  Oligonucleotide primer for the detection of SNP TSC0038033
ttaaatatgtat

SEQ ID NO: 334260 - DNA, 12 bp, Artificial Sequence
  Oligonucleotide primer for the detection of SNP TSC0038040
ttaacctaatta

SEQ ID NO: 334261 - DNA, 12 bp, Artificial Sequence
  Oligonucleotide primer for the detection of SNP TSC0038040
tatagaatatat

SEQ ID NO: 334262 - DNA, 12 bp, Artificial Sequence
  Oligonucleotide primer for the detection of SNP TSC0038040
cacaaaatacat

SEQ ID NO: 334263 - DNA, 12 bp, Artificial Sequence
  Oligonucleotide primer for the detection of SNP TSC0038040
ttaatttagtta

SEQ ID NO: 334264 - DNA, 12 bp, Artificial Sequence
  Oligonucleotide primer for the detection of SNP TSC0038042
cgtaaataaaaa

SEQ ID NO: 334265 - DNA, 12 bp, Artificial Sequence
  Oligonucleotide primer for the detection of SNP TSC0038042
gttagtggtggg

SEQ ID NO: 334266 - DNA, 12 bp, Artificial Sequence
  Oligonucleotide primer for the detection of SNP TSC0038042
gttagcggtggg

SEQ ID NO: 334267 - DNA, 12 bp, Artificial Sequence
  Oligonucleotide primer for the detection of SNP TSC0038042
actaacgataaa

SEQ ID NO: 334268 - DNA, 12 bp, Artificial Sequence
  Oligonucleotide primer for the detection of SNP TSC0038042
tgtaggtaaaag

SEQ ID NO: 334269 - DNA, 12 bp, Artificial Sequence
  Oligonucleotide primer for the detection of SNP TSC0038042
cgtaggtaaaag

SEQ ID NO: 334270 - DNA, 12 bp, Artificial Sequence
  Oligonucleotide primer for the detection of SNP TSC0038044
aattatatttta

SEQ ID NO: 334271 - DNA, 12 bp, Artificial Sequence
  Oligonucleotide primer for the detection of SNP TSC0038044
aactacatttta

SEQ ID NO: 334272 - DNA, 12 bp, Artificial Sequence
  Oligonucleotide primer for the detection of SNP TSC0038044
ggtagagaaaaa

SEQ ID NO: 334273 - DNA, 12 bp, Artificial Sequence
  Oligonucleotide primer for the detection of SNP TSC0038048
ttcctcccataa

SEQ ID NO: 334274 - DNA, 12 bp, Artificial Sequence
  Oligonucleotide primer for the detection of SNP TSC0038048
ccataattccac

SEQ ID NO: 334275 - DNA, 12 bp, Artificial Sequence
  Oligonucleotide primer for the detection of SNP TSC0038049
ttttacctaaac

SEQ ID NO: 334276 - DNA, 12 bp, Artificial Sequence
  Oligonucleotide primer for the detection of SNP TSC0038049
ttatatttatag

SEQ ID NO: 334277 - DNA, 12 bp, Artificial Sequence
  Oligonucleotide primer for the detection of SNP TSC0038050
taaaaaaatcac

SEQ ID NO: 334278 - DNA, 12 bp, Artificial Sequence
  Oligonucleotide primer for the detection of SNP TSC0038052
actaaaatcaca

SEQ ID NO: 334279 - DNA, 12 bp, Artificial Sequence
  Oligonucleotide primer for the detection of SNP TSC0038052
tggggtgtagtg

SEQ ID NO: 334280 - DNA, 12 bp, Artificial Sequence
  Oligonucleotide primer for the detection of SNP TSC0038052
gttgagattata

SEQ ID NO: 334281 - DNA, 12 bp, Artificial Sequence
  Oligonucleotide primer for the detection of SNP TSC0038053
acacacacatac

SEQ ID NO: 334282 - DNA, 12 bp, Artificial Sequence
  Oligonucleotide primer for the detection of SNP TSC0038054
aataaacatacc

SEQ ID NO: 334283 - DNA, 12 bp, Artificial Sequence
  Oligonucleotide primer for the detection of SNP TSC0038054
tcactaactcta

SEQ ID NO: 334284 - DNA, 12 bp, Artificial Sequence
  Oligonucleotide primer for the detection of SNP TSC0038054
gataagtatgtt

SEQ ID NO: 334285 - DNA, 12 bp, Artificial Sequence
  Oligonucleotide primer for the detection of SNP TSC0038055
ctatataacaaa

SEQ ID NO: 334286 - DNA, 12 bp, Artificial Sequence
  Oligonucleotide primer for the detection of SNP TSC0038055
agttttagggtg

SEQ ID NO: 334287 - DNA, 12 bp, Artificial Sequence
  Oligonucleotide primer for the detection of SNP TSC0038055
aattttaaaata

SEQ ID NO: 334288 - DNA, 12 bp, Artificial Sequence
  Oligonucleotide primer for the detection of SNP TSC0038055
gttgtataataa

SEQ ID NO: 334289 - DNA, 12 bp, Artificial Sequence
  Oligonucleotide primer for the detection of SNP TSC0038056
cgctacaacctc

SEQ ID NO: 334290 - DNA, 12 bp, Artificial Sequence
  Oligonucleotide primer for the detection of SNP TSC0038060
atcaccaccacc

SEQ ID NO: 334291 - DNA, 12 bp, Artificial Sequence
  Oligonucleotide primer for the detection of SNP TSC0038060
atcgccaccacc

SEQ ID NO: 334292 - DNA, 12 bp, Artificial Sequence
  Oligonucleotide primer for the detection of SNP TSC0038060
ttggaggggtgg

SEQ ID NO: 334293 - DNA, 12 bp, Artificial Sequence
  Oligonucleotide primer for the detection of SNP TSC0038060
tcggaggggtgg

SEQ ID NO: 334294 - DNA, 12 bp, Artificial Sequence
  Oligonucleotide primer for the detection of SNP TSC0038060
ccgaaaaaataa

SEQ ID NO: 334295 - DNA, 12 bp, Artificial Sequence
  Oligonucleotide primer for the detection of SNP TSC0038060
attgttattatt

SEQ ID NO: 334296 - DNA, 12 bp, Artificial Sequence
  Oligonucleotide primer for the detection of SNP TSC0038060
atcgttattatt

SEQ ID NO: 334297 - DNA, 12 bp, Artificial Sequence
  Oligonucleotide primer for the detection of SNP TSC0038060
attgttattatc

SEQ ID NO: 334298 - DNA, 12 bp, Artificial Sequence
  Oligonucleotide primer for the detection of SNP TSC0038060
atcgttattatc

SEQ ID NO: 334299 - DNA, 12 bp, Artificial Sequence
  Oligonucleotide primer for the detection of SNP TSC0038061
ttttctcttccc

SEQ ID NO: 334300 - DNA, 12 bp, Artificial Sequence
  Oligonucleotide primer for the detection of SNP TSC0038061
ttttggtgggga

SEQ ID NO: 334301 - DNA, 12 bp, Artificial Sequence
  Oligonucleotide primer for the detection of SNP TSC0038062
cacaccaccata

SEQ ID NO: 334302 - DNA, 12 bp, Artificial Sequence
  Oligonucleotide primer for the detection of SNP TSC0038062
cacaccgccata

SEQ ID NO: 334303 - DNA, 12 bp, Artificial Sequence
  Oligonucleotide primer for the detection of SNP TSC0038062
cgcaccaccata

SEQ ID NO: 334304 - DNA, 12 bp, Artificial Sequence
  Oligonucleotide primer for the detection of SNP TSC0038062
cgcaccgccata

SEQ ID NO: 334305 - DNA, 12 bp, Artificial Sequence
  Oligonucleotide primer for the detection of SNP TSC0038062
aaaaattagttt

SEQ ID NO: 334306 - DNA, 12 bp, Artificial Sequence
  Oligonucleotide primer for the detection of SNP TSC0038062
aaaaattaactc

SEQ ID NO: 334307 - DNA, 12 bp, Artificial Sequence
  Oligonucleotide primer for the detection of SNP TSC0038062
gtattgttatgt

SEQ ID NO: 334308 - DNA, 12 bp, Artificial Sequence
  Oligonucleotide primer for the detection of SNP TSC0038062
gtatcgttatgt

SEQ ID NO: 334309 - DNA, 12 bp, Artificial Sequence
  Oligonucleotide primer for the detection of SNP TSC0038062
gtattgttatgc

SEQ ID NO: 334310 - DNA, 12 bp, Artificial Sequence
  Oligonucleotide primer for the detection of SNP TSC0038062
gtatcgttatgc

SEQ ID NO: 334311 - DNA, 12 bp, Artificial Sequence
  Oligonucleotide primer for the detection of SNP TSC0038063
aaatctcctaac

SEQ ID NO: 334312 - DNA, 12 bp, Artificial Sequence
  Oligonucleotide primer for the detection of SNP TSC0038063
ttttgttatagg

SEQ ID NO: 334313 - DNA, 12 bp, Artificial Sequence
  Oligonucleotide primer for the detection of SNP TSC0038064
atacacactttt

SEQ ID NO: 334314 - DNA, 12 bp, Artificial Sequence
  Oligonucleotide primer for the detection of SNP TSC0038064
taaaaagagaaa

SEQ ID NO: 334315 - DNA, 12 bp, Artificial Sequence
  Oligonucleotide primer for the detection of SNP TSC0038067
ataactaaataa

SEQ ID NO: 334316 - DNA, 12 bp, Artificial Sequence
  Oligonucleotide primer for the detection of SNP TSC0038067
ttttatatagga

SEQ ID NO: 334317 - DNA, 12 bp, Artificial Sequence
  Oligonucleotide primer for the detection of SNP TSC0038071
atttcaaaaatt

SEQ ID NO: 334318 - DNA, 12 bp, Artificial Sequence
  Oligonucleotide primer for the detection of SNP TSC0038071
tgatatttggaa

SEQ ID NO: 334319 - DNA, 12 bp, Artificial Sequence
  Oligonucleotide primer for the detection of SNP TSC0038072
atctactccaaa

SEQ ID NO: 334320 - DNA, 12 bp, Artificial Sequence
  Oligonucleotide primer for the detection of SNP TSC0038072
ttataagaagtt

SEQ ID NO: 334321 - DNA, 12 bp, Artificial Sequence
  Oligonucleotide primer for the detection of SNP TSC0038072
tcacaaaaaact

SEQ ID NO: 334322 - DNA, 12 bp, Artificial Sequence
  Oligonucleotide primer for the detection of SNP TSC0038073
aactcgaaaaaa

SEQ ID NO: 334323 - DNA, 12 bp, Artificial Sequence
  Oligonucleotide primer for the detection of SNP TSC0038073
gtttaattattc

SEQ ID NO: 334324 - DNA, 12 bp, Artificial Sequence
  Oligonucleotide primer for the detection of SNP TSC0038073
aattcgggagga

SEQ ID NO: 334325 - DNA, 12 bp, Artificial Sequence
  Oligonucleotide primer for the detection of SNP TSC0038075
ttcctctattta

SEQ ID NO: 334326 - DNA, 12 bp, Artificial Sequence
  Oligonucleotide primer for the detection of SNP TSC0038076
tctttatcaaaa

SEQ ID NO: 334327 - DNA, 12 bp, Artificial Sequence
  Oligonucleotide primer for the detection of SNP TSC0038076
tttattttaagg

SEQ ID NO: 334328 - DNA, 12 bp, Artificial Sequence
  Oligonucleotide primer for the detection of SNP TSC0038076
tttatcccaaaa

SEQ ID NO: 334329 - DNA, 12 bp, Artificial Sequence
  Oligonucleotide primer for the detection of SNP TSC0038078
accatttttcat

SEQ ID NO: 334330 - DNA, 12 bp, Artificial Sequence
  Oligonucleotide primer for the detection of SNP TSC0038078
gaagttattaaa

SEQ ID NO: 334331 - DNA, 12 bp, Artificial Sequence
  Oligonucleotide primer for the detection of SNP TSC0038083
tgttttagtttt

SEQ ID NO: 334332 - DNA, 12 bp, Artificial Sequence
  Oligonucleotide primer for the detection of SNP TSC0038087
tacactcccttt

SEQ ID NO: 334333 - DNA, 12 bp, Artificial Sequence
  Oligonucleotide primer for the detection of SNP TSC0038087
tacgctcccttt

SEQ ID NO: 334334 - DNA, 12 bp, Artificial Sequence
  Oligonucleotide primer for the detection of SNP TSC0038087
gttgtggggagg

SEQ ID NO: 334335 - DNA, 12 bp, Artificial Sequence
  Oligonucleotide primer for the detection of SNP TSC0038087
gttgcggggagg

SEQ ID NO: 334336 - DNA, 12 bp, Artificial Sequence
  Oligonucleotide primer for the detection of SNP TSC0038088
taacaaacaaac

SEQ ID NO: 334337 - DNA, 12 bp, Artificial Sequence
  Oligonucleotide primer for the detection of SNP TSC0038088
tgatttgtatta

SEQ ID NO: 334338 - DNA, 12 bp, Artificial Sequence
  Oligonucleotide primer for the detection of SNP TSC0038088
tgattcgtatta

SEQ ID NO: 334339 - DNA, 12 bp, Artificial Sequence
  Oligonucleotide primer for the detection of SNP TSC0038091
actatcttctac

SEQ ID NO: 334340 - DNA, 12 bp, Artificial Sequence
  Oligonucleotide primer for the detection of SNP TSC0038091
ggtatggttgtt

SEQ ID NO: 334341 - DNA, 12 bp, Artificial Sequence
  Oligonucleotide primer for the detection of SNP TSC0038091
ggtatggtcgtt

SEQ ID NO: 334342 - DNA, 12 bp, Artificial Sequence
  Oligonucleotide primer for the detection of SNP TSC0038091
ggtatggttgtc

SEQ ID NO: 334343 - DNA, 12 bp, Artificial Sequence
  Oligonucleotide primer for the detection of SNP TSC0038091
ggtatggtcgtc

SEQ ID NO: 334344 - DNA, 12 bp, Artificial Sequence
  Oligonucleotide primer for the detection of SNP TSC0038091
ataacataacca

SEQ ID NO: 334345 - DNA, 12 bp, Artificial Sequence
  Oligonucleotide primer for the detection of SNP TSC0038091
ataacataaccg

SEQ ID NO: 334346 - DNA, 12 bp, Artificial Sequence
  Oligonucleotide primer for the detection of SNP TSC0038098
tacctcttcatt

SEQ ID NO: 334347 - DNA, 12 bp, Artificial Sequence
  Oligonucleotide primer for the detection of SNP TSC0038098
tacctcttcgtt

SEQ ID NO: 334348 - DNA, 12 bp, Artificial Sequence
  Oligonucleotide primer for the detection of SNP TSC0038098
gtgtatttaaaa

SEQ ID NO: 334349 - DNA, 12 bp, Artificial Sequence
  Oligonucleotide primer for the detection of SNP TSC0038098
tacatctaaaaa

SEQ ID NO: 334350 - DNA, 12 bp, Artificial Sequence
  Oligonucleotide primer for the detection of SNP TSC0038098
tgttttttcgtt

SEQ ID NO: 334351 - DNA, 12 bp, Artificial Sequence
  Oligonukleotid-Primer
atcacataaatt

SEQ ID NO: 334352 - DNA, 12 bp, Artificial Sequence
  Oligonucleotide primer for the detection of SNP TSC0038099
atcacgtaaatt

SEQ ID NO: 334353 - DNA, 12 bp, Artificial Sequence
  Oligonucleotide primer for the detection of SNP TSC0038099
gttatgtgggtt

SEQ ID NO: 334354 - DNA, 12 bp, Artificial Sequence
  Oligonucleotide primer for the detection of SNP TSC0038099
gttacgtgggtt

SEQ ID NO: 334355 - DNA, 12 bp, Artificial Sequence
  Oligonucleotide primer for the detection of SNP TSC0038100
aaccatttcatt

SEQ ID NO: 334356 - DNA, 12 bp, Artificial Sequence
  Oligonucleotide primer for the detection of SNP TSC0038100
ttggataggtgg

SEQ ID NO: 334357 - DNA, 12 bp, Artificial Sequence
  Oligonucleotide primer for the detection of SNP TSC0038101
actccttactaa

SEQ ID NO: 334358 - DNA, 12 bp, Artificial Sequence
  Oligonucleotide primer for the detection of SNP TSC0038101
tttgggatatga

SEQ ID NO: 334359 - DNA, 12 bp, Artificial Sequence
  Oligonucleotide primer for the detection of SNP TSC0038101
cctaaaatataa

SEQ ID NO: 334360 - DNA, 12 bp, Artificial Sequence
  Oligonucleotide primer for the detection of SNP TSC0038101
gttttttattgg

SEQ ID NO: 334361 - DNA, 12 bp, Artificial Sequence
  Oligonucleotide primer for the detection of SNP TSC0038102
aaaattactttc

SEQ ID NO: 334362 - DNA, 12 bp, Artificial Sequence
  Oligonucleotide primer for the detection of SNP TSC0038102
agaaaatagttg

SEQ ID NO: 334363 - DNA, 12 bp, Artificial Sequence
  Oligonucleotide primer for the detection of SNP TSC0038103
actcaaaataat

SEQ ID NO: 334364 - DNA, 12 bp, Artificial Sequence
  Oligonucleotide primer for the detection of SNP TSC0038103
cctttcaataac

SEQ ID NO: 334365 - DNA, 12 bp, Artificial Sequence
  Oligonucleotide primer for the detection of SNP TSC0038103
gtttaaagtgat

SEQ ID NO: 334366 - DNA, 12 bp, Artificial Sequence
  Oligonucleotide primer for the detection of SNP TSC0038104
actcaaaacttc

SEQ ID NO: 334367 - DNA, 12 bp, Artificial Sequence
  Oligonucleotide primer for the detection of SNP TSC0038104
gtgttttaattg

SEQ ID NO: 334368 - DNA, 12 bp, Artificial Sequence
  Oligonucleotide primer for the detection of SNP TSC0038107
atactaccacat

SEQ ID NO: 334369 - DNA, 12 bp, Artificial Sequence
  Oligonucleotide primer for the detection of SNP TSC0038107
gttgaaatttaa

SEQ ID NO: 334370 - DNA, 12 bp, Artificial Sequence
  Oligonucleotide primer for the detection of SNP TSC0038107
attaaaacttaa

SEQ ID NO: 334371 - DNA, 12 bp, Artificial Sequence
  Oligonucleotide primer for the detection of SNP TSC0038107
gtattgttatat

SEQ ID NO: 334372 - DNA, 12 bp, Artificial Sequence
  Oligonucleotide primer for the detection of SNP TSC0038109
accaactacctt

SEQ ID NO: 334373 - DNA, 12 bp, Artificial Sequence
  Oligonucleotide primer for the detection of SNP TSC0038109
agttattaataa

SEQ ID NO: 334374 - DNA, 12 bp, Artificial Sequence
  Oligonucleotide primer for the detection of SNP TSC0038109
gttagttatttt

SEQ ID NO: 334375 - DNA, 12 bp, Artificial Sequence
  Oligonucleotide primer for the detection of SNP TSC0038110
ctctctacaact

SEQ ID NO: 334376 - DNA, 12 bp, Artificial Sequence
  Oligonucleotide primer for the detection of SNP TSC0038110
ttggtatagaaa

SEQ ID NO: 334377 - DNA, 12 bp, Artificial Sequence
  Oligonucleotide primer for the detection of SNP TSC0038112
ttggagtttttt

SEQ ID NO: 334378 - DNA, 12 bp, Artificial Sequence
  Oligonucleotide primer for the detection of SNP TSC0038112
ctaaaatttttc

SEQ ID NO: 334379 - DNA, 12 bp, Artificial Sequence
  Oligonucleotide primer for the detection of SNP TSC0038113
atatcaaattaa

SEQ ID NO: 334380 - DNA, 12 bp, Artificial Sequence
  Oligonucleotide primer for the detection of SNP TSC0038113
tttattggatat

SEQ ID NO: 334381 - DNA, 12 bp, Artificial Sequence
  Oligonucleotide primer for the detection of SNP TSC0038113
tttactaaatat

SEQ ID NO: 334382 - DNA, 12 bp, Artificial Sequence
  Oligonucleotide primer for the detection of SNP TSC0038113
tgttagattaat

SEQ ID NO: 334383 - DNA, 12 bp, Artificial Sequence
  Oligonucleotide primer for the detection of SNP TSC0038114
taaataaaccat

SEQ ID NO: 334384 - DNA, 12 bp, Artificial Sequence
  Oligonucleotide primer for the detection of SNP TSC0038114
tggataaagtta

SEQ ID NO: 334385 - DNA, 12 bp, Artificial Sequence
  Oligonucleotide primer for the detection of SNP TSC0038114
taaacaaaatca

SEQ ID NO: 334386 - DNA, 12 bp, Artificial Sequence
  Oligonucleotide primer for the detection of SNP TSC0038114
tagataagttat

SEQ ID NO: 334387 - DNA, 12 bp, Artificial Sequence
  Oligonucleotide primer for the detection of SNP TSC0038115
ttaaaaaaacat

SEQ ID NO: 334388 - DNA, 12 bp, Artificial Sequence
  Oligonucleotide primer for the detection of SNP TSC0038115
ttgagtttgcga

SEQ ID NO: 334389 - DNA, 12 bp, Artificial Sequence
  Oligonucleotide primer for the detection of SNP TSC0038120
atatacgccatc

SEQ ID NO: 334390 - DNA, 12 bp, Artificial Sequence
  Oligonucleotide primer for the detection of SNP TSC0038121
ttaaactcaaaa

SEQ ID NO: 334391 - DNA, 12 bp, Artificial Sequence
  Oligonucleotide primer for the detection of SNP TSC0038121
ttggtttaagat

SEQ ID NO: 334392 - DNA, 12 bp, Artificial Sequence
  Oligonucleotide primer for the detection of SNP TSC0038121
ctaacttaaaat

SEQ ID NO: 334393 - DNA, 12 bp, Artificial Sequence
  Oligonucleotide primer for the detection of SNP TSC0038121
ttaaatttagaa

SEQ ID NO: 334394 - DNA, 12 bp, Artificial Sequence
  Oligonucleotide primer for the detection of SNP TSC0038122
ataatatttaat

SEQ ID NO: 334395 - DNA, 12 bp, Artificial Sequence
  Oligonucleotide primer for the detection of SNP TSC0038122
agttataataat

SEQ ID NO: 334396 - DNA, 12 bp, Artificial Sequence
  Oligonucleotide primer for the detection of SNP TSC0038122
aattacaacaac

SEQ ID NO: 334397 - DNA, 12 bp, Artificial Sequence
  Oligonucleotide primer for the detection of SNP TSC0038122
atgatatttgat

SEQ ID NO: 334398 - DNA, 12 bp, Artificial Sequence
  Oligonucleotide primer for the detection of SNP TSC0038123
tttttatggtga

SEQ ID NO: 334399 - DNA, 12 bp, Artificial Sequence
  Oligonucleotide primer for the detection of SNP TSC0038131
attaccacttac

SEQ ID NO: 334400 - DNA, 12 bp, Artificial Sequence
  Oligonucleotide primer for the detection of SNP TSC0038131
tattgtaatgta

SEQ ID NO: 334401 - DNA, 12 bp, Artificial Sequence
  Oligonucleotide primer for the detection of SNP TSC0038131
cattataataca

SEQ ID NO: 334402 - DNA, 12 bp, Artificial Sequence
  Oligonucleotide primer for the detection of SNP TSC0038131
attattatttat

SEQ ID NO: 334403 - DNA, 12 bp, Artificial Sequence
  Oligonucleotide primer for the detection of SNP TSC0038132
ttaggttatttg

SEQ ID NO: 334404 - DNA, 12 bp, Artificial Sequence
  Oligonucleotide primer for the detection of SNP TSC0038132
tggtgggagatt

SEQ ID NO: 334405 - DNA, 12 bp, Artificial Sequence
  Oligonucleotide primer for the detection of SNP TSC0038136
aacaaaaattct

SEQ ID NO: 334406 - DNA, 12 bp, Artificial Sequence
  Oligonucleotide primer for the detection of SNP TSC0038136
gtttagatttag

SEQ ID NO: 334407 - DNA, 12 bp, Artificial Sequence
  Oligonucleotide primer for the detection of SNP TSC0038137
tcacatatattt

SEQ ID NO: 334408 - DNA, 12 bp, Artificial Sequence
  Oligonucleotide primer for the detection of SNP TSC0038137
atttaatctccc

SEQ ID NO: 334409 - DNA, 12 bp, Artificial Sequence
  Oligonucleotide primer for the detection of SNP TSC0038138
acatttactctt

SEQ ID NO: 334410 - DNA, 12 bp, Artificial Sequence
  Oligonucleotide primer for the detection of SNP TSC0038138
atttagaatgta

SEQ ID NO: 334411 - DNA, 12 bp, Artificial Sequence
  Oligonucleotide primer for the detection of SNP TSC0038139
tccaaatccacc

SEQ ID NO: 334412 - DNA, 12 bp, Artificial Sequence
  Oligonucleotide primer for the detection of SNP TSC0038139
agtaagtagttg

SEQ ID NO: 334413 - DNA, 12 bp, Artificial Sequence
  Oligonucleotide primer for the detection of SNP TSC0038141
aatctatatttt

SEQ ID NO: 334414 - DNA, 12 bp, Artificial Sequence
  Oligonucleotide primer for the detection of SNP TSC0038141
atttggggttaa

SEQ ID NO: 334415 - DNA, 12 bp, Artificial Sequence
  Oligonucleotide primer for the detection of SNP TSC0038142
aacaatatcatt

SEQ ID NO: 334416 - DNA, 12 bp, Artificial Sequence
  Oligonucleotide primer for the detection of SNP TSC0038142
aacgatatcatt

SEQ ID NO: 334417 - DNA, 12 bp, Artificial Sequence
  Oligonucleotide primer for the detection of SNP TSC0038142
atctatattcta

SEQ ID NO: 334418 - DNA, 12 bp, Artificial Sequence
  Oligonucleotide primer for the detection of SNP TSC0038142
acgatgttattt

SEQ ID NO: 334419 - DNA, 12 bp, Artificial Sequence
  Oligonucleotide primer for the detection of SNP TSC0038146
aaaaaactacaa

SEQ ID NO: 334420 - DNA, 12 bp, Artificial Sequence
  Oligonucleotide primer for the detection of SNP TSC0038146
ttctctacatct

SEQ ID NO: 334421 - DNA, 12 bp, Artificial Sequence
  Oligonucleotide primer for the detection of SNP TSC0038146
agagaattataa

SEQ ID NO: 334422 - DNA, 12 bp, Artificial Sequence
  Oligonucleotide primer for the detection of SNP TSC0038147
acacaaaaacaa

SEQ ID NO: 334423 - DNA, 12 bp, Artificial Sequence
  Oligonucleotide primer for the detection of SNP TSC0038147
acacgaaaacaa

SEQ ID NO: 334424 - DNA, 12 bp, Artificial Sequence
  Oligonucleotide primer for the detection of SNP TSC0038147
acgcaaaaacaa

SEQ ID NO: 334425 - DNA, 12 bp, Artificial Sequence
  Oligonucleotide primer for the detection of SNP TSC0038147
acgcgaaaacaa

SEQ ID NO: 334426 - DNA, 12 bp, Artificial Sequence
  Oligonucleotide primer for the detection of SNP TSC0038147
tagtagtgaggt

SEQ ID NO: 334427 - DNA, 12 bp, Artificial Sequence
  Oligonucleotide primer for the detection of SNP TSC0038147
gtgtgggggtag

SEQ ID NO: 334428 - DNA, 12 bp, Artificial Sequence
  Oligonucleotide primer for the detection of SNP TSC0038147
gcgtgggggtag

SEQ ID NO: 334429 - DNA, 12 bp, Artificial Sequence
  Oligonucleotide primer for the detection of SNP TSC0038147
gtgcgggggtag

SEQ ID NO: 334430 - DNA, 12 bp, Artificial Sequence
  Oligonucleotide primer for the detection of SNP TSC0038147
gcgcgggggtag

SEQ ID NO: 334431 - DNA, 12 bp, Artificial Sequence
  Oligonucleotide primer for the detection of SNP TSC0038148
actcctactttc

SEQ ID NO: 334432 - DNA, 12 bp, Artificial Sequence
  Oligonucleotide primer for the detection of SNP TSC0038148
gttgttattaaa

SEQ ID NO: 334433 - DNA, 12 bp, Artificial Sequence
  Oligonucleotide primer for the detection of SNP TSC0038149
aaccatcacttc

SEQ ID NO: 334434 - DNA, 12 bp, Artificial Sequence
  Oligonucleotide primer for the detection of SNP TSC0038149
gttggagggatg

SEQ ID NO: 334435 - DNA, 12 bp, Artificial Sequence
  Oligonucleotide primer for the detection of SNP TSC0038150
tttttgtggttg

SEQ ID NO: 334436 - DNA, 12 bp, Artificial Sequence
  Oligonucleotide primer for the detection of SNP TSC0038151
actaatatcaat

SEQ ID NO: 334437 - DNA, 12 bp, Artificial Sequence
  Oligonucleotide primer for the detection of SNP TSC0038151
tattgtttttta

SEQ ID NO: 334438 - DNA, 12 bp, Artificial Sequence
  Oligonucleotide primer for the detection of SNP TSC0038152
ataactaatatc

SEQ ID NO: 334439 - DNA, 12 bp, Artificial Sequence
  Oligonucleotide primer for the detection of SNP TSC0038153
aatcccacttcc

SEQ ID NO: 334440 - DNA, 12 bp, Artificial Sequence
  Oligonucleotide primer for the detection of SNP TSC0038154
aaataccaaaca

SEQ ID NO: 334441 - DNA, 12 bp, Artificial Sequence
  Oligonucleotide primer for the detection of SNP TSC0038154
aacaccatttct

SEQ ID NO: 334442 - DNA, 12 bp, Artificial Sequence
  Oligonucleotide primer for the detection of SNP TSC0038154
aaatattaggta

SEQ ID NO: 334443 - DNA, 12 bp, Artificial Sequence
  Oligonucleotide primer for the detection of SNP TSC0038155
atataaattatt

SEQ ID NO: 334444 - DNA, 12 bp, Artificial Sequence
  Oligonucleotide primer for the detection of SNP TSC0038155
tgtaaaattgga

SEQ ID NO: 334445 - DNA, 12 bp, Artificial Sequence
  Oligonucleotide primer for the detection of SNP TSC0038156
aaacaaaacttt

SEQ ID NO: 334446 - DNA, 12 bp, Artificial Sequence
  Oligonucleotide primer for the detection of SNP TSC0038156
attaaggtttgg

SEQ ID NO: 334447 - DNA, 12 bp, Artificial Sequence
  Oligonucleotide primer for the detection of SNP TSC0038156
accaaaatctaa

SEQ ID NO: 334448 - DNA, 12 bp, Artificial Sequence
  Oligonucleotide primer for the detection of SNP TSC0038156
agataaagtttt

SEQ ID NO: 334449 - DNA, 12 bp, Artificial Sequence
  Oligonucleotide primer for the detection of SNP TSC0038159
tttatccttaat

SEQ ID NO: 334450 - DNA, 12 bp, Artificial Sequence
  Oligonucleotide primer for the detection of SNP TSC0038159
ttaaatccctca

SEQ ID NO: 334451 - DNA, 12 bp, Artificial Sequence
  Oligonucleotide primer for the detection of SNP TSC0038159
tttatttttgat

SEQ ID NO: 334452 - DNA, 12 bp, Artificial Sequence
  Oligonucleotide primer for the detection of SNP TSC0038160
ttaggttaggta

SEQ ID NO: 334453 - DNA, 12 bp, Artificial Sequence
  Oligonucleotide primer for the detection of SNP TSC0038162
atagtgtatttg

SEQ ID NO: 334454 - DNA, 12 bp, Artificial Sequence
  Oligonucleotide primer for the detection of SNP TSC0038162
atagtgtattcg

SEQ ID NO: 334455 - DNA, 12 bp, Artificial Sequence
  Oligonucleotide primer for the detection of SNP TSC0038163
aaactaacttac

SEQ ID NO: 334456 - DNA, 12 bp, Artificial Sequence
  Oligonucleotide primer for the detection of SNP TSC0038163
gaactaacttac

SEQ ID NO: 334457 - DNA, 12 bp, Artificial Sequence
  Oligonucleotide primer for the detection of SNP TSC0038163
aggagtttagtg

SEQ ID NO: 334458 - DNA, 12 bp, Artificial Sequence
  Oligonucleotide primer for the detection of SNP TSC0038163
aggagtttagcg

SEQ ID NO: 334459 - DNA, 12 bp, Artificial Sequence
  Oligonucleotide primer for the detection of SNP TSC0038163
aaaaacccaaca

SEQ ID NO: 334460 - DNA, 12 bp, Artificial Sequence
  Oligonucleotide primer for the detection of SNP TSC0038163
aaaaacccaacg

SEQ ID NO: 334461 - DNA, 12 bp, Artificial Sequence
  Oligonucleotide primer for the detection of SNP TSC0038163
gagttgatttgt

SEQ ID NO: 334462 - DNA, 12 bp, Artificial Sequence
  Oligonucleotide primer for the detection of SNP TSC0038165
taggtttagttt

SEQ ID NO: 334463 - DNA, 12 bp, Artificial Sequence
  Oligonucleotide primer for the detection of SNP TSC0038165
caaacccaacct

SEQ ID NO: 334464 - DNA, 12 bp, Artificial Sequence
  Oligonucleotide primer for the detection of SNP TSC0038166
aattcataaaat

SEQ ID NO: 334465 - DNA, 12 bp, Artificial Sequence
  Oligonucleotide primer for the detection of SNP TSC0038166
atattattttgg

SEQ ID NO: 334466 - DNA, 12 bp, Artificial Sequence
  Oligonucleotide primer for the detection of SNP TSC0038168
atagagtaaaat

SEQ ID NO: 334467 - DNA, 12 bp, Artificial Sequence
  Oligonucleotide primer for the detection of SNP TSC0038168
atagagtaaaac

SEQ ID NO: 334468 - DNA, 12 bp, Artificial Sequence
  Oligonucleotide primer for the detection of SNP TSC0038169
ctttctcctccc

SEQ ID NO: 334469 - DNA, 12 bp, Artificial Sequence
  Oligonucleotide primer for the detection of SNP TSC0038169
gttttttttcgt

SEQ ID NO: 334470 - DNA, 12 bp, Artificial Sequence
  Oligonucleotide primer for the detection of SNP TSC0038169
gtttttttttgc

SEQ ID NO: 334471 - DNA, 12 bp, Artificial Sequence
  Oligonucleotide primer for the detection of SNP TSC0038169
gttttttttcgc

SEQ ID NO: 334472 - DNA, 12 bp, Artificial Sequence
  Oligonucleotide primer for the detection of SNP TSC0038169
actcctcctcac

SEQ ID NO: 334473 - DNA, 12 bp, Artificial Sequence
  Oligonucleotide primer for the detection of SNP TSC0038169
actcctcctcgc

SEQ ID NO: 334474 - DNA, 12 bp, Artificial Sequence
  Oligonucleotide primer for the detection of SNP TSC0038171
ttcaatctatca

SEQ ID NO: 334475 - DNA, 12 bp, Artificial Sequence
  Oligonucleotide primer for the detection of SNP TSC0038171
tgttttaaagaa

SEQ ID NO: 334476 - DNA, 12 bp, Artificial Sequence
  Oligonucleotide primer for the detection of SNP TSC0038171
tacttcaaaaaa

SEQ ID NO: 334477 - DNA, 12 bp, Artificial Sequence
  Oligonucleotide primer for the detection of SNP TSC0038171
ttttaatttgtt

SEQ ID NO: 334478 - DNA, 12 bp, Artificial Sequence
  Oligonucleotide primer for the detection of SNP TSC0038172
caacctccgcct

SEQ ID NO: 334479 - DNA, 12 bp, Artificial Sequence
  Oligonucleotide primer for the detection of SNP TSC0038172
gtttgagtttag

SEQ ID NO: 334480 - DNA, 12 bp, Artificial Sequence
  Oligonucleotide primer for the detection of SNP TSC0038174
atttatatatac

SEQ ID NO: 334481 - DNA, 12 bp, Artificial Sequence
  Oligonucleotide primer for the detection of SNP TSC0038174
catccacacaca

SEQ ID NO: 334482 - DNA, 12 bp, Artificial Sequence
  Oligonucleotide primer for the detection of SNP TSC0038174
agataataggat

SEQ ID NO: 334483 - DNA, 12 bp, Artificial Sequence
  Oligonucleotide primer for the detection of SNP TSC0038177
tttactattttc

SEQ ID NO: 334484 - DNA, 12 bp, Artificial Sequence
  Oligonucleotide primer for the detection of SNP TSC0038177
aggaggaagata

SEQ ID NO: 334485 - DNA, 12 bp, Artificial Sequence
  Oligonucleotide primer for the detection of SNP TSC0038180
cattcttttttt

SEQ ID NO: 334486 - DNA, 12 bp, Artificial Sequence
  Oligonucleotide primer for the detection of SNP TSC0038180
cgttcttttttt

SEQ ID NO: 334487 - DNA, 12 bp, Artificial Sequence
  Oligonucleotide primer for the detection of SNP TSC0038181
caatctaaatcc

SEQ ID NO: 334488 - DNA, 12 bp, Artificial Sequence
  Oligonucleotide primer for the detection of SNP TSC0038181
tttaaattatgg

SEQ ID NO: 334489 - DNA, 12 bp, Artificial Sequence
  Oligonucleotide primer for the detection of SNP TSC0038182
ttggaaaagtgt

SEQ ID NO: 334490 - DNA, 12 bp, Artificial Sequence
  Oligonucleotide primer for the detection of SNP TSC0038182
gtgttttttgga

SEQ ID NO: 334491 - DNA, 12 bp, Artificial Sequence
  Oligonucleotide primer for the detection of SNP TSC0038185
ccataataaatc

SEQ ID NO: 334492 - DNA, 12 bp, Artificial Sequence
  Oligonucleotide primer for the detection of SNP TSC0038185
ttgtgtttatgg

SEQ ID NO: 334493 - DNA, 12 bp, Artificial Sequence
  Oligonucleotide primer for the detection of SNP TSC0038191
taattcccacaa

SEQ ID NO: 334494 - DNA, 12 bp, Artificial Sequence
  Oligonucleotide primer for the detection of SNP TSC0038191
cccaacccctaa

SEQ ID NO: 334495 - DNA, 12 bp, Artificial Sequence
  Oligonucleotide primer for the detection of SNP TSC0038191
tggtttttataa

SEQ ID NO: 334496 - DNA, 12 bp, Artificial Sequence
  Oligonucleotide primer for the detection of SNP TSC0038192
accacatattat

SEQ ID NO: 334497 - DNA, 12 bp, Artificial Sequence
  Oligonucleotide primer for the detection of SNP TSC0038192
ataaattgaata

SEQ ID NO: 334498 - DNA, 12 bp, Artificial Sequence
  Oligonucleotide primer for the detection of SNP TSC0038193
aaacaaaaaaca

SEQ ID NO: 334499 - DNA, 12 bp, Artificial Sequence
  Oligonucleotide primer for the detection of SNP TSC0038193
ttatttaagttt

SEQ ID NO: 334500 - DNA, 12 bp, Artificial Sequence
  Oligonucleotide primer for the detection of SNP TSC0038193
agagtagaaagt

SEQ ID NO: 334501 - DNA, 12 bp, Artificial Sequence
  Oligonucleotide primer for the detection of SNP TSC0038194
attattcctaca

SEQ ID NO: 334502 - DNA, 12 bp, Artificial Sequence
  Oligonucleotide primer for the detection of SNP TSC0038195
atgagttattgt

SEQ ID NO: 334503 - DNA, 12 bp, Artificial Sequence
  Oligonucleotide primer for the detection of SNP TSC0038195
ataaaccattat

SEQ ID NO: 334504 - DNA, 12 bp, Artificial Sequence
  Oligonucleotide primer for the detection of SNP TSC0038195
attagagatagt

SEQ ID NO: 334505 - DNA, 12 bp, Artificial Sequence
  Oligonucleotide primer for the detection of SNP TSC0038196
agaatgagtaag

SEQ ID NO: 334506 - DNA, 12 bp, Artificial Sequence
  Oligonucleotide primer for the detection of SNP TSC0038200
atttatttctta

SEQ ID NO: 334507 - DNA, 12 bp, Artificial Sequence
  Oligonucleotide primer for the detection of SNP TSC0038200
ttgggttttata

SEQ ID NO: 334508 - DNA, 12 bp, Artificial Sequence
  Oligonucleotide primer for the detection of SNP TSC0038200
aaaccttacaaa

SEQ ID NO: 334509 - DNA, 12 bp, Artificial Sequence
  Oligonucleotide primer for the detection of SNP TSC0038201
aaattcaatatc

SEQ ID NO: 334510 - DNA, 12 bp, Artificial Sequence
  Oligonucleotide primer for the detection of SNP TSC0038203
atccaaaaaact

SEQ ID NO: 334511 - DNA, 12 bp, Artificial Sequence
  Oligonucleotide primer for the detection of SNP TSC0038203
tttttttagtaa

SEQ ID NO: 334512 - DNA, 12 bp, Artificial Sequence
  Oligonucleotide primer for the detection of SNP TSC0038204
ttttgttgtgtg

SEQ ID NO: 334513 - DNA, 12 bp, Artificial Sequence
  Oligonucleotide primer for the detection of SNP TSC0038204
tgattgaggttt

SEQ ID NO: 334514 - DNA, 12 bp, Artificial Sequence
  Oligonucleotide primer for the detection of SNP TSC0038206
tccttttttaaa

SEQ ID NO: 334515 - DNA, 12 bp, Artificial Sequence
  Oligonucleotide primer for the detection of SNP TSC0038206
aagaggtaggtt

SEQ ID NO: 334516 - DNA, 12 bp, Artificial Sequence
  Oligonucleotide primer for the detection of SNP TSC0038209
ttaaatacattc

SEQ ID NO: 334517 - DNA, 12 bp, Artificial Sequence
  Oligonucleotide primer for the detection of SNP TSC0038209
atttagagtatg

SEQ ID NO: 334518 - DNA, 12 bp, Artificial Sequence
  Oligonucleotide primer for the detection of SNP TSC0038210
tattaacaaaac

SEQ ID NO: 334519 - DNA, 12 bp, Artificial Sequence
  Oligonucleotide primer for the detection of SNP TSC0038210
tatctaatcata

SEQ ID NO: 334520 - DNA, 12 bp, Artificial Sequence
  Oligonucleotide primer for the detection of SNP TSC0038210
tgttaataaagt

SEQ ID NO: 334521 - DNA, 12 bp, Artificial Sequence
  Oligonucleotide primer for the detection of SNP TSC0038211
caaacctccaat

SEQ ID NO: 334522 - DNA, 12 bp, Artificial Sequence
  Oligonucleotide primer for the detection of SNP TSC0038215
aactataactaa

SEQ ID NO: 334523 - DNA, 12 bp, Artificial Sequence
  Oligonucleotide primer for the detection of SNP TSC0038215
gttgatataaat

SEQ ID NO: 334524 - DNA, 12 bp, Artificial Sequence
  Oligonucleotide primer for the detection of SNP TSC0038215
tattaacataaa

SEQ ID NO: 334525 - DNA, 12 bp, Artificial Sequence
  Oligonucleotide primer for the detection of SNP TSC0038215
agattataattg

SEQ ID NO: 334526 - DNA, 12 bp, Artificial Sequence
  Oligonucleotide primer for the detection of SNP TSC0038216
agtagaatgaag

SEQ ID NO: 334527 - DNA, 12 bp, Artificial Sequence
  Oligonucleotide primer for the detection of SNP TSC0038216
gtatttttagag

SEQ ID NO: 334528 - DNA, 12 bp, Artificial Sequence
  Oligonucleotide primer for the detection of SNP TSC0038217
atggatattata

SEQ ID NO: 334529 - DNA, 12 bp, Artificial Sequence
  Oligonucleotide primer for the detection of SNP TSC0038219
tttataaaatct

SEQ ID NO: 334530 - DNA, 12 bp, Artificial Sequence
  Oligonucleotide primer for the detection of SNP TSC0038219
tttgtgttttag

SEQ ID NO: 334531 - DNA, 12 bp, Artificial Sequence
  Oligonucleotide primer for the detection of SNP TSC0038220
ttaaaataactt

SEQ ID NO: 334532 - DNA, 12 bp, Artificial Sequence
  Oligonucleotide primer for the detection of SNP TSC0038220
ttgagaaatgag

SEQ ID NO: 334533 - DNA, 12 bp, Artificial Sequence
  Oligonucleotide primer for the detection of SNP TSC0038224
cttcaaatatct

SEQ ID NO: 334534 - DNA, 12 bp, Artificial Sequence
  Oligonucleotide primer for the detection of SNP TSC0038224
tttgttgtgaag

SEQ ID NO: 334535 - DNA, 12 bp, Artificial Sequence
  Oligonucleotide primer for the detection of SNP TSC0038227
aaattttttctc

SEQ ID NO: 334536 - DNA, 12 bp, Artificial Sequence
  Oligonucleotide primer for the detection of SNP TSC0038228
taaatatatatt

SEQ ID NO: 334537 - DNA, 12 bp, Artificial Sequence
  Oligonucleotide primer for the detection of SNP TSC0038228
aaatgtatgtag

SEQ ID NO: 334538 - DNA, 12 bp, Artificial Sequence
  Oligonucleotide primer for the detection of SNP TSC0038228
aaatgtacgtag

SEQ ID NO: 334539 - DNA, 12 bp, Artificial Sequence
  Oligonucleotide primer for the detection of SNP TSC0038229
acttaaactcaa

SEQ ID NO: 334540 - DNA, 12 bp, Artificial Sequence
  Oligonucleotide primer for the detection of SNP TSC0038230
aataatatcaaa

SEQ ID NO: 334541 - DNA, 12 bp, Artificial Sequence
  Oligonucleotide primer for the detection of SNP TSC0038230
caaatttttcct

SEQ ID NO: 334542 - DNA, 12 bp, Artificial Sequence
  Oligonucleotide primer for the detection of SNP TSC0038232
atcttcaaactt

SEQ ID NO: 334543 - DNA, 12 bp, Artificial Sequence
  Oligonucleotide primer for the detection of SNP TSC0038232
gaatagataatt

SEQ ID NO: 334544 - DNA, 12 bp, Artificial Sequence
  Oligonucleotide primer for the detection of SNP TSC0038232
aataaataacta

SEQ ID NO: 334545 - DNA, 12 bp, Artificial Sequence
  Oligonucleotide primer for the detection of SNP TSC0038233
atacaatataca

SEQ ID NO: 334546 - DNA, 12 bp, Artificial Sequence
  Oligonucleotide primer for the detection of SNP TSC0038233
tatgtaatatat

SEQ ID NO: 334547 - DNA, 12 bp, Artificial Sequence
  Oligonucleotide primer for the detection of SNP TSC0038234
attttagttaga

SEQ ID NO: 334548 - DNA, 12 bp, Artificial Sequence
  Oligonucleotide primer for the detection of SNP TSC0038235
ataaaactcata

SEQ ID NO: 334549 - DNA, 12 bp, Artificial Sequence
  Oligonucleotide primer for the detection of SNP TSC0038235
aataggttaggt

SEQ ID NO: 334550 - DNA, 12 bp, Artificial Sequence
  Oligonucleotide primer for the detection of SNP TSC0038235
atgagatttatg

SEQ ID NO: 334551 - DNA, 12 bp, Artificial Sequence
  Oligonucleotide primer for the detection of SNP TSC0038237
ttctaccaaatc

SEQ ID NO: 334552 - DNA, 12 bp, Artificial Sequence
  Oligonucleotide primer for the detection of SNP TSC0038237
gttttttagaaa

SEQ ID NO: 334553 - DNA, 12 bp, Artificial Sequence
  Oligonucleotide primer for the detection of SNP TSC0038241
tactaaactaac

SEQ ID NO: 334554 - DNA, 12 bp, Artificial Sequence
  Oligonucleotide primer for the detection of SNP TSC0038241
taaagatttgta

SEQ ID NO: 334555 - DNA, 12 bp, Artificial Sequence
  Oligonucleotide primer for the detection of SNP TSC0038241
taaagattcgta

SEQ ID NO: 334556 - DNA, 12 bp, Artificial Sequence
  Oligonucleotide primer for the detection of SNP TSC0038244
cccctaaacttc

SEQ ID NO: 334557 - DNA, 12 bp, Artificial Sequence
  Oligonucleotide primer for the detection of SNP TSC0038244
ttcttacataat

SEQ ID NO: 334558 - DNA, 12 bp, Artificial Sequence
  Oligonucleotide primer for the detection of SNP TSC0038245
tcactttcaaaa

SEQ ID NO: 334559 - DNA, 12 bp, Artificial Sequence
  Oligonucleotide primer for the detection of SNP TSC0038245
taaattaggaga

SEQ ID NO: 334560 - DNA, 12 bp, Artificial Sequence
  Oligonucleotide primer for the detection of SNP TSC0038248
atactctcctaa

SEQ ID NO: 334561 - DNA, 12 bp, Artificial Sequence
  Oligonucleotide primer for the detection of SNP TSC0038248
taaatgggataa

SEQ ID NO: 334562 - DNA, 12 bp, Artificial Sequence
  Oligonucleotide primer for the detection of SNP TSC0038252
gagattataaga

SEQ ID NO: 334563 - DNA, 12 bp, Artificial Sequence
  Oligonucleotide primer for the detection of SNP TSC0038252
gaaaagtaatat

SEQ ID NO: 334564 - DNA, 12 bp, Artificial Sequence
  Oligonucleotide primer for the detection of SNP TSC0038255
tcttctacttaa

SEQ ID NO: 334565 - DNA, 12 bp, Artificial Sequence
  Oligonucleotide primer for the detection of SNP TSC0038255
tggtgaaagaag

SEQ ID NO: 334566 - DNA, 12 bp, Artificial Sequence
  Oligonucleotide primer for the detection of SNP TSC0038258
acctaatcacat

SEQ ID NO: 334567 - DNA, 12 bp, Artificial Sequence
  Oligonucleotide primer for the detection of SNP TSC0038258
tttgtttttgcg

SEQ ID NO: 334568 - DNA, 12 bp, Artificial Sequence
  Oligonucleotide primer for the detection of SNP TSC0038259
tttaaaaaactt

SEQ ID NO: 334569 - DNA, 12 bp, Artificial Sequence
  Oligonucleotide primer for the detection of SNP TSC0038263
taaaaacaaatt

SEQ ID NO: 334570 - DNA, 12 bp, Artificial Sequence
  Oligonucleotide primer for the detection of SNP TSC0038263
gtaatatagtga

SEQ ID NO: 334571 - DNA, 12 bp, Artificial Sequence
  Oligonucleotide primer for the detection of SNP TSC0038267
gtttgtgttgtg

SEQ ID NO: 334572 - DNA, 12 bp, Artificial Sequence
  Oligonucleotide primer for the detection of SNP TSC0038267
gtttgcgttgtg

SEQ ID NO: 334573 - DNA, 12 bp, Artificial Sequence
  Oligonucleotide primer for the detection of SNP TSC0038267
atctacattata

SEQ ID NO: 334574 - DNA, 12 bp, Artificial Sequence
  Oligonucleotide primer for the detection of SNP TSC0038267
atctacgttata

SEQ ID NO: 334575 - DNA, 12 bp, Artificial Sequence
  Oligonucleotide primer for the detection of SNP TSC0038267
gagtgtaggtgt

SEQ ID NO: 334576 - DNA, 12 bp, Artificial Sequence
  Oligonucleotide primer for the detection of SNP TSC0038268
tattcataaaca

SEQ ID NO: 334577 - DNA, 12 bp, Artificial Sequence
  Oligonucleotide primer for the detection of SNP TSC0038268
gagattttgatt

SEQ ID NO: 334578 - DNA, 12 bp, Artificial Sequence
  Oligonucleotide primer for the detection of SNP TSC0038268
tgtttatgaata

SEQ ID NO: 334579 - DNA, 12 bp, Artificial Sequence
  Oligonucleotide primer for the detection of SNP TSC0038269
ccttaaaacaac

SEQ ID NO: 334580 - DNA, 12 bp, Artificial Sequence
  Oligonucleotide primer for the detection of SNP TSC0038269
atttatgtggaa

SEQ ID NO: 334581 - DNA, 12 bp, Artificial Sequence
  Oligonucleotide primer for the detection of SNP TSC0038269
atttacgtggaa

SEQ ID NO: 334582 - DNA, 12 bp, Artificial Sequence
  Oligonucleotide primer for the detection of SNP TSC0038269
acttacgtaaaa

SEQ ID NO: 334583 - DNA, 12 bp, Artificial Sequence
  Oligonucleotide primer for the detection of SNP TSC0038270
ctatctatacaa

SEQ ID NO: 334584 - DNA, 12 bp, Artificial Sequence
  Oligonucleotide primer for the detection of SNP TSC0038270
ttgaggttgagt

SEQ ID NO: 334585 - DNA, 12 bp, Artificial Sequence
  Oligonucleotide primer for the detection of SNP TSC0038270
taaaactaaaca

SEQ ID NO: 334586 - DNA, 12 bp, Artificial Sequence
  Oligonucleotide primer for the detection of SNP TSC0038270
tatttgtataat

SEQ ID NO: 334587 - DNA, 12 bp, Artificial Sequence
  Oligonucleotide primer for the detection of SNP TSC0038271
ttatttttgatg

SEQ ID NO: 334588 - DNA, 12 bp, Artificial Sequence
  Oligonucleotide primer for the detection of SNP TSC0038272
tgagtagtttta

SEQ ID NO: 334589 - DNA, 12 bp, Artificial Sequence
  Oligonucleotide primer for the detection of SNP TSC0038274
aaaaatttaatt

SEQ ID NO: 334590 - DNA, 12 bp, Artificial Sequence
  Oligonucleotide primer for the detection of SNP TSC0038274
gttgaattgtga

SEQ ID NO: 334591 - DNA, 12 bp, Artificial Sequence
  Oligonucleotide primer for the detection of SNP TSC0038275
ccatttataact

SEQ ID NO: 334592 - DNA, 12 bp, Artificial Sequence
  Oligonucleotide primer for the detection of SNP TSC0038275
ccgtttataact

SEQ ID NO: 334593 - DNA, 12 bp, Artificial Sequence
  Oligonucleotide primer for the detection of SNP TSC0038276
cctatcctccaa

SEQ ID NO: 334594 - DNA, 12 bp, Artificial Sequence
  Oligonucleotide primer for the detection of SNP TSC0038276
gtggataataga

SEQ ID NO: 334595 - DNA, 12 bp, Artificial Sequence
  Oligonucleotide primer for the detection of SNP TSC0038282
cattttttctct

SEQ ID NO: 334596 - DNA, 12 bp, Artificial Sequence
  Oligonucleotide primer for the detection of SNP TSC0038282
tctactccatca

SEQ ID NO: 334597 - DNA, 12 bp, Artificial Sequence
  Oligonucleotide primer for the detection of SNP TSC0038283
tctccaaaacac

SEQ ID NO: 334598 - DNA, 12 bp, Artificial Sequence
  Oligonucleotide primer for the detection of SNP TSC0038283
tcgttttgttta

SEQ ID NO: 334599 - DNA, 12 bp, Artificial Sequence
  Oligonucleotide primer for the detection of SNP TSC0038283
ttgtttcgttta

SEQ ID NO: 334600 - DNA, 12 bp, Artificial Sequence
  Oligonukleotid-Primer
tcgtttcgttta

SEQ ID NO: 334601 - DNA, 12 bp, Artificial Sequence
  Oligonucleotide primer for the detection of SNP TSC0038284
cataataacctc

SEQ ID NO: 334602 - DNA, 12 bp, Artificial Sequence
  Oligonucleotide primer for the detection of SNP TSC0038285
cttccttaaaac

SEQ ID NO: 334603 - DNA, 12 bp, Artificial Sequence
  Oligonucleotide primer for the detection of SNP TSC0038292
ataaccaaacat

SEQ ID NO: 334604 - DNA, 12 bp, Artificial Sequence
  Oligonucleotide primer for the detection of SNP TSC0038293
taacaccaactc

SEQ ID NO: 334605 - DNA, 12 bp, Artificial Sequence
  Oligonucleotide primer for the detection of SNP TSC0038293
tttatgatataa

SEQ ID NO: 334606 - DNA, 12 bp, Artificial Sequence
  Oligonucleotide primer for the detection of SNP TSC0038293
tttacgatataa

SEQ ID NO: 334607 - DNA, 12 bp, Artificial Sequence
  Oligonucleotide primer for the detection of SNP TSC0038294
taaaatatcaaa

SEQ ID NO: 334608 - DNA, 12 bp, Artificial Sequence
  Oligonucleotide primer for the detection of SNP TSC0038294
atttttattaac

SEQ ID NO: 334609 - DNA, 12 bp, Artificial Sequence
  Oligonucleotide primer for the detection of SNP TSC0038294
taaaatattaga

SEQ ID NO: 334610 - DNA, 12 bp, Artificial Sequence
  Oligonucleotide primer for the detection of SNP TSC0038295
tgtagtatttat

SEQ ID NO: 334611 - DNA, 12 bp, Artificial Sequence
  Oligonucleotide primer for the detection of SNP TSC0038295
tacaacattcac

SEQ ID NO: 334612 - DNA, 12 bp, Artificial Sequence
  Oligonukleotid-Primer
gagagggagtgg

SEQ ID NO: 334613 - DNA, 12 bp, Artificial Sequence
  Oligonucleotide primer for the detection of SNP TSC0038298
actaccaataac

SEQ ID NO: 334614 - DNA, 12 bp, Artificial Sequence
  Oligonucleotide primer for the detection of SNP TSC0038298
tttagttagata

SEQ ID NO: 334615 - DNA, 12 bp, Artificial Sequence
  Oligonucleotide primer for the detection of SNP TSC0038300
tgatagagtaag

SEQ ID NO: 334616 - DNA, 12 bp, Artificial Sequence
  Oligonucleotide primer for the detection of SNP TSC0038301
aatctccacttt

SEQ ID NO: 334617 - DNA, 12 bp, Artificial Sequence
  Oligonucleotide primer for the detection of SNP TSC0038301
agtgtatttatg

SEQ ID NO: 334618 - DNA, 12 bp, Artificial Sequence
  Oligonucleotide primer for the detection of SNP TSC0038303
tcataactttca

SEQ ID NO: 334619 - DNA, 12 bp, Artificial Sequence
  Oligonucleotide primer for the detection of SNP TSC0038303
aaggtgttttat

SEQ ID NO: 334620 - DNA, 12 bp, Artificial Sequence
  Oligonukleotid-Primer
aaatactccata

SEQ ID NO: 334621 - DNA, 12 bp, Artificial Sequence
  Oligonucleotide primer for the detection of SNP TSC0038306
attatatataaa

SEQ ID NO: 334622 - DNA, 12 bp, Artificial Sequence
  Oligonucleotide primer for the detection of SNP TSC0038310
tcctaaatactt

SEQ ID NO: 334623 - DNA, 12 bp, Artificial Sequence
  Oligonucleotide primer for the detection of SNP TSC0038310
gggaaagaataa

SEQ ID NO: 334624 - DNA, 12 bp, Artificial Sequence
  Oligonucleotide primer for the detection of SNP TSC0038311
ccttaaaaatct

SEQ ID NO: 334625 - DNA, 12 bp, Artificial Sequence
  Oligonucleotide primer for the detection of SNP TSC0038311
ggtattataggg

SEQ ID NO: 334626 - DNA, 12 bp, Artificial Sequence
  Oligonucleotide primer for the detection of SNP TSC0038311
aataccacaaaa

SEQ ID NO: 334627 - DNA, 12 bp, Artificial Sequence
  Oligonucleotide primer for the detection of SNP TSC0038312
ggattaaggttt

SEQ ID NO: 334628 - DNA, 12 bp, Artificial Sequence
  Oligonukleotid-Primer
ggattaaggttc

SEQ ID NO: 334629 - DNA, 12 bp, Artificial Sequence
  Oligonucleotide primer for the detection of SNP TSC0038313
aacaaataataa

SEQ ID NO: 334630 - DNA, 12 bp, Artificial Sequence
  Oligonucleotide primer for the detection of SNP TSC0038313
aattgtgagagt

SEQ ID NO: 334631 - DNA, 12 bp, Artificial Sequence
  Oligonucleotide primer for the detection of SNP TSC0038313
aataggtgataa

SEQ ID NO: 334632 - DNA, 12 bp, Artificial Sequence
  Oligonukleotid-Primer
ttttaaaaatta

SEQ ID NO: 334633 - DNA, 12 bp, Artificial Sequence
  Oligonucleotide primer for the detection of SNP TSC0038315
atttaaaaaata

SEQ ID NO: 334634 - DNA, 12 bp, Artificial Sequence
  Oligonucleotide primer for the detection of SNP TSC0038315
tttaagattatt

SEQ ID NO: 334635 - DNA, 12 bp, Artificial Sequence
  Oligonucleotide primer for the detection of SNP TSC0038315
tctaaaattatc

SEQ ID NO: 334636 - DNA, 12 bp, Artificial Sequence
  Oligonucleotide primer for the detection of SNP TSC0038315
atttgggaagta

SEQ ID NO: 334637 - DNA, 12 bp, Artificial Sequence
  Oligonucleotide primer for the detection of SNP TSC0038317
aacacaataaca

SEQ ID NO: 334638 - DNA, 12 bp, Artificial Sequence
  Oligonucleotide primer for the detection of SNP TSC0038317
ggtatagtggta

SEQ ID NO: 334639 - DNA, 12 bp, Artificial Sequence
  Oligonucleotide primer for the detection of SNP TSC0038318
aaacaatccaaa

SEQ ID NO: 334640 - DNA, 12 bp, Artificial Sequence
  Oligonukleotid-Primer
aagtaatttagg

SEQ ID NO: 334641 - DNA, 12 bp, Artificial Sequence
  Oligonucleotide primer for the detection of SNP TSC0038319
gataataaattg

SEQ ID NO: 334642 - DNA, 12 bp, Artificial Sequence
  Oligonucleotide primer for the detection of SNP TSC0038319
gataataaatcg

SEQ ID NO: 334643 - DNA, 12 bp, Artificial Sequence
  Oligonucleotide primer for the detection of SNP TSC0038319
aacaataaatcg

SEQ ID NO: 334644 - DNA, 12 bp, Artificial Sequence
  Oligonucleotide primer for the detection of SNP TSC0038319
aggagaatgggt

SEQ ID NO: 334645 - DNA, 12 bp, Artificial Sequence
  Oligonucleotide primer for the detection of SNP TSC0038322
ttataaataatt

SEQ ID NO: 334646 - DNA, 12 bp, Artificial Sequence
  Oligonucleotide primer for the detection of SNP TSC0038322
gtttatttaaga

SEQ ID NO: 334647 - DNA, 12 bp, Artificial Sequence
  Oligonucleotide primer for the detection of SNP TSC0038324
taaaacaaaata

SEQ ID NO: 334648 - DNA, 12 bp, Artificial Sequence
  Oligonukleotid-Primer
cactcaacaaat

SEQ ID NO: 334649 - DNA, 12 bp, Artificial Sequence
  Oligonucleotide primer for the detection of SNP TSC0038325
ggtgtttaataa

SEQ ID NO: 334650 - DNA, 12 bp, Artificial Sequence
  Oligonucleotide primer for the detection of SNP TSC0038325
ggcgtttaataa

SEQ ID NO: 334651 - DNA, 12 bp, Artificial Sequence
  Oligonucleotide primer for the detection of SNP TSC0038327
tttaccatttaa

SEQ ID NO: 334652 - DNA, 12 bp, Artificial Sequence
  Oligonucleotide primer for the detection of SNP TSC0038327
agtaagtaaaat

SEQ ID NO: 334653 - DNA, 12 bp, Artificial Sequence
  Oligonucleotide primer for the detection of SNP TSC0038328
tctatttctttt

SEQ ID NO: 334654 - DNA, 12 bp, Artificial Sequence
  Oligonucleotide primer for the detection of SNP TSC0038328
aatgaaataaaa

SEQ ID NO: 334655 - DNA, 12 bp, Artificial Sequence
  Oligonucleotide primer for the detection of SNP TSC0038332
aacaaaattaac

SEQ ID NO: 334656 - DNA, 12 bp, Artificial Sequence
  Oligonucleotide primer for the detection of SNP TSC0038332
attaatgttaaa

SEQ ID NO: 334657 - DNA, 12 bp, Artificial Sequence
  Oligonucleotide primer for the detection of SNP TSC0038333
atttataaaaaa

SEQ ID NO: 334658 - DNA, 12 bp, Artificial Sequence
  Oligonucleotide primer for the detection of SNP TSC0038333
tgtatttcgttt

SEQ ID NO: 334659 - DNA, 12 bp, Artificial Sequence
  Oligonucleotide primer for the detection of SNP TSC0038333
tatacctcatcc

SEQ ID NO: 334660 - DNA, 12 bp, Artificial Sequence
  Oligonucleotide primer for the detection of SNP TSC0038333
tatacctcgtcc

SEQ ID NO: 334661 - DNA, 12 bp, Artificial Sequence
  Oligonucleotide primer for the detection of SNP TSC0038333
atttatagaaaa

SEQ ID NO: 334662 - DNA, 12 bp, Artificial Sequence
  Oligonucleotide primer for the detection of SNP TSC0038334
ttatctaacatt

SEQ ID NO: 334663 - DNA, 12 bp, Artificial Sequence
  Oligonucleotide primer for the detection of SNP TSC0038334
gtatgaaaataa

SEQ ID NO: 334664 - DNA, 12 bp, Artificial Sequence
  Oligonucleotide primer for the detection of SNP TSC0038335
caaacaaaacaa

SEQ ID NO: 334665 - DNA, 12 bp, Artificial Sequence
  Oligonucleotide primer for the detection of SNP TSC0038335
caaacgaaacaa

SEQ ID NO: 334666 - DNA, 12 bp, Artificial Sequence
  Oligonucleotide primer for the detection of SNP TSC0038335
gtagtatagttt

SEQ ID NO: 334667 - DNA, 12 bp, Artificial Sequence
  Oligonucleotide primer for the detection of SNP TSC0038335
acaacacaatcc

SEQ ID NO: 334668 - DNA, 12 bp, Artificial Sequence
  Oligonucleotide primer for the detection of SNP TSC0038335
tagatggggtag

SEQ ID NO: 334669 - DNA, 12 bp, Artificial Sequence
  Oligonucleotide primer for the detection of SNP TSC0038335
tagacggggtag

SEQ ID NO: 334670 - DNA, 12 bp, Artificial Sequence
  Oligonucleotide primer for the detection of SNP TSC0038336
gtggttaggtat

SEQ ID NO: 334671 - DNA, 12 bp, Artificial Sequence
  Oligonucleotide primer for the detection of SNP TSC0038336
gtggttaggtac

SEQ ID NO: 334672 - DNA, 12 bp, Artificial Sequence
  Oligonucleotide primer for the detection of SNP TSC0038336
ataaccaaacac

SEQ ID NO: 334673 - DNA, 12 bp, Artificial Sequence
  Oligonucleotide primer for the detection of SNP TSC0038336
ggtatgagttac

SEQ ID NO: 334674 - DNA, 12 bp, Artificial Sequence
  Oligonucleotide primer for the detection of SNP TSC0038337
ctttctcacaaa

SEQ ID NO: 334675 - DNA, 12 bp, Artificial Sequence
  Oligonucleotide primer for the detection of SNP TSC0038337
ggattagatgag

SEQ ID NO: 334676 - DNA, 12 bp, Artificial Sequence
  Oligonucleotide primer for the detection of SNP TSC0038337
tttttataggtt

SEQ ID NO: 334677 - DNA, 12 bp, Artificial Sequence
  Oligonucleotide primer for the detection of SNP TSC0038339
ttttgttataat

SEQ ID NO: 334678 - DNA, 12 bp, Artificial Sequence
  Oligonucleotide primer for the detection of SNP TSC0038340
cttatacttctc

SEQ ID NO: 334679 - DNA, 12 bp, Artificial Sequence
  Oligonucleotide primer for the detection of SNP TSC0038340
agttttggaagt

SEQ ID NO: 334680 - DNA, 12 bp, Artificial Sequence
  Oligonucleotide primer for the detection of SNP TSC0038340
aattctaaaaat

SEQ ID NO: 334681 - DNA, 12 bp, Artificial Sequence
  Oligonucleotide primer for the detection of SNP TSC0038341
acataaatactt

SEQ ID NO: 334682 - DNA, 12 bp, Artificial Sequence
  Oligonucleotide primer for the detection of SNP TSC0038341
tgaatttttata

SEQ ID NO: 334683 - DNA, 12 bp, Artificial Sequence
  Oligonucleotide primer for the detection of SNP TSC0038345
ctccttctttca

SEQ ID NO: 334684 - DNA, 12 bp, Artificial Sequence
  Oligonucleotide primer for the detection of SNP TSC0038345
tatagtgttaat

SEQ ID NO: 334685 - DNA, 12 bp, Artificial Sequence
  Oligonucleotide primer for the detection of SNP TSC0038345
cacaatactaat

SEQ ID NO: 334686 - DNA, 12 bp, Artificial Sequence
  Oligonucleotide primer for the detection of SNP TSC0038346
tacaaaacaatt

SEQ ID NO: 334687 - DNA, 12 bp, Artificial Sequence
  Oligonucleotide primer for the detection of SNP TSC0038346
tgagagttaaga

SEQ ID NO: 334688 - DNA, 12 bp, Artificial Sequence
  Oligonucleotide primer for the detection of SNP TSC0038347
attggattatag

SEQ ID NO: 334689 - DNA, 12 bp, Artificial Sequence
  Oligonucleotide primer for the detection of SNP TSC0038347
ctaaatcataaa

SEQ ID NO: 334690 - DNA, 12 bp, Artificial Sequence
  Oligonucleotide primer for the detection of SNP TSC0038347
attagaaattat

SEQ ID NO: 334691 - DNA, 12 bp, Artificial Sequence
  Oligonucleotide primer for the detection of SNP TSC0038347
attagaaattac

SEQ ID NO: 334692 - DNA, 12 bp, Artificial Sequence
  Oligonucleotide primer for the detection of SNP TSC0038348
aaccaaactaat

SEQ ID NO: 334693 - DNA, 12 bp, Artificial Sequence
  Oligonucleotide primer for the detection of SNP TSC0038348
gttaggagttta

SEQ ID NO: 334694 - DNA, 12 bp, Artificial Sequence
  Oligonucleotide primer for the detection of SNP TSC0038348
atcaaaaattca

SEQ ID NO: 334695 - DNA, 12 bp, Artificial Sequence
  Oligonucleotide primer for the detection of SNP TSC0038348
gttaggttggtt

SEQ ID NO: 334696 - DNA, 12 bp, Artificial Sequence
  Oligonucleotide primer for the detection of SNP TSC0038348
gttaggttggtc

SEQ ID NO: 334697 - DNA, 12 bp, Artificial Sequence
  Oligonucleotide primer for the detection of SNP TSC0038350
tatataaaaata

SEQ ID NO: 334698 - DNA, 12 bp, Artificial Sequence
  Oligonucleotide primer for the detection of SNP TSC0038350
gattttttagtt

SEQ ID NO: 334699 - DNA, 12 bp, Artificial Sequence
  Oligonucleotide primer for the detection of SNP TSC0038350
aacttttcaatt

SEQ ID NO: 334700 - DNA, 12 bp, Artificial Sequence
  Oligonucleotide primer for the detection of SNP TSC0038350
ttatgtagaaat

SEQ ID NO: 334701 - DNA, 12 bp, Artificial Sequence
  Oligonucleotide primer for the detection of SNP TSC0038351
catctccctttc

SEQ ID NO: 334702 - DNA, 12 bp, Artificial Sequence
  Oligonucleotide primer for the detection of SNP TSC0038351
ttttagagagta

SEQ ID NO: 334703 - DNA, 12 bp, Artificial Sequence
  Oligonucleotide primer for the detection of SNP TSC0038352
tctaaattaatc

SEQ ID NO: 334704 - DNA, 12 bp, Artificial Sequence
  Oligonucleotide primer for the detection of SNP TSC0038352
gagaatttttta

SEQ ID NO: 334705 - DNA, 12 bp, Artificial Sequence
  Oligonucleotide primer for the detection of SNP TSC0038354
tattcccaaata

SEQ ID NO: 334706 - DNA, 12 bp, Artificial Sequence
  Oligonucleotide primer for the detection of SNP TSC0038354
ttgagttagaat

SEQ ID NO: 334707 - DNA, 12 bp, Artificial Sequence
  Oligonucleotide primer for the detection of SNP TSC0038356
acctttattttc

SEQ ID NO: 334708 - DNA, 12 bp, Artificial Sequence
  Oligonucleotide primer for the detection of SNP TSC0038356
ccttatatttta

SEQ ID NO: 334709 - DNA, 12 bp, Artificial Sequence
  Oligonucleotide primer for the detection of SNP TSC0038358
caactacaatat

SEQ ID NO: 334710 - DNA, 12 bp, Artificial Sequence
  Oligonucleotide primer for the detection of SNP TSC0038358
ttgtggaggagt

SEQ ID NO: 334711 - DNA, 12 bp, Artificial Sequence
  Oligonucleotide primer for the detection of SNP TSC0038359
atagataattga

SEQ ID NO: 334712 - DNA, 12 bp, Artificial Sequence
  Oligonucleotide primer for the detection of SNP TSC0038359
atagataatcga

SEQ ID NO: 334713 - DNA, 12 bp, Artificial Sequence
  Oligonucleotide primer for the detection of SNP TSC0038359
acaaacaatcaa

SEQ ID NO: 334714 - DNA, 12 bp, Artificial Sequence
  Oligonucleotide primer for the detection of SNP TSC0038359
acaaacaatcga

SEQ ID NO: 334715 - DNA, 12 bp, Artificial Sequence
  Oligonucleotide primer for the detection of SNP TSC0038359
agtgtagtatgt

SEQ ID NO: 334716 - DNA, 12 bp, Artificial Sequence
  Oligonucleotide primer for the detection of SNP TSC0038360
gaagagatgttg

SEQ ID NO: 334717 - DNA, 12 bp, Artificial Sequence
  Oligonucleotide primer for the detection of SNP TSC0038364
tcctcaattttt

SEQ ID NO: 334718 - DNA, 12 bp, Artificial Sequence
  Oligonucleotide primer for the detection of SNP TSC0038365
cctcaattttta

SEQ ID NO: 334719 - DNA, 12 bp, Artificial Sequence
  Oligonucleotide primer for the detection of SNP TSC0038366
tttaatttttaa

SEQ ID NO: 334720 - DNA, 12 bp, Artificial Sequence
  Oligonucleotide primer for the detection of SNP TSC0038366
ctcaatttttaa

SEQ ID NO: 334721 - DNA, 12 bp, Artificial Sequence
  Oligonucleotide primer for the detection of SNP TSC0038369
aattttataatt

SEQ ID NO: 334722 - DNA, 12 bp, Artificial Sequence
  Oligonucleotide primer for the detection of SNP TSC0038369
attgaagaaaaa

SEQ ID NO: 334723 - DNA, 12 bp, Artificial Sequence
  Oligonucleotide primer for the detection of SNP TSC0038370
gctcaacccaaa

SEQ ID NO: 334724 - DNA, 12 bp, Artificial Sequence
  Oligonucleotide primer for the detection of SNP TSC0038370
tctataatttca

SEQ ID NO: 334725 - DNA, 12 bp, Artificial Sequence
  Oligonucleotide primer for the detection of SNP TSC0038370
gtttaatttaga

SEQ ID NO: 334726 - DNA, 12 bp, Artificial Sequence
  Oligonucleotide primer for the detection of SNP TSC0038371
attctcacaatt

SEQ ID NO: 334727 - DNA, 12 bp, Artificial Sequence
  Oligonucleotide primer for the detection of SNP TSC0038371
taattattatta

SEQ ID NO: 334728 - DNA, 12 bp, Artificial Sequence
  Oligonucleotide primer for the detection of SNP TSC0038371
caactaccacca

SEQ ID NO: 334729 - DNA, 12 bp, Artificial Sequence
  Oligonucleotide primer for the detection of SNP TSC0038371
ttttataatttc

SEQ ID NO: 334730 - DNA, 12 bp, Artificial Sequence
  Oligonucleotide primer for the detection of SNP TSC0038372
aaaacaactact

SEQ ID NO: 334731 - DNA, 12 bp, Artificial Sequence
  Oligonucleotide primer for the detection of SNP TSC0038372
taagtattaaaa

SEQ ID NO: 334732 - DNA, 12 bp, Artificial Sequence
  Oligonucleotide primer for the detection of SNP TSC0038373
gttggtagtttg

SEQ ID NO: 334733 - DNA, 12 bp, Artificial Sequence
  Oligonucleotide primer for the detection of SNP TSC0038374
tttagaggtgta

SEQ ID NO: 334734 - DNA, 12 bp, Artificial Sequence
  Oligonucleotide primer for the detection of SNP TSC0038375
catttttcttcc

SEQ ID NO: 334735 - DNA, 12 bp, Artificial Sequence
  Oligonucleotide primer for the detection of SNP TSC0038375
aagatttgttga

SEQ ID NO: 334736 - DNA, 12 bp, Artificial Sequence
  Oligonucleotide primer for the detection of SNP TSC0038376
tccctttcaatt

SEQ ID NO: 334737 - DNA, 12 bp, Artificial Sequence
  Oligonucleotide primer for the detection of SNP TSC0038376
ttttaaattaaa

SEQ ID NO: 334738 - DNA, 12 bp, Artificial Sequence
  Oligonucleotide primer for the detection of SNP TSC0038380
tattcctaaata

SEQ ID NO: 334739 - DNA, 12 bp, Artificial Sequence
  Oligonucleotide primer for the detection of SNP TSC0038380
ttgagataagtt

SEQ ID NO: 334740 - DNA, 12 bp, Artificial Sequence
  Oligonucleotide primer for the detection of SNP TSC0038380
tcgagataagtt

SEQ ID NO: 334741 - DNA, 12 bp, Artificial Sequence
  Oligonucleotide primer for the detection of SNP TSC0038380
ttccaaaataaa

SEQ ID NO: 334742 - DNA, 12 bp, Artificial Sequence
  Oligonucleotide primer for the detection of SNP TSC0038380
ttccgaaataaa

SEQ ID NO: 334743 - DNA, 12 bp, Artificial Sequence
  Oligonucleotide primer for the detection of SNP TSC0038380
ttgtttttgaat

SEQ ID NO: 334744 - DNA, 12 bp, Artificial Sequence
  Oligonucleotide primer for the detection of SNP TSC0038381
taaataatcaac

SEQ ID NO: 334745 - DNA, 12 bp, Artificial Sequence
  Oligonucleotide primer for the detection of SNP TSC0038381
taaatagttagt

SEQ ID NO: 334746 - DNA, 12 bp, Artificial Sequence
  Oligonucleotide primer for the detection of SNP TSC0038382
tcaaaactcata

SEQ ID NO: 334747 - DNA, 12 bp, Artificial Sequence
  Oligonucleotide primer for the detection of SNP TSC0038382
aaaaaaaaagtt

SEQ ID NO: 334748 - DNA, 12 bp, Artificial Sequence
  Oligonucleotide primer for the detection of SNP TSC0038382
tagagtttatat

SEQ ID NO: 334749 - DNA, 12 bp, Artificial Sequence
  Oligonucleotide primer for the detection of SNP TSC0038383
aaaaaaatacac

SEQ ID NO: 334750 - DNA, 12 bp, Artificial Sequence
  Oligonucleotide primer for the detection of SNP TSC0038383
acttttcctcca

SEQ ID NO: 334751 - DNA, 12 bp, Artificial Sequence
  Oligonucleotide primer for the detection of SNP TSC0038383
aaaagggtatat

SEQ ID NO: 334752 - DNA, 12 bp, Artificial Sequence
  Oligonucleotide primer for the detection of SNP TSC0038384
taaataaatcac

SEQ ID NO: 334753 - DNA, 12 bp, Artificial Sequence
  Oligonucleotide primer for the detection of SNP TSC0038387
cttaaacataca

SEQ ID NO: 334754 - DNA, 12 bp, Artificial Sequence
  Oligonucleotide primer for the detection of SNP TSC0038387
tatagatatatt

SEQ ID NO: 334755 - DNA, 12 bp, Artificial Sequence
  Oligonucleotide primer for the detection of SNP TSC0038387
acaaatacatta

SEQ ID NO: 334756 - DNA, 12 bp, Artificial Sequence
  Oligonucleotide primer for the detection of SNP TSC0038387
tttggatatata

SEQ ID NO: 334757 - DNA, 12 bp, Artificial Sequence
  Oligonucleotide primer for the detection of SNP TSC0038388
atttttacaaaa

SEQ ID NO: 334758 - DNA, 12 bp, Artificial Sequence
  Oligonucleotide primer for the detection of SNP TSC0038388
ggaaaatgaata

SEQ ID NO: 334759 - DNA, 12 bp, Artificial Sequence
  Oligonucleotide primer for the detection of SNP TSC0038388
gtttttataaag

SEQ ID NO: 334760 - DNA, 12 bp, Artificial Sequence
  Oligonucleotide primer for the detection of SNP TSC0038389
aactataaactt

SEQ ID NO: 334761 - DNA, 12 bp, Artificial Sequence
  Oligonucleotide primer for the detection of SNP TSC0038389
gatatattatta

SEQ ID NO: 334762 - DNA, 12 bp, Artificial Sequence
  Oligonucleotide primer for the detection of SNP TSC0038389
aacacattatca

SEQ ID NO: 334763 - DNA, 12 bp, Artificial Sequence
  Oligonucleotide primer for the detection of SNP TSC0038389
aattatggattt

SEQ ID NO: 334764 - DNA, 12 bp, Artificial Sequence
  Oligonucleotide primer for the detection of SNP TSC0038391
ataaattaatat

SEQ ID NO: 334765 - DNA, 12 bp, Artificial Sequence
  Oligonucleotide primer for the detection of SNP TSC0038391
tatttattaata

SEQ ID NO: 334766 - DNA, 12 bp, Artificial Sequence
  Oligonucleotide primer for the detection of SNP TSC0038391
tacttattaata

SEQ ID NO: 334767 - DNA, 12 bp, Artificial Sequence
  Oligonucleotide primer for the detection of SNP TSC0038391
gtgaattaatat

SEQ ID NO: 334768 - DNA, 12 bp, Artificial Sequence
  Oligonucleotide primer for the detection of SNP TSC0038394
aggaaatgttag

SEQ ID NO: 334769 - DNA, 12 bp, Artificial Sequence
  Oligonucleotide primer for the detection of SNP TSC0038395
taattaaattaa

SEQ ID NO: 334770 - DNA, 12 bp, Artificial Sequence
  Oligonucleotide primer for the detection of SNP TSC0038395
gttttataaaat

SEQ ID NO: 334771 - DNA, 12 bp, Artificial Sequence
  Oligonucleotide primer for the detection of SNP TSC0038395
tgattgggttag

SEQ ID NO: 334772 - DNA, 12 bp, Artificial Sequence
  Oligonucleotide primer for the detection of SNP TSC0038396
aatcaacataat

SEQ ID NO: 334773 - DNA, 12 bp, Artificial Sequence
  Oligonucleotide primer for the detection of SNP TSC0038396
aagaattttggg

SEQ ID NO: 334774 - DNA, 12 bp, Artificial Sequence
  Oligonucleotide primer for the detection of SNP TSC0038397
aataactttctt

SEQ ID NO: 334775 - DNA, 12 bp, Artificial Sequence
  Oligonucleotide primer for the detection of SNP TSC0038398
caccaatccctc

SEQ ID NO: 334776 - DNA, 12 bp, Artificial Sequence
  Oligonucleotide primer for the detection of SNP TSC0038398
gaagtttaattt

SEQ ID NO: 334777 - DNA, 12 bp, Artificial Sequence
  Oligonucleotide primer for the detection of SNP TSC0038398
taaaaacccaac

SEQ ID NO: 334778 - DNA, 12 bp, Artificial Sequence
  Oligonucleotide primer for the detection of SNP TSC0038398
tattagtttttt

SEQ ID NO: 334779 - DNA, 12 bp, Artificial Sequence
  Oligonucleotide primer for the detection of SNP TSC0038398
tattagtttttc

SEQ ID NO: 334780 - DNA, 12 bp, Artificial Sequence
  Oligonucleotide primer for the detection of SNP TSC0038399
atggtgtgattt

SEQ ID NO: 334781 - DNA, 12 bp, Artificial Sequence
  Oligonucleotide primer for the detection of SNP TSC0038399
atggtgcgattt

SEQ ID NO: 334782 - DNA, 12 bp, Artificial Sequence
  Oligonucleotide primer for the detection of SNP TSC0038399
ggttgtggtaag

SEQ ID NO: 334783 - DNA, 12 bp, Artificial Sequence
  Oligonucleotide primer for the detection of SNP TSC0038401
attgtttgatta

SEQ ID NO: 334784 - DNA, 12 bp, Artificial Sequence
  Oligonucleotide primer for the detection of SNP TSC0038402
tctcaactttct

SEQ ID NO: 334785 - DNA, 12 bp, Artificial Sequence
  Oligonucleotide primer for the detection of SNP TSC0038402
ttattatttgaa

SEQ ID NO: 334786 - DNA, 12 bp, Artificial Sequence
  Oligonucleotide primer for the detection of SNP TSC0038403
tggtattttttc

SEQ ID NO: 334787 - DNA, 12 bp, Artificial Sequence
  Oligonucleotide primer for the detection of SNP TSC0038403
taacacctcccc

SEQ ID NO: 334788 - DNA, 12 bp, Artificial Sequence
  Oligonucleotide primer for the detection of SNP TSC0038403
taatatagagag

SEQ ID NO: 334789 - DNA, 12 bp, Artificial Sequence
  Oligonucleotide primer for the detection of SNP TSC0038404
caacacctatta

SEQ ID NO: 334790 - DNA, 12 bp, Artificial Sequence
  Oligonucleotide primer for the detection of SNP TSC0038404
atatcttatcac

SEQ ID NO: 334791 - DNA, 12 bp, Artificial Sequence
  Oligonucleotide primer for the detection of SNP TSC0038404
tagtatttgttg

SEQ ID NO: 334792 - DNA, 12 bp, Artificial Sequence
  Oligonucleotide primer for the detection of SNP TSC0038407
ctactaattttt

SEQ ID NO: 334793 - DNA, 12 bp, Artificial Sequence
  Oligonucleotide primer for the detection of SNP TSC0038408
ctcatttattat

SEQ ID NO: 334794 - DNA, 12 bp, Artificial Sequence
  Oligonucleotide primer for the detection of SNP TSC0038408
taaattagttat

SEQ ID NO: 334795 - DNA, 12 bp, Artificial Sequence
  Oligonucleotide primer for the detection of SNP TSC0038408
ctaaaccaatca

SEQ ID NO: 334796 - DNA, 12 bp, Artificial Sequence
  Oligonucleotide primer for the detection of SNP TSC0038412
tccaactctaat

SEQ ID NO: 334797 - DNA, 12 bp, Artificial Sequence
  Oligonukleotid-Primer
ttaggaagtgag

SEQ ID NO: 334798 - DNA, 12 bp, Artificial Sequence
  Oligonucleotide primer for the detection of SNP TSC0038414
caaattccaccc

SEQ ID NO: 334799 - DNA, 12 bp, Artificial Sequence
  Oligonucleotide primer for the detection of SNP TSC0038414
gtgagagtgatg

SEQ ID NO: 334800 - DNA, 12 bp, Artificial Sequence
  Oligonucleotide primer for the detection of SNP TSC0038415
ttatggtgagta

SEQ ID NO: 334801 - DNA, 12 bp, Artificial Sequence
  Oligonukleotid-Primer
ccataataaaca

SEQ ID NO: 334802 - DNA, 12 bp, Artificial Sequence
  Oligonucleotide primer for the detection of SNP TSC0038415
gggaatagaggt

SEQ ID NO: 334803 - DNA, 12 bp, Artificial Sequence
  Oligonucleotide primer for the detection of SNP TSC0038416
tactacctttat

SEQ ID NO: 334804 - DNA, 12 bp, Artificial Sequence
  Oligonucleotide primer for the detection of SNP TSC0038416
tgatggtggtag

SEQ ID NO: 334805 - DNA, 12 bp, Artificial Sequence
  Oligonucleotide primer for the detection of SNP TSC0038416
tgacggtggtag

SEQ ID NO: 334806 - DNA, 12 bp, Artificial Sequence
  Oligonucleotide primer for the detection of SNP TSC0038417
cttaaacaattt

SEQ ID NO: 334807 - DNA, 12 bp, Artificial Sequence
  Oligonucleotide primer for the detection of SNP TSC0038420
aatcccaaactt

SEQ ID NO: 334808 - DNA, 12 bp, Artificial Sequence
  Oligonucleotide primer for the detection of SNP TSC0038420
tataaggttata

SEQ ID NO: 334809 - DNA, 12 bp, Artificial Sequence
  Oligonukleotid-Primer
attcaaaaaaac

SEQ ID NO: 334810 - DNA, 12 bp, Artificial Sequence
  Oligonucleotide primer for the detection of SNP TSC0038422
attcgaaaaaac

SEQ ID NO: 334811 - DNA, 12 bp, Artificial Sequence
  Oligonucleotide primer for the detection of SNP TSC0038422
ggaggggtttgg

SEQ ID NO: 334812 - DNA, 12 bp, Artificial Sequence
  Oligonucleotide primer for the detection of SNP TSC0038422
gtttgaaggagt

SEQ ID NO: 334813 - DNA, 12 bp, Artificial Sequence
  Oligonucleotide primer for the detection of SNP TSC0038422
gttcgaaggagt

SEQ ID NO: 334814 - DNA, 12 bp, Artificial Sequence
  Oligonucleotide primer for the detection of SNP TSC0038423
ttttacaaactc

SEQ ID NO: 334815 - DNA, 12 bp, Artificial Sequence
  Oligonucleotide primer for the detection of SNP TSC0038423
attaaggtagta

SEQ ID NO: 334816 - DNA, 12 bp, Artificial Sequence
  Oligonucleotide primer for the detection of SNP TSC0038423
atcaaaacaata

SEQ ID NO: 334817 - DNA, 12 bp, Artificial Sequence
  Oligonucleotide primer for the detection of SNP TSC0038423
ttttgtagattt

SEQ ID NO: 334818 - DNA, 12 bp, Artificial Sequence
  Oligonucleotide primer for the detection of SNP TSC0038424
ctcccttaaaat

SEQ ID NO: 334819 - DNA, 12 bp, Artificial Sequence
  Oligonucleotide primer for the detection of SNP TSC0038424
attataagataa

SEQ ID NO: 334820 - DNA, 12 bp, Artificial Sequence
  Oligonucleotide primer for the detection of SNP TSC0038425
ttacaaaaacat

SEQ ID NO: 334821 - DNA, 12 bp, Artificial Sequence
  Oligonucleotide primer for the detection of SNP TSC0038426
caaataaatttt

SEQ ID NO: 334822 - DNA, 12 bp, Artificial Sequence
  Oligonucleotide primer for the detection of SNP TSC0038426
gttattaataaa

SEQ ID NO: 334823 - DNA, 12 bp, Artificial Sequence
  Oligonucleotide primer for the detection of SNP TSC0038427
aatataataacg

SEQ ID NO: 334824 - DNA, 12 bp, Artificial Sequence
  Oligonucleotide primer for the detection of SNP TSC0038427
gaagatggtttt

SEQ ID NO: 334825 - DNA, 12 bp, Artificial Sequence
  Oligonucleotide primer for the detection of SNP TSC0038427
aaaaataatctt

SEQ ID NO: 334826 - DNA, 12 bp, Artificial Sequence
  Oligonucleotide primer for the detection of SNP TSC0038427
aatatgatgatg

SEQ ID NO: 334827 - DNA, 12 bp, Artificial Sequence
  Oligonucleotide primer for the detection of SNP TSC0038427
aatatgatgacg

SEQ ID NO: 334828 - DNA, 12 bp, Artificial Sequence
  Oligonucleotide primer for the detection of SNP TSC0038428
acaattaaataa

SEQ ID NO: 334829 - DNA, 12 bp, Artificial Sequence
  Oligonucleotide primer for the detection of SNP TSC0038428
aatatactcaca

SEQ ID NO: 334830 - DNA, 12 bp, Artificial Sequence
  Oligonucleotide primer for the detection of SNP TSC0038428
gtaattaagtga

SEQ ID NO: 334831 - DNA, 12 bp, Artificial Sequence
  Oligonucleotide primer for the detection of SNP TSC0038429
tttaaaaaattt

SEQ ID NO: 334832 - DNA, 12 bp, Artificial Sequence
  Oligonucleotide primer for the detection of SNP TSC0038429
gttagggtattg

SEQ ID NO: 334833 - DNA, 12 bp, Artificial Sequence
  Oligonucleotide primer for the detection of SNP TSC0038430
tctattataaaa

SEQ ID NO: 334834 - DNA, 12 bp, Artificial Sequence
  Oligonucleotide primer for the detection of SNP TSC0038430
tttatccatctt

SEQ ID NO: 334835 - DNA, 12 bp, Artificial Sequence
  Oligonucleotide primer for the detection of SNP TSC0038430
tttattatagag

SEQ ID NO: 334836 - DNA, 12 bp, Artificial Sequence
  Oligonucleotide primer for the detection of SNP TSC0038431
aataataaacaa

SEQ ID NO: 334837 - DNA, 12 bp, Artificial Sequence
  Oligonucleotide primer for the detection of SNP TSC0038431
atagtataagag

SEQ ID NO: 334838 - DNA, 12 bp, Artificial Sequence
  Oligonucleotide primer for the detection of SNP TSC0038431
ataacacaaaaa

SEQ ID NO: 334839 - DNA, 12 bp, Artificial Sequence
  Oligonucleotide primer for the detection of SNP TSC0038431
taatagtaggta

SEQ ID NO: 334840 - DNA, 12 bp, Artificial Sequence
  Oligonucleotide primer for the detection of SNP TSC0038432
aatatatctaat

SEQ ID NO: 334841 - DNA, 12 bp, Artificial Sequence
  Oligonucleotide primer for the detection of SNP TSC0038432
aataattgtaaa

SEQ ID NO: 334842 - DNA, 12 bp, Artificial Sequence
  Oligonucleotide primer for the detection of SNP TSC0038433
tctaaatcaaac

SEQ ID NO: 334843 - DNA, 12 bp, Artificial Sequence
  Oligonucleotide primer for the detection of SNP TSC0038433
atttggaaaagt

SEQ ID NO: 334844 - DNA, 12 bp, Artificial Sequence
  Oligonucleotide primer for the detection of SNP TSC0038433
tttgagttagat

SEQ ID NO: 334845 - DNA, 12 bp, Artificial Sequence
  Oligonucleotide primer for the detection of SNP TSC0038433
tttgagttagac

SEQ ID NO: 334846 - DNA, 12 bp, Artificial Sequence
  Oligonucleotide primer for the detection of SNP TSC0038439
tttgttattatg

SEQ ID NO: 334847 - DNA, 12 bp, Artificial Sequence
  Oligonucleotide primer for the detection of SNP TSC0038439
ttcgttattatg

SEQ ID NO: 334848 - DNA, 12 bp, Artificial Sequence
  Oligonucleotide primer for the detection of SNP TSC0038439
tttgttattacg

SEQ ID NO: 334849 - DNA, 12 bp, Artificial Sequence
  Oligonucleotide primer for the detection of SNP TSC0038439
ttcgttattacg

SEQ ID NO: 334850 - DNA, 12 bp, Artificial Sequence
  Oligonucleotide primer for the detection of SNP TSC0038439
cccaccaccacg

SEQ ID NO: 334851 - DNA, 12 bp, Artificial Sequence
  Oligonucleotide primer for the detection of SNP TSC0038439
cccgccaccaca

SEQ ID NO: 334852 - DNA, 12 bp, Artificial Sequence
  Oligonucleotide primer for the detection of SNP TSC0038439
cccgccaccacg

SEQ ID NO: 334853 - DNA, 12 bp, Artificial Sequence
  Oligonucleotide primer for the detection of SNP TSC0038440
ctttctcataat

SEQ ID NO: 334854 - DNA, 12 bp, Artificial Sequence
  Oligonucleotide primer for the detection of SNP TSC0038448
caaaaaataaat

SEQ ID NO: 334855 - DNA, 12 bp, Artificial Sequence
  Oligonucleotide primer for the detection of SNP TSC0038448
aaatagagataa

SEQ ID NO: 334856 - DNA, 12 bp, Artificial Sequence
  Oligonucleotide primer for the detection of SNP TSC0038449
taaaaaaatata

SEQ ID NO: 334857 - DNA, 12 bp, Artificial Sequence
  Oligonucleotide primer for the detection of SNP TSC0038449
taggtgggtatt

SEQ ID NO: 334858 - DNA, 12 bp, Artificial Sequence
  Oligonucleotide primer for the detection of SNP TSC0038449
aaataaatacca

SEQ ID NO: 334859 - DNA, 12 bp, Artificial Sequence
  Oligonucleotide primer for the detection of SNP TSC0038449
ttaggagggtgt

SEQ ID NO: 334860 - DNA, 12 bp, Artificial Sequence
  Oligonucleotide primer for the detection of SNP TSC0038450
ctacaaaaaata

SEQ ID NO: 334861 - DNA, 12 bp, Artificial Sequence
  Oligonucleotide primer for the detection of SNP TSC0038450
taaccaattttt

SEQ ID NO: 334862 - DNA, 12 bp, Artificial Sequence
  Oligonucleotide primer for the detection of SNP TSC0038451
aatcttttccct

SEQ ID NO: 334863 - DNA, 12 bp, Artificial Sequence
  Oligonucleotide primer for the detection of SNP TSC0038451
aagaataattta

SEQ ID NO: 334864 - DNA, 12 bp, Artificial Sequence
  Oligonucleotide primer for the detection of SNP TSC0038451
aaaaataatcta

SEQ ID NO: 334865 - DNA, 12 bp, Artificial Sequence
  Oligonucleotide primer for the detection of SNP TSC0038452
taaatatatcct

SEQ ID NO: 334866 - DNA, 12 bp, Artificial Sequence
  Oligonucleotide primer for the detection of SNP TSC0038452
gtaattattata

SEQ ID NO: 334867 - DNA, 12 bp, Artificial Sequence
  Oligonucleotide primer for the detection of SNP TSC0038453
accaaatcaatc

SEQ ID NO: 334868 - DNA, 12 bp, Artificial Sequence
  Oligonucleotide primer for the detection of SNP TSC0038455
aattaaataaaa

SEQ ID NO: 334869 - DNA, 12 bp, Artificial Sequence
  Oligonucleotide primer for the detection of SNP TSC0038455
ttttttaaggaa

SEQ ID NO: 334870 - DNA, 12 bp, Artificial Sequence
  Oligonucleotide primer for the detection of SNP TSC0038455
cttcttaaaaaa

SEQ ID NO: 334871 - DNA, 12 bp, Artificial Sequence
  Oligonucleotide primer for the detection of SNP TSC0038455
tagttgagtaaa

SEQ ID NO: 334872 - DNA, 12 bp, Artificial Sequence
  Oligonucleotide primer for the detection of SNP TSC0038457
ttccacatacac

SEQ ID NO: 334873 - DNA, 12 bp, Artificial Sequence
  Oligonucleotide primer for the detection of SNP TSC0038457
tgatgtttgtaa

SEQ ID NO: 334874 - DNA, 12 bp, Artificial Sequence
  Oligonucleotide primer for the detection of SNP TSC0038457
tgacgtttgtaa

SEQ ID NO: 334875 - DNA, 12 bp, Artificial Sequence
  Oligonucleotide primer for the detection of SNP TSC0038459
agttagattggg

SEQ ID NO: 334876 - DNA, 12 bp, Artificial Sequence
  Oligonucleotide primer for the detection of SNP TSC0038460
ttgggagatatt

SEQ ID NO: 334877 - DNA, 12 bp, Artificial Sequence
  Oligonucleotide primer for the detection of SNP TSC0038460
ttaaaaaacact

SEQ ID NO: 334878 - DNA, 12 bp, Artificial Sequence
  Oligonucleotide primer for the detection of SNP TSC0038460
ggatagggtggg

SEQ ID NO: 334879 - DNA, 12 bp, Artificial Sequence
  Oligonucleotide primer for the detection of SNP TSC0038462
tatggatttgta

SEQ ID NO: 334880 - DNA, 12 bp, Artificial Sequence
  Oligonucleotide primer for the detection of SNP TSC0038463
acccacaataaa

SEQ ID NO: 334881 - DNA, 12 bp, Artificial Sequence
  Oligonucleotide primer for the detection of SNP TSC0038463
tatgttggggtt

SEQ ID NO: 334882 - DNA, 12 bp, Artificial Sequence
  Oligonucleotide primer for the detection of SNP TSC0038463
tatgttggggtc

SEQ ID NO: 334883 - DNA, 12 bp, Artificial Sequence
  Oligonucleotide primer for the detection of SNP TSC0038463
tacatactaaaa

SEQ ID NO: 334884 - DNA, 12 bp, Artificial Sequence
  Oligonucleotide primer for the detection of SNP TSC0038463
gagtttatagta

SEQ ID NO: 334885 - DNA, 12 bp, Artificial Sequence
  Oligonucleotide primer for the detection of SNP TSC0038464
ctacaatatttc

SEQ ID NO: 334886 - DNA, 12 bp, Artificial Sequence
  Oligonucleotide primer for the detection of SNP TSC0038464
ggagaaattatt

SEQ ID NO: 334887 - DNA, 12 bp, Artificial Sequence
  Oligonucleotide primer for the detection of SNP TSC0038464
ggagaaattatc

SEQ ID NO: 334888 - DNA, 12 bp, Artificial Sequence
  Oligonucleotide primer for the detection of SNP TSC0038465
aaataactacat

SEQ ID NO: 334889 - DNA, 12 bp, Artificial Sequence
  Oligonucleotide primer for the detection of SNP TSC0038466
ctaaaatctatt

SEQ ID NO: 334890 - DNA, 12 bp, Artificial Sequence
  Oligonucleotide primer for the detection of SNP TSC0038466
agaaaatgtgaa

SEQ ID NO: 334891 - DNA, 12 bp, Artificial Sequence
  Oligonucleotide primer for the detection of SNP TSC0038466
agaaaacgtgaa

SEQ ID NO: 334892 - DNA, 12 bp, Artificial Sequence
  Oligonucleotide primer for the detection of SNP TSC0038467
cacacacatatc

SEQ ID NO: 334893 - DNA, 12 bp, Artificial Sequence
  Oligonucleotide primer for the detection of SNP TSC0038467
tatctatttcaa

SEQ ID NO: 334894 - DNA, 12 bp, Artificial Sequence
  Oligonucleotide primer for the detection of SNP TSC0038467
tatatatatgtt

SEQ ID NO: 334895 - DNA, 12 bp, Artificial Sequence
  Oligonucleotide primer for the detection of SNP TSC0038468
attgggataaga

SEQ ID NO: 334896 - DNA, 12 bp, Artificial Sequence
  Oligonucleotide primer for the detection of SNP TSC0038468
gggagattaaat

SEQ ID NO: 334897 - DNA, 12 bp, Artificial Sequence
  Oligonucleotide primer for the detection of SNP TSC0038471
acaaaatacatt

SEQ ID NO: 334898 - DNA, 12 bp, Artificial Sequence
  Oligonucleotide primer for the detection of SNP TSC0038471
tttgtggataag

SEQ ID NO: 334899 - DNA, 12 bp, Artificial Sequence
  Oligonucleotide primer for the detection of SNP TSC0038475
aagtttggaaaa

SEQ ID NO: 334900 - DNA, 12 bp, Artificial Sequence
  Oligonucleotide primer for the detection of SNP TSC0038476
ttatctcttact

SEQ ID NO: 334901 - DNA, 12 bp, Artificial Sequence
  Oligonucleotide primer for the detection of SNP TSC0038477
taaactttatct

SEQ ID NO: 334902 - DNA, 12 bp, Artificial Sequence
  Oligonucleotide primer for the detection of SNP TSC0038477
ttaggagaagta

SEQ ID NO: 334903 - DNA, 12 bp, Artificial Sequence
  Oligonucleotide primer for the detection of SNP TSC0038477
aagttttatttc

SEQ ID NO: 334904 - DNA, 12 bp, Artificial Sequence
  Oligonucleotide primer for the detection of SNP TSC0038478
tctatccctaac

SEQ ID NO: 334905 - DNA, 12 bp, Artificial Sequence
  Oligonucleotide primer for the detection of SNP TSC0038478
gtgattaattgg

SEQ ID NO: 334906 - DNA, 12 bp, Artificial Sequence
  Oligonucleotide primer for the detection of SNP TSC0038478
gtgattaatcgg

SEQ ID NO: 334907 - DNA, 12 bp, Artificial Sequence
  Oligonucleotide primer for the detection of SNP TSC0038479
ctattttctaaa

SEQ ID NO: 334908 - DNA, 12 bp, Artificial Sequence
  Oligonucleotide primer for the detection of SNP TSC0038479
gtagaatgagtt

SEQ ID NO: 334909 - DNA, 12 bp, Artificial Sequence
  Oligonucleotide primer for the detection of SNP TSC0038480
ataattaacata

SEQ ID NO: 334910 - DNA, 12 bp, Artificial Sequence
  Oligonucleotide primer for the detection of SNP TSC0038480
atggttggtatg

SEQ ID NO: 334911 - DNA, 12 bp, Artificial Sequence
  Oligonucleotide primer for the detection of SNP TSC0038481
atcgaaaacatc

SEQ ID NO: 334912 - DNA, 12 bp, Artificial Sequence
  Oligonucleotide primer for the detection of SNP TSC0038482
tattttatggaa

SEQ ID NO: 334913 - DNA, 12 bp, Artificial Sequence
  Oligonucleotide primer for the detection of SNP TSC0038485
attatctccact

SEQ ID NO: 334914 - DNA, 12 bp, Artificial Sequence
  Oligonucleotide primer for the detection of SNP TSC0038487
tcaatccaacac

SEQ ID NO: 334915 - DNA, 12 bp, Artificial Sequence
  Oligonucleotide primer for the detection of SNP TSC0038487
tcctcctcacca

SEQ ID NO: 334916 - DNA, 12 bp, Artificial Sequence
  Oligonucleotide primer for the detection of SNP TSC0038487
ttagtttaatat

SEQ ID NO: 334917 - DNA, 12 bp, Artificial Sequence
  Oligonucleotide primer for the detection of SNP TSC0038487
ttagtttaatac

SEQ ID NO: 334918 - DNA, 12 bp, Artificial Sequence
  Oligonucleotide primer for the detection of SNP TSC0038488
taaacaaccata

SEQ ID NO: 334919 - DNA, 12 bp, Artificial Sequence
  Oligonucleotide primer for the detection of SNP TSC0038488
accaataattta

SEQ ID NO: 334920 - DNA, 12 bp, Artificial Sequence
  Oligonucleotide primer for the detection of SNP TSC0038488
atggataattat

SEQ ID NO: 334921 - DNA, 12 bp, Artificial Sequence
  Oligonucleotide primer for the detection of SNP TSC0038489
gagatagttttt

SEQ ID NO: 334922 - DNA, 12 bp, Artificial Sequence
  Oligonucleotide primer for the detection of SNP TSC0038489
aaaacaactttt

SEQ ID NO: 334923 - DNA, 12 bp, Artificial Sequence
  Oligonucleotide primer for the detection of SNP TSC0038489
agggagagtgag

SEQ ID NO: 334924 - DNA, 12 bp, Artificial Sequence
  Oligonucleotide primer for the detection of SNP TSC0038490
aaatctaaatcc

SEQ ID NO: 334925 - DNA, 12 bp, Artificial Sequence
  Oligonucleotide primer for the detection of SNP TSC0038490
agtgggtataag

SEQ ID NO: 334926 - DNA, 12 bp, Artificial Sequence
  Oligonucleotide primer for the detection of SNP TSC0038490
agcgggtataag

SEQ ID NO: 334927 - DNA, 12 bp, Artificial Sequence
  Oligonucleotide primer for the detection of SNP TSC0038490
ggatttgagttt

SEQ ID NO: 334928 - DNA, 12 bp, Artificial Sequence
  Oligonucleotide primer for the detection of SNP TSC0038491
accaatctactc

SEQ ID NO: 334929 - DNA, 12 bp, Artificial Sequence
  Oligonucleotide primer for the detection of SNP TSC0038491
accgatctactc

SEQ ID NO: 334930 - DNA, 12 bp, Artificial Sequence
  Oligonucleotide primer for the detection of SNP TSC0038491
aataggtgagta

SEQ ID NO: 334931 - DNA, 12 bp, Artificial Sequence
  Oligonucleotide primer for the detection of SNP TSC0038492
tttcacattaaa

SEQ ID NO: 334932 - DNA, 12 bp, Artificial Sequence
  Oligonucleotide primer for the detection of SNP TSC0038492
tttagttattat

SEQ ID NO: 334933 - DNA, 12 bp, Artificial Sequence
  Oligonucleotide primer for the detection of SNP TSC0038492
accactataaaa

SEQ ID NO: 334934 - DNA, 12 bp, Artificial Sequence
  Oligonucleotide primer for the detection of SNP TSC0038492
tttttatattag

SEQ ID NO: 334935 - DNA, 12 bp, Artificial Sequence
  Oligonucleotide primer for the detection of SNP TSC0038493
tacaatataact

SEQ ID NO: 334936 - DNA, 12 bp, Artificial Sequence
  Oligonucleotide primer for the detection of SNP TSC0038493
atgtatgaaatg

SEQ ID NO: 334937 - DNA, 12 bp, Artificial Sequence
  Oligonucleotide primer for the detection of SNP TSC0038496
taggattgtata

SEQ ID NO: 334938 - DNA, 12 bp, Artificial Sequence
  Oligonucleotide primer for the detection of SNP TSC0038499
atttaaaactac

SEQ ID NO: 334939 - DNA, 12 bp, Artificial Sequence
  Oligonucleotide primer for the detection of SNP TSC0038500
aaaatcaaaaat

SEQ ID NO: 334940 - DNA, 12 bp, Artificial Sequence
  Oligonucleotide primer for the detection of SNP TSC0038500
tagatttgtata

SEQ ID NO: 334941 - DNA, 12 bp, Artificial Sequence
  Oligonucleotide primer for the detection of SNP TSC0038503
tctaaaaaaaat

SEQ ID NO: 334942 - DNA, 12 bp, Artificial Sequence
  Oligonucleotide primer for the detection of SNP TSC0038504
aattaatatact

SEQ ID NO: 334943 - DNA, 12 bp, Artificial Sequence
  Oligonucleotide primer for the detection of SNP TSC0038504
agttaagtaaag

SEQ ID NO: 334944 - DNA, 12 bp, Artificial Sequence
  Oligonucleotide primer for the detection of SNP TSC0038505
cctttacccaat

SEQ ID NO: 334945 - DNA, 12 bp, Artificial Sequence
  Oligonucleotide primer for the detection of SNP TSC0038505
atgtttgtttgg

SEQ ID NO: 334946 - DNA, 12 bp, Artificial Sequence
  Oligonucleotide primer for the detection of SNP TSC0038509
cctaatatttat

SEQ ID NO: 334947 - DNA, 12 bp, Artificial Sequence
  Oligonucleotide primer for the detection of SNP TSC0038509
ggattatataag

SEQ ID NO: 334948 - DNA, 12 bp, Artificial Sequence
  Oligonucleotide primer for the detection of SNP TSC0038510
ttagagatttat

SEQ ID NO: 334949 - DNA, 12 bp, Artificial Sequence
  Oligonucleotide primer for the detection of SNP TSC0038510
aaaaatttataa

SEQ ID NO: 334950 - DNA, 12 bp, Artificial Sequence
  Oligonucleotide primer for the detection of SNP TSC0038510
attaaatgaaat

SEQ ID NO: 334951 - DNA, 12 bp, Artificial Sequence
  Oligonucleotide primer for the detection of SNP TSC0038511
tttttaacttcc

SEQ ID NO: 334952 - DNA, 12 bp, Artificial Sequence
  Oligonucleotide primer for the detection of SNP TSC0038511
ttttagattggg

SEQ ID NO: 334953 - DNA, 12 bp, Artificial Sequence
  Oligonucleotide primer for the detection of SNP TSC0038512
attcataaataa

SEQ ID NO: 334954 - DNA, 12 bp, Artificial Sequence
  Oligonucleotide primer for the detection of SNP TSC0038512
ctatcttccctt

SEQ ID NO: 334955 - DNA, 12 bp, Artificial Sequence
  Oligonucleotide primer for the detection of SNP TSC0038512
gtttatgagtaa

SEQ ID NO: 334956 - DNA, 12 bp, Artificial Sequence
  Oligonucleotide primer for the detection of SNP TSC0038513
caatacaatcta

SEQ ID NO: 334957 - DNA, 12 bp, Artificial Sequence
  Oligonucleotide primer for the detection of SNP TSC0038513
tggatttttttt

SEQ ID NO: 334958 - DNA, 12 bp, Artificial Sequence
  Oligonucleotide primer for the detection of SNP TSC0038513
cggatttttttt

SEQ ID NO: 334959 - DNA, 12 bp, Artificial Sequence
  Oligonucleotide primer for the detection of SNP TSC0038513
acaaattttttc

SEQ ID NO: 334960 - DNA, 12 bp, Artificial Sequence
  Oligonucleotide primer for the detection of SNP TSC0038513
acgaattttttc

SEQ ID NO: 334961 - DNA, 12 bp, Artificial Sequence
  Oligonucleotide primer for the detection of SNP TSC0038513
ttagtgtaattt

SEQ ID NO: 334962 - DNA, 12 bp, Artificial Sequence
  Oligonucleotide primer for the detection of SNP TSC0038519
cttaaaattaca

SEQ ID NO: 334963 - DNA, 12 bp, Artificial Sequence
  Oligonucleotide primer for the detection of SNP TSC0038519
aatagaaataat

SEQ ID NO: 334964 - DNA, 12 bp, Artificial Sequence
  Oligonucleotide primer for the detection of SNP TSC0038519
tttggagttgta

SEQ ID NO: 334965 - DNA, 12 bp, Artificial Sequence
  Oligonucleotide primer for the detection of SNP TSC0038520
ttatattaatat

SEQ ID NO: 334966 - DNA, 12 bp, Artificial Sequence
  Oligonucleotide primer for the detection of SNP TSC0038521
tgatgatgtata

SEQ ID NO: 334967 - DNA, 12 bp, Artificial Sequence
  Oligonucleotide primer for the detection of SNP TSC0038522
agtaaagattta

SEQ ID NO: 334968 - DNA, 12 bp, Artificial Sequence
  Oligonucleotide primer for the detection of SNP TSC0038523
aaattttacact

SEQ ID NO: 334969 - DNA, 12 bp, Artificial Sequence
  Oligonucleotide primer for the detection of SNP TSC0038523
taaaggagttaa

SEQ ID NO: 334970 - DNA, 12 bp, Artificial Sequence
  Oligonucleotide primer for the detection of SNP TSC0038524
tttttatctcta

SEQ ID NO: 334971 - DNA, 12 bp, Artificial Sequence
  Oligonucleotide primer for the detection of SNP TSC0038524
ttaaattttgag

SEQ ID NO: 334972 - DNA, 12 bp, Artificial Sequence
  Oligonucleotide primer for the detection of SNP TSC0038526
caacattcttct

SEQ ID NO: 334973 - DNA, 12 bp, Artificial Sequence
  Oligonucleotide primer for the detection of SNP TSC0038526
agttttaaggaa

SEQ ID NO: 334974 - DNA, 12 bp, Artificial Sequence
  Oligonucleotide primer for the detection of SNP TSC0038526
atcctaaaaaaa

SEQ ID NO: 334975 - DNA, 12 bp, Artificial Sequence
  Oligonucleotide primer for the detection of SNP TSC0038528
aaaaaactcaat

SEQ ID NO: 334976 - DNA, 12 bp, Artificial Sequence
  Oligonucleotide primer for the detection of SNP TSC0038528
tttggaaaatta

SEQ ID NO: 334977 - DNA, 12 bp, Artificial Sequence
  Oligonucleotide primer for the detection of SNP TSC0038529
aaaaaatttcat

SEQ ID NO: 334978 - DNA, 12 bp, Artificial Sequence
  Oligonucleotide primer for the detection of SNP TSC0038529
tgagaatatgaa

SEQ ID NO: 334979 - DNA, 12 bp, Artificial Sequence
  Oligonucleotide primer for the detection of SNP TSC0038530
tcttataactat

SEQ ID NO: 334980 - DNA, 12 bp, Artificial Sequence
  Oligonucleotide primer for the detection of SNP TSC0038533
ataaattttaca

SEQ ID NO: 334981 - DNA, 12 bp, Artificial Sequence
  Oligonucleotide primer for the detection of SNP TSC0038533
gtatttgttatt

SEQ ID NO: 334982 - DNA, 12 bp, Artificial Sequence
  Oligonucleotide primer for the detection of SNP TSC0038533
atatctattatt

SEQ ID NO: 334983 - DNA, 12 bp, Artificial Sequence
  Oligonucleotide primer for the detection of SNP TSC0038533
atgaattttgta

SEQ ID NO: 334984 - DNA, 12 bp, Artificial Sequence
  Oligonucleotide primer for the detection of SNP TSC0038536
agtatgaagaat

SEQ ID NO: 334985 - DNA, 12 bp, Artificial Sequence
  Oligonucleotide primer for the detection of SNP TSC0038536
agtacgaagaat

SEQ ID NO: 334986 - DNA, 12 bp, Artificial Sequence
  Oligonucleotide primer for the detection of SNP TSC0038536
aatacgaaaaac

SEQ ID NO: 334987 - DNA, 12 bp, Artificial Sequence
  Oligonucleotide primer for the detection of SNP TSC0038536
taattttgatta

SEQ ID NO: 334988 - DNA, 12 bp, Artificial Sequence
  Oligonucleotide primer for the detection of SNP TSC0038538
atgtttgtgttt

SEQ ID NO: 334989 - DNA, 12 bp, Artificial Sequence
  Oligonucleotide primer for the detection of SNP TSC0038538
taatatctatac

SEQ ID NO: 334990 - DNA, 12 bp, Artificial Sequence
  Oligonucleotide primer for the detection of SNP TSC0038538
atttaggaggtt

SEQ ID NO: 334991 - DNA, 12 bp, Artificial Sequence
  Oligonucleotide primer for the detection of SNP TSC0038539
gaagtgttatgt

SEQ ID NO: 334992 - DNA, 12 bp, Artificial Sequence
  Oligonucleotide primer for the detection of SNP TSC0038539
aaaatactatat

SEQ ID NO: 334993 - DNA, 12 bp, Artificial Sequence
  Oligonucleotide primer for the detection of SNP TSC0038539
gtatggaaagga

SEQ ID NO: 334994 - DNA, 12 bp, Artificial Sequence
  Oligonucleotide primer for the detection of SNP TSC0038540
tcaacaataaca

SEQ ID NO: 334995 - DNA, 12 bp, Artificial Sequence
  Oligonucleotide primer for the detection of SNP TSC0038540
tccttttttttt

SEQ ID NO: 334996 - DNA, 12 bp, Artificial Sequence
  Oligonucleotide primer for the detection of SNP TSC0038540
taatagtgatat

SEQ ID NO: 334997 - DNA, 12 bp, Artificial Sequence
  Oligonucleotide primer for the detection of SNP TSC0038544
tagtataatatg

SEQ ID NO: 334998 - DNA, 12 bp, Artificial Sequence
  Oligonucleotide primer for the detection of SNP TSC0038546
tcatatatatat

SEQ ID NO: 334999 - DNA, 12 bp, Artificial Sequence
  Oligonucleotide primer for the detection of SNP TSC0038546
tgattgtattag

SEQ ID NO: 335000 - DNA, 12 bp, Artificial Sequence
  Oligonucleotide primer for the detection of SNP TSC0038547
agattagtgatt

SEQ ID NO: 335001 - DNA, 12 bp, Artificial Sequence
  Oligonucleotide primer for the detection of SNP TSC0038547
gaatggatggag

SEQ ID NO: 335002 - DNA, 12 bp, Artificial Sequence
  Oligonucleotide primer for the detection of SNP TSC0038548
ccatccattctt

SEQ ID NO: 335003 - DNA, 12 bp, Artificial Sequence
  Oligonucleotide primer for the detection of SNP TSC0038548
tttgttaggtga

SEQ ID NO: 335004 - DNA, 12 bp, Artificial Sequence
  Oligonucleotide primer for the detection of SNP TSC0038549
ttctatcctcct

SEQ ID NO: 335005 - DNA, 12 bp, Artificial Sequence
  Oligonucleotide primer for the detection of SNP TSC0038549
aaggttgttaaa

SEQ ID NO: 335006 - DNA, 12 bp, Artificial Sequence
  Oligonucleotide primer for the detection of SNP TSC0038549
aaaactaccaaa

SEQ ID NO: 335007 - DNA, 12 bp, Artificial Sequence
  Oligonucleotide primer for the detection of SNP TSC0038550
aaccactaacca

SEQ ID NO: 335008 - DNA, 12 bp, Artificial Sequence
  Oligonucleotide primer for the detection of SNP TSC0038550
tagtatggttat

SEQ ID NO: 335009 - DNA, 12 bp, Artificial Sequence
  Oligonucleotide primer for the detection of SNP TSC0038550
taatataaccac

SEQ ID NO: 335010 - DNA, 12 bp, Artificial Sequence
  Oligonukleotid-Primer
attattggttat

SEQ ID NO: 335011 - DNA, 12 bp, Artificial Sequence
  Oligonucleotide primer for the detection of SNP TSC0038550
attattggttac

SEQ ID NO: 335012 - DNA, 12 bp, Artificial Sequence
  Oligonucleotide primer for the detection of SNP TSC0038551
tctaaataacaa

SEQ ID NO: 335013 - DNA, 12 bp, Artificial Sequence
  Oligonucleotide primer for the detection of SNP TSC0038551
gtttttatggag

SEQ ID NO: 335014 - DNA, 12 bp, Artificial Sequence
  Oligonucleotide primer for the detection of SNP TSC0038551
gtttttacggag

SEQ ID NO: 335015 - DNA, 12 bp, Artificial Sequence
  Oligonucleotide primer for the detection of SNP TSC0038551
atcttcacaaaa

SEQ ID NO: 335016 - DNA, 12 bp, Artificial Sequence
  Oligonucleotide primer for the detection of SNP TSC0038551
atcttcacgaaa

SEQ ID NO: 335017 - DNA, 12 bp, Artificial Sequence
  Oligonucleotide primer for the detection of SNP TSC0038551
gatttggataat

SEQ ID NO: 335018 - DNA, 12 bp, Artificial Sequence
  Oligonucleotide primer for the detection of SNP TSC0038552
cttttctttttt

SEQ ID NO: 335019 - DNA, 12 bp, Artificial Sequence
  Oligonucleotide primer for the detection of SNP TSC0038552
tttttattagga

SEQ ID NO: 335020 - DNA, 12 bp, Artificial Sequence
  Oligonucleotide primer for the detection of SNP TSC0038554
cactataaccca

SEQ ID NO: 335021 - DNA, 12 bp, Artificial Sequence
  Oligonucleotide primer for the detection of SNP TSC0038554
cgctataaccca

SEQ ID NO: 335022 - DNA, 12 bp, Artificial Sequence
  Oligonucleotide primer for the detection of SNP TSC0038554
tcttatatattt

SEQ ID NO: 335023 - DNA, 12 bp, Artificial Sequence
  Oligonucleotide primer for the detection of SNP TSC0038554
tgttgtagttta

SEQ ID NO: 335024 - DNA, 12 bp, Artificial Sequence
  Oligonucleotide primer for the detection of SNP TSC0038554
cgttgtagttta

SEQ ID NO: 335025 - DNA, 12 bp, Artificial Sequence
  Oligonucleotide primer for the detection of SNP TSC0038555
taaagattgaag

SEQ ID NO: 335026 - DNA, 12 bp, Artificial Sequence
  Oligonucleotide primer for the detection of SNP TSC0038556
ttaattctttta

SEQ ID NO: 335027 - DNA, 12 bp, Artificial Sequence
  Oligonucleotide primer for the detection of SNP TSC0038556
tgatatattatc

SEQ ID NO: 335028 - DNA, 12 bp, Artificial Sequence
  Oligonucleotide primer for the detection of SNP TSC0038556
taatacactacc

SEQ ID NO: 335029 - DNA, 12 bp, Artificial Sequence
  Oligonucleotide primer for the detection of SNP TSC0038559
cacacataaata

SEQ ID NO: 335030 - DNA, 12 bp, Artificial Sequence
  Oligonucleotide primer for the detection of SNP TSC0038559
cacacgtaaata

SEQ ID NO: 335031 - DNA, 12 bp, Artificial Sequence
  Oligonucleotide primer for the detection of SNP TSC0038559
aagttgtgttaa

SEQ ID NO: 335032 - DNA, 12 bp, Artificial Sequence
  Oligonucleotide primer for the detection of SNP TSC0038559
aaattatattaa

SEQ ID NO: 335033 - DNA, 12 bp, Artificial Sequence
  Oligonucleotide primer for the detection of SNP TSC0038559
tatatgtaagta

SEQ ID NO: 335034 - DNA, 12 bp, Artificial Sequence
  Oligonucleotide primer for the detection of SNP TSC0038559
tatacgtaagta

SEQ ID NO: 335035 - DNA, 12 bp, Artificial Sequence
  Oligonucleotide primer for the detection of SNP TSC0038560
ttatttaatcat

SEQ ID NO: 335036 - DNA, 12 bp, Artificial Sequence
  Oligonucleotide primer for the detection of SNP TSC0038561
ctcctccaattc

SEQ ID NO: 335037 - DNA, 12 bp, Artificial Sequence
  Oligonucleotide primer for the detection of SNP TSC0038561
aggtggttttta

SEQ ID NO: 335038 - DNA, 12 bp, Artificial Sequence
  Oligonucleotide primer for the detection of SNP TSC0038563
aactttattcta

SEQ ID NO: 335039 - DNA, 12 bp, Artificial Sequence
  Oligonucleotide primer for the detection of SNP TSC0038563
gagtagtttaag

SEQ ID NO: 335040 - DNA, 12 bp, Artificial Sequence
  Oligonucleotide primer for the detection of SNP TSC0038566
ttacaataacac

SEQ ID NO: 335041 - DNA, 12 bp, Artificial Sequence
  Oligonucleotide primer for the detection of SNP TSC0038566
tttattggtaac

SEQ ID NO: 335042 - DNA, 12 bp, Artificial Sequence
  Oligonucleotide primer for the detection of SNP TSC0038566
cttactaacaac

SEQ ID NO: 335043 - DNA, 12 bp, Artificial Sequence
  Oligonucleotide primer for the detection of SNP TSC0038566
tgtaatgatatt

SEQ ID NO: 335044 - DNA, 12 bp, Artificial Sequence
  Oligonucleotide primer for the detection of SNP TSC0038567
tatttccttctc

SEQ ID NO: 335045 - DNA, 12 bp, Artificial Sequence
  Oligonucleotide primer for the detection of SNP TSC0038567
taaaattttatg

SEQ ID NO: 335046 - DNA, 12 bp, Artificial Sequence
  Oligonucleotide primer for the detection of SNP TSC0038567
caaaattttata

SEQ ID NO: 335047 - DNA, 12 bp, Artificial Sequence
  Oligonucleotide primer for the detection of SNP TSC0038570
aaacaacttaac

SEQ ID NO: 335048 - DNA, 12 bp, Artificial Sequence
  Oligonucleotide primer for the detection of SNP TSC0038570
tttatattggga

SEQ ID NO: 335049 - DNA, 12 bp, Artificial Sequence
  Oligonucleotide primer for the detection of SNP TSC0038572
aattctcatcat

SEQ ID NO: 335050 - DNA, 12 bp, Artificial Sequence
  Oligonucleotide primer for the detection of SNP TSC0038572
gagaaatgtaga

SEQ ID NO: 335051 - DNA, 12 bp, Artificial Sequence
  Oligonucleotide primer for the detection of SNP TSC0038573
aaactctactac

SEQ ID NO: 335052 - DNA, 12 bp, Artificial Sequence
  Oligonucleotide primer for the detection of SNP TSC0038573
agagtgtgttga

SEQ ID NO: 335053 - DNA, 12 bp, Artificial Sequence
  Oligonucleotide primer for the detection of SNP TSC0038574
tcactattataa

SEQ ID NO: 335054 - DNA, 12 bp, Artificial Sequence
  Oligonucleotide primer for the detection of SNP TSC0038574
gtttatggtaat

SEQ ID NO: 335055 - DNA, 12 bp, Artificial Sequence
  Oligonucleotide primer for the detection of SNP TSC0038574
ttattgttgtga

SEQ ID NO: 335056 - DNA, 12 bp, Artificial Sequence
  Oligonucleotide primer for the detection of SNP TSC0038577
tgtgtttggttc

SEQ ID NO: 335057 - DNA, 12 bp, Artificial Sequence
  Oligonucleotide primer for the detection of SNP TSC0038577
cgtgtttggttc

SEQ ID NO: 335058 - DNA, 12 bp, Artificial Sequence
  Oligonucleotide primer for the detection of SNP TSC0038577
gaatatagattt

SEQ ID NO: 335059 - DNA, 12 bp, Artificial Sequence
  Oligonucleotide primer for the detection of SNP TSC0038581
aaaccatcaacc

SEQ ID NO: 335060 - DNA, 12 bp, Artificial Sequence
  Oligonucleotide primer for the detection of SNP TSC0038581
aaaccgtcaacc

SEQ ID NO: 335061 - DNA, 12 bp, Artificial Sequence
  Oligonucleotide primer for the detection of SNP TSC0038581
ttatagaaattt

SEQ ID NO: 335062 - DNA, 12 bp, Artificial Sequence
  Oligonucleotide primer for the detection of SNP TSC0038581
ttataaaaatct

SEQ ID NO: 335063 - DNA, 12 bp, Artificial Sequence
  Oligonucleotide primer for the detection of SNP TSC0038581
aaattgttaatt

SEQ ID NO: 335064 - DNA, 12 bp, Artificial Sequence
  Oligonucleotide primer for the detection of SNP TSC0038581
aaatcgttaatt

SEQ ID NO: 335065 - DNA, 12 bp, Artificial Sequence
  Oligonucleotide primer for the detection of SNP TSC0038582
caaaaaactcaa

SEQ ID NO: 335066 - DNA, 12 bp, Artificial Sequence
  Oligonucleotide primer for the detection of SNP TSC0038582
atatttcttata

SEQ ID NO: 335067 - DNA, 12 bp, Artificial Sequence
  Oligonucleotide primer for the detection of SNP TSC0038582
taaagaatttag

SEQ ID NO: 335068 - DNA, 12 bp, Artificial Sequence
  Oligonucleotide primer for the detection of SNP TSC0038583
aataccctattt

SEQ ID NO: 335069 - DNA, 12 bp, Artificial Sequence
  Oligonucleotide primer for the detection of SNP TSC0038583
tattaaagtata

SEQ ID NO: 335070 - DNA, 12 bp, Artificial Sequence
  Oligonucleotide primer for the detection of SNP TSC0038584
ttaacattaact

SEQ ID NO: 335071 - DNA, 12 bp, Artificial Sequence
  Oligonucleotide primer for the detection of SNP TSC0038584
tatgtgttaggg

SEQ ID NO: 335072 - DNA, 12 bp, Artificial Sequence
  Oligonucleotide primer for the detection of SNP TSC0038585
tgtagaggaatt

SEQ ID NO: 335073 - DNA, 12 bp, Artificial Sequence
  Oligonucleotide primer for the detection of SNP TSC0038585
cgtagaggaatt

SEQ ID NO: 335074 - DNA, 12 bp, Artificial Sequence
  Oligonucleotide primer for the detection of SNP TSC0038585
cacaaaaaaatt

SEQ ID NO: 335075 - DNA, 12 bp, Artificial Sequence
  Oligonucleotide primer for the detection of SNP TSC0038585
cgcaaaaaaatt

SEQ ID NO: 335076 - DNA, 12 bp, Artificial Sequence
  Oligonucleotide primer for the detection of SNP TSC0038585
aaagaaattttt

SEQ ID NO: 335077 - DNA, 12 bp, Artificial Sequence
  Oligonucleotide primer for the detection of SNP TSC0038589
ttaattaatctc

SEQ ID NO: 335078 - DNA, 12 bp, Artificial Sequence
  Oligonucleotide primer for the detection of SNP TSC0038589
aataaagattta

SEQ ID NO: 335079 - DNA, 12 bp, Artificial Sequence
  Oligonucleotide primer for the detection of SNP TSC0038590
accccttcaaat

SEQ ID NO: 335080 - DNA, 12 bp, Artificial Sequence
  Oligonucleotide primer for the detection of SNP TSC0038590
taaatggatgaa

SEQ ID NO: 335081 - DNA, 12 bp, Artificial Sequence
  Oligonucleotide primer for the detection of SNP TSC0038590
taaatggacgaa

SEQ ID NO: 335082 - DNA, 12 bp, Artificial Sequence
  Oligonucleotide primer for the detection of SNP TSC0038590
taaataaacgaa

SEQ ID NO: 335083 - DNA, 12 bp, Artificial Sequence
  Oligonucleotide primer for the detection of SNP TSC0038590
tttttttaaatt

SEQ ID NO: 335084 - DNA, 12 bp, Artificial Sequence
  Oligonucleotide primer for the detection of SNP TSC0038592
atttttaattaa

SEQ ID NO: 335085 - DNA, 12 bp, Artificial Sequence
  Oligonucleotide primer for the detection of SNP TSC0038592
taagattggttt

SEQ ID NO: 335086 - DNA, 12 bp, Artificial Sequence
  Oligonucleotide primer for the detection of SNP TSC0038592
taaaattaattt

SEQ ID NO: 335087 - DNA, 12 bp, Artificial Sequence
  Oligonucleotide primer for the detection of SNP TSC0038592
atttttagttga

SEQ ID NO: 335088 - DNA, 12 bp, Artificial Sequence
  Oligonucleotide primer for the detection of SNP TSC0038593
tttaacctctcc

SEQ ID NO: 335089 - DNA, 12 bp, Artificial Sequence
  Oligonucleotide primer for the detection of SNP TSC0038593
aaggaaataaga

SEQ ID NO: 335090 - DNA, 12 bp, Artificial Sequence
  Oligonucleotide primer for the detection of SNP TSC0038594
cttcccaatatc

SEQ ID NO: 335091 - DNA, 12 bp, Artificial Sequence
  Oligonucleotide primer for the detection of SNP TSC0038594
gaaaaataaata

SEQ ID NO: 335092 - DNA, 12 bp, Artificial Sequence
  Oligonucleotide primer for the detection of SNP TSC0038596
atttaacataaa

SEQ ID NO: 335093 - DNA, 12 bp, Artificial Sequence
  Oligonucleotide primer for the detection of SNP TSC0038596
taagtaggattt

SEQ ID NO: 335094 - DNA, 12 bp, Artificial Sequence
  Oligonucleotide primer for the detection of SNP TSC0038596
ggtttagtatga

SEQ ID NO: 335095 - DNA, 12 bp, Artificial Sequence
  Oligonucleotide primer for the detection of SNP TSC0038598
ccaaacctaact

SEQ ID NO: 335096 - DNA, 12 bp, Artificial Sequence
  Oligonucleotide primer for the detection of SNP TSC0038598
ggataatgaggg

SEQ ID NO: 335097 - DNA, 12 bp, Artificial Sequence
  Oligonucleotide primer for the detection of SNP TSC0038599
attccaaatttc

SEQ ID NO: 335098 - DNA, 12 bp, Artificial Sequence
  Oligonucleotide primer for the detection of SNP TSC0038599
gagtgttgtttt

SEQ ID NO: 335099 - DNA, 12 bp, Artificial Sequence
  Oligonucleotide primer for the detection of SNP TSC0038599
gagcgttgtttt

SEQ ID NO: 335100 - DNA, 12 bp, Artificial Sequence
  Oligonucleotide primer for the detection of SNP TSC0038599
gagtgttgtttc

SEQ ID NO: 335101 - DNA, 12 bp, Artificial Sequence
  Oligonucleotide primer for the detection of SNP TSC0038599
gagcgttgtttc

SEQ ID NO: 335102 - DNA, 12 bp, Artificial Sequence
  Oligonucleotide primer for the detection of SNP TSC0038599
taaacattactt

SEQ ID NO: 335103 - DNA, 12 bp, Artificial Sequence
  Oligonucleotide primer for the detection of SNP TSC0038599
taaacgttactt

SEQ ID NO: 335104 - DNA, 12 bp, Artificial Sequence
  Oligonucleotide primer for the detection of SNP TSC0038600
ggaggttaatta

SEQ ID NO: 335105 - DNA, 12 bp, Artificial Sequence
  Oligonucleotide primer for the detection of SNP TSC0038601
agtaatatgtgt

SEQ ID NO: 335106 - DNA, 12 bp, Artificial Sequence
  Oligonucleotide primer for the detection of SNP TSC0038601
acaacatataca

SEQ ID NO: 335107 - DNA, 12 bp, Artificial Sequence
  Oligonucleotide primer for the detection of SNP TSC0038601
taaggaagaaat

SEQ ID NO: 335108 - DNA, 12 bp, Artificial Sequence
  Oligonucleotide primer for the detection of SNP TSC0038606
ctcaatctcaaa

SEQ ID NO: 335109 - DNA, 12 bp, Artificial Sequence
  Oligonucleotide primer for the detection of SNP TSC0038606
acatacatataa

SEQ ID NO: 335110 - DNA, 12 bp, Artificial Sequence
  Oligonucleotide primer for the detection of SNP TSC0038606
agttttagattt

SEQ ID NO: 335111 - DNA, 12 bp, Artificial Sequence
  Oligonucleotide primer for the detection of SNP TSC0038608
aacaaatattta

SEQ ID NO: 335112 - DNA, 12 bp, Artificial Sequence
  Oligonucleotide primer for the detection of SNP TSC0038608
tgataagagtat

SEQ ID NO: 335113 - DNA, 12 bp, Artificial Sequence
  Oligonucleotide primer for the detection of SNP TSC0038608
aaataagtgttt

SEQ ID NO: 335114 - DNA, 12 bp, Artificial Sequence
  Oligonucleotide primer for the detection of SNP TSC0038609
ccccaatctctc

SEQ ID NO: 335115 - DNA, 12 bp, Artificial Sequence
  Oligonucleotide primer for the detection of SNP TSC0038609
gagtatatggag

SEQ ID NO: 335116 - DNA, 12 bp, Artificial Sequence
  Oligonucleotide primer for the detection of SNP TSC0038610
aaacatctataa

SEQ ID NO: 335117 - DNA, 12 bp, Artificial Sequence
  Oligonucleotide primer for the detection of SNP TSC0038610
tttttaaaaagt

SEQ ID NO: 335118 - DNA, 12 bp, Artificial Sequence
  Oligonucleotide primer for the detection of SNP TSC0038611
gagtgtttatta

SEQ ID NO: 335119 - DNA, 12 bp, Artificial Sequence
  Oligonucleotide primer for the detection of SNP TSC0038611
aaatactcacta

SEQ ID NO: 335120 - DNA, 12 bp, Artificial Sequence
  Oligonucleotide primer for the detection of SNP TSC0038611
atttagatgtgt

SEQ ID NO: 335121 - DNA, 12 bp, Artificial Sequence
  Oligonucleotide primer for the detection of SNP TSC0038613
ctaactttattt

SEQ ID NO: 335122 - DNA, 12 bp, Artificial Sequence
  Oligonucleotide primer for the detection of SNP TSC0038613
ttagaggagagg

SEQ ID NO: 335123 - DNA, 12 bp, Artificial Sequence
  Oligonucleotide primer for the detection of SNP TSC0038614
cctaattcccct

SEQ ID NO: 335124 - DNA, 12 bp, Artificial Sequence
  Oligonucleotide primer for the detection of SNP TSC0038615
aaagattatttt

SEQ ID NO: 335125 - DNA, 12 bp, Artificial Sequence
  Oligonucleotide primer for the detection of SNP TSC0038615
aaaaattatttt

SEQ ID NO: 335126 - DNA, 12 bp, Artificial Sequence
  Oligonucleotide primer for the detection of SNP TSC0038615
gaaatagaaaga

SEQ ID NO: 335127 - DNA, 12 bp, Artificial Sequence
  Oligonucleotide primer for the detection of SNP TSC0038616
aaatatacaaaa

SEQ ID NO: 335128 - DNA, 12 bp, Artificial Sequence
  Oligonucleotide primer for the detection of SNP TSC0038616
agttagttgttt

SEQ ID NO: 335129 - DNA, 12 bp, Artificial Sequence
  Oligonucleotide primer for the detection of SNP TSC0038616
aactaattattt

SEQ ID NO: 335130 - DNA, 12 bp, Artificial Sequence
  Oligonucleotide primer for the detection of SNP TSC0038616
aaatatataaaa

SEQ ID NO: 335131 - DNA, 12 bp, Artificial Sequence
  Oligonukleotid-Primer
caataaaataat

SEQ ID NO: 335132 - DNA, 12 bp, Artificial Sequence
  Oligonucleotide primer for the detection of SNP TSC0038618
cctcctatcata

SEQ ID NO: 335133 - DNA, 12 bp, Artificial Sequence
  Oligonucleotide primer for the detection of SNP TSC0038618
tgtttagaagag

SEQ ID NO: 335134 - DNA, 12 bp, Artificial Sequence
  Oligonucleotide primer for the detection of SNP TSC0038618
tacccaaaaaaa

SEQ ID NO: 335135 - DNA, 12 bp, Artificial Sequence
  Oligonukleotid-Primer
ttattttctttt

SEQ ID NO: 335136 - DNA, 12 bp, Artificial Sequence
  Oligonucleotide primer for the detection of SNP TSC0038620
atcctctacccc

SEQ ID NO: 335137 - DNA, 12 bp, Artificial Sequence
  Oligonucleotide primer for the detection of SNP TSC0038620
atggttttgaaa

SEQ ID NO: 335138 - DNA, 12 bp, Artificial Sequence
  Oligonucleotide primer for the detection of SNP TSC0038621
caaaaaacactt

SEQ ID NO: 335139 - DNA, 12 bp, Artificial Sequence
  Oligonukleotid-Primer
ttaggtatataa

SEQ ID NO: 335140 - DNA, 12 bp, Artificial Sequence
  Oligonucleotide primer for the detection of SNP TSC0038622
aaatctaccaat

SEQ ID NO: 335141 - DNA, 12 bp, Artificial Sequence
  Oligonucleotide primer for the detection of SNP TSC0038623
aataacatttct

SEQ ID NO: 335142 - DNA, 12 bp, Artificial Sequence
  Oligonucleotide primer for the detection of SNP TSC0038623
ggttttaagaag

SEQ ID NO: 335143 - DNA, 12 bp, Artificial Sequence
  Oligonukleotid-Primer
agtaatattttt

SEQ ID NO: 335144 - DNA, 12 bp, Artificial Sequence
  Oligonucleotide primer for the detection of SNP TSC0038624
cttctctctcct

SEQ ID NO: 335145 - DNA, 12 bp, Artificial Sequence
  Oligonucleotide primer for the detection of SNP TSC0038625
aaatacatatat

SEQ ID NO: 335146 - DNA, 12 bp, Artificial Sequence
  Oligonucleotide primer for the detection of SNP TSC0038626
gaatttttgatg

SEQ ID NO: 335147 - DNA, 12 bp, Artificial Sequence
  Oligonucleotide primer for the detection of SNP TSC0038627
taaaattaatga

SEQ ID NO: 335148 - DNA, 12 bp, Artificial Sequence
  Oligonucleotide primer for the detection of SNP TSC0038631
ttaaagagttga

SEQ ID NO: 335149 - DNA, 12 bp, Artificial Sequence
  Oligonucleotide primer for the detection of SNP TSC0038631
ggtaagataaag

SEQ ID NO: 335150 - DNA, 12 bp, Artificial Sequence
  Oligonucleotide primer for the detection of SNP TSC0038634
cacccacaccca

SEQ ID NO: 335151 - DNA, 12 bp, Artificial Sequence
  Oligonucleotide primer for the detection of SNP TSC0038634
taaaaattagtc

SEQ ID NO: 335152 - DNA, 12 bp, Artificial Sequence
  Oligonucleotide primer for the detection of SNP TSC0038635
caataataaatc

SEQ ID NO: 335153 - DNA, 12 bp, Artificial Sequence
  Oligonucleotide primer for the detection of SNP TSC0038635
tttaagtatagt

SEQ ID NO: 335154 - DNA, 12 bp, Artificial Sequence
  Oligonucleotide primer for the detection of SNP TSC0038635
acccaaatacaa

SEQ ID NO: 335155 - DNA, 12 bp, Artificial Sequence
  Oligonucleotide primer for the detection of SNP TSC0038635
tagtaatgaatt

SEQ ID NO: 335156 - DNA, 12 bp, Artificial Sequence
  Oligonucleotide primer for the detection of SNP TSC0038635
tagtaatgaatc

SEQ ID NO: 335157 - DNA, 12 bp, Artificial Sequence
  Oligonucleotide primer for the detection of SNP TSC0038636
tacaaacgaaaa

SEQ ID NO: 335158 - DNA, 12 bp, Artificial Sequence
  Oligonucleotide primer for the detection of SNP TSC0038636
tattttttgtgt

SEQ ID NO: 335159 - DNA, 12 bp, Artificial Sequence
  Oligonucleotide primer for the detection of SNP TSC0038636
caccctctatac

SEQ ID NO: 335160 - DNA, 12 bp, Artificial Sequence
  Oligonucleotide primer for the detection of SNP TSC0038636
tgtaagtgaaga

SEQ ID NO: 335161 - DNA, 12 bp, Artificial Sequence
  Oligonucleotide primer for the detection of SNP TSC0038636
tgtaagcgaaga

SEQ ID NO: 335162 - DNA, 12 bp, Artificial Sequence
  Oligonucleotide primer for the detection of SNP TSC0038637
caatttctacaa

SEQ ID NO: 335163 - DNA, 12 bp, Artificial Sequence
  Oligonukleotid-Primer
gggagaatggag

SEQ ID NO: 335164 - DNA, 12 bp, Artificial Sequence
  Oligonucleotide primer for the detection of SNP TSC0038638
ccttaacacatc

SEQ ID NO: 335165 - DNA, 12 bp, Artificial Sequence
  Oligonucleotide primer for the detection of SNP TSC0038638
aaggatatatag

SEQ ID NO: 335166 - DNA, 12 bp, Artificial Sequence
  Oligonucleotide primer for the detection of SNP TSC0038642
tactataaatta

SEQ ID NO: 335167 - DNA, 12 bp, Artificial Sequence
  Oligonukleotid-Primer
taataatagaat

SEQ ID NO: 335168 - DNA, 12 bp, Artificial Sequence
  Oligonucleotide primer for the detection of SNP TSC0038642
taataatagaac

SEQ ID NO: 335169 - DNA, 12 bp, Artificial Sequence
  Oligonucleotide primer for the detection of SNP TSC0038642
atgttatggatt

SEQ ID NO: 335170 - DNA, 12 bp, Artificial Sequence
  Oligonucleotide primer for the detection of SNP TSC0038646
aaaatataaaat

SEQ ID NO: 335171 - DNA, 12 bp, Artificial Sequence
  Oligonukleotid-Primer
attaataaactc

SEQ ID NO: 335172 - DNA, 12 bp, Artificial Sequence
  Oligonucleotide primer for the detection of SNP TSC0038649
taattatattgg

SEQ ID NO: 335173 - DNA, 12 bp, Artificial Sequence
  Oligonucleotide primer for the detection of SNP TSC0038650
attgttttgagg

SEQ ID NO: 335174 - DNA, 12 bp, Artificial Sequence
  Oligonucleotide primer for the detection of SNP TSC0038651
taaaactcaaat

SEQ ID NO: 335175 - DNA, 12 bp, Artificial Sequence
  Oligonukleotid-Primer
ttattgtgatat

SEQ ID NO: 335176 - DNA, 12 bp, Artificial Sequence
  Oligonucleotide primer for the detection of SNP TSC0038651
actactataaca

SEQ ID NO: 335177 - DNA, 12 bp, Artificial Sequence
  Oligonucleotide primer for the detection of SNP TSC0038651
tagaatttaaat

SEQ ID NO: 335178 - DNA, 12 bp, Artificial Sequence
  Oligonucleotide primer for the detection of SNP TSC0038652
aagtagataaaa

SEQ ID NO: 335179 - DNA, 12 bp, Artificial Sequence
  Oligonukleotid-Primer
tatggggtagag

SEQ ID NO: 335180 - DNA, 12 bp, Artificial Sequence
  Oligonucleotide primer for the detection of SNP TSC0038656
ctcctcaatata

SEQ ID NO: 335181 - DNA, 12 bp, Artificial Sequence
  Oligonucleotide primer for the detection of SNP TSC0038656
ctcctcgatata

SEQ ID NO: 335182 - DNA, 12 bp, Artificial Sequence
  Oligonucleotide primer for the detection of SNP TSC0038656
atgttgttttat

SEQ ID NO: 335183 - DNA, 12 bp, Artificial Sequence
  Oligonucleotide primer for the detection of SNP TSC0038656
aatattacctta

SEQ ID NO: 335184 - DNA, 12 bp, Artificial Sequence
  Oligonucleotide primer for the detection of SNP TSC0038656
ttttttgatgtg

SEQ ID NO: 335185 - DNA, 12 bp, Artificial Sequence
  Oligonucleotide primer for the detection of SNP TSC0038656
tttttcgatgtg

SEQ ID NO: 335186 - DNA, 12 bp, Artificial Sequence
  Oligonucleotide primer for the detection of SNP TSC0038657
gtaagatttttt

SEQ ID NO: 335187 - DNA, 12 bp, Artificial Sequence
  Oligonucleotide primer for the detection of SNP TSC0038658
aacaatacactt

SEQ ID NO: 335188 - DNA, 12 bp, Artificial Sequence
  Oligonucleotide primer for the detection of SNP TSC0038658
atatgttgtgta

SEQ ID NO: 335189 - DNA, 12 bp, Artificial Sequence
  Oligonucleotide primer for the detection of SNP TSC0038658
acatactatata

SEQ ID NO: 335190 - DNA, 12 bp, Artificial Sequence
  Oligonucleotide primer for the detection of SNP TSC0038658
agtagtatattt

SEQ ID NO: 335191 - DNA, 12 bp, Artificial Sequence
  Oligonucleotide primer for the detection of SNP TSC0038659
ataaaattttat

SEQ ID NO: 335192 - DNA, 12 bp, Artificial Sequence
  Oligonucleotide primer for the detection of SNP TSC0038659
aaatgtagggat

SEQ ID NO: 335193 - DNA, 12 bp, Artificial Sequence
  Oligonucleotide primer for the detection of SNP TSC0038659
tgggattttgtt

SEQ ID NO: 335194 - DNA, 12 bp, Artificial Sequence
  Oligonucleotide primer for the detection of SNP TSC0038659
tgggattttgtc

SEQ ID NO: 335195 - DNA, 12 bp, Artificial Sequence
  Oligonucleotide primer for the detection of SNP TSC0038661
acgataacataa

SEQ ID NO: 335196 - DNA, 12 bp, Artificial Sequence
  Oligonucleotide primer for the detection of SNP TSC0038661
tatagggttatt

SEQ ID NO: 335197 - DNA, 12 bp, Artificial Sequence
  Oligonucleotide primer for the detection of SNP TSC0038661
tacaaaactact

SEQ ID NO: 335198 - DNA, 12 bp, Artificial Sequence
  Oligonucleotide primer for the detection of SNP TSC0038661
atgatggtatag

SEQ ID NO: 335199 - DNA, 12 bp, Artificial Sequence
  Oligonucleotide primer for the detection of SNP TSC0038661
acgatggtatag

SEQ ID NO: 335200 - DNA, 12 bp, Artificial Sequence
  Oligonucleotide primer for the detection of SNP TSC0038664
catcataaaaaa

SEQ ID NO: 335201 - DNA, 12 bp, Artificial Sequence
  Oligonucleotide primer for the detection of SNP TSC0038664
tgttttttatat

SEQ ID NO: 335202 - DNA, 12 bp, Artificial Sequence
  Oligonucleotide primer for the detection of SNP TSC0038664
tattatgggaag

SEQ ID NO: 335203 - DNA, 12 bp, Artificial Sequence
  Oligonucleotide primer for the detection of SNP TSC0038665
caactaaccatc

SEQ ID NO: 335204 - DNA, 12 bp, Artificial Sequence
  Oligonucleotide primer for the detection of SNP TSC0038665
ttattatcataa

SEQ ID NO: 335205 - DNA, 12 bp, Artificial Sequence
  Oligonucleotide primer for the detection of SNP TSC0038667
aaacctttcctt

SEQ ID NO: 335206 - DNA, 12 bp, Artificial Sequence
  Oligonucleotide primer for the detection of SNP TSC0038667
atatttaatgta

SEQ ID NO: 335207 - DNA, 12 bp, Artificial Sequence
  Oligonucleotide primer for the detection of SNP TSC0038668
taacaaatttta

SEQ ID NO: 335208 - DNA, 12 bp, Artificial Sequence
  Oligonucleotide primer for the detection of SNP TSC0038668
taaatgaatatt

SEQ ID NO: 335209 - DNA, 12 bp, Artificial Sequence
  Oligonucleotide primer for the detection of SNP TSC0038668
gataggttttat

SEQ ID NO: 335210 - DNA, 12 bp, Artificial Sequence
  Oligonucleotide primer for the detection of SNP TSC0038670
accatttacatc

SEQ ID NO: 335211 - DNA, 12 bp, Artificial Sequence
  Oligonucleotide primer for the detection of SNP TSC0038671
caaatatttata

SEQ ID NO: 335212 - DNA, 12 bp, Artificial Sequence
  Oligonucleotide primer for the detection of SNP TSC0038671
tagtttgttggg

SEQ ID NO: 335213 - DNA, 12 bp, Artificial Sequence
  Oligonucleotide primer for the detection of SNP TSC0038671
taatctattaaa

SEQ ID NO: 335214 - DNA, 12 bp, Artificial Sequence
  Oligonucleotide primer for the detection of SNP TSC0038671
aggtgtttatat

SEQ ID NO: 335215 - DNA, 12 bp, Artificial Sequence
  Oligonucleotide primer for the detection of SNP TSC0038675
aatcctttcccc

SEQ ID NO: 335216 - DNA, 12 bp, Artificial Sequence
  Oligonucleotide primer for the detection of SNP TSC0038675
taaaaataagta

SEQ ID NO: 335217 - DNA, 12 bp, Artificial Sequence
  Oligonucleotide primer for the detection of SNP TSC0038678
tatcacttctct

SEQ ID NO: 335218 - DNA, 12 bp, Artificial Sequence
  Oligonucleotide primer for the detection of SNP TSC0038678
taataaagaata

SEQ ID NO: 335219 - DNA, 12 bp, Artificial Sequence
  Oligonucleotide primer for the detection of SNP TSC0038679
acaaatacatct

SEQ ID NO: 335220 - DNA, 12 bp, Artificial Sequence
  Oligonucleotide primer for the detection of SNP TSC0038680
actcacctaaac

SEQ ID NO: 335221 - DNA, 12 bp, Artificial Sequence
  Oligonucleotide primer for the detection of SNP TSC0038680
actcgcctaaac

SEQ ID NO: 335222 - DNA, 12 bp, Artificial Sequence
  Oligonucleotide primer for the detection of SNP TSC0038680
gataattgttag

SEQ ID NO: 335223 - DNA, 12 bp, Artificial Sequence
  Oligonucleotide primer for the detection of SNP TSC0038680
ataactaccaaa

SEQ ID NO: 335224 - DNA, 12 bp, Artificial Sequence
  Oligonucleotide primer for the detection of SNP TSC0038680
gtttgtttaggt

SEQ ID NO: 335225 - DNA, 12 bp, Artificial Sequence
  Oligonucleotide primer for the detection of SNP TSC0038680
gttcgtttaggt

SEQ ID NO: 335226 - DNA, 12 bp, Artificial Sequence
  Oligonucleotide primer for the detection of SNP TSC0038681
aactaaaatata

SEQ ID NO: 335227 - DNA, 12 bp, Artificial Sequence
  Oligonucleotide primer for the detection of SNP TSC0038681
tctaatcccatc

SEQ ID NO: 335228 - DNA, 12 bp, Artificial Sequence
  Oligonucleotide primer for the detection of SNP TSC0038681
gattggaatgta

SEQ ID NO: 335229 - DNA, 12 bp, Artificial Sequence
  Oligonucleotide primer for the detection of SNP TSC0038682
tacatttaaaaa

SEQ ID NO: 335230 - DNA, 12 bp, Artificial Sequence
  Oligonucleotide primer for the detection of SNP TSC0038682
tattttgtaagt

SEQ ID NO: 335231 - DNA, 12 bp, Artificial Sequence
  Oligonucleotide primer for the detection of SNP TSC0038682
tttgtatttgga

SEQ ID NO: 335232 - DNA, 12 bp, Artificial Sequence
  Oligonucleotide primer for the detection of SNP TSC0038683
tctattacccac

SEQ ID NO: 335233 - DNA, 12 bp, Artificial Sequence
  Oligonucleotide primer for the detection of SNP TSC0038684
accactacactc

SEQ ID NO: 335234 - DNA, 12 bp, Artificial Sequence
  Oligonucleotide primer for the detection of SNP TSC0038684
ttgttgtttatg

SEQ ID NO: 335235 - DNA, 12 bp, Artificial Sequence
  Oligonucleotide primer for the detection of SNP TSC0038685
tttaactactac

SEQ ID NO: 335236 - DNA, 12 bp, Artificial Sequence
  Oligonucleotide primer for the detection of SNP TSC0038685
aggtaattatat

SEQ ID NO: 335237 - DNA, 12 bp, Artificial Sequence
  Oligonucleotide primer for the detection of SNP TSC0038688
ccttctttcttc

SEQ ID NO: 335238 - DNA, 12 bp, Artificial Sequence
  Oligonucleotide primer for the detection of SNP TSC0038688
aaagagagaaag

SEQ ID NO: 335239 - DNA, 12 bp, Artificial Sequence
  Oligonucleotide primer for the detection of SNP TSC0038689
aaccccaacaaa

SEQ ID NO: 335240 - DNA, 12 bp, Artificial Sequence
  Oligonucleotide primer for the detection of SNP TSC0038689
tccccattcccc

SEQ ID NO: 335241 - DNA, 12 bp, Artificial Sequence
  Oligonucleotide primer for the detection of SNP TSC0038689
ggttttagtaaa

SEQ ID NO: 335242 - DNA, 12 bp, Artificial Sequence
  Oligonucleotide primer for the detection of SNP TSC0038690
ataatatattat

SEQ ID NO: 335243 - DNA, 12 bp, Artificial Sequence
  Oligonucleotide primer for the detection of SNP TSC0038690
tatttggaaata

SEQ ID NO: 335244 - DNA, 12 bp, Artificial Sequence
  Oligonucleotide primer for the detection of SNP TSC0038691
aacaacttaatt

SEQ ID NO: 335245 - DNA, 12 bp, Artificial Sequence
  Oligonucleotide primer for the detection of SNP TSC0038691
taagtggtttta

SEQ ID NO: 335246 - DNA, 12 bp, Artificial Sequence
  Oligonucleotide primer for the detection of SNP TSC0038691
taaataattcta

SEQ ID NO: 335247 - DNA, 12 bp, Artificial Sequence
  Oligonucleotide primer for the detection of SNP TSC0038691
agtaatttggtt

SEQ ID NO: 335248 - DNA, 12 bp, Artificial Sequence
  Oligonucleotide primer for the detection of SNP TSC0038692
cacttctaaaca

SEQ ID NO: 335249 - DNA, 12 bp, Artificial Sequence
  Oligonucleotide primer for the detection of SNP TSC0038692
acctaaaatctt

SEQ ID NO: 335250 - DNA, 12 bp, Artificial Sequence
  Oligonucleotide primer for the detection of SNP TSC0038692
atttttggatat

SEQ ID NO: 335251 - DNA, 12 bp, Artificial Sequence
  Oligonucleotide primer for the detection of SNP TSC0038693
ttaaactataaa

SEQ ID NO: 335252 - DNA, 12 bp, Artificial Sequence
  Oligonucleotide primer for the detection of SNP TSC0038693
gtatatgagttg

SEQ ID NO: 335253 - DNA, 12 bp, Artificial Sequence
  Oligonucleotide primer for the detection of SNP TSC0038693
acatataaatta

SEQ ID NO: 335254 - DNA, 12 bp, Artificial Sequence
  Oligonucleotide primer for the detection of SNP TSC0038693
gcatataaatta

SEQ ID NO: 335255 - DNA, 12 bp, Artificial Sequence
  Oligonucleotide primer for the detection of SNP TSC0038693
ttaagttgtgaa

SEQ ID NO: 335256 - DNA, 12 bp, Artificial Sequence
  Oligonucleotide primer for the detection of SNP TSC0038694
ccaaaactccac

SEQ ID NO: 335257 - DNA, 12 bp, Artificial Sequence
  Oligonucleotide primer for the detection of SNP TSC0038694
ccgaaactccac

SEQ ID NO: 335258 - DNA, 12 bp, Artificial Sequence
  Oligonucleotide primer for the detection of SNP TSC0038695
ctaccaactcac

SEQ ID NO: 335259 - DNA, 12 bp, Artificial Sequence
  Oligonucleotide primer for the detection of SNP TSC0038695
taggtataggag

SEQ ID NO: 335260 - DNA, 12 bp, Artificial Sequence
  Oligonucleotide primer for the detection of SNP TSC0038698
atacctaaaaat

SEQ ID NO: 335261 - DNA, 12 bp, Artificial Sequence
  Oligonucleotide primer for the detection of SNP TSC0038698
tataagttaaaa

SEQ ID NO: 335262 - DNA, 12 bp, Artificial Sequence
  Oligonucleotide primer for the detection of SNP TSC0038699
acaaacacccgc

SEQ ID NO: 335263 - DNA, 12 bp, Artificial Sequence
  Oligonucleotide primer for the detection of SNP TSC0038699
acaaacgcccac

SEQ ID NO: 335264 - DNA, 12 bp, Artificial Sequence
  Oligonucleotide primer for the detection of SNP TSC0038699
acaaacgcccgc

SEQ ID NO: 335265 - DNA, 12 bp, Artificial Sequence
  Oligonucleotide primer for the detection of SNP TSC0038699
agtcgggtgtgg

SEQ ID NO: 335266 - DNA, 12 bp, Artificial Sequence
  Oligonucleotide primer for the detection of SNP TSC0038699
agtcgggcgtgg

SEQ ID NO: 335267 - DNA, 12 bp, Artificial Sequence
  Oligonucleotide primer for the detection of SNP TSC0038700
cgaaactaaaac

SEQ ID NO: 335268 - DNA, 12 bp, Artificial Sequence
  Oligonucleotide primer for the detection of SNP TSC0038700
tagatgttttag

SEQ ID NO: 335269 - DNA, 12 bp, Artificial Sequence
  Oligonucleotide primer for the detection of SNP TSC0038700
aaataccccaaa

SEQ ID NO: 335270 - DNA, 12 bp, Artificial Sequence
  Oligonucleotide primer for the detection of SNP TSC0038700
tgaggttgggat

SEQ ID NO: 335271 - DNA, 12 bp, Artificial Sequence
  Oligonucleotide primer for the detection of SNP TSC0038700
cgaggttgggat

SEQ ID NO: 335272 - DNA, 12 bp, Artificial Sequence
  Oligonucleotide primer for the detection of SNP TSC0038702
attaactctctt

SEQ ID NO: 335273 - DNA, 12 bp, Artificial Sequence
  Oligonucleotide primer for the detection of SNP TSC0038702
ggaggtaggaaa

SEQ ID NO: 335274 - DNA, 12 bp, Artificial Sequence
  Oligonucleotide primer for the detection of SNP TSC0038703
tatctatcaact

SEQ ID NO: 335275 - DNA, 12 bp, Artificial Sequence
  Oligonucleotide primer for the detection of SNP TSC0038703
agtttgtatgaa

SEQ ID NO: 335276 - DNA, 12 bp, Artificial Sequence
  Oligonucleotide primer for the detection of SNP TSC0038705
ataacaacacta

SEQ ID NO: 335277 - DNA, 12 bp, Artificial Sequence
  Oligonucleotide primer for the detection of SNP TSC0038705
cacctatctcac

SEQ ID NO: 335278 - DNA, 12 bp, Artificial Sequence
  Oligonucleotide primer for the detection of SNP TSC0038705
atagtaatattg

SEQ ID NO: 335279 - DNA, 12 bp, Artificial Sequence
  Oligonucleotide primer for the detection of SNP TSC0038707
aaaaaaactacc

SEQ ID NO: 335280 - DNA, 12 bp, Artificial Sequence
  Oligonucleotide primer for the detection of SNP TSC0038707
atgggaaaatgt

SEQ ID NO: 335281 - DNA, 12 bp, Artificial Sequence
  Oligonucleotide primer for the detection of SNP TSC0038707
atgggaaaatgc

SEQ ID NO: 335282 - DNA, 12 bp, Artificial Sequence
  Oligonucleotide primer for the detection of SNP TSC0038707
gagggaattgtt

SEQ ID NO: 335283 - DNA, 12 bp, Artificial Sequence
  Oligonucleotide primer for the detection of SNP TSC0038707
gagggaattgtc

SEQ ID NO: 335284 - DNA, 12 bp, Artificial Sequence
  Oligonukleotid-Primer
aaaacaaatcaa

SEQ ID NO: 335285 - DNA, 12 bp, Artificial Sequence
  Oligonucleotide primer for the detection of SNP TSC0038708
aaaacgaatcaa

SEQ ID NO: 335286 - DNA, 12 bp, Artificial Sequence
  Oligonucleotide primer for the detection of SNP TSC0038708
gtttttttgggt

SEQ ID NO: 335287 - DNA, 12 bp, Artificial Sequence
  Oligonucleotide primer for the detection of SNP TSC0038708
cttctctaaata

SEQ ID NO: 335288 - DNA, 12 bp, Artificial Sequence
  Oligonucleotide primer for the detection of SNP TSC0038708
aggagatggatt

SEQ ID NO: 335289 - DNA, 12 bp, Artificial Sequence
  Oligonucleotide primer for the detection of SNP TSC0038708
aggagacggatt

SEQ ID NO: 335290 - DNA, 12 bp, Artificial Sequence
  Oligonucleotide primer for the detection of SNP TSC0038711
aatttcaaatat

SEQ ID NO: 335291 - DNA, 12 bp, Artificial Sequence
  Oligonucleotide primer for the detection of SNP TSC0038711
ctccctttataa

SEQ ID NO: 335292 - DNA, 12 bp, Artificial Sequence
  Oligonucleotide primer for the detection of SNP TSC0038711
gattttaagtat

SEQ ID NO: 335293 - DNA, 12 bp, Artificial Sequence
  Oligonucleotide primer for the detection of SNP TSC0038712
ctattcttcttt

SEQ ID NO: 335294 - DNA, 12 bp, Artificial Sequence
  Oligonucleotide primer for the detection of SNP TSC0038712
aaaaagtaaagg

SEQ ID NO: 335295 - DNA, 12 bp, Artificial Sequence
  Oligonucleotide primer for the detection of SNP TSC0038713
aaataatatttt

SEQ ID NO: 335296 - DNA, 12 bp, Artificial Sequence
  Oligonucleotide primer for the detection of SNP TSC0038713
aaataacatttc

SEQ ID NO: 335297 - DNA, 12 bp, Artificial Sequence
  Oligonucleotide primer for the detection of SNP TSC0038713
gtagaatgtttg

SEQ ID NO: 335298 - DNA, 12 bp, Artificial Sequence
  Oligonucleotide primer for the detection of SNP TSC0038719
tcacaaaacaat

SEQ ID NO: 335299 - DNA, 12 bp, Artificial Sequence
  Oligonucleotide primer for the detection of SNP TSC0038719
tcacgaaacaat

SEQ ID NO: 335300 - DNA, 12 bp, Artificial Sequence
  Oligonucleotide primer for the detection of SNP TSC0038730
atgttaagtata

SEQ ID NO: 335301 - DNA, 12 bp, Artificial Sequence
  Oligonucleotide primer for the detection of SNP TSC0038731
taatccttcact

SEQ ID NO: 335302 - DNA, 12 bp, Artificial Sequence
  Oligonucleotide primer for the detection of SNP TSC0038731
taaagatattta

SEQ ID NO: 335303 - DNA, 12 bp, Artificial Sequence
  Oligonucleotide primer for the detection of SNP TSC0038738
atgtagggttag

SEQ ID NO: 335304 - DNA, 12 bp, Artificial Sequence
  Oligonucleotide primer for the detection of SNP TSC0038739
aataattttact

SEQ ID NO: 335305 - DNA, 12 bp, Artificial Sequence
  Oligonucleotide primer for the detection of SNP TSC0038739
ggttttgattag

SEQ ID NO: 335306 - DNA, 12 bp, Artificial Sequence
  Oligonucleotide primer for the detection of SNP TSC0038742
gtctaaaccatc

SEQ ID NO: 335307 - DNA, 12 bp, Artificial Sequence
  Oligonucleotide primer for the detection of SNP TSC0038742
gtctaaaccgtc

SEQ ID NO: 335308 - DNA, 12 bp, Artificial Sequence
  Oligonucleotide primer for the detection of SNP TSC0038742
gggtatttaaga

SEQ ID NO: 335309 - DNA, 12 bp, Artificial Sequence
  Oligonucleotide primer for the detection of SNP TSC0038744
tcactccatacc

SEQ ID NO: 335310 - DNA, 12 bp, Artificial Sequence
  Oligonucleotide primer for the detection of SNP TSC0038744
gattggggtgtg

SEQ ID NO: 335311 - DNA, 12 bp, Artificial Sequence
  Oligonucleotide primer for the detection of SNP TSC0038744
gattggggcgtg

SEQ ID NO: 335312 - DNA, 12 bp, Artificial Sequence
  Oligonucleotide primer for the detection of SNP TSC0038744
gactaaaacata

SEQ ID NO: 335313 - DNA, 12 bp, Artificial Sequence
  Oligonucleotide primer for the detection of SNP TSC0038744
gactaaaacgta

SEQ ID NO: 335314 - DNA, 12 bp, Artificial Sequence
  Oligonucleotide primer for the detection of SNP TSC0038744
ttattttatgtt

SEQ ID NO: 335315 - DNA, 12 bp, Artificial Sequence
  Oligonucleotide primer for the detection of SNP TSC0038747
cttctaaatacc

SEQ ID NO: 335316 - DNA, 12 bp, Artificial Sequence
  Oligonucleotide primer for the detection of SNP TSC0038747
tttgatttgaga

SEQ ID NO: 335317 - DNA, 12 bp, Artificial Sequence
  Oligonucleotide primer for the detection of SNP TSC0038752
tcttttcattct

SEQ ID NO: 335318 - DNA, 12 bp, Artificial Sequence
  Oligonucleotide primer for the detection of SNP TSC0038752
gggattttttag

SEQ ID NO: 335319 - DNA, 12 bp, Artificial Sequence
  Oligonucleotide primer for the detection of SNP TSC0038754
taattttgttta

SEQ ID NO: 335320 - DNA, 12 bp, Artificial Sequence
  Oligonucleotide primer for the detection of SNP TSC0038754
caatcttattta

SEQ ID NO: 335321 - DNA, 12 bp, Artificial Sequence
  Oligonucleotide primer for the detection of SNP TSC0038754
gtattagagatg

SEQ ID NO: 335322 - DNA, 12 bp, Artificial Sequence
  Oligonucleotide primer for the detection of SNP TSC0038755
aatatacactaa

SEQ ID NO: 335323 - DNA, 12 bp, Artificial Sequence
  Oligonucleotide primer for the detection of SNP TSC0038755
aatatacgctaa

SEQ ID NO: 335324 - DNA, 12 bp, Artificial Sequence
  Oligonucleotide primer for the detection of SNP TSC0038755
taagtatgaata

SEQ ID NO: 335325 - DNA, 12 bp, Artificial Sequence
  Oligonucleotide primer for the detection of SNP TSC0038756
ttacttatcacc

SEQ ID NO: 335326 - DNA, 12 bp, Artificial Sequence
  Oligonucleotide primer for the detection of SNP TSC0038756
agtggatttttg

SEQ ID NO: 335327 - DNA, 12 bp, Artificial Sequence
  Oligonucleotide primer for the detection of SNP TSC0038758
ctccccaaacac

SEQ ID NO: 335328 - DNA, 12 bp, Artificial Sequence
  Oligonucleotide primer for the detection of SNP TSC0038758
ctccccaaacgc

SEQ ID NO: 335329 - DNA, 12 bp, Artificial Sequence
  Oligonucleotide primer for the detection of SNP TSC0038758
gagttaagatag

SEQ ID NO: 335330 - DNA, 12 bp, Artificial Sequence
  Oligonucleotide primer for the detection of SNP TSC0038758
ttttttaagtgt

SEQ ID NO: 335331 - DNA, 12 bp, Artificial Sequence
  Oligonucleotide primer for the detection of SNP TSC0038758
ttttttaagcgt

SEQ ID NO: 335332 - DNA, 12 bp, Artificial Sequence
  Oligonucleotide primer for the detection of SNP TSC0038759
aataaaactctc

SEQ ID NO: 335333 - DNA, 12 bp, Artificial Sequence
  Oligonucleotide primer for the detection of SNP TSC0038759
gatatagagttg

SEQ ID NO: 335334 - DNA, 12 bp, Artificial Sequence
  Oligonucleotide primer for the detection of SNP TSC0038760
taaacactcact

SEQ ID NO: 335335 - DNA, 12 bp, Artificial Sequence
  Oligonucleotide primer for the detection of SNP TSC0038760
taaacactcgct

SEQ ID NO: 335336 - DNA, 12 bp, Artificial Sequence
  Oligonucleotide primer for the detection of SNP TSC0038760
taaacgctcact

SEQ ID NO: 335337 - DNA, 12 bp, Artificial Sequence
  Oligonucleotide primer for the detection of SNP TSC0038760
taaacgctcgct

SEQ ID NO: 335338 - DNA, 12 bp, Artificial Sequence
  Oligonucleotide primer for the detection of SNP TSC0038760
aaagtaggttta

SEQ ID NO: 335339 - DNA, 12 bp, Artificial Sequence
  Oligonucleotide primer for the detection of SNP TSC0038760
aaaacaaaccca

SEQ ID NO: 335340 - DNA, 12 bp, Artificial Sequence
  Oligonucleotide primer for the detection of SNP TSC0038760
taggtgtttgtt

SEQ ID NO: 335341 - DNA, 12 bp, Artificial Sequence
  Oligonucleotide primer for the detection of SNP TSC0038760
taggcgtttgtt

SEQ ID NO: 335342 - DNA, 12 bp, Artificial Sequence
  Oligonucleotide primer for the detection of SNP TSC0038760
taggtgttcgtt

SEQ ID NO: 335343 - DNA, 12 bp, Artificial Sequence
  Oligonucleotide primer for the detection of SNP TSC0038760
taggcgttcgtt

SEQ ID NO: 335344 - DNA, 12 bp, Artificial Sequence
  Oligonucleotide primer for the detection of SNP TSC0038761
aaatttttacca

SEQ ID NO: 335345 - DNA, 12 bp, Artificial Sequence
  Oligonucleotide primer for the detection of SNP TSC0038761
tatatggtttaa

SEQ ID NO: 335346 - DNA, 12 bp, Artificial Sequence
  Oligonucleotide primer for the detection of SNP TSC0038761
catataacccaa

SEQ ID NO: 335347 - DNA, 12 bp, Artificial Sequence
  Oligonucleotide primer for the detection of SNP TSC0038762
atgtaatattta

SEQ ID NO: 335348 - DNA, 12 bp, Artificial Sequence
  Oligonucleotide primer for the detection of SNP TSC0038762
atataacactta

SEQ ID NO: 335349 - DNA, 12 bp, Artificial Sequence
  Oligonucleotide primer for the detection of SNP TSC0038762
attatatttggt

SEQ ID NO: 335350 - DNA, 12 bp, Artificial Sequence
  Oligonucleotide primer for the detection of SNP TSC0038762
attatattcggt

SEQ ID NO: 335351 - DNA, 12 bp, Artificial Sequence
  Oligonucleotide primer for the detection of SNP TSC0038763
tttcacaattca

SEQ ID NO: 335352 - DNA, 12 bp, Artificial Sequence
  Oligonucleotide primer for the detection of SNP TSC0038763
tttatttgggat

SEQ ID NO: 335353 - DNA, 12 bp, Artificial Sequence
  Oligonucleotide primer for the detection of SNP TSC0038763
actcatttaaaa

SEQ ID NO: 335354 - DNA, 12 bp, Artificial Sequence
  Oligonucleotide primer for the detection of SNP TSC0038764
actaaaaactct

SEQ ID NO: 335355 - DNA, 12 bp, Artificial Sequence
  Oligonucleotide primer for the detection of SNP TSC0038764
agtttagtttta

SEQ ID NO: 335356 - DNA, 12 bp, Artificial Sequence
  Oligonucleotide primer for the detection of SNP TSC0038764
aattcaatttta

SEQ ID NO: 335357 - DNA, 12 bp, Artificial Sequence
  Oligonucleotide primer for the detection of SNP TSC0038764
gttgaagatttt

SEQ ID NO: 335358 - DNA, 12 bp, Artificial Sequence
  Oligonucleotide primer for the detection of SNP TSC0038770
ttcaccataatt

SEQ ID NO: 335359 - DNA, 12 bp, Artificial Sequence
  Oligonucleotide primer for the detection of SNP TSC0038770
gtttagaggttt

SEQ ID NO: 335360 - DNA, 12 bp, Artificial Sequence
  Oligonucleotide primer for the detection of SNP TSC0038770
atccaaaaaccc

SEQ ID NO: 335361 - DNA, 12 bp, Artificial Sequence
  Oligonucleotide primer for the detection of SNP TSC0038770
tttattatagtt

SEQ ID NO: 335362 - DNA, 12 bp, Artificial Sequence
  Oligonucleotide primer for the detection of SNP TSC0038771
accaaaattatt

SEQ ID NO: 335363 - DNA, 12 bp, Artificial Sequence
  Oligonucleotide primer for the detection of SNP TSC0038771
tttttatttgaa

SEQ ID NO: 335364 - DNA, 12 bp, Artificial Sequence
  Oligonucleotide primer for the detection of SNP TSC0038771
tctttatttaaa

SEQ ID NO: 335365 - DNA, 12 bp, Artificial Sequence
  Oligonucleotide primer for the detection of SNP TSC0038771
gttaggattatt

SEQ ID NO: 335366 - DNA, 12 bp, Artificial Sequence
  Oligonucleotide primer for the detection of SNP TSC0038776
tataataactat

SEQ ID NO: 335367 - DNA, 12 bp, Artificial Sequence
  Oligonucleotide primer for the detection of SNP TSC0038776
ttttttaaagta

SEQ ID NO: 335368 - DNA, 12 bp, Artificial Sequence
  Oligonucleotide primer for the detection of SNP TSC0038777
tacaactaattt

SEQ ID NO: 335369 - DNA, 12 bp, Artificial Sequence
  Oligonucleotide primer for the detection of SNP TSC0038777
gatgatggaaaa

SEQ ID NO: 335370 - DNA, 12 bp, Artificial Sequence
  Oligonucleotide primer for the detection of SNP TSC0038778
gtattaaataga

SEQ ID NO: 335371 - DNA, 12 bp, Artificial Sequence
  Oligonucleotide primer for the detection of SNP TSC0038779
tatttccctttc

SEQ ID NO: 335372 - DNA, 12 bp, Artificial Sequence
  Oligonucleotide primer for the detection of SNP TSC0038779
gtgggtgattga

SEQ ID NO: 335373 - DNA, 12 bp, Artificial Sequence
  Oligonucleotide primer for the detection of SNP TSC0038780
ctacttacatct

SEQ ID NO: 335374 - DNA, 12 bp, Artificial Sequence
  Oligonucleotide primer for the detection of SNP TSC0038780
tttttgtagttg

SEQ ID NO: 335375 - DNA, 12 bp, Artificial Sequence
  Oligonucleotide primer for the detection of SNP TSC0038781
ctactcactaaa

SEQ ID NO: 335376 - DNA, 12 bp, Artificial Sequence
  Oligonucleotide primer for the detection of SNP TSC0038781
ctactcgctaaa

SEQ ID NO: 335377 - DNA, 12 bp, Artificial Sequence
  Oligonucleotide primer for the detection of SNP TSC0038781
tgtgtttttaag

SEQ ID NO: 335378 - DNA, 12 bp, Artificial Sequence
  Oligonucleotide primer for the detection of SNP TSC0038781
tatacttccaaa

SEQ ID NO: 335379 - DNA, 12 bp, Artificial Sequence
  Oligonucleotide primer for the detection of SNP TSC0038782
catcaatcacca

SEQ ID NO: 335380 - DNA, 12 bp, Artificial Sequence
  Oligonucleotide primer for the detection of SNP TSC0038782
catcaatcaccg

SEQ ID NO: 335381 - DNA, 12 bp, Artificial Sequence
  Oligonucleotide primer for the detection of SNP TSC0038782
ttagtgagtagt

SEQ ID NO: 335382 - DNA, 12 bp, Artificial Sequence
  Oligonucleotide primer for the detection of SNP TSC0038782
ttagcgagtagt

SEQ ID NO: 335383 - DNA, 12 bp, Artificial Sequence
  Oligonucleotide primer for the detection of SNP TSC0038782
caacaaacaaca

SEQ ID NO: 335384 - DNA, 12 bp, Artificial Sequence
  Oligonucleotide primer for the detection of SNP TSC0038782
caacgaacaaca

SEQ ID NO: 335385 - DNA, 12 bp, Artificial Sequence
  Oligonucleotide primer for the detection of SNP TSC0038782
tattaattattg

SEQ ID NO: 335386 - DNA, 12 bp, Artificial Sequence
  Oligonucleotide primer for the detection of SNP TSC0038782
tattaattatcg

SEQ ID NO: 335387 - DNA, 12 bp, Artificial Sequence
  Oligonucleotide primer for the detection of SNP TSC0038783
ctaaataaactt

SEQ ID NO: 335388 - DNA, 12 bp, Artificial Sequence
  Oligonucleotide primer for the detection of SNP TSC0038785
accccaccacta

SEQ ID NO: 335389 - DNA, 12 bp, Artificial Sequence
  Oligonucleotide primer for the detection of SNP TSC0038785
accccgccacta

SEQ ID NO: 335390 - DNA, 12 bp, Artificial Sequence
  Oligonucleotide primer for the detection of SNP TSC0038785
gccccaccacta

SEQ ID NO: 335391 - DNA, 12 bp, Artificial Sequence
  Oligonucleotide primer for the detection of SNP TSC0038785
gccccgccacta

SEQ ID NO: 335392 - DNA, 12 bp, Artificial Sequence
  Oligonucleotide primer for the detection of SNP TSC0038785
atagagattggg

SEQ ID NO: 335393 - DNA, 12 bp, Artificial Sequence
  Oligonucleotide primer for the detection of SNP TSC0038786
atctttaccacc

SEQ ID NO: 335394 - DNA, 12 bp, Artificial Sequence
  Oligonucleotide primer for the detection of SNP TSC0038786
gtagtggtgggg

SEQ ID NO: 335395 - DNA, 12 bp, Artificial Sequence
  Oligonucleotide primer for the detection of SNP TSC0038786
gtagtggcgggg

SEQ ID NO: 335396 - DNA, 12 bp, Artificial Sequence
  Oligonucleotide primer for the detection of SNP TSC0038786
acaataacgaaa

SEQ ID NO: 335397 - DNA, 12 bp, Artificial Sequence
  Oligonucleotide primer for the detection of SNP TSC0038786
atttttgttatc

SEQ ID NO: 335398 - DNA, 12 bp, Artificial Sequence
  Oligonucleotide primer for the detection of SNP TSC0038787
aatactcctaac

SEQ ID NO: 335399 - DNA, 12 bp, Artificial Sequence
  Oligonucleotide primer for the detection of SNP TSC0038787
aggttaaagtat

SEQ ID NO: 335400 - DNA, 12 bp, Artificial Sequence
  Oligonucleotide primer for the detection of SNP TSC0038787
aactaaaacaca

SEQ ID NO: 335401 - DNA, 12 bp, Artificial Sequence
  Oligonucleotide primer for the detection of SNP TSC0038787
gatgtttttggt

SEQ ID NO: 335402 - DNA, 12 bp, Artificial Sequence
  Oligonucleotide primer for the detection of SNP TSC0038788
aaaactaacacc

SEQ ID NO: 335403 - DNA, 12 bp, Artificial Sequence
  Oligonucleotide primer for the detection of SNP TSC0038788
gtgttgtatgtt

SEQ ID NO: 335404 - DNA, 12 bp, Artificial Sequence
  Oligonucleotide primer for the detection of SNP TSC0038788
agagttaatatt

SEQ ID NO: 335405 - DNA, 12 bp, Artificial Sequence
  Oligonucleotide primer for the detection of SNP TSC0038789
tgggagtattgg

SEQ ID NO: 335406 - DNA, 12 bp, Artificial Sequence
  Oligonucleotide primer for the detection of SNP TSC0038795
tacatttattac

SEQ ID NO: 335407 - DNA, 12 bp, Artificial Sequence
  Oligonucleotide primer for the detection of SNP TSC0038795
tacgtttattac

SEQ ID NO: 335408 - DNA, 12 bp, Artificial Sequence
  Oligonucleotide primer for the detection of SNP TSC0038795
ataggtttatta

SEQ ID NO: 335409 - DNA, 12 bp, Artificial Sequence
  Oligonucleotide primer for the detection of SNP TSC0038796
gagttttaaaaa

SEQ ID NO: 335410 - DNA, 12 bp, Artificial Sequence
  Oligonucleotide primer for the detection of SNP TSC0038796
aaaattagaatt

SEQ ID NO: 335411 - DNA, 12 bp, Artificial Sequence
  Oligonucleotide primer for the detection of SNP TSC0038797
ttcttccattat

SEQ ID NO: 335412 - DNA, 12 bp, Artificial Sequence
  Oligonucleotide primer for the detection of SNP TSC0038797
ttttgaaattta

SEQ ID NO: 335413 - DNA, 12 bp, Artificial Sequence
  Oligonucleotide primer for the detection of SNP TSC0038803
taaacctttata

SEQ ID NO: 335414 - DNA, 12 bp, Artificial Sequence
  Oligonucleotide primer for the detection of SNP TSC0038803
ctacatttcaaa

SEQ ID NO: 335415 - DNA, 12 bp, Artificial Sequence
  Oligonucleotide primer for the detection of SNP TSC0038803
ataggtttttgt

SEQ ID NO: 335416 - DNA, 12 bp, Artificial Sequence
  Oligonucleotide primer for the detection of SNP TSC0038807
catatattatac

SEQ ID NO: 335417 - DNA, 12 bp, Artificial Sequence
  Oligonucleotide primer for the detection of SNP TSC0038807
cttataaaacca

SEQ ID NO: 335418 - DNA, 12 bp, Artificial Sequence
  Oligonucleotide primer for the detection of SNP TSC0038807
tatatattatat

SEQ ID NO: 335419 - DNA, 12 bp, Artificial Sequence
  Oligonucleotide primer for the detection of SNP TSC0038808
tatttaaactta

SEQ ID NO: 335420 - DNA, 12 bp, Artificial Sequence
  Oligonucleotide primer for the detection of SNP TSC0038808
tattgtttttga

SEQ ID NO: 335421 - DNA, 12 bp, Artificial Sequence
  Oligonucleotide primer for the detection of SNP TSC0038808
gtgtttggattt

SEQ ID NO: 335422 - DNA, 12 bp, Artificial Sequence
  Oligonucleotide primer for the detection of SNP TSC0038813
tccacaaaaata

SEQ ID NO: 335423 - DNA, 12 bp, Artificial Sequence
  Oligonucleotide primer for the detection of SNP TSC0038813
gatggtgatttt

SEQ ID NO: 335424 - DNA, 12 bp, Artificial Sequence
  Oligonucleotide primer for the detection of SNP TSC0038813
aataataatttt

SEQ ID NO: 335425 - DNA, 12 bp, Artificial Sequence
  Oligonucleotide primer for the detection of SNP TSC0038813
tttataaagata

SEQ ID NO: 335426 - DNA, 12 bp, Artificial Sequence
  Oligonucleotide primer for the detection of SNP TSC0038815
aattctaacaaa

SEQ ID NO: 335427 - DNA, 12 bp, Artificial Sequence
  Oligonucleotide primer for the detection of SNP TSC0038815
aatttattgtat

SEQ ID NO: 335428 - DNA, 12 bp, Artificial Sequence
  Oligonucleotide primer for the detection of SNP TSC0038815
aattcactacat

SEQ ID NO: 335429 - DNA, 12 bp, Artificial Sequence
  Oligonucleotide primer for the detection of SNP TSC0038815
aattttggtagg

SEQ ID NO: 335430 - DNA, 12 bp, Artificial Sequence
  Oligonucleotide primer for the detection of SNP TSC0038816
ctaccttataat

SEQ ID NO: 335431 - DNA, 12 bp, Artificial Sequence
  Oligonucleotide primer for the detection of SNP TSC0038816
tggggtttgtta

SEQ ID NO: 335432 - DNA, 12 bp, Artificial Sequence
  Oligonucleotide primer for the detection of SNP TSC0038817
aatcaaaaacac

SEQ ID NO: 335433 - DNA, 12 bp, Artificial Sequence
  Oligonucleotide primer for the detection of SNP TSC0038818
tctcataaacta

SEQ ID NO: 335434 - DNA, 12 bp, Artificial Sequence
  Oligonucleotide primer for the detection of SNP TSC0038818
tattttatttat

SEQ ID NO: 335435 - DNA, 12 bp, Artificial Sequence
  Oligonucleotide primer for the detection of SNP TSC0038818
atttcatccata

SEQ ID NO: 335436 - DNA, 12 bp, Artificial Sequence
  Oligonucleotide primer for the detection of SNP TSC0038818
attttataagtt

SEQ ID NO: 335437 - DNA, 12 bp, Artificial Sequence
  Oligonucleotide primer for the detection of SNP TSC0038819
aaaaacactaat

SEQ ID NO: 335438 - DNA, 12 bp, Artificial Sequence
  Oligonucleotide primer for the detection of SNP TSC0038819
ggtggtaaatag

SEQ ID NO: 335439 - DNA, 12 bp, Artificial Sequence
  Oligonucleotide primer for the detection of SNP TSC0038820
tctacaattatc

SEQ ID NO: 335440 - DNA, 12 bp, Artificial Sequence
  Oligonucleotide primer for the detection of SNP TSC0038820
cctctattaaac

SEQ ID NO: 335441 - DNA, 12 bp, Artificial Sequence
  Oligonucleotide primer for the detection of SNP TSC0038820
tttgtagttgtt

SEQ ID NO: 335442 - DNA, 12 bp, Artificial Sequence
  Oligonucleotide primer for the detection of SNP TSC0038826
gaaaatttgatg

SEQ ID NO: 335443 - DNA, 12 bp, Artificial Sequence
  Oligonucleotide primer for the detection of SNP TSC0038830
atatataattta

SEQ ID NO: 335444 - DNA, 12 bp, Artificial Sequence
  Oligonucleotide primer for the detection of SNP TSC0038830
actaacatctcc

SEQ ID NO: 335445 - DNA, 12 bp, Artificial Sequence
  Oligonucleotide primer for the detection of SNP TSC0038830
atgtatgatttg

SEQ ID NO: 335446 - DNA, 12 bp, Artificial Sequence
  Oligonucleotide primer for the detection of SNP TSC0038831
aagaatttaaag

SEQ ID NO: 335447 - DNA, 12 bp, Artificial Sequence
  Oligonucleotide primer for the detection of SNP TSC0038832
tccatcaccaat

SEQ ID NO: 335448 - DNA, 12 bp, Artificial Sequence
  Oligonucleotide primer for the detection of SNP TSC0038832
atatatttagtg

SEQ ID NO: 335449 - DNA, 12 bp, Artificial Sequence
  Oligonucleotide primer for the detection of SNP TSC0038833
tactatttctct

SEQ ID NO: 335450 - DNA, 12 bp, Artificial Sequence
  Oligonucleotide primer for the detection of SNP TSC0038833
tatatttatata

SEQ ID NO: 335451 - DNA, 12 bp, Artificial Sequence
  Oligonucleotide primer for the detection of SNP TSC0038833
tacatctacata

SEQ ID NO: 335452 - DNA, 12 bp, Artificial Sequence
  Oligonucleotide primer for the detection of SNP TSC0038834
ctctatattcat

SEQ ID NO: 335453 - DNA, 12 bp, Artificial Sequence
  Oligonucleotide primer for the detection of SNP TSC0038834
ttgaaattaaag

SEQ ID NO: 335454 - DNA, 12 bp, Artificial Sequence
  Oligonucleotide primer for the detection of SNP TSC0038835
aataataatacc

SEQ ID NO: 335455 - DNA, 12 bp, Artificial Sequence
  Oligonucleotide primer for the detection of SNP TSC0038839
aattttaaccaa

SEQ ID NO: 335456 - DNA, 12 bp, Artificial Sequence
  Oligonucleotide primer for the detection of SNP TSC0038839
tgtaaatgtttt

SEQ ID NO: 335457 - DNA, 12 bp, Artificial Sequence
  Oligonucleotide primer for the detection of SNP TSC0038839
tacaaatacttc

SEQ ID NO: 335458 - DNA, 12 bp, Artificial Sequence
  Oligonucleotide primer for the detection of SNP TSC0038839
aattttggttag

SEQ ID NO: 335459 - DNA, 12 bp, Artificial Sequence
  Oligonucleotide primer for the detection of SNP TSC0038840
acctataacaat

SEQ ID NO: 335460 - DNA, 12 bp, Artificial Sequence
  Oligonucleotide primer for the detection of SNP TSC0038841
ctctatatttaa

SEQ ID NO: 335461 - DNA, 12 bp, Artificial Sequence
  Oligonucleotide primer for the detection of SNP TSC0038841
tggaatgttttt

SEQ ID NO: 335462 - DNA, 12 bp, Artificial Sequence
  Oligonucleotide primer for the detection of SNP TSC0038841
ggttttgtattt

SEQ ID NO: 335463 - DNA, 12 bp, Artificial Sequence
  Oligonucleotide primer for the detection of SNP TSC0038842
aaaaacaacctc

SEQ ID NO: 335464 - DNA, 12 bp, Artificial Sequence
  Oligonucleotide primer for the detection of SNP TSC0038842
tagagggtttta

SEQ ID NO: 335465 - DNA, 12 bp, Artificial Sequence
  Oligonucleotide primer for the detection of SNP TSC0038843
ataccaatcttt

SEQ ID NO: 335466 - DNA, 12 bp, Artificial Sequence
  Oligonucleotide primer for the detection of SNP TSC0038843
aatccatataac

SEQ ID NO: 335467 - DNA, 12 bp, Artificial Sequence
  Oligonucleotide primer for the detection of SNP TSC0038845
aactaactctat

SEQ ID NO: 335468 - DNA, 12 bp, Artificial Sequence
  Oligonucleotide primer for the detection of SNP TSC0038845
tgaagggggtag

SEQ ID NO: 335469 - DNA, 12 bp, Artificial Sequence
  Oligonucleotide primer for the detection of SNP TSC0038845
cgaagggggtag

SEQ ID NO: 335470 - DNA, 12 bp, Artificial Sequence
  Oligonucleotide primer for the detection of SNP TSC0038847
actctatcatcc

SEQ ID NO: 335471 - DNA, 12 bp, Artificial Sequence
  Oligonucleotide primer for the detection of SNP TSC0038847
actctatcgtcc

SEQ ID NO: 335472 - DNA, 12 bp, Artificial Sequence
  Oligonucleotide primer for the detection of SNP TSC0038847
aggaggagagag

SEQ ID NO: 335473 - DNA, 12 bp, Artificial Sequence
  Oligonucleotide primer for the detection of SNP TSC0038847
ttttgtcgtttt

SEQ ID NO: 335474 - DNA, 12 bp, Artificial Sequence
  Oligonucleotide primer for the detection of SNP TSC0038848
ataaaaattact

SEQ ID NO: 335475 - DNA, 12 bp, Artificial Sequence
  Oligonucleotide primer for the detection of SNP TSC0038848
ttatttaaagga

SEQ ID NO: 335476 - DNA, 12 bp, Artificial Sequence
  Oligonucleotide primer for the detection of SNP TSC0038849
ttaataataaat

SEQ ID NO: 335477 - DNA, 12 bp, Artificial Sequence
  Oligonucleotide primer for the detection of SNP TSC0038849
aaaagaaagttg

SEQ ID NO: 335478 - DNA, 12 bp, Artificial Sequence
  Oligonucleotide primer for the detection of SNP TSC0038850
aacccttactaa

SEQ ID NO: 335479 - DNA, 12 bp, Artificial Sequence
  Oligonucleotide primer for the detection of SNP TSC0038850
aaggatgagttt

SEQ ID NO: 335480 - DNA, 12 bp, Artificial Sequence
  Oligonucleotide primer for the detection of SNP TSC0038850
agtttttgttga

SEQ ID NO: 335481 - DNA, 12 bp, Artificial Sequence
  Oligonucleotide primer for the detection of SNP TSC0038853
aaacctctaccc

SEQ ID NO: 335482 - DNA, 12 bp, Artificial Sequence
  Oligonucleotide primer for the detection of SNP TSC0038853
aaagtgggttta

SEQ ID NO: 335483 - DNA, 12 bp, Artificial Sequence
  Oligonucleotide primer for the detection of SNP TSC0038853
aaagcgggttta

SEQ ID NO: 335484 - DNA, 12 bp, Artificial Sequence
  Oligonucleotide primer for the detection of SNP TSC0038854
acaatccaaaac

SEQ ID NO: 335485 - DNA, 12 bp, Artificial Sequence
  Oligonucleotide primer for the detection of SNP TSC0038854
tgttttggagga

SEQ ID NO: 335486 - DNA, 12 bp, Artificial Sequence
  Oligonucleotide primer for the detection of SNP TSC0038854
cgttttggagga

SEQ ID NO: 335487 - DNA, 12 bp, Artificial Sequence
  Oligonucleotide primer for the detection of SNP TSC0038856
agatggttatta

SEQ ID NO: 335488 - DNA, 12 bp, Artificial Sequence
  Oligonucleotide primer for the detection of SNP TSC0038857
tattttaataaa

SEQ ID NO: 335489 - DNA, 12 bp, Artificial Sequence
  Oligonucleotide primer for the detection of SNP TSC0038857
atttgtatagag

SEQ ID NO: 335490 - DNA, 12 bp, Artificial Sequence
  Oligonucleotide primer for the detection of SNP TSC0038857
attcgtatagag

SEQ ID NO: 335491 - DNA, 12 bp, Artificial Sequence
  Oligonucleotide primer for the detection of SNP TSC0038857
atccatacaaaa

SEQ ID NO: 335492 - DNA, 12 bp, Artificial Sequence
  Oligonucleotide primer for the detection of SNP TSC0038857
atccgtacaaaa

SEQ ID NO: 335493 - DNA, 12 bp, Artificial Sequence
  Oligonucleotide primer for the detection of SNP TSC0038857
attgttttggta

SEQ ID NO: 335494 - DNA, 12 bp, Artificial Sequence
  Oligonucleotide primer for the detection of SNP TSC0038858
tatttgtatatt

SEQ ID NO: 335495 - DNA, 12 bp, Artificial Sequence
  Oligonucleotide primer for the detection of SNP TSC0038858
ccacctacacat

SEQ ID NO: 335496 - DNA, 12 bp, Artificial Sequence
  Oligonucleotide primer for the detection of SNP TSC0038858
gtggatgaggat

SEQ ID NO: 335497 - DNA, 12 bp, Artificial Sequence
  Oligonucleotide primer for the detection of SNP TSC0038860
aatctcatatcc

SEQ ID NO: 335498 - DNA, 12 bp, Artificial Sequence
  Oligonucleotide primer for the detection of SNP TSC0038860
ttttgtaaatta

SEQ ID NO: 335499 - DNA, 12 bp, Artificial Sequence
  Oligonucleotide primer for the detection of SNP TSC0038860
tcttacaaacca

SEQ ID NO: 335500 - DNA, 12 bp, Artificial Sequence
  Oligonucleotide primer for the detection of SNP TSC0038861
aaacttaaattt

SEQ ID NO: 335501 - DNA, 12 bp, Artificial Sequence
  Oligonucleotide primer for the detection of SNP TSC0038861
ttggaggtagta

SEQ ID NO: 335502 - DNA, 12 bp, Artificial Sequence
  Oligonucleotide primer for the detection of SNP TSC0038864
caaataaaatct

SEQ ID NO: 335503 - DNA, 12 bp, Artificial Sequence
  Oligonucleotide primer for the detection of SNP TSC0038864
agtttggggaaa

SEQ ID NO: 335504 - DNA, 12 bp, Artificial Sequence
  Oligonucleotide primer for the detection of SNP TSC0038864
agttcggggaaa

SEQ ID NO: 335505 - DNA, 12 bp, Artificial Sequence
  Oligonucleotide primer for the detection of SNP TSC0038866
taaaattaatca

SEQ ID NO: 335506 - DNA, 12 bp, Artificial Sequence
  Oligonucleotide primer for the detection of SNP TSC0038866
ttggttatattt

SEQ ID NO: 335507 - DNA, 12 bp, Artificial Sequence
  Oligonucleotide primer for the detection of SNP TSC0038866
tttaatcacatt

SEQ ID NO: 335508 - DNA, 12 bp, Artificial Sequence
  Oligonucleotide primer for the detection of SNP TSC0038866
tagaattgatta

SEQ ID NO: 335509 - DNA, 12 bp, Artificial Sequence
  Oligonucleotide primer for the detection of SNP TSC0038867
ttttaatttcct

SEQ ID NO: 335510 - DNA, 12 bp, Artificial Sequence
  Oligonucleotide primer for the detection of SNP TSC0038867
gtaataattaag

SEQ ID NO: 335511 - DNA, 12 bp, Artificial Sequence
  Oligonucleotide primer for the detection of SNP TSC0038867
acaacaattaaa

SEQ ID NO: 335512 - DNA, 12 bp, Artificial Sequence
  Oligonucleotide primer for the detection of SNP TSC0038868
cacctctaccta

SEQ ID NO: 335513 - DNA, 12 bp, Artificial Sequence
  Oligonucleotide primer for the detection of SNP TSC0038868
gggggtaggtgt

SEQ ID NO: 335514 - DNA, 12 bp, Artificial Sequence
  Oligonucleotide primer for the detection of SNP TSC0038870
gatatatagttg

SEQ ID NO: 335515 - DNA, 12 bp, Artificial Sequence
  Oligonucleotide primer for the detection of SNP TSC0038870
aacatataacta

SEQ ID NO: 335516 - DNA, 12 bp, Artificial Sequence
  Oligonucleotide primer for the detection of SNP TSC0038871
acaaactaccct

SEQ ID NO: 335517 - DNA, 12 bp, Artificial Sequence
  Oligonucleotide primer for the detection of SNP TSC0038871
attgattttggt

SEQ ID NO: 335518 - DNA, 12 bp, Artificial Sequence
  Oligonucleotide primer for the detection of SNP TSC0038871
cactaactttaa

SEQ ID NO: 335519 - DNA, 12 bp, Artificial Sequence
  Oligonucleotide primer for the detection of SNP TSC0038871
ataaattgtttt

SEQ ID NO: 335520 - DNA, 12 bp, Artificial Sequence
  Oligonucleotide primer for the detection of SNP TSC0038872
taatatttttta

SEQ ID NO: 335521 - DNA, 12 bp, Artificial Sequence
  Oligonucleotide primer for the detection of SNP TSC0038872
taacacttttta

SEQ ID NO: 335522 - DNA, 12 bp, Artificial Sequence
  Oligonukleotid-Primer
aaaagaatattg

SEQ ID NO: 335523 - DNA, 12 bp, Artificial Sequence
  Oligonucleotide primer for the detection of SNP TSC0038873
attttatgtttt

SEQ ID NO: 335524 - DNA, 12 bp, Artificial Sequence
  Oligonucleotide primer for the detection of SNP TSC0038873
attttacgtttt

SEQ ID NO: 335525 - DNA, 12 bp, Artificial Sequence
  Oligonucleotide primer for the detection of SNP TSC0038873
ttctacatctta

SEQ ID NO: 335526 - DNA, 12 bp, Artificial Sequence
  Oligonucleotide primer for the detection of SNP TSC0038873
ttctacgtctta

SEQ ID NO: 335527 - DNA, 12 bp, Artificial Sequence
  Oligonucleotide primer for the detection of SNP TSC0038875
actatatatatt

SEQ ID NO: 335528 - DNA, 12 bp, Artificial Sequence
  Oligonucleotide primer for the detection of SNP TSC0038875
ttatgtttgaag

SEQ ID NO: 335529 - DNA, 12 bp, Artificial Sequence
  Oligonucleotide primer for the detection of SNP TSC0038876
ccttaaaaaacc

SEQ ID NO: 335530 - DNA, 12 bp, Artificial Sequence
  Oligonukleotid-Primer
tagataaaaaat

SEQ ID NO: 335531 - DNA, 12 bp, Artificial Sequence
  Oligonucleotide primer for the detection of SNP TSC0038877
aaaactaattat

SEQ ID NO: 335532 - DNA, 12 bp, Artificial Sequence
  Oligonucleotide primer for the detection of SNP TSC0038879
taataatacaac

SEQ ID NO: 335533 - DNA, 12 bp, Artificial Sequence
  Oligonucleotide primer for the detection of SNP TSC0038879
aatttttttaaa

SEQ ID NO: 335534 - DNA, 12 bp, Artificial Sequence
  Oligonucleotide primer for the detection of SNP TSC0038880
aaaaattaaact

SEQ ID NO: 335535 - DNA, 12 bp, Artificial Sequence
  Oligonucleotide primer for the detection of SNP TSC0038880
gaaaattaaact

SEQ ID NO: 335536 - DNA, 12 bp, Artificial Sequence
  Oligonucleotide primer for the detection of SNP TSC0038880
gttataaatttg

SEQ ID NO: 335537 - DNA, 12 bp, Artificial Sequence
  Oligonucleotide primer for the detection of SNP TSC0038881
atacaactaaac

SEQ ID NO: 335538 - DNA, 12 bp, Artificial Sequence
  Oligonukleotid-Primer
gaagatatgtaa

SEQ ID NO: 335539 - DNA, 12 bp, Artificial Sequence
  Oligonucleotide primer for the detection of SNP TSC0038881
gaagatacgtaa

SEQ ID NO: 335540 - DNA, 12 bp, Artificial Sequence
  Oligonucleotide primer for the detection of SNP TSC0038881
atgtaattggat

SEQ ID NO: 335541 - DNA, 12 bp, Artificial Sequence
  Oligonucleotide primer for the detection of SNP TSC0038883
tattttctaaac

SEQ ID NO: 335542 - DNA, 12 bp, Artificial Sequence
  Oligonucleotide primer for the detection of SNP TSC0038883
tgttaggtaagt

SEQ ID NO: 335543 - DNA, 12 bp, Artificial Sequence
  Oligonucleotide primer for the detection of SNP TSC0038886
ttaaatataacc

SEQ ID NO: 335544 - DNA, 12 bp, Artificial Sequence
  Oligonucleotide primer for the detection of SNP TSC0038886
ttgttaatgtta

SEQ ID NO: 335545 - DNA, 12 bp, Artificial Sequence
  Oligonucleotide primer for the detection of SNP TSC0038886
tcgttaatgtta

SEQ ID NO: 335546 - DNA, 12 bp, Artificial Sequence
  Oligonukleotid-Primer
aaaataataaca

SEQ ID NO: 335547 - DNA, 12 bp, Artificial Sequence
  Oligonucleotide primer for the detection of SNP TSC0038892
attgttttggtg

SEQ ID NO: 335548 - DNA, 12 bp, Artificial Sequence
  Oligonucleotide primer for the detection of SNP TSC0038892
actattctaata

SEQ ID NO: 335549 - DNA, 12 bp, Artificial Sequence
  Oligonucleotide primer for the detection of SNP TSC0038892
aattattatgtt

SEQ ID NO: 335550 - DNA, 12 bp, Artificial Sequence
  Oligonucleotide primer for the detection of SNP TSC0038892
aattattatgtc

SEQ ID NO: 335551 - DNA, 12 bp, Artificial Sequence
  Oligonucleotide primer for the detection of SNP TSC0038893
cacataaataaa

SEQ ID NO: 335552 - DNA, 12 bp, Artificial Sequence
  Oligonucleotide primer for the detection of SNP TSC0038898
tttaacttaata

SEQ ID NO: 335553 - DNA, 12 bp, Artificial Sequence
  Oligonucleotide primer for the detection of SNP TSC0038898
gttatatttttt

SEQ ID NO: 335554 - DNA, 12 bp, Artificial Sequence
  Oligonucleotide primer for the detection of SNP TSC0038898
attacacctcct

SEQ ID NO: 335555 - DNA, 12 bp, Artificial Sequence
  Oligonucleotide primer for the detection of SNP TSC0038898
tttggtttggta

SEQ ID NO: 335556 - DNA, 12 bp, Artificial Sequence
  Oligonucleotide primer for the detection of SNP TSC0038899
aaatcccttaaa

SEQ ID NO: 335557 - DNA, 12 bp, Artificial Sequence
  Oligonucleotide primer for the detection of SNP TSC0038899
gaattttttgaa

SEQ ID NO: 335558 - DNA, 12 bp, Artificial Sequence
  Oligonucleotide primer for the detection of SNP TSC0038900
atactcaaaatt

SEQ ID NO: 335559 - DNA, 12 bp, Artificial Sequence
  Oligonucleotide primer for the detection of SNP TSC0038900
tatttttaaatg

SEQ ID NO: 335560 - DNA, 12 bp, Artificial Sequence
  Oligonucleotide primer for the detection of SNP TSC0038901
ccatcttttctc

SEQ ID NO: 335561 - DNA, 12 bp, Artificial Sequence
  Oligonucleotide primer for the detection of SNP TSC0038901
atttaggtgaag

SEQ ID NO: 335562 - DNA, 12 bp, Artificial Sequence
  Oligonucleotide primer for the detection of SNP TSC0038901
cccaaataaaaa

SEQ ID NO: 335563 - DNA, 12 bp, Artificial Sequence
  Oligonucleotide primer for the detection of SNP TSC0004808
gtttagtaaaag

SEQ ID NO: 335564 - DNA, 12 bp, Artificial Sequence
  Oligonucleotide primer for the detection of SNP TSC0004808
atctaacaaaaa

SEQ ID NO: 335565 - DNA, 12 bp, Artificial Sequence
  Oligonucleotide primer for the detection of SNP TSC0004808
tgtgtttataat

SEQ ID NO: 335566 - DNA, 12 bp, Artificial Sequence
  Oligonucleotide primer for the detection of SNP TSC0006430
ggaaaatgaatt

SEQ ID NO: 335567 - DNA, 12 bp, Artificial Sequence
  Oligonucleotide primer for the detection of SNP TSC0006430
agggttagaagt

SEQ ID NO: 335568 - DNA, 12 bp, Artificial Sequence
  Oligonucleotide primer for the detection of SNP TSC0038903
tcccccttacct

SEQ ID NO: 335569 - DNA, 12 bp, Artificial Sequence
  Oligonucleotide primer for the detection of SNP TSC0038903
tgtttttggggg

SEQ ID NO: 335570 - DNA, 12 bp, Artificial Sequence
  Oligonucleotide primer for the detection of SNP TSC0038904
taccataccatt

SEQ ID NO: 335571 - DNA, 12 bp, Artificial Sequence
  Oligonucleotide primer for the detection of SNP TSC0038904
aatataatgggt

SEQ ID NO: 335572 - DNA, 12 bp, Artificial Sequence
  Oligonucleotide primer for the detection of SNP TSC0038904
aaacataataaa

SEQ ID NO: 335573 - DNA, 12 bp, Artificial Sequence
  Oligonucleotide primer for the detection of SNP TSC0038905
aatttatatacc

SEQ ID NO: 335574 - DNA, 12 bp, Artificial Sequence
  Oligonucleotide primer for the detection of SNP TSC0038905
taaaagtttaaa

SEQ ID NO: 335575 - DNA, 12 bp, Artificial Sequence
  Oligonucleotide primer for the detection of SNP TSC0038905
taaaaatttaaa

SEQ ID NO: 335576 - DNA, 12 bp, Artificial Sequence
  Oligonucleotide primer for the detection of SNP TSC0038905
agtttatgtgtt

SEQ ID NO: 335577 - DNA, 12 bp, Artificial Sequence
  Oligonucleotide primer for the detection of SNP TSC0038906
caaactccttcc

SEQ ID NO: 335578 - DNA, 12 bp, Artificial Sequence
  Oligonucleotide primer for the detection of SNP TSC0038906
cgaactccttcc

SEQ ID NO: 335579 - DNA, 12 bp, Artificial Sequence
  Oligonucleotide primer for the detection of SNP TSC0038906
gataaattgtga

SEQ ID NO: 335580 - DNA, 12 bp, Artificial Sequence
  Oligonucleotide primer for the detection of SNP TSC0038906
gataaatcgtga

SEQ ID NO: 335581 - DNA, 12 bp, Artificial Sequence
  Oligonucleotide primer for the detection of SNP TSC0007618
tggttttgtttg

SEQ ID NO: 335582 - DNA, 12 bp, Artificial Sequence
  Oligonucleotide primer for the detection of SNP TSC0038907
tcaaataaaaaa

SEQ ID NO: 335583 - DNA, 12 bp, Artificial Sequence
  Oligonucleotide primer for the detection of SNP TSC0038907
agtttttgtaat

SEQ ID NO: 335584 - DNA, 12 bp, Artificial Sequence
  Oligonucleotide primer for the detection of SNP TSC0038907
aacctctataac

SEQ ID NO: 335585 - DNA, 12 bp, Artificial Sequence
  Oligonucleotide primer for the detection of SNP TSC0038907
taattaagtagg

SEQ ID NO: 335586 - DNA, 12 bp, Artificial Sequence
  Oligonucleotide primer for the detection of SNP TSC0038908
ttaaaaatttca

SEQ ID NO: 335587 - DNA, 12 bp, Artificial Sequence
  Oligonucleotide primer for the detection of SNP TSC0038908
ttgaaaattagt

SEQ ID NO: 335588 - DNA, 12 bp, Artificial Sequence
  Oligonucleotide primer for the detection of SNP TSC0038908
ttagagatttta

SEQ ID NO: 335589 - DNA, 12 bp, Artificial Sequence
  Oligonucleotide primer for the detection of SNP TSC0038909
ttttagatttaa

SEQ ID NO: 335590 - DNA, 12 bp, Artificial Sequence
  Oligonucleotide primer for the detection of SNP TSC0038910
gtaggagaattg

SEQ ID NO: 335591 - DNA, 12 bp, Artificial Sequence
  Oligonucleotide primer for the detection of SNP TSC0038910
gtaggagaatcg

SEQ ID NO: 335592 - DNA, 12 bp, Artificial Sequence
  Oligonucleotide primer for the detection of SNP TSC0038911
tatgtgatggta

SEQ ID NO: 335593 - DNA, 12 bp, Artificial Sequence
  Oligonucleotide primer for the detection of SNP TSC0038911
tacgtgatggta

SEQ ID NO: 335594 - DNA, 12 bp, Artificial Sequence
  Oligonucleotide primer for the detection of SNP TSC0038911
cacataataaca

SEQ ID NO: 335595 - DNA, 12 bp, Artificial Sequence
  Oligonucleotide primer for the detection of SNP TSC0038911
cacgtaataaca

SEQ ID NO: 335596 - DNA, 12 bp, Artificial Sequence
  Oligonucleotide primer for the detection of SNP TSC0038911
gggatattaaat

SEQ ID NO: 335597 - DNA, 12 bp, Artificial Sequence
  Oligonucleotide primer for the detection of SNP TSC0038912
aaaataatacaa

SEQ ID NO: 335598 - DNA, 12 bp, Artificial Sequence
  Oligonucleotide primer for the detection of SNP TSC0038912
ggagttataaga

SEQ ID NO: 335599 - DNA, 12 bp, Artificial Sequence
  Oligonucleotide primer for the detection of SNP TSC0038912
taaaaatgatat

SEQ ID NO: 335600 - DNA, 12 bp, Artificial Sequence
  Oligonucleotide primer for the detection of SNP TSC0038913
ataatacatcat

SEQ ID NO: 335601 - DNA, 12 bp, Artificial Sequence
  Oligonucleotide primer for the detection of SNP TSC0038914
tattaacataca

SEQ ID NO: 335602 - DNA, 12 bp, Artificial Sequence
  Oligonucleotide primer for the detection of SNP TSC0038914
tttataaggtat

SEQ ID NO: 335603 - DNA, 12 bp, Artificial Sequence
  Oligonucleotide primer for the detection of SNP TSC0038914
tataaaacataa

SEQ ID NO: 335604 - DNA, 12 bp, Artificial Sequence
  Oligonucleotide primer for the detection of SNP TSC0038914
tgatatatattt

SEQ ID NO: 335605 - DNA, 12 bp, Artificial Sequence
  Oligonucleotide primer for the detection of SNP TSC0009742
aaacaatatatt

SEQ ID NO: 335606 - DNA, 12 bp, Artificial Sequence
  Oligonucleotide primer for the detection of SNP TSC0009742
tattttatgtta

SEQ ID NO: 335607 - DNA, 12 bp, Artificial Sequence
  Oligonucleotide primer for the detection of SNP TSC0000782
gtttatatggtg

SEQ ID NO: 335608 - DNA, 12 bp, Artificial Sequence
  Oligonucleotide primer for the detection of SNP TSC0000783
taatttgtttta

SEQ ID NO: 335609 - DNA, 12 bp, Artificial Sequence
  Oligonucleotide primer for the detection of SNP TSC0000783
caatctatttta

SEQ ID NO: 335610 - DNA, 12 bp, Artificial Sequence
  Oligonucleotide primer for the detection of SNP TSC0000783
gaatttatagat

SEQ ID NO: 335611 - DNA, 12 bp, Artificial Sequence
  Oligonucleotide primer for the detection of SNP TSC0009713
tacctataattc

SEQ ID NO: 335612 - DNA, 12 bp, Artificial Sequence
  Oligonucleotide primer for the detection of SNP TSC0038921
actaatcctaaa

SEQ ID NO: 335613 - DNA, 12 bp, Artificial Sequence
  Oligonucleotide primer for the detection of SNP TSC0038921
tatcgttttttt

SEQ ID NO: 335614 - DNA, 12 bp, Artificial Sequence
  Oligonucleotide primer for the detection of SNP TSC0038921
caccaccccctc

SEQ ID NO: 335615 - DNA, 12 bp, Artificial Sequence
  Oligonucleotide primer for the detection of SNP TSC0038921
caccgccccctc

SEQ ID NO: 335616 - DNA, 12 bp, Artificial Sequence
  Oligonucleotide primer for the detection of SNP TSC0038921
gttgattttggg

SEQ ID NO: 335617 - DNA, 12 bp, Artificial Sequence
  Oligonucleotide primer for the detection of SNP TSC0000281
ctacaacacaat

SEQ ID NO: 335618 - DNA, 12 bp, Artificial Sequence
  Oligonucleotide primer for the detection of SNP TSC0000281
gtttaaatataa

SEQ ID NO: 335619 - DNA, 12 bp, Artificial Sequence
  Oligonucleotide primer for the detection of SNP TSC0038922
atctattcccaa

SEQ ID NO: 335620 - DNA, 12 bp, Artificial Sequence
  Oligonucleotide primer for the detection of SNP TSC0038922
gtggaagtagat

SEQ ID NO: 335621 - DNA, 12 bp, Artificial Sequence
  Oligonucleotide primer for the detection of SNP TSC0000768
gttattgttgaa

SEQ ID NO: 335622 - DNA, 12 bp, Artificial Sequence
  Oligonucleotide primer for the detection of SNP TSC0038924
atacctaaacca

SEQ ID NO: 335623 - DNA, 12 bp, Artificial Sequence
  Oligonucleotide primer for the detection of SNP TSC0038924
taatatatgtat

SEQ ID NO: 335624 - DNA, 12 bp, Artificial Sequence
  Oligonucleotide primer for the detection of SNP TSC0038924
ataacacataca

SEQ ID NO: 335625 - DNA, 12 bp, Artificial Sequence
  Oligonucleotide primer for the detection of SNP TSC0038924
atgtttaagtta

SEQ ID NO: 335626 - DNA, 12 bp, Artificial Sequence
  Oligonucleotide primer for the detection of SNP TSC0038925
actccccaactt

SEQ ID NO: 335627 - DNA, 12 bp, Artificial Sequence
  Oligonucleotide primer for the detection of SNP TSC0038925
tgtgtattagta

SEQ ID NO: 335628 - DNA, 12 bp, Artificial Sequence
  Oligonucleotide primer for the detection of SNP TSC0038925
cgtgtattagta

SEQ ID NO: 335629 - DNA, 12 bp, Artificial Sequence
  Oligonucleotide primer for the detection of SNP TSC0000939
tggtgtgaattt

SEQ ID NO: 335630 - DNA, 12 bp, Artificial Sequence
  Oligonucleotide primer for the detection of SNP TSC0000939
tggtgtgaattc

SEQ ID NO: 335631 - DNA, 12 bp, Artificial Sequence
  Oligonucleotide primer for the detection of SNP TSC0000939
ataatataaatt

SEQ ID NO: 335632 - DNA, 12 bp, Artificial Sequence
  Oligonucleotide primer for the detection of SNP TSC0038928
agtggtgttatg

SEQ ID NO: 335633 - DNA, 12 bp, Artificial Sequence
  Oligonucleotide primer for the detection of SNP TSC0038929
aactccataact

SEQ ID NO: 335634 - DNA, 12 bp, Artificial Sequence
  Oligonucleotide primer for the detection of SNP TSC0038929
aactccgtaact

SEQ ID NO: 335635 - DNA, 12 bp, Artificial Sequence
  Oligonucleotide primer for the detection of SNP TSC0038929
gactccataact

SEQ ID NO: 335636 - DNA, 12 bp, Artificial Sequence
  Oligonucleotide primer for the detection of SNP TSC0038929
gactccgtaact

SEQ ID NO: 335637 - DNA, 12 bp, Artificial Sequence
  Oligonucleotide primer for the detection of SNP TSC0038930
tagggaggatga

SEQ ID NO: 335638 - DNA, 12 bp, Artificial Sequence
  Oligonucleotide primer for the detection of SNP TSC0000577
aagttttaatat

SEQ ID NO: 335639 - DNA, 12 bp, Artificial Sequence
  Oligonucleotide primer for the detection of SNP TSC0000577
aagttttaatac

SEQ ID NO: 335640 - DNA, 12 bp, Artificial Sequence
  Oligonucleotide primer for the detection of SNP TSC0000577
aaatcctaacac

SEQ ID NO: 335641 - DNA, 12 bp, Artificial Sequence
  Oligonucleotide primer for the detection of SNP TSC0000577
tttttttgaggg

SEQ ID NO: 335642 - DNA, 12 bp, Artificial Sequence
  Oligonucleotide primer for the detection of SNP TSC0000578
cctcaataaaat

SEQ ID NO: 335643 - DNA, 12 bp, Artificial Sequence
  Oligonucleotide primer for the detection of SNP TSC0000578
atgtttgttagg

SEQ ID NO: 335644 - DNA, 12 bp, Artificial Sequence
  Oligonucleotide primer for the detection of SNP TSC0000578
acgtttgttagg

SEQ ID NO: 335645 - DNA, 12 bp, Artificial Sequence
  Oligonucleotide primer for the detection of SNP TSC0001115
caaactttccct

SEQ ID NO: 335646 - DNA, 12 bp, Artificial Sequence
  Oligonucleotide primer for the detection of SNP TSC0001115
gggtaataggta

SEQ ID NO: 335647 - DNA, 12 bp, Artificial Sequence
  Oligonucleotide primer for the detection of SNP TSC0038932
actaaaaatatc

SEQ ID NO: 335648 - DNA, 12 bp, Artificial Sequence
  Oligonucleotide primer for the detection of SNP TSC0038932
attgtaaatttg

SEQ ID NO: 335649 - DNA, 12 bp, Artificial Sequence
  Oligonucleotide primer for the detection of SNP TSC0038933
atactccaacta

SEQ ID NO: 335650 - DNA, 12 bp, Artificial Sequence
  Oligonucleotide primer for the detection of SNP TSC0038933
attaatttttat

SEQ ID NO: 335651 - DNA, 12 bp, Artificial Sequence
  Oligonucleotide primer for the detection of SNP TSC0038934
tactctccttct

SEQ ID NO: 335652 - DNA, 12 bp, Artificial Sequence
  Oligonucleotide primer for the detection of SNP TSC0038935
attaatgaatta

SEQ ID NO: 335653 - DNA, 12 bp, Artificial Sequence
  Oligonucleotide primer for the detection of SNP TSC0038936
taaaacactaat

SEQ ID NO: 335654 - DNA, 12 bp, Artificial Sequence
  Oligonucleotide primer for the detection of SNP TSC0038936
tgtatattagga

SEQ ID NO: 335655 - DNA, 12 bp, Artificial Sequence
  Oligonucleotide primer for the detection of SNP TSC0038937
taactttttact

SEQ ID NO: 335656 - DNA, 12 bp, Artificial Sequence
  Oligonucleotide primer for the detection of SNP TSC0038937
agaaattgaggg

SEQ ID NO: 335657 - DNA, 12 bp, Artificial Sequence
  Oligonucleotide primer for the detection of SNP TSC0038943
cataattaattt

SEQ ID NO: 335658 - DNA, 12 bp, Artificial Sequence
  Oligonucleotide primer for the detection of SNP TSC0038943
agggagttgtaa

SEQ ID NO: 335659 - DNA, 12 bp, Artificial Sequence
  Oligonucleotide primer for the detection of SNP TSC0038944
ttattctcatct

SEQ ID NO: 335660 - DNA, 12 bp, Artificial Sequence
  Oligonucleotide primer for the detection of SNP TSC0038944
aataaattttag

SEQ ID NO: 335661 - DNA, 12 bp, Artificial Sequence
  Oligonucleotide primer for the detection of SNP TSC0001401
aaaaaaatccaa

SEQ ID NO: 335662 - DNA, 12 bp, Artificial Sequence
  Oligonucleotide primer for the detection of SNP TSC0001401
ggtagagaattt

SEQ ID NO: 335663 - DNA, 12 bp, Artificial Sequence
  Oligonucleotide primer for the detection of SNP TSC0001401
aacaaaaaattt

SEQ ID NO: 335664 - DNA, 12 bp, Artificial Sequence
  Oligonucleotide primer for the detection of SNP TSC0001401
gaaaaaaattta

SEQ ID NO: 335665 - DNA, 12 bp, Artificial Sequence
  Oligonucleotide primer for the detection of SNP TSC0001225
tttcattaaaac

SEQ ID NO: 335666 - DNA, 12 bp, Artificial Sequence
  Oligonucleotide primer for the detection of SNP TSC0001225
ctatctcatcaa

SEQ ID NO: 335667 - DNA, 12 bp, Artificial Sequence
  Oligonucleotide primer for the detection of SNP TSC0001225
ttttattaaaat

SEQ ID NO: 335668 - DNA, 12 bp, Artificial Sequence
  Oligonucleotide primer for the detection of SNP TSC0001020
aacctaacctaa

SEQ ID NO: 335669 - DNA, 12 bp, Artificial Sequence
  Oligonucleotide primer for the detection of SNP TSC0038953
caattaaatata

SEQ ID NO: 335670 - DNA, 12 bp, Artificial Sequence
  Oligonucleotide primer for the detection of SNP TSC0038953
gatgttaattga

SEQ ID NO: 335671 - DNA, 12 bp, Artificial Sequence
  Oligonucleotide primer for the detection of SNP TSC0038953
aataccaattaa

SEQ ID NO: 335672 - DNA, 12 bp, Artificial Sequence
  Oligonucleotide primer for the detection of SNP TSC0038953
taattgaatatg

SEQ ID NO: 335673 - DNA, 12 bp, Artificial Sequence
  Oligonucleotide primer for the detection of SNP TSC0038954
ttaacttaaaat

SEQ ID NO: 335674 - DNA, 12 bp, Artificial Sequence
  Oligonucleotide primer for the detection of SNP TSC0038954
gtatttgttaag

SEQ ID NO: 335675 - DNA, 12 bp, Artificial Sequence
  Oligonucleotide primer for the detection of SNP TSC0038955
tatcttcttact

SEQ ID NO: 335676 - DNA, 12 bp, Artificial Sequence
  Oligonucleotide primer for the detection of SNP TSC0038955
gtggtaggagaa

SEQ ID NO: 335677 - DNA, 12 bp, Artificial Sequence
  Oligonucleotide primer for the detection of SNP TSC0038956
aacaccaaatac

SEQ ID NO: 335678 - DNA, 12 bp, Artificial Sequence
  Oligonucleotide primer for the detection of SNP TSC0038956
tttattgatgtg

SEQ ID NO: 335679 - DNA, 12 bp, Artificial Sequence
  Oligonucleotide primer for the detection of SNP TSC0038957
ctcaaacaacaa

SEQ ID NO: 335680 - DNA, 12 bp, Artificial Sequence
  Oligonucleotide primer for the detection of SNP TSC0038957
ctaacttaatta

SEQ ID NO: 335681 - DNA, 12 bp, Artificial Sequence
  Oligonucleotide primer for the detection of SNP TSC0038957
ttagataatagt

SEQ ID NO: 335682 - DNA, 12 bp, Artificial Sequence
  Oligonucleotide primer for the detection of SNP TSC0038958
tcaatcacataa

SEQ ID NO: 335683 - DNA, 12 bp, Artificial Sequence
  Oligonucleotide primer for the detection of SNP TSC0038958
tatttacttcca

SEQ ID NO: 335684 - DNA, 12 bp, Artificial Sequence
  Oligonucleotide primer for the detection of SNP TSC0038959
taacaaattatt

SEQ ID NO: 335685 - DNA, 12 bp, Artificial Sequence
  Oligonucleotide primer for the detection of SNP TSC0038959
atttttgtaaat

SEQ ID NO: 335686 - DNA, 12 bp, Artificial Sequence
  Oligonucleotide primer for the detection of SNP TSC0038964
ctattcaaaacc

SEQ ID NO: 335687 - DNA, 12 bp, Artificial Sequence
  Oligonucleotide primer for the detection of SNP TSC0038964
gtggagaagtat

SEQ ID NO: 335688 - DNA, 12 bp, Artificial Sequence
  Oligonucleotide primer for the detection of SNP TSC0038965
caataactaaaa

SEQ ID NO: 335689 - DNA, 12 bp, Artificial Sequence
  Oligonucleotide primer for the detection of SNP TSC0038965
ttattagtattg

SEQ ID NO: 335690 - DNA, 12 bp, Artificial Sequence
  Oligonucleotide primer for the detection of SNP TSC0038965
ccattaatacta

SEQ ID NO: 335691 - DNA, 12 bp, Artificial Sequence
  Oligonucleotide primer for the detection of SNP TSC0038965
tagtgattaggg

SEQ ID NO: 335692 - DNA, 12 bp, Artificial Sequence
  Oligonucleotide primer for the detection of SNP TSC0038966
aacaaatttctt

SEQ ID NO: 335693 - DNA, 12 bp, Artificial Sequence
  Oligonucleotide primer for the detection of SNP TSC0038966
aaaaattttagg

SEQ ID NO: 335694 - DNA, 12 bp, Artificial Sequence
  Oligonucleotide primer for the detection of SNP TSC0038968
actctcctttat

SEQ ID NO: 335695 - DNA, 12 bp, Artificial Sequence
  Oligonucleotide primer for the detection of SNP TSC0038968
gatagatgttta

SEQ ID NO: 335696 - DNA, 12 bp, Artificial Sequence
  Oligonucleotide primer for the detection of SNP TSC0038969
aatattaaccca

SEQ ID NO: 335697 - DNA, 12 bp, Artificial Sequence
  Oligonucleotide primer for the detection of SNP TSC0038969
tattttgtgatt

SEQ ID NO: 335698 - DNA, 12 bp, Artificial Sequence
  Oligonucleotide primer for the detection of SNP TSC0038969
caccctataatc

SEQ ID NO: 335699 - DNA, 12 bp, Artificial Sequence
  Oligonucleotide primer for the detection of SNP TSC0038969
agtattgattta

SEQ ID NO: 335700 - DNA, 12 bp, Artificial Sequence
  Oligonucleotide primer for the detection of SNP TSC0038970
tcccacaataaa

SEQ ID NO: 335701 - DNA, 12 bp, Artificial Sequence
  Oligonucleotide primer for the detection of SNP TSC0038971
atactaaaaaat

SEQ ID NO: 335702 - DNA, 12 bp, Artificial Sequence
  Oligonucleotide primer for the detection of SNP TSC0038971
tctttaatattt

SEQ ID NO: 335703 - DNA, 12 bp, Artificial Sequence
  Oligonucleotide primer for the detection of SNP TSC0038973
tactttaatcca

SEQ ID NO: 335704 - DNA, 12 bp, Artificial Sequence
  Oligonucleotide primer for the detection of SNP TSC0038974
aaaataaactct

SEQ ID NO: 335705 - DNA, 12 bp, Artificial Sequence
  Oligonucleotide primer for the detection of SNP TSC0038975
aaatccttttta

SEQ ID NO: 335706 - DNA, 12 bp, Artificial Sequence
  Oligonucleotide primer for the detection of SNP TSC0038975
tttgagaataat

SEQ ID NO: 335707 - DNA, 12 bp, Artificial Sequence
  Oligonucleotide primer for the detection of SNP TSC0038975
cttaaaaacaac

SEQ ID NO: 335708 - DNA, 12 bp, Artificial Sequence
  Oligonucleotide primer for the detection of SNP TSC0038976
caataaaaacct

SEQ ID NO: 335709 - DNA, 12 bp, Artificial Sequence
  Oligonucleotide primer for the detection of SNP TSC0038976
atttgttatgta

SEQ ID NO: 335710 - DNA, 12 bp, Artificial Sequence
  Oligonucleotide primer for the detection of SNP TSC0038977
ttaaaaaatttc

SEQ ID NO: 335711 - DNA, 12 bp, Artificial Sequence
  Oligonucleotide primer for the detection of SNP TSC0038977
tttagtgtaggg

SEQ ID NO: 335712 - DNA, 12 bp, Artificial Sequence
  Oligonucleotide primer for the detection of SNP TSC0038977
taatacaaaaaa

SEQ ID NO: 335713 - DNA, 12 bp, Artificial Sequence
  Oligonucleotide primer for the detection of SNP TSC0038977
tgaaaggttttt

SEQ ID NO: 335714 - DNA, 12 bp, Artificial Sequence
  Oligonucleotide primer for the detection of SNP TSC0038978
aaaacacttttt

SEQ ID NO: 335715 - DNA, 12 bp, Artificial Sequence
  Oligonucleotide primer for the detection of SNP TSC0038978
ttttatttggaa

SEQ ID NO: 335716 - DNA, 12 bp, Artificial Sequence
  Oligonucleotide primer for the detection of SNP TSC0038979
ttcaatttaaaa

SEQ ID NO: 335717 - DNA, 12 bp, Artificial Sequence
  Oligonucleotide primer for the detection of SNP TSC0038979
cttaaaaatcca

SEQ ID NO: 335718 - DNA, 12 bp, Artificial Sequence
  Oligonucleotide primer for the detection of SNP TSC0038979
tttagtttgaaa

SEQ ID NO: 335719 - DNA, 12 bp, Artificial Sequence
  Oligonucleotide primer for the detection of SNP TSC0038980
aaactacatcaa

SEQ ID NO: 335720 - DNA, 12 bp, Artificial Sequence
  Oligonucleotide primer for the detection of SNP TSC0038980
agatttgtttgt

SEQ ID NO: 335721 - DNA, 12 bp, Artificial Sequence
  Oligonucleotide primer for the detection of SNP TSC0038980
aaacttatctac

SEQ ID NO: 335722 - DNA, 12 bp, Artificial Sequence
  Oligonucleotide primer for the detection of SNP TSC0038980
aagttgtattag

SEQ ID NO: 335723 - DNA, 12 bp, Artificial Sequence
  Oligonucleotide primer for the detection of SNP TSC0038982
aaataaaatatc

SEQ ID NO: 335724 - DNA, 12 bp, Artificial Sequence
  Oligonucleotide primer for the detection of SNP TSC0038982
taagggaatggg

SEQ ID NO: 335725 - DNA, 12 bp, Artificial Sequence
  Oligonucleotide primer for the detection of SNP TSC0038983
ctatttcccaaa

SEQ ID NO: 335726 - DNA, 12 bp, Artificial Sequence
  Oligonucleotide primer for the detection of SNP TSC0038983
tattataatttt

SEQ ID NO: 335727 - DNA, 12 bp, Artificial Sequence
  Oligonucleotide primer for the detection of SNP TSC0038983
tattataatttc

SEQ ID NO: 335728 - DNA, 12 bp, Artificial Sequence
  Oligonucleotide primer for the detection of SNP TSC0038983
tactattacaat

SEQ ID NO: 335729 - DNA, 12 bp, Artificial Sequence
  Oligonucleotide primer for the detection of SNP TSC0038984
actaactacaat

SEQ ID NO: 335730 - DNA, 12 bp, Artificial Sequence
  Oligonucleotide primer for the detection of SNP TSC0038985
tttgtattatta

SEQ ID NO: 335731 - DNA, 12 bp, Artificial Sequence
  Oligonucleotide primer for the detection of SNP TSC0038985
tctacatcacca

SEQ ID NO: 335732 - DNA, 12 bp, Artificial Sequence
  Oligonucleotide primer for the detection of SNP TSC0038985
agaatattgggg

SEQ ID NO: 335733 - DNA, 12 bp, Artificial Sequence
  Oligonucleotide primer for the detection of SNP TSC0038987
accacttaatct

SEQ ID NO: 335734 - DNA, 12 bp, Artificial Sequence
  Oligonucleotide primer for the detection of SNP TSC0038988
acttaatctacc

SEQ ID NO: 335735 - DNA, 12 bp, Artificial Sequence
  Oligonucleotide primer for the detection of SNP TSC0038988
ggagtaatttta

SEQ ID NO: 335736 - DNA, 12 bp, Artificial Sequence
  Oligonucleotide primer for the detection of SNP TSC0038990
tatcctatcatc

SEQ ID NO: 335737 - DNA, 12 bp, Artificial Sequence
  Oligonucleotide primer for the detection of SNP TSC0038990
atgtaaaattta

SEQ ID NO: 335738 - DNA, 12 bp, Artificial Sequence
  Oligonucleotide primer for the detection of SNP TSC0038991
accccaccccaa

SEQ ID NO: 335739 - DNA, 12 bp, Artificial Sequence
  Oligonucleotide primer for the detection of SNP TSC0038991
tatttgttatat

SEQ ID NO: 335740 - DNA, 12 bp, Artificial Sequence
  Oligonucleotide primer for the detection of SNP TSC0038991
tattcgttatat

SEQ ID NO: 335741 - DNA, 12 bp, Artificial Sequence
  Oligonucleotide primer for the detection of SNP TSC0038991
catccattatac

SEQ ID NO: 335742 - DNA, 12 bp, Artificial Sequence
  Oligonucleotide primer for the detection of SNP TSC0038991
catccgttatac

SEQ ID NO: 335743 - DNA, 12 bp, Artificial Sequence
  Oligonucleotide primer for the detection of SNP TSC0038991
attttattttaa

SEQ ID NO: 335744 - DNA, 12 bp, Artificial Sequence
  Oligonucleotide primer for the detection of SNP TSC0038992
tccattatactt

SEQ ID NO: 335745 - DNA, 12 bp, Artificial Sequence
  Oligonucleotide primer for the detection of SNP TSC0038992
gtgttgtatttg

SEQ ID NO: 335746 - DNA, 12 bp, Artificial Sequence
  Oligonucleotide primer for the detection of SNP TSC0038994
tcatctctttct

SEQ ID NO: 335747 - DNA, 12 bp, Artificial Sequence
  Oligonucleotide primer for the detection of SNP TSC0038994
ttttatttttgg

SEQ ID NO: 335748 - DNA, 12 bp, Artificial Sequence
  Oligonucleotide primer for the detection of SNP TSC0038995
tagaaattataa

SEQ ID NO: 335749 - DNA, 12 bp, Artificial Sequence
  Oligonucleotide primer for the detection of SNP TSC0038996
tcacaataaatt

SEQ ID NO: 335750 - DNA, 12 bp, Artificial Sequence
  Oligonucleotide primer for the detection of SNP TSC0038997
atacttttacaa

SEQ ID NO: 335751 - DNA, 12 bp, Artificial Sequence
  Oligonukleotid-Primer
tataaatatgtt

SEQ ID NO: 335752 - DNA, 12 bp, Artificial Sequence
  Oligonucleotide primer for the detection of SNP TSC0038997
tataaatatgtc

SEQ ID NO: 335753 - DNA, 12 bp, Artificial Sequence
  Oligonucleotide primer for the detection of SNP TSC0038997
tacaaatatacc

SEQ ID NO: 335754 - DNA, 12 bp, Artificial Sequence
  Oligonucleotide primer for the detection of SNP TSC0038997
gtatttttatag

SEQ ID NO: 335755 - DNA, 12 bp, Artificial Sequence
  Oligonucleotide primer for the detection of SNP TSC0038998
ctcatttctctt

SEQ ID NO: 335756 - DNA, 12 bp, Artificial Sequence
  Oligonucleotide primer for the detection of SNP TSC0039001
ttcaactttccc

SEQ ID NO: 335757 - DNA, 12 bp, Artificial Sequence
  Oligonucleotide primer for the detection of SNP TSC0039001
ttttgtttgaag

SEQ ID NO: 335758 - DNA, 12 bp, Artificial Sequence
  Oligonucleotide primer for the detection of SNP TSC0039002
aaacacattatt

SEQ ID NO: 335759 - DNA, 12 bp, Artificial Sequence
  Oligonukleotid-Primer
ttctataaaaat

SEQ ID NO: 335760 - DNA, 12 bp, Artificial Sequence
  Oligonucleotide primer for the detection of SNP TSC0039003
gttttgatttta

SEQ ID NO: 335761 - DNA, 12 bp, Artificial Sequence
  Oligonucleotide primer for the detection of SNP TSC0039004
aaaattttactc

SEQ ID NO: 335762 - DNA, 12 bp, Artificial Sequence
  Oligonucleotide primer for the detection of SNP TSC0039004
taatatagtaat

SEQ ID NO: 335763 - DNA, 12 bp, Artificial Sequence
  Oligonucleotide primer for the detection of SNP TSC0039004
taatacaacaac

SEQ ID NO: 335764 - DNA, 12 bp, Artificial Sequence
  Oligonucleotide primer for the detection of SNP TSC0039004
aaggttttattt

SEQ ID NO: 335765 - DNA, 12 bp, Artificial Sequence
  Oligonucleotide primer for the detection of SNP TSC0039005
attaaactctta

SEQ ID NO: 335766 - DNA, 12 bp, Artificial Sequence
  Oligonucleotide primer for the detection of SNP TSC0039005
tttagaggaaag

SEQ ID NO: 335767 - DNA, 12 bp, Artificial Sequence
  Oligonucleotide primer for the detection of SNP TSC0039006
tataatagaagg

SEQ ID NO: 335768 - DNA, 12 bp, Artificial Sequence
  Oligonucleotide primer for the detection of SNP TSC0039006
ggaaagatgggt

SEQ ID NO: 335769 - DNA, 12 bp, Artificial Sequence
  Oligonucleotide primer for the detection of SNP TSC0039006
ggaaagacgggt

SEQ ID NO: 335770 - DNA, 12 bp, Artificial Sequence
  Oligonucleotide primer for the detection of SNP TSC0039007
tattaatataaa

SEQ ID NO: 335771 - DNA, 12 bp, Artificial Sequence
  Oligonucleotide primer for the detection of SNP TSC0039007
atagaaggttgg

SEQ ID NO: 335772 - DNA, 12 bp, Artificial Sequence
  Oligonucleotide primer for the detection of SNP TSC0039007
atagaaggtcgg

SEQ ID NO: 335773 - DNA, 12 bp, Artificial Sequence
  Oligonucleotide primer for the detection of SNP TSC0039007
acaaaaaaccaa

SEQ ID NO: 335774 - DNA, 12 bp, Artificial Sequence
  Oligonucleotide primer for the detection of SNP TSC0039007
acaaaaaaccga

SEQ ID NO: 335775 - DNA, 12 bp, Artificial Sequence
  Oligonucleotide primer for the detection of SNP TSC0039007
tgttagtgtagg

SEQ ID NO: 335776 - DNA, 12 bp, Artificial Sequence
  Oligonucleotide primer for the detection of SNP TSC0039008
aacataaccaac

SEQ ID NO: 335777 - DNA, 12 bp, Artificial Sequence
  Oligonucleotide primer for the detection of SNP TSC0039008
aacataaccgac

SEQ ID NO: 335778 - DNA, 12 bp, Artificial Sequence
  Oligonucleotide primer for the detection of SNP TSC0039008
aacgtaaccaac

SEQ ID NO: 335779 - DNA, 12 bp, Artificial Sequence
  Oligonucleotide primer for the detection of SNP TSC0039008
aacgtaaccgac

SEQ ID NO: 335780 - DNA, 12 bp, Artificial Sequence
  Oligonucleotide primer for the detection of SNP TSC0039008
taatgtagaggg

SEQ ID NO: 335781 - DNA, 12 bp, Artificial Sequence
  Oligonucleotide primer for the detection of SNP TSC0039008
ggtgtggttggt

SEQ ID NO: 335782 - DNA, 12 bp, Artificial Sequence
  Oligonucleotide primer for the detection of SNP TSC0039008
ggcgtggttggt

SEQ ID NO: 335783 - DNA, 12 bp, Artificial Sequence
  Oligonucleotide primer for the detection of SNP TSC0039008
ggtgtggtcggt

SEQ ID NO: 335784 - DNA, 12 bp, Artificial Sequence
  Oligonucleotide primer for the detection of SNP TSC0039008
ggcgtggtcggt

SEQ ID NO: 335785 - DNA, 12 bp, Artificial Sequence
  Oligonucleotide primer for the detection of SNP TSC0039011
agtgtatgttag

SEQ ID NO: 335786 - DNA, 12 bp, Artificial Sequence
  Oligonucleotide primer for the detection of SNP TSC0039013
cactatacacat

SEQ ID NO: 335787 - DNA, 12 bp, Artificial Sequence
  Oligonucleotide primer for the detection of SNP TSC0039013
ataaacctcctc

SEQ ID NO: 335788 - DNA, 12 bp, Artificial Sequence
  Oligonucleotide primer for the detection of SNP TSC0039014
aatattaccaat

SEQ ID NO: 335789 - DNA, 12 bp, Artificial Sequence
  Oligonucleotide primer for the detection of SNP TSC0039014
tggtgattaaag

SEQ ID NO: 335790 - DNA, 12 bp, Artificial Sequence
  Oligonucleotide primer for the detection of SNP TSC0039014
taataaccaaaa

SEQ ID NO: 335791 - DNA, 12 bp, Artificial Sequence
  Oligonucleotide primer for the detection of SNP TSC0039014
aatgttattagt

SEQ ID NO: 335792 - DNA, 12 bp, Artificial Sequence
  Oligonucleotide primer for the detection of SNP TSC0039015
caattttaatct

SEQ ID NO: 335793 - DNA, 12 bp, Artificial Sequence
  Oligonucleotide primer for the detection of SNP TSC0039015
tgtagagggatg

SEQ ID NO: 335794 - DNA, 12 bp, Artificial Sequence
  Oligonucleotide primer for the detection of SNP TSC0039016
ccaaaaatccct

SEQ ID NO: 335795 - DNA, 12 bp, Artificial Sequence
  Oligonucleotide primer for the detection of SNP TSC0039016
tatatatttggt

SEQ ID NO: 335796 - DNA, 12 bp, Artificial Sequence
  Oligonucleotide primer for the detection of SNP TSC0039016
catatacctaat

SEQ ID NO: 335797 - DNA, 12 bp, Artificial Sequence
  Oligonucleotide primer for the detection of SNP TSC0039016
ttaggggttttt

SEQ ID NO: 335798 - DNA, 12 bp, Artificial Sequence
  Oligonucleotide primer for the detection of SNP TSC0039021
tttaacctttaa

SEQ ID NO: 335799 - DNA, 12 bp, Artificial Sequence
  Oligonucleotide primer for the detection of SNP TSC0039021
ataaagagtatt

SEQ ID NO: 335800 - DNA, 12 bp, Artificial Sequence
  Oligonucleotide primer for the detection of SNP TSC0039021
ataaagagtatc

SEQ ID NO: 335801 - DNA, 12 bp, Artificial Sequence
  Oligonucleotide primer for the detection of SNP TSC0039021
aatttgattttt

SEQ ID NO: 335802 - DNA, 12 bp, Artificial Sequence
  Oligonucleotide primer for the detection of SNP TSC0039022
tacctttatatt

SEQ ID NO: 335803 - DNA, 12 bp, Artificial Sequence
  Oligonucleotide primer for the detection of SNP TSC0039022
gaataagagtta

SEQ ID NO: 335804 - DNA, 12 bp, Artificial Sequence
  Oligonucleotide primer for the detection of SNP TSC0039030
aaaaatcaaaat

SEQ ID NO: 335805 - DNA, 12 bp, Artificial Sequence
  Oligonucleotide primer for the detection of SNP TSC0039030
aaaaatcgaaat

SEQ ID NO: 335806 - DNA, 12 bp, Artificial Sequence
  Oligonucleotide primer for the detection of SNP TSC0039031
cctcattataac

SEQ ID NO: 335807 - DNA, 12 bp, Artificial Sequence
  Oligonucleotide primer for the detection of SNP TSC0039031
tggttttgtgag

SEQ ID NO: 335808 - DNA, 12 bp, Artificial Sequence
  Oligonucleotide primer for the detection of SNP TSC0039033
caaattttatac

SEQ ID NO: 335809 - DNA, 12 bp, Artificial Sequence
  Oligonucleotide primer for the detection of SNP TSC0039033
taatatatattg

SEQ ID NO: 335810 - DNA, 12 bp, Artificial Sequence
  Oligonucleotide primer for the detection of SNP TSC0039034
acacaactaccc

SEQ ID NO: 335811 - DNA, 12 bp, Artificial Sequence
  Oligonucleotide primer for the detection of SNP TSC0039034
tttttaggatgt

SEQ ID NO: 335812 - DNA, 12 bp, Artificial Sequence
  Oligonucleotide primer for the detection of SNP TSC0039038
aatcaaattaac

SEQ ID NO: 335813 - DNA, 12 bp, Artificial Sequence
  Oligonucleotide primer for the detection of SNP TSC0039038
ggttagtattta

SEQ ID NO: 335814 - DNA, 12 bp, Artificial Sequence
  Oligonucleotide primer for the detection of SNP TSC0039039
gattgaaggata

SEQ ID NO: 335815 - DNA, 12 bp, Artificial Sequence
  Oligonucleotide primer for the detection of SNP TSC0039039
ggattaatattt

SEQ ID NO: 335816 - DNA, 12 bp, Artificial Sequence
  Oligonucleotide primer for the detection of SNP TSC0039040
attaaaaataaa

SEQ ID NO: 335817 - DNA, 12 bp, Artificial Sequence
  Oligonucleotide primer for the detection of SNP TSC0039040
gttgggaaaggt

SEQ ID NO: 335818 - DNA, 12 bp, Artificial Sequence
  Oligonucleotide primer for the detection of SNP TSC0039040
ctaaaaaaaaca

SEQ ID NO: 335819 - DNA, 12 bp, Artificial Sequence
  Oligonucleotide primer for the detection of SNP TSC0039040
ttaaggatgggt

SEQ ID NO: 335820 - DNA, 12 bp, Artificial Sequence
  Oligonucleotide primer for the detection of SNP TSC0039041
acatcatcactt

SEQ ID NO: 335821 - DNA, 12 bp, Artificial Sequence
  Oligonucleotide primer for the detection of SNP TSC0039041
ttctattaaaca

SEQ ID NO: 335822 - DNA, 12 bp, Artificial Sequence
  Oligonucleotide primer for the detection of SNP TSC0039042
aatacattaata

SEQ ID NO: 335823 - DNA, 12 bp, Artificial Sequence
  Oligonucleotide primer for the detection of SNP TSC0039042
ttgagttattgg

SEQ ID NO: 335824 - DNA, 12 bp, Artificial Sequence
  Oligonucleotide primer for the detection of SNP TSC0039042
ctaaattactaa

SEQ ID NO: 335825 - DNA, 12 bp, Artificial Sequence
  Oligonucleotide primer for the detection of SNP TSC0039042
attggtattttt

SEQ ID NO: 335826 - DNA, 12 bp, Artificial Sequence
  Oligonucleotide primer for the detection of SNP TSC0039043
aaatcaactaac

SEQ ID NO: 335827 - DNA, 12 bp, Artificial Sequence
  Oligonucleotide primer for the detection of SNP TSC0039043
ccatatctccca

SEQ ID NO: 335828 - DNA, 12 bp, Artificial Sequence
  Oligonucleotide primer for the detection of SNP TSC0039043
gattaattggtt

SEQ ID NO: 335829 - DNA, 12 bp, Artificial Sequence
  Oligonucleotide primer for the detection of SNP TSC0039045
tatattgattta

SEQ ID NO: 335830 - DNA, 12 bp, Artificial Sequence
  Oligonucleotide primer for the detection of SNP TSC0039046
aacaaccaataa

SEQ ID NO: 335831 - DNA, 12 bp, Artificial Sequence
  Oligonucleotide primer for the detection of SNP TSC0039046
tatatgattatt

SEQ ID NO: 335832 - DNA, 12 bp, Artificial Sequence
  Oligonucleotide primer for the detection of SNP TSC0039046
tatatgattatc

SEQ ID NO: 335833 - DNA, 12 bp, Artificial Sequence
  Oligonucleotide primer for the detection of SNP TSC0039046
cacataactatc

SEQ ID NO: 335834 - DNA, 12 bp, Artificial Sequence
  Oligonucleotide primer for the detection of SNP TSC0039046
ggtagttagtag

SEQ ID NO: 335835 - DNA, 12 bp, Artificial Sequence
  Oligonucleotide primer for the detection of SNP TSC0039047
atttagtttttg

SEQ ID NO: 335836 - DNA, 12 bp, Artificial Sequence
  Oligonucleotide primer for the detection of SNP TSC0039048
aatttctccata

SEQ ID NO: 335837 - DNA, 12 bp, Artificial Sequence
  Oligonucleotide primer for the detection of SNP TSC0039048
atcccctcactc

SEQ ID NO: 335838 - DNA, 12 bp, Artificial Sequence
  Oligonucleotide primer for the detection of SNP TSC0039048
atttttttatac

SEQ ID NO: 335839 - DNA, 12 bp, Artificial Sequence
  Oligonucleotide primer for the detection of SNP TSC0039050
gtattgtgtttg

SEQ ID NO: 335840 - DNA, 12 bp, Artificial Sequence
  Oligonucleotide primer for the detection of SNP TSC0039051
aaaaaaatctta

SEQ ID NO: 335841 - DNA, 12 bp, Artificial Sequence
  Oligonucleotide primer for the detection of SNP TSC0039051
ttttttaagtga

SEQ ID NO: 335842 - DNA, 12 bp, Artificial Sequence
  Oligonucleotide primer for the detection of SNP TSC0039051
ttttctaaataa

SEQ ID NO: 335843 - DNA, 12 bp, Artificial Sequence
  Oligonucleotide primer for the detection of SNP TSC0039052
agagttatttat

SEQ ID NO: 335844 - DNA, 12 bp, Artificial Sequence
  Oligonucleotide primer for the detection of SNP TSC0039052
aaactacccaca

SEQ ID NO: 335845 - DNA, 12 bp, Artificial Sequence
  Oligonucleotide primer for the detection of SNP TSC0039052
tttagaaaggtt

SEQ ID NO: 335846 - DNA, 12 bp, Artificial Sequence
  Oligonucleotide primer for the detection of SNP TSC0039055
gttgggattttt

SEQ ID NO: 335847 - DNA, 12 bp, Artificial Sequence
  Oligonucleotide primer for the detection of SNP TSC0039055
attaaaattttt

SEQ ID NO: 335848 - DNA, 12 bp, Artificial Sequence
  Oligonucleotide primer for the detection of SNP TSC0039058
ataactaaaaac

SEQ ID NO: 335849 - DNA, 12 bp, Artificial Sequence
  Oligonucleotide primer for the detection of SNP TSC0039058
ttctaatcccct

SEQ ID NO: 335850 - DNA, 12 bp, Artificial Sequence
  Oligonucleotide primer for the detection of SNP TSC0039058
gtggttggggat

SEQ ID NO: 335851 - DNA, 12 bp, Artificial Sequence
  Oligonucleotide primer for the detection of SNP TSC0039059
tctaacctctct

SEQ ID NO: 335852 - DNA, 12 bp, Artificial Sequence
  Oligonucleotide primer for the detection of SNP TSC0039063
ttcacctcaaat

SEQ ID NO: 335853 - DNA, 12 bp, Artificial Sequence
  Oligonucleotide primer for the detection of SNP TSC0039063
tgttgatttata

SEQ ID NO: 335854 - DNA, 12 bp, Artificial Sequence
  Oligonucleotide primer for the detection of SNP TSC0039064
tatttttggata

SEQ ID NO: 335855 - DNA, 12 bp, Artificial Sequence
  Oligonucleotide primer for the detection of SNP TSC0039064
tatctttaaaca

SEQ ID NO: 335856 - DNA, 12 bp, Artificial Sequence
  Oligonucleotide primer for the detection of SNP TSC0039064
aaattttaattt

SEQ ID NO: 335857 - DNA, 12 bp, Artificial Sequence
  Oligonucleotide primer for the detection of SNP TSC0039065
aatcaattatcc

SEQ ID NO: 335858 - DNA, 12 bp, Artificial Sequence
  Oligonucleotide primer for the detection of SNP TSC0039065
gggaatttatta

SEQ ID NO: 335859 - DNA, 12 bp, Artificial Sequence
  Oligonucleotide primer for the detection of SNP TSC0039067
gtttttaggtga

SEQ ID NO: 335860 - DNA, 12 bp, Artificial Sequence
  Oligonucleotide primer for the detection of SNP TSC0039070
tataatttacct

SEQ ID NO: 335861 - DNA, 12 bp, Artificial Sequence
  Oligonucleotide primer for the detection of SNP TSC0039070
ttaaagtagaaa

SEQ ID NO: 335862 - DNA, 12 bp, Artificial Sequence
  Oligonucleotide primer for the detection of SNP TSC0039074
aaatcctcctct

SEQ ID NO: 335863 - DNA, 12 bp, Artificial Sequence
  Oligonucleotide primer for the detection of SNP TSC0039074
tagattaatgta

SEQ ID NO: 335864 - DNA, 12 bp, Artificial Sequence
  Oligonucleotide primer for the detection of SNP TSC0039079
atctcccaccaa

SEQ ID NO: 335865 - DNA, 12 bp, Artificial Sequence
  Oligonucleotide primer for the detection of SNP TSC0039079
tttaattgttgt

SEQ ID NO: 335866 - DNA, 12 bp, Artificial Sequence
  Oligonucleotide primer for the detection of SNP TSC0039079
cccaattattat

SEQ ID NO: 335867 - DNA, 12 bp, Artificial Sequence
  Oligonucleotide primer for the detection of SNP TSC0039082
tctctcactatc

SEQ ID NO: 335868 - DNA, 12 bp, Artificial Sequence
  Oligonucleotide primer for the detection of SNP TSC0039083
ttaaagttttaa

SEQ ID NO: 335869 - DNA, 12 bp, Artificial Sequence
  Oligonucleotide primer for the detection of SNP TSC0039083
ccaaaatcttaa

SEQ ID NO: 335870 - DNA, 12 bp, Artificial Sequence
  Oligonucleotide primer for the detection of SNP TSC0039083
aatgttgaaatg

SEQ ID NO: 335871 - DNA, 12 bp, Artificial Sequence
  Oligonucleotide primer for the detection of SNP TSC0039085
caataaaatttt

SEQ ID NO: 335872 - DNA, 12 bp, Artificial Sequence
  Oligonucleotide primer for the detection of SNP TSC0039085
gttaataaaaga

SEQ ID NO: 335873 - DNA, 12 bp, Artificial Sequence
  Oligonucleotide primer for the detection of SNP TSC0039087
ctacattttact

SEQ ID NO: 335874 - DNA, 12 bp, Artificial Sequence
  Oligonucleotide primer for the detection of SNP TSC0039087
aagttttataga

SEQ ID NO: 335875 - DNA, 12 bp, Artificial Sequence
  Oligonucleotide primer for the detection of SNP TSC0039090
gggaatatgtta

SEQ ID NO: 335876 - DNA, 12 bp, Artificial Sequence
  Oligonucleotide primer for the detection of SNP TSC0039090
gaggaatgatat

SEQ ID NO: 335877 - DNA, 12 bp, Artificial Sequence
  Oligonucleotide primer for the detection of SNP TSC0039091
ttaaacactatt

SEQ ID NO: 335878 - DNA, 12 bp, Artificial Sequence
  Oligonucleotide primer for the detection of SNP TSC0039091
atgaagtaatta

SEQ ID NO: 335879 - DNA, 12 bp, Artificial Sequence
  Oligonucleotide primer for the detection of SNP TSC0039092
acctaactccta

SEQ ID NO: 335880 - DNA, 12 bp, Artificial Sequence
  Oligonucleotide primer for the detection of SNP TSC0039092
gtttatagagat

SEQ ID NO: 335881 - DNA, 12 bp, Artificial Sequence
  Oligonucleotide primer for the detection of SNP TSC0039092
ttgatttttatt

SEQ ID NO: 335882 - DNA, 12 bp, Artificial Sequence
  Oligonucleotide primer for the detection of SNP TSC0039093
tattgatttatg

SEQ ID NO: 335883 - DNA, 12 bp, Artificial Sequence
  Oligonucleotide primer for the detection of SNP TSC0039093
cattaatttata

SEQ ID NO: 335884 - DNA, 12 bp, Artificial Sequence
  Oligonucleotide primer for the detection of SNP TSC0039093
gatagattaagt

SEQ ID NO: 335885 - DNA, 12 bp, Artificial Sequence
  Oligonucleotide primer for the detection of SNP TSC0039094
ctaaatcttact

SEQ ID NO: 335886 - DNA, 12 bp, Artificial Sequence
  Oligonucleotide primer for the detection of SNP TSC0039094
tattgtataata

SEQ ID NO: 335887 - DNA, 12 bp, Artificial Sequence
  Oligonucleotide primer for the detection of SNP TSC0039095
attatattggat

SEQ ID NO: 335888 - DNA, 12 bp, Artificial Sequence
  Oligonucleotide primer for the detection of SNP TSC0039095
accatattaaac

SEQ ID NO: 335889 - DNA, 12 bp, Artificial Sequence
  Oligonucleotide primer for the detection of SNP TSC0039095
gagggattgaga

SEQ ID NO: 335890 - DNA, 12 bp, Artificial Sequence
  Oligonucleotide primer for the detection of SNP TSC0039095
gagggatcgaga

SEQ ID NO: 335891 - DNA, 12 bp, Artificial Sequence
  Oligonucleotide primer for the detection of SNP TSC0039096
ggtgaaaaggga

SEQ ID NO: 335892 - DNA, 12 bp, Artificial Sequence
  Oligonucleotide primer for the detection of SNP TSC0039100
ataattttatct

SEQ ID NO: 335893 - DNA, 12 bp, Artificial Sequence
  Oligonucleotide primer for the detection of SNP TSC0039100
gaaaatataaat

SEQ ID NO: 335894 - DNA, 12 bp, Artificial Sequence
  Oligonucleotide primer for the detection of SNP TSC0039100
atgattttattt

SEQ ID NO: 335895 - DNA, 12 bp, Artificial Sequence
  Oligonucleotide primer for the detection of SNP TSC0039103
ttcaacataaaa

SEQ ID NO: 335896 - DNA, 12 bp, Artificial Sequence
  Oligonucleotide primer for the detection of SNP TSC0039103
ttcaacgtaaaa

SEQ ID NO: 335897 - DNA, 12 bp, Artificial Sequence
  Oligonucleotide primer for the detection of SNP TSC0039103
ttttatcctctc

SEQ ID NO: 335898 - DNA, 12 bp, Artificial Sequence
  Oligonucleotide primer for the detection of SNP TSC0039103
tttaatgtgaga

SEQ ID NO: 335899 - DNA, 12 bp, Artificial Sequence
  Oligonucleotide primer for the detection of SNP TSC0039103
tttaacgtgaga

SEQ ID NO: 335900 - DNA, 12 bp, Artificial Sequence
  Oligonucleotide primer for the detection of SNP TSC0009835
ccctcaacaaaa

SEQ ID NO: 335901 - DNA, 12 bp, Artificial Sequence
  Oligonucleotide primer for the detection of SNP TSC0009835
tttttttggagg

SEQ ID NO: 335902 - DNA, 12 bp, Artificial Sequence
  Oligonucleotide primer for the detection of SNP TSC0009835
tttagtagaatt

SEQ ID NO: 335903 - DNA, 12 bp, Artificial Sequence
  Oligonucleotide primer for the detection of SNP TSC0039105
tcccctaaacca

SEQ ID NO: 335904 - DNA, 12 bp, Artificial Sequence
  Oligonucleotide primer for the detection of SNP TSC0039105
atttaataaccc

SEQ ID NO: 335905 - DNA, 12 bp, Artificial Sequence
  Oligonucleotide primer for the detection of SNP TSC0039106
accccttcccct

SEQ ID NO: 335906 - DNA, 12 bp, Artificial Sequence
  Oligonucleotide primer for the detection of SNP TSC0039106
ggaaaatgaaaa

SEQ ID NO: 335907 - DNA, 12 bp, Artificial Sequence
  Oligonucleotide primer for the detection of SNP TSC0039108
cgaaaaaaacaa

SEQ ID NO: 335908 - DNA, 12 bp, Artificial Sequence
  Oligonucleotide primer for the detection of SNP TSC0039108
tatgtgagtaat

SEQ ID NO: 335909 - DNA, 12 bp, Artificial Sequence
  Oligonucleotide primer for the detection of SNP TSC0039108
tatataaataac

SEQ ID NO: 335910 - DNA, 12 bp, Artificial Sequence
  Oligonucleotide primer for the detection of SNP TSC0039108
gagagaaatagt

SEQ ID NO: 335911 - DNA, 12 bp, Artificial Sequence
  Oligonucleotide primer for the detection of SNP TSC0039108
gagagaaatagc

SEQ ID NO: 335912 - DNA, 12 bp, Artificial Sequence
  Oligonucleotide primer for the detection of SNP TSC0039109
taaaacacttaa

SEQ ID NO: 335913 - DNA, 12 bp, Artificial Sequence
  Oligonucleotide primer for the detection of SNP TSC0039109
caaatattcttt

SEQ ID NO: 335914 - DNA, 12 bp, Artificial Sequence
  Oligonucleotide primer for the detection of SNP TSC0008278
aaatacaattac

SEQ ID NO: 335915 - DNA, 12 bp, Artificial Sequence
  Oligonucleotide primer for the detection of SNP TSC0008278
aaatacgattac

SEQ ID NO: 335916 - DNA, 12 bp, Artificial Sequence
  Oligonukleotid-Primer
gaatagtatgaa

SEQ ID NO: 335917 - DNA, 12 bp, Artificial Sequence
  Oligonucleotide primer for the detection of SNP TSC0039111
aaatttaacaat

SEQ ID NO: 335918 - DNA, 12 bp, Artificial Sequence
  Oligonucleotide primer for the detection of SNP TSC0039111
aatgaagaaaga

SEQ ID NO: 335919 - DNA, 12 bp, Artificial Sequence
  Oligonucleotide primer for the detection of SNP TSC0039111
aaatttagtagt

SEQ ID NO: 335920 - DNA, 12 bp, Artificial Sequence
  Oligonukleotid-Primer
aacaactttttt

SEQ ID NO: 335921 - DNA, 12 bp, Artificial Sequence
  Oligonucleotide primer for the detection of SNP TSC0039112
aacgactttttt

SEQ ID NO: 335922 - DNA, 12 bp, Artificial Sequence
  Oligonucleotide primer for the detection of SNP TSC0039112
gtgttagaggga

SEQ ID NO: 335923 - DNA, 12 bp, Artificial Sequence
  Oligonucleotide primer for the detection of SNP TSC0039114
tccataaaacac

SEQ ID NO: 335924 - DNA, 12 bp, Artificial Sequence
  Oligonucleotide primer for the detection of SNP TSC0039114
ccaaccccacta

SEQ ID NO: 335925 - DNA, 12 bp, Artificial Sequence
  Oligonucleotide primer for the detection of SNP TSC0039114
tttatggagtat

SEQ ID NO: 335926 - DNA, 12 bp, Artificial Sequence
  Oligonucleotide primer for the detection of SNP TSC0039114
tttatggagtac

SEQ ID NO: 335927 - DNA, 12 bp, Artificial Sequence
  Oligonucleotide primer for the detection of SNP TSC0039115
ataaatacaaat

SEQ ID NO: 335928 - DNA, 12 bp, Artificial Sequence
  Oligonucleotide primer for the detection of SNP TSC0039115
taggtgagtgaa

SEQ ID NO: 335929 - DNA, 12 bp, Artificial Sequence
  Oligonucleotide primer for the detection of SNP TSC0039115
taggtgagcgaa

SEQ ID NO: 335930 - DNA, 12 bp, Artificial Sequence
  Oligonucleotide primer for the detection of SNP TSC0039119
atatgtttgtat

SEQ ID NO: 335931 - DNA, 12 bp, Artificial Sequence
  Oligonucleotide primer for the detection of SNP TSC0039119
acatacctacac

SEQ ID NO: 335932 - DNA, 12 bp, Artificial Sequence
  Oligonucleotide primer for the detection of SNP TSC0039119
tgtgtaggtgtg

SEQ ID NO: 335933 - DNA, 12 bp, Artificial Sequence
  Oligonucleotide primer for the detection of SNP TSC0039120
caattaactaac

SEQ ID NO: 335934 - DNA, 12 bp, Artificial Sequence
  Oligonucleotide primer for the detection of SNP TSC0039120
aggaataggttg

SEQ ID NO: 335935 - DNA, 12 bp, Artificial Sequence
  Oligonucleotide primer for the detection of SNP TSC0039120
tagttaattaat

SEQ ID NO: 335936 - DNA, 12 bp, Artificial Sequence
  Oligonucleotide primer for the detection of SNP TSC0039121
gtggatatatta

SEQ ID NO: 335937 - DNA, 12 bp, Artificial Sequence
  Oligonucleotide primer for the detection of SNP TSC0039121
gtaggtggtaga

SEQ ID NO: 335938 - DNA, 12 bp, Artificial Sequence
  Oligonucleotide primer for the detection of SNP TSC0039122
gggtagtatttt

SEQ ID NO: 335939 - DNA, 12 bp, Artificial Sequence
  Oligonucleotide primer for the detection of SNP TSC0039123
cttatcttttca

SEQ ID NO: 335940 - DNA, 12 bp, Artificial Sequence
  Oligonucleotide primer for the detection of SNP TSC0039123
tatggtggtaat

SEQ ID NO: 335941 - DNA, 12 bp, Artificial Sequence
  Oligonucleotide primer for the detection of SNP TSC0007554
aattcctcccat

SEQ ID NO: 335942 - DNA, 12 bp, Artificial Sequence
  Oligonucleotide primer for the detection of SNP TSC0007554
ataatttttgta

SEQ ID NO: 335943 - DNA, 12 bp, Artificial Sequence
  Oligonucleotide primer for the detection of SNP TSC0007554
ataattttcgta

SEQ ID NO: 335944 - DNA, 12 bp, Artificial Sequence
  Oligonucleotide primer for the detection of SNP TSC0009515
aattccaaaata

SEQ ID NO: 335945 - DNA, 12 bp, Artificial Sequence
  Oligonucleotide primer for the detection of SNP TSC0009515
aaaactaataaa

SEQ ID NO: 335946 - DNA, 12 bp, Artificial Sequence
  Oligonucleotide primer for the detection of SNP TSC0009515
attttagaatat

SEQ ID NO: 335947 - DNA, 12 bp, Artificial Sequence
  Oligonucleotide primer for the detection of SNP TSC0039126
gagatttaggga

SEQ ID NO: 335948 - DNA, 12 bp, Artificial Sequence
  Oligonucleotide primer for the detection of SNP TSC0039126
tgaaaggagttt

SEQ ID NO: 335949 - DNA, 12 bp, Artificial Sequence
  Oligonucleotide primer for the detection of SNP TSC0039127
cttcccaaaata

SEQ ID NO: 335950 - DNA, 12 bp, Artificial Sequence
  Oligonucleotide primer for the detection of SNP TSC0039127
atgtttgtaatt

SEQ ID NO: 335951 - DNA, 12 bp, Artificial Sequence
  Oligonucleotide primer for the detection of SNP TSC0039128
accatacataaa

SEQ ID NO: 335952 - DNA, 12 bp, Artificial Sequence
  Oligonucleotide primer for the detection of SNP TSC0039128
tttttaagtttt

SEQ ID NO: 335953 - DNA, 12 bp, Artificial Sequence
  Oligonucleotide primer for the detection of SNP TSC0039128
cttccaaatcct

SEQ ID NO: 335954 - DNA, 12 bp, Artificial Sequence
  Oligonucleotide primer for the detection of SNP TSC0039129
aaatataaatct

SEQ ID NO: 335955 - DNA, 12 bp, Artificial Sequence
  Oligonucleotide primer for the detection of SNP TSC0039129
gtttaatattta

SEQ ID NO: 335956 - DNA, 12 bp, Artificial Sequence
  Oligonucleotide primer for the detection of SNP TSC0039130
attttctaccat

SEQ ID NO: 335957 - DNA, 12 bp, Artificial Sequence
  Oligonucleotide primer for the detection of SNP TSC0039130
atgtagaaaaat

SEQ ID NO: 335958 - DNA, 12 bp, Artificial Sequence
  Oligonucleotide primer for the detection of SNP TSC0039131
cctaaaatttct

SEQ ID NO: 335959 - DNA, 12 bp, Artificial Sequence
  Oligonucleotide primer for the detection of SNP TSC0039131
gttttatttaaa

SEQ ID NO: 335960 - DNA, 12 bp, Artificial Sequence
  Oligonucleotide primer for the detection of SNP TSC0039132
aaatttatttag

SEQ ID NO: 335961 - DNA, 12 bp, Artificial Sequence
  Oligonucleotide primer for the detection of SNP TSC0039133
aaattatcaaat

SEQ ID NO: 335962 - DNA, 12 bp, Artificial Sequence
  Oligonucleotide primer for the detection of SNP TSC0039135
gatttgtgttta

SEQ ID NO: 335963 - DNA, 12 bp, Artificial Sequence
  Oligonucleotide primer for the detection of SNP TSC0039136
aattcccaaatt

SEQ ID NO: 335964 - DNA, 12 bp, Artificial Sequence
  Oligonucleotide primer for the detection of SNP TSC0039137
ttctactttttt

SEQ ID NO: 335965 - DNA, 12 bp, Artificial Sequence
  Oligonucleotide primer for the detection of SNP TSC0039138
cttaaattaaaa

SEQ ID NO: 335966 - DNA, 12 bp, Artificial Sequence
  Oligonucleotide primer for the detection of SNP TSC0039138
taagatgttagt

SEQ ID NO: 335967 - DNA, 12 bp, Artificial Sequence
  Oligonucleotide primer for the detection of SNP TSC0039138
tttggattaggg

SEQ ID NO: 335968 - DNA, 12 bp, Artificial Sequence
  Oligonucleotide primer for the detection of SNP TSC0039139
tgtttttagtag

SEQ ID NO: 335969 - DNA, 12 bp, Artificial Sequence
  Oligonucleotide primer for the detection of SNP TSC0039140
cattacttctac

SEQ ID NO: 335970 - DNA, 12 bp, Artificial Sequence
  Oligonucleotide primer for the detection of SNP TSC0039140
atgatattttta

SEQ ID NO: 335971 - DNA, 12 bp, Artificial Sequence
  Oligonucleotide primer for the detection of SNP TSC0039140
acgatattttta

SEQ ID NO: 335972 - DNA, 12 bp, Artificial Sequence
  Oligonucleotide primer for the detection of SNP TSC0006464
atataactcttc

SEQ ID NO: 335973 - DNA, 12 bp, Artificial Sequence
  Oligonucleotide primer for the detection of SNP TSC0006464
tttatttaaggg

SEQ ID NO: 335974 - DNA, 12 bp, Artificial Sequence
  Oligonucleotide primer for the detection of SNP TSC0039142
aattttctcttt

SEQ ID NO: 335975 - DNA, 12 bp, Artificial Sequence
  Oligonucleotide primer for the detection of SNP TSC0039142
aagtatatttaa

SEQ ID NO: 335976 - DNA, 12 bp, Artificial Sequence
  Oligonucleotide primer for the detection of SNP TSC0039143
gatggtttttaa

SEQ ID NO: 335977 - DNA, 12 bp, Artificial Sequence
  Oligonucleotide primer for the detection of SNP TSC0039144
cctcttacttat

SEQ ID NO: 335978 - DNA, 12 bp, Artificial Sequence
  Oligonucleotide primer for the detection of SNP TSC0039145
tttctttttata

SEQ ID NO: 335979 - DNA, 12 bp, Artificial Sequence
  Oligonucleotide primer for the detection of SNP TSC0039145
tagggaatgaat

SEQ ID NO: 335980 - DNA, 12 bp, Artificial Sequence
  Oligonukleotid-Primer
cactaatctctt

SEQ ID NO: 335981 - DNA, 12 bp, Artificial Sequence
  Oligonucleotide primer for the detection of SNP TSC0039146
cgctaatctctt

SEQ ID NO: 335982 - DNA, 12 bp, Artificial Sequence
  Oligonucleotide primer for the detection of SNP TSC0039146
tttaaaaaggtt

SEQ ID NO: 335983 - DNA, 12 bp, Artificial Sequence
  Oligonucleotide primer for the detection of SNP TSC0039146
tccaaaaaaatt

SEQ ID NO: 335984 - DNA, 12 bp, Artificial Sequence
  Oligonucleotide primer for the detection of SNP TSC0039146
gttgattttttt

SEQ ID NO: 335985 - DNA, 12 bp, Artificial Sequence
  Oligonucleotide primer for the detection of SNP TSC0039147
acaacaccaata

SEQ ID NO: 335986 - DNA, 12 bp, Artificial Sequence
  Oligonucleotide primer for the detection of SNP TSC0039147
gaaggaaaattt

SEQ ID NO: 335987 - DNA, 12 bp, Artificial Sequence
  Oligonucleotide primer for the detection of SNP TSC0039147
gtagtattagtg

SEQ ID NO: 335988 - DNA, 12 bp, Artificial Sequence
  Oligonucleotide primer for the detection of SNP TSC0039151
aatataccatca

SEQ ID NO: 335989 - DNA, 12 bp, Artificial Sequence
  Oligonucleotide primer for the detection of SNP TSC0039151
tttataaagtat

SEQ ID NO: 335990 - DNA, 12 bp, Artificial Sequence
  Oligonucleotide primer for the detection of SNP TSC0039151
ttttacaaaata

SEQ ID NO: 335991 - DNA, 12 bp, Artificial Sequence
  Oligonucleotide primer for the detection of SNP TSC0039151
aaatatattatt

SEQ ID NO: 335992 - DNA, 12 bp, Artificial Sequence
  Oligonucleotide primer for the detection of SNP TSC0039152
tatattcacaac

SEQ ID NO: 335993 - DNA, 12 bp, Artificial Sequence
  Oligonucleotide primer for the detection of SNP TSC0039152
taatgtttaaaa

SEQ ID NO: 335994 - DNA, 12 bp, Artificial Sequence
  Oligonucleotide primer for the detection of SNP TSC0039152
taacgtttaaaa

SEQ ID NO: 335995 - DNA, 12 bp, Artificial Sequence
  Oligonucleotide primer for the detection of SNP TSC0039153
tagatttaaggt

SEQ ID NO: 335996 - DNA, 12 bp, Artificial Sequence
  Oligonucleotide primer for the detection of SNP TSC0039153
tgagttattacg

SEQ ID NO: 335997 - DNA, 12 bp, Artificial Sequence
  Oligonucleotide primer for the detection of SNP TSC0039154
aatcttactttt

SEQ ID NO: 335998 - DNA, 12 bp, Artificial Sequence
  Oligonucleotide primer for the detection of SNP TSC0039155
cacaaccataca

SEQ ID NO: 335999 - DNA, 12 bp, Artificial Sequence
  Oligonucleotide primer for the detection of SNP TSC0039155
cacaaccatacg

SEQ ID NO: 336000 - DNA, 12 bp, Artificial Sequence
  Oligonucleotide primer for the detection of SNP TSC0039155
cacgaccataca

SEQ ID NO: 336001 - DNA, 12 bp, Artificial Sequence
  Oligonucleotide primer for the detection of SNP TSC0039155
cacgaccatacg

SEQ ID NO: 336002 - DNA, 12 bp, Artificial Sequence
  Oligonucleotide primer for the detection of SNP TSC0039155
acaaaaatcacc

SEQ ID NO: 336003 - DNA, 12 bp, Artificial Sequence
  Oligonucleotide primer for the detection of SNP TSC0039155
tatgattatatg

SEQ ID NO: 336004 - DNA, 12 bp, Artificial Sequence
  Oligonucleotide primer for the detection of SNP TSC0039155
tacgattatatg

SEQ ID NO: 336005 - DNA, 12 bp, Artificial Sequence
  Oligonucleotide primer for the detection of SNP TSC0039155
tatgattatacg

SEQ ID NO: 336006 - DNA, 12 bp, Artificial Sequence
  Oligonucleotide primer for the detection of SNP TSC0039155
tacgattatacg

SEQ ID NO: 336007 - DNA, 12 bp, Artificial Sequence
  Oligonucleotide primer for the detection of SNP TSC0039156
aaattatacaat

SEQ ID NO: 336008 - DNA, 12 bp, Artificial Sequence
  Oligonucleotide primer for the detection of SNP TSC0039156
tgtggttttaat

SEQ ID NO: 336009 - DNA, 12 bp, Artificial Sequence
  Oligonucleotide primer for the detection of SNP TSC0039156
ctataatcttaa

SEQ ID NO: 336010 - DNA, 12 bp, Artificial Sequence
  Oligonucleotide primer for the detection of SNP TSC0039156
ggattatgtagt

SEQ ID NO: 336011 - DNA, 12 bp, Artificial Sequence
  Oligonucleotide primer for the detection of SNP TSC0039157
aaaatacgaaac

SEQ ID NO: 336012 - DNA, 12 bp, Artificial Sequence
  Oligonucleotide primer for the detection of SNP TSC0039157
aagatattatga

SEQ ID NO: 336013 - DNA, 12 bp, Artificial Sequence
  Oligonucleotide primer for the detection of SNP TSC0039158
actaaaaaatac

SEQ ID NO: 336014 - DNA, 12 bp, Artificial Sequence
  Oligonucleotide primer for the detection of SNP TSC0039158
ttatgagtgttt

SEQ ID NO: 336015 - DNA, 12 bp, Artificial Sequence
  Oligonucleotide primer for the detection of SNP TSC0039158
accataaatacc

SEQ ID NO: 336016 - DNA, 12 bp, Artificial Sequence
  Oligonucleotide primer for the detection of SNP TSC0039158
gttgaaaaatgt

SEQ ID NO: 336017 - DNA, 12 bp, Artificial Sequence
  Oligonucleotide primer for the detection of SNP TSC0039158
gttgaaaaatgc

SEQ ID NO: 336018 - DNA, 12 bp, Artificial Sequence
  Oligonucleotide primer for the detection of SNP TSC0004553
aacaaattttac

SEQ ID NO: 336019 - DNA, 12 bp, Artificial Sequence
  Oligonucleotide primer for the detection of SNP TSC0004553
attagtaattga

SEQ ID NO: 336020 - DNA, 12 bp, Artificial Sequence
  Oligonucleotide primer for the detection of SNP TSC0004553
accaacaactaa

SEQ ID NO: 336021 - DNA, 12 bp, Artificial Sequence
  Oligonucleotide primer for the detection of SNP TSC0004553
aataagttttat

SEQ ID NO: 336022 - DNA, 12 bp, Artificial Sequence
  Oligonucleotide primer for the detection of SNP TSC0039160
ttttattatgat

SEQ ID NO: 336023 - DNA, 12 bp, Artificial Sequence
  Oligonucleotide primer for the detection of SNP TSC0039161
tcttaataaatt

SEQ ID NO: 336024 - DNA, 12 bp, Artificial Sequence
  Oligonucleotide primer for the detection of SNP TSC0039161
atttatgattaa

SEQ ID NO: 336025 - DNA, 12 bp, Artificial Sequence
  Oligonucleotide primer for the detection of SNP TSC0039162
ataaacctcaac

SEQ ID NO: 336026 - DNA, 12 bp, Artificial Sequence
  Oligonucleotide primer for the detection of SNP TSC0039162
ttattgtgttta

SEQ ID NO: 336027 - DNA, 12 bp, Artificial Sequence
  Oligonucleotide primer for the detection of SNP TSC0039169
accttaatttta

SEQ ID NO: 336028 - DNA, 12 bp, Artificial Sequence
  Oligonucleotide primer for the detection of SNP TSC0039169
gatgttggaaga

SEQ ID NO: 336029 - DNA, 12 bp, Artificial Sequence
  Oligonucleotide primer for the detection of SNP TSC0039170
ttttgattttgt

SEQ ID NO: 336030 - DNA, 12 bp, Artificial Sequence
  Oligonucleotide primer for the detection of SNP TSC0039170
ccttaattttat

SEQ ID NO: 336031 - DNA, 12 bp, Artificial Sequence
  Oligonucleotide primer for the detection of SNP TSC0039170
tggatgttggaa

SEQ ID NO: 336032 - DNA, 12 bp, Artificial Sequence
  Oligonucleotide primer for the detection of SNP TSC0039172
aaactatccaat

SEQ ID NO: 336033 - DNA, 12 bp, Artificial Sequence
  Oligonucleotide primer for the detection of SNP TSC0039172
atagttatttga

SEQ ID NO: 336034 - DNA, 12 bp, Artificial Sequence
  Oligonucleotide primer for the detection of SNP TSC0039173
ttacaccttcta

SEQ ID NO: 336035 - DNA, 12 bp, Artificial Sequence
  Oligonucleotide primer for the detection of SNP TSC0039173
aaatttattatt

SEQ ID NO: 336036 - DNA, 12 bp, Artificial Sequence
  Oligonucleotide primer for the detection of SNP TSC0039173
aaacttactatc

SEQ ID NO: 336037 - DNA, 12 bp, Artificial Sequence
  Oligonucleotide primer for the detection of SNP TSC0039174
tatataacacct

SEQ ID NO: 336038 - DNA, 12 bp, Artificial Sequence
  Oligonucleotide primer for the detection of SNP TSC0039174
agagtaagtaga

SEQ ID NO: 336039 - DNA, 12 bp, Artificial Sequence
  Oligonucleotide primer for the detection of SNP TSC0039178
tattacacaata

SEQ ID NO: 336040 - DNA, 12 bp, Artificial Sequence
  Oligonucleotide primer for the detection of SNP TSC0039178
gtggtaggtttt

SEQ ID NO: 336041 - DNA, 12 bp, Artificial Sequence
  Oligonucleotide primer for the detection of SNP TSC0039178
taacaaattcta

SEQ ID NO: 336042 - DNA, 12 bp, Artificial Sequence
  Oligonucleotide primer for the detection of SNP TSC0039178
gttatataatac

SEQ ID NO: 336043 - DNA, 12 bp, Artificial Sequence
  Oligonucleotide primer for the detection of SNP TSC0039179
cacaatcctttc

SEQ ID NO: 336044 - DNA, 12 bp, Artificial Sequence
  Oligonucleotide primer for the detection of SNP TSC0039179
gttgtattttgt

SEQ ID NO: 336045 - DNA, 12 bp, Artificial Sequence
  Oligonucleotide primer for the detection of SNP TSC0039179
tactacatttta

SEQ ID NO: 336046 - DNA, 12 bp, Artificial Sequence
  Oligonucleotide primer for the detection of SNP TSC0039179
tataattttttc

SEQ ID NO: 336047 - DNA, 12 bp, Artificial Sequence
  Oligonucleotide primer for the detection of SNP TSC0039180
ccatctttactt

SEQ ID NO: 336048 - DNA, 12 bp, Artificial Sequence
  Oligonucleotide primer for the detection of SNP TSC0039180
tgtttgtaaatg

SEQ ID NO: 336049 - DNA, 12 bp, Artificial Sequence
  Oligonucleotide primer for the detection of SNP TSC0006399
ttcttctaaaac

SEQ ID NO: 336050 - DNA, 12 bp, Artificial Sequence
  Oligonucleotide primer for the detection of SNP TSC0006399
ttattttctctc

SEQ ID NO: 336051 - DNA, 12 bp, Artificial Sequence
  Oligonucleotide primer for the detection of SNP TSC0006399
tttttttgaaac

SEQ ID NO: 336052 - DNA, 12 bp, Artificial Sequence
  Oligonucleotide primer for the detection of SNP TSC0039182
ataataaaataa

SEQ ID NO: 336053 - DNA, 12 bp, Artificial Sequence
  Oligonucleotide primer for the detection of SNP TSC0039182
agaaattttgtt

SEQ ID NO: 336054 - DNA, 12 bp, Artificial Sequence
  Oligonucleotide primer for the detection of SNP TSC0039182
aaaaatcctact

SEQ ID NO: 336055 - DNA, 12 bp, Artificial Sequence
  Oligonucleotide primer for the detection of SNP TSC0039182
atagtgggatga

SEQ ID NO: 336056 - DNA, 12 bp, Artificial Sequence
  Oligonucleotide primer for the detection of SNP TSC0039184
gcccaaaaaaat

SEQ ID NO: 336057 - DNA, 12 bp, Artificial Sequence
  Oligonucleotide primer for the detection of SNP TSC0039184
gtatgagattta

SEQ ID NO: 336058 - DNA, 12 bp, Artificial Sequence
  Oligonucleotide primer for the detection of SNP TSC0000100
tacaaatattat

SEQ ID NO: 336059 - DNA, 12 bp, Artificial Sequence
  Oligonucleotide primer for the detection of SNP TSC0000100
attaaaagttta

SEQ ID NO: 336060 - DNA, 12 bp, Artificial Sequence
  Oligonucleotide primer for the detection of SNP TSC0000101
taactaccttac

SEQ ID NO: 336061 - DNA, 12 bp, Artificial Sequence
  Oligonucleotide primer for the detection of SNP TSC0000101
atgttaattatg

SEQ ID NO: 336062 - DNA, 12 bp, Artificial Sequence
  Oligonucleotide primer for the detection of SNP TSC0000880
aaaaactctaat

SEQ ID NO: 336063 - DNA, 12 bp, Artificial Sequence
  Oligonucleotide primer for the detection of SNP TSC0000880
ttattaagttaa

SEQ ID NO: 336064 - DNA, 12 bp, Artificial Sequence
  Oligonucleotide primer for the detection of SNP TSC0039186
acactcctacct

SEQ ID NO: 336065 - DNA, 12 bp, Artificial Sequence
  Oligonucleotide primer for the detection of SNP TSC0039186
tttgttagggta

SEQ ID NO: 336066 - DNA, 12 bp, Artificial Sequence
  Oligonucleotide primer for the detection of SNP TSC0039186
ttcgttagggta

SEQ ID NO: 336067 - DNA, 12 bp, Artificial Sequence
  Oligonucleotide primer for the detection of SNP TSC0039187
gtgtgtaggttg

SEQ ID NO: 336068 - DNA, 12 bp, Artificial Sequence
  Oligonucleotide primer for the detection of SNP TSC0039187
aggagaggagga

SEQ ID NO: 336069 - DNA, 12 bp, Artificial Sequence
  Oligonucleotide primer for the detection of SNP TSC0039188
aattacctctat

SEQ ID NO: 336070 - DNA, 12 bp, Artificial Sequence
  Oligonucleotide primer for the detection of SNP TSC0039188
ccatcaacttca

SEQ ID NO: 336071 - DNA, 12 bp, Artificial Sequence
  Oligonucleotide primer for the detection of SNP TSC0039188
ggttgtttttgt

SEQ ID NO: 336072 - DNA, 12 bp, Artificial Sequence
  Oligonucleotide primer for the detection of SNP TSC0000409
tgtatggttagg

SEQ ID NO: 336073 - DNA, 12 bp, Artificial Sequence
  Oligonucleotide primer for the detection of SNP TSC0039190
taactattaata

SEQ ID NO: 336074 - DNA, 12 bp, Artificial Sequence
  Oligonucleotide primer for the detection of SNP TSC0039190
tataaagaatat

SEQ ID NO: 336075 - DNA, 12 bp, Artificial Sequence
  Oligonucleotide primer for the detection of SNP TSC0039190
tataaagaatac

SEQ ID NO: 336076 - DNA, 12 bp, Artificial Sequence
  Oligonucleotide primer for the detection of SNP TSC0039190
ttacaaaaaata

SEQ ID NO: 336077 - DNA, 12 bp, Artificial Sequence
  Oligonucleotide primer for the detection of SNP TSC0039190
tggttgttgata

SEQ ID NO: 336078 - DNA, 12 bp, Artificial Sequence
  Oligonucleotide primer for the detection of SNP TSC0039191
catctctttcat

SEQ ID NO: 336079 - DNA, 12 bp, Artificial Sequence
  Oligonucleotide primer for the detection of SNP TSC0039192
gtttgcgttttt

SEQ ID NO: 336080 - DNA, 12 bp, Artificial Sequence
  Oligonucleotide primer for the detection of SNP TSC0039192
atttacacttcc

SEQ ID NO: 336081 - DNA, 12 bp, Artificial Sequence
  Oligonucleotide primer for the detection of SNP TSC0039192
atttacgcttcc

SEQ ID NO: 336082 - DNA, 12 bp, Artificial Sequence
  Oligonucleotide primer for the detection of SNP TSC0039192
tgttggagaggg

SEQ ID NO: 336083 - DNA, 12 bp, Artificial Sequence
  Oligonucleotide primer for the detection of SNP TSC0039193
aaatcttccaaa

SEQ ID NO: 336084 - DNA, 12 bp, Artificial Sequence
  Oligonucleotide primer for the detection of SNP TSC0039193
gatatgtttagt

SEQ ID NO: 336085 - DNA, 12 bp, Artificial Sequence
  Oligonukleotid-Primer
aacatatccaac

SEQ ID NO: 336086 - DNA, 12 bp, Artificial Sequence
  Oligonucleotide primer for the detection of SNP TSC0039193
gacatatccaac

SEQ ID NO: 336087 - DNA, 12 bp, Artificial Sequence
  Oligonucleotide primer for the detection of SNP TSC0039193
ggattttttaga

SEQ ID NO: 336088 - DNA, 12 bp, Artificial Sequence
  Oligonucleotide primer for the detection of SNP TSC0039194
caaaatactcaa

SEQ ID NO: 336089 - DNA, 12 bp, Artificial Sequence
  Oligonucleotide primer for the detection of SNP TSC0039194
gaatttaaggtg

SEQ ID NO: 336090 - DNA, 12 bp, Artificial Sequence
  Oligonucleotide primer for the detection of SNP TSC0039194
aaatccaaaata

SEQ ID NO: 336091 - DNA, 12 bp, Artificial Sequence
  Oligonucleotide primer for the detection of SNP TSC0039194
taaagtatttag

SEQ ID NO: 336092 - DNA, 12 bp, Artificial Sequence
  Oligonucleotide primer for the detection of SNP TSC0039195
ttaatcaaaact

SEQ ID NO: 336093 - DNA, 12 bp, Artificial Sequence
  Oligonucleotide primer for the detection of SNP TSC0039195
gtttgatatata

SEQ ID NO: 336094 - DNA, 12 bp, Artificial Sequence
  Oligonucleotide primer for the detection of SNP TSC0039196
tatttagtaatt

SEQ ID NO: 336095 - DNA, 12 bp, Artificial Sequence
  Oligonucleotide primer for the detection of SNP TSC0039196
atccaacaatta

SEQ ID NO: 336096 - DNA, 12 bp, Artificial Sequence
  Oligonucleotide primer for the detection of SNP TSC0039196
ggaattatgtat

SEQ ID NO: 336097 - DNA, 12 bp, Artificial Sequence
  Oligonucleotide primer for the detection of SNP TSC0039197
tatttctaatat

SEQ ID NO: 336098 - DNA, 12 bp, Artificial Sequence
  Oligonucleotide primer for the detection of SNP TSC0039197
aatatattttta

SEQ ID NO: 336099 - DNA, 12 bp, Artificial Sequence
  Oligonucleotide primer for the detection of SNP TSC0039198
aaaatctctaat

SEQ ID NO: 336100 - DNA, 12 bp, Artificial Sequence
  Oligonucleotide primer for the detection of SNP TSC0039198
gttattttgtaa

SEQ ID NO: 336101 - DNA, 12 bp, Artificial Sequence
  Oligonucleotide primer for the detection of SNP TSC0039199
tcaattatatac

SEQ ID NO: 336102 - DNA, 12 bp, Artificial Sequence
  Oligonucleotide primer for the detection of SNP TSC0039199
tcgattatatac

SEQ ID NO: 336103 - DNA, 12 bp, Artificial Sequence
  Oligonucleotide primer for the detection of SNP TSC0039199
gaattgaaggtg

SEQ ID NO: 336104 - DNA, 12 bp, Artificial Sequence
  Oligonucleotide primer for the detection of SNP TSC0000753
ttattaattaat

SEQ ID NO: 336105 - DNA, 12 bp, Artificial Sequence
  Oligonucleotide primer for the detection of SNP TSC0000753
atcactaactaa

SEQ ID NO: 336106 - DNA, 12 bp, Artificial Sequence
  Oligonucleotide primer for the detection of SNP TSC0039200
actttactcaat

SEQ ID NO: 336107 - DNA, 12 bp, Artificial Sequence
  Oligonucleotide primer for the detection of SNP TSC0039200
atttaatagtaa

SEQ ID NO: 336108 - DNA, 12 bp, Artificial Sequence
  Oligonucleotide primer for the detection of SNP TSC0039202
aaaactaatata

SEQ ID NO: 336109 - DNA, 12 bp, Artificial Sequence
  Oligonucleotide primer for the detection of SNP TSC0039202
aatatagttttt

SEQ ID NO: 336110 - DNA, 12 bp, Artificial Sequence
  Oligonucleotide primer for the detection of SNP TSC0039202
atacaattctta

SEQ ID NO: 336111 - DNA, 12 bp, Artificial Sequence
  Oligonucleotide primer for the detection of SNP TSC0039202
gagggttaatat

SEQ ID NO: 336112 - DNA, 12 bp, Artificial Sequence
  Oligonucleotide primer for the detection of SNP TSC0039203
attttaatttta

SEQ ID NO: 336113 - DNA, 12 bp, Artificial Sequence
  Oligonucleotide primer for the detection of SNP TSC0039203
actctaatctca

SEQ ID NO: 336114 - DNA, 12 bp, Artificial Sequence
  Oligonucleotide primer for the detection of SNP TSC0039203
gaaattaagatt

SEQ ID NO: 336115 - DNA, 12 bp, Artificial Sequence
  Oligonucleotide primer for the detection of SNP TSC0039205
aattcttccact

SEQ ID NO: 336116 - DNA, 12 bp, Artificial Sequence
  Oligonucleotide primer for the detection of SNP TSC0039205
taaagtgatttt

SEQ ID NO: 336117 - DNA, 12 bp, Artificial Sequence
  Oligonucleotide primer for the detection of SNP TSC0039205
taaaataacttc

SEQ ID NO: 336118 - DNA, 12 bp, Artificial Sequence
  Oligonucleotide primer for the detection of SNP TSC0039206
tcctaatctaac

SEQ ID NO: 336119 - DNA, 12 bp, Artificial Sequence
  Oligonucleotide primer for the detection of SNP TSC0039206
ttctcttttaaa

SEQ ID NO: 336120 - DNA, 12 bp, Artificial Sequence
  Oligonucleotide primer for the detection of SNP TSC0039206
ttttgatttggt

SEQ ID NO: 336121 - DNA, 12 bp, Artificial Sequence
  Oligonucleotide primer for the detection of SNP TSC0039206
ttttgatttggc

SEQ ID NO: 336122 - DNA, 12 bp, Artificial Sequence
  Oligonucleotide primer for the detection of SNP TSC0000912
aaatatctcata

SEQ ID NO: 336123 - DNA, 12 bp, Artificial Sequence
  Oligonucleotide primer for the detection of SNP TSC0000912
tttttataaagt

SEQ ID NO: 336124 - DNA, 12 bp, Artificial Sequence
  Oligonucleotide primer for the detection of SNP TSC0000912
tttttacaaaat

SEQ ID NO: 336125 - DNA, 12 bp, Artificial Sequence
  Oligonucleotide primer for the detection of SNP TSC0000912
gagtgttttata

SEQ ID NO: 336126 - DNA, 12 bp, Artificial Sequence
  Oligonucleotide primer for the detection of SNP TSC0000325
ttgtgtttgtta

SEQ ID NO: 336127 - DNA, 12 bp, Artificial Sequence
  Oligonucleotide primer for the detection of SNP TSC0001254
ctactaaaataa

SEQ ID NO: 336128 - DNA, 12 bp, Artificial Sequence
  Oligonucleotide primer for the detection of SNP TSC0001254
ttggtagattta

SEQ ID NO: 336129 - DNA, 12 bp, Artificial Sequence
  Oligonucleotide primer for the detection of SNP TSC0001255
gtggttattgat

SEQ ID NO: 336130 - DNA, 12 bp, Artificial Sequence
  Oligonucleotide primer for the detection of SNP TSC0001255
gtggttattgac

SEQ ID NO: 336131 - DNA, 12 bp, Artificial Sequence
  Oligonucleotide primer for the detection of SNP TSC0001255
ataatcactaac

SEQ ID NO: 336132 - DNA, 12 bp, Artificial Sequence
  Oligonucleotide primer for the detection of SNP TSC0001255
gtaatcactaac

SEQ ID NO: 336133 - DNA, 12 bp, Artificial Sequence
  Oligonucleotide primer for the detection of SNP TSC0039210
atagtgggttta

SEQ ID NO: 336134 - DNA, 12 bp, Artificial Sequence
  Oligonucleotide primer for the detection of SNP TSC0039211
aaaataataact

SEQ ID NO: 336135 - DNA, 12 bp, Artificial Sequence
  Oligonucleotide primer for the detection of SNP TSC0039211
aaatgtatagaa

SEQ ID NO: 336136 - DNA, 12 bp, Artificial Sequence
  Oligonucleotide primer for the detection of SNP TSC0039212
tattcaaataat

SEQ ID NO: 336137 - DNA, 12 bp, Artificial Sequence
  Oligonucleotide primer for the detection of SNP TSC0039212
agtgagagggtg

SEQ ID NO: 336138 - DNA, 12 bp, Artificial Sequence
  Oligonucleotide primer for the detection of SNP TSC0039212
agcgagagggtg

SEQ ID NO: 336139 - DNA, 12 bp, Artificial Sequence
  Oligonucleotide primer for the detection of SNP TSC0000956
actactaaactc

SEQ ID NO: 336140 - DNA, 12 bp, Artificial Sequence
  Oligonucleotide primer for the detection of SNP TSC0000956
tgtgaatatata

SEQ ID NO: 336141 - DNA, 12 bp, Artificial Sequence
  Oligonucleotide primer for the detection of SNP TSC0000957
actaaattaatt

SEQ ID NO: 336142 - DNA, 12 bp, Artificial Sequence
  Oligonucleotide primer for the detection of SNP TSC0000957
aataattgttaa

SEQ ID NO: 336143 - DNA, 12 bp, Artificial Sequence
  Oligonucleotide primer for the detection of SNP TSC0000958
attattatttag

SEQ ID NO: 336144 - DNA, 12 bp, Artificial Sequence
  Oligonucleotide primer for the detection of SNP TSC0000958
atcaccatccaa

SEQ ID NO: 336145 - DNA, 12 bp, Artificial Sequence
  Oligonucleotide primer for the detection of SNP TSC0000958
tgttgttgttgt

SEQ ID NO: 336146 - DNA, 12 bp, Artificial Sequence
  Oligonucleotide primer for the detection of SNP TSC0001450
tatacttttcat

SEQ ID NO: 336147 - DNA, 12 bp, Artificial Sequence
  Oligonucleotide primer for the detection of SNP TSC0001450
gttttagtttaa

SEQ ID NO: 336148 - DNA, 12 bp, Artificial Sequence
  Oligonucleotide primer for the detection of SNP TSC0000290
cctttcccaaac

SEQ ID NO: 336149 - DNA, 12 bp, Artificial Sequence
  Oligonucleotide primer for the detection of SNP TSC0000291
tatccaacaatt

SEQ ID NO: 336150 - DNA, 12 bp, Artificial Sequence
  Oligonucleotide primer for the detection of SNP TSC0000291
ggatttaggaga

SEQ ID NO: 336151 - DNA, 12 bp, Artificial Sequence
  Oligonucleotide primer for the detection of SNP TSC0001350
tgttattagggg

SEQ ID NO: 336152 - DNA, 12 bp, Artificial Sequence
  Oligonucleotide primer for the detection of SNP TSC0001351
gaagagaattta

SEQ ID NO: 336153 - DNA, 12 bp, Artificial Sequence
  Oligonucleotide primer for the detection of SNP TSC0000798
catattacttcc

SEQ ID NO: 336154 - DNA, 12 bp, Artificial Sequence
  Oligonucleotide primer for the detection of SNP TSC0000798
aattttagagag

SEQ ID NO: 336155 - DNA, 12 bp, Artificial Sequence
  Oligonucleotide primer for the detection of SNP TSC0039217
atattaaatttt

SEQ ID NO: 336156 - DNA, 12 bp, Artificial Sequence
  Oligonucleotide primer for the detection of SNP TSC0039217
atttaaagttaa

SEQ ID NO: 336157 - DNA, 12 bp, Artificial Sequence
  Oligonucleotide primer for the detection of SNP TSC0039220
atcatccttcac

SEQ ID NO: 336158 - DNA, 12 bp, Artificial Sequence
  Oligonucleotide primer for the detection of SNP TSC0039221
aagtgaaaaggg

SEQ ID NO: 336159 - DNA, 12 bp, Artificial Sequence
  Oligonucleotide primer for the detection of SNP TSC0039222
ccatctaaatca

SEQ ID NO: 336160 - DNA, 12 bp, Artificial Sequence
  Oligonucleotide primer for the detection of SNP TSC0039222
tttataaagttt

SEQ ID NO: 336161 - DNA, 12 bp, Artificial Sequence
  Oligonucleotide primer for the detection of SNP TSC0039224
tattctataaca

SEQ ID NO: 336162 - DNA, 12 bp, Artificial Sequence
  Oligonucleotide primer for the detection of SNP TSC0039224
tctattaaccca

SEQ ID NO: 336163 - DNA, 12 bp, Artificial Sequence
  Oligonucleotide primer for the detection of SNP TSC0039224
gtattttatgat

SEQ ID NO: 336164 - DNA, 12 bp, Artificial Sequence
  Oligonucleotide primer for the detection of SNP TSC0039227
tagttttaagtt

SEQ ID NO: 336165 - DNA, 12 bp, Artificial Sequence
  Oligonucleotide primer for the detection of SNP TSC0039227
taaattaaaata

SEQ ID NO: 336166 - DNA, 12 bp, Artificial Sequence
  Oligonucleotide primer for the detection of SNP TSC0039228
cctaattctcac

SEQ ID NO: 336167 - DNA, 12 bp, Artificial Sequence
  Oligonucleotide primer for the detection of SNP TSC0039228
cctaattctcgc

SEQ ID NO: 336168 - DNA, 12 bp, Artificial Sequence
  Oligonucleotide primer for the detection of SNP TSC0039228
ggtggagatgag

SEQ ID NO: 336169 - DNA, 12 bp, Artificial Sequence
  Oligonucleotide primer for the detection of SNP TSC0039229
tatagattattt

SEQ ID NO: 336170 - DNA, 12 bp, Artificial Sequence
  Oligonucleotide primer for the detection of SNP TSC0039229
ataaattactca

SEQ ID NO: 336171 - DNA, 12 bp, Artificial Sequence
  Oligonucleotide primer for the detection of SNP TSC0039229
taatttttgaaa

SEQ ID NO: 336172 - DNA, 12 bp, Artificial Sequence
  Oligonucleotide primer for the detection of SNP TSC0039230
ttacattttaat

SEQ ID NO: 336173 - DNA, 12 bp, Artificial Sequence
  Oligonucleotide primer for the detection of SNP TSC0039230
tatagattttaa

SEQ ID NO: 336174 - DNA, 12 bp, Artificial Sequence
  Oligonucleotide primer for the detection of SNP TSC0039230
tacaaattttaa

SEQ ID NO: 336175 - DNA, 12 bp, Artificial Sequence
  Oligonucleotide primer for the detection of SNP TSC0039230
ttatattttagt

SEQ ID NO: 336176 - DNA, 12 bp, Artificial Sequence
  Oligonucleotide primer for the detection of SNP TSC0039233
ttattcctatct

SEQ ID NO: 336177 - DNA, 12 bp, Artificial Sequence
  Oligonucleotide primer for the detection of SNP TSC0039233
aaaggagaataa

SEQ ID NO: 336178 - DNA, 12 bp, Artificial Sequence
  Oligonucleotide primer for the detection of SNP TSC0039235
ccacaaccccaa

SEQ ID NO: 336179 - DNA, 12 bp, Artificial Sequence
  Oligonucleotide primer for the detection of SNP TSC0039235
tggataaaatgt

SEQ ID NO: 336180 - DNA, 12 bp, Artificial Sequence
  Oligonucleotide primer for the detection of SNP TSC0039235
ttaaataaaata

SEQ ID NO: 336181 - DNA, 12 bp, Artificial Sequence
  Oligonucleotide primer for the detection of SNP TSC0039235
ttatagttttag

SEQ ID NO: 336182 - DNA, 12 bp, Artificial Sequence
  Oligonucleotide primer for the detection of SNP TSC0039236
ttatgtgtagat

SEQ ID NO: 336183 - DNA, 12 bp, Artificial Sequence
  Oligonucleotide primer for the detection of SNP TSC0039236
catatacaaaca

SEQ ID NO: 336184 - DNA, 12 bp, Artificial Sequence
  Oligonucleotide primer for the detection of SNP TSC0039238
tccaactacaac

SEQ ID NO: 336185 - DNA, 12 bp, Artificial Sequence
  Oligonucleotide primer for the detection of SNP TSC0039239
ctctaccactac

SEQ ID NO: 336186 - DNA, 12 bp, Artificial Sequence
  Oligonucleotide primer for the detection of SNP TSC0039239
atgaaatggtgg

SEQ ID NO: 336187 - DNA, 12 bp, Artificial Sequence
  Oligonucleotide primer for the detection of SNP TSC0039240
taaaaacaccaa

SEQ ID NO: 336188 - DNA, 12 bp, Artificial Sequence
  Oligonucleotide primer for the detection of SNP TSC0039240
ccttaatccaat

SEQ ID NO: 336189 - DNA, 12 bp, Artificial Sequence
  Oligonucleotide primer for the detection of SNP TSC0039240
taaggatattag

SEQ ID NO: 336190 - DNA, 12 bp, Artificial Sequence
  Oligonucleotide primer for the detection of SNP TSC0039241
aaaacaactata

SEQ ID NO: 336191 - DNA, 12 bp, Artificial Sequence
  Oligonucleotide primer for the detection of SNP TSC0039241
tatcatttcatc

SEQ ID NO: 336192 - DNA, 12 bp, Artificial Sequence
  Oligonucleotide primer for the detection of SNP TSC0039241
aaggtagttgtg

SEQ ID NO: 336193 - DNA, 12 bp, Artificial Sequence
  Oligonucleotide primer for the detection of SNP TSC0039242
aaatctacacac

SEQ ID NO: 336194 - DNA, 12 bp, Artificial Sequence
  Oligonucleotide primer for the detection of SNP TSC0039242
aaatctacacgc

SEQ ID NO: 336195 - DNA, 12 bp, Artificial Sequence
  Oligonucleotide primer for the detection of SNP TSC0039242
ataatattgttg

SEQ ID NO: 336196 - DNA, 12 bp, Artificial Sequence
  Oligonucleotide primer for the detection of SNP TSC0039243
ctccccaaataa

SEQ ID NO: 336197 - DNA, 12 bp, Artificial Sequence
  Oligonucleotide primer for the detection of SNP TSC0039243
gaagtaggttta

SEQ ID NO: 336198 - DNA, 12 bp, Artificial Sequence
  Oligonucleotide primer for the detection of SNP TSC0039243
aaacaaactcaa

SEQ ID NO: 336199 - DNA, 12 bp, Artificial Sequence
  Oligonucleotide primer for the detection of SNP TSC0039243
tttttaaatggt

SEQ ID NO: 336200 - DNA, 12 bp, Artificial Sequence
  Oligonucleotide primer for the detection of SNP TSC0039244
ttaaataattcc

SEQ ID NO: 336201 - DNA, 12 bp, Artificial Sequence
  Oligonucleotide primer for the detection of SNP TSC0039244
tatttgtgttta

SEQ ID NO: 336202 - DNA, 12 bp, Artificial Sequence
  Oligonucleotide primer for the detection of SNP TSC0039244
tacctataccca

SEQ ID NO: 336203 - DNA, 12 bp, Artificial Sequence
  Oligonucleotide primer for the detection of SNP TSC0039244
ttaagtggtttt

SEQ ID NO: 336204 - DNA, 12 bp, Artificial Sequence
  Oligonucleotide primer for the detection of SNP TSC0039246
ctccctcacaat

SEQ ID NO: 336205 - DNA, 12 bp, Artificial Sequence
  Oligonucleotide primer for the detection of SNP TSC0039246
ttattggtttag

SEQ ID NO: 336206 - DNA, 12 bp, Artificial Sequence
  Oligonucleotide primer for the detection of SNP TSC0039246
ctactaactcaa

SEQ ID NO: 336207 - DNA, 12 bp, Artificial Sequence
  Oligonucleotide primer for the detection of SNP TSC0039247
taaatcttaacc

SEQ ID NO: 336208 - DNA, 12 bp, Artificial Sequence
  Oligonucleotide primer for the detection of SNP TSC0039247
ttattagtagga

SEQ ID NO: 336209 - DNA, 12 bp, Artificial Sequence
  Oligonucleotide primer for the detection of SNP TSC0039248
tactaaattaac

SEQ ID NO: 336210 - DNA, 12 bp, Artificial Sequence
  Oligonucleotide primer for the detection of SNP TSC0039248
tgaatgttaggg

SEQ ID NO: 336211 - DNA, 12 bp, Artificial Sequence
  Oligonucleotide primer for the detection of SNP TSC0039248
taaatattaaaa

SEQ ID NO: 336212 - DNA, 12 bp, Artificial Sequence
  Oligonucleotide primer for the detection of SNP TSC0039248
tattaaattgat

SEQ ID NO: 336213 - DNA, 12 bp, Artificial Sequence
  Oligonucleotide primer for the detection of SNP TSC0039249
gtgttaatatta

SEQ ID NO: 336214 - DNA, 12 bp, Artificial Sequence
  Oligonucleotide primer for the detection of SNP TSC0039252
tcttaccatctc

SEQ ID NO: 336215 - DNA, 12 bp, Artificial Sequence
  Oligonucleotide primer for the detection of SNP TSC0039252
ggaaagtgtttt

SEQ ID NO: 336216 - DNA, 12 bp, Artificial Sequence
  Oligonucleotide primer for the detection of SNP TSC0039252
aaaaatatccca

SEQ ID NO: 336217 - DNA, 12 bp, Artificial Sequence
  Oligonucleotide primer for the detection of SNP TSC0039254
catatctaatac

SEQ ID NO: 336218 - DNA, 12 bp, Artificial Sequence
  Oligonucleotide primer for the detection of SNP TSC0039254
aaaactcttaca

SEQ ID NO: 336219 - DNA, 12 bp, Artificial Sequence
  Oligonucleotide primer for the detection of SNP TSC0039254
tatgtttggtat

SEQ ID NO: 336220 - DNA, 12 bp, Artificial Sequence
  Oligonucleotide primer for the detection of SNP TSC0039255
ttatcggtttag

SEQ ID NO: 336221 - DNA, 12 bp, Artificial Sequence
  Oligonucleotide primer for the detection of SNP TSC0039255
tcaccaatttaa

SEQ ID NO: 336222 - DNA, 12 bp, Artificial Sequence
  Oligonucleotide primer for the detection of SNP TSC0039255
tcaccgatttaa

SEQ ID NO: 336223 - DNA, 12 bp, Artificial Sequence
  Oligonucleotide primer for the detection of SNP TSC0039255
tatagaagtgtg

SEQ ID NO: 336224 - DNA, 12 bp, Artificial Sequence
  Oligonucleotide primer for the detection of SNP TSC0039257
aactctcatacc

SEQ ID NO: 336225 - DNA, 12 bp, Artificial Sequence
  Oligonucleotide primer for the detection of SNP TSC0039257
atagataaaagg

SEQ ID NO: 336226 - DNA, 12 bp, Artificial Sequence
  Oligonucleotide primer for the detection of SNP TSC0039258
tttttcttttaa

SEQ ID NO: 336227 - DNA, 12 bp, Artificial Sequence
  Oligonucleotide primer for the detection of SNP TSC0039258
ggatggtgaaat

SEQ ID NO: 336228 - DNA, 12 bp, Artificial Sequence
  Oligonucleotide primer for the detection of SNP TSC0039259
acatccaaacct

SEQ ID NO: 336229 - DNA, 12 bp, Artificial Sequence
  Oligonucleotide primer for the detection of SNP TSC0039259
gagggaagatga

SEQ ID NO: 336230 - DNA, 12 bp, Artificial Sequence
  Oligonucleotide primer for the detection of SNP TSC0039263
aaaatttgtatt

SEQ ID NO: 336231 - DNA, 12 bp, Artificial Sequence
  Oligonucleotide primer for the detection of SNP TSC0039263
aaaatctacatt

SEQ ID NO: 336232 - DNA, 12 bp, Artificial Sequence
  Oligonucleotide primer for the detection of SNP TSC0039263
ttaaagttatag

SEQ ID NO: 336233 - DNA, 12 bp, Artificial Sequence
  Oligonucleotide primer for the detection of SNP TSC0039264
ggttggaggaaa

SEQ ID NO: 336234 - DNA, 12 bp, Artificial Sequence
  Oligonucleotide primer for the detection of SNP TSC0039269
cacacctacccc

SEQ ID NO: 336235 - DNA, 12 bp, Artificial Sequence
  Oligonucleotide primer for the detection of SNP TSC0039269
cacgcctacccc

SEQ ID NO: 336236 - DNA, 12 bp, Artificial Sequence
  Oligonucleotide primer for the detection of SNP TSC0039269
gttgttgagtta

SEQ ID NO: 336237 - DNA, 12 bp, Artificial Sequence
  Oligonucleotide primer for the detection of SNP TSC0039269
gtcgttgagtta

SEQ ID NO: 336238 - DNA, 12 bp, Artificial Sequence
  Oligonucleotide primer for the detection of SNP TSC0039269
atcactaaatca

SEQ ID NO: 336239 - DNA, 12 bp, Artificial Sequence
  Oligonucleotide primer for the detection of SNP TSC0039269
atcgctaaatca

SEQ ID NO: 336240 - DNA, 12 bp, Artificial Sequence
  Oligonucleotide primer for the detection of SNP TSC0039269
gtcactaaatca

SEQ ID NO: 336241 - DNA, 12 bp, Artificial Sequence
  Oligonucleotide primer for the detection of SNP TSC0039269
gtcgctaaatca

SEQ ID NO: 336242 - DNA, 12 bp, Artificial Sequence
  Oligonukleotid-Primer
tacgtttgtttt

SEQ ID NO: 336243 - DNA, 12 bp, Artificial Sequence
  Oligonucleotide primer for the detection of SNP TSC0039273
acattattattc

SEQ ID NO: 336244 - DNA, 12 bp, Artificial Sequence
  Oligonucleotide primer for the detection of SNP TSC0039273
gtgattaataaa

SEQ ID NO: 336245 - DNA, 12 bp, Artificial Sequence
  Oligonucleotide primer for the detection of SNP TSC0039274
taaatatatact

SEQ ID NO: 336246 - DNA, 12 bp, Artificial Sequence
  Oligonukleotid-Primer
atgttttaataa

SEQ ID NO: 336247 - DNA, 12 bp, Artificial Sequence
  Oligonucleotide primer for the detection of SNP TSC0039274
atacctcaataa

SEQ ID NO: 336248 - DNA, 12 bp, Artificial Sequence
  Oligonucleotide primer for the detection of SNP TSC0005659
tcttctaacaaa

SEQ ID NO: 336249 - DNA, 12 bp, Artificial Sequence
  Oligonucleotide primer for the detection of SNP TSC0005659
ggtataatttgt

SEQ ID NO: 336250 - DNA, 12 bp, Artificial Sequence
  Oligonucleotide primer for the detection of SNP TSC0005659
aatacaacctac

SEQ ID NO: 336251 - DNA, 12 bp, Artificial Sequence
  Oligonucleotide primer for the detection of SNP TSC0039275
gaaagttaagga

SEQ ID NO: 336252 - DNA, 12 bp, Artificial Sequence
  Oligonucleotide primer for the detection of SNP TSC0039276
tttgatttggtt

SEQ ID NO: 336253 - DNA, 12 bp, Artificial Sequence
  Oligonucleotide primer for the detection of SNP TSC0039276
ttcgatttggtt

SEQ ID NO: 336254 - DNA, 12 bp, Artificial Sequence
  Oligonucleotide primer for the detection of SNP TSC0039276
tcaatctaacta

SEQ ID NO: 336255 - DNA, 12 bp, Artificial Sequence
  Oligonucleotide primer for the detection of SNP TSC0039276
tcgatctaacta

SEQ ID NO: 336256 - DNA, 12 bp, Artificial Sequence
  Oligonucleotide primer for the detection of SNP TSC0039276
tttgaagagaag

SEQ ID NO: 336257 - DNA, 12 bp, Artificial Sequence
  Oligonucleotide primer for the detection of SNP TSC0039277
aataaacatctt

SEQ ID NO: 336258 - DNA, 12 bp, Artificial Sequence
  Oligonucleotide primer for the detection of SNP TSC0039277
ttagaattaatg

SEQ ID NO: 336259 - DNA, 12 bp, Artificial Sequence
  Oligonucleotide primer for the detection of SNP TSC0039278
tcctttctatct

SEQ ID NO: 336260 - DNA, 12 bp, Artificial Sequence
  Oligonucleotide primer for the detection of SNP TSC0039278
tagattgttaaa

SEQ ID NO: 336261 - DNA, 12 bp, Artificial Sequence
  Oligonucleotide primer for the detection of SNP TSC0004578
ctataacacatc

SEQ ID NO: 336262 - DNA, 12 bp, Artificial Sequence
  Oligonucleotide primer for the detection of SNP TSC0004578
gtttttgattgc

SEQ ID NO: 336263 - DNA, 12 bp, Artificial Sequence
  Oligonucleotide primer for the detection of SNP TSC0004578
gtaatatatttt

SEQ ID NO: 336264 - DNA, 12 bp, Artificial Sequence
  Oligonucleotide primer for the detection of SNP TSC0004579
aacctataaatc

SEQ ID NO: 336265 - DNA, 12 bp, Artificial Sequence
  Oligonucleotide primer for the detection of SNP TSC0004579
gtattgtatttg

SEQ ID NO: 336266 - DNA, 12 bp, Artificial Sequence
  Oligonucleotide primer for the detection of SNP TSC0004579
acactacaccta

SEQ ID NO: 336267 - DNA, 12 bp, Artificial Sequence
  Oligonucleotide primer for the detection of SNP TSC0004579
aatttgtgagtt

SEQ ID NO: 336268 - DNA, 12 bp, Artificial Sequence
  Oligonucleotide primer for the detection of SNP TSC0039279
agtatattaata

SEQ ID NO: 336269 - DNA, 12 bp, Artificial Sequence
  Oligonucleotide primer for the detection of SNP TSC0039280
aacatcacccac

SEQ ID NO: 336270 - DNA, 12 bp, Artificial Sequence
  Oligonucleotide primer for the detection of SNP TSC0039280
attgaatgaatg

SEQ ID NO: 336271 - DNA, 12 bp, Artificial Sequence
  Oligonucleotide primer for the detection of SNP TSC0039281
cccaaaactaaa

SEQ ID NO: 336272 - DNA, 12 bp, Artificial Sequence
  Oligonucleotide primer for the detection of SNP TSC0039281
tttttgtaaatt

SEQ ID NO: 336273 - DNA, 12 bp, Artificial Sequence
  Oligonucleotide primer for the detection of SNP TSC0039281
cttttataaatt

SEQ ID NO: 336274 - DNA, 12 bp, Artificial Sequence
  Oligonucleotide primer for the detection of SNP TSC0039281
tttaagattgga

SEQ ID NO: 336275 - DNA, 12 bp, Artificial Sequence
  Oligonucleotide primer for the detection of SNP TSC0039282
tccaatcttaaa

SEQ ID NO: 336276 - DNA, 12 bp, Artificial Sequence
  Oligonucleotide primer for the detection of SNP TSC0039282
tgagaaagatat

SEQ ID NO: 336277 - DNA, 12 bp, Artificial Sequence
  Oligonucleotide primer for the detection of SNP TSC0039283
tcacactactaa

SEQ ID NO: 336278 - DNA, 12 bp, Artificial Sequence
  Oligonucleotide primer for the detection of SNP TSC0039283
tcacgctactaa

SEQ ID NO: 336279 - DNA, 12 bp, Artificial Sequence
  Oligonucleotide primer for the detection of SNP TSC0039283
gggaatgttttt

SEQ ID NO: 336280 - DNA, 12 bp, Artificial Sequence
  Oligonucleotide primer for the detection of SNP TSC0039283
cttaaaaatatc

SEQ ID NO: 336281 - DNA, 12 bp, Artificial Sequence
  Oligonucleotide primer for the detection of SNP TSC0039283
tttatgttgttg

SEQ ID NO: 336282 - DNA, 12 bp, Artificial Sequence
  Oligonucleotide primer for the detection of SNP TSC0039283
tttacgttgttg

SEQ ID NO: 336283 - DNA, 12 bp, Artificial Sequence
  Oligonucleotide primer for the detection of SNP TSC0039286
tacaaaacatat

SEQ ID NO: 336284 - DNA, 12 bp, Artificial Sequence
  Oligonucleotide primer for the detection of SNP TSC0039286
aattgggtatgg

SEQ ID NO: 336285 - DNA, 12 bp, Artificial Sequence
  Oligonucleotide primer for the detection of SNP TSC0039286
aatcgggtatgg

SEQ ID NO: 336286 - DNA, 12 bp, Artificial Sequence
  Oligonucleotide primer for the detection of SNP TSC0039291
ttccaaattttt

SEQ ID NO: 336287 - DNA, 12 bp, Artificial Sequence
  Oligonucleotide primer for the detection of SNP TSC0039291
aatatagaattt

SEQ ID NO: 336288 - DNA, 12 bp, Artificial Sequence
  Oligonucleotide primer for the detection of SNP TSC0039291
aatacaaaattc

SEQ ID NO: 336289 - DNA, 12 bp, Artificial Sequence
  Oligonucleotide primer for the detection of SNP TSC0000350
acatatatcaaa

SEQ ID NO: 336290 - DNA, 12 bp, Artificial Sequence
  Oligonucleotide primer for the detection of SNP TSC0000350
tttaagtgtttt

SEQ ID NO: 336291 - DNA, 12 bp, Artificial Sequence
  Oligonucleotide primer for the detection of SNP TSC0000350
tctaaatacttt

SEQ ID NO: 336292 - DNA, 12 bp, Artificial Sequence
  Oligonucleotide primer for the detection of SNP TSC0000350
atatatattaga

SEQ ID NO: 336293 - DNA, 12 bp, Artificial Sequence
  Oligonucleotide primer for the detection of SNP TSC0001748
aactctcaccca

SEQ ID NO: 336294 - DNA, 12 bp, Artificial Sequence
  Oligonucleotide primer for the detection of SNP TSC0001748
ttgtttttggag

SEQ ID NO: 336295 - DNA, 12 bp, Artificial Sequence
  Oligonucleotide primer for the detection of SNP TSC0001748
tatctttaaaaa

SEQ ID NO: 336296 - DNA, 12 bp, Artificial Sequence
  Oligonucleotide primer for the detection of SNP TSC0001748
taatttttattt

SEQ ID NO: 336297 - DNA, 12 bp, Artificial Sequence
  Oligonucleotide primer for the detection of SNP TSC0001749
ctcccctcataa

SEQ ID NO: 336298 - DNA, 12 bp, Artificial Sequence
  Oligonucleotide primer for the detection of SNP TSC0001749
ttattagttagt

SEQ ID NO: 336299 - DNA, 12 bp, Artificial Sequence
  Oligonucleotide primer for the detection of SNP TSC0001749
ttatcaaccaac

SEQ ID NO: 336300 - DNA, 12 bp, Artificial Sequence
  Oligonucleotide primer for the detection of SNP TSC0039295
acttcttattta

SEQ ID NO: 336301 - DNA, 12 bp, Artificial Sequence
  Oligonucleotide primer for the detection of SNP TSC0004851
cttttaaactat

SEQ ID NO: 336302 - DNA, 12 bp, Artificial Sequence
  Oligonucleotide primer for the detection of SNP TSC0004851
taatgagggatg

SEQ ID NO: 336303 - DNA, 12 bp, Artificial Sequence
  Oligonucleotide primer for the detection of SNP TSC0039296
tctttatcttta

SEQ ID NO: 336304 - DNA, 12 bp, Artificial Sequence
  Oligonucleotide primer for the detection of SNP TSC0039296
tgaagttatggt

SEQ ID NO: 336305 - DNA, 12 bp, Artificial Sequence
  Oligonucleotide primer for the detection of SNP TSC0039296
taaaattataat

SEQ ID NO: 336306 - DNA, 12 bp, Artificial Sequence
  Oligonucleotide primer for the detection of SNP TSC0039297
ctaacttattct

SEQ ID NO: 336307 - DNA, 12 bp, Artificial Sequence
  Oligonucleotide primer for the detection of SNP TSC0039297
ttacttaaaaaa

SEQ ID NO: 336308 - DNA, 12 bp, Artificial Sequence
  Oligonucleotide primer for the detection of SNP TSC0039297
ttggtttgtttt

SEQ ID NO: 336309 - DNA, 12 bp, Artificial Sequence
  Oligonucleotide primer for the detection of SNP TSC0039298
gtagagataggg

SEQ ID NO: 336310 - DNA, 12 bp, Artificial Sequence
  Oligonucleotide primer for the detection of SNP TSC0039299
acaacacttaat

SEQ ID NO: 336311 - DNA, 12 bp, Artificial Sequence
  Oligonucleotide primer for the detection of SNP TSC0039299
ttttattattaa

SEQ ID NO: 336312 - DNA, 12 bp, Artificial Sequence
  Oligonucleotide primer for the detection of SNP TSC0039302
gcgattttgttt

SEQ ID NO: 336313 - DNA, 12 bp, Artificial Sequence
  Oligonucleotide primer for the detection of SNP TSC0039302
acaatcctacct

SEQ ID NO: 336314 - DNA, 12 bp, Artificial Sequence
  Oligonucleotide primer for the detection of SNP TSC0039302
acgatcctacct

SEQ ID NO: 336315 - DNA, 12 bp, Artificial Sequence
  Oligonucleotide primer for the detection of SNP TSC0039307
aggaagtaaaaa

SEQ ID NO: 336316 - DNA, 12 bp, Artificial Sequence
  Oligonucleotide primer for the detection of SNP TSC0005052
ccatcaatcaat

SEQ ID NO: 336317 - DNA, 12 bp, Artificial Sequence
  Oligonucleotide primer for the detection of SNP TSC0005052
tgggtttaatta

SEQ ID NO: 336318 - DNA, 12 bp, Artificial Sequence
  Oligonucleotide primer for the detection of SNP TSC0004547
acaataatataa

SEQ ID NO: 336319 - DNA, 12 bp, Artificial Sequence
  Oligonucleotide primer for the detection of SNP TSC0039313
ctctctactaca

SEQ ID NO: 336320 - DNA, 12 bp, Artificial Sequence
  Oligonucleotide primer for the detection of SNP TSC0039313
attaggggttag

SEQ ID NO: 336321 - DNA, 12 bp, Artificial Sequence
  Oligonucleotide primer for the detection of SNP TSC0039313
actaaaaactaa

SEQ ID NO: 336322 - DNA, 12 bp, Artificial Sequence
  Oligonucleotide primer for the detection of SNP TSC0039313
ttttgttgtatt

SEQ ID NO: 336323 - DNA, 12 bp, Artificial Sequence
  Oligonucleotide primer for the detection of SNP TSC0039314
ctctcactatta

SEQ ID NO: 336324 - DNA, 12 bp, Artificial Sequence
  Oligonucleotide primer for the detection of SNP TSC0039314
taaatttttata

SEQ ID NO: 336325 - DNA, 12 bp, Artificial Sequence
  Oligonucleotide primer for the detection of SNP TSC0039314
taaattctcata

SEQ ID NO: 336326 - DNA, 12 bp, Artificial Sequence
  Oligonucleotide primer for the detection of SNP TSC0039315
tcttttactaat

SEQ ID NO: 336327 - DNA, 12 bp, Artificial Sequence
  Oligonucleotide primer for the detection of SNP TSC0039315
ttttggaaggtg

SEQ ID NO: 336328 - DNA, 12 bp, Artificial Sequence
  Oligonucleotide primer for the detection of SNP TSC0039316
tactaaaatcat

SEQ ID NO: 336329 - DNA, 12 bp, Artificial Sequence
  Oligonucleotide primer for the detection of SNP TSC0039316
tgtggtgattta

SEQ ID NO: 336330 - DNA, 12 bp, Artificial Sequence
  Oligonucleotide primer for the detection of SNP TSC0039316
tataataactca

SEQ ID NO: 336331 - DNA, 12 bp, Artificial Sequence
  Oligonucleotide primer for the detection of SNP TSC0039317
taaccatttttt

SEQ ID NO: 336332 - DNA, 12 bp, Artificial Sequence
  Oligonucleotide primer for the detection of SNP TSC0039317
cactttattttt

SEQ ID NO: 336333 - DNA, 12 bp, Artificial Sequence
  Oligonucleotide primer for the detection of SNP TSC0039317
tggttatttttt

SEQ ID NO: 336334 - DNA, 12 bp, Artificial Sequence
  Oligonucleotide primer for the detection of SNP TSC0039318
tttcaaaaacat

SEQ ID NO: 336335 - DNA, 12 bp, Artificial Sequence
  Oligonucleotide primer for the detection of SNP TSC0039318
ccttttttatcc

SEQ ID NO: 336336 - DNA, 12 bp, Artificial Sequence
  Oligonucleotide primer for the detection of SNP TSC0039318
ttttaaagatat

SEQ ID NO: 336337 - DNA, 12 bp, Artificial Sequence
  Oligonucleotide primer for the detection of SNP TSC0039319
ataaaatcctac

SEQ ID NO: 336338 - DNA, 12 bp, Artificial Sequence
  Oligonucleotide primer for the detection of SNP TSC0039321
actactctaaac

SEQ ID NO: 336339 - DNA, 12 bp, Artificial Sequence
  Oligonucleotide primer for the detection of SNP TSC0039321
taataaggtaag

SEQ ID NO: 336340 - DNA, 12 bp, Artificial Sequence
  Oligonucleotide primer for the detection of SNP TSC0039321
gttgttttgggt

SEQ ID NO: 336341 - DNA, 12 bp, Artificial Sequence
  Oligonucleotide primer for the detection of SNP TSC0039322
cactctaccaca

SEQ ID NO: 336342 - DNA, 12 bp, Artificial Sequence
  Oligonucleotide primer for the detection of SNP TSC0039322
ttttgagaagat

SEQ ID NO: 336343 - DNA, 12 bp, Artificial Sequence
  Oligonucleotide primer for the detection of SNP TSC0039323
aaattaagtttt

SEQ ID NO: 336344 - DNA, 12 bp, Artificial Sequence
  Oligonucleotide primer for the detection of SNP TSC0039323
ccaaatcaaatt

SEQ ID NO: 336345 - DNA, 12 bp, Artificial Sequence
  Oligonucleotide primer for the detection of SNP TSC0039323
gaggtagagtta

SEQ ID NO: 336346 - DNA, 12 bp, Artificial Sequence
  Oligonucleotide primer for the detection of SNP TSC0039325
actaatctcctt

SEQ ID NO: 336347 - DNA, 12 bp, Artificial Sequence
  Oligonucleotide primer for the detection of SNP TSC0039325
tatttttaatta

SEQ ID NO: 336348 - DNA, 12 bp, Artificial Sequence
  Oligonucleotide primer for the detection of SNP TSC0039325
cactctcaatta

SEQ ID NO: 336349 - DNA, 12 bp, Artificial Sequence
  Oligonucleotide primer for the detection of SNP TSC0039326
cacctattcact

SEQ ID NO: 336350 - DNA, 12 bp, Artificial Sequence
  Oligonucleotide primer for the detection of SNP TSC0039327
aattcgttatat

SEQ ID NO: 336351 - DNA, 12 bp, Artificial Sequence
  Oligonucleotide primer for the detection of SNP TSC0039327
ttttagtttata

SEQ ID NO: 336352 - DNA, 12 bp, Artificial Sequence
  Oligonucleotide primer for the detection of SNP TSC0039328
ttttaaaaggga

SEQ ID NO: 336353 - DNA, 12 bp, Artificial Sequence
  Oligonucleotide primer for the detection of SNP TSC0039330
gtagtttattgt

SEQ ID NO: 336354 - DNA, 12 bp, Artificial Sequence
  Oligonucleotide primer for the detection of SNP TSC0039330
acaatccactac

SEQ ID NO: 336355 - DNA, 12 bp, Artificial Sequence
  Oligonucleotide primer for the detection of SNP TSC0039330
agtataagatga

SEQ ID NO: 336356 - DNA, 12 bp, Artificial Sequence
  Oligonucleotide primer for the detection of SNP TSC0007431
ccatcctaccca

SEQ ID NO: 336357 - DNA, 12 bp, Artificial Sequence
  Oligonucleotide primer for the detection of SNP TSC0007431
agtgttgggtaa

SEQ ID NO: 336358 - DNA, 12 bp, Artificial Sequence
  Oligonucleotide primer for the detection of SNP TSC0007431
actaaataaaaa

SEQ ID NO: 336359 - DNA, 12 bp, Artificial Sequence
  Oligonucleotide primer for the detection of SNP TSC0039332
taaatattcaaa

SEQ ID NO: 336360 - DNA, 12 bp, Artificial Sequence
  Oligonucleotide primer for the detection of SNP TSC0039332
ttttaatctctt

SEQ ID NO: 336361 - DNA, 12 bp, Artificial Sequence
  Oligonucleotide primer for the detection of SNP TSC0039332
tggatgtttaaa

SEQ ID NO: 336362 - DNA, 12 bp, Artificial Sequence
  Oligonucleotide primer for the detection of SNP TSC0039333
aattattatata

SEQ ID NO: 336363 - DNA, 12 bp, Artificial Sequence
  Oligonucleotide primer for the detection of SNP TSC0039333
atataattaagt

SEQ ID NO: 336364 - DNA, 12 bp, Artificial Sequence
  Oligonucleotide primer for the detection of SNP TSC0039333
tatacaatcaaa

SEQ ID NO: 336365 - DNA, 12 bp, Artificial Sequence
  Oligonucleotide primer for the detection of SNP TSC0039333
aggttattatgt

SEQ ID NO: 336366 - DNA, 12 bp, Artificial Sequence
  Oligonucleotide primer for the detection of SNP TSC0039335
aaaacctcccaa

SEQ ID NO: 336367 - DNA, 12 bp, Artificial Sequence
  Oligonucleotide primer for the detection of SNP TSC0039335
aagttttatatg

SEQ ID NO: 336368 - DNA, 12 bp, Artificial Sequence
  Oligonucleotide primer for the detection of SNP TSC0039335
aaattccacata

SEQ ID NO: 336369 - DNA, 12 bp, Artificial Sequence
  Oligonucleotide primer for the detection of SNP TSC0039335
gaggttttttag

SEQ ID NO: 336370 - DNA, 12 bp, Artificial Sequence
  Oligonucleotide primer for the detection of SNP TSC0039336
aacatctatact

SEQ ID NO: 336371 - DNA, 12 bp, Artificial Sequence
  Oligonucleotide primer for the detection of SNP TSC0039336
aacgtctatact

SEQ ID NO: 336372 - DNA, 12 bp, Artificial Sequence
  Oligonucleotide primer for the detection of SNP TSC0039336
gatgttattttg

SEQ ID NO: 336373 - DNA, 12 bp, Artificial Sequence
  Oligonucleotide primer for the detection of SNP TSC0039337
ttttcttaaaat

SEQ ID NO: 336374 - DNA, 12 bp, Artificial Sequence
  Oligonucleotide primer for the detection of SNP TSC0039338
ttaatactctaa

SEQ ID NO: 336375 - DNA, 12 bp, Artificial Sequence
  Oligonucleotide primer for the detection of SNP TSC0039338
attattatgggg

SEQ ID NO: 336376 - DNA, 12 bp, Artificial Sequence
  Oligonucleotide primer for the detection of SNP TSC0039338
attattacgggg

SEQ ID NO: 336377 - DNA, 12 bp, Artificial Sequence
  Oligonucleotide primer for the detection of SNP TSC0039338
accaccacaaaa

SEQ ID NO: 336378 - DNA, 12 bp, Artificial Sequence
  Oligonucleotide primer for the detection of SNP TSC0039338
accaccacgaaa

SEQ ID NO: 336379 - DNA, 12 bp, Artificial Sequence
  Oligonucleotide primer for the detection of SNP TSC0039339
ccacaaccacta

SEQ ID NO: 336380 - DNA, 12 bp, Artificial Sequence
  Oligonucleotide primer for the detection of SNP TSC0039339
tggttaggggtg

SEQ ID NO: 336381 - DNA, 12 bp, Artificial Sequence
  Oligonucleotide primer for the detection of SNP TSC0039340
atcaaaaacctt

SEQ ID NO: 336382 - DNA, 12 bp, Artificial Sequence
  Oligonucleotide primer for the detection of SNP TSC0039340
ttaggtagattt

SEQ ID NO: 336383 - DNA, 12 bp, Artificial Sequence
  Oligonucleotide primer for the detection of SNP TSC0039340
caccaaataaac

SEQ ID NO: 336384 - DNA, 12 bp, Artificial Sequence
  Oligonucleotide primer for the detection of SNP TSC0039341
atatatacccta

SEQ ID NO: 336385 - DNA, 12 bp, Artificial Sequence
  Oligonucleotide primer for the detection of SNP TSC0039341
ttcttcatttac

SEQ ID NO: 336386 - DNA, 12 bp, Artificial Sequence
  Oligonucleotide primer for the detection of SNP TSC0039341
ggtatatgtttt

SEQ ID NO: 336387 - DNA, 12 bp, Artificial Sequence
  Oligonucleotide primer for the detection of SNP TSC0039342
aactcttttact

SEQ ID NO: 336388 - DNA, 12 bp, Artificial Sequence
  Oligonucleotide primer for the detection of SNP TSC0039342
tgaagggaaatg

SEQ ID NO: 336389 - DNA, 12 bp, Artificial Sequence
  Oligonucleotide primer for the detection of SNP TSC0039342
aatttttttgtt

SEQ ID NO: 336390 - DNA, 12 bp, Artificial Sequence
  Oligonucleotide primer for the detection of SNP TSC0039343
taaataatatac

SEQ ID NO: 336391 - DNA, 12 bp, Artificial Sequence
  Oligonucleotide primer for the detection of SNP TSC0039343
ttttgggggtaa

SEQ ID NO: 336392 - DNA, 12 bp, Artificial Sequence
  Oligonucleotide primer for the detection of SNP TSC0039345
aattatcttttc

SEQ ID NO: 336393 - DNA, 12 bp, Artificial Sequence
  Oligonucleotide primer for the detection of SNP TSC0039345
ggggagttagga

SEQ ID NO: 336394 - DNA, 12 bp, Artificial Sequence
  Oligonucleotide primer for the detection of SNP TSC0039346
ctcctaactccc

SEQ ID NO: 336395 - DNA, 12 bp, Artificial Sequence
  Oligonucleotide primer for the detection of SNP TSC0039346
tagtatagataa

SEQ ID NO: 336396 - DNA, 12 bp, Artificial Sequence
  Oligonucleotide primer for the detection of SNP TSC0039347
acaaaataattt

SEQ ID NO: 336397 - DNA, 12 bp, Artificial Sequence
  Oligonucleotide primer for the detection of SNP TSC0039347
aacaaaaaatca

SEQ ID NO: 336398 - DNA, 12 bp, Artificial Sequence
  Oligonucleotide primer for the detection of SNP TSC0039347
gtaagatgattt

SEQ ID NO: 336399 - DNA, 12 bp, Artificial Sequence
  Oligonucleotide primer for the detection of SNP TSC0039348
tcttctatttac

SEQ ID NO: 336400 - DNA, 12 bp, Artificial Sequence
  Oligonucleotide primer for the detection of SNP TSC0039348
cctcttatttaa

SEQ ID NO: 336401 - DNA, 12 bp, Artificial Sequence
  Oligonucleotide primer for the detection of SNP TSC0001355
aaacaaactttt

SEQ ID NO: 336402 - DNA, 12 bp, Artificial Sequence
  Oligonucleotide primer for the detection of SNP TSC0001355
taagatggttag

SEQ ID NO: 336403 - DNA, 12 bp, Artificial Sequence
  Oligonucleotide primer for the detection of SNP TSC0001356
aaaaaatttaat

SEQ ID NO: 336404 - DNA, 12 bp, Artificial Sequence
  Oligonucleotide primer for the detection of SNP TSC0001356
gataattgtgag

SEQ ID NO: 336405 - DNA, 12 bp, Artificial Sequence
  Oligonucleotide primer for the detection of SNP TSC0001356
aagaagtttaat

SEQ ID NO: 336406 - DNA, 12 bp, Artificial Sequence
  Oligonucleotide primer for the detection of SNP TSC0039349
tccccatacact

SEQ ID NO: 336407 - DNA, 12 bp, Artificial Sequence
  Oligonucleotide primer for the detection of SNP TSC0039349
taggtaattgga

SEQ ID NO: 336408 - DNA, 12 bp, Artificial Sequence
  Oligonucleotide primer for the detection of SNP TSC0039349
taaacaattaaa

SEQ ID NO: 336409 - DNA, 12 bp, Artificial Sequence
  Oligonucleotide primer for the detection of SNP TSC0005492
tcaactattatt

SEQ ID NO: 336410 - DNA, 12 bp, Artificial Sequence
  Oligonucleotide primer for the detection of SNP TSC0005492
tattgttatata

SEQ ID NO: 336411 - DNA, 12 bp, Artificial Sequence
  Oligonucleotide primer for the detection of SNP TSC0039350
aagatgaattag

SEQ ID NO: 336412 - DNA, 12 bp, Artificial Sequence
  Oligonucleotide primer for the detection of SNP TSC0005708
cacctcccaaat

SEQ ID NO: 336413 - DNA, 12 bp, Artificial Sequence
  Oligonucleotide primer for the detection of SNP TSC0005708
cgcctcccaaat

SEQ ID NO: 336414 - DNA, 12 bp, Artificial Sequence
  Oligonucleotide primer for the detection of SNP TSC0005708
gagaattttttg

SEQ ID NO: 336415 - DNA, 12 bp, Artificial Sequence
  Oligonucleotide primer for the detection of SNP TSC0039351
ttctaactcaaa

SEQ ID NO: 336416 - DNA, 12 bp, Artificial Sequence
  Oligonucleotide primer for the detection of SNP TSC0039351
taggttggagtt

SEQ ID NO: 336417 - DNA, 12 bp, Artificial Sequence
  Oligonucleotide primer for the detection of SNP TSC0039351
caaactaaaatc

SEQ ID NO: 336418 - DNA, 12 bp, Artificial Sequence
  Oligonucleotide primer for the detection of SNP TSC0039352
aataaataaatc

SEQ ID NO: 336419 - DNA, 12 bp, Artificial Sequence
  Oligonucleotide primer for the detection of SNP TSC0039352
ttttaaatggga

SEQ ID NO: 336420 - DNA, 12 bp, Artificial Sequence
  Oligonucleotide primer for the detection of SNP TSC0039352
ctttaaataaaa

SEQ ID NO: 336421 - DNA, 12 bp, Artificial Sequence
  Oligonucleotide primer for the detection of SNP TSC0039352
gatgaatgaatt

SEQ ID NO: 336422 - DNA, 12 bp, Artificial Sequence
  Oligonucleotide primer for the detection of SNP TSC0039353
tacctaactcaa

SEQ ID NO: 336423 - DNA, 12 bp, Artificial Sequence
  Oligonukleotid-Primer
tttttagtaatg

SEQ ID NO: 336424 - DNA, 12 bp, Artificial Sequence
  Oligonucleotide primer for the detection of SNP TSC0039353
tttccaataata

SEQ ID NO: 336425 - DNA, 12 bp, Artificial Sequence
  Oligonucleotide primer for the detection of SNP TSC0039353
atttggtttaat

SEQ ID NO: 336426 - DNA, 12 bp, Artificial Sequence
  Oligonucleotide primer for the detection of SNP TSC0039354
tcaaaactccca

SEQ ID NO: 336427 - DNA, 12 bp, Artificial Sequence
  Oligonucleotide primer for the detection of SNP TSC0039354
tcgaaactccca

SEQ ID NO: 336428 - DNA, 12 bp, Artificial Sequence
  Oligonucleotide primer for the detection of SNP TSC0039354
gaaaagaaggat

SEQ ID NO: 336429 - DNA, 12 bp, Artificial Sequence
  Oligonucleotide primer for the detection of SNP TSC0039354
ttgaaattttta

SEQ ID NO: 336430 - DNA, 12 bp, Artificial Sequence
  Oligonucleotide primer for the detection of SNP TSC0039354
tcgaaattttta

SEQ ID NO: 336431 - DNA, 12 bp, Artificial Sequence
  Oligonucleotide primer for the detection of SNP TSC0039357
aagaatagtaag

SEQ ID NO: 336432 - DNA, 12 bp, Artificial Sequence
  Oligonucleotide primer for the detection of SNP TSC0039358
ttataacaatac

SEQ ID NO: 336433 - DNA, 12 bp, Artificial Sequence
  Oligonucleotide primer for the detection of SNP TSC0039358
ttatagtaatgt

SEQ ID NO: 336434 - DNA, 12 bp, Artificial Sequence
  Oligonucleotide primer for the detection of SNP TSC0039358
ttatagtaatgc

SEQ ID NO: 336435 - DNA, 12 bp, Artificial Sequence
  Oligonucleotide primer for the detection of SNP TSC0039360
ataataaattta

SEQ ID NO: 336436 - DNA, 12 bp, Artificial Sequence
  Oligonucleotide primer for the detection of SNP TSC0039360
ataagttgataa

SEQ ID NO: 336437 - DNA, 12 bp, Artificial Sequence
  Oligonucleotide primer for the detection of SNP TSC0039360
tatgataggttt

SEQ ID NO: 336438 - DNA, 12 bp, Artificial Sequence
  Oligonucleotide primer for the detection of SNP TSC0039361
tgatgatttagt

SEQ ID NO: 336439 - DNA, 12 bp, Artificial Sequence
  Oligonucleotide primer for the detection of SNP TSC0039361
taataattcaat

SEQ ID NO: 336440 - DNA, 12 bp, Artificial Sequence
  Oligonucleotide primer for the detection of SNP TSC0007085
ctaaataaatac

SEQ ID NO: 336441 - DNA, 12 bp, Artificial Sequence
  Oligonucleotide primer for the detection of SNP TSC0007085
ttatattaggag

SEQ ID NO: 336442 - DNA, 12 bp, Artificial Sequence
  Oligonucleotide primer for the detection of SNP TSC0039362
catttttaaact

SEQ ID NO: 336443 - DNA, 12 bp, Artificial Sequence
  Oligonucleotide primer for the detection of SNP TSC0039362
gtagaaatttta

SEQ ID NO: 336444 - DNA, 12 bp, Artificial Sequence
  Oligonucleotide primer for the detection of SNP TSC0039363
atactacgtact

SEQ ID NO: 336445 - DNA, 12 bp, Artificial Sequence
  Oligonucleotide primer for the detection of SNP TSC0039363
agataatatttg

SEQ ID NO: 336446 - DNA, 12 bp, Artificial Sequence
  Oligonucleotide primer for the detection of SNP TSC0039364
acattcacactc

SEQ ID NO: 336447 - DNA, 12 bp, Artificial Sequence
  Oligonucleotide primer for the detection of SNP TSC0039364
acattcgcactc

SEQ ID NO: 336448 - DNA, 12 bp, Artificial Sequence
  Oligonucleotide primer for the detection of SNP TSC0039364
acgttcacactc

SEQ ID NO: 336449 - DNA, 12 bp, Artificial Sequence
  Oligonucleotide primer for the detection of SNP TSC0039364
acgttcgcactc

SEQ ID NO: 336450 - DNA, 12 bp, Artificial Sequence
  Oligonucleotide primer for the detection of SNP TSC0039364
ttatttttatag

SEQ ID NO: 336451 - DNA, 12 bp, Artificial Sequence
  Oligonucleotide primer for the detection of SNP TSC0005267
cccattaacctc

SEQ ID NO: 336452 - DNA, 12 bp, Artificial Sequence
  Oligonucleotide primer for the detection of SNP TSC0005267
tgtttggtatgg

SEQ ID NO: 336453 - DNA, 12 bp, Artificial Sequence
  Oligonucleotide primer for the detection of SNP TSC0005267
tacctaacataa

SEQ ID NO: 336454 - DNA, 12 bp, Artificial Sequence
  Oligonucleotide primer for the detection of SNP TSC0039365
ttattacccaaa

SEQ ID NO: 336455 - DNA, 12 bp, Artificial Sequence
  Oligonucleotide primer for the detection of SNP TSC0039365
cacttcactcca

SEQ ID NO: 336456 - DNA, 12 bp, Artificial Sequence
  Oligonucleotide primer for the detection of SNP TSC0039365
atttgttgttta

SEQ ID NO: 336457 - DNA, 12 bp, Artificial Sequence
  Oligonucleotide primer for the detection of SNP TSC0039366
tagtttgagtga

SEQ ID NO: 336458 - DNA, 12 bp, Artificial Sequence
  Oligonucleotide primer for the detection of SNP TSC0039366
tagtttgagcga

SEQ ID NO: 336459 - DNA, 12 bp, Artificial Sequence
  Oligonucleotide primer for the detection of SNP TSC0039367
tgtaaaatattc

SEQ ID NO: 336460 - DNA, 12 bp, Artificial Sequence
  Oligonucleotide primer for the detection of SNP TSC0039367
atataaaatact

SEQ ID NO: 336461 - DNA, 12 bp, Artificial Sequence
  Oligonucleotide primer for the detection of SNP TSC0039367
ttaaatggtaaa

SEQ ID NO: 336462 - DNA, 12 bp, Artificial Sequence
  Oligonucleotide primer for the detection of SNP TSC0039368
taatacctattc

SEQ ID NO: 336463 - DNA, 12 bp, Artificial Sequence
  Oligonucleotide primer for the detection of SNP TSC0039369
ctattataactc

SEQ ID NO: 336464 - DNA, 12 bp, Artificial Sequence
  Oligonucleotide primer for the detection of SNP TSC0039369
tgtagtgattaa

SEQ ID NO: 336465 - DNA, 12 bp, Artificial Sequence
  Oligonucleotide primer for the detection of SNP TSC0039371
ccccaccctcct

SEQ ID NO: 336466 - DNA, 12 bp, Artificial Sequence
  Oligonucleotide primer for the detection of SNP TSC0039372
tctcattctcat

SEQ ID NO: 336467 - DNA, 12 bp, Artificial Sequence
  Oligonucleotide primer for the detection of SNP TSC0039372
tctcgttctcat

SEQ ID NO: 336468 - DNA, 12 bp, Artificial Sequence
  Oligonucleotide primer for the detection of SNP TSC0039372
gtgattgaagga

SEQ ID NO: 336469 - DNA, 12 bp, Artificial Sequence
  Oligonucleotide primer for the detection of SNP TSC0006829
aaaaatttgttg

SEQ ID NO: 336470 - DNA, 12 bp, Artificial Sequence
  Oligonucleotide primer for the detection of SNP TSC0039373
ataaaacatatt

SEQ ID NO: 336471 - DNA, 12 bp, Artificial Sequence
  Oligonucleotide primer for the detection of SNP TSC0039373
tgtttttatgta

SEQ ID NO: 336472 - DNA, 12 bp, Artificial Sequence
  Oligonucleotide primer for the detection of SNP TSC0039374
accctctcctaa

SEQ ID NO: 336473 - DNA, 12 bp, Artificial Sequence
  Oligonucleotide primer for the detection of SNP TSC0039374
aggtaagttgtt

SEQ ID NO: 336474 - DNA, 12 bp, Artificial Sequence
  Oligonucleotide primer for the detection of SNP TSC0039375
aactctctcctc

SEQ ID NO: 336475 - DNA, 12 bp, Artificial Sequence
  Oligonucleotide primer for the detection of SNP TSC0039375
gattgagaatta

SEQ ID NO: 336476 - DNA, 12 bp, Artificial Sequence
  Oligonucleotide primer for the detection of SNP TSC0039375
aactaaaaatca

SEQ ID NO: 336477 - DNA, 12 bp, Artificial Sequence
  Oligonucleotide primer for the detection of SNP TSC0039376
atatccaactaa

SEQ ID NO: 336478 - DNA, 12 bp, Artificial Sequence
  Oligonucleotide primer for the detection of SNP TSC0039376
atatccgactaa

SEQ ID NO: 336479 - DNA, 12 bp, Artificial Sequence
  Oligonucleotide primer for the detection of SNP TSC0039376
atgttcggttaa

SEQ ID NO: 336480 - DNA, 12 bp, Artificial Sequence
  Oligonucleotide primer for the detection of SNP TSC0039377
taaacctataac

SEQ ID NO: 336481 - DNA, 12 bp, Artificial Sequence
  Oligonucleotide primer for the detection of SNP TSC0039377
taatttgtttaa

SEQ ID NO: 336482 - DNA, 12 bp, Artificial Sequence
  Oligonucleotide primer for the detection of SNP TSC0039378
taataattaaac

SEQ ID NO: 336483 - DNA, 12 bp, Artificial Sequence
  Oligonucleotide primer for the detection of SNP TSC0039378
ttgtatatttta

SEQ ID NO: 336484 - DNA, 12 bp, Artificial Sequence
  Oligonucleotide primer for the detection of SNP TSC0039379
aaacttaatcat

SEQ ID NO: 336485 - DNA, 12 bp, Artificial Sequence
  Oligonucleotide primer for the detection of SNP TSC0039380
taacacctccca

SEQ ID NO: 336486 - DNA, 12 bp, Artificial Sequence
  Oligonucleotide primer for the detection of SNP TSC0039380
taacgcctccca

SEQ ID NO: 336487 - DNA, 12 bp, Artificial Sequence
  Oligonucleotide primer for the detection of SNP TSC0039380
tttatattaggt

SEQ ID NO: 336488 - DNA, 12 bp, Artificial Sequence
  Oligonucleotide primer for the detection of SNP TSC0039380
ctcacaccaaac

SEQ ID NO: 336489 - DNA, 12 bp, Artificial Sequence
  Oligonucleotide primer for the detection of SNP TSC0039380
gtaacgtttttt

SEQ ID NO: 336490 - DNA, 12 bp, Artificial Sequence
  Oligonucleotide primer for the detection of SNP TSC0039381
tctccccaaatt

SEQ ID NO: 336491 - DNA, 12 bp, Artificial Sequence
  Oligonucleotide primer for the detection of SNP TSC0039381
aggagaattgtt

SEQ ID NO: 336492 - DNA, 12 bp, Artificial Sequence
  Oligonucleotide primer for the detection of SNP TSC0039381
aggagaatcgtt

SEQ ID NO: 336493 - DNA, 12 bp, Artificial Sequence
  Oligonucleotide primer for the detection of SNP TSC0039381
aaaaaaatcgct

SEQ ID NO: 336494 - DNA, 12 bp, Artificial Sequence
  Oligonucleotide primer for the detection of SNP TSC0039382
ggagataagata

SEQ ID NO: 336495 - DNA, 12 bp, Artificial Sequence
  Oligonucleotide primer for the detection of SNP TSC0039386
tttaaacacacc

SEQ ID NO: 336496 - DNA, 12 bp, Artificial Sequence
  Oligonucleotide primer for the detection of SNP TSC0039386
ggattgggggag

SEQ ID NO: 336497 - DNA, 12 bp, Artificial Sequence
  Oligonucleotide primer for the detection of SNP TSC0039386
ggatcgggggag

SEQ ID NO: 336498 - DNA, 12 bp, Artificial Sequence
  Oligonucleotide primer for the detection of SNP TSC0007934
aaaattacaaaa

SEQ ID NO: 336499 - DNA, 12 bp, Artificial Sequence
  Oligonucleotide primer for the detection of SNP TSC0007934
ttcacttcttcc

SEQ ID NO: 336500 - DNA, 12 bp, Artificial Sequence
  Oligonucleotide primer for the detection of SNP TSC0007934
tagagttgtaag

SEQ ID NO: 336501 - DNA, 12 bp, Artificial Sequence
  Oligonucleotide primer for the detection of SNP TSC0039387
aaaataaccact

SEQ ID NO: 336502 - DNA, 12 bp, Artificial Sequence
  Oligonucleotide primer for the detection of SNP TSC0039387
aaaataaccgct

SEQ ID NO: 336503 - DNA, 12 bp, Artificial Sequence
  Oligonucleotide primer for the detection of SNP TSC0039387
agaagttttata

SEQ ID NO: 336504 - DNA, 12 bp, Artificial Sequence
  Oligonucleotide primer for the detection of SNP TSC0039387
aaaaacttcata

SEQ ID NO: 336505 - DNA, 12 bp, Artificial Sequence
  Oligonucleotide primer for the detection of SNP TSC0039387
aaagtgattgtt

SEQ ID NO: 336506 - DNA, 12 bp, Artificial Sequence
  Oligonucleotide primer for the detection of SNP TSC0039387
aaagtgatcgtt

SEQ ID NO: 336507 - DNA, 12 bp, Artificial Sequence
  Oligonucleotide primer for the detection of SNP TSC0039388
atacccattaac

SEQ ID NO: 336508 - DNA, 12 bp, Artificial Sequence
  Oligonucleotide primer for the detection of SNP TSC0039388
gaatggaaagtg

SEQ ID NO: 336509 - DNA, 12 bp, Artificial Sequence
  Oligonucleotide primer for the detection of SNP TSC0039394
caaacaccatct

SEQ ID NO: 336510 - DNA, 12 bp, Artificial Sequence
  Oligonucleotide primer for the detection of SNP TSC0039394
ttttatagttaa

SEQ ID NO: 336511 - DNA, 12 bp, Artificial Sequence
  Oligonucleotide primer for the detection of SNP TSC0039394
tcccacaactaa

SEQ ID NO: 336512 - DNA, 12 bp, Artificial Sequence
  Oligonucleotide primer for the detection of SNP TSC0039394
taggtattattt

SEQ ID NO: 336513 - DNA, 12 bp, Artificial Sequence
  Oligonucleotide primer for the detection of SNP TSC0039395
aactactatcta

SEQ ID NO: 336514 - DNA, 12 bp, Artificial Sequence
  Oligonucleotide primer for the detection of SNP TSC0039395
ttgagataaaaa

SEQ ID NO: 336515 - DNA, 12 bp, Artificial Sequence
  Oligonucleotide primer for the detection of SNP TSC0039396
atccaactctac

SEQ ID NO: 336516 - DNA, 12 bp, Artificial Sequence
  Oligonucleotide primer for the detection of SNP TSC0039396
atttgatgaggt

SEQ ID NO: 336517 - DNA, 12 bp, Artificial Sequence
  Oligonucleotide primer for the detection of SNP TSC0039397
taaaattataac

SEQ ID NO: 336518 - DNA, 12 bp, Artificial Sequence
  Oligonucleotide primer for the detection of SNP TSC0039397
tatttattgatg

SEQ ID NO: 336519 - DNA, 12 bp, Artificial Sequence
  Oligonucleotide primer for the detection of SNP TSC0039398
aaacatattccc

SEQ ID NO: 336520 - DNA, 12 bp, Artificial Sequence
  Oligonucleotide primer for the detection of SNP TSC0039398
aatatatgtttg

SEQ ID NO: 336521 - DNA, 12 bp, Artificial Sequence
  Oligonucleotide primer for the detection of SNP TSC0010497
tagtttattgta

SEQ ID NO: 336522 - DNA, 12 bp, Artificial Sequence
  Oligonucleotide primer for the detection of SNP TSC0010497
caactcactaca

SEQ ID NO: 336523 - DNA, 12 bp, Artificial Sequence
  Oligonucleotide primer for the detection of SNP TSC0010497
aggaggtagaga

SEQ ID NO: 336524 - DNA, 12 bp, Artificial Sequence
  Oligonucleotide primer for the detection of SNP TSC0005072
tttattttaata

SEQ ID NO: 336525 - DNA, 12 bp, Artificial Sequence
  Oligonucleotide primer for the detection of SNP TSC0039401
ctatatcacaat

SEQ ID NO: 336526 - DNA, 12 bp, Artificial Sequence
  Oligonucleotide primer for the detection of SNP TSC0039401
aggaaatataaa

SEQ ID NO: 336527 - DNA, 12 bp, Artificial Sequence
  Oligonucleotide primer for the detection of SNP TSC0039402
acctaaacttca

SEQ ID NO: 336528 - DNA, 12 bp, Artificial Sequence
  Oligonucleotide primer for the detection of SNP TSC0039402
tttcattccctt

SEQ ID NO: 336529 - DNA, 12 bp, Artificial Sequence
  Oligonucleotide primer for the detection of SNP TSC0039402
atttgaatttta

SEQ ID NO: 336530 - DNA, 12 bp, Artificial Sequence
  Oligonucleotide primer for the detection of SNP TSC0039403
tatatattcctt

SEQ ID NO: 336531 - DNA, 12 bp, Artificial Sequence
  Oligonucleotide primer for the detection of SNP TSC0039404
tatatcaatcca

SEQ ID NO: 336532 - DNA, 12 bp, Artificial Sequence
  Oligonucleotide primer for the detection of SNP TSC0039404
agttttaaattt

SEQ ID NO: 336533 - DNA, 12 bp, Artificial Sequence
  Oligonucleotide primer for the detection of SNP TSC0039405
aaaataacctat

SEQ ID NO: 336534 - DNA, 12 bp, Artificial Sequence
  Oligonucleotide primer for the detection of SNP TSC0039405
aatttgaattaa

SEQ ID NO: 336535 - DNA, 12 bp, Artificial Sequence
  Oligonucleotide primer for the detection of SNP TSC0039406
cttcattaccat

SEQ ID NO: 336536 - DNA, 12 bp, Artificial Sequence
  Oligonucleotide primer for the detection of SNP TSC0039406
gtttagatttta

SEQ ID NO: 336537 - DNA, 12 bp, Artificial Sequence
  Oligonucleotide primer for the detection of SNP TSC0039406
attcaaatttta

SEQ ID NO: 336538 - DNA, 12 bp, Artificial Sequence
  Oligonucleotide primer for the detection of SNP TSC0039407
aaccaatttcca

SEQ ID NO: 336539 - DNA, 12 bp, Artificial Sequence
  Oligonucleotide primer for the detection of SNP TSC0039407
atgtagtatgta

SEQ ID NO: 336540 - DNA, 12 bp, Artificial Sequence
  Oligonucleotide primer for the detection of SNP TSC0039407
atacaacataca

SEQ ID NO: 336541 - DNA, 12 bp, Artificial Sequence
  Oligonucleotide primer for the detection of SNP TSC0039407
agttaattttta

SEQ ID NO: 336542 - DNA, 12 bp, Artificial Sequence
  Oligonucleotide primer for the detection of SNP TSC0039408
gaaagaaagttg

SEQ ID NO: 336543 - DNA, 12 bp, Artificial Sequence
  Oligonucleotide primer for the detection of SNP TSC0039409
tttcttcactta

SEQ ID NO: 336544 - DNA, 12 bp, Artificial Sequence
  Oligonucleotide primer for the detection of SNP TSC0039409
atttgttgtaag

SEQ ID NO: 336545 - DNA, 12 bp, Artificial Sequence
  Oligonucleotide primer for the detection of SNP TSC0039411
tttagttattag

SEQ ID NO: 336546 - DNA, 12 bp, Artificial Sequence
  Oligonucleotide primer for the detection of SNP TSC0039412
aacttataattt

SEQ ID NO: 336547 - DNA, 12 bp, Artificial Sequence
  Oligonucleotide primer for the detection of SNP TSC0039412
gaaaaataagag

SEQ ID NO: 336548 - DNA, 12 bp, Artificial Sequence
  Oligonucleotide primer for the detection of SNP TSC0039412
aatttatgattt

SEQ ID NO: 336549 - DNA, 12 bp, Artificial Sequence
  Oligonucleotide primer for the detection of SNP TSC0039418
attatattaaat

SEQ ID NO: 336550 - DNA, 12 bp, Artificial Sequence
  Oligonucleotide primer for the detection of SNP TSC0039418
attatattaaac

SEQ ID NO: 336551 - DNA, 12 bp, Artificial Sequence
  Oligonucleotide primer for the detection of SNP TSC0039418
attacactaaac

SEQ ID NO: 336552 - DNA, 12 bp, Artificial Sequence
  Oligonucleotide primer for the detection of SNP TSC0039418
ggggtggaagag

SEQ ID NO: 336553 - DNA, 12 bp, Artificial Sequence
  Oligonucleotide primer for the detection of SNP TSC0039419
aaacaactatat

SEQ ID NO: 336554 - DNA, 12 bp, Artificial Sequence
  Oligonucleotide primer for the detection of SNP TSC0039419
gaggtgatatag

SEQ ID NO: 336555 - DNA, 12 bp, Artificial Sequence
  Oligonucleotide primer for the detection of SNP TSC0039420
taaatcaaaatc

SEQ ID NO: 336556 - DNA, 12 bp, Artificial Sequence
  Oligonucleotide primer for the detection of SNP TSC0039420
gaattaaaattt

SEQ ID NO: 336557 - DNA, 12 bp, Artificial Sequence
  Oligonucleotide primer for the detection of SNP TSC0039421
gtttttaaaatt

SEQ ID NO: 336558 - DNA, 12 bp, Artificial Sequence
  Oligonucleotide primer for the detection of SNP TSC0039421
cttctaaaatta

SEQ ID NO: 336559 - DNA, 12 bp, Artificial Sequence
  Oligonucleotide primer for the detection of SNP TSC0039421
tttggaagagaa

SEQ ID NO: 336560 - DNA, 12 bp, Artificial Sequence
  Oligonucleotide primer for the detection of SNP TSC0039422
tgggaagtataa

SEQ ID NO: 336561 - DNA, 12 bp, Artificial Sequence
  Oligonucleotide primer for the detection of SNP TSC0039423
caaacaaaccac

SEQ ID NO: 336562 - DNA, 12 bp, Artificial Sequence
  Oligonucleotide primer for the detection of SNP TSC0039423
taggagggtttt

SEQ ID NO: 336563 - DNA, 12 bp, Artificial Sequence
  Oligonucleotide primer for the detection of SNP TSC0039423
caaaaaaacttt

SEQ ID NO: 336564 - DNA, 12 bp, Artificial Sequence
  Oligonucleotide primer for the detection of SNP TSC0039424
ttctaatcttac

SEQ ID NO: 336565 - DNA, 12 bp, Artificial Sequence
  Oligonucleotide primer for the detection of SNP TSC0039424
ttatagttttgg

SEQ ID NO: 336566 - DNA, 12 bp, Artificial Sequence
  Oligonucleotide primer for the detection of SNP TSC0039424
ttatagtttcgg

SEQ ID NO: 336567 - DNA, 12 bp, Artificial Sequence
  Oligonucleotide primer for the detection of SNP TSC0039424
tcacaatctcaa

SEQ ID NO: 336568 - DNA, 12 bp, Artificial Sequence
  Oligonucleotide primer for the detection of SNP TSC0039424
tcacaatctcga

SEQ ID NO: 336569 - DNA, 12 bp, Artificial Sequence
  Oligonucleotide primer for the detection of SNP TSC0039424
ttttaattttat

SEQ ID NO: 336570 - DNA, 12 bp, Artificial Sequence
  Oligonucleotide primer for the detection of SNP TSC0039425
tctcttaccctt

SEQ ID NO: 336571 - DNA, 12 bp, Artificial Sequence
  Oligonucleotide primer for the detection of SNP TSC0039425
gagtaaaagttt

SEQ ID NO: 336572 - DNA, 12 bp, Artificial Sequence
  Oligonucleotide primer for the detection of SNP TSC0039426
taataattctca

SEQ ID NO: 336573 - DNA, 12 bp, Artificial Sequence
  Oligonucleotide primer for the detection of SNP TSC0039426
taagtaaatagt

SEQ ID NO: 336574 - DNA, 12 bp, Artificial Sequence
  Oligonucleotide primer for the detection of SNP TSC0039426
taaacaaataac

SEQ ID NO: 336575 - DNA, 12 bp, Artificial Sequence
  Oligonucleotide primer for the detection of SNP TSC0039426
taataattttta

SEQ ID NO: 336576 - DNA, 12 bp, Artificial Sequence
  Oligonukleotid-Primer
ttgggaaaagaa

SEQ ID NO: 336577 - DNA, 12 bp, Artificial Sequence
  Oligonucleotide primer for the detection of SNP TSC0039428
ataaaacaacat

SEQ ID NO: 336578 - DNA, 12 bp, Artificial Sequence
  Oligonucleotide primer for the detection of SNP TSC0039432
atcccctaaaat

SEQ ID NO: 336579 - DNA, 12 bp, Artificial Sequence
  Oligonucleotide primer for the detection of SNP TSC0039432
tatttttttgtg

SEQ ID NO: 336580 - DNA, 12 bp, Artificial Sequence
  Oligonukleotid-Primer
tattttttcgtg

SEQ ID NO: 336581 - DNA, 12 bp, Artificial Sequence
  Oligonucleotide primer for the detection of SNP TSC0039433
acatctaacaca

SEQ ID NO: 336582 - DNA, 12 bp, Artificial Sequence
  Oligonucleotide primer for the detection of SNP TSC0039433
ttaagtattttt

SEQ ID NO: 336583 - DNA, 12 bp, Artificial Sequence
  Oligonucleotide primer for the detection of SNP TSC0039433
attaaacatctt

SEQ ID NO: 336584 - DNA, 12 bp, Artificial Sequence
  Oligonukleotid-Primer
tatgattataag

SEQ ID NO: 336585 - DNA, 12 bp, Artificial Sequence
  Oligonucleotide primer for the detection of SNP TSC0039435
tcttaattatac

SEQ ID NO: 336586 - DNA, 12 bp, Artificial Sequence
  Oligonucleotide primer for the detection of SNP TSC0039435
ttaaagtggata

SEQ ID NO: 336587 - DNA, 12 bp, Artificial Sequence
  Oligonucleotide primer for the detection of SNP TSC0005376
ataaataatttt

SEQ ID NO: 336588 - DNA, 12 bp, Artificial Sequence
  Oligonucleotide primer for the detection of SNP TSC0039436
aacccctacttt

SEQ ID NO: 336589 - DNA, 12 bp, Artificial Sequence
  Oligonucleotide primer for the detection of SNP TSC0039436
aaaggtagaata

SEQ ID NO: 336590 - DNA, 12 bp, Artificial Sequence
  Oligonucleotide primer for the detection of SNP TSC0039437
attattaacatc

SEQ ID NO: 336591 - DNA, 12 bp, Artificial Sequence
  Oligonucleotide primer for the detection of SNP TSC0039437
tagttattttga

SEQ ID NO: 336592 - DNA, 12 bp, Artificial Sequence
  Oligonucleotide primer for the detection of SNP TSC0039438
aataactatcat

SEQ ID NO: 336593 - DNA, 12 bp, Artificial Sequence
  Oligonucleotide primer for the detection of SNP TSC0039438
aataactatcgt

SEQ ID NO: 336594 - DNA, 12 bp, Artificial Sequence
  Oligonucleotide primer for the detection of SNP TSC0039439
tctcactaactt

SEQ ID NO: 336595 - DNA, 12 bp, Artificial Sequence
  Oligonucleotide primer for the detection of SNP TSC0039439
tgtatttgatta

SEQ ID NO: 336596 - DNA, 12 bp, Artificial Sequence
  Oligonukleotid-Primer
cgtatttgatta

SEQ ID NO: 336597 - DNA, 12 bp, Artificial Sequence
  Oligonucleotide primer for the detection of SNP TSC0039439
catatttaacca

SEQ ID NO: 336598 - DNA, 12 bp, Artificial Sequence
  Oligonucleotide primer for the detection of SNP TSC0039439
cgtatttaacca

SEQ ID NO: 336599 - DNA, 12 bp, Artificial Sequence
  Oligonucleotide primer for the detection of SNP TSC0039442
ctcaatctataa

SEQ ID NO: 336600 - DNA, 12 bp, Artificial Sequence
  Oligonucleotide primer for the detection of SNP TSC0039442
ctcgatctataa

SEQ ID NO: 336601 - DNA, 12 bp, Artificial Sequence
  Oligonucleotide primer for the detection of SNP TSC0039442
atgttttggttg

SEQ ID NO: 336602 - DNA, 12 bp, Artificial Sequence
  Oligonucleotide primer for the detection of SNP TSC0039442
atatcttaatta

SEQ ID NO: 336603 - DNA, 12 bp, Artificial Sequence
  Oligonucleotide primer for the detection of SNP TSC0039442
tttggtttgtaa

SEQ ID NO: 336604 - DNA, 12 bp, Artificial Sequence
  Oligonucleotide primer for the detection of SNP TSC0039442
ttcggtttgtaa

SEQ ID NO: 336605 - DNA, 12 bp, Artificial Sequence
  Oligonucleotide primer for the detection of SNP TSC0039443
tagggggaatgt

SEQ ID NO: 336606 - DNA, 12 bp, Artificial Sequence
  Oligonucleotide primer for the detection of SNP TSC0039444
acctttataatc

SEQ ID NO: 336607 - DNA, 12 bp, Artificial Sequence
  Oligonucleotide primer for the detection of SNP TSC0039444
gtaatattggaa

SEQ ID NO: 336608 - DNA, 12 bp, Artificial Sequence
  Oligonucleotide primer for the detection of SNP TSC0039445
actctttttctt

SEQ ID NO: 336609 - DNA, 12 bp, Artificial Sequence
  Oligonucleotide primer for the detection of SNP TSC0039445
agagagagagaa

SEQ ID NO: 336610 - DNA, 12 bp, Artificial Sequence
  Oligonucleotide primer for the detection of SNP TSC0039446
ttaaatgttgag

SEQ ID NO: 336611 - DNA, 12 bp, Artificial Sequence
  Oligonucleotide primer for the detection of SNP TSC0039447
caaattacaatt

SEQ ID NO: 336612 - DNA, 12 bp, Artificial Sequence
  Oligonucleotide primer for the detection of SNP TSC0039447
ggttaaataata

SEQ ID NO: 336613 - DNA, 12 bp, Artificial Sequence
  Oligonucleotide primer for the detection of SNP TSC0039447
taaattataatt

SEQ ID NO: 336614 - DNA, 12 bp, Artificial Sequence
  Oligonucleotide primer for the detection of SNP TSC0039448
tcccaccaaaca

SEQ ID NO: 336615 - DNA, 12 bp, Artificial Sequence
  Oligonucleotide primer for the detection of SNP TSC0039448
aagtagaagtat

SEQ ID NO: 336616 - DNA, 12 bp, Artificial Sequence
  Oligonucleotide primer for the detection of SNP TSC0039448
taaacaaaaaca

SEQ ID NO: 336617 - DNA, 12 bp, Artificial Sequence
  Oligonucleotide primer for the detection of SNP TSC0039448
tttttattagat

SEQ ID NO: 336618 - DNA, 12 bp, Artificial Sequence
  Oligonucleotide primer for the detection of SNP TSC0000982
aaaaaatgagtt

SEQ ID NO: 336619 - DNA, 12 bp, Artificial Sequence
  Oligonucleotide primer for the detection of SNP TSC0000982
aaaaaatgagtc

SEQ ID NO: 336620 - DNA, 12 bp, Artificial Sequence
  Oligonucleotide primer for the detection of SNP TSC0000983
atttcctaacct

SEQ ID NO: 336621 - DNA, 12 bp, Artificial Sequence
  Oligonucleotide primer for the detection of SNP TSC0000983
acaaataaatca

SEQ ID NO: 336622 - DNA, 12 bp, Artificial Sequence
  Oligonucleotide primer for the detection of SNP TSC0000983
acgaataaatca

SEQ ID NO: 336623 - DNA, 12 bp, Artificial Sequence
  Oligonucleotide primer for the detection of SNP TSC0001415
cattctctaaat

SEQ ID NO: 336624 - DNA, 12 bp, Artificial Sequence
  Oligonucleotide primer for the detection of SNP TSC0001415
gtgattaaaata

SEQ ID NO: 336625 - DNA, 12 bp, Artificial Sequence
  Oligonucleotide primer for the detection of SNP TSC0000830
acatttcctccc

SEQ ID NO: 336626 - DNA, 12 bp, Artificial Sequence
  Oligonucleotide primer for the detection of SNP TSC0000830
gcatttcctccc

SEQ ID NO: 336627 - DNA, 12 bp, Artificial Sequence
  Oligonucleotide primer for the detection of SNP TSC0000831
ccaccacaacca

SEQ ID NO: 336628 - DNA, 12 bp, Artificial Sequence
  Oligonucleotide primer for the detection of SNP TSC0000831
ccgccacaacca

SEQ ID NO: 336629 - DNA, 12 bp, Artificial Sequence
  Oligonucleotide primer for the detection of SNP TSC0000831
ggaatgatgtag

SEQ ID NO: 336630 - DNA, 12 bp, Artificial Sequence
  Oligonucleotide primer for the detection of SNP TSC0000831
ttgttatagtta

SEQ ID NO: 336631 - DNA, 12 bp, Artificial Sequence
  Oligonucleotide primer for the detection of SNP TSC0000831
tcgttatagtta

SEQ ID NO: 336632 - DNA, 12 bp, Artificial Sequence
  Oligonucleotide primer for the detection of SNP TSC0039451
tatattcatcca

SEQ ID NO: 336633 - DNA, 12 bp, Artificial Sequence
  Oligonucleotide primer for the detection of SNP TSC0039451
tatattcgtcca

SEQ ID NO: 336634 - DNA, 12 bp, Artificial Sequence
  Oligonucleotide primer for the detection of SNP TSC0039451
tttattagtagt

SEQ ID NO: 336635 - DNA, 12 bp, Artificial Sequence
  Oligonucleotide primer for the detection of SNP TSC0039451
tttattaacaat

SEQ ID NO: 336636 - DNA, 12 bp, Artificial Sequence
  Oligonucleotide primer for the detection of SNP TSC0039451
tgtatttgttta

SEQ ID NO: 336637 - DNA, 12 bp, Artificial Sequence
  Oligonucleotide primer for the detection of SNP TSC0039451
tgtattcgttta

SEQ ID NO: 336638 - DNA, 12 bp, Artificial Sequence
  Oligonucleotide primer for the detection of SNP TSC0039452
tcaactcactct

SEQ ID NO: 336639 - DNA, 12 bp, Artificial Sequence
  Oligonucleotide primer for the detection of SNP TSC0039452
atagtggtatag

SEQ ID NO: 336640 - DNA, 12 bp, Artificial Sequence
  Oligonucleotide primer for the detection of SNP TSC0000084
ttataaaataat

SEQ ID NO: 336641 - DNA, 12 bp, Artificial Sequence
  Oligonucleotide primer for the detection of SNP TSC0000084
ttcacaaaacaa

SEQ ID NO: 336642 - DNA, 12 bp, Artificial Sequence
  Oligonucleotide primer for the detection of SNP TSC0000085
ttaaaatccccc

SEQ ID NO: 336643 - DNA, 12 bp, Artificial Sequence
  Oligonucleotide primer for the detection of SNP TSC0000085
tatataataatg

SEQ ID NO: 336644 - DNA, 12 bp, Artificial Sequence
  Oligonucleotide primer for the detection of SNP TSC0001096
ggtaaatatttt

SEQ ID NO: 336645 - DNA, 12 bp, Artificial Sequence
  Oligonucleotide primer for the detection of SNP TSC0039453
ttatcataaatt

SEQ ID NO: 336646 - DNA, 12 bp, Artificial Sequence
  Oligonucleotide primer for the detection of SNP TSC0039453
agattaggtaaa

SEQ ID NO: 336647 - DNA, 12 bp, Artificial Sequence
  Oligonucleotide primer for the detection of SNP TSC0039455
cccttcctacct

SEQ ID NO: 336648 - DNA, 12 bp, Artificial Sequence
  Oligonucleotide primer for the detection of SNP TSC0039455
aaaggtagttta

SEQ ID NO: 336649 - DNA, 12 bp, Artificial Sequence
  Oligonucleotide primer for the detection of SNP TSC0039456
aagttaattaaa

SEQ ID NO: 336650 - DNA, 12 bp, Artificial Sequence
  Oligonucleotide primer for the detection of SNP TSC0039456
aaatcaattaaa

SEQ ID NO: 336651 - DNA, 12 bp, Artificial Sequence
  Oligonucleotide primer for the detection of SNP TSC0039457
tttgagtatttg

SEQ ID NO: 336652 - DNA, 12 bp, Artificial Sequence
  Oligonucleotide primer for the detection of SNP TSC0039457
cctaaatatcta

SEQ ID NO: 336653 - DNA, 12 bp, Artificial Sequence
  Oligonucleotide primer for the detection of SNP TSC0039457
tgtgtttgtggt

SEQ ID NO: 336654 - DNA, 12 bp, Artificial Sequence
  Oligonucleotide primer for the detection of SNP TSC0039458
aaatacttatac

SEQ ID NO: 336655 - DNA, 12 bp, Artificial Sequence
  Oligonucleotide primer for the detection of SNP TSC0039459
attaccactatt

SEQ ID NO: 336656 - DNA, 12 bp, Artificial Sequence
  Oligonucleotide primer for the detection of SNP TSC0039459
tgtttaaatggg

SEQ ID NO: 336657 - DNA, 12 bp, Artificial Sequence
  Oligonucleotide primer for the detection of SNP TSC0039460
gattttttaata

SEQ ID NO: 336658 - DNA, 12 bp, Artificial Sequence
  Oligonucleotide primer for the detection of SNP TSC0039461
aacaaaatttcg

SEQ ID NO: 336659 - DNA, 12 bp, Artificial Sequence
  Oligonucleotide primer for the detection of SNP TSC0039461
agtttgattagt

SEQ ID NO: 336660 - DNA, 12 bp, Artificial Sequence
  Oligonucleotide primer for the detection of SNP TSC0039461
aacctaaccaac

SEQ ID NO: 336661 - DNA, 12 bp, Artificial Sequence
  Oligonucleotide primer for the detection of SNP TSC0039461
gatagggttttg

SEQ ID NO: 336662 - DNA, 12 bp, Artificial Sequence
  Oligonucleotide primer for the detection of SNP TSC0039461
gatagggtttcg

SEQ ID NO: 336663 - DNA, 12 bp, Artificial Sequence
  Oligonucleotide primer for the detection of SNP TSC0001586
taaaattaacct

SEQ ID NO: 336664 - DNA, 12 bp, Artificial Sequence
  Oligonucleotide primer for the detection of SNP TSC0001586
aagaggtttatt

SEQ ID NO: 336665 - DNA, 12 bp, Artificial Sequence
  Oligonucleotide primer for the detection of SNP TSC0039462
cacccaaaaacc

SEQ ID NO: 336666 - DNA, 12 bp, Artificial Sequence
  Oligonucleotide primer for the detection of SNP TSC0039462
cgcccaaaaacc

SEQ ID NO: 336667 - DNA, 12 bp, Artificial Sequence
  Oligonucleotide primer for the detection of SNP TSC0039462
atgtttggggtt

SEQ ID NO: 336668 - DNA, 12 bp, Artificial Sequence
  Oligonucleotide primer for the detection of SNP TSC0039462
acgtttggggtt

SEQ ID NO: 336669 - DNA, 12 bp, Artificial Sequence
  Oligonucleotide primer for the detection of SNP TSC0039462
atgttcggggtt

SEQ ID NO: 336670 - DNA, 12 bp, Artificial Sequence
  Oligonucleotide primer for the detection of SNP TSC0039462
acgttcggggtt

SEQ ID NO: 336671 - DNA, 12 bp, Artificial Sequence
  Oligonucleotide primer for the detection of SNP TSC0039462
atgtttggggtc

SEQ ID NO: 336672 - DNA, 12 bp, Artificial Sequence
  Oligonucleotide primer for the detection of SNP TSC0039462
acgtttggggtc

SEQ ID NO: 336673 - DNA, 12 bp, Artificial Sequence
  Oligonucleotide primer for the detection of SNP TSC0039462
atgttcggggtc

SEQ ID NO: 336674 - DNA, 12 bp, Artificial Sequence
  Oligonucleotide primer for the detection of SNP TSC0039462
acgttcggggtc

SEQ ID NO: 336675 - DNA, 12 bp, Artificial Sequence
  Oligonucleotide primer for the detection of SNP TSC0039462
acactcaaaatc

SEQ ID NO: 336676 - DNA, 12 bp, Artificial Sequence
  Oligonucleotide primer for the detection of SNP TSC0039462
acactcgaaatc

SEQ ID NO: 336677 - DNA, 12 bp, Artificial Sequence
  Oligonucleotide primer for the detection of SNP TSC0039462
acgctcaaaatc

SEQ ID NO: 336678 - DNA, 12 bp, Artificial Sequence
  Oligonucleotide primer for the detection of SNP TSC0039462
acgctcgaaatc

SEQ ID NO: 336679 - DNA, 12 bp, Artificial Sequence
  Oligonucleotide primer for the detection of SNP TSC0039462
tgtttaggggtt

SEQ ID NO: 336680 - DNA, 12 bp, Artificial Sequence
  Oligonucleotide primer for the detection of SNP TSC0039462
cgtttaggggtt

SEQ ID NO: 336681 - DNA, 12 bp, Artificial Sequence
  Oligonucleotide primer for the detection of SNP TSC0039462
tgtttaggggtc

SEQ ID NO: 336682 - DNA, 12 bp, Artificial Sequence
  Oligonucleotide primer for the detection of SNP TSC0039462
cgtttaggggtc

SEQ ID NO: 336683 - DNA, 12 bp, Artificial Sequence
  Oligonucleotide primer for the detection of SNP TSC0000253
caccaaaaccac

SEQ ID NO: 336684 - DNA, 12 bp, Artificial Sequence
  Oligonucleotide primer for the detection of SNP TSC0000253
tttagattttaa

SEQ ID NO: 336685 - DNA, 12 bp, Artificial Sequence
  Oligonucleotide primer for the detection of SNP TSC0039463
cctaaaaacttc

SEQ ID NO: 336686 - DNA, 12 bp, Artificial Sequence
  Oligonucleotide primer for the detection of SNP TSC0039463
atgtaataagta

SEQ ID NO: 336687 - DNA, 12 bp, Artificial Sequence
  Oligonucleotide primer for the detection of SNP TSC0000661
atctcaaatatt

SEQ ID NO: 336688 - DNA, 12 bp, Artificial Sequence
  Oligonucleotide primer for the detection of SNP TSC0000661
gttgttataaag

SEQ ID NO: 336689 - DNA, 12 bp, Artificial Sequence
  Oligonucleotide primer for the detection of SNP TSC0000662
ctttatctccat

SEQ ID NO: 336690 - DNA, 12 bp, Artificial Sequence
  Oligonucleotide primer for the detection of SNP TSC0000662
gtttatatttta

SEQ ID NO: 336691 - DNA, 12 bp, Artificial Sequence
  Oligonucleotide primer for the detection of SNP TSC0039464
ttgataattttg

SEQ ID NO: 336692 - DNA, 12 bp, Artificial Sequence
  Oligonucleotide primer for the detection of SNP TSC0039465
tcaataaaatat

SEQ ID NO: 336693 - DNA, 12 bp, Artificial Sequence
  Oligonucleotide primer for the detection of SNP TSC0039466
tatcatataaat

SEQ ID NO: 336694 - DNA, 12 bp, Artificial Sequence
  Oligonucleotide primer for the detection of SNP TSC0039466
ataaattgtata

SEQ ID NO: 336695 - DNA, 12 bp, Artificial Sequence
  Oligonucleotide primer for the detection of SNP TSC0000647
taccaacaaaat

SEQ ID NO: 336696 - DNA, 12 bp, Artificial Sequence
  Oligonucleotide primer for the detection of SNP TSC0039468
tactaaccttcc

SEQ ID NO: 336697 - DNA, 12 bp, Artificial Sequence
  Oligonucleotide primer for the detection of SNP TSC0039468
atagtttttgga

SEQ ID NO: 336698 - DNA, 12 bp, Artificial Sequence
  Oligonucleotide primer for the detection of SNP TSC0039468
atagttttcgga

SEQ ID NO: 336699 - DNA, 12 bp, Artificial Sequence
  Oligonucleotide primer for the detection of SNP TSC0039468
acaactctcgaa

SEQ ID NO: 336700 - DNA, 12 bp, Artificial Sequence
  Oligonucleotide primer for the detection of SNP TSC0039469
aaaccaaataac

SEQ ID NO: 336701 - DNA, 12 bp, Artificial Sequence
  Oligonucleotide primer for the detection of SNP TSC0039469
tttttaattatg

SEQ ID NO: 336702 - DNA, 12 bp, Artificial Sequence
  Oligonucleotide primer for the detection of SNP TSC0039469
tttttaattacg

SEQ ID NO: 336703 - DNA, 12 bp, Artificial Sequence
  Oligonucleotide primer for the detection of SNP TSC0039473
taaaaattatat

SEQ ID NO: 336704 - DNA, 12 bp, Artificial Sequence
  Oligonucleotide primer for the detection of SNP TSC0039474
aataaaccctta

SEQ ID NO: 336705 - DNA, 12 bp, Artificial Sequence
  Oligonucleotide primer for the detection of SNP TSC0039474
gatttaagaata

SEQ ID NO: 336706 - DNA, 12 bp, Artificial Sequence
  Oligonucleotide primer for the detection of SNP TSC0039474
aactcaaaaata

SEQ ID NO: 336707 - DNA, 12 bp, Artificial Sequence
  Oligonucleotide primer for the detection of SNP TSC0039474
aatgagttttta

SEQ ID NO: 336708 - DNA, 12 bp, Artificial Sequence
  Oligonucleotide primer for the detection of SNP TSC0039479
aaaactccataa

SEQ ID NO: 336709 - DNA, 12 bp, Artificial Sequence
  Oligonukleotid-Primer
tataagtgaata

SEQ ID NO: 336710 - DNA, 12 bp, Artificial Sequence
  Oligonucleotide primer for the detection of SNP TSC0039479
cacaaataaaca

SEQ ID NO: 336711 - DNA, 12 bp, Artificial Sequence
  Oligonucleotide primer for the detection of SNP TSC0039479
tggggttttata

SEQ ID NO: 336712 - DNA, 12 bp, Artificial Sequence
  Oligonucleotide primer for the detection of SNP TSC0039480
cttatttattct

SEQ ID NO: 336713 - DNA, 12 bp, Artificial Sequence
  Oligonucleotide primer for the detection of SNP TSC0039480
ttaaaccatcca

SEQ ID NO: 336714 - DNA, 12 bp, Artificial Sequence
  Oligonucleotide primer for the detection of SNP TSC0039483
acaatcatatat

SEQ ID NO: 336715 - DNA, 12 bp, Artificial Sequence
  Oligonucleotide primer for the detection of SNP TSC0039483
acactttttttt

SEQ ID NO: 336716 - DNA, 12 bp, Artificial Sequence
  Oligonucleotide primer for the detection of SNP TSC0039483
ataattatgtat

SEQ ID NO: 336717 - DNA, 12 bp, Artificial Sequence
  Oligonucleotide primer for the detection of SNP TSC0039484
cttattaactat

SEQ ID NO: 336718 - DNA, 12 bp, Artificial Sequence
  Oligonucleotide primer for the detection of SNP TSC0039484
atattaagtttt

SEQ ID NO: 336719 - DNA, 12 bp, Artificial Sequence
  Oligonucleotide primer for the detection of SNP TSC0039484
aacatcaaattt

SEQ ID NO: 336720 - DNA, 12 bp, Artificial Sequence
  Oligonucleotide primer for the detection of SNP TSC0039484
tttattaattgt

SEQ ID NO: 336721 - DNA, 12 bp, Artificial Sequence
  Oligonucleotide primer for the detection of SNP TSC0008903
tctcaatataca

SEQ ID NO: 336722 - DNA, 12 bp, Artificial Sequence
  Oligonucleotide primer for the detection of SNP TSC0008903
agaaataatttt

SEQ ID NO: 336723 - DNA, 12 bp, Artificial Sequence
  Oligonucleotide primer for the detection of SNP TSC0008903
aaaaacaatttt

SEQ ID NO: 336724 - DNA, 12 bp, Artificial Sequence
  Oligonucleotide primer for the detection of SNP TSC0008903
ttttaatgtata

SEQ ID NO: 336725 - DNA, 12 bp, Artificial Sequence
  Oligonucleotide primer for the detection of SNP TSC0039486
actctctcattt

SEQ ID NO: 336726 - DNA, 12 bp, Artificial Sequence
  Oligonucleotide primer for the detection of SNP TSC0039486
tttgtcgtgaag

SEQ ID NO: 336727 - DNA, 12 bp, Artificial Sequence
  Oligonucleotide primer for the detection of SNP TSC0039487
tactataatttt

SEQ ID NO: 336728 - DNA, 12 bp, Artificial Sequence
  Oligonucleotide primer for the detection of SNP TSC0039487
taattttagtga

SEQ ID NO: 336729 - DNA, 12 bp, Artificial Sequence
  Oligonucleotide primer for the detection of SNP TSC0039487
taatcttaataa

SEQ ID NO: 336730 - DNA, 12 bp, Artificial Sequence
  Oligonucleotide primer for the detection of SNP TSC0039487
tattatagtttt

SEQ ID NO: 336731 - DNA, 12 bp, Artificial Sequence
  Oligonucleotide primer for the detection of SNP TSC0039488
ccataattactt

SEQ ID NO: 336732 - DNA, 12 bp, Artificial Sequence
  Oligonucleotide primer for the detection of SNP TSC0039488
ttatttaggtgg

SEQ ID NO: 336733 - DNA, 12 bp, Artificial Sequence
  Oligonucleotide primer for the detection of SNP TSC0006320
ttattctttaat

SEQ ID NO: 336734 - DNA, 12 bp, Artificial Sequence
  Oligonucleotide primer for the detection of SNP TSC0006320
attttttgtgga

SEQ ID NO: 336735 - DNA, 12 bp, Artificial Sequence
  Oligonucleotide primer for the detection of SNP TSC0039494
atcaatatccct

SEQ ID NO: 336736 - DNA, 12 bp, Artificial Sequence
  Oligonucleotide primer for the detection of SNP TSC0039494
attatatattat

SEQ ID NO: 336737 - DNA, 12 bp, Artificial Sequence
  Oligonucleotide primer for the detection of SNP TSC0039494
actacatattat

SEQ ID NO: 336738 - DNA, 12 bp, Artificial Sequence
  Oligonucleotide primer for the detection of SNP TSC0039494
attagtgttttt

SEQ ID NO: 336739 - DNA, 12 bp, Artificial Sequence
  Oligonucleotide primer for the detection of SNP TSC0039495
cacttctaaata

SEQ ID NO: 336740 - DNA, 12 bp, Artificial Sequence
  Oligonucleotide primer for the detection of SNP TSC0039495
atgttggaatat

SEQ ID NO: 336741 - DNA, 12 bp, Artificial Sequence
  Oligonucleotide primer for the detection of SNP TSC0039495
tatttttgggta

SEQ ID NO: 336742 - DNA, 12 bp, Artificial Sequence
  Oligonucleotide primer for the detection of SNP TSC0039496
attgtgtataag

SEQ ID NO: 336743 - DNA, 12 bp, Artificial Sequence
  Oligonucleotide primer for the detection of SNP TSC0039496
atcgtgtataag

SEQ ID NO: 336744 - DNA, 12 bp, Artificial Sequence
  Oligonucleotide primer for the detection of SNP TSC0039496
ccatatacaaaa

SEQ ID NO: 336745 - DNA, 12 bp, Artificial Sequence
  Oligonucleotide primer for the detection of SNP TSC0039496
ccgtatacaaaa

SEQ ID NO: 336746 - DNA, 12 bp, Artificial Sequence
  Oligonucleotide primer for the detection of SNP TSC0039496
gagaaaggggaa

SEQ ID NO: 336747 - DNA, 12 bp, Artificial Sequence
  Oligonucleotide primer for the detection of SNP TSC0039497
cttactaaaaaa

SEQ ID NO: 336748 - DNA, 12 bp, Artificial Sequence
  Oligonucleotide primer for the detection of SNP TSC0039497
ggtgttagaaat

SEQ ID NO: 336749 - DNA, 12 bp, Artificial Sequence
  Oligonucleotide primer for the detection of SNP TSC0039497
aataccaaaaac

SEQ ID NO: 336750 - DNA, 12 bp, Artificial Sequence
  Oligonucleotide primer for the detection of SNP TSC0039497
tttgttgagagg

SEQ ID NO: 336751 - DNA, 12 bp, Artificial Sequence
  Oligonucleotide primer for the detection of SNP TSC0039498
ctaaatacttaa

SEQ ID NO: 336752 - DNA, 12 bp, Artificial Sequence
  Oligonucleotide primer for the detection of SNP TSC0039498
ttataattagtg

SEQ ID NO: 336753 - DNA, 12 bp, Artificial Sequence
  Oligonucleotide primer for the detection of SNP TSC0039500
cacacaatttct

SEQ ID NO: 336754 - DNA, 12 bp, Artificial Sequence
  Oligonucleotide primer for the detection of SNP TSC0039500
atgattttttag

SEQ ID NO: 336755 - DNA, 12 bp, Artificial Sequence
  Oligonucleotide primer for the detection of SNP TSC0039500
ataacctctcaa

SEQ ID NO: 336756 - DNA, 12 bp, Artificial Sequence
  Oligonucleotide primer for the detection of SNP TSC0039500
tatatagttttt

SEQ ID NO: 336757 - DNA, 12 bp, Artificial Sequence
  Oligonucleotide primer for the detection of SNP TSC0039507
ctattcacacta

SEQ ID NO: 336758 - DNA, 12 bp, Artificial Sequence
  Oligonucleotide primer for the detection of SNP TSC0039507
tttcggggtttt

SEQ ID NO: 336759 - DNA, 12 bp, Artificial Sequence
  Oligonucleotide primer for the detection of SNP TSC0039507
cctcaaaacctc

SEQ ID NO: 336760 - DNA, 12 bp, Artificial Sequence
  Oligonucleotide primer for the detection of SNP TSC0039507
cctcgaaacctc

SEQ ID NO: 336761 - DNA, 12 bp, Artificial Sequence
  Oligonucleotide primer for the detection of SNP TSC0039507
tgtttatattgt

SEQ ID NO: 336762 - DNA, 12 bp, Artificial Sequence
  Oligonucleotide primer for the detection of SNP TSC0039507
tgtttatattgc

SEQ ID NO: 336763 - DNA, 12 bp, Artificial Sequence
  Oligonucleotide primer for the detection of SNP TSC0039508
ttaacccacacc

SEQ ID NO: 336764 - DNA, 12 bp, Artificial Sequence
  Oligonucleotide primer for the detection of SNP TSC0039508
tgttgttgagga

SEQ ID NO: 336765 - DNA, 12 bp, Artificial Sequence
  Oligonucleotide primer for the detection of SNP TSC0039509
caaaacaaacac

SEQ ID NO: 336766 - DNA, 12 bp, Artificial Sequence
  Oligonucleotide primer for the detection of SNP TSC0039509
attaatatttag

SEQ ID NO: 336767 - DNA, 12 bp, Artificial Sequence
  Oligonucleotide primer for the detection of SNP TSC0039510
tcactcctccca

SEQ ID NO: 336768 - DNA, 12 bp, Artificial Sequence
  Oligonucleotide primer for the detection of SNP TSC0039514
aaaaatatacct

SEQ ID NO: 336769 - DNA, 12 bp, Artificial Sequence
  Oligonucleotide primer for the detection of SNP TSC0039514
tatttatttgtg

SEQ ID NO: 336770 - DNA, 12 bp, Artificial Sequence
  Oligonucleotide primer for the detection of SNP TSC0039515
acctctaccttt

SEQ ID NO: 336771 - DNA, 12 bp, Artificial Sequence
  Oligonucleotide primer for the detection of SNP TSC0039515
gttatatatttg

SEQ ID NO: 336772 - DNA, 12 bp, Artificial Sequence
  Oligonucleotide primer for the detection of SNP TSC0039517
tctacaaaaaat

SEQ ID NO: 336773 - DNA, 12 bp, Artificial Sequence
  Oligonucleotide primer for the detection of SNP TSC0039517
atgtatagtaag

SEQ ID NO: 336774 - DNA, 12 bp, Artificial Sequence
  Oligonucleotide primer for the detection of SNP TSC0039518
tatttataaaaa

SEQ ID NO: 336775 - DNA, 12 bp, Artificial Sequence
  Oligonucleotide primer for the detection of SNP TSC0039518
tgtattgtaatt

SEQ ID NO: 336776 - DNA, 12 bp, Artificial Sequence
  Oligonucleotide primer for the detection of SNP TSC0039518
tgtatcgtaatt

SEQ ID NO: 336777 - DNA, 12 bp, Artificial Sequence
  Oligonucleotide primer for the detection of SNP TSC0039518
tgtattgtaatc

SEQ ID NO: 336778 - DNA, 12 bp, Artificial Sequence
  Oligonucleotide primer for the detection of SNP TSC0039518
tgtatcgtaatc

SEQ ID NO: 336779 - DNA, 12 bp, Artificial Sequence
  Oligonucleotide primer for the detection of SNP TSC0039518
tatatcacaatc

SEQ ID NO: 336780 - DNA, 12 bp, Artificial Sequence
  Oligonucleotide primer for the detection of SNP TSC0039518
tatatcgcaatc

SEQ ID NO: 336781 - DNA, 12 bp, Artificial Sequence
  Oligonucleotide primer for the detection of SNP TSC0039518
ttatttataaag

SEQ ID NO: 336782 - DNA, 12 bp, Artificial Sequence
  Oligonucleotide primer for the detection of SNP TSC0039519
tccttatctcat

SEQ ID NO: 336783 - DNA, 12 bp, Artificial Sequence
  Oligonucleotide primer for the detection of SNP TSC0039519
ttttttgagtta

SEQ ID NO: 336784 - DNA, 12 bp, Artificial Sequence
  Oligonucleotide primer for the detection of SNP TSC0039519
ctttctaaacta

SEQ ID NO: 336785 - DNA, 12 bp, Artificial Sequence
  Oligonucleotide primer for the detection of SNP TSC0006978
ttataaaactta

SEQ ID NO: 336786 - DNA, 12 bp, Artificial Sequence
  Oligonucleotide primer for the detection of SNP TSC0006978
tgtttttatggt

SEQ ID NO: 336787 - DNA, 12 bp, Artificial Sequence
  Oligonucleotide primer for the detection of SNP TSC0006978
ttgtgagattta

SEQ ID NO: 336788 - DNA, 12 bp, Artificial Sequence
  unsure (2): Oligonucleotide primer for the detection of SNP TSC0039520
anttttaatttc

SEQ ID NO: 336789 - DNA, 12 bp, Artificial Sequence
  Oligonucleotide primer for the detection of SNP TSC0039520
tttagagagagg

SEQ ID NO: 336790 - DNA, 12 bp, Artificial Sequence
  Oligonucleotide primer for the detection of SNP TSC0039522
tttaatctatac

SEQ ID NO: 336791 - DNA, 12 bp, Artificial Sequence
  Oligonucleotide primer for the detection of SNP TSC0039522
aatattaagaag

SEQ ID NO: 336792 - DNA, 12 bp, Artificial Sequence
  Oligonucleotide primer for the detection of SNP TSC0039523
tgtgtatatgta

SEQ ID NO: 336793 - DNA, 12 bp, Artificial Sequence
  Oligonucleotide primer for the detection of SNP TSC0039524
aactaaactaac

SEQ ID NO: 336794 - DNA, 12 bp, Artificial Sequence
  Oligonucleotide primer for the detection of SNP TSC0039524
tgtaagtgtggg

SEQ ID NO: 336795 - DNA, 12 bp, Artificial Sequence
  Oligonucleotide primer for the detection of SNP TSC0039524
tgtaagtgcggg

SEQ ID NO: 336796 - DNA, 12 bp, Artificial Sequence
  Oligonucleotide primer for the detection of SNP TSC0039524
tacaaatacaaa

SEQ ID NO: 336797 - DNA, 12 bp, Artificial Sequence
  Oligonucleotide primer for the detection of SNP TSC0039524
tacaaatacgaa

SEQ ID NO: 336798 - DNA, 12 bp, Artificial Sequence
  Oligonucleotide primer for the detection of SNP TSC0039524
agttgggttggt

SEQ ID NO: 336799 - DNA, 12 bp, Artificial Sequence
  Oligonucleotide primer for the detection of SNP TSC0039525
cttaaaactaat

SEQ ID NO: 336800 - DNA, 12 bp, Artificial Sequence
  Oligonucleotide primer for the detection of SNP TSC0039525
tttattgaattg

SEQ ID NO: 336801 - DNA, 12 bp, Artificial Sequence
  Oligonucleotide primer for the detection of SNP TSC0039525
tttattgaatcg

SEQ ID NO: 336802 - DNA, 12 bp, Artificial Sequence
  Oligonucleotide primer for the detection of SNP TSC0039525
ctcactaaatca

SEQ ID NO: 336803 - DNA, 12 bp, Artificial Sequence
  Oligonucleotide primer for the detection of SNP TSC0039525
ctcactaaatcg

SEQ ID NO: 336804 - DNA, 12 bp, Artificial Sequence
  Oligonucleotide primer for the detection of SNP TSC0039525
tttagggttggt

SEQ ID NO: 336805 - DNA, 12 bp, Artificial Sequence
  Oligonucleotide primer for the detection of SNP TSC0039529
tttatctttttt

SEQ ID NO: 336806 - DNA, 12 bp, Artificial Sequence
  Oligonucleotide primer for the detection of SNP TSC0039530
aacacaacacaa

SEQ ID NO: 336807 - DNA, 12 bp, Artificial Sequence
  Oligonucleotide primer for the detection of SNP TSC0039530
ttatggtagtag

SEQ ID NO: 336808 - DNA, 12 bp, Artificial Sequence
  Oligonucleotide primer for the detection of SNP TSC0039530
aagtatagtata

SEQ ID NO: 336809 - DNA, 12 bp, Artificial Sequence
  Oligonucleotide primer for the detection of SNP TSC0039531
atttcaaatccc

SEQ ID NO: 336810 - DNA, 12 bp, Artificial Sequence
  Oligonucleotide primer for the detection of SNP TSC0039531
gtttcaaatccc

SEQ ID NO: 336811 - DNA, 12 bp, Artificial Sequence
  Oligonucleotide primer for the detection of SNP TSC0039531
tggcgtttttta

SEQ ID NO: 336812 - DNA, 12 bp, Artificial Sequence
  Oligonucleotide primer for the detection of SNP TSC0039534
tatattaatttt

SEQ ID NO: 336813 - DNA, 12 bp, Artificial Sequence
  Oligonucleotide primer for the detection of SNP TSC0039534
ttatagttttta

SEQ ID NO: 336814 - DNA, 12 bp, Artificial Sequence
  Oligonucleotide primer for the detection of SNP TSC0039535
tcaataacctat

SEQ ID NO: 336815 - DNA, 12 bp, Artificial Sequence
  Oligonucleotide primer for the detection of SNP TSC0039535
ttttggttatta

SEQ ID NO: 336816 - DNA, 12 bp, Artificial Sequence
  Oligonucleotide primer for the detection of SNP TSC0039535
tcttaatcacca

SEQ ID NO: 336817 - DNA, 12 bp, Artificial Sequence
  Oligonucleotide primer for the detection of SNP TSC0039535
ttaatagtttat

SEQ ID NO: 336818 - DNA, 12 bp, Artificial Sequence
  Oligonucleotide primer for the detection of SNP TSC0008189
tataaaattaac

SEQ ID NO: 336819 - DNA, 12 bp, Artificial Sequence
  Oligonucleotide primer for the detection of SNP TSC0008189
ctcttatccttt

SEQ ID NO: 336820 - DNA, 12 bp, Artificial Sequence
  Oligonucleotide primer for the detection of SNP TSC0008189
tgtaaggttagt

SEQ ID NO: 336821 - DNA, 12 bp, Artificial Sequence
  Oligonucleotide primer for the detection of SNP TSC0039536
tttaacaaaaac

SEQ ID NO: 336822 - DNA, 12 bp, Artificial Sequence
  Oligonukleotid-Primer
atgtattgattg

SEQ ID NO: 336823 - DNA, 12 bp, Artificial Sequence
  Oligonucleotide primer for the detection of SNP TSC0039537
taataggtttta

SEQ ID NO: 336824 - DNA, 12 bp, Artificial Sequence
  Oligonucleotide primer for the detection of SNP TSC0039537
atgtttgttagt

SEQ ID NO: 336825 - DNA, 12 bp, Artificial Sequence
  Oligonucleotide primer for the detection of SNP TSC0039537
atgtttgttagc

SEQ ID NO: 336826 - DNA, 12 bp, Artificial Sequence
  Oligonukleotid-Primer
cattaaacacac

SEQ ID NO: 336827 - DNA, 12 bp, Artificial Sequence
  Oligonucleotide primer for the detection of SNP TSC0039538
cgttaaacacac

SEQ ID NO: 336828 - DNA, 12 bp, Artificial Sequence
  Oligonucleotide primer for the detection of SNP TSC0039539
ttcctaactatc

SEQ ID NO: 336829 - DNA, 12 bp, Artificial Sequence
  Oligonucleotide primer for the detection of SNP TSC0039539
gtttgtagaaag

SEQ ID NO: 336830 - DNA, 12 bp, Artificial Sequence
  Oligonukleotid-Primer
cttctacatcca

SEQ ID NO: 336831 - DNA, 12 bp, Artificial Sequence
  Oligonucleotide primer for the detection of SNP TSC0039540
agttagagtggt

SEQ ID NO: 336832 - DNA, 12 bp, Artificial Sequence
  Oligonucleotide primer for the detection of SNP TSC0039540
agttagagtggc

SEQ ID NO: 336833 - DNA, 12 bp, Artificial Sequence
  Oligonucleotide primer for the detection of SNP TSC0039540
aactaaaataac

SEQ ID NO: 336834 - DNA, 12 bp, Artificial Sequence
  Oligonucleotide primer for the detection of SNP TSC0039545
taaaatatattt

SEQ ID NO: 336835 - DNA, 12 bp, Artificial Sequence
  Oligonucleotide primer for the detection of SNP TSC0039545
ttatgattttta

SEQ ID NO: 336836 - DNA, 12 bp, Artificial Sequence
  Oligonucleotide primer for the detection of SNP TSC0039546
aataaaatctct

SEQ ID NO: 336837 - DNA, 12 bp, Artificial Sequence
  Oligonucleotide primer for the detection of SNP TSC0039546
taaattgatata

SEQ ID NO: 336838 - DNA, 12 bp, Artificial Sequence
  Oligonucleotide primer for the detection of SNP TSC0039547
actaatataatt

SEQ ID NO: 336839 - DNA, 12 bp, Artificial Sequence
  Oligonucleotide primer for the detection of SNP TSC0039548
ccaaaaaaaatt

SEQ ID NO: 336840 - DNA, 12 bp, Artificial Sequence
  Oligonucleotide primer for the detection of SNP TSC0039548
attttttgaaaa

SEQ ID NO: 336841 - DNA, 12 bp, Artificial Sequence
  Oligonucleotide primer for the detection of SNP TSC0039549
aaaacccttttc

SEQ ID NO: 336842 - DNA, 12 bp, Artificial Sequence
  Oligonucleotide primer for the detection of SNP TSC0039549
attattttagag

SEQ ID NO: 336843 - DNA, 12 bp, Artificial Sequence
  Oligonucleotide primer for the detection of SNP TSC0039549
atcatctcaaaa

SEQ ID NO: 336844 - DNA, 12 bp, Artificial Sequence
  Oligonucleotide primer for the detection of SNP TSC0039550
acatattaacat

SEQ ID NO: 336845 - DNA, 12 bp, Artificial Sequence
  Oligonucleotide primer for the detection of SNP TSC0039551
acactaactttt

SEQ ID NO: 336846 - DNA, 12 bp, Artificial Sequence
  Oligonucleotide primer for the detection of SNP TSC0039551
atagttatgtga

SEQ ID NO: 336847 - DNA, 12 bp, Artificial Sequence
  Oligonucleotide primer for the detection of SNP TSC0039551
ataaccatataa

SEQ ID NO: 336848 - DNA, 12 bp, Artificial Sequence
  Oligonucleotide primer for the detection of SNP TSC0039552
ccctctatttta

SEQ ID NO: 336849 - DNA, 12 bp, Artificial Sequence
  Oligonucleotide primer for the detection of SNP TSC0039552
atatgaatagtt

SEQ ID NO: 336850 - DNA, 12 bp, Artificial Sequence
  Oligonucleotide primer for the detection of SNP TSC0039552
atatgaatagtc

SEQ ID NO: 336851 - DNA, 12 bp, Artificial Sequence
  Oligonucleotide primer for the detection of SNP TSC0039552
atataaataatc

SEQ ID NO: 336852 - DNA, 12 bp, Artificial Sequence
  Oligonucleotide primer for the detection of SNP TSC0007848
ttggttggtttg

SEQ ID NO: 336853 - DNA, 12 bp, Artificial Sequence
  Oligonucleotide primer for the detection of SNP TSC0007633
aaaattaaatca

SEQ ID NO: 336854 - DNA, 12 bp, Artificial Sequence
  Oligonucleotide primer for the detection of SNP TSC0007633
aaagaatattat

SEQ ID NO: 336855 - DNA, 12 bp, Artificial Sequence
  Oligonucleotide primer for the detection of SNP TSC0007633
gagaattaaatt

SEQ ID NO: 336856 - DNA, 12 bp, Artificial Sequence
  Oligonucleotide primer for the detection of SNP TSC0039556
attaacaaattt

SEQ ID NO: 336857 - DNA, 12 bp, Artificial Sequence
  Oligonucleotide primer for the detection of SNP TSC0039556
cccttcttaaaa

SEQ ID NO: 336858 - DNA, 12 bp, Artificial Sequence
  Oligonucleotide primer for the detection of SNP TSC0039557
aaccataattta

SEQ ID NO: 336859 - DNA, 12 bp, Artificial Sequence
  Oligonucleotide primer for the detection of SNP TSC0039557
taacttcatttt

SEQ ID NO: 336860 - DNA, 12 bp, Artificial Sequence
  Oligonucleotide primer for the detection of SNP TSC0039557
aagttatggttt

SEQ ID NO: 336861 - DNA, 12 bp, Artificial Sequence
  Oligonucleotide primer for the detection of SNP TSC0039558
accaattaaccc

SEQ ID NO: 336862 - DNA, 12 bp, Artificial Sequence
  Oligonucleotide primer for the detection of SNP TSC0039559
ttaaaagttgta

SEQ ID NO: 336863 - DNA, 12 bp, Artificial Sequence
  Oligonucleotide primer for the detection of SNP TSC0039560
attctcttctct

SEQ ID NO: 336864 - DNA, 12 bp, Artificial Sequence
  Oligonucleotide primer for the detection of SNP TSC0039560
gtggggagatag

SEQ ID NO: 336865 - DNA, 12 bp, Artificial Sequence
  Oligonucleotide primer for the detection of SNP TSC0008260
attatctatata

SEQ ID NO: 336866 - DNA, 12 bp, Artificial Sequence
  Oligonucleotide primer for the detection of SNP TSC0008260
aatggggtagga

SEQ ID NO: 336867 - DNA, 12 bp, Artificial Sequence
  Oligonucleotide primer for the detection of SNP TSC0039563
cttaattacttt

SEQ ID NO: 336868 - DNA, 12 bp, Artificial Sequence
  Oligonucleotide primer for the detection of SNP TSC0039563
ttggaaaagaag

SEQ ID NO: 336869 - DNA, 12 bp, Artificial Sequence
  Oligonucleotide primer for the detection of SNP TSC0039564
attgattttaag

SEQ ID NO: 336870 - DNA, 12 bp, Artificial Sequence
  Oligonukleotid-Primer
tagagaaatgta

SEQ ID NO: 336871 - DNA, 12 bp, Artificial Sequence
  Oligonucleotide primer for the detection of SNP TSC0039568
ttttattataac

SEQ ID NO: 336872 - DNA, 12 bp, Artificial Sequence
  Oligonucleotide primer for the detection of SNP TSC0039568
tattttttagga

SEQ ID NO: 336873 - DNA, 12 bp, Artificial Sequence
  Oligonucleotide primer for the detection of SNP TSC0039569
gaattatgtaat

SEQ ID NO: 336874 - DNA, 12 bp, Artificial Sequence
  Oligonukleotid-Primer
atcatacaataa

SEQ ID NO: 336875 - DNA, 12 bp, Artificial Sequence
  Oligonucleotide primer for the detection of SNP TSC0039570
tatttatgtaat

SEQ ID NO: 336876 - DNA, 12 bp, Artificial Sequence
  Oligonucleotide primer for the detection of SNP TSC0039570
tacttatataat

SEQ ID NO: 336877 - DNA, 12 bp, Artificial Sequence
  Oligonucleotide primer for the detection of SNP TSC0039570
aataatgatttt

SEQ ID NO: 336878 - DNA, 12 bp, Artificial Sequence
  Oligonukleotid-Primer
atatctctttca

SEQ ID NO: 336879 - DNA, 12 bp, Artificial Sequence
  Oligonucleotide primer for the detection of SNP TSC0039571
tatttagagttt

SEQ ID NO: 336880 - DNA, 12 bp, Artificial Sequence
  Oligonucleotide primer for the detection of SNP TSC0039571
atttaaaatcta

SEQ ID NO: 336881 - DNA, 12 bp, Artificial Sequence
  Oligonucleotide primer for the detection of SNP TSC0039571
atgtttttttta

SEQ ID NO: 336882 - DNA, 12 bp, Artificial Sequence
  Oligonucleotide primer for the detection of SNP TSC0010657
atcaatttaatt

SEQ ID NO: 336883 - DNA, 12 bp, Artificial Sequence
  Oligonucleotide primer for the detection of SNP TSC0010657
taaaattattga

SEQ ID NO: 336884 - DNA, 12 bp, Artificial Sequence
  Oligonucleotide primer for the detection of SNP TSC0039572
aataacactata

SEQ ID NO: 336885 - DNA, 12 bp, Artificial Sequence
  Oligonucleotide primer for the detection of SNP TSC0039572
ggttatttttgt

SEQ ID NO: 336886 - DNA, 12 bp, Artificial Sequence
  Oligonucleotide primer for the detection of SNP TSC0039572
aactacccctat

SEQ ID NO: 336887 - DNA, 12 bp, Artificial Sequence
  Oligonucleotide primer for the detection of SNP TSC0039572
ggtgatattgta

SEQ ID NO: 336888 - DNA, 12 bp, Artificial Sequence
  Oligonucleotide primer for the detection of SNP TSC0039573
tataaataatca

SEQ ID NO: 336889 - DNA, 12 bp, Artificial Sequence
  Oligonucleotide primer for the detection of SNP TSC0039573
cctaacatatca

SEQ ID NO: 336890 - DNA, 12 bp, Artificial Sequence
  Oligonucleotide primer for the detection of SNP TSC0039573
tataaatgatta

SEQ ID NO: 336891 - DNA, 12 bp, Artificial Sequence
  Oligonucleotide primer for the detection of SNP TSC0039574
ataaatactata

SEQ ID NO: 336892 - DNA, 12 bp, Artificial Sequence
  Oligonucleotide primer for the detection of SNP TSC0039574
tctttcttttca

SEQ ID NO: 336893 - DNA, 12 bp, Artificial Sequence
  Oligonucleotide primer for the detection of SNP TSC0039574
ataagtgttgta

SEQ ID NO: 336894 - DNA, 12 bp, Artificial Sequence
  Oligonucleotide primer for the detection of SNP TSC0007116
aaatttaatact

SEQ ID NO: 336895 - DNA, 12 bp, Artificial Sequence
  Oligonucleotide primer for the detection of SNP TSC0007116
gggtaatttaag

SEQ ID NO: 336896 - DNA, 12 bp, Artificial Sequence
  Oligonucleotide primer for the detection of SNP TSC0039576
aaatttcctctt

SEQ ID NO: 336897 - DNA, 12 bp, Artificial Sequence
  Oligonucleotide primer for the detection of SNP TSC0039576
tttatgttgaag

SEQ ID NO: 336898 - DNA, 12 bp, Artificial Sequence
  Oligonucleotide primer for the detection of SNP TSC0039576
tttacgttgaag

SEQ ID NO: 336899 - DNA, 12 bp, Artificial Sequence
  Oligonucleotide primer for the detection of SNP TSC0039577
actcctaatacc

SEQ ID NO: 336900 - DNA, 12 bp, Artificial Sequence
  Oligonucleotide primer for the detection of SNP TSC0039578
ttctcctaattc

SEQ ID NO: 336901 - DNA, 12 bp, Artificial Sequence
  Oligonucleotide primer for the detection of SNP TSC0039578
gagtgtgttaat

SEQ ID NO: 336902 - DNA, 12 bp, Artificial Sequence
  Oligonucleotide primer for the detection of SNP TSC0039578
gagtgtgttaac

SEQ ID NO: 336903 - DNA, 12 bp, Artificial Sequence
  Oligonucleotide primer for the detection of SNP TSC0039579
cctctaactact

SEQ ID NO: 336904 - DNA, 12 bp, Artificial Sequence
  Oligonucleotide primer for the detection of SNP TSC0039579
tcttatttaaat

SEQ ID NO: 336905 - DNA, 12 bp, Artificial Sequence
  Oligonucleotide primer for the detection of SNP TSC0039580
ctaaaaaaattc

SEQ ID NO: 336906 - DNA, 12 bp, Artificial Sequence
  Oligonucleotide primer for the detection of SNP TSC0039580
ttatagatttga

SEQ ID NO: 336907 - DNA, 12 bp, Artificial Sequence
  Oligonucleotide primer for the detection of SNP TSC0039580
ttataaatctaa

SEQ ID NO: 336908 - DNA, 12 bp, Artificial Sequence
  Oligonucleotide primer for the detection of SNP TSC0039580
ttaagagaattt

SEQ ID NO: 336909 - DNA, 12 bp, Artificial Sequence
  Oligonucleotide primer for the detection of SNP TSC0039581
ttttggttgtat

SEQ ID NO: 336910 - DNA, 12 bp, Artificial Sequence
  Oligonucleotide primer for the detection of SNP TSC0039581
ttttggttgtac

SEQ ID NO: 336911 - DNA, 12 bp, Artificial Sequence
  Oligonucleotide primer for the detection of SNP TSC0039581
cttttaactata

SEQ ID NO: 336912 - DNA, 12 bp, Artificial Sequence
  Oligonucleotide primer for the detection of SNP TSC0039581
atgtatttttgt

SEQ ID NO: 336913 - DNA, 12 bp, Artificial Sequence
  Oligonucleotide primer for the detection of SNP TSC0039586
aaattcttaccc

SEQ ID NO: 336914 - DNA, 12 bp, Artificial Sequence
  Oligonucleotide primer for the detection of SNP TSC0039586
taggttatgtgg

SEQ ID NO: 336915 - DNA, 12 bp, Artificial Sequence
  Oligonucleotide primer for the detection of SNP TSC0039586
taggttatgcgg

SEQ ID NO: 336916 - DNA, 12 bp, Artificial Sequence
  Oligonucleotide primer for the detection of SNP TSC0039587
aattaaaatcac

SEQ ID NO: 336917 - DNA, 12 bp, Artificial Sequence
  Oligonucleotide primer for the detection of SNP TSC0039587
ttagttatgtat

SEQ ID NO: 336918 - DNA, 12 bp, Artificial Sequence
  Oligonucleotide primer for the detection of SNP TSC0039587
tcaactatacat

SEQ ID NO: 336919 - DNA, 12 bp, Artificial Sequence
  Oligonucleotide primer for the detection of SNP TSC0039587
gattggagttat

SEQ ID NO: 336920 - DNA, 12 bp, Artificial Sequence
  Oligonucleotide primer for the detection of SNP TSC0039592
ttttatctataa

SEQ ID NO: 336921 - DNA, 12 bp, Artificial Sequence
  Oligonucleotide primer for the detection of SNP TSC0039592
tttagaaatgtt

SEQ ID NO: 336922 - DNA, 12 bp, Artificial Sequence
  Oligonucleotide primer for the detection of SNP TSC0039592
cccaaaaatacc

SEQ ID NO: 336923 - DNA, 12 bp, Artificial Sequence
  Oligonucleotide primer for the detection of SNP TSC0039600
aattagatagta

SEQ ID NO: 336924 - DNA, 12 bp, Artificial Sequence
  Oligonucleotide primer for the detection of SNP TSC0039601
actctacctaaa

SEQ ID NO: 336925 - DNA, 12 bp, Artificial Sequence
  Oligonucleotide primer for the detection of SNP TSC0039601
gctctacctaaa

SEQ ID NO: 336926 - DNA, 12 bp, Artificial Sequence
  Oligonucleotide primer for the detection of SNP TSC0039601
atctcctatacc

SEQ ID NO: 336927 - DNA, 12 bp, Artificial Sequence
  Oligonucleotide primer for the detection of SNP TSC0039601
gttttgtttgga

SEQ ID NO: 336928 - DNA, 12 bp, Artificial Sequence
  Oligonucleotide primer for the detection of SNP TSC0039602
tatatttatggt

SEQ ID NO: 336929 - DNA, 12 bp, Artificial Sequence
  Oligonucleotide primer for the detection of SNP TSC0039602
tacattcataat

SEQ ID NO: 336930 - DNA, 12 bp, Artificial Sequence
  Oligonucleotide primer for the detection of SNP TSC0039602
gttttttgggga

SEQ ID NO: 336931 - DNA, 12 bp, Artificial Sequence
  Oligonucleotide primer for the detection of SNP TSC0039603
ccttacaaaata

SEQ ID NO: 336932 - DNA, 12 bp, Artificial Sequence
  Oligonucleotide primer for the detection of SNP TSC0039603
ccttacgaaata

SEQ ID NO: 336933 - DNA, 12 bp, Artificial Sequence
  Oligonucleotide primer for the detection of SNP TSC0039603
ttaatgataggt

SEQ ID NO: 336934 - DNA, 12 bp, Artificial Sequence
  Oligonucleotide primer for the detection of SNP TSC0039603
tcaataataaac

SEQ ID NO: 336935 - DNA, 12 bp, Artificial Sequence
  Oligonucleotide primer for the detection of SNP TSC0039603
ttttatggggtg

SEQ ID NO: 336936 - DNA, 12 bp, Artificial Sequence
  Oligonucleotide primer for the detection of SNP TSC0039603
ttttacggggtg

SEQ ID NO: 336937 - DNA, 12 bp, Artificial Sequence
  Oligonucleotide primer for the detection of SNP TSC0039604
tctaaactcctt

SEQ ID NO: 336938 - DNA, 12 bp, Artificial Sequence
  Oligonucleotide primer for the detection of SNP TSC0039604
atgataggtata

SEQ ID NO: 336939 - DNA, 12 bp, Artificial Sequence
  Oligonucleotide primer for the detection of SNP TSC0039604
ataataaacaca

SEQ ID NO: 336940 - DNA, 12 bp, Artificial Sequence
  Oligonucleotide primer for the detection of SNP TSC0039605
tagttttataga

SEQ ID NO: 336941 - DNA, 12 bp, Artificial Sequence
  Oligonucleotide primer for the detection of SNP TSC0039606
ttattctttata

SEQ ID NO: 336942 - DNA, 12 bp, Artificial Sequence
  Oligonucleotide primer for the detection of SNP TSC0039606
taatgtaagatt

SEQ ID NO: 336943 - DNA, 12 bp, Artificial Sequence
  Oligonucleotide primer for the detection of SNP TSC0039606
atacaaaactaa

SEQ ID NO: 336944 - DNA, 12 bp, Artificial Sequence
  Oligonucleotide primer for the detection of SNP TSC0039606
tttgttttttgt

SEQ ID NO: 336945 - DNA, 12 bp, Artificial Sequence
  Oligonucleotide primer for the detection of SNP TSC0039607
tcttcctaattt

SEQ ID NO: 336946 - DNA, 12 bp, Artificial Sequence
  Oligonucleotide primer for the detection of SNP TSC0039607
tgggtaagagaa

SEQ ID NO: 336947 - DNA, 12 bp, Artificial Sequence
  Oligonucleotide primer for the detection of SNP TSC0039608
accaaataattt

SEQ ID NO: 336948 - DNA, 12 bp, Artificial Sequence
  Oligonucleotide primer for the detection of SNP TSC0039608
ataataatatgg

SEQ ID NO: 336949 - DNA, 12 bp, Artificial Sequence
  Oligonucleotide primer for the detection of SNP TSC0039608
gttaaataattt

SEQ ID NO: 336950 - DNA, 12 bp, Artificial Sequence
  Oligonucleotide primer for the detection of SNP TSC0039610
acaaacattcac

SEQ ID NO: 336951 - DNA, 12 bp, Artificial Sequence
  Oligonucleotide primer for the detection of SNP TSC0039610
acaaacgttcac

SEQ ID NO: 336952 - DNA, 12 bp, Artificial Sequence
  Oligonucleotide primer for the detection of SNP TSC0039610
gtattaattgtg

SEQ ID NO: 336953 - DNA, 12 bp, Artificial Sequence
  Oligonucleotide primer for the detection of SNP TSC0039611
tgttatataagg

SEQ ID NO: 336954 - DNA, 12 bp, Artificial Sequence
  Oligonucleotide primer for the detection of SNP TSC0039612
aaatacaccaaa

SEQ ID NO: 336955 - DNA, 12 bp, Artificial Sequence
  Oligonucleotide primer for the detection of SNP TSC0039612
tccaacctaccc

SEQ ID NO: 336956 - DNA, 12 bp, Artificial Sequence
  Oligonucleotide primer for the detection of SNP TSC0039612
gagtatattagg

SEQ ID NO: 336957 - DNA, 12 bp, Artificial Sequence
  Oligonucleotide primer for the detection of SNP TSC0039613
aaatcactataa

SEQ ID NO: 336958 - DNA, 12 bp, Artificial Sequence
  Oligonucleotide primer for the detection of SNP TSC0039613
cctccttactac

SEQ ID NO: 336959 - DNA, 12 bp, Artificial Sequence
  Oligonucleotide primer for the detection of SNP TSC0039613
aggttattgtgg

SEQ ID NO: 336960 - DNA, 12 bp, Artificial Sequence
  Oligonucleotide primer for the detection of SNP TSC0039614
ctttctattaac

SEQ ID NO: 336961 - DNA, 12 bp, Artificial Sequence
  Oligonucleotide primer for the detection of SNP TSC0039614
aggtttggttgg

SEQ ID NO: 336962 - DNA, 12 bp, Artificial Sequence
  Oligonucleotide primer for the detection of SNP TSC0039614
aaatctaactaa

SEQ ID NO: 336963 - DNA, 12 bp, Artificial Sequence
  Oligonucleotide primer for the detection of SNP TSC0039616
aaaataacctca

SEQ ID NO: 336964 - DNA, 12 bp, Artificial Sequence
  Oligonucleotide primer for the detection of SNP TSC0039616
tttaatttttgg

SEQ ID NO: 336965 - DNA, 12 bp, Artificial Sequence
  Oligonucleotide primer for the detection of SNP TSC0039616
ctcaacccttaa

SEQ ID NO: 336966 - DNA, 12 bp, Artificial Sequence
  Oligonucleotide primer for the detection of SNP TSC0039616
gaaatgatttta

SEQ ID NO: 336967 - DNA, 12 bp, Artificial Sequence
  Oligonucleotide primer for the detection of SNP TSC0006660
gtattagtaaaa

SEQ ID NO: 336968 - DNA, 12 bp, Artificial Sequence
  Oligonucleotide primer for the detection of SNP TSC0039617
atcaataaacac

SEQ ID NO: 336969 - DNA, 12 bp, Artificial Sequence
  Oligonucleotide primer for the detection of SNP TSC0039618
ttattttttagt

SEQ ID NO: 336970 - DNA, 12 bp, Artificial Sequence
  Oligonucleotide primer for the detection of SNP TSC0039618
tcatctcctaac

SEQ ID NO: 336971 - DNA, 12 bp, Artificial Sequence
  Oligonucleotide primer for the detection of SNP TSC0039618
gggagggatttg

SEQ ID NO: 336972 - DNA, 12 bp, Artificial Sequence
  Oligonucleotide primer for the detection of SNP TSC0039619
aataacctcaca

SEQ ID NO: 336973 - DNA, 12 bp, Artificial Sequence
  Oligonucleotide primer for the detection of SNP TSC0039619
tattggttgagt

SEQ ID NO: 336974 - DNA, 12 bp, Artificial Sequence
  Oligonucleotide primer for the detection of SNP TSC0039619
tattggtcgagt

SEQ ID NO: 336975 - DNA, 12 bp, Artificial Sequence
  Oligonucleotide primer for the detection of SNP TSC0039619
attaatcaaata

SEQ ID NO: 336976 - DNA, 12 bp, Artificial Sequence
  Oligonucleotide primer for the detection of SNP TSC0039619
attaatcgaata

SEQ ID NO: 336977 - DNA, 12 bp, Artificial Sequence
  Oligonucleotide primer for the detection of SNP TSC0039620
cattataacctc

SEQ ID NO: 336978 - DNA, 12 bp, Artificial Sequence
  Oligonucleotide primer for the detection of SNP TSC0039620
cgttataacctc

SEQ ID NO: 336979 - DNA, 12 bp, Artificial Sequence
  Oligonukleotid-Primer
tatggtatagga

SEQ ID NO: 336980 - DNA, 12 bp, Artificial Sequence
  Oligonucleotide primer for the detection of SNP TSC0039621
aaatccccctta

SEQ ID NO: 336981 - DNA, 12 bp, Artificial Sequence
  Oligonucleotide primer for the detection of SNP TSC0039621
acattatttata

SEQ ID NO: 336982 - DNA, 12 bp, Artificial Sequence
  Oligonucleotide primer for the detection of SNP TSC0039621
aaattttttttg

SEQ ID NO: 336983 - DNA, 12 bp, Artificial Sequence
  Oligonukleotid-Primer
atggaaaatttg

SEQ ID NO: 336984 - DNA, 12 bp, Artificial Sequence
  Oligonucleotide primer for the detection of SNP TSC0006845
taatttttctat

SEQ ID NO: 336985 - DNA, 12 bp, Artificial Sequence
  Oligonucleotide primer for the detection of SNP TSC0006845
ttaaatttaagg

SEQ ID NO: 336986 - DNA, 12 bp, Artificial Sequence
  Oligonucleotide primer for the detection of SNP TSC0006846
ggtaatatttat

SEQ ID NO: 336987 - DNA, 12 bp, Artificial Sequence
  Oligonukleotid-Primer
aataacatttac

SEQ ID NO: 336988 - DNA, 12 bp, Artificial Sequence
  Oligonucleotide primer for the detection of SNP TSC0006847
ttaatcaaaaac

SEQ ID NO: 336989 - DNA, 12 bp, Artificial Sequence
  Oligonucleotide primer for the detection of SNP TSC0006847
attctaactaaa

SEQ ID NO: 336990 - DNA, 12 bp, Artificial Sequence
  Oligonucleotide primer for the detection of SNP TSC0006847
ttaattagagat

SEQ ID NO: 336991 - DNA, 12 bp, Artificial Sequence
  Oligonukleotid-Primer
tatccctaccca

SEQ ID NO: 336992 - DNA, 12 bp, Artificial Sequence
  Oligonucleotide primer for the detection of SNP TSC0039630
atattttaatat

SEQ ID NO: 336993 - DNA, 12 bp, Artificial Sequence
  Oligonucleotide primer for the detection of SNP TSC0039630
acattttaatat

SEQ ID NO: 336994 - DNA, 12 bp, Artificial Sequence
  Oligonucleotide primer for the detection of SNP TSC0039631
ttaaaaacaacc

SEQ ID NO: 336995 - DNA, 12 bp, Artificial Sequence
  Oligonucleotide primer for the detection of SNP TSC0039631
atttaagatttg

SEQ ID NO: 336996 - DNA, 12 bp, Artificial Sequence
  Oligonucleotide primer for the detection of SNP TSC0039632
ctttttcaaaaa

SEQ ID NO: 336997 - DNA, 12 bp, Artificial Sequence
  Oligonucleotide primer for the detection of SNP TSC0039632
ttatttgtttga

SEQ ID NO: 336998 - DNA, 12 bp, Artificial Sequence
  Oligonucleotide primer for the detection of SNP TSC0039633
aaaccacatatt

SEQ ID NO: 336999 - DNA, 12 bp, Artificial Sequence
  Oligonucleotide primer for the detection of SNP TSC0039633
gtaaaggggaaa

SEQ ID NO: 337000 - DNA, 12 bp, Artificial Sequence
  Oligonucleotide primer for the detection of SNP TSC0039634
aatgtgttgtat

SEQ ID NO: 337001 - DNA, 12 bp, Artificial Sequence
  Oligonucleotide primer for the detection of SNP TSC0039634
aatatactatat

SEQ ID NO: 337002 - DNA, 12 bp, Artificial Sequence
  Oligonucleotide primer for the detection of SNP TSC0039634
gatagataaaaa

SEQ ID NO: 337003 - DNA, 12 bp, Artificial Sequence
  Oligonucleotide primer for the detection of SNP TSC0039635
ttctacctatct

SEQ ID NO: 337004 - DNA, 12 bp, Artificial Sequence
  Oligonucleotide primer for the detection of SNP TSC0039635
aaacttacttct

SEQ ID NO: 337005 - DNA, 12 bp, Artificial Sequence
  Oligonucleotide primer for the detection of SNP TSC0007727
actatactcact

SEQ ID NO: 337006 - DNA, 12 bp, Artificial Sequence
  Oligonucleotide primer for the detection of SNP TSC0007727
agtattgaaata

SEQ ID NO: 337007 - DNA, 12 bp, Artificial Sequence
  Oligonucleotide primer for the detection of SNP TSC0039636
ccaacctcacca

SEQ ID NO: 337008 - DNA, 12 bp, Artificial Sequence
  Oligonucleotide primer for the detection of SNP TSC0039636
ccaacctcgcca

SEQ ID NO: 337009 - DNA, 12 bp, Artificial Sequence
  Oligonucleotide primer for the detection of SNP TSC0039636
tttgggaggggt

SEQ ID NO: 337010 - DNA, 12 bp, Artificial Sequence
  Oligonucleotide primer for the detection of SNP TSC0039636
tttagtttcgtt

SEQ ID NO: 337011 - DNA, 12 bp, Artificial Sequence
  Oligonucleotide primer for the detection of SNP TSC0039640
ctaactccaacc

SEQ ID NO: 337012 - DNA, 12 bp, Artificial Sequence
  Oligonucleotide primer for the detection of SNP TSC0039640
ctacccctctca

SEQ ID NO: 337013 - DNA, 12 bp, Artificial Sequence
  Oligonucleotide primer for the detection of SNP TSC0039640
tggttttagttt

SEQ ID NO: 337014 - DNA, 12 bp, Artificial Sequence
  Oligonucleotide primer for the detection of SNP TSC0039641
aaattaaccctc

SEQ ID NO: 337015 - DNA, 12 bp, Artificial Sequence
  Oligonucleotide primer for the detection of SNP TSC0039641
tttcgtttttgt

SEQ ID NO: 337016 - DNA, 12 bp, Artificial Sequence
  Oligonucleotide primer for the detection of SNP TSC0039641
tttcgttttcgt

SEQ ID NO: 337017 - DNA, 12 bp, Artificial Sequence
  Oligonucleotide primer for the detection of SNP TSC0039641
attctcacaaaa

SEQ ID NO: 337018 - DNA, 12 bp, Artificial Sequence
  Oligonucleotide primer for the detection of SNP TSC0039641
attctcgcaaaa

SEQ ID NO: 337019 - DNA, 12 bp, Artificial Sequence
  Oligonucleotide primer for the detection of SNP TSC0039641
gttctcacaaaa

SEQ ID NO: 337020 - DNA, 12 bp, Artificial Sequence
  Oligonucleotide primer for the detection of SNP TSC0039641
gttctcgcaaaa

SEQ ID NO: 337021 - DNA, 12 bp, Artificial Sequence
  Oligonucleotide primer for the detection of SNP TSC0039641
agattggttttt

SEQ ID NO: 337022 - DNA, 12 bp, Artificial Sequence
  Oligonucleotide primer for the detection of SNP TSC0039641
agattggttttc

SEQ ID NO: 337023 - DNA, 12 bp, Artificial Sequence
  Oligonucleotide primer for the detection of SNP TSC0039642
caataaccactt

SEQ ID NO: 337024 - DNA, 12 bp, Artificial Sequence
  Oligonucleotide primer for the detection of SNP TSC0039642
ggatggttggta

SEQ ID NO: 337025 - DNA, 12 bp, Artificial Sequence
  Oligonucleotide primer for the detection of SNP TSC0039643
tcataaaacatt

SEQ ID NO: 337026 - DNA, 12 bp, Artificial Sequence
  Oligonucleotide primer for the detection of SNP TSC0039644
aaactcccaaca

SEQ ID NO: 337027 - DNA, 12 bp, Artificial Sequence
  Oligonucleotide primer for the detection of SNP TSC0039644
tctaattttcat

SEQ ID NO: 337028 - DNA, 12 bp, Artificial Sequence
  Oligonucleotide primer for the detection of SNP TSC0039644
gagtttttagta

SEQ ID NO: 337029 - DNA, 12 bp, Artificial Sequence
  Oligonucleotide primer for the detection of SNP TSC0039646
tctctatttcta

SEQ ID NO: 337030 - DNA, 12 bp, Artificial Sequence
  Oligonucleotide primer for the detection of SNP TSC0039646
tttttcgtattt

SEQ ID NO: 337031 - DNA, 12 bp, Artificial Sequence
  Oligonucleotide primer for the detection of SNP TSC0039646
ccccccacatct

SEQ ID NO: 337032 - DNA, 12 bp, Artificial Sequence
  Oligonucleotide primer for the detection of SNP TSC0039646
ccccccgcatct

SEQ ID NO: 337033 - DNA, 12 bp, Artificial Sequence
  Oligonucleotide primer for the detection of SNP TSC0039647
ttattctaacct

SEQ ID NO: 337034 - DNA, 12 bp, Artificial Sequence
  Oligonucleotide primer for the detection of SNP TSC0039647
agttataaatat

SEQ ID NO: 337035 - DNA, 12 bp, Artificial Sequence
  Oligonucleotide primer for the detection of SNP TSC0039647
aattacaaatat

SEQ ID NO: 337036 - DNA, 12 bp, Artificial Sequence
  Oligonucleotide primer for the detection of SNP TSC0039648
cacctaaataac

SEQ ID NO: 337037 - DNA, 12 bp, Artificial Sequence
  Oligonucleotide primer for the detection of SNP TSC0039648
atattaaggggg

SEQ ID NO: 337038 - DNA, 12 bp, Artificial Sequence
  Oligonucleotide primer for the detection of SNP TSC0039648
tatttgaataat

SEQ ID NO: 337039 - DNA, 12 bp, Artificial Sequence
  Oligonucleotide primer for the detection of SNP TSC0039649
gtagtggtataa

SEQ ID NO: 337040 - DNA, 12 bp, Artificial Sequence
  Oligonucleotide primer for the detection of SNP TSC0039649
gtggtagtgagt

SEQ ID NO: 337041 - DNA, 12 bp, Artificial Sequence
  Oligonucleotide primer for the detection of SNP TSC0007700
atatattattct

SEQ ID NO: 337042 - DNA, 12 bp, Artificial Sequence
  Oligonucleotide primer for the detection of SNP TSC0007700
tgaggatagtga

SEQ ID NO: 337043 - DNA, 12 bp, Artificial Sequence
  unsure (4): Oligonucleotide primer for the detection of SNP TSC0039650
catnttatttat

SEQ ID NO: 337044 - DNA, 12 bp, Artificial Sequence
  Oligonucleotide primer for the detection of SNP TSC0039650
tatgtaagtgta

SEQ ID NO: 337045 - DNA, 12 bp, Artificial Sequence
  Oligonucleotide primer for the detection of SNP TSC0039651
accacctccaaa

SEQ ID NO: 337046 - DNA, 12 bp, Artificial Sequence
  Oligonucleotide primer for the detection of SNP TSC0039651
ttccccaaaccc

SEQ ID NO: 337047 - DNA, 12 bp, Artificial Sequence
  Oligonucleotide primer for the detection of SNP TSC0039651
gttatttttaag

SEQ ID NO: 337048 - DNA, 12 bp, Artificial Sequence
  Oligonucleotide primer for the detection of SNP TSC0039654
aaaatcacaaat

SEQ ID NO: 337049 - DNA, 12 bp, Artificial Sequence
  Oligonucleotide primer for the detection of SNP TSC0039654
aaaatcacgaat

SEQ ID NO: 337050 - DNA, 12 bp, Artificial Sequence
  Oligonucleotide primer for the detection of SNP TSC0039654
gtagattggtga

SEQ ID NO: 337051 - DNA, 12 bp, Artificial Sequence
  Oligonucleotide primer for the detection of SNP TSC0039655
cttctaaaattt

SEQ ID NO: 337052 - DNA, 12 bp, Artificial Sequence
  Oligonucleotide primer for the detection of SNP TSC0039656
aaatacactttt

SEQ ID NO: 337053 - DNA, 12 bp, Artificial Sequence
  Oligonucleotide primer for the detection of SNP TSC0039656
aggatgtttgga

SEQ ID NO: 337054 - DNA, 12 bp, Artificial Sequence
  Oligonucleotide primer for the detection of SNP TSC0039657
atcacttacaaa

SEQ ID NO: 337055 - DNA, 12 bp, Artificial Sequence
  Oligonucleotide primer for the detection of SNP TSC0039657
cttattaaaata

SEQ ID NO: 337056 - DNA, 12 bp, Artificial Sequence
  Oligonucleotide primer for the detection of SNP TSC0039657
agttatttatag

SEQ ID NO: 337057 - DNA, 12 bp, Artificial Sequence
  Oligonucleotide primer for the detection of SNP TSC0039658
atttttgaatag

SEQ ID NO: 337058 - DNA, 12 bp, Artificial Sequence
  Oligonucleotide primer for the detection of SNP TSC0039658
tttttaaataaa

SEQ ID NO: 337059 - DNA, 12 bp, Artificial Sequence
  Oligonucleotide primer for the detection of SNP TSC0039658
aggaagggttaa

SEQ ID NO: 337060 - DNA, 12 bp, Artificial Sequence
  Oligonucleotide primer for the detection of SNP TSC0039659
atttaaaatttt

SEQ ID NO: 337061 - DNA, 12 bp, Artificial Sequence
  Oligonucleotide primer for the detection of SNP TSC0039659
ttatgagagtaa

SEQ ID NO: 337062 - DNA, 12 bp, Artificial Sequence
  Oligonucleotide primer for the detection of SNP TSC0006653
aatctatttatc

SEQ ID NO: 337063 - DNA, 12 bp, Artificial Sequence
  Oligonucleotide primer for the detection of SNP TSC0006653
ttagtaaaataa

SEQ ID NO: 337064 - DNA, 12 bp, Artificial Sequence
  Oligonucleotide primer for the detection of SNP TSC0006653
ttaacaaaacaa

SEQ ID NO: 337065 - DNA, 12 bp, Artificial Sequence
  Oligonucleotide primer for the detection of SNP TSC0006653
gatttatttgtt

SEQ ID NO: 337066 - DNA, 12 bp, Artificial Sequence
  Oligonucleotide primer for the detection of SNP TSC0039660
ttttttgtattg

SEQ ID NO: 337067 - DNA, 12 bp, Artificial Sequence
  Oligonucleotide primer for the detection of SNP TSC0008761
taaaatcatcat

SEQ ID NO: 337068 - DNA, 12 bp, Artificial Sequence
  Oligonucleotide primer for the detection of SNP TSC0008761
tagattgaggaa

SEQ ID NO: 337069 - DNA, 12 bp, Artificial Sequence
  Oligonucleotide primer for the detection of SNP TSC0039661
tatattaactaa

SEQ ID NO: 337070 - DNA, 12 bp, Artificial Sequence
  Oligonucleotide primer for the detection of SNP TSC0039661
tctctttctttt

SEQ ID NO: 337071 - DNA, 12 bp, Artificial Sequence
  Oligonucleotide primer for the detection of SNP TSC0039661
tgtattagttaa

SEQ ID NO: 337072 - DNA, 12 bp, Artificial Sequence
  Oligonucleotide primer for the detection of SNP TSC0039667
ctactcatttat

SEQ ID NO: 337073 - DNA, 12 bp, Artificial Sequence
  Oligonucleotide primer for the detection of SNP TSC0039667
tatgaaataata

SEQ ID NO: 337074 - DNA, 12 bp, Artificial Sequence
  Oligonucleotide primer for the detection of SNP TSC0039668
atatgtattata

SEQ ID NO: 337075 - DNA, 12 bp, Artificial Sequence
  Oligonucleotide primer for the detection of SNP TSC0039668
catacattacaa

SEQ ID NO: 337076 - DNA, 12 bp, Artificial Sequence
  Oligonucleotide primer for the detection of SNP TSC0039668
gagattttagtc

SEQ ID NO: 337077 - DNA, 12 bp, Artificial Sequence
  Oligonucleotide primer for the detection of SNP TSC0007056
ttgaattgggtg

SEQ ID NO: 337078 - DNA, 12 bp, Artificial Sequence
  Oligonucleotide primer for the detection of SNP TSC0007057
tttgagataaat

SEQ ID NO: 337079 - DNA, 12 bp, Artificial Sequence
  Oligonucleotide primer for the detection of SNP TSC0007057
ttaaaaaattta

SEQ ID NO: 337080 - DNA, 12 bp, Artificial Sequence
  Oligonucleotide primer for the detection of SNP TSC0000276
tctatctctctc

SEQ ID NO: 337081 - DNA, 12 bp, Artificial Sequence
  Oligonucleotide primer for the detection of SNP TSC0007219
ttttattaaata

SEQ ID NO: 337082 - DNA, 12 bp, Artificial Sequence
  Oligonucleotide primer for the detection of SNP TSC0007220
aactacaaatta

SEQ ID NO: 337083 - DNA, 12 bp, Artificial Sequence
  Oligonucleotide primer for the detection of SNP TSC0007220
gactacaaatta

SEQ ID NO: 337084 - DNA, 12 bp, Artificial Sequence
  Oligonucleotide primer for the detection of SNP TSC0007220
gttggttaatat

SEQ ID NO: 337085 - DNA, 12 bp, Artificial Sequence
  Oligonucleotide primer for the detection of SNP TSC0007220
gtcggttaatat

SEQ ID NO: 337086 - DNA, 12 bp, Artificial Sequence
  Oligonucleotide primer for the detection of SNP TSC0007220
tatcaatcaaca

SEQ ID NO: 337087 - DNA, 12 bp, Artificial Sequence
  Oligonucleotide primer for the detection of SNP TSC0007220
tatcgatcaaca

SEQ ID NO: 337088 - DNA, 12 bp, Artificial Sequence
  Oligonucleotide primer for the detection of SNP TSC0007220
gttgtaggttgt

SEQ ID NO: 337089 - DNA, 12 bp, Artificial Sequence
  Oligonucleotide primer for the detection of SNP TSC0007220
gttgtaggttgc

SEQ ID NO: 337090 - DNA, 12 bp, Artificial Sequence
  Oligonucleotide primer for the detection of SNP TSC0039670
tttgtttggata

SEQ ID NO: 337091 - DNA, 12 bp, Artificial Sequence
  Oligonucleotide primer for the detection of SNP TSC0039672
atttaataccat

SEQ ID NO: 337092 - DNA, 12 bp, Artificial Sequence
  Oligonucleotide primer for the detection of SNP TSC0039673
atatacttttca

SEQ ID NO: 337093 - DNA, 12 bp, Artificial Sequence
  Oligonucleotide primer for the detection of SNP TSC0039673
tatggaatatat

SEQ ID NO: 337094 - DNA, 12 bp, Artificial Sequence
  Oligonucleotide primer for the detection of SNP TSC0039673
tataaaatacat

SEQ ID NO: 337095 - DNA, 12 bp, Artificial Sequence
  Oligonucleotide primer for the detection of SNP TSC0039673
atgtgtttttta

SEQ ID NO: 337096 - DNA, 12 bp, Artificial Sequence
  Oligonucleotide primer for the detection of SNP TSC0039675
tatctataaata

SEQ ID NO: 337097 - DNA, 12 bp, Artificial Sequence
  Oligonucleotide primer for the detection of SNP TSC0039675
ttttatgattaa

SEQ ID NO: 337098 - DNA, 12 bp, Artificial Sequence
  Oligonucleotide primer for the detection of SNP TSC0039675
ccctataattaa

SEQ ID NO: 337099 - DNA, 12 bp, Artificial Sequence
  Oligonucleotide primer for the detection of SNP TSC0039675
tatttgtagata

SEQ ID NO: 337100 - DNA, 12 bp, Artificial Sequence
  Oligonucleotide primer for the detection of SNP TSC0039677
aatcttaatatt

SEQ ID NO: 337101 - DNA, 12 bp, Artificial Sequence
  Oligonucleotide primer for the detection of SNP TSC0039677
acttattttata

SEQ ID NO: 337102 - DNA, 12 bp, Artificial Sequence
  Oligonucleotide primer for the detection of SNP TSC0039677
attttaatgttt

SEQ ID NO: 337103 - DNA, 12 bp, Artificial Sequence
  Oligonucleotide primer for the detection of SNP TSC0039677
attttaatgttc

SEQ ID NO: 337104 - DNA, 12 bp, Artificial Sequence
  Oligonucleotide primer for the detection of SNP TSC0039678
tataatataata

SEQ ID NO: 337105 - DNA, 12 bp, Artificial Sequence
  Oligonucleotide primer for the detection of SNP TSC0039678
atggttttattt

SEQ ID NO: 337106 - DNA, 12 bp, Artificial Sequence
  Oligonucleotide primer for the detection of SNP TSC0039678
ataacctcattt

SEQ ID NO: 337107 - DNA, 12 bp, Artificial Sequence
  Oligonucleotide primer for the detection of SNP TSC0039678
tatgatgtgata

SEQ ID NO: 337108 - DNA, 12 bp, Artificial Sequence
  Oligonucleotide primer for the detection of SNP TSC0039679
taacaaacaatt

SEQ ID NO: 337109 - DNA, 12 bp, Artificial Sequence
  Oligonucleotide primer for the detection of SNP TSC0039679
tggtttttggta

SEQ ID NO: 337110 - DNA, 12 bp, Artificial Sequence
  Oligonucleotide primer for the detection of SNP TSC0039680
taatttccaaat

SEQ ID NO: 337111 - DNA, 12 bp, Artificial Sequence
  Oligonucleotide primer for the detection of SNP TSC0039680
acctcttattac

SEQ ID NO: 337112 - DNA, 12 bp, Artificial Sequence
  Oligonucleotide primer for the detection of SNP TSC0039680
taatttttaggt

SEQ ID NO: 337113 - DNA, 12 bp, Artificial Sequence
  Oligonucleotide primer for the detection of SNP TSC0039681
aaatatatcaat

SEQ ID NO: 337114 - DNA, 12 bp, Artificial Sequence
  Oligonucleotide primer for the detection of SNP TSC0039683
tttttatcaatc

SEQ ID NO: 337115 - DNA, 12 bp, Artificial Sequence
  Oligonucleotide primer for the detection of SNP TSC0039684
ggttagattaat

SEQ ID NO: 337116 - DNA, 12 bp, Artificial Sequence
  Oligonucleotide primer for the detection of SNP TSC0039684
aaccaaaccaac

SEQ ID NO: 337117 - DNA, 12 bp, Artificial Sequence
  Oligonucleotide primer for the detection of SNP TSC0039684
aaaatgagagag

SEQ ID NO: 337118 - DNA, 12 bp, Artificial Sequence
  Oligonucleotide primer for the detection of SNP TSC0039689
tttggtattatt

SEQ ID NO: 337119 - DNA, 12 bp, Artificial Sequence
  Oligonucleotide primer for the detection of SNP TSC0039689
cttaacattact

SEQ ID NO: 337120 - DNA, 12 bp, Artificial Sequence
  Oligonucleotide primer for the detection of SNP TSC0039689
ttagaaaggaga

SEQ ID NO: 337121 - DNA, 12 bp, Artificial Sequence
  Oligonucleotide primer for the detection of SNP TSC0039690
ataaactaacaa

SEQ ID NO: 337122 - DNA, 12 bp, Artificial Sequence
  Oligonucleotide primer for the detection of SNP TSC0039690
ataaactaacga

SEQ ID NO: 337123 - DNA, 12 bp, Artificial Sequence
  Oligonucleotide primer for the detection of SNP TSC0039690
gttgaaagtgga

SEQ ID NO: 337124 - DNA, 12 bp, Artificial Sequence
  Oligonucleotide primer for the detection of SNP TSC0039690
gaatggattaat

SEQ ID NO: 337125 - DNA, 12 bp, Artificial Sequence
  Oligonucleotide primer for the detection of SNP TSC0039690
gaatggattaac

SEQ ID NO: 337126 - DNA, 12 bp, Artificial Sequence
  Oligonucleotide primer for the detection of SNP TSC0039691
ctacacttacat

SEQ ID NO: 337127 - DNA, 12 bp, Artificial Sequence
  Oligonucleotide primer for the detection of SNP TSC0039691
ccttccaaaaaa

SEQ ID NO: 337128 - DNA, 12 bp, Artificial Sequence
  Oligonukleotid-Primer
ttgtatttgtat

SEQ ID NO: 337129 - DNA, 12 bp, Artificial Sequence
  Oligonucleotide primer for the detection of SNP TSC0039692
catacatttcat

SEQ ID NO: 337130 - DNA, 12 bp, Artificial Sequence
  Oligonucleotide primer for the detection of SNP TSC0039692
catacatttcgt

SEQ ID NO: 337131 - DNA, 12 bp, Artificial Sequence
  Oligonucleotide primer for the detection of SNP TSC0039692
tggtagaaatag

SEQ ID NO: 337132 - DNA, 12 bp, Artificial Sequence
  Oligonucleotide primer for the detection of SNP TSC0039692
taacaaaaataa

SEQ ID NO: 337133 - DNA, 12 bp, Artificial Sequence
  Oligonucleotide primer for the detection of SNP TSC0039692
tatatattttgt

SEQ ID NO: 337134 - DNA, 12 bp, Artificial Sequence
  Oligonucleotide primer for the detection of SNP TSC0039692
tatatatttcgt

SEQ ID NO: 337135 - DNA, 12 bp, Artificial Sequence
  Oligonucleotide primer for the detection of SNP TSC0039693
taacaaaacatc

SEQ ID NO: 337136 - DNA, 12 bp, Artificial Sequence
  Oligonucleotide primer for the detection of SNP TSC0039693
ccatactataaa

SEQ ID NO: 337137 - DNA, 12 bp, Artificial Sequence
  Oligonucleotide primer for the detection of SNP TSC0039693
tgataggatatt

SEQ ID NO: 337138 - DNA, 12 bp, Artificial Sequence
  Oligonucleotide primer for the detection of SNP TSC0039694
aatatcctatca

SEQ ID NO: 337139 - DNA, 12 bp, Artificial Sequence
  Oligonucleotide primer for the detection of SNP TSC0039694
taataaggtttg

SEQ ID NO: 337140 - DNA, 12 bp, Artificial Sequence
  Oligonucleotide primer for the detection of SNP TSC0039695
atcaataaaact

SEQ ID NO: 337141 - DNA, 12 bp, Artificial Sequence
  Oligonucleotide primer for the detection of SNP TSC0039695
atcgataaaact

SEQ ID NO: 337142 - DNA, 12 bp, Artificial Sequence
  Oligonucleotide primer for the detection of SNP TSC0039695
tgattttataaa

SEQ ID NO: 337143 - DNA, 12 bp, Artificial Sequence
  Oligonucleotide primer for the detection of SNP TSC0039695
cgattttataaa

SEQ ID NO: 337144 - DNA, 12 bp, Artificial Sequence
  Oligonucleotide primer for the detection of SNP TSC0039696
catcataaaaac

SEQ ID NO: 337145 - DNA, 12 bp, Artificial Sequence
  Oligonucleotide primer for the detection of SNP TSC0039696
catcgtaaaaac

SEQ ID NO: 337146 - DNA, 12 bp, Artificial Sequence
  Oligonucleotide primer for the detection of SNP TSC0039696
ttgttttgttgg

SEQ ID NO: 337147 - DNA, 12 bp, Artificial Sequence
  Oligonucleotide primer for the detection of SNP TSC0039697
ctctcaaaaaaa

SEQ ID NO: 337148 - DNA, 12 bp, Artificial Sequence
  Oligonucleotide primer for the detection of SNP TSC0039698
ggagtgtattgg

SEQ ID NO: 337149 - DNA, 12 bp, Artificial Sequence
  Oligonucleotide primer for the detection of SNP TSC0039699
caaaaatcaacc

SEQ ID NO: 337150 - DNA, 12 bp, Artificial Sequence
  Oligonucleotide primer for the detection of SNP TSC0039700
cattactccaca

SEQ ID NO: 337151 - DNA, 12 bp, Artificial Sequence
  Oligonucleotide primer for the detection of SNP TSC0039700
tttttaaggtgt

SEQ ID NO: 337152 - DNA, 12 bp, Artificial Sequence
  Oligonucleotide primer for the detection of SNP TSC0039701
atattttattac

SEQ ID NO: 337153 - DNA, 12 bp, Artificial Sequence
  Oligonucleotide primer for the detection of SNP TSC0039702
acctaaaattta

SEQ ID NO: 337154 - DNA, 12 bp, Artificial Sequence
  Oligonucleotide primer for the detection of SNP TSC0039702
taccttttttaa

SEQ ID NO: 337155 - DNA, 12 bp, Artificial Sequence
  Oligonucleotide primer for the detection of SNP TSC0039702
ttgaaatttatt

SEQ ID NO: 337156 - DNA, 12 bp, Artificial Sequence
  Oligonucleotide primer for the detection of SNP TSC0039705
atataaatggtt

SEQ ID NO: 337157 - DNA, 12 bp, Artificial Sequence
  Oligonucleotide primer for the detection of SNP TSC0039705
atataaatggtc

SEQ ID NO: 337158 - DNA, 12 bp, Artificial Sequence
  Oligonucleotide primer for the detection of SNP TSC0039705
atataaataacc

SEQ ID NO: 337159 - DNA, 12 bp, Artificial Sequence
  Oligonucleotide primer for the detection of SNP TSC0039705
ttttaagttgta

SEQ ID NO: 337160 - DNA, 12 bp, Artificial Sequence
  Oligonucleotide primer for the detection of SNP TSC0039708
tacaactatcaa

SEQ ID NO: 337161 - DNA, 12 bp, Artificial Sequence
  Oligonucleotide primer for the detection of SNP TSC0039708
ttttttatgttt

SEQ ID NO: 337162 - DNA, 12 bp, Artificial Sequence
  Oligonucleotide primer for the detection of SNP TSC0039708
tcctcatattca

SEQ ID NO: 337163 - DNA, 12 bp, Artificial Sequence
  Oligonucleotide primer for the detection of SNP TSC0039708
tgtagttattaa

SEQ ID NO: 337164 - DNA, 12 bp, Artificial Sequence
  Oligonucleotide primer for the detection of SNP TSC0039709
ataaaatgtata

SEQ ID NO: 337165 - DNA, 12 bp, Artificial Sequence
  Oligonucleotide primer for the detection of SNP TSC0039710
actacataccaa

SEQ ID NO: 337166 - DNA, 12 bp, Artificial Sequence
  Oligonucleotide primer for the detection of SNP TSC0039710
tctattacccaa

SEQ ID NO: 337167 - DNA, 12 bp, Artificial Sequence
  Oligonucleotide primer for the detection of SNP TSC0039711
ttaaaaactata

SEQ ID NO: 337168 - DNA, 12 bp, Artificial Sequence
  Oligonucleotide primer for the detection of SNP TSC0039711
atgtaaattttt

SEQ ID NO: 337169 - DNA, 12 bp, Artificial Sequence
  Oligonucleotide primer for the detection of SNP TSC0039711
ttttatataaac

SEQ ID NO: 337170 - DNA, 12 bp, Artificial Sequence
  Oligonucleotide primer for the detection of SNP TSC0039711
tttgaaagttgt

SEQ ID NO: 337171 - DNA, 12 bp, Artificial Sequence
  Oligonucleotide primer for the detection of SNP TSC0039712
taaacaaattat

SEQ ID NO: 337172 - DNA, 12 bp, Artificial Sequence
  Oligonucleotide primer for the detection of SNP TSC0039712
gataagtttttt

SEQ ID NO: 337173 - DNA, 12 bp, Artificial Sequence
  Oligonucleotide primer for the detection of SNP TSC0039712
tagataagttgt

SEQ ID NO: 337174 - DNA, 12 bp, Artificial Sequence
  Oligonucleotide primer for the detection of SNP TSC0039713
acttaacaatac

SEQ ID NO: 337175 - DNA, 12 bp, Artificial Sequence
  Oligonucleotide primer for the detection of SNP TSC0039713
tttgaattttaa

SEQ ID NO: 337176 - DNA, 12 bp, Artificial Sequence
  Oligonucleotide primer for the detection of SNP TSC0039714
tagattatataa

SEQ ID NO: 337177 - DNA, 12 bp, Artificial Sequence
  Oligonucleotide primer for the detection of SNP TSC0039715
tacttcatatat

SEQ ID NO: 337178 - DNA, 12 bp, Artificial Sequence
  Oligonucleotide primer for the detection of SNP TSC0039715
tttttagtttag

SEQ ID NO: 337179 - DNA, 12 bp, Artificial Sequence
  Oligonucleotide primer for the detection of SNP TSC0039715
cttccaatctaa

SEQ ID NO: 337180 - DNA, 12 bp, Artificial Sequence
  Oligonucleotide primer for the detection of SNP TSC0039715
tgttttatgtgt

SEQ ID NO: 337181 - DNA, 12 bp, Artificial Sequence
  Oligonucleotide primer for the detection of SNP TSC0039716
cataataaccca

SEQ ID NO: 337182 - DNA, 12 bp, Artificial Sequence
  Oligonucleotide primer for the detection of SNP TSC0039716
cgtaataaccca

SEQ ID NO: 337183 - DNA, 12 bp, Artificial Sequence
  Oligonucleotide primer for the detection of SNP TSC0039716
caattccttacc

SEQ ID NO: 337184 - DNA, 12 bp, Artificial Sequence
  Oligonucleotide primer for the detection of SNP TSC0039716
cgtagtggttta

SEQ ID NO: 337185 - DNA, 12 bp, Artificial Sequence
  Oligonucleotide primer for the detection of SNP TSC0039722
atttatttaaat

SEQ ID NO: 337186 - DNA, 12 bp, Artificial Sequence
  Oligonucleotide primer for the detection of SNP TSC0039722
atattggttaga

SEQ ID NO: 337187 - DNA, 12 bp, Artificial Sequence
  Oligonucleotide primer for the detection of SNP TSC0039722
atatcggttaga

SEQ ID NO: 337188 - DNA, 12 bp, Artificial Sequence
  Oligonucleotide primer for the detection of SNP TSC0039723
ctataataaatt

SEQ ID NO: 337189 - DNA, 12 bp, Artificial Sequence
  Oligonucleotide primer for the detection of SNP TSC0039723
gaaggaatagtg

SEQ ID NO: 337190 - DNA, 12 bp, Artificial Sequence
  Oligonucleotide primer for the detection of SNP TSC0039726
tgttttgggtag

SEQ ID NO: 337191 - DNA, 12 bp, Artificial Sequence
  Oligonucleotide primer for the detection of SNP TSC0039726
tactttaaacaa

SEQ ID NO: 337192 - DNA, 12 bp, Artificial Sequence
  Oligonucleotide primer for the detection of SNP TSC0039727
actctccacatc

SEQ ID NO: 337193 - DNA, 12 bp, Artificial Sequence
  Oligonucleotide primer for the detection of SNP TSC0039728
actctaatatta

SEQ ID NO: 337194 - DNA, 12 bp, Artificial Sequence
  Oligonucleotide primer for the detection of SNP TSC0039728
ttggttttttat

SEQ ID NO: 337195 - DNA, 12 bp, Artificial Sequence
  Oligonucleotide primer for the detection of SNP TSC0039728
tcggttttttat

SEQ ID NO: 337196 - DNA, 12 bp, Artificial Sequence
  Oligonucleotide primer for the detection of SNP TSC0039728
ccaacttcctac

SEQ ID NO: 337197 - DNA, 12 bp, Artificial Sequence
  Oligonucleotide primer for the detection of SNP TSC0039728
ccgacttcctac

SEQ ID NO: 337198 - DNA, 12 bp, Artificial Sequence
  Oligonucleotide primer for the detection of SNP TSC0039728
gttttaatgtta

SEQ ID NO: 337199 - DNA, 12 bp, Artificial Sequence
  Oligonucleotide primer for the detection of SNP TSC0039729
taaccaaaactt

SEQ ID NO: 337200 - DNA, 12 bp, Artificial Sequence
  Oligonucleotide primer for the detection of SNP TSC0039729
gggatgaaatta

SEQ ID NO: 337201 - DNA, 12 bp, Artificial Sequence
  Oligonucleotide primer for the detection of SNP TSC0039730
ctttttttcttc

SEQ ID NO: 337202 - DNA, 12 bp, Artificial Sequence
  Oligonucleotide primer for the detection of SNP TSC0039730
attagaaattag

SEQ ID NO: 337203 - DNA, 12 bp, Artificial Sequence
  Oligonucleotide primer for the detection of SNP TSC0039731
accattaataac

SEQ ID NO: 337204 - DNA, 12 bp, Artificial Sequence
  Oligonucleotide primer for the detection of SNP TSC0039731
taaagttatgtg

SEQ ID NO: 337205 - DNA, 12 bp, Artificial Sequence
  Oligonucleotide primer for the detection of SNP TSC0039732
ttttaaaaatac

SEQ ID NO: 337206 - DNA, 12 bp, Artificial Sequence
  Oligonucleotide primer for the detection of SNP TSC0039732
taattatataaa

SEQ ID NO: 337207 - DNA, 12 bp, Artificial Sequence
  Oligonucleotide primer for the detection of SNP TSC0039734
caccacctattt

SEQ ID NO: 337208 - DNA, 12 bp, Artificial Sequence
  Oligonucleotide primer for the detection of SNP TSC0039734
ttaatattgtgg

SEQ ID NO: 337209 - DNA, 12 bp, Artificial Sequence
  Oligonucleotide primer for the detection of SNP TSC0039734
ctaacactataa

SEQ ID NO: 337210 - DNA, 12 bp, Artificial Sequence
  Oligonucleotide primer for the detection of SNP TSC0039735
tttatgtgtata

SEQ ID NO: 337211 - DNA, 12 bp, Artificial Sequence
  Oligonucleotide primer for the detection of SNP TSC0039735
tttacgtgtata

SEQ ID NO: 337212 - DNA, 12 bp, Artificial Sequence
  Oligonucleotide primer for the detection of SNP TSC0039736
ttacaatctcat

SEQ ID NO: 337213 - DNA, 12 bp, Artificial Sequence
  Oligonucleotide primer for the detection of SNP TSC0039736
ttatgggttttg

SEQ ID NO: 337214 - DNA, 12 bp, Artificial Sequence
  Oligonucleotide primer for the detection of SNP TSC0039739
atacaaccccta

SEQ ID NO: 337215 - DNA, 12 bp, Artificial Sequence
  Oligonucleotide primer for the detection of SNP TSC0039739
atttcctctccc

SEQ ID NO: 337216 - DNA, 12 bp, Artificial Sequence
  Oligonucleotide primer for the detection of SNP TSC0039739
atgtagtttttg

SEQ ID NO: 337217 - DNA, 12 bp, Artificial Sequence
  Oligonucleotide primer for the detection of SNP TSC0039740
ttttgtagagaa

SEQ ID NO: 337218 - DNA, 12 bp, Artificial Sequence
  Oligonucleotide primer for the detection of SNP TSC0039740
tgaagggaatag

SEQ ID NO: 337219 - DNA, 12 bp, Artificial Sequence
  Oligonucleotide primer for the detection of SNP TSC0039743
caacacctcata

SEQ ID NO: 337220 - DNA, 12 bp, Artificial Sequence
  Oligonucleotide primer for the detection of SNP TSC0039743
ttaggtgaaaga

SEQ ID NO: 337221 - DNA, 12 bp, Artificial Sequence
  Oligonucleotide primer for the detection of SNP TSC0039744
cccctcatcctt

SEQ ID NO: 337222 - DNA, 12 bp, Artificial Sequence
  Oligonucleotide primer for the detection of SNP TSC0039744
attaagttgaga

SEQ ID NO: 337223 - DNA, 12 bp, Artificial Sequence
  Oligonucleotide primer for the detection of SNP TSC0039745
tttacatccccc

SEQ ID NO: 337224 - DNA, 12 bp, Artificial Sequence
  Oligonucleotide primer for the detection of SNP TSC0039745
tttacgtccccc

SEQ ID NO: 337225 - DNA, 12 bp, Artificial Sequence
  Oligonucleotide primer for the detection of SNP TSC0039745
agatgaaatttg

SEQ ID NO: 337226 - DNA, 12 bp, Artificial Sequence
  Oligonucleotide primer for the detection of SNP TSC0039746
cttttcctataa

SEQ ID NO: 337227 - DNA, 12 bp, Artificial Sequence
  Oligonucleotide primer for the detection of SNP TSC0039746
ttttttttgtga

SEQ ID NO: 337228 - DNA, 12 bp, Artificial Sequence
  Oligonucleotide primer for the detection of SNP TSC0039747
aaccaaaaatac

SEQ ID NO: 337229 - DNA, 12 bp, Artificial Sequence
  Oligonucleotide primer for the detection of SNP TSC0039747
tattatataata

SEQ ID NO: 337230 - DNA, 12 bp, Artificial Sequence
  Oligonucleotide primer for the detection of SNP TSC0039748
ttcctttaaaat

SEQ ID NO: 337231 - DNA, 12 bp, Artificial Sequence
  Oligonucleotide primer for the detection of SNP TSC0039748
tttgtaattagt

SEQ ID NO: 337232 - DNA, 12 bp, Artificial Sequence
  Oligonucleotide primer for the detection of SNP TSC0039748
tctacaaccaat

SEQ ID NO: 337233 - DNA, 12 bp, Artificial Sequence
  Oligonucleotide primer for the detection of SNP TSC0039749
ttgtaatgggtt

SEQ ID NO: 337234 - DNA, 12 bp, Artificial Sequence
  Oligonucleotide primer for the detection of SNP TSC0039749
ttgtaacgggtt

SEQ ID NO: 337235 - DNA, 12 bp, Artificial Sequence
  Oligonucleotide primer for the detection of SNP TSC0039749
ttacaacaaact

SEQ ID NO: 337236 - DNA, 12 bp, Artificial Sequence
  Oligonucleotide primer for the detection of SNP TSC0039749
ttacaacgaact

SEQ ID NO: 337237 - DNA, 12 bp, Artificial Sequence
  Oligonucleotide primer for the detection of SNP TSC0039749
tggggagaaaat

SEQ ID NO: 337238 - DNA, 12 bp, Artificial Sequence
  Oligonucleotide primer for the detection of SNP TSC0039749
cggggagaaaat

SEQ ID NO: 337239 - DNA, 12 bp, Artificial Sequence
  Oligonucleotide primer for the detection of SNP TSC0039750
atactcatttac

SEQ ID NO: 337240 - DNA, 12 bp, Artificial Sequence
  Oligonucleotide primer for the detection of SNP TSC0039750
atgtttatttgt

SEQ ID NO: 337241 - DNA, 12 bp, Artificial Sequence
  Oligonucleotide primer for the detection of SNP TSC0039751
atatatatacca

SEQ ID NO: 337242 - DNA, 12 bp, Artificial Sequence
  Oligonucleotide primer for the detection of SNP TSC0039751
tgaattgataaa

SEQ ID NO: 337243 - DNA, 12 bp, Artificial Sequence
  Oligonucleotide primer for the detection of SNP TSC0039751
taaattaataaa

SEQ ID NO: 337244 - DNA, 12 bp, Artificial Sequence
  Oligonucleotide primer for the detection of SNP TSC0039751
gtatatgtatta

SEQ ID NO: 337245 - DNA, 12 bp, Artificial Sequence
  Oligonucleotide primer for the detection of SNP TSC0039752
acaattaaactc

SEQ ID NO: 337246 - DNA, 12 bp, Artificial Sequence
  Oligonucleotide primer for the detection of SNP TSC0039753
tctaaaataaat

SEQ ID NO: 337247 - DNA, 12 bp, Artificial Sequence
  Oligonucleotide primer for the detection of SNP TSC0039753
aatgtaaattgg

SEQ ID NO: 337248 - DNA, 12 bp, Artificial Sequence
  Oligonucleotide primer for the detection of SNP TSC0039754
acactcaaaaat

SEQ ID NO: 337249 - DNA, 12 bp, Artificial Sequence
  Oligonucleotide primer for the detection of SNP TSC0039754
gatatagtaata

SEQ ID NO: 337250 - DNA, 12 bp, Artificial Sequence
  Oligonucleotide primer for the detection of SNP TSC0039755
taaaatatcaca

SEQ ID NO: 337251 - DNA, 12 bp, Artificial Sequence
  Oligonucleotide primer for the detection of SNP TSC0039755
taaaatatcacg

SEQ ID NO: 337252 - DNA, 12 bp, Artificial Sequence
  Oligonucleotide primer for the detection of SNP TSC0039755
gtaaagtgttta

SEQ ID NO: 337253 - DNA, 12 bp, Artificial Sequence
  Oligonucleotide primer for the detection of SNP TSC0039755
ataaaatattca

SEQ ID NO: 337254 - DNA, 12 bp, Artificial Sequence
  Oligonucleotide primer for the detection of SNP TSC0039755
ataaagtgttat

SEQ ID NO: 337255 - DNA, 12 bp, Artificial Sequence
  Oligonucleotide primer for the detection of SNP TSC0039755
ataaagtgttac

SEQ ID NO: 337256 - DNA, 12 bp, Artificial Sequence
  Oligonucleotide primer for the detection of SNP TSC0006138
aaaaatctcttt

SEQ ID NO: 337257 - DNA, 12 bp, Artificial Sequence
  Oligonucleotide primer for the detection of SNP TSC0006138
ttagtgtttata

SEQ ID NO: 337258 - DNA, 12 bp, Artificial Sequence
  Oligonucleotide primer for the detection of SNP TSC0006138
ttaatatccata

SEQ ID NO: 337259 - DNA, 12 bp, Artificial Sequence
  Oligonucleotide primer for the detection of SNP TSC0006139
cattaatttact

SEQ ID NO: 337260 - DNA, 12 bp, Artificial Sequence
  Oligonucleotide primer for the detection of SNP TSC0039757
aatctaaccaac

SEQ ID NO: 337261 - DNA, 12 bp, Artificial Sequence
  Oligonucleotide primer for the detection of SNP TSC0039757
ggataaagatag

SEQ ID NO: 337262 - DNA, 12 bp, Artificial Sequence
  Oligonucleotide primer for the detection of SNP TSC0039757
atttaattaatt

SEQ ID NO: 337263 - DNA, 12 bp, Artificial Sequence
  Oligonucleotide primer for the detection of SNP TSC0039758
ttgttatattga

SEQ ID NO: 337264 - DNA, 12 bp, Artificial Sequence
  Oligonucleotide primer for the detection of SNP TSC0039759
tattttggaaaa

SEQ ID NO: 337265 - DNA, 12 bp, Artificial Sequence
  Oligonucleotide primer for the detection of SNP TSC0039766
ttatataaaaac

SEQ ID NO: 337266 - DNA, 12 bp, Artificial Sequence
  Oligonucleotide primer for the detection of SNP TSC0039766
gatagtgtattg

SEQ ID NO: 337267 - DNA, 12 bp, Artificial Sequence
  Oligonucleotide primer for the detection of SNP TSC0039772
ataacaaatact

SEQ ID NO: 337268 - DNA, 12 bp, Artificial Sequence
  Oligonucleotide primer for the detection of SNP TSC0039772
tttcatctacaa

SEQ ID NO: 337269 - DNA, 12 bp, Artificial Sequence
  Oligonucleotide primer for the detection of SNP TSC0039772
ataatagatgtt

SEQ ID NO: 337270 - DNA, 12 bp, Artificial Sequence
  Oligonucleotide primer for the detection of SNP TSC0004745
tgtttagtttat

SEQ ID NO: 337271 - DNA, 12 bp, Artificial Sequence
  Oligonucleotide primer for the detection of SNP TSC0004745
tacttaatccac

SEQ ID NO: 337272 - DNA, 12 bp, Artificial Sequence
  Oligonucleotide primer for the detection of SNP TSC0004745
tagtggtggtag

SEQ ID NO: 337273 - DNA, 12 bp, Artificial Sequence
  Oligonucleotide primer for the detection of SNP TSC0039777
ataaacgtaaat

SEQ ID NO: 337274 - DNA, 12 bp, Artificial Sequence
  Oligonucleotide primer for the detection of SNP TSC0039777
tgaaatttagtg

SEQ ID NO: 337275 - DNA, 12 bp, Artificial Sequence
  Oligonucleotide primer for the detection of SNP TSC0039777
ataggtgtgggt

SEQ ID NO: 337276 - DNA, 12 bp, Artificial Sequence
  Oligonucleotide primer for the detection of SNP TSC0039777
ataggcgtgggt

SEQ ID NO: 337277 - DNA, 12 bp, Artificial Sequence
  Oligonucleotide primer for the detection of SNP TSC0039778
cactttaaaata

SEQ ID NO: 337278 - DNA, 12 bp, Artificial Sequence
  Oligonucleotide primer for the detection of SNP TSC0039778
gggtagttaagg

SEQ ID NO: 337279 - DNA, 12 bp, Artificial Sequence
  Oligonucleotide primer for the detection of SNP TSC0039778
tattttgagatg

SEQ ID NO: 337280 - DNA, 12 bp, Artificial Sequence
  Oligonucleotide primer for the detection of SNP TSC0039782
ttttagtttagg

SEQ ID NO: 337281 - DNA, 12 bp, Artificial Sequence
  Oligonucleotide primer for the detection of SNP TSC0039782
ctccaatccaaa

SEQ ID NO: 337282 - DNA, 12 bp, Artificial Sequence
  Oligonucleotide primer for the detection of SNP TSC0039782
gaagggggtatg

SEQ ID NO: 337283 - DNA, 12 bp, Artificial Sequence
  Oligonucleotide primer for the detection of SNP TSC0039783
attctctataaa

SEQ ID NO: 337284 - DNA, 12 bp, Artificial Sequence
  Oligonucleotide primer for the detection of SNP TSC0039783
tgatatattgtt

SEQ ID NO: 337285 - DNA, 12 bp, Artificial Sequence
  Oligonucleotide primer for the detection of SNP TSC0039783
cgatatattgtt

SEQ ID NO: 337286 - DNA, 12 bp, Artificial Sequence
  Oligonucleotide primer for the detection of SNP TSC0039783
tgatatatcgtt

SEQ ID NO: 337287 - DNA, 12 bp, Artificial Sequence
  Oligonucleotide primer for the detection of SNP TSC0039783
cgatatatcgtt

SEQ ID NO: 337288 - DNA, 12 bp, Artificial Sequence
  Oligonucleotide primer for the detection of SNP TSC0039783
ctcaatacatcg

SEQ ID NO: 337289 - DNA, 12 bp, Artificial Sequence
  Oligonukleotid-Primer
ctcgatacatca

SEQ ID NO: 337290 - DNA, 12 bp, Artificial Sequence
  Oligonucleotide primer for the detection of SNP TSC0039783
ctcgatacatcg

SEQ ID NO: 337291 - DNA, 12 bp, Artificial Sequence
  Oligonucleotide primer for the detection of SNP TSC0039783
attttttatagg

SEQ ID NO: 337292 - DNA, 12 bp, Artificial Sequence
  Oligonucleotide primer for the detection of SNP TSC0039784
tcctaatttaaa

SEQ ID NO: 337293 - DNA, 12 bp, Artificial Sequence
  Oligonucleotide primer for the detection of SNP TSC0039784
aaaaaagtaatt

SEQ ID NO: 337294 - DNA, 12 bp, Artificial Sequence
  Oligonucleotide primer for the detection of SNP TSC0039785
aaaatacttccg

SEQ ID NO: 337295 - DNA, 12 bp, Artificial Sequence
  Oligonucleotide primer for the detection of SNP TSC0039785
gtaagaattttt

SEQ ID NO: 337296 - DNA, 12 bp, Artificial Sequence
  Oligonucleotide primer for the detection of SNP TSC0039785
ataaaaatcctt

SEQ ID NO: 337297 - DNA, 12 bp, Artificial Sequence
  Oligonucleotide primer for the detection of SNP TSC0039785
aaaggtgttttt

SEQ ID NO: 337298 - DNA, 12 bp, Artificial Sequence
  Oligonucleotide primer for the detection of SNP TSC0039785
aaaggtgttttc

SEQ ID NO: 337299 - DNA, 12 bp, Artificial Sequence
  Oligonucleotide primer for the detection of SNP TSC0039786
atgtttgggata

SEQ ID NO: 337300 - DNA, 12 bp, Artificial Sequence
  Oligonucleotide primer for the detection of SNP TSC0000839
tttatcaaatat

SEQ ID NO: 337301 - DNA, 12 bp, Artificial Sequence
  Oligonucleotide primer for the detection of SNP TSC0039790
taaatagtaatt

SEQ ID NO: 337302 - DNA, 12 bp, Artificial Sequence
  Oligonucleotide primer for the detection of SNP TSC0039790
ttaaacaataac

SEQ ID NO: 337303 - DNA, 12 bp, Artificial Sequence
  Oligonucleotide primer for the detection of SNP TSC0039796
tacaatttacat

SEQ ID NO: 337304 - DNA, 12 bp, Artificial Sequence
  Oligonucleotide primer for the detection of SNP TSC0039798
actctactaaaa

SEQ ID NO: 337305 - DNA, 12 bp, Artificial Sequence
  Oligonucleotide primer for the detection of SNP TSC0039798
tagtttttgtgg

SEQ ID NO: 337306 - DNA, 12 bp, Artificial Sequence
  Oligonucleotide primer for the detection of SNP TSC0039802
tttatatacaca

SEQ ID NO: 337307 - DNA, 12 bp, Artificial Sequence
  Oligonucleotide primer for the detection of SNP TSC0039802
ttagataaaatt

SEQ ID NO: 337308 - DNA, 12 bp, Artificial Sequence
  Oligonucleotide primer for the detection of SNP TSC0039802
ttaaacaaaacc

SEQ ID NO: 337309 - DNA, 12 bp, Artificial Sequence
  Oligonucleotide primer for the detection of SNP TSC0039803
atatacacataa

SEQ ID NO: 337310 - DNA, 12 bp, Artificial Sequence
  Oligonucleotide primer for the detection of SNP TSC0039803
gattttagttag

SEQ ID NO: 337311 - DNA, 12 bp, Artificial Sequence
  Oligonucleotide primer for the detection of SNP TSC0039803
atctcaattaaa

SEQ ID NO: 337312 - DNA, 12 bp, Artificial Sequence
  Oligonucleotide primer for the detection of SNP TSC0039803
gtatatggtttt

SEQ ID NO: 337313 - DNA, 12 bp, Artificial Sequence
  Oligonucleotide primer for the detection of SNP TSC0039804
taaaattctcct

SEQ ID NO: 337314 - DNA, 12 bp, Artificial Sequence
  Oligonucleotide primer for the detection of SNP TSC0039804
gttattgaatgg

SEQ ID NO: 337315 - DNA, 12 bp, Artificial Sequence
  Oligonucleotide primer for the detection of SNP TSC0039804
attattaaataa

SEQ ID NO: 337316 - DNA, 12 bp, Artificial Sequence
  Oligonucleotide primer for the detection of SNP TSC0039812
actataaaaaaa

SEQ ID NO: 337317 - DNA, 12 bp, Artificial Sequence
  Oligonucleotide primer for the detection of SNP TSC0039812
ttagttttgggt

SEQ ID NO: 337318 - DNA, 12 bp, Artificial Sequence
  Oligonucleotide primer for the detection of SNP TSC0039812
cccaatcttaaa

SEQ ID NO: 337319 - DNA, 12 bp, Artificial Sequence
  Oligonucleotide primer for the detection of SNP TSC0039812
attgttatgaag

SEQ ID NO: 337320 - DNA, 12 bp, Artificial Sequence
  Oligonucleotide primer for the detection of SNP TSC0039813
accatccttaca

SEQ ID NO: 337321 - DNA, 12 bp, Artificial Sequence
  Oligonucleotide primer for the detection of SNP TSC0039815
ctttaaaaatct

SEQ ID NO: 337322 - DNA, 12 bp, Artificial Sequence
  Oligonucleotide primer for the detection of SNP TSC0039815
agattgttttag

SEQ ID NO: 337323 - DNA, 12 bp, Artificial Sequence
  Oligonucleotide primer for the detection of SNP TSC0006685
tcaactcaaaat

SEQ ID NO: 337324 - DNA, 12 bp, Artificial Sequence
  Oligonucleotide primer for the detection of SNP TSC0006685
tcgactcaaaat

SEQ ID NO: 337325 - DNA, 12 bp, Artificial Sequence
  Oligonucleotide primer for the detection of SNP TSC0006685
gtatggttggta

SEQ ID NO: 337326 - DNA, 12 bp, Artificial Sequence
  Oligonucleotide primer for the detection of SNP TSC0039821
catcatatcttc

SEQ ID NO: 337327 - DNA, 12 bp, Artificial Sequence
  Oligonucleotide primer for the detection of SNP TSC0039821
catcgtatcttc

SEQ ID NO: 337328 - DNA, 12 bp, Artificial Sequence
  Oligonucleotide primer for the detection of SNP TSC0039821
ttagtaagatag

SEQ ID NO: 337329 - DNA, 12 bp, Artificial Sequence
  Oligonucleotide primer for the detection of SNP TSC0039821
taataaaacaaa

SEQ ID NO: 337330 - DNA, 12 bp, Artificial Sequence
  Oligonucleotide primer for the detection of SNP TSC0039822
ttaaccaaactt

SEQ ID NO: 337331 - DNA, 12 bp, Artificial Sequence
  Oligonucleotide primer for the detection of SNP TSC0039822
tgtgggtttatg

SEQ ID NO: 337332 - DNA, 12 bp, Artificial Sequence
  Oligonucleotide primer for the detection of SNP TSC0039822
cgtgggtttatg

SEQ ID NO: 337333 - DNA, 12 bp, Artificial Sequence
  Oligonucleotide primer for the detection of SNP TSC0039823
acttaatcttta

SEQ ID NO: 337334 - DNA, 12 bp, Artificial Sequence
  Oligonucleotide primer for the detection of SNP TSC0039823
gaaaatgagggt

SEQ ID NO: 337335 - DNA, 12 bp, Artificial Sequence
  Oligonucleotide primer for the detection of SNP TSC0039823
gatttagttttt

SEQ ID NO: 337336 - DNA, 12 bp, Artificial Sequence
  Oligonucleotide primer for the detection of SNP TSC0039824
catcaacaaaac

SEQ ID NO: 337337 - DNA, 12 bp, Artificial Sequence
  Oligonucleotide primer for the detection of SNP TSC0039824
tgtgaagaatgg

SEQ ID NO: 337338 - DNA, 12 bp, Artificial Sequence
  Oligonucleotide primer for the detection of SNP TSC0039824
cgtgaagaatgg

SEQ ID NO: 337339 - DNA, 12 bp, Artificial Sequence
  Oligonucleotide primer for the detection of SNP TSC0039824
tgtgaagaacgg

SEQ ID NO: 337340 - DNA, 12 bp, Artificial Sequence
  Oligonucleotide primer for the detection of SNP TSC0039824
cgtgaagaacgg

SEQ ID NO: 337341 - DNA, 12 bp, Artificial Sequence
  Oligonucleotide primer for the detection of SNP TSC0039825
ggttaaaaattt

SEQ ID NO: 337342 - DNA, 12 bp, Artificial Sequence
  Oligonucleotide primer for the detection of SNP TSC0039825
gtgtgttgggta

SEQ ID NO: 337343 - DNA, 12 bp, Artificial Sequence
  Oligonucleotide primer for the detection of SNP TSC0039830
aatgttagatta

SEQ ID NO: 337344 - DNA, 12 bp, Artificial Sequence
  Oligonucleotide primer for the detection of SNP TSC0039830
aatattaaacta

SEQ ID NO: 337345 - DNA, 12 bp, Artificial Sequence
  Oligonucleotide primer for the detection of SNP TSC0039830
atatagtgatga

SEQ ID NO: 337346 - DNA, 12 bp, Artificial Sequence
  Oligonucleotide primer for the detection of SNP TSC0004552
tggtttgagttt

SEQ ID NO: 337347 - DNA, 12 bp, Artificial Sequence
  Oligonucleotide primer for the detection of SNP TSC0004552
taatctaaacct

SEQ ID NO: 337348 - DNA, 12 bp, Artificial Sequence
  Oligonucleotide primer for the detection of SNP TSC0004552
gatattagtggg

SEQ ID NO: 337349 - DNA, 12 bp, Artificial Sequence
  Oligonucleotide primer for the detection of SNP TSC0039831
ttcattatcttt

SEQ ID NO: 337350 - DNA, 12 bp, Artificial Sequence
  Oligonucleotide primer for the detection of SNP TSC0039831
gaggaaaagaaa

SEQ ID NO: 337351 - DNA, 12 bp, Artificial Sequence
  Oligonucleotide primer for the detection of SNP TSC0005649
aaaatacttatt

SEQ ID NO: 337352 - DNA, 12 bp, Artificial Sequence
  Oligonucleotide primer for the detection of SNP TSC0005649
gtatttatataa

SEQ ID NO: 337353 - DNA, 12 bp, Artificial Sequence
  Oligonucleotide primer for the detection of SNP TSC0005650
tgtgggatattg

SEQ ID NO: 337354 - DNA, 12 bp, Artificial Sequence
  Oligonucleotide primer for the detection of SNP TSC0039836
actaactcatat

SEQ ID NO: 337355 - DNA, 12 bp, Artificial Sequence
  Oligonucleotide primer for the detection of SNP TSC0039836
actaactcgtat

SEQ ID NO: 337356 - DNA, 12 bp, Artificial Sequence
  Oligonucleotide primer for the detection of SNP TSC0039837
ctattaatacta

SEQ ID NO: 337357 - DNA, 12 bp, Artificial Sequence
  Oligonucleotide primer for the detection of SNP TSC0039837
agtagtttttat

SEQ ID NO: 337358 - DNA, 12 bp, Artificial Sequence
  Oligonucleotide primer for the detection of SNP TSC0039837
aaataatttcta

SEQ ID NO: 337359 - DNA, 12 bp, Artificial Sequence
  Oligonucleotide primer for the detection of SNP TSC0039837
ttgttgatattg

SEQ ID NO: 337360 - DNA, 12 bp, Artificial Sequence
  Oligonucleotide primer for the detection of SNP TSC0039839
caatctcatttt

SEQ ID NO: 337361 - DNA, 12 bp, Artificial Sequence
  Oligonucleotide primer for the detection of SNP TSC0039839
atgggagttata

SEQ ID NO: 337362 - DNA, 12 bp, Artificial Sequence
  Oligonucleotide primer for the detection of SNP TSC0039840
ctaaaaaccttt

SEQ ID NO: 337363 - DNA, 12 bp, Artificial Sequence
  Oligonucleotide primer for the detection of SNP TSC0039840
atagtttttgta

SEQ ID NO: 337364 - DNA, 12 bp, Artificial Sequence
  Oligonucleotide primer for the detection of SNP TSC0039841
cgttagatatta

SEQ ID NO: 337365 - DNA, 12 bp, Artificial Sequence
  Oligonucleotide primer for the detection of SNP TSC0039842
aaaataactatt

SEQ ID NO: 337366 - DNA, 12 bp, Artificial Sequence
  Oligonucleotide primer for the detection of SNP TSC0039843
actacatacaca

SEQ ID NO: 337367 - DNA, 12 bp, Artificial Sequence
  Oligonucleotide primer for the detection of SNP TSC0039843
gatttgtatatt

SEQ ID NO: 337368 - DNA, 12 bp, Artificial Sequence
  Oligonucleotide primer for the detection of SNP TSC0039843
ataacttacaca

SEQ ID NO: 337369 - DNA, 12 bp, Artificial Sequence
  Oligonucleotide primer for the detection of SNP TSC0039843
tgttatatgtat

SEQ ID NO: 337370 - DNA, 12 bp, Artificial Sequence
  Oligonucleotide primer for the detection of SNP TSC0039844
ataaaacatctt

SEQ ID NO: 337371 - DNA, 12 bp, Artificial Sequence
  Oligonucleotide primer for the detection of SNP TSC0039844
catcttaaaatt

SEQ ID NO: 337372 - DNA, 12 bp, Artificial Sequence
  Oligonucleotide primer for the detection of SNP TSC0039844
atggagtatttt

SEQ ID NO: 337373 - DNA, 12 bp, Artificial Sequence
  Oligonucleotide primer for the detection of SNP TSC0009465
gttaatatttta

SEQ ID NO: 337374 - DNA, 12 bp, Artificial Sequence
  Oligonucleotide primer for the detection of SNP TSC0039845
tcaaacctactt

SEQ ID NO: 337375 - DNA, 12 bp, Artificial Sequence
  Oligonucleotide primer for the detection of SNP TSC0039845
taatgtaggaga

SEQ ID NO: 337376 - DNA, 12 bp, Artificial Sequence
  Oligonucleotide primer for the detection of SNP TSC0039846
tgatttatttga

SEQ ID NO: 337377 - DNA, 12 bp, Artificial Sequence
  Oligonucleotide primer for the detection of SNP TSC0039848
atcaacctaact

SEQ ID NO: 337378 - DNA, 12 bp, Artificial Sequence
  Oligonucleotide primer for the detection of SNP TSC0039848
attgtttgttgg

SEQ ID NO: 337379 - DNA, 12 bp, Artificial Sequence
  Oligonucleotide primer for the detection of SNP TSC0039848
atcgtttgttgg

SEQ ID NO: 337380 - DNA, 12 bp, Artificial Sequence
  Oligonucleotide primer for the detection of SNP TSC0039848
attgtttgtcgg

SEQ ID NO: 337381 - DNA, 12 bp, Artificial Sequence
  Oligonucleotide primer for the detection of SNP TSC0039848
atcgtttgtcgg

SEQ ID NO: 337382 - DNA, 12 bp, Artificial Sequence
  Oligonucleotide primer for the detection of SNP TSC0039848
accacttaccaa

SEQ ID NO: 337383 - DNA, 12 bp, Artificial Sequence
  Oligonucleotide primer for the detection of SNP TSC0039848
accacttaccga

SEQ ID NO: 337384 - DNA, 12 bp, Artificial Sequence
  Oligonucleotide primer for the detection of SNP TSC0039848
accgcttaccaa

SEQ ID NO: 337385 - DNA, 12 bp, Artificial Sequence
  Oligonucleotide primer for the detection of SNP TSC0039848
accgcttaccga

SEQ ID NO: 337386 - DNA, 12 bp, Artificial Sequence
  Oligonucleotide primer for the detection of SNP TSC0039848
attaatttggtt

SEQ ID NO: 337387 - DNA, 12 bp, Artificial Sequence
  Oligonucleotide primer for the detection of SNP TSC0039849
tactaatatatt

SEQ ID NO: 337388 - DNA, 12 bp, Artificial Sequence
  Oligonucleotide primer for the detection of SNP TSC0039849
ttatatgaatta

SEQ ID NO: 337389 - DNA, 12 bp, Artificial Sequence
  Oligonucleotide primer for the detection of SNP TSC0039850
atactttatttc

SEQ ID NO: 337390 - DNA, 12 bp, Artificial Sequence
  Oligonucleotide primer for the detection of SNP TSC0039850
tataggatagta

SEQ ID NO: 337391 - DNA, 12 bp, Artificial Sequence
  Oligonucleotide primer for the detection of SNP TSC0039851
ctaaaaaatccc

SEQ ID NO: 337392 - DNA, 12 bp, Artificial Sequence
  Oligonucleotide primer for the detection of SNP TSC0039851
gagattttgtta

SEQ ID NO: 337393 - DNA, 12 bp, Artificial Sequence
  Oligonucleotide primer for the detection of SNP TSC0039851
gagatttcgtta

SEQ ID NO: 337394 - DNA, 12 bp, Artificial Sequence
  Oligonucleotide primer for the detection of SNP TSC0039852
acaactataaat

SEQ ID NO: 337395 - DNA, 12 bp, Artificial Sequence
  Oligonucleotide primer for the detection of SNP TSC0039852
tattaatatatg

SEQ ID NO: 337396 - DNA, 12 bp, Artificial Sequence
  Oligonucleotide primer for the detection of SNP TSC0039853
atcaataaattt

SEQ ID NO: 337397 - DNA, 12 bp, Artificial Sequence
  Oligonucleotide primer for the detection of SNP TSC0039853
tggatatagaaa

SEQ ID NO: 337398 - DNA, 12 bp, Artificial Sequence
  Oligonucleotide primer for the detection of SNP TSC0039854
cttaaaacaata

SEQ ID NO: 337399 - DNA, 12 bp, Artificial Sequence
  Oligonucleotide primer for the detection of SNP TSC0039854
ggaatttggtat

SEQ ID NO: 337400 - DNA, 12 bp, Artificial Sequence
  Oligonucleotide primer for the detection of SNP TSC0039854
aaaatctaatat

SEQ ID NO: 337401 - DNA, 12 bp, Artificial Sequence
  Oligonucleotide primer for the detection of SNP TSC0039854
tttgggatagtg

SEQ ID NO: 337402 - DNA, 12 bp, Artificial Sequence
  Oligonucleotide primer for the detection of SNP TSC0008141
ataatctattta

SEQ ID NO: 337403 - DNA, 12 bp, Artificial Sequence
  Oligonucleotide primer for the detection of SNP TSC0008141
tgtaagtaaaaa

SEQ ID NO: 337404 - DNA, 12 bp, Artificial Sequence
  Oligonucleotide primer for the detection of SNP TSC0008141
atagtttgttta

SEQ ID NO: 337405 - DNA, 12 bp, Artificial Sequence
  Oligonucleotide primer for the detection of SNP TSC0008142
agagtatagtag

SEQ ID NO: 337406 - DNA, 12 bp, Artificial Sequence
  Oligonucleotide primer for the detection of SNP TSC0039855
ttattgtgtgtt

SEQ ID NO: 337407 - DNA, 12 bp, Artificial Sequence
  Oligonucleotide primer for the detection of SNP TSC0039855
tactatatacca

SEQ ID NO: 337408 - DNA, 12 bp, Artificial Sequence
  Oligonucleotide primer for the detection of SNP TSC0039855
gtggtatattat

SEQ ID NO: 337409 - DNA, 12 bp, Artificial Sequence
  Oligonucleotide primer for the detection of SNP TSC0039856
aaggaatttgag

SEQ ID NO: 337410 - DNA, 12 bp, Artificial Sequence
  Oligonucleotide primer for the detection of SNP TSC0039859
cataaattattt

SEQ ID NO: 337411 - DNA, 12 bp, Artificial Sequence
  Oligonucleotide primer for the detection of SNP TSC0039859
cgtaaattattt

SEQ ID NO: 337412 - DNA, 12 bp, Artificial Sequence
  Oligonucleotide primer for the detection of SNP TSC0039860
aaattattaact

SEQ ID NO: 337413 - DNA, 12 bp, Artificial Sequence
  Oligonucleotide primer for the detection of SNP TSC0039860
gatgtttggaag

SEQ ID NO: 337414 - DNA, 12 bp, Artificial Sequence
  Oligonucleotide primer for the detection of SNP TSC0039865
atattttgttag

SEQ ID NO: 337415 - DNA, 12 bp, Artificial Sequence
  Oligonucleotide primer for the detection of SNP TSC0039866
taactctcctac

SEQ ID NO: 337416 - DNA, 12 bp, Artificial Sequence
  Oligonucleotide primer for the detection of SNP TSC0039866
gattgattttta

SEQ ID NO: 337417 - DNA, 12 bp, Artificial Sequence
  Oligonucleotide primer for the detection of SNP TSC0039866
aactaacttcca

SEQ ID NO: 337418 - DNA, 12 bp, Artificial Sequence
  Oligonucleotide primer for the detection of SNP TSC0039866
taatttttttgt

SEQ ID NO: 337419 - DNA, 12 bp, Artificial Sequence
  Oligonucleotide primer for the detection of SNP TSC0039867
tacaacctcctc

SEQ ID NO: 337420 - DNA, 12 bp, Artificial Sequence
  Oligonucleotide primer for the detection of SNP TSC0039868
ggagtttaatat

SEQ ID NO: 337421 - DNA, 12 bp, Artificial Sequence
  Oligonucleotide primer for the detection of SNP TSC0039868
tggaagattgat

SEQ ID NO: 337422 - DNA, 12 bp, Artificial Sequence
  Oligonucleotide primer for the detection of SNP TSC0039869
attgaggtgtag

SEQ ID NO: 337423 - DNA, 12 bp, Artificial Sequence
  Oligonucleotide primer for the detection of SNP TSC0039869
atcgaggtgtag

SEQ ID NO: 337424 - DNA, 12 bp, Artificial Sequence
  Oligonucleotide primer for the detection of SNP TSC0039869
ccaaaatataaa

SEQ ID NO: 337425 - DNA, 12 bp, Artificial Sequence
  Oligonucleotide primer for the detection of SNP TSC0039869
ccgaaatataaa

SEQ ID NO: 337426 - DNA, 12 bp, Artificial Sequence
  Oligonucleotide primer for the detection of SNP TSC0039869
agagttggttaa

SEQ ID NO: 337427 - DNA, 12 bp, Artificial Sequence
  Oligonucleotide primer for the detection of SNP TSC0039870
ttaattatatta

SEQ ID NO: 337428 - DNA, 12 bp, Artificial Sequence
  Oligonucleotide primer for the detection of SNP TSC0039870
tgtagaaggagt

SEQ ID NO: 337429 - DNA, 12 bp, Artificial Sequence
  Oligonucleotide primer for the detection of SNP TSC0039871
atatctaaaaac

SEQ ID NO: 337430 - DNA, 12 bp, Artificial Sequence
  Oligonucleotide primer for the detection of SNP TSC0039872
attataggtatg

SEQ ID NO: 337431 - DNA, 12 bp, Artificial Sequence
  Oligonucleotide primer for the detection of SNP TSC0039872
attataggtacg

SEQ ID NO: 337432 - DNA, 12 bp, Artificial Sequence
  Oligonucleotide primer for the detection of SNP TSC0039873
ataaatataact

SEQ ID NO: 337433 - DNA, 12 bp, Artificial Sequence
  Oligonucleotide primer for the detection of SNP TSC0039873
tttattaattat

SEQ ID NO: 337434 - DNA, 12 bp, Artificial Sequence
  Oligonucleotide primer for the detection of SNP TSC0039873
tttattaactac

SEQ ID NO: 337435 - DNA, 12 bp, Artificial Sequence
  Oligonucleotide primer for the detection of SNP TSC0039873
gtaaatatggtt

SEQ ID NO: 337436 - DNA, 12 bp, Artificial Sequence
  Oligonucleotide primer for the detection of SNP TSC0005721
aaagaagggata

SEQ ID NO: 337437 - DNA, 12 bp, Artificial Sequence
  Oligonucleotide primer for the detection of SNP TSC0005722
actttcactcac

SEQ ID NO: 337438 - DNA, 12 bp, Artificial Sequence
  Oligonucleotide primer for the detection of SNP TSC0005722
aagtagagggtt

SEQ ID NO: 337439 - DNA, 12 bp, Artificial Sequence
  Oligonucleotide primer for the detection of SNP TSC0005722
aaataaaaaact

SEQ ID NO: 337440 - DNA, 12 bp, Artificial Sequence
  Oligonucleotide primer for the detection of SNP TSC0039874
actaaacctaat

SEQ ID NO: 337441 - DNA, 12 bp, Artificial Sequence
  Oligonucleotide primer for the detection of SNP TSC0039874
agtataggtata

SEQ ID NO: 337442 - DNA, 12 bp, Artificial Sequence
  Oligonucleotide primer for the detection of SNP TSC0039874
aatacaaacaca

SEQ ID NO: 337443 - DNA, 12 bp, Artificial Sequence
  Oligonucleotide primer for the detection of SNP TSC0039875
ttatgttgtttt

SEQ ID NO: 337444 - DNA, 12 bp, Artificial Sequence
  Oligonucleotide primer for the detection of SNP TSC0039875
ccatactattct

SEQ ID NO: 337445 - DNA, 12 bp, Artificial Sequence
  Oligonucleotide primer for the detection of SNP TSC0039875
tgaggttaggaa

SEQ ID NO: 337446 - DNA, 12 bp, Artificial Sequence
  Oligonucleotide primer for the detection of SNP TSC0039876
atttcaaattca

SEQ ID NO: 337447 - DNA, 12 bp, Artificial Sequence
  Oligonucleotide primer for the detection of SNP TSC0039876
tagaggagttag

SEQ ID NO: 337448 - DNA, 12 bp, Artificial Sequence
  Oligonucleotide primer for the detection of SNP TSC0039877
ttctaacttaaa

SEQ ID NO: 337449 - DNA, 12 bp, Artificial Sequence
  Oligonucleotide primer for the detection of SNP TSC0039877
tatttacccaat

SEQ ID NO: 337450 - DNA, 12 bp, Artificial Sequence
  Oligonucleotide primer for the detection of SNP TSC0039880
cataataacaaa

SEQ ID NO: 337451 - DNA, 12 bp, Artificial Sequence
  Oligonucleotide primer for the detection of SNP TSC0039880
cataataacgaa

SEQ ID NO: 337452 - DNA, 12 bp, Artificial Sequence
  Oligonucleotide primer for the detection of SNP TSC0039880
tatggtggtgag

SEQ ID NO: 337453 - DNA, 12 bp, Artificial Sequence
  Oligonucleotide primer for the detection of SNP TSC0039880
tatggtggcgag

SEQ ID NO: 337454 - DNA, 12 bp, Artificial Sequence
  Oligonucleotide primer for the detection of SNP TSC0039881
aatattaaaatt

SEQ ID NO: 337455 - DNA, 12 bp, Artificial Sequence
  Oligonucleotide primer for the detection of SNP TSC0039881
cggtggtttacg

SEQ ID NO: 337456 - DNA, 12 bp, Artificial Sequence
  Oligonucleotide primer for the detection of SNP TSC0039882
ttaatatctaaa

SEQ ID NO: 337457 - DNA, 12 bp, Artificial Sequence
  Oligonucleotide primer for the detection of SNP TSC0039882
ctaactattcaa

SEQ ID NO: 337458 - DNA, 12 bp, Artificial Sequence
  Oligonucleotide primer for the detection of SNP TSC0039882
taatgtttgagt

SEQ ID NO: 337459 - DNA, 12 bp, Artificial Sequence
  Oligonucleotide primer for the detection of SNP TSC0039883
ttctaaaattaa

SEQ ID NO: 337460 - DNA, 12 bp, Artificial Sequence
  Oligonucleotide primer for the detection of SNP TSC0039883
taaataaggtat

SEQ ID NO: 337461 - DNA, 12 bp, Artificial Sequence
  Oligonucleotide primer for the detection of SNP TSC0039883
ttttaggattgg

SEQ ID NO: 337462 - DNA, 12 bp, Artificial Sequence
  Oligonucleotide primer for the detection of SNP TSC0007315
tatattcaaaca

SEQ ID NO: 337463 - DNA, 12 bp, Artificial Sequence
  Oligonucleotide primer for the detection of SNP TSC0007315
atgtttagatat

SEQ ID NO: 337464 - DNA, 12 bp, Artificial Sequence
  Oligonucleotide primer for the detection of SNP TSC0039884
aactttctctta

SEQ ID NO: 337465 - DNA, 12 bp, Artificial Sequence
  Oligonucleotide primer for the detection of SNP TSC0039884
atatatttaaat

SEQ ID NO: 337466 - DNA, 12 bp, Artificial Sequence
  Oligonukleotid-Primer
atatatttaaac

SEQ ID NO: 337467 - DNA, 12 bp, Artificial Sequence
  Oligonucleotide primer for the detection of SNP TSC0039884
aatacatttaaa

SEQ ID NO: 337468 - DNA, 12 bp, Artificial Sequence
  Oligonucleotide primer for the detection of SNP TSC0039886
catcttatttaa

SEQ ID NO: 337469 - DNA, 12 bp, Artificial Sequence
  Oligonucleotide primer for the detection of SNP TSC0039886
ataagatttttt

SEQ ID NO: 337470 - DNA, 12 bp, Artificial Sequence
  Oligonucleotide primer for the detection of SNP TSC0039886
ataaaatttttt

SEQ ID NO: 337471 - DNA, 12 bp, Artificial Sequence
  Oligonucleotide primer for the detection of SNP TSC0039886
tattttatttag

SEQ ID NO: 337472 - DNA, 12 bp, Artificial Sequence
  Oligonucleotide primer for the detection of SNP TSC0039887
atattaaccaaa

SEQ ID NO: 337473 - DNA, 12 bp, Artificial Sequence
  Oligonucleotide primer for the detection of SNP TSC0039887
aaataggttttt

SEQ ID NO: 337474 - DNA, 12 bp, Artificial Sequence
  Oligonucleotide primer for the detection of SNP TSC0039887
aaacaaacttct

SEQ ID NO: 337475 - DNA, 12 bp, Artificial Sequence
  Oligonucleotide primer for the detection of SNP TSC0039887
atgttggttaaa

SEQ ID NO: 337476 - DNA, 12 bp, Artificial Sequence
  Oligonucleotide primer for the detection of SNP TSC0039888
tcatatcaactt

SEQ ID NO: 337477 - DNA, 12 bp, Artificial Sequence
  Oligonucleotide primer for the detection of SNP TSC0039888
ttttgattttga

SEQ ID NO: 337478 - DNA, 12 bp, Artificial Sequence
  Oligonucleotide primer for the detection of SNP TSC0039889
tctcattaattt

SEQ ID NO: 337479 - DNA, 12 bp, Artificial Sequence
  Oligonucleotide primer for the detection of SNP TSC0039889
tctcgttaattt

SEQ ID NO: 337480 - DNA, 12 bp, Artificial Sequence
  Oligonucleotide primer for the detection of SNP TSC0039889
ctcacaattcta

SEQ ID NO: 337481 - DNA, 12 bp, Artificial Sequence
  Oligonucleotide primer for the detection of SNP TSC0039889
tttcgttggttt

SEQ ID NO: 337482 - DNA, 12 bp, Artificial Sequence
  Oligonucleotide primer for the detection of SNP TSC0039892
taatataaactt

SEQ ID NO: 337483 - DNA, 12 bp, Artificial Sequence
  Oligonucleotide primer for the detection of SNP TSC0039892
agaaaagggtta

SEQ ID NO: 337484 - DNA, 12 bp, Artificial Sequence
  Oligonucleotide primer for the detection of SNP TSC0039893
ttatccttttac

SEQ ID NO: 337485 - DNA, 12 bp, Artificial Sequence
  Oligonucleotide primer for the detection of SNP TSC0039893
tatttatagaag

SEQ ID NO: 337486 - DNA, 12 bp, Artificial Sequence
  Oligonucleotide primer for the detection of SNP TSC0039894
ccctaacaataa

SEQ ID NO: 337487 - DNA, 12 bp, Artificial Sequence
  Oligonucleotide primer for the detection of SNP TSC0039894
tataagttttat

SEQ ID NO: 337488 - DNA, 12 bp, Artificial Sequence
  Oligonucleotide primer for the detection of SNP TSC0039894
cacaaactttat

SEQ ID NO: 337489 - DNA, 12 bp, Artificial Sequence
  Oligonucleotide primer for the detection of SNP TSC0039894
ttttgatagtgg

SEQ ID NO: 337490 - DNA, 12 bp, Artificial Sequence
  Oligonucleotide primer for the detection of SNP TSC0039895
ctatttataaaa

SEQ ID NO: 337491 - DNA, 12 bp, Artificial Sequence
  Oligonucleotide primer for the detection of SNP TSC0039895
atgaaaattgta

SEQ ID NO: 337492 - DNA, 12 bp, Artificial Sequence
  Oligonucleotide primer for the detection of SNP TSC0039895
ataaaaattata

SEQ ID NO: 337493 - DNA, 12 bp, Artificial Sequence
  Oligonucleotide primer for the detection of SNP TSC0039895
ttggttgtttat

SEQ ID NO: 337494 - DNA, 12 bp, Artificial Sequence
  Oligonucleotide primer for the detection of SNP TSC0039895
tcggttgtttat

SEQ ID NO: 337495 - DNA, 12 bp, Artificial Sequence
  Oligonucleotide primer for the detection of SNP TSC0039896
tcaaaatacctt

SEQ ID NO: 337496 - DNA, 12 bp, Artificial Sequence
  Oligonucleotide primer for the detection of SNP TSC0039897
aaaccctaacaa

SEQ ID NO: 337497 - DNA, 12 bp, Artificial Sequence
  Oligonucleotide primer for the detection of SNP TSC0039897
agttttatcgtt

SEQ ID NO: 337498 - DNA, 12 bp, Artificial Sequence
  Oligonucleotide primer for the detection of SNP TSC0039897
caaactttatca

SEQ ID NO: 337499 - DNA, 12 bp, Artificial Sequence
  Oligonucleotide primer for the detection of SNP TSC0039897
caaactttatcg

SEQ ID NO: 337500 - DNA, 12 bp, Artificial Sequence
  Oligonucleotide primer for the detection of SNP TSC0039897
gaaattttgata

SEQ ID NO: 337501 - DNA, 12 bp, Artificial Sequence
  Oligonucleotide primer for the detection of SNP TSC0039901
caaaaatcccta

SEQ ID NO: 337502 - DNA, 12 bp, Artificial Sequence
  Oligonucleotide primer for the detection of SNP TSC0039901
tataaattttat

SEQ ID NO: 337503 - DNA, 12 bp, Artificial Sequence
  Oligonucleotide primer for the detection of SNP TSC0039901
ataaatttcata

SEQ ID NO: 337504 - DNA, 12 bp, Artificial Sequence
  Oligonucleotide primer for the detection of SNP TSC0039901
gaatttttgttt

SEQ ID NO: 337505 - DNA, 12 bp, Artificial Sequence
  Oligonucleotide primer for the detection of SNP TSC0039902
ttgatataaaag

SEQ ID NO: 337506 - DNA, 12 bp, Artificial Sequence
  Oligonucleotide primer for the detection of SNP TSC0039903
aaactaatactt

SEQ ID NO: 337507 - DNA, 12 bp, Artificial Sequence
  Oligonucleotide primer for the detection of SNP TSC0039904
atcataattatt

SEQ ID NO: 337508 - DNA, 12 bp, Artificial Sequence
  Oligonucleotide primer for the detection of SNP TSC0039904
atataaaaggaa

SEQ ID NO: 337509 - DNA, 12 bp, Artificial Sequence
  Oligonucleotide primer for the detection of SNP TSC0039904
gttatagttatt

SEQ ID NO: 337510 - DNA, 12 bp, Artificial Sequence
  Oligonucleotide primer for the detection of SNP TSC0008668
tcttaaaaccat

SEQ ID NO: 337511 - DNA, 12 bp, Artificial Sequence
  Oligonucleotide primer for the detection of SNP TSC0008668
tgtggattataa

SEQ ID NO: 337512 - DNA, 12 bp, Artificial Sequence
  Oligonucleotide primer for the detection of SNP TSC0008668
cgtggattataa

SEQ ID NO: 337513 - DNA, 12 bp, Artificial Sequence
  Oligonucleotide primer for the detection of SNP TSC0039905
acgatatataat

SEQ ID NO: 337514 - DNA, 12 bp, Artificial Sequence
  Oligonucleotide primer for the detection of SNP TSC0039905
atgatgtgtgat

SEQ ID NO: 337515 - DNA, 12 bp, Artificial Sequence
  Oligonucleotide primer for the detection of SNP TSC0039905
acgatgtgtgat

SEQ ID NO: 337516 - DNA, 12 bp, Artificial Sequence
  Oligonucleotide primer for the detection of SNP TSC0039906
tataattaatct

SEQ ID NO: 337517 - DNA, 12 bp, Artificial Sequence
  Oligonucleotide primer for the detection of SNP TSC0039906
aattggaattaa

SEQ ID NO: 337518 - DNA, 12 bp, Artificial Sequence
  Oligonucleotide primer for the detection of SNP TSC0039907
aactttaaacca

SEQ ID NO: 337519 - DNA, 12 bp, Artificial Sequence
  Oligonucleotide primer for the detection of SNP TSC0039907
gattatagattg

SEQ ID NO: 337520 - DNA, 12 bp, Artificial Sequence
  Oligonucleotide primer for the detection of SNP TSC0039907
accacaaactaa

SEQ ID NO: 337521 - DNA, 12 bp, Artificial Sequence
  Oligonucleotide primer for the detection of SNP TSC0039907
gaattttaagtt

SEQ ID NO: 337522 - DNA, 12 bp, Artificial Sequence
  Oligonucleotide primer for the detection of SNP TSC0039908
ttgaaaggttag

SEQ ID NO: 337523 - DNA, 12 bp, Artificial Sequence
  Oligonucleotide primer for the detection of SNP TSC0039909
acataatattcc

SEQ ID NO: 337524 - DNA, 12 bp, Artificial Sequence
  Oligonucleotide primer for the detection of SNP TSC0039909
tcttatacacaa

SEQ ID NO: 337525 - DNA, 12 bp, Artificial Sequence
  Oligonucleotide primer for the detection of SNP TSC0039909
gtatagtatttt

SEQ ID NO: 337526 - DNA, 12 bp, Artificial Sequence
  Oligonucleotide primer for the detection of SNP TSC0039910
tataaatctatt

SEQ ID NO: 337527 - DNA, 12 bp, Artificial Sequence
  Oligonucleotide primer for the detection of SNP TSC0039910
ttaaataattta

SEQ ID NO: 337528 - DNA, 12 bp, Artificial Sequence
  Oligonucleotide primer for the detection of SNP TSC0039913
aaaacacttctt

SEQ ID NO: 337529 - DNA, 12 bp, Artificial Sequence
  Oligonucleotide primer for the detection of SNP TSC0039913
tatttagatata

SEQ ID NO: 337530 - DNA, 12 bp, Artificial Sequence
  Oligonucleotide primer for the detection of SNP TSC0039913
cattcaaacaca

SEQ ID NO: 337531 - DNA, 12 bp, Artificial Sequence
  Oligonucleotide primer for the detection of SNP TSC0039914
tattctaaaatc

SEQ ID NO: 337532 - DNA, 12 bp, Artificial Sequence
  Oligonucleotide primer for the detection of SNP TSC0039914
ttgttttttaga

SEQ ID NO: 337533 - DNA, 12 bp, Artificial Sequence
  Oligonucleotide primer for the detection of SNP TSC0039915
gtattttttgac

SEQ ID NO: 337534 - DNA, 12 bp, Artificial Sequence
  Oligonucleotide primer for the detection of SNP TSC0039915
acatcctttaac

SEQ ID NO: 337535 - DNA, 12 bp, Artificial Sequence
  Oligonucleotide primer for the detection of SNP TSC0039915
aaagtataaaat

SEQ ID NO: 337536 - DNA, 12 bp, Artificial Sequence
  Oligonucleotide primer for the detection of SNP TSC0039916
tcaacattttat

SEQ ID NO: 337537 - DNA, 12 bp, Artificial Sequence
  Oligonucleotide primer for the detection of SNP TSC0039916
aagattatttat

SEQ ID NO: 337538 - DNA, 12 bp, Artificial Sequence
  Oligonucleotide primer for the detection of SNP TSC0039916
aaaactatttat

SEQ ID NO: 337539 - DNA, 12 bp, Artificial Sequence
  Oligonucleotide primer for the detection of SNP TSC0039917
accccaaactta

SEQ ID NO: 337540 - DNA, 12 bp, Artificial Sequence
  Oligonucleotide primer for the detection of SNP TSC0039917
agttgaattatt

SEQ ID NO: 337541 - DNA, 12 bp, Artificial Sequence
  Oligonucleotide primer for the detection of SNP TSC0039917
agtcgaattatt

SEQ ID NO: 337542 - DNA, 12 bp, Artificial Sequence
  Oligonucleotide primer for the detection of SNP TSC0039917
taaatcaaacca

SEQ ID NO: 337543 - DNA, 12 bp, Artificial Sequence
  Oligonucleotide primer for the detection of SNP TSC0039917
taaatcgaacca

SEQ ID NO: 337544 - DNA, 12 bp, Artificial Sequence
  Oligonucleotide primer for the detection of SNP TSC0039918
actttttaaaca

SEQ ID NO: 337545 - DNA, 12 bp, Artificial Sequence
  Oligonucleotide primer for the detection of SNP TSC0039918
gaaagtaaatgt

SEQ ID NO: 337546 - DNA, 12 bp, Artificial Sequence
  Oligonucleotide primer for the detection of SNP TSC0039918
tattttttagat

SEQ ID NO: 337547 - DNA, 12 bp, Artificial Sequence
  Oligonucleotide primer for the detection of SNP TSC0039919
cacttctaaaac

SEQ ID NO: 337548 - DNA, 12 bp, Artificial Sequence
  Oligonucleotide primer for the detection of SNP TSC0039922
atattttcacat

SEQ ID NO: 337549 - DNA, 12 bp, Artificial Sequence
  Oligonucleotide primer for the detection of SNP TSC0039922
tttttaaagtga

SEQ ID NO: 337550 - DNA, 12 bp, Artificial Sequence
  Oligonucleotide primer for the detection of SNP TSC0039922
atgtttttatat

SEQ ID NO: 337551 - DNA, 12 bp, Artificial Sequence
  Oligonucleotide primer for the detection of SNP TSC0039923
acaatttatttc

SEQ ID NO: 337552 - DNA, 12 bp, Artificial Sequence
  Oligonucleotide primer for the detection of SNP TSC0039923
acgatttatttc

SEQ ID NO: 337553 - DNA, 12 bp, Artificial Sequence
  Oligonucleotide primer for the detection of SNP TSC0039923
atagaggtgatg

SEQ ID NO: 337554 - DNA, 12 bp, Artificial Sequence
  Oligonucleotide primer for the detection of SNP TSC0039924
ctaactccctcc

SEQ ID NO: 337555 - DNA, 12 bp, Artificial Sequence
  Oligonucleotide primer for the detection of SNP TSC0039924
tgtttggtgtag

SEQ ID NO: 337556 - DNA, 12 bp, Artificial Sequence
  Oligonucleotide primer for the detection of SNP TSC0039927
agtgtatgtttt

SEQ ID NO: 337557 - DNA, 12 bp, Artificial Sequence
  Oligonucleotide primer for the detection of SNP TSC0039927
aatatatatttc

SEQ ID NO: 337558 - DNA, 12 bp, Artificial Sequence
  Oligonucleotide primer for the detection of SNP TSC0039927
tgagaaaattaa

SEQ ID NO: 337559 - DNA, 12 bp, Artificial Sequence
  Oligonucleotide primer for the detection of SNP TSC0039929
ctaaatcatctt

SEQ ID NO: 337560 - DNA, 12 bp, Artificial Sequence
  Oligonucleotide primer for the detection of SNP TSC0039929
tgaaaataatga

SEQ ID NO: 337561 - DNA, 12 bp, Artificial Sequence
  Oligonucleotide primer for the detection of SNP TSC0039930
tggttattttgg

SEQ ID NO: 337562 - DNA, 12 bp, Artificial Sequence
  Oligonucleotide primer for the detection of SNP TSC0039932
aaataacaatac

SEQ ID NO: 337563 - DNA, 12 bp, Artificial Sequence
  Oligonucleotide primer for the detection of SNP TSC0039932
gtggattttttt

SEQ ID NO: 337564 - DNA, 12 bp, Artificial Sequence
  Oligonucleotide primer for the detection of SNP TSC0039932
taaactctccta

SEQ ID NO: 337565 - DNA, 12 bp, Artificial Sequence
  Oligonucleotide primer for the detection of SNP TSC0039932
ggtgataatgtt

SEQ ID NO: 337566 - DNA, 12 bp, Artificial Sequence
  Oligonucleotide primer for the detection of SNP TSC0039933
atacaaaatcaa

SEQ ID NO: 337567 - DNA, 12 bp, Artificial Sequence
  Oligonucleotide primer for the detection of SNP TSC0039934
aattccaccaaa

SEQ ID NO: 337568 - DNA, 12 bp, Artificial Sequence
  Oligonucleotide primer for the detection of SNP TSC0039934
tggtttattttt

SEQ ID NO: 337569 - DNA, 12 bp, Artificial Sequence
  Oligonucleotide primer for the detection of SNP TSC0039934
taatttacctct

SEQ ID NO: 337570 - DNA, 12 bp, Artificial Sequence
  Oligonucleotide primer for the detection of SNP TSC0039934
agttttattaaa

SEQ ID NO: 337571 - DNA, 12 bp, Artificial Sequence
  Oligonucleotide primer for the detection of SNP TSC0039935
actaaaattata

SEQ ID NO: 337572 - DNA, 12 bp, Artificial Sequence
  Oligonucleotide primer for the detection of SNP TSC0039935
taaagtgagtat

SEQ ID NO: 337573 - DNA, 12 bp, Artificial Sequence
  Oligonucleotide primer for the detection of SNP TSC0039935
taaaataaacat

SEQ ID NO: 337574 - DNA, 12 bp, Artificial Sequence
  Oligonucleotide primer for the detection of SNP TSC0039935
attggagttgta

SEQ ID NO: 337575 - DNA, 12 bp, Artificial Sequence
  Oligonucleotide primer for the detection of SNP TSC0039936
ataacaatccca

SEQ ID NO: 337576 - DNA, 12 bp, Artificial Sequence
  Oligonucleotide primer for the detection of SNP TSC0039936
ttatttgaggtg

SEQ ID NO: 337577 - DNA, 12 bp, Artificial Sequence
  Oligonucleotide primer for the detection of SNP TSC0039936
ctatttaaaata

SEQ ID NO: 337578 - DNA, 12 bp, Artificial Sequence
  Oligonucleotide primer for the detection of SNP TSC0039936
ggtggtagtttt

SEQ ID NO: 337579 - DNA, 12 bp, Artificial Sequence
  Oligonucleotide primer for the detection of SNP TSC0039938
aacaaaaattaa

SEQ ID NO: 337580 - DNA, 12 bp, Artificial Sequence
  Oligonucleotide primer for the detection of SNP TSC0039938
aacgaaaattaa

SEQ ID NO: 337581 - DNA, 12 bp, Artificial Sequence
  Oligonucleotide primer for the detection of SNP TSC0039938
gttaaatttaag

SEQ ID NO: 337582 - DNA, 12 bp, Artificial Sequence
  Oligonucleotide primer for the detection of SNP TSC0039938
accaaatttaaa

SEQ ID NO: 337583 - DNA, 12 bp, Artificial Sequence
  Oligonucleotide primer for the detection of SNP TSC0039938
taatgaggatta

SEQ ID NO: 337584 - DNA, 12 bp, Artificial Sequence
  Oligonucleotide primer for the detection of SNP TSC0039938
taacgaggatta

SEQ ID NO: 337585 - DNA, 12 bp, Artificial Sequence
  Oligonucleotide primer for the detection of SNP TSC0039939
atccatctctct

SEQ ID NO: 337586 - DNA, 12 bp, Artificial Sequence
  Oligonucleotide primer for the detection of SNP TSC0039939
tggaggttggaa

SEQ ID NO: 337587 - DNA, 12 bp, Artificial Sequence
  Oligonucleotide primer for the detection of SNP TSC0005340
taatatatacta

SEQ ID NO: 337588 - DNA, 12 bp, Artificial Sequence
  Oligonucleotide primer for the detection of SNP TSC0005340
atttaaaatgtt

SEQ ID NO: 337589 - DNA, 12 bp, Artificial Sequence
  Oligonucleotide primer for the detection of SNP TSC0005340
atttaaaatatc

SEQ ID NO: 337590 - DNA, 12 bp, Artificial Sequence
  Oligonucleotide primer for the detection of SNP TSC0005340
tggtatatgtta

SEQ ID NO: 337591 - DNA, 12 bp, Artificial Sequence
  Oligonucleotide primer for the detection of SNP TSC0039940
ttaaaacaatac

SEQ ID NO: 337592 - DNA, 12 bp, Artificial Sequence
  Oligonucleotide primer for the detection of SNP TSC0039940
ttagagaagtag

SEQ ID NO: 337593 - DNA, 12 bp, Artificial Sequence
  Oligonucleotide primer for the detection of SNP TSC0039941
aaaacctaccac

SEQ ID NO: 337594 - DNA, 12 bp, Artificial Sequence
  Oligonucleotide primer for the detection of SNP TSC0039941
ggttttaggtat

SEQ ID NO: 337595 - DNA, 12 bp, Artificial Sequence
  Oligonucleotide primer for the detection of SNP TSC0039941
ggttttaggtac

SEQ ID NO: 337596 - DNA, 12 bp, Artificial Sequence
  Oligonucleotide primer for the detection of SNP TSC0039941
aaatcccaaata

SEQ ID NO: 337597 - DNA, 12 bp, Artificial Sequence
  Oligonucleotide primer for the detection of SNP TSC0039941
agggtttgttat

SEQ ID NO: 337598 - DNA, 12 bp, Artificial Sequence
  Oligonucleotide primer for the detection of SNP TSC0039942
aattttccttat

SEQ ID NO: 337599 - DNA, 12 bp, Artificial Sequence
  Oligonucleotide primer for the detection of SNP TSC0039942
tttttataaggg

SEQ ID NO: 337600 - DNA, 12 bp, Artificial Sequence
  Oligonucleotide primer for the detection of SNP TSC0039942
tcctcacaaaaa

SEQ ID NO: 337601 - DNA, 12 bp, Artificial Sequence
  Oligonucleotide primer for the detection of SNP TSC0039943
atacacaaaaaa

SEQ ID NO: 337602 - DNA, 12 bp, Artificial Sequence
  Oligonucleotide primer for the detection of SNP TSC0039943
tttattgtgaat

SEQ ID NO: 337603 - DNA, 12 bp, Artificial Sequence
  Oligonucleotide primer for the detection of SNP TSC0039943
ttcactataaac

SEQ ID NO: 337604 - DNA, 12 bp, Artificial Sequence
  Oligonucleotide primer for the detection of SNP TSC0039943
atatataagaaa

SEQ ID NO: 337605 - DNA, 12 bp, Artificial Sequence
  Oligonucleotide primer for the detection of SNP TSC0039944
tactacaaaaat

SEQ ID NO: 337606 - DNA, 12 bp, Artificial Sequence
  Oligonucleotide primer for the detection of SNP TSC0039944
aatctctcccca

SEQ ID NO: 337607 - DNA, 12 bp, Artificial Sequence
  Oligonucleotide primer for the detection of SNP TSC0039944
tgttataaaaat

SEQ ID NO: 337608 - DNA, 12 bp, Artificial Sequence
  Oligonucleotide primer for the detection of SNP TSC0005196
tttttctcttct

SEQ ID NO: 337609 - DNA, 12 bp, Artificial Sequence
  Oligonucleotide primer for the detection of SNP TSC0005196
taaggaataggg

SEQ ID NO: 337610 - DNA, 12 bp, Artificial Sequence
  Oligonucleotide primer for the detection of SNP TSC0005197
tcctaaaaacat

SEQ ID NO: 337611 - DNA, 12 bp, Artificial Sequence
  Oligonucleotide primer for the detection of SNP TSC0005198
ttaaggtatata

SEQ ID NO: 337612 - DNA, 12 bp, Artificial Sequence
  Oligonucleotide primer for the detection of SNP TSC0039945
taaacatttatt

SEQ ID NO: 337613 - DNA, 12 bp, Artificial Sequence
  Oligonucleotide primer for the detection of SNP TSC0039945
ttcattcattca

SEQ ID NO: 337614 - DNA, 12 bp, Artificial Sequence
  Oligonucleotide primer for the detection of SNP TSC0039948
caaccacttttc

SEQ ID NO: 337615 - DNA, 12 bp, Artificial Sequence
  Oligonucleotide primer for the detection of SNP TSC0039948
gagtttattaaa

SEQ ID NO: 337616 - DNA, 12 bp, Artificial Sequence
  Oligonucleotide primer for the detection of SNP TSC0039949
aaaaacatatca

SEQ ID NO: 337617 - DNA, 12 bp, Artificial Sequence
  Oligonucleotide primer for the detection of SNP TSC0039949
tgaattaaaatt

SEQ ID NO: 337618 - DNA, 12 bp, Artificial Sequence
  Oligonucleotide primer for the detection of SNP TSC0039949
taaattaaaatc

SEQ ID NO: 337619 - DNA, 12 bp, Artificial Sequence
  Oligonucleotide primer for the detection of SNP TSC0039949
gaaaatatatta

SEQ ID NO: 337620 - DNA, 12 bp, Artificial Sequence
  Oligonucleotide primer for the detection of SNP TSC0039950
atcaaaatatac

SEQ ID NO: 337621 - DNA, 12 bp, Artificial Sequence
  Oligonucleotide primer for the detection of SNP TSC0039950
atgatttagtta

SEQ ID NO: 337622 - DNA, 12 bp, Artificial Sequence
  Oligonucleotide primer for the detection of SNP TSC0039950
acgatttagtta

SEQ ID NO: 337623 - DNA, 12 bp, Artificial Sequence
  Oligonucleotide primer for the detection of SNP TSC0039950
acaactcaacca

SEQ ID NO: 337624 - DNA, 12 bp, Artificial Sequence
  Oligonucleotide primer for the detection of SNP TSC0039950
acgactcaacca

SEQ ID NO: 337625 - DNA, 12 bp, Artificial Sequence
  Oligonucleotide primer for the detection of SNP TSC0039950
attagagtatgt

SEQ ID NO: 337626 - DNA, 12 bp, Artificial Sequence
  Oligonucleotide primer for the detection of SNP TSC0039951
caaaatcttcat

SEQ ID NO: 337627 - DNA, 12 bp, Artificial Sequence
  Oligonucleotide primer for the detection of SNP TSC0039951
gatattgagata

SEQ ID NO: 337628 - DNA, 12 bp, Artificial Sequence
  Oligonucleotide primer for the detection of SNP TSC0039953
tggtggttatta

SEQ ID NO: 337629 - DNA, 12 bp, Artificial Sequence
  Oligonucleotide primer for the detection of SNP TSC0039956
ataacactaaat

SEQ ID NO: 337630 - DNA, 12 bp, Artificial Sequence
  Oligonucleotide primer for the detection of SNP TSC0039956
aaataatgtata

SEQ ID NO: 337631 - DNA, 12 bp, Artificial Sequence
  Oligonucleotide primer for the detection of SNP TSC0039959
cttaatatacct

SEQ ID NO: 337632 - DNA, 12 bp, Artificial Sequence
  Oligonucleotide primer for the detection of SNP TSC0039960
attaaaaaactc

SEQ ID NO: 337633 - DNA, 12 bp, Artificial Sequence
  Oligonucleotide primer for the detection of SNP TSC0039960
gagaagaagata

SEQ ID NO: 337634 - DNA, 12 bp, Artificial Sequence
  Oligonucleotide primer for the detection of SNP TSC0039961
ttaaaaaaaatc

SEQ ID NO: 337635 - DNA, 12 bp, Artificial Sequence
  Oligonucleotide primer for the detection of SNP TSC0039961
tttaagtggtta

SEQ ID NO: 337636 - DNA, 12 bp, Artificial Sequence
  Oligonucleotide primer for the detection of SNP TSC0039968
accatataaaaa

SEQ ID NO: 337637 - DNA, 12 bp, Artificial Sequence
  Oligonucleotide primer for the detection of SNP TSC0039968
attcttcaactc

SEQ ID NO: 337638 - DNA, 12 bp, Artificial Sequence
  Oligonucleotide primer for the detection of SNP TSC0039968
attatatagaaa

SEQ ID NO: 337639 - DNA, 12 bp, Artificial Sequence
  Oligonucleotide primer for the detection of SNP TSC0039969
cgaaatcacacc

SEQ ID NO: 337640 - DNA, 12 bp, Artificial Sequence
  Oligonucleotide primer for the detection of SNP TSC0039969
tgagattatatt

SEQ ID NO: 337641 - DNA, 12 bp, Artificial Sequence
  Oligonucleotide primer for the detection of SNP TSC0039969
cgagattatatt

SEQ ID NO: 337642 - DNA, 12 bp, Artificial Sequence
  Oligonucleotide primer for the detection of SNP TSC0039970
taatataatctc

SEQ ID NO: 337643 - DNA, 12 bp, Artificial Sequence
  Oligonucleotide primer for the detection of SNP TSC0039971
ttaataactctc

SEQ ID NO: 337644 - DNA, 12 bp, Artificial Sequence
  Oligonucleotide primer for the detection of SNP TSC0039971
agagagatttga

SEQ ID NO: 337645 - DNA, 12 bp, Artificial Sequence
  Oligonucleotide primer for the detection of SNP TSC0039975
acatctttatta

SEQ ID NO: 337646 - DNA, 12 bp, Artificial Sequence
  Oligonucleotide primer for the detection of SNP TSC0039975
ctttacaaacac

SEQ ID NO: 337647 - DNA, 12 bp, Artificial Sequence
  Oligonucleotide primer for the detection of SNP TSC0039975
atatttttattg

SEQ ID NO: 337648 - DNA, 12 bp, Artificial Sequence
  Oligonucleotide primer for the detection of SNP TSC0039978
cataaaaacttt

SEQ ID NO: 337649 - DNA, 12 bp, Artificial Sequence
  Oligonucleotide primer for the detection of SNP TSC0039978
ttgtgaaatgta

SEQ ID NO: 337650 - DNA, 12 bp, Artificial Sequence
  Oligonucleotide primer for the detection of SNP TSC0039979
tacatctactac

SEQ ID NO: 337651 - DNA, 12 bp, Artificial Sequence
  Oligonucleotide primer for the detection of SNP TSC0039979
tgggttttttta

SEQ ID NO: 337652 - DNA, 12 bp, Artificial Sequence
  Oligonucleotide primer for the detection of SNP TSC0039981
ttattaaatttc

SEQ ID NO: 337653 - DNA, 12 bp, Artificial Sequence
  Oligonucleotide primer for the detection of SNP TSC0039981
aaagtttttgag

SEQ ID NO: 337654 - DNA, 12 bp, Artificial Sequence
  Oligonucleotide primer for the detection of SNP TSC0039982
taagaataatga

SEQ ID NO: 337655 - DNA, 12 bp, Artificial Sequence
  Oligonucleotide primer for the detection of SNP TSC0039983
ttaaaaccttat

SEQ ID NO: 337656 - DNA, 12 bp, Artificial Sequence
  Oligonucleotide primer for the detection of SNP TSC0039983
ttgtatatgggg

SEQ ID NO: 337657 - DNA, 12 bp, Artificial Sequence
  Oligonucleotide primer for the detection of SNP TSC0039984
aattctccccat

SEQ ID NO: 337658 - DNA, 12 bp, Artificial Sequence
  Oligonucleotide primer for the detection of SNP TSC0039984
tgtgtattgagg

SEQ ID NO: 337659 - DNA, 12 bp, Artificial Sequence
  Oligonucleotide primer for the detection of SNP TSC0039985
caatatacacac

SEQ ID NO: 337660 - DNA, 12 bp, Artificial Sequence
  Oligonucleotide primer for the detection of SNP TSC0039985
aatgtttagatg

SEQ ID NO: 337661 - DNA, 12 bp, Artificial Sequence
  Oligonucleotide primer for the detection of SNP TSC0039985
aatacttaaata

SEQ ID NO: 337662 - DNA, 12 bp, Artificial Sequence
  Oligonucleotide primer for the detection of SNP TSC0039985
taatgtatatat

SEQ ID NO: 337663 - DNA, 12 bp, Artificial Sequence
  Oligonucleotide primer for the detection of SNP TSC0039986
tctaataattct

SEQ ID NO: 337664 - DNA, 12 bp, Artificial Sequence
  Oligonucleotide primer for the detection of SNP TSC0039986
tttttttaggta

SEQ ID NO: 337665 - DNA, 12 bp, Artificial Sequence
  Oligonucleotide primer for the detection of SNP TSC0039987
ccaatcaaccat

SEQ ID NO: 337666 - DNA, 12 bp, Artificial Sequence
  Oligonucleotide primer for the detection of SNP TSC0039987
gttaaatttata

SEQ ID NO: 337667 - DNA, 12 bp, Artificial Sequence
  Oligonucleotide primer for the detection of SNP TSC0039989
atactataattt

SEQ ID NO: 337668 - DNA, 12 bp, Artificial Sequence
  Oligonucleotide primer for the detection of SNP TSC0039989
tagagtaatgta

SEQ ID NO: 337669 - DNA, 12 bp, Artificial Sequence
  Oligonucleotide primer for the detection of SNP TSC0039990
actattatcttc

SEQ ID NO: 337670 - DNA, 12 bp, Artificial Sequence
  Oligonucleotide primer for the detection of SNP TSC0039990
agaataataaag

SEQ ID NO: 337671 - DNA, 12 bp, Artificial Sequence
  Oligonucleotide primer for the detection of SNP TSC0039993
accaccacctct

SEQ ID NO: 337672 - DNA, 12 bp, Artificial Sequence
  Oligonucleotide primer for the detection of SNP TSC0039994
ctctttataaat

SEQ ID NO: 337673 - DNA, 12 bp, Artificial Sequence
  Oligonucleotide primer for the detection of SNP TSC0039994
tttgaagttgag

SEQ ID NO: 337674 - DNA, 12 bp, Artificial Sequence
  Oligonucleotide primer for the detection of SNP TSC0039996
ttaaaacataat

SEQ ID NO: 337675 - DNA, 12 bp, Artificial Sequence
  Oligonucleotide primer for the detection of SNP TSC0039996
tggagagagaaa

SEQ ID NO: 337676 - DNA, 12 bp, Artificial Sequence
  Oligonucleotide primer for the detection of SNP TSC0039996
ttgaaatataat

SEQ ID NO: 337677 - DNA, 12 bp, Artificial Sequence
  Oligonucleotide primer for the detection of SNP TSC0039997
caacctatttat

SEQ ID NO: 337678 - DNA, 12 bp, Artificial Sequence
  Oligonucleotide primer for the detection of SNP TSC0039997
aagtggtttatg

SEQ ID NO: 337679 - DNA, 12 bp, Artificial Sequence
  Oligonucleotide primer for the detection of SNP TSC0039999
ataccatctaac

SEQ ID NO: 337680 - DNA, 12 bp, Artificial Sequence
  Oligonucleotide primer for the detection of SNP TSC0039999
ggaaaaattata

SEQ ID NO: 337681 - DNA, 12 bp, Artificial Sequence
  Oligonucleotide primer for the detection of SNP TSC0039999
atattatttaat

SEQ ID NO: 337682 - DNA, 12 bp, Artificial Sequence
  Oligonucleotide primer for the detection of SNP TSC0040000
attcatcacatt

SEQ ID NO: 337683 - DNA, 12 bp, Artificial Sequence
  Oligonucleotide primer for the detection of SNP TSC0040000
aataatgaatga

SEQ ID NO: 337684 - DNA, 12 bp, Artificial Sequence
  Oligonucleotide primer for the detection of SNP TSC0040001
catttaaattaa

SEQ ID NO: 337685 - DNA, 12 bp, Artificial Sequence
  Oligonucleotide primer for the detection of SNP TSC0040001
atagtaaagatt

SEQ ID NO: 337686 - DNA, 12 bp, Artificial Sequence
  Oligonucleotide primer for the detection of SNP TSC0040001
tatttggattgg

SEQ ID NO: 337687 - DNA, 12 bp, Artificial Sequence
  Oligonucleotide primer for the detection of SNP TSC0040002
accaaaatatct

SEQ ID NO: 337688 - DNA, 12 bp, Artificial Sequence
  Oligonucleotide primer for the detection of SNP TSC0040002
aagatttagatg

SEQ ID NO: 337689 - DNA, 12 bp, Artificial Sequence
  Oligonucleotide primer for the detection of SNP TSC0040003
catctctctcaa

SEQ ID NO: 337690 - DNA, 12 bp, Artificial Sequence
  Oligonucleotide primer for the detection of SNP TSC0040003
aagtggtagtaa

SEQ ID NO: 337691 - DNA, 12 bp, Artificial Sequence
  Oligonucleotide primer for the detection of SNP TSC0040003
aaataacaataa

SEQ ID NO: 337692 - DNA, 12 bp, Artificial Sequence
  Oligonucleotide primer for the detection of SNP TSC0040004
aaccccttctat

SEQ ID NO: 337693 - DNA, 12 bp, Artificial Sequence
  Oligonucleotide primer for the detection of SNP TSC0040004
gagtgtgggttg

SEQ ID NO: 337694 - DNA, 12 bp, Artificial Sequence
  Oligonucleotide primer for the detection of SNP TSC0040005
tgttaaggtttt

SEQ ID NO: 337695 - DNA, 12 bp, Artificial Sequence
  Oligonucleotide primer for the detection of SNP TSC0040005
tatcaaaatctt

SEQ ID NO: 337696 - DNA, 12 bp, Artificial Sequence
  Oligonucleotide primer for the detection of SNP TSC0040005
agataattaatt

SEQ ID NO: 337697 - DNA, 12 bp, Artificial Sequence
  Oligonucleotide primer for the detection of SNP TSC0040008
attaaacactta

SEQ ID NO: 337698 - DNA, 12 bp, Artificial Sequence
  Oligonucleotide primer for the detection of SNP TSC0040008
tttggagataga

SEQ ID NO: 337699 - DNA, 12 bp, Artificial Sequence
  Oligonucleotide primer for the detection of SNP TSC0040008
attaagtatttg

SEQ ID NO: 337700 - DNA, 12 bp, Artificial Sequence
  Oligonucleotide primer for the detection of SNP TSC0040012
taataaatttta

SEQ ID NO: 337701 - DNA, 12 bp, Artificial Sequence
  Oligonucleotide primer for the detection of SNP TSC0040013
actcttttcatt

SEQ ID NO: 337702 - DNA, 12 bp, Artificial Sequence
  Oligonucleotide primer for the detection of SNP TSC0040013
ttagtttaatta

SEQ ID NO: 337703 - DNA, 12 bp, Artificial Sequence
  Oligonucleotide primer for the detection of SNP TSC0040015
tatactaccaat

SEQ ID NO: 337704 - DNA, 12 bp, Artificial Sequence
  Oligonucleotide primer for the detection of SNP TSC0040022
atacatttaaat

SEQ ID NO: 337705 - DNA, 12 bp, Artificial Sequence
  Oligonucleotide primer for the detection of SNP TSC0040023
ccaattttaaat

SEQ ID NO: 337706 - DNA, 12 bp, Artificial Sequence
  Oligonucleotide primer for the detection of SNP TSC0040023
gaaatattttgg

SEQ ID NO: 337707 - DNA, 12 bp, Artificial Sequence
  Oligonucleotide primer for the detection of SNP TSC0040025
atttttattatt

SEQ ID NO: 337708 - DNA, 12 bp, Artificial Sequence
  Oligonucleotide primer for the detection of SNP TSC0040025
tggagattagaa

SEQ ID NO: 337709 - DNA, 12 bp, Artificial Sequence
  Oligonucleotide primer for the detection of SNP TSC0040025
atttttattgtt

SEQ ID NO: 337710 - DNA, 12 bp, Artificial Sequence
  Oligonucleotide primer for the detection of SNP TSC0040026
actaacattaaa

SEQ ID NO: 337711 - DNA, 12 bp, Artificial Sequence
  Oligonucleotide primer for the detection of SNP TSC0040026
gaagaaaaattg

SEQ ID NO: 337712 - DNA, 12 bp, Artificial Sequence
  Oligonucleotide primer for the detection of SNP TSC0040027
cattaacaaaac

SEQ ID NO: 337713 - DNA, 12 bp, Artificial Sequence
  Oligonucleotide primer for the detection of SNP TSC0040027
agagtattaaag

SEQ ID NO: 337714 - DNA, 12 bp, Artificial Sequence
  Oligonucleotide primer for the detection of SNP TSC0040030
atctattctctc

SEQ ID NO: 337715 - DNA, 12 bp, Artificial Sequence
  Oligonucleotide primer for the detection of SNP TSC0040030
atgtgtgtaaga

SEQ ID NO: 337716 - DNA, 12 bp, Artificial Sequence
  Oligonucleotide primer for the detection of SNP TSC0040031
cattcttataca

SEQ ID NO: 337717 - DNA, 12 bp, Artificial Sequence
  Oligonucleotide primer for the detection of SNP TSC0040031
cgttcttataca

SEQ ID NO: 337718 - DNA, 12 bp, Artificial Sequence
  Oligonucleotide primer for the detection of SNP TSC0040031
gtggtgaatgat

SEQ ID NO: 337719 - DNA, 12 bp, Artificial Sequence
  Oligonucleotide primer for the detection of SNP TSC0040031
gtggtgaatgac

SEQ ID NO: 337720 - DNA, 12 bp, Artificial Sequence
  Oligonucleotide primer for the detection of SNP TSC0040031
ataataaataac

SEQ ID NO: 337721 - DNA, 12 bp, Artificial Sequence
  Oligonucleotide primer for the detection of SNP TSC0040031
ttgtttttatgt

SEQ ID NO: 337722 - DNA, 12 bp, Artificial Sequence
  Oligonucleotide primer for the detection of SNP TSC0040031
tcgtttttatgt

SEQ ID NO: 337723 - DNA, 12 bp, Artificial Sequence
  Oligonucleotide primer for the detection of SNP TSC0040032
aactttaaattc

SEQ ID NO: 337724 - DNA, 12 bp, Artificial Sequence
  Oligonucleotide primer for the detection of SNP TSC0040032
gagtatgttata

SEQ ID NO: 337725 - DNA, 12 bp, Artificial Sequence
  Oligonucleotide primer for the detection of SNP TSC0040033
tttaaaattata

SEQ ID NO: 337726 - DNA, 12 bp, Artificial Sequence
  Oligonucleotide primer for the detection of SNP TSC0040033
aattatttttat

SEQ ID NO: 337727 - DNA, 12 bp, Artificial Sequence
  Oligonucleotide primer for the detection of SNP TSC0040033
aatcattttcac

SEQ ID NO: 337728 - DNA, 12 bp, Artificial Sequence
  Oligonucleotide primer for the detection of SNP TSC0040033
tttgaaattgta

SEQ ID NO: 337729 - DNA, 12 bp, Artificial Sequence
  Oligonucleotide primer for the detection of SNP TSC0040037
tatattattatg

SEQ ID NO: 337730 - DNA, 12 bp, Artificial Sequence
  Oligonucleotide primer for the detection of SNP TSC0040037
aatataaaaagt

SEQ ID NO: 337731 - DNA, 12 bp, Artificial Sequence
  Oligonucleotide primer for the detection of SNP TSC0040043
tagtttttaaag

SEQ ID NO: 337732 - DNA, 12 bp, Artificial Sequence
  Oligonucleotide primer for the detection of SNP TSC0040044
tactttcaactt

SEQ ID NO: 337733 - DNA, 12 bp, Artificial Sequence
  Oligonucleotide primer for the detection of SNP TSC0040044
ggaattagtaat

SEQ ID NO: 337734 - DNA, 12 bp, Artificial Sequence
  Oligonucleotide primer for the detection of SNP TSC0040045
cactccactaat

SEQ ID NO: 337735 - DNA, 12 bp, Artificial Sequence
  Oligonucleotide primer for the detection of SNP TSC0040046
ttttattaaatt

SEQ ID NO: 337736 - DNA, 12 bp, Artificial Sequence
  Oligonucleotide primer for the detection of SNP TSC0040046
ataatgaggaga

SEQ ID NO: 337737 - DNA, 12 bp, Artificial Sequence
  Oligonucleotide primer for the detection of SNP TSC0040047
ttttttaattaa

SEQ ID NO: 337738 - DNA, 12 bp, Artificial Sequence
  Oligonucleotide primer for the detection of SNP TSC0040050
taaccaatcaaa

SEQ ID NO: 337739 - DNA, 12 bp, Artificial Sequence
  Oligonucleotide primer for the detection of SNP TSC0040050
ttaagggtaaaa

SEQ ID NO: 337740 - DNA, 12 bp, Artificial Sequence
  Oligonucleotide primer for the detection of SNP TSC0040050
ttgattagttag

SEQ ID NO: 337741 - DNA, 12 bp, Artificial Sequence
  Oligonucleotide primer for the detection of SNP TSC0040052
ccaaaaaactaa

SEQ ID NO: 337742 - DNA, 12 bp, Artificial Sequence
  Oligonucleotide primer for the detection of SNP TSC0040052
gaatggttttat

SEQ ID NO: 337743 - DNA, 12 bp, Artificial Sequence
  Oligonucleotide primer for the detection of SNP TSC0040052
aaataatcccac

SEQ ID NO: 337744 - DNA, 12 bp, Artificial Sequence
  Oligonucleotide primer for the detection of SNP TSC0040052
ttaagaggttgg

SEQ ID NO: 337745 - DNA, 12 bp, Artificial Sequence
  Oligonucleotide primer for the detection of SNP TSC0040053
aaatactttccc

SEQ ID NO: 337746 - DNA, 12 bp, Artificial Sequence
  Oligonucleotide primer for the detection of SNP TSC0040053
tttgggaggtag

SEQ ID NO: 337747 - DNA, 12 bp, Artificial Sequence
  Oligonucleotide primer for the detection of SNP TSC0040053
gagtgttttttt

SEQ ID NO: 337748 - DNA, 12 bp, Artificial Sequence
  Oligonucleotide primer for the detection of SNP TSC0040054
taaacaaattca

SEQ ID NO: 337749 - DNA, 12 bp, Artificial Sequence
  Oligonucleotide primer for the detection of SNP TSC0040054
tttagatgtgtt

SEQ ID NO: 337750 - DNA, 12 bp, Artificial Sequence
  Oligonucleotide primer for the detection of SNP TSC0040054
tttagacgtgtt

SEQ ID NO: 337751 - DNA, 12 bp, Artificial Sequence
  Oligonucleotide primer for the detection of SNP TSC0040054
tttagatgtgtc

SEQ ID NO: 337752 - DNA, 12 bp, Artificial Sequence
  Oligonucleotide primer for the detection of SNP TSC0040054
tttagacgtgtc

SEQ ID NO: 337753 - DNA, 12 bp, Artificial Sequence
  Oligonucleotide primer for the detection of SNP TSC0040054
ctcaaacatatc

SEQ ID NO: 337754 - DNA, 12 bp, Artificial Sequence
  Oligonucleotide primer for the detection of SNP TSC0040054
ctcaaacgtatc

SEQ ID NO: 337755 - DNA, 12 bp, Artificial Sequence
  Oligonucleotide primer for the detection of SNP TSC0040054
ttgggtaaattt

SEQ ID NO: 337756 - DNA, 12 bp, Artificial Sequence
  Oligonucleotide primer for the detection of SNP TSC0004732
aaaccacttccc

SEQ ID NO: 337757 - DNA, 12 bp, Artificial Sequence
  Oligonucleotide primer for the detection of SNP TSC0004732
agtagaagttgg

SEQ ID NO: 337758 - DNA, 12 bp, Artificial Sequence
  Oligonucleotide primer for the detection of SNP TSC0040058
taagagtaatat

SEQ ID NO: 337759 - DNA, 12 bp, Artificial Sequence
  Oligonucleotide primer for the detection of SNP TSC0040058
caaaaacaatat

SEQ ID NO: 337760 - DNA, 12 bp, Artificial Sequence
  Oligonucleotide primer for the detection of SNP TSC0040058
gtgatagttata

SEQ ID NO: 337761 - DNA, 12 bp, Artificial Sequence
  Oligonucleotide primer for the detection of SNP TSC0040059
cactacctatat

SEQ ID NO: 337762 - DNA, 12 bp, Artificial Sequence
  Oligonucleotide primer for the detection of SNP TSC0040060
taacctcatttt

SEQ ID NO: 337763 - DNA, 12 bp, Artificial Sequence
  Oligonucleotide primer for the detection of SNP TSC0040060
agagatgattaa

SEQ ID NO: 337764 - DNA, 12 bp, Artificial Sequence
  Oligonucleotide primer for the detection of SNP TSC0040061
atttatatgtga

SEQ ID NO: 337765 - DNA, 12 bp, Artificial Sequence
  Oligonucleotide primer for the detection of SNP TSC0040061
gaggtagaaagt

SEQ ID NO: 337766 - DNA, 12 bp, Artificial Sequence
  Oligonucleotide primer for the detection of SNP TSC0040061
gaggtagaaagc

SEQ ID NO: 337767 - DNA, 12 bp, Artificial Sequence
  Oligonucleotide primer for the detection of SNP TSC0040062
aattatatatat

SEQ ID NO: 337768 - DNA, 12 bp, Artificial Sequence
  Oligonucleotide primer for the detection of SNP TSC0040062
gtgaaaaatata

SEQ ID NO: 337769 - DNA, 12 bp, Artificial Sequence
  Oligonucleotide primer for the detection of SNP TSC0040063
tttaaagtggga

SEQ ID NO: 337770 - DNA, 12 bp, Artificial Sequence
  Oligonucleotide primer for the detection of SNP TSC0040064
gatatataggtg

SEQ ID NO: 337771 - DNA, 12 bp, Artificial Sequence
  Oligonucleotide primer for the detection of SNP TSC0040065
attataggtatc

SEQ ID NO: 337772 - DNA, 12 bp, Artificial Sequence
  Oligonucleotide primer for the detection of SNP TSC0040070
aaaacacatttt

SEQ ID NO: 337773 - DNA, 12 bp, Artificial Sequence
  Oligonucleotide primer for the detection of SNP TSC0040070
tttggtagttag

SEQ ID NO: 337774 - DNA, 12 bp, Artificial Sequence
  Oligonucleotide primer for the detection of SNP TSC0040071
tattacaacaac

SEQ ID NO: 337775 - DNA, 12 bp, Artificial Sequence
  Oligonucleotide primer for the detection of SNP TSC0040071
ggattttaatag

SEQ ID NO: 337776 - DNA, 12 bp, Artificial Sequence
  Oligonucleotide primer for the detection of SNP TSC0040072
gttttattatat

SEQ ID NO: 337777 - DNA, 12 bp, Artificial Sequence
  Oligonucleotide primer for the detection of SNP TSC0040072
attttactatat

SEQ ID NO: 337778 - DNA, 12 bp, Artificial Sequence
  Oligonucleotide primer for the detection of SNP TSC0040072
ttaaaaataaga

SEQ ID NO: 337779 - DNA, 12 bp, Artificial Sequence
  Oligonucleotide primer for the detection of SNP TSC0040073
aaatcaatctat

SEQ ID NO: 337780 - DNA, 12 bp, Artificial Sequence
  Oligonucleotide primer for the detection of SNP TSC0040073
aagttagtttgt

SEQ ID NO: 337781 - DNA, 12 bp, Artificial Sequence
  Oligonucleotide primer for the detection of SNP TSC0040074
caaaactctaat

SEQ ID NO: 337782 - DNA, 12 bp, Artificial Sequence
  Oligonucleotide primer for the detection of SNP TSC0040074
gattgtttaaga

SEQ ID NO: 337783 - DNA, 12 bp, Artificial Sequence
  Oligonucleotide primer for the detection of SNP TSC0040074
aattatttaaaa

SEQ ID NO: 337784 - DNA, 12 bp, Artificial Sequence
  Oligonucleotide primer for the detection of SNP TSC0040074
tagagttttagt

SEQ ID NO: 337785 - DNA, 12 bp, Artificial Sequence
  Oligonucleotide primer for the detection of SNP TSC0040075
gatgtttttgga

SEQ ID NO: 337786 - DNA, 12 bp, Artificial Sequence
  Oligonucleotide primer for the detection of SNP TSC0040076
aaaacatttaaa

SEQ ID NO: 337787 - DNA, 12 bp, Artificial Sequence
  Oligonucleotide primer for the detection of SNP TSC0040076
taaaaggaaaag

SEQ ID NO: 337788 - DNA, 12 bp, Artificial Sequence
  Oligonucleotide primer for the detection of SNP TSC0040076
tagggtatttaa

SEQ ID NO: 337789 - DNA, 12 bp, Artificial Sequence
  Oligonucleotide primer for the detection of SNP TSC0006295
gttaattaaatc

SEQ ID NO: 337790 - DNA, 12 bp, Artificial Sequence
  Oligonucleotide primer for the detection of SNP TSC0040077
aattatagggtt

SEQ ID NO: 337791 - DNA, 12 bp, Artificial Sequence
  Oligonucleotide primer for the detection of SNP TSC0040077
aattatagggtc

SEQ ID NO: 337792 - DNA, 12 bp, Artificial Sequence
  Oligonucleotide primer for the detection of SNP TSC0040077
aaccacaaaatc

SEQ ID NO: 337793 - DNA, 12 bp, Artificial Sequence
  Oligonucleotide primer for the detection of SNP TSC0040077
aagtgagtaaag

SEQ ID NO: 337794 - DNA, 12 bp, Artificial Sequence
  Oligonucleotide primer for the detection of SNP TSC0040079
aataacaaacaa

SEQ ID NO: 337795 - DNA, 12 bp, Artificial Sequence
  Oligonucleotide primer for the detection of SNP TSC0040079
aataacaaacga

SEQ ID NO: 337796 - DNA, 12 bp, Artificial Sequence
  Oligonucleotide primer for the detection of SNP TSC0040079
ggatgttttgtt

SEQ ID NO: 337797 - DNA, 12 bp, Artificial Sequence
  Oligonucleotide primer for the detection of SNP TSC0040079
aaatactctacc

SEQ ID NO: 337798 - DNA, 12 bp, Artificial Sequence
  Oligonucleotide primer for the detection of SNP TSC0040079
tgatggtagatg

SEQ ID NO: 337799 - DNA, 12 bp, Artificial Sequence
  Oligonucleotide primer for the detection of SNP TSC0040079
tgatggtagacg

SEQ ID NO: 337800 - DNA, 12 bp, Artificial Sequence
  Oligonukleotid-Primer
aaccaaaaataa

SEQ ID NO: 337801 - DNA, 12 bp, Artificial Sequence
  Oligonucleotide primer for the detection of SNP TSC0040080
gaccaaaaataa

SEQ ID NO: 337802 - DNA, 12 bp, Artificial Sequence
  Oligonucleotide primer for the detection of SNP TSC0040080
ccatcatctacc

SEQ ID NO: 337803 - DNA, 12 bp, Artificial Sequence
  Oligonucleotide primer for the detection of SNP TSC0040080
ccatcgtctacc

SEQ ID NO: 337804 - DNA, 12 bp, Artificial Sequence
  Oligonucleotide primer for the detection of SNP TSC0040080
tggttagggatg

SEQ ID NO: 337805 - DNA, 12 bp, Artificial Sequence
  Oligonucleotide primer for the detection of SNP TSC0040080
cggttagggatg

SEQ ID NO: 337806 - DNA, 12 bp, Artificial Sequence
  Oligonucleotide primer for the detection of SNP TSC0040081
tacgaaaaaaaa

SEQ ID NO: 337807 - DNA, 12 bp, Artificial Sequence
  Oligonucleotide primer for the detection of SNP TSC0040081
acaacatccacc

SEQ ID NO: 337808 - DNA, 12 bp, Artificial Sequence
  Oligonucleotide primer for the detection of SNP TSC0040081
tgtggaggaaga

SEQ ID NO: 337809 - DNA, 12 bp, Artificial Sequence
  Oligonucleotide primer for the detection of SNP TSC0040081
tgcggaggaaga

SEQ ID NO: 337810 - DNA, 12 bp, Artificial Sequence
  Oligonucleotide primer for the detection of SNP TSC0040082
acctacataatt

SEQ ID NO: 337811 - DNA, 12 bp, Artificial Sequence
  Oligonucleotide primer for the detection of SNP TSC0040082
agaaatatttga

SEQ ID NO: 337812 - DNA, 12 bp, Artificial Sequence
  Oligonucleotide primer for the detection of SNP TSC0040083
aaatactaatac

SEQ ID NO: 337813 - DNA, 12 bp, Artificial Sequence
  Oligonucleotide primer for the detection of SNP TSC0040083
ttgtgttgtagt

SEQ ID NO: 337814 - DNA, 12 bp, Artificial Sequence
  Oligonucleotide primer for the detection of SNP TSC0040083
tcgtgttgtagt

SEQ ID NO: 337815 - DNA, 12 bp, Artificial Sequence
  Oligonucleotide primer for the detection of SNP TSC0040083
catattataaca

SEQ ID NO: 337816 - DNA, 12 bp, Artificial Sequence
  Oligonucleotide primer for the detection of SNP TSC0040083
cgtattataaca

SEQ ID NO: 337817 - DNA, 12 bp, Artificial Sequence
  Oligonucleotide primer for the detection of SNP TSC0040083
aagtattgatat

SEQ ID NO: 337818 - DNA, 12 bp, Artificial Sequence
  Oligonucleotide primer for the detection of SNP TSC0040083
aagtattgatac

SEQ ID NO: 337819 - DNA, 12 bp, Artificial Sequence
  Oligonucleotide primer for the detection of SNP TSC0040084
tccctttcttaa

SEQ ID NO: 337820 - DNA, 12 bp, Artificial Sequence
  Oligonucleotide primer for the detection of SNP TSC0040084
taatttaagtat

SEQ ID NO: 337821 - DNA, 12 bp, Artificial Sequence
  Oligonucleotide primer for the detection of SNP TSC0040084
caacccaaacac

SEQ ID NO: 337822 - DNA, 12 bp, Artificial Sequence
  Oligonucleotide primer for the detection of SNP TSC0040085
ttataatatatg

SEQ ID NO: 337823 - DNA, 12 bp, Artificial Sequence
  Oligonucleotide primer for the detection of SNP TSC0040085
ttataatatata

SEQ ID NO: 337824 - DNA, 12 bp, Artificial Sequence
  Oligonucleotide primer for the detection of SNP TSC0040085
aggagagtaaat

SEQ ID NO: 337825 - DNA, 12 bp, Artificial Sequence
  Oligonucleotide primer for the detection of SNP TSC0040086
ccaaaatacctt

SEQ ID NO: 337826 - DNA, 12 bp, Artificial Sequence
  Oligonucleotide primer for the detection of SNP TSC0040086
taaatataagta

SEQ ID NO: 337827 - DNA, 12 bp, Artificial Sequence
  Oligonucleotide primer for the detection of SNP TSC0040086
taaatataaaca

SEQ ID NO: 337828 - DNA, 12 bp, Artificial Sequence
  Oligonucleotide primer for the detection of SNP TSC0040086
ttaaagtgtttt

SEQ ID NO: 337829 - DNA, 12 bp, Artificial Sequence
  Oligonucleotide primer for the detection of SNP TSC0040087
tcattaatatac

SEQ ID NO: 337830 - DNA, 12 bp, Artificial Sequence
  Oligonucleotide primer for the detection of SNP TSC0040087
aggaaaaaaaaa

SEQ ID NO: 337831 - DNA, 12 bp, Artificial Sequence
  Oligonucleotide primer for the detection of SNP TSC0040087
ttattaatgtat

SEQ ID NO: 337832 - DNA, 12 bp, Artificial Sequence
  Oligonucleotide primer for the detection of SNP TSC0040093
aacaaaaatctc

SEQ ID NO: 337833 - DNA, 12 bp, Artificial Sequence
  Oligonucleotide primer for the detection of SNP TSC0040093
gatatgagggta

SEQ ID NO: 337834 - DNA, 12 bp, Artificial Sequence
  Oligonucleotide primer for the detection of SNP TSC0040098
tacttactaaca

SEQ ID NO: 337835 - DNA, 12 bp, Artificial Sequence
  Oligonucleotide primer for the detection of SNP TSC0040098
aggtggaaaatg

SEQ ID NO: 337836 - DNA, 12 bp, Artificial Sequence
  Oligonucleotide primer for the detection of SNP TSC0040099
aaatatctcacc

SEQ ID NO: 337837 - DNA, 12 bp, Artificial Sequence
  Oligonucleotide primer for the detection of SNP TSC0040099
cttcccaaatta

SEQ ID NO: 337838 - DNA, 12 bp, Artificial Sequence
  Oligonucleotide primer for the detection of SNP TSC0040099
aggtgttttatt

SEQ ID NO: 337839 - DNA, 12 bp, Artificial Sequence
  Oligonucleotide primer for the detection of SNP TSC0040100
aagagtttttta

SEQ ID NO: 337840 - DNA, 12 bp, Artificial Sequence
  Oligonucleotide primer for the detection of SNP TSC0040100
aaaaacttccca

SEQ ID NO: 337841 - DNA, 12 bp, Artificial Sequence
  Oligonucleotide primer for the detection of SNP TSC0040100
gtttgaaaggat

SEQ ID NO: 337842 - DNA, 12 bp, Artificial Sequence
  Oligonucleotide primer for the detection of SNP TSC0040101
acaatcaataaa

SEQ ID NO: 337843 - DNA, 12 bp, Artificial Sequence
  Oligonucleotide primer for the detection of SNP TSC0040101
atttttttaaat

SEQ ID NO: 337844 - DNA, 12 bp, Artificial Sequence
  Oligonucleotide primer for the detection of SNP TSC0040101
tcctttcaaaca

SEQ ID NO: 337845 - DNA, 12 bp, Artificial Sequence
  Oligonucleotide primer for the detection of SNP TSC0040101
attagtaagttt

SEQ ID NO: 337846 - DNA, 12 bp, Artificial Sequence
  Oligonucleotide primer for the detection of SNP TSC0040102
acattctataaa

SEQ ID NO: 337847 - DNA, 12 bp, Artificial Sequence
  Oligonucleotide primer for the detection of SNP TSC0040102
tgggaagttttt

SEQ ID NO: 337848 - DNA, 12 bp, Artificial Sequence
  Oligonucleotide primer for the detection of SNP TSC0040103
tatccaaaatac

SEQ ID NO: 337849 - DNA, 12 bp, Artificial Sequence
  Oligonucleotide primer for the detection of SNP TSC0040103
ttaatgataaaa

SEQ ID NO: 337850 - DNA, 12 bp, Artificial Sequence
  Oligonucleotide primer for the detection of SNP TSC0040106
caaacaaaaact

SEQ ID NO: 337851 - DNA, 12 bp, Artificial Sequence
  Oligonucleotide primer for the detection of SNP TSC0040106
atgtatgtaaga

SEQ ID NO: 337852 - DNA, 12 bp, Artificial Sequence
  Oligonucleotide primer for the detection of SNP TSC0040107
cattaaaaacaa

SEQ ID NO: 337853 - DNA, 12 bp, Artificial Sequence
  Oligonucleotide primer for the detection of SNP TSC0040107
tcttccttaaaa

SEQ ID NO: 337854 - DNA, 12 bp, Artificial Sequence
  Oligonucleotide primer for the detection of SNP TSC0040109
cattttcactcc

SEQ ID NO: 337855 - DNA, 12 bp, Artificial Sequence
  Oligonucleotide primer for the detection of SNP TSC0040109
aggaaattttat

SEQ ID NO: 337856 - DNA, 12 bp, Artificial Sequence
  Oligonucleotide primer for the detection of SNP TSC0040109
aaaaacttcaca

SEQ ID NO: 337857 - DNA, 12 bp, Artificial Sequence
  Oligonucleotide primer for the detection of SNP TSC0040109
tatttttatttc

SEQ ID NO: 337858 - DNA, 12 bp, Artificial Sequence
  Oligonucleotide primer for the detection of SNP TSC0040110
ataattcctaaa

SEQ ID NO: 337859 - DNA, 12 bp, Artificial Sequence
  Oligonucleotide primer for the detection of SNP TSC0040110
atggtgggttat

SEQ ID NO: 337860 - DNA, 12 bp, Artificial Sequence
  Oligonucleotide primer for the detection of SNP TSC0040110
gtggtttttagg

SEQ ID NO: 337861 - DNA, 12 bp, Artificial Sequence
  Oligonucleotide primer for the detection of SNP TSC0040112
aacaccactacc

SEQ ID NO: 337862 - DNA, 12 bp, Artificial Sequence
  Oligonucleotide primer for the detection of SNP TSC0040112
aacgccactacc

SEQ ID NO: 337863 - DNA, 12 bp, Artificial Sequence
  Oligonucleotide primer for the detection of SNP TSC0040112
ttgtaggtattg

SEQ ID NO: 337864 - DNA, 12 bp, Artificial Sequence
  Oligonucleotide primer for the detection of SNP TSC0040112
ctacaaatacta

SEQ ID NO: 337865 - DNA, 12 bp, Artificial Sequence
  Oligonucleotide primer for the detection of SNP TSC0040112
aatgttattgtt

SEQ ID NO: 337866 - DNA, 12 bp, Artificial Sequence
  Oligonucleotide primer for the detection of SNP TSC0040112
aacgttattgtt

SEQ ID NO: 337867 - DNA, 12 bp, Artificial Sequence
  Oligonucleotide primer for the detection of SNP TSC0040113
actcaaacaccc

SEQ ID NO: 337868 - DNA, 12 bp, Artificial Sequence
  Oligonucleotide primer for the detection of SNP TSC0040113
tgttaggattaa

SEQ ID NO: 337869 - DNA, 12 bp, Artificial Sequence
  Oligonucleotide primer for the detection of SNP TSC0040115
tcttcctatctt

SEQ ID NO: 337870 - DNA, 12 bp, Artificial Sequence
  Oligonucleotide primer for the detection of SNP TSC0040115
gagggtttagaa

SEQ ID NO: 337871 - DNA, 12 bp, Artificial Sequence
  Oligonucleotide primer for the detection of SNP TSC0040116
tcctttataaat

SEQ ID NO: 337872 - DNA, 12 bp, Artificial Sequence
  Oligonucleotide primer for the detection of SNP TSC0040116
ttaagattgtgt

SEQ ID NO: 337873 - DNA, 12 bp, Artificial Sequence
  Oligonucleotide primer for the detection of SNP TSC0040116
cccaaaactata

SEQ ID NO: 337874 - DNA, 12 bp, Artificial Sequence
  Oligonucleotide primer for the detection of SNP TSC0040117
ttaaatcataaa

SEQ ID NO: 337875 - DNA, 12 bp, Artificial Sequence
  Oligonucleotide primer for the detection of SNP TSC0040117
tagtatggggga

SEQ ID NO: 337876 - DNA, 12 bp, Artificial Sequence
  Oligonucleotide primer for the detection of SNP TSC0040119
ttaaatcttatt

SEQ ID NO: 337877 - DNA, 12 bp, Artificial Sequence
  Oligonucleotide primer for the detection of SNP TSC0040119
tttgttggtagg

SEQ ID NO: 337878 - DNA, 12 bp, Artificial Sequence
  Oligonucleotide primer for the detection of SNP TSC0040120
aattctaaaaaa

SEQ ID NO: 337879 - DNA, 12 bp, Artificial Sequence
  Oligonucleotide primer for the detection of SNP TSC0040120
acctccacccta

SEQ ID NO: 337880 - DNA, 12 bp, Artificial Sequence
  Oligonucleotide primer for the detection of SNP TSC0040120
gagtggattttg

SEQ ID NO: 337881 - DNA, 12 bp, Artificial Sequence
  Oligonucleotide primer for the detection of SNP TSC0040121
taaaccacctaa

SEQ ID NO: 337882 - DNA, 12 bp, Artificial Sequence
  Oligonucleotide primer for the detection of SNP TSC0040121
taagttttaggt

SEQ ID NO: 337883 - DNA, 12 bp, Artificial Sequence
  Oligonucleotide primer for the detection of SNP TSC0040121
tgagttatttgg

SEQ ID NO: 337884 - DNA, 12 bp, Artificial Sequence
  Oligonucleotide primer for the detection of SNP TSC0040125
aatttctactca

SEQ ID NO: 337885 - DNA, 12 bp, Artificial Sequence
  Oligonucleotide primer for the detection of SNP TSC0040125
aaaagaaaatta

SEQ ID NO: 337886 - DNA, 12 bp, Artificial Sequence
  Oligonucleotide primer for the detection of SNP TSC0005563
aatatttattat

SEQ ID NO: 337887 - DNA, 12 bp, Artificial Sequence
  Oligonucleotide primer for the detection of SNP TSC0005563
aaatacccacta

SEQ ID NO: 337888 - DNA, 12 bp, Artificial Sequence
  Oligonucleotide primer for the detection of SNP TSC0005563
agtataaaaata

SEQ ID NO: 337889 - DNA, 12 bp, Artificial Sequence
  Oligonucleotide primer for the detection of SNP TSC0040130
ttttttgttgat

SEQ ID NO: 337890 - DNA, 12 bp, Artificial Sequence
  Oligonucleotide primer for the detection of SNP TSC0040130
cctcttattaac

SEQ ID NO: 337891 - DNA, 12 bp, Artificial Sequence
  Oligonucleotide primer for the detection of SNP TSC0040130
tttttaaaattc

SEQ ID NO: 337892 - DNA, 12 bp, Artificial Sequence
  Oligonucleotide primer for the detection of SNP TSC0040131
ctaatacaaatc

SEQ ID NO: 337893 - DNA, 12 bp, Artificial Sequence
  Oligonucleotide primer for the detection of SNP TSC0040131
ttttctaatcta

SEQ ID NO: 337894 - DNA, 12 bp, Artificial Sequence
  Oligonucleotide primer for the detection of SNP TSC0040131
ttaatataggtt

SEQ ID NO: 337895 - DNA, 12 bp, Artificial Sequence
  Oligonucleotide primer for the detection of SNP TSC0040131
ttaatataggtc

SEQ ID NO: 337896 - DNA, 12 bp, Artificial Sequence
  unsure (3): Oligonucleotide primer for the detection of SNP TSC0040132
tcntactctacc

SEQ ID NO: 337897 - DNA, 12 bp, Artificial Sequence
  Oligonucleotide primer for the detection of SNP TSC0040132
aggtatattata

SEQ ID NO: 337898 - DNA, 12 bp, Artificial Sequence
  Oligonucleotide primer for the detection of SNP TSC0040132
aaacacatcata

SEQ ID NO: 337899 - DNA, 12 bp, Artificial Sequence
  Oligonucleotide primer for the detection of SNP TSC0040132
  unsure (3): unknown base
ttntgttttgtt

SEQ ID NO: 337900 - DNA, 12 bp, Artificial Sequence
  Oligonucleotide primer for the detection of SNP TSC0040133
atataaattaat

SEQ ID NO: 337901 - DNA, 12 bp, Artificial Sequence
  Oligonucleotide primer for the detection of SNP TSC0040133
ttttatagtggg

SEQ ID NO: 337902 - DNA, 12 bp, Artificial Sequence
  Oligonucleotide primer for the detection of SNP TSC0040135
actaaaaattaa

SEQ ID NO: 337903 - DNA, 12 bp, Artificial Sequence
  Oligonucleotide primer for the detection of SNP TSC0040135
ttatatctcctt

SEQ ID NO: 337904 - DNA, 12 bp, Artificial Sequence
  Oligonucleotide primer for the detection of SNP TSC0040135
attgaggattaa

SEQ ID NO: 337905 - DNA, 12 bp, Artificial Sequence
  Oligonucleotide primer for the detection of SNP TSC0040137
taaattaccttc

SEQ ID NO: 337906 - DNA, 12 bp, Artificial Sequence
  unsure (2): Oligonucleotide primer for the detection of SNP TSC0040137
anttatagattt

SEQ ID NO: 337907 - DNA, 12 bp, Artificial Sequence
  unsure (2): Oligonucleotide primer for the detection of SNP TSC0040137
anttatagattc

SEQ ID NO: 337908 - DNA, 12 bp, Artificial Sequence
  unsure (2): Oligonucleotide primer for the detection of SNP TSC0040137
antcataaattc

SEQ ID NO: 337909 - DNA, 12 bp, Artificial Sequence
  Oligonucleotide primer for the detection of SNP TSC0040137
tgaattgttttc

SEQ ID NO: 337910 - DNA, 12 bp, Artificial Sequence
  Oligonucleotide primer for the detection of SNP TSC0040138
tattccaaaatt

SEQ ID NO: 337911 - DNA, 12 bp, Artificial Sequence
  Oligonucleotide primer for the detection of SNP TSC0040138
agtggtaatatg

SEQ ID NO: 337912 - DNA, 12 bp, Artificial Sequence
  Oligonucleotide primer for the detection of SNP TSC0040140
ttttctaactca

SEQ ID NO: 337913 - DNA, 12 bp, Artificial Sequence
  Oligonucleotide primer for the detection of SNP TSC0040140
ggtagagaaata

SEQ ID NO: 337914 - DNA, 12 bp, Artificial Sequence
  Oligonucleotide primer for the detection of SNP TSC0040141
aaaaagaattgg

SEQ ID NO: 337915 - DNA, 12 bp, Artificial Sequence
  Oligonucleotide primer for the detection of SNP TSC0040142
aataattccttc

SEQ ID NO: 337916 - DNA, 12 bp, Artificial Sequence
  Oligonucleotide primer for the detection of SNP TSC0040147
ataatcccattt

SEQ ID NO: 337917 - DNA, 12 bp, Artificial Sequence
  Oligonukleotid-Primer
ttaataggatta

SEQ ID NO: 337918 - DNA, 12 bp, Artificial Sequence
  Oligonucleotide primer for the detection of SNP TSC0040148
tcaaaaaaaaac

SEQ ID NO: 337919 - DNA, 12 bp, Artificial Sequence
  Oligonucleotide primer for the detection of SNP TSC0040149
ctaattaaaatc

SEQ ID NO: 337920 - DNA, 12 bp, Artificial Sequence
  Oligonucleotide primer for the detection of SNP TSC0040149
attattatgaat

SEQ ID NO: 337921 - DNA, 12 bp, Artificial Sequence
  Oligonukleotid-Primer
ttaattggagtt

SEQ ID NO: 337922 - DNA, 12 bp, Artificial Sequence
  Oligonucleotide primer for the detection of SNP TSC0040150
ttaataaatcct

SEQ ID NO: 337923 - DNA, 12 bp, Artificial Sequence
  Oligonucleotide primer for the detection of SNP TSC0040151
cccaatacctct

SEQ ID NO: 337924 - DNA, 12 bp, Artificial Sequence
  Oligonucleotide primer for the detection of SNP TSC0040151
ttttaatgagat

SEQ ID NO: 337925 - DNA, 12 bp, Artificial Sequence
  Oligonukleotid-Primer
tttaatgttttt

SEQ ID NO: 337926 - DNA, 12 bp, Artificial Sequence
  Oligonucleotide primer for the detection of SNP TSC0040152
acataataaatt

SEQ ID NO: 337927 - DNA, 12 bp, Artificial Sequence
  Oligonucleotide primer for the detection of SNP TSC0040152
ttaattttatag

SEQ ID NO: 337928 - DNA, 12 bp, Artificial Sequence
  Oligonucleotide primer for the detection of SNP TSC0040152
tcaactctataa

SEQ ID NO: 337929 - DNA, 12 bp, Artificial Sequence
  Oligonucleotide primer for the detection of SNP TSC0040152
gtataataaatt

SEQ ID NO: 337930 - DNA, 12 bp, Artificial Sequence
  Oligonucleotide primer for the detection of SNP TSC0040153
agtgaaatttta

SEQ ID NO: 337931 - DNA, 12 bp, Artificial Sequence
  Oligonucleotide primer for the detection of SNP TSC0040153
attttttgtaga

SEQ ID NO: 337932 - DNA, 12 bp, Artificial Sequence
  Oligonucleotide primer for the detection of SNP TSC0040154
tttaaaaatact

SEQ ID NO: 337933 - DNA, 12 bp, Artificial Sequence
  Oligonukleotid-Primer
cctctcctccta

SEQ ID NO: 337934 - DNA, 12 bp, Artificial Sequence
  Oligonucleotide primer for the detection of SNP TSC0040158
caaattcaaaat

SEQ ID NO: 337935 - DNA, 12 bp, Artificial Sequence
  Oligonucleotide primer for the detection of SNP TSC0040158
aagattagatga

SEQ ID NO: 337936 - DNA, 12 bp, Artificial Sequence
  Oligonucleotide primer for the detection of SNP TSC0040159
cttacactacac

SEQ ID NO: 337937 - DNA, 12 bp, Artificial Sequence
  Oligonukleotid-Primer
gttaatattgta

SEQ ID NO: 337938 - DNA, 12 bp, Artificial Sequence
  Oligonucleotide primer for the detection of SNP TSC0040159
attaatactata

SEQ ID NO: 337939 - DNA, 12 bp, Artificial Sequence
  Oligonucleotide primer for the detection of SNP TSC0040159
tttatattgtat

SEQ ID NO: 337940 - DNA, 12 bp, Artificial Sequence
  Oligonucleotide primer for the detection of SNP TSC0040160
aacctaatatta

SEQ ID NO: 337941 - DNA, 12 bp, Artificial Sequence
  Oligonucleotide primer for the detection of SNP TSC0040160
gtatatttagtg

SEQ ID NO: 337942 - DNA, 12 bp, Artificial Sequence
  Oligonucleotide primer for the detection of SNP TSC0040160
acacactcaata

SEQ ID NO: 337943 - DNA, 12 bp, Artificial Sequence
  Oligonucleotide primer for the detection of SNP TSC0040160
gatttgatatta

SEQ ID NO: 337944 - DNA, 12 bp, Artificial Sequence
  Oligonucleotide primer for the detection of SNP TSC0040161
tatatattaatc

SEQ ID NO: 337945 - DNA, 12 bp, Artificial Sequence
  Oligonucleotide primer for the detection of SNP TSC0040161
gtagtgtaaaaa

SEQ ID NO: 337946 - DNA, 12 bp, Artificial Sequence
  Oligonucleotide primer for the detection of SNP TSC0040161
tgtgtattagtt

SEQ ID NO: 337947 - DNA, 12 bp, Artificial Sequence
  Oligonucleotide primer for the detection of SNP TSC0040162
agaaaaggggtt

SEQ ID NO: 337948 - DNA, 12 bp, Artificial Sequence
  Oligonucleotide primer for the detection of SNP TSC0040165
ccctcacctccc

SEQ ID NO: 337949 - DNA, 12 bp, Artificial Sequence
  Oligonucleotide primer for the detection of SNP TSC0040165
aaaggtagtgag

SEQ ID NO: 337950 - DNA, 12 bp, Artificial Sequence
  Oligonucleotide primer for the detection of SNP TSC0040165
aaaggtagcgag

SEQ ID NO: 337951 - DNA, 12 bp, Artificial Sequence
  Oligonucleotide primer for the detection of SNP TSC0040166
tatattatctat

SEQ ID NO: 337952 - DNA, 12 bp, Artificial Sequence
  Oligonucleotide primer for the detection of SNP TSC0040166
gatttattagga

SEQ ID NO: 337953 - DNA, 12 bp, Artificial Sequence
  Oligonucleotide primer for the detection of SNP TSC0040167
acccaaacattt

SEQ ID NO: 337954 - DNA, 12 bp, Artificial Sequence
  Oligonucleotide primer for the detection of SNP TSC0040167
tgtttttttttg

SEQ ID NO: 337955 - DNA, 12 bp, Artificial Sequence
  Oligonucleotide primer for the detection of SNP TSC0040168
aaactaaatttt

SEQ ID NO: 337956 - DNA, 12 bp, Artificial Sequence
  Oligonucleotide primer for the detection of SNP TSC0040169
aaatactataat

SEQ ID NO: 337957 - DNA, 12 bp, Artificial Sequence
  Oligonucleotide primer for the detection of SNP TSC0040169
gagtgttgtggt

SEQ ID NO: 337958 - DNA, 12 bp, Artificial Sequence
  Oligonucleotide primer for the detection of SNP TSC0040170
tacaatccaacc

SEQ ID NO: 337959 - DNA, 12 bp, Artificial Sequence
  Oligonucleotide primer for the detection of SNP TSC0040170
tttattaggata

SEQ ID NO: 337960 - DNA, 12 bp, Artificial Sequence
  Oligonucleotide primer for the detection of SNP TSC0040170
ctcactaaaaca

SEQ ID NO: 337961 - DNA, 12 bp, Artificial Sequence
  Oligonucleotide primer for the detection of SNP TSC0040170
tgtaatttagtt

SEQ ID NO: 337962 - DNA, 12 bp, Artificial Sequence
  Oligonucleotide primer for the detection of SNP TSC0040173
catcaataataa

SEQ ID NO: 337963 - DNA, 12 bp, Artificial Sequence
  Oligonucleotide primer for the detection of SNP TSC0040173
ttatcaactttc

SEQ ID NO: 337964 - DNA, 12 bp, Artificial Sequence
  Oligonucleotide primer for the detection of SNP TSC0040173
tattagtgataa

SEQ ID NO: 337965 - DNA, 12 bp, Artificial Sequence
  Oligonucleotide primer for the detection of SNP TSC0040184
attgtatggaat

SEQ ID NO: 337966 - DNA, 12 bp, Artificial Sequence
  Oligonucleotide primer for the detection of SNP TSC0040184
attgtatggaac

SEQ ID NO: 337967 - DNA, 12 bp, Artificial Sequence
  Oligonucleotide primer for the detection of SNP TSC0040184
gaatgaggggga

SEQ ID NO: 337968 - DNA, 12 bp, Artificial Sequence
  Oligonucleotide primer for the detection of SNP TSC0040184
gaacgaggggga

SEQ ID NO: 337969 - DNA, 12 bp, Artificial Sequence
  Oligonucleotide primer for the detection of SNP TSC0040185
caatattactaa

SEQ ID NO: 337970 - DNA, 12 bp, Artificial Sequence
  Oligonucleotide primer for the detection of SNP TSC0040185
tggatatttttt

SEQ ID NO: 337971 - DNA, 12 bp, Artificial Sequence
  Oligonucleotide primer for the detection of SNP TSC0040185
tggatatttttc

SEQ ID NO: 337972 - DNA, 12 bp, Artificial Sequence
  Oligonucleotide primer for the detection of SNP TSC0040185
cctaaacaccct

SEQ ID NO: 337973 - DNA, 12 bp, Artificial Sequence
  Oligonucleotide primer for the detection of SNP TSC0040185
gatagtgttatt

SEQ ID NO: 337974 - DNA, 12 bp, Artificial Sequence
  Oligonucleotide primer for the detection of SNP TSC0040186
cctttcttcctt

SEQ ID NO: 337975 - DNA, 12 bp, Artificial Sequence
  Oligonucleotide primer for the detection of SNP TSC0040189
caatataaattt

SEQ ID NO: 337976 - DNA, 12 bp, Artificial Sequence
  Oligonucleotide primer for the detection of SNP TSC0040189
agaatttgaaaa

SEQ ID NO: 337977 - DNA, 12 bp, Artificial Sequence
  Oligonucleotide primer for the detection of SNP TSC0040190
tcaaccatacaa

SEQ ID NO: 337978 - DNA, 12 bp, Artificial Sequence
  Oligonucleotide primer for the detection of SNP TSC0040190
tcaaccgtacaa

SEQ ID NO: 337979 - DNA, 12 bp, Artificial Sequence
  Oligonucleotide primer for the detection of SNP TSC0040190
ttacctcctata

SEQ ID NO: 337980 - DNA, 12 bp, Artificial Sequence
  Oligonucleotide primer for the detection of SNP TSC0040190
ttagtcgtatag

SEQ ID NO: 337981 - DNA, 12 bp, Artificial Sequence
  Oligonucleotide primer for the detection of SNP TSC0040191
ttttataagtag

SEQ ID NO: 337982 - DNA, 12 bp, Artificial Sequence
  Oligonucleotide primer for the detection of SNP TSC0040191
ttacaaataaaa

SEQ ID NO: 337983 - DNA, 12 bp, Artificial Sequence
  Oligonucleotide primer for the detection of SNP TSC0040191
ttaggaagattt

SEQ ID NO: 337984 - DNA, 12 bp, Artificial Sequence
  Oligonucleotide primer for the detection of SNP TSC0006634
ccttaacccacc

SEQ ID NO: 337985 - DNA, 12 bp, Artificial Sequence
  Oligonucleotide primer for the detection of SNP TSC0040192
caaacaatcctc

SEQ ID NO: 337986 - DNA, 12 bp, Artificial Sequence
  Oligonucleotide primer for the detection of SNP TSC0040192
tgggttaaggtg

SEQ ID NO: 337987 - DNA, 12 bp, Artificial Sequence
  Oligonucleotide primer for the detection of SNP TSC0040193
caaaattcctta

SEQ ID NO: 337988 - DNA, 12 bp, Artificial Sequence
  Oligonucleotide primer for the detection of SNP TSC0040193
ccatcatttcca

SEQ ID NO: 337989 - DNA, 12 bp, Artificial Sequence
  Oligonucleotide primer for the detection of SNP TSC0040194
ctaatacacaat

SEQ ID NO: 337990 - DNA, 12 bp, Artificial Sequence
  Oligonucleotide primer for the detection of SNP TSC0040194
aatttttattgg

SEQ ID NO: 337991 - DNA, 12 bp, Artificial Sequence
  Oligonucleotide primer for the detection of SNP TSC0040195
taatttaactta

SEQ ID NO: 337992 - DNA, 12 bp, Artificial Sequence
  Oligonucleotide primer for the detection of SNP TSC0040195
atcttccttttc

SEQ ID NO: 337993 - DNA, 12 bp, Artificial Sequence
  Oligonucleotide primer for the detection of SNP TSC0040195
ttgatttgattt

SEQ ID NO: 337994 - DNA, 12 bp, Artificial Sequence
  Oligonucleotide primer for the detection of SNP TSC0040199
ggtatgatttta

SEQ ID NO: 337995 - DNA, 12 bp, Artificial Sequence
  Oligonucleotide primer for the detection of SNP TSC0040199
ggtacgatttta

SEQ ID NO: 337996 - DNA, 12 bp, Artificial Sequence
  Oligonucleotide primer for the detection of SNP TSC0040200
tactccaacact

SEQ ID NO: 337997 - DNA, 12 bp, Artificial Sequence
  Oligonucleotide primer for the detection of SNP TSC0040200
gttggagtgttg

SEQ ID NO: 337998 - DNA, 12 bp, Artificial Sequence
  Oligonucleotide primer for the detection of SNP TSC0040201
attttacaaaaa

SEQ ID NO: 337999 - DNA, 12 bp, Artificial Sequence
  Oligonucleotide primer for the detection of SNP TSC0040201
accattctcact

SEQ ID NO: 338000 - DNA, 12 bp, Artificial Sequence
  Oligonucleotide primer for the detection of SNP TSC0040202
acatataatttc

SEQ ID NO: 338001 - DNA, 12 bp, Artificial Sequence
  Oligonucleotide primer for the detection of SNP TSC0040202
tttaggagaata

SEQ ID NO: 338002 - DNA, 12 bp, Artificial Sequence
  Oligonucleotide primer for the detection of SNP TSC0040203
acaactaacaaa

SEQ ID NO: 338003 - DNA, 12 bp, Artificial Sequence
  Oligonucleotide primer for the detection of SNP TSC0040203
attgtttaatag

SEQ ID NO: 338004 - DNA, 12 bp, Artificial Sequence
  Oligonucleotide primer for the detection of SNP TSC0040204
tgagtgtttttt

SEQ ID NO: 338005 - DNA, 12 bp, Artificial Sequence
  Oligonucleotide primer for the detection of SNP TSC0040204
tgagtgtttttc

SEQ ID NO: 338006 - DNA, 12 bp, Artificial Sequence
  Oligonucleotide primer for the detection of SNP TSC0040204
taaatactttcc

SEQ ID NO: 338007 - DNA, 12 bp, Artificial Sequence
  Oligonucleotide primer for the detection of SNP TSC0040204
ttatgaattagt

SEQ ID NO: 338008 - DNA, 12 bp, Artificial Sequence
  Oligonucleotide primer for the detection of SNP TSC0040205
tatatttacact

SEQ ID NO: 338009 - DNA, 12 bp, Artificial Sequence
  Oligonucleotide primer for the detection of SNP TSC0040205
tgtaaagtggga

SEQ ID NO: 338010 - DNA, 12 bp, Artificial Sequence
  Oligonucleotide primer for the detection of SNP TSC0040206
tacactctccca

SEQ ID NO: 338011 - DNA, 12 bp, Artificial Sequence
  Oligonucleotide primer for the detection of SNP TSC0040206
tatttctataaa

SEQ ID NO: 338012 - DNA, 12 bp, Artificial Sequence
  Oligonucleotide primer for the detection of SNP TSC0040207
attaaaaacttc

SEQ ID NO: 338013 - DNA, 12 bp, Artificial Sequence
  Oligonucleotide primer for the detection of SNP TSC0040207
tagttttagaat

SEQ ID NO: 338014 - DNA, 12 bp, Artificial Sequence
  Oligonucleotide primer for the detection of SNP TSC0040207
tagttttagaac

SEQ ID NO: 338015 - DNA, 12 bp, Artificial Sequence
  Oligonucleotide primer for the detection of SNP TSC0040207
taactccaaaac

SEQ ID NO: 338016 - DNA, 12 bp, Artificial Sequence
  Oligonucleotide primer for the detection of SNP TSC0040207
gttaagagtttt

SEQ ID NO: 338017 - DNA, 12 bp, Artificial Sequence
  Oligonucleotide primer for the detection of SNP TSC0040207
gttaagagtttc

SEQ ID NO: 338018 - DNA, 12 bp, Artificial Sequence
  Oligonucleotide primer for the detection of SNP TSC0040212
ttcatcctaaaa

SEQ ID NO: 338019 - DNA, 12 bp, Artificial Sequence
  Oligonucleotide primer for the detection of SNP TSC0040213
tcaacatttcca

SEQ ID NO: 338020 - DNA, 12 bp, Artificial Sequence
  Oligonucleotide primer for the detection of SNP TSC0040213
ttatttaaattt

SEQ ID NO: 338021 - DNA, 12 bp, Artificial Sequence
  Oligonucleotide primer for the detection of SNP TSC0040213
ctactcaaattc

SEQ ID NO: 338022 - DNA, 12 bp, Artificial Sequence
  Oligonucleotide primer for the detection of SNP TSC0040214
caactcttctct

SEQ ID NO: 338023 - DNA, 12 bp, Artificial Sequence
  Oligonucleotide primer for the detection of SNP TSC0040214
attgtattatta

SEQ ID NO: 338024 - DNA, 12 bp, Artificial Sequence
  Oligonucleotide primer for the detection of SNP TSC0040215
tttcactctacc

SEQ ID NO: 338025 - DNA, 12 bp, Artificial Sequence
  Oligonucleotide primer for the detection of SNP TSC0040215
tttggaataaga

SEQ ID NO: 338026 - DNA, 12 bp, Artificial Sequence
  Oligonucleotide primer for the detection of SNP TSC0040216
ttcttcttcttt

SEQ ID NO: 338027 - DNA, 12 bp, Artificial Sequence
  Oligonucleotide primer for the detection of SNP TSC0040217
attaaattcctt

SEQ ID NO: 338028 - DNA, 12 bp, Artificial Sequence
  Oligonucleotide primer for the detection of SNP TSC0040217
gttgtaggttaa

SEQ ID NO: 338029 - DNA, 12 bp, Artificial Sequence
  Oligonucleotide primer for the detection of SNP TSC0040218
caaactactttc

SEQ ID NO: 338030 - DNA, 12 bp, Artificial Sequence
  Oligonucleotide primer for the detection of SNP TSC0040218
tttttaatttac

SEQ ID NO: 338031 - DNA, 12 bp, Artificial Sequence
  Oligonucleotide primer for the detection of SNP TSC0040218
tctttaacccac

SEQ ID NO: 338032 - DNA, 12 bp, Artificial Sequence
  Oligonucleotide primer for the detection of SNP TSC0040218
aggttgtttttt

SEQ ID NO: 338033 - DNA, 12 bp, Artificial Sequence
  Oligonucleotide primer for the detection of SNP TSC0040219
aagggtttttga

SEQ ID NO: 338034 - DNA, 12 bp, Artificial Sequence
  Oligonucleotide primer for the detection of SNP TSC0040219
aagggttttcga

SEQ ID NO: 338035 - DNA, 12 bp, Artificial Sequence
  Oligonucleotide primer for the detection of SNP TSC0040220
aaaaaatcactc

SEQ ID NO: 338036 - DNA, 12 bp, Artificial Sequence
  Oligonucleotide primer for the detection of SNP TSC0040220
tagaaattatat

SEQ ID NO: 338037 - DNA, 12 bp, Artificial Sequence
  Oligonucleotide primer for the detection of SNP TSC0040220
aaaaattataca

SEQ ID NO: 338038 - DNA, 12 bp, Artificial Sequence
  Oligonucleotide primer for the detection of SNP TSC0040221
ttaacaaccctc

SEQ ID NO: 338039 - DNA, 12 bp, Artificial Sequence
  Oligonucleotide primer for the detection of SNP TSC0040221
tttgaaggatgg

SEQ ID NO: 338040 - DNA, 12 bp, Artificial Sequence
  Oligonucleotide primer for the detection of SNP TSC0040222
aaatctcccact

SEQ ID NO: 338041 - DNA, 12 bp, Artificial Sequence
  Oligonucleotide primer for the detection of SNP TSC0040222
ttgattttaata

SEQ ID NO: 338042 - DNA, 12 bp, Artificial Sequence
  Oligonucleotide primer for the detection of SNP TSC0040223
aaacaaaattca

SEQ ID NO: 338043 - DNA, 12 bp, Artificial Sequence
  Oligonucleotide primer for the detection of SNP TSC0040223
tatttaaataac

SEQ ID NO: 338044 - DNA, 12 bp, Artificial Sequence
  Oligonucleotide primer for the detection of SNP TSC0040223
taggtaaagttt

SEQ ID NO: 338045 - DNA, 12 bp, Artificial Sequence
  Oligonucleotide primer for the detection of SNP TSC0040224
tagatatagatg

SEQ ID NO: 338046 - DNA, 12 bp, Artificial Sequence
  Oligonucleotide primer for the detection of SNP TSC0040225
acaactaaaata

SEQ ID NO: 338047 - DNA, 12 bp, Artificial Sequence
  Oligonucleotide primer for the detection of SNP TSC0040225
ttagaagtagta

SEQ ID NO: 338048 - DNA, 12 bp, Artificial Sequence
  Oligonucleotide primer for the detection of SNP TSC0040225
ccaaaaacaaca

SEQ ID NO: 338049 - DNA, 12 bp, Artificial Sequence
  Oligonucleotide primer for the detection of SNP TSC0040225
gtagttggagtg

SEQ ID NO: 338050 - DNA, 12 bp, Artificial Sequence
  Oligonucleotide primer for the detection of SNP TSC0040226
ataaacacaaaa

SEQ ID NO: 338051 - DNA, 12 bp, Artificial Sequence
  Oligonucleotide primer for the detection of SNP TSC0040226
taatatagtaag

SEQ ID NO: 338052 - DNA, 12 bp, Artificial Sequence
  Oligonucleotide primer for the detection of SNP TSC0040226
caacacaacaaa

SEQ ID NO: 338053 - DNA, 12 bp, Artificial Sequence
  Oligonucleotide primer for the detection of SNP TSC0040226
atagatatagag

SEQ ID NO: 338054 - DNA, 12 bp, Artificial Sequence
  Oligonucleotide primer for the detection of SNP TSC0040229
atcaactatctt

SEQ ID NO: 338055 - DNA, 12 bp, Artificial Sequence
  Oligonucleotide primer for the detection of SNP TSC0040229
ttagagaagttg

SEQ ID NO: 338056 - DNA, 12 bp, Artificial Sequence
  Oligonucleotide primer for the detection of SNP TSC0040232
atcctcacacat

SEQ ID NO: 338057 - DNA, 12 bp, Artificial Sequence
  Oligonucleotide primer for the detection of SNP TSC0040232
agagaaggtaag

SEQ ID NO: 338058 - DNA, 12 bp, Artificial Sequence
  Oligonucleotide primer for the detection of SNP TSC0040237
ataacaatatca

SEQ ID NO: 338059 - DNA, 12 bp, Artificial Sequence
  Oligonucleotide primer for the detection of SNP TSC0040237
ataacaatatcg

SEQ ID NO: 338060 - DNA, 12 bp, Artificial Sequence
  Oligonucleotide primer for the detection of SNP TSC0040237
ttatgttaataa

SEQ ID NO: 338061 - DNA, 12 bp, Artificial Sequence
  Oligonucleotide primer for the detection of SNP TSC0040237
ttacgttaataa

SEQ ID NO: 338062 - DNA, 12 bp, Artificial Sequence
  Oligonucleotide primer for the detection of SNP TSC0040237
tcacattaataa

SEQ ID NO: 338063 - DNA, 12 bp, Artificial Sequence
  Oligonucleotide primer for the detection of SNP TSC0040237
tcacgttaataa

SEQ ID NO: 338064 - DNA, 12 bp, Artificial Sequence
  Oligonucleotide primer for the detection of SNP TSC0040237
gtgatagtgttg

SEQ ID NO: 338065 - DNA, 12 bp, Artificial Sequence
  Oligonucleotide primer for the detection of SNP TSC0040237
gtgatagtgtcg

SEQ ID NO: 338066 - DNA, 12 bp, Artificial Sequence
  Oligonucleotide primer for the detection of SNP TSC0040239
cttcctcaacca

SEQ ID NO: 338067 - DNA, 12 bp, Artificial Sequence
  Oligonucleotide primer for the detection of SNP TSC0040239
taggaatataat

SEQ ID NO: 338068 - DNA, 12 bp, Artificial Sequence
  Oligonucleotide primer for the detection of SNP TSC0008884
ataaaaatttaa

SEQ ID NO: 338069 - DNA, 12 bp, Artificial Sequence
  Oligonucleotide primer for the detection of SNP TSC0008884
aattggaaataa

SEQ ID NO: 338070 - DNA, 12 bp, Artificial Sequence
  Oligonucleotide primer for the detection of SNP TSC0008884
tgatgaaaattt

SEQ ID NO: 338071 - DNA, 12 bp, Artificial Sequence
  Oligonucleotide primer for the detection of SNP TSC0009408
aatataaattaa

SEQ ID NO: 338072 - DNA, 12 bp, Artificial Sequence
  Oligonucleotide primer for the detection of SNP TSC0009408
tataatgtgtgt

SEQ ID NO: 338073 - DNA, 12 bp, Artificial Sequence
  Oligonucleotide primer for the detection of SNP TSC0009408
tgaatatggatt

SEQ ID NO: 338074 - DNA, 12 bp, Artificial Sequence
  Oligonucleotide primer for the detection of SNP TSC0040240
acacacatttac

SEQ ID NO: 338075 - DNA, 12 bp, Artificial Sequence
  Oligonucleotide primer for the detection of SNP TSC0040240
acacacgtttac

SEQ ID NO: 338076 - DNA, 12 bp, Artificial Sequence
  Oligonucleotide primer for the detection of SNP TSC0040240
gtttgttatata

SEQ ID NO: 338077 - DNA, 12 bp, Artificial Sequence
  Oligonucleotide primer for the detection of SNP TSC0040241
caacaaaatttc

SEQ ID NO: 338078 - DNA, 12 bp, Artificial Sequence
  Oligonukleotid-Primer
attggatggtgg

SEQ ID NO: 338079 - DNA, 12 bp, Artificial Sequence
  Oligonucleotide primer for the detection of SNP TSC0040243
aataacttaaac

SEQ ID NO: 338080 - DNA, 12 bp, Artificial Sequence
  Oligonucleotide primer for the detection of SNP TSC0040245
ttcacttcattt

SEQ ID NO: 338081 - DNA, 12 bp, Artificial Sequence
  Oligonucleotide primer for the detection of SNP TSC0007635
tatgggagttat

SEQ ID NO: 338082 - DNA, 12 bp, Artificial Sequence
  Oligonucleotide primer for the detection of SNP TSC0007635
cataaaaatcac

SEQ ID NO: 338083 - DNA, 12 bp, Artificial Sequence
  Oligonucleotide primer for the detection of SNP TSC0007635
gtttgtagatat

SEQ ID NO: 338084 - DNA, 12 bp, Artificial Sequence
  Oligonucleotide primer for the detection of SNP TSC0040246
ttaacatataca

SEQ ID NO: 338085 - DNA, 12 bp, Artificial Sequence
  Oligonucleotide primer for the detection of SNP TSC0040246
tatttatccatt

SEQ ID NO: 338086 - DNA, 12 bp, Artificial Sequence
  Oligonucleotide primer for the detection of SNP TSC0040249
acaacctcctta

SEQ ID NO: 338087 - DNA, 12 bp, Artificial Sequence
  Oligonucleotide primer for the detection of SNP TSC0040249
tttttggagtta

SEQ ID NO: 338088 - DNA, 12 bp, Artificial Sequence
  Oligonucleotide primer for the detection of SNP TSC0040249
cccctaaaatta

SEQ ID NO: 338089 - DNA, 12 bp, Artificial Sequence
  Oligonucleotide primer for the detection of SNP TSC0040250
ttaaaatttcct

SEQ ID NO: 338090 - DNA, 12 bp, Artificial Sequence
  Oligonucleotide primer for the detection of SNP TSC0040250
ttttattatatg

SEQ ID NO: 338091 - DNA, 12 bp, Artificial Sequence
  Oligonucleotide primer for the detection of SNP TSC0040250
ttttattatacg

SEQ ID NO: 338092 - DNA, 12 bp, Artificial Sequence
  Oligonucleotide primer for the detection of SNP TSC0040250
ttccatcacaca

SEQ ID NO: 338093 - DNA, 12 bp, Artificial Sequence
  Oligonucleotide primer for the detection of SNP TSC0040250
ttccatcacacg

SEQ ID NO: 338094 - DNA, 12 bp, Artificial Sequence
  Oligonucleotide primer for the detection of SNP TSC0040250
ttaagatttttt

SEQ ID NO: 338095 - DNA, 12 bp, Artificial Sequence
  Oligonucleotide primer for the detection of SNP TSC0040251
taataataaacc

SEQ ID NO: 338096 - DNA, 12 bp, Artificial Sequence
  Oligonucleotide primer for the detection of SNP TSC0040252
aatccctatcca

SEQ ID NO: 338097 - DNA, 12 bp, Artificial Sequence
  Oligonucleotide primer for the detection of SNP TSC0040252
agttgttatttt

SEQ ID NO: 338098 - DNA, 12 bp, Artificial Sequence
  Oligonucleotide primer for the detection of SNP TSC0040252
aattattactcc

SEQ ID NO: 338099 - DNA, 12 bp, Artificial Sequence
  Oligonucleotide primer for the detection of SNP TSC0040254
ttatgttttata

SEQ ID NO: 338100 - DNA, 12 bp, Artificial Sequence
  Oligonucleotide primer for the detection of SNP TSC0040255
acccaatctaca

SEQ ID NO: 338101 - DNA, 12 bp, Artificial Sequence
  Oligonucleotide primer for the detection of SNP TSC0040255
ttgtatttaatt

SEQ ID NO: 338102 - DNA, 12 bp, Artificial Sequence
  Oligonucleotide primer for the detection of SNP TSC0040255
tcctacatctaa

SEQ ID NO: 338103 - DNA, 12 bp, Artificial Sequence
  Oligonucleotide primer for the detection of SNP TSC0040255
ggtttagtttgt

SEQ ID NO: 338104 - DNA, 12 bp, Artificial Sequence
  Oligonucleotide primer for the detection of SNP TSC0040256
aaaattataact

SEQ ID NO: 338105 - DNA, 12 bp, Artificial Sequence
  Oligonucleotide primer for the detection of SNP TSC0040256
gtagtggtggta

SEQ ID NO: 338106 - DNA, 12 bp, Artificial Sequence
  Oligonucleotide primer for the detection of SNP TSC0040259
aaataacaacac

SEQ ID NO: 338107 - DNA, 12 bp, Artificial Sequence
  Oligonucleotide primer for the detection of SNP TSC0040259
aatagggttaga

SEQ ID NO: 338108 - DNA, 12 bp, Artificial Sequence
  Oligonucleotide primer for the detection of SNP TSC0040263
ctacaacctaac

SEQ ID NO: 338109 - DNA, 12 bp, Artificial Sequence
  Oligonucleotide primer for the detection of SNP TSC0040263
tgaatttgggag

SEQ ID NO: 338110 - DNA, 12 bp, Artificial Sequence
  Oligonucleotide primer for the detection of SNP TSC0040266
ttaagggagtaa

SEQ ID NO: 338111 - DNA, 12 bp, Artificial Sequence
  Oligonucleotide primer for the detection of SNP TSC0040266
tttgaggttggt

SEQ ID NO: 338112 - DNA, 12 bp, Artificial Sequence
  Oligonucleotide primer for the detection of SNP TSC0040267
cataaaaatact

SEQ ID NO: 338113 - DNA, 12 bp, Artificial Sequence
  Oligonucleotide primer for the detection of SNP TSC0040267
tttaggatagaa

SEQ ID NO: 338114 - DNA, 12 bp, Artificial Sequence
  Oligonucleotide primer for the detection of SNP TSC0009630
aaaccatatact

SEQ ID NO: 338115 - DNA, 12 bp, Artificial Sequence
  Oligonucleotide primer for the detection of SNP TSC0009630
aatatattggtg

SEQ ID NO: 338116 - DNA, 12 bp, Artificial Sequence
  Oligonucleotide primer for the detection of SNP TSC0040269
tcatctaatcac

SEQ ID NO: 338117 - DNA, 12 bp, Artificial Sequence
  Oligonucleotide primer for the detection of SNP TSC0040269
gtttaatttata

SEQ ID NO: 338118 - DNA, 12 bp, Artificial Sequence
  Oligonucleotide primer for the detection of SNP TSC0040270
ttttctaaaaca

SEQ ID NO: 338119 - DNA, 12 bp, Artificial Sequence
  Oligonucleotide primer for the detection of SNP TSC0040270
gtttaatttagt

SEQ ID NO: 338120 - DNA, 12 bp, Artificial Sequence
  Oligonucleotide primer for the detection of SNP TSC0040270
ctaatttaataa

SEQ ID NO: 338121 - DNA, 12 bp, Artificial Sequence
  Oligonucleotide primer for the detection of SNP TSC0040270
tttttagagtat

SEQ ID NO: 338122 - DNA, 12 bp, Artificial Sequence
  Oligonucleotide primer for the detection of SNP TSC0040270
tttttagagtac

SEQ ID NO: 338123 - DNA, 12 bp, Artificial Sequence
  Oligonucleotide primer for the detection of SNP TSC0040271
taatttctccta

SEQ ID NO: 338124 - DNA, 12 bp, Artificial Sequence
  Oligonucleotide primer for the detection of SNP TSC0040271
aggagagtggta

SEQ ID NO: 338125 - DNA, 12 bp, Artificial Sequence
  Oligonucleotide primer for the detection of SNP TSC0040272
cctaaactaaac

SEQ ID NO: 338126 - DNA, 12 bp, Artificial Sequence
  Oligonucleotide primer for the detection of SNP TSC0040272
ttatttgttgta

SEQ ID NO: 338127 - DNA, 12 bp, Artificial Sequence
  Oligonucleotide primer for the detection of SNP TSC0040273
cttcaaaataaa

SEQ ID NO: 338128 - DNA, 12 bp, Artificial Sequence
  Oligonucleotide primer for the detection of SNP TSC0040273
tgatttttgaga

SEQ ID NO: 338129 - DNA, 12 bp, Artificial Sequence
  Oligonucleotide primer for the detection of SNP TSC0040274
aatataattttc

SEQ ID NO: 338130 - DNA, 12 bp, Artificial Sequence
  Oligonucleotide primer for the detection of SNP TSC0040274
taagagttaaat

SEQ ID NO: 338131 - DNA, 12 bp, Artificial Sequence
  Oligonucleotide primer for the detection of SNP TSC0040274
taagagttaaac

SEQ ID NO: 338132 - DNA, 12 bp, Artificial Sequence
  Oligonucleotide primer for the detection of SNP TSC0040274
tcaaaaatcaaa

SEQ ID NO: 338133 - DNA, 12 bp, Artificial Sequence
  Oligonucleotide primer for the detection of SNP TSC0040274
agtgtggttttt

SEQ ID NO: 338134 - DNA, 12 bp, Artificial Sequence
  Oligonucleotide primer for the detection of SNP TSC0040276
actatattcacc

SEQ ID NO: 338135 - DNA, 12 bp, Artificial Sequence
  Oligonucleotide primer for the detection of SNP TSC0040276
actatattcgcc

SEQ ID NO: 338136 - DNA, 12 bp, Artificial Sequence
  Oligonucleotide primer for the detection of SNP TSC0040276
ggttgtgaatta

SEQ ID NO: 338137 - DNA, 12 bp, Artificial Sequence
  Oligonucleotide primer for the detection of SNP TSC0040276
ggttgcgaatta

SEQ ID NO: 338138 - DNA, 12 bp, Artificial Sequence
  Oligonucleotide primer for the detection of SNP TSC0040277
ttattgagtata

SEQ ID NO: 338139 - DNA, 12 bp, Artificial Sequence
  Oligonucleotide primer for the detection of SNP TSC0040279
aaccattcaata

SEQ ID NO: 338140 - DNA, 12 bp, Artificial Sequence
  Oligonucleotide primer for the detection of SNP TSC0040279
aaccgttcaata

SEQ ID NO: 338141 - DNA, 12 bp, Artificial Sequence
  Oligonucleotide primer for the detection of SNP TSC0040279
ataaaaagttag

SEQ ID NO: 338142 - DNA, 12 bp, Artificial Sequence
  Oligonucleotide primer for the detection of SNP TSC0040279
acaaaaaactaa

SEQ ID NO: 338143 - DNA, 12 bp, Artificial Sequence
  Oligonucleotide primer for the detection of SNP TSC0040279
gattgtttagta

SEQ ID NO: 338144 - DNA, 12 bp, Artificial Sequence
  Oligonucleotide primer for the detection of SNP TSC0040279
gatcgtttagta

SEQ ID NO: 338145 - DNA, 12 bp, Artificial Sequence
  Oligonucleotide primer for the detection of SNP TSC0040280
attcatcaatta

SEQ ID NO: 338146 - DNA, 12 bp, Artificial Sequence
  Oligonucleotide primer for the detection of SNP TSC0040280
attcatcgatta

SEQ ID NO: 338147 - DNA, 12 bp, Artificial Sequence
  Oligonucleotide primer for the detection of SNP TSC0040280
taaaatattatt

SEQ ID NO: 338148 - DNA, 12 bp, Artificial Sequence
  Oligonucleotide primer for the detection of SNP TSC0040280
atttattggtta

SEQ ID NO: 338149 - DNA, 12 bp, Artificial Sequence
  Oligonucleotide primer for the detection of SNP TSC0040280
atttatcggtta

SEQ ID NO: 338150 - DNA, 12 bp, Artificial Sequence
  Oligonucleotide primer for the detection of SNP TSC0040284
acgtaaaaactt

SEQ ID NO: 338151 - DNA, 12 bp, Artificial Sequence
  Oligonucleotide primer for the detection of SNP TSC0040284
tgtgtgttttaa

SEQ ID NO: 338152 - DNA, 12 bp, Artificial Sequence
  Oligonucleotide primer for the detection of SNP TSC0040291
aaatccaaacac

SEQ ID NO: 338153 - DNA, 12 bp, Artificial Sequence
  Oligonucleotide primer for the detection of SNP TSC0040292
tttgttatatta

SEQ ID NO: 338154 - DNA, 12 bp, Artificial Sequence
  Oligonucleotide primer for the detection of SNP TSC0040293
tatcatttctat

SEQ ID NO: 338155 - DNA, 12 bp, Artificial Sequence
  Oligonucleotide primer for the detection of SNP TSC0040293
tgtttaggggga

SEQ ID NO: 338156 - DNA, 12 bp, Artificial Sequence
  Oligonucleotide primer for the detection of SNP TSC0040294
ctctaaaataat

SEQ ID NO: 338157 - DNA, 12 bp, Artificial Sequence
  Oligonucleotide primer for the detection of SNP TSC0040294
cttcaaaaaaca

SEQ ID NO: 338158 - DNA, 12 bp, Artificial Sequence
  Oligonucleotide primer for the detection of SNP TSC0040294
ttttggagtgat

SEQ ID NO: 338159 - DNA, 12 bp, Artificial Sequence
  Oligonucleotide primer for the detection of SNP TSC0040295
ggaggttgaggc

SEQ ID NO: 338160 - DNA, 12 bp, Artificial Sequence
  Oligonucleotide primer for the detection of SNP TSC0040295
ggaggtcgaggc

SEQ ID NO: 338161 - DNA, 12 bp, Artificial Sequence
  Oligonucleotide primer for the detection of SNP TSC0040295
aggtgagttgtt

SEQ ID NO: 338162 - DNA, 12 bp, Artificial Sequence
  Oligonucleotide primer for the detection of SNP TSC0040295
aggtgagttgtc

SEQ ID NO: 338163 - DNA, 12 bp, Artificial Sequence
  Oligonucleotide primer for the detection of SNP TSC0040300
cataataatatt

SEQ ID NO: 338164 - DNA, 12 bp, Artificial Sequence
  Oligonucleotide primer for the detection of SNP TSC0040300
ttggttatgtta

SEQ ID NO: 338165 - DNA, 12 bp, Artificial Sequence
  Oligonucleotide primer for the detection of SNP TSC0040301
tattaaaattct

SEQ ID NO: 338166 - DNA, 12 bp, Artificial Sequence
  Oligonucleotide primer for the detection of SNP TSC0040301
ttttatagtgta

SEQ ID NO: 338167 - DNA, 12 bp, Artificial Sequence
  Oligonucleotide primer for the detection of SNP TSC0040302
tttaaaaaaaga

SEQ ID NO: 338168 - DNA, 12 bp, Artificial Sequence
  Oligonucleotide primer for the detection of SNP TSC0040305
tactaaattttt

SEQ ID NO: 338169 - DNA, 12 bp, Artificial Sequence
  Oligonucleotide primer for the detection of SNP TSC0040305
ttattttggtat

SEQ ID NO: 338170 - DNA, 12 bp, Artificial Sequence
  Oligonucleotide primer for the detection of SNP TSC0040305
ccactctaacat

SEQ ID NO: 338171 - DNA, 12 bp, Artificial Sequence
  Oligonucleotide primer for the detection of SNP TSC0040305
tgttaaattttt

SEQ ID NO: 338172 - DNA, 12 bp, Artificial Sequence
  Oligonucleotide primer for the detection of SNP TSC0040306
tttaaatactta

SEQ ID NO: 338173 - DNA, 12 bp, Artificial Sequence
  Oligonucleotide primer for the detection of SNP TSC0040306
tataaatggaga

SEQ ID NO: 338174 - DNA, 12 bp, Artificial Sequence
  Oligonucleotide primer for the detection of SNP TSC0040306
tacaaataaaaa

SEQ ID NO: 338175 - DNA, 12 bp, Artificial Sequence
  Oligonucleotide primer for the detection of SNP TSC0040306
gtttaggtgttt

SEQ ID NO: 338176 - DNA, 12 bp, Artificial Sequence
  Oligonucleotide primer for the detection of SNP TSC0040312
tcactccaaata

SEQ ID NO: 338177 - DNA, 12 bp, Artificial Sequence
  Oligonucleotide primer for the detection of SNP TSC0040312
ataaatatagtt

SEQ ID NO: 338178 - DNA, 12 bp, Artificial Sequence
  Oligonucleotide primer for the detection of SNP TSC0040312
ataaatacaatt

SEQ ID NO: 338179 - DNA, 12 bp, Artificial Sequence
  Oligonucleotide primer for the detection of SNP TSC0040313
tttacttaatca

SEQ ID NO: 338180 - DNA, 12 bp, Artificial Sequence
  Oligonucleotide primer for the detection of SNP TSC0040313
gagtatagagaa

SEQ ID NO: 338181 - DNA, 12 bp, Artificial Sequence
  Oligonucleotide primer for the detection of SNP TSC0040316
ttgtttggtatt

SEQ ID NO: 338182 - DNA, 12 bp, Artificial Sequence
  Oligonucleotide primer for the detection of SNP TSC0040316
cattacttaaca

SEQ ID NO: 338183 - DNA, 12 bp, Artificial Sequence
  Oligonucleotide primer for the detection of SNP TSC0040316
ataaaagttttt

SEQ ID NO: 338184 - DNA, 12 bp, Artificial Sequence
  Oligonucleotide primer for the detection of SNP TSC0040321
gagaatgtggta

SEQ ID NO: 338185 - DNA, 12 bp, Artificial Sequence
  Oligonucleotide primer for the detection of SNP TSC0040322
cacctaaaatcc

SEQ ID NO: 338186 - DNA, 12 bp, Artificial Sequence
  Oligonucleotide primer for the detection of SNP TSC0040322
gattttataatt

SEQ ID NO: 338187 - DNA, 12 bp, Artificial Sequence
  Oligonucleotide primer for the detection of SNP TSC0040322
aactctacaatt

SEQ ID NO: 338188 - DNA, 12 bp, Artificial Sequence
  Oligonucleotide primer for the detection of SNP TSC0040322
tatttggagttt

SEQ ID NO: 338189 - DNA, 12 bp, Artificial Sequence
  Oligonucleotide primer for the detection of SNP TSC0040323
aatacacttaac

SEQ ID NO: 338190 - DNA, 12 bp, Artificial Sequence
  Oligonucleotide primer for the detection of SNP TSC0040323
tttaggatttgg

SEQ ID NO: 338191 - DNA, 12 bp, Artificial Sequence
  Oligonucleotide primer for the detection of SNP TSC0040323
aatatatttgat

SEQ ID NO: 338192 - DNA, 12 bp, Artificial Sequence
  Oligonucleotide primer for the detection of SNP TSC0040324
agaaattgttta

SEQ ID NO: 338193 - DNA, 12 bp, Artificial Sequence
  Oligonucleotide primer for the detection of SNP TSC0040327
caaactaattta

SEQ ID NO: 338194 - DNA, 12 bp, Artificial Sequence
  Oligonucleotide primer for the detection of SNP TSC0040327
aaaatgaaagta

SEQ ID NO: 338195 - DNA, 12 bp, Artificial Sequence
  Oligonucleotide primer for the detection of SNP TSC0040330
ctacatcacttt

SEQ ID NO: 338196 - DNA, 12 bp, Artificial Sequence
  Oligonucleotide primer for the detection of SNP TSC0040330
gtagtttaaata

SEQ ID NO: 338197 - DNA, 12 bp, Artificial Sequence
  Oligonucleotide primer for the detection of SNP TSC0040330
acaattcaaata

SEQ ID NO: 338198 - DNA, 12 bp, Artificial Sequence
  Oligonucleotide primer for the detection of SNP TSC0040331
ccccaaataaaa

SEQ ID NO: 338199 - DNA, 12 bp, Artificial Sequence
  Oligonucleotide primer for the detection of SNP TSC0040331
ttttttgtaatt

SEQ ID NO: 338200 - DNA, 12 bp, Artificial Sequence
  Oligonucleotide primer for the detection of SNP TSC0040331
tttcctacaact

SEQ ID NO: 338201 - DNA, 12 bp, Artificial Sequence
  Oligonucleotide primer for the detection of SNP TSC0040331
ttttagatgaga

SEQ ID NO: 338202 - DNA, 12 bp, Artificial Sequence
  Oligonucleotide primer for the detection of SNP TSC0040332
ctcctaactcta

SEQ ID NO: 338203 - DNA, 12 bp, Artificial Sequence
  Oligonucleotide primer for the detection of SNP TSC0040332
ttttagggggat

SEQ ID NO: 338204 - DNA, 12 bp, Artificial Sequence
  Oligonucleotide primer for the detection of SNP TSC0040333
aaaactaacgcc

SEQ ID NO: 338205 - DNA, 12 bp, Artificial Sequence
  Oligonucleotide primer for the detection of SNP TSC0040333
gggtttgtgatg

SEQ ID NO: 338206 - DNA, 12 bp, Artificial Sequence
  Oligonucleotide primer for the detection of SNP TSC0040333
gggttcgtgatg

SEQ ID NO: 338207 - DNA, 12 bp, Artificial Sequence
  Oligonucleotide primer for the detection of SNP TSC0040337
acaaaaaatacc

SEQ ID NO: 338208 - DNA, 12 bp, Artificial Sequence
  Oligonucleotide primer for the detection of SNP TSC0040337
aataaaattgag

SEQ ID NO: 338209 - DNA, 12 bp, Artificial Sequence
  Oligonucleotide primer for the detection of SNP TSC0040343
tctttaaacatt

SEQ ID NO: 338210 - DNA, 12 bp, Artificial Sequence
  Oligonucleotide primer for the detection of SNP TSC0040343
caaaaactcaca

SEQ ID NO: 338211 - DNA, 12 bp, Artificial Sequence
  Oligonucleotide primer for the detection of SNP TSC0040343
tttttgggtatt

SEQ ID NO: 338212 - DNA, 12 bp, Artificial Sequence
  Oligonucleotide primer for the detection of SNP TSC0040346
aagaattttaat

SEQ ID NO: 338213 - DNA, 12 bp, Artificial Sequence
  Oligonucleotide primer for the detection of SNP TSC0040347
tttttgaagttt

SEQ ID NO: 338214 - DNA, 12 bp, Artificial Sequence
  Oligonucleotide primer for the detection of SNP TSC0040347
agatagaaaata

SEQ ID NO: 338215 - DNA, 12 bp, Artificial Sequence
  Oligonucleotide primer for the detection of SNP TSC0040348
taacatcactcc

SEQ ID NO: 338216 - DNA, 12 bp, Artificial Sequence
  Oligonucleotide primer for the detection of SNP TSC0040348
agaaaattagga

SEQ ID NO: 338217 - DNA, 12 bp, Artificial Sequence
  Oligonucleotide primer for the detection of SNP TSC0040349
atatttttaaac

SEQ ID NO: 338218 - DNA, 12 bp, Artificial Sequence
  Oligonucleotide primer for the detection of SNP TSC0040349
gattgttataaa

SEQ ID NO: 338219 - DNA, 12 bp, Artificial Sequence
  Oligonucleotide primer for the detection of SNP TSC0040350
aatattatttat

SEQ ID NO: 338220 - DNA, 12 bp, Artificial Sequence
  Oligonucleotide primer for the detection of SNP TSC0040352
aaccatatacac

SEQ ID NO: 338221 - DNA, 12 bp, Artificial Sequence
  Oligonucleotide primer for the detection of SNP TSC0040352
gttttgtatgtt

SEQ ID NO: 338222 - DNA, 12 bp, Artificial Sequence
  Oligonucleotide primer for the detection of SNP TSC0040352
accttacatact

SEQ ID NO: 338223 - DNA, 12 bp, Artificial Sequence
  Oligonucleotide primer for the detection of SNP TSC0040354
tcataaaatata

SEQ ID NO: 338224 - DNA, 12 bp, Artificial Sequence
  Oligonucleotide primer for the detection of SNP TSC0040354
ataagaatgaga

SEQ ID NO: 338225 - DNA, 12 bp, Artificial Sequence
  Oligonucleotide primer for the detection of SNP TSC0040354
ttataaaatgtg

SEQ ID NO: 338226 - DNA, 12 bp, Artificial Sequence
  Oligonucleotide primer for the detection of SNP TSC0040355
ataaataaacga

SEQ ID NO: 338227 - DNA, 12 bp, Artificial Sequence
  Oligonucleotide primer for the detection of SNP TSC0040355
agtgtttagttt

SEQ ID NO: 338228 - DNA, 12 bp, Artificial Sequence
  Oligonucleotide primer for the detection of SNP TSC0040355
aatatctaactc

SEQ ID NO: 338229 - DNA, 12 bp, Artificial Sequence
  Oligonucleotide primer for the detection of SNP TSC0040355
atgaatgggtgg

SEQ ID NO: 338230 - DNA, 12 bp, Artificial Sequence
  Oligonucleotide primer for the detection of SNP TSC0040355
atgaatgggcgg

SEQ ID NO: 338231 - DNA, 12 bp, Artificial Sequence
  Oligonucleotide primer for the detection of SNP TSC0040358
gattttattttg

SEQ ID NO: 338232 - DNA, 12 bp, Artificial Sequence
  Oligonucleotide primer for the detection of SNP TSC0040359
ttcaattaatat

SEQ ID NO: 338233 - DNA, 12 bp, Artificial Sequence
  Oligonucleotide primer for the detection of SNP TSC0040360
ctatactaaata

SEQ ID NO: 338234 - DNA, 12 bp, Artificial Sequence
  Oligonucleotide primer for the detection of SNP TSC0040360
gaattattattc

SEQ ID NO: 338235 - DNA, 12 bp, Artificial Sequence
  Oligonucleotide primer for the detection of SNP TSC0040360
aaatcaccactc

SEQ ID NO: 338236 - DNA, 12 bp, Artificial Sequence
  Oligonucleotide primer for the detection of SNP TSC0040360
tttgtgttaaat

SEQ ID NO: 338237 - DNA, 12 bp, Artificial Sequence
  Oligonucleotide primer for the detection of SNP TSC0040361
aaaagtaattta

SEQ ID NO: 338238 - DNA, 12 bp, Artificial Sequence
  Oligonucleotide primer for the detection of SNP TSC0040361
aaaaataattta

SEQ ID NO: 338239 - DNA, 12 bp, Artificial Sequence
  Oligonucleotide primer for the detection of SNP TSC0040361
gaaataagaagt

SEQ ID NO: 338240 - DNA, 12 bp, Artificial Sequence
  Oligonucleotide primer for the detection of SNP TSC0040362
ctttattttttt

SEQ ID NO: 338241 - DNA, 12 bp, Artificial Sequence
  Oligonucleotide primer for the detection of SNP TSC0040362
ttaaaaaaaatt

SEQ ID NO: 338242 - DNA, 12 bp, Artificial Sequence
  Oligonucleotide primer for the detection of SNP TSC0040364
aaatttttgttt

SEQ ID NO: 338243 - DNA, 12 bp, Artificial Sequence
  Oligonucleotide primer for the detection of SNP TSC0040364
aaattttcgttt

SEQ ID NO: 338244 - DNA, 12 bp, Artificial Sequence
  Oligonucleotide primer for the detection of SNP TSC0040364
aaatcctcacct

SEQ ID NO: 338245 - DNA, 12 bp, Artificial Sequence
  Oligonucleotide primer for the detection of SNP TSC0040364
aaatcctcgcct

SEQ ID NO: 338246 - DNA, 12 bp, Artificial Sequence
  Oligonucleotide primer for the detection of SNP TSC0040364
gtagatagtgaa

SEQ ID NO: 338247 - DNA, 12 bp, Artificial Sequence
  Oligonucleotide primer for the detection of SNP TSC0040365
aacaaccaaaac

SEQ ID NO: 338248 - DNA, 12 bp, Artificial Sequence
  Oligonucleotide primer for the detection of SNP TSC0040365
gaagtatttttt

SEQ ID NO: 338249 - DNA, 12 bp, Artificial Sequence
  Oligonucleotide primer for the detection of SNP TSC0040365
gaagtatttttc

SEQ ID NO: 338250 - DNA, 12 bp, Artificial Sequence
  Oligonucleotide primer for the detection of SNP TSC0040365
atagttagggtt

SEQ ID NO: 338251 - DNA, 12 bp, Artificial Sequence
  Oligonucleotide primer for the detection of SNP TSC0040366
aacaacaatatc

SEQ ID NO: 338252 - DNA, 12 bp, Artificial Sequence
  Oligonucleotide primer for the detection of SNP TSC0040366
aacgacaatatc

SEQ ID NO: 338253 - DNA, 12 bp, Artificial Sequence
  Oligonucleotide primer for the detection of SNP TSC0040366
tttaaggtttag

SEQ ID NO: 338254 - DNA, 12 bp, Artificial Sequence
  Oligonucleotide primer for the detection of SNP TSC0040368
tttatttattgg

SEQ ID NO: 338255 - DNA, 12 bp, Artificial Sequence
  Oligonukleotid-Primer
tttacccactaa

SEQ ID NO: 338256 - DNA, 12 bp, Artificial Sequence
  Oligonucleotide primer for the detection of SNP TSC0040371
acaaaaacccaa

SEQ ID NO: 338257 - DNA, 12 bp, Artificial Sequence
  Oligonucleotide primer for the detection of SNP TSC0040371
cgttttatttgt

SEQ ID NO: 338258 - DNA, 12 bp, Artificial Sequence
  Oligonucleotide primer for the detection of SNP TSC0040371
attttatttata

SEQ ID NO: 338259 - DNA, 12 bp, Artificial Sequence
  Oligonucleotide primer for the detection of SNP TSC0040371
gttttatttata

SEQ ID NO: 338260 - DNA, 12 bp, Artificial Sequence
  Oligonucleotide primer for the detection of SNP TSC0040371
taaaggtttagt

SEQ ID NO: 338261 - DNA, 12 bp, Artificial Sequence
  Oligonucleotide primer for the detection of SNP TSC0040372
aaaaactctaca

SEQ ID NO: 338262 - DNA, 12 bp, Artificial Sequence
  Oligonucleotide primer for the detection of SNP TSC0040372
aaaaactctacg

SEQ ID NO: 338263 - DNA, 12 bp, Artificial Sequence
  Oligonucleotide primer for the detection of SNP TSC0040372
tacttaattctt

SEQ ID NO: 338264 - DNA, 12 bp, Artificial Sequence
  Oligonucleotide primer for the detection of SNP TSC0040372
aaaagttttgtg

SEQ ID NO: 338265 - DNA, 12 bp, Artificial Sequence
  Oligonucleotide primer for the detection of SNP TSC0040372
aaaagttttgcg

SEQ ID NO: 338266 - DNA, 12 bp, Artificial Sequence
  Oligonucleotide primer for the detection of SNP TSC0040375
atatattatcct

SEQ ID NO: 338267 - DNA, 12 bp, Artificial Sequence
  Oligonucleotide primer for the detection of SNP TSC0040375
aataataaattt

SEQ ID NO: 338268 - DNA, 12 bp, Artificial Sequence
  Oligonucleotide primer for the detection of SNP TSC0040376
aacctaatatct

SEQ ID NO: 338269 - DNA, 12 bp, Artificial Sequence
  unsure (5): Oligonucleotide primer for the detection of SNP TSC0040376
ggggngaaaaaa

SEQ ID NO: 338270 - DNA, 12 bp, Artificial Sequence
  Oligonucleotide primer for the detection of SNP TSC0040377
cttttccaacca

SEQ ID NO: 338271 - DNA, 12 bp, Artificial Sequence
  Oligonucleotide primer for the detection of SNP TSC0040377
gtgttatattat

SEQ ID NO: 338272 - DNA, 12 bp, Artificial Sequence
  Oligonucleotide primer for the detection of SNP TSC0040377
atatcataccat

SEQ ID NO: 338273 - DNA, 12 bp, Artificial Sequence
  Oligonucleotide primer for the detection of SNP TSC0040378
cataacattaca

SEQ ID NO: 338274 - DNA, 12 bp, Artificial Sequence
  Oligonucleotide primer for the detection of SNP TSC0040378
cgtaacattaca

SEQ ID NO: 338275 - DNA, 12 bp, Artificial Sequence
  Oligonucleotide primer for the detection of SNP TSC0040378
ttctactactac

SEQ ID NO: 338276 - DNA, 12 bp, Artificial Sequence
  Oligonucleotide primer for the detection of SNP TSC0040378
tgtaatattgta

SEQ ID NO: 338277 - DNA, 12 bp, Artificial Sequence
  Oligonucleotide primer for the detection of SNP TSC0040378
cgtaatattgta

SEQ ID NO: 338278 - DNA, 12 bp, Artificial Sequence
  Oligonucleotide primer for the detection of SNP TSC0040379
taaaaaaatctt

SEQ ID NO: 338279 - DNA, 12 bp, Artificial Sequence
  Oligonucleotide primer for the detection of SNP TSC0040379
ttgtgtttggaa

SEQ ID NO: 338280 - DNA, 12 bp, Artificial Sequence
  Oligonucleotide primer for the detection of SNP TSC0040379
ttgcgtttggaa

SEQ ID NO: 338281 - DNA, 12 bp, Artificial Sequence
  Oligonucleotide primer for the detection of SNP TSC0040379
ctacatctaaaa

SEQ ID NO: 338282 - DNA, 12 bp, Artificial Sequence
  Oligonucleotide primer for the detection of SNP TSC0040379
ctacgtctaaaa

SEQ ID NO: 338283 - DNA, 12 bp, Artificial Sequence
  Oligonucleotide primer for the detection of SNP TSC0040379
tagaagagtttt

SEQ ID NO: 338284 - DNA, 12 bp, Artificial Sequence
  Oligonucleotide primer for the detection of SNP TSC0040380
aaaaaatctatt

SEQ ID NO: 338285 - DNA, 12 bp, Artificial Sequence
  Oligonucleotide primer for the detection of SNP TSC0040380
atatgaagataa

SEQ ID NO: 338286 - DNA, 12 bp, Artificial Sequence
  Oligonucleotide primer for the detection of SNP TSC0040380
acataaaaataa

SEQ ID NO: 338287 - DNA, 12 bp, Artificial Sequence
  Oligonucleotide primer for the detection of SNP TSC0040380
aaggaatttatt

SEQ ID NO: 338288 - DNA, 12 bp, Artificial Sequence
  Oligonucleotide primer for the detection of SNP TSC0040381
tgtagtaatttt

SEQ ID NO: 338289 - DNA, 12 bp, Artificial Sequence
  Oligonucleotide primer for the detection of SNP TSC0040381
tgtagtaatttc

SEQ ID NO: 338290 - DNA, 12 bp, Artificial Sequence
  Oligonucleotide primer for the detection of SNP TSC0040381
tataataacttc

SEQ ID NO: 338291 - DNA, 12 bp, Artificial Sequence
  Oligonucleotide primer for the detection of SNP TSC0040382
aaaaaaatttaa

SEQ ID NO: 338292 - DNA, 12 bp, Artificial Sequence
  Oligonucleotide primer for the detection of SNP TSC0040382
atttaatttgtt

SEQ ID NO: 338293 - DNA, 12 bp, Artificial Sequence
  Oligonucleotide primer for the detection of SNP TSC0040382
agagaaatttaa

SEQ ID NO: 338294 - DNA, 12 bp, Artificial Sequence
  Oligonucleotide primer for the detection of SNP TSC0040385
actcacacaacc

SEQ ID NO: 338295 - DNA, 12 bp, Artificial Sequence
  Oligonucleotide primer for the detection of SNP TSC0040385
actcacgcaacc

SEQ ID NO: 338296 - DNA, 12 bp, Artificial Sequence
  Oligonucleotide primer for the detection of SNP TSC0040385
actcgcacaacc

SEQ ID NO: 338297 - DNA, 12 bp, Artificial Sequence
  Oligonucleotide primer for the detection of SNP TSC0040385
actcgcgcaacc

SEQ ID NO: 338298 - DNA, 12 bp, Artificial Sequence
  Oligonucleotide primer for the detection of SNP TSC0040385
tggtggtggggg

SEQ ID NO: 338299 - DNA, 12 bp, Artificial Sequence
  Oligonucleotide primer for the detection of SNP TSC0040385
tggcggtggggg

SEQ ID NO: 338300 - DNA, 12 bp, Artificial Sequence
  Oligonucleotide primer for the detection of SNP TSC0040386
aaaaactatttt

SEQ ID NO: 338301 - DNA, 12 bp, Artificial Sequence
  Oligonucleotide primer for the detection of SNP TSC0040387
atagaaatttgg

SEQ ID NO: 338302 - DNA, 12 bp, Artificial Sequence
  Oligonucleotide primer for the detection of SNP TSC0040388
cccaactctaaa

SEQ ID NO: 338303 - DNA, 12 bp, Artificial Sequence
  Oligonucleotide primer for the detection of SNP TSC0040388
ttaagagttaag

SEQ ID NO: 338304 - DNA, 12 bp, Artificial Sequence
  Oligonucleotide primer for the detection of SNP TSC0040391
ctattttttttt

SEQ ID NO: 338305 - DNA, 12 bp, Artificial Sequence
  Oligonucleotide primer for the detection of SNP TSC0040393
aactctaaaaac

SEQ ID NO: 338306 - DNA, 12 bp, Artificial Sequence
  Oligonucleotide primer for the detection of SNP TSC0040394
aattaacccaat

SEQ ID NO: 338307 - DNA, 12 bp, Artificial Sequence
  Oligonucleotide primer for the detection of SNP TSC0008393
tttattaaccat

SEQ ID NO: 338308 - DNA, 12 bp, Artificial Sequence
  Oligonucleotide primer for the detection of SNP TSC0008393
tttattaaccgt

SEQ ID NO: 338309 - DNA, 12 bp, Artificial Sequence
  Oligonucleotide primer for the detection of SNP TSC0008393
tgtaagattttg

SEQ ID NO: 338310 - DNA, 12 bp, Artificial Sequence
  Oligonucleotide primer for the detection of SNP TSC0008393
cgtaagattttg

SEQ ID NO: 338311 - DNA, 12 bp, Artificial Sequence
  Oligonucleotide primer for the detection of SNP TSC0008393
cataaaattcta

SEQ ID NO: 338312 - DNA, 12 bp, Artificial Sequence
  Oligonucleotide primer for the detection of SNP TSC0008393
cgtaaaattcta

SEQ ID NO: 338313 - DNA, 12 bp, Artificial Sequence
  Oligonucleotide primer for the detection of SNP TSC0008393
tttattaatcgt

SEQ ID NO: 338314 - DNA, 12 bp, Artificial Sequence
  Oligonucleotide primer for the detection of SNP TSC0040396
tcatataaccta

SEQ ID NO: 338315 - DNA, 12 bp, Artificial Sequence
  Oligonucleotide primer for the detection of SNP TSC0040396
tgttttgattgt

SEQ ID NO: 338316 - DNA, 12 bp, Artificial Sequence
  Oligonucleotide primer for the detection of SNP TSC0040396
cgttttgattgt

SEQ ID NO: 338317 - DNA, 12 bp, Artificial Sequence
  Oligonucleotide primer for the detection of SNP TSC0040396
cattttaactat

SEQ ID NO: 338318 - DNA, 12 bp, Artificial Sequence
  Oligonucleotide primer for the detection of SNP TSC0040396
cgttttaactat

SEQ ID NO: 338319 - DNA, 12 bp, Artificial Sequence
  Oligonucleotide primer for the detection of SNP TSC0040396
tatgtgatttgt

SEQ ID NO: 338320 - DNA, 12 bp, Artificial Sequence
  Oligonucleotide primer for the detection of SNP TSC0040397
tattatattcta

SEQ ID NO: 338321 - DNA, 12 bp, Artificial Sequence
  Oligonucleotide primer for the detection of SNP TSC0040397
gatttatttggt

SEQ ID NO: 338322 - DNA, 12 bp, Artificial Sequence
  Oligonucleotide primer for the detection of SNP TSC0040397
gatttatttggc

SEQ ID NO: 338323 - DNA, 12 bp, Artificial Sequence
  Oligonucleotide primer for the detection of SNP TSC0040397
taactcatctaa

SEQ ID NO: 338324 - DNA, 12 bp, Artificial Sequence
  Oligonucleotide primer for the detection of SNP TSC0040398
ctaaattccttt

SEQ ID NO: 338325 - DNA, 12 bp, Artificial Sequence
  Oligonucleotide primer for the detection of SNP TSC0040398
aaaagtttatag

SEQ ID NO: 338326 - DNA, 12 bp, Artificial Sequence
  Oligonucleotide primer for the detection of SNP TSC0040403
attattacttaa

SEQ ID NO: 338327 - DNA, 12 bp, Artificial Sequence
  Oligonucleotide primer for the detection of SNP TSC0040403
ttttctttaata

SEQ ID NO: 338328 - DNA, 12 bp, Artificial Sequence
  Oligonucleotide primer for the detection of SNP TSC0000439
tcaataactact

SEQ ID NO: 338329 - DNA, 12 bp, Artificial Sequence
  Oligonucleotide primer for the detection of SNP TSC0000439
taatagtgggga

SEQ ID NO: 338330 - DNA, 12 bp, Artificial Sequence
  Oligonucleotide primer for the detection of SNP TSC0040405
aacccttccccc

SEQ ID NO: 338331 - DNA, 12 bp, Artificial Sequence
  Oligonucleotide primer for the detection of SNP TSC0040405
tttttaagggaa

SEQ ID NO: 338332 - DNA, 12 bp, Artificial Sequence
  Oligonucleotide primer for the detection of SNP TSC0009106
ttataaaaacta

SEQ ID NO: 338333 - DNA, 12 bp, Artificial Sequence
  Oligonucleotide primer for the detection of SNP TSC0009106
agatgttgtggg

SEQ ID NO: 338334 - DNA, 12 bp, Artificial Sequence
  Oligonucleotide primer for the detection of SNP TSC0009106
agatgtcgtggg

SEQ ID NO: 338335 - DNA, 12 bp, Artificial Sequence
  Oligonucleotide primer for the detection of SNP TSC0040410
aatcactaaaac

SEQ ID NO: 338336 - DNA, 12 bp, Artificial Sequence
  Oligonucleotide primer for the detection of SNP TSC0040410
tttaatttggag

SEQ ID NO: 338337 - DNA, 12 bp, Artificial Sequence
  Oligonucleotide primer for the detection of SNP TSC0040410
tctaacttaaaa

SEQ ID NO: 338338 - DNA, 12 bp, Artificial Sequence
  Oligonucleotide primer for the detection of SNP TSC0040410
aattattggggt

SEQ ID NO: 338339 - DNA, 12 bp, Artificial Sequence
  Oligonucleotide primer for the detection of SNP TSC0040411
ctaaatatatac

SEQ ID NO: 338340 - DNA, 12 bp, Artificial Sequence
  Oligonucleotide primer for the detection of SNP TSC0040411
taatgtttttta

SEQ ID NO: 338341 - DNA, 12 bp, Artificial Sequence
  Oligonucleotide primer for the detection of SNP TSC0040412
tccttcctcctt

SEQ ID NO: 338342 - DNA, 12 bp, Artificial Sequence
  Oligonucleotide primer for the detection of SNP TSC0040412
tattagtgtgta

SEQ ID NO: 338343 - DNA, 12 bp, Artificial Sequence
  Oligonucleotide primer for the detection of SNP TSC0040412
tattagtgcgta

SEQ ID NO: 338344 - DNA, 12 bp, Artificial Sequence
  Oligonucleotide primer for the detection of SNP TSC0040413
caaaaaaaaccc

SEQ ID NO: 338345 - DNA, 12 bp, Artificial Sequence
  Oligonucleotide primer for the detection of SNP TSC0040413
atttagtatata

SEQ ID NO: 338346 - DNA, 12 bp, Artificial Sequence
  Oligonucleotide primer for the detection of SNP TSC0040417
aacctattaata

SEQ ID NO: 338347 - DNA, 12 bp, Artificial Sequence
  Oligonucleotide primer for the detection of SNP TSC0040417
taaataaagttg

SEQ ID NO: 338348 - DNA, 12 bp, Artificial Sequence
  Oligonucleotide primer for the detection of SNP TSC0040417
caaataaaacta

SEQ ID NO: 338349 - DNA, 12 bp, Artificial Sequence
  Oligonucleotide primer for the detection of SNP TSC0040417
aatttgttgata

SEQ ID NO: 338350 - DNA, 12 bp, Artificial Sequence
  Oligonucleotide primer for the detection of SNP TSC0040418
aactattaaaaa

SEQ ID NO: 338351 - DNA, 12 bp, Artificial Sequence
  Oligonucleotide primer for the detection of SNP TSC0040418
taattttaattt

SEQ ID NO: 338352 - DNA, 12 bp, Artificial Sequence
  Oligonucleotide primer for the detection of SNP TSC0040418
agttattaggga

SEQ ID NO: 338353 - DNA, 12 bp, Artificial Sequence
  Oligonucleotide primer for the detection of SNP TSC0040421
ttttggtggttg

SEQ ID NO: 338354 - DNA, 12 bp, Artificial Sequence
  Oligonucleotide primer for the detection of SNP TSC0010017
tgttattaaaga

SEQ ID NO: 338355 - DNA, 12 bp, Artificial Sequence
  Oligonucleotide primer for the detection of SNP TSC0008818
aaaaacttacta

SEQ ID NO: 338356 - DNA, 12 bp, Artificial Sequence
  Oligonucleotide primer for the detection of SNP TSC0008818
tggttaaagtta

SEQ ID NO: 338357 - DNA, 12 bp, Artificial Sequence
  Oligonucleotide primer for the detection of SNP TSC0008818
gagatttgttgt

SEQ ID NO: 338358 - DNA, 12 bp, Artificial Sequence
  Oligonucleotide primer for the detection of SNP TSC0040422
aattataaaacc

SEQ ID NO: 338359 - DNA, 12 bp, Artificial Sequence
  Oligonucleotide primer for the detection of SNP TSC0040422
ggtataaagaag

SEQ ID NO: 338360 - DNA, 12 bp, Artificial Sequence
  Oligonucleotide primer for the detection of SNP TSC0040424
tccaatccacca

SEQ ID NO: 338361 - DNA, 12 bp, Artificial Sequence
  Oligonucleotide primer for the detection of SNP TSC0040424
ttttgagaatag

SEQ ID NO: 338362 - DNA, 12 bp, Artificial Sequence
  Oligonucleotide primer for the detection of SNP TSC0009587
gaaattaagtaa

SEQ ID NO: 338363 - DNA, 12 bp, Artificial Sequence
  Oligonucleotide primer for the detection of SNP TSC0040425
aaaaaccatcta

SEQ ID NO: 338364 - DNA, 12 bp, Artificial Sequence
  Oligonucleotide primer for the detection of SNP TSC0040425
tttttttaggat

SEQ ID NO: 338365 - DNA, 12 bp, Artificial Sequence
  Oligonucleotide primer for the detection of SNP TSC0040425
tcccttcaaaac

SEQ ID NO: 338366 - DNA, 12 bp, Artificial Sequence
  Oligonucleotide primer for the detection of SNP TSC0040425
aggaattattta

SEQ ID NO: 338367 - DNA, 12 bp, Artificial Sequence
  Oligonucleotide primer for the detection of SNP TSC0005364
acccaaattcta

SEQ ID NO: 338368 - DNA, 12 bp, Artificial Sequence
  Oligonucleotide primer for the detection of SNP TSC0005364
tatattgtatat

SEQ ID NO: 338369 - DNA, 12 bp, Artificial Sequence
  Oligonucleotide primer for the detection of SNP TSC0005364
tatattacatac

SEQ ID NO: 338370 - DNA, 12 bp, Artificial Sequence
  Oligonucleotide primer for the detection of SNP TSC0005364
gtttagattttg

SEQ ID NO: 338371 - DNA, 12 bp, Artificial Sequence
  Oligonucleotide primer for the detection of SNP TSC0040430
taaactctaatt

SEQ ID NO: 338372 - DNA, 12 bp, Artificial Sequence
  Oligonukleotid-Primer
tattatgggtta

SEQ ID NO: 338373 - DNA, 12 bp, Artificial Sequence
  Oligonucleotide primer for the detection of SNP TSC0040432
atttttcctaac

SEQ ID NO: 338374 - DNA, 12 bp, Artificial Sequence
  Oligonucleotide primer for the detection of SNP TSC0040432
tagttattataa

SEQ ID NO: 338375 - DNA, 12 bp, Artificial Sequence
  Oligonucleotide primer for the detection of SNP TSC0040434
ccaaaaaaaata

SEQ ID NO: 338376 - DNA, 12 bp, Artificial Sequence
  Oligonukleotid-Primer
gaattttttagt

SEQ ID NO: 338377 - DNA, 12 bp, Artificial Sequence
  Oligonucleotide primer for the detection of SNP TSC0040434
aaatcccttaac

SEQ ID NO: 338378 - DNA, 12 bp, Artificial Sequence
  Oligonucleotide primer for the detection of SNP TSC0040434
aaagagaatatt

SEQ ID NO: 338379 - DNA, 12 bp, Artificial Sequence
  Oligonucleotide primer for the detection of SNP TSC0040434
aaagagaatatc

SEQ ID NO: 338380 - DNA, 12 bp, Artificial Sequence
  Oligonucleotide primer for the detection of SNP TSC0040438
ccttccactccc

SEQ ID NO: 338381 - DNA, 12 bp, Artificial Sequence
  Oligonucleotide primer for the detection of SNP TSC0040438
tgtaaaggatga

SEQ ID NO: 338382 - DNA, 12 bp, Artificial Sequence
  Oligonucleotide primer for the detection of SNP TSC0040438
tgtaaaggacga

SEQ ID NO: 338383 - DNA, 12 bp, Artificial Sequence
  Oligonucleotide primer for the detection of SNP TSC0040449
ccaaaatataac

SEQ ID NO: 338384 - DNA, 12 bp, Artificial Sequence
  Oligonucleotide primer for the detection of SNP TSC0040449
gttaattattta

SEQ ID NO: 338385 - DNA, 12 bp, Artificial Sequence
  Oligonucleotide primer for the detection of SNP TSC0040450
cttctatcatac

SEQ ID NO: 338386 - DNA, 12 bp, Artificial Sequence
  Oligonucleotide primer for the detection of SNP TSC0040450
aagatggggggg

SEQ ID NO: 338387 - DNA, 12 bp, Artificial Sequence
  Oligonucleotide primer for the detection of SNP TSC0040452
ataaactcactt

SEQ ID NO: 338388 - DNA, 12 bp, Artificial Sequence
  Oligonucleotide primer for the detection of SNP TSC0040452
aaatgtggtaag

SEQ ID NO: 338389 - DNA, 12 bp, Artificial Sequence
  Oligonucleotide primer for the detection of SNP TSC0040453
ccccattcactc

SEQ ID NO: 338390 - DNA, 12 bp, Artificial Sequence
  Oligonucleotide primer for the detection of SNP TSC0040453
agaagaatgata

SEQ ID NO: 338391 - DNA, 12 bp, Artificial Sequence
  Oligonucleotide primer for the detection of SNP TSC0006407
ataaccaattaa

SEQ ID NO: 338392 - DNA, 12 bp, Artificial Sequence
  Oligonucleotide primer for the detection of SNP TSC0006407
taaattttgagt

SEQ ID NO: 338393 - DNA, 12 bp, Artificial Sequence
  Oligonucleotide primer for the detection of SNP TSC0006407
aactttaaataa

SEQ ID NO: 338394 - DNA, 12 bp, Artificial Sequence
  Oligonucleotide primer for the detection of SNP TSC0006407
atagttagttaa

SEQ ID NO: 338395 - DNA, 12 bp, Artificial Sequence
  Oligonucleotide primer for the detection of SNP TSC0006408
attctaccctca

SEQ ID NO: 338396 - DNA, 12 bp, Artificial Sequence
  Oligonucleotide primer for the detection of SNP TSC0040454
acacctttcccc

SEQ ID NO: 338397 - DNA, 12 bp, Artificial Sequence
  Oligonucleotide primer for the detection of SNP TSC0040454
atttttgggtga

SEQ ID NO: 338398 - DNA, 12 bp, Artificial Sequence
  Oligonucleotide primer for the detection of SNP TSC0040454
atttttgggcga

SEQ ID NO: 338399 - DNA, 12 bp, Artificial Sequence
  Oligonucleotide primer for the detection of SNP TSC0005458
acaaccaataaa

SEQ ID NO: 338400 - DNA, 12 bp, Artificial Sequence
  Oligonucleotide primer for the detection of SNP TSC0005458
tatatattgatt

SEQ ID NO: 338401 - DNA, 12 bp, Artificial Sequence
  Oligonucleotide primer for the detection of SNP TSC0005458
tatatattgatc

SEQ ID NO: 338402 - DNA, 12 bp, Artificial Sequence
  Oligonucleotide primer for the detection of SNP TSC0005458
tacacattaatc

SEQ ID NO: 338403 - DNA, 12 bp, Artificial Sequence
  Oligonucleotide primer for the detection of SNP TSC0005458
tagttaatgaat

SEQ ID NO: 338404 - DNA, 12 bp, Artificial Sequence
  Oligonucleotide primer for the detection of SNP TSC0005459
acatatttattc

SEQ ID NO: 338405 - DNA, 12 bp, Artificial Sequence
  Oligonucleotide primer for the detection of SNP TSC0040462
acttaataatta

SEQ ID NO: 338406 - DNA, 12 bp, Artificial Sequence
  Oligonucleotide primer for the detection of SNP TSC0040462
aaataatcttta

SEQ ID NO: 338407 - DNA, 12 bp, Artificial Sequence
  Oligonucleotide primer for the detection of SNP TSC0040462
gatttaataatt

SEQ ID NO: 338408 - DNA, 12 bp, Artificial Sequence
  Oligonucleotide primer for the detection of SNP TSC0040463
tattttaaaata

SEQ ID NO: 338409 - DNA, 12 bp, Artificial Sequence
  Oligonucleotide primer for the detection of SNP TSC0040463
tattttaaaatg

SEQ ID NO: 338410 - DNA, 12 bp, Artificial Sequence
  Oligonucleotide primer for the detection of SNP TSC0040465
ccattactctcc

SEQ ID NO: 338411 - DNA, 12 bp, Artificial Sequence
  Oligonucleotide primer for the detection of SNP TSC0040465
ttggttgaaata

SEQ ID NO: 338412 - DNA, 12 bp, Artificial Sequence
  Oligonucleotide primer for the detection of SNP TSC0040466
cataataacttc

SEQ ID NO: 338413 - DNA, 12 bp, Artificial Sequence
  Oligonucleotide primer for the detection of SNP TSC0040466
atagattgagga

SEQ ID NO: 338414 - DNA, 12 bp, Artificial Sequence
  Oligonucleotide primer for the detection of SNP TSC0040467
cttaaaaaaaac

SEQ ID NO: 338415 - DNA, 12 bp, Artificial Sequence
  Oligonucleotide primer for the detection of SNP TSC0040467
ttaaaattcaaa

SEQ ID NO: 338416 - DNA, 12 bp, Artificial Sequence
  Oligonucleotide primer for the detection of SNP TSC0040467
tttaagaaagat

SEQ ID NO: 338417 - DNA, 12 bp, Artificial Sequence
  Oligonucleotide primer for the detection of SNP TSC0040469
tcctataactat

SEQ ID NO: 338418 - DNA, 12 bp, Artificial Sequence
  Oligonucleotide primer for the detection of SNP TSC0040469
ggaaaaataaaa

SEQ ID NO: 338419 - DNA, 12 bp, Artificial Sequence
  Oligonucleotide primer for the detection of SNP TSC0040469
ttttgtgattgt

SEQ ID NO: 338420 - DNA, 12 bp, Artificial Sequence
  Oligonucleotide primer for the detection of SNP TSC0040470
cccaaaaaatat

SEQ ID NO: 338421 - DNA, 12 bp, Artificial Sequence
  Oligonucleotide primer for the detection of SNP TSC0040470
cccgaaaaatat

SEQ ID NO: 338422 - DNA, 12 bp, Artificial Sequence
  Oligonucleotide primer for the detection of SNP TSC0040470
aaaatagttata

SEQ ID NO: 338423 - DNA, 12 bp, Artificial Sequence
  Oligonucleotide primer for the detection of SNP TSC0040470
tttggggaatgt

SEQ ID NO: 338424 - DNA, 12 bp, Artificial Sequence
  Oligonucleotide primer for the detection of SNP TSC0040470
ttcggggaatgt

SEQ ID NO: 338425 - DNA, 12 bp, Artificial Sequence
  Oligonucleotide primer for the detection of SNP TSC0040471
ctctcacatcca

SEQ ID NO: 338426 - DNA, 12 bp, Artificial Sequence
  Oligonucleotide primer for the detection of SNP TSC0040471
atggaaagaaat

SEQ ID NO: 338427 - DNA, 12 bp, Artificial Sequence
  Oligonucleotide primer for the detection of SNP TSC0040472
aattaatttaac

SEQ ID NO: 338428 - DNA, 12 bp, Artificial Sequence
  Oligonucleotide primer for the detection of SNP TSC0040472
tagagtgagtta

SEQ ID NO: 338429 - DNA, 12 bp, Artificial Sequence
  Oligonucleotide primer for the detection of SNP TSC0040477
tggtataaaata

SEQ ID NO: 338430 - DNA, 12 bp, Artificial Sequence
  Oligonucleotide primer for the detection of SNP TSC0040479
cctaccctaccc

SEQ ID NO: 338431 - DNA, 12 bp, Artificial Sequence
  Oligonucleotide primer for the detection of SNP TSC0040479
gttaataatgga

SEQ ID NO: 338432 - DNA, 12 bp, Artificial Sequence
  Oligonucleotide primer for the detection of SNP TSC0040480
tataaactacaa

SEQ ID NO: 338433 - DNA, 12 bp, Artificial Sequence
  Oligonucleotide primer for the detection of SNP TSC0040480
atataaatttaa

SEQ ID NO: 338434 - DNA, 12 bp, Artificial Sequence
  Oligonucleotide primer for the detection of SNP TSC0040480
atacaaacttaa

SEQ ID NO: 338435 - DNA, 12 bp, Artificial Sequence
  Oligonucleotide primer for the detection of SNP TSC0040480
tataggttataa

SEQ ID NO: 338436 - DNA, 12 bp, Artificial Sequence
  Oligonucleotide primer for the detection of SNP TSC0040483
tttgaataagat

SEQ ID NO: 338437 - DNA, 12 bp, Artificial Sequence
  Oligonucleotide primer for the detection of SNP TSC0040483
tttaaacaaaac

SEQ ID NO: 338438 - DNA, 12 bp, Artificial Sequence
  Oligonucleotide primer for the detection of SNP TSC0040483
atttatatttag

SEQ ID NO: 338439 - DNA, 12 bp, Artificial Sequence
  Oligonucleotide primer for the detection of SNP TSC0040486
ttcaaccccaaa

SEQ ID NO: 338440 - DNA, 12 bp, Artificial Sequence
  Oligonucleotide primer for the detection of SNP TSC0040486
ggattgggtttg

SEQ ID NO: 338441 - DNA, 12 bp, Artificial Sequence
  Oligonucleotide primer for the detection of SNP TSC0040486
ggattgggttcg

SEQ ID NO: 338442 - DNA, 12 bp, Artificial Sequence
  Oligonucleotide primer for the detection of SNP TSC0040486
aaactaaaccca

SEQ ID NO: 338443 - DNA, 12 bp, Artificial Sequence
  Oligonucleotide primer for the detection of SNP TSC0040486
aaactaaacccg

SEQ ID NO: 338444 - DNA, 12 bp, Artificial Sequence
  Oligonucleotide primer for the detection of SNP TSC0040487
tgtaatggtgta

SEQ ID NO: 338445 - DNA, 12 bp, Artificial Sequence
  Oligonucleotide primer for the detection of SNP TSC0040487
tgtaatggcgta

SEQ ID NO: 338446 - DNA, 12 bp, Artificial Sequence
  Oligonucleotide primer for the detection of SNP TSC0040488
caaacttaataa

SEQ ID NO: 338447 - DNA, 12 bp, Artificial Sequence
  Oligonucleotide primer for the detection of SNP TSC0040488
gattataagtat

SEQ ID NO: 338448 - DNA, 12 bp, Artificial Sequence
  Oligonucleotide primer for the detection of SNP TSC0040488
taggtttggtgg

SEQ ID NO: 338449 - DNA, 12 bp, Artificial Sequence
  Oligonucleotide primer for the detection of SNP TSC0040490
ttctactataaa

SEQ ID NO: 338450 - DNA, 12 bp, Artificial Sequence
  Oligonucleotide primer for the detection of SNP TSC0040490
atattaatatgt

SEQ ID NO: 338451 - DNA, 12 bp, Artificial Sequence
  Oligonucleotide primer for the detection of SNP TSC0040490
atactaacatac

SEQ ID NO: 338452 - DNA, 12 bp, Artificial Sequence
  Oligonucleotide primer for the detection of SNP TSC0040490
ttttgttatgga

SEQ ID NO: 338453 - DNA, 12 bp, Artificial Sequence
  Oligonucleotide primer for the detection of SNP TSC0040492
taccaaaaaatc

SEQ ID NO: 338454 - DNA, 12 bp, Artificial Sequence
  Oligonucleotide primer for the detection of SNP TSC0040492
attttaggaaat

SEQ ID NO: 338455 - DNA, 12 bp, Artificial Sequence
  Oligonucleotide primer for the detection of SNP TSC0040492
actctaaaaaat

SEQ ID NO: 338456 - DNA, 12 bp, Artificial Sequence
  Oligonucleotide primer for the detection of SNP TSC0040492
tattaaaaaatt

SEQ ID NO: 338457 - DNA, 12 bp, Artificial Sequence
  Oligonucleotide primer for the detection of SNP TSC0040493
tttgtgagtaga

SEQ ID NO: 338458 - DNA, 12 bp, Artificial Sequence
  Oligonucleotide primer for the detection of SNP TSC0040494
attctctcacat

SEQ ID NO: 338459 - DNA, 12 bp, Artificial Sequence
  Oligonucleotide primer for the detection of SNP TSC0040495
ttctatatattc

SEQ ID NO: 338460 - DNA, 12 bp, Artificial Sequence
  Oligonucleotide primer for the detection of SNP TSC0040496
ttatttttaaat

SEQ ID NO: 338461 - DNA, 12 bp, Artificial Sequence
  Oligonucleotide primer for the detection of SNP TSC0040496
ggttggtagtag

SEQ ID NO: 338462 - DNA, 12 bp, Artificial Sequence
  Oligonucleotide primer for the detection of SNP TSC0040496
aactaataataa

SEQ ID NO: 338463 - DNA, 12 bp, Artificial Sequence
  Oligonucleotide primer for the detection of SNP TSC0040496
ttgtttttaagt

SEQ ID NO: 338464 - DNA, 12 bp, Artificial Sequence
  Oligonucleotide primer for the detection of SNP TSC0040497
cccttaaataat

SEQ ID NO: 338465 - DNA, 12 bp, Artificial Sequence
  Oligonucleotide primer for the detection of SNP TSC0040497
atatagttatgt

SEQ ID NO: 338466 - DNA, 12 bp, Artificial Sequence
  Oligonucleotide primer for the detection of SNP TSC0040497
aatataatcata

SEQ ID NO: 338467 - DNA, 12 bp, Artificial Sequence
  Oligonucleotide primer for the detection of SNP TSC0040497
ttttaaatgatt

SEQ ID NO: 338468 - DNA, 12 bp, Artificial Sequence
  Oligonucleotide primer for the detection of SNP TSC0040498
accacaccccac

SEQ ID NO: 338469 - DNA, 12 bp, Artificial Sequence
  Oligonucleotide primer for the detection of SNP TSC0040500
aattaaaaatat

SEQ ID NO: 338470 - DNA, 12 bp, Artificial Sequence
  Oligonucleotide primer for the detection of SNP TSC0040500
tccatttaaaaa

SEQ ID NO: 338471 - DNA, 12 bp, Artificial Sequence
  Oligonucleotide primer for the detection of SNP TSC0040502
attaataaaaat

SEQ ID NO: 338472 - DNA, 12 bp, Artificial Sequence
  Oligonucleotide primer for the detection of SNP TSC0040502
atggagtatggg

SEQ ID NO: 338473 - DNA, 12 bp, Artificial Sequence
  Oligonucleotide primer for the detection of SNP TSC0040503
tattttcaattc

SEQ ID NO: 338474 - DNA, 12 bp, Artificial Sequence
  Oligonucleotide primer for the detection of SNP TSC0040503
taatgaaagaag

SEQ ID NO: 338475 - DNA, 12 bp, Artificial Sequence
  Oligonucleotide primer for the detection of SNP TSC0040505
tgtttgagtttt

SEQ ID NO: 338476 - DNA, 12 bp, Artificial Sequence
  Oligonucleotide primer for the detection of SNP TSC0040505
tatttaaattct

SEQ ID NO: 338477 - DNA, 12 bp, Artificial Sequence
  Oligonucleotide primer for the detection of SNP TSC0040505
agtgtttgttag

SEQ ID NO: 338478 - DNA, 12 bp, Artificial Sequence
  Oligonucleotide primer for the detection of SNP TSC0040506
ctactcacttca

SEQ ID NO: 338479 - DNA, 12 bp, Artificial Sequence
  Oligonucleotide primer for the detection of SNP TSC0040506
atggtatagtgt

SEQ ID NO: 338480 - DNA, 12 bp, Artificial Sequence
  Oligonucleotide primer for the detection of SNP TSC0040506
aataacataata

SEQ ID NO: 338481 - DNA, 12 bp, Artificial Sequence
  Oligonucleotide primer for the detection of SNP TSC0040509
ttttccaatttc

SEQ ID NO: 338482 - DNA, 12 bp, Artificial Sequence
  Oligonucleotide primer for the detection of SNP TSC0040509
gataaaagataa

SEQ ID NO: 338483 - DNA, 12 bp, Artificial Sequence
  Oligonucleotide primer for the detection of SNP TSC0040513
taaaattccaac

SEQ ID NO: 338484 - DNA, 12 bp, Artificial Sequence
  Oligonucleotide primer for the detection of SNP TSC0040513
ttaggtgtaaag

SEQ ID NO: 338485 - DNA, 12 bp, Artificial Sequence
  Oligonucleotide primer for the detection of SNP TSC0040513
tgaaattttagt

SEQ ID NO: 338486 - DNA, 12 bp, Artificial Sequence
  Oligonucleotide primer for the detection of SNP TSC0040514
aatcttaaattc

SEQ ID NO: 338487 - DNA, 12 bp, Artificial Sequence
  Oligonucleotide primer for the detection of SNP TSC0040514
tgtagattagaa

SEQ ID NO: 338488 - DNA, 12 bp, Artificial Sequence
  Oligonucleotide primer for the detection of SNP TSC0040515
taggaaataaag

SEQ ID NO: 338489 - DNA, 12 bp, Artificial Sequence
  Oligonucleotide primer for the detection of SNP TSC0040516
actttctttcta

SEQ ID NO: 338490 - DNA, 12 bp, Artificial Sequence
  Oligonucleotide primer for the detection of SNP TSC0040516
gaaaattttata

SEQ ID NO: 338491 - DNA, 12 bp, Artificial Sequence
  Oligonucleotide primer for the detection of SNP TSC0040517
cataaaaactct

SEQ ID NO: 338492 - DNA, 12 bp, Artificial Sequence
  Oligonucleotide primer for the detection of SNP TSC0040517
taggttatgagg

SEQ ID NO: 338493 - DNA, 12 bp, Artificial Sequence
  Oligonucleotide primer for the detection of SNP TSC0040519
tttcttcaactc

SEQ ID NO: 338494 - DNA, 12 bp, Artificial Sequence
  Oligonucleotide primer for the detection of SNP TSC0040519
gaaattaaagta

SEQ ID NO: 338495 - DNA, 12 bp, Artificial Sequence
  Oligonucleotide primer for the detection of SNP TSC0040520
atcacattaatt

SEQ ID NO: 338496 - DNA, 12 bp, Artificial Sequence
  Oligonucleotide primer for the detection of SNP TSC0040521
tctaaataaaaa

SEQ ID NO: 338497 - DNA, 12 bp, Artificial Sequence
  Oligonucleotide primer for the detection of SNP TSC0040521
aattggttttat

SEQ ID NO: 338498 - DNA, 12 bp, Artificial Sequence
  Oligonucleotide primer for the detection of SNP TSC0040521
aatcggttttat

SEQ ID NO: 338499 - DNA, 12 bp, Artificial Sequence
  Oligonucleotide primer for the detection of SNP TSC0040521
aaccaattctac

SEQ ID NO: 338500 - DNA, 12 bp, Artificial Sequence
  Oligonucleotide primer for the detection of SNP TSC0040521
aaccgattctac

SEQ ID NO: 338501 - DNA, 12 bp, Artificial Sequence
  Oligonucleotide primer for the detection of SNP TSC0040521
tttgagtgagag

SEQ ID NO: 338502 - DNA, 12 bp, Artificial Sequence
  Oligonucleotide primer for the detection of SNP TSC0040522
attattactcat

SEQ ID NO: 338503 - DNA, 12 bp, Artificial Sequence
  Oligonucleotide primer for the detection of SNP TSC0040522
tttgtgagattg

SEQ ID NO: 338504 - DNA, 12 bp, Artificial Sequence
  Oligonucleotide primer for the detection of SNP TSC0040522
ttcgtgagattg

SEQ ID NO: 338505 - DNA, 12 bp, Artificial Sequence
  Oligonucleotide primer for the detection of SNP TSC0040523
taactataatac

SEQ ID NO: 338506 - DNA, 12 bp, Artificial Sequence
  Oligonucleotide primer for the detection of SNP TSC0040523
ttattatgtgtg

SEQ ID NO: 338507 - DNA, 12 bp, Artificial Sequence
  Oligonucleotide primer for the detection of SNP TSC0040524
ctaaatatacct

SEQ ID NO: 338508 - DNA, 12 bp, Artificial Sequence
  Oligonucleotide primer for the detection of SNP TSC0040524
attttatgtatg

SEQ ID NO: 338509 - DNA, 12 bp, Artificial Sequence
  Oligonucleotide primer for the detection of SNP TSC0040525
atattttatata

SEQ ID NO: 338510 - DNA, 12 bp, Artificial Sequence
  Oligonucleotide primer for the detection of SNP TSC0040525
attgttttaggt

SEQ ID NO: 338511 - DNA, 12 bp, Artificial Sequence
  Oligonucleotide primer for the detection of SNP TSC0040525
attatctcaaac

SEQ ID NO: 338512 - DNA, 12 bp, Artificial Sequence
  Oligonucleotide primer for the detection of SNP TSC0040525
gtattttatatg

SEQ ID NO: 338513 - DNA, 12 bp, Artificial Sequence
  Oligonucleotide primer for the detection of SNP TSC0040527
aacatctataaa

SEQ ID NO: 338514 - DNA, 12 bp, Artificial Sequence
  Oligonucleotide primer for the detection of SNP TSC0040527
aacctcctatac

SEQ ID NO: 338515 - DNA, 12 bp, Artificial Sequence
  Oligonucleotide primer for the detection of SNP TSC0040527
agtatttgtgag

SEQ ID NO: 338516 - DNA, 12 bp, Artificial Sequence
  Oligonucleotide primer for the detection of SNP TSC0040528
taataagtatag

SEQ ID NO: 338517 - DNA, 12 bp, Artificial Sequence
  Oligonucleotide primer for the detection of SNP TSC0040530
cactattataaa

SEQ ID NO: 338518 - DNA, 12 bp, Artificial Sequence
  Oligonucleotide primer for the detection of SNP TSC0040530
acttatcactta

SEQ ID NO: 338519 - DNA, 12 bp, Artificial Sequence
  Oligonucleotide primer for the detection of SNP TSC0040530
attattataaat

SEQ ID NO: 338520 - DNA, 12 bp, Artificial Sequence
  Oligonucleotide primer for the detection of SNP TSC0040530
attattataaac

SEQ ID NO: 338521 - DNA, 12 bp, Artificial Sequence
  Oligonukleotid-Primer
tctaatttcccc

SEQ ID NO: 338522 - DNA, 12 bp, Artificial Sequence
  Oligonucleotide primer for the detection of SNP TSC0040531
agaagaaattag

SEQ ID NO: 338523 - DNA, 12 bp, Artificial Sequence
  Oligonucleotide primer for the detection of SNP TSC0040532
tgttattattgt

SEQ ID NO: 338524 - DNA, 12 bp, Artificial Sequence
  Oligonucleotide primer for the detection of SNP TSC0040532
taccattactac

SEQ ID NO: 338525 - DNA, 12 bp, Artificial Sequence
  Oligonucleotide primer for the detection of SNP TSC0040532
ggaggatgggtt

SEQ ID NO: 338526 - DNA, 12 bp, Artificial Sequence
  Oligonucleotide primer for the detection of SNP TSC0005250
ttgttagtatat

SEQ ID NO: 338527 - DNA, 12 bp, Artificial Sequence
  Oligonucleotide primer for the detection of SNP TSC0005250
ttgttagtatac

SEQ ID NO: 338528 - DNA, 12 bp, Artificial Sequence
  Oligonucleotide primer for the detection of SNP TSC0005250
ttatcaacatac

SEQ ID NO: 338529 - DNA, 12 bp, Artificial Sequence
  Oligonucleotide primer for the detection of SNP TSC0005250
attttgagggtt

SEQ ID NO: 338530 - DNA, 12 bp, Artificial Sequence
  Oligonucleotide primer for the detection of SNP TSC0005251
caccaacttcaa

SEQ ID NO: 338531 - DNA, 12 bp, Artificial Sequence
  Oligonucleotide primer for the detection of SNP TSC0005251
ttcactcaactt

SEQ ID NO: 338532 - DNA, 12 bp, Artificial Sequence
  Oligonucleotide primer for the detection of SNP TSC0040537
tcttttctaaaa

SEQ ID NO: 338533 - DNA, 12 bp, Artificial Sequence
  Oligonucleotide primer for the detection of SNP TSC0040537
tatttttaaaga

SEQ ID NO: 338534 - DNA, 12 bp, Artificial Sequence
  Oligonucleotide primer for the detection of SNP TSC0040538
cctttctaacta

SEQ ID NO: 338535 - DNA, 12 bp, Artificial Sequence
  Oligonucleotide primer for the detection of SNP TSC0040538
agatggttgatt

SEQ ID NO: 338536 - DNA, 12 bp, Artificial Sequence
  Oligonucleotide primer for the detection of SNP TSC0040538
aaataactaact

SEQ ID NO: 338537 - DNA, 12 bp, Artificial Sequence
  Oligonucleotide primer for the detection of SNP TSC0040538
tttttttggttg

SEQ ID NO: 338538 - DNA, 12 bp, Artificial Sequence
  Oligonucleotide primer for the detection of SNP TSC0040539
ataaccaatatt

SEQ ID NO: 338539 - DNA, 12 bp, Artificial Sequence
  Oligonucleotide primer for the detection of SNP TSC0040539
ataaccgatatt

SEQ ID NO: 338540 - DNA, 12 bp, Artificial Sequence
  Oligonucleotide primer for the detection of SNP TSC0040539
aagatgattata

SEQ ID NO: 338541 - DNA, 12 bp, Artificial Sequence
  Oligonucleotide primer for the detection of SNP TSC0040540
ttttagtgatta

SEQ ID NO: 338542 - DNA, 12 bp, Artificial Sequence
  Oligonucleotide primer for the detection of SNP TSC0006086
aactacaatatc

SEQ ID NO: 338543 - DNA, 12 bp, Artificial Sequence
  Oligonucleotide primer for the detection of SNP TSC0006086
aactacgatatc

SEQ ID NO: 338544 - DNA, 12 bp, Artificial Sequence
  Oligonucleotide primer for the detection of SNP TSC0040544
cacaatatatac

SEQ ID NO: 338545 - DNA, 12 bp, Artificial Sequence
  Oligonucleotide primer for the detection of SNP TSC0040544
cgcaatatatac

SEQ ID NO: 338546 - DNA, 12 bp, Artificial Sequence
  Oligonucleotide primer for the detection of SNP TSC0040544
tttgtataaagg

SEQ ID NO: 338547 - DNA, 12 bp, Artificial Sequence
  Oligonucleotide primer for the detection of SNP TSC0040544
tgtaatgtatgt

SEQ ID NO: 338548 - DNA, 12 bp, Artificial Sequence
  Oligonucleotide primer for the detection of SNP TSC0040544
cgtaatgtatgt

SEQ ID NO: 338549 - DNA, 12 bp, Artificial Sequence
  Oligonucleotide primer for the detection of SNP TSC0040545
agatgttagatt

SEQ ID NO: 338550 - DNA, 12 bp, Artificial Sequence
  Oligonucleotide primer for the detection of SNP TSC0040545
aaatatcaaatt

SEQ ID NO: 338551 - DNA, 12 bp, Artificial Sequence
  Oligonucleotide primer for the detection of SNP TSC0040545
tgtaaaaaagga

SEQ ID NO: 338552 - DNA, 12 bp, Artificial Sequence
  Oligonucleotide primer for the detection of SNP TSC0009052
gggttgtaggta

SEQ ID NO: 338553 - DNA, 12 bp, Artificial Sequence
  Oligonucleotide primer for the detection of SNP TSC0040546
ttttgtagatgg

SEQ ID NO: 338554 - DNA, 12 bp, Artificial Sequence
  Oligonucleotide primer for the detection of SNP TSC0040546
tttcgtagatgg

SEQ ID NO: 338555 - DNA, 12 bp, Artificial Sequence
  Oligonucleotide primer for the detection of SNP TSC0040547
tctcctcctctt

SEQ ID NO: 338556 - DNA, 12 bp, Artificial Sequence
  Oligonucleotide primer for the detection of SNP TSC0040547
tggttgttaaaa

SEQ ID NO: 338557 - DNA, 12 bp, Artificial Sequence
  Oligonucleotide primer for the detection of SNP TSC0040548
ccttttaaattt

SEQ ID NO: 338558 - DNA, 12 bp, Artificial Sequence
  Oligonucleotide primer for the detection of SNP TSC0040548
atagggatagta

SEQ ID NO: 338559 - DNA, 12 bp, Artificial Sequence
  Oligonucleotide primer for the detection of SNP TSC0040548
acaaaaacaata

SEQ ID NO: 338560 - DNA, 12 bp, Artificial Sequence
  Oligonucleotide primer for the detection of SNP TSC0040550
aaaaaaaccaat

SEQ ID NO: 338561 - DNA, 12 bp, Artificial Sequence
  Oligonucleotide primer for the detection of SNP TSC0040550
ggaggttaaaga

SEQ ID NO: 338562 - DNA, 12 bp, Artificial Sequence
  Oligonucleotide primer for the detection of SNP TSC0040550
gaagaggttaat

SEQ ID NO: 338563 - DNA, 12 bp, Artificial Sequence
  Oligonucleotide primer for the detection of SNP TSC0040551
atttttcccttt

SEQ ID NO: 338564 - DNA, 12 bp, Artificial Sequence
  Oligonucleotide primer for the detection of SNP TSC0040551
ttaaatagtgaa

SEQ ID NO: 338565 - DNA, 12 bp, Artificial Sequence
  Oligonucleotide primer for the detection of SNP TSC0040551
ctaaacaataaa

SEQ ID NO: 338566 - DNA, 12 bp, Artificial Sequence
  Oligonucleotide primer for the detection of SNP TSC0040552
agaaaaatagat

SEQ ID NO: 338567 - DNA, 12 bp, Artificial Sequence
  Oligonucleotide primer for the detection of SNP TSC0040552
aagatattagat

SEQ ID NO: 338568 - DNA, 12 bp, Artificial Sequence
  Oligonucleotide primer for the detection of SNP TSC0040553
acctatttcaat

SEQ ID NO: 338569 - DNA, 12 bp, Artificial Sequence
  Oligonucleotide primer for the detection of SNP TSC0040553
ttattttatata

SEQ ID NO: 338570 - DNA, 12 bp, Artificial Sequence
  Oligonucleotide primer for the detection of SNP TSC0040554
ttcttaccaaaa

SEQ ID NO: 338571 - DNA, 12 bp, Artificial Sequence
  Oligonucleotide primer for the detection of SNP TSC0040554
ctctacacattc

SEQ ID NO: 338572 - DNA, 12 bp, Artificial Sequence
  Oligonucleotide primer for the detection of SNP TSC0040556
aatatttaaaat

SEQ ID NO: 338573 - DNA, 12 bp, Artificial Sequence
  Oligonucleotide primer for the detection of SNP TSC0040556
tgtgggtttttg

SEQ ID NO: 338574 - DNA, 12 bp, Artificial Sequence
  Oligonucleotide primer for the detection of SNP TSC0040557
agaatgataaaa

SEQ ID NO: 338575 - DNA, 12 bp, Artificial Sequence
  Oligonucleotide primer for the detection of SNP TSC0040557
tataataagtat

SEQ ID NO: 338576 - DNA, 12 bp, Artificial Sequence
  Oligonucleotide primer for the detection of SNP TSC0040558
aagttggttatg

SEQ ID NO: 338577 - DNA, 12 bp, Artificial Sequence
  Oligonucleotide primer for the detection of SNP TSC0040559
ttactatcattc

SEQ ID NO: 338578 - DNA, 12 bp, Artificial Sequence
  Oligonucleotide primer for the detection of SNP TSC0040559
ttaatagtgttg

SEQ ID NO: 338579 - DNA, 12 bp, Artificial Sequence
  Oligonucleotide primer for the detection of SNP TSC0040560
taataataaaac

SEQ ID NO: 338580 - DNA, 12 bp, Artificial Sequence
  Oligonucleotide primer for the detection of SNP TSC0040560
gaatatgtaaat

SEQ ID NO: 338581 - DNA, 12 bp, Artificial Sequence
  Oligonucleotide primer for the detection of SNP TSC0040560
aatatacaaata

SEQ ID NO: 338582 - DNA, 12 bp, Artificial Sequence
  Oligonucleotide primer for the detection of SNP TSC0040560
taatagtaaaat

SEQ ID NO: 338583 - DNA, 12 bp, Artificial Sequence
  Oligonucleotide primer for the detection of SNP TSC0040561
tttaataacatt

SEQ ID NO: 338584 - DNA, 12 bp, Artificial Sequence
  Oligonucleotide primer for the detection of SNP TSC0040564
tctatcctccta

SEQ ID NO: 338585 - DNA, 12 bp, Artificial Sequence
  Oligonucleotide primer for the detection of SNP TSC0040564
ggtagggagggt

SEQ ID NO: 338586 - DNA, 12 bp, Artificial Sequence
  Oligonucleotide primer for the detection of SNP TSC0040564
tttgtttttttg

SEQ ID NO: 338587 - DNA, 12 bp, Artificial Sequence
  Oligonucleotide primer for the detection of SNP TSC0040565
aaaaaatcaaac

SEQ ID NO: 338588 - DNA, 12 bp, Artificial Sequence
  Oligonucleotide primer for the detection of SNP TSC0040565
tatcatttttta

SEQ ID NO: 338589 - DNA, 12 bp, Artificial Sequence
  Oligonucleotide primer for the detection of SNP TSC0040565
gaagaattaaat

SEQ ID NO: 338590 - DNA, 12 bp, Artificial Sequence
  Oligonucleotide primer for the detection of SNP TSC0040566
aacatttcctca

SEQ ID NO: 338591 - DNA, 12 bp, Artificial Sequence
  Oligonucleotide primer for the detection of SNP TSC0040566
tttgtaggattt

SEQ ID NO: 338592 - DNA, 12 bp, Artificial Sequence
  Oligonucleotide primer for the detection of SNP TSC0040567
aacaactcttac

SEQ ID NO: 338593 - DNA, 12 bp, Artificial Sequence
  Oligonucleotide primer for the detection of SNP TSC0040567
tatcttccaaca

SEQ ID NO: 338594 - DNA, 12 bp, Artificial Sequence
  Oligonucleotide primer for the detection of SNP TSC0040568
acatttccaaat

SEQ ID NO: 338595 - DNA, 12 bp, Artificial Sequence
  Oligonucleotide primer for the detection of SNP TSC0040569
aatctaaatcca

SEQ ID NO: 338596 - DNA, 12 bp, Artificial Sequence
  Oligonucleotide primer for the detection of SNP TSC0040569
aagttttagaat

SEQ ID NO: 338597 - DNA, 12 bp, Artificial Sequence
  Oligonucleotide primer for the detection of SNP TSC0040569
aaatttgaattt

SEQ ID NO: 338598 - DNA, 12 bp, Artificial Sequence
  Oligonucleotide primer for the detection of SNP TSC0040572
cccatcaactct

SEQ ID NO: 338599 - DNA, 12 bp, Artificial Sequence
  Oligonucleotide primer for the detection of SNP TSC0040572
ttattaaaggag

SEQ ID NO: 338600 - DNA, 12 bp, Artificial Sequence
  Oligonucleotide primer for the detection of SNP TSC0040573
actaactccttc

SEQ ID NO: 338601 - DNA, 12 bp, Artificial Sequence
  Oligonucleotide primer for the detection of SNP TSC0040573
gagatgtaaatg

SEQ ID NO: 338602 - DNA, 12 bp, Artificial Sequence
  Oligonucleotide primer for the detection of SNP TSC0040573
aaaatacaaata

SEQ ID NO: 338603 - DNA, 12 bp, Artificial Sequence
  Oligonucleotide primer for the detection of SNP TSC0040573
gaaatacaaata

SEQ ID NO: 338604 - DNA, 12 bp, Artificial Sequence
  Oligonucleotide primer for the detection of SNP TSC0040574
caactaaattca

SEQ ID NO: 338605 - DNA, 12 bp, Artificial Sequence
  Oligonucleotide primer for the detection of SNP TSC0040574
aatctactccca

SEQ ID NO: 338606 - DNA, 12 bp, Artificial Sequence
  Oligonucleotide primer for the detection of SNP TSC0040574
aattgggtttat

SEQ ID NO: 338607 - DNA, 12 bp, Artificial Sequence
  Oligonucleotide primer for the detection of SNP TSC0040575
ctctaattaaat

SEQ ID NO: 338608 - DNA, 12 bp, Artificial Sequence
  Oligonucleotide primer for the detection of SNP TSC0040575
aatagttagaag

SEQ ID NO: 338609 - DNA, 12 bp, Artificial Sequence
  Oligonucleotide primer for the detection of SNP TSC0040576
ttggaatatatt

SEQ ID NO: 338610 - DNA, 12 bp, Artificial Sequence
  Oligonucleotide primer for the detection of SNP TSC0040576
tcggaatatatt

SEQ ID NO: 338611 - DNA, 12 bp, Artificial Sequence
  Oligonucleotide primer for the detection of SNP TSC0040576
accaaaatacat

SEQ ID NO: 338612 - DNA, 12 bp, Artificial Sequence
  Oligonucleotide primer for the detection of SNP TSC0040576
accgaaatacat

SEQ ID NO: 338613 - DNA, 12 bp, Artificial Sequence
  Oligonucleotide primer for the detection of SNP TSC0040576
aagaagatgaat

SEQ ID NO: 338614 - DNA, 12 bp, Artificial Sequence
  Oligonucleotide primer for the detection of SNP TSC0040577
ataaatatcaaa

SEQ ID NO: 338615 - DNA, 12 bp, Artificial Sequence
  Oligonucleotide primer for the detection of SNP TSC0040577
cttctactccta

SEQ ID NO: 338616 - DNA, 12 bp, Artificial Sequence
  Oligonucleotide primer for the detection of SNP TSC0040577
ggtgaatgttaa

SEQ ID NO: 338617 - DNA, 12 bp, Artificial Sequence
  Oligonucleotide primer for the detection of SNP TSC0040579
cttcctataaat

SEQ ID NO: 338618 - DNA, 12 bp, Artificial Sequence
  Oligonucleotide primer for the detection of SNP TSC0040579
tggtttttgtaa

SEQ ID NO: 338619 - DNA, 12 bp, Artificial Sequence
  Oligonucleotide primer for the detection of SNP TSC0040579
cttctataaaaa

SEQ ID NO: 338620 - DNA, 12 bp, Artificial Sequence
  Oligonucleotide primer for the detection of SNP TSC0040579
ttttttgtgaat

SEQ ID NO: 338621 - DNA, 12 bp, Artificial Sequence
  Oligonucleotide primer for the detection of SNP TSC0040580
atgtattttatt

SEQ ID NO: 338622 - DNA, 12 bp, Artificial Sequence
  Oligonucleotide primer for the detection of SNP TSC0040580
catacattttac

SEQ ID NO: 338623 - DNA, 12 bp, Artificial Sequence
  Oligonucleotide primer for the detection of SNP TSC0040580
gaatagataaat

SEQ ID NO: 338624 - DNA, 12 bp, Artificial Sequence
  Oligonucleotide primer for the detection of SNP TSC0040581
taatatgtagaa

SEQ ID NO: 338625 - DNA, 12 bp, Artificial Sequence
  Oligonucleotide primer for the detection of SNP TSC0040584
gtttttgtgtat

SEQ ID NO: 338626 - DNA, 12 bp, Artificial Sequence
  Oligonucleotide primer for the detection of SNP TSC0040587
aacttcaacctc

SEQ ID NO: 338627 - DNA, 12 bp, Artificial Sequence
  Oligonucleotide primer for the detection of SNP TSC0040587
taaataaggaat

SEQ ID NO: 338628 - DNA, 12 bp, Artificial Sequence
  Oligonucleotide primer for the detection of SNP TSC0040587
gattttaatttt

SEQ ID NO: 338629 - DNA, 12 bp, Artificial Sequence
  Oligonucleotide primer for the detection of SNP TSC0040588
ccttacctctac

SEQ ID NO: 338630 - DNA, 12 bp, Artificial Sequence
  Oligonucleotide primer for the detection of SNP TSC0040589
aaatacttttct

SEQ ID NO: 338631 - DNA, 12 bp, Artificial Sequence
  Oligonucleotide primer for the detection of SNP TSC0040589
gaagtgattttt

SEQ ID NO: 338632 - DNA, 12 bp, Artificial Sequence
  Oligonucleotide primer for the detection of SNP TSC0040592
taggttgttgat

SEQ ID NO: 338633 - DNA, 12 bp, Artificial Sequence
  Oligonucleotide primer for the detection of SNP TSC0040592
taaattactaac

SEQ ID NO: 338634 - DNA, 12 bp, Artificial Sequence
  Oligonucleotide primer for the detection of SNP TSC0040592
aatggataggtg

SEQ ID NO: 338635 - DNA, 12 bp, Artificial Sequence
  Oligonucleotide primer for the detection of SNP TSC0040593
actactaaaatt

SEQ ID NO: 338636 - DNA, 12 bp, Artificial Sequence
  Oligonucleotide primer for the detection of SNP TSC0040593
ttaaaagagata

SEQ ID NO: 338637 - DNA, 12 bp, Artificial Sequence
  Oligonucleotide primer for the detection of SNP TSC0040593
attattaaaatt

SEQ ID NO: 338638 - DNA, 12 bp, Artificial Sequence
  Oligonucleotide primer for the detection of SNP TSC0040594
cttaattaccat

SEQ ID NO: 338639 - DNA, 12 bp, Artificial Sequence
  Oligonucleotide primer for the detection of SNP TSC0040595
ctaactaaaatc

SEQ ID NO: 338640 - DNA, 12 bp, Artificial Sequence
  Oligonucleotide primer for the detection of SNP TSC0040603
atatcacaaccc

SEQ ID NO: 338641 - DNA, 12 bp, Artificial Sequence
  Oligonucleotide primer for the detection of SNP TSC0040603
atatagttataa

SEQ ID NO: 338642 - DNA, 12 bp, Artificial Sequence
  Oligonucleotide primer for the detection of SNP TSC0040606
tgggtagagaat

SEQ ID NO: 338643 - DNA, 12 bp, Artificial Sequence
  Oligonucleotide primer for the detection of SNP TSC0040606
ggtttagagaag

SEQ ID NO: 338644 - DNA, 12 bp, Artificial Sequence
  Oligonucleotide primer for the detection of SNP TSC0040607
taacattcctac

SEQ ID NO: 338645 - DNA, 12 bp, Artificial Sequence
  Oligonucleotide primer for the detection of SNP TSC0040607
ggttattgttgg

SEQ ID NO: 338646 - DNA, 12 bp, Artificial Sequence
  Oligonucleotide primer for the detection of SNP TSC0040608
tctctaatttct

SEQ ID NO: 338647 - DNA, 12 bp, Artificial Sequence
  Oligonucleotide primer for the detection of SNP TSC0040608
aaacactactca

SEQ ID NO: 338648 - DNA, 12 bp, Artificial Sequence
  Oligonucleotide primer for the detection of SNP TSC0040609
gctaaatataat

SEQ ID NO: 338649 - DNA, 12 bp, Artificial Sequence
  Oligonucleotide primer for the detection of SNP TSC0040609
tttataggtatg

SEQ ID NO: 338650 - DNA, 12 bp, Artificial Sequence
  Oligonucleotide primer for the detection of SNP TSC0040609
tctataaacata

SEQ ID NO: 338651 - DNA, 12 bp, Artificial Sequence
  Oligonucleotide primer for the detection of SNP TSC0040609
gttggatgtggt

SEQ ID NO: 338652 - DNA, 12 bp, Artificial Sequence
  Oligonucleotide primer for the detection of SNP TSC0040610
tatttattacat

SEQ ID NO: 338653 - DNA, 12 bp, Artificial Sequence
  Oligonucleotide primer for the detection of SNP TSC0040610
atatatgtaata

SEQ ID NO: 338654 - DNA, 12 bp, Artificial Sequence
  Oligonucleotide primer for the detection of SNP TSC0040611
ttcttaataacc

SEQ ID NO: 338655 - DNA, 12 bp, Artificial Sequence
  Oligonucleotide primer for the detection of SNP TSC0040611
tttttgataatt

SEQ ID NO: 338656 - DNA, 12 bp, Artificial Sequence
  Oligonucleotide primer for the detection of SNP TSC0040612
taaaaaatcact

SEQ ID NO: 338657 - DNA, 12 bp, Artificial Sequence
  Oligonucleotide primer for the detection of SNP TSC0040612
tgttgtgtttta

SEQ ID NO: 338658 - DNA, 12 bp, Artificial Sequence
  Oligonucleotide primer for the detection of SNP TSC0040612
cgttgtgtttta

SEQ ID NO: 338659 - DNA, 12 bp, Artificial Sequence
  Oligonucleotide primer for the detection of SNP TSC0040612
tgtcgtgtttta

SEQ ID NO: 338660 - DNA, 12 bp, Artificial Sequence
  Oligonucleotide primer for the detection of SNP TSC0040612
cgtcgtgtttta

SEQ ID NO: 338661 - DNA, 12 bp, Artificial Sequence
  Oligonucleotide primer for the detection of SNP TSC0040616
tagttgttttgg

SEQ ID NO: 338662 - DNA, 12 bp, Artificial Sequence
  Oligonucleotide primer for the detection of SNP TSC0040616
taactaccctaa

SEQ ID NO: 338663 - DNA, 12 bp, Artificial Sequence
  Oligonucleotide primer for the detection of SNP TSC0040616
atgttgttaaat

SEQ ID NO: 338664 - DNA, 12 bp, Artificial Sequence
  Oligonucleotide primer for the detection of SNP TSC0040617
cacatactaaat

SEQ ID NO: 338665 - DNA, 12 bp, Artificial Sequence
  Oligonucleotide primer for the detection of SNP TSC0040617
ttttttgggtta

SEQ ID NO: 338666 - DNA, 12 bp, Artificial Sequence
  Oligonucleotide primer for the detection of SNP TSC0040618
tacctaaatttt

SEQ ID NO: 338667 - DNA, 12 bp, Artificial Sequence
  Oligonucleotide primer for the detection of SNP TSC0040618
aaaagaagtttg

SEQ ID NO: 338668 - DNA, 12 bp, Artificial Sequence
  Oligonucleotide primer for the detection of SNP TSC0040618
aaaaaaaatcta

SEQ ID NO: 338669 - DNA, 12 bp, Artificial Sequence
  Oligonucleotide primer for the detection of SNP TSC0040619
cttttacttttt

SEQ ID NO: 338670 - DNA, 12 bp, Artificial Sequence
  Oligonucleotide primer for the detection of SNP TSC0040619
catttcaaaatt

SEQ ID NO: 338671 - DNA, 12 bp, Artificial Sequence
  Oligonucleotide primer for the detection of SNP TSC0040620
tttatttttgaa

SEQ ID NO: 338672 - DNA, 12 bp, Artificial Sequence
  Oligonucleotide primer for the detection of SNP TSC0040621
ccctataaatac

SEQ ID NO: 338673 - DNA, 12 bp, Artificial Sequence
  Oligonucleotide primer for the detection of SNP TSC0040621
tttggaaaatga

SEQ ID NO: 338674 - DNA, 12 bp, Artificial Sequence
  Oligonucleotide primer for the detection of SNP TSC0040621
ttttgtaaatgt

SEQ ID NO: 338675 - DNA, 12 bp, Artificial Sequence
  Oligonucleotide primer for the detection of SNP TSC0040622
aacgataactaa

SEQ ID NO: 338676 - DNA, 12 bp, Artificial Sequence
  Oligonucleotide primer for the detection of SNP TSC0040622
agttgtggtttt

SEQ ID NO: 338677 - DNA, 12 bp, Artificial Sequence
  Oligonucleotide primer for the detection of SNP TSC0040622
aattataattct

SEQ ID NO: 338678 - DNA, 12 bp, Artificial Sequence
  Oligonucleotide primer for the detection of SNP TSC0040622
agtggtggttgg

SEQ ID NO: 338679 - DNA, 12 bp, Artificial Sequence
  Oligonucleotide primer for the detection of SNP TSC0040622
agcggtggttgg

SEQ ID NO: 338680 - DNA, 12 bp, Artificial Sequence
  Oligonucleotide primer for the detection of SNP TSC0040623
tacactttaact

SEQ ID NO: 338681 - DNA, 12 bp, Artificial Sequence
  Oligonucleotide primer for the detection of SNP TSC0040623
aatgagatttga

SEQ ID NO: 338682 - DNA, 12 bp, Artificial Sequence
  Oligonucleotide primer for the detection of SNP TSC0040627
aaacacaattaa

SEQ ID NO: 338683 - DNA, 12 bp, Artificial Sequence
  Oligonucleotide primer for the detection of SNP TSC0040627
agaaaatagagg

SEQ ID NO: 338684 - DNA, 12 bp, Artificial Sequence
  Oligonucleotide primer for the detection of SNP TSC0040629
aaactccaacat

SEQ ID NO: 338685 - DNA, 12 bp, Artificial Sequence
  Oligonucleotide primer for the detection of SNP TSC0040629
aaactccgacat

SEQ ID NO: 338686 - DNA, 12 bp, Artificial Sequence
  Oligonucleotide primer for the detection of SNP TSC0040629
accaaatacaat

SEQ ID NO: 338687 - DNA, 12 bp, Artificial Sequence
  Oligonucleotide primer for the detection of SNP TSC0040629
agattttgatat

SEQ ID NO: 338688 - DNA, 12 bp, Artificial Sequence
  Oligonucleotide primer for the detection of SNP TSC0040629
agatttcgatat

SEQ ID NO: 338689 - DNA, 12 bp, Artificial Sequence
  Oligonucleotide primer for the detection of SNP TSC0040630
aaatatatcaaa

SEQ ID NO: 338690 - DNA, 12 bp, Artificial Sequence
  Oligonukleotid-Primer
tagtaaattgta

SEQ ID NO: 338691 - DNA, 12 bp, Artificial Sequence
  Oligonucleotide primer for the detection of SNP TSC0040630
caataaattata

SEQ ID NO: 338692 - DNA, 12 bp, Artificial Sequence
  Oligonucleotide primer for the detection of SNP TSC0040630
aaatatgttagg

SEQ ID NO: 338693 - DNA, 12 bp, Artificial Sequence
  Oligonucleotide primer for the detection of SNP TSC0040631
ccacacataatt

SEQ ID NO: 338694 - DNA, 12 bp, Artificial Sequence
  Oligonucleotide primer for the detection of SNP TSC0040631
taaaatggtgaa

SEQ ID NO: 338695 - DNA, 12 bp, Artificial Sequence
  Oligonucleotide primer for the detection of SNP TSC0040632
atcactcaccaa

SEQ ID NO: 338696 - DNA, 12 bp, Artificial Sequence
  Oligonucleotide primer for the detection of SNP TSC0040632
gttaagttggtt

SEQ ID NO: 338697 - DNA, 12 bp, Artificial Sequence
  Oligonucleotide primer for the detection of SNP TSC0040632
taaactaactaa

SEQ ID NO: 338698 - DNA, 12 bp, Artificial Sequence
  Oligonucleotide primer for the detection of SNP TSC0040632
tgttatttatta

SEQ ID NO: 338699 - DNA, 12 bp, Artificial Sequence
  Oligonucleotide primer for the detection of SNP TSC0040633
tcacaactcact

SEQ ID NO: 338700 - DNA, 12 bp, Artificial Sequence
  Oligonucleotide primer for the detection of SNP TSC0040633
tcacgactcact

SEQ ID NO: 338701 - DNA, 12 bp, Artificial Sequence
  Oligonucleotide primer for the detection of SNP TSC0040633
tagaggttaagg

SEQ ID NO: 338702 - DNA, 12 bp, Artificial Sequence
  Oligonucleotide primer for the detection of SNP TSC0040634
taaccaacatta

SEQ ID NO: 338703 - DNA, 12 bp, Artificial Sequence
  Oligonucleotide primer for the detection of SNP TSC0040634
gtaaaaacaaaa

SEQ ID NO: 338704 - DNA, 12 bp, Artificial Sequence
  Oligonucleotide primer for the detection of SNP TSC0040634
tggttagtattg

SEQ ID NO: 338705 - DNA, 12 bp, Artificial Sequence
  Oligonucleotide primer for the detection of SNP TSC0040636
actacaaaaatt

SEQ ID NO: 338706 - DNA, 12 bp, Artificial Sequence
  Oligonucleotide primer for the detection of SNP TSC0040636
tcctttattaac

SEQ ID NO: 338707 - DNA, 12 bp, Artificial Sequence
  Oligonucleotide primer for the detection of SNP TSC0040636
gttataaagatt

SEQ ID NO: 338708 - DNA, 12 bp, Artificial Sequence
  Oligonucleotide primer for the detection of SNP TSC0040637
ctaatatttaac

SEQ ID NO: 338709 - DNA, 12 bp, Artificial Sequence
  Oligonucleotide primer for the detection of SNP TSC0040637
gaaggtgttgta

SEQ ID NO: 338710 - DNA, 12 bp, Artificial Sequence
  Oligonucleotide primer for the detection of SNP TSC0040638
gataaatgttag

SEQ ID NO: 338711 - DNA, 12 bp, Artificial Sequence
  Oligonucleotide primer for the detection of SNP TSC0040639
aattcccacaaa

SEQ ID NO: 338712 - DNA, 12 bp, Artificial Sequence
  Oligonucleotide primer for the detection of SNP TSC0040639
agattaaggatt

SEQ ID NO: 338713 - DNA, 12 bp, Artificial Sequence
  Oligonucleotide primer for the detection of SNP TSC0040639
agattaaggatc

SEQ ID NO: 338714 - DNA, 12 bp, Artificial Sequence
  Oligonucleotide primer for the detection of SNP TSC0040641
tcacaaaaataa

SEQ ID NO: 338715 - DNA, 12 bp, Artificial Sequence
  Oligonucleotide primer for the detection of SNP TSC0040641
tcacgaaaataa

SEQ ID NO: 338716 - DNA, 12 bp, Artificial Sequence
  Oligonucleotide primer for the detection of SNP TSC0040641
gtatgggaaaga

SEQ ID NO: 338717 - DNA, 12 bp, Artificial Sequence
  Oligonucleotide primer for the detection of SNP TSC0040641
ttatgggggtgg

SEQ ID NO: 338718 - DNA, 12 bp, Artificial Sequence
  Oligonucleotide primer for the detection of SNP TSC0040641
ttacgggggtgg

SEQ ID NO: 338719 - DNA, 12 bp, Artificial Sequence
  Oligonucleotide primer for the detection of SNP TSC0040642
aatcccaaatta

SEQ ID NO: 338720 - DNA, 12 bp, Artificial Sequence
  Oligonucleotide primer for the detection of SNP TSC0040642
aatcccgaatta

SEQ ID NO: 338721 - DNA, 12 bp, Artificial Sequence
  Oligonucleotide primer for the detection of SNP TSC0040642
ggggtgggtgat

SEQ ID NO: 338722 - DNA, 12 bp, Artificial Sequence
  Oligonucleotide primer for the detection of SNP TSC0040642
ggggtgggcgat

SEQ ID NO: 338723 - DNA, 12 bp, Artificial Sequence
  Oligonucleotide primer for the detection of SNP TSC0040642
aaaataaacgat

SEQ ID NO: 338724 - DNA, 12 bp, Artificial Sequence
  Oligonucleotide primer for the detection of SNP TSC0040642
tagttttgggtt

SEQ ID NO: 338725 - DNA, 12 bp, Artificial Sequence
  Oligonucleotide primer for the detection of SNP TSC0040642
tagtttcgggtt

SEQ ID NO: 338726 - DNA, 12 bp, Artificial Sequence
  Oligonucleotide primer for the detection of SNP TSC0040643
aacaatcccaaa

SEQ ID NO: 338727 - DNA, 12 bp, Artificial Sequence
  Oligonucleotide primer for the detection of SNP TSC0040643
aacaatcccgaa

SEQ ID NO: 338728 - DNA, 12 bp, Artificial Sequence
  Oligonucleotide primer for the detection of SNP TSC0040643
gggtgggtgatt

SEQ ID NO: 338729 - DNA, 12 bp, Artificial Sequence
  Oligonucleotide primer for the detection of SNP TSC0040643
gggtgggcgatt

SEQ ID NO: 338730 - DNA, 12 bp, Artificial Sequence
  Oligonucleotide primer for the detection of SNP TSC0040645
agattttataaa

SEQ ID NO: 338731 - DNA, 12 bp, Artificial Sequence
  Oligonucleotide primer for the detection of SNP TSC0040645
ttattataggaa

SEQ ID NO: 338732 - DNA, 12 bp, Artificial Sequence
  Oligonucleotide primer for the detection of SNP TSC0040646
tcctctaaacct

SEQ ID NO: 338733 - DNA, 12 bp, Artificial Sequence
  Oligonucleotide primer for the detection of SNP TSC0040646
attatagagatg

SEQ ID NO: 338734 - DNA, 12 bp, Artificial Sequence
  Oligonucleotide primer for the detection of SNP TSC0008157
ataacaaccaat

SEQ ID NO: 338735 - DNA, 12 bp, Artificial Sequence
  Oligonucleotide primer for the detection of SNP TSC0008157
ataatacaaata

SEQ ID NO: 338736 - DNA, 12 bp, Artificial Sequence
  Oligonucleotide primer for the detection of SNP TSC0008157
ataatagttagt

SEQ ID NO: 338737 - DNA, 12 bp, Artificial Sequence
  Oligonucleotide primer for the detection of SNP TSC0040647
acactaacaaaa

SEQ ID NO: 338738 - DNA, 12 bp, Artificial Sequence
  Oligonucleotide primer for the detection of SNP TSC0040647
cttcttccttca

SEQ ID NO: 338739 - DNA, 12 bp, Artificial Sequence
  Oligonucleotide primer for the detection of SNP TSC0040647
atattgatagaa

SEQ ID NO: 338740 - DNA, 12 bp, Artificial Sequence
  Oligonucleotide primer for the detection of SNP TSC0040650
cttcttaactat

SEQ ID NO: 338741 - DNA, 12 bp, Artificial Sequence
  Oligonucleotide primer for the detection of SNP TSC0040650
gaattaagaaaa

SEQ ID NO: 338742 - DNA, 12 bp, Artificial Sequence
  Oligonucleotide primer for the detection of SNP TSC0040650
tttttggttatt

SEQ ID NO: 338743 - DNA, 12 bp, Artificial Sequence
  Oligonucleotide primer for the detection of SNP TSC0040653
tgaagttttata

SEQ ID NO: 338744 - DNA, 12 bp, Artificial Sequence
  Oligonucleotide primer for the detection of SNP TSC0040653
taaaatcccaca

SEQ ID NO: 338745 - DNA, 12 bp, Artificial Sequence
  Oligonucleotide primer for the detection of SNP TSC0040653
tatagatggttt

SEQ ID NO: 338746 - DNA, 12 bp, Artificial Sequence
  Oligonucleotide primer for the detection of SNP TSC0040654
ttttacacatat

SEQ ID NO: 338747 - DNA, 12 bp, Artificial Sequence
  Oligonucleotide primer for the detection of SNP TSC0040654
taaaaatgaatg

SEQ ID NO: 338748 - DNA, 12 bp, Artificial Sequence
  Oligonucleotide primer for the detection of SNP TSC0040655
attgaatattgt

SEQ ID NO: 338749 - DNA, 12 bp, Artificial Sequence
  Oligonucleotide primer for the detection of SNP TSC0040655
actaaacactat

SEQ ID NO: 338750 - DNA, 12 bp, Artificial Sequence
  Oligonucleotide primer for the detection of SNP TSC0040655
atttagaaggaa

SEQ ID NO: 338751 - DNA, 12 bp, Artificial Sequence
  Oligonucleotide primer for the detection of SNP TSC0040656
tttaataacaaa

SEQ ID NO: 338752 - DNA, 12 bp, Artificial Sequence
  Oligonucleotide primer for the detection of SNP TSC0040656
atttaatattgt

SEQ ID NO: 338753 - DNA, 12 bp, Artificial Sequence
  Oligonucleotide primer for the detection of SNP TSC0040656
atttaatactat

SEQ ID NO: 338754 - DNA, 12 bp, Artificial Sequence
  Oligonucleotide primer for the detection of SNP TSC0040656
tttagtggtaga

SEQ ID NO: 338755 - DNA, 12 bp, Artificial Sequence
  Oligonucleotide primer for the detection of SNP TSC0040659
acacaaatcata

SEQ ID NO: 338756 - DNA, 12 bp, Artificial Sequence
  Oligonucleotide primer for the detection of SNP TSC0040659
ttattaaggatt

SEQ ID NO: 338757 - DNA, 12 bp, Artificial Sequence
  Oligonucleotide primer for the detection of SNP TSC0040659
ttattaaggatc

SEQ ID NO: 338758 - DNA, 12 bp, Artificial Sequence
  Oligonucleotide primer for the detection of SNP TSC0040659
aatcatcaaaaa

SEQ ID NO: 338759 - DNA, 12 bp, Artificial Sequence
  Oligonucleotide primer for the detection of SNP TSC0040660
tcatatccaccc

SEQ ID NO: 338760 - DNA, 12 bp, Artificial Sequence
  Oligonucleotide primer for the detection of SNP TSC0040661
ccaatataaaat

SEQ ID NO: 338761 - DNA, 12 bp, Artificial Sequence
  Oligonucleotide primer for the detection of SNP TSC0040662
aaaaattaacat

SEQ ID NO: 338762 - DNA, 12 bp, Artificial Sequence
  Oligonucleotide primer for the detection of SNP TSC0040662
agttatttaatt

SEQ ID NO: 338763 - DNA, 12 bp, Artificial Sequence
  Oligonucleotide primer for the detection of SNP TSC0040663
ccttcaatatac

SEQ ID NO: 338764 - DNA, 12 bp, Artificial Sequence
  Oligonucleotide primer for the detection of SNP TSC0040663
accaatccctca

SEQ ID NO: 338765 - DNA, 12 bp, Artificial Sequence
  Oligonucleotide primer for the detection of SNP TSC0040663
tttttagtatat

SEQ ID NO: 338766 - DNA, 12 bp, Artificial Sequence
  Oligonucleotide primer for the detection of SNP TSC0040664
tccaattctctc

SEQ ID NO: 338767 - DNA, 12 bp, Artificial Sequence
  Oligonucleotide primer for the detection of SNP TSC0040664
tgaagatggagt

SEQ ID NO: 338768 - DNA, 12 bp, Artificial Sequence
  Oligonucleotide primer for the detection of SNP TSC0040668
acactactaact

SEQ ID NO: 338769 - DNA, 12 bp, Artificial Sequence
  Oligonucleotide primer for the detection of SNP TSC0040668
acgctactaact

SEQ ID NO: 338770 - DNA, 12 bp, Artificial Sequence
  Oligonucleotide primer for the detection of SNP TSC0040668
aatttttaaatg

SEQ ID NO: 338771 - DNA, 12 bp, Artificial Sequence
  Oligonucleotide primer for the detection of SNP TSC0040668
aatttttaaata

SEQ ID NO: 338772 - DNA, 12 bp, Artificial Sequence
  Oligonucleotide primer for the detection of SNP TSC0040668
atgttattggtt

SEQ ID NO: 338773 - DNA, 12 bp, Artificial Sequence
  Oligonucleotide primer for the detection of SNP TSC0040668
acgttattggtt

SEQ ID NO: 338774 - DNA, 12 bp, Artificial Sequence
  Oligonucleotide primer for the detection of SNP TSC0040669
aacttcaaataa

SEQ ID NO: 338775 - DNA, 12 bp, Artificial Sequence
  Oligonucleotide primer for the detection of SNP TSC0040669
ggaggttaagat

SEQ ID NO: 338776 - DNA, 12 bp, Artificial Sequence
  Oligonucleotide primer for the detection of SNP TSC0040669
gattttaggtga

SEQ ID NO: 338777 - DNA, 12 bp, Artificial Sequence
  Oligonucleotide primer for the detection of SNP TSC0040670
caacatttcacc

SEQ ID NO: 338778 - DNA, 12 bp, Artificial Sequence
  Oligonucleotide primer for the detection of SNP TSC0040670
caacatttcgcc

SEQ ID NO: 338779 - DNA, 12 bp, Artificial Sequence
  Oligonucleotide primer for the detection of SNP TSC0040670
tagtttggttaa

SEQ ID NO: 338780 - DNA, 12 bp, Artificial Sequence
  Oligonucleotide primer for the detection of SNP TSC0040670
tagtattttgtt

SEQ ID NO: 338781 - DNA, 12 bp, Artificial Sequence
  Oligonucleotide primer for the detection of SNP TSC0040670
tagtatttcgtt

SEQ ID NO: 338782 - DNA, 12 bp, Artificial Sequence
  Oligonucleotide primer for the detection of SNP TSC0040671
cttaaaaattac

SEQ ID NO: 338783 - DNA, 12 bp, Artificial Sequence
  Oligonucleotide primer for the detection of SNP TSC0040671
agtagatgattt

SEQ ID NO: 338784 - DNA, 12 bp, Artificial Sequence
  Oligonucleotide primer for the detection of SNP TSC0040671
ttggaagttgtt

SEQ ID NO: 338785 - DNA, 12 bp, Artificial Sequence
  Oligonucleotide primer for the detection of SNP TSC0040672
ataaaaaccaac

SEQ ID NO: 338786 - DNA, 12 bp, Artificial Sequence
  Oligonucleotide primer for the detection of SNP TSC0040672
ttagtttggtta

SEQ ID NO: 338787 - DNA, 12 bp, Artificial Sequence
  Oligonucleotide primer for the detection of SNP TSC0040673
ttattattagaa

SEQ ID NO: 338788 - DNA, 12 bp, Artificial Sequence
  Oligonucleotide primer for the detection of SNP TSC0040673
caccattaaaaa

SEQ ID NO: 338789 - DNA, 12 bp, Artificial Sequence
  Oligonucleotide primer for the detection of SNP TSC0040677
atataggagtgt

SEQ ID NO: 338790 - DNA, 12 bp, Artificial Sequence
  Oligonucleotide primer for the detection of SNP TSC0040677
atataggagcgt

SEQ ID NO: 338791 - DNA, 12 bp, Artificial Sequence
  Oligonukleotid-Primer
ttcggttttgtt

SEQ ID NO: 338792 - DNA, 12 bp, Artificial Sequence
  Oligonucleotide primer for the detection of SNP TSC0008770
atagaagaaaat

SEQ ID NO: 338793 - DNA, 12 bp, Artificial Sequence
  Oligonucleotide primer for the detection of SNP TSC0040678
aaccaaattaac

SEQ ID NO: 338794 - DNA, 12 bp, Artificial Sequence
  Oligonucleotide primer for the detection of SNP TSC0040678
ttgtttgtaatt

SEQ ID NO: 338795 - DNA, 12 bp, Artificial Sequence
  Oligonukleotid-Primer
ttgtttgtaatc

SEQ ID NO: 338796 - DNA, 12 bp, Artificial Sequence
  Oligonucleotide primer for the detection of SNP TSC0040678
attaagttagtt

SEQ ID NO: 338797 - DNA, 12 bp, Artificial Sequence
  Oligonucleotide primer for the detection of SNP TSC0040679
aaccaccataaa

SEQ ID NO: 338798 - DNA, 12 bp, Artificial Sequence
  Oligonucleotide primer for the detection of SNP TSC0040679
aaccgccataaa

SEQ ID NO: 338799 - DNA, 12 bp, Artificial Sequence
  Oligonucleotide primer for the detection of SNP TSC0040679
taagaagaatta

SEQ ID NO: 338800 - DNA, 12 bp, Artificial Sequence
  Oligonucleotide primer for the detection of SNP TSC0040679
tagttgttatga

SEQ ID NO: 338801 - DNA, 12 bp, Artificial Sequence
  Oligonucleotide primer for the detection of SNP TSC0040679
tagtcgttatga

SEQ ID NO: 338802 - DNA, 12 bp, Artificial Sequence
  Oligonucleotide primer for the detection of SNP TSC0040681
tttaggttaggt

SEQ ID NO: 338803 - DNA, 12 bp, Artificial Sequence
  Oligonucleotide primer for the detection of SNP TSC0040681
ttcaaaccaaac

SEQ ID NO: 338804 - DNA, 12 bp, Artificial Sequence
  Oligonucleotide primer for the detection of SNP TSC0040682
taatattatttt

SEQ ID NO: 338805 - DNA, 12 bp, Artificial Sequence
  Oligonucleotide primer for the detection of SNP TSC0040682
attggaatatat

SEQ ID NO: 338806 - DNA, 12 bp, Artificial Sequence
  Oligonucleotide primer for the detection of SNP TSC0040682
attaaaatacat

SEQ ID NO: 338807 - DNA, 12 bp, Artificial Sequence
  Oligonucleotide primer for the detection of SNP TSC0040683
attataacttac

SEQ ID NO: 338808 - DNA, 12 bp, Artificial Sequence
  Oligonucleotide primer for the detection of SNP TSC0040687
ccttataattac

SEQ ID NO: 338809 - DNA, 12 bp, Artificial Sequence
  Oligonucleotide primer for the detection of SNP TSC0040687
tgagtgagttta

SEQ ID NO: 338810 - DNA, 12 bp, Artificial Sequence
  Oligonucleotide primer for the detection of SNP TSC0040688
accttacaaatt

SEQ ID NO: 338811 - DNA, 12 bp, Artificial Sequence
  Oligonucleotide primer for the detection of SNP TSC0040688
ttggaaataata

SEQ ID NO: 338812 - DNA, 12 bp, Artificial Sequence
  Oligonucleotide primer for the detection of SNP TSC0006815
ttctttaaaaaa

SEQ ID NO: 338813 - DNA, 12 bp, Artificial Sequence
  Oligonucleotide primer for the detection of SNP TSC0006815
atgtttgaggtt

SEQ ID NO: 338814 - DNA, 12 bp, Artificial Sequence
  Oligonucleotide primer for the detection of SNP TSC0006815
tatctaaaacta

SEQ ID NO: 338815 - DNA, 12 bp, Artificial Sequence
  Oligonucleotide primer for the detection of SNP TSC0006815
taattttttgaa

SEQ ID NO: 338816 - DNA, 12 bp, Artificial Sequence
  Oligonucleotide primer for the detection of SNP TSC0040691
taatccaaacct

SEQ ID NO: 338817 - DNA, 12 bp, Artificial Sequence
  Oligonucleotide primer for the detection of SNP TSC0040691
ctttaacccccc

SEQ ID NO: 338818 - DNA, 12 bp, Artificial Sequence
  Oligonucleotide primer for the detection of SNP TSC0040691
tggtttaggttt

SEQ ID NO: 338819 - DNA, 12 bp, Artificial Sequence
  Oligonucleotide primer for the detection of SNP TSC0040693
ccattaaatctc

SEQ ID NO: 338820 - DNA, 12 bp, Artificial Sequence
  Oligonucleotide primer for the detection of SNP TSC0040693
agagtgagtgag

SEQ ID NO: 338821 - DNA, 12 bp, Artificial Sequence
  Oligonucleotide primer for the detection of SNP TSC0040698
aatataccctaa

SEQ ID NO: 338822 - DNA, 12 bp, Artificial Sequence
  Oligonucleotide primer for the detection of SNP TSC0040698
cccacctttaaa

SEQ ID NO: 338823 - DNA, 12 bp, Artificial Sequence
  Oligonucleotide primer for the detection of SNP TSC0040698
ggtatgttttaa

SEQ ID NO: 338824 - DNA, 12 bp, Artificial Sequence
  Oligonucleotide primer for the detection of SNP TSC0040699
taataaactatt

SEQ ID NO: 338825 - DNA, 12 bp, Artificial Sequence
  Oligonucleotide primer for the detection of SNP TSC0040699
ttttgtgtagga

SEQ ID NO: 338826 - DNA, 12 bp, Artificial Sequence
  Oligonucleotide primer for the detection of SNP TSC0040701
accctaatttcc

SEQ ID NO: 338827 - DNA, 12 bp, Artificial Sequence
  Oligonucleotide primer for the detection of SNP TSC0040701
aaaaattgtatg

SEQ ID NO: 338828 - DNA, 12 bp, Artificial Sequence
  Oligonucleotide primer for the detection of SNP TSC0040701
aaaaattacata

SEQ ID NO: 338829 - DNA, 12 bp, Artificial Sequence
  Oligonucleotide primer for the detection of SNP TSC0040701
attttgattttc

SEQ ID NO: 338830 - DNA, 12 bp, Artificial Sequence
  Oligonucleotide primer for the detection of SNP TSC0040702
ccttcacttaaa

SEQ ID NO: 338831 - DNA, 12 bp, Artificial Sequence
  Oligonucleotide primer for the detection of SNP TSC0040702
aataattggtga

SEQ ID NO: 338832 - DNA, 12 bp, Artificial Sequence
  Oligonucleotide primer for the detection of SNP TSC0040702
aacaattaataa

SEQ ID NO: 338833 - DNA, 12 bp, Artificial Sequence
  Oligonucleotide primer for the detection of SNP TSC0040703
ctcaactaaata

SEQ ID NO: 338834 - DNA, 12 bp, Artificial Sequence
  Oligonucleotide primer for the detection of SNP TSC0040703
tttaatgtatta

SEQ ID NO: 338835 - DNA, 12 bp, Artificial Sequence
  Oligonucleotide primer for the detection of SNP TSC0040703
cctaatatatca

SEQ ID NO: 338836 - DNA, 12 bp, Artificial Sequence
  Oligonucleotide primer for the detection of SNP TSC0040704
taaccttatact

SEQ ID NO: 338837 - DNA, 12 bp, Artificial Sequence
  Oligonucleotide primer for the detection of SNP TSC0040705
aattattctatt

SEQ ID NO: 338838 - DNA, 12 bp, Artificial Sequence
  Oligonucleotide primer for the detection of SNP TSC0040708
taataatatctc

SEQ ID NO: 338839 - DNA, 12 bp, Artificial Sequence
  Oligonucleotide primer for the detection of SNP TSC0005192
gttgtgtattta

SEQ ID NO: 338840 - DNA, 12 bp, Artificial Sequence
  Oligonucleotide primer for the detection of SNP TSC0040710
cttcctatccac

SEQ ID NO: 338841 - DNA, 12 bp, Artificial Sequence
  Oligonucleotide primer for the detection of SNP TSC0040710
atggttttgtag

SEQ ID NO: 338842 - DNA, 12 bp, Artificial Sequence
  Oligonucleotide primer for the detection of SNP TSC0040711
aataccaaaact

SEQ ID NO: 338843 - DNA, 12 bp, Artificial Sequence
  Oligonucleotide primer for the detection of SNP TSC0040711
ttaataagttaa

SEQ ID NO: 338844 - DNA, 12 bp, Artificial Sequence
  Oligonucleotide primer for the detection of SNP TSC0040711
agtattaagatt

SEQ ID NO: 338845 - DNA, 12 bp, Artificial Sequence
  Oligonucleotide primer for the detection of SNP TSC0005424
ttaattaaactt

SEQ ID NO: 338846 - DNA, 12 bp, Artificial Sequence
  Oligonucleotide primer for the detection of SNP TSC0005424
atgtgtttaaga

SEQ ID NO: 338847 - DNA, 12 bp, Artificial Sequence
  Oligonucleotide primer for the detection of SNP TSC0005424
atatatttaaaa

SEQ ID NO: 338848 - DNA, 12 bp, Artificial Sequence
  Oligonucleotide primer for the detection of SNP TSC0005424
ttagttggattt

SEQ ID NO: 338849 - DNA, 12 bp, Artificial Sequence
  Oligonucleotide primer for the detection of SNP TSC0040712
acctaaacgaca

SEQ ID NO: 338850 - DNA, 12 bp, Artificial Sequence
  Oligonucleotide primer for the detection of SNP TSC0040712
ataaaatctcac

SEQ ID NO: 338851 - DNA, 12 bp, Artificial Sequence
  Oligonucleotide primer for the detection of SNP TSC0040712
agtttaggtgat

SEQ ID NO: 338852 - DNA, 12 bp, Artificial Sequence
  Oligonucleotide primer for the detection of SNP TSC0040712
agtttaggcgat

SEQ ID NO: 338853 - DNA, 12 bp, Artificial Sequence
  Oligonucleotide primer for the detection of SNP TSC0040714
aaaatggttagg

SEQ ID NO: 338854 - DNA, 12 bp, Artificial Sequence
  Oligonucleotide primer for the detection of SNP TSC0040715
cttaaaatattt

SEQ ID NO: 338855 - DNA, 12 bp, Artificial Sequence
  Oligonucleotide primer for the detection of SNP TSC0040715
tattgtgtttaa

SEQ ID NO: 338856 - DNA, 12 bp, Artificial Sequence
  Oligonucleotide primer for the detection of SNP TSC0040715
tatcgtgtttaa

SEQ ID NO: 338857 - DNA, 12 bp, Artificial Sequence
  Oligonucleotide primer for the detection of SNP TSC0040716
ttcaaaaccaaa

SEQ ID NO: 338858 - DNA, 12 bp, Artificial Sequence
  Oligonucleotide primer for the detection of SNP TSC0040716
ttagttagaatt

SEQ ID NO: 338859 - DNA, 12 bp, Artificial Sequence
  Oligonucleotide primer for the detection of SNP TSC0040716
acccaaccaaaa

SEQ ID NO: 338860 - DNA, 12 bp, Artificial Sequence
  Oligonucleotide primer for the detection of SNP TSC0040717
ataatctaaatc

SEQ ID NO: 338861 - DNA, 12 bp, Artificial Sequence
  Oligonucleotide primer for the detection of SNP TSC0040717
ttttgaatttgg

SEQ ID NO: 338862 - DNA, 12 bp, Artificial Sequence
  Oligonucleotide primer for the detection of SNP TSC0040718
aaaaatttatat

SEQ ID NO: 338863 - DNA, 12 bp, Artificial Sequence
  Oligonucleotide primer for the detection of SNP TSC0040719
actataactata

SEQ ID NO: 338864 - DNA, 12 bp, Artificial Sequence
  Oligonucleotide primer for the detection of SNP TSC0040719
attatagtttat

SEQ ID NO: 338865 - DNA, 12 bp, Artificial Sequence
  Oligonucleotide primer for the detection of SNP TSC0040719
attacaacctat

SEQ ID NO: 338866 - DNA, 12 bp, Artificial Sequence
  Oligonucleotide primer for the detection of SNP TSC0040719
attgtagttata

SEQ ID NO: 338867 - DNA, 12 bp, Artificial Sequence
  Oligonucleotide primer for the detection of SNP TSC0004941
attactaccact

SEQ ID NO: 338868 - DNA, 12 bp, Artificial Sequence
  Oligonucleotide primer for the detection of SNP TSC0004941
tatagtaaaaag

SEQ ID NO: 338869 - DNA, 12 bp, Artificial Sequence
  Oligonucleotide primer for the detection of SNP TSC0005367
taccaaatcaac

SEQ ID NO: 338870 - DNA, 12 bp, Artificial Sequence
  Oligonucleotide primer for the detection of SNP TSC0005367
tgtattttttaa

SEQ ID NO: 338871 - DNA, 12 bp, Artificial Sequence
  Oligonucleotide primer for the detection of SNP TSC0005367
tacacccctcaa

SEQ ID NO: 338872 - DNA, 12 bp, Artificial Sequence
  Oligonucleotide primer for the detection of SNP TSC0005367
tattaagttagt

SEQ ID NO: 338873 - DNA, 12 bp, Artificial Sequence
  Oligonucleotide primer for the detection of SNP TSC0040721
aaacgaaaaaat

SEQ ID NO: 338874 - DNA, 12 bp, Artificial Sequence
  Oligonucleotide primer for the detection of SNP TSC0040721
tttggatttaag

SEQ ID NO: 338875 - DNA, 12 bp, Artificial Sequence
  Oligonucleotide primer for the detection of SNP TSC0040721
aggtgggaggat

SEQ ID NO: 338876 - DNA, 12 bp, Artificial Sequence
  Oligonucleotide primer for the detection of SNP TSC0040721
aggcgggaggat

SEQ ID NO: 338877 - DNA, 12 bp, Artificial Sequence
  Oligonucleotide primer for the detection of SNP TSC0040725
taatatatttta

SEQ ID NO: 338878 - DNA, 12 bp, Artificial Sequence
  Oligonucleotide primer for the detection of SNP TSC0040725
caatacacttta

SEQ ID NO: 338879 - DNA, 12 bp, Artificial Sequence
  Oligonucleotide primer for the detection of SNP TSC0040725
agaataattaga

SEQ ID NO: 338880 - DNA, 12 bp, Artificial Sequence
  Oligonucleotide primer for the detection of SNP TSC0040726
acaaaaccaact

SEQ ID NO: 338881 - DNA, 12 bp, Artificial Sequence
  Oligonucleotide primer for the detection of SNP TSC0040726
tatgtttgttta

SEQ ID NO: 338882 - DNA, 12 bp, Artificial Sequence
  Oligonucleotide primer for the detection of SNP TSC0040726
tatatttatcca

SEQ ID NO: 338883 - DNA, 12 bp, Artificial Sequence
  Oligonucleotide primer for the detection of SNP TSC0040726
gtaaaattagtt

SEQ ID NO: 338884 - DNA, 12 bp, Artificial Sequence
  Oligonucleotide primer for the detection of SNP TSC0040729
taaattaatttt

SEQ ID NO: 338885 - DNA, 12 bp, Artificial Sequence
  Oligonucleotide primer for the detection of SNP TSC0040729
caaattaatttc

SEQ ID NO: 338886 - DNA, 12 bp, Artificial Sequence
  Oligonucleotide primer for the detection of SNP TSC0040729
gataaataagaa

SEQ ID NO: 338887 - DNA, 12 bp, Artificial Sequence
  Oligonucleotide primer for the detection of SNP TSC0040730
ctattccataaa

SEQ ID NO: 338888 - DNA, 12 bp, Artificial Sequence
  Oligonucleotide primer for the detection of SNP TSC0040730
tttattattaat

SEQ ID NO: 338889 - DNA, 12 bp, Artificial Sequence
  Oligonucleotide primer for the detection of SNP TSC0040730
ttcatcattaac

SEQ ID NO: 338890 - DNA, 12 bp, Artificial Sequence
  Oligonucleotide primer for the detection of SNP TSC0040730
ttattttatggg

SEQ ID NO: 338891 - DNA, 12 bp, Artificial Sequence
  Oligonucleotide primer for the detection of SNP TSC0040731
aaattaaattat

SEQ ID NO: 338892 - DNA, 12 bp, Artificial Sequence
  Oligonucleotide primer for the detection of SNP TSC0040731
ttaaaactatta

SEQ ID NO: 338893 - DNA, 12 bp, Artificial Sequence
  Oligonucleotide primer for the detection of SNP TSC0040731
agattaaattat

SEQ ID NO: 338894 - DNA, 12 bp, Artificial Sequence
  Oligonucleotide primer for the detection of SNP TSC0040735
atcacataaaac

SEQ ID NO: 338895 - DNA, 12 bp, Artificial Sequence
  Oligonucleotide primer for the detection of SNP TSC0040735
ttttgtgagaga

SEQ ID NO: 338896 - DNA, 12 bp, Artificial Sequence
  Oligonucleotide primer for the detection of SNP TSC0040735
ttctataaaaaa

SEQ ID NO: 338897 - DNA, 12 bp, Artificial Sequence
  Oligonucleotide primer for the detection of SNP TSC0040735
gttatatggaat

SEQ ID NO: 338898 - DNA, 12 bp, Artificial Sequence
  Oligonucleotide primer for the detection of SNP TSC0005508
tcttttctactt

SEQ ID NO: 338899 - DNA, 12 bp, Artificial Sequence
  Oligonucleotide primer for the detection of SNP TSC0005508
agaaaagaaaga

SEQ ID NO: 338900 - DNA, 12 bp, Artificial Sequence
  Oligonucleotide primer for the detection of SNP TSC0005509
cttttctttaac

SEQ ID NO: 338901 - DNA, 12 bp, Artificial Sequence
  Oligonucleotide primer for the detection of SNP TSC0005509
aagaaagaaatg

SEQ ID NO: 338902 - DNA, 12 bp, Artificial Sequence
  Oligonucleotide primer for the detection of SNP TSC0040738
cttaatttctat

SEQ ID NO: 338903 - DNA, 12 bp, Artificial Sequence
  Oligonucleotide primer for the detection of SNP TSC0040738
aatatggagtga

SEQ ID NO: 338904 - DNA, 12 bp, Artificial Sequence
  Oligonucleotide primer for the detection of SNP TSC0010428
aaatataactct

SEQ ID NO: 338905 - DNA, 12 bp, Artificial Sequence
  Oligonucleotide primer for the detection of SNP TSC0010428
aaaactatttaa

SEQ ID NO: 338906 - DNA, 12 bp, Artificial Sequence
  Oligonucleotide primer for the detection of SNP TSC0010428
gagtataatttt

SEQ ID NO: 338907 - DNA, 12 bp, Artificial Sequence
  Oligonucleotide primer for the detection of SNP TSC0040741
atttacctatat

SEQ ID NO: 338908 - DNA, 12 bp, Artificial Sequence
  Oligonucleotide primer for the detection of SNP TSC0040741
agattagggtgg

SEQ ID NO: 338909 - DNA, 12 bp, Artificial Sequence
  Oligonucleotide primer for the detection of SNP TSC0040742
taaaactttatt

SEQ ID NO: 338910 - DNA, 12 bp, Artificial Sequence
  Oligonucleotide primer for the detection of SNP TSC0040742
actcttttcact

SEQ ID NO: 338911 - DNA, 12 bp, Artificial Sequence
  Oligonucleotide primer for the detection of SNP TSC0040743
atacccccacat

SEQ ID NO: 338912 - DNA, 12 bp, Artificial Sequence
  Oligonucleotide primer for the detection of SNP TSC0040743
aaagataaatag

SEQ ID NO: 338913 - DNA, 12 bp, Artificial Sequence
  Oligonucleotide primer for the detection of SNP TSC0040744
taattattatac

SEQ ID NO: 338914 - DNA, 12 bp, Artificial Sequence
  Oligonucleotide primer for the detection of SNP TSC0040744
aagttttaatta

SEQ ID NO: 338915 - DNA, 12 bp, Artificial Sequence
  Oligonucleotide primer for the detection of SNP TSC0040745
cttctaaaaata

SEQ ID NO: 338916 - DNA, 12 bp, Artificial Sequence
  Oligonucleotide primer for the detection of SNP TSC0040745
gtaatggtttgt

SEQ ID NO: 338917 - DNA, 12 bp, Artificial Sequence
  Oligonucleotide primer for the detection of SNP TSC0040745
tttttggaagta

SEQ ID NO: 338918 - DNA, 12 bp, Artificial Sequence
  Oligonucleotide primer for the detection of SNP TSC0040747
ctaaaaaatatt

SEQ ID NO: 338919 - DNA, 12 bp, Artificial Sequence
  Oligonucleotide primer for the detection of SNP TSC0040748
tatgtgttgtta

SEQ ID NO: 338920 - DNA, 12 bp, Artificial Sequence
  Oligonucleotide primer for the detection of SNP TSC0040748
tatgtgtcgtta

SEQ ID NO: 338921 - DNA, 12 bp, Artificial Sequence
  Oligonucleotide primer for the detection of SNP TSC0040748
catatatcacca

SEQ ID NO: 338922 - DNA, 12 bp, Artificial Sequence
  Oligonucleotide primer for the detection of SNP TSC0040748
catatatcgcca

SEQ ID NO: 338923 - DNA, 12 bp, Artificial Sequence
  Oligonucleotide primer for the detection of SNP TSC0040749
cctaaatctcta

SEQ ID NO: 338924 - DNA, 12 bp, Artificial Sequence
  Oligonucleotide primer for the detection of SNP TSC0040749
agattgaggaga

SEQ ID NO: 338925 - DNA, 12 bp, Artificial Sequence
  Oligonucleotide primer for the detection of SNP TSC0040750
tcaccatctttc

SEQ ID NO: 338926 - DNA, 12 bp, Artificial Sequence
  Oligonucleotide primer for the detection of SNP TSC0040750
tcaccgtctttc

SEQ ID NO: 338927 - DNA, 12 bp, Artificial Sequence
  Oligonucleotide primer for the detection of SNP TSC0040750
tcgccatctttc

SEQ ID NO: 338928 - DNA, 12 bp, Artificial Sequence
  Oligonucleotide primer for the detection of SNP TSC0040750
tcgccgtctttc

SEQ ID NO: 338929 - DNA, 12 bp, Artificial Sequence
  Oligonucleotide primer for the detection of SNP TSC0040751
ctattaataata

SEQ ID NO: 338930 - DNA, 12 bp, Artificial Sequence
  Oligonucleotide primer for the detection of SNP TSC0040751
aaaaggttttag

SEQ ID NO: 338931 - DNA, 12 bp, Artificial Sequence
  Oligonucleotide primer for the detection of SNP TSC0040751
aaaaaactctaa

SEQ ID NO: 338932 - DNA, 12 bp, Artificial Sequence
  Oligonucleotide primer for the detection of SNP TSC0040753
attattgttgtt

SEQ ID NO: 338933 - DNA, 12 bp, Artificial Sequence
  Oligonucleotide primer for the detection of SNP TSC0040753
actactactact

SEQ ID NO: 338934 - DNA, 12 bp, Artificial Sequence
  Oligonucleotide primer for the detection of SNP TSC0040753
atgaagtatata

SEQ ID NO: 338935 - DNA, 12 bp, Artificial Sequence
  Oligonucleotide primer for the detection of SNP TSC0040754
accgcacctaac

SEQ ID NO: 338936 - DNA, 12 bp, Artificial Sequence
  Oligonucleotide primer for the detection of SNP TSC0040754
accgcgcctaac

SEQ ID NO: 338937 - DNA, 12 bp, Artificial Sequence
  Oligonucleotide primer for the detection of SNP TSC0040754
atgggatttata

SEQ ID NO: 338938 - DNA, 12 bp, Artificial Sequence
  Oligonucleotide primer for the detection of SNP TSC0040755
cgaactactaac

SEQ ID NO: 338939 - DNA, 12 bp, Artificial Sequence
  Oligonucleotide primer for the detection of SNP TSC0040755
aggattatttga

SEQ ID NO: 338940 - DNA, 12 bp, Artificial Sequence
  Oligonucleotide primer for the detection of SNP TSC0040756
attcaaaaaatt

SEQ ID NO: 338941 - DNA, 12 bp, Artificial Sequence
  Oligonucleotide primer for the detection of SNP TSC0040756
attcgaaaaatt

SEQ ID NO: 338942 - DNA, 12 bp, Artificial Sequence
  Oligonucleotide primer for the detection of SNP TSC0040756
gttgaagtagga

SEQ ID NO: 338943 - DNA, 12 bp, Artificial Sequence
  Oligonucleotide primer for the detection of SNP TSC0040757
tacacacatcta

SEQ ID NO: 338944 - DNA, 12 bp, Artificial Sequence
  Oligonucleotide primer for the detection of SNP TSC0040757
aaaaaaattgat

SEQ ID NO: 338945 - DNA, 12 bp, Artificial Sequence
  Oligonucleotide primer for the detection of SNP TSC0040758
tttaatagataa

SEQ ID NO: 338946 - DNA, 12 bp, Artificial Sequence
  Oligonucleotide primer for the detection of SNP TSC0040759
aacttcttcccc

SEQ ID NO: 338947 - DNA, 12 bp, Artificial Sequence
  Oligonucleotide primer for the detection of SNP TSC0010891
cacaaaatattc

SEQ ID NO: 338948 - DNA, 12 bp, Artificial Sequence
  Oligonucleotide primer for the detection of SNP TSC0010891
tctaaaaaaata

SEQ ID NO: 338949 - DNA, 12 bp, Artificial Sequence
  Oligonucleotide primer for the detection of SNP TSC0010891
tatagaatattt

SEQ ID NO: 338950 - DNA, 12 bp, Artificial Sequence
  Oligonucleotide primer for the detection of SNP TSC0010891
tatagaatattc

SEQ ID NO: 338951 - DNA, 12 bp, Artificial Sequence
  Oligonucleotide primer for the detection of SNP TSC0010884
atctacataaaa

SEQ ID NO: 338952 - DNA, 12 bp, Artificial Sequence
  Oligonucleotide primer for the detection of SNP TSC0010884
atctacgtaaaa

SEQ ID NO: 338953 - DNA, 12 bp, Artificial Sequence
  Oligonucleotide primer for the detection of SNP TSC0010885
caatccctttcc

SEQ ID NO: 338954 - DNA, 12 bp, Artificial Sequence
  Oligonucleotide primer for the detection of SNP TSC0010885
tggaaaagttta

SEQ ID NO: 338955 - DNA, 12 bp, Artificial Sequence
  Oligonucleotide primer for the detection of SNP TSC0010886
ctaaaaatctaa

SEQ ID NO: 338956 - DNA, 12 bp, Artificial Sequence
  Oligonucleotide primer for the detection of SNP TSC0010886
ggaagtggattt

SEQ ID NO: 338957 - DNA, 12 bp, Artificial Sequence
  Oligonucleotide primer for the detection of SNP TSC0010886
atttgaaggttt

SEQ ID NO: 338958 - DNA, 12 bp, Artificial Sequence
  Oligonucleotide primer for the detection of SNP TSC0040760
tatctctacccc

SEQ ID NO: 338959 - DNA, 12 bp, Artificial Sequence
  Oligonucleotide primer for the detection of SNP TSC0040760
agagaaagaaag

SEQ ID NO: 338960 - DNA, 12 bp, Artificial Sequence
  Oligonucleotide primer for the detection of SNP TSC0040761
cacattaaccct

SEQ ID NO: 338961 - DNA, 12 bp, Artificial Sequence
  Oligonucleotide primer for the detection of SNP TSC0040761
ataaaatttaag

SEQ ID NO: 338962 - DNA, 12 bp, Artificial Sequence
  Oligonucleotide primer for the detection of SNP TSC0040761
ataaaatctaaa

SEQ ID NO: 338963 - DNA, 12 bp, Artificial Sequence
  Oligonucleotide primer for the detection of SNP TSC0040762
tatcaacttttt

SEQ ID NO: 338964 - DNA, 12 bp, Artificial Sequence
  Oligonukleotid-Primer
caccctatctta

SEQ ID NO: 338965 - DNA, 12 bp, Artificial Sequence
  Oligonucleotide primer for the detection of SNP TSC0040762
tattaatttttt

SEQ ID NO: 338966 - DNA, 12 bp, Artificial Sequence
  Oligonucleotide primer for the detection of SNP TSC0040763
aaacctataaat

SEQ ID NO: 338967 - DNA, 12 bp, Artificial Sequence
  Oligonucleotide primer for the detection of SNP TSC0005701
ttattgtagaat

SEQ ID NO: 338968 - DNA, 12 bp, Artificial Sequence
  Oligonukleotid-Primer
ttactataaaat

SEQ ID NO: 338969 - DNA, 12 bp, Artificial Sequence
  Oligonucleotide primer for the detection of SNP TSC0005701
aaattttaaatg

SEQ ID NO: 338970 - DNA, 12 bp, Artificial Sequence
  Oligonucleotide primer for the detection of SNP TSC0005702
cactttatctct

SEQ ID NO: 338971 - DNA, 12 bp, Artificial Sequence
  Oligonucleotide primer for the detection of SNP TSC0040767
ttttgatttgtt

SEQ ID NO: 338972 - DNA, 12 bp, Artificial Sequence
  Oligonukleotid-Primer
cttttaacttac

SEQ ID NO: 338973 - DNA, 12 bp, Artificial Sequence
  Oligonucleotide primer for the detection of SNP TSC0040767
ttagggtaagtt

SEQ ID NO: 338974 - DNA, 12 bp, Artificial Sequence
  Oligonucleotide primer for the detection of SNP TSC0040769
aggtataattgt

SEQ ID NO: 338975 - DNA, 12 bp, Artificial Sequence
  Oligonucleotide primer for the detection of SNP TSC0040769
aaatataactat

SEQ ID NO: 338976 - DNA, 12 bp, Artificial Sequence
  Oligonucleotide primer for the detection of SNP TSC0040769
ttgtttaagatt

SEQ ID NO: 338977 - DNA, 12 bp, Artificial Sequence
  Oligonucleotide primer for the detection of SNP TSC0010274
atctaaaacata

SEQ ID NO: 338978 - DNA, 12 bp, Artificial Sequence
  Oligonucleotide primer for the detection of SNP TSC0010274
gattttggaggt

SEQ ID NO: 338979 - DNA, 12 bp, Artificial Sequence
  Oligonucleotide primer for the detection of SNP TSC0010274
aaccctaaaaat

SEQ ID NO: 338980 - DNA, 12 bp, Artificial Sequence
  Oligonucleotide primer for the detection of SNP TSC0010274
atttagaatata

SEQ ID NO: 338981 - DNA, 12 bp, Artificial Sequence
  Oligonucleotide primer for the detection of SNP TSC0040770
acccacacccca

SEQ ID NO: 338982 - DNA, 12 bp, Artificial Sequence
  Oligonucleotide primer for the detection of SNP TSC0040770
acccacgcccca

SEQ ID NO: 338983 - DNA, 12 bp, Artificial Sequence
  Oligonucleotide primer for the detection of SNP TSC0040770
tattttttgata

SEQ ID NO: 338984 - DNA, 12 bp, Artificial Sequence
  Oligonucleotide primer for the detection of SNP TSC0040770
cactccctaaca

SEQ ID NO: 338985 - DNA, 12 bp, Artificial Sequence
  Oligonucleotide primer for the detection of SNP TSC0040770
aatttacgtttt

SEQ ID NO: 338986 - DNA, 12 bp, Artificial Sequence
  Oligonucleotide primer for the detection of SNP TSC0040771
caaccactacac

SEQ ID NO: 338987 - DNA, 12 bp, Artificial Sequence
  Oligonucleotide primer for the detection of SNP TSC0008499
ctatattttttt

SEQ ID NO: 338988 - DNA, 12 bp, Artificial Sequence
  Oligonucleotide primer for the detection of SNP TSC0008499
aaataagatttt

SEQ ID NO: 338989 - DNA, 12 bp, Artificial Sequence
  Oligonucleotide primer for the detection of SNP TSC0040776
aagatgtttaat

SEQ ID NO: 338990 - DNA, 12 bp, Artificial Sequence
  Oligonucleotide primer for the detection of SNP TSC0040776
aaaatactcaat

SEQ ID NO: 338991 - DNA, 12 bp, Artificial Sequence
  Oligonucleotide primer for the detection of SNP TSC0040776
gatgaataatta

SEQ ID NO: 338992 - DNA, 12 bp, Artificial Sequence
  Oligonucleotide primer for the detection of SNP TSC0040777
atacttacaaat

SEQ ID NO: 338993 - DNA, 12 bp, Artificial Sequence
  Oligonucleotide primer for the detection of SNP TSC0040777
gtaaagaaatga

SEQ ID NO: 338994 - DNA, 12 bp, Artificial Sequence
  Oligonucleotide primer for the detection of SNP TSC0040777
gtaaagaaacga

SEQ ID NO: 338995 - DNA, 12 bp, Artificial Sequence
  Oligonucleotide primer for the detection of SNP TSC0040777
acaaaaaaacga

SEQ ID NO: 338996 - DNA, 12 bp, Artificial Sequence
  Oligonucleotide primer for the detection of SNP TSC0040777
gtatttgtaaat

SEQ ID NO: 338997 - DNA, 12 bp, Artificial Sequence
  Oligonucleotide primer for the detection of SNP TSC0040780
ttatataatata

SEQ ID NO: 338998 - DNA, 12 bp, Artificial Sequence
  Oligonucleotide primer for the detection of SNP TSC0040780
ttattttattgt

SEQ ID NO: 338999 - DNA, 12 bp, Artificial Sequence
  Oligonucleotide primer for the detection of SNP TSC0040780
attttattataa

SEQ ID NO: 339000 - DNA, 12 bp, Artificial Sequence
  Oligonucleotide primer for the detection of SNP TSC0040780
atataatgtgtt

SEQ ID NO: 339001 - DNA, 12 bp, Artificial Sequence
  Oligonucleotide primer for the detection of SNP TSC0040781
aactacaaaaat

SEQ ID NO: 339002 - DNA, 12 bp, Artificial Sequence
  Oligonucleotide primer for the detection of SNP TSC0040782
taccaaactatc

SEQ ID NO: 339003 - DNA, 12 bp, Artificial Sequence
  Oligonucleotide primer for the detection of SNP TSC0040782
acatccacttta

SEQ ID NO: 339004 - DNA, 12 bp, Artificial Sequence
  Oligonucleotide primer for the detection of SNP TSC0040782
ttaaattgtttt

SEQ ID NO: 339005 - DNA, 12 bp, Artificial Sequence
  Oligonucleotide primer for the detection of SNP TSC0040785
ctttattatttt

SEQ ID NO: 339006 - DNA, 12 bp, Artificial Sequence
  Oligonucleotide primer for the detection of SNP TSC0040786
actactattaaa

SEQ ID NO: 339007 - DNA, 12 bp, Artificial Sequence
  Oligonucleotide primer for the detection of SNP TSC0040786
tttttaaagtat

SEQ ID NO: 339008 - DNA, 12 bp, Artificial Sequence
  Oligonucleotide primer for the detection of SNP TSC0040786
tttccaaaacac

SEQ ID NO: 339009 - DNA, 12 bp, Artificial Sequence
  Oligonucleotide primer for the detection of SNP TSC0040786
attattattgga

SEQ ID NO: 339010 - DNA, 12 bp, Artificial Sequence
  Oligonucleotide primer for the detection of SNP TSC0040787
aaacacatatcc

SEQ ID NO: 339011 - DNA, 12 bp, Artificial Sequence
  Oligonucleotide primer for the detection of SNP TSC0040788
tcatcatttata

SEQ ID NO: 339012 - DNA, 12 bp, Artificial Sequence
  Oligonucleotide primer for the detection of SNP TSC0040788
tcatcgtttata

SEQ ID NO: 339013 - DNA, 12 bp, Artificial Sequence
  Oligonucleotide primer for the detection of SNP TSC0040788
ttaagagttgat

SEQ ID NO: 339014 - DNA, 12 bp, Artificial Sequence
  Oligonucleotide primer for the detection of SNP TSC0040788
ttaaaaactaac

SEQ ID NO: 339015 - DNA, 12 bp, Artificial Sequence
  Oligonucleotide primer for the detection of SNP TSC0040788
ttattgtttata

SEQ ID NO: 339016 - DNA, 12 bp, Artificial Sequence
  Oligonucleotide primer for the detection of SNP TSC0040788
ttatcgtttata

SEQ ID NO: 339017 - DNA, 12 bp, Artificial Sequence
  Oligonucleotide primer for the detection of SNP TSC0040789
aaaactaatcct

SEQ ID NO: 339018 - DNA, 12 bp, Artificial Sequence
  Oligonucleotide primer for the detection of SNP TSC0040789
ggtattttattg

SEQ ID NO: 339019 - DNA, 12 bp, Artificial Sequence
  Oligonucleotide primer for the detection of SNP TSC0040790
aaacccttatac

SEQ ID NO: 339020 - DNA, 12 bp, Artificial Sequence
  Oligonucleotide primer for the detection of SNP TSC0040792
aacctaaacatc

SEQ ID NO: 339021 - DNA, 12 bp, Artificial Sequence
  Oligonucleotide primer for the detection of SNP TSC0040792
tatttgtgttga

SEQ ID NO: 339022 - DNA, 12 bp, Artificial Sequence
  Oligonucleotide primer for the detection of SNP TSC0040792
tatttgcgttga

SEQ ID NO: 339023 - DNA, 12 bp, Artificial Sequence
  Oligonucleotide primer for the detection of SNP TSC0040793
tattttaaaaat

SEQ ID NO: 339024 - DNA, 12 bp, Artificial Sequence
  Oligonucleotide primer for the detection of SNP TSC0040795
aactcttatcaa

SEQ ID NO: 339025 - DNA, 12 bp, Artificial Sequence
  Oligonucleotide primer for the detection of SNP TSC0040795
aactcttatcga

SEQ ID NO: 339026 - DNA, 12 bp, Artificial Sequence
  Oligonucleotide primer for the detection of SNP TSC0040795
gtttaattttta

SEQ ID NO: 339027 - DNA, 12 bp, Artificial Sequence
  Oligonucleotide primer for the detection of SNP TSC0040795
ctcaactttcaa

SEQ ID NO: 339028 - DNA, 12 bp, Artificial Sequence
  Oligonucleotide primer for the detection of SNP TSC0040796
ttcaactttcct

SEQ ID NO: 339029 - DNA, 12 bp, Artificial Sequence
  Oligonucleotide primer for the detection of SNP TSC0040797
attaaaaaataa

SEQ ID NO: 339030 - DNA, 12 bp, Artificial Sequence
  Oligonucleotide primer for the detection of SNP TSC0040797
ggttgttttaat

SEQ ID NO: 339031 - DNA, 12 bp, Artificial Sequence
  Oligonucleotide primer for the detection of SNP TSC0040797
ggttgttttaac

SEQ ID NO: 339032 - DNA, 12 bp, Artificial Sequence
  Oligonucleotide primer for the detection of SNP TSC0040797
taactatcccaa

SEQ ID NO: 339033 - DNA, 12 bp, Artificial Sequence
  Oligonucleotide primer for the detection of SNP TSC0040797
ttggggggtggt

SEQ ID NO: 339034 - DNA, 12 bp, Artificial Sequence
  Oligonucleotide primer for the detection of SNP TSC0040798
cacactaaaact

SEQ ID NO: 339035 - DNA, 12 bp, Artificial Sequence
  Oligonucleotide primer for the detection of SNP TSC0040798
gatagaattgga

SEQ ID NO: 339036 - DNA, 12 bp, Artificial Sequence
  Oligonucleotide primer for the detection of SNP TSC0040799
atatacaaataa

SEQ ID NO: 339037 - DNA, 12 bp, Artificial Sequence
  Oligonucleotide primer for the detection of SNP TSC0040799
atatacgaataa

SEQ ID NO: 339038 - DNA, 12 bp, Artificial Sequence
  Oligonucleotide primer for the detection of SNP TSC0040799
gtatacaaataa

SEQ ID NO: 339039 - DNA, 12 bp, Artificial Sequence
  Oligonucleotide primer for the detection of SNP TSC0040799
gtatacgaataa

SEQ ID NO: 339040 - DNA, 12 bp, Artificial Sequence
  Oligonucleotide primer for the detection of SNP TSC0040799
atgtatagagtt

SEQ ID NO: 339041 - DNA, 12 bp, Artificial Sequence
  Oligonucleotide primer for the detection of SNP TSC0040799
atacacaaaacc

SEQ ID NO: 339042 - DNA, 12 bp, Artificial Sequence
  Oligonucleotide primer for the detection of SNP TSC0040799
gtgtgtgagtgg

SEQ ID NO: 339043 - DNA, 12 bp, Artificial Sequence
  Oligonucleotide primer for the detection of SNP TSC0040799
gtgtgcgagtgg

SEQ ID NO: 339044 - DNA, 12 bp, Artificial Sequence
  Oligonucleotide primer for the detection of SNP TSC0040800
tacaaataaccc

SEQ ID NO: 339045 - DNA, 12 bp, Artificial Sequence
  Oligonucleotide primer for the detection of SNP TSC0040800
tacgaataaccc

SEQ ID NO: 339046 - DNA, 12 bp, Artificial Sequence
  Oligonucleotide primer for the detection of SNP TSC0040800
tgtatagagtta

SEQ ID NO: 339047 - DNA, 12 bp, Artificial Sequence
  Oligonucleotide primer for the detection of SNP TSC0040803
gatgaattttta

SEQ ID NO: 339048 - DNA, 12 bp, Artificial Sequence
  Oligonucleotide primer for the detection of SNP TSC0040804
ctattttcattt

SEQ ID NO: 339049 - DNA, 12 bp, Artificial Sequence
  Oligonucleotide primer for the detection of SNP TSC0040804
taaataaaatta

SEQ ID NO: 339050 - DNA, 12 bp, Artificial Sequence
  Oligonucleotide primer for the detection of SNP TSC0040805
tacaattaaaac

SEQ ID NO: 339051 - DNA, 12 bp, Artificial Sequence
  Oligonucleotide primer for the detection of SNP TSC0040806
catattataact

SEQ ID NO: 339052 - DNA, 12 bp, Artificial Sequence
  Oligonucleotide primer for the detection of SNP TSC0040806
ttatgatatgaa

SEQ ID NO: 339053 - DNA, 12 bp, Artificial Sequence
  Oligonucleotide primer for the detection of SNP TSC0040808
aaccctacattc

SEQ ID NO: 339054 - DNA, 12 bp, Artificial Sequence
  Oligonucleotide primer for the detection of SNP TSC0040808
tttattttatag

SEQ ID NO: 339055 - DNA, 12 bp, Artificial Sequence
  Oligonucleotide primer for the detection of SNP TSC0040809
acaacaaaaacc

SEQ ID NO: 339056 - DNA, 12 bp, Artificial Sequence
  Oligonucleotide primer for the detection of SNP TSC0040809
taaggtaaaata

SEQ ID NO: 339057 - DNA, 12 bp, Artificial Sequence
  Oligonucleotide primer for the detection of SNP TSC0040809
gtagtagggatt

SEQ ID NO: 339058 - DNA, 12 bp, Artificial Sequence
  Oligonucleotide primer for the detection of SNP TSC0040810
caaataatattt

SEQ ID NO: 339059 - DNA, 12 bp, Artificial Sequence
  Oligonucleotide primer for the detection of SNP TSC0040810
aaatgtgtaagg

SEQ ID NO: 339060 - DNA, 12 bp, Artificial Sequence
  Oligonucleotide primer for the detection of SNP TSC0040810
taggtggtattt

SEQ ID NO: 339061 - DNA, 12 bp, Artificial Sequence
  Oligonucleotide primer for the detection of SNP TSC0040811
ctcccaaaatta

SEQ ID NO: 339062 - DNA, 12 bp, Artificial Sequence
  Oligonucleotide primer for the detection of SNP TSC0040811
ctcccgaaatta

SEQ ID NO: 339063 - DNA, 12 bp, Artificial Sequence
  Oligonucleotide primer for the detection of SNP TSC0040811
taaggagttgat

SEQ ID NO: 339064 - DNA, 12 bp, Artificial Sequence
  Oligonucleotide primer for the detection of SNP TSC0040811
ttttcggggttg

SEQ ID NO: 339065 - DNA, 12 bp, Artificial Sequence
  Oligonucleotide primer for the detection of SNP TSC0040812
aatacaaaactt

SEQ ID NO: 339066 - DNA, 12 bp, Artificial Sequence
  Oligonucleotide primer for the detection of SNP TSC0040813
tcccaaccattc

SEQ ID NO: 339067 - DNA, 12 bp, Artificial Sequence
  Oligonucleotide primer for the detection of SNP TSC0040813
ttttagagggag

SEQ ID NO: 339068 - DNA, 12 bp, Artificial Sequence
  Oligonucleotide primer for the detection of SNP TSC0006714
attttttaatta

SEQ ID NO: 339069 - DNA, 12 bp, Artificial Sequence
  Oligonucleotide primer for the detection of SNP TSC0040814
acttaaataaac

SEQ ID NO: 339070 - DNA, 12 bp, Artificial Sequence
  Oligonucleotide primer for the detection of SNP TSC0040814
tttaggaaaatg

SEQ ID NO: 339071 - DNA, 12 bp, Artificial Sequence
  Oligonucleotide primer for the detection of SNP TSC0040814
atttaagtgaat

SEQ ID NO: 339072 - DNA, 12 bp, Artificial Sequence
  Oligonucleotide primer for the detection of SNP TSC0040815
tttaaattacta

SEQ ID NO: 339073 - DNA, 12 bp, Artificial Sequence
  Oligonucleotide primer for the detection of SNP TSC0040815
atttgtatttaa

SEQ ID NO: 339074 - DNA, 12 bp, Artificial Sequence
  Oligonucleotide primer for the detection of SNP TSC0040815
attcgtatttaa

SEQ ID NO: 339075 - DNA, 12 bp, Artificial Sequence
  Oligonucleotide primer for the detection of SNP TSC0040815
acccatatttaa

SEQ ID NO: 339076 - DNA, 12 bp, Artificial Sequence
  Oligonucleotide primer for the detection of SNP TSC0040815
acccgtatttaa

SEQ ID NO: 339077 - DNA, 12 bp, Artificial Sequence
  Oligonucleotide primer for the detection of SNP TSC0040815
tttggattgttg

SEQ ID NO: 339078 - DNA, 12 bp, Artificial Sequence
  Oligonucleotide primer for the detection of SNP TSC0040816
aatttacattat

SEQ ID NO: 339079 - DNA, 12 bp, Artificial Sequence
  Oligonucleotide primer for the detection of SNP TSC0040818
taatacataaaa

SEQ ID NO: 339080 - DNA, 12 bp, Artificial Sequence
  Oligonucleotide primer for the detection of SNP TSC0040818
tattttgtgttt

SEQ ID NO: 339081 - DNA, 12 bp, Artificial Sequence
  Oligonucleotide primer for the detection of SNP TSC0040818
tattttatactc

SEQ ID NO: 339082 - DNA, 12 bp, Artificial Sequence
  Oligonucleotide primer for the detection of SNP TSC0040818
tgatatatagga

SEQ ID NO: 339083 - DNA, 12 bp, Artificial Sequence
  Oligonucleotide primer for the detection of SNP TSC0040819
actaataaatat

SEQ ID NO: 339084 - DNA, 12 bp, Artificial Sequence
  Oligonucleotide primer for the detection of SNP TSC0040819
cacacaactaaa

SEQ ID NO: 339085 - DNA, 12 bp, Artificial Sequence
  Oligonukleotid-Primer
ttggtaagtgtt

SEQ ID NO: 339086 - DNA, 12 bp, Artificial Sequence
  Oligonucleotide primer for the detection of SNP TSC0040820
actaatatccta

SEQ ID NO: 339087 - DNA, 12 bp, Artificial Sequence
  Oligonucleotide primer for the detection of SNP TSC0040820
gatgggtagggg

SEQ ID NO: 339088 - DNA, 12 bp, Artificial Sequence
  Oligonucleotide primer for the detection of SNP TSC0040821
ttatttctactt

SEQ ID NO: 339089 - DNA, 12 bp, Artificial Sequence
  Oligonukleotid-Primer
taaagaaaagta

SEQ ID NO: 339090 - DNA, 12 bp, Artificial Sequence
  Oligonucleotide primer for the detection of SNP TSC0040821
ttatttttgttt

SEQ ID NO: 339091 - DNA, 12 bp, Artificial Sequence
  Oligonucleotide primer for the detection of SNP TSC0040822
aaatattttatt

SEQ ID NO: 339092 - DNA, 12 bp, Artificial Sequence
  Oligonucleotide primer for the detection of SNP TSC0040822
cctctcccttta

SEQ ID NO: 339093 - DNA, 12 bp, Artificial Sequence
  Oligonucleotide primer for the detection of SNP TSC0040822
agtattttgttt

SEQ ID NO: 339094 - DNA, 12 bp, Artificial Sequence
  Oligonucleotide primer for the detection of SNP TSC0007979
ataaactcttat

SEQ ID NO: 339095 - DNA, 12 bp, Artificial Sequence
  Oligonucleotide primer for the detection of SNP TSC0007979
attataattagg

SEQ ID NO: 339096 - DNA, 12 bp, Artificial Sequence
  Oligonucleotide primer for the detection of SNP TSC0009377
cttccttccact

SEQ ID NO: 339097 - DNA, 12 bp, Artificial Sequence
  Oligonucleotide primer for the detection of SNP TSC0009377
aattagaaatta

SEQ ID NO: 339098 - DNA, 12 bp, Artificial Sequence
  Oligonucleotide primer for the detection of SNP TSC0040823
agttaaatattg

SEQ ID NO: 339099 - DNA, 12 bp, Artificial Sequence
  Oligonucleotide primer for the detection of SNP TSC0040824
ctttcttctaat

SEQ ID NO: 339100 - DNA, 12 bp, Artificial Sequence
  Oligonucleotide primer for the detection of SNP TSC0040824
atttattcccaa

SEQ ID NO: 339101 - DNA, 12 bp, Artificial Sequence
  Oligonukleotid-Primer
taattaattaac

SEQ ID NO: 339102 - DNA, 12 bp, Artificial Sequence
  Oligonucleotide primer for the detection of SNP TSC0040826
ttaataattgtg

SEQ ID NO: 339103 - DNA, 12 bp, Artificial Sequence
  Oligonucleotide primer for the detection of SNP TSC0040827
aaactaacatct

SEQ ID NO: 339104 - DNA, 12 bp, Artificial Sequence
  Oligonucleotide primer for the detection of SNP TSC0040828
aatataaatttt

SEQ ID NO: 339105 - DNA, 12 bp, Artificial Sequence
  Oligonucleotide primer for the detection of SNP TSC0040828
agaggttaatag

SEQ ID NO: 339106 - DNA, 12 bp, Artificial Sequence
  Oligonucleotide primer for the detection of SNP TSC0040829
ctaatcattaaa

SEQ ID NO: 339107 - DNA, 12 bp, Artificial Sequence
  Oligonucleotide primer for the detection of SNP TSC0040829
agaaatatggag

SEQ ID NO: 339108 - DNA, 12 bp, Artificial Sequence
  Oligonucleotide primer for the detection of SNP TSC0040829
agaaatacggag

SEQ ID NO: 339109 - DNA, 12 bp, Artificial Sequence
  Oligonukleotid-Primer
ttagttattgaa

SEQ ID NO: 339110 - DNA, 12 bp, Artificial Sequence
  Oligonucleotide primer for the detection of SNP TSC0040831
ctcccttaacct

SEQ ID NO: 339111 - DNA, 12 bp, Artificial Sequence
  Oligonucleotide primer for the detection of SNP TSC0040831
ataagtaagagg

SEQ ID NO: 339112 - DNA, 12 bp, Artificial Sequence
  Oligonucleotide primer for the detection of SNP TSC0040832
tcaaacacccta

SEQ ID NO: 339113 - DNA, 12 bp, Artificial Sequence
  Oligonucleotide primer for the detection of SNP TSC0040833
aattctacatat

SEQ ID NO: 339114 - DNA, 12 bp, Artificial Sequence
  Oligonucleotide primer for the detection of SNP TSC0040833
atatatttaata

SEQ ID NO: 339115 - DNA, 12 bp, Artificial Sequence
  Oligonucleotide primer for the detection of SNP TSC0040842
ttcaaacttcaa

SEQ ID NO: 339116 - DNA, 12 bp, Artificial Sequence
  Oligonucleotide primer for the detection of SNP TSC0040842
ggtttatatatg

SEQ ID NO: 339117 - DNA, 12 bp, Artificial Sequence
  Oligonukleotid-Primer
atttatatataa

SEQ ID NO: 339118 - DNA, 12 bp, Artificial Sequence
  Oligonucleotide primer for the detection of SNP TSC0040842
atttaggtttta

SEQ ID NO: 339119 - DNA, 12 bp, Artificial Sequence
  Oligonucleotide primer for the detection of SNP TSC0040843
acaaactttacc

SEQ ID NO: 339120 - DNA, 12 bp, Artificial Sequence
  Oligonucleotide primer for the detection of SNP TSC0040843
gttttggttgag

SEQ ID NO: 339121 - DNA, 12 bp, Artificial Sequence
  Oligonukleotid-Primer
catatttttaat

SEQ ID NO: 339122 - DNA, 12 bp, Artificial Sequence
  Oligonucleotide primer for the detection of SNP TSC0040844
tttgagtataag

SEQ ID NO: 339123 - DNA, 12 bp, Artificial Sequence
  Oligonucleotide primer for the detection of SNP TSC0040845
tttaaattacat

SEQ ID NO: 339124 - DNA, 12 bp, Artificial Sequence
  Oligonucleotide primer for the detection of SNP TSC0040845
taatgtaagtta

SEQ ID NO: 339125 - DNA, 12 bp, Artificial Sequence
  Oligonukleotid-Primer
ttttaagtgaaa

SEQ ID NO: 339126 - DNA, 12 bp, Artificial Sequence
  Oligonucleotide primer for the detection of SNP TSC0040847
aaatacaactat

SEQ ID NO: 339127 - DNA, 12 bp, Artificial Sequence
  Oligonucleotide primer for the detection of SNP TSC0040847
aaatacgactat

SEQ ID NO: 339128 - DNA, 12 bp, Artificial Sequence
  Oligonucleotide primer for the detection of SNP TSC0040848
aaaataaaacat

SEQ ID NO: 339129 - DNA, 12 bp, Artificial Sequence
  Oligonucleotide primer for the detection of SNP TSC0040849
aattatacatta

SEQ ID NO: 339130 - DNA, 12 bp, Artificial Sequence
  Oligonucleotide primer for the detection of SNP TSC0040849
aaatttttctcc

SEQ ID NO: 339131 - DNA, 12 bp, Artificial Sequence
  Oligonucleotide primer for the detection of SNP TSC0040849
gattatgtatta

SEQ ID NO: 339132 - DNA, 12 bp, Artificial Sequence
  Oligonucleotide primer for the detection of SNP TSC0040850
ttaatttgttgt

SEQ ID NO: 339133 - DNA, 12 bp, Artificial Sequence
  Oligonukleotid-Primer
ttaattcgttgt

SEQ ID NO: 339134 - DNA, 12 bp, Artificial Sequence
  Oligonucleotide primer for the detection of SNP TSC0040850
ccaactcattac

SEQ ID NO: 339135 - DNA, 12 bp, Artificial Sequence
  Oligonucleotide primer for the detection of SNP TSC0040850
ccaactcgttac

SEQ ID NO: 339136 - DNA, 12 bp, Artificial Sequence
  Oligonucleotide primer for the detection of SNP TSC0040850
ttgtgaatagta

SEQ ID NO: 339137 - DNA, 12 bp, Artificial Sequence
  Oligonucleotide primer for the detection of SNP TSC0040854
agttataattta

SEQ ID NO: 339138 - DNA, 12 bp, Artificial Sequence
  Oligonucleotide primer for the detection of SNP TSC0040854
aaccataaccta

SEQ ID NO: 339139 - DNA, 12 bp, Artificial Sequence
  Oligonucleotide primer for the detection of SNP TSC0040855
ataaacaattat

SEQ ID NO: 339140 - DNA, 12 bp, Artificial Sequence
  Oligonucleotide primer for the detection of SNP TSC0040855
ataaacgattat

SEQ ID NO: 339141 - DNA, 12 bp, Artificial Sequence
  Oligonucleotide primer for the detection of SNP TSC0040856
acatatattaat

SEQ ID NO: 339142 - DNA, 12 bp, Artificial Sequence
  Oligonucleotide primer for the detection of SNP TSC0040856
ttatattaagga

SEQ ID NO: 339143 - DNA, 12 bp, Artificial Sequence
  Oligonucleotide primer for the detection of SNP TSC0040858
gttgttttttat

SEQ ID NO: 339144 - DNA, 12 bp, Artificial Sequence
  Oligonucleotide primer for the detection of SNP TSC0040858
actaccctccac

SEQ ID NO: 339145 - DNA, 12 bp, Artificial Sequence
  Oligonucleotide primer for the detection of SNP TSC0040858
ttgtggggtggg

SEQ ID NO: 339146 - DNA, 12 bp, Artificial Sequence
  Oligonucleotide primer for the detection of SNP TSC0040864
aactaacacaat

SEQ ID NO: 339147 - DNA, 12 bp, Artificial Sequence
  Oligonucleotide primer for the detection of SNP TSC0040864
aactaacacgat

SEQ ID NO: 339148 - DNA, 12 bp, Artificial Sequence
  Oligonucleotide primer for the detection of SNP TSC0040866
ttttttggaggg

SEQ ID NO: 339149 - DNA, 12 bp, Artificial Sequence
  Oligonukleotid-Primer
tactacctaaac

SEQ ID NO: 339150 - DNA, 12 bp, Artificial Sequence
  Oligonucleotide primer for the detection of SNP TSC0040868
gataggaggtgg

SEQ ID NO: 339151 - DNA, 12 bp, Artificial Sequence
  Oligonucleotide primer for the detection of SNP TSC0040868
gataggaggcgg

SEQ ID NO: 339152 - DNA, 12 bp, Artificial Sequence
  Oligonucleotide primer for the detection of SNP TSC0040869
ctctctataaaa

SEQ ID NO: 339153 - DNA, 12 bp, Artificial Sequence
  Oligonucleotide primer for the detection of SNP TSC0040869
ttggggattgtt

SEQ ID NO: 339154 - DNA, 12 bp, Artificial Sequence
  Oligonucleotide primer for the detection of SNP TSC0040869
attaaaaactac

SEQ ID NO: 339155 - DNA, 12 bp, Artificial Sequence
  Oligonucleotide primer for the detection of SNP TSC0040869
cgttttttgtag

SEQ ID NO: 339156 - DNA, 12 bp, Artificial Sequence
  Oligonucleotide primer for the detection of SNP TSC0040870
atcccaaaacca

SEQ ID NO: 339157 - DNA, 12 bp, Artificial Sequence
  Oligonucleotide primer for the detection of SNP TSC0040870
tatagtgtggga

SEQ ID NO: 339158 - DNA, 12 bp, Artificial Sequence
  Oligonucleotide primer for the detection of SNP TSC0040871
taaacaaaataa

SEQ ID NO: 339159 - DNA, 12 bp, Artificial Sequence
  Oligonucleotide primer for the detection of SNP TSC0040871
atataaattgtt

SEQ ID NO: 339160 - DNA, 12 bp, Artificial Sequence
  Oligonucleotide primer for the detection of SNP TSC0040871
aaacataaacta

SEQ ID NO: 339161 - DNA, 12 bp, Artificial Sequence
  Oligonucleotide primer for the detection of SNP TSC0040871
tggataaagtag

SEQ ID NO: 339162 - DNA, 12 bp, Artificial Sequence
  Oligonucleotide primer for the detection of SNP TSC0040872
aaatttatcatc

SEQ ID NO: 339163 - DNA, 12 bp, Artificial Sequence
  Oligonucleotide primer for the detection of SNP TSC0040872
gatatataaatt

SEQ ID NO: 339164 - DNA, 12 bp, Artificial Sequence
  Oligonucleotide primer for the detection of SNP TSC0040873
tctcctaaatac

SEQ ID NO: 339165 - DNA, 12 bp, Artificial Sequence
  Oligonucleotide primer for the detection of SNP TSC0040873
ggttatagaggg

SEQ ID NO: 339166 - DNA, 12 bp, Artificial Sequence
  Oligonucleotide primer for the detection of SNP TSC0040874
ataattattttc

SEQ ID NO: 339167 - DNA, 12 bp, Artificial Sequence
  Oligonucleotide primer for the detection of SNP TSC0040874
tatgtaatatta

SEQ ID NO: 339168 - DNA, 12 bp, Artificial Sequence
  Oligonucleotide primer for the detection of SNP TSC0040877
ataataatattt

SEQ ID NO: 339169 - DNA, 12 bp, Artificial Sequence
  Oligonucleotide primer for the detection of SNP TSC0040877
attagatgttta

SEQ ID NO: 339170 - DNA, 12 bp, Artificial Sequence
  Oligonucleotide primer for the detection of SNP TSC0040877
atcaaatactta

SEQ ID NO: 339171 - DNA, 12 bp, Artificial Sequence
  Oligonucleotide primer for the detection of SNP TSC0040877
tggtaatatttc

SEQ ID NO: 339172 - DNA, 12 bp, Artificial Sequence
  Oligonucleotide primer for the detection of SNP TSC0008948
ttacattcacta

SEQ ID NO: 339173 - DNA, 12 bp, Artificial Sequence
  Oligonucleotide primer for the detection of SNP TSC0008948
ttatattaaaat

SEQ ID NO: 339174 - DNA, 12 bp, Artificial Sequence
  Oligonucleotide primer for the detection of SNP TSC0040879
ctcatatttatt

SEQ ID NO: 339175 - DNA, 12 bp, Artificial Sequence
  Oligonucleotide primer for the detection of SNP TSC0040879
gtaataaattgg

SEQ ID NO: 339176 - DNA, 12 bp, Artificial Sequence
  Oligonucleotide primer for the detection of SNP TSC0040884
acaatcctccta

SEQ ID NO: 339177 - DNA, 12 bp, Artificial Sequence
  Oligonucleotide primer for the detection of SNP TSC0040884
tattttgaaggt

SEQ ID NO: 339178 - DNA, 12 bp, Artificial Sequence
  Oligonucleotide primer for the detection of SNP TSC0040884
tactctaaaaac

SEQ ID NO: 339179 - DNA, 12 bp, Artificial Sequence
  Oligonucleotide primer for the detection of SNP TSC0040885
tttgaggttagt

SEQ ID NO: 339180 - DNA, 12 bp, Artificial Sequence
  Oligonucleotide primer for the detection of SNP TSC0040885
ttaaaattaaca

SEQ ID NO: 339181 - DNA, 12 bp, Artificial Sequence
  Oligonucleotide primer for the detection of SNP TSC0040885
gttgtttagatt

SEQ ID NO: 339182 - DNA, 12 bp, Artificial Sequence
  Oligonucleotide primer for the detection of SNP TSC0040887
acctatctaaac

SEQ ID NO: 339183 - DNA, 12 bp, Artificial Sequence
  Oligonucleotide primer for the detection of SNP TSC0040887
ttaggttaaggg

SEQ ID NO: 339184 - DNA, 12 bp, Artificial Sequence
  Oligonucleotide primer for the detection of SNP TSC0040888
aaaatttttata

SEQ ID NO: 339185 - DNA, 12 bp, Artificial Sequence
  Oligonucleotide primer for the detection of SNP TSC0040888
agttagaataat

SEQ ID NO: 339186 - DNA, 12 bp, Artificial Sequence
  Oligonucleotide primer for the detection of SNP TSC0040889
aaaacaccaaat

SEQ ID NO: 339187 - DNA, 12 bp, Artificial Sequence
  Oligonucleotide primer for the detection of SNP TSC0040889
aaaacaccgaat

SEQ ID NO: 339188 - DNA, 12 bp, Artificial Sequence
  Oligonucleotide primer for the detection of SNP TSC0040889
tggggtttttag

SEQ ID NO: 339189 - DNA, 12 bp, Artificial Sequence
  Oligonucleotide primer for the detection of SNP TSC0040890
aatatacccaaa

SEQ ID NO: 339190 - DNA, 12 bp, Artificial Sequence
  Oligonucleotide primer for the detection of SNP TSC0040890
taaatgtgtttt

SEQ ID NO: 339191 - DNA, 12 bp, Artificial Sequence
  Oligonucleotide primer for the detection of SNP TSC0040890
atgtatttaaat

SEQ ID NO: 339192 - DNA, 12 bp, Artificial Sequence
  Oligonucleotide primer for the detection of SNP TSC0040891
aatttaagaatg

SEQ ID NO: 339193 - DNA, 12 bp, Artificial Sequence
  Oligonucleotide primer for the detection of SNP TSC0040892
ccatatatttct

SEQ ID NO: 339194 - DNA, 12 bp, Artificial Sequence
  Oligonucleotide primer for the detection of SNP TSC0040892
tatataaataaa

SEQ ID NO: 339195 - DNA, 12 bp, Artificial Sequence
  Oligonucleotide primer for the detection of SNP TSC0040893
aaacatataaat

SEQ ID NO: 339196 - DNA, 12 bp, Artificial Sequence
  Oligonucleotide primer for the detection of SNP TSC0040895
actcatcatcct

SEQ ID NO: 339197 - DNA, 12 bp, Artificial Sequence
  Oligonucleotide primer for the detection of SNP TSC0040895
gaaatgatagga

SEQ ID NO: 339198 - DNA, 12 bp, Artificial Sequence
  Oligonucleotide primer for the detection of SNP TSC0040896
tcttactctatt

SEQ ID NO: 339199 - DNA, 12 bp, Artificial Sequence
  Oligonucleotide primer for the detection of SNP TSC0040896
aagtattataga

SEQ ID NO: 339200 - DNA, 12 bp, Artificial Sequence
  Oligonucleotide primer for the detection of SNP TSC0040897
tttatgtgtttt

SEQ ID NO: 339201 - DNA, 12 bp, Artificial Sequence
  Oligonucleotide primer for the detection of SNP TSC0040897
cttatatatctt

SEQ ID NO: 339202 - DNA, 12 bp, Artificial Sequence
  Oligonucleotide primer for the detection of SNP TSC0040897
tgatgttaaaga

SEQ ID NO: 339203 - DNA, 12 bp, Artificial Sequence
  Oligonucleotide primer for the detection of SNP TSC0040898
cttacccatcat

SEQ ID NO: 339204 - DNA, 12 bp, Artificial Sequence
  Oligonucleotide primer for the detection of SNP TSC0040898
ggatggaggtga

SEQ ID NO: 339205 - DNA, 12 bp, Artificial Sequence
  Oligonucleotide primer for the detection of SNP TSC0040898
ggacggaggtga

SEQ ID NO: 339206 - DNA, 12 bp, Artificial Sequence
  Oligonucleotide primer for the detection of SNP TSC0040899
tttatcctacac

SEQ ID NO: 339207 - DNA, 12 bp, Artificial Sequence
  Oligonucleotide primer for the detection of SNP TSC0040899
ttttgaagggga

SEQ ID NO: 339208 - DNA, 12 bp, Artificial Sequence
  Oligonucleotide primer for the detection of SNP TSC0040901
gtttttgaggtg

SEQ ID NO: 339209 - DNA, 12 bp, Artificial Sequence
  Oligonucleotide primer for the detection of SNP TSC0040901
atctctaaaata

SEQ ID NO: 339210 - DNA, 12 bp, Artificial Sequence
  Oligonucleotide primer for the detection of SNP TSC0040901
ggtgaaaagtat

SEQ ID NO: 339211 - DNA, 12 bp, Artificial Sequence
  Oligonucleotide primer for the detection of SNP TSC0000763
aatccaaaacat

SEQ ID NO: 339212 - DNA, 12 bp, Artificial Sequence
  Oligonucleotide primer for the detection of SNP TSC0000763
gatgttatataa

SEQ ID NO: 339213 - DNA, 12 bp, Artificial Sequence
  Oligonucleotide primer for the detection of SNP TSC0000763
aataccacataa

SEQ ID NO: 339214 - DNA, 12 bp, Artificial Sequence
  Oligonucleotide primer for the detection of SNP TSC0000763
aatttaggatat

SEQ ID NO: 339215 - DNA, 12 bp, Artificial Sequence
  Oligonucleotide primer for the detection of SNP TSC0040905
cccattactctc

SEQ ID NO: 339216 - DNA, 12 bp, Artificial Sequence
  Oligonucleotide primer for the detection of SNP TSC0040905
agtaaaggggta

SEQ ID NO: 339217 - DNA, 12 bp, Artificial Sequence
  Oligonucleotide primer for the detection of SNP TSC0040906
accaacacaacc

SEQ ID NO: 339218 - DNA, 12 bp, Artificial Sequence
  Oligonucleotide primer for the detection of SNP TSC0040907
accattttctac

SEQ ID NO: 339219 - DNA, 12 bp, Artificial Sequence
  Oligonucleotide primer for the detection of SNP TSC0040907
gaaaattaggaa

SEQ ID NO: 339220 - DNA, 12 bp, Artificial Sequence
  Oligonucleotide primer for the detection of SNP TSC0040908
aatcattataaa

SEQ ID NO: 339221 - DNA, 12 bp, Artificial Sequence
  Oligonucleotide primer for the detection of SNP TSC0040908
tatacaactatt

SEQ ID NO: 339222 - DNA, 12 bp, Artificial Sequence
  Oligonucleotide primer for the detection of SNP TSC0040908
aattattatggg

SEQ ID NO: 339223 - DNA, 12 bp, Artificial Sequence
  Oligonucleotide primer for the detection of SNP TSC0040909
tatttataaata

SEQ ID NO: 339224 - DNA, 12 bp, Artificial Sequence
  Oligonucleotide primer for the detection of SNP TSC0040909
acacctttccac

SEQ ID NO: 339225 - DNA, 12 bp, Artificial Sequence
  Oligonucleotide primer for the detection of SNP TSC0040909
tatttgtaggtg

SEQ ID NO: 339226 - DNA, 12 bp, Artificial Sequence
  Oligonucleotide primer for the detection of SNP TSC0040910
ccacctacaaat

SEQ ID NO: 339227 - DNA, 12 bp, Artificial Sequence
  Oligonucleotide primer for the detection of SNP TSC0040910
attggatatata

SEQ ID NO: 339228 - DNA, 12 bp, Artificial Sequence
  Oligonucleotide primer for the detection of SNP TSC0004539
aactaattatac

SEQ ID NO: 339229 - DNA, 12 bp, Artificial Sequence
  Oligonucleotide primer for the detection of SNP TSC0004539
attgaaaattta

SEQ ID NO: 339230 - DNA, 12 bp, Artificial Sequence
  Oligonucleotide primer for the detection of SNP TSC0040911
caactatactaa

SEQ ID NO: 339231 - DNA, 12 bp, Artificial Sequence
  Oligonucleotide primer for the detection of SNP TSC0040911
tggagtatatat

SEQ ID NO: 339232 - DNA, 12 bp, Artificial Sequence
  Oligonucleotide primer for the detection of SNP TSC0040911
gataattgtgtt

SEQ ID NO: 339233 - DNA, 12 bp, Artificial Sequence
  Oligonucleotide primer for the detection of SNP TSC0040912
taatttatttcc

SEQ ID NO: 339234 - DNA, 12 bp, Artificial Sequence
  Oligonucleotide primer for the detection of SNP TSC0040912
tatagaatatta

SEQ ID NO: 339235 - DNA, 12 bp, Artificial Sequence
  Oligonucleotide primer for the detection of SNP TSC0009891
taaaaaacattt

SEQ ID NO: 339236 - DNA, 12 bp, Artificial Sequence
  Oligonucleotide primer for the detection of SNP TSC0009891
agataataaatg

SEQ ID NO: 339237 - DNA, 12 bp, Artificial Sequence
  Oligonucleotide primer for the detection of SNP TSC0040913
attcaaatccct

SEQ ID NO: 339238 - DNA, 12 bp, Artificial Sequence
  Oligonucleotide primer for the detection of SNP TSC0040913
taaggagttaga

SEQ ID NO: 339239 - DNA, 12 bp, Artificial Sequence
  Oligonucleotide primer for the detection of SNP TSC0040914
ataatcaacccc

SEQ ID NO: 339240 - DNA, 12 bp, Artificial Sequence
  Oligonucleotide primer for the detection of SNP TSC0040914
gtaggtttggag

SEQ ID NO: 339241 - DNA, 12 bp, Artificial Sequence
  Oligonucleotide primer for the detection of SNP TSC0040914
atgattagtttt

SEQ ID NO: 339242 - DNA, 12 bp, Artificial Sequence
  Oligonucleotide primer for the detection of SNP TSC0040915
cactttataatt

SEQ ID NO: 339243 - DNA, 12 bp, Artificial Sequence
  Oligonucleotide primer for the detection of SNP TSC0040915
agtgttagatga

SEQ ID NO: 339244 - DNA, 12 bp, Artificial Sequence
  Oligonucleotide primer for the detection of SNP TSC0040915
agtgttagacga

SEQ ID NO: 339245 - DNA, 12 bp, Artificial Sequence
  Oligonucleotide primer for the detection of SNP TSC0040916
ctcacacacaca

SEQ ID NO: 339246 - DNA, 12 bp, Artificial Sequence
  Oligonucleotide primer for the detection of SNP TSC0040916
taaatggagtgt

SEQ ID NO: 339247 - DNA, 12 bp, Artificial Sequence
  Oligonucleotide primer for the detection of SNP TSC0040917
gaggtttgggtt

SEQ ID NO: 339248 - DNA, 12 bp, Artificial Sequence
  Oligonucleotide primer for the detection of SNP TSC0040917
aaacttaaatca

SEQ ID NO: 339249 - DNA, 12 bp, Artificial Sequence
  Oligonucleotide primer for the detection of SNP TSC0040917
aagatttatttt

SEQ ID NO: 339250 - DNA, 12 bp, Artificial Sequence
  Oligonucleotide primer for the detection of SNP TSC0009802
aaacttatatct

SEQ ID NO: 339251 - DNA, 12 bp, Artificial Sequence
  Oligonucleotide primer for the detection of SNP TSC0009802
atatttaattta

SEQ ID NO: 339252 - DNA, 12 bp, Artificial Sequence
  Oligonucleotide primer for the detection of SNP TSC0007697
attcaaaatatt

SEQ ID NO: 339253 - DNA, 12 bp, Artificial Sequence
  Oligonucleotide primer for the detection of SNP TSC0007697
gaattatttagg

SEQ ID NO: 339254 - DNA, 12 bp, Artificial Sequence
  Oligonucleotide primer for the detection of SNP TSC0040919
ctatctattttc

SEQ ID NO: 339255 - DNA, 12 bp, Artificial Sequence
  Oligonucleotide primer for the detection of SNP TSC0040919
ggaggtagtttg

SEQ ID NO: 339256 - DNA, 12 bp, Artificial Sequence
  Oligonucleotide primer for the detection of SNP TSC0040920
taataaatcatt

SEQ ID NO: 339257 - DNA, 12 bp, Artificial Sequence
  Oligonucleotide primer for the detection of SNP TSC0040920
ttataggtatta

SEQ ID NO: 339258 - DNA, 12 bp, Artificial Sequence
  Oligonucleotide primer for the detection of SNP TSC0006348
cactcatctata

SEQ ID NO: 339259 - DNA, 12 bp, Artificial Sequence
  Oligonucleotide primer for the detection of SNP TSC0006348
cactcgtctata

SEQ ID NO: 339260 - DNA, 12 bp, Artificial Sequence
  Oligonucleotide primer for the detection of SNP TSC0006348
ataattaaaata

SEQ ID NO: 339261 - DNA, 12 bp, Artificial Sequence
  Oligonucleotide primer for the detection of SNP TSC0006348
ataactaaaata

SEQ ID NO: 339262 - DNA, 12 bp, Artificial Sequence
  Oligonucleotide primer for the detection of SNP TSC0006348
ttatttgtttat

SEQ ID NO: 339263 - DNA, 12 bp, Artificial Sequence
  Oligonucleotide primer for the detection of SNP TSC0006348
ttattcgtttat

SEQ ID NO: 339264 - DNA, 12 bp, Artificial Sequence
  Oligonucleotide primer for the detection of SNP TSC0040922
ttcctatacaaa

SEQ ID NO: 339265 - DNA, 12 bp, Artificial Sequence
  Oligonucleotide primer for the detection of SNP TSC0040922
atttatagtttt

SEQ ID NO: 339266 - DNA, 12 bp, Artificial Sequence
  Oligonucleotide primer for the detection of SNP TSC0040922
actcacaattct

SEQ ID NO: 339267 - DNA, 12 bp, Artificial Sequence
  Oligonucleotide primer for the detection of SNP TSC0040922
tttttgtatagg

SEQ ID NO: 339268 - DNA, 12 bp, Artificial Sequence
  Oligonucleotide primer for the detection of SNP TSC0040924
aaactaaatacc

SEQ ID NO: 339269 - DNA, 12 bp, Artificial Sequence
  Oligonucleotide primer for the detection of SNP TSC0040924
ttttgaataaga

SEQ ID NO: 339270 - DNA, 12 bp, Artificial Sequence
  Oligonucleotide primer for the detection of SNP TSC0040925
tctaatctataa

SEQ ID NO: 339271 - DNA, 12 bp, Artificial Sequence
  Oligonucleotide primer for the detection of SNP TSC0040925
gtttatttgtta

SEQ ID NO: 339272 - DNA, 12 bp, Artificial Sequence
  Oligonucleotide primer for the detection of SNP TSC0040925
cccacttaccaa

SEQ ID NO: 339273 - DNA, 12 bp, Artificial Sequence
  Oligonucleotide primer for the detection of SNP TSC0040926
aaattacccaat

SEQ ID NO: 339274 - DNA, 12 bp, Artificial Sequence
  Oligonucleotide primer for the detection of SNP TSC0040926
agatatatttga

SEQ ID NO: 339275 - DNA, 12 bp, Artificial Sequence
  Oligonucleotide primer for the detection of SNP TSC0040927
aagtagttatag

SEQ ID NO: 339276 - DNA, 12 bp, Artificial Sequence
  Oligonucleotide primer for the detection of SNP TSC0006781
acaataatccac

SEQ ID NO: 339277 - DNA, 12 bp, Artificial Sequence
  Oligonucleotide primer for the detection of SNP TSC0006781
attgttattgag

SEQ ID NO: 339278 - DNA, 12 bp, Artificial Sequence
  Oligonucleotide primer for the detection of SNP TSC0006781
attgttatcgag

SEQ ID NO: 339279 - DNA, 12 bp, Artificial Sequence
  Oligonucleotide primer for the detection of SNP TSC0040928
aaattaataacc

SEQ ID NO: 339280 - DNA, 12 bp, Artificial Sequence
  Oligonucleotide primer for the detection of SNP TSC0040929
tttttgaatttg

SEQ ID NO: 339281 - DNA, 12 bp, Artificial Sequence
  Oligonucleotide primer for the detection of SNP TSC0040930
ataaattatctt

SEQ ID NO: 339282 - DNA, 12 bp, Artificial Sequence
  Oligonucleotide primer for the detection of SNP TSC0040930
atttattatata

SEQ ID NO: 339283 - DNA, 12 bp, Artificial Sequence
  Oligonucleotide primer for the detection of SNP TSC0040930
actcattacata

SEQ ID NO: 339284 - DNA, 12 bp, Artificial Sequence
  Oligonucleotide primer for the detection of SNP TSC0040931
tacttacaattc

SEQ ID NO: 339285 - DNA, 12 bp, Artificial Sequence
  Oligonucleotide primer for the detection of SNP TSC0040931
ttaaatattgaa

SEQ ID NO: 339286 - DNA, 12 bp, Artificial Sequence
  Oligonucleotide primer for the detection of SNP TSC0040932
tattacttttac

SEQ ID NO: 339287 - DNA, 12 bp, Artificial Sequence
  Oligonucleotide primer for the detection of SNP TSC0007278
caactaaatcca

SEQ ID NO: 339288 - DNA, 12 bp, Artificial Sequence
  Oligonucleotide primer for the detection of SNP TSC0007278
aagggagttttt

SEQ ID NO: 339289 - DNA, 12 bp, Artificial Sequence
  Oligonucleotide primer for the detection of SNP TSC0007278
aaaaaaatttcc

SEQ ID NO: 339290 - DNA, 12 bp, Artificial Sequence
  Oligonucleotide primer for the detection of SNP TSC0007278
tagttgaattta

SEQ ID NO: 339291 - DNA, 12 bp, Artificial Sequence
  Oligonucleotide primer for the detection of SNP TSC0007279
aactccctttca

SEQ ID NO: 339292 - DNA, 12 bp, Artificial Sequence
  Oligonucleotide primer for the detection of SNP TSC0007279
aactccctttcg

SEQ ID NO: 339293 - DNA, 12 bp, Artificial Sequence
  Oligonucleotide primer for the detection of SNP TSC0007279
ctattaaccccc

SEQ ID NO: 339294 - DNA, 12 bp, Artificial Sequence
  Oligonucleotide primer for the detection of SNP TSC0007279
aattttttttcg

SEQ ID NO: 339295 - DNA, 12 bp, Artificial Sequence
  Oligonucleotide primer for the detection of SNP TSC0040933
tttaaaaaccat

SEQ ID NO: 339296 - DNA, 12 bp, Artificial Sequence
  Oligonucleotide primer for the detection of SNP TSC0040934
tttaccaaaatt

SEQ ID NO: 339297 - DNA, 12 bp, Artificial Sequence
  Oligonucleotide primer for the detection of SNP TSC0040934
aataattaattg

SEQ ID NO: 339298 - DNA, 12 bp, Artificial Sequence
  Oligonucleotide primer for the detection of SNP TSC0040935
taattatataat

SEQ ID NO: 339299 - DNA, 12 bp, Artificial Sequence
  Oligonucleotide primer for the detection of SNP TSC0040935
ttgatttattaa

SEQ ID NO: 339300 - DNA, 12 bp, Artificial Sequence
  Oligonucleotide primer for the detection of SNP TSC0040938
caacccaccaaa

SEQ ID NO: 339301 - DNA, 12 bp, Artificial Sequence
  Oligonucleotide primer for the detection of SNP TSC0040938
caacccaccgaa

SEQ ID NO: 339302 - DNA, 12 bp, Artificial Sequence
  Oligonucleotide primer for the detection of SNP TSC0040938
caacccgccaaa

SEQ ID NO: 339303 - DNA, 12 bp, Artificial Sequence
  Oligonucleotide primer for the detection of SNP TSC0040938
caacccgccgaa

SEQ ID NO: 339304 - DNA, 12 bp, Artificial Sequence
  Oligonucleotide primer for the detection of SNP TSC0040938
tgtaggtggggt

SEQ ID NO: 339305 - DNA, 12 bp, Artificial Sequence
  Oligonucleotide primer for the detection of SNP TSC0040938
cgtaggtggggt

SEQ ID NO: 339306 - DNA, 12 bp, Artificial Sequence
  Oligonucleotide primer for the detection of SNP TSC0040938
tgtaggcggggt

SEQ ID NO: 339307 - DNA, 12 bp, Artificial Sequence
  Oligonucleotide primer for the detection of SNP TSC0040938
tgtaggtggggc

SEQ ID NO: 339308 - DNA, 12 bp, Artificial Sequence
  Oligonucleotide primer for the detection of SNP TSC0040938
cgtaggcggggt

SEQ ID NO: 339309 - DNA, 12 bp, Artificial Sequence
  Oligonucleotide primer for the detection of SNP TSC0040938
cgtaggtggggc

SEQ ID NO: 339310 - DNA, 12 bp, Artificial Sequence
  Oligonucleotide primer for the detection of SNP TSC0040938
tgtaggcggggc

SEQ ID NO: 339311 - DNA, 12 bp, Artificial Sequence
  Oligonucleotide primer for the detection of SNP TSC0040938
cgtaggcggggc

SEQ ID NO: 339312 - DNA, 12 bp, Artificial Sequence
  Oligonucleotide primer for the detection of SNP TSC0040938
cacaaacaaaac

SEQ ID NO: 339313 - DNA, 12 bp, Artificial Sequence
  Oligonucleotide primer for the detection of SNP TSC0040938
cacaaacgaaac

SEQ ID NO: 339314 - DNA, 12 bp, Artificial Sequence
  Oligonukleotid-Primer
cgcaaacaaaac

SEQ ID NO: 339315 - DNA, 12 bp, Artificial Sequence
  Oligonucleotide primer for the detection of SNP TSC0040938
cgcaaacgaaac

SEQ ID NO: 339316 - DNA, 12 bp, Artificial Sequence
  Oligonucleotide primer for the detection of SNP TSC0040938
tagttcgttggg

SEQ ID NO: 339317 - DNA, 12 bp, Artificial Sequence
  Oligonucleotide primer for the detection of SNP TSC0040938
tagtttgtcggg

SEQ ID NO: 339318 - DNA, 12 bp, Artificial Sequence
  Oligonucleotide primer for the detection of SNP TSC0040938
tagttcgtcggg

SEQ ID NO: 339319 - DNA, 12 bp, Artificial Sequence
  Oligonucleotide primer for the detection of SNP TSC0040939
aattatatttaa

SEQ ID NO: 339320 - DNA, 12 bp, Artificial Sequence
  Oligonucleotide primer for the detection of SNP TSC0040940
taattagggtaa

SEQ ID NO: 339321 - DNA, 12 bp, Artificial Sequence
  Oligonucleotide primer for the detection of SNP TSC0040941
ttctactattta

SEQ ID NO: 339322 - DNA, 12 bp, Artificial Sequence
  Oligonucleotide primer for the detection of SNP TSC0040941
tattctaccaac

SEQ ID NO: 339323 - DNA, 12 bp, Artificial Sequence
  Oligonucleotide primer for the detection of SNP TSC0040942
acaccaaacccc

SEQ ID NO: 339324 - DNA, 12 bp, Artificial Sequence
  Oligonucleotide primer for the detection of SNP TSC0040942
gtaggattagag

SEQ ID NO: 339325 - DNA, 12 bp, Artificial Sequence
  Oligonucleotide primer for the detection of SNP TSC0040942
gtattaagtttt

SEQ ID NO: 339326 - DNA, 12 bp, Artificial Sequence
  Oligonucleotide primer for the detection of SNP TSC0040942
gtattaagtttc

SEQ ID NO: 339327 - DNA, 12 bp, Artificial Sequence
  Oligonucleotide primer for the detection of SNP TSC0040943
gaatataaaata

SEQ ID NO: 339328 - DNA, 12 bp, Artificial Sequence
  Oligonucleotide primer for the detection of SNP TSC0040943
ttgttttaaaat

SEQ ID NO: 339329 - DNA, 12 bp, Artificial Sequence
  Oligonucleotide primer for the detection of SNP TSC0040944
tacccaaatcat

SEQ ID NO: 339330 - DNA, 12 bp, Artificial Sequence
  Oligonucleotide primer for the detection of SNP TSC0040944
atatttgtgtaa

SEQ ID NO: 339331 - DNA, 12 bp, Artificial Sequence
  Oligonucleotide primer for the detection of SNP TSC0040947
gccaccatacct

SEQ ID NO: 339332 - DNA, 12 bp, Artificial Sequence
  Oligonucleotide primer for the detection of SNP TSC0007103
aaccctttattc

SEQ ID NO: 339333 - DNA, 12 bp, Artificial Sequence
  Oligonucleotide primer for the detection of SNP TSC0007103
ggtgttaataga

SEQ ID NO: 339334 - DNA, 12 bp, Artificial Sequence
  Oligonucleotide primer for the detection of SNP TSC0007104
tattaacaccat

SEQ ID NO: 339335 - DNA, 12 bp, Artificial Sequence
  Oligonucleotide primer for the detection of SNP TSC0007104
gttgttagaaaa

SEQ ID NO: 339336 - DNA, 12 bp, Artificial Sequence
  Oligonucleotide primer for the detection of SNP TSC0007104
tattggtattat

SEQ ID NO: 339337 - DNA, 12 bp, Artificial Sequence
  Oligonucleotide primer for the detection of SNP TSC0040949
taccacattcat

SEQ ID NO: 339338 - DNA, 12 bp, Artificial Sequence
  Oligonucleotide primer for the detection of SNP TSC0040949
taccacgttcat

SEQ ID NO: 339339 - DNA, 12 bp, Artificial Sequence
  Oligonucleotide primer for the detection of SNP TSC0040950
ctccttccctcc

SEQ ID NO: 339340 - DNA, 12 bp, Artificial Sequence
  Oligonucleotide primer for the detection of SNP TSC0040950
tgatttatgagg

SEQ ID NO: 339341 - DNA, 12 bp, Artificial Sequence
  Oligonucleotide primer for the detection of SNP TSC0040950
cgatttatgagg

SEQ ID NO: 339342 - DNA, 12 bp, Artificial Sequence
  Oligonucleotide primer for the detection of SNP TSC0040950
caattcataaaa

SEQ ID NO: 339343 - DNA, 12 bp, Artificial Sequence
  Oligonucleotide primer for the detection of SNP TSC0040950
cgattcataaaa

SEQ ID NO: 339344 - DNA, 12 bp, Artificial Sequence
  Oligonucleotide primer for the detection of SNP TSC0040951
aaattatctata

SEQ ID NO: 339345 - DNA, 12 bp, Artificial Sequence
  Oligonucleotide primer for the detection of SNP TSC0040951
tctaattaactt

SEQ ID NO: 339346 - DNA, 12 bp, Artificial Sequence
  Oligonucleotide primer for the detection of SNP TSC0040951
gaattatttgta

SEQ ID NO: 339347 - DNA, 12 bp, Artificial Sequence
  Oligonucleotide primer for the detection of SNP TSC0040952
acccctaccccc

SEQ ID NO: 339348 - DNA, 12 bp, Artificial Sequence
  Oligonucleotide primer for the detection of SNP TSC0040952
atttatttgtaa

SEQ ID NO: 339349 - DNA, 12 bp, Artificial Sequence
  Oligonucleotide primer for the detection of SNP TSC0040953
cacaaaccaatt

SEQ ID NO: 339350 - DNA, 12 bp, Artificial Sequence
  Oligonucleotide primer for the detection of SNP TSC0040953
tttaagaaataa

SEQ ID NO: 339351 - DNA, 12 bp, Artificial Sequence
  Oligonucleotide primer for the detection of SNP TSC0006719
acctttttaaac

SEQ ID NO: 339352 - DNA, 12 bp, Artificial Sequence
  Oligonucleotide primer for the detection of SNP TSC0006719
attattaataga

SEQ ID NO: 339353 - DNA, 12 bp, Artificial Sequence
  Oligonucleotide primer for the detection of SNP TSC0040956
tctccaaactaa

SEQ ID NO: 339354 - DNA, 12 bp, Artificial Sequence
  Oligonucleotide primer for the detection of SNP TSC0040956
tggtgaggggat

SEQ ID NO: 339355 - DNA, 12 bp, Artificial Sequence
  Oligonucleotide primer for the detection of SNP TSC0040956
tttttaagttga

SEQ ID NO: 339356 - DNA, 12 bp, Artificial Sequence
  Oligonucleotide primer for the detection of SNP TSC0040957
tctatcttaaac

SEQ ID NO: 339357 - DNA, 12 bp, Artificial Sequence
  Oligonucleotide primer for the detection of SNP TSC0040957
agggtatagtat

SEQ ID NO: 339358 - DNA, 12 bp, Artificial Sequence
  Oligonucleotide primer for the detection of SNP TSC0040958
caacttcaatta

SEQ ID NO: 339359 - DNA, 12 bp, Artificial Sequence
  Oligonucleotide primer for the detection of SNP TSC0040958
tttgacgttttt

SEQ ID NO: 339360 - DNA, 12 bp, Artificial Sequence
  Oligonucleotide primer for the detection of SNP TSC0040958
taacatccctaa

SEQ ID NO: 339361 - DNA, 12 bp, Artificial Sequence
  Oligonucleotide primer for the detection of SNP TSC0040958
taacgtccctaa

SEQ ID NO: 339362 - DNA, 12 bp, Artificial Sequence
  Oligonucleotide primer for the detection of SNP TSC0040958
tagttttagttg

SEQ ID NO: 339363 - DNA, 12 bp, Artificial Sequence
  Oligonucleotide primer for the detection of SNP TSC0040959
attttggtagta

SEQ ID NO: 339364 - DNA, 12 bp, Artificial Sequence
  Oligonucleotide primer for the detection of SNP TSC0040964
atcccaatatta

SEQ ID NO: 339365 - DNA, 12 bp, Artificial Sequence
  Oligonucleotide primer for the detection of SNP TSC0040964
taaaagaaagat

SEQ ID NO: 339366 - DNA, 12 bp, Artificial Sequence
  Oligonucleotide primer for the detection of SNP TSC0040967
acccaaaccaat

SEQ ID NO: 339367 - DNA, 12 bp, Artificial Sequence
  Oligonucleotide primer for the detection of SNP TSC0040968
cttctctctttt

SEQ ID NO: 339368 - DNA, 12 bp, Artificial Sequence
  Oligonucleotide primer for the detection of SNP TSC0040968
agggttatttta

SEQ ID NO: 339369 - DNA, 12 bp, Artificial Sequence
  Oligonucleotide primer for the detection of SNP TSC0040970
ataaaaaaacca

SEQ ID NO: 339370 - DNA, 12 bp, Artificial Sequence
  Oligonucleotide primer for the detection of SNP TSC0040970
taatgttttaat

SEQ ID NO: 339371 - DNA, 12 bp, Artificial Sequence
  Oligonucleotide primer for the detection of SNP TSC0040970
taatgttttaac

SEQ ID NO: 339372 - DNA, 12 bp, Artificial Sequence
  Oligonucleotide primer for the detection of SNP TSC0040970
tcaatactccaa

SEQ ID NO: 339373 - DNA, 12 bp, Artificial Sequence
  Oligonucleotide primer for the detection of SNP TSC0040970
atgagaagatta

SEQ ID NO: 339374 - DNA, 12 bp, Artificial Sequence
  Oligonucleotide primer for the detection of SNP TSC0040971
tgtgaaaagatt

SEQ ID NO: 339375 - DNA, 12 bp, Artificial Sequence
  Oligonucleotide primer for the detection of SNP TSC0040971
ataaaaaaacta

SEQ ID NO: 339376 - DNA, 12 bp, Artificial Sequence
  Oligonucleotide primer for the detection of SNP TSC0040971
ggttaagttatt

SEQ ID NO: 339377 - DNA, 12 bp, Artificial Sequence
  Oligonucleotide primer for the detection of SNP TSC0040972
ctcactctaaaa

SEQ ID NO: 339378 - DNA, 12 bp, Artificial Sequence
  Oligonucleotide primer for the detection of SNP TSC0040972
ttgtttcgaatt

SEQ ID NO: 339379 - DNA, 12 bp, Artificial Sequence
  Oligonucleotide primer for the detection of SNP TSC0040972
ctacctcaaatc

SEQ ID NO: 339380 - DNA, 12 bp, Artificial Sequence
  Oligonucleotide primer for the detection of SNP TSC0040972
ctacctcgaatc

SEQ ID NO: 339381 - DNA, 12 bp, Artificial Sequence
  Oligonucleotide primer for the detection of SNP TSC0040972
tttattttgaaa

SEQ ID NO: 339382 - DNA, 12 bp, Artificial Sequence
  Oligonucleotide primer for the detection of SNP TSC0040973
atcatctaaaac

SEQ ID NO: 339383 - DNA, 12 bp, Artificial Sequence
  Oligonucleotide primer for the detection of SNP TSC0040973
tggtagaggaag

SEQ ID NO: 339384 - DNA, 12 bp, Artificial Sequence
  Oligonucleotide primer for the detection of SNP TSC0040979
ataagataatta

SEQ ID NO: 339385 - DNA, 12 bp, Artificial Sequence
  Oligonucleotide primer for the detection of SNP TSC0040981
ttattttatagg

SEQ ID NO: 339386 - DNA, 12 bp, Artificial Sequence
  Oligonucleotide primer for the detection of SNP TSC0040982
ctaaaaaactac

SEQ ID NO: 339387 - DNA, 12 bp, Artificial Sequence
  Oligonucleotide primer for the detection of SNP TSC0040982
ttttgtttaaat

SEQ ID NO: 339388 - DNA, 12 bp, Artificial Sequence
  Oligonucleotide primer for the detection of SNP TSC0040982
ctctactcaaat

SEQ ID NO: 339389 - DNA, 12 bp, Artificial Sequence
  Oligonucleotide primer for the detection of SNP TSC0040982
ttgaggagttat

SEQ ID NO: 339390 - DNA, 12 bp, Artificial Sequence
  Oligonucleotide primer for the detection of SNP TSC0040983
tctatatctcta

SEQ ID NO: 339391 - DNA, 12 bp, Artificial Sequence
  Oligonucleotide primer for the detection of SNP TSC0040983
gtttaaatggta

SEQ ID NO: 339392 - DNA, 12 bp, Artificial Sequence
  Oligonucleotide primer for the detection of SNP TSC0040984
tattcaataata

SEQ ID NO: 339393 - DNA, 12 bp, Artificial Sequence
  Oligonucleotide primer for the detection of SNP TSC0040984
tgtttagtgatg

SEQ ID NO: 339394 - DNA, 12 bp, Artificial Sequence
  Oligonucleotide primer for the detection of SNP TSC0010634
catatatttatt

SEQ ID NO: 339395 - DNA, 12 bp, Artificial Sequence
  Oligonucleotide primer for the detection of SNP TSC0010634
tgtaaatgagag

SEQ ID NO: 339396 - DNA, 12 bp, Artificial Sequence
  Oligonucleotide primer for the detection of SNP TSC0009032
atatgtattttt

SEQ ID NO: 339397 - DNA, 12 bp, Artificial Sequence
  Oligonucleotide primer for the detection of SNP TSC0009032
catacattctta

SEQ ID NO: 339398 - DNA, 12 bp, Artificial Sequence
  Oligonucleotide primer for the detection of SNP TSC0009032
aaaaaaagtaat

SEQ ID NO: 339399 - DNA, 12 bp, Artificial Sequence
  Oligonucleotide primer for the detection of SNP TSC0040985
taattttaaccc

SEQ ID NO: 339400 - DNA, 12 bp, Artificial Sequence
  Oligonucleotide primer for the detection of SNP TSC0040986
atatatttatgg

SEQ ID NO: 339401 - DNA, 12 bp, Artificial Sequence
  Oligonucleotide primer for the detection of SNP TSC0040987
tctaaattttct

SEQ ID NO: 339402 - DNA, 12 bp, Artificial Sequence
  Oligonucleotide primer for the detection of SNP TSC0040987
tgaagaaatgga

SEQ ID NO: 339403 - DNA, 12 bp, Artificial Sequence
  Oligonucleotide primer for the detection of SNP TSC0040988
ttcataacactt

SEQ ID NO: 339404 - DNA, 12 bp, Artificial Sequence
  Oligonucleotide primer for the detection of SNP TSC0040988
gattagtgatga

SEQ ID NO: 339405 - DNA, 12 bp, Artificial Sequence
  Oligonucleotide primer for the detection of SNP TSC0040989
tatttcataaca

SEQ ID NO: 339406 - DNA, 12 bp, Artificial Sequence
  Oligonucleotide primer for the detection of SNP TSC0040989
tagtgatgatga

SEQ ID NO: 339407 - DNA, 12 bp, Artificial Sequence
  Oligonucleotide primer for the detection of SNP TSC0040989
attttatggtat

SEQ ID NO: 339408 - DNA, 12 bp, Artificial Sequence
  Oligonucleotide primer for the detection of SNP TSC0040989
attttatggtac

SEQ ID NO: 339409 - DNA, 12 bp, Artificial Sequence
  unsure (2): Oligonucleotide primer for the detection of SNP TSC0040990
tncaaaaccttc

SEQ ID NO: 339410 - DNA, 12 bp, Artificial Sequence
  Oligonucleotide primer for the detection of SNP TSC0040990
tgtaatttttaa

SEQ ID NO: 339411 - DNA, 12 bp, Artificial Sequence
  Oligonucleotide primer for the detection of SNP TSC0040991
ttaatttaacaa

SEQ ID NO: 339412 - DNA, 12 bp, Artificial Sequence
  Oligonucleotide primer for the detection of SNP TSC0040991
aattctaactat

SEQ ID NO: 339413 - DNA, 12 bp, Artificial Sequence
  Oligonucleotide primer for the detection of SNP TSC0040991
ttagtttggtaa

SEQ ID NO: 339414 - DNA, 12 bp, Artificial Sequence
  Oligonucleotide primer for the detection of SNP TSC0040992
ataaattttcaa

SEQ ID NO: 339415 - DNA, 12 bp, Artificial Sequence
  Oligonucleotide primer for the detection of SNP TSC0040992
actctcaatctt

SEQ ID NO: 339416 - DNA, 12 bp, Artificial Sequence
  Oligonucleotide primer for the detection of SNP TSC0040992
atggatttttaa

SEQ ID NO: 339417 - DNA, 12 bp, Artificial Sequence
  Oligonucleotide primer for the detection of SNP TSC0040993
aatggattttta

SEQ ID NO: 339418 - DNA, 12 bp, Artificial Sequence
  Oligonucleotide primer for the detection of SNP TSC0008831
tttttctcccac

SEQ ID NO: 339419 - DNA, 12 bp, Artificial Sequence
  Oligonucleotide primer for the detection of SNP TSC0008831
aggtgattagag

SEQ ID NO: 339420 - DNA, 12 bp, Artificial Sequence
  Oligonucleotide primer for the detection of SNP TSC0040996
ttcactcttatt

SEQ ID NO: 339421 - DNA, 12 bp, Artificial Sequence
  Oligonucleotide primer for the detection of SNP TSC0040996
attgtagtttgg

SEQ ID NO: 339422 - DNA, 12 bp, Artificial Sequence
  Oligonucleotide primer for the detection of SNP TSC0040997
ttatttatacac

SEQ ID NO: 339423 - DNA, 12 bp, Artificial Sequence
  Oligonucleotide primer for the detection of SNP TSC0040997
tatataatagta

SEQ ID NO: 339424 - DNA, 12 bp, Artificial Sequence
  Oligonucleotide primer for the detection of SNP TSC0040998
attccaaaattt

SEQ ID NO: 339425 - DNA, 12 bp, Artificial Sequence
  Oligonucleotide primer for the detection of SNP TSC0040998
attccgaaattt

SEQ ID NO: 339426 - DNA, 12 bp, Artificial Sequence
  Oligonucleotide primer for the detection of SNP TSC0040998
agggagaaggta

SEQ ID NO: 339427 - DNA, 12 bp, Artificial Sequence
  Oligonucleotide primer for the detection of SNP TSC0040999
ctattatttaaa

SEQ ID NO: 339428 - DNA, 12 bp, Artificial Sequence
  Oligonucleotide primer for the detection of SNP TSC0040999
tttgaaataaat

SEQ ID NO: 339429 - DNA, 12 bp, Artificial Sequence
  Oligonucleotide primer for the detection of SNP TSC0041000
attagagagatg

SEQ ID NO: 339430 - DNA, 12 bp, Artificial Sequence
  Oligonucleotide primer for the detection of SNP TSC0041001
caactataccac

SEQ ID NO: 339431 - DNA, 12 bp, Artificial Sequence
  Oligonucleotide primer for the detection of SNP TSC0041001
aagatgtttatg

SEQ ID NO: 339432 - DNA, 12 bp, Artificial Sequence
  Oligonucleotide primer for the detection of SNP TSC0041002
taaataaaaccc

SEQ ID NO: 339433 - DNA, 12 bp, Artificial Sequence
  Oligonucleotide primer for the detection of SNP TSC0041002
aaattggatttg

SEQ ID NO: 339434 - DNA, 12 bp, Artificial Sequence
  Oligonucleotide primer for the detection of SNP TSC0041003
aataaactccac

SEQ ID NO: 339435 - DNA, 12 bp, Artificial Sequence
  Oligonucleotide primer for the detection of SNP TSC0041003
tagtgtggtttt

SEQ ID NO: 339436 - DNA, 12 bp, Artificial Sequence
  Oligonucleotide primer for the detection of SNP TSC0041003
caatataatttt

SEQ ID NO: 339437 - DNA, 12 bp, Artificial Sequence
  Oligonucleotide primer for the detection of SNP TSC0041003
agtaaattttat

SEQ ID NO: 339438 - DNA, 12 bp, Artificial Sequence
  Oligonucleotide primer for the detection of SNP TSC0041004
tttctcttttta

SEQ ID NO: 339439 - DNA, 12 bp, Artificial Sequence
  Oligonucleotide primer for the detection of SNP TSC0041004
aagaaaaattat

SEQ ID NO: 339440 - DNA, 12 bp, Artificial Sequence
  Oligonucleotide primer for the detection of SNP TSC0041005
aacaaaacctca

SEQ ID NO: 339441 - DNA, 12 bp, Artificial Sequence
  Oligonucleotide primer for the detection of SNP TSC0041005
aatagggtttta

SEQ ID NO: 339442 - DNA, 12 bp, Artificial Sequence
  Oligonucleotide primer for the detection of SNP TSC0041006
atctatatctta

SEQ ID NO: 339443 - DNA, 12 bp, Artificial Sequence
  Oligonucleotide primer for the detection of SNP TSC0041006
ttttgttaaaaa

SEQ ID NO: 339444 - DNA, 12 bp, Artificial Sequence
  Oligonucleotide primer for the detection of SNP TSC0041006
tgtttgtgtttt

SEQ ID NO: 339445 - DNA, 12 bp, Artificial Sequence
  Oligonucleotide primer for the detection of SNP TSC0041007
taaattaaatcc

SEQ ID NO: 339446 - DNA, 12 bp, Artificial Sequence
  Oligonucleotide primer for the detection of SNP TSC0041007
ttaattattttt

SEQ ID NO: 339447 - DNA, 12 bp, Artificial Sequence
  Oligonucleotide primer for the detection of SNP TSC0041007
aatcattcttaa

SEQ ID NO: 339448 - DNA, 12 bp, Artificial Sequence
  Oligonucleotide primer for the detection of SNP TSC0041007
tgaattaaattt

SEQ ID NO: 339449 - DNA, 12 bp, Artificial Sequence
  Oligonucleotide primer for the detection of SNP TSC0041008
atttttatcatt

SEQ ID NO: 339450 - DNA, 12 bp, Artificial Sequence
  Oligonucleotide primer for the detection of SNP TSC0041009
ctcatctatcca

SEQ ID NO: 339451 - DNA, 12 bp, Artificial Sequence
  Oligonucleotide primer for the detection of SNP TSC0041009
taaaaatttccc

SEQ ID NO: 339452 - DNA, 12 bp, Artificial Sequence
  Oligonucleotide primer for the detection of SNP TSC0041010
atatcttttttt

SEQ ID NO: 339453 - DNA, 12 bp, Artificial Sequence
  Oligonucleotide primer for the detection of SNP TSC0041010
aagtgtataggt

SEQ ID NO: 339454 - DNA, 12 bp, Artificial Sequence
  Oligonucleotide primer for the detection of SNP TSC0041012
caatccttatat

SEQ ID NO: 339455 - DNA, 12 bp, Artificial Sequence
  Oligonucleotide primer for the detection of SNP TSC0041012
agatatttttag

SEQ ID NO: 339456 - DNA, 12 bp, Artificial Sequence
  Oligonucleotide primer for the detection of SNP TSC0041014
taaaacaaatac

SEQ ID NO: 339457 - DNA, 12 bp, Artificial Sequence
  Oligonucleotide primer for the detection of SNP TSC0041014
gtaggttggtga

SEQ ID NO: 339458 - DNA, 12 bp, Artificial Sequence
  Oligonucleotide primer for the detection of SNP TSC0041015
ccatttaaatca

SEQ ID NO: 339459 - DNA, 12 bp, Artificial Sequence
  Oligonucleotide primer for the detection of SNP TSC0041015
caacccatttat

SEQ ID NO: 339460 - DNA, 12 bp, Artificial Sequence
  Oligonucleotide primer for the detection of SNP TSC0041015
ttatttgggtta

SEQ ID NO: 339461 - DNA, 12 bp, Artificial Sequence
  Oligonucleotide primer for the detection of SNP TSC0041018
taaatacttttt

SEQ ID NO: 339462 - DNA, 12 bp, Artificial Sequence
  Oligonucleotide primer for the detection of SNP TSC0041019
aattaataaata

SEQ ID NO: 339463 - DNA, 12 bp, Artificial Sequence
  Oligonucleotide primer for the detection of SNP TSC0041019
atggtggtttgt

SEQ ID NO: 339464 - DNA, 12 bp, Artificial Sequence
  Oligonucleotide primer for the detection of SNP TSC0041019
ataataatttac

SEQ ID NO: 339465 - DNA, 12 bp, Artificial Sequence
  Oligonucleotide primer for the detection of SNP TSC0041019
ggttgatgggtg

SEQ ID NO: 339466 - DNA, 12 bp, Artificial Sequence
  Oligonucleotide primer for the detection of SNP TSC0041022
tatcaaaaaaac

SEQ ID NO: 339467 - DNA, 12 bp, Artificial Sequence
  Oligonucleotide primer for the detection of SNP TSC0041022
attttgtggata

SEQ ID NO: 339468 - DNA, 12 bp, Artificial Sequence
  Oligonucleotide primer for the detection of SNP TSC0041022
attttgcggata

SEQ ID NO: 339469 - DNA, 12 bp, Artificial Sequence
  Oligonucleotide primer for the detection of SNP TSC0041023
ctctctcattct

SEQ ID NO: 339470 - DNA, 12 bp, Artificial Sequence
  Oligonucleotide primer for the detection of SNP TSC0041023
tgtgtatatttg

SEQ ID NO: 339471 - DNA, 12 bp, Artificial Sequence
  Oligonucleotide primer for the detection of SNP TSC0041026
cactatatatta

SEQ ID NO: 339472 - DNA, 12 bp, Artificial Sequence
  Oligonucleotide primer for the detection of SNP TSC0041026
attggtagggat

SEQ ID NO: 339473 - DNA, 12 bp, Artificial Sequence
  Oligonucleotide primer for the detection of SNP TSC0041026
attggtagggac

SEQ ID NO: 339474 - DNA, 12 bp, Artificial Sequence
  Oligonucleotide primer for the detection of SNP TSC0041026
attaacaaaaac

SEQ ID NO: 339475 - DNA, 12 bp, Artificial Sequence
  Oligonucleotide primer for the detection of SNP TSC0041026
gtatgttatttt

SEQ ID NO: 339476 - DNA, 12 bp, Artificial Sequence
  Oligonucleotide primer for the detection of SNP TSC0041032
ctctattaccaa

SEQ ID NO: 339477 - DNA, 12 bp, Artificial Sequence
  Oligonucleotide primer for the detection of SNP TSC0041032
attacactccaa

SEQ ID NO: 339478 - DNA, 12 bp, Artificial Sequence
  Oligonucleotide primer for the detection of SNP TSC0041033
ttacattattaa

SEQ ID NO: 339479 - DNA, 12 bp, Artificial Sequence
  Oligonucleotide primer for the detection of SNP TSC0041033
ttaaaagaaaaa

SEQ ID NO: 339480 - DNA, 12 bp, Artificial Sequence
  Oligonucleotide primer for the detection of SNP TSC0041033
ttgtattattaa

SEQ ID NO: 339481 - DNA, 12 bp, Artificial Sequence
  Oligonucleotide primer for the detection of SNP TSC0041037
taatacctaaac

SEQ ID NO: 339482 - DNA, 12 bp, Artificial Sequence
  Oligonucleotide primer for the detection of SNP TSC0041037
ggttataaatgt

SEQ ID NO: 339483 - DNA, 12 bp, Artificial Sequence
  Oligonucleotide primer for the detection of SNP TSC0041037
atcataaatata

SEQ ID NO: 339484 - DNA, 12 bp, Artificial Sequence
  Oligonucleotide primer for the detection of SNP TSC0041037
gtgtttgagttt

SEQ ID NO: 339485 - DNA, 12 bp, Artificial Sequence
  Oligonucleotide primer for the detection of SNP TSC0009241
cccccaaaaaaa

SEQ ID NO: 339486 - DNA, 12 bp, Artificial Sequence
  Oligonucleotide primer for the detection of SNP TSC0009241
tgttaaaatata

SEQ ID NO: 339487 - DNA, 12 bp, Artificial Sequence
  Oligonucleotide primer for the detection of SNP TSC0009242
aattttctaatt

SEQ ID NO: 339488 - DNA, 12 bp, Artificial Sequence
  Oligonucleotide primer for the detection of SNP TSC0009242
ggtaaatgaata

SEQ ID NO: 339489 - DNA, 12 bp, Artificial Sequence
  Oligonucleotide primer for the detection of SNP TSC0009242
aattttttgatt

SEQ ID NO: 339490 - DNA, 12 bp, Artificial Sequence
  Oligonucleotide primer for the detection of SNP TSC0009244
ctcacataacta

SEQ ID NO: 339491 - DNA, 12 bp, Artificial Sequence
  Oligonucleotide primer for the detection of SNP TSC0009244
ttttatataaga

SEQ ID NO: 339492 - DNA, 12 bp, Artificial Sequence
  Oligonucleotide primer for the detection of SNP TSC0009244
tcccacacaaaa

SEQ ID NO: 339493 - DNA, 12 bp, Artificial Sequence
  Oligonucleotide primer for the detection of SNP TSC0009244
tatataattgtt

SEQ ID NO: 339494 - DNA, 12 bp, Artificial Sequence
  Oligonucleotide primer for the detection of SNP TSC0009244
tatataattgtc

SEQ ID NO: 339495 - DNA, 12 bp, Artificial Sequence
  Oligonukleotid-Primer
atttattaaaac

SEQ ID NO: 339496 - DNA, 12 bp, Artificial Sequence
  Oligonucleotide primer for the detection of SNP TSC0041038
gtggtaattatg

SEQ ID NO: 339497 - DNA, 12 bp, Artificial Sequence
  Oligonucleotide primer for the detection of SNP TSC0041040
aaattaataaca

SEQ ID NO: 339498 - DNA, 12 bp, Artificial Sequence
  Oligonucleotide primer for the detection of SNP TSC0041040
attgtaagatgt

SEQ ID NO: 339499 - DNA, 12 bp, Artificial Sequence
  Oligonukleotid-Primer
aagttagtagta

SEQ ID NO: 339500 - DNA, 12 bp, Artificial Sequence
  Oligonucleotide primer for the detection of SNP TSC0041041
aaaaaaacacat

SEQ ID NO: 339501 - DNA, 12 bp, Artificial Sequence
  Oligonucleotide primer for the detection of SNP TSC0041041
ttgtaggatttg

SEQ ID NO: 339502 - DNA, 12 bp, Artificial Sequence
  Oligonucleotide primer for the detection of SNP TSC0041041
tcgtaggatttg

SEQ ID NO: 339503 - DNA, 12 bp, Artificial Sequence
  Oligonucleotide primer for the detection of SNP TSC0041041
tcgcaaaaccta

SEQ ID NO: 339504 - DNA, 12 bp, Artificial Sequence
  Oligonucleotide primer for the detection of SNP TSC0041041
aagaggatatat

SEQ ID NO: 339505 - DNA, 12 bp, Artificial Sequence
  Oligonucleotide primer for the detection of SNP TSC0041044
ttttttaacata

SEQ ID NO: 339506 - DNA, 12 bp, Artificial Sequence
  Oligonucleotide primer for the detection of SNP TSC0041044
gagtataaaaag

SEQ ID NO: 339507 - DNA, 12 bp, Artificial Sequence
  Oligonucleotide primer for the detection of SNP TSC0041045
atcttcccaccc

SEQ ID NO: 339508 - DNA, 12 bp, Artificial Sequence
  Oligonucleotide primer for the detection of SNP TSC0041045
taaaatggtatg

SEQ ID NO: 339509 - DNA, 12 bp, Artificial Sequence
  Oligonucleotide primer for the detection of SNP TSC0041046
taattttataaa

SEQ ID NO: 339510 - DNA, 12 bp, Artificial Sequence
  Oligonucleotide primer for the detection of SNP TSC0041046
cggatatttttt

SEQ ID NO: 339511 - DNA, 12 bp, Artificial Sequence
  Oligonucleotide primer for the detection of SNP TSC0041046
aaacattttcta

SEQ ID NO: 339512 - DNA, 12 bp, Artificial Sequence
  Oligonucleotide primer for the detection of SNP TSC0041046
gaacattttcta

SEQ ID NO: 339513 - DNA, 12 bp, Artificial Sequence
  Oligonucleotide primer for the detection of SNP TSC0041046
tttaattttata

SEQ ID NO: 339514 - DNA, 12 bp, Artificial Sequence
  Oligonucleotide primer for the detection of SNP TSC0041047
ttaacttacaat

SEQ ID NO: 339515 - DNA, 12 bp, Artificial Sequence
  Oligonucleotide primer for the detection of SNP TSC0041047
tttgtggaaatg

SEQ ID NO: 339516 - DNA, 12 bp, Artificial Sequence
  Oligonucleotide primer for the detection of SNP TSC0041047
tttgcggaaatg

SEQ ID NO: 339517 - DNA, 12 bp, Artificial Sequence
  Oligonucleotide primer for the detection of SNP TSC0041048
aatggtatgttt

SEQ ID NO: 339518 - DNA, 12 bp, Artificial Sequence
  Oligonucleotide primer for the detection of SNP TSC0041048
ataacatattta

SEQ ID NO: 339519 - DNA, 12 bp, Artificial Sequence
  Oligonucleotide primer for the detection of SNP TSC0041051
taataatactct

SEQ ID NO: 339520 - DNA, 12 bp, Artificial Sequence
  Oligonucleotide primer for the detection of SNP TSC0041051
gatttattgagg

SEQ ID NO: 339521 - DNA, 12 bp, Artificial Sequence
  Oligonucleotide primer for the detection of SNP TSC0041059
aaactaaaaacc

SEQ ID NO: 339522 - DNA, 12 bp, Artificial Sequence
  Oligonucleotide primer for the detection of SNP TSC0041059
ccctcccaaaaa

SEQ ID NO: 339523 - DNA, 12 bp, Artificial Sequence
  Oligonucleotide primer for the detection of SNP TSC0041059
aggttggaaatt

SEQ ID NO: 339524 - DNA, 12 bp, Artificial Sequence
  Oligonucleotide primer for the detection of SNP TSC0041060
tcacaccaaaaa

SEQ ID NO: 339525 - DNA, 12 bp, Artificial Sequence
  Oligonucleotide primer for the detection of SNP TSC0041060
aggagtatatag

SEQ ID NO: 339526 - DNA, 12 bp, Artificial Sequence
  Oligonucleotide primer for the detection of SNP TSC0041061
aaaacttaattc

SEQ ID NO: 339527 - DNA, 12 bp, Artificial Sequence
  Oligonucleotide primer for the detection of SNP TSC0041062
taaaaaatcatt

SEQ ID NO: 339528 - DNA, 12 bp, Artificial Sequence
  Oligonucleotide primer for the detection of SNP TSC0041062
taaaaaatcgtt

SEQ ID NO: 339529 - DNA, 12 bp, Artificial Sequence
  Oligonucleotide primer for the detection of SNP TSC0041062
ttatttttagga

SEQ ID NO: 339530 - DNA, 12 bp, Artificial Sequence
  Oligonucleotide primer for the detection of SNP TSC0041062
ccacctccaaaa

SEQ ID NO: 339531 - DNA, 12 bp, Artificial Sequence
  Oligonucleotide primer for the detection of SNP TSC0041062
tggagaattgtt

SEQ ID NO: 339532 - DNA, 12 bp, Artificial Sequence
  Oligonucleotide primer for the detection of SNP TSC0041062
tggagaatcgtt

SEQ ID NO: 339533 - DNA, 12 bp, Artificial Sequence
  Oligonucleotide primer for the detection of SNP TSC0041063
atctctaataat

SEQ ID NO: 339534 - DNA, 12 bp, Artificial Sequence
  Oligonucleotide primer for the detection of SNP TSC0041063
ggttgttataag

SEQ ID NO: 339535 - DNA, 12 bp, Artificial Sequence
  Oligonucleotide primer for the detection of SNP TSC0041065
aactataaatct

SEQ ID NO: 339536 - DNA, 12 bp, Artificial Sequence
  Oligonucleotide primer for the detection of SNP TSC0041065
tttatgaagtta

SEQ ID NO: 339537 - DNA, 12 bp, Artificial Sequence
  Oligonucleotide primer for the detection of SNP TSC0041066
ctttacactaca

SEQ ID NO: 339538 - DNA, 12 bp, Artificial Sequence
  Oligonucleotide primer for the detection of SNP TSC0041066
gtgagataagtt

SEQ ID NO: 339539 - DNA, 12 bp, Artificial Sequence
  Oligonucleotide primer for the detection of SNP TSC0041067
caaacacaactt

SEQ ID NO: 339540 - DNA, 12 bp, Artificial Sequence
  Oligonucleotide primer for the detection of SNP TSC0041067
tgagtgtagtgt

SEQ ID NO: 339541 - DNA, 12 bp, Artificial Sequence
  Oligonucleotide primer for the detection of SNP TSC0041067
cgagtgtagtgt

SEQ ID NO: 339542 - DNA, 12 bp, Artificial Sequence
  Oligonucleotide primer for the detection of SNP TSC0041067
caaatacaatac

SEQ ID NO: 339543 - DNA, 12 bp, Artificial Sequence
  Oligonucleotide primer for the detection of SNP TSC0041067
cgaatacaatac

SEQ ID NO: 339544 - DNA, 12 bp, Artificial Sequence
  Oligonucleotide primer for the detection of SNP TSC0041067
tagatatagttt

SEQ ID NO: 339545 - DNA, 12 bp, Artificial Sequence
  Oligonucleotide primer for the detection of SNP TSC0041068
tttcaattactc

SEQ ID NO: 339546 - DNA, 12 bp, Artificial Sequence
  Oligonucleotide primer for the detection of SNP TSC0041068
ttagtaagaatg

SEQ ID NO: 339547 - DNA, 12 bp, Artificial Sequence
  Oligonucleotide primer for the detection of SNP TSC0041068
ttaacaaaaata

SEQ ID NO: 339548 - DNA, 12 bp, Artificial Sequence
  Oligonucleotide primer for the detection of SNP TSC0041068
ttttagttgttt

SEQ ID NO: 339549 - DNA, 12 bp, Artificial Sequence
  Oligonucleotide primer for the detection of SNP TSC0041069
ccaccctaaaca

SEQ ID NO: 339550 - DNA, 12 bp, Artificial Sequence
  Oligonucleotide primer for the detection of SNP TSC0041069
ccaccctaaacg

SEQ ID NO: 339551 - DNA, 12 bp, Artificial Sequence
  Oligonucleotide primer for the detection of SNP TSC0041069
ggagattttggt

SEQ ID NO: 339552 - DNA, 12 bp, Artificial Sequence
  Oligonucleotide primer for the detection of SNP TSC0041069
aaaaattctaat

SEQ ID NO: 339553 - DNA, 12 bp, Artificial Sequence
  Oligonucleotide primer for the detection of SNP TSC0041069
ttattttaggtg

SEQ ID NO: 339554 - DNA, 12 bp, Artificial Sequence
  Oligonucleotide primer for the detection of SNP TSC0041069
ttattttaggcg

SEQ ID NO: 339555 - DNA, 12 bp, Artificial Sequence
  Oligonucleotide primer for the detection of SNP TSC0041070
taattttatgag

SEQ ID NO: 339556 - DNA, 12 bp, Artificial Sequence
  Oligonucleotide primer for the detection of SNP TSC0004850
atacattaaacc

SEQ ID NO: 339557 - DNA, 12 bp, Artificial Sequence
  Oligonucleotide primer for the detection of SNP TSC0041072
tcccacaaatac

SEQ ID NO: 339558 - DNA, 12 bp, Artificial Sequence
  Oligonucleotide primer for the detection of SNP TSC0041072
tcccacgaatac

SEQ ID NO: 339559 - DNA, 12 bp, Artificial Sequence
  Oligonucleotide primer for the detection of SNP TSC0041072
atggagtagatg

SEQ ID NO: 339560 - DNA, 12 bp, Artificial Sequence
  Oligonucleotide primer for the detection of SNP TSC0041073
aaacacaacctt

SEQ ID NO: 339561 - DNA, 12 bp, Artificial Sequence
  Oligonucleotide primer for the detection of SNP TSC0041073
agatttgagtaa

SEQ ID NO: 339562 - DNA, 12 bp, Artificial Sequence
  Oligonucleotide primer for the detection of SNP TSC0041074
acttctcacaca

SEQ ID NO: 339563 - DNA, 12 bp, Artificial Sequence
  Oligonucleotide primer for the detection of SNP TSC0041074
tttgaaaatttt

SEQ ID NO: 339564 - DNA, 12 bp, Artificial Sequence
  Oligonucleotide primer for the detection of SNP TSC0041074
atcctaaaaacc

SEQ ID NO: 339565 - DNA, 12 bp, Artificial Sequence
  Oligonucleotide primer for the detection of SNP TSC0041075
tatccaaaacca

SEQ ID NO: 339566 - DNA, 12 bp, Artificial Sequence
  Oligonucleotide primer for the detection of SNP TSC0041075
gttattaattgt

SEQ ID NO: 339567 - DNA, 12 bp, Artificial Sequence
  Oligonucleotide primer for the detection of SNP TSC0041075
taccatcaatta

SEQ ID NO: 339568 - DNA, 12 bp, Artificial Sequence
  Oligonucleotide primer for the detection of SNP TSC0041075
gtgtttaaggtt

SEQ ID NO: 339569 - DNA, 12 bp, Artificial Sequence
  Oligonucleotide primer for the detection of SNP TSC0041077
tatataacaaaa

SEQ ID NO: 339570 - DNA, 12 bp, Artificial Sequence
  Oligonucleotide primer for the detection of SNP TSC0041077
tatataacgaaa

SEQ ID NO: 339571 - DNA, 12 bp, Artificial Sequence
  Oligonucleotide primer for the detection of SNP TSC0041077
ggataggtgttt

SEQ ID NO: 339572 - DNA, 12 bp, Artificial Sequence
  Oligonucleotide primer for the detection of SNP TSC0041077
tgtgtgatgagg

SEQ ID NO: 339573 - DNA, 12 bp, Artificial Sequence
  Oligonucleotide primer for the detection of SNP TSC0041077
tgtgtgacgagg

SEQ ID NO: 339574 - DNA, 12 bp, Artificial Sequence
  Oligonucleotide primer for the detection of SNP TSC0041078
aatataatatat

SEQ ID NO: 339575 - DNA, 12 bp, Artificial Sequence
  Oligonucleotide primer for the detection of SNP TSC0041078
aaagaaaatttg

SEQ ID NO: 339576 - DNA, 12 bp, Artificial Sequence
  Oligonucleotide primer for the detection of SNP TSC0041078
aaagaaaattcg

SEQ ID NO: 339577 - DNA, 12 bp, Artificial Sequence
  Oligonucleotide primer for the detection of SNP TSC0041079
taaaaacttcac

SEQ ID NO: 339578 - DNA, 12 bp, Artificial Sequence
  Oligonucleotide primer for the detection of SNP TSC0041079
ttttgttaatta

SEQ ID NO: 339579 - DNA, 12 bp, Artificial Sequence
  Oligonucleotide primer for the detection of SNP TSC0041081
tgagtgtaatta

SEQ ID NO: 339580 - DNA, 12 bp, Artificial Sequence
  Oligonucleotide primer for the detection of SNP TSC0041082
aaaatataaatt

SEQ ID NO: 339581 - DNA, 12 bp, Artificial Sequence
  Oligonucleotide primer for the detection of SNP TSC0041082
ttatagtgatta

SEQ ID NO: 339582 - DNA, 12 bp, Artificial Sequence
  Oligonucleotide primer for the detection of SNP TSC0041083
cttacccttcaa

SEQ ID NO: 339583 - DNA, 12 bp, Artificial Sequence
  Oligonucleotide primer for the detection of SNP TSC0041083
ggtaggggtgat

SEQ ID NO: 339584 - DNA, 12 bp, Artificial Sequence
  Oligonucleotide primer for the detection of SNP TSC0041087
gaggattgtgta

SEQ ID NO: 339585 - DNA, 12 bp, Artificial Sequence
  Oligonucleotide primer for the detection of SNP TSC0041088
aacctaaacatt

SEQ ID NO: 339586 - DNA, 12 bp, Artificial Sequence
  Oligonucleotide primer for the detection of SNP TSC0041088
gtttttaaataa

SEQ ID NO: 339587 - DNA, 12 bp, Artificial Sequence
  Oligonucleotide primer for the detection of SNP TSC0041089
acaattaaaata

SEQ ID NO: 339588 - DNA, 12 bp, Artificial Sequence
  Oligonucleotide primer for the detection of SNP TSC0041089
ttctatttctaa

SEQ ID NO: 339589 - DNA, 12 bp, Artificial Sequence
  Oligonucleotide primer for the detection of SNP TSC0041089
gtaattaaaatg

SEQ ID NO: 339590 - DNA, 12 bp, Artificial Sequence
  Oligonucleotide primer for the detection of SNP TSC0041090
aacaaaacctaa

SEQ ID NO: 339591 - DNA, 12 bp, Artificial Sequence
  Oligonucleotide primer for the detection of SNP TSC0041090
attgtgtgtaat

SEQ ID NO: 339592 - DNA, 12 bp, Artificial Sequence
  Oligonucleotide primer for the detection of SNP TSC0041090
attatatataac

SEQ ID NO: 339593 - DNA, 12 bp, Artificial Sequence
  Oligonucleotide primer for the detection of SNP TSC0041090
aataaggtttaa

SEQ ID NO: 339594 - DNA, 12 bp, Artificial Sequence
  Oligonucleotide primer for the detection of SNP TSC0041091
aacacatactat

SEQ ID NO: 339595 - DNA, 12 bp, Artificial Sequence
  Oligonucleotide primer for the detection of SNP TSC0041091
aatatagtatag

SEQ ID NO: 339596 - DNA, 12 bp, Artificial Sequence
  Oligonucleotide primer for the detection of SNP TSC0041091
aacataacataa

SEQ ID NO: 339597 - DNA, 12 bp, Artificial Sequence
  Oligonucleotide primer for the detection of SNP TSC0041091
agtatatattat

SEQ ID NO: 339598 - DNA, 12 bp, Artificial Sequence
  Oligonucleotide primer for the detection of SNP TSC0041092
ttatatagtaga

SEQ ID NO: 339599 - DNA, 12 bp, Artificial Sequence
  Oligonucleotide primer for the detection of SNP TSC0041093
aataaccttccc

SEQ ID NO: 339600 - DNA, 12 bp, Artificial Sequence
  Oligonucleotide primer for the detection of SNP TSC0041093
tttttagagtag

SEQ ID NO: 339601 - DNA, 12 bp, Artificial Sequence
  Oligonucleotide primer for the detection of SNP TSC0041094
tctccaacaatt

SEQ ID NO: 339602 - DNA, 12 bp, Artificial Sequence
  Oligonucleotide primer for the detection of SNP TSC0041097
agtaggaaaaga

SEQ ID NO: 339603 - DNA, 12 bp, Artificial Sequence
  Oligonucleotide primer for the detection of SNP TSC0041097
ttttataaagat

SEQ ID NO: 339604 - DNA, 12 bp, Artificial Sequence
  Oligonucleotide primer for the detection of SNP TSC0006442
aaaaaacacttt

SEQ ID NO: 339605 - DNA, 12 bp, Artificial Sequence
  Oligonucleotide primer for the detection of SNP TSC0006442
taaaatgagttg

SEQ ID NO: 339606 - DNA, 12 bp, Artificial Sequence
  Oligonucleotide primer for the detection of SNP TSC0006443
gttttattaaaa

SEQ ID NO: 339607 - DNA, 12 bp, Artificial Sequence
  Oligonucleotide primer for the detection of SNP TSC0041102
tttcttctttta

SEQ ID NO: 339608 - DNA, 12 bp, Artificial Sequence
  Oligonucleotide primer for the detection of SNP TSC0041102
aatgtgtaggtt

SEQ ID NO: 339609 - DNA, 12 bp, Artificial Sequence
  Oligonucleotide primer for the detection of SNP TSC0041102
aatgcgtaggtt

SEQ ID NO: 339610 - DNA, 12 bp, Artificial Sequence
  Oligonucleotide primer for the detection of SNP TSC0041102
aatacacaaact

SEQ ID NO: 339611 - DNA, 12 bp, Artificial Sequence
  Oligonucleotide primer for the detection of SNP TSC0041102
aatacgcaaact

SEQ ID NO: 339612 - DNA, 12 bp, Artificial Sequence
  Oligonucleotide primer for the detection of SNP TSC0041103
tctaaaatacta

SEQ ID NO: 339613 - DNA, 12 bp, Artificial Sequence
  Oligonucleotide primer for the detection of SNP TSC0041103
aagaaaatattt

SEQ ID NO: 339614 - DNA, 12 bp, Artificial Sequence
  Oligonucleotide primer for the detection of SNP TSC0041104
caaaatcaaacc

SEQ ID NO: 339615 - DNA, 12 bp, Artificial Sequence
  Oligonucleotide primer for the detection of SNP TSC0041104
cgaaatcaaacc

SEQ ID NO: 339616 - DNA, 12 bp, Artificial Sequence
  Oligonucleotide primer for the detection of SNP TSC0041104
gttggagtgtgg

SEQ ID NO: 339617 - DNA, 12 bp, Artificial Sequence
  Oligonucleotide primer for the detection of SNP TSC0041104
gttggagtgcgg

SEQ ID NO: 339618 - DNA, 12 bp, Artificial Sequence
  Oligonucleotide primer for the detection of SNP TSC0041104
actaaaatacga

SEQ ID NO: 339619 - DNA, 12 bp, Artificial Sequence
  Oligonucleotide primer for the detection of SNP TSC0041104
tgagattaggtt

SEQ ID NO: 339620 - DNA, 12 bp, Artificial Sequence
  Oligonucleotide primer for the detection of SNP TSC0041104
cgagattaggtt

SEQ ID NO: 339621 - DNA, 12 bp, Artificial Sequence
  Oligonucleotide primer for the detection of SNP TSC0041105
taaaaaagagga

SEQ ID NO: 339622 - DNA, 12 bp, Artificial Sequence
  Oligonucleotide primer for the detection of SNP TSC0041106
attacaaacttc

SEQ ID NO: 339623 - DNA, 12 bp, Artificial Sequence
  Oligonucleotide primer for the detection of SNP TSC0041107
atctatttaaac

SEQ ID NO: 339624 - DNA, 12 bp, Artificial Sequence
  Oligonukleotid-Primer
ataatagtttta

SEQ ID NO: 339625 - DNA, 12 bp, Artificial Sequence
  Oligonucleotide primer for the detection of SNP TSC0041108
tcaaattaaaat

SEQ ID NO: 339626 - DNA, 12 bp, Artificial Sequence
  Oligonucleotide primer for the detection of SNP TSC0041108
aaacatcccaaa

SEQ ID NO: 339627 - DNA, 12 bp, Artificial Sequence
  Oligonucleotide primer for the detection of SNP TSC0041108
ttaggttagaat

SEQ ID NO: 339628 - DNA, 12 bp, Artificial Sequence
  Oligonukleotid-Primer
cactctaaccta

SEQ ID NO: 339629 - DNA, 12 bp, Artificial Sequence
  Oligonucleotide primer for the detection of SNP TSC0041109
ttgttgtgttat

SEQ ID NO: 339630 - DNA, 12 bp, Artificial Sequence
  Oligonucleotide primer for the detection of SNP TSC0041109
ttgttgtgttac

SEQ ID NO: 339631 - DNA, 12 bp, Artificial Sequence
  Oligonucleotide primer for the detection of SNP TSC0041109
ttactatatcac

SEQ ID NO: 339632 - DNA, 12 bp, Artificial Sequence
  Oligonucleotide primer for the detection of SNP TSC0041110
aatcacacacac

SEQ ID NO: 339633 - DNA, 12 bp, Artificial Sequence
  Oligonucleotide primer for the detection of SNP TSC0041110
aatcgcacacac

SEQ ID NO: 339634 - DNA, 12 bp, Artificial Sequence
  Oligonucleotide primer for the detection of SNP TSC0041110
cgtgtgtatgtg

SEQ ID NO: 339635 - DNA, 12 bp, Artificial Sequence
  Oligonucleotide primer for the detection of SNP TSC0041110
tgtgtgtatgcg

SEQ ID NO: 339636 - DNA, 12 bp, Artificial Sequence
  Oligonucleotide primer for the detection of SNP TSC0041110
cgtgtgtatgcg

SEQ ID NO: 339637 - DNA, 12 bp, Artificial Sequence
  Oligonucleotide primer for the detection of SNP TSC0041110
catatacatacg

SEQ ID NO: 339638 - DNA, 12 bp, Artificial Sequence
  Oligonucleotide primer for the detection of SNP TSC0041110
cgtatacataca

SEQ ID NO: 339639 - DNA, 12 bp, Artificial Sequence
  Oligonucleotide primer for the detection of SNP TSC0041110
cgtatacatacg

SEQ ID NO: 339640 - DNA, 12 bp, Artificial Sequence
  Oligonucleotide primer for the detection of SNP TSC0041110
ggttgtatatat

SEQ ID NO: 339641 - DNA, 12 bp, Artificial Sequence
  Oligonucleotide primer for the detection of SNP TSC0041110
ggtcgtatatat

SEQ ID NO: 339642 - DNA, 12 bp, Artificial Sequence
  Oligonucleotide primer for the detection of SNP TSC0041110
ggttgtatatac

SEQ ID NO: 339643 - DNA, 12 bp, Artificial Sequence
  Oligonucleotide primer for the detection of SNP TSC0041110
ggtcgtatatac

SEQ ID NO: 339644 - DNA, 12 bp, Artificial Sequence
  Oligonucleotide primer for the detection of SNP TSC0041111
gaaatattatag

SEQ ID NO: 339645 - DNA, 12 bp, Artificial Sequence
  Oligonucleotide primer for the detection of SNP TSC0041111
aaaacattacaa

SEQ ID NO: 339646 - DNA, 12 bp, Artificial Sequence
  Oligonucleotide primer for the detection of SNP TSC0041111
gaagaatttaaa

SEQ ID NO: 339647 - DNA, 12 bp, Artificial Sequence
  Oligonucleotide primer for the detection of SNP TSC0005527
aataattaaatc

SEQ ID NO: 339648 - DNA, 12 bp, Artificial Sequence
  Oligonucleotide primer for the detection of SNP TSC0041112
aaatcttcctta

SEQ ID NO: 339649 - DNA, 12 bp, Artificial Sequence
  Oligonucleotide primer for the detection of SNP TSC0041112
tttgtttaaagg

SEQ ID NO: 339650 - DNA, 12 bp, Artificial Sequence
  Oligonucleotide primer for the detection of SNP TSC0041112
tttactcaaaaa

SEQ ID NO: 339651 - DNA, 12 bp, Artificial Sequence
  Oligonucleotide primer for the detection of SNP TSC0041112
gaattttttttg

SEQ ID NO: 339652 - DNA, 12 bp, Artificial Sequence
  Oligonucleotide primer for the detection of SNP TSC0041113
tctaacatatat

SEQ ID NO: 339653 - DNA, 12 bp, Artificial Sequence
  Oligonucleotide primer for the detection of SNP TSC0041113
gaagatttaata

SEQ ID NO: 339654 - DNA, 12 bp, Artificial Sequence
  Oligonucleotide primer for the detection of SNP TSC0041114
aaacaaataacc

SEQ ID NO: 339655 - DNA, 12 bp, Artificial Sequence
  Oligonucleotide primer for the detection of SNP TSC0041114
atggatttgggg

SEQ ID NO: 339656 - DNA, 12 bp, Artificial Sequence
  Oligonucleotide primer for the detection of SNP TSC0041115
cccaccaaactc

SEQ ID NO: 339657 - DNA, 12 bp, Artificial Sequence
  Oligonucleotide primer for the detection of SNP TSC0041115
tttttggttgta

SEQ ID NO: 339658 - DNA, 12 bp, Artificial Sequence
  Oligonucleotide primer for the detection of SNP TSC0041118
aaccactaaact

SEQ ID NO: 339659 - DNA, 12 bp, Artificial Sequence
  Oligonucleotide primer for the detection of SNP TSC0041118
tatgttttgttg

SEQ ID NO: 339660 - DNA, 12 bp, Artificial Sequence
  Oligonucleotide primer for the detection of SNP TSC0041119
tatatactacat

SEQ ID NO: 339661 - DNA, 12 bp, Artificial Sequence
  Oligonucleotide primer for the detection of SNP TSC0041121
cacccattaact

SEQ ID NO: 339662 - DNA, 12 bp, Artificial Sequence
  Oligonucleotide primer for the detection of SNP TSC0041121
ttaatgtaaatg

SEQ ID NO: 339663 - DNA, 12 bp, Artificial Sequence
  Oligonucleotide primer for the detection of SNP TSC0041128
aaataccatcaa

SEQ ID NO: 339664 - DNA, 12 bp, Artificial Sequence
  Oligonucleotide primer for the detection of SNP TSC0041128
gtgttattaatt

SEQ ID NO: 339665 - DNA, 12 bp, Artificial Sequence
  Oligonucleotide primer for the detection of SNP TSC0041130
ccatcctcccac

SEQ ID NO: 339666 - DNA, 12 bp, Artificial Sequence
  Oligonucleotide primer for the detection of SNP TSC0041130
ccatcctcccgc

SEQ ID NO: 339667 - DNA, 12 bp, Artificial Sequence
  Oligonucleotide primer for the detection of SNP TSC0041131
caattccataac

SEQ ID NO: 339668 - DNA, 12 bp, Artificial Sequence
  Oligonucleotide primer for the detection of SNP TSC0041131
caattccgtaac

SEQ ID NO: 339669 - DNA, 12 bp, Artificial Sequence
  Oligonucleotide primer for the detection of SNP TSC0041131
ggaatatgttta

SEQ ID NO: 339670 - DNA, 12 bp, Artificial Sequence
  Oligonucleotide primer for the detection of SNP TSC0041131
aaaacatactta

SEQ ID NO: 339671 - DNA, 12 bp, Artificial Sequence
  Oligonucleotide primer for the detection of SNP TSC0041131
taattttgtgat

SEQ ID NO: 339672 - DNA, 12 bp, Artificial Sequence
  Oligonucleotide primer for the detection of SNP TSC0041131
taatttcgtgat

SEQ ID NO: 339673 - DNA, 12 bp, Artificial Sequence
  Oligonucleotide primer for the detection of SNP TSC0041132
tcctttcaaata

SEQ ID NO: 339674 - DNA, 12 bp, Artificial Sequence
  Oligonucleotide primer for the detection of SNP TSC0041133
acaaaatcatat

SEQ ID NO: 339675 - DNA, 12 bp, Artificial Sequence
  Oligonucleotide primer for the detection of SNP TSC0041133
acaaaatcgtat

SEQ ID NO: 339676 - DNA, 12 bp, Artificial Sequence
  Oligonucleotide primer for the detection of SNP TSC0041133
atttttatatta

SEQ ID NO: 339677 - DNA, 12 bp, Artificial Sequence
  Oligonucleotide primer for the detection of SNP TSC0041134
cactaacaccaa

SEQ ID NO: 339678 - DNA, 12 bp, Artificial Sequence
  Oligonucleotide primer for the detection of SNP TSC0041134
ggagtttttttt

SEQ ID NO: 339679 - DNA, 12 bp, Artificial Sequence
  Oligonucleotide primer for the detection of SNP TSC0041134
ggagtttttttc

SEQ ID NO: 339680 - DNA, 12 bp, Artificial Sequence
  Oligonucleotide primer for the detection of SNP TSC0041134
taaaaattcttt

SEQ ID NO: 339681 - DNA, 12 bp, Artificial Sequence
  Oligonucleotide primer for the detection of SNP TSC0041134
tattggtattaa

SEQ ID NO: 339682 - DNA, 12 bp, Artificial Sequence
  Oligonucleotide primer for the detection of SNP TSC0008466
atttataccttt

SEQ ID NO: 339683 - DNA, 12 bp, Artificial Sequence
  Oligonucleotide primer for the detection of SNP TSC0008466
tgaattttaaag

SEQ ID NO: 339684 - DNA, 12 bp, Artificial Sequence
  Oligonucleotide primer for the detection of SNP TSC0041138
ttatctttttct

SEQ ID NO: 339685 - DNA, 12 bp, Artificial Sequence
  Oligonucleotide primer for the detection of SNP TSC0041138
ggtaaaattata

SEQ ID NO: 339686 - DNA, 12 bp, Artificial Sequence
  Oligonucleotide primer for the detection of SNP TSC0041138
tgtttttttttc

SEQ ID NO: 339687 - DNA, 12 bp, Artificial Sequence
  Oligonucleotide primer for the detection of SNP TSC0009919
ccaataataact

SEQ ID NO: 339688 - DNA, 12 bp, Artificial Sequence
  Oligonucleotide primer for the detection of SNP TSC0009919
ttagaggtgata

SEQ ID NO: 339689 - DNA, 12 bp, Artificial Sequence
  Oligonucleotide primer for the detection of SNP TSC0041141
taaacaactaaa

SEQ ID NO: 339690 - DNA, 12 bp, Artificial Sequence
  Oligonucleotide primer for the detection of SNP TSC0041141
attattttatta

SEQ ID NO: 339691 - DNA, 12 bp, Artificial Sequence
  Oligonucleotide primer for the detection of SNP TSC0041141
aattaaataatt

SEQ ID NO: 339692 - DNA, 12 bp, Artificial Sequence
  Oligonucleotide primer for the detection of SNP TSC0041142
tacaatataaca

SEQ ID NO: 339693 - DNA, 12 bp, Artificial Sequence
  Oligonucleotide primer for the detection of SNP TSC0041142
tatttagataat

SEQ ID NO: 339694 - DNA, 12 bp, Artificial Sequence
  Oligonucleotide primer for the detection of SNP TSC0041142
tacttaaacaat

SEQ ID NO: 339695 - DNA, 12 bp, Artificial Sequence
  Oligonucleotide primer for the detection of SNP TSC0041142
gtaatatgatat

SEQ ID NO: 339696 - DNA, 12 bp, Artificial Sequence
  Oligonucleotide primer for the detection of SNP TSC0041143
ttaatagtgaga

SEQ ID NO: 339697 - DNA, 12 bp, Artificial Sequence
  Oligonucleotide primer for the detection of SNP TSC0041144
aaattaatttaa

SEQ ID NO: 339698 - DNA, 12 bp, Artificial Sequence
  Oligonucleotide primer for the detection of SNP TSC0041144
aggatgtaaatt

SEQ ID NO: 339699 - DNA, 12 bp, Artificial Sequence
  Oligonucleotide primer for the detection of SNP TSC0041144
aaatacaaatta

SEQ ID NO: 339700 - DNA, 12 bp, Artificial Sequence
  Oligonucleotide primer for the detection of SNP TSC0041144
gagttgatttgg

SEQ ID NO: 339701 - DNA, 12 bp, Artificial Sequence
  Oligonucleotide primer for the detection of SNP TSC0041145
tattatttcccc

SEQ ID NO: 339702 - DNA, 12 bp, Artificial Sequence
  Oligonucleotide primer for the detection of SNP TSC0041145
taagattattta

SEQ ID NO: 339703 - DNA, 12 bp, Artificial Sequence
  Oligonucleotide primer for the detection of SNP TSC0041146
caccactactct

SEQ ID NO: 339704 - DNA, 12 bp, Artificial Sequence
  Oligonucleotide primer for the detection of SNP TSC0041146
aaatagagatta

SEQ ID NO: 339705 - DNA, 12 bp, Artificial Sequence
  Oligonucleotide primer for the detection of SNP TSC0041146
tattattgtttt

SEQ ID NO: 339706 - DNA, 12 bp, Artificial Sequence
  Oligonucleotide primer for the detection of SNP TSC0041147
tcataactacat

SEQ ID NO: 339707 - DNA, 12 bp, Artificial Sequence
  Oligonucleotide primer for the detection of SNP TSC0041147
tcgtaactacat

SEQ ID NO: 339708 - DNA, 12 bp, Artificial Sequence
  Oligonucleotide primer for the detection of SNP TSC0010383
accaacccctcc

SEQ ID NO: 339709 - DNA, 12 bp, Artificial Sequence
  Oligonucleotide primer for the detection of SNP TSC0010383
aaaaggaggaaa

SEQ ID NO: 339710 - DNA, 12 bp, Artificial Sequence
  Oligonucleotide primer for the detection of SNP TSC0010384
acgacaaaaatt

SEQ ID NO: 339711 - DNA, 12 bp, Artificial Sequence
  Oligonucleotide primer for the detection of SNP TSC0010384
gttttagtggta

SEQ ID NO: 339712 - DNA, 12 bp, Artificial Sequence
  Oligonucleotide primer for the detection of SNP TSC0041148
ttgagggtaata

SEQ ID NO: 339713 - DNA, 12 bp, Artificial Sequence
  Oligonucleotide primer for the detection of SNP TSC0041149
atataaggtaga

SEQ ID NO: 339714 - DNA, 12 bp, Artificial Sequence
  Oligonucleotide primer for the detection of SNP TSC0041149
atataaaataaa

SEQ ID NO: 339715 - DNA, 12 bp, Artificial Sequence
  Oligonucleotide primer for the detection of SNP TSC0041149
atagagatttat

SEQ ID NO: 339716 - DNA, 12 bp, Artificial Sequence
  Oligonucleotide primer for the detection of SNP TSC0041149
atagagatttac

SEQ ID NO: 339717 - DNA, 12 bp, Artificial Sequence
  Oligonucleotide primer for the detection of SNP TSC0041150
atttatagttat

SEQ ID NO: 339718 - DNA, 12 bp, Artificial Sequence
  Oligonucleotide primer for the detection of SNP TSC0041150
attcacaattat

SEQ ID NO: 339719 - DNA, 12 bp, Artificial Sequence
  Oligonucleotide primer for the detection of SNP TSC0041150
tatatatgagag

SEQ ID NO: 339720 - DNA, 12 bp, Artificial Sequence
  Oligonucleotide primer for the detection of SNP TSC0041151
taactcaactca

SEQ ID NO: 339721 - DNA, 12 bp, Artificial Sequence
  Oligonucleotide primer for the detection of SNP TSC0041151
agagttttaaag

SEQ ID NO: 339722 - DNA, 12 bp, Artificial Sequence
  Oligonucleotide primer for the detection of SNP TSC0041151
aaaaccttaaaa

SEQ ID NO: 339723 - DNA, 12 bp, Artificial Sequence
  Oligonucleotide primer for the detection of SNP TSC0041152
aaaaaatcctca

SEQ ID NO: 339724 - DNA, 12 bp, Artificial Sequence
  Oligonucleotide primer for the detection of SNP TSC0041152
gtgttatatttg

SEQ ID NO: 339725 - DNA, 12 bp, Artificial Sequence
  Oligonucleotide primer for the detection of SNP TSC0041152
gtgttatattcg

SEQ ID NO: 339726 - DNA, 12 bp, Artificial Sequence
  Oligonucleotide primer for the detection of SNP TSC0041152
ataccacatcca

SEQ ID NO: 339727 - DNA, 12 bp, Artificial Sequence
  Oligonucleotide primer for the detection of SNP TSC0041152
ataccacatccg

SEQ ID NO: 339728 - DNA, 12 bp, Artificial Sequence
  Oligonucleotide primer for the detection of SNP TSC0041152
agaaggttttta

SEQ ID NO: 339729 - DNA, 12 bp, Artificial Sequence
  Oligonucleotide primer for the detection of SNP TSC0007619
catataacaact

SEQ ID NO: 339730 - DNA, 12 bp, Artificial Sequence
  Oligonucleotide primer for the detection of SNP TSC0007619
ttttttggtata

SEQ ID NO: 339731 - DNA, 12 bp, Artificial Sequence
  Oligonucleotide primer for the detection of SNP TSC0041153
tttgagaaattt

SEQ ID NO: 339732 - DNA, 12 bp, Artificial Sequence
  Oligonucleotide primer for the detection of SNP TSC0041153
ttcgagaaattt

SEQ ID NO: 339733 - DNA, 12 bp, Artificial Sequence
  Oligonukleotid-Primer
ctcaaaaaatcc

SEQ ID NO: 339734 - DNA, 12 bp, Artificial Sequence
  Oligonucleotide primer for the detection of SNP TSC0041153
ctcgaaaaatcc

SEQ ID NO: 339735 - DNA, 12 bp, Artificial Sequence
  Oligonucleotide primer for the detection of SNP TSC0041153
aagtaatgtttt

SEQ ID NO: 339736 - DNA, 12 bp, Artificial Sequence
  Oligonucleotide primer for the detection of SNP TSC0041153
aagtaatgtttc

SEQ ID NO: 339737 - DNA, 12 bp, Artificial Sequence
  Oligonucleotide primer for the detection of SNP TSC0041154
ataaacaacatc

SEQ ID NO: 339738 - DNA, 12 bp, Artificial Sequence
  Oligonucleotide primer for the detection of SNP TSC0041154
tatggttgataa

SEQ ID NO: 339739 - DNA, 12 bp, Artificial Sequence
  Oligonucleotide primer for the detection of SNP TSC0041154
atggatagtatt

SEQ ID NO: 339740 - DNA, 12 bp, Artificial Sequence
  Oligonucleotide primer for the detection of SNP TSC0009132
cactctacttct

SEQ ID NO: 339741 - DNA, 12 bp, Artificial Sequence
  Oligonucleotide primer for the detection of SNP TSC0009132
tagggaatataa

SEQ ID NO: 339742 - DNA, 12 bp, Artificial Sequence
  Oligonucleotide primer for the detection of SNP TSC0009132
taaaaaacataa

SEQ ID NO: 339743 - DNA, 12 bp, Artificial Sequence
  Oligonucleotide primer for the detection of SNP TSC0041155
ccaccttaacct

SEQ ID NO: 339744 - DNA, 12 bp, Artificial Sequence
  Oligonucleotide primer for the detection of SNP TSC0041155
ccgccttaacct

SEQ ID NO: 339745 - DNA, 12 bp, Artificial Sequence
  Oligonucleotide primer for the detection of SNP TSC0041155
ttcgtattttga

SEQ ID NO: 339746 - DNA, 12 bp, Artificial Sequence
  Oligonucleotide primer for the detection of SNP TSC0041156
ctaaaataaacc

SEQ ID NO: 339747 - DNA, 12 bp, Artificial Sequence
  Oligonucleotide primer for the detection of SNP TSC0041156
ttgggatgggtt

SEQ ID NO: 339748 - DNA, 12 bp, Artificial Sequence
  Oligonucleotide primer for the detection of SNP TSC0041156
ttgggatgggtc

SEQ ID NO: 339749 - DNA, 12 bp, Artificial Sequence
  Oligonucleotide primer for the detection of SNP TSC0041158
tcatacattact

SEQ ID NO: 339750 - DNA, 12 bp, Artificial Sequence
  Oligonucleotide primer for the detection of SNP TSC0041158
ttaaactctcac

SEQ ID NO: 339751 - DNA, 12 bp, Artificial Sequence
  Oligonucleotide primer for the detection of SNP TSC0041158
ttatatattgtt

SEQ ID NO: 339752 - DNA, 12 bp, Artificial Sequence
  Oligonucleotide primer for the detection of SNP TSC0008057
ctaccaccacta

SEQ ID NO: 339753 - DNA, 12 bp, Artificial Sequence
  Oligonucleotide primer for the detection of SNP TSC0008057
ctaccaccgcta

SEQ ID NO: 339754 - DNA, 12 bp, Artificial Sequence
  Oligonucleotide primer for the detection of SNP TSC0008057
tactctaaactc

SEQ ID NO: 339755 - DNA, 12 bp, Artificial Sequence
  Oligonucleotide primer for the detection of SNP TSC0008057
ttgttattgttg

SEQ ID NO: 339756 - DNA, 12 bp, Artificial Sequence
  Oligonucleotide primer for the detection of SNP TSC0008057
ttgttatcgttg

SEQ ID NO: 339757 - DNA, 12 bp, Artificial Sequence
  Oligonucleotide primer for the detection of SNP TSC0041159
tttactatacct

SEQ ID NO: 339758 - DNA, 12 bp, Artificial Sequence
  Oligonucleotide primer for the detection of SNP TSC0041159
ttgaatattaaa

SEQ ID NO: 339759 - DNA, 12 bp, Artificial Sequence
  Oligonucleotide primer for the detection of SNP TSC0041159
ctaaacattaaa

SEQ ID NO: 339760 - DNA, 12 bp, Artificial Sequence
  Oligonucleotide primer for the detection of SNP TSC0041159
tttgttgtattt

SEQ ID NO: 339761 - DNA, 12 bp, Artificial Sequence
  Oligonucleotide primer for the detection of SNP TSC0041160
aaataaaatata

SEQ ID NO: 339762 - DNA, 12 bp, Artificial Sequence
  Oligonucleotide primer for the detection of SNP TSC0041160
gaggtaatattt

SEQ ID NO: 339763 - DNA, 12 bp, Artificial Sequence
  Oligonucleotide primer for the detection of SNP TSC0041160
aaaataacattt

SEQ ID NO: 339764 - DNA, 12 bp, Artificial Sequence
  Oligonucleotide primer for the detection of SNP TSC0041160
aagtgaagtata

SEQ ID NO: 339765 - DNA, 12 bp, Artificial Sequence
  Oligonucleotide primer for the detection of SNP TSC0005704
cttaactacatc

SEQ ID NO: 339766 - DNA, 12 bp, Artificial Sequence
  Oligonucleotide primer for the detection of SNP TSC0041161
aaacaaatttaa

SEQ ID NO: 339767 - DNA, 12 bp, Artificial Sequence
  Oligonucleotide primer for the detection of SNP TSC0041161
aggtattgttat

SEQ ID NO: 339768 - DNA, 12 bp, Artificial Sequence
  Oligonucleotide primer for the detection of SNP TSC0041161
gaataaatttag

SEQ ID NO: 339769 - DNA, 12 bp, Artificial Sequence
  Oligonucleotide primer for the detection of SNP TSC0041162
acctaataattc

SEQ ID NO: 339770 - DNA, 12 bp, Artificial Sequence
  Oligonucleotide primer for the detection of SNP TSC0041163
gttttataaggt

SEQ ID NO: 339771 - DNA, 12 bp, Artificial Sequence
  Oligonucleotide primer for the detection of SNP TSC0041163
attctataaaac

SEQ ID NO: 339772 - DNA, 12 bp, Artificial Sequence
  Oligonucleotide primer for the detection of SNP TSC0041163
gttctataaaac

SEQ ID NO: 339773 - DNA, 12 bp, Artificial Sequence
  Oligonucleotide primer for the detection of SNP TSC0041163
attaggataata

SEQ ID NO: 339774 - DNA, 12 bp, Artificial Sequence
  Oligonucleotide primer for the detection of SNP TSC0005985
acatttatatat

SEQ ID NO: 339775 - DNA, 12 bp, Artificial Sequence
  Oligonucleotide primer for the detection of SNP TSC0005985
tagagggtgata

SEQ ID NO: 339776 - DNA, 12 bp, Artificial Sequence
  Oligonucleotide primer for the detection of SNP TSC0005894
acccacactaaa

SEQ ID NO: 339777 - DNA, 12 bp, Artificial Sequence
  Oligonucleotide primer for the detection of SNP TSC0005894
gaattttatttt

SEQ ID NO: 339778 - DNA, 12 bp, Artificial Sequence
  Oligonucleotide primer for the detection of SNP TSC0005894
aaatctcacttc

SEQ ID NO: 339779 - DNA, 12 bp, Artificial Sequence
  Oligonucleotide primer for the detection of SNP TSC0005894
tatttatattgg

SEQ ID NO: 339780 - DNA, 12 bp, Artificial Sequence
  Oligonucleotide primer for the detection of SNP TSC0041168
atttacctactt

SEQ ID NO: 339781 - DNA, 12 bp, Artificial Sequence
  Oligonucleotide primer for the detection of SNP TSC0041168
atttttttagag

SEQ ID NO: 339782 - DNA, 12 bp, Artificial Sequence
  Oligonucleotide primer for the detection of SNP TSC0041170
attaaaaataat

SEQ ID NO: 339783 - DNA, 12 bp, Artificial Sequence
  Oligonucleotide primer for the detection of SNP TSC0041170
atatcttcttaa

SEQ ID NO: 339784 - DNA, 12 bp, Artificial Sequence
  Oligonucleotide primer for the detection of SNP TSC0041170
gttgagagtgat

SEQ ID NO: 339785 - DNA, 12 bp, Artificial Sequence
  Oligonucleotide primer for the detection of SNP TSC0041174
tatttcttcaaa

SEQ ID NO: 339786 - DNA, 12 bp, Artificial Sequence
  Oligonucleotide primer for the detection of SNP TSC0041174
gagaatagaaaa

SEQ ID NO: 339787 - DNA, 12 bp, Artificial Sequence
  Oligonucleotide primer for the detection of SNP TSC0041175
tcaataaaaact

SEQ ID NO: 339788 - DNA, 12 bp, Artificial Sequence
  Oligonucleotide primer for the detection of SNP TSC0008563
gtagaggtggtt

SEQ ID NO: 339789 - DNA, 12 bp, Artificial Sequence
  Oligonucleotide primer for the detection of SNP TSC0008563
gtagaggcggtt

SEQ ID NO: 339790 - DNA, 12 bp, Artificial Sequence
  Oligonucleotide primer for the detection of SNP TSC0041177
atcacaaaacta

SEQ ID NO: 339791 - DNA, 12 bp, Artificial Sequence
  Oligonucleotide primer for the detection of SNP TSC0041177
atcctctcctta

SEQ ID NO: 339792 - DNA, 12 bp, Artificial Sequence
  Oligonucleotide primer for the detection of SNP TSC0041177
attatagagttg

SEQ ID NO: 339793 - DNA, 12 bp, Artificial Sequence
  Oligonucleotide primer for the detection of SNP TSC0041178
tacacatttctt

SEQ ID NO: 339794 - DNA, 12 bp, Artificial Sequence
  Oligonucleotide primer for the detection of SNP TSC0041178
tggaaggtgtta

SEQ ID NO: 339795 - DNA, 12 bp, Artificial Sequence
  Oligonucleotide primer for the detection of SNP TSC0041179
gaaatgtgtatt

SEQ ID NO: 339796 - DNA, 12 bp, Artificial Sequence
  Oligonucleotide primer for the detection of SNP TSC0041179
aaaaatatatac

SEQ ID NO: 339797 - DNA, 12 bp, Artificial Sequence
  Oligonucleotide primer for the detection of SNP TSC0041181
cctacaatacaa

SEQ ID NO: 339798 - DNA, 12 bp, Artificial Sequence
  Oligonucleotide primer for the detection of SNP TSC0041181
cctacaatacga

SEQ ID NO: 339799 - DNA, 12 bp, Artificial Sequence
  Oligonucleotide primer for the detection of SNP TSC0041181
tttgtaatatga

SEQ ID NO: 339800 - DNA, 12 bp, Artificial Sequence
  Oligonucleotide primer for the detection of SNP TSC0041181
tttgtaatacga

SEQ ID NO: 339801 - DNA, 12 bp, Artificial Sequence
  Oligonucleotide primer for the detection of SNP TSC0041182
tttcctaaaaca

SEQ ID NO: 339802 - DNA, 12 bp, Artificial Sequence
  Oligonucleotide primer for the detection of SNP TSC0041182
tttttagaatat

SEQ ID NO: 339803 - DNA, 12 bp, Artificial Sequence
  Oligonucleotide primer for the detection of SNP TSC0041182
tttttagaatac

SEQ ID NO: 339804 - DNA, 12 bp, Artificial Sequence
  Oligonucleotide primer for the detection of SNP TSC0041183
atcctaaaaatc

SEQ ID NO: 339805 - DNA, 12 bp, Artificial Sequence
  Oligonucleotide primer for the detection of SNP TSC0041187
ccttctataaat

SEQ ID NO: 339806 - DNA, 12 bp, Artificial Sequence
  Oligonucleotide primer for the detection of SNP TSC0041187
agtaatagggtt

SEQ ID NO: 339807 - DNA, 12 bp, Artificial Sequence
  Oligonucleotide primer for the detection of SNP TSC0041187
ttttttatgagt

SEQ ID NO: 339808 - DNA, 12 bp, Artificial Sequence
  Oligonucleotide primer for the detection of SNP TSC0009301
ttctaaatccaa

SEQ ID NO: 339809 - DNA, 12 bp, Artificial Sequence
  Oligonucleotide primer for the detection of SNP TSC0005349
cttatctctaaa

SEQ ID NO: 339810 - DNA, 12 bp, Artificial Sequence
  Oligonucleotide primer for the detection of SNP TSC0005349
taattattatat

SEQ ID NO: 339811 - DNA, 12 bp, Artificial Sequence
  Oligonucleotide primer for the detection of SNP TSC0005349
caaccaccacat

SEQ ID NO: 339812 - DNA, 12 bp, Artificial Sequence
  Oligonucleotide primer for the detection of SNP TSC0005349
gtttttaagttt

SEQ ID NO: 339813 - DNA, 12 bp, Artificial Sequence
  Oligonucleotide primer for the detection of SNP TSC0005350
ctaattcaccct

SEQ ID NO: 339814 - DNA, 12 bp, Artificial Sequence
  Oligonucleotide primer for the detection of SNP TSC0005350
ttaaggaataaa

SEQ ID NO: 339815 - DNA, 12 bp, Artificial Sequence
  Oligonucleotide primer for the detection of SNP TSC0041188
aaacctaaaacc

SEQ ID NO: 339816 - DNA, 12 bp, Artificial Sequence
  Oligonucleotide primer for the detection of SNP TSC0041188
tatattaaatag

SEQ ID NO: 339817 - DNA, 12 bp, Artificial Sequence
  Oligonucleotide primer for the detection of SNP TSC0041189
taacatacttac

SEQ ID NO: 339818 - DNA, 12 bp, Artificial Sequence
  Oligonucleotide primer for the detection of SNP TSC0041189
taaaatttatgg

SEQ ID NO: 339819 - DNA, 12 bp, Artificial Sequence
  Oligonucleotide primer for the detection of SNP TSC0041190
tttcatttattc

SEQ ID NO: 339820 - DNA, 12 bp, Artificial Sequence
  Oligonucleotide primer for the detection of SNP TSC0041190
aagttgtaaatg

SEQ ID NO: 339821 - DNA, 12 bp, Artificial Sequence
  Oligonucleotide primer for the detection of SNP TSC0041191
gttaaaaaaaaa

SEQ ID NO: 339822 - DNA, 12 bp, Artificial Sequence
  Oligonucleotide primer for the detection of SNP TSC0041192
atttaataatgg

SEQ ID NO: 339823 - DNA, 12 bp, Artificial Sequence
  Oligonucleotide primer for the detection of SNP TSC0041195
ttcttcaaactt

SEQ ID NO: 339824 - DNA, 12 bp, Artificial Sequence
  Oligonucleotide primer for the detection of SNP TSC0041196
ttaatcatactt

SEQ ID NO: 339825 - DNA, 12 bp, Artificial Sequence
  Oligonucleotide primer for the detection of SNP TSC0041196
tttttaggaata

SEQ ID NO: 339826 - DNA, 12 bp, Artificial Sequence
  Oligonucleotide primer for the detection of SNP TSC0041197
cacctacaaaca

SEQ ID NO: 339827 - DNA, 12 bp, Artificial Sequence
  Oligonucleotide primer for the detection of SNP TSC0041197
cacctacaaacg

SEQ ID NO: 339828 - DNA, 12 bp, Artificial Sequence
  Oligonucleotide primer for the detection of SNP TSC0041197
caaacttaacct

SEQ ID NO: 339829 - DNA, 12 bp, Artificial Sequence
  Oligonucleotide primer for the detection of SNP TSC0041197
tatttgtagatg

SEQ ID NO: 339830 - DNA, 12 bp, Artificial Sequence
  Oligonucleotide primer for the detection of SNP TSC0041197
tatttgtagacg

SEQ ID NO: 339831 - DNA, 12 bp, Artificial Sequence
  Oligonucleotide primer for the detection of SNP TSC0041198
aaaaataacttt

SEQ ID NO: 339832 - DNA, 12 bp, Artificial Sequence
  Oligonucleotide primer for the detection of SNP TSC0041198
tgtatattaata

SEQ ID NO: 339833 - DNA, 12 bp, Artificial Sequence
  Oligonucleotide primer for the detection of SNP TSC0041199
ctaaaactatcc

SEQ ID NO: 339834 - DNA, 12 bp, Artificial Sequence
  Oligonucleotide primer for the detection of SNP TSC0041199
agagatagataa

SEQ ID NO: 339835 - DNA, 12 bp, Artificial Sequence
  Oligonucleotide primer for the detection of SNP TSC0041207
tattttatttga

SEQ ID NO: 339836 - DNA, 12 bp, Artificial Sequence
  Oligonucleotide primer for the detection of SNP TSC0041210
ataccaattaac

SEQ ID NO: 339837 - DNA, 12 bp, Artificial Sequence
  Oligonucleotide primer for the detection of SNP TSC0041211
atttatttttta

SEQ ID NO: 339838 - DNA, 12 bp, Artificial Sequence
  Oligonucleotide primer for the detection of SNP TSC0041212
caaaccaaacta

SEQ ID NO: 339839 - DNA, 12 bp, Artificial Sequence
  Oligonucleotide primer for the detection of SNP TSC0041212
caaaccgaacta

SEQ ID NO: 339840 - DNA, 12 bp, Artificial Sequence
  Oligonucleotide primer for the detection of SNP TSC0041212
gttattgtagtt

SEQ ID NO: 339841 - DNA, 12 bp, Artificial Sequence
  Oligonucleotide primer for the detection of SNP TSC0041212
accactacaatc

SEQ ID NO: 339842 - DNA, 12 bp, Artificial Sequence
  Oligonucleotide primer for the detection of SNP TSC0041212
gccactacaatc

SEQ ID NO: 339843 - DNA, 12 bp, Artificial Sequence
  Oligonucleotide primer for the detection of SNP TSC0041212
taggttggattg

SEQ ID NO: 339844 - DNA, 12 bp, Artificial Sequence
  Oligonucleotide primer for the detection of SNP TSC0041212
taggtcggattg

SEQ ID NO: 339845 - DNA, 12 bp, Artificial Sequence
  Oligonucleotide primer for the detection of SNP TSC0041215
acaactactttc

SEQ ID NO: 339846 - DNA, 12 bp, Artificial Sequence
  Oligonucleotide primer for the detection of SNP TSC0041215
gagataatatat

SEQ ID NO: 339847 - DNA, 12 bp, Artificial Sequence
  Oligonucleotide primer for the detection of SNP TSC0041216
atttcaaaaaca

SEQ ID NO: 339848 - DNA, 12 bp, Artificial Sequence
  Oligonucleotide primer for the detection of SNP TSC0041216
ttattagtttat

SEQ ID NO: 339849 - DNA, 12 bp, Artificial Sequence
  Oligonucleotide primer for the detection of SNP TSC0041216
gttttagaagta

SEQ ID NO: 339850 - DNA, 12 bp, Artificial Sequence
  Oligonucleotide primer for the detection of SNP TSC0041217
tatgagagattt

SEQ ID NO: 339851 - DNA, 12 bp, Artificial Sequence
  Oligonucleotide primer for the detection of SNP TSC0041217
ggtaagaaattg

SEQ ID NO: 339852 - DNA, 12 bp, Artificial Sequence
  Oligonucleotide primer for the detection of SNP TSC0041218
attaatttaaga

SEQ ID NO: 339853 - DNA, 12 bp, Artificial Sequence
  Oligonucleotide primer for the detection of SNP TSC0041218
attaatctaaaa

SEQ ID NO: 339854 - DNA, 12 bp, Artificial Sequence
  Oligonucleotide primer for the detection of SNP TSC0041220
accaacaaactt

SEQ ID NO: 339855 - DNA, 12 bp, Artificial Sequence
  Oligonucleotide primer for the detection of SNP TSC0041222
cacctctatcaa

SEQ ID NO: 339856 - DNA, 12 bp, Artificial Sequence
  Oligonucleotide primer for the detection of SNP TSC0041222
cacctctatcga

SEQ ID NO: 339857 - DNA, 12 bp, Artificial Sequence
  Oligonucleotide primer for the detection of SNP TSC0041222
tttaagtgaggt

SEQ ID NO: 339858 - DNA, 12 bp, Artificial Sequence
  Oligonucleotide primer for the detection of SNP TSC0041222
tttaagcgaggt

SEQ ID NO: 339859 - DNA, 12 bp, Artificial Sequence
  Oligonucleotide primer for the detection of SNP TSC0041222
cccaaacaaaac

SEQ ID NO: 339860 - DNA, 12 bp, Artificial Sequence
  Oligonucleotide primer for the detection of SNP TSC0041222
cccaaacgaaac

SEQ ID NO: 339861 - DNA, 12 bp, Artificial Sequence
  Oligonucleotide primer for the detection of SNP TSC0041222
tatttttgttgg

SEQ ID NO: 339862 - DNA, 12 bp, Artificial Sequence
  Oligonucleotide primer for the detection of SNP TSC0041222
tatttttgtcgg

SEQ ID NO: 339863 - DNA, 12 bp, Artificial Sequence
  Oligonucleotide primer for the detection of SNP TSC0041223
atcataattttt

SEQ ID NO: 339864 - DNA, 12 bp, Artificial Sequence
  Oligonucleotide primer for the detection of SNP TSC0041223
tgagttgtaatt

SEQ ID NO: 339865 - DNA, 12 bp, Artificial Sequence
  Oligonucleotide primer for the detection of SNP TSC0041224
taaaactcctaa

SEQ ID NO: 339866 - DNA, 12 bp, Artificial Sequence
  Oligonucleotide primer for the detection of SNP TSC0041224
aaaatttttaat

SEQ ID NO: 339867 - DNA, 12 bp, Artificial Sequence
  Oligonucleotide primer for the detection of SNP TSC0041225
tattccatcaac

SEQ ID NO: 339868 - DNA, 12 bp, Artificial Sequence
  Oligonucleotide primer for the detection of SNP TSC0041225
attgttgttagg

SEQ ID NO: 339869 - DNA, 12 bp, Artificial Sequence
  Oligonucleotide primer for the detection of SNP TSC0041225
actattactaaa

SEQ ID NO: 339870 - DNA, 12 bp, Artificial Sequence
  Oligonucleotide primer for the detection of SNP TSC0041225
attttattagtt

SEQ ID NO: 339871 - DNA, 12 bp, Artificial Sequence
  Oligonucleotide primer for the detection of SNP TSC0041227
taaaaaaatatc

SEQ ID NO: 339872 - DNA, 12 bp, Artificial Sequence
  Oligonucleotide primer for the detection of SNP TSC0041227
gagaggatattt

SEQ ID NO: 339873 - DNA, 12 bp, Artificial Sequence
  Oligonucleotide primer for the detection of SNP TSC0041228
ttaggtatgata

SEQ ID NO: 339874 - DNA, 12 bp, Artificial Sequence
  Oligonucleotide primer for the detection of SNP TSC0041232
taatatttcaca

SEQ ID NO: 339875 - DNA, 12 bp, Artificial Sequence
  Oligonucleotide primer for the detection of SNP TSC0041232
gtaagagtagtt

SEQ ID NO: 339876 - DNA, 12 bp, Artificial Sequence
  Oligonucleotide primer for the detection of SNP TSC0041232
gtaagagtagtc

SEQ ID NO: 339877 - DNA, 12 bp, Artificial Sequence
  Oligonucleotide primer for the detection of SNP TSC0041232
tgatgttttata

SEQ ID NO: 339878 - DNA, 12 bp, Artificial Sequence
  Oligonucleotide primer for the detection of SNP TSC0041233
taattttttccc

SEQ ID NO: 339879 - DNA, 12 bp, Artificial Sequence
  Oligonucleotide primer for the detection of SNP TSC0041233
ttaagaaataaa

SEQ ID NO: 339880 - DNA, 12 bp, Artificial Sequence
  Oligonucleotide primer for the detection of SNP TSC0041234
ctaacttttatt

SEQ ID NO: 339881 - DNA, 12 bp, Artificial Sequence
  Oligonucleotide primer for the detection of SNP TSC0041234
tgagtatttaaa

SEQ ID NO: 339882 - DNA, 12 bp, Artificial Sequence
  Oligonucleotide primer for the detection of SNP TSC0041235
aattttaaacat

SEQ ID NO: 339883 - DNA, 12 bp, Artificial Sequence
  Oligonucleotide primer for the detection of SNP TSC0041235
ttaagtttatag

SEQ ID NO: 339884 - DNA, 12 bp, Artificial Sequence
  Oligonucleotide primer for the detection of SNP TSC0041237
aaaacgaaatac

SEQ ID NO: 339885 - DNA, 12 bp, Artificial Sequence
  Oligonucleotide primer for the detection of SNP TSC0041237
tagttttggtgg

SEQ ID NO: 339886 - DNA, 12 bp, Artificial Sequence
  Oligonucleotide primer for the detection of SNP TSC0041237
aaggtggggtat

SEQ ID NO: 339887 - DNA, 12 bp, Artificial Sequence
  Oligonucleotide primer for the detection of SNP TSC0041237
aaggcggggtat

SEQ ID NO: 339888 - DNA, 12 bp, Artificial Sequence
  Oligonucleotide primer for the detection of SNP TSC0041238
ttctaaactctt

SEQ ID NO: 339889 - DNA, 12 bp, Artificial Sequence
  Oligonucleotide primer for the detection of SNP TSC0041238
tataagaaaaat

SEQ ID NO: 339890 - DNA, 12 bp, Artificial Sequence
  Oligonucleotide primer for the detection of SNP TSC0041239
attaaatttaac

SEQ ID NO: 339891 - DNA, 12 bp, Artificial Sequence
  Oligonucleotide primer for the detection of SNP TSC0041239
ttaaaactttca

SEQ ID NO: 339892 - DNA, 12 bp, Artificial Sequence
  Oligonucleotide primer for the detection of SNP TSC0041239
gttaggtttagt

SEQ ID NO: 339893 - DNA, 12 bp, Artificial Sequence
  Oligonucleotide primer for the detection of SNP TSC0041244
taaacttttttt

SEQ ID NO: 339894 - DNA, 12 bp, Artificial Sequence
  Oligonucleotide primer for the detection of SNP TSC0041244
atgaaaattttt

SEQ ID NO: 339895 - DNA, 12 bp, Artificial Sequence
  Oligonucleotide primer for the detection of SNP TSC0041245
tccttaaaaaaa

SEQ ID NO: 339896 - DNA, 12 bp, Artificial Sequence
  Oligonucleotide primer for the detection of SNP TSC0041245
tggttatgggat

SEQ ID NO: 339897 - DNA, 12 bp, Artificial Sequence
  Oligonucleotide primer for the detection of SNP TSC0041245
taactataaaac

SEQ ID NO: 339898 - DNA, 12 bp, Artificial Sequence
  Oligonucleotide primer for the detection of SNP TSC0041245
tttttagaggga

SEQ ID NO: 339899 - DNA, 12 bp, Artificial Sequence
  Oligonucleotide primer for the detection of SNP TSC0041247
taaatcaatcaa

SEQ ID NO: 339900 - DNA, 12 bp, Artificial Sequence
  Oligonucleotide primer for the detection of SNP TSC0041247
taaatcaatcga

SEQ ID NO: 339901 - DNA, 12 bp, Artificial Sequence
  Oligonucleotide primer for the detection of SNP TSC0041247
catatctttccc

SEQ ID NO: 339902 - DNA, 12 bp, Artificial Sequence
  Oligonucleotide primer for the detection of SNP TSC0041247
tgagttagttga

SEQ ID NO: 339903 - DNA, 12 bp, Artificial Sequence
  Oligonucleotide primer for the detection of SNP TSC0041247
tgagttagtcga

SEQ ID NO: 339904 - DNA, 12 bp, Artificial Sequence
  Oligonucleotide primer for the detection of SNP TSC0041252
attacctaatct

SEQ ID NO: 339905 - DNA, 12 bp, Artificial Sequence
  Oligonucleotide primer for the detection of SNP TSC0041252
aaaaaactacct

SEQ ID NO: 339906 - DNA, 12 bp, Artificial Sequence
  Oligonucleotide primer for the detection of SNP TSC0041255
aactcccaacct

SEQ ID NO: 339907 - DNA, 12 bp, Artificial Sequence
  Oligonucleotide primer for the detection of SNP TSC0041255
aactcccgacct

SEQ ID NO: 339908 - DNA, 12 bp, Artificial Sequence
  Oligonucleotide primer for the detection of SNP TSC0041255
gtgggtagagta

SEQ ID NO: 339909 - DNA, 12 bp, Artificial Sequence
  Oligonucleotide primer for the detection of SNP TSC0041255
aattttcgattt

SEQ ID NO: 339910 - DNA, 12 bp, Artificial Sequence
  Oligonucleotide primer for the detection of SNP TSC0041258
acaataataaat

SEQ ID NO: 339911 - DNA, 12 bp, Artificial Sequence
  Oligonucleotide primer for the detection of SNP TSC0041258
acttttaattta

SEQ ID NO: 339912 - DNA, 12 bp, Artificial Sequence
  Oligonucleotide primer for the detection of SNP TSC0041258
taatgataaatt

SEQ ID NO: 339913 - DNA, 12 bp, Artificial Sequence
  Oligonucleotide primer for the detection of SNP TSC0041258
taatgataaatc

SEQ ID NO: 339914 - DNA, 12 bp, Artificial Sequence
  Oligonucleotide primer for the detection of SNP TSC0041261
ttaactttaaaa

SEQ ID NO: 339915 - DNA, 12 bp, Artificial Sequence
  Oligonucleotide primer for the detection of SNP TSC0041261
atttattgaaat

SEQ ID NO: 339916 - DNA, 12 bp, Artificial Sequence
  Oligonucleotide primer for the detection of SNP TSC0041261
tcactaaaataa

SEQ ID NO: 339917 - DNA, 12 bp, Artificial Sequence
  Oligonucleotide primer for the detection of SNP TSC0041261
aattttaaagtt

SEQ ID NO: 339918 - DNA, 12 bp, Artificial Sequence
  Oligonucleotide primer for the detection of SNP TSC0041262
tcttcaataaat

SEQ ID NO: 339919 - DNA, 12 bp, Artificial Sequence
  Oligonucleotide primer for the detection of SNP TSC0041263
aaacaacatatc

SEQ ID NO: 339920 - DNA, 12 bp, Artificial Sequence
  Oligonucleotide primer for the detection of SNP TSC0041263
tttgtagtttta

SEQ ID NO: 339921 - DNA, 12 bp, Artificial Sequence
  Oligonucleotide primer for the detection of SNP TSC0041264
ataaactctata

SEQ ID NO: 339922 - DNA, 12 bp, Artificial Sequence
  Oligonucleotide primer for the detection of SNP TSC0041264
agggtggagttt

SEQ ID NO: 339923 - DNA, 12 bp, Artificial Sequence
  Oligonucleotide primer for the detection of SNP TSC0041264
gtggattttgtg

SEQ ID NO: 339924 - DNA, 12 bp, Artificial Sequence
  Oligonucleotide primer for the detection of SNP TSC0041265
atctctacccta

SEQ ID NO: 339925 - DNA, 12 bp, Artificial Sequence
  Oligonucleotide primer for the detection of SNP TSC0041265
ttggattataaa

SEQ ID NO: 339926 - DNA, 12 bp, Artificial Sequence
  Oligonucleotide primer for the detection of SNP TSC0041266
tattatccaaat

SEQ ID NO: 339927 - DNA, 12 bp, Artificial Sequence
  Oligonucleotide primer for the detection of SNP TSC0041267
cactcttcacta

SEQ ID NO: 339928 - DNA, 12 bp, Artificial Sequence
  Oligonucleotide primer for the detection of SNP TSC0041267
cgctcttcacta

SEQ ID NO: 339929 - DNA, 12 bp, Artificial Sequence
  Oligonucleotide primer for the detection of SNP TSC0041267
aggtaaaatggt

SEQ ID NO: 339930 - DNA, 12 bp, Artificial Sequence
  Oligonucleotide primer for the detection of SNP TSC0041270
ttcaaaataaca

SEQ ID NO: 339931 - DNA, 12 bp, Artificial Sequence
  Oligonucleotide primer for the detection of SNP TSC0041270
gattatattttt

SEQ ID NO: 339932 - DNA, 12 bp, Artificial Sequence
  Oligonucleotide primer for the detection of SNP TSC0041270
aatcataccctc

SEQ ID NO: 339933 - DNA, 12 bp, Artificial Sequence
  Oligonucleotide primer for the detection of SNP TSC0041270
tttaaaatgata

SEQ ID NO: 339934 - DNA, 12 bp, Artificial Sequence
  Oligonucleotide primer for the detection of SNP TSC0041271
ccctccttcctc

SEQ ID NO: 339935 - DNA, 12 bp, Artificial Sequence
  Oligonucleotide primer for the detection of SNP TSC0041271
aaggagggggaa

SEQ ID NO: 339936 - DNA, 12 bp, Artificial Sequence
  Oligonucleotide primer for the detection of SNP TSC0041272
tttttagaaagt

SEQ ID NO: 339937 - DNA, 12 bp, Artificial Sequence
  Oligonucleotide primer for the detection of SNP TSC0041272
tttcaaaaaaca

SEQ ID NO: 339938 - DNA, 12 bp, Artificial Sequence
  Oligonukleotid-Primer
atggaaaaggta

SEQ ID NO: 339939 - DNA, 12 bp, Artificial Sequence
  Oligonucleotide primer for the detection of SNP TSC0041274
aactattattta

SEQ ID NO: 339940 - DNA, 12 bp, Artificial Sequence
  Oligonucleotide primer for the detection of SNP TSC0041274
ttaaagttggat

SEQ ID NO: 339941 - DNA, 12 bp, Artificial Sequence
  Oligonucleotide primer for the detection of SNP TSC0041274
gaattattgttt

SEQ ID NO: 339942 - DNA, 12 bp, Artificial Sequence
  Oligonukleotid-Primer
tcacaaatatat

SEQ ID NO: 339943 - DNA, 12 bp, Artificial Sequence
  Oligonucleotide primer for the detection of SNP TSC0041275
gtaaatgtagta

SEQ ID NO: 339944 - DNA, 12 bp, Artificial Sequence
  Oligonucleotide primer for the detection of SNP TSC0041275
acaaatacaata

SEQ ID NO: 339945 - DNA, 12 bp, Artificial Sequence
  Oligonucleotide primer for the detection of SNP TSC0041275
ttataaatgtgt

SEQ ID NO: 339946 - DNA, 12 bp, Artificial Sequence
  Oligonucleotide primer for the detection of SNP TSC0007645
taaattatacct

SEQ ID NO: 339947 - DNA, 12 bp, Artificial Sequence
  Oligonucleotide primer for the detection of SNP TSC0007645
ttttaaaatatg

SEQ ID NO: 339948 - DNA, 12 bp, Artificial Sequence
  Oligonucleotide primer for the detection of SNP TSC0007933
acaccccttcac

SEQ ID NO: 339949 - DNA, 12 bp, Artificial Sequence
  Oligonucleotide primer for the detection of SNP TSC0007933
acgccccttcac

SEQ ID NO: 339950 - DNA, 12 bp, Artificial Sequence
  Oligonucleotide primer for the detection of SNP TSC0007933
acgtttttttat

SEQ ID NO: 339951 - DNA, 12 bp, Artificial Sequence
  Oligonucleotide primer for the detection of SNP TSC0009404
cactctaccata

SEQ ID NO: 339952 - DNA, 12 bp, Artificial Sequence
  Oligonucleotide primer for the detection of SNP TSC0009404
atttattgttat

SEQ ID NO: 339953 - DNA, 12 bp, Artificial Sequence
  Oligonucleotide primer for the detection of SNP TSC0009404
atccactatcac

SEQ ID NO: 339954 - DNA, 12 bp, Artificial Sequence
  Oligonucleotide primer for the detection of SNP TSC0009404
tattttgttatg

SEQ ID NO: 339955 - DNA, 12 bp, Artificial Sequence
  Oligonucleotide primer for the detection of SNP TSC0041277
ataaaaccccat

SEQ ID NO: 339956 - DNA, 12 bp, Artificial Sequence
  Oligonucleotide primer for the detection of SNP TSC0041277
ataaaaccccgt

SEQ ID NO: 339957 - DNA, 12 bp, Artificial Sequence
  Oligonucleotide primer for the detection of SNP TSC0041278
aaacccgaaacc

SEQ ID NO: 339958 - DNA, 12 bp, Artificial Sequence
  Oligonucleotide primer for the detection of SNP TSC0041278
gtatgtatgtaa

SEQ ID NO: 339959 - DNA, 12 bp, Artificial Sequence
  Oligonucleotide primer for the detection of SNP TSC0041279
agatgtttttta

SEQ ID NO: 339960 - DNA, 12 bp, Artificial Sequence
  Oligonucleotide primer for the detection of SNP TSC0041280
taatcaaaaata

SEQ ID NO: 339961 - DNA, 12 bp, Artificial Sequence
  Oligonucleotide primer for the detection of SNP TSC0041280
tagaagttttat

SEQ ID NO: 339962 - DNA, 12 bp, Artificial Sequence
  Oligonucleotide primer for the detection of SNP TSC0041280
caaaaaccttat

SEQ ID NO: 339963 - DNA, 12 bp, Artificial Sequence
  Oligonucleotide primer for the detection of SNP TSC0041280
tagttaagagta

SEQ ID NO: 339964 - DNA, 12 bp, Artificial Sequence
  Oligonucleotide primer for the detection of SNP TSC0041281
caacacaaacta

SEQ ID NO: 339965 - DNA, 12 bp, Artificial Sequence
  Oligonucleotide primer for the detection of SNP TSC0041281
caacacgaacta

SEQ ID NO: 339966 - DNA, 12 bp, Artificial Sequence
  Oligonucleotide primer for the detection of SNP TSC0041281
tggattttataa

SEQ ID NO: 339967 - DNA, 12 bp, Artificial Sequence
  Oligonucleotide primer for the detection of SNP TSC0041281
taaattccataa

SEQ ID NO: 339968 - DNA, 12 bp, Artificial Sequence
  Oligonucleotide primer for the detection of SNP TSC0041281
tagtatgagtta

SEQ ID NO: 339969 - DNA, 12 bp, Artificial Sequence
  Oligonucleotide primer for the detection of SNP TSC0041281
tagtacgagtta

SEQ ID NO: 339970 - DNA, 12 bp, Artificial Sequence
  Oligonucleotide primer for the detection of SNP TSC0009633
gaatggatgtta

SEQ ID NO: 339971 - DNA, 12 bp, Artificial Sequence
  Oligonucleotide primer for the detection of SNP TSC0009633
ttgaaaaaatgg

SEQ ID NO: 339972 - DNA, 12 bp, Artificial Sequence
  Oligonucleotide primer for the detection of SNP TSC0009675
atcaaaaccctt

SEQ ID NO: 339973 - DNA, 12 bp, Artificial Sequence
  Oligonucleotide primer for the detection of SNP TSC0009675
atgtttatatat

SEQ ID NO: 339974 - DNA, 12 bp, Artificial Sequence
  Oligonucleotide primer for the detection of SNP TSC0009675
tatctacatata

SEQ ID NO: 339975 - DNA, 12 bp, Artificial Sequence
  Oligonucleotide primer for the detection of SNP TSC0009675
attaaagttttt

SEQ ID NO: 339976 - DNA, 12 bp, Artificial Sequence
  Oligonucleotide primer for the detection of SNP TSC0041282
ttacataaatac

SEQ ID NO: 339977 - DNA, 12 bp, Artificial Sequence
  Oligonucleotide primer for the detection of SNP TSC0041287
ctaaatattcct

SEQ ID NO: 339978 - DNA, 12 bp, Artificial Sequence
  Oligonucleotide primer for the detection of SNP TSC0041288
gtggggtagttt

SEQ ID NO: 339979 - DNA, 12 bp, Artificial Sequence
  Oligonucleotide primer for the detection of SNP TSC0041288
taaaacaactta

SEQ ID NO: 339980 - DNA, 12 bp, Artificial Sequence
  Oligonucleotide primer for the detection of SNP TSC0041288
ttaagattatgt

SEQ ID NO: 339981 - DNA, 12 bp, Artificial Sequence
  Oligonucleotide primer for the detection of SNP TSC0041289
tatacaactcac

SEQ ID NO: 339982 - DNA, 12 bp, Artificial Sequence
  Oligonucleotide primer for the detection of SNP TSC0041289
tatacgactcac

SEQ ID NO: 339983 - DNA, 12 bp, Artificial Sequence
  Oligonucleotide primer for the detection of SNP TSC0041289
tagatttagtga

SEQ ID NO: 339984 - DNA, 12 bp, Artificial Sequence
  Oligonucleotide primer for the detection of SNP TSC0041291
ctttcccctaaa

SEQ ID NO: 339985 - DNA, 12 bp, Artificial Sequence
  Oligonucleotide primer for the detection of SNP TSC0041291
tatgattaattt

SEQ ID NO: 339986 - DNA, 12 bp, Artificial Sequence
  Oligonucleotide primer for the detection of SNP TSC0041291
tataactaattt

SEQ ID NO: 339987 - DNA, 12 bp, Artificial Sequence
  Oligonucleotide primer for the detection of SNP TSC0008136
tttctttcactt

SEQ ID NO: 339988 - DNA, 12 bp, Artificial Sequence
  Oligonucleotide primer for the detection of SNP TSC0008136
ttaggtaattag

SEQ ID NO: 339989 - DNA, 12 bp, Artificial Sequence
  Oligonucleotide primer for the detection of SNP TSC0041292
aaatacttattt

SEQ ID NO: 339990 - DNA, 12 bp, Artificial Sequence
  Oligonucleotide primer for the detection of SNP TSC0041292
ttgtttttgata

SEQ ID NO: 339991 - DNA, 12 bp, Artificial Sequence
  Oligonucleotide primer for the detection of SNP TSC0041292
ttatttctaata

SEQ ID NO: 339992 - DNA, 12 bp, Artificial Sequence
  Oligonucleotide primer for the detection of SNP TSC0041292
agtgtttatttt

SEQ ID NO: 339993 - DNA, 12 bp, Artificial Sequence
  Oligonucleotide primer for the detection of SNP TSC0041292
agtgtttatttc

SEQ ID NO: 339994 - DNA, 12 bp, Artificial Sequence
  Oligonucleotide primer for the detection of SNP TSC0041293
aaataacttaca

SEQ ID NO: 339995 - DNA, 12 bp, Artificial Sequence
  Oligonucleotide primer for the detection of SNP TSC0041293
gataatttatac

SEQ ID NO: 339996 - DNA, 12 bp, Artificial Sequence
  Oligonucleotide primer for the detection of SNP TSC0041295
aattttcaacca

SEQ ID NO: 339997 - DNA, 12 bp, Artificial Sequence
  Oligonucleotide primer for the detection of SNP TSC0041295
tagatagtaaat

SEQ ID NO: 339998 - DNA, 12 bp, Artificial Sequence
  Oligonucleotide primer for the detection of SNP TSC0041295
caaacaataaat

SEQ ID NO: 339999 - DNA, 12 bp, Artificial Sequence
  Oligonucleotide primer for the detection of SNP TSC0041295
aatttttagtta

SEQ ID NO: 340000 - DNA, 12 bp, Artificial Sequence
  Oligonucleotide primer for the detection of SNP TSC0041296
attaccttaaac

SEQ ID NO: 340001 - DNA, 12 bp, Artificial Sequence
  Oligonucleotide primer for the detection of SNP TSC0041297
ctatcataaaca

SEQ ID NO: 340002 - DNA, 12 bp, Artificial Sequence
  Oligonucleotide primer for the detection of SNP TSC0041297
ttaatttcataa

SEQ ID NO: 340003 - DNA, 12 bp, Artificial Sequence
  Oligonucleotide primer for the detection of SNP TSC0041297
ttattataagta

SEQ ID NO: 340004 - DNA, 12 bp, Artificial Sequence
  Oligonucleotide primer for the detection of SNP TSC0041299
acatttatatct

SEQ ID NO: 340005 - DNA, 12 bp, Artificial Sequence
  Oligonucleotide primer for the detection of SNP TSC0041299
atgtagaaataa

SEQ ID NO: 340006 - DNA, 12 bp, Artificial Sequence
  Oligonucleotide primer for the detection of SNP TSC0041301
aacccaacacca

SEQ ID NO: 340007 - DNA, 12 bp, Artificial Sequence
  Oligonucleotide primer for the detection of SNP TSC0041301
ttggtagttttt

SEQ ID NO: 340008 - DNA, 12 bp, Artificial Sequence
  Oligonucleotide primer for the detection of SNP TSC0041301
ttaacaacttcc

SEQ ID NO: 340009 - DNA, 12 bp, Artificial Sequence
  Oligonucleotide primer for the detection of SNP TSC0041301
ggtttaatatta

SEQ ID NO: 340010 - DNA, 12 bp, Artificial Sequence
  Oligonucleotide primer for the detection of SNP TSC0041302
ctttttaaaata

SEQ ID NO: 340011 - DNA, 12 bp, Artificial Sequence
  Oligonucleotide primer for the detection of SNP TSC0041302
attaaaattatt

SEQ ID NO: 340012 - DNA, 12 bp, Artificial Sequence
  Oligonucleotide primer for the detection of SNP TSC0041303
atacattattcc

SEQ ID NO: 340013 - DNA, 12 bp, Artificial Sequence
  Oligonucleotide primer for the detection of SNP TSC0041306
atcaaataaaac

SEQ ID NO: 340014 - DNA, 12 bp, Artificial Sequence
  Oligonucleotide primer for the detection of SNP TSC0041306
gggaaattttgg

SEQ ID NO: 340015 - DNA, 12 bp, Artificial Sequence
  Oligonucleotide primer for the detection of SNP TSC0041307
aggaaaggtaga

SEQ ID NO: 340016 - DNA, 12 bp, Artificial Sequence
  Oligonucleotide primer for the detection of SNP TSC0041307
gaatagaaaatt

SEQ ID NO: 340017 - DNA, 12 bp, Artificial Sequence
  Oligonucleotide primer for the detection of SNP TSC0041307
gaatagaaaatc

SEQ ID NO: 340018 - DNA, 12 bp, Artificial Sequence
  Oligonucleotide primer for the detection of SNP TSC0006221
taacttaaattc

SEQ ID NO: 340019 - DNA, 12 bp, Artificial Sequence
  Oligonucleotide primer for the detection of SNP TSC0006221
tatattgggaaa

SEQ ID NO: 340020 - DNA, 12 bp, Artificial Sequence
  Oligonucleotide primer for the detection of SNP TSC0041308
atcaaatcataa

SEQ ID NO: 340021 - DNA, 12 bp, Artificial Sequence
  Oligonucleotide primer for the detection of SNP TSC0041308
tatcctttctca

SEQ ID NO: 340022 - DNA, 12 bp, Artificial Sequence
  Oligonucleotide primer for the detection of SNP TSC0041308
attaaattatgg

SEQ ID NO: 340023 - DNA, 12 bp, Artificial Sequence
  Oligonucleotide primer for the detection of SNP TSC0041309
cataaaataaaa

SEQ ID NO: 340024 - DNA, 12 bp, Artificial Sequence
  Oligonucleotide primer for the detection of SNP TSC0041309
aggaaaattttg

SEQ ID NO: 340025 - DNA, 12 bp, Artificial Sequence
  Oligonucleotide primer for the detection of SNP TSC0041310
acaattttcaaa

SEQ ID NO: 340026 - DNA, 12 bp, Artificial Sequence
  Oligonucleotide primer for the detection of SNP TSC0041310
taaatttatatt

SEQ ID NO: 340027 - DNA, 12 bp, Artificial Sequence
  Oligonucleotide primer for the detection of SNP TSC0041310
aaattcacatca

SEQ ID NO: 340028 - DNA, 12 bp, Artificial Sequence
  Oligonucleotide primer for the detection of SNP TSC0041310
tataatttttag

SEQ ID NO: 340029 - DNA, 12 bp, Artificial Sequence
  Oligonucleotide primer for the detection of SNP TSC0041311
acaaccttatac

SEQ ID NO: 340030 - DNA, 12 bp, Artificial Sequence
  Oligonucleotide primer for the detection of SNP TSC0041312
atatacatatat

SEQ ID NO: 340031 - DNA, 12 bp, Artificial Sequence
  Oligonucleotide primer for the detection of SNP TSC0041313
ataatacccaac

SEQ ID NO: 340032 - DNA, 12 bp, Artificial Sequence
  Oligonucleotide primer for the detection of SNP TSC0041313
tgagtattgata

SEQ ID NO: 340033 - DNA, 12 bp, Artificial Sequence
  Oligonucleotide primer for the detection of SNP TSC0041314
ctaaattccatt

SEQ ID NO: 340034 - DNA, 12 bp, Artificial Sequence
  Oligonucleotide primer for the detection of SNP TSC0041315
aaaacacacttc

SEQ ID NO: 340035 - DNA, 12 bp, Artificial Sequence
  Oligonucleotide primer for the detection of SNP TSC0041315
agttaaaatttt

SEQ ID NO: 340036 - DNA, 12 bp, Artificial Sequence
  Oligonucleotide primer for the detection of SNP TSC0041315
ataactaaaatc

SEQ ID NO: 340037 - DNA, 12 bp, Artificial Sequence
  Oligonucleotide primer for the detection of SNP TSC0041315
agaatatatttc

SEQ ID NO: 340038 - DNA, 12 bp, Artificial Sequence
  Oligonucleotide primer for the detection of SNP TSC0041316
tgatttgatttt

SEQ ID NO: 340039 - DNA, 12 bp, Artificial Sequence
  Oligonucleotide primer for the detection of SNP TSC0041316
ggtattttttga

SEQ ID NO: 340040 - DNA, 12 bp, Artificial Sequence
  Oligonucleotide primer for the detection of SNP TSC0041317
tctttaaaattt

SEQ ID NO: 340041 - DNA, 12 bp, Artificial Sequence
  Oligonucleotide primer for the detection of SNP TSC0041317
gtttttaattgt

SEQ ID NO: 340042 - DNA, 12 bp, Artificial Sequence
  Oligonucleotide primer for the detection of SNP TSC0041317
cattcttaatta

SEQ ID NO: 340043 - DNA, 12 bp, Artificial Sequence
  Oligonucleotide primer for the detection of SNP TSC0041317
cgttcttaatta

SEQ ID NO: 340044 - DNA, 12 bp, Artificial Sequence
  Oligonucleotide primer for the detection of SNP TSC0041318
tattttattggg

SEQ ID NO: 340045 - DNA, 12 bp, Artificial Sequence
  Oligonucleotide primer for the detection of SNP TSC0041318
atcccactaaaa

SEQ ID NO: 340046 - DNA, 12 bp, Artificial Sequence
  Oligonucleotide primer for the detection of SNP TSC0041318
atttgggaatat

SEQ ID NO: 340047 - DNA, 12 bp, Artificial Sequence
  Oligonucleotide primer for the detection of SNP TSC0041319
ataactcttcta

SEQ ID NO: 340048 - DNA, 12 bp, Artificial Sequence
  Oligonucleotide primer for the detection of SNP TSC0041319
tgagttaataag

SEQ ID NO: 340049 - DNA, 12 bp, Artificial Sequence
  Oligonucleotide primer for the detection of SNP TSC0041320
aaataacttaat

SEQ ID NO: 340050 - DNA, 12 bp, Artificial Sequence
  Oligonucleotide primer for the detection of SNP TSC0041320
aagaaataaaag

SEQ ID NO: 340051 - DNA, 12 bp, Artificial Sequence
  Oligonucleotide primer for the detection of SNP TSC0006368
atttctactctt

SEQ ID NO: 340052 - DNA, 12 bp, Artificial Sequence
  Oligonucleotide primer for the detection of SNP TSC0006368
gaaaataaataa

SEQ ID NO: 340053 - DNA, 12 bp, Artificial Sequence
  Oligonucleotide primer for the detection of SNP TSC0041321
ctataatccata

SEQ ID NO: 340054 - DNA, 12 bp, Artificial Sequence
  Oligonucleotide primer for the detection of SNP TSC0041321
tttttggggaat

SEQ ID NO: 340055 - DNA, 12 bp, Artificial Sequence
  Oligonucleotide primer for the detection of SNP TSC0041321
tccttaaaaaac

SEQ ID NO: 340056 - DNA, 12 bp, Artificial Sequence
  Oligonucleotide primer for the detection of SNP TSC0041322
accacacatatc

SEQ ID NO: 340057 - DNA, 12 bp, Artificial Sequence
  Oligonucleotide primer for the detection of SNP TSC0041322
tattattgagta

SEQ ID NO: 340058 - DNA, 12 bp, Artificial Sequence
  Oligonucleotide primer for the detection of SNP TSC0041323
atttttctaccc

SEQ ID NO: 340059 - DNA, 12 bp, Artificial Sequence
  Oligonucleotide primer for the detection of SNP TSC0041323
ttgttgttaggg

SEQ ID NO: 340060 - DNA, 12 bp, Artificial Sequence
  Oligonucleotide primer for the detection of SNP TSC0041323
ttgtcgttaggg

SEQ ID NO: 340061 - DNA, 12 bp, Artificial Sequence
  Oligonucleotide primer for the detection of SNP TSC0041324
cactatcatcaa

SEQ ID NO: 340062 - DNA, 12 bp, Artificial Sequence
  Oligonucleotide primer for the detection of SNP TSC0041324
cactatcgtcaa

SEQ ID NO: 340063 - DNA, 12 bp, Artificial Sequence
  Oligonucleotide primer for the detection of SNP TSC0041324
cgctatcatcaa

SEQ ID NO: 340064 - DNA, 12 bp, Artificial Sequence
  Oligonucleotide primer for the detection of SNP TSC0041324
cgctatcgtcaa

SEQ ID NO: 340065 - DNA, 12 bp, Artificial Sequence
  Oligonucleotide primer for the detection of SNP TSC0041324
ttttctaccccc

SEQ ID NO: 340066 - DNA, 12 bp, Artificial Sequence
  Oligonucleotide primer for the detection of SNP TSC0041324
tgttgttgttag

SEQ ID NO: 340067 - DNA, 12 bp, Artificial Sequence
  Oligonucleotide primer for the detection of SNP TSC0041324
cgttgttgttag

SEQ ID NO: 340068 - DNA, 12 bp, Artificial Sequence
  Oligonucleotide primer for the detection of SNP TSC0041324
tgttgtcgttag

SEQ ID NO: 340069 - DNA, 12 bp, Artificial Sequence
  Oligonucleotide primer for the detection of SNP TSC0041324
cgttgtcgttag

SEQ ID NO: 340070 - DNA, 12 bp, Artificial Sequence
  Oligonucleotide primer for the detection of SNP TSC0041325
taactataatcc

SEQ ID NO: 340071 - DNA, 12 bp, Artificial Sequence
  Oligonucleotide primer for the detection of SNP TSC0041325
gggaatagggtg

SEQ ID NO: 340072 - DNA, 12 bp, Artificial Sequence
  Oligonucleotide primer for the detection of SNP TSC0041325
tggttgtggttt

SEQ ID NO: 340073 - DNA, 12 bp, Artificial Sequence
  Oligonucleotide primer for the detection of SNP TSC0041326
tttaataaaatt

SEQ ID NO: 340074 - DNA, 12 bp, Artificial Sequence
  Oligonucleotide primer for the detection of SNP TSC0041326
agaaatattata

SEQ ID NO: 340075 - DNA, 12 bp, Artificial Sequence
  Oligonucleotide primer for the detection of SNP TSC0041329
tgtgtgtgttcg

SEQ ID NO: 340076 - DNA, 12 bp, Artificial Sequence
  Oligonucleotide primer for the detection of SNP TSC0041330
cacactaacttt

SEQ ID NO: 340077 - DNA, 12 bp, Artificial Sequence
  Oligonucleotide primer for the detection of SNP TSC0041334
taacatattaat

SEQ ID NO: 340078 - DNA, 12 bp, Artificial Sequence
  Oligonucleotide primer for the detection of SNP TSC0041334
agagttatttta

SEQ ID NO: 340079 - DNA, 12 bp, Artificial Sequence
  Oligonucleotide primer for the detection of SNP TSC0041334
aaaatcacctca

SEQ ID NO: 340080 - DNA, 12 bp, Artificial Sequence
  Oligonucleotide primer for the detection of SNP TSC0041334
tgatatgttgat

SEQ ID NO: 340081 - DNA, 12 bp, Artificial Sequence
  Oligonucleotide primer for the detection of SNP TSC0041336
aaattcccatac

SEQ ID NO: 340082 - DNA, 12 bp, Artificial Sequence
  Oligonucleotide primer for the detection of SNP TSC0041336
attttgtgattt

SEQ ID NO: 340083 - DNA, 12 bp, Artificial Sequence
  Oligonucleotide primer for the detection of SNP TSC0041336
attttgtgattc

SEQ ID NO: 340084 - DNA, 12 bp, Artificial Sequence
  Oligonucleotide primer for the detection of SNP TSC0041336
taaatcctataa

SEQ ID NO: 340085 - DNA, 12 bp, Artificial Sequence
  Oligonucleotide primer for the detection of SNP TSC0041336
aagtttttatgt

SEQ ID NO: 340086 - DNA, 12 bp, Artificial Sequence
  Oligonucleotide primer for the detection of SNP TSC0041337
tggttaatagag

SEQ ID NO: 340087 - DNA, 12 bp, Artificial Sequence
  Oligonucleotide primer for the detection of SNP TSC0041337
aagatggagttt

SEQ ID NO: 340088 - DNA, 12 bp, Artificial Sequence
  Oligonucleotide primer for the detection of SNP TSC0041340
cttcctctccat

SEQ ID NO: 340089 - DNA, 12 bp, Artificial Sequence
  Oligonucleotide primer for the detection of SNP TSC0041341
tttattctttac

SEQ ID NO: 340090 - DNA, 12 bp, Artificial Sequence
  Oligonucleotide primer for the detection of SNP TSC0041342
atctaaaactat

SEQ ID NO: 340091 - DNA, 12 bp, Artificial Sequence
  Oligonucleotide primer for the detection of SNP TSC0041342
gggttaggagtg

SEQ ID NO: 340092 - DNA, 12 bp, Artificial Sequence
  Oligonucleotide primer for the detection of SNP TSC0041342
gggttaggagcg

SEQ ID NO: 340093 - DNA, 12 bp, Artificial Sequence
  Oligonucleotide primer for the detection of SNP TSC0041342
aaaccaaaaacg

SEQ ID NO: 340094 - DNA, 12 bp, Artificial Sequence
  Oligonucleotide primer for the detection of SNP TSC0041342
gtttaaggttgt

SEQ ID NO: 340095 - DNA, 12 bp, Artificial Sequence
  Oligonucleotide primer for the detection of SNP TSC0041343
ttatgaatataa

SEQ ID NO: 340096 - DNA, 12 bp, Artificial Sequence
  Oligonucleotide primer for the detection of SNP TSC0041343
ttataaacacaa

SEQ ID NO: 340097 - DNA, 12 bp, Artificial Sequence
  Oligonucleotide primer for the detection of SNP TSC0041343
tgggtgatttgt

SEQ ID NO: 340098 - DNA, 12 bp, Artificial Sequence
  Oligonucleotide primer for the detection of SNP TSC0041343
tgggtgatttgc

SEQ ID NO: 340099 - DNA, 12 bp, Artificial Sequence
  Oligonukleotid-Primer
caattttcccaa

SEQ ID NO: 340100 - DNA, 12 bp, Artificial Sequence
  Oligonucleotide primer for the detection of SNP TSC0041344
attaagataggt

SEQ ID NO: 340101 - DNA, 12 bp, Artificial Sequence
  Oligonucleotide primer for the detection of SNP TSC0041344
attaaaacaaac

SEQ ID NO: 340102 - DNA, 12 bp, Artificial Sequence
  Oligonucleotide primer for the detection of SNP TSC0041345
atatttaaatac

SEQ ID NO: 340103 - DNA, 12 bp, Artificial Sequence
  Oligonucleotide primer for the detection of SNP TSC0041345
gtatggatggaa

SEQ ID NO: 340104 - DNA, 12 bp, Artificial Sequence
  Oligonucleotide primer for the detection of SNP TSC0041346
caaaaatattac

SEQ ID NO: 340105 - DNA, 12 bp, Artificial Sequence
  Oligonucleotide primer for the detection of SNP TSC0041346
cttatcaaattt

SEQ ID NO: 340106 - DNA, 12 bp, Artificial Sequence
  Oligonucleotide primer for the detection of SNP TSC0041346
taaagatattat

SEQ ID NO: 340107 - DNA, 12 bp, Artificial Sequence
  Oligonucleotide primer for the detection of SNP TSC0041347
tcaaaaatatta

SEQ ID NO: 340108 - DNA, 12 bp, Artificial Sequence
  Oligonucleotide primer for the detection of SNP TSC0041347
ttattaaatttt

SEQ ID NO: 340109 - DNA, 12 bp, Artificial Sequence
  Oligonucleotide primer for the detection of SNP TSC0041347
ttatcaaatttt

SEQ ID NO: 340110 - DNA, 12 bp, Artificial Sequence
  Oligonucleotide primer for the detection of SNP TSC0041347
ttaaagatatta

SEQ ID NO: 340111 - DNA, 12 bp, Artificial Sequence
  Oligonucleotide primer for the detection of SNP TSC0041352
ccttctccaaaa

SEQ ID NO: 340112 - DNA, 12 bp, Artificial Sequence
  Oligonucleotide primer for the detection of SNP TSC0041352
tcttaaccaaca

SEQ ID NO: 340113 - DNA, 12 bp, Artificial Sequence
  Oligonucleotide primer for the detection of SNP TSC0041353
ctcaacccatac

SEQ ID NO: 340114 - DNA, 12 bp, Artificial Sequence
  Oligonucleotide primer for the detection of SNP TSC0041353
agagttggtggg

SEQ ID NO: 340115 - DNA, 12 bp, Artificial Sequence
  Oligonucleotide primer for the detection of SNP TSC0041354
ttctttaaaaat

SEQ ID NO: 340116 - DNA, 12 bp, Artificial Sequence
  Oligonucleotide primer for the detection of SNP TSC0041354
ggggtgaataga

SEQ ID NO: 340117 - DNA, 12 bp, Artificial Sequence
  Oligonucleotide primer for the detection of SNP TSC0041355
aatttactaact

SEQ ID NO: 340118 - DNA, 12 bp, Artificial Sequence
  Oligonucleotide primer for the detection of SNP TSC0041355
tggagtgagaga

SEQ ID NO: 340119 - DNA, 12 bp, Artificial Sequence
  Oligonucleotide primer for the detection of SNP TSC0009582
tgagataggaat

SEQ ID NO: 340120 - DNA, 12 bp, Artificial Sequence
  Oligonucleotide primer for the detection of SNP TSC0009582
tgaaaggataga

SEQ ID NO: 340121 - DNA, 12 bp, Artificial Sequence
  Oligonucleotide primer for the detection of SNP TSC0041356
taaataaaactt

SEQ ID NO: 340122 - DNA, 12 bp, Artificial Sequence
  Oligonucleotide primer for the detection of SNP TSC0041356
ttttagtgttta

SEQ ID NO: 340123 - DNA, 12 bp, Artificial Sequence
  Oligonucleotide primer for the detection of SNP TSC0041357
cttaaacactaa

SEQ ID NO: 340124 - DNA, 12 bp, Artificial Sequence
  Oligonucleotide primer for the detection of SNP TSC0041357
gttagaaattat

SEQ ID NO: 340125 - DNA, 12 bp, Artificial Sequence
  Oligonucleotide primer for the detection of SNP TSC0041357
aaccaaaaacta

SEQ ID NO: 340126 - DNA, 12 bp, Artificial Sequence
  Oligonucleotide primer for the detection of SNP TSC0041357
taaatattggtt

SEQ ID NO: 340127 - DNA, 12 bp, Artificial Sequence
  Oligonucleotide primer for the detection of SNP TSC0041358
tcaaatattttt

SEQ ID NO: 340128 - DNA, 12 bp, Artificial Sequence
  Oligonucleotide primer for the detection of SNP TSC0041358
ataagtaaaata

SEQ ID NO: 340129 - DNA, 12 bp, Artificial Sequence
  Oligonucleotide primer for the detection of SNP TSC0041358
ataaataaaaca

SEQ ID NO: 340130 - DNA, 12 bp, Artificial Sequence
  Oligonucleotide primer for the detection of SNP TSC0041358
ttaggtgttttt

SEQ ID NO: 340131 - DNA, 12 bp, Artificial Sequence
  Oligonucleotide primer for the detection of SNP TSC0041359
attcattaccct

SEQ ID NO: 340132 - DNA, 12 bp, Artificial Sequence
  Oligonucleotide primer for the detection of SNP TSC0041359
taggaaataata

SEQ ID NO: 340133 - DNA, 12 bp, Artificial Sequence
  Oligonucleotide primer for the detection of SNP TSC0041363
aaatccacaaac

SEQ ID NO: 340134 - DNA, 12 bp, Artificial Sequence
  Oligonucleotide primer for the detection of SNP TSC0041364
attcatttataa

SEQ ID NO: 340135 - DNA, 12 bp, Artificial Sequence
  Oligonucleotide primer for the detection of SNP TSC0041364
tgtttgcggaat

SEQ ID NO: 340136 - DNA, 12 bp, Artificial Sequence
  Oligonucleotide primer for the detection of SNP TSC0041364
tgtttgtggaac

SEQ ID NO: 340137 - DNA, 12 bp, Artificial Sequence
  Oligonucleotide primer for the detection of SNP TSC0041364
tgtttgcggaac

SEQ ID NO: 340138 - DNA, 12 bp, Artificial Sequence
  Oligonucleotide primer for the detection of SNP TSC0041364
tacttacaaaac

SEQ ID NO: 340139 - DNA, 12 bp, Artificial Sequence
  Oligonucleotide primer for the detection of SNP TSC0041364
tacttacgaaac

SEQ ID NO: 340140 - DNA, 12 bp, Artificial Sequence
  Oligonucleotide primer for the detection of SNP TSC0041364
atttatttataa

SEQ ID NO: 340141 - DNA, 12 bp, Artificial Sequence
  Oligonucleotide primer for the detection of SNP TSC0041365
tagtgtttgggg

SEQ ID NO: 340142 - DNA, 12 bp, Artificial Sequence
  Oligonucleotide primer for the detection of SNP TSC0041366
caacaataatct

SEQ ID NO: 340143 - DNA, 12 bp, Artificial Sequence
  Oligonucleotide primer for the detection of SNP TSC0041366
tttgtgtattta

SEQ ID NO: 340144 - DNA, 12 bp, Artificial Sequence
  Oligonucleotide primer for the detection of SNP TSC0041366
tttatataccca

SEQ ID NO: 340145 - DNA, 12 bp, Artificial Sequence
  Oligonucleotide primer for the detection of SNP TSC0041366
tagtagtggttt

SEQ ID NO: 340146 - DNA, 12 bp, Artificial Sequence
  Oligonucleotide primer for the detection of SNP TSC0041367
aaacataaaaaa

SEQ ID NO: 340147 - DNA, 12 bp, Artificial Sequence
  Oligonucleotide primer for the detection of SNP TSC0041367
aaggatgaaatt

SEQ ID NO: 340148 - DNA, 12 bp, Artificial Sequence
  Oligonucleotide primer for the detection of SNP TSC0041368
ctatctctatct

SEQ ID NO: 340149 - DNA, 12 bp, Artificial Sequence
  Oligonucleotide primer for the detection of SNP TSC0041368
tgaggagtgtgt

SEQ ID NO: 340150 - DNA, 12 bp, Artificial Sequence
  Oligonucleotide primer for the detection of SNP TSC0041369
ttaccatttttc

SEQ ID NO: 340151 - DNA, 12 bp, Artificial Sequence
  Oligonucleotide primer for the detection of SNP TSC0041369
ttttggggagta

SEQ ID NO: 340152 - DNA, 12 bp, Artificial Sequence
  Oligonucleotide primer for the detection of SNP TSC0041371
cctactcccttt

SEQ ID NO: 340153 - DNA, 12 bp, Artificial Sequence
  Oligonucleotide primer for the detection of SNP TSC0041371
tactttttatac

SEQ ID NO: 340154 - DNA, 12 bp, Artificial Sequence
  Oligonucleotide primer for the detection of SNP TSC0041372
attactactcct

SEQ ID NO: 340155 - DNA, 12 bp, Artificial Sequence
  Oligonucleotide primer for the detection of SNP TSC0041372
cctccaactaaa

SEQ ID NO: 340156 - DNA, 12 bp, Artificial Sequence
  Oligonucleotide primer for the detection of SNP TSC0041373
ccacataaaaaa

SEQ ID NO: 340157 - DNA, 12 bp, Artificial Sequence
  Oligonucleotide primer for the detection of SNP TSC0041373
gttattattatt

SEQ ID NO: 340158 - DNA, 12 bp, Artificial Sequence
  Oligonucleotide primer for the detection of SNP TSC0041373
ttatataaaaaa

SEQ ID NO: 340159 - DNA, 12 bp, Artificial Sequence
  Oligonucleotide primer for the detection of SNP TSC0041374
caaactatatat

SEQ ID NO: 340160 - DNA, 12 bp, Artificial Sequence
  Oligonucleotide primer for the detection of SNP TSC0041374
cgaactatatat

SEQ ID NO: 340161 - DNA, 12 bp, Artificial Sequence
  Oligonucleotide primer for the detection of SNP TSC0041375
aatctaattaca

SEQ ID NO: 340162 - DNA, 12 bp, Artificial Sequence
  Oligonucleotide primer for the detection of SNP TSC0041375
aatgatttttat

SEQ ID NO: 340163 - DNA, 12 bp, Artificial Sequence
  Oligonucleotide primer for the detection of SNP TSC0041375
aataacctctac

SEQ ID NO: 340164 - DNA, 12 bp, Artificial Sequence
  Oligonucleotide primer for the detection of SNP TSC0041375
gatttaattgta

SEQ ID NO: 340165 - DNA, 12 bp, Artificial Sequence
  Oligonucleotide primer for the detection of SNP TSC0041376
aaacttaatact

SEQ ID NO: 340166 - DNA, 12 bp, Artificial Sequence
  Oligonucleotide primer for the detection of SNP TSC0041376
aatgtttaagtg

SEQ ID NO: 340167 - DNA, 12 bp, Artificial Sequence
  Oligonucleotide primer for the detection of SNP TSC0041381
ctccttcctctc

SEQ ID NO: 340168 - DNA, 12 bp, Artificial Sequence
  Oligonucleotide primer for the detection of SNP TSC0041381
tataggggaata

SEQ ID NO: 340169 - DNA, 12 bp, Artificial Sequence
  Oligonucleotide primer for the detection of SNP TSC0041382
cacaaccaaatc

SEQ ID NO: 340170 - DNA, 12 bp, Artificial Sequence
  Oligonucleotide primer for the detection of SNP TSC0041382
attattatttga

SEQ ID NO: 340171 - DNA, 12 bp, Artificial Sequence
  Oligonucleotide primer for the detection of SNP TSC0006375
catttttattta

SEQ ID NO: 340172 - DNA, 12 bp, Artificial Sequence
  Oligonucleotide primer for the detection of SNP TSC0006375
ttttgggagtag

SEQ ID NO: 340173 - DNA, 12 bp, Artificial Sequence
  Oligonucleotide primer for the detection of SNP TSC0006375
tttcgggagtag

SEQ ID NO: 340174 - DNA, 12 bp, Artificial Sequence
  Oligonucleotide primer for the detection of SNP TSC0006375
tttcaaaaacaa

SEQ ID NO: 340175 - DNA, 12 bp, Artificial Sequence
  Oligonucleotide primer for the detection of SNP TSC0006375
tttcgaaaacaa

SEQ ID NO: 340176 - DNA, 12 bp, Artificial Sequence
  Oligonucleotide primer for the detection of SNP TSC0041386
catatccacccc

SEQ ID NO: 340177 - DNA, 12 bp, Artificial Sequence
  Oligonucleotide primer for the detection of SNP TSC0041386
cgtatccacccc

SEQ ID NO: 340178 - DNA, 12 bp, Artificial Sequence
  Oligonucleotide primer for the detection of SNP TSC0041386
tttttaaacgta

SEQ ID NO: 340179 - DNA, 12 bp, Artificial Sequence
  Oligonucleotide primer for the detection of SNP TSC0041387
taacatctattt

SEQ ID NO: 340180 - DNA, 12 bp, Artificial Sequence
  Oligonucleotide primer for the detection of SNP TSC0041392
caaaatactcat

SEQ ID NO: 340181 - DNA, 12 bp, Artificial Sequence
  Oligonucleotide primer for the detection of SNP TSC0041392
tttttgaaggtt

SEQ ID NO: 340182 - DNA, 12 bp, Artificial Sequence
  Oligonucleotide primer for the detection of SNP TSC0041392
ttttcgaaggtt

SEQ ID NO: 340183 - DNA, 12 bp, Artificial Sequence
  Oligonucleotide primer for the detection of SNP TSC0041392
tttccaaaaacc

SEQ ID NO: 340184 - DNA, 12 bp, Artificial Sequence
  Oligonucleotide primer for the detection of SNP TSC0041392
tttccgaaaacc

SEQ ID NO: 340185 - DNA, 12 bp, Artificial Sequence
  Oligonucleotide primer for the detection of SNP TSC0041392
taaggtgtttat

SEQ ID NO: 340186 - DNA, 12 bp, Artificial Sequence
  Oligonucleotide primer for the detection of SNP TSC0041394
tttcatttaaac

SEQ ID NO: 340187 - DNA, 12 bp, Artificial Sequence
  Oligonucleotide primer for the detection of SNP TSC0041396
acaattctcaaa

SEQ ID NO: 340188 - DNA, 12 bp, Artificial Sequence
  Oligonucleotide primer for the detection of SNP TSC0041396
aaatgtttagaa

SEQ ID NO: 340189 - DNA, 12 bp, Artificial Sequence
  Oligonucleotide primer for the detection of SNP TSC0041396
ttgtagttttta

SEQ ID NO: 340190 - DNA, 12 bp, Artificial Sequence
  Oligonucleotide primer for the detection of SNP TSC0006942
aaaacaacttta

SEQ ID NO: 340191 - DNA, 12 bp, Artificial Sequence
  Oligonucleotide primer for the detection of SNP TSC0006942
tattattaagtt

SEQ ID NO: 340192 - DNA, 12 bp, Artificial Sequence
  Oligonucleotide primer for the detection of SNP TSC0006942
accattaccaaa

SEQ ID NO: 340193 - DNA, 12 bp, Artificial Sequence
  Oligonucleotide primer for the detection of SNP TSC0006942
aaagtagttttg

SEQ ID NO: 340194 - DNA, 12 bp, Artificial Sequence
  Oligonucleotide primer for the detection of SNP TSC0041397
aaaacctccttt

SEQ ID NO: 340195 - DNA, 12 bp, Artificial Sequence
  Oligonucleotide primer for the detection of SNP TSC0006240
caacaatcaaca

SEQ ID NO: 340196 - DNA, 12 bp, Artificial Sequence
  Oligonucleotide primer for the detection of SNP TSC0006240
atagaagttttt

SEQ ID NO: 340197 - DNA, 12 bp, Artificial Sequence
  Oligonucleotide primer for the detection of SNP TSC0006240
caaaaatcttca

SEQ ID NO: 340198 - DNA, 12 bp, Artificial Sequence
  Oligonucleotide primer for the detection of SNP TSC0006240
taataattaata

SEQ ID NO: 340199 - DNA, 12 bp, Artificial Sequence
  Oligonucleotide primer for the detection of SNP TSC0006241
gatattgagtta

SEQ ID NO: 340200 - DNA, 12 bp, Artificial Sequence
  Oligonucleotide primer for the detection of SNP TSC0006241
acactaaattaa

SEQ ID NO: 340201 - DNA, 12 bp, Artificial Sequence
  Oligonucleotide primer for the detection of SNP TSC0006241
ttgagggaaaaa

SEQ ID NO: 340202 - DNA, 12 bp, Artificial Sequence
  Oligonucleotide primer for the detection of SNP TSC0041398
ctaaccttacaa

SEQ ID NO: 340203 - DNA, 12 bp, Artificial Sequence
  Oligonucleotide primer for the detection of SNP TSC0041398
ttattattgttt

SEQ ID NO: 340204 - DNA, 12 bp, Artificial Sequence
  Oligonucleotide primer for the detection of SNP TSC0041398
ctattactactt

SEQ ID NO: 340205 - DNA, 12 bp, Artificial Sequence
  Oligonucleotide primer for the detection of SNP TSC0041398
ttgattttataa

SEQ ID NO: 340206 - DNA, 12 bp, Artificial Sequence
  Oligonucleotide primer for the detection of SNP TSC0041399
tagttgtgtgtt

SEQ ID NO: 340207 - DNA, 12 bp, Artificial Sequence
  Oligonucleotide primer for the detection of SNP TSC0041400
tacaccacatat

SEQ ID NO: 340208 - DNA, 12 bp, Artificial Sequence
  Oligonucleotide primer for the detection of SNP TSC0041400
tttaagaagaaa

SEQ ID NO: 340209 - DNA, 12 bp, Artificial Sequence
  Oligonucleotide primer for the detection of SNP TSC0041404
aactcttaaacc

SEQ ID NO: 340210 - DNA, 12 bp, Artificial Sequence
  Oligonucleotide primer for the detection of SNP TSC0041404
atttttatttca

SEQ ID NO: 340211 - DNA, 12 bp, Artificial Sequence
  Oligonucleotide primer for the detection of SNP TSC0041404
aatttttgaatt

SEQ ID NO: 340212 - DNA, 12 bp, Artificial Sequence
  Oligonucleotide primer for the detection of SNP TSC0041405
aaatatatattc

SEQ ID NO: 340213 - DNA, 12 bp, Artificial Sequence
  Oligonucleotide primer for the detection of SNP TSC0041405
tattccatatac

SEQ ID NO: 340214 - DNA, 12 bp, Artificial Sequence
  Oligonucleotide primer for the detection of SNP TSC0041405
gaatatatattt

SEQ ID NO: 340215 - DNA, 12 bp, Artificial Sequence
  Oligonucleotide primer for the detection of SNP TSC0041408
acttaaaactct

SEQ ID NO: 340216 - DNA, 12 bp, Artificial Sequence
  Oligonucleotide primer for the detection of SNP TSC0041408
tttaagaaggga

SEQ ID NO: 340217 - DNA, 12 bp, Artificial Sequence
  Oligonucleotide primer for the detection of SNP TSC0041409
aacattcaattc

SEQ ID NO: 340218 - DNA, 12 bp, Artificial Sequence
  Oligonucleotide primer for the detection of SNP TSC0041409
ggagtgtgtttt

SEQ ID NO: 340219 - DNA, 12 bp, Artificial Sequence
  Oligonucleotide primer for the detection of SNP TSC0041409
ggagcgtgtttt

SEQ ID NO: 340220 - DNA, 12 bp, Artificial Sequence
  Oligonucleotide primer for the detection of SNP TSC0041409
ggtatttaattt

SEQ ID NO: 340221 - DNA, 12 bp, Artificial Sequence
  Oligonucleotide primer for the detection of SNP TSC0041409
ggtatttaattc

SEQ ID NO: 340222 - DNA, 12 bp, Artificial Sequence
  Oligonucleotide primer for the detection of SNP TSC0041410
tatctatcatta

SEQ ID NO: 340223 - DNA, 12 bp, Artificial Sequence
  Oligonucleotide primer for the detection of SNP TSC0041410
gggtttaaggaa

SEQ ID NO: 340224 - DNA, 12 bp, Artificial Sequence
  Oligonukleotid-Primer
tatttgttattg

SEQ ID NO: 340225 - DNA, 12 bp, Artificial Sequence
  Oligonucleotide primer for the detection of SNP TSC0041411
aaaccaataaac

SEQ ID NO: 340226 - DNA, 12 bp, Artificial Sequence
  Oligonucleotide primer for the detection of SNP TSC0041411
tagagggttgta

SEQ ID NO: 340227 - DNA, 12 bp, Artificial Sequence
  Oligonucleotide primer for the detection of SNP TSC0041412
taaatagatggt

SEQ ID NO: 340228 - DNA, 12 bp, Artificial Sequence
  Oligonukleotid-Primer
taaatagacggt

SEQ ID NO: 340229 - DNA, 12 bp, Artificial Sequence
  Oligonucleotide primer for the detection of SNP TSC0041412
caaataaacaac

SEQ ID NO: 340230 - DNA, 12 bp, Artificial Sequence
  Oligonucleotide primer for the detection of SNP TSC0041412
caaataaacgac

SEQ ID NO: 340231 - DNA, 12 bp, Artificial Sequence
  Oligonucleotide primer for the detection of SNP TSC0041412
ttttgatagtat

SEQ ID NO: 340232 - DNA, 12 bp, Artificial Sequence
  Oligonucleotide primer for the detection of SNP TSC0041413
aattcctctcct

SEQ ID NO: 340233 - DNA, 12 bp, Artificial Sequence
  Oligonucleotide primer for the detection of SNP TSC0041413
tttagagttaga

SEQ ID NO: 340234 - DNA, 12 bp, Artificial Sequence
  Oligonucleotide primer for the detection of SNP TSC0041414
gtttttgaggta

SEQ ID NO: 340235 - DNA, 12 bp, Artificial Sequence
  Oligonucleotide primer for the detection of SNP TSC0010029
cttaaaatcata

SEQ ID NO: 340236 - DNA, 12 bp, Artificial Sequence
  Oligonucleotide primer for the detection of SNP TSC0010029
aaccacatctat

SEQ ID NO: 340237 - DNA, 12 bp, Artificial Sequence
  Oligonucleotide primer for the detection of SNP TSC0010029
tttaagattatg

SEQ ID NO: 340238 - DNA, 12 bp, Artificial Sequence
  Oligonucleotide primer for the detection of SNP TSC0008496
ccacccaaaaaa

SEQ ID NO: 340239 - DNA, 12 bp, Artificial Sequence
  Oligonucleotide primer for the detection of SNP TSC0008496
gggagattattt

SEQ ID NO: 340240 - DNA, 12 bp, Artificial Sequence
  Oligonucleotide primer for the detection of SNP TSC0008496
ttatttagaaaa

SEQ ID NO: 340241 - DNA, 12 bp, Artificial Sequence
  Oligonucleotide primer for the detection of SNP TSC0041417
tatagtttttat

SEQ ID NO: 340242 - DNA, 12 bp, Artificial Sequence
  Oligonucleotide primer for the detection of SNP TSC0041417
ataacctttaca

SEQ ID NO: 340243 - DNA, 12 bp, Artificial Sequence
  Oligonucleotide primer for the detection of SNP TSC0041420
ttggttttattt

SEQ ID NO: 340244 - DNA, 12 bp, Artificial Sequence
  Oligonucleotide primer for the detection of SNP TSC0041420
ttaaccctactt

SEQ ID NO: 340245 - DNA, 12 bp, Artificial Sequence
  Oligonucleotide primer for the detection of SNP TSC0041420
ggagaggagaat

SEQ ID NO: 340246 - DNA, 12 bp, Artificial Sequence
  Oligonucleotide primer for the detection of SNP TSC0006192
aaaaacaacaaa

SEQ ID NO: 340247 - DNA, 12 bp, Artificial Sequence
  Oligonucleotide primer for the detection of SNP TSC0006192
aggatattatat

SEQ ID NO: 340248 - DNA, 12 bp, Artificial Sequence
  Oligonucleotide primer for the detection of SNP TSC0006192
aggggtaataga

SEQ ID NO: 340249 - DNA, 12 bp, Artificial Sequence
  Oligonucleotide primer for the detection of SNP TSC0041421
attcattttttt

SEQ ID NO: 340250 - DNA, 12 bp, Artificial Sequence
  Oligonucleotide primer for the detection of SNP TSC0041422
tattaaactttc

SEQ ID NO: 340251 - DNA, 12 bp, Artificial Sequence
  Oligonucleotide primer for the detection of SNP TSC0041422
tttaagtaagat

SEQ ID NO: 340252 - DNA, 12 bp, Artificial Sequence
  Oligonucleotide primer for the detection of SNP TSC0041422
tttaagtaagac

SEQ ID NO: 340253 - DNA, 12 bp, Artificial Sequence
  Oligonucleotide primer for the detection of SNP TSC0041422
acccaaataaaa

SEQ ID NO: 340254 - DNA, 12 bp, Artificial Sequence
  Oligonucleotide primer for the detection of SNP TSC0041422
tattgaattttt

SEQ ID NO: 340255 - DNA, 12 bp, Artificial Sequence
  Oligonucleotide primer for the detection of SNP TSC0041423
gattttgttgtt

SEQ ID NO: 340256 - DNA, 12 bp, Artificial Sequence
  Oligonucleotide primer for the detection of SNP TSC0041423
gattttgttgtc

SEQ ID NO: 340257 - DNA, 12 bp, Artificial Sequence
  Oligonucleotide primer for the detection of SNP TSC0041423
taaaccctatta

SEQ ID NO: 340258 - DNA, 12 bp, Artificial Sequence
  Oligonucleotide primer for the detection of SNP TSC0041423
tttagtaagaga

SEQ ID NO: 340259 - DNA, 12 bp, Artificial Sequence
  Oligonucleotide primer for the detection of SNP TSC0041424
gggttaaatttt

SEQ ID NO: 340260 - DNA, 12 bp, Artificial Sequence
  Oligonucleotide primer for the detection of SNP TSC0041424
aaaaatgaggtt

SEQ ID NO: 340261 - DNA, 12 bp, Artificial Sequence
  Oligonucleotide primer for the detection of SNP TSC0041425
atcccaaattaa

SEQ ID NO: 340262 - DNA, 12 bp, Artificial Sequence
  Oligonucleotide primer for the detection of SNP TSC0041425
atcccgaattaa

SEQ ID NO: 340263 - DNA, 12 bp, Artificial Sequence
  Oligonucleotide primer for the detection of SNP TSC0041425
aatattattatg

SEQ ID NO: 340264 - DNA, 12 bp, Artificial Sequence
  Oligonucleotide primer for the detection of SNP TSC0041425
aacaccatcata

SEQ ID NO: 340265 - DNA, 12 bp, Artificial Sequence
  Oligonucleotide primer for the detection of SNP TSC0041425
gttttgagttag

SEQ ID NO: 340266 - DNA, 12 bp, Artificial Sequence
  Oligonucleotide primer for the detection of SNP TSC0041425
gtttcgagttag

SEQ ID NO: 340267 - DNA, 12 bp, Artificial Sequence
  Oligonucleotide primer for the detection of SNP TSC0041426
tctaatatactc

SEQ ID NO: 340268 - DNA, 12 bp, Artificial Sequence
  Oligonucleotide primer for the detection of SNP TSC0041426
gtttttggttaa

SEQ ID NO: 340269 - DNA, 12 bp, Artificial Sequence
  Oligonucleotide primer for the detection of SNP TSC0041427
ctcataaacatc

SEQ ID NO: 340270 - DNA, 12 bp, Artificial Sequence
  Oligonucleotide primer for the detection of SNP TSC0041427
gttgttttttgg

SEQ ID NO: 340271 - DNA, 12 bp, Artificial Sequence
  Oligonucleotide primer for the detection of SNP TSC0041428
tgtttaggttta

SEQ ID NO: 340272 - DNA, 12 bp, Artificial Sequence
  Oligonucleotide primer for the detection of SNP TSC0041433
tcatacaaccca

SEQ ID NO: 340273 - DNA, 12 bp, Artificial Sequence
  Oligonucleotide primer for the detection of SNP TSC0041433
ttttttgggaaa

SEQ ID NO: 340274 - DNA, 12 bp, Artificial Sequence
  Oligonucleotide primer for the detection of SNP TSC0041434
cctcaaaactct

SEQ ID NO: 340275 - DNA, 12 bp, Artificial Sequence
  Oligonucleotide primer for the detection of SNP TSC0041434
ttgtattttaga

SEQ ID NO: 340276 - DNA, 12 bp, Artificial Sequence
  Oligonucleotide primer for the detection of SNP TSC0041434
ttatatcttaaa

SEQ ID NO: 340277 - DNA, 12 bp, Artificial Sequence
  Oligonucleotide primer for the detection of SNP TSC0041434
ttttaaagtttt

SEQ ID NO: 340278 - DNA, 12 bp, Artificial Sequence
  Oligonucleotide primer for the detection of SNP TSC0041435
tctacccttaac

SEQ ID NO: 340279 - DNA, 12 bp, Artificial Sequence
  Oligonucleotide primer for the detection of SNP TSC0041435
ggttatataggg

SEQ ID NO: 340280 - DNA, 12 bp, Artificial Sequence
  Oligonucleotide primer for the detection of SNP TSC0041435
aatcatacaaaa

SEQ ID NO: 340281 - DNA, 12 bp, Artificial Sequence
  Oligonucleotide primer for the detection of SNP TSC0041435
tttgtttttagc

SEQ ID NO: 340282 - DNA, 12 bp, Artificial Sequence
  Oligonucleotide primer for the detection of SNP TSC0041436
aactcctcaccc

SEQ ID NO: 340283 - DNA, 12 bp, Artificial Sequence
  Oligonucleotide primer for the detection of SNP TSC0041436
gactcctcaccc

SEQ ID NO: 340284 - DNA, 12 bp, Artificial Sequence
  Oligonucleotide primer for the detection of SNP TSC0041436
agggtgaggttt

SEQ ID NO: 340285 - DNA, 12 bp, Artificial Sequence
  Oligonucleotide primer for the detection of SNP TSC0041436
aaataaaactca

SEQ ID NO: 340286 - DNA, 12 bp, Artificial Sequence
  Oligonucleotide primer for the detection of SNP TSC0041436
gattttttattt

SEQ ID NO: 340287 - DNA, 12 bp, Artificial Sequence
  Oligonucleotide primer for the detection of SNP TSC0041437
taatctacaaaa

SEQ ID NO: 340288 - DNA, 12 bp, Artificial Sequence
  Oligonucleotide primer for the detection of SNP TSC0041437
tatcatcctaca

SEQ ID NO: 340289 - DNA, 12 bp, Artificial Sequence
  Oligonucleotide primer for the detection of SNP TSC0041437
taatttatagaa

SEQ ID NO: 340290 - DNA, 12 bp, Artificial Sequence
  Oligonucleotide primer for the detection of SNP TSC0041438
gatatttgttta

SEQ ID NO: 340291 - DNA, 12 bp, Artificial Sequence
  Oligonucleotide primer for the detection of SNP TSC0041438
aacatctactca

SEQ ID NO: 340292 - DNA, 12 bp, Artificial Sequence
  Oligonucleotide primer for the detection of SNP TSC0041438
gataaggaggtt

SEQ ID NO: 340293 - DNA, 12 bp, Artificial Sequence
  Oligonucleotide primer for the detection of SNP TSC0041439
taaattatatat

SEQ ID NO: 340294 - DNA, 12 bp, Artificial Sequence
  Oligonucleotide primer for the detection of SNP TSC0041439
tgtttttgaata

SEQ ID NO: 340295 - DNA, 12 bp, Artificial Sequence
  Oligonucleotide primer for the detection of SNP TSC0041439
tatccctaaata

SEQ ID NO: 340296 - DNA, 12 bp, Artificial Sequence
  Oligonucleotide primer for the detection of SNP TSC0041439
taaattatgtgt

SEQ ID NO: 340297 - DNA, 12 bp, Artificial Sequence
  Oligonucleotide primer for the detection of SNP TSC0041440
acaataaaaata

SEQ ID NO: 340298 - DNA, 12 bp, Artificial Sequence
  Oligonucleotide primer for the detection of SNP TSC0041440
tattatggtata

SEQ ID NO: 340299 - DNA, 12 bp, Artificial Sequence
  Oligonucleotide primer for the detection of SNP TSC0041440
tactataacaca

SEQ ID NO: 340300 - DNA, 12 bp, Artificial Sequence
  Oligonucleotide primer for the detection of SNP TSC0041440
taatgagaatat

SEQ ID NO: 340301 - DNA, 12 bp, Artificial Sequence
  Oligonucleotide primer for the detection of SNP TSC0041443
aaaaacatcttt

SEQ ID NO: 340302 - DNA, 12 bp, Artificial Sequence
  Oligonucleotide primer for the detection of SNP TSC0041443
gtttgattgttg

SEQ ID NO: 340303 - DNA, 12 bp, Artificial Sequence
  Oligonucleotide primer for the detection of SNP TSC0041445
tacattcaataa

SEQ ID NO: 340304 - DNA, 12 bp, Artificial Sequence
  Oligonucleotide primer for the detection of SNP TSC0041445
aatgtattgaat

SEQ ID NO: 340305 - DNA, 12 bp, Artificial Sequence
  Oligonucleotide primer for the detection of SNP TSC0041445
tgtatatttagt

SEQ ID NO: 340306 - DNA, 12 bp, Artificial Sequence
  Oligonucleotide primer for the detection of SNP TSC0041446
ttaaatctttct

SEQ ID NO: 340307 - DNA, 12 bp, Artificial Sequence
  Oligonucleotide primer for the detection of SNP TSC0041446
ttaatttatgaa

SEQ ID NO: 340308 - DNA, 12 bp, Artificial Sequence
  Oligonucleotide primer for the detection of SNP TSC0041447
agaaaaatgtga

SEQ ID NO: 340309 - DNA, 12 bp, Artificial Sequence
  Oligonucleotide primer for the detection of SNP TSC0041447
agaaaaacgtga

SEQ ID NO: 340310 - DNA, 12 bp, Artificial Sequence
  Oligonucleotide primer for the detection of SNP TSC0041447
tttagtttattt

SEQ ID NO: 340311 - DNA, 12 bp, Artificial Sequence
  Oligonucleotide primer for the detection of SNP TSC0041448
acacacacactc

SEQ ID NO: 340312 - DNA, 12 bp, Artificial Sequence
  Oligonucleotide primer for the detection of SNP TSC0041448
tgtgggggtggg

SEQ ID NO: 340313 - DNA, 12 bp, Artificial Sequence
  Oligonucleotide primer for the detection of SNP TSC0041451
tagtttaggttg

SEQ ID NO: 340314 - DNA, 12 bp, Artificial Sequence
  Oligonucleotide primer for the detection of SNP TSC0041452
aattattataca

SEQ ID NO: 340315 - DNA, 12 bp, Artificial Sequence
  Oligonucleotide primer for the detection of SNP TSC0041452
tttatgtaatat

SEQ ID NO: 340316 - DNA, 12 bp, Artificial Sequence
  Oligonucleotide primer for the detection of SNP TSC0041452
acttatacaata

SEQ ID NO: 340317 - DNA, 12 bp, Artificial Sequence
  Oligonucleotide primer for the detection of SNP TSC0041452
ggattattatgt

SEQ ID NO: 340318 - DNA, 12 bp, Artificial Sequence
  Oligonucleotide primer for the detection of SNP TSC0041458
ttaaatgtatta

SEQ ID NO: 340319 - DNA, 12 bp, Artificial Sequence
  Oligonucleotide primer for the detection of SNP TSC0041460
aaatatttctat

SEQ ID NO: 340320 - DNA, 12 bp, Artificial Sequence
  Oligonucleotide primer for the detection of SNP TSC0041460
aatggttgagta

SEQ ID NO: 340321 - DNA, 12 bp, Artificial Sequence
  Oligonucleotide primer for the detection of SNP TSC0041461
agaagttgtata

SEQ ID NO: 340322 - DNA, 12 bp, Artificial Sequence
  Oligonucleotide primer for the detection of SNP TSC0041462
gaattttatgag

SEQ ID NO: 340323 - DNA, 12 bp, Artificial Sequence
  Oligonucleotide primer for the detection of SNP TSC0041463
tcaaaactcatc

SEQ ID NO: 340324 - DNA, 12 bp, Artificial Sequence
  Oligonucleotide primer for the detection of SNP TSC0041463
gagttgggaata

SEQ ID NO: 340325 - DNA, 12 bp, Artificial Sequence
  Oligonucleotide primer for the detection of SNP TSC0041464
accctcactata

SEQ ID NO: 340326 - DNA, 12 bp, Artificial Sequence
  Oligonucleotide primer for the detection of SNP TSC0041464
ctaatacttatc

SEQ ID NO: 340327 - DNA, 12 bp, Artificial Sequence
  Oligonucleotide primer for the detection of SNP TSC0041466
ttaatcttctct

SEQ ID NO: 340328 - DNA, 12 bp, Artificial Sequence
  Oligonucleotide primer for the detection of SNP TSC0041466
tgggaaggttag

SEQ ID NO: 340329 - DNA, 12 bp, Artificial Sequence
  Oligonucleotide primer for the detection of SNP TSC0041467
aaatctcccacc

SEQ ID NO: 340330 - DNA, 12 bp, Artificial Sequence
  Oligonucleotide primer for the detection of SNP TSC0041467
aaatctcccgcc

SEQ ID NO: 340331 - DNA, 12 bp, Artificial Sequence
  Oligonucleotide primer for the detection of SNP TSC0041468
taatttttttac

SEQ ID NO: 340332 - DNA, 12 bp, Artificial Sequence
  Oligonucleotide primer for the detection of SNP TSC0041468
caatcctcccac

SEQ ID NO: 340333 - DNA, 12 bp, Artificial Sequence
  Oligonucleotide primer for the detection of SNP TSC0041468
tttaggaggttg

SEQ ID NO: 340334 - DNA, 12 bp, Artificial Sequence
  Oligonucleotide primer for the detection of SNP TSC0041469
caaacaaacact

SEQ ID NO: 340335 - DNA, 12 bp, Artificial Sequence
  Oligonucleotide primer for the detection of SNP TSC0041469
agatttatagta

SEQ ID NO: 340336 - DNA, 12 bp, Artificial Sequence
  Oligonucleotide primer for the detection of SNP TSC0041470
acaaaatacaaa

SEQ ID NO: 340337 - DNA, 12 bp, Artificial Sequence
  Oligonucleotide primer for the detection of SNP TSC0041470
tatcactttctc

SEQ ID NO: 340338 - DNA, 12 bp, Artificial Sequence
  Oligonucleotide primer for the detection of SNP TSC0041470
taaaatataagt

SEQ ID NO: 340339 - DNA, 12 bp, Artificial Sequence
  Oligonucleotide primer for the detection of SNP TSC0041472
aaaatcttaact

SEQ ID NO: 340340 - DNA, 12 bp, Artificial Sequence
  Oligonucleotide primer for the detection of SNP TSC0041472
ttaaaatttgga

SEQ ID NO: 340341 - DNA, 12 bp, Artificial Sequence
  Oligonucleotide primer for the detection of SNP TSC0041473
tctcttaaacta

SEQ ID NO: 340342 - DNA, 12 bp, Artificial Sequence
  Oligonucleotide primer for the detection of SNP TSC0041473
gtgtgataaaat

SEQ ID NO: 340343 - DNA, 12 bp, Artificial Sequence
  Oligonucleotide primer for the detection of SNP TSC0041475
aaattttattaa

SEQ ID NO: 340344 - DNA, 12 bp, Artificial Sequence
  Oligonucleotide primer for the detection of SNP TSC0041476
tactaacatccc

SEQ ID NO: 340345 - DNA, 12 bp, Artificial Sequence
  Oligonucleotide primer for the detection of SNP TSC0041476
tagagtttttaa

SEQ ID NO: 340346 - DNA, 12 bp, Artificial Sequence
  Oligonucleotide primer for the detection of SNP TSC0041477
acccttcattat

SEQ ID NO: 340347 - DNA, 12 bp, Artificial Sequence
  Oligonucleotide primer for the detection of SNP TSC0041477
gagaattggtga

SEQ ID NO: 340348 - DNA, 12 bp, Artificial Sequence
  Oligonucleotide primer for the detection of SNP TSC0041477
gagaattggcga

SEQ ID NO: 340349 - DNA, 12 bp, Artificial Sequence
  Oligonucleotide primer for the detection of SNP TSC0041477
aaaactaacgaa

SEQ ID NO: 340350 - DNA, 12 bp, Artificial Sequence
  Oligonucleotide primer for the detection of SNP TSC0041478
attatttatttt

SEQ ID NO: 340351 - DNA, 12 bp, Artificial Sequence
  Oligonucleotide primer for the detection of SNP TSC0041478
attggatttttt

SEQ ID NO: 340352 - DNA, 12 bp, Artificial Sequence
  Oligonucleotide primer for the detection of SNP TSC0041478
actaaatttttt

SEQ ID NO: 340353 - DNA, 12 bp, Artificial Sequence
  Oligonucleotide primer for the detection of SNP TSC0041478
attatttgtttt

SEQ ID NO: 340354 - DNA, 12 bp, Artificial Sequence
  Oligonucleotide primer for the detection of SNP TSC0041480
aaatccaattat

SEQ ID NO: 340355 - DNA, 12 bp, Artificial Sequence
  Oligonucleotide primer for the detection of SNP TSC0041480
taaaaatagtaa

SEQ ID NO: 340356 - DNA, 12 bp, Artificial Sequence
  Oligonucleotide primer for the detection of SNP TSC0041481
taataatcatca

SEQ ID NO: 340357 - DNA, 12 bp, Artificial Sequence
  Oligonucleotide primer for the detection of SNP TSC0041482
aaatacacttct

SEQ ID NO: 340358 - DNA, 12 bp, Artificial Sequence
  Oligonucleotide primer for the detection of SNP TSC0041482
tggtgtaagata

SEQ ID NO: 340359 - DNA, 12 bp, Artificial Sequence
  Oligonucleotide primer for the detection of SNP TSC0041482
tggcgtaagata

SEQ ID NO: 340360 - DNA, 12 bp, Artificial Sequence
  Oligonucleotide primer for the detection of SNP TSC0041483
aattaaccatca

SEQ ID NO: 340361 - DNA, 12 bp, Artificial Sequence
  Oligonucleotide primer for the detection of SNP TSC0041483
gttaagaggaat

SEQ ID NO: 340362 - DNA, 12 bp, Artificial Sequence
  Oligonucleotide primer for the detection of SNP TSC0041486
ttcttacaccaa

SEQ ID NO: 340363 - DNA, 12 bp, Artificial Sequence
  Oligonucleotide primer for the detection of SNP TSC0041486
aattaattaaat

SEQ ID NO: 340364 - DNA, 12 bp, Artificial Sequence
  Oligonucleotide primer for the detection of SNP TSC0041486
aattaattaaac

SEQ ID NO: 340365 - DNA, 12 bp, Artificial Sequence
  Oligonucleotide primer for the detection of SNP TSC0041486
aaatcaatcaaa

SEQ ID NO: 340366 - DNA, 12 bp, Artificial Sequence
  Oligonucleotide primer for the detection of SNP TSC0041486
tttttgtattaa

SEQ ID NO: 340367 - DNA, 12 bp, Artificial Sequence
  Oligonucleotide primer for the detection of SNP TSC0041489
ttaattcaactc

SEQ ID NO: 340368 - DNA, 12 bp, Artificial Sequence
  Oligonucleotide primer for the detection of SNP TSC0041489
gaattaataaag

SEQ ID NO: 340369 - DNA, 12 bp, Artificial Sequence
  Oligonucleotide primer for the detection of SNP TSC0041491
ctacaacaacat

SEQ ID NO: 340370 - DNA, 12 bp, Artificial Sequence
  Oligonucleotide primer for the detection of SNP TSC0041492
taagttattttc

SEQ ID NO: 340371 - DNA, 12 bp, Artificial Sequence
  Oligonucleotide primer for the detection of SNP TSC0041492
caaaccattctc

SEQ ID NO: 340372 - DNA, 12 bp, Artificial Sequence
  Oligonucleotide primer for the detection of SNP TSC0041492
gaggttgaagta

SEQ ID NO: 340373 - DNA, 12 bp, Artificial Sequence
  Oligonucleotide primer for the detection of SNP TSC0041493
tacatataactt

SEQ ID NO: 340374 - DNA, 12 bp, Artificial Sequence
  Oligonucleotide primer for the detection of SNP TSC0041493
taggaggatgtg

SEQ ID NO: 340375 - DNA, 12 bp, Artificial Sequence
  Oligonucleotide primer for the detection of SNP TSC0041496
ctattactataa

SEQ ID NO: 340376 - DNA, 12 bp, Artificial Sequence
  Oligonucleotide primer for the detection of SNP TSC0041496
ttttaatacctc

SEQ ID NO: 340377 - DNA, 12 bp, Artificial Sequence
  Oligonucleotide primer for the detection of SNP TSC0041496
tttgttgttatg

SEQ ID NO: 340378 - DNA, 12 bp, Artificial Sequence
  Oligonucleotide primer for the detection of SNP TSC0041497
cattttcattac

SEQ ID NO: 340379 - DNA, 12 bp, Artificial Sequence
  Oligonucleotide primer for the detection of SNP TSC0041498
catactcattaa

SEQ ID NO: 340380 - DNA, 12 bp, Artificial Sequence
  Oligonucleotide primer for the detection of SNP TSC0041498
atgggatgtgat

SEQ ID NO: 340381 - DNA, 12 bp, Artificial Sequence
  Oligonucleotide primer for the detection of SNP TSC0041499
acaaacaaccta

SEQ ID NO: 340382 - DNA, 12 bp, Artificial Sequence
  Oligonucleotide primer for the detection of SNP TSC0041499
acgaacaaccta

SEQ ID NO: 340383 - DNA, 12 bp, Artificial Sequence
  Oligonucleotide primer for the detection of SNP TSC0041499
caaattctctac

SEQ ID NO: 340384 - DNA, 12 bp, Artificial Sequence
  Oligonucleotide primer for the detection of SNP TSC0041499
atgagtagtttg

SEQ ID NO: 340385 - DNA, 12 bp, Artificial Sequence
  Oligonucleotide primer for the detection of SNP TSC0041499
acgagtagtttg

SEQ ID NO: 340386 - DNA, 12 bp, Artificial Sequence
  Oligonucleotide primer for the detection of SNP TSC0041500
tcaaaaacatac

SEQ ID NO: 340387 - DNA, 12 bp, Artificial Sequence
  Oligonucleotide primer for the detection of SNP TSC0041500
tattgtgattta

SEQ ID NO: 340388 - DNA, 12 bp, Artificial Sequence
  Oligonucleotide primer for the detection of SNP TSC0041501
caatataaatac

SEQ ID NO: 340389 - DNA, 12 bp, Artificial Sequence
  Oligonucleotide primer for the detection of SNP TSC0041501
tattttttgtag

SEQ ID NO: 340390 - DNA, 12 bp, Artificial Sequence
  Oligonucleotide primer for the detection of SNP TSC0041501
tattttctataa

SEQ ID NO: 340391 - DNA, 12 bp, Artificial Sequence
  Oligonucleotide primer for the detection of SNP TSC0041501
taatgtaaatat

SEQ ID NO: 340392 - DNA, 12 bp, Artificial Sequence
  Oligonucleotide primer for the detection of SNP TSC0041502
tatattttaaac

SEQ ID NO: 340393 - DNA, 12 bp, Artificial Sequence
  Oligonucleotide primer for the detection of SNP TSC0041502
aaaatagtttgg

SEQ ID NO: 340394 - DNA, 12 bp, Artificial Sequence
  Oligonucleotide primer for the detection of SNP TSC0041502
aaaatagttcgg

SEQ ID NO: 340395 - DNA, 12 bp, Artificial Sequence
  Oligonucleotide primer for the detection of SNP TSC0041502
aaaacaattcaa

SEQ ID NO: 340396 - DNA, 12 bp, Artificial Sequence
  Oligonucleotide primer for the detection of SNP TSC0041502
aaaacaattcga

SEQ ID NO: 340397 - DNA, 12 bp, Artificial Sequence
  Oligonukleotid-Primer
taatacaaaaat

SEQ ID NO: 340398 - DNA, 12 bp, Artificial Sequence
  Oligonucleotide primer for the detection of SNP TSC0041504
aaattttagaga

SEQ ID NO: 340399 - DNA, 12 bp, Artificial Sequence
  Oligonucleotide primer for the detection of SNP TSC0041505
aactttaatttt

SEQ ID NO: 340400 - DNA, 12 bp, Artificial Sequence
  Oligonucleotide primer for the detection of SNP TSC0041507
aatcaaacttcc

SEQ ID NO: 340401 - DNA, 12 bp, Artificial Sequence
  Oligonucleotide primer for the detection of SNP TSC0041508
ctcaaaaatact

SEQ ID NO: 340402 - DNA, 12 bp, Artificial Sequence
  Oligonucleotide primer for the detection of SNP TSC0041508
ttgtataagata

SEQ ID NO: 340403 - DNA, 12 bp, Artificial Sequence
  Oligonucleotide primer for the detection of SNP TSC0041508
ttacataaaata

SEQ ID NO: 340404 - DNA, 12 bp, Artificial Sequence
  Oligonucleotide primer for the detection of SNP TSC0041509
atttcttatatt

SEQ ID NO: 340405 - DNA, 12 bp, Artificial Sequence
  Oligonukleotid-Primer
attaagtggaaa

SEQ ID NO: 340406 - DNA, 12 bp, Artificial Sequence
  Oligonucleotide primer for the detection of SNP TSC0041511
attagagtatag

SEQ ID NO: 340407 - DNA, 12 bp, Artificial Sequence
  Oligonucleotide primer for the detection of SNP TSC0041511
tgagattgtgtt

SEQ ID NO: 340408 - DNA, 12 bp, Artificial Sequence
  Oligonucleotide primer for the detection of SNP TSC0041511
cgagattgtgtt

SEQ ID NO: 340409 - DNA, 12 bp, Artificial Sequence
  Oligonukleotid-Primer
aaatataataat

SEQ ID NO: 340410 - DNA, 12 bp, Artificial Sequence
  Oligonucleotide primer for the detection of SNP TSC0041513
actaaatttaac

SEQ ID NO: 340411 - DNA, 12 bp, Artificial Sequence
  Oligonucleotide primer for the detection of SNP TSC0041514
tattcaatttcc

SEQ ID NO: 340412 - DNA, 12 bp, Artificial Sequence
  Oligonucleotide primer for the detection of SNP TSC0041515
caaacccactat

SEQ ID NO: 340413 - DNA, 12 bp, Artificial Sequence
  Oligonucleotide primer for the detection of SNP TSC0041515
gtttagggattt

SEQ ID NO: 340414 - DNA, 12 bp, Artificial Sequence
  Oligonucleotide primer for the detection of SNP TSC0041515
attcaaaaatcc

SEQ ID NO: 340415 - DNA, 12 bp, Artificial Sequence
  Oligonucleotide primer for the detection of SNP TSC0041515
taggtttattgt

SEQ ID NO: 340416 - DNA, 12 bp, Artificial Sequence
  Oligonucleotide primer for the detection of SNP TSC0041516
ccctacatttaa

SEQ ID NO: 340417 - DNA, 12 bp, Artificial Sequence
  Oligonukleotid-Primer
ccctacgtttaa

SEQ ID NO: 340418 - DNA, 12 bp, Artificial Sequence
  Oligonucleotide primer for the detection of SNP TSC0041516
tgggtaaatgtg

SEQ ID NO: 340419 - DNA, 12 bp, Artificial Sequence
  Oligonucleotide primer for the detection of SNP TSC0041517
attcttcaaaac

SEQ ID NO: 340420 - DNA, 12 bp, Artificial Sequence
  Oligonucleotide primer for the detection of SNP TSC0041517
aataggtagtag

SEQ ID NO: 340421 - DNA, 12 bp, Artificial Sequence
  Oligonucleotide primer for the detection of SNP TSC0041517
aacaaacaataa

SEQ ID NO: 340422 - DNA, 12 bp, Artificial Sequence
  Oligonucleotide primer for the detection of SNP TSC0041517
gttttttaggat

SEQ ID NO: 340423 - DNA, 12 bp, Artificial Sequence
  Oligonucleotide primer for the detection of SNP TSC0007614
aataactcaaaa

SEQ ID NO: 340424 - DNA, 12 bp, Artificial Sequence
  Oligonucleotide primer for the detection of SNP TSC0007614
cacattcacccc

SEQ ID NO: 340425 - DNA, 12 bp, Artificial Sequence
  Oligonucleotide primer for the detection of SNP TSC0007614
aatagtttaagg

SEQ ID NO: 340426 - DNA, 12 bp, Artificial Sequence
  Oligonucleotide primer for the detection of SNP TSC0041521
aaatctccttat

SEQ ID NO: 340427 - DNA, 12 bp, Artificial Sequence
  Oligonucleotide primer for the detection of SNP TSC0041521
gatttaggttaa

SEQ ID NO: 340428 - DNA, 12 bp, Artificial Sequence
  Oligonucleotide primer for the detection of SNP TSC0041524
atcctcacaaat

SEQ ID NO: 340429 - DNA, 12 bp, Artificial Sequence
  Oligonucleotide primer for the detection of SNP TSC0041524
tttttatgataa

SEQ ID NO: 340430 - DNA, 12 bp, Artificial Sequence
  Oligonucleotide primer for the detection of SNP TSC0041527
tacttacacaac

SEQ ID NO: 340431 - DNA, 12 bp, Artificial Sequence
  Oligonucleotide primer for the detection of SNP TSC0041527
tacttacgcaac

SEQ ID NO: 340432 - DNA, 12 bp, Artificial Sequence
  Oligonucleotide primer for the detection of SNP TSC0041527
aatagtattgag

SEQ ID NO: 340433 - DNA, 12 bp, Artificial Sequence
  Oligonucleotide primer for the detection of SNP TSC0041527
ataatactaaaa

SEQ ID NO: 340434 - DNA, 12 bp, Artificial Sequence
  Oligonucleotide primer for the detection of SNP TSC0041527
tatttatgtagt

SEQ ID NO: 340435 - DNA, 12 bp, Artificial Sequence
  Oligonucleotide primer for the detection of SNP TSC0041527
tatttacgtagt

SEQ ID NO: 340436 - DNA, 12 bp, Artificial Sequence
  Oligonucleotide primer for the detection of SNP TSC0041528
cacatatcacct

SEQ ID NO: 340437 - DNA, 12 bp, Artificial Sequence
  Oligonucleotide primer for the detection of SNP TSC0041528
tagggttatatg

SEQ ID NO: 340438 - DNA, 12 bp, Artificial Sequence
  Oligonucleotide primer for the detection of SNP TSC0041529
cctcatacttcc

SEQ ID NO: 340439 - DNA, 12 bp, Artificial Sequence
  Oligonucleotide primer for the detection of SNP TSC0041529
aaatatgtataa

SEQ ID NO: 340440 - DNA, 12 bp, Artificial Sequence
  Oligonucleotide primer for the detection of SNP TSC0041530
tcttcctaactt

SEQ ID NO: 340441 - DNA, 12 bp, Artificial Sequence
  Oligonucleotide primer for the detection of SNP TSC0041530
agaaggtggttg

SEQ ID NO: 340442 - DNA, 12 bp, Artificial Sequence
  Oligonucleotide primer for the detection of SNP TSC0041531
cctaaaatttat

SEQ ID NO: 340443 - DNA, 12 bp, Artificial Sequence
  Oligonucleotide primer for the detection of SNP TSC0041531
atatagaaagga

SEQ ID NO: 340444 - DNA, 12 bp, Artificial Sequence
  Oligonucleotide primer for the detection of SNP TSC0041532
ttcaaaacttac

SEQ ID NO: 340445 - DNA, 12 bp, Artificial Sequence
  Oligonucleotide primer for the detection of SNP TSC0041532
ttcgaaacttac

SEQ ID NO: 340446 - DNA, 12 bp, Artificial Sequence
  Oligonucleotide primer for the detection of SNP TSC0041532
gtattaatgtaa

SEQ ID NO: 340447 - DNA, 12 bp, Artificial Sequence
  Oligonucleotide primer for the detection of SNP TSC0041532
tttgaaatttat

SEQ ID NO: 340448 - DNA, 12 bp, Artificial Sequence
  Oligonucleotide primer for the detection of SNP TSC0041532
ttcgaaatttat

SEQ ID NO: 340449 - DNA, 12 bp, Artificial Sequence
  Oligonucleotide primer for the detection of SNP TSC0041532
tttgaaatttac

SEQ ID NO: 340450 - DNA, 12 bp, Artificial Sequence
  Oligonucleotide primer for the detection of SNP TSC0041533
ttaatattattc

SEQ ID NO: 340451 - DNA, 12 bp, Artificial Sequence
  Oligonucleotide primer for the detection of SNP TSC0041533
tgataaatttta

SEQ ID NO: 340452 - DNA, 12 bp, Artificial Sequence
  Oligonucleotide primer for the detection of SNP TSC0041535
ctacctatacca

SEQ ID NO: 340453 - DNA, 12 bp, Artificial Sequence
  Oligonucleotide primer for the detection of SNP TSC0041535
taccacttcctc

SEQ ID NO: 340454 - DNA, 12 bp, Artificial Sequence
  Oligonucleotide primer for the detection of SNP TSC0041535
gttgtttgtgtt

SEQ ID NO: 340455 - DNA, 12 bp, Artificial Sequence
  Oligonucleotide primer for the detection of SNP TSC0041536
cccttaacaaac

SEQ ID NO: 340456 - DNA, 12 bp, Artificial Sequence
  Oligonucleotide primer for the detection of SNP TSC0041539
ttaaaattttat

SEQ ID NO: 340457 - DNA, 12 bp, Artificial Sequence
  Oligonucleotide primer for the detection of SNP TSC0041539
atatttagaata

SEQ ID NO: 340458 - DNA, 12 bp, Artificial Sequence
  Oligonucleotide primer for the detection of SNP TSC0041542
ataatataattt

SEQ ID NO: 340459 - DNA, 12 bp, Artificial Sequence
  Oligonucleotide primer for the detection of SNP TSC0041542
agtagggatata

SEQ ID NO: 340460 - DNA, 12 bp, Artificial Sequence
  Oligonucleotide primer for the detection of SNP TSC0041544
ttgtttttaatt

SEQ ID NO: 340461 - DNA, 12 bp, Artificial Sequence
  Oligonucleotide primer for the detection of SNP TSC0041544
actacttttaac

SEQ ID NO: 340462 - DNA, 12 bp, Artificial Sequence
  Oligonucleotide primer for the detection of SNP TSC0041544
taaggaagaagt

SEQ ID NO: 340463 - DNA, 12 bp, Artificial Sequence
  Oligonucleotide primer for the detection of SNP TSC0006814
tataaggtagat

SEQ ID NO: 340464 - DNA, 12 bp, Artificial Sequence
  Oligonucleotide primer for the detection of SNP TSC0006814
ccacaaaataaa

SEQ ID NO: 340465 - DNA, 12 bp, Artificial Sequence
  Oligonucleotide primer for the detection of SNP TSC0041545
aatctacataac

SEQ ID NO: 340466 - DNA, 12 bp, Artificial Sequence
  Oligonucleotide primer for the detection of SNP TSC0041546
aaaaactatctt

SEQ ID NO: 340467 - DNA, 12 bp, Artificial Sequence
  Oligonucleotide primer for the detection of SNP TSC0041546
gatttatgtatt

SEQ ID NO: 340468 - DNA, 12 bp, Artificial Sequence
  Oligonucleotide primer for the detection of SNP TSC0041547
aaacgaaataaa

SEQ ID NO: 340469 - DNA, 12 bp, Artificial Sequence
  Oligonucleotide primer for the detection of SNP TSC0041547
gggtgaggtggg

SEQ ID NO: 340470 - DNA, 12 bp, Artificial Sequence
  Oligonucleotide primer for the detection of SNP TSC0041547
gggcgaggtggg

SEQ ID NO: 340471 - DNA, 12 bp, Artificial Sequence
  Oligonucleotide primer for the detection of SNP TSC0041549
tcccaatttaca

SEQ ID NO: 340472 - DNA, 12 bp, Artificial Sequence
  Oligonucleotide primer for the detection of SNP TSC0041549
aattattagttt

SEQ ID NO: 340473 - DNA, 12 bp, Artificial Sequence
  Oligonucleotide primer for the detection of SNP TSC0041549
aaccatcaactc

SEQ ID NO: 340474 - DNA, 12 bp, Artificial Sequence
  Oligonucleotide primer for the detection of SNP TSC0006697
tcaaaaaaaaca

SEQ ID NO: 340475 - DNA, 12 bp, Artificial Sequence
  Oligonucleotide primer for the detection of SNP TSC0006697
tcgaaaaaaaca

SEQ ID NO: 340476 - DNA, 12 bp, Artificial Sequence
  Oligonucleotide primer for the detection of SNP TSC0006697
agatattttaat

SEQ ID NO: 340477 - DNA, 12 bp, Artificial Sequence
  Oligonucleotide primer for the detection of SNP TSC0006697
caaacaccttaa

SEQ ID NO: 340478 - DNA, 12 bp, Artificial Sequence
  Oligonucleotide primer for the detection of SNP TSC0006697
ttgggagaagta

SEQ ID NO: 340479 - DNA, 12 bp, Artificial Sequence
  Oligonucleotide primer for the detection of SNP TSC0006697
tcgggagaagta

SEQ ID NO: 340480 - DNA, 12 bp, Artificial Sequence
  Oligonucleotide primer for the detection of SNP TSC0041552
aggtagaagaat

SEQ ID NO: 340481 - DNA, 12 bp, Artificial Sequence
  Oligonucleotide primer for the detection of SNP TSC0041555
tgtaatttagga

SEQ ID NO: 340482 - DNA, 12 bp, Artificial Sequence
  Oligonucleotide primer for the detection of SNP TSC0041556
attataaattac

SEQ ID NO: 340483 - DNA, 12 bp, Artificial Sequence
  Oligonucleotide primer for the detection of SNP TSC0041556
atgtgttattta

SEQ ID NO: 340484 - DNA, 12 bp, Artificial Sequence
  Oligonucleotide primer for the detection of SNP TSC0041557
atacctaaccca

SEQ ID NO: 340485 - DNA, 12 bp, Artificial Sequence
  Oligonucleotide primer for the detection of SNP TSC0041557
aatttagtattg

SEQ ID NO: 340486 - DNA, 12 bp, Artificial Sequence
  Oligonucleotide primer for the detection of SNP TSC0041557
ttaatactaaaa

SEQ ID NO: 340487 - DNA, 12 bp, Artificial Sequence
  Oligonucleotide primer for the detection of SNP TSC0007117
cctaactcacac

SEQ ID NO: 340488 - DNA, 12 bp, Artificial Sequence
  Oligonucleotide primer for the detection of SNP TSC0041558
acatcaaaacat

SEQ ID NO: 340489 - DNA, 12 bp, Artificial Sequence
  Oligonucleotide primer for the detection of SNP TSC0041558
ggtttgttagtt

SEQ ID NO: 340490 - DNA, 12 bp, Artificial Sequence
  Oligonucleotide primer for the detection of SNP TSC0041558
aacctactaacc

SEQ ID NO: 340491 - DNA, 12 bp, Artificial Sequence
  Oligonucleotide primer for the detection of SNP TSC0041558
atattagagtat

SEQ ID NO: 340492 - DNA, 12 bp, Artificial Sequence
  Oligonucleotide primer for the detection of SNP TSC0041559
caccaacaaaac

SEQ ID NO: 340493 - DNA, 12 bp, Artificial Sequence
  Oligonucleotide primer for the detection of SNP TSC0041559
gttaatgattta

SEQ ID NO: 340494 - DNA, 12 bp, Artificial Sequence
  Oligonucleotide primer for the detection of SNP TSC0041560
tattaaaggtaa

SEQ ID NO: 340495 - DNA, 12 bp, Artificial Sequence
  Oligonucleotide primer for the detection of SNP TSC0041561
tatgtgtatgtg

SEQ ID NO: 340496 - DNA, 12 bp, Artificial Sequence
  Oligonucleotide primer for the detection of SNP TSC0041562
gaaggagggaag

SEQ ID NO: 340497 - DNA, 12 bp, Artificial Sequence
  Oligonucleotide primer for the detection of SNP TSC0041569
attataattaat

SEQ ID NO: 340498 - DNA, 12 bp, Artificial Sequence
  Oligonucleotide primer for the detection of SNP TSC0041569
agtatattaaga

SEQ ID NO: 340499 - DNA, 12 bp, Artificial Sequence
  Oligonucleotide primer for the detection of SNP TSC0041570
tttaaacaataa

SEQ ID NO: 340500 - DNA, 12 bp, Artificial Sequence
  Oligonucleotide primer for the detection of SNP TSC0041570
tatatttttggg

SEQ ID NO: 340501 - DNA, 12 bp, Artificial Sequence
  Oligonucleotide primer for the detection of SNP TSC0041570
tatatccttaaa

SEQ ID NO: 340502 - DNA, 12 bp, Artificial Sequence
  Oligonucleotide primer for the detection of SNP TSC0041570
ttggataatggt

SEQ ID NO: 340503 - DNA, 12 bp, Artificial Sequence
  Oligonucleotide primer for the detection of SNP TSC0041571
ccaaaatttcat

SEQ ID NO: 340504 - DNA, 12 bp, Artificial Sequence
  Oligonucleotide primer for the detection of SNP TSC0041571
tttaattatcta

SEQ ID NO: 340505 - DNA, 12 bp, Artificial Sequence
  Oligonucleotide primer for the detection of SNP TSC0041571
ttagagttttat

SEQ ID NO: 340506 - DNA, 12 bp, Artificial Sequence
  Oligonucleotide primer for the detection of SNP TSC0041574
tttgtatgaatt

SEQ ID NO: 340507 - DNA, 12 bp, Artificial Sequence
  Oligonucleotide primer for the detection of SNP TSC0041574
ttacataaatta

SEQ ID NO: 340508 - DNA, 12 bp, Artificial Sequence
  Oligonucleotide primer for the detection of SNP TSC0041574
aatatatgggag

SEQ ID NO: 340509 - DNA, 12 bp, Artificial Sequence
  Oligonucleotide primer for the detection of SNP TSC0041575
tactaattaaat

SEQ ID NO: 340510 - DNA, 12 bp, Artificial Sequence
  Oligonucleotide primer for the detection of SNP TSC0041575
gtaattgatgta

SEQ ID NO: 340511 - DNA, 12 bp, Artificial Sequence
  Oligonucleotide primer for the detection of SNP TSC0041575
gtaatcgatgta

SEQ ID NO: 340512 - DNA, 12 bp, Artificial Sequence
  Oligonucleotide primer for the detection of SNP TSC0041576
cccacttttcta

SEQ ID NO: 340513 - DNA, 12 bp, Artificial Sequence
  Oligonucleotide primer for the detection of SNP TSC0041576
tgaaaggtgtat

SEQ ID NO: 340514 - DNA, 12 bp, Artificial Sequence
  Oligonucleotide primer for the detection of SNP TSC0041576
tatttttttatt

SEQ ID NO: 340515 - DNA, 12 bp, Artificial Sequence
  Oligonucleotide primer for the detection of SNP TSC0041578
acaaaactaaac

SEQ ID NO: 340516 - DNA, 12 bp, Artificial Sequence
  Oligonucleotide primer for the detection of SNP TSC0041578
aggtgtgaatta

SEQ ID NO: 340517 - DNA, 12 bp, Artificial Sequence
  Oligonucleotide primer for the detection of SNP TSC0041578
atagggttgggt

SEQ ID NO: 340518 - DNA, 12 bp, Artificial Sequence
  Oligonucleotide primer for the detection of SNP TSC0041578
atagggttgggc

SEQ ID NO: 340519 - DNA, 12 bp, Artificial Sequence
  Oligonucleotide primer for the detection of SNP TSC0041579
aatttttctatc

SEQ ID NO: 340520 - DNA, 12 bp, Artificial Sequence
  Oligonucleotide primer for the detection of SNP TSC0041580
aatcttatttct

SEQ ID NO: 340521 - DNA, 12 bp, Artificial Sequence
  Oligonucleotide primer for the detection of SNP TSC0041581
acattctcaaaa

SEQ ID NO: 340522 - DNA, 12 bp, Artificial Sequence
  Oligonucleotide primer for the detection of SNP TSC0041581
agaaaaagagag

SEQ ID NO: 340523 - DNA, 12 bp, Artificial Sequence
  Oligonucleotide primer for the detection of SNP TSC0041581
atatttttagag

SEQ ID NO: 340524 - DNA, 12 bp, Artificial Sequence
  Oligonucleotide primer for the detection of SNP TSC0041582
aattatacaaat

SEQ ID NO: 340525 - DNA, 12 bp, Artificial Sequence
  Oligonucleotide primer for the detection of SNP TSC0041583
attataatgttt

SEQ ID NO: 340526 - DNA, 12 bp, Artificial Sequence
  Oligonucleotide primer for the detection of SNP TSC0041583
attataacgttt

SEQ ID NO: 340527 - DNA, 12 bp, Artificial Sequence
  Oligonucleotide primer for the detection of SNP TSC0041583
tacaacacctaa

SEQ ID NO: 340528 - DNA, 12 bp, Artificial Sequence
  Oligonucleotide primer for the detection of SNP TSC0041583
tacaacgcctaa

SEQ ID NO: 340529 - DNA, 12 bp, Artificial Sequence
  Oligonucleotide primer for the detection of SNP TSC0041583
tatttagaggga

SEQ ID NO: 340530 - DNA, 12 bp, Artificial Sequence
  Oligonucleotide primer for the detection of SNP TSC0041585
aataaaaaccac

SEQ ID NO: 340531 - DNA, 12 bp, Artificial Sequence
  Oligonucleotide primer for the detection of SNP TSC0041585
gaatattgattg

SEQ ID NO: 340532 - DNA, 12 bp, Artificial Sequence
  Oligonucleotide primer for the detection of SNP TSC0041586
ttacaataaaat

SEQ ID NO: 340533 - DNA, 12 bp, Artificial Sequence
  Oligonucleotide primer for the detection of SNP TSC0041586
ttacgataaaat

SEQ ID NO: 340534 - DNA, 12 bp, Artificial Sequence
  Oligonucleotide primer for the detection of SNP TSC0041586
ttgtggtggggt

SEQ ID NO: 340535 - DNA, 12 bp, Artificial Sequence
  Oligonucleotide primer for the detection of SNP TSC0041586
ttgcggtggggt

SEQ ID NO: 340536 - DNA, 12 bp, Artificial Sequence
  Oligonucleotide primer for the detection of SNP TSC0041588
caattacaaaaa

SEQ ID NO: 340537 - DNA, 12 bp, Artificial Sequence
  Oligonucleotide primer for the detection of SNP TSC0041588
agatatgttata

SEQ ID NO: 340538 - DNA, 12 bp, Artificial Sequence
  Oligonucleotide primer for the detection of SNP TSC0041588
taattatagaag

SEQ ID NO: 340539 - DNA, 12 bp, Artificial Sequence
  Oligonucleotide primer for the detection of SNP TSC0041589
taccaatcactt

SEQ ID NO: 340540 - DNA, 12 bp, Artificial Sequence
  Oligonucleotide primer for the detection of SNP TSC0041589
atatttgggttg

SEQ ID NO: 340541 - DNA, 12 bp, Artificial Sequence
  Oligonucleotide primer for the detection of SNP TSC0041589
atattcgggttg

SEQ ID NO: 340542 - DNA, 12 bp, Artificial Sequence
  Oligonucleotide primer for the detection of SNP TSC0041591
tttctacctaaa

SEQ ID NO: 340543 - DNA, 12 bp, Artificial Sequence
  Oligonucleotide primer for the detection of SNP TSC0041591
gtagaagattat

SEQ ID NO: 340544 - DNA, 12 bp, Artificial Sequence
  Oligonucleotide primer for the detection of SNP TSC0041592
ataaaattcatt

SEQ ID NO: 340545 - DNA, 12 bp, Artificial Sequence
  Oligonucleotide primer for the detection of SNP TSC0041592
aatttggaatta

SEQ ID NO: 340546 - DNA, 12 bp, Artificial Sequence
  Oligonucleotide primer for the detection of SNP TSC0041592
aacctaaaatca

SEQ ID NO: 340547 - DNA, 12 bp, Artificial Sequence
  Oligonucleotide primer for the detection of SNP TSC0041592
atgggatttatt

SEQ ID NO: 340548 - DNA, 12 bp, Artificial Sequence
  Oligonucleotide primer for the detection of SNP TSC0008897
tttcttactatt

SEQ ID NO: 340549 - DNA, 12 bp, Artificial Sequence
  Oligonucleotide primer for the detection of SNP TSC0008897
gtgattgtataa

SEQ ID NO: 340550 - DNA, 12 bp, Artificial Sequence
  Oligonucleotide primer for the detection of SNP TSC0008898
atacaactaaat

SEQ ID NO: 340551 - DNA, 12 bp, Artificial Sequence
  Oligonucleotide primer for the detection of SNP TSC0008898
ttgttattaaaa

SEQ ID NO: 340552 - DNA, 12 bp, Artificial Sequence
  Oligonucleotide primer for the detection of SNP TSC0008898
ctattattaaaa

SEQ ID NO: 340553 - DNA, 12 bp, Artificial Sequence
  Oligonucleotide primer for the detection of SNP TSC0008898
atataattgaat

SEQ ID NO: 340554 - DNA, 12 bp, Artificial Sequence
  Oligonucleotide primer for the detection of SNP TSC0041594
actaaactcatc

SEQ ID NO: 340555 - DNA, 12 bp, Artificial Sequence
  Oligonucleotide primer for the detection of SNP TSC0041594
ttggaggtatta

SEQ ID NO: 340556 - DNA, 12 bp, Artificial Sequence
  Oligonucleotide primer for the detection of SNP TSC0041595
tttgttatatgt

SEQ ID NO: 340557 - DNA, 12 bp, Artificial Sequence
  Oligonucleotide primer for the detection of SNP TSC0041595
atttactatata

SEQ ID NO: 340558 - DNA, 12 bp, Artificial Sequence
  Oligonucleotide primer for the detection of SNP TSC0041595
ttgaaaaaatat

SEQ ID NO: 340559 - DNA, 12 bp, Artificial Sequence
  Oligonucleotide primer for the detection of SNP TSC0005770
aaaaaacactta

SEQ ID NO: 340560 - DNA, 12 bp, Artificial Sequence
  Oligonucleotide primer for the detection of SNP TSC0005770
aaagtttatttg

SEQ ID NO: 340561 - DNA, 12 bp, Artificial Sequence
  Oligonucleotide primer for the detection of SNP TSC0005770
aaactcatttaa

SEQ ID NO: 340562 - DNA, 12 bp, Artificial Sequence
  Oligonucleotide primer for the detection of SNP TSC0005770
aggggtatttat

SEQ ID NO: 340563 - DNA, 12 bp, Artificial Sequence
  Oligonucleotide primer for the detection of SNP TSC0005771
cccatctaacca

SEQ ID NO: 340564 - DNA, 12 bp, Artificial Sequence
  Oligonucleotide primer for the detection of SNP TSC0005771
taaatccaatca

SEQ ID NO: 340565 - DNA, 12 bp, Artificial Sequence
  Oligonucleotide primer for the detection of SNP TSC0005771
tttatttggtta

SEQ ID NO: 340566 - DNA, 12 bp, Artificial Sequence
  Oligonucleotide primer for the detection of SNP TSC0041597
ttatttcctttt

SEQ ID NO: 340567 - DNA, 12 bp, Artificial Sequence
  Oligonucleotide primer for the detection of SNP TSC0041597
aaataatgtaga

SEQ ID NO: 340568 - DNA, 12 bp, Artificial Sequence
  Oligonucleotide primer for the detection of SNP TSC0041597
aaataacgtaga

SEQ ID NO: 340569 - DNA, 12 bp, Artificial Sequence
  Oligonucleotide primer for the detection of SNP TSC0041598
ttaaaaaatttt

SEQ ID NO: 340570 - DNA, 12 bp, Artificial Sequence
  Oligonucleotide primer for the detection of SNP TSC0041598
gaataattttaa

SEQ ID NO: 340571 - DNA, 12 bp, Artificial Sequence
  Oligonucleotide primer for the detection of SNP TSC0041599
cacccactcctt

SEQ ID NO: 340572 - DNA, 12 bp, Artificial Sequence
  Oligonucleotide primer for the detection of SNP TSC0041600
atcatcaattat

SEQ ID NO: 340573 - DNA, 12 bp, Artificial Sequence
  Oligonucleotide primer for the detection of SNP TSC0041600
agaattatttga

SEQ ID NO: 340574 - DNA, 12 bp, Artificial Sequence
  Oligonucleotide primer for the detection of SNP TSC0041601
atttcactcttt

SEQ ID NO: 340575 - DNA, 12 bp, Artificial Sequence
  Oligonucleotide primer for the detection of SNP TSC0041601
aattgagtgagt

SEQ ID NO: 340576 - DNA, 12 bp, Artificial Sequence
  Oligonucleotide primer for the detection of SNP TSC0041601
aattaaataaat

SEQ ID NO: 340577 - DNA, 12 bp, Artificial Sequence
  Oligonucleotide primer for the detection of SNP TSC0041602
agtttgggttta

SEQ ID NO: 340578 - DNA, 12 bp, Artificial Sequence
  Oligonucleotide primer for the detection of SNP TSC0010815
tttcaaaattcc

SEQ ID NO: 340579 - DNA, 12 bp, Artificial Sequence
  Oligonucleotide primer for the detection of SNP TSC0010815
aaaatggatata

SEQ ID NO: 340580 - DNA, 12 bp, Artificial Sequence
  Oligonucleotide primer for the detection of SNP TSC0010815
aaaacggatata

SEQ ID NO: 340581 - DNA, 12 bp, Artificial Sequence
  Oligonucleotide primer for the detection of SNP TSC0010816
aatatggagaaa

SEQ ID NO: 340582 - DNA, 12 bp, Artificial Sequence
  Oligonucleotide primer for the detection of SNP TSC0009124
tgattgatgtgg

SEQ ID NO: 340583 - DNA, 12 bp, Artificial Sequence
  Oligonucleotide primer for the detection of SNP TSC0009124
tgattgacgtgg

SEQ ID NO: 340584 - DNA, 12 bp, Artificial Sequence
  Oligonucleotide primer for the detection of SNP TSC0009124
taactaacataa

SEQ ID NO: 340585 - DNA, 12 bp, Artificial Sequence
  Oligonucleotide primer for the detection of SNP TSC0009124
taactaacgtaa

SEQ ID NO: 340586 - DNA, 12 bp, Artificial Sequence
  Oligonucleotide primer for the detection of SNP TSC0009124
gtagaaggtatt

SEQ ID NO: 340587 - DNA, 12 bp, Artificial Sequence
  Oligonucleotide primer for the detection of SNP TSC0007423
ggagatgttttt

SEQ ID NO: 340588 - DNA, 12 bp, Artificial Sequence
  Oligonucleotide primer for the detection of SNP TSC0007423
aaaatactttta

SEQ ID NO: 340589 - DNA, 12 bp, Artificial Sequence
  Oligonucleotide primer for the detection of SNP TSC0007423
aatgaagagttt

SEQ ID NO: 340590 - DNA, 12 bp, Artificial Sequence
  Oligonucleotide primer for the detection of SNP TSC0007424
tattttaaaaac

SEQ ID NO: 340591 - DNA, 12 bp, Artificial Sequence
  Oligonucleotide primer for the detection of SNP TSC0007424
tagatgaggtta

SEQ ID NO: 340592 - DNA, 12 bp, Artificial Sequence
  Oligonucleotide primer for the detection of SNP TSC0007424
caaataaaatca

SEQ ID NO: 340593 - DNA, 12 bp, Artificial Sequence
  Oligonucleotide primer for the detection of SNP TSC0007424
tattttgaaaat

SEQ ID NO: 340594 - DNA, 12 bp, Artificial Sequence
  Oligonucleotide primer for the detection of SNP TSC0041604
acctcatttctc

SEQ ID NO: 340595 - DNA, 12 bp, Artificial Sequence
  Oligonucleotide primer for the detection of SNP TSC0041604
acctcgtttctc

SEQ ID NO: 340596 - DNA, 12 bp, Artificial Sequence
  Oligonucleotide primer for the detection of SNP TSC0041604
attatttataga

SEQ ID NO: 340597 - DNA, 12 bp, Artificial Sequence
  Oligonucleotide primer for the detection of SNP TSC0008164
tttttctccttt

SEQ ID NO: 340598 - DNA, 12 bp, Artificial Sequence
  Oligonucleotide primer for the detection of SNP TSC0008164
ttttagagatag

SEQ ID NO: 340599 - DNA, 12 bp, Artificial Sequence
  Oligonucleotide primer for the detection of SNP TSC0041605
caaataatctat

SEQ ID NO: 340600 - DNA, 12 bp, Artificial Sequence
  Oligonucleotide primer for the detection of SNP TSC0041605
tgaaagaaaatt

SEQ ID NO: 340601 - DNA, 12 bp, Artificial Sequence
  Oligonucleotide primer for the detection of SNP TSC0041605
tagatagtttat

SEQ ID NO: 340602 - DNA, 12 bp, Artificial Sequence
  Oligonucleotide primer for the detection of SNP TSC0041606
ttaacaaaactc

SEQ ID NO: 340603 - DNA, 12 bp, Artificial Sequence
  Oligonucleotide primer for the detection of SNP TSC0041607
cactttaatctc

SEQ ID NO: 340604 - DNA, 12 bp, Artificial Sequence
  Oligonucleotide primer for the detection of SNP TSC0041607
gagattttagta

SEQ ID NO: 340605 - DNA, 12 bp, Artificial Sequence
  Oligonucleotide primer for the detection of SNP TSC0041608
ttttaaaataag

SEQ ID NO: 340606 - DNA, 12 bp, Artificial Sequence
  Oligonucleotide primer for the detection of SNP TSC0041609
acaaaatactac

SEQ ID NO: 340607 - DNA, 12 bp, Artificial Sequence
  Oligonucleotide primer for the detection of SNP TSC0041609
aataagtggtag

SEQ ID NO: 340608 - DNA, 12 bp, Artificial Sequence
  Oligonucleotide primer for the detection of SNP TSC0041610
ttctttattact

SEQ ID NO: 340609 - DNA, 12 bp, Artificial Sequence
  Oligonucleotide primer for the detection of SNP TSC0041610
tatatattattt

SEQ ID NO: 340610 - DNA, 12 bp, Artificial Sequence
  Oligonucleotide primer for the detection of SNP TSC0041610
cacatattacct

SEQ ID NO: 340611 - DNA, 12 bp, Artificial Sequence
  Oligonucleotide primer for the detection of SNP TSC0041614
cgaataaatttt

SEQ ID NO: 340612 - DNA, 12 bp, Artificial Sequence
  Oligonucleotide primer for the detection of SNP TSC0041614
tttgaaaaggaa

SEQ ID NO: 340613 - DNA, 12 bp, Artificial Sequence
  Oligonucleotide primer for the detection of SNP TSC0041615
ccccaaacaacc

SEQ ID NO: 340614 - DNA, 12 bp, Artificial Sequence
  Oligonucleotide primer for the detection of SNP TSC0041615
tgggatttagaa

SEQ ID NO: 340615 - DNA, 12 bp, Artificial Sequence
  Oligonucleotide primer for the detection of SNP TSC0041616
ttcctatttcct

SEQ ID NO: 340616 - DNA, 12 bp, Artificial Sequence
  Oligonucleotide primer for the detection of SNP TSC0041616
aaactcttttta

SEQ ID NO: 340617 - DNA, 12 bp, Artificial Sequence
  Oligonucleotide primer for the detection of SNP TSC0041618
tcatatccaaac

SEQ ID NO: 340618 - DNA, 12 bp, Artificial Sequence
  Oligonucleotide primer for the detection of SNP TSC0041618
tcgtatccaaac

SEQ ID NO: 340619 - DNA, 12 bp, Artificial Sequence
  Oligonucleotide primer for the detection of SNP TSC0041618
ggtgaaggggag

SEQ ID NO: 340620 - DNA, 12 bp, Artificial Sequence
  Oligonucleotide primer for the detection of SNP TSC0041618
ttgtatttaaat

SEQ ID NO: 340621 - DNA, 12 bp, Artificial Sequence
  Oligonucleotide primer for the detection of SNP TSC0041618
tcgtatttaaat

SEQ ID NO: 340622 - DNA, 12 bp, Artificial Sequence
  Oligonucleotide primer for the detection of SNP TSC0041619
taaatttgattt

SEQ ID NO: 340623 - DNA, 12 bp, Artificial Sequence
  Oligonucleotide primer for the detection of SNP TSC0041619
taaatctaactc

SEQ ID NO: 340624 - DNA, 12 bp, Artificial Sequence
  Oligonucleotide primer for the detection of SNP TSC0041619
taaatagagatt

SEQ ID NO: 340625 - DNA, 12 bp, Artificial Sequence
  Oligonucleotide primer for the detection of SNP TSC0041620
aacttacaaccc

SEQ ID NO: 340626 - DNA, 12 bp, Artificial Sequence
  Oligonukleotid-Primer
ggttggtttggg

SEQ ID NO: 340627 - DNA, 12 bp, Artificial Sequence
  Oligonucleotide primer for the detection of SNP TSC0041620
ggttggttcggg

SEQ ID NO: 340628 - DNA, 12 bp, Artificial Sequence
  Oligonucleotide primer for the detection of SNP TSC0041621
aaaaaagttttt

SEQ ID NO: 340629 - DNA, 12 bp, Artificial Sequence
  Oligonucleotide primer for the detection of SNP TSC0041621
tgatttaaaagt

SEQ ID NO: 340630 - DNA, 12 bp, Artificial Sequence
  Oligonukleotid-Primer
aaccatctattt

SEQ ID NO: 340631 - DNA, 12 bp, Artificial Sequence
  Oligonucleotide primer for the detection of SNP TSC0041622
tgtgaattttta

SEQ ID NO: 340632 - DNA, 12 bp, Artificial Sequence
  Oligonucleotide primer for the detection of SNP TSC0041623
atcaattctttt

SEQ ID NO: 340633 - DNA, 12 bp, Artificial Sequence
  Oligonucleotide primer for the detection of SNP TSC0041623
tataaaatttag

SEQ ID NO: 340634 - DNA, 12 bp, Artificial Sequence
  Oligonukleotid-Primer
agataagttaga

SEQ ID NO: 340635 - DNA, 12 bp, Artificial Sequence
  Oligonucleotide primer for the detection of SNP TSC0006254
tccatactttac

SEQ ID NO: 340636 - DNA, 12 bp, Artificial Sequence
  Oligonucleotide primer for the detection of SNP TSC0006254
tattggaggaga

SEQ ID NO: 340637 - DNA, 12 bp, Artificial Sequence
  Oligonucleotide primer for the detection of SNP TSC0041633
aactaaaaccat

SEQ ID NO: 340638 - DNA, 12 bp, Artificial Sequence
  Oligonukleotid-Primer
tttatggttata

SEQ ID NO: 340639 - DNA, 12 bp, Artificial Sequence
  Oligonucleotide primer for the detection of SNP TSC0041633
cccataattaca

SEQ ID NO: 340640 - DNA, 12 bp, Artificial Sequence
  Oligonucleotide primer for the detection of SNP TSC0041633
aattgaaattat

SEQ ID NO: 340641 - DNA, 12 bp, Artificial Sequence
  Oligonucleotide primer for the detection of SNP TSC0041634
attatcatcaca

SEQ ID NO: 340642 - DNA, 12 bp, Artificial Sequence
  Oligonucleotide primer for the detection of SNP TSC0041634
tagtattttttg

SEQ ID NO: 340643 - DNA, 12 bp, Artificial Sequence
  Oligonucleotide primer for the detection of SNP TSC0041634
caacatctctta

SEQ ID NO: 340644 - DNA, 12 bp, Artificial Sequence
  Oligonucleotide primer for the detection of SNP TSC0041634
ttattattatat

SEQ ID NO: 340645 - DNA, 12 bp, Artificial Sequence
  Oligonucleotide primer for the detection of SNP TSC0041635
aattctcctatc

SEQ ID NO: 340646 - DNA, 12 bp, Artificial Sequence
  Oligonucleotide primer for the detection of SNP TSC0041636
accctacccacc

SEQ ID NO: 340647 - DNA, 12 bp, Artificial Sequence
  Oligonucleotide primer for the detection of SNP TSC0041636
accctacccgcc

SEQ ID NO: 340648 - DNA, 12 bp, Artificial Sequence
  Oligonucleotide primer for the detection of SNP TSC0041637
aaaaacgaaact

SEQ ID NO: 340649 - DNA, 12 bp, Artificial Sequence
  Oligonucleotide primer for the detection of SNP TSC0041637
ggtggaggttgt

SEQ ID NO: 340650 - DNA, 12 bp, Artificial Sequence
  Oligonucleotide primer for the detection of SNP TSC0041637
aataaaaactac

SEQ ID NO: 340651 - DNA, 12 bp, Artificial Sequence
  Oligonucleotide primer for the detection of SNP TSC0041637
gagagtgagatt

SEQ ID NO: 340652 - DNA, 12 bp, Artificial Sequence
  Oligonucleotide primer for the detection of SNP TSC0041637
gagagcgagatt

SEQ ID NO: 340653 - DNA, 12 bp, Artificial Sequence
  Oligonucleotide primer for the detection of SNP TSC0041638
ctcttactcact

SEQ ID NO: 340654 - DNA, 12 bp, Artificial Sequence
  Oligonucleotide primer for the detection of SNP TSC0041638
gataagatgaaa

SEQ ID NO: 340655 - DNA, 12 bp, Artificial Sequence
  Oligonucleotide primer for the detection of SNP TSC0005097
ctttccataata

SEQ ID NO: 340656 - DNA, 12 bp, Artificial Sequence
  Oligonucleotide primer for the detection of SNP TSC0005097
agagtgttttta

SEQ ID NO: 340657 - DNA, 12 bp, Artificial Sequence
  Oligonucleotide primer for the detection of SNP TSC0005097
tttttttatgat

SEQ ID NO: 340658 - DNA, 12 bp, Artificial Sequence
  Oligonucleotide primer for the detection of SNP TSC0041639
tgagtaatagat

SEQ ID NO: 340659 - DNA, 12 bp, Artificial Sequence
  Oligonucleotide primer for the detection of SNP TSC0041639
ataaacaacaaa

SEQ ID NO: 340660 - DNA, 12 bp, Artificial Sequence
  Oligonucleotide primer for the detection of SNP TSC0041639
ttgttgtagaaa

SEQ ID NO: 340661 - DNA, 12 bp, Artificial Sequence
  Oligonucleotide primer for the detection of SNP TSC0007702
acaaaaaaacac

SEQ ID NO: 340662 - DNA, 12 bp, Artificial Sequence
  Oligonucleotide primer for the detection of SNP TSC0007702
acaaaaaaacgc

SEQ ID NO: 340663 - DNA, 12 bp, Artificial Sequence
  Oligonucleotide primer for the detection of SNP TSC0007702
aagttgttttgt

SEQ ID NO: 340664 - DNA, 12 bp, Artificial Sequence
  Oligonucleotide primer for the detection of SNP TSC0007702
aagttgttttgc

SEQ ID NO: 340665 - DNA, 12 bp, Artificial Sequence
  Oligonucleotide primer for the detection of SNP TSC0007702
aaactattctac

SEQ ID NO: 340666 - DNA, 12 bp, Artificial Sequence
  Oligonucleotide primer for the detection of SNP TSC0007702
gtaaaagagtgt

SEQ ID NO: 340667 - DNA, 12 bp, Artificial Sequence
  Oligonucleotide primer for the detection of SNP TSC0007702
gtaaaagagcgt

SEQ ID NO: 340668 - DNA, 12 bp, Artificial Sequence
  Oligonucleotide primer for the detection of SNP TSC0007702
gtaaaagagtgc

SEQ ID NO: 340669 - DNA, 12 bp, Artificial Sequence
  Oligonucleotide primer for the detection of SNP TSC0007702
gtaaaagagcgc

SEQ ID NO: 340670 - DNA, 12 bp, Artificial Sequence
  Oligonucleotide primer for the detection of SNP TSC0041640
aattctttaatt

SEQ ID NO: 340671 - DNA, 12 bp, Artificial Sequence
  Oligonucleotide primer for the detection of SNP TSC0041640
agaattttagaa

SEQ ID NO: 340672 - DNA, 12 bp, Artificial Sequence
  Oligonucleotide primer for the detection of SNP TSC0041640
gattttttaatt

SEQ ID NO: 340673 - DNA, 12 bp, Artificial Sequence
  Oligonucleotide primer for the detection of SNP TSC0004807
cctcctacccaa

SEQ ID NO: 340674 - DNA, 12 bp, Artificial Sequence
  Oligonucleotide primer for the detection of SNP TSC0004807
tggtgtagggag

SEQ ID NO: 340675 - DNA, 12 bp, Artificial Sequence
  Oligonucleotide primer for the detection of SNP TSC0041641
taactctaaaac

SEQ ID NO: 340676 - DNA, 12 bp, Artificial Sequence
  Oligonucleotide primer for the detection of SNP TSC0041641
aattgatgagtt

SEQ ID NO: 340677 - DNA, 12 bp, Artificial Sequence
  Oligonucleotide primer for the detection of SNP TSC0041641
aactaataaatt

SEQ ID NO: 340678 - DNA, 12 bp, Artificial Sequence
  Oligonucleotide primer for the detection of SNP TSC0041641
tagttttaggat

SEQ ID NO: 340679 - DNA, 12 bp, Artificial Sequence
  Oligonucleotide primer for the detection of SNP TSC0041644
acaatacaacca

SEQ ID NO: 340680 - DNA, 12 bp, Artificial Sequence
  Oligonucleotide primer for the detection of SNP TSC0041644
acaatacgacca

SEQ ID NO: 340681 - DNA, 12 bp, Artificial Sequence
  Oligonucleotide primer for the detection of SNP TSC0041644
acgatacaacca

SEQ ID NO: 340682 - DNA, 12 bp, Artificial Sequence
  Oligonucleotide primer for the detection of SNP TSC0041644
acgatacgacca

SEQ ID NO: 340683 - DNA, 12 bp, Artificial Sequence
  Oligonucleotide primer for the detection of SNP TSC0041644
atggtgatttgt

SEQ ID NO: 340684 - DNA, 12 bp, Artificial Sequence
  Oligonucleotide primer for the detection of SNP TSC0041644
ataataacttac

SEQ ID NO: 340685 - DNA, 12 bp, Artificial Sequence
  Oligonucleotide primer for the detection of SNP TSC0041644
atgatatgatta

SEQ ID NO: 340686 - DNA, 12 bp, Artificial Sequence
  Oligonucleotide primer for the detection of SNP TSC0041644
acgatatgatta

SEQ ID NO: 340687 - DNA, 12 bp, Artificial Sequence
  Oligonucleotide primer for the detection of SNP TSC0041644
atgatacgatta

SEQ ID NO: 340688 - DNA, 12 bp, Artificial Sequence
  Oligonucleotide primer for the detection of SNP TSC0041644
acgatacgatta

SEQ ID NO: 340689 - DNA, 12 bp, Artificial Sequence
  Oligonucleotide primer for the detection of SNP TSC0041646
aacaaacgaatc

SEQ ID NO: 340690 - DNA, 12 bp, Artificial Sequence
  Oligonucleotide primer for the detection of SNP TSC0041646
aacgaacgaatc

SEQ ID NO: 340691 - DNA, 12 bp, Artificial Sequence
  Oligonucleotide primer for the detection of SNP TSC0041647
ttaaaacaatca

SEQ ID NO: 340692 - DNA, 12 bp, Artificial Sequence
  Oligonucleotide primer for the detection of SNP TSC0041647
atatagattgta

SEQ ID NO: 340693 - DNA, 12 bp, Artificial Sequence
  Oligonucleotide primer for the detection of SNP TSC0041648
tatcaaaacaaa

SEQ ID NO: 340694 - DNA, 12 bp, Artificial Sequence
  Oligonucleotide primer for the detection of SNP TSC0041648
atttaatttgaa

SEQ ID NO: 340695 - DNA, 12 bp, Artificial Sequence
  Oligonucleotide primer for the detection of SNP TSC0041649
atcttaataaaa

SEQ ID NO: 340696 - DNA, 12 bp, Artificial Sequence
  Oligonucleotide primer for the detection of SNP TSC0041649
ctcttcttaata

SEQ ID NO: 340697 - DNA, 12 bp, Artificial Sequence
  Oligonucleotide primer for the detection of SNP TSC0041649
gttttagtaaag

SEQ ID NO: 340698 - DNA, 12 bp, Artificial Sequence
  Oligonucleotide primer for the detection of SNP TSC0041651
ctcacaacctcc

SEQ ID NO: 340699 - DNA, 12 bp, Artificial Sequence
  Oligonucleotide primer for the detection of SNP TSC0041651
ttggataagggt

SEQ ID NO: 340700 - DNA, 12 bp, Artificial Sequence
  Oligonucleotide primer for the detection of SNP TSC0041651
tttatagttttt

SEQ ID NO: 340701 - DNA, 12 bp, Artificial Sequence
  Oligonucleotide primer for the detection of SNP TSC0041651
tttatagttttc

SEQ ID NO: 340702 - DNA, 12 bp, Artificial Sequence
  Oligonucleotide primer for the detection of SNP TSC0041652
tggaatgggaaa

SEQ ID NO: 340703 - DNA, 12 bp, Artificial Sequence
  Oligonucleotide primer for the detection of SNP TSC0041653
tccaatacttca

SEQ ID NO: 340704 - DNA, 12 bp, Artificial Sequence
  Oligonucleotide primer for the detection of SNP TSC0041653
caatatttattc

SEQ ID NO: 340705 - DNA, 12 bp, Artificial Sequence
  Oligonucleotide primer for the detection of SNP TSC0041654
aaactttattaa

SEQ ID NO: 340706 - DNA, 12 bp, Artificial Sequence
  Oligonucleotide primer for the detection of SNP TSC0041654
agtattagtaat

SEQ ID NO: 340707 - DNA, 12 bp, Artificial Sequence
  Oligonucleotide primer for the detection of SNP TSC0009235
atcaatatcatt

SEQ ID NO: 340708 - DNA, 12 bp, Artificial Sequence
  Oligonucleotide primer for the detection of SNP TSC0009235
gtttggtgtata

SEQ ID NO: 340709 - DNA, 12 bp, Artificial Sequence
  Oligonucleotide primer for the detection of SNP TSC0009235
cttaatatataa

SEQ ID NO: 340710 - DNA, 12 bp, Artificial Sequence
  Oligonucleotide primer for the detection of SNP TSC0009236
ttataactctat

SEQ ID NO: 340711 - DNA, 12 bp, Artificial Sequence
  Oligonucleotide primer for the detection of SNP TSC0009236
gaatttttttat

SEQ ID NO: 340712 - DNA, 12 bp, Artificial Sequence
  Oligonucleotide primer for the detection of SNP TSC0009236
aaattttctcat

SEQ ID NO: 340713 - DNA, 12 bp, Artificial Sequence
  Oligonucleotide primer for the detection of SNP TSC0009236
ttatgattttat

SEQ ID NO: 340714 - DNA, 12 bp, Artificial Sequence
  Oligonucleotide primer for the detection of SNP TSC0009237
taacctttaaac

SEQ ID NO: 340715 - DNA, 12 bp, Artificial Sequence
  Oligonucleotide primer for the detection of SNP TSC0009238
tcttcacaaata

SEQ ID NO: 340716 - DNA, 12 bp, Artificial Sequence
  Oligonucleotide primer for the detection of SNP TSC0009238
tcttcgcaaata

SEQ ID NO: 340717 - DNA, 12 bp, Artificial Sequence
  Oligonucleotide primer for the detection of SNP TSC0009238
tatagagttata

SEQ ID NO: 340718 - DNA, 12 bp, Artificial Sequence
  Oligonucleotide primer for the detection of SNP TSC0009238
tataaaatcata

SEQ ID NO: 340719 - DNA, 12 bp, Artificial Sequence
  Oligonucleotide primer for the detection of SNP TSC0041655
aataacccctct

SEQ ID NO: 340720 - DNA, 12 bp, Artificial Sequence
  Oligonucleotide primer for the detection of SNP TSC0041655
gtagtttttgag

SEQ ID NO: 340721 - DNA, 12 bp, Artificial Sequence
  Oligonucleotide primer for the detection of SNP TSC0041656
aaaaatactatc

SEQ ID NO: 340722 - DNA, 12 bp, Artificial Sequence
  Oligonucleotide primer for the detection of SNP TSC0041656
tattttagtatt

SEQ ID NO: 340723 - DNA, 12 bp, Artificial Sequence
  Oligonucleotide primer for the detection of SNP TSC0041656
acctcaatacca

SEQ ID NO: 340724 - DNA, 12 bp, Artificial Sequence
  Oligonucleotide primer for the detection of SNP TSC0041656
gagggtattgtt

SEQ ID NO: 340725 - DNA, 12 bp, Artificial Sequence
  Oligonucleotide primer for the detection of SNP TSC0041656
gagggtattgtc

SEQ ID NO: 340726 - DNA, 12 bp, Artificial Sequence
  Oligonucleotide primer for the detection of SNP TSC0041657
ggttatataggt

SEQ ID NO: 340727 - DNA, 12 bp, Artificial Sequence
  Oligonukleotid-Primer
aattacacaaat

SEQ ID NO: 340728 - DNA, 12 bp, Artificial Sequence
  Oligonucleotide primer for the detection of SNP TSC0041657
ttatgaagataa

SEQ ID NO: 340729 - DNA, 12 bp, Artificial Sequence
  Oligonucleotide primer for the detection of SNP TSC0041657
ttacgaagataa

SEQ ID NO: 340730 - DNA, 12 bp, Artificial Sequence
  Oligonucleotide primer for the detection of SNP TSC0041658
attaacttttca

SEQ ID NO: 340731 - DNA, 12 bp, Artificial Sequence
  Oligonucleotide primer for the detection of SNP TSC0041658
tgaaattatttt

SEQ ID NO: 340732 - DNA, 12 bp, Artificial Sequence
  Oligonucleotide primer for the detection of SNP TSC0041658
cgaaattatttt

SEQ ID NO: 340733 - DNA, 12 bp, Artificial Sequence
  Oligonucleotide primer for the detection of SNP TSC0041658
caaaattatctt

SEQ ID NO: 340734 - DNA, 12 bp, Artificial Sequence
  Oligonucleotide primer for the detection of SNP TSC0041658
cgaaattatctt

SEQ ID NO: 340735 - DNA, 12 bp, Artificial Sequence
  Oligonucleotide primer for the detection of SNP TSC0041659
tattttaaaaca

SEQ ID NO: 340736 - DNA, 12 bp, Artificial Sequence
  Oligonucleotide primer for the detection of SNP TSC0041659
ttagagaataat

SEQ ID NO: 340737 - DNA, 12 bp, Artificial Sequence
  Oligonucleotide primer for the detection of SNP TSC0041660
aacccaaactcc

SEQ ID NO: 340738 - DNA, 12 bp, Artificial Sequence
  Oligonucleotide primer for the detection of SNP TSC0041660
aacccgaactcc

SEQ ID NO: 340739 - DNA, 12 bp, Artificial Sequence
  Oligonucleotide primer for the detection of SNP TSC0041660
attgaattggga

SEQ ID NO: 340740 - DNA, 12 bp, Artificial Sequence
  Oligonucleotide primer for the detection of SNP TSC0041660
aatttgggtttt

SEQ ID NO: 340741 - DNA, 12 bp, Artificial Sequence
  Oligonucleotide primer for the detection of SNP TSC0041660
aattcgggtttt

SEQ ID NO: 340742 - DNA, 12 bp, Artificial Sequence
  Oligonucleotide primer for the detection of SNP TSC0041661
tccttctctaat

SEQ ID NO: 340743 - DNA, 12 bp, Artificial Sequence
  Oligonucleotide primer for the detection of SNP TSC0041662
cattatataaac

SEQ ID NO: 340744 - DNA, 12 bp, Artificial Sequence
  Oligonucleotide primer for the detection of SNP TSC0041662
gtggatgagtgg

SEQ ID NO: 340745 - DNA, 12 bp, Artificial Sequence
  Oligonucleotide primer for the detection of SNP TSC0041663
tctaaatttcta

SEQ ID NO: 340746 - DNA, 12 bp, Artificial Sequence
  Oligonucleotide primer for the detection of SNP TSC0041663
aagatttaagag

SEQ ID NO: 340747 - DNA, 12 bp, Artificial Sequence
  Oligonucleotide primer for the detection of SNP TSC0009210
aaacataaacat

SEQ ID NO: 340748 - DNA, 12 bp, Artificial Sequence
  Oligonucleotide primer for the detection of SNP TSC0009210
aaagtatttgta

SEQ ID NO: 340749 - DNA, 12 bp, Artificial Sequence
  Oligonucleotide primer for the detection of SNP TSC0009210
aaaacatttata

SEQ ID NO: 340750 - DNA, 12 bp, Artificial Sequence
  Oligonucleotide primer for the detection of SNP TSC0009210
aagtataaatat

SEQ ID NO: 340751 - DNA, 12 bp, Artificial Sequence
  Oligonucleotide primer for the detection of SNP TSC0009211
tactttatttta

SEQ ID NO: 340752 - DNA, 12 bp, Artificial Sequence
  Oligonucleotide primer for the detection of SNP TSC0009211
tttgaggtttta

SEQ ID NO: 340753 - DNA, 12 bp, Artificial Sequence
  Oligonucleotide primer for the detection of SNP TSC0009211
tctaaaactcca

SEQ ID NO: 340754 - DNA, 12 bp, Artificial Sequence
  Oligonucleotide primer for the detection of SNP TSC0009211
gttttgttttac

SEQ ID NO: 340755 - DNA, 12 bp, Artificial Sequence
  Oligonucleotide primer for the detection of SNP TSC0010071
ccacctccaaca

SEQ ID NO: 340756 - DNA, 12 bp, Artificial Sequence
  Oligonucleotide primer for the detection of SNP TSC0010071
atgtaattttta

SEQ ID NO: 340757 - DNA, 12 bp, Artificial Sequence
  Oligonucleotide primer for the detection of SNP TSC0010071
atacaatcccca

SEQ ID NO: 340758 - DNA, 12 bp, Artificial Sequence
  Oligonucleotide primer for the detection of SNP TSC0010072
atgtaagatgtg

SEQ ID NO: 340759 - DNA, 12 bp, Artificial Sequence
  Oligonucleotide primer for the detection of SNP TSC0010072
tataaaatataa

SEQ ID NO: 340760 - DNA, 12 bp, Artificial Sequence
  Oligonucleotide primer for the detection of SNP TSC0010072
agaggaagaagt

SEQ ID NO: 340761 - DNA, 12 bp, Artificial Sequence
  Oligonucleotide primer for the detection of SNP TSC0041664
atatagtgtatg

SEQ ID NO: 340762 - DNA, 12 bp, Artificial Sequence
  Oligonucleotide primer for the detection of SNP TSC0041665
cttccaaaattc

SEQ ID NO: 340763 - DNA, 12 bp, Artificial Sequence
  Oligonucleotide primer for the detection of SNP TSC0041665
tgatttggtgta

SEQ ID NO: 340764 - DNA, 12 bp, Artificial Sequence
  Oligonucleotide primer for the detection of SNP TSC0041665
taatttaataca

SEQ ID NO: 340765 - DNA, 12 bp, Artificial Sequence
  Oligonucleotide primer for the detection of SNP TSC0041666
agattgtgattt

SEQ ID NO: 340766 - DNA, 12 bp, Artificial Sequence
  Oligonucleotide primer for the detection of SNP TSC0041666
aattataaccta

SEQ ID NO: 340767 - DNA, 12 bp, Artificial Sequence
  Oligonucleotide primer for the detection of SNP TSC0041666
tttaaaagatat

SEQ ID NO: 340768 - DNA, 12 bp, Artificial Sequence
  Oligonucleotide primer for the detection of SNP TSC0041667
caacaattttaa

SEQ ID NO: 340769 - DNA, 12 bp, Artificial Sequence
  Oligonucleotide primer for the detection of SNP TSC0041667
ttgtttatggtt

SEQ ID NO: 340770 - DNA, 12 bp, Artificial Sequence
  Oligonucleotide primer for the detection of SNP TSC0041667
ctattcataatt

SEQ ID NO: 340771 - DNA, 12 bp, Artificial Sequence
  Oligonucleotide primer for the detection of SNP TSC0041667
tagtagttttaa

SEQ ID NO: 340772 - DNA, 12 bp, Artificial Sequence
  Oligonucleotide primer for the detection of SNP TSC0041668
ttcttactactt

SEQ ID NO: 340773 - DNA, 12 bp, Artificial Sequence
  Oligonucleotide primer for the detection of SNP TSC0041669
tggtttatagag

SEQ ID NO: 340774 - DNA, 12 bp, Artificial Sequence
  Oligonucleotide primer for the detection of SNP TSC0041672
tttattttttct

SEQ ID NO: 340775 - DNA, 12 bp, Artificial Sequence
  Oligonucleotide primer for the detection of SNP TSC0041672
ataagtattata

SEQ ID NO: 340776 - DNA, 12 bp, Artificial Sequence
  Oligonucleotide primer for the detection of SNP TSC0006798
aactcaaacatc

SEQ ID NO: 340777 - DNA, 12 bp, Artificial Sequence
  Oligonucleotide primer for the detection of SNP TSC0041675
ataataccttaa

SEQ ID NO: 340778 - DNA, 12 bp, Artificial Sequence
  Oligonucleotide primer for the detection of SNP TSC0041675
taagatttaagt

SEQ ID NO: 340779 - DNA, 12 bp, Artificial Sequence
  Oligonucleotide primer for the detection of SNP TSC0041675
aatattttaatt

SEQ ID NO: 340780 - DNA, 12 bp, Artificial Sequence
  Oligonucleotide primer for the detection of SNP TSC0041676
tttactcttcct

SEQ ID NO: 340781 - DNA, 12 bp, Artificial Sequence
  Oligonucleotide primer for the detection of SNP TSC0041677
actttattttcc

SEQ ID NO: 340782 - DNA, 12 bp, Artificial Sequence
  Oligonucleotide primer for the detection of SNP TSC0041677
tgttgatagtga

SEQ ID NO: 340783 - DNA, 12 bp, Artificial Sequence
  Oligonucleotide primer for the detection of SNP TSC0041678
aacctccccact

SEQ ID NO: 340784 - DNA, 12 bp, Artificial Sequence
  Oligonucleotide primer for the detection of SNP TSC0041678
gggaggtagaag

SEQ ID NO: 340785 - DNA, 12 bp, Artificial Sequence
  Oligonucleotide primer for the detection of SNP TSC0041679
aattcaccaaat

SEQ ID NO: 340786 - DNA, 12 bp, Artificial Sequence
  Oligonucleotide primer for the detection of SNP TSC0041679
aaataaactcta

SEQ ID NO: 340787 - DNA, 12 bp, Artificial Sequence
  Oligonucleotide primer for the detection of SNP TSC0041680
tttattatgtag

SEQ ID NO: 340788 - DNA, 12 bp, Artificial Sequence
  Oligonucleotide primer for the detection of SNP TSC0041680
ctcatcatacaa

SEQ ID NO: 340789 - DNA, 12 bp, Artificial Sequence
  Oligonucleotide primer for the detection of SNP TSC0041680
gatgaaaagttt

SEQ ID NO: 340790 - DNA, 12 bp, Artificial Sequence
  Oligonucleotide primer for the detection of SNP TSC0005763
tacaaactaaac

SEQ ID NO: 340791 - DNA, 12 bp, Artificial Sequence
  Oligonucleotide primer for the detection of SNP TSC0005763
gttagtatgtta

SEQ ID NO: 340792 - DNA, 12 bp, Artificial Sequence
  Oligonucleotide primer for the detection of SNP TSC0005764
aattctatctac

SEQ ID NO: 340793 - DNA, 12 bp, Artificial Sequence
  Oligonucleotide primer for the detection of SNP TSC0005764
atttatattaga

SEQ ID NO: 340794 - DNA, 12 bp, Artificial Sequence
  Oligonucleotide primer for the detection of SNP TSC0006025
aaacattaaact

SEQ ID NO: 340795 - DNA, 12 bp, Artificial Sequence
  Oligonucleotide primer for the detection of SNP TSC0041681
atttaccacact

SEQ ID NO: 340796 - DNA, 12 bp, Artificial Sequence
  Oligonucleotide primer for the detection of SNP TSC0041681
agggtagaggta

SEQ ID NO: 340797 - DNA, 12 bp, Artificial Sequence
  Oligonucleotide primer for the detection of SNP TSC0010400
tatttaatattt

SEQ ID NO: 340798 - DNA, 12 bp, Artificial Sequence
  Oligonucleotide primer for the detection of SNP TSC0010400
tatttaacactt

SEQ ID NO: 340799 - DNA, 12 bp, Artificial Sequence
  Oligonucleotide primer for the detection of SNP TSC0010400
agaataaataag

SEQ ID NO: 340800 - DNA, 12 bp, Artificial Sequence
  Oligonucleotide primer for the detection of SNP TSC0041682
tataaaacacta

SEQ ID NO: 340801 - DNA, 12 bp, Artificial Sequence
  Oligonucleotide primer for the detection of SNP TSC0041682
aaactaaccaca

SEQ ID NO: 340802 - DNA, 12 bp, Artificial Sequence
  Oligonucleotide primer for the detection of SNP TSC0041682
ttatgaaatatt

SEQ ID NO: 340803 - DNA, 12 bp, Artificial Sequence
  Oligonucleotide primer for the detection of SNP TSC0041683
aaattaataata

SEQ ID NO: 340804 - DNA, 12 bp, Artificial Sequence
  Oligonucleotide primer for the detection of SNP TSC0041683
ataataatatta

SEQ ID NO: 340805 - DNA, 12 bp, Artificial Sequence
  Oligonucleotide primer for the detection of SNP TSC0041683
agaattagtgat

SEQ ID NO: 340806 - DNA, 12 bp, Artificial Sequence
  Oligonucleotide primer for the detection of SNP TSC0041684
tcactataaaat

SEQ ID NO: 340807 - DNA, 12 bp, Artificial Sequence
  Oligonucleotide primer for the detection of SNP TSC0041684
atatattattaa

SEQ ID NO: 340808 - DNA, 12 bp, Artificial Sequence
  Oligonucleotide primer for the detection of SNP TSC0041685
taacaaaatact

SEQ ID NO: 340809 - DNA, 12 bp, Artificial Sequence
  Oligonucleotide primer for the detection of SNP TSC0041685
tatataatgtta

SEQ ID NO: 340810 - DNA, 12 bp, Artificial Sequence
  Oligonucleotide primer for the detection of SNP TSC0041686
taaacataaaca

SEQ ID NO: 340811 - DNA, 12 bp, Artificial Sequence
  Oligonucleotide primer for the detection of SNP TSC0041686
aggggattgggt

SEQ ID NO: 340812 - DNA, 12 bp, Artificial Sequence
  Oligonucleotide primer for the detection of SNP TSC0041686
ttagatatagat

SEQ ID NO: 340813 - DNA, 12 bp, Artificial Sequence
  Oligonucleotide primer for the detection of SNP TSC0041687
caaattatactt

SEQ ID NO: 340814 - DNA, 12 bp, Artificial Sequence
  Oligonucleotide primer for the detection of SNP TSC0041687
gttattttattg

SEQ ID NO: 340815 - DNA, 12 bp, Artificial Sequence
  Oligonucleotide primer for the detection of SNP TSC0041688
tataaatcactc

SEQ ID NO: 340816 - DNA, 12 bp, Artificial Sequence
  Oligonucleotide primer for the detection of SNP TSC0041688
agttgattaggg

SEQ ID NO: 340817 - DNA, 12 bp, Artificial Sequence
  Oligonucleotide primer for the detection of SNP TSC0041689
acttttaccctt

SEQ ID NO: 340818 - DNA, 12 bp, Artificial Sequence
  Oligonucleotide primer for the detection of SNP TSC0041690
taacaatattct

SEQ ID NO: 340819 - DNA, 12 bp, Artificial Sequence
  Oligonucleotide primer for the detection of SNP TSC0041691
ttacataaaact

SEQ ID NO: 340820 - DNA, 12 bp, Artificial Sequence
  Oligonucleotide primer for the detection of SNP TSC0041692
ataccccaaaat

SEQ ID NO: 340821 - DNA, 12 bp, Artificial Sequence
  Oligonucleotide primer for the detection of SNP TSC0041693
ctaaaaattcaa

SEQ ID NO: 340822 - DNA, 12 bp, Artificial Sequence
  Oligonucleotide primer for the detection of SNP TSC0041693
gtgttatttata

SEQ ID NO: 340823 - DNA, 12 bp, Artificial Sequence
  Oligonucleotide primer for the detection of SNP TSC0041693
atattattcata

SEQ ID NO: 340824 - DNA, 12 bp, Artificial Sequence
  Oligonucleotide primer for the detection of SNP TSC0041693
ttttagggattt

SEQ ID NO: 340825 - DNA, 12 bp, Artificial Sequence
  Oligonucleotide primer for the detection of SNP TSC0041695
aaacaaatcata

SEQ ID NO: 340826 - DNA, 12 bp, Artificial Sequence
  Oligonucleotide primer for the detection of SNP TSC0041695
aaacaaatcgta

SEQ ID NO: 340827 - DNA, 12 bp, Artificial Sequence
  Oligonucleotide primer for the detection of SNP TSC0041695
aggaagaagtaa

SEQ ID NO: 340828 - DNA, 12 bp, Artificial Sequence
  Oligonucleotide primer for the detection of SNP TSC0041699
attatcaacaat

SEQ ID NO: 340829 - DNA, 12 bp, Artificial Sequence
  Oligonucleotide primer for the detection of SNP TSC0041699
tattatggttat

SEQ ID NO: 340830 - DNA, 12 bp, Artificial Sequence
  Oligonucleotide primer for the detection of SNP TSC0041699
tattacggttat

SEQ ID NO: 340831 - DNA, 12 bp, Artificial Sequence
  Oligonucleotide primer for the detection of SNP TSC0041699
tatcacaattat

SEQ ID NO: 340832 - DNA, 12 bp, Artificial Sequence
  Oligonucleotide primer for the detection of SNP TSC0041699
tatcacgattat

SEQ ID NO: 340833 - DNA, 12 bp, Artificial Sequence
  Oligonucleotide primer for the detection of SNP TSC0041699
attgttaatagt

SEQ ID NO: 340834 - DNA, 12 bp, Artificial Sequence
  Oligonucleotide primer for the detection of SNP TSC0041700
tacacataatac

SEQ ID NO: 340835 - DNA, 12 bp, Artificial Sequence
  Oligonucleotide primer for the detection of SNP TSC0041700
atcctttccata

SEQ ID NO: 340836 - DNA, 12 bp, Artificial Sequence
  Oligonucleotide primer for the detection of SNP TSC0041700
atatatgatatt

SEQ ID NO: 340837 - DNA, 12 bp, Artificial Sequence
  Oligonucleotide primer for the detection of SNP TSC0041705
aatttaaaccat

SEQ ID NO: 340838 - DNA, 12 bp, Artificial Sequence
  Oligonucleotide primer for the detection of SNP TSC0041705
ttttaagtgatg

SEQ ID NO: 340839 - DNA, 12 bp, Artificial Sequence
  Oligonucleotide primer for the detection of SNP TSC0041706
gtatttaagtaa

SEQ ID NO: 340840 - DNA, 12 bp, Artificial Sequence
  Oligonucleotide primer for the detection of SNP TSC0041708
ttataagaggta

SEQ ID NO: 340841 - DNA, 12 bp, Artificial Sequence
  Oligonucleotide primer for the detection of SNP TSC0041712
atctacaaataa

SEQ ID NO: 340842 - DNA, 12 bp, Artificial Sequence
  Oligonucleotide primer for the detection of SNP TSC0041712
ttagttggatta

SEQ ID NO: 340843 - DNA, 12 bp, Artificial Sequence
  Oligonucleotide primer for the detection of SNP TSC0041712
caactaaatcaa

SEQ ID NO: 340844 - DNA, 12 bp, Artificial Sequence
  Oligonucleotide primer for the detection of SNP TSC0041712
tttgtaggtaat

SEQ ID NO: 340845 - DNA, 12 bp, Artificial Sequence
  Oligonucleotide primer for the detection of SNP TSC0041712
tttgtaggtaac

SEQ ID NO: 340846 - DNA, 12 bp, Artificial Sequence
  Oligonucleotide primer for the detection of SNP TSC0041713
aaaatcgataac

SEQ ID NO: 340847 - DNA, 12 bp, Artificial Sequence
  Oligonucleotide primer for the detection of SNP TSC0041713
taagtatttggg

SEQ ID NO: 340848 - DNA, 12 bp, Artificial Sequence
  Oligonucleotide primer for the detection of SNP TSC0041713
caaacatctaaa

SEQ ID NO: 340849 - DNA, 12 bp, Artificial Sequence
  Oligonucleotide primer for the detection of SNP TSC0041713
gagattgatagt

SEQ ID NO: 340850 - DNA, 12 bp, Artificial Sequence
  Oligonucleotide primer for the detection of SNP TSC0041713
gagatcgatagt

SEQ ID NO: 340851 - DNA, 12 bp, Artificial Sequence
  Oligonucleotide primer for the detection of SNP TSC0041714
caaaacctcaac

SEQ ID NO: 340852 - DNA, 12 bp, Artificial Sequence
  Oligonucleotide primer for the detection of SNP TSC0041714
ttaataatatga

SEQ ID NO: 340853 - DNA, 12 bp, Artificial Sequence
  Oligonucleotide primer for the detection of SNP TSC0041714
ttaataatataa

SEQ ID NO: 340854 - DNA, 12 bp, Artificial Sequence
  Oligonucleotide primer for the detection of SNP TSC0041715
atctcatttttt

SEQ ID NO: 340855 - DNA, 12 bp, Artificial Sequence
  Oligonucleotide primer for the detection of SNP TSC0041716
taaaattaaaac

SEQ ID NO: 340856 - DNA, 12 bp, Artificial Sequence
  Oligonucleotide primer for the detection of SNP TSC0041716
aaggttttatta

SEQ ID NO: 340857 - DNA, 12 bp, Artificial Sequence
  Oligonucleotide primer for the detection of SNP TSC0041717
tcaaatatttat

SEQ ID NO: 340858 - DNA, 12 bp, Artificial Sequence
  Oligonucleotide primer for the detection of SNP TSC0041717
taataaagagta

SEQ ID NO: 340859 - DNA, 12 bp, Artificial Sequence
  Oligonucleotide primer for the detection of SNP TSC0041718
acttctcaactt

SEQ ID NO: 340860 - DNA, 12 bp, Artificial Sequence
  Oligonucleotide primer for the detection of SNP TSC0041718
tattggtattga

SEQ ID NO: 340861 - DNA, 12 bp, Artificial Sequence
  Oligonucleotide primer for the detection of SNP TSC0041718
tattggtatcga

SEQ ID NO: 340862 - DNA, 12 bp, Artificial Sequence
  Oligonucleotide primer for the detection of SNP TSC0041718
cattaacaccaa

SEQ ID NO: 340863 - DNA, 12 bp, Artificial Sequence
  Oligonucleotide primer for the detection of SNP TSC0041718
cattaacaccga

SEQ ID NO: 340864 - DNA, 12 bp, Artificial Sequence
  Oligonucleotide primer for the detection of SNP TSC0041719
cttaattttaat

SEQ ID NO: 340865 - DNA, 12 bp, Artificial Sequence
  Oligonucleotide primer for the detection of SNP TSC0041719
taaaataaattt

SEQ ID NO: 340866 - DNA, 12 bp, Artificial Sequence
  Oligonucleotide primer for the detection of SNP TSC0041720
actaattacttt

SEQ ID NO: 340867 - DNA, 12 bp, Artificial Sequence
  Oligonucleotide primer for the detection of SNP TSC0041720
atataaatatta

SEQ ID NO: 340868 - DNA, 12 bp, Artificial Sequence
  Oligonucleotide primer for the detection of SNP TSC0006148
cacctccacacc

SEQ ID NO: 340869 - DNA, 12 bp, Artificial Sequence
  Oligonucleotide primer for the detection of SNP TSC0006148
gggttttttgga

SEQ ID NO: 340870 - DNA, 12 bp, Artificial Sequence
  Oligonucleotide primer for the detection of SNP TSC0041721
ttaaatatttct

SEQ ID NO: 340871 - DNA, 12 bp, Artificial Sequence
  Oligonucleotide primer for the detection of SNP TSC0041721
attgtaagattg

SEQ ID NO: 340872 - DNA, 12 bp, Artificial Sequence
  Oligonucleotide primer for the detection of SNP TSC0041721
actacaaaacta

SEQ ID NO: 340873 - DNA, 12 bp, Artificial Sequence
  Oligonucleotide primer for the detection of SNP TSC0041722
attacacaatta

SEQ ID NO: 340874 - DNA, 12 bp, Artificial Sequence
  Oligonucleotide primer for the detection of SNP TSC0041722
atattaagaaat

SEQ ID NO: 340875 - DNA, 12 bp, Artificial Sequence
  Oligonucleotide primer for the detection of SNP TSC0041722
attgtatagtta

SEQ ID NO: 340876 - DNA, 12 bp, Artificial Sequence
  Oligonucleotide primer for the detection of SNP TSC0041723
tcacactccaaa

SEQ ID NO: 340877 - DNA, 12 bp, Artificial Sequence
  Oligonucleotide primer for the detection of SNP TSC0041723
tgtatttatgtt

SEQ ID NO: 340878 - DNA, 12 bp, Artificial Sequence
  Oligonucleotide primer for the detection of SNP TSC0041723
tgtatttatgtc

SEQ ID NO: 340879 - DNA, 12 bp, Artificial Sequence
  Oligonucleotide primer for the detection of SNP TSC0041723
atatactcatat

SEQ ID NO: 340880 - DNA, 12 bp, Artificial Sequence
  Oligonucleotide primer for the detection of SNP TSC0041724
agtttttaattt

SEQ ID NO: 340881 - DNA, 12 bp, Artificial Sequence
  Oligonucleotide primer for the detection of SNP TSC0041724
aaaaccttcaac

SEQ ID NO: 340882 - DNA, 12 bp, Artificial Sequence
  Oligonucleotide primer for the detection of SNP TSC0041724
tatataagggag

SEQ ID NO: 340883 - DNA, 12 bp, Artificial Sequence
  Oligonucleotide primer for the detection of SNP TSC0041729
cacacatatata

SEQ ID NO: 340884 - DNA, 12 bp, Artificial Sequence
  Oligonucleotide primer for the detection of SNP TSC0041729
atatatatgtat

SEQ ID NO: 340885 - DNA, 12 bp, Artificial Sequence
  Oligonucleotide primer for the detection of SNP TSC0041734
tatcctaccctt

SEQ ID NO: 340886 - DNA, 12 bp, Artificial Sequence
  Oligonucleotide primer for the detection of SNP TSC0041735
gaatttgagtat

SEQ ID NO: 340887 - DNA, 12 bp, Artificial Sequence
  Oligonucleotide primer for the detection of SNP TSC0041735
aaaatctaaaca

SEQ ID NO: 340888 - DNA, 12 bp, Artificial Sequence
  Oligonucleotide primer for the detection of SNP TSC0041735
agggttattttg

SEQ ID NO: 340889 - DNA, 12 bp, Artificial Sequence
  Oligonucleotide primer for the detection of SNP TSC0041738
tttttacactta

SEQ ID NO: 340890 - DNA, 12 bp, Artificial Sequence
  Oligonucleotide primer for the detection of SNP TSC0041738
ttatttgtaatt

SEQ ID NO: 340891 - DNA, 12 bp, Artificial Sequence
  Oligonucleotide primer for the detection of SNP TSC0041738
ttacttataatt

SEQ ID NO: 340892 - DNA, 12 bp, Artificial Sequence
  Oligonukleotid-Primer
gtttttgtattt

SEQ ID NO: 340893 - DNA, 12 bp, Artificial Sequence
  Oligonucleotide primer for the detection of SNP TSC0041739
aaatactattct

SEQ ID NO: 340894 - DNA, 12 bp, Artificial Sequence
  Oligonucleotide primer for the detection of SNP TSC0041739
gttaaggattgt

SEQ ID NO: 340895 - DNA, 12 bp, Artificial Sequence
  Oligonucleotide primer for the detection of SNP TSC0041739
caaaaactataa

SEQ ID NO: 340896 - DNA, 12 bp, Artificial Sequence
  Oligonucleotide primer for the detection of SNP TSC0041739
agatattatttt

SEQ ID NO: 340897 - DNA, 12 bp, Artificial Sequence
  Oligonucleotide primer for the detection of SNP TSC0041740
cattctaatctt

SEQ ID NO: 340898 - DNA, 12 bp, Artificial Sequence
  Oligonucleotide primer for the detection of SNP TSC0041740
actcattcaaaa

SEQ ID NO: 340899 - DNA, 12 bp, Artificial Sequence
  Oligonucleotide primer for the detection of SNP TSC0041741
ttaaggattgtg

SEQ ID NO: 340900 - DNA, 12 bp, Artificial Sequence
  Oligonukleotid-Primer
tccaacttcttt

SEQ ID NO: 340901 - DNA, 12 bp, Artificial Sequence
  Oligonucleotide primer for the detection of SNP TSC0041742
tttttatataga

SEQ ID NO: 340902 - DNA, 12 bp, Artificial Sequence
  Oligonucleotide primer for the detection of SNP TSC0041743
ctaatcacaaac

SEQ ID NO: 340903 - DNA, 12 bp, Artificial Sequence
  Oligonucleotide primer for the detection of SNP TSC0041743
ctaatcacgaac

SEQ ID NO: 340904 - DNA, 12 bp, Artificial Sequence
  Oligonucleotide primer for the detection of SNP TSC0041743
tttgaggttagg

SEQ ID NO: 340905 - DNA, 12 bp, Artificial Sequence
  Oligonucleotide primer for the detection of SNP TSC0041744
agaaaatggtta

SEQ ID NO: 340906 - DNA, 12 bp, Artificial Sequence
  Oligonucleotide primer for the detection of SNP TSC0041744
aaaaaataacta

SEQ ID NO: 340907 - DNA, 12 bp, Artificial Sequence
  Oligonucleotide primer for the detection of SNP TSC0041744
aaatgtgggtat

SEQ ID NO: 340908 - DNA, 12 bp, Artificial Sequence
  Oligonucleotide primer for the detection of SNP TSC0041745
aataaattaaca

SEQ ID NO: 340909 - DNA, 12 bp, Artificial Sequence
  Oligonucleotide primer for the detection of SNP TSC0041745
ccataaattata

SEQ ID NO: 340910 - DNA, 12 bp, Artificial Sequence
  Oligonucleotide primer for the detection of SNP TSC0041745
tggtagattggt

SEQ ID NO: 340911 - DNA, 12 bp, Artificial Sequence
  Oligonucleotide primer for the detection of SNP TSC0005891
ctatatctccca

SEQ ID NO: 340912 - DNA, 12 bp, Artificial Sequence
  Oligonucleotide primer for the detection of SNP TSC0005891
aataatttttta

SEQ ID NO: 340913 - DNA, 12 bp, Artificial Sequence
  Oligonucleotide primer for the detection of SNP TSC0005891
aacaatttttca

SEQ ID NO: 340914 - DNA, 12 bp, Artificial Sequence
  Oligonucleotide primer for the detection of SNP TSC0005891
tgtgttttttat

SEQ ID NO: 340915 - DNA, 12 bp, Artificial Sequence
  Oligonucleotide primer for the detection of SNP TSC0005891
tgtgttttttac

SEQ ID NO: 340916 - DNA, 12 bp, Artificial Sequence
  Oligonucleotide primer for the detection of SNP TSC0041746
ttttgaaagaat

SEQ ID NO: 340917 - DNA, 12 bp, Artificial Sequence
  Oligonucleotide primer for the detection of SNP TSC0041751
tacaacacaaaa

SEQ ID NO: 340918 - DNA, 12 bp, Artificial Sequence
  Oligonucleotide primer for the detection of SNP TSC0041751
atggaagttatg

SEQ ID NO: 340919 - DNA, 12 bp, Artificial Sequence
  Oligonucleotide primer for the detection of SNP TSC0007216
ttaaacccaaaa

SEQ ID NO: 340920 - DNA, 12 bp, Artificial Sequence
  Oligonucleotide primer for the detection of SNP TSC0007216
tgtaatttttac

SEQ ID NO: 340921 - DNA, 12 bp, Artificial Sequence
  Oligonucleotide primer for the detection of SNP TSC0007216
tttgaatttagg

SEQ ID NO: 340922 - DNA, 12 bp, Artificial Sequence
  Oligonucleotide primer for the detection of SNP TSC0007217
ttcaaactattc

SEQ ID NO: 340923 - DNA, 12 bp, Artificial Sequence
  Oligonucleotide primer for the detection of SNP TSC0007217
aggggaggttta

SEQ ID NO: 340924 - DNA, 12 bp, Artificial Sequence
  Oligonucleotide primer for the detection of SNP TSC0007217
tttagattgttt

SEQ ID NO: 340925 - DNA, 12 bp, Artificial Sequence
  Oligonucleotide primer for the detection of SNP TSC0041752
aaaaatttaaat

SEQ ID NO: 340926 - DNA, 12 bp, Artificial Sequence
  Oligonucleotide primer for the detection of SNP TSC0041752
tgaggtattgaa

SEQ ID NO: 340927 - DNA, 12 bp, Artificial Sequence
  Oligonucleotide primer for the detection of SNP TSC0041752
taaaacactaaa

SEQ ID NO: 340928 - DNA, 12 bp, Artificial Sequence
  Oligonucleotide primer for the detection of SNP TSC0041752
ggaaatttaggt

SEQ ID NO: 340929 - DNA, 12 bp, Artificial Sequence
  Oligonucleotide primer for the detection of SNP TSC0041753
gaaataaattgt

SEQ ID NO: 340930 - DNA, 12 bp, Artificial Sequence
  Oligonucleotide primer for the detection of SNP TSC0041753
taaaacaaatta

SEQ ID NO: 340931 - DNA, 12 bp, Artificial Sequence
  Oligonucleotide primer for the detection of SNP TSC0007491
tattcaataaat

SEQ ID NO: 340932 - DNA, 12 bp, Artificial Sequence
  Oligonucleotide primer for the detection of SNP TSC0007491
aatcataattcc

SEQ ID NO: 340933 - DNA, 12 bp, Artificial Sequence
  Oligonucleotide primer for the detection of SNP TSC0007491
tgtttaataagt

SEQ ID NO: 340934 - DNA, 12 bp, Artificial Sequence
  Oligonucleotide primer for the detection of SNP TSC0041756
atattactcaac

SEQ ID NO: 340935 - DNA, 12 bp, Artificial Sequence
  Oligonucleotide primer for the detection of SNP TSC0041756
gaatagttatta

SEQ ID NO: 340936 - DNA, 12 bp, Artificial Sequence
  Oligonucleotide primer for the detection of SNP TSC0041757
aactaataaact

SEQ ID NO: 340937 - DNA, 12 bp, Artificial Sequence
  Oligonucleotide primer for the detection of SNP TSC0041757
gggtattataaa

SEQ ID NO: 340938 - DNA, 12 bp, Artificial Sequence
  Oligonucleotide primer for the detection of SNP TSC0041757
ggttgataggtt

SEQ ID NO: 340939 - DNA, 12 bp, Artificial Sequence
  Oligonucleotide primer for the detection of SNP TSC0041758
ctctcttctaac

SEQ ID NO: 340940 - DNA, 12 bp, Artificial Sequence
  Oligonucleotide primer for the detection of SNP TSC0041758
ttgagaataaga

SEQ ID NO: 340941 - DNA, 12 bp, Artificial Sequence
  Oligonucleotide primer for the detection of SNP TSC0041759
ttattcataact

SEQ ID NO: 340942 - DNA, 12 bp, Artificial Sequence
  Oligonucleotide primer for the detection of SNP TSC0041759
tttgttatgagg

SEQ ID NO: 340943 - DNA, 12 bp, Artificial Sequence
  Oligonucleotide primer for the detection of SNP TSC0041759
tctaccataaaa

SEQ ID NO: 340944 - DNA, 12 bp, Artificial Sequence
  Oligonucleotide primer for the detection of SNP TSC0041759
ttatttatgatt

SEQ ID NO: 340945 - DNA, 12 bp, Artificial Sequence
  Oligonucleotide primer for the detection of SNP TSC0041760
tttccaaaacat

SEQ ID NO: 340946 - DNA, 12 bp, Artificial Sequence
  Oligonucleotide primer for the detection of SNP TSC0041760
tgttaaagggga

SEQ ID NO: 340947 - DNA, 12 bp, Artificial Sequence
  Oligonucleotide primer for the detection of SNP TSC0005895
acatctacttta

SEQ ID NO: 340948 - DNA, 12 bp, Artificial Sequence
  Oligonucleotide primer for the detection of SNP TSC0005895
ataattttatgt

SEQ ID NO: 340949 - DNA, 12 bp, Artificial Sequence
  Oligonucleotide primer for the detection of SNP TSC0005895
acaattttatat

SEQ ID NO: 340950 - DNA, 12 bp, Artificial Sequence
  Oligonucleotide primer for the detection of SNP TSC0005895
tatatttgtttt

SEQ ID NO: 340951 - DNA, 12 bp, Artificial Sequence
  Oligonucleotide primer for the detection of SNP TSC0006825
aaaagaggttaa

SEQ ID NO: 340952 - DNA, 12 bp, Artificial Sequence
  Oligonucleotide primer for the detection of SNP TSC0006826
tctatcctttcc

SEQ ID NO: 340953 - DNA, 12 bp, Artificial Sequence
  Oligonucleotide primer for the detection of SNP TSC0041764
gtattttgtaga

SEQ ID NO: 340954 - DNA, 12 bp, Artificial Sequence
  Oligonucleotide primer for the detection of SNP TSC0041764
taccttataaaa

SEQ ID NO: 340955 - DNA, 12 bp, Artificial Sequence
  Oligonucleotide primer for the detection of SNP TSC0041764
gggattgtaaat

SEQ ID NO: 340956 - DNA, 12 bp, Artificial Sequence
  Oligonucleotide primer for the detection of SNP TSC0041765
taattattatga

SEQ ID NO: 340957 - DNA, 12 bp, Artificial Sequence
  Oligonucleotide primer for the detection of SNP TSC0041765
caatcaccataa

SEQ ID NO: 340958 - DNA, 12 bp, Artificial Sequence
  Oligonucleotide primer for the detection of SNP TSC0041765
ataataaaatgt

SEQ ID NO: 340959 - DNA, 12 bp, Artificial Sequence
  Oligonucleotide primer for the detection of SNP TSC0041769
taacttatataa

SEQ ID NO: 340960 - DNA, 12 bp, Artificial Sequence
  Oligonucleotide primer for the detection of SNP TSC0041769
taatcattttaa

SEQ ID NO: 340961 - DNA, 12 bp, Artificial Sequence
  Oligonucleotide primer for the detection of SNP TSC0041769
tggtttatataa

SEQ ID NO: 340962 - DNA, 12 bp, Artificial Sequence
  Oligonucleotide primer for the detection of SNP TSC0041770
tatcaaaataac

SEQ ID NO: 340963 - DNA, 12 bp, Artificial Sequence
  Oligonucleotide primer for the detection of SNP TSC0041770
tttcccattata

SEQ ID NO: 340964 - DNA, 12 bp, Artificial Sequence
  Oligonucleotide primer for the detection of SNP TSC0041770
tattagagtaat

SEQ ID NO: 340965 - DNA, 12 bp, Artificial Sequence
  Oligonucleotide primer for the detection of SNP TSC0041771
tatcacatattt

SEQ ID NO: 340966 - DNA, 12 bp, Artificial Sequence
  Oligonucleotide primer for the detection of SNP TSC0041771
tagtataaaatg

SEQ ID NO: 340967 - DNA, 12 bp, Artificial Sequence
  Oligonucleotide primer for the detection of SNP TSC0041772
ctacattaacaa

SEQ ID NO: 340968 - DNA, 12 bp, Artificial Sequence
  Oligonucleotide primer for the detection of SNP TSC0041772
gttggttgggtt

SEQ ID NO: 340969 - DNA, 12 bp, Artificial Sequence
  Oligonucleotide primer for the detection of SNP TSC0041772
attaactaaact

SEQ ID NO: 340970 - DNA, 12 bp, Artificial Sequence
  Oligonucleotide primer for the detection of SNP TSC0041772
gttaactaaact

SEQ ID NO: 340971 - DNA, 12 bp, Artificial Sequence
  Oligonucleotide primer for the detection of SNP TSC0041772
ttatattagtag

SEQ ID NO: 340972 - DNA, 12 bp, Artificial Sequence
  Oligonucleotide primer for the detection of SNP TSC0006834
tttatattacta

SEQ ID NO: 340973 - DNA, 12 bp, Artificial Sequence
  Oligonucleotide primer for the detection of SNP TSC0006834
tatgataatagt

SEQ ID NO: 340974 - DNA, 12 bp, Artificial Sequence
  Oligonucleotide primer for the detection of SNP TSC0006834
ccataataataa

SEQ ID NO: 340975 - DNA, 12 bp, Artificial Sequence
  Oligonucleotide primer for the detection of SNP TSC0006835
acccccacaacc

SEQ ID NO: 340976 - DNA, 12 bp, Artificial Sequence
  Oligonucleotide primer for the detection of SNP TSC0006835
agagattgggaa

SEQ ID NO: 340977 - DNA, 12 bp, Artificial Sequence
  Oligonucleotide primer for the detection of SNP TSC0006835
atttttataatt

SEQ ID NO: 340978 - DNA, 12 bp, Artificial Sequence
  Oligonucleotide primer for the detection of SNP TSC0041773
tgaaaaatgtaa

SEQ ID NO: 340979 - DNA, 12 bp, Artificial Sequence
  Oligonucleotide primer for the detection of SNP TSC0041773
tgaaaaacgtaa

SEQ ID NO: 340980 - DNA, 12 bp, Artificial Sequence
  Oligonucleotide primer for the detection of SNP TSC0041775
aataatcaatca

SEQ ID NO: 340981 - DNA, 12 bp, Artificial Sequence
  Oligonucleotide primer for the detection of SNP TSC0041775
taaaaccatact

SEQ ID NO: 340982 - DNA, 12 bp, Artificial Sequence
  Oligonucleotide primer for the detection of SNP TSC0041775
aatagttaatta

SEQ ID NO: 340983 - DNA, 12 bp, Artificial Sequence
  Oligonucleotide primer for the detection of SNP TSC0041778
acacacttttat

SEQ ID NO: 340984 - DNA, 12 bp, Artificial Sequence
  Oligonucleotide primer for the detection of SNP TSC0041778
ttaatatattga

SEQ ID NO: 340985 - DNA, 12 bp, Artificial Sequence
  Oligonucleotide primer for the detection of SNP TSC0041779
aaccaaaataaa

SEQ ID NO: 340986 - DNA, 12 bp, Artificial Sequence
  Oligonucleotide primer for the detection of SNP TSC0041780
aaaaatctctct

SEQ ID NO: 340987 - DNA, 12 bp, Artificial Sequence
  Oligonucleotide primer for the detection of SNP TSC0041780
aaggattttttt

SEQ ID NO: 340988 - DNA, 12 bp, Artificial Sequence
  Oligonucleotide primer for the detection of SNP TSC0041784
ttaaatcaattc

SEQ ID NO: 340989 - DNA, 12 bp, Artificial Sequence
  Oligonucleotide primer for the detection of SNP TSC0041784
tgttgtaagttg

SEQ ID NO: 340990 - DNA, 12 bp, Artificial Sequence
  Oligonucleotide primer for the detection of SNP TSC0041785
attaattctttc

SEQ ID NO: 340991 - DNA, 12 bp, Artificial Sequence
  Oligonucleotide primer for the detection of SNP TSC0041785
gaaagataatga

SEQ ID NO: 340992 - DNA, 12 bp, Artificial Sequence
  Oligonucleotide primer for the detection of SNP TSC0041786
gagaaaaagtat

SEQ ID NO: 340993 - DNA, 12 bp, Artificial Sequence
  Oligonucleotide primer for the detection of SNP TSC0041788
agtgggaggata

SEQ ID NO: 340994 - DNA, 12 bp, Artificial Sequence
  Oligonucleotide primer for the detection of SNP TSC0041788
agcgggaggata

SEQ ID NO: 340995 - DNA, 12 bp, Artificial Sequence
  Oligonucleotide primer for the detection of SNP TSC0041790
atacaattctac

SEQ ID NO: 340996 - DNA, 12 bp, Artificial Sequence
  Oligonucleotide primer for the detection of SNP TSC0041791
aaccttaataaa

SEQ ID NO: 340997 - DNA, 12 bp, Artificial Sequence
  Oligonucleotide primer for the detection of SNP TSC0041791
gagttattgttg

SEQ ID NO: 340998 - DNA, 12 bp, Artificial Sequence
  Oligonucleotide primer for the detection of SNP TSC0041791
aaactattatta

SEQ ID NO: 340999 - DNA, 12 bp, Artificial Sequence
  Oligonucleotide primer for the detection of SNP TSC0041791
attttaatgagt

SEQ ID NO: 341000 - DNA, 12 bp, Artificial Sequence
  Oligonucleotide primer for the detection of SNP TSC0041792
actaaatttatc

SEQ ID NO: 341001 - DNA, 12 bp, Artificial Sequence
  Oligonucleotide primer for the detection of SNP TSC0041792
tggagttattaa

SEQ ID NO: 341002 - DNA, 12 bp, Artificial Sequence
  Oligonucleotide primer for the detection of SNP TSC0041793
tcataattttat

SEQ ID NO: 341003 - DNA, 12 bp, Artificial Sequence
  Oligonucleotide primer for the detection of SNP TSC0041793
gaaaaattttaa

SEQ ID NO: 341004 - DNA, 12 bp, Artificial Sequence
  Oligonucleotide primer for the detection of SNP TSC0041793
ttataattttat

SEQ ID NO: 341005 - DNA, 12 bp, Artificial Sequence
  Oligonucleotide primer for the detection of SNP TSC0041794
actttaactttc

SEQ ID NO: 341006 - DNA, 12 bp, Artificial Sequence
  Oligonucleotide primer for the detection of SNP TSC0041797
aaactttatttt

SEQ ID NO: 341007 - DNA, 12 bp, Artificial Sequence
  Oligonucleotide primer for the detection of SNP TSC0041798
ttgaaaaaaatt

SEQ ID NO: 341008 - DNA, 12 bp, Artificial Sequence
  Oligonucleotide primer for the detection of SNP TSC0041800
aatacattttcc

SEQ ID NO: 341009 - DNA, 12 bp, Artificial Sequence
  Oligonucleotide primer for the detection of SNP TSC0041800
aatacgttttcc

SEQ ID NO: 341010 - DNA, 12 bp, Artificial Sequence
  Oligonucleotide primer for the detection of SNP TSC0041800
tgagtttagtat

SEQ ID NO: 341011 - DNA, 12 bp, Artificial Sequence
  Oligonucleotide primer for the detection of SNP TSC0041800
taaactcaacat

SEQ ID NO: 341012 - DNA, 12 bp, Artificial Sequence
  Oligonucleotide primer for the detection of SNP TSC0041801
atacaactctaa

SEQ ID NO: 341013 - DNA, 12 bp, Artificial Sequence
  Oligonucleotide primer for the detection of SNP TSC0041801
aaatccctcata

SEQ ID NO: 341014 - DNA, 12 bp, Artificial Sequence
  Oligonucleotide primer for the detection of SNP TSC0041801
tggtatagtttt

SEQ ID NO: 341015 - DNA, 12 bp, Artificial Sequence
  Oligonucleotide primer for the detection of SNP TSC0041802
tatagaggaggt

SEQ ID NO: 341016 - DNA, 12 bp, Artificial Sequence
  Oligonucleotide primer for the detection of SNP TSC0041802
taatagatgatg

SEQ ID NO: 341017 - DNA, 12 bp, Artificial Sequence
  Oligonucleotide primer for the detection of SNP TSC0041803
acatcatctatt

SEQ ID NO: 341018 - DNA, 12 bp, Artificial Sequence
  Oligonucleotide primer for the detection of SNP TSC0041807
taatttcacttt

SEQ ID NO: 341019 - DNA, 12 bp, Artificial Sequence
  Oligonucleotide primer for the detection of SNP TSC0041807
agtaagatttag

SEQ ID NO: 341020 - DNA, 12 bp, Artificial Sequence
  Oligonucleotide primer for the detection of SNP TSC0041808
aacatcaatatt

SEQ ID NO: 341021 - DNA, 12 bp, Artificial Sequence
  Oligonucleotide primer for the detection of SNP TSC0041808
gacatcaatatt

SEQ ID NO: 341022 - DNA, 12 bp, Artificial Sequence
  Oligonucleotide primer for the detection of SNP TSC0041808
gatattatttag

SEQ ID NO: 341023 - DNA, 12 bp, Artificial Sequence
  Oligonucleotide primer for the detection of SNP TSC0041827
acaaaaaaatct

SEQ ID NO: 341024 - DNA, 12 bp, Artificial Sequence
  Oligonucleotide primer for the detection of SNP TSC0008523
ttttaggataaa

SEQ ID NO: 341025 - DNA, 12 bp, Artificial Sequence
  Oligonucleotide primer for the detection of SNP TSC0008523
ttccaaaacaaa

SEQ ID NO: 341026 - DNA, 12 bp, Artificial Sequence
  Oligonucleotide primer for the detection of SNP TSC0008523
tatgtatgtgat

SEQ ID NO: 341027 - DNA, 12 bp, Artificial Sequence
  Oligonucleotide primer for the detection of SNP TSC0041829
cattcaaactaa

SEQ ID NO: 341028 - DNA, 12 bp, Artificial Sequence
  Oligonucleotide primer for the detection of SNP TSC0041829
gtattattgtat

SEQ ID NO: 341029 - DNA, 12 bp, Artificial Sequence
  Oligonucleotide primer for the detection of SNP TSC0041829
acaccactacat

SEQ ID NO: 341030 - DNA, 12 bp, Artificial Sequence
  Oligonucleotide primer for the detection of SNP TSC0008414
tttaagggttaa

SEQ ID NO: 341031 - DNA, 12 bp, Artificial Sequence
  Oligonucleotide primer for the detection of SNP TSC0041834
ttttcctttcac

SEQ ID NO: 341032 - DNA, 12 bp, Artificial Sequence
  Oligonucleotide primer for the detection of SNP TSC0041834
agaaaaaaaaag

SEQ ID NO: 341033 - DNA, 12 bp, Artificial Sequence
  Oligonucleotide primer for the detection of SNP TSC0010735
atagtttttcgt

SEQ ID NO: 341034 - DNA, 12 bp, Artificial Sequence
  Oligonucleotide primer for the detection of SNP TSC0010735
acaactcttcac

SEQ ID NO: 341035 - DNA, 12 bp, Artificial Sequence
  Oligonucleotide primer for the detection of SNP TSC0010735
acaactcttcgc

SEQ ID NO: 341036 - DNA, 12 bp, Artificial Sequence
  Oligonucleotide primer for the detection of SNP TSC0010735
ataggataaatg

SEQ ID NO: 341037 - DNA, 12 bp, Artificial Sequence
  Oligonucleotide primer for the detection of SNP TSC0041836
ctactcataata

SEQ ID NO: 341038 - DNA, 12 bp, Artificial Sequence
  Oligonucleotide primer for the detection of SNP TSC0041836
ttatttttgttg

SEQ ID NO: 341039 - DNA, 12 bp, Artificial Sequence
  Oligonucleotide primer for the detection of SNP TSC0041836
ccacctctacta

SEQ ID NO: 341040 - DNA, 12 bp, Artificial Sequence
  Oligonucleotide primer for the detection of SNP TSC0041836
ttatttatggtg

SEQ ID NO: 341041 - DNA, 12 bp, Artificial Sequence
  Oligonucleotide primer for the detection of SNP TSC0005409
tttatatttctt

SEQ ID NO: 341042 - DNA, 12 bp, Artificial Sequence
  Oligonucleotide primer for the detection of SNP TSC0005410
aaatcaaaacct

SEQ ID NO: 341043 - DNA, 12 bp, Artificial Sequence
  Oligonucleotide primer for the detection of SNP TSC0005410
ttagtatttagg

SEQ ID NO: 341044 - DNA, 12 bp, Artificial Sequence
  Oligonucleotide primer for the detection of SNP TSC0008300
ttttcatcaatc

SEQ ID NO: 341045 - DNA, 12 bp, Artificial Sequence
  Oligonucleotide primer for the detection of SNP TSC0008301
aatcatcctcat

SEQ ID NO: 341046 - DNA, 12 bp, Artificial Sequence
  Oligonucleotide primer for the detection of SNP TSC0008301
ttaatataggta

SEQ ID NO: 341047 - DNA, 12 bp, Artificial Sequence
  Oligonucleotide primer for the detection of SNP TSC0009524
aaaccacttaac

SEQ ID NO: 341048 - DNA, 12 bp, Artificial Sequence
  Oligonucleotide primer for the detection of SNP TSC0009524
atgattattgtt

SEQ ID NO: 341049 - DNA, 12 bp, Artificial Sequence
  Oligonucleotide primer for the detection of SNP TSC0041838
aattattgtttt

SEQ ID NO: 341050 - DNA, 12 bp, Artificial Sequence
  Oligonucleotide primer for the detection of SNP TSC0041838
aaccactacttc

SEQ ID NO: 341051 - DNA, 12 bp, Artificial Sequence
  Oligonucleotide primer for the detection of SNP TSC0041838
atataagaatga

SEQ ID NO: 341052 - DNA, 12 bp, Artificial Sequence
  Oligonucleotide primer for the detection of SNP TSC0041838
atataagaacga

SEQ ID NO: 341053 - DNA, 12 bp, Artificial Sequence
  Oligonucleotide primer for the detection of SNP TSC0041839
actttaaaaata

SEQ ID NO: 341054 - DNA, 12 bp, Artificial Sequence
  Oligonucleotide primer for the detection of SNP TSC0041839
ggtgggattatt

SEQ ID NO: 341055 - DNA, 12 bp, Artificial Sequence
  Oligonucleotide primer for the detection of SNP TSC0041839
ggcgggattatt

SEQ ID NO: 341056 - DNA, 12 bp, Artificial Sequence
  Oligonucleotide primer for the detection of SNP TSC0041839
ggtgggattatc

SEQ ID NO: 341057 - DNA, 12 bp, Artificial Sequence
  Oligonucleotide primer for the detection of SNP TSC0041839
ggcgggattatc

SEQ ID NO: 341058 - DNA, 12 bp, Artificial Sequence
  Oligonucleotide primer for the detection of SNP TSC0041839
aacaaaatcacc

SEQ ID NO: 341059 - DNA, 12 bp, Artificial Sequence
  Oligonucleotide primer for the detection of SNP TSC0041839
aacgaaatcacc

SEQ ID NO: 341060 - DNA, 12 bp, Artificial Sequence
  Oligonucleotide primer for the detection of SNP TSC0041839
ttttgaaaatgt

SEQ ID NO: 341061 - DNA, 12 bp, Artificial Sequence
  Oligonucleotide primer for the detection of SNP TSC0010090
aggtagttttaa

SEQ ID NO: 341062 - DNA, 12 bp, Artificial Sequence
  Oligonucleotide primer for the detection of SNP TSC0010091
aatatatattca

SEQ ID NO: 341063 - DNA, 12 bp, Artificial Sequence
  Oligonucleotide primer for the detection of SNP TSC0010091
ccttatttaccc

SEQ ID NO: 341064 - DNA, 12 bp, Artificial Sequence
  Oligonucleotide primer for the detection of SNP TSC0010091
gatgtatgttta

SEQ ID NO: 341065 - DNA, 12 bp, Artificial Sequence
  Oligonucleotide primer for the detection of SNP TSC0010092
ccttcactaatc

SEQ ID NO: 341066 - DNA, 12 bp, Artificial Sequence
  Oligonucleotide primer for the detection of SNP TSC0010092
taataattaaga

SEQ ID NO: 341067 - DNA, 12 bp, Artificial Sequence
  Oligonucleotide primer for the detection of SNP TSC0041841
aataaattttcc

SEQ ID NO: 341068 - DNA, 12 bp, Artificial Sequence
  Oligonucleotide primer for the detection of SNP TSC0041841
tctcctaccctc

SEQ ID NO: 341069 - DNA, 12 bp, Artificial Sequence
  Oligonucleotide primer for the detection of SNP TSC0041841
aatgaatttttt

SEQ ID NO: 341070 - DNA, 12 bp, Artificial Sequence
  Oligonucleotide primer for the detection of SNP TSC0041841
aatgaatttttc

SEQ ID NO: 341071 - DNA, 12 bp, Artificial Sequence
  Oligonucleotide primer for the detection of SNP TSC0041842
aaacctacttaa

SEQ ID NO: 341072 - DNA, 12 bp, Artificial Sequence
  Oligonucleotide primer for the detection of SNP TSC0041842
gggaaaaaaatt

SEQ ID NO: 341073 - DNA, 12 bp, Artificial Sequence
  Oligonucleotide primer for the detection of SNP TSC0041842
gaatttatttaa

SEQ ID NO: 341074 - DNA, 12 bp, Artificial Sequence
  Oligonucleotide primer for the detection of SNP TSC0000089
atatccatcaac

SEQ ID NO: 341075 - DNA, 12 bp, Artificial Sequence
  Oligonucleotide primer for the detection of SNP TSC0000089
agtatttgttga

SEQ ID NO: 341076 - DNA, 12 bp, Artificial Sequence
  Oligonucleotide primer for the detection of SNP TSC0010008
acttacattaac

SEQ ID NO: 341077 - DNA, 12 bp, Artificial Sequence
  Oligonucleotide primer for the detection of SNP TSC0010008
ttttttgtgtgg

SEQ ID NO: 341078 - DNA, 12 bp, Artificial Sequence
  Oligonucleotide primer for the detection of SNP TSC0041843
ggggggtagttg

SEQ ID NO: 341079 - DNA, 12 bp, Artificial Sequence
  Oligonucleotide primer for the detection of SNP TSC0009486
atataccaacta

SEQ ID NO: 341080 - DNA, 12 bp, Artificial Sequence
  Oligonucleotide primer for the detection of SNP TSC0009486
gtattatgttgt

SEQ ID NO: 341081 - DNA, 12 bp, Artificial Sequence
  Oligonucleotide primer for the detection of SNP TSC0009486
acatcatactat

SEQ ID NO: 341082 - DNA, 12 bp, Artificial Sequence
  Oligonucleotide primer for the detection of SNP TSC0009486
gcatcatactat

SEQ ID NO: 341083 - DNA, 12 bp, Artificial Sequence
  Oligonucleotide primer for the detection of SNP TSC0009486
atgtgttagttg

SEQ ID NO: 341084 - DNA, 12 bp, Artificial Sequence
  Oligonucleotide primer for the detection of SNP TSC0041845
taaccttacctc

SEQ ID NO: 341085 - DNA, 12 bp, Artificial Sequence
  Oligonucleotide primer for the detection of SNP TSC0041845
ttgatagtatga

SEQ ID NO: 341086 - DNA, 12 bp, Artificial Sequence
  Oligonucleotide primer for the detection of SNP TSC0041845
tcgatagtatga

SEQ ID NO: 341087 - DNA, 12 bp, Artificial Sequence
  Oligonucleotide primer for the detection of SNP TSC0009483
aataattatagt

SEQ ID NO: 341088 - DNA, 12 bp, Artificial Sequence
  Oligonucleotide primer for the detection of SNP TSC0009483
aacaatcacaac

SEQ ID NO: 341089 - DNA, 12 bp, Artificial Sequence
  Oligonucleotide primer for the detection of SNP TSC0009483
ttggagagtaga

SEQ ID NO: 341090 - DNA, 12 bp, Artificial Sequence
  Oligonucleotide primer for the detection of SNP TSC0009484
aaaaaactaatc

SEQ ID NO: 341091 - DNA, 12 bp, Artificial Sequence
  Oligonucleotide primer for the detection of SNP TSC0009484
gttaaaagttaa

SEQ ID NO: 341092 - DNA, 12 bp, Artificial Sequence
  Oligonucleotide primer for the detection of SNP TSC0009484
gaagagttagtt

SEQ ID NO: 341093 - DNA, 12 bp, Artificial Sequence
  Oligonucleotide primer for the detection of SNP TSC0041846
tggaattgggat

SEQ ID NO: 341094 - DNA, 12 bp, Artificial Sequence
  Oligonucleotide primer for the detection of SNP TSC0041846
gagggtgaaaat

SEQ ID NO: 341095 - DNA, 12 bp, Artificial Sequence
  Oligonucleotide primer for the detection of SNP TSC0041846
gagggtgaaaac

SEQ ID NO: 341096 - DNA, 12 bp, Artificial Sequence
  Oligonucleotide primer for the detection of SNP TSC0041854
ctaatctaaaat

SEQ ID NO: 341097 - DNA, 12 bp, Artificial Sequence
  Oligonucleotide primer for the detection of SNP TSC0041854
tattagatattg

SEQ ID NO: 341098 - DNA, 12 bp, Artificial Sequence
  Oligonucleotide primer for the detection of SNP TSC0041855
caataaatttaa

SEQ ID NO: 341099 - DNA, 12 bp, Artificial Sequence
  Oligonucleotide primer for the detection of SNP TSC0041855
gtggtgtttatt

SEQ ID NO: 341100 - DNA, 12 bp, Artificial Sequence
  Oligonucleotide primer for the detection of SNP TSC0041855
ataatatctacc

SEQ ID NO: 341101 - DNA, 12 bp, Artificial Sequence
  Oligonucleotide primer for the detection of SNP TSC0041855
taataagtttga

SEQ ID NO: 341102 - DNA, 12 bp, Artificial Sequence
  Oligonucleotide primer for the detection of SNP TSC0041856
ctataaaaatat

SEQ ID NO: 341103 - DNA, 12 bp, Artificial Sequence
  Oligonucleotide primer for the detection of SNP TSC0041856
ttttaagattag

SEQ ID NO: 341104 - DNA, 12 bp, Artificial Sequence
  Oligonucleotide primer for the detection of SNP TSC0041856
cttcaaaaccaa

SEQ ID NO: 341105 - DNA, 12 bp, Artificial Sequence
  Oligonucleotide primer for the detection of SNP TSC0041856
ttatgaggatgt

SEQ ID NO: 341106 - DNA, 12 bp, Artificial Sequence
  Oligonucleotide primer for the detection of SNP TSC0041857
caattaataaaa

SEQ ID NO: 341107 - DNA, 12 bp, Artificial Sequence
  Oligonucleotide primer for the detection of SNP TSC0041857
gaattagtttat

SEQ ID NO: 341108 - DNA, 12 bp, Artificial Sequence
  Oligonucleotide primer for the detection of SNP TSC0041857
agttggtgggat

SEQ ID NO: 341109 - DNA, 12 bp, Artificial Sequence
  Oligonucleotide primer for the detection of SNP TSC0041857
agttggtgggac

SEQ ID NO: 341110 - DNA, 12 bp, Artificial Sequence
  Oligonucleotide primer for the detection of SNP TSC0041859
catctcatacat

SEQ ID NO: 341111 - DNA, 12 bp, Artificial Sequence
  Oligonucleotide primer for the detection of SNP TSC0041859
catctcatacgt

SEQ ID NO: 341112 - DNA, 12 bp, Artificial Sequence
  Oligonucleotide primer for the detection of SNP TSC0041859
attgtttaaaga

SEQ ID NO: 341113 - DNA, 12 bp, Artificial Sequence
  Oligonucleotide primer for the detection of SNP TSC0010084
acaatcataata

SEQ ID NO: 341114 - DNA, 12 bp, Artificial Sequence
  Oligonucleotide primer for the detection of SNP TSC0010084
ataattatggtg

SEQ ID NO: 341115 - DNA, 12 bp, Artificial Sequence
  Oligonucleotide primer for the detection of SNP TSC0010085
ataaatttctca

SEQ ID NO: 341116 - DNA, 12 bp, Artificial Sequence
  Oligonucleotide primer for the detection of SNP TSC0010085
gttttagatgga

SEQ ID NO: 341117 - DNA, 12 bp, Artificial Sequence
  Oligonucleotide primer for the detection of SNP TSC0009878
caataaaataca

SEQ ID NO: 341118 - DNA, 12 bp, Artificial Sequence
  Oligonucleotide primer for the detection of SNP TSC0009878
tagtggggtata

SEQ ID NO: 341119 - DNA, 12 bp, Artificial Sequence
  Oligonucleotide primer for the detection of SNP TSC0041869
cctaatttttaa

SEQ ID NO: 341120 - DNA, 12 bp, Artificial Sequence
  Oligonucleotide primer for the detection of SNP TSC0041869
tgattgaaagtt

SEQ ID NO: 341121 - DNA, 12 bp, Artificial Sequence
  Oligonucleotide primer for the detection of SNP TSC0041869
attaattaaaaa

SEQ ID NO: 341122 - DNA, 12 bp, Artificial Sequence
  Oligonucleotide primer for the detection of SNP TSC0041869
gttaattaaaaa

SEQ ID NO: 341123 - DNA, 12 bp, Artificial Sequence
  Oligonucleotide primer for the detection of SNP TSC0041869
tggtttttaatt

SEQ ID NO: 341124 - DNA, 12 bp, Artificial Sequence
  Oligonucleotide primer for the detection of SNP TSC0041870
ttttattatgtg

SEQ ID NO: 341125 - DNA, 12 bp, Artificial Sequence
  Oligonucleotide primer for the detection of SNP TSC0041871
ctccaatcaatt

SEQ ID NO: 341126 - DNA, 12 bp, Artificial Sequence
  Oligonucleotide primer for the detection of SNP TSC0041871
attgttaagtta

SEQ ID NO: 341127 - DNA, 12 bp, Artificial Sequence
  Oligonucleotide primer for the detection of SNP TSC0041872
aatttttaattc

SEQ ID NO: 341128 - DNA, 12 bp, Artificial Sequence
  Oligonucleotide primer for the detection of SNP TSC0041872
tgttgattgaaa

SEQ ID NO: 341129 - DNA, 12 bp, Artificial Sequence
  Oligonukleotid-Primer
cgttgattgaaa

SEQ ID NO: 341130 - DNA, 12 bp, Artificial Sequence
  Oligonucleotide primer for the detection of SNP TSC0041877
aaattggttatt

SEQ ID NO: 341131 - DNA, 12 bp, Artificial Sequence
  Oligonucleotide primer for the detection of SNP TSC0041877
aaattaattact

SEQ ID NO: 341132 - DNA, 12 bp, Artificial Sequence
  Oligonucleotide primer for the detection of SNP TSC0041879
cccccattctct

SEQ ID NO: 341133 - DNA, 12 bp, Artificial Sequence
  Oligonukleotid-Primer
ttttgtgttgaa

SEQ ID NO: 341134 - DNA, 12 bp, Artificial Sequence
  Oligonucleotide primer for the detection of SNP TSC0041880
taataaacaaac

SEQ ID NO: 341135 - DNA, 12 bp, Artificial Sequence
  Oligonucleotide primer for the detection of SNP TSC0041880
atttatttgtta

SEQ ID NO: 341136 - DNA, 12 bp, Artificial Sequence
  Oligonucleotide primer for the detection of SNP TSC0041881
ttggtatggatg

SEQ ID NO: 341137 - DNA, 12 bp, Artificial Sequence
  Oligonucleotide primer for the detection of SNP TSC0041883
taccatcattca

SEQ ID NO: 341138 - DNA, 12 bp, Artificial Sequence
  Oligonucleotide primer for the detection of SNP TSC0041883
gttataattgat

SEQ ID NO: 341139 - DNA, 12 bp, Artificial Sequence
  Oligonucleotide primer for the detection of SNP TSC0041883
aactataattaa

SEQ ID NO: 341140 - DNA, 12 bp, Artificial Sequence
  Oligonucleotide primer for the detection of SNP TSC0041884
gttgtaaatata

SEQ ID NO: 341141 - DNA, 12 bp, Artificial Sequence
  Oligonucleotide primer for the detection of SNP TSC0041885
taaaatttacct

SEQ ID NO: 341142 - DNA, 12 bp, Artificial Sequence
  Oligonucleotide primer for the detection of SNP TSC0041885
tattaaaggaag

SEQ ID NO: 341143 - DNA, 12 bp, Artificial Sequence
  Oligonucleotide primer for the detection of SNP TSC0041886
attctatactta

SEQ ID NO: 341144 - DNA, 12 bp, Artificial Sequence
  Oligonucleotide primer for the detection of SNP TSC0041886
ggtatatagttt

SEQ ID NO: 341145 - DNA, 12 bp, Artificial Sequence
  Oligonukleotid-Primer
acacacaattca

SEQ ID NO: 341146 - DNA, 12 bp, Artificial Sequence
  Oligonucleotide primer for the detection of SNP TSC0041887
aaatatactaac

SEQ ID NO: 341147 - DNA, 12 bp, Artificial Sequence
  Oligonucleotide primer for the detection of SNP TSC0041887
tattaaaagata

SEQ ID NO: 341148 - DNA, 12 bp, Artificial Sequence
  Oligonucleotide primer for the detection of SNP TSC0041889
agagaaatatgg

SEQ ID NO: 341149 - DNA, 12 bp, Artificial Sequence
  Oligonucleotide primer for the detection of SNP TSC0041890
gtatagttggtt

SEQ ID NO: 341150 - DNA, 12 bp, Artificial Sequence
  Oligonucleotide primer for the detection of SNP TSC0041890
acacaattaatt

SEQ ID NO: 341151 - DNA, 12 bp, Artificial Sequence
  Oligonucleotide primer for the detection of SNP TSC0041890
ataaaaaaattg

SEQ ID NO: 341152 - DNA, 12 bp, Artificial Sequence
  Oligonucleotide primer for the detection of SNP TSC0041891
attcatttttcc

SEQ ID NO: 341153 - DNA, 12 bp, Artificial Sequence
  Oligonukleotid-Primer
agaggaaagaga

SEQ ID NO: 341154 - DNA, 12 bp, Artificial Sequence
  Oligonucleotide primer for the detection of SNP TSC0041895
ttaatatcgagg

SEQ ID NO: 341155 - DNA, 12 bp, Artificial Sequence
  Oligonucleotide primer for the detection of SNP TSC0041896
acacacatacat

SEQ ID NO: 341156 - DNA, 12 bp, Artificial Sequence
  Oligonucleotide primer for the detection of SNP TSC0041896
gatttgggtgtg

SEQ ID NO: 341157 - DNA, 12 bp, Artificial Sequence
  Oligonukleotid-Primer
gatttgggtgcg

SEQ ID NO: 341158 - DNA, 12 bp, Artificial Sequence
  Oligonucleotide primer for the detection of SNP TSC0041897
aaggagaaggaa

SEQ ID NO: 341159 - DNA, 12 bp, Artificial Sequence
  Oligonucleotide primer for the detection of SNP TSC0041898
cctcaatctctt

SEQ ID NO: 341160 - DNA, 12 bp, Artificial Sequence
  Oligonucleotide primer for the detection of SNP TSC0041898
tgattaattttg

SEQ ID NO: 341161 - DNA, 12 bp, Artificial Sequence
  Oligonucleotide primer for the detection of SNP TSC0041899
aactaaaaactt

SEQ ID NO: 341162 - DNA, 12 bp, Artificial Sequence
  Oligonucleotide primer for the detection of SNP TSC0041899
ttgttatatagg

SEQ ID NO: 341163 - DNA, 12 bp, Artificial Sequence
  Oligonucleotide primer for the detection of SNP TSC0041902
aactattaacat

SEQ ID NO: 341164 - DNA, 12 bp, Artificial Sequence
  Oligonucleotide primer for the detection of SNP TSC0041902
aacctctaccca

SEQ ID NO: 341165 - DNA, 12 bp, Artificial Sequence
  Oligonukleotid-Primer
ttattggtattt

SEQ ID NO: 341166 - DNA, 12 bp, Artificial Sequence
  Oligonucleotide primer for the detection of SNP TSC0041905
aatagaaagata

SEQ ID NO: 341167 - DNA, 12 bp, Artificial Sequence
  Oligonucleotide primer for the detection of SNP TSC0041906
ttaataaatcac

SEQ ID NO: 341168 - DNA, 12 bp, Artificial Sequence
  Oligonucleotide primer for the detection of SNP TSC0041906
aaatggagtaaa

SEQ ID NO: 341169 - DNA, 12 bp, Artificial Sequence
  Oligonukleotid-Primer
aaacggagtaaa

SEQ ID NO: 341170 - DNA, 12 bp, Artificial Sequence
  Oligonucleotide primer for the detection of SNP TSC0041907
ctcttatttatc

SEQ ID NO: 341171 - DNA, 12 bp, Artificial Sequence
  Oligonucleotide primer for the detection of SNP TSC0006583
aatatattcaat

SEQ ID NO: 341172 - DNA, 12 bp, Artificial Sequence
  Oligonucleotide primer for the detection of SNP TSC0006583
tatttttagtta

SEQ ID NO: 341173 - DNA, 12 bp, Artificial Sequence
  Oligonucleotide primer for the detection of SNP TSC0041911
gtgtgttaataa

SEQ ID NO: 341174 - DNA, 12 bp, Artificial Sequence
  Oligonucleotide primer for the detection of SNP TSC0041911
tatactaacaaa

SEQ ID NO: 341175 - DNA, 12 bp, Artificial Sequence
  Oligonucleotide primer for the detection of SNP TSC0041911
taagtgaattag

SEQ ID NO: 341176 - DNA, 12 bp, Artificial Sequence
  Oligonucleotide primer for the detection of SNP TSC0041912
ttaataaataac

SEQ ID NO: 341177 - DNA, 12 bp, Artificial Sequence
  Oligonukleotid-Primer
ttgttatgaaag

SEQ ID NO: 341178 - DNA, 12 bp, Artificial Sequence
  Oligonucleotide primer for the detection of SNP TSC0041913
aaaccaacataa

SEQ ID NO: 341179 - DNA, 12 bp, Artificial Sequence
  Oligonucleotide primer for the detection of SNP TSC0041913
aaaccaacgtaa

SEQ ID NO: 341180 - DNA, 12 bp, Artificial Sequence
  Oligonucleotide primer for the detection of SNP TSC0041913
tcccctatccct

SEQ ID NO: 341181 - DNA, 12 bp, Artificial Sequence
  Oligonucleotide primer for the detection of SNP TSC0041913
gagttaatgtga

SEQ ID NO: 341182 - DNA, 12 bp, Artificial Sequence
  Oligonucleotide primer for the detection of SNP TSC0041913
gagttaacgtga

SEQ ID NO: 341183 - DNA, 12 bp, Artificial Sequence
  Oligonucleotide primer for the detection of SNP TSC0041918
ataaaatatttt

SEQ ID NO: 341184 - DNA, 12 bp, Artificial Sequence
  Oligonucleotide primer for the detection of SNP TSC0041918
tgtaatatggaa

SEQ ID NO: 341185 - DNA, 12 bp, Artificial Sequence
  Oligonucleotide primer for the detection of SNP TSC0006389
ttcctttctccc

SEQ ID NO: 341186 - DNA, 12 bp, Artificial Sequence
  Oligonucleotide primer for the detection of SNP TSC0006389
ttaagtaaattt

SEQ ID NO: 341187 - DNA, 12 bp, Artificial Sequence
  Oligonucleotide primer for the detection of SNP TSC0006389
aataaattcaaa

SEQ ID NO: 341188 - DNA, 12 bp, Artificial Sequence
  Oligonucleotide primer for the detection of SNP TSC0006390
taattaaaattc

SEQ ID NO: 341189 - DNA, 12 bp, Artificial Sequence
  Oligonucleotide primer for the detection of SNP TSC0041919
tatctaaatact

SEQ ID NO: 341190 - DNA, 12 bp, Artificial Sequence
  Oligonucleotide primer for the detection of SNP TSC0041919
tatttggatatt

SEQ ID NO: 341191 - DNA, 12 bp, Artificial Sequence
  Oligonucleotide primer for the detection of SNP TSC0041920
acaatataacat

SEQ ID NO: 341192 - DNA, 12 bp, Artificial Sequence
  Oligonucleotide primer for the detection of SNP TSC0041920
cacactcattta

SEQ ID NO: 341193 - DNA, 12 bp, Artificial Sequence
  Oligonucleotide primer for the detection of SNP TSC0041920
gtagtgtagtat

SEQ ID NO: 341194 - DNA, 12 bp, Artificial Sequence
  Oligonucleotide primer for the detection of SNP TSC0041921
actaataataac

SEQ ID NO: 341195 - DNA, 12 bp, Artificial Sequence
  Oligonucleotide primer for the detection of SNP TSC0041921
tctaaattctta

SEQ ID NO: 341196 - DNA, 12 bp, Artificial Sequence
  Oligonucleotide primer for the detection of SNP TSC0041921
ttagtgataatt

SEQ ID NO: 341197 - DNA, 12 bp, Artificial Sequence
  Oligonucleotide primer for the detection of SNP TSC0041922
ttttaaattaag

SEQ ID NO: 341198 - DNA, 12 bp, Artificial Sequence
  Oligonucleotide primer for the detection of SNP TSC0041923
ttgaggagaatt

SEQ ID NO: 341199 - DNA, 12 bp, Artificial Sequence
  Oligonucleotide primer for the detection of SNP TSC0041923
ttgttttagtta

SEQ ID NO: 341200 - DNA, 12 bp, Artificial Sequence
  Oligonucleotide primer for the detection of SNP TSC0041924
ttttttatacta

SEQ ID NO: 341201 - DNA, 12 bp, Artificial Sequence
  Oligonucleotide primer for the detection of SNP TSC0041924
gatattaaaagt

SEQ ID NO: 341202 - DNA, 12 bp, Artificial Sequence
  Oligonucleotide primer for the detection of SNP TSC0041925
taatatttaatc

SEQ ID NO: 341203 - DNA, 12 bp, Artificial Sequence
  Oligonucleotide primer for the detection of SNP TSC0041925
agttttataatg

SEQ ID NO: 341204 - DNA, 12 bp, Artificial Sequence
  Oligonucleotide primer for the detection of SNP TSC0041927
gaagttagatat

SEQ ID NO: 341205 - DNA, 12 bp, Artificial Sequence
  Oligonucleotide primer for the detection of SNP TSC0041927
aatcaaatataa

SEQ ID NO: 341206 - DNA, 12 bp, Artificial Sequence
  Oligonucleotide primer for the detection of SNP TSC0041927
aatggattaatt

SEQ ID NO: 341207 - DNA, 12 bp, Artificial Sequence
  Oligonucleotide primer for the detection of SNP TSC0007477
cccattctacaa

SEQ ID NO: 341208 - DNA, 12 bp, Artificial Sequence
  Oligonucleotide primer for the detection of SNP TSC0007477
acttcattttac

SEQ ID NO: 341209 - DNA, 12 bp, Artificial Sequence
  Oligonucleotide primer for the detection of SNP TSC0041929
catcaaaaacaa

SEQ ID NO: 341210 - DNA, 12 bp, Artificial Sequence
  Oligonucleotide primer for the detection of SNP TSC0041929
tggagattgttt

SEQ ID NO: 341211 - DNA, 12 bp, Artificial Sequence
  Oligonucleotide primer for the detection of SNP TSC0041929
tggagattgttc

SEQ ID NO: 341212 - DNA, 12 bp, Artificial Sequence
  Oligonucleotide primer for the detection of SNP TSC0041929
ggtattaaaaat

SEQ ID NO: 341213 - DNA, 12 bp, Artificial Sequence
  Oligonucleotide primer for the detection of SNP TSC0041930
acaatactcttc

SEQ ID NO: 341214 - DNA, 12 bp, Artificial Sequence
  Oligonucleotide primer for the detection of SNP TSC0041931
atatcacccaaa

SEQ ID NO: 341215 - DNA, 12 bp, Artificial Sequence
  Oligonucleotide primer for the detection of SNP TSC0041931
cactacactcca

SEQ ID NO: 341216 - DNA, 12 bp, Artificial Sequence
  Oligonucleotide primer for the detection of SNP TSC0041931
tatgttatttaa

SEQ ID NO: 341217 - DNA, 12 bp, Artificial Sequence
  Oligonucleotide primer for the detection of SNP TSC0041933
gtaatatagtgg

SEQ ID NO: 341218 - DNA, 12 bp, Artificial Sequence
  Oligonucleotide primer for the detection of SNP TSC0041934
ttagggtataaa

SEQ ID NO: 341219 - DNA, 12 bp, Artificial Sequence
  Oligonucleotide primer for the detection of SNP TSC0041937
cccacctactaa

SEQ ID NO: 341220 - DNA, 12 bp, Artificial Sequence
  Oligonucleotide primer for the detection of SNP TSC0041937
cccacctcaacc

SEQ ID NO: 341221 - DNA, 12 bp, Artificial Sequence
  Oligonukleotid-Primer
tactttataaat

SEQ ID NO: 341222 - DNA, 12 bp, Artificial Sequence
  Oligonucleotide primer for the detection of SNP TSC0041938
ttaagttaatag

SEQ ID NO: 341223 - DNA, 12 bp, Artificial Sequence
  Oligonucleotide primer for the detection of SNP TSC0041939
acttaaatcaaa

SEQ ID NO: 341224 - DNA, 12 bp, Artificial Sequence
  Oligonucleotide primer for the detection of SNP TSC0041939
aattggtgatat

SEQ ID NO: 341225 - DNA, 12 bp, Artificial Sequence
  Oligonucleotide primer for the detection of SNP TSC0041939
aactaataatac

SEQ ID NO: 341226 - DNA, 12 bp, Artificial Sequence
  Oligonucleotide primer for the detection of SNP TSC0041939
atttaggttaaa

SEQ ID NO: 341227 - DNA, 12 bp, Artificial Sequence
  Oligonucleotide primer for the detection of SNP TSC0041940
tcctaccaatac

SEQ ID NO: 341228 - DNA, 12 bp, Artificial Sequence
  Oligonucleotide primer for the detection of SNP TSC0041941
taaatcctaact

SEQ ID NO: 341229 - DNA, 12 bp, Artificial Sequence
  Oligonukleotid-Primer
acactcacacat

SEQ ID NO: 341230 - DNA, 12 bp, Artificial Sequence
  Oligonucleotide primer for the detection of SNP TSC0041943
acgctcacacat

SEQ ID NO: 341231 - DNA, 12 bp, Artificial Sequence
  Oligonucleotide primer for the detection of SNP TSC0041943
gaatttgaatat

SEQ ID NO: 341232 - DNA, 12 bp, Artificial Sequence
  Oligonucleotide primer for the detection of SNP TSC0041943
aaatttaaatac

SEQ ID NO: 341233 - DNA, 12 bp, Artificial Sequence
  Oligonucleotide primer for the detection of SNP TSC0041943
tgtttatatatt

SEQ ID NO: 341234 - DNA, 12 bp, Artificial Sequence
  Oligonucleotide primer for the detection of SNP TSC0041943
cgtttatatatt

SEQ ID NO: 341235 - DNA, 12 bp, Artificial Sequence
  Oligonucleotide primer for the detection of SNP TSC0041943
tgtttatatatc

SEQ ID NO: 341236 - DNA, 12 bp, Artificial Sequence
  Oligonucleotide primer for the detection of SNP TSC0041943
cgtttatatatc

SEQ ID NO: 341237 - DNA, 12 bp, Artificial Sequence
  Oligonucleotide primer for the detection of SNP TSC0041944
tacatatatata

SEQ ID NO: 341238 - DNA, 12 bp, Artificial Sequence
  Oligonucleotide primer for the detection of SNP TSC0041944
tttgtgtatgtt

SEQ ID NO: 341239 - DNA, 12 bp, Artificial Sequence
  Oligonucleotide primer for the detection of SNP TSC0041944
tctatatatatt

SEQ ID NO: 341240 - DNA, 12 bp, Artificial Sequence
  Oligonucleotide primer for the detection of SNP TSC0041945
tttacaaacatt

SEQ ID NO: 341241 - DNA, 12 bp, Artificial Sequence
  Oligonucleotide primer for the detection of SNP TSC0041945
gattattatata

SEQ ID NO: 341242 - DNA, 12 bp, Artificial Sequence
  Oligonucleotide primer for the detection of SNP TSC0041945
aatcaccatata

SEQ ID NO: 341243 - DNA, 12 bp, Artificial Sequence
  Oligonucleotide primer for the detection of SNP TSC0041945
tttgtaaatatt

SEQ ID NO: 341244 - DNA, 12 bp, Artificial Sequence
  Oligonucleotide primer for the detection of SNP TSC0041946
aatcaataaaac

SEQ ID NO: 341245 - DNA, 12 bp, Artificial Sequence
  Oligonucleotide primer for the detection of SNP TSC0041946
ataaagaaaaga

SEQ ID NO: 341246 - DNA, 12 bp, Artificial Sequence
  Oligonucleotide primer for the detection of SNP TSC0041948
taaacaataaat

SEQ ID NO: 341247 - DNA, 12 bp, Artificial Sequence
  Oligonucleotide primer for the detection of SNP TSC0041948
gtattgtttttt

SEQ ID NO: 341248 - DNA, 12 bp, Artificial Sequence
  Oligonucleotide primer for the detection of SNP TSC0041948
gtatcgtttttt

SEQ ID NO: 341249 - DNA, 12 bp, Artificial Sequence
  Oligonucleotide primer for the detection of SNP TSC0041948
catcacctctta

SEQ ID NO: 341250 - DNA, 12 bp, Artificial Sequence
  Oligonucleotide primer for the detection of SNP TSC0041948
catcgcctctta

SEQ ID NO: 341251 - DNA, 12 bp, Artificial Sequence
  Oligonucleotide primer for the detection of SNP TSC0041948
taaatagtaaat

SEQ ID NO: 341252 - DNA, 12 bp, Artificial Sequence
  Oligonucleotide primer for the detection of SNP TSC0041949
aactacctaaac

SEQ ID NO: 341253 - DNA, 12 bp, Artificial Sequence
  Oligonucleotide primer for the detection of SNP TSC0041949
aaaattaatgag

SEQ ID NO: 341254 - DNA, 12 bp, Artificial Sequence
  Oligonucleotide primer for the detection of SNP TSC0041949
agttgtttggat

SEQ ID NO: 341255 - DNA, 12 bp, Artificial Sequence
  Oligonucleotide primer for the detection of SNP TSC0041949
agttgtttggac

SEQ ID NO: 341256 - DNA, 12 bp, Artificial Sequence
  Oligonucleotide primer for the detection of SNP TSC0041950
tttacatacaaa

SEQ ID NO: 341257 - DNA, 12 bp, Artificial Sequence
  Oligonucleotide primer for the detection of SNP TSC0041950
ttattaatacta

SEQ ID NO: 341258 - DNA, 12 bp, Artificial Sequence
  Oligonucleotide primer for the detection of SNP TSC0041951
ctaaatttttcc

SEQ ID NO: 341259 - DNA, 12 bp, Artificial Sequence
  Oligonucleotide primer for the detection of SNP TSC0041951
atttaaggaaga

SEQ ID NO: 341260 - DNA, 12 bp, Artificial Sequence
  Oligonucleotide primer for the detection of SNP TSC0041952
ttatatctcttt

SEQ ID NO: 341261 - DNA, 12 bp, Artificial Sequence
  Oligonucleotide primer for the detection of SNP TSC0041953
attattatttca

SEQ ID NO: 341262 - DNA, 12 bp, Artificial Sequence
  Oligonucleotide primer for the detection of SNP TSC0041953
aaattggatttt

SEQ ID NO: 341263 - DNA, 12 bp, Artificial Sequence
  Oligonucleotide primer for the detection of SNP TSC0041953
ccaaattaaact

SEQ ID NO: 341264 - DNA, 12 bp, Artificial Sequence
  Oligonucleotide primer for the detection of SNP TSC0041953
attattgtttta

SEQ ID NO: 341265 - DNA, 12 bp, Artificial Sequence
  Oligonucleotide primer for the detection of SNP TSC0041954
taaaacacttta

SEQ ID NO: 341266 - DNA, 12 bp, Artificial Sequence
  Oligonucleotide primer for the detection of SNP TSC0041954
gagatgtttttt

SEQ ID NO: 341267 - DNA, 12 bp, Artificial Sequence
  Oligonucleotide primer for the detection of SNP TSC0041954
aaaatactcttt

SEQ ID NO: 341268 - DNA, 12 bp, Artificial Sequence
  Oligonucleotide primer for the detection of SNP TSC0041954
ggatattttatt

SEQ ID NO: 341269 - DNA, 12 bp, Artificial Sequence
  Oligonucleotide primer for the detection of SNP TSC0041955
ctaccaccaaaa

SEQ ID NO: 341270 - DNA, 12 bp, Artificial Sequence
  Oligonucleotide primer for the detection of SNP TSC0041955
tggttaaggaga

SEQ ID NO: 341271 - DNA, 12 bp, Artificial Sequence
  Oligonucleotide primer for the detection of SNP TSC0041955
cggttaaggaga

SEQ ID NO: 341272 - DNA, 12 bp, Artificial Sequence
  Oligonucleotide primer for the detection of SNP TSC0041955
caactaaaaaaa

SEQ ID NO: 341273 - DNA, 12 bp, Artificial Sequence
  Oligonucleotide primer for the detection of SNP TSC0041955
cgactaaaaaaa

SEQ ID NO: 341274 - DNA, 12 bp, Artificial Sequence
  Oligonucleotide primer for the detection of SNP TSC0041955
gttattaaaatt

SEQ ID NO: 341275 - DNA, 12 bp, Artificial Sequence
  Oligonucleotide primer for the detection of SNP TSC0041956
caatcaaaacac

SEQ ID NO: 341276 - DNA, 12 bp, Artificial Sequence
  Oligonucleotide primer for the detection of SNP TSC0041956
caatcgaaacac

SEQ ID NO: 341277 - DNA, 12 bp, Artificial Sequence
  Oligonucleotide primer for the detection of SNP TSC0041956
gatttttttggg

SEQ ID NO: 341278 - DNA, 12 bp, Artificial Sequence
  Oligonucleotide primer for the detection of SNP TSC0041956
gattttttcggg

SEQ ID NO: 341279 - DNA, 12 bp, Artificial Sequence
  Oligonucleotide primer for the detection of SNP TSC0041957
accatacatata

SEQ ID NO: 341280 - DNA, 12 bp, Artificial Sequence
  Oligonucleotide primer for the detection of SNP TSC0041957
ttgtttatggat

SEQ ID NO: 341281 - DNA, 12 bp, Artificial Sequence
  Oligonucleotide primer for the detection of SNP TSC0041959
cattttctaccc

SEQ ID NO: 341282 - DNA, 12 bp, Artificial Sequence
  Oligonucleotide primer for the detection of SNP TSC0041960
aatgaatagtat

SEQ ID NO: 341283 - DNA, 12 bp, Artificial Sequence
  Oligonucleotide primer for the detection of SNP TSC0041960
aaataaataaca

SEQ ID NO: 341284 - DNA, 12 bp, Artificial Sequence
  Oligonucleotide primer for the detection of SNP TSC0041960
gaggatggagtg

SEQ ID NO: 341285 - DNA, 12 bp, Artificial Sequence
  Oligonucleotide primer for the detection of SNP TSC0041961
cgaaaaataaat

SEQ ID NO: 341286 - DNA, 12 bp, Artificial Sequence
  Oligonucleotide primer for the detection of SNP TSC0041961
atattaattaaa

SEQ ID NO: 341287 - DNA, 12 bp, Artificial Sequence
  Oligonucleotide primer for the detection of SNP TSC0041961
ataccaactaaa

SEQ ID NO: 341288 - DNA, 12 bp, Artificial Sequence
  Oligonucleotide primer for the detection of SNP TSC0041961
tgagaagtggat

SEQ ID NO: 341289 - DNA, 12 bp, Artificial Sequence
  Oligonucleotide primer for the detection of SNP TSC0041961
cgagaagtggat

SEQ ID NO: 341290 - DNA, 12 bp, Artificial Sequence
  Oligonucleotide primer for the detection of SNP TSC0041962
actcccttataa

SEQ ID NO: 341291 - DNA, 12 bp, Artificial Sequence
  Oligonucleotide primer for the detection of SNP TSC0041962
ttggtaatttaa

SEQ ID NO: 341292 - DNA, 12 bp, Artificial Sequence
  Oligonucleotide primer for the detection of SNP TSC0041963
aatcctaacccc

SEQ ID NO: 341293 - DNA, 12 bp, Artificial Sequence
  Oligonucleotide primer for the detection of SNP TSC0041963
aaaatatggtaa

SEQ ID NO: 341294 - DNA, 12 bp, Artificial Sequence
  Oligonucleotide primer for the detection of SNP TSC0041967
ggttaggttggt

SEQ ID NO: 341295 - DNA, 12 bp, Artificial Sequence
  Oligonucleotide primer for the detection of SNP TSC0041967
ttaggagtttat

SEQ ID NO: 341296 - DNA, 12 bp, Artificial Sequence
  Oligonucleotide primer for the detection of SNP TSC0041967
ttaggagtttac

SEQ ID NO: 341297 - DNA, 12 bp, Artificial Sequence
  Oligonucleotide primer for the detection of SNP TSC0041968
cataaaaaaaaa

SEQ ID NO: 341298 - DNA, 12 bp, Artificial Sequence
  Oligonucleotide primer for the detection of SNP TSC0041968
ggtgtttttagt

SEQ ID NO: 341299 - DNA, 12 bp, Artificial Sequence
  Oligonucleotide primer for the detection of SNP TSC0041968
aatattcttaac

SEQ ID NO: 341300 - DNA, 12 bp, Artificial Sequence
  Oligonucleotide primer for the detection of SNP TSC0041968
tatgaaggaaag

SEQ ID NO: 341301 - DNA, 12 bp, Artificial Sequence
  Oligonucleotide primer for the detection of SNP TSC0041969
tactacatacac

SEQ ID NO: 341302 - DNA, 12 bp, Artificial Sequence
  Oligonucleotide primer for the detection of SNP TSC0041969
ttaattggtgga

SEQ ID NO: 341303 - DNA, 12 bp, Artificial Sequence
  Oligonucleotide primer for the detection of SNP TSC0041970
acatatataaaa

SEQ ID NO: 341304 - DNA, 12 bp, Artificial Sequence
  Oligonucleotide primer for the detection of SNP TSC0041970
tttagatggtat

SEQ ID NO: 341305 - DNA, 12 bp, Artificial Sequence
  Oligonucleotide primer for the detection of SNP TSC0041970
ctcaaataatac

SEQ ID NO: 341306 - DNA, 12 bp, Artificial Sequence
  Oligonucleotide primer for the detection of SNP TSC0041970
gtatgtataggg

SEQ ID NO: 341307 - DNA, 12 bp, Artificial Sequence
  Oligonucleotide primer for the detection of SNP TSC0041971
tgttattggttt

SEQ ID NO: 341308 - DNA, 12 bp, Artificial Sequence
  Oligonucleotide primer for the detection of SNP TSC0041971
cgttattggttt

SEQ ID NO: 341309 - DNA, 12 bp, Artificial Sequence
  Oligonucleotide primer for the detection of SNP TSC0041971
attattaatcta

SEQ ID NO: 341310 - DNA, 12 bp, Artificial Sequence
  Oligonukleotid-Primer
gttattaatcta

SEQ ID NO: 341311 - DNA, 12 bp, Artificial Sequence
  Oligonucleotide primer for the detection of SNP TSC0041971
atagatggggga

SEQ ID NO: 341312 - DNA, 12 bp, Artificial Sequence
  Oligonucleotide primer for the detection of SNP TSC0041975
ttaaaaaacctt

SEQ ID NO: 341313 - DNA, 12 bp, Artificial Sequence
  Oligonucleotide primer for the detection of SNP TSC0041975
ttataaattgta

SEQ ID NO: 341314 - DNA, 12 bp, Artificial Sequence
  Oligonukleotid-Primer
cccactactctc

SEQ ID NO: 341315 - DNA, 12 bp, Artificial Sequence
  Oligonucleotide primer for the detection of SNP TSC0041976
gtagaagagttg

SEQ ID NO: 341316 - DNA, 12 bp, Artificial Sequence
  Oligonucleotide primer for the detection of SNP TSC0006817
atacctattttt

SEQ ID NO: 341317 - DNA, 12 bp, Artificial Sequence
  Oligonucleotide primer for the detection of SNP TSC0006817
tgtttataaatg

SEQ ID NO: 341318 - DNA, 12 bp, Artificial Sequence
  Oligonukleotid-Primer
tctctaaatata

SEQ ID NO: 341319 - DNA, 12 bp, Artificial Sequence
  Oligonucleotide primer for the detection of SNP TSC0006818
attaagggaaag

SEQ ID NO: 341320 - DNA, 12 bp, Artificial Sequence
  Oligonucleotide primer for the detection of SNP TSC0006818
ttttttggatgt

SEQ ID NO: 341321 - DNA, 12 bp, Artificial Sequence
  Oligonucleotide primer for the detection of SNP TSC0006819
ttaatcaaatct

SEQ ID NO: 341322 - DNA, 12 bp, Artificial Sequence
  Oligonucleotide primer for the detection of SNP TSC0006819
aaatttgaggtg

SEQ ID NO: 341323 - DNA, 12 bp, Artificial Sequence
  Oligonucleotide primer for the detection of SNP TSC0006819
ttggttaagttt

SEQ ID NO: 341324 - DNA, 12 bp, Artificial Sequence
  Oligonucleotide primer for the detection of SNP TSC0041982
cctcctaaaacc

SEQ ID NO: 341325 - DNA, 12 bp, Artificial Sequence
  Oligonucleotide primer for the detection of SNP TSC0041982
ttgaaagtttaa

SEQ ID NO: 341326 - DNA, 12 bp, Artificial Sequence
  Oligonucleotide primer for the detection of SNP TSC0041982
tcgaaagtttaa

SEQ ID NO: 341327 - DNA, 12 bp, Artificial Sequence
  Oligonucleotide primer for the detection of SNP TSC0041987
ttgtttgaaaaa

SEQ ID NO: 341328 - DNA, 12 bp, Artificial Sequence
  Oligonucleotide primer for the detection of SNP TSC0041988
catatatatacc

SEQ ID NO: 341329 - DNA, 12 bp, Artificial Sequence
  Oligonucleotide primer for the detection of SNP TSC0041988
ttttatatggaa

SEQ ID NO: 341330 - DNA, 12 bp, Artificial Sequence
  Oligonucleotide primer for the detection of SNP TSC0007591
tatataaaaatt

SEQ ID NO: 341331 - DNA, 12 bp, Artificial Sequence
  Oligonucleotide primer for the detection of SNP TSC0007591
aagaaatgttat

SEQ ID NO: 341332 - DNA, 12 bp, Artificial Sequence
  Oligonucleotide primer for the detection of SNP TSC0007591
aagaaatgttac

SEQ ID NO: 341333 - DNA, 12 bp, Artificial Sequence
  Oligonucleotide primer for the detection of SNP TSC0041989
caccaaaaaaat

SEQ ID NO: 341334 - DNA, 12 bp, Artificial Sequence
  Oligonucleotide primer for the detection of SNP TSC0041989
tggatttgatta

SEQ ID NO: 341335 - DNA, 12 bp, Artificial Sequence
  Oligonucleotide primer for the detection of SNP TSC0041990
agtttgtgtaag

SEQ ID NO: 341336 - DNA, 12 bp, Artificial Sequence
  Oligonucleotide primer for the detection of SNP TSC0010654
agggttaggttg

SEQ ID NO: 341337 - DNA, 12 bp, Artificial Sequence
  Oligonucleotide primer for the detection of SNP TSC0010654
aatagtagagtt

SEQ ID NO: 341338 - DNA, 12 bp, Artificial Sequence
  Oligonukleotid-Primer
aattgaaggttt

SEQ ID NO: 341339 - DNA, 12 bp, Artificial Sequence
  Oligonucleotide primer for the detection of SNP TSC0010655
aactaaaaattt

SEQ ID NO: 341340 - DNA, 12 bp, Artificial Sequence
  Oligonucleotide primer for the detection of SNP TSC0010656
acaataacccat

SEQ ID NO: 341341 - DNA, 12 bp, Artificial Sequence
  Oligonucleotide primer for the detection of SNP TSC0010656
ataatgatttat

SEQ ID NO: 341342 - DNA, 12 bp, Artificial Sequence
  Oligonukleotid-Primer
tagtaatagtat

SEQ ID NO: 341343 - DNA, 12 bp, Artificial Sequence
  Oligonucleotide primer for the detection of SNP TSC0041991
tagtaatagtac

SEQ ID NO: 341344 - DNA, 12 bp, Artificial Sequence
  Oligonucleotide primer for the detection of SNP TSC0041991
caataacaatac

SEQ ID NO: 341345 - DNA, 12 bp, Artificial Sequence
  Oligonucleotide primer for the detection of SNP TSC0041991
tgaatgatatag

SEQ ID NO: 341346 - DNA, 12 bp, Artificial Sequence
  Oligonucleotide primer for the detection of SNP TSC0041992
aactataaaact

SEQ ID NO: 341347 - DNA, 12 bp, Artificial Sequence
  Oligonucleotide primer for the detection of SNP TSC0041992
agggaaaggata

SEQ ID NO: 341348 - DNA, 12 bp, Artificial Sequence
  Oligonucleotide primer for the detection of SNP TSC0041993
aataatttaatt

SEQ ID NO: 341349 - DNA, 12 bp, Artificial Sequence
  Oligonucleotide primer for the detection of SNP TSC0041993
tagtttaataag

SEQ ID NO: 341350 - DNA, 12 bp, Artificial Sequence
  Oligonucleotide primer for the detection of SNP TSC0041994
atatgatagtaa

SEQ ID NO: 341351 - DNA, 12 bp, Artificial Sequence
  Oligonucleotide primer for the detection of SNP TSC0041995
tccaccacaaac

SEQ ID NO: 341352 - DNA, 12 bp, Artificial Sequence
  Oligonucleotide primer for the detection of SNP TSC0041995
ttttgtaatgga

SEQ ID NO: 341353 - DNA, 12 bp, Artificial Sequence
  Oligonucleotide primer for the detection of SNP TSC0041999
ctttttctttat

SEQ ID NO: 341354 - DNA, 12 bp, Artificial Sequence
  Oligonucleotide primer for the detection of SNP TSC0041999
agagattgggta

SEQ ID NO: 341355 - DNA, 12 bp, Artificial Sequence
  Oligonucleotide primer for the detection of SNP TSC0042000
ctactaccatat

SEQ ID NO: 341356 - DNA, 12 bp, Artificial Sequence
  Oligonucleotide primer for the detection of SNP TSC0042000
ggagtaaaggta

SEQ ID NO: 341357 - DNA, 12 bp, Artificial Sequence
  Oligonucleotide primer for the detection of SNP TSC0042000
ttgttgttatgt

SEQ ID NO: 341358 - DNA, 12 bp, Artificial Sequence
  Oligonucleotide primer for the detection of SNP TSC0042001
tctccaaaaact

SEQ ID NO: 341359 - DNA, 12 bp, Artificial Sequence
  Oligonucleotide primer for the detection of SNP TSC0042001
tctccgaaaact

SEQ ID NO: 341360 - DNA, 12 bp, Artificial Sequence
  Oligonucleotide primer for the detection of SNP TSC0042001
tatgatagtgaa

SEQ ID NO: 341361 - DNA, 12 bp, Artificial Sequence
  Oligonucleotide primer for the detection of SNP TSC0042002
tcaatctctttt

SEQ ID NO: 341362 - DNA, 12 bp, Artificial Sequence
  Oligonucleotide primer for the detection of SNP TSC0042002
gatatttttata

SEQ ID NO: 341363 - DNA, 12 bp, Artificial Sequence
  Oligonucleotide primer for the detection of SNP TSC0009920
taaaacccaaac

SEQ ID NO: 341364 - DNA, 12 bp, Artificial Sequence
  Oligonucleotide primer for the detection of SNP TSC0009920
gtgttttgaata

SEQ ID NO: 341365 - DNA, 12 bp, Artificial Sequence
  Oligonucleotide primer for the detection of SNP TSC0042005
ttattttgggtt

SEQ ID NO: 341366 - DNA, 12 bp, Artificial Sequence
  Oligonucleotide primer for the detection of SNP TSC0042005
tcactttaaact

SEQ ID NO: 341367 - DNA, 12 bp, Artificial Sequence
  Oligonucleotide primer for the detection of SNP TSC0042006
ttttatttaaac

SEQ ID NO: 341368 - DNA, 12 bp, Artificial Sequence
  Oligonucleotide primer for the detection of SNP TSC0042006
taaaatttatta

SEQ ID NO: 341369 - DNA, 12 bp, Artificial Sequence
  Oligonucleotide primer for the detection of SNP TSC0042007
aatattaatcta

SEQ ID NO: 341370 - DNA, 12 bp, Artificial Sequence
  Oligonucleotide primer for the detection of SNP TSC0042007
tatttttaaaac

SEQ ID NO: 341371 - DNA, 12 bp, Artificial Sequence
  Oligonucleotide primer for the detection of SNP TSC0042007
ggtgttagtttg

SEQ ID NO: 341372 - DNA, 12 bp, Artificial Sequence
  Oligonucleotide primer for the detection of SNP TSC0006909
tcaaaaccaacc

SEQ ID NO: 341373 - DNA, 12 bp, Artificial Sequence
  Oligonucleotide primer for the detection of SNP TSC0006909
tcgaaaccaacc

SEQ ID NO: 341374 - DNA, 12 bp, Artificial Sequence
  Oligonucleotide primer for the detection of SNP TSC0006909
ttattatattgg

SEQ ID NO: 341375 - DNA, 12 bp, Artificial Sequence
  Oligonucleotide primer for the detection of SNP TSC0006909
tcaccacattaa

SEQ ID NO: 341376 - DNA, 12 bp, Artificial Sequence
  Oligonucleotide primer for the detection of SNP TSC0006909
ttgagattaatt

SEQ ID NO: 341377 - DNA, 12 bp, Artificial Sequence
  Oligonucleotide primer for the detection of SNP TSC0006909
tcgagattaatt

SEQ ID NO: 341378 - DNA, 12 bp, Artificial Sequence
  Oligonucleotide primer for the detection of SNP TSC0006910
ttaactaactaa

SEQ ID NO: 341379 - DNA, 12 bp, Artificial Sequence
  Oligonucleotide primer for the detection of SNP TSC0006910
cttatttattta

SEQ ID NO: 341380 - DNA, 12 bp, Artificial Sequence
  Oligonucleotide primer for the detection of SNP TSC0042016
ataaataattta

SEQ ID NO: 341381 - DNA, 12 bp, Artificial Sequence
  Oligonucleotide primer for the detection of SNP TSC0042016
agtgaggatgaa

SEQ ID NO: 341382 - DNA, 12 bp, Artificial Sequence
  Oligonucleotide primer for the detection of SNP TSC0042016
atgaatgatttg

SEQ ID NO: 341383 - DNA, 12 bp, Artificial Sequence
  Oligonucleotide primer for the detection of SNP TSC0042017
taaatagttggt

SEQ ID NO: 341384 - DNA, 12 bp, Artificial Sequence
  Oligonucleotide primer for the detection of SNP TSC0042017
taaatagttggc

SEQ ID NO: 341385 - DNA, 12 bp, Artificial Sequence
  Oligonucleotide primer for the detection of SNP TSC0042017
aacaactaacaa

SEQ ID NO: 341386 - DNA, 12 bp, Artificial Sequence
  Oligonucleotide primer for the detection of SNP TSC0042017
aacaactaacga

SEQ ID NO: 341387 - DNA, 12 bp, Artificial Sequence
  Oligonucleotide primer for the detection of SNP TSC0042017
tgaggatttgta

SEQ ID NO: 341388 - DNA, 12 bp, Artificial Sequence
  Oligonucleotide primer for the detection of SNP TSC0042018
ccataaacaaaa

SEQ ID NO: 341389 - DNA, 12 bp, Artificial Sequence
  Oligonucleotide primer for the detection of SNP TSC0042018
tttcttccattc

SEQ ID NO: 341390 - DNA, 12 bp, Artificial Sequence
  Oligonucleotide primer for the detection of SNP TSC0042018
tttcttccgttc

SEQ ID NO: 341391 - DNA, 12 bp, Artificial Sequence
  Oligonucleotide primer for the detection of SNP TSC0042018
ttataaataggg

SEQ ID NO: 341392 - DNA, 12 bp, Artificial Sequence
  Oligonucleotide primer for the detection of SNP TSC0042019
accccaataact

SEQ ID NO: 341393 - DNA, 12 bp, Artificial Sequence
  Oligonucleotide primer for the detection of SNP TSC0042019
ttagttaagtgg

SEQ ID NO: 341394 - DNA, 12 bp, Artificial Sequence
  Oligonucleotide primer for the detection of SNP TSC0042020
taataaataaca

SEQ ID NO: 341395 - DNA, 12 bp, Artificial Sequence
  Oligonucleotide primer for the detection of SNP TSC0042020
ttggagttgtat

SEQ ID NO: 341396 - DNA, 12 bp, Artificial Sequence
  Oligonucleotide primer for the detection of SNP TSC0042020
ttaaaattacac

SEQ ID NO: 341397 - DNA, 12 bp, Artificial Sequence
  Oligonucleotide primer for the detection of SNP TSC0042020
ataatgaatagt

SEQ ID NO: 341398 - DNA, 12 bp, Artificial Sequence
  Oligonucleotide primer for the detection of SNP TSC0042021
ctcccacctcta

SEQ ID NO: 341399 - DNA, 12 bp, Artificial Sequence
  Oligonucleotide primer for the detection of SNP TSC0042021
tgtgttatgtat

SEQ ID NO: 341400 - DNA, 12 bp, Artificial Sequence
  Oligonucleotide primer for the detection of SNP TSC0042023
atgtttgtatgg

SEQ ID NO: 341401 - DNA, 12 bp, Artificial Sequence
  Oligonucleotide primer for the detection of SNP TSC0042023
acgtttgtatgg

SEQ ID NO: 341402 - DNA, 12 bp, Artificial Sequence
  Oligonucleotide primer for the detection of SNP TSC0042024
acaattaatatt

SEQ ID NO: 341403 - DNA, 12 bp, Artificial Sequence
  Oligonucleotide primer for the detection of SNP TSC0042024
acgattaatatt

SEQ ID NO: 341404 - DNA, 12 bp, Artificial Sequence
  Oligonucleotide primer for the detection of SNP TSC0042024
gatgttttaaga

SEQ ID NO: 341405 - DNA, 12 bp, Artificial Sequence
  Oligonucleotide primer for the detection of SNP TSC0042026
aaattaactata

SEQ ID NO: 341406 - DNA, 12 bp, Artificial Sequence
  Oligonucleotide primer for the detection of SNP TSC0042026
acatataccacc

SEQ ID NO: 341407 - DNA, 12 bp, Artificial Sequence
  Oligonucleotide primer for the detection of SNP TSC0042026
agattagttgtg

SEQ ID NO: 341408 - DNA, 12 bp, Artificial Sequence
  Oligonucleotide primer for the detection of SNP TSC0042027
cctaaaaattaa

SEQ ID NO: 341409 - DNA, 12 bp, Artificial Sequence
  Oligonucleotide primer for the detection of SNP TSC0042027
tattttcatacc

SEQ ID NO: 341410 - DNA, 12 bp, Artificial Sequence
  Oligonucleotide primer for the detection of SNP TSC0042027
ttttggggattg

SEQ ID NO: 341411 - DNA, 12 bp, Artificial Sequence
  Oligonucleotide primer for the detection of SNP TSC0008560
tattttaacaac

SEQ ID NO: 341412 - DNA, 12 bp, Artificial Sequence
  Oligonucleotide primer for the detection of SNP TSC0008560
ggatagtattgg

SEQ ID NO: 341413 - DNA, 12 bp, Artificial Sequence
  Oligonucleotide primer for the detection of SNP TSC0008560
aaataacattaa

SEQ ID NO: 341414 - DNA, 12 bp, Artificial Sequence
  Oligonucleotide primer for the detection of SNP TSC0008560
tattttggtagt

SEQ ID NO: 341415 - DNA, 12 bp, Artificial Sequence
  Oligonucleotide primer for the detection of SNP TSC0008561
cctcacacataa

SEQ ID NO: 341416 - DNA, 12 bp, Artificial Sequence
  Oligonucleotide primer for the detection of SNP TSC0008561
gtagtattgtga

SEQ ID NO: 341417 - DNA, 12 bp, Artificial Sequence
  Oligonucleotide primer for the detection of SNP TSC0005717
aacattaatttc

SEQ ID NO: 341418 - DNA, 12 bp, Artificial Sequence
  Oligonucleotide primer for the detection of SNP TSC0005717
tatgattataaa

SEQ ID NO: 341419 - DNA, 12 bp, Artificial Sequence
  Oligonucleotide primer for the detection of SNP TSC0042029
aacttataatta

SEQ ID NO: 341420 - DNA, 12 bp, Artificial Sequence
  Oligonucleotide primer for the detection of SNP TSC0042029
ggttagatattt

SEQ ID NO: 341421 - DNA, 12 bp, Artificial Sequence
  Oligonucleotide primer for the detection of SNP TSC0042029
aactaaacattt

SEQ ID NO: 341422 - DNA, 12 bp, Artificial Sequence
  Oligonucleotide primer for the detection of SNP TSC0042029
agtttgtggttg

SEQ ID NO: 341423 - DNA, 12 bp, Artificial Sequence
  Oligonucleotide primer for the detection of SNP TSC0042030
ataaaaccatct

SEQ ID NO: 341424 - DNA, 12 bp, Artificial Sequence
  Oligonucleotide primer for the detection of SNP TSC0042030
ttatttttttgt

SEQ ID NO: 341425 - DNA, 12 bp, Artificial Sequence
  Oligonucleotide primer for the detection of SNP TSC0042030
ttatttttttac

SEQ ID NO: 341426 - DNA, 12 bp, Artificial Sequence
  Oligonucleotide primer for the detection of SNP TSC0042030
tgaagttatttt

SEQ ID NO: 341427 - DNA, 12 bp, Artificial Sequence
  Oligonucleotide primer for the detection of SNP TSC0042030
tgaagttatttc

SEQ ID NO: 341428 - DNA, 12 bp, Artificial Sequence
  Oligonucleotide primer for the detection of SNP TSC0042031
tactaaaccatt

SEQ ID NO: 341429 - DNA, 12 bp, Artificial Sequence
  Oligonucleotide primer for the detection of SNP TSC0042031
tattaatttata

SEQ ID NO: 341430 - DNA, 12 bp, Artificial Sequence
  Oligonucleotide primer for the detection of SNP TSC0042032
tttacttacctc

SEQ ID NO: 341431 - DNA, 12 bp, Artificial Sequence
  Oligonucleotide primer for the detection of SNP TSC0042032
aatgatgtaaag

SEQ ID NO: 341432 - DNA, 12 bp, Artificial Sequence
  Oligonucleotide primer for the detection of SNP TSC0042033
aaaactaaatta

SEQ ID NO: 341433 - DNA, 12 bp, Artificial Sequence
  Oligonucleotide primer for the detection of SNP TSC0042033
ttgttgatttaa

SEQ ID NO: 341434 - DNA, 12 bp, Artificial Sequence
  Oligonucleotide primer for the detection of SNP TSC0042033
tcgttgatttaa

SEQ ID NO: 341435 - DNA, 12 bp, Artificial Sequence
  Oligonucleotide primer for the detection of SNP TSC0042034
cattatctacca

SEQ ID NO: 341436 - DNA, 12 bp, Artificial Sequence
  Oligonucleotide primer for the detection of SNP TSC0042034
aactcacaatcc

SEQ ID NO: 341437 - DNA, 12 bp, Artificial Sequence
  Oligonucleotide primer for the detection of SNP TSC0042035
taatatcattta

SEQ ID NO: 341438 - DNA, 12 bp, Artificial Sequence
  Oligonucleotide primer for the detection of SNP TSC0042036
tactactatcca

SEQ ID NO: 341439 - DNA, 12 bp, Artificial Sequence
  Oligonucleotide primer for the detection of SNP TSC0042036
taattgtagttt

SEQ ID NO: 341440 - DNA, 12 bp, Artificial Sequence
  Oligonucleotide primer for the detection of SNP TSC0042036
caattacaatct

SEQ ID NO: 341441 - DNA, 12 bp, Artificial Sequence
  Oligonucleotide primer for the detection of SNP TSC0042036
tattgttattta

SEQ ID NO: 341442 - DNA, 12 bp, Artificial Sequence
  Oligonucleotide primer for the detection of SNP TSC0042037
ccatatctctcc

SEQ ID NO: 341443 - DNA, 12 bp, Artificial Sequence
  Oligonucleotide primer for the detection of SNP TSC0042037
taaatatatgtg

SEQ ID NO: 341444 - DNA, 12 bp, Artificial Sequence
  Oligonucleotide primer for the detection of SNP TSC0042040
ttctaaatttcc

SEQ ID NO: 341445 - DNA, 12 bp, Artificial Sequence
  Oligonucleotide primer for the detection of SNP TSC0042040
aagatatgttta

SEQ ID NO: 341446 - DNA, 12 bp, Artificial Sequence
  Oligonucleotide primer for the detection of SNP TSC0042040
ttttgagttttc

SEQ ID NO: 341447 - DNA, 12 bp, Artificial Sequence
  Oligonucleotide primer for the detection of SNP TSC0042041
acaattaaaact

SEQ ID NO: 341448 - DNA, 12 bp, Artificial Sequence
  Oligonucleotide primer for the detection of SNP TSC0042041
tggatttatata

SEQ ID NO: 341449 - DNA, 12 bp, Artificial Sequence
  Oligonucleotide primer for the detection of SNP TSC0042042
cactcacaaaat

SEQ ID NO: 341450 - DNA, 12 bp, Artificial Sequence
  Oligonucleotide primer for the detection of SNP TSC0042042
aaatctcttcta

SEQ ID NO: 341451 - DNA, 12 bp, Artificial Sequence
  Oligonucleotide primer for the detection of SNP TSC0042042
tatttataagat

SEQ ID NO: 341452 - DNA, 12 bp, Artificial Sequence
  Oligonucleotide primer for the detection of SNP TSC0042043
aaaaaatattaa

SEQ ID NO: 341453 - DNA, 12 bp, Artificial Sequence
  Oligonucleotide primer for the detection of SNP TSC0042043
aattttcttttt

SEQ ID NO: 341454 - DNA, 12 bp, Artificial Sequence
  Oligonucleotide primer for the detection of SNP TSC0042043
aaaagatgttaa

SEQ ID NO: 341455 - DNA, 12 bp, Artificial Sequence
  Oligonucleotide primer for the detection of SNP TSC0042044
gttttgattttt

SEQ ID NO: 341456 - DNA, 12 bp, Artificial Sequence
  Oligonucleotide primer for the detection of SNP TSC0042044
gttttgattttc

SEQ ID NO: 341457 - DNA, 12 bp, Artificial Sequence
  Oligonucleotide primer for the detection of SNP TSC0042044
aactctaactct

SEQ ID NO: 341458 - DNA, 12 bp, Artificial Sequence
  Oligonucleotide primer for the detection of SNP TSC0007750
aatcacctaaaa

SEQ ID NO: 341459 - DNA, 12 bp, Artificial Sequence
  Oligonucleotide primer for the detection of SNP TSC0007750
atcccaaaatcc

SEQ ID NO: 341460 - DNA, 12 bp, Artificial Sequence
  Oligonucleotide primer for the detection of SNP TSC0042045
caaacatacacc

SEQ ID NO: 341461 - DNA, 12 bp, Artificial Sequence
  Oligonucleotide primer for the detection of SNP TSC0042045
ttagttgggttg

SEQ ID NO: 341462 - DNA, 12 bp, Artificial Sequence
  Oligonucleotide primer for the detection of SNP TSC0042046
tgtattttttag

SEQ ID NO: 341463 - DNA, 12 bp, Artificial Sequence
  Oligonucleotide primer for the detection of SNP TSC0042047
tacctttctctt

SEQ ID NO: 341464 - DNA, 12 bp, Artificial Sequence
  Oligonucleotide primer for the detection of SNP TSC0042047
gtaattatagtg

SEQ ID NO: 341465 - DNA, 12 bp, Artificial Sequence
  Oligonucleotide primer for the detection of SNP TSC0042048
ccttaatttaac

SEQ ID NO: 341466 - DNA, 12 bp, Artificial Sequence
  Oligonucleotide primer for the detection of SNP TSC0042049
agtaaattttta

SEQ ID NO: 341467 - DNA, 12 bp, Artificial Sequence
  Oligonucleotide primer for the detection of SNP TSC0042049
aataaactccta

SEQ ID NO: 341468 - DNA, 12 bp, Artificial Sequence
  Oligonucleotide primer for the detection of SNP TSC0042049
atatataaaggt

SEQ ID NO: 341469 - DNA, 12 bp, Artificial Sequence
  Oligonucleotide primer for the detection of SNP TSC0042052
aacttataatca

SEQ ID NO: 341470 - DNA, 12 bp, Artificial Sequence
  Oligonucleotide primer for the detection of SNP TSC0042052
agttaatataat

SEQ ID NO: 341471 - DNA, 12 bp, Artificial Sequence
  Oligonucleotide primer for the detection of SNP TSC0042052
agttaatataac

SEQ ID NO: 341472 - DNA, 12 bp, Artificial Sequence
  Oligonucleotide primer for the detection of SNP TSC0042052
aaaccaatacaa

SEQ ID NO: 341473 - DNA, 12 bp, Artificial Sequence
  Oligonucleotide primer for the detection of SNP TSC0042053
taacttcaactt

SEQ ID NO: 341474 - DNA, 12 bp, Artificial Sequence
  Oligonucleotide primer for the detection of SNP TSC0042053
tataatgaatga

SEQ ID NO: 341475 - DNA, 12 bp, Artificial Sequence
  Oligonucleotide primer for the detection of SNP TSC0042053
tataacgaatga

SEQ ID NO: 341476 - DNA, 12 bp, Artificial Sequence
  Oligonucleotide primer for the detection of SNP TSC0042054
actatttaaccc

SEQ ID NO: 341477 - DNA, 12 bp, Artificial Sequence
  Oligonucleotide primer for the detection of SNP TSC0042054
agtatatgaata

SEQ ID NO: 341478 - DNA, 12 bp, Artificial Sequence
  Oligonucleotide primer for the detection of SNP TSC0042058
ctaaaaccacta

SEQ ID NO: 341479 - DNA, 12 bp, Artificial Sequence
  Oligonucleotide primer for the detection of SNP TSC0042058
ctaaaaccgcta

SEQ ID NO: 341480 - DNA, 12 bp, Artificial Sequence
  Oligonucleotide primer for the detection of SNP TSC0042058
aaaataaggtta

SEQ ID NO: 341481 - DNA, 12 bp, Artificial Sequence
  Oligonucleotide primer for the detection of SNP TSC0042058
ttggagttgtta

SEQ ID NO: 341482 - DNA, 12 bp, Artificial Sequence
  Oligonucleotide primer for the detection of SNP TSC0042058
ttggagtcgtta

SEQ ID NO: 341483 - DNA, 12 bp, Artificial Sequence
  Oligonucleotide primer for the detection of SNP TSC0042059
gttaaataatag

SEQ ID NO: 341484 - DNA, 12 bp, Artificial Sequence
  Oligonucleotide primer for the detection of SNP TSC0042060
cccctaaaaaac

SEQ ID NO: 341485 - DNA, 12 bp, Artificial Sequence
  Oligonucleotide primer for the detection of SNP TSC0042060
attttataagtg

SEQ ID NO: 341486 - DNA, 12 bp, Artificial Sequence
  Oligonucleotide primer for the detection of SNP TSC0042060
accttataaata

SEQ ID NO: 341487 - DNA, 12 bp, Artificial Sequence
  Oligonucleotide primer for the detection of SNP TSC0042061
aactacataaaa

SEQ ID NO: 341488 - DNA, 12 bp, Artificial Sequence
  Oligonucleotide primer for the detection of SNP TSC0042061
aattatatgaga

SEQ ID NO: 341489 - DNA, 12 bp, Artificial Sequence
  Oligonucleotide primer for the detection of SNP TSC0042062
caacacttaaaa

SEQ ID NO: 341490 - DNA, 12 bp, Artificial Sequence
  Oligonucleotide primer for the detection of SNP TSC0042062
caacgcttaaaa

SEQ ID NO: 341491 - DNA, 12 bp, Artificial Sequence
  Oligonukleotid-Primer
agatgtgggttt

SEQ ID NO: 341492 - DNA, 12 bp, Artificial Sequence
  Oligonucleotide primer for the detection of SNP TSC0042062
aatgtttggaat

SEQ ID NO: 341493 - DNA, 12 bp, Artificial Sequence
  Oligonucleotide primer for the detection of SNP TSC0042062
aacgtttggaat

SEQ ID NO: 341494 - DNA, 12 bp, Artificial Sequence
  Oligonucleotide primer for the detection of SNP TSC0042068
gaatatggaaaa

SEQ ID NO: 341495 - DNA, 12 bp, Artificial Sequence
  Oligonukleotid-Primer
cctataacactt

SEQ ID NO: 341496 - DNA, 12 bp, Artificial Sequence
  Oligonucleotide primer for the detection of SNP TSC0042071
attgaatagttg

SEQ ID NO: 341497 - DNA, 12 bp, Artificial Sequence
  Oligonucleotide primer for the detection of SNP TSC0042071
attgaatagtcg

SEQ ID NO: 341498 - DNA, 12 bp, Artificial Sequence
  Oligonucleotide primer for the detection of SNP TSC0042072
atagtgtatgta

SEQ ID NO: 341499 - DNA, 12 bp, Artificial Sequence
  Oligonucleotide primer for the detection of SNP TSC0042072
ttttgaaattat

SEQ ID NO: 341500 - DNA, 12 bp, Artificial Sequence
  Oligonucleotide primer for the detection of SNP TSC0042073
cttaaaatccaa

SEQ ID NO: 341501 - DNA, 12 bp, Artificial Sequence
  Oligonucleotide primer for the detection of SNP TSC0042073
acacattcttcc

SEQ ID NO: 341502 - DNA, 12 bp, Artificial Sequence
  Oligonucleotide primer for the detection of SNP TSC0042073
acacgttcttcc

SEQ ID NO: 341503 - DNA, 12 bp, Artificial Sequence
  Oligonucleotide primer for the detection of SNP TSC0042073
ggtttggggttt

SEQ ID NO: 341504 - DNA, 12 bp, Artificial Sequence
  Oligonucleotide primer for the detection of SNP TSC0042074
caaactaccccc

SEQ ID NO: 341505 - DNA, 12 bp, Artificial Sequence
  Oligonucleotide primer for the detection of SNP TSC0042074
gggtaggggatg

SEQ ID NO: 341506 - DNA, 12 bp, Artificial Sequence
  Oligonucleotide primer for the detection of SNP TSC0042074
taggttgttttc

SEQ ID NO: 341507 - DNA, 12 bp, Artificial Sequence
  Oligonucleotide primer for the detection of SNP TSC0042075
aaatccattatt

SEQ ID NO: 341508 - DNA, 12 bp, Artificial Sequence
  Oligonucleotide primer for the detection of SNP TSC0042075
agggtagttgta

SEQ ID NO: 341509 - DNA, 12 bp, Artificial Sequence
  Oligonucleotide primer for the detection of SNP TSC0042076
tttctctacctt

SEQ ID NO: 341510 - DNA, 12 bp, Artificial Sequence
  Oligonucleotide primer for the detection of SNP TSC0042076
gaaatgatggtg

SEQ ID NO: 341511 - DNA, 12 bp, Artificial Sequence
  Oligonucleotide primer for the detection of SNP TSC0042076
gaaacgatggtg

SEQ ID NO: 341512 - DNA, 12 bp, Artificial Sequence
  Oligonucleotide primer for the detection of SNP TSC0042076
gaaatgacggtg

SEQ ID NO: 341513 - DNA, 12 bp, Artificial Sequence
  Oligonucleotide primer for the detection of SNP TSC0042076
gaaacgacggtg

SEQ ID NO: 341514 - DNA, 12 bp, Artificial Sequence
  Oligonucleotide primer for the detection of SNP TSC0042081
agaagaggttgt

SEQ ID NO: 341515 - DNA, 12 bp, Artificial Sequence
  Oligonucleotide primer for the detection of SNP TSC0042081
tttaggaaatag

SEQ ID NO: 341516 - DNA, 12 bp, Artificial Sequence
  Oligonucleotide primer for the detection of SNP TSC0042082
atagggggaaaa

SEQ ID NO: 341517 - DNA, 12 bp, Artificial Sequence
  Oligonucleotide primer for the detection of SNP TSC0042083
accccctcaaaa

SEQ ID NO: 341518 - DNA, 12 bp, Artificial Sequence
  Oligonucleotide primer for the detection of SNP TSC0042083
attttgatattt

SEQ ID NO: 341519 - DNA, 12 bp, Artificial Sequence
  Oligonucleotide primer for the detection of SNP TSC0042083
aaaactttaaca

SEQ ID NO: 341520 - DNA, 12 bp, Artificial Sequence
  Oligonucleotide primer for the detection of SNP TSC0042084
cttcaaatcaaa

SEQ ID NO: 341521 - DNA, 12 bp, Artificial Sequence
  Oligonucleotide primer for the detection of SNP TSC0042084
caacattttaaa

SEQ ID NO: 341522 - DNA, 12 bp, Artificial Sequence
  Oligonucleotide primer for the detection of SNP TSC0042084
ttttaagttaaa

SEQ ID NO: 341523 - DNA, 12 bp, Artificial Sequence
  Oligonucleotide primer for the detection of SNP TSC0005463
tcatttataata

SEQ ID NO: 341524 - DNA, 12 bp, Artificial Sequence
  Oligonucleotide primer for the detection of SNP TSC0005463
gggtttttgatg

SEQ ID NO: 341525 - DNA, 12 bp, Artificial Sequence
  Oligonucleotide primer for the detection of SNP TSC0005463
aaatttttaata

SEQ ID NO: 341526 - DNA, 12 bp, Artificial Sequence
  Oligonucleotide primer for the detection of SNP TSC0005463
gttatttgtaat

SEQ ID NO: 341527 - DNA, 12 bp, Artificial Sequence
  Oligonucleotide primer for the detection of SNP TSC0005464
aaatattaatat

SEQ ID NO: 341528 - DNA, 12 bp, Artificial Sequence
  Oligonucleotide primer for the detection of SNP TSC0005464
gttgggagtata

SEQ ID NO: 341529 - DNA, 12 bp, Artificial Sequence
  Oligonucleotide primer for the detection of SNP TSC0042087
agggttgtagat

SEQ ID NO: 341530 - DNA, 12 bp, Artificial Sequence
  Oligonucleotide primer for the detection of SNP TSC0042087
aggaggaggtaa

SEQ ID NO: 341531 - DNA, 12 bp, Artificial Sequence
  Oligonucleotide primer for the detection of SNP TSC0042090
ttaaatacaaaa

SEQ ID NO: 341532 - DNA, 12 bp, Artificial Sequence
  Oligonucleotide primer for the detection of SNP TSC0042090
gtgtagttattt

SEQ ID NO: 341533 - DNA, 12 bp, Artificial Sequence
  Oligonucleotide primer for the detection of SNP TSC0042090
atacaatcaccc

SEQ ID NO: 341534 - DNA, 12 bp, Artificial Sequence
  Oligonucleotide primer for the detection of SNP TSC0042090
ttaagtgtaggg

SEQ ID NO: 341535 - DNA, 12 bp, Artificial Sequence
  Oligonucleotide primer for the detection of SNP TSC0042091
tatataacatat

SEQ ID NO: 341536 - DNA, 12 bp, Artificial Sequence
  Oligonucleotide primer for the detection of SNP TSC0042091
aaatgggaatag

SEQ ID NO: 341537 - DNA, 12 bp, Artificial Sequence
  Oligonucleotide primer for the detection of SNP TSC0042092
ataacaatttat

SEQ ID NO: 341538 - DNA, 12 bp, Artificial Sequence
  Oligonucleotide primer for the detection of SNP TSC0042092
ataacgatttat

SEQ ID NO: 341539 - DNA, 12 bp, Artificial Sequence
  Oligonucleotide primer for the detection of SNP TSC0042092
ggatgtattaaa

SEQ ID NO: 341540 - DNA, 12 bp, Artificial Sequence
  Oligonucleotide primer for the detection of SNP TSC0005205
ttattcctcccc

SEQ ID NO: 341541 - DNA, 12 bp, Artificial Sequence
  Oligonucleotide primer for the detection of SNP TSC0005205
atagaattatgg

SEQ ID NO: 341542 - DNA, 12 bp, Artificial Sequence
  Oligonucleotide primer for the detection of SNP TSC0042095
tcacttaaacac

SEQ ID NO: 341543 - DNA, 12 bp, Artificial Sequence
  Oligonucleotide primer for the detection of SNP TSC0042096
tctaatcccttc

SEQ ID NO: 341544 - DNA, 12 bp, Artificial Sequence
  Oligonucleotide primer for the detection of SNP TSC0005061
ttaaaatgttaa

SEQ ID NO: 341545 - DNA, 12 bp, Artificial Sequence
  Oligonucleotide primer for the detection of SNP TSC0005061
tcaaaatattaa

SEQ ID NO: 341546 - DNA, 12 bp, Artificial Sequence
  Oligonucleotide primer for the detection of SNP TSC0005061
tagatatttgat

SEQ ID NO: 341547 - DNA, 12 bp, Artificial Sequence
  Oligonucleotide primer for the detection of SNP TSC0042097
tatttatgaaaa

SEQ ID NO: 341548 - DNA, 12 bp, Artificial Sequence
  Oligonucleotide primer for the detection of SNP TSC0042098
ctatttaatttc

SEQ ID NO: 341549 - DNA, 12 bp, Artificial Sequence
  Oligonucleotide primer for the detection of SNP TSC0042098
ctaattaaccta

SEQ ID NO: 341550 - DNA, 12 bp, Artificial Sequence
  Oligonucleotide primer for the detection of SNP TSC0042100
gagtgatttata

SEQ ID NO: 341551 - DNA, 12 bp, Artificial Sequence
  Oligonucleotide primer for the detection of SNP TSC0042100
aataattcacaa

SEQ ID NO: 341552 - DNA, 12 bp, Artificial Sequence
  Oligonucleotide primer for the detection of SNP TSC0042100
atattgtaaaag

SEQ ID NO: 341553 - DNA, 12 bp, Artificial Sequence
  Oligonucleotide primer for the detection of SNP TSC0042101
tccaacttcctt

SEQ ID NO: 341554 - DNA, 12 bp, Artificial Sequence
  Oligonucleotide primer for the detection of SNP TSC0042101
gataaggatatg

SEQ ID NO: 341555 - DNA, 12 bp, Artificial Sequence
  Oligonucleotide primer for the detection of SNP TSC0042102
aacattcccctt

SEQ ID NO: 341556 - DNA, 12 bp, Artificial Sequence
  Oligonucleotide primer for the detection of SNP TSC0042102
gggaagtgtagt

SEQ ID NO: 341557 - DNA, 12 bp, Artificial Sequence
  Oligonucleotide primer for the detection of SNP TSC0042102
gggaagcgtagt

SEQ ID NO: 341558 - DNA, 12 bp, Artificial Sequence
  Oligonucleotide primer for the detection of SNP TSC0042102
aaaaaacacaat

SEQ ID NO: 341559 - DNA, 12 bp, Artificial Sequence
  Oligonucleotide primer for the detection of SNP TSC0042102
aaaaaacgcaat

SEQ ID NO: 341560 - DNA, 12 bp, Artificial Sequence
  Oligonucleotide primer for the detection of SNP TSC0042103
atttcaattctt

SEQ ID NO: 341561 - DNA, 12 bp, Artificial Sequence
  Oligonucleotide primer for the detection of SNP TSC0042103
ttgaaataataa

SEQ ID NO: 341562 - DNA, 12 bp, Artificial Sequence
  Oligonucleotide primer for the detection of SNP TSC0042104
tctaattaaaac

SEQ ID NO: 341563 - DNA, 12 bp, Artificial Sequence
  Oligonucleotide primer for the detection of SNP TSC0042105
actaaataatac

SEQ ID NO: 341564 - DNA, 12 bp, Artificial Sequence
  Oligonucleotide primer for the detection of SNP TSC0005059
catatataattt

SEQ ID NO: 341565 - DNA, 12 bp, Artificial Sequence
  Oligonucleotide primer for the detection of SNP TSC0005059
ttagaatagtgg

SEQ ID NO: 341566 - DNA, 12 bp, Artificial Sequence
  Oligonucleotide primer for the detection of SNP TSC0005060
ataagtgggagg

SEQ ID NO: 341567 - DNA, 12 bp, Artificial Sequence
  Oligonucleotide primer for the detection of SNP TSC0005060
tttggggagggt

SEQ ID NO: 341568 - DNA, 12 bp, Artificial Sequence
  Oligonucleotide primer for the detection of SNP TSC0042106
aattatgttggg

SEQ ID NO: 341569 - DNA, 12 bp, Artificial Sequence
  Oligonucleotide primer for the detection of SNP TSC0042107
ttatttcttacc

SEQ ID NO: 341570 - DNA, 12 bp, Artificial Sequence
  Oligonucleotide primer for the detection of SNP TSC0042107
attttatatata

SEQ ID NO: 341571 - DNA, 12 bp, Artificial Sequence
  Oligonucleotide primer for the detection of SNP TSC0042109
actcataaaccc

SEQ ID NO: 341572 - DNA, 12 bp, Artificial Sequence
  Oligonucleotide primer for the detection of SNP TSC0042109
aaaatgttaatt

SEQ ID NO: 341573 - DNA, 12 bp, Artificial Sequence
  Oligonucleotide primer for the detection of SNP TSC0042109
aaatactaatta

SEQ ID NO: 341574 - DNA, 12 bp, Artificial Sequence
  Oligonucleotide primer for the detection of SNP TSC0042109
atttatgaattt

SEQ ID NO: 341575 - DNA, 12 bp, Artificial Sequence
  Oligonucleotide primer for the detection of SNP TSC0042109
atttatgaattc

SEQ ID NO: 341576 - DNA, 12 bp, Artificial Sequence
  Oligonucleotide primer for the detection of SNP TSC0042110
accactactaac

SEQ ID NO: 341577 - DNA, 12 bp, Artificial Sequence
  Oligonucleotide primer for the detection of SNP TSC0042110
gtagttttttga

SEQ ID NO: 341578 - DNA, 12 bp, Artificial Sequence
  Oligonucleotide primer for the detection of SNP TSC0042111
ttaaaaattaat

SEQ ID NO: 341579 - DNA, 12 bp, Artificial Sequence
  Oligonucleotide primer for the detection of SNP TSC0042111
agtatgtagaaa

SEQ ID NO: 341580 - DNA, 12 bp, Artificial Sequence
  Oligonucleotide primer for the detection of SNP TSC0042112
catttctacata

SEQ ID NO: 341581 - DNA, 12 bp, Artificial Sequence
  Oligonucleotide primer for the detection of SNP TSC0042112
cgtttctacata

SEQ ID NO: 341582 - DNA, 12 bp, Artificial Sequence
  Oligonucleotide primer for the detection of SNP TSC0042112
ttgtttattgtt

SEQ ID NO: 341583 - DNA, 12 bp, Artificial Sequence
  Oligonucleotide primer for the detection of SNP TSC0042112
cattattcacta

SEQ ID NO: 341584 - DNA, 12 bp, Artificial Sequence
  Oligonucleotide primer for the detection of SNP TSC0042112
gtttttatatgt

SEQ ID NO: 341585 - DNA, 12 bp, Artificial Sequence
  Oligonucleotide primer for the detection of SNP TSC0042112
gtttttatatgc

SEQ ID NO: 341586 - DNA, 12 bp, Artificial Sequence
  Oligonucleotide primer for the detection of SNP TSC0042118
cacatctaatcc

SEQ ID NO: 341587 - DNA, 12 bp, Artificial Sequence
  Oligonucleotide primer for the detection of SNP TSC0042118
tttttgaaggag

SEQ ID NO: 341588 - DNA, 12 bp, Artificial Sequence
  Oligonucleotide primer for the detection of SNP TSC0042118
ttttcgaaggag

SEQ ID NO: 341589 - DNA, 12 bp, Artificial Sequence
  Oligonucleotide primer for the detection of SNP TSC0042118
tatatttaattc

SEQ ID NO: 341590 - DNA, 12 bp, Artificial Sequence
  Oligonucleotide primer for the detection of SNP TSC0042119
aactataccccc

SEQ ID NO: 341591 - DNA, 12 bp, Artificial Sequence
  Oligonucleotide primer for the detection of SNP TSC0042119
ttggtttaggag

SEQ ID NO: 341592 - DNA, 12 bp, Artificial Sequence
  Oligonucleotide primer for the detection of SNP TSC0042120
attaaaacccca

SEQ ID NO: 341593 - DNA, 12 bp, Artificial Sequence
  Oligonucleotide primer for the detection of SNP TSC0042125
tatttattttgg

SEQ ID NO: 341594 - DNA, 12 bp, Artificial Sequence
  Oligonucleotide primer for the detection of SNP TSC0042125
catccatcctaa

SEQ ID NO: 341595 - DNA, 12 bp, Artificial Sequence
  Oligonucleotide primer for the detection of SNP TSC0042130
ataacactatct

SEQ ID NO: 341596 - DNA, 12 bp, Artificial Sequence
  Oligonucleotide primer for the detection of SNP TSC0042130
attatttgtagg

SEQ ID NO: 341597 - DNA, 12 bp, Artificial Sequence
  Oligonucleotide primer for the detection of SNP TSC0042131
tactaaactctt

SEQ ID NO: 341598 - DNA, 12 bp, Artificial Sequence
  Oligonucleotide primer for the detection of SNP TSC0042131
gaggtttaattg

SEQ ID NO: 341599 - DNA, 12 bp, Artificial Sequence
  Oligonucleotide primer for the detection of SNP TSC0008742
tattttacctaa

SEQ ID NO: 341600 - DNA, 12 bp, Artificial Sequence
  Oligonucleotide primer for the detection of SNP TSC0008742
atcctttaaaca

SEQ ID NO: 341601 - DNA, 12 bp, Artificial Sequence
  Oligonucleotide primer for the detection of SNP TSC0008742
ttgttttgtttg

SEQ ID NO: 341602 - DNA, 12 bp, Artificial Sequence
  Oligonucleotide primer for the detection of SNP TSC0008743
ataactttttat

SEQ ID NO: 341603 - DNA, 12 bp, Artificial Sequence
  Oligonucleotide primer for the detection of SNP TSC0008743
ttgtttttcggg

SEQ ID NO: 341604 - DNA, 12 bp, Artificial Sequence
  Oligonucleotide primer for the detection of SNP TSC0008744
ctatttacaaaa

SEQ ID NO: 341605 - DNA, 12 bp, Artificial Sequence
  Oligonucleotide primer for the detection of SNP TSC0008744
tagttatttaat

SEQ ID NO: 341606 - DNA, 12 bp, Artificial Sequence
  Oligonucleotide primer for the detection of SNP TSC0008744
tagttatttaac

SEQ ID NO: 341607 - DNA, 12 bp, Artificial Sequence
  Oligonucleotide primer for the detection of SNP TSC0008744
acaattatttaa

SEQ ID NO: 341608 - DNA, 12 bp, Artificial Sequence
  Oligonucleotide primer for the detection of SNP TSC0042136
acataatacttc

SEQ ID NO: 341609 - DNA, 12 bp, Artificial Sequence
  Oligonucleotide primer for the detection of SNP TSC0042136
ttgaatttagtg

SEQ ID NO: 341610 - DNA, 12 bp, Artificial Sequence
  Oligonucleotide primer for the detection of SNP TSC0042136
ctaaatccaata

SEQ ID NO: 341611 - DNA, 12 bp, Artificial Sequence
  Oligonucleotide primer for the detection of SNP TSC0042136
atatggtgtttt

SEQ ID NO: 341612 - DNA, 12 bp, Artificial Sequence
  Oligonucleotide primer for the detection of SNP TSC0042137
cattccccttaa

SEQ ID NO: 341613 - DNA, 12 bp, Artificial Sequence
  Oligonucleotide primer for the detection of SNP TSC0042137
tgagggaagaga

SEQ ID NO: 341614 - DNA, 12 bp, Artificial Sequence
  Oligonucleotide primer for the detection of SNP TSC0042137
attttttttggt

SEQ ID NO: 341615 - DNA, 12 bp, Artificial Sequence
  Oligonucleotide primer for the detection of SNP TSC0042138
tattttttcctc

SEQ ID NO: 341616 - DNA, 12 bp, Artificial Sequence
  Oligonucleotide primer for the detection of SNP TSC0042138
ataggattttag

SEQ ID NO: 341617 - DNA, 12 bp, Artificial Sequence
  Oligonucleotide primer for the detection of SNP TSC0042140
caattaaatcat

SEQ ID NO: 341618 - DNA, 12 bp, Artificial Sequence
  Oligonucleotide primer for the detection of SNP TSC0042141
tactacatattc

SEQ ID NO: 341619 - DNA, 12 bp, Artificial Sequence
  Oligonucleotide primer for the detection of SNP TSC0042142
taaaactattta

SEQ ID NO: 341620 - DNA, 12 bp, Artificial Sequence
  Oligonucleotide primer for the detection of SNP TSC0042142
gagataattagt

SEQ ID NO: 341621 - DNA, 12 bp, Artificial Sequence
  Oligonucleotide primer for the detection of SNP TSC0042143
atatttattttt

SEQ ID NO: 341622 - DNA, 12 bp, Artificial Sequence
  Oligonucleotide primer for the detection of SNP TSC0042143
atattcactttc

SEQ ID NO: 341623 - DNA, 12 bp, Artificial Sequence
  Oligonucleotide primer for the detection of SNP TSC0042143
aatataataaga

SEQ ID NO: 341624 - DNA, 12 bp, Artificial Sequence
  Oligonucleotide primer for the detection of SNP TSC0006517
tccattttcata

SEQ ID NO: 341625 - DNA, 12 bp, Artificial Sequence
  Oligonucleotide primer for the detection of SNP TSC0006517
aaattttgtgat

SEQ ID NO: 341626 - DNA, 12 bp, Artificial Sequence
  Oligonucleotide primer for the detection of SNP TSC0006517
aaaatcttataa

SEQ ID NO: 341627 - DNA, 12 bp, Artificial Sequence
  Oligonucleotide primer for the detection of SNP TSC0042147
tttagtatttga

SEQ ID NO: 341628 - DNA, 12 bp, Artificial Sequence
  Oligonucleotide primer for the detection of SNP TSC0042147
tttagtattcga

SEQ ID NO: 341629 - DNA, 12 bp, Artificial Sequence
  Oligonucleotide primer for the detection of SNP TSC0042149
aaaatcaaccta

SEQ ID NO: 341630 - DNA, 12 bp, Artificial Sequence
  Oligonucleotide primer for the detection of SNP TSC0042150
tttatattatgg

SEQ ID NO: 341631 - DNA, 12 bp, Artificial Sequence
  Oligonucleotide primer for the detection of SNP TSC0042152
atattaacttta

SEQ ID NO: 341632 - DNA, 12 bp, Artificial Sequence
  Oligonucleotide primer for the detection of SNP TSC0042152
aaaagaggaatt

SEQ ID NO: 341633 - DNA, 12 bp, Artificial Sequence
  Oligonucleotide primer for the detection of SNP TSC0042153
caaatttcctac

SEQ ID NO: 341634 - DNA, 12 bp, Artificial Sequence
  Oligonucleotide primer for the detection of SNP TSC0042154
tatttatgatta

SEQ ID NO: 341635 - DNA, 12 bp, Artificial Sequence
  Oligonucleotide primer for the detection of SNP TSC0004554
ttccattaaatt

SEQ ID NO: 341636 - DNA, 12 bp, Artificial Sequence
  Oligonucleotide primer for the detection of SNP TSC0004554
tatttagggagt

SEQ ID NO: 341637 - DNA, 12 bp, Artificial Sequence
  Oligonucleotide primer for the detection of SNP TSC0042155
ctactacacttc

SEQ ID NO: 341638 - DNA, 12 bp, Artificial Sequence
  Oligonucleotide primer for the detection of SNP TSC0042155
aattgtttaaga

SEQ ID NO: 341639 - DNA, 12 bp, Artificial Sequence
  Oligonucleotide primer for the detection of SNP TSC0004862
ataatgagaaga

SEQ ID NO: 341640 - DNA, 12 bp, Artificial Sequence
  Oligonucleotide primer for the detection of SNP TSC0004862
ttgagaggagtg

SEQ ID NO: 341641 - DNA, 12 bp, Artificial Sequence
  Oligonucleotide primer for the detection of SNP TSC0004862
ttgagaggagcg

SEQ ID NO: 341642 - DNA, 12 bp, Artificial Sequence
  Oligonucleotide primer for the detection of SNP TSC0042159
aactccacactt

SEQ ID NO: 341643 - DNA, 12 bp, Artificial Sequence
  Oligonucleotide primer for the detection of SNP TSC0042159
gtgttatgatgg

SEQ ID NO: 341644 - DNA, 12 bp, Artificial Sequence
  Oligonucleotide primer for the detection of SNP TSC0042160
ttcttatcatcc

SEQ ID NO: 341645 - DNA, 12 bp, Artificial Sequence
  Oligonucleotide primer for the detection of SNP TSC0042160
tttatatttgga

SEQ ID NO: 341646 - DNA, 12 bp, Artificial Sequence
  Oligonucleotide primer for the detection of SNP TSC0042161
ttcacccttcta

SEQ ID NO: 341647 - DNA, 12 bp, Artificial Sequence
  Oligonucleotide primer for the detection of SNP TSC0042161
ttcgcccttcta

SEQ ID NO: 341648 - DNA, 12 bp, Artificial Sequence
  Oligonucleotide primer for the detection of SNP TSC0042161
aaacttataatc

SEQ ID NO: 341649 - DNA, 12 bp, Artificial Sequence
  Oligonucleotide primer for the detection of SNP TSC0042161
ttcgtttttttg

SEQ ID NO: 341650 - DNA, 12 bp, Artificial Sequence
  Oligonucleotide primer for the detection of SNP TSC0042163
ataattaaaaca

SEQ ID NO: 341651 - DNA, 12 bp, Artificial Sequence
  Oligonucleotide primer for the detection of SNP TSC0042163
ttattaaaacac

SEQ ID NO: 341652 - DNA, 12 bp, Artificial Sequence
  Oligonucleotide primer for the detection of SNP TSC0042163
tataattagagt

SEQ ID NO: 341653 - DNA, 12 bp, Artificial Sequence
  Oligonucleotide primer for the detection of SNP TSC0042164
ctaaaacaccat

SEQ ID NO: 341654 - DNA, 12 bp, Artificial Sequence
  Oligonucleotide primer for the detection of SNP TSC0042164
aattagatggtg

SEQ ID NO: 341655 - DNA, 12 bp, Artificial Sequence
  Oligonucleotide primer for the detection of SNP TSC0008285
caaatcattttt

SEQ ID NO: 341656 - DNA, 12 bp, Artificial Sequence
  Oligonucleotide primer for the detection of SNP TSC0008285
ttaatataaagt

SEQ ID NO: 341657 - DNA, 12 bp, Artificial Sequence
  Oligonucleotide primer for the detection of SNP TSC0008285
tttaatataaaa

SEQ ID NO: 341658 - DNA, 12 bp, Artificial Sequence
  Oligonucleotide primer for the detection of SNP TSC0042165
tcattacttttt

SEQ ID NO: 341659 - DNA, 12 bp, Artificial Sequence
  Oligonucleotide primer for the detection of SNP TSC0042167
cccttaaattat

SEQ ID NO: 341660 - DNA, 12 bp, Artificial Sequence
  Oligonucleotide primer for the detection of SNP TSC0042169
cctcctaacctc

SEQ ID NO: 341661 - DNA, 12 bp, Artificial Sequence
  Oligonucleotide primer for the detection of SNP TSC0042169
gtggtgggtgga

SEQ ID NO: 341662 - DNA, 12 bp, Artificial Sequence
  Oligonucleotide primer for the detection of SNP TSC0042169
gtggtgggcgga

SEQ ID NO: 341663 - DNA, 12 bp, Artificial Sequence
  Oligonucleotide primer for the detection of SNP TSC0042169
ataataaacaaa

SEQ ID NO: 341664 - DNA, 12 bp, Artificial Sequence
  Oligonucleotide primer for the detection of SNP TSC0042169
ataataaacgaa

SEQ ID NO: 341665 - DNA, 12 bp, Artificial Sequence
  Oligonucleotide primer for the detection of SNP TSC0042169
gtaataaacaaa

SEQ ID NO: 341666 - DNA, 12 bp, Artificial Sequence
  Oligonucleotide primer for the detection of SNP TSC0042169
gtaataaacgaa

SEQ ID NO: 341667 - DNA, 12 bp, Artificial Sequence
  Oligonucleotide primer for the detection of SNP TSC0042170
gaagttggtagg

SEQ ID NO: 341668 - DNA, 12 bp, Artificial Sequence
  Oligonucleotide primer for the detection of SNP TSC0042170
gaagtcggtagg

SEQ ID NO: 341669 - DNA, 12 bp, Artificial Sequence
  Oligonucleotide primer for the detection of SNP TSC0042170
aaaaccaataaa

SEQ ID NO: 341670 - DNA, 12 bp, Artificial Sequence
  Oligonucleotide primer for the detection of SNP TSC0042170
aaaaccgataaa

SEQ ID NO: 341671 - DNA, 12 bp, Artificial Sequence
  Oligonucleotide primer for the detection of SNP TSC0042170
tattgtaaattt

SEQ ID NO: 341672 - DNA, 12 bp, Artificial Sequence
  Oligonucleotide primer for the detection of SNP TSC0042176
aattaaaacaat

SEQ ID NO: 341673 - DNA, 12 bp, Artificial Sequence
  Oligonucleotide primer for the detection of SNP TSC0042176
tggattaaagag

SEQ ID NO: 341674 - DNA, 12 bp, Artificial Sequence
  Oligonucleotide primer for the detection of SNP TSC0042176
agttggagtaat

SEQ ID NO: 341675 - DNA, 12 bp, Artificial Sequence
  Oligonucleotide primer for the detection of SNP TSC0042177
caattcctctat

SEQ ID NO: 341676 - DNA, 12 bp, Artificial Sequence
  Oligonucleotide primer for the detection of SNP TSC0042177
atagaggaaaaa

SEQ ID NO: 341677 - DNA, 12 bp, Artificial Sequence
  Oligonucleotide primer for the detection of SNP TSC0042182
actcaaaaaaca

SEQ ID NO: 341678 - DNA, 12 bp, Artificial Sequence
  Oligonucleotide primer for the detection of SNP TSC0042182
aggaaaatgaag

SEQ ID NO: 341679 - DNA, 12 bp, Artificial Sequence
  Oligonucleotide primer for the detection of SNP TSC0042182
aggaaaacgaag

SEQ ID NO: 341680 - DNA, 12 bp, Artificial Sequence
  Oligonucleotide primer for the detection of SNP TSC0042182
agtttagaaaat

SEQ ID NO: 341681 - DNA, 12 bp, Artificial Sequence
  Oligonucleotide primer for the detection of SNP TSC0042183
cccccacctaca

SEQ ID NO: 341682 - DNA, 12 bp, Artificial Sequence
  Oligonucleotide primer for the detection of SNP TSC0042183
cccccgcctaca

SEQ ID NO: 341683 - DNA, 12 bp, Artificial Sequence
  Oligonucleotide primer for the detection of SNP TSC0042183
tgttggagttgt

SEQ ID NO: 341684 - DNA, 12 bp, Artificial Sequence
  Oligonucleotide primer for the detection of SNP TSC0042183
tactaaaactac

SEQ ID NO: 341685 - DNA, 12 bp, Artificial Sequence
  Oligonucleotide primer for the detection of SNP TSC0042183
tcgtttgtattt

SEQ ID NO: 341686 - DNA, 12 bp, Artificial Sequence
  Oligonucleotide primer for the detection of SNP TSC0042183
ttgtttgtattc

SEQ ID NO: 341687 - DNA, 12 bp, Artificial Sequence
  Oligonucleotide primer for the detection of SNP TSC0042183
tcgtttgtattc

SEQ ID NO: 341688 - DNA, 12 bp, Artificial Sequence
  Oligonukleotid-Primer
aatatataatat

SEQ ID NO: 341689 - DNA, 12 bp, Artificial Sequence
  Oligonucleotide primer for the detection of SNP TSC0007567
cctttaaaaaac

SEQ ID NO: 341690 - DNA, 12 bp, Artificial Sequence
  Oligonucleotide primer for the detection of SNP TSC0007567
ttatgtattaag

SEQ ID NO: 341691 - DNA, 12 bp, Artificial Sequence
  Oligonucleotide primer for the detection of SNP TSC0042184
tatttacactaa

SEQ ID NO: 341692 - DNA, 12 bp, Artificial Sequence
  Oligonukleotid-Primer
tttaaaagggat

SEQ ID NO: 341693 - DNA, 12 bp, Artificial Sequence
  Oligonucleotide primer for the detection of SNP TSC0042184
tgtttgtattgg

SEQ ID NO: 341694 - DNA, 12 bp, Artificial Sequence
  Oligonucleotide primer for the detection of SNP TSC0042185
caacctcaacct

SEQ ID NO: 341695 - DNA, 12 bp, Artificial Sequence
  Oligonucleotide primer for the detection of SNP TSC0042185
ttagttattcgg

SEQ ID NO: 341696 - DNA, 12 bp, Artificial Sequence
  Oligonukleotid-Primer
ggtaaggtaaag

SEQ ID NO: 341697 - DNA, 12 bp, Artificial Sequence
  Oligonucleotide primer for the detection of SNP TSC0042190
atattaaaacaa

SEQ ID NO: 341698 - DNA, 12 bp, Artificial Sequence
  Oligonucleotide primer for the detection of SNP TSC0042190
actctaacactc

SEQ ID NO: 341699 - DNA, 12 bp, Artificial Sequence
  Oligonucleotide primer for the detection of SNP TSC0042190
gtgttgggatag

SEQ ID NO: 341700 - DNA, 12 bp, Artificial Sequence
  Oligonukleotid-Primer
atcctccatcta

SEQ ID NO: 341701 - DNA, 12 bp, Artificial Sequence
  Oligonucleotide primer for the detection of SNP TSC0042193
atcctccgtcta

SEQ ID NO: 341702 - DNA, 12 bp, Artificial Sequence
  Oligonucleotide primer for the detection of SNP TSC0042193
gtgtgataaaga

SEQ ID NO: 341703 - DNA, 12 bp, Artificial Sequence
  Oligonucleotide primer for the detection of SNP TSC0042193
gtttttcgttta

SEQ ID NO: 341704 - DNA, 12 bp, Artificial Sequence
  Oligonucleotide primer for the detection of SNP TSC0042194
taaacttaattc

SEQ ID NO: 341705 - DNA, 12 bp, Artificial Sequence
  Oligonucleotide primer for the detection of SNP TSC0042194
atggggttgggg

SEQ ID NO: 341706 - DNA, 12 bp, Artificial Sequence
  Oligonucleotide primer for the detection of SNP TSC0042194
tagatttgattt

SEQ ID NO: 341707 - DNA, 12 bp, Artificial Sequence
  Oligonucleotide primer for the detection of SNP TSC0042194
tagatttgattc

SEQ ID NO: 341708 - DNA, 12 bp, Artificial Sequence
  Oligonucleotide primer for the detection of SNP TSC0042195
attataaaccaa

SEQ ID NO: 341709 - DNA, 12 bp, Artificial Sequence
  Oligonucleotide primer for the detection of SNP TSC0042195
gatagaggtttt

SEQ ID NO: 341710 - DNA, 12 bp, Artificial Sequence
  Oligonucleotide primer for the detection of SNP TSC0042195
gttataaattag

SEQ ID NO: 341711 - DNA, 12 bp, Artificial Sequence
  Oligonucleotide primer for the detection of SNP TSC0042196
aattattcttta

SEQ ID NO: 341712 - DNA, 12 bp, Artificial Sequence
  Oligonucleotide primer for the detection of SNP TSC0042196
tagaaaagtata

SEQ ID NO: 341713 - DNA, 12 bp, Artificial Sequence
  Oligonucleotide primer for the detection of SNP TSC0042197
caccaaaatctc

SEQ ID NO: 341714 - DNA, 12 bp, Artificial Sequence
  Oligonucleotide primer for the detection of SNP TSC0042197
tatttagtggtg

SEQ ID NO: 341715 - DNA, 12 bp, Artificial Sequence
  Oligonucleotide primer for the detection of SNP TSC0005148
tcaaaaattaac

SEQ ID NO: 341716 - DNA, 12 bp, Artificial Sequence
  Oligonucleotide primer for the detection of SNP TSC0005148
tcgaaaattaac

SEQ ID NO: 341717 - DNA, 12 bp, Artificial Sequence
  Oligonucleotide primer for the detection of SNP TSC0004797
aatcaaaaatta

SEQ ID NO: 341718 - DNA, 12 bp, Artificial Sequence
  Oligonucleotide primer for the detection of SNP TSC0004797
ggttattaattt

SEQ ID NO: 341719 - DNA, 12 bp, Artificial Sequence
  Oligonucleotide primer for the detection of SNP TSC0004797
aactaccaattt

SEQ ID NO: 341720 - DNA, 12 bp, Artificial Sequence
  Oligonucleotide primer for the detection of SNP TSC0004797
ggttagaaatta

SEQ ID NO: 341721 - DNA, 12 bp, Artificial Sequence
  Oligonucleotide primer for the detection of SNP TSC0042199
catttcaaaatc

SEQ ID NO: 341722 - DNA, 12 bp, Artificial Sequence
  Oligonucleotide primer for the detection of SNP TSC0042200
aatccttaaaac

SEQ ID NO: 341723 - DNA, 12 bp, Artificial Sequence
  Oligonucleotide primer for the detection of SNP TSC0042200
atgagagtggaa

SEQ ID NO: 341724 - DNA, 12 bp, Artificial Sequence
  Oligonucleotide primer for the detection of SNP TSC0042200
aatttttgaagt

SEQ ID NO: 341725 - DNA, 12 bp, Artificial Sequence
  Oligonucleotide primer for the detection of SNP TSC0042201
cactacaaaaca

SEQ ID NO: 341726 - DNA, 12 bp, Artificial Sequence
  Oligonucleotide primer for the detection of SNP TSC0042201
tgttttaggggt

SEQ ID NO: 341727 - DNA, 12 bp, Artificial Sequence
  Oligonucleotide primer for the detection of SNP TSC0042201
actccaaaaaca

SEQ ID NO: 341728 - DNA, 12 bp, Artificial Sequence
  Oligonucleotide primer for the detection of SNP TSC0042201
ttgtaaagtatt

SEQ ID NO: 341729 - DNA, 12 bp, Artificial Sequence
  Oligonucleotide primer for the detection of SNP TSC0042204
tttataaatttt

SEQ ID NO: 341730 - DNA, 12 bp, Artificial Sequence
  Oligonucleotide primer for the detection of SNP TSC0042204
taatgagattta

SEQ ID NO: 341731 - DNA, 12 bp, Artificial Sequence
  Oligonucleotide primer for the detection of SNP TSC0042205
acttatactcct

SEQ ID NO: 341732 - DNA, 12 bp, Artificial Sequence
  Oligonucleotide primer for the detection of SNP TSC0042205
aaaatggaagaa

SEQ ID NO: 341733 - DNA, 12 bp, Artificial Sequence
  Oligonucleotide primer for the detection of SNP TSC0042206
taatttatagag

SEQ ID NO: 341734 - DNA, 12 bp, Artificial Sequence
  Oligonucleotide primer for the detection of SNP TSC0042207
aaaaaatattac

SEQ ID NO: 341735 - DNA, 12 bp, Artificial Sequence
  Oligonucleotide primer for the detection of SNP TSC0042207
gaagagtgtaaa

SEQ ID NO: 341736 - DNA, 12 bp, Artificial Sequence
  Oligonucleotide primer for the detection of SNP TSC0042209
ttacaatattct

SEQ ID NO: 341737 - DNA, 12 bp, Artificial Sequence
  Oligonucleotide primer for the detection of SNP TSC0007369
aactacaaaact

SEQ ID NO: 341738 - DNA, 12 bp, Artificial Sequence
  Oligonucleotide primer for the detection of SNP TSC0007369
taggaataatta

SEQ ID NO: 341739 - DNA, 12 bp, Artificial Sequence
  Oligonucleotide primer for the detection of SNP TSC0007369
caaaaataatca

SEQ ID NO: 341740 - DNA, 12 bp, Artificial Sequence
  Oligonucleotide primer for the detection of SNP TSC0007369
gattataaagtt

SEQ ID NO: 341741 - DNA, 12 bp, Artificial Sequence
  Oligonucleotide primer for the detection of SNP TSC0042211
caataaatatta

SEQ ID NO: 341742 - DNA, 12 bp, Artificial Sequence
  Oligonucleotide primer for the detection of SNP TSC0042211
tacaaatatata

SEQ ID NO: 341743 - DNA, 12 bp, Artificial Sequence
  Oligonucleotide primer for the detection of SNP TSC0042211
taataaatattg

SEQ ID NO: 341744 - DNA, 12 bp, Artificial Sequence
  Oligonucleotide primer for the detection of SNP TSC0042212
aatataatctac

SEQ ID NO: 341745 - DNA, 12 bp, Artificial Sequence
  Oligonucleotide primer for the detection of SNP TSC0042212
tagtagatgtta

SEQ ID NO: 341746 - DNA, 12 bp, Artificial Sequence
  Oligonucleotide primer for the detection of SNP TSC0042217
caatctactttt

SEQ ID NO: 341747 - DNA, 12 bp, Artificial Sequence
  Oligonucleotide primer for the detection of SNP TSC0042217
gaaattaagaat

SEQ ID NO: 341748 - DNA, 12 bp, Artificial Sequence
  Oligonucleotide primer for the detection of SNP TSC0042218
attacatttatt

SEQ ID NO: 341749 - DNA, 12 bp, Artificial Sequence
  Oligonucleotide primer for the detection of SNP TSC0042218
attacgtttatt

SEQ ID NO: 341750 - DNA, 12 bp, Artificial Sequence
  Oligonucleotide primer for the detection of SNP TSC0042218
agaaataaagta

SEQ ID NO: 341751 - DNA, 12 bp, Artificial Sequence
  Oligonucleotide primer for the detection of SNP TSC0042218
attatgtttatt

SEQ ID NO: 341752 - DNA, 12 bp, Artificial Sequence
  Oligonucleotide primer for the detection of SNP TSC0042219
acataattacta

SEQ ID NO: 341753 - DNA, 12 bp, Artificial Sequence
  Oligonucleotide primer for the detection of SNP TSC0042219
agtgtttgatat

SEQ ID NO: 341754 - DNA, 12 bp, Artificial Sequence
  Oligonucleotide primer for the detection of SNP TSC0042219
aatatctaatat

SEQ ID NO: 341755 - DNA, 12 bp, Artificial Sequence
  Oligonucleotide primer for the detection of SNP TSC0042219
gtataattatta

SEQ ID NO: 341756 - DNA, 12 bp, Artificial Sequence
  Oligonucleotide primer for the detection of SNP TSC0042220
ttgaggaatata

SEQ ID NO: 341757 - DNA, 12 bp, Artificial Sequence
  Oligonucleotide primer for the detection of SNP TSC0042221
ttaaattaatct

SEQ ID NO: 341758 - DNA, 12 bp, Artificial Sequence
  Oligonucleotide primer for the detection of SNP TSC0042221
tttgtaggttga

SEQ ID NO: 341759 - DNA, 12 bp, Artificial Sequence
  Oligonucleotide primer for the detection of SNP TSC0042221
tttataaactaa

SEQ ID NO: 341760 - DNA, 12 bp, Artificial Sequence
  Oligonucleotide primer for the detection of SNP TSC0042221
ttgggttagttt

SEQ ID NO: 341761 - DNA, 12 bp, Artificial Sequence
  Oligonucleotide primer for the detection of SNP TSC0042222
taataccaaaac

SEQ ID NO: 341762 - DNA, 12 bp, Artificial Sequence
  Oligonucleotide primer for the detection of SNP TSC0042222
tgtagtttaggg

SEQ ID NO: 341763 - DNA, 12 bp, Artificial Sequence
  Oligonucleotide primer for the detection of SNP TSC0042222
cgtagtttaggg

SEQ ID NO: 341764 - DNA, 12 bp, Artificial Sequence
  Oligonucleotide primer for the detection of SNP TSC0042223
ataaactcacaa

SEQ ID NO: 341765 - DNA, 12 bp, Artificial Sequence
  Oligonucleotide primer for the detection of SNP TSC0042223
ctccccaaccat

SEQ ID NO: 341766 - DNA, 12 bp, Artificial Sequence
  Oligonucleotide primer for the detection of SNP TSC0042223
atggatttataa

SEQ ID NO: 341767 - DNA, 12 bp, Artificial Sequence
  Oligonucleotide primer for the detection of SNP TSC0005063
tactttatcaac

SEQ ID NO: 341768 - DNA, 12 bp, Artificial Sequence
  Oligonucleotide primer for the detection of SNP TSC0042224
tttagtatttaa

SEQ ID NO: 341769 - DNA, 12 bp, Artificial Sequence
  Oligonucleotide primer for the detection of SNP TSC0009209
cataattctatt

SEQ ID NO: 341770 - DNA, 12 bp, Artificial Sequence
  Oligonucleotide primer for the detection of SNP TSC0009209
cactatcacaca

SEQ ID NO: 341771 - DNA, 12 bp, Artificial Sequence
  Oligonucleotide primer for the detection of SNP TSC0009209
tataattttgtt

SEQ ID NO: 341772 - DNA, 12 bp, Artificial Sequence
  Oligonucleotide primer for the detection of SNP TSC0042225
ctcctactcaca

SEQ ID NO: 341773 - DNA, 12 bp, Artificial Sequence
  Oligonucleotide primer for the detection of SNP TSC0042225
tatttatttggt

SEQ ID NO: 341774 - DNA, 12 bp, Artificial Sequence
  Oligonucleotide primer for the detection of SNP TSC0042225
tatttatttggc

SEQ ID NO: 341775 - DNA, 12 bp, Artificial Sequence
  Oligonucleotide primer for the detection of SNP TSC0042225
tattcatttaac

SEQ ID NO: 341776 - DNA, 12 bp, Artificial Sequence
  Oligonucleotide primer for the detection of SNP TSC0042226
tctacaaaattt

SEQ ID NO: 341777 - DNA, 12 bp, Artificial Sequence
  Oligonucleotide primer for the detection of SNP TSC0008427
tagatttattta

SEQ ID NO: 341778 - DNA, 12 bp, Artificial Sequence
  Oligonucleotide primer for the detection of SNP TSC0008427
caaacttaccta

SEQ ID NO: 341779 - DNA, 12 bp, Artificial Sequence
  Oligonucleotide primer for the detection of SNP TSC0008427
aaattaagattt

SEQ ID NO: 341780 - DNA, 12 bp, Artificial Sequence
  Oligonucleotide primer for the detection of SNP TSC0008428
ttcaaaaaaccc

SEQ ID NO: 341781 - DNA, 12 bp, Artificial Sequence
  Oligonucleotide primer for the detection of SNP TSC0008428
ttcgaaaaaccc

SEQ ID NO: 341782 - DNA, 12 bp, Artificial Sequence
  Oligonucleotide primer for the detection of SNP TSC0008428
tttatacgtaag

SEQ ID NO: 341783 - DNA, 12 bp, Artificial Sequence
  Oligonucleotide primer for the detection of SNP TSC0042227
ctacatcattat

SEQ ID NO: 341784 - DNA, 12 bp, Artificial Sequence
  Oligonucleotide primer for the detection of SNP TSC0042227
ctacatcgttat

SEQ ID NO: 341785 - DNA, 12 bp, Artificial Sequence
  Oligonucleotide primer for the detection of SNP TSC0042227
agataatatata

SEQ ID NO: 341786 - DNA, 12 bp, Artificial Sequence
  Oligonucleotide primer for the detection of SNP TSC0042228
ttctcccacaaa

SEQ ID NO: 341787 - DNA, 12 bp, Artificial Sequence
  Oligonucleotide primer for the detection of SNP TSC0042228
aatctctctttc

SEQ ID NO: 341788 - DNA, 12 bp, Artificial Sequence
  Oligonucleotide primer for the detection of SNP TSC0042229
aaaattacatca

SEQ ID NO: 341789 - DNA, 12 bp, Artificial Sequence
  Oligonucleotide primer for the detection of SNP TSC0042229
attaattttggt

SEQ ID NO: 341790 - DNA, 12 bp, Artificial Sequence
  Oligonucleotide primer for the detection of SNP TSC0042229
atcaactttaac

SEQ ID NO: 341791 - DNA, 12 bp, Artificial Sequence
  Oligonucleotide primer for the detection of SNP TSC0042229
aagattgtatta

SEQ ID NO: 341792 - DNA, 12 bp, Artificial Sequence
  Oligonucleotide primer for the detection of SNP TSC0006496
ataaaattagaa

SEQ ID NO: 341793 - DNA, 12 bp, Artificial Sequence
  Oligonucleotide primer for the detection of SNP TSC0042231
taataaatattc

SEQ ID NO: 341794 - DNA, 12 bp, Artificial Sequence
  Oligonucleotide primer for the detection of SNP TSC0042231
atattttttgaa

SEQ ID NO: 341795 - DNA, 12 bp, Artificial Sequence
  Oligonucleotide primer for the detection of SNP TSC0042232
attcaataacca

SEQ ID NO: 341796 - DNA, 12 bp, Artificial Sequence
  Oligonucleotide primer for the detection of SNP TSC0042232
attcgataacca

SEQ ID NO: 341797 - DNA, 12 bp, Artificial Sequence
  Oligonucleotide primer for the detection of SNP TSC0042232
cttaacattcat

SEQ ID NO: 341798 - DNA, 12 bp, Artificial Sequence
  Oligonucleotide primer for the detection of SNP TSC0042232
atttgatggtta

SEQ ID NO: 341799 - DNA, 12 bp, Artificial Sequence
  Oligonucleotide primer for the detection of SNP TSC0042232
attcgatggtta

SEQ ID NO: 341800 - DNA, 12 bp, Artificial Sequence
  Oligonucleotide primer for the detection of SNP TSC0042233
tttgtttaataa

SEQ ID NO: 341801 - DNA, 12 bp, Artificial Sequence
  Oligonucleotide primer for the detection of SNP TSC0042233
cctactcaacaa

SEQ ID NO: 341802 - DNA, 12 bp, Artificial Sequence
  Oligonucleotide primer for the detection of SNP TSC0042233
gtaatgagatat

SEQ ID NO: 341803 - DNA, 12 bp, Artificial Sequence
  Oligonucleotide primer for the detection of SNP TSC0008334
gagtatagtata

SEQ ID NO: 341804 - DNA, 12 bp, Artificial Sequence
  Oligonucleotide primer for the detection of SNP TSC0010628
tcaattcccata

SEQ ID NO: 341805 - DNA, 12 bp, Artificial Sequence
  Oligonucleotide primer for the detection of SNP TSC0010628
tattaaatttga

SEQ ID NO: 341806 - DNA, 12 bp, Artificial Sequence
  Oligonucleotide primer for the detection of SNP TSC0006582
tcataaaaacaa

SEQ ID NO: 341807 - DNA, 12 bp, Artificial Sequence
  Oligonucleotide primer for the detection of SNP TSC0006582
tcaacctttaac

SEQ ID NO: 341808 - DNA, 12 bp, Artificial Sequence
  Oligonucleotide primer for the detection of SNP TSC0006582
tatagaagtagt

SEQ ID NO: 341809 - DNA, 12 bp, Artificial Sequence
  Oligonucleotide primer for the detection of SNP TSC0042236
ccctcccataat

SEQ ID NO: 341810 - DNA, 12 bp, Artificial Sequence
  Oligonucleotide primer for the detection of SNP TSC0042236
ccataatcccta

SEQ ID NO: 341811 - DNA, 12 bp, Artificial Sequence
  Oligonucleotide primer for the detection of SNP TSC0042237
ccatttcctaat

SEQ ID NO: 341812 - DNA, 12 bp, Artificial Sequence
  Oligonucleotide primer for the detection of SNP TSC0042238
ggtttttaatgg

SEQ ID NO: 341813 - DNA, 12 bp, Artificial Sequence
  Oligonucleotide primer for the detection of SNP TSC0042238
acctctaataaa

SEQ ID NO: 341814 - DNA, 12 bp, Artificial Sequence
  Oligonucleotide primer for the detection of SNP TSC0042238
taggaatgatat

SEQ ID NO: 341815 - DNA, 12 bp, Artificial Sequence
  Oligonucleotide primer for the detection of SNP TSC0042238
taggaatgatac

SEQ ID NO: 341816 - DNA, 12 bp, Artificial Sequence
  Oligonucleotide primer for the detection of SNP TSC0042239
ttagattgggta

SEQ ID NO: 341817 - DNA, 12 bp, Artificial Sequence
  Oligonucleotide primer for the detection of SNP TSC0042240
taaatccattaa

SEQ ID NO: 341818 - DNA, 12 bp, Artificial Sequence
  Oligonucleotide primer for the detection of SNP TSC0042240
aagaaaaagagg

SEQ ID NO: 341819 - DNA, 12 bp, Artificial Sequence
  Oligonucleotide primer for the detection of SNP TSC0042240
tgagtttattaa

SEQ ID NO: 341820 - DNA, 12 bp, Artificial Sequence
  Oligonucleotide primer for the detection of SNP TSC0042243
aaacaaactaat

SEQ ID NO: 341821 - DNA, 12 bp, Artificial Sequence
  Oligonucleotide primer for the detection of SNP TSC0042243
ttatgttaatta

SEQ ID NO: 341822 - DNA, 12 bp, Artificial Sequence
  Oligonucleotide primer for the detection of SNP TSC0042244
taatcataaaca

SEQ ID NO: 341823 - DNA, 12 bp, Artificial Sequence
  Oligonucleotide primer for the detection of SNP TSC0042244
cactcccttcct

SEQ ID NO: 341824 - DNA, 12 bp, Artificial Sequence
  Oligonucleotide primer for the detection of SNP TSC0042244
tagttataggta

SEQ ID NO: 341825 - DNA, 12 bp, Artificial Sequence
  Oligonucleotide primer for the detection of SNP TSC0042245
aattacatacat

SEQ ID NO: 341826 - DNA, 12 bp, Artificial Sequence
  Oligonucleotide primer for the detection of SNP TSC0042245
tatagtaaagaa

SEQ ID NO: 341827 - DNA, 12 bp, Artificial Sequence
  Oligonucleotide primer for the detection of SNP TSC0042247
cttcttttaaac

SEQ ID NO: 341828 - DNA, 12 bp, Artificial Sequence
  Oligonucleotide primer for the detection of SNP TSC0042247
aatagtttggag

SEQ ID NO: 341829 - DNA, 12 bp, Artificial Sequence
  Oligonucleotide primer for the detection of SNP TSC0009163
acaacttaaatt

SEQ ID NO: 341830 - DNA, 12 bp, Artificial Sequence
  Oligonucleotide primer for the detection of SNP TSC0009164
cccaacaccatc

SEQ ID NO: 341831 - DNA, 12 bp, Artificial Sequence
  Oligonucleotide primer for the detection of SNP TSC0042250
ctaatctcaaaa

SEQ ID NO: 341832 - DNA, 12 bp, Artificial Sequence
  Oligonucleotide primer for the detection of SNP TSC0042250
aaaataaagttt

SEQ ID NO: 341833 - DNA, 12 bp, Artificial Sequence
  Oligonucleotide primer for the detection of SNP TSC0042250
aaaacaaaaccc

SEQ ID NO: 341834 - DNA, 12 bp, Artificial Sequence
  Oligonucleotide primer for the detection of SNP TSC0042251
atattttatttt

SEQ ID NO: 341835 - DNA, 12 bp, Artificial Sequence
  Oligonucleotide primer for the detection of SNP TSC0042251
ttttaagtataa

SEQ ID NO: 341836 - DNA, 12 bp, Artificial Sequence
  Oligonucleotide primer for the detection of SNP TSC0042251
ccttaaatataa

SEQ ID NO: 341837 - DNA, 12 bp, Artificial Sequence
  Oligonucleotide primer for the detection of SNP TSC0005942
ttccccaacaac

SEQ ID NO: 341838 - DNA, 12 bp, Artificial Sequence
  Oligonucleotide primer for the detection of SNP TSC0005942
gggaattgggta

SEQ ID NO: 341839 - DNA, 12 bp, Artificial Sequence
  Oligonucleotide primer for the detection of SNP TSC0042252
actacctaattt

SEQ ID NO: 341840 - DNA, 12 bp, Artificial Sequence
  Oligonucleotide primer for the detection of SNP TSC0042253
taaaatagtatg

SEQ ID NO: 341841 - DNA, 12 bp, Artificial Sequence
  Oligonucleotide primer for the detection of SNP TSC0010498
acaaaccaattt

SEQ ID NO: 341842 - DNA, 12 bp, Artificial Sequence
  Oligonucleotide primer for the detection of SNP TSC0010498
tttatatggtga

SEQ ID NO: 341843 - DNA, 12 bp, Artificial Sequence
  Oligonucleotide primer for the detection of SNP TSC0010499
acatatttaaaa

SEQ ID NO: 341844 - DNA, 12 bp, Artificial Sequence
  Oligonucleotide primer for the detection of SNP TSC0010499
ttgattattatt

SEQ ID NO: 341845 - DNA, 12 bp, Artificial Sequence
  Oligonucleotide primer for the detection of SNP TSC0010499
ctaatcaccatc

SEQ ID NO: 341846 - DNA, 12 bp, Artificial Sequence
  Oligonucleotide primer for the detection of SNP TSC0010499
gtatatttaagg

SEQ ID NO: 341847 - DNA, 12 bp, Artificial Sequence
  Oligonucleotide primer for the detection of SNP TSC0010244
ctccctatctcc

SEQ ID NO: 341848 - DNA, 12 bp, Artificial Sequence
  Oligonucleotide primer for the detection of SNP TSC0010244
aatagagttgta

SEQ ID NO: 341849 - DNA, 12 bp, Artificial Sequence
  Oligonucleotide primer for the detection of SNP TSC0042259
taatataaatat

SEQ ID NO: 341850 - DNA, 12 bp, Artificial Sequence
  Oligonucleotide primer for the detection of SNP TSC0042259
gtgattattatg

SEQ ID NO: 341851 - DNA, 12 bp, Artificial Sequence
  Oligonucleotide primer for the detection of SNP TSC0042259
ataattattata

SEQ ID NO: 341852 - DNA, 12 bp, Artificial Sequence
  Oligonucleotide primer for the detection of SNP TSC0042259
tgatataggtgt

SEQ ID NO: 341853 - DNA, 12 bp, Artificial Sequence
  Oligonucleotide primer for the detection of SNP TSC0042260
aaacaaacaact

SEQ ID NO: 341854 - DNA, 12 bp, Artificial Sequence
  Oligonucleotide primer for the detection of SNP TSC0042260
aaacaaacgact

SEQ ID NO: 341855 - DNA, 12 bp, Artificial Sequence
  Oligonucleotide primer for the detection of SNP TSC0042260
aaatttttatta

SEQ ID NO: 341856 - DNA, 12 bp, Artificial Sequence
  Oligonucleotide primer for the detection of SNP TSC0042260
aaattcctatta

SEQ ID NO: 341857 - DNA, 12 bp, Artificial Sequence
  Oligonucleotide primer for the detection of SNP TSC0042260
gaatagatggtt

SEQ ID NO: 341858 - DNA, 12 bp, Artificial Sequence
  Oligonucleotide primer for the detection of SNP TSC0042260
gaatagacggtt

SEQ ID NO: 341859 - DNA, 12 bp, Artificial Sequence
  Oligonucleotide primer for the detection of SNP TSC0042261
ccaaaaacatta

SEQ ID NO: 341860 - DNA, 12 bp, Artificial Sequence
  Oligonucleotide primer for the detection of SNP TSC0042261
agtaagtatgat

SEQ ID NO: 341861 - DNA, 12 bp, Artificial Sequence
  Oligonucleotide primer for the detection of SNP TSC0042261
ttaaaggtattg

SEQ ID NO: 341862 - DNA, 12 bp, Artificial Sequence
  Oligonucleotide primer for the detection of SNP TSC0042266
ctcaaaaaactc

SEQ ID NO: 341863 - DNA, 12 bp, Artificial Sequence
  Oligonucleotide primer for the detection of SNP TSC0042266
tgtaaatatgaa

SEQ ID NO: 341864 - DNA, 12 bp, Artificial Sequence
  Oligonucleotide primer for the detection of SNP TSC0042266
tgtaaatacgaa

SEQ ID NO: 341865 - DNA, 12 bp, Artificial Sequence
  Oligonucleotide primer for the detection of SNP TSC0009793
accaatcaaata

SEQ ID NO: 341866 - DNA, 12 bp, Artificial Sequence
  Oligonucleotide primer for the detection of SNP TSC0009793
aggaagttttat

SEQ ID NO: 341867 - DNA, 12 bp, Artificial Sequence
  Oligonucleotide primer for the detection of SNP TSC0009793
taaaaaactcta

SEQ ID NO: 341868 - DNA, 12 bp, Artificial Sequence
  Oligonucleotide primer for the detection of SNP TSC0009793
ttaattaaatgt

SEQ ID NO: 341869 - DNA, 12 bp, Artificial Sequence
  Oligonucleotide primer for the detection of SNP TSC0042268
actaacacacaa

SEQ ID NO: 341870 - DNA, 12 bp, Artificial Sequence
  Oligonucleotide primer for the detection of SNP TSC0042268
agtgaatatgtt

SEQ ID NO: 341871 - DNA, 12 bp, Artificial Sequence
  Oligonucleotide primer for the detection of SNP TSC0042268
aataaacatatt

SEQ ID NO: 341872 - DNA, 12 bp, Artificial Sequence
  Oligonucleotide primer for the detection of SNP TSC0042268
attaatatatag

SEQ ID NO: 341873 - DNA, 12 bp, Artificial Sequence
  Oligonukleotid-Primer
ccaaaactacaa

SEQ ID NO: 341874 - DNA, 12 bp, Artificial Sequence
  Oligonucleotide primer for the detection of SNP TSC0042269
gaatagtggtat

SEQ ID NO: 341875 - DNA, 12 bp, Artificial Sequence
  Oligonucleotide primer for the detection of SNP TSC0042269
aaaacaataaca

SEQ ID NO: 341876 - DNA, 12 bp, Artificial Sequence
  Oligonucleotide primer for the detection of SNP TSC0042269
taaagttgtagt

SEQ ID NO: 341877 - DNA, 12 bp, Artificial Sequence
  Oligonucleotide primer for the detection of SNP TSC0042273
aaatatatacta

SEQ ID NO: 341878 - DNA, 12 bp, Artificial Sequence
  Oligonucleotide primer for the detection of SNP TSC0042273
atggtaatttaa

SEQ ID NO: 341879 - DNA, 12 bp, Artificial Sequence
  Oligonucleotide primer for the detection of SNP TSC0042273
ataataatttaa

SEQ ID NO: 341880 - DNA, 12 bp, Artificial Sequence
  Oligonucleotide primer for the detection of SNP TSC0042273
gagatatgtatt

SEQ ID NO: 341881 - DNA, 12 bp, Artificial Sequence
  Oligonucleotide primer for the detection of SNP TSC0008340
ctactccccaaa

SEQ ID NO: 341882 - DNA, 12 bp, Artificial Sequence
  Oligonucleotide primer for the detection of SNP TSC0008340
atcctatctcta

SEQ ID NO: 341883 - DNA, 12 bp, Artificial Sequence
  Oligonucleotide primer for the detection of SNP TSC0042274
tacactaatttt

SEQ ID NO: 341884 - DNA, 12 bp, Artificial Sequence
  Oligonucleotide primer for the detection of SNP TSC0042274
gatgtggggata

SEQ ID NO: 341885 - DNA, 12 bp, Artificial Sequence
  Oligonucleotide primer for the detection of SNP TSC0042281
aataaaatgttg

SEQ ID NO: 341886 - DNA, 12 bp, Artificial Sequence
  Oligonucleotide primer for the detection of SNP TSC0042282
cttatcctaaaa

SEQ ID NO: 341887 - DNA, 12 bp, Artificial Sequence
  Oligonucleotide primer for the detection of SNP TSC0042282
taatgtattttt

SEQ ID NO: 341888 - DNA, 12 bp, Artificial Sequence
  Oligonucleotide primer for the detection of SNP TSC0042283
tttaattccttc

SEQ ID NO: 341889 - DNA, 12 bp, Artificial Sequence
  Oligonucleotide primer for the detection of SNP TSC0042283
tttttaggataa

SEQ ID NO: 341890 - DNA, 12 bp, Artificial Sequence
  Oligonucleotide primer for the detection of SNP TSC0042284
attaaataactt

SEQ ID NO: 341891 - DNA, 12 bp, Artificial Sequence
  Oligonucleotide primer for the detection of SNP TSC0042284
tatttaatagta

SEQ ID NO: 341892 - DNA, 12 bp, Artificial Sequence
  Oligonucleotide primer for the detection of SNP TSC0042284
ttcaataacaaa

SEQ ID NO: 341893 - DNA, 12 bp, Artificial Sequence
  Oligonucleotide primer for the detection of SNP TSC0042284
attaggtgattt

SEQ ID NO: 341894 - DNA, 12 bp, Artificial Sequence
  Oligonucleotide primer for the detection of SNP TSC0042285
aattcactaaat

SEQ ID NO: 341895 - DNA, 12 bp, Artificial Sequence
  Oligonucleotide primer for the detection of SNP TSC0042285
aattcgctaaat

SEQ ID NO: 341896 - DNA, 12 bp, Artificial Sequence
  Oligonucleotide primer for the detection of SNP TSC0042285
aaatacctacca

SEQ ID NO: 341897 - DNA, 12 bp, Artificial Sequence
  Oligonucleotide primer for the detection of SNP TSC0042285
aatttgttgggt

SEQ ID NO: 341898 - DNA, 12 bp, Artificial Sequence
  Oligonucleotide primer for the detection of SNP TSC0042285
aattcgttgggt

SEQ ID NO: 341899 - DNA, 12 bp, Artificial Sequence
  Oligonucleotide primer for the detection of SNP TSC0042286
ataactctaaac

SEQ ID NO: 341900 - DNA, 12 bp, Artificial Sequence
  Oligonucleotide primer for the detection of SNP TSC0042286
tgagttattttg

SEQ ID NO: 341901 - DNA, 12 bp, Artificial Sequence
  Oligonucleotide primer for the detection of SNP TSC0042286
taaaccacccta

SEQ ID NO: 341902 - DNA, 12 bp, Artificial Sequence
  Oligonucleotide primer for the detection of SNP TSC0042286
gtgattttaggt

SEQ ID NO: 341903 - DNA, 12 bp, Artificial Sequence
  Oligonucleotide primer for the detection of SNP TSC0005375
atttataaacaa

SEQ ID NO: 341904 - DNA, 12 bp, Artificial Sequence
  Oligonucleotide primer for the detection of SNP TSC0005375
atttaagggttt

SEQ ID NO: 341905 - DNA, 12 bp, Artificial Sequence
  Oligonucleotide primer for the detection of SNP TSC0005375
acccaaaaattt

SEQ ID NO: 341906 - DNA, 12 bp, Artificial Sequence
  Oligonucleotide primer for the detection of SNP TSC0005375
gtttataggtaa

SEQ ID NO: 341907 - DNA, 12 bp, Artificial Sequence
  Oligonucleotide primer for the detection of SNP TSC0042287
atcaatatttcc

SEQ ID NO: 341908 - DNA, 12 bp, Artificial Sequence
  Oligonucleotide primer for the detection of SNP TSC0042287
tgattgaaaaat

SEQ ID NO: 341909 - DNA, 12 bp, Artificial Sequence
  Oligonucleotide primer for the detection of SNP TSC0042287
tgattgaaaaac

SEQ ID NO: 341910 - DNA, 12 bp, Artificial Sequence
  Oligonucleotide primer for the detection of SNP TSC0042289
tttaacatatca

SEQ ID NO: 341911 - DNA, 12 bp, Artificial Sequence
  Oligonucleotide primer for the detection of SNP TSC0042289
gttatgaaagtt

SEQ ID NO: 341912 - DNA, 12 bp, Artificial Sequence
  Oligonucleotide primer for the detection of SNP TSC0042289
atcataaaaact

SEQ ID NO: 341913 - DNA, 12 bp, Artificial Sequence
  Oligonucleotide primer for the detection of SNP TSC0042289
tttagtatgtta

SEQ ID NO: 341914 - DNA, 12 bp, Artificial Sequence
  Oligonucleotide primer for the detection of SNP TSC0042291
tatatttaactt

SEQ ID NO: 341915 - DNA, 12 bp, Artificial Sequence
  Oligonucleotide primer for the detection of SNP TSC0042291
aaaatggaatta

SEQ ID NO: 341916 - DNA, 12 bp, Artificial Sequence
  Oligonucleotide primer for the detection of SNP TSC0042292
tatttctatcct

SEQ ID NO: 341917 - DNA, 12 bp, Artificial Sequence
  Oligonucleotide primer for the detection of SNP TSC0042292
gtaatgattaga

SEQ ID NO: 341918 - DNA, 12 bp, Artificial Sequence
  Oligonucleotide primer for the detection of SNP TSC0042293
atatccaataac

SEQ ID NO: 341919 - DNA, 12 bp, Artificial Sequence
  Oligonucleotide primer for the detection of SNP TSC0042294
ctaaaattttct

SEQ ID NO: 341920 - DNA, 12 bp, Artificial Sequence
  Oligonucleotide primer for the detection of SNP TSC0042294
tttattttaaga

SEQ ID NO: 341921 - DNA, 12 bp, Artificial Sequence
  Oligonucleotide primer for the detection of SNP TSC0042295
ctatcttccatc

SEQ ID NO: 341922 - DNA, 12 bp, Artificial Sequence
  Oligonucleotide primer for the detection of SNP TSC0042295
tttagaggaaat

SEQ ID NO: 341923 - DNA, 12 bp, Artificial Sequence
  Oligonucleotide primer for the detection of SNP TSC0042296
gagagagggaga

SEQ ID NO: 341924 - DNA, 12 bp, Artificial Sequence
  Oligonucleotide primer for the detection of SNP TSC0042297
cattaatcaact

SEQ ID NO: 341925 - DNA, 12 bp, Artificial Sequence
  Oligonucleotide primer for the detection of SNP TSC0042297
aaattattttga

SEQ ID NO: 341926 - DNA, 12 bp, Artificial Sequence
  Oligonucleotide primer for the detection of SNP TSC0042298
cataataaaact

SEQ ID NO: 341927 - DNA, 12 bp, Artificial Sequence
  Oligonucleotide primer for the detection of SNP TSC0042298
tattttttaaag

SEQ ID NO: 341928 - DNA, 12 bp, Artificial Sequence
  Oligonucleotide primer for the detection of SNP TSC0042299
accaaattaaaa

SEQ ID NO: 341929 - DNA, 12 bp, Artificial Sequence
  Oligonucleotide primer for the detection of SNP TSC0042299
taacacttattc

SEQ ID NO: 341930 - DNA, 12 bp, Artificial Sequence
  Oligonucleotide primer for the detection of SNP TSC0042299
attagattagag

SEQ ID NO: 341931 - DNA, 12 bp, Artificial Sequence
  Oligonucleotide primer for the detection of SNP TSC0042300
aatctatttaaa

SEQ ID NO: 341932 - DNA, 12 bp, Artificial Sequence
  Oligonucleotide primer for the detection of SNP TSC0042300
gaaattaatatt

SEQ ID NO: 341933 - DNA, 12 bp, Artificial Sequence
  Oligonucleotide primer for the detection of SNP TSC0042300
aaaattaatact

SEQ ID NO: 341934 - DNA, 12 bp, Artificial Sequence
  Oligonucleotide primer for the detection of SNP TSC0042300
atttatttagat

SEQ ID NO: 341935 - DNA, 12 bp, Artificial Sequence
  Oligonucleotide primer for the detection of SNP TSC0042301
tactttaatccc

SEQ ID NO: 341936 - DNA, 12 bp, Artificial Sequence
  Oligonucleotide primer for the detection of SNP TSC0042301
tataggggaaag

SEQ ID NO: 341937 - DNA, 12 bp, Artificial Sequence
  Oligonucleotide primer for the detection of SNP TSC0042302
tcattttaacaa

SEQ ID NO: 341938 - DNA, 12 bp, Artificial Sequence
  Oligonucleotide primer for the detection of SNP TSC0042302
gtggttaggaag

SEQ ID NO: 341939 - DNA, 12 bp, Artificial Sequence
  Oligonucleotide primer for the detection of SNP TSC0042302
gcggttaggaag

SEQ ID NO: 341940 - DNA, 12 bp, Artificial Sequence
  Oligonucleotide primer for the detection of SNP TSC0042302
acaattaaaaaa

SEQ ID NO: 341941 - DNA, 12 bp, Artificial Sequence
  Oligonucleotide primer for the detection of SNP TSC0042302
acgattaaaaaa

SEQ ID NO: 341942 - DNA, 12 bp, Artificial Sequence
  Oligonucleotide primer for the detection of SNP TSC0042302
ttattttgataa

SEQ ID NO: 341943 - DNA, 12 bp, Artificial Sequence
  Oligonucleotide primer for the detection of SNP TSC0042303
aatttctaaact

SEQ ID NO: 341944 - DNA, 12 bp, Artificial Sequence
  Oligonucleotide primer for the detection of SNP TSC0042303
tatttttcaaaa

SEQ ID NO: 341945 - DNA, 12 bp, Artificial Sequence
  Oligonucleotide primer for the detection of SNP TSC0042304
ctattcccaatt

SEQ ID NO: 341946 - DNA, 12 bp, Artificial Sequence
  Oligonucleotide primer for the detection of SNP TSC0042304
atagggtagaaa

SEQ ID NO: 341947 - DNA, 12 bp, Artificial Sequence
  Oligonucleotide primer for the detection of SNP TSC0042305
acctaacaccaa

SEQ ID NO: 341948 - DNA, 12 bp, Artificial Sequence
  Oligonucleotide primer for the detection of SNP TSC0042305
agggggatgtta

SEQ ID NO: 341949 - DNA, 12 bp, Artificial Sequence
  Oligonucleotide primer for the detection of SNP TSC0042305
aaaaatatcaaa

SEQ ID NO: 341950 - DNA, 12 bp, Artificial Sequence
  Oligonucleotide primer for the detection of SNP TSC0042305
agatttggtatt

SEQ ID NO: 341951 - DNA, 12 bp, Artificial Sequence
  Oligonucleotide primer for the detection of SNP TSC0042306
aacactaataca

SEQ ID NO: 341952 - DNA, 12 bp, Artificial Sequence
  Oligonucleotide primer for the detection of SNP TSC0042306
cctctaacataa

SEQ ID NO: 341953 - DNA, 12 bp, Artificial Sequence
  Oligonucleotide primer for the detection of SNP TSC0042307
ttgattgatgtt

SEQ ID NO: 341954 - DNA, 12 bp, Artificial Sequence
  Oligonucleotide primer for the detection of SNP TSC0042307
ttgattgacgtt

SEQ ID NO: 341955 - DNA, 12 bp, Artificial Sequence
  Oligonucleotide primer for the detection of SNP TSC0042307
taattaacacta

SEQ ID NO: 341956 - DNA, 12 bp, Artificial Sequence
  Oligonucleotide primer for the detection of SNP TSC0042307
taattaacgcta

SEQ ID NO: 341957 - DNA, 12 bp, Artificial Sequence
  Oligonucleotide primer for the detection of SNP TSC0042307
tataggatgtat

SEQ ID NO: 341958 - DNA, 12 bp, Artificial Sequence
  Oligonucleotide primer for the detection of SNP TSC0042309
tttagtgagtag

SEQ ID NO: 341959 - DNA, 12 bp, Artificial Sequence
  Oligonucleotide primer for the detection of SNP TSC0042310
cactaaattatt

SEQ ID NO: 341960 - DNA, 12 bp, Artificial Sequence
  Oligonucleotide primer for the detection of SNP TSC0042310
gatattatttta

SEQ ID NO: 341961 - DNA, 12 bp, Artificial Sequence
  Oligonucleotide primer for the detection of SNP TSC0042311
cacaactaacca

SEQ ID NO: 341962 - DNA, 12 bp, Artificial Sequence
  Oligonucleotide primer for the detection of SNP TSC0042311
cacaactaaccg

SEQ ID NO: 341963 - DNA, 12 bp, Artificial Sequence
  Oligonucleotide primer for the detection of SNP TSC0042311
ctaaacctcttc

SEQ ID NO: 341964 - DNA, 12 bp, Artificial Sequence
  Oligonucleotide primer for the detection of SNP TSC0042311
tatagttgattg

SEQ ID NO: 341965 - DNA, 12 bp, Artificial Sequence
  Oligonucleotide primer for the detection of SNP TSC0042311
tatagttgatcg

SEQ ID NO: 341966 - DNA, 12 bp, Artificial Sequence
  Oligonucleotide primer for the detection of SNP TSC0042312
gtgtttatggtg

SEQ ID NO: 341967 - DNA, 12 bp, Artificial Sequence
  Oligonucleotide primer for the detection of SNP TSC0042312
atatccataata

SEQ ID NO: 341968 - DNA, 12 bp, Artificial Sequence
  Oligonucleotide primer for the detection of SNP TSC0042312
tttgtggatagg

SEQ ID NO: 341969 - DNA, 12 bp, Artificial Sequence
  Oligonucleotide primer for the detection of SNP TSC0042313
cataataatcct

SEQ ID NO: 341970 - DNA, 12 bp, Artificial Sequence
  Oligonucleotide primer for the detection of SNP TSC0042313
ttaggtttgtgg

SEQ ID NO: 341971 - DNA, 12 bp, Artificial Sequence
  Oligonucleotide primer for the detection of SNP TSC0042314
aacacaactaac

SEQ ID NO: 341972 - DNA, 12 bp, Artificial Sequence
  Oligonucleotide primer for the detection of SNP TSC0042314
cgtttgggtttt

SEQ ID NO: 341973 - DNA, 12 bp, Artificial Sequence
  Oligonucleotide primer for the detection of SNP TSC0042314
cacctaaacctc

SEQ ID NO: 341974 - DNA, 12 bp, Artificial Sequence
  Oligonucleotide primer for the detection of SNP TSC0042314
cgcctaaacctc

SEQ ID NO: 341975 - DNA, 12 bp, Artificial Sequence
  Oligonucleotide primer for the detection of SNP TSC0042314
gatatagttgat

SEQ ID NO: 341976 - DNA, 12 bp, Artificial Sequence
  Oligonucleotide primer for the detection of SNP TSC0042315
taatctcccacc

SEQ ID NO: 341977 - DNA, 12 bp, Artificial Sequence
  Oligonucleotide primer for the detection of SNP TSC0042315
ggatgttgggag

SEQ ID NO: 341978 - DNA, 12 bp, Artificial Sequence
  Oligonucleotide primer for the detection of SNP TSC0042315
ggacgttgggag

SEQ ID NO: 341979 - DNA, 12 bp, Artificial Sequence
  Oligonucleotide primer for the detection of SNP TSC0042315
aaacactaaaaa

SEQ ID NO: 341980 - DNA, 12 bp, Artificial Sequence
  Oligonucleotide primer for the detection of SNP TSC0042315
aaacgctaaaaa

SEQ ID NO: 341981 - DNA, 12 bp, Artificial Sequence
  Oligonucleotide primer for the detection of SNP TSC0042316
aaatacataatt

SEQ ID NO: 341982 - DNA, 12 bp, Artificial Sequence
  Oligonucleotide primer for the detection of SNP TSC0042316
gaaaatttttgt

SEQ ID NO: 341983 - DNA, 12 bp, Artificial Sequence
  Oligonucleotide primer for the detection of SNP TSC0042316
gaaaattttcgt

SEQ ID NO: 341984 - DNA, 12 bp, Artificial Sequence
  Oligonucleotide primer for the detection of SNP TSC0042316
aaaaatcttcgc

SEQ ID NO: 341985 - DNA, 12 bp, Artificial Sequence
  Oligonucleotide primer for the detection of SNP TSC0042316
agatgtatagtt

SEQ ID NO: 341986 - DNA, 12 bp, Artificial Sequence
  Oligonukleotid-Primer
atttctatatct

SEQ ID NO: 341987 - DNA, 12 bp, Artificial Sequence
  Oligonucleotide primer for the detection of SNP TSC0042317
aattctcaaaaa

SEQ ID NO: 341988 - DNA, 12 bp, Artificial Sequence
  Oligonucleotide primer for the detection of SNP TSC0042318
atttacaaatca

SEQ ID NO: 341989 - DNA, 12 bp, Artificial Sequence
  Oligonucleotide primer for the detection of SNP TSC0042318
gtgatgaaattt

SEQ ID NO: 341990 - DNA, 12 bp, Artificial Sequence
  Oligonucleotide primer for the detection of SNP TSC0042318
gcgatgaaattt

SEQ ID NO: 341991 - DNA, 12 bp, Artificial Sequence
  Oligonucleotide primer for the detection of SNP TSC0042318
aatacgataaaa

SEQ ID NO: 341992 - DNA, 12 bp, Artificial Sequence
  Oligonucleotide primer for the detection of SNP TSC0042319
caatccacccta

SEQ ID NO: 341993 - DNA, 12 bp, Artificial Sequence
  Oligonucleotide primer for the detection of SNP TSC0042319
gaagaaataaaa

SEQ ID NO: 341994 - DNA, 12 bp, Artificial Sequence
  Oligonucleotide primer for the detection of SNP TSC0042320
ttcaacaaacct

SEQ ID NO: 341995 - DNA, 12 bp, Artificial Sequence
  Oligonucleotide primer for the detection of SNP TSC0042320
tgtgtggttatg

SEQ ID NO: 341996 - DNA, 12 bp, Artificial Sequence
  Oligonucleotide primer for the detection of SNP TSC0042321
tatttccctata

SEQ ID NO: 341997 - DNA, 12 bp, Artificial Sequence
  Oligonucleotide primer for the detection of SNP TSC0042321
aaaaataatgtt

SEQ ID NO: 341998 - DNA, 12 bp, Artificial Sequence
  Oligonucleotide primer for the detection of SNP TSC0042324
aggaataaattt

SEQ ID NO: 341999 - DNA, 12 bp, Artificial Sequence
  Oligonucleotide primer for the detection of SNP TSC0042326
gtgtatttttaa

SEQ ID NO: 342000 - DNA, 12 bp, Artificial Sequence
  Oligonucleotide primer for the detection of SNP TSC0042327
gaggaggtttga

SEQ ID NO: 342001 - DNA, 12 bp, Artificial Sequence
  Oligonucleotide primer for the detection of SNP TSC0042327
tgagataaagta

SEQ ID NO: 342002 - DNA, 12 bp, Artificial Sequence
  Oligonukleotid-Primer
taaatatttatc

SEQ ID NO: 342003 - DNA, 12 bp, Artificial Sequence
  Oligonucleotide primer for the detection of SNP TSC0042329
agggagagtatt

SEQ ID NO: 342004 - DNA, 12 bp, Artificial Sequence
  Oligonucleotide primer for the detection of SNP TSC0042329
taggtatttgtt

SEQ ID NO: 342005 - DNA, 12 bp, Artificial Sequence
  Oligonucleotide primer for the detection of SNP TSC0042329
taggtatttgtc

SEQ ID NO: 342006 - DNA, 12 bp, Artificial Sequence
  Oligonucleotide primer for the detection of SNP TSC0042330
attctaatttta

SEQ ID NO: 342007 - DNA, 12 bp, Artificial Sequence
  Oligonucleotide primer for the detection of SNP TSC0042330
attaagttttta

SEQ ID NO: 342008 - DNA, 12 bp, Artificial Sequence
  Oligonucleotide primer for the detection of SNP TSC0042330
attaaatcttca

SEQ ID NO: 342009 - DNA, 12 bp, Artificial Sequence
  Oligonucleotide primer for the detection of SNP TSC0042330
gttttgattttg

SEQ ID NO: 342010 - DNA, 12 bp, Artificial Sequence
  Oligonucleotide primer for the detection of SNP TSC0042331
aatccaatcacc

SEQ ID NO: 342011 - DNA, 12 bp, Artificial Sequence
  Oligonucleotide primer for the detection of SNP TSC0042331
aatccaatcgcc

SEQ ID NO: 342012 - DNA, 12 bp, Artificial Sequence
  Oligonucleotide primer for the detection of SNP TSC0042331
gatccaatcacc

SEQ ID NO: 342013 - DNA, 12 bp, Artificial Sequence
  Oligonucleotide primer for the detection of SNP TSC0042331
gatccaatcgcc

SEQ ID NO: 342014 - DNA, 12 bp, Artificial Sequence
  Oligonucleotide primer for the detection of SNP TSC0042332
cattccccaata

SEQ ID NO: 342015 - DNA, 12 bp, Artificial Sequence
  Oligonucleotide primer for the detection of SNP TSC0042332
tttttggagtaa

SEQ ID NO: 342016 - DNA, 12 bp, Artificial Sequence
  Oligonucleotide primer for the detection of SNP TSC0042332
ttctaaaacaaa

SEQ ID NO: 342017 - DNA, 12 bp, Artificial Sequence
  Oligonucleotide primer for the detection of SNP TSC0042333
gtggtttgtttg

SEQ ID NO: 342018 - DNA, 12 bp, Artificial Sequence
  Oligonucleotide primer for the detection of SNP TSC0042333
gtggtttgttcg

SEQ ID NO: 342019 - DNA, 12 bp, Artificial Sequence
  Oligonucleotide primer for the detection of SNP TSC0042333
ataatctacccg

SEQ ID NO: 342020 - DNA, 12 bp, Artificial Sequence
  Oligonucleotide primer for the detection of SNP TSC0042337
ggagtaattaag

SEQ ID NO: 342021 - DNA, 12 bp, Artificial Sequence
  Oligonucleotide primer for the detection of SNP TSC0042339
tcatttaacctt

SEQ ID NO: 342022 - DNA, 12 bp, Artificial Sequence
  Oligonucleotide primer for the detection of SNP TSC0042339
agttaggattag

SEQ ID NO: 342023 - DNA, 12 bp, Artificial Sequence
  Oligonucleotide primer for the detection of SNP TSC0042340
acaattaaattt

SEQ ID NO: 342024 - DNA, 12 bp, Artificial Sequence
  Oligonucleotide primer for the detection of SNP TSC0042341
cattaaacaatt

SEQ ID NO: 342025 - DNA, 12 bp, Artificial Sequence
  Oligonucleotide primer for the detection of SNP TSC0042341
tatggtttgatg

SEQ ID NO: 342026 - DNA, 12 bp, Artificial Sequence
  Oligonucleotide primer for the detection of SNP TSC0042342
ttagagagatta

SEQ ID NO: 342027 - DNA, 12 bp, Artificial Sequence
  Oligonucleotide primer for the detection of SNP TSC0042344
tgagttagggag

SEQ ID NO: 342028 - DNA, 12 bp, Artificial Sequence
  Oligonucleotide primer for the detection of SNP TSC0042349
aataacaattaa

SEQ ID NO: 342029 - DNA, 12 bp, Artificial Sequence
  Oligonucleotide primer for the detection of SNP TSC0042349
tgaatttttatt

SEQ ID NO: 342030 - DNA, 12 bp, Artificial Sequence
  Oligonucleotide primer for the detection of SNP TSC0042349
ggtagtaattag

SEQ ID NO: 342031 - DNA, 12 bp, Artificial Sequence
  Oligonucleotide primer for the detection of SNP TSC0042350
cctcaatttcat

SEQ ID NO: 342032 - DNA, 12 bp, Artificial Sequence
  Oligonucleotide primer for the detection of SNP TSC0042350
ccattttaccaa

SEQ ID NO: 342033 - DNA, 12 bp, Artificial Sequence
  Oligonucleotide primer for the detection of SNP TSC0042351
aaatctcaatta

SEQ ID NO: 342034 - DNA, 12 bp, Artificial Sequence
  Oligonucleotide primer for the detection of SNP TSC0042351
taggaagtatat

SEQ ID NO: 342035 - DNA, 12 bp, Artificial Sequence
  Oligonucleotide primer for the detection of SNP TSC0042351
caaaaaacacac

SEQ ID NO: 342036 - DNA, 12 bp, Artificial Sequence
  Oligonucleotide primer for the detection of SNP TSC0042351
aaattttagtta

SEQ ID NO: 342037 - DNA, 12 bp, Artificial Sequence
  Oligonucleotide primer for the detection of SNP TSC0042352
acctataaattc

SEQ ID NO: 342038 - DNA, 12 bp, Artificial Sequence
  Oligonucleotide primer for the detection of SNP TSC0042352
cttttaccataa

SEQ ID NO: 342039 - DNA, 12 bp, Artificial Sequence
  Oligonucleotide primer for the detection of SNP TSC0042352
gtttgtaaattt

SEQ ID NO: 342040 - DNA, 12 bp, Artificial Sequence
  Oligonucleotide primer for the detection of SNP TSC0005206
tccccaaaaata

SEQ ID NO: 342041 - DNA, 12 bp, Artificial Sequence
  Oligonucleotide primer for the detection of SNP TSC0005206
tccccgaaaata

SEQ ID NO: 342042 - DNA, 12 bp, Artificial Sequence
  Oligonucleotide primer for the detection of SNP TSC0005206
ttataattagag

SEQ ID NO: 342043 - DNA, 12 bp, Artificial Sequence
  Oligonucleotide primer for the detection of SNP TSC0005206
tttttgaaaatg

SEQ ID NO: 342044 - DNA, 12 bp, Artificial Sequence
  Oligonucleotide primer for the detection of SNP TSC0005206
ttttcgaaaatg

SEQ ID NO: 342045 - DNA, 12 bp, Artificial Sequence
  Oligonucleotide primer for the detection of SNP TSC0005207
aacttatctatt

SEQ ID NO: 342046 - DNA, 12 bp, Artificial Sequence
  Oligonucleotide primer for the detection of SNP TSC0005207
aagatggatagg

SEQ ID NO: 342047 - DNA, 12 bp, Artificial Sequence
  Oligonucleotide primer for the detection of SNP TSC0005208
cctatccatctt

SEQ ID NO: 342048 - DNA, 12 bp, Artificial Sequence
  Oligonucleotide primer for the detection of SNP TSC0005208
tagaagagtgtg

SEQ ID NO: 342049 - DNA, 12 bp, Artificial Sequence
  Oligonucleotide primer for the detection of SNP TSC0042360
tcaatttatcta

SEQ ID NO: 342050 - DNA, 12 bp, Artificial Sequence
  Oligonucleotide primer for the detection of SNP TSC0042360
tattattttata

SEQ ID NO: 342051 - DNA, 12 bp, Artificial Sequence
  Oligonucleotide primer for the detection of SNP TSC0042360
cattattttata

SEQ ID NO: 342052 - DNA, 12 bp, Artificial Sequence
  Oligonucleotide primer for the detection of SNP TSC0042360
aatttgtttatt

SEQ ID NO: 342053 - DNA, 12 bp, Artificial Sequence
  Oligonucleotide primer for the detection of SNP TSC0007871
aaggatttgttt

SEQ ID NO: 342054 - DNA, 12 bp, Artificial Sequence
  Oligonucleotide primer for the detection of SNP TSC0042362
aattattaatca

SEQ ID NO: 342055 - DNA, 12 bp, Artificial Sequence
  Oligonucleotide primer for the detection of SNP TSC0042362
ttttgaaggttt

SEQ ID NO: 342056 - DNA, 12 bp, Artificial Sequence
  Oligonucleotide primer for the detection of SNP TSC0042362
ctctaaaaactc

SEQ ID NO: 342057 - DNA, 12 bp, Artificial Sequence
  Oligonucleotide primer for the detection of SNP TSC0042362
gagttgttaatt

SEQ ID NO: 342058 - DNA, 12 bp, Artificial Sequence
  Oligonucleotide primer for the detection of SNP TSC0042363
aactaatacaaa

SEQ ID NO: 342059 - DNA, 12 bp, Artificial Sequence
  Oligonucleotide primer for the detection of SNP TSC0042363
aactaatacgaa

SEQ ID NO: 342060 - DNA, 12 bp, Artificial Sequence
  Oligonucleotide primer for the detection of SNP TSC0042363
tactccacccca

SEQ ID NO: 342061 - DNA, 12 bp, Artificial Sequence
  Oligonucleotide primer for the detection of SNP TSC0042363
ggttggtgtggg

SEQ ID NO: 342062 - DNA, 12 bp, Artificial Sequence
  Oligonucleotide primer for the detection of SNP TSC0042363
ggttggtgcggg

SEQ ID NO: 342063 - DNA, 12 bp, Artificial Sequence
  Oligonucleotide primer for the detection of SNP TSC0042364
attttaaaaact

SEQ ID NO: 342064 - DNA, 12 bp, Artificial Sequence
  Oligonucleotide primer for the detection of SNP TSC0042364
gaagagttggta

SEQ ID NO: 342065 - DNA, 12 bp, Artificial Sequence
  Oligonucleotide primer for the detection of SNP TSC0042365
attaaacttctc

SEQ ID NO: 342066 - DNA, 12 bp, Artificial Sequence
  Oligonucleotide primer for the detection of SNP TSC0042365
tttttaagattg

SEQ ID NO: 342067 - DNA, 12 bp, Artificial Sequence
  Oligonucleotide primer for the detection of SNP TSC0042366
agtggtgtgatt

SEQ ID NO: 342068 - DNA, 12 bp, Artificial Sequence
  Oligonucleotide primer for the detection of SNP TSC0042367
tacaactaccta

SEQ ID NO: 342069 - DNA, 12 bp, Artificial Sequence
  Oligonucleotide primer for the detection of SNP TSC0042367
tttttgagagat

SEQ ID NO: 342070 - DNA, 12 bp, Artificial Sequence
  Oligonucleotide primer for the detection of SNP TSC0042367
cttctaaaaaac

SEQ ID NO: 342071 - DNA, 12 bp, Artificial Sequence
  Oligonucleotide primer for the detection of SNP TSC0042367
tgtaattgtttg

SEQ ID NO: 342072 - DNA, 12 bp, Artificial Sequence
  Oligonucleotide primer for the detection of SNP TSC0042368
cctaattaaaat

SEQ ID NO: 342073 - DNA, 12 bp, Artificial Sequence
  Oligonucleotide primer for the detection of SNP TSC0042369
agggagagatat

SEQ ID NO: 342074 - DNA, 12 bp, Artificial Sequence
  Oligonucleotide primer for the detection of SNP TSC0042370
tataaatccaaa

SEQ ID NO: 342075 - DNA, 12 bp, Artificial Sequence
  Oligonucleotide primer for the detection of SNP TSC0042370
ttgttttgggtt

SEQ ID NO: 342076 - DNA, 12 bp, Artificial Sequence
  Oligonucleotide primer for the detection of SNP TSC0042370
ttattctaaatc

SEQ ID NO: 342077 - DNA, 12 bp, Artificial Sequence
  Oligonucleotide primer for the detection of SNP TSC0042370
tgtaggtttaga

SEQ ID NO: 342078 - DNA, 12 bp, Artificial Sequence
  Oligonucleotide primer for the detection of SNP TSC0042371
attcctcctact

SEQ ID NO: 342079 - DNA, 12 bp, Artificial Sequence
  Oligonucleotide primer for the detection of SNP TSC0042371
gtgaaggtagga

SEQ ID NO: 342080 - DNA, 12 bp, Artificial Sequence
  Oligonucleotide primer for the detection of SNP TSC0004935
caaaaacccttt

SEQ ID NO: 342081 - DNA, 12 bp, Artificial Sequence
  Oligonucleotide primer for the detection of SNP TSC0042372
attatttgttta

SEQ ID NO: 342082 - DNA, 12 bp, Artificial Sequence
  Oligonucleotide primer for the detection of SNP TSC0042373
attaaacttaca

SEQ ID NO: 342083 - DNA, 12 bp, Artificial Sequence
  Oligonucleotide primer for the detection of SNP TSC0042373
tattatatggaa

SEQ ID NO: 342084 - DNA, 12 bp, Artificial Sequence
  Oligonucleotide primer for the detection of SNP TSC0042373
caccacataaaa

SEQ ID NO: 342085 - DNA, 12 bp, Artificial Sequence
  Oligonucleotide primer for the detection of SNP TSC0042373
aattggatttat

SEQ ID NO: 342086 - DNA, 12 bp, Artificial Sequence
  Oligonucleotide primer for the detection of SNP TSC0042381
taataaaaaata

SEQ ID NO: 342087 - DNA, 12 bp, Artificial Sequence
  Oligonucleotide primer for the detection of SNP TSC0042381
tttaaaatattt

SEQ ID NO: 342088 - DNA, 12 bp, Artificial Sequence
  Oligonucleotide primer for the detection of SNP TSC0042381
taatgaaaaata

SEQ ID NO: 342089 - DNA, 12 bp, Artificial Sequence
  Oligonucleotide primer for the detection of SNP TSC0042382
taatttggtttg

SEQ ID NO: 342090 - DNA, 12 bp, Artificial Sequence
  Oligonucleotide primer for the detection of SNP TSC0042382
taacctaatcta

SEQ ID NO: 342091 - DNA, 12 bp, Artificial Sequence
  Oligonucleotide primer for the detection of SNP TSC0042382
ggggagagagga

SEQ ID NO: 342092 - DNA, 12 bp, Artificial Sequence
  Oligonucleotide primer for the detection of SNP TSC0042383
aactaaatatta

SEQ ID NO: 342093 - DNA, 12 bp, Artificial Sequence
  Oligonucleotide primer for the detection of SNP TSC0042384
aaactaaatatt

SEQ ID NO: 342094 - DNA, 12 bp, Artificial Sequence
  Oligonucleotide primer for the detection of SNP TSC0042384
tttaaataatga

SEQ ID NO: 342095 - DNA, 12 bp, Artificial Sequence
  Oligonucleotide primer for the detection of SNP TSC0004882
tataattcacac

SEQ ID NO: 342096 - DNA, 12 bp, Artificial Sequence
  Oligonucleotide primer for the detection of SNP TSC0004882
tgtatgatgtta

SEQ ID NO: 342097 - DNA, 12 bp, Artificial Sequence
  Oligonucleotide primer for the detection of SNP TSC0004882
cgtatgatgtta

SEQ ID NO: 342098 - DNA, 12 bp, Artificial Sequence
  Oligonucleotide primer for the detection of SNP TSC0006269
cttaactaaatt

SEQ ID NO: 342099 - DNA, 12 bp, Artificial Sequence
  Oligonucleotide primer for the detection of SNP TSC0006269
ttttaggaatga

SEQ ID NO: 342100 - DNA, 12 bp, Artificial Sequence
  Oligonucleotide primer for the detection of SNP TSC0010534
gaattgtgatta

SEQ ID NO: 342101 - DNA, 12 bp, Artificial Sequence
  Oligonucleotide primer for the detection of SNP TSC0010535
cacaattaacac

SEQ ID NO: 342102 - DNA, 12 bp, Artificial Sequence
  Oligonucleotide primer for the detection of SNP TSC0004798
caaacacaatta

SEQ ID NO: 342103 - DNA, 12 bp, Artificial Sequence
  Oligonucleotide primer for the detection of SNP TSC0004798
caaacgcaatta

SEQ ID NO: 342104 - DNA, 12 bp, Artificial Sequence
  Oligonucleotide primer for the detection of SNP TSC0004798
ctccacctaaaa

SEQ ID NO: 342105 - DNA, 12 bp, Artificial Sequence
  Oligonucleotide primer for the detection of SNP TSC0004798
ttaggtgtagtt

SEQ ID NO: 342106 - DNA, 12 bp, Artificial Sequence
  Oligonucleotide primer for the detection of SNP TSC0004798
ttaggcgtagtt

SEQ ID NO: 342107 - DNA, 12 bp, Artificial Sequence
  Oligonucleotide primer for the detection of SNP TSC0004799
aaaactccttac

SEQ ID NO: 342108 - DNA, 12 bp, Artificial Sequence
  Oligonucleotide primer for the detection of SNP TSC0004799
agttgagtttat

SEQ ID NO: 342109 - DNA, 12 bp, Artificial Sequence
  Oligonucleotide primer for the detection of SNP TSC0004799
aattaaattcat

SEQ ID NO: 342110 - DNA, 12 bp, Artificial Sequence
  Oligonucleotide primer for the detection of SNP TSC0004799
gggattttttgt

SEQ ID NO: 342111 - DNA, 12 bp, Artificial Sequence
  Oligonucleotide primer for the detection of SNP TSC0004777
ttaactactaca

SEQ ID NO: 342112 - DNA, 12 bp, Artificial Sequence
  Oligonucleotide primer for the detection of SNP TSC0004777
ttttttggtggt

SEQ ID NO: 342113 - DNA, 12 bp, Artificial Sequence
  Oligonucleotide primer for the detection of SNP TSC0004777
ttttctaataac

SEQ ID NO: 342114 - DNA, 12 bp, Artificial Sequence
  Oligonucleotide primer for the detection of SNP TSC0004777
ttgattgttata

SEQ ID NO: 342115 - DNA, 12 bp, Artificial Sequence
  Oligonucleotide primer for the detection of SNP TSC0007737
aaaagttaaatg

SEQ ID NO: 342116 - DNA, 12 bp, Artificial Sequence
  Oligonucleotide primer for the detection of SNP TSC0042389
aataattacact

SEQ ID NO: 342117 - DNA, 12 bp, Artificial Sequence
  Oligonucleotide primer for the detection of SNP TSC0042390
aacttcactact

SEQ ID NO: 342118 - DNA, 12 bp, Artificial Sequence
  Oligonucleotide primer for the detection of SNP TSC0042390
atatttggtaga

SEQ ID NO: 342119 - DNA, 12 bp, Artificial Sequence
  Oligonucleotide primer for the detection of SNP TSC0042392
catctcattaac

SEQ ID NO: 342120 - DNA, 12 bp, Artificial Sequence
  Oligonucleotide primer for the detection of SNP TSC0042392
atatcttttact

SEQ ID NO: 342121 - DNA, 12 bp, Artificial Sequence
  Oligonucleotide primer for the detection of SNP TSC0042392
tattttattaat

SEQ ID NO: 342122 - DNA, 12 bp, Artificial Sequence
  Oligonucleotide primer for the detection of SNP TSC0042393
caccacacccca

SEQ ID NO: 342123 - DNA, 12 bp, Artificial Sequence
  Oligonucleotide primer for the detection of SNP TSC0042394
aataaaattttt

SEQ ID NO: 342124 - DNA, 12 bp, Artificial Sequence
  Oligonucleotide primer for the detection of SNP TSC0042395
acacttttcaat

SEQ ID NO: 342125 - DNA, 12 bp, Artificial Sequence
  Oligonucleotide primer for the detection of SNP TSC0042395
acgcttttcaat

SEQ ID NO: 342126 - DNA, 12 bp, Artificial Sequence
  Oligonucleotide primer for the detection of SNP TSC0042395
tttctaaaacta

SEQ ID NO: 342127 - DNA, 12 bp, Artificial Sequence
  Oligonucleotide primer for the detection of SNP TSC0042395
gtgttttttaat

SEQ ID NO: 342128 - DNA, 12 bp, Artificial Sequence
  Oligonucleotide primer for the detection of SNP TSC0042395
gcgttttttaat

SEQ ID NO: 342129 - DNA, 12 bp, Artificial Sequence
  Oligonucleotide primer for the detection of SNP TSC0042397
acttttcctacc

SEQ ID NO: 342130 - DNA, 12 bp, Artificial Sequence
  Oligonucleotide primer for the detection of SNP TSC0042397
aattgtttgtaa

SEQ ID NO: 342131 - DNA, 12 bp, Artificial Sequence
  Oligonucleotide primer for the detection of SNP TSC0042398
ccaaaaaatata

SEQ ID NO: 342132 - DNA, 12 bp, Artificial Sequence
  Oligonucleotide primer for the detection of SNP TSC0042398
atatttttaatt

SEQ ID NO: 342133 - DNA, 12 bp, Artificial Sequence
  Oligonucleotide primer for the detection of SNP TSC0042398
atatttttaatc

SEQ ID NO: 342134 - DNA, 12 bp, Artificial Sequence
  Oligonucleotide primer for the detection of SNP TSC0042398
atactctcaacc

SEQ ID NO: 342135 - DNA, 12 bp, Artificial Sequence
  Oligonucleotide primer for the detection of SNP TSC0042398
ttagaagatgtg

SEQ ID NO: 342136 - DNA, 12 bp, Artificial Sequence
  Oligonucleotide primer for the detection of SNP TSC0042399
tttaaaaactcc

SEQ ID NO: 342137 - DNA, 12 bp, Artificial Sequence
  Oligonucleotide primer for the detection of SNP TSC0042399
attcctatttac

SEQ ID NO: 342138 - DNA, 12 bp, Artificial Sequence
  Oligonucleotide primer for the detection of SNP TSC0042399
tagaaatttttt

SEQ ID NO: 342139 - DNA, 12 bp, Artificial Sequence
  Oligonucleotide primer for the detection of SNP TSC0009466
ttacttaaataa

SEQ ID NO: 342140 - DNA, 12 bp, Artificial Sequence
  Oligonucleotide primer for the detection of SNP TSC0009466
tttgtttaaatg

SEQ ID NO: 342141 - DNA, 12 bp, Artificial Sequence
  Oligonucleotide primer for the detection of SNP TSC0042402
ataaaatccctc

SEQ ID NO: 342142 - DNA, 12 bp, Artificial Sequence
  Oligonucleotide primer for the detection of SNP TSC0042402
taaaaattagaa

SEQ ID NO: 342143 - DNA, 12 bp, Artificial Sequence
  Oligonucleotide primer for the detection of SNP TSC0042403
ttcaccatatta

SEQ ID NO: 342144 - DNA, 12 bp, Artificial Sequence
  Oligonucleotide primer for the detection of SNP TSC0042403
tgtgatgagttt

SEQ ID NO: 342145 - DNA, 12 bp, Artificial Sequence
  Oligonucleotide primer for the detection of SNP TSC0042403
tgtgacgagttt

SEQ ID NO: 342146 - DNA, 12 bp, Artificial Sequence
  Oligonucleotide primer for the detection of SNP TSC0042403
taacaaacctaa

SEQ ID NO: 342147 - DNA, 12 bp, Artificial Sequence
  Oligonucleotide primer for the detection of SNP TSC0042403
taacgaacctaa

SEQ ID NO: 342148 - DNA, 12 bp, Artificial Sequence
  Oligonucleotide primer for the detection of SNP TSC0042404
cacaatctacac

SEQ ID NO: 342149 - DNA, 12 bp, Artificial Sequence
  Oligonucleotide primer for the detection of SNP TSC0042404
ggagatattgaa

SEQ ID NO: 342150 - DNA, 12 bp, Artificial Sequence
  Oligonucleotide primer for the detection of SNP TSC0042405
atttgtgatatg

SEQ ID NO: 342151 - DNA, 12 bp, Artificial Sequence
  Oligonucleotide primer for the detection of SNP TSC0042405
acttataacata

SEQ ID NO: 342152 - DNA, 12 bp, Artificial Sequence
  Oligonucleotide primer for the detection of SNP TSC0042405
atgaaaatattt

SEQ ID NO: 342153 - DNA, 12 bp, Artificial Sequence
  Oligonucleotide primer for the detection of SNP TSC0042406
aataattctttt

SEQ ID NO: 342154 - DNA, 12 bp, Artificial Sequence
  Oligonucleotide primer for the detection of SNP TSC0042406
aaagtaataaaa

SEQ ID NO: 342155 - DNA, 12 bp, Artificial Sequence
  Oligonucleotide primer for the detection of SNP TSC0042407
aaaattaaccac

SEQ ID NO: 342156 - DNA, 12 bp, Artificial Sequence
  Oligonucleotide primer for the detection of SNP TSC0042407
ttgttaatttaa

SEQ ID NO: 342157 - DNA, 12 bp, Artificial Sequence
  Oligonucleotide primer for the detection of SNP TSC0042410
ttactccaatac

SEQ ID NO: 342158 - DNA, 12 bp, Artificial Sequence
  Oligonucleotide primer for the detection of SNP TSC0042410
agtagttgggtg

SEQ ID NO: 342159 - DNA, 12 bp, Artificial Sequence
  Oligonucleotide primer for the detection of SNP TSC0042412
cataacacatca

SEQ ID NO: 342160 - DNA, 12 bp, Artificial Sequence
  Oligonucleotide primer for the detection of SNP TSC0042412
cataacgcatca

SEQ ID NO: 342161 - DNA, 12 bp, Artificial Sequence
  Oligonucleotide primer for the detection of SNP TSC0042412
aattcatatccc

SEQ ID NO: 342162 - DNA, 12 bp, Artificial Sequence
  Oligonucleotide primer for the detection of SNP TSC0042412
tatggtgtatta

SEQ ID NO: 342163 - DNA, 12 bp, Artificial Sequence
  Oligonucleotide primer for the detection of SNP TSC0042412
tatggcgtatta

SEQ ID NO: 342164 - DNA, 12 bp, Artificial Sequence
  Oligonucleotide primer for the detection of SNP TSC0042413
catctatttcta

SEQ ID NO: 342165 - DNA, 12 bp, Artificial Sequence
  Oligonucleotide primer for the detection of SNP TSC0042413
aactatccctcc

SEQ ID NO: 342166 - DNA, 12 bp, Artificial Sequence
  Oligonucleotide primer for the detection of SNP TSC0042414
aacctccaacaa

SEQ ID NO: 342167 - DNA, 12 bp, Artificial Sequence
  Oligonucleotide primer for the detection of SNP TSC0042414
aacctccaacga

SEQ ID NO: 342168 - DNA, 12 bp, Artificial Sequence
  Oligonucleotide primer for the detection of SNP TSC0042414
tggaagtgtttt

SEQ ID NO: 342169 - DNA, 12 bp, Artificial Sequence
  Oligonucleotide primer for the detection of SNP TSC0005168
aaaatttaatga

SEQ ID NO: 342170 - DNA, 12 bp, Artificial Sequence
  Oligonucleotide primer for the detection of SNP TSC0005168
aaaatttaacga

SEQ ID NO: 342171 - DNA, 12 bp, Artificial Sequence
  Oligonucleotide primer for the detection of SNP TSC0005168
aaaatttaacaa

SEQ ID NO: 342172 - DNA, 12 bp, Artificial Sequence
  Oligonucleotide primer for the detection of SNP TSC0005168
tatatttaaaag

SEQ ID NO: 342173 - DNA, 12 bp, Artificial Sequence
  Oligonucleotide primer for the detection of SNP TSC0042415
atataaaaaaac

SEQ ID NO: 342174 - DNA, 12 bp, Artificial Sequence
  Oligonucleotide primer for the detection of SNP TSC0042415
ataggtatatta

SEQ ID NO: 342175 - DNA, 12 bp, Artificial Sequence
  Oligonucleotide primer for the detection of SNP TSC0042415
ataaacatacta

SEQ ID NO: 342176 - DNA, 12 bp, Artificial Sequence
  Oligonucleotide primer for the detection of SNP TSC0042415
atataaagaaat

SEQ ID NO: 342177 - DNA, 12 bp, Artificial Sequence
  Oligonucleotide primer for the detection of SNP TSC0042416
taaaaatacccc

SEQ ID NO: 342178 - DNA, 12 bp, Artificial Sequence
  Oligonucleotide primer for the detection of SNP TSC0042416
atgtttaggtga

SEQ ID NO: 342179 - DNA, 12 bp, Artificial Sequence
  Oligonucleotide primer for the detection of SNP TSC0042417
ggcgtggtggtg

SEQ ID NO: 342180 - DNA, 12 bp, Artificial Sequence
  Oligonucleotide primer for the detection of SNP TSC0042417
aacataataata

SEQ ID NO: 342181 - DNA, 12 bp, Artificial Sequence
  Oligonucleotide primer for the detection of SNP TSC0042417
aacgtaataata

SEQ ID NO: 342182 - DNA, 12 bp, Artificial Sequence
  Oligonucleotide primer for the detection of SNP TSC0042418
taaatccaattt

SEQ ID NO: 342183 - DNA, 12 bp, Artificial Sequence
  Oligonukleotid-Primer
ggtgagaaggtg

SEQ ID NO: 342184 - DNA, 12 bp, Artificial Sequence
  Oligonucleotide primer for the detection of SNP TSC0042419
ccaaaaaccaac

SEQ ID NO: 342185 - DNA, 12 bp, Artificial Sequence
  Oligonucleotide primer for the detection of SNP TSC0042419
aaactttaacta

SEQ ID NO: 342186 - DNA, 12 bp, Artificial Sequence
  Oligonucleotide primer for the detection of SNP TSC0010407
ttacaacactac

SEQ ID NO: 342187 - DNA, 12 bp, Artificial Sequence
  Oligonukleotid-Primer
gattaggttgga

SEQ ID NO: 342188 - DNA, 12 bp, Artificial Sequence
  Oligonucleotide primer for the detection of SNP TSC0010408
ataaaaaaacac

SEQ ID NO: 342189 - DNA, 12 bp, Artificial Sequence
  Oligonucleotide primer for the detection of SNP TSC0007036
tatattaaaact

SEQ ID NO: 342190 - DNA, 12 bp, Artificial Sequence
  Oligonucleotide primer for the detection of SNP TSC0007036
tatacggtttta

SEQ ID NO: 342191 - DNA, 12 bp, Artificial Sequence
  Oligonukleotid-Primer
catacaattcta

SEQ ID NO: 342192 - DNA, 12 bp, Artificial Sequence
  Oligonucleotide primer for the detection of SNP TSC0007036
catacgattcta

SEQ ID NO: 342193 - DNA, 12 bp, Artificial Sequence
  Oligonucleotide primer for the detection of SNP TSC0007036
tgtgttgaaatt

SEQ ID NO: 342194 - DNA, 12 bp, Artificial Sequence
  Oligonucleotide primer for the detection of SNP TSC0007037
gtattgattaaa

SEQ ID NO: 342195 - DNA, 12 bp, Artificial Sequence
  Oligonukleotid-Primer
tggattggagga

SEQ ID NO: 342196 - DNA, 12 bp, Artificial Sequence
  Oligonucleotide primer for the detection of SNP TSC0042423
ctttacaataca

SEQ ID NO: 342197 - DNA, 12 bp, Artificial Sequence
  Oligonucleotide primer for the detection of SNP TSC0042423
tggaggagattg

SEQ ID NO: 342198 - DNA, 12 bp, Artificial Sequence
  Oligonucleotide primer for the detection of SNP TSC0006579
taaacttttctt

SEQ ID NO: 342199 - DNA, 12 bp, Artificial Sequence
  Oligonukleotid-Primer
ttatgtggtaga

SEQ ID NO: 342200 - DNA, 12 bp, Artificial Sequence
  Oligonucleotide primer for the detection of SNP TSC0006580
aatttttcaaac

SEQ ID NO: 342201 - DNA, 12 bp, Artificial Sequence
  Oligonucleotide primer for the detection of SNP TSC0006580
agtaaaatataa

SEQ ID NO: 342202 - DNA, 12 bp, Artificial Sequence
  Oligonucleotide primer for the detection of SNP TSC0004659
ccccctcctatc

SEQ ID NO: 342203 - DNA, 12 bp, Artificial Sequence
  Oligonukleotid-Primer
gttttggttaag

SEQ ID NO: 342204 - DNA, 12 bp, Artificial Sequence
  Oligonucleotide primer for the detection of SNP TSC0004660
aaacaactaata

SEQ ID NO: 342205 - DNA, 12 bp, Artificial Sequence
  Oligonucleotide primer for the detection of SNP TSC0004660
tattttgggata

SEQ ID NO: 342206 - DNA, 12 bp, Artificial Sequence
  Oligonucleotide primer for the detection of SNP TSC0004660
cactctaaaaca

SEQ ID NO: 342207 - DNA, 12 bp, Artificial Sequence
  Oligonucleotide primer for the detection of SNP TSC0004660
gagtagttggtg

SEQ ID NO: 342208 - DNA, 12 bp, Artificial Sequence
  Oligonucleotide primer for the detection of SNP TSC0006683
ttttctttttaa

SEQ ID NO: 342209 - DNA, 12 bp, Artificial Sequence
  Oligonucleotide primer for the detection of SNP TSC0006683
gattgataagtg

SEQ ID NO: 342210 - DNA, 12 bp, Artificial Sequence
  Oligonucleotide primer for the detection of SNP TSC0042431
catactaacaac

SEQ ID NO: 342211 - DNA, 12 bp, Artificial Sequence
  Oligonucleotide primer for the detection of SNP TSC0042431
aaactcaaatca

SEQ ID NO: 342212 - DNA, 12 bp, Artificial Sequence
  Oligonucleotide primer for the detection of SNP TSC0042431
tatattggtaat

SEQ ID NO: 342213 - DNA, 12 bp, Artificial Sequence
  Oligonucleotide primer for the detection of SNP TSC0042432
gtaatagaaaga

SEQ ID NO: 342214 - DNA, 12 bp, Artificial Sequence
  Oligonucleotide primer for the detection of SNP TSC0042433
tacaatcttaac

SEQ ID NO: 342215 - DNA, 12 bp, Artificial Sequence
  Oligonucleotide primer for the detection of SNP TSC0042433
agtatggtttaa

SEQ ID NO: 342216 - DNA, 12 bp, Artificial Sequence
  Oligonucleotide primer for the detection of SNP TSC0042435
aactaaatattc

SEQ ID NO: 342217 - DNA, 12 bp, Artificial Sequence
  Oligonucleotide primer for the detection of SNP TSC0042435
ttaaggagtatg

SEQ ID NO: 342218 - DNA, 12 bp, Artificial Sequence
  Oligonucleotide primer for the detection of SNP TSC0042437
aacaaataatct

SEQ ID NO: 342219 - DNA, 12 bp, Artificial Sequence
  Oligonucleotide primer for the detection of SNP TSC0042437
tgagtattagga

SEQ ID NO: 342220 - DNA, 12 bp, Artificial Sequence
  Oligonucleotide primer for the detection of SNP TSC0042438
taatatatattc

SEQ ID NO: 342221 - DNA, 12 bp, Artificial Sequence
  Oligonucleotide primer for the detection of SNP TSC0042438
gtatttgtgggg

SEQ ID NO: 342222 - DNA, 12 bp, Artificial Sequence
  Oligonucleotide primer for the detection of SNP TSC0042439
aattaccctaat

SEQ ID NO: 342223 - DNA, 12 bp, Artificial Sequence
  Oligonucleotide primer for the detection of SNP TSC0042439
acacttatataa

SEQ ID NO: 342224 - DNA, 12 bp, Artificial Sequence
  Oligonucleotide primer for the detection of SNP TSC0042439
gattgttttggt

SEQ ID NO: 342225 - DNA, 12 bp, Artificial Sequence
  Oligonucleotide primer for the detection of SNP TSC0042444
taaaattattac

SEQ ID NO: 342226 - DNA, 12 bp, Artificial Sequence
  Oligonucleotide primer for the detection of SNP TSC0042444
atattaatgtag

SEQ ID NO: 342227 - DNA, 12 bp, Artificial Sequence
  Oligonucleotide primer for the detection of SNP TSC0042445
cacaaataatta

SEQ ID NO: 342228 - DNA, 12 bp, Artificial Sequence
  Oligonucleotide primer for the detection of SNP TSC0042445
ttagaaatttaa

SEQ ID NO: 342229 - DNA, 12 bp, Artificial Sequence
  Oligonucleotide primer for the detection of SNP TSC0042445
tcaaaaactcaa

SEQ ID NO: 342230 - DNA, 12 bp, Artificial Sequence
  Oligonucleotide primer for the detection of SNP TSC0042445
tataaatggtta

SEQ ID NO: 342231 - DNA, 12 bp, Artificial Sequence
  Oligonucleotide primer for the detection of SNP TSC0042446
cttacatatatc

SEQ ID NO: 342232 - DNA, 12 bp, Artificial Sequence
  Oligonucleotide primer for the detection of SNP TSC0042446
tatgagatatta

SEQ ID NO: 342233 - DNA, 12 bp, Artificial Sequence
  Oligonucleotide primer for the detection of SNP TSC0042447
agaattttaaag

SEQ ID NO: 342234 - DNA, 12 bp, Artificial Sequence
  Oligonucleotide primer for the detection of SNP TSC0004959
cctaaataactt

SEQ ID NO: 342235 - DNA, 12 bp, Artificial Sequence
  Oligonucleotide primer for the detection of SNP TSC0004959
atgtttgtagtt

SEQ ID NO: 342236 - DNA, 12 bp, Artificial Sequence
  Oligonucleotide primer for the detection of SNP TSC0042448
aaataatttaat

SEQ ID NO: 342237 - DNA, 12 bp, Artificial Sequence
  Oligonucleotide primer for the detection of SNP TSC0042448
aggataatttta

SEQ ID NO: 342238 - DNA, 12 bp, Artificial Sequence
  Oligonucleotide primer for the detection of SNP TSC0007578
aatcattcttct

SEQ ID NO: 342239 - DNA, 12 bp, Artificial Sequence
  Oligonucleotide primer for the detection of SNP TSC0007578
gttattttttgg

SEQ ID NO: 342240 - DNA, 12 bp, Artificial Sequence
  Oligonucleotide primer for the detection of SNP TSC0042449
taccccaaaatt

SEQ ID NO: 342241 - DNA, 12 bp, Artificial Sequence
  Oligonucleotide primer for the detection of SNP TSC0042449
gaagtttaaata

SEQ ID NO: 342242 - DNA, 12 bp, Artificial Sequence
  Oligonucleotide primer for the detection of SNP TSC0042450
ctaccaaacacc

SEQ ID NO: 342243 - DNA, 12 bp, Artificial Sequence
  Oligonucleotide primer for the detection of SNP TSC0042450
ggatttaagtgg

SEQ ID NO: 342244 - DNA, 12 bp, Artificial Sequence
  Oligonucleotide primer for the detection of SNP TSC0006858
aaaaactctaac

SEQ ID NO: 342245 - DNA, 12 bp, Artificial Sequence
  Oligonucleotide primer for the detection of SNP TSC0006858
tttattaatatg

SEQ ID NO: 342246 - DNA, 12 bp, Artificial Sequence
  Oligonucleotide primer for the detection of SNP TSC0006858
tttattaatacg

SEQ ID NO: 342247 - DNA, 12 bp, Artificial Sequence
  Oligonucleotide primer for the detection of SNP TSC0042452
taattgtatgat

SEQ ID NO: 342248 - DNA, 12 bp, Artificial Sequence
  Oligonucleotide primer for the detection of SNP TSC0042452
caattatataat

SEQ ID NO: 342249 - DNA, 12 bp, Artificial Sequence
  Oligonucleotide primer for the detection of SNP TSC0042452
gtagaatagaga

SEQ ID NO: 342250 - DNA, 12 bp, Artificial Sequence
  Oligonucleotide primer for the detection of SNP TSC0042456
agattgtggaaa

SEQ ID NO: 342251 - DNA, 12 bp, Artificial Sequence
  Oligonucleotide primer for the detection of SNP TSC0042457
caataatcttcc

SEQ ID NO: 342252 - DNA, 12 bp, Artificial Sequence
  Oligonucleotide primer for the detection of SNP TSC0042457
ttgtgtagtttg

SEQ ID NO: 342253 - DNA, 12 bp, Artificial Sequence
  Oligonucleotide primer for the detection of SNP TSC0007271
attatatttagt

SEQ ID NO: 342254 - DNA, 12 bp, Artificial Sequence
  Oligonucleotide primer for the detection of SNP TSC0007272
atcaacatataa

SEQ ID NO: 342255 - DNA, 12 bp, Artificial Sequence
  Oligonucleotide primer for the detection of SNP TSC0007272
tatttggggtat

SEQ ID NO: 342256 - DNA, 12 bp, Artificial Sequence
  Oligonucleotide primer for the detection of SNP TSC0007272
tacttaaaacat

SEQ ID NO: 342257 - DNA, 12 bp, Artificial Sequence
  Oligonucleotide primer for the detection of SNP TSC0007273
tttaactaaaca

SEQ ID NO: 342258 - DNA, 12 bp, Artificial Sequence
  Oligonucleotide primer for the detection of SNP TSC0007273
gtgagtttgtag

SEQ ID NO: 342259 - DNA, 12 bp, Artificial Sequence
  Oligonucleotide primer for the detection of SNP TSC0007273
ataaatttacaa

SEQ ID NO: 342260 - DNA, 12 bp, Artificial Sequence
  Oligonucleotide primer for the detection of SNP TSC0007273
tttaattgggta

SEQ ID NO: 342261 - DNA, 12 bp, Artificial Sequence
  Oligonucleotide primer for the detection of SNP TSC0007274
caaacaatataa

SEQ ID NO: 342262 - DNA, 12 bp, Artificial Sequence
  Oligonucleotide primer for the detection of SNP TSC0007274
cgaacaatataa

SEQ ID NO: 342263 - DNA, 12 bp, Artificial Sequence
  Oligonucleotide primer for the detection of SNP TSC0042458
ctaaacaacaaa

SEQ ID NO: 342264 - DNA, 12 bp, Artificial Sequence
  Oligonucleotide primer for the detection of SNP TSC0042458
agataaggtttt

SEQ ID NO: 342265 - DNA, 12 bp, Artificial Sequence
  Oligonucleotide primer for the detection of SNP TSC0042460
aaacaacccaat

SEQ ID NO: 342266 - DNA, 12 bp, Artificial Sequence
  Oligonucleotide primer for the detection of SNP TSC0006805
aaaccattataa

SEQ ID NO: 342267 - DNA, 12 bp, Artificial Sequence
  Oligonucleotide primer for the detection of SNP TSC0006805
aacctctcacct

SEQ ID NO: 342268 - DNA, 12 bp, Artificial Sequence
  Oligonucleotide primer for the detection of SNP TSC0006805
attattgtggtt

SEQ ID NO: 342269 - DNA, 12 bp, Artificial Sequence
  Oligonucleotide primer for the detection of SNP TSC0006806
ctctacaatata

SEQ ID NO: 342270 - DNA, 12 bp, Artificial Sequence
  Oligonucleotide primer for the detection of SNP TSC0006806
gagaggttggga

SEQ ID NO: 342271 - DNA, 12 bp, Artificial Sequence
  Oligonucleotide primer for the detection of SNP TSC0042464
tctatcttaatc

SEQ ID NO: 342272 - DNA, 12 bp, Artificial Sequence
  Oligonucleotide primer for the detection of SNP TSC0042465
ttaaaaaccaac

SEQ ID NO: 342273 - DNA, 12 bp, Artificial Sequence
  Oligonucleotide primer for the detection of SNP TSC0042465
tattatattggg

SEQ ID NO: 342274 - DNA, 12 bp, Artificial Sequence
  Oligonucleotide primer for the detection of SNP TSC0042466
ttataaactacc

SEQ ID NO: 342275 - DNA, 12 bp, Artificial Sequence
  Oligonucleotide primer for the detection of SNP TSC0042466
aaatattgtaaa

SEQ ID NO: 342276 - DNA, 12 bp, Artificial Sequence
  Oligonucleotide primer for the detection of SNP TSC0042466
aaatatcgtaaa

SEQ ID NO: 342277 - DNA, 12 bp, Artificial Sequence
  Oligonucleotide primer for the detection of SNP TSC0042467
aaaattgattaa

SEQ ID NO: 342278 - DNA, 12 bp, Artificial Sequence
  Oligonucleotide primer for the detection of SNP TSC0042468
attatacttttt

SEQ ID NO: 342279 - DNA, 12 bp, Artificial Sequence
  Oligonucleotide primer for the detection of SNP TSC0042468
ttgatgattgaa

SEQ ID NO: 342280 - DNA, 12 bp, Artificial Sequence
  Oligonucleotide primer for the detection of SNP TSC0042468
taataactaaaa

SEQ ID NO: 342281 - DNA, 12 bp, Artificial Sequence
  Oligonucleotide primer for the detection of SNP TSC0042469
tattacaatata

SEQ ID NO: 342282 - DNA, 12 bp, Artificial Sequence
  Oligonucleotide primer for the detection of SNP TSC0042472
taaaagtttgtg

SEQ ID NO: 342283 - DNA, 12 bp, Artificial Sequence
  Oligonucleotide primer for the detection of SNP TSC0042473
atcaataccaac

SEQ ID NO: 342284 - DNA, 12 bp, Artificial Sequence
  Oligonucleotide primer for the detection of SNP TSC0042473
gttaaattaagg

SEQ ID NO: 342285 - DNA, 12 bp, Artificial Sequence
  Oligonucleotide primer for the detection of SNP TSC0042474
ccttcaaataat

SEQ ID NO: 342286 - DNA, 12 bp, Artificial Sequence
  Oligonucleotide primer for the detection of SNP TSC0042474
gtttagattata

SEQ ID NO: 342287 - DNA, 12 bp, Artificial Sequence
  Oligonucleotide primer for the detection of SNP TSC0042474
atccaaatcata

SEQ ID NO: 342288 - DNA, 12 bp, Artificial Sequence
  Oligonucleotide primer for the detection of SNP TSC0042474
tttttaagtaat

SEQ ID NO: 342289 - DNA, 12 bp, Artificial Sequence
  Oligonucleotide primer for the detection of SNP TSC0042475
ttaacctacctt

SEQ ID NO: 342290 - DNA, 12 bp, Artificial Sequence
  Oligonucleotide primer for the detection of SNP TSC0042475
aaaggaatttga

SEQ ID NO: 342291 - DNA, 12 bp, Artificial Sequence
  Oligonucleotide primer for the detection of SNP TSC0042479
aaacttaatcct

SEQ ID NO: 342292 - DNA, 12 bp, Artificial Sequence
  Oligonucleotide primer for the detection of SNP TSC0042479
gtggaaggtaag

SEQ ID NO: 342293 - DNA, 12 bp, Artificial Sequence
  Oligonucleotide primer for the detection of SNP TSC0042479
gcggaaggtaag

SEQ ID NO: 342294 - DNA, 12 bp, Artificial Sequence
  Oligonucleotide primer for the detection of SNP TSC0042480
attttaaacata

SEQ ID NO: 342295 - DNA, 12 bp, Artificial Sequence
  Oligonucleotide primer for the detection of SNP TSC0042480
atctctaatttc

SEQ ID NO: 342296 - DNA, 12 bp, Artificial Sequence
  Oligonucleotide primer for the detection of SNP TSC0042480
attttaaatata

SEQ ID NO: 342297 - DNA, 12 bp, Artificial Sequence
  Oligonucleotide primer for the detection of SNP TSC0042482
ctaaattctaac

SEQ ID NO: 342298 - DNA, 12 bp, Artificial Sequence
  Oligonucleotide primer for the detection of SNP TSC0042482
attttagttagg

SEQ ID NO: 342299 - DNA, 12 bp, Artificial Sequence
  Oligonucleotide primer for the detection of SNP TSC0006031
attatactcttc

SEQ ID NO: 342300 - DNA, 12 bp, Artificial Sequence
  Oligonucleotide primer for the detection of SNP TSC0006031
ttattaattaaa

SEQ ID NO: 342301 - DNA, 12 bp, Artificial Sequence
  Oligonucleotide primer for the detection of SNP TSC0009903
tacaaaatttcc

SEQ ID NO: 342302 - DNA, 12 bp, Artificial Sequence
  Oligonucleotide primer for the detection of SNP TSC0042487
acaatctcctta

SEQ ID NO: 342303 - DNA, 12 bp, Artificial Sequence
  Oligonucleotide primer for the detection of SNP TSC0042487
tagtagtgtttt

SEQ ID NO: 342304 - DNA, 12 bp, Artificial Sequence
  Oligonucleotide primer for the detection of SNP TSC0042487
tagtagcgtttt

SEQ ID NO: 342305 - DNA, 12 bp, Artificial Sequence
  Oligonucleotide primer for the detection of SNP TSC0042487
caataacattct

SEQ ID NO: 342306 - DNA, 12 bp, Artificial Sequence
  Oligonucleotide primer for the detection of SNP TSC0042487
caataacgttct

SEQ ID NO: 342307 - DNA, 12 bp, Artificial Sequence
  Oligonucleotide primer for the detection of SNP TSC0042488
ctcataccaatc

SEQ ID NO: 342308 - DNA, 12 bp, Artificial Sequence
  Oligonucleotide primer for the detection of SNP TSC0042488
ctcgtaccaatc

SEQ ID NO: 342309 - DNA, 12 bp, Artificial Sequence
  Oligonucleotide primer for the detection of SNP TSC0042488
tgtttgatatga

SEQ ID NO: 342310 - DNA, 12 bp, Artificial Sequence
  Oligonucleotide primer for the detection of SNP TSC0042489
tcctaatcattt

SEQ ID NO: 342311 - DNA, 12 bp, Artificial Sequence
  Oligonucleotide primer for the detection of SNP TSC0042489
aataaatttttt

SEQ ID NO: 342312 - DNA, 12 bp, Artificial Sequence
  Oligonucleotide primer for the detection of SNP TSC0042489
ttttgattattt

SEQ ID NO: 342313 - DNA, 12 bp, Artificial Sequence
  Oligonucleotide primer for the detection of SNP TSC0007298
acaaaaaccaac

SEQ ID NO: 342314 - DNA, 12 bp, Artificial Sequence
  Oligonucleotide primer for the detection of SNP TSC0007298
tttagtgaatat

SEQ ID NO: 342315 - DNA, 12 bp, Artificial Sequence
  Oligonucleotide primer for the detection of SNP TSC0007298
atagagattaat

SEQ ID NO: 342316 - DNA, 12 bp, Artificial Sequence
  Oligonucleotide primer for the detection of SNP TSC0042491
atactaaaaaca

SEQ ID NO: 342317 - DNA, 12 bp, Artificial Sequence
  Oligonucleotide primer for the detection of SNP TSC0042491
aggattaaatgt

SEQ ID NO: 342318 - DNA, 12 bp, Artificial Sequence
  Oligonucleotide primer for the detection of SNP TSC0042491
tattaaagatat

SEQ ID NO: 342319 - DNA, 12 bp, Artificial Sequence
  Oligonucleotide primer for the detection of SNP TSC0008487
accttacttccc

SEQ ID NO: 342320 - DNA, 12 bp, Artificial Sequence
  Oligonucleotide primer for the detection of SNP TSC0008487
ttatggtagaag

SEQ ID NO: 342321 - DNA, 12 bp, Artificial Sequence
  Oligonucleotide primer for the detection of SNP TSC0010807
agtggattatat

SEQ ID NO: 342322 - DNA, 12 bp, Artificial Sequence
  Oligonucleotide primer for the detection of SNP TSC0010807
ataaattacaca

SEQ ID NO: 342323 - DNA, 12 bp, Artificial Sequence
  Oligonucleotide primer for the detection of SNP TSC0010807
tgagaaattttg

SEQ ID NO: 342324 - DNA, 12 bp, Artificial Sequence
  Oligonucleotide primer for the detection of SNP TSC0010808
ctaaaaacccca

SEQ ID NO: 342325 - DNA, 12 bp, Artificial Sequence
  Oligonucleotide primer for the detection of SNP TSC0010808
tcaacttcctcc

SEQ ID NO: 342326 - DNA, 12 bp, Artificial Sequence
  Oligonucleotide primer for the detection of SNP TSC0042496
aaaaactaatac

SEQ ID NO: 342327 - DNA, 12 bp, Artificial Sequence
  Oligonucleotide primer for the detection of SNP TSC0042496
atttagttatta

SEQ ID NO: 342328 - DNA, 12 bp, Artificial Sequence
  Oligonucleotide primer for the detection of SNP TSC0042500
aatttcctaata

SEQ ID NO: 342329 - DNA, 12 bp, Artificial Sequence
  Oligonucleotide primer for the detection of SNP TSC0042500
atttttagtgaa

SEQ ID NO: 342330 - DNA, 12 bp, Artificial Sequence
  Oligonucleotide primer for the detection of SNP TSC0042500
cctttaataaaa

SEQ ID NO: 342331 - DNA, 12 bp, Artificial Sequence
  Oligonucleotide primer for the detection of SNP TSC0042500
ttttttggtgtt

SEQ ID NO: 342332 - DNA, 12 bp, Artificial Sequence
  Oligonucleotide primer for the detection of SNP TSC0042500
ttttttggtgtc

SEQ ID NO: 342333 - DNA, 12 bp, Artificial Sequence
  Oligonucleotide primer for the detection of SNP TSC0042501
tactacctcttc

SEQ ID NO: 342334 - DNA, 12 bp, Artificial Sequence
  Oligonucleotide primer for the detection of SNP TSC0042501
ttgaagggtaga

SEQ ID NO: 342335 - DNA, 12 bp, Artificial Sequence
  Oligonucleotide primer for the detection of SNP TSC0007396
aaaaaacatctt

SEQ ID NO: 342336 - DNA, 12 bp, Artificial Sequence
  Oligonucleotide primer for the detection of SNP TSC0007396
tgtatgttgtta

SEQ ID NO: 342337 - DNA, 12 bp, Artificial Sequence
  Oligonucleotide primer for the detection of SNP TSC0007397
cttaaatatatt

SEQ ID NO: 342338 - DNA, 12 bp, Artificial Sequence
  Oligonucleotide primer for the detection of SNP TSC0007397
atataattatta

SEQ ID NO: 342339 - DNA, 12 bp, Artificial Sequence
  Oligonucleotide primer for the detection of SNP TSC0006180
ttaggaaaaaaa

SEQ ID NO: 342340 - DNA, 12 bp, Artificial Sequence
  Oligonucleotide primer for the detection of SNP TSC0042502
caaaaaaattaa

SEQ ID NO: 342341 - DNA, 12 bp, Artificial Sequence
  Oligonucleotide primer for the detection of SNP TSC0042502
tttgaggaagtt

SEQ ID NO: 342342 - DNA, 12 bp, Artificial Sequence
  Oligonucleotide primer for the detection of SNP TSC0042502
ttaaaaaaatca

SEQ ID NO: 342343 - DNA, 12 bp, Artificial Sequence
  Oligonucleotide primer for the detection of SNP TSC0042502
tatagaaaggtt

SEQ ID NO: 342344 - DNA, 12 bp, Artificial Sequence
  Oligonucleotide primer for the detection of SNP TSC0042503
taaaattgtttg

SEQ ID NO: 342345 - DNA, 12 bp, Artificial Sequence
  Oligonucleotide primer for the detection of SNP TSC0042504
aaccatattttc

SEQ ID NO: 342346 - DNA, 12 bp, Artificial Sequence
  Oligonucleotide primer for the detection of SNP TSC0042504
aaaaggaaaaaa

SEQ ID NO: 342347 - DNA, 12 bp, Artificial Sequence
  Oligonucleotide primer for the detection of SNP TSC0006993
aaattctaccct

SEQ ID NO: 342348 - DNA, 12 bp, Artificial Sequence
  Oligonucleotide primer for the detection of SNP TSC0006993
aggtttggagag

SEQ ID NO: 342349 - DNA, 12 bp, Artificial Sequence
  Oligonucleotide primer for the detection of SNP TSC0006994
ctctccaaacct

SEQ ID NO: 342350 - DNA, 12 bp, Artificial Sequence
  Oligonucleotide primer for the detection of SNP TSC0008613
gaaatagaatta

SEQ ID NO: 342351 - DNA, 12 bp, Artificial Sequence
  Oligonucleotide primer for the detection of SNP TSC0005745
gtttatgtttgg

SEQ ID NO: 342352 - DNA, 12 bp, Artificial Sequence
  Oligonucleotide primer for the detection of SNP TSC0005745
gtttacgtttgg

SEQ ID NO: 342353 - DNA, 12 bp, Artificial Sequence
  Oligonucleotide primer for the detection of SNP TSC0000342
tttcaaaacatt

SEQ ID NO: 342354 - DNA, 12 bp, Artificial Sequence
  Oligonucleotide primer for the detection of SNP TSC0000343
aaatcaaacact

SEQ ID NO: 342355 - DNA, 12 bp, Artificial Sequence
  Oligonucleotide primer for the detection of SNP TSC0000343
aaatcaaacgct

SEQ ID NO: 342356 - DNA, 12 bp, Artificial Sequence
  Oligonucleotide primer for the detection of SNP TSC0000343
tgttttagtttg

SEQ ID NO: 342357 - DNA, 12 bp, Artificial Sequence
  Oligonucleotide primer for the detection of SNP TSC0042505
catcctctaaaa

SEQ ID NO: 342358 - DNA, 12 bp, Artificial Sequence
  Oligonucleotide primer for the detection of SNP TSC0042505
tagttagtgagt

SEQ ID NO: 342359 - DNA, 12 bp, Artificial Sequence
  Oligonucleotide primer for the detection of SNP TSC0042505
caatcaataaat

SEQ ID NO: 342360 - DNA, 12 bp, Artificial Sequence
  Oligonucleotide primer for the detection of SNP TSC0042506
tatatacactta

SEQ ID NO: 342361 - DNA, 12 bp, Artificial Sequence
  Oligonucleotide primer for the detection of SNP TSC0042506
atgaaggtatat

SEQ ID NO: 342362 - DNA, 12 bp, Artificial Sequence
  Oligonucleotide primer for the detection of SNP TSC0042506
ataaaaacacac

SEQ ID NO: 342363 - DNA, 12 bp, Artificial Sequence
  Oligonucleotide primer for the detection of SNP TSC0042506
tgtgtgtatttg

SEQ ID NO: 342364 - DNA, 12 bp, Artificial Sequence
  Oligonucleotide primer for the detection of SNP TSC0042508
aaattacatcta

SEQ ID NO: 342365 - DNA, 12 bp, Artificial Sequence
  Oligonucleotide primer for the detection of SNP TSC0042508
agttgattttat

SEQ ID NO: 342366 - DNA, 12 bp, Artificial Sequence
  Oligonucleotide primer for the detection of SNP TSC0042508
aattaaccttat

SEQ ID NO: 342367 - DNA, 12 bp, Artificial Sequence
  Oligonucleotide primer for the detection of SNP TSC0042508
tgaattatattt

SEQ ID NO: 342368 - DNA, 12 bp, Artificial Sequence
  Oligonucleotide primer for the detection of SNP TSC0042509
actaaaactcct

SEQ ID NO: 342369 - DNA, 12 bp, Artificial Sequence
  Oligonucleotide primer for the detection of SNP TSC0042509
taaagttaagag

SEQ ID NO: 342370 - DNA, 12 bp, Artificial Sequence
  Oligonucleotide primer for the detection of SNP TSC0009070
ataaacaattct

SEQ ID NO: 342371 - DNA, 12 bp, Artificial Sequence
  Oligonucleotide primer for the detection of SNP TSC0007455
ttactctaacca

SEQ ID NO: 342372 - DNA, 12 bp, Artificial Sequence
  Oligonucleotide primer for the detection of SNP TSC0007455
tggtttttaaga

SEQ ID NO: 342373 - DNA, 12 bp, Artificial Sequence
  Oligonucleotide primer for the detection of SNP TSC0001573
gtatgttagtat

SEQ ID NO: 342374 - DNA, 12 bp, Artificial Sequence
  Oligonucleotide primer for the detection of SNP TSC0001573
acatatcaacat

SEQ ID NO: 342375 - DNA, 12 bp, Artificial Sequence
  Oligonucleotide primer for the detection of SNP TSC0001573
gatatttgataa

SEQ ID NO: 342376 - DNA, 12 bp, Artificial Sequence
  Oligonucleotide primer for the detection of SNP TSC0001574
atacttactccc

SEQ ID NO: 342377 - DNA, 12 bp, Artificial Sequence
  Oligonucleotide primer for the detection of SNP TSC0001574
atatagaggagg

SEQ ID NO: 342378 - DNA, 12 bp, Artificial Sequence
  Oligonucleotide primer for the detection of SNP TSC0042513
tcactctccaaa

SEQ ID NO: 342379 - DNA, 12 bp, Artificial Sequence
  Oligonucleotide primer for the detection of SNP TSC0042513
ggtagaagttat

SEQ ID NO: 342380 - DNA, 12 bp, Artificial Sequence
  Oligonucleotide primer for the detection of SNP TSC0042514
attctaaataat

SEQ ID NO: 342381 - DNA, 12 bp, Artificial Sequence
  Oligonucleotide primer for the detection of SNP TSC0042517
actaattcctcc

SEQ ID NO: 342382 - DNA, 12 bp, Artificial Sequence
  Oligonucleotide primer for the detection of SNP TSC0042517
tagaataagaga

SEQ ID NO: 342383 - DNA, 12 bp, Artificial Sequence
  Oligonucleotide primer for the detection of SNP TSC0042518
tcacaatctatt

SEQ ID NO: 342384 - DNA, 12 bp, Artificial Sequence
  Oligonucleotide primer for the detection of SNP TSC0042518
gttttattgtta

SEQ ID NO: 342385 - DNA, 12 bp, Artificial Sequence
  Oligonucleotide primer for the detection of SNP TSC0042518
gttttatcgtta

SEQ ID NO: 342386 - DNA, 12 bp, Artificial Sequence
  Oligonucleotide primer for the detection of SNP TSC0042519
tccactacttct

SEQ ID NO: 342387 - DNA, 12 bp, Artificial Sequence
  Oligonucleotide primer for the detection of SNP TSC0042519
atgttaaggtta

SEQ ID NO: 342388 - DNA, 12 bp, Artificial Sequence
  Oligonucleotide primer for the detection of SNP TSC0042520
caaatattctac

SEQ ID NO: 342389 - DNA, 12 bp, Artificial Sequence
  Oligonucleotide primer for the detection of SNP TSC0042520
tttagggttata

SEQ ID NO: 342390 - DNA, 12 bp, Artificial Sequence
  Oligonucleotide primer for the detection of SNP TSC0042520
taggtgttttgt

SEQ ID NO: 342391 - DNA, 12 bp, Artificial Sequence
  Oligonucleotide primer for the detection of SNP TSC0042525
taaaaactccca

SEQ ID NO: 342392 - DNA, 12 bp, Artificial Sequence
  Oligonucleotide primer for the detection of SNP TSC0042525
attttaatagat

SEQ ID NO: 342393 - DNA, 12 bp, Artificial Sequence
  Oligonucleotide primer for the detection of SNP TSC0042525
taagaattttta

SEQ ID NO: 342394 - DNA, 12 bp, Artificial Sequence
  Oligonucleotide primer for the detection of SNP TSC0042526
cttctatacttt

SEQ ID NO: 342395 - DNA, 12 bp, Artificial Sequence
  Oligonucleotide primer for the detection of SNP TSC0042527
aaattatccctc

SEQ ID NO: 342396 - DNA, 12 bp, Artificial Sequence
  Oligonucleotide primer for the detection of SNP TSC0042527
aaatggatgttg

SEQ ID NO: 342397 - DNA, 12 bp, Artificial Sequence
  Oligonucleotide primer for the detection of SNP TSC0042527
aaataaatatta

SEQ ID NO: 342398 - DNA, 12 bp, Artificial Sequence
  Oligonucleotide primer for the detection of SNP TSC0042527
gaattgtttttt

SEQ ID NO: 342399 - DNA, 12 bp, Artificial Sequence
  Oligonucleotide primer for the detection of SNP TSC0042528
tatttttacaaa

SEQ ID NO: 342400 - DNA, 12 bp, Artificial Sequence
  Oligonucleotide primer for the detection of SNP TSC0042528
tcactaataata

SEQ ID NO: 342401 - DNA, 12 bp, Artificial Sequence
  Oligonucleotide primer for the detection of SNP TSC0042528
gtgtatttttat

SEQ ID NO: 342402 - DNA, 12 bp, Artificial Sequence
  Oligonucleotide primer for the detection of SNP TSC0042529
aaaaaggaaggt

SEQ ID NO: 342403 - DNA, 12 bp, Artificial Sequence
  Oligonucleotide primer for the detection of SNP TSC0042529
tgataataaaaa

SEQ ID NO: 342404 - DNA, 12 bp, Artificial Sequence
  Oligonucleotide primer for the detection of SNP TSC0042530
ctaataaataat

SEQ ID NO: 342405 - DNA, 12 bp, Artificial Sequence
  Oligonucleotide primer for the detection of SNP TSC0042530
gtgtatgtataa

SEQ ID NO: 342406 - DNA, 12 bp, Artificial Sequence
  Oligonucleotide primer for the detection of SNP TSC0042531
ccatttaatcta

SEQ ID NO: 342407 - DNA, 12 bp, Artificial Sequence
  Oligonucleotide primer for the detection of SNP TSC0042531
gagggatgtatt

SEQ ID NO: 342408 - DNA, 12 bp, Artificial Sequence
  Oligonucleotide primer for the detection of SNP TSC0042531
aaaaaatatatt

SEQ ID NO: 342409 - DNA, 12 bp, Artificial Sequence
  Oligonucleotide primer for the detection of SNP TSC0042532
catacttttata

SEQ ID NO: 342410 - DNA, 12 bp, Artificial Sequence
  Oligonucleotide primer for the detection of SNP TSC0042532
aggatttatttt

SEQ ID NO: 342411 - DNA, 12 bp, Artificial Sequence
  Oligonucleotide primer for the detection of SNP TSC0042532
aaaacccatttc

SEQ ID NO: 342412 - DNA, 12 bp, Artificial Sequence
  Oligonucleotide primer for the detection of SNP TSC0042532
tatatttttata

SEQ ID NO: 342413 - DNA, 12 bp, Artificial Sequence
  Oligonucleotide primer for the detection of SNP TSC0042533
aatcactacaca

SEQ ID NO: 342414 - DNA, 12 bp, Artificial Sequence
  Oligonucleotide primer for the detection of SNP TSC0042533
tttttggagaat

SEQ ID NO: 342415 - DNA, 12 bp, Artificial Sequence
  Oligonucleotide primer for the detection of SNP TSC0042533
ttcttaaaaaac

SEQ ID NO: 342416 - DNA, 12 bp, Artificial Sequence
  Oligonucleotide primer for the detection of SNP TSC0042533
agttattgtata

SEQ ID NO: 342417 - DNA, 12 bp, Artificial Sequence
  Oligonucleotide primer for the detection of SNP TSC0042534
ggttagatatag

SEQ ID NO: 342418 - DNA, 12 bp, Artificial Sequence
  Oligonucleotide primer for the detection of SNP TSC0042535
atacctattaca

SEQ ID NO: 342419 - DNA, 12 bp, Artificial Sequence
  Oligonucleotide primer for the detection of SNP TSC0042535
tttaaagttatt

SEQ ID NO: 342420 - DNA, 12 bp, Artificial Sequence
  Oligonucleotide primer for the detection of SNP TSC0042535
ctcaaaactact

SEQ ID NO: 342421 - DNA, 12 bp, Artificial Sequence
  Oligonucleotide primer for the detection of SNP TSC0042535
atatttattgta

SEQ ID NO: 342422 - DNA, 12 bp, Artificial Sequence
  Oligonucleotide primer for the detection of SNP TSC0042536
acccaaataatt

SEQ ID NO: 342423 - DNA, 12 bp, Artificial Sequence
  Oligonucleotide primer for the detection of SNP TSC0042536
gaggaaaaagaa

SEQ ID NO: 342424 - DNA, 12 bp, Artificial Sequence
  Oligonucleotide primer for the detection of SNP TSC0042537
ctccttaaaact

SEQ ID NO: 342425 - DNA, 12 bp, Artificial Sequence
  Oligonucleotide primer for the detection of SNP TSC0042538
caattctcctac

SEQ ID NO: 342426 - DNA, 12 bp, Artificial Sequence
  Oligonucleotide primer for the detection of SNP TSC0042538
tttagaggttga

SEQ ID NO: 342427 - DNA, 12 bp, Artificial Sequence
  Oligonucleotide primer for the detection of SNP TSC0042539
cttaaaaaatac

SEQ ID NO: 342428 - DNA, 12 bp, Artificial Sequence
  Oligonucleotide primer for the detection of SNP TSC0042539
acccttctatta

SEQ ID NO: 342429 - DNA, 12 bp, Artificial Sequence
  Oligonucleotide primer for the detection of SNP TSC0042539
tttggaaggtgt

SEQ ID NO: 342430 - DNA, 12 bp, Artificial Sequence
  Oligonucleotide primer for the detection of SNP TSC0042540
tattgtaattgt

SEQ ID NO: 342431 - DNA, 12 bp, Artificial Sequence
  Oligonucleotide primer for the detection of SNP TSC0042540
tattgtaatcgt

SEQ ID NO: 342432 - DNA, 12 bp, Artificial Sequence
  Oligonucleotide primer for the detection of SNP TSC0042540
tactataaccac

SEQ ID NO: 342433 - DNA, 12 bp, Artificial Sequence
  Oligonucleotide primer for the detection of SNP TSC0042540
tactataaccgc

SEQ ID NO: 342434 - DNA, 12 bp, Artificial Sequence
  Oligonucleotide primer for the detection of SNP TSC0042540
tgaatagagttg

SEQ ID NO: 342435 - DNA, 12 bp, Artificial Sequence
  Oligonucleotide primer for the detection of SNP TSC0042543
ccactcacatta

SEQ ID NO: 342436 - DNA, 12 bp, Artificial Sequence
  Oligonucleotide primer for the detection of SNP TSC0042543
ttcggttatttt

SEQ ID NO: 342437 - DNA, 12 bp, Artificial Sequence
  Oligonucleotide primer for the detection of SNP TSC0042543
ttcaaccatttc

SEQ ID NO: 342438 - DNA, 12 bp, Artificial Sequence
  Oligonucleotide primer for the detection of SNP TSC0042543
ttcgaccatttc

SEQ ID NO: 342439 - DNA, 12 bp, Artificial Sequence
  Oligonucleotide primer for the detection of SNP TSC0042544
acctcaaaacat

SEQ ID NO: 342440 - DNA, 12 bp, Artificial Sequence
  Oligonucleotide primer for the detection of SNP TSC0042544
gtaaagtattta

SEQ ID NO: 342441 - DNA, 12 bp, Artificial Sequence
  Oligonucleotide primer for the detection of SNP TSC0042546
agagaattattt

SEQ ID NO: 342442 - DNA, 12 bp, Artificial Sequence
  Oligonucleotide primer for the detection of SNP TSC0042547
ttccccaactaa

SEQ ID NO: 342443 - DNA, 12 bp, Artificial Sequence
  Oligonucleotide primer for the detection of SNP TSC0042547
aagagatttatt

SEQ ID NO: 342444 - DNA, 12 bp, Artificial Sequence
  Oligonucleotide primer for the detection of SNP TSC0042548
aatagaagtgta

SEQ ID NO: 342445 - DNA, 12 bp, Artificial Sequence
  Oligonucleotide primer for the detection of SNP TSC0042548
aatagaagcgta

SEQ ID NO: 342446 - DNA, 12 bp, Artificial Sequence
  Oligonucleotide primer for the detection of SNP TSC0042549
actcccaatttt

SEQ ID NO: 342447 - DNA, 12 bp, Artificial Sequence
  Oligonucleotide primer for the detection of SNP TSC0042549
gaaatgttgagg

SEQ ID NO: 342448 - DNA, 12 bp, Artificial Sequence
  Oligonucleotide primer for the detection of SNP TSC0042550
cactatattcac

SEQ ID NO: 342449 - DNA, 12 bp, Artificial Sequence
  Oligonucleotide primer for the detection of SNP TSC0042550
atttaaaagaag

SEQ ID NO: 342450 - DNA, 12 bp, Artificial Sequence
  Oligonucleotide primer for the detection of SNP TSC0042551
aactacccactt

SEQ ID NO: 342451 - DNA, 12 bp, Artificial Sequence
  Oligonucleotide primer for the detection of SNP TSC0042551
aagtaggagaag

SEQ ID NO: 342452 - DNA, 12 bp, Artificial Sequence
  Oligonucleotide primer for the detection of SNP TSC0005014
aaatttttcaaa

SEQ ID NO: 342453 - DNA, 12 bp, Artificial Sequence
  Oligonucleotide primer for the detection of SNP TSC0005014
tctcttaccttc

SEQ ID NO: 342454 - DNA, 12 bp, Artificial Sequence
  Oligonucleotide primer for the detection of SNP TSC0005014
ggattttttagg

SEQ ID NO: 342455 - DNA, 12 bp, Artificial Sequence
  Oligonucleotide primer for the detection of SNP TSC0005015
cacctcctatct

SEQ ID NO: 342456 - DNA, 12 bp, Artificial Sequence
  Oligonucleotide primer for the detection of SNP TSC0005015
ttaaggaatggg

SEQ ID NO: 342457 - DNA, 12 bp, Artificial Sequence
  Oligonucleotide primer for the detection of SNP TSC0005015
ttaaggaacggg

SEQ ID NO: 342458 - DNA, 12 bp, Artificial Sequence
  Oligonucleotide primer for the detection of SNP TSC0042553
aatattaatcac

SEQ ID NO: 342459 - DNA, 12 bp, Artificial Sequence
  Oligonucleotide primer for the detection of SNP TSC0042553
agttaaaggaaa

SEQ ID NO: 342460 - DNA, 12 bp, Artificial Sequence
  Oligonucleotide primer for the detection of SNP TSC0042554
aactctaaatat

SEQ ID NO: 342461 - DNA, 12 bp, Artificial Sequence
  Oligonucleotide primer for the detection of SNP TSC0042554
aagagagaaatg

SEQ ID NO: 342462 - DNA, 12 bp, Artificial Sequence
  Oligonucleotide primer for the detection of SNP TSC0042556
tctctactaaaa

SEQ ID NO: 342463 - DNA, 12 bp, Artificial Sequence
  Oligonucleotide primer for the detection of SNP TSC0042557
cctaacatttca

SEQ ID NO: 342464 - DNA, 12 bp, Artificial Sequence
  Oligonucleotide primer for the detection of SNP TSC0042557
ggatttttagtt

SEQ ID NO: 342465 - DNA, 12 bp, Artificial Sequence
  Oligonucleotide primer for the detection of SNP TSC0042557
aaacctccaatc

SEQ ID NO: 342466 - DNA, 12 bp, Artificial Sequence
  Oligonucleotide primer for the detection of SNP TSC0042558
ttaaaaataaac

SEQ ID NO: 342467 - DNA, 12 bp, Artificial Sequence
  Oligonucleotide primer for the detection of SNP TSC0042558
gattattaataa

SEQ ID NO: 342468 - DNA, 12 bp, Artificial Sequence
  Oligonucleotide primer for the detection of SNP TSC0042559
tcaaaatataat

SEQ ID NO: 342469 - DNA, 12 bp, Artificial Sequence
  Oligonucleotide primer for the detection of SNP TSC0042559
ttgtttttagaa

SEQ ID NO: 342470 - DNA, 12 bp, Artificial Sequence
  Oligonucleotide primer for the detection of SNP TSC0042562
atccaatccaat

SEQ ID NO: 342471 - DNA, 12 bp, Artificial Sequence
  Oligonucleotide primer for the detection of SNP TSC0042562
gtattttagtgg

SEQ ID NO: 342472 - DNA, 12 bp, Artificial Sequence
  Oligonucleotide primer for the detection of SNP TSC0042564
tatattctaaca

SEQ ID NO: 342473 - DNA, 12 bp, Artificial Sequence
  Oligonucleotide primer for the detection of SNP TSC0042564
agaatttggatt

SEQ ID NO: 342474 - DNA, 12 bp, Artificial Sequence
  Oligonucleotide primer for the detection of SNP TSC0042564
aaatttaaacta

SEQ ID NO: 342475 - DNA, 12 bp, Artificial Sequence
  Oligonucleotide primer for the detection of SNP TSC0042564
gtgttttggtat

SEQ ID NO: 342476 - DNA, 12 bp, Artificial Sequence
  Oligonucleotide primer for the detection of SNP TSC0042565
tacaataaaata

SEQ ID NO: 342477 - DNA, 12 bp, Artificial Sequence
  Oligonucleotide primer for the detection of SNP TSC0042565
actattctcatt

SEQ ID NO: 342478 - DNA, 12 bp, Artificial Sequence
  Oligonucleotide primer for the detection of SNP TSC0042565
tataatagaata

SEQ ID NO: 342479 - DNA, 12 bp, Artificial Sequence
  Oligonucleotide primer for the detection of SNP TSC0042566
aaaatatacaac

SEQ ID NO: 342480 - DNA, 12 bp, Artificial Sequence
  Oligonucleotide primer for the detection of SNP TSC0042566
ttgatttaatta

SEQ ID NO: 342481 - DNA, 12 bp, Artificial Sequence
  Oligonucleotide primer for the detection of SNP TSC0042566
ttaacccaatta

SEQ ID NO: 342482 - DNA, 12 bp, Artificial Sequence
  Oligonucleotide primer for the detection of SNP TSC0042566
gggatgtataat

SEQ ID NO: 342483 - DNA, 12 bp, Artificial Sequence
  Oligonucleotide primer for the detection of SNP TSC0042567
attacatattat

SEQ ID NO: 342484 - DNA, 12 bp, Artificial Sequence
  Oligonukleotid-Primer
attacgtattat

SEQ ID NO: 342485 - DNA, 12 bp, Artificial Sequence
  Oligonucleotide primer for the detection of SNP TSC0042567
ttgtttttggga

SEQ ID NO: 342486 - DNA, 12 bp, Artificial Sequence
  Oligonucleotide primer for the detection of SNP TSC0008411
ctataaacacat

SEQ ID NO: 342487 - DNA, 12 bp, Artificial Sequence
  Oligonucleotide primer for the detection of SNP TSC0008411
tttatttgtata

SEQ ID NO: 342488 - DNA, 12 bp, Artificial Sequence
  Oligonukleotid-Primer
atcaacaaatcc

SEQ ID NO: 342489 - DNA, 12 bp, Artificial Sequence
  Oligonucleotide primer for the detection of SNP TSC0008412
aaaaaaaaagta

SEQ ID NO: 342490 - DNA, 12 bp, Artificial Sequence
  Oligonucleotide primer for the detection of SNP TSC0008413
ctaaacacatac

SEQ ID NO: 342491 - DNA, 12 bp, Artificial Sequence
  Oligonucleotide primer for the detection of SNP TSC0008413
agttttgggagg

SEQ ID NO: 342492 - DNA, 12 bp, Artificial Sequence
  Oligonukleotid-Primer
ctacctacctta

SEQ ID NO: 342493 - DNA, 12 bp, Artificial Sequence
  Oligonucleotide primer for the detection of SNP TSC0007598
taatttgtaagt

SEQ ID NO: 342494 - DNA, 12 bp, Artificial Sequence
  Oligonucleotide primer for the detection of SNP TSC0007598
caacttacaaac

SEQ ID NO: 342495 - DNA, 12 bp, Artificial Sequence
  Oligonucleotide primer for the detection of SNP TSC0042568
aataaaccaaac

SEQ ID NO: 342496 - DNA, 12 bp, Artificial Sequence
  Oligonucleotide primer for the detection of SNP TSC0042568
aataaaccgaac

SEQ ID NO: 342497 - DNA, 12 bp, Artificial Sequence
  Oligonucleotide primer for the detection of SNP TSC0042568
aataggttgggt

SEQ ID NO: 342498 - DNA, 12 bp, Artificial Sequence
  Oligonucleotide primer for the detection of SNP TSC0042568
aataggtcgggt

SEQ ID NO: 342499 - DNA, 12 bp, Artificial Sequence
  Oligonucleotide primer for the detection of SNP TSC0042569
taaacactttac

SEQ ID NO: 342500 - DNA, 12 bp, Artificial Sequence
  Oligonucleotide primer for the detection of SNP TSC0042569
attttgttgtat

SEQ ID NO: 342501 - DNA, 12 bp, Artificial Sequence
  Oligonucleotide primer for the detection of SNP TSC0042569
tcctattacaca

SEQ ID NO: 342502 - DNA, 12 bp, Artificial Sequence
  Oligonucleotide primer for the detection of SNP TSC0042570
ttaggaggttgg

SEQ ID NO: 342503 - DNA, 12 bp, Artificial Sequence
  Oligonucleotide primer for the detection of SNP TSC0042571
tgggaatagttt

SEQ ID NO: 342504 - DNA, 12 bp, Artificial Sequence
  Oligonucleotide primer for the detection of SNP TSC0042571
agaaaattgaat

SEQ ID NO: 342505 - DNA, 12 bp, Artificial Sequence
  Oligonucleotide primer for the detection of SNP TSC0042572
aaaataatttat

SEQ ID NO: 342506 - DNA, 12 bp, Artificial Sequence
  Oligonucleotide primer for the detection of SNP TSC0042574
atatacactaca

SEQ ID NO: 342507 - DNA, 12 bp, Artificial Sequence
  Oligonucleotide primer for the detection of SNP TSC0042574
tgaatgaatatt

SEQ ID NO: 342508 - DNA, 12 bp, Artificial Sequence
  Oligonucleotide primer for the detection of SNP TSC0042575
actctaacaaat

SEQ ID NO: 342509 - DNA, 12 bp, Artificial Sequence
  Oligonucleotide primer for the detection of SNP TSC0042575
ttgattttattg

SEQ ID NO: 342510 - DNA, 12 bp, Artificial Sequence
  Oligonucleotide primer for the detection of SNP TSC0042576
atcactaaaaaa

SEQ ID NO: 342511 - DNA, 12 bp, Artificial Sequence
  Oligonucleotide primer for the detection of SNP TSC0042576
atgtattataat

SEQ ID NO: 342512 - DNA, 12 bp, Artificial Sequence
  Oligonucleotide primer for the detection of SNP TSC0042576
atataccataat

SEQ ID NO: 342513 - DNA, 12 bp, Artificial Sequence
  Oligonucleotide primer for the detection of SNP TSC0042576
gttattgaaaag

SEQ ID NO: 342514 - DNA, 12 bp, Artificial Sequence
  Oligonucleotide primer for the detection of SNP TSC0042577
tagagaagtgat

SEQ ID NO: 342515 - DNA, 12 bp, Artificial Sequence
  Oligonucleotide primer for the detection of SNP TSC0042577
tagagaagcgat

SEQ ID NO: 342516 - DNA, 12 bp, Artificial Sequence
  Oligonucleotide primer for the detection of SNP TSC0042577
agaggataaaaa

SEQ ID NO: 342517 - DNA, 12 bp, Artificial Sequence
  Oligonucleotide primer for the detection of SNP TSC0042583
tataaacacaca

SEQ ID NO: 342518 - DNA, 12 bp, Artificial Sequence
  Oligonucleotide primer for the detection of SNP TSC0042583
aggtaaggttat

SEQ ID NO: 342519 - DNA, 12 bp, Artificial Sequence
  Oligonucleotide primer for the detection of SNP TSC0042584
aatttatatgta

SEQ ID NO: 342520 - DNA, 12 bp, Artificial Sequence
  Oligonucleotide primer for the detection of SNP TSC0042584
aattcatatata

SEQ ID NO: 342521 - DNA, 12 bp, Artificial Sequence
  Oligonucleotide primer for the detection of SNP TSC0042584
tgtatttgttgt

SEQ ID NO: 342522 - DNA, 12 bp, Artificial Sequence
  Oligonucleotide primer for the detection of SNP TSC0042585
tccttcaactat

SEQ ID NO: 342523 - DNA, 12 bp, Artificial Sequence
  Oligonucleotide primer for the detection of SNP TSC0042585
aaagaaaattta

SEQ ID NO: 342524 - DNA, 12 bp, Artificial Sequence
  Oligonucleotide primer for the detection of SNP TSC0005562
tatataccaaaa

SEQ ID NO: 342525 - DNA, 12 bp, Artificial Sequence
  Oligonucleotide primer for the detection of SNP TSC0005562
ttttttgtaagt

SEQ ID NO: 342526 - DNA, 12 bp, Artificial Sequence
  Oligonucleotide primer for the detection of SNP TSC0005562
tttttcgtaagt

SEQ ID NO: 342527 - DNA, 12 bp, Artificial Sequence
  Oligonucleotide primer for the detection of SNP TSC0005562
ttttttgtaagc

SEQ ID NO: 342528 - DNA, 12 bp, Artificial Sequence
  Oligonucleotide primer for the detection of SNP TSC0005562
tttttcgtaagc

SEQ ID NO: 342529 - DNA, 12 bp, Artificial Sequence
  Oligonucleotide primer for the detection of SNP TSC0005562
atttcccacaaa

SEQ ID NO: 342530 - DNA, 12 bp, Artificial Sequence
  Oligonucleotide primer for the detection of SNP TSC0005562
atttcccgcaaa

SEQ ID NO: 342531 - DNA, 12 bp, Artificial Sequence
  Oligonucleotide primer for the detection of SNP TSC0005562
gattgtatatta

SEQ ID NO: 342532 - DNA, 12 bp, Artificial Sequence
  Oligonucleotide primer for the detection of SNP TSC0042589
gggagtgagtta

SEQ ID NO: 342533 - DNA, 12 bp, Artificial Sequence
  Oligonucleotide primer for the detection of SNP TSC0042590
acaccccaaatc

SEQ ID NO: 342534 - DNA, 12 bp, Artificial Sequence
  Oligonucleotide primer for the detection of SNP TSC0042590
acaccccgaatc

SEQ ID NO: 342535 - DNA, 12 bp, Artificial Sequence
  Oligonucleotide primer for the detection of SNP TSC0042590
taagtgtttaga

SEQ ID NO: 342536 - DNA, 12 bp, Artificial Sequence
  Oligonucleotide primer for the detection of SNP TSC0042591
actacacaaaac

SEQ ID NO: 342537 - DNA, 12 bp, Artificial Sequence
  Oligonucleotide primer for the detection of SNP TSC0042591
tataaaagttag

SEQ ID NO: 342538 - DNA, 12 bp, Artificial Sequence
  Oligonucleotide primer for the detection of SNP TSC0042592
cacacaatcttt

SEQ ID NO: 342539 - DNA, 12 bp, Artificial Sequence
  Oligonucleotide primer for the detection of SNP TSC0042592
cacgcaatcttt

SEQ ID NO: 342540 - DNA, 12 bp, Artificial Sequence
  Oligonucleotide primer for the detection of SNP TSC0042592
aaataaatttta

SEQ ID NO: 342541 - DNA, 12 bp, Artificial Sequence
  Oligonucleotide primer for the detection of SNP TSC0042592
aaacaaacctca

SEQ ID NO: 342542 - DNA, 12 bp, Artificial Sequence
  Oligonucleotide primer for the detection of SNP TSC0042592
tatgtaattttt

SEQ ID NO: 342543 - DNA, 12 bp, Artificial Sequence
  Oligonucleotide primer for the detection of SNP TSC0042592
tacgtaattttt

SEQ ID NO: 342544 - DNA, 12 bp, Artificial Sequence
  Oligonucleotide primer for the detection of SNP TSC0042593
aacccatatcat

SEQ ID NO: 342545 - DNA, 12 bp, Artificial Sequence
  Oligonucleotide primer for the detection of SNP TSC0042593
tggttaaatgtg

SEQ ID NO: 342546 - DNA, 12 bp, Artificial Sequence
  Oligonucleotide primer for the detection of SNP TSC0042594
caccattataat

SEQ ID NO: 342547 - DNA, 12 bp, Artificial Sequence
  unsure (3): Oligonucleotide primer for the detection of SNP TSC0042594
tgnttttgtatg

SEQ ID NO: 342548 - DNA, 12 bp, Artificial Sequence
  unsure (3): Oligonucleotide primer for the detection of SNP TSC0042594
cgnttttgtatg

SEQ ID NO: 342549 - DNA, 12 bp, Artificial Sequence
  Oligonucleotide primer for the detection of SNP TSC0042595
acaaataaaaat

SEQ ID NO: 342550 - DNA, 12 bp, Artificial Sequence
  Oligonucleotide primer for the detection of SNP TSC0042595
gtaagtatatat

SEQ ID NO: 342551 - DNA, 12 bp, Artificial Sequence
  Oligonucleotide primer for the detection of SNP TSC0042596
atgtatattata

SEQ ID NO: 342552 - DNA, 12 bp, Artificial Sequence
  Oligonucleotide primer for the detection of SNP TSC0042596
atacatattata

SEQ ID NO: 342553 - DNA, 12 bp, Artificial Sequence
  Oligonucleotide primer for the detection of SNP TSC0042596
gaagaatatagt

SEQ ID NO: 342554 - DNA, 12 bp, Artificial Sequence
  Oligonucleotide primer for the detection of SNP TSC0042597
ataaacctttta

SEQ ID NO: 342555 - DNA, 12 bp, Artificial Sequence
  Oligonucleotide primer for the detection of SNP TSC0042597
gtaaacctttta

SEQ ID NO: 342556 - DNA, 12 bp, Artificial Sequence
  Oligonucleotide primer for the detection of SNP TSC0042597
tgtgtaataaat

SEQ ID NO: 342557 - DNA, 12 bp, Artificial Sequence
  Oligonucleotide primer for the detection of SNP TSC0042597
tatataataaat

SEQ ID NO: 342558 - DNA, 12 bp, Artificial Sequence
  Oligonucleotide primer for the detection of SNP TSC0042597
gtaagttttttg

SEQ ID NO: 342559 - DNA, 12 bp, Artificial Sequence
  Oligonucleotide primer for the detection of SNP TSC0042601
aaataccctcta

SEQ ID NO: 342560 - DNA, 12 bp, Artificial Sequence
  Oligonucleotide primer for the detection of SNP TSC0042601
gggtatatttta

SEQ ID NO: 342561 - DNA, 12 bp, Artificial Sequence
  Oligonucleotide primer for the detection of SNP TSC0042601
aaacatacccca

SEQ ID NO: 342562 - DNA, 12 bp, Artificial Sequence
  Oligonucleotide primer for the detection of SNP TSC0042602
tctaataatact

SEQ ID NO: 342563 - DNA, 12 bp, Artificial Sequence
  Oligonucleotide primer for the detection of SNP TSC0042602
aattttatgatg

SEQ ID NO: 342564 - DNA, 12 bp, Artificial Sequence
  Oligonucleotide primer for the detection of SNP TSC0042605
atttaatattac

SEQ ID NO: 342565 - DNA, 12 bp, Artificial Sequence
  Oligonucleotide primer for the detection of SNP TSC0042605
agggaggattag

SEQ ID NO: 342566 - DNA, 12 bp, Artificial Sequence
  Oligonucleotide primer for the detection of SNP TSC0042606
ttaaacatctat

SEQ ID NO: 342567 - DNA, 12 bp, Artificial Sequence
  Oligonucleotide primer for the detection of SNP TSC0042606
ctatcctacatc

SEQ ID NO: 342568 - DNA, 12 bp, Artificial Sequence
  Oligonucleotide primer for the detection of SNP TSC0042606
ttgagtatttat

SEQ ID NO: 342569 - DNA, 12 bp, Artificial Sequence
  Oligonucleotide primer for the detection of SNP TSC0042607
tcctttctactt

SEQ ID NO: 342570 - DNA, 12 bp, Artificial Sequence
  Oligonucleotide primer for the detection of SNP TSC0042607
ccccttttacta

SEQ ID NO: 342571 - DNA, 12 bp, Artificial Sequence
  Oligonucleotide primer for the detection of SNP TSC0008832
actttctatatt

SEQ ID NO: 342572 - DNA, 12 bp, Artificial Sequence
  Oligonucleotide primer for the detection of SNP TSC0008832
tagtttatgtta

SEQ ID NO: 342573 - DNA, 12 bp, Artificial Sequence
  Oligonucleotide primer for the detection of SNP TSC0042608
aataatcctaca

SEQ ID NO: 342574 - DNA, 12 bp, Artificial Sequence
  Oligonucleotide primer for the detection of SNP TSC0042608
aataatcctacg

SEQ ID NO: 342575 - DNA, 12 bp, Artificial Sequence
  Oligonucleotide primer for the detection of SNP TSC0042608
aatgataggaga

SEQ ID NO: 342576 - DNA, 12 bp, Artificial Sequence
  Oligonucleotide primer for the detection of SNP TSC0042608
agtgattttgtg

SEQ ID NO: 342577 - DNA, 12 bp, Artificial Sequence
  Oligonucleotide primer for the detection of SNP TSC0042608
agtgattttgcg

SEQ ID NO: 342578 - DNA, 12 bp, Artificial Sequence
  Oligonucleotide primer for the detection of SNP TSC0042609
tttcatcaatat

SEQ ID NO: 342579 - DNA, 12 bp, Artificial Sequence
  Oligonucleotide primer for the detection of SNP TSC0042609
tatgttttataa

SEQ ID NO: 342580 - DNA, 12 bp, Artificial Sequence
  Oligonucleotide primer for the detection of SNP TSC0042610
tatcattccccc

SEQ ID NO: 342581 - DNA, 12 bp, Artificial Sequence
  Oligonucleotide primer for the detection of SNP TSC0042610
gggtttggggag

SEQ ID NO: 342582 - DNA, 12 bp, Artificial Sequence
  Oligonucleotide primer for the detection of SNP TSC0042610
gggttcggggag

SEQ ID NO: 342583 - DNA, 12 bp, Artificial Sequence
  Oligonucleotide primer for the detection of SNP TSC0042611
ctaattctaata

SEQ ID NO: 342584 - DNA, 12 bp, Artificial Sequence
  Oligonucleotide primer for the detection of SNP TSC0042611
gtggagataata

SEQ ID NO: 342585 - DNA, 12 bp, Artificial Sequence
  Oligonucleotide primer for the detection of SNP TSC0042611
tttgattttaat

SEQ ID NO: 342586 - DNA, 12 bp, Artificial Sequence
  Oligonucleotide primer for the detection of SNP TSC0042613
aataacactact

SEQ ID NO: 342587 - DNA, 12 bp, Artificial Sequence
  Oligonucleotide primer for the detection of SNP TSC0042613
aaaaagtgaata

SEQ ID NO: 342588 - DNA, 12 bp, Artificial Sequence
  Oligonucleotide primer for the detection of SNP TSC0042613
aataatattatt

SEQ ID NO: 342589 - DNA, 12 bp, Artificial Sequence
  Oligonucleotide primer for the detection of SNP TSC0010769
caacctaataac

SEQ ID NO: 342590 - DNA, 12 bp, Artificial Sequence
  Oligonucleotide primer for the detection of SNP TSC0010769
tgtgttttttag

SEQ ID NO: 342591 - DNA, 12 bp, Artificial Sequence
  Oligonucleotide primer for the detection of SNP TSC0010769
cgtgttttttag

SEQ ID NO: 342592 - DNA, 12 bp, Artificial Sequence
  Oligonucleotide primer for the detection of SNP TSC0010769
tgcgttttttag

SEQ ID NO: 342593 - DNA, 12 bp, Artificial Sequence
  Oligonukleotid-Primer
cgcgttttttag

SEQ ID NO: 342594 - DNA, 12 bp, Artificial Sequence
  Oligonucleotide primer for the detection of SNP TSC0042616
ctcattctataa

SEQ ID NO: 342595 - DNA, 12 bp, Artificial Sequence
  Oligonucleotide primer for the detection of SNP TSC0042616
gttttagggtgt

SEQ ID NO: 342596 - DNA, 12 bp, Artificial Sequence
  Oligonucleotide primer for the detection of SNP TSC0042616
actccaaaatat

SEQ ID NO: 342597 - DNA, 12 bp, Artificial Sequence
  Oligonucleotide primer for the detection of SNP TSC0042616
tttattttgtgg

SEQ ID NO: 342598 - DNA, 12 bp, Artificial Sequence
  Oligonucleotide primer for the detection of SNP TSC0042617
ttacttccccct

SEQ ID NO: 342599 - DNA, 12 bp, Artificial Sequence
  Oligonucleotide primer for the detection of SNP TSC0042617
tatggtggaagg

SEQ ID NO: 342600 - DNA, 12 bp, Artificial Sequence
  Oligonucleotide primer for the detection of SNP TSC0042618
actactctcaac

SEQ ID NO: 342601 - DNA, 12 bp, Artificial Sequence
  Oligonucleotide primer for the detection of SNP TSC0042618
aaagggaatttg

SEQ ID NO: 342602 - DNA, 12 bp, Artificial Sequence
  Oligonucleotide primer for the detection of SNP TSC0042619
atcttactaacc

SEQ ID NO: 342603 - DNA, 12 bp, Artificial Sequence
  Oligonucleotide primer for the detection of SNP TSC0042619
tagaaaagtgga

SEQ ID NO: 342604 - DNA, 12 bp, Artificial Sequence
  Oligonucleotide primer for the detection of SNP TSC0042620
actcttactatt

SEQ ID NO: 342605 - DNA, 12 bp, Artificial Sequence
  Oligonucleotide primer for the detection of SNP TSC0042620
aattttttgaaa

SEQ ID NO: 342606 - DNA, 12 bp, Artificial Sequence
  Oligonucleotide primer for the detection of SNP TSC0042621
atcatacaaaac

SEQ ID NO: 342607 - DNA, 12 bp, Artificial Sequence
  Oligonucleotide primer for the detection of SNP TSC0042621
ccctacctccaa

SEQ ID NO: 342608 - DNA, 12 bp, Artificial Sequence
  Oligonucleotide primer for the detection of SNP TSC0042621
attatgtaaggt

SEQ ID NO: 342609 - DNA, 12 bp, Artificial Sequence
  Oligonucleotide primer for the detection of SNP TSC0042623
ctcactatatta

SEQ ID NO: 342610 - DNA, 12 bp, Artificial Sequence
  Oligonucleotide primer for the detection of SNP TSC0042628
actaaaataact

SEQ ID NO: 342611 - DNA, 12 bp, Artificial Sequence
  Oligonucleotide primer for the detection of SNP TSC0042628
tgattgagttta

SEQ ID NO: 342612 - DNA, 12 bp, Artificial Sequence
  Oligonucleotide primer for the detection of SNP TSC0042628
tgatcgagttta

SEQ ID NO: 342613 - DNA, 12 bp, Artificial Sequence
  Oligonucleotide primer for the detection of SNP TSC0042628
taaccaaactta

SEQ ID NO: 342614 - DNA, 12 bp, Artificial Sequence
  Oligonucleotide primer for the detection of SNP TSC0042628
taaccgaactta

SEQ ID NO: 342615 - DNA, 12 bp, Artificial Sequence
  Oligonucleotide primer for the detection of SNP TSC0042628
gttaagatggtt

SEQ ID NO: 342616 - DNA, 12 bp, Artificial Sequence
  Oligonucleotide primer for the detection of SNP TSC0042629
ctatttcacata

SEQ ID NO: 342617 - DNA, 12 bp, Artificial Sequence
  Oligonucleotide primer for the detection of SNP TSC0042629
tttggggtgaag

SEQ ID NO: 342618 - DNA, 12 bp, Artificial Sequence
  Oligonucleotide primer for the detection of SNP TSC0042630
atatatctactc

SEQ ID NO: 342619 - DNA, 12 bp, Artificial Sequence
  Oligonucleotide primer for the detection of SNP TSC0042630
ttagggttatta

SEQ ID NO: 342620 - DNA, 12 bp, Artificial Sequence
  Oligonucleotide primer for the detection of SNP TSC0042632
cttccttccttc

SEQ ID NO: 342621 - DNA, 12 bp, Artificial Sequence
  Oligonucleotide primer for the detection of SNP TSC0042632
ggaaggaaggaa

SEQ ID NO: 342622 - DNA, 12 bp, Artificial Sequence
  Oligonucleotide primer for the detection of SNP TSC0042633
taaaatatatct

SEQ ID NO: 342623 - DNA, 12 bp, Artificial Sequence
  Oligonucleotide primer for the detection of SNP TSC0042633
ttattggtgagt

SEQ ID NO: 342624 - DNA, 12 bp, Artificial Sequence
  Oligonucleotide primer for the detection of SNP TSC0042633
ttatcggtgagt

SEQ ID NO: 342625 - DNA, 12 bp, Artificial Sequence
  Oligonucleotide primer for the detection of SNP TSC0042633
ttaccaataaac

SEQ ID NO: 342626 - DNA, 12 bp, Artificial Sequence
  Oligonucleotide primer for the detection of SNP TSC0042633
ttaccgataaac

SEQ ID NO: 342627 - DNA, 12 bp, Artificial Sequence
  Oligonucleotide primer for the detection of SNP TSC0042633
taggatatgttt

SEQ ID NO: 342628 - DNA, 12 bp, Artificial Sequence
  Oligonucleotide primer for the detection of SNP TSC0042634
aaatgttgttat

SEQ ID NO: 342629 - DNA, 12 bp, Artificial Sequence
  Oligonucleotide primer for the detection of SNP TSC0042634
aaatgtcgttat

SEQ ID NO: 342630 - DNA, 12 bp, Artificial Sequence
  Oligonucleotide primer for the detection of SNP TSC0042634
aaatatcgttac

SEQ ID NO: 342631 - DNA, 12 bp, Artificial Sequence
  Oligonucleotide primer for the detection of SNP TSC0042634
taagagaaagat

SEQ ID NO: 342632 - DNA, 12 bp, Artificial Sequence
  Oligonucleotide primer for the detection of SNP TSC0042638
acattaaacaac

SEQ ID NO: 342633 - DNA, 12 bp, Artificial Sequence
  Oligonucleotide primer for the detection of SNP TSC0042638
acgttaaacaac

SEQ ID NO: 342634 - DNA, 12 bp, Artificial Sequence
  Oligonucleotide primer for the detection of SNP TSC0042640
aataatatttcc

SEQ ID NO: 342635 - DNA, 12 bp, Artificial Sequence
  Oligonucleotide primer for the detection of SNP TSC0042641
aacaccatctcc

SEQ ID NO: 342636 - DNA, 12 bp, Artificial Sequence
  Oligonucleotide primer for the detection of SNP TSC0042641
aacgccatctcc

SEQ ID NO: 342637 - DNA, 12 bp, Artificial Sequence
  Oligonucleotide primer for the detection of SNP TSC0042641
agcgttattttt

SEQ ID NO: 342638 - DNA, 12 bp, Artificial Sequence
  Oligonucleotide primer for the detection of SNP TSC0042642
tacattcatcat

SEQ ID NO: 342639 - DNA, 12 bp, Artificial Sequence
  Oligonucleotide primer for the detection of SNP TSC0042642
tattgtatgatt

SEQ ID NO: 342640 - DNA, 12 bp, Artificial Sequence
  Oligonucleotide primer for the detection of SNP TSC0042643
tatctctactaa

SEQ ID NO: 342641 - DNA, 12 bp, Artificial Sequence
  Oligonucleotide primer for the detection of SNP TSC0042643
attttttgtatt

SEQ ID NO: 342642 - DNA, 12 bp, Artificial Sequence
  Oligonucleotide primer for the detection of SNP TSC0042644
ttcgttttaaaa

SEQ ID NO: 342643 - DNA, 12 bp, Artificial Sequence
  Oligonucleotide primer for the detection of SNP TSC0042644
tccgtctcaaaa

SEQ ID NO: 342644 - DNA, 12 bp, Artificial Sequence
  Oligonucleotide primer for the detection of SNP TSC0042646
atttattagata

SEQ ID NO: 342645 - DNA, 12 bp, Artificial Sequence
  Oligonucleotide primer for the detection of SNP TSC0042646
atctattaaata

SEQ ID NO: 342646 - DNA, 12 bp, Artificial Sequence
  Oligonucleotide primer for the detection of SNP TSC0042646
agtaattaaagt

SEQ ID NO: 342647 - DNA, 12 bp, Artificial Sequence
  Oligonucleotide primer for the detection of SNP TSC0042647
cacttcttcttt

SEQ ID NO: 342648 - DNA, 12 bp, Artificial Sequence
  Oligonucleotide primer for the detection of SNP TSC0042647
gtagaaaatgta

SEQ ID NO: 342649 - DNA, 12 bp, Artificial Sequence
  Oligonucleotide primer for the detection of SNP TSC0042648
acctcccacaat

SEQ ID NO: 342650 - DNA, 12 bp, Artificial Sequence
  Oligonucleotide primer for the detection of SNP TSC0042648
gtagttgatata

SEQ ID NO: 342651 - DNA, 12 bp, Artificial Sequence
  Oligonucleotide primer for the detection of SNP TSC0042648
acaactaacaca

SEQ ID NO: 342652 - DNA, 12 bp, Artificial Sequence
  Oligonucleotide primer for the detection of SNP TSC0004719
ccaatttatctc

SEQ ID NO: 342653 - DNA, 12 bp, Artificial Sequence
  Oligonucleotide primer for the detection of SNP TSC0010690
aaacatataaaa

SEQ ID NO: 342654 - DNA, 12 bp, Artificial Sequence
  Oligonucleotide primer for the detection of SNP TSC0010690
agtttattatat

SEQ ID NO: 342655 - DNA, 12 bp, Artificial Sequence
  Oligonucleotide primer for the detection of SNP TSC0010690
gatatatagagt

SEQ ID NO: 342656 - DNA, 12 bp, Artificial Sequence
  Oligonucleotide primer for the detection of SNP TSC0010690
gatatatagagc

SEQ ID NO: 342657 - DNA, 12 bp, Artificial Sequence
  Oligonucleotide primer for the detection of SNP TSC0005681
ctttcatactcc

SEQ ID NO: 342658 - DNA, 12 bp, Artificial Sequence
  Oligonucleotide primer for the detection of SNP TSC0005681
ttgtagtagaga

SEQ ID NO: 342659 - DNA, 12 bp, Artificial Sequence
  Oligonucleotide primer for the detection of SNP TSC0042653
atactctaaatt

SEQ ID NO: 342660 - DNA, 12 bp, Artificial Sequence
  Oligonucleotide primer for the detection of SNP TSC0042653
gtattttggatt

SEQ ID NO: 342661 - DNA, 12 bp, Artificial Sequence
  Oligonucleotide primer for the detection of SNP TSC0008320
attctaatccca

SEQ ID NO: 342662 - DNA, 12 bp, Artificial Sequence
  Oligonucleotide primer for the detection of SNP TSC0008320
tttgttgtaaat

SEQ ID NO: 342663 - DNA, 12 bp, Artificial Sequence
  Oligonucleotide primer for the detection of SNP TSC0008320
atttactacaaa

SEQ ID NO: 342664 - DNA, 12 bp, Artificial Sequence
  Oligonucleotide primer for the detection of SNP TSC0008321
caaaaaacacat

SEQ ID NO: 342665 - DNA, 12 bp, Artificial Sequence
  Oligonucleotide primer for the detection of SNP TSC0008321
tgtagtaaatta

SEQ ID NO: 342666 - DNA, 12 bp, Artificial Sequence
  Oligonucleotide primer for the detection of SNP TSC0006033
ggaaatattttg

SEQ ID NO: 342667 - DNA, 12 bp, Artificial Sequence
  Oligonucleotide primer for the detection of SNP TSC0007584
attaaaacatca

SEQ ID NO: 342668 - DNA, 12 bp, Artificial Sequence
  Oligonucleotide primer for the detection of SNP TSC0007584
tatctttaatat

SEQ ID NO: 342669 - DNA, 12 bp, Artificial Sequence
  Oligonucleotide primer for the detection of SNP TSC0007584
attaagatatta

SEQ ID NO: 342670 - DNA, 12 bp, Artificial Sequence
  Oligonucleotide primer for the detection of SNP TSC0042657
ctaaattcataa

SEQ ID NO: 342671 - DNA, 12 bp, Artificial Sequence
  Oligonucleotide primer for the detection of SNP TSC0042657
taaggttttttg

SEQ ID NO: 342672 - DNA, 12 bp, Artificial Sequence
  Oligonucleotide primer for the detection of SNP TSC0042658
aaaataatcaaa

SEQ ID NO: 342673 - DNA, 12 bp, Artificial Sequence
  Oligonucleotide primer for the detection of SNP TSC0042658
agtgaataaaat

SEQ ID NO: 342674 - DNA, 12 bp, Artificial Sequence
  Oligonucleotide primer for the detection of SNP TSC0042658
aagtgattaggt

SEQ ID NO: 342675 - DNA, 12 bp, Artificial Sequence
  Oligonucleotide primer for the detection of SNP TSC0042660
aaaaatttctcc

SEQ ID NO: 342676 - DNA, 12 bp, Artificial Sequence
  Oligonucleotide primer for the detection of SNP TSC0042660
tttgtattgtta

SEQ ID NO: 342677 - DNA, 12 bp, Artificial Sequence
  Oligonucleotide primer for the detection of SNP TSC0042660
tttgtatcgtta

SEQ ID NO: 342678 - DNA, 12 bp, Artificial Sequence
  Oligonucleotide primer for the detection of SNP TSC0042661
gagataaattaa

SEQ ID NO: 342679 - DNA, 12 bp, Artificial Sequence
  Oligonucleotide primer for the detection of SNP TSC0042662
taattttattta

SEQ ID NO: 342680 - DNA, 12 bp, Artificial Sequence
  Oligonucleotide primer for the detection of SNP TSC0042663
tcaaatttcaat

SEQ ID NO: 342681 - DNA, 12 bp, Artificial Sequence
  Oligonucleotide primer for the detection of SNP TSC0042663
aaattataaaag

SEQ ID NO: 342682 - DNA, 12 bp, Artificial Sequence
  Oligonucleotide primer for the detection of SNP TSC0010757
agatgtgttttt

SEQ ID NO: 342683 - DNA, 12 bp, Artificial Sequence
  Oligonucleotide primer for the detection of SNP TSC0010757
agacgtgttttt

SEQ ID NO: 342684 - DNA, 12 bp, Artificial Sequence
  Oligonucleotide primer for the detection of SNP TSC0010757
agatgtgttttc

SEQ ID NO: 342685 - DNA, 12 bp, Artificial Sequence
  Oligonucleotide primer for the detection of SNP TSC0010757
agacgtgttttc

SEQ ID NO: 342686 - DNA, 12 bp, Artificial Sequence
  Oligonucleotide primer for the detection of SNP TSC0010757
aaaacatacttt

SEQ ID NO: 342687 - DNA, 12 bp, Artificial Sequence
  Oligonucleotide primer for the detection of SNP TSC0010757
aaaacgtacttt

SEQ ID NO: 342688 - DNA, 12 bp, Artificial Sequence
  Oligonucleotide primer for the detection of SNP TSC0010757
attatggtggaa

SEQ ID NO: 342689 - DNA, 12 bp, Artificial Sequence
  Oligonucleotide primer for the detection of SNP TSC0010758
tttaaaacctcc

SEQ ID NO: 342690 - DNA, 12 bp, Artificial Sequence
  Oligonucleotide primer for the detection of SNP TSC0010758
tttatgtggttg

SEQ ID NO: 342691 - DNA, 12 bp, Artificial Sequence
  Oligonucleotide primer for the detection of SNP TSC0042664
atggtggaagga

SEQ ID NO: 342692 - DNA, 12 bp, Artificial Sequence
  Oligonucleotide primer for the detection of SNP TSC0042665
tattactatttt

SEQ ID NO: 342693 - DNA, 12 bp, Artificial Sequence
  Oligonucleotide primer for the detection of SNP TSC0010536
acctacatctcc

SEQ ID NO: 342694 - DNA, 12 bp, Artificial Sequence
  Oligonucleotide primer for the detection of SNP TSC0010536
acctacgtctcc

SEQ ID NO: 342695 - DNA, 12 bp, Artificial Sequence
  Oligonucleotide primer for the detection of SNP TSC0010536
aaactacctaaa

SEQ ID NO: 342696 - DNA, 12 bp, Artificial Sequence
  Oligonucleotide primer for the detection of SNP TSC0010536
atttgcgttttt

SEQ ID NO: 342697 - DNA, 12 bp, Artificial Sequence
  Oligonucleotide primer for the detection of SNP TSC0042666
attattgggaga

SEQ ID NO: 342698 - DNA, 12 bp, Artificial Sequence
  Oligonucleotide primer for the detection of SNP TSC0007008
atggattaatac

SEQ ID NO: 342699 - DNA, 12 bp, Artificial Sequence
  Oligonucleotide primer for the detection of SNP TSC0007008
aaactaatacaa

SEQ ID NO: 342700 - DNA, 12 bp, Artificial Sequence
  Oligonucleotide primer for the detection of SNP TSC0007008
aaactaatacga

SEQ ID NO: 342701 - DNA, 12 bp, Artificial Sequence
  Oligonucleotide primer for the detection of SNP TSC0007008
ggagagtatgat

SEQ ID NO: 342702 - DNA, 12 bp, Artificial Sequence
  Oligonucleotide primer for the detection of SNP TSC0042668
accttttttaac

SEQ ID NO: 342703 - DNA, 12 bp, Artificial Sequence
  Oligonucleotide primer for the detection of SNP TSC0042668
tatagttttaaa

SEQ ID NO: 342704 - DNA, 12 bp, Artificial Sequence
  Oligonucleotide primer for the detection of SNP TSC0010812
acctcatttaat

SEQ ID NO: 342705 - DNA, 12 bp, Artificial Sequence
  Oligonucleotide primer for the detection of SNP TSC0010812
aaactcaccaaa

SEQ ID NO: 342706 - DNA, 12 bp, Artificial Sequence
  Oligonucleotide primer for the detection of SNP TSC0042671
attatgtgtgtg

SEQ ID NO: 342707 - DNA, 12 bp, Artificial Sequence
  Oligonucleotide primer for the detection of SNP TSC0042671
attacgtgtgtg

SEQ ID NO: 342708 - DNA, 12 bp, Artificial Sequence
  Oligonucleotide primer for the detection of SNP TSC0042672
cctactcacatc

SEQ ID NO: 342709 - DNA, 12 bp, Artificial Sequence
  Oligonucleotide primer for the detection of SNP TSC0042672
aaagtttgagat

SEQ ID NO: 342710 - DNA, 12 bp, Artificial Sequence
  Oligonucleotide primer for the detection of SNP TSC0042673
taattattacta

SEQ ID NO: 342711 - DNA, 12 bp, Artificial Sequence
  Oligonucleotide primer for the detection of SNP TSC0042673
atacattcattt

SEQ ID NO: 342712 - DNA, 12 bp, Artificial Sequence
  Oligonucleotide primer for the detection of SNP TSC0042673
tagttattatta

SEQ ID NO: 342713 - DNA, 12 bp, Artificial Sequence
  Oligonucleotide primer for the detection of SNP TSC0042675
ggatttatgttt

SEQ ID NO: 342714 - DNA, 12 bp, Artificial Sequence
  Oligonucleotide primer for the detection of SNP TSC0042675
aatccataccta

SEQ ID NO: 342715 - DNA, 12 bp, Artificial Sequence
  Oligonucleotide primer for the detection of SNP TSC0042675
aattaagaagag

SEQ ID NO: 342716 - DNA, 12 bp, Artificial Sequence
  Oligonucleotide primer for the detection of SNP TSC0042676
aataaactcacc

SEQ ID NO: 342717 - DNA, 12 bp, Artificial Sequence
  Oligonucleotide primer for the detection of SNP TSC0042677
ttattcactctt

SEQ ID NO: 342718 - DNA, 12 bp, Artificial Sequence
  Oligonucleotide primer for the detection of SNP TSC0042677
gttgtgttgtta

SEQ ID NO: 342719 - DNA, 12 bp, Artificial Sequence
  Oligonucleotide primer for the detection of SNP TSC0042678
aatcatttattc

SEQ ID NO: 342720 - DNA, 12 bp, Artificial Sequence
  Oligonucleotide primer for the detection of SNP TSC0042678
atgtaagatata

SEQ ID NO: 342721 - DNA, 12 bp, Artificial Sequence
  Oligonucleotide primer for the detection of SNP TSC0042679
cctttttacaac

SEQ ID NO: 342722 - DNA, 12 bp, Artificial Sequence
  Oligonucleotide primer for the detection of SNP TSC0042679
cctttttacgac

SEQ ID NO: 342723 - DNA, 12 bp, Artificial Sequence
  Oligonucleotide primer for the detection of SNP TSC0042679
gatttagatatt

SEQ ID NO: 342724 - DNA, 12 bp, Artificial Sequence
  Oligonucleotide primer for the detection of SNP TSC0042679
attcaaacacta

SEQ ID NO: 342725 - DNA, 12 bp, Artificial Sequence
  Oligonucleotide primer for the detection of SNP TSC0042679
tttttttacgat

SEQ ID NO: 342726 - DNA, 12 bp, Artificial Sequence
  Oligonucleotide primer for the detection of SNP TSC0042680
cttaacccctat

SEQ ID NO: 342727 - DNA, 12 bp, Artificial Sequence
  Oligonucleotide primer for the detection of SNP TSC0042680
ggagttgggtaa

SEQ ID NO: 342728 - DNA, 12 bp, Artificial Sequence
  Oligonucleotide primer for the detection of SNP TSC0042681
tttctctttttt

SEQ ID NO: 342729 - DNA, 12 bp, Artificial Sequence
  Oligonucleotide primer for the detection of SNP TSC0042681
gagaaagtgttt

SEQ ID NO: 342730 - DNA, 12 bp, Artificial Sequence
  Oligonucleotide primer for the detection of SNP TSC0009084
aaaactcctaaa

SEQ ID NO: 342731 - DNA, 12 bp, Artificial Sequence
  Oligonucleotide primer for the detection of SNP TSC0009084
actatttcctct

SEQ ID NO: 342732 - DNA, 12 bp, Artificial Sequence
  Oligonucleotide primer for the detection of SNP TSC0009084
gggaggttttta

SEQ ID NO: 342733 - DNA, 12 bp, Artificial Sequence
  Oligonucleotide primer for the detection of SNP TSC0042683
acaaacaatact

SEQ ID NO: 342734 - DNA, 12 bp, Artificial Sequence
  Oligonucleotide primer for the detection of SNP TSC0042683
aaaggttgttta

SEQ ID NO: 342735 - DNA, 12 bp, Artificial Sequence
  Oligonucleotide primer for the detection of SNP TSC0042683
aaaggtcgttta

SEQ ID NO: 342736 - DNA, 12 bp, Artificial Sequence
  Oligonucleotide primer for the detection of SNP TSC0042683
aaaaaccactca

SEQ ID NO: 342737 - DNA, 12 bp, Artificial Sequence
  Oligonucleotide primer for the detection of SNP TSC0042683
aaaaaccgctca

SEQ ID NO: 342738 - DNA, 12 bp, Artificial Sequence
  Oligonucleotide primer for the detection of SNP TSC0042683
gtaaataatgtt

SEQ ID NO: 342739 - DNA, 12 bp, Artificial Sequence
  Oligonucleotide primer for the detection of SNP TSC0010280
gatttgtgttat

SEQ ID NO: 342740 - DNA, 12 bp, Artificial Sequence
  Oligonucleotide primer for the detection of SNP TSC0010280
gatttgtgttac

SEQ ID NO: 342741 - DNA, 12 bp, Artificial Sequence
  Oligonucleotide primer for the detection of SNP TSC0010280
aacctatatcac

SEQ ID NO: 342742 - DNA, 12 bp, Artificial Sequence
  Oligonucleotide primer for the detection of SNP TSC0010280
tggtggatgttt

SEQ ID NO: 342743 - DNA, 12 bp, Artificial Sequence
  Oligonucleotide primer for the detection of SNP TSC0010801
ctataatactca

SEQ ID NO: 342744 - DNA, 12 bp, Artificial Sequence
  Oligonucleotide primer for the detection of SNP TSC0010801
ctataatactcg

SEQ ID NO: 342745 - DNA, 12 bp, Artificial Sequence
  Oligonucleotide primer for the detection of SNP TSC0010801
tttaaactcact

SEQ ID NO: 342746 - DNA, 12 bp, Artificial Sequence
  Oligonukleotid-Primer
ttgtaatgtttg

SEQ ID NO: 342747 - DNA, 12 bp, Artificial Sequence
  Oligonucleotide primer for the detection of SNP TSC0010801
ttgtaatgttcg

SEQ ID NO: 342748 - DNA, 12 bp, Artificial Sequence
  Oligonucleotide primer for the detection of SNP TSC0042687
attatttaaatt

SEQ ID NO: 342749 - DNA, 12 bp, Artificial Sequence
  Oligonucleotide primer for the detection of SNP TSC0042687
ttattcaaatta

SEQ ID NO: 342750 - DNA, 12 bp, Artificial Sequence
  Oligonucleotide primer for the detection of SNP TSC0042687
attagggattgg

SEQ ID NO: 342751 - DNA, 12 bp, Artificial Sequence
  Oligonucleotide primer for the detection of SNP TSC0042690
ctctacaaacca

SEQ ID NO: 342752 - DNA, 12 bp, Artificial Sequence
  Oligonucleotide primer for the detection of SNP TSC0042690
caaaacctcata

SEQ ID NO: 342753 - DNA, 12 bp, Artificial Sequence
  Oligonucleotide primer for the detection of SNP TSC0042690
ttttgtaggtta

SEQ ID NO: 342754 - DNA, 12 bp, Artificial Sequence
  Oligonukleotid-Primer
accataaaaaat

SEQ ID NO: 342755 - DNA, 12 bp, Artificial Sequence
  Oligonucleotide primer for the detection of SNP TSC0042691
tattaattggta

SEQ ID NO: 342756 - DNA, 12 bp, Artificial Sequence
  Oligonucleotide primer for the detection of SNP TSC0008740
caccaaacaaca

SEQ ID NO: 342757 - DNA, 12 bp, Artificial Sequence
  Oligonucleotide primer for the detection of SNP TSC0008740
gtttgttaagtt

SEQ ID NO: 342758 - DNA, 12 bp, Artificial Sequence
  Oligonukleotid-Primer
aaacctaccaaa

SEQ ID NO: 342759 - DNA, 12 bp, Artificial Sequence
  Oligonucleotide primer for the detection of SNP TSC0006645
aacctttcccca

SEQ ID NO: 342760 - DNA, 12 bp, Artificial Sequence
  Oligonucleotide primer for the detection of SNP TSC0006645
taattagaattt

SEQ ID NO: 342761 - DNA, 12 bp, Artificial Sequence
  Oligonucleotide primer for the detection of SNP TSC0006645
acaaccaaaatc

SEQ ID NO: 342762 - DNA, 12 bp, Artificial Sequence
  Oligonukleotid-Primer
gaggagattggt

SEQ ID NO: 342763 - DNA, 12 bp, Artificial Sequence
  Oligonucleotide primer for the detection of SNP TSC0042695
tttggggaaagg

SEQ ID NO: 342764 - DNA, 12 bp, Artificial Sequence
  Oligonucleotide primer for the detection of SNP TSC0042695
aggttgatgaat

SEQ ID NO: 342765 - DNA, 12 bp, Artificial Sequence
  Oligonucleotide primer for the detection of SNP TSC0042696
tttaactaatac

SEQ ID NO: 342766 - DNA, 12 bp, Artificial Sequence
  Oligonukleotid-Primer
aggtagtattta

SEQ ID NO: 342767 - DNA, 12 bp, Artificial Sequence
  Oligonucleotide primer for the detection of SNP TSC0042698
aaaaaaaccaac

SEQ ID NO: 342768 - DNA, 12 bp, Artificial Sequence
  Oligonucleotide primer for the detection of SNP TSC0042698
ttttttggggag

SEQ ID NO: 342769 - DNA, 12 bp, Artificial Sequence
  Oligonucleotide primer for the detection of SNP TSC0042698
aaaaggttaatt

SEQ ID NO: 342770 - DNA, 12 bp, Artificial Sequence
  Oligonukleotid-Primer
aatcattcactt

SEQ ID NO: 342771 - DNA, 12 bp, Artificial Sequence
  Oligonucleotide primer for the detection of SNP TSC0008856
aatcgttcactt

SEQ ID NO: 342772 - DNA, 12 bp, Artificial Sequence
  Oligonucleotide primer for the detection of SNP TSC0008856
attaattaaatg

SEQ ID NO: 342773 - DNA, 12 bp, Artificial Sequence
  Oligonucleotide primer for the detection of SNP TSC0042699
aatggattaatg

SEQ ID NO: 342774 - DNA, 12 bp, Artificial Sequence
  Oligonucleotide primer for the detection of SNP TSC0042699
aacggattaatg

SEQ ID NO: 342775 - DNA, 12 bp, Artificial Sequence
  Oligonucleotide primer for the detection of SNP TSC0042699
aacgaattaata

SEQ ID NO: 342776 - DNA, 12 bp, Artificial Sequence
  Oligonucleotide primer for the detection of SNP TSC0042699
ttggaaagtttt

SEQ ID NO: 342777 - DNA, 12 bp, Artificial Sequence
  Oligonucleotide primer for the detection of SNP TSC0042701
aaattacctaat

SEQ ID NO: 342778 - DNA, 12 bp, Artificial Sequence
  Oligonucleotide primer for the detection of SNP TSC0042701
aatttttagtgg

SEQ ID NO: 342779 - DNA, 12 bp, Artificial Sequence
  Oligonucleotide primer for the detection of SNP TSC0042707
tcatctcattct

SEQ ID NO: 342780 - DNA, 12 bp, Artificial Sequence
  Oligonucleotide primer for the detection of SNP TSC0042707
tcgtctcattct

SEQ ID NO: 342781 - DNA, 12 bp, Artificial Sequence
  Oligonucleotide primer for the detection of SNP TSC0042707
ttgaagttggat

SEQ ID NO: 342782 - DNA, 12 bp, Artificial Sequence
  Oligonucleotide primer for the detection of SNP TSC0042708
tataaaaccccg

SEQ ID NO: 342783 - DNA, 12 bp, Artificial Sequence
  Oligonucleotide primer for the detection of SNP TSC0042708
gcgtttagtttt

SEQ ID NO: 342784 - DNA, 12 bp, Artificial Sequence
  Oligonucleotide primer for the detection of SNP TSC0042708
acacccaattcc

SEQ ID NO: 342785 - DNA, 12 bp, Artificial Sequence
  Oligonucleotide primer for the detection of SNP TSC0042708
acgcccaattcc

SEQ ID NO: 342786 - DNA, 12 bp, Artificial Sequence
  Oligonucleotide primer for the detection of SNP TSC0042708
tgtggggttttg

SEQ ID NO: 342787 - DNA, 12 bp, Artificial Sequence
  Oligonucleotide primer for the detection of SNP TSC0042708
tgtggggtttcg

SEQ ID NO: 342788 - DNA, 12 bp, Artificial Sequence
  Oligonucleotide primer for the detection of SNP TSC0042709
cttacacaaaca

SEQ ID NO: 342789 - DNA, 12 bp, Artificial Sequence
  Oligonucleotide primer for the detection of SNP TSC0042709
ctactattacta

SEQ ID NO: 342790 - DNA, 12 bp, Artificial Sequence
  Oligonucleotide primer for the detection of SNP TSC0042709
ttatatagatat

SEQ ID NO: 342791 - DNA, 12 bp, Artificial Sequence
  Oligonucleotide primer for the detection of SNP TSC0005025
tacaaacacatc

SEQ ID NO: 342792 - DNA, 12 bp, Artificial Sequence
  Oligonucleotide primer for the detection of SNP TSC0005025
attttaaaagat

SEQ ID NO: 342793 - DNA, 12 bp, Artificial Sequence
  Oligonucleotide primer for the detection of SNP TSC0005025
tgtaagtatatc

SEQ ID NO: 342794 - DNA, 12 bp, Artificial Sequence
  Oligonucleotide primer for the detection of SNP TSC0005027
accatattaatc

SEQ ID NO: 342795 - DNA, 12 bp, Artificial Sequence
  Oligonucleotide primer for the detection of SNP TSC0005027
agttcgagatta

SEQ ID NO: 342796 - DNA, 12 bp, Artificial Sequence
  Oligonucleotide primer for the detection of SNP TSC0042710
aaaaattcgaaa

SEQ ID NO: 342797 - DNA, 12 bp, Artificial Sequence
  Oligonucleotide primer for the detection of SNP TSC0042710
ttgtataggttg

SEQ ID NO: 342798 - DNA, 12 bp, Artificial Sequence
  Oligonucleotide primer for the detection of SNP TSC0042710
ttacacaaacta

SEQ ID NO: 342799 - DNA, 12 bp, Artificial Sequence
  Oligonucleotide primer for the detection of SNP TSC0042710
taggagttcgag

SEQ ID NO: 342800 - DNA, 12 bp, Artificial Sequence
  Oligonucleotide primer for the detection of SNP TSC0042711
cacctctaacta

SEQ ID NO: 342801 - DNA, 12 bp, Artificial Sequence
  Oligonucleotide primer for the detection of SNP TSC0042711
tagattttaagg

SEQ ID NO: 342802 - DNA, 12 bp, Artificial Sequence
  Oligonucleotide primer for the detection of SNP TSC0042711
caaaccttaaaa

SEQ ID NO: 342803 - DNA, 12 bp, Artificial Sequence
  Oligonucleotide primer for the detection of SNP TSC0042712
taaacactccaa

SEQ ID NO: 342804 - DNA, 12 bp, Artificial Sequence
  Oligonucleotide primer for the detection of SNP TSC0042712
actttattaccc

SEQ ID NO: 342805 - DNA, 12 bp, Artificial Sequence
  Oligonucleotide primer for the detection of SNP TSC0042712
tgggtattttag

SEQ ID NO: 342806 - DNA, 12 bp, Artificial Sequence
  Oligonucleotide primer for the detection of SNP TSC0042717
atttaaactaaa

SEQ ID NO: 342807 - DNA, 12 bp, Artificial Sequence
  Oligonucleotide primer for the detection of SNP TSC0042717
gattttggaata

SEQ ID NO: 342808 - DNA, 12 bp, Artificial Sequence
  Oligonucleotide primer for the detection of SNP TSC0042717
actctaaaataa

SEQ ID NO: 342809 - DNA, 12 bp, Artificial Sequence
  Oligonucleotide primer for the detection of SNP TSC0042717
tttagattaaat

SEQ ID NO: 342810 - DNA, 12 bp, Artificial Sequence
  Oligonucleotide primer for the detection of SNP TSC0042717
tttagattaaac

SEQ ID NO: 342811 - DNA, 12 bp, Artificial Sequence
  Oligonucleotide primer for the detection of SNP TSC0042718
atatattctaat

SEQ ID NO: 342812 - DNA, 12 bp, Artificial Sequence
  Oligonucleotide primer for the detection of SNP TSC0042718
aaaaatggttga

SEQ ID NO: 342813 - DNA, 12 bp, Artificial Sequence
  Oligonucleotide primer for the detection of SNP TSC0042719
ttaatatttaaa

SEQ ID NO: 342814 - DNA, 12 bp, Artificial Sequence
  Oligonucleotide primer for the detection of SNP TSC0042719
tcaacattcaaa

SEQ ID NO: 342815 - DNA, 12 bp, Artificial Sequence
  Oligonucleotide primer for the detection of SNP TSC0042719
tagtaaataggt

SEQ ID NO: 342816 - DNA, 12 bp, Artificial Sequence
  Oligonucleotide primer for the detection of SNP TSC0042720
ccctcaaaacac

SEQ ID NO: 342817 - DNA, 12 bp, Artificial Sequence
  Oligonucleotide primer for the detection of SNP TSC0042720
gagtgagttgtt

SEQ ID NO: 342818 - DNA, 12 bp, Artificial Sequence
  Oligonucleotide primer for the detection of SNP TSC0042721
gagtaaaatttt

SEQ ID NO: 342819 - DNA, 12 bp, Artificial Sequence
  Oligonucleotide primer for the detection of SNP TSC0005871
gagataaagaat

SEQ ID NO: 342820 - DNA, 12 bp, Artificial Sequence
  Oligonucleotide primer for the detection of SNP TSC0005871
agtagatataaa

SEQ ID NO: 342821 - DNA, 12 bp, Artificial Sequence
  Oligonucleotide primer for the detection of SNP TSC0005872
ctcaactccact

SEQ ID NO: 342822 - DNA, 12 bp, Artificial Sequence
  Oligonucleotide primer for the detection of SNP TSC0005872
taaaagttgggg

SEQ ID NO: 342823 - DNA, 12 bp, Artificial Sequence
  Oligonucleotide primer for the detection of SNP TSC0042724
aaactaaataac

SEQ ID NO: 342824 - DNA, 12 bp, Artificial Sequence
  Oligonucleotide primer for the detection of SNP TSC0042724
tttaattattag

SEQ ID NO: 342825 - DNA, 12 bp, Artificial Sequence
  Oligonucleotide primer for the detection of SNP TSC0042725
ccaacctacctc

SEQ ID NO: 342826 - DNA, 12 bp, Artificial Sequence
  Oligonucleotide primer for the detection of SNP TSC0042725
agtatttgtaaa

SEQ ID NO: 342827 - DNA, 12 bp, Artificial Sequence
  Oligonucleotide primer for the detection of SNP TSC0042726
ataccttcaatt

SEQ ID NO: 342828 - DNA, 12 bp, Artificial Sequence
  Oligonucleotide primer for the detection of SNP TSC0042726
tatgtagaaaaa

SEQ ID NO: 342829 - DNA, 12 bp, Artificial Sequence
  Oligonucleotide primer for the detection of SNP TSC0042727
ctctatataatt

SEQ ID NO: 342830 - DNA, 12 bp, Artificial Sequence
  Oligonucleotide primer for the detection of SNP TSC0042727
tttatgggattt

SEQ ID NO: 342831 - DNA, 12 bp, Artificial Sequence
  Oligonucleotide primer for the detection of SNP TSC0042727
tttacgggattt

SEQ ID NO: 342832 - DNA, 12 bp, Artificial Sequence
  Oligonucleotide primer for the detection of SNP TSC0042727
tttacaaaactt

SEQ ID NO: 342833 - DNA, 12 bp, Artificial Sequence
  Oligonucleotide primer for the detection of SNP TSC0042727
tttacgaaactt

SEQ ID NO: 342834 - DNA, 12 bp, Artificial Sequence
  Oligonucleotide primer for the detection of SNP TSC0004555
tttcacctaaca

SEQ ID NO: 342835 - DNA, 12 bp, Artificial Sequence
  Oligonucleotide primer for the detection of SNP TSC0004555
ggtgtgtgttat

SEQ ID NO: 342836 - DNA, 12 bp, Artificial Sequence
  Oligonucleotide primer for the detection of SNP TSC0004555
tttatttggtat

SEQ ID NO: 342837 - DNA, 12 bp, Artificial Sequence
  Oligonucleotide primer for the detection of SNP TSC0004555
tttatttggtac

SEQ ID NO: 342838 - DNA, 12 bp, Artificial Sequence
  Oligonucleotide primer for the detection of SNP TSC0008910
tacaaataattt

SEQ ID NO: 342839 - DNA, 12 bp, Artificial Sequence
  Oligonucleotide primer for the detection of SNP TSC0008910
ttattaaaagta

SEQ ID NO: 342840 - DNA, 12 bp, Artificial Sequence
  Oligonucleotide primer for the detection of SNP TSC0008911
tataaaaaaaca

SEQ ID NO: 342841 - DNA, 12 bp, Artificial Sequence
  Oligonucleotide primer for the detection of SNP TSC0008911
attttttagatt

SEQ ID NO: 342842 - DNA, 12 bp, Artificial Sequence
  Oligonucleotide primer for the detection of SNP TSC0008911
atcttccaaacc

SEQ ID NO: 342843 - DNA, 12 bp, Artificial Sequence
  Oligonucleotide primer for the detection of SNP TSC0008911
tataggaaaata

SEQ ID NO: 342844 - DNA, 12 bp, Artificial Sequence
  Oligonucleotide primer for the detection of SNP TSC0042729
cactaatccctt

SEQ ID NO: 342845 - DNA, 12 bp, Artificial Sequence
  Oligonucleotide primer for the detection of SNP TSC0042729
gtaaggtgtaga

SEQ ID NO: 342846 - DNA, 12 bp, Artificial Sequence
  Oligonucleotide primer for the detection of SNP TSC0042730
acctcttttcta

SEQ ID NO: 342847 - DNA, 12 bp, Artificial Sequence
  Oligonucleotide primer for the detection of SNP TSC0042730
tctcttttcctc

SEQ ID NO: 342848 - DNA, 12 bp, Artificial Sequence
  Oligonucleotide primer for the detection of SNP TSC0042731
tcaaatttccca

SEQ ID NO: 342849 - DNA, 12 bp, Artificial Sequence
  Oligonucleotide primer for the detection of SNP TSC0042731
tcttaaaaaact

SEQ ID NO: 342850 - DNA, 12 bp, Artificial Sequence
  Oligonucleotide primer for the detection of SNP TSC0042731
ttagatttttta

SEQ ID NO: 342851 - DNA, 12 bp, Artificial Sequence
  Oligonucleotide primer for the detection of SNP TSC0042732
aacctcaaaatc

SEQ ID NO: 342852 - DNA, 12 bp, Artificial Sequence
  Oligonucleotide primer for the detection of SNP TSC0042732
tggaagttgtag

SEQ ID NO: 342853 - DNA, 12 bp, Artificial Sequence
  Oligonucleotide primer for the detection of SNP TSC0042732
cggaagttgtag

SEQ ID NO: 342854 - DNA, 12 bp, Artificial Sequence
  Oligonucleotide primer for the detection of SNP TSC0042736
ttattctatttt

SEQ ID NO: 342855 - DNA, 12 bp, Artificial Sequence
  Oligonucleotide primer for the detection of SNP TSC0042736
gttgataaagtg

SEQ ID NO: 342856 - DNA, 12 bp, Artificial Sequence
  Oligonucleotide primer for the detection of SNP TSC0042737
aataatattctt

SEQ ID NO: 342857 - DNA, 12 bp, Artificial Sequence
  Oligonucleotide primer for the detection of SNP TSC0042737
ttgttgttagtg

SEQ ID NO: 342858 - DNA, 12 bp, Artificial Sequence
  Oligonucleotide primer for the detection of SNP TSC0042737
tcgttgttagtg

SEQ ID NO: 342859 - DNA, 12 bp, Artificial Sequence
  Oligonucleotide primer for the detection of SNP TSC0042737
ccattaccaata

SEQ ID NO: 342860 - DNA, 12 bp, Artificial Sequence
  Oligonucleotide primer for the detection of SNP TSC0042737
ccgttaccaata

SEQ ID NO: 342861 - DNA, 12 bp, Artificial Sequence
  Oligonucleotide primer for the detection of SNP TSC0042737
gatgatgttttt

SEQ ID NO: 342862 - DNA, 12 bp, Artificial Sequence
  Oligonucleotide primer for the detection of SNP TSC0042738
taataacccccc

SEQ ID NO: 342863 - DNA, 12 bp, Artificial Sequence
  Oligonucleotide primer for the detection of SNP TSC0042738
ttaggtatggga

SEQ ID NO: 342864 - DNA, 12 bp, Artificial Sequence
  Oligonucleotide primer for the detection of SNP TSC0042739
acgaaaaaatat

SEQ ID NO: 342865 - DNA, 12 bp, Artificial Sequence
  Oligonucleotide primer for the detection of SNP TSC0042739
taaaaccatccc

SEQ ID NO: 342866 - DNA, 12 bp, Artificial Sequence
  Oligonucleotide primer for the detection of SNP TSC0042739
gtggaggggtgt

SEQ ID NO: 342867 - DNA, 12 bp, Artificial Sequence
  Oligonucleotide primer for the detection of SNP TSC0042739
gcggaggggtgt

SEQ ID NO: 342868 - DNA, 12 bp, Artificial Sequence
  Oligonucleotide primer for the detection of SNP TSC0042740
tgttttttagat

SEQ ID NO: 342869 - DNA, 12 bp, Artificial Sequence
  Oligonucleotide primer for the detection of SNP TSC0042740
ttactccttaaa

SEQ ID NO: 342870 - DNA, 12 bp, Artificial Sequence
  Oligonucleotide primer for the detection of SNP TSC0042740
gtttataagtag

SEQ ID NO: 342871 - DNA, 12 bp, Artificial Sequence
  Oligonucleotide primer for the detection of SNP TSC0042744
atacttacctat

SEQ ID NO: 342872 - DNA, 12 bp, Artificial Sequence
  Oligonucleotide primer for the detection of SNP TSC0042744
aatgagtagata

SEQ ID NO: 342873 - DNA, 12 bp, Artificial Sequence
  Oligonucleotide primer for the detection of SNP TSC0042744
aataaacaaaca

SEQ ID NO: 342874 - DNA, 12 bp, Artificial Sequence
  Oligonucleotide primer for the detection of SNP TSC0042745
tatactacctta

SEQ ID NO: 342875 - DNA, 12 bp, Artificial Sequence
  Oligonucleotide primer for the detection of SNP TSC0042745
atatattctact

SEQ ID NO: 342876 - DNA, 12 bp, Artificial Sequence
  Oligonucleotide primer for the detection of SNP TSC0042745
tgtgttgtttta

SEQ ID NO: 342877 - DNA, 12 bp, Artificial Sequence
  Oligonucleotide primer for the detection of SNP TSC0042746
taaacctatatt

SEQ ID NO: 342878 - DNA, 12 bp, Artificial Sequence
  Oligonucleotide primer for the detection of SNP TSC0042746
tttttagaaagg

SEQ ID NO: 342879 - DNA, 12 bp, Artificial Sequence
  Oligonucleotide primer for the detection of SNP TSC0042747
gaattaatagag

SEQ ID NO: 342880 - DNA, 12 bp, Artificial Sequence
  Oligonucleotide primer for the detection of SNP TSC0042748
tttttaaagtag

SEQ ID NO: 342881 - DNA, 12 bp, Artificial Sequence
  Oligonucleotide primer for the detection of SNP TSC0042749
ttaaataaataa

SEQ ID NO: 342882 - DNA, 12 bp, Artificial Sequence
  Oligonucleotide primer for the detection of SNP TSC0042749
tctatctatcta

SEQ ID NO: 342883 - DNA, 12 bp, Artificial Sequence
  Oligonucleotide primer for the detection of SNP TSC0042749
ttaggtaggtag

SEQ ID NO: 342884 - DNA, 12 bp, Artificial Sequence
  Oligonucleotide primer for the detection of SNP TSC0042761
agattttttagg

SEQ ID NO: 342885 - DNA, 12 bp, Artificial Sequence
  Oligonucleotide primer for the detection of SNP TSC0042762
aactataaatac

SEQ ID NO: 342886 - DNA, 12 bp, Artificial Sequence
  Oligonucleotide primer for the detection of SNP TSC0042762
gtatttagaagg

SEQ ID NO: 342887 - DNA, 12 bp, Artificial Sequence
  Oligonucleotide primer for the detection of SNP TSC0042763
ccccaccaaacc

SEQ ID NO: 342888 - DNA, 12 bp, Artificial Sequence
  Oligonucleotide primer for the detection of SNP TSC0042763
tgtaggatagag

SEQ ID NO: 342889 - DNA, 12 bp, Artificial Sequence
  Oligonucleotide primer for the detection of SNP TSC0042764
actaacttccct

SEQ ID NO: 342890 - DNA, 12 bp, Artificial Sequence
  Oligonucleotide primer for the detection of SNP TSC0042764
taagatagggag

SEQ ID NO: 342891 - DNA, 12 bp, Artificial Sequence
  Oligonucleotide primer for the detection of SNP TSC0042765
tataaataatac

SEQ ID NO: 342892 - DNA, 12 bp, Artificial Sequence
  Oligonucleotide primer for the detection of SNP TSC0042768
accactattctc

SEQ ID NO: 342893 - DNA, 12 bp, Artificial Sequence
  Oligonucleotide primer for the detection of SNP TSC0042768
gtagtaaagatg

SEQ ID NO: 342894 - DNA, 12 bp, Artificial Sequence
  Oligonucleotide primer for the detection of SNP TSC0042768
attattgttttt

SEQ ID NO: 342895 - DNA, 12 bp, Artificial Sequence
  Oligonucleotide primer for the detection of SNP TSC0042768
attattgttttc

SEQ ID NO: 342896 - DNA, 12 bp, Artificial Sequence
  Oligonucleotide primer for the detection of SNP TSC0042769
caaactcaaaat

SEQ ID NO: 342897 - DNA, 12 bp, Artificial Sequence
  Oligonucleotide primer for the detection of SNP TSC0042769
gataaatttata

SEQ ID NO: 342898 - DNA, 12 bp, Artificial Sequence
  Oligonucleotide primer for the detection of SNP TSC0042769
aacaaatctata

SEQ ID NO: 342899 - DNA, 12 bp, Artificial Sequence
  Oligonucleotide primer for the detection of SNP TSC0042769
aaatttaaagtt

SEQ ID NO: 342900 - DNA, 12 bp, Artificial Sequence
  Oligonucleotide primer for the detection of SNP TSC0042769
aaatttaaagtc

SEQ ID NO: 342901 - DNA, 12 bp, Artificial Sequence
  Oligonucleotide primer for the detection of SNP TSC0042773
tcctaaaacact

SEQ ID NO: 342902 - DNA, 12 bp, Artificial Sequence
  Oligonucleotide primer for the detection of SNP TSC0042773
tcctaaaacgct

SEQ ID NO: 342903 - DNA, 12 bp, Artificial Sequence
  Oligonucleotide primer for the detection of SNP TSC0042773
gttttatttagg

SEQ ID NO: 342904 - DNA, 12 bp, Artificial Sequence
  Oligonucleotide primer for the detection of SNP TSC0042774
ataaatctcctt

SEQ ID NO: 342905 - DNA, 12 bp, Artificial Sequence
  Oligonucleotide primer for the detection of SNP TSC0042774
gatggagatgta

SEQ ID NO: 342906 - DNA, 12 bp, Artificial Sequence
  Oligonucleotide primer for the detection of SNP TSC0042775
ttatttaatagt

SEQ ID NO: 342907 - DNA, 12 bp, Artificial Sequence
  Oligonucleotide primer for the detection of SNP TSC0042775
atcatccaacaa

SEQ ID NO: 342908 - DNA, 12 bp, Artificial Sequence
  Oligonucleotide primer for the detection of SNP TSC0042775
gttagaattatt

SEQ ID NO: 342909 - DNA, 12 bp, Artificial Sequence
  Oligonucleotide primer for the detection of SNP TSC0042776
ccatatttttaa

SEQ ID NO: 342910 - DNA, 12 bp, Artificial Sequence
  Oligonucleotide primer for the detection of SNP TSC0042776
tatagtatgagt

SEQ ID NO: 342911 - DNA, 12 bp, Artificial Sequence
  Oligonucleotide primer for the detection of SNP TSC0042776
tatagtacgagt

SEQ ID NO: 342912 - DNA, 12 bp, Artificial Sequence
  Oligonucleotide primer for the detection of SNP TSC0042776
tataacacgaat

SEQ ID NO: 342913 - DNA, 12 bp, Artificial Sequence
  Oligonucleotide primer for the detection of SNP TSC0042780
gaaaaatgaata

SEQ ID NO: 342914 - DNA, 12 bp, Artificial Sequence
  Oligonucleotide primer for the detection of SNP TSC0042781
aaacaaactact

SEQ ID NO: 342915 - DNA, 12 bp, Artificial Sequence
  Oligonucleotide primer for the detection of SNP TSC0042781
tttggttgtata

SEQ ID NO: 342916 - DNA, 12 bp, Artificial Sequence
  Oligonucleotide primer for the detection of SNP TSC0042781
ttcggttgtata

SEQ ID NO: 342917 - DNA, 12 bp, Artificial Sequence
  Oligonucleotide primer for the detection of SNP TSC0042781
cccaactacata

SEQ ID NO: 342918 - DNA, 12 bp, Artificial Sequence
  Oligonucleotide primer for the detection of SNP TSC0042781
cccgactacata

SEQ ID NO: 342919 - DNA, 12 bp, Artificial Sequence
  Oligonukleotid-Primer
gaatagattgtt

SEQ ID NO: 342920 - DNA, 12 bp, Artificial Sequence
  Oligonucleotide primer for the detection of SNP TSC0042782
ttttatttagat

SEQ ID NO: 342921 - DNA, 12 bp, Artificial Sequence
  Oligonucleotide primer for the detection of SNP TSC0042782
ctttattcaaat

SEQ ID NO: 342922 - DNA, 12 bp, Artificial Sequence
  Oligonucleotide primer for the detection of SNP TSC0042782
tatatgtaggat

SEQ ID NO: 342923 - DNA, 12 bp, Artificial Sequence
  Oligonukleotid-Primer
ttctaatttaac

SEQ ID NO: 342924 - DNA, 12 bp, Artificial Sequence
  Oligonucleotide primer for the detection of SNP TSC0042783
aaaagtagattg

SEQ ID NO: 342925 - DNA, 12 bp, Artificial Sequence
  Oligonucleotide primer for the detection of SNP TSC0042785
aacatattctat

SEQ ID NO: 342926 - DNA, 12 bp, Artificial Sequence
  Oligonucleotide primer for the detection of SNP TSC0042785
tttttttataga

SEQ ID NO: 342927 - DNA, 12 bp, Artificial Sequence
  Oligonukleotid-Primer
tttatatagtta

SEQ ID NO: 342928 - DNA, 12 bp, Artificial Sequence
  Oligonucleotide primer for the detection of SNP TSC0042787
taatttaaacta

SEQ ID NO: 342929 - DNA, 12 bp, Artificial Sequence
  Oligonucleotide primer for the detection of SNP TSC0042787
atctttaaaact

SEQ ID NO: 342930 - DNA, 12 bp, Artificial Sequence
  Oligonucleotide primer for the detection of SNP TSC0042787
atggtttgagtt

SEQ ID NO: 342931 - DNA, 12 bp, Artificial Sequence
  Oligonukleotid-Primer
acttctctcaac

SEQ ID NO: 342932 - DNA, 12 bp, Artificial Sequence
  Oligonucleotide primer for the detection of SNP TSC0042788
tagataaaatta

SEQ ID NO: 342933 - DNA, 12 bp, Artificial Sequence
  Oligonucleotide primer for the detection of SNP TSC0042789
aaaccataacaa

SEQ ID NO: 342934 - DNA, 12 bp, Artificial Sequence
  Oligonucleotide primer for the detection of SNP TSC0042789
ttgattttgtgt

SEQ ID NO: 342935 - DNA, 12 bp, Artificial Sequence
  Oligonucleotide primer for the detection of SNP TSC0042789
taactctatata

SEQ ID NO: 342936 - DNA, 12 bp, Artificial Sequence
  Oligonucleotide primer for the detection of SNP TSC0042789
tgaattatagta

SEQ ID NO: 342937 - DNA, 12 bp, Artificial Sequence
  Oligonucleotide primer for the detection of SNP TSC0042790
taataactctat

SEQ ID NO: 342938 - DNA, 12 bp, Artificial Sequence
  Oligonucleotide primer for the detection of SNP TSC0042790
gatttgtttaag

SEQ ID NO: 342939 - DNA, 12 bp, Artificial Sequence
  Oligonucleotide primer for the detection of SNP TSC0042792
ctaatcaataat

SEQ ID NO: 342940 - DNA, 12 bp, Artificial Sequence
  Oligonucleotide primer for the detection of SNP TSC0042792
tctatcactcca

SEQ ID NO: 342941 - DNA, 12 bp, Artificial Sequence
  Oligonucleotide primer for the detection of SNP TSC0042792
ttggttaatgat

SEQ ID NO: 342942 - DNA, 12 bp, Artificial Sequence
  Oligonucleotide primer for the detection of SNP TSC0042793
tcttaatactac

SEQ ID NO: 342943 - DNA, 12 bp, Artificial Sequence
  Oligonucleotide primer for the detection of SNP TSC0042793
ttttatggttta

SEQ ID NO: 342944 - DNA, 12 bp, Artificial Sequence
  Oligonucleotide primer for the detection of SNP TSC0042793
ttttacggttta

SEQ ID NO: 342945 - DNA, 12 bp, Artificial Sequence
  Oligonucleotide primer for the detection of SNP TSC0007038
aaataaaatctt

SEQ ID NO: 342946 - DNA, 12 bp, Artificial Sequence
  Oligonucleotide primer for the detection of SNP TSC0007038
aattttaaatta

SEQ ID NO: 342947 - DNA, 12 bp, Artificial Sequence
  Oligonucleotide primer for the detection of SNP TSC0042794
ctatataattct

SEQ ID NO: 342948 - DNA, 12 bp, Artificial Sequence
  Oligonucleotide primer for the detection of SNP TSC0042796
aaaaagaaaagt

SEQ ID NO: 342949 - DNA, 12 bp, Artificial Sequence
  Oligonucleotide primer for the detection of SNP TSC0042797
gttgaatttttt

SEQ ID NO: 342950 - DNA, 12 bp, Artificial Sequence
  Oligonucleotide primer for the detection of SNP TSC0042797
gttgaatttttc

SEQ ID NO: 342951 - DNA, 12 bp, Artificial Sequence
  Oligonucleotide primer for the detection of SNP TSC0042797
ctaaactcctca

SEQ ID NO: 342952 - DNA, 12 bp, Artificial Sequence
  Oligonucleotide primer for the detection of SNP TSC0042797
ctaaactcctcg

SEQ ID NO: 342953 - DNA, 12 bp, Artificial Sequence
  Oligonucleotide primer for the detection of SNP TSC0042797
agatagtgggga

SEQ ID NO: 342954 - DNA, 12 bp, Artificial Sequence
  Oligonucleotide primer for the detection of SNP TSC0042802
ctctacatcaat

SEQ ID NO: 342955 - DNA, 12 bp, Artificial Sequence
  Oligonucleotide primer for the detection of SNP TSC0042802
gtaagggaggat

SEQ ID NO: 342956 - DNA, 12 bp, Artificial Sequence
  Oligonucleotide primer for the detection of SNP TSC0042802
ttttgtattagt

SEQ ID NO: 342957 - DNA, 12 bp, Artificial Sequence
  Oligonucleotide primer for the detection of SNP TSC0042803
aagtttagttta

SEQ ID NO: 342958 - DNA, 12 bp, Artificial Sequence
  Oligonucleotide primer for the detection of SNP TSC0042804
taaaccctcccc

SEQ ID NO: 342959 - DNA, 12 bp, Artificial Sequence
  Oligonucleotide primer for the detection of SNP TSC0042804
gggggtggagga

SEQ ID NO: 342960 - DNA, 12 bp, Artificial Sequence
  Oligonucleotide primer for the detection of SNP TSC0042805
ccctccccttcc

SEQ ID NO: 342961 - DNA, 12 bp, Artificial Sequence
  Oligonucleotide primer for the detection of SNP TSC0042805
gaaggggggtgg

SEQ ID NO: 342962 - DNA, 12 bp, Artificial Sequence
  Oligonucleotide primer for the detection of SNP TSC0042806
ttttgagggatt

SEQ ID NO: 342963 - DNA, 12 bp, Artificial Sequence
  Oligonucleotide primer for the detection of SNP TSC0042809
ttcataactaaa

SEQ ID NO: 342964 - DNA, 12 bp, Artificial Sequence
  Oligonucleotide primer for the detection of SNP TSC0042809
atggtatgtatt

SEQ ID NO: 342965 - DNA, 12 bp, Artificial Sequence
  Oligonucleotide primer for the detection of SNP TSC0042809
tataatatacat

SEQ ID NO: 342966 - DNA, 12 bp, Artificial Sequence
  Oligonucleotide primer for the detection of SNP TSC0042809
attttatagtta

SEQ ID NO: 342967 - DNA, 12 bp, Artificial Sequence
  Oligonucleotide primer for the detection of SNP TSC0042810
aacaaatattat

SEQ ID NO: 342968 - DNA, 12 bp, Artificial Sequence
  Oligonucleotide primer for the detection of SNP TSC0042810
aaagtttttaag

SEQ ID NO: 342969 - DNA, 12 bp, Artificial Sequence
  Oligonucleotide primer for the detection of SNP TSC0042814
aaaaaacttttt

SEQ ID NO: 342970 - DNA, 12 bp, Artificial Sequence
  Oligonucleotide primer for the detection of SNP TSC0042814
taggaaattttt

SEQ ID NO: 342971 - DNA, 12 bp, Artificial Sequence
  Oligonucleotide primer for the detection of SNP TSC0042814
taaaaaattttt

SEQ ID NO: 342972 - DNA, 12 bp, Artificial Sequence
  Oligonucleotide primer for the detection of SNP TSC0042814
ggagaatttttt

SEQ ID NO: 342973 - DNA, 12 bp, Artificial Sequence
  Oligonucleotide primer for the detection of SNP TSC0042815
taatgttttttt

SEQ ID NO: 342974 - DNA, 12 bp, Artificial Sequence
  Oligonucleotide primer for the detection of SNP TSC0042815
ttaatatctctc

SEQ ID NO: 342975 - DNA, 12 bp, Artificial Sequence
  Oligonucleotide primer for the detection of SNP TSC0042815
aatagaaggaat

SEQ ID NO: 342976 - DNA, 12 bp, Artificial Sequence
  Oligonucleotide primer for the detection of SNP TSC0042816
ccacccatctct

SEQ ID NO: 342977 - DNA, 12 bp, Artificial Sequence
  Oligonucleotide primer for the detection of SNP TSC0042816
ccacccgtctct

SEQ ID NO: 342978 - DNA, 12 bp, Artificial Sequence
  Oligonucleotide primer for the detection of SNP TSC0042816
aaggaggaagga

SEQ ID NO: 342979 - DNA, 12 bp, Artificial Sequence
  Oligonucleotide primer for the detection of SNP TSC0042816
ttcgtttttttc

SEQ ID NO: 342980 - DNA, 12 bp, Artificial Sequence
  Oligonucleotide primer for the detection of SNP TSC0042817
ccttattttttt

SEQ ID NO: 342981 - DNA, 12 bp, Artificial Sequence
  Oligonucleotide primer for the detection of SNP TSC0042817
agagatttaaaa

SEQ ID NO: 342982 - DNA, 12 bp, Artificial Sequence
  Oligonucleotide primer for the detection of SNP TSC0042818
cctaaaacctca

SEQ ID NO: 342983 - DNA, 12 bp, Artificial Sequence
  Oligonucleotide primer for the detection of SNP TSC0042818
atttatttggtt

SEQ ID NO: 342984 - DNA, 12 bp, Artificial Sequence
  Oligonucleotide primer for the detection of SNP TSC0042818
atttacttaatc

SEQ ID NO: 342985 - DNA, 12 bp, Artificial Sequence
  Oligonucleotide primer for the detection of SNP TSC0042818
tttagggtttta

SEQ ID NO: 342986 - DNA, 12 bp, Artificial Sequence
  Oligonucleotide primer for the detection of SNP TSC0042819
caacaaaatttt

SEQ ID NO: 342987 - DNA, 12 bp, Artificial Sequence
  Oligonucleotide primer for the detection of SNP TSC0042819
agtttggaggga

SEQ ID NO: 342988 - DNA, 12 bp, Artificial Sequence
  Oligonucleotide primer for the detection of SNP TSC0042820
atatgagttagt

SEQ ID NO: 342989 - DNA, 12 bp, Artificial Sequence
  Oligonucleotide primer for the detection of SNP TSC0042820
atttggaagatt

SEQ ID NO: 342990 - DNA, 12 bp, Artificial Sequence
  Oligonucleotide primer for the detection of SNP TSC0042820
atttggaagatc

SEQ ID NO: 342991 - DNA, 12 bp, Artificial Sequence
  Oligonucleotide primer for the detection of SNP TSC0042821
taaaatatcaac

SEQ ID NO: 342992 - DNA, 12 bp, Artificial Sequence
  Oligonucleotide primer for the detection of SNP TSC0042821
atatagggatag

SEQ ID NO: 342993 - DNA, 12 bp, Artificial Sequence
  Oligonucleotide primer for the detection of SNP TSC0042822
aaaatatatatt

SEQ ID NO: 342994 - DNA, 12 bp, Artificial Sequence
  Oligonucleotide primer for the detection of SNP TSC0042822
tgattttgttaa

SEQ ID NO: 342995 - DNA, 12 bp, Artificial Sequence
  Oligonucleotide primer for the detection of SNP TSC0042822
taaccttaccaa

SEQ ID NO: 342996 - DNA, 12 bp, Artificial Sequence
  Oligonucleotide primer for the detection of SNP TSC0042822
aggatgtatatt

SEQ ID NO: 342997 - DNA, 12 bp, Artificial Sequence
  Oligonucleotide primer for the detection of SNP TSC0042825
taatctatcttc

SEQ ID NO: 342998 - DNA, 12 bp, Artificial Sequence
  Oligonucleotide primer for the detection of SNP TSC0042825
aagaattagtga

SEQ ID NO: 342999 - DNA, 12 bp, Artificial Sequence
  Oligonucleotide primer for the detection of SNP TSC0007830
acctacccccaa

SEQ ID NO: 343000 - DNA, 12 bp, Artificial Sequence
  Oligonucleotide primer for the detection of SNP TSC0007830
ttagtttttaat

SEQ ID NO: 343001 - DNA, 12 bp, Artificial Sequence
  Oligonucleotide primer for the detection of SNP TSC0007830
ctaacctttaat

SEQ ID NO: 343002 - DNA, 12 bp, Artificial Sequence
  Oligonucleotide primer for the detection of SNP TSC0007830
atttatttttag

SEQ ID NO: 343003 - DNA, 12 bp, Artificial Sequence
  Oligonucleotide primer for the detection of SNP TSC0005162
caacacaaacat

SEQ ID NO: 343004 - DNA, 12 bp, Artificial Sequence
  Oligonucleotide primer for the detection of SNP TSC0005162
ttaggaatagta

SEQ ID NO: 343005 - DNA, 12 bp, Artificial Sequence
  Oligonucleotide primer for the detection of SNP TSC0042828
gatatttttttg

SEQ ID NO: 343006 - DNA, 12 bp, Artificial Sequence
  Oligonucleotide primer for the detection of SNP TSC0042829
aaatcccctaac

SEQ ID NO: 343007 - DNA, 12 bp, Artificial Sequence
  Oligonucleotide primer for the detection of SNP TSC0042829
atttagttttgg

SEQ ID NO: 343008 - DNA, 12 bp, Artificial Sequence
  Oligonucleotide primer for the detection of SNP TSC0010186
cttaaacttaaa

SEQ ID NO: 343009 - DNA, 12 bp, Artificial Sequence
  Oligonucleotide primer for the detection of SNP TSC0010186
aatattgatgat

SEQ ID NO: 343010 - DNA, 12 bp, Artificial Sequence
  Oligonucleotide primer for the detection of SNP TSC0010186
aatatcgatgat

SEQ ID NO: 343011 - DNA, 12 bp, Artificial Sequence
  Oligonucleotide primer for the detection of SNP TSC0010186
aatattgatgac

SEQ ID NO: 343012 - DNA, 12 bp, Artificial Sequence
  Oligonucleotide primer for the detection of SNP TSC0010186
aatatcgatgac

SEQ ID NO: 343013 - DNA, 12 bp, Artificial Sequence
  Oligonucleotide primer for the detection of SNP TSC0010186
aataccaataac

SEQ ID NO: 343014 - DNA, 12 bp, Artificial Sequence
  Oligonucleotide primer for the detection of SNP TSC0010186
aataccgataac

SEQ ID NO: 343015 - DNA, 12 bp, Artificial Sequence
  Oligonucleotide primer for the detection of SNP TSC0010186
tgagtttggatt

SEQ ID NO: 343016 - DNA, 12 bp, Artificial Sequence
  Oligonucleotide primer for the detection of SNP TSC0010187
taagagggaatt

SEQ ID NO: 343017 - DNA, 12 bp, Artificial Sequence
  Oligonucleotide primer for the detection of SNP TSC0010187
tgaagggtattt

SEQ ID NO: 343018 - DNA, 12 bp, Artificial Sequence
  Oligonucleotide primer for the detection of SNP TSC0042830
gtatagtaggta

SEQ ID NO: 343019 - DNA, 12 bp, Artificial Sequence
  Oligonucleotide primer for the detection of SNP TSC0042831
tttcttcattaa

SEQ ID NO: 343020 - DNA, 12 bp, Artificial Sequence
  Oligonucleotide primer for the detection of SNP TSC0042832
cacaatttcccc

SEQ ID NO: 343021 - DNA, 12 bp, Artificial Sequence
  Oligonucleotide primer for the detection of SNP TSC0042832
aaaatgttatta

SEQ ID NO: 343022 - DNA, 12 bp, Artificial Sequence
  Oligonucleotide primer for the detection of SNP TSC0042833
tcaatatcccct

SEQ ID NO: 343023 - DNA, 12 bp, Artificial Sequence
  Oligonucleotide primer for the detection of SNP TSC0042833
atatagtgttta

SEQ ID NO: 343024 - DNA, 12 bp, Artificial Sequence
  Oligonucleotide primer for the detection of SNP TSC0042834
ggtaagtgagta

SEQ ID NO: 343025 - DNA, 12 bp, Artificial Sequence
  Oligonucleotide primer for the detection of SNP TSC0042835
acaactttcata

SEQ ID NO: 343026 - DNA, 12 bp, Artificial Sequence
  Oligonucleotide primer for the detection of SNP TSC0042835
tcttctacaact

SEQ ID NO: 343027 - DNA, 12 bp, Artificial Sequence
  Oligonucleotide primer for the detection of SNP TSC0042835
ggtaatttttat

SEQ ID NO: 343028 - DNA, 12 bp, Artificial Sequence
  Oligonucleotide primer for the detection of SNP TSC0042836
aggtgattaggt

SEQ ID NO: 343029 - DNA, 12 bp, Artificial Sequence
  Oligonucleotide primer for the detection of SNP TSC0042836
atggtagaaaat

SEQ ID NO: 343030 - DNA, 12 bp, Artificial Sequence
  Oligonucleotide primer for the detection of SNP TSC0042837
ttcacactaaca

SEQ ID NO: 343031 - DNA, 12 bp, Artificial Sequence
  Oligonucleotide primer for the detection of SNP TSC0042837
ttcacgctaaca

SEQ ID NO: 343032 - DNA, 12 bp, Artificial Sequence
  Oligonucleotide primer for the detection of SNP TSC0042837
ttaatgttattt

SEQ ID NO: 343033 - DNA, 12 bp, Artificial Sequence
  Oligonucleotide primer for the detection of SNP TSC0042837
tatcatctaaaa

SEQ ID NO: 343034 - DNA, 12 bp, Artificial Sequence
  Oligonucleotide primer for the detection of SNP TSC0042837
tttatgttaata

SEQ ID NO: 343035 - DNA, 12 bp, Artificial Sequence
  Oligonucleotide primer for the detection of SNP TSC0042837
tttacgttaata

SEQ ID NO: 343036 - DNA, 12 bp, Artificial Sequence
  Oligonucleotide primer for the detection of SNP TSC0042838
taataatattat

SEQ ID NO: 343037 - DNA, 12 bp, Artificial Sequence
  Oligonucleotide primer for the detection of SNP TSC0042838
tgttaaattgta

SEQ ID NO: 343038 - DNA, 12 bp, Artificial Sequence
  Oligonucleotide primer for the detection of SNP TSC0042839
tacctaccactt

SEQ ID NO: 343039 - DNA, 12 bp, Artificial Sequence
  Oligonucleotide primer for the detection of SNP TSC0042839
taatttagaata

SEQ ID NO: 343040 - DNA, 12 bp, Artificial Sequence
  Oligonucleotide primer for the detection of SNP TSC0042839
taactcaaaaca

SEQ ID NO: 343041 - DNA, 12 bp, Artificial Sequence
  Oligonucleotide primer for the detection of SNP TSC0042840
atcaaccaaaat

SEQ ID NO: 343042 - DNA, 12 bp, Artificial Sequence
  Oligonucleotide primer for the detection of SNP TSC0042840
gtttatagttgg

SEQ ID NO: 343043 - DNA, 12 bp, Artificial Sequence
  Oligonucleotide primer for the detection of SNP TSC0042844
aaccatcacacc

SEQ ID NO: 343044 - DNA, 12 bp, Artificial Sequence
  Oligonucleotide primer for the detection of SNP TSC0042844
aagaatagatga

SEQ ID NO: 343045 - DNA, 12 bp, Artificial Sequence
  Oligonucleotide primer for the detection of SNP TSC0042845
ataaaacttcac

SEQ ID NO: 343046 - DNA, 12 bp, Artificial Sequence
  Oligonucleotide primer for the detection of SNP TSC0042845
atggggttttat

SEQ ID NO: 343047 - DNA, 12 bp, Artificial Sequence
  Oligonucleotide primer for the detection of SNP TSC0042846
ttaactacattt

SEQ ID NO: 343048 - DNA, 12 bp, Artificial Sequence
  Oligonucleotide primer for the detection of SNP TSC0042846
atatggtttaag

SEQ ID NO: 343049 - DNA, 12 bp, Artificial Sequence
  Oligonucleotide primer for the detection of SNP TSC0009000
aatcttcaacat

SEQ ID NO: 343050 - DNA, 12 bp, Artificial Sequence
  Oligonucleotide primer for the detection of SNP TSC0009001
taacttaacaat

SEQ ID NO: 343051 - DNA, 12 bp, Artificial Sequence
  Oligonucleotide primer for the detection of SNP TSC0009001
tattgatagaaa

SEQ ID NO: 343052 - DNA, 12 bp, Artificial Sequence
  Oligonucleotide primer for the detection of SNP TSC0042851
tcataaacatta

SEQ ID NO: 343053 - DNA, 12 bp, Artificial Sequence
  Oligonucleotide primer for the detection of SNP TSC0042851
tttatgggtatt

SEQ ID NO: 343054 - DNA, 12 bp, Artificial Sequence
  Oligonucleotide primer for the detection of SNP TSC0042852
atattaaaacat

SEQ ID NO: 343055 - DNA, 12 bp, Artificial Sequence
  Oligonucleotide primer for the detection of SNP TSC0042852
atttggtggata

SEQ ID NO: 343056 - DNA, 12 bp, Artificial Sequence
  Oligonucleotide primer for the detection of SNP TSC0042852
attcggtggata

SEQ ID NO: 343057 - DNA, 12 bp, Artificial Sequence
  Oligonucleotide primer for the detection of SNP TSC0042852
attcaataaata

SEQ ID NO: 343058 - DNA, 12 bp, Artificial Sequence
  Oligonucleotide primer for the detection of SNP TSC0042852
attcgataaata

SEQ ID NO: 343059 - DNA, 12 bp, Artificial Sequence
  Oligonucleotide primer for the detection of SNP TSC0042852
atgttgaagtat

SEQ ID NO: 343060 - DNA, 12 bp, Artificial Sequence
  Oligonucleotide primer for the detection of SNP TSC0042854
tacaaatacact

SEQ ID NO: 343061 - DNA, 12 bp, Artificial Sequence
  Oligonucleotide primer for the detection of SNP TSC0042854
ttttcaaacttt

SEQ ID NO: 343062 - DNA, 12 bp, Artificial Sequence
  Oligonucleotide primer for the detection of SNP TSC0042854
tgtaggtgtatt

SEQ ID NO: 343063 - DNA, 12 bp, Artificial Sequence
  Oligonucleotide primer for the detection of SNP TSC0042855
tactaacataaa

SEQ ID NO: 343064 - DNA, 12 bp, Artificial Sequence
  Oligonucleotide primer for the detection of SNP TSC0042855
gttaatatatat

SEQ ID NO: 343065 - DNA, 12 bp, Artificial Sequence
  Oligonucleotide primer for the detection of SNP TSC0042855
tattgatatagg

SEQ ID NO: 343066 - DNA, 12 bp, Artificial Sequence
  Oligonucleotide primer for the detection of SNP TSC0042856
aataaatacaac

SEQ ID NO: 343067 - DNA, 12 bp, Artificial Sequence
  Oligonucleotide primer for the detection of SNP TSC0042856
ttgtttaaatat

SEQ ID NO: 343068 - DNA, 12 bp, Artificial Sequence
  Oligonucleotide primer for the detection of SNP TSC0042856
ttatctaaatat

SEQ ID NO: 343069 - DNA, 12 bp, Artificial Sequence
  Oligonucleotide primer for the detection of SNP TSC0042856
aatgggtataat

SEQ ID NO: 343070 - DNA, 12 bp, Artificial Sequence
  Oligonucleotide primer for the detection of SNP TSC0042857
acttaaaaaaac

SEQ ID NO: 343071 - DNA, 12 bp, Artificial Sequence
  Oligonucleotide primer for the detection of SNP TSC0042858
acttacaaaaaa

SEQ ID NO: 343072 - DNA, 12 bp, Artificial Sequence
  Oligonucleotide primer for the detection of SNP TSC0042858
tcattcccttac

SEQ ID NO: 343073 - DNA, 12 bp, Artificial Sequence
  Oligonucleotide primer for the detection of SNP TSC0042858
gtttataaaaaa

SEQ ID NO: 343074 - DNA, 12 bp, Artificial Sequence
  Oligonucleotide primer for the detection of SNP TSC0042862
gtgattttgaga

SEQ ID NO: 343075 - DNA, 12 bp, Artificial Sequence
  Oligonucleotide primer for the detection of SNP TSC0042865
ataccaaacaat

SEQ ID NO: 343076 - DNA, 12 bp, Artificial Sequence
  Oligonucleotide primer for the detection of SNP TSC0042865
tggaattttaaa

SEQ ID NO: 343077 - DNA, 12 bp, Artificial Sequence
  Oligonucleotide primer for the detection of SNP TSC0042865
gtattaggtagt

SEQ ID NO: 343078 - DNA, 12 bp, Artificial Sequence
  Oligonucleotide primer for the detection of SNP TSC0042866
cataattaaatt

SEQ ID NO: 343079 - DNA, 12 bp, Artificial Sequence
  Oligonucleotide primer for the detection of SNP TSC0042866
attatattagag

SEQ ID NO: 343080 - DNA, 12 bp, Artificial Sequence
  Oligonucleotide primer for the detection of SNP TSC0042868
ccaactacaata

SEQ ID NO: 343081 - DNA, 12 bp, Artificial Sequence
  Oligonucleotide primer for the detection of SNP TSC0042868
atgtcgttggat

SEQ ID NO: 343082 - DNA, 12 bp, Artificial Sequence
  Oligonucleotide primer for the detection of SNP TSC0042868
atatcactaaac

SEQ ID NO: 343083 - DNA, 12 bp, Artificial Sequence
  Oligonucleotide primer for the detection of SNP TSC0042868
atatcgctaaac

SEQ ID NO: 343084 - DNA, 12 bp, Artificial Sequence
  Oligonucleotide primer for the detection of SNP TSC0042868
ttagttgtagtg

SEQ ID NO: 343085 - DNA, 12 bp, Artificial Sequence
  Oligonucleotide primer for the detection of SNP TSC0042871
tgttgaggttta

SEQ ID NO: 343086 - DNA, 12 bp, Artificial Sequence
  Oligonucleotide primer for the detection of SNP TSC0042871
cgttgaggttta

SEQ ID NO: 343087 - DNA, 12 bp, Artificial Sequence
  Oligonucleotide primer for the detection of SNP TSC0042872
cctaacccattc

SEQ ID NO: 343088 - DNA, 12 bp, Artificial Sequence
  Oligonucleotide primer for the detection of SNP TSC0042875
cttaataactat

SEQ ID NO: 343089 - DNA, 12 bp, Artificial Sequence
  Oligonucleotide primer for the detection of SNP TSC0042875
taatatattagg

SEQ ID NO: 343090 - DNA, 12 bp, Artificial Sequence
  Oligonucleotide primer for the detection of SNP TSC0042880
ctaaatcctaac

SEQ ID NO: 343091 - DNA, 12 bp, Artificial Sequence
  Oligonucleotide primer for the detection of SNP TSC0042880
tatataatggtg

SEQ ID NO: 343092 - DNA, 12 bp, Artificial Sequence
  Oligonucleotide primer for the detection of SNP TSC0042881
actaaaacgaaa

SEQ ID NO: 343093 - DNA, 12 bp, Artificial Sequence
  Oligonucleotide primer for the detection of SNP TSC0042881
gtaatatgtttt

SEQ ID NO: 343094 - DNA, 12 bp, Artificial Sequence
  Oligonucleotide primer for the detection of SNP TSC0042881
ataatatatctt

SEQ ID NO: 343095 - DNA, 12 bp, Artificial Sequence
  Oligonucleotide primer for the detection of SNP TSC0042881
gttaaaatgaaa

SEQ ID NO: 343096 - DNA, 12 bp, Artificial Sequence
  Oligonucleotide primer for the detection of SNP TSC0042881
gttaaaacgaaa

SEQ ID NO: 343097 - DNA, 12 bp, Artificial Sequence
  Oligonucleotide primer for the detection of SNP TSC0042882
attaaaataata

SEQ ID NO: 343098 - DNA, 12 bp, Artificial Sequence
  Oligonucleotide primer for the detection of SNP TSC0042883
acttaaattctt

SEQ ID NO: 343099 - DNA, 12 bp, Artificial Sequence
  Oligonucleotide primer for the detection of SNP TSC0042883
gatatgtattta

SEQ ID NO: 343100 - DNA, 12 bp, Artificial Sequence
  Oligonucleotide primer for the detection of SNP TSC0042886
ttttattagtgt

SEQ ID NO: 343101 - DNA, 12 bp, Artificial Sequence
  Oligonucleotide primer for the detection of SNP TSC0042886
ccttaccaatac

SEQ ID NO: 343102 - DNA, 12 bp, Artificial Sequence
  Oligonucleotide primer for the detection of SNP TSC0042886
tttaaatttggt

SEQ ID NO: 343103 - DNA, 12 bp, Artificial Sequence
  Oligonucleotide primer for the detection of SNP TSC0042887
tttagtgtggat

SEQ ID NO: 343104 - DNA, 12 bp, Artificial Sequence
  Oligonucleotide primer for the detection of SNP TSC0042887
ttttaatataaa

SEQ ID NO: 343105 - DNA, 12 bp, Artificial Sequence
  Oligonucleotide primer for the detection of SNP TSC0042887
gagaagtttttg

SEQ ID NO: 343106 - DNA, 12 bp, Artificial Sequence
  Oligonucleotide primer for the detection of SNP TSC0042890
accaaattatat

SEQ ID NO: 343107 - DNA, 12 bp, Artificial Sequence
  Oligonucleotide primer for the detection of SNP TSC0042892
catattttaact

SEQ ID NO: 343108 - DNA, 12 bp, Artificial Sequence
  Oligonucleotide primer for the detection of SNP TSC0042892
gggatattatat

SEQ ID NO: 343109 - DNA, 12 bp, Artificial Sequence
  Oligonucleotide primer for the detection of SNP TSC0042892
aaaacattatac

SEQ ID NO: 343110 - DNA, 12 bp, Artificial Sequence
  Oligonucleotide primer for the detection of SNP TSC0042894
ataattaataat

SEQ ID NO: 343111 - DNA, 12 bp, Artificial Sequence
  Oligonucleotide primer for the detection of SNP TSC0042894
ttatgaaataaa

SEQ ID NO: 343112 - DNA, 12 bp, Artificial Sequence
  Oligonucleotide primer for the detection of SNP TSC0042895
ccttaacaacct

SEQ ID NO: 343113 - DNA, 12 bp, Artificial Sequence
  Oligonucleotide primer for the detection of SNP TSC0042895
ttagttttataa

SEQ ID NO: 343114 - DNA, 12 bp, Artificial Sequence
  Oligonucleotide primer for the detection of SNP TSC0042897
attcatttcacc

SEQ ID NO: 343115 - DNA, 12 bp, Artificial Sequence
  Oligonucleotide primer for the detection of SNP TSC0042897
tggtagagagga

SEQ ID NO: 343116 - DNA, 12 bp, Artificial Sequence
  Oligonucleotide primer for the detection of SNP TSC0042899
aaagtaaaatga

SEQ ID NO: 343117 - DNA, 12 bp, Artificial Sequence
  Oligonucleotide primer for the detection of SNP TSC0042901
tttataaaattt

SEQ ID NO: 343118 - DNA, 12 bp, Artificial Sequence
  Oligonucleotide primer for the detection of SNP TSC0042901
taaggtaggttt

SEQ ID NO: 343119 - DNA, 12 bp, Artificial Sequence
  Oligonucleotide primer for the detection of SNP TSC0042901
atcaaaataaac

SEQ ID NO: 343120 - DNA, 12 bp, Artificial Sequence
  Oligonucleotide primer for the detection of SNP TSC0042901
tttataagattt

SEQ ID NO: 343121 - DNA, 12 bp, Artificial Sequence
  Oligonucleotide primer for the detection of SNP TSC0042902
aaatcaaaatca

SEQ ID NO: 343122 - DNA, 12 bp, Artificial Sequence
  Oligonucleotide primer for the detection of SNP TSC0042902
gagtaattgatt

SEQ ID NO: 343123 - DNA, 12 bp, Artificial Sequence
  Oligonucleotide primer for the detection of SNP TSC0042902
aaataactaatc

SEQ ID NO: 343124 - DNA, 12 bp, Artificial Sequence
  Oligonucleotide primer for the detection of SNP TSC0042902
aagttaaagtta

SEQ ID NO: 343125 - DNA, 12 bp, Artificial Sequence
  Oligonucleotide primer for the detection of SNP TSC0042903
tccatcaaaata

SEQ ID NO: 343126 - DNA, 12 bp, Artificial Sequence
  Oligonucleotide primer for the detection of SNP TSC0042903
agaaatatagta

SEQ ID NO: 343127 - DNA, 12 bp, Artificial Sequence
  Oligonucleotide primer for the detection of SNP TSC0042903
aaaaatacaata

SEQ ID NO: 343128 - DNA, 12 bp, Artificial Sequence
  Oligonucleotide primer for the detection of SNP TSC0042903
ttttattagaat

SEQ ID NO: 343129 - DNA, 12 bp, Artificial Sequence
  Oligonucleotide primer for the detection of SNP TSC0042904
atccatccacct

SEQ ID NO: 343130 - DNA, 12 bp, Artificial Sequence
  Oligonucleotide primer for the detection of SNP TSC0042904
atccatccgcct

SEQ ID NO: 343131 - DNA, 12 bp, Artificial Sequence
  Oligonucleotide primer for the detection of SNP TSC0042904
atccgtccacct

SEQ ID NO: 343132 - DNA, 12 bp, Artificial Sequence
  Oligonukleotid-Primer
atccgtccgcct

SEQ ID NO: 343133 - DNA, 12 bp, Artificial Sequence
  Oligonucleotide primer for the detection of SNP TSC0042904
tatttttggagg

SEQ ID NO: 343134 - DNA, 12 bp, Artificial Sequence
  Oligonucleotide primer for the detection of SNP TSC0042904
cacttttaaaaa

SEQ ID NO: 343135 - DNA, 12 bp, Artificial Sequence
  Oligonucleotide primer for the detection of SNP TSC0004794
ttaataaaaaga

SEQ ID NO: 343136 - DNA, 12 bp, Artificial Sequence
  Oligonukleotid-Primer
acccaactaatt

SEQ ID NO: 343137 - DNA, 12 bp, Artificial Sequence
  Oligonucleotide primer for the detection of SNP TSC0004795
acccgactaatt

SEQ ID NO: 343138 - DNA, 12 bp, Artificial Sequence
  Oligonucleotide primer for the detection of SNP TSC0004795
gtttggttaatt

SEQ ID NO: 343139 - DNA, 12 bp, Artificial Sequence
  Oligonucleotide primer for the detection of SNP TSC0004795
gttcggttaatt

SEQ ID NO: 343140 - DNA, 12 bp, Artificial Sequence
  Oligonucleotide primer for the detection of SNP TSC0005766
tctaaattcttt

SEQ ID NO: 343141 - DNA, 12 bp, Artificial Sequence
  Oligonucleotide primer for the detection of SNP TSC0005766
tgggataataaa

SEQ ID NO: 343142 - DNA, 12 bp, Artificial Sequence
  Oligonucleotide primer for the detection of SNP TSC0005542
aatataaatatt

SEQ ID NO: 343143 - DNA, 12 bp, Artificial Sequence
  Oligonucleotide primer for the detection of SNP TSC0005542
ataatatgtaag

SEQ ID NO: 343144 - DNA, 12 bp, Artificial Sequence
  Oligonucleotide primer for the detection of SNP TSC0042910
gaagtttattta

SEQ ID NO: 343145 - DNA, 12 bp, Artificial Sequence
  Oligonucleotide primer for the detection of SNP TSC0042910
aaaattcatcca

SEQ ID NO: 343146 - DNA, 12 bp, Artificial Sequence
  Oligonucleotide primer for the detection of SNP TSC0042910
ggttgtgggaat

SEQ ID NO: 343147 - DNA, 12 bp, Artificial Sequence
  Oligonucleotide primer for the detection of SNP TSC0042911
catataaataaa

SEQ ID NO: 343148 - DNA, 12 bp, Artificial Sequence
  Oligonucleotide primer for the detection of SNP TSC0042911
tagggtggaaat

SEQ ID NO: 343149 - DNA, 12 bp, Artificial Sequence
  Oligonucleotide primer for the detection of SNP TSC0042911
caaaataaaaac

SEQ ID NO: 343150 - DNA, 12 bp, Artificial Sequence
  Oligonucleotide primer for the detection of SNP TSC0042911
tatgtggataaa

SEQ ID NO: 343151 - DNA, 12 bp, Artificial Sequence
  Oligonucleotide primer for the detection of SNP TSC0042912
cactaatcctat

SEQ ID NO: 343152 - DNA, 12 bp, Artificial Sequence
  Oligonucleotide primer for the detection of SNP TSC0042912
ttgaattgttta

SEQ ID NO: 343153 - DNA, 12 bp, Artificial Sequence
  Oligonucleotide primer for the detection of SNP TSC0042915
acaaaacatttc

SEQ ID NO: 343154 - DNA, 12 bp, Artificial Sequence
  Oligonucleotide primer for the detection of SNP TSC0042915
gagagtttagat

SEQ ID NO: 343155 - DNA, 12 bp, Artificial Sequence
  Oligonucleotide primer for the detection of SNP TSC0042915
aaaaatccaaat

SEQ ID NO: 343156 - DNA, 12 bp, Artificial Sequence
  Oligonucleotide primer for the detection of SNP TSC0042916
aaacctaatcca

SEQ ID NO: 343157 - DNA, 12 bp, Artificial Sequence
  Oligonucleotide primer for the detection of SNP TSC0042916
ttagggttttgt

SEQ ID NO: 343158 - DNA, 12 bp, Artificial Sequence
  Oligonucleotide primer for the detection of SNP TSC0042916
ttaaaaccttac

SEQ ID NO: 343159 - DNA, 12 bp, Artificial Sequence
  Oligonucleotide primer for the detection of SNP TSC0042916
aagtttaattta

SEQ ID NO: 343160 - DNA, 12 bp, Artificial Sequence
  Oligonucleotide primer for the detection of SNP TSC0042917
aattattaacct

SEQ ID NO: 343161 - DNA, 12 bp, Artificial Sequence
  Oligonucleotide primer for the detection of SNP TSC0042917
tattagttataa

SEQ ID NO: 343162 - DNA, 12 bp, Artificial Sequence
  Oligonucleotide primer for the detection of SNP TSC0042917
tattaaccataa

SEQ ID NO: 343163 - DNA, 12 bp, Artificial Sequence
  Oligonucleotide primer for the detection of SNP TSC0042917
agttattaattt

SEQ ID NO: 343164 - DNA, 12 bp, Artificial Sequence
  Oligonucleotide primer for the detection of SNP TSC0042919
aattgtaagtta

SEQ ID NO: 343165 - DNA, 12 bp, Artificial Sequence
  Oligonucleotide primer for the detection of SNP TSC0004816
tcacattcactc

SEQ ID NO: 343166 - DNA, 12 bp, Artificial Sequence
  Oligonucleotide primer for the detection of SNP TSC0004816
ttagtgagtgag

SEQ ID NO: 343167 - DNA, 12 bp, Artificial Sequence
  Oligonucleotide primer for the detection of SNP TSC0042920
aaaattaaatta

SEQ ID NO: 343168 - DNA, 12 bp, Artificial Sequence
  Oligonucleotide primer for the detection of SNP TSC0042920
aaaatgtttttg

SEQ ID NO: 343169 - DNA, 12 bp, Artificial Sequence
  Oligonucleotide primer for the detection of SNP TSC0042920
aaatatttttaa

SEQ ID NO: 343170 - DNA, 12 bp, Artificial Sequence
  Oligonucleotide primer for the detection of SNP TSC0042920
aaaattaagttg

SEQ ID NO: 343171 - DNA, 12 bp, Artificial Sequence
  Oligonucleotide primer for the detection of SNP TSC0042921
catttttttaat

SEQ ID NO: 343172 - DNA, 12 bp, Artificial Sequence
  Oligonucleotide primer for the detection of SNP TSC0042923
ctctcatattta

SEQ ID NO: 343173 - DNA, 12 bp, Artificial Sequence
  Oligonucleotide primer for the detection of SNP TSC0042923
ctctcgtattta

SEQ ID NO: 343174 - DNA, 12 bp, Artificial Sequence
  Oligonucleotide primer for the detection of SNP TSC0042923
cataaaatattt

SEQ ID NO: 343175 - DNA, 12 bp, Artificial Sequence
  Oligonucleotide primer for the detection of SNP TSC0042923
ttttcgtgttta

SEQ ID NO: 343176 - DNA, 12 bp, Artificial Sequence
  Oligonucleotide primer for the detection of SNP TSC0042924
ttaaagatttat

SEQ ID NO: 343177 - DNA, 12 bp, Artificial Sequence
  Oligonucleotide primer for the detection of SNP TSC0042924
tcaaaaatttac

SEQ ID NO: 343178 - DNA, 12 bp, Artificial Sequence
  Oligonucleotide primer for the detection of SNP TSC0042924
aagtttaaagag

SEQ ID NO: 343179 - DNA, 12 bp, Artificial Sequence
  Oligonucleotide primer for the detection of SNP TSC0042928
gtttgtttgcga

SEQ ID NO: 343180 - DNA, 12 bp, Artificial Sequence
  Oligonucleotide primer for the detection of SNP TSC0042929
ttgagatgtatg

SEQ ID NO: 343181 - DNA, 12 bp, Artificial Sequence
  Oligonucleotide primer for the detection of SNP TSC0042930
taacaaaactac

SEQ ID NO: 343182 - DNA, 12 bp, Artificial Sequence
  Oligonucleotide primer for the detection of SNP TSC0042931
acttaaattcct

SEQ ID NO: 343183 - DNA, 12 bp, Artificial Sequence
  Oligonucleotide primer for the detection of SNP TSC0042931
tgttagtttttt

SEQ ID NO: 343184 - DNA, 12 bp, Artificial Sequence
  Oligonucleotide primer for the detection of SNP TSC0042931
ctaccaatccct

SEQ ID NO: 343185 - DNA, 12 bp, Artificial Sequence
  Oligonucleotide primer for the detection of SNP TSC0042932
aaccaaaaactt

SEQ ID NO: 343186 - DNA, 12 bp, Artificial Sequence
  Oligonucleotide primer for the detection of SNP TSC0042932
aaccgaaaactt

SEQ ID NO: 343187 - DNA, 12 bp, Artificial Sequence
  Oligonucleotide primer for the detection of SNP TSC0042932
aggtttaggttg

SEQ ID NO: 343188 - DNA, 12 bp, Artificial Sequence
  Oligonucleotide primer for the detection of SNP TSC0042933
ttctacttttat

SEQ ID NO: 343189 - DNA, 12 bp, Artificial Sequence
  Oligonucleotide primer for the detection of SNP TSC0042933
ttagtttggagt

SEQ ID NO: 343190 - DNA, 12 bp, Artificial Sequence
  Oligonucleotide primer for the detection of SNP TSC0042933
tcaacttaaaac

SEQ ID NO: 343191 - DNA, 12 bp, Artificial Sequence
  Oligonucleotide primer for the detection of SNP TSC0042934
cctcctactccc

SEQ ID NO: 343192 - DNA, 12 bp, Artificial Sequence
  Oligonucleotide primer for the detection of SNP TSC0042934
tatttaaggaag

SEQ ID NO: 343193 - DNA, 12 bp, Artificial Sequence
  Oligonucleotide primer for the detection of SNP TSC0042939
aatggggattat

SEQ ID NO: 343194 - DNA, 12 bp, Artificial Sequence
  Oligonucleotide primer for the detection of SNP TSC0042940
tatacaactttc

SEQ ID NO: 343195 - DNA, 12 bp, Artificial Sequence
  Oligonucleotide primer for the detection of SNP TSC0042940
aataaaatagta

SEQ ID NO: 343196 - DNA, 12 bp, Artificial Sequence
  Oligonucleotide primer for the detection of SNP TSC0042941
tagtaattttaa

SEQ ID NO: 343197 - DNA, 12 bp, Artificial Sequence
  Oligonucleotide primer for the detection of SNP TSC0042943
gaattataggtg

SEQ ID NO: 343198 - DNA, 12 bp, Artificial Sequence
  Oligonucleotide primer for the detection of SNP TSC0042944
ctcctcttaatc

SEQ ID NO: 343199 - DNA, 12 bp, Artificial Sequence
  Oligonucleotide primer for the detection of SNP TSC0042944
tagtttttgtta

SEQ ID NO: 343200 - DNA, 12 bp, Artificial Sequence
  Oligonucleotide primer for the detection of SNP TSC0042945
atatacatattc

SEQ ID NO: 343201 - DNA, 12 bp, Artificial Sequence
  Oligonucleotide primer for the detection of SNP TSC0042945
atatacgtattc

SEQ ID NO: 343202 - DNA, 12 bp, Artificial Sequence
  Oligonucleotide primer for the detection of SNP TSC0042945
gattattttata

SEQ ID NO: 343203 - DNA, 12 bp, Artificial Sequence
  Oligonucleotide primer for the detection of SNP TSC0042946
tttttgaattta

SEQ ID NO: 343204 - DNA, 12 bp, Artificial Sequence
  Oligonucleotide primer for the detection of SNP TSC0042947
ttttctttttat

SEQ ID NO: 343205 - DNA, 12 bp, Artificial Sequence
  Oligonucleotide primer for the detection of SNP TSC0042948
tcttaaaaatct

SEQ ID NO: 343206 - DNA, 12 bp, Artificial Sequence
  Oligonucleotide primer for the detection of SNP TSC0042948
taggaaattata

SEQ ID NO: 343207 - DNA, 12 bp, Artificial Sequence
  Oligonucleotide primer for the detection of SNP TSC0042949
tttagttgatta

SEQ ID NO: 343208 - DNA, 12 bp, Artificial Sequence
  Oligonucleotide primer for the detection of SNP TSC0042949
ttcaattaatca

SEQ ID NO: 343209 - DNA, 12 bp, Artificial Sequence
  Oligonucleotide primer for the detection of SNP TSC0042949
aagaggtggttt

SEQ ID NO: 343210 - DNA, 12 bp, Artificial Sequence
  Oligonucleotide primer for the detection of SNP TSC0005175
atcttaatacca

SEQ ID NO: 343211 - DNA, 12 bp, Artificial Sequence
  Oligonucleotide primer for the detection of SNP TSC0005175
taatgttaaaag

SEQ ID NO: 343212 - DNA, 12 bp, Artificial Sequence
  Oligonucleotide primer for the detection of SNP TSC0042951
atatattaaata

SEQ ID NO: 343213 - DNA, 12 bp, Artificial Sequence
  Oligonucleotide primer for the detection of SNP TSC0042951
tgtaagttttta

SEQ ID NO: 343214 - DNA, 12 bp, Artificial Sequence
  Oligonucleotide primer for the detection of SNP TSC0042951
acaaattctcaa

SEQ ID NO: 343215 - DNA, 12 bp, Artificial Sequence
  Oligonucleotide primer for the detection of SNP TSC0042951
ggtgtattgaat

SEQ ID NO: 343216 - DNA, 12 bp, Artificial Sequence
  Oligonucleotide primer for the detection of SNP TSC0042952
tataacccatat

SEQ ID NO: 343217 - DNA, 12 bp, Artificial Sequence
  Oligonucleotide primer for the detection of SNP TSC0042953
caccccacctcc

SEQ ID NO: 343218 - DNA, 12 bp, Artificial Sequence
  Oligonucleotide primer for the detection of SNP TSC0042953
ggaagtggggtt

SEQ ID NO: 343219 - DNA, 12 bp, Artificial Sequence
  Oligonucleotide primer for the detection of SNP TSC0042956
aaacattcaaat

SEQ ID NO: 343220 - DNA, 12 bp, Artificial Sequence
  Oligonucleotide primer for the detection of SNP TSC0042956
tttgttagaaaa

SEQ ID NO: 343221 - DNA, 12 bp, Artificial Sequence
  Oligonucleotide primer for the detection of SNP TSC0042956
ttcgttagaaaa

SEQ ID NO: 343222 - DNA, 12 bp, Artificial Sequence
  Oligonucleotide primer for the detection of SNP TSC0042957
ttaaaaacaaat

SEQ ID NO: 343223 - DNA, 12 bp, Artificial Sequence
  Oligonucleotide primer for the detection of SNP TSC0042957
agttggatttag

SEQ ID NO: 343224 - DNA, 12 bp, Artificial Sequence
  Oligonucleotide primer for the detection of SNP TSC0042957
ttagaagtaagt

SEQ ID NO: 343225 - DNA, 12 bp, Artificial Sequence
  Oligonucleotide primer for the detection of SNP TSC0042959
ataacaaaaata

SEQ ID NO: 343226 - DNA, 12 bp, Artificial Sequence
  Oligonucleotide primer for the detection of SNP TSC0042959
gttgatttaaat

SEQ ID NO: 343227 - DNA, 12 bp, Artificial Sequence
  Oligonucleotide primer for the detection of SNP TSC0042959
ctaacttaaata

SEQ ID NO: 343228 - DNA, 12 bp, Artificial Sequence
  Oligonucleotide primer for the detection of SNP TSC0042959
aataataagggt

SEQ ID NO: 343229 - DNA, 12 bp, Artificial Sequence
  Oligonucleotide primer for the detection of SNP TSC0042960
aacatcaaaata

SEQ ID NO: 343230 - DNA, 12 bp, Artificial Sequence
  Oligonucleotide primer for the detection of SNP TSC0042960
attattagtatt

SEQ ID NO: 343231 - DNA, 12 bp, Artificial Sequence
  Oligonucleotide primer for the detection of SNP TSC0042960
attactaacatt

SEQ ID NO: 343232 - DNA, 12 bp, Artificial Sequence
  Oligonucleotide primer for the detection of SNP TSC0042960
agtattaaaatg

SEQ ID NO: 343233 - DNA, 12 bp, Artificial Sequence
  Oligonucleotide primer for the detection of SNP TSC0010295
tactacctaaaa

SEQ ID NO: 343234 - DNA, 12 bp, Artificial Sequence
  Oligonucleotide primer for the detection of SNP TSC0010295
ataaactaccca

SEQ ID NO: 343235 - DNA, 12 bp, Artificial Sequence
  Oligonucleotide primer for the detection of SNP TSC0010295
atattatttgag

SEQ ID NO: 343236 - DNA, 12 bp, Artificial Sequence
  Oligonucleotide primer for the detection of SNP TSC0042961
aattatggaagg

SEQ ID NO: 343237 - DNA, 12 bp, Artificial Sequence
  Oligonucleotide primer for the detection of SNP TSC0042961
ttgtgaagaggt

SEQ ID NO: 343238 - DNA, 12 bp, Artificial Sequence
  Oligonucleotide primer for the detection of SNP TSC0008407
atatacacaatt

SEQ ID NO: 343239 - DNA, 12 bp, Artificial Sequence
  Oligonucleotide primer for the detection of SNP TSC0042965
aatcattttatt

SEQ ID NO: 343240 - DNA, 12 bp, Artificial Sequence
  Oligonucleotide primer for the detection of SNP TSC0042965
ctttcttataaa

SEQ ID NO: 343241 - DNA, 12 bp, Artificial Sequence
  Oligonucleotide primer for the detection of SNP TSC0042966
caaaacacacca

SEQ ID NO: 343242 - DNA, 12 bp, Artificial Sequence
  Oligonucleotide primer for the detection of SNP TSC0042966
gtagatgttatt

SEQ ID NO: 343243 - DNA, 12 bp, Artificial Sequence
  Oligonucleotide primer for the detection of SNP TSC0042966
ataaataccatt

SEQ ID NO: 343244 - DNA, 12 bp, Artificial Sequence
  Oligonucleotide primer for the detection of SNP TSC0042966
taggatatatta

SEQ ID NO: 343245 - DNA, 12 bp, Artificial Sequence
  Oligonucleotide primer for the detection of SNP TSC0042967
caccctaacaaa

SEQ ID NO: 343246 - DNA, 12 bp, Artificial Sequence
  Oligonucleotide primer for the detection of SNP TSC0042967
tcacttaccccc

SEQ ID NO: 343247 - DNA, 12 bp, Artificial Sequence
  Oligonucleotide primer for the detection of SNP TSC0042968
taattaaatctt

SEQ ID NO: 343248 - DNA, 12 bp, Artificial Sequence
  Oligonucleotide primer for the detection of SNP TSC0042968
aataaagaaaaa

SEQ ID NO: 343249 - DNA, 12 bp, Artificial Sequence
  Oligonucleotide primer for the detection of SNP TSC0042969
tactaaatatat

SEQ ID NO: 343250 - DNA, 12 bp, Artificial Sequence
  Oligonucleotide primer for the detection of SNP TSC0042969
tgtgtatgtaga

SEQ ID NO: 343251 - DNA, 12 bp, Artificial Sequence
  Oligonucleotide primer for the detection of SNP TSC0042970
ttcatttctttt

SEQ ID NO: 343252 - DNA, 12 bp, Artificial Sequence
  Oligonucleotide primer for the detection of SNP TSC0042971
ttttactttcaa

SEQ ID NO: 343253 - DNA, 12 bp, Artificial Sequence
  Oligonucleotide primer for the detection of SNP TSC0042971
aaaattagatat

SEQ ID NO: 343254 - DNA, 12 bp, Artificial Sequence
  Oligonucleotide primer for the detection of SNP TSC0042972
gttgagttttga

SEQ ID NO: 343255 - DNA, 12 bp, Artificial Sequence
  Oligonucleotide primer for the detection of SNP TSC0005776
tagttgtattgt

SEQ ID NO: 343256 - DNA, 12 bp, Artificial Sequence
  Oligonucleotide primer for the detection of SNP TSC0005776
aactatattata

SEQ ID NO: 343257 - DNA, 12 bp, Artificial Sequence
  Oligonucleotide primer for the detection of SNP TSC0005776
tgatattaaaat

SEQ ID NO: 343258 - DNA, 12 bp, Artificial Sequence
  Oligonucleotide primer for the detection of SNP TSC0005776
tgatattaaaac

SEQ ID NO: 343259 - DNA, 12 bp, Artificial Sequence
  Oligonucleotide primer for the detection of SNP TSC0005174
taaaatctaatc

SEQ ID NO: 343260 - DNA, 12 bp, Artificial Sequence
  Oligonucleotide primer for the detection of SNP TSC0005174
attattaaagta

SEQ ID NO: 343261 - DNA, 12 bp, Artificial Sequence
  Oligonucleotide primer for the detection of SNP TSC0005174
tgaaatttgatt

SEQ ID NO: 343262 - DNA, 12 bp, Artificial Sequence
  Oligonucleotide primer for the detection of SNP TSC0042975
gaggaaagatag

SEQ ID NO: 343263 - DNA, 12 bp, Artificial Sequence
  Oligonucleotide primer for the detection of SNP TSC0042976
atttgtttatta

SEQ ID NO: 343264 - DNA, 12 bp, Artificial Sequence
  Oligonucleotide primer for the detection of SNP TSC0042976
aatgaagaaatg

SEQ ID NO: 343265 - DNA, 12 bp, Artificial Sequence
  Oligonucleotide primer for the detection of SNP TSC0042978
caaattaaaatt

SEQ ID NO: 343266 - DNA, 12 bp, Artificial Sequence
  Oligonucleotide primer for the detection of SNP TSC0042978
agaaaattttta

SEQ ID NO: 343267 - DNA, 12 bp, Artificial Sequence
  Oligonucleotide primer for the detection of SNP TSC0042978
aaaaaattctta

SEQ ID NO: 343268 - DNA, 12 bp, Artificial Sequence
  Oligonucleotide primer for the detection of SNP TSC0042978
taaattaagatt

SEQ ID NO: 343269 - DNA, 12 bp, Artificial Sequence
  Oligonucleotide primer for the detection of SNP TSC0042979
ttaccacttaaa

SEQ ID NO: 343270 - DNA, 12 bp, Artificial Sequence
  Oligonucleotide primer for the detection of SNP TSC0042979
tgtgatttaagg

SEQ ID NO: 343271 - DNA, 12 bp, Artificial Sequence
  Oligonucleotide primer for the detection of SNP TSC0042979
tataacttaaaa

SEQ ID NO: 343272 - DNA, 12 bp, Artificial Sequence
  Oligonucleotide primer for the detection of SNP TSC0042979
tattatttgggt

SEQ ID NO: 343273 - DNA, 12 bp, Artificial Sequence
  Oligonucleotide primer for the detection of SNP TSC0042980
aaaaatatctcc

SEQ ID NO: 343274 - DNA, 12 bp, Artificial Sequence
  Oligonucleotide primer for the detection of SNP TSC0042980
aatatttaacaa

SEQ ID NO: 343275 - DNA, 12 bp, Artificial Sequence
  Oligonucleotide primer for the detection of SNP TSC0005172
tgttaaaatttg

SEQ ID NO: 343276 - DNA, 12 bp, Artificial Sequence
  Oligonucleotide primer for the detection of SNP TSC0005172
cgttaaaatttg

SEQ ID NO: 343277 - DNA, 12 bp, Artificial Sequence
  Oligonucleotide primer for the detection of SNP TSC0005172
cactaaaattta

SEQ ID NO: 343278 - DNA, 12 bp, Artificial Sequence
  Oligonucleotide primer for the detection of SNP TSC0005172
cgctaaaattta

SEQ ID NO: 343279 - DNA, 12 bp, Artificial Sequence
  Oligonucleotide primer for the detection of SNP TSC0005172
aaaatgagttgt

SEQ ID NO: 343280 - DNA, 12 bp, Artificial Sequence
  Oligonucleotide primer for the detection of SNP TSC0042981
aaattataatca

SEQ ID NO: 343281 - DNA, 12 bp, Artificial Sequence
  Oligonucleotide primer for the detection of SNP TSC0042981
aaattataatcg

SEQ ID NO: 343282 - DNA, 12 bp, Artificial Sequence
  Oligonucleotide primer for the detection of SNP TSC0042981
cacccccaacat

SEQ ID NO: 343283 - DNA, 12 bp, Artificial Sequence
  Oligonucleotide primer for the detection of SNP TSC0042981
gaattgtaattg

SEQ ID NO: 343284 - DNA, 12 bp, Artificial Sequence
  Oligonucleotide primer for the detection of SNP TSC0042981
gaattgtaatcg

SEQ ID NO: 343285 - DNA, 12 bp, Artificial Sequence
  Oligonucleotide primer for the detection of SNP TSC0042983
taataaaataac

SEQ ID NO: 343286 - DNA, 12 bp, Artificial Sequence
  Oligonucleotide primer for the detection of SNP TSC0042983
gtttggttgtta

SEQ ID NO: 343287 - DNA, 12 bp, Artificial Sequence
  Oligonucleotide primer for the detection of SNP TSC0005685
aatccccacaac

SEQ ID NO: 343288 - DNA, 12 bp, Artificial Sequence
  Oligonucleotide primer for the detection of SNP TSC0005685
aatccccacgac

SEQ ID NO: 343289 - DNA, 12 bp, Artificial Sequence
  Oligonucleotide primer for the detection of SNP TSC0005685
aatccccgcaac

SEQ ID NO: 343290 - DNA, 12 bp, Artificial Sequence
  Oligonucleotide primer for the detection of SNP TSC0005685
aatccccgcgac

SEQ ID NO: 343291 - DNA, 12 bp, Artificial Sequence
  Oligonucleotide primer for the detection of SNP TSC0005685
gtgagtagaagg

SEQ ID NO: 343292 - DNA, 12 bp, Artificial Sequence
  Oligonucleotide primer for the detection of SNP TSC0009030
aaaaacccaact

SEQ ID NO: 343293 - DNA, 12 bp, Artificial Sequence
  Oligonucleotide primer for the detection of SNP TSC0009030
ataaggggtgaa

SEQ ID NO: 343294 - DNA, 12 bp, Artificial Sequence
  Oligonucleotide primer for the detection of SNP TSC0042985
gtgataagagta

SEQ ID NO: 343295 - DNA, 12 bp, Artificial Sequence
  Oligonucleotide primer for the detection of SNP TSC0042985
gcgataagagta

SEQ ID NO: 343296 - DNA, 12 bp, Artificial Sequence
  Oligonucleotide primer for the detection of SNP TSC0042986
tacttaaaaatc

SEQ ID NO: 343297 - DNA, 12 bp, Artificial Sequence
  Oligonucleotide primer for the detection of SNP TSC0042986
aatttgttatta

SEQ ID NO: 343298 - DNA, 12 bp, Artificial Sequence
  Oligonucleotide primer for the detection of SNP TSC0042988
taattctaaaat

SEQ ID NO: 343299 - DNA, 12 bp, Artificial Sequence
  Oligonucleotide primer for the detection of SNP TSC0042988
aatatattaaaa

SEQ ID NO: 343300 - DNA, 12 bp, Artificial Sequence
  Oligonucleotide primer for the detection of SNP TSC0042988
tgattttgagat

SEQ ID NO: 343301 - DNA, 12 bp, Artificial Sequence
  Oligonucleotide primer for the detection of SNP TSC0042989
ataccaataatt

SEQ ID NO: 343302 - DNA, 12 bp, Artificial Sequence
  Oligonucleotide primer for the detection of SNP TSC0042989
aattgtatttta

SEQ ID NO: 343303 - DNA, 12 bp, Artificial Sequence
  Oligonucleotide primer for the detection of SNP TSC0042989
aatcgtatttta

SEQ ID NO: 343304 - DNA, 12 bp, Artificial Sequence
  Oligonucleotide primer for the detection of SNP TSC0010824
ccttttaaaatc

SEQ ID NO: 343305 - DNA, 12 bp, Artificial Sequence
  Oligonucleotide primer for the detection of SNP TSC0010824
aatggatattgg

SEQ ID NO: 343306 - DNA, 12 bp, Artificial Sequence
  Oligonucleotide primer for the detection of SNP TSC0010454
gggtttaagttg

SEQ ID NO: 343307 - DNA, 12 bp, Artificial Sequence
  Oligonucleotide primer for the detection of SNP TSC0042990
ttaatggattta

SEQ ID NO: 343308 - DNA, 12 bp, Artificial Sequence
  Oligonucleotide primer for the detection of SNP TSC0042990
aaatggattaaa

SEQ ID NO: 343309 - DNA, 12 bp, Artificial Sequence
  Oligonucleotide primer for the detection of SNP TSC0042991
aacctaaattat

SEQ ID NO: 343310 - DNA, 12 bp, Artificial Sequence
  Oligonucleotide primer for the detection of SNP TSC0042991
atattttatagg

SEQ ID NO: 343311 - DNA, 12 bp, Artificial Sequence
  Oligonucleotide primer for the detection of SNP TSC0042992
ttatatacctat

SEQ ID NO: 343312 - DNA, 12 bp, Artificial Sequence
  Oligonucleotide primer for the detection of SNP TSC0042992
aagattatattt

SEQ ID NO: 343313 - DNA, 12 bp, Artificial Sequence
  Oligonucleotide primer for the detection of SNP TSC0042992
aaaatcatatct

SEQ ID NO: 343314 - DNA, 12 bp, Artificial Sequence
  Oligonucleotide primer for the detection of SNP TSC0042992
ttgtatatttgt

SEQ ID NO: 343315 - DNA, 12 bp, Artificial Sequence
  Oligonucleotide primer for the detection of SNP TSC0042993
ttcccttaaaaa

SEQ ID NO: 343316 - DNA, 12 bp, Artificial Sequence
  Oligonucleotide primer for the detection of SNP TSC0042993
aaaggtgtttag

SEQ ID NO: 343317 - DNA, 12 bp, Artificial Sequence
  Oligonucleotide primer for the detection of SNP TSC0042993
aaaaatattcaa

SEQ ID NO: 343318 - DNA, 12 bp, Artificial Sequence
  Oligonucleotide primer for the detection of SNP TSC0042994
ctcatctctact

SEQ ID NO: 343319 - DNA, 12 bp, Artificial Sequence
  Oligonucleotide primer for the detection of SNP TSC0042995
attttttttaga

SEQ ID NO: 343320 - DNA, 12 bp, Artificial Sequence
  Oligonucleotide primer for the detection of SNP TSC0042996
taataatataac

SEQ ID NO: 343321 - DNA, 12 bp, Artificial Sequence
  Oligonucleotide primer for the detection of SNP TSC0042996
tgagaggtggag

SEQ ID NO: 343322 - DNA, 12 bp, Artificial Sequence
  Oligonucleotide primer for the detection of SNP TSC0042998
ataaataaatta

SEQ ID NO: 343323 - DNA, 12 bp, Artificial Sequence
  Oligonucleotide primer for the detection of SNP TSC0042998
tggatgaattat

SEQ ID NO: 343324 - DNA, 12 bp, Artificial Sequence
  Oligonucleotide primer for the detection of SNP TSC0042999
ctttaacatatt

SEQ ID NO: 343325 - DNA, 12 bp, Artificial Sequence
  Oligonucleotide primer for the detection of SNP TSC0042999
ggttgtatgaga

SEQ ID NO: 343326 - DNA, 12 bp, Artificial Sequence
  Oligonucleotide primer for the detection of SNP TSC0043000
caaatattttct

SEQ ID NO: 343327 - DNA, 12 bp, Artificial Sequence
  Oligonucleotide primer for the detection of SNP TSC0043000
atttatagatgg

SEQ ID NO: 343328 - DNA, 12 bp, Artificial Sequence
  Oligonucleotide primer for the detection of SNP TSC0043001
ttttttgtgtag

SEQ ID NO: 343329 - DNA, 12 bp, Artificial Sequence
  Oligonucleotide primer for the detection of SNP TSC0043002
atttaactttac

SEQ ID NO: 343330 - DNA, 12 bp, Artificial Sequence
  Oligonucleotide primer for the detection of SNP TSC0043002
tataggtaataa

SEQ ID NO: 343331 - DNA, 12 bp, Artificial Sequence
  Oligonucleotide primer for the detection of SNP TSC0043003
taacacaaaacc

SEQ ID NO: 343332 - DNA, 12 bp, Artificial Sequence
  Oligonucleotide primer for the detection of SNP TSC0043003
tatatattttgg

SEQ ID NO: 343333 - DNA, 12 bp, Artificial Sequence
  Oligonucleotide primer for the detection of SNP TSC0043007
ctctactaaaat

SEQ ID NO: 343334 - DNA, 12 bp, Artificial Sequence
  Oligonucleotide primer for the detection of SNP TSC0043007
ttaaggagtttt

SEQ ID NO: 343335 - DNA, 12 bp, Artificial Sequence
  Oligonucleotide primer for the detection of SNP TSC0043008
aaaactttcatt

SEQ ID NO: 343336 - DNA, 12 bp, Artificial Sequence
  Oligonucleotide primer for the detection of SNP TSC0043009
taataaactaac

SEQ ID NO: 343337 - DNA, 12 bp, Artificial Sequence
  Oligonucleotide primer for the detection of SNP TSC0043009
atgtgttagtag

SEQ ID NO: 343338 - DNA, 12 bp, Artificial Sequence
  Oligonucleotide primer for the detection of SNP TSC0043010
acatatcaaaac

SEQ ID NO: 343339 - DNA, 12 bp, Artificial Sequence
  Oligonucleotide primer for the detection of SNP TSC0043010
acatatcgaaac

SEQ ID NO: 343340 - DNA, 12 bp, Artificial Sequence
  Oligonucleotide primer for the detection of SNP TSC0043011
cctcaaactctt

SEQ ID NO: 343341 - DNA, 12 bp, Artificial Sequence
  Oligonucleotide primer for the detection of SNP TSC0043011
ataggtagaagg

SEQ ID NO: 343342 - DNA, 12 bp, Artificial Sequence
  Oligonucleotide primer for the detection of SNP TSC0043013
tagtttagatgt

SEQ ID NO: 343343 - DNA, 12 bp, Artificial Sequence
  Oligonucleotide primer for the detection of SNP TSC0043013
caacttaaatat

SEQ ID NO: 343344 - DNA, 12 bp, Artificial Sequence
  Oligonucleotide primer for the detection of SNP TSC0043017
gatttgttgtaa

SEQ ID NO: 343345 - DNA, 12 bp, Artificial Sequence
  Oligonucleotide primer for the detection of SNP TSC0006537
caatacatttat

SEQ ID NO: 343346 - DNA, 12 bp, Artificial Sequence
  Oligonucleotide primer for the detection of SNP TSC0006537
ctattatattta

SEQ ID NO: 343347 - DNA, 12 bp, Artificial Sequence
  Oligonucleotide primer for the detection of SNP TSC0006537
taatgtatttgt

SEQ ID NO: 343348 - DNA, 12 bp, Artificial Sequence
  Oligonucleotide primer for the detection of SNP TSC0043018
tataatactttt

SEQ ID NO: 343349 - DNA, 12 bp, Artificial Sequence
  Oligonucleotide primer for the detection of SNP TSC0043018
aagttatatgaa

SEQ ID NO: 343350 - DNA, 12 bp, Artificial Sequence
  Oligonucleotide primer for the detection of SNP TSC0043019
atctattatata

SEQ ID NO: 343351 - DNA, 12 bp, Artificial Sequence
  Oligonucleotide primer for the detection of SNP TSC0043019
taatatatatga

SEQ ID NO: 343352 - DNA, 12 bp, Artificial Sequence
  Oligonucleotide primer for the detection of SNP TSC0043019
caacacatataa

SEQ ID NO: 343353 - DNA, 12 bp, Artificial Sequence
  Oligonucleotide primer for the detection of SNP TSC0043019
tgtttgttgtgt

SEQ ID NO: 343354 - DNA, 12 bp, Artificial Sequence
  Oligonucleotide primer for the detection of SNP TSC0043022
ttataactccat

SEQ ID NO: 343355 - DNA, 12 bp, Artificial Sequence
  Oligonucleotide primer for the detection of SNP TSC0043022
agttttaaatat

SEQ ID NO: 343356 - DNA, 12 bp, Artificial Sequence
  Oligonucleotide primer for the detection of SNP TSC0043022
ctctaaatataa

SEQ ID NO: 343357 - DNA, 12 bp, Artificial Sequence
  Oligonucleotide primer for the detection of SNP TSC0043022
gtggttttattt

SEQ ID NO: 343358 - DNA, 12 bp, Artificial Sequence
  Oligonucleotide primer for the detection of SNP TSC0043022
gtggttttattc

SEQ ID NO: 343359 - DNA, 12 bp, Artificial Sequence
  Oligonucleotide primer for the detection of SNP TSC0043026
tttatatggtaa

SEQ ID NO: 343360 - DNA, 12 bp, Artificial Sequence
  Oligonucleotide primer for the detection of SNP TSC0009897
agtatttagttc

SEQ ID NO: 343361 - DNA, 12 bp, Artificial Sequence
  Oligonucleotide primer for the detection of SNP TSC0009897
aatactcaaccc

SEQ ID NO: 343362 - DNA, 12 bp, Artificial Sequence
  Oligonucleotide primer for the detection of SNP TSC0009897
gaagtaggaagg

SEQ ID NO: 343363 - DNA, 12 bp, Artificial Sequence
  Oligonucleotide primer for the detection of SNP TSC0043028
ttcttcctatat

SEQ ID NO: 343364 - DNA, 12 bp, Artificial Sequence
  Oligonucleotide primer for the detection of SNP TSC0043028
gtttttttgggg

SEQ ID NO: 343365 - DNA, 12 bp, Artificial Sequence
  Oligonucleotide primer for the detection of SNP TSC0007776
aaatcaactaca

SEQ ID NO: 343366 - DNA, 12 bp, Artificial Sequence
  Oligonucleotide primer for the detection of SNP TSC0007776
aaatcgactaca

SEQ ID NO: 343367 - DNA, 12 bp, Artificial Sequence
  Oligonucleotide primer for the detection of SNP TSC0007776
aacatttactat

SEQ ID NO: 343368 - DNA, 12 bp, Artificial Sequence
  Oligonucleotide primer for the detection of SNP TSC0007776
agattgattata

SEQ ID NO: 343369 - DNA, 12 bp, Artificial Sequence
  Oligonucleotide primer for the detection of SNP TSC0007776
agatcgattata

SEQ ID NO: 343370 - DNA, 12 bp, Artificial Sequence
  Oligonucleotide primer for the detection of SNP TSC0007777
ataacatattat

SEQ ID NO: 343371 - DNA, 12 bp, Artificial Sequence
  Oligonucleotide primer for the detection of SNP TSC0007777
atatctataaaa

SEQ ID NO: 343372 - DNA, 12 bp, Artificial Sequence
  Oligonucleotide primer for the detection of SNP TSC0043030
tttaaaacacaa

SEQ ID NO: 343373 - DNA, 12 bp, Artificial Sequence
  Oligonucleotide primer for the detection of SNP TSC0043030
taaccatatcat

SEQ ID NO: 343374 - DNA, 12 bp, Artificial Sequence
  Oligonucleotide primer for the detection of SNP TSC0043031
gaaaataaaaaa

SEQ ID NO: 343375 - DNA, 12 bp, Artificial Sequence
  Oligonucleotide primer for the detection of SNP TSC0043031
aaggtgagggat

SEQ ID NO: 343376 - DNA, 12 bp, Artificial Sequence
  Oligonucleotide primer for the detection of SNP TSC0043034
aaaaccctctca

SEQ ID NO: 343377 - DNA, 12 bp, Artificial Sequence
  Oligonucleotide primer for the detection of SNP TSC0043034
atgggaatatgt

SEQ ID NO: 343378 - DNA, 12 bp, Artificial Sequence
  Oligonucleotide primer for the detection of SNP TSC0043035
ctatattcaaaa

SEQ ID NO: 343379 - DNA, 12 bp, Artificial Sequence
  Oligonucleotide primer for the detection of SNP TSC0043035
gtatgtgagagg

SEQ ID NO: 343380 - DNA, 12 bp, Artificial Sequence
  Oligonucleotide primer for the detection of SNP TSC0043035
ttgtgtttagaa

SEQ ID NO: 343381 - DNA, 12 bp, Artificial Sequence
  Oligonucleotide primer for the detection of SNP TSC0043036
agatggttggag

SEQ ID NO: 343382 - DNA, 12 bp, Artificial Sequence
  Oligonucleotide primer for the detection of SNP TSC0043037
aaataataatgt

SEQ ID NO: 343383 - DNA, 12 bp, Artificial Sequence
  Oligonucleotide primer for the detection of SNP TSC0043037
aaataataatat

SEQ ID NO: 343384 - DNA, 12 bp, Artificial Sequence
  Oligonucleotide primer for the detection of SNP TSC0043038
aacaaaaactac

SEQ ID NO: 343385 - DNA, 12 bp, Artificial Sequence
  Oligonucleotide primer for the detection of SNP TSC0043038
ttattttggtga

SEQ ID NO: 343386 - DNA, 12 bp, Artificial Sequence
  Oligonucleotide primer for the detection of SNP TSC0043040
tattacaaaact

SEQ ID NO: 343387 - DNA, 12 bp, Artificial Sequence
  Oligonucleotide primer for the detection of SNP TSC0043040
tggttgttgtga

SEQ ID NO: 343388 - DNA, 12 bp, Artificial Sequence
  Oligonucleotide primer for the detection of SNP TSC0043042
atctcctttacc

SEQ ID NO: 343389 - DNA, 12 bp, Artificial Sequence
  Oligonucleotide primer for the detection of SNP TSC0043042
attgagagaaag

SEQ ID NO: 343390 - DNA, 12 bp, Artificial Sequence
  Oligonucleotide primer for the detection of SNP TSC0043043
aataataaaatc

SEQ ID NO: 343391 - DNA, 12 bp, Artificial Sequence
  Oligonucleotide primer for the detection of SNP TSC0043043
aaggggtaaagg

SEQ ID NO: 343392 - DNA, 12 bp, Artificial Sequence
  Oligonucleotide primer for the detection of SNP TSC0005042
aatataattcct

SEQ ID NO: 343393 - DNA, 12 bp, Artificial Sequence
  Oligonucleotide primer for the detection of SNP TSC0043046
cttccaactaat

SEQ ID NO: 343394 - DNA, 12 bp, Artificial Sequence
  Oligonucleotide primer for the detection of SNP TSC0043046
tagatataaata

SEQ ID NO: 343395 - DNA, 12 bp, Artificial Sequence
  Oligonucleotide primer for the detection of SNP TSC0043046
aaacacaaacaa

SEQ ID NO: 343396 - DNA, 12 bp, Artificial Sequence
  Oligonucleotide primer for the detection of SNP TSC0043046
ttttagttggtt

SEQ ID NO: 343397 - DNA, 12 bp, Artificial Sequence
  Oligonucleotide primer for the detection of SNP TSC0043047
tccttaaacaac

SEQ ID NO: 343398 - DNA, 12 bp, Artificial Sequence
  Oligonucleotide primer for the detection of SNP TSC0043048
ctaaatctctat

SEQ ID NO: 343399 - DNA, 12 bp, Artificial Sequence
  Oligonucleotide primer for the detection of SNP TSC0043048
aaagttgtaagt

SEQ ID NO: 343400 - DNA, 12 bp, Artificial Sequence
  Oligonucleotide primer for the detection of SNP TSC0043049
tatataatacat

SEQ ID NO: 343401 - DNA, 12 bp, Artificial Sequence
  Oligonucleotide primer for the detection of SNP TSC0043049
tatataatacgt

SEQ ID NO: 343402 - DNA, 12 bp, Artificial Sequence
  Oligonucleotide primer for the detection of SNP TSC0043049
tggttttaaata

SEQ ID NO: 343403 - DNA, 12 bp, Artificial Sequence
  Oligonucleotide primer for the detection of SNP TSC0043050
ttttcacaaaaa

SEQ ID NO: 343404 - DNA, 12 bp, Artificial Sequence
  Oligonucleotide primer for the detection of SNP TSC0043050
ataaagatattt

SEQ ID NO: 343405 - DNA, 12 bp, Artificial Sequence
  Oligonucleotide primer for the detection of SNP TSC0043051
tttccaataaac

SEQ ID NO: 343406 - DNA, 12 bp, Artificial Sequence
  Oligonucleotide primer for the detection of SNP TSC0043052
aaagggtttgtt

SEQ ID NO: 343407 - DNA, 12 bp, Artificial Sequence
  Oligonucleotide primer for the detection of SNP TSC0043052
tagtttaggtaa

SEQ ID NO: 343408 - DNA, 12 bp, Artificial Sequence
  Oligonucleotide primer for the detection of SNP TSC0009140
aaaaatccaaac

SEQ ID NO: 343409 - DNA, 12 bp, Artificial Sequence
  Oligonucleotide primer for the detection of SNP TSC0009140
tttataggaatg

SEQ ID NO: 343410 - DNA, 12 bp, Artificial Sequence
  Oligonucleotide primer for the detection of SNP TSC0009140
tttataggaacg

SEQ ID NO: 343411 - DNA, 12 bp, Artificial Sequence
  Oligonucleotide primer for the detection of SNP TSC0043053
caaaccttcctc

SEQ ID NO: 343412 - DNA, 12 bp, Artificial Sequence
  Oligonucleotide primer for the detection of SNP TSC0043053
gtggttggagta

SEQ ID NO: 343413 - DNA, 12 bp, Artificial Sequence
  Oligonucleotide primer for the detection of SNP TSC0043054
ttcataaaaatc

SEQ ID NO: 343414 - DNA, 12 bp, Artificial Sequence
  Oligonucleotide primer for the detection of SNP TSC0043054
ttttttaggagg

SEQ ID NO: 343415 - DNA, 12 bp, Artificial Sequence
  Oligonucleotide primer for the detection of SNP TSC0043054
tcccctaaaaaa

SEQ ID NO: 343416 - DNA, 12 bp, Artificial Sequence
  Oligonucleotide primer for the detection of SNP TSC0043054
ttatggaggttt

SEQ ID NO: 343417 - DNA, 12 bp, Artificial Sequence
  Oligonucleotide primer for the detection of SNP TSC0043055
gtagtatgtatt

SEQ ID NO: 343418 - DNA, 12 bp, Artificial Sequence
  Oligonucleotide primer for the detection of SNP TSC0043055
ataacatatact

SEQ ID NO: 343419 - DNA, 12 bp, Artificial Sequence
  Oligonucleotide primer for the detection of SNP TSC0043058
tcttaatccata

SEQ ID NO: 343420 - DNA, 12 bp, Artificial Sequence
  Oligonucleotide primer for the detection of SNP TSC0043058
gttagttaaaat

SEQ ID NO: 343421 - DNA, 12 bp, Artificial Sequence
  Oligonucleotide primer for the detection of SNP TSC0043060
aattaaatattc

SEQ ID NO: 343422 - DNA, 12 bp, Artificial Sequence
  Oligonucleotide primer for the detection of SNP TSC0043061
aatcaaattaat

SEQ ID NO: 343423 - DNA, 12 bp, Artificial Sequence
  Oligonucleotide primer for the detection of SNP TSC0043062
gtggtagaaata

SEQ ID NO: 343424 - DNA, 12 bp, Artificial Sequence
  Oligonucleotide primer for the detection of SNP TSC0043063
aaaatactatac

SEQ ID NO: 343425 - DNA, 12 bp, Artificial Sequence
  Oligonucleotide primer for the detection of SNP TSC0043064
attaaaattatg

SEQ ID NO: 343426 - DNA, 12 bp, Artificial Sequence
  Oligonucleotide primer for the detection of SNP TSC0043064
tataagttttga

SEQ ID NO: 343427 - DNA, 12 bp, Artificial Sequence
  Oligonucleotide primer for the detection of SNP TSC0043067
tttcaattaaca

SEQ ID NO: 343428 - DNA, 12 bp, Artificial Sequence
  Oligonucleotide primer for the detection of SNP TSC0043067
tgttttttggat

SEQ ID NO: 343429 - DNA, 12 bp, Artificial Sequence
  Oligonucleotide primer for the detection of SNP TSC0043067
ctttctaaataa

SEQ ID NO: 343430 - DNA, 12 bp, Artificial Sequence
  Oligonucleotide primer for the detection of SNP TSC0043068
attctacttact

SEQ ID NO: 343431 - DNA, 12 bp, Artificial Sequence
  Oligonucleotide primer for the detection of SNP TSC0043068
tatatatagtga

SEQ ID NO: 343432 - DNA, 12 bp, Artificial Sequence
  Oligonucleotide primer for the detection of SNP TSC0043069
aaccacttcatc

SEQ ID NO: 343433 - DNA, 12 bp, Artificial Sequence
  Oligonucleotide primer for the detection of SNP TSC0043069
tatttagtattg

SEQ ID NO: 343434 - DNA, 12 bp, Artificial Sequence
  Oligonucleotide primer for the detection of SNP TSC0043069
tatttagtatcg

SEQ ID NO: 343435 - DNA, 12 bp, Artificial Sequence
  Oligonucleotide primer for the detection of SNP TSC0043070
atttacaactac

SEQ ID NO: 343436 - DNA, 12 bp, Artificial Sequence
  Oligonucleotide primer for the detection of SNP TSC0043070
ttgtttattata

SEQ ID NO: 343437 - DNA, 12 bp, Artificial Sequence
  Oligonucleotide primer for the detection of SNP TSC0043070
ttatctactaca

SEQ ID NO: 343438 - DNA, 12 bp, Artificial Sequence
  Oligonucleotide primer for the detection of SNP TSC0007853
tttaataaaata

SEQ ID NO: 343439 - DNA, 12 bp, Artificial Sequence
  Oligonucleotide primer for the detection of SNP TSC0007853
tttggtaaggta

SEQ ID NO: 343440 - DNA, 12 bp, Artificial Sequence
  Oligonucleotide primer for the detection of SNP TSC0043071
ttagaggtaagg

SEQ ID NO: 343441 - DNA, 12 bp, Artificial Sequence
  Oligonucleotide primer for the detection of SNP TSC0043071
tgtttaggaatt

SEQ ID NO: 343442 - DNA, 12 bp, Artificial Sequence
  Oligonucleotide primer for the detection of SNP TSC0043072
aactcaatattt

SEQ ID NO: 343443 - DNA, 12 bp, Artificial Sequence
  Oligonucleotide primer for the detection of SNP TSC0043072
agaggggtatta

SEQ ID NO: 343444 - DNA, 12 bp, Artificial Sequence
  Oligonucleotide primer for the detection of SNP TSC0043073
ggggggtggggg

SEQ ID NO: 343445 - DNA, 12 bp, Artificial Sequence
  Oligonucleotide primer for the detection of SNP TSC0043074
attacatttcta

SEQ ID NO: 343446 - DNA, 12 bp, Artificial Sequence
  Oligonucleotide primer for the detection of SNP TSC0043074
gttattagttat

SEQ ID NO: 343447 - DNA, 12 bp, Artificial Sequence
  Oligonucleotide primer for the detection of SNP TSC0043074
accaccaaccat

SEQ ID NO: 343448 - DNA, 12 bp, Artificial Sequence
  Oligonucleotide primer for the detection of SNP TSC0043074
gttatatttttg

SEQ ID NO: 343449 - DNA, 12 bp, Artificial Sequence
  Oligonucleotide primer for the detection of SNP TSC0006453
taaatcttttat

SEQ ID NO: 343450 - DNA, 12 bp, Artificial Sequence
  Oligonucleotide primer for the detection of SNP TSC0006453
aaaagttaaaaa

SEQ ID NO: 343451 - DNA, 12 bp, Artificial Sequence
  Oligonucleotide primer for the detection of SNP TSC0043076
ctctcaaccttc

SEQ ID NO: 343452 - DNA, 12 bp, Artificial Sequence
  Oligonucleotide primer for the detection of SNP TSC0043077
tccaataaacac

SEQ ID NO: 343453 - DNA, 12 bp, Artificial Sequence
  Oligonucleotide primer for the detection of SNP TSC0043078
aaccttattact

SEQ ID NO: 343454 - DNA, 12 bp, Artificial Sequence
  Oligonucleotide primer for the detection of SNP TSC0043078
aaaatattttaa

SEQ ID NO: 343455 - DNA, 12 bp, Artificial Sequence
  Oligonucleotide primer for the detection of SNP TSC0043079
cattcacaactt

SEQ ID NO: 343456 - DNA, 12 bp, Artificial Sequence
  Oligonucleotide primer for the detection of SNP TSC0043079
ttttaatagtta

SEQ ID NO: 343457 - DNA, 12 bp, Artificial Sequence
  Oligonucleotide primer for the detection of SNP TSC0009281
ctaatcaaatat

SEQ ID NO: 343458 - DNA, 12 bp, Artificial Sequence
  Oligonucleotide primer for the detection of SNP TSC0009281
tttggatttata

SEQ ID NO: 343459 - DNA, 12 bp, Artificial Sequence
  Oligonucleotide primer for the detection of SNP TSC0009281
tctaaacttaca

SEQ ID NO: 343460 - DNA, 12 bp, Artificial Sequence
  Oligonucleotide primer for the detection of SNP TSC0009281
ttgattaaatgt

SEQ ID NO: 343461 - DNA, 12 bp, Artificial Sequence
  Oligonucleotide primer for the detection of SNP TSC0043080
ctactattatca

SEQ ID NO: 343462 - DNA, 12 bp, Artificial Sequence
  Oligonucleotide primer for the detection of SNP TSC0043080
acttaaacaacc

SEQ ID NO: 343463 - DNA, 12 bp, Artificial Sequence
  Oligonucleotide primer for the detection of SNP TSC0043081
attaccattatt

SEQ ID NO: 343464 - DNA, 12 bp, Artificial Sequence
  Oligonucleotide primer for the detection of SNP TSC0043081
gtttagaatttg

SEQ ID NO: 343465 - DNA, 12 bp, Artificial Sequence
  Oligonucleotide primer for the detection of SNP TSC0043083
taaatatcaatt

SEQ ID NO: 343466 - DNA, 12 bp, Artificial Sequence
  Oligonucleotide primer for the detection of SNP TSC0043083
taaatattaatt

SEQ ID NO: 343467 - DNA, 12 bp, Artificial Sequence
  Oligonucleotide primer for the detection of SNP TSC0043085
tctactcaatac

SEQ ID NO: 343468 - DNA, 12 bp, Artificial Sequence
  Oligonucleotide primer for the detection of SNP TSC0043085
tctactcgatac

SEQ ID NO: 343469 - DNA, 12 bp, Artificial Sequence
  Oligonucleotide primer for the detection of SNP TSC0043085
caacaatataat

SEQ ID NO: 343470 - DNA, 12 bp, Artificial Sequence
  Oligonucleotide primer for the detection of SNP TSC0043085
tttgtttgatgt

SEQ ID NO: 343471 - DNA, 12 bp, Artificial Sequence
  Oligonucleotide primer for the detection of SNP TSC0043085
tttgttcgatgt

SEQ ID NO: 343472 - DNA, 12 bp, Artificial Sequence
  Oligonucleotide primer for the detection of SNP TSC0007238
caatcaaataat

SEQ ID NO: 343473 - DNA, 12 bp, Artificial Sequence
  Oligonukleotid-Primer
aattattttttg

SEQ ID NO: 343474 - DNA, 12 bp, Artificial Sequence
  Oligonucleotide primer for the detection of SNP TSC0043087
caataatttatt

SEQ ID NO: 343475 - DNA, 12 bp, Artificial Sequence
  Oligonucleotide primer for the detection of SNP TSC0043087
agtaataaaaaa

SEQ ID NO: 343476 - DNA, 12 bp, Artificial Sequence
  Oligonucleotide primer for the detection of SNP TSC0043088
cctttaattctc

SEQ ID NO: 343477 - DNA, 12 bp, Artificial Sequence
  Oligonucleotide primer for the detection of SNP TSC0043089
tttatctaactt

SEQ ID NO: 343478 - DNA, 12 bp, Artificial Sequence
  Oligonucleotide primer for the detection of SNP TSC0043089
tgttaagtgaaa

SEQ ID NO: 343479 - DNA, 12 bp, Artificial Sequence
  Oligonucleotide primer for the detection of SNP TSC0043091
aaactttcatat

SEQ ID NO: 343480 - DNA, 12 bp, Artificial Sequence
  Oligonucleotide primer for the detection of SNP TSC0043091
aaatattgaaaa

SEQ ID NO: 343481 - DNA, 12 bp, Artificial Sequence
  Oligonucleotide primer for the detection of SNP TSC0043092
agggataatgtt

SEQ ID NO: 343482 - DNA, 12 bp, Artificial Sequence
  Oligonucleotide primer for the detection of SNP TSC0043092
aaaaacaatatt

SEQ ID NO: 343483 - DNA, 12 bp, Artificial Sequence
  Oligonucleotide primer for the detection of SNP TSC0043092
ggtgaataagat

SEQ ID NO: 343484 - DNA, 12 bp, Artificial Sequence
  Oligonucleotide primer for the detection of SNP TSC0043093
tctacttaaaac

SEQ ID NO: 343485 - DNA, 12 bp, Artificial Sequence
  Oligonukleotid-Primer
agtattaattta

SEQ ID NO: 343486 - DNA, 12 bp, Artificial Sequence
  Oligonucleotide primer for the detection of SNP TSC0043094
aatttttataac

SEQ ID NO: 343487 - DNA, 12 bp, Artificial Sequence
  Oligonucleotide primer for the detection of SNP TSC0043095
attttttattgg

SEQ ID NO: 343488 - DNA, 12 bp, Artificial Sequence
  Oligonucleotide primer for the detection of SNP TSC0043096
cattataacaat

SEQ ID NO: 343489 - DNA, 12 bp, Artificial Sequence
  Oligonucleotide primer for the detection of SNP TSC0043096
atagatatttag

SEQ ID NO: 343490 - DNA, 12 bp, Artificial Sequence
  Oligonucleotide primer for the detection of SNP TSC0043096
acaaacacccaa

SEQ ID NO: 343491 - DNA, 12 bp, Artificial Sequence
  Oligonucleotide primer for the detection of SNP TSC0043096
tattgtgatagt

SEQ ID NO: 343492 - DNA, 12 bp, Artificial Sequence
  Oligonucleotide primer for the detection of SNP TSC0043098
caacatctatac

SEQ ID NO: 343493 - DNA, 12 bp, Artificial Sequence
  Oligonucleotide primer for the detection of SNP TSC0006855
tctccatccttc

SEQ ID NO: 343494 - DNA, 12 bp, Artificial Sequence
  Oligonucleotide primer for the detection of SNP TSC0006855
tttagtttggag

SEQ ID NO: 343495 - DNA, 12 bp, Artificial Sequence
  Oligonucleotide primer for the detection of SNP TSC0007899
ccaaatccttac

SEQ ID NO: 343496 - DNA, 12 bp, Artificial Sequence
  Oligonucleotide primer for the detection of SNP TSC0007899
tttaaagttata

SEQ ID NO: 343497 - DNA, 12 bp, Artificial Sequence
  Oligonucleotide primer for the detection of SNP TSC0043101
tacgaaaacaaa

SEQ ID NO: 343498 - DNA, 12 bp, Artificial Sequence
  Oligonucleotide primer for the detection of SNP TSC0043101
tacgaaaacgaa

SEQ ID NO: 343499 - DNA, 12 bp, Artificial Sequence
  Oligonucleotide primer for the detection of SNP TSC0043101
catttttacatc

SEQ ID NO: 343500 - DNA, 12 bp, Artificial Sequence
  Oligonucleotide primer for the detection of SNP TSC0043101
tatgaaaatggg

SEQ ID NO: 343501 - DNA, 12 bp, Artificial Sequence
  Oligonucleotide primer for the detection of SNP TSC0043101
tacgaaaatggg

SEQ ID NO: 343502 - DNA, 12 bp, Artificial Sequence
  Oligonucleotide primer for the detection of SNP TSC0043101
tatgaaaacggg

SEQ ID NO: 343503 - DNA, 12 bp, Artificial Sequence
  Oligonucleotide primer for the detection of SNP TSC0043101
tacgaaaacggg

SEQ ID NO: 343504 - DNA, 12 bp, Artificial Sequence
  Oligonucleotide primer for the detection of SNP TSC0043102
aatatagatatg

SEQ ID NO: 343505 - DNA, 12 bp, Artificial Sequence
  Oligonucleotide primer for the detection of SNP TSC0008308
gatagagttttg

SEQ ID NO: 343506 - DNA, 12 bp, Artificial Sequence
  Oligonucleotide primer for the detection of SNP TSC0008309
ataattctttaa

SEQ ID NO: 343507 - DNA, 12 bp, Artificial Sequence
  Oligonucleotide primer for the detection of SNP TSC0008309
actttatttttt

SEQ ID NO: 343508 - DNA, 12 bp, Artificial Sequence
  Oligonucleotide primer for the detection of SNP TSC0008309
gtgattttttga

SEQ ID NO: 343509 - DNA, 12 bp, Artificial Sequence
  Oligonukleotid-Primer
aaattattaacc

SEQ ID NO: 343510 - DNA, 12 bp, Artificial Sequence
  Oligonucleotide primer for the detection of SNP TSC0043104
taggattttgaa

SEQ ID NO: 343511 - DNA, 12 bp, Artificial Sequence
  Oligonucleotide primer for the detection of SNP TSC0043105
ttacaacacaaa

SEQ ID NO: 343512 - DNA, 12 bp, Artificial Sequence
  Oligonucleotide primer for the detection of SNP TSC0043105
tagaaaaaatat

SEQ ID NO: 343513 - DNA, 12 bp, Artificial Sequence
  Oligonucleotide primer for the detection of SNP TSC0043105
ttgtagtataga

SEQ ID NO: 343514 - DNA, 12 bp, Artificial Sequence
  Oligonucleotide primer for the detection of SNP TSC0043106
attgttattaaa

SEQ ID NO: 343515 - DNA, 12 bp, Artificial Sequence
  Oligonucleotide primer for the detection of SNP TSC0043107
cactttccataa

SEQ ID NO: 343516 - DNA, 12 bp, Artificial Sequence
  Oligonucleotide primer for the detection of SNP TSC0043107
aattattgtgaa

SEQ ID NO: 343517 - DNA, 12 bp, Artificial Sequence
  Oligonukleotid-Primer
caaatacttatc

SEQ ID NO: 343518 - DNA, 12 bp, Artificial Sequence
  Oligonucleotide primer for the detection of SNP TSC0043108
attttatagtgg

SEQ ID NO: 343519 - DNA, 12 bp, Artificial Sequence
  Oligonucleotide primer for the detection of SNP TSC0005233
cataatttctac

SEQ ID NO: 343520 - DNA, 12 bp, Artificial Sequence
  Oligonucleotide primer for the detection of SNP TSC0005233
ttacgtttttta

SEQ ID NO: 343521 - DNA, 12 bp, Artificial Sequence
  Oligonukleotid-Primer
taaaagaattat

SEQ ID NO: 343522 - DNA, 12 bp, Artificial Sequence
  Oligonucleotide primer for the detection of SNP TSC0043109
taaaaaaaccat

SEQ ID NO: 343523 - DNA, 12 bp, Artificial Sequence
  Oligonucleotide primer for the detection of SNP TSC0043109
gaatttaaagtt

SEQ ID NO: 343524 - DNA, 12 bp, Artificial Sequence
  Oligonucleotide primer for the detection of SNP TSC0043110
caaaaaatcctt

SEQ ID NO: 343525 - DNA, 12 bp, Artificial Sequence
  Oligonucleotide primer for the detection of SNP TSC0043110
cgaaaaatcctt

SEQ ID NO: 343526 - DNA, 12 bp, Artificial Sequence
  Oligonucleotide primer for the detection of SNP TSC0043110
gagttgtaagat

SEQ ID NO: 343527 - DNA, 12 bp, Artificial Sequence
  Oligonucleotide primer for the detection of SNP TSC0043110
aaactataaaat

SEQ ID NO: 343528 - DNA, 12 bp, Artificial Sequence
  Oligonucleotide primer for the detection of SNP TSC0008144
aactcccaataa

SEQ ID NO: 343529 - DNA, 12 bp, Artificial Sequence
  Oligonucleotide primer for the detection of SNP TSC0008144
ttttaattaagt

SEQ ID NO: 343530 - DNA, 12 bp, Artificial Sequence
  Oligonucleotide primer for the detection of SNP TSC0008144
ggtttttaatga

SEQ ID NO: 343531 - DNA, 12 bp, Artificial Sequence
  Oligonucleotide primer for the detection of SNP TSC0043111
atttttttacct

SEQ ID NO: 343532 - DNA, 12 bp, Artificial Sequence
  Oligonucleotide primer for the detection of SNP TSC0043111
atgagttttatg

SEQ ID NO: 343533 - DNA, 12 bp, Artificial Sequence
  Oligonucleotide primer for the detection of SNP TSC0043111
atgagttttacg

SEQ ID NO: 343534 - DNA, 12 bp, Artificial Sequence
  Oligonucleotide primer for the detection of SNP TSC0010582
ttgtatttgaaa

SEQ ID NO: 343535 - DNA, 12 bp, Artificial Sequence
  Oligonucleotide primer for the detection of SNP TSC0010582
ttacacttaaaa

SEQ ID NO: 343536 - DNA, 12 bp, Artificial Sequence
  Oligonucleotide primer for the detection of SNP TSC0010582
tataggtttaat

SEQ ID NO: 343537 - DNA, 12 bp, Artificial Sequence
  Oligonucleotide primer for the detection of SNP TSC0043112
aaatatttacaa

SEQ ID NO: 343538 - DNA, 12 bp, Artificial Sequence
  Oligonucleotide primer for the detection of SNP TSC0043112
tataaaagtttt

SEQ ID NO: 343539 - DNA, 12 bp, Artificial Sequence
  Oligonucleotide primer for the detection of SNP TSC0043112
acaaaaacttta

SEQ ID NO: 343540 - DNA, 12 bp, Artificial Sequence
  Oligonucleotide primer for the detection of SNP TSC0043112
gaatatttataa

SEQ ID NO: 343541 - DNA, 12 bp, Artificial Sequence
  Oligonucleotide primer for the detection of SNP TSC0043113
ttaattctactc

SEQ ID NO: 343542 - DNA, 12 bp, Artificial Sequence
  Oligonucleotide primer for the detection of SNP TSC0043114
aaatatacaaat

SEQ ID NO: 343543 - DNA, 12 bp, Artificial Sequence
  Oligonucleotide primer for the detection of SNP TSC0043114
ggaaggatggtt

SEQ ID NO: 343544 - DNA, 12 bp, Artificial Sequence
  Oligonucleotide primer for the detection of SNP TSC0043114
aagtgtgtaaat

SEQ ID NO: 343545 - DNA, 12 bp, Artificial Sequence
  Oligonucleotide primer for the detection of SNP TSC0043115
tcatttacacac

SEQ ID NO: 343546 - DNA, 12 bp, Artificial Sequence
  Oligonucleotide primer for the detection of SNP TSC0043115
aggaaagtttta

SEQ ID NO: 343547 - DNA, 12 bp, Artificial Sequence
  Oligonucleotide primer for the detection of SNP TSC0043119
catcataaccta

SEQ ID NO: 343548 - DNA, 12 bp, Artificial Sequence
  Oligonucleotide primer for the detection of SNP TSC0043119
tttggggatgag

SEQ ID NO: 343549 - DNA, 12 bp, Artificial Sequence
  Oligonucleotide primer for the detection of SNP TSC0043119
tattatggtttg

SEQ ID NO: 343550 - DNA, 12 bp, Artificial Sequence
  Oligonucleotide primer for the detection of SNP TSC0043120
cttcatctctat

SEQ ID NO: 343551 - DNA, 12 bp, Artificial Sequence
  Oligonucleotide primer for the detection of SNP TSC0043120
tgagtaaaatag

SEQ ID NO: 343552 - DNA, 12 bp, Artificial Sequence
  Oligonucleotide primer for the detection of SNP TSC0043121
aatacccccatc

SEQ ID NO: 343553 - DNA, 12 bp, Artificial Sequence
  Oligonucleotide primer for the detection of SNP TSC0043121
tttaaattgaag

SEQ ID NO: 343554 - DNA, 12 bp, Artificial Sequence
  Oligonucleotide primer for the detection of SNP TSC0007547
tgtttagtatta

SEQ ID NO: 343555 - DNA, 12 bp, Artificial Sequence
  Oligonucleotide primer for the detection of SNP TSC0007547
cgtttagtatta

SEQ ID NO: 343556 - DNA, 12 bp, Artificial Sequence
  Oligonucleotide primer for the detection of SNP TSC0007549
aaaacttacttt

SEQ ID NO: 343557 - DNA, 12 bp, Artificial Sequence
  Oligonucleotide primer for the detection of SNP TSC0007549
ttttaagattga

SEQ ID NO: 343558 - DNA, 12 bp, Artificial Sequence
  Oligonucleotide primer for the detection of SNP TSC0007549
ttccaaaattaa

SEQ ID NO: 343559 - DNA, 12 bp, Artificial Sequence
  Oligonucleotide primer for the detection of SNP TSC0007549
gggatttgtttt

SEQ ID NO: 343560 - DNA, 12 bp, Artificial Sequence
  Oligonucleotide primer for the detection of SNP TSC0043122
tgagtattttaa

SEQ ID NO: 343561 - DNA, 12 bp, Artificial Sequence
  Oligonucleotide primer for the detection of SNP TSC0043122
taaatacctcaa

SEQ ID NO: 343562 - DNA, 12 bp, Artificial Sequence
  Oligonucleotide primer for the detection of SNP TSC0043122
tgttggtatttt

SEQ ID NO: 343563 - DNA, 12 bp, Artificial Sequence
  Oligonucleotide primer for the detection of SNP TSC0010681
aacttacctatc

SEQ ID NO: 343564 - DNA, 12 bp, Artificial Sequence
  Oligonucleotide primer for the detection of SNP TSC0010681
tatagaatagta

SEQ ID NO: 343565 - DNA, 12 bp, Artificial Sequence
  Oligonucleotide primer for the detection of SNP TSC0010681
cacaaaataata

SEQ ID NO: 343566 - DNA, 12 bp, Artificial Sequence
  Oligonucleotide primer for the detection of SNP TSC0010681
ggtttatttgtt

SEQ ID NO: 343567 - DNA, 12 bp, Artificial Sequence
  Oligonucleotide primer for the detection of SNP TSC0043123
aaactcttcctc

SEQ ID NO: 343568 - DNA, 12 bp, Artificial Sequence
  Oligonucleotide primer for the detection of SNP TSC0043123
tttgttggattg

SEQ ID NO: 343569 - DNA, 12 bp, Artificial Sequence
  Oligonucleotide primer for the detection of SNP TSC0043123
tttgttggatcg

SEQ ID NO: 343570 - DNA, 12 bp, Artificial Sequence
  Oligonucleotide primer for the detection of SNP TSC0010300
ccccactccaac

SEQ ID NO: 343571 - DNA, 12 bp, Artificial Sequence
  Oligonucleotide primer for the detection of SNP TSC0010300
tgtaatttttag

SEQ ID NO: 343572 - DNA, 12 bp, Artificial Sequence
  Oligonucleotide primer for the detection of SNP TSC0010863
ttagattatggg

SEQ ID NO: 343573 - DNA, 12 bp, Artificial Sequence
  Oligonucleotide primer for the detection of SNP TSC0006077
aatacatattta

SEQ ID NO: 343574 - DNA, 12 bp, Artificial Sequence
  Oligonucleotide primer for the detection of SNP TSC0006077
attttatttgaa

SEQ ID NO: 343575 - DNA, 12 bp, Artificial Sequence
  Oligonucleotide primer for the detection of SNP TSC0006078
aaaaactaataa

SEQ ID NO: 343576 - DNA, 12 bp, Artificial Sequence
  Oligonucleotide primer for the detection of SNP TSC0006078
ttgatgtaagtt

SEQ ID NO: 343577 - DNA, 12 bp, Artificial Sequence
  Oligonucleotide primer for the detection of SNP TSC0006078
cttaatacaaat

SEQ ID NO: 343578 - DNA, 12 bp, Artificial Sequence
  Oligonucleotide primer for the detection of SNP TSC0006078
aaaagttaataa

SEQ ID NO: 343579 - DNA, 12 bp, Artificial Sequence
  Oligonucleotide primer for the detection of SNP TSC0043126
accttaacaaat

SEQ ID NO: 343580 - DNA, 12 bp, Artificial Sequence
  Oligonucleotide primer for the detection of SNP TSC0043126
gttagtaaagaa

SEQ ID NO: 343581 - DNA, 12 bp, Artificial Sequence
  Oligonucleotide primer for the detection of SNP TSC0006888
acacctacaaac

SEQ ID NO: 343582 - DNA, 12 bp, Artificial Sequence
  Oligonucleotide primer for the detection of SNP TSC0008348
aactccaacctc

SEQ ID NO: 343583 - DNA, 12 bp, Artificial Sequence
  Oligonucleotide primer for the detection of SNP TSC0008348
tgggttgttttg

SEQ ID NO: 343584 - DNA, 12 bp, Artificial Sequence
  Oligonucleotide primer for the detection of SNP TSC0008348
tgggtcgttttg

SEQ ID NO: 343585 - DNA, 12 bp, Artificial Sequence
  Oligonucleotide primer for the detection of SNP TSC0043127
aaaaacaacaat

SEQ ID NO: 343586 - DNA, 12 bp, Artificial Sequence
  Oligonucleotide primer for the detection of SNP TSC0043127
tattgattagag

SEQ ID NO: 343587 - DNA, 12 bp, Artificial Sequence
  Oligonucleotide primer for the detection of SNP TSC0043127
tactaatcaaaa

SEQ ID NO: 343588 - DNA, 12 bp, Artificial Sequence
  Oligonucleotide primer for the detection of SNP TSC0043127
aaagataataat

SEQ ID NO: 343589 - DNA, 12 bp, Artificial Sequence
  Oligonucleotide primer for the detection of SNP TSC0043128
atccatctcctt

SEQ ID NO: 343590 - DNA, 12 bp, Artificial Sequence
  Oligonucleotide primer for the detection of SNP TSC0043128
atgaagattgag

SEQ ID NO: 343591 - DNA, 12 bp, Artificial Sequence
  Oligonucleotide primer for the detection of SNP TSC0043134
accaactccttt

SEQ ID NO: 343592 - DNA, 12 bp, Artificial Sequence
  Oligonucleotide primer for the detection of SNP TSC0043134
ttttgatgagaa

SEQ ID NO: 343593 - DNA, 12 bp, Artificial Sequence
  Oligonucleotide primer for the detection of SNP TSC0043135
aaaattatccaa

SEQ ID NO: 343594 - DNA, 12 bp, Artificial Sequence
  Oligonucleotide primer for the detection of SNP TSC0043135
ttgatatttggg

SEQ ID NO: 343595 - DNA, 12 bp, Artificial Sequence
  Oligonucleotide primer for the detection of SNP TSC0043135
ttaacatttaaa

SEQ ID NO: 343596 - DNA, 12 bp, Artificial Sequence
  Oligonucleotide primer for the detection of SNP TSC0043135
aagaattattta

SEQ ID NO: 343597 - DNA, 12 bp, Artificial Sequence
  Oligonucleotide primer for the detection of SNP TSC0043140
aactaaaacttc

SEQ ID NO: 343598 - DNA, 12 bp, Artificial Sequence
  Oligonucleotide primer for the detection of SNP TSC0043140
tagtagatagta

SEQ ID NO: 343599 - DNA, 12 bp, Artificial Sequence
  Oligonucleotide primer for the detection of SNP TSC0043141
tttcaatcaaaa

SEQ ID NO: 343600 - DNA, 12 bp, Artificial Sequence
  Oligonucleotide primer for the detection of SNP TSC0043141
gtatttttaata

SEQ ID NO: 343601 - DNA, 12 bp, Artificial Sequence
  Oligonucleotide primer for the detection of SNP TSC0043141
atacttttaata

SEQ ID NO: 343602 - DNA, 12 bp, Artificial Sequence
  Oligonucleotide primer for the detection of SNP TSC0043141
tattttagttag

SEQ ID NO: 343603 - DNA, 12 bp, Artificial Sequence
  Oligonucleotide primer for the detection of SNP TSC0043145
ccacactactca

SEQ ID NO: 343604 - DNA, 12 bp, Artificial Sequence
  Oligonucleotide primer for the detection of SNP TSC0043146
ttttttgttgtg

SEQ ID NO: 343605 - DNA, 12 bp, Artificial Sequence
  Oligonucleotide primer for the detection of SNP TSC0043146
ttttttgttgcg

SEQ ID NO: 343606 - DNA, 12 bp, Artificial Sequence
  Oligonucleotide primer for the detection of SNP TSC0043150
attttagaaaaa

SEQ ID NO: 343607 - DNA, 12 bp, Artificial Sequence
  Oligonucleotide primer for the detection of SNP TSC0043151
aattttagaaaa

SEQ ID NO: 343608 - DNA, 12 bp, Artificial Sequence
  Oligonucleotide primer for the detection of SNP TSC0043152
aatcctatatta

SEQ ID NO: 343609 - DNA, 12 bp, Artificial Sequence
  Oligonucleotide primer for the detection of SNP TSC0043152
caattatccttt

SEQ ID NO: 343610 - DNA, 12 bp, Artificial Sequence
  Oligonucleotide primer for the detection of SNP TSC0043152
aattttgtgtta

SEQ ID NO: 343611 - DNA, 12 bp, Artificial Sequence
  Oligonucleotide primer for the detection of SNP TSC0043153
ttctcaacattc

SEQ ID NO: 343612 - DNA, 12 bp, Artificial Sequence
  Oligonucleotide primer for the detection of SNP TSC0043153
ttaattgatagg

SEQ ID NO: 343613 - DNA, 12 bp, Artificial Sequence
  Oligonucleotide primer for the detection of SNP TSC0043153
ttaactaacaaa

SEQ ID NO: 343614 - DNA, 12 bp, Artificial Sequence
  Oligonucleotide primer for the detection of SNP TSC0043153
tttagtattttt

SEQ ID NO: 343615 - DNA, 12 bp, Artificial Sequence
  Oligonucleotide primer for the detection of SNP TSC0043154
aataattctccc

SEQ ID NO: 343616 - DNA, 12 bp, Artificial Sequence
  Oligonucleotide primer for the detection of SNP TSC0043154
agtaattgagtt

SEQ ID NO: 343617 - DNA, 12 bp, Artificial Sequence
  Oligonucleotide primer for the detection of SNP TSC0043154
taaataattaaa

SEQ ID NO: 343618 - DNA, 12 bp, Artificial Sequence
  Oligonucleotide primer for the detection of SNP TSC0043154
gataattttttt

SEQ ID NO: 343619 - DNA, 12 bp, Artificial Sequence
  Oligonucleotide primer for the detection of SNP TSC0043154
gataattttttc

SEQ ID NO: 343620 - DNA, 12 bp, Artificial Sequence
  Oligonucleotide primer for the detection of SNP TSC0043155
cctaatacaacc

SEQ ID NO: 343621 - DNA, 12 bp, Artificial Sequence
  Oligonucleotide primer for the detection of SNP TSC0043159
caaaataaaaat

SEQ ID NO: 343622 - DNA, 12 bp, Artificial Sequence
  Oligonucleotide primer for the detection of SNP TSC0043159
gattgtaggata

SEQ ID NO: 343623 - DNA, 12 bp, Artificial Sequence
  Oligonucleotide primer for the detection of SNP TSC0043160
accttaataata

SEQ ID NO: 343624 - DNA, 12 bp, Artificial Sequence
  Oligonucleotide primer for the detection of SNP TSC0043160
tactcttctatt

SEQ ID NO: 343625 - DNA, 12 bp, Artificial Sequence
  Oligonucleotide primer for the detection of SNP TSC0043160
aattttaatgat

SEQ ID NO: 343626 - DNA, 12 bp, Artificial Sequence
  Oligonucleotide primer for the detection of SNP TSC0043161
ttgttatttaat

SEQ ID NO: 343627 - DNA, 12 bp, Artificial Sequence
  Oligonucleotide primer for the detection of SNP TSC0043161
ttattattcaat

SEQ ID NO: 343628 - DNA, 12 bp, Artificial Sequence
  Oligonucleotide primer for the detection of SNP TSC0043165
tacattatctca

SEQ ID NO: 343629 - DNA, 12 bp, Artificial Sequence
  Oligonucleotide primer for the detection of SNP TSC0043165
ttttgtaggaat

SEQ ID NO: 343630 - DNA, 12 bp, Artificial Sequence
  Oligonucleotide primer for the detection of SNP TSC0043167
ccatattttact

SEQ ID NO: 343631 - DNA, 12 bp, Artificial Sequence
  Oligonucleotide primer for the detection of SNP TSC0043172
acctattaaaat

SEQ ID NO: 343632 - DNA, 12 bp, Artificial Sequence
  Oligonucleotide primer for the detection of SNP TSC0043172
attaatttgaag

SEQ ID NO: 343633 - DNA, 12 bp, Artificial Sequence
  Oligonucleotide primer for the detection of SNP TSC0043174
attattatatat

SEQ ID NO: 343634 - DNA, 12 bp, Artificial Sequence
  Oligonucleotide primer for the detection of SNP TSC0043174
ataattatgtaa

SEQ ID NO: 343635 - DNA, 12 bp, Artificial Sequence
  Oligonucleotide primer for the detection of SNP TSC0043175
ttctacaaacca

SEQ ID NO: 343636 - DNA, 12 bp, Artificial Sequence
  Oligonucleotide primer for the detection of SNP TSC0043175
tgtatatgattt

SEQ ID NO: 343637 - DNA, 12 bp, Artificial Sequence
  Oligonucleotide primer for the detection of SNP TSC0043175
acacataaccta

SEQ ID NO: 343638 - DNA, 12 bp, Artificial Sequence
  Oligonucleotide primer for the detection of SNP TSC0043175
gttttgtaggtt

SEQ ID NO: 343639 - DNA, 12 bp, Artificial Sequence
  Oligonucleotide primer for the detection of SNP TSC0043176
catcaaatctcc

SEQ ID NO: 343640 - DNA, 12 bp, Artificial Sequence
  Oligonucleotide primer for the detection of SNP TSC0043176
atagtgaataag

SEQ ID NO: 343641 - DNA, 12 bp, Artificial Sequence
  Oligonucleotide primer for the detection of SNP TSC0043179
aaaactatatat

SEQ ID NO: 343642 - DNA, 12 bp, Artificial Sequence
  Oligonucleotide primer for the detection of SNP TSC0043179
agagaaagtttg

SEQ ID NO: 343643 - DNA, 12 bp, Artificial Sequence
  Oligonucleotide primer for the detection of SNP TSC0043179
gaggttatatgt

SEQ ID NO: 343644 - DNA, 12 bp, Artificial Sequence
  Oligonucleotide primer for the detection of SNP TSC0043180
atacaataactc

SEQ ID NO: 343645 - DNA, 12 bp, Artificial Sequence
  Oligonucleotide primer for the detection of SNP TSC0043180
tgggaggatagg

SEQ ID NO: 343646 - DNA, 12 bp, Artificial Sequence
  Oligonucleotide primer for the detection of SNP TSC0043181
ggtgttttgtaa

SEQ ID NO: 343647 - DNA, 12 bp, Artificial Sequence
  Oligonucleotide primer for the detection of SNP TSC0043182
ctaaatctcatc

SEQ ID NO: 343648 - DNA, 12 bp, Artificial Sequence
  Oligonucleotide primer for the detection of SNP TSC0043183
ctatttttaata

SEQ ID NO: 343649 - DNA, 12 bp, Artificial Sequence
  Oligonucleotide primer for the detection of SNP TSC0043183
gtattggataat

SEQ ID NO: 343650 - DNA, 12 bp, Artificial Sequence
  Oligonucleotide primer for the detection of SNP TSC0043183
atattaaataac

SEQ ID NO: 343651 - DNA, 12 bp, Artificial Sequence
  Oligonucleotide primer for the detection of SNP TSC0008310
aaaaaaccatcc

SEQ ID NO: 343652 - DNA, 12 bp, Artificial Sequence
  Oligonucleotide primer for the detection of SNP TSC0008310
ttgagttattag

SEQ ID NO: 343653 - DNA, 12 bp, Artificial Sequence
  Oligonucleotide primer for the detection of SNP TSC0008310
tcgagttattag

SEQ ID NO: 343654 - DNA, 12 bp, Artificial Sequence
  Oligonucleotide primer for the detection of SNP TSC0043184
tcaatctaatac

SEQ ID NO: 343655 - DNA, 12 bp, Artificial Sequence
  Oligonucleotide primer for the detection of SNP TSC0043184
agtattgtaaat

SEQ ID NO: 343656 - DNA, 12 bp, Artificial Sequence
  Oligonucleotide primer for the detection of SNP TSC0043184
aaacactacaaa

SEQ ID NO: 343657 - DNA, 12 bp, Artificial Sequence
  Oligonucleotide primer for the detection of SNP TSC0043184
ttagtttgatgc

SEQ ID NO: 343658 - DNA, 12 bp, Artificial Sequence
  Oligonucleotide primer for the detection of SNP TSC0043188
aaactaaacaac

SEQ ID NO: 343659 - DNA, 12 bp, Artificial Sequence
  Oligonucleotide primer for the detection of SNP TSC0043188
tgaggttgttaa

SEQ ID NO: 343660 - DNA, 12 bp, Artificial Sequence
  Oligonucleotide primer for the detection of SNP TSC0043188
tgaggtcgttaa

SEQ ID NO: 343661 - DNA, 12 bp, Artificial Sequence
  Oligonucleotide primer for the detection of SNP TSC0043189
tacaaatcccaa

SEQ ID NO: 343662 - DNA, 12 bp, Artificial Sequence
  Oligonucleotide primer for the detection of SNP TSC0043189
tggaatattgtt

SEQ ID NO: 343663 - DNA, 12 bp, Artificial Sequence
  Oligonucleotide primer for the detection of SNP TSC0043189
taaaacactact

SEQ ID NO: 343664 - DNA, 12 bp, Artificial Sequence
  Oligonucleotide primer for the detection of SNP TSC0043189
atatagatttta

SEQ ID NO: 343665 - DNA, 12 bp, Artificial Sequence
  Oligonucleotide primer for the detection of SNP TSC0043190
attttgaatata

SEQ ID NO: 343666 - DNA, 12 bp, Artificial Sequence
  Oligonucleotide primer for the detection of SNP TSC0043190
atttcgaatata

SEQ ID NO: 343667 - DNA, 12 bp, Artificial Sequence
  Oligonucleotide primer for the detection of SNP TSC0043191
aacccaaaccac

SEQ ID NO: 343668 - DNA, 12 bp, Artificial Sequence
  Oligonucleotide primer for the detection of SNP TSC0043191
aatttaaattat

SEQ ID NO: 343669 - DNA, 12 bp, Artificial Sequence
  Oligonucleotide primer for the detection of SNP TSC0043192
actattaaaact

SEQ ID NO: 343670 - DNA, 12 bp, Artificial Sequence
  Oligonucleotide primer for the detection of SNP TSC0043193
aatttcctctct

SEQ ID NO: 343671 - DNA, 12 bp, Artificial Sequence
  Oligonucleotide primer for the detection of SNP TSC0043193
attatttatgga

SEQ ID NO: 343672 - DNA, 12 bp, Artificial Sequence
  Oligonucleotide primer for the detection of SNP TSC0043193
attatccataaa

SEQ ID NO: 343673 - DNA, 12 bp, Artificial Sequence
  Oligonucleotide primer for the detection of SNP TSC0043194
tcaaaccctaca

SEQ ID NO: 343674 - DNA, 12 bp, Artificial Sequence
  Oligonucleotide primer for the detection of SNP TSC0043194
taggaaaaagat

SEQ ID NO: 343675 - DNA, 12 bp, Artificial Sequence
  Oligonucleotide primer for the detection of SNP TSC0043194
tttaagttttgt

SEQ ID NO: 343676 - DNA, 12 bp, Artificial Sequence
  Oligonucleotide primer for the detection of SNP TSC0043196
taaatcaaacta

SEQ ID NO: 343677 - DNA, 12 bp, Artificial Sequence
  Oligonucleotide primer for the detection of SNP TSC0043196
tgaaagtgattt

SEQ ID NO: 343678 - DNA, 12 bp, Artificial Sequence
  Oligonucleotide primer for the detection of SNP TSC0043196
taaaaataattc

SEQ ID NO: 343679 - DNA, 12 bp, Artificial Sequence
  Oligonucleotide primer for the detection of SNP TSC0043196
tgggttaggttg

SEQ ID NO: 343680 - DNA, 12 bp, Artificial Sequence
  Oligonucleotide primer for the detection of SNP TSC0043197
atcactttcaaa

SEQ ID NO: 343681 - DNA, 12 bp, Artificial Sequence
  Oligonucleotide primer for the detection of SNP TSC0043197
aattatttttaa

SEQ ID NO: 343682 - DNA, 12 bp, Artificial Sequence
  Oligonucleotide primer for the detection of SNP TSC0043198
taaatcatatat

SEQ ID NO: 343683 - DNA, 12 bp, Artificial Sequence
  Oligonucleotide primer for the detection of SNP TSC0043198
tatttagaagag

SEQ ID NO: 343684 - DNA, 12 bp, Artificial Sequence
  Oligonucleotide primer for the detection of SNP TSC0043199
caaccaaaaaat

SEQ ID NO: 343685 - DNA, 12 bp, Artificial Sequence
  Oligonucleotide primer for the detection of SNP TSC0043199
taaagttttttg

SEQ ID NO: 343686 - DNA, 12 bp, Artificial Sequence
  Oligonucleotide primer for the detection of SNP TSC0043201
aactaaaatctt

SEQ ID NO: 343687 - DNA, 12 bp, Artificial Sequence
  Oligonucleotide primer for the detection of SNP TSC0043201
gggagtgatata

SEQ ID NO: 343688 - DNA, 12 bp, Artificial Sequence
  Oligonucleotide primer for the detection of SNP TSC0043204
accaaaaccaca

SEQ ID NO: 343689 - DNA, 12 bp, Artificial Sequence
  Oligonucleotide primer for the detection of SNP TSC0043204
ttttctaccaat

SEQ ID NO: 343690 - DNA, 12 bp, Artificial Sequence
  Oligonucleotide primer for the detection of SNP TSC0043205
attcctaaaaat

SEQ ID NO: 343691 - DNA, 12 bp, Artificial Sequence
  Oligonucleotide primer for the detection of SNP TSC0043205
tggtgtagaggt

SEQ ID NO: 343692 - DNA, 12 bp, Artificial Sequence
  Oligonucleotide primer for the detection of SNP TSC0043206
tcccacaacccc

SEQ ID NO: 343693 - DNA, 12 bp, Artificial Sequence
  Oligonucleotide primer for the detection of SNP TSC0043206
aatggttagagg

SEQ ID NO: 343694 - DNA, 12 bp, Artificial Sequence
  Oligonucleotide primer for the detection of SNP TSC0043206
ttttatagtttt

SEQ ID NO: 343695 - DNA, 12 bp, Artificial Sequence
  Oligonucleotide primer for the detection of SNP TSC0043207
gtggttttggtt

SEQ ID NO: 343696 - DNA, 12 bp, Artificial Sequence
  Oligonucleotide primer for the detection of SNP TSC0043208
ccatctttctta

SEQ ID NO: 343697 - DNA, 12 bp, Artificial Sequence
  Oligonucleotide primer for the detection of SNP TSC0043208
tttgttggttgg

SEQ ID NO: 343698 - DNA, 12 bp, Artificial Sequence
  Oligonucleotide primer for the detection of SNP TSC0043208
cttattaactaa

SEQ ID NO: 343699 - DNA, 12 bp, Artificial Sequence
  Oligonucleotide primer for the detection of SNP TSC0043209
actcaaaaacac

SEQ ID NO: 343700 - DNA, 12 bp, Artificial Sequence
  Oligonucleotide primer for the detection of SNP TSC0043209
ttttttggaaag

SEQ ID NO: 343701 - DNA, 12 bp, Artificial Sequence
  Oligonucleotide primer for the detection of SNP TSC0043210
tatttaattcaa

SEQ ID NO: 343702 - DNA, 12 bp, Artificial Sequence
  Oligonucleotide primer for the detection of SNP TSC0043210
tggtaattaaat

SEQ ID NO: 343703 - DNA, 12 bp, Artificial Sequence
  Oligonucleotide primer for the detection of SNP TSC0043210
tatttgatttag

SEQ ID NO: 343704 - DNA, 12 bp, Artificial Sequence
  Oligonucleotide primer for the detection of SNP TSC0043211
actctctccaat

SEQ ID NO: 343705 - DNA, 12 bp, Artificial Sequence
  Oligonucleotide primer for the detection of SNP TSC0043211
gaaagagagtta

SEQ ID NO: 343706 - DNA, 12 bp, Artificial Sequence
  Oligonucleotide primer for the detection of SNP TSC0043212
cttaatcttatt

SEQ ID NO: 343707 - DNA, 12 bp, Artificial Sequence
  Oligonucleotide primer for the detection of SNP TSC0043212
atatttgggtaa

SEQ ID NO: 343708 - DNA, 12 bp, Artificial Sequence
  Oligonucleotide primer for the detection of SNP TSC0043213
tttttgtgtgga

SEQ ID NO: 343709 - DNA, 12 bp, Artificial Sequence
  Oligonucleotide primer for the detection of SNP TSC0043213
tttttgcgtgga

SEQ ID NO: 343710 - DNA, 12 bp, Artificial Sequence
  Oligonucleotide primer for the detection of SNP TSC0043214
attaggtttatt

SEQ ID NO: 343711 - DNA, 12 bp, Artificial Sequence
  Oligonucleotide primer for the detection of SNP TSC0043214
attaaatccatt

SEQ ID NO: 343712 - DNA, 12 bp, Artificial Sequence
  Oligonucleotide primer for the detection of SNP TSC0043214
ttggattagaga

SEQ ID NO: 343713 - DNA, 12 bp, Artificial Sequence
  Oligonucleotide primer for the detection of SNP TSC0043217
aaaacattaata

SEQ ID NO: 343714 - DNA, 12 bp, Artificial Sequence
  Oligonucleotide primer for the detection of SNP TSC0043217
agaatattattt

SEQ ID NO: 343715 - DNA, 12 bp, Artificial Sequence
  Oligonucleotide primer for the detection of SNP TSC0043217
agaatattattc

SEQ ID NO: 343716 - DNA, 12 bp, Artificial Sequence
  Oligonucleotide primer for the detection of SNP TSC0043217
aaacattattca

SEQ ID NO: 343717 - DNA, 12 bp, Artificial Sequence
  Oligonucleotide primer for the detection of SNP TSC0043217
aaacattattcg

SEQ ID NO: 343718 - DNA, 12 bp, Artificial Sequence
  Oligonucleotide primer for the detection of SNP TSC0043218
acctataacaac

SEQ ID NO: 343719 - DNA, 12 bp, Artificial Sequence
  Oligonucleotide primer for the detection of SNP TSC0043218
ttaaaatatgga

SEQ ID NO: 343720 - DNA, 12 bp, Artificial Sequence
  Oligonucleotide primer for the detection of SNP TSC0043218
atttgtggtaat

SEQ ID NO: 343721 - DNA, 12 bp, Artificial Sequence
  Oligonucleotide primer for the detection of SNP TSC0043220
atagatttatta

SEQ ID NO: 343722 - DNA, 12 bp, Artificial Sequence
  Oligonucleotide primer for the detection of SNP TSC0043221
atcacattcaaa

SEQ ID NO: 343723 - DNA, 12 bp, Artificial Sequence
  Oligonucleotide primer for the detection of SNP TSC0043221
gattttgtgtgt

SEQ ID NO: 343724 - DNA, 12 bp, Artificial Sequence
  Oligonucleotide primer for the detection of SNP TSC0043221
aaaccttatata

SEQ ID NO: 343725 - DNA, 12 bp, Artificial Sequence
  Oligonucleotide primer for the detection of SNP TSC0043222
aaaacaccccat

SEQ ID NO: 343726 - DNA, 12 bp, Artificial Sequence
  Oligonucleotide primer for the detection of SNP TSC0043222
aaaacgccccat

SEQ ID NO: 343727 - DNA, 12 bp, Artificial Sequence
  Oligonucleotide primer for the detection of SNP TSC0043222
ttaaaagaaatg

SEQ ID NO: 343728 - DNA, 12 bp, Artificial Sequence
  Oligonucleotide primer for the detection of SNP TSC0043222
ttaaaagaaacg

SEQ ID NO: 343729 - DNA, 12 bp, Artificial Sequence
  Oligonucleotide primer for the detection of SNP TSC0043223
acttatctctaa

SEQ ID NO: 343730 - DNA, 12 bp, Artificial Sequence
  Oligonucleotide primer for the detection of SNP TSC0043223
tagtttaagtgg

SEQ ID NO: 343731 - DNA, 12 bp, Artificial Sequence
  Oligonucleotide primer for the detection of SNP TSC0043224
aataaatattca

SEQ ID NO: 343732 - DNA, 12 bp, Artificial Sequence
  Oligonucleotide primer for the detection of SNP TSC0043224
cactccttctta

SEQ ID NO: 343733 - DNA, 12 bp, Artificial Sequence
  Oligonucleotide primer for the detection of SNP TSC0043225
actccctaaaaa

SEQ ID NO: 343734 - DNA, 12 bp, Artificial Sequence
  Oligonucleotide primer for the detection of SNP TSC0043225
gatgaaagtttt

SEQ ID NO: 343735 - DNA, 12 bp, Artificial Sequence
  Oligonucleotide primer for the detection of SNP TSC0043225
aataaaaatccc

SEQ ID NO: 343736 - DNA, 12 bp, Artificial Sequence
  Oligonucleotide primer for the detection of SNP TSC0043225
ttttttgaggat

SEQ ID NO: 343737 - DNA, 12 bp, Artificial Sequence
  Oligonucleotide primer for the detection of SNP TSC0043225
ttttttgaggac

SEQ ID NO: 343738 - DNA, 12 bp, Artificial Sequence
  Oligonucleotide primer for the detection of SNP TSC0043226
aataatttaaac

SEQ ID NO: 343739 - DNA, 12 bp, Artificial Sequence
  Oligonucleotide primer for the detection of SNP TSC0043226
aaaatttatttg

SEQ ID NO: 343740 - DNA, 12 bp, Artificial Sequence
  Oligonucleotide primer for the detection of SNP TSC0006326
cctcaaacttct

SEQ ID NO: 343741 - DNA, 12 bp, Artificial Sequence
  Oligonucleotide primer for the detection of SNP TSC0043227
atattttttgat

SEQ ID NO: 343742 - DNA, 12 bp, Artificial Sequence
  Oligonucleotide primer for the detection of SNP TSC0043227
atactttttaat

SEQ ID NO: 343743 - DNA, 12 bp, Artificial Sequence
  Oligonucleotide primer for the detection of SNP TSC0043227
atggggttaagg

SEQ ID NO: 343744 - DNA, 12 bp, Artificial Sequence
  Oligonucleotide primer for the detection of SNP TSC0043229
tttatccattca

SEQ ID NO: 343745 - DNA, 12 bp, Artificial Sequence
  Oligonucleotide primer for the detection of SNP TSC0043229
tttatccattcg

SEQ ID NO: 343746 - DNA, 12 bp, Artificial Sequence
  Oligonukleotid-Primer
taaatgtttatt

SEQ ID NO: 343747 - DNA, 12 bp, Artificial Sequence
  Oligonucleotide primer for the detection of SNP TSC0043229
taaatattcact

SEQ ID NO: 343748 - DNA, 12 bp, Artificial Sequence
  Oligonucleotide primer for the detection of SNP TSC0043229
tttatttattcg

SEQ ID NO: 343749 - DNA, 12 bp, Artificial Sequence
  Oligonucleotide primer for the detection of SNP TSC0043230
tttctttatcca

SEQ ID NO: 343750 - DNA, 12 bp, Artificial Sequence
  Oligonucleotide primer for the detection of SNP TSC0043230
atgtttattgat

SEQ ID NO: 343751 - DNA, 12 bp, Artificial Sequence
  Oligonucleotide primer for the detection of SNP TSC0043230
atgtttattgac

SEQ ID NO: 343752 - DNA, 12 bp, Artificial Sequence
  Oligonucleotide primer for the detection of SNP TSC0043230
atattcactaac

SEQ ID NO: 343753 - DNA, 12 bp, Artificial Sequence
  Oligonucleotide primer for the detection of SNP TSC0043231
ttataacaaaat

SEQ ID NO: 343754 - DNA, 12 bp, Artificial Sequence
  Oligonucleotide primer for the detection of SNP TSC0043231
tatttagtttgt

SEQ ID NO: 343755 - DNA, 12 bp, Artificial Sequence
  Oligonucleotide primer for the detection of SNP TSC0043231
cccaatctataa

SEQ ID NO: 343756 - DNA, 12 bp, Artificial Sequence
  Oligonucleotide primer for the detection of SNP TSC0043231
ttgtaatagaat

SEQ ID NO: 343757 - DNA, 12 bp, Artificial Sequence
  Oligonucleotide primer for the detection of SNP TSC0043232
tatctatctctc

SEQ ID NO: 343758 - DNA, 12 bp, Artificial Sequence
  Oligonucleotide primer for the detection of SNP TSC0043232
ttatatatatat

SEQ ID NO: 343759 - DNA, 12 bp, Artificial Sequence
  Oligonucleotide primer for the detection of SNP TSC0043234
taccaaaaactt

SEQ ID NO: 343760 - DNA, 12 bp, Artificial Sequence
  Oligonucleotide primer for the detection of SNP TSC0043234
tttttagaaaga

SEQ ID NO: 343761 - DNA, 12 bp, Artificial Sequence
  Oligonucleotide primer for the detection of SNP TSC0043235
cactccccaatt

SEQ ID NO: 343762 - DNA, 12 bp, Artificial Sequence
  Oligonucleotide primer for the detection of SNP TSC0043235
gagtatatggtg

SEQ ID NO: 343763 - DNA, 12 bp, Artificial Sequence
  Oligonucleotide primer for the detection of SNP TSC0043235
gagtatacggtg

SEQ ID NO: 343764 - DNA, 12 bp, Artificial Sequence
  Oligonucleotide primer for the detection of SNP TSC0007692
cttctttttttt

SEQ ID NO: 343765 - DNA, 12 bp, Artificial Sequence
  Oligonucleotide primer for the detection of SNP TSC0007692
gtataataataa

SEQ ID NO: 343766 - DNA, 12 bp, Artificial Sequence
  Oligonucleotide primer for the detection of SNP TSC0043236
aaaatttaccct

SEQ ID NO: 343767 - DNA, 12 bp, Artificial Sequence
  Oligonucleotide primer for the detection of SNP TSC0043236
taatttaggagg

SEQ ID NO: 343768 - DNA, 12 bp, Artificial Sequence
  Oligonucleotide primer for the detection of SNP TSC0043237
tttatcaaatta

SEQ ID NO: 343769 - DNA, 12 bp, Artificial Sequence
  Oligonucleotide primer for the detection of SNP TSC0043237
tattaccacata

SEQ ID NO: 343770 - DNA, 12 bp, Artificial Sequence
  Oligonucleotide primer for the detection of SNP TSC0043237
tttgttaaatta

SEQ ID NO: 343771 - DNA, 12 bp, Artificial Sequence
  Oligonucleotide primer for the detection of SNP TSC0043238
gaaaaagttttt

SEQ ID NO: 343772 - DNA, 12 bp, Artificial Sequence
  Oligonucleotide primer for the detection of SNP TSC0010926
actatctttcac

SEQ ID NO: 343773 - DNA, 12 bp, Artificial Sequence
  Oligonucleotide primer for the detection of SNP TSC0010926
ggttaaaaatgt

SEQ ID NO: 343774 - DNA, 12 bp, Artificial Sequence
  Oligonucleotide primer for the detection of SNP TSC0010926
attaaaaataca

SEQ ID NO: 343775 - DNA, 12 bp, Artificial Sequence
  Oligonucleotide primer for the detection of SNP TSC0043239
acaaatataaat

SEQ ID NO: 343776 - DNA, 12 bp, Artificial Sequence
  Oligonucleotide primer for the detection of SNP TSC0043239
acgaatataaat

SEQ ID NO: 343777 - DNA, 12 bp, Artificial Sequence
  Oligonucleotide primer for the detection of SNP TSC0043239
tattatatttgt

SEQ ID NO: 343778 - DNA, 12 bp, Artificial Sequence
  Oligonucleotide primer for the detection of SNP TSC0043239
caccacacctat

SEQ ID NO: 343779 - DNA, 12 bp, Artificial Sequence
  Oligonucleotide primer for the detection of SNP TSC0043239
gtggatataagt

SEQ ID NO: 343780 - DNA, 12 bp, Artificial Sequence
  Oligonucleotide primer for the detection of SNP TSC0043239
gcggatataagt

SEQ ID NO: 343781 - DNA, 12 bp, Artificial Sequence
  Oligonucleotide primer for the detection of SNP TSC0043240
aaatttttcaac

SEQ ID NO: 343782 - DNA, 12 bp, Artificial Sequence
  Oligonucleotide primer for the detection of SNP TSC0043240
gtgaaattttgg

SEQ ID NO: 343783 - DNA, 12 bp, Artificial Sequence
  Oligonucleotide primer for the detection of SNP TSC0043240
gcgaaattttgg

SEQ ID NO: 343784 - DNA, 12 bp, Artificial Sequence
  Oligonucleotide primer for the detection of SNP TSC0043245
taaatcctcaaa

SEQ ID NO: 343785 - DNA, 12 bp, Artificial Sequence
  Oligonucleotide primer for the detection of SNP TSC0043245
aagtgtgaattt

SEQ ID NO: 343786 - DNA, 12 bp, Artificial Sequence
  Oligonucleotide primer for the detection of SNP TSC0043245
aaatataaattc

SEQ ID NO: 343787 - DNA, 12 bp, Artificial Sequence
  Oligonucleotide primer for the detection of SNP TSC0043248
taccttcttata

SEQ ID NO: 343788 - DNA, 12 bp, Artificial Sequence
  Oligonucleotide primer for the detection of SNP TSC0043248
ttgatatttgtt

SEQ ID NO: 343789 - DNA, 12 bp, Artificial Sequence
  Oligonucleotide primer for the detection of SNP TSC0043248
taacacttatta

SEQ ID NO: 343790 - DNA, 12 bp, Artificial Sequence
  Oligonucleotide primer for the detection of SNP TSC0043248
tgtttttttatg

SEQ ID NO: 343791 - DNA, 12 bp, Artificial Sequence
  Oligonucleotide primer for the detection of SNP TSC0043249
caatcttaaaaa

SEQ ID NO: 343792 - DNA, 12 bp, Artificial Sequence
  Oligonucleotide primer for the detection of SNP TSC0043249
tatttgaaatgt

SEQ ID NO: 343793 - DNA, 12 bp, Artificial Sequence
  Oligonucleotide primer for the detection of SNP TSC0043249
tatttgaaacgt

SEQ ID NO: 343794 - DNA, 12 bp, Artificial Sequence
  Oligonucleotide primer for the detection of SNP TSC0043249
acctaaaacaca

SEQ ID NO: 343795 - DNA, 12 bp, Artificial Sequence
  Oligonucleotide primer for the detection of SNP TSC0043249
acctaaaacgca

SEQ ID NO: 343796 - DNA, 12 bp, Artificial Sequence
  Oligonucleotide primer for the detection of SNP TSC0043251
taccactcctct

SEQ ID NO: 343797 - DNA, 12 bp, Artificial Sequence
  Oligonucleotide primer for the detection of SNP TSC0043251
ggtgggtaggga

SEQ ID NO: 343798 - DNA, 12 bp, Artificial Sequence
  Oligonucleotide primer for the detection of SNP TSC0043252
taattagtatga

SEQ ID NO: 343799 - DNA, 12 bp, Artificial Sequence
  Oligonucleotide primer for the detection of SNP TSC0043252
caatcaacataa

SEQ ID NO: 343800 - DNA, 12 bp, Artificial Sequence
  Oligonucleotide primer for the detection of SNP TSC0043252
ggtgttagaata

SEQ ID NO: 343801 - DNA, 12 bp, Artificial Sequence
  Oligonucleotide primer for the detection of SNP TSC0043253
aaaacttttttt

SEQ ID NO: 343802 - DNA, 12 bp, Artificial Sequence
  Oligonucleotide primer for the detection of SNP TSC0043254
accactcatatt

SEQ ID NO: 343803 - DNA, 12 bp, Artificial Sequence
  Oligonucleotide primer for the detection of SNP TSC0043254
ttgatttaataa

SEQ ID NO: 343804 - DNA, 12 bp, Artificial Sequence
  Oligonucleotide primer for the detection of SNP TSC0043256
aataaaactact

SEQ ID NO: 343805 - DNA, 12 bp, Artificial Sequence
  Oligonucleotide primer for the detection of SNP TSC0043256
aatatataatta

SEQ ID NO: 343806 - DNA, 12 bp, Artificial Sequence
  Oligonucleotide primer for the detection of SNP TSC0043257
ggtatgaaatta

SEQ ID NO: 343807 - DNA, 12 bp, Artificial Sequence
  Oligonucleotide primer for the detection of SNP TSC0043258
aattttttaatt

SEQ ID NO: 343808 - DNA, 12 bp, Artificial Sequence
  Oligonucleotide primer for the detection of SNP TSC0043258
caactctccaac

SEQ ID NO: 343809 - DNA, 12 bp, Artificial Sequence
  Oligonucleotide primer for the detection of SNP TSC0043259
ctacaaataact

SEQ ID NO: 343810 - DNA, 12 bp, Artificial Sequence
  Oligonucleotide primer for the detection of SNP TSC0043259
tttaagggtgga

SEQ ID NO: 343811 - DNA, 12 bp, Artificial Sequence
  Oligonucleotide primer for the detection of SNP TSC0004918
tttcacaataat

SEQ ID NO: 343812 - DNA, 12 bp, Artificial Sequence
  Oligonucleotide primer for the detection of SNP TSC0004918
attataaatgga

SEQ ID NO: 343813 - DNA, 12 bp, Artificial Sequence
  Oligonucleotide primer for the detection of SNP TSC0006945
tataattattaa

SEQ ID NO: 343814 - DNA, 12 bp, Artificial Sequence
  Oligonucleotide primer for the detection of SNP TSC0006945
cataattattaa

SEQ ID NO: 343815 - DNA, 12 bp, Artificial Sequence
  Oligonucleotide primer for the detection of SNP TSC0006945
aaaaaagaaagt

SEQ ID NO: 343816 - DNA, 12 bp, Artificial Sequence
  Oligonucleotide primer for the detection of SNP TSC0043261
atttcaatatat

SEQ ID NO: 343817 - DNA, 12 bp, Artificial Sequence
  Oligonucleotide primer for the detection of SNP TSC0043261
ttttattataat

SEQ ID NO: 343818 - DNA, 12 bp, Artificial Sequence
  Oligonucleotide primer for the detection of SNP TSC0043261
attttaatatgt

SEQ ID NO: 343819 - DNA, 12 bp, Artificial Sequence
  Oligonucleotide primer for the detection of SNP TSC0043262
ggtatatttagg

SEQ ID NO: 343820 - DNA, 12 bp, Artificial Sequence
  Oligonucleotide primer for the detection of SNP TSC0043263
tgtgttatataa

SEQ ID NO: 343821 - DNA, 12 bp, Artificial Sequence
  Oligonucleotide primer for the detection of SNP TSC0043263
cgtgttatataa

SEQ ID NO: 343822 - DNA, 12 bp, Artificial Sequence
  Oligonucleotide primer for the detection of SNP TSC0043264
attttaacactc

SEQ ID NO: 343823 - DNA, 12 bp, Artificial Sequence
  Oligonucleotide primer for the detection of SNP TSC0043264
ttttgagttatg

SEQ ID NO: 343824 - DNA, 12 bp, Artificial Sequence
  Oligonucleotide primer for the detection of SNP TSC0043265
ctaaatttccat

SEQ ID NO: 343825 - DNA, 12 bp, Artificial Sequence
  Oligonucleotide primer for the detection of SNP TSC0043265
ctaaatttccgt

SEQ ID NO: 343826 - DNA, 12 bp, Artificial Sequence
  Oligonucleotide primer for the detection of SNP TSC0043265
aagatggttatg

SEQ ID NO: 343827 - DNA, 12 bp, Artificial Sequence
  Oligonucleotide primer for the detection of SNP TSC0043265
aagacggttatg

SEQ ID NO: 343828 - DNA, 12 bp, Artificial Sequence
  Oligonucleotide primer for the detection of SNP TSC0043265
aagatggttacg

SEQ ID NO: 343829 - DNA, 12 bp, Artificial Sequence
  Oligonucleotide primer for the detection of SNP TSC0043265
aagacggttacg

SEQ ID NO: 343830 - DNA, 12 bp, Artificial Sequence
  Oligonucleotide primer for the detection of SNP TSC0043266
tctctcttatct

SEQ ID NO: 343831 - DNA, 12 bp, Artificial Sequence
  Oligonucleotide primer for the detection of SNP TSC0043266
ttttatatggtg

SEQ ID NO: 343832 - DNA, 12 bp, Artificial Sequence
  Oligonucleotide primer for the detection of SNP TSC0043266
ttttatatggcg

SEQ ID NO: 343833 - DNA, 12 bp, Artificial Sequence
  Oligonucleotide primer for the detection of SNP TSC0043267
ttactcttctaa

SEQ ID NO: 343834 - DNA, 12 bp, Artificial Sequence
  Oligonucleotide primer for the detection of SNP TSC0043267
gttttataagta

SEQ ID NO: 343835 - DNA, 12 bp, Artificial Sequence
  Oligonucleotide primer for the detection of SNP TSC0043267
acctcataaaca

SEQ ID NO: 343836 - DNA, 12 bp, Artificial Sequence
  Oligonucleotide primer for the detection of SNP TSC0043268
aggtggaaaagg

SEQ ID NO: 343837 - DNA, 12 bp, Artificial Sequence
  Oligonucleotide primer for the detection of SNP TSC0043268
aggcggaaaagg

SEQ ID NO: 343838 - DNA, 12 bp, Artificial Sequence
  Oligonucleotide primer for the detection of SNP TSC0043268
agagtaagtatt

SEQ ID NO: 343839 - DNA, 12 bp, Artificial Sequence
  Oligonucleotide primer for the detection of SNP TSC0043268
agagtaagtatc

SEQ ID NO: 343840 - DNA, 12 bp, Artificial Sequence
  Oligonucleotide primer for the detection of SNP TSC0043269
ctttactataaa

SEQ ID NO: 343841 - DNA, 12 bp, Artificial Sequence
  Oligonucleotide primer for the detection of SNP TSC0043269
actattcactct

SEQ ID NO: 343842 - DNA, 12 bp, Artificial Sequence
  Oligonucleotide primer for the detection of SNP TSC0043273
aacctctatttt

SEQ ID NO: 343843 - DNA, 12 bp, Artificial Sequence
  Oligonucleotide primer for the detection of SNP TSC0043273
gacctctatttt

SEQ ID NO: 343844 - DNA, 12 bp, Artificial Sequence
  Oligonucleotide primer for the detection of SNP TSC0043273
atttaaagaaat

SEQ ID NO: 343845 - DNA, 12 bp, Artificial Sequence
  Oligonucleotide primer for the detection of SNP TSC0043273
gtttttattttc

SEQ ID NO: 343846 - DNA, 12 bp, Artificial Sequence
  Oligonucleotide primer for the detection of SNP TSC0043274
ctaaaccttata

SEQ ID NO: 343847 - DNA, 12 bp, Artificial Sequence
  Oligonucleotide primer for the detection of SNP TSC0043274
tgaagtgggtag

SEQ ID NO: 343848 - DNA, 12 bp, Artificial Sequence
  Oligonucleotide primer for the detection of SNP TSC0043274
cgaagtgggtag

SEQ ID NO: 343849 - DNA, 12 bp, Artificial Sequence
  Oligonucleotide primer for the detection of SNP TSC0043274
gaaataaacaaa

SEQ ID NO: 343850 - DNA, 12 bp, Artificial Sequence
  Oligonucleotide primer for the detection of SNP TSC0043274
tttagattttgt

SEQ ID NO: 343851 - DNA, 12 bp, Artificial Sequence
  Oligonucleotide primer for the detection of SNP TSC0043275
gaaaatagaggt

SEQ ID NO: 343852 - DNA, 12 bp, Artificial Sequence
  Oligonucleotide primer for the detection of SNP TSC0005774
ttctttctttat

SEQ ID NO: 343853 - DNA, 12 bp, Artificial Sequence
  Oligonucleotide primer for the detection of SNP TSC0005774
tgatattgggta

SEQ ID NO: 343854 - DNA, 12 bp, Artificial Sequence
  Oligonucleotide primer for the detection of SNP TSC0005775
taactatcaata

SEQ ID NO: 343855 - DNA, 12 bp, Artificial Sequence
  Oligonucleotide primer for the detection of SNP TSC0005775
aataatagtttt

SEQ ID NO: 343856 - DNA, 12 bp, Artificial Sequence
  Oligonucleotide primer for the detection of SNP TSC0005775
aataacaatttt

SEQ ID NO: 343857 - DNA, 12 bp, Artificial Sequence
  Oligonucleotide primer for the detection of SNP TSC0005775
taattattaata

SEQ ID NO: 343858 - DNA, 12 bp, Artificial Sequence
  Oligonucleotide primer for the detection of SNP TSC0006227
aaatcaccgaaa

SEQ ID NO: 343859 - DNA, 12 bp, Artificial Sequence
  Oligonucleotide primer for the detection of SNP TSC0006227
caatccttttta

SEQ ID NO: 343860 - DNA, 12 bp, Artificial Sequence
  Oligonucleotide primer for the detection of SNP TSC0006227
taaggttattgg

SEQ ID NO: 343861 - DNA, 12 bp, Artificial Sequence
  Oligonucleotide primer for the detection of SNP TSC0006227
taaggttatcgg

SEQ ID NO: 343862 - DNA, 12 bp, Artificial Sequence
  Oligonucleotide primer for the detection of SNP TSC0010198
aaatatataata

SEQ ID NO: 343863 - DNA, 12 bp, Artificial Sequence
  Oligonukleotid-Primer
gtttgatatgtt

SEQ ID NO: 343864 - DNA, 12 bp, Artificial Sequence
  Oligonucleotide primer for the detection of SNP TSC0010198
gtttgatacgtt

SEQ ID NO: 343865 - DNA, 12 bp, Artificial Sequence
  Oligonucleotide primer for the detection of SNP TSC0010198
aatctaatacac

SEQ ID NO: 343866 - DNA, 12 bp, Artificial Sequence
  Oligonucleotide primer for the detection of SNP TSC0010198
aatctaatacgc

SEQ ID NO: 343867 - DNA, 12 bp, Artificial Sequence
  Oligonucleotide primer for the detection of SNP TSC0010198
agagtgtgtaat

SEQ ID NO: 343868 - DNA, 12 bp, Artificial Sequence
  Oligonucleotide primer for the detection of SNP TSC0043278
tttttttagatt

SEQ ID NO: 343869 - DNA, 12 bp, Artificial Sequence
  Oligonucleotide primer for the detection of SNP TSC0043278
tttttttagatc

SEQ ID NO: 343870 - DNA, 12 bp, Artificial Sequence
  Oligonucleotide primer for the detection of SNP TSC0043278
cctccctaaacc

SEQ ID NO: 343871 - DNA, 12 bp, Artificial Sequence
  Oligonucleotide primer for the detection of SNP TSC0043278
gaggtatgagtt

SEQ ID NO: 343872 - DNA, 12 bp, Artificial Sequence
  Oligonucleotide primer for the detection of SNP TSC0043279
aaatactctaaa

SEQ ID NO: 343873 - DNA, 12 bp, Artificial Sequence
  Oligonucleotide primer for the detection of SNP TSC0043279
gggtgttttgaa

SEQ ID NO: 343874 - DNA, 12 bp, Artificial Sequence
  Oligonucleotide primer for the detection of SNP TSC0043280
ttcaccaattat

SEQ ID NO: 343875 - DNA, 12 bp, Artificial Sequence
  Oligonucleotide primer for the detection of SNP TSC0043280
ttttttttgatg

SEQ ID NO: 343876 - DNA, 12 bp, Artificial Sequence
  Oligonucleotide primer for the detection of SNP TSC0043280
tctcctttaata

SEQ ID NO: 343877 - DNA, 12 bp, Artificial Sequence
  Oligonucleotide primer for the detection of SNP TSC0043281
ctctcctaaaac

SEQ ID NO: 343878 - DNA, 12 bp, Artificial Sequence
  Oligonucleotide primer for the detection of SNP TSC0043281
ccctaaacccaa

SEQ ID NO: 343879 - DNA, 12 bp, Artificial Sequence
  Oligonucleotide primer for the detection of SNP TSC0043281
tttttttgaggt

SEQ ID NO: 343880 - DNA, 12 bp, Artificial Sequence
  Oligonucleotide primer for the detection of SNP TSC0010310
ctacctacccaa

SEQ ID NO: 343881 - DNA, 12 bp, Artificial Sequence
  Oligonucleotide primer for the detection of SNP TSC0010310
agtattttatat

SEQ ID NO: 343882 - DNA, 12 bp, Artificial Sequence
  Oligonucleotide primer for the detection of SNP TSC0010310
aacacctcacat

SEQ ID NO: 343883 - DNA, 12 bp, Artificial Sequence
  Oligonucleotide primer for the detection of SNP TSC0043284
attccctccctc

SEQ ID NO: 343884 - DNA, 12 bp, Artificial Sequence
  Oligonucleotide primer for the detection of SNP TSC0043284
gttagggtagag

SEQ ID NO: 343885 - DNA, 12 bp, Artificial Sequence
  Oligonucleotide primer for the detection of SNP TSC0043285
tataataaaatt

SEQ ID NO: 343886 - DNA, 12 bp, Artificial Sequence
  Oligonucleotide primer for the detection of SNP TSC0043285
gtataataaaaa

SEQ ID NO: 343887 - DNA, 12 bp, Artificial Sequence
  Oligonucleotide primer for the detection of SNP TSC0043287
gtagaataatgt

SEQ ID NO: 343888 - DNA, 12 bp, Artificial Sequence
  Oligonucleotide primer for the detection of SNP TSC0043287
tttgaagtggag

SEQ ID NO: 343889 - DNA, 12 bp, Artificial Sequence
  Oligonucleotide primer for the detection of SNP TSC0043288
aaaatattcctc

SEQ ID NO: 343890 - DNA, 12 bp, Artificial Sequence
  Oligonucleotide primer for the detection of SNP TSC0043288
gaggtttattag

SEQ ID NO: 343891 - DNA, 12 bp, Artificial Sequence
  Oligonucleotide primer for the detection of SNP TSC0043288
ggaatgtttttt

SEQ ID NO: 343892 - DNA, 12 bp, Artificial Sequence
  Oligonucleotide primer for the detection of SNP TSC0043289
aaatccccactt

SEQ ID NO: 343893 - DNA, 12 bp, Artificial Sequence
  Oligonucleotide primer for the detection of SNP TSC0043289
gaagaaatgagg

SEQ ID NO: 343894 - DNA, 12 bp, Artificial Sequence
  Oligonucleotide primer for the detection of SNP TSC0043290
atatcttccacc

SEQ ID NO: 343895 - DNA, 12 bp, Artificial Sequence
  Oligonucleotide primer for the detection of SNP TSC0043290
gtattaaatgtg

SEQ ID NO: 343896 - DNA, 12 bp, Artificial Sequence
  Oligonucleotide primer for the detection of SNP TSC0043291
tttaataccttt

SEQ ID NO: 343897 - DNA, 12 bp, Artificial Sequence
  Oligonucleotide primer for the detection of SNP TSC0043291
tagtgataatga

SEQ ID NO: 343898 - DNA, 12 bp, Artificial Sequence
  Oligonucleotide primer for the detection of SNP TSC0043292
taccctctacct

SEQ ID NO: 343899 - DNA, 12 bp, Artificial Sequence
  Oligonucleotide primer for the detection of SNP TSC0043292
ttttttatagaa

SEQ ID NO: 343900 - DNA, 12 bp, Artificial Sequence
  Oligonucleotide primer for the detection of SNP TSC0043293
accaccccacta

SEQ ID NO: 343901 - DNA, 12 bp, Artificial Sequence
  Oligonucleotide primer for the detection of SNP TSC0043293
ttattgtataat

SEQ ID NO: 343902 - DNA, 12 bp, Artificial Sequence
  Oligonucleotide primer for the detection of SNP TSC0043293
ccactacacaat

SEQ ID NO: 343903 - DNA, 12 bp, Artificial Sequence
  Oligonucleotide primer for the detection of SNP TSC0043294
ctttcttcaatt

SEQ ID NO: 343904 - DNA, 12 bp, Artificial Sequence
  Oligonucleotide primer for the detection of SNP TSC0043294
gttttagagtag

SEQ ID NO: 343905 - DNA, 12 bp, Artificial Sequence
  Oligonucleotide primer for the detection of SNP TSC0043295
ttaataaacaca

SEQ ID NO: 343906 - DNA, 12 bp, Artificial Sequence
  Oligonucleotide primer for the detection of SNP TSC0043295
gtaatatatata

SEQ ID NO: 343907 - DNA, 12 bp, Artificial Sequence
  Oligonucleotide primer for the detection of SNP TSC0043295
acaacatacaca

SEQ ID NO: 343908 - DNA, 12 bp, Artificial Sequence
  Oligonucleotide primer for the detection of SNP TSC0043295
ttggtaaatata

SEQ ID NO: 343909 - DNA, 12 bp, Artificial Sequence
  Oligonucleotide primer for the detection of SNP TSC0008073
ataccaaacact

SEQ ID NO: 343910 - DNA, 12 bp, Artificial Sequence
  Oligonucleotide primer for the detection of SNP TSC0008073
ttgattgtttta

SEQ ID NO: 343911 - DNA, 12 bp, Artificial Sequence
  Oligonucleotide primer for the detection of SNP TSC0043296
taatctcaaact

SEQ ID NO: 343912 - DNA, 12 bp, Artificial Sequence
  Oligonucleotide primer for the detection of SNP TSC0043296
taatctcgaact

SEQ ID NO: 343913 - DNA, 12 bp, Artificial Sequence
  Oligonucleotide primer for the detection of SNP TSC0043297
aaactacataaa

SEQ ID NO: 343914 - DNA, 12 bp, Artificial Sequence
  Oligonucleotide primer for the detection of SNP TSC0043297
aaactacgtaaa

SEQ ID NO: 343915 - DNA, 12 bp, Artificial Sequence
  Oligonucleotide primer for the detection of SNP TSC0043297
ttggtagtgata

SEQ ID NO: 343916 - DNA, 12 bp, Artificial Sequence
  Oligonucleotide primer for the detection of SNP TSC0043297
tcggtagtgata

SEQ ID NO: 343917 - DNA, 12 bp, Artificial Sequence
  Oligonucleotide primer for the detection of SNP TSC0043297
gacaataacaaa

SEQ ID NO: 343918 - DNA, 12 bp, Artificial Sequence
  Oligonucleotide primer for the detection of SNP TSC0043297
gagttgtgtgag

SEQ ID NO: 343919 - DNA, 12 bp, Artificial Sequence
  Oligonucleotide primer for the detection of SNP TSC0043297
gagttgcgtgag

SEQ ID NO: 343920 - DNA, 12 bp, Artificial Sequence
  Oligonucleotide primer for the detection of SNP TSC0043298
tttatggtagta

SEQ ID NO: 343921 - DNA, 12 bp, Artificial Sequence
  Oligonucleotide primer for the detection of SNP TSC0043299
tcaccccccaaa

SEQ ID NO: 343922 - DNA, 12 bp, Artificial Sequence
  Oligonucleotide primer for the detection of SNP TSC0043299
ggattttaatat

SEQ ID NO: 343923 - DNA, 12 bp, Artificial Sequence
  Oligonucleotide primer for the detection of SNP TSC0043299
aaacttcaacat

SEQ ID NO: 343924 - DNA, 12 bp, Artificial Sequence
  Oligonucleotide primer for the detection of SNP TSC0008453
cctaattcccaa

SEQ ID NO: 343925 - DNA, 12 bp, Artificial Sequence
  Oligonucleotide primer for the detection of SNP TSC0008453
tttatatatgtt

SEQ ID NO: 343926 - DNA, 12 bp, Artificial Sequence
  Oligonucleotide primer for the detection of SNP TSC0008453
ttcacatatatt

SEQ ID NO: 343927 - DNA, 12 bp, Artificial Sequence
  Oligonucleotide primer for the detection of SNP TSC0005420
cacccaacccct

SEQ ID NO: 343928 - DNA, 12 bp, Artificial Sequence
  Oligonucleotide primer for the detection of SNP TSC0005420
cacccgacccct

SEQ ID NO: 343929 - DNA, 12 bp, Artificial Sequence
  Oligonucleotide primer for the detection of SNP TSC0005420
cgcccaacccct

SEQ ID NO: 343930 - DNA, 12 bp, Artificial Sequence
  Oligonucleotide primer for the detection of SNP TSC0005420
cgcccgacccct

SEQ ID NO: 343931 - DNA, 12 bp, Artificial Sequence
  Oligonucleotide primer for the detection of SNP TSC0005420
cgtttggttttt

SEQ ID NO: 343932 - DNA, 12 bp, Artificial Sequence
  Oligonucleotide primer for the detection of SNP TSC0005420
tgttcggttttt

SEQ ID NO: 343933 - DNA, 12 bp, Artificial Sequence
  Oligonucleotide primer for the detection of SNP TSC0005420
cgttcggttttt

SEQ ID NO: 343934 - DNA, 12 bp, Artificial Sequence
  Oligonucleotide primer for the detection of SNP TSC0043302
aaatctttcaaa

SEQ ID NO: 343935 - DNA, 12 bp, Artificial Sequence
  Oligonucleotide primer for the detection of SNP TSC0010818
ctaccttcaaat

SEQ ID NO: 343936 - DNA, 12 bp, Artificial Sequence
  Oligonucleotide primer for the detection of SNP TSC0010818
atttggatttaa

SEQ ID NO: 343937 - DNA, 12 bp, Artificial Sequence
  Oligonucleotide primer for the detection of SNP TSC0010818
atttaaattcaa

SEQ ID NO: 343938 - DNA, 12 bp, Artificial Sequence
  Oligonucleotide primer for the detection of SNP TSC0043303
ctaaaaatatta

SEQ ID NO: 343939 - DNA, 12 bp, Artificial Sequence
  Oligonucleotide primer for the detection of SNP TSC0043303
aatattgtgttt

SEQ ID NO: 343940 - DNA, 12 bp, Artificial Sequence
  Oligonucleotide primer for the detection of SNP TSC0043303
aaaaacattata

SEQ ID NO: 343941 - DNA, 12 bp, Artificial Sequence
  Oligonucleotide primer for the detection of SNP TSC0043303
tttagaagtatt

SEQ ID NO: 343942 - DNA, 12 bp, Artificial Sequence
  Oligonucleotide primer for the detection of SNP TSC0043304
ctttataaaaca

SEQ ID NO: 343943 - DNA, 12 bp, Artificial Sequence
  Oligonucleotide primer for the detection of SNP TSC0043304
attagatggagt

SEQ ID NO: 343944 - DNA, 12 bp, Artificial Sequence
  Oligonucleotide primer for the detection of SNP TSC0043304
ttttataaaata

SEQ ID NO: 343945 - DNA, 12 bp, Artificial Sequence
  Oligonucleotide primer for the detection of SNP TSC0043305
aattaatcttct

SEQ ID NO: 343946 - DNA, 12 bp, Artificial Sequence
  Oligonucleotide primer for the detection of SNP TSC0043305
ttgtggaatatt

SEQ ID NO: 343947 - DNA, 12 bp, Artificial Sequence
  Oligonucleotide primer for the detection of SNP TSC0043305
aattggtttttt

SEQ ID NO: 343948 - DNA, 12 bp, Artificial Sequence
  Oligonucleotide primer for the detection of SNP TSC0043306
cctacactctca

SEQ ID NO: 343949 - DNA, 12 bp, Artificial Sequence
  Oligonucleotide primer for the detection of SNP TSC0043306
gagagagagagc

SEQ ID NO: 343950 - DNA, 12 bp, Artificial Sequence
  Oligonucleotide primer for the detection of SNP TSC0043307
caaaaacaaacc

SEQ ID NO: 343951 - DNA, 12 bp, Artificial Sequence
  Oligonucleotide primer for the detection of SNP TSC0043307
tgtgaattattg

SEQ ID NO: 343952 - DNA, 12 bp, Artificial Sequence
  Oligonucleotide primer for the detection of SNP TSC0043307
tataaattatta

SEQ ID NO: 343953 - DNA, 12 bp, Artificial Sequence
  Oligonucleotide primer for the detection of SNP TSC0043307
tagaagtagatt

SEQ ID NO: 343954 - DNA, 12 bp, Artificial Sequence
  Oligonucleotide primer for the detection of SNP TSC0043308
tcaactaaattc

SEQ ID NO: 343955 - DNA, 12 bp, Artificial Sequence
  Oligonucleotide primer for the detection of SNP TSC0043308
atctacttctaa

SEQ ID NO: 343956 - DNA, 12 bp, Artificial Sequence
  Oligonucleotide primer for the detection of SNP TSC0043308
tagttgggtttt

SEQ ID NO: 343957 - DNA, 12 bp, Artificial Sequence
  Oligonucleotide primer for the detection of SNP TSC0043309
ttattatgaata

SEQ ID NO: 343958 - DNA, 12 bp, Artificial Sequence
  Oligonucleotide primer for the detection of SNP TSC0043310
aatcaattaaac

SEQ ID NO: 343959 - DNA, 12 bp, Artificial Sequence
  Oligonucleotide primer for the detection of SNP TSC0043310
atatgggaaaga

SEQ ID NO: 343960 - DNA, 12 bp, Artificial Sequence
  Oligonucleotide primer for the detection of SNP TSC0043311
tacctactacca

SEQ ID NO: 343961 - DNA, 12 bp, Artificial Sequence
  Oligonucleotide primer for the detection of SNP TSC0043311
atcacatcttat

SEQ ID NO: 343962 - DNA, 12 bp, Artificial Sequence
  Oligonucleotide primer for the detection of SNP TSC0043311
tgtttgttgtta

SEQ ID NO: 343963 - DNA, 12 bp, Artificial Sequence
  Oligonucleotide primer for the detection of SNP TSC0043312
acctaaaactca

SEQ ID NO: 343964 - DNA, 12 bp, Artificial Sequence
  Oligonucleotide primer for the detection of SNP TSC0043312
acctaaaactcg

SEQ ID NO: 343965 - DNA, 12 bp, Artificial Sequence
  Oligonucleotide primer for the detection of SNP TSC0043312
ttttgaaagtgt

SEQ ID NO: 343966 - DNA, 12 bp, Artificial Sequence
  Oligonucleotide primer for the detection of SNP TSC0043312
tttgggatttgt

SEQ ID NO: 343967 - DNA, 12 bp, Artificial Sequence
  Oligonucleotide primer for the detection of SNP TSC0043312
tttgggattcgt

SEQ ID NO: 343968 - DNA, 12 bp, Artificial Sequence
  Oligonukleotid-Primer
gaagattaagtt

SEQ ID NO: 343969 - DNA, 12 bp, Artificial Sequence
  Oligonucleotide primer for the detection of SNP TSC0043314
cttcattatttt

SEQ ID NO: 343970 - DNA, 12 bp, Artificial Sequence
  Oligonucleotide primer for the detection of SNP TSC0043314
gattgggatata

SEQ ID NO: 343971 - DNA, 12 bp, Artificial Sequence
  Oligonucleotide primer for the detection of SNP TSC0043315
aaatactaattt

SEQ ID NO: 343972 - DNA, 12 bp, Artificial Sequence
  Oligonukleotid-Primer
tgttgataaatt

SEQ ID NO: 343973 - DNA, 12 bp, Artificial Sequence
  Oligonucleotide primer for the detection of SNP TSC0043315
tattaacaaatc

SEQ ID NO: 343974 - DNA, 12 bp, Artificial Sequence
  Oligonucleotide primer for the detection of SNP TSC0008517
aaacaaactatc

SEQ ID NO: 343975 - DNA, 12 bp, Artificial Sequence
  Oligonucleotide primer for the detection of SNP TSC0008517
ttggataatata

SEQ ID NO: 343976 - DNA, 12 bp, Artificial Sequence
  Oligonukleotid-Primer
tatttcttatat

SEQ ID NO: 343977 - DNA, 12 bp, Artificial Sequence
  Oligonucleotide primer for the detection of SNP TSC0043316
tgataagtgata

SEQ ID NO: 343978 - DNA, 12 bp, Artificial Sequence
  Oligonucleotide primer for the detection of SNP TSC0043317
taaaactttaac

SEQ ID NO: 343979 - DNA, 12 bp, Artificial Sequence
  Oligonucleotide primer for the detection of SNP TSC0043318
caataactttta

SEQ ID NO: 343980 - DNA, 12 bp, Artificial Sequence
  Oligonukleotid-Primer
cgataactttta

SEQ ID NO: 343981 - DNA, 12 bp, Artificial Sequence
  Oligonucleotide primer for the detection of SNP TSC0043318
tgggaatttatt

SEQ ID NO: 343982 - DNA, 12 bp, Artificial Sequence
  Oligonucleotide primer for the detection of SNP TSC0043318
aaaattcattaa

SEQ ID NO: 343983 - DNA, 12 bp, Artificial Sequence
  Oligonucleotide primer for the detection of SNP TSC0043318
tggtgattttta

SEQ ID NO: 343984 - DNA, 12 bp, Artificial Sequence
  Oligonucleotide primer for the detection of SNP TSC0043318
cggtgattttta

SEQ ID NO: 343985 - DNA, 12 bp, Artificial Sequence
  Oligonucleotide primer for the detection of SNP TSC0043319
taacccctcaac

SEQ ID NO: 343986 - DNA, 12 bp, Artificial Sequence
  Oligonucleotide primer for the detection of SNP TSC0043319
tgggattggtta

SEQ ID NO: 343987 - DNA, 12 bp, Artificial Sequence
  Oligonucleotide primer for the detection of SNP TSC0043320
caataaaaacca

SEQ ID NO: 343988 - DNA, 12 bp, Artificial Sequence
  Oligonucleotide primer for the detection of SNP TSC0043320
tagagtataaat

SEQ ID NO: 343989 - DNA, 12 bp, Artificial Sequence
  Oligonucleotide primer for the detection of SNP TSC0043320
atagtaaaggtt

SEQ ID NO: 343990 - DNA, 12 bp, Artificial Sequence
  Oligonucleotide primer for the detection of SNP TSC0043321
aactctatattt

SEQ ID NO: 343991 - DNA, 12 bp, Artificial Sequence
  Oligonucleotide primer for the detection of SNP TSC0043321
tgttattataag

SEQ ID NO: 343992 - DNA, 12 bp, Artificial Sequence
  Oligonucleotide primer for the detection of SNP TSC0043322
ctaataaatatc

SEQ ID NO: 343993 - DNA, 12 bp, Artificial Sequence
  Oligonucleotide primer for the detection of SNP TSC0043322
tgataaatattt

SEQ ID NO: 343994 - DNA, 12 bp, Artificial Sequence
  Oligonucleotide primer for the detection of SNP TSC0043324
acctcaaataat

SEQ ID NO: 343995 - DNA, 12 bp, Artificial Sequence
  Oligonucleotide primer for the detection of SNP TSC0043324
ttgaggagggta

SEQ ID NO: 343996 - DNA, 12 bp, Artificial Sequence
  Oligonucleotide primer for the detection of SNP TSC0043326
ctaccctctcat

SEQ ID NO: 343997 - DNA, 12 bp, Artificial Sequence
  Oligonucleotide primer for the detection of SNP TSC0043326
aaatgggtagga

SEQ ID NO: 343998 - DNA, 12 bp, Artificial Sequence
  Oligonucleotide primer for the detection of SNP TSC0043327
actaaataaccc

SEQ ID NO: 343999 - DNA, 12 bp, Artificial Sequence
  Oligonucleotide primer for the detection of SNP TSC0043327
tttaaaaataga

SEQ ID NO: 344000 - DNA, 12 bp, Artificial Sequence
  Oligonucleotide primer for the detection of SNP TSC0043328
cctacatattca

SEQ ID NO: 344001 - DNA, 12 bp, Artificial Sequence
  Oligonucleotide primer for the detection of SNP TSC0043328
atataggaagat

SEQ ID NO: 344002 - DNA, 12 bp, Artificial Sequence
  Oligonucleotide primer for the detection of SNP TSC0043328
ttttgtatgttt

SEQ ID NO: 344003 - DNA, 12 bp, Artificial Sequence
  Oligonucleotide primer for the detection of SNP TSC0043329
aacctatttaaa

SEQ ID NO: 344004 - DNA, 12 bp, Artificial Sequence
  Oligonucleotide primer for the detection of SNP TSC0043329
taataaaataag

SEQ ID NO: 344005 - DNA, 12 bp, Artificial Sequence
  Oligonucleotide primer for the detection of SNP TSC0043329
agtttatttgga

SEQ ID NO: 344006 - DNA, 12 bp, Artificial Sequence
  Oligonucleotide primer for the detection of SNP TSC0043331
attttgtgttat

SEQ ID NO: 344007 - DNA, 12 bp, Artificial Sequence
  Oligonucleotide primer for the detection of SNP TSC0043331
actctatatcat

SEQ ID NO: 344008 - DNA, 12 bp, Artificial Sequence
  Oligonucleotide primer for the detection of SNP TSC0043331
aaagtgtaagga

SEQ ID NO: 344009 - DNA, 12 bp, Artificial Sequence
  Oligonucleotide primer for the detection of SNP TSC0043332
taatacttttat

SEQ ID NO: 344010 - DNA, 12 bp, Artificial Sequence
  Oligonucleotide primer for the detection of SNP TSC0043332
aatagagaatta

SEQ ID NO: 344011 - DNA, 12 bp, Artificial Sequence
  Oligonucleotide primer for the detection of SNP TSC0043332
tgatatttttat

SEQ ID NO: 344012 - DNA, 12 bp, Artificial Sequence
  Oligonucleotide primer for the detection of SNP TSC0043333
aaaccctaaccc

SEQ ID NO: 344013 - DNA, 12 bp, Artificial Sequence
  Oligonucleotide primer for the detection of SNP TSC0043333
aggagtttgata

SEQ ID NO: 344014 - DNA, 12 bp, Artificial Sequence
  Oligonucleotide primer for the detection of SNP TSC0043333
aagttttggttt

SEQ ID NO: 344015 - DNA, 12 bp, Artificial Sequence
  Oligonucleotide primer for the detection of SNP TSC0043334
tcaaataccaaa

SEQ ID NO: 344016 - DNA, 12 bp, Artificial Sequence
  Oligonucleotide primer for the detection of SNP TSC0043334
gggttagggttt

SEQ ID NO: 344017 - DNA, 12 bp, Artificial Sequence
  Oligonucleotide primer for the detection of SNP TSC0043334
aaccaaaactta

SEQ ID NO: 344018 - DNA, 12 bp, Artificial Sequence
  Oligonucleotide primer for the detection of SNP TSC0043334
ttaggtattaag

SEQ ID NO: 344019 - DNA, 12 bp, Artificial Sequence
  Oligonucleotide primer for the detection of SNP TSC0006588
ctctaaatcctt

SEQ ID NO: 344020 - DNA, 12 bp, Artificial Sequence
  Oligonucleotide primer for the detection of SNP TSC0006588
ctctaaatccaa

SEQ ID NO: 344021 - DNA, 12 bp, Artificial Sequence
  Oligonucleotide primer for the detection of SNP TSC0043335
caaaaacaacct

SEQ ID NO: 344022 - DNA, 12 bp, Artificial Sequence
  Oligonucleotide primer for the detection of SNP TSC0043335
cgaaaacaacct

SEQ ID NO: 344023 - DNA, 12 bp, Artificial Sequence
  Oligonucleotide primer for the detection of SNP TSC0043335
agaaatatagtg

SEQ ID NO: 344024 - DNA, 12 bp, Artificial Sequence
  Oligonucleotide primer for the detection of SNP TSC0043335
agaaatatagcg

SEQ ID NO: 344025 - DNA, 12 bp, Artificial Sequence
  Oligonucleotide primer for the detection of SNP TSC0043336
aaacaatcatcc

SEQ ID NO: 344026 - DNA, 12 bp, Artificial Sequence
  Oligonucleotide primer for the detection of SNP TSC0043336
gaaaagttgtag

SEQ ID NO: 344027 - DNA, 12 bp, Artificial Sequence
  Oligonucleotide primer for the detection of SNP TSC0043340
agaatgaaatag

SEQ ID NO: 344028 - DNA, 12 bp, Artificial Sequence
  Oligonucleotide primer for the detection of SNP TSC0043340
atttgagatttt

SEQ ID NO: 344029 - DNA, 12 bp, Artificial Sequence
  Oligonucleotide primer for the detection of SNP TSC0043341
ccaaaatcattt

SEQ ID NO: 344030 - DNA, 12 bp, Artificial Sequence
  Oligonucleotide primer for the detection of SNP TSC0043343
aaaaaatcttta

SEQ ID NO: 344031 - DNA, 12 bp, Artificial Sequence
  Oligonucleotide primer for the detection of SNP TSC0043343
ggttttaatggg

SEQ ID NO: 344032 - DNA, 12 bp, Artificial Sequence
  Oligonucleotide primer for the detection of SNP TSC0043344
tcttcttaaaat

SEQ ID NO: 344033 - DNA, 12 bp, Artificial Sequence
  Oligonucleotide primer for the detection of SNP TSC0043344
aatagttgaaat

SEQ ID NO: 344034 - DNA, 12 bp, Artificial Sequence
  Oligonucleotide primer for the detection of SNP TSC0043345
atataatttaac

SEQ ID NO: 344035 - DNA, 12 bp, Artificial Sequence
  Oligonucleotide primer for the detection of SNP TSC0043345
ttgtatggagat

SEQ ID NO: 344036 - DNA, 12 bp, Artificial Sequence
  Oligonucleotide primer for the detection of SNP TSC0043345
tacataaaaaca

SEQ ID NO: 344037 - DNA, 12 bp, Artificial Sequence
  Oligonucleotide primer for the detection of SNP TSC0043345
tatggtttggtt

SEQ ID NO: 344038 - DNA, 12 bp, Artificial Sequence
  Oligonucleotide primer for the detection of SNP TSC0043346
tttccaataaat

SEQ ID NO: 344039 - DNA, 12 bp, Artificial Sequence
  Oligonucleotide primer for the detection of SNP TSC0043346
attttggaggtg

SEQ ID NO: 344040 - DNA, 12 bp, Artificial Sequence
  Oligonucleotide primer for the detection of SNP TSC0043353
cacacctccaca

SEQ ID NO: 344041 - DNA, 12 bp, Artificial Sequence
  Oligonucleotide primer for the detection of SNP TSC0043353
cacacctccacg

SEQ ID NO: 344042 - DNA, 12 bp, Artificial Sequence
  Oligonucleotide primer for the detection of SNP TSC0043353
cacacctccgca

SEQ ID NO: 344043 - DNA, 12 bp, Artificial Sequence
  Oligonucleotide primer for the detection of SNP TSC0043353
cacacctccgcg

SEQ ID NO: 344044 - DNA, 12 bp, Artificial Sequence
  Oligonucleotide primer for the detection of SNP TSC0043353
ttttgttataga

SEQ ID NO: 344045 - DNA, 12 bp, Artificial Sequence
  Oligonucleotide primer for the detection of SNP TSC0043353
tcttattacaaa

SEQ ID NO: 344046 - DNA, 12 bp, Artificial Sequence
  Oligonucleotide primer for the detection of SNP TSC0043353
tatattttcgtg

SEQ ID NO: 344047 - DNA, 12 bp, Artificial Sequence
  Oligonucleotide primer for the detection of SNP TSC0043353
tatatttttgcg

SEQ ID NO: 344048 - DNA, 12 bp, Artificial Sequence
  Oligonucleotide primer for the detection of SNP TSC0043353
tatattttcgcg

SEQ ID NO: 344049 - DNA, 12 bp, Artificial Sequence
  Oligonucleotide primer for the detection of SNP TSC0043354
aaccccacacac

SEQ ID NO: 344050 - DNA, 12 bp, Artificial Sequence
  Oligonucleotide primer for the detection of SNP TSC0043354
aaccccgcacac

SEQ ID NO: 344051 - DNA, 12 bp, Artificial Sequence
  Oligonucleotide primer for the detection of SNP TSC0043354
atagattgtgga

SEQ ID NO: 344052 - DNA, 12 bp, Artificial Sequence
  Oligonucleotide primer for the detection of SNP TSC0043354
atagatcgtgga

SEQ ID NO: 344053 - DNA, 12 bp, Artificial Sequence
  Oligonucleotide primer for the detection of SNP TSC0043354
atagattgcgga

SEQ ID NO: 344054 - DNA, 12 bp, Artificial Sequence
  Oligonucleotide primer for the detection of SNP TSC0043354
atagatcgcgga

SEQ ID NO: 344055 - DNA, 12 bp, Artificial Sequence
  Oligonucleotide primer for the detection of SNP TSC0043357
aatatcgtgttt

SEQ ID NO: 344056 - DNA, 12 bp, Artificial Sequence
  Oligonucleotide primer for the detection of SNP TSC0043357
aaacatcatacc

SEQ ID NO: 344057 - DNA, 12 bp, Artificial Sequence
  Oligonucleotide primer for the detection of SNP TSC0043357
aaacatcgtacc

SEQ ID NO: 344058 - DNA, 12 bp, Artificial Sequence
  Oligonucleotide primer for the detection of SNP TSC0043357
aaagatttgagt

SEQ ID NO: 344059 - DNA, 12 bp, Artificial Sequence
  Oligonucleotide primer for the detection of SNP TSC0043357
aaagatttgagc

SEQ ID NO: 344060 - DNA, 12 bp, Artificial Sequence
  Oligonucleotide primer for the detection of SNP TSC0043358
aatcacaaactc

SEQ ID NO: 344061 - DNA, 12 bp, Artificial Sequence
  Oligonucleotide primer for the detection of SNP TSC0043358
cttttaaactca

SEQ ID NO: 344062 - DNA, 12 bp, Artificial Sequence
  Oligonucleotide primer for the detection of SNP TSC0043358
agttataaattt

SEQ ID NO: 344063 - DNA, 12 bp, Artificial Sequence
  Oligonucleotide primer for the detection of SNP TSC0043359
tcctaactccaa

SEQ ID NO: 344064 - DNA, 12 bp, Artificial Sequence
  Oligonucleotide primer for the detection of SNP TSC0043359
gttagatttata

SEQ ID NO: 344065 - DNA, 12 bp, Artificial Sequence
  Oligonucleotide primer for the detection of SNP TSC0043359
attaaacttata

SEQ ID NO: 344066 - DNA, 12 bp, Artificial Sequence
  Oligonucleotide primer for the detection of SNP TSC0043359
ttttgattttaa

SEQ ID NO: 344067 - DNA, 12 bp, Artificial Sequence
  Oligonucleotide primer for the detection of SNP TSC0043360
caaaaacaaact

SEQ ID NO: 344068 - DNA, 12 bp, Artificial Sequence
  Oligonucleotide primer for the detection of SNP TSC0043361
cttaaatttaaa

SEQ ID NO: 344069 - DNA, 12 bp, Artificial Sequence
  Oligonucleotide primer for the detection of SNP TSC0043361
tatatattaagg

SEQ ID NO: 344070 - DNA, 12 bp, Artificial Sequence
  Oligonucleotide primer for the detection of SNP TSC0043363
ctaccataacta

SEQ ID NO: 344071 - DNA, 12 bp, Artificial Sequence
  Oligonucleotide primer for the detection of SNP TSC0043363
gataaaaaatta

SEQ ID NO: 344072 - DNA, 12 bp, Artificial Sequence
  Oligonucleotide primer for the detection of SNP TSC0043363
ttattatgattg

SEQ ID NO: 344073 - DNA, 12 bp, Artificial Sequence
  Oligonucleotide primer for the detection of SNP TSC0043364
taatcctacctt

SEQ ID NO: 344074 - DNA, 12 bp, Artificial Sequence
  Oligonucleotide primer for the detection of SNP TSC0043364
gttatgtagtag

SEQ ID NO: 344075 - DNA, 12 bp, Artificial Sequence
  Oligonucleotide primer for the detection of SNP TSC0043364
gttacgtagtag

SEQ ID NO: 344076 - DNA, 12 bp, Artificial Sequence
  Oligonucleotide primer for the detection of SNP TSC0043365
tacactccaaac

SEQ ID NO: 344077 - DNA, 12 bp, Artificial Sequence
  Oligonucleotide primer for the detection of SNP TSC0043367
caacaactattc

SEQ ID NO: 344078 - DNA, 12 bp, Artificial Sequence
  Oligonucleotide primer for the detection of SNP TSC0043367
attgtaatttag

SEQ ID NO: 344079 - DNA, 12 bp, Artificial Sequence
  Oligonucleotide primer for the detection of SNP TSC0043368
gtttaatgtata

SEQ ID NO: 344080 - DNA, 12 bp, Artificial Sequence
  Oligonucleotide primer for the detection of SNP TSC0043368
attaaagtttat

SEQ ID NO: 344081 - DNA, 12 bp, Artificial Sequence
  Oligonucleotide primer for the detection of SNP TSC0043369
acccatttttaa

SEQ ID NO: 344082 - DNA, 12 bp, Artificial Sequence
  Oligonucleotide primer for the detection of SNP TSC0043369
aataataatcta

SEQ ID NO: 344083 - DNA, 12 bp, Artificial Sequence
  Oligonucleotide primer for the detection of SNP TSC0043370
tatcttctttta

SEQ ID NO: 344084 - DNA, 12 bp, Artificial Sequence
  Oligonucleotide primer for the detection of SNP TSC0043370
ggtttgattagg

SEQ ID NO: 344085 - DNA, 12 bp, Artificial Sequence
  Oligonucleotide primer for the detection of SNP TSC0043370
aatctaactaaa

SEQ ID NO: 344086 - DNA, 12 bp, Artificial Sequence
  Oligonucleotide primer for the detection of SNP TSC0008064
acacatttaaat

SEQ ID NO: 344087 - DNA, 12 bp, Artificial Sequence
  Oligonucleotide primer for the detection of SNP TSC0008065
aataatatttta

SEQ ID NO: 344088 - DNA, 12 bp, Artificial Sequence
  Oligonucleotide primer for the detection of SNP TSC0008065
tataattgtatt

SEQ ID NO: 344089 - DNA, 12 bp, Artificial Sequence
  Oligonucleotide primer for the detection of SNP TSC0008065
tacaattatacc

SEQ ID NO: 344090 - DNA, 12 bp, Artificial Sequence
  Oligonucleotide primer for the detection of SNP TSC0008065
gaataatatttt

SEQ ID NO: 344091 - DNA, 12 bp, Artificial Sequence
  Oligonucleotide primer for the detection of SNP TSC0006205
ttctccttataa

SEQ ID NO: 344092 - DNA, 12 bp, Artificial Sequence
  Oligonucleotide primer for the detection of SNP TSC0006205
ttttgaaagttt

SEQ ID NO: 344093 - DNA, 12 bp, Artificial Sequence
  Oligonukleotid-Primer
ctttaaaaattt

SEQ ID NO: 344094 - DNA, 12 bp, Artificial Sequence
  Oligonucleotide primer for the detection of SNP TSC0043374
taaccctttcct

SEQ ID NO: 344095 - DNA, 12 bp, Artificial Sequence
  Oligonucleotide primer for the detection of SNP TSC0043374
ttttttgttgag

SEQ ID NO: 344096 - DNA, 12 bp, Artificial Sequence
  Oligonucleotide primer for the detection of SNP TSC0043375
attagtagttag

SEQ ID NO: 344097 - DNA, 12 bp, Artificial Sequence
  Oligonucleotide primer for the detection of SNP TSC0043379
ctaaactcctct

SEQ ID NO: 344098 - DNA, 12 bp, Artificial Sequence
  Oligonucleotide primer for the detection of SNP TSC0043379
ggtatatattta

SEQ ID NO: 344099 - DNA, 12 bp, Artificial Sequence
  Oligonucleotide primer for the detection of SNP TSC0043380
tattatttaatt

SEQ ID NO: 344100 - DNA, 12 bp, Artificial Sequence
  Oligonucleotide primer for the detection of SNP TSC0043380
tcaccacttaac

SEQ ID NO: 344101 - DNA, 12 bp, Artificial Sequence
  Oligonukleotid-Primer
aggaagggtggt

SEQ ID NO: 344102 - DNA, 12 bp, Artificial Sequence
  Oligonucleotide primer for the detection of SNP TSC0043381
taaataacctac

SEQ ID NO: 344103 - DNA, 12 bp, Artificial Sequence
  Oligonucleotide primer for the detection of SNP TSC0043381
attttacactca

SEQ ID NO: 344104 - DNA, 12 bp, Artificial Sequence
  Oligonucleotide primer for the detection of SNP TSC0043381
tagatggtttgt

SEQ ID NO: 344105 - DNA, 12 bp, Artificial Sequence
  Oligonukleotid-Primer
atatttaggtga

SEQ ID NO: 344106 - DNA, 12 bp, Artificial Sequence
  Oligonucleotide primer for the detection of SNP TSC0043385
ataaaacaccat

SEQ ID NO: 344107 - DNA, 12 bp, Artificial Sequence
  Oligonucleotide primer for the detection of SNP TSC0043386
taattaaacctt

SEQ ID NO: 344108 - DNA, 12 bp, Artificial Sequence
  Oligonucleotide primer for the detection of SNP TSC0043386
gttgaatgaaaa

SEQ ID NO: 344109 - DNA, 12 bp, Artificial Sequence
  Oligonukleotid-Primer
taattaaatttt

SEQ ID NO: 344110 - DNA, 12 bp, Artificial Sequence
  Oligonucleotide primer for the detection of SNP TSC0043387
attaaatttttc

SEQ ID NO: 344111 - DNA, 12 bp, Artificial Sequence
  Oligonucleotide primer for the detection of SNP TSC0043388
actacactacaa

SEQ ID NO: 344112 - DNA, 12 bp, Artificial Sequence
  Oligonucleotide primer for the detection of SNP TSC0043388
tgttttgtggtt

SEQ ID NO: 344113 - DNA, 12 bp, Artificial Sequence
  Oligonukleotid-Primer
cgttttgtggtt

SEQ ID NO: 344114 - DNA, 12 bp, Artificial Sequence
  Oligonucleotide primer for the detection of SNP TSC0043388
cactctataacc

SEQ ID NO: 344115 - DNA, 12 bp, Artificial Sequence
  Oligonucleotide primer for the detection of SNP TSC0043388
cgctctataacc

SEQ ID NO: 344116 - DNA, 12 bp, Artificial Sequence
  Oligonucleotide primer for the detection of SNP TSC0043388
attgtattgtag

SEQ ID NO: 344117 - DNA, 12 bp, Artificial Sequence
  Oligonukleotid-Primer
ttttagggtgtt

SEQ ID NO: 344118 - DNA, 12 bp, Artificial Sequence
  Oligonucleotide primer for the detection of SNP TSC0043390
tcctaaaatatt

SEQ ID NO: 344119 - DNA, 12 bp, Artificial Sequence
  Oligonucleotide primer for the detection of SNP TSC0043390
ttttagaagaga

SEQ ID NO: 344120 - DNA, 12 bp, Artificial Sequence
  Oligonucleotide primer for the detection of SNP TSC0043393
tgtatatgtttg

SEQ ID NO: 344121 - DNA, 12 bp, Artificial Sequence
  Oligonukleotid-Primer
cgtatatgtttg

SEQ ID NO: 344122 - DNA, 12 bp, Artificial Sequence
  Oligonucleotide primer for the detection of SNP TSC0043394
gatttattgtaa

SEQ ID NO: 344123 - DNA, 12 bp, Artificial Sequence
  Oligonucleotide primer for the detection of SNP TSC0043395
tgatgaaatttt

SEQ ID NO: 344124 - DNA, 12 bp, Artificial Sequence
  Oligonucleotide primer for the detection of SNP TSC0043397
aatcacttatct

SEQ ID NO: 344125 - DNA, 12 bp, Artificial Sequence
  Oligonucleotide primer for the detection of SNP TSC0043397
agtaaattttaa

SEQ ID NO: 344126 - DNA, 12 bp, Artificial Sequence
  Oligonucleotide primer for the detection of SNP TSC0007543
ttgttttaggtt

SEQ ID NO: 344127 - DNA, 12 bp, Artificial Sequence
  Oligonucleotide primer for the detection of SNP TSC0043400
ccaaatctcatc

SEQ ID NO: 344128 - DNA, 12 bp, Artificial Sequence
  Oligonucleotide primer for the detection of SNP TSC0043400
gattataattta

SEQ ID NO: 344129 - DNA, 12 bp, Artificial Sequence
  Oligonucleotide primer for the detection of SNP TSC0008461
tgggttatttgg

SEQ ID NO: 344130 - DNA, 12 bp, Artificial Sequence
  Oligonucleotide primer for the detection of SNP TSC0008461
aaactacttaaa

SEQ ID NO: 344131 - DNA, 12 bp, Artificial Sequence
  Oligonucleotide primer for the detection of SNP TSC0008461
ttgaatgagaat

SEQ ID NO: 344132 - DNA, 12 bp, Artificial Sequence
  Oligonucleotide primer for the detection of SNP TSC0043401
tttttattttct

SEQ ID NO: 344133 - DNA, 12 bp, Artificial Sequence
  Oligonucleotide primer for the detection of SNP TSC0043401
gttagggtttaa

SEQ ID NO: 344134 - DNA, 12 bp, Artificial Sequence
  Oligonucleotide primer for the detection of SNP TSC0043402
cacttcaaacat

SEQ ID NO: 344135 - DNA, 12 bp, Artificial Sequence
  Oligonucleotide primer for the detection of SNP TSC0043402
tttattttagaa

SEQ ID NO: 344136 - DNA, 12 bp, Artificial Sequence
  Oligonucleotide primer for the detection of SNP TSC0043404
ggttttggttgt

SEQ ID NO: 344137 - DNA, 12 bp, Artificial Sequence
  Oligonucleotide primer for the detection of SNP TSC0043404
aatcctaactac

SEQ ID NO: 344138 - DNA, 12 bp, Artificial Sequence
  Oligonucleotide primer for the detection of SNP TSC0043404
tagaataattag

SEQ ID NO: 344139 - DNA, 12 bp, Artificial Sequence
  Oligonucleotide primer for the detection of SNP TSC0043406
aaaatcaacata

SEQ ID NO: 344140 - DNA, 12 bp, Artificial Sequence
  Oligonucleotide primer for the detection of SNP TSC0043406
taattaattttt

SEQ ID NO: 344141 - DNA, 12 bp, Artificial Sequence
  Oligonukleotid-Primer
aaatataactaa

SEQ ID NO: 344142 - DNA, 12 bp, Artificial Sequence
  Oligonucleotide primer for the detection of SNP TSC0043406
aaaattaatatg

SEQ ID NO: 344143 - DNA, 12 bp, Artificial Sequence
  Oligonucleotide primer for the detection of SNP TSC0006614
ttgtataatata

SEQ ID NO: 344144 - DNA, 12 bp, Artificial Sequence
  Oligonucleotide primer for the detection of SNP TSC0006614
ttatacaatata

SEQ ID NO: 344145 - DNA, 12 bp, Artificial Sequence
  Oligonucleotide primer for the detection of SNP TSC0006614
agaatatataat

SEQ ID NO: 344146 - DNA, 12 bp, Artificial Sequence
  Oligonucleotide primer for the detection of SNP TSC0043413
caactatacatt

SEQ ID NO: 344147 - DNA, 12 bp, Artificial Sequence
  Oligonucleotide primer for the detection of SNP TSC0043413
ggcgtttattta

SEQ ID NO: 344148 - DNA, 12 bp, Artificial Sequence
  Oligonucleotide primer for the detection of SNP TSC0043414
atctcacttatt

SEQ ID NO: 344149 - DNA, 12 bp, Artificial Sequence
  Oligonukleotid-Primer
gttttagggtgc

SEQ ID NO: 344150 - DNA, 12 bp, Artificial Sequence
  Oligonucleotide primer for the detection of SNP TSC0006971
cctaaaatacaa

SEQ ID NO: 344151 - DNA, 12 bp, Artificial Sequence
  Oligonucleotide primer for the detection of SNP TSC0006971
cctaaaatacga

SEQ ID NO: 344152 - DNA, 12 bp, Artificial Sequence
  Oligonucleotide primer for the detection of SNP TSC0006971
agttttagtatt

SEQ ID NO: 344153 - DNA, 12 bp, Artificial Sequence
  Oligonucleotide primer for the detection of SNP TSC0043415
tatttatagaat

SEQ ID NO: 344154 - DNA, 12 bp, Artificial Sequence
  Oligonucleotide primer for the detection of SNP TSC0043415
catctataaaac

SEQ ID NO: 344155 - DNA, 12 bp, Artificial Sequence
  Oligonucleotide primer for the detection of SNP TSC0043415
ttggaggttaag

SEQ ID NO: 344156 - DNA, 12 bp, Artificial Sequence
  Oligonucleotide primer for the detection of SNP TSC0043416
cccataatctct

SEQ ID NO: 344157 - DNA, 12 bp, Artificial Sequence
  Oligonucleotide primer for the detection of SNP TSC0043416
tggagttttggg

SEQ ID NO: 344158 - DNA, 12 bp, Artificial Sequence
  Oligonucleotide primer for the detection of SNP TSC0007195
tttggaaagaat

SEQ ID NO: 344159 - DNA, 12 bp, Artificial Sequence
  Oligonucleotide primer for the detection of SNP TSC0007195
aatgtatttata

SEQ ID NO: 344160 - DNA, 12 bp, Artificial Sequence
  Oligonucleotide primer for the detection of SNP TSC0007196
tccttcaaaaat

SEQ ID NO: 344161 - DNA, 12 bp, Artificial Sequence
  Oligonucleotide primer for the detection of SNP TSC0007196
tccttcgaaaat

SEQ ID NO: 344162 - DNA, 12 bp, Artificial Sequence
  Oligonucleotide primer for the detection of SNP TSC0007196
gggagtagttga

SEQ ID NO: 344163 - DNA, 12 bp, Artificial Sequence
  Oligonucleotide primer for the detection of SNP TSC0007196
gggagtagtcga

SEQ ID NO: 344164 - DNA, 12 bp, Artificial Sequence
  Oligonucleotide primer for the detection of SNP TSC0043417
tatatcccatcc

SEQ ID NO: 344165 - DNA, 12 bp, Artificial Sequence
  Oligonucleotide primer for the detection of SNP TSC0043417
tatatcccgtcc

SEQ ID NO: 344166 - DNA, 12 bp, Artificial Sequence
  Oligonucleotide primer for the detection of SNP TSC0043417
tatatttcgttt

SEQ ID NO: 344167 - DNA, 12 bp, Artificial Sequence
  Oligonucleotide primer for the detection of SNP TSC0043417
tatattttgttc

SEQ ID NO: 344168 - DNA, 12 bp, Artificial Sequence
  Oligonucleotide primer for the detection of SNP TSC0043417
tatatttcgttc

SEQ ID NO: 344169 - DNA, 12 bp, Artificial Sequence
  Oligonucleotide primer for the detection of SNP TSC0043421
tatttcctttca

SEQ ID NO: 344170 - DNA, 12 bp, Artificial Sequence
  Oligonucleotide primer for the detection of SNP TSC0043421
tttgttagtgtt

SEQ ID NO: 344171 - DNA, 12 bp, Artificial Sequence
  Oligonucleotide primer for the detection of SNP TSC0043421
tctatcaatatt

SEQ ID NO: 344172 - DNA, 12 bp, Artificial Sequence
  Oligonucleotide primer for the detection of SNP TSC0043422
ctcccacctttc

SEQ ID NO: 344173 - DNA, 12 bp, Artificial Sequence
  Oligonucleotide primer for the detection of SNP TSC0043428
cataatcattat

SEQ ID NO: 344174 - DNA, 12 bp, Artificial Sequence
  Oligonucleotide primer for the detection of SNP TSC0043428
taaattaaagga

SEQ ID NO: 344175 - DNA, 12 bp, Artificial Sequence
  Oligonucleotide primer for the detection of SNP TSC0043429
gtgattttatta

SEQ ID NO: 344176 - DNA, 12 bp, Artificial Sequence
  Oligonucleotide primer for the detection of SNP TSC0043429
ataaccctatca

SEQ ID NO: 344177 - DNA, 12 bp, Artificial Sequence
  Oligonucleotide primer for the detection of SNP TSC0043429
tttaagagagtt

SEQ ID NO: 344178 - DNA, 12 bp, Artificial Sequence
  Oligonucleotide primer for the detection of SNP TSC0043430
taacacataaca

SEQ ID NO: 344179 - DNA, 12 bp, Artificial Sequence
  Oligonucleotide primer for the detection of SNP TSC0043430
gttaattgagta

SEQ ID NO: 344180 - DNA, 12 bp, Artificial Sequence
  Oligonucleotide primer for the detection of SNP TSC0043431
aaatatctacaa

SEQ ID NO: 344181 - DNA, 12 bp, Artificial Sequence
  Oligonucleotide primer for the detection of SNP TSC0043431
ttggttataaat

SEQ ID NO: 344182 - DNA, 12 bp, Artificial Sequence
  Oligonucleotide primer for the detection of SNP TSC0043431
ttaactacaaat

SEQ ID NO: 344183 - DNA, 12 bp, Artificial Sequence
  Oligonucleotide primer for the detection of SNP TSC0043431
aaatgtttgtaa

SEQ ID NO: 344184 - DNA, 12 bp, Artificial Sequence
  Oligonucleotide primer for the detection of SNP TSC0043432
ataaaaaacacc

SEQ ID NO: 344185 - DNA, 12 bp, Artificial Sequence
  Oligonucleotide primer for the detection of SNP TSC0043432
atttgtaggaga

SEQ ID NO: 344186 - DNA, 12 bp, Artificial Sequence
  Oligonucleotide primer for the detection of SNP TSC0043433
cgctaaaaattt

SEQ ID NO: 344187 - DNA, 12 bp, Artificial Sequence
  Oligonucleotide primer for the detection of SNP TSC0043433
gtttgattttta

SEQ ID NO: 344188 - DNA, 12 bp, Artificial Sequence
  Oligonucleotide primer for the detection of SNP TSC0043433
atttaactttca

SEQ ID NO: 344189 - DNA, 12 bp, Artificial Sequence
  Oligonucleotide primer for the detection of SNP TSC0043433
tgttggaggttt

SEQ ID NO: 344190 - DNA, 12 bp, Artificial Sequence
  Oligonucleotide primer for the detection of SNP TSC0043433
cgttggaggttt

SEQ ID NO: 344191 - DNA, 12 bp, Artificial Sequence
  Oligonucleotide primer for the detection of SNP TSC0043435
tcccaaataact

SEQ ID NO: 344192 - DNA, 12 bp, Artificial Sequence
  Oligonucleotide primer for the detection of SNP TSC0043435
tatatgtttgta

SEQ ID NO: 344193 - DNA, 12 bp, Artificial Sequence
  Oligonucleotide primer for the detection of SNP TSC0043436
aaaaaccctatc

SEQ ID NO: 344194 - DNA, 12 bp, Artificial Sequence
  Oligonucleotide primer for the detection of SNP TSC0008660
aacaaaaccctt

SEQ ID NO: 344195 - DNA, 12 bp, Artificial Sequence
  Oligonucleotide primer for the detection of SNP TSC0043437
aaacaaaaaact

SEQ ID NO: 344196 - DNA, 12 bp, Artificial Sequence
  Oligonucleotide primer for the detection of SNP TSC0043437
agtgtatagtgg

SEQ ID NO: 344197 - DNA, 12 bp, Artificial Sequence
  Oligonucleotide primer for the detection of SNP TSC0043438
taaataaaaacg

SEQ ID NO: 344198 - DNA, 12 bp, Artificial Sequence
  Oligonucleotide primer for the detection of SNP TSC0043438
gtatattttggt

SEQ ID NO: 344199 - DNA, 12 bp, Artificial Sequence
  Oligonucleotide primer for the detection of SNP TSC0043438
acacatcttaat

SEQ ID NO: 344200 - DNA, 12 bp, Artificial Sequence
  Oligonucleotide primer for the detection of SNP TSC0043438
tggatgggggtg

SEQ ID NO: 344201 - DNA, 12 bp, Artificial Sequence
  Oligonucleotide primer for the detection of SNP TSC0043438
tggatgggggcg

SEQ ID NO: 344202 - DNA, 12 bp, Artificial Sequence
  Oligonucleotide primer for the detection of SNP TSC0005768
ataattttgatt

SEQ ID NO: 344203 - DNA, 12 bp, Artificial Sequence
  Oligonucleotide primer for the detection of SNP TSC0005768
ataactctaacc

SEQ ID NO: 344204 - DNA, 12 bp, Artificial Sequence
  Oligonucleotide primer for the detection of SNP TSC0005768
tgataatagata

SEQ ID NO: 344205 - DNA, 12 bp, Artificial Sequence
  Oligonucleotide primer for the detection of SNP TSC0043439
ttaaaactatat

SEQ ID NO: 344206 - DNA, 12 bp, Artificial Sequence
  Oligonucleotide primer for the detection of SNP TSC0043439
aattatgaagta

SEQ ID NO: 344207 - DNA, 12 bp, Artificial Sequence
  Oligonucleotide primer for the detection of SNP TSC0043439
aattacgaagta

SEQ ID NO: 344208 - DNA, 12 bp, Artificial Sequence
  Oligonucleotide primer for the detection of SNP TSC0009116
gatttttttttg

SEQ ID NO: 344209 - DNA, 12 bp, Artificial Sequence
  Oligonucleotide primer for the detection of SNP TSC0009116
aatttcccccta

SEQ ID NO: 344210 - DNA, 12 bp, Artificial Sequence
  Oligonucleotide primer for the detection of SNP TSC0009116
aagagagagttt

SEQ ID NO: 344211 - DNA, 12 bp, Artificial Sequence
  Oligonucleotide primer for the detection of SNP TSC0009117
ctacattactta

SEQ ID NO: 344212 - DNA, 12 bp, Artificial Sequence
  Oligonucleotide primer for the detection of SNP TSC0009117
agggatgtaatg

SEQ ID NO: 344213 - DNA, 12 bp, Artificial Sequence
  Oligonucleotide primer for the detection of SNP TSC0009118
actaaaatctct

SEQ ID NO: 344214 - DNA, 12 bp, Artificial Sequence
  Oligonucleotide primer for the detection of SNP TSC0009118
ggtaggaagaga

SEQ ID NO: 344215 - DNA, 12 bp, Artificial Sequence
  Oligonucleotide primer for the detection of SNP TSC0043441
agtagagaatag

SEQ ID NO: 344216 - DNA, 12 bp, Artificial Sequence
  Oligonucleotide primer for the detection of SNP TSC0043442
aaaatcccccac

SEQ ID NO: 344217 - DNA, 12 bp, Artificial Sequence
  Oligonucleotide primer for the detection of SNP TSC0043442
tggaggttgtgg

SEQ ID NO: 344218 - DNA, 12 bp, Artificial Sequence
  Oligonucleotide primer for the detection of SNP TSC0043443
acattttaaatt

SEQ ID NO: 344219 - DNA, 12 bp, Artificial Sequence
  Oligonucleotide primer for the detection of SNP TSC0043443
taagatggttta

SEQ ID NO: 344220 - DNA, 12 bp, Artificial Sequence
  Oligonucleotide primer for the detection of SNP TSC0043446
aagagtttatag

SEQ ID NO: 344221 - DNA, 12 bp, Artificial Sequence
  Oligonucleotide primer for the detection of SNP TSC0043447
aaacaactcaac

SEQ ID NO: 344222 - DNA, 12 bp, Artificial Sequence
  Oligonucleotide primer for the detection of SNP TSC0043447
atagtttatttg

SEQ ID NO: 344223 - DNA, 12 bp, Artificial Sequence
  Oligonucleotide primer for the detection of SNP TSC0043447
acaatttattta

SEQ ID NO: 344224 - DNA, 12 bp, Artificial Sequence
  Oligonucleotide primer for the detection of SNP TSC0043447
aggtaatttagt

SEQ ID NO: 344225 - DNA, 12 bp, Artificial Sequence
  Oligonucleotide primer for the detection of SNP TSC0043448
cccaaataaatc

SEQ ID NO: 344226 - DNA, 12 bp, Artificial Sequence
  Oligonucleotide primer for the detection of SNP TSC0043449
aatttccaaaac

SEQ ID NO: 344227 - DNA, 12 bp, Artificial Sequence
  Oligonucleotide primer for the detection of SNP TSC0043449
gtttttttataa

SEQ ID NO: 344228 - DNA, 12 bp, Artificial Sequence
  Oligonucleotide primer for the detection of SNP TSC0043450
cacacacaaaaa

SEQ ID NO: 344229 - DNA, 12 bp, Artificial Sequence
  Oligonucleotide primer for the detection of SNP TSC0043450
gtatttgttttt

SEQ ID NO: 344230 - DNA, 12 bp, Artificial Sequence
  Oligonucleotide primer for the detection of SNP TSC0043450
atatttatcctt

SEQ ID NO: 344231 - DNA, 12 bp, Artificial Sequence
  Oligonucleotide primer for the detection of SNP TSC0043450
tatatataaaaa

SEQ ID NO: 344232 - DNA, 12 bp, Artificial Sequence
  Oligonucleotide primer for the detection of SNP TSC0043454
ttgaattatggg

SEQ ID NO: 344233 - DNA, 12 bp, Artificial Sequence
  Oligonucleotide primer for the detection of SNP TSC0043455
aatataaaacaa

SEQ ID NO: 344234 - DNA, 12 bp, Artificial Sequence
  Oligonucleotide primer for the detection of SNP TSC0043455
attccttcttaa

SEQ ID NO: 344235 - DNA, 12 bp, Artificial Sequence
  Oligonucleotide primer for the detection of SNP TSC0009589
ctccctaactca

SEQ ID NO: 344236 - DNA, 12 bp, Artificial Sequence
  Oligonucleotide primer for the detection of SNP TSC0009589
tgggaggatttt

SEQ ID NO: 344237 - DNA, 12 bp, Artificial Sequence
  Oligonucleotide primer for the detection of SNP TSC0009589
tgggaggatttc

SEQ ID NO: 344238 - DNA, 12 bp, Artificial Sequence
  Oligonucleotide primer for the detection of SNP TSC0043461
aaccctatttca

SEQ ID NO: 344239 - DNA, 12 bp, Artificial Sequence
  Oligonucleotide primer for the detection of SNP TSC0009626
ttaattacaatt

SEQ ID NO: 344240 - DNA, 12 bp, Artificial Sequence
  Oligonucleotide primer for the detection of SNP TSC0009626
attaaatagtag

SEQ ID NO: 344241 - DNA, 12 bp, Artificial Sequence
  Oligonucleotide primer for the detection of SNP TSC0043462
tttaattttatc

SEQ ID NO: 344242 - DNA, 12 bp, Artificial Sequence
  Oligonucleotide primer for the detection of SNP TSC0043462
tttaatttcacc

SEQ ID NO: 344243 - DNA, 12 bp, Artificial Sequence
  Oligonucleotide primer for the detection of SNP TSC0043462
atattagaattg

SEQ ID NO: 344244 - DNA, 12 bp, Artificial Sequence
  Oligonucleotide primer for the detection of SNP TSC0043463
attttaaatgag

SEQ ID NO: 344245 - DNA, 12 bp, Artificial Sequence
  Oligonucleotide primer for the detection of SNP TSC0009895
gatgatttgaag

SEQ ID NO: 344246 - DNA, 12 bp, Artificial Sequence
  Oligonucleotide primer for the detection of SNP TSC0009895
aataatctaaaa

SEQ ID NO: 344247 - DNA, 12 bp, Artificial Sequence
  Oligonucleotide primer for the detection of SNP TSC0009895
agttagggatag

SEQ ID NO: 344248 - DNA, 12 bp, Artificial Sequence
  Oligonucleotide primer for the detection of SNP TSC0043465
aaccttaaatta

SEQ ID NO: 344249 - DNA, 12 bp, Artificial Sequence
  Oligonucleotide primer for the detection of SNP TSC0043465
gtgggtgggtaa

SEQ ID NO: 344250 - DNA, 12 bp, Artificial Sequence
  Oligonucleotide primer for the detection of SNP TSC0043466
aaattcaaaaat

SEQ ID NO: 344251 - DNA, 12 bp, Artificial Sequence
  Oligonucleotide primer for the detection of SNP TSC0043466
ttgtattgttta

SEQ ID NO: 344252 - DNA, 12 bp, Artificial Sequence
  Oligonucleotide primer for the detection of SNP TSC0043466
ctacactaccca

SEQ ID NO: 344253 - DNA, 12 bp, Artificial Sequence
  Oligonucleotide primer for the detection of SNP TSC0043466
gagtttaagagt

SEQ ID NO: 344254 - DNA, 12 bp, Artificial Sequence
  Oligonucleotide primer for the detection of SNP TSC0043467
aaagtatataga

SEQ ID NO: 344255 - DNA, 12 bp, Artificial Sequence
  Oligonucleotide primer for the detection of SNP TSC0043467
aaaatatacaaa

SEQ ID NO: 344256 - DNA, 12 bp, Artificial Sequence
  Oligonucleotide primer for the detection of SNP TSC0043467
taattaaagtat

SEQ ID NO: 344257 - DNA, 12 bp, Artificial Sequence
  Oligonucleotide primer for the detection of SNP TSC0043468
tagtatttatga

SEQ ID NO: 344258 - DNA, 12 bp, Artificial Sequence
  Oligonucleotide primer for the detection of SNP TSC0043469
atccccccaccc

SEQ ID NO: 344259 - DNA, 12 bp, Artificial Sequence
  Oligonucleotide primer for the detection of SNP TSC0043469
gttggtagtggt

SEQ ID NO: 344260 - DNA, 12 bp, Artificial Sequence
  Oligonucleotide primer for the detection of SNP TSC0043469
attaacaataat

SEQ ID NO: 344261 - DNA, 12 bp, Artificial Sequence
  Oligonucleotide primer for the detection of SNP TSC0043471
aaatcaaacaat

SEQ ID NO: 344262 - DNA, 12 bp, Artificial Sequence
  Oligonucleotide primer for the detection of SNP TSC0043471
aaatcgaacaat

SEQ ID NO: 344263 - DNA, 12 bp, Artificial Sequence
  Oligonucleotide primer for the detection of SNP TSC0043471
atttccacatta

SEQ ID NO: 344264 - DNA, 12 bp, Artificial Sequence
  Oligonucleotide primer for the detection of SNP TSC0043471
ggattgaatagt

SEQ ID NO: 344265 - DNA, 12 bp, Artificial Sequence
  Oligonucleotide primer for the detection of SNP TSC0043471
ggatcgaatagt

SEQ ID NO: 344266 - DNA, 12 bp, Artificial Sequence
  Oligonucleotide primer for the detection of SNP TSC0043472
gtggtttatggt

SEQ ID NO: 344267 - DNA, 12 bp, Artificial Sequence
  Oligonucleotide primer for the detection of SNP TSC0043472
ataactcataac

SEQ ID NO: 344268 - DNA, 12 bp, Artificial Sequence
  Oligonucleotide primer for the detection of SNP TSC0043473
aaaactaaactt

SEQ ID NO: 344269 - DNA, 12 bp, Artificial Sequence
  Oligonucleotide primer for the detection of SNP TSC0043473
gatgtgaaggta

SEQ ID NO: 344270 - DNA, 12 bp, Artificial Sequence
  Oligonucleotide primer for the detection of SNP TSC0043473
ggggttgggttt

SEQ ID NO: 344271 - DNA, 12 bp, Artificial Sequence
  Oligonucleotide primer for the detection of SNP TSC0043474
atgaagaagata

SEQ ID NO: 344272 - DNA, 12 bp, Artificial Sequence
  Oligonucleotide primer for the detection of SNP TSC0005400
atttcaaaacaa

SEQ ID NO: 344273 - DNA, 12 bp, Artificial Sequence
  Oligonucleotide primer for the detection of SNP TSC0005400
aggagaatgtag

SEQ ID NO: 344274 - DNA, 12 bp, Artificial Sequence
  Oligonucleotide primer for the detection of SNP TSC0005401
aacaacaataat

SEQ ID NO: 344275 - DNA, 12 bp, Artificial Sequence
  Oligonucleotide primer for the detection of SNP TSC0005401
aacgacaataat

SEQ ID NO: 344276 - DNA, 12 bp, Artificial Sequence
  Oligonucleotide primer for the detection of SNP TSC0005401
tagattttagaa

SEQ ID NO: 344277 - DNA, 12 bp, Artificial Sequence
  Oligonucleotide primer for the detection of SNP TSC0005401
ggtgataatgat

SEQ ID NO: 344278 - DNA, 12 bp, Artificial Sequence
  Oligonucleotide primer for the detection of SNP TSC0005401
ggcgataatgat

SEQ ID NO: 344279 - DNA, 12 bp, Artificial Sequence
  Oligonucleotide primer for the detection of SNP TSC0043477
ttattctcctac

SEQ ID NO: 344280 - DNA, 12 bp, Artificial Sequence
  Oligonucleotide primer for the detection of SNP TSC0043477
tttggttttaag

SEQ ID NO: 344281 - DNA, 12 bp, Artificial Sequence
  Oligonucleotide primer for the detection of SNP TSC0043478
aatctctacaat

SEQ ID NO: 344282 - DNA, 12 bp, Artificial Sequence
  Oligonucleotide primer for the detection of SNP TSC0043478
gatagaggttta

SEQ ID NO: 344283 - DNA, 12 bp, Artificial Sequence
  Oligonucleotide primer for the detection of SNP TSC0043482
ctaaaaaacatc

SEQ ID NO: 344284 - DNA, 12 bp, Artificial Sequence
  Oligonucleotide primer for the detection of SNP TSC0043482
agattatgtttg

SEQ ID NO: 344285 - DNA, 12 bp, Artificial Sequence
  Oligonucleotide primer for the detection of SNP TSC0043482
aaaccatattta

SEQ ID NO: 344286 - DNA, 12 bp, Artificial Sequence
  Oligonucleotide primer for the detection of SNP TSC0043482
ttgaaagatatt

SEQ ID NO: 344287 - DNA, 12 bp, Artificial Sequence
  Oligonucleotide primer for the detection of SNP TSC0043483
actaaccaatat

SEQ ID NO: 344288 - DNA, 12 bp, Artificial Sequence
  Oligonucleotide primer for the detection of SNP TSC0043483
tgaattttttta

SEQ ID NO: 344289 - DNA, 12 bp, Artificial Sequence
  Oligonucleotide primer for the detection of SNP TSC0043483
cgaattttttta

SEQ ID NO: 344290 - DNA, 12 bp, Artificial Sequence
  Oligonucleotide primer for the detection of SNP TSC0043484
tggtttataagg

SEQ ID NO: 344291 - DNA, 12 bp, Artificial Sequence
  Oligonucleotide primer for the detection of SNP TSC0008400
aatacttcacat

SEQ ID NO: 344292 - DNA, 12 bp, Artificial Sequence
  Oligonucleotide primer for the detection of SNP TSC0008400
ttgtttaaattt

SEQ ID NO: 344293 - DNA, 12 bp, Artificial Sequence
  Oligonucleotide primer for the detection of SNP TSC0008400
aactattcaaac

SEQ ID NO: 344294 - DNA, 12 bp, Artificial Sequence
  Oligonucleotide primer for the detection of SNP TSC0008400
gatattttatat

SEQ ID NO: 344295 - DNA, 12 bp, Artificial Sequence
  Oligonucleotide primer for the detection of SNP TSC0009832
atatctttcttt

SEQ ID NO: 344296 - DNA, 12 bp, Artificial Sequence
  Oligonucleotide primer for the detection of SNP TSC0009832
attgggtttttg

SEQ ID NO: 344297 - DNA, 12 bp, Artificial Sequence
  Oligonucleotide primer for the detection of SNP TSC0009832
atcgggtttttg

SEQ ID NO: 344298 - DNA, 12 bp, Artificial Sequence
  Oligonucleotide primer for the detection of SNP TSC0043486
tttctaaatcaa

SEQ ID NO: 344299 - DNA, 12 bp, Artificial Sequence
  Oligonucleotide primer for the detection of SNP TSC0043486
atatgattttat

SEQ ID NO: 344300 - DNA, 12 bp, Artificial Sequence
  Oligonucleotide primer for the detection of SNP TSC0043486
atataatcctat

SEQ ID NO: 344301 - DNA, 12 bp, Artificial Sequence
  Oligonucleotide primer for the detection of SNP TSC0043486
tttttagattag

SEQ ID NO: 344302 - DNA, 12 bp, Artificial Sequence
  Oligonucleotide primer for the detection of SNP TSC0043488
ctaacaaaatta

SEQ ID NO: 344303 - DNA, 12 bp, Artificial Sequence
  Oligonucleotide primer for the detection of SNP TSC0043488
gagtttaagttt

SEQ ID NO: 344304 - DNA, 12 bp, Artificial Sequence
  Oligonucleotide primer for the detection of SNP TSC0043488
ttaataaagtta

SEQ ID NO: 344305 - DNA, 12 bp, Artificial Sequence
  Oligonucleotide primer for the detection of SNP TSC0043490
ccaatcaacata

SEQ ID NO: 344306 - DNA, 12 bp, Artificial Sequence
  Oligonucleotide primer for the detection of SNP TSC0043490
ccgatcaacata

SEQ ID NO: 344307 - DNA, 12 bp, Artificial Sequence
  Oligonucleotide primer for the detection of SNP TSC0043490
tgtagggaaagt

SEQ ID NO: 344308 - DNA, 12 bp, Artificial Sequence
  Oligonucleotide primer for the detection of SNP TSC0043490
tcggttaatatg

SEQ ID NO: 344309 - DNA, 12 bp, Artificial Sequence
  Oligonucleotide primer for the detection of SNP TSC0043491
atcaaaacaact

SEQ ID NO: 344310 - DNA, 12 bp, Artificial Sequence
  Oligonukleotid-Primer
aaatataatgtt

SEQ ID NO: 344311 - DNA, 12 bp, Artificial Sequence
  Oligonucleotide primer for the detection of SNP TSC0043491
aaatataatatt

SEQ ID NO: 344312 - DNA, 12 bp, Artificial Sequence
  Oligonucleotide primer for the detection of SNP TSC0043492
aaatctttaatt

SEQ ID NO: 344313 - DNA, 12 bp, Artificial Sequence
  Oligonucleotide primer for the detection of SNP TSC0043492
atttggagagaa

SEQ ID NO: 344314 - DNA, 12 bp, Artificial Sequence
  Oligonucleotide primer for the detection of SNP TSC0043492
gaatttttagtt

SEQ ID NO: 344315 - DNA, 12 bp, Artificial Sequence
  Oligonucleotide primer for the detection of SNP TSC0005408
aacaaacattct

SEQ ID NO: 344316 - DNA, 12 bp, Artificial Sequence
  Oligonucleotide primer for the detection of SNP TSC0005408
atagggtatata

SEQ ID NO: 344317 - DNA, 12 bp, Artificial Sequence
  Oligonucleotide primer for the detection of SNP TSC0043493
taatcccttcaa

SEQ ID NO: 344318 - DNA, 12 bp, Artificial Sequence
  Oligonucleotide primer for the detection of SNP TSC0043493
atattaataggt

SEQ ID NO: 344319 - DNA, 12 bp, Artificial Sequence
  Oligonucleotide primer for the detection of SNP TSC0043493
acactaataaat

SEQ ID NO: 344320 - DNA, 12 bp, Artificial Sequence
  Oligonucleotide primer for the detection of SNP TSC0008625
atgagttagtta

SEQ ID NO: 344321 - DNA, 12 bp, Artificial Sequence
  Oligonucleotide primer for the detection of SNP TSC0008625
ataaactaatta

SEQ ID NO: 344322 - DNA, 12 bp, Artificial Sequence
  Oligonucleotide primer for the detection of SNP TSC0008625
aagaaaagaggt

SEQ ID NO: 344323 - DNA, 12 bp, Artificial Sequence
  Oligonucleotide primer for the detection of SNP TSC0043494
tcaccgaaaacc

SEQ ID NO: 344324 - DNA, 12 bp, Artificial Sequence
  Oligonucleotide primer for the detection of SNP TSC0043494
gttttaaatttc

SEQ ID NO: 344325 - DNA, 12 bp, Artificial Sequence
  Oligonucleotide primer for the detection of SNP TSC0043494
ttattggaggtt

SEQ ID NO: 344326 - DNA, 12 bp, Artificial Sequence
  Oligonucleotide primer for the detection of SNP TSC0043494
ttatcggaggtt

SEQ ID NO: 344327 - DNA, 12 bp, Artificial Sequence
  Oligonucleotide primer for the detection of SNP TSC0005803
acacctaaaaat

SEQ ID NO: 344328 - DNA, 12 bp, Artificial Sequence
  Oligonucleotide primer for the detection of SNP TSC0005803
ttaggtgggaga

SEQ ID NO: 344329 - DNA, 12 bp, Artificial Sequence
  Oligonucleotide primer for the detection of SNP TSC0005662
caacaaccatta

SEQ ID NO: 344330 - DNA, 12 bp, Artificial Sequence
  Oligonucleotide primer for the detection of SNP TSC0005662
gtaaaggggagt

SEQ ID NO: 344331 - DNA, 12 bp, Artificial Sequence
  Oligonucleotide primer for the detection of SNP TSC0005662
gtaaaggggagc

SEQ ID NO: 344332 - DNA, 12 bp, Artificial Sequence
  Oligonucleotide primer for the detection of SNP TSC0005662
tagtagttattg

SEQ ID NO: 344333 - DNA, 12 bp, Artificial Sequence
  Oligonucleotide primer for the detection of SNP TSC0005663
aaaaatactacc

SEQ ID NO: 344334 - DNA, 12 bp, Artificial Sequence
  Oligonucleotide primer for the detection of SNP TSC0005663
aaattttaagaa

SEQ ID NO: 344335 - DNA, 12 bp, Artificial Sequence
  Oligonucleotide primer for the detection of SNP TSC0043495
ctccccataaaa

SEQ ID NO: 344336 - DNA, 12 bp, Artificial Sequence
  Oligonucleotide primer for the detection of SNP TSC0043495
atgttggttggg

SEQ ID NO: 344337 - DNA, 12 bp, Artificial Sequence
  Oligonucleotide primer for the detection of SNP TSC0043495
atactaactaaa

SEQ ID NO: 344338 - DNA, 12 bp, Artificial Sequence
  Oligonucleotide primer for the detection of SNP TSC0043495
ttttttatggag

SEQ ID NO: 344339 - DNA, 12 bp, Artificial Sequence
  Oligonucleotide primer for the detection of SNP TSC0043496
ataatactaata

SEQ ID NO: 344340 - DNA, 12 bp, Artificial Sequence
  Oligonucleotide primer for the detection of SNP TSC0043496
tatggtattgat

SEQ ID NO: 344341 - DNA, 12 bp, Artificial Sequence
  Oligonucleotide primer for the detection of SNP TSC0009738
acttacaattac

SEQ ID NO: 344342 - DNA, 12 bp, Artificial Sequence
  Oligonucleotide primer for the detection of SNP TSC0043498
tacacccaataa

SEQ ID NO: 344343 - DNA, 12 bp, Artificial Sequence
  Oligonucleotide primer for the detection of SNP TSC0043498
ctacatatttct

SEQ ID NO: 344344 - DNA, 12 bp, Artificial Sequence
  Oligonucleotide primer for the detection of SNP TSC0043498
tttatatttaat

SEQ ID NO: 344345 - DNA, 12 bp, Artificial Sequence
  Oligonucleotide primer for the detection of SNP TSC0043499
tttattgataga

SEQ ID NO: 344346 - DNA, 12 bp, Artificial Sequence
  Oligonucleotide primer for the detection of SNP TSC0043499
tccattaataaa

SEQ ID NO: 344347 - DNA, 12 bp, Artificial Sequence
  Oligonucleotide primer for the detection of SNP TSC0043499
aggttgagatgg

SEQ ID NO: 344348 - DNA, 12 bp, Artificial Sequence
  Oligonucleotide primer for the detection of SNP TSC0043499
aggtcgagatgg

SEQ ID NO: 344349 - DNA, 12 bp, Artificial Sequence
  Oligonucleotide primer for the detection of SNP TSC0043500
tgtgattatagg

SEQ ID NO: 344350 - DNA, 12 bp, Artificial Sequence
  Oligonucleotide primer for the detection of SNP TSC0043501
aacttacaatct

SEQ ID NO: 344351 - DNA, 12 bp, Artificial Sequence
  Oligonucleotide primer for the detection of SNP TSC0043502
ttatttagtaaa

SEQ ID NO: 344352 - DNA, 12 bp, Artificial Sequence
  Oligonucleotide primer for the detection of SNP TSC0007661
ttttaaaagtga

SEQ ID NO: 344353 - DNA, 12 bp, Artificial Sequence
  Oligonucleotide primer for the detection of SNP TSC0043503
cacacatcacct

SEQ ID NO: 344354 - DNA, 12 bp, Artificial Sequence
  Oligonucleotide primer for the detection of SNP TSC0043503
cacgcatcacct

SEQ ID NO: 344355 - DNA, 12 bp, Artificial Sequence
  Oligonucleotide primer for the detection of SNP TSC0043503
agggtgaaatga

SEQ ID NO: 344356 - DNA, 12 bp, Artificial Sequence
  Oligonucleotide primer for the detection of SNP TSC0043503
agggtgaaacga

SEQ ID NO: 344357 - DNA, 12 bp, Artificial Sequence
  Oligonucleotide primer for the detection of SNP TSC0043504
acaataaacttc

SEQ ID NO: 344358 - DNA, 12 bp, Artificial Sequence
  Oligonucleotide primer for the detection of SNP TSC0043504
tatttttaatga

SEQ ID NO: 344359 - DNA, 12 bp, Artificial Sequence
  Oligonucleotide primer for the detection of SNP TSC0043505
cataatctcctt

SEQ ID NO: 344360 - DNA, 12 bp, Artificial Sequence
  Oligonucleotide primer for the detection of SNP TSC0043505
tacctttctcta

SEQ ID NO: 344361 - DNA, 12 bp, Artificial Sequence
  Oligonucleotide primer for the detection of SNP TSC0043506
atatattatcaa

SEQ ID NO: 344362 - DNA, 12 bp, Artificial Sequence
  Oligonucleotide primer for the detection of SNP TSC0043506
atatattatcga

SEQ ID NO: 344363 - DNA, 12 bp, Artificial Sequence
  Oligonucleotide primer for the detection of SNP TSC0043506
aaaattgagttt

SEQ ID NO: 344364 - DNA, 12 bp, Artificial Sequence
  Oligonucleotide primer for the detection of SNP TSC0043506
atatattattga

SEQ ID NO: 344365 - DNA, 12 bp, Artificial Sequence
  Oligonucleotide primer for the detection of SNP TSC0004791
caaacaatcctt

SEQ ID NO: 344366 - DNA, 12 bp, Artificial Sequence
  Oligonucleotide primer for the detection of SNP TSC0004791
gtgtgtatataa

SEQ ID NO: 344367 - DNA, 12 bp, Artificial Sequence
  Oligonucleotide primer for the detection of SNP TSC0043507
aataattttatg

SEQ ID NO: 344368 - DNA, 12 bp, Artificial Sequence
  Oligonucleotide primer for the detection of SNP TSC0043508
ctacaataataa

SEQ ID NO: 344369 - DNA, 12 bp, Artificial Sequence
  Oligonucleotide primer for the detection of SNP TSC0043508
gattttattatt

SEQ ID NO: 344370 - DNA, 12 bp, Artificial Sequence
  Oligonucleotide primer for the detection of SNP TSC0043508
aacttcaccacc

SEQ ID NO: 344371 - DNA, 12 bp, Artificial Sequence
  Oligonucleotide primer for the detection of SNP TSC0043508
ttataataatgg

SEQ ID NO: 344372 - DNA, 12 bp, Artificial Sequence
  Oligonucleotide primer for the detection of SNP TSC0005587
agagagagtttg

SEQ ID NO: 344373 - DNA, 12 bp, Artificial Sequence
  Oligonucleotide primer for the detection of SNP TSC0004527
caacattaaaac

SEQ ID NO: 344374 - DNA, 12 bp, Artificial Sequence
  Oligonucleotide primer for the detection of SNP TSC0004527
attttgtatatt

SEQ ID NO: 344375 - DNA, 12 bp, Artificial Sequence
  Oligonucleotide primer for the detection of SNP TSC0004527
attttatacacc

SEQ ID NO: 344376 - DNA, 12 bp, Artificial Sequence
  Oligonucleotide primer for the detection of SNP TSC0004527
taatattggaat

SEQ ID NO: 344377 - DNA, 12 bp, Artificial Sequence
  Oligonucleotide primer for the detection of SNP TSC0043509
ctcccattatcc

SEQ ID NO: 344378 - DNA, 12 bp, Artificial Sequence
  Oligonucleotide primer for the detection of SNP TSC0043509
tgggaggataaa

SEQ ID NO: 344379 - DNA, 12 bp, Artificial Sequence
  Oligonucleotide primer for the detection of SNP TSC0043510
tttcaatcaata

SEQ ID NO: 344380 - DNA, 12 bp, Artificial Sequence
  Oligonucleotide primer for the detection of SNP TSC0043510
tgaaaatttaga

SEQ ID NO: 344381 - DNA, 12 bp, Artificial Sequence
  Oligonucleotide primer for the detection of SNP TSC0043510
cgaaaatttaga

SEQ ID NO: 344382 - DNA, 12 bp, Artificial Sequence
  Oligonucleotide primer for the detection of SNP TSC0043510
caaaaactcaaa

SEQ ID NO: 344383 - DNA, 12 bp, Artificial Sequence
  Oligonucleotide primer for the detection of SNP TSC0043510
cgaaaactcaaa

SEQ ID NO: 344384 - DNA, 12 bp, Artificial Sequence
  Oligonucleotide primer for the detection of SNP TSC0043512
cctaaaactaaa

SEQ ID NO: 344385 - DNA, 12 bp, Artificial Sequence
  Oligonucleotide primer for the detection of SNP TSC0043512
ttctttataaat

SEQ ID NO: 344386 - DNA, 12 bp, Artificial Sequence
  Oligonucleotide primer for the detection of SNP TSC0043512
ttgagattggat

SEQ ID NO: 344387 - DNA, 12 bp, Artificial Sequence
  Oligonucleotide primer for the detection of SNP TSC0043518
caatacacaaat

SEQ ID NO: 344388 - DNA, 12 bp, Artificial Sequence
  Oligonucleotide primer for the detection of SNP TSC0043518
ttaaataggaga

SEQ ID NO: 344389 - DNA, 12 bp, Artificial Sequence
  Oligonucleotide primer for the detection of SNP TSC0043519
catttactcatt

SEQ ID NO: 344390 - DNA, 12 bp, Artificial Sequence
  Oligonucleotide primer for the detection of SNP TSC0043519
cgtttactcatt

SEQ ID NO: 344391 - DNA, 12 bp, Artificial Sequence
  Oligonucleotide primer for the detection of SNP TSC0043519
ttttggttatat

SEQ ID NO: 344392 - DNA, 12 bp, Artificial Sequence
  Oligonucleotide primer for the detection of SNP TSC0043519
ttttaatcatac

SEQ ID NO: 344393 - DNA, 12 bp, Artificial Sequence
  Oligonucleotide primer for the detection of SNP TSC0043519
tgtttgtttatt

SEQ ID NO: 344394 - DNA, 12 bp, Artificial Sequence
  Oligonucleotide primer for the detection of SNP TSC0043519
cgtttgtttatt

SEQ ID NO: 344395 - DNA, 12 bp, Artificial Sequence
  Oligonucleotide primer for the detection of SNP TSC0043520
taaaaatcttat

SEQ ID NO: 344396 - DNA, 12 bp, Artificial Sequence
  Oligonucleotide primer for the detection of SNP TSC0043520
aaacatacacat

SEQ ID NO: 344397 - DNA, 12 bp, Artificial Sequence
  Oligonucleotide primer for the detection of SNP TSC0043521
aatccattatat

SEQ ID NO: 344398 - DNA, 12 bp, Artificial Sequence
  Oligonucleotide primer for the detection of SNP TSC0043521
agattgatgtta

SEQ ID NO: 344399 - DNA, 12 bp, Artificial Sequence
  Oligonucleotide primer for the detection of SNP TSC0043526
tacgtttgattt

SEQ ID NO: 344400 - DNA, 12 bp, Artificial Sequence
  Oligonucleotide primer for the detection of SNP TSC0043526
gtttaatttaaa

SEQ ID NO: 344401 - DNA, 12 bp, Artificial Sequence
  Oligonucleotide primer for the detection of SNP TSC0043526
tatggtaatgga

SEQ ID NO: 344402 - DNA, 12 bp, Artificial Sequence
  Oligonucleotide primer for the detection of SNP TSC0005969
aaatcttaaaaa

SEQ ID NO: 344403 - DNA, 12 bp, Artificial Sequence
  Oligonucleotide primer for the detection of SNP TSC0005969
tatattgtgatg

SEQ ID NO: 344404 - DNA, 12 bp, Artificial Sequence
  Oligonucleotide primer for the detection of SNP TSC0005969
tatattgcgatg

SEQ ID NO: 344405 - DNA, 12 bp, Artificial Sequence
  Oligonucleotide primer for the detection of SNP TSC0005969
tacactacaata

SEQ ID NO: 344406 - DNA, 12 bp, Artificial Sequence
  Oligonucleotide primer for the detection of SNP TSC0005969
tacactacgata

SEQ ID NO: 344407 - DNA, 12 bp, Artificial Sequence
  Oligonucleotide primer for the detection of SNP TSC0005969
ggattttagaga

SEQ ID NO: 344408 - DNA, 12 bp, Artificial Sequence
  Oligonucleotide primer for the detection of SNP TSC0043531
taacaatatctt

SEQ ID NO: 344409 - DNA, 12 bp, Artificial Sequence
  Oligonucleotide primer for the detection of SNP TSC0006223
aaaacctacatc

SEQ ID NO: 344410 - DNA, 12 bp, Artificial Sequence
  Oligonucleotide primer for the detection of SNP TSC0006223
aaaacctacgtc

SEQ ID NO: 344411 - DNA, 12 bp, Artificial Sequence
  Oligonucleotide primer for the detection of SNP TSC0006223
aggtatgataag

SEQ ID NO: 344412 - DNA, 12 bp, Artificial Sequence
  Oligonucleotide primer for the detection of SNP TSC0006223
aaacataacaaa

SEQ ID NO: 344413 - DNA, 12 bp, Artificial Sequence
  Oligonucleotide primer for the detection of SNP TSC0006223
aaaatttatgtt

SEQ ID NO: 344414 - DNA, 12 bp, Artificial Sequence
  Oligonucleotide primer for the detection of SNP TSC0006223
aaaatttacgtt

SEQ ID NO: 344415 - DNA, 12 bp, Artificial Sequence
  Oligonucleotide primer for the detection of SNP TSC0006224
ccatctaacctc

SEQ ID NO: 344416 - DNA, 12 bp, Artificial Sequence
  Oligonucleotide primer for the detection of SNP TSC0006224
atgtttgtgggg

SEQ ID NO: 344417 - DNA, 12 bp, Artificial Sequence
  Oligonucleotide primer for the detection of SNP TSC0006224
atacctataaaa

SEQ ID NO: 344418 - DNA, 12 bp, Artificial Sequence
  Oligonucleotide primer for the detection of SNP TSC0006224
ttatttggtttc

SEQ ID NO: 344419 - DNA, 12 bp, Artificial Sequence
  Oligonucleotide primer for the detection of SNP TSC0043532
gttagttttaga

SEQ ID NO: 344420 - DNA, 12 bp, Artificial Sequence
  Oligonucleotide primer for the detection of SNP TSC0043532
attaaccccaaa

SEQ ID NO: 344421 - DNA, 12 bp, Artificial Sequence
  Oligonucleotide primer for the detection of SNP TSC0043533
taataattaaaa

SEQ ID NO: 344422 - DNA, 12 bp, Artificial Sequence
  Oligonucleotide primer for the detection of SNP TSC0043533
acaatatccctt

SEQ ID NO: 344423 - DNA, 12 bp, Artificial Sequence
  Oligonucleotide primer for the detection of SNP TSC0043533
tgataattggaa

SEQ ID NO: 344424 - DNA, 12 bp, Artificial Sequence
  Oligonucleotide primer for the detection of SNP TSC0043534
ttcttatcacca

SEQ ID NO: 344425 - DNA, 12 bp, Artificial Sequence
  Oligonucleotide primer for the detection of SNP TSC0043534
gttatttgtttt

SEQ ID NO: 344426 - DNA, 12 bp, Artificial Sequence
  Oligonucleotide primer for the detection of SNP TSC0043534
gttattcgtttt

SEQ ID NO: 344427 - DNA, 12 bp, Artificial Sequence
  Oligonukleotid-Primer
atcattcatttt

SEQ ID NO: 344428 - DNA, 12 bp, Artificial Sequence
  Oligonucleotide primer for the detection of SNP TSC0043534
atcattcgtttt

SEQ ID NO: 344429 - DNA, 12 bp, Artificial Sequence
  Oligonucleotide primer for the detection of SNP TSC0043535
tggattttattt

SEQ ID NO: 344430 - DNA, 12 bp, Artificial Sequence
  Oligonucleotide primer for the detection of SNP TSC0043535
taaactctatct

SEQ ID NO: 344431 - DNA, 12 bp, Artificial Sequence
  Oligonucleotide primer for the detection of SNP TSC0043535
agattaatggaa

SEQ ID NO: 344432 - DNA, 12 bp, Artificial Sequence
  Oligonucleotide primer for the detection of SNP TSC0043536
ccccacccacca

SEQ ID NO: 344433 - DNA, 12 bp, Artificial Sequence
  Oligonucleotide primer for the detection of SNP TSC0043536
ccccacccgcca

SEQ ID NO: 344434 - DNA, 12 bp, Artificial Sequence
  Oligonucleotide primer for the detection of SNP TSC0043536
ttagggtggggt

SEQ ID NO: 344435 - DNA, 12 bp, Artificial Sequence
  Oligonucleotide primer for the detection of SNP TSC0043536
ttagggtggggc

SEQ ID NO: 344436 - DNA, 12 bp, Artificial Sequence
  Oligonucleotide primer for the detection of SNP TSC0043537
gtatttgtatta

SEQ ID NO: 344437 - DNA, 12 bp, Artificial Sequence
  Oligonucleotide primer for the detection of SNP TSC0043540
tctatctaaaat

SEQ ID NO: 344438 - DNA, 12 bp, Artificial Sequence
  Oligonucleotide primer for the detection of SNP TSC0043543
ttttagttttac

SEQ ID NO: 344439 - DNA, 12 bp, Artificial Sequence
  Oligonukleotid-Primer
attccaatttca

SEQ ID NO: 344440 - DNA, 12 bp, Artificial Sequence
  Oligonucleotide primer for the detection of SNP TSC0043543
gaaaagaattat

SEQ ID NO: 344441 - DNA, 12 bp, Artificial Sequence
  Oligonucleotide primer for the detection of SNP TSC0043544
cggaggttgtag

SEQ ID NO: 344442 - DNA, 12 bp, Artificial Sequence
  Oligonucleotide primer for the detection of SNP TSC0043544
cgaaaattacaa

SEQ ID NO: 344443 - DNA, 12 bp, Artificial Sequence
  Oligonukleotid-Primer
tctccatcacac

SEQ ID NO: 344444 - DNA, 12 bp, Artificial Sequence
  Oligonucleotide primer for the detection of SNP TSC0043545
aagtttgaggag

SEQ ID NO: 344445 - DNA, 12 bp, Artificial Sequence
  Oligonucleotide primer for the detection of SNP TSC0043546
aatatatttaac

SEQ ID NO: 344446 - DNA, 12 bp, Artificial Sequence
  Oligonucleotide primer for the detection of SNP TSC0043546
atatatttaagg

SEQ ID NO: 344447 - DNA, 12 bp, Artificial Sequence
  Oligonukleotid-Primer
caaacctatttc

SEQ ID NO: 344448 - DNA, 12 bp, Artificial Sequence
  Oligonucleotide primer for the detection of SNP TSC0043547
tataaagtggag

SEQ ID NO: 344449 - DNA, 12 bp, Artificial Sequence
  Oligonucleotide primer for the detection of SNP TSC0043548
aaccttatctct

SEQ ID NO: 344450 - DNA, 12 bp, Artificial Sequence
  Oligonucleotide primer for the detection of SNP TSC0043549
tgtgttgtttag

SEQ ID NO: 344451 - DNA, 12 bp, Artificial Sequence
  Oligonucleotide primer for the detection of SNP TSC0043550
catcatcatcat

SEQ ID NO: 344452 - DNA, 12 bp, Artificial Sequence
  Oligonucleotide primer for the detection of SNP TSC0043550
aagtaatagtaa

SEQ ID NO: 344453 - DNA, 12 bp, Artificial Sequence
  Oligonucleotide primer for the detection of SNP TSC0043553
aaaactttatct

SEQ ID NO: 344454 - DNA, 12 bp, Artificial Sequence
  Oligonucleotide primer for the detection of SNP TSC0043553
gttgattttaaa

SEQ ID NO: 344455 - DNA, 12 bp, Artificial Sequence
  Oligonucleotide primer for the detection of SNP TSC0043554
ctatttatatat

SEQ ID NO: 344456 - DNA, 12 bp, Artificial Sequence
  Oligonucleotide primer for the detection of SNP TSC0043554
gtagttatttag

SEQ ID NO: 344457 - DNA, 12 bp, Artificial Sequence
  Oligonucleotide primer for the detection of SNP TSC0043555
tatatttttaag

SEQ ID NO: 344458 - DNA, 12 bp, Artificial Sequence
  Oligonucleotide primer for the detection of SNP TSC0043558
gaataaattgtg

SEQ ID NO: 344459 - DNA, 12 bp, Artificial Sequence
  Oligonucleotide primer for the detection of SNP TSC0043558
aaacaaattata

SEQ ID NO: 344460 - DNA, 12 bp, Artificial Sequence
  Oligonucleotide primer for the detection of SNP TSC0043558
ggtagtgatata

SEQ ID NO: 344461 - DNA, 12 bp, Artificial Sequence
  Oligonucleotide primer for the detection of SNP TSC0043559
tttaaaacatta

SEQ ID NO: 344462 - DNA, 12 bp, Artificial Sequence
  Oligonucleotide primer for the detection of SNP TSC0043559
ggaaaatagttt

SEQ ID NO: 344463 - DNA, 12 bp, Artificial Sequence
  Oligonucleotide primer for the detection of SNP TSC0043560
ataaacttttct

SEQ ID NO: 344464 - DNA, 12 bp, Artificial Sequence
  Oligonucleotide primer for the detection of SNP TSC0043560
gatagggtaaaa

SEQ ID NO: 344465 - DNA, 12 bp, Artificial Sequence
  Oligonucleotide primer for the detection of SNP TSC0043561
tcataaaaaatt

SEQ ID NO: 344466 - DNA, 12 bp, Artificial Sequence
  Oligonucleotide primer for the detection of SNP TSC0043562
attccacattct

SEQ ID NO: 344467 - DNA, 12 bp, Artificial Sequence
  Oligonucleotide primer for the detection of SNP TSC0043562
ttggattggtgt

SEQ ID NO: 344468 - DNA, 12 bp, Artificial Sequence
  Oligonucleotide primer for the detection of SNP TSC0043562
taaactaatata

SEQ ID NO: 344469 - DNA, 12 bp, Artificial Sequence
  Oligonucleotide primer for the detection of SNP TSC0043563
aacaatataaca

SEQ ID NO: 344470 - DNA, 12 bp, Artificial Sequence
  Oligonucleotide primer for the detection of SNP TSC0043563
cttaactccttt

SEQ ID NO: 344471 - DNA, 12 bp, Artificial Sequence
  Oligonucleotide primer for the detection of SNP TSC0043563
gatagtgtgata

SEQ ID NO: 344472 - DNA, 12 bp, Artificial Sequence
  Oligonucleotide primer for the detection of SNP TSC0043564
caaaatcacaaa

SEQ ID NO: 344473 - DNA, 12 bp, Artificial Sequence
  Oligonucleotide primer for the detection of SNP TSC0043564
cattatctaaac

SEQ ID NO: 344474 - DNA, 12 bp, Artificial Sequence
  Oligonucleotide primer for the detection of SNP TSC0043565
acaaataaacac

SEQ ID NO: 344475 - DNA, 12 bp, Artificial Sequence
  Oligonucleotide primer for the detection of SNP TSC0043565
taattattattg

SEQ ID NO: 344476 - DNA, 12 bp, Artificial Sequence
  Oligonucleotide primer for the detection of SNP TSC0043567
atatcccctccc

SEQ ID NO: 344477 - DNA, 12 bp, Artificial Sequence
  Oligonucleotide primer for the detection of SNP TSC0043567
agagttttttaa

SEQ ID NO: 344478 - DNA, 12 bp, Artificial Sequence
  Oligonucleotide primer for the detection of SNP TSC0043570
acaatataaaca

SEQ ID NO: 344479 - DNA, 12 bp, Artificial Sequence
  unsure (1): Oligonucleotide primer for the detection of SNP TSC0043570
ntttgtggaggt

SEQ ID NO: 344480 - DNA, 12 bp, Artificial Sequence
  unsure (1): Oligonucleotide primer for the detection of SNP TSC0043570
ncttataaaaac

SEQ ID NO: 344481 - DNA, 12 bp, Artificial Sequence
  Oligonucleotide primer for the detection of SNP TSC0043570
ggtaatgtgagt

SEQ ID NO: 344482 - DNA, 12 bp, Artificial Sequence
  Oligonucleotide primer for the detection of SNP TSC0043572
accacttttact

SEQ ID NO: 344483 - DNA, 12 bp, Artificial Sequence
  Oligonucleotide primer for the detection of SNP TSC0010792
attccaataaaa

SEQ ID NO: 344484 - DNA, 12 bp, Artificial Sequence
  Oligonucleotide primer for the detection of SNP TSC0010792
tatatgtttagt

SEQ ID NO: 344485 - DNA, 12 bp, Artificial Sequence
  Oligonucleotide primer for the detection of SNP TSC0010792
catatattcaac

SEQ ID NO: 344486 - DNA, 12 bp, Artificial Sequence
  Oligonucleotide primer for the detection of SNP TSC0010792
gttttagtgaga

SEQ ID NO: 344487 - DNA, 12 bp, Artificial Sequence
  Oligonukleotid-Primer
tcctcacataac

SEQ ID NO: 344488 - DNA, 12 bp, Artificial Sequence
  Oligonucleotide primer for the detection of SNP TSC0043574
aacgttttaaaa

SEQ ID NO: 344489 - DNA, 12 bp, Artificial Sequence
  Oligonucleotide primer for the detection of SNP TSC0043575
atatggatatga

SEQ ID NO: 344490 - DNA, 12 bp, Artificial Sequence
  Oligonucleotide primer for the detection of SNP TSC0043575
acataaatataa

SEQ ID NO: 344491 - DNA, 12 bp, Artificial Sequence
  Oligonucleotide primer for the detection of SNP TSC0043575
aatatatatttt

SEQ ID NO: 344492 - DNA, 12 bp, Artificial Sequence
  Oligonucleotide primer for the detection of SNP TSC0043576
attgggagtaaa

SEQ ID NO: 344493 - DNA, 12 bp, Artificial Sequence
  Oligonucleotide primer for the detection of SNP TSC0043576
agattgagaaag

SEQ ID NO: 344494 - DNA, 12 bp, Artificial Sequence
  Oligonucleotide primer for the detection of SNP TSC0043578
ttattattagga

SEQ ID NO: 344495 - DNA, 12 bp, Artificial Sequence
  Oligonukleotid-Primer
catattttatac

SEQ ID NO: 344496 - DNA, 12 bp, Artificial Sequence
  Oligonucleotide primer for the detection of SNP TSC0043580
aaccacatttca

SEQ ID NO: 344497 - DNA, 12 bp, Artificial Sequence
  Oligonucleotide primer for the detection of SNP TSC0043581
caaaatttctaa

SEQ ID NO: 344498 - DNA, 12 bp, Artificial Sequence
  Oligonucleotide primer for the detection of SNP TSC0043581
tagattttttga

SEQ ID NO: 344499 - DNA, 12 bp, Artificial Sequence
  Oligonucleotide primer for the detection of SNP TSC0043581
caaacctcctaa

SEQ ID NO: 344500 - DNA, 12 bp, Artificial Sequence
  Oligonucleotide primer for the detection of SNP TSC0043581
tagggtttttga

SEQ ID NO: 344501 - DNA, 12 bp, Artificial Sequence
  Oligonucleotide primer for the detection of SNP TSC0043582
attactaaaaaa

SEQ ID NO: 344502 - DNA, 12 bp, Artificial Sequence
  Oligonucleotide primer for the detection of SNP TSC0043582
aataaaggaatt

SEQ ID NO: 344503 - DNA, 12 bp, Artificial Sequence
  Oligonucleotide primer for the detection of SNP TSC0043582
gttgttgggaag

SEQ ID NO: 344504 - DNA, 12 bp, Artificial Sequence
  Oligonucleotide primer for the detection of SNP TSC0004988
ccaaataatact

SEQ ID NO: 344505 - DNA, 12 bp, Artificial Sequence
  Oligonucleotide primer for the detection of SNP TSC0004988
ttagtagtatga

SEQ ID NO: 344506 - DNA, 12 bp, Artificial Sequence
  Oligonucleotide primer for the detection of SNP TSC0004988
ttagtagtacga

SEQ ID NO: 344507 - DNA, 12 bp, Artificial Sequence
  Oligonucleotide primer for the detection of SNP TSC0043589
aaaacatatctt

SEQ ID NO: 344508 - DNA, 12 bp, Artificial Sequence
  Oligonucleotide primer for the detection of SNP TSC0043589
tttgttagagta

SEQ ID NO: 344509 - DNA, 12 bp, Artificial Sequence
  Oligonucleotide primer for the detection of SNP TSC0043590
aaaacttattat

SEQ ID NO: 344510 - DNA, 12 bp, Artificial Sequence
  Oligonucleotide primer for the detection of SNP TSC0043590
ttaaatgtttag

SEQ ID NO: 344511 - DNA, 12 bp, Artificial Sequence
  Oligonucleotide primer for the detection of SNP TSC0043590
ttaaacgtttag

SEQ ID NO: 344512 - DNA, 12 bp, Artificial Sequence
  Oligonucleotide primer for the detection of SNP TSC0043591
gtttaattatta

SEQ ID NO: 344513 - DNA, 12 bp, Artificial Sequence
  Oligonucleotide primer for the detection of SNP TSC0043592
tttatcatacat

SEQ ID NO: 344514 - DNA, 12 bp, Artificial Sequence
  Oligonucleotide primer for the detection of SNP TSC0043592
tttatcatacgt

SEQ ID NO: 344515 - DNA, 12 bp, Artificial Sequence
  Oligonucleotide primer for the detection of SNP TSC0043592
tagattttaggg

SEQ ID NO: 344516 - DNA, 12 bp, Artificial Sequence
  Oligonucleotide primer for the detection of SNP TSC0043593
ccttcacaattc

SEQ ID NO: 344517 - DNA, 12 bp, Artificial Sequence
  Oligonucleotide primer for the detection of SNP TSC0043593
ccttcacgattc

SEQ ID NO: 344518 - DNA, 12 bp, Artificial Sequence
  Oligonucleotide primer for the detection of SNP TSC0043593
aggtgtatgtgg

SEQ ID NO: 344519 - DNA, 12 bp, Artificial Sequence
  Oligonucleotide primer for the detection of SNP TSC0043593
aaatacatataa

SEQ ID NO: 344520 - DNA, 12 bp, Artificial Sequence
  Oligonucleotide primer for the detection of SNP TSC0043593
tttttacggttt

SEQ ID NO: 344521 - DNA, 12 bp, Artificial Sequence
  Oligonucleotide primer for the detection of SNP TSC0043593
tttttatggttc

SEQ ID NO: 344522 - DNA, 12 bp, Artificial Sequence
  Oligonucleotide primer for the detection of SNP TSC0043593
tttttacggttc

SEQ ID NO: 344523 - DNA, 12 bp, Artificial Sequence
  Oligonucleotide primer for the detection of SNP TSC0043597
aatataacctta

SEQ ID NO: 344524 - DNA, 12 bp, Artificial Sequence
  Oligonucleotide primer for the detection of SNP TSC0043597
agatatttttgt

SEQ ID NO: 344525 - DNA, 12 bp, Artificial Sequence
  Oligonucleotide primer for the detection of SNP TSC0043597
agtgtgatttta

SEQ ID NO: 344526 - DNA, 12 bp, Artificial Sequence
  Oligonucleotide primer for the detection of SNP TSC0043598
tatattaaaata

SEQ ID NO: 344527 - DNA, 12 bp, Artificial Sequence
  Oligonucleotide primer for the detection of SNP TSC0043598
tatttaacatat

SEQ ID NO: 344528 - DNA, 12 bp, Artificial Sequence
  Oligonucleotide primer for the detection of SNP TSC0043598
tatattgaaata

SEQ ID NO: 344529 - DNA, 12 bp, Artificial Sequence
  Oligonucleotide primer for the detection of SNP TSC0043599
taatctctctat

SEQ ID NO: 344530 - DNA, 12 bp, Artificial Sequence
  Oligonucleotide primer for the detection of SNP TSC0043599
gagtattttatg

SEQ ID NO: 344531 - DNA, 12 bp, Artificial Sequence
  Oligonucleotide primer for the detection of SNP TSC0043599
aaatattctata

SEQ ID NO: 344532 - DNA, 12 bp, Artificial Sequence
  Oligonucleotide primer for the detection of SNP TSC0043600
atttttacttat

SEQ ID NO: 344533 - DNA, 12 bp, Artificial Sequence
  Oligonucleotide primer for the detection of SNP TSC0043604
aataaatcacaa

SEQ ID NO: 344534 - DNA, 12 bp, Artificial Sequence
  Oligonucleotide primer for the detection of SNP TSC0043604
aataaatcgcaa

SEQ ID NO: 344535 - DNA, 12 bp, Artificial Sequence
  Oligonucleotide primer for the detection of SNP TSC0043604
ttttaaatctac

SEQ ID NO: 344536 - DNA, 12 bp, Artificial Sequence
  Oligonucleotide primer for the detection of SNP TSC0043604
agtaggttgtag

SEQ ID NO: 344537 - DNA, 12 bp, Artificial Sequence
  Oligonucleotide primer for the detection of SNP TSC0043604
agtaggtcgtag

SEQ ID NO: 344538 - DNA, 12 bp, Artificial Sequence
  Oligonucleotide primer for the detection of SNP TSC0043605
agtttattgttg

SEQ ID NO: 344539 - DNA, 12 bp, Artificial Sequence
  Oligonucleotide primer for the detection of SNP TSC0043605
agtttatcgttg

SEQ ID NO: 344540 - DNA, 12 bp, Artificial Sequence
  Oligonucleotide primer for the detection of SNP TSC0043605
aatctaccacta

SEQ ID NO: 344541 - DNA, 12 bp, Artificial Sequence
  Oligonucleotide primer for the detection of SNP TSC0043605
aatctaccgcta

SEQ ID NO: 344542 - DNA, 12 bp, Artificial Sequence
  Oligonucleotide primer for the detection of SNP TSC0043605
tgggaagtaggt

SEQ ID NO: 344543 - DNA, 12 bp, Artificial Sequence
  Oligonucleotide primer for the detection of SNP TSC0043606
atacttactaaa

SEQ ID NO: 344544 - DNA, 12 bp, Artificial Sequence
  Oligonucleotide primer for the detection of SNP TSC0043606
ttatctttaata

SEQ ID NO: 344545 - DNA, 12 bp, Artificial Sequence
  Oligonucleotide primer for the detection of SNP TSC0043606
atatttgttaag

SEQ ID NO: 344546 - DNA, 12 bp, Artificial Sequence
  Oligonucleotide primer for the detection of SNP TSC0043607
taaaatttccac

SEQ ID NO: 344547 - DNA, 12 bp, Artificial Sequence
  Oligonucleotide primer for the detection of SNP TSC0043607
tctcactctcta

SEQ ID NO: 344548 - DNA, 12 bp, Artificial Sequence
  Oligonucleotide primer for the detection of SNP TSC0043607
tgaagtttttat

SEQ ID NO: 344549 - DNA, 12 bp, Artificial Sequence
  Oligonucleotide primer for the detection of SNP TSC0043608
aaaacccaccac

SEQ ID NO: 344550 - DNA, 12 bp, Artificial Sequence
  Oligonucleotide primer for the detection of SNP TSC0043609
cttaacaaacac

SEQ ID NO: 344551 - DNA, 12 bp, Artificial Sequence
  Oligonucleotide primer for the detection of SNP TSC0043610
tgggattataga

SEQ ID NO: 344552 - DNA, 12 bp, Artificial Sequence
  Oligonucleotide primer for the detection of SNP TSC0043611
taaataacacat

SEQ ID NO: 344553 - DNA, 12 bp, Artificial Sequence
  Oligonucleotide primer for the detection of SNP TSC0043611
atataattagaa

SEQ ID NO: 344554 - DNA, 12 bp, Artificial Sequence
  Oligonucleotide primer for the detection of SNP TSC0043612
atttcaaccact

SEQ ID NO: 344555 - DNA, 12 bp, Artificial Sequence
  Oligonucleotide primer for the detection of SNP TSC0043612
tgaggggtaatg

SEQ ID NO: 344556 - DNA, 12 bp, Artificial Sequence
  Oligonucleotide primer for the detection of SNP TSC0043613
aacccaaaaaat

SEQ ID NO: 344557 - DNA, 12 bp, Artificial Sequence
  Oligonucleotide primer for the detection of SNP TSC0043614
tcactctattac

SEQ ID NO: 344558 - DNA, 12 bp, Artificial Sequence
  Oligonucleotide primer for the detection of SNP TSC0043614
aagatgatttta

SEQ ID NO: 344559 - DNA, 12 bp, Artificial Sequence
  Oligonucleotide primer for the detection of SNP TSC0043614
aagacgatttta

SEQ ID NO: 344560 - DNA, 12 bp, Artificial Sequence
  Oligonucleotide primer for the detection of SNP TSC0043615
aacctcaaactc

SEQ ID NO: 344561 - DNA, 12 bp, Artificial Sequence
  Oligonucleotide primer for the detection of SNP TSC0043615
aacctcgaactc

SEQ ID NO: 344562 - DNA, 12 bp, Artificial Sequence
  Oligonucleotide primer for the detection of SNP TSC0043615
tattagggttta

SEQ ID NO: 344563 - DNA, 12 bp, Artificial Sequence
  Oligonucleotide primer for the detection of SNP TSC0043616
aaactcaaatct

SEQ ID NO: 344564 - DNA, 12 bp, Artificial Sequence
  Oligonucleotide primer for the detection of SNP TSC0043616
aaagtttacgtg

SEQ ID NO: 344565 - DNA, 12 bp, Artificial Sequence
  Oligonucleotide primer for the detection of SNP TSC0004852
acaacaacactt

SEQ ID NO: 344566 - DNA, 12 bp, Artificial Sequence
  Oligonucleotide primer for the detection of SNP TSC0004852
attgttatatga

SEQ ID NO: 344567 - DNA, 12 bp, Artificial Sequence
  Oligonucleotide primer for the detection of SNP TSC0043618
cttttcctacaa

SEQ ID NO: 344568 - DNA, 12 bp, Artificial Sequence
  Oligonucleotide primer for the detection of SNP TSC0043618
cataattaaaaa

SEQ ID NO: 344569 - DNA, 12 bp, Artificial Sequence
  Oligonucleotide primer for the detection of SNP TSC0005919
ataaaactcact

SEQ ID NO: 344570 - DNA, 12 bp, Artificial Sequence
  Oligonucleotide primer for the detection of SNP TSC0005919
tttgatagaatg

SEQ ID NO: 344571 - DNA, 12 bp, Artificial Sequence
  Oligonucleotide primer for the detection of SNP TSC0005919
cttaataaaata

SEQ ID NO: 344572 - DNA, 12 bp, Artificial Sequence
  Oligonucleotide primer for the detection of SNP TSC0005919
ataaaatttatt

SEQ ID NO: 344573 - DNA, 12 bp, Artificial Sequence
  Oligonucleotide primer for the detection of SNP TSC0043620
cacacccaacta

SEQ ID NO: 344574 - DNA, 12 bp, Artificial Sequence
  Oligonucleotide primer for the detection of SNP TSC0043620
cacgcccaacta

SEQ ID NO: 344575 - DNA, 12 bp, Artificial Sequence
  Oligonucleotide primer for the detection of SNP TSC0043620
tacgtttagtta

SEQ ID NO: 344576 - DNA, 12 bp, Artificial Sequence
  Oligonucleotide primer for the detection of SNP TSC0043622
tgttattaatat

SEQ ID NO: 344577 - DNA, 12 bp, Artificial Sequence
  Oligonucleotide primer for the detection of SNP TSC0043622
tgttattaatac

SEQ ID NO: 344578 - DNA, 12 bp, Artificial Sequence
  Oligonucleotide primer for the detection of SNP TSC0043622
atatcattaaca

SEQ ID NO: 344579 - DNA, 12 bp, Artificial Sequence
  Oligonucleotide primer for the detection of SNP TSC0043622
agaaggataaaa

SEQ ID NO: 344580 - DNA, 12 bp, Artificial Sequence
  Oligonucleotide primer for the detection of SNP TSC0043623
atgaatttttag

SEQ ID NO: 344581 - DNA, 12 bp, Artificial Sequence
  Oligonucleotide primer for the detection of SNP TSC0043623
ataaatcttcaa

SEQ ID NO: 344582 - DNA, 12 bp, Artificial Sequence
  Oligonucleotide primer for the detection of SNP TSC0043623
aggagaaaaaaa

SEQ ID NO: 344583 - DNA, 12 bp, Artificial Sequence
  Oligonucleotide primer for the detection of SNP TSC0043624
atagaatttaag

SEQ ID NO: 344584 - DNA, 12 bp, Artificial Sequence
  Oligonucleotide primer for the detection of SNP TSC0004550
ttatattaccaa

SEQ ID NO: 344585 - DNA, 12 bp, Artificial Sequence
  Oligonucleotide primer for the detection of SNP TSC0004550
ttttttttccta

SEQ ID NO: 344586 - DNA, 12 bp, Artificial Sequence
  Oligonucleotide primer for the detection of SNP TSC0043627
atcacttaaaca

SEQ ID NO: 344587 - DNA, 12 bp, Artificial Sequence
  Oligonucleotide primer for the detection of SNP TSC0043627
atcgcttaaaca

SEQ ID NO: 344588 - DNA, 12 bp, Artificial Sequence
  Oligonucleotide primer for the detection of SNP TSC0043627
acctccacctac

SEQ ID NO: 344589 - DNA, 12 bp, Artificial Sequence
  Oligonucleotide primer for the detection of SNP TSC0043627
attgtttgaata

SEQ ID NO: 344590 - DNA, 12 bp, Artificial Sequence
  Oligonucleotide primer for the detection of SNP TSC0043627
atcgtttgaata

SEQ ID NO: 344591 - DNA, 12 bp, Artificial Sequence
  Oligonucleotide primer for the detection of SNP TSC0043628
acctctattcca

SEQ ID NO: 344592 - DNA, 12 bp, Artificial Sequence
  Oligonucleotide primer for the detection of SNP TSC0043628
gggaattgtgtg

SEQ ID NO: 344593 - DNA, 12 bp, Artificial Sequence
  Oligonucleotide primer for the detection of SNP TSC0043629
aaatacttacca

SEQ ID NO: 344594 - DNA, 12 bp, Artificial Sequence
  Oligonucleotide primer for the detection of SNP TSC0043629
atttttaggttc

SEQ ID NO: 344595 - DNA, 12 bp, Artificial Sequence
  Oligonucleotide primer for the detection of SNP TSC0043629
acccccaaaccc

SEQ ID NO: 344596 - DNA, 12 bp, Artificial Sequence
  Oligonucleotide primer for the detection of SNP TSC0043629
tgagtatttgtt

SEQ ID NO: 344597 - DNA, 12 bp, Artificial Sequence
  Oligonucleotide primer for the detection of SNP TSC0043631
tttaaaggtttt

SEQ ID NO: 344598 - DNA, 12 bp, Artificial Sequence
  Oligonucleotide primer for the detection of SNP TSC0043631
ctcaaaaacccc

SEQ ID NO: 344599 - DNA, 12 bp, Artificial Sequence
  Oligonucleotide primer for the detection of SNP TSC0043631
gaagtaggaata

SEQ ID NO: 344600 - DNA, 12 bp, Artificial Sequence
  Oligonucleotide primer for the detection of SNP TSC0043632
ttttaactatta

SEQ ID NO: 344601 - DNA, 12 bp, Artificial Sequence
  Oligonucleotide primer for the detection of SNP TSC0043632
ttttaattatta

SEQ ID NO: 344602 - DNA, 12 bp, Artificial Sequence
  Oligonucleotide primer for the detection of SNP TSC0043633
aaatcataaata

SEQ ID NO: 344603 - DNA, 12 bp, Artificial Sequence
  Oligonucleotide primer for the detection of SNP TSC0043633
atttattggttg

SEQ ID NO: 344604 - DNA, 12 bp, Artificial Sequence
  Oligonucleotide primer for the detection of SNP TSC0043633
atccactaacta

SEQ ID NO: 344605 - DNA, 12 bp, Artificial Sequence
  Oligonucleotide primer for the detection of SNP TSC0043633
aagttatgagta

SEQ ID NO: 344606 - DNA, 12 bp, Artificial Sequence
  Oligonucleotide primer for the detection of SNP TSC0043634
atattcacttta

SEQ ID NO: 344607 - DNA, 12 bp, Artificial Sequence
  Oligonucleotide primer for the detection of SNP TSC0043634
ttatgtattttc

SEQ ID NO: 344608 - DNA, 12 bp, Artificial Sequence
  Oligonucleotide primer for the detection of SNP TSC0043634
tcatacattttc

SEQ ID NO: 344609 - DNA, 12 bp, Artificial Sequence
  Oligonucleotide primer for the detection of SNP TSC0043634
atatttattttg

SEQ ID NO: 344610 - DNA, 12 bp, Artificial Sequence
  Oligonucleotide primer for the detection of SNP TSC0043635
aaatatcaaaac

SEQ ID NO: 344611 - DNA, 12 bp, Artificial Sequence
  Oligonucleotide primer for the detection of SNP TSC0043635
tttgtatagagg

SEQ ID NO: 344612 - DNA, 12 bp, Artificial Sequence
  Oligonucleotide primer for the detection of SNP TSC0043636
aattacctccca

SEQ ID NO: 344613 - DNA, 12 bp, Artificial Sequence
  Oligonucleotide primer for the detection of SNP TSC0043636
gggagtgatttg

SEQ ID NO: 344614 - DNA, 12 bp, Artificial Sequence
  Oligonucleotide primer for the detection of SNP TSC0043637
aacatatactac

SEQ ID NO: 344615 - DNA, 12 bp, Artificial Sequence
  Oligonucleotide primer for the detection of SNP TSC0043637
taagagatttta

SEQ ID NO: 344616 - DNA, 12 bp, Artificial Sequence
  Oligonucleotide primer for the detection of SNP TSC0043639
tcacatcacact

SEQ ID NO: 344617 - DNA, 12 bp, Artificial Sequence
  Oligonucleotide primer for the detection of SNP TSC0043639
tcgcatcacact

SEQ ID NO: 344618 - DNA, 12 bp, Artificial Sequence
  Oligonucleotide primer for the detection of SNP TSC0043639
ttgttagtggag

SEQ ID NO: 344619 - DNA, 12 bp, Artificial Sequence
  Oligonucleotide primer for the detection of SNP TSC0006871
tttttttggatg

SEQ ID NO: 344620 - DNA, 12 bp, Artificial Sequence
  Oligonucleotide primer for the detection of SNP TSC0006871
gaggtgtggttg

SEQ ID NO: 344621 - DNA, 12 bp, Artificial Sequence
  Oligonucleotide primer for the detection of SNP TSC0043642
gagaattagggt

SEQ ID NO: 344622 - DNA, 12 bp, Artificial Sequence
  Oligonucleotide primer for the detection of SNP TSC0043643
accctaaatact

SEQ ID NO: 344623 - DNA, 12 bp, Artificial Sequence
  Oligonucleotide primer for the detection of SNP TSC0043643
ggaaaggtagta

SEQ ID NO: 344624 - DNA, 12 bp, Artificial Sequence
  Oligonucleotide primer for the detection of SNP TSC0043643
attttggatgtt

SEQ ID NO: 344625 - DNA, 12 bp, Artificial Sequence
  Oligonucleotide primer for the detection of SNP TSC0004576
cacaccacaaca

SEQ ID NO: 344626 - DNA, 12 bp, Artificial Sequence
  Oligonucleotide primer for the detection of SNP TSC0004576
cacaccacgaca

SEQ ID NO: 344627 - DNA, 12 bp, Artificial Sequence
  Oligonucleotide primer for the detection of SNP TSC0004576
cacgccacaaca

SEQ ID NO: 344628 - DNA, 12 bp, Artificial Sequence
  Oligonucleotide primer for the detection of SNP TSC0004576
cgcaccacaaca

SEQ ID NO: 344629 - DNA, 12 bp, Artificial Sequence
  Oligonucleotide primer for the detection of SNP TSC0004576
cacgccacgaca

SEQ ID NO: 344630 - DNA, 12 bp, Artificial Sequence
  Oligonucleotide primer for the detection of SNP TSC0004576
cgcaccacgaca

SEQ ID NO: 344631 - DNA, 12 bp, Artificial Sequence
  Oligonucleotide primer for the detection of SNP TSC0004576
cgcgccacaaca

SEQ ID NO: 344632 - DNA, 12 bp, Artificial Sequence
  Oligonucleotide primer for the detection of SNP TSC0004576
cgcgccacgaca

SEQ ID NO: 344633 - DNA, 12 bp, Artificial Sequence
  Oligonucleotide primer for the detection of SNP TSC0004576
ttgtgttatggt

SEQ ID NO: 344634 - DNA, 12 bp, Artificial Sequence
  Oligonucleotide primer for the detection of SNP TSC0004576
tcgtgttatggt

SEQ ID NO: 344635 - DNA, 12 bp, Artificial Sequence
  Oligonucleotide primer for the detection of SNP TSC0004576
ttgcgttatggt

SEQ ID NO: 344636 - DNA, 12 bp, Artificial Sequence
  Oligonucleotide primer for the detection of SNP TSC0004576
ttgtgttacggt

SEQ ID NO: 344637 - DNA, 12 bp, Artificial Sequence
  Oligonucleotide primer for the detection of SNP TSC0004576
tcgcgttatggt

SEQ ID NO: 344638 - DNA, 12 bp, Artificial Sequence
  Oligonucleotide primer for the detection of SNP TSC0004576
tcgtgttacggt

SEQ ID NO: 344639 - DNA, 12 bp, Artificial Sequence
  Oligonucleotide primer for the detection of SNP TSC0004576
ttgcgttacggt

SEQ ID NO: 344640 - DNA, 12 bp, Artificial Sequence
  Oligonucleotide primer for the detection of SNP TSC0004576
tcgcgttacggt

SEQ ID NO: 344641 - DNA, 12 bp, Artificial Sequence
  Oligonucleotide primer for the detection of SNP TSC0004577
atcctaacaacc

SEQ ID NO: 344642 - DNA, 12 bp, Artificial Sequence
  Oligonucleotide primer for the detection of SNP TSC0004577
taagtaattttg

SEQ ID NO: 344643 - DNA, 12 bp, Artificial Sequence
  Oligonucleotide primer for the detection of SNP TSC0004577
caaacaatttta

SEQ ID NO: 344644 - DNA, 12 bp, Artificial Sequence
  Oligonucleotide primer for the detection of SNP TSC0004577
attttgatagtt

SEQ ID NO: 344645 - DNA, 12 bp, Artificial Sequence
  Oligonucleotide primer for the detection of SNP TSC0043644
caaactcacaac

SEQ ID NO: 344646 - DNA, 12 bp, Artificial Sequence
  Oligonucleotide primer for the detection of SNP TSC0043644
ttaaatttttgt

SEQ ID NO: 344647 - DNA, 12 bp, Artificial Sequence
  Oligonucleotide primer for the detection of SNP TSC0043644
ttaaatttttgc

SEQ ID NO: 344648 - DNA, 12 bp, Artificial Sequence
  Oligonucleotide primer for the detection of SNP TSC0043644
ttaaattcctac

SEQ ID NO: 344649 - DNA, 12 bp, Artificial Sequence
  Oligonucleotide primer for the detection of SNP TSC0043644
aggtttatagtt

SEQ ID NO: 344650 - DNA, 12 bp, Artificial Sequence
  Oligonucleotide primer for the detection of SNP TSC0043645
aaaattactata

SEQ ID NO: 344651 - DNA, 12 bp, Artificial Sequence
  Oligonucleotide primer for the detection of SNP TSC0043645
aataaagagaat

SEQ ID NO: 344652 - DNA, 12 bp, Artificial Sequence
  Oligonucleotide primer for the detection of SNP TSC0043645
aagttattgtgt

SEQ ID NO: 344653 - DNA, 12 bp, Artificial Sequence
  Oligonucleotide primer for the detection of SNP TSC0043646
gaaataagttta

SEQ ID NO: 344654 - DNA, 12 bp, Artificial Sequence
  Oligonucleotide primer for the detection of SNP TSC0043647
ggtaaaagtggt

SEQ ID NO: 344655 - DNA, 12 bp, Artificial Sequence
  Oligonucleotide primer for the detection of SNP TSC0043647
aatggttaatta

SEQ ID NO: 344656 - DNA, 12 bp, Artificial Sequence
  Oligonucleotide primer for the detection of SNP TSC0043648
ttgttgttatat

SEQ ID NO: 344657 - DNA, 12 bp, Artificial Sequence
  Oligonucleotide primer for the detection of SNP TSC0043648
ttgtcgttatat

SEQ ID NO: 344658 - DNA, 12 bp, Artificial Sequence
  Oligonucleotide primer for the detection of SNP TSC0043648
aggtgaaaggta

SEQ ID NO: 344659 - DNA, 12 bp, Artificial Sequence
  Oligonucleotide primer for the detection of SNP TSC0043651
ccttcctaacct

SEQ ID NO: 344660 - DNA, 12 bp, Artificial Sequence
  Oligonucleotide primer for the detection of SNP TSC0043651
tagaaggggttg

SEQ ID NO: 344661 - DNA, 12 bp, Artificial Sequence
  Oligonucleotide primer for the detection of SNP TSC0043651
caaaaaaaacta

SEQ ID NO: 344662 - DNA, 12 bp, Artificial Sequence
  Oligonucleotide primer for the detection of SNP TSC0043652
cttcaacaaaac

SEQ ID NO: 344663 - DNA, 12 bp, Artificial Sequence
  Oligonucleotide primer for the detection of SNP TSC0043652
aagtattggttt

SEQ ID NO: 344664 - DNA, 12 bp, Artificial Sequence
  Oligonucleotide primer for the detection of SNP TSC0043652
aaacattaactt

SEQ ID NO: 344665 - DNA, 12 bp, Artificial Sequence
  Oligonucleotide primer for the detection of SNP TSC0043653
aatttttttata

SEQ ID NO: 344666 - DNA, 12 bp, Artificial Sequence
  Oligonucleotide primer for the detection of SNP TSC0043653
ggtttttttgtg

SEQ ID NO: 344667 - DNA, 12 bp, Artificial Sequence
  Oligonucleotide primer for the detection of SNP TSC0043654
accacccttaaa

SEQ ID NO: 344668 - DNA, 12 bp, Artificial Sequence
  Oligonucleotide primer for the detection of SNP TSC0043654
tatggcggaagg

SEQ ID NO: 344669 - DNA, 12 bp, Artificial Sequence
  Oligonucleotide primer for the detection of SNP TSC0043654
cataacgaaaaa

SEQ ID NO: 344670 - DNA, 12 bp, Artificial Sequence
  Oligonucleotide primer for the detection of SNP TSC0043655
atatcacctatt

SEQ ID NO: 344671 - DNA, 12 bp, Artificial Sequence
  Oligonucleotide primer for the detection of SNP TSC0006941
acttacctaaat

SEQ ID NO: 344672 - DNA, 12 bp, Artificial Sequence
  Oligonucleotide primer for the detection of SNP TSC0006941
tgaaaagattaa

SEQ ID NO: 344673 - DNA, 12 bp, Artificial Sequence
  Oligonucleotide primer for the detection of SNP TSC0043656
aaatcttaacac

SEQ ID NO: 344674 - DNA, 12 bp, Artificial Sequence
  Oligonucleotide primer for the detection of SNP TSC0043656
taatagttaaag

SEQ ID NO: 344675 - DNA, 12 bp, Artificial Sequence
  Oligonucleotide primer for the detection of SNP TSC0043657
ttaaaaattatt

SEQ ID NO: 344676 - DNA, 12 bp, Artificial Sequence
  Oligonucleotide primer for the detection of SNP TSC0043657
cattaaaaacca

SEQ ID NO: 344677 - DNA, 12 bp, Artificial Sequence
  Oligonucleotide primer for the detection of SNP TSC0043657
agataaattaag

SEQ ID NO: 344678 - DNA, 12 bp, Artificial Sequence
  Oligonucleotide primer for the detection of SNP TSC0043659
tcacatttttat

SEQ ID NO: 344679 - DNA, 12 bp, Artificial Sequence
  Oligonucleotide primer for the detection of SNP TSC0043659
aataaatttttc

SEQ ID NO: 344680 - DNA, 12 bp, Artificial Sequence
  Oligonucleotide primer for the detection of SNP TSC0043663
taataataacac

SEQ ID NO: 344681 - DNA, 12 bp, Artificial Sequence
  Oligonucleotide primer for the detection of SNP TSC0043663
gaggtttgtttg

SEQ ID NO: 344682 - DNA, 12 bp, Artificial Sequence
  Oligonucleotide primer for the detection of SNP TSC0043663
tggtagtgatat

SEQ ID NO: 344683 - DNA, 12 bp, Artificial Sequence
  Oligonucleotide primer for the detection of SNP TSC0043664
tccaataactaa

SEQ ID NO: 344684 - DNA, 12 bp, Artificial Sequence
  Oligonucleotide primer for the detection of SNP TSC0043664
gggtatgaaagt

SEQ ID NO: 344685 - DNA, 12 bp, Artificial Sequence
  Oligonucleotide primer for the detection of SNP TSC0043664
aaacataaaaac

SEQ ID NO: 344686 - DNA, 12 bp, Artificial Sequence
  Oligonucleotide primer for the detection of SNP TSC0043664
tttaatggttgg

SEQ ID NO: 344687 - DNA, 12 bp, Artificial Sequence
  Oligonucleotide primer for the detection of SNP TSC0043668
ctataaaattac

SEQ ID NO: 344688 - DNA, 12 bp, Artificial Sequence
  Oligonucleotide primer for the detection of SNP TSC0043668
accttcatctac

SEQ ID NO: 344689 - DNA, 12 bp, Artificial Sequence
  Oligonucleotide primer for the detection of SNP TSC0043668
ttatgagattat

SEQ ID NO: 344690 - DNA, 12 bp, Artificial Sequence
  Oligonucleotide primer for the detection of SNP TSC0043669
tatttcttttaa

SEQ ID NO: 344691 - DNA, 12 bp, Artificial Sequence
  Oligonucleotide primer for the detection of SNP TSC0043669
agtatggagtaa

SEQ ID NO: 344692 - DNA, 12 bp, Artificial Sequence
  Oligonucleotide primer for the detection of SNP TSC0043672
cactaatcaaac

SEQ ID NO: 344693 - DNA, 12 bp, Artificial Sequence
  Oligonucleotide primer for the detection of SNP TSC0043672
cgtgttattatg

SEQ ID NO: 344694 - DNA, 12 bp, Artificial Sequence
  Oligonucleotide primer for the detection of SNP TSC0043672
catactatcata

SEQ ID NO: 344695 - DNA, 12 bp, Artificial Sequence
  Oligonucleotide primer for the detection of SNP TSC0043672
cgtactatcata

SEQ ID NO: 344696 - DNA, 12 bp, Artificial Sequence
  Oligonucleotide primer for the detection of SNP TSC0043672
tattgattaaat

SEQ ID NO: 344697 - DNA, 12 bp, Artificial Sequence
  Oligonucleotide primer for the detection of SNP TSC0005067
aaaaataaccgc

SEQ ID NO: 344698 - DNA, 12 bp, Artificial Sequence
  Oligonucleotide primer for the detection of SNP TSC0005067
tgtgatagtatg

SEQ ID NO: 344699 - DNA, 12 bp, Artificial Sequence
  Oligonucleotide primer for the detection of SNP TSC0043673
tcccacatatta

SEQ ID NO: 344700 - DNA, 12 bp, Artificial Sequence
  Oligonucleotide primer for the detection of SNP TSC0043673
tagtggttattt

SEQ ID NO: 344701 - DNA, 12 bp, Artificial Sequence
  Oligonucleotide primer for the detection of SNP TSC0043673
tagcggttattt

SEQ ID NO: 344702 - DNA, 12 bp, Artificial Sequence
  Oligonucleotide primer for the detection of SNP TSC0043673
tataacaattac

SEQ ID NO: 344703 - DNA, 12 bp, Artificial Sequence
  Oligonucleotide primer for the detection of SNP TSC0043673
tataacgattac

SEQ ID NO: 344704 - DNA, 12 bp, Artificial Sequence
  Oligonucleotide primer for the detection of SNP TSC0043675
ctcaattaccat

SEQ ID NO: 344705 - DNA, 12 bp, Artificial Sequence
  Oligonucleotide primer for the detection of SNP TSC0043675
agaaatttaaaa

SEQ ID NO: 344706 - DNA, 12 bp, Artificial Sequence
  Oligonucleotide primer for the detection of SNP TSC0043679
caaacatatttt

SEQ ID NO: 344707 - DNA, 12 bp, Artificial Sequence
  Oligonucleotide primer for the detection of SNP TSC0043679
tgaattagagat

SEQ ID NO: 344708 - DNA, 12 bp, Artificial Sequence
  Oligonucleotide primer for the detection of SNP TSC0043680
atatatctctat

SEQ ID NO: 344709 - DNA, 12 bp, Artificial Sequence
  Oligonucleotide primer for the detection of SNP TSC0043680
gggaagggagaa

SEQ ID NO: 344710 - DNA, 12 bp, Artificial Sequence
  Oligonucleotide primer for the detection of SNP TSC0043681
aaaactccatct

SEQ ID NO: 344711 - DNA, 12 bp, Artificial Sequence
  Oligonucleotide primer for the detection of SNP TSC0043681
aaaactccgtct

SEQ ID NO: 344712 - DNA, 12 bp, Artificial Sequence
  Oligonucleotide primer for the detection of SNP TSC0043681
gaaaaattagag

SEQ ID NO: 344713 - DNA, 12 bp, Artificial Sequence
  Oligonucleotide primer for the detection of SNP TSC0043682
ataatcacacat

SEQ ID NO: 344714 - DNA, 12 bp, Artificial Sequence
  Oligonucleotide primer for the detection of SNP TSC0043682
ataatcacacgt

SEQ ID NO: 344715 - DNA, 12 bp, Artificial Sequence
  Oligonucleotide primer for the detection of SNP TSC0043682
atatatgtggta

SEQ ID NO: 344716 - DNA, 12 bp, Artificial Sequence
  Oligonucleotide primer for the detection of SNP TSC0043682
atatatataaca

SEQ ID NO: 344717 - DNA, 12 bp, Artificial Sequence
  Oligonucleotide primer for the detection of SNP TSC0043682
atgattatatgt

SEQ ID NO: 344718 - DNA, 12 bp, Artificial Sequence
  Oligonucleotide primer for the detection of SNP TSC0043682
atgattatacgt

SEQ ID NO: 344719 - DNA, 12 bp, Artificial Sequence
  Oligonucleotide primer for the detection of SNP TSC0043684
aaactactatac

SEQ ID NO: 344720 - DNA, 12 bp, Artificial Sequence
  Oligonucleotide primer for the detection of SNP TSC0043684
tttgttttgtaa

SEQ ID NO: 344721 - DNA, 12 bp, Artificial Sequence
  Oligonucleotide primer for the detection of SNP TSC0043684
ttcgttttgtaa

SEQ ID NO: 344722 - DNA, 12 bp, Artificial Sequence
  Oligonucleotide primer for the detection of SNP TSC0043685
taccatcaactc

SEQ ID NO: 344723 - DNA, 12 bp, Artificial Sequence
  Oligonucleotide primer for the detection of SNP TSC0043686
attccataaata

SEQ ID NO: 344724 - DNA, 12 bp, Artificial Sequence
  Oligonucleotide primer for the detection of SNP TSC0043686
tgtgggttttta

SEQ ID NO: 344725 - DNA, 12 bp, Artificial Sequence
  Oligonucleotide primer for the detection of SNP TSC0043686
tataaaccctta

SEQ ID NO: 344726 - DNA, 12 bp, Artificial Sequence
  Oligonucleotide primer for the detection of SNP TSC0043686
tattttataagt

SEQ ID NO: 344727 - DNA, 12 bp, Artificial Sequence
  Oligonucleotide primer for the detection of SNP TSC0043687
attccctcaaac

SEQ ID NO: 344728 - DNA, 12 bp, Artificial Sequence
  Oligonucleotide primer for the detection of SNP TSC0043688
taatttaaattt

SEQ ID NO: 344729 - DNA, 12 bp, Artificial Sequence
  Oligonucleotide primer for the detection of SNP TSC0043688
ttaataggataa

SEQ ID NO: 344730 - DNA, 12 bp, Artificial Sequence
  Oligonucleotide primer for the detection of SNP TSC0043689
atactaaatctc

SEQ ID NO: 344731 - DNA, 12 bp, Artificial Sequence
  Oligonucleotide primer for the detection of SNP TSC0043690
aacattaattac

SEQ ID NO: 344732 - DNA, 12 bp, Artificial Sequence
  Oligonucleotide primer for the detection of SNP TSC0043690
gttgataagaga

SEQ ID NO: 344733 - DNA, 12 bp, Artificial Sequence
  Oligonucleotide primer for the detection of SNP TSC0010379
cttaacctaaaa

SEQ ID NO: 344734 - DNA, 12 bp, Artificial Sequence
  Oligonucleotide primer for the detection of SNP TSC0010379
tgatgtggttgt

SEQ ID NO: 344735 - DNA, 12 bp, Artificial Sequence
  Oligonucleotide primer for the detection of SNP TSC0010379
taatataactat

SEQ ID NO: 344736 - DNA, 12 bp, Artificial Sequence
  Oligonucleotide primer for the detection of SNP TSC0010379
tttgatttgaaa

SEQ ID NO: 344737 - DNA, 12 bp, Artificial Sequence
  Oligonucleotide primer for the detection of SNP TSC0043691
ccaaaatcacac

SEQ ID NO: 344738 - DNA, 12 bp, Artificial Sequence
  Oligonucleotide primer for the detection of SNP TSC0043691
ccaaaatcgcac

SEQ ID NO: 344739 - DNA, 12 bp, Artificial Sequence
  Oligonucleotide primer for the detection of SNP TSC0043691
ccgaaatcacac

SEQ ID NO: 344740 - DNA, 12 bp, Artificial Sequence
  Oligonucleotide primer for the detection of SNP TSC0043691
ccgaaatcgcac

SEQ ID NO: 344741 - DNA, 12 bp, Artificial Sequence
  Oligonukleotid-Primer
gttggagtgtaa

SEQ ID NO: 344742 - DNA, 12 bp, Artificial Sequence
  Oligonucleotide primer for the detection of SNP TSC0043692
tatcaataactt

SEQ ID NO: 344743 - DNA, 12 bp, Artificial Sequence
  Oligonucleotide primer for the detection of SNP TSC0043692
gatttgtatagg

SEQ ID NO: 344744 - DNA, 12 bp, Artificial Sequence
  Oligonucleotide primer for the detection of SNP TSC0005689
tccaatacccta

SEQ ID NO: 344745 - DNA, 12 bp, Artificial Sequence
  Oligonukleotid-Primer
gttttgagtttt

SEQ ID NO: 344746 - DNA, 12 bp, Artificial Sequence
  Oligonucleotide primer for the detection of SNP TSC0005689
atcctaaactct

SEQ ID NO: 344747 - DNA, 12 bp, Artificial Sequence
  Oligonucleotide primer for the detection of SNP TSC0005689
tttagtgttttg

SEQ ID NO: 344748 - DNA, 12 bp, Artificial Sequence
  Oligonucleotide primer for the detection of SNP TSC0005690
caaaccaaaacc

SEQ ID NO: 344749 - DNA, 12 bp, Artificial Sequence
  Oligonukleotid-Primer
tcacaaatacct

SEQ ID NO: 344750 - DNA, 12 bp, Artificial Sequence
  Oligonucleotide primer for the detection of SNP TSC0005691
tttagttatgta

SEQ ID NO: 344751 - DNA, 12 bp, Artificial Sequence
  Oligonucleotide primer for the detection of SNP TSC0005691
tttaaccataca

SEQ ID NO: 344752 - DNA, 12 bp, Artificial Sequence
  Oligonucleotide primer for the detection of SNP TSC0005691
taaatatttttc

SEQ ID NO: 344753 - DNA, 12 bp, Artificial Sequence
  Oligonucleotide primer for the detection of SNP TSC0005692
tattcctacccc

SEQ ID NO: 344754 - DNA, 12 bp, Artificial Sequence
  Oligonucleotide primer for the detection of SNP TSC0043694
tagggagtaagt

SEQ ID NO: 344755 - DNA, 12 bp, Artificial Sequence
  Oligonucleotide primer for the detection of SNP TSC0043694
gagttaagagat

SEQ ID NO: 344756 - DNA, 12 bp, Artificial Sequence
  Oligonucleotide primer for the detection of SNP TSC0043695
cacctaaccatc

SEQ ID NO: 344757 - DNA, 12 bp, Artificial Sequence
  Oligonucleotide primer for the detection of SNP TSC0043695
cacctaaccgtc

SEQ ID NO: 344758 - DNA, 12 bp, Artificial Sequence
  Oligonucleotide primer for the detection of SNP TSC0043695
gtagttaggagt

SEQ ID NO: 344759 - DNA, 12 bp, Artificial Sequence
  Oligonucleotide primer for the detection of SNP TSC0043695
ataaccaaaaat

SEQ ID NO: 344760 - DNA, 12 bp, Artificial Sequence
  Oligonucleotide primer for the detection of SNP TSC0043695
tatttgattgtt

SEQ ID NO: 344761 - DNA, 12 bp, Artificial Sequence
  Oligonucleotide primer for the detection of SNP TSC0043695
tatttgatcgtt

SEQ ID NO: 344762 - DNA, 12 bp, Artificial Sequence
  Oligonucleotide primer for the detection of SNP TSC0009010
aaaatattatta

SEQ ID NO: 344763 - DNA, 12 bp, Artificial Sequence
  Oligonucleotide primer for the detection of SNP TSC0009010
tattaataataa

SEQ ID NO: 344764 - DNA, 12 bp, Artificial Sequence
  Oligonucleotide primer for the detection of SNP TSC0009010
tattaacaacaa

SEQ ID NO: 344765 - DNA, 12 bp, Artificial Sequence
  Oligonucleotide primer for the detection of SNP TSC0009010
atattattattc

SEQ ID NO: 344766 - DNA, 12 bp, Artificial Sequence
  Oligonucleotide primer for the detection of SNP TSC0043696
acctacttctac

SEQ ID NO: 344767 - DNA, 12 bp, Artificial Sequence
  Oligonucleotide primer for the detection of SNP TSC0043696
gtgagaatttta

SEQ ID NO: 344768 - DNA, 12 bp, Artificial Sequence
  Oligonucleotide primer for the detection of SNP TSC0043697
aacacatcatcc

SEQ ID NO: 344769 - DNA, 12 bp, Artificial Sequence
  Oligonucleotide primer for the detection of SNP TSC0043697
tgtttatttagt

SEQ ID NO: 344770 - DNA, 12 bp, Artificial Sequence
  Oligonucleotide primer for the detection of SNP TSC0043697
cttatccaacaa

SEQ ID NO: 344771 - DNA, 12 bp, Artificial Sequence
  Oligonucleotide primer for the detection of SNP TSC0043697
agtatattattt

SEQ ID NO: 344772 - DNA, 12 bp, Artificial Sequence
  Oligonucleotide primer for the detection of SNP TSC0043697
agtatattattc

SEQ ID NO: 344773 - DNA, 12 bp, Artificial Sequence
  Oligonucleotide primer for the detection of SNP TSC0043698
tggatttgttta

SEQ ID NO: 344774 - DNA, 12 bp, Artificial Sequence
  Oligonucleotide primer for the detection of SNP TSC0043698
taaatctactca

SEQ ID NO: 344775 - DNA, 12 bp, Artificial Sequence
  Oligonucleotide primer for the detection of SNP TSC0043698
gtaagatgagat

SEQ ID NO: 344776 - DNA, 12 bp, Artificial Sequence
  Oligonucleotide primer for the detection of SNP TSC0043702
tcattaattact

SEQ ID NO: 344777 - DNA, 12 bp, Artificial Sequence
  Oligonucleotide primer for the detection of SNP TSC0043703
ttggagtgtaat

SEQ ID NO: 344778 - DNA, 12 bp, Artificial Sequence
  Oligonucleotide primer for the detection of SNP TSC0043703
agttgagattgt

SEQ ID NO: 344779 - DNA, 12 bp, Artificial Sequence
  Oligonucleotide primer for the detection of SNP TSC0043703
agtcgagattgt

SEQ ID NO: 344780 - DNA, 12 bp, Artificial Sequence
  Oligonucleotide primer for the detection of SNP TSC0043703
agttgagatcgt

SEQ ID NO: 344781 - DNA, 12 bp, Artificial Sequence
  Oligonucleotide primer for the detection of SNP TSC0043703
agtcgagatcgt

SEQ ID NO: 344782 - DNA, 12 bp, Artificial Sequence
  Oligonucleotide primer for the detection of SNP TSC0043703
agttgagattgc

SEQ ID NO: 344783 - DNA, 12 bp, Artificial Sequence
  Oligonucleotide primer for the detection of SNP TSC0043703
agtcgagattgc

SEQ ID NO: 344784 - DNA, 12 bp, Artificial Sequence
  Oligonucleotide primer for the detection of SNP TSC0043703
agttgagatcgc

SEQ ID NO: 344785 - DNA, 12 bp, Artificial Sequence
  Oligonucleotide primer for the detection of SNP TSC0043703
agtcgagatcgc

SEQ ID NO: 344786 - DNA, 12 bp, Artificial Sequence
  Oligonucleotide primer for the detection of SNP TSC0043704
ctccatatcttc

SEQ ID NO: 344787 - DNA, 12 bp, Artificial Sequence
  Oligonucleotide primer for the detection of SNP TSC0043704
tgtaagtgagaa

SEQ ID NO: 344788 - DNA, 12 bp, Artificial Sequence
  Oligonucleotide primer for the detection of SNP TSC0043706
aaccaacactaa

SEQ ID NO: 344789 - DNA, 12 bp, Artificial Sequence
  Oligonucleotide primer for the detection of SNP TSC0043706
ttttttgcgtat

SEQ ID NO: 344790 - DNA, 12 bp, Artificial Sequence
  Oligonucleotide primer for the detection of SNP TSC0043708
ggtttgtaagtg

SEQ ID NO: 344791 - DNA, 12 bp, Artificial Sequence
  Oligonucleotide primer for the detection of SNP TSC0043708
atggtaataaat

SEQ ID NO: 344792 - DNA, 12 bp, Artificial Sequence
  Oligonucleotide primer for the detection of SNP TSC0043709
tattgtggttgt

SEQ ID NO: 344793 - DNA, 12 bp, Artificial Sequence
  Oligonucleotide primer for the detection of SNP TSC0043709
gtattaaatgag

SEQ ID NO: 344794 - DNA, 12 bp, Artificial Sequence
  Oligonucleotide primer for the detection of SNP TSC0043712
ttataaaaataa

SEQ ID NO: 344795 - DNA, 12 bp, Artificial Sequence
  Oligonucleotide primer for the detection of SNP TSC0043712
attcctccctaa

SEQ ID NO: 344796 - DNA, 12 bp, Artificial Sequence
  Oligonucleotide primer for the detection of SNP TSC0043712
tttgtaggaatg

SEQ ID NO: 344797 - DNA, 12 bp, Artificial Sequence
  Oligonucleotide primer for the detection of SNP TSC0043713
cctttatatatc

SEQ ID NO: 344798 - DNA, 12 bp, Artificial Sequence
  Oligonucleotide primer for the detection of SNP TSC0043713
gttaaattttac

SEQ ID NO: 344799 - DNA, 12 bp, Artificial Sequence
  Oligonucleotide primer for the detection of SNP TSC0043713
accaaattctac

SEQ ID NO: 344800 - DNA, 12 bp, Artificial Sequence
  Oligonucleotide primer for the detection of SNP TSC0043717
ccctaattccaa

SEQ ID NO: 344801 - DNA, 12 bp, Artificial Sequence
  Oligonucleotide primer for the detection of SNP TSC0043717
ttccccatctta

SEQ ID NO: 344802 - DNA, 12 bp, Artificial Sequence
  Oligonucleotide primer for the detection of SNP TSC0043717
ttagttttagtt

SEQ ID NO: 344803 - DNA, 12 bp, Artificial Sequence
  Oligonucleotide primer for the detection of SNP TSC0008719
atttatttatgt

SEQ ID NO: 344804 - DNA, 12 bp, Artificial Sequence
  Oligonucleotide primer for the detection of SNP TSC0008719
tatctattcata

SEQ ID NO: 344805 - DNA, 12 bp, Artificial Sequence
  Oligonucleotide primer for the detection of SNP TSC0008719
tgaaatgtggat

SEQ ID NO: 344806 - DNA, 12 bp, Artificial Sequence
  Oligonucleotide primer for the detection of SNP TSC0043718
tagattttttat

SEQ ID NO: 344807 - DNA, 12 bp, Artificial Sequence
  Oligonucleotide primer for the detection of SNP TSC0043718
caaactttctac

SEQ ID NO: 344808 - DNA, 12 bp, Artificial Sequence
  Oligonucleotide primer for the detection of SNP TSC0043718
gattgaagatga

SEQ ID NO: 344809 - DNA, 12 bp, Artificial Sequence
  Oligonucleotide primer for the detection of SNP TSC0043719
taggttttagtt

SEQ ID NO: 344810 - DNA, 12 bp, Artificial Sequence
  Oligonucleotide primer for the detection of SNP TSC0043719
acaaactccaac

SEQ ID NO: 344811 - DNA, 12 bp, Artificial Sequence
  Oligonucleotide primer for the detection of SNP TSC0043719
gagattaaagat

SEQ ID NO: 344812 - DNA, 12 bp, Artificial Sequence
  Oligonucleotide primer for the detection of SNP TSC0043719
gagattaaagac

SEQ ID NO: 344813 - DNA, 12 bp, Artificial Sequence
  Oligonucleotide primer for the detection of SNP TSC0009508
attattacctac

SEQ ID NO: 344814 - DNA, 12 bp, Artificial Sequence
  Oligonucleotide primer for the detection of SNP TSC0009508
aagggaaggtta

SEQ ID NO: 344815 - DNA, 12 bp, Artificial Sequence
  Oligonucleotide primer for the detection of SNP TSC0009509
actaacaatact

SEQ ID NO: 344816 - DNA, 12 bp, Artificial Sequence
  Oligonucleotide primer for the detection of SNP TSC0009509
aggtgaatttta

SEQ ID NO: 344817 - DNA, 12 bp, Artificial Sequence
  Oligonucleotide primer for the detection of SNP TSC0009510
actcataacaaa

SEQ ID NO: 344818 - DNA, 12 bp, Artificial Sequence
  Oligonucleotide primer for the detection of SNP TSC0009510
gtattttaaata

SEQ ID NO: 344819 - DNA, 12 bp, Artificial Sequence
  Oligonucleotide primer for the detection of SNP TSC0009510
atatttcaaaca

SEQ ID NO: 344820 - DNA, 12 bp, Artificial Sequence
  Oligonucleotide primer for the detection of SNP TSC0009510
ggtttataataa

SEQ ID NO: 344821 - DNA, 12 bp, Artificial Sequence
  Oligonucleotide primer for the detection of SNP TSC0009506
aacctaaaaatc

SEQ ID NO: 344822 - DNA, 12 bp, Artificial Sequence
  Oligonucleotide primer for the detection of SNP TSC0009506
atttgatgttaa

SEQ ID NO: 344823 - DNA, 12 bp, Artificial Sequence
  Oligonucleotide primer for the detection of SNP TSC0043720
ctaaaatcctta

SEQ ID NO: 344824 - DNA, 12 bp, Artificial Sequence
  Oligonucleotide primer for the detection of SNP TSC0043720
ttttgagaattt

SEQ ID NO: 344825 - DNA, 12 bp, Artificial Sequence
  Oligonucleotide primer for the detection of SNP TSC0043720
ctctaaaaaccc

SEQ ID NO: 344826 - DNA, 12 bp, Artificial Sequence
  Oligonucleotide primer for the detection of SNP TSC0043721
cctaaaatcctt

SEQ ID NO: 344827 - DNA, 12 bp, Artificial Sequence
  Oligonucleotide primer for the detection of SNP TSC0043721
gagaatttatga

SEQ ID NO: 344828 - DNA, 12 bp, Artificial Sequence
  Oligonucleotide primer for the detection of SNP TSC0043721
gagaatttacga

SEQ ID NO: 344829 - DNA, 12 bp, Artificial Sequence
  Oligonucleotide primer for the detection of SNP TSC0043722
attttcttctaa

SEQ ID NO: 344830 - DNA, 12 bp, Artificial Sequence
  Oligonucleotide primer for the detection of SNP TSC0043723
ttaccaaaaact

SEQ ID NO: 344831 - DNA, 12 bp, Artificial Sequence
  Oligonucleotide primer for the detection of SNP TSC0043725
aaaaaacctata

SEQ ID NO: 344832 - DNA, 12 bp, Artificial Sequence
  Oligonucleotide primer for the detection of SNP TSC0043725
gaagattttatt

SEQ ID NO: 344833 - DNA, 12 bp, Artificial Sequence
  Oligonucleotide primer for the detection of SNP TSC0043725
taaaaattttac

SEQ ID NO: 344834 - DNA, 12 bp, Artificial Sequence
  Oligonucleotide primer for the detection of SNP TSC0043725
aggagggtttgt

SEQ ID NO: 344835 - DNA, 12 bp, Artificial Sequence
  Oligonucleotide primer for the detection of SNP TSC0043727
aaacatctcatt

SEQ ID NO: 344836 - DNA, 12 bp, Artificial Sequence
  Oligonucleotide primer for the detection of SNP TSC0043727
tgtagataaggg

SEQ ID NO: 344837 - DNA, 12 bp, Artificial Sequence
  Oligonucleotide primer for the detection of SNP TSC0043727
cgtagataaggg

SEQ ID NO: 344838 - DNA, 12 bp, Artificial Sequence
  Oligonucleotide primer for the detection of SNP TSC0043728
atcatacctaac

SEQ ID NO: 344839 - DNA, 12 bp, Artificial Sequence
  Oligonucleotide primer for the detection of SNP TSC0043728
atcgtacctaac

SEQ ID NO: 344840 - DNA, 12 bp, Artificial Sequence
  Oligonucleotide primer for the detection of SNP TSC0043728
tatatttattaa

SEQ ID NO: 344841 - DNA, 12 bp, Artificial Sequence
  Oligonucleotide primer for the detection of SNP TSC0043728
tatacctattaa

SEQ ID NO: 344842 - DNA, 12 bp, Artificial Sequence
  Oligonukleotid-Primer
attgtatttggt

SEQ ID NO: 344843 - DNA, 12 bp, Artificial Sequence
  Oligonucleotide primer for the detection of SNP TSC0043728
atcgtatttggt

SEQ ID NO: 344844 - DNA, 12 bp, Artificial Sequence
  Oligonucleotide primer for the detection of SNP TSC0043729
acccacctatct

SEQ ID NO: 344845 - DNA, 12 bp, Artificial Sequence
  Oligonucleotide primer for the detection of SNP TSC0043730
tatcacccaaac

SEQ ID NO: 344846 - DNA, 12 bp, Artificial Sequence
  Oligonukleotid-Primer
attatatttgta

SEQ ID NO: 344847 - DNA, 12 bp, Artificial Sequence
  Oligonucleotide primer for the detection of SNP TSC0043730
atcacacctaca

SEQ ID NO: 344848 - DNA, 12 bp, Artificial Sequence
  Oligonucleotide primer for the detection of SNP TSC0043730
tgttatttagat

SEQ ID NO: 344849 - DNA, 12 bp, Artificial Sequence
  Oligonucleotide primer for the detection of SNP TSC0043733
gattgaaataaa

SEQ ID NO: 344850 - DNA, 12 bp, Artificial Sequence
  Oligonukleotid-Primer
gagttgtaattt

SEQ ID NO: 344851 - DNA, 12 bp, Artificial Sequence
  Oligonucleotide primer for the detection of SNP TSC0043734
aactacaatcta

SEQ ID NO: 344852 - DNA, 12 bp, Artificial Sequence
  Oligonucleotide primer for the detection of SNP TSC0043734
tgggaggtagga

SEQ ID NO: 344853 - DNA, 12 bp, Artificial Sequence
  Oligonucleotide primer for the detection of SNP TSC0010154
tccactaaaaaa

SEQ ID NO: 344854 - DNA, 12 bp, Artificial Sequence
  Oligonucleotide primer for the detection of SNP TSC0010154
gtagaagggatt

SEQ ID NO: 344855 - DNA, 12 bp, Artificial Sequence
  Oligonucleotide primer for the detection of SNP TSC0010154
tttattggagaa

SEQ ID NO: 344856 - DNA, 12 bp, Artificial Sequence
  Oligonucleotide primer for the detection of SNP TSC0043736
aactcccccata

SEQ ID NO: 344857 - DNA, 12 bp, Artificial Sequence
  Oligonucleotide primer for the detection of SNP TSC0043736
atcataaaaaca

SEQ ID NO: 344858 - DNA, 12 bp, Artificial Sequence
  Oligonucleotide primer for the detection of SNP TSC0043738
aaaattttatta

SEQ ID NO: 344859 - DNA, 12 bp, Artificial Sequence
  Oligonucleotide primer for the detection of SNP TSC0043738
cacaatccttta

SEQ ID NO: 344860 - DNA, 12 bp, Artificial Sequence
  Oligonucleotide primer for the detection of SNP TSC0043738
gaattttgttgt

SEQ ID NO: 344861 - DNA, 12 bp, Artificial Sequence
  Oligonucleotide primer for the detection of SNP TSC0043739
taatataaatac

SEQ ID NO: 344862 - DNA, 12 bp, Artificial Sequence
  Oligonucleotide primer for the detection of SNP TSC0043739
gttgttttgata

SEQ ID NO: 344863 - DNA, 12 bp, Artificial Sequence
  Oligonucleotide primer for the detection of SNP TSC0043740
actcatttttat

SEQ ID NO: 344864 - DNA, 12 bp, Artificial Sequence
  Oligonucleotide primer for the detection of SNP TSC0043741
aaacctacctcc

SEQ ID NO: 344865 - DNA, 12 bp, Artificial Sequence
  Oligonucleotide primer for the detection of SNP TSC0043742
aggatgttattg

SEQ ID NO: 344866 - DNA, 12 bp, Artificial Sequence
  Oligonucleotide primer for the detection of SNP TSC0043742
aaaatactatta

SEQ ID NO: 344867 - DNA, 12 bp, Artificial Sequence
  Oligonucleotide primer for the detection of SNP TSC0043742
tagtgagggaaa

SEQ ID NO: 344868 - DNA, 12 bp, Artificial Sequence
  Oligonucleotide primer for the detection of SNP TSC0043742
tagcgagggaaa

SEQ ID NO: 344869 - DNA, 12 bp, Artificial Sequence
  Oligonucleotide primer for the detection of SNP TSC0006881
ttataataaaaa

SEQ ID NO: 344870 - DNA, 12 bp, Artificial Sequence
  Oligonucleotide primer for the detection of SNP TSC0006881
tttaggttaaaa

SEQ ID NO: 344871 - DNA, 12 bp, Artificial Sequence
  Oligonucleotide primer for the detection of SNP TSC0006881
ttcaaatcaaaa

SEQ ID NO: 344872 - DNA, 12 bp, Artificial Sequence
  Oligonucleotide primer for the detection of SNP TSC0006881
ttgtgataagaa

SEQ ID NO: 344873 - DNA, 12 bp, Artificial Sequence
  Oligonucleotide primer for the detection of SNP TSC0043743
aaaatcaatctt

SEQ ID NO: 344874 - DNA, 12 bp, Artificial Sequence
  Oligonucleotide primer for the detection of SNP TSC0043743
tagtttattgag

SEQ ID NO: 344875 - DNA, 12 bp, Artificial Sequence
  Oligonucleotide primer for the detection of SNP TSC0043744
aaataatcttat

SEQ ID NO: 344876 - DNA, 12 bp, Artificial Sequence
  Oligonucleotide primer for the detection of SNP TSC0007471
agtgtaatgttg

SEQ ID NO: 344877 - DNA, 12 bp, Artificial Sequence
  Oligonucleotide primer for the detection of SNP TSC0007471
agcgtaatgttg

SEQ ID NO: 344878 - DNA, 12 bp, Artificial Sequence
  Oligonucleotide primer for the detection of SNP TSC0007471
aacacaatacta

SEQ ID NO: 344879 - DNA, 12 bp, Artificial Sequence
  Oligonucleotide primer for the detection of SNP TSC0007471
aacgcaatacta

SEQ ID NO: 344880 - DNA, 12 bp, Artificial Sequence
  Oligonucleotide primer for the detection of SNP TSC0007471
ttaaggtttaat

SEQ ID NO: 344881 - DNA, 12 bp, Artificial Sequence
  Oligonucleotide primer for the detection of SNP TSC0007472
accacaacatta

SEQ ID NO: 344882 - DNA, 12 bp, Artificial Sequence
  Oligonucleotide primer for the detection of SNP TSC0007472
accgcaacatta

SEQ ID NO: 344883 - DNA, 12 bp, Artificial Sequence
  Oligonucleotide primer for the detection of SNP TSC0007472
gaattggttttt

SEQ ID NO: 344884 - DNA, 12 bp, Artificial Sequence
  Oligonucleotide primer for the detection of SNP TSC0007472
aaactaatttct

SEQ ID NO: 344885 - DNA, 12 bp, Artificial Sequence
  Oligonucleotide primer for the detection of SNP TSC0007472
attgtagtattg

SEQ ID NO: 344886 - DNA, 12 bp, Artificial Sequence
  Oligonucleotide primer for the detection of SNP TSC0007472
atcgtagtattg

SEQ ID NO: 344887 - DNA, 12 bp, Artificial Sequence
  Oligonucleotide primer for the detection of SNP TSC0043747
atatctttcact

SEQ ID NO: 344888 - DNA, 12 bp, Artificial Sequence
  Oligonucleotide primer for the detection of SNP TSC0043747
ggagaaaatatg

SEQ ID NO: 344889 - DNA, 12 bp, Artificial Sequence
  Oligonucleotide primer for the detection of SNP TSC0043747
ggagaaaatacg

SEQ ID NO: 344890 - DNA, 12 bp, Artificial Sequence
  Oligonucleotide primer for the detection of SNP TSC0043747
aaaaaaaatacg

SEQ ID NO: 344891 - DNA, 12 bp, Artificial Sequence
  Oligonucleotide primer for the detection of SNP TSC0043751
gtatatttaata

SEQ ID NO: 344892 - DNA, 12 bp, Artificial Sequence
  Oligonucleotide primer for the detection of SNP TSC0043752
tattcactcatc

SEQ ID NO: 344893 - DNA, 12 bp, Artificial Sequence
  Oligonucleotide primer for the detection of SNP TSC0043752
aatattgaatta

SEQ ID NO: 344894 - DNA, 12 bp, Artificial Sequence
  Oligonucleotide primer for the detection of SNP TSC0043753
gtttagtagtta

SEQ ID NO: 344895 - DNA, 12 bp, Artificial Sequence
  Oligonucleotide primer for the detection of SNP TSC0043754
taacaaatacta

SEQ ID NO: 344896 - DNA, 12 bp, Artificial Sequence
  Oligonucleotide primer for the detection of SNP TSC0043754
agaggtttattt

SEQ ID NO: 344897 - DNA, 12 bp, Artificial Sequence
  Oligonucleotide primer for the detection of SNP TSC0043754
aaaactcactca

SEQ ID NO: 344898 - DNA, 12 bp, Artificial Sequence
  Oligonucleotide primer for the detection of SNP TSC0043754
agtaggtgttgt

SEQ ID NO: 344899 - DNA, 12 bp, Artificial Sequence
  Oligonucleotide primer for the detection of SNP TSC0043755
ttgtgtgtgcgt

SEQ ID NO: 344900 - DNA, 12 bp, Artificial Sequence
  Oligonucleotide primer for the detection of SNP TSC0043755
ttgtgcgtgcgt

SEQ ID NO: 344901 - DNA, 12 bp, Artificial Sequence
  Oligonucleotide primer for the detection of SNP TSC0043755
ctatacatacat

SEQ ID NO: 344902 - DNA, 12 bp, Artificial Sequence
  Oligonucleotide primer for the detection of SNP TSC0043755
ctatacatacgt

SEQ ID NO: 344903 - DNA, 12 bp, Artificial Sequence
  Oligonucleotide primer for the detection of SNP TSC0043755
ctatacgtacat

SEQ ID NO: 344904 - DNA, 12 bp, Artificial Sequence
  Oligonucleotide primer for the detection of SNP TSC0043755
ctatacgtacgt

SEQ ID NO: 344905 - DNA, 12 bp, Artificial Sequence
  Oligonucleotide primer for the detection of SNP TSC0043755
tatatacgtata

SEQ ID NO: 344906 - DNA, 12 bp, Artificial Sequence
  Oligonucleotide primer for the detection of SNP TSC0043756
tctcaactaaaa

SEQ ID NO: 344907 - DNA, 12 bp, Artificial Sequence
  Oligonucleotide primer for the detection of SNP TSC0043756
tctcgactaaaa

SEQ ID NO: 344908 - DNA, 12 bp, Artificial Sequence
  Oligonucleotide primer for the detection of SNP TSC0043756
tatcattttctc

SEQ ID NO: 344909 - DNA, 12 bp, Artificial Sequence
  Oligonucleotide primer for the detection of SNP TSC0043756
ttttttttggtt

SEQ ID NO: 344910 - DNA, 12 bp, Artificial Sequence
  Oligonucleotide primer for the detection of SNP TSC0043756
tttttttcggtt

SEQ ID NO: 344911 - DNA, 12 bp, Artificial Sequence
  Oligonucleotide primer for the detection of SNP TSC0043759
atgtatagattt

SEQ ID NO: 344912 - DNA, 12 bp, Artificial Sequence
  Oligonucleotide primer for the detection of SNP TSC0043759
atacacaaattt

SEQ ID NO: 344913 - DNA, 12 bp, Artificial Sequence
  Oligonucleotide primer for the detection of SNP TSC0043759
aaaggatagtaa

SEQ ID NO: 344914 - DNA, 12 bp, Artificial Sequence
  Oligonucleotide primer for the detection of SNP TSC0043760
tacattttaaat

SEQ ID NO: 344915 - DNA, 12 bp, Artificial Sequence
  Oligonucleotide primer for the detection of SNP TSC0043766
ctcttaataaac

SEQ ID NO: 344916 - DNA, 12 bp, Artificial Sequence
  Oligonucleotide primer for the detection of SNP TSC0043766
aaattattaatt

SEQ ID NO: 344917 - DNA, 12 bp, Artificial Sequence
  Oligonucleotide primer for the detection of SNP TSC0043766
tttttaataaat

SEQ ID NO: 344918 - DNA, 12 bp, Artificial Sequence
  Oligonucleotide primer for the detection of SNP TSC0043767
cctaataacaat

SEQ ID NO: 344919 - DNA, 12 bp, Artificial Sequence
  Oligonucleotide primer for the detection of SNP TSC0043767
gtaatttattta

SEQ ID NO: 344920 - DNA, 12 bp, Artificial Sequence
  Oligonucleotide primer for the detection of SNP TSC0043771
caaaaaaaataa

SEQ ID NO: 344921 - DNA, 12 bp, Artificial Sequence
  Oligonucleotide primer for the detection of SNP TSC0043771
tttatggttttt

SEQ ID NO: 344922 - DNA, 12 bp, Artificial Sequence
  Oligonucleotide primer for the detection of SNP TSC0043771
ctcataacccct

SEQ ID NO: 344923 - DNA, 12 bp, Artificial Sequence
  Oligonucleotide primer for the detection of SNP TSC0043771
taaaagaggtgg

SEQ ID NO: 344924 - DNA, 12 bp, Artificial Sequence
  Oligonucleotide primer for the detection of SNP TSC0043772
attttaaaatcc

SEQ ID NO: 344925 - DNA, 12 bp, Artificial Sequence
  Oligonucleotide primer for the detection of SNP TSC0043772
aaaaggagttat

SEQ ID NO: 344926 - DNA, 12 bp, Artificial Sequence
  Oligonucleotide primer for the detection of SNP TSC0043773
ctttttcgaaaa

SEQ ID NO: 344927 - DNA, 12 bp, Artificial Sequence
  Oligonucleotide primer for the detection of SNP TSC0043773
atattgagtttt

SEQ ID NO: 344928 - DNA, 12 bp, Artificial Sequence
  Oligonucleotide primer for the detection of SNP TSC0043773
atactaaatttt

SEQ ID NO: 344929 - DNA, 12 bp, Artificial Sequence
  Oligonucleotide primer for the detection of SNP TSC0043773
ttttttcgaaaa

SEQ ID NO: 344930 - DNA, 12 bp, Artificial Sequence
  Oligonucleotide primer for the detection of SNP TSC0043774
aaaaaatatatc

SEQ ID NO: 344931 - DNA, 12 bp, Artificial Sequence
  Oligonucleotide primer for the detection of SNP TSC0043774
tatagagaataa

SEQ ID NO: 344932 - DNA, 12 bp, Artificial Sequence
  Oligonucleotide primer for the detection of SNP TSC0043777
acttaaaaattt

SEQ ID NO: 344933 - DNA, 12 bp, Artificial Sequence
  Oligonucleotide primer for the detection of SNP TSC0043777
gaaatgagataa

SEQ ID NO: 344934 - DNA, 12 bp, Artificial Sequence
  Oligonucleotide primer for the detection of SNP TSC0043787
caattacacaaa

SEQ ID NO: 344935 - DNA, 12 bp, Artificial Sequence
  Oligonucleotide primer for the detection of SNP TSC0043787
caattacacgaa

SEQ ID NO: 344936 - DNA, 12 bp, Artificial Sequence
  Oligonucleotide primer for the detection of SNP TSC0043787
gttgtttttttc

SEQ ID NO: 344937 - DNA, 12 bp, Artificial Sequence
  Oligonucleotide primer for the detection of SNP TSC0043787
actatctctctc

SEQ ID NO: 344938 - DNA, 12 bp, Artificial Sequence
  Oligonucleotide primer for the detection of SNP TSC0043787
agtaattatatg

SEQ ID NO: 344939 - DNA, 12 bp, Artificial Sequence
  Oligonucleotide primer for the detection of SNP TSC0043787
agtaattatacg

SEQ ID NO: 344940 - DNA, 12 bp, Artificial Sequence
  Oligonucleotide primer for the detection of SNP TSC0043788
ctctaattcctc

SEQ ID NO: 344941 - DNA, 12 bp, Artificial Sequence
  Oligonucleotide primer for the detection of SNP TSC0043790
ttaaatcttaaa

SEQ ID NO: 344942 - DNA, 12 bp, Artificial Sequence
  Oligonucleotide primer for the detection of SNP TSC0043790
ggaggtttagag

SEQ ID NO: 344943 - DNA, 12 bp, Artificial Sequence
  Oligonucleotide primer for the detection of SNP TSC0043791
accacaactctc

SEQ ID NO: 344944 - DNA, 12 bp, Artificial Sequence
  Oligonucleotide primer for the detection of SNP TSC0043791
gggaagaattta

SEQ ID NO: 344945 - DNA, 12 bp, Artificial Sequence
  Oligonucleotide primer for the detection of SNP TSC0043792
gttattttttac

SEQ ID NO: 344946 - DNA, 12 bp, Artificial Sequence
  Oligonucleotide primer for the detection of SNP TSC0043792
atcacctcccac

SEQ ID NO: 344947 - DNA, 12 bp, Artificial Sequence
  Oligonucleotide primer for the detection of SNP TSC0043792
aaggagggattt

SEQ ID NO: 344948 - DNA, 12 bp, Artificial Sequence
  Oligonucleotide primer for the detection of SNP TSC0043792
aaggagggattc

SEQ ID NO: 344949 - DNA, 12 bp, Artificial Sequence
  Oligonucleotide primer for the detection of SNP TSC0043793
tcacataaatac

SEQ ID NO: 344950 - DNA, 12 bp, Artificial Sequence
  Oligonucleotide primer for the detection of SNP TSC0043793
aattattatagt

SEQ ID NO: 344951 - DNA, 12 bp, Artificial Sequence
  Oligonucleotide primer for the detection of SNP TSC0043793
aactattacaat

SEQ ID NO: 344952 - DNA, 12 bp, Artificial Sequence
  Oligonucleotide primer for the detection of SNP TSC0043794
tcaaccaaccaa

SEQ ID NO: 344953 - DNA, 12 bp, Artificial Sequence
  Oligonucleotide primer for the detection of SNP TSC0043794
ttagttaattaa

SEQ ID NO: 344954 - DNA, 12 bp, Artificial Sequence
  Oligonucleotide primer for the detection of SNP TSC0043797
taattttactat

SEQ ID NO: 344955 - DNA, 12 bp, Artificial Sequence
  Oligonucleotide primer for the detection of SNP TSC0043797
ttgttattttga

SEQ ID NO: 344956 - DNA, 12 bp, Artificial Sequence
  Oligonucleotide primer for the detection of SNP TSC0043797
ctaccaccttaa

SEQ ID NO: 344957 - DNA, 12 bp, Artificial Sequence
  Oligonucleotide primer for the detection of SNP TSC0043798
gaaattaattta

SEQ ID NO: 344958 - DNA, 12 bp, Artificial Sequence
  Oligonucleotide primer for the detection of SNP TSC0043799
atgattgaatta

SEQ ID NO: 344959 - DNA, 12 bp, Artificial Sequence
  Oligonucleotide primer for the detection of SNP TSC0043801
ttaattgaaaag

SEQ ID NO: 344960 - DNA, 12 bp, Artificial Sequence
  Oligonucleotide primer for the detection of SNP TSC0043801
tcaactaaaaaa

SEQ ID NO: 344961 - DNA, 12 bp, Artificial Sequence
  Oligonucleotide primer for the detection of SNP TSC0043801
gttgaagaggat

SEQ ID NO: 344962 - DNA, 12 bp, Artificial Sequence
  Oligonucleotide primer for the detection of SNP TSC0043802
aaacaaacactt

SEQ ID NO: 344963 - DNA, 12 bp, Artificial Sequence
  Oligonucleotide primer for the detection of SNP TSC0043802
aaacaaacgctt

SEQ ID NO: 344964 - DNA, 12 bp, Artificial Sequence
  Oligonucleotide primer for the detection of SNP TSC0043802
tgttgtaatata

SEQ ID NO: 344965 - DNA, 12 bp, Artificial Sequence
  Oligonucleotide primer for the detection of SNP TSC0043802
tattataataca

SEQ ID NO: 344966 - DNA, 12 bp, Artificial Sequence
  Oligonucleotide primer for the detection of SNP TSC0043802
aagtaagtgttt

SEQ ID NO: 344967 - DNA, 12 bp, Artificial Sequence
  Oligonucleotide primer for the detection of SNP TSC0043802
aagtaagcgttt

SEQ ID NO: 344968 - DNA, 12 bp, Artificial Sequence
  Oligonucleotide primer for the detection of SNP TSC0007632
acataacaaaat

SEQ ID NO: 344969 - DNA, 12 bp, Artificial Sequence
  Oligonucleotide primer for the detection of SNP TSC0007632
ttttttgtgtga

SEQ ID NO: 344970 - DNA, 12 bp, Artificial Sequence
  Oligonucleotide primer for the detection of SNP TSC0043804
aagttaatatat

SEQ ID NO: 344971 - DNA, 12 bp, Artificial Sequence
  Oligonucleotide primer for the detection of SNP TSC0043804
aaccaacataca

SEQ ID NO: 344972 - DNA, 12 bp, Artificial Sequence
  Oligonucleotide primer for the detection of SNP TSC0043804
aatatgttgatt

SEQ ID NO: 344973 - DNA, 12 bp, Artificial Sequence
  Oligonucleotide primer for the detection of SNP TSC0043805
ttaatctatctc

SEQ ID NO: 344974 - DNA, 12 bp, Artificial Sequence
  Oligonucleotide primer for the detection of SNP TSC0043805
gatatttaattg

SEQ ID NO: 344975 - DNA, 12 bp, Artificial Sequence
  Oligonucleotide primer for the detection of SNP TSC0043807
tcaaactcaaac

SEQ ID NO: 344976 - DNA, 12 bp, Artificial Sequence
  Oligonucleotide primer for the detection of SNP TSC0043807
aggtaggagggt

SEQ ID NO: 344977 - DNA, 12 bp, Artificial Sequence
  Oligonucleotide primer for the detection of SNP TSC0005526
ttaatttccccc

SEQ ID NO: 344978 - DNA, 12 bp, Artificial Sequence
  Oligonucleotide primer for the detection of SNP TSC0005526
aagaaatattta

SEQ ID NO: 344979 - DNA, 12 bp, Artificial Sequence
  Oligonucleotide primer for the detection of SNP TSC0043808
aaacttaaaaca

SEQ ID NO: 344980 - DNA, 12 bp, Artificial Sequence
  Oligonucleotide primer for the detection of SNP TSC0043808
aagttttggttg

SEQ ID NO: 344981 - DNA, 12 bp, Artificial Sequence
  Oligonucleotide primer for the detection of SNP TSC0043808
taaatttagaat

SEQ ID NO: 344982 - DNA, 12 bp, Artificial Sequence
  Oligonucleotide primer for the detection of SNP TSC0043810
acataaaaatat

SEQ ID NO: 344983 - DNA, 12 bp, Artificial Sequence
  Oligonucleotide primer for the detection of SNP TSC0043810
tgtagttaaagg

SEQ ID NO: 344984 - DNA, 12 bp, Artificial Sequence
  Oligonucleotide primer for the detection of SNP TSC0043811
atcctaactcta

SEQ ID NO: 344985 - DNA, 12 bp, Artificial Sequence
  Oligonucleotide primer for the detection of SNP TSC0043811
attgtgttttgt

SEQ ID NO: 344986 - DNA, 12 bp, Artificial Sequence
  Oligonucleotide primer for the detection of SNP TSC0043811
attgtgttttgc

SEQ ID NO: 344987 - DNA, 12 bp, Artificial Sequence
  Oligonucleotide primer for the detection of SNP TSC0043811
actatattttac

SEQ ID NO: 344988 - DNA, 12 bp, Artificial Sequence
  Oligonucleotide primer for the detection of SNP TSC0043812
cttatactaccc

SEQ ID NO: 344989 - DNA, 12 bp, Artificial Sequence
  Oligonucleotide primer for the detection of SNP TSC0043812
aatgtatagaaa

SEQ ID NO: 344990 - DNA, 12 bp, Artificial Sequence
  Oligonucleotide primer for the detection of SNP TSC0043812
aatacacaaaaa

SEQ ID NO: 344991 - DNA, 12 bp, Artificial Sequence
  Oligonucleotide primer for the detection of SNP TSC0010376
agaataggatat

SEQ ID NO: 344992 - DNA, 12 bp, Artificial Sequence
  Oligonucleotide primer for the detection of SNP TSC0010376
aaaacaaaacac

SEQ ID NO: 344993 - DNA, 12 bp, Artificial Sequence
  Oligonucleotide primer for the detection of SNP TSC0010377
gtggtggtaggt

SEQ ID NO: 344994 - DNA, 12 bp, Artificial Sequence
  Oligonucleotide primer for the detection of SNP TSC0043814
aaaccaatcaac

SEQ ID NO: 344995 - DNA, 12 bp, Artificial Sequence
  Oligonucleotide primer for the detection of SNP TSC0043814
ttttagaatatg

SEQ ID NO: 344996 - DNA, 12 bp, Artificial Sequence
  Oligonucleotide primer for the detection of SNP TSC0043814
ctttaaaatata

SEQ ID NO: 344997 - DNA, 12 bp, Artificial Sequence
  Oligonucleotide primer for the detection of SNP TSC0043814
aggttaattaat

SEQ ID NO: 344998 - DNA, 12 bp, Artificial Sequence
  Oligonucleotide primer for the detection of SNP TSC0043815
tttcataataat

SEQ ID NO: 344999 - DNA, 12 bp, Artificial Sequence
  Oligonucleotide primer for the detection of SNP TSC0043815
aaaaacttatca

SEQ ID NO: 345000 - DNA, 12 bp, Artificial Sequence
  Oligonucleotide primer for the detection of SNP TSC0043815
ttttatgatggt

SEQ ID NO: 345001 - DNA, 12 bp, Artificial Sequence
  Oligonucleotide primer for the detection of SNP TSC0043816
atctctcaaatt

SEQ ID NO: 345002 - DNA, 12 bp, Artificial Sequence
  Oligonucleotide primer for the detection of SNP TSC0043816
gagatagatgag

SEQ ID NO: 345003 - DNA, 12 bp, Artificial Sequence
  Oligonucleotide primer for the detection of SNP TSC0043817
tactaaccctat

SEQ ID NO: 345004 - DNA, 12 bp, Artificial Sequence
  Oligonucleotide primer for the detection of SNP TSC0043817
gaatggtgttga

SEQ ID NO: 345005 - DNA, 12 bp, Artificial Sequence
  Oligonucleotide primer for the detection of SNP TSC0043817
aaataatactaa

SEQ ID NO: 345006 - DNA, 12 bp, Artificial Sequence
  Oligonucleotide primer for the detection of SNP TSC0043817
tgttaattttgt

SEQ ID NO: 345007 - DNA, 12 bp, Artificial Sequence
  Oligonucleotide primer for the detection of SNP TSC0043818
ccacttactaac

SEQ ID NO: 345008 - DNA, 12 bp, Artificial Sequence
  Oligonucleotide primer for the detection of SNP TSC0043818
tattttagttaa

SEQ ID NO: 345009 - DNA, 12 bp, Artificial Sequence
  Oligonucleotide primer for the detection of SNP TSC0043819
tataacattcat

SEQ ID NO: 345010 - DNA, 12 bp, Artificial Sequence
  Oligonucleotide primer for the detection of SNP TSC0043820
agaagaatttgg

SEQ ID NO: 345011 - DNA, 12 bp, Artificial Sequence
  Oligonucleotide primer for the detection of SNP TSC0043822
tagataaatata

SEQ ID NO: 345012 - DNA, 12 bp, Artificial Sequence
  Oligonucleotide primer for the detection of SNP TSC0043823
tttaccttctaa

SEQ ID NO: 345013 - DNA, 12 bp, Artificial Sequence
  Oligonucleotide primer for the detection of SNP TSC0043823
ctatatttatct

SEQ ID NO: 345014 - DNA, 12 bp, Artificial Sequence
  Oligonucleotide primer for the detection of SNP TSC0043824
ataaatttattc

SEQ ID NO: 345015 - DNA, 12 bp, Artificial Sequence
  Oligonucleotide primer for the detection of SNP TSC0043824
gtttgttgagtg

SEQ ID NO: 345016 - DNA, 12 bp, Artificial Sequence
  Oligonucleotide primer for the detection of SNP TSC0043824
gtttgtcgagtg

SEQ ID NO: 345017 - DNA, 12 bp, Artificial Sequence
  Oligonucleotide primer for the detection of SNP TSC0043824
atttaccaaata

SEQ ID NO: 345018 - DNA, 12 bp, Artificial Sequence
  Oligonucleotide primer for the detection of SNP TSC0043824
atttaccgaata

SEQ ID NO: 345019 - DNA, 12 bp, Artificial Sequence
  Oligonukleotid-Primer
atagatttattt

SEQ ID NO: 345020 - DNA, 12 bp, Artificial Sequence
  Oligonucleotide primer for the detection of SNP TSC0043829
tttaataaaact

SEQ ID NO: 345021 - DNA, 12 bp, Artificial Sequence
  Oligonucleotide primer for the detection of SNP TSC0043829
ttgtaagtatta

SEQ ID NO: 345022 - DNA, 12 bp, Artificial Sequence
  Oligonucleotide primer for the detection of SNP TSC0043830
acaactacttca

SEQ ID NO: 345023 - DNA, 12 bp, Artificial Sequence
  Oligonukleotid-Primer
ttggaattatgt

SEQ ID NO: 345024 - DNA, 12 bp, Artificial Sequence
  Oligonucleotide primer for the detection of SNP TSC0043830
ttaaaatcatat

SEQ ID NO: 345025 - DNA, 12 bp, Artificial Sequence
  Oligonucleotide primer for the detection of SNP TSC0043831
tcctttcatatt

SEQ ID NO: 345026 - DNA, 12 bp, Artificial Sequence
  Oligonucleotide primer for the detection of SNP TSC0043831
aagagaaaattg

SEQ ID NO: 345027 - DNA, 12 bp, Artificial Sequence
  Oligonukleotid-Primer
cccaaccttcaa

SEQ ID NO: 345028 - DNA, 12 bp, Artificial Sequence
  Oligonucleotide primer for the detection of SNP TSC0043832
cccgaccttcaa

SEQ ID NO: 345029 - DNA, 12 bp, Artificial Sequence
  Oligonucleotide primer for the detection of SNP TSC0043832
taggttggtggt

SEQ ID NO: 345030 - DNA, 12 bp, Artificial Sequence
  Oligonucleotide primer for the detection of SNP TSC0043832
caaattaataat

SEQ ID NO: 345031 - DNA, 12 bp, Artificial Sequence
  Oligonucleotide primer for the detection of SNP TSC0043832
ttcggtttttaa

SEQ ID NO: 345032 - DNA, 12 bp, Artificial Sequence
  Oligonucleotide primer for the detection of SNP TSC0043833
aaattcatttct

SEQ ID NO: 345033 - DNA, 12 bp, Artificial Sequence
  Oligonucleotide primer for the detection of SNP TSC0043836
tacaatcaataa

SEQ ID NO: 345034 - DNA, 12 bp, Artificial Sequence
  Oligonucleotide primer for the detection of SNP TSC0043836
gttgattgtttt

SEQ ID NO: 345035 - DNA, 12 bp, Artificial Sequence
  Oligonucleotide primer for the detection of SNP TSC0043836
attaattatttt

SEQ ID NO: 345036 - DNA, 12 bp, Artificial Sequence
  Oligonucleotide primer for the detection of SNP TSC0043836
tatagttaatga

SEQ ID NO: 345037 - DNA, 12 bp, Artificial Sequence
  Oligonucleotide primer for the detection of SNP TSC0043841
acaattaaatac

SEQ ID NO: 345038 - DNA, 12 bp, Artificial Sequence
  Oligonucleotide primer for the detection of SNP TSC0043841
tgattttattga

SEQ ID NO: 345039 - DNA, 12 bp, Artificial Sequence
  Oligonucleotide primer for the detection of SNP TSC0043844
tagtaatatttt

SEQ ID NO: 345040 - DNA, 12 bp, Artificial Sequence
  Oligonucleotide primer for the detection of SNP TSC0043844
acaacaatatcc

SEQ ID NO: 345041 - DNA, 12 bp, Artificial Sequence
  Oligonucleotide primer for the detection of SNP TSC0043844
gtgttagttttg

SEQ ID NO: 345042 - DNA, 12 bp, Artificial Sequence
  Oligonucleotide primer for the detection of SNP TSC0043844
gcgttagttttg

SEQ ID NO: 345043 - DNA, 12 bp, Artificial Sequence
  Oligonucleotide primer for the detection of SNP TSC0043845
cccaataaatac

SEQ ID NO: 345044 - DNA, 12 bp, Artificial Sequence
  Oligonucleotide primer for the detection of SNP TSC0043845
atggtatttagg

SEQ ID NO: 345045 - DNA, 12 bp, Artificial Sequence
  Oligonucleotide primer for the detection of SNP TSC0043845
ttaatgagtatt

SEQ ID NO: 345046 - DNA, 12 bp, Artificial Sequence
  Oligonucleotide primer for the detection of SNP TSC0043846
acgcaaaacaaa

SEQ ID NO: 345047 - DNA, 12 bp, Artificial Sequence
  Oligonucleotide primer for the detection of SNP TSC0043846
aagagtaaaggg

SEQ ID NO: 345048 - DNA, 12 bp, Artificial Sequence
  Oligonucleotide primer for the detection of SNP TSC0043846
gtaagataaatt

SEQ ID NO: 345049 - DNA, 12 bp, Artificial Sequence
  Oligonucleotide primer for the detection of SNP TSC0043847
cccataaaaatc

SEQ ID NO: 345050 - DNA, 12 bp, Artificial Sequence
  Oligonucleotide primer for the detection of SNP TSC0043847
aaaaggattgtg

SEQ ID NO: 345051 - DNA, 12 bp, Artificial Sequence
  Oligonucleotide primer for the detection of SNP TSC0043848
tcaattaaaata

SEQ ID NO: 345052 - DNA, 12 bp, Artificial Sequence
  Oligonucleotide primer for the detection of SNP TSC0043848
atttgggttatg

SEQ ID NO: 345053 - DNA, 12 bp, Artificial Sequence
  Oligonucleotide primer for the detection of SNP TSC0043849
ttttattgtgaa

SEQ ID NO: 345054 - DNA, 12 bp, Artificial Sequence
  Oligonucleotide primer for the detection of SNP TSC0043850
ctctcttacctc

SEQ ID NO: 345055 - DNA, 12 bp, Artificial Sequence
  Oligonucleotide primer for the detection of SNP TSC0043850
ggaaggtagaaa

SEQ ID NO: 345056 - DNA, 12 bp, Artificial Sequence
  Oligonucleotide primer for the detection of SNP TSC0043852
catatcaatctc

SEQ ID NO: 345057 - DNA, 12 bp, Artificial Sequence
  Oligonucleotide primer for the detection of SNP TSC0043852
tagaattattag

SEQ ID NO: 345058 - DNA, 12 bp, Artificial Sequence
  Oligonucleotide primer for the detection of SNP TSC0043853
ccccctcctacc

SEQ ID NO: 345059 - DNA, 12 bp, Artificial Sequence
  Oligonucleotide primer for the detection of SNP TSC0043853
aagaaagggtga

SEQ ID NO: 345060 - DNA, 12 bp, Artificial Sequence
  Oligonucleotide primer for the detection of SNP TSC0043854
ttgtttgttgta

SEQ ID NO: 345061 - DNA, 12 bp, Artificial Sequence
  Oligonucleotide primer for the detection of SNP TSC0043855
tttcccttaatt

SEQ ID NO: 345062 - DNA, 12 bp, Artificial Sequence
  Oligonucleotide primer for the detection of SNP TSC0043855
aatgaatttaag

SEQ ID NO: 345063 - DNA, 12 bp, Artificial Sequence
  Oligonucleotide primer for the detection of SNP TSC0043856
tcaattttaata

SEQ ID NO: 345064 - DNA, 12 bp, Artificial Sequence
  Oligonucleotide primer for the detection of SNP TSC0043856
gtgtattgattt

SEQ ID NO: 345065 - DNA, 12 bp, Artificial Sequence
  Oligonucleotide primer for the detection of SNP TSC0043856
aatatattaact

SEQ ID NO: 345066 - DNA, 12 bp, Artificial Sequence
  Oligonucleotide primer for the detection of SNP TSC0043857
attacaaattca

SEQ ID NO: 345067 - DNA, 12 bp, Artificial Sequence
  Oligonucleotide primer for the detection of SNP TSC0043857
tttcttcaccaa

SEQ ID NO: 345068 - DNA, 12 bp, Artificial Sequence
  Oligonucleotide primer for the detection of SNP TSC0043857
attgtaaattta

SEQ ID NO: 345069 - DNA, 12 bp, Artificial Sequence
  Oligonucleotide primer for the detection of SNP TSC0043858
attattaaaact

SEQ ID NO: 345070 - DNA, 12 bp, Artificial Sequence
  Oligonucleotide primer for the detection of SNP TSC0043858
tatagtaaaaaa

SEQ ID NO: 345071 - DNA, 12 bp, Artificial Sequence
  Oligonucleotide primer for the detection of SNP TSC0043859
acattttacact

SEQ ID NO: 345072 - DNA, 12 bp, Artificial Sequence
  Oligonucleotide primer for the detection of SNP TSC0043859
taatatagttag

SEQ ID NO: 345073 - DNA, 12 bp, Artificial Sequence
  Oligonucleotide primer for the detection of SNP TSC0043860
cctcttctaccc

SEQ ID NO: 345074 - DNA, 12 bp, Artificial Sequence
  Oligonucleotide primer for the detection of SNP TSC0043860
aaaggtatgtag

SEQ ID NO: 345075 - DNA, 12 bp, Artificial Sequence
  Oligonucleotide primer for the detection of SNP TSC0043861
attttcataata

SEQ ID NO: 345076 - DNA, 12 bp, Artificial Sequence
  Oligonucleotide primer for the detection of SNP TSC0043861
aaattagtataa

SEQ ID NO: 345077 - DNA, 12 bp, Artificial Sequence
  Oligonucleotide primer for the detection of SNP TSC0043861
aaattaatacaa

SEQ ID NO: 345078 - DNA, 12 bp, Artificial Sequence
  Oligonucleotide primer for the detection of SNP TSC0043861
tgtttttatagt

SEQ ID NO: 345079 - DNA, 12 bp, Artificial Sequence
  Oligonucleotide primer for the detection of SNP TSC0043863
tcatatatcacc

SEQ ID NO: 345080 - DNA, 12 bp, Artificial Sequence
  Oligonucleotide primer for the detection of SNP TSC0043863
tagaagagggga

SEQ ID NO: 345081 - DNA, 12 bp, Artificial Sequence
  Oligonucleotide primer for the detection of SNP TSC0006887
aattacaaataa

SEQ ID NO: 345082 - DNA, 12 bp, Artificial Sequence
  Oligonucleotide primer for the detection of SNP TSC0006887
aaattaaaaggt

SEQ ID NO: 345083 - DNA, 12 bp, Artificial Sequence
  Oligonucleotide primer for the detection of SNP TSC0006887
agttataagtag

SEQ ID NO: 345084 - DNA, 12 bp, Artificial Sequence
  Oligonucleotide primer for the detection of SNP TSC0043866
tatctttaatca

SEQ ID NO: 345085 - DNA, 12 bp, Artificial Sequence
  Oligonucleotide primer for the detection of SNP TSC0043866
aaaattaatttt

SEQ ID NO: 345086 - DNA, 12 bp, Artificial Sequence
  Oligonucleotide primer for the detection of SNP TSC0008469
aaataattatac

SEQ ID NO: 345087 - DNA, 12 bp, Artificial Sequence
  Oligonucleotide primer for the detection of SNP TSC0008469
atgagtaaatga

SEQ ID NO: 345088 - DNA, 12 bp, Artificial Sequence
  Oligonucleotide primer for the detection of SNP TSC0043867
aatctacaaatt

SEQ ID NO: 345089 - DNA, 12 bp, Artificial Sequence
  Oligonucleotide primer for the detection of SNP TSC0043867
gttttgaagatt

SEQ ID NO: 345090 - DNA, 12 bp, Artificial Sequence
  Oligonucleotide primer for the detection of SNP TSC0043868
caactacaacta

SEQ ID NO: 345091 - DNA, 12 bp, Artificial Sequence
  Oligonucleotide primer for the detection of SNP TSC0043868
caactacgacta

SEQ ID NO: 345092 - DNA, 12 bp, Artificial Sequence
  Oligonucleotide primer for the detection of SNP TSC0043868
ttaggagttatt

SEQ ID NO: 345093 - DNA, 12 bp, Artificial Sequence
  Oligonucleotide primer for the detection of SNP TSC0043868
ccaaaaaccacc

SEQ ID NO: 345094 - DNA, 12 bp, Artificial Sequence
  Oligonucleotide primer for the detection of SNP TSC0043868
tagttatgattg

SEQ ID NO: 345095 - DNA, 12 bp, Artificial Sequence
  Oligonucleotide primer for the detection of SNP TSC0043868
tagttacgattg

SEQ ID NO: 345096 - DNA, 12 bp, Artificial Sequence
  Oligonucleotide primer for the detection of SNP TSC0043871
tttcctacataa

SEQ ID NO: 345097 - DNA, 12 bp, Artificial Sequence
  Oligonucleotide primer for the detection of SNP TSC0043871
atgataatatgg

SEQ ID NO: 345098 - DNA, 12 bp, Artificial Sequence
  Oligonucleotide primer for the detection of SNP TSC0043871
tttttatatggt

SEQ ID NO: 345099 - DNA, 12 bp, Artificial Sequence
  Oligonucleotide primer for the detection of SNP TSC0043872
tctatttttttt

SEQ ID NO: 345100 - DNA, 12 bp, Artificial Sequence
  Oligonucleotide primer for the detection of SNP TSC0007989
aaataaaattct

SEQ ID NO: 345101 - DNA, 12 bp, Artificial Sequence
  Oligonucleotide primer for the detection of SNP TSC0007990
cacttctctata

SEQ ID NO: 345102 - DNA, 12 bp, Artificial Sequence
  Oligonucleotide primer for the detection of SNP TSC0007990
ttgaatattggg

SEQ ID NO: 345103 - DNA, 12 bp, Artificial Sequence
  Oligonucleotide primer for the detection of SNP TSC0043875
ctaaactacgat

SEQ ID NO: 345104 - DNA, 12 bp, Artificial Sequence
  Oligonucleotide primer for the detection of SNP TSC0043875
ttggattgtggt

SEQ ID NO: 345105 - DNA, 12 bp, Artificial Sequence
  Oligonucleotide primer for the detection of SNP TSC0043875
ttggattgcggt

SEQ ID NO: 345106 - DNA, 12 bp, Artificial Sequence
  Oligonucleotide primer for the detection of SNP TSC0043876
atttaggtagtt

SEQ ID NO: 345107 - DNA, 12 bp, Artificial Sequence
  Oligonucleotide primer for the detection of SNP TSC0043876
ttttgggaagtt

SEQ ID NO: 345108 - DNA, 12 bp, Artificial Sequence
  Oligonucleotide primer for the detection of SNP TSC0043877
tctacaaacttt

SEQ ID NO: 345109 - DNA, 12 bp, Artificial Sequence
  Oligonucleotide primer for the detection of SNP TSC0010086
tagttgaataag

SEQ ID NO: 345110 - DNA, 12 bp, Artificial Sequence
  Oligonucleotide primer for the detection of SNP TSC0043879
atatatcaaaaa

SEQ ID NO: 345111 - DNA, 12 bp, Artificial Sequence
  Oligonucleotide primer for the detection of SNP TSC0043879
attttggttgat

SEQ ID NO: 345112 - DNA, 12 bp, Artificial Sequence
  Oligonucleotide primer for the detection of SNP TSC0043879
attctaactaat

SEQ ID NO: 345113 - DNA, 12 bp, Artificial Sequence
  Oligonucleotide primer for the detection of SNP TSC0043879
gtatattagaaa

SEQ ID NO: 345114 - DNA, 12 bp, Artificial Sequence
  Oligonucleotide primer for the detection of SNP TSC0043880
aactattttcat

SEQ ID NO: 345115 - DNA, 12 bp, Artificial Sequence
  Oligonucleotide primer for the detection of SNP TSC0043880
aagaaaaatata

SEQ ID NO: 345116 - DNA, 12 bp, Artificial Sequence
  Oligonucleotide primer for the detection of SNP TSC0043884
ttcttcttacta

SEQ ID NO: 345117 - DNA, 12 bp, Artificial Sequence
  Oligonucleotide primer for the detection of SNP TSC0043884
ttaattgttttt

SEQ ID NO: 345118 - DNA, 12 bp, Artificial Sequence
  Oligonucleotide primer for the detection of SNP TSC0043885
ataataacgaat

SEQ ID NO: 345119 - DNA, 12 bp, Artificial Sequence
  Oligonucleotide primer for the detection of SNP TSC0043885
ttgagattatag

SEQ ID NO: 345120 - DNA, 12 bp, Artificial Sequence
  Oligonucleotide primer for the detection of SNP TSC0043887
tacatattaatt

SEQ ID NO: 345121 - DNA, 12 bp, Artificial Sequence
  Oligonucleotide primer for the detection of SNP TSC0043887
ggtttattgagg

SEQ ID NO: 345122 - DNA, 12 bp, Artificial Sequence
  Oligonucleotide primer for the detection of SNP TSC0043889
ttatttatcctt

SEQ ID NO: 345123 - DNA, 12 bp, Artificial Sequence
  Oligonucleotide primer for the detection of SNP TSC0043890
atcaatataaac

SEQ ID NO: 345124 - DNA, 12 bp, Artificial Sequence
  Oligonucleotide primer for the detection of SNP TSC0043890
atcgatataaac

SEQ ID NO: 345125 - DNA, 12 bp, Artificial Sequence
  Oligonucleotide primer for the detection of SNP TSC0043890
gtcaatataaac

SEQ ID NO: 345126 - DNA, 12 bp, Artificial Sequence
  Oligonucleotide primer for the detection of SNP TSC0043890
gtcgatataaac

SEQ ID NO: 345127 - DNA, 12 bp, Artificial Sequence
  Oligonucleotide primer for the detection of SNP TSC0043890
gtatgggtgatt

SEQ ID NO: 345128 - DNA, 12 bp, Artificial Sequence
  Oligonucleotide primer for the detection of SNP TSC0043890
gtacgggtgatt

SEQ ID NO: 345129 - DNA, 12 bp, Artificial Sequence
  Oligonucleotide primer for the detection of SNP TSC0043890
atacaaataact

SEQ ID NO: 345130 - DNA, 12 bp, Artificial Sequence
  Oligonucleotide primer for the detection of SNP TSC0043890
atacgaataact

SEQ ID NO: 345131 - DNA, 12 bp, Artificial Sequence
  Oligonucleotide primer for the detection of SNP TSC0043890
tgatgtggattt

SEQ ID NO: 345132 - DNA, 12 bp, Artificial Sequence
  Oligonucleotide primer for the detection of SNP TSC0043890
cgatgtggattt

SEQ ID NO: 345133 - DNA, 12 bp, Artificial Sequence
  Oligonucleotide primer for the detection of SNP TSC0043891
atccccaaccaa

SEQ ID NO: 345134 - DNA, 12 bp, Artificial Sequence
  Oligonucleotide primer for the detection of SNP TSC0043891
atccccaaccga

SEQ ID NO: 345135 - DNA, 12 bp, Artificial Sequence
  Oligonucleotide primer for the detection of SNP TSC0043891
atccccgaccaa

SEQ ID NO: 345136 - DNA, 12 bp, Artificial Sequence
  Oligonucleotide primer for the detection of SNP TSC0043891
atccccgaccga

SEQ ID NO: 345137 - DNA, 12 bp, Artificial Sequence
  Oligonucleotide primer for the detection of SNP TSC0043891
ttggttattaaa

SEQ ID NO: 345138 - DNA, 12 bp, Artificial Sequence
  Oligonucleotide primer for the detection of SNP TSC0043891
ctaattaccaaa

SEQ ID NO: 345139 - DNA, 12 bp, Artificial Sequence
  Oligonucleotide primer for the detection of SNP TSC0043891
tgtttttggtcg

SEQ ID NO: 345140 - DNA, 12 bp, Artificial Sequence
  Oligonucleotide primer for the detection of SNP TSC0043891
tgttttcggtcg

SEQ ID NO: 345141 - DNA, 12 bp, Artificial Sequence
  Oligonucleotide primer for the detection of SNP TSC0005471
aacttcaaaaat

SEQ ID NO: 345142 - DNA, 12 bp, Artificial Sequence
  Oligonucleotide primer for the detection of SNP TSC0005471
tgttatgagatg

SEQ ID NO: 345143 - DNA, 12 bp, Artificial Sequence
  Oligonucleotide primer for the detection of SNP TSC0005471
taccataaaata

SEQ ID NO: 345144 - DNA, 12 bp, Artificial Sequence
  Oligonucleotide primer for the detection of SNP TSC0005471
aattttaaagat

SEQ ID NO: 345145 - DNA, 12 bp, Artificial Sequence
  Oligonucleotide primer for the detection of SNP TSC0043892
attgtttgtttt

SEQ ID NO: 345146 - DNA, 12 bp, Artificial Sequence
  Oligonucleotide primer for the detection of SNP TSC0043892
agaagtagaaaa

SEQ ID NO: 345147 - DNA, 12 bp, Artificial Sequence
  Oligonucleotide primer for the detection of SNP TSC0043893
ccataataaaat

SEQ ID NO: 345148 - DNA, 12 bp, Artificial Sequence
  Oligonucleotide primer for the detection of SNP TSC0043893
attttttgtata

SEQ ID NO: 345149 - DNA, 12 bp, Artificial Sequence
  Oligonucleotide primer for the detection of SNP TSC0043894
ttttggtttgaa

SEQ ID NO: 345150 - DNA, 12 bp, Artificial Sequence
  Oligonucleotide primer for the detection of SNP TSC0007291
ttgttaatagga

SEQ ID NO: 345151 - DNA, 12 bp, Artificial Sequence
  Oligonucleotide primer for the detection of SNP TSC0043896
ttactactcatc

SEQ ID NO: 345152 - DNA, 12 bp, Artificial Sequence
  Oligonucleotide primer for the detection of SNP TSC0043896
atttagatatga

SEQ ID NO: 345153 - DNA, 12 bp, Artificial Sequence
  Oligonucleotide primer for the detection of SNP TSC0043897
tatttctataac

SEQ ID NO: 345154 - DNA, 12 bp, Artificial Sequence
  Oligonucleotide primer for the detection of SNP TSC0043897
atattataattg

SEQ ID NO: 345155 - DNA, 12 bp, Artificial Sequence
  Oligonucleotide primer for the detection of SNP TSC0043898
atttaggaattg

SEQ ID NO: 345156 - DNA, 12 bp, Artificial Sequence
  Oligonucleotide primer for the detection of SNP TSC0043898
atccaaaaatta

SEQ ID NO: 345157 - DNA, 12 bp, Artificial Sequence
  Oligonucleotide primer for the detection of SNP TSC0043900
aaaacaattttt

SEQ ID NO: 345158 - DNA, 12 bp, Artificial Sequence
  Oligonucleotide primer for the detection of SNP TSC0043901
tatctttaactt

SEQ ID NO: 345159 - DNA, 12 bp, Artificial Sequence
  Oligonucleotide primer for the detection of SNP TSC0043901
gagtgggaagtt

SEQ ID NO: 345160 - DNA, 12 bp, Artificial Sequence
  Oligonucleotide primer for the detection of SNP TSC0043901
tgtttttgattt

SEQ ID NO: 345161 - DNA, 12 bp, Artificial Sequence
  Oligonucleotide primer for the detection of SNP TSC0043902
ctaaaacacccc

SEQ ID NO: 345162 - DNA, 12 bp, Artificial Sequence
  Oligonucleotide primer for the detection of SNP TSC0043902
agttattataga

SEQ ID NO: 345163 - DNA, 12 bp, Artificial Sequence
  Oligonucleotide primer for the detection of SNP TSC0043903
ctcctctaacca

SEQ ID NO: 345164 - DNA, 12 bp, Artificial Sequence
  Oligonucleotide primer for the detection of SNP TSC0043903
ttcattcctact

SEQ ID NO: 345165 - DNA, 12 bp, Artificial Sequence
  Oligonucleotide primer for the detection of SNP TSC0043904
tctaataacacc

SEQ ID NO: 345166 - DNA, 12 bp, Artificial Sequence
  Oligonucleotide primer for the detection of SNP TSC0043904
actcccctttcc

SEQ ID NO: 345167 - DNA, 12 bp, Artificial Sequence
  Oligonucleotide primer for the detection of SNP TSC0043905
caaccaaatatc

SEQ ID NO: 345168 - DNA, 12 bp, Artificial Sequence
  Oligonucleotide primer for the detection of SNP TSC0043905
agaatttaagta

SEQ ID NO: 345169 - DNA, 12 bp, Artificial Sequence
  Oligonucleotide primer for the detection of SNP TSC0043906
ttaaacaaaatc

SEQ ID NO: 345170 - DNA, 12 bp, Artificial Sequence
  Oligonucleotide primer for the detection of SNP TSC0043906
tcctatttaaaa

SEQ ID NO: 345171 - DNA, 12 bp, Artificial Sequence
  Oligonucleotide primer for the detection of SNP TSC0043906
ttagataaagtt

SEQ ID NO: 345172 - DNA, 12 bp, Artificial Sequence
  Oligonucleotide primer for the detection of SNP TSC0043907
aaactatattcc

SEQ ID NO: 345173 - DNA, 12 bp, Artificial Sequence
  Oligonucleotide primer for the detection of SNP TSC0043908
atttgttagaga

SEQ ID NO: 345174 - DNA, 12 bp, Artificial Sequence
  Oligonucleotide primer for the detection of SNP TSC0043909
ctcatatttcac

SEQ ID NO: 345175 - DNA, 12 bp, Artificial Sequence
  Oligonucleotide primer for the detection of SNP TSC0043909
aattttttgata

SEQ ID NO: 345176 - DNA, 12 bp, Artificial Sequence
  Oligonucleotide primer for the detection of SNP TSC0043910
taagtttatgaa

SEQ ID NO: 345177 - DNA, 12 bp, Artificial Sequence
  Oligonucleotide primer for the detection of SNP TSC0043911
aacataacaaat

SEQ ID NO: 345178 - DNA, 12 bp, Artificial Sequence
  Oligonucleotide primer for the detection of SNP TSC0043911
tatcccatatca

SEQ ID NO: 345179 - DNA, 12 bp, Artificial Sequence
  Oligonucleotide primer for the detection of SNP TSC0043911
agtataataggt

SEQ ID NO: 345180 - DNA, 12 bp, Artificial Sequence
  Oligonucleotide primer for the detection of SNP TSC0043912
ttctataaaact

SEQ ID NO: 345181 - DNA, 12 bp, Artificial Sequence
  Oligonucleotide primer for the detection of SNP TSC0043912
atatgtttgagg

SEQ ID NO: 345182 - DNA, 12 bp, Artificial Sequence
  Oligonucleotide primer for the detection of SNP TSC0043912
atatgttcgagg

SEQ ID NO: 345183 - DNA, 12 bp, Artificial Sequence
  Oligonucleotide primer for the detection of SNP TSC0043916
aaaactataaca

SEQ ID NO: 345184 - DNA, 12 bp, Artificial Sequence
  Oligonucleotide primer for the detection of SNP TSC0043916
ttatctaaaaca

SEQ ID NO: 345185 - DNA, 12 bp, Artificial Sequence
  Oligonucleotide primer for the detection of SNP TSC0043916
ggaaattgtgat

SEQ ID NO: 345186 - DNA, 12 bp, Artificial Sequence
  Oligonucleotide primer for the detection of SNP TSC0043917
tattaagaaatg

SEQ ID NO: 345187 - DNA, 12 bp, Artificial Sequence
  Oligonucleotide primer for the detection of SNP TSC0043918
tgtgtataagtt

SEQ ID NO: 345188 - DNA, 12 bp, Artificial Sequence
  Oligonucleotide primer for the detection of SNP TSC0043918
tgcgtataagtt

SEQ ID NO: 345189 - DNA, 12 bp, Artificial Sequence
  Oligonucleotide primer for the detection of SNP TSC0043918
tgtgtataagtc

SEQ ID NO: 345190 - DNA, 12 bp, Artificial Sequence
  Oligonucleotide primer for the detection of SNP TSC0043918
tgcgtataagtc

SEQ ID NO: 345191 - DNA, 12 bp, Artificial Sequence
  Oligonucleotide primer for the detection of SNP TSC0043918
tatacatacaaa

SEQ ID NO: 345192 - DNA, 12 bp, Artificial Sequence
  Oligonucleotide primer for the detection of SNP TSC0043918
tatacgtacaaa

SEQ ID NO: 345193 - DNA, 12 bp, Artificial Sequence
  Oligonucleotide primer for the detection of SNP TSC0043918
ttgggtggtata

SEQ ID NO: 345194 - DNA, 12 bp, Artificial Sequence
  Oligonucleotide primer for the detection of SNP TSC0043918
ttgggcggtata

SEQ ID NO: 345195 - DNA, 12 bp, Artificial Sequence
  Oligonucleotide primer for the detection of SNP TSC0043919
aataacaataac

SEQ ID NO: 345196 - DNA, 12 bp, Artificial Sequence
  Oligonucleotide primer for the detection of SNP TSC0043919
ggtggtagtggt

SEQ ID NO: 345197 - DNA, 12 bp, Artificial Sequence
  Oligonucleotide primer for the detection of SNP TSC0043919
ggtggtagtggc

SEQ ID NO: 345198 - DNA, 12 bp, Artificial Sequence
  Oligonucleotide primer for the detection of SNP TSC0043920
tatctcaatata

SEQ ID NO: 345199 - DNA, 12 bp, Artificial Sequence
  Oligonucleotide primer for the detection of SNP TSC0043920
atgttggggatg

SEQ ID NO: 345200 - DNA, 12 bp, Artificial Sequence
  Oligonucleotide primer for the detection of SNP TSC0043920
atgttggggacg

SEQ ID NO: 345201 - DNA, 12 bp, Artificial Sequence
  Oligonucleotide primer for the detection of SNP TSC0043920
tattaaaaacaa

SEQ ID NO: 345202 - DNA, 12 bp, Artificial Sequence
  Oligonucleotide primer for the detection of SNP TSC0043920
tattaaaaacga

SEQ ID NO: 345203 - DNA, 12 bp, Artificial Sequence
  Oligonucleotide primer for the detection of SNP TSC0043920
attttagtatgt

SEQ ID NO: 345204 - DNA, 12 bp, Artificial Sequence
  Oligonukleotid-Primer
gattgattagga

SEQ ID NO: 345205 - DNA, 12 bp, Artificial Sequence
  Oligonucleotide primer for the detection of SNP TSC0000241
gtattgggattg

SEQ ID NO: 345206 - DNA, 12 bp, Artificial Sequence
  Oligonucleotide primer for the detection of SNP TSC0000241
acactaaaacta

SEQ ID NO: 345207 - DNA, 12 bp, Artificial Sequence
  Oligonucleotide primer for the detection of SNP TSC0000241
gatattgagggg

SEQ ID NO: 345208 - DNA, 12 bp, Artificial Sequence
  Oligonukleotid-Primer
caaatacaacta

SEQ ID NO: 345209 - DNA, 12 bp, Artificial Sequence
  Oligonucleotide primer for the detection of SNP TSC0000242
gattgagaattt

SEQ ID NO: 345210 - DNA, 12 bp, Artificial Sequence
  Oligonucleotide primer for the detection of SNP TSC0000242
aactaaaaacct

SEQ ID NO: 345211 - DNA, 12 bp, Artificial Sequence
  Oligonucleotide primer for the detection of SNP TSC0000242
taaatgtagttg

SEQ ID NO: 345212 - DNA, 12 bp, Artificial Sequence
  Oligonucleotide primer for the detection of SNP TSC0000243
taaactccatac

SEQ ID NO: 345213 - DNA, 12 bp, Artificial Sequence
  Oligonucleotide primer for the detection of SNP TSC0000243
ggtatatttttg

SEQ ID NO: 345214 - DNA, 12 bp, Artificial Sequence
  Oligonucleotide primer for the detection of SNP TSC0000243
aacacaccccta

SEQ ID NO: 345215 - DNA, 12 bp, Artificial Sequence
  Oligonucleotide primer for the detection of SNP TSC0043923
tctaaactaacc

SEQ ID NO: 345216 - DNA, 12 bp, Artificial Sequence
  Oligonucleotide primer for the detection of SNP TSC0043924
attgaatgattt

SEQ ID NO: 345217 - DNA, 12 bp, Artificial Sequence
  Oligonucleotide primer for the detection of SNP TSC0043925
ttatataattct

SEQ ID NO: 345218 - DNA, 12 bp, Artificial Sequence
  Oligonucleotide primer for the detection of SNP TSC0043925
tggtttgattaa

SEQ ID NO: 345219 - DNA, 12 bp, Artificial Sequence
  Oligonucleotide primer for the detection of SNP TSC0010035
aataacctccac

SEQ ID NO: 345220 - DNA, 12 bp, Artificial Sequence
  Oligonucleotide primer for the detection of SNP TSC0010035
ttgaaggagaag

SEQ ID NO: 345221 - DNA, 12 bp, Artificial Sequence
  Oligonucleotide primer for the detection of SNP TSC0043926
aacatttaaaat

SEQ ID NO: 345222 - DNA, 12 bp, Artificial Sequence
  Oligonucleotide primer for the detection of SNP TSC0043926
ttgttgaaagag

SEQ ID NO: 345223 - DNA, 12 bp, Artificial Sequence
  Oligonucleotide primer for the detection of SNP TSC0001259
taatatacaaaa

SEQ ID NO: 345224 - DNA, 12 bp, Artificial Sequence
  Oligonucleotide primer for the detection of SNP TSC0001259
atgagttttttt

SEQ ID NO: 345225 - DNA, 12 bp, Artificial Sequence
  Oligonucleotide primer for the detection of SNP TSC0001259
atgagttttttc

SEQ ID NO: 345226 - DNA, 12 bp, Artificial Sequence
  Oligonucleotide primer for the detection of SNP TSC0001259
ataaactccttc

SEQ ID NO: 345227 - DNA, 12 bp, Artificial Sequence
  Oligonucleotide primer for the detection of SNP TSC0001259
aatatataggat

SEQ ID NO: 345228 - DNA, 12 bp, Artificial Sequence
  Oligonucleotide primer for the detection of SNP TSC0043927
ccaattttaaaa

SEQ ID NO: 345229 - DNA, 12 bp, Artificial Sequence
  Oligonucleotide primer for the detection of SNP TSC0000739
ttagattttatt

SEQ ID NO: 345230 - DNA, 12 bp, Artificial Sequence
  Oligonucleotide primer for the detection of SNP TSC0000739
ttccaaacttca

SEQ ID NO: 345231 - DNA, 12 bp, Artificial Sequence
  Oligonucleotide primer for the detection of SNP TSC0000739
tatttaggggag

SEQ ID NO: 345232 - DNA, 12 bp, Artificial Sequence
  Oligonucleotide primer for the detection of SNP TSC0043928
taattctatcca

SEQ ID NO: 345233 - DNA, 12 bp, Artificial Sequence
  Oligonucleotide primer for the detection of SNP TSC0043928
gttaaggtaaaa

SEQ ID NO: 345234 - DNA, 12 bp, Artificial Sequence
  Oligonucleotide primer for the detection of SNP TSC0043928
tgattttattta

SEQ ID NO: 345235 - DNA, 12 bp, Artificial Sequence
  Oligonucleotide primer for the detection of SNP TSC0043931
caatatttaaac

SEQ ID NO: 345236 - DNA, 12 bp, Artificial Sequence
  Oligonucleotide primer for the detection of SNP TSC0007935
tattattatctc

SEQ ID NO: 345237 - DNA, 12 bp, Artificial Sequence
  Oligonucleotide primer for the detection of SNP TSC0043932
aaatacttaata

SEQ ID NO: 345238 - DNA, 12 bp, Artificial Sequence
  Oligonucleotide primer for the detection of SNP TSC0043932
tggaaggtttta

SEQ ID NO: 345239 - DNA, 12 bp, Artificial Sequence
  Oligonucleotide primer for the detection of SNP TSC0043932
taaaaaatttta

SEQ ID NO: 345240 - DNA, 12 bp, Artificial Sequence
  Oligonucleotide primer for the detection of SNP TSC0043932
taagtgtttggt

SEQ ID NO: 345241 - DNA, 12 bp, Artificial Sequence
  Oligonucleotide primer for the detection of SNP TSC0043933
tatctttttttc

SEQ ID NO: 345242 - DNA, 12 bp, Artificial Sequence
  Oligonucleotide primer for the detection of SNP TSC0043933
gtaatgttatta

SEQ ID NO: 345243 - DNA, 12 bp, Artificial Sequence
  Oligonucleotide primer for the detection of SNP TSC0000734
cttctaatacca

SEQ ID NO: 345244 - DNA, 12 bp, Artificial Sequence
  Oligonucleotide primer for the detection of SNP TSC0000734
ttattctcttca

SEQ ID NO: 345245 - DNA, 12 bp, Artificial Sequence
  Oligonucleotide primer for the detection of SNP TSC0000734
ttttagtattat

SEQ ID NO: 345246 - DNA, 12 bp, Artificial Sequence
  Oligonucleotide primer for the detection of SNP TSC0000735
tttttttttctc

SEQ ID NO: 345247 - DNA, 12 bp, Artificial Sequence
  Oligonucleotide primer for the detection of SNP TSC0000735
ttagagaaatag

SEQ ID NO: 345248 - DNA, 12 bp, Artificial Sequence
  Oligonucleotide primer for the detection of SNP TSC0006870
gattataaggtt

SEQ ID NO: 345249 - DNA, 12 bp, Artificial Sequence
  Oligonucleotide primer for the detection of SNP TSC0006870
aattacaaaatt

SEQ ID NO: 345250 - DNA, 12 bp, Artificial Sequence
  Oligonucleotide primer for the detection of SNP TSC0006870
gtttttgtatat

SEQ ID NO: 345251 - DNA, 12 bp, Artificial Sequence
  Oligonucleotide primer for the detection of SNP TSC0009928
acatctaaccat

SEQ ID NO: 345252 - DNA, 12 bp, Artificial Sequence
  Oligonucleotide primer for the detection of SNP TSC0043934
actttacaacct

SEQ ID NO: 345253 - DNA, 12 bp, Artificial Sequence
  Oligonucleotide primer for the detection of SNP TSC0043934
tttgtttggatt

SEQ ID NO: 345254 - DNA, 12 bp, Artificial Sequence
  Oligonucleotide primer for the detection of SNP TSC0043934
tttatctaaact

SEQ ID NO: 345255 - DNA, 12 bp, Artificial Sequence
  Oligonucleotide primer for the detection of SNP TSC0043934
attttgtaattt

SEQ ID NO: 345256 - DNA, 12 bp, Artificial Sequence
  Oligonucleotide primer for the detection of SNP TSC0043935
atttaataaaac

SEQ ID NO: 345257 - DNA, 12 bp, Artificial Sequence
  Oligonucleotide primer for the detection of SNP TSC0043935
taggatgatgta

SEQ ID NO: 345258 - DNA, 12 bp, Artificial Sequence
  Oligonucleotide primer for the detection of SNP TSC0043936
cacacactttat

SEQ ID NO: 345259 - DNA, 12 bp, Artificial Sequence
  Oligonucleotide primer for the detection of SNP TSC0043936
gagatttatttt

SEQ ID NO: 345260 - DNA, 12 bp, Artificial Sequence
  Oligonucleotide primer for the detection of SNP TSC0000978
gtttgtaggtgt

SEQ ID NO: 345261 - DNA, 12 bp, Artificial Sequence
  Oligonucleotide primer for the detection of SNP TSC0043938
cataacatttaa

SEQ ID NO: 345262 - DNA, 12 bp, Artificial Sequence
  Oligonucleotide primer for the detection of SNP TSC0043938
cgtaacatttaa

SEQ ID NO: 345263 - DNA, 12 bp, Artificial Sequence
  Oligonucleotide primer for the detection of SNP TSC0043938
tttaggaagtgt

SEQ ID NO: 345264 - DNA, 12 bp, Artificial Sequence
  Oligonucleotide primer for the detection of SNP TSC0043938
tttaggaagcgt

SEQ ID NO: 345265 - DNA, 12 bp, Artificial Sequence
  Oligonucleotide primer for the detection of SNP TSC0043938
ctcaaaaaacat

SEQ ID NO: 345266 - DNA, 12 bp, Artificial Sequence
  Oligonucleotide primer for the detection of SNP TSC0043938
ctcaaaaaacgt

SEQ ID NO: 345267 - DNA, 12 bp, Artificial Sequence
  Oligonucleotide primer for the detection of SNP TSC0043938
tgtgatatttag

SEQ ID NO: 345268 - DNA, 12 bp, Artificial Sequence
  Oligonucleotide primer for the detection of SNP TSC0043938
cgtgatatttag

SEQ ID NO: 345269 - DNA, 12 bp, Artificial Sequence
  Oligonucleotide primer for the detection of SNP TSC0043939
gtgtataggaat

SEQ ID NO: 345270 - DNA, 12 bp, Artificial Sequence
  Oligonucleotide primer for the detection of SNP TSC0043940
tcctacccatca

SEQ ID NO: 345271 - DNA, 12 bp, Artificial Sequence
  Oligonucleotide primer for the detection of SNP TSC0043940
tcctacccgtca

SEQ ID NO: 345272 - DNA, 12 bp, Artificial Sequence
  Oligonucleotide primer for the detection of SNP TSC0043940
cactcaaaatac

SEQ ID NO: 345273 - DNA, 12 bp, Artificial Sequence
  Oligonucleotide primer for the detection of SNP TSC0043940
ttttgttcgtta

SEQ ID NO: 345274 - DNA, 12 bp, Artificial Sequence
  Oligonucleotide primer for the detection of SNP TSC0043941
ttaaaaataaat

SEQ ID NO: 345275 - DNA, 12 bp, Artificial Sequence
  Oligonucleotide primer for the detection of SNP TSC0043941
ttagattggggg

SEQ ID NO: 345276 - DNA, 12 bp, Artificial Sequence
  Oligonucleotide primer for the detection of SNP TSC0043942
actttccttaat

SEQ ID NO: 345277 - DNA, 12 bp, Artificial Sequence
  Oligonucleotide primer for the detection of SNP TSC0043942
taaggttgttaa

SEQ ID NO: 345278 - DNA, 12 bp, Artificial Sequence
  Oligonucleotide primer for the detection of SNP TSC0043942
caaaattatcaa

SEQ ID NO: 345279 - DNA, 12 bp, Artificial Sequence
  Oligonucleotide primer for the detection of SNP TSC0043943
cctcttaaccat

SEQ ID NO: 345280 - DNA, 12 bp, Artificial Sequence
  Oligonucleotide primer for the detection of SNP TSC0043944
catcttttccct

SEQ ID NO: 345281 - DNA, 12 bp, Artificial Sequence
  Oligonucleotide primer for the detection of SNP TSC0043944
ataatgtgaaga

SEQ ID NO: 345282 - DNA, 12 bp, Artificial Sequence
  Oligonucleotide primer for the detection of SNP TSC0000165
ttataatcaaaa

SEQ ID NO: 345283 - DNA, 12 bp, Artificial Sequence
  Oligonucleotide primer for the detection of SNP TSC0000165
gtatgtaagaag

SEQ ID NO: 345284 - DNA, 12 bp, Artificial Sequence
  Oligonucleotide primer for the detection of SNP TSC0000165
ttgtaattaaag

SEQ ID NO: 345285 - DNA, 12 bp, Artificial Sequence
  Oligonucleotide primer for the detection of SNP TSC0043945
ttccaacaccac

SEQ ID NO: 345286 - DNA, 12 bp, Artificial Sequence
  Oligonucleotide primer for the detection of SNP TSC0043945
ttataaagaagg

SEQ ID NO: 345287 - DNA, 12 bp, Artificial Sequence
  Oligonucleotide primer for the detection of SNP TSC0043946
tactaatccttt

SEQ ID NO: 345288 - DNA, 12 bp, Artificial Sequence
  Oligonucleotide primer for the detection of SNP TSC0043946
agataattttag

SEQ ID NO: 345289 - DNA, 12 bp, Artificial Sequence
  Oligonucleotide primer for the detection of SNP TSC0043947
cacctcaacttc

SEQ ID NO: 345290 - DNA, 12 bp, Artificial Sequence
  Oligonucleotide primer for the detection of SNP TSC0043949
cccactataaac

SEQ ID NO: 345291 - DNA, 12 bp, Artificial Sequence
  Oligonucleotide primer for the detection of SNP TSC0043949
taagaaaaatga

SEQ ID NO: 345292 - DNA, 12 bp, Artificial Sequence
  Oligonucleotide primer for the detection of SNP TSC0043950
atatccatcatc

SEQ ID NO: 345293 - DNA, 12 bp, Artificial Sequence
  Oligonucleotide primer for the detection of SNP TSC0043950
ttgttttaaata

SEQ ID NO: 345294 - DNA, 12 bp, Artificial Sequence
  Oligonucleotide primer for the detection of SNP TSC0043951
aaaacccacaaa

SEQ ID NO: 345295 - DNA, 12 bp, Artificial Sequence
  Oligonucleotide primer for the detection of SNP TSC0043951
tatggggttttt

SEQ ID NO: 345296 - DNA, 12 bp, Artificial Sequence
  Oligonucleotide primer for the detection of SNP TSC0043951
caccataaaacc

SEQ ID NO: 345297 - DNA, 12 bp, Artificial Sequence
  Oligonucleotide primer for the detection of SNP TSC0043951
ggaatttatagg

SEQ ID NO: 345298 - DNA, 12 bp, Artificial Sequence
  Oligonucleotide primer for the detection of SNP TSC0043954
tttctcataaaa

SEQ ID NO: 345299 - DNA, 12 bp, Artificial Sequence
  Oligonucleotide primer for the detection of SNP TSC0043956
ctaatcactaaa

SEQ ID NO: 345300 - DNA, 12 bp, Artificial Sequence
  Oligonucleotide primer for the detection of SNP TSC0043956
tctaaattcaca

SEQ ID NO: 345301 - DNA, 12 bp, Artificial Sequence
  Oligonucleotide primer for the detection of SNP TSC0043957
aaattaatttat

SEQ ID NO: 345302 - DNA, 12 bp, Artificial Sequence
  Oligonucleotide primer for the detection of SNP TSC0043960
ttaaaatacatc

SEQ ID NO: 345303 - DNA, 12 bp, Artificial Sequence
  Oligonucleotide primer for the detection of SNP TSC0043962
tgtaggttgggt

SEQ ID NO: 345304 - DNA, 12 bp, Artificial Sequence
  Oligonucleotide primer for the detection of SNP TSC0043963
attggtaagaaa

SEQ ID NO: 345305 - DNA, 12 bp, Artificial Sequence
  Oligonucleotide primer for the detection of SNP TSC0008492
aaaaaaacactt

SEQ ID NO: 345306 - DNA, 12 bp, Artificial Sequence
  Oligonucleotide primer for the detection of SNP TSC0043965
atcatcattcac

SEQ ID NO: 345307 - DNA, 12 bp, Artificial Sequence
  Oligonucleotide primer for the detection of SNP TSC0043965
atcatcattcgc

SEQ ID NO: 345308 - DNA, 12 bp, Artificial Sequence
  Oligonucleotide primer for the detection of SNP TSC0043965
atcatcgttcac

SEQ ID NO: 345309 - DNA, 12 bp, Artificial Sequence
  Oligonucleotide primer for the detection of SNP TSC0043965
atcatcgttcgc

SEQ ID NO: 345310 - DNA, 12 bp, Artificial Sequence
  Oligonucleotide primer for the detection of SNP TSC0043965
tatatttgtaaa

SEQ ID NO: 345311 - DNA, 12 bp, Artificial Sequence
  Oligonucleotide primer for the detection of SNP TSC0043965
tatatttataaa

SEQ ID NO: 345312 - DNA, 12 bp, Artificial Sequence
  Oligonucleotide primer for the detection of SNP TSC0043965
attattgtttgt

SEQ ID NO: 345313 - DNA, 12 bp, Artificial Sequence
  Oligonucleotide primer for the detection of SNP TSC0043965
attatcgtttgt

SEQ ID NO: 345314 - DNA, 12 bp, Artificial Sequence
  Oligonucleotide primer for the detection of SNP TSC0043965
attattgttcgt

SEQ ID NO: 345315 - DNA, 12 bp, Artificial Sequence
  Oligonucleotide primer for the detection of SNP TSC0043965
attatcgttcgt

SEQ ID NO: 345316 - DNA, 12 bp, Artificial Sequence
  Oligonucleotide primer for the detection of SNP TSC0043966
acttaaaacaac

SEQ ID NO: 345317 - DNA, 12 bp, Artificial Sequence
  Oligonucleotide primer for the detection of SNP TSC0043970
taatttaggaga

SEQ ID NO: 345318 - DNA, 12 bp, Artificial Sequence
  Oligonucleotide primer for the detection of SNP TSC0006044
ttatcaattctc

SEQ ID NO: 345319 - DNA, 12 bp, Artificial Sequence
  Oligonucleotide primer for the detection of SNP TSC0006044
ttatcgattctc

SEQ ID NO: 345320 - DNA, 12 bp, Artificial Sequence
  Oligonucleotide primer for the detection of SNP TSC0006044
ttattattaata

SEQ ID NO: 345321 - DNA, 12 bp, Artificial Sequence
  Oligonucleotide primer for the detection of SNP TSC0043972
aaatccaaatat

SEQ ID NO: 345322 - DNA, 12 bp, Artificial Sequence
  Oligonucleotide primer for the detection of SNP TSC0043972
aaatttatttta

SEQ ID NO: 345323 - DNA, 12 bp, Artificial Sequence
  Oligonucleotide primer for the detection of SNP TSC0043973
acttatattaat

SEQ ID NO: 345324 - DNA, 12 bp, Artificial Sequence
  Oligonucleotide primer for the detection of SNP TSC0043973
tatttgaaatat

SEQ ID NO: 345325 - DNA, 12 bp, Artificial Sequence
  Oligonucleotide primer for the detection of SNP TSC0043973
tacttaaaatat

SEQ ID NO: 345326 - DNA, 12 bp, Artificial Sequence
  Oligonucleotide primer for the detection of SNP TSC0043974
attcccttttac

SEQ ID NO: 345327 - DNA, 12 bp, Artificial Sequence
  Oligonucleotide primer for the detection of SNP TSC0043974
ttttttgtaaat

SEQ ID NO: 345328 - DNA, 12 bp, Artificial Sequence
  Oligonucleotide primer for the detection of SNP TSC0043974
tctctacaaata

SEQ ID NO: 345329 - DNA, 12 bp, Artificial Sequence
  Oligonucleotide primer for the detection of SNP TSC0043975
agagtttttttc

SEQ ID NO: 345330 - DNA, 12 bp, Artificial Sequence
  Oligonucleotide primer for the detection of SNP TSC0043975
aaaaccttcccc

SEQ ID NO: 345331 - DNA, 12 bp, Artificial Sequence
  Oligonucleotide primer for the detection of SNP TSC0043975
taatatatagag

SEQ ID NO: 345332 - DNA, 12 bp, Artificial Sequence
  Oligonucleotide primer for the detection of SNP TSC0043976
ttcacaaacact

SEQ ID NO: 345333 - DNA, 12 bp, Artificial Sequence
  Oligonucleotide primer for the detection of SNP TSC0043976
aaaataaagagg

SEQ ID NO: 345334 - DNA, 12 bp, Artificial Sequence
  Oligonucleotide primer for the detection of SNP TSC0043976
tttataggtatt

SEQ ID NO: 345335 - DNA, 12 bp, Artificial Sequence
  Oligonucleotide primer for the detection of SNP TSC0043980
ccaaataaaatt

SEQ ID NO: 345336 - DNA, 12 bp, Artificial Sequence
  Oligonucleotide primer for the detection of SNP TSC0043980
atattatttaaa

SEQ ID NO: 345337 - DNA, 12 bp, Artificial Sequence
  Oligonucleotide primer for the detection of SNP TSC0043981
gaattgagtatt

SEQ ID NO: 345338 - DNA, 12 bp, Artificial Sequence
  Oligonucleotide primer for the detection of SNP TSC0043981
aaattaaatatc

SEQ ID NO: 345339 - DNA, 12 bp, Artificial Sequence
  Oligonucleotide primer for the detection of SNP TSC0043982
tacctaatctaa

SEQ ID NO: 345340 - DNA, 12 bp, Artificial Sequence
  Oligonucleotide primer for the detection of SNP TSC0043982
attataaaatac

SEQ ID NO: 345341 - DNA, 12 bp, Artificial Sequence
  Oligonucleotide primer for the detection of SNP TSC0043982
atcacaaaatac

SEQ ID NO: 345342 - DNA, 12 bp, Artificial Sequence
  Oligonucleotide primer for the detection of SNP TSC0043986
tcccgaaaaaaa

SEQ ID NO: 345343 - DNA, 12 bp, Artificial Sequence
  Oligonucleotide primer for the detection of SNP TSC0043986
taggagaaaata

SEQ ID NO: 345344 - DNA, 12 bp, Artificial Sequence
  Oligonucleotide primer for the detection of SNP TSC0043986
caaaaaaaaaca

SEQ ID NO: 345345 - DNA, 12 bp, Artificial Sequence
  Oligonucleotide primer for the detection of SNP TSC0043986
tttgaaggaagt

SEQ ID NO: 345346 - DNA, 12 bp, Artificial Sequence
  Oligonucleotide primer for the detection of SNP TSC0043986
ttcgaaggaagt

SEQ ID NO: 345347 - DNA, 12 bp, Artificial Sequence
  Oligonucleotide primer for the detection of SNP TSC0043987
aattaattgggg

SEQ ID NO: 345348 - DNA, 12 bp, Artificial Sequence
  Oligonucleotide primer for the detection of SNP TSC0043988
ccttccttcctt

SEQ ID NO: 345349 - DNA, 12 bp, Artificial Sequence
  Oligonucleotide primer for the detection of SNP TSC0043988
ggaggaagaaag

SEQ ID NO: 345350 - DNA, 12 bp, Artificial Sequence
  Oligonucleotide primer for the detection of SNP TSC0043989
taattaccacta

SEQ ID NO: 345351 - DNA, 12 bp, Artificial Sequence
  Oligonucleotide primer for the detection of SNP TSC0043989
aggtttagtgtt

SEQ ID NO: 345352 - DNA, 12 bp, Artificial Sequence
  Oligonucleotide primer for the detection of SNP TSC0043990
ctttacataata

SEQ ID NO: 345353 - DNA, 12 bp, Artificial Sequence
  Oligonucleotide primer for the detection of SNP TSC0043990
tactttatcata

SEQ ID NO: 345354 - DNA, 12 bp, Artificial Sequence
  Oligonucleotide primer for the detection of SNP TSC0043990
tttttgtataat

SEQ ID NO: 345355 - DNA, 12 bp, Artificial Sequence
  Oligonucleotide primer for the detection of SNP TSC0043991
tctaataatttt

SEQ ID NO: 345356 - DNA, 12 bp, Artificial Sequence
  Oligonucleotide primer for the detection of SNP TSC0043991
ttgagttatttg

SEQ ID NO: 345357 - DNA, 12 bp, Artificial Sequence
  Oligonucleotide primer for the detection of SNP TSC0043992
ggtggtaaaata

SEQ ID NO: 345358 - DNA, 12 bp, Artificial Sequence
  Oligonucleotide primer for the detection of SNP TSC0043994
cataacaaaaat

SEQ ID NO: 345359 - DNA, 12 bp, Artificial Sequence
  Oligonucleotide primer for the detection of SNP TSC0043994
ggttatagttgg

SEQ ID NO: 345360 - DNA, 12 bp, Artificial Sequence
  Oligonucleotide primer for the detection of SNP TSC0043995
acaaccacacaa

SEQ ID NO: 345361 - DNA, 12 bp, Artificial Sequence
  Oligonucleotide primer for the detection of SNP TSC0043995
gtttttatgtag

SEQ ID NO: 345362 - DNA, 12 bp, Artificial Sequence
  Oligonucleotide primer for the detection of SNP TSC0043996
atatattaactt

SEQ ID NO: 345363 - DNA, 12 bp, Artificial Sequence
  Oligonucleotide primer for the detection of SNP TSC0043996
tgtgagaattta

SEQ ID NO: 345364 - DNA, 12 bp, Artificial Sequence
  Oligonucleotide primer for the detection of SNP TSC0043998
caaaaaaaattt

SEQ ID NO: 345365 - DNA, 12 bp, Artificial Sequence
  Oligonucleotide primer for the detection of SNP TSC0043998
tggtatatattt

SEQ ID NO: 345366 - DNA, 12 bp, Artificial Sequence
  Oligonucleotide primer for the detection of SNP TSC0043998
taacatatattt

SEQ ID NO: 345367 - DNA, 12 bp, Artificial Sequence
  Oligonucleotide primer for the detection of SNP TSC0043999
taaaatatttta

SEQ ID NO: 345368 - DNA, 12 bp, Artificial Sequence
  Oligonucleotide primer for the detection of SNP TSC0044000
atgttaaaaaaa

SEQ ID NO: 345369 - DNA, 12 bp, Artificial Sequence
  Oligonucleotide primer for the detection of SNP TSC0044001
tgtttttagtat

SEQ ID NO: 345370 - DNA, 12 bp, Artificial Sequence
  Oligonucleotide primer for the detection of SNP TSC0044001
tatttccaatac

SEQ ID NO: 345371 - DNA, 12 bp, Artificial Sequence
  Oligonucleotide primer for the detection of SNP TSC0044001
taggagagggag

SEQ ID NO: 345372 - DNA, 12 bp, Artificial Sequence
  Oligonucleotide primer for the detection of SNP TSC0044002
attaaaataccc

SEQ ID NO: 345373 - DNA, 12 bp, Artificial Sequence
  Oligonucleotide primer for the detection of SNP TSC0044002
tttatgagtggg

SEQ ID NO: 345374 - DNA, 12 bp, Artificial Sequence
  Oligonucleotide primer for the detection of SNP TSC0044003
accaataaaata

SEQ ID NO: 345375 - DNA, 12 bp, Artificial Sequence
  Oligonucleotide primer for the detection of SNP TSC0044003
tttattctataa

SEQ ID NO: 345376 - DNA, 12 bp, Artificial Sequence
  Oligonucleotide primer for the detection of SNP TSC0044003
gttaatagggtg

SEQ ID NO: 345377 - DNA, 12 bp, Artificial Sequence
  Oligonucleotide primer for the detection of SNP TSC0044007
acaaacatttaa

SEQ ID NO: 345378 - DNA, 12 bp, Artificial Sequence
  Oligonucleotide primer for the detection of SNP TSC0044007
gttttatagagt

SEQ ID NO: 345379 - DNA, 12 bp, Artificial Sequence
  Oligonucleotide primer for the detection of SNP TSC0044007
accttataaaac

SEQ ID NO: 345380 - DNA, 12 bp, Artificial Sequence
  Oligonucleotide primer for the detection of SNP TSC0044007
gtagatatttgg

SEQ ID NO: 345381 - DNA, 12 bp, Artificial Sequence
  Oligonucleotide primer for the detection of SNP TSC0044009
ttacaaaccctc

SEQ ID NO: 345382 - DNA, 12 bp, Artificial Sequence
  Oligonucleotide primer for the detection of SNP TSC0044009
ttttaaattgaa

SEQ ID NO: 345383 - DNA, 12 bp, Artificial Sequence
  Oligonucleotide primer for the detection of SNP TSC0044010
aaaattatttat

SEQ ID NO: 345384 - DNA, 12 bp, Artificial Sequence
  Oligonucleotide primer for the detection of SNP TSC0044010
aatttttgataa

SEQ ID NO: 345385 - DNA, 12 bp, Artificial Sequence
  Oligonucleotide primer for the detection of SNP TSC0044012
ttgagttaaata

SEQ ID NO: 345386 - DNA, 12 bp, Artificial Sequence
  Oligonucleotide primer for the detection of SNP TSC0044013
tttatttcttta

SEQ ID NO: 345387 - DNA, 12 bp, Artificial Sequence
  Oligonucleotide primer for the detection of SNP TSC0044013
atcactatactc

SEQ ID NO: 345388 - DNA, 12 bp, Artificial Sequence
  Oligonucleotide primer for the detection of SNP TSC0044014
tcactccaacac

SEQ ID NO: 345389 - DNA, 12 bp, Artificial Sequence
  Oligonucleotide primer for the detection of SNP TSC0044014
aaatttccctca

SEQ ID NO: 345390 - DNA, 12 bp, Artificial Sequence
  Oligonucleotide primer for the detection of SNP TSC0044014
ttattttagtat

SEQ ID NO: 345391 - DNA, 12 bp, Artificial Sequence
  Oligonucleotide primer for the detection of SNP TSC0006355
ctaataaccctc

SEQ ID NO: 345392 - DNA, 12 bp, Artificial Sequence
  Oligonucleotide primer for the detection of SNP TSC0006355
ataatctcccca

SEQ ID NO: 345393 - DNA, 12 bp, Artificial Sequence
  Oligonucleotide primer for the detection of SNP TSC0006355
tggtaatttttt

SEQ ID NO: 345394 - DNA, 12 bp, Artificial Sequence
  Oligonucleotide primer for the detection of SNP TSC0044015
ttctaaaaatat

SEQ ID NO: 345395 - DNA, 12 bp, Artificial Sequence
  Oligonucleotide primer for the detection of SNP TSC0044015
tttgatatataa

SEQ ID NO: 345396 - DNA, 12 bp, Artificial Sequence
  Oligonucleotide primer for the detection of SNP TSC0044016
acccaaccaaat

SEQ ID NO: 345397 - DNA, 12 bp, Artificial Sequence
  Oligonucleotide primer for the detection of SNP TSC0044016
gggtggttgtta

SEQ ID NO: 345398 - DNA, 12 bp, Artificial Sequence
  Oligonucleotide primer for the detection of SNP TSC0044016
gggcggttgtta

SEQ ID NO: 345399 - DNA, 12 bp, Artificial Sequence
  Oligonucleotide primer for the detection of SNP TSC0044016
aaacaactacta

SEQ ID NO: 345400 - DNA, 12 bp, Artificial Sequence
  Oligonucleotide primer for the detection of SNP TSC0044016
aaacgactacta

SEQ ID NO: 345401 - DNA, 12 bp, Artificial Sequence
  Oligonucleotide primer for the detection of SNP TSC0044016
atttagttagat

SEQ ID NO: 345402 - DNA, 12 bp, Artificial Sequence
  Oligonucleotide primer for the detection of SNP TSC0044018
aattttttttct

SEQ ID NO: 345403 - DNA, 12 bp, Artificial Sequence
  Oligonucleotide primer for the detection of SNP TSC0044018
gatgattttgga

SEQ ID NO: 345404 - DNA, 12 bp, Artificial Sequence
  Oligonucleotide primer for the detection of SNP TSC0044020
cctctactaaac

SEQ ID NO: 345405 - DNA, 12 bp, Artificial Sequence
  Oligonucleotide primer for the detection of SNP TSC0044020
aaaccaaaacca

SEQ ID NO: 345406 - DNA, 12 bp, Artificial Sequence
  Oligonucleotide primer for the detection of SNP TSC0044021
atttaaattact

SEQ ID NO: 345407 - DNA, 12 bp, Artificial Sequence
  Oligonucleotide primer for the detection of SNP TSC0044021
aaattagtttat

SEQ ID NO: 345408 - DNA, 12 bp, Artificial Sequence
  Oligonucleotide primer for the detection of SNP TSC0044021
atttaagttgtt

SEQ ID NO: 345409 - DNA, 12 bp, Artificial Sequence
  Oligonucleotide primer for the detection of SNP TSC0044022
aggagttgaatg

SEQ ID NO: 345410 - DNA, 12 bp, Artificial Sequence
  Oligonucleotide primer for the detection of SNP TSC0044022
aggagtcgaatg

SEQ ID NO: 345411 - DNA, 12 bp, Artificial Sequence
  Oligonucleotide primer for the detection of SNP TSC0044025
aacttatttcct

SEQ ID NO: 345412 - DNA, 12 bp, Artificial Sequence
  Oligonucleotide primer for the detection of SNP TSC0044025
tattaaaataga

SEQ ID NO: 345413 - DNA, 12 bp, Artificial Sequence
  Oligonucleotide primer for the detection of SNP TSC0044026
tacactacttaa

SEQ ID NO: 345414 - DNA, 12 bp, Artificial Sequence
  Oligonucleotide primer for the detection of SNP TSC0044026
tttttttggatt

SEQ ID NO: 345415 - DNA, 12 bp, Artificial Sequence
  Oligonucleotide primer for the detection of SNP TSC0044026
cttttcttaaac

SEQ ID NO: 345416 - DNA, 12 bp, Artificial Sequence
  Oligonucleotide primer for the detection of SNP TSC0044027
tatacatttatt

SEQ ID NO: 345417 - DNA, 12 bp, Artificial Sequence
  Oligonucleotide primer for the detection of SNP TSC0044027
agtagtaaaatg

SEQ ID NO: 345418 - DNA, 12 bp, Artificial Sequence
  Oligonucleotide primer for the detection of SNP TSC0044028
ctcataaaaata

SEQ ID NO: 345419 - DNA, 12 bp, Artificial Sequence
  Oligonucleotide primer for the detection of SNP TSC0044028
ctcgtaaaaata

SEQ ID NO: 345420 - DNA, 12 bp, Artificial Sequence
  Oligonucleotide primer for the detection of SNP TSC0044028
agagggggttgt

SEQ ID NO: 345421 - DNA, 12 bp, Artificial Sequence
  Oligonucleotide primer for the detection of SNP TSC0044028
tttgtgagggta

SEQ ID NO: 345422 - DNA, 12 bp, Artificial Sequence
  Oligonucleotide primer for the detection of SNP TSC0044028
ttcgtgagggta

SEQ ID NO: 345423 - DNA, 12 bp, Artificial Sequence
  Oligonucleotide primer for the detection of SNP TSC0044029
atactaatacca

SEQ ID NO: 345424 - DNA, 12 bp, Artificial Sequence
  Oligonucleotide primer for the detection of SNP TSC0044029
ggggagaatttt

SEQ ID NO: 345425 - DNA, 12 bp, Artificial Sequence
  Oligonucleotide primer for the detection of SNP TSC0044029
tatgttaatatt

SEQ ID NO: 345426 - DNA, 12 bp, Artificial Sequence
  Oligonucleotide primer for the detection of SNP TSC0044030
gttataaaaatg

SEQ ID NO: 345427 - DNA, 12 bp, Artificial Sequence
  Oligonucleotide primer for the detection of SNP TSC0044031
cacaaatataat

SEQ ID NO: 345428 - DNA, 12 bp, Artificial Sequence
  Oligonucleotide primer for the detection of SNP TSC0044032
ataatcaaaaat

SEQ ID NO: 345429 - DNA, 12 bp, Artificial Sequence
  Oligonucleotide primer for the detection of SNP TSC0044033
aactaacaattc

SEQ ID NO: 345430 - DNA, 12 bp, Artificial Sequence
  Oligonucleotide primer for the detection of SNP TSC0044033
ttgattgtttga

SEQ ID NO: 345431 - DNA, 12 bp, Artificial Sequence
  Oligonucleotide primer for the detection of SNP TSC0044034
ttcaaatataaa

SEQ ID NO: 345432 - DNA, 12 bp, Artificial Sequence
  Oligonucleotide primer for the detection of SNP TSC0044034
tggtgttattgt

SEQ ID NO: 345433 - DNA, 12 bp, Artificial Sequence
  Oligonucleotide primer for the detection of SNP TSC0044034
taatatcattat

SEQ ID NO: 345434 - DNA, 12 bp, Artificial Sequence
  Oligonucleotide primer for the detection of SNP TSC0044034
tttaggtataaa

SEQ ID NO: 345435 - DNA, 12 bp, Artificial Sequence
  Oligonucleotide primer for the detection of SNP TSC0044035
ttaataatacct

SEQ ID NO: 345436 - DNA, 12 bp, Artificial Sequence
  Oligonucleotide primer for the detection of SNP TSC0044036
attaaatttcct

SEQ ID NO: 345437 - DNA, 12 bp, Artificial Sequence
  Oligonucleotide primer for the detection of SNP TSC0044036
ttataagttata

SEQ ID NO: 345438 - DNA, 12 bp, Artificial Sequence
  Oligonucleotide primer for the detection of SNP TSC0007643
cttataacaaca

SEQ ID NO: 345439 - DNA, 12 bp, Artificial Sequence
  Oligonucleotide primer for the detection of SNP TSC0007643
cttataacaacg

SEQ ID NO: 345440 - DNA, 12 bp, Artificial Sequence
  Oligonucleotide primer for the detection of SNP TSC0007643
aagttaatgttt

SEQ ID NO: 345441 - DNA, 12 bp, Artificial Sequence
  Oligonucleotide primer for the detection of SNP TSC0007643
aaaccaatacct

SEQ ID NO: 345442 - DNA, 12 bp, Artificial Sequence
  Oligonucleotide primer for the detection of SNP TSC0007643
tttgtagtaatg

SEQ ID NO: 345443 - DNA, 12 bp, Artificial Sequence
  Oligonucleotide primer for the detection of SNP TSC0007643
tttgtagtaacg

SEQ ID NO: 345444 - DNA, 12 bp, Artificial Sequence
  Oligonucleotide primer for the detection of SNP TSC0007644
tcctcacataca

SEQ ID NO: 345445 - DNA, 12 bp, Artificial Sequence
  Oligonucleotide primer for the detection of SNP TSC0007644
atttttagaagt

SEQ ID NO: 345446 - DNA, 12 bp, Artificial Sequence
  Oligonucleotide primer for the detection of SNP TSC0007644
attctcaaaaat

SEQ ID NO: 345447 - DNA, 12 bp, Artificial Sequence
  Oligonucleotide primer for the detection of SNP TSC0005671
acaaaacttcat

SEQ ID NO: 345448 - DNA, 12 bp, Artificial Sequence
  Oligonucleotide primer for the detection of SNP TSC0005671
agagtaaaggta

SEQ ID NO: 345449 - DNA, 12 bp, Artificial Sequence
  Oligonucleotide primer for the detection of SNP TSC0044038
ttacaatactat

SEQ ID NO: 345450 - DNA, 12 bp, Artificial Sequence
  Oligonucleotide primer for the detection of SNP TSC0044038
tgtaaaatttga

SEQ ID NO: 345451 - DNA, 12 bp, Artificial Sequence
  Oligonucleotide primer for the detection of SNP TSC0044039
tgaaatatttta

SEQ ID NO: 345452 - DNA, 12 bp, Artificial Sequence
  Oligonucleotide primer for the detection of SNP TSC0007928
ttccaatttctt

SEQ ID NO: 345453 - DNA, 12 bp, Artificial Sequence
  Oligonucleotide primer for the detection of SNP TSC0005430
aaactctttctc

SEQ ID NO: 345454 - DNA, 12 bp, Artificial Sequence
  Oligonucleotide primer for the detection of SNP TSC0005430
gaagtagagttt

SEQ ID NO: 345455 - DNA, 12 bp, Artificial Sequence
  Oligonucleotide primer for the detection of SNP TSC0005431
atctaccataat

SEQ ID NO: 345456 - DNA, 12 bp, Artificial Sequence
  Oligonucleotide primer for the detection of SNP TSC0005431
aatttaattttt

SEQ ID NO: 345457 - DNA, 12 bp, Artificial Sequence
  Oligonucleotide primer for the detection of SNP TSC0005432
tcaaaaattaat

SEQ ID NO: 345458 - DNA, 12 bp, Artificial Sequence
  Oligonucleotide primer for the detection of SNP TSC0005432
agtaaatattgt

SEQ ID NO: 345459 - DNA, 12 bp, Artificial Sequence
  Oligonucleotide primer for the detection of SNP TSC0005432
aataaatactat

SEQ ID NO: 345460 - DNA, 12 bp, Artificial Sequence
  Oligonucleotide primer for the detection of SNP TSC0005432
ttagaagttggt

SEQ ID NO: 345461 - DNA, 12 bp, Artificial Sequence
  Oligonucleotide primer for the detection of SNP TSC0044044
cctaaacatttt

SEQ ID NO: 345462 - DNA, 12 bp, Artificial Sequence
  Oligonucleotide primer for the detection of SNP TSC0044044
gtttattaacga

SEQ ID NO: 345463 - DNA, 12 bp, Artificial Sequence
  Oligonucleotide primer for the detection of SNP TSC0044045
ttagggtgggtg

SEQ ID NO: 345464 - DNA, 12 bp, Artificial Sequence
  Oligonucleotide primer for the detection of SNP TSC0044045
ttagggcgggtg

SEQ ID NO: 345465 - DNA, 12 bp, Artificial Sequence
  Oligonucleotide primer for the detection of SNP TSC0044045
ttagggtgggcg

SEQ ID NO: 345466 - DNA, 12 bp, Artificial Sequence
  Oligonucleotide primer for the detection of SNP TSC0044045
ttagggcgggcg

SEQ ID NO: 345467 - DNA, 12 bp, Artificial Sequence
  Oligonucleotide primer for the detection of SNP TSC0044045
ttaaaacaaaca

SEQ ID NO: 345468 - DNA, 12 bp, Artificial Sequence
  Oligonucleotide primer for the detection of SNP TSC0044045
ttaaaacaaacg

SEQ ID NO: 345469 - DNA, 12 bp, Artificial Sequence
  Oligonukleotid-Primer
ttaaaacgaaca

SEQ ID NO: 345470 - DNA, 12 bp, Artificial Sequence
  Oligonucleotide primer for the detection of SNP TSC0044045
ttaaaacgaacg

SEQ ID NO: 345471 - DNA, 12 bp, Artificial Sequence
  Oligonucleotide primer for the detection of SNP TSC0044045
ggtgtgaattat

SEQ ID NO: 345472 - DNA, 12 bp, Artificial Sequence
  Oligonucleotide primer for the detection of SNP TSC0044046
actaatcttaaa

SEQ ID NO: 345473 - DNA, 12 bp, Artificial Sequence
  Oligonucleotide primer for the detection of SNP TSC0044046
tatgaggttggg

SEQ ID NO: 345474 - DNA, 12 bp, Artificial Sequence
  Oligonucleotide primer for the detection of SNP TSC0044046
tacgaggttggg

SEQ ID NO: 345475 - DNA, 12 bp, Artificial Sequence
  Oligonucleotide primer for the detection of SNP TSC0044046
tatgaggtcggg

SEQ ID NO: 345476 - DNA, 12 bp, Artificial Sequence
  Oligonucleotide primer for the detection of SNP TSC0044046
tacgaggtcggg

SEQ ID NO: 345477 - DNA, 12 bp, Artificial Sequence
  Oligonucleotide primer for the detection of SNP TSC0044046
acaaaatcgaaa

SEQ ID NO: 345478 - DNA, 12 bp, Artificial Sequence
  Oligonucleotide primer for the detection of SNP TSC0044046
acgaaatcaaaa

SEQ ID NO: 345479 - DNA, 12 bp, Artificial Sequence
  Oligonucleotide primer for the detection of SNP TSC0044046
acgaaatcgaaa

SEQ ID NO: 345480 - DNA, 12 bp, Artificial Sequence
  Oligonucleotide primer for the detection of SNP TSC0044047
caacctaattaa

SEQ ID NO: 345481 - DNA, 12 bp, Artificial Sequence
  Oligonucleotide primer for the detection of SNP TSC0044047
agtttgtttttt

SEQ ID NO: 345482 - DNA, 12 bp, Artificial Sequence
  Oligonucleotide primer for the detection of SNP TSC0044047
attctttaaaaa

SEQ ID NO: 345483 - DNA, 12 bp, Artificial Sequence
  Oligonucleotide primer for the detection of SNP TSC0044047
agtttaattgat

SEQ ID NO: 345484 - DNA, 12 bp, Artificial Sequence
  unsure (4, 5): Oligonucleotide primer for the detection of SNP TSC0044048
tttnnactttta

SEQ ID NO: 345485 - DNA, 12 bp, Artificial Sequence
  Oligonucleotide primer for the detection of SNP TSC0044048
tattaattaaat

SEQ ID NO: 345486 - DNA, 12 bp, Artificial Sequence
  Oligonucleotide primer for the detection of SNP TSC0044048
ataccaattaaa

SEQ ID NO: 345487 - DNA, 12 bp, Artificial Sequence
  unsure (5, 6): Oligonucleotide primer for the detection of SNP TSC0044048
ttttnnattttt

SEQ ID NO: 345488 - DNA, 12 bp, Artificial Sequence
  Oligonucleotide primer for the detection of SNP TSC0044049
gaagagtagaga

SEQ ID NO: 345489 - DNA, 12 bp, Artificial Sequence
  Oligonucleotide primer for the detection of SNP TSC0044049
gatggggatagg

SEQ ID NO: 345490 - DNA, 12 bp, Artificial Sequence
  Oligonucleotide primer for the detection of SNP TSC0006932
tcttccttacct

SEQ ID NO: 345491 - DNA, 12 bp, Artificial Sequence
  Oligonucleotide primer for the detection of SNP TSC0006932
aataaaaggtgg

SEQ ID NO: 345492 - DNA, 12 bp, Artificial Sequence
  Oligonucleotide primer for the detection of SNP TSC0044055
ttttcctttttt

SEQ ID NO: 345493 - DNA, 12 bp, Artificial Sequence
  Oligonucleotide primer for the detection of SNP TSC0006581
tcatcctttttc

SEQ ID NO: 345494 - DNA, 12 bp, Artificial Sequence
  Oligonucleotide primer for the detection of SNP TSC0006581
tgagatgtttaa

SEQ ID NO: 345495 - DNA, 12 bp, Artificial Sequence
  Oligonucleotide primer for the detection of SNP TSC0044059
ccccaattttac

SEQ ID NO: 345496 - DNA, 12 bp, Artificial Sequence
  Oligonucleotide primer for the detection of SNP TSC0044059
tatttatttatg

SEQ ID NO: 345497 - DNA, 12 bp, Artificial Sequence
  Oligonucleotide primer for the detection of SNP TSC0044059
cactcacccata

SEQ ID NO: 345498 - DNA, 12 bp, Artificial Sequence
  Oligonucleotide primer for the detection of SNP TSC0044060
ttaaaataaata

SEQ ID NO: 345499 - DNA, 12 bp, Artificial Sequence
  Oligonucleotide primer for the detection of SNP TSC0044060
gaggataatgtt

SEQ ID NO: 345500 - DNA, 12 bp, Artificial Sequence
  Oligonucleotide primer for the detection of SNP TSC0044060
aaaataatatca

SEQ ID NO: 345501 - DNA, 12 bp, Artificial Sequence
  Oligonucleotide primer for the detection of SNP TSC0044060
ttgagataggtg

SEQ ID NO: 345502 - DNA, 12 bp, Artificial Sequence
  Oligonucleotide primer for the detection of SNP TSC0008133
acccaactttac

SEQ ID NO: 345503 - DNA, 12 bp, Artificial Sequence
  Oligonucleotide primer for the detection of SNP TSC0008133
atgaaattttag

SEQ ID NO: 345504 - DNA, 12 bp, Artificial Sequence
  Oligonucleotide primer for the detection of SNP TSC0044061
attctaatacaa

SEQ ID NO: 345505 - DNA, 12 bp, Artificial Sequence
  Oligonucleotide primer for the detection of SNP TSC0044061
ggaatgtttaat

SEQ ID NO: 345506 - DNA, 12 bp, Artificial Sequence
  Oligonucleotide primer for the detection of SNP TSC0044061
ggaatgtttaac

SEQ ID NO: 345507 - DNA, 12 bp, Artificial Sequence
  Oligonucleotide primer for the detection of SNP TSC0044061
aaaatatctaac

SEQ ID NO: 345508 - DNA, 12 bp, Artificial Sequence
  Oligonucleotide primer for the detection of SNP TSC0044061
gaaatatctaac

SEQ ID NO: 345509 - DNA, 12 bp, Artificial Sequence
  Oligonucleotide primer for the detection of SNP TSC0044061
gttttaatgtag

SEQ ID NO: 345510 - DNA, 12 bp, Artificial Sequence
  Oligonucleotide primer for the detection of SNP TSC0044062
caatactactaa

SEQ ID NO: 345511 - DNA, 12 bp, Artificial Sequence
  Oligonucleotide primer for the detection of SNP TSC0044062
tttttgaatagt

SEQ ID NO: 345512 - DNA, 12 bp, Artificial Sequence
  Oligonucleotide primer for the detection of SNP TSC0044062
tccttaaataac

SEQ ID NO: 345513 - DNA, 12 bp, Artificial Sequence
  Oligonucleotide primer for the detection of SNP TSC0044062
taatgttattaa

SEQ ID NO: 345514 - DNA, 12 bp, Artificial Sequence
  Oligonucleotide primer for the detection of SNP TSC0044063
atctaatttcac

SEQ ID NO: 345515 - DNA, 12 bp, Artificial Sequence
  Oligonucleotide primer for the detection of SNP TSC0044063
gttggtagaaaa

SEQ ID NO: 345516 - DNA, 12 bp, Artificial Sequence
  Oligonucleotide primer for the detection of SNP TSC0044064
aaccactattat

SEQ ID NO: 345517 - DNA, 12 bp, Artificial Sequence
  Oligonucleotide primer for the detection of SNP TSC0010456
tttactctactc

SEQ ID NO: 345518 - DNA, 12 bp, Artificial Sequence
  Oligonucleotide primer for the detection of SNP TSC0010456
aattagagtata

SEQ ID NO: 345519 - DNA, 12 bp, Artificial Sequence
  Oligonucleotide primer for the detection of SNP TSC0044065
ctttcttcttat

SEQ ID NO: 345520 - DNA, 12 bp, Artificial Sequence
  Oligonucleotide primer for the detection of SNP TSC0044065
ttagaggaggtt

SEQ ID NO: 345521 - DNA, 12 bp, Artificial Sequence
  Oligonucleotide primer for the detection of SNP TSC0044070
tttctcattcat

SEQ ID NO: 345522 - DNA, 12 bp, Artificial Sequence
  Oligonucleotide primer for the detection of SNP TSC0044071
tccaaaaatatc

SEQ ID NO: 345523 - DNA, 12 bp, Artificial Sequence
  Oligonucleotide primer for the detection of SNP TSC0044071
agaatgttaaga

SEQ ID NO: 345524 - DNA, 12 bp, Artificial Sequence
  Oligonucleotide primer for the detection of SNP TSC0044074
tattaaaaaatc

SEQ ID NO: 345525 - DNA, 12 bp, Artificial Sequence
  Oligonucleotide primer for the detection of SNP TSC0044074
aataaattttta

SEQ ID NO: 345526 - DNA, 12 bp, Artificial Sequence
  Oligonucleotide primer for the detection of SNP TSC0044075
taacaaaacaca

SEQ ID NO: 345527 - DNA, 12 bp, Artificial Sequence
  Oligonucleotide primer for the detection of SNP TSC0044075
taacaaaacacg

SEQ ID NO: 345528 - DNA, 12 bp, Artificial Sequence
  Oligonucleotide primer for the detection of SNP TSC0044075
ttagttaaattt

SEQ ID NO: 345529 - DNA, 12 bp, Artificial Sequence
  Oligonucleotide primer for the detection of SNP TSC0044075
ttagttaaattc

SEQ ID NO: 345530 - DNA, 12 bp, Artificial Sequence
  Oligonucleotide primer for the detection of SNP TSC0044075
ccaaccaaattc

SEQ ID NO: 345531 - DNA, 12 bp, Artificial Sequence
  Oligonucleotide primer for the detection of SNP TSC0044075
ggtagaatatgt

SEQ ID NO: 345532 - DNA, 12 bp, Artificial Sequence
  Oligonucleotide primer for the detection of SNP TSC0044075
ggtagaatacgt

SEQ ID NO: 345533 - DNA, 12 bp, Artificial Sequence
  Oligonucleotide primer for the detection of SNP TSC0044077
tatacccaactc

SEQ ID NO: 345534 - DNA, 12 bp, Artificial Sequence
  Oligonucleotide primer for the detection of SNP TSC0044077
ctcacccccacc

SEQ ID NO: 345535 - DNA, 12 bp, Artificial Sequence
  Oligonucleotide primer for the detection of SNP TSC0044077
tgtgtttaattt

SEQ ID NO: 345536 - DNA, 12 bp, Artificial Sequence
  Oligonucleotide primer for the detection of SNP TSC0044077
tgtgtttaattc

SEQ ID NO: 345537 - DNA, 12 bp, Artificial Sequence
  Oligonucleotide primer for the detection of SNP TSC0044079
aatattcaatac

SEQ ID NO: 345538 - DNA, 12 bp, Artificial Sequence
  Oligonucleotide primer for the detection of SNP TSC0044079
gaaggaggtggg

SEQ ID NO: 345539 - DNA, 12 bp, Artificial Sequence
  Oligonucleotide primer for the detection of SNP TSC0044080
aaactaataaat

SEQ ID NO: 345540 - DNA, 12 bp, Artificial Sequence
  Oligonucleotide primer for the detection of SNP TSC0044080
ccaatcccccaa

SEQ ID NO: 345541 - DNA, 12 bp, Artificial Sequence
  Oligonucleotide primer for the detection of SNP TSC0044080
aaattaatgaat

SEQ ID NO: 345542 - DNA, 12 bp, Artificial Sequence
  Oligonucleotide primer for the detection of SNP TSC0044081
caaacactaaac

SEQ ID NO: 345543 - DNA, 12 bp, Artificial Sequence
  Oligonucleotide primer for the detection of SNP TSC0044081
ggggggttaata

SEQ ID NO: 345544 - DNA, 12 bp, Artificial Sequence
  Oligonucleotide primer for the detection of SNP TSC0008076
tcaaaaaatatt

SEQ ID NO: 345545 - DNA, 12 bp, Artificial Sequence
  Oligonucleotide primer for the detection of SNP TSC0044086
aaataactacaa

SEQ ID NO: 345546 - DNA, 12 bp, Artificial Sequence
  Oligonucleotide primer for the detection of SNP TSC0044086
ctttcaatactc

SEQ ID NO: 345547 - DNA, 12 bp, Artificial Sequence
  Oligonucleotide primer for the detection of SNP TSC0044086
tagaatagttgt

SEQ ID NO: 345548 - DNA, 12 bp, Artificial Sequence
  Oligonucleotide primer for the detection of SNP TSC0044090
cacattaaattt

SEQ ID NO: 345549 - DNA, 12 bp, Artificial Sequence
  Oligonucleotide primer for the detection of SNP TSC0044093
caaacctactaa

SEQ ID NO: 345550 - DNA, 12 bp, Artificial Sequence
  Oligonucleotide primer for the detection of SNP TSC0044093
tttttagagttt

SEQ ID NO: 345551 - DNA, 12 bp, Artificial Sequence
  Oligonucleotide primer for the detection of SNP TSC0044093
ccctcaaaattt

SEQ ID NO: 345552 - DNA, 12 bp, Artificial Sequence
  Oligonucleotide primer for the detection of SNP TSC0044093
tagatttattga

SEQ ID NO: 345553 - DNA, 12 bp, Artificial Sequence
  Oligonucleotide primer for the detection of SNP TSC0044094
tttacaattcat

SEQ ID NO: 345554 - DNA, 12 bp, Artificial Sequence
  Oligonucleotide primer for the detection of SNP TSC0044094
ttagttttggtt

SEQ ID NO: 345555 - DNA, 12 bp, Artificial Sequence
  Oligonucleotide primer for the detection of SNP TSC0044094
ctaattctaacc

SEQ ID NO: 345556 - DNA, 12 bp, Artificial Sequence
  Oligonucleotide primer for the detection of SNP TSC0044094
tttataatttat

SEQ ID NO: 345557 - DNA, 12 bp, Artificial Sequence
  Oligonucleotide primer for the detection of SNP TSC0008099
accataattata

SEQ ID NO: 345558 - DNA, 12 bp, Artificial Sequence
  Oligonucleotide primer for the detection of SNP TSC0008099
tgggaggtttta

SEQ ID NO: 345559 - DNA, 12 bp, Artificial Sequence
  Oligonucleotide primer for the detection of SNP TSC0008099
taaaaaacctca

SEQ ID NO: 345560 - DNA, 12 bp, Artificial Sequence
  Oligonucleotide primer for the detection of SNP TSC0008099
gttatgattgta

SEQ ID NO: 345561 - DNA, 12 bp, Artificial Sequence
  Oligonucleotide primer for the detection of SNP TSC0044096
taatttccaaaa

SEQ ID NO: 345562 - DNA, 12 bp, Artificial Sequence
  Oligonucleotide primer for the detection of SNP TSC0044096
taatttccgaaa

SEQ ID NO: 345563 - DNA, 12 bp, Artificial Sequence
  Oligonucleotide primer for the detection of SNP TSC0044096
atgattttagtt

SEQ ID NO: 345564 - DNA, 12 bp, Artificial Sequence
  Oligonucleotide primer for the detection of SNP TSC0044096
actccaaccaaa

SEQ ID NO: 345565 - DNA, 12 bp, Artificial Sequence
  Oligonucleotide primer for the detection of SNP TSC0044096
ataatttttgga

SEQ ID NO: 345566 - DNA, 12 bp, Artificial Sequence
  Oligonucleotide primer for the detection of SNP TSC0044096
ataattttcgga

SEQ ID NO: 345567 - DNA, 12 bp, Artificial Sequence
  Oligonucleotide primer for the detection of SNP TSC0044097
taatttttccaa

SEQ ID NO: 345568 - DNA, 12 bp, Artificial Sequence
  Oligonucleotide primer for the detection of SNP TSC0044097
catctcatactt

SEQ ID NO: 345569 - DNA, 12 bp, Artificial Sequence
  Oligonucleotide primer for the detection of SNP TSC0044098
ttacattcaaac

SEQ ID NO: 345570 - DNA, 12 bp, Artificial Sequence
  Oligonucleotide primer for the detection of SNP TSC0044098
ataagattgtaa

SEQ ID NO: 345571 - DNA, 12 bp, Artificial Sequence
  Oligonucleotide primer for the detection of SNP TSC0044100
tataaaaactct

SEQ ID NO: 345572 - DNA, 12 bp, Artificial Sequence
  Oligonucleotide primer for the detection of SNP TSC0044100
taaagaaggtaa

SEQ ID NO: 345573 - DNA, 12 bp, Artificial Sequence
  Oligonucleotide primer for the detection of SNP TSC0044100
tataaaggtttt

SEQ ID NO: 345574 - DNA, 12 bp, Artificial Sequence
  Oligonucleotide primer for the detection of SNP TSC0044101
tgtataattgta

SEQ ID NO: 345575 - DNA, 12 bp, Artificial Sequence
  Oligonucleotide primer for the detection of SNP TSC0044102
tatcttcctttc

SEQ ID NO: 345576 - DNA, 12 bp, Artificial Sequence
  Oligonucleotide primer for the detection of SNP TSC0044102
ttttgtttattg

SEQ ID NO: 345577 - DNA, 12 bp, Artificial Sequence
  Oligonucleotide primer for the detection of SNP TSC0044102
tttattcattaa

SEQ ID NO: 345578 - DNA, 12 bp, Artificial Sequence
  Oligonucleotide primer for the detection of SNP TSC0044105
attctttttact

SEQ ID NO: 345579 - DNA, 12 bp, Artificial Sequence
  Oligonucleotide primer for the detection of SNP TSC0044105
tagttaaaatta

SEQ ID NO: 345580 - DNA, 12 bp, Artificial Sequence
  Oligonucleotide primer for the detection of SNP TSC0044106
aatataatcatt

SEQ ID NO: 345581 - DNA, 12 bp, Artificial Sequence
  Oligonucleotide primer for the detection of SNP TSC0044106
taaatattatta

SEQ ID NO: 345582 - DNA, 12 bp, Artificial Sequence
  Oligonukleotid-Primer
agtatggttatt

SEQ ID NO: 345583 - DNA, 12 bp, Artificial Sequence
  Oligonucleotide primer for the detection of SNP TSC0010544
aactaaaaccgt

SEQ ID NO: 345584 - DNA, 12 bp, Artificial Sequence
  Oligonucleotide primer for the detection of SNP TSC0010544
attgggtagtga

SEQ ID NO: 345585 - DNA, 12 bp, Artificial Sequence
  Oligonucleotide primer for the detection of SNP TSC0010544
atcgggtagtga

SEQ ID NO: 345586 - DNA, 12 bp, Artificial Sequence
  Oligonucleotide primer for the detection of SNP TSC0010544
accaaacaataa

SEQ ID NO: 345587 - DNA, 12 bp, Artificial Sequence
  Oligonucleotide primer for the detection of SNP TSC0010544
accgaacaataa

SEQ ID NO: 345588 - DNA, 12 bp, Artificial Sequence
  Oligonucleotide primer for the detection of SNP TSC0010544
ggttggaattgt

SEQ ID NO: 345589 - DNA, 12 bp, Artificial Sequence
  Oligonucleotide primer for the detection of SNP TSC0010544
ggttggaatcgt

SEQ ID NO: 345590 - DNA, 12 bp, Artificial Sequence
  Oligonucleotide primer for the detection of SNP TSC0044107
ataaaaaatatt

SEQ ID NO: 345591 - DNA, 12 bp, Artificial Sequence
  Oligonucleotide primer for the detection of SNP TSC0044107
ttagggtattta

SEQ ID NO: 345592 - DNA, 12 bp, Artificial Sequence
  Oligonucleotide primer for the detection of SNP TSC0044109
aaattccattat

SEQ ID NO: 345593 - DNA, 12 bp, Artificial Sequence
  Oligonucleotide primer for the detection of SNP TSC0044109
atgtagtatata

SEQ ID NO: 345594 - DNA, 12 bp, Artificial Sequence
  Oligonucleotide primer for the detection of SNP TSC0044109
atataacatata

SEQ ID NO: 345595 - DNA, 12 bp, Artificial Sequence
  Oligonucleotide primer for the detection of SNP TSC0044109
aaattttattgt

SEQ ID NO: 345596 - DNA, 12 bp, Artificial Sequence
  Oligonucleotide primer for the detection of SNP TSC0044110
gaaatttgtgaa

SEQ ID NO: 345597 - DNA, 12 bp, Artificial Sequence
  Oligonucleotide primer for the detection of SNP TSC0044111
attctattcttt

SEQ ID NO: 345598 - DNA, 12 bp, Artificial Sequence
  Oligonucleotide primer for the detection of SNP TSC0044111
tgttaagattga

SEQ ID NO: 345599 - DNA, 12 bp, Artificial Sequence
  Oligonucleotide primer for the detection of SNP TSC0044112
taacaatactat

SEQ ID NO: 345600 - DNA, 12 bp, Artificial Sequence
  Oligonucleotide primer for the detection of SNP TSC0044112
taacgatactat

SEQ ID NO: 345601 - DNA, 12 bp, Artificial Sequence
  Oligonucleotide primer for the detection of SNP TSC0010277
tgtatattataa

SEQ ID NO: 345602 - DNA, 12 bp, Artificial Sequence
  Oligonucleotide primer for the detection of SNP TSC0010279
ttggagatatgg

SEQ ID NO: 345603 - DNA, 12 bp, Artificial Sequence
  Oligonucleotide primer for the detection of SNP TSC0010279
ttggagatacgg

SEQ ID NO: 345604 - DNA, 12 bp, Artificial Sequence
  Oligonucleotide primer for the detection of SNP TSC0008558
atccaaaattaa

SEQ ID NO: 345605 - DNA, 12 bp, Artificial Sequence
  Oligonucleotide primer for the detection of SNP TSC0008558
atgtaaagttag

SEQ ID NO: 345606 - DNA, 12 bp, Artificial Sequence
  Oligonucleotide primer for the detection of SNP TSC0008558
gtttagggttag

SEQ ID NO: 345607 - DNA, 12 bp, Artificial Sequence
  Oligonucleotide primer for the detection of SNP TSC0008559
agtttgttttta

SEQ ID NO: 345608 - DNA, 12 bp, Artificial Sequence
  Oligonucleotide primer for the detection of SNP TSC0008559
aatctattttca

SEQ ID NO: 345609 - DNA, 12 bp, Artificial Sequence
  Oligonucleotide primer for the detection of SNP TSC0005623
tttcctcctaaa

SEQ ID NO: 345610 - DNA, 12 bp, Artificial Sequence
  Oligonucleotide primer for the detection of SNP TSC0005623
gagttttaaagg

SEQ ID NO: 345611 - DNA, 12 bp, Artificial Sequence
  Oligonucleotide primer for the detection of SNP TSC0044114
aaatcctcccac

SEQ ID NO: 345612 - DNA, 12 bp, Artificial Sequence
  Oligonucleotide primer for the detection of SNP TSC0044114
ataaaagttaag

SEQ ID NO: 345613 - DNA, 12 bp, Artificial Sequence
  Oligonucleotide primer for the detection of SNP TSC0044115
aattaaacccta

SEQ ID NO: 345614 - DNA, 12 bp, Artificial Sequence
  Oligonucleotide primer for the detection of SNP TSC0044115
gttttgatgtat

SEQ ID NO: 345615 - DNA, 12 bp, Artificial Sequence
  Oligonucleotide primer for the detection of SNP TSC0044115
gtttcgatgtat

SEQ ID NO: 345616 - DNA, 12 bp, Artificial Sequence
  Oligonucleotide primer for the detection of SNP TSC0044115
atttcgatatat

SEQ ID NO: 345617 - DNA, 12 bp, Artificial Sequence
  Oligonucleotide primer for the detection of SNP TSC0044115
aattgagttttg

SEQ ID NO: 345618 - DNA, 12 bp, Artificial Sequence
  Oligonucleotide primer for the detection of SNP TSC0005986
actactaaatcc

SEQ ID NO: 345619 - DNA, 12 bp, Artificial Sequence
  Oligonucleotide primer for the detection of SNP TSC0005986
gggtgtaatata

SEQ ID NO: 345620 - DNA, 12 bp, Artificial Sequence
  Oligonucleotide primer for the detection of SNP TSC0005987
acccatttattt

SEQ ID NO: 345621 - DNA, 12 bp, Artificial Sequence
  Oligonucleotide primer for the detection of SNP TSC0005987
ccaattctcaaa

SEQ ID NO: 345622 - DNA, 12 bp, Artificial Sequence
  Oligonucleotide primer for the detection of SNP TSC0005988
caccattcatcc

SEQ ID NO: 345623 - DNA, 12 bp, Artificial Sequence
  Oligonucleotide primer for the detection of SNP TSC0005988
caccgttcatcc

SEQ ID NO: 345624 - DNA, 12 bp, Artificial Sequence
  Oligonucleotide primer for the detection of SNP TSC0005988
cttcataatata

SEQ ID NO: 345625 - DNA, 12 bp, Artificial Sequence
  Oligonucleotide primer for the detection of SNP TSC0005988
tattgtttattt

SEQ ID NO: 345626 - DNA, 12 bp, Artificial Sequence
  Oligonucleotide primer for the detection of SNP TSC0005988
tatcgtttattt

SEQ ID NO: 345627 - DNA, 12 bp, Artificial Sequence
  Oligonucleotide primer for the detection of SNP TSC0009175
aaactaaaccat

SEQ ID NO: 345628 - DNA, 12 bp, Artificial Sequence
  Oligonucleotide primer for the detection of SNP TSC0009175
tatggaggtgga

SEQ ID NO: 345629 - DNA, 12 bp, Artificial Sequence
  Oligonucleotide primer for the detection of SNP TSC0009175
cataaaaataaa

SEQ ID NO: 345630 - DNA, 12 bp, Artificial Sequence
  Oligonucleotide primer for the detection of SNP TSC0009175
gaattaaattat

SEQ ID NO: 345631 - DNA, 12 bp, Artificial Sequence
  Oligonucleotide primer for the detection of SNP TSC0044116
aaacctaacaac

SEQ ID NO: 345632 - DNA, 12 bp, Artificial Sequence
  Oligonucleotide primer for the detection of SNP TSC0044119
cccctcccacac

SEQ ID NO: 345633 - DNA, 12 bp, Artificial Sequence
  Oligonucleotide primer for the detection of SNP TSC0044119
tttttgggtagg

SEQ ID NO: 345634 - DNA, 12 bp, Artificial Sequence
  Oligonucleotide primer for the detection of SNP TSC0044120
attttgggtata

SEQ ID NO: 345635 - DNA, 12 bp, Artificial Sequence
  Oligonucleotide primer for the detection of SNP TSC0044121
gggaattggtta

SEQ ID NO: 345636 - DNA, 12 bp, Artificial Sequence
  Oligonucleotide primer for the detection of SNP TSC0007474
ataaacatttat

SEQ ID NO: 345637 - DNA, 12 bp, Artificial Sequence
  Oligonucleotide primer for the detection of SNP TSC0007474
acatctatccaa

SEQ ID NO: 345638 - DNA, 12 bp, Artificial Sequence
  Oligonucleotide primer for the detection of SNP TSC0007474
gtgagtatttat

SEQ ID NO: 345639 - DNA, 12 bp, Artificial Sequence
  Oligonucleotide primer for the detection of SNP TSC0044124
atacaatcattc

SEQ ID NO: 345640 - DNA, 12 bp, Artificial Sequence
  Oligonucleotide primer for the detection of SNP TSC0044124
tatatatataga

SEQ ID NO: 345641 - DNA, 12 bp, Artificial Sequence
  Oligonucleotide primer for the detection of SNP TSC0044125
aaaaaaatcaat

SEQ ID NO: 345642 - DNA, 12 bp, Artificial Sequence
  Oligonucleotide primer for the detection of SNP TSC0044125
ataatttttaat

SEQ ID NO: 345643 - DNA, 12 bp, Artificial Sequence
  Oligonucleotide primer for the detection of SNP TSC0044126
tttaaaaataat

SEQ ID NO: 345644 - DNA, 12 bp, Artificial Sequence
  unsure (2): Oligonucleotide primer for the detection of SNP TSC0044126
gntttgaaaata

SEQ ID NO: 345645 - DNA, 12 bp, Artificial Sequence
  Oligonucleotide primer for the detection of SNP TSC0009511
aaaacccataat

SEQ ID NO: 345646 - DNA, 12 bp, Artificial Sequence
  Oligonucleotide primer for the detection of SNP TSC0009511
attggatttgag

SEQ ID NO: 345647 - DNA, 12 bp, Artificial Sequence
  Oligonucleotide primer for the detection of SNP TSC0009511
atcggatttgag

SEQ ID NO: 345648 - DNA, 12 bp, Artificial Sequence
  Oligonucleotide primer for the detection of SNP TSC0044128
ctccccaactaa

SEQ ID NO: 345649 - DNA, 12 bp, Artificial Sequence
  Oligonucleotide primer for the detection of SNP TSC0044128
ttttggttttat

SEQ ID NO: 345650 - DNA, 12 bp, Artificial Sequence
  Oligonucleotide primer for the detection of SNP TSC0044128
cttaatttcata

SEQ ID NO: 345651 - DNA, 12 bp, Artificial Sequence
  Oligonucleotide primer for the detection of SNP TSC0044128
ttttttagttga

SEQ ID NO: 345652 - DNA, 12 bp, Artificial Sequence
  Oligonucleotide primer for the detection of SNP TSC0044129
cccaaaccaaaa

SEQ ID NO: 345653 - DNA, 12 bp, Artificial Sequence
  Oligonucleotide primer for the detection of SNP TSC0044129
cccaaaccgaaa

SEQ ID NO: 345654 - DNA, 12 bp, Artificial Sequence
  Oligonucleotide primer for the detection of SNP TSC0044129
tttaggtcggag

SEQ ID NO: 345655 - DNA, 12 bp, Artificial Sequence
  Oligonucleotide primer for the detection of SNP TSC0044132
taaaataactat

SEQ ID NO: 345656 - DNA, 12 bp, Artificial Sequence
  Oligonucleotide primer for the detection of SNP TSC0044133
taaaaacttacc

SEQ ID NO: 345657 - DNA, 12 bp, Artificial Sequence
  Oligonucleotide primer for the detection of SNP TSC0044133
ttttggggtttg

SEQ ID NO: 345658 - DNA, 12 bp, Artificial Sequence
  Oligonucleotide primer for the detection of SNP TSC0044133
tttcggggtttg

SEQ ID NO: 345659 - DNA, 12 bp, Artificial Sequence
  Oligonucleotide primer for the detection of SNP TSC0044134
agtttatgttat

SEQ ID NO: 345660 - DNA, 12 bp, Artificial Sequence
  Oligonucleotide primer for the detection of SNP TSC0044134
aattcataccat

SEQ ID NO: 345661 - DNA, 12 bp, Artificial Sequence
  Oligonucleotide primer for the detection of SNP TSC0044134
tttagagtagaa

SEQ ID NO: 345662 - DNA, 12 bp, Artificial Sequence
  Oligonucleotide primer for the detection of SNP TSC0044135
actataaaaata

SEQ ID NO: 345663 - DNA, 12 bp, Artificial Sequence
  Oligonucleotide primer for the detection of SNP TSC0044135
aaaagtatttgt

SEQ ID NO: 345664 - DNA, 12 bp, Artificial Sequence
  Oligonucleotide primer for the detection of SNP TSC0044135
aaaatacttata

SEQ ID NO: 345665 - DNA, 12 bp, Artificial Sequence
  Oligonucleotide primer for the detection of SNP TSC0044135
attgtaaaagta

SEQ ID NO: 345666 - DNA, 12 bp, Artificial Sequence
  Oligonucleotide primer for the detection of SNP TSC0044136
taatattttaaa

SEQ ID NO: 345667 - DNA, 12 bp, Artificial Sequence
  Oligonucleotide primer for the detection of SNP TSC0044136
ttgtgaattgtg

SEQ ID NO: 345668 - DNA, 12 bp, Artificial Sequence
  Oligonucleotide primer for the detection of SNP TSC0044136
ctataaactata

SEQ ID NO: 345669 - DNA, 12 bp, Artificial Sequence
  Oligonucleotide primer for the detection of SNP TSC0044136
tagtattttgga

SEQ ID NO: 345670 - DNA, 12 bp, Artificial Sequence
  Oligonucleotide primer for the detection of SNP TSC0044137
ctaaaaaactct

SEQ ID NO: 345671 - DNA, 12 bp, Artificial Sequence
  Oligonucleotide primer for the detection of SNP TSC0044138
accttacaaaaa

SEQ ID NO: 345672 - DNA, 12 bp, Artificial Sequence
  Oligonucleotide primer for the detection of SNP TSC0044138
cctccccatccc

SEQ ID NO: 345673 - DNA, 12 bp, Artificial Sequence
  Oligonucleotide primer for the detection of SNP TSC0044138
gttttgtaaggg

SEQ ID NO: 345674 - DNA, 12 bp, Artificial Sequence
  Oligonucleotide primer for the detection of SNP TSC0044139
acctaaattaac

SEQ ID NO: 345675 - DNA, 12 bp, Artificial Sequence
  Oligonucleotide primer for the detection of SNP TSC0044139
cttttttttctt

SEQ ID NO: 345676 - DNA, 12 bp, Artificial Sequence
  Oligonucleotide primer for the detection of SNP TSC0044139
atttagattaat

SEQ ID NO: 345677 - DNA, 12 bp, Artificial Sequence
  Oligonucleotide primer for the detection of SNP TSC0044140
ttaaattgtttg

SEQ ID NO: 345678 - DNA, 12 bp, Artificial Sequence
  Oligonucleotide primer for the detection of SNP TSC0044141
aactacctaaat

SEQ ID NO: 345679 - DNA, 12 bp, Artificial Sequence
  Oligonucleotide primer for the detection of SNP TSC0044141
tttttttcttta

SEQ ID NO: 345680 - DNA, 12 bp, Artificial Sequence
  Oligonucleotide primer for the detection of SNP TSC0044141
ggttatttagat

SEQ ID NO: 345681 - DNA, 12 bp, Artificial Sequence
  Oligonucleotide primer for the detection of SNP TSC0044142
attaaactacca

SEQ ID NO: 345682 - DNA, 12 bp, Artificial Sequence
  Oligonucleotide primer for the detection of SNP TSC0044142
agtatattatat

SEQ ID NO: 345683 - DNA, 12 bp, Artificial Sequence
  Oligonucleotide primer for the detection of SNP TSC0044142
aacatattacat

SEQ ID NO: 345684 - DNA, 12 bp, Artificial Sequence
  Oligonucleotide primer for the detection of SNP TSC0044142
gttaagttgtta

SEQ ID NO: 345685 - DNA, 12 bp, Artificial Sequence
  Oligonucleotide primer for the detection of SNP TSC0044143
atatttataatc

SEQ ID NO: 345686 - DNA, 12 bp, Artificial Sequence
  Oligonucleotide primer for the detection of SNP TSC0044143
attaattgtatg

SEQ ID NO: 345687 - DNA, 12 bp, Artificial Sequence
  Oligonucleotide primer for the detection of SNP TSC0044144
aaaccacccacc

SEQ ID NO: 345688 - DNA, 12 bp, Artificial Sequence
  Oligonucleotide primer for the detection of SNP TSC0044144
gaggtttttggg

SEQ ID NO: 345689 - DNA, 12 bp, Artificial Sequence
  Oligonucleotide primer for the detection of SNP TSC0044144
aaacttttaaaa

SEQ ID NO: 345690 - DNA, 12 bp, Artificial Sequence
  Oligonucleotide primer for the detection of SNP TSC0044144
gattatttattt

SEQ ID NO: 345691 - DNA, 12 bp, Artificial Sequence
  Oligonucleotide primer for the detection of SNP TSC0044145
aattcaaaatat

SEQ ID NO: 345692 - DNA, 12 bp, Artificial Sequence
  Oligonucleotide primer for the detection of SNP TSC0044145
aagtattgatta

SEQ ID NO: 345693 - DNA, 12 bp, Artificial Sequence
  Oligonucleotide primer for the detection of SNP TSC0044145
gatttagagtgt

SEQ ID NO: 345694 - DNA, 12 bp, Artificial Sequence
  Oligonucleotide primer for the detection of SNP TSC0044146
aaatccctttat

SEQ ID NO: 345695 - DNA, 12 bp, Artificial Sequence
  Oligonucleotide primer for the detection of SNP TSC0044146
ggaagaggaagt

SEQ ID NO: 345696 - DNA, 12 bp, Artificial Sequence
  Oligonucleotide primer for the detection of SNP TSC0044147
tcctcccattct

SEQ ID NO: 345697 - DNA, 12 bp, Artificial Sequence
  Oligonucleotide primer for the detection of SNP TSC0044147
ttagaggagtag

SEQ ID NO: 345698 - DNA, 12 bp, Artificial Sequence
  Oligonucleotide primer for the detection of SNP TSC0044148
tgagttattttt

SEQ ID NO: 345699 - DNA, 12 bp, Artificial Sequence
  Oligonucleotide primer for the detection of SNP TSC0044148
taaatcacttct

SEQ ID NO: 345700 - DNA, 12 bp, Artificial Sequence
  Oligonucleotide primer for the detection of SNP TSC0044148
tgttgaatgttg

SEQ ID NO: 345701 - DNA, 12 bp, Artificial Sequence
  Oligonucleotide primer for the detection of SNP TSC0044149
aattttcatttc

SEQ ID NO: 345702 - DNA, 12 bp, Artificial Sequence
  Oligonucleotide primer for the detection of SNP TSC0044149
attaaatgagta

SEQ ID NO: 345703 - DNA, 12 bp, Artificial Sequence
  Oligonucleotide primer for the detection of SNP TSC0044151
tgagatgaaata

SEQ ID NO: 345704 - DNA, 12 bp, Artificial Sequence
  Oligonucleotide primer for the detection of SNP TSC0044152
aaacaaataaca

SEQ ID NO: 345705 - DNA, 12 bp, Artificial Sequence
  Oligonucleotide primer for the detection of SNP TSC0044152
attactcaattt

SEQ ID NO: 345706 - DNA, 12 bp, Artificial Sequence
  Oligonucleotide primer for the detection of SNP TSC0044152
aaatagatggta

SEQ ID NO: 345707 - DNA, 12 bp, Artificial Sequence
  Oligonucleotide primer for the detection of SNP TSC0000921
taaaacaaaatt

SEQ ID NO: 345708 - DNA, 12 bp, Artificial Sequence
  Oligonucleotide primer for the detection of SNP TSC0044153
ccccatcaataa

SEQ ID NO: 345709 - DNA, 12 bp, Artificial Sequence
  Oligonucleotide primer for the detection of SNP TSC0044153
ttaattattttg

SEQ ID NO: 345710 - DNA, 12 bp, Artificial Sequence
  Oligonucleotide primer for the detection of SNP TSC0044153
ctaaccacctta

SEQ ID NO: 345711 - DNA, 12 bp, Artificial Sequence
  Oligonucleotide primer for the detection of SNP TSC0010627
taatcactctat

SEQ ID NO: 345712 - DNA, 12 bp, Artificial Sequence
  Oligonucleotide primer for the detection of SNP TSC0010627
taaagaaaataa

SEQ ID NO: 345713 - DNA, 12 bp, Artificial Sequence
  Oligonucleotide primer for the detection of SNP TSC0044155
ctataattttac

SEQ ID NO: 345714 - DNA, 12 bp, Artificial Sequence
  Oligonucleotide primer for the detection of SNP TSC0044155
gattagtattta

SEQ ID NO: 345715 - DNA, 12 bp, Artificial Sequence
  Oligonucleotide primer for the detection of SNP TSC0044156
aattattttgat

SEQ ID NO: 345716 - DNA, 12 bp, Artificial Sequence
  Oligonucleotide primer for the detection of SNP TSC0044156
tgatttgagttg

SEQ ID NO: 345717 - DNA, 12 bp, Artificial Sequence
  Oligonucleotide primer for the detection of SNP TSC0044157
ttgttttatttc

SEQ ID NO: 345718 - DNA, 12 bp, Artificial Sequence
  Oligonucleotide primer for the detection of SNP TSC0044157
ctacctcattcc

SEQ ID NO: 345719 - DNA, 12 bp, Artificial Sequence
  Oligonucleotide primer for the detection of SNP TSC0044157
ggagagagtttg

SEQ ID NO: 345720 - DNA, 12 bp, Artificial Sequence
  Oligonucleotide primer for the detection of SNP TSC0044158
tcaaatatctaa

SEQ ID NO: 345721 - DNA, 12 bp, Artificial Sequence
  Oligonucleotide primer for the detection of SNP TSC0044158
cattattcttac

SEQ ID NO: 345722 - DNA, 12 bp, Artificial Sequence
  Oligonucleotide primer for the detection of SNP TSC0044158
ttaaatatttag

SEQ ID NO: 345723 - DNA, 12 bp, Artificial Sequence
  Oligonucleotide primer for the detection of SNP TSC0044159
ttaaaaacattt

SEQ ID NO: 345724 - DNA, 12 bp, Artificial Sequence
  Oligonucleotide primer for the detection of SNP TSC0044159
tatataaagtag

SEQ ID NO: 345725 - DNA, 12 bp, Artificial Sequence
  Oligonucleotide primer for the detection of SNP TSC0044160
taaatatcccta

SEQ ID NO: 345726 - DNA, 12 bp, Artificial Sequence
  Oligonucleotide primer for the detection of SNP TSC0044160
tcaaaactatca

SEQ ID NO: 345727 - DNA, 12 bp, Artificial Sequence
  Oligonucleotide primer for the detection of SNP TSC0044160
aaatgtttttgt

SEQ ID NO: 345728 - DNA, 12 bp, Artificial Sequence
  Oligonucleotide primer for the detection of SNP TSC0044161
aaaaaaaaaacg

SEQ ID NO: 345729 - DNA, 12 bp, Artificial Sequence
  Oligonucleotide primer for the detection of SNP TSC0044161
ctccaatattaa

SEQ ID NO: 345730 - DNA, 12 bp, Artificial Sequence
  Oligonucleotide primer for the detection of SNP TSC0044161
gggggaggggtg

SEQ ID NO: 345731 - DNA, 12 bp, Artificial Sequence
  Oligonucleotide primer for the detection of SNP TSC0044161
gggggaggggcg

SEQ ID NO: 345732 - DNA, 12 bp, Artificial Sequence
  Oligonucleotide primer for the detection of SNP TSC0044162
aaattccctttc

SEQ ID NO: 345733 - DNA, 12 bp, Artificial Sequence
  Oligonucleotide primer for the detection of SNP TSC0044163
ttacacaaatct

SEQ ID NO: 345734 - DNA, 12 bp, Artificial Sequence
  Oligonucleotide primer for the detection of SNP TSC0044163
ttgtataggttt

SEQ ID NO: 345735 - DNA, 12 bp, Artificial Sequence
  Oligonucleotide primer for the detection of SNP TSC0044164
cctcttcaaatt

SEQ ID NO: 345736 - DNA, 12 bp, Artificial Sequence
  Oligonucleotide primer for the detection of SNP TSC0044164
attaggtaaagg

SEQ ID NO: 345737 - DNA, 12 bp, Artificial Sequence
  Oligonucleotide primer for the detection of SNP TSC0044165
aaaaataattac

SEQ ID NO: 345738 - DNA, 12 bp, Artificial Sequence
  Oligonucleotide primer for the detection of SNP TSC0044165
ttatttgtattg

SEQ ID NO: 345739 - DNA, 12 bp, Artificial Sequence
  Oligonucleotide primer for the detection of SNP TSC0044165
ttatttacatta

SEQ ID NO: 345740 - DNA, 12 bp, Artificial Sequence
  Oligonucleotide primer for the detection of SNP TSC0044165
gaggatgattat

SEQ ID NO: 345741 - DNA, 12 bp, Artificial Sequence
  Oligonucleotide primer for the detection of SNP TSC0044166
caaccaaaatca

SEQ ID NO: 345742 - DNA, 12 bp, Artificial Sequence
  Oligonucleotide primer for the detection of SNP TSC0044166
tagttaagatta

SEQ ID NO: 345743 - DNA, 12 bp, Artificial Sequence
  Oligonucleotide primer for the detection of SNP TSC0044167
ctaactacaacc

SEQ ID NO: 345744 - DNA, 12 bp, Artificial Sequence
  Oligonucleotide primer for the detection of SNP TSC0044167
ttcgggaggtgg

SEQ ID NO: 345745 - DNA, 12 bp, Artificial Sequence
  Oligonucleotide primer for the detection of SNP TSC0044168
tctatacaaaat

SEQ ID NO: 345746 - DNA, 12 bp, Artificial Sequence
  Oligonucleotide primer for the detection of SNP TSC0044169
ctataaacctct

SEQ ID NO: 345747 - DNA, 12 bp, Artificial Sequence
  Oligonucleotide primer for the detection of SNP TSC0044170
actaattcctat

SEQ ID NO: 345748 - DNA, 12 bp, Artificial Sequence
  Oligonucleotide primer for the detection of SNP TSC0044170
ataaataaggag

SEQ ID NO: 345749 - DNA, 12 bp, Artificial Sequence
  Oligonucleotide primer for the detection of SNP TSC0044171
cattttcaaata

SEQ ID NO: 345750 - DNA, 12 bp, Artificial Sequence
  Oligonucleotide primer for the detection of SNP TSC0044171
aggataggaatt

SEQ ID NO: 345751 - DNA, 12 bp, Artificial Sequence
  Oligonucleotide primer for the detection of SNP TSC0044171
aaaataaaaact

SEQ ID NO: 345752 - DNA, 12 bp, Artificial Sequence
  Oligonucleotide primer for the detection of SNP TSC0044171
tatttttaggtg

SEQ ID NO: 345753 - DNA, 12 bp, Artificial Sequence
  Oligonucleotide primer for the detection of SNP TSC0044172
atattttaaaat

SEQ ID NO: 345754 - DNA, 12 bp, Artificial Sequence
  Oligonucleotide primer for the detection of SNP TSC0009983
tatctttttata

SEQ ID NO: 345755 - DNA, 12 bp, Artificial Sequence
  Oligonucleotide primer for the detection of SNP TSC0009983
gtggggatggtt

SEQ ID NO: 345756 - DNA, 12 bp, Artificial Sequence
  Oligonucleotide primer for the detection of SNP TSC0044173
taaataggtaag

SEQ ID NO: 345757 - DNA, 12 bp, Artificial Sequence
  Oligonucleotide primer for the detection of SNP TSC0009992
tccctcttactt

SEQ ID NO: 345758 - DNA, 12 bp, Artificial Sequence
  Oligonucleotide primer for the detection of SNP TSC0009992
tatatggtgaag

SEQ ID NO: 345759 - DNA, 12 bp, Artificial Sequence
  Oligonucleotide primer for the detection of SNP TSC0044174
aatcacactatc

SEQ ID NO: 345760 - DNA, 12 bp, Artificial Sequence
  Oligonucleotide primer for the detection of SNP TSC0010074
caaaaactcccc

SEQ ID NO: 345761 - DNA, 12 bp, Artificial Sequence
  Oligonucleotide primer for the detection of SNP TSC0044175
gaaagtatatat

SEQ ID NO: 345762 - DNA, 12 bp, Artificial Sequence
  Oligonucleotide primer for the detection of SNP TSC0044176
tgaaagtataaa

SEQ ID NO: 345763 - DNA, 12 bp, Artificial Sequence
  Oligonucleotide primer for the detection of SNP TSC0044176
tgttataaaagt

SEQ ID NO: 345764 - DNA, 12 bp, Artificial Sequence
  Oligonucleotide primer for the detection of SNP TSC0009730
accacaaactat

SEQ ID NO: 345765 - DNA, 12 bp, Artificial Sequence
  Oligonucleotide primer for the detection of SNP TSC0009730
agtttttaagag

SEQ ID NO: 345766 - DNA, 12 bp, Artificial Sequence
  Oligonucleotide primer for the detection of SNP TSC0009739
tgttttggtttt

SEQ ID NO: 345767 - DNA, 12 bp, Artificial Sequence
  Oligonucleotide primer for the detection of SNP TSC0010362
ccacaccctcta

SEQ ID NO: 345768 - DNA, 12 bp, Artificial Sequence
  Oligonucleotide primer for the detection of SNP TSC0010362
tgtgtgtgtgtt

SEQ ID NO: 345769 - DNA, 12 bp, Artificial Sequence
  Oligonucleotide primer for the detection of SNP TSC0010362
cgtgtgtgtgtt

SEQ ID NO: 345770 - DNA, 12 bp, Artificial Sequence
  Oligonucleotide primer for the detection of SNP TSC0044178
tcttatacctca

SEQ ID NO: 345771 - DNA, 12 bp, Artificial Sequence
  Oligonucleotide primer for the detection of SNP TSC0044180
tttgtgtgtttt

SEQ ID NO: 345772 - DNA, 12 bp, Artificial Sequence
  Oligonucleotide primer for the detection of SNP TSC0044180
cctatatatctc

SEQ ID NO: 345773 - DNA, 12 bp, Artificial Sequence
  Oligonucleotide primer for the detection of SNP TSC0044180
ataaggtagaag

SEQ ID NO: 345774 - DNA, 12 bp, Artificial Sequence
  Oligonucleotide primer for the detection of SNP TSC0044183
attgattttaga

SEQ ID NO: 345775 - DNA, 12 bp, Artificial Sequence
  Oligonucleotide primer for the detection of SNP TSC0044184
tgtatatttgtt

SEQ ID NO: 345776 - DNA, 12 bp, Artificial Sequence
  Oligonucleotide primer for the detection of SNP TSC0044184
tacacatttacc

SEQ ID NO: 345777 - DNA, 12 bp, Artificial Sequence
  Oligonucleotide primer for the detection of SNP TSC0044184
gtatggaaggtg

SEQ ID NO: 345778 - DNA, 12 bp, Artificial Sequence
  Oligonucleotide primer for the detection of SNP TSC0044185
ataataaaaacc

SEQ ID NO: 345779 - DNA, 12 bp, Artificial Sequence
  Oligonucleotide primer for the detection of SNP TSC0044185
attgtgaggtag

SEQ ID NO: 345780 - DNA, 12 bp, Artificial Sequence
  Oligonucleotide primer for the detection of SNP TSC0044186
taaaataaccat

SEQ ID NO: 345781 - DNA, 12 bp, Artificial Sequence
  Oligonucleotide primer for the detection of SNP TSC0044186
ttggtagtggat

SEQ ID NO: 345782 - DNA, 12 bp, Artificial Sequence
  Oligonucleotide primer for the detection of SNP TSC0044186
tcggtagtggat

SEQ ID NO: 345783 - DNA, 12 bp, Artificial Sequence
  Oligonucleotide primer for the detection of SNP TSC0044186
atcgataataaa

SEQ ID NO: 345784 - DNA, 12 bp, Artificial Sequence
  Oligonucleotide primer for the detection of SNP TSC0044186
ggggtgattatt

SEQ ID NO: 345785 - DNA, 12 bp, Artificial Sequence
  Oligonucleotide primer for the detection of SNP TSC0044190
aaaaacatacac

SEQ ID NO: 345786 - DNA, 12 bp, Artificial Sequence
  Oligonucleotide primer for the detection of SNP TSC0044190
aaaaacatacgc

SEQ ID NO: 345787 - DNA, 12 bp, Artificial Sequence
  Oligonucleotide primer for the detection of SNP TSC0044190
aaaggatagttg

SEQ ID NO: 345788 - DNA, 12 bp, Artificial Sequence
  Oligonucleotide primer for the detection of SNP TSC0044193
tgtttaagagta

SEQ ID NO: 345789 - DNA, 12 bp, Artificial Sequence
  Oligonucleotide primer for the detection of SNP TSC0044194
aaattgtttatt

SEQ ID NO: 345790 - DNA, 12 bp, Artificial Sequence
  Oligonucleotide primer for the detection of SNP TSC0044194
gtaaagggttag

SEQ ID NO: 345791 - DNA, 12 bp, Artificial Sequence
  Oligonucleotide primer for the detection of SNP TSC0044195
ggagtggttgaa

SEQ ID NO: 345792 - DNA, 12 bp, Artificial Sequence
  Oligonucleotide primer for the detection of SNP TSC0044196
tatacaacatac

SEQ ID NO: 345793 - DNA, 12 bp, Artificial Sequence
  Oligonucleotide primer for the detection of SNP TSC0044196
aggaaatggttg

SEQ ID NO: 345794 - DNA, 12 bp, Artificial Sequence
  Oligonucleotide primer for the detection of SNP TSC0044198
aacaccatactt

SEQ ID NO: 345795 - DNA, 12 bp, Artificial Sequence
  Oligonucleotide primer for the detection of SNP TSC0044200
taactatcaaat

SEQ ID NO: 345796 - DNA, 12 bp, Artificial Sequence
  Oligonucleotide primer for the detection of SNP TSC0044200
ttagattgtaag

SEQ ID NO: 345797 - DNA, 12 bp, Artificial Sequence
  Oligonucleotide primer for the detection of SNP TSC0044201
tcctatcctctt

SEQ ID NO: 345798 - DNA, 12 bp, Artificial Sequence
  Oligonucleotide primer for the detection of SNP TSC0044201
aaggtattatag

SEQ ID NO: 345799 - DNA, 12 bp, Artificial Sequence
  Oligonucleotide primer for the detection of SNP TSC0044203
attaggattaga

SEQ ID NO: 345800 - DNA, 12 bp, Artificial Sequence
  Oligonucleotide primer for the detection of SNP TSC0044205
taaaattcatac

SEQ ID NO: 345801 - DNA, 12 bp, Artificial Sequence
  Oligonucleotide primer for the detection of SNP TSC0044205
agaggtgattta

SEQ ID NO: 345802 - DNA, 12 bp, Artificial Sequence
  Oligonucleotide primer for the detection of SNP TSC0044208
ccaatctacttc

SEQ ID NO: 345803 - DNA, 12 bp, Artificial Sequence
  Oligonucleotide primer for the detection of SNP TSC0044208
ttattagtatat

SEQ ID NO: 345804 - DNA, 12 bp, Artificial Sequence
  Oligonucleotide primer for the detection of SNP TSC0044208
cccatcaatata

SEQ ID NO: 345805 - DNA, 12 bp, Artificial Sequence
  Oligonucleotide primer for the detection of SNP TSC0044210
cctcttaaatta

SEQ ID NO: 345806 - DNA, 12 bp, Artificial Sequence
  Oligonucleotide primer for the detection of SNP TSC0044210
gagagatttttt

SEQ ID NO: 345807 - DNA, 12 bp, Artificial Sequence
  Oligonucleotide primer for the detection of SNP TSC0044210
aaaaaactcccc

SEQ ID NO: 345808 - DNA, 12 bp, Artificial Sequence
  Oligonucleotide primer for the detection of SNP TSC0044210
tttttgagttgc

SEQ ID NO: 345809 - DNA, 12 bp, Artificial Sequence
  Oligonucleotide primer for the detection of SNP TSC0044211
tcaacctattta

SEQ ID NO: 345810 - DNA, 12 bp, Artificial Sequence
  Oligonucleotide primer for the detection of SNP TSC0044211
tataaatatatg

SEQ ID NO: 345811 - DNA, 12 bp, Artificial Sequence
  Oligonucleotide primer for the detection of SNP TSC0044211
taaacatataaa

SEQ ID NO: 345812 - DNA, 12 bp, Artificial Sequence
  Oligonucleotide primer for the detection of SNP TSC0044216
tctccccaacac

SEQ ID NO: 345813 - DNA, 12 bp, Artificial Sequence
  Oligonucleotide primer for the detection of SNP TSC0044216
gtgaagtgtata

SEQ ID NO: 345814 - DNA, 12 bp, Artificial Sequence
  Oligonucleotide primer for the detection of SNP TSC0044217
ctacataacaac

SEQ ID NO: 345815 - DNA, 12 bp, Artificial Sequence
  Oligonucleotide primer for the detection of SNP TSC0044217
atgaaagatatg

SEQ ID NO: 345816 - DNA, 12 bp, Artificial Sequence
  Oligonucleotide primer for the detection of SNP TSC0044225
tactaaacatat

SEQ ID NO: 345817 - DNA, 12 bp, Artificial Sequence
  Oligonucleotide primer for the detection of SNP TSC0044225
gaattattgata

SEQ ID NO: 345818 - DNA, 12 bp, Artificial Sequence
  Oligonucleotide primer for the detection of SNP TSC0044226
aacatttaccaa

SEQ ID NO: 345819 - DNA, 12 bp, Artificial Sequence
  Oligonucleotide primer for the detection of SNP TSC0044226
aatatttacacc

SEQ ID NO: 345820 - DNA, 12 bp, Artificial Sequence
  Oligonucleotide primer for the detection of SNP TSC0044226
agtatttgttag

SEQ ID NO: 345821 - DNA, 12 bp, Artificial Sequence
  Oligonucleotide primer for the detection of SNP TSC0044228
aacttcaaccac

SEQ ID NO: 345822 - DNA, 12 bp, Artificial Sequence
  Oligonucleotide primer for the detection of SNP TSC0044230
attatttctata

SEQ ID NO: 345823 - DNA, 12 bp, Artificial Sequence
  Oligonucleotide primer for the detection of SNP TSC0044230
taagtgttattt

SEQ ID NO: 345824 - DNA, 12 bp, Artificial Sequence
  Oligonucleotide primer for the detection of SNP TSC0044230
attatttttgtg

SEQ ID NO: 345825 - DNA, 12 bp, Artificial Sequence
  Oligonucleotide primer for the detection of SNP TSC0010768
aaactctcttac

SEQ ID NO: 345826 - DNA, 12 bp, Artificial Sequence
  Oligonucleotide primer for the detection of SNP TSC0044231
gttaaaaaagta

SEQ ID NO: 345827 - DNA, 12 bp, Artificial Sequence
  Oligonucleotide primer for the detection of SNP TSC0044232
tcaaacctacaa

SEQ ID NO: 345828 - DNA, 12 bp, Artificial Sequence
  Oligonucleotide primer for the detection of SNP TSC0044232
taaatttatagt

SEQ ID NO: 345829 - DNA, 12 bp, Artificial Sequence
  Oligonucleotide primer for the detection of SNP TSC0044232
taaatttatagc

SEQ ID NO: 345830 - DNA, 12 bp, Artificial Sequence
  Oligonucleotide primer for the detection of SNP TSC0044233
ttaaaactacct

SEQ ID NO: 345831 - DNA, 12 bp, Artificial Sequence
  Oligonucleotide primer for the detection of SNP TSC0044233
tataatgaggga

SEQ ID NO: 345832 - DNA, 12 bp, Artificial Sequence
  Oligonucleotide primer for the detection of SNP TSC0044233
tataacgaggga

SEQ ID NO: 345833 - DNA, 12 bp, Artificial Sequence
  Oligonucleotide primer for the detection of SNP TSC0044234
aaaaaacacccc

SEQ ID NO: 345834 - DNA, 12 bp, Artificial Sequence
  Oligonucleotide primer for the detection of SNP TSC0044234
tagggagttttt

SEQ ID NO: 345835 - DNA, 12 bp, Artificial Sequence
  Oligonucleotide primer for the detection of SNP TSC0044234
agagggtatttt

SEQ ID NO: 345836 - DNA, 12 bp, Artificial Sequence
  Oligonucleotide primer for the detection of SNP TSC0044235
aaacttaattta

SEQ ID NO: 345837 - DNA, 12 bp, Artificial Sequence
  Oligonucleotide primer for the detection of SNP TSC0044235
cctctctaaatc

SEQ ID NO: 345838 - DNA, 12 bp, Artificial Sequence
  Oligonucleotide primer for the detection of SNP TSC0044235
aggtttagttta

SEQ ID NO: 345839 - DNA, 12 bp, Artificial Sequence
  Oligonucleotide primer for the detection of SNP TSC0005326
tagtgtagtttt

SEQ ID NO: 345840 - DNA, 12 bp, Artificial Sequence
  Oligonucleotide primer for the detection of SNP TSC0044236
attttagttaaa

SEQ ID NO: 345841 - DNA, 12 bp, Artificial Sequence
  Oligonucleotide primer for the detection of SNP TSC0044236
atcccaattaaa

SEQ ID NO: 345842 - DNA, 12 bp, Artificial Sequence
  Oligonucleotide primer for the detection of SNP TSC0044236
agttatgtggga

SEQ ID NO: 345843 - DNA, 12 bp, Artificial Sequence
  Oligonucleotide primer for the detection of SNP TSC0044237
tttctttcactc

SEQ ID NO: 345844 - DNA, 12 bp, Artificial Sequence
  Oligonucleotide primer for the detection of SNP TSC0044237
tttaaaaatgtt

SEQ ID NO: 345845 - DNA, 12 bp, Artificial Sequence
  Oligonucleotide primer for the detection of SNP TSC0044238
aagtatatttta

SEQ ID NO: 345846 - DNA, 12 bp, Artificial Sequence
  Oligonucleotide primer for the detection of SNP TSC0044239
acatatttattt

SEQ ID NO: 345847 - DNA, 12 bp, Artificial Sequence
  Oligonucleotide primer for the detection of SNP TSC0044239
acgtatttattt

SEQ ID NO: 345848 - DNA, 12 bp, Artificial Sequence
  Oligonucleotide primer for the detection of SNP TSC0044239
gtgtgtttgttt

SEQ ID NO: 345849 - DNA, 12 bp, Artificial Sequence
  Oligonucleotide primer for the detection of SNP TSC0044239
gcgtgtttgttt

SEQ ID NO: 345850 - DNA, 12 bp, Artificial Sequence
  Oligonucleotide primer for the detection of SNP TSC0044245
cacaactttaaa

SEQ ID NO: 345851 - DNA, 12 bp, Artificial Sequence
  Oligonucleotide primer for the detection of SNP TSC0044245
atattatataat

SEQ ID NO: 345852 - DNA, 12 bp, Artificial Sequence
  Oligonucleotide primer for the detection of SNP TSC0044245
atattatataac

SEQ ID NO: 345853 - DNA, 12 bp, Artificial Sequence
  Oligonucleotide primer for the detection of SNP TSC0044245
ataattttgaat

SEQ ID NO: 345854 - DNA, 12 bp, Artificial Sequence
  Oligonucleotide primer for the detection of SNP TSC0044246
aataattttggt

SEQ ID NO: 345855 - DNA, 12 bp, Artificial Sequence
  Oligonucleotide primer for the detection of SNP TSC0044247
ttttatttcaca

SEQ ID NO: 345856 - DNA, 12 bp, Artificial Sequence
  Oligonucleotide primer for the detection of SNP TSC0044247
ttgttaggtttt

SEQ ID NO: 345857 - DNA, 12 bp, Artificial Sequence
  Oligonucleotide primer for the detection of SNP TSC0044247
cctaccaaactc

SEQ ID NO: 345858 - DNA, 12 bp, Artificial Sequence
  Oligonucleotide primer for the detection of SNP TSC0044252
ctttatctatcc

SEQ ID NO: 345859 - DNA, 12 bp, Artificial Sequence
  Oligonukleotid-Primer
tagattaaaggt

SEQ ID NO: 345860 - DNA, 12 bp, Artificial Sequence
  Oligonucleotide primer for the detection of SNP TSC0044254
tcaatatcccac

SEQ ID NO: 345861 - DNA, 12 bp, Artificial Sequence
  Oligonucleotide primer for the detection of SNP TSC0044254
tatttatgtagg

SEQ ID NO: 345862 - DNA, 12 bp, Artificial Sequence
  Oligonucleotide primer for the detection of SNP TSC0044254
cacttatataaa

SEQ ID NO: 345863 - DNA, 12 bp, Artificial Sequence
  Oligonukleotid-Primer
atacacaaatat

SEQ ID NO: 345864 - DNA, 12 bp, Artificial Sequence
  Oligonucleotide primer for the detection of SNP TSC0044255
ttgtagaaaggt

SEQ ID NO: 345865 - DNA, 12 bp, Artificial Sequence
  Oligonucleotide primer for the detection of SNP TSC0044255
gtgtataaatgt

SEQ ID NO: 345866 - DNA, 12 bp, Artificial Sequence
  Oligonucleotide primer for the detection of SNP TSC0044256
tataaaatctac

SEQ ID NO: 345867 - DNA, 12 bp, Artificial Sequence
  Oligonucleotide primer for the detection of SNP TSC0044256
aatggagtttta

SEQ ID NO: 345868 - DNA, 12 bp, Artificial Sequence
  Oligonucleotide primer for the detection of SNP TSC0044257
atctctatacta

SEQ ID NO: 345869 - DNA, 12 bp, Artificial Sequence
  Oligonucleotide primer for the detection of SNP TSC0044257
atcctccctcca

SEQ ID NO: 345870 - DNA, 12 bp, Artificial Sequence
  Oligonucleotide primer for the detection of SNP TSC0006105
ccatttaacata

SEQ ID NO: 345871 - DNA, 12 bp, Artificial Sequence
  Oligonucleotide primer for the detection of SNP TSC0006105
tttaaatgtatt

SEQ ID NO: 345872 - DNA, 12 bp, Artificial Sequence
  Oligonucleotide primer for the detection of SNP TSC0006105
tttaaacgtatt

SEQ ID NO: 345873 - DNA, 12 bp, Artificial Sequence
  Oligonucleotide primer for the detection of SNP TSC0006105
ttcaaacatact

SEQ ID NO: 345874 - DNA, 12 bp, Artificial Sequence
  Oligonucleotide primer for the detection of SNP TSC0006105
ttcaaacgtact

SEQ ID NO: 345875 - DNA, 12 bp, Artificial Sequence
  Oligonucleotide primer for the detection of SNP TSC0044261
aacccttccaaa

SEQ ID NO: 345876 - DNA, 12 bp, Artificial Sequence
  Oligonucleotide primer for the detection of SNP TSC0044261
tcaaactccttc

SEQ ID NO: 345877 - DNA, 12 bp, Artificial Sequence
  Oligonucleotide primer for the detection of SNP TSC0044261
ggtttttttaag

SEQ ID NO: 345878 - DNA, 12 bp, Artificial Sequence
  Oligonucleotide primer for the detection of SNP TSC0044262
gataaaaggttt

SEQ ID NO: 345879 - DNA, 12 bp, Artificial Sequence
  Oligonucleotide primer for the detection of SNP TSC0044262
agggggggtggt

SEQ ID NO: 345880 - DNA, 12 bp, Artificial Sequence
  Oligonucleotide primer for the detection of SNP TSC0044262
agggggggtggc

SEQ ID NO: 345881 - DNA, 12 bp, Artificial Sequence
  Oligonucleotide primer for the detection of SNP TSC0044263
caaaatcctatt

SEQ ID NO: 345882 - DNA, 12 bp, Artificial Sequence
  Oligonucleotide primer for the detection of SNP TSC0044263
aggttttataga

SEQ ID NO: 345883 - DNA, 12 bp, Artificial Sequence
  Oligonucleotide primer for the detection of SNP TSC0006477
aattatacttcc

SEQ ID NO: 345884 - DNA, 12 bp, Artificial Sequence
  Oligonucleotide primer for the detection of SNP TSC0044268
ttattctcataa

SEQ ID NO: 345885 - DNA, 12 bp, Artificial Sequence
  Oligonucleotide primer for the detection of SNP TSC0044268
ttattttgtaat

SEQ ID NO: 345886 - DNA, 12 bp, Artificial Sequence
  Oligonucleotide primer for the detection of SNP TSC0044268
ttaccttacaat

SEQ ID NO: 345887 - DNA, 12 bp, Artificial Sequence
  Oligonucleotide primer for the detection of SNP TSC0044269
tttattctcata

SEQ ID NO: 345888 - DNA, 12 bp, Artificial Sequence
  Oligonucleotide primer for the detection of SNP TSC0044269
tattttgtaatt

SEQ ID NO: 345889 - DNA, 12 bp, Artificial Sequence
  Oligonucleotide primer for the detection of SNP TSC0044269
accttacaatta

SEQ ID NO: 345890 - DNA, 12 bp, Artificial Sequence
  Oligonucleotide primer for the detection of SNP TSC0044269
atttatttttat

SEQ ID NO: 345891 - DNA, 12 bp, Artificial Sequence
  Oligonucleotide primer for the detection of SNP TSC0044270
tcttaaacaaaa

SEQ ID NO: 345892 - DNA, 12 bp, Artificial Sequence
  Oligonucleotide primer for the detection of SNP TSC0044270
acccttaactca

SEQ ID NO: 345893 - DNA, 12 bp, Artificial Sequence
  Oligonucleotide primer for the detection of SNP TSC0044271
caataaattcta

SEQ ID NO: 345894 - DNA, 12 bp, Artificial Sequence
  Oligonucleotide primer for the detection of SNP TSC0044271
agtaaggttgag

SEQ ID NO: 345895 - DNA, 12 bp, Artificial Sequence
  Oligonucleotide primer for the detection of SNP TSC0044271
gtagtaaatttt

SEQ ID NO: 345896 - DNA, 12 bp, Artificial Sequence
  Oligonucleotide primer for the detection of SNP TSC0005646
ttaattagaaaa

SEQ ID NO: 345897 - DNA, 12 bp, Artificial Sequence
  Oligonucleotide primer for the detection of SNP TSC0005646
ctaattaaaaaa

SEQ ID NO: 345898 - DNA, 12 bp, Artificial Sequence
  Oligonucleotide primer for the detection of SNP TSC0005646
ttaaaaggtaga

SEQ ID NO: 345899 - DNA, 12 bp, Artificial Sequence
  Oligonucleotide primer for the detection of SNP TSC0005647
aacaactctcac

SEQ ID NO: 345900 - DNA, 12 bp, Artificial Sequence
  Oligonucleotide primer for the detection of SNP TSC0005647
ttttaaaaataa

SEQ ID NO: 345901 - DNA, 12 bp, Artificial Sequence
  Oligonucleotide primer for the detection of SNP TSC0005647
agtagtttttac

SEQ ID NO: 345902 - DNA, 12 bp, Artificial Sequence
  Oligonucleotide primer for the detection of SNP TSC0044272
taactaaaaact

SEQ ID NO: 345903 - DNA, 12 bp, Artificial Sequence
  Oligonucleotide primer for the detection of SNP TSC0044272
tagtagttatag

SEQ ID NO: 345904 - DNA, 12 bp, Artificial Sequence
  Oligonucleotide primer for the detection of SNP TSC0044273
ctttaatttttt

SEQ ID NO: 345905 - DNA, 12 bp, Artificial Sequence
  Oligonucleotide primer for the detection of SNP TSC0044273
ttaagtataatt

SEQ ID NO: 345906 - DNA, 12 bp, Artificial Sequence
  Oligonucleotide primer for the detection of SNP TSC0044273
tcaaacataatt

SEQ ID NO: 345907 - DNA, 12 bp, Artificial Sequence
  Oligonucleotide primer for the detection of SNP TSC0044274
caataccatcat

SEQ ID NO: 345908 - DNA, 12 bp, Artificial Sequence
  Oligonucleotide primer for the detection of SNP TSC0044274
taattttttggt

SEQ ID NO: 345909 - DNA, 12 bp, Artificial Sequence
  Oligonucleotide primer for the detection of SNP TSC0007795
taaaatactttt

SEQ ID NO: 345910 - DNA, 12 bp, Artificial Sequence
  Oligonucleotide primer for the detection of SNP TSC0007795
tagtgaaaaata

SEQ ID NO: 345911 - DNA, 12 bp, Artificial Sequence
  Oligonucleotide primer for the detection of SNP TSC0007796
ctttaaattcta

SEQ ID NO: 345912 - DNA, 12 bp, Artificial Sequence
  Oligonucleotide primer for the detection of SNP TSC0007796
aagataaagttt

SEQ ID NO: 345913 - DNA, 12 bp, Artificial Sequence
  Oligonucleotide primer for the detection of SNP TSC0007797
ccttttattttt

SEQ ID NO: 345914 - DNA, 12 bp, Artificial Sequence
  Oligonucleotide primer for the detection of SNP TSC0007797
gagtttgagggg

SEQ ID NO: 345915 - DNA, 12 bp, Artificial Sequence
  Oligonucleotide primer for the detection of SNP TSC0005078
tttatatttaga

SEQ ID NO: 345916 - DNA, 12 bp, Artificial Sequence
  Oligonucleotide primer for the detection of SNP TSC0044285
ggttatagttgt

SEQ ID NO: 345917 - DNA, 12 bp, Artificial Sequence
  Oligonucleotide primer for the detection of SNP TSC0044285
accacaactata

SEQ ID NO: 345918 - DNA, 12 bp, Artificial Sequence
  Oligonucleotide primer for the detection of SNP TSC0044285
agagttataggt

SEQ ID NO: 345919 - DNA, 12 bp, Artificial Sequence
  Oligonucleotide primer for the detection of SNP TSC0044286
atgtggtataat

SEQ ID NO: 345920 - DNA, 12 bp, Artificial Sequence
  Oligonucleotide primer for the detection of SNP TSC0044286
catataacataa

SEQ ID NO: 345921 - DNA, 12 bp, Artificial Sequence
  Oligonucleotide primer for the detection of SNP TSC0044286
tatgtaagagat

SEQ ID NO: 345922 - DNA, 12 bp, Artificial Sequence
  Oligonucleotide primer for the detection of SNP TSC0044287
aataatctcact

SEQ ID NO: 345923 - DNA, 12 bp, Artificial Sequence
  Oligonucleotide primer for the detection of SNP TSC0044287
attgatatatta

SEQ ID NO: 345924 - DNA, 12 bp, Artificial Sequence
  Oligonucleotide primer for the detection of SNP TSC0044288
atttcaaacatt

SEQ ID NO: 345925 - DNA, 12 bp, Artificial Sequence
  Oligonucleotide primer for the detection of SNP TSC0044288
ttatggggaaag

SEQ ID NO: 345926 - DNA, 12 bp, Artificial Sequence
  Oligonucleotide primer for the detection of SNP TSC0044289
ttttatacatta

SEQ ID NO: 345927 - DNA, 12 bp, Artificial Sequence
  Oligonucleotide primer for the detection of SNP TSC0044289
ttttatacgtta

SEQ ID NO: 345928 - DNA, 12 bp, Artificial Sequence
  Oligonucleotide primer for the detection of SNP TSC0044289
ggagtagaatat

SEQ ID NO: 345929 - DNA, 12 bp, Artificial Sequence
  Oligonucleotide primer for the detection of SNP TSC0044289
ttttatgcgtta

SEQ ID NO: 345930 - DNA, 12 bp, Artificial Sequence
  Oligonucleotide primer for the detection of SNP TSC0044290
attcaatattct

SEQ ID NO: 345931 - DNA, 12 bp, Artificial Sequence
  Oligonucleotide primer for the detection of SNP TSC0044290
attcgatattct

SEQ ID NO: 345932 - DNA, 12 bp, Artificial Sequence
  Oligonucleotide primer for the detection of SNP TSC0044290
tgtagttaggga

SEQ ID NO: 345933 - DNA, 12 bp, Artificial Sequence
  Oligonucleotide primer for the detection of SNP TSC0044291
aaatcttttatt

SEQ ID NO: 345934 - DNA, 12 bp, Artificial Sequence
  Oligonucleotide primer for the detection of SNP TSC0044291
tattagttttta

SEQ ID NO: 345935 - DNA, 12 bp, Artificial Sequence
  Oligonucleotide primer for the detection of SNP TSC0044292
gttaattgtttt

SEQ ID NO: 345936 - DNA, 12 bp, Artificial Sequence
  Oligonucleotide primer for the detection of SNP TSC0044292
ccaattactcca

SEQ ID NO: 345937 - DNA, 12 bp, Artificial Sequence
  Oligonucleotide primer for the detection of SNP TSC0044292
ttagtaaatggt

SEQ ID NO: 345938 - DNA, 12 bp, Artificial Sequence
  Oligonucleotide primer for the detection of SNP TSC0044293
tccactaaattt

SEQ ID NO: 345939 - DNA, 12 bp, Artificial Sequence
  Oligonucleotide primer for the detection of SNP TSC0044293
aaaaatgtaaaa

SEQ ID NO: 345940 - DNA, 12 bp, Artificial Sequence
  Oligonucleotide primer for the detection of SNP TSC0044294
cctccctaaact

SEQ ID NO: 345941 - DNA, 12 bp, Artificial Sequence
  Oligonucleotide primer for the detection of SNP TSC0044295
tatttcttacat

SEQ ID NO: 345942 - DNA, 12 bp, Artificial Sequence
  Oligonucleotide primer for the detection of SNP TSC0044295
gtttggaagtta

SEQ ID NO: 345943 - DNA, 12 bp, Artificial Sequence
  Oligonucleotide primer for the detection of SNP TSC0044296
aaatagaaggag

SEQ ID NO: 345944 - DNA, 12 bp, Artificial Sequence
  Oligonucleotide primer for the detection of SNP TSC0008209
tcaattctaaat

SEQ ID NO: 345945 - DNA, 12 bp, Artificial Sequence
  Oligonucleotide primer for the detection of SNP TSC0008980
acaacttaactc

SEQ ID NO: 345946 - DNA, 12 bp, Artificial Sequence
  Oligonucleotide primer for the detection of SNP TSC0008980
ttattgatatgt

SEQ ID NO: 345947 - DNA, 12 bp, Artificial Sequence
  Oligonucleotide primer for the detection of SNP TSC0008980
tcactaatatat

SEQ ID NO: 345948 - DNA, 12 bp, Artificial Sequence
  Oligonucleotide primer for the detection of SNP TSC0008980
tagtttagtttt

SEQ ID NO: 345949 - DNA, 12 bp, Artificial Sequence
  Oligonucleotide primer for the detection of SNP TSC0044298
ataaaatattta

SEQ ID NO: 345950 - DNA, 12 bp, Artificial Sequence
  Oligonucleotide primer for the detection of SNP TSC0044298
acaaaacatcta

SEQ ID NO: 345951 - DNA, 12 bp, Artificial Sequence
  Oligonucleotide primer for the detection of SNP TSC0044298
agagtggatttt

SEQ ID NO: 345952 - DNA, 12 bp, Artificial Sequence
  Oligonucleotide primer for the detection of SNP TSC0044300
ttttcccactat

SEQ ID NO: 345953 - DNA, 12 bp, Artificial Sequence
  Oligonucleotide primer for the detection of SNP TSC0044300
tttaattataaa

SEQ ID NO: 345954 - DNA, 12 bp, Artificial Sequence
  Oligonucleotide primer for the detection of SNP TSC0044301
ttaaacttctca

SEQ ID NO: 345955 - DNA, 12 bp, Artificial Sequence
  Oligonucleotide primer for the detection of SNP TSC0044301
ggaggttgagtt

SEQ ID NO: 345956 - DNA, 12 bp, Artificial Sequence
  Oligonucleotide primer for the detection of SNP TSC0044301
tggattttttat

SEQ ID NO: 345957 - DNA, 12 bp, Artificial Sequence
  Oligonucleotide primer for the detection of SNP TSC0044301
tggattttttac

SEQ ID NO: 345958 - DNA, 12 bp, Artificial Sequence
  Oligonucleotide primer for the detection of SNP TSC0044302
acacaatcataa

SEQ ID NO: 345959 - DNA, 12 bp, Artificial Sequence
  Oligonucleotide primer for the detection of SNP TSC0044302
acgcaatcataa

SEQ ID NO: 345960 - DNA, 12 bp, Artificial Sequence
  Oligonucleotide primer for the detection of SNP TSC0044302
ggtttatgttgt

SEQ ID NO: 345961 - DNA, 12 bp, Artificial Sequence
  Oligonucleotide primer for the detection of SNP TSC0044302
aatctatactac

SEQ ID NO: 345962 - DNA, 12 bp, Artificial Sequence
  Oligonucleotide primer for the detection of SNP TSC0044302
gtgtaattatgg

SEQ ID NO: 345963 - DNA, 12 bp, Artificial Sequence
  Oligonucleotide primer for the detection of SNP TSC0044302
gcgtaattatgg

SEQ ID NO: 345964 - DNA, 12 bp, Artificial Sequence
  Oligonucleotide primer for the detection of SNP TSC0044303
aaaccatccaaa

SEQ ID NO: 345965 - DNA, 12 bp, Artificial Sequence
  Oligonucleotide primer for the detection of SNP TSC0044303
tttgaaatatta

SEQ ID NO: 345966 - DNA, 12 bp, Artificial Sequence
  Oligonucleotide primer for the detection of SNP TSC0044305
aacctaataaat

SEQ ID NO: 345967 - DNA, 12 bp, Artificial Sequence
  Oligonucleotide primer for the detection of SNP TSC0044305
atttaggatata

SEQ ID NO: 345968 - DNA, 12 bp, Artificial Sequence
  Oligonucleotide primer for the detection of SNP TSC0044305
attcaaaatata

SEQ ID NO: 345969 - DNA, 12 bp, Artificial Sequence
  Oligonucleotide primer for the detection of SNP TSC0044305
gatttggtgagt

SEQ ID NO: 345970 - DNA, 12 bp, Artificial Sequence
  Oligonucleotide primer for the detection of SNP TSC0005939
gtgaaaatttaa

SEQ ID NO: 345971 - DNA, 12 bp, Artificial Sequence
  Oligonucleotide primer for the detection of SNP TSC0005939
ataaaaattcaa

SEQ ID NO: 345972 - DNA, 12 bp, Artificial Sequence
  Oligonucleotide primer for the detection of SNP TSC0005939
aaaataggagtt

SEQ ID NO: 345973 - DNA, 12 bp, Artificial Sequence
  Oligonucleotide primer for the detection of SNP TSC0005940
tgtgattttagg

SEQ ID NO: 345974 - DNA, 12 bp, Artificial Sequence
  Oligonucleotide primer for the detection of SNP TSC0044309
attttatggttt

SEQ ID NO: 345975 - DNA, 12 bp, Artificial Sequence
  Oligonucleotide primer for the detection of SNP TSC0044309
attttatggttc

SEQ ID NO: 345976 - DNA, 12 bp, Artificial Sequence
  Oligonucleotide primer for the detection of SNP TSC0044309
accctataaccc

SEQ ID NO: 345977 - DNA, 12 bp, Artificial Sequence
  Oligonucleotide primer for the detection of SNP TSC0044309
tgatatgttgac

SEQ ID NO: 345978 - DNA, 12 bp, Artificial Sequence
  Oligonucleotide primer for the detection of SNP TSC0044310
cttctaaatctc

SEQ ID NO: 345979 - DNA, 12 bp, Artificial Sequence
  Oligonucleotide primer for the detection of SNP TSC0044310
atttgtagttgg

SEQ ID NO: 345980 - DNA, 12 bp, Artificial Sequence
  Oligonucleotide primer for the detection of SNP TSC0006301
cctataaatcct

SEQ ID NO: 345981 - DNA, 12 bp, Artificial Sequence
  Oligonucleotide primer for the detection of SNP TSC0006301
tgttttggagta

SEQ ID NO: 345982 - DNA, 12 bp, Artificial Sequence
  Oligonucleotide primer for the detection of SNP TSC0006302
taatatataaaa

SEQ ID NO: 345983 - DNA, 12 bp, Artificial Sequence
  Oligonucleotide primer for the detection of SNP TSC0006302
tataactctata

SEQ ID NO: 345984 - DNA, 12 bp, Artificial Sequence
  Oligonucleotide primer for the detection of SNP TSC0006302
atagtgtatgaa

SEQ ID NO: 345985 - DNA, 12 bp, Artificial Sequence
  Oligonucleotide primer for the detection of SNP TSC0044311
aaacccaaattt

SEQ ID NO: 345986 - DNA, 12 bp, Artificial Sequence
  Oligonucleotide primer for the detection of SNP TSC0044311
tagaagatttta

SEQ ID NO: 345987 - DNA, 12 bp, Artificial Sequence
  Oligonucleotide primer for the detection of SNP TSC0044312
tcctaaacacaa

SEQ ID NO: 345988 - DNA, 12 bp, Artificial Sequence
  Oligonucleotide primer for the detection of SNP TSC0044312
tttagagagttt

SEQ ID NO: 345989 - DNA, 12 bp, Artificial Sequence
  Oligonucleotide primer for the detection of SNP TSC0044312
attcaaaaaatc

SEQ ID NO: 345990 - DNA, 12 bp, Artificial Sequence
  Oligonucleotide primer for the detection of SNP TSC0044312
ggatatagtttt

SEQ ID NO: 345991 - DNA, 12 bp, Artificial Sequence
  Oligonucleotide primer for the detection of SNP TSC0044313
caccaccaccac

SEQ ID NO: 345992 - DNA, 12 bp, Artificial Sequence
  Oligonucleotide primer for the detection of SNP TSC0044313
caccaccaccgc

SEQ ID NO: 345993 - DNA, 12 bp, Artificial Sequence
  Oligonucleotide primer for the detection of SNP TSC0044314
tattccaaactt

SEQ ID NO: 345994 - DNA, 12 bp, Artificial Sequence
  Oligonucleotide primer for the detection of SNP TSC0044314
tattattgtatt

SEQ ID NO: 345995 - DNA, 12 bp, Artificial Sequence
  Oligonucleotide primer for the detection of SNP TSC0044314
ataccactatac

SEQ ID NO: 345996 - DNA, 12 bp, Artificial Sequence
  Oligonucleotide primer for the detection of SNP TSC0044314
tgttttaggttt

SEQ ID NO: 345997 - DNA, 12 bp, Artificial Sequence
  Oligonucleotide primer for the detection of SNP TSC0044316
atatattacatt

SEQ ID NO: 345998 - DNA, 12 bp, Artificial Sequence
  Oligonucleotide primer for the detection of SNP TSC0044316
atatattacgtt

SEQ ID NO: 345999 - DNA, 12 bp, Artificial Sequence
  Oligonucleotide primer for the detection of SNP TSC0044316
gtgttaaataat

SEQ ID NO: 346000 - DNA, 12 bp, Artificial Sequence
  Oligonucleotide primer for the detection of SNP TSC0044316
ataccaaacaac

SEQ ID NO: 346001 - DNA, 12 bp, Artificial Sequence
  Oligonucleotide primer for the detection of SNP TSC0044316
atatgttgtgtt

SEQ ID NO: 346002 - DNA, 12 bp, Artificial Sequence
  Oligonucleotide primer for the detection of SNP TSC0044316
atatgttgcgtt

SEQ ID NO: 346003 - DNA, 12 bp, Artificial Sequence
  Oligonucleotide primer for the detection of SNP TSC0044317
aatttattccaa

SEQ ID NO: 346004 - DNA, 12 bp, Artificial Sequence
  Oligonukleotid-Primer
aatttattccga

SEQ ID NO: 346005 - DNA, 12 bp, Artificial Sequence
  Oligonucleotide primer for the detection of SNP TSC0044317
tagaatgttttt

SEQ ID NO: 346006 - DNA, 12 bp, Artificial Sequence
  Oligonucleotide primer for the detection of SNP TSC0044317
ctcaaaatattc

SEQ ID NO: 346007 - DNA, 12 bp, Artificial Sequence
  Oligonucleotide primer for the detection of SNP TSC0044317
ggtttgttttgg

SEQ ID NO: 346008 - DNA, 12 bp, Artificial Sequence
  Oligonucleotide primer for the detection of SNP TSC0044317
ggtttgtttcgg

SEQ ID NO: 346009 - DNA, 12 bp, Artificial Sequence
  Oligonucleotide primer for the detection of SNP TSC0044322
ctctataacaaa

SEQ ID NO: 346010 - DNA, 12 bp, Artificial Sequence
  Oligonucleotide primer for the detection of SNP TSC0044322
ggtgagtttatt

SEQ ID NO: 346011 - DNA, 12 bp, Artificial Sequence
  Oligonucleotide primer for the detection of SNP TSC0044322
ggtgagtttatc

SEQ ID NO: 346012 - DNA, 12 bp, Artificial Sequence
  Oligonucleotide primer for the detection of SNP TSC0044322
aataaacctatc

SEQ ID NO: 346013 - DNA, 12 bp, Artificial Sequence
  Oligonucleotide primer for the detection of SNP TSC0044322
tttttgtggtag

SEQ ID NO: 346014 - DNA, 12 bp, Artificial Sequence
  Oligonucleotide primer for the detection of SNP TSC0044323
tactcctcataa

SEQ ID NO: 346015 - DNA, 12 bp, Artificial Sequence
  Oligonucleotide primer for the detection of SNP TSC0044323
aaatgtggattt

SEQ ID NO: 346016 - DNA, 12 bp, Artificial Sequence
  Oligonucleotide primer for the detection of SNP TSC0044324
taaatatataac

SEQ ID NO: 346017 - DNA, 12 bp, Artificial Sequence
  Oligonucleotide primer for the detection of SNP TSC0044324
gtgtagatttta

SEQ ID NO: 346018 - DNA, 12 bp, Artificial Sequence
  Oligonucleotide primer for the detection of SNP TSC0044325
tgggttttattt

SEQ ID NO: 346019 - DNA, 12 bp, Artificial Sequence
  Oligonucleotide primer for the detection of SNP TSC0044325
cgggttttattt

SEQ ID NO: 346020 - DNA, 12 bp, Artificial Sequence
  Oligonucleotide primer for the detection of SNP TSC0044325
tgggttttattc

SEQ ID NO: 346021 - DNA, 12 bp, Artificial Sequence
  Oligonucleotide primer for the detection of SNP TSC0044325
cgggttttattc

SEQ ID NO: 346022 - DNA, 12 bp, Artificial Sequence
  Oligonucleotide primer for the detection of SNP TSC0044325
tcaaatctcact

SEQ ID NO: 346023 - DNA, 12 bp, Artificial Sequence
  Oligonucleotide primer for the detection of SNP TSC0044325
tcgaatctcact

SEQ ID NO: 346024 - DNA, 12 bp, Artificial Sequence
  Oligonucleotide primer for the detection of SNP TSC0044326
aaaatcttaatt

SEQ ID NO: 346025 - DNA, 12 bp, Artificial Sequence
  Oligonucleotide primer for the detection of SNP TSC0044331
ggtagaggtaag

SEQ ID NO: 346026 - DNA, 12 bp, Artificial Sequence
  Oligonucleotide primer for the detection of SNP TSC0044332
tcaaaataaaac

SEQ ID NO: 346027 - DNA, 12 bp, Artificial Sequence
  Oligonucleotide primer for the detection of SNP TSC0044332
ttatttcgatta

SEQ ID NO: 346028 - DNA, 12 bp, Artificial Sequence
  Oligonucleotide primer for the detection of SNP TSC0044332
ttagagtggagt

SEQ ID NO: 346029 - DNA, 12 bp, Artificial Sequence
  Oligonucleotide primer for the detection of SNP TSC0044333
attccacttaac

SEQ ID NO: 346030 - DNA, 12 bp, Artificial Sequence
  Oligonucleotide primer for the detection of SNP TSC0044333
attccgcttaac

SEQ ID NO: 346031 - DNA, 12 bp, Artificial Sequence
  Oligonucleotide primer for the detection of SNP TSC0044334
caatataattct

SEQ ID NO: 346032 - DNA, 12 bp, Artificial Sequence
  Oligonucleotide primer for the detection of SNP TSC0044334
taagtaagtatt

SEQ ID NO: 346033 - DNA, 12 bp, Artificial Sequence
  Oligonucleotide primer for the detection of SNP TSC0009762
tccaaatattct

SEQ ID NO: 346034 - DNA, 12 bp, Artificial Sequence
  Oligonucleotide primer for the detection of SNP TSC0009762
tatttatatagg

SEQ ID NO: 346035 - DNA, 12 bp, Artificial Sequence
  Oligonucleotide primer for the detection of SNP TSC0044335
ggagtgtagagg

SEQ ID NO: 346036 - DNA, 12 bp, Artificial Sequence
  Oligonucleotide primer for the detection of SNP TSC0044336
tttgagatagaa

SEQ ID NO: 346037 - DNA, 12 bp, Artificial Sequence
  Oligonucleotide primer for the detection of SNP TSC0044337
aacctaaataac

SEQ ID NO: 346038 - DNA, 12 bp, Artificial Sequence
  Oligonucleotide primer for the detection of SNP TSC0044337
ttagagataggg

SEQ ID NO: 346039 - DNA, 12 bp, Artificial Sequence
  Oligonucleotide primer for the detection of SNP TSC0044337
agtttgagtgat

SEQ ID NO: 346040 - DNA, 12 bp, Artificial Sequence
  Oligonucleotide primer for the detection of SNP TSC0044338
ccatcacaaaat

SEQ ID NO: 346041 - DNA, 12 bp, Artificial Sequence
  Oligonucleotide primer for the detection of SNP TSC0044338
tattttataata

SEQ ID NO: 346042 - DNA, 12 bp, Artificial Sequence
  Oligonucleotide primer for the detection of SNP TSC0044338
caccctacaaca

SEQ ID NO: 346043 - DNA, 12 bp, Artificial Sequence
  Oligonucleotide primer for the detection of SNP TSC0044338
ttattatagaat

SEQ ID NO: 346044 - DNA, 12 bp, Artificial Sequence
  Oligonucleotide primer for the detection of SNP TSC0044339
tctatataaaca

SEQ ID NO: 346045 - DNA, 12 bp, Artificial Sequence
  Oligonucleotide primer for the detection of SNP TSC0044339
gtgaatgaatga

SEQ ID NO: 346046 - DNA, 12 bp, Artificial Sequence
  Oligonucleotide primer for the detection of SNP TSC0044339
ttatgtaggtat

SEQ ID NO: 346047 - DNA, 12 bp, Artificial Sequence
  Oligonucleotide primer for the detection of SNP TSC0000136
atactcaacttc

SEQ ID NO: 346048 - DNA, 12 bp, Artificial Sequence
  Oligonucleotide primer for the detection of SNP TSC0000137
ccgcctaaaaat

SEQ ID NO: 346049 - DNA, 12 bp, Artificial Sequence
  Oligonucleotide primer for the detection of SNP TSC0000137
ttagatgtaagt

SEQ ID NO: 346050 - DNA, 12 bp, Artificial Sequence
  Oligonucleotide primer for the detection of SNP TSC0000137
tcaaatacaaat

SEQ ID NO: 346051 - DNA, 12 bp, Artificial Sequence
  Oligonucleotide primer for the detection of SNP TSC0000137
ttgtttgagggt

SEQ ID NO: 346052 - DNA, 12 bp, Artificial Sequence
  Oligonucleotide primer for the detection of SNP TSC0000137
tcgtttgagggt

SEQ ID NO: 346053 - DNA, 12 bp, Artificial Sequence
  Oligonucleotide primer for the detection of SNP TSC0001389
tagataaaataa

SEQ ID NO: 346054 - DNA, 12 bp, Artificial Sequence
  Oligonucleotide primer for the detection of SNP TSC0001389
taaataaaacaa

SEQ ID NO: 346055 - DNA, 12 bp, Artificial Sequence
  Oligonucleotide primer for the detection of SNP TSC0001389
ttaattaggata

SEQ ID NO: 346056 - DNA, 12 bp, Artificial Sequence
  Oligonucleotide primer for the detection of SNP TSC0044341
tttctcttaata

SEQ ID NO: 346057 - DNA, 12 bp, Artificial Sequence
  Oligonucleotide primer for the detection of SNP TSC0044341
atgataaatgtt

SEQ ID NO: 346058 - DNA, 12 bp, Artificial Sequence
  Oligonucleotide primer for the detection of SNP TSC0044341
atgataaatgtc

SEQ ID NO: 346059 - DNA, 12 bp, Artificial Sequence
  Oligonucleotide primer for the detection of SNP TSC0044342
ctaacccataaa

SEQ ID NO: 346060 - DNA, 12 bp, Artificial Sequence
  Oligonucleotide primer for the detection of SNP TSC0044342
agagaatgatga

SEQ ID NO: 346061 - DNA, 12 bp, Artificial Sequence
  Oligonucleotide primer for the detection of SNP TSC0044342
ttggtttatgga

SEQ ID NO: 346062 - DNA, 12 bp, Artificial Sequence
  Oligonucleotide primer for the detection of SNP TSC0044343
cctaaaattatt

SEQ ID NO: 346063 - DNA, 12 bp, Artificial Sequence
  Oligonucleotide primer for the detection of SNP TSC0044343
ttattattaaag

SEQ ID NO: 346064 - DNA, 12 bp, Artificial Sequence
  Oligonucleotide primer for the detection of SNP TSC0044343
ccatcatcaaaa

SEQ ID NO: 346065 - DNA, 12 bp, Artificial Sequence
  Oligonucleotide primer for the detection of SNP TSC0044344
acaatactatac

SEQ ID NO: 346066 - DNA, 12 bp, Artificial Sequence
  Oligonucleotide primer for the detection of SNP TSC0044345
accaatctctac

SEQ ID NO: 346067 - DNA, 12 bp, Artificial Sequence
  Oligonucleotide primer for the detection of SNP TSC0044345
agatagaaatag

SEQ ID NO: 346068 - DNA, 12 bp, Artificial Sequence
  Oligonucleotide primer for the detection of SNP TSC0009728
ttcccacatttt

SEQ ID NO: 346069 - DNA, 12 bp, Artificial Sequence
  Oligonucleotide primer for the detection of SNP TSC0009728
gaattaagatag

SEQ ID NO: 346070 - DNA, 12 bp, Artificial Sequence
  Oligonucleotide primer for the detection of SNP TSC0044346
tctaaaaccttc

SEQ ID NO: 346071 - DNA, 12 bp, Artificial Sequence
  Oligonucleotide primer for the detection of SNP TSC0044346
taggaagtatgg

SEQ ID NO: 346072 - DNA, 12 bp, Artificial Sequence
  Oligonucleotide primer for the detection of SNP TSC0044346
caaaaaacataa

SEQ ID NO: 346073 - DNA, 12 bp, Artificial Sequence
  Oligonucleotide primer for the detection of SNP TSC0044346
tttgaggttttt

SEQ ID NO: 346074 - DNA, 12 bp, Artificial Sequence
  Oligonucleotide primer for the detection of SNP TSC0000289
acatatattata

SEQ ID NO: 346075 - DNA, 12 bp, Artificial Sequence
  Oligonucleotide primer for the detection of SNP TSC0000289
gaacgtttttta

SEQ ID NO: 346076 - DNA, 12 bp, Artificial Sequence
  Oligonucleotide primer for the detection of SNP TSC0000289
acattctttaaa

SEQ ID NO: 346077 - DNA, 12 bp, Artificial Sequence
  Oligonucleotide primer for the detection of SNP TSC0000289
acgttctttaaa

SEQ ID NO: 346078 - DNA, 12 bp, Artificial Sequence
  Oligonucleotide primer for the detection of SNP TSC0044349
actaaaattaac

SEQ ID NO: 346079 - DNA, 12 bp, Artificial Sequence
  Oligonucleotide primer for the detection of SNP TSC0044349
taatataaatgg

SEQ ID NO: 346080 - DNA, 12 bp, Artificial Sequence
  Oligonucleotide primer for the detection of SNP TSC0044352
tactccaaccta

SEQ ID NO: 346081 - DNA, 12 bp, Artificial Sequence
  Oligonucleotide primer for the detection of SNP TSC0044354
atatatattaca

SEQ ID NO: 346082 - DNA, 12 bp, Artificial Sequence
  Oligonucleotide primer for the detection of SNP TSC0044354
aatatatattat

SEQ ID NO: 346083 - DNA, 12 bp, Artificial Sequence
  Oligonucleotide primer for the detection of SNP TSC0044355
attacacaaact

SEQ ID NO: 346084 - DNA, 12 bp, Artificial Sequence
  Oligonucleotide primer for the detection of SNP TSC0044355
atttttatagaa

SEQ ID NO: 346085 - DNA, 12 bp, Artificial Sequence
  Oligonucleotide primer for the detection of SNP TSC0044355
attgtataagtt

SEQ ID NO: 346086 - DNA, 12 bp, Artificial Sequence
  Oligonucleotide primer for the detection of SNP TSC0044358
aacaataacaac

SEQ ID NO: 346087 - DNA, 12 bp, Artificial Sequence
  Oligonucleotide primer for the detection of SNP TSC0044358
ttttaatatttg

SEQ ID NO: 346088 - DNA, 12 bp, Artificial Sequence
  Oligonucleotide primer for the detection of SNP TSC0044362
accccctaaaac

SEQ ID NO: 346089 - DNA, 12 bp, Artificial Sequence
  Oligonucleotide primer for the detection of SNP TSC0044363
tttattaataaa

SEQ ID NO: 346090 - DNA, 12 bp, Artificial Sequence
  Oligonucleotide primer for the detection of SNP TSC0044363
tagttgtaaatt

SEQ ID NO: 346091 - DNA, 12 bp, Artificial Sequence
  Oligonucleotide primer for the detection of SNP TSC0044364
tacaatcattct

SEQ ID NO: 346092 - DNA, 12 bp, Artificial Sequence
  Oligonucleotide primer for the detection of SNP TSC0044364
tacaatcgttct

SEQ ID NO: 346093 - DNA, 12 bp, Artificial Sequence
  Oligonucleotide primer for the detection of SNP TSC0044364
gtggaagaatga

SEQ ID NO: 346094 - DNA, 12 bp, Artificial Sequence
  Oligonucleotide primer for the detection of SNP TSC0044370
acttcatattat

SEQ ID NO: 346095 - DNA, 12 bp, Artificial Sequence
  Oligonucleotide primer for the detection of SNP TSC0044370
gatagtttatta

SEQ ID NO: 346096 - DNA, 12 bp, Artificial Sequence
  Oligonucleotide primer for the detection of SNP TSC0044371
ccttcttcactc

SEQ ID NO: 346097 - DNA, 12 bp, Artificial Sequence
  Oligonucleotide primer for the detection of SNP TSC0044371
ttatattgtata

SEQ ID NO: 346098 - DNA, 12 bp, Artificial Sequence
  Oligonucleotide primer for the detection of SNP TSC0044372
acacaccttata

SEQ ID NO: 346099 - DNA, 12 bp, Artificial Sequence
  Oligonucleotide primer for the detection of SNP TSC0044372
acgcaccttata

SEQ ID NO: 346100 - DNA, 12 bp, Artificial Sequence
  Oligonucleotide primer for the detection of SNP TSC0044372
ataacacatcac

SEQ ID NO: 346101 - DNA, 12 bp, Artificial Sequence
  Oligonucleotide primer for the detection of SNP TSC0044372
ataacacatcgc

SEQ ID NO: 346102 - DNA, 12 bp, Artificial Sequence
  Oligonucleotide primer for the detection of SNP TSC0044372
gatgtattttgt

SEQ ID NO: 346103 - DNA, 12 bp, Artificial Sequence
  Oligonucleotide primer for the detection of SNP TSC0044372
gacgtattttgt

SEQ ID NO: 346104 - DNA, 12 bp, Artificial Sequence
  Oligonucleotide primer for the detection of SNP TSC0044376
ttaaccaacctc

SEQ ID NO: 346105 - DNA, 12 bp, Artificial Sequence
  Oligonucleotide primer for the detection of SNP TSC0044376
tataaagaatta

SEQ ID NO: 346106 - DNA, 12 bp, Artificial Sequence
  Oligonucleotide primer for the detection of SNP TSC0006214
aattctcccacc

SEQ ID NO: 346107 - DNA, 12 bp, Artificial Sequence
  Oligonucleotide primer for the detection of SNP TSC0006214
agataaaggatg

SEQ ID NO: 346108 - DNA, 12 bp, Artificial Sequence
  Oligonucleotide primer for the detection of SNP TSC0006214
gatttttttatt

SEQ ID NO: 346109 - DNA, 12 bp, Artificial Sequence
  Oligonucleotide primer for the detection of SNP TSC0006214
gatttttttatc

SEQ ID NO: 346110 - DNA, 12 bp, Artificial Sequence
  Oligonucleotide primer for the detection of SNP TSC0044378
aatattctattt

SEQ ID NO: 346111 - DNA, 12 bp, Artificial Sequence
  Oligonucleotide primer for the detection of SNP TSC0044379
atgattatagtt

SEQ ID NO: 346112 - DNA, 12 bp, Artificial Sequence
  Oligonucleotide primer for the detection of SNP TSC0044379
atgattatagtc

SEQ ID NO: 346113 - DNA, 12 bp, Artificial Sequence
  Oligonucleotide primer for the detection of SNP TSC0044379
ataatcacaacc

SEQ ID NO: 346114 - DNA, 12 bp, Artificial Sequence
  Oligonucleotide primer for the detection of SNP TSC0044379
gagttattgtgt

SEQ ID NO: 346115 - DNA, 12 bp, Artificial Sequence
  Oligonucleotide primer for the detection of SNP TSC0044379
gagttattgtgc

SEQ ID NO: 346116 - DNA, 12 bp, Artificial Sequence
  Oligonucleotide primer for the detection of SNP TSC0044380
ccaatcataatt

SEQ ID NO: 346117 - DNA, 12 bp, Artificial Sequence
  Oligonucleotide primer for the detection of SNP TSC0044380
aattttaaggta

SEQ ID NO: 346118 - DNA, 12 bp, Artificial Sequence
  Oligonucleotide primer for the detection of SNP TSC0044380
aacctcaaaaca

SEQ ID NO: 346119 - DNA, 12 bp, Artificial Sequence
  Oligonucleotide primer for the detection of SNP TSC0044380
tagttatgattt

SEQ ID NO: 346120 - DNA, 12 bp, Artificial Sequence
  Oligonucleotide primer for the detection of SNP TSC0044381
actaacctaaac

SEQ ID NO: 346121 - DNA, 12 bp, Artificial Sequence
  Oligonucleotide primer for the detection of SNP TSC0044381
tgattgttatga

SEQ ID NO: 346122 - DNA, 12 bp, Artificial Sequence
  Oligonucleotide primer for the detection of SNP TSC0044382
ctatctctaaat

SEQ ID NO: 346123 - DNA, 12 bp, Artificial Sequence
  Oligonucleotide primer for the detection of SNP TSC0044382
tgtgtttgtttg

SEQ ID NO: 346124 - DNA, 12 bp, Artificial Sequence
  Oligonucleotide primer for the detection of SNP TSC0044384
ttcactaacaat

SEQ ID NO: 346125 - DNA, 12 bp, Artificial Sequence
  Oligonucleotide primer for the detection of SNP TSC0044384
tgtagtaggtta

SEQ ID NO: 346126 - DNA, 12 bp, Artificial Sequence
  Oligonucleotide primer for the detection of SNP TSC0044385
caatttcccctc

SEQ ID NO: 346127 - DNA, 12 bp, Artificial Sequence
  Oligonucleotide primer for the detection of SNP TSC0044386
ttcaactattaa

SEQ ID NO: 346128 - DNA, 12 bp, Artificial Sequence
  Oligonucleotide primer for the detection of SNP TSC0044386
aataatatttat

SEQ ID NO: 346129 - DNA, 12 bp, Artificial Sequence
  Oligonucleotide primer for the detection of SNP TSC0044387
tacccactactt

SEQ ID NO: 346130 - DNA, 12 bp, Artificial Sequence
  Oligonucleotide primer for the detection of SNP TSC0044387
tagtagttgtgg

SEQ ID NO: 346131 - DNA, 12 bp, Artificial Sequence
  Oligonucleotide primer for the detection of SNP TSC0044387
tagtagttgcgg

SEQ ID NO: 346132 - DNA, 12 bp, Artificial Sequence
  Oligonucleotide primer for the detection of SNP TSC0044389
actaaactaaaa

SEQ ID NO: 346133 - DNA, 12 bp, Artificial Sequence
  Oligonucleotide primer for the detection of SNP TSC0044389
ttctttaaataa

SEQ ID NO: 346134 - DNA, 12 bp, Artificial Sequence
  Oligonucleotide primer for the detection of SNP TSC0044389
gttgggttgagg

SEQ ID NO: 346135 - DNA, 12 bp, Artificial Sequence
  Oligonucleotide primer for the detection of SNP TSC0044391
tttattaaaaca

SEQ ID NO: 346136 - DNA, 12 bp, Artificial Sequence
  Oligonucleotide primer for the detection of SNP TSC0044392
tgaatttgtatg

SEQ ID NO: 346137 - DNA, 12 bp, Artificial Sequence
  Oligonucleotide primer for the detection of SNP TSC0044392
tgaatttgtacg

SEQ ID NO: 346138 - DNA, 12 bp, Artificial Sequence
  Oligonucleotide primer for the detection of SNP TSC0044392
taaatttacaca

SEQ ID NO: 346139 - DNA, 12 bp, Artificial Sequence
  Oligonucleotide primer for the detection of SNP TSC0044392
taaatttacacg

SEQ ID NO: 346140 - DNA, 12 bp, Artificial Sequence
  Oligonucleotide primer for the detection of SNP TSC0044392
agggtgggagtt

SEQ ID NO: 346141 - DNA, 12 bp, Artificial Sequence
  Oligonucleotide primer for the detection of SNP TSC0044393
cacctttacttt

SEQ ID NO: 346142 - DNA, 12 bp, Artificial Sequence
  Oligonucleotide primer for the detection of SNP TSC0044393
cgcctttacttt

SEQ ID NO: 346143 - DNA, 12 bp, Artificial Sequence
  Oligonucleotide primer for the detection of SNP TSC0044393
ggaaagtagagg

SEQ ID NO: 346144 - DNA, 12 bp, Artificial Sequence
  Oligonucleotide primer for the detection of SNP TSC0044394
acaattcaacct

SEQ ID NO: 346145 - DNA, 12 bp, Artificial Sequence
  Oligonucleotide primer for the detection of SNP TSC0044394
atattatatgga

SEQ ID NO: 346146 - DNA, 12 bp, Artificial Sequence
  Oligonucleotide primer for the detection of SNP TSC0044397
gataaagtttta

SEQ ID NO: 346147 - DNA, 12 bp, Artificial Sequence
  Oligonucleotide primer for the detection of SNP TSC0044399
tatttttaagag

SEQ ID NO: 346148 - DNA, 12 bp, Artificial Sequence
  Oligonucleotide primer for the detection of SNP TSC0044400
aacaacacatac

SEQ ID NO: 346149 - DNA, 12 bp, Artificial Sequence
  Oligonucleotide primer for the detection of SNP TSC0044400
tttgttgtttgg

SEQ ID NO: 346150 - DNA, 12 bp, Artificial Sequence
  Oligonucleotide primer for the detection of SNP TSC0044401
ttgaggatgatg

SEQ ID NO: 346151 - DNA, 12 bp, Artificial Sequence
  Oligonucleotide primer for the detection of SNP TSC0005893
aatctttttata

SEQ ID NO: 346152 - DNA, 12 bp, Artificial Sequence
  Oligonucleotide primer for the detection of SNP TSC0005893
gggaaaaaattt

SEQ ID NO: 346153 - DNA, 12 bp, Artificial Sequence
  Oligonucleotide primer for the detection of SNP TSC0044406
tagttttgaaag

SEQ ID NO: 346154 - DNA, 12 bp, Artificial Sequence
  Oligonucleotide primer for the detection of SNP TSC0044406
caatcctaaaaa

SEQ ID NO: 346155 - DNA, 12 bp, Artificial Sequence
  Oligonucleotide primer for the detection of SNP TSC0044406
aaaataagaaat

SEQ ID NO: 346156 - DNA, 12 bp, Artificial Sequence
  Oligonucleotide primer for the detection of SNP TSC0044407
aaacaattcaat

SEQ ID NO: 346157 - DNA, 12 bp, Artificial Sequence
  Oligonucleotide primer for the detection of SNP TSC0044407
ttaaccacataa

SEQ ID NO: 346158 - DNA, 12 bp, Artificial Sequence
  Oligonucleotide primer for the detection of SNP TSC0044407
gataatttagtt

SEQ ID NO: 346159 - DNA, 12 bp, Artificial Sequence
  Oligonucleotide primer for the detection of SNP TSC0044407
gataatttagtc

SEQ ID NO: 346160 - DNA, 12 bp, Artificial Sequence
  Oligonucleotide primer for the detection of SNP TSC0044408
taaataaatgag

SEQ ID NO: 346161 - DNA, 12 bp, Artificial Sequence
  Oligonucleotide primer for the detection of SNP TSC0044409
tactttaaacat

SEQ ID NO: 346162 - DNA, 12 bp, Artificial Sequence
  Oligonucleotide primer for the detection of SNP TSC0044409
tataaagaagtg

SEQ ID NO: 346163 - DNA, 12 bp, Artificial Sequence
  Oligonucleotide primer for the detection of SNP TSC0044411
tatccctccctt

SEQ ID NO: 346164 - DNA, 12 bp, Artificial Sequence
  Oligonucleotide primer for the detection of SNP TSC0044411
ttgtattagttg

SEQ ID NO: 346165 - DNA, 12 bp, Artificial Sequence
  Oligonucleotide primer for the detection of SNP TSC0007586
aattaatccaat

SEQ ID NO: 346166 - DNA, 12 bp, Artificial Sequence
  Oligonucleotide primer for the detection of SNP TSC0044412
ataaattagtaa

SEQ ID NO: 346167 - DNA, 12 bp, Artificial Sequence
  Oligonucleotide primer for the detection of SNP TSC0044413
ccacccaacaac

SEQ ID NO: 346168 - DNA, 12 bp, Artificial Sequence
  Oligonucleotide primer for the detection of SNP TSC0044413
ttttacccaatt

SEQ ID NO: 346169 - DNA, 12 bp, Artificial Sequence
  Oligonucleotide primer for the detection of SNP TSC0044414
tataaaacatat

SEQ ID NO: 346170 - DNA, 12 bp, Artificial Sequence
  Oligonucleotide primer for the detection of SNP TSC0044414
gttttgtatttt

SEQ ID NO: 346171 - DNA, 12 bp, Artificial Sequence
  Oligonucleotide primer for the detection of SNP TSC0044414
attttatactcc

SEQ ID NO: 346172 - DNA, 12 bp, Artificial Sequence
  Oligonucleotide primer for the detection of SNP TSC0044415
ttctatacaaaa

SEQ ID NO: 346173 - DNA, 12 bp, Artificial Sequence
  Oligonucleotide primer for the detection of SNP TSC0044415
tatgtattattt

SEQ ID NO: 346174 - DNA, 12 bp, Artificial Sequence
  Oligonucleotide primer for the detection of SNP TSC0044415
atacattatcta

SEQ ID NO: 346175 - DNA, 12 bp, Artificial Sequence
  Oligonucleotide primer for the detection of SNP TSC0009425
cacacaataaaa

SEQ ID NO: 346176 - DNA, 12 bp, Artificial Sequence
  Oligonucleotide primer for the detection of SNP TSC0009425
cgcacaataaaa

SEQ ID NO: 346177 - DNA, 12 bp, Artificial Sequence
  Oligonucleotide primer for the detection of SNP TSC0009425
gtaaagttttgg

SEQ ID NO: 346178 - DNA, 12 bp, Artificial Sequence
  Oligonucleotide primer for the detection of SNP TSC0044416
tttttgattggg

SEQ ID NO: 346179 - DNA, 12 bp, Artificial Sequence
  Oligonucleotide primer for the detection of SNP TSC0044416
ctttaactaaaa

SEQ ID NO: 346180 - DNA, 12 bp, Artificial Sequence
  Oligonucleotide primer for the detection of SNP TSC0044416
ataggattgggt

SEQ ID NO: 346181 - DNA, 12 bp, Artificial Sequence
  Oligonucleotide primer for the detection of SNP TSC0044417
tttgaaagataa

SEQ ID NO: 346182 - DNA, 12 bp, Artificial Sequence
  Oligonucleotide primer for the detection of SNP TSC0044417
tttaaaaaacaa

SEQ ID NO: 346183 - DNA, 12 bp, Artificial Sequence
  Oligonucleotide primer for the detection of SNP TSC0044417
aaatggtagtat

SEQ ID NO: 346184 - DNA, 12 bp, Artificial Sequence
  Oligonucleotide primer for the detection of SNP TSC0044417
aaatggtagtac

SEQ ID NO: 346185 - DNA, 12 bp, Artificial Sequence
  Oligonucleotide primer for the detection of SNP TSC0044418
cttctcttatat

SEQ ID NO: 346186 - DNA, 12 bp, Artificial Sequence
  Oligonucleotide primer for the detection of SNP TSC0044418
aatttgatgggg

SEQ ID NO: 346187 - DNA, 12 bp, Artificial Sequence
  Oligonucleotide primer for the detection of SNP TSC0044419
atgggttttttt

SEQ ID NO: 346188 - DNA, 12 bp, Artificial Sequence
  Oligonucleotide primer for the detection of SNP TSC0044419
ataaatcctttt

SEQ ID NO: 346189 - DNA, 12 bp, Artificial Sequence
  Oligonukleotid-Primer
gtggaggaagta

SEQ ID NO: 346190 - DNA, 12 bp, Artificial Sequence
  Oligonucleotide primer for the detection of SNP TSC0044422
tcataccatctc

SEQ ID NO: 346191 - DNA, 12 bp, Artificial Sequence
  Oligonucleotide primer for the detection of SNP TSC0044422
ttatgttatttt

SEQ ID NO: 346192 - DNA, 12 bp, Artificial Sequence
  Oligonucleotide primer for the detection of SNP TSC0044425
gaaataaatgaa

SEQ ID NO: 346193 - DNA, 12 bp, Artificial Sequence
  Oligonucleotide primer for the detection of SNP TSC0044426
aaaccccaatac

SEQ ID NO: 346194 - DNA, 12 bp, Artificial Sequence
  Oligonucleotide primer for the detection of SNP TSC0044427
aaaatataacat

SEQ ID NO: 346195 - DNA, 12 bp, Artificial Sequence
  Oligonucleotide primer for the detection of SNP TSC0044427
taaataagattt

SEQ ID NO: 346196 - DNA, 12 bp, Artificial Sequence
  Oligonucleotide primer for the detection of SNP TSC0044427
caaataaaatcc

SEQ ID NO: 346197 - DNA, 12 bp, Artificial Sequence
  Oligonukleotid-Primer
aaaatgtaatat

SEQ ID NO: 346198 - DNA, 12 bp, Artificial Sequence
  Oligonucleotide primer for the detection of SNP TSC0044432
ttctttttcaaa

SEQ ID NO: 346199 - DNA, 12 bp, Artificial Sequence
  Oligonucleotide primer for the detection of SNP TSC0044432
ttgtttgagatt

SEQ ID NO: 346200 - DNA, 12 bp, Artificial Sequence
  Oligonucleotide primer for the detection of SNP TSC0044433
accaaactctac

SEQ ID NO: 346201 - DNA, 12 bp, Artificial Sequence
  Oligonukleotid-Primer
ttttaatttaga

SEQ ID NO: 346202 - DNA, 12 bp, Artificial Sequence
  Oligonucleotide primer for the detection of SNP TSC0044434
taactatttaac

SEQ ID NO: 346203 - DNA, 12 bp, Artificial Sequence
  Oligonucleotide primer for the detection of SNP TSC0044434
tagtaagaaaaa

SEQ ID NO: 346204 - DNA, 12 bp, Artificial Sequence
  Oligonucleotide primer for the detection of SNP TSC0044435
actttatccaca

SEQ ID NO: 346205 - DNA, 12 bp, Artificial Sequence
  Oligonukleotid-Primer
gaggtggtgatt

SEQ ID NO: 346206 - DNA, 12 bp, Artificial Sequence
  Oligonucleotide primer for the detection of SNP TSC0044439
cctataaaaata

SEQ ID NO: 346207 - DNA, 12 bp, Artificial Sequence
  Oligonucleotide primer for the detection of SNP TSC0044439
gtaatttgtatt

SEQ ID NO: 346208 - DNA, 12 bp, Artificial Sequence
  Oligonucleotide primer for the detection of SNP TSC0044439
acaatctacatt

SEQ ID NO: 346209 - DNA, 12 bp, Artificial Sequence
  Oligonucleotide primer for the detection of SNP TSC0044439
tttataaaaatg

SEQ ID NO: 346210 - DNA, 12 bp, Artificial Sequence
  Oligonucleotide primer for the detection of SNP TSC0044440
tttcattattct

SEQ ID NO: 346211 - DNA, 12 bp, Artificial Sequence
  Oligonucleotide primer for the detection of SNP TSC0044440
tttgagttaata

SEQ ID NO: 346212 - DNA, 12 bp, Artificial Sequence
  Oligonucleotide primer for the detection of SNP TSC0044440
cttaaactaata

SEQ ID NO: 346213 - DNA, 12 bp, Artificial Sequence
  Oligonucleotide primer for the detection of SNP TSC0044441
aatggtgtcggg

SEQ ID NO: 346214 - DNA, 12 bp, Artificial Sequence
  Oligonucleotide primer for the detection of SNP TSC0044442
ccaaaaaaacat

SEQ ID NO: 346215 - DNA, 12 bp, Artificial Sequence
  Oligonucleotide primer for the detection of SNP TSC0044442
tttatggtttaa

SEQ ID NO: 346216 - DNA, 12 bp, Artificial Sequence
  Oligonucleotide primer for the detection of SNP TSC0044442
tctataacccaa

SEQ ID NO: 346217 - DNA, 12 bp, Artificial Sequence
  Oligonukleotid-Primer
ttaagaaagtat

SEQ ID NO: 346218 - DNA, 12 bp, Artificial Sequence
  Oligonucleotide primer for the detection of SNP TSC0007253
aaaatgaatata

SEQ ID NO: 346219 - DNA, 12 bp, Artificial Sequence
  Oligonucleotide primer for the detection of SNP TSC0007253
gtgggaaatatt

SEQ ID NO: 346220 - DNA, 12 bp, Artificial Sequence
  Oligonucleotide primer for the detection of SNP TSC0007254
aagagaagaagg

SEQ ID NO: 346221 - DNA, 12 bp, Artificial Sequence
  Oligonucleotide primer for the detection of SNP TSC0007255
ctcccatcctac

SEQ ID NO: 346222 - DNA, 12 bp, Artificial Sequence
  Oligonucleotide primer for the detection of SNP TSC0044443
taaaattaaatc

SEQ ID NO: 346223 - DNA, 12 bp, Artificial Sequence
  Oligonucleotide primer for the detection of SNP TSC0044443
atttgaaggtta

SEQ ID NO: 346224 - DNA, 12 bp, Artificial Sequence
  Oligonucleotide primer for the detection of SNP TSC0044444
acaaaaattact

SEQ ID NO: 346225 - DNA, 12 bp, Artificial Sequence
  Oligonucleotide primer for the detection of SNP TSC0044444
ttcgttttttag

SEQ ID NO: 346226 - DNA, 12 bp, Artificial Sequence
  Oligonucleotide primer for the detection of SNP TSC0044444
ttcacctcccaa

SEQ ID NO: 346227 - DNA, 12 bp, Artificial Sequence
  Oligonucleotide primer for the detection of SNP TSC0044444
ttcgcctcccaa

SEQ ID NO: 346228 - DNA, 12 bp, Artificial Sequence
  Oligonucleotide primer for the detection of SNP TSC0044444
ataagaattgtt

SEQ ID NO: 346229 - DNA, 12 bp, Artificial Sequence
  Oligonukleotid-Primer
ttggaaaaatta

SEQ ID NO: 346230 - DNA, 12 bp, Artificial Sequence
  Oligonucleotide primer for the detection of SNP TSC0044446
ttaattggtgaa

SEQ ID NO: 346231 - DNA, 12 bp, Artificial Sequence
  Oligonucleotide primer for the detection of SNP TSC0044449
caaaattttatt

SEQ ID NO: 346232 - DNA, 12 bp, Artificial Sequence
  Oligonucleotide primer for the detection of SNP TSC0044449
gagatgaagtag

SEQ ID NO: 346233 - DNA, 12 bp, Artificial Sequence
  Oligonucleotide primer for the detection of SNP TSC0044450
ttttaaaaaaga

SEQ ID NO: 346234 - DNA, 12 bp, Artificial Sequence
  Oligonucleotide primer for the detection of SNP TSC0044451
atttgatgttgt

SEQ ID NO: 346235 - DNA, 12 bp, Artificial Sequence
  Oligonucleotide primer for the detection of SNP TSC0044451
atttgatgtcgt

SEQ ID NO: 346236 - DNA, 12 bp, Artificial Sequence
  Oligonucleotide primer for the detection of SNP TSC0044451
acctaataccat

SEQ ID NO: 346237 - DNA, 12 bp, Artificial Sequence
  Oligonukleotid-Primer
acctaataccgt

SEQ ID NO: 346238 - DNA, 12 bp, Artificial Sequence
  Oligonucleotide primer for the detection of SNP TSC0044451
ttgaaaattgta

SEQ ID NO: 346239 - DNA, 12 bp, Artificial Sequence
  Oligonucleotide primer for the detection of SNP TSC0044452
cattcttcaaaa

SEQ ID NO: 346240 - DNA, 12 bp, Artificial Sequence
  Oligonucleotide primer for the detection of SNP TSC0044452
tgagattttagg

SEQ ID NO: 346241 - DNA, 12 bp, Artificial Sequence
  Oligonukleotid-Primer
actttactcata

SEQ ID NO: 346242 - DNA, 12 bp, Artificial Sequence
  Oligonucleotide primer for the detection of SNP TSC0009634
aagaagtgagta

SEQ ID NO: 346243 - DNA, 12 bp, Artificial Sequence
  Oligonucleotide primer for the detection of SNP TSC0009635
acttctattaca

SEQ ID NO: 346244 - DNA, 12 bp, Artificial Sequence
  Oligonucleotide primer for the detection of SNP TSC0009635
ttcatcctatta

SEQ ID NO: 346245 - DNA, 12 bp, Artificial Sequence
  Oligonukleotid-Primer
acaacctaaatt

SEQ ID NO: 346246 - DNA, 12 bp, Artificial Sequence
  Oligonucleotide primer for the detection of SNP TSC0044461
ttattgttattg

SEQ ID NO: 346247 - DNA, 12 bp, Artificial Sequence
  Oligonucleotide primer for the detection of SNP TSC0044462
tcataaaaacat

SEQ ID NO: 346248 - DNA, 12 bp, Artificial Sequence
  Oligonucleotide primer for the detection of SNP TSC0044462
tttataagaggg

SEQ ID NO: 346249 - DNA, 12 bp, Artificial Sequence
  Oligonukleotid-Primer
acttaaactaat

SEQ ID NO: 346250 - DNA, 12 bp, Artificial Sequence
  Oligonucleotide primer for the detection of SNP TSC0044463
ttttcgttagta

SEQ ID NO: 346251 - DNA, 12 bp, Artificial Sequence
  Oligonucleotide primer for the detection of SNP TSC0005202
ataccaaataaa

SEQ ID NO: 346252 - DNA, 12 bp, Artificial Sequence
  Oligonucleotide primer for the detection of SNP TSC0044465
aataagtttatt

SEQ ID NO: 346253 - DNA, 12 bp, Artificial Sequence
  Oligonukleotid-Primer
aacaaactcatc

SEQ ID NO: 346254 - DNA, 12 bp, Artificial Sequence
  Oligonucleotide primer for the detection of SNP TSC0044465
gaaaggggagaa

SEQ ID NO: 346255 - DNA, 12 bp, Artificial Sequence
  Oligonucleotide primer for the detection of SNP TSC0007148
ataactaataaa

SEQ ID NO: 346256 - DNA, 12 bp, Artificial Sequence
  Oligonucleotide primer for the detection of SNP TSC0007148
atgattttgagg

SEQ ID NO: 346257 - DNA, 12 bp, Artificial Sequence
  Oligonucleotide primer for the detection of SNP TSC0007148
ataattctaaaa

SEQ ID NO: 346258 - DNA, 12 bp, Artificial Sequence
  Oligonucleotide primer for the detection of SNP TSC0007148
atggttgatgag

SEQ ID NO: 346259 - DNA, 12 bp, Artificial Sequence
  Oligonucleotide primer for the detection of SNP TSC0044467
cattaatctata

SEQ ID NO: 346260 - DNA, 12 bp, Artificial Sequence
  Oligonucleotide primer for the detection of SNP TSC0044467
ttagttgtgtaa

SEQ ID NO: 346261 - DNA, 12 bp, Artificial Sequence
  Oligonucleotide primer for the detection of SNP TSC0044467
ttagtcgtgtaa

SEQ ID NO: 346262 - DNA, 12 bp, Artificial Sequence
  Oligonucleotide primer for the detection of SNP TSC0044467
tcaaccatataa

SEQ ID NO: 346263 - DNA, 12 bp, Artificial Sequence
  Oligonucleotide primer for the detection of SNP TSC0044467
tcaaccgtataa

SEQ ID NO: 346264 - DNA, 12 bp, Artificial Sequence
  Oligonucleotide primer for the detection of SNP TSC0044467
tattagtttgtg

SEQ ID NO: 346265 - DNA, 12 bp, Artificial Sequence
  Oligonucleotide primer for the detection of SNP TSC0044470
aacaattaacac

SEQ ID NO: 346266 - DNA, 12 bp, Artificial Sequence
  Oligonucleotide primer for the detection of SNP TSC0044470
gtgtatgttaaa

SEQ ID NO: 346267 - DNA, 12 bp, Artificial Sequence
  Oligonucleotide primer for the detection of SNP TSC0044470
gcgtatgttaaa

SEQ ID NO: 346268 - DNA, 12 bp, Artificial Sequence
  Oligonucleotide primer for the detection of SNP TSC0044470
gtgtacgttaaa

SEQ ID NO: 346269 - DNA, 12 bp, Artificial Sequence
  Oligonucleotide primer for the detection of SNP TSC0044470
gcgtacgttaaa

SEQ ID NO: 346270 - DNA, 12 bp, Artificial Sequence
  Oligonucleotide primer for the detection of SNP TSC0044471
attttctatata

SEQ ID NO: 346271 - DNA, 12 bp, Artificial Sequence
  Oligonucleotide primer for the detection of SNP TSC0044471
tagtttttatag

SEQ ID NO: 346272 - DNA, 12 bp, Artificial Sequence
  Oligonucleotide primer for the detection of SNP TSC0044471
taatcctcacaa

SEQ ID NO: 346273 - DNA, 12 bp, Artificial Sequence
  Oligonucleotide primer for the detection of SNP TSC0044471
aattttttatgt

SEQ ID NO: 346274 - DNA, 12 bp, Artificial Sequence
  Oligonucleotide primer for the detection of SNP TSC0044473
gttttgttatgt

SEQ ID NO: 346275 - DNA, 12 bp, Artificial Sequence
  Oligonucleotide primer for the detection of SNP TSC0044473
attctaccatat

SEQ ID NO: 346276 - DNA, 12 bp, Artificial Sequence
  Oligonucleotide primer for the detection of SNP TSC0044480
accttatttaat

SEQ ID NO: 346277 - DNA, 12 bp, Artificial Sequence
  Oligonucleotide primer for the detection of SNP TSC0044480
gattttattata

SEQ ID NO: 346278 - DNA, 12 bp, Artificial Sequence
  Oligonucleotide primer for the detection of SNP TSC0044481
tcccctttatat

SEQ ID NO: 346279 - DNA, 12 bp, Artificial Sequence
  Oligonucleotide primer for the detection of SNP TSC0044482
gtagaaattatg

SEQ ID NO: 346280 - DNA, 12 bp, Artificial Sequence
  Oligonucleotide primer for the detection of SNP TSC0044483
aaaaacactacc

SEQ ID NO: 346281 - DNA, 12 bp, Artificial Sequence
  Oligonucleotide primer for the detection of SNP TSC0044483
gttatttagtag

SEQ ID NO: 346282 - DNA, 12 bp, Artificial Sequence
  Oligonucleotide primer for the detection of SNP TSC0044491
atctaacacaac

SEQ ID NO: 346283 - DNA, 12 bp, Artificial Sequence
  Oligonucleotide primer for the detection of SNP TSC0044491
gtagtagattaa

SEQ ID NO: 346284 - DNA, 12 bp, Artificial Sequence
  Oligonucleotide primer for the detection of SNP TSC0044491
ataataaatcaa

SEQ ID NO: 346285 - DNA, 12 bp, Artificial Sequence
  Oligonucleotide primer for the detection of SNP TSC0044491
gtttggtatagt

SEQ ID NO: 346286 - DNA, 12 bp, Artificial Sequence
  Oligonucleotide primer for the detection of SNP TSC0044492
ttttaactttcc

SEQ ID NO: 346287 - DNA, 12 bp, Artificial Sequence
  Oligonucleotide primer for the detection of SNP TSC0044492
attagtaaagaa

SEQ ID NO: 346288 - DNA, 12 bp, Artificial Sequence
  Oligonucleotide primer for the detection of SNP TSC0044493
aactaacactac

SEQ ID NO: 346289 - DNA, 12 bp, Artificial Sequence
  Oligonucleotide primer for the detection of SNP TSC0044493
tgtataggtaat

SEQ ID NO: 346290 - DNA, 12 bp, Artificial Sequence
  Oligonucleotide primer for the detection of SNP TSC0044493
cgtataggtaat

SEQ ID NO: 346291 - DNA, 12 bp, Artificial Sequence
  Oligonucleotide primer for the detection of SNP TSC0044493
tgtataggtaac

SEQ ID NO: 346292 - DNA, 12 bp, Artificial Sequence
  Oligonucleotide primer for the detection of SNP TSC0044493
cgtataggtaac

SEQ ID NO: 346293 - DNA, 12 bp, Artificial Sequence
  Oligonucleotide primer for the detection of SNP TSC0044493
cacacaaataac

SEQ ID NO: 346294 - DNA, 12 bp, Artificial Sequence
  Oligonucleotide primer for the detection of SNP TSC0044493
cgcacaaataac

SEQ ID NO: 346295 - DNA, 12 bp, Artificial Sequence
  Oligonucleotide primer for the detection of SNP TSC0044493
gattggtattgt

SEQ ID NO: 346296 - DNA, 12 bp, Artificial Sequence
  Oligonucleotide primer for the detection of SNP TSC0044493
gattggtattgc

SEQ ID NO: 346297 - DNA, 12 bp, Artificial Sequence
  Oligonucleotide primer for the detection of SNP TSC0044494
taaaacgaactc

SEQ ID NO: 346298 - DNA, 12 bp, Artificial Sequence
  Oligonucleotide primer for the detection of SNP TSC0044494
ttttttgattaa

SEQ ID NO: 346299 - DNA, 12 bp, Artificial Sequence
  Oligonucleotide primer for the detection of SNP TSC0044495
aacttttattct

SEQ ID NO: 346300 - DNA, 12 bp, Artificial Sequence
  Oligonucleotide primer for the detection of SNP TSC0044495
tgttatgaataa

SEQ ID NO: 346301 - DNA, 12 bp, Artificial Sequence
  Oligonucleotide primer for the detection of SNP TSC0044497
aactatattaaa

SEQ ID NO: 346302 - DNA, 12 bp, Artificial Sequence
  Oligonucleotide primer for the detection of SNP TSC0044497
gattgtattagg

SEQ ID NO: 346303 - DNA, 12 bp, Artificial Sequence
  Oligonucleotide primer for the detection of SNP TSC0044499
atctctttatct

SEQ ID NO: 346304 - DNA, 12 bp, Artificial Sequence
  Oligonucleotide primer for the detection of SNP TSC0044499
tagatattttag

SEQ ID NO: 346305 - DNA, 12 bp, Artificial Sequence
  Oligonucleotide primer for the detection of SNP TSC0044500
agtataaattga

SEQ ID NO: 346306 - DNA, 12 bp, Artificial Sequence
  Oligonucleotide primer for the detection of SNP TSC0044501
taatttatattg

SEQ ID NO: 346307 - DNA, 12 bp, Artificial Sequence
  Oligonucleotide primer for the detection of SNP TSC0044501
aacttacactaa

SEQ ID NO: 346308 - DNA, 12 bp, Artificial Sequence
  Oligonucleotide primer for the detection of SNP TSC0044501
aggaattgagag

SEQ ID NO: 346309 - DNA, 12 bp, Artificial Sequence
  Oligonucleotide primer for the detection of SNP TSC0044502
aaggtgattgga

SEQ ID NO: 346310 - DNA, 12 bp, Artificial Sequence
  Oligonucleotide primer for the detection of SNP TSC0044503
taatatatacct

SEQ ID NO: 346311 - DNA, 12 bp, Artificial Sequence
  Oligonucleotide primer for the detection of SNP TSC0044503
tgaaggggaagt

SEQ ID NO: 346312 - DNA, 12 bp, Artificial Sequence
  Oligonucleotide primer for the detection of SNP TSC0044503
taatatatgttt

SEQ ID NO: 346313 - DNA, 12 bp, Artificial Sequence
  Oligonucleotide primer for the detection of SNP TSC0044506
atacttaaatca

SEQ ID NO: 346314 - DNA, 12 bp, Artificial Sequence
  Oligonucleotide primer for the detection of SNP TSC0044506
ggatggtttggg

SEQ ID NO: 346315 - DNA, 12 bp, Artificial Sequence
  Oligonucleotide primer for the detection of SNP TSC0044506
tgtttgaattat

SEQ ID NO: 346316 - DNA, 12 bp, Artificial Sequence
  Oligonucleotide primer for the detection of SNP TSC0044509
ccatctttcatt

SEQ ID NO: 346317 - DNA, 12 bp, Artificial Sequence
  Oligonucleotide primer for the detection of SNP TSC0044509
aagtttttaatg

SEQ ID NO: 346318 - DNA, 12 bp, Artificial Sequence
  Oligonucleotide primer for the detection of SNP TSC0044510
ctcttcccttcc

SEQ ID NO: 346319 - DNA, 12 bp, Artificial Sequence
  Oligonucleotide primer for the detection of SNP TSC0044510
tgggaagggatg

SEQ ID NO: 346320 - DNA, 12 bp, Artificial Sequence
  Oligonucleotide primer for the detection of SNP TSC0044514
ctccttataaaa

SEQ ID NO: 346321 - DNA, 12 bp, Artificial Sequence
  Oligonucleotide primer for the detection of SNP TSC0044514
taagaattagtt

SEQ ID NO: 346322 - DNA, 12 bp, Artificial Sequence
  Oligonucleotide primer for the detection of SNP TSC0044515
tagaggatttat

SEQ ID NO: 346323 - DNA, 12 bp, Artificial Sequence
  Oligonucleotide primer for the detection of SNP TSC0044515
taaaaaactcat

SEQ ID NO: 346324 - DNA, 12 bp, Artificial Sequence
  Oligonucleotide primer for the detection of SNP TSC0044515
tggaaagttagg

SEQ ID NO: 346325 - DNA, 12 bp, Artificial Sequence
  Oligonucleotide primer for the detection of SNP TSC0044516
ctcccctactac

SEQ ID NO: 346326 - DNA, 12 bp, Artificial Sequence
  Oligonucleotide primer for the detection of SNP TSC0044516
atttagatatta

SEQ ID NO: 346327 - DNA, 12 bp, Artificial Sequence
  Oligonucleotide primer for the detection of SNP TSC0044517
ccataaaaccat

SEQ ID NO: 346328 - DNA, 12 bp, Artificial Sequence
  Oligonucleotide primer for the detection of SNP TSC0044519
aaaacaaacact

SEQ ID NO: 346329 - DNA, 12 bp, Artificial Sequence
  Oligonucleotide primer for the detection of SNP TSC0044519
agagtagatatt

SEQ ID NO: 346330 - DNA, 12 bp, Artificial Sequence
  Oligonucleotide primer for the detection of SNP TSC0044520
ctccttcataaa

SEQ ID NO: 346331 - DNA, 12 bp, Artificial Sequence
  Oligonucleotide primer for the detection of SNP TSC0044520
tgtttgttttgt

SEQ ID NO: 346332 - DNA, 12 bp, Artificial Sequence
  Oligonucleotide primer for the detection of SNP TSC0044520
tatctactctat

SEQ ID NO: 346333 - DNA, 12 bp, Artificial Sequence
  Oligonucleotide primer for the detection of SNP TSC0044523
tcattttaataa

SEQ ID NO: 346334 - DNA, 12 bp, Artificial Sequence
  Oligonucleotide primer for the detection of SNP TSC0044525
accaaatctctt

SEQ ID NO: 346335 - DNA, 12 bp, Artificial Sequence
  Oligonucleotide primer for the detection of SNP TSC0044525
aaaatgattaaa

SEQ ID NO: 346336 - DNA, 12 bp, Artificial Sequence
  Oligonucleotide primer for the detection of SNP TSC0044526
cacatacatttt

SEQ ID NO: 346337 - DNA, 12 bp, Artificial Sequence
  Oligonucleotide primer for the detection of SNP TSC0044526
aatttattttaa

SEQ ID NO: 346338 - DNA, 12 bp, Artificial Sequence
  Oligonucleotide primer for the detection of SNP TSC0044527
tgttatagttta

SEQ ID NO: 346339 - DNA, 12 bp, Artificial Sequence
  Oligonucleotide primer for the detection of SNP TSC0044527
taccacaaccca

SEQ ID NO: 346340 - DNA, 12 bp, Artificial Sequence
  Oligonucleotide primer for the detection of SNP TSC0044527
ttaatagggtat

SEQ ID NO: 346341 - DNA, 12 bp, Artificial Sequence
  Oligonucleotide primer for the detection of SNP TSC0044528
ctatactatatc

SEQ ID NO: 346342 - DNA, 12 bp, Artificial Sequence
  Oligonucleotide primer for the detection of SNP TSC0044528
ttattttgaaaa

SEQ ID NO: 346343 - DNA, 12 bp, Artificial Sequence
  Oligonucleotide primer for the detection of SNP TSC0044531
ccaaaaaatttc

SEQ ID NO: 346344 - DNA, 12 bp, Artificial Sequence
  Oligonucleotide primer for the detection of SNP TSC0044531
ttaggaagtttt

SEQ ID NO: 346345 - DNA, 12 bp, Artificial Sequence
  Oligonucleotide primer for the detection of SNP TSC0044532
aacatcttaact

SEQ ID NO: 346346 - DNA, 12 bp, Artificial Sequence
  Oligonucleotide primer for the detection of SNP TSC0044532
ttgtgattgtag

SEQ ID NO: 346347 - DNA, 12 bp, Artificial Sequence
  Oligonucleotide primer for the detection of SNP TSC0044532
ttgtgatcgtag

SEQ ID NO: 346348 - DNA, 12 bp, Artificial Sequence
  Oligonucleotide primer for the detection of SNP TSC0044533
taccaaacaatc

SEQ ID NO: 346349 - DNA, 12 bp, Artificial Sequence
  Oligonucleotide primer for the detection of SNP TSC0044533
taccgaacaatc

SEQ ID NO: 346350 - DNA, 12 bp, Artificial Sequence
  Oligonucleotide primer for the detection of SNP TSC0044533
gtatagaaaaaa

SEQ ID NO: 346351 - DNA, 12 bp, Artificial Sequence
  Oligonucleotide primer for the detection of SNP TSC0004994
tttagattgtga

SEQ ID NO: 346352 - DNA, 12 bp, Artificial Sequence
  Oligonucleotide primer for the detection of SNP TSC0044535
tttccacccccc

SEQ ID NO: 346353 - DNA, 12 bp, Artificial Sequence
  Oligonucleotide primer for the detection of SNP TSC0044535
gttggggtggtg

SEQ ID NO: 346354 - DNA, 12 bp, Artificial Sequence
  Oligonucleotide primer for the detection of SNP TSC0044535
gttggggtggcg

SEQ ID NO: 346355 - DNA, 12 bp, Artificial Sequence
  Oligonucleotide primer for the detection of SNP TSC0044536
aaacctaatatt

SEQ ID NO: 346356 - DNA, 12 bp, Artificial Sequence
  Oligonucleotide primer for the detection of SNP TSC0044536
ttgagatagtaa

SEQ ID NO: 346357 - DNA, 12 bp, Artificial Sequence
  Oligonucleotide primer for the detection of SNP TSC0044536
aatttggtgttt

SEQ ID NO: 346358 - DNA, 12 bp, Artificial Sequence
  Oligonucleotide primer for the detection of SNP TSC0044537
taaaaacactat

SEQ ID NO: 346359 - DNA, 12 bp, Artificial Sequence
  Oligonucleotide primer for the detection of SNP TSC0044538
aataaaaatact

SEQ ID NO: 346360 - DNA, 12 bp, Artificial Sequence
  Oligonucleotide primer for the detection of SNP TSC0044538
ttttgtggatga

SEQ ID NO: 346361 - DNA, 12 bp, Artificial Sequence
  Oligonucleotide primer for the detection of SNP TSC0044538
ttttgcggatga

SEQ ID NO: 346362 - DNA, 12 bp, Artificial Sequence
  Oligonucleotide primer for the detection of SNP TSC0044539
ttattaatatat

SEQ ID NO: 346363 - DNA, 12 bp, Artificial Sequence
  Oligonucleotide primer for the detection of SNP TSC0044539
atatgtgtagta

SEQ ID NO: 346364 - DNA, 12 bp, Artificial Sequence
  Oligonucleotide primer for the detection of SNP TSC0044540
aacaacaactat

SEQ ID NO: 346365 - DNA, 12 bp, Artificial Sequence
  Oligonucleotide primer for the detection of SNP TSC0044540
tgatagagataa

SEQ ID NO: 346366 - DNA, 12 bp, Artificial Sequence
  Oligonucleotide primer for the detection of SNP TSC0044540
taacaaaaacaa

SEQ ID NO: 346367 - DNA, 12 bp, Artificial Sequence
  Oligonucleotide primer for the detection of SNP TSC0044540
ggtaataattat

SEQ ID NO: 346368 - DNA, 12 bp, Artificial Sequence
  Oligonucleotide primer for the detection of SNP TSC0044545
aaaattctcttt

SEQ ID NO: 346369 - DNA, 12 bp, Artificial Sequence
  Oligonucleotide primer for the detection of SNP TSC0044546
ttgtgaggttta

SEQ ID NO: 346370 - DNA, 12 bp, Artificial Sequence
  Oligonucleotide primer for the detection of SNP TSC0044549
atcttcctcaac

SEQ ID NO: 346371 - DNA, 12 bp, Artificial Sequence
  Oligonucleotide primer for the detection of SNP TSC0044549
tgtttttattag

SEQ ID NO: 346372 - DNA, 12 bp, Artificial Sequence
  Oligonucleotide primer for the detection of SNP TSC0044549
tactcctaccaa

SEQ ID NO: 346373 - DNA, 12 bp, Artificial Sequence
  Oligonucleotide primer for the detection of SNP TSC0044550
taaacaacaatc

SEQ ID NO: 346374 - DNA, 12 bp, Artificial Sequence
  Oligonucleotide primer for the detection of SNP TSC0044550
tgttagtttata

SEQ ID NO: 346375 - DNA, 12 bp, Artificial Sequence
  Oligonucleotide primer for the detection of SNP TSC0044551
taacaacaattt

SEQ ID NO: 346376 - DNA, 12 bp, Artificial Sequence
  Oligonucleotide primer for the detection of SNP TSC0044551
taatgaaagtta

SEQ ID NO: 346377 - DNA, 12 bp, Artificial Sequence
  Oligonucleotide primer for the detection of SNP TSC0044552
taaaatcatctc

SEQ ID NO: 346378 - DNA, 12 bp, Artificial Sequence
  Oligonucleotide primer for the detection of SNP TSC0044552
ttattttgtagt

SEQ ID NO: 346379 - DNA, 12 bp, Artificial Sequence
  Oligonucleotide primer for the detection of SNP TSC0044552
cactctataata

SEQ ID NO: 346380 - DNA, 12 bp, Artificial Sequence
  Oligonucleotide primer for the detection of SNP TSC0044557
atatacctattt

SEQ ID NO: 346381 - DNA, 12 bp, Artificial Sequence
  Oligonucleotide primer for the detection of SNP TSC0044558
ataatataacaa

SEQ ID NO: 346382 - DNA, 12 bp, Artificial Sequence
  Oligonucleotide primer for the detection of SNP TSC0044558
acactcacacta

SEQ ID NO: 346383 - DNA, 12 bp, Artificial Sequence
  Oligonucleotide primer for the detection of SNP TSC0044558
gtgatgtggtag

SEQ ID NO: 346384 - DNA, 12 bp, Artificial Sequence
  Oligonucleotide primer for the detection of SNP TSC0044559
tatatgtataag

SEQ ID NO: 346385 - DNA, 12 bp, Artificial Sequence
  Oligonucleotide primer for the detection of SNP TSC0044559
catatatataaa

SEQ ID NO: 346386 - DNA, 12 bp, Artificial Sequence
  Oligonucleotide primer for the detection of SNP TSC0044559
tttgaggaagta

SEQ ID NO: 346387 - DNA, 12 bp, Artificial Sequence
  Oligonucleotide primer for the detection of SNP TSC0044560
aaatatactata

SEQ ID NO: 346388 - DNA, 12 bp, Artificial Sequence
  Oligonucleotide primer for the detection of SNP TSC0044560
gaatatactata

SEQ ID NO: 346389 - DNA, 12 bp, Artificial Sequence
  Oligonucleotide primer for the detection of SNP TSC0044560
gatgtgttatgt

SEQ ID NO: 346390 - DNA, 12 bp, Artificial Sequence
  Oligonucleotide primer for the detection of SNP TSC0044561
aaccttcacatc

SEQ ID NO: 346391 - DNA, 12 bp, Artificial Sequence
  Oligonucleotide primer for the detection of SNP TSC0044561
tgggaataagtt

SEQ ID NO: 346392 - DNA, 12 bp, Artificial Sequence
  Oligonucleotide primer for the detection of SNP TSC0044561
ctaaaaataaac

SEQ ID NO: 346393 - DNA, 12 bp, Artificial Sequence
  Oligonucleotide primer for the detection of SNP TSC0044561
agtttttatatc

SEQ ID NO: 346394 - DNA, 12 bp, Artificial Sequence
  Oligonucleotide primer for the detection of SNP TSC0044563
aactaccaccac

SEQ ID NO: 346395 - DNA, 12 bp, Artificial Sequence
  Oligonucleotide primer for the detection of SNP TSC0044563
gaaattataggt

SEQ ID NO: 346396 - DNA, 12 bp, Artificial Sequence
  Oligonucleotide primer for the detection of SNP TSC0044563
gaaattataggc

SEQ ID NO: 346397 - DNA, 12 bp, Artificial Sequence
  Oligonucleotide primer for the detection of SNP TSC0044563
aaaaaccacaaa

SEQ ID NO: 346398 - DNA, 12 bp, Artificial Sequence
  Oligonucleotide primer for the detection of SNP TSC0044563
gattgttattat

SEQ ID NO: 346399 - DNA, 12 bp, Artificial Sequence
  Oligonucleotide primer for the detection of SNP TSC0044564
aaacaccatctc

SEQ ID NO: 346400 - DNA, 12 bp, Artificial Sequence
  Oligonucleotide primer for the detection of SNP TSC0044565
acctcaccatcc

SEQ ID NO: 346401 - DNA, 12 bp, Artificial Sequence
  Oligonucleotide primer for the detection of SNP TSC0044565
caaaaatactca

SEQ ID NO: 346402 - DNA, 12 bp, Artificial Sequence
  Oligonucleotide primer for the detection of SNP TSC0044566
aaaaactcaata

SEQ ID NO: 346403 - DNA, 12 bp, Artificial Sequence
  Oligonucleotide primer for the detection of SNP TSC0044566
ttatatatttta

SEQ ID NO: 346404 - DNA, 12 bp, Artificial Sequence
  Oligonucleotide primer for the detection of SNP TSC0044566
ttacacatttta

SEQ ID NO: 346405 - DNA, 12 bp, Artificial Sequence
  Oligonucleotide primer for the detection of SNP TSC0044566
aagaatttagta

SEQ ID NO: 346406 - DNA, 12 bp, Artificial Sequence
  Oligonucleotide primer for the detection of SNP TSC0044567
tcccctctctct

SEQ ID NO: 346407 - DNA, 12 bp, Artificial Sequence
  Oligonucleotide primer for the detection of SNP TSC0044567
tataagaagaaa

SEQ ID NO: 346408 - DNA, 12 bp, Artificial Sequence
  Oligonucleotide primer for the detection of SNP TSC0044568
cctcaacctcat

SEQ ID NO: 346409 - DNA, 12 bp, Artificial Sequence
  Oligonucleotide primer for the detection of SNP TSC0044568
gtaaaagaagtg

SEQ ID NO: 346410 - DNA, 12 bp, Artificial Sequence
  Oligonucleotide primer for the detection of SNP TSC0044569
ctattttataaa

SEQ ID NO: 346411 - DNA, 12 bp, Artificial Sequence
  Oligonucleotide primer for the detection of SNP TSC0044569
gttgtaatattt

SEQ ID NO: 346412 - DNA, 12 bp, Artificial Sequence
  Oligonucleotide primer for the detection of SNP TSC0044569
ctataacattta

SEQ ID NO: 346413 - DNA, 12 bp, Artificial Sequence
  Oligonucleotide primer for the detection of SNP TSC0044570
cataaattaaat

SEQ ID NO: 346414 - DNA, 12 bp, Artificial Sequence
  Oligonukleotid-Primer
cgtaaattaaat

SEQ ID NO: 346415 - DNA, 12 bp, Artificial Sequence
  Oligonucleotide primer for the detection of SNP TSC0044571
acataccccaac

SEQ ID NO: 346416 - DNA, 12 bp, Artificial Sequence
  Oligonucleotide primer for the detection of SNP TSC0044571
attagtggtttt

SEQ ID NO: 346417 - DNA, 12 bp, Artificial Sequence
  Oligonucleotide primer for the detection of SNP TSC0044571
accaataattct

SEQ ID NO: 346418 - DNA, 12 bp, Artificial Sequence
  Oligonucleotide primer for the detection of SNP TSC0044571
atattttagttt

SEQ ID NO: 346419 - DNA, 12 bp, Artificial Sequence
  Oligonucleotide primer for the detection of SNP TSC0044572
aaaattcttact

SEQ ID NO: 346420 - DNA, 12 bp, Artificial Sequence
  Oligonucleotide primer for the detection of SNP TSC0044575
aaccgaaacaaa

SEQ ID NO: 346421 - DNA, 12 bp, Artificial Sequence
  Oligonucleotide primer for the detection of SNP TSC0044575
tttaggtgtttt

SEQ ID NO: 346422 - DNA, 12 bp, Artificial Sequence
  Oligonucleotide primer for the detection of SNP TSC0044575
ctcaaatatttt

SEQ ID NO: 346423 - DNA, 12 bp, Artificial Sequence
  Oligonucleotide primer for the detection of SNP TSC0044575
gaggtcgaggta

SEQ ID NO: 346424 - DNA, 12 bp, Artificial Sequence
  Oligonucleotide primer for the detection of SNP TSC0044576
actattttcacc

SEQ ID NO: 346425 - DNA, 12 bp, Artificial Sequence
  Oligonucleotide primer for the detection of SNP TSC0044576
gtgtttatttaa

SEQ ID NO: 346426 - DNA, 12 bp, Artificial Sequence
  Oligonucleotide primer for the detection of SNP TSC0044577
aatacattcatt

SEQ ID NO: 346427 - DNA, 12 bp, Artificial Sequence
  Oligonucleotide primer for the detection of SNP TSC0044578
accaaatacatt

SEQ ID NO: 346428 - DNA, 12 bp, Artificial Sequence
  Oligonucleotide primer for the detection of SNP TSC0044578
accgaatacatt

SEQ ID NO: 346429 - DNA, 12 bp, Artificial Sequence
  Oligonucleotide primer for the detection of SNP TSC0044579
tggtgtaattta

SEQ ID NO: 346430 - DNA, 12 bp, Artificial Sequence
  Oligonucleotide primer for the detection of SNP TSC0044579
tggcgtaattta

SEQ ID NO: 346431 - DNA, 12 bp, Artificial Sequence
  Oligonucleotide primer for the detection of SNP TSC0044580
tttattaattaa

SEQ ID NO: 346432 - DNA, 12 bp, Artificial Sequence
  Oligonucleotide primer for the detection of SNP TSC0044581
accaaacacaat

SEQ ID NO: 346433 - DNA, 12 bp, Artificial Sequence
  Oligonucleotide primer for the detection of SNP TSC0044581
attataagtgta

SEQ ID NO: 346434 - DNA, 12 bp, Artificial Sequence
  Oligonukleotid-Primer
aaaacctataca

SEQ ID NO: 346435 - DNA, 12 bp, Artificial Sequence
  Oligonucleotide primer for the detection of SNP TSC0044583
tgttgttatgtt

SEQ ID NO: 346436 - DNA, 12 bp, Artificial Sequence
  Oligonucleotide primer for the detection of SNP TSC0044583
tgttgttacgtt

SEQ ID NO: 346437 - DNA, 12 bp, Artificial Sequence
  Oligonucleotide primer for the detection of SNP TSC0044583
tactatcacact

SEQ ID NO: 346438 - DNA, 12 bp, Artificial Sequence
  Oligonucleotide primer for the detection of SNP TSC0044583
tactatcacgct

SEQ ID NO: 346439 - DNA, 12 bp, Artificial Sequence
  Oligonucleotide primer for the detection of SNP TSC0044583
aaggtttgtgta

SEQ ID NO: 346440 - DNA, 12 bp, Artificial Sequence
  Oligonucleotide primer for the detection of SNP TSC0044584
aaacaaataacg

SEQ ID NO: 346441 - DNA, 12 bp, Artificial Sequence
  Oligonucleotide primer for the detection of SNP TSC0044584
tttttagggata

SEQ ID NO: 346442 - DNA, 12 bp, Artificial Sequence
  Oligonucleotide primer for the detection of SNP TSC0044584
ctccaaaaacaa

SEQ ID NO: 346443 - DNA, 12 bp, Artificial Sequence
  Oligonucleotide primer for the detection of SNP TSC0044584
agtaagtggtgt

SEQ ID NO: 346444 - DNA, 12 bp, Artificial Sequence
  Oligonucleotide primer for the detection of SNP TSC0044584
agtaagtggcgt

SEQ ID NO: 346445 - DNA, 12 bp, Artificial Sequence
  Oligonucleotide primer for the detection of SNP TSC0044584
agtaagtggtgc

SEQ ID NO: 346446 - DNA, 12 bp, Artificial Sequence
  Oligonucleotide primer for the detection of SNP TSC0044584
agtaagtggcgc

SEQ ID NO: 346447 - DNA, 12 bp, Artificial Sequence
  Oligonucleotide primer for the detection of SNP TSC0044585
tcactataataa

SEQ ID NO: 346448 - DNA, 12 bp, Artificial Sequence
  Oligonucleotide primer for the detection of SNP TSC0044585
tgttatttgttt

SEQ ID NO: 346449 - DNA, 12 bp, Artificial Sequence
  Oligonucleotide primer for the detection of SNP TSC0044585
cgttatttgttt

SEQ ID NO: 346450 - DNA, 12 bp, Artificial Sequence
  Oligonucleotide primer for the detection of SNP TSC0044585
accacttactta

SEQ ID NO: 346451 - DNA, 12 bp, Artificial Sequence
  Oligonucleotide primer for the detection of SNP TSC0044585
gccacttactta

SEQ ID NO: 346452 - DNA, 12 bp, Artificial Sequence
  Oligonucleotide primer for the detection of SNP TSC0044585
tttattgtggtg

SEQ ID NO: 346453 - DNA, 12 bp, Artificial Sequence
  Oligonucleotide primer for the detection of SNP TSC0044586
cttttcaaaata

SEQ ID NO: 346454 - DNA, 12 bp, Artificial Sequence
  Oligonucleotide primer for the detection of SNP TSC0044586
ctccctaatcct

SEQ ID NO: 346455 - DNA, 12 bp, Artificial Sequence
  Oligonucleotide primer for the detection of SNP TSC0044586
ttttttagagtg

SEQ ID NO: 346456 - DNA, 12 bp, Artificial Sequence
  Oligonucleotide primer for the detection of SNP TSC0044587
tataatcttcat

SEQ ID NO: 346457 - DNA, 12 bp, Artificial Sequence
  Oligonucleotide primer for the detection of SNP TSC0044587
tggatatataaa

SEQ ID NO: 346458 - DNA, 12 bp, Artificial Sequence
  Oligonucleotide primer for the detection of SNP TSC0044588
aatatattatac

SEQ ID NO: 346459 - DNA, 12 bp, Artificial Sequence
  Oligonucleotide primer for the detection of SNP TSC0044588
ttttaatttaaa

SEQ ID NO: 346460 - DNA, 12 bp, Artificial Sequence
  Oligonucleotide primer for the detection of SNP TSC0044589
tcaataaaatcc

SEQ ID NO: 346461 - DNA, 12 bp, Artificial Sequence
  Oligonucleotide primer for the detection of SNP TSC0044589
aataatgtatta

SEQ ID NO: 346462 - DNA, 12 bp, Artificial Sequence
  Oligonucleotide primer for the detection of SNP TSC0044590
gtttaggtagtt

SEQ ID NO: 346463 - DNA, 12 bp, Artificial Sequence
  Oligonucleotide primer for the detection of SNP TSC0044591
aagttaagatta

SEQ ID NO: 346464 - DNA, 12 bp, Artificial Sequence
  Oligonucleotide primer for the detection of SNP TSC0009459
acttaaccccat

SEQ ID NO: 346465 - DNA, 12 bp, Artificial Sequence
  Oligonucleotide primer for the detection of SNP TSC0044592
acttaaaataaa

SEQ ID NO: 346466 - DNA, 12 bp, Artificial Sequence
  Oligonucleotide primer for the detection of SNP TSC0044592
ttaaaatataat

SEQ ID NO: 346467 - DNA, 12 bp, Artificial Sequence
  Oligonucleotide primer for the detection of SNP TSC0044592
ctaaaacataac

SEQ ID NO: 346468 - DNA, 12 bp, Artificial Sequence
  Oligonucleotide primer for the detection of SNP TSC0044592
atttgaggtaag

SEQ ID NO: 346469 - DNA, 12 bp, Artificial Sequence
  Oligonucleotide primer for the detection of SNP TSC0044595
cttattaatatt

SEQ ID NO: 346470 - DNA, 12 bp, Artificial Sequence
  Oligonucleotide primer for the detection of SNP TSC0044595
gtatttatgttg

SEQ ID NO: 346471 - DNA, 12 bp, Artificial Sequence
  Oligonucleotide primer for the detection of SNP TSC0044597
taatctaaactt

SEQ ID NO: 346472 - DNA, 12 bp, Artificial Sequence
  Oligonucleotide primer for the detection of SNP TSC0044597
gttttttaagtg

SEQ ID NO: 346473 - DNA, 12 bp, Artificial Sequence
  Oligonucleotide primer for the detection of SNP TSC0044599
aaccaataaccc

SEQ ID NO: 346474 - DNA, 12 bp, Artificial Sequence
  Oligonucleotide primer for the detection of SNP TSC0044601
ttttaatcattt

SEQ ID NO: 346475 - DNA, 12 bp, Artificial Sequence
  Oligonucleotide primer for the detection of SNP TSC0044602
aaacactacatc

SEQ ID NO: 346476 - DNA, 12 bp, Artificial Sequence
  Oligonucleotide primer for the detection of SNP TSC0044602
gttttgtgaggg

SEQ ID NO: 346477 - DNA, 12 bp, Artificial Sequence
  Oligonucleotide primer for the detection of SNP TSC0044602
aatattatattt

SEQ ID NO: 346478 - DNA, 12 bp, Artificial Sequence
  Oligonucleotide primer for the detection of SNP TSC0044603
cttccctactaa

SEQ ID NO: 346479 - DNA, 12 bp, Artificial Sequence
  Oligonucleotide primer for the detection of SNP TSC0044603
aatttgtagggt

SEQ ID NO: 346480 - DNA, 12 bp, Artificial Sequence
  Oligonucleotide primer for the detection of SNP TSC0044603
tttttgttggtc

SEQ ID NO: 346481 - DNA, 12 bp, Artificial Sequence
  Oligonucleotide primer for the detection of SNP TSC0044604
ctcccaccttaa

SEQ ID NO: 346482 - DNA, 12 bp, Artificial Sequence
  Oligonucleotide primer for the detection of SNP TSC0044604
gtattttggaag

SEQ ID NO: 346483 - DNA, 12 bp, Artificial Sequence
  Oligonucleotide primer for the detection of SNP TSC0044604
tttttattttgg

SEQ ID NO: 346484 - DNA, 12 bp, Artificial Sequence
  Oligonucleotide primer for the detection of SNP TSC0044605
tttttttctctt

SEQ ID NO: 346485 - DNA, 12 bp, Artificial Sequence
  Oligonucleotide primer for the detection of SNP TSC0044605
aaggaatttata

SEQ ID NO: 346486 - DNA, 12 bp, Artificial Sequence
  Oligonucleotide primer for the detection of SNP TSC0044606
tacaaaacatta

SEQ ID NO: 346487 - DNA, 12 bp, Artificial Sequence
  Oligonucleotide primer for the detection of SNP TSC0044606
cttacttcactt

SEQ ID NO: 346488 - DNA, 12 bp, Artificial Sequence
  Oligonucleotide primer for the detection of SNP TSC0044606
tgtagaatatta

SEQ ID NO: 346489 - DNA, 12 bp, Artificial Sequence
  Oligonucleotide primer for the detection of SNP TSC0044607
tttgtagttatt

SEQ ID NO: 346490 - DNA, 12 bp, Artificial Sequence
  Oligonucleotide primer for the detection of SNP TSC0044607
cttacaatcatc

SEQ ID NO: 346491 - DNA, 12 bp, Artificial Sequence
  Oligonucleotide primer for the detection of SNP TSC0044607
aagttaaattgg

SEQ ID NO: 346492 - DNA, 12 bp, Artificial Sequence
  Oligonucleotide primer for the detection of SNP TSC0044608
atttacaaaatt

SEQ ID NO: 346493 - DNA, 12 bp, Artificial Sequence
  Oligonucleotide primer for the detection of SNP TSC0044608
gttttttattat

SEQ ID NO: 346494 - DNA, 12 bp, Artificial Sequence
  Oligonucleotide primer for the detection of SNP TSC0044608
aattttctacta

SEQ ID NO: 346495 - DNA, 12 bp, Artificial Sequence
  Oligonucleotide primer for the detection of SNP TSC0044608
atttgtaagatt

SEQ ID NO: 346496 - DNA, 12 bp, Artificial Sequence
  Oligonucleotide primer for the detection of SNP TSC0044609
gaaatagaaggt

SEQ ID NO: 346497 - DNA, 12 bp, Artificial Sequence
  Oligonucleotide primer for the detection of SNP TSC0044610
tttagttcggag

SEQ ID NO: 346498 - DNA, 12 bp, Artificial Sequence
  Oligonucleotide primer for the detection of SNP TSC0044611
tcaaatcacatt

SEQ ID NO: 346499 - DNA, 12 bp, Artificial Sequence
  Oligonucleotide primer for the detection of SNP TSC0044611
tcaaatcgcatt

SEQ ID NO: 346500 - DNA, 12 bp, Artificial Sequence
  Oligonucleotide primer for the detection of SNP TSC0044612
aaaatacctcca

SEQ ID NO: 346501 - DNA, 12 bp, Artificial Sequence
  Oligonucleotide primer for the detection of SNP TSC0044612
tatttgagtagg

SEQ ID NO: 346502 - DNA, 12 bp, Artificial Sequence
  Oligonucleotide primer for the detection of SNP TSC0044612
aatgtttttatt

SEQ ID NO: 346503 - DNA, 12 bp, Artificial Sequence
  Oligonucleotide primer for the detection of SNP TSC0044613
acatcaaaaata

SEQ ID NO: 346504 - DNA, 12 bp, Artificial Sequence
  Oligonucleotide primer for the detection of SNP TSC0044613
gaataatttttg

SEQ ID NO: 346505 - DNA, 12 bp, Artificial Sequence
  Oligonucleotide primer for the detection of SNP TSC0044613
aaacaattctta

SEQ ID NO: 346506 - DNA, 12 bp, Artificial Sequence
  Oligonucleotide primer for the detection of SNP TSC0044613
tattagaaatat

SEQ ID NO: 346507 - DNA, 12 bp, Artificial Sequence
  Oligonucleotide primer for the detection of SNP TSC0044614
ttatatgatttt

SEQ ID NO: 346508 - DNA, 12 bp, Artificial Sequence
  Oligonucleotide primer for the detection of SNP TSC0044614
ttatatgatttc

SEQ ID NO: 346509 - DNA, 12 bp, Artificial Sequence
  Oligonucleotide primer for the detection of SNP TSC0044614
acataatctcaa

SEQ ID NO: 346510 - DNA, 12 bp, Artificial Sequence
  Oligonucleotide primer for the detection of SNP TSC0044614
acataatctcga

SEQ ID NO: 346511 - DNA, 12 bp, Artificial Sequence
  Oligonucleotide primer for the detection of SNP TSC0044614
gaagttgtagtg

SEQ ID NO: 346512 - DNA, 12 bp, Artificial Sequence
  Oligonucleotide primer for the detection of SNP TSC0044618
tctttttcacca

SEQ ID NO: 346513 - DNA, 12 bp, Artificial Sequence
  Oligonucleotide primer for the detection of SNP TSC0044618
tctttttcaccg

SEQ ID NO: 346514 - DNA, 12 bp, Artificial Sequence
  Oligonucleotide primer for the detection of SNP TSC0044618
ggaattttatat

SEQ ID NO: 346515 - DNA, 12 bp, Artificial Sequence
  Oligonucleotide primer for the detection of SNP TSC0044621
tttatatcacaa

SEQ ID NO: 346516 - DNA, 12 bp, Artificial Sequence
  Oligonucleotide primer for the detection of SNP TSC0044621
tttatatcacga

SEQ ID NO: 346517 - DNA, 12 bp, Artificial Sequence
  Oligonucleotide primer for the detection of SNP TSC0044621
tttatatcgcaa

SEQ ID NO: 346518 - DNA, 12 bp, Artificial Sequence
  Oligonucleotide primer for the detection of SNP TSC0044621
tttatatcgcga

SEQ ID NO: 346519 - DNA, 12 bp, Artificial Sequence
  Oligonucleotide primer for the detection of SNP TSC0044621
ttcattcttttt

SEQ ID NO: 346520 - DNA, 12 bp, Artificial Sequence
  Oligonucleotide primer for the detection of SNP TSC0044621
attttatattgt

SEQ ID NO: 346521 - DNA, 12 bp, Artificial Sequence
  Oligonucleotide primer for the detection of SNP TSC0044621
attttatatcgt

SEQ ID NO: 346522 - DNA, 12 bp, Artificial Sequence
  Oligonucleotide primer for the detection of SNP TSC0044621
attttatattgc

SEQ ID NO: 346523 - DNA, 12 bp, Artificial Sequence
  Oligonucleotide primer for the detection of SNP TSC0044621
attttatatcgc

SEQ ID NO: 346524 - DNA, 12 bp, Artificial Sequence
  Oligonucleotide primer for the detection of SNP TSC0044622
tatttataaact

SEQ ID NO: 346525 - DNA, 12 bp, Artificial Sequence
  Oligonucleotide primer for the detection of SNP TSC0044623
aggaatattaat

SEQ ID NO: 346526 - DNA, 12 bp, Artificial Sequence
  Oligonucleotide primer for the detection of SNP TSC0044624
aaaaatttccaa

SEQ ID NO: 346527 - DNA, 12 bp, Artificial Sequence
  Oligonucleotide primer for the detection of SNP TSC0044624
tttccaaatttc

SEQ ID NO: 346528 - DNA, 12 bp, Artificial Sequence
  Oligonucleotide primer for the detection of SNP TSC0044624
gtgggggttttt

SEQ ID NO: 346529 - DNA, 12 bp, Artificial Sequence
  Oligonucleotide primer for the detection of SNP TSC0044625
tccattctttta

SEQ ID NO: 346530 - DNA, 12 bp, Artificial Sequence
  Oligonucleotide primer for the detection of SNP TSC0044625
tcccaacattca

SEQ ID NO: 346531 - DNA, 12 bp, Artificial Sequence
  Oligonucleotide primer for the detection of SNP TSC0006465
aataaattctta

SEQ ID NO: 346532 - DNA, 12 bp, Artificial Sequence
  Oligonucleotide primer for the detection of SNP TSC0006465
tcataacctcac

SEQ ID NO: 346533 - DNA, 12 bp, Artificial Sequence
  Oligonucleotide primer for the detection of SNP TSC0006465
ggataaattttt

SEQ ID NO: 346534 - DNA, 12 bp, Artificial Sequence
  Oligonucleotide primer for the detection of SNP TSC0044628
aatttgtatata

SEQ ID NO: 346535 - DNA, 12 bp, Artificial Sequence
  Oligonucleotide primer for the detection of SNP TSC0044629
aaagtggtatgg

SEQ ID NO: 346536 - DNA, 12 bp, Artificial Sequence
  Oligonucleotide primer for the detection of SNP TSC0044635
ttctattaacaa

SEQ ID NO: 346537 - DNA, 12 bp, Artificial Sequence
  Oligonucleotide primer for the detection of SNP TSC0044635
tagtggtagata

SEQ ID NO: 346538 - DNA, 12 bp, Artificial Sequence
  Oligonucleotide primer for the detection of SNP TSC0044636
ttatccaaactc

SEQ ID NO: 346539 - DNA, 12 bp, Artificial Sequence
  Oligonucleotide primer for the detection of SNP TSC0044636
tttgagtttgag

SEQ ID NO: 346540 - DNA, 12 bp, Artificial Sequence
  Oligonucleotide primer for the detection of SNP TSC0044636
ttcgagtttgag

SEQ ID NO: 346541 - DNA, 12 bp, Artificial Sequence
  Oligonucleotide primer for the detection of SNP TSC0044637
tccaaaataact

SEQ ID NO: 346542 - DNA, 12 bp, Artificial Sequence
  Oligonucleotide primer for the detection of SNP TSC0044637
tccgaaataact

SEQ ID NO: 346543 - DNA, 12 bp, Artificial Sequence
  Oligonucleotide primer for the detection of SNP TSC0044637
tatgcgtttgta

SEQ ID NO: 346544 - DNA, 12 bp, Artificial Sequence
  Oligonucleotide primer for the detection of SNP TSC0044638
cttcccaactaa

SEQ ID NO: 346545 - DNA, 12 bp, Artificial Sequence
  Oligonucleotide primer for the detection of SNP TSC0044638
cttcccgactaa

SEQ ID NO: 346546 - DNA, 12 bp, Artificial Sequence
  Oligonucleotide primer for the detection of SNP TSC0044638
gagatttgtatt

SEQ ID NO: 346547 - DNA, 12 bp, Artificial Sequence
  Oligonucleotide primer for the detection of SNP TSC0044638
aaatttacacca

SEQ ID NO: 346548 - DNA, 12 bp, Artificial Sequence
  Oligonucleotide primer for the detection of SNP TSC0044638
ttttttcggtta

SEQ ID NO: 346549 - DNA, 12 bp, Artificial Sequence
  Oligonucleotide primer for the detection of SNP TSC0044640
tctactacaaac

SEQ ID NO: 346550 - DNA, 12 bp, Artificial Sequence
  Oligonucleotide primer for the detection of SNP TSC0044640
ttagtggtgtgg

SEQ ID NO: 346551 - DNA, 12 bp, Artificial Sequence
  Oligonucleotide primer for the detection of SNP TSC0044640
ctaataatataa

SEQ ID NO: 346552 - DNA, 12 bp, Artificial Sequence
  Oligonucleotide primer for the detection of SNP TSC0044640
tttattgtaagt

SEQ ID NO: 346553 - DNA, 12 bp, Artificial Sequence
  Oligonucleotide primer for the detection of SNP TSC0044643
aaaaatttttac

SEQ ID NO: 346554 - DNA, 12 bp, Artificial Sequence
  Oligonucleotide primer for the detection of SNP TSC0044643
aaagaaagttta

SEQ ID NO: 346555 - DNA, 12 bp, Artificial Sequence
  Oligonucleotide primer for the detection of SNP TSC0044645
tccctatctaca

SEQ ID NO: 346556 - DNA, 12 bp, Artificial Sequence
  Oligonucleotide primer for the detection of SNP TSC0044645
aatatgttgtat

SEQ ID NO: 346557 - DNA, 12 bp, Artificial Sequence
  Oligonucleotide primer for the detection of SNP TSC0044645
aaatatattaca

SEQ ID NO: 346558 - DNA, 12 bp, Artificial Sequence
  Oligonucleotide primer for the detection of SNP TSC0044645
atttttatttgt

SEQ ID NO: 346559 - DNA, 12 bp, Artificial Sequence
  Oligonucleotide primer for the detection of SNP TSC0044646
ccaataaaaaat

SEQ ID NO: 346560 - DNA, 12 bp, Artificial Sequence
  Oligonucleotide primer for the detection of SNP TSC0044648
tttacaacccta

SEQ ID NO: 346561 - DNA, 12 bp, Artificial Sequence
  Oligonucleotide primer for the detection of SNP TSC0044648
tttacgacccta

SEQ ID NO: 346562 - DNA, 12 bp, Artificial Sequence
  Oligonucleotide primer for the detection of SNP TSC0044648
agtatttggaat

SEQ ID NO: 346563 - DNA, 12 bp, Artificial Sequence
  Oligonucleotide primer for the detection of SNP TSC0044648
aatacttaaaat

SEQ ID NO: 346564 - DNA, 12 bp, Artificial Sequence
  Oligonucleotide primer for the detection of SNP TSC0044648
tttgtgattttg

SEQ ID NO: 346565 - DNA, 12 bp, Artificial Sequence
  Oligonucleotide primer for the detection of SNP TSC0044648
tttgcgattttg

SEQ ID NO: 346566 - DNA, 12 bp, Artificial Sequence
  Oligonucleotide primer for the detection of SNP TSC0044649
tcaaaaaacact

SEQ ID NO: 346567 - DNA, 12 bp, Artificial Sequence
  Oligonucleotide primer for the detection of SNP TSC0044649
ttatggatatag

SEQ ID NO: 346568 - DNA, 12 bp, Artificial Sequence
  Oligonucleotide primer for the detection of SNP TSC0044650
atctatatttta

SEQ ID NO: 346569 - DNA, 12 bp, Artificial Sequence
  Oligonucleotide primer for the detection of SNP TSC0044650
taattgataaat

SEQ ID NO: 346570 - DNA, 12 bp, Artificial Sequence
  Oligonucleotide primer for the detection of SNP TSC0044650
ccaactaataaa

SEQ ID NO: 346571 - DNA, 12 bp, Artificial Sequence
  Oligonukleotid-Primer
tttatgttttat

SEQ ID NO: 346572 - DNA, 12 bp, Artificial Sequence
  Oligonucleotide primer for the detection of SNP TSC0044651
gtaaaatattgg

SEQ ID NO: 346573 - DNA, 12 bp, Artificial Sequence
  Oligonucleotide primer for the detection of SNP TSC0007719
aaccctacaatt

SEQ ID NO: 346574 - DNA, 12 bp, Artificial Sequence
  Oligonucleotide primer for the detection of SNP TSC0007719
tataaaaataag

SEQ ID NO: 346575 - DNA, 12 bp, Artificial Sequence
  Oligonucleotide primer for the detection of SNP TSC0006700
aatcctccccaa

SEQ ID NO: 346576 - DNA, 12 bp, Artificial Sequence
  Oligonucleotide primer for the detection of SNP TSC0006700
gggtggtagggg

SEQ ID NO: 346577 - DNA, 12 bp, Artificial Sequence
  Oligonucleotide primer for the detection of SNP TSC0044653
ttatcaatactt

SEQ ID NO: 346578 - DNA, 12 bp, Artificial Sequence
  Oligonucleotide primer for the detection of SNP TSC0044653
tattaagagtag

SEQ ID NO: 346579 - DNA, 12 bp, Artificial Sequence
  Oligonucleotide primer for the detection of SNP TSC0044654
acactttttata

SEQ ID NO: 346580 - DNA, 12 bp, Artificial Sequence
  Oligonucleotide primer for the detection of SNP TSC0044657
catcctctctta

SEQ ID NO: 346581 - DNA, 12 bp, Artificial Sequence
  Oligonucleotide primer for the detection of SNP TSC0044657
ttgttttaaatt

SEQ ID NO: 346582 - DNA, 12 bp, Artificial Sequence
  Oligonucleotide primer for the detection of SNP TSC0044657
ttattttaaacc

SEQ ID NO: 346583 - DNA, 12 bp, Artificial Sequence
  Oligonucleotide primer for the detection of SNP TSC0044658
taccctttccaa

SEQ ID NO: 346584 - DNA, 12 bp, Artificial Sequence
  Oligonucleotide primer for the detection of SNP TSC0044658
gggtgaggtttt

SEQ ID NO: 346585 - DNA, 12 bp, Artificial Sequence
  Oligonucleotide primer for the detection of SNP TSC0044659
aaaaacaccctc

SEQ ID NO: 346586 - DNA, 12 bp, Artificial Sequence
  Oligonucleotide primer for the detection of SNP TSC0044659
tttttaggtatg

SEQ ID NO: 346587 - DNA, 12 bp, Artificial Sequence
  Oligonucleotide primer for the detection of SNP TSC0044660
ttcattttcccc

SEQ ID NO: 346588 - DNA, 12 bp, Artificial Sequence
  Oligonucleotide primer for the detection of SNP TSC0044660
ttttatgtaagg

SEQ ID NO: 346589 - DNA, 12 bp, Artificial Sequence
  Oligonucleotide primer for the detection of SNP TSC0044661
taaaacaataat

SEQ ID NO: 346590 - DNA, 12 bp, Artificial Sequence
  Oligonucleotide primer for the detection of SNP TSC0044661
ggtagtaatatt

SEQ ID NO: 346591 - DNA, 12 bp, Artificial Sequence
  Oligonucleotide primer for the detection of SNP TSC0044661
aacaataatatc

SEQ ID NO: 346592 - DNA, 12 bp, Artificial Sequence
  Oligonucleotide primer for the detection of SNP TSC0044661
tggaataatgat

SEQ ID NO: 346593 - DNA, 12 bp, Artificial Sequence
  Oligonucleotide primer for the detection of SNP TSC0044664
cataataaaaat

SEQ ID NO: 346594 - DNA, 12 bp, Artificial Sequence
  Oligonucleotide primer for the detection of SNP TSC0007140
caatatccacat

SEQ ID NO: 346595 - DNA, 12 bp, Artificial Sequence
  Oligonucleotide primer for the detection of SNP TSC0007140
gtgatattttaa

SEQ ID NO: 346596 - DNA, 12 bp, Artificial Sequence
  Oligonucleotide primer for the detection of SNP TSC0044666
caaaacataaac

SEQ ID NO: 346597 - DNA, 12 bp, Artificial Sequence
  Oligonucleotide primer for the detection of SNP TSC0044666
atgaaatttttg

SEQ ID NO: 346598 - DNA, 12 bp, Artificial Sequence
  Oligonucleotide primer for the detection of SNP TSC0044666
taggatataggt

SEQ ID NO: 346599 - DNA, 12 bp, Artificial Sequence
  Oligonucleotide primer for the detection of SNP TSC0044667
aatttttcattt

SEQ ID NO: 346600 - DNA, 12 bp, Artificial Sequence
  Oligonucleotide primer for the detection of SNP TSC0044667
aaataaaaaagg

SEQ ID NO: 346601 - DNA, 12 bp, Artificial Sequence
  Oligonucleotide primer for the detection of SNP TSC0044669
tatcacataaaa

SEQ ID NO: 346602 - DNA, 12 bp, Artificial Sequence
  Oligonucleotide primer for the detection of SNP TSC0044669
tttggaggtttt

SEQ ID NO: 346603 - DNA, 12 bp, Artificial Sequence
  Oligonukleotid-Primer
ttttaaaaattc

SEQ ID NO: 346604 - DNA, 12 bp, Artificial Sequence
  Oligonucleotide primer for the detection of SNP TSC0044669
gatttgttatat

SEQ ID NO: 346605 - DNA, 12 bp, Artificial Sequence
  Oligonucleotide primer for the detection of SNP TSC0044670
gagtttgatgat

SEQ ID NO: 346606 - DNA, 12 bp, Artificial Sequence
  Oligonucleotide primer for the detection of SNP TSC0044671
gagttatttgta

SEQ ID NO: 346607 - DNA, 12 bp, Artificial Sequence
  Oligonucleotide primer for the detection of SNP TSC0044673
ataaaacccttt

SEQ ID NO: 346608 - DNA, 12 bp, Artificial Sequence
  Oligonucleotide primer for the detection of SNP TSC0044673
aaggtagttata

SEQ ID NO: 346609 - DNA, 12 bp, Artificial Sequence
  Oligonucleotide primer for the detection of SNP TSC0044674
attaggatatat

SEQ ID NO: 346610 - DNA, 12 bp, Artificial Sequence
  Oligonucleotide primer for the detection of SNP TSC0044674
accaaaacacat

SEQ ID NO: 346611 - DNA, 12 bp, Artificial Sequence
  Oligonucleotide primer for the detection of SNP TSC0006396
atttcaacattt

SEQ ID NO: 346612 - DNA, 12 bp, Artificial Sequence
  Oligonucleotide primer for the detection of SNP TSC0006396
aattcaataaaa

SEQ ID NO: 346613 - DNA, 12 bp, Artificial Sequence
  Oligonucleotide primer for the detection of SNP TSC0044676
tattttcatata

SEQ ID NO: 346614 - DNA, 12 bp, Artificial Sequence
  Oligonucleotide primer for the detection of SNP TSC0044676
atatgtttgttt

SEQ ID NO: 346615 - DNA, 12 bp, Artificial Sequence
  Oligonucleotide primer for the detection of SNP TSC0044676
tatatctaccta

SEQ ID NO: 346616 - DNA, 12 bp, Artificial Sequence
  Oligonucleotide primer for the detection of SNP TSC0044676
atttttatgtat

SEQ ID NO: 346617 - DNA, 12 bp, Artificial Sequence
  Oligonucleotide primer for the detection of SNP TSC0044677
atactttaaaac

SEQ ID NO: 346618 - DNA, 12 bp, Artificial Sequence
  Oligonucleotide primer for the detection of SNP TSC0044677
gatttttaaaaa

SEQ ID NO: 346619 - DNA, 12 bp, Artificial Sequence
  Oligonucleotide primer for the detection of SNP TSC0044678
gttttgtatatg

SEQ ID NO: 346620 - DNA, 12 bp, Artificial Sequence
  Oligonucleotide primer for the detection of SNP TSC0044678
accttatatata

SEQ ID NO: 346621 - DNA, 12 bp, Artificial Sequence
  Oligonucleotide primer for the detection of SNP TSC0044678
aaaaaaggttat

SEQ ID NO: 346622 - DNA, 12 bp, Artificial Sequence
  Oligonucleotide primer for the detection of SNP TSC0044679
tttttatgtaag

SEQ ID NO: 346623 - DNA, 12 bp, Artificial Sequence
  Oligonukleotid-Primer
ccccatataaaa

SEQ ID NO: 346624 - DNA, 12 bp, Artificial Sequence
  Oligonucleotide primer for the detection of SNP TSC0044679
ggtaaaaggtaa

SEQ ID NO: 346625 - DNA, 12 bp, Artificial Sequence
  Oligonucleotide primer for the detection of SNP TSC0044680
tttatgtaagag

SEQ ID NO: 346626 - DNA, 12 bp, Artificial Sequence
  Oligonucleotide primer for the detection of SNP TSC0044680
cccatataaaaa

SEQ ID NO: 346627 - DNA, 12 bp, Artificial Sequence
  Oligonucleotide primer for the detection of SNP TSC0044680
aggtaaaaggta

SEQ ID NO: 346628 - DNA, 12 bp, Artificial Sequence
  Oligonucleotide primer for the detection of SNP TSC0044681
ccctccattaat

SEQ ID NO: 346629 - DNA, 12 bp, Artificial Sequence
  Oligonucleotide primer for the detection of SNP TSC0044681
tgatttaagtgt

SEQ ID NO: 346630 - DNA, 12 bp, Artificial Sequence
  Oligonucleotide primer for the detection of SNP TSC0006822
tattcgatttat

SEQ ID NO: 346631 - DNA, 12 bp, Artificial Sequence
  Oligonucleotide primer for the detection of SNP TSC0006822
acattcaatcta

SEQ ID NO: 346632 - DNA, 12 bp, Artificial Sequence
  Oligonucleotide primer for the detection of SNP TSC0006822
acattcgatcta

SEQ ID NO: 346633 - DNA, 12 bp, Artificial Sequence
  Oligonucleotide primer for the detection of SNP TSC0006822
aattaagttagt

SEQ ID NO: 346634 - DNA, 12 bp, Artificial Sequence
  Oligonucleotide primer for the detection of SNP TSC0007728
ttatttactccc

SEQ ID NO: 346635 - DNA, 12 bp, Artificial Sequence
  Oligonucleotide primer for the detection of SNP TSC0007729
atatatattcta

SEQ ID NO: 346636 - DNA, 12 bp, Artificial Sequence
  Oligonucleotide primer for the detection of SNP TSC0007729
tttggtttttga

SEQ ID NO: 346637 - DNA, 12 bp, Artificial Sequence
  Oligonucleotide primer for the detection of SNP TSC0044682
taccaaaacact

SEQ ID NO: 346638 - DNA, 12 bp, Artificial Sequence
  Oligonucleotide primer for the detection of SNP TSC0044682
gggtatagtagg

SEQ ID NO: 346639 - DNA, 12 bp, Artificial Sequence
  Oligonucleotide primer for the detection of SNP TSC0044683
aaaaaataccta

SEQ ID NO: 346640 - DNA, 12 bp, Artificial Sequence
  Oligonucleotide primer for the detection of SNP TSC0044683
ctttctcaacct

SEQ ID NO: 346641 - DNA, 12 bp, Artificial Sequence
  Oligonucleotide primer for the detection of SNP TSC0044683
agagaaatgttt

SEQ ID NO: 346642 - DNA, 12 bp, Artificial Sequence
  Oligonucleotide primer for the detection of SNP TSC0044685
attcaattatct

SEQ ID NO: 346643 - DNA, 12 bp, Artificial Sequence
  Oligonucleotide primer for the detection of SNP TSC0044685
gggatttagagg

SEQ ID NO: 346644 - DNA, 12 bp, Artificial Sequence
  Oligonucleotide primer for the detection of SNP TSC0044686
catcaaactctc

SEQ ID NO: 346645 - DNA, 12 bp, Artificial Sequence
  Oligonucleotide primer for the detection of SNP TSC0044687
tttcacactaat

SEQ ID NO: 346646 - DNA, 12 bp, Artificial Sequence
  Oligonucleotide primer for the detection of SNP TSC0044687
taattagtattt

SEQ ID NO: 346647 - DNA, 12 bp, Artificial Sequence
  Oligonucleotide primer for the detection of SNP TSC0044687
taattaacattt

SEQ ID NO: 346648 - DNA, 12 bp, Artificial Sequence
  Oligonucleotide primer for the detection of SNP TSC0044688
ctacatttaatt

SEQ ID NO: 346649 - DNA, 12 bp, Artificial Sequence
  Oligonucleotide primer for the detection of SNP TSC0044688
taattaatagta

SEQ ID NO: 346650 - DNA, 12 bp, Artificial Sequence
  Oligonucleotide primer for the detection of SNP TSC0044688
taactaataata

SEQ ID NO: 346651 - DNA, 12 bp, Artificial Sequence
  Oligonucleotide primer for the detection of SNP TSC0044688
ttgtatttgatt

SEQ ID NO: 346652 - DNA, 12 bp, Artificial Sequence
  Oligonucleotide primer for the detection of SNP TSC0005493
ataacacccact

SEQ ID NO: 346653 - DNA, 12 bp, Artificial Sequence
  Oligonucleotide primer for the detection of SNP TSC0005493
atagttgaggag

SEQ ID NO: 346654 - DNA, 12 bp, Artificial Sequence
  Oligonucleotide primer for the detection of SNP TSC0044690
actaattcttct

SEQ ID NO: 346655 - DNA, 12 bp, Artificial Sequence
  Oligonucleotide primer for the detection of SNP TSC0044690
gagttaaaaggg

SEQ ID NO: 346656 - DNA, 12 bp, Artificial Sequence
  Oligonucleotide primer for the detection of SNP TSC0044691
ttgtttagtaga

SEQ ID NO: 346657 - DNA, 12 bp, Artificial Sequence
  Oligonucleotide primer for the detection of SNP TSC0044691
ctacttaacaaa

SEQ ID NO: 346658 - DNA, 12 bp, Artificial Sequence
  Oligonucleotide primer for the detection of SNP TSC0044691
taggaggaagat

SEQ ID NO: 346659 - DNA, 12 bp, Artificial Sequence
  Oligonucleotide primer for the detection of SNP TSC0044693
catttcccccta

SEQ ID NO: 346660 - DNA, 12 bp, Artificial Sequence
  Oligonucleotide primer for the detection of SNP TSC0044693
agggttttttag

SEQ ID NO: 346661 - DNA, 12 bp, Artificial Sequence
  Oligonucleotide primer for the detection of SNP TSC0044693
aaaactttccaa

SEQ ID NO: 346662 - DNA, 12 bp, Artificial Sequence
  Oligonucleotide primer for the detection of SNP TSC0044694
atttaaattttc

SEQ ID NO: 346663 - DNA, 12 bp, Artificial Sequence
  Oligonucleotide primer for the detection of SNP TSC0044694
aaattaaataga

SEQ ID NO: 346664 - DNA, 12 bp, Artificial Sequence
  Oligonucleotide primer for the detection of SNP TSC0044695
ccaatatcaaat

SEQ ID NO: 346665 - DNA, 12 bp, Artificial Sequence
  Oligonucleotide primer for the detection of SNP TSC0044695
aggttggaggga

SEQ ID NO: 346666 - DNA, 12 bp, Artificial Sequence
  Oligonucleotide primer for the detection of SNP TSC0044696
catccaatatca

SEQ ID NO: 346667 - DNA, 12 bp, Artificial Sequence
  Oligonucleotide primer for the detection of SNP TSC0044696
agggaattttat

SEQ ID NO: 346668 - DNA, 12 bp, Artificial Sequence
  Oligonucleotide primer for the detection of SNP TSC0044696
aaaaaacttcat

SEQ ID NO: 346669 - DNA, 12 bp, Artificial Sequence
  Oligonucleotide primer for the detection of SNP TSC0044696
tatttaatatta

SEQ ID NO: 346670 - DNA, 12 bp, Artificial Sequence
  Oligonucleotide primer for the detection of SNP TSC0044697
acaaaaataatt

SEQ ID NO: 346671 - DNA, 12 bp, Artificial Sequence
  Oligonucleotide primer for the detection of SNP TSC0044697
aaggaaggagta

SEQ ID NO: 346672 - DNA, 12 bp, Artificial Sequence
  Oligonucleotide primer for the detection of SNP TSC0044698
ccaattttactc

SEQ ID NO: 346673 - DNA, 12 bp, Artificial Sequence
  Oligonucleotide primer for the detection of SNP TSC0044698
ccaatactatat

SEQ ID NO: 346674 - DNA, 12 bp, Artificial Sequence
  Oligonucleotide primer for the detection of SNP TSC0044699
caacaaattaac

SEQ ID NO: 346675 - DNA, 12 bp, Artificial Sequence
  Oligonucleotide primer for the detection of SNP TSC0044699
aaattttttcca

SEQ ID NO: 346676 - DNA, 12 bp, Artificial Sequence
  Oligonucleotide primer for the detection of SNP TSC0044699
aataaattagtt

SEQ ID NO: 346677 - DNA, 12 bp, Artificial Sequence
  Oligonucleotide primer for the detection of SNP TSC0044700
taaattataatc

SEQ ID NO: 346678 - DNA, 12 bp, Artificial Sequence
  Oligonucleotide primer for the detection of SNP TSC0044700
agaaagtaagat

SEQ ID NO: 346679 - DNA, 12 bp, Artificial Sequence
  Oligonucleotide primer for the detection of SNP TSC0044701
attctatttccc

SEQ ID NO: 346680 - DNA, 12 bp, Artificial Sequence
  Oligonucleotide primer for the detection of SNP TSC0044701
agaaaagagtag

SEQ ID NO: 346681 - DNA, 12 bp, Artificial Sequence
  Oligonucleotide primer for the detection of SNP TSC0044702
gagaaaaaattt

SEQ ID NO: 346682 - DNA, 12 bp, Artificial Sequence
  Oligonucleotide primer for the detection of SNP TSC0006727
tgatagatattt

SEQ ID NO: 346683 - DNA, 12 bp, Artificial Sequence
  Oligonucleotide primer for the detection of SNP TSC0006727
taacaaacacct

SEQ ID NO: 346684 - DNA, 12 bp, Artificial Sequence
  Oligonucleotide primer for the detection of SNP TSC0006727
gggtgagaagaa

SEQ ID NO: 346685 - DNA, 12 bp, Artificial Sequence
  Oligonucleotide primer for the detection of SNP TSC0044704
taattaattgtt

SEQ ID NO: 346686 - DNA, 12 bp, Artificial Sequence
  Oligonucleotide primer for the detection of SNP TSC0044704
accaattatcaa

SEQ ID NO: 346687 - DNA, 12 bp, Artificial Sequence
  Oligonucleotide primer for the detection of SNP TSC0044704
taaggatttttt

SEQ ID NO: 346688 - DNA, 12 bp, Artificial Sequence
  Oligonucleotide primer for the detection of SNP TSC0044705
atttaggtttat

SEQ ID NO: 346689 - DNA, 12 bp, Artificial Sequence
  Oligonucleotide primer for the detection of SNP TSC0044705
atccaaacttat

SEQ ID NO: 346690 - DNA, 12 bp, Artificial Sequence
  Oligonucleotide primer for the detection of SNP TSC0044705
tttttagataat

SEQ ID NO: 346691 - DNA, 12 bp, Artificial Sequence
  Oligonucleotide primer for the detection of SNP TSC0044706
tcacaaaaaaaa

SEQ ID NO: 346692 - DNA, 12 bp, Artificial Sequence
  Oligonucleotide primer for the detection of SNP TSC0044706
atttaaatatgg

SEQ ID NO: 346693 - DNA, 12 bp, Artificial Sequence
  Oligonucleotide primer for the detection of SNP TSC0044706
atttaaatacgg

SEQ ID NO: 346694 - DNA, 12 bp, Artificial Sequence
  Oligonucleotide primer for the detection of SNP TSC0044706
acttaaacacaa

SEQ ID NO: 346695 - DNA, 12 bp, Artificial Sequence
  Oligonucleotide primer for the detection of SNP TSC0044706
acttaaacacga

SEQ ID NO: 346696 - DNA, 12 bp, Artificial Sequence
  Oligonucleotide primer for the detection of SNP TSC0044706
aggttataaaag

SEQ ID NO: 346697 - DNA, 12 bp, Artificial Sequence
  Oligonucleotide primer for the detection of SNP TSC0008112
caaaattttttc

SEQ ID NO: 346698 - DNA, 12 bp, Artificial Sequence
  Oligonucleotide primer for the detection of SNP TSC0008112
aattaaatataa

SEQ ID NO: 346699 - DNA, 12 bp, Artificial Sequence
  Oligonucleotide primer for the detection of SNP TSC0008112
taaggttttttc

SEQ ID NO: 346700 - DNA, 12 bp, Artificial Sequence
  Oligonucleotide primer for the detection of SNP TSC0044707
gcccaccaccac

SEQ ID NO: 346701 - DNA, 12 bp, Artificial Sequence
  Oligonucleotide primer for the detection of SNP TSC0044707
gcccgccaccac

SEQ ID NO: 346702 - DNA, 12 bp, Artificial Sequence
  Oligonucleotide primer for the detection of SNP TSC0044708
aatgtttgattt

SEQ ID NO: 346703 - DNA, 12 bp, Artificial Sequence
  Oligonucleotide primer for the detection of SNP TSC0044713
ctaatttctaaa

SEQ ID NO: 346704 - DNA, 12 bp, Artificial Sequence
  Oligonucleotide primer for the detection of SNP TSC0044713
tgagggataaat

SEQ ID NO: 346705 - DNA, 12 bp, Artificial Sequence
  Oligonucleotide primer for the detection of SNP TSC0044713
gttggtttttga

SEQ ID NO: 346706 - DNA, 12 bp, Artificial Sequence
  Oligonucleotide primer for the detection of SNP TSC0044714
tcaaattaatta

SEQ ID NO: 346707 - DNA, 12 bp, Artificial Sequence
  Oligonucleotide primer for the detection of SNP TSC0044714
agaaaatttgga

SEQ ID NO: 346708 - DNA, 12 bp, Artificial Sequence
  Oligonucleotide primer for the detection of SNP TSC0044715
tacacaatacac

SEQ ID NO: 346709 - DNA, 12 bp, Artificial Sequence
  Oligonucleotide primer for the detection of SNP TSC0044715
gaaggaaaagtg

SEQ ID NO: 346710 - DNA, 12 bp, Artificial Sequence
  Oligonucleotide primer for the detection of SNP TSC0044715
tgtatagtgtat

SEQ ID NO: 346711 - DNA, 12 bp, Artificial Sequence
  Oligonucleotide primer for the detection of SNP TSC0044716
aatttactactt

SEQ ID NO: 346712 - DNA, 12 bp, Artificial Sequence
  Oligonucleotide primer for the detection of SNP TSC0044716
ttagggttagga

SEQ ID NO: 346713 - DNA, 12 bp, Artificial Sequence
  Oligonucleotide primer for the detection of SNP TSC0044717
attacttaatat

SEQ ID NO: 346714 - DNA, 12 bp, Artificial Sequence
  Oligonucleotide primer for the detection of SNP TSC0044717
gtgtgggggtta

SEQ ID NO: 346715 - DNA, 12 bp, Artificial Sequence
  Oligonucleotide primer for the detection of SNP TSC0044717
atataaaaacca

SEQ ID NO: 346716 - DNA, 12 bp, Artificial Sequence
  Oligonucleotide primer for the detection of SNP TSC0044717
attgtttggtgt

SEQ ID NO: 346717 - DNA, 12 bp, Artificial Sequence
  Oligonucleotide primer for the detection of SNP TSC0044718
cacacccaaaaa

SEQ ID NO: 346718 - DNA, 12 bp, Artificial Sequence
  Oligonucleotide primer for the detection of SNP TSC0044718
cacgcccaaaaa

SEQ ID NO: 346719 - DNA, 12 bp, Artificial Sequence
  Oligonucleotide primer for the detection of SNP TSC0044718
attttttatgtc

SEQ ID NO: 346720 - DNA, 12 bp, Artificial Sequence
  Oligonucleotide primer for the detection of SNP TSC0044718
accttccatatc

SEQ ID NO: 346721 - DNA, 12 bp, Artificial Sequence
  Oligonucleotide primer for the detection of SNP TSC0044718
gtatgtttagag

SEQ ID NO: 346722 - DNA, 12 bp, Artificial Sequence
  Oligonucleotide primer for the detection of SNP TSC0044718
gtacgtttagag

SEQ ID NO: 346723 - DNA, 12 bp, Artificial Sequence
  Oligonucleotide primer for the detection of SNP TSC0044719
ccacccacactt

SEQ ID NO: 346724 - DNA, 12 bp, Artificial Sequence
  Oligonucleotide primer for the detection of SNP TSC0044719
gttgtttagtta

SEQ ID NO: 346725 - DNA, 12 bp, Artificial Sequence
  Oligonucleotide primer for the detection of SNP TSC0044724
tttatattatag

SEQ ID NO: 346726 - DNA, 12 bp, Artificial Sequence
  Oligonucleotide primer for the detection of SNP TSC0044725
aaaaatatcatc

SEQ ID NO: 346727 - DNA, 12 bp, Artificial Sequence
  Oligonucleotide primer for the detection of SNP TSC0044725
tggagaaatgtg

SEQ ID NO: 346728 - DNA, 12 bp, Artificial Sequence
  Oligonucleotide primer for the detection of SNP TSC0044725
cggagaaatgtg

SEQ ID NO: 346729 - DNA, 12 bp, Artificial Sequence
  Oligonucleotide primer for the detection of SNP TSC0044726
tttaagttagtt

SEQ ID NO: 346730 - DNA, 12 bp, Artificial Sequence
  Oligonucleotide primer for the detection of SNP TSC0044726
ttcccaaatcaa

SEQ ID NO: 346731 - DNA, 12 bp, Artificial Sequence
  Oligonucleotide primer for the detection of SNP TSC0044726
tattgggaaatt

SEQ ID NO: 346732 - DNA, 12 bp, Artificial Sequence
  Oligonucleotide primer for the detection of SNP TSC0044729
ttctctacctcc

SEQ ID NO: 346733 - DNA, 12 bp, Artificial Sequence
  Oligonucleotide primer for the detection of SNP TSC0044729
tggttggtattt

SEQ ID NO: 346734 - DNA, 12 bp, Artificial Sequence
  Oligonucleotide primer for the detection of SNP TSC0044729
taattaacactt

SEQ ID NO: 346735 - DNA, 12 bp, Artificial Sequence
  Oligonucleotide primer for the detection of SNP TSC0044730
aacattatttct

SEQ ID NO: 346736 - DNA, 12 bp, Artificial Sequence
  Oligonucleotide primer for the detection of SNP TSC0044730
aacgttatttct

SEQ ID NO: 346737 - DNA, 12 bp, Artificial Sequence
  Oligonucleotide primer for the detection of SNP TSC0044730
gtttgagtttta

SEQ ID NO: 346738 - DNA, 12 bp, Artificial Sequence
  Oligonucleotide primer for the detection of SNP TSC0044730
atctaaactcta

SEQ ID NO: 346739 - DNA, 12 bp, Artificial Sequence
  Oligonucleotide primer for the detection of SNP TSC0044730
aatgttgttttt

SEQ ID NO: 346740 - DNA, 12 bp, Artificial Sequence
  Oligonucleotide primer for the detection of SNP TSC0044730
aacgttgttttt

SEQ ID NO: 346741 - DNA, 12 bp, Artificial Sequence
  Oligonucleotide primer for the detection of SNP TSC0044731
ttttaaaaaaca

SEQ ID NO: 346742 - DNA, 12 bp, Artificial Sequence
  Oligonucleotide primer for the detection of SNP TSC0044731
aaccaattttct

SEQ ID NO: 346743 - DNA, 12 bp, Artificial Sequence
  Oligonucleotide primer for the detection of SNP TSC0044731
ttttgaaaaata

SEQ ID NO: 346744 - DNA, 12 bp, Artificial Sequence
  Oligonucleotide primer for the detection of SNP TSC0044732
aaaatacaaaat

SEQ ID NO: 346745 - DNA, 12 bp, Artificial Sequence
  Oligonucleotide primer for the detection of SNP TSC0044734
taattctacatc

SEQ ID NO: 346746 - DNA, 12 bp, Artificial Sequence
  Oligonucleotide primer for the detection of SNP TSC0044734
aatgtagtttta

SEQ ID NO: 346747 - DNA, 12 bp, Artificial Sequence
  Oligonucleotide primer for the detection of SNP TSC0044737
caaacaaatttt

SEQ ID NO: 346748 - DNA, 12 bp, Artificial Sequence
  Oligonucleotide primer for the detection of SNP TSC0044738
tttctcaaatat

SEQ ID NO: 346749 - DNA, 12 bp, Artificial Sequence
  Oligonucleotide primer for the detection of SNP TSC0044738
ttttagaataaa

SEQ ID NO: 346750 - DNA, 12 bp, Artificial Sequence
  Oligonucleotide primer for the detection of SNP TSC0044739
cttcctatattt

SEQ ID NO: 346751 - DNA, 12 bp, Artificial Sequence
  Oligonucleotide primer for the detection of SNP TSC0044739
atttgattattg

SEQ ID NO: 346752 - DNA, 12 bp, Artificial Sequence
  Oligonucleotide primer for the detection of SNP TSC0044740
atactaaaattc

SEQ ID NO: 346753 - DNA, 12 bp, Artificial Sequence
  Oligonucleotide primer for the detection of SNP TSC0044740
tattaaaatttt

SEQ ID NO: 346754 - DNA, 12 bp, Artificial Sequence
  Oligonucleotide primer for the detection of SNP TSC0044740
atattaaaattt

SEQ ID NO: 346755 - DNA, 12 bp, Artificial Sequence
  Oligonucleotide primer for the detection of SNP TSC0044741
taaattctaaca

SEQ ID NO: 346756 - DNA, 12 bp, Artificial Sequence
  Oligonucleotide primer for the detection of SNP TSC0044741
ttttgatgaaat

SEQ ID NO: 346757 - DNA, 12 bp, Artificial Sequence
  Oligonucleotide primer for the detection of SNP TSC0044741
ttttgatgaaac

SEQ ID NO: 346758 - DNA, 12 bp, Artificial Sequence
  Oligonucleotide primer for the detection of SNP TSC0044741
attctaataaaa

SEQ ID NO: 346759 - DNA, 12 bp, Artificial Sequence
  Oligonucleotide primer for the detection of SNP TSC0044741
taagttttaata

SEQ ID NO: 346760 - DNA, 12 bp, Artificial Sequence
  Oligonucleotide primer for the detection of SNP TSC0044742
actatatctccc

SEQ ID NO: 346761 - DNA, 12 bp, Artificial Sequence
  Oligonucleotide primer for the detection of SNP TSC0044742
gctatatctccc

SEQ ID NO: 346762 - DNA, 12 bp, Artificial Sequence
  Oligonucleotide primer for the detection of SNP TSC0044742
tttcgtatttta

SEQ ID NO: 346763 - DNA, 12 bp, Artificial Sequence
  Oligonucleotide primer for the detection of SNP TSC0044743
caaaatcacgcc

SEQ ID NO: 346764 - DNA, 12 bp, Artificial Sequence
  Oligonukleotid-Primer
caaaatcgcgcc

SEQ ID NO: 346765 - DNA, 12 bp, Artificial Sequence
  Oligonucleotide primer for the detection of SNP TSC0044743
cgaaatcacgcc

SEQ ID NO: 346766 - DNA, 12 bp, Artificial Sequence
  Oligonucleotide primer for the detection of SNP TSC0044743
cgaaatcgcacc

SEQ ID NO: 346767 - DNA, 12 bp, Artificial Sequence
  Oligonucleotide primer for the detection of SNP TSC0044743
cgaaatcgcgcc

SEQ ID NO: 346768 - DNA, 12 bp, Artificial Sequence
  Oligonucleotide primer for the detection of SNP TSC0044743
tgagatcgtgtt

SEQ ID NO: 346769 - DNA, 12 bp, Artificial Sequence
  Oligonucleotide primer for the detection of SNP TSC0044743
tgagattgcgtt

SEQ ID NO: 346770 - DNA, 12 bp, Artificial Sequence
  Oligonucleotide primer for the detection of SNP TSC0044743
cgagatcgtgtt

SEQ ID NO: 346771 - DNA, 12 bp, Artificial Sequence
  Oligonucleotide primer for the detection of SNP TSC0044743
cgagattgcgtt

SEQ ID NO: 346772 - DNA, 12 bp, Artificial Sequence
  Oligonucleotide primer for the detection of SNP TSC0044743
tgagatcgcgtt

SEQ ID NO: 346773 - DNA, 12 bp, Artificial Sequence
  Oligonucleotide primer for the detection of SNP TSC0044743
cgagatcgcgtt

SEQ ID NO: 346774 - DNA, 12 bp, Artificial Sequence
  Oligonucleotide primer for the detection of SNP TSC0044744
tttaataaaagg

SEQ ID NO: 346775 - DNA, 12 bp, Artificial Sequence
  Oligonucleotide primer for the detection of SNP TSC0044745
tctaaacctaac

SEQ ID NO: 346776 - DNA, 12 bp, Artificial Sequence
  Oligonucleotide primer for the detection of SNP TSC0044745
gtgtaagttatg

SEQ ID NO: 346777 - DNA, 12 bp, Artificial Sequence
  Oligonucleotide primer for the detection of SNP TSC0044749
tggtttgaattt

SEQ ID NO: 346778 - DNA, 12 bp, Artificial Sequence
  Oligonucleotide primer for the detection of SNP TSC0044749
tggtttgaattc

SEQ ID NO: 346779 - DNA, 12 bp, Artificial Sequence
  Oligonucleotide primer for the detection of SNP TSC0044750
aaatgaaaagtt

SEQ ID NO: 346780 - DNA, 12 bp, Artificial Sequence
  Oligonucleotide primer for the detection of SNP TSC0044751
tatgtttgtgat

SEQ ID NO: 346781 - DNA, 12 bp, Artificial Sequence
  Oligonucleotide primer for the detection of SNP TSC0044751
aaaagttagtta

SEQ ID NO: 346782 - DNA, 12 bp, Artificial Sequence
  Oligonucleotide primer for the detection of SNP TSC0044753
attcttttccct

SEQ ID NO: 346783 - DNA, 12 bp, Artificial Sequence
  Oligonucleotide primer for the detection of SNP TSC0044753
taaaaatagatt

SEQ ID NO: 346784 - DNA, 12 bp, Artificial Sequence
  Oligonucleotide primer for the detection of SNP TSC0044754
cattattaactt

SEQ ID NO: 346785 - DNA, 12 bp, Artificial Sequence
  Oligonucleotide primer for the detection of SNP TSC0044755
aatttcaatctc

SEQ ID NO: 346786 - DNA, 12 bp, Artificial Sequence
  Oligonucleotide primer for the detection of SNP TSC0044757
tacataaactac

SEQ ID NO: 346787 - DNA, 12 bp, Artificial Sequence
  Oligonucleotide primer for the detection of SNP TSC0044757
ttggatagtggg

SEQ ID NO: 346788 - DNA, 12 bp, Artificial Sequence
  Oligonukleotid-Primer
attcctcaaact

SEQ ID NO: 346789 - DNA, 12 bp, Artificial Sequence
  Oligonucleotide primer for the detection of SNP TSC0044760
tgagaggtgggg

SEQ ID NO: 346790 - DNA, 12 bp, Artificial Sequence
  Oligonucleotide primer for the detection of SNP TSC0044761
tacatcaacctc

SEQ ID NO: 346791 - DNA, 12 bp, Artificial Sequence
  Oligonucleotide primer for the detection of SNP TSC0044761
aataaaattgga

SEQ ID NO: 346792 - DNA, 12 bp, Artificial Sequence
  Oligonukleotid-Primer
caaaataaaatc

SEQ ID NO: 346793 - DNA, 12 bp, Artificial Sequence
  Oligonucleotide primer for the detection of SNP TSC0044763
catcaccacata

SEQ ID NO: 346794 - DNA, 12 bp, Artificial Sequence
  Oligonucleotide primer for the detection of SNP TSC0044763
ttggtgtatgtg

SEQ ID NO: 346795 - DNA, 12 bp, Artificial Sequence
  Oligonucleotide primer for the detection of SNP TSC0044764
tagaattaagta

SEQ ID NO: 346796 - DNA, 12 bp, Artificial Sequence
  Oligonucleotide primer for the detection of SNP TSC0044767
ccacaaattttt

SEQ ID NO: 346797 - DNA, 12 bp, Artificial Sequence
  Oligonucleotide primer for the detection of SNP TSC0044767
atgagaatttta

SEQ ID NO: 346798 - DNA, 12 bp, Artificial Sequence
  Oligonucleotide primer for the detection of SNP TSC0044768
atatctttattc

SEQ ID NO: 346799 - DNA, 12 bp, Artificial Sequence
  Oligonucleotide primer for the detection of SNP TSC0044768
ttgaaattaatg

SEQ ID NO: 346800 - DNA, 12 bp, Artificial Sequence
  Oligonucleotide primer for the detection of SNP TSC0044770
acttctaataat

SEQ ID NO: 346801 - DNA, 12 bp, Artificial Sequence
  Oligonucleotide primer for the detection of SNP TSC0044770
aattatagataa

SEQ ID NO: 346802 - DNA, 12 bp, Artificial Sequence
  Oligonucleotide primer for the detection of SNP TSC0044773
aaactacaaaat

SEQ ID NO: 346803 - DNA, 12 bp, Artificial Sequence
  Oligonucleotide primer for the detection of SNP TSC0044776
caacacaataac

SEQ ID NO: 346804 - DNA, 12 bp, Artificial Sequence
  Oligonucleotide primer for the detection of SNP TSC0044777
taccccatatcc

SEQ ID NO: 346805 - DNA, 12 bp, Artificial Sequence
  Oligonucleotide primer for the detection of SNP TSC0044777
gtttttgtagga

SEQ ID NO: 346806 - DNA, 12 bp, Artificial Sequence
  Oligonucleotide primer for the detection of SNP TSC0044778
acaaatcttaac

SEQ ID NO: 346807 - DNA, 12 bp, Artificial Sequence
  Oligonucleotide primer for the detection of SNP TSC0044778
taaataaaatga

SEQ ID NO: 346808 - DNA, 12 bp, Artificial Sequence
  Oligonucleotide primer for the detection of SNP TSC0044779
attaaatagtta

SEQ ID NO: 346809 - DNA, 12 bp, Artificial Sequence
  Oligonucleotide primer for the detection of SNP TSC0044779
tagttgaagatt

SEQ ID NO: 346810 - DNA, 12 bp, Artificial Sequence
  Oligonucleotide primer for the detection of SNP TSC0044780
tgttgaataaaa

SEQ ID NO: 346811 - DNA, 12 bp, Artificial Sequence
  Oligonucleotide primer for the detection of SNP TSC0044781
tattaagtggag

SEQ ID NO: 346812 - DNA, 12 bp, Artificial Sequence
  Oligonucleotide primer for the detection of SNP TSC0044782
catacaaaccat

SEQ ID NO: 346813 - DNA, 12 bp, Artificial Sequence
  Oligonucleotide primer for the detection of SNP TSC0044782
ttttgaaatgag

SEQ ID NO: 346814 - DNA, 12 bp, Artificial Sequence
  Oligonucleotide primer for the detection of SNP TSC0044783
atttaccttttt

SEQ ID NO: 346815 - DNA, 12 bp, Artificial Sequence
  Oligonucleotide primer for the detection of SNP TSC0044784
caatcaaaaatc

SEQ ID NO: 346816 - DNA, 12 bp, Artificial Sequence
  Oligonucleotide primer for the detection of SNP TSC0044784
agtggagaaatt

SEQ ID NO: 346817 - DNA, 12 bp, Artificial Sequence
  Oligonucleotide primer for the detection of SNP TSC0044784
attagggatttt

SEQ ID NO: 346818 - DNA, 12 bp, Artificial Sequence
  Oligonucleotide primer for the detection of SNP TSC0044785
aactcataccta

SEQ ID NO: 346819 - DNA, 12 bp, Artificial Sequence
  Oligonucleotide primer for the detection of SNP TSC0044785
aactcgtaccta

SEQ ID NO: 346820 - DNA, 12 bp, Artificial Sequence
  Oligonucleotide primer for the detection of SNP TSC0044785
agttttggaaaa

SEQ ID NO: 346821 - DNA, 12 bp, Artificial Sequence
  Oligonucleotide primer for the detection of SNP TSC0044785
aatcttaaaaaa

SEQ ID NO: 346822 - DNA, 12 bp, Artificial Sequence
  Oligonucleotide primer for the detection of SNP TSC0044785
agtttgtatttg

SEQ ID NO: 346823 - DNA, 12 bp, Artificial Sequence
  Oligonucleotide primer for the detection of SNP TSC0044785
agttcgtatttg

SEQ ID NO: 346824 - DNA, 12 bp, Artificial Sequence
  Oligonucleotide primer for the detection of SNP TSC0044786
tacctatattta

SEQ ID NO: 346825 - DNA, 12 bp, Artificial Sequence
  Oligonucleotide primer for the detection of SNP TSC0044786
ggtaaagtaatt

SEQ ID NO: 346826 - DNA, 12 bp, Artificial Sequence
  Oligonucleotide primer for the detection of SNP TSC0044786
tatttatgtttg

SEQ ID NO: 346827 - DNA, 12 bp, Artificial Sequence
  Oligonucleotide primer for the detection of SNP TSC0044787
tactttaatttt

SEQ ID NO: 346828 - DNA, 12 bp, Artificial Sequence
  Oligonucleotide primer for the detection of SNP TSC0044787
ggtattatagaa

SEQ ID NO: 346829 - DNA, 12 bp, Artificial Sequence
  Oligonucleotide primer for the detection of SNP TSC0044788
taacttctataa

SEQ ID NO: 346830 - DNA, 12 bp, Artificial Sequence
  Oligonucleotide primer for the detection of SNP TSC0044788
tggggggggggg

SEQ ID NO: 346831 - DNA, 12 bp, Artificial Sequence
  Oligonucleotide primer for the detection of SNP TSC0044788
cggggggggggg

SEQ ID NO: 346832 - DNA, 12 bp, Artificial Sequence
  Oligonucleotide primer for the detection of SNP TSC0044789
aacttaacttac

SEQ ID NO: 346833 - DNA, 12 bp, Artificial Sequence
  Oligonucleotide primer for the detection of SNP TSC0044789
ttatggtatgag

SEQ ID NO: 346834 - DNA, 12 bp, Artificial Sequence
  Oligonucleotide primer for the detection of SNP TSC0044789
gatttagtttgt

SEQ ID NO: 346835 - DNA, 12 bp, Artificial Sequence
  Oligonucleotide primer for the detection of SNP TSC0044790
aacaacaaatac

SEQ ID NO: 346836 - DNA, 12 bp, Artificial Sequence
  Oligonukleotid-Primer
ataaggatagaa

SEQ ID NO: 346837 - DNA, 12 bp, Artificial Sequence
  Oligonucleotide primer for the detection of SNP TSC0044791
attaattaatat

SEQ ID NO: 346838 - DNA, 12 bp, Artificial Sequence
  Oligonucleotide primer for the detection of SNP TSC0044791
attaaccaatac

SEQ ID NO: 346839 - DNA, 12 bp, Artificial Sequence
  Oligonucleotide primer for the detection of SNP TSC0044791
ttatagagaaaa

SEQ ID NO: 346840 - DNA, 12 bp, Artificial Sequence
  Oligonukleotid-Primer
atacctctaaaa

SEQ ID NO: 346841 - DNA, 12 bp, Artificial Sequence
  Oligonucleotide primer for the detection of SNP TSC0044792
tttagtggggaa

SEQ ID NO: 346842 - DNA, 12 bp, Artificial Sequence
  Oligonucleotide primer for the detection of SNP TSC0044792
tttagcggggaa

SEQ ID NO: 346843 - DNA, 12 bp, Artificial Sequence
  Oligonucleotide primer for the detection of SNP TSC0044792
tccaacgaaaaa

SEQ ID NO: 346844 - DNA, 12 bp, Artificial Sequence
  Oligonucleotide primer for the detection of SNP TSC0044792
tgtttttaggat

SEQ ID NO: 346845 - DNA, 12 bp, Artificial Sequence
  Oligonucleotide primer for the detection of SNP TSC0044792
tgtttttaggac

SEQ ID NO: 346846 - DNA, 12 bp, Artificial Sequence
  Oligonucleotide primer for the detection of SNP TSC0044793
tttaccatttct

SEQ ID NO: 346847 - DNA, 12 bp, Artificial Sequence
  Oligonucleotide primer for the detection of SNP TSC0044793
aagagtaagtaa

SEQ ID NO: 346848 - DNA, 12 bp, Artificial Sequence
  Oligonucleotide primer for the detection of SNP TSC0044794
attttcttattt

SEQ ID NO: 346849 - DNA, 12 bp, Artificial Sequence
  Oligonucleotide primer for the detection of SNP TSC0044794
ttagaatttatg

SEQ ID NO: 346850 - DNA, 12 bp, Artificial Sequence
  Oligonucleotide primer for the detection of SNP TSC0044794
ttagaatttacg

SEQ ID NO: 346851 - DNA, 12 bp, Artificial Sequence
  Oligonucleotide primer for the detection of SNP TSC0044796
agtttttataga

SEQ ID NO: 346852 - DNA, 12 bp, Artificial Sequence
  Oligonucleotide primer for the detection of SNP TSC0044797
atacatcttatt

SEQ ID NO: 346853 - DNA, 12 bp, Artificial Sequence
  Oligonucleotide primer for the detection of SNP TSC0044797
atacgtcttatt

SEQ ID NO: 346854 - DNA, 12 bp, Artificial Sequence
  Oligonucleotide primer for the detection of SNP TSC0044797
agagagttgtta

SEQ ID NO: 346855 - DNA, 12 bp, Artificial Sequence
  Oligonucleotide primer for the detection of SNP TSC0044799
aaacaacccaca

SEQ ID NO: 346856 - DNA, 12 bp, Artificial Sequence
  Oligonucleotide primer for the detection of SNP TSC0044799
aagagattttat

SEQ ID NO: 346857 - DNA, 12 bp, Artificial Sequence
  Oligonucleotide primer for the detection of SNP TSC0044799
aaaaaatcctat

SEQ ID NO: 346858 - DNA, 12 bp, Artificial Sequence
  Oligonucleotide primer for the detection of SNP TSC0044799
gggtagtttata

SEQ ID NO: 346859 - DNA, 12 bp, Artificial Sequence
  Oligonucleotide primer for the detection of SNP TSC0044800
aatctcacaact

SEQ ID NO: 346860 - DNA, 12 bp, Artificial Sequence
  Oligonucleotide primer for the detection of SNP TSC0044803
tactttatctac

SEQ ID NO: 346861 - DNA, 12 bp, Artificial Sequence
  Oligonucleotide primer for the detection of SNP TSC0044803
tattaatagtga

SEQ ID NO: 346862 - DNA, 12 bp, Artificial Sequence
  Oligonucleotide primer for the detection of SNP TSC0044803
cattaacaataa

SEQ ID NO: 346863 - DNA, 12 bp, Artificial Sequence
  Oligonucleotide primer for the detection of SNP TSC0044804
taacataccaat

SEQ ID NO: 346864 - DNA, 12 bp, Artificial Sequence
  Oligonucleotide primer for the detection of SNP TSC0044804
aggaaggaaaga

SEQ ID NO: 346865 - DNA, 12 bp, Artificial Sequence
  Oligonucleotide primer for the detection of SNP TSC0044805
aatatttctata

SEQ ID NO: 346866 - DNA, 12 bp, Artificial Sequence
  Oligonucleotide primer for the detection of SNP TSC0044805
tgaagaatattt

SEQ ID NO: 346867 - DNA, 12 bp, Artificial Sequence
  Oligonucleotide primer for the detection of SNP TSC0044805
taaaaaatattt

SEQ ID NO: 346868 - DNA, 12 bp, Artificial Sequence
  Oligonucleotide primer for the detection of SNP TSC0044805
aatgtttttgta

SEQ ID NO: 346869 - DNA, 12 bp, Artificial Sequence
  Oligonucleotide primer for the detection of SNP TSC0044809
acccttatctct

SEQ ID NO: 346870 - DNA, 12 bp, Artificial Sequence
  Oligonucleotide primer for the detection of SNP TSC0044809
tatttggggtag

SEQ ID NO: 346871 - DNA, 12 bp, Artificial Sequence
  Oligonucleotide primer for the detection of SNP TSC0044813
actcttcttcct

SEQ ID NO: 346872 - DNA, 12 bp, Artificial Sequence
  Oligonucleotide primer for the detection of SNP TSC0044813
ttgggtaattta

SEQ ID NO: 346873 - DNA, 12 bp, Artificial Sequence
  Oligonucleotide primer for the detection of SNP TSC0007673
tcacaattcccc

SEQ ID NO: 346874 - DNA, 12 bp, Artificial Sequence
  Oligonucleotide primer for the detection of SNP TSC0007674
ttacaaattacc

SEQ ID NO: 346875 - DNA, 12 bp, Artificial Sequence
  Oligonucleotide primer for the detection of SNP TSC0007674
aattgtttaaaa

SEQ ID NO: 346876 - DNA, 12 bp, Artificial Sequence
  Oligonucleotide primer for the detection of SNP TSC0044814
tcctaaaccact

SEQ ID NO: 346877 - DNA, 12 bp, Artificial Sequence
  Oligonucleotide primer for the detection of SNP TSC0044814
tgggtaaggtta

SEQ ID NO: 346878 - DNA, 12 bp, Artificial Sequence
  Oligonucleotide primer for the detection of SNP TSC0044815
cctacacccatc

SEQ ID NO: 346879 - DNA, 12 bp, Artificial Sequence
  Oligonucleotide primer for the detection of SNP TSC0044815
ttggagttttga

SEQ ID NO: 346880 - DNA, 12 bp, Artificial Sequence
  Oligonucleotide primer for the detection of SNP TSC0044818
ctacctaaataa

SEQ ID NO: 346881 - DNA, 12 bp, Artificial Sequence
  Oligonucleotide primer for the detection of SNP TSC0044818
gatttaggtgtt

SEQ ID NO: 346882 - DNA, 12 bp, Artificial Sequence
  Oligonucleotide primer for the detection of SNP TSC0044818
aattcaaatact

SEQ ID NO: 346883 - DNA, 12 bp, Artificial Sequence
  Oligonucleotide primer for the detection of SNP TSC0044818
tttgaataattt

SEQ ID NO: 346884 - DNA, 12 bp, Artificial Sequence
  Oligonucleotide primer for the detection of SNP TSC0044819
aatccaaaatta

SEQ ID NO: 346885 - DNA, 12 bp, Artificial Sequence
  Oligonucleotide primer for the detection of SNP TSC0044819
atatttgttatt

SEQ ID NO: 346886 - DNA, 12 bp, Artificial Sequence
  Oligonucleotide primer for the detection of SNP TSC0044819
aaacatttacca

SEQ ID NO: 346887 - DNA, 12 bp, Artificial Sequence
  Oligonucleotide primer for the detection of SNP TSC0044819
gggtttagggtt

SEQ ID NO: 346888 - DNA, 12 bp, Artificial Sequence
  Oligonucleotide primer for the detection of SNP TSC0044821
ttatccatacta

SEQ ID NO: 346889 - DNA, 12 bp, Artificial Sequence
  Oligonucleotide primer for the detection of SNP TSC0044821
aattatgagttt

SEQ ID NO: 346890 - DNA, 12 bp, Artificial Sequence
  Oligonucleotide primer for the detection of SNP TSC0044821
aaaccataaatc

SEQ ID NO: 346891 - DNA, 12 bp, Artificial Sequence
  Oligonucleotide primer for the detection of SNP TSC0044821
ttatttatgttg

SEQ ID NO: 346892 - DNA, 12 bp, Artificial Sequence
  Oligonucleotide primer for the detection of SNP TSC0004965
ctaaatccatac

SEQ ID NO: 346893 - DNA, 12 bp, Artificial Sequence
  Oligonucleotide primer for the detection of SNP TSC0004965
tagaattttaat

SEQ ID NO: 346894 - DNA, 12 bp, Artificial Sequence
  Oligonucleotide primer for the detection of SNP TSC0004965
aaaaccctaata

SEQ ID NO: 346895 - DNA, 12 bp, Artificial Sequence
  Oligonucleotide primer for the detection of SNP TSC0004965
ttgagtttatat

SEQ ID NO: 346896 - DNA, 12 bp, Artificial Sequence
  Oligonucleotide primer for the detection of SNP TSC0004965
ttgagtttatac

SEQ ID NO: 346897 - DNA, 12 bp, Artificial Sequence
  Oligonucleotide primer for the detection of SNP TSC0004966
taaacataaata

SEQ ID NO: 346898 - DNA, 12 bp, Artificial Sequence
  Oligonucleotide primer for the detection of SNP TSC0004966
ttaattaggaat

SEQ ID NO: 346899 - DNA, 12 bp, Artificial Sequence
  Oligonucleotide primer for the detection of SNP TSC0004966
tcaatcaaaaac

SEQ ID NO: 346900 - DNA, 12 bp, Artificial Sequence
  Oligonucleotide primer for the detection of SNP TSC0004966
tagatataaatg

SEQ ID NO: 346901 - DNA, 12 bp, Artificial Sequence
  Oligonucleotide primer for the detection of SNP TSC0004967
tacctattaaaa

SEQ ID NO: 346902 - DNA, 12 bp, Artificial Sequence
  Oligonucleotide primer for the detection of SNP TSC0044822
atcaattcaata

SEQ ID NO: 346903 - DNA, 12 bp, Artificial Sequence
  Oligonucleotide primer for the detection of SNP TSC0044822
ttaataagtgat

SEQ ID NO: 346904 - DNA, 12 bp, Artificial Sequence
  Oligonucleotide primer for the detection of SNP TSC0044822
ttaatttagtgt

SEQ ID NO: 346905 - DNA, 12 bp, Artificial Sequence
  Oligonucleotide primer for the detection of SNP TSC0044824
aatctataatat

SEQ ID NO: 346906 - DNA, 12 bp, Artificial Sequence
  Oligonucleotide primer for the detection of SNP TSC0044824
tattgtattgtg

SEQ ID NO: 346907 - DNA, 12 bp, Artificial Sequence
  Oligonucleotide primer for the detection of SNP TSC0044826
acctatttctaa

SEQ ID NO: 346908 - DNA, 12 bp, Artificial Sequence
  Oligonucleotide primer for the detection of SNP TSC0044826
tttggaagtaat

SEQ ID NO: 346909 - DNA, 12 bp, Artificial Sequence
  Oligonucleotide primer for the detection of SNP TSC0044827
aataaaactctt

SEQ ID NO: 346910 - DNA, 12 bp, Artificial Sequence
  Oligonucleotide primer for the detection of SNP TSC0044827
aattgagttttt

SEQ ID NO: 346911 - DNA, 12 bp, Artificial Sequence
  Oligonucleotide primer for the detection of SNP TSC0044827
aatggggttttt

SEQ ID NO: 346912 - DNA, 12 bp, Artificial Sequence
  Oligonucleotide primer for the detection of SNP TSC0044828
agtttaggtttt

SEQ ID NO: 346913 - DNA, 12 bp, Artificial Sequence
  Oligonucleotide primer for the detection of SNP TSC0044828
aacccaaacccc

SEQ ID NO: 346914 - DNA, 12 bp, Artificial Sequence
  Oligonucleotide primer for the detection of SNP TSC0044828
ttgggagtattg

SEQ ID NO: 346915 - DNA, 12 bp, Artificial Sequence
  Oligonucleotide primer for the detection of SNP TSC0044829
acctcatactat

SEQ ID NO: 346916 - DNA, 12 bp, Artificial Sequence
  Oligonucleotide primer for the detection of SNP TSC0044830
aattttccaaca

SEQ ID NO: 346917 - DNA, 12 bp, Artificial Sequence
  Oligonucleotide primer for the detection of SNP TSC0044830
tgattgaagaga

SEQ ID NO: 346918 - DNA, 12 bp, Artificial Sequence
  Oligonucleotide primer for the detection of SNP TSC0044831
aacaatttatat

SEQ ID NO: 346919 - DNA, 12 bp, Artificial Sequence
  Oligonucleotide primer for the detection of SNP TSC0044831
ataaattataag

SEQ ID NO: 346920 - DNA, 12 bp, Artificial Sequence
  Oligonucleotide primer for the detection of SNP TSC0044834
aaacctccaaaa

SEQ ID NO: 346921 - DNA, 12 bp, Artificial Sequence
  Oligonucleotide primer for the detection of SNP TSC0044834
aaacctccgaaa

SEQ ID NO: 346922 - DNA, 12 bp, Artificial Sequence
  Oligonucleotide primer for the detection of SNP TSC0044834
tttatgtgatta

SEQ ID NO: 346923 - DNA, 12 bp, Artificial Sequence
  Oligonucleotide primer for the detection of SNP TSC0044835
ttacaacaacat

SEQ ID NO: 346924 - DNA, 12 bp, Artificial Sequence
  Oligonucleotide primer for the detection of SNP TSC0044835
atgttttttata

SEQ ID NO: 346925 - DNA, 12 bp, Artificial Sequence
  Oligonucleotide primer for the detection of SNP TSC0044835
atacctttcata

SEQ ID NO: 346926 - DNA, 12 bp, Artificial Sequence
  Oligonucleotide primer for the detection of SNP TSC0044835
ttgtaataatat

SEQ ID NO: 346927 - DNA, 12 bp, Artificial Sequence
  Oligonucleotide primer for the detection of SNP TSC0044837
aatttaaaatgt

SEQ ID NO: 346928 - DNA, 12 bp, Artificial Sequence
  Oligonucleotide primer for the detection of SNP TSC0044837
gataaattaaat

SEQ ID NO: 346929 - DNA, 12 bp, Artificial Sequence
  Oligonucleotide primer for the detection of SNP TSC0044838
cttaacaaaaca

SEQ ID NO: 346930 - DNA, 12 bp, Artificial Sequence
  Oligonucleotide primer for the detection of SNP TSC0044838
cttaacgaaaca

SEQ ID NO: 346931 - DNA, 12 bp, Artificial Sequence
  Oligonucleotide primer for the detection of SNP TSC0044838
gttttttgatta

SEQ ID NO: 346932 - DNA, 12 bp, Artificial Sequence
  Oligonucleotide primer for the detection of SNP TSC0044838
cttcttaaccaa

SEQ ID NO: 346933 - DNA, 12 bp, Artificial Sequence
  Oligonucleotide primer for the detection of SNP TSC0044838
ttttgatgaagt

SEQ ID NO: 346934 - DNA, 12 bp, Artificial Sequence
  Oligonucleotide primer for the detection of SNP TSC0044838
ttttgacgaagt

SEQ ID NO: 346935 - DNA, 12 bp, Artificial Sequence
  Oligonucleotide primer for the detection of SNP TSC0044839
acaacttacaaa

SEQ ID NO: 346936 - DNA, 12 bp, Artificial Sequence
  Oligonucleotide primer for the detection of SNP TSC0044839
acaacttacgaa

SEQ ID NO: 346937 - DNA, 12 bp, Artificial Sequence
  Oligonucleotide primer for the detection of SNP TSC0044839
ccaacctccacc

SEQ ID NO: 346938 - DNA, 12 bp, Artificial Sequence
  Oligonucleotide primer for the detection of SNP TSC0044839
gtagtttgtggg

SEQ ID NO: 346939 - DNA, 12 bp, Artificial Sequence
  Oligonucleotide primer for the detection of SNP TSC0044839
gtagtttgcggg

SEQ ID NO: 346940 - DNA, 12 bp, Artificial Sequence
  Oligonucleotide primer for the detection of SNP TSC0044842
aaaacaaacacc

SEQ ID NO: 346941 - DNA, 12 bp, Artificial Sequence
  Oligonucleotide primer for the detection of SNP TSC0044842
aaaacgaacacc

SEQ ID NO: 346942 - DNA, 12 bp, Artificial Sequence
  Oligonucleotide primer for the detection of SNP TSC0044843
gaaagatggtat

SEQ ID NO: 346943 - DNA, 12 bp, Artificial Sequence
  Oligonucleotide primer for the detection of SNP TSC0044843
gaaagatggtac

SEQ ID NO: 346944 - DNA, 12 bp, Artificial Sequence
  Oligonucleotide primer for the detection of SNP TSC0044843
ttattgaaaaat

SEQ ID NO: 346945 - DNA, 12 bp, Artificial Sequence
  unsure (3): Oligonucleotide primer for the detection of SNP TSC0044844
acncaaattacc

SEQ ID NO: 346946 - DNA, 12 bp, Artificial Sequence
  unsure (3): Oligonucleotide primer for the detection of SNP TSC0044844
gtntaggttgtt

SEQ ID NO: 346947 - DNA, 12 bp, Artificial Sequence
  Oligonucleotide primer for the detection of SNP TSC0008647
ccccacctccaa

SEQ ID NO: 346948 - DNA, 12 bp, Artificial Sequence
  Oligonucleotide primer for the detection of SNP TSC0008647
attataatcccc

SEQ ID NO: 346949 - DNA, 12 bp, Artificial Sequence
  Oligonucleotide primer for the detection of SNP TSC0044845
actcaaataact

SEQ ID NO: 346950 - DNA, 12 bp, Artificial Sequence
  Oligonucleotide primer for the detection of SNP TSC0044845
actcgaataact

SEQ ID NO: 346951 - DNA, 12 bp, Artificial Sequence
  Oligonucleotide primer for the detection of SNP TSC0044846
tggttaagttgg

SEQ ID NO: 346952 - DNA, 12 bp, Artificial Sequence
  Oligonucleotide primer for the detection of SNP TSC0004937
atatccacttat

SEQ ID NO: 346953 - DNA, 12 bp, Artificial Sequence
  Oligonucleotide primer for the detection of SNP TSC0004937
tataatccttta

SEQ ID NO: 346954 - DNA, 12 bp, Artificial Sequence
  Oligonucleotide primer for the detection of SNP TSC0044851
agattatattat

SEQ ID NO: 346955 - DNA, 12 bp, Artificial Sequence
  Oligonucleotide primer for the detection of SNP TSC0044851
caaatcacatca

SEQ ID NO: 346956 - DNA, 12 bp, Artificial Sequence
  Oligonucleotide primer for the detection of SNP TSC0044851
attttgtagaaa

SEQ ID NO: 346957 - DNA, 12 bp, Artificial Sequence
  Oligonucleotide primer for the detection of SNP TSC0008649
tatgttatatta

SEQ ID NO: 346958 - DNA, 12 bp, Artificial Sequence
  Oligonucleotide primer for the detection of SNP TSC0044852
tattatcactaa

SEQ ID NO: 346959 - DNA, 12 bp, Artificial Sequence
  Oligonucleotide primer for the detection of SNP TSC0044852
ttttatcttact

SEQ ID NO: 346960 - DNA, 12 bp, Artificial Sequence
  Oligonucleotide primer for the detection of SNP TSC0044852
tgttattattga

SEQ ID NO: 346961 - DNA, 12 bp, Artificial Sequence
  Oligonucleotide primer for the detection of SNP TSC0044853
ccaatcttaccc

SEQ ID NO: 346962 - DNA, 12 bp, Artificial Sequence
  Oligonucleotide primer for the detection of SNP TSC0044853
ggtgaatgaaag

SEQ ID NO: 346963 - DNA, 12 bp, Artificial Sequence
  Oligonucleotide primer for the detection of SNP TSC0044856
gtattttgaatt

SEQ ID NO: 346964 - DNA, 12 bp, Artificial Sequence
  Oligonucleotide primer for the detection of SNP TSC0044856
gtattttgaatc

SEQ ID NO: 346965 - DNA, 12 bp, Artificial Sequence
  Oligonucleotide primer for the detection of SNP TSC0044856
aacattttaaat

SEQ ID NO: 346966 - DNA, 12 bp, Artificial Sequence
  Oligonucleotide primer for the detection of SNP TSC0044856
taaaatatgaaa

SEQ ID NO: 346967 - DNA, 12 bp, Artificial Sequence
  Oligonucleotide primer for the detection of SNP TSC0044858
actatctactcg

SEQ ID NO: 346968 - DNA, 12 bp, Artificial Sequence
  Oligonucleotide primer for the detection of SNP TSC0044858
ggtaataggagt

SEQ ID NO: 346969 - DNA, 12 bp, Artificial Sequence
  Oligonucleotide primer for the detection of SNP TSC0044858
aacaacaaaaac

SEQ ID NO: 346970 - DNA, 12 bp, Artificial Sequence
  Oligonucleotide primer for the detection of SNP TSC0044858
gacaacaaaaac

SEQ ID NO: 346971 - DNA, 12 bp, Artificial Sequence
  Oligonucleotide primer for the detection of SNP TSC0044858
gttgtttgtttg

SEQ ID NO: 346972 - DNA, 12 bp, Artificial Sequence
  Oligonucleotide primer for the detection of SNP TSC0044858
gttgtttgttcg

SEQ ID NO: 346973 - DNA, 12 bp, Artificial Sequence
  Oligonucleotide primer for the detection of SNP TSC0007707
cccaactttccc

SEQ ID NO: 346974 - DNA, 12 bp, Artificial Sequence
  Oligonucleotide primer for the detection of SNP TSC0044860
tgaaatttagtt

SEQ ID NO: 346975 - DNA, 12 bp, Artificial Sequence
  Oligonucleotide primer for the detection of SNP TSC0044860
aaaatccaatta

SEQ ID NO: 346976 - DNA, 12 bp, Artificial Sequence
  Oligonucleotide primer for the detection of SNP TSC0044860
gggttaaaagtt

SEQ ID NO: 346977 - DNA, 12 bp, Artificial Sequence
  Oligonucleotide primer for the detection of SNP TSC0044860
gggttaaaagtc

SEQ ID NO: 346978 - DNA, 12 bp, Artificial Sequence
  Oligonucleotide primer for the detection of SNP TSC0044861
taaacactttat

SEQ ID NO: 346979 - DNA, 12 bp, Artificial Sequence
  Oligonucleotide primer for the detection of SNP TSC0044861
gttgtatgtaaa

SEQ ID NO: 346980 - DNA, 12 bp, Artificial Sequence
  Oligonucleotide primer for the detection of SNP TSC0044862
accgaaaaaaaa

SEQ ID NO: 346981 - DNA, 12 bp, Artificial Sequence
  Oligonucleotide primer for the detection of SNP TSC0044862
aatggaatagtt

SEQ ID NO: 346982 - DNA, 12 bp, Artificial Sequence
  Oligonucleotide primer for the detection of SNP TSC0044862
aatggaatagtc

SEQ ID NO: 346983 - DNA, 12 bp, Artificial Sequence
  Oligonucleotide primer for the detection of SNP TSC0044862
tattgaggagga

SEQ ID NO: 346984 - DNA, 12 bp, Artificial Sequence
  Oligonucleotide primer for the detection of SNP TSC0044862
tatcgaggagga

SEQ ID NO: 346985 - DNA, 12 bp, Artificial Sequence
  Oligonucleotide primer for the detection of SNP TSC0005687
tatctccataca

SEQ ID NO: 346986 - DNA, 12 bp, Artificial Sequence
  Oligonucleotide primer for the detection of SNP TSC0005687
gttatgaaggga

SEQ ID NO: 346987 - DNA, 12 bp, Artificial Sequence
  Oligonucleotide primer for the detection of SNP TSC0044863
ctattcaacaaa

SEQ ID NO: 346988 - DNA, 12 bp, Artificial Sequence
  Oligonucleotide primer for the detection of SNP TSC0044863
aaggaaggtggg

SEQ ID NO: 346989 - DNA, 12 bp, Artificial Sequence
  Oligonucleotide primer for the detection of SNP TSC0044863
ttatttagtaga

SEQ ID NO: 346990 - DNA, 12 bp, Artificial Sequence
  Oligonucleotide primer for the detection of SNP TSC0001469
atcaatttccaa

SEQ ID NO: 346991 - DNA, 12 bp, Artificial Sequence
  Oligonucleotide primer for the detection of SNP TSC0001469
ttaggggttatt

SEQ ID NO: 346992 - DNA, 12 bp, Artificial Sequence
  Oligonucleotide primer for the detection of SNP TSC0001469
ttaggggttatc

SEQ ID NO: 346993 - DNA, 12 bp, Artificial Sequence
  Oligonukleotid-Primer
atcaaaaatcat

SEQ ID NO: 346994 - DNA, 12 bp, Artificial Sequence
  Oligonucleotide primer for the detection of SNP TSC0001469
gattagttttta

SEQ ID NO: 346995 - DNA, 12 bp, Artificial Sequence
  Oligonucleotide primer for the detection of SNP TSC0001470
aataacaactca

SEQ ID NO: 346996 - DNA, 12 bp, Artificial Sequence
  Oligonucleotide primer for the detection of SNP TSC0001470
aaaagtaagaat

SEQ ID NO: 346997 - DNA, 12 bp, Artificial Sequence
  Oligonucleotide primer for the detection of SNP TSC0001470
agataatagttt

SEQ ID NO: 346998 - DNA, 12 bp, Artificial Sequence
  Oligonucleotide primer for the detection of SNP TSC0044864
aaggaaatgaaa

SEQ ID NO: 346999 - DNA, 12 bp, Artificial Sequence
  Oligonucleotide primer for the detection of SNP TSC0044865
aaatcttttcct

SEQ ID NO: 347000 - DNA, 12 bp, Artificial Sequence
  Oligonucleotide primer for the detection of SNP TSC0044865
ataaggggtatg

SEQ ID NO: 347001 - DNA, 12 bp, Artificial Sequence
  Oligonucleotide primer for the detection of SNP TSC0044865
acaaaaaatata

SEQ ID NO: 347002 - DNA, 12 bp, Artificial Sequence
  Oligonucleotide primer for the detection of SNP TSC0044866
gatatattaatt

SEQ ID NO: 347003 - DNA, 12 bp, Artificial Sequence
  Oligonucleotide primer for the detection of SNP TSC0044866
aacatactaatt

SEQ ID NO: 347004 - DNA, 12 bp, Artificial Sequence
  Oligonucleotide primer for the detection of SNP TSC0044866
ggaattaaaatt

SEQ ID NO: 347005 - DNA, 12 bp, Artificial Sequence
  Oligonucleotide primer for the detection of SNP TSC0044867
atacaaccattt

SEQ ID NO: 347006 - DNA, 12 bp, Artificial Sequence
  Oligonucleotide primer for the detection of SNP TSC0044867
tattaggtatga

SEQ ID NO: 347007 - DNA, 12 bp, Artificial Sequence
  Oligonucleotide primer for the detection of SNP TSC0008421
ggtttttagtat

SEQ ID NO: 347008 - DNA, 12 bp, Artificial Sequence
  Oligonucleotide primer for the detection of SNP TSC0008421
ggtttttagtac

SEQ ID NO: 347009 - DNA, 12 bp, Artificial Sequence
  Oligonucleotide primer for the detection of SNP TSC0008421
caactcccaaca

SEQ ID NO: 347010 - DNA, 12 bp, Artificial Sequence
  Oligonucleotide primer for the detection of SNP TSC0008421
cgactcccaaca

SEQ ID NO: 347011 - DNA, 12 bp, Artificial Sequence
  Oligonucleotide primer for the detection of SNP TSC0008421
taggggaggggt

SEQ ID NO: 347012 - DNA, 12 bp, Artificial Sequence
  Oligonucleotide primer for the detection of SNP TSC0008422
acatataaacaa

SEQ ID NO: 347013 - DNA, 12 bp, Artificial Sequence
  Oligonucleotide primer for the detection of SNP TSC0008422
acgtataaacaa

SEQ ID NO: 347014 - DNA, 12 bp, Artificial Sequence
  Oligonucleotide primer for the detection of SNP TSC0008422
aggtttatttgt

SEQ ID NO: 347015 - DNA, 12 bp, Artificial Sequence
  Oligonucleotide primer for the detection of SNP TSC0008422
aaacccacctac

SEQ ID NO: 347016 - DNA, 12 bp, Artificial Sequence
  Oligonucleotide primer for the detection of SNP TSC0008422
atgtgtggatag

SEQ ID NO: 347017 - DNA, 12 bp, Artificial Sequence
  Oligonucleotide primer for the detection of SNP TSC0008422
acgtgtggatag

SEQ ID NO: 347018 - DNA, 12 bp, Artificial Sequence
  Oligonucleotide primer for the detection of SNP TSC0044873
tataaaagaggt

SEQ ID NO: 347019 - DNA, 12 bp, Artificial Sequence
  Oligonucleotide primer for the detection of SNP TSC0044874
acaataacaaca

SEQ ID NO: 347020 - DNA, 12 bp, Artificial Sequence
  Oligonucleotide primer for the detection of SNP TSC0044874
tccacaaataac

SEQ ID NO: 347021 - DNA, 12 bp, Artificial Sequence
  Oligonucleotide primer for the detection of SNP TSC0044874
tagtggtagtat

SEQ ID NO: 347022 - DNA, 12 bp, Artificial Sequence
  Oligonucleotide primer for the detection of SNP TSC0000875
ttttaaattatc

SEQ ID NO: 347023 - DNA, 12 bp, Artificial Sequence
  Oligonucleotide primer for the detection of SNP TSC0001703
atttcaattacc

SEQ ID NO: 347024 - DNA, 12 bp, Artificial Sequence
  Oligonucleotide primer for the detection of SNP TSC0001703
gattttagttga

SEQ ID NO: 347025 - DNA, 12 bp, Artificial Sequence
  Oligonucleotide primer for the detection of SNP TSC0001703
aattccaattaa

SEQ ID NO: 347026 - DNA, 12 bp, Artificial Sequence
  Oligonucleotide primer for the detection of SNP TSC0044875
tattttttgaag

SEQ ID NO: 347027 - DNA, 12 bp, Artificial Sequence
  Oligonucleotide primer for the detection of SNP TSC0044879
ttacccttaaat

SEQ ID NO: 347028 - DNA, 12 bp, Artificial Sequence
  Oligonucleotide primer for the detection of SNP TSC0044879
tgagggaaaaag

SEQ ID NO: 347029 - DNA, 12 bp, Artificial Sequence
  Oligonucleotide primer for the detection of SNP TSC0001424
tttatatttcca

SEQ ID NO: 347030 - DNA, 12 bp, Artificial Sequence
  Oligonucleotide primer for the detection of SNP TSC0001424
tttgagtttggt

SEQ ID NO: 347031 - DNA, 12 bp, Artificial Sequence
  Oligonucleotide primer for the detection of SNP TSC0001424
cttaaatttaat

SEQ ID NO: 347032 - DNA, 12 bp, Artificial Sequence
  Oligonucleotide primer for the detection of SNP TSC0001425
ttatgagatgtg

SEQ ID NO: 347033 - DNA, 12 bp, Artificial Sequence
  Oligonucleotide primer for the detection of SNP TSC0001425
ttatgagatgcg

SEQ ID NO: 347034 - DNA, 12 bp, Artificial Sequence
  Oligonucleotide primer for the detection of SNP TSC0001425
cataaaatacaa

SEQ ID NO: 347035 - DNA, 12 bp, Artificial Sequence
  Oligonucleotide primer for the detection of SNP TSC0001425
cataaaatacga

SEQ ID NO: 347036 - DNA, 12 bp, Artificial Sequence
  Oligonucleotide primer for the detection of SNP TSC0044881
aatattaactta

SEQ ID NO: 347037 - DNA, 12 bp, Artificial Sequence
  Oligonucleotide primer for the detection of SNP TSC0044881
atgaggtgtaat

SEQ ID NO: 347038 - DNA, 12 bp, Artificial Sequence
  Oligonucleotide primer for the detection of SNP TSC0044881
acgaggtgtaat

SEQ ID NO: 347039 - DNA, 12 bp, Artificial Sequence
  Oligonucleotide primer for the detection of SNP TSC0044881
acaaaatacaat

SEQ ID NO: 347040 - DNA, 12 bp, Artificial Sequence
  Oligonucleotide primer for the detection of SNP TSC0044881
acgaaatacaat

SEQ ID NO: 347041 - DNA, 12 bp, Artificial Sequence
  Oligonucleotide primer for the detection of SNP TSC0044881
atgttaatttat

SEQ ID NO: 347042 - DNA, 12 bp, Artificial Sequence
  Oligonucleotide primer for the detection of SNP TSC0044883
aaaaatcctcaa

SEQ ID NO: 347043 - DNA, 12 bp, Artificial Sequence
  Oligonucleotide primer for the detection of SNP TSC0044883
tgataagaatta

SEQ ID NO: 347044 - DNA, 12 bp, Artificial Sequence
  Oligonucleotide primer for the detection of SNP TSC0044883
taacaaaaacca

SEQ ID NO: 347045 - DNA, 12 bp, Artificial Sequence
  Oligonucleotide primer for the detection of SNP TSC0044885
taaattaagggg

SEQ ID NO: 347046 - DNA, 12 bp, Artificial Sequence
  Oligonucleotide primer for the detection of SNP TSC0044885
tgaaaattgtat

SEQ ID NO: 347047 - DNA, 12 bp, Artificial Sequence
  Oligonucleotide primer for the detection of SNP TSC0044886
atttactttatt

SEQ ID NO: 347048 - DNA, 12 bp, Artificial Sequence
  Oligonucleotide primer for the detection of SNP TSC0044886
aataatatatta

SEQ ID NO: 347049 - DNA, 12 bp, Artificial Sequence
  Oligonucleotide primer for the detection of SNP TSC0044887
caaatacacttc

SEQ ID NO: 347050 - DNA, 12 bp, Artificial Sequence
  Oligonucleotide primer for the detection of SNP TSC0044887
attatgatatta

SEQ ID NO: 347051 - DNA, 12 bp, Artificial Sequence
  Oligonucleotide primer for the detection of SNP TSC0005524
tcaatctctaat

SEQ ID NO: 347052 - DNA, 12 bp, Artificial Sequence
  Oligonucleotide primer for the detection of SNP TSC0005524
aatgattattta

SEQ ID NO: 347053 - DNA, 12 bp, Artificial Sequence
  Oligonucleotide primer for the detection of SNP TSC0009851
tataatctacct

SEQ ID NO: 347054 - DNA, 12 bp, Artificial Sequence
  Oligonucleotide primer for the detection of SNP TSC0009851
ttaagtatggtg

SEQ ID NO: 347055 - DNA, 12 bp, Artificial Sequence
  Oligonucleotide primer for the detection of SNP TSC0009851
ttaaatataata

SEQ ID NO: 347056 - DNA, 12 bp, Artificial Sequence
  Oligonucleotide primer for the detection of SNP TSC0000213
gtatttggtatt

SEQ ID NO: 347057 - DNA, 12 bp, Artificial Sequence
  Oligonucleotide primer for the detection of SNP TSC0000213
aacacttaatac

SEQ ID NO: 347058 - DNA, 12 bp, Artificial Sequence
  Oligonucleotide primer for the detection of SNP TSC0044896
tttcataactta

SEQ ID NO: 347059 - DNA, 12 bp, Artificial Sequence
  Oligonucleotide primer for the detection of SNP TSC0044896
tttcgtaactta

SEQ ID NO: 347060 - DNA, 12 bp, Artificial Sequence
  Oligonucleotide primer for the detection of SNP TSC0044896
agaatgttgttg

SEQ ID NO: 347061 - DNA, 12 bp, Artificial Sequence
  Oligonucleotide primer for the detection of SNP TSC0044896
agaacgttgttg

SEQ ID NO: 347062 - DNA, 12 bp, Artificial Sequence
  Oligonucleotide primer for the detection of SNP TSC0044896
agaatgttgtcg

SEQ ID NO: 347063 - DNA, 12 bp, Artificial Sequence
  Oligonucleotide primer for the detection of SNP TSC0044896
agaacgttgtcg

SEQ ID NO: 347064 - DNA, 12 bp, Artificial Sequence
  Oligonucleotide primer for the detection of SNP TSC0044896
aaaacactatcg

SEQ ID NO: 347065 - DNA, 12 bp, Artificial Sequence
  Oligonucleotide primer for the detection of SNP TSC0044896
aaaacgctatcg

SEQ ID NO: 347066 - DNA, 12 bp, Artificial Sequence
  Oligonucleotide primer for the detection of SNP TSC0044896
ttttgtagttta

SEQ ID NO: 347067 - DNA, 12 bp, Artificial Sequence
  Oligonucleotide primer for the detection of SNP TSC0044896
tttcgtagttta

SEQ ID NO: 347068 - DNA, 12 bp, Artificial Sequence
  Oligonucleotide primer for the detection of SNP TSC0044897
acttttataaaa

SEQ ID NO: 347069 - DNA, 12 bp, Artificial Sequence
  Oligonucleotide primer for the detection of SNP TSC0044897
aatgtttttagt

SEQ ID NO: 347070 - DNA, 12 bp, Artificial Sequence
  Oligonucleotide primer for the detection of SNP TSC0044897
aataccttcaac

SEQ ID NO: 347071 - DNA, 12 bp, Artificial Sequence
  Oligonucleotide primer for the detection of SNP TSC0044897
aatttttgtaag

SEQ ID NO: 347072 - DNA, 12 bp, Artificial Sequence
  Oligonucleotide primer for the detection of SNP TSC0044898
gaattgtaattt

SEQ ID NO: 347073 - DNA, 12 bp, Artificial Sequence
  Oligonucleotide primer for the detection of SNP TSC0044898
aattacaactta

SEQ ID NO: 347074 - DNA, 12 bp, Artificial Sequence
  Oligonucleotide primer for the detection of SNP TSC0044898
attttaatatag

SEQ ID NO: 347075 - DNA, 12 bp, Artificial Sequence
  Oligonucleotide primer for the detection of SNP TSC0044900
gtttttagtgat

SEQ ID NO: 347076 - DNA, 12 bp, Artificial Sequence
  Oligonucleotide primer for the detection of SNP TSC0044900
ttggtttatatt

SEQ ID NO: 347077 - DNA, 12 bp, Artificial Sequence
  Oligonucleotide primer for the detection of SNP TSC0044903
ctttataaatta

SEQ ID NO: 347078 - DNA, 12 bp, Artificial Sequence
  Oligonucleotide primer for the detection of SNP TSC0044903
attaaagattgg

SEQ ID NO: 347079 - DNA, 12 bp, Artificial Sequence
  Oligonucleotide primer for the detection of SNP TSC0044903
tttttatgaatt

SEQ ID NO: 347080 - DNA, 12 bp, Artificial Sequence
  Oligonucleotide primer for the detection of SNP TSC0000892
catcaaaatcat

SEQ ID NO: 347081 - DNA, 12 bp, Artificial Sequence
  Oligonucleotide primer for the detection of SNP TSC0000892
gtaaaagaagat

SEQ ID NO: 347082 - DNA, 12 bp, Artificial Sequence
  Oligonucleotide primer for the detection of SNP TSC0000892
tattaagattat

SEQ ID NO: 347083 - DNA, 12 bp, Artificial Sequence
  Oligonucleotide primer for the detection of SNP TSC0044907
aacaattctact

SEQ ID NO: 347084 - DNA, 12 bp, Artificial Sequence
  Oligonucleotide primer for the detection of SNP TSC0000580
cttcaaaaactc

SEQ ID NO: 347085 - DNA, 12 bp, Artificial Sequence
  Oligonucleotide primer for the detection of SNP TSC0000580
gaataaggttaa

SEQ ID NO: 347086 - DNA, 12 bp, Artificial Sequence
  Oligonucleotide primer for the detection of SNP TSC0009899
aaaaatactcta

SEQ ID NO: 347087 - DNA, 12 bp, Artificial Sequence
  Oligonucleotide primer for the detection of SNP TSC0009899
ttattaggaatt

SEQ ID NO: 347088 - DNA, 12 bp, Artificial Sequence
  Oligonucleotide primer for the detection of SNP TSC0009899
ttttatcaaaaa

SEQ ID NO: 347089 - DNA, 12 bp, Artificial Sequence
  Oligonucleotide primer for the detection of SNP TSC0009899
gaagatattttg

SEQ ID NO: 347090 - DNA, 12 bp, Artificial Sequence
  Oligonucleotide primer for the detection of SNP TSC0009900
ccacataataat

SEQ ID NO: 347091 - DNA, 12 bp, Artificial Sequence
  Oligonucleotide primer for the detection of SNP TSC0009900
ataatagttttg

SEQ ID NO: 347092 - DNA, 12 bp, Artificial Sequence
  Oligonucleotide primer for the detection of SNP TSC0005462
ccctaactaata

SEQ ID NO: 347093 - DNA, 12 bp, Artificial Sequence
  Oligonucleotide primer for the detection of SNP TSC0005462
gtgaattttttt

SEQ ID NO: 347094 - DNA, 12 bp, Artificial Sequence
  Oligonucleotide primer for the detection of SNP TSC0005462
ataaatttctct

SEQ ID NO: 347095 - DNA, 12 bp, Artificial Sequence
  Oligonucleotide primer for the detection of SNP TSC0005462
ttttgattgata

SEQ ID NO: 347096 - DNA, 12 bp, Artificial Sequence
  Oligonucleotide primer for the detection of SNP TSC0044909
atcttatcacac

SEQ ID NO: 347097 - DNA, 12 bp, Artificial Sequence
  Oligonucleotide primer for the detection of SNP TSC0044910
ccaacatacaca

SEQ ID NO: 347098 - DNA, 12 bp, Artificial Sequence
  Oligonucleotide primer for the detection of SNP TSC0044910
ccaacatacgca

SEQ ID NO: 347099 - DNA, 12 bp, Artificial Sequence
  Oligonucleotide primer for the detection of SNP TSC0044910
ccgacatacaca

SEQ ID NO: 347100 - DNA, 12 bp, Artificial Sequence
  Oligonucleotide primer for the detection of SNP TSC0044910
ccgacatacgca

SEQ ID NO: 347101 - DNA, 12 bp, Artificial Sequence
  Oligonucleotide primer for the detection of SNP TSC0044910
tttgttgggaag

SEQ ID NO: 347102 - DNA, 12 bp, Artificial Sequence
  Oligonukleotid-Primer
aaccccaattct

SEQ ID NO: 347103 - DNA, 12 bp, Artificial Sequence
  Oligonucleotide primer for the detection of SNP TSC0044911
tttaagttaaaa

SEQ ID NO: 347104 - DNA, 12 bp, Artificial Sequence
  Oligonucleotide primer for the detection of SNP TSC0044911
aattttaatttt

SEQ ID NO: 347105 - DNA, 12 bp, Artificial Sequence
  Oligonucleotide primer for the detection of SNP TSC0044912
aaactttaactt

SEQ ID NO: 347106 - DNA, 12 bp, Artificial Sequence
  Oligonucleotide primer for the detection of SNP TSC0044912
gaactttaactt

SEQ ID NO: 347107 - DNA, 12 bp, Artificial Sequence
  Oligonucleotide primer for the detection of SNP TSC0044913
tatttaaaagtg

SEQ ID NO: 347108 - DNA, 12 bp, Artificial Sequence
  Oligonucleotide primer for the detection of SNP TSC0008990
ctatatccccac

SEQ ID NO: 347109 - DNA, 12 bp, Artificial Sequence
  Oligonucleotide primer for the detection of SNP TSC0008990
agatgagattta

SEQ ID NO: 347110 - DNA, 12 bp, Artificial Sequence
  Oligonukleotid-Primer
gtttttagaaat

SEQ ID NO: 347111 - DNA, 12 bp, Artificial Sequence
  Oligonucleotide primer for the detection of SNP TSC0044915
tatttatttctt

SEQ ID NO: 347112 - DNA, 12 bp, Artificial Sequence
  Oligonucleotide primer for the detection of SNP TSC0044915
tgagaggagaaa

SEQ ID NO: 347113 - DNA, 12 bp, Artificial Sequence
  Oligonucleotide primer for the detection of SNP TSC0044916
tagtgttttatt

SEQ ID NO: 347114 - DNA, 12 bp, Artificial Sequence
  Oligonukleotid-Primer
taatatcttacc

SEQ ID NO: 347115 - DNA, 12 bp, Artificial Sequence
  Oligonucleotide primer for the detection of SNP TSC0044916
ggaaaagtgaaa

SEQ ID NO: 347116 - DNA, 12 bp, Artificial Sequence
  Oligonucleotide primer for the detection of SNP TSC0044917
tatcaaaactcc

SEQ ID NO: 347117 - DNA, 12 bp, Artificial Sequence
  Oligonucleotide primer for the detection of SNP TSC0044917
gaattaattatt

SEQ ID NO: 347118 - DNA, 12 bp, Artificial Sequence
  Oligonucleotide primer for the detection of SNP TSC0044917
actaattattaa

SEQ ID NO: 347119 - DNA, 12 bp, Artificial Sequence
  Oligonucleotide primer for the detection of SNP TSC0044919
aactttaaacat

SEQ ID NO: 347120 - DNA, 12 bp, Artificial Sequence
  Oligonucleotide primer for the detection of SNP TSC0044919
attaaggaataa

SEQ ID NO: 347121 - DNA, 12 bp, Artificial Sequence
  Oligonucleotide primer for the detection of SNP TSC0044920
caatcactaaat

SEQ ID NO: 347122 - DNA, 12 bp, Artificial Sequence
  Oligonucleotide primer for the detection of SNP TSC0044920
gtttgttttaga

SEQ ID NO: 347123 - DNA, 12 bp, Artificial Sequence
  Oligonucleotide primer for the detection of SNP TSC0044921
ctataaaaacac

SEQ ID NO: 347124 - DNA, 12 bp, Artificial Sequence
  Oligonucleotide primer for the detection of SNP TSC0044921
tctctctttaca

SEQ ID NO: 347125 - DNA, 12 bp, Artificial Sequence
  Oligonucleotide primer for the detection of SNP TSC0044921
ttataggaatat

SEQ ID NO: 347126 - DNA, 12 bp, Artificial Sequence
  Oligonukleotid-Primer
ttataggaatac

SEQ ID NO: 347127 - DNA, 12 bp, Artificial Sequence
  Oligonucleotide primer for the detection of SNP TSC0044925
agttaaattatg

SEQ ID NO: 347128 - DNA, 12 bp, Artificial Sequence
  Oligonucleotide primer for the detection of SNP TSC0044925
taaaatagagtt

SEQ ID NO: 347129 - DNA, 12 bp, Artificial Sequence
  Oligonucleotide primer for the detection of SNP TSC0044926
tccaaattaatc

SEQ ID NO: 347130 - DNA, 12 bp, Artificial Sequence
  Oligonucleotide primer for the detection of SNP TSC0044926
aagggttattta

SEQ ID NO: 347131 - DNA, 12 bp, Artificial Sequence
  Oligonucleotide primer for the detection of SNP TSC0044927
tacaaaaatctt

SEQ ID NO: 347132 - DNA, 12 bp, Artificial Sequence
  Oligonucleotide primer for the detection of SNP TSC0044927
aatgttaggaaa

SEQ ID NO: 347133 - DNA, 12 bp, Artificial Sequence
  Oligonucleotide primer for the detection of SNP TSC0044928
aaaaactttcaa

SEQ ID NO: 347134 - DNA, 12 bp, Artificial Sequence
  Oligonucleotide primer for the detection of SNP TSC0044928
tttatgaaattt

SEQ ID NO: 347135 - DNA, 12 bp, Artificial Sequence
  Oligonucleotide primer for the detection of SNP TSC0044928
ccataaaaccta

SEQ ID NO: 347136 - DNA, 12 bp, Artificial Sequence
  Oligonucleotide primer for the detection of SNP TSC0044928
agaggtttttag

SEQ ID NO: 347137 - DNA, 12 bp, Artificial Sequence
  Oligonucleotide primer for the detection of SNP TSC0000270
cattttaatatt

SEQ ID NO: 347138 - DNA, 12 bp, Artificial Sequence
  Oligonukleotid-Primer
gttttagaaaag

SEQ ID NO: 347139 - DNA, 12 bp, Artificial Sequence
  Oligonucleotide primer for the detection of SNP TSC0006451
ttttcattaata

SEQ ID NO: 347140 - DNA, 12 bp, Artificial Sequence
  Oligonucleotide primer for the detection of SNP TSC0006451
ttttcgttaata

SEQ ID NO: 347141 - DNA, 12 bp, Artificial Sequence
  Oligonucleotide primer for the detection of SNP TSC0006451
tatagttattat

SEQ ID NO: 347142 - DNA, 12 bp, Artificial Sequence
  Oligonucleotide primer for the detection of SNP TSC0006451
tataattattat

SEQ ID NO: 347143 - DNA, 12 bp, Artificial Sequence
  Oligonucleotide primer for the detection of SNP TSC0006451
ttttcgttgata

SEQ ID NO: 347144 - DNA, 12 bp, Artificial Sequence
  Oligonucleotide primer for the detection of SNP TSC0006452
aactattttaaa

SEQ ID NO: 347145 - DNA, 12 bp, Artificial Sequence
  Oligonucleotide primer for the detection of SNP TSC0006452
ttaatgaaaaat

SEQ ID NO: 347146 - DNA, 12 bp, Artificial Sequence
  Oligonucleotide primer for the detection of SNP TSC0006452
tcaacgaaaaat

SEQ ID NO: 347147 - DNA, 12 bp, Artificial Sequence
  Oligonucleotide primer for the detection of SNP TSC0000693
caaccccaaaac

SEQ ID NO: 347148 - DNA, 12 bp, Artificial Sequence
  Oligonucleotide primer for the detection of SNP TSC0000694
ttaaaactattc

SEQ ID NO: 347149 - DNA, 12 bp, Artificial Sequence
  Oligonucleotide primer for the detection of SNP TSC0001015
tatctcatccac

SEQ ID NO: 347150 - DNA, 12 bp, Artificial Sequence
  Oligonucleotide primer for the detection of SNP TSC0001015
tatggtgggagg

SEQ ID NO: 347151 - DNA, 12 bp, Artificial Sequence
  Oligonucleotide primer for the detection of SNP TSC0000586
tttttatgattt

SEQ ID NO: 347152 - DNA, 12 bp, Artificial Sequence
  Oligonucleotide primer for the detection of SNP TSC0000586
acccccataatt

SEQ ID NO: 347153 - DNA, 12 bp, Artificial Sequence
  Oligonucleotide primer for the detection of SNP TSC0000586
gtgggaagtaat

SEQ ID NO: 347154 - DNA, 12 bp, Artificial Sequence
  Oligonucleotide primer for the detection of SNP TSC0000587
tcaattacttcc

SEQ ID NO: 347155 - DNA, 12 bp, Artificial Sequence
  Oligonucleotide primer for the detection of SNP TSC0000587
gtaggaatttgg

SEQ ID NO: 347156 - DNA, 12 bp, Artificial Sequence
  Oligonucleotide primer for the detection of SNP TSC0044936
atttggtgtttt

SEQ ID NO: 347157 - DNA, 12 bp, Artificial Sequence
  Oligonucleotide primer for the detection of SNP TSC0044936
acttaataccct

SEQ ID NO: 347158 - DNA, 12 bp, Artificial Sequence
  Oligonucleotide primer for the detection of SNP TSC0044937
ctatacattaat

SEQ ID NO: 347159 - DNA, 12 bp, Artificial Sequence
  Oligonucleotide primer for the detection of SNP TSC0044937
tagttgttttag

SEQ ID NO: 347160 - DNA, 12 bp, Artificial Sequence
  Oligonucleotide primer for the detection of SNP TSC0044937
caactactccaa

SEQ ID NO: 347161 - DNA, 12 bp, Artificial Sequence
  Oligonucleotide primer for the detection of SNP TSC0044937
ttgtatattggt

SEQ ID NO: 347162 - DNA, 12 bp, Artificial Sequence
  Oligonucleotide primer for the detection of SNP TSC0044938
aaacccaacacc

SEQ ID NO: 347163 - DNA, 12 bp, Artificial Sequence
  Oligonucleotide primer for the detection of SNP TSC0044938
tggtagttttta

SEQ ID NO: 347164 - DNA, 12 bp, Artificial Sequence
  Oligonucleotide primer for the detection of SNP TSC0044938
taacaacttcca

SEQ ID NO: 347165 - DNA, 12 bp, Artificial Sequence
  Oligonucleotide primer for the detection of SNP TSC0044938
aggtttaatatt

SEQ ID NO: 347166 - DNA, 12 bp, Artificial Sequence
  Oligonucleotide primer for the detection of SNP TSC0044940
tctaaaaaataa

SEQ ID NO: 347167 - DNA, 12 bp, Artificial Sequence
  Oligonucleotide primer for the detection of SNP TSC0044940
tggaaaaggtaa

SEQ ID NO: 347168 - DNA, 12 bp, Artificial Sequence
  Oligonucleotide primer for the detection of SNP TSC0044941
ccctaccaacat

SEQ ID NO: 347169 - DNA, 12 bp, Artificial Sequence
  Oligonucleotide primer for the detection of SNP TSC0044941
ggttaaaattaa

SEQ ID NO: 347170 - DNA, 12 bp, Artificial Sequence
  Oligonucleotide primer for the detection of SNP TSC0044942
acataacactta

SEQ ID NO: 347171 - DNA, 12 bp, Artificial Sequence
  Oligonucleotide primer for the detection of SNP TSC0044942
ctcaaaaataat

SEQ ID NO: 347172 - DNA, 12 bp, Artificial Sequence
  Oligonucleotide primer for the detection of SNP TSC0044942
atataatattta

SEQ ID NO: 347173 - DNA, 12 bp, Artificial Sequence
  Oligonucleotide primer for the detection of SNP TSC0044943
aacaaaaattcc

SEQ ID NO: 347174 - DNA, 12 bp, Artificial Sequence
  Oligonucleotide primer for the detection of SNP TSC0044943
aatttttgttta

SEQ ID NO: 347175 - DNA, 12 bp, Artificial Sequence
  Oligonucleotide primer for the detection of SNP TSC0044944
ttgggtggggat

SEQ ID NO: 347176 - DNA, 12 bp, Artificial Sequence
  Oligonucleotide primer for the detection of SNP TSC0044945
atttcaactacc

SEQ ID NO: 347177 - DNA, 12 bp, Artificial Sequence
  Oligonucleotide primer for the detection of SNP TSC0044947
taataaaaacat

SEQ ID NO: 347178 - DNA, 12 bp, Artificial Sequence
  Oligonucleotide primer for the detection of SNP TSC0044947
tttaagtaggta

SEQ ID NO: 347179 - DNA, 12 bp, Artificial Sequence
  Oligonucleotide primer for the detection of SNP TSC0008130
ttctacataaca

SEQ ID NO: 347180 - DNA, 12 bp, Artificial Sequence
  Oligonucleotide primer for the detection of SNP TSC0008130
agaaatgtatat

SEQ ID NO: 347181 - DNA, 12 bp, Artificial Sequence
  Oligonucleotide primer for the detection of SNP TSC0008959
ctatttttaaat

SEQ ID NO: 347182 - DNA, 12 bp, Artificial Sequence
  Oligonucleotide primer for the detection of SNP TSC0008959
ttaatgaatttg

SEQ ID NO: 347183 - DNA, 12 bp, Artificial Sequence
  Oligonucleotide primer for the detection of SNP TSC0000286
tctaacatacat

SEQ ID NO: 347184 - DNA, 12 bp, Artificial Sequence
  Oligonucleotide primer for the detection of SNP TSC0000287
tatattcctctt

SEQ ID NO: 347185 - DNA, 12 bp, Artificial Sequence
  Oligonucleotide primer for the detection of SNP TSC0000287
ttaaaaattgag

SEQ ID NO: 347186 - DNA, 12 bp, Artificial Sequence
  Oligonucleotide primer for the detection of SNP TSC0001649
ctacttaccatt

SEQ ID NO: 347187 - DNA, 12 bp, Artificial Sequence
  Oligonucleotide primer for the detection of SNP TSC0001649
ctacttaccgtt

SEQ ID NO: 347188 - DNA, 12 bp, Artificial Sequence
  Oligonucleotide primer for the detection of SNP TSC0001649
gatttttagata

SEQ ID NO: 347189 - DNA, 12 bp, Artificial Sequence
  Oligonucleotide primer for the detection of SNP TSC0001649
ttgtttgttgtt

SEQ ID NO: 347190 - DNA, 12 bp, Artificial Sequence
  Oligonucleotide primer for the detection of SNP TSC0001649
ttgtttgtcgtt

SEQ ID NO: 347191 - DNA, 12 bp, Artificial Sequence
  Oligonucleotide primer for the detection of SNP TSC0000296
caaaatcatatc

SEQ ID NO: 347192 - DNA, 12 bp, Artificial Sequence
  Oligonucleotide primer for the detection of SNP TSC0000296
tatattaaagta

SEQ ID NO: 347193 - DNA, 12 bp, Artificial Sequence
  Oligonucleotide primer for the detection of SNP TSC0001352
atcctaatttta

SEQ ID NO: 347194 - DNA, 12 bp, Artificial Sequence
  Oligonucleotide primer for the detection of SNP TSC0001352
tgtagataaaaa

SEQ ID NO: 347195 - DNA, 12 bp, Artificial Sequence
  Oligonucleotide primer for the detection of SNP TSC0001353
aaaatttatgta

SEQ ID NO: 347196 - DNA, 12 bp, Artificial Sequence
  Oligonucleotide primer for the detection of SNP TSC0001354
ttatcctaatca

SEQ ID NO: 347197 - DNA, 12 bp, Artificial Sequence
  Oligonucleotide primer for the detection of SNP TSC0000525
tataccaaaata

SEQ ID NO: 347198 - DNA, 12 bp, Artificial Sequence
  Oligonucleotide primer for the detection of SNP TSC0000525
aaatttcttcaa

SEQ ID NO: 347199 - DNA, 12 bp, Artificial Sequence
  Oligonucleotide primer for the detection of SNP TSC0000525
gtattaaaatat

SEQ ID NO: 347200 - DNA, 12 bp, Artificial Sequence
  Oligonucleotide primer for the detection of SNP TSC0000526
ctcaatttttcc

SEQ ID NO: 347201 - DNA, 12 bp, Artificial Sequence
  Oligonucleotide primer for the detection of SNP TSC0044955
ttgagtggtatt

SEQ ID NO: 347202 - DNA, 12 bp, Artificial Sequence
  Oligonucleotide primer for the detection of SNP TSC0044955
tcgagtggtatt

SEQ ID NO: 347203 - DNA, 12 bp, Artificial Sequence
  Oligonucleotide primer for the detection of SNP TSC0044955
caaataatatca

SEQ ID NO: 347204 - DNA, 12 bp, Artificial Sequence
  Oligonucleotide primer for the detection of SNP TSC0044955
cgaataatatca

SEQ ID NO: 347205 - DNA, 12 bp, Artificial Sequence
  Oligonucleotide primer for the detection of SNP TSC0044955
ttggaatataag

SEQ ID NO: 347206 - DNA, 12 bp, Artificial Sequence
  Oligonucleotide primer for the detection of SNP TSC0044958
aataaaaaacca

SEQ ID NO: 347207 - DNA, 12 bp, Artificial Sequence
  Oligonucleotide primer for the detection of SNP TSC0044958
tactaactttct

SEQ ID NO: 347208 - DNA, 12 bp, Artificial Sequence
  Oligonucleotide primer for the detection of SNP TSC0044958
aataaaaggtta

SEQ ID NO: 347209 - DNA, 12 bp, Artificial Sequence
  Oligonucleotide primer for the detection of SNP TSC0044959
tattaatactat

SEQ ID NO: 347210 - DNA, 12 bp, Artificial Sequence
  Oligonucleotide primer for the detection of SNP TSC0044959
gagatatatata

SEQ ID NO: 347211 - DNA, 12 bp, Artificial Sequence
  Oligonucleotide primer for the detection of SNP TSC0044959
attgatgttatt

SEQ ID NO: 347212 - DNA, 12 bp, Artificial Sequence
  Oligonucleotide primer for the detection of SNP TSC0044959
attgatgttatc

SEQ ID NO: 347213 - DNA, 12 bp, Artificial Sequence
  Oligonucleotide primer for the detection of SNP TSC0044960
tctataactata

SEQ ID NO: 347214 - DNA, 12 bp, Artificial Sequence
  Oligonucleotide primer for the detection of SNP TSC0044960
attaattagtta

SEQ ID NO: 347215 - DNA, 12 bp, Artificial Sequence
  Oligonucleotide primer for the detection of SNP TSC0044960
accaaccaatta

SEQ ID NO: 347216 - DNA, 12 bp, Artificial Sequence
  Oligonucleotide primer for the detection of SNP TSC0044960
tttgtggttata

SEQ ID NO: 347217 - DNA, 12 bp, Artificial Sequence
  Oligonucleotide primer for the detection of SNP TSC0044961
aaaatctattta

SEQ ID NO: 347218 - DNA, 12 bp, Artificial Sequence
  Oligonucleotide primer for the detection of SNP TSC0044961
attattattaaa

SEQ ID NO: 347219 - DNA, 12 bp, Artificial Sequence
  Oligonucleotide primer for the detection of SNP TSC0044961
accatcactaaa

SEQ ID NO: 347220 - DNA, 12 bp, Artificial Sequence
  Oligonucleotide primer for the detection of SNP TSC0044961
agagtttgttta

SEQ ID NO: 347221 - DNA, 12 bp, Artificial Sequence
  Oligonucleotide primer for the detection of SNP TSC0044962
tacaaataaatc

SEQ ID NO: 347222 - DNA, 12 bp, Artificial Sequence
  Oligonucleotide primer for the detection of SNP TSC0044962
tttatatttgta

SEQ ID NO: 347223 - DNA, 12 bp, Artificial Sequence
  Oligonucleotide primer for the detection of SNP TSC0044963
aaaatctaaaac

SEQ ID NO: 347224 - DNA, 12 bp, Artificial Sequence
  Oligonucleotide primer for the detection of SNP TSC0044963
ttaaagtgtata

SEQ ID NO: 347225 - DNA, 12 bp, Artificial Sequence
  Oligonucleotide primer for the detection of SNP TSC0044966
atccacaaacac

SEQ ID NO: 347226 - DNA, 12 bp, Artificial Sequence
  Oligonucleotide primer for the detection of SNP TSC0044970
ataagttttgta

SEQ ID NO: 347227 - DNA, 12 bp, Artificial Sequence
  Oligonucleotide primer for the detection of SNP TSC0044970
acaaattttaca

SEQ ID NO: 347228 - DNA, 12 bp, Artificial Sequence
  Oligonucleotide primer for the detection of SNP TSC0044970
ttgaataggaaa

SEQ ID NO: 347229 - DNA, 12 bp, Artificial Sequence
  Oligonucleotide primer for the detection of SNP TSC0044971
aaggaaagttgg

SEQ ID NO: 347230 - DNA, 12 bp, Artificial Sequence
  Oligonucleotide primer for the detection of SNP TSC0044972
ctttccttaacc

SEQ ID NO: 347231 - DNA, 12 bp, Artificial Sequence
  Oligonucleotide primer for the detection of SNP TSC0044972
gagaagtaagag

SEQ ID NO: 347232 - DNA, 12 bp, Artificial Sequence
  Oligonucleotide primer for the detection of SNP TSC0044973
atataaaacaaa

SEQ ID NO: 347233 - DNA, 12 bp, Artificial Sequence
  Oligonucleotide primer for the detection of SNP TSC0044973
agttgggtatgt

SEQ ID NO: 347234 - DNA, 12 bp, Artificial Sequence
  Oligonucleotide primer for the detection of SNP TSC0044973
aactaaatatat

SEQ ID NO: 347235 - DNA, 12 bp, Artificial Sequence
  Oligonucleotide primer for the detection of SNP TSC0044973
ttatgtaaagta

SEQ ID NO: 347236 - DNA, 12 bp, Artificial Sequence
  Oligonucleotide primer for the detection of SNP TSC0044974
aatacttcacaa

SEQ ID NO: 347237 - DNA, 12 bp, Artificial Sequence
  Oligonucleotide primer for the detection of SNP TSC0044974
aggtttaaggac

SEQ ID NO: 347238 - DNA, 12 bp, Artificial Sequence
  Oligonucleotide primer for the detection of SNP TSC0044974
ggtgttttatag

SEQ ID NO: 347239 - DNA, 12 bp, Artificial Sequence
  Oligonucleotide primer for the detection of SNP TSC0044975
gaattattttag

SEQ ID NO: 347240 - DNA, 12 bp, Artificial Sequence
  Oligonucleotide primer for the detection of SNP TSC0044975
aaaccatctcaa

SEQ ID NO: 347241 - DNA, 12 bp, Artificial Sequence
  Oligonucleotide primer for the detection of SNP TSC0044975
aggaataaaggt

SEQ ID NO: 347242 - DNA, 12 bp, Artificial Sequence
  Oligonucleotide primer for the detection of SNP TSC0044976
aataaaataaag

SEQ ID NO: 347243 - DNA, 12 bp, Artificial Sequence
  Oligonucleotide primer for the detection of SNP TSC0044976
gttttgtgtttt

SEQ ID NO: 347244 - DNA, 12 bp, Artificial Sequence
  Oligonucleotide primer for the detection of SNP TSC0044978
attttcaactaa

SEQ ID NO: 347245 - DNA, 12 bp, Artificial Sequence
  Oligonucleotide primer for the detection of SNP TSC0044978
tatgagtaatta

SEQ ID NO: 347246 - DNA, 12 bp, Artificial Sequence
  Oligonucleotide primer for the detection of SNP TSC0044978
cataaataacta

SEQ ID NO: 347247 - DNA, 12 bp, Artificial Sequence
  Oligonucleotide primer for the detection of SNP TSC0044978
aagtttttaatt

SEQ ID NO: 347248 - DNA, 12 bp, Artificial Sequence
  Oligonucleotide primer for the detection of SNP TSC0044981
tgattttgagta

SEQ ID NO: 347249 - DNA, 12 bp, Artificial Sequence
  Oligonucleotide primer for the detection of SNP TSC0044982
tacaaaattcca

SEQ ID NO: 347250 - DNA, 12 bp, Artificial Sequence
  Oligonucleotide primer for the detection of SNP TSC0044982
ttgagagaaatt

SEQ ID NO: 347251 - DNA, 12 bp, Artificial Sequence
  Oligonucleotide primer for the detection of SNP TSC0044982
ataaaattttac

SEQ ID NO: 347252 - DNA, 12 bp, Artificial Sequence
  Oligonucleotide primer for the detection of SNP TSC0044983
atatctttttcc

SEQ ID NO: 347253 - DNA, 12 bp, Artificial Sequence
  Oligonucleotide primer for the detection of SNP TSC0044983
gtggtatttatg

SEQ ID NO: 347254 - DNA, 12 bp, Artificial Sequence
  Oligonucleotide primer for the detection of SNP TSC0044987
aactccatttac

SEQ ID NO: 347255 - DNA, 12 bp, Artificial Sequence
  Oligonucleotide primer for the detection of SNP TSC0044987
taatatatgaga

SEQ ID NO: 347256 - DNA, 12 bp, Artificial Sequence
  Oligonucleotide primer for the detection of SNP TSC0044987
taatatacgaga

SEQ ID NO: 347257 - DNA, 12 bp, Artificial Sequence
  Oligonucleotide primer for the detection of SNP TSC0044991
caacttctaaaa

SEQ ID NO: 347258 - DNA, 12 bp, Artificial Sequence
  Oligonucleotide primer for the detection of SNP TSC0044991
attgttgttgga

SEQ ID NO: 347259 - DNA, 12 bp, Artificial Sequence
  Oligonucleotide primer for the detection of SNP TSC0044992
gacaactaaaac

SEQ ID NO: 347260 - DNA, 12 bp, Artificial Sequence
  Oligonucleotide primer for the detection of SNP TSC0044992
ttgataattgta

SEQ ID NO: 347261 - DNA, 12 bp, Artificial Sequence
  Oligonucleotide primer for the detection of SNP TSC0044995
aaacctaaaaac

SEQ ID NO: 347262 - DNA, 12 bp, Artificial Sequence
  Oligonucleotide primer for the detection of SNP TSC0044995
tttttgtgtgtg

SEQ ID NO: 347263 - DNA, 12 bp, Artificial Sequence
  Oligonucleotide primer for the detection of SNP TSC0045000
cacaaaactaac

SEQ ID NO: 347264 - DNA, 12 bp, Artificial Sequence
  Oligonucleotide primer for the detection of SNP TSC0045000
tgttaattgtga

SEQ ID NO: 347265 - DNA, 12 bp, Artificial Sequence
  Oligonucleotide primer for the detection of SNP TSC0045000
tgttaattgcga

SEQ ID NO: 347266 - DNA, 12 bp, Artificial Sequence
  Oligonucleotide primer for the detection of SNP TSC0045001
aaaaaaacctcc

SEQ ID NO: 347267 - DNA, 12 bp, Artificial Sequence
  Oligonucleotide primer for the detection of SNP TSC0045001
ggagtattatta

SEQ ID NO: 347268 - DNA, 12 bp, Artificial Sequence
  Oligonucleotide primer for the detection of SNP TSC0045003
ataaacactaaa

SEQ ID NO: 347269 - DNA, 12 bp, Artificial Sequence
  Oligonucleotide primer for the detection of SNP TSC0045003
ttggttaattta

SEQ ID NO: 347270 - DNA, 12 bp, Artificial Sequence
  Oligonucleotide primer for the detection of SNP TSC0045007
aaaatcccaacc

SEQ ID NO: 347271 - DNA, 12 bp, Artificial Sequence
  Oligonucleotide primer for the detection of SNP TSC0045007
aaaatcccgacc

SEQ ID NO: 347272 - DNA, 12 bp, Artificial Sequence
  Oligonucleotide primer for the detection of SNP TSC0045007
acaccaaacctt

SEQ ID NO: 347273 - DNA, 12 bp, Artificial Sequence
  Oligonucleotide primer for the detection of SNP TSC0045007
aggattttgatt

SEQ ID NO: 347274 - DNA, 12 bp, Artificial Sequence
  Oligonucleotide primer for the detection of SNP TSC0045007
aggatttcgatt

SEQ ID NO: 347275 - DNA, 12 bp, Artificial Sequence
  Oligonucleotide primer for the detection of SNP TSC0045008
gagttaaagttc

SEQ ID NO: 347276 - DNA, 12 bp, Artificial Sequence
  Oligonucleotide primer for the detection of SNP TSC0045008
aaattaaaatcc

SEQ ID NO: 347277 - DNA, 12 bp, Artificial Sequence
  Oligonucleotide primer for the detection of SNP TSC0045008
agtgttggttgg

SEQ ID NO: 347278 - DNA, 12 bp, Artificial Sequence
  Oligonucleotide primer for the detection of SNP TSC0045009
taaattattact

SEQ ID NO: 347279 - DNA, 12 bp, Artificial Sequence
  Oligonucleotide primer for the detection of SNP TSC0045009
ggttaatttatg

SEQ ID NO: 347280 - DNA, 12 bp, Artificial Sequence
  Oligonucleotide primer for the detection of SNP TSC0045009
aattaacttata

SEQ ID NO: 347281 - DNA, 12 bp, Artificial Sequence
  Oligonucleotide primer for the detection of SNP TSC0045009
tggattgttatt

SEQ ID NO: 347282 - DNA, 12 bp, Artificial Sequence
  Oligonucleotide primer for the detection of SNP TSC0045010
caatacaatatc

SEQ ID NO: 347283 - DNA, 12 bp, Artificial Sequence
  Oligonucleotide primer for the detection of SNP TSC0045010
tttaatgttttg

SEQ ID NO: 347284 - DNA, 12 bp, Artificial Sequence
  Oligonucleotide primer for the detection of SNP TSC0045010
cttaatacccta

SEQ ID NO: 347285 - DNA, 12 bp, Artificial Sequence
  Oligonucleotide primer for the detection of SNP TSC0045010
taatataatgtt

SEQ ID NO: 347286 - DNA, 12 bp, Artificial Sequence
  Oligonucleotide primer for the detection of SNP TSC0045011
taaaatataact

SEQ ID NO: 347287 - DNA, 12 bp, Artificial Sequence
  Oligonucleotide primer for the detection of SNP TSC0045011
taaaaaataaga

SEQ ID NO: 347288 - DNA, 12 bp, Artificial Sequence
  Oligonucleotide primer for the detection of SNP TSC0045012
atattccaaaat

SEQ ID NO: 347289 - DNA, 12 bp, Artificial Sequence
  Oligonucleotide primer for the detection of SNP TSC0045012
tatttattaaag

SEQ ID NO: 347290 - DNA, 12 bp, Artificial Sequence
  Oligonucleotide primer for the detection of SNP TSC0045014
tgttgaagatag

SEQ ID NO: 347291 - DNA, 12 bp, Artificial Sequence
  Oligonucleotide primer for the detection of SNP TSC0045015
atcttcaaaccc

SEQ ID NO: 347292 - DNA, 12 bp, Artificial Sequence
  Oligonucleotide primer for the detection of SNP TSC0045015
ataatataattg

SEQ ID NO: 347293 - DNA, 12 bp, Artificial Sequence
  Oligonucleotide primer for the detection of SNP TSC0045016
accatcaactct

SEQ ID NO: 347294 - DNA, 12 bp, Artificial Sequence
  Oligonucleotide primer for the detection of SNP TSC0045016
tttggtagtggg

SEQ ID NO: 347295 - DNA, 12 bp, Artificial Sequence
  Oligonucleotide primer for the detection of SNP TSC0045017
ctatttattatc

SEQ ID NO: 347296 - DNA, 12 bp, Artificial Sequence
  Oligonucleotide primer for the detection of SNP TSC0045017
agaaagttttag

SEQ ID NO: 347297 - DNA, 12 bp, Artificial Sequence
  Oligonucleotide primer for the detection of SNP TSC0045020
cccatatcccta

SEQ ID NO: 347298 - DNA, 12 bp, Artificial Sequence
  Oligonucleotide primer for the detection of SNP TSC0045020
cccgtatcccta

SEQ ID NO: 347299 - DNA, 12 bp, Artificial Sequence
  Oligonucleotide primer for the detection of SNP TSC0045020
ggggtagagtaa

SEQ ID NO: 347300 - DNA, 12 bp, Artificial Sequence
  Oligonucleotide primer for the detection of SNP TSC0045022
actttaataaat

SEQ ID NO: 347301 - DNA, 12 bp, Artificial Sequence
  Oligonucleotide primer for the detection of SNP TSC0045022
tatattttaaga

SEQ ID NO: 347302 - DNA, 12 bp, Artificial Sequence
  Oligonucleotide primer for the detection of SNP TSC0045022
gttttgataggt

SEQ ID NO: 347303 - DNA, 12 bp, Artificial Sequence
  Oligonucleotide primer for the detection of SNP TSC0045024
tttactaaattt

SEQ ID NO: 347304 - DNA, 12 bp, Artificial Sequence
  Oligonucleotide primer for the detection of SNP TSC0045024
aataaatatgaa

SEQ ID NO: 347305 - DNA, 12 bp, Artificial Sequence
  Oligonucleotide primer for the detection of SNP TSC0045025
tttcactcaaca

SEQ ID NO: 347306 - DNA, 12 bp, Artificial Sequence
  Oligonucleotide primer for the detection of SNP TSC0045025
agggttgtgtat

SEQ ID NO: 347307 - DNA, 12 bp, Artificial Sequence
  Oligonucleotide primer for the detection of SNP TSC0045025
agggtcgtgtat

SEQ ID NO: 347308 - DNA, 12 bp, Artificial Sequence
  Oligonucleotide primer for the detection of SNP TSC0045025
aaaatcatacat

SEQ ID NO: 347309 - DNA, 12 bp, Artificial Sequence
  Oligonucleotide primer for the detection of SNP TSC0045025
aaaatcgtacat

SEQ ID NO: 347310 - DNA, 12 bp, Artificial Sequence
  Oligonucleotide primer for the detection of SNP TSC0045026
ataaattttaat

SEQ ID NO: 347311 - DNA, 12 bp, Artificial Sequence
  Oligonucleotide primer for the detection of SNP TSC0045026
ggattataatat

SEQ ID NO: 347312 - DNA, 12 bp, Artificial Sequence
  Oligonucleotide primer for the detection of SNP TSC0045027
tataaattcaac

SEQ ID NO: 347313 - DNA, 12 bp, Artificial Sequence
  Oligonucleotide primer for the detection of SNP TSC0045027
taatttatgttt

SEQ ID NO: 347314 - DNA, 12 bp, Artificial Sequence
  Oligonucleotide primer for the detection of SNP TSC0045027
ttcaattcatac

SEQ ID NO: 347315 - DNA, 12 bp, Artificial Sequence
  Oligonucleotide primer for the detection of SNP TSC0045027
tgtggatttaat

SEQ ID NO: 347316 - DNA, 12 bp, Artificial Sequence
  Oligonucleotide primer for the detection of SNP TSC0045027
tgtggatttaac

SEQ ID NO: 347317 - DNA, 12 bp, Artificial Sequence
  Oligonucleotide primer for the detection of SNP TSC0045028
aatttcatctaa

SEQ ID NO: 347318 - DNA, 12 bp, Artificial Sequence
  Oligonucleotide primer for the detection of SNP TSC0045028
aaaaatgttagt

SEQ ID NO: 347319 - DNA, 12 bp, Artificial Sequence
  Oligonucleotide primer for the detection of SNP TSC0045029
tatttttcccct

SEQ ID NO: 347320 - DNA, 12 bp, Artificial Sequence
  Oligonucleotide primer for the detection of SNP TSC0045029
aagaataagtta

SEQ ID NO: 347321 - DNA, 12 bp, Artificial Sequence
  Oligonucleotide primer for the detection of SNP TSC0006394
tatagttaagtt

SEQ ID NO: 347322 - DNA, 12 bp, Artificial Sequence
  Oligonucleotide primer for the detection of SNP TSC0006394
tacaatcaaatt

SEQ ID NO: 347323 - DNA, 12 bp, Artificial Sequence
  Oligonukleotid-Primer
ttaaagaaatta

SEQ ID NO: 347324 - DNA, 12 bp, Artificial Sequence
  Oligonucleotide primer for the detection of SNP TSC0045032
agatatattttt

SEQ ID NO: 347325 - DNA, 12 bp, Artificial Sequence
  Oligonucleotide primer for the detection of SNP TSC0045033
acaaaattcttc

SEQ ID NO: 347326 - DNA, 12 bp, Artificial Sequence
  Oligonucleotide primer for the detection of SNP TSC0045033
tgtagggattta

SEQ ID NO: 347327 - DNA, 12 bp, Artificial Sequence
  Oligonucleotide primer for the detection of SNP TSC0045034
ttatcactaaat

SEQ ID NO: 347328 - DNA, 12 bp, Artificial Sequence
  Oligonucleotide primer for the detection of SNP TSC0045034
atttttgtttga

SEQ ID NO: 347329 - DNA, 12 bp, Artificial Sequence
  Oligonucleotide primer for the detection of SNP TSC0045035
ttaatataatat

SEQ ID NO: 347330 - DNA, 12 bp, Artificial Sequence
  Oligonucleotide primer for the detection of SNP TSC0045038
acactttaatat

SEQ ID NO: 347331 - DNA, 12 bp, Artificial Sequence
  Oligonucleotide primer for the detection of SNP TSC0045038
tgtaaaatttaa

SEQ ID NO: 347332 - DNA, 12 bp, Artificial Sequence
  Oligonucleotide primer for the detection of SNP TSC0045039
tgagttttatat

SEQ ID NO: 347333 - DNA, 12 bp, Artificial Sequence
  Oligonucleotide primer for the detection of SNP TSC0045039
ttaaattttaca

SEQ ID NO: 347334 - DNA, 12 bp, Artificial Sequence
  Oligonucleotide primer for the detection of SNP TSC0045039
tttgttttaaat

SEQ ID NO: 347335 - DNA, 12 bp, Artificial Sequence
  Oligonucleotide primer for the detection of SNP TSC0045040
tatattaatctc

SEQ ID NO: 347336 - DNA, 12 bp, Artificial Sequence
  Oligonucleotide primer for the detection of SNP TSC0045040
ttatgagtttat

SEQ ID NO: 347337 - DNA, 12 bp, Artificial Sequence
  Oligonucleotide primer for the detection of SNP TSC0045040
ttatgagtttac

SEQ ID NO: 347338 - DNA, 12 bp, Artificial Sequence
  Oligonucleotide primer for the detection of SNP TSC0045040
ttataaactcac

SEQ ID NO: 347339 - DNA, 12 bp, Artificial Sequence
  Oligonukleotid-Primer
aaaattacccta

SEQ ID NO: 347340 - DNA, 12 bp, Artificial Sequence
  Oligonucleotide primer for the detection of SNP TSC0045041
taaattattgtt

SEQ ID NO: 347341 - DNA, 12 bp, Artificial Sequence
  Oligonucleotide primer for the detection of SNP TSC0045041
acaaattattac

SEQ ID NO: 347342 - DNA, 12 bp, Artificial Sequence
  Oligonucleotide primer for the detection of SNP TSC0045041
tagaattatttt

SEQ ID NO: 347343 - DNA, 12 bp, Artificial Sequence
  Oligonucleotide primer for the detection of SNP TSC0045042
ccatactactac

SEQ ID NO: 347344 - DNA, 12 bp, Artificial Sequence
  Oligonucleotide primer for the detection of SNP TSC0045043
actactacactt

SEQ ID NO: 347345 - DNA, 12 bp, Artificial Sequence
  Oligonucleotide primer for the detection of SNP TSC0045043
tatgaaaaaaaa

SEQ ID NO: 347346 - DNA, 12 bp, Artificial Sequence
  Oligonucleotide primer for the detection of SNP TSC0045044
aaactactcctt

SEQ ID NO: 347347 - DNA, 12 bp, Artificial Sequence
  Oligonucleotide primer for the detection of SNP TSC0045044
aggtagtttgag

SEQ ID NO: 347348 - DNA, 12 bp, Artificial Sequence
  Oligonucleotide primer for the detection of SNP TSC0045044
aggtagttcgag

SEQ ID NO: 347349 - DNA, 12 bp, Artificial Sequence
  Oligonucleotide primer for the detection of SNP TSC0045045
cttaatctccac

SEQ ID NO: 347350 - DNA, 12 bp, Artificial Sequence
  Oligonucleotide primer for the detection of SNP TSC0045045
gatttttgtaga

SEQ ID NO: 347351 - DNA, 12 bp, Artificial Sequence
  Oligonucleotide primer for the detection of SNP TSC0045045
aacctctacaaa

SEQ ID NO: 347352 - DNA, 12 bp, Artificial Sequence
  Oligonucleotide primer for the detection of SNP TSC0045045
gacctctacaaa

SEQ ID NO: 347353 - DNA, 12 bp, Artificial Sequence
  Oligonucleotide primer for the detection of SNP TSC0045047
ataaaccatcac

SEQ ID NO: 347354 - DNA, 12 bp, Artificial Sequence
  Oligonucleotide primer for the detection of SNP TSC0045047
ataaaccatcgc

SEQ ID NO: 347355 - DNA, 12 bp, Artificial Sequence
  Oligonucleotide primer for the detection of SNP TSC0045047
tattagagaggg

SEQ ID NO: 347356 - DNA, 12 bp, Artificial Sequence
  Oligonucleotide primer for the detection of SNP TSC0045048
aacctcctaata

SEQ ID NO: 347357 - DNA, 12 bp, Artificial Sequence
  Oligonucleotide primer for the detection of SNP TSC0045048
aaattaaataag

SEQ ID NO: 347358 - DNA, 12 bp, Artificial Sequence
  Oligonucleotide primer for the detection of SNP TSC0045048
aaactaaataaa

SEQ ID NO: 347359 - DNA, 12 bp, Artificial Sequence
  Oligonucleotide primer for the detection of SNP TSC0045048
gattttttgatg

SEQ ID NO: 347360 - DNA, 12 bp, Artificial Sequence
  Oligonucleotide primer for the detection of SNP TSC0045050
ttatcataaaac

SEQ ID NO: 347361 - DNA, 12 bp, Artificial Sequence
  Oligonucleotide primer for the detection of SNP TSC0045050
aaaatttagtat

SEQ ID NO: 347362 - DNA, 12 bp, Artificial Sequence
  Oligonucleotide primer for the detection of SNP TSC0045050
taaaatctaaca

SEQ ID NO: 347363 - DNA, 12 bp, Artificial Sequence
  Oligonucleotide primer for the detection of SNP TSC0045050
ttattataaagt

SEQ ID NO: 347364 - DNA, 12 bp, Artificial Sequence
  Oligonucleotide primer for the detection of SNP TSC0045050
ttattataaagc

SEQ ID NO: 347365 - DNA, 12 bp, Artificial Sequence
  Oligonucleotide primer for the detection of SNP TSC0045051
catttattattt

SEQ ID NO: 347366 - DNA, 12 bp, Artificial Sequence
  Oligonucleotide primer for the detection of SNP TSC0045051
agaaagagtata

SEQ ID NO: 347367 - DNA, 12 bp, Artificial Sequence
  Oligonucleotide primer for the detection of SNP TSC0045052
tacaaaatcact

SEQ ID NO: 347368 - DNA, 12 bp, Artificial Sequence
  Oligonucleotide primer for the detection of SNP TSC0045052
tattgatttgtg

SEQ ID NO: 347369 - DNA, 12 bp, Artificial Sequence
  Oligonucleotide primer for the detection of SNP TSC0045054
tactcaactatc

SEQ ID NO: 347370 - DNA, 12 bp, Artificial Sequence
  Oligonucleotide primer for the detection of SNP TSC0045054
tgtggtgtttgt

SEQ ID NO: 347371 - DNA, 12 bp, Artificial Sequence
  Oligonucleotide primer for the detection of SNP TSC0045055
aaaattcaatac

SEQ ID NO: 347372 - DNA, 12 bp, Artificial Sequence
  Oligonucleotide primer for the detection of SNP TSC0045055
tgttgtttaggg

SEQ ID NO: 347373 - DNA, 12 bp, Artificial Sequence
  Oligonucleotide primer for the detection of SNP TSC0045056
aataaaacacta

SEQ ID NO: 347374 - DNA, 12 bp, Artificial Sequence
  Oligonucleotide primer for the detection of SNP TSC0045056
agtgaggtattg

SEQ ID NO: 347375 - DNA, 12 bp, Artificial Sequence
  Oligonucleotide primer for the detection of SNP TSC0045057
ttttatagtaat

SEQ ID NO: 347376 - DNA, 12 bp, Artificial Sequence
  Oligonucleotide primer for the detection of SNP TSC0045057
ttctataacaat

SEQ ID NO: 347377 - DNA, 12 bp, Artificial Sequence
  Oligonucleotide primer for the detection of SNP TSC0045057
ggaatttgaagt

SEQ ID NO: 347378 - DNA, 12 bp, Artificial Sequence
  Oligonucleotide primer for the detection of SNP TSC0045058
taatttttacac

SEQ ID NO: 347379 - DNA, 12 bp, Artificial Sequence
  Oligonucleotide primer for the detection of SNP TSC0045058
tcatatccctca

SEQ ID NO: 347380 - DNA, 12 bp, Artificial Sequence
  Oligonucleotide primer for the detection of SNP TSC0045058
tcgtatccctca

SEQ ID NO: 347381 - DNA, 12 bp, Artificial Sequence
  Oligonucleotide primer for the detection of SNP TSC0045058
tgatttttgtac

SEQ ID NO: 347382 - DNA, 12 bp, Artificial Sequence
  Oligonucleotide primer for the detection of SNP TSC0045062
tttgttaaattg

SEQ ID NO: 347383 - DNA, 12 bp, Artificial Sequence
  Oligonucleotide primer for the detection of SNP TSC0045063
ttagttttatga

SEQ ID NO: 347384 - DNA, 12 bp, Artificial Sequence
  Oligonucleotide primer for the detection of SNP TSC0045063
ttagttttacga

SEQ ID NO: 347385 - DNA, 12 bp, Artificial Sequence
  Oligonucleotide primer for the detection of SNP TSC0045063
tcaatcttacaa

SEQ ID NO: 347386 - DNA, 12 bp, Artificial Sequence
  Oligonucleotide primer for the detection of SNP TSC0045063
tcaatcttacga

SEQ ID NO: 347387 - DNA, 12 bp, Artificial Sequence
  Oligonucleotide primer for the detection of SNP TSC0045063
ttaggtaaagag

SEQ ID NO: 347388 - DNA, 12 bp, Artificial Sequence
  Oligonucleotide primer for the detection of SNP TSC0045067
acacctactcta

SEQ ID NO: 347389 - DNA, 12 bp, Artificial Sequence
  Oligonucleotide primer for the detection of SNP TSC0045067
acgttttttatt

SEQ ID NO: 347390 - DNA, 12 bp, Artificial Sequence
  Oligonucleotide primer for the detection of SNP TSC0045067
acacttctcatc

SEQ ID NO: 347391 - DNA, 12 bp, Artificial Sequence
  Oligonucleotide primer for the detection of SNP TSC0045067
acgcttctcatc

SEQ ID NO: 347392 - DNA, 12 bp, Artificial Sequence
  Oligonucleotide primer for the detection of SNP TSC0045067
tatttgttttgt

SEQ ID NO: 347393 - DNA, 12 bp, Artificial Sequence
  Oligonucleotide primer for the detection of SNP TSC0045067
tatttgttttgc

SEQ ID NO: 347394 - DNA, 12 bp, Artificial Sequence
  Oligonucleotide primer for the detection of SNP TSC0045068
aaaatacttact

SEQ ID NO: 347395 - DNA, 12 bp, Artificial Sequence
  Oligonucleotide primer for the detection of SNP TSC0045068
gtatttattata

SEQ ID NO: 347396 - DNA, 12 bp, Artificial Sequence
  Oligonucleotide primer for the detection of SNP TSC0045069
atccattttaaa

SEQ ID NO: 347397 - DNA, 12 bp, Artificial Sequence
  Oligonucleotide primer for the detection of SNP TSC0045069
gtccattttaaa

SEQ ID NO: 347398 - DNA, 12 bp, Artificial Sequence
  Oligonucleotide primer for the detection of SNP TSC0045069
ttggagttgttt

SEQ ID NO: 347399 - DNA, 12 bp, Artificial Sequence
  Oligonucleotide primer for the detection of SNP TSC0045069
ttggagtcgttt

SEQ ID NO: 347400 - DNA, 12 bp, Artificial Sequence
  Oligonucleotide primer for the detection of SNP TSC0045069
ttaaaatcactt

SEQ ID NO: 347401 - DNA, 12 bp, Artificial Sequence
  Oligonucleotide primer for the detection of SNP TSC0045069
ttaaaatcgctt

SEQ ID NO: 347402 - DNA, 12 bp, Artificial Sequence
  Oligonucleotide primer for the detection of SNP TSC0045069
gtttattttgaa

SEQ ID NO: 347403 - DNA, 12 bp, Artificial Sequence
  Oligonucleotide primer for the detection of SNP TSC0045072
ttttaagggtta

SEQ ID NO: 347404 - DNA, 12 bp, Artificial Sequence
  Oligonucleotide primer for the detection of SNP TSC0045072
ttctaaaaatca

SEQ ID NO: 347405 - DNA, 12 bp, Artificial Sequence
  Oligonucleotide primer for the detection of SNP TSC0045072
aaatggaagggt

SEQ ID NO: 347406 - DNA, 12 bp, Artificial Sequence
  Oligonucleotide primer for the detection of SNP TSC0006880
cacactactaca

SEQ ID NO: 347407 - DNA, 12 bp, Artificial Sequence
  Oligonucleotide primer for the detection of SNP TSC0006880
cacgctactaca

SEQ ID NO: 347408 - DNA, 12 bp, Artificial Sequence
  Oligonucleotide primer for the detection of SNP TSC0006880
tagttttgagta

SEQ ID NO: 347409 - DNA, 12 bp, Artificial Sequence
  Oligonucleotide primer for the detection of SNP TSC0006880
tagtttcgagta

SEQ ID NO: 347410 - DNA, 12 bp, Artificial Sequence
  Oligonucleotide primer for the detection of SNP TSC0045077
acaacaaatact

SEQ ID NO: 347411 - DNA, 12 bp, Artificial Sequence
  Oligonucleotide primer for the detection of SNP TSC0045078
aaaaaatggtgt

SEQ ID NO: 347412 - DNA, 12 bp, Artificial Sequence
  Oligonucleotide primer for the detection of SNP TSC0045078
aagatttatagg

SEQ ID NO: 347413 - DNA, 12 bp, Artificial Sequence
  Oligonucleotide primer for the detection of SNP TSC0045079
aatttctataac

SEQ ID NO: 347414 - DNA, 12 bp, Artificial Sequence
  Oligonucleotide primer for the detection of SNP TSC0045079
atatttttttag

SEQ ID NO: 347415 - DNA, 12 bp, Artificial Sequence
  Oligonucleotide primer for the detection of SNP TSC0045080
tatataagtgga

SEQ ID NO: 347416 - DNA, 12 bp, Artificial Sequence
  Oligonucleotide primer for the detection of SNP TSC0045081
ctcctatctcaa

SEQ ID NO: 347417 - DNA, 12 bp, Artificial Sequence
  Oligonucleotide primer for the detection of SNP TSC0045081
gttaatggggag

SEQ ID NO: 347418 - DNA, 12 bp, Artificial Sequence
  Oligonucleotide primer for the detection of SNP TSC0045081
actaataaaaaa

SEQ ID NO: 347419 - DNA, 12 bp, Artificial Sequence
  Oligonucleotide primer for the detection of SNP TSC0045082
acaattaactat

SEQ ID NO: 347420 - DNA, 12 bp, Artificial Sequence
  Oligonucleotide primer for the detection of SNP TSC0045082
taaattatttgg

SEQ ID NO: 347421 - DNA, 12 bp, Artificial Sequence
  Oligonucleotide primer for the detection of SNP TSC0045085
tttaaaaaacat

SEQ ID NO: 347422 - DNA, 12 bp, Artificial Sequence
  Oligonucleotide primer for the detection of SNP TSC0045088
acctccatcact

SEQ ID NO: 347423 - DNA, 12 bp, Artificial Sequence
  Oligonucleotide primer for the detection of SNP TSC0045088
ttatttggtaaa

SEQ ID NO: 347424 - DNA, 12 bp, Artificial Sequence
  Oligonucleotide primer for the detection of SNP TSC0045089
tttaccatctat

SEQ ID NO: 347425 - DNA, 12 bp, Artificial Sequence
  Oligonucleotide primer for the detection of SNP TSC0045089
tttaaagaatat

SEQ ID NO: 347426 - DNA, 12 bp, Artificial Sequence
  Oligonucleotide primer for the detection of SNP TSC0045090
tatataactaac

SEQ ID NO: 347427 - DNA, 12 bp, Artificial Sequence
  Oligonucleotide primer for the detection of SNP TSC0045092
ttataaaggaaa

SEQ ID NO: 347428 - DNA, 12 bp, Artificial Sequence
  Oligonucleotide primer for the detection of SNP TSC0045093
aaatatcttaat

SEQ ID NO: 347429 - DNA, 12 bp, Artificial Sequence
  Oligonucleotide primer for the detection of SNP TSC0045093
aatgtttgtatt

SEQ ID NO: 347430 - DNA, 12 bp, Artificial Sequence
  Oligonucleotide primer for the detection of SNP TSC0045093
aatatctatatc

SEQ ID NO: 347431 - DNA, 12 bp, Artificial Sequence
  Oligonucleotide primer for the detection of SNP TSC0045093
aaatgttttggt

SEQ ID NO: 347432 - DNA, 12 bp, Artificial Sequence
  Oligonucleotide primer for the detection of SNP TSC0004528
tctactctattt

SEQ ID NO: 347433 - DNA, 12 bp, Artificial Sequence
  Oligonucleotide primer for the detection of SNP TSC0004529
gtgagaattgtg

SEQ ID NO: 347434 - DNA, 12 bp, Artificial Sequence
  Oligonucleotide primer for the detection of SNP TSC0045098
aaacacttttac

SEQ ID NO: 347435 - DNA, 12 bp, Artificial Sequence
  Oligonucleotide primer for the detection of SNP TSC0008758
tcccaatcttaa

SEQ ID NO: 347436 - DNA, 12 bp, Artificial Sequence
  Oligonucleotide primer for the detection of SNP TSC0008758
gataaagatata

SEQ ID NO: 347437 - DNA, 12 bp, Artificial Sequence
  Oligonucleotide primer for the detection of SNP TSC0045101
gaagaaatagga

SEQ ID NO: 347438 - DNA, 12 bp, Artificial Sequence
  Oligonucleotide primer for the detection of SNP TSC0045101
gatataagggtt

SEQ ID NO: 347439 - DNA, 12 bp, Artificial Sequence
  Oligonucleotide primer for the detection of SNP TSC0045104
tataatattaac

SEQ ID NO: 347440 - DNA, 12 bp, Artificial Sequence
  Oligonucleotide primer for the detection of SNP TSC0045104
tatattatggga

SEQ ID NO: 347441 - DNA, 12 bp, Artificial Sequence
  Oligonucleotide primer for the detection of SNP TSC0045105
catcaacatttc

SEQ ID NO: 347442 - DNA, 12 bp, Artificial Sequence
  Oligonucleotide primer for the detection of SNP TSC0045105
aaaatagttatg

SEQ ID NO: 347443 - DNA, 12 bp, Artificial Sequence
  Oligonucleotide primer for the detection of SNP TSC0005092
tctactctatca

SEQ ID NO: 347444 - DNA, 12 bp, Artificial Sequence
  Oligonucleotide primer for the detection of SNP TSC0005092
tggggatgtttt

SEQ ID NO: 347445 - DNA, 12 bp, Artificial Sequence
  Oligonucleotide primer for the detection of SNP TSC0007903
ctaaacttttat

SEQ ID NO: 347446 - DNA, 12 bp, Artificial Sequence
  Oligonucleotide primer for the detection of SNP TSC0007903
aggggaggtaga

SEQ ID NO: 347447 - DNA, 12 bp, Artificial Sequence
  Oligonucleotide primer for the detection of SNP TSC0045110
taattatttctt

SEQ ID NO: 347448 - DNA, 12 bp, Artificial Sequence
  Oligonucleotide primer for the detection of SNP TSC0045110
ttttgtatagta

SEQ ID NO: 347449 - DNA, 12 bp, Artificial Sequence
  Oligonucleotide primer for the detection of SNP TSC0045110
ttctacacaata

SEQ ID NO: 347450 - DNA, 12 bp, Artificial Sequence
  Oligonucleotide primer for the detection of SNP TSC0045110
tgattatttttt

SEQ ID NO: 347451 - DNA, 12 bp, Artificial Sequence
  Oligonucleotide primer for the detection of SNP TSC0045112
actccaattata

SEQ ID NO: 347452 - DNA, 12 bp, Artificial Sequence
  Oligonucleotide primer for the detection of SNP TSC0045112
ggtattaaaatt

SEQ ID NO: 347453 - DNA, 12 bp, Artificial Sequence
  Oligonucleotide primer for the detection of SNP TSC0045112
aacaccaaaatt

SEQ ID NO: 347454 - DNA, 12 bp, Artificial Sequence
  Oligonucleotide primer for the detection of SNP TSC0045113
ataaaacaaatt

SEQ ID NO: 347455 - DNA, 12 bp, Artificial Sequence
  Oligonucleotide primer for the detection of SNP TSC0045114
catccttttaac

SEQ ID NO: 347456 - DNA, 12 bp, Artificial Sequence
  Oligonucleotide primer for the detection of SNP TSC0045114
aatttttatgta

SEQ ID NO: 347457 - DNA, 12 bp, Artificial Sequence
  Oligonucleotide primer for the detection of SNP TSC0045116
gtatttaagtta

SEQ ID NO: 347458 - DNA, 12 bp, Artificial Sequence
  Oligonucleotide primer for the detection of SNP TSC0045116
acactcaaacca

SEQ ID NO: 347459 - DNA, 12 bp, Artificial Sequence
  Oligonucleotide primer for the detection of SNP TSC0045116
aaaggggagggg

SEQ ID NO: 347460 - DNA, 12 bp, Artificial Sequence
  Oligonucleotide primer for the detection of SNP TSC0004958
ttatcacatata

SEQ ID NO: 347461 - DNA, 12 bp, Artificial Sequence
  Oligonucleotide primer for the detection of SNP TSC0004958
atttaaaaagat

SEQ ID NO: 347462 - DNA, 12 bp, Artificial Sequence
  Oligonucleotide primer for the detection of SNP TSC0005030
tctttattccta

SEQ ID NO: 347463 - DNA, 12 bp, Artificial Sequence
  Oligonucleotide primer for the detection of SNP TSC0005030
atgaagtaataa

SEQ ID NO: 347464 - DNA, 12 bp, Artificial Sequence
  Oligonucleotide primer for the detection of SNP TSC0045120
aaaacttatata

SEQ ID NO: 347465 - DNA, 12 bp, Artificial Sequence
  Oligonucleotide primer for the detection of SNP TSC0045120
ttattatttttc

SEQ ID NO: 347466 - DNA, 12 bp, Artificial Sequence
  Oligonucleotide primer for the detection of SNP TSC0045120
ctactatttttc

SEQ ID NO: 347467 - DNA, 12 bp, Artificial Sequence
  Oligonucleotide primer for the detection of SNP TSC0045120
gaggtttatgtg

SEQ ID NO: 347468 - DNA, 12 bp, Artificial Sequence
  Oligonucleotide primer for the detection of SNP TSC0045123
atacaaccaaaa

SEQ ID NO: 347469 - DNA, 12 bp, Artificial Sequence
  Oligonucleotide primer for the detection of SNP TSC0045123
ttgtgggatggt

SEQ ID NO: 347470 - DNA, 12 bp, Artificial Sequence
  Oligonucleotide primer for the detection of SNP TSC0045123
atatagttaggg

SEQ ID NO: 347471 - DNA, 12 bp, Artificial Sequence
  Oligonucleotide primer for the detection of SNP TSC0045124
tctttcaatcat

SEQ ID NO: 347472 - DNA, 12 bp, Artificial Sequence
  Oligonucleotide primer for the detection of SNP TSC0045124
atggattaatgg

SEQ ID NO: 347473 - DNA, 12 bp, Artificial Sequence
  Oligonucleotide primer for the detection of SNP TSC0045129
tttatagtagtt

SEQ ID NO: 347474 - DNA, 12 bp, Artificial Sequence
  Oligonucleotide primer for the detection of SNP TSC0045129
ttcacaacaatt

SEQ ID NO: 347475 - DNA, 12 bp, Artificial Sequence
  Oligonucleotide primer for the detection of SNP TSC0045129
tgatttttagaa

SEQ ID NO: 347476 - DNA, 12 bp, Artificial Sequence
  Oligonucleotide primer for the detection of SNP TSC0000648
ctaccttttaat

SEQ ID NO: 347477 - DNA, 12 bp, Artificial Sequence
  Oligonucleotide primer for the detection of SNP TSC0000648
tgaatttttagg

SEQ ID NO: 347478 - DNA, 12 bp, Artificial Sequence
  Oligonucleotide primer for the detection of SNP TSC0045130
ttatcccattcc

SEQ ID NO: 347479 - DNA, 12 bp, Artificial Sequence
  Oligonucleotide primer for the detection of SNP TSC0045130
aatataggtttt

SEQ ID NO: 347480 - DNA, 12 bp, Artificial Sequence
  Oligonucleotide primer for the detection of SNP TSC0045130
aatataaattct

SEQ ID NO: 347481 - DNA, 12 bp, Artificial Sequence
  Oligonucleotide primer for the detection of SNP TSC0045131
atactacccaca

SEQ ID NO: 347482 - DNA, 12 bp, Artificial Sequence
  Oligonucleotide primer for the detection of SNP TSC0045131
atactacccgca

SEQ ID NO: 347483 - DNA, 12 bp, Artificial Sequence
  Oligonucleotide primer for the detection of SNP TSC0045131
ttctaattctcc

SEQ ID NO: 347484 - DNA, 12 bp, Artificial Sequence
  Oligonucleotide primer for the detection of SNP TSC0045131
gtgttgttcgta

SEQ ID NO: 347485 - DNA, 12 bp, Artificial Sequence
  Oligonucleotide primer for the detection of SNP TSC0000951
aggtaagagaat

SEQ ID NO: 347486 - DNA, 12 bp, Artificial Sequence
  Oligonucleotide primer for the detection of SNP TSC0000952
ttttatagtcgt

SEQ ID NO: 347487 - DNA, 12 bp, Artificial Sequence
  Oligonucleotide primer for the detection of SNP TSC0000952
attttataatca

SEQ ID NO: 347488 - DNA, 12 bp, Artificial Sequence
  Oligonucleotide primer for the detection of SNP TSC0000952
attttataatcg

SEQ ID NO: 347489 - DNA, 12 bp, Artificial Sequence
  Oligonucleotide primer for the detection of SNP TSC0000952
tgaagttaaggg

SEQ ID NO: 347490 - DNA, 12 bp, Artificial Sequence
  Oligonucleotide primer for the detection of SNP TSC0000953
actaactttttt

SEQ ID NO: 347491 - DNA, 12 bp, Artificial Sequence
  Oligonucleotide primer for the detection of SNP TSC0045134
ctcataccatat

SEQ ID NO: 347492 - DNA, 12 bp, Artificial Sequence
  Oligonucleotide primer for the detection of SNP TSC0045134
gggttataagta

SEQ ID NO: 347493 - DNA, 12 bp, Artificial Sequence
  Oligonucleotide primer for the detection of SNP TSC0045135
aaattgatgtga

SEQ ID NO: 347494 - DNA, 12 bp, Artificial Sequence
  Oligonucleotide primer for the detection of SNP TSC0008573
cattacaccaat

SEQ ID NO: 347495 - DNA, 12 bp, Artificial Sequence
  Oligonucleotide primer for the detection of SNP TSC0008573
aaaattagtata

SEQ ID NO: 347496 - DNA, 12 bp, Artificial Sequence
  Oligonucleotide primer for the detection of SNP TSC0045137
actatccctccc

SEQ ID NO: 347497 - DNA, 12 bp, Artificial Sequence
  Oligonucleotide primer for the detection of SNP TSC0045137
ggtggggggagg

SEQ ID NO: 347498 - DNA, 12 bp, Artificial Sequence
  Oligonucleotide primer for the detection of SNP TSC0045138
tcttatttacca

SEQ ID NO: 347499 - DNA, 12 bp, Artificial Sequence
  Oligonucleotide primer for the detection of SNP TSC0045138
ttaaaattatag

SEQ ID NO: 347500 - DNA, 12 bp, Artificial Sequence
  Oligonucleotide primer for the detection of SNP TSC0000628
aacaattatcat

SEQ ID NO: 347501 - DNA, 12 bp, Artificial Sequence
  Oligonucleotide primer for the detection of SNP TSC0000628
ggaagttattag

SEQ ID NO: 347502 - DNA, 12 bp, Artificial Sequence
  Oligonucleotide primer for the detection of SNP TSC0000628
agtagttattat

SEQ ID NO: 347503 - DNA, 12 bp, Artificial Sequence
  Oligonucleotide primer for the detection of SNP TSC0045140
aaacctctaaaa

SEQ ID NO: 347504 - DNA, 12 bp, Artificial Sequence
  Oligonucleotide primer for the detection of SNP TSC0045140
taagggagtttt

SEQ ID NO: 347505 - DNA, 12 bp, Artificial Sequence
  Oligonucleotide primer for the detection of SNP TSC0045140
taaaaaaaccct

SEQ ID NO: 347506 - DNA, 12 bp, Artificial Sequence
  Oligonucleotide primer for the detection of SNP TSC0045140
gaatttttggga

SEQ ID NO: 347507 - DNA, 12 bp, Artificial Sequence
  Oligonucleotide primer for the detection of SNP TSC0045141
acaaacaattat

SEQ ID NO: 347508 - DNA, 12 bp, Artificial Sequence
  Oligonucleotide primer for the detection of SNP TSC0045141
ttattagtatta

SEQ ID NO: 347509 - DNA, 12 bp, Artificial Sequence
  Oligonucleotide primer for the detection of SNP TSC0045142
tagattttagta

SEQ ID NO: 347510 - DNA, 12 bp, Artificial Sequence
  Oligonucleotide primer for the detection of SNP TSC0000663
acaccctattct

SEQ ID NO: 347511 - DNA, 12 bp, Artificial Sequence
  Oligonucleotide primer for the detection of SNP TSC0000663
ttaagtattatg

SEQ ID NO: 347512 - DNA, 12 bp, Artificial Sequence
  Oligonucleotide primer for the detection of SNP TSC0045143
tttataggtaaa

SEQ ID NO: 347513 - DNA, 12 bp, Artificial Sequence
  Oligonucleotide primer for the detection of SNP TSC0045144
aatcaaacttat

SEQ ID NO: 347514 - DNA, 12 bp, Artificial Sequence
  Oligonucleotide primer for the detection of SNP TSC0045144
ttttattatagg

SEQ ID NO: 347515 - DNA, 12 bp, Artificial Sequence
  Oligonucleotide primer for the detection of SNP TSC0045145
tttttaggatcg

SEQ ID NO: 347516 - DNA, 12 bp, Artificial Sequence
  Oligonucleotide primer for the detection of SNP TSC0045145
tctccaaaatca

SEQ ID NO: 347517 - DNA, 12 bp, Artificial Sequence
  Oligonucleotide primer for the detection of SNP TSC0045145
tctccaaaatcg

SEQ ID NO: 347518 - DNA, 12 bp, Artificial Sequence
  Oligonucleotide primer for the detection of SNP TSC0045145
aataaggtagta

SEQ ID NO: 347519 - DNA, 12 bp, Artificial Sequence
  Oligonucleotide primer for the detection of SNP TSC0045146
caaaattatttc

SEQ ID NO: 347520 - DNA, 12 bp, Artificial Sequence
  Oligonucleotide primer for the detection of SNP TSC0045146
atttttcaatca

SEQ ID NO: 347521 - DNA, 12 bp, Artificial Sequence
  Oligonucleotide primer for the detection of SNP TSC0045146
tagagttatttt

SEQ ID NO: 347522 - DNA, 12 bp, Artificial Sequence
  Oligonucleotide primer for the detection of SNP TSC0045147
tagtattgatgg

SEQ ID NO: 347523 - DNA, 12 bp, Artificial Sequence
  Oligonucleotide primer for the detection of SNP TSC0045148
atcttaaaaaaa

SEQ ID NO: 347524 - DNA, 12 bp, Artificial Sequence
  Oligonucleotide primer for the detection of SNP TSC0045148
ggaaaagttaat

SEQ ID NO: 347525 - DNA, 12 bp, Artificial Sequence
  Oligonucleotide primer for the detection of SNP TSC0045149
ccactctatatt

SEQ ID NO: 347526 - DNA, 12 bp, Artificial Sequence
  Oligonucleotide primer for the detection of SNP TSC0045149
ttagatgggaga

SEQ ID NO: 347527 - DNA, 12 bp, Artificial Sequence
  Oligonucleotide primer for the detection of SNP TSC0045150
acttaaatttac

SEQ ID NO: 347528 - DNA, 12 bp, Artificial Sequence
  Oligonucleotide primer for the detection of SNP TSC0045150
gcttaaatttac

SEQ ID NO: 347529 - DNA, 12 bp, Artificial Sequence
  Oligonucleotide primer for the detection of SNP TSC0045150
tttaaatatata

SEQ ID NO: 347530 - DNA, 12 bp, Artificial Sequence
  Oligonucleotide primer for the detection of SNP TSC0045150
ttcaaacacata

SEQ ID NO: 347531 - DNA, 12 bp, Artificial Sequence
  Oligonucleotide primer for the detection of SNP TSC0045150
gtttggatttgt

SEQ ID NO: 347532 - DNA, 12 bp, Artificial Sequence
  Oligonukleotid-Primer
ccatacttatac

SEQ ID NO: 347533 - DNA, 12 bp, Artificial Sequence
  Oligonucleotide primer for the detection of SNP TSC0045151
taaagttttgta

SEQ ID NO: 347534 - DNA, 12 bp, Artificial Sequence
  Oligonucleotide primer for the detection of SNP TSC0045151
caaaattctata

SEQ ID NO: 347535 - DNA, 12 bp, Artificial Sequence
  Oligonucleotide primer for the detection of SNP TSC0045151
ttatgtttgtgt

SEQ ID NO: 347536 - DNA, 12 bp, Artificial Sequence
  Oligonucleotide primer for the detection of SNP TSC0045152
gttttgttgtta

SEQ ID NO: 347537 - DNA, 12 bp, Artificial Sequence
  Oligonucleotide primer for the detection of SNP TSC0045153
cacttctacatc

SEQ ID NO: 347538 - DNA, 12 bp, Artificial Sequence
  Oligonucleotide primer for the detection of SNP TSC0045153
tgaagagaaaat

SEQ ID NO: 347539 - DNA, 12 bp, Artificial Sequence
  Oligonucleotide primer for the detection of SNP TSC0045153
tgaagagaaaac

SEQ ID NO: 347540 - DNA, 12 bp, Artificial Sequence
  Oligonucleotide primer for the detection of SNP TSC0045154
aacaataatttt

SEQ ID NO: 347541 - DNA, 12 bp, Artificial Sequence
  Oligonucleotide primer for the detection of SNP TSC0045154
attgaagttttt

SEQ ID NO: 347542 - DNA, 12 bp, Artificial Sequence
  Oligonucleotide primer for the detection of SNP TSC0045155
tgttatagttat

SEQ ID NO: 347543 - DNA, 12 bp, Artificial Sequence
  Oligonucleotide primer for the detection of SNP TSC0045155
tatcataatcat

SEQ ID NO: 347544 - DNA, 12 bp, Artificial Sequence
  Oligonucleotide primer for the detection of SNP TSC0045155
tggagaaagtat

SEQ ID NO: 347545 - DNA, 12 bp, Artificial Sequence
  Oligonucleotide primer for the detection of SNP TSC0045156
ggattatttttt

SEQ ID NO: 347546 - DNA, 12 bp, Artificial Sequence
  Oligonucleotide primer for the detection of SNP TSC0045156
aaatcatctctt

SEQ ID NO: 347547 - DNA, 12 bp, Artificial Sequence
  Oligonucleotide primer for the detection of SNP TSC0045156
ataaagaaaaaa

SEQ ID NO: 347548 - DNA, 12 bp, Artificial Sequence
  Oligonucleotide primer for the detection of SNP TSC0045157
aatccaaataaa

SEQ ID NO: 347549 - DNA, 12 bp, Artificial Sequence
  Oligonucleotide primer for the detection of SNP TSC0045157
atttctaattat

SEQ ID NO: 347550 - DNA, 12 bp, Artificial Sequence
  Oligonucleotide primer for the detection of SNP TSC0045157
tgatttaaataa

SEQ ID NO: 347551 - DNA, 12 bp, Artificial Sequence
  Oligonucleotide primer for the detection of SNP TSC0000374
agaaaagtgtag

SEQ ID NO: 347552 - DNA, 12 bp, Artificial Sequence
  Oligonucleotide primer for the detection of SNP TSC0045159
tttcacctccca

SEQ ID NO: 347553 - DNA, 12 bp, Artificial Sequence
  Oligonucleotide primer for the detection of SNP TSC0045159
ggttttagaatt

SEQ ID NO: 347554 - DNA, 12 bp, Artificial Sequence
  Oligonucleotide primer for the detection of SNP TSC0045160
taccctaaatat

SEQ ID NO: 347555 - DNA, 12 bp, Artificial Sequence
  Oligonucleotide primer for the detection of SNP TSC0045160
gggaagttttaa

SEQ ID NO: 347556 - DNA, 12 bp, Artificial Sequence
  Oligonucleotide primer for the detection of SNP TSC0045160
tgttttaagtgt

SEQ ID NO: 347557 - DNA, 12 bp, Artificial Sequence
  Oligonucleotide primer for the detection of SNP TSC0045161
ttaccaaaattt

SEQ ID NO: 347558 - DNA, 12 bp, Artificial Sequence
  Oligonucleotide primer for the detection of SNP TSC0045161
ttatagggttta

SEQ ID NO: 347559 - DNA, 12 bp, Artificial Sequence
  Oligonucleotide primer for the detection of SNP TSC0045162
tcccaaattttt

SEQ ID NO: 347560 - DNA, 12 bp, Artificial Sequence
  Oligonucleotide primer for the detection of SNP TSC0045162
aaagaaagaaaa

SEQ ID NO: 347561 - DNA, 12 bp, Artificial Sequence
  Oligonucleotide primer for the detection of SNP TSC0045163
aattataaccat

SEQ ID NO: 347562 - DNA, 12 bp, Artificial Sequence
  Oligonucleotide primer for the detection of SNP TSC0045163
agttggttaaga

SEQ ID NO: 347563 - DNA, 12 bp, Artificial Sequence
  Oligonucleotide primer for the detection of SNP TSC0045163
aactaatcaaaa

SEQ ID NO: 347564 - DNA, 12 bp, Artificial Sequence
  Oligonucleotide primer for the detection of SNP TSC0045163
gattatagttat

SEQ ID NO: 347565 - DNA, 12 bp, Artificial Sequence
  Oligonucleotide primer for the detection of SNP TSC0045164
cctaaacctaaa

SEQ ID NO: 347566 - DNA, 12 bp, Artificial Sequence
  Oligonucleotide primer for the detection of SNP TSC0045164
ttggtggaagga

SEQ ID NO: 347567 - DNA, 12 bp, Artificial Sequence
  Oligonucleotide primer for the detection of SNP TSC0045165
acacaaattctc

SEQ ID NO: 347568 - DNA, 12 bp, Artificial Sequence
  Oligonucleotide primer for the detection of SNP TSC0045165
acgcaaattctc

SEQ ID NO: 347569 - DNA, 12 bp, Artificial Sequence
  Oligonucleotide primer for the detection of SNP TSC0045165
gttgttgtggag

SEQ ID NO: 347570 - DNA, 12 bp, Artificial Sequence
  Oligonucleotide primer for the detection of SNP TSC0045166
gttttgaggggt

SEQ ID NO: 347571 - DNA, 12 bp, Artificial Sequence
  Oligonucleotide primer for the detection of SNP TSC0045166
gttctaaaaaat

SEQ ID NO: 347572 - DNA, 12 bp, Artificial Sequence
  Oligonucleotide primer for the detection of SNP TSC0045166
agagagaatttg

SEQ ID NO: 347573 - DNA, 12 bp, Artificial Sequence
  Oligonucleotide primer for the detection of SNP TSC0009311
ccatcaacactt

SEQ ID NO: 347574 - DNA, 12 bp, Artificial Sequence
  Oligonucleotide primer for the detection of SNP TSC0009311
aagatggattat

SEQ ID NO: 347575 - DNA, 12 bp, Artificial Sequence
  Oligonucleotide primer for the detection of SNP TSC0009311
caaaataaatca

SEQ ID NO: 347576 - DNA, 12 bp, Artificial Sequence
  Oligonucleotide primer for the detection of SNP TSC0009311
ttattagtattt

SEQ ID NO: 347577 - DNA, 12 bp, Artificial Sequence
  Oligonucleotide primer for the detection of SNP TSC0045170
acataaattaaa

SEQ ID NO: 347578 - DNA, 12 bp, Artificial Sequence
  Oligonucleotide primer for the detection of SNP TSC0007960
caccctcctcaa

SEQ ID NO: 347579 - DNA, 12 bp, Artificial Sequence
  Oligonucleotide primer for the detection of SNP TSC0007960
aggaagggtagg

SEQ ID NO: 347580 - DNA, 12 bp, Artificial Sequence
  Oligonucleotide primer for the detection of SNP TSC0006225
taaatttctttt

SEQ ID NO: 347581 - DNA, 12 bp, Artificial Sequence
  Oligonucleotide primer for the detection of SNP TSC0007615
taaacaacacat

SEQ ID NO: 347582 - DNA, 12 bp, Artificial Sequence
  Oligonucleotide primer for the detection of SNP TSC0007615
taagaaatgggg

SEQ ID NO: 347583 - DNA, 12 bp, Artificial Sequence
  Oligonucleotide primer for the detection of SNP TSC0007615
tgggtaatatat

SEQ ID NO: 347584 - DNA, 12 bp, Artificial Sequence
  Oligonucleotide primer for the detection of SNP TSC0045171
aaatcacataaa

SEQ ID NO: 347585 - DNA, 12 bp, Artificial Sequence
  Oligonucleotide primer for the detection of SNP TSC0045171
agattatatgag

SEQ ID NO: 347586 - DNA, 12 bp, Artificial Sequence
  Oligonucleotide primer for the detection of SNP TSC0045172
accctatctcta

SEQ ID NO: 347587 - DNA, 12 bp, Artificial Sequence
  Oligonucleotide primer for the detection of SNP TSC0045175
tacttataacat

SEQ ID NO: 347588 - DNA, 12 bp, Artificial Sequence
  Oligonucleotide primer for the detection of SNP TSC0045175
tttaagatattg

SEQ ID NO: 347589 - DNA, 12 bp, Artificial Sequence
  Oligonucleotide primer for the detection of SNP TSC0045177
accttaatcctc

SEQ ID NO: 347590 - DNA, 12 bp, Artificial Sequence
  Oligonucleotide primer for the detection of SNP TSC0045177
tagatgagggga

SEQ ID NO: 347591 - DNA, 12 bp, Artificial Sequence
  Oligonucleotide primer for the detection of SNP TSC0045179
tttttattttgt

SEQ ID NO: 347592 - DNA, 12 bp, Artificial Sequence
  Oligonucleotide primer for the detection of SNP TSC0045179
tctctcatttta

SEQ ID NO: 347593 - DNA, 12 bp, Artificial Sequence
  Oligonucleotide primer for the detection of SNP TSC0045179
aagaggtttaat

SEQ ID NO: 347594 - DNA, 12 bp, Artificial Sequence
  Oligonucleotide primer for the detection of SNP TSC0045179
aagaggtttaac

SEQ ID NO: 347595 - DNA, 12 bp, Artificial Sequence
  Oligonucleotide primer for the detection of SNP TSC0045180
cccacactatat

SEQ ID NO: 347596 - DNA, 12 bp, Artificial Sequence
  Oligonucleotide primer for the detection of SNP TSC0045180
ataggaatttga

SEQ ID NO: 347597 - DNA, 12 bp, Artificial Sequence
  Oligonucleotide primer for the detection of SNP TSC0045181
acaaattcaaca

SEQ ID NO: 347598 - DNA, 12 bp, Artificial Sequence
  Oligonucleotide primer for the detection of SNP TSC0045181
tttgagaagaat

SEQ ID NO: 347599 - DNA, 12 bp, Artificial Sequence
  Oligonucleotide primer for the detection of SNP TSC0045187
atcactaaataa

SEQ ID NO: 347600 - DNA, 12 bp, Artificial Sequence
  Oligonucleotide primer for the detection of SNP TSC0045187
cttaacttcata

SEQ ID NO: 347601 - DNA, 12 bp, Artificial Sequence
  Oligonucleotide primer for the detection of SNP TSC0045187
ttattggatgat

SEQ ID NO: 347602 - DNA, 12 bp, Artificial Sequence
  Oligonucleotide primer for the detection of SNP TSC0045188
aaaaaaatcata

SEQ ID NO: 347603 - DNA, 12 bp, Artificial Sequence
  Oligonucleotide primer for the detection of SNP TSC0045188
ggttattatatc

SEQ ID NO: 347604 - DNA, 12 bp, Artificial Sequence
  Oligonucleotide primer for the detection of SNP TSC0045188
aaatcattatat

SEQ ID NO: 347605 - DNA, 12 bp, Artificial Sequence
  Oligonucleotide primer for the detection of SNP TSC0045188
gaggggaattat

SEQ ID NO: 347606 - DNA, 12 bp, Artificial Sequence
  Oligonucleotide primer for the detection of SNP TSC0045189
caaaacctcatt

SEQ ID NO: 347607 - DNA, 12 bp, Artificial Sequence
  Oligonucleotide primer for the detection of SNP TSC0045189
ttatatggtgga

SEQ ID NO: 347608 - DNA, 12 bp, Artificial Sequence
  Oligonucleotide primer for the detection of SNP TSC0045189
tcacataataaa

SEQ ID NO: 347609 - DNA, 12 bp, Artificial Sequence
  Oligonucleotide primer for the detection of SNP TSC0045190
aaatcccaaccc

SEQ ID NO: 347610 - DNA, 12 bp, Artificial Sequence
  Oligonucleotide primer for the detection of SNP TSC0045190
tttttaagtgat

SEQ ID NO: 347611 - DNA, 12 bp, Artificial Sequence
  Oligonucleotide primer for the detection of SNP TSC0045190
tttttaagtgac

SEQ ID NO: 347612 - DNA, 12 bp, Artificial Sequence
  Oligonucleotide primer for the detection of SNP TSC0045190
ctcctaaataac

SEQ ID NO: 347613 - DNA, 12 bp, Artificial Sequence
  Oligonucleotide primer for the detection of SNP TSC0045190
gaattttagttt

SEQ ID NO: 347614 - DNA, 12 bp, Artificial Sequence
  Oligonucleotide primer for the detection of SNP TSC0045190
gaattttagttc

SEQ ID NO: 347615 - DNA, 12 bp, Artificial Sequence
  Oligonucleotide primer for the detection of SNP TSC0045191
tttttggtttat

SEQ ID NO: 347616 - DNA, 12 bp, Artificial Sequence
  Oligonucleotide primer for the detection of SNP TSC0045191
ttctaatccaca

SEQ ID NO: 347617 - DNA, 12 bp, Artificial Sequence
  Oligonucleotide primer for the detection of SNP TSC0045191
agaatagatgtt

SEQ ID NO: 347618 - DNA, 12 bp, Artificial Sequence
  Oligonucleotide primer for the detection of SNP TSC0000547
acatcctaccca

SEQ ID NO: 347619 - DNA, 12 bp, Artificial Sequence
  Oligonucleotide primer for the detection of SNP TSC0000547
aattagtggttt

SEQ ID NO: 347620 - DNA, 12 bp, Artificial Sequence
  Oligonucleotide primer for the detection of SNP TSC0000547
atattttattta

SEQ ID NO: 347621 - DNA, 12 bp, Artificial Sequence
  Oligonucleotide primer for the detection of SNP TSC0000548
aggttttggaag

SEQ ID NO: 347622 - DNA, 12 bp, Artificial Sequence
  Oligonucleotide primer for the detection of SNP TSC0000548
ttgggattgtag

SEQ ID NO: 347623 - DNA, 12 bp, Artificial Sequence
  Oligonucleotide primer for the detection of SNP TSC0045192
ccactaatttac

SEQ ID NO: 347624 - DNA, 12 bp, Artificial Sequence
  Oligonucleotide primer for the detection of SNP TSC0045192
aattaaaataag

SEQ ID NO: 347625 - DNA, 12 bp, Artificial Sequence
  Oligonucleotide primer for the detection of SNP TSC0045193
acacaacctaca

SEQ ID NO: 347626 - DNA, 12 bp, Artificial Sequence
  Oligonucleotide primer for the detection of SNP TSC0045193
gagttattgtat

SEQ ID NO: 347627 - DNA, 12 bp, Artificial Sequence
  Oligonucleotide primer for the detection of SNP TSC0045193
ggtatagtttat

SEQ ID NO: 347628 - DNA, 12 bp, Artificial Sequence
  Oligonucleotide primer for the detection of SNP TSC0045194
aaaaactaactc

SEQ ID NO: 347629 - DNA, 12 bp, Artificial Sequence
  Oligonucleotide primer for the detection of SNP TSC0045194
tatatattttag

SEQ ID NO: 347630 - DNA, 12 bp, Artificial Sequence
  Oligonucleotide primer for the detection of SNP TSC0045195
aacctatatttt

SEQ ID NO: 347631 - DNA, 12 bp, Artificial Sequence
  Oligonucleotide primer for the detection of SNP TSC0045195
gtgatgtatatg

SEQ ID NO: 347632 - DNA, 12 bp, Artificial Sequence
  Oligonucleotide primer for the detection of SNP TSC0045196
tacttaacctcc

SEQ ID NO: 347633 - DNA, 12 bp, Artificial Sequence
  Oligonucleotide primer for the detection of SNP TSC0045196
acaatctttctc

SEQ ID NO: 347634 - DNA, 12 bp, Artificial Sequence
  Oligonucleotide primer for the detection of SNP TSC0045197
taggaagggatt

SEQ ID NO: 347635 - DNA, 12 bp, Artificial Sequence
  Oligonucleotide primer for the detection of SNP TSC0045197
agaagataaagt

SEQ ID NO: 347636 - DNA, 12 bp, Artificial Sequence
  Oligonucleotide primer for the detection of SNP TSC0045198
tcaacctaccaa

SEQ ID NO: 347637 - DNA, 12 bp, Artificial Sequence
  Oligonucleotide primer for the detection of SNP TSC0045198
atttattggaat

SEQ ID NO: 347638 - DNA, 12 bp, Artificial Sequence
  Oligonucleotide primer for the detection of SNP TSC0045199
taatataaggta

SEQ ID NO: 347639 - DNA, 12 bp, Artificial Sequence
  Oligonucleotide primer for the detection of SNP TSC0045200
aaaaccatcaaa

SEQ ID NO: 347640 - DNA, 12 bp, Artificial Sequence
  Oligonucleotide primer for the detection of SNP TSC0045200
aagaaaaagttt

SEQ ID NO: 347641 - DNA, 12 bp, Artificial Sequence
  Oligonucleotide primer for the detection of SNP TSC0045200
atgaagttatta

SEQ ID NO: 347642 - DNA, 12 bp, Artificial Sequence
  Oligonucleotide primer for the detection of SNP TSC0010372
ttgttgtgttaa

SEQ ID NO: 347643 - DNA, 12 bp, Artificial Sequence
  Oligonucleotide primer for the detection of SNP TSC0010372
tcgttgtgttaa

SEQ ID NO: 347644 - DNA, 12 bp, Artificial Sequence
  Oligonucleotide primer for the detection of SNP TSC0010372
tcattataccaa

SEQ ID NO: 347645 - DNA, 12 bp, Artificial Sequence
  Oligonucleotide primer for the detection of SNP TSC0010372
tcgttataccaa

SEQ ID NO: 347646 - DNA, 12 bp, Artificial Sequence
  Oligonucleotide primer for the detection of SNP TSC0000505
attagttaggtg

SEQ ID NO: 347647 - DNA, 12 bp, Artificial Sequence
  Oligonucleotide primer for the detection of SNP TSC0000505
attagttaggcg

SEQ ID NO: 347648 - DNA, 12 bp, Artificial Sequence
  Oligonucleotide primer for the detection of SNP TSC0045204
tggttatttata

SEQ ID NO: 347649 - DNA, 12 bp, Artificial Sequence
  Oligonucleotide primer for the detection of SNP TSC0045205
gaaatttgtttg

SEQ ID NO: 347650 - DNA, 12 bp, Artificial Sequence
  Oligonucleotide primer for the detection of SNP TSC0045205
gaaatttgttcg

SEQ ID NO: 347651 - DNA, 12 bp, Artificial Sequence
  Oligonucleotide primer for the detection of SNP TSC0045205
aaaatctaccca

SEQ ID NO: 347652 - DNA, 12 bp, Artificial Sequence
  Oligonucleotide primer for the detection of SNP TSC0045205
aaaatctacccg

SEQ ID NO: 347653 - DNA, 12 bp, Artificial Sequence
  Oligonucleotide primer for the detection of SNP TSC0045205
ggtgattggatt

SEQ ID NO: 347654 - DNA, 12 bp, Artificial Sequence
  Oligonucleotide primer for the detection of SNP TSC0045206
atctatattcct

SEQ ID NO: 347655 - DNA, 12 bp, Artificial Sequence
  Oligonucleotide primer for the detection of SNP TSC0045206
tataaaatttgg

SEQ ID NO: 347656 - DNA, 12 bp, Artificial Sequence
  Oligonucleotide primer for the detection of SNP TSC0045207
aactaataaata

SEQ ID NO: 347657 - DNA, 12 bp, Artificial Sequence
  Oligonucleotide primer for the detection of SNP TSC0045207
atcctaactcca

SEQ ID NO: 347658 - DNA, 12 bp, Artificial Sequence
  Oligonucleotide primer for the detection of SNP TSC0045207
tagttagtaagt

SEQ ID NO: 347659 - DNA, 12 bp, Artificial Sequence
  Oligonucleotide primer for the detection of SNP TSC0045208
actccactactt

SEQ ID NO: 347660 - DNA, 12 bp, Artificial Sequence
  Oligonucleotide primer for the detection of SNP TSC0045208
ggttattagtta

SEQ ID NO: 347661 - DNA, 12 bp, Artificial Sequence
  Oligonucleotide primer for the detection of SNP TSC0045209
attaacatatca

SEQ ID NO: 347662 - DNA, 12 bp, Artificial Sequence
  Oligonucleotide primer for the detection of SNP TSC0045209
ttaagtattaat

SEQ ID NO: 347663 - DNA, 12 bp, Artificial Sequence
  Oligonucleotide primer for the detection of SNP TSC0045209
gttggtatgtta

SEQ ID NO: 347664 - DNA, 12 bp, Artificial Sequence
  Oligonucleotide primer for the detection of SNP TSC0045210
caaccaaattta

SEQ ID NO: 347665 - DNA, 12 bp, Artificial Sequence
  Oligonucleotide primer for the detection of SNP TSC0045210
ttgtttttatga

SEQ ID NO: 347666 - DNA, 12 bp, Artificial Sequence
  Oligonucleotide primer for the detection of SNP TSC0045210
ttactttcataa

SEQ ID NO: 347667 - DNA, 12 bp, Artificial Sequence
  Oligonucleotide primer for the detection of SNP TSC0045210
tagttaggttta

SEQ ID NO: 347668 - DNA, 12 bp, Artificial Sequence
  Oligonucleotide primer for the detection of SNP TSC0045211
atggataagata

SEQ ID NO: 347669 - DNA, 12 bp, Artificial Sequence
  Oligonucleotide primer for the detection of SNP TSC0000630
acaactaattct

SEQ ID NO: 347670 - DNA, 12 bp, Artificial Sequence
  Oligonucleotide primer for the detection of SNP TSC0000630
ttgatggagaag

SEQ ID NO: 347671 - DNA, 12 bp, Artificial Sequence
  Oligonucleotide primer for the detection of SNP TSC0000630
gtagttagtttt

SEQ ID NO: 347672 - DNA, 12 bp, Artificial Sequence
  Oligonucleotide primer for the detection of SNP TSC0000631
gttgtttgatta

SEQ ID NO: 347673 - DNA, 12 bp, Artificial Sequence
  Oligonucleotide primer for the detection of SNP TSC0000631
actatttaacca

SEQ ID NO: 347674 - DNA, 12 bp, Artificial Sequence
  Oligonucleotide primer for the detection of SNP TSC0000631
ttgtgattttgt

SEQ ID NO: 347675 - DNA, 12 bp, Artificial Sequence
  Oligonucleotide primer for the detection of SNP TSC0045213
atatgtgttttg

SEQ ID NO: 347676 - DNA, 12 bp, Artificial Sequence
  Oligonucleotide primer for the detection of SNP TSC0045213
atatgcgttttg

SEQ ID NO: 347677 - DNA, 12 bp, Artificial Sequence
  Oligonucleotide primer for the detection of SNP TSC0045213
acatacgttcta

SEQ ID NO: 347678 - DNA, 12 bp, Artificial Sequence
  Oligonucleotide primer for the detection of SNP TSC0045213
tagaagaggttt

SEQ ID NO: 347679 - DNA, 12 bp, Artificial Sequence
  Oligonucleotide primer for the detection of SNP TSC0045214
aaacaaatatct

SEQ ID NO: 347680 - DNA, 12 bp, Artificial Sequence
  Oligonucleotide primer for the detection of SNP TSC0045214
ctttcccttaaa

SEQ ID NO: 347681 - DNA, 12 bp, Artificial Sequence
  Oligonucleotide primer for the detection of SNP TSC0045215
aataattactta

SEQ ID NO: 347682 - DNA, 12 bp, Artificial Sequence
  Oligonucleotide primer for the detection of SNP TSC0045215
ttagtaaatatt

SEQ ID NO: 347683 - DNA, 12 bp, Artificial Sequence
  Oligonucleotide primer for the detection of SNP TSC0045215
ttagtaaatatc

SEQ ID NO: 347684 - DNA, 12 bp, Artificial Sequence
  Oligonucleotide primer for the detection of SNP TSC0045215
tttaataaacat

SEQ ID NO: 347685 - DNA, 12 bp, Artificial Sequence
  Oligonukleotid-Primer
taattgtttatt

SEQ ID NO: 347686 - DNA, 12 bp, Artificial Sequence
  Oligonucleotide primer for the detection of SNP TSC0045216
acccataaaccc

SEQ ID NO: 347687 - DNA, 12 bp, Artificial Sequence
  Oligonucleotide primer for the detection of SNP TSC0045216
gtttaattataa

SEQ ID NO: 347688 - DNA, 12 bp, Artificial Sequence
  Oligonucleotide primer for the detection of SNP TSC0045217
tttatcttcaaa

SEQ ID NO: 347689 - DNA, 12 bp, Artificial Sequence
  Oligonukleotid-Primer
taaaatttgaat

SEQ ID NO: 347690 - DNA, 12 bp, Artificial Sequence
  Oligonucleotide primer for the detection of SNP TSC0045218
ccatcttatccc

SEQ ID NO: 347691 - DNA, 12 bp, Artificial Sequence
  Oligonucleotide primer for the detection of SNP TSC0045218
ccgtcttatccc

SEQ ID NO: 347692 - DNA, 12 bp, Artificial Sequence
  Oligonucleotide primer for the detection of SNP TSC0045218
ggtgtggtgtgt

SEQ ID NO: 347693 - DNA, 12 bp, Artificial Sequence
  Oligonucleotide primer for the detection of SNP TSC0045218
cgttttattttt

SEQ ID NO: 347694 - DNA, 12 bp, Artificial Sequence
  Oligonucleotide primer for the detection of SNP TSC0010528
ccttcttcctac

SEQ ID NO: 347695 - DNA, 12 bp, Artificial Sequence
  Oligonucleotide primer for the detection of SNP TSC0000833
attaatacttac

SEQ ID NO: 347696 - DNA, 12 bp, Artificial Sequence
  Oligonucleotide primer for the detection of SNP TSC0000833
ttattgtttgaa

SEQ ID NO: 347697 - DNA, 12 bp, Artificial Sequence
  Oligonukleotid-Primer
accctttccctc

SEQ ID NO: 347698 - DNA, 12 bp, Artificial Sequence
  Oligonucleotide primer for the detection of SNP TSC0000589
aagttagaagag

SEQ ID NO: 347699 - DNA, 12 bp, Artificial Sequence
  Oligonucleotide primer for the detection of SNP TSC0000216
ttcccttcccat

SEQ ID NO: 347700 - DNA, 12 bp, Artificial Sequence
  Oligonucleotide primer for the detection of SNP TSC0000216
ggaggtttgatg

SEQ ID NO: 347701 - DNA, 12 bp, Artificial Sequence
  Oligonukleotid-Primer
cttataaaactt

SEQ ID NO: 347702 - DNA, 12 bp, Artificial Sequence
  Oligonucleotide primer for the detection of SNP TSC0000217
ttttgatagtga

SEQ ID NO: 347703 - DNA, 12 bp, Artificial Sequence
  Oligonucleotide primer for the detection of SNP TSC0045224
attttaatctcc

SEQ ID NO: 347704 - DNA, 12 bp, Artificial Sequence
  Oligonucleotide primer for the detection of SNP TSC0045224
tgtgatgtgagg

SEQ ID NO: 347705 - DNA, 12 bp, Artificial Sequence
  Oligonukleotid-Primer
aacacacaaact

SEQ ID NO: 347706 - DNA, 12 bp, Artificial Sequence
  Oligonucleotide primer for the detection of SNP TSC0045225
agtttagatgat

SEQ ID NO: 347707 - DNA, 12 bp, Artificial Sequence
  Oligonucleotide primer for the detection of SNP TSC0000824
actatttccata

SEQ ID NO: 347708 - DNA, 12 bp, Artificial Sequence
  Oligonucleotide primer for the detection of SNP TSC0000824
aatgattattgt

SEQ ID NO: 347709 - DNA, 12 bp, Artificial Sequence
  Oligonucleotide primer for the detection of SNP TSC0000824
aacgattattgt

SEQ ID NO: 347710 - DNA, 12 bp, Artificial Sequence
  Oligonucleotide primer for the detection of SNP TSC0000824
aacaaccactat

SEQ ID NO: 347711 - DNA, 12 bp, Artificial Sequence
  Oligonucleotide primer for the detection of SNP TSC0000824
aacgaccactat

SEQ ID NO: 347712 - DNA, 12 bp, Artificial Sequence
  Oligonucleotide primer for the detection of SNP TSC0001149
atctatataaaa

SEQ ID NO: 347713 - DNA, 12 bp, Artificial Sequence
  Oligonucleotide primer for the detection of SNP TSC0001149
ttgtgtgagtaa

SEQ ID NO: 347714 - DNA, 12 bp, Artificial Sequence
  Oligonucleotide primer for the detection of SNP TSC0001149
gtttgtgtaagg

SEQ ID NO: 347715 - DNA, 12 bp, Artificial Sequence
  Oligonucleotide primer for the detection of SNP TSC0001150
aagtttttatat

SEQ ID NO: 347716 - DNA, 12 bp, Artificial Sequence
  Oligonucleotide primer for the detection of SNP TSC0001150
aacccttacaca

SEQ ID NO: 347717 - DNA, 12 bp, Artificial Sequence
  Oligonucleotide primer for the detection of SNP TSC0001150
agtttagtttgt

SEQ ID NO: 347718 - DNA, 12 bp, Artificial Sequence
  Oligonucleotide primer for the detection of SNP TSC0009759
taataacttttt

SEQ ID NO: 347719 - DNA, 12 bp, Artificial Sequence
  Oligonucleotide primer for the detection of SNP TSC0045227
tatccataaata

SEQ ID NO: 347720 - DNA, 12 bp, Artificial Sequence
  Oligonucleotide primer for the detection of SNP TSC0045227
tatccgtaaata

SEQ ID NO: 347721 - DNA, 12 bp, Artificial Sequence
  Oligonucleotide primer for the detection of SNP TSC0045227
aggaaggtatat

SEQ ID NO: 347722 - DNA, 12 bp, Artificial Sequence
  Oligonucleotide primer for the detection of SNP TSC0045227
tatttgtaaata

SEQ ID NO: 347723 - DNA, 12 bp, Artificial Sequence
  Oligonucleotide primer for the detection of SNP TSC0045227
tattcgtaaata

SEQ ID NO: 347724 - DNA, 12 bp, Artificial Sequence
  Oligonucleotide primer for the detection of SNP TSC0000272
ttaataaaaacc

SEQ ID NO: 347725 - DNA, 12 bp, Artificial Sequence
  Oligonucleotide primer for the detection of SNP TSC0000272
taatattagaga

SEQ ID NO: 347726 - DNA, 12 bp, Artificial Sequence
  Oligonucleotide primer for the detection of SNP TSC0045228
tccttaacacac

SEQ ID NO: 347727 - DNA, 12 bp, Artificial Sequence
  Oligonucleotide primer for the detection of SNP TSC0045230
attatacctaaa

SEQ ID NO: 347728 - DNA, 12 bp, Artificial Sequence
  Oligonucleotide primer for the detection of SNP TSC0045230
ggaagtatattt

SEQ ID NO: 347729 - DNA, 12 bp, Artificial Sequence
  Oligonucleotide primer for the detection of SNP TSC0045230
aaaaacatattt

SEQ ID NO: 347730 - DNA, 12 bp, Artificial Sequence
  Oligonucleotide primer for the detection of SNP TSC0001563
tcccaaaaaata

SEQ ID NO: 347731 - DNA, 12 bp, Artificial Sequence
  Oligonucleotide primer for the detection of SNP TSC0001563
tatgaatatttt

SEQ ID NO: 347732 - DNA, 12 bp, Artificial Sequence
  Oligonucleotide primer for the detection of SNP TSC0001563
tataaacacctt

SEQ ID NO: 347733 - DNA, 12 bp, Artificial Sequence
  Oligonucleotide primer for the detection of SNP TSC0001563
ttttaaagagtg

SEQ ID NO: 347734 - DNA, 12 bp, Artificial Sequence
  Oligonucleotide primer for the detection of SNP TSC0045235
gtttcgttatgt

SEQ ID NO: 347735 - DNA, 12 bp, Artificial Sequence
  Oligonucleotide primer for the detection of SNP TSC0045235
atttcaccatat

SEQ ID NO: 347736 - DNA, 12 bp, Artificial Sequence
  Oligonucleotide primer for the detection of SNP TSC0045235
atttcgccatat

SEQ ID NO: 347737 - DNA, 12 bp, Artificial Sequence
  Oligonucleotide primer for the detection of SNP TSC0000269
tattaaaataac

SEQ ID NO: 347738 - DNA, 12 bp, Artificial Sequence
  Oligonucleotide primer for the detection of SNP TSC0000364
atatccataaat

SEQ ID NO: 347739 - DNA, 12 bp, Artificial Sequence
  Oligonucleotide primer for the detection of SNP TSC0000364
ttgatattaatt

SEQ ID NO: 347740 - DNA, 12 bp, Artificial Sequence
  Oligonucleotide primer for the detection of SNP TSC0000364
ctaatattaatt

SEQ ID NO: 347741 - DNA, 12 bp, Artificial Sequence
  Oligonucleotide primer for the detection of SNP TSC0000364
atgtttatgggt

SEQ ID NO: 347742 - DNA, 12 bp, Artificial Sequence
  Oligonucleotide primer for the detection of SNP TSC0045236
attaacataaaa

SEQ ID NO: 347743 - DNA, 12 bp, Artificial Sequence
  Oligonucleotide primer for the detection of SNP TSC0045236
tgatttatgtat

SEQ ID NO: 347744 - DNA, 12 bp, Artificial Sequence
  Oligonucleotide primer for the detection of SNP TSC0045236
taacttatatat

SEQ ID NO: 347745 - DNA, 12 bp, Artificial Sequence
  Oligonucleotide primer for the detection of SNP TSC0045236
attgatataaaa

SEQ ID NO: 347746 - DNA, 12 bp, Artificial Sequence
  Oligonucleotide primer for the detection of SNP TSC0045237
atcaataaaaca

SEQ ID NO: 347747 - DNA, 12 bp, Artificial Sequence
  Oligonucleotide primer for the detection of SNP TSC0045237
gggatttttatt

SEQ ID NO: 347748 - DNA, 12 bp, Artificial Sequence
  Oligonucleotide primer for the detection of SNP TSC0045237
ctaaaattccta

SEQ ID NO: 347749 - DNA, 12 bp, Artificial Sequence
  Oligonucleotide primer for the detection of SNP TSC0045237
agttaatgaaat

SEQ ID NO: 347750 - DNA, 12 bp, Artificial Sequence
  Oligonucleotide primer for the detection of SNP TSC0045238
taatttacaaat

SEQ ID NO: 347751 - DNA, 12 bp, Artificial Sequence
  Oligonucleotide primer for the detection of SNP TSC0045238
gtttggaagaag

SEQ ID NO: 347752 - DNA, 12 bp, Artificial Sequence
  Oligonucleotide primer for the detection of SNP TSC0045239
aaaacaaaatca

SEQ ID NO: 347753 - DNA, 12 bp, Artificial Sequence
  Oligonucleotide primer for the detection of SNP TSC0045239
ttttaggaatag

SEQ ID NO: 347754 - DNA, 12 bp, Artificial Sequence
  Oligonucleotide primer for the detection of SNP TSC0045239
tctcaaaaataa

SEQ ID NO: 347755 - DNA, 12 bp, Artificial Sequence
  Oligonucleotide primer for the detection of SNP TSC0045239
gaaataaagtta

SEQ ID NO: 347756 - DNA, 12 bp, Artificial Sequence
  Oligonucleotide primer for the detection of SNP TSC0045240
atttaaaaactc

SEQ ID NO: 347757 - DNA, 12 bp, Artificial Sequence
  Oligonucleotide primer for the detection of SNP TSC0045240
gaaattaattga

SEQ ID NO: 347758 - DNA, 12 bp, Artificial Sequence
  Oligonucleotide primer for the detection of SNP TSC0045241
ctaataaacaca

SEQ ID NO: 347759 - DNA, 12 bp, Artificial Sequence
  Oligonucleotide primer for the detection of SNP TSC0045242
attttctctcca

SEQ ID NO: 347760 - DNA, 12 bp, Artificial Sequence
  Oligonucleotide primer for the detection of SNP TSC0045242
ttataggtattt

SEQ ID NO: 347761 - DNA, 12 bp, Artificial Sequence
  Oligonucleotide primer for the detection of SNP TSC0045242
ttataaacactt

SEQ ID NO: 347762 - DNA, 12 bp, Artificial Sequence
  Oligonucleotide primer for the detection of SNP TSC0045243
aataggaaggaa

SEQ ID NO: 347763 - DNA, 12 bp, Artificial Sequence
  Oligonucleotide primer for the detection of SNP TSC0045244
tactaccaaacc

SEQ ID NO: 347764 - DNA, 12 bp, Artificial Sequence
  Oligonucleotide primer for the detection of SNP TSC0045244
agagaggagttt

SEQ ID NO: 347765 - DNA, 12 bp, Artificial Sequence
  Oligonucleotide primer for the detection of SNP TSC0045244
tgttgttaagtt

SEQ ID NO: 347766 - DNA, 12 bp, Artificial Sequence
  Oligonucleotide primer for the detection of SNP TSC0045245
aataattcaaaa

SEQ ID NO: 347767 - DNA, 12 bp, Artificial Sequence
  Oligonucleotide primer for the detection of SNP TSC0045245
attagataataa

SEQ ID NO: 347768 - DNA, 12 bp, Artificial Sequence
  Oligonucleotide primer for the detection of SNP TSC0045245
aagtaatttaga

SEQ ID NO: 347769 - DNA, 12 bp, Artificial Sequence
  Oligonucleotide primer for the detection of SNP TSC0045246
ttagataataat

SEQ ID NO: 347770 - DNA, 12 bp, Artificial Sequence
  Oligonucleotide primer for the detection of SNP TSC0045246
taagtaatttag

SEQ ID NO: 347771 - DNA, 12 bp, Artificial Sequence
  Oligonucleotide primer for the detection of SNP TSC0045248
tctaaaacaaaa

SEQ ID NO: 347772 - DNA, 12 bp, Artificial Sequence
  Oligonucleotide primer for the detection of SNP TSC0045248
atctcatcacaa

SEQ ID NO: 347773 - DNA, 12 bp, Artificial Sequence
  Oligonucleotide primer for the detection of SNP TSC0045248
tttaaaatagaa

SEQ ID NO: 347774 - DNA, 12 bp, Artificial Sequence
  Oligonucleotide primer for the detection of SNP TSC0045249
aattcaatatta

SEQ ID NO: 347775 - DNA, 12 bp, Artificial Sequence
  Oligonucleotide primer for the detection of SNP TSC0045249
agaaagttatta

SEQ ID NO: 347776 - DNA, 12 bp, Artificial Sequence
  Oligonucleotide primer for the detection of SNP TSC0045249
aatttagtatta

SEQ ID NO: 347777 - DNA, 12 bp, Artificial Sequence
  Oligonucleotide primer for the detection of SNP TSC0045250
cacatcatttcc

SEQ ID NO: 347778 - DNA, 12 bp, Artificial Sequence
  Oligonucleotide primer for the detection of SNP TSC0045250
aggtttaaaaaa

SEQ ID NO: 347779 - DNA, 12 bp, Artificial Sequence
  Oligonucleotide primer for the detection of SNP TSC0045251
ataaaatacacc

SEQ ID NO: 347780 - DNA, 12 bp, Artificial Sequence
  Oligonucleotide primer for the detection of SNP TSC0045251
tttaaaatgtga

SEQ ID NO: 347781 - DNA, 12 bp, Artificial Sequence
  Oligonucleotide primer for the detection of SNP TSC0045252
tataaccataac

SEQ ID NO: 347782 - DNA, 12 bp, Artificial Sequence
  Oligonucleotide primer for the detection of SNP TSC0045252
tataaccgtaac

SEQ ID NO: 347783 - DNA, 12 bp, Artificial Sequence
  Oligonucleotide primer for the detection of SNP TSC0045252
ggagatagatgg

SEQ ID NO: 347784 - DNA, 12 bp, Artificial Sequence
  Oligonucleotide primer for the detection of SNP TSC0045255
caataactatta

SEQ ID NO: 347785 - DNA, 12 bp, Artificial Sequence
  Oligonucleotide primer for the detection of SNP TSC0045255
attaattgtatt

SEQ ID NO: 347786 - DNA, 12 bp, Artificial Sequence
  Oligonucleotide primer for the detection of SNP TSC0045255
atcaactacatt

SEQ ID NO: 347787 - DNA, 12 bp, Artificial Sequence
  Oligonucleotide primer for the detection of SNP TSC0045255
taataattgtta

SEQ ID NO: 347788 - DNA, 12 bp, Artificial Sequence
  Oligonucleotide primer for the detection of SNP TSC0045257
cgataaacaaaa

SEQ ID NO: 347789 - DNA, 12 bp, Artificial Sequence
  Oligonucleotide primer for the detection of SNP TSC0045257
gggagatttttt

SEQ ID NO: 347790 - DNA, 12 bp, Artificial Sequence
  Oligonucleotide primer for the detection of SNP TSC0045257
aaaaatttccta

SEQ ID NO: 347791 - DNA, 12 bp, Artificial Sequence
  Oligonucleotide primer for the detection of SNP TSC0045257
gtaggtaaaatt

SEQ ID NO: 347792 - DNA, 12 bp, Artificial Sequence
  Oligonucleotide primer for the detection of SNP TSC0045258
atttctattaat

SEQ ID NO: 347793 - DNA, 12 bp, Artificial Sequence
  Oligonucleotide primer for the detection of SNP TSC0045258
taaaattgttat

SEQ ID NO: 347794 - DNA, 12 bp, Artificial Sequence
  Oligonucleotide primer for the detection of SNP TSC0045258
ttaaaattatca

SEQ ID NO: 347795 - DNA, 12 bp, Artificial Sequence
  Oligonucleotide primer for the detection of SNP TSC0045258
gtttttattaat

SEQ ID NO: 347796 - DNA, 12 bp, Artificial Sequence
  Oligonucleotide primer for the detection of SNP TSC0045259
acttctctaacc

SEQ ID NO: 347797 - DNA, 12 bp, Artificial Sequence
  Oligonucleotide primer for the detection of SNP TSC0045260
ttttaccctttt

SEQ ID NO: 347798 - DNA, 12 bp, Artificial Sequence
  Oligonucleotide primer for the detection of SNP TSC0045260
gaagataatata

SEQ ID NO: 347799 - DNA, 12 bp, Artificial Sequence
  Oligonucleotide primer for the detection of SNP TSC0045261
gtactaaacaat

SEQ ID NO: 347800 - DNA, 12 bp, Artificial Sequence
  Oligonucleotide primer for the detection of SNP TSC0045261
taaggtttagga

SEQ ID NO: 347801 - DNA, 12 bp, Artificial Sequence
  Oligonucleotide primer for the detection of SNP TSC0045262
tagtttgaggaa

SEQ ID NO: 347802 - DNA, 12 bp, Artificial Sequence
  Oligonucleotide primer for the detection of SNP TSC0045263
caaaaacatacc

SEQ ID NO: 347803 - DNA, 12 bp, Artificial Sequence
  Oligonucleotide primer for the detection of SNP TSC0045263
aaccaaatataa

SEQ ID NO: 347804 - DNA, 12 bp, Artificial Sequence
  Oligonucleotide primer for the detection of SNP TSC0045263
taggagtatgtt

SEQ ID NO: 347805 - DNA, 12 bp, Artificial Sequence
  Oligonucleotide primer for the detection of SNP TSC0045264
aaaatcacttat

SEQ ID NO: 347806 - DNA, 12 bp, Artificial Sequence
  Oligonucleotide primer for the detection of SNP TSC0045264
ttggattttttg

SEQ ID NO: 347807 - DNA, 12 bp, Artificial Sequence
  Oligonucleotide primer for the detection of SNP TSC0045265
taaaaacacttt

SEQ ID NO: 347808 - DNA, 12 bp, Artificial Sequence
  Oligonucleotide primer for the detection of SNP TSC0045266
cttaattactct

SEQ ID NO: 347809 - DNA, 12 bp, Artificial Sequence
  Oligonucleotide primer for the detection of SNP TSC0045266
tttattggtagg

SEQ ID NO: 347810 - DNA, 12 bp, Artificial Sequence
  Oligonucleotide primer for the detection of SNP TSC0045268
tttataattggg

SEQ ID NO: 347811 - DNA, 12 bp, Artificial Sequence
  Oligonucleotide primer for the detection of SNP TSC0045269
ttaattttactt

SEQ ID NO: 347812 - DNA, 12 bp, Artificial Sequence
  Oligonucleotide primer for the detection of SNP TSC0045269
aatggtgttagg

SEQ ID NO: 347813 - DNA, 12 bp, Artificial Sequence
  Oligonucleotide primer for the detection of SNP TSC0045272
ccaatccttttc

SEQ ID NO: 347814 - DNA, 12 bp, Artificial Sequence
  Oligonucleotide primer for the detection of SNP TSC0045273
aaattatactat

SEQ ID NO: 347815 - DNA, 12 bp, Artificial Sequence
  Oligonucleotide primer for the detection of SNP TSC0045274
acatatacaata

SEQ ID NO: 347816 - DNA, 12 bp, Artificial Sequence
  Oligonucleotide primer for the detection of SNP TSC0045274
acgtatacaata

SEQ ID NO: 347817 - DNA, 12 bp, Artificial Sequence
  Oligonucleotide primer for the detection of SNP TSC0045274
aaacttccctca

SEQ ID NO: 347818 - DNA, 12 bp, Artificial Sequence
  Oligonucleotide primer for the detection of SNP TSC0045274
gtgtgtaatgtt

SEQ ID NO: 347819 - DNA, 12 bp, Artificial Sequence
  Oligonucleotide primer for the detection of SNP TSC0045278
aactttataatc

SEQ ID NO: 347820 - DNA, 12 bp, Artificial Sequence
  Oligonucleotide primer for the detection of SNP TSC0045278
aggttagttaag

SEQ ID NO: 347821 - DNA, 12 bp, Artificial Sequence
  Oligonucleotide primer for the detection of SNP TSC0045279
cttaattttctt

SEQ ID NO: 347822 - DNA, 12 bp, Artificial Sequence
  Oligonucleotide primer for the detection of SNP TSC0045279
tttgaagttaga

SEQ ID NO: 347823 - DNA, 12 bp, Artificial Sequence
  Oligonucleotide primer for the detection of SNP TSC0045280
gtttgaggttta

SEQ ID NO: 347824 - DNA, 12 bp, Artificial Sequence
  Oligonucleotide primer for the detection of SNP TSC0045281
caaaacaatttc

SEQ ID NO: 347825 - DNA, 12 bp, Artificial Sequence
  Oligonucleotide primer for the detection of SNP TSC0045281
caaaacgatttc

SEQ ID NO: 347826 - DNA, 12 bp, Artificial Sequence
  Oligonucleotide primer for the detection of SNP TSC0045281
atgtgtttataa

SEQ ID NO: 347827 - DNA, 12 bp, Artificial Sequence
  Oligonucleotide primer for the detection of SNP TSC0045282
tattaaacccct

SEQ ID NO: 347828 - DNA, 12 bp, Artificial Sequence
  Oligonucleotide primer for the detection of SNP TSC0045282
gattttagtgga

SEQ ID NO: 347829 - DNA, 12 bp, Artificial Sequence
  Oligonucleotide primer for the detection of SNP TSC0045282
gattttagcgga

SEQ ID NO: 347830 - DNA, 12 bp, Artificial Sequence
  Oligonucleotide primer for the detection of SNP TSC0045283
tcaaataaaacc

SEQ ID NO: 347831 - DNA, 12 bp, Artificial Sequence
  Oligonucleotide primer for the detection of SNP TSC0045283
ggggaaagatga

SEQ ID NO: 347832 - DNA, 12 bp, Artificial Sequence
  Oligonucleotide primer for the detection of SNP TSC0045284
acactatattat

SEQ ID NO: 347833 - DNA, 12 bp, Artificial Sequence
  Oligonucleotide primer for the detection of SNP TSC0045284
acgctatattat

SEQ ID NO: 347834 - DNA, 12 bp, Artificial Sequence
  Oligonucleotide primer for the detection of SNP TSC0045284
tgggaggttagg

SEQ ID NO: 347835 - DNA, 12 bp, Artificial Sequence
  Oligonucleotide primer for the detection of SNP TSC0045285
ctactctttaca

SEQ ID NO: 347836 - DNA, 12 bp, Artificial Sequence
  Oligonucleotide primer for the detection of SNP TSC0045285
tataagatggtg

SEQ ID NO: 347837 - DNA, 12 bp, Artificial Sequence
  Oligonucleotide primer for the detection of SNP TSC0045288
taaaataaatct

SEQ ID NO: 347838 - DNA, 12 bp, Artificial Sequence
  Oligonucleotide primer for the detection of SNP TSC0045288
taaaataggttt

SEQ ID NO: 347839 - DNA, 12 bp, Artificial Sequence
  Oligonucleotide primer for the detection of SNP TSC0045289
taaccaatttaa

SEQ ID NO: 347840 - DNA, 12 bp, Artificial Sequence
  Oligonucleotide primer for the detection of SNP TSC0045289
tttaaattagta

SEQ ID NO: 347841 - DNA, 12 bp, Artificial Sequence
  Oligonucleotide primer for the detection of SNP TSC0045289
cttaaatcaata

SEQ ID NO: 347842 - DNA, 12 bp, Artificial Sequence
  Oligonucleotide primer for the detection of SNP TSC0045290
ctaccactaatt

SEQ ID NO: 347843 - DNA, 12 bp, Artificial Sequence
  Oligonucleotide primer for the detection of SNP TSC0045290
tttaaatgaaaa

SEQ ID NO: 347844 - DNA, 12 bp, Artificial Sequence
  Oligonucleotide primer for the detection of SNP TSC0045291
tacctcatcaca

SEQ ID NO: 347845 - DNA, 12 bp, Artificial Sequence
  Oligonucleotide primer for the detection of SNP TSC0045291
agtagttggggg

SEQ ID NO: 347846 - DNA, 12 bp, Artificial Sequence
  Oligonucleotide primer for the detection of SNP TSC0045292
ataatttctact

SEQ ID NO: 347847 - DNA, 12 bp, Artificial Sequence
  Oligonucleotide primer for the detection of SNP TSC0045294
atttacaatatt

SEQ ID NO: 347848 - DNA, 12 bp, Artificial Sequence
  Oligonucleotide primer for the detection of SNP TSC0045294
ttttaaaagaat

SEQ ID NO: 347849 - DNA, 12 bp, Artificial Sequence
  Oligonucleotide primer for the detection of SNP TSC0045295
attcctttaaat

SEQ ID NO: 347850 - DNA, 12 bp, Artificial Sequence
  Oligonucleotide primer for the detection of SNP TSC0045295
tggaaaatgtta

SEQ ID NO: 347851 - DNA, 12 bp, Artificial Sequence
  Oligonucleotide primer for the detection of SNP TSC0045295
taaaaaatatca

SEQ ID NO: 347852 - DNA, 12 bp, Artificial Sequence
  Oligonucleotide primer for the detection of SNP TSC0045295
atttttttggat

SEQ ID NO: 347853 - DNA, 12 bp, Artificial Sequence
  Oligonucleotide primer for the detection of SNP TSC0045296
acctaaacttcc

SEQ ID NO: 347854 - DNA, 12 bp, Artificial Sequence
  Oligonucleotide primer for the detection of SNP TSC0045296
ggaaaattagaa

SEQ ID NO: 347855 - DNA, 12 bp, Artificial Sequence
  Oligonucleotide primer for the detection of SNP TSC0045298
tgagttaagatg

SEQ ID NO: 347856 - DNA, 12 bp, Artificial Sequence
  Oligonucleotide primer for the detection of SNP TSC0045299
tacacaataatt

SEQ ID NO: 347857 - DNA, 12 bp, Artificial Sequence
  Oligonucleotide primer for the detection of SNP TSC0045305
ttagaaaattat

SEQ ID NO: 347858 - DNA, 12 bp, Artificial Sequence
  Oligonucleotide primer for the detection of SNP TSC0045305
caaaaaaccaca

SEQ ID NO: 347859 - DNA, 12 bp, Artificial Sequence
  Oligonucleotide primer for the detection of SNP TSC0045305
gattataaaata

SEQ ID NO: 347860 - DNA, 12 bp, Artificial Sequence
  Oligonucleotide primer for the detection of SNP TSC0045307
ttttattttatc

SEQ ID NO: 347861 - DNA, 12 bp, Artificial Sequence
  Oligonucleotide primer for the detection of SNP TSC0045307
tttctaccatct

SEQ ID NO: 347862 - DNA, 12 bp, Artificial Sequence
  Oligonucleotide primer for the detection of SNP TSC0045308
tatactatctat

SEQ ID NO: 347863 - DNA, 12 bp, Artificial Sequence
  Oligonucleotide primer for the detection of SNP TSC0045308
aatgttgtataa

SEQ ID NO: 347864 - DNA, 12 bp, Artificial Sequence
  Oligonucleotide primer for the detection of SNP TSC0045309
aacataaaactt

SEQ ID NO: 347865 - DNA, 12 bp, Artificial Sequence
  Oligonucleotide primer for the detection of SNP TSC0045309
attggtatttga

SEQ ID NO: 347866 - DNA, 12 bp, Artificial Sequence
  Oligonucleotide primer for the detection of SNP TSC0045313
tatacttaaaat

SEQ ID NO: 347867 - DNA, 12 bp, Artificial Sequence
  Oligonucleotide primer for the detection of SNP TSC0045313
tatatgatttaa

SEQ ID NO: 347868 - DNA, 12 bp, Artificial Sequence
  Oligonucleotide primer for the detection of SNP TSC0045314
ctattccttctc

SEQ ID NO: 347869 - DNA, 12 bp, Artificial Sequence
  Oligonucleotide primer for the detection of SNP TSC0045314
gaataaagagga

SEQ ID NO: 347870 - DNA, 12 bp, Artificial Sequence
  Oligonucleotide primer for the detection of SNP TSC0045315
cttaaaaactat

SEQ ID NO: 347871 - DNA, 12 bp, Artificial Sequence
  Oligonucleotide primer for the detection of SNP TSC0045315
tattgagtatga

SEQ ID NO: 347872 - DNA, 12 bp, Artificial Sequence
  Oligonucleotide primer for the detection of SNP TSC0045316
ccaaatccttca

SEQ ID NO: 347873 - DNA, 12 bp, Artificial Sequence
  Oligonucleotide primer for the detection of SNP TSC0045316
ttattttagaat

SEQ ID NO: 347874 - DNA, 12 bp, Artificial Sequence
  Oligonucleotide primer for the detection of SNP TSC0045317
atacaacatatc

SEQ ID NO: 347875 - DNA, 12 bp, Artificial Sequence
  Oligonucleotide primer for the detection of SNP TSC0045317
ttaattttttgg

SEQ ID NO: 347876 - DNA, 12 bp, Artificial Sequence
  Oligonucleotide primer for the detection of SNP TSC0045318
tagttagaggat

SEQ ID NO: 347877 - DNA, 12 bp, Artificial Sequence
  Oligonucleotide primer for the detection of SNP TSC0045318
caactaaaaaat

SEQ ID NO: 347878 - DNA, 12 bp, Artificial Sequence
  Oligonucleotide primer for the detection of SNP TSC0045318
tgagtgggttgg

SEQ ID NO: 347879 - DNA, 12 bp, Artificial Sequence
  Oligonucleotide primer for the detection of SNP TSC0045321
caaatataatcc

SEQ ID NO: 347880 - DNA, 12 bp, Artificial Sequence
  Oligonucleotide primer for the detection of SNP TSC0045321
aaagaaatataa

SEQ ID NO: 347881 - DNA, 12 bp, Artificial Sequence
  Oligonucleotide primer for the detection of SNP TSC0045322
atttatattcca

SEQ ID NO: 347882 - DNA, 12 bp, Artificial Sequence
  Oligonucleotide primer for the detection of SNP TSC0045322
ttttctactaat

SEQ ID NO: 347883 - DNA, 12 bp, Artificial Sequence
  Oligonucleotide primer for the detection of SNP TSC0045322
atttgtgtttta

SEQ ID NO: 347884 - DNA, 12 bp, Artificial Sequence
  Oligonucleotide primer for the detection of SNP TSC0045323
attatccctata

SEQ ID NO: 347885 - DNA, 12 bp, Artificial Sequence
  Oligonucleotide primer for the detection of SNP TSC0045323
gaaatagaagat

SEQ ID NO: 347886 - DNA, 12 bp, Artificial Sequence
  Oligonucleotide primer for the detection of SNP TSC0045324
taattataaatc

SEQ ID NO: 347887 - DNA, 12 bp, Artificial Sequence
  Oligonucleotide primer for the detection of SNP TSC0045325
aattactaaatc

SEQ ID NO: 347888 - DNA, 12 bp, Artificial Sequence
  Oligonucleotide primer for the detection of SNP TSC0045325
agatatttgtgt

SEQ ID NO: 347889 - DNA, 12 bp, Artificial Sequence
  Oligonucleotide primer for the detection of SNP TSC0045325
atacctatacaa

SEQ ID NO: 347890 - DNA, 12 bp, Artificial Sequence
  Oligonucleotide primer for the detection of SNP TSC0045325
attgttaaattt

SEQ ID NO: 347891 - DNA, 12 bp, Artificial Sequence
  Oligonucleotide primer for the detection of SNP TSC0045326
acgtaataatac

SEQ ID NO: 347892 - DNA, 12 bp, Artificial Sequence
  Oligonucleotide primer for the detection of SNP TSC0045326
gtgtgatggtgt

SEQ ID NO: 347893 - DNA, 12 bp, Artificial Sequence
  Oligonucleotide primer for the detection of SNP TSC0045326
gcgtgatggtgt

SEQ ID NO: 347894 - DNA, 12 bp, Artificial Sequence
  Oligonucleotide primer for the detection of SNP TSC0045328
aaaattctatta

SEQ ID NO: 347895 - DNA, 12 bp, Artificial Sequence
  Oligonucleotide primer for the detection of SNP TSC0045329
aataataccaat

SEQ ID NO: 347896 - DNA, 12 bp, Artificial Sequence
  Oligonucleotide primer for the detection of SNP TSC0045329
tagaattttaag

SEQ ID NO: 347897 - DNA, 12 bp, Artificial Sequence
  Oligonucleotide primer for the detection of SNP TSC0045329
agtgatattaat

SEQ ID NO: 347898 - DNA, 12 bp, Artificial Sequence
  Oligonucleotide primer for the detection of SNP TSC0045333
tgaatttggata

SEQ ID NO: 347899 - DNA, 12 bp, Artificial Sequence
  Oligonucleotide primer for the detection of SNP TSC0045334
tgtatatgttta

SEQ ID NO: 347900 - DNA, 12 bp, Artificial Sequence
  Oligonucleotide primer for the detection of SNP TSC0045334
tacacatatcca

SEQ ID NO: 347901 - DNA, 12 bp, Artificial Sequence
  Oligonucleotide primer for the detection of SNP TSC0045334
aatgtgatgaat

SEQ ID NO: 347902 - DNA, 12 bp, Artificial Sequence
  Oligonucleotide primer for the detection of SNP TSC0045335
caaattcatcac

SEQ ID NO: 347903 - DNA, 12 bp, Artificial Sequence
  Oligonucleotide primer for the detection of SNP TSC0045335
ttaatgtatata

SEQ ID NO: 347904 - DNA, 12 bp, Artificial Sequence
  Oligonucleotide primer for the detection of SNP TSC0045336
actaaaaaaact

SEQ ID NO: 347905 - DNA, 12 bp, Artificial Sequence
  Oligonucleotide primer for the detection of SNP TSC0045336
tcctcccctcct

SEQ ID NO: 347906 - DNA, 12 bp, Artificial Sequence
  Oligonucleotide primer for the detection of SNP TSC0045336
gttggggaggtt

SEQ ID NO: 347907 - DNA, 12 bp, Artificial Sequence
  Oligonucleotide primer for the detection of SNP TSC0045337
gtgtagtggtta

SEQ ID NO: 347908 - DNA, 12 bp, Artificial Sequence
  Oligonucleotide primer for the detection of SNP TSC0045337
atacaataatca

SEQ ID NO: 347909 - DNA, 12 bp, Artificial Sequence
  Oligonucleotide primer for the detection of SNP TSC0045337
gtgagttgtaat

SEQ ID NO: 347910 - DNA, 12 bp, Artificial Sequence
  Oligonucleotide primer for the detection of SNP TSC0045339
aataccttttcc

SEQ ID NO: 347911 - DNA, 12 bp, Artificial Sequence
  Oligonucleotide primer for the detection of SNP TSC0045339
ttgtattataaa

SEQ ID NO: 347912 - DNA, 12 bp, Artificial Sequence
  Oligonucleotide primer for the detection of SNP TSC0045340
acacaaattact

SEQ ID NO: 347913 - DNA, 12 bp, Artificial Sequence
  Oligonucleotide primer for the detection of SNP TSC0045340
agtttgtaattg

SEQ ID NO: 347914 - DNA, 12 bp, Artificial Sequence
  Oligonucleotide primer for the detection of SNP TSC0045340
aatttacaatta

SEQ ID NO: 347915 - DNA, 12 bp, Artificial Sequence
  Oligonucleotide primer for the detection of SNP TSC0045341
aaatcaaaaaca

SEQ ID NO: 347916 - DNA, 12 bp, Artificial Sequence
  Oligonucleotide primer for the detection of SNP TSC0045341
taataagagtta

SEQ ID NO: 347917 - DNA, 12 bp, Artificial Sequence
  Oligonucleotide primer for the detection of SNP TSC0045341
taacaaaaatta

SEQ ID NO: 347918 - DNA, 12 bp, Artificial Sequence
  Oligonukleotid-Primer
ggttagagatat

SEQ ID NO: 347919 - DNA, 12 bp, Artificial Sequence
  Oligonucleotide primer for the detection of SNP TSC0045343
acatattcaaaa

SEQ ID NO: 347920 - DNA, 12 bp, Artificial Sequence
  Oligonucleotide primer for the detection of SNP TSC0045343
tgttaggaagtt

SEQ ID NO: 347921 - DNA, 12 bp, Artificial Sequence
  Oligonucleotide primer for the detection of SNP TSC0045343
tatatttaaaac

SEQ ID NO: 347922 - DNA, 12 bp, Artificial Sequence
  Oligonukleotid-Primer
tttaggcgtttt

SEQ ID NO: 347923 - DNA, 12 bp, Artificial Sequence
  Oligonucleotide primer for the detection of SNP TSC0045347
ttaaacacccta

SEQ ID NO: 347924 - DNA, 12 bp, Artificial Sequence
  Oligonucleotide primer for the detection of SNP TSC0045347
ttaaacgcccta

SEQ ID NO: 347925 - DNA, 12 bp, Artificial Sequence
  Oligonucleotide primer for the detection of SNP TSC0045352
tttaaattctaa

SEQ ID NO: 347926 - DNA, 12 bp, Artificial Sequence
  Oligonucleotide primer for the detection of SNP TSC0045352
atatgggggatt

SEQ ID NO: 347927 - DNA, 12 bp, Artificial Sequence
  Oligonucleotide primer for the detection of SNP TSC0005955
agttttgtggtg

SEQ ID NO: 347928 - DNA, 12 bp, Artificial Sequence
  Oligonucleotide primer for the detection of SNP TSC0005956
aaggtgttggga

SEQ ID NO: 347929 - DNA, 12 bp, Artificial Sequence
  Oligonucleotide primer for the detection of SNP TSC0045355
atcttacatatc

SEQ ID NO: 347930 - DNA, 12 bp, Artificial Sequence
  Oligonukleotid-Primer
atcttacgtatc

SEQ ID NO: 347931 - DNA, 12 bp, Artificial Sequence
  Oligonucleotide primer for the detection of SNP TSC0045355
tgataataaata

SEQ ID NO: 347932 - DNA, 12 bp, Artificial Sequence
  Oligonucleotide primer for the detection of SNP TSC0045356
ttaatctatttt

SEQ ID NO: 347933 - DNA, 12 bp, Artificial Sequence
  Oligonucleotide primer for the detection of SNP TSC0045356
tttatagtattg

SEQ ID NO: 347934 - DNA, 12 bp, Artificial Sequence
  Oligonukleotid-Primer
acaaaaatactc

SEQ ID NO: 347935 - DNA, 12 bp, Artificial Sequence
  Oligonucleotide primer for the detection of SNP TSC0045357
ggttagtgaaaa

SEQ ID NO: 347936 - DNA, 12 bp, Artificial Sequence
  Oligonucleotide primer for the detection of SNP TSC0045359
aataaattatgg

SEQ ID NO: 347937 - DNA, 12 bp, Artificial Sequence
  Oligonucleotide primer for the detection of SNP TSC0045360
caataaacaaca

SEQ ID NO: 347938 - DNA, 12 bp, Artificial Sequence
  Oligonukleotid-Primer
ctcatttttaca

SEQ ID NO: 347939 - DNA, 12 bp, Artificial Sequence
  Oligonucleotide primer for the detection of SNP TSC0045360
atagtggatagt

SEQ ID NO: 347940 - DNA, 12 bp, Artificial Sequence
  Oligonucleotide primer for the detection of SNP TSC0045361
cactataaaatc

SEQ ID NO: 347941 - DNA, 12 bp, Artificial Sequence
  Oligonucleotide primer for the detection of SNP TSC0045361
gggttttaatta

SEQ ID NO: 347942 - DNA, 12 bp, Artificial Sequence
  Oligonukleotid-Primer
ggatgggttatt

SEQ ID NO: 347943 - DNA, 12 bp, Artificial Sequence
  Oligonucleotide primer for the detection of SNP TSC0045363
acaaaaaccccc

SEQ ID NO: 347944 - DNA, 12 bp, Artificial Sequence
  Oligonucleotide primer for the detection of SNP TSC0045364
aataccttatac

SEQ ID NO: 347945 - DNA, 12 bp, Artificial Sequence
  Oligonucleotide primer for the detection of SNP TSC0045364
gaaataaatatt

SEQ ID NO: 347946 - DNA, 12 bp, Artificial Sequence
  Oligonukleotid-Primer
gaaataaatatc

SEQ ID NO: 347947 - DNA, 12 bp, Artificial Sequence
  Oligonucleotide primer for the detection of SNP TSC0045365
ttaggtttaagg

SEQ ID NO: 347948 - DNA, 12 bp, Artificial Sequence
  Oligonucleotide primer for the detection of SNP TSC0045368
aaccacctaact

SEQ ID NO: 347949 - DNA, 12 bp, Artificial Sequence
  Oligonucleotide primer for the detection of SNP TSC0045368
ttatttaaaaag

SEQ ID NO: 347950 - DNA, 12 bp, Artificial Sequence
  Oligonucleotide primer for the detection of SNP TSC0045378
ttactaaatcac

SEQ ID NO: 347951 - DNA, 12 bp, Artificial Sequence
  Oligonucleotide primer for the detection of SNP TSC0045379
tttcaactaaac

SEQ ID NO: 347952 - DNA, 12 bp, Artificial Sequence
  Oligonucleotide primer for the detection of SNP TSC0005176
aaaatatttcct

SEQ ID NO: 347953 - DNA, 12 bp, Artificial Sequence
  Oligonucleotide primer for the detection of SNP TSC0005176
taaagaagaata

SEQ ID NO: 347954 - DNA, 12 bp, Artificial Sequence
  Oligonucleotide primer for the detection of SNP TSC0045380
aaacataaaatt

SEQ ID NO: 347955 - DNA, 12 bp, Artificial Sequence
  Oligonucleotide primer for the detection of SNP TSC0045380
aaacgtaaaatt

SEQ ID NO: 347956 - DNA, 12 bp, Artificial Sequence
  Oligonucleotide primer for the detection of SNP TSC0045380
tataaattgtag

SEQ ID NO: 347957 - DNA, 12 bp, Artificial Sequence
  Oligonucleotide primer for the detection of SNP TSC0045381
aaaaattacttc

SEQ ID NO: 347958 - DNA, 12 bp, Artificial Sequence
  Oligonucleotide primer for the detection of SNP TSC0045381
ggggtagatggt

SEQ ID NO: 347959 - DNA, 12 bp, Artificial Sequence
  Oligonucleotide primer for the detection of SNP TSC0045382
aaatagtatata

SEQ ID NO: 347960 - DNA, 12 bp, Artificial Sequence
  Oligonucleotide primer for the detection of SNP TSC0045382
aaataacacaca

SEQ ID NO: 347961 - DNA, 12 bp, Artificial Sequence
  Oligonucleotide primer for the detection of SNP TSC0045382
gggggatgggtt

SEQ ID NO: 347962 - DNA, 12 bp, Artificial Sequence
  Oligonucleotide primer for the detection of SNP TSC0006577
taaaattcaaat

SEQ ID NO: 347963 - DNA, 12 bp, Artificial Sequence
  Oligonucleotide primer for the detection of SNP TSC0006577
tttgataaattt

SEQ ID NO: 347964 - DNA, 12 bp, Artificial Sequence
  Oligonucleotide primer for the detection of SNP TSC0006577
tttaataaaccc

SEQ ID NO: 347965 - DNA, 12 bp, Artificial Sequence
  Oligonucleotide primer for the detection of SNP TSC0006577
taaaatttaggt

SEQ ID NO: 347966 - DNA, 12 bp, Artificial Sequence
  Oligonucleotide primer for the detection of SNP TSC0045384
aatccaccacaa

SEQ ID NO: 347967 - DNA, 12 bp, Artificial Sequence
  Oligonucleotide primer for the detection of SNP TSC0045384
ataagttttttc

SEQ ID NO: 347968 - DNA, 12 bp, Artificial Sequence
  Oligonucleotide primer for the detection of SNP TSC0045384
gtagtttattat

SEQ ID NO: 347969 - DNA, 12 bp, Artificial Sequence
  Oligonucleotide primer for the detection of SNP TSC0045385
aatccaacaaaa

SEQ ID NO: 347970 - DNA, 12 bp, Artificial Sequence
  Oligonukleotid-Primer
gtattttgtttt

SEQ ID NO: 347971 - DNA, 12 bp, Artificial Sequence
  Oligonucleotide primer for the detection of SNP TSC0045385
atactctatcct

SEQ ID NO: 347972 - DNA, 12 bp, Artificial Sequence
  Oligonucleotide primer for the detection of SNP TSC0045385
aatttaataaga

SEQ ID NO: 347973 - DNA, 12 bp, Artificial Sequence
  Oligonucleotide primer for the detection of SNP TSC0008913
caaaaaaatccc

SEQ ID NO: 347974 - DNA, 12 bp, Artificial Sequence
  Oligonucleotide primer for the detection of SNP TSC0008913
gtagatggtttg

SEQ ID NO: 347975 - DNA, 12 bp, Artificial Sequence
  Oligonucleotide primer for the detection of SNP TSC0008913
acaaataaccta

SEQ ID NO: 347976 - DNA, 12 bp, Artificial Sequence
  Oligonucleotide primer for the detection of SNP TSC0008913
taaagaagtttt

SEQ ID NO: 347977 - DNA, 12 bp, Artificial Sequence
  Oligonucleotide primer for the detection of SNP TSC0045386
agtaatattaag

SEQ ID NO: 347978 - DNA, 12 bp, Artificial Sequence
  Oligonucleotide primer for the detection of SNP TSC0045386
agtgtataaagt

SEQ ID NO: 347979 - DNA, 12 bp, Artificial Sequence
  Oligonucleotide primer for the detection of SNP TSC0045387
tacaaataccat

SEQ ID NO: 347980 - DNA, 12 bp, Artificial Sequence
  Oligonucleotide primer for the detection of SNP TSC0045387
ttgggagaaata

SEQ ID NO: 347981 - DNA, 12 bp, Artificial Sequence
  Oligonucleotide primer for the detection of SNP TSC0045388
ctaattaaaaac

SEQ ID NO: 347982 - DNA, 12 bp, Artificial Sequence
  Oligonucleotide primer for the detection of SNP TSC0045388
ttatgagttttg

SEQ ID NO: 347983 - DNA, 12 bp, Artificial Sequence
  Oligonucleotide primer for the detection of SNP TSC0045388
ccataaattcta

SEQ ID NO: 347984 - DNA, 12 bp, Artificial Sequence
  Oligonucleotide primer for the detection of SNP TSC0045388
ttggttaaaaat

SEQ ID NO: 347985 - DNA, 12 bp, Artificial Sequence
  Oligonucleotide primer for the detection of SNP TSC0045389
atatccttatta

SEQ ID NO: 347986 - DNA, 12 bp, Artificial Sequence
  Oligonucleotide primer for the detection of SNP TSC0045389
attttatatgtt

SEQ ID NO: 347987 - DNA, 12 bp, Artificial Sequence
  Oligonucleotide primer for the detection of SNP TSC0045389
ttccatatacta

SEQ ID NO: 347988 - DNA, 12 bp, Artificial Sequence
  Oligonucleotide primer for the detection of SNP TSC0045390
attttgtattta

SEQ ID NO: 347989 - DNA, 12 bp, Artificial Sequence
  Oligonucleotide primer for the detection of SNP TSC0045390
atttcgtattta

SEQ ID NO: 347990 - DNA, 12 bp, Artificial Sequence
  Oligonucleotide primer for the detection of SNP TSC0045390
cctcatactcaa

SEQ ID NO: 347991 - DNA, 12 bp, Artificial Sequence
  Oligonucleotide primer for the detection of SNP TSC0045390
cctcgtactcaa

SEQ ID NO: 347992 - DNA, 12 bp, Artificial Sequence
  Oligonucleotide primer for the detection of SNP TSC0045390
ataaatattggg

SEQ ID NO: 347993 - DNA, 12 bp, Artificial Sequence
  Oligonucleotide primer for the detection of SNP TSC0045391
tctcaaaaccct

SEQ ID NO: 347994 - DNA, 12 bp, Artificial Sequence
  Oligonucleotide primer for the detection of SNP TSC0045391
tttagagtgtta

SEQ ID NO: 347995 - DNA, 12 bp, Artificial Sequence
  Oligonucleotide primer for the detection of SNP TSC0045393
cactctatattt

SEQ ID NO: 347996 - DNA, 12 bp, Artificial Sequence
  Oligonucleotide primer for the detection of SNP TSC0045394
actacccattat

SEQ ID NO: 347997 - DNA, 12 bp, Artificial Sequence
  Oligonucleotide primer for the detection of SNP TSC0010521
tgaaaaatgaat

SEQ ID NO: 347998 - DNA, 12 bp, Artificial Sequence
  Oligonucleotide primer for the detection of SNP TSC0010522
atattcttttat

SEQ ID NO: 347999 - DNA, 12 bp, Artificial Sequence
  Oligonucleotide primer for the detection of SNP TSC0010522
attgaagttaaa

SEQ ID NO: 348000 - DNA, 12 bp, Artificial Sequence
  Oligonucleotide primer for the detection of SNP TSC0045397
catcacattatt

SEQ ID NO: 348001 - DNA, 12 bp, Artificial Sequence
  Oligonucleotide primer for the detection of SNP TSC0045397
gaaaatgttgag

SEQ ID NO: 348002 - DNA, 12 bp, Artificial Sequence
  Oligonucleotide primer for the detection of SNP TSC0009208
ggtatgaattta

SEQ ID NO: 348003 - DNA, 12 bp, Artificial Sequence
  Oligonucleotide primer for the detection of SNP TSC0045398
agtagatgttga

SEQ ID NO: 348004 - DNA, 12 bp, Artificial Sequence
  Oligonucleotide primer for the detection of SNP TSC0045398
aataaatattaa

SEQ ID NO: 348005 - DNA, 12 bp, Artificial Sequence
  Oligonucleotide primer for the detection of SNP TSC0045398
aatgaaagaatt

SEQ ID NO: 348006 - DNA, 12 bp, Artificial Sequence
  Oligonucleotide primer for the detection of SNP TSC0005319
aagaaattggga

SEQ ID NO: 348007 - DNA, 12 bp, Artificial Sequence
  Oligonucleotide primer for the detection of SNP TSC0005319
aagaaatcggga

SEQ ID NO: 348008 - DNA, 12 bp, Artificial Sequence
  Oligonucleotide primer for the detection of SNP TSC0005320
tttactaaccaa

SEQ ID NO: 348009 - DNA, 12 bp, Artificial Sequence
  Oligonucleotide primer for the detection of SNP TSC0005320
gagaaaggaaga

SEQ ID NO: 348010 - DNA, 12 bp, Artificial Sequence
  Oligonucleotide primer for the detection of SNP TSC0005320
tttgttagttaa

SEQ ID NO: 348011 - DNA, 12 bp, Artificial Sequence
  Oligonucleotide primer for the detection of SNP TSC0045399
ctatactatcat

SEQ ID NO: 348012 - DNA, 12 bp, Artificial Sequence
  Oligonucleotide primer for the detection of SNP TSC0045400
ctaacaaactta

SEQ ID NO: 348013 - DNA, 12 bp, Artificial Sequence
  Oligonucleotide primer for the detection of SNP TSC0045400
tttattttagtg

SEQ ID NO: 348014 - DNA, 12 bp, Artificial Sequence
  Oligonucleotide primer for the detection of SNP TSC0045400
tttattttagcg

SEQ ID NO: 348015 - DNA, 12 bp, Artificial Sequence
  Oligonucleotide primer for the detection of SNP TSC0045401
aaaaataaatcc

SEQ ID NO: 348016 - DNA, 12 bp, Artificial Sequence
  Oligonucleotide primer for the detection of SNP TSC0045401
tttattaattga

SEQ ID NO: 348017 - DNA, 12 bp, Artificial Sequence
  Oligonucleotide primer for the detection of SNP TSC0004919
caaccctcacaa

SEQ ID NO: 348018 - DNA, 12 bp, Artificial Sequence
  Oligonucleotide primer for the detection of SNP TSC0004919
tacctctccata

SEQ ID NO: 348019 - DNA, 12 bp, Artificial Sequence
  Oligonucleotide primer for the detection of SNP TSC0004920
aataaaatataa

SEQ ID NO: 348020 - DNA, 12 bp, Artificial Sequence
  Oligonucleotide primer for the detection of SNP TSC0004920
tatgtgtattag

SEQ ID NO: 348021 - DNA, 12 bp, Artificial Sequence
  Oligonucleotide primer for the detection of SNP TSC0004920
tatatatattaa

SEQ ID NO: 348022 - DNA, 12 bp, Artificial Sequence
  Oligonucleotide primer for the detection of SNP TSC0004920
gtaatggaatgt

SEQ ID NO: 348023 - DNA, 12 bp, Artificial Sequence
  Oligonucleotide primer for the detection of SNP TSC0045403
gttgtttgtaat

SEQ ID NO: 348024 - DNA, 12 bp, Artificial Sequence
  Oligonucleotide primer for the detection of SNP TSC0045403
attatctataat

SEQ ID NO: 348025 - DNA, 12 bp, Artificial Sequence
  Oligonucleotide primer for the detection of SNP TSC0045404
ttaccaaattta

SEQ ID NO: 348026 - DNA, 12 bp, Artificial Sequence
  Oligonucleotide primer for the detection of SNP TSC0045404
attgatgttttt

SEQ ID NO: 348027 - DNA, 12 bp, Artificial Sequence
  Oligonucleotide primer for the detection of SNP TSC0045404
attaatactctt

SEQ ID NO: 348028 - DNA, 12 bp, Artificial Sequence
  Oligonucleotide primer for the detection of SNP TSC0045404
ttattaaatttg

SEQ ID NO: 348029 - DNA, 12 bp, Artificial Sequence
  Oligonucleotide primer for the detection of SNP TSC0045406
aaccttaacaca

SEQ ID NO: 348030 - DNA, 12 bp, Artificial Sequence
  Oligonucleotide primer for the detection of SNP TSC0045406
tttaaatgtttt

SEQ ID NO: 348031 - DNA, 12 bp, Artificial Sequence
  Oligonucleotide primer for the detection of SNP TSC0045406
ttcaaatacccc

SEQ ID NO: 348032 - DNA, 12 bp, Artificial Sequence
  Oligonucleotide primer for the detection of SNP TSC0045406
agttttggtata

SEQ ID NO: 348033 - DNA, 12 bp, Artificial Sequence
  Oligonucleotide primer for the detection of SNP TSC0045408
atttccccaacc

SEQ ID NO: 348034 - DNA, 12 bp, Artificial Sequence
  Oligonucleotide primer for the detection of SNP TSC0045408
agaaaaggagtg

SEQ ID NO: 348035 - DNA, 12 bp, Artificial Sequence
  Oligonucleotide primer for the detection of SNP TSC0045408
agaaaaggagcg

SEQ ID NO: 348036 - DNA, 12 bp, Artificial Sequence
  Oligonucleotide primer for the detection of SNP TSC0045409
ctttacaactcc

SEQ ID NO: 348037 - DNA, 12 bp, Artificial Sequence
  Oligonucleotide primer for the detection of SNP TSC0045409
tgaggaataatt

SEQ ID NO: 348038 - DNA, 12 bp, Artificial Sequence
  Oligonucleotide primer for the detection of SNP TSC0045410
atacacaataat

SEQ ID NO: 348039 - DNA, 12 bp, Artificial Sequence
  Oligonucleotide primer for the detection of SNP TSC0045410
attagaaatgag

SEQ ID NO: 348040 - DNA, 12 bp, Artificial Sequence
  Oligonucleotide primer for the detection of SNP TSC0004785
ccctctaaatct

SEQ ID NO: 348041 - DNA, 12 bp, Artificial Sequence
  Oligonucleotide primer for the detection of SNP TSC0045411
ataactaatctt

SEQ ID NO: 348042 - DNA, 12 bp, Artificial Sequence
  Oligonucleotide primer for the detection of SNP TSC0045411
gtaactaatctt

SEQ ID NO: 348043 - DNA, 12 bp, Artificial Sequence
  Oligonucleotide primer for the detection of SNP TSC0045411
gggaaagagtta

SEQ ID NO: 348044 - DNA, 12 bp, Artificial Sequence
  Oligonucleotide primer for the detection of SNP TSC0045411
gtaattagtttt

SEQ ID NO: 348045 - DNA, 12 bp, Artificial Sequence
  Oligonucleotide primer for the detection of SNP TSC0045412
aaataaattccc

SEQ ID NO: 348046 - DNA, 12 bp, Artificial Sequence
  Oligonucleotide primer for the detection of SNP TSC0045412
atcttccaacta

SEQ ID NO: 348047 - DNA, 12 bp, Artificial Sequence
  Oligonucleotide primer for the detection of SNP TSC0045412
gaatggattttt

SEQ ID NO: 348048 - DNA, 12 bp, Artificial Sequence
  Oligonucleotide primer for the detection of SNP TSC0045413
attctacatacc

SEQ ID NO: 348049 - DNA, 12 bp, Artificial Sequence
  Oligonucleotide primer for the detection of SNP TSC0045413
attctacgtacc

SEQ ID NO: 348050 - DNA, 12 bp, Artificial Sequence
  Oligonucleotide primer for the detection of SNP TSC0045413
gtaagaataaga

SEQ ID NO: 348051 - DNA, 12 bp, Artificial Sequence
  Oligonucleotide primer for the detection of SNP TSC0045414
taactcactaca

SEQ ID NO: 348052 - DNA, 12 bp, Artificial Sequence
  Oligonucleotide primer for the detection of SNP TSC0045415
aaacatatactt

SEQ ID NO: 348053 - DNA, 12 bp, Artificial Sequence
  Oligonucleotide primer for the detection of SNP TSC0045415
taagatatttaa

SEQ ID NO: 348054 - DNA, 12 bp, Artificial Sequence
  Oligonucleotide primer for the detection of SNP TSC0045416
aacacaccacca

SEQ ID NO: 348055 - DNA, 12 bp, Artificial Sequence
  Oligonucleotide primer for the detection of SNP TSC0045416
aatgagttgggt

SEQ ID NO: 348056 - DNA, 12 bp, Artificial Sequence
  Oligonucleotide primer for the detection of SNP TSC0010461
atgtttaattta

SEQ ID NO: 348057 - DNA, 12 bp, Artificial Sequence
  Oligonucleotide primer for the detection of SNP TSC0010462
aacataatacta

SEQ ID NO: 348058 - DNA, 12 bp, Artificial Sequence
  Oligonucleotide primer for the detection of SNP TSC0010462
aaaaatttatag

SEQ ID NO: 348059 - DNA, 12 bp, Artificial Sequence
  Oligonucleotide primer for the detection of SNP TSC0010462
aaaaacccacaa

SEQ ID NO: 348060 - DNA, 12 bp, Artificial Sequence
  Oligonucleotide primer for the detection of SNP TSC0010462
agtatgatgttg

SEQ ID NO: 348061 - DNA, 12 bp, Artificial Sequence
  Oligonucleotide primer for the detection of SNP TSC0045417
atgaatgatatt

SEQ ID NO: 348062 - DNA, 12 bp, Artificial Sequence
  Oligonucleotide primer for the detection of SNP TSC0045417
ataaataacatc

SEQ ID NO: 348063 - DNA, 12 bp, Artificial Sequence
  Oligonucleotide primer for the detection of SNP TSC0045417
taaagaatagga

SEQ ID NO: 348064 - DNA, 12 bp, Artificial Sequence
  Oligonucleotide primer for the detection of SNP TSC0008628
cctcaaaaacct

SEQ ID NO: 348065 - DNA, 12 bp, Artificial Sequence
  Oligonucleotide primer for the detection of SNP TSC0008628
gaggtagataga

SEQ ID NO: 348066 - DNA, 12 bp, Artificial Sequence
  Oligonucleotide primer for the detection of SNP TSC0005321
attatttatatc

SEQ ID NO: 348067 - DNA, 12 bp, Artificial Sequence
  Oligonucleotide primer for the detection of SNP TSC0005321
tattttgaaaaa

SEQ ID NO: 348068 - DNA, 12 bp, Artificial Sequence
  Oligonucleotide primer for the detection of SNP TSC0005321
attgtttgtatt

SEQ ID NO: 348069 - DNA, 12 bp, Artificial Sequence
  Oligonucleotide primer for the detection of SNP TSC0005322
ataacaatattc

SEQ ID NO: 348070 - DNA, 12 bp, Artificial Sequence
  Oligonucleotide primer for the detection of SNP TSC0005322
aataaaggatta

SEQ ID NO: 348071 - DNA, 12 bp, Artificial Sequence
  Oligonucleotide primer for the detection of SNP TSC0010192
ataactttaatc

SEQ ID NO: 348072 - DNA, 12 bp, Artificial Sequence
  Oligonucleotide primer for the detection of SNP TSC0010192
taggaagaggag

SEQ ID NO: 348073 - DNA, 12 bp, Artificial Sequence
  Oligonucleotide primer for the detection of SNP TSC0010192
ggttttaatttt

SEQ ID NO: 348074 - DNA, 12 bp, Artificial Sequence
  Oligonucleotide primer for the detection of SNP TSC0045420
ttcctacctacc

SEQ ID NO: 348075 - DNA, 12 bp, Artificial Sequence
  Oligonucleotide primer for the detection of SNP TSC0045420
agagaaggaatg

SEQ ID NO: 348076 - DNA, 12 bp, Artificial Sequence
  Oligonucleotide primer for the detection of SNP TSC0045421
tttttttttact

SEQ ID NO: 348077 - DNA, 12 bp, Artificial Sequence
  Oligonucleotide primer for the detection of SNP TSC0045421
aatggaaagata

SEQ ID NO: 348078 - DNA, 12 bp, Artificial Sequence
  Oligonucleotide primer for the detection of SNP TSC0045422
caatcattacct

SEQ ID NO: 348079 - DNA, 12 bp, Artificial Sequence
  Oligonucleotide primer for the detection of SNP TSC0000876
gtttattagaat

SEQ ID NO: 348080 - DNA, 12 bp, Artificial Sequence
  Oligonucleotide primer for the detection of SNP TSC0000876
tttaccaaaata

SEQ ID NO: 348081 - DNA, 12 bp, Artificial Sequence
  Oligonucleotide primer for the detection of SNP TSC0045423
acaaacctactc

SEQ ID NO: 348082 - DNA, 12 bp, Artificial Sequence
  Oligonucleotide primer for the detection of SNP TSC0045423
aaaataggatga

SEQ ID NO: 348083 - DNA, 12 bp, Artificial Sequence
  Oligonucleotide primer for the detection of SNP TSC0045424
tttatctatttt

SEQ ID NO: 348084 - DNA, 12 bp, Artificial Sequence
  Oligonucleotide primer for the detection of SNP TSC0045424
agttaattaaag

SEQ ID NO: 348085 - DNA, 12 bp, Artificial Sequence
  Oligonucleotide primer for the detection of SNP TSC0000201
gaagggatgaaa

SEQ ID NO: 348086 - DNA, 12 bp, Artificial Sequence
  Oligonucleotide primer for the detection of SNP TSC0045426
ataagttaaata

SEQ ID NO: 348087 - DNA, 12 bp, Artificial Sequence
  Oligonucleotide primer for the detection of SNP TSC0045431
aataatactaat

SEQ ID NO: 348088 - DNA, 12 bp, Artificial Sequence
  Oligonucleotide primer for the detection of SNP TSC0000612
tccaattactca

SEQ ID NO: 348089 - DNA, 12 bp, Artificial Sequence
  Oligonucleotide primer for the detection of SNP TSC0000612
gtggtttaatat

SEQ ID NO: 348090 - DNA, 12 bp, Artificial Sequence
  Oligonucleotide primer for the detection of SNP TSC0000612
ataacctaatac

SEQ ID NO: 348091 - DNA, 12 bp, Artificial Sequence
  Oligonucleotide primer for the detection of SNP TSC0000613
cacatatcactt

SEQ ID NO: 348092 - DNA, 12 bp, Artificial Sequence
  Oligonucleotide primer for the detection of SNP TSC0000613
aaaatgaaaaag

SEQ ID NO: 348093 - DNA, 12 bp, Artificial Sequence
  Oligonucleotide primer for the detection of SNP TSC0000614
cattaccacact

SEQ ID NO: 348094 - DNA, 12 bp, Artificial Sequence
  Oligonucleotide primer for the detection of SNP TSC0000614
tagtgaaattaa

SEQ ID NO: 348095 - DNA, 12 bp, Artificial Sequence
  Oligonucleotide primer for the detection of SNP TSC0000614
caataaaattaa

SEQ ID NO: 348096 - DNA, 12 bp, Artificial Sequence
  Oligonucleotide primer for the detection of SNP TSC0045437
atatcaaatatc

SEQ ID NO: 348097 - DNA, 12 bp, Artificial Sequence
  Oligonucleotide primer for the detection of SNP TSC0045437
aggaatataagg

SEQ ID NO: 348098 - DNA, 12 bp, Artificial Sequence
  Oligonucleotide primer for the detection of SNP TSC0045438
ttctctataacc

SEQ ID NO: 348099 - DNA, 12 bp, Artificial Sequence
  Oligonucleotide primer for the detection of SNP TSC0045438
aagttatattta

SEQ ID NO: 348100 - DNA, 12 bp, Artificial Sequence
  Oligonucleotide primer for the detection of SNP TSC0045438
aaactatattta

SEQ ID NO: 348101 - DNA, 12 bp, Artificial Sequence
  Oligonucleotide primer for the detection of SNP TSC0045438
ttttttgtagtt

SEQ ID NO: 348102 - DNA, 12 bp, Artificial Sequence
  Oligonucleotide primer for the detection of SNP TSC0045440
tgggttagtttt

SEQ ID NO: 348103 - DNA, 12 bp, Artificial Sequence
  Oligonucleotide primer for the detection of SNP TSC0045440
atctaaatcaac

SEQ ID NO: 348104 - DNA, 12 bp, Artificial Sequence
  Oligonucleotide primer for the detection of SNP TSC0045440
ttagaatgggag

SEQ ID NO: 348105 - DNA, 12 bp, Artificial Sequence
  unsure (7): unknown base
  Oligonucleotide primer for the detection of SNP TSC0045441
atagagnggaga

SEQ ID NO: 348106 - DNA, 12 bp, Artificial Sequence
  unsure (7): Oligonucleotide primer for the detection of SNP TSC0045441
acaaaanaaaaa

SEQ ID NO: 348107 - DNA, 12 bp, Artificial Sequence
  Oligonucleotide primer for the detection of SNP TSC0045443
taaaatcaacct

SEQ ID NO: 348108 - DNA, 12 bp, Artificial Sequence
  Oligonucleotide primer for the detection of SNP TSC0045443
tattaatggatg

SEQ ID NO: 348109 - DNA, 12 bp, Artificial Sequence
  Oligonucleotide primer for the detection of SNP TSC0045447
atatataatctt

SEQ ID NO: 348110 - DNA, 12 bp, Artificial Sequence
  Oligonucleotide primer for the detection of SNP TSC0045447
aagttagatata

SEQ ID NO: 348111 - DNA, 12 bp, Artificial Sequence
  Oligonucleotide primer for the detection of SNP TSC0045447
aaaccaaacaca

SEQ ID NO: 348112 - DNA, 12 bp, Artificial Sequence
  Oligonucleotide primer for the detection of SNP TSC0045447
atatgtaatttt

SEQ ID NO: 348113 - DNA, 12 bp, Artificial Sequence
  Oligonucleotide primer for the detection of SNP TSC0001162
atacacattttt

SEQ ID NO: 348114 - DNA, 12 bp, Artificial Sequence
  Oligonucleotide primer for the detection of SNP TSC0001162
ataaaaatattt

SEQ ID NO: 348115 - DNA, 12 bp, Artificial Sequence
  Oligonucleotide primer for the detection of SNP TSC0001162
acaaaaatattt

SEQ ID NO: 348116 - DNA, 12 bp, Artificial Sequence
  Oligonucleotide primer for the detection of SNP TSC0001163
ttacttacaact

SEQ ID NO: 348117 - DNA, 12 bp, Artificial Sequence
  Oligonucleotide primer for the detection of SNP TSC0001163
tagaataaatta

SEQ ID NO: 348118 - DNA, 12 bp, Artificial Sequence
  Oligonucleotide primer for the detection of SNP TSC0045455
aggtatatggaa

SEQ ID NO: 348119 - DNA, 12 bp, Artificial Sequence
  Oligonucleotide primer for the detection of SNP TSC0045457
aaactcactcat

SEQ ID NO: 348120 - DNA, 12 bp, Artificial Sequence
  Oligonucleotide primer for the detection of SNP TSC0045457
aaactcgctcat

SEQ ID NO: 348121 - DNA, 12 bp, Artificial Sequence
  Oligonucleotide primer for the detection of SNP TSC0045457
aagtagaagaat

SEQ ID NO: 348122 - DNA, 12 bp, Artificial Sequence
  Oligonucleotide primer for the detection of SNP TSC0045457
aagtagaagaac

SEQ ID NO: 348123 - DNA, 12 bp, Artificial Sequence
  Oligonucleotide primer for the detection of SNP TSC0045457
aacaaaaaaacg

SEQ ID NO: 348124 - DNA, 12 bp, Artificial Sequence
  Oligonucleotide primer for the detection of SNP TSC0045457
aagtttgtttat

SEQ ID NO: 348125 - DNA, 12 bp, Artificial Sequence
  Oligonucleotide primer for the detection of SNP TSC0045457
aagttcgtttat

SEQ ID NO: 348126 - DNA, 12 bp, Artificial Sequence
  Oligonucleotide primer for the detection of SNP TSC0045458
aaatctctatat

SEQ ID NO: 348127 - DNA, 12 bp, Artificial Sequence
  Oligonucleotide primer for the detection of SNP TSC0045458
tttttgtgtata

SEQ ID NO: 348128 - DNA, 12 bp, Artificial Sequence
  Oligonucleotide primer for the detection of SNP TSC0045459
aatcatccatct

SEQ ID NO: 348129 - DNA, 12 bp, Artificial Sequence
  Oligonucleotide primer for the detection of SNP TSC0045459
ttttattggtgg

SEQ ID NO: 348130 - DNA, 12 bp, Artificial Sequence
  Oligonucleotide primer for the detection of SNP TSC0045459
tctcattaataa

SEQ ID NO: 348131 - DNA, 12 bp, Artificial Sequence
  Oligonucleotide primer for the detection of SNP TSC0005249
ttatcaaaaaaa

SEQ ID NO: 348132 - DNA, 12 bp, Artificial Sequence
  Oligonucleotide primer for the detection of SNP TSC0005249
ctttctcttttt

SEQ ID NO: 348133 - DNA, 12 bp, Artificial Sequence
  Oligonucleotide primer for the detection of SNP TSC0005249
ttattaggaaag

SEQ ID NO: 348134 - DNA, 12 bp, Artificial Sequence
  Oligonucleotide primer for the detection of SNP TSC0004860
cctcctacctac

SEQ ID NO: 348135 - DNA, 12 bp, Artificial Sequence
  Oligonucleotide primer for the detection of SNP TSC0004860
aagtttttgtta

SEQ ID NO: 348136 - DNA, 12 bp, Artificial Sequence
  Oligonucleotide primer for the detection of SNP TSC0000197
aaaaactataat

SEQ ID NO: 348137 - DNA, 12 bp, Artificial Sequence
  Oligonucleotide primer for the detection of SNP TSC0000197
ttattagttttg

SEQ ID NO: 348138 - DNA, 12 bp, Artificial Sequence
  Oligonucleotide primer for the detection of SNP TSC0045462
acccactctcaa

SEQ ID NO: 348139 - DNA, 12 bp, Artificial Sequence
  Oligonucleotide primer for the detection of SNP TSC0045463
accttaacctcc

SEQ ID NO: 348140 - DNA, 12 bp, Artificial Sequence
  Oligonucleotide primer for the detection of SNP TSC0045463
tctcaatatttt

SEQ ID NO: 348141 - DNA, 12 bp, Artificial Sequence
  Oligonucleotide primer for the detection of SNP TSC0045464
taataaaatcac

SEQ ID NO: 348142 - DNA, 12 bp, Artificial Sequence
  Oligonucleotide primer for the detection of SNP TSC0045464
gtaaggtagaaa

SEQ ID NO: 348143 - DNA, 12 bp, Artificial Sequence
  Oligonucleotide primer for the detection of SNP TSC0045464
taataggattat

SEQ ID NO: 348144 - DNA, 12 bp, Artificial Sequence
  Oligonucleotide primer for the detection of SNP TSC0045465
aaaatttttccc

SEQ ID NO: 348145 - DNA, 12 bp, Artificial Sequence
  Oligonucleotide primer for the detection of SNP TSC0045465
taggagtttata

SEQ ID NO: 348146 - DNA, 12 bp, Artificial Sequence
  Oligonucleotide primer for the detection of SNP TSC0045466
taccacaactat

SEQ ID NO: 348147 - DNA, 12 bp, Artificial Sequence
  unsure (3): Oligonucleotide primer for the detection of SNP TSC0045466
gantgaggagga

SEQ ID NO: 348148 - DNA, 12 bp, Artificial Sequence
  Oligonucleotide primer for the detection of SNP TSC0006670
tgtttgaagagg

SEQ ID NO: 348149 - DNA, 12 bp, Artificial Sequence
  Oligonucleotide primer for the detection of SNP TSC0006670
tatctaaaaaaa

SEQ ID NO: 348150 - DNA, 12 bp, Artificial Sequence
  Oligonucleotide primer for the detection of SNP TSC0006671
tcccccacaaaa

SEQ ID NO: 348151 - DNA, 12 bp, Artificial Sequence
  Oligonucleotide primer for the detection of SNP TSC0006671
tatacgttattt

SEQ ID NO: 348152 - DNA, 12 bp, Artificial Sequence
  Oligonucleotide primer for the detection of SNP TSC0006671
cacacaccactt

SEQ ID NO: 348153 - DNA, 12 bp, Artificial Sequence
  Oligonucleotide primer for the detection of SNP TSC0006671
cacacgccactt

SEQ ID NO: 348154 - DNA, 12 bp, Artificial Sequence
  Oligonucleotide primer for the detection of SNP TSC0045467
cctttaacaaac

SEQ ID NO: 348155 - DNA, 12 bp, Artificial Sequence
  Oligonucleotide primer for the detection of SNP TSC0045467
cctttaacgaac

SEQ ID NO: 348156 - DNA, 12 bp, Artificial Sequence
  Oligonucleotide primer for the detection of SNP TSC0045467
agatatatggag

SEQ ID NO: 348157 - DNA, 12 bp, Artificial Sequence
  Oligonucleotide primer for the detection of SNP TSC0045468
tatataccatct

SEQ ID NO: 348158 - DNA, 12 bp, Artificial Sequence
  Oligonucleotide primer for the detection of SNP TSC0045468
atttgttgggag

SEQ ID NO: 348159 - DNA, 12 bp, Artificial Sequence
  Oligonucleotide primer for the detection of SNP TSC0045468
tgtgtgttattt

SEQ ID NO: 348160 - DNA, 12 bp, Artificial Sequence
  Oligonucleotide primer for the detection of SNP TSC0009637
cctacaataaat

SEQ ID NO: 348161 - DNA, 12 bp, Artificial Sequence
  Oligonucleotide primer for the detection of SNP TSC0045469
tcacttaaacaa

SEQ ID NO: 348162 - DNA, 12 bp, Artificial Sequence
  Oligonucleotide primer for the detection of SNP TSC0045469
tcacttaaacga

SEQ ID NO: 348163 - DNA, 12 bp, Artificial Sequence
  Oligonucleotide primer for the detection of SNP TSC0045469
ataagaggtatt

SEQ ID NO: 348164 - DNA, 12 bp, Artificial Sequence
  Oligonucleotide primer for the detection of SNP TSC0045469
tttaaatggttt

SEQ ID NO: 348165 - DNA, 12 bp, Artificial Sequence
  Oligonucleotide primer for the detection of SNP TSC0045469
tttaaacggttt

SEQ ID NO: 348166 - DNA, 12 bp, Artificial Sequence
  Oligonucleotide primer for the detection of SNP TSC0000104
ttccctcatctt

SEQ ID NO: 348167 - DNA, 12 bp, Artificial Sequence
  Oligonukleotid-Primer
agaagaagatag

SEQ ID NO: 348168 - DNA, 12 bp, Artificial Sequence
  Oligonucleotide primer for the detection of SNP TSC0045470
ggaaatgttgga

SEQ ID NO: 348169 - DNA, 12 bp, Artificial Sequence
  Oligonucleotide primer for the detection of SNP TSC0045470
tgtttgataagt

SEQ ID NO: 348170 - DNA, 12 bp, Artificial Sequence
  Oligonucleotide primer for the detection of SNP TSC0045471
aaactatacacc

SEQ ID NO: 348171 - DNA, 12 bp, Artificial Sequence
  Oligonukleotid-Primer
aaactatacgcc

SEQ ID NO: 348172 - DNA, 12 bp, Artificial Sequence
  Oligonucleotide primer for the detection of SNP TSC0045471
agattttgaagg

SEQ ID NO: 348173 - DNA, 12 bp, Artificial Sequence
  Oligonucleotide primer for the detection of SNP TSC0045471
agatttcgaagg

SEQ ID NO: 348174 - DNA, 12 bp, Artificial Sequence
  Oligonucleotide primer for the detection of SNP TSC0045471
ggttgtgtgttt

SEQ ID NO: 348175 - DNA, 12 bp, Artificial Sequence
  Oligonucleotide primer for the detection of SNP TSC0045471
ggttgtgcgttt

SEQ ID NO: 348176 - DNA, 12 bp, Artificial Sequence
  Oligonucleotide primer for the detection of SNP TSC0045472
ctttctacatct

SEQ ID NO: 348177 - DNA, 12 bp, Artificial Sequence
  Oligonucleotide primer for the detection of SNP TSC0045472
agttttatatgg

SEQ ID NO: 348178 - DNA, 12 bp, Artificial Sequence
  Oligonucleotide primer for the detection of SNP TSC0045472
aacctcatataa

SEQ ID NO: 348179 - DNA, 12 bp, Artificial Sequence
  Oligonucleotide primer for the detection of SNP TSC0004776
actctccatacc

SEQ ID NO: 348180 - DNA, 12 bp, Artificial Sequence
  Oligonucleotide primer for the detection of SNP TSC0004776
cttaaacttcaa

SEQ ID NO: 348181 - DNA, 12 bp, Artificial Sequence
  Oligonucleotide primer for the detection of SNP TSC0004776
gttttttatgtt

SEQ ID NO: 348182 - DNA, 12 bp, Artificial Sequence
  Oligonucleotide primer for the detection of SNP TSC0001046
tatggtatatta

SEQ ID NO: 348183 - DNA, 12 bp, Artificial Sequence
  Oligonucleotide primer for the detection of SNP TSC0001046
tacggtatatta

SEQ ID NO: 348184 - DNA, 12 bp, Artificial Sequence
  Oligonucleotide primer for the detection of SNP TSC0001046
tacaacacacta

SEQ ID NO: 348185 - DNA, 12 bp, Artificial Sequence
  Oligonucleotide primer for the detection of SNP TSC0001046
tacgacacacta

SEQ ID NO: 348186 - DNA, 12 bp, Artificial Sequence
  Oligonucleotide primer for the detection of SNP TSC0001046
aaaatttagatt

SEQ ID NO: 348187 - DNA, 12 bp, Artificial Sequence
  Oligonucleotide primer for the detection of SNP TSC0004790
cattctcttacc

SEQ ID NO: 348188 - DNA, 12 bp, Artificial Sequence
  Oligonucleotide primer for the detection of SNP TSC0045476
tatgggggttgt

SEQ ID NO: 348189 - DNA, 12 bp, Artificial Sequence
  Oligonucleotide primer for the detection of SNP TSC0045476
cataaaaattat

SEQ ID NO: 348190 - DNA, 12 bp, Artificial Sequence
  Oligonucleotide primer for the detection of SNP TSC0006682
tagaaaaatttt

SEQ ID NO: 348191 - DNA, 12 bp, Artificial Sequence
  Oligonucleotide primer for the detection of SNP TSC0006682
caaaaaaatctc

SEQ ID NO: 348192 - DNA, 12 bp, Artificial Sequence
  Oligonucleotide primer for the detection of SNP TSC0006682
taggttaataga

SEQ ID NO: 348193 - DNA, 12 bp, Artificial Sequence
  Oligonucleotide primer for the detection of SNP TSC0045478
atatacatacca

SEQ ID NO: 348194 - DNA, 12 bp, Artificial Sequence
  Oligonucleotide primer for the detection of SNP TSC0045478
atatacgtacca

SEQ ID NO: 348195 - DNA, 12 bp, Artificial Sequence
  Oligonucleotide primer for the detection of SNP TSC0045478
agatgaagaaat

SEQ ID NO: 348196 - DNA, 12 bp, Artificial Sequence
  Oligonucleotide primer for the detection of SNP TSC0045478
tatatgtattat

SEQ ID NO: 348197 - DNA, 12 bp, Artificial Sequence
  Oligonucleotide primer for the detection of SNP TSC0045478
tatacgtattat

SEQ ID NO: 348198 - DNA, 12 bp, Artificial Sequence
  Oligonucleotide primer for the detection of SNP TSC0045479
aataacttttat

SEQ ID NO: 348199 - DNA, 12 bp, Artificial Sequence
  Oligonucleotide primer for the detection of SNP TSC0045483
taatttctactt

SEQ ID NO: 348200 - DNA, 12 bp, Artificial Sequence
  Oligonucleotide primer for the detection of SNP TSC0045483
ttaatagattaa

SEQ ID NO: 348201 - DNA, 12 bp, Artificial Sequence
  Oligonucleotide primer for the detection of SNP TSC0001346
cacactttcacc

SEQ ID NO: 348202 - DNA, 12 bp, Artificial Sequence
  Oligonucleotide primer for the detection of SNP TSC0001346
cacgctttcacc

SEQ ID NO: 348203 - DNA, 12 bp, Artificial Sequence
  Oligonucleotide primer for the detection of SNP TSC0001346
tacgtttttatt

SEQ ID NO: 348204 - DNA, 12 bp, Artificial Sequence
  Oligonucleotide primer for the detection of SNP TSC0001347
aaaatacccata

SEQ ID NO: 348205 - DNA, 12 bp, Artificial Sequence
  Oligonucleotide primer for the detection of SNP TSC0001347
gaaatacccata

SEQ ID NO: 348206 - DNA, 12 bp, Artificial Sequence
  Oligonucleotide primer for the detection of SNP TSC0001347
tttttataatga

SEQ ID NO: 348207 - DNA, 12 bp, Artificial Sequence
  Oligonucleotide primer for the detection of SNP TSC0001347
ctcccacaataa

SEQ ID NO: 348208 - DNA, 12 bp, Artificial Sequence
  Oligonucleotide primer for the detection of SNP TSC0001347
tgaaatgtttat

SEQ ID NO: 348209 - DNA, 12 bp, Artificial Sequence
  Oligonucleotide primer for the detection of SNP TSC0001347
cgaaatgtttat

SEQ ID NO: 348210 - DNA, 12 bp, Artificial Sequence
  Oligonucleotide primer for the detection of SNP TSC0001348
ctataaaaaact

SEQ ID NO: 348211 - DNA, 12 bp, Artificial Sequence
  Oligonucleotide primer for the detection of SNP TSC0001348
gattgttgtgta

SEQ ID NO: 348212 - DNA, 12 bp, Artificial Sequence
  Oligonucleotide primer for the detection of SNP TSC0001349
aaaaaaaccatc

SEQ ID NO: 348213 - DNA, 12 bp, Artificial Sequence
  Oligonucleotide primer for the detection of SNP TSC0001349
aaaaaaaccgtc

SEQ ID NO: 348214 - DNA, 12 bp, Artificial Sequence
  Oligonucleotide primer for the detection of SNP TSC0001349
ggaagtattggt

SEQ ID NO: 348215 - DNA, 12 bp, Artificial Sequence
  Oligonucleotide primer for the detection of SNP TSC0001349
aaagagttgttt

SEQ ID NO: 348216 - DNA, 12 bp, Artificial Sequence
  Oligonucleotide primer for the detection of SNP TSC0001349
aaagagtcgttt

SEQ ID NO: 348217 - DNA, 12 bp, Artificial Sequence
  Oligonucleotide primer for the detection of SNP TSC0045486
ctttctttttta

SEQ ID NO: 348218 - DNA, 12 bp, Artificial Sequence
  Oligonucleotide primer for the detection of SNP TSC0045486
aaaggattaaaa

SEQ ID NO: 348219 - DNA, 12 bp, Artificial Sequence
  Oligonucleotide primer for the detection of SNP TSC0045487
aataatcctccc

SEQ ID NO: 348220 - DNA, 12 bp, Artificial Sequence
  Oligonucleotide primer for the detection of SNP TSC0045487
ttagtaattgag

SEQ ID NO: 348221 - DNA, 12 bp, Artificial Sequence
  Oligonucleotide primer for the detection of SNP TSC0045488
ctccctttcaaa

SEQ ID NO: 348222 - DNA, 12 bp, Artificial Sequence
  Oligonucleotide primer for the detection of SNP TSC0045488
ggaaaggatttt

SEQ ID NO: 348223 - DNA, 12 bp, Artificial Sequence
  Oligonucleotide primer for the detection of SNP TSC0045488
ggaaaggatttc

SEQ ID NO: 348224 - DNA, 12 bp, Artificial Sequence
  Oligonucleotide primer for the detection of SNP TSC0045489
acataataccct

SEQ ID NO: 348225 - DNA, 12 bp, Artificial Sequence
  Oligonucleotide primer for the detection of SNP TSC0045489
gagtaattggaa

SEQ ID NO: 348226 - DNA, 12 bp, Artificial Sequence
  Oligonucleotide primer for the detection of SNP TSC0045490
gagggaaaaata

SEQ ID NO: 348227 - DNA, 12 bp, Artificial Sequence
  Oligonucleotide primer for the detection of SNP TSC0045491
cctcttactcac

SEQ ID NO: 348228 - DNA, 12 bp, Artificial Sequence
  Oligonucleotide primer for the detection of SNP TSC0045491
atttttgtaata

SEQ ID NO: 348229 - DNA, 12 bp, Artificial Sequence
  Oligonucleotide primer for the detection of SNP TSC0045491
attttcgtaata

SEQ ID NO: 348230 - DNA, 12 bp, Artificial Sequence
  Oligonucleotide primer for the detection of SNP TSC0045494
ttaaaaataccc

SEQ ID NO: 348231 - DNA, 12 bp, Artificial Sequence
  Oligonucleotide primer for the detection of SNP TSC0045495
catacaactaac

SEQ ID NO: 348232 - DNA, 12 bp, Artificial Sequence
  Oligonucleotide primer for the detection of SNP TSC0045495
tgtggaaatttg

SEQ ID NO: 348233 - DNA, 12 bp, Artificial Sequence
  Oligonucleotide primer for the detection of SNP TSC0045495
tataaaaatcta

SEQ ID NO: 348234 - DNA, 12 bp, Artificial Sequence
  Oligonucleotide primer for the detection of SNP TSC0045495
tatgtagttaat

SEQ ID NO: 348235 - DNA, 12 bp, Artificial Sequence
  Oligonucleotide primer for the detection of SNP TSC0045496
actatcaaaaac

SEQ ID NO: 348236 - DNA, 12 bp, Artificial Sequence
  Oligonucleotide primer for the detection of SNP TSC0045496
gctatcaaaaac

SEQ ID NO: 348237 - DNA, 12 bp, Artificial Sequence
  Oligonucleotide primer for the detection of SNP TSC0045496
tgtcggattagg

SEQ ID NO: 348238 - DNA, 12 bp, Artificial Sequence
  Oligonucleotide primer for the detection of SNP TSC0045497
catccattatcc

SEQ ID NO: 348239 - DNA, 12 bp, Artificial Sequence
  Oligonucleotide primer for the detection of SNP TSC0045497
ggtttttgaaga

SEQ ID NO: 348240 - DNA, 12 bp, Artificial Sequence
  Oligonucleotide primer for the detection of SNP TSC0045498
ataaatctccct

SEQ ID NO: 348241 - DNA, 12 bp, Artificial Sequence
  Oligonucleotide primer for the detection of SNP TSC0045498
tatatttagagg

SEQ ID NO: 348242 - DNA, 12 bp, Artificial Sequence
  Oligonucleotide primer for the detection of SNP TSC0045499
gattataaacat

SEQ ID NO: 348243 - DNA, 12 bp, Artificial Sequence
  Oligonucleotide primer for the detection of SNP TSC0045499
ataaaataagta

SEQ ID NO: 348244 - DNA, 12 bp, Artificial Sequence
  Oligonucleotide primer for the detection of SNP TSC0045500
aacacaaactac

SEQ ID NO: 348245 - DNA, 12 bp, Artificial Sequence
  Oligonucleotide primer for the detection of SNP TSC0045500
atattttggttg

SEQ ID NO: 348246 - DNA, 12 bp, Artificial Sequence
  Oligonucleotide primer for the detection of SNP TSC0045500
acaccctaacta

SEQ ID NO: 348247 - DNA, 12 bp, Artificial Sequence
  Oligonucleotide primer for the detection of SNP TSC0045500
agtataggttgt

SEQ ID NO: 348248 - DNA, 12 bp, Artificial Sequence
  Oligonucleotide primer for the detection of SNP TSC0045502
taatatttacac

SEQ ID NO: 348249 - DNA, 12 bp, Artificial Sequence
  Oligonucleotide primer for the detection of SNP TSC0045502
ttaaaattaatg

SEQ ID NO: 348250 - DNA, 12 bp, Artificial Sequence
  Oligonucleotide primer for the detection of SNP TSC0045503
acattttcttca

SEQ ID NO: 348251 - DNA, 12 bp, Artificial Sequence
  Oligonucleotide primer for the detection of SNP TSC0045503
ttaaaattttta

SEQ ID NO: 348252 - DNA, 12 bp, Artificial Sequence
  Oligonucleotide primer for the detection of SNP TSC0045503
ctaaaaccttca

SEQ ID NO: 348253 - DNA, 12 bp, Artificial Sequence
  Oligonucleotide primer for the detection of SNP TSC0045504
attttaataaat

SEQ ID NO: 348254 - DNA, 12 bp, Artificial Sequence
  Oligonucleotide primer for the detection of SNP TSC0045504
tttaagttaata

SEQ ID NO: 348255 - DNA, 12 bp, Artificial Sequence
  Oligonucleotide primer for the detection of SNP TSC0045505
aatattaaaact

SEQ ID NO: 348256 - DNA, 12 bp, Artificial Sequence
  Oligonucleotide primer for the detection of SNP TSC0045505
atgtttatataa

SEQ ID NO: 348257 - DNA, 12 bp, Artificial Sequence
  Oligonucleotide primer for the detection of SNP TSC0045505
atatttacacaa

SEQ ID NO: 348258 - DNA, 12 bp, Artificial Sequence
  Oligonucleotide primer for the detection of SNP TSC0045505
aatgttaaaatt

SEQ ID NO: 348259 - DNA, 12 bp, Artificial Sequence
  Oligonucleotide primer for the detection of SNP TSC0045506
ggatatatatag

SEQ ID NO: 348260 - DNA, 12 bp, Artificial Sequence
  Oligonucleotide primer for the detection of SNP TSC0045508
tttggtagatta

SEQ ID NO: 348261 - DNA, 12 bp, Artificial Sequence
  Oligonucleotide primer for the detection of SNP TSC0045509
tataataaattg

SEQ ID NO: 348262 - DNA, 12 bp, Artificial Sequence
  Oligonucleotide primer for the detection of SNP TSC0045513
taaaacataata

SEQ ID NO: 348263 - DNA, 12 bp, Artificial Sequence
  Oligonucleotide primer for the detection of SNP TSC0045513
cataatttttat

SEQ ID NO: 348264 - DNA, 12 bp, Artificial Sequence
  Oligonucleotide primer for the detection of SNP TSC0045513
taaagtataata

SEQ ID NO: 348265 - DNA, 12 bp, Artificial Sequence
  Oligonucleotide primer for the detection of SNP TSC0045515
tggtggtaatat

SEQ ID NO: 348266 - DNA, 12 bp, Artificial Sequence
  Oligonucleotide primer for the detection of SNP TSC0045515
atggaagtagaa

SEQ ID NO: 348267 - DNA, 12 bp, Artificial Sequence
  Oligonucleotide primer for the detection of SNP TSC0045517
ttactctatcta

SEQ ID NO: 348268 - DNA, 12 bp, Artificial Sequence
  Oligonucleotide primer for the detection of SNP TSC0045517
ggaagtgagatt

SEQ ID NO: 348269 - DNA, 12 bp, Artificial Sequence
  Oligonucleotide primer for the detection of SNP TSC0045517
ggaagtgagatc

SEQ ID NO: 348270 - DNA, 12 bp, Artificial Sequence
  Oligonucleotide primer for the detection of SNP TSC0045518
ggaagggttata

SEQ ID NO: 348271 - DNA, 12 bp, Artificial Sequence
  Oligonucleotide primer for the detection of SNP TSC0045519
cccaactactca

SEQ ID NO: 348272 - DNA, 12 bp, Artificial Sequence
  Oligonucleotide primer for the detection of SNP TSC0045519
cccaactactcg

SEQ ID NO: 348273 - DNA, 12 bp, Artificial Sequence
  Oligonucleotide primer for the detection of SNP TSC0045520
atattacataat

SEQ ID NO: 348274 - DNA, 12 bp, Artificial Sequence
  Oligonucleotide primer for the detection of SNP TSC0045520
tgttatattatg

SEQ ID NO: 348275 - DNA, 12 bp, Artificial Sequence
  Oligonucleotide primer for the detection of SNP TSC0045522
acaaattaaaat

SEQ ID NO: 348276 - DNA, 12 bp, Artificial Sequence
  Oligonucleotide primer for the detection of SNP TSC0045522
ataaggttttta

SEQ ID NO: 348277 - DNA, 12 bp, Artificial Sequence
  Oligonucleotide primer for the detection of SNP TSC0045523
catcttaactcc

SEQ ID NO: 348278 - DNA, 12 bp, Artificial Sequence
  Oligonucleotide primer for the detection of SNP TSC0045523
ttaaagatagaa

SEQ ID NO: 348279 - DNA, 12 bp, Artificial Sequence
  Oligonucleotide primer for the detection of SNP TSC0045525
tttctttatatt

SEQ ID NO: 348280 - DNA, 12 bp, Artificial Sequence
  Oligonucleotide primer for the detection of SNP TSC0045525
catcttcaaaca

SEQ ID NO: 348281 - DNA, 12 bp, Artificial Sequence
  Oligonucleotide primer for the detection of SNP TSC0045526
attactttttta

SEQ ID NO: 348282 - DNA, 12 bp, Artificial Sequence
  Oligonucleotide primer for the detection of SNP TSC0045526
gtttatgaagta

SEQ ID NO: 348283 - DNA, 12 bp, Artificial Sequence
  Oligonucleotide primer for the detection of SNP TSC0045526
acccataaaaca

SEQ ID NO: 348284 - DNA, 12 bp, Artificial Sequence
  Oligonucleotide primer for the detection of SNP TSC0045527
atgtattaggta

SEQ ID NO: 348285 - DNA, 12 bp, Artificial Sequence
  Oligonucleotide primer for the detection of SNP TSC0045528
aaatatatattt

SEQ ID NO: 348286 - DNA, 12 bp, Artificial Sequence
  Oligonucleotide primer for the detection of SNP TSC0045528
aggttgttaaga

SEQ ID NO: 348287 - DNA, 12 bp, Artificial Sequence
  Oligonucleotide primer for the detection of SNP TSC0045528
aggtcgttaaga

SEQ ID NO: 348288 - DNA, 12 bp, Artificial Sequence
  Oligonucleotide primer for the detection of SNP TSC0045529
tcaatataccac

SEQ ID NO: 348289 - DNA, 12 bp, Artificial Sequence
  Oligonucleotide primer for the detection of SNP TSC0045529
ataaaatattag

SEQ ID NO: 348290 - DNA, 12 bp, Artificial Sequence
  Oligonucleotide primer for the detection of SNP TSC0045530
tactaaaatata

SEQ ID NO: 348291 - DNA, 12 bp, Artificial Sequence
  Oligonucleotide primer for the detection of SNP TSC0045530
agttttatggtt

SEQ ID NO: 348292 - DNA, 12 bp, Artificial Sequence
  Oligonucleotide primer for the detection of SNP TSC0045530
tattgaaatgta

SEQ ID NO: 348293 - DNA, 12 bp, Artificial Sequence
  Oligonucleotide primer for the detection of SNP TSC0045531
aaaccacaaacc

SEQ ID NO: 348294 - DNA, 12 bp, Artificial Sequence
  Oligonucleotide primer for the detection of SNP TSC0045531
aaaccacgaacc

SEQ ID NO: 348295 - DNA, 12 bp, Artificial Sequence
  Oligonucleotide primer for the detection of SNP TSC0045531
atggattggtat

SEQ ID NO: 348296 - DNA, 12 bp, Artificial Sequence
  Oligonucleotide primer for the detection of SNP TSC0045531
atggattggtac

SEQ ID NO: 348297 - DNA, 12 bp, Artificial Sequence
  Oligonucleotide primer for the detection of SNP TSC0045531
aggttatgaatt

SEQ ID NO: 348298 - DNA, 12 bp, Artificial Sequence
  Oligonucleotide primer for the detection of SNP TSC0045531
aggttacgaatt

SEQ ID NO: 348299 - DNA, 12 bp, Artificial Sequence
  Oligonucleotide primer for the detection of SNP TSC0045531
aggttatgaatc

SEQ ID NO: 348300 - DNA, 12 bp, Artificial Sequence
  Oligonucleotide primer for the detection of SNP TSC0045531
aggttacgaatc

SEQ ID NO: 348301 - DNA, 12 bp, Artificial Sequence
  Oligonucleotide primer for the detection of SNP TSC0045532
actactttacct

SEQ ID NO: 348302 - DNA, 12 bp, Artificial Sequence
  Oligonucleotide primer for the detection of SNP TSC0045532
ataagtgaaaga

SEQ ID NO: 348303 - DNA, 12 bp, Artificial Sequence
  Oligonucleotide primer for the detection of SNP TSC0045533
aaaactcttatt

SEQ ID NO: 348304 - DNA, 12 bp, Artificial Sequence
  Oligonucleotide primer for the detection of SNP TSC0045533
gaagatggttag

SEQ ID NO: 348305 - DNA, 12 bp, Artificial Sequence
  Oligonucleotide primer for the detection of SNP TSC0045536
atcattttaaca

SEQ ID NO: 348306 - DNA, 12 bp, Artificial Sequence
  Oligonucleotide primer for the detection of SNP TSC0045536
gttggtttgagt

SEQ ID NO: 348307 - DNA, 12 bp, Artificial Sequence
  Oligonucleotide primer for the detection of SNP TSC0045536
ttaatctaaaca

SEQ ID NO: 348308 - DNA, 12 bp, Artificial Sequence
  Oligonucleotide primer for the detection of SNP TSC0045536
agttattttggt

SEQ ID NO: 348309 - DNA, 12 bp, Artificial Sequence
  Oligonucleotide primer for the detection of SNP TSC0045537
ctcataaccaca

SEQ ID NO: 348310 - DNA, 12 bp, Artificial Sequence
  Oligonucleotide primer for the detection of SNP TSC0045537
agaatgttttat

SEQ ID NO: 348311 - DNA, 12 bp, Artificial Sequence
  Oligonucleotide primer for the detection of SNP TSC0045537
aaatacttcaca

SEQ ID NO: 348312 - DNA, 12 bp, Artificial Sequence
  Oligonucleotide primer for the detection of SNP TSC0045538
taaatttccttt

SEQ ID NO: 348313 - DNA, 12 bp, Artificial Sequence
  Oligonucleotide primer for the detection of SNP TSC0045538
gatagttgttgt

SEQ ID NO: 348314 - DNA, 12 bp, Artificial Sequence
  Oligonucleotide primer for the detection of SNP TSC0045539
aatcattacttc

SEQ ID NO: 348315 - DNA, 12 bp, Artificial Sequence
  Oligonucleotide primer for the detection of SNP TSC0045539
attattgtaatg

SEQ ID NO: 348316 - DNA, 12 bp, Artificial Sequence
  Oligonucleotide primer for the detection of SNP TSC0045540
tctcactcatct

SEQ ID NO: 348317 - DNA, 12 bp, Artificial Sequence
  Oligonucleotide primer for the detection of SNP TSC0045540
tgaattgttata

SEQ ID NO: 348318 - DNA, 12 bp, Artificial Sequence
  Oligonucleotide primer for the detection of SNP TSC0045545
acacataacaaa

SEQ ID NO: 348319 - DNA, 12 bp, Artificial Sequence
  Oligonucleotide primer for the detection of SNP TSC0045545
ataaatgttaat

SEQ ID NO: 348320 - DNA, 12 bp, Artificial Sequence
  Oligonucleotide primer for the detection of SNP TSC0045545
acaaatactaat

SEQ ID NO: 348321 - DNA, 12 bp, Artificial Sequence
  Oligonucleotide primer for the detection of SNP TSC0045545
gtatatagtaag

SEQ ID NO: 348322 - DNA, 12 bp, Artificial Sequence
  Oligonucleotide primer for the detection of SNP TSC0045546
tactatatattc

SEQ ID NO: 348323 - DNA, 12 bp, Artificial Sequence
  Oligonucleotide primer for the detection of SNP TSC0045546
tttatttgaatg

SEQ ID NO: 348324 - DNA, 12 bp, Artificial Sequence
  Oligonucleotide primer for the detection of SNP TSC0045546
tttatttgaacg

SEQ ID NO: 348325 - DNA, 12 bp, Artificial Sequence
  Oligonucleotide primer for the detection of SNP TSC0045546
cttatttaaaca

SEQ ID NO: 348326 - DNA, 12 bp, Artificial Sequence
  Oligonucleotide primer for the detection of SNP TSC0045546
cttatttaaacg

SEQ ID NO: 348327 - DNA, 12 bp, Artificial Sequence
  Oligonucleotide primer for the detection of SNP TSC0045546
tattatgtgttt

SEQ ID NO: 348328 - DNA, 12 bp, Artificial Sequence
  Oligonucleotide primer for the detection of SNP TSC0045547
aattctattaac

SEQ ID NO: 348329 - DNA, 12 bp, Artificial Sequence
  Oligonucleotide primer for the detection of SNP TSC0045548
ttcaaccaaata

SEQ ID NO: 348330 - DNA, 12 bp, Artificial Sequence
  Oligonucleotide primer for the detection of SNP TSC0045548
tttagttaggtg

SEQ ID NO: 348331 - DNA, 12 bp, Artificial Sequence
  Oligonucleotide primer for the detection of SNP TSC0045549
gtttattgtgta

SEQ ID NO: 348332 - DNA, 12 bp, Artificial Sequence
  Oligonucleotide primer for the detection of SNP TSC0045550
tctatcatttac

SEQ ID NO: 348333 - DNA, 12 bp, Artificial Sequence
  Oligonucleotide primer for the detection of SNP TSC0009879
attaattaaaac

SEQ ID NO: 348334 - DNA, 12 bp, Artificial Sequence
  Oligonucleotide primer for the detection of SNP TSC0009879
gttttgaggaat

SEQ ID NO: 348335 - DNA, 12 bp, Artificial Sequence
  Oligonucleotide primer for the detection of SNP TSC0009879
accttaaaaaac

SEQ ID NO: 348336 - DNA, 12 bp, Artificial Sequence
  Oligonucleotide primer for the detection of SNP TSC0009879
attgattgaaat

SEQ ID NO: 348337 - DNA, 12 bp, Artificial Sequence
  Oligonucleotide primer for the detection of SNP TSC0008611
tataccatattt

SEQ ID NO: 348338 - DNA, 12 bp, Artificial Sequence
  Oligonucleotide primer for the detection of SNP TSC0008611
tgaatgaataaa

SEQ ID NO: 348339 - DNA, 12 bp, Artificial Sequence
  Oligonucleotide primer for the detection of SNP TSC0008611
aaataaacaaaa

SEQ ID NO: 348340 - DNA, 12 bp, Artificial Sequence
  Oligonucleotide primer for the detection of SNP TSC0008611
tgtattatgttt

SEQ ID NO: 348341 - DNA, 12 bp, Artificial Sequence
  Oligonucleotide primer for the detection of SNP TSC0045553
attcttaacttc

SEQ ID NO: 348342 - DNA, 12 bp, Artificial Sequence
  Oligonucleotide primer for the detection of SNP TSC0045553
gtttttaggtgt

SEQ ID NO: 348343 - DNA, 12 bp, Artificial Sequence
  Oligonucleotide primer for the detection of SNP TSC0045553
cctccaaataca

SEQ ID NO: 348344 - DNA, 12 bp, Artificial Sequence
  Oligonucleotide primer for the detection of SNP TSC0008454
tttaatccatcc

SEQ ID NO: 348345 - DNA, 12 bp, Artificial Sequence
  Oligonucleotide primer for the detection of SNP TSC0008454
tgaagatgagag

SEQ ID NO: 348346 - DNA, 12 bp, Artificial Sequence
  Oligonucleotide primer for the detection of SNP TSC0008455
tccctactacca

SEQ ID NO: 348347 - DNA, 12 bp, Artificial Sequence
  Oligonucleotide primer for the detection of SNP TSC0008455
gtattagtatgg

SEQ ID NO: 348348 - DNA, 12 bp, Artificial Sequence
  Oligonukleotid-Primer
ttttgttgttat

SEQ ID NO: 348349 - DNA, 12 bp, Artificial Sequence
  Oligonucleotide primer for the detection of SNP TSC0045554
aaactttcaaca

SEQ ID NO: 348350 - DNA, 12 bp, Artificial Sequence
  Oligonucleotide primer for the detection of SNP TSC0045554
tttatttgaagt

SEQ ID NO: 348351 - DNA, 12 bp, Artificial Sequence
  Oligonucleotide primer for the detection of SNP TSC0045554
ttatctaaaata

SEQ ID NO: 348352 - DNA, 12 bp, Artificial Sequence
  Oligonucleotide primer for the detection of SNP TSC0045554
aaatttttagta

SEQ ID NO: 348353 - DNA, 12 bp, Artificial Sequence
  Oligonucleotide primer for the detection of SNP TSC0045555
acttaataatca

SEQ ID NO: 348354 - DNA, 12 bp, Artificial Sequence
  Oligonucleotide primer for the detection of SNP TSC0045555
tagttaaaaatt

SEQ ID NO: 348355 - DNA, 12 bp, Artificial Sequence
  Oligonucleotide primer for the detection of SNP TSC0045555
taactaaaaatc

SEQ ID NO: 348356 - DNA, 12 bp, Artificial Sequence
  Oligonucleotide primer for the detection of SNP TSC0045555
tatttagtgatt

SEQ ID NO: 348357 - DNA, 12 bp, Artificial Sequence
  Oligonucleotide primer for the detection of SNP TSC0045556
taatttcttttt

SEQ ID NO: 348358 - DNA, 12 bp, Artificial Sequence
  Oligonucleotide primer for the detection of SNP TSC0045556
taattctaaaaa

SEQ ID NO: 348359 - DNA, 12 bp, Artificial Sequence
  Oligonucleotide primer for the detection of SNP TSC0045558
caacaatcatca

SEQ ID NO: 348360 - DNA, 12 bp, Artificial Sequence
  Oligonucleotide primer for the detection of SNP TSC0045558
tggtagggagga

SEQ ID NO: 348361 - DNA, 12 bp, Artificial Sequence
  Oligonucleotide primer for the detection of SNP TSC0045558
gtagttattatt

SEQ ID NO: 348362 - DNA, 12 bp, Artificial Sequence
  Oligonucleotide primer for the detection of SNP TSC0045558
gtagttattatc

SEQ ID NO: 348363 - DNA, 12 bp, Artificial Sequence
  Oligonucleotide primer for the detection of SNP TSC0045559
tttccttatctc

SEQ ID NO: 348364 - DNA, 12 bp, Artificial Sequence
  Oligonucleotide primer for the detection of SNP TSC0045559
aaagaagaagag

SEQ ID NO: 348365 - DNA, 12 bp, Artificial Sequence
  Oligonucleotide primer for the detection of SNP TSC0045560
aaattattttgg

SEQ ID NO: 348366 - DNA, 12 bp, Artificial Sequence
  Oligonucleotide primer for the detection of SNP TSC0045561
aatttaaaaacc

SEQ ID NO: 348367 - DNA, 12 bp, Artificial Sequence
  Oligonucleotide primer for the detection of SNP TSC0045561
ttttccaacaaa

SEQ ID NO: 348368 - DNA, 12 bp, Artificial Sequence
  Oligonucleotide primer for the detection of SNP TSC0045561
ggtttgaaagtt

SEQ ID NO: 348369 - DNA, 12 bp, Artificial Sequence
  Oligonucleotide primer for the detection of SNP TSC0045564
tcaacccactta

SEQ ID NO: 348370 - DNA, 12 bp, Artificial Sequence
  Oligonucleotide primer for the detection of SNP TSC0045564
taagaaaatagt

SEQ ID NO: 348371 - DNA, 12 bp, Artificial Sequence
  Oligonucleotide primer for the detection of SNP TSC0045564
ttaatttatttg

SEQ ID NO: 348372 - DNA, 12 bp, Artificial Sequence
  Oligonucleotide primer for the detection of SNP TSC0045565
aaacattacacc

SEQ ID NO: 348373 - DNA, 12 bp, Artificial Sequence
  Oligonucleotide primer for the detection of SNP TSC0045565
tttgatataaag

SEQ ID NO: 348374 - DNA, 12 bp, Artificial Sequence
  Oligonucleotide primer for the detection of SNP TSC0045565
cttaatataaaa

SEQ ID NO: 348375 - DNA, 12 bp, Artificial Sequence
  Oligonucleotide primer for the detection of SNP TSC0045566
ttcactcttaaa

SEQ ID NO: 348376 - DNA, 12 bp, Artificial Sequence
  Oligonucleotide primer for the detection of SNP TSC0045566
actcctattaat

SEQ ID NO: 348377 - DNA, 12 bp, Artificial Sequence
  Oligonucleotide primer for the detection of SNP TSC0045567
aaattttttaat

SEQ ID NO: 348378 - DNA, 12 bp, Artificial Sequence
  Oligonucleotide primer for the detection of SNP TSC0045568
ttattaaattat

SEQ ID NO: 348379 - DNA, 12 bp, Artificial Sequence
  Oligonucleotide primer for the detection of SNP TSC0045568
taaattttgtta

SEQ ID NO: 348380 - DNA, 12 bp, Artificial Sequence
  Oligonucleotide primer for the detection of SNP TSC0045569
atgatttattcg

SEQ ID NO: 348381 - DNA, 12 bp, Artificial Sequence
  Oligonucleotide primer for the detection of SNP TSC0045570
acgcctataatc

SEQ ID NO: 348382 - DNA, 12 bp, Artificial Sequence
  Oligonucleotide primer for the detection of SNP TSC0045571
taacattaactt

SEQ ID NO: 348383 - DNA, 12 bp, Artificial Sequence
  Oligonucleotide primer for the detection of SNP TSC0045571
atattagttttc

SEQ ID NO: 348384 - DNA, 12 bp, Artificial Sequence
  Oligonucleotide primer for the detection of SNP TSC0045572
ttataaacatta

SEQ ID NO: 348385 - DNA, 12 bp, Artificial Sequence
  Oligonucleotide primer for the detection of SNP TSC0045572
aggagaaggggt

SEQ ID NO: 348386 - DNA, 12 bp, Artificial Sequence
  Oligonucleotide primer for the detection of SNP TSC0045572
ttataagtatta

SEQ ID NO: 348387 - DNA, 12 bp, Artificial Sequence
  Oligonucleotide primer for the detection of SNP TSC0045573
caaacataaaac

SEQ ID NO: 348388 - DNA, 12 bp, Artificial Sequence
  Oligonucleotide primer for the detection of SNP TSC0045573
tttatagattta

SEQ ID NO: 348389 - DNA, 12 bp, Artificial Sequence
  Oligonucleotide primer for the detection of SNP TSC0045574
taatcaacataa

SEQ ID NO: 348390 - DNA, 12 bp, Artificial Sequence
  Oligonucleotide primer for the detection of SNP TSC0045574
aggtggggtttt

SEQ ID NO: 348391 - DNA, 12 bp, Artificial Sequence
  Oligonucleotide primer for the detection of SNP TSC0045576
atatctacatct

SEQ ID NO: 348392 - DNA, 12 bp, Artificial Sequence
  Oligonucleotide primer for the detection of SNP TSC0045579
cccttaatccca

SEQ ID NO: 348393 - DNA, 12 bp, Artificial Sequence
  Oligonucleotide primer for the detection of SNP TSC0045579
aacccttcttat

SEQ ID NO: 348394 - DNA, 12 bp, Artificial Sequence
  Oligonucleotide primer for the detection of SNP TSC0045580
tacactaaaaac

SEQ ID NO: 348395 - DNA, 12 bp, Artificial Sequence
  Oligonucleotide primer for the detection of SNP TSC0045580
ataggaagtaag

SEQ ID NO: 348396 - DNA, 12 bp, Artificial Sequence
  Oligonucleotide primer for the detection of SNP TSC0045581
acttactaaaat

SEQ ID NO: 348397 - DNA, 12 bp, Artificial Sequence
  Oligonucleotide primer for the detection of SNP TSC0045581
gatttggaatta

SEQ ID NO: 348398 - DNA, 12 bp, Artificial Sequence
  Oligonucleotide primer for the detection of SNP TSC0045582
ataggtggtatt

SEQ ID NO: 348399 - DNA, 12 bp, Artificial Sequence
  Oligonucleotide primer for the detection of SNP TSC0045582
ataggcggtatt

SEQ ID NO: 348400 - DNA, 12 bp, Artificial Sequence
  Oligonucleotide primer for the detection of SNP TSC0045582
acaaacgatact

SEQ ID NO: 348401 - DNA, 12 bp, Artificial Sequence
  Oligonucleotide primer for the detection of SNP TSC0045582
aaaaaaaaagcg

SEQ ID NO: 348402 - DNA, 12 bp, Artificial Sequence
  Oligonucleotide primer for the detection of SNP TSC0045583
aaatctcacttt

SEQ ID NO: 348403 - DNA, 12 bp, Artificial Sequence
  Oligonucleotide primer for the detection of SNP TSC0045583
tttgattatata

SEQ ID NO: 348404 - DNA, 12 bp, Artificial Sequence
  Oligonucleotide primer for the detection of SNP TSC0008648
ttttaaacaaca

SEQ ID NO: 348405 - DNA, 12 bp, Artificial Sequence
  Oligonucleotide primer for the detection of SNP TSC0008648
ttttaaacgaca

SEQ ID NO: 348406 - DNA, 12 bp, Artificial Sequence
  Oligonucleotide primer for the detection of SNP TSC0008648
tggtttataaaa

SEQ ID NO: 348407 - DNA, 12 bp, Artificial Sequence
  Oligonucleotide primer for the detection of SNP TSC0008648
taatctataaaa

SEQ ID NO: 348408 - DNA, 12 bp, Artificial Sequence
  Oligonucleotide primer for the detection of SNP TSC0008648
ttttgagtgata

SEQ ID NO: 348409 - DNA, 12 bp, Artificial Sequence
  Oligonucleotide primer for the detection of SNP TSC0008648
ttttgagcgata

SEQ ID NO: 348410 - DNA, 12 bp, Artificial Sequence
  Oligonucleotide primer for the detection of SNP TSC0045585
caacacttattt

SEQ ID NO: 348411 - DNA, 12 bp, Artificial Sequence
  Oligonucleotide primer for the detection of SNP TSC0045585
tttggaaatgta

SEQ ID NO: 348412 - DNA, 12 bp, Artificial Sequence
  Oligonucleotide primer for the detection of SNP TSC0045586
ttttggtttaga

SEQ ID NO: 348413 - DNA, 12 bp, Artificial Sequence
  Oligonucleotide primer for the detection of SNP TSC0045589
aaaataacttaa

SEQ ID NO: 348414 - DNA, 12 bp, Artificial Sequence
  Oligonucleotide primer for the detection of SNP TSC0045589
ttaatttacata

SEQ ID NO: 348415 - DNA, 12 bp, Artificial Sequence
  Oligonucleotide primer for the detection of SNP TSC0045589
aggatggtttaa

SEQ ID NO: 348416 - DNA, 12 bp, Artificial Sequence
  Oligonucleotide primer for the detection of SNP TSC0045590
gaaggatattgt

SEQ ID NO: 348417 - DNA, 12 bp, Artificial Sequence
  Oligonucleotide primer for the detection of SNP TSC0045590
aaaaatattata

SEQ ID NO: 348418 - DNA, 12 bp, Artificial Sequence
  Oligonucleotide primer for the detection of SNP TSC0045590
attttaaaaatg

SEQ ID NO: 348419 - DNA, 12 bp, Artificial Sequence
  Oligonucleotide primer for the detection of SNP TSC0008364
atactaaattaa

SEQ ID NO: 348420 - DNA, 12 bp, Artificial Sequence
  Oligonucleotide primer for the detection of SNP TSC0008364
tttgtggagttt

SEQ ID NO: 348421 - DNA, 12 bp, Artificial Sequence
  Oligonucleotide primer for the detection of SNP TSC0008364
tttgcggagttt

SEQ ID NO: 348422 - DNA, 12 bp, Artificial Sequence
  Oligonucleotide primer for the detection of SNP TSC0008364
ctttacgaaatt

SEQ ID NO: 348423 - DNA, 12 bp, Artificial Sequence
  Oligonucleotide primer for the detection of SNP TSC0008364
tgtgttgaatta

SEQ ID NO: 348424 - DNA, 12 bp, Artificial Sequence
  Oligonucleotide primer for the detection of SNP TSC0045592
tgatgagttgtt

SEQ ID NO: 348425 - DNA, 12 bp, Artificial Sequence
  Oligonucleotide primer for the detection of SNP TSC0045592
tgacgagttgtt

SEQ ID NO: 348426 - DNA, 12 bp, Artificial Sequence
  Oligonucleotide primer for the detection of SNP TSC0045592
taacaaattact

SEQ ID NO: 348427 - DNA, 12 bp, Artificial Sequence
  Oligonucleotide primer for the detection of SNP TSC0045592
taacgaattact

SEQ ID NO: 348428 - DNA, 12 bp, Artificial Sequence
  Oligonucleotide primer for the detection of SNP TSC0045592
tgtaattagaga

SEQ ID NO: 348429 - DNA, 12 bp, Artificial Sequence
  Oligonucleotide primer for the detection of SNP TSC0045593
atgaagaaataa

SEQ ID NO: 348430 - DNA, 12 bp, Artificial Sequence
  Oligonucleotide primer for the detection of SNP TSC0004995
accttccacaac

SEQ ID NO: 348431 - DNA, 12 bp, Artificial Sequence
  Oligonucleotide primer for the detection of SNP TSC0004995
taggggttggga

SEQ ID NO: 348432 - DNA, 12 bp, Artificial Sequence
  Oligonucleotide primer for the detection of SNP TSC0009670
cctaaattttat

SEQ ID NO: 348433 - DNA, 12 bp, Artificial Sequence
  Oligonucleotide primer for the detection of SNP TSC0009670
gaaaaggataga

SEQ ID NO: 348434 - DNA, 12 bp, Artificial Sequence
  Oligonucleotide primer for the detection of SNP TSC0045594
aataatccacac

SEQ ID NO: 348435 - DNA, 12 bp, Artificial Sequence
  Oligonucleotide primer for the detection of SNP TSC0045594
aataatccacgc

SEQ ID NO: 348436 - DNA, 12 bp, Artificial Sequence
  Oligonucleotide primer for the detection of SNP TSC0045594
gttgggattatt

SEQ ID NO: 348437 - DNA, 12 bp, Artificial Sequence
  Oligonucleotide primer for the detection of SNP TSC0045594
actaaaattact

SEQ ID NO: 348438 - DNA, 12 bp, Artificial Sequence
  Oligonucleotide primer for the detection of SNP TSC0045594
ggtggtttatgt

SEQ ID NO: 348439 - DNA, 12 bp, Artificial Sequence
  Oligonucleotide primer for the detection of SNP TSC0045594
ggtggtttacgt

SEQ ID NO: 348440 - DNA, 12 bp, Artificial Sequence
  Oligonucleotide primer for the detection of SNP TSC0045595
ttacgtttggta

SEQ ID NO: 348441 - DNA, 12 bp, Artificial Sequence
  Oligonucleotide primer for the detection of SNP TSC0045596
caaactaaaaac

SEQ ID NO: 348442 - DNA, 12 bp, Artificial Sequence
  Oligonucleotide primer for the detection of SNP TSC0045596
cgaactaaaaac

SEQ ID NO: 348443 - DNA, 12 bp, Artificial Sequence
  Oligonucleotide primer for the detection of SNP TSC0045596
ttggttttttcg

SEQ ID NO: 348444 - DNA, 12 bp, Artificial Sequence
  Oligonucleotide primer for the detection of SNP TSC0045596
ctaactttctca

SEQ ID NO: 348445 - DNA, 12 bp, Artificial Sequence
  Oligonucleotide primer for the detection of SNP TSC0045596
ctaactttctcg

SEQ ID NO: 348446 - DNA, 12 bp, Artificial Sequence
  Oligonucleotide primer for the detection of SNP TSC0045596
tgagttggagat

SEQ ID NO: 348447 - DNA, 12 bp, Artificial Sequence
  Oligonucleotide primer for the detection of SNP TSC0045596
cgagttggagat

SEQ ID NO: 348448 - DNA, 12 bp, Artificial Sequence
  Oligonucleotide primer for the detection of SNP TSC0045596
tgagttggagac

SEQ ID NO: 348449 - DNA, 12 bp, Artificial Sequence
  Oligonucleotide primer for the detection of SNP TSC0045596
cgagttggagac

SEQ ID NO: 348450 - DNA, 12 bp, Artificial Sequence
  Oligonucleotide primer for the detection of SNP TSC0045598
aaatttcccctt

SEQ ID NO: 348451 - DNA, 12 bp, Artificial Sequence
  Oligonucleotide primer for the detection of SNP TSC0045598
ggtttggttatg

SEQ ID NO: 348452 - DNA, 12 bp, Artificial Sequence
  Oligonucleotide primer for the detection of SNP TSC0045598
ggttcggttatg

SEQ ID NO: 348453 - DNA, 12 bp, Artificial Sequence
  Oligonucleotide primer for the detection of SNP TSC0045599
tttataccccat

SEQ ID NO: 348454 - DNA, 12 bp, Artificial Sequence
  Oligonucleotide primer for the detection of SNP TSC0045599
tttttatttggg

SEQ ID NO: 348455 - DNA, 12 bp, Artificial Sequence
  Oligonucleotide primer for the detection of SNP TSC0045600
ccaacacaatat

SEQ ID NO: 348456 - DNA, 12 bp, Artificial Sequence
  Oligonucleotide primer for the detection of SNP TSC0045600
ttgtgtatagta

SEQ ID NO: 348457 - DNA, 12 bp, Artificial Sequence
  Oligonucleotide primer for the detection of SNP TSC0045601
aagtattatata

SEQ ID NO: 348458 - DNA, 12 bp, Artificial Sequence
  Oligonucleotide primer for the detection of SNP TSC0045601
aaacactacaca

SEQ ID NO: 348459 - DNA, 12 bp, Artificial Sequence
  Oligonucleotide primer for the detection of SNP TSC0045601
tatagaggttgt

SEQ ID NO: 348460 - DNA, 12 bp, Artificial Sequence
  Oligonucleotide primer for the detection of SNP TSC0045602
acctacaattcc

SEQ ID NO: 348461 - DNA, 12 bp, Artificial Sequence
  Oligonucleotide primer for the detection of SNP TSC0045602
attcacaaccaa

SEQ ID NO: 348462 - DNA, 12 bp, Artificial Sequence
  Oligonucleotide primer for the detection of SNP TSC0045603
atcaccttattt

SEQ ID NO: 348463 - DNA, 12 bp, Artificial Sequence
  Oligonucleotide primer for the detection of SNP TSC0045603
taatttccctct

SEQ ID NO: 348464 - DNA, 12 bp, Artificial Sequence
  Oligonucleotide primer for the detection of SNP TSC0045604
accacttaataa

SEQ ID NO: 348465 - DNA, 12 bp, Artificial Sequence
  Oligonucleotide primer for the detection of SNP TSC0045604
gtggttaaagtt

SEQ ID NO: 348466 - DNA, 12 bp, Artificial Sequence
  Oligonucleotide primer for the detection of SNP TSC0045604
attatttaataa

SEQ ID NO: 348467 - DNA, 12 bp, Artificial Sequence
  Oligonucleotide primer for the detection of SNP TSC0045605
taaaataatctt

SEQ ID NO: 348468 - DNA, 12 bp, Artificial Sequence
  Oligonucleotide primer for the detection of SNP TSC0045605
gtattaatatag

SEQ ID NO: 348469 - DNA, 12 bp, Artificial Sequence
  Oligonucleotide primer for the detection of SNP TSC0005282
aggcgatttatt

SEQ ID NO: 348470 - DNA, 12 bp, Artificial Sequence
  Oligonucleotide primer for the detection of SNP TSC0005282
aaacgatccacc

SEQ ID NO: 348471 - DNA, 12 bp, Artificial Sequence
  Oligonucleotide primer for the detection of SNP TSC0005283
aaaacacctatt

SEQ ID NO: 348472 - DNA, 12 bp, Artificial Sequence
  Oligonucleotide primer for the detection of SNP TSC0005283
taagagttagtt

SEQ ID NO: 348473 - DNA, 12 bp, Artificial Sequence
  Oligonucleotide primer for the detection of SNP TSC0045609
aatttaaaaggg

SEQ ID NO: 348474 - DNA, 12 bp, Artificial Sequence
  Oligonucleotide primer for the detection of SNP TSC0045609
tattgtaaataa

SEQ ID NO: 348475 - DNA, 12 bp, Artificial Sequence
  Oligonucleotide primer for the detection of SNP TSC0004661
ctattaaaatat

SEQ ID NO: 348476 - DNA, 12 bp, Artificial Sequence
  Oligonucleotide primer for the detection of SNP TSC0045610
aattttaaatgt

SEQ ID NO: 348477 - DNA, 12 bp, Artificial Sequence
  Oligonucleotide primer for the detection of SNP TSC0045610
aattttaaatgc

SEQ ID NO: 348478 - DNA, 12 bp, Artificial Sequence
  Oligonucleotide primer for the detection of SNP TSC0045610
aaacttcaaata

SEQ ID NO: 348479 - DNA, 12 bp, Artificial Sequence
  Oligonucleotide primer for the detection of SNP TSC0045610
tgtgtttaaata

SEQ ID NO: 348480 - DNA, 12 bp, Artificial Sequence
  Oligonucleotide primer for the detection of SNP TSC0045612
cctattcattct

SEQ ID NO: 348481 - DNA, 12 bp, Artificial Sequence
  Oligonucleotide primer for the detection of SNP TSC0045612
tgtttagagata

SEQ ID NO: 348482 - DNA, 12 bp, Artificial Sequence
  Oligonucleotide primer for the detection of SNP TSC0045613
tagttggtttat

SEQ ID NO: 348483 - DNA, 12 bp, Artificial Sequence
  Oligonucleotide primer for the detection of SNP TSC0045613
tagttggtttac

SEQ ID NO: 348484 - DNA, 12 bp, Artificial Sequence
  Oligonucleotide primer for the detection of SNP TSC0045613
taattaattcac

SEQ ID NO: 348485 - DNA, 12 bp, Artificial Sequence
  Oligonucleotide primer for the detection of SNP TSC0045613
agtttaattttg

SEQ ID NO: 348486 - DNA, 12 bp, Artificial Sequence
  Oligonucleotide primer for the detection of SNP TSC0045615
tcctttcctttt

SEQ ID NO: 348487 - DNA, 12 bp, Artificial Sequence
  Oligonucleotide primer for the detection of SNP TSC0045615
aattataaaaga

SEQ ID NO: 348488 - DNA, 12 bp, Artificial Sequence
  Oligonucleotide primer for the detection of SNP TSC0045616
taataaattact

SEQ ID NO: 348489 - DNA, 12 bp, Artificial Sequence
  Oligonucleotide primer for the detection of SNP TSC0045616
gtgtttttaaga

SEQ ID NO: 348490 - DNA, 12 bp, Artificial Sequence
  Oligonucleotide primer for the detection of SNP TSC0045616
atattttcaaaa

SEQ ID NO: 348491 - DNA, 12 bp, Artificial Sequence
  Oligonucleotide primer for the detection of SNP TSC0045616
tggtaaattatt

SEQ ID NO: 348492 - DNA, 12 bp, Artificial Sequence
  Oligonucleotide primer for the detection of SNP TSC0045620
tataataaattc

SEQ ID NO: 348493 - DNA, 12 bp, Artificial Sequence
  Oligonucleotide primer for the detection of SNP TSC0045620
aaaattcactta

SEQ ID NO: 348494 - DNA, 12 bp, Artificial Sequence
  Oligonucleotide primer for the detection of SNP TSC0045620
tgtaataaattt

SEQ ID NO: 348495 - DNA, 12 bp, Artificial Sequence
  Oligonucleotide primer for the detection of SNP TSC0045621
aggttaggtatt

SEQ ID NO: 348496 - DNA, 12 bp, Artificial Sequence
  Oligonucleotide primer for the detection of SNP TSC0045621
aggttaggtatc

SEQ ID NO: 348497 - DNA, 12 bp, Artificial Sequence
  Oligonucleotide primer for the detection of SNP TSC0045621
ataaaccaaaca

SEQ ID NO: 348498 - DNA, 12 bp, Artificial Sequence
  Oligonucleotide primer for the detection of SNP TSC0045621
agatgtgagtta

SEQ ID NO: 348499 - DNA, 12 bp, Artificial Sequence
  Oligonucleotide primer for the detection of SNP TSC0045621
agacgtgagtta

SEQ ID NO: 348500 - DNA, 12 bp, Artificial Sequence
  Oligonucleotide primer for the detection of SNP TSC0045622
tctcttcaatac

SEQ ID NO: 348501 - DNA, 12 bp, Artificial Sequence
  Oligonukleotid-Primer
tgtttgatgttg

SEQ ID NO: 348502 - DNA, 12 bp, Artificial Sequence
  Oligonucleotide primer for the detection of SNP TSC0045623
gtattgtggttt

SEQ ID NO: 348503 - DNA, 12 bp, Artificial Sequence
  Oligonucleotide primer for the detection of SNP TSC0045623
gtatcgtggttt

SEQ ID NO: 348504 - DNA, 12 bp, Artificial Sequence
  Oligonucleotide primer for the detection of SNP TSC0045623
acaccataactc

SEQ ID NO: 348505 - DNA, 12 bp, Artificial Sequence
  Oligonucleotide primer for the detection of SNP TSC0045623
acaccgtaactc

SEQ ID NO: 348506 - DNA, 12 bp, Artificial Sequence
  Oligonucleotide primer for the detection of SNP TSC0045624
ttatgttattaa

SEQ ID NO: 348507 - DNA, 12 bp, Artificial Sequence
  Oligonucleotide primer for the detection of SNP TSC0045627
tacaatacatca

SEQ ID NO: 348508 - DNA, 12 bp, Artificial Sequence
  Oligonucleotide primer for the detection of SNP TSC0045627
attttatttggt

SEQ ID NO: 348509 - DNA, 12 bp, Artificial Sequence
  Oligonucleotide primer for the detection of SNP TSC0045627
tataatatatta

SEQ ID NO: 348510 - DNA, 12 bp, Artificial Sequence
  Oligonucleotide primer for the detection of SNP TSC0045628
aaaaacccaaaa

SEQ ID NO: 348511 - DNA, 12 bp, Artificial Sequence
  Oligonucleotide primer for the detection of SNP TSC0045628
aggttttttgta

SEQ ID NO: 348512 - DNA, 12 bp, Artificial Sequence
  Oligonucleotide primer for the detection of SNP TSC0045629
tacaaaccatac

SEQ ID NO: 348513 - DNA, 12 bp, Artificial Sequence
  Oligonucleotide primer for the detection of SNP TSC0045629
tacaaaccgtac

SEQ ID NO: 348514 - DNA, 12 bp, Artificial Sequence
  Oligonucleotide primer for the detection of SNP TSC0045629
tacgaaccatac

SEQ ID NO: 348515 - DNA, 12 bp, Artificial Sequence
  Oligonucleotide primer for the detection of SNP TSC0045629
tacgaaccgtac

SEQ ID NO: 348516 - DNA, 12 bp, Artificial Sequence
  Oligonucleotide primer for the detection of SNP TSC0045629
aatgtaaattta

SEQ ID NO: 348517 - DNA, 12 bp, Artificial Sequence
  Oligonucleotide primer for the detection of SNP TSC0045630
gttaggagtttg

SEQ ID NO: 348518 - DNA, 12 bp, Artificial Sequence
  Oligonucleotide primer for the detection of SNP TSC0045630
gttaggagttcg

SEQ ID NO: 348519 - DNA, 12 bp, Artificial Sequence
  Oligonucleotide primer for the detection of SNP TSC0045631
gttatgagataa

SEQ ID NO: 348520 - DNA, 12 bp, Artificial Sequence
  Oligonucleotide primer for the detection of SNP TSC0045631
gatttgtaattt

SEQ ID NO: 348521 - DNA, 12 bp, Artificial Sequence
  Oligonucleotide primer for the detection of SNP TSC0045632
attaattgttaa

SEQ ID NO: 348522 - DNA, 12 bp, Artificial Sequence
  Oligonucleotide primer for the detection of SNP TSC0045632
ggtttataaaaa

SEQ ID NO: 348523 - DNA, 12 bp, Artificial Sequence
  Oligonucleotide primer for the detection of SNP TSC0045633
taatttcaaaaa

SEQ ID NO: 348524 - DNA, 12 bp, Artificial Sequence
  Oligonucleotide primer for the detection of SNP TSC0045633
acttaaaactta

SEQ ID NO: 348525 - DNA, 12 bp, Artificial Sequence
  Oligonucleotide primer for the detection of SNP TSC0045633
gattttagagat

SEQ ID NO: 348526 - DNA, 12 bp, Artificial Sequence
  Oligonucleotide primer for the detection of SNP TSC0045633
gattttagagac

SEQ ID NO: 348527 - DNA, 12 bp, Artificial Sequence
  Oligonucleotide primer for the detection of SNP TSC0045634
actttttctcct

SEQ ID NO: 348528 - DNA, 12 bp, Artificial Sequence
  Oligonucleotide primer for the detection of SNP TSC0045634
aagaaaattata

SEQ ID NO: 348529 - DNA, 12 bp, Artificial Sequence
  Oligonucleotide primer for the detection of SNP TSC0045635
acaacttactac

SEQ ID NO: 348530 - DNA, 12 bp, Artificial Sequence
  Oligonucleotide primer for the detection of SNP TSC0045635
gtggaagtagaa

SEQ ID NO: 348531 - DNA, 12 bp, Artificial Sequence
  Oligonucleotide primer for the detection of SNP TSC0045636
aattctataatt

SEQ ID NO: 348532 - DNA, 12 bp, Artificial Sequence
  Oligonucleotide primer for the detection of SNP TSC0045636
tttgagtagtta

SEQ ID NO: 348533 - DNA, 12 bp, Artificial Sequence
  Oligonucleotide primer for the detection of SNP TSC0045637
atcttataattt

SEQ ID NO: 348534 - DNA, 12 bp, Artificial Sequence
  Oligonucleotide primer for the detection of SNP TSC0045637
agattatgggtg

SEQ ID NO: 348535 - DNA, 12 bp, Artificial Sequence
  Oligonucleotide primer for the detection of SNP TSC0045638
accttatcactt

SEQ ID NO: 348536 - DNA, 12 bp, Artificial Sequence
  Oligonucleotide primer for the detection of SNP TSC0045638
gtatgaagtata

SEQ ID NO: 348537 - DNA, 12 bp, Artificial Sequence
  Oligonucleotide primer for the detection of SNP TSC0045639
tagtagttgggt

SEQ ID NO: 348538 - DNA, 12 bp, Artificial Sequence
  Oligonucleotide primer for the detection of SNP TSC0045639
taacaactaaac

SEQ ID NO: 348539 - DNA, 12 bp, Artificial Sequence
  Oligonucleotide primer for the detection of SNP TSC0045639
aggtttgagtta

SEQ ID NO: 348540 - DNA, 12 bp, Artificial Sequence
  Oligonucleotide primer for the detection of SNP TSC0045641
caaaaatccaaa

SEQ ID NO: 348541 - DNA, 12 bp, Artificial Sequence
  Oligonucleotide primer for the detection of SNP TSC0045641
gaatggagtaga

SEQ ID NO: 348542 - DNA, 12 bp, Artificial Sequence
  Oligonucleotide primer for the detection of SNP TSC0045643
attcaaaaaacc

SEQ ID NO: 348543 - DNA, 12 bp, Artificial Sequence
  Oligonucleotide primer for the detection of SNP TSC0045643
tgtggggggggg

SEQ ID NO: 348544 - DNA, 12 bp, Artificial Sequence
  Oligonucleotide primer for the detection of SNP TSC0006990
tttctaaaaatt

SEQ ID NO: 348545 - DNA, 12 bp, Artificial Sequence
  Oligonucleotide primer for the detection of SNP TSC0006990
ttgtggaaattg

SEQ ID NO: 348546 - DNA, 12 bp, Artificial Sequence
  Oligonucleotide primer for the detection of SNP TSC0006991
ctataaacattt

SEQ ID NO: 348547 - DNA, 12 bp, Artificial Sequence
  Oligonucleotide primer for the detection of SNP TSC0006991
ttttggaaatta

SEQ ID NO: 348548 - DNA, 12 bp, Artificial Sequence
  Oligonucleotide primer for the detection of SNP TSC0006992
taaactacctat

SEQ ID NO: 348549 - DNA, 12 bp, Artificial Sequence
  Oligonucleotide primer for the detection of SNP TSC0006992
ttacttataaat

SEQ ID NO: 348550 - DNA, 12 bp, Artificial Sequence
  Oligonucleotide primer for the detection of SNP TSC0006992
tggattgtttat

SEQ ID NO: 348551 - DNA, 12 bp, Artificial Sequence
  Oligonucleotide primer for the detection of SNP TSC0045644
atcctataacac

SEQ ID NO: 348552 - DNA, 12 bp, Artificial Sequence
  Oligonucleotide primer for the detection of SNP TSC0045644
gtaaaagaagaa

SEQ ID NO: 348553 - DNA, 12 bp, Artificial Sequence
  Oligonucleotide primer for the detection of SNP TSC0045645
caataatttctt

SEQ ID NO: 348554 - DNA, 12 bp, Artificial Sequence
  Oligonucleotide primer for the detection of SNP TSC0045645
agtaatagaaag

SEQ ID NO: 348555 - DNA, 12 bp, Artificial Sequence
  Oligonucleotide primer for the detection of SNP TSC0010668
tcttcaaaaaat

SEQ ID NO: 348556 - DNA, 12 bp, Artificial Sequence
  Oligonucleotide primer for the detection of SNP TSC0010668
gtaaaattataa

SEQ ID NO: 348557 - DNA, 12 bp, Artificial Sequence
  Oligonucleotide primer for the detection of SNP TSC0010668
acaaaactataa

SEQ ID NO: 348558 - DNA, 12 bp, Artificial Sequence
  Oligonucleotide primer for the detection of SNP TSC0045646
atataaaaatat

SEQ ID NO: 348559 - DNA, 12 bp, Artificial Sequence
  Oligonucleotide primer for the detection of SNP TSC0045646
gaataaaattta

SEQ ID NO: 348560 - DNA, 12 bp, Artificial Sequence
  Oligonucleotide primer for the detection of SNP TSC0045647
atctattccaaa

SEQ ID NO: 348561 - DNA, 12 bp, Artificial Sequence
  Oligonucleotide primer for the detection of SNP TSC0045647
ttgtttgttaat

SEQ ID NO: 348562 - DNA, 12 bp, Artificial Sequence
  Oligonucleotide primer for the detection of SNP TSC0045647
ttatttaccaac

SEQ ID NO: 348563 - DNA, 12 bp, Artificial Sequence
  Oligonucleotide primer for the detection of SNP TSC0045647
atttattttagg

SEQ ID NO: 348564 - DNA, 12 bp, Artificial Sequence
  Oligonucleotide primer for the detection of SNP TSC0010289
aattttaaatag

SEQ ID NO: 348565 - DNA, 12 bp, Artificial Sequence
  Oligonucleotide primer for the detection of SNP TSC0045648
aacaaaactaat

SEQ ID NO: 348566 - DNA, 12 bp, Artificial Sequence
  Oligonucleotide primer for the detection of SNP TSC0045648
atgatataatta

SEQ ID NO: 348567 - DNA, 12 bp, Artificial Sequence
  Oligonucleotide primer for the detection of SNP TSC0045650
aaaaaccctaat

SEQ ID NO: 348568 - DNA, 12 bp, Artificial Sequence
  Oligonucleotide primer for the detection of SNP TSC0045650
ttgattataggg

SEQ ID NO: 348569 - DNA, 12 bp, Artificial Sequence
  Oligonucleotide primer for the detection of SNP TSC0045651
tactaaaaatcc

SEQ ID NO: 348570 - DNA, 12 bp, Artificial Sequence
  Oligonucleotide primer for the detection of SNP TSC0045651
ggttaaaattgt

SEQ ID NO: 348571 - DNA, 12 bp, Artificial Sequence
  Oligonucleotide primer for the detection of SNP TSC0045651
aactaaaactat

SEQ ID NO: 348572 - DNA, 12 bp, Artificial Sequence
  Oligonucleotide primer for the detection of SNP TSC0045651
tgttggggattt

SEQ ID NO: 348573 - DNA, 12 bp, Artificial Sequence
  Oligonucleotide primer for the detection of SNP TSC0045652
cttatttaaata

SEQ ID NO: 348574 - DNA, 12 bp, Artificial Sequence
  Oligonucleotide primer for the detection of SNP TSC0045652
tttgtttagata

SEQ ID NO: 348575 - DNA, 12 bp, Artificial Sequence
  Oligonucleotide primer for the detection of SNP TSC0045653
tatttttttagg

SEQ ID NO: 348576 - DNA, 12 bp, Artificial Sequence
  Oligonucleotide primer for the detection of SNP TSC0045655
tatacctaaaca

SEQ ID NO: 348577 - DNA, 12 bp, Artificial Sequence
  Oligonucleotide primer for the detection of SNP TSC0045655
tgagggtgattt

SEQ ID NO: 348578 - DNA, 12 bp, Artificial Sequence
  Oligonucleotide primer for the detection of SNP TSC0045655
taaaaataactt

SEQ ID NO: 348579 - DNA, 12 bp, Artificial Sequence
  Oligonucleotide primer for the detection of SNP TSC0045655
tatgtttgaata

SEQ ID NO: 348580 - DNA, 12 bp, Artificial Sequence
  Oligonucleotide primer for the detection of SNP TSC0045656
atctaaatctac

SEQ ID NO: 348581 - DNA, 12 bp, Artificial Sequence
  Oligonucleotide primer for the detection of SNP TSC0045656
tttgtgggttta

SEQ ID NO: 348582 - DNA, 12 bp, Artificial Sequence
  Oligonucleotide primer for the detection of SNP TSC0045658
aactacaacaaa

SEQ ID NO: 348583 - DNA, 12 bp, Artificial Sequence
  Oligonucleotide primer for the detection of SNP TSC0045658
attgtaatagat

SEQ ID NO: 348584 - DNA, 12 bp, Artificial Sequence
  Oligonucleotide primer for the detection of SNP TSC0045659
catcaacatcac

SEQ ID NO: 348585 - DNA, 12 bp, Artificial Sequence
  Oligonucleotide primer for the detection of SNP TSC0045659
catcaacgtcac

SEQ ID NO: 348586 - DNA, 12 bp, Artificial Sequence
  Oligonucleotide primer for the detection of SNP TSC0045659
atataatttgtg

SEQ ID NO: 348587 - DNA, 12 bp, Artificial Sequence
  Oligonucleotide primer for the detection of SNP TSC0045659
acacaacttata

SEQ ID NO: 348588 - DNA, 12 bp, Artificial Sequence
  Oligonucleotide primer for the detection of SNP TSC0045659
tattaatgttat

SEQ ID NO: 348589 - DNA, 12 bp, Artificial Sequence
  Oligonucleotide primer for the detection of SNP TSC0045659
tattaacgttat

SEQ ID NO: 348590 - DNA, 12 bp, Artificial Sequence
  Oligonucleotide primer for the detection of SNP TSC0045660
aaacatctcaaa

SEQ ID NO: 348591 - DNA, 12 bp, Artificial Sequence
  Oligonucleotide primer for the detection of SNP TSC0045661
aattttcaatcc

SEQ ID NO: 348592 - DNA, 12 bp, Artificial Sequence
  Oligonucleotide primer for the detection of SNP TSC0045661
tagtgagtttag

SEQ ID NO: 348593 - DNA, 12 bp, Artificial Sequence
  Oligonucleotide primer for the detection of SNP TSC0045661
caataaacttaa

SEQ ID NO: 348594 - DNA, 12 bp, Artificial Sequence
  Oligonucleotide primer for the detection of SNP TSC0045661
aatttttagttt

SEQ ID NO: 348595 - DNA, 12 bp, Artificial Sequence
  Oligonucleotide primer for the detection of SNP TSC0045662
aatggagaaatt

SEQ ID NO: 348596 - DNA, 12 bp, Artificial Sequence
  Oligonucleotide primer for the detection of SNP TSC0045662
gattttggggga

SEQ ID NO: 348597 - DNA, 12 bp, Artificial Sequence
  Oligonucleotide primer for the detection of SNP TSC0045663
ctaacttaacca

SEQ ID NO: 348598 - DNA, 12 bp, Artificial Sequence
  Oligonucleotide primer for the detection of SNP TSC0045663
ttttagtggagt

SEQ ID NO: 348599 - DNA, 12 bp, Artificial Sequence
  Oligonucleotide primer for the detection of SNP TSC0045663
acttcaataaaa

SEQ ID NO: 348600 - DNA, 12 bp, Artificial Sequence
  Oligonucleotide primer for the detection of SNP TSC0045663
tagtttgattat

SEQ ID NO: 348601 - DNA, 12 bp, Artificial Sequence
  Oligonucleotide primer for the detection of SNP TSC0045664
acctctctaaat

SEQ ID NO: 348602 - DNA, 12 bp, Artificial Sequence
  Oligonucleotide primer for the detection of SNP TSC0045664
ggtgttggtata

SEQ ID NO: 348603 - DNA, 12 bp, Artificial Sequence
  Oligonucleotide primer for the detection of SNP TSC0045666
ataactaattat

SEQ ID NO: 348604 - DNA, 12 bp, Artificial Sequence
  Oligonucleotide primer for the detection of SNP TSC0045666
aagtgttatgta

SEQ ID NO: 348605 - DNA, 12 bp, Artificial Sequence
  Oligonucleotide primer for the detection of SNP TSC0045668
aattcctaaatt

SEQ ID NO: 348606 - DNA, 12 bp, Artificial Sequence
  Oligonucleotide primer for the detection of SNP TSC0045668
gtttgaggattg

SEQ ID NO: 348607 - DNA, 12 bp, Artificial Sequence
  Oligonucleotide primer for the detection of SNP TSC0045668
gtttgaggatcg

SEQ ID NO: 348608 - DNA, 12 bp, Artificial Sequence
  Oligonucleotide primer for the detection of SNP TSC0006026
aataattgtttt

SEQ ID NO: 348609 - DNA, 12 bp, Artificial Sequence
  Oligonucleotide primer for the detection of SNP TSC0006026
aaataattactc

SEQ ID NO: 348610 - DNA, 12 bp, Artificial Sequence
  Oligonucleotide primer for the detection of SNP TSC0006026
ttttggttagat

SEQ ID NO: 348611 - DNA, 12 bp, Artificial Sequence
  Oligonucleotide primer for the detection of SNP TSC0006026
ttttggttagac

SEQ ID NO: 348612 - DNA, 12 bp, Artificial Sequence
  Oligonucleotide primer for the detection of SNP TSC0045670
tgatttataaag

SEQ ID NO: 348613 - DNA, 12 bp, Artificial Sequence
  Oligonucleotide primer for the detection of SNP TSC0045670
gagttaattaaa

SEQ ID NO: 348614 - DNA, 12 bp, Artificial Sequence
  Oligonucleotide primer for the detection of SNP TSC0045671
ttttgagattta

SEQ ID NO: 348615 - DNA, 12 bp, Artificial Sequence
  Oligonucleotide primer for the detection of SNP TSC0045672
aaaatatggaat

SEQ ID NO: 348616 - DNA, 12 bp, Artificial Sequence
  Oligonucleotide primer for the detection of SNP TSC0045672
tatcgtatttgg

SEQ ID NO: 348617 - DNA, 12 bp, Artificial Sequence
  Oligonucleotide primer for the detection of SNP TSC0045676
aaaacccttaac

SEQ ID NO: 348618 - DNA, 12 bp, Artificial Sequence
  Oligonucleotide primer for the detection of SNP TSC0045676
tttgttgatgta

SEQ ID NO: 348619 - DNA, 12 bp, Artificial Sequence
  Oligonucleotide primer for the detection of SNP TSC0045676
tttgtcgatgta

SEQ ID NO: 348620 - DNA, 12 bp, Artificial Sequence
  Oligonucleotide primer for the detection of SNP TSC0045676
cttatcaatata

SEQ ID NO: 348621 - DNA, 12 bp, Artificial Sequence
  Oligonucleotide primer for the detection of SNP TSC0045676
cttatcgatata

SEQ ID NO: 348622 - DNA, 12 bp, Artificial Sequence
  Oligonucleotide primer for the detection of SNP TSC0045676
gggatttttgat

SEQ ID NO: 348623 - DNA, 12 bp, Artificial Sequence
  Oligonucleotide primer for the detection of SNP TSC0045677
aaaaacaaacaa

SEQ ID NO: 348624 - DNA, 12 bp, Artificial Sequence
  Oligonucleotide primer for the detection of SNP TSC0045677
tagtgattatat

SEQ ID NO: 348625 - DNA, 12 bp, Artificial Sequence
  Oligonucleotide primer for the detection of SNP TSC0045677
caataaccatat

SEQ ID NO: 348626 - DNA, 12 bp, Artificial Sequence
  Oligonucleotide primer for the detection of SNP TSC0045677
agaaataggtaa

SEQ ID NO: 348627 - DNA, 12 bp, Artificial Sequence
  Oligonucleotide primer for the detection of SNP TSC0045678
tatttcctacac

SEQ ID NO: 348628 - DNA, 12 bp, Artificial Sequence
  Oligonucleotide primer for the detection of SNP TSC0045679
tttaatcacaac

SEQ ID NO: 348629 - DNA, 12 bp, Artificial Sequence
  Oligonucleotide primer for the detection of SNP TSC0045679
gattggttaaat

SEQ ID NO: 348630 - DNA, 12 bp, Artificial Sequence
  Oligonucleotide primer for the detection of SNP TSC0045679
tttagttataat

SEQ ID NO: 348631 - DNA, 12 bp, Artificial Sequence
  Oligonucleotide primer for the detection of SNP TSC0045683
cttaaatacaat

SEQ ID NO: 348632 - DNA, 12 bp, Artificial Sequence
  Oligonucleotide primer for the detection of SNP TSC0045683
gatagataggga

SEQ ID NO: 348633 - DNA, 12 bp, Artificial Sequence
  Oligonucleotide primer for the detection of SNP TSC0045683
tttagatgtagt

SEQ ID NO: 348634 - DNA, 12 bp, Artificial Sequence
  Oligonucleotide primer for the detection of SNP TSC0045686
aattcacttttt

SEQ ID NO: 348635 - DNA, 12 bp, Artificial Sequence
  Oligonucleotide primer for the detection of SNP TSC0001012
caaacacattca

SEQ ID NO: 348636 - DNA, 12 bp, Artificial Sequence
  Oligonucleotide primer for the detection of SNP TSC0001012
aaaggatgaaag

SEQ ID NO: 348637 - DNA, 12 bp, Artificial Sequence
  Oligonucleotide primer for the detection of SNP TSC0001012
ttaaatatattt

SEQ ID NO: 348638 - DNA, 12 bp, Artificial Sequence
  Oligonucleotide primer for the detection of SNP TSC0045687
tatactcaaaca

SEQ ID NO: 348639 - DNA, 12 bp, Artificial Sequence
  Oligonucleotide primer for the detection of SNP TSC0045687
aatttggagttt

SEQ ID NO: 348640 - DNA, 12 bp, Artificial Sequence
  Oligonucleotide primer for the detection of SNP TSC0045687
gtgtttaaatat

SEQ ID NO: 348641 - DNA, 12 bp, Artificial Sequence
  Oligonucleotide primer for the detection of SNP TSC0045688
caataaactaaa

SEQ ID NO: 348642 - DNA, 12 bp, Artificial Sequence
  Oligonucleotide primer for the detection of SNP TSC0045688
gttggttgattt

SEQ ID NO: 348643 - DNA, 12 bp, Artificial Sequence
  Oligonucleotide primer for the detection of SNP TSC0045688
tagtaataaatt

SEQ ID NO: 348644 - DNA, 12 bp, Artificial Sequence
  Oligonucleotide primer for the detection of SNP TSC0045689
caatatattaac

SEQ ID NO: 348645 - DNA, 12 bp, Artificial Sequence
  Oligonucleotide primer for the detection of SNP TSC0045689
caacaacatatt

SEQ ID NO: 348646 - DNA, 12 bp, Artificial Sequence
  Oligonucleotide primer for the detection of SNP TSC0045689
caacgacatatt

SEQ ID NO: 348647 - DNA, 12 bp, Artificial Sequence
  Oligonucleotide primer for the detection of SNP TSC0045689
taatatattggt

SEQ ID NO: 348648 - DNA, 12 bp, Artificial Sequence
  Oligonucleotide primer for the detection of SNP TSC0045690
attcatttacac

SEQ ID NO: 348649 - DNA, 12 bp, Artificial Sequence
  Oligonucleotide primer for the detection of SNP TSC0045691
ttaaatccaaaa

SEQ ID NO: 348650 - DNA, 12 bp, Artificial Sequence
  Oligonucleotide primer for the detection of SNP TSC0045691
tttgagtttagg

SEQ ID NO: 348651 - DNA, 12 bp, Artificial Sequence
  Oligonucleotide primer for the detection of SNP TSC0001215
taaaaatctctt

SEQ ID NO: 348652 - DNA, 12 bp, Artificial Sequence
  Oligonucleotide primer for the detection of SNP TSC0001215
ttttgtaatata

SEQ ID NO: 348653 - DNA, 12 bp, Artificial Sequence
  Oligonucleotide primer for the detection of SNP TSC0001215
ctttataacata

SEQ ID NO: 348654 - DNA, 12 bp, Artificial Sequence
  Oligonucleotide primer for the detection of SNP TSC0001216
taatgaaaaatt

SEQ ID NO: 348655 - DNA, 12 bp, Artificial Sequence
  Oligonucleotide primer for the detection of SNP TSC0001216
caataaaaaatc

SEQ ID NO: 348656 - DNA, 12 bp, Artificial Sequence
  Oligonucleotide primer for the detection of SNP TSC0001216
ttttagaggttg

SEQ ID NO: 348657 - DNA, 12 bp, Artificial Sequence
  Oligonucleotide primer for the detection of SNP TSC0001217
ccaacaacctct

SEQ ID NO: 348658 - DNA, 12 bp, Artificial Sequence
  Oligonukleotid-Primer
ccgacaacctct

SEQ ID NO: 348659 - DNA, 12 bp, Artificial Sequence
  Oligonucleotide primer for the detection of SNP TSC0045692
taaaaccttatc

SEQ ID NO: 348660 - DNA, 12 bp, Artificial Sequence
  Oligonucleotide primer for the detection of SNP TSC0045693
aaattactcaat

SEQ ID NO: 348661 - DNA, 12 bp, Artificial Sequence
  Oligonucleotide primer for the detection of SNP TSC0045694
aactaacctaaa

SEQ ID NO: 348662 - DNA, 12 bp, Artificial Sequence
  Oligonucleotide primer for the detection of SNP TSC0006996
atagtgagtata

SEQ ID NO: 348663 - DNA, 12 bp, Artificial Sequence
  Oligonucleotide primer for the detection of SNP TSC0006996
atagcgagtata

SEQ ID NO: 348664 - DNA, 12 bp, Artificial Sequence
  Oligonucleotide primer for the detection of SNP TSC0006997
ctcaaacaactt

SEQ ID NO: 348665 - DNA, 12 bp, Artificial Sequence
  Oligonucleotide primer for the detection of SNP TSC0006997
ttttattaggga

SEQ ID NO: 348666 - DNA, 12 bp, Artificial Sequence
  Oligonucleotide primer for the detection of SNP TSC0045696
aaaaatttactc

SEQ ID NO: 348667 - DNA, 12 bp, Artificial Sequence
  Oligonucleotide primer for the detection of SNP TSC0045696
cttcaccttcta

SEQ ID NO: 348668 - DNA, 12 bp, Artificial Sequence
  Oligonucleotide primer for the detection of SNP TSC0045696
gagaatttattt

SEQ ID NO: 348669 - DNA, 12 bp, Artificial Sequence
  Oligonucleotide primer for the detection of SNP TSC0045698
tgggaggtgaag

SEQ ID NO: 348670 - DNA, 12 bp, Artificial Sequence
  Oligonucleotide primer for the detection of SNP TSC0045698
tgggaggcgaag

SEQ ID NO: 348671 - DNA, 12 bp, Artificial Sequence
  Oligonucleotide primer for the detection of SNP TSC0045699
aaaataatatac

SEQ ID NO: 348672 - DNA, 12 bp, Artificial Sequence
  Oligonucleotide primer for the detection of SNP TSC0045699
gaaagttattta

SEQ ID NO: 348673 - DNA, 12 bp, Artificial Sequence
  Oligonucleotide primer for the detection of SNP TSC0045699
aaaaatcaccta

SEQ ID NO: 348674 - DNA, 12 bp, Artificial Sequence
  Oligonucleotide primer for the detection of SNP TSC0045700
cccaaaaaatac

SEQ ID NO: 348675 - DNA, 12 bp, Artificial Sequence
  Oligonucleotide primer for the detection of SNP TSC0045700
ttttaggaaggg

SEQ ID NO: 348676 - DNA, 12 bp, Artificial Sequence
  Oligonucleotide primer for the detection of SNP TSC0000619
aataaaccaatc

SEQ ID NO: 348677 - DNA, 12 bp, Artificial Sequence
  Oligonucleotide primer for the detection of SNP TSC0000619
tttgttagaaga

SEQ ID NO: 348678 - DNA, 12 bp, Artificial Sequence
  Oligonucleotide primer for the detection of SNP TSC0000619
ggtgggttagtt

SEQ ID NO: 348679 - DNA, 12 bp, Artificial Sequence
  Oligonucleotide primer for the detection of SNP TSC0045701
atttctccaaaa

SEQ ID NO: 348680 - DNA, 12 bp, Artificial Sequence
  Oligonucleotide primer for the detection of SNP TSC0045701
tattatttgtgt

SEQ ID NO: 348681 - DNA, 12 bp, Artificial Sequence
  Oligonucleotide primer for the detection of SNP TSC0045701
actacctatata

SEQ ID NO: 348682 - DNA, 12 bp, Artificial Sequence
  Oligonucleotide primer for the detection of SNP TSC0000232
cctcaaatactt

SEQ ID NO: 348683 - DNA, 12 bp, Artificial Sequence
  Oligonucleotide primer for the detection of SNP TSC0045703
ctcaaatacttt

SEQ ID NO: 348684 - DNA, 12 bp, Artificial Sequence
  Oligonucleotide primer for the detection of SNP TSC0045704
taaagagtttgt

SEQ ID NO: 348685 - DNA, 12 bp, Artificial Sequence
  Oligonucleotide primer for the detection of SNP TSC0045704
caaaaaatttac

SEQ ID NO: 348686 - DNA, 12 bp, Artificial Sequence
  Oligonucleotide primer for the detection of SNP TSC0045704
taaggagtaaat

SEQ ID NO: 348687 - DNA, 12 bp, Artificial Sequence
  Oligonucleotide primer for the detection of SNP TSC0045704
taaggagtaaac

SEQ ID NO: 348688 - DNA, 12 bp, Artificial Sequence
  Oligonucleotide primer for the detection of SNP TSC0045705
tattatttgtta

SEQ ID NO: 348689 - DNA, 12 bp, Artificial Sequence
  Oligonucleotide primer for the detection of SNP TSC0006695
ataaaaaaccta

SEQ ID NO: 348690 - DNA, 12 bp, Artificial Sequence
  Oligonucleotide primer for the detection of SNP TSC0006695
ttttaagattaa

SEQ ID NO: 348691 - DNA, 12 bp, Artificial Sequence
  Oligonucleotide primer for the detection of SNP TSC0006696
tacatttaaaat

SEQ ID NO: 348692 - DNA, 12 bp, Artificial Sequence
  Oligonucleotide primer for the detection of SNP TSC0006696
tttagaagaaat

SEQ ID NO: 348693 - DNA, 12 bp, Artificial Sequence
  Oligonucleotide primer for the detection of SNP TSC0006696
tatatttgaaat

SEQ ID NO: 348694 - DNA, 12 bp, Artificial Sequence
  Oligonucleotide primer for the detection of SNP TSC0000920
ctttatacacat

SEQ ID NO: 348695 - DNA, 12 bp, Artificial Sequence
  Oligonucleotide primer for the detection of SNP TSC0000920
tgggggtgtaga

SEQ ID NO: 348696 - DNA, 12 bp, Artificial Sequence
  Oligonucleotide primer for the detection of SNP TSC0000920
ttttgtgtatat

SEQ ID NO: 348697 - DNA, 12 bp, Artificial Sequence
  Oligonucleotide primer for the detection of SNP TSC0045708
attgaagtatta

SEQ ID NO: 348698 - DNA, 12 bp, Artificial Sequence
  Oligonucleotide primer for the detection of SNP TSC0045708
actaaaacacta

SEQ ID NO: 348699 - DNA, 12 bp, Artificial Sequence
  Oligonucleotide primer for the detection of SNP TSC0045708
atttggatgggg

SEQ ID NO: 348700 - DNA, 12 bp, Artificial Sequence
  Oligonucleotide primer for the detection of SNP TSC0045709
atttcaaaaaac

SEQ ID NO: 348701 - DNA, 12 bp, Artificial Sequence
  Oligonucleotide primer for the detection of SNP TSC0045710
aaataaatttat

SEQ ID NO: 348702 - DNA, 12 bp, Artificial Sequence
  Oligonucleotide primer for the detection of SNP TSC0045710
atgatagatgga

SEQ ID NO: 348703 - DNA, 12 bp, Artificial Sequence
  Oligonucleotide primer for the detection of SNP TSC0045710
ggatgaatttat

SEQ ID NO: 348704 - DNA, 12 bp, Artificial Sequence
  Oligonucleotide primer for the detection of SNP TSC0000193
aactataactat

SEQ ID NO: 348705 - DNA, 12 bp, Artificial Sequence
  Oligonucleotide primer for the detection of SNP TSC0000193
ggtataggtggg

SEQ ID NO: 348706 - DNA, 12 bp, Artificial Sequence
  Oligonucleotide primer for the detection of SNP TSC0045714
aaatattaatac

SEQ ID NO: 348707 - DNA, 12 bp, Artificial Sequence
  Oligonucleotide primer for the detection of SNP TSC0045714
tttaggggtgag

SEQ ID NO: 348708 - DNA, 12 bp, Artificial Sequence
  Oligonucleotide primer for the detection of SNP TSC0045714
atattaatgttt

SEQ ID NO: 348709 - DNA, 12 bp, Artificial Sequence
  Oligonucleotide primer for the detection of SNP TSC0045715
actataacaaat

SEQ ID NO: 348710 - DNA, 12 bp, Artificial Sequence
  Oligonukleotid-Primer
atagatgtgagt

SEQ ID NO: 348711 - DNA, 12 bp, Artificial Sequence
  Oligonucleotide primer for the detection of SNP TSC0045715
ttgtaataaatc

SEQ ID NO: 348712 - DNA, 12 bp, Artificial Sequence
  Oligonucleotide primer for the detection of SNP TSC0045716
ctcaaatatatc

SEQ ID NO: 348713 - DNA, 12 bp, Artificial Sequence
  Oligonucleotide primer for the detection of SNP TSC0045716
tgttgttgataa

SEQ ID NO: 348714 - DNA, 12 bp, Artificial Sequence
  Oligonukleotid-Primer
tttacctactac

SEQ ID NO: 348715 - DNA, 12 bp, Artificial Sequence
  Oligonucleotide primer for the detection of SNP TSC0045717
attttatatgga

SEQ ID NO: 348716 - DNA, 12 bp, Artificial Sequence
  Oligonucleotide primer for the detection of SNP TSC0045718
aaatataacaca

SEQ ID NO: 348717 - DNA, 12 bp, Artificial Sequence
  Oligonucleotide primer for the detection of SNP TSC0045718
tggatgtgatat

SEQ ID NO: 348718 - DNA, 12 bp, Artificial Sequence
  Oligonukleotid-Primer
cacatcaaccaa

SEQ ID NO: 348719 - DNA, 12 bp, Artificial Sequence
  Oligonucleotide primer for the detection of SNP TSC0001626
cacatcgaccaa

SEQ ID NO: 348720 - DNA, 12 bp, Artificial Sequence
  Oligonucleotide primer for the detection of SNP TSC0001626
tctctctaattt

SEQ ID NO: 348721 - DNA, 12 bp, Artificial Sequence
  Oligonucleotide primer for the detection of SNP TSC0001626
tatattgattaa

SEQ ID NO: 348722 - DNA, 12 bp, Artificial Sequence
  Oligonucleotide primer for the detection of SNP TSC0001626
tatatcgattaa

SEQ ID NO: 348723 - DNA, 12 bp, Artificial Sequence
  Oligonucleotide primer for the detection of SNP TSC0001628
ataatcaacaaa

SEQ ID NO: 348724 - DNA, 12 bp, Artificial Sequence
  Oligonucleotide primer for the detection of SNP TSC0001628
ataatcgacaaa

SEQ ID NO: 348725 - DNA, 12 bp, Artificial Sequence
  Oligonucleotide primer for the detection of SNP TSC0001628
agggattgtatt

SEQ ID NO: 348726 - DNA, 12 bp, Artificial Sequence
  Oligonucleotide primer for the detection of SNP TSC0001628
gattgataggtt

SEQ ID NO: 348727 - DNA, 12 bp, Artificial Sequence
  Oligonucleotide primer for the detection of SNP TSC0001628
gatcgataggtt

SEQ ID NO: 348728 - DNA, 12 bp, Artificial Sequence
  Oligonucleotide primer for the detection of SNP TSC0045719
aaacctacactt

SEQ ID NO: 348729 - DNA, 12 bp, Artificial Sequence
  Oligonucleotide primer for the detection of SNP TSC0045719
aatttaggggta

SEQ ID NO: 348730 - DNA, 12 bp, Artificial Sequence
  Oligonucleotide primer for the detection of SNP TSC0045719
aattcaaaaata

SEQ ID NO: 348731 - DNA, 12 bp, Artificial Sequence
  Oligonucleotide primer for the detection of SNP TSC0045719
aaatttgtattt

SEQ ID NO: 348732 - DNA, 12 bp, Artificial Sequence
  Oligonucleotide primer for the detection of SNP TSC0001079
accaaaatatat

SEQ ID NO: 348733 - DNA, 12 bp, Artificial Sequence
  Oligonucleotide primer for the detection of SNP TSC0001079
aattttatttag

SEQ ID NO: 348734 - DNA, 12 bp, Artificial Sequence
  Oligonucleotide primer for the detection of SNP TSC0045720
acttacaatttc

SEQ ID NO: 348735 - DNA, 12 bp, Artificial Sequence
  Oligonucleotide primer for the detection of SNP TSC0045720
tagaatagaaag

SEQ ID NO: 348736 - DNA, 12 bp, Artificial Sequence
  Oligonucleotide primer for the detection of SNP TSC0045721
tttctttcaaaa

SEQ ID NO: 348737 - DNA, 12 bp, Artificial Sequence
  Oligonucleotide primer for the detection of SNP TSC0045722
acctcaacccca

SEQ ID NO: 348738 - DNA, 12 bp, Artificial Sequence
  Oligonucleotide primer for the detection of SNP TSC0045722
acctcgacccca

SEQ ID NO: 348739 - DNA, 12 bp, Artificial Sequence
  Oligonucleotide primer for the detection of SNP TSC0045722
gtttcggtttta

SEQ ID NO: 348740 - DNA, 12 bp, Artificial Sequence
  Oligonucleotide primer for the detection of SNP TSC0045723
ccctttcccatt

SEQ ID NO: 348741 - DNA, 12 bp, Artificial Sequence
  Oligonucleotide primer for the detection of SNP TSC0045723
atgttttgagta

SEQ ID NO: 348742 - DNA, 12 bp, Artificial Sequence
  Oligonucleotide primer for the detection of SNP TSC0045724
tctcccaccttc

SEQ ID NO: 348743 - DNA, 12 bp, Artificial Sequence
  Oligonucleotide primer for the detection of SNP TSC0045724
gtttttaaggcg

SEQ ID NO: 348744 - DNA, 12 bp, Artificial Sequence
  Oligonucleotide primer for the detection of SNP TSC0045729
tagtaagtattt

SEQ ID NO: 348745 - DNA, 12 bp, Artificial Sequence
  Oligonucleotide primer for the detection of SNP TSC0045729
ataaacactcaa

SEQ ID NO: 348746 - DNA, 12 bp, Artificial Sequence
  Oligonucleotide primer for the detection of SNP TSC0045730
ttcacctttctt

SEQ ID NO: 348747 - DNA, 12 bp, Artificial Sequence
  Oligonucleotide primer for the detection of SNP TSC0045730
ttagtaggtata

SEQ ID NO: 348748 - DNA, 12 bp, Artificial Sequence
  Oligonucleotide primer for the detection of SNP TSC0045730
tcaacaaataca

SEQ ID NO: 348749 - DNA, 12 bp, Artificial Sequence
  Oligonucleotide primer for the detection of SNP TSC0045731
tccattaaatta

SEQ ID NO: 348750 - DNA, 12 bp, Artificial Sequence
  Oligonucleotide primer for the detection of SNP TSC0045731
tccgttaaatta

SEQ ID NO: 348751 - DNA, 12 bp, Artificial Sequence
  Oligonucleotide primer for the detection of SNP TSC0045731
gatttttgataa

SEQ ID NO: 348752 - DNA, 12 bp, Artificial Sequence
  Oligonucleotide primer for the detection of SNP TSC0045731
aatctttaacaa

SEQ ID NO: 348753 - DNA, 12 bp, Artificial Sequence
  Oligonucleotide primer for the detection of SNP TSC0045731
ttcgttaaattg

SEQ ID NO: 348754 - DNA, 12 bp, Artificial Sequence
  Oligonucleotide primer for the detection of SNP TSC0045732
ttatactcacac

SEQ ID NO: 348755 - DNA, 12 bp, Artificial Sequence
  Oligonucleotide primer for the detection of SNP TSC0045732
ttatgaagttga

SEQ ID NO: 348756 - DNA, 12 bp, Artificial Sequence
  Oligonucleotide primer for the detection of SNP TSC0045735
accaccaccata

SEQ ID NO: 348757 - DNA, 12 bp, Artificial Sequence
  Oligonucleotide primer for the detection of SNP TSC0045737
tctacactttat

SEQ ID NO: 348758 - DNA, 12 bp, Artificial Sequence
  Oligonucleotide primer for the detection of SNP TSC0045737
tggggtggggag

SEQ ID NO: 348759 - DNA, 12 bp, Artificial Sequence
  Oligonucleotide primer for the detection of SNP TSC0045737
tttgtattttat

SEQ ID NO: 348760 - DNA, 12 bp, Artificial Sequence
  Oligonucleotide primer for the detection of SNP TSC0045738
ctatataaaaac

SEQ ID NO: 348761 - DNA, 12 bp, Artificial Sequence
  Oligonucleotide primer for the detection of SNP TSC0045738
gagtttgttatg

SEQ ID NO: 348762 - DNA, 12 bp, Artificial Sequence
  Oligonucleotide primer for the detection of SNP TSC0045739
aacttcccacca

SEQ ID NO: 348763 - DNA, 12 bp, Artificial Sequence
  Oligonucleotide primer for the detection of SNP TSC0045739
tttttagaggcg

SEQ ID NO: 348764 - DNA, 12 bp, Artificial Sequence
  Oligonucleotide primer for the detection of SNP TSC0045739
tcctaaaaacaa

SEQ ID NO: 348765 - DNA, 12 bp, Artificial Sequence
  Oligonucleotide primer for the detection of SNP TSC0045739
tcctaaaaacga

SEQ ID NO: 348766 - DNA, 12 bp, Artificial Sequence
  Oligonucleotide primer for the detection of SNP TSC0045739
agattttttatt

SEQ ID NO: 348767 - DNA, 12 bp, Artificial Sequence
  Oligonucleotide primer for the detection of SNP TSC0045740
aaatgagaattt

SEQ ID NO: 348768 - DNA, 12 bp, Artificial Sequence
  Oligonucleotide primer for the detection of SNP TSC0045740
aaataaaaactt

SEQ ID NO: 348769 - DNA, 12 bp, Artificial Sequence
  Oligonucleotide primer for the detection of SNP TSC0045741
ttcctcaactcc

SEQ ID NO: 348770 - DNA, 12 bp, Artificial Sequence
  Oligonucleotide primer for the detection of SNP TSC0045741
gatttattttat

SEQ ID NO: 348771 - DNA, 12 bp, Artificial Sequence
  Oligonucleotide primer for the detection of SNP TSC0045741
tctatttcataa

SEQ ID NO: 348772 - DNA, 12 bp, Artificial Sequence
  Oligonucleotide primer for the detection of SNP TSC0045742
ccaccttaatca

SEQ ID NO: 348773 - DNA, 12 bp, Artificial Sequence
  Oligonucleotide primer for the detection of SNP TSC0045742
aggttagttaat

SEQ ID NO: 348774 - DNA, 12 bp, Artificial Sequence
  Oligonucleotide primer for the detection of SNP TSC0045742
aaaccaactaat

SEQ ID NO: 348775 - DNA, 12 bp, Artificial Sequence
  Oligonucleotide primer for the detection of SNP TSC0045743
aaaaacaatatc

SEQ ID NO: 348776 - DNA, 12 bp, Artificial Sequence
  Oligonucleotide primer for the detection of SNP TSC0045743
cgaggtttaggt

SEQ ID NO: 348777 - DNA, 12 bp, Artificial Sequence
  Oligonucleotide primer for the detection of SNP TSC0045743
gaaactcaaaca

SEQ ID NO: 348778 - DNA, 12 bp, Artificial Sequence
  Oligonucleotide primer for the detection of SNP TSC0045743
aaggatagtatt

SEQ ID NO: 348779 - DNA, 12 bp, Artificial Sequence
  Oligonucleotide primer for the detection of SNP TSC0045744
actcactattat

SEQ ID NO: 348780 - DNA, 12 bp, Artificial Sequence
  Oligonucleotide primer for the detection of SNP TSC0045745
aaaacaattacc

SEQ ID NO: 348781 - DNA, 12 bp, Artificial Sequence
  Oligonucleotide primer for the detection of SNP TSC0045745
aatagtagtata

SEQ ID NO: 348782 - DNA, 12 bp, Artificial Sequence
  Oligonucleotide primer for the detection of SNP TSC0045745
gaggtagttatt

SEQ ID NO: 348783 - DNA, 12 bp, Artificial Sequence
  Oligonucleotide primer for the detection of SNP TSC0045747
aatctcgtaaaa

SEQ ID NO: 348784 - DNA, 12 bp, Artificial Sequence
  Oligonucleotide primer for the detection of SNP TSC0045747
tctcattataat

SEQ ID NO: 348785 - DNA, 12 bp, Artificial Sequence
  Oligonucleotide primer for the detection of SNP TSC0045747
gattttgtgaga

SEQ ID NO: 348786 - DNA, 12 bp, Artificial Sequence
  Oligonucleotide primer for the detection of SNP TSC0045747
gatttcgtgaga

SEQ ID NO: 348787 - DNA, 12 bp, Artificial Sequence
  Oligonucleotide primer for the detection of SNP TSC0045748
aacctccaaccc

SEQ ID NO: 348788 - DNA, 12 bp, Artificial Sequence
  Oligonucleotide primer for the detection of SNP TSC0045748
aattgaggagaa

SEQ ID NO: 348789 - DNA, 12 bp, Artificial Sequence
  Oligonucleotide primer for the detection of SNP TSC0045749
ccaataatcctt

SEQ ID NO: 348790 - DNA, 12 bp, Artificial Sequence
  Oligonucleotide primer for the detection of SNP TSC0045749
attgtgtaaaag

SEQ ID NO: 348791 - DNA, 12 bp, Artificial Sequence
  Oligonucleotide primer for the detection of SNP TSC0045750
cctatcaattta

SEQ ID NO: 348792 - DNA, 12 bp, Artificial Sequence
  Oligonucleotide primer for the detection of SNP TSC0045750
cctatcgattta

SEQ ID NO: 348793 - DNA, 12 bp, Artificial Sequence
  Oligonucleotide primer for the detection of SNP TSC0045750
gtggtttggaat

SEQ ID NO: 348794 - DNA, 12 bp, Artificial Sequence
  Oligonucleotide primer for the detection of SNP TSC0045750
gtggttcggaat

SEQ ID NO: 348795 - DNA, 12 bp, Artificial Sequence
  Oligonucleotide primer for the detection of SNP TSC0045750
ataatccaaaat

SEQ ID NO: 348796 - DNA, 12 bp, Artificial Sequence
  Oligonucleotide primer for the detection of SNP TSC0045750
ataatccgaaat

SEQ ID NO: 348797 - DNA, 12 bp, Artificial Sequence
  Oligonucleotide primer for the detection of SNP TSC0045750
tttgttgattta

SEQ ID NO: 348798 - DNA, 12 bp, Artificial Sequence
  Oligonucleotide primer for the detection of SNP TSC0045750
tttgtcgattta

SEQ ID NO: 348799 - DNA, 12 bp, Artificial Sequence
  Oligonucleotide primer for the detection of SNP TSC0045751
taacttatctac

SEQ ID NO: 348800 - DNA, 12 bp, Artificial Sequence
  Oligonucleotide primer for the detection of SNP TSC0045755
catacttcatat

SEQ ID NO: 348801 - DNA, 12 bp, Artificial Sequence
  Oligonucleotide primer for the detection of SNP TSC0045755
tataattagttg

SEQ ID NO: 348802 - DNA, 12 bp, Artificial Sequence
  Oligonucleotide primer for the detection of SNP TSC0045756
atagttaaaaag

SEQ ID NO: 348803 - DNA, 12 bp, Artificial Sequence
  Oligonucleotide primer for the detection of SNP TSC0045756
gtaaaattaaat

SEQ ID NO: 348804 - DNA, 12 bp, Artificial Sequence
  Oligonucleotide primer for the detection of SNP TSC0045757
tagatattaaaa

SEQ ID NO: 348805 - DNA, 12 bp, Artificial Sequence
  Oligonucleotide primer for the detection of SNP TSC0045758
aaacgtataaaa

SEQ ID NO: 348806 - DNA, 12 bp, Artificial Sequence
  Oligonucleotide primer for the detection of SNP TSC0045758
tttgtgaatttt

SEQ ID NO: 348807 - DNA, 12 bp, Artificial Sequence
  Oligonucleotide primer for the detection of SNP TSC0045758
tatttataaatc

SEQ ID NO: 348808 - DNA, 12 bp, Artificial Sequence
  Oligonucleotide primer for the detection of SNP TSC0045758
tataagtgtatg

SEQ ID NO: 348809 - DNA, 12 bp, Artificial Sequence
  Oligonucleotide primer for the detection of SNP TSC0045758
tataagcgtatg

SEQ ID NO: 348810 - DNA, 12 bp, Artificial Sequence
  Oligonucleotide primer for the detection of SNP TSC0045759
acacatctctaa

SEQ ID NO: 348811 - DNA, 12 bp, Artificial Sequence
  Oligonucleotide primer for the detection of SNP TSC0045759
aggttttggttt

SEQ ID NO: 348812 - DNA, 12 bp, Artificial Sequence
  Oligonucleotide primer for the detection of SNP TSC0045759
aaattctaatcc

SEQ ID NO: 348813 - DNA, 12 bp, Artificial Sequence
  Oligonucleotide primer for the detection of SNP TSC0045759
gtatatttttgg

SEQ ID NO: 348814 - DNA, 12 bp, Artificial Sequence
  Oligonucleotide primer for the detection of SNP TSC0045760
aatatccacaaa

SEQ ID NO: 348815 - DNA, 12 bp, Artificial Sequence
  Oligonucleotide primer for the detection of SNP TSC0045760
ggatttgtaaat

SEQ ID NO: 348816 - DNA, 12 bp, Artificial Sequence
  Oligonucleotide primer for the detection of SNP TSC0045760
aatctacaaaca

SEQ ID NO: 348817 - DNA, 12 bp, Artificial Sequence
  Oligonucleotide primer for the detection of SNP TSC0045760
tagtgtttatag

SEQ ID NO: 348818 - DNA, 12 bp, Artificial Sequence
  Oligonucleotide primer for the detection of SNP TSC0045763
ttttatagaaaa

SEQ ID NO: 348819 - DNA, 12 bp, Artificial Sequence
  Oligonucleotide primer for the detection of SNP TSC0045764
tcatcaaaataa

SEQ ID NO: 348820 - DNA, 12 bp, Artificial Sequence
  Oligonucleotide primer for the detection of SNP TSC0045764
ataattttttgt

SEQ ID NO: 348821 - DNA, 12 bp, Artificial Sequence
  Oligonucleotide primer for the detection of SNP TSC0045764
aataacccccta

SEQ ID NO: 348822 - DNA, 12 bp, Artificial Sequence
  Oligonucleotide primer for the detection of SNP TSC0045764
tattaaaataat

SEQ ID NO: 348823 - DNA, 12 bp, Artificial Sequence
  Oligonucleotide primer for the detection of SNP TSC0045766
tctatatatact

SEQ ID NO: 348824 - DNA, 12 bp, Artificial Sequence
  Oligonucleotide primer for the detection of SNP TSC0045766
atggaaatattg

SEQ ID NO: 348825 - DNA, 12 bp, Artificial Sequence
  Oligonucleotide primer for the detection of SNP TSC0045769
aggatttggttt

SEQ ID NO: 348826 - DNA, 12 bp, Artificial Sequence
  Oligonucleotide primer for the detection of SNP TSC0045769
aaaacctaacct

SEQ ID NO: 348827 - DNA, 12 bp, Artificial Sequence
  Oligonukleotid-Primer
tagaatttagta

SEQ ID NO: 348828 - DNA, 12 bp, Artificial Sequence
  Oligonucleotide primer for the detection of SNP TSC0045770
atttatagtaaa

SEQ ID NO: 348829 - DNA, 12 bp, Artificial Sequence
  Oligonucleotide primer for the detection of SNP TSC0045776
aaaaccctaact

SEQ ID NO: 348830 - DNA, 12 bp, Artificial Sequence
  Oligonucleotide primer for the detection of SNP TSC0045776
gaaaccctaact

SEQ ID NO: 348831 - DNA, 12 bp, Artificial Sequence
  Oligonucleotide primer for the detection of SNP TSC0007580
tcacataaaaat

SEQ ID NO: 348832 - DNA, 12 bp, Artificial Sequence
  Oligonucleotide primer for the detection of SNP TSC0007580
tattttttgtaa

SEQ ID NO: 348833 - DNA, 12 bp, Artificial Sequence
  Oligonucleotide primer for the detection of SNP TSC0007580
cacttcttacaa

SEQ ID NO: 348834 - DNA, 12 bp, Artificial Sequence
  Oligonucleotide primer for the detection of SNP TSC0007580
atatgagaattt

SEQ ID NO: 348835 - DNA, 12 bp, Artificial Sequence
  Oligonukleotid-Primer
ttattaagaatt

SEQ ID NO: 348836 - DNA, 12 bp, Artificial Sequence
  Oligonucleotide primer for the detection of SNP TSC0045780
tcactaaaaatc

SEQ ID NO: 348837 - DNA, 12 bp, Artificial Sequence
  Oligonucleotide primer for the detection of SNP TSC0045780
agaaaataatta

SEQ ID NO: 348838 - DNA, 12 bp, Artificial Sequence
  Oligonucleotide primer for the detection of SNP TSC0045782
tttaaaatttgt

SEQ ID NO: 348839 - DNA, 12 bp, Artificial Sequence
  Oligonucleotide primer for the detection of SNP TSC0045782
atctaaaattta

SEQ ID NO: 348840 - DNA, 12 bp, Artificial Sequence
  Oligonucleotide primer for the detection of SNP TSC0045783
actcttattacc

SEQ ID NO: 348841 - DNA, 12 bp, Artificial Sequence
  Oligonucleotide primer for the detection of SNP TSC0045783
gctcttattacc

SEQ ID NO: 348842 - DNA, 12 bp, Artificial Sequence
  Oligonucleotide primer for the detection of SNP TSC0045784
tccttttaaata

SEQ ID NO: 348843 - DNA, 12 bp, Artificial Sequence
  Oligonucleotide primer for the detection of SNP TSC0045784
ttaagaaatgtt

SEQ ID NO: 348844 - DNA, 12 bp, Artificial Sequence
  Oligonucleotide primer for the detection of SNP TSC0045785
acttcctctcat

SEQ ID NO: 348845 - DNA, 12 bp, Artificial Sequence
  Oligonucleotide primer for the detection of SNP TSC0045785
tgaggttgttag

SEQ ID NO: 348846 - DNA, 12 bp, Artificial Sequence
  Oligonucleotide primer for the detection of SNP TSC0045785
cgaggttgttag

SEQ ID NO: 348847 - DNA, 12 bp, Artificial Sequence
  Oligonucleotide primer for the detection of SNP TSC0045787
aaacaactcttc

SEQ ID NO: 348848 - DNA, 12 bp, Artificial Sequence
  Oligonucleotide primer for the detection of SNP TSC0045787
ggaattatattg

SEQ ID NO: 348849 - DNA, 12 bp, Artificial Sequence
  Oligonucleotide primer for the detection of SNP TSC0045787
aaaattacacta

SEQ ID NO: 348850 - DNA, 12 bp, Artificial Sequence
  Oligonucleotide primer for the detection of SNP TSC0045787
aaatagtttttt

SEQ ID NO: 348851 - DNA, 12 bp, Artificial Sequence
  Oligonucleotide primer for the detection of SNP TSC0007757
cttatatatact

SEQ ID NO: 348852 - DNA, 12 bp, Artificial Sequence
  Oligonucleotide primer for the detection of SNP TSC0007757
gagaaatttata

SEQ ID NO: 348853 - DNA, 12 bp, Artificial Sequence
  Oligonucleotide primer for the detection of SNP TSC0045789
ttcgttgttttg

SEQ ID NO: 348854 - DNA, 12 bp, Artificial Sequence
  Oligonucleotide primer for the detection of SNP TSC0045790
aacaaaatataa

SEQ ID NO: 348855 - DNA, 12 bp, Artificial Sequence
  Oligonucleotide primer for the detection of SNP TSC0045790
cactactctaat

SEQ ID NO: 348856 - DNA, 12 bp, Artificial Sequence
  Oligonucleotide primer for the detection of SNP TSC0045790
cgctactctaat

SEQ ID NO: 348857 - DNA, 12 bp, Artificial Sequence
  Oligonucleotide primer for the detection of SNP TSC0045790
aagtagaatgta

SEQ ID NO: 348858 - DNA, 12 bp, Artificial Sequence
  Oligonucleotide primer for the detection of SNP TSC0045791
gtaaaaaaaata

SEQ ID NO: 348859 - DNA, 12 bp, Artificial Sequence
  Oligonucleotide primer for the detection of SNP TSC0045791
ccttcaactatt

SEQ ID NO: 348860 - DNA, 12 bp, Artificial Sequence
  Oligonucleotide primer for the detection of SNP TSC0045791
gtggaggagatg

SEQ ID NO: 348861 - DNA, 12 bp, Artificial Sequence
  Oligonucleotide primer for the detection of SNP TSC0045792
ctctatctacaa

SEQ ID NO: 348862 - DNA, 12 bp, Artificial Sequence
  Oligonucleotide primer for the detection of SNP TSC0045792
attaagggagta

SEQ ID NO: 348863 - DNA, 12 bp, Artificial Sequence
  Oligonucleotide primer for the detection of SNP TSC0045793
ccctttatatct

SEQ ID NO: 348864 - DNA, 12 bp, Artificial Sequence
  Oligonucleotide primer for the detection of SNP TSC0045793
gagtttagaggg

SEQ ID NO: 348865 - DNA, 12 bp, Artificial Sequence
  Oligonucleotide primer for the detection of SNP TSC0045794
ttaattacttac

SEQ ID NO: 348866 - DNA, 12 bp, Artificial Sequence
  Oligonucleotide primer for the detection of SNP TSC0045794
aaacttaacata

SEQ ID NO: 348867 - DNA, 12 bp, Artificial Sequence
  Oligonucleotide primer for the detection of SNP TSC0045794
ttgattgtttat

SEQ ID NO: 348868 - DNA, 12 bp, Artificial Sequence
  Oligonucleotide primer for the detection of SNP TSC0045795
ttaacactttat

SEQ ID NO: 348869 - DNA, 12 bp, Artificial Sequence
  Oligonucleotide primer for the detection of SNP TSC0045795
ggttaaagttta

SEQ ID NO: 348870 - DNA, 12 bp, Artificial Sequence
  Oligonucleotide primer for the detection of SNP TSC0045795
aactaaaattta

SEQ ID NO: 348871 - DNA, 12 bp, Artificial Sequence
  Oligonucleotide primer for the detection of SNP TSC0045795
ttgatattttat

SEQ ID NO: 348872 - DNA, 12 bp, Artificial Sequence
  Oligonucleotide primer for the detection of SNP TSC0045798
ccctccctaata

SEQ ID NO: 348873 - DNA, 12 bp, Artificial Sequence
  Oligonucleotide primer for the detection of SNP TSC0045798
ggtggtaggata

SEQ ID NO: 348874 - DNA, 12 bp, Artificial Sequence
  Oligonucleotide primer for the detection of SNP TSC0045799
ccccaacctacc

SEQ ID NO: 348875 - DNA, 12 bp, Artificial Sequence
  Oligonucleotide primer for the detection of SNP TSC0045799
gatgagattgaa

SEQ ID NO: 348876 - DNA, 12 bp, Artificial Sequence
  Oligonucleotide primer for the detection of SNP TSC0045800
aattcaataaat

SEQ ID NO: 348877 - DNA, 12 bp, Artificial Sequence
  Oligonucleotide primer for the detection of SNP TSC0045800
aaattaaggtag

SEQ ID NO: 348878 - DNA, 12 bp, Artificial Sequence
  Oligonucleotide primer for the detection of SNP TSC0045801
tattcaacaaat

SEQ ID NO: 348879 - DNA, 12 bp, Artificial Sequence
  Oligonucleotide primer for the detection of SNP TSC0045801
attttttagaaa

SEQ ID NO: 348880 - DNA, 12 bp, Artificial Sequence
  Oligonucleotide primer for the detection of SNP TSC0045801
actttttaaaaa

SEQ ID NO: 348881 - DNA, 12 bp, Artificial Sequence
  Oligonucleotide primer for the detection of SNP TSC0045801
tgtttaatagat

SEQ ID NO: 348882 - DNA, 12 bp, Artificial Sequence
  Oligonucleotide primer for the detection of SNP TSC0045802
aaacattctaca

SEQ ID NO: 348883 - DNA, 12 bp, Artificial Sequence
  Oligonucleotide primer for the detection of SNP TSC0045802
aaacgttctaca

SEQ ID NO: 348884 - DNA, 12 bp, Artificial Sequence
  Oligonucleotide primer for the detection of SNP TSC0045802
agagatttagta

SEQ ID NO: 348885 - DNA, 12 bp, Artificial Sequence
  Oligonucleotide primer for the detection of SNP TSC0045802
taaatgttttgt

SEQ ID NO: 348886 - DNA, 12 bp, Artificial Sequence
  Oligonucleotide primer for the detection of SNP TSC0045802
taaacgttttgt

SEQ ID NO: 348887 - DNA, 12 bp, Artificial Sequence
  Oligonucleotide primer for the detection of SNP TSC0045803
gagaggttaggt

SEQ ID NO: 348888 - DNA, 12 bp, Artificial Sequence
  Oligonucleotide primer for the detection of SNP TSC0045803
aatcaaataaaa

SEQ ID NO: 348889 - DNA, 12 bp, Artificial Sequence
  Oligonucleotide primer for the detection of SNP TSC0045803
gggataatagtg

SEQ ID NO: 348890 - DNA, 12 bp, Artificial Sequence
  Oligonucleotide primer for the detection of SNP TSC0045804
ttaatctacttt

SEQ ID NO: 348891 - DNA, 12 bp, Artificial Sequence
  Oligonucleotide primer for the detection of SNP TSC0045805
ccctaccacaaa

SEQ ID NO: 348892 - DNA, 12 bp, Artificial Sequence
  Oligonucleotide primer for the detection of SNP TSC0045805
atttatgtgtgt

SEQ ID NO: 348893 - DNA, 12 bp, Artificial Sequence
  Oligonucleotide primer for the detection of SNP TSC0045805
acttatatatat

SEQ ID NO: 348894 - DNA, 12 bp, Artificial Sequence
  Oligonucleotide primer for the detection of SNP TSC0045806
acctaattaaac

SEQ ID NO: 348895 - DNA, 12 bp, Artificial Sequence
  Oligonucleotide primer for the detection of SNP TSC0045806
gttaaaagtatt

SEQ ID NO: 348896 - DNA, 12 bp, Artificial Sequence
  Oligonucleotide primer for the detection of SNP TSC0045806
ttaaaaatatca

SEQ ID NO: 348897 - DNA, 12 bp, Artificial Sequence
  Oligonucleotide primer for the detection of SNP TSC0045806
tttgattaaatt

SEQ ID NO: 348898 - DNA, 12 bp, Artificial Sequence
  Oligonucleotide primer for the detection of SNP TSC0045808
agttgggcgttt

SEQ ID NO: 348899 - DNA, 12 bp, Artificial Sequence
  Oligonucleotide primer for the detection of SNP TSC0045808
actaaacaccca

SEQ ID NO: 348900 - DNA, 12 bp, Artificial Sequence
  Oligonucleotide primer for the detection of SNP TSC0045808
actaaacgccca

SEQ ID NO: 348901 - DNA, 12 bp, Artificial Sequence
  Oligonucleotide primer for the detection of SNP TSC0045809
tttctttatacc

SEQ ID NO: 348902 - DNA, 12 bp, Artificial Sequence
  Oligonucleotide primer for the detection of SNP TSC0045809
aatagttggtaa

SEQ ID NO: 348903 - DNA, 12 bp, Artificial Sequence
  Oligonucleotide primer for the detection of SNP TSC0045813
atcttttttatc

SEQ ID NO: 348904 - DNA, 12 bp, Artificial Sequence
  Oligonucleotide primer for the detection of SNP TSC0045813
tagtaaattatt

SEQ ID NO: 348905 - DNA, 12 bp, Artificial Sequence
  Oligonucleotide primer for the detection of SNP TSC0045813
aacaaattatta

SEQ ID NO: 348906 - DNA, 12 bp, Artificial Sequence
  Oligonucleotide primer for the detection of SNP TSC0045813
attttttttatc

SEQ ID NO: 348907 - DNA, 12 bp, Artificial Sequence
  Oligonucleotide primer for the detection of SNP TSC0010288
ttatattaagta

SEQ ID NO: 348908 - DNA, 12 bp, Artificial Sequence
  Oligonucleotide primer for the detection of SNP TSC0010288
tcacatcaaaca

SEQ ID NO: 348909 - DNA, 12 bp, Artificial Sequence
  Oligonucleotide primer for the detection of SNP TSC0010288
tagagtagaatt

SEQ ID NO: 348910 - DNA, 12 bp, Artificial Sequence
  Oligonucleotide primer for the detection of SNP TSC0045815
cttttataatct

SEQ ID NO: 348911 - DNA, 12 bp, Artificial Sequence
  Oligonucleotide primer for the detection of SNP TSC0045815
tgtgatgtatta

SEQ ID NO: 348912 - DNA, 12 bp, Artificial Sequence
  Oligonucleotide primer for the detection of SNP TSC0045815
tataatacacta

SEQ ID NO: 348913 - DNA, 12 bp, Artificial Sequence
  Oligonucleotide primer for the detection of SNP TSC0045817
ctatctctctct

SEQ ID NO: 348914 - DNA, 12 bp, Artificial Sequence
  Oligonucleotide primer for the detection of SNP TSC0045818
aatttttaattg

SEQ ID NO: 348915 - DNA, 12 bp, Artificial Sequence
  Oligonucleotide primer for the detection of SNP TSC0045819
tactacatatac

SEQ ID NO: 348916 - DNA, 12 bp, Artificial Sequence
  Oligonucleotide primer for the detection of SNP TSC0045819
attgtatatatt

SEQ ID NO: 348917 - DNA, 12 bp, Artificial Sequence
  Oligonucleotide primer for the detection of SNP TSC0045820
gaataaatttat

SEQ ID NO: 348918 - DNA, 12 bp, Artificial Sequence
  Oligonucleotide primer for the detection of SNP TSC0045820
tttgtggatata

SEQ ID NO: 348919 - DNA, 12 bp, Artificial Sequence
  Oligonucleotide primer for the detection of SNP TSC0045820
gaataagtttat

SEQ ID NO: 348920 - DNA, 12 bp, Artificial Sequence
  Oligonucleotide primer for the detection of SNP TSC0045821
aacatttaccac

SEQ ID NO: 348921 - DNA, 12 bp, Artificial Sequence
  Oligonucleotide primer for the detection of SNP TSC0045821
tttatagttaga

SEQ ID NO: 348922 - DNA, 12 bp, Artificial Sequence
  Oligonucleotide primer for the detection of SNP TSC0045821
ctcacaattaaa

SEQ ID NO: 348923 - DNA, 12 bp, Artificial Sequence
  Oligonucleotide primer for the detection of SNP TSC0045822
acaaacttacaa

SEQ ID NO: 348924 - DNA, 12 bp, Artificial Sequence
  Oligonucleotide primer for the detection of SNP TSC0045822
ttacactaaata

SEQ ID NO: 348925 - DNA, 12 bp, Artificial Sequence
  Oligonucleotide primer for the detection of SNP TSC0045822
taaatttataat

SEQ ID NO: 348926 - DNA, 12 bp, Artificial Sequence
  Oligonucleotide primer for the detection of SNP TSC0045823
aaataacacctc

SEQ ID NO: 348927 - DNA, 12 bp, Artificial Sequence
  Oligonucleotide primer for the detection of SNP TSC0045824
atattcctattc

SEQ ID NO: 348928 - DNA, 12 bp, Artificial Sequence
  Oligonucleotide primer for the detection of SNP TSC0045824
aaagagatttgg

SEQ ID NO: 348929 - DNA, 12 bp, Artificial Sequence
  Oligonucleotide primer for the detection of SNP TSC0045825
cttcctaacaaa

SEQ ID NO: 348930 - DNA, 12 bp, Artificial Sequence
  Oligonucleotide primer for the detection of SNP TSC0045825
ttttttaataga

SEQ ID NO: 348931 - DNA, 12 bp, Artificial Sequence
  Oligonucleotide primer for the detection of SNP TSC0045827
tatcatataacc

SEQ ID NO: 348932 - DNA, 12 bp, Artificial Sequence
  Oligonucleotide primer for the detection of SNP TSC0045827
ataatataataa

SEQ ID NO: 348933 - DNA, 12 bp, Artificial Sequence
  Oligonucleotide primer for the detection of SNP TSC0045828
tttaaaagaaaa

SEQ ID NO: 348934 - DNA, 12 bp, Artificial Sequence
  Oligonucleotide primer for the detection of SNP TSC0045829
ccttattcctta

SEQ ID NO: 348935 - DNA, 12 bp, Artificial Sequence
  Oligonucleotide primer for the detection of SNP TSC0045829
agtattgaaagt

SEQ ID NO: 348936 - DNA, 12 bp, Artificial Sequence
  Oligonucleotide primer for the detection of SNP TSC0045829
aatactaaaaat

SEQ ID NO: 348937 - DNA, 12 bp, Artificial Sequence
  Oligonucleotide primer for the detection of SNP TSC0006448
accacatttttt

SEQ ID NO: 348938 - DNA, 12 bp, Artificial Sequence
  Oligonucleotide primer for the detection of SNP TSC0006448
gtttaagtaatt

SEQ ID NO: 348939 - DNA, 12 bp, Artificial Sequence
  Oligonucleotide primer for the detection of SNP TSC0006449
atcataacccac

SEQ ID NO: 348940 - DNA, 12 bp, Artificial Sequence
  Oligonucleotide primer for the detection of SNP TSC0045830
tataaaccttat

SEQ ID NO: 348941 - DNA, 12 bp, Artificial Sequence
  Oligonucleotide primer for the detection of SNP TSC0045830
ttttattgaaga

SEQ ID NO: 348942 - DNA, 12 bp, Artificial Sequence
  Oligonucleotide primer for the detection of SNP TSC0045831
attggttaatat

SEQ ID NO: 348943 - DNA, 12 bp, Artificial Sequence
  Oligonucleotide primer for the detection of SNP TSC0045831
actaaccaacac

SEQ ID NO: 348944 - DNA, 12 bp, Artificial Sequence
  Oligonucleotide primer for the detection of SNP TSC0045831
gatgggatttta

SEQ ID NO: 348945 - DNA, 12 bp, Artificial Sequence
  Oligonucleotide primer for the detection of SNP TSC0045833
ttcccaaaacaa

SEQ ID NO: 348946 - DNA, 12 bp, Artificial Sequence
  Oligonucleotide primer for the detection of SNP TSC0045833
ttagttttagtg

SEQ ID NO: 348947 - DNA, 12 bp, Artificial Sequence
  Oligonucleotide primer for the detection of SNP TSC0045838
atcaaattatat

SEQ ID NO: 348948 - DNA, 12 bp, Artificial Sequence
  Oligonucleotide primer for the detection of SNP TSC0045838
atatgtttaatg

SEQ ID NO: 348949 - DNA, 12 bp, Artificial Sequence
  Oligonucleotide primer for the detection of SNP TSC0045838
attaaattatgt

SEQ ID NO: 348950 - DNA, 12 bp, Artificial Sequence
  Oligonucleotide primer for the detection of SNP TSC0045839
atataaccctaa

SEQ ID NO: 348951 - DNA, 12 bp, Artificial Sequence
  Oligonucleotide primer for the detection of SNP TSC0045839
ggtatgttaatt

SEQ ID NO: 348952 - DNA, 12 bp, Artificial Sequence
  Oligonucleotide primer for the detection of SNP TSC0045839
ggtatgttaatc

SEQ ID NO: 348953 - DNA, 12 bp, Artificial Sequence
  Oligonucleotide primer for the detection of SNP TSC0045839
aacatatcaatc

SEQ ID NO: 348954 - DNA, 12 bp, Artificial Sequence
  Oligonucleotide primer for the detection of SNP TSC0045839
atatggttttga

SEQ ID NO: 348955 - DNA, 12 bp, Artificial Sequence
  Oligonucleotide primer for the detection of SNP TSC0045840
aataattacaat

SEQ ID NO: 348956 - DNA, 12 bp, Artificial Sequence
  Oligonucleotide primer for the detection of SNP TSC0045840
aataattacgat

SEQ ID NO: 348957 - DNA, 12 bp, Artificial Sequence
  Oligonucleotide primer for the detection of SNP TSC0045840
aagtaattggaa

SEQ ID NO: 348958 - DNA, 12 bp, Artificial Sequence
  Oligonucleotide primer for the detection of SNP TSC0045840
aaacaattaaaa

SEQ ID NO: 348959 - DNA, 12 bp, Artificial Sequence
  Oligonucleotide primer for the detection of SNP TSC0045840
agtaattgtggt

SEQ ID NO: 348960 - DNA, 12 bp, Artificial Sequence
  Oligonucleotide primer for the detection of SNP TSC0045840
agtaattgcggt

SEQ ID NO: 348961 - DNA, 12 bp, Artificial Sequence
  Oligonucleotide primer for the detection of SNP TSC0045841
gagttaatttgg

SEQ ID NO: 348962 - DNA, 12 bp, Artificial Sequence
  Oligonucleotide primer for the detection of SNP TSC0045841
aaactaacttaa

SEQ ID NO: 348963 - DNA, 12 bp, Artificial Sequence
  Oligonucleotide primer for the detection of SNP TSC0045841
gaactaacttaa

SEQ ID NO: 348964 - DNA, 12 bp, Artificial Sequence
  Oligonukleotid-Primer
tggaataggagt

SEQ ID NO: 348965 - DNA, 12 bp, Artificial Sequence
  Oligonucleotide primer for the detection of SNP TSC0045842
tttccttaaaca

SEQ ID NO: 348966 - DNA, 12 bp, Artificial Sequence
  Oligonucleotide primer for the detection of SNP TSC0045842
tactctccttac

SEQ ID NO: 348967 - DNA, 12 bp, Artificial Sequence
  Oligonucleotide primer for the detection of SNP TSC0045842
tttttttgagta

SEQ ID NO: 348968 - DNA, 12 bp, Artificial Sequence
  Oligonukleotid-Primer
attagatagatt

SEQ ID NO: 348969 - DNA, 12 bp, Artificial Sequence
  Oligonucleotide primer for the detection of SNP TSC0045843
aataagagaatg

SEQ ID NO: 348970 - DNA, 12 bp, Artificial Sequence
  Oligonucleotide primer for the detection of SNP TSC0045844
tatcctaatttc

SEQ ID NO: 348971 - DNA, 12 bp, Artificial Sequence
  Oligonucleotide primer for the detection of SNP TSC0010358
ttacatttaaac

SEQ ID NO: 348972 - DNA, 12 bp, Artificial Sequence
  Oligonukleotid-Primer
agatattttaaa

SEQ ID NO: 348973 - DNA, 12 bp, Artificial Sequence
  Oligonucleotide primer for the detection of SNP TSC0045845
acaattaaatat

SEQ ID NO: 348974 - DNA, 12 bp, Artificial Sequence
  Oligonucleotide primer for the detection of SNP TSC0045845
tttttaccctta

SEQ ID NO: 348975 - DNA, 12 bp, Artificial Sequence
  Oligonucleotide primer for the detection of SNP TSC0045845
aattgaatattt

SEQ ID NO: 348976 - DNA, 12 bp, Artificial Sequence
  Oligonukleotid-Primer
gtgtttattata

SEQ ID NO: 348977 - DNA, 12 bp, Artificial Sequence
  Oligonucleotide primer for the detection of SNP TSC0010389
atacttatcata

SEQ ID NO: 348978 - DNA, 12 bp, Artificial Sequence
  Oligonucleotide primer for the detection of SNP TSC0010389
ttttaaagtaat

SEQ ID NO: 348979 - DNA, 12 bp, Artificial Sequence
  Oligonucleotide primer for the detection of SNP TSC0045848
acataaaccaac

SEQ ID NO: 348980 - DNA, 12 bp, Artificial Sequence
  Oligonucleotide primer for the detection of SNP TSC0045848
acataaaccgac

SEQ ID NO: 348981 - DNA, 12 bp, Artificial Sequence
  Oligonucleotide primer for the detection of SNP TSC0045848
tgatggttgtta

SEQ ID NO: 348982 - DNA, 12 bp, Artificial Sequence
  Oligonucleotide primer for the detection of SNP TSC0045848
cgatggttgtta

SEQ ID NO: 348983 - DNA, 12 bp, Artificial Sequence
  Oligonucleotide primer for the detection of SNP TSC0045848
tgatggtcgtta

SEQ ID NO: 348984 - DNA, 12 bp, Artificial Sequence
  Oligonucleotide primer for the detection of SNP TSC0045848
cgatggtcgtta

SEQ ID NO: 348985 - DNA, 12 bp, Artificial Sequence
  Oligonucleotide primer for the detection of SNP TSC0045848
caataaccacca

SEQ ID NO: 348986 - DNA, 12 bp, Artificial Sequence
  Oligonucleotide primer for the detection of SNP TSC0045848
caataaccgcca

SEQ ID NO: 348987 - DNA, 12 bp, Artificial Sequence
  Oligonucleotide primer for the detection of SNP TSC0045848
cgataaccacca

SEQ ID NO: 348988 - DNA, 12 bp, Artificial Sequence
  Oligonucleotide primer for the detection of SNP TSC0045848
cgataaccgcca

SEQ ID NO: 348989 - DNA, 12 bp, Artificial Sequence
  Oligonucleotide primer for the detection of SNP TSC0045848
gtatgaattggt

SEQ ID NO: 348990 - DNA, 12 bp, Artificial Sequence
  Oligonucleotide primer for the detection of SNP TSC0045848
gtatgaatcggt

SEQ ID NO: 348991 - DNA, 12 bp, Artificial Sequence
  Oligonucleotide primer for the detection of SNP TSC0045849
tccctaaacatc

SEQ ID NO: 348992 - DNA, 12 bp, Artificial Sequence
  Oligonucleotide primer for the detection of SNP TSC0045849
tactccccttaa

SEQ ID NO: 348993 - DNA, 12 bp, Artificial Sequence
  Oligonucleotide primer for the detection of SNP TSC0045849
tttttgaatatt

SEQ ID NO: 348994 - DNA, 12 bp, Artificial Sequence
  Oligonucleotide primer for the detection of SNP TSC0045849
tttttgaatatc

SEQ ID NO: 348995 - DNA, 12 bp, Artificial Sequence
  Oligonucleotide primer for the detection of SNP TSC0045851
cttccaaactca

SEQ ID NO: 348996 - DNA, 12 bp, Artificial Sequence
  Oligonucleotide primer for the detection of SNP TSC0006748
ataccaaaaaat

SEQ ID NO: 348997 - DNA, 12 bp, Artificial Sequence
  Oligonucleotide primer for the detection of SNP TSC0008472
ttacattctatc

SEQ ID NO: 348998 - DNA, 12 bp, Artificial Sequence
  Oligonucleotide primer for the detection of SNP TSC0008472
tggttgtggaaa

SEQ ID NO: 348999 - DNA, 12 bp, Artificial Sequence
  Oligonucleotide primer for the detection of SNP TSC0045854
aaacaactctac

SEQ ID NO: 349000 - DNA, 12 bp, Artificial Sequence
  Oligonucleotide primer for the detection of SNP TSC0045854
ttaggttgggag

SEQ ID NO: 349001 - DNA, 12 bp, Artificial Sequence
  Oligonucleotide primer for the detection of SNP TSC0045855
agaaaaattata

SEQ ID NO: 349002 - DNA, 12 bp, Artificial Sequence
  Oligonucleotide primer for the detection of SNP TSC0045855
ggtaaaatatat

SEQ ID NO: 349003 - DNA, 12 bp, Artificial Sequence
  Oligonucleotide primer for the detection of SNP TSC0045856
actttctttaaa

SEQ ID NO: 349004 - DNA, 12 bp, Artificial Sequence
  Oligonucleotide primer for the detection of SNP TSC0045856
atagataagtga

SEQ ID NO: 349005 - DNA, 12 bp, Artificial Sequence
  Oligonucleotide primer for the detection of SNP TSC0045857
caaaccaaatta

SEQ ID NO: 349006 - DNA, 12 bp, Artificial Sequence
  Oligonucleotide primer for the detection of SNP TSC0045857
ttgggtttggtt

SEQ ID NO: 349007 - DNA, 12 bp, Artificial Sequence
  Oligonucleotide primer for the detection of SNP TSC0045857
tcgggtttggtt

SEQ ID NO: 349008 - DNA, 12 bp, Artificial Sequence
  Oligonucleotide primer for the detection of SNP TSC0045857
ccaaacttaacc

SEQ ID NO: 349009 - DNA, 12 bp, Artificial Sequence
  Oligonucleotide primer for the detection of SNP TSC0045857
ccgaacttaacc

SEQ ID NO: 349010 - DNA, 12 bp, Artificial Sequence
  Oligonucleotide primer for the detection of SNP TSC0045857
taaattaagtta

SEQ ID NO: 349011 - DNA, 12 bp, Artificial Sequence
  Oligonucleotide primer for the detection of SNP TSC0045859
gttaattaatta

SEQ ID NO: 349012 - DNA, 12 bp, Artificial Sequence
  Oligonucleotide primer for the detection of SNP TSC0045859
actaattaatca

SEQ ID NO: 349013 - DNA, 12 bp, Artificial Sequence
  Oligonucleotide primer for the detection of SNP TSC0045859
ttttaggaatgt

SEQ ID NO: 349014 - DNA, 12 bp, Artificial Sequence
  Oligonucleotide primer for the detection of SNP TSC0010318
ggaggtttatta

SEQ ID NO: 349015 - DNA, 12 bp, Artificial Sequence
  Oligonucleotide primer for the detection of SNP TSC0045862
tatttaaactct

SEQ ID NO: 349016 - DNA, 12 bp, Artificial Sequence
  Oligonucleotide primer for the detection of SNP TSC0045862
agagtgttgaaa

SEQ ID NO: 349017 - DNA, 12 bp, Artificial Sequence
  Oligonucleotide primer for the detection of SNP TSC0008609
atctcaatctaa

SEQ ID NO: 349018 - DNA, 12 bp, Artificial Sequence
  Oligonucleotide primer for the detection of SNP TSC0008609
agatataagaat

SEQ ID NO: 349019 - DNA, 12 bp, Artificial Sequence
  Oligonucleotide primer for the detection of SNP TSC0045865
tcaaaataaatt

SEQ ID NO: 349020 - DNA, 12 bp, Artificial Sequence
  Oligonucleotide primer for the detection of SNP TSC0045865
tttatatttagg

SEQ ID NO: 349021 - DNA, 12 bp, Artificial Sequence
  Oligonucleotide primer for the detection of SNP TSC0045866
atgtagaaatta

SEQ ID NO: 349022 - DNA, 12 bp, Artificial Sequence
  Oligonucleotide primer for the detection of SNP TSC0045866
aaagaataaggt

SEQ ID NO: 349023 - DNA, 12 bp, Artificial Sequence
  Oligonucleotide primer for the detection of SNP TSC0045867
tatatacatcct

SEQ ID NO: 349024 - DNA, 12 bp, Artificial Sequence
  Oligonucleotide primer for the detection of SNP TSC0045867
tggagtaggatg

SEQ ID NO: 349025 - DNA, 12 bp, Artificial Sequence
  Oligonucleotide primer for the detection of SNP TSC0045868
cacaaaaacaac

SEQ ID NO: 349026 - DNA, 12 bp, Artificial Sequence
  Oligonucleotide primer for the detection of SNP TSC0045868
cacaaaaacgac

SEQ ID NO: 349027 - DNA, 12 bp, Artificial Sequence
  Oligonucleotide primer for the detection of SNP TSC0045868
tattgtgtgaat

SEQ ID NO: 349028 - DNA, 12 bp, Artificial Sequence
  Oligonucleotide primer for the detection of SNP TSC0045868
tatcgtgtgaat

SEQ ID NO: 349029 - DNA, 12 bp, Artificial Sequence
  Oligonucleotide primer for the detection of SNP TSC0045871
ccaacctatttc

SEQ ID NO: 349030 - DNA, 12 bp, Artificial Sequence
  Oligonucleotide primer for the detection of SNP TSC0045871
atgtataggtgg

SEQ ID NO: 349031 - DNA, 12 bp, Artificial Sequence
  Oligonucleotide primer for the detection of SNP TSC0045871
ttaatttgtttt

SEQ ID NO: 349032 - DNA, 12 bp, Artificial Sequence
  Oligonucleotide primer for the detection of SNP TSC0045872
aaaacaatcaaa

SEQ ID NO: 349033 - DNA, 12 bp, Artificial Sequence
  Oligonucleotide primer for the detection of SNP TSC0045872
gtatttgtattg

SEQ ID NO: 349034 - DNA, 12 bp, Artificial Sequence
  Oligonucleotide primer for the detection of SNP TSC0045872
gaggtaattaaa

SEQ ID NO: 349035 - DNA, 12 bp, Artificial Sequence
  Oligonucleotide primer for the detection of SNP TSC0045873
atttttagaaag

SEQ ID NO: 349036 - DNA, 12 bp, Artificial Sequence
  Oligonucleotide primer for the detection of SNP TSC0045873
tgagaaagtaat

SEQ ID NO: 349037 - DNA, 12 bp, Artificial Sequence
  Oligonucleotide primer for the detection of SNP TSC0045874
atttcaatttca

SEQ ID NO: 349038 - DNA, 12 bp, Artificial Sequence
  Oligonucleotide primer for the detection of SNP TSC0010791
atcctaaccttt

SEQ ID NO: 349039 - DNA, 12 bp, Artificial Sequence
  Oligonucleotide primer for the detection of SNP TSC0010791
taattatgttgg

SEQ ID NO: 349040 - DNA, 12 bp, Artificial Sequence
  Oligonucleotide primer for the detection of SNP TSC0010791
taactatactaa

SEQ ID NO: 349041 - DNA, 12 bp, Artificial Sequence
  Oligonucleotide primer for the detection of SNP TSC0045875
actaaatccctc

SEQ ID NO: 349042 - DNA, 12 bp, Artificial Sequence
  Oligonucleotide primer for the detection of SNP TSC0045875
ttatgtgttgtg

SEQ ID NO: 349043 - DNA, 12 bp, Artificial Sequence
  Oligonucleotide primer for the detection of SNP TSC0045877
taccctaacttc

SEQ ID NO: 349044 - DNA, 12 bp, Artificial Sequence
  Oligonucleotide primer for the detection of SNP TSC0045877
tgattaggttat

SEQ ID NO: 349045 - DNA, 12 bp, Artificial Sequence
  Oligonucleotide primer for the detection of SNP TSC0045877
taactaaatcat

SEQ ID NO: 349046 - DNA, 12 bp, Artificial Sequence
  Oligonucleotide primer for the detection of SNP TSC0045877
tattttgatttt

SEQ ID NO: 349047 - DNA, 12 bp, Artificial Sequence
  Oligonucleotide primer for the detection of SNP TSC0045878
aattattaacat

SEQ ID NO: 349048 - DNA, 12 bp, Artificial Sequence
  Oligonucleotide primer for the detection of SNP TSC0045878
atatttaagttg

SEQ ID NO: 349049 - DNA, 12 bp, Artificial Sequence
  Oligonucleotide primer for the detection of SNP TSC0045879
taattaaaacat

SEQ ID NO: 349050 - DNA, 12 bp, Artificial Sequence
  Oligonucleotide primer for the detection of SNP TSC0045880
ttttcctctata

SEQ ID NO: 349051 - DNA, 12 bp, Artificial Sequence
  Oligonucleotide primer for the detection of SNP TSC0045880
aaaaggattaat

SEQ ID NO: 349052 - DNA, 12 bp, Artificial Sequence
  Oligonucleotide primer for the detection of SNP TSC0045881
acataaataaac

SEQ ID NO: 349053 - DNA, 12 bp, Artificial Sequence
  Oligonucleotide primer for the detection of SNP TSC0045881
ttaatgtttttt

SEQ ID NO: 349054 - DNA, 12 bp, Artificial Sequence
  Oligonucleotide primer for the detection of SNP TSC0045881
taatatcttcca

SEQ ID NO: 349055 - DNA, 12 bp, Artificial Sequence
  Oligonucleotide primer for the detection of SNP TSC0045881
atatggatggat

SEQ ID NO: 349056 - DNA, 12 bp, Artificial Sequence
  Oligonucleotide primer for the detection of SNP TSC0045882
tattaaagttta

SEQ ID NO: 349057 - DNA, 12 bp, Artificial Sequence
  Oligonucleotide primer for the detection of SNP TSC0006987
ttcaaattctcc

SEQ ID NO: 349058 - DNA, 12 bp, Artificial Sequence
  Oligonucleotide primer for the detection of SNP TSC0006987
atgtgtatataa

SEQ ID NO: 349059 - DNA, 12 bp, Artificial Sequence
  Oligonucleotide primer for the detection of SNP TSC0045883
aacacacccaaa

SEQ ID NO: 349060 - DNA, 12 bp, Artificial Sequence
  Oligonucleotide primer for the detection of SNP TSC0045883
tggataggttgt

SEQ ID NO: 349061 - DNA, 12 bp, Artificial Sequence
  Oligonucleotide primer for the detection of SNP TSC0045883
gtatatttaggt

SEQ ID NO: 349062 - DNA, 12 bp, Artificial Sequence
  Oligonucleotide primer for the detection of SNP TSC0045886
tgtttattggta

SEQ ID NO: 349063 - DNA, 12 bp, Artificial Sequence
  Oligonucleotide primer for the detection of SNP TSC0045886
tgtttatcggta

SEQ ID NO: 349064 - DNA, 12 bp, Artificial Sequence
  Oligonucleotide primer for the detection of SNP TSC0045886
tattcatcaata

SEQ ID NO: 349065 - DNA, 12 bp, Artificial Sequence
  Oligonucleotide primer for the detection of SNP TSC0045886
tattcatcgata

SEQ ID NO: 349066 - DNA, 12 bp, Artificial Sequence
  Oligonucleotide primer for the detection of SNP TSC0045887
atcataatctct

SEQ ID NO: 349067 - DNA, 12 bp, Artificial Sequence
  Oligonucleotide primer for the detection of SNP TSC0045887
gttcgtatttta

SEQ ID NO: 349068 - DNA, 12 bp, Artificial Sequence
  Oligonucleotide primer for the detection of SNP TSC0045887
acccatattcta

SEQ ID NO: 349069 - DNA, 12 bp, Artificial Sequence
  Oligonucleotide primer for the detection of SNP TSC0045887
acccgtattcta

SEQ ID NO: 349070 - DNA, 12 bp, Artificial Sequence
  Oligonucleotide primer for the detection of SNP TSC0045888
ctacaaatctca

SEQ ID NO: 349071 - DNA, 12 bp, Artificial Sequence
  Oligonucleotide primer for the detection of SNP TSC0045888
agaaagggaatg

SEQ ID NO: 349072 - DNA, 12 bp, Artificial Sequence
  Oligonucleotide primer for the detection of SNP TSC0045890
ttgtttgggttt

SEQ ID NO: 349073 - DNA, 12 bp, Artificial Sequence
  Oligonucleotide primer for the detection of SNP TSC0045890
ctacctaaattc

SEQ ID NO: 349074 - DNA, 12 bp, Artificial Sequence
  Oligonucleotide primer for the detection of SNP TSC0045891
ccaactactcaa

SEQ ID NO: 349075 - DNA, 12 bp, Artificial Sequence
  Oligonucleotide primer for the detection of SNP TSC0045892
cccacctatctc

SEQ ID NO: 349076 - DNA, 12 bp, Artificial Sequence
  Oligonucleotide primer for the detection of SNP TSC0045892
ggaggtttgagt

SEQ ID NO: 349077 - DNA, 12 bp, Artificial Sequence
  Oligonucleotide primer for the detection of SNP TSC0045893
aaaaacttcacc

SEQ ID NO: 349078 - DNA, 12 bp, Artificial Sequence
  Oligonucleotide primer for the detection of SNP TSC0045893
gatagtagagaa

SEQ ID NO: 349079 - DNA, 12 bp, Artificial Sequence
  Oligonucleotide primer for the detection of SNP TSC0001340
aaaaacaactca

SEQ ID NO: 349080 - DNA, 12 bp, Artificial Sequence
  Oligonucleotide primer for the detection of SNP TSC0001340
tttttcttattc

SEQ ID NO: 349081 - DNA, 12 bp, Artificial Sequence
  Oligonucleotide primer for the detection of SNP TSC0045894
aactattcaaaa

SEQ ID NO: 349082 - DNA, 12 bp, Artificial Sequence
  Oligonucleotide primer for the detection of SNP TSC0045894
gttgtgaatatt

SEQ ID NO: 349083 - DNA, 12 bp, Artificial Sequence
  Oligonucleotide primer for the detection of SNP TSC0045894
ctataaatatta

SEQ ID NO: 349084 - DNA, 12 bp, Artificial Sequence
  Oligonucleotide primer for the detection of SNP TSC0045894
agttgtttaaaa

SEQ ID NO: 349085 - DNA, 12 bp, Artificial Sequence
  Oligonucleotide primer for the detection of SNP TSC0045895
tagaattgaagg

SEQ ID NO: 349086 - DNA, 12 bp, Artificial Sequence
  Oligonucleotide primer for the detection of SNP TSC0045896
ggatatttgaag

SEQ ID NO: 349087 - DNA, 12 bp, Artificial Sequence
  Oligonucleotide primer for the detection of SNP TSC0045897
aaaatcattacc

SEQ ID NO: 349088 - DNA, 12 bp, Artificial Sequence
  Oligonucleotide primer for the detection of SNP TSC0045898
aaacatacccaa

SEQ ID NO: 349089 - DNA, 12 bp, Artificial Sequence
  Oligonucleotide primer for the detection of SNP TSC0045898
tgtagaaggttt

SEQ ID NO: 349090 - DNA, 12 bp, Artificial Sequence
  Oligonucleotide primer for the detection of SNP TSC0045898
acatacaaaaaa

SEQ ID NO: 349091 - DNA, 12 bp, Artificial Sequence
  Oligonucleotide primer for the detection of SNP TSC0045898
ggaaatatattt

SEQ ID NO: 349092 - DNA, 12 bp, Artificial Sequence
  Oligonucleotide primer for the detection of SNP TSC0045909
aactaacatatt

SEQ ID NO: 349093 - DNA, 12 bp, Artificial Sequence
  Oligonucleotide primer for the detection of SNP TSC0045910
caaaaaactatt

SEQ ID NO: 349094 - DNA, 12 bp, Artificial Sequence
  Oligonucleotide primer for the detection of SNP TSC0045910
cgaaaaactatt

SEQ ID NO: 349095 - DNA, 12 bp, Artificial Sequence
  Oligonucleotide primer for the detection of SNP TSC0045910
gaagttgttatg

SEQ ID NO: 349096 - DNA, 12 bp, Artificial Sequence
  Oligonucleotide primer for the detection of SNP TSC0000250
atctaaacctcc

SEQ ID NO: 349097 - DNA, 12 bp, Artificial Sequence
  Oligonucleotide primer for the detection of SNP TSC0000250
gtctaaacctcc

SEQ ID NO: 349098 - DNA, 12 bp, Artificial Sequence
  Oligonucleotide primer for the detection of SNP TSC0045911
aattaactcttc

SEQ ID NO: 349099 - DNA, 12 bp, Artificial Sequence
  Oligonucleotide primer for the detection of SNP TSC0045911
ttttatagaatg

SEQ ID NO: 349100 - DNA, 12 bp, Artificial Sequence
  Oligonucleotide primer for the detection of SNP TSC0045912
cattaatcaata

SEQ ID NO: 349101 - DNA, 12 bp, Artificial Sequence
  Oligonucleotide primer for the detection of SNP TSC0045912
ggtattttgttc

SEQ ID NO: 349102 - DNA, 12 bp, Artificial Sequence
  Oligonucleotide primer for the detection of SNP TSC0045912
aacattttattc

SEQ ID NO: 349103 - DNA, 12 bp, Artificial Sequence
  Oligonucleotide primer for the detection of SNP TSC0045912
gtattggttaat

SEQ ID NO: 349104 - DNA, 12 bp, Artificial Sequence
  Oligonucleotide primer for the detection of SNP TSC0045919
aaataaaatttt

SEQ ID NO: 349105 - DNA, 12 bp, Artificial Sequence
  Oligonucleotide primer for the detection of SNP TSC0045919
ggttgtgtttta

SEQ ID NO: 349106 - DNA, 12 bp, Artificial Sequence
  Oligonucleotide primer for the detection of SNP TSC0045920
tatataacccac

SEQ ID NO: 349107 - DNA, 12 bp, Artificial Sequence
  Oligonucleotide primer for the detection of SNP TSC0045920
ggagatgaagtg

SEQ ID NO: 349108 - DNA, 12 bp, Artificial Sequence
  Oligonucleotide primer for the detection of SNP TSC0045921
catcttcactct

SEQ ID NO: 349109 - DNA, 12 bp, Artificial Sequence
  Oligonucleotide primer for the detection of SNP TSC0045921
gaagaggtttag

SEQ ID NO: 349110 - DNA, 12 bp, Artificial Sequence
  Oligonucleotide primer for the detection of SNP TSC0045924
aatttttcccta

SEQ ID NO: 349111 - DNA, 12 bp, Artificial Sequence
  unsure (9): Oligonucleotide primer for the detection of SNP TSC0045924
gaagtgtanagt

SEQ ID NO: 349112 - DNA, 12 bp, Artificial Sequence
  unsure (6): Oligonucleotide primer for the detection of SNP TSC0045924
atacanaacaaa

SEQ ID NO: 349113 - DNA, 12 bp, Artificial Sequence
  Oligonucleotide primer for the detection of SNP TSC0045925
ccttccttccac

SEQ ID NO: 349114 - DNA, 12 bp, Artificial Sequence
  Oligonucleotide primer for the detection of SNP TSC0001177
actaaaatttta

SEQ ID NO: 349115 - DNA, 12 bp, Artificial Sequence
  Oligonucleotide primer for the detection of SNP TSC0001177
ttgtaagtgata

SEQ ID NO: 349116 - DNA, 12 bp, Artificial Sequence
  Oligonucleotide primer for the detection of SNP TSC0001178
tcaaaattaaaa

SEQ ID NO: 349117 - DNA, 12 bp, Artificial Sequence
  Oligonucleotide primer for the detection of SNP TSC0001178
aaaattattttg

SEQ ID NO: 349118 - DNA, 12 bp, Artificial Sequence
  Oligonucleotide primer for the detection of SNP TSC0001178
aaaaccatctta

SEQ ID NO: 349119 - DNA, 12 bp, Artificial Sequence
  Oligonucleotide primer for the detection of SNP TSC0045926
ataactaaaaca

SEQ ID NO: 349120 - DNA, 12 bp, Artificial Sequence
  Oligonucleotide primer for the detection of SNP TSC0045926
tcttttccaaaa

SEQ ID NO: 349121 - DNA, 12 bp, Artificial Sequence
  Oligonucleotide primer for the detection of SNP TSC0045926
atagttgaaata

SEQ ID NO: 349122 - DNA, 12 bp, Artificial Sequence
  Oligonucleotide primer for the detection of SNP TSC0045928
aaaaacatctaa

SEQ ID NO: 349123 - DNA, 12 bp, Artificial Sequence
  Oligonucleotide primer for the detection of SNP TSC0045928
gaaatgtttttt

SEQ ID NO: 349124 - DNA, 12 bp, Artificial Sequence
  Oligonucleotide primer for the detection of SNP TSC0045928
aaaatatcttct

SEQ ID NO: 349125 - DNA, 12 bp, Artificial Sequence
  Oligonucleotide primer for the detection of SNP TSC0045928
ttaagggtattt

SEQ ID NO: 349126 - DNA, 12 bp, Artificial Sequence
  Oligonucleotide primer for the detection of SNP TSC0045929
tcccttcttcac

SEQ ID NO: 349127 - DNA, 12 bp, Artificial Sequence
  Oligonucleotide primer for the detection of SNP TSC0045929
agttgagataga

SEQ ID NO: 349128 - DNA, 12 bp, Artificial Sequence
  Oligonucleotide primer for the detection of SNP TSC0009611
ttctaacacttt

SEQ ID NO: 349129 - DNA, 12 bp, Artificial Sequence
  Oligonucleotide primer for the detection of SNP TSC0009611
tgagaatgttta

SEQ ID NO: 349130 - DNA, 12 bp, Artificial Sequence
  Oligonucleotide primer for the detection of SNP TSC0045930
cttccctccttc

SEQ ID NO: 349131 - DNA, 12 bp, Artificial Sequence
  Oligonucleotide primer for the detection of SNP TSC0045930
aggagaaagaag

SEQ ID NO: 349132 - DNA, 12 bp, Artificial Sequence
  Oligonucleotide primer for the detection of SNP TSC0045931
aactcacaccta

SEQ ID NO: 349133 - DNA, 12 bp, Artificial Sequence
  Oligonucleotide primer for the detection of SNP TSC0045931
aactcacgccta

SEQ ID NO: 349134 - DNA, 12 bp, Artificial Sequence
  Oligonucleotide primer for the detection of SNP TSC0045931
aagttttaggat

SEQ ID NO: 349135 - DNA, 12 bp, Artificial Sequence
  Oligonucleotide primer for the detection of SNP TSC0006703
aaatactaactt

SEQ ID NO: 349136 - DNA, 12 bp, Artificial Sequence
  Oligonucleotide primer for the detection of SNP TSC0006703
tttgagagtaaa

SEQ ID NO: 349137 - DNA, 12 bp, Artificial Sequence
  Oligonucleotide primer for the detection of SNP TSC0045932
atccaaaatatc

SEQ ID NO: 349138 - DNA, 12 bp, Artificial Sequence
  Oligonucleotide primer for the detection of SNP TSC0045932
ttaagtttagag

SEQ ID NO: 349139 - DNA, 12 bp, Artificial Sequence
  Oligonucleotide primer for the detection of SNP TSC0045933
taagatattttt

SEQ ID NO: 349140 - DNA, 12 bp, Artificial Sequence
  Oligonucleotide primer for the detection of SNP TSC0045933
ataccttcaaaa

SEQ ID NO: 349141 - DNA, 12 bp, Artificial Sequence
  Oligonucleotide primer for the detection of SNP TSC0000199
acaacataattc

SEQ ID NO: 349142 - DNA, 12 bp, Artificial Sequence
  Oligonucleotide primer for the detection of SNP TSC0000199
ttgagttatgaa

SEQ ID NO: 349143 - DNA, 12 bp, Artificial Sequence
  Oligonucleotide primer for the detection of SNP TSC0000878
actatcctaaca

SEQ ID NO: 349144 - DNA, 12 bp, Artificial Sequence
  Oligonucleotide primer for the detection of SNP TSC0000878
aaagagaaataa

SEQ ID NO: 349145 - DNA, 12 bp, Artificial Sequence
  Oligonucleotide primer for the detection of SNP TSC0045940
ataccacctcct

SEQ ID NO: 349146 - DNA, 12 bp, Artificial Sequence
  Oligonucleotide primer for the detection of SNP TSC0045940
gtaccacctcct

SEQ ID NO: 349147 - DNA, 12 bp, Artificial Sequence
  Oligonucleotide primer for the detection of SNP TSC0045940
gttagggttttg

SEQ ID NO: 349148 - DNA, 12 bp, Artificial Sequence
  Oligonucleotide primer for the detection of SNP TSC0045941
cctactccactc

SEQ ID NO: 349149 - DNA, 12 bp, Artificial Sequence
  Oligonucleotide primer for the detection of SNP TSC0045941
tttttagtatga

SEQ ID NO: 349150 - DNA, 12 bp, Artificial Sequence
  Oligonucleotide primer for the detection of SNP TSC0045942
ctaaaacctaaa

SEQ ID NO: 349151 - DNA, 12 bp, Artificial Sequence
  Oligonucleotide primer for the detection of SNP TSC0045942
ggagaattaagt

SEQ ID NO: 349152 - DNA, 12 bp, Artificial Sequence
  Oligonucleotide primer for the detection of SNP TSC0045942
ttggggtttgga

SEQ ID NO: 349153 - DNA, 12 bp, Artificial Sequence
  Oligonucleotide primer for the detection of SNP TSC0045943
aaacatcatcca

SEQ ID NO: 349154 - DNA, 12 bp, Artificial Sequence
  Oligonucleotide primer for the detection of SNP TSC0045943
aaacatcgtcca

SEQ ID NO: 349155 - DNA, 12 bp, Artificial Sequence
  Oligonucleotide primer for the detection of SNP TSC0045943
cgagtttttgtt

SEQ ID NO: 349156 - DNA, 12 bp, Artificial Sequence
  Oligonucleotide primer for the detection of SNP TSC0045943
caaactcttacc

SEQ ID NO: 349157 - DNA, 12 bp, Artificial Sequence
  Oligonucleotide primer for the detection of SNP TSC0045943
cgaactcttacc

SEQ ID NO: 349158 - DNA, 12 bp, Artificial Sequence
  Oligonucleotide primer for the detection of SNP TSC0045943
aggtatcgttta

SEQ ID NO: 349159 - DNA, 12 bp, Artificial Sequence
  Oligonucleotide primer for the detection of SNP TSC0000553
tcctaactaaca

SEQ ID NO: 349160 - DNA, 12 bp, Artificial Sequence
  Oligonucleotide primer for the detection of SNP TSC0000553
agacggggtttt

SEQ ID NO: 349161 - DNA, 12 bp, Artificial Sequence
  Oligonucleotide primer for the detection of SNP TSC0000553
aaacgaaatttc

SEQ ID NO: 349162 - DNA, 12 bp, Artificial Sequence
  Oligonucleotide primer for the detection of SNP TSC0045946
ccaaaattacac

SEQ ID NO: 349163 - DNA, 12 bp, Artificial Sequence
  Oligonucleotide primer for the detection of SNP TSC0045946
ttgtagtgtagt

SEQ ID NO: 349164 - DNA, 12 bp, Artificial Sequence
  Oligonucleotide primer for the detection of SNP TSC0045946
ctacaatacaat

SEQ ID NO: 349165 - DNA, 12 bp, Artificial Sequence
  Oligonucleotide primer for the detection of SNP TSC0045946
ttaagattgtat

SEQ ID NO: 349166 - DNA, 12 bp, Artificial Sequence
  Oligonucleotide primer for the detection of SNP TSC0045947
aaatttacaaat

SEQ ID NO: 349167 - DNA, 12 bp, Artificial Sequence
  Oligonucleotide primer for the detection of SNP TSC0045947
taagggatttga

SEQ ID NO: 349168 - DNA, 12 bp, Artificial Sequence
  Oligonucleotide primer for the detection of SNP TSC0045948
tattattaaacc

SEQ ID NO: 349169 - DNA, 12 bp, Artificial Sequence
  Oligonucleotide primer for the detection of SNP TSC0045948
ttcatttataaa

SEQ ID NO: 349170 - DNA, 12 bp, Artificial Sequence
  Oligonucleotide primer for the detection of SNP TSC0045948
ttattaagtttt

SEQ ID NO: 349171 - DNA, 12 bp, Artificial Sequence
  Oligonucleotide primer for the detection of SNP TSC0000369
ttcaaaaaacaa

SEQ ID NO: 349172 - DNA, 12 bp, Artificial Sequence
  Oligonucleotide primer for the detection of SNP TSC0000369
ttaattttgaat

SEQ ID NO: 349173 - DNA, 12 bp, Artificial Sequence
  Oligonucleotide primer for the detection of SNP TSC0000369
ctaattctaaat

SEQ ID NO: 349174 - DNA, 12 bp, Artificial Sequence
  Oligonucleotide primer for the detection of SNP TSC0045953
cctaaaacacct

SEQ ID NO: 349175 - DNA, 12 bp, Artificial Sequence
  Oligonucleotide primer for the detection of SNP TSC0045953
agaatattggaa

SEQ ID NO: 349176 - DNA, 12 bp, Artificial Sequence
  Oligonucleotide primer for the detection of SNP TSC0045956
ttatttttgggg

SEQ ID NO: 349177 - DNA, 12 bp, Artificial Sequence
  Oligonucleotide primer for the detection of SNP TSC0045956
ccattcctaaaa

SEQ ID NO: 349178 - DNA, 12 bp, Artificial Sequence
  Oligonucleotide primer for the detection of SNP TSC0045957
taaaaaacctat

SEQ ID NO: 349179 - DNA, 12 bp, Artificial Sequence
  Oligonucleotide primer for the detection of SNP TSC0045959
ttttaaattcct

SEQ ID NO: 349180 - DNA, 12 bp, Artificial Sequence
  Oligonucleotide primer for the detection of SNP TSC0045959
atatagtaatta

SEQ ID NO: 349181 - DNA, 12 bp, Artificial Sequence
  Oligonucleotide primer for the detection of SNP TSC0045963
ttcttcattttt

SEQ ID NO: 349182 - DNA, 12 bp, Artificial Sequence
  Oligonucleotide primer for the detection of SNP TSC0045963
gataaaagatga

SEQ ID NO: 349183 - DNA, 12 bp, Artificial Sequence
  Oligonucleotide primer for the detection of SNP TSC0045964
agtgagtcgtga

SEQ ID NO: 349184 - DNA, 12 bp, Artificial Sequence
  Oligonucleotide primer for the detection of SNP TSC0045964
agtgagttgcga

SEQ ID NO: 349185 - DNA, 12 bp, Artificial Sequence
  Oligonucleotide primer for the detection of SNP TSC0045964
agtgagtcgcga

SEQ ID NO: 349186 - DNA, 12 bp, Artificial Sequence
  Oligonucleotide primer for the detection of SNP TSC0045964
aataaaccacga

SEQ ID NO: 349187 - DNA, 12 bp, Artificial Sequence
  Oligonucleotide primer for the detection of SNP TSC0045964
aataaaccgcaa

SEQ ID NO: 349188 - DNA, 12 bp, Artificial Sequence
  Oligonucleotide primer for the detection of SNP TSC0045964
aataaaccgcga

SEQ ID NO: 349189 - DNA, 12 bp, Artificial Sequence
  Oligonucleotide primer for the detection of SNP TSC0045969
tccaaatatcaa

SEQ ID NO: 349190 - DNA, 12 bp, Artificial Sequence
  Oligonucleotide primer for the detection of SNP TSC0045969
ttgtggttatat

SEQ ID NO: 349191 - DNA, 12 bp, Artificial Sequence
  Oligonucleotide primer for the detection of SNP TSC0045969
taaccacataaa

SEQ ID NO: 349192 - DNA, 12 bp, Artificial Sequence
  Oligonucleotide primer for the detection of SNP TSC0045969
ttttaagtgtta

SEQ ID NO: 349193 - DNA, 12 bp, Artificial Sequence
  Oligonucleotide primer for the detection of SNP TSC0045970
taaaattatttc

SEQ ID NO: 349194 - DNA, 12 bp, Artificial Sequence
  Oligonucleotide primer for the detection of SNP TSC0045970
aatgagttatga

SEQ ID NO: 349195 - DNA, 12 bp, Artificial Sequence
  Oligonucleotide primer for the detection of SNP TSC0045972
taactttataaa

SEQ ID NO: 349196 - DNA, 12 bp, Artificial Sequence
  Oligonucleotide primer for the detection of SNP TSC0045973
caaacttctaac

SEQ ID NO: 349197 - DNA, 12 bp, Artificial Sequence
  Oligonucleotide primer for the detection of SNP TSC0045973
gagaatggttta

SEQ ID NO: 349198 - DNA, 12 bp, Artificial Sequence
  Oligonucleotide primer for the detection of SNP TSC0045974
taataatttaat

SEQ ID NO: 349199 - DNA, 12 bp, Artificial Sequence
  Oligonucleotide primer for the detection of SNP TSC0045974
aataaaaataga

SEQ ID NO: 349200 - DNA, 12 bp, Artificial Sequence
  Oligonucleotide primer for the detection of SNP TSC0045988
tttttaatgttt

SEQ ID NO: 349201 - DNA, 12 bp, Artificial Sequence
  Oligonucleotide primer for the detection of SNP TSC0045988
tctctaatacct

SEQ ID NO: 349202 - DNA, 12 bp, Artificial Sequence
  Oligonucleotide primer for the detection of SNP TSC0045988
tgagaatggaag

SEQ ID NO: 349203 - DNA, 12 bp, Artificial Sequence
  Oligonucleotide primer for the detection of SNP TSC0045992
tttaaaaatctc

SEQ ID NO: 349204 - DNA, 12 bp, Artificial Sequence
  Oligonucleotide primer for the detection of SNP TSC0045992
tattaggaggag

SEQ ID NO: 349205 - DNA, 12 bp, Artificial Sequence
  Oligonucleotide primer for the detection of SNP TSC0045992
tttaggaatttt

SEQ ID NO: 349206 - DNA, 12 bp, Artificial Sequence
  Oligonucleotide primer for the detection of SNP TSC0045994
ataccatactta

SEQ ID NO: 349207 - DNA, 12 bp, Artificial Sequence
  Oligonucleotide primer for the detection of SNP TSC0045994
aatatttagtta

SEQ ID NO: 349208 - DNA, 12 bp, Artificial Sequence
  Oligonucleotide primer for the detection of SNP TSC0045994
aatatttaatca

SEQ ID NO: 349209 - DNA, 12 bp, Artificial Sequence
  Oligonucleotide primer for the detection of SNP TSC0045994
tatgttatattt

SEQ ID NO: 349210 - DNA, 12 bp, Artificial Sequence
  Oligonucleotide primer for the detection of SNP TSC0045997
atttctttctcc

SEQ ID NO: 349211 - DNA, 12 bp, Artificial Sequence
  Oligonucleotide primer for the detection of SNP TSC0045997
gagagaaaaatg

SEQ ID NO: 349212 - DNA, 12 bp, Artificial Sequence
  Oligonucleotide primer for the detection of SNP TSC0045998
ccacactatatt

SEQ ID NO: 349213 - DNA, 12 bp, Artificial Sequence
  Oligonucleotide primer for the detection of SNP TSC0045998
tggtattttgta

SEQ ID NO: 349214 - DNA, 12 bp, Artificial Sequence
  Oligonucleotide primer for the detection of SNP TSC0045998
tggtatttcgta

SEQ ID NO: 349215 - DNA, 12 bp, Artificial Sequence
  Oligonucleotide primer for the detection of SNP TSC0046000
ctcaaatctcaa

SEQ ID NO: 349216 - DNA, 12 bp, Artificial Sequence
  Oligonucleotide primer for the detection of SNP TSC0046000
aaagttaagaag

SEQ ID NO: 349217 - DNA, 12 bp, Artificial Sequence
  Oligonucleotide primer for the detection of SNP TSC0046000
ttagattttagt

SEQ ID NO: 349218 - DNA, 12 bp, Artificial Sequence
  Oligonucleotide primer for the detection of SNP TSC0046001
agttaagaagat

SEQ ID NO: 349219 - DNA, 12 bp, Artificial Sequence
  Oligonucleotide primer for the detection of SNP TSC0046001
tttagattttag

SEQ ID NO: 349220 - DNA, 12 bp, Artificial Sequence
  Oligonucleotide primer for the detection of SNP TSC0046002
tttttattgttg

SEQ ID NO: 349221 - DNA, 12 bp, Artificial Sequence
  Oligonucleotide primer for the detection of SNP TSC0046002
tttttatcgttg

SEQ ID NO: 349222 - DNA, 12 bp, Artificial Sequence
  Oligonucleotide primer for the detection of SNP TSC0046003
ctaattaatacc

SEQ ID NO: 349223 - DNA, 12 bp, Artificial Sequence
  Oligonucleotide primer for the detection of SNP TSC0046003
ttttaatttggg

SEQ ID NO: 349224 - DNA, 12 bp, Artificial Sequence
  Oligonucleotide primer for the detection of SNP TSC0046004
tttaaaacatac

SEQ ID NO: 349225 - DNA, 12 bp, Artificial Sequence
  Oligonucleotide primer for the detection of SNP TSC0046004
gaatattattga

SEQ ID NO: 349226 - DNA, 12 bp, Artificial Sequence
  Oligonucleotide primer for the detection of SNP TSC0046005
atctactttcta

SEQ ID NO: 349227 - DNA, 12 bp, Artificial Sequence
  Oligonucleotide primer for the detection of SNP TSC0046005
gtaaatttatag

SEQ ID NO: 349228 - DNA, 12 bp, Artificial Sequence
  Oligonucleotide primer for the detection of SNP TSC0046005
caaatccataaa

SEQ ID NO: 349229 - DNA, 12 bp, Artificial Sequence
  Oligonucleotide primer for the detection of SNP TSC0046011
tactaaaataaa

SEQ ID NO: 349230 - DNA, 12 bp, Artificial Sequence
  Oligonucleotide primer for the detection of SNP TSC0046011
atatgttattta

SEQ ID NO: 349231 - DNA, 12 bp, Artificial Sequence
  Oligonucleotide primer for the detection of SNP TSC0046011
atacgttattta

SEQ ID NO: 349232 - DNA, 12 bp, Artificial Sequence
  Oligonucleotide primer for the detection of SNP TSC0046011
atacatcaccta

SEQ ID NO: 349233 - DNA, 12 bp, Artificial Sequence
  Oligonucleotide primer for the detection of SNP TSC0046011
atacgtcaccta

SEQ ID NO: 349234 - DNA, 12 bp, Artificial Sequence
  Oligonucleotide primer for the detection of SNP TSC0046011
tgttaaaatgag

SEQ ID NO: 349235 - DNA, 12 bp, Artificial Sequence
  Oligonucleotide primer for the detection of SNP TSC0046012
cctaattattca

SEQ ID NO: 349236 - DNA, 12 bp, Artificial Sequence
  Oligonucleotide primer for the detection of SNP TSC0046012
aggttggagttt

SEQ ID NO: 349237 - DNA, 12 bp, Artificial Sequence
  Oligonucleotide primer for the detection of SNP TSC0046012
ttgattatttat

SEQ ID NO: 349238 - DNA, 12 bp, Artificial Sequence
  Oligonucleotide primer for the detection of SNP TSC0046014
cttaataaattt

SEQ ID NO: 349239 - DNA, 12 bp, Artificial Sequence
  Oligonucleotide primer for the detection of SNP TSC0046017
aaataataaact

SEQ ID NO: 349240 - DNA, 12 bp, Artificial Sequence
  Oligonucleotide primer for the detection of SNP TSC0046017
aagtatataata

SEQ ID NO: 349241 - DNA, 12 bp, Artificial Sequence
  Oligonucleotide primer for the detection of SNP TSC0046017
aaatatacaaca

SEQ ID NO: 349242 - DNA, 12 bp, Artificial Sequence
  Oligonucleotide primer for the detection of SNP TSC0046017
gaatgatgagtt

SEQ ID NO: 349243 - DNA, 12 bp, Artificial Sequence
  Oligonucleotide primer for the detection of SNP TSC0046018
taaactaactac

SEQ ID NO: 349244 - DNA, 12 bp, Artificial Sequence
  Oligonucleotide primer for the detection of SNP TSC0046019
ctacttacacta

SEQ ID NO: 349245 - DNA, 12 bp, Artificial Sequence
  Oligonucleotide primer for the detection of SNP TSC0046019
ggtttgtttata

SEQ ID NO: 349246 - DNA, 12 bp, Artificial Sequence
  Oligonucleotide primer for the detection of SNP TSC0046019
aacttacttaca

SEQ ID NO: 349247 - DNA, 12 bp, Artificial Sequence
  Oligonucleotide primer for the detection of SNP TSC0046020
ttactataactt

SEQ ID NO: 349248 - DNA, 12 bp, Artificial Sequence
  Oligonucleotide primer for the detection of SNP TSC0046020
catccaaaacta

SEQ ID NO: 349249 - DNA, 12 bp, Artificial Sequence
  Oligonucleotide primer for the detection of SNP TSC0046021
ttcttaattatc

SEQ ID NO: 349250 - DNA, 12 bp, Artificial Sequence
  Oligonucleotide primer for the detection of SNP TSC0046021
aaatattttaag

SEQ ID NO: 349251 - DNA, 12 bp, Artificial Sequence
  Oligonucleotide primer for the detection of SNP TSC0046027
aaaaacttaaac

SEQ ID NO: 349252 - DNA, 12 bp, Artificial Sequence
  Oligonucleotide primer for the detection of SNP TSC0046027
tttttagaatta

SEQ ID NO: 349253 - DNA, 12 bp, Artificial Sequence
  Oligonucleotide primer for the detection of SNP TSC0046029
acctaattattt

SEQ ID NO: 349254 - DNA, 12 bp, Artificial Sequence
  Oligonucleotide primer for the detection of SNP TSC0046029
taatatgtttta

SEQ ID NO: 349255 - DNA, 12 bp, Artificial Sequence
  Oligonucleotide primer for the detection of SNP TSC0046030
taaatcctaaac

SEQ ID NO: 349256 - DNA, 12 bp, Artificial Sequence
  Oligonucleotide primer for the detection of SNP TSC0046030
gaattattaggg

SEQ ID NO: 349257 - DNA, 12 bp, Artificial Sequence
  Oligonucleotide primer for the detection of SNP TSC0046031
aaaaacctcatt

SEQ ID NO: 349258 - DNA, 12 bp, Artificial Sequence
  Oligonucleotide primer for the detection of SNP TSC0046031
tagatttaggaa

SEQ ID NO: 349259 - DNA, 12 bp, Artificial Sequence
  Oligonucleotide primer for the detection of SNP TSC0046035
tcactcctatac

SEQ ID NO: 349260 - DNA, 12 bp, Artificial Sequence
  Oligonucleotide primer for the detection of SNP TSC0046035
ttgtttggagtg

SEQ ID NO: 349261 - DNA, 12 bp, Artificial Sequence
  Oligonucleotide primer for the detection of SNP TSC0046035
tcgtttggagtg

SEQ ID NO: 349262 - DNA, 12 bp, Artificial Sequence
  Oligonucleotide primer for the detection of SNP TSC0046035
cgtctaaaataa

SEQ ID NO: 349263 - DNA, 12 bp, Artificial Sequence
  Oligonucleotide primer for the detection of SNP TSC0046035
ttatttttatgc

SEQ ID NO: 349264 - DNA, 12 bp, Artificial Sequence
  Oligonucleotide primer for the detection of SNP TSC0046036
gctacaaaaaaa

SEQ ID NO: 349265 - DNA, 12 bp, Artificial Sequence
  Oligonucleotide primer for the detection of SNP TSC0046036
tttgtgtggagt

SEQ ID NO: 349266 - DNA, 12 bp, Artificial Sequence
  Oligonucleotide primer for the detection of SNP TSC0046036
tttatataaaac

SEQ ID NO: 349267 - DNA, 12 bp, Artificial Sequence
  Oligonucleotide primer for the detection of SNP TSC0046036
gttataggaaaa

SEQ ID NO: 349268 - DNA, 12 bp, Artificial Sequence
  Oligonucleotide primer for the detection of SNP TSC0046040
accactttaatt

SEQ ID NO: 349269 - DNA, 12 bp, Artificial Sequence
  Oligonucleotide primer for the detection of SNP TSC0046040
tcatttactcta

SEQ ID NO: 349270 - DNA, 12 bp, Artificial Sequence
  Oligonucleotide primer for the detection of SNP TSC0046040
attattttggtt

SEQ ID NO: 349271 - DNA, 12 bp, Artificial Sequence
  Oligonucleotide primer for the detection of SNP TSC0046043
ctacttaacatt

SEQ ID NO: 349272 - DNA, 12 bp, Artificial Sequence
  Oligonucleotide primer for the detection of SNP TSC0046043
ctacttaacgtt

SEQ ID NO: 349273 - DNA, 12 bp, Artificial Sequence
  Oligonucleotide primer for the detection of SNP TSC0046043
tttttgagaggg

SEQ ID NO: 349274 - DNA, 12 bp, Artificial Sequence
  Oligonucleotide primer for the detection of SNP TSC0046043
ttatttaatgtt

SEQ ID NO: 349275 - DNA, 12 bp, Artificial Sequence
  Oligonucleotide primer for the detection of SNP TSC0046043
ttatttaacgtt

SEQ ID NO: 349276 - DNA, 12 bp, Artificial Sequence
  Oligonucleotide primer for the detection of SNP TSC0046044
tatccctaaacc

SEQ ID NO: 349277 - DNA, 12 bp, Artificial Sequence
  Oligonucleotide primer for the detection of SNP TSC0046044
tttaggttatgg

SEQ ID NO: 349278 - DNA, 12 bp, Artificial Sequence
  Oligonucleotide primer for the detection of SNP TSC0046045
cctcataacacc

SEQ ID NO: 349279 - DNA, 12 bp, Artificial Sequence
  Oligonucleotide primer for the detection of SNP TSC0046045
cctcgtaacacc

SEQ ID NO: 349280 - DNA, 12 bp, Artificial Sequence
  Oligonucleotide primer for the detection of SNP TSC0046048
atacttaaaaaa

SEQ ID NO: 349281 - DNA, 12 bp, Artificial Sequence
  Oligonucleotide primer for the detection of SNP TSC0046048
taaaactatttt

SEQ ID NO: 349282 - DNA, 12 bp, Artificial Sequence
  Oligonucleotide primer for the detection of SNP TSC0046048
atgtttagagaa

SEQ ID NO: 349283 - DNA, 12 bp, Artificial Sequence
  Oligonucleotide primer for the detection of SNP TSC0046049
cttctattaact

SEQ ID NO: 349284 - DNA, 12 bp, Artificial Sequence
  Oligonucleotide primer for the detection of SNP TSC0046049
tattttttgatg

SEQ ID NO: 349285 - DNA, 12 bp, Artificial Sequence
  Oligonucleotide primer for the detection of SNP TSC0046050
tctaaaatcact

SEQ ID NO: 349286 - DNA, 12 bp, Artificial Sequence
  Oligonucleotide primer for the detection of SNP TSC0046050
tagtagaatgta

SEQ ID NO: 349287 - DNA, 12 bp, Artificial Sequence
  Oligonucleotide primer for the detection of SNP TSC0046050
caacaaaataca

SEQ ID NO: 349288 - DNA, 12 bp, Artificial Sequence
  Oligonucleotide primer for the detection of SNP TSC0046051
taattatccttt

SEQ ID NO: 349289 - DNA, 12 bp, Artificial Sequence
  Oligonucleotide primer for the detection of SNP TSC0046052
tttttttaatcc

SEQ ID NO: 349290 - DNA, 12 bp, Artificial Sequence
  Oligonucleotide primer for the detection of SNP TSC0046052
tagtttaataaa

SEQ ID NO: 349291 - DNA, 12 bp, Artificial Sequence
  Oligonucleotide primer for the detection of SNP TSC0046054
aaatattttcac

SEQ ID NO: 349292 - DNA, 12 bp, Artificial Sequence
  Oligonucleotide primer for the detection of SNP TSC0046054
tatgttttgaag

SEQ ID NO: 349293 - DNA, 12 bp, Artificial Sequence
  Oligonucleotide primer for the detection of SNP TSC0046054
tacgttttgaag

SEQ ID NO: 349294 - DNA, 12 bp, Artificial Sequence
  Oligonucleotide primer for the detection of SNP TSC0046056
ataataaattat

SEQ ID NO: 349295 - DNA, 12 bp, Artificial Sequence
  Oligonucleotide primer for the detection of SNP TSC0046056
gttattttttga

SEQ ID NO: 349296 - DNA, 12 bp, Artificial Sequence
  Oligonucleotide primer for the detection of SNP TSC0046057
actctcactccc

SEQ ID NO: 349297 - DNA, 12 bp, Artificial Sequence
  Oligonucleotide primer for the detection of SNP TSC0046057
gaataggggtta

SEQ ID NO: 349298 - DNA, 12 bp, Artificial Sequence
  Oligonucleotide primer for the detection of SNP TSC0046058
attggtgtgtaa

SEQ ID NO: 349299 - DNA, 12 bp, Artificial Sequence
  Oligonucleotide primer for the detection of SNP TSC0046059
gtataaattaac

SEQ ID NO: 349300 - DNA, 12 bp, Artificial Sequence
  Oligonucleotide primer for the detection of SNP TSC0046059
ttataattagta

SEQ ID NO: 349301 - DNA, 12 bp, Artificial Sequence
  Oligonucleotide primer for the detection of SNP TSC0046061
tctaacattttt

SEQ ID NO: 349302 - DNA, 12 bp, Artificial Sequence
  Oligonucleotide primer for the detection of SNP TSC0046061
ttagatgtgata

SEQ ID NO: 349303 - DNA, 12 bp, Artificial Sequence
  Oligonucleotide primer for the detection of SNP TSC0046062
taccctaaccca

SEQ ID NO: 349304 - DNA, 12 bp, Artificial Sequence
  Oligonucleotide primer for the detection of SNP TSC0046062
taaccctccacc

SEQ ID NO: 349305 - DNA, 12 bp, Artificial Sequence
  Oligonucleotide primer for the detection of SNP TSC0046062
attttggtttat

SEQ ID NO: 349306 - DNA, 12 bp, Artificial Sequence
  Oligonucleotide primer for the detection of SNP TSC0046063
ccactcatacac

SEQ ID NO: 349307 - DNA, 12 bp, Artificial Sequence
  Oligonucleotide primer for the detection of SNP TSC0046063
ccactcgtacac

SEQ ID NO: 349308 - DNA, 12 bp, Artificial Sequence
  Oligonucleotide primer for the detection of SNP TSC0046063
gttattaagaag

SEQ ID NO: 349309 - DNA, 12 bp, Artificial Sequence
  Oligonucleotide primer for the detection of SNP TSC0046064
acataaataaaa

SEQ ID NO: 349310 - DNA, 12 bp, Artificial Sequence
  Oligonucleotide primer for the detection of SNP TSC0046064
agattttgtgta

SEQ ID NO: 349311 - DNA, 12 bp, Artificial Sequence
  Oligonucleotide primer for the detection of SNP TSC0046064
aactctatacaa

SEQ ID NO: 349312 - DNA, 12 bp, Artificial Sequence
  Oligonucleotide primer for the detection of SNP TSC0046064
tataagtaaaat

SEQ ID NO: 349313 - DNA, 12 bp, Artificial Sequence
  Oligonucleotide primer for the detection of SNP TSC0046065
ttttgaatttat

SEQ ID NO: 349314 - DNA, 12 bp, Artificial Sequence
  Oligonucleotide primer for the detection of SNP TSC0046065
tttttaaactca

SEQ ID NO: 349315 - DNA, 12 bp, Artificial Sequence
  Oligonucleotide primer for the detection of SNP TSC0046065
tttatttaaatt

SEQ ID NO: 349316 - DNA, 12 bp, Artificial Sequence
  Oligonucleotide primer for the detection of SNP TSC0046067
ctaatataactt

SEQ ID NO: 349317 - DNA, 12 bp, Artificial Sequence
  Oligonucleotide primer for the detection of SNP TSC0046067
aagtaataattt

SEQ ID NO: 349318 - DNA, 12 bp, Artificial Sequence
  Oligonukleotid-Primer
aacaacaaccta

SEQ ID NO: 349319 - DNA, 12 bp, Artificial Sequence
  Oligonucleotide primer for the detection of SNP TSC0046067
ttggtgtgattt

SEQ ID NO: 349320 - DNA, 12 bp, Artificial Sequence
  Oligonucleotide primer for the detection of SNP TSC0046068
ggattatttgaa

SEQ ID NO: 349321 - DNA, 12 bp, Artificial Sequence
  Oligonucleotide primer for the detection of SNP TSC0046068
ggattattcgaa

SEQ ID NO: 349322 - DNA, 12 bp, Artificial Sequence
  Oligonucleotide primer for the detection of SNP TSC0046068
aaattattcaaa

SEQ ID NO: 349323 - DNA, 12 bp, Artificial Sequence
  Oligonucleotide primer for the detection of SNP TSC0046068
aaattattcgaa

SEQ ID NO: 349324 - DNA, 12 bp, Artificial Sequence
  Oligonucleotide primer for the detection of SNP TSC0046069
ttaattttatct

SEQ ID NO: 349325 - DNA, 12 bp, Artificial Sequence
  Oligonucleotide primer for the detection of SNP TSC0046069
gtgggagaaaga

SEQ ID NO: 349326 - DNA, 12 bp, Artificial Sequence
  Oligonucleotide primer for the detection of SNP TSC0046070
tacaataatacc

SEQ ID NO: 349327 - DNA, 12 bp, Artificial Sequence
  Oligonucleotide primer for the detection of SNP TSC0046070
attgtttatttg

SEQ ID NO: 349328 - DNA, 12 bp, Artificial Sequence
  Oligonucleotide primer for the detection of SNP TSC0046072
ctcaccctcata

SEQ ID NO: 349329 - DNA, 12 bp, Artificial Sequence
  Oligonucleotide primer for the detection of SNP TSC0046073
taaacataatat

SEQ ID NO: 349330 - DNA, 12 bp, Artificial Sequence
  Oligonucleotide primer for the detection of SNP TSC0046073
atttttgtggaa

SEQ ID NO: 349331 - DNA, 12 bp, Artificial Sequence
  Oligonucleotide primer for the detection of SNP TSC0046074
atttaccaatcc

SEQ ID NO: 349332 - DNA, 12 bp, Artificial Sequence
  Oligonucleotide primer for the detection of SNP TSC0046074
atttaccgatcc

SEQ ID NO: 349333 - DNA, 12 bp, Artificial Sequence
  Oligonucleotide primer for the detection of SNP TSC0046074
atattatagaga

SEQ ID NO: 349334 - DNA, 12 bp, Artificial Sequence
  Oligonucleotide primer for the detection of SNP TSC0046075
aaaacataacta

SEQ ID NO: 349335 - DNA, 12 bp, Artificial Sequence
  Oligonucleotide primer for the detection of SNP TSC0046075
gaataatttaaa

SEQ ID NO: 349336 - DNA, 12 bp, Artificial Sequence
  Oligonucleotide primer for the detection of SNP TSC0046075
aaacaatctaaa

SEQ ID NO: 349337 - DNA, 12 bp, Artificial Sequence
  Oligonucleotide primer for the detection of SNP TSC0046075
aagaatatgatt

SEQ ID NO: 349338 - DNA, 12 bp, Artificial Sequence
  Oligonucleotide primer for the detection of SNP TSC0046078
cttttacttaaa

SEQ ID NO: 349339 - DNA, 12 bp, Artificial Sequence
  Oligonucleotide primer for the detection of SNP TSC0046078
tttaattaaatt

SEQ ID NO: 349340 - DNA, 12 bp, Artificial Sequence
  Oligonucleotide primer for the detection of SNP TSC0046078
tcaattaaatta

SEQ ID NO: 349341 - DNA, 12 bp, Artificial Sequence
  Oligonucleotide primer for the detection of SNP TSC0046081
ctttaaatacac

SEQ ID NO: 349342 - DNA, 12 bp, Artificial Sequence
  Oligonucleotide primer for the detection of SNP TSC0046081
tttaggatatta

SEQ ID NO: 349343 - DNA, 12 bp, Artificial Sequence
  Oligonucleotide primer for the detection of SNP TSC0046082
ctataataacac

SEQ ID NO: 349344 - DNA, 12 bp, Artificial Sequence
  Oligonucleotide primer for the detection of SNP TSC0046082
agaggtttatta

SEQ ID NO: 349345 - DNA, 12 bp, Artificial Sequence
  Oligonucleotide primer for the detection of SNP TSC0046082
aaaaacccacca

SEQ ID NO: 349346 - DNA, 12 bp, Artificial Sequence
  Oligonucleotide primer for the detection of SNP TSC0046082
ttgtggtgatat

SEQ ID NO: 349347 - DNA, 12 bp, Artificial Sequence
  Oligonucleotide primer for the detection of SNP TSC0046083
aacaccaacacc

SEQ ID NO: 349348 - DNA, 12 bp, Artificial Sequence
  Oligonucleotide primer for the detection of SNP TSC0046083
agtgttattata

SEQ ID NO: 349349 - DNA, 12 bp, Artificial Sequence
  Oligonucleotide primer for the detection of SNP TSC0046084
accaaaataaaa

SEQ ID NO: 349350 - DNA, 12 bp, Artificial Sequence
  Oligonucleotide primer for the detection of SNP TSC0046084
attagtattggt

SEQ ID NO: 349351 - DNA, 12 bp, Artificial Sequence
  Oligonucleotide primer for the detection of SNP TSC0046084
aatcaacactaa

SEQ ID NO: 349352 - DNA, 12 bp, Artificial Sequence
  Oligonucleotide primer for the detection of SNP TSC0046084
gttaaaatgaga

SEQ ID NO: 349353 - DNA, 12 bp, Artificial Sequence
  Oligonucleotide primer for the detection of SNP TSC0046085
atcatataatca

SEQ ID NO: 349354 - DNA, 12 bp, Artificial Sequence
  Oligonucleotide primer for the detection of SNP TSC0046085
atcgtataatca

SEQ ID NO: 349355 - DNA, 12 bp, Artificial Sequence
  Oligonucleotide primer for the detection of SNP TSC0046085
tgttattattac

SEQ ID NO: 349356 - DNA, 12 bp, Artificial Sequence
  Oligonucleotide primer for the detection of SNP TSC0046085
ctattatcacca

SEQ ID NO: 349357 - DNA, 12 bp, Artificial Sequence
  Oligonucleotide primer for the detection of SNP TSC0046085
attgtgtgatta

SEQ ID NO: 349358 - DNA, 12 bp, Artificial Sequence
  Oligonucleotide primer for the detection of SNP TSC0046085
atcgtgtgatta

SEQ ID NO: 349359 - DNA, 12 bp, Artificial Sequence
  Oligonucleotide primer for the detection of SNP TSC0007230
atttctctcctc

SEQ ID NO: 349360 - DNA, 12 bp, Artificial Sequence
  Oligonucleotide primer for the detection of SNP TSC0007230
tgaaggggggag

SEQ ID NO: 349361 - DNA, 12 bp, Artificial Sequence
  Oligonucleotide primer for the detection of SNP TSC0046088
ttatctaccaaa

SEQ ID NO: 349362 - DNA, 12 bp, Artificial Sequence
  Oligonucleotide primer for the detection of SNP TSC0046088
ttatctaccgaa

SEQ ID NO: 349363 - DNA, 12 bp, Artificial Sequence
  Oligonucleotide primer for the detection of SNP TSC0046088
ttatttgttggg

SEQ ID NO: 349364 - DNA, 12 bp, Artificial Sequence
  Oligonucleotide primer for the detection of SNP TSC0046088
ttatttgtcggg

SEQ ID NO: 349365 - DNA, 12 bp, Artificial Sequence
  Oligonucleotide primer for the detection of SNP TSC0046089
cttttctatttt

SEQ ID NO: 349366 - DNA, 12 bp, Artificial Sequence
  Oligonucleotide primer for the detection of SNP TSC0046089
aagagaaaaaaa

SEQ ID NO: 349367 - DNA, 12 bp, Artificial Sequence
  Oligonucleotide primer for the detection of SNP TSC0046091
caccatatatat

SEQ ID NO: 349368 - DNA, 12 bp, Artificial Sequence
  Oligonucleotide primer for the detection of SNP TSC0046091
aatattataggg

SEQ ID NO: 349369 - DNA, 12 bp, Artificial Sequence
  Oligonucleotide primer for the detection of SNP TSC0046092
atatataaacaa

SEQ ID NO: 349370 - DNA, 12 bp, Artificial Sequence
  Oligonucleotide primer for the detection of SNP TSC0046092
gaataatattgt

SEQ ID NO: 349371 - DNA, 12 bp, Artificial Sequence
  Oligonucleotide primer for the detection of SNP TSC0046092
gaataatatcgt

SEQ ID NO: 349372 - DNA, 12 bp, Artificial Sequence
  Oligonucleotide primer for the detection of SNP TSC0046092
aaataatatcac

SEQ ID NO: 349373 - DNA, 12 bp, Artificial Sequence
  Oligonucleotide primer for the detection of SNP TSC0046092
aaataatatcgc

SEQ ID NO: 349374 - DNA, 12 bp, Artificial Sequence
  Oligonucleotide primer for the detection of SNP TSC0046092
gtatgtaaatag

SEQ ID NO: 349375 - DNA, 12 bp, Artificial Sequence
  Oligonucleotide primer for the detection of SNP TSC0046101
ctaatctctaaa

SEQ ID NO: 349376 - DNA, 12 bp, Artificial Sequence
  Oligonucleotide primer for the detection of SNP TSC0046101
attttatttttc

SEQ ID NO: 349377 - DNA, 12 bp, Artificial Sequence
  Oligonucleotide primer for the detection of SNP TSC0046101
acctcattcccc

SEQ ID NO: 349378 - DNA, 12 bp, Artificial Sequence
  Oligonucleotide primer for the detection of SNP TSC0046102
aaataacaccac

SEQ ID NO: 349379 - DNA, 12 bp, Artificial Sequence
  Oligonucleotide primer for the detection of SNP TSC0046102
aaataacgccac

SEQ ID NO: 349380 - DNA, 12 bp, Artificial Sequence
  Oligonucleotide primer for the detection of SNP TSC0046102
tttgatagttga

SEQ ID NO: 349381 - DNA, 12 bp, Artificial Sequence
  Oligonucleotide primer for the detection of SNP TSC0046103
tttattttgaat

SEQ ID NO: 349382 - DNA, 12 bp, Artificial Sequence
  Oligonucleotide primer for the detection of SNP TSC0046103
cctattctaaat

SEQ ID NO: 349383 - DNA, 12 bp, Artificial Sequence
  Oligonucleotide primer for the detection of SNP TSC0046103
agagatgtagga

SEQ ID NO: 349384 - DNA, 12 bp, Artificial Sequence
  Oligonucleotide primer for the detection of SNP TSC0046104
taggtttattgg

SEQ ID NO: 349385 - DNA, 12 bp, Artificial Sequence
  Oligonucleotide primer for the detection of SNP TSC0046104
taaatttattaa

SEQ ID NO: 349386 - DNA, 12 bp, Artificial Sequence
  Oligonucleotide primer for the detection of SNP TSC0046105
tcttcaatttaa

SEQ ID NO: 349387 - DNA, 12 bp, Artificial Sequence
  Oligonucleotide primer for the detection of SNP TSC0046105
aaattggaaata

SEQ ID NO: 349388 - DNA, 12 bp, Artificial Sequence
  Oligonucleotide primer for the detection of SNP TSC0046105
tttttaatttag

SEQ ID NO: 349389 - DNA, 12 bp, Artificial Sequence
  Oligonucleotide primer for the detection of SNP TSC0046106
taacttttcaaa

SEQ ID NO: 349390 - DNA, 12 bp, Artificial Sequence
  Oligonucleotide primer for the detection of SNP TSC0046106
cccttaatttta

SEQ ID NO: 349391 - DNA, 12 bp, Artificial Sequence
  Oligonucleotide primer for the detection of SNP TSC0046106
tggttttttaaa

SEQ ID NO: 349392 - DNA, 12 bp, Artificial Sequence
  Oligonucleotide primer for the detection of SNP TSC0006524
aaaaactatcct

SEQ ID NO: 349393 - DNA, 12 bp, Artificial Sequence
  Oligonucleotide primer for the detection of SNP TSC0006524
tgataaattatg

SEQ ID NO: 349394 - DNA, 12 bp, Artificial Sequence
  Oligonucleotide primer for the detection of SNP TSC0046109
tatataaattaa

SEQ ID NO: 349395 - DNA, 12 bp, Artificial Sequence
  Oligonucleotide primer for the detection of SNP TSC0046109
gaagaaaatttt

SEQ ID NO: 349396 - DNA, 12 bp, Artificial Sequence
  Oligonucleotide primer for the detection of SNP TSC0046110
aaatttcataac

SEQ ID NO: 349397 - DNA, 12 bp, Artificial Sequence
  Oligonucleotide primer for the detection of SNP TSC0046110
aaatttcgtaac

SEQ ID NO: 349398 - DNA, 12 bp, Artificial Sequence
  Oligonucleotide primer for the detection of SNP TSC0046110
cttttaaattct

SEQ ID NO: 349399 - DNA, 12 bp, Artificial Sequence
  Oligonucleotide primer for the detection of SNP TSC0046110
ggattttgtgat

SEQ ID NO: 349400 - DNA, 12 bp, Artificial Sequence
  Oligonucleotide primer for the detection of SNP TSC0046110
ggatttcgtgat

SEQ ID NO: 349401 - DNA, 12 bp, Artificial Sequence
  Oligonucleotide primer for the detection of SNP TSC0046116
caactttataat

SEQ ID NO: 349402 - DNA, 12 bp, Artificial Sequence
  Oligonucleotide primer for the detection of SNP TSC0046116
aattttaatata

SEQ ID NO: 349403 - DNA, 12 bp, Artificial Sequence
  Oligonucleotide primer for the detection of SNP TSC0046116
aatcttaacaca

SEQ ID NO: 349404 - DNA, 12 bp, Artificial Sequence
  Oligonucleotide primer for the detection of SNP TSC0046116
tagttttataat

SEQ ID NO: 349405 - DNA, 12 bp, Artificial Sequence
  Oligonucleotide primer for the detection of SNP TSC0046117
aaaaaaccatta

SEQ ID NO: 349406 - DNA, 12 bp, Artificial Sequence
  Oligonucleotide primer for the detection of SNP TSC0046117
gggaagttatta

SEQ ID NO: 349407 - DNA, 12 bp, Artificial Sequence
  Oligonucleotide primer for the detection of SNP TSC0046121
aaccttaaattt

SEQ ID NO: 349408 - DNA, 12 bp, Artificial Sequence
  Oligonucleotide primer for the detection of SNP TSC0046124
aatccaaaaatc

SEQ ID NO: 349409 - DNA, 12 bp, Artificial Sequence
  Oligonucleotide primer for the detection of SNP TSC0046124
tgattttttgta

SEQ ID NO: 349410 - DNA, 12 bp, Artificial Sequence
  Oligonucleotide primer for the detection of SNP TSC0046126
atcctttactat

SEQ ID NO: 349411 - DNA, 12 bp, Artificial Sequence
  Oligonucleotide primer for the detection of SNP TSC0046126
gaagattaagag

SEQ ID NO: 349412 - DNA, 12 bp, Artificial Sequence
  Oligonucleotide primer for the detection of SNP TSC0046127
ggataatagaga

SEQ ID NO: 349413 - DNA, 12 bp, Artificial Sequence
  Oligonucleotide primer for the detection of SNP TSC0046128
aataattctcgt

SEQ ID NO: 349414 - DNA, 12 bp, Artificial Sequence
  Oligonucleotide primer for the detection of SNP TSC0010682
cattattcccct

SEQ ID NO: 349415 - DNA, 12 bp, Artificial Sequence
  Oligonucleotide primer for the detection of SNP TSC0010683
acattcttcttc

SEQ ID NO: 349416 - DNA, 12 bp, Artificial Sequence
  Oligonucleotide primer for the detection of SNP TSC0010684
aactcaatttat

SEQ ID NO: 349417 - DNA, 12 bp, Artificial Sequence
  Oligonucleotide primer for the detection of SNP TSC0010684
aggtattaagaa

SEQ ID NO: 349418 - DNA, 12 bp, Artificial Sequence
  Oligonucleotide primer for the detection of SNP TSC0046130
caaaaacactat

SEQ ID NO: 349419 - DNA, 12 bp, Artificial Sequence
  Oligonucleotide primer for the detection of SNP TSC0046130
tttatttagata

SEQ ID NO: 349420 - DNA, 12 bp, Artificial Sequence
  Oligonucleotide primer for the detection of SNP TSC0046131
aattaccataac

SEQ ID NO: 349421 - DNA, 12 bp, Artificial Sequence
  Oligonucleotide primer for the detection of SNP TSC0046131
attatattgtaa

SEQ ID NO: 349422 - DNA, 12 bp, Artificial Sequence
  Oligonucleotide primer for the detection of SNP TSC0046131
attatatcgtaa

SEQ ID NO: 349423 - DNA, 12 bp, Artificial Sequence
  Oligonucleotide primer for the detection of SNP TSC0046132
aacaactaaatt

SEQ ID NO: 349424 - DNA, 12 bp, Artificial Sequence
  Oligonucleotide primer for the detection of SNP TSC0046132
agaaaagttata

SEQ ID NO: 349425 - DNA, 12 bp, Artificial Sequence
  Oligonucleotide primer for the detection of SNP TSC0046137
caccataccaaa

SEQ ID NO: 349426 - DNA, 12 bp, Artificial Sequence
  Oligonucleotide primer for the detection of SNP TSC0046137
aattttaaaaat

SEQ ID NO: 349427 - DNA, 12 bp, Artificial Sequence
  Oligonucleotide primer for the detection of SNP TSC0046137
tattatgttagg

SEQ ID NO: 349428 - DNA, 12 bp, Artificial Sequence
  Oligonucleotide primer for the detection of SNP TSC0046138
tttaaataatac

SEQ ID NO: 349429 - DNA, 12 bp, Artificial Sequence
  Oligonucleotide primer for the detection of SNP TSC0046139
caaacataccac

SEQ ID NO: 349430 - DNA, 12 bp, Artificial Sequence
  Oligonucleotide primer for the detection of SNP TSC0046139
caaacgtaccac

SEQ ID NO: 349431 - DNA, 12 bp, Artificial Sequence
  Oligonucleotide primer for the detection of SNP TSC0046139
attagttaagtg

SEQ ID NO: 349432 - DNA, 12 bp, Artificial Sequence
  Oligonucleotide primer for the detection of SNP TSC0046139
atcaaccaaata

SEQ ID NO: 349433 - DNA, 12 bp, Artificial Sequence
  Oligonucleotide primer for the detection of SNP TSC0046139
taggtgtgttat

SEQ ID NO: 349434 - DNA, 12 bp, Artificial Sequence
  Oligonucleotide primer for the detection of SNP TSC0046139
taggcgtgttat

SEQ ID NO: 349435 - DNA, 12 bp, Artificial Sequence
  Oligonucleotide primer for the detection of SNP TSC0046140
taagttgtttta

SEQ ID NO: 349436 - DNA, 12 bp, Artificial Sequence
  Oligonucleotide primer for the detection of SNP TSC0046141
tcctcaaattct

SEQ ID NO: 349437 - DNA, 12 bp, Artificial Sequence
  Oligonucleotide primer for the detection of SNP TSC0046141
aggttataatta

SEQ ID NO: 349438 - DNA, 12 bp, Artificial Sequence
  Oligonucleotide primer for the detection of SNP TSC0046144
ccactactcttc

SEQ ID NO: 349439 - DNA, 12 bp, Artificial Sequence
  Oligonucleotide primer for the detection of SNP TSC0046144
ggttattttata

SEQ ID NO: 349440 - DNA, 12 bp, Artificial Sequence
  Oligonucleotide primer for the detection of SNP TSC0046145
ttagttggttgt

SEQ ID NO: 349441 - DNA, 12 bp, Artificial Sequence
  Oligonucleotide primer for the detection of SNP TSC0046145
tcaattaattat

SEQ ID NO: 349442 - DNA, 12 bp, Artificial Sequence
  Oligonucleotide primer for the detection of SNP TSC0046145
taagaaaatata

SEQ ID NO: 349443 - DNA, 12 bp, Artificial Sequence
  Oligonucleotide primer for the detection of SNP TSC0046146
actacaaacata

SEQ ID NO: 349444 - DNA, 12 bp, Artificial Sequence
  Oligonucleotide primer for the detection of SNP TSC0046146
actacaaacgta

SEQ ID NO: 349445 - DNA, 12 bp, Artificial Sequence
  Oligonucleotide primer for the detection of SNP TSC0046147
ctttctcaaaat

SEQ ID NO: 349446 - DNA, 12 bp, Artificial Sequence
  Oligonucleotide primer for the detection of SNP TSC0046147
tgtggtaaagga

SEQ ID NO: 349447 - DNA, 12 bp, Artificial Sequence
  Oligonucleotide primer for the detection of SNP TSC0046148
catacaattaat

SEQ ID NO: 349448 - DNA, 12 bp, Artificial Sequence
  Oligonucleotide primer for the detection of SNP TSC0046149
cctaaacaaaac

SEQ ID NO: 349449 - DNA, 12 bp, Artificial Sequence
  Oligonucleotide primer for the detection of SNP TSC0046149
aattaagttatg

SEQ ID NO: 349450 - DNA, 12 bp, Artificial Sequence
  Oligonucleotide primer for the detection of SNP TSC0046149
aattaaaccata

SEQ ID NO: 349451 - DNA, 12 bp, Artificial Sequence
  Oligonucleotide primer for the detection of SNP TSC0046149
tttgaatagagt

SEQ ID NO: 349452 - DNA, 12 bp, Artificial Sequence
  Oligonucleotide primer for the detection of SNP TSC0046150
tatcacaaatac

SEQ ID NO: 349453 - DNA, 12 bp, Artificial Sequence
  Oligonucleotide primer for the detection of SNP TSC0046150
tatcacgaatac

SEQ ID NO: 349454 - DNA, 12 bp, Artificial Sequence
  Oligonucleotide primer for the detection of SNP TSC0046150
taaagttaagga

SEQ ID NO: 349455 - DNA, 12 bp, Artificial Sequence
  Oligonucleotide primer for the detection of SNP TSC0046152
ttcataatactt

SEQ ID NO: 349456 - DNA, 12 bp, Artificial Sequence
  Oligonucleotide primer for the detection of SNP TSC0046152
tttaattggtga

SEQ ID NO: 349457 - DNA, 12 bp, Artificial Sequence
  Oligonucleotide primer for the detection of SNP TSC0046153
tctccataacct

SEQ ID NO: 349458 - DNA, 12 bp, Artificial Sequence
  Oligonucleotide primer for the detection of SNP TSC0046153
aatagatgttgg

SEQ ID NO: 349459 - DNA, 12 bp, Artificial Sequence
  Oligonucleotide primer for the detection of SNP TSC0046154
tatttcttaact

SEQ ID NO: 349460 - DNA, 12 bp, Artificial Sequence
  Oligonucleotide primer for the detection of SNP TSC0046154
taaagaaaaaaa

SEQ ID NO: 349461 - DNA, 12 bp, Artificial Sequence
  Oligonucleotide primer for the detection of SNP TSC0046156
tatatgtatttt

SEQ ID NO: 349462 - DNA, 12 bp, Artificial Sequence
  Oligonucleotide primer for the detection of SNP TSC0046156
ttattttaagtt

SEQ ID NO: 349463 - DNA, 12 bp, Artificial Sequence
  Oligonucleotide primer for the detection of SNP TSC0046157
acaccaaacttt

SEQ ID NO: 349464 - DNA, 12 bp, Artificial Sequence
  Oligonucleotide primer for the detection of SNP TSC0046157
ttaaattaaatg

SEQ ID NO: 349465 - DNA, 12 bp, Artificial Sequence
  Oligonucleotide primer for the detection of SNP TSC0046158
tttaaattaaat

SEQ ID NO: 349466 - DNA, 12 bp, Artificial Sequence
  Oligonucleotide primer for the detection of SNP TSC0046158
tccaaactaaat

SEQ ID NO: 349467 - DNA, 12 bp, Artificial Sequence
  Oligonucleotide primer for the detection of SNP TSC0046163
aaaaatccttac

SEQ ID NO: 349468 - DNA, 12 bp, Artificial Sequence
  Oligonucleotide primer for the detection of SNP TSC0046163
ggagatttttta

SEQ ID NO: 349469 - DNA, 12 bp, Artificial Sequence
  Oligonucleotide primer for the detection of SNP TSC0046164
catattcaaatc

SEQ ID NO: 349470 - DNA, 12 bp, Artificial Sequence
  Oligonucleotide primer for the detection of SNP TSC0046165
cctatatatata

SEQ ID NO: 349471 - DNA, 12 bp, Artificial Sequence
  Oligonucleotide primer for the detection of SNP TSC0046165
ggaagagatatt

SEQ ID NO: 349472 - DNA, 12 bp, Artificial Sequence
  Oligonucleotide primer for the detection of SNP TSC0046165
tttgtgtgtata

SEQ ID NO: 349473 - DNA, 12 bp, Artificial Sequence
  Oligonucleotide primer for the detection of SNP TSC0046166
ataacaaaacaa

SEQ ID NO: 349474 - DNA, 12 bp, Artificial Sequence
  Oligonucleotide primer for the detection of SNP TSC0046166
accactcaatct

SEQ ID NO: 349475 - DNA, 12 bp, Artificial Sequence
  Oligonucleotide primer for the detection of SNP TSC0046166
tataataagata

SEQ ID NO: 349476 - DNA, 12 bp, Artificial Sequence
  Oligonucleotide primer for the detection of SNP TSC0008757
atgtattaaata

SEQ ID NO: 349477 - DNA, 12 bp, Artificial Sequence
  Oligonucleotide primer for the detection of SNP TSC0046168
atcattaatttc

SEQ ID NO: 349478 - DNA, 12 bp, Artificial Sequence
  Oligonucleotide primer for the detection of SNP TSC0046168
gttaataaatta

SEQ ID NO: 349479 - DNA, 12 bp, Artificial Sequence
  Oligonucleotide primer for the detection of SNP TSC0046169
ttataatgtggg

SEQ ID NO: 349480 - DNA, 12 bp, Artificial Sequence
  Oligonucleotide primer for the detection of SNP TSC0046170
ctaattaactta

SEQ ID NO: 349481 - DNA, 12 bp, Artificial Sequence
  Oligonucleotide primer for the detection of SNP TSC0046170
tgataaggttaa

SEQ ID NO: 349482 - DNA, 12 bp, Artificial Sequence
  Oligonucleotide primer for the detection of SNP TSC0046170
taacaaaaccaa

SEQ ID NO: 349483 - DNA, 12 bp, Artificial Sequence
  Oligonucleotide primer for the detection of SNP TSC0046170
tgattgatttgt

SEQ ID NO: 349484 - DNA, 12 bp, Artificial Sequence
  Oligonucleotide primer for the detection of SNP TSC0007690
ggtatatgttat

SEQ ID NO: 349485 - DNA, 12 bp, Artificial Sequence
  Oligonucleotide primer for the detection of SNP TSC0007690
ggtatacgttat

SEQ ID NO: 349486 - DNA, 12 bp, Artificial Sequence
  Oligonucleotide primer for the detection of SNP TSC0007690
ggtatatgttac

SEQ ID NO: 349487 - DNA, 12 bp, Artificial Sequence
  Oligonucleotide primer for the detection of SNP TSC0007690
ggtatacgttac

SEQ ID NO: 349488 - DNA, 12 bp, Artificial Sequence
  Oligonucleotide primer for the detection of SNP TSC0046171
tacaacctaata

SEQ ID NO: 349489 - DNA, 12 bp, Artificial Sequence
  Oligonucleotide primer for the detection of SNP TSC0046171
tatttgtttagt

SEQ ID NO: 349490 - DNA, 12 bp, Artificial Sequence
  Oligonucleotide primer for the detection of SNP TSC0046171
tacttatctaat

SEQ ID NO: 349491 - DNA, 12 bp, Artificial Sequence
  Oligonucleotide primer for the detection of SNP TSC0046171
ttgtaatttaat

SEQ ID NO: 349492 - DNA, 12 bp, Artificial Sequence
  Oligonucleotide primer for the detection of SNP TSC0046172
cttcataaccaa

SEQ ID NO: 349493 - DNA, 12 bp, Artificial Sequence
  Oligonucleotide primer for the detection of SNP TSC0046172
gttagaggtgtt

SEQ ID NO: 349494 - DNA, 12 bp, Artificial Sequence
  Oligonucleotide primer for the detection of SNP TSC0046172
actaaaaatact

SEQ ID NO: 349495 - DNA, 12 bp, Artificial Sequence
  Oligonucleotide primer for the detection of SNP TSC0046172
ttttatgattag

SEQ ID NO: 349496 - DNA, 12 bp, Artificial Sequence
  Oligonucleotide primer for the detection of SNP TSC0046173
ccaacaatttta

SEQ ID NO: 349497 - DNA, 12 bp, Artificial Sequence
  Oligonucleotide primer for the detection of SNP TSC0046173
ataaacacatta

SEQ ID NO: 349498 - DNA, 12 bp, Artificial Sequence
  Oligonucleotide primer for the detection of SNP TSC0046173
tttaatagtttt

SEQ ID NO: 349499 - DNA, 12 bp, Artificial Sequence
  Oligonucleotide primer for the detection of SNP TSC0046174
tacctaataaaa

SEQ ID NO: 349500 - DNA, 12 bp, Artificial Sequence
  Oligonucleotide primer for the detection of SNP TSC0046174
taactttctttt

SEQ ID NO: 349501 - DNA, 12 bp, Artificial Sequence
  Oligonucleotide primer for the detection of SNP TSC0046174
aagttgtttgat

SEQ ID NO: 349502 - DNA, 12 bp, Artificial Sequence
  Oligonucleotide primer for the detection of SNP TSC0046178
aaatatttcttt

SEQ ID NO: 349503 - DNA, 12 bp, Artificial Sequence
  Oligonucleotide primer for the detection of SNP TSC0046178
gaagaatttata

SEQ ID NO: 349504 - DNA, 12 bp, Artificial Sequence
  Oligonucleotide primer for the detection of SNP TSC0010355
aatcattaactt

SEQ ID NO: 349505 - DNA, 12 bp, Artificial Sequence
  Oligonucleotide primer for the detection of SNP TSC0010355
tttatgtaattt

SEQ ID NO: 349506 - DNA, 12 bp, Artificial Sequence
  Oligonucleotide primer for the detection of SNP TSC0046181
acctacattaac

SEQ ID NO: 349507 - DNA, 12 bp, Artificial Sequence
  Oligonucleotide primer for the detection of SNP TSC0046181
atataattagta

SEQ ID NO: 349508 - DNA, 12 bp, Artificial Sequence
  Oligonucleotide primer for the detection of SNP TSC0046182
tgatacgtatta

SEQ ID NO: 349509 - DNA, 12 bp, Artificial Sequence
  Oligonucleotide primer for the detection of SNP TSC0046183
ttttataaaacc

SEQ ID NO: 349510 - DNA, 12 bp, Artificial Sequence
  Oligonucleotide primer for the detection of SNP TSC0046188
aactctcgaaac

SEQ ID NO: 349511 - DNA, 12 bp, Artificial Sequence
  Oligonucleotide primer for the detection of SNP TSC0046188
tatttaagtaaa

SEQ ID NO: 349512 - DNA, 12 bp, Artificial Sequence
  Oligonucleotide primer for the detection of SNP TSC0046189
tccccaaaactc

SEQ ID NO: 349513 - DNA, 12 bp, Artificial Sequence
  Oligonucleotide primer for the detection of SNP TSC0046189
ttaaaatgttta

SEQ ID NO: 349514 - DNA, 12 bp, Artificial Sequence
  Oligonucleotide primer for the detection of SNP TSC0046190
attttaagagga

SEQ ID NO: 349515 - DNA, 12 bp, Artificial Sequence
  Oligonucleotide primer for the detection of SNP TSC0046190
attttaaaaaaa

SEQ ID NO: 349516 - DNA, 12 bp, Artificial Sequence
  Oligonucleotide primer for the detection of SNP TSC0046190
aggaaaatgttt

SEQ ID NO: 349517 - DNA, 12 bp, Artificial Sequence
  Oligonucleotide primer for the detection of SNP TSC0006721
ttcttaaaaaat

SEQ ID NO: 349518 - DNA, 12 bp, Artificial Sequence
  Oligonucleotide primer for the detection of SNP TSC0046191
ttcattcccctt

SEQ ID NO: 349519 - DNA, 12 bp, Artificial Sequence
  Oligonucleotide primer for the detection of SNP TSC0046191
aaataaatagag

SEQ ID NO: 349520 - DNA, 12 bp, Artificial Sequence
  Oligonucleotide primer for the detection of SNP TSC0046193
tgaattattgtg

SEQ ID NO: 349521 - DNA, 12 bp, Artificial Sequence
  Oligonucleotide primer for the detection of SNP TSC0046193
tgaattatcgtg

SEQ ID NO: 349522 - DNA, 12 bp, Artificial Sequence
  Oligonucleotide primer for the detection of SNP TSC0046193
tgaattattgcg

SEQ ID NO: 349523 - DNA, 12 bp, Artificial Sequence
  Oligonucleotide primer for the detection of SNP TSC0046193
tgaattatcgcg

SEQ ID NO: 349524 - DNA, 12 bp, Artificial Sequence
  Oligonucleotide primer for the detection of SNP TSC0046193
taaaaattaggt

SEQ ID NO: 349525 - DNA, 12 bp, Artificial Sequence
  Oligonucleotide primer for the detection of SNP TSC0046196
cactttaattta

SEQ ID NO: 349526 - DNA, 12 bp, Artificial Sequence
  Oligonucleotide primer for the detection of SNP TSC0046196
ttagtagattag

SEQ ID NO: 349527 - DNA, 12 bp, Artificial Sequence
  Oligonucleotide primer for the detection of SNP TSC0046196
caacaaaccaaa

SEQ ID NO: 349528 - DNA, 12 bp, Artificial Sequence
  Oligonucleotide primer for the detection of SNP TSC0046196
tattttggtttg

SEQ ID NO: 349529 - DNA, 12 bp, Artificial Sequence
  Oligonucleotide primer for the detection of SNP TSC0046197
aaaatccaaacc

SEQ ID NO: 349530 - DNA, 12 bp, Artificial Sequence
  Oligonucleotide primer for the detection of SNP TSC0046197
taataagaatta

SEQ ID NO: 349531 - DNA, 12 bp, Artificial Sequence
  Oligonucleotide primer for the detection of SNP TSC0046197
taataaaaacca

SEQ ID NO: 349532 - DNA, 12 bp, Artificial Sequence
  Oligonucleotide primer for the detection of SNP TSC0046197
gagatttaaatt

SEQ ID NO: 349533 - DNA, 12 bp, Artificial Sequence
  Oligonucleotide primer for the detection of SNP TSC0046198
aaccattctatt

SEQ ID NO: 349534 - DNA, 12 bp, Artificial Sequence
  Oligonucleotide primer for the detection of SNP TSC0046198
gtttgtgtttag

SEQ ID NO: 349535 - DNA, 12 bp, Artificial Sequence
  Oligonucleotide primer for the detection of SNP TSC0046199
aggatttgtttg

SEQ ID NO: 349536 - DNA, 12 bp, Artificial Sequence
  Oligonucleotide primer for the detection of SNP TSC0006868
ataataattatt

SEQ ID NO: 349537 - DNA, 12 bp, Artificial Sequence
  Oligonucleotide primer for the detection of SNP TSC0006868
aggtttttttta

SEQ ID NO: 349538 - DNA, 12 bp, Artificial Sequence
  Oligonucleotide primer for the detection of SNP TSC0046204
taggttttttag

SEQ ID NO: 349539 - DNA, 12 bp, Artificial Sequence
  Oligonucleotide primer for the detection of SNP TSC0046205
ttttatcataaa

SEQ ID NO: 349540 - DNA, 12 bp, Artificial Sequence
  Oligonucleotide primer for the detection of SNP TSC0046205
aatgttagtatt

SEQ ID NO: 349541 - DNA, 12 bp, Artificial Sequence
  Oligonucleotide primer for the detection of SNP TSC0046205
aaaatatcaata

SEQ ID NO: 349542 - DNA, 12 bp, Artificial Sequence
  Oligonucleotide primer for the detection of SNP TSC0046206
ttaagtagttgg

SEQ ID NO: 349543 - DNA, 12 bp, Artificial Sequence
  Oligonucleotide primer for the detection of SNP TSC0046206
tcaaataactaa

SEQ ID NO: 349544 - DNA, 12 bp, Artificial Sequence
  Oligonucleotide primer for the detection of SNP TSC0046207
atcacttaaacc

SEQ ID NO: 349545 - DNA, 12 bp, Artificial Sequence
  Oligonucleotide primer for the detection of SNP TSC0046207
atcgcttaaacc

SEQ ID NO: 349546 - DNA, 12 bp, Artificial Sequence
  Oligonucleotide primer for the detection of SNP TSC0046207
attgtttgaatt

SEQ ID NO: 349547 - DNA, 12 bp, Artificial Sequence
  Oligonucleotide primer for the detection of SNP TSC0046207
atcgtttgaatt

SEQ ID NO: 349548 - DNA, 12 bp, Artificial Sequence
  Oligonucleotide primer for the detection of SNP TSC0046208
taaaacttaaca

SEQ ID NO: 349549 - DNA, 12 bp, Artificial Sequence
  Oligonucleotide primer for the detection of SNP TSC0046208
ttttttgaaaat

SEQ ID NO: 349550 - DNA, 12 bp, Artificial Sequence
  Oligonucleotide primer for the detection of SNP TSC0046208
tgagatttagta

SEQ ID NO: 349551 - DNA, 12 bp, Artificial Sequence
  Oligonucleotide primer for the detection of SNP TSC0046211
cactatacacta

SEQ ID NO: 349552 - DNA, 12 bp, Artificial Sequence
  Oligonucleotide primer for the detection of SNP TSC0046211
cgctatacacta

SEQ ID NO: 349553 - DNA, 12 bp, Artificial Sequence
  Oligonucleotide primer for the detection of SNP TSC0046211
gaaattgagagt

SEQ ID NO: 349554 - DNA, 12 bp, Artificial Sequence
  Oligonucleotide primer for the detection of SNP TSC0046211
gtgttgtgtatt

SEQ ID NO: 349555 - DNA, 12 bp, Artificial Sequence
  Oligonucleotide primer for the detection of SNP TSC0046211
gcgttgtgtatt

SEQ ID NO: 349556 - DNA, 12 bp, Artificial Sequence
  Oligonucleotide primer for the detection of SNP TSC0046212
aattaaaaatta

SEQ ID NO: 349557 - DNA, 12 bp, Artificial Sequence
  Oligonucleotide primer for the detection of SNP TSC0046212
tgatgtttaaga

SEQ ID NO: 349558 - DNA, 12 bp, Artificial Sequence
  Oligonucleotide primer for the detection of SNP TSC0046212
taattgaaaatt

SEQ ID NO: 349559 - DNA, 12 bp, Artificial Sequence
  Oligonucleotide primer for the detection of SNP TSC0046213
gtaaaatatttt

SEQ ID NO: 349560 - DNA, 12 bp, Artificial Sequence
  Oligonucleotide primer for the detection of SNP TSC0046213
aaaaggagttta

SEQ ID NO: 349561 - DNA, 12 bp, Artificial Sequence
  Oligonucleotide primer for the detection of SNP TSC0046214
ctaaaccccctt

SEQ ID NO: 349562 - DNA, 12 bp, Artificial Sequence
  Oligonucleotide primer for the detection of SNP TSC0046214
ataagatttagg

SEQ ID NO: 349563 - DNA, 12 bp, Artificial Sequence
  Oligonucleotide primer for the detection of SNP TSC0006518
tacttattactt

SEQ ID NO: 349564 - DNA, 12 bp, Artificial Sequence
  Oligonucleotide primer for the detection of SNP TSC0006518
tataatttgaaa

SEQ ID NO: 349565 - DNA, 12 bp, Artificial Sequence
  Oligonucleotide primer for the detection of SNP TSC0046215
tttttgaattcg

SEQ ID NO: 349566 - DNA, 12 bp, Artificial Sequence
  Oligonucleotide primer for the detection of SNP TSC0000125
tttttgggtaaa

SEQ ID NO: 349567 - DNA, 12 bp, Artificial Sequence
  Oligonukleotid-Primer
gttttattgatt

SEQ ID NO: 349568 - DNA, 12 bp, Artificial Sequence
  Oligonucleotide primer for the detection of SNP TSC0046216
actccactaact

SEQ ID NO: 349569 - DNA, 12 bp, Artificial Sequence
  Oligonucleotide primer for the detection of SNP TSC0046216
tttcgggttttg

SEQ ID NO: 349570 - DNA, 12 bp, Artificial Sequence
  Oligonucleotide primer for the detection of SNP TSC0046217
tacaccaccaca

SEQ ID NO: 349571 - DNA, 12 bp, Artificial Sequence
  Oligonucleotide primer for the detection of SNP TSC0046217
gtattattatat

SEQ ID NO: 349572 - DNA, 12 bp, Artificial Sequence
  Oligonucleotide primer for the detection of SNP TSC0006013
aaccactacgcc

SEQ ID NO: 349573 - DNA, 12 bp, Artificial Sequence
  Oligonucleotide primer for the detection of SNP TSC0006013
agaaaatttgtt

SEQ ID NO: 349574 - DNA, 12 bp, Artificial Sequence
  Oligonucleotide primer for the detection of SNP TSC0006013
agaaaatttgtc

SEQ ID NO: 349575 - DNA, 12 bp, Artificial Sequence
  Oligonucleotide primer for the detection of SNP TSC0006013
agttattgtgtc

SEQ ID NO: 349576 - DNA, 12 bp, Artificial Sequence
  Oligonucleotide primer for the detection of SNP TSC0006013
agttattgcgtc

SEQ ID NO: 349577 - DNA, 12 bp, Artificial Sequence
  Oligonucleotide primer for the detection of SNP TSC0046219
ttaaataattac

SEQ ID NO: 349578 - DNA, 12 bp, Artificial Sequence
  Oligonucleotide primer for the detection of SNP TSC0046219
gaaataattttt

SEQ ID NO: 349579 - DNA, 12 bp, Artificial Sequence
  Oligonucleotide primer for the detection of SNP TSC0046219
aaataattctca

SEQ ID NO: 349580 - DNA, 12 bp, Artificial Sequence
  Oligonucleotide primer for the detection of SNP TSC0046219
aagtggttattt

SEQ ID NO: 349581 - DNA, 12 bp, Artificial Sequence
  Oligonucleotide primer for the detection of SNP TSC0000096
ataccccaataa

SEQ ID NO: 349582 - DNA, 12 bp, Artificial Sequence
  Oligonucleotide primer for the detection of SNP TSC0000096
ccataatttcca

SEQ ID NO: 349583 - DNA, 12 bp, Artificial Sequence
  Oligonucleotide primer for the detection of SNP TSC0000096
aaatgttttagt

SEQ ID NO: 349584 - DNA, 12 bp, Artificial Sequence
  Oligonucleotide primer for the detection of SNP TSC0000673
tatattttttgg

SEQ ID NO: 349585 - DNA, 12 bp, Artificial Sequence
  Oligonucleotide primer for the detection of SNP TSC0006053
tactccctattc

SEQ ID NO: 349586 - DNA, 12 bp, Artificial Sequence
  Oligonucleotide primer for the detection of SNP TSC0006053
ttagtagaggtg

SEQ ID NO: 349587 - DNA, 12 bp, Artificial Sequence
  Oligonucleotide primer for the detection of SNP TSC0006054
tatacttaatta

SEQ ID NO: 349588 - DNA, 12 bp, Artificial Sequence
  Oligonucleotide primer for the detection of SNP TSC0006054
tgttatgttagt

SEQ ID NO: 349589 - DNA, 12 bp, Artificial Sequence
  Oligonucleotide primer for the detection of SNP TSC0006054
tgttacgttagt

SEQ ID NO: 349590 - DNA, 12 bp, Artificial Sequence
  Oligonucleotide primer for the detection of SNP TSC0006054
taccacaccaac

SEQ ID NO: 349591 - DNA, 12 bp, Artificial Sequence
  Oligonucleotide primer for the detection of SNP TSC0006054
taccacgccaac

SEQ ID NO: 349592 - DNA, 12 bp, Artificial Sequence
  Oligonucleotide primer for the detection of SNP TSC0006054
tgtgtttggtta

SEQ ID NO: 349593 - DNA, 12 bp, Artificial Sequence
  Oligonucleotide primer for the detection of SNP TSC0046227
tcactaatattt

SEQ ID NO: 349594 - DNA, 12 bp, Artificial Sequence
  Oligonucleotide primer for the detection of SNP TSC0046227
tttgaaaaatta

SEQ ID NO: 349595 - DNA, 12 bp, Artificial Sequence
  Oligonucleotide primer for the detection of SNP TSC0046228
tccaccataatt

SEQ ID NO: 349596 - DNA, 12 bp, Artificial Sequence
  Oligonucleotide primer for the detection of SNP TSC0046228
tggttggggagg

SEQ ID NO: 349597 - DNA, 12 bp, Artificial Sequence
  Oligonucleotide primer for the detection of SNP TSC0046228
tttattatgatt

SEQ ID NO: 349598 - DNA, 12 bp, Artificial Sequence
  Oligonucleotide primer for the detection of SNP TSC0046229
agtgatagttat

SEQ ID NO: 349599 - DNA, 12 bp, Artificial Sequence
  Oligonucleotide primer for the detection of SNP TSC0046229
aataataattac

SEQ ID NO: 349600 - DNA, 12 bp, Artificial Sequence
  Oligonucleotide primer for the detection of SNP TSC0046229
atgtaatttttg

SEQ ID NO: 349601 - DNA, 12 bp, Artificial Sequence
  Oligonucleotide primer for the detection of SNP TSC0007370
ttacaattaacc

SEQ ID NO: 349602 - DNA, 12 bp, Artificial Sequence
  Oligonucleotide primer for the detection of SNP TSC0007370
ggatatttgaat

SEQ ID NO: 349603 - DNA, 12 bp, Artificial Sequence
  Oligonucleotide primer for the detection of SNP TSC0007370
ggatatttgaac

SEQ ID NO: 349604 - DNA, 12 bp, Artificial Sequence
  Oligonucleotide primer for the detection of SNP TSC0007370
ttatagttgatt

SEQ ID NO: 349605 - DNA, 12 bp, Artificial Sequence
  Oligonucleotide primer for the detection of SNP TSC0007371
tatacccactca

SEQ ID NO: 349606 - DNA, 12 bp, Artificial Sequence
  Oligonucleotide primer for the detection of SNP TSC0007371
tatacccactcg

SEQ ID NO: 349607 - DNA, 12 bp, Artificial Sequence
  Oligonucleotide primer for the detection of SNP TSC0007371
gtttagaaaagt

SEQ ID NO: 349608 - DNA, 12 bp, Artificial Sequence
  Oligonucleotide primer for the detection of SNP TSC0007371
tatatttatttg

SEQ ID NO: 349609 - DNA, 12 bp, Artificial Sequence
  Oligonucleotide primer for the detection of SNP TSC0007371
tatatttattcg

SEQ ID NO: 349610 - DNA, 12 bp, Artificial Sequence
  Oligonucleotide primer for the detection of SNP TSC0046230
aaaaatcatatc

SEQ ID NO: 349611 - DNA, 12 bp, Artificial Sequence
  Oligonucleotide primer for the detection of SNP TSC0046230
aaaaatcgtatc

SEQ ID NO: 349612 - DNA, 12 bp, Artificial Sequence
  Oligonucleotide primer for the detection of SNP TSC0046230
ataagttaaaag

SEQ ID NO: 349613 - DNA, 12 bp, Artificial Sequence
  Oligonucleotide primer for the detection of SNP TSC0000542
tttgattgtttg

SEQ ID NO: 349614 - DNA, 12 bp, Artificial Sequence
  Oligonucleotide primer for the detection of SNP TSC0000542
cttaattaccta

SEQ ID NO: 349615 - DNA, 12 bp, Artificial Sequence
  Oligonucleotide primer for the detection of SNP TSC0000542
gggggtaggggt

SEQ ID NO: 349616 - DNA, 12 bp, Artificial Sequence
  Oligonucleotide primer for the detection of SNP TSC0046231
caatctcctact

SEQ ID NO: 349617 - DNA, 12 bp, Artificial Sequence
  Oligonucleotide primer for the detection of SNP TSC0046231
tgatttggaaga

SEQ ID NO: 349618 - DNA, 12 bp, Artificial Sequence
  Oligonucleotide primer for the detection of SNP TSC0000115
caacaattccca

SEQ ID NO: 349619 - DNA, 12 bp, Artificial Sequence
  Oligonucleotide primer for the detection of SNP TSC0000115
tgagggtgaagt

SEQ ID NO: 349620 - DNA, 12 bp, Artificial Sequence
  Oligonucleotide primer for the detection of SNP TSC0000115
tgagggtgaagc

SEQ ID NO: 349621 - DNA, 12 bp, Artificial Sequence
  Oligonucleotide primer for the detection of SNP TSC0046235
atccataccatt

SEQ ID NO: 349622 - DNA, 12 bp, Artificial Sequence
  Oligonucleotide primer for the detection of SNP TSC0046235
agaggaatgaaa

SEQ ID NO: 349623 - DNA, 12 bp, Artificial Sequence
  Oligonucleotide primer for the detection of SNP TSC0046236
attgatatttta

SEQ ID NO: 349624 - DNA, 12 bp, Artificial Sequence
  Oligonucleotide primer for the detection of SNP TSC0046237
ttccctaaaaat

SEQ ID NO: 349625 - DNA, 12 bp, Artificial Sequence
  Oligonucleotide primer for the detection of SNP TSC0046237
ggtaatttttta

SEQ ID NO: 349626 - DNA, 12 bp, Artificial Sequence
  Oligonucleotide primer for the detection of SNP TSC0046238
attttacataca

SEQ ID NO: 349627 - DNA, 12 bp, Artificial Sequence
  Oligonucleotide primer for the detection of SNP TSC0046238
tttataatatgt

SEQ ID NO: 349628 - DNA, 12 bp, Artificial Sequence
  Oligonucleotide primer for the detection of SNP TSC0046238
attttgtatata

SEQ ID NO: 349629 - DNA, 12 bp, Artificial Sequence
  Oligonucleotide primer for the detection of SNP TSC0046239
ttactaaaatat

SEQ ID NO: 349630 - DNA, 12 bp, Artificial Sequence
  Oligonucleotide primer for the detection of SNP TSC0046239
atgaataagtga

SEQ ID NO: 349631 - DNA, 12 bp, Artificial Sequence
  Oligonucleotide primer for the detection of SNP TSC0046242
cctaaatatcga

SEQ ID NO: 349632 - DNA, 12 bp, Artificial Sequence
  Oligonucleotide primer for the detection of SNP TSC0046242
gtgtcggtgttt

SEQ ID NO: 349633 - DNA, 12 bp, Artificial Sequence
  Oligonucleotide primer for the detection of SNP TSC0046242
gtgttggcgttt

SEQ ID NO: 349634 - DNA, 12 bp, Artificial Sequence
  Oligonucleotide primer for the detection of SNP TSC0046242
gtgtcggcgttt

SEQ ID NO: 349635 - DNA, 12 bp, Artificial Sequence
  Oligonucleotide primer for the detection of SNP TSC0046242
atatcaacattc

SEQ ID NO: 349636 - DNA, 12 bp, Artificial Sequence
  Oligonucleotide primer for the detection of SNP TSC0046242
atatcaacgttc

SEQ ID NO: 349637 - DNA, 12 bp, Artificial Sequence
  Oligonucleotide primer for the detection of SNP TSC0046242
atatcgacattc

SEQ ID NO: 349638 - DNA, 12 bp, Artificial Sequence
  Oligonucleotide primer for the detection of SNP TSC0046242
atatcgacgttc

SEQ ID NO: 349639 - DNA, 12 bp, Artificial Sequence
  Oligonucleotide primer for the detection of SNP TSC0046242
tttggatgttgg

SEQ ID NO: 349640 - DNA, 12 bp, Artificial Sequence
  Oligonucleotide primer for the detection of SNP TSC0046242
tttggatgtcgg

SEQ ID NO: 349641 - DNA, 12 bp, Artificial Sequence
  Oligonucleotide primer for the detection of SNP TSC0046243
accacaaaatac

SEQ ID NO: 349642 - DNA, 12 bp, Artificial Sequence
  Oligonucleotide primer for the detection of SNP TSC0046243
accacgaaatac

SEQ ID NO: 349643 - DNA, 12 bp, Artificial Sequence
  Oligonucleotide primer for the detection of SNP TSC0046243
gccacaaaatac

SEQ ID NO: 349644 - DNA, 12 bp, Artificial Sequence
  Oligonucleotide primer for the detection of SNP TSC0046243
gccacgaaatac

SEQ ID NO: 349645 - DNA, 12 bp, Artificial Sequence
  Oligonucleotide primer for the detection of SNP TSC0046243
ttgttgttatta

SEQ ID NO: 349646 - DNA, 12 bp, Artificial Sequence
  Oligonucleotide primer for the detection of SNP TSC0046243
tcgttgttatta

SEQ ID NO: 349647 - DNA, 12 bp, Artificial Sequence
  Oligonucleotide primer for the detection of SNP TSC0046244
cacatacttaat

SEQ ID NO: 349648 - DNA, 12 bp, Artificial Sequence
  Oligonucleotide primer for the detection of SNP TSC0046244
cacgtacttaat

SEQ ID NO: 349649 - DNA, 12 bp, Artificial Sequence
  Oligonucleotide primer for the detection of SNP TSC0046244
tgtttgaaaaga

SEQ ID NO: 349650 - DNA, 12 bp, Artificial Sequence
  Oligonucleotide primer for the detection of SNP TSC0046245
aaatgttattgt

SEQ ID NO: 349651 - DNA, 12 bp, Artificial Sequence
  Oligonucleotide primer for the detection of SNP TSC0046246
tatctatcaaaa

SEQ ID NO: 349652 - DNA, 12 bp, Artificial Sequence
  Oligonucleotide primer for the detection of SNP TSC0046249
cccccaacacct

SEQ ID NO: 349653 - DNA, 12 bp, Artificial Sequence
  Oligonucleotide primer for the detection of SNP TSC0046249
gtggaggaaggg

SEQ ID NO: 349654 - DNA, 12 bp, Artificial Sequence
  Oligonucleotide primer for the detection of SNP TSC0046250
tcattactattt

SEQ ID NO: 349655 - DNA, 12 bp, Artificial Sequence
  Oligonucleotide primer for the detection of SNP TSC0046250
ttcttaataact

SEQ ID NO: 349656 - DNA, 12 bp, Artificial Sequence
  Oligonucleotide primer for the detection of SNP TSC0046251
atcttaaaactt

SEQ ID NO: 349657 - DNA, 12 bp, Artificial Sequence
  Oligonucleotide primer for the detection of SNP TSC0046251
ttatattttgtg

SEQ ID NO: 349658 - DNA, 12 bp, Artificial Sequence
  Oligonucleotide primer for the detection of SNP TSC0046252
actatataacta

SEQ ID NO: 349659 - DNA, 12 bp, Artificial Sequence
  Oligonucleotide primer for the detection of SNP TSC0046252
tgttttaattat

SEQ ID NO: 349660 - DNA, 12 bp, Artificial Sequence
  Oligonucleotide primer for the detection of SNP TSC0046252
tatcttaattat

SEQ ID NO: 349661 - DNA, 12 bp, Artificial Sequence
  Oligonucleotide primer for the detection of SNP TSC0046253
tcccactttatt

SEQ ID NO: 349662 - DNA, 12 bp, Artificial Sequence
  Oligonucleotide primer for the detection of SNP TSC0046253
aataattttgaa

SEQ ID NO: 349663 - DNA, 12 bp, Artificial Sequence
  Oligonucleotide primer for the detection of SNP TSC0007533
ttaccataaaat

SEQ ID NO: 349664 - DNA, 12 bp, Artificial Sequence
  Oligonucleotide primer for the detection of SNP TSC0007533
tatttgataagg

SEQ ID NO: 349665 - DNA, 12 bp, Artificial Sequence
  Oligonucleotide primer for the detection of SNP TSC0007534
tttgtagttgag

SEQ ID NO: 349666 - DNA, 12 bp, Artificial Sequence
  Oligonucleotide primer for the detection of SNP TSC0046254
agtgtgataaaa

SEQ ID NO: 349667 - DNA, 12 bp, Artificial Sequence
  Oligonucleotide primer for the detection of SNP TSC0046254
aataatagaaaa

SEQ ID NO: 349668 - DNA, 12 bp, Artificial Sequence
  Oligonucleotide primer for the detection of SNP TSC0046255
atttatctaaaa

SEQ ID NO: 349669 - DNA, 12 bp, Artificial Sequence
  Oligonucleotide primer for the detection of SNP TSC0046255
ttttcaaataat

SEQ ID NO: 349670 - DNA, 12 bp, Artificial Sequence
  Oligonucleotide primer for the detection of SNP TSC0046255
atttatttgaaa

SEQ ID NO: 349671 - DNA, 12 bp, Artificial Sequence
  Oligonucleotide primer for the detection of SNP TSC0046256
ctattctattaa

SEQ ID NO: 349672 - DNA, 12 bp, Artificial Sequence
  Oligonucleotide primer for the detection of SNP TSC0046257
ttcaaaatcttt

SEQ ID NO: 349673 - DNA, 12 bp, Artificial Sequence
  Oligonucleotide primer for the detection of SNP TSC0046257
tatagggaatta

SEQ ID NO: 349674 - DNA, 12 bp, Artificial Sequence
  Oligonucleotide primer for the detection of SNP TSC0046257
cataaaaaacca

SEQ ID NO: 349675 - DNA, 12 bp, Artificial Sequence
  Oligonucleotide primer for the detection of SNP TSC0046258
accaccctataa

SEQ ID NO: 349676 - DNA, 12 bp, Artificial Sequence
  Oligonucleotide primer for the detection of SNP TSC0046258
tgggggtggtta

SEQ ID NO: 349677 - DNA, 12 bp, Artificial Sequence
  Oligonucleotide primer for the detection of SNP TSC0001438
aaatctcacctc

SEQ ID NO: 349678 - DNA, 12 bp, Artificial Sequence
  Oligonucleotide primer for the detection of SNP TSC0001438
atgtggattata

SEQ ID NO: 349679 - DNA, 12 bp, Artificial Sequence
  Oligonucleotide primer for the detection of SNP TSC0001438
atgcggattata

SEQ ID NO: 349680 - DNA, 12 bp, Artificial Sequence
  Oligonucleotide primer for the detection of SNP TSC0001439
aatccgcatata

SEQ ID NO: 349681 - DNA, 12 bp, Artificial Sequence
  Oligonucleotide primer for the detection of SNP TSC0001439
aaatccctccct

SEQ ID NO: 349682 - DNA, 12 bp, Artificial Sequence
  Oligonucleotide primer for the detection of SNP TSC0001439
aatttgtatgtg

SEQ ID NO: 349683 - DNA, 12 bp, Artificial Sequence
  Oligonucleotide primer for the detection of SNP TSC0001439
aattcgtatgtg

SEQ ID NO: 349684 - DNA, 12 bp, Artificial Sequence
  Oligonukleotid-Primer
ataaactaaaac

SEQ ID NO: 349685 - DNA, 12 bp, Artificial Sequence
  Oligonucleotide primer for the detection of SNP TSC0000228
tcaatctcataa

SEQ ID NO: 349686 - DNA, 12 bp, Artificial Sequence
  Oligonucleotide primer for the detection of SNP TSC0000228
atggattaagat

SEQ ID NO: 349687 - DNA, 12 bp, Artificial Sequence
  Oligonucleotide primer for the detection of SNP TSC0046259
acacacatacgc

SEQ ID NO: 349688 - DNA, 12 bp, Artificial Sequence
  Oligonucleotide primer for the detection of SNP TSC0046259
atatatatgtgt

SEQ ID NO: 349689 - DNA, 12 bp, Artificial Sequence
  Oligonucleotide primer for the detection of SNP TSC0046259
atatatatgcgt

SEQ ID NO: 349690 - DNA, 12 bp, Artificial Sequence
  Oligonucleotide primer for the detection of SNP TSC0046259
atatatatgtgc

SEQ ID NO: 349691 - DNA, 12 bp, Artificial Sequence
  Oligonucleotide primer for the detection of SNP TSC0046259
atatatatgcgc

SEQ ID NO: 349692 - DNA, 12 bp, Artificial Sequence
  Oligonucleotide primer for the detection of SNP TSC0000379
tccacactcttt

SEQ ID NO: 349693 - DNA, 12 bp, Artificial Sequence
  Oligonucleotide primer for the detection of SNP TSC0000379
tccgcactcttt

SEQ ID NO: 349694 - DNA, 12 bp, Artificial Sequence
  Oligonucleotide primer for the detection of SNP TSC0000379
ttgttttgaaaa

SEQ ID NO: 349695 - DNA, 12 bp, Artificial Sequence
  Oligonucleotide primer for the detection of SNP TSC0000380
ctatttatatta

SEQ ID NO: 349696 - DNA, 12 bp, Artificial Sequence
  Oligonucleotide primer for the detection of SNP TSC0000380
aattaaaagagt

SEQ ID NO: 349697 - DNA, 12 bp, Artificial Sequence
  Oligonucleotide primer for the detection of SNP TSC0046260
gtagtttttttt

SEQ ID NO: 349698 - DNA, 12 bp, Artificial Sequence
  Oligonucleotide primer for the detection of SNP TSC0046260
ataattcttttc

SEQ ID NO: 349699 - DNA, 12 bp, Artificial Sequence
  Oligonucleotide primer for the detection of SNP TSC0046260
atataaatagat

SEQ ID NO: 349700 - DNA, 12 bp, Artificial Sequence
  Oligonucleotide primer for the detection of SNP TSC0046261
ttcaattataca

SEQ ID NO: 349701 - DNA, 12 bp, Artificial Sequence
  Oligonucleotide primer for the detection of SNP TSC0046261
aatttttaatgt

SEQ ID NO: 349702 - DNA, 12 bp, Artificial Sequence
  Oligonucleotide primer for the detection of SNP TSC0046261
aatttttaacgt

SEQ ID NO: 349703 - DNA, 12 bp, Artificial Sequence
  Oligonucleotide primer for the detection of SNP TSC0046261
taatccttaaca

SEQ ID NO: 349704 - DNA, 12 bp, Artificial Sequence
  Oligonucleotide primer for the detection of SNP TSC0046261
taatccttaacg

SEQ ID NO: 349705 - DNA, 12 bp, Artificial Sequence
  Oligonucleotide primer for the detection of SNP TSC0046261
ttttaattgtat

SEQ ID NO: 349706 - DNA, 12 bp, Artificial Sequence
  Oligonucleotide primer for the detection of SNP TSC0046264
acccaaaaaata

SEQ ID NO: 349707 - DNA, 12 bp, Artificial Sequence
  Oligonucleotide primer for the detection of SNP TSC0046264
tttaaggaatgt

SEQ ID NO: 349708 - DNA, 12 bp, Artificial Sequence
  Oligonucleotide primer for the detection of SNP TSC0046264
tttaaggaatgc

SEQ ID NO: 349709 - DNA, 12 bp, Artificial Sequence
  Oligonucleotide primer for the detection of SNP TSC0046267
aacatttaacac

SEQ ID NO: 349710 - DNA, 12 bp, Artificial Sequence
  Oligonucleotide primer for the detection of SNP TSC0046267
tttaagaaggag

SEQ ID NO: 349711 - DNA, 12 bp, Artificial Sequence
  Oligonucleotide primer for the detection of SNP TSC0046268
attattgtttag

SEQ ID NO: 349712 - DNA, 12 bp, Artificial Sequence
  Oligonucleotide primer for the detection of SNP TSC0046268
attatcgtttag

SEQ ID NO: 349713 - DNA, 12 bp, Artificial Sequence
  Oligonucleotide primer for the detection of SNP TSC0046268
ctatcgcccaaa

SEQ ID NO: 349714 - DNA, 12 bp, Artificial Sequence
  Oligonucleotide primer for the detection of SNP TSC0046268
agtttaagagag

SEQ ID NO: 349715 - DNA, 12 bp, Artificial Sequence
  Oligonucleotide primer for the detection of SNP TSC0046272
cttttatttttt

SEQ ID NO: 349716 - DNA, 12 bp, Artificial Sequence
  Oligonucleotide primer for the detection of SNP TSC0046272
agtatgtagtta

SEQ ID NO: 349717 - DNA, 12 bp, Artificial Sequence
  Oligonucleotide primer for the detection of SNP TSC0046272
agtacgtagtta

SEQ ID NO: 349718 - DNA, 12 bp, Artificial Sequence
  Oligonucleotide primer for the detection of SNP TSC0046273
attaattttatt

SEQ ID NO: 349719 - DNA, 12 bp, Artificial Sequence
  Oligonucleotide primer for the detection of SNP TSC0046274
ctattaaaacct

SEQ ID NO: 349720 - DNA, 12 bp, Artificial Sequence
  Oligonucleotide primer for the detection of SNP TSC0046274
ttcaatttttca

SEQ ID NO: 349721 - DNA, 12 bp, Artificial Sequence
  Oligonucleotide primer for the detection of SNP TSC0046274
ttattgaggttt

SEQ ID NO: 349722 - DNA, 12 bp, Artificial Sequence
  Oligonucleotide primer for the detection of SNP TSC0046275
ccttcataaatt

SEQ ID NO: 349723 - DNA, 12 bp, Artificial Sequence
  Oligonucleotide primer for the detection of SNP TSC0046276
cattttcacaaa

SEQ ID NO: 349724 - DNA, 12 bp, Artificial Sequence
  Oligonucleotide primer for the detection of SNP TSC0046277
aacccaaatctc

SEQ ID NO: 349725 - DNA, 12 bp, Artificial Sequence
  Oligonucleotide primer for the detection of SNP TSC0046277
tggaattattta

SEQ ID NO: 349726 - DNA, 12 bp, Artificial Sequence
  Oligonucleotide primer for the detection of SNP TSC0046278
tatatataaaca

SEQ ID NO: 349727 - DNA, 12 bp, Artificial Sequence
  Oligonucleotide primer for the detection of SNP TSC0046278
ttgggttatatt

SEQ ID NO: 349728 - DNA, 12 bp, Artificial Sequence
  Oligonucleotide primer for the detection of SNP TSC0046278
tatatatagata

SEQ ID NO: 349729 - DNA, 12 bp, Artificial Sequence
  Oligonucleotide primer for the detection of SNP TSC0046280
caataacttttc

SEQ ID NO: 349730 - DNA, 12 bp, Artificial Sequence
  Oligonucleotide primer for the detection of SNP TSC0046280
aataattggttt

SEQ ID NO: 349731 - DNA, 12 bp, Artificial Sequence
  Oligonucleotide primer for the detection of SNP TSC0046280
acaactaattta

SEQ ID NO: 349732 - DNA, 12 bp, Artificial Sequence
  Oligonucleotide primer for the detection of SNP TSC0046281
ttaaccccctca

SEQ ID NO: 349733 - DNA, 12 bp, Artificial Sequence
  Oligonucleotide primer for the detection of SNP TSC0046281
ataggatttttt

SEQ ID NO: 349734 - DNA, 12 bp, Artificial Sequence
  Oligonucleotide primer for the detection of SNP TSC0046281
taaaactcctta

SEQ ID NO: 349735 - DNA, 12 bp, Artificial Sequence
  Oligonucleotide primer for the detection of SNP TSC0046282
ttaaccttcaca

SEQ ID NO: 349736 - DNA, 12 bp, Artificial Sequence
  Oligonucleotide primer for the detection of SNP TSC0046282
ttagatgagtat

SEQ ID NO: 349737 - DNA, 12 bp, Artificial Sequence
  Oligonucleotide primer for the detection of SNP TSC0046282
attaaataaata

SEQ ID NO: 349738 - DNA, 12 bp, Artificial Sequence
  Oligonucleotide primer for the detection of SNP TSC0046282
taatttttatac

SEQ ID NO: 349739 - DNA, 12 bp, Artificial Sequence
  Oligonucleotide primer for the detection of SNP TSC0046284
tccctaattatt

SEQ ID NO: 349740 - DNA, 12 bp, Artificial Sequence
  Oligonucleotide primer for the detection of SNP TSC0046284
gtgttattatta

SEQ ID NO: 349741 - DNA, 12 bp, Artificial Sequence
  Oligonucleotide primer for the detection of SNP TSC0046290
tttttcgggttt

SEQ ID NO: 349742 - DNA, 12 bp, Artificial Sequence
  Oligonucleotide primer for the detection of SNP TSC0046291
ttataacaacta

SEQ ID NO: 349743 - DNA, 12 bp, Artificial Sequence
  Oligonucleotide primer for the detection of SNP TSC0046291
tccaaaaacatt

SEQ ID NO: 349744 - DNA, 12 bp, Artificial Sequence
  Oligonucleotide primer for the detection of SNP TSC0046291
ttgtgataatta

SEQ ID NO: 349745 - DNA, 12 bp, Artificial Sequence
  Oligonucleotide primer for the detection of SNP TSC0046294
gtttagatgaaa

SEQ ID NO: 349746 - DNA, 12 bp, Artificial Sequence
  Oligonucleotide primer for the detection of SNP TSC0046295
atagataaggaa

SEQ ID NO: 349747 - DNA, 12 bp, Artificial Sequence
  Oligonucleotide primer for the detection of SNP TSC0046296
acaaacatcctt

SEQ ID NO: 349748 - DNA, 12 bp, Artificial Sequence
  Oligonucleotide primer for the detection of SNP TSC0046296
acaaacgtcctt

SEQ ID NO: 349749 - DNA, 12 bp, Artificial Sequence
  Oligonucleotide primer for the detection of SNP TSC0046296
ataagtgttttt

SEQ ID NO: 349750 - DNA, 12 bp, Artificial Sequence
  Oligonucleotide primer for the detection of SNP TSC0046296
ataagcgttttt

SEQ ID NO: 349751 - DNA, 12 bp, Artificial Sequence
  Oligonucleotide primer for the detection of SNP TSC0046297
atatttatttag

SEQ ID NO: 349752 - DNA, 12 bp, Artificial Sequence
  Oligonucleotide primer for the detection of SNP TSC0046299
ccttttcattct

SEQ ID NO: 349753 - DNA, 12 bp, Artificial Sequence
  Oligonucleotide primer for the detection of SNP TSC0046299
tttttagagaag

SEQ ID NO: 349754 - DNA, 12 bp, Artificial Sequence
  Oligonucleotide primer for the detection of SNP TSC0046300
atcaaaataaca

SEQ ID NO: 349755 - DNA, 12 bp, Artificial Sequence
  Oligonucleotide primer for the detection of SNP TSC0046300
aaatgttatttt

SEQ ID NO: 349756 - DNA, 12 bp, Artificial Sequence
  Oligonucleotide primer for the detection of SNP TSC0046300
aatatcatccca

SEQ ID NO: 349757 - DNA, 12 bp, Artificial Sequence
  Oligonucleotide primer for the detection of SNP TSC0046300
tgttaagatgat

SEQ ID NO: 349758 - DNA, 12 bp, Artificial Sequence
  Oligonucleotide primer for the detection of SNP TSC0046302
tttaccttaatc

SEQ ID NO: 349759 - DNA, 12 bp, Artificial Sequence
  Oligonucleotide primer for the detection of SNP TSC0046302
ggtattaaggag

SEQ ID NO: 349760 - DNA, 12 bp, Artificial Sequence
  Oligonucleotide primer for the detection of SNP TSC0046303
atcttaaaaaac

SEQ ID NO: 349761 - DNA, 12 bp, Artificial Sequence
  Oligonucleotide primer for the detection of SNP TSC0046303
aaattttagaat

SEQ ID NO: 349762 - DNA, 12 bp, Artificial Sequence
  Oligonucleotide primer for the detection of SNP TSC0046303
attttagggaat

SEQ ID NO: 349763 - DNA, 12 bp, Artificial Sequence
  Oligonucleotide primer for the detection of SNP TSC0046304
taaactactctc

SEQ ID NO: 349764 - DNA, 12 bp, Artificial Sequence
  Oligonucleotide primer for the detection of SNP TSC0046304
tataaatagtag

SEQ ID NO: 349765 - DNA, 12 bp, Artificial Sequence
  Oligonucleotide primer for the detection of SNP TSC0046305
tatcttttattc

SEQ ID NO: 349766 - DNA, 12 bp, Artificial Sequence
  Oligonucleotide primer for the detection of SNP TSC0046305
ttgaatgaggaa

SEQ ID NO: 349767 - DNA, 12 bp, Artificial Sequence
  Oligonucleotide primer for the detection of SNP TSC0046306
attcaaacactt

SEQ ID NO: 349768 - DNA, 12 bp, Artificial Sequence
  Oligonucleotide primer for the detection of SNP TSC0046306
gttgaggtataa

SEQ ID NO: 349769 - DNA, 12 bp, Artificial Sequence
  Oligonucleotide primer for the detection of SNP TSC0046307
aacctacaaatt

SEQ ID NO: 349770 - DNA, 12 bp, Artificial Sequence
  Oligonucleotide primer for the detection of SNP TSC0046307
tttaggaatata

SEQ ID NO: 349771 - DNA, 12 bp, Artificial Sequence
  Oligonucleotide primer for the detection of SNP TSC0046308
cccccatcaccc

SEQ ID NO: 349772 - DNA, 12 bp, Artificial Sequence
  Oligonucleotide primer for the detection of SNP TSC0046308
cccccatcgccc

SEQ ID NO: 349773 - DNA, 12 bp, Artificial Sequence
  Oligonucleotide primer for the detection of SNP TSC0046308
gtgtgttttagg

SEQ ID NO: 349774 - DNA, 12 bp, Artificial Sequence
  Oligonucleotide primer for the detection of SNP TSC0046308
atatatcctaaa

SEQ ID NO: 349775 - DNA, 12 bp, Artificial Sequence
  Oligonucleotide primer for the detection of SNP TSC0046311
acttttttaaat

SEQ ID NO: 349776 - DNA, 12 bp, Artificial Sequence
  Oligonucleotide primer for the detection of SNP TSC0046311
ataaaaatattg

SEQ ID NO: 349777 - DNA, 12 bp, Artificial Sequence
  Oligonucleotide primer for the detection of SNP TSC0046312
gaaaaagagacg

SEQ ID NO: 349778 - DNA, 12 bp, Artificial Sequence
  Oligonucleotide primer for the detection of SNP TSC0046316
taacctccatac

SEQ ID NO: 349779 - DNA, 12 bp, Artificial Sequence
  Oligonucleotide primer for the detection of SNP TSC0046316
ttgggtttagta

SEQ ID NO: 349780 - DNA, 12 bp, Artificial Sequence
  Oligonucleotide primer for the detection of SNP TSC0046317
caacccaccctt

SEQ ID NO: 349781 - DNA, 12 bp, Artificial Sequence
  Oligonucleotide primer for the detection of SNP TSC0046317
agggtgtataag

SEQ ID NO: 349782 - DNA, 12 bp, Artificial Sequence
  Oligonucleotide primer for the detection of SNP TSC0046317
agggcgtataag

SEQ ID NO: 349783 - DNA, 12 bp, Artificial Sequence
  Oligonucleotide primer for the detection of SNP TSC0046318
ttttaaatttaa

SEQ ID NO: 349784 - DNA, 12 bp, Artificial Sequence
  Oligonucleotide primer for the detection of SNP TSC0046318
ttttaaacctaa

SEQ ID NO: 349785 - DNA, 12 bp, Artificial Sequence
  Oligonucleotide primer for the detection of SNP TSC0046318
gttaggatatat

SEQ ID NO: 349786 - DNA, 12 bp, Artificial Sequence
  Oligonucleotide primer for the detection of SNP TSC0046322
ttaaatattagt

SEQ ID NO: 349787 - DNA, 12 bp, Artificial Sequence
  Oligonucleotide primer for the detection of SNP TSC0046322
aaggttttggaa

SEQ ID NO: 349788 - DNA, 12 bp, Artificial Sequence
  Oligonucleotide primer for the detection of SNP TSC0046322
aaggtttcggaa

SEQ ID NO: 349789 - DNA, 12 bp, Artificial Sequence
  Oligonucleotide primer for the detection of SNP TSC0046327
ttcaacaaactt

SEQ ID NO: 349790 - DNA, 12 bp, Artificial Sequence
  Oligonucleotide primer for the detection of SNP TSC0046328
aaattcataaat

SEQ ID NO: 349791 - DNA, 12 bp, Artificial Sequence
  Oligonucleotide primer for the detection of SNP TSC0046328
agtagaaagagg

SEQ ID NO: 349792 - DNA, 12 bp, Artificial Sequence
  Oligonucleotide primer for the detection of SNP TSC0046329
tgaaaagtatat

SEQ ID NO: 349793 - DNA, 12 bp, Artificial Sequence
  Oligonucleotide primer for the detection of SNP TSC0046329
tatgtgttagat

SEQ ID NO: 349794 - DNA, 12 bp, Artificial Sequence
  Oligonucleotide primer for the detection of SNP TSC0046330
aaaataattttc

SEQ ID NO: 349795 - DNA, 12 bp, Artificial Sequence
  Oligonucleotide primer for the detection of SNP TSC0046330
taaaataaatag

SEQ ID NO: 349796 - DNA, 12 bp, Artificial Sequence
  Oligonucleotide primer for the detection of SNP TSC0046331
ataactccccac

SEQ ID NO: 349797 - DNA, 12 bp, Artificial Sequence
  Oligonucleotide primer for the detection of SNP TSC0046331
ataaatttatat

SEQ ID NO: 349798 - DNA, 12 bp, Artificial Sequence
  Oligonucleotide primer for the detection of SNP TSC0046331
atagttttttat

SEQ ID NO: 349799 - DNA, 12 bp, Artificial Sequence
  Oligonucleotide primer for the detection of SNP TSC0046332
tccccaatccca

SEQ ID NO: 349800 - DNA, 12 bp, Artificial Sequence
  Oligonucleotide primer for the detection of SNP TSC0046332
aaaagatatgtg

SEQ ID NO: 349801 - DNA, 12 bp, Artificial Sequence
  Oligonucleotide primer for the detection of SNP TSC0046333
ttttatgtatgc

SEQ ID NO: 349802 - DNA, 12 bp, Artificial Sequence
  Oligonucleotide primer for the detection of SNP TSC0046333
ccttatacatac

SEQ ID NO: 349803 - DNA, 12 bp, Artificial Sequence
  Oligonucleotide primer for the detection of SNP TSC0046333
aattgtgatggt

SEQ ID NO: 349804 - DNA, 12 bp, Artificial Sequence
  Oligonucleotide primer for the detection of SNP TSC0046335
ataaaaatttat

SEQ ID NO: 349805 - DNA, 12 bp, Artificial Sequence
  Oligonucleotide primer for the detection of SNP TSC0046335
gtttaggagaaa

SEQ ID NO: 349806 - DNA, 12 bp, Artificial Sequence
  Oligonucleotide primer for the detection of SNP TSC0046336
aaaatgatgata

SEQ ID NO: 349807 - DNA, 12 bp, Artificial Sequence
  Oligonucleotide primer for the detection of SNP TSC0046337
aaaattacaaac

SEQ ID NO: 349808 - DNA, 12 bp, Artificial Sequence
  Oligonucleotide primer for the detection of SNP TSC0046337
ggtatgatgggg

SEQ ID NO: 349809 - DNA, 12 bp, Artificial Sequence
  Oligonucleotide primer for the detection of SNP TSC0046338
ttgagtgatttt

SEQ ID NO: 349810 - DNA, 12 bp, Artificial Sequence
  Oligonucleotide primer for the detection of SNP TSC0046338
ttaaataacttt

SEQ ID NO: 349811 - DNA, 12 bp, Artificial Sequence
  Oligonucleotide primer for the detection of SNP TSC0046339
ataaagtaaaga

SEQ ID NO: 349812 - DNA, 12 bp, Artificial Sequence
  Oligonucleotide primer for the detection of SNP TSC0046339
aaatattgaaat

SEQ ID NO: 349813 - DNA, 12 bp, Artificial Sequence
  Oligonucleotide primer for the detection of SNP TSC0046340
ttttaggagaga

SEQ ID NO: 349814 - DNA, 12 bp, Artificial Sequence
  Oligonucleotide primer for the detection of SNP TSC0046344
ccattctaataa

SEQ ID NO: 349815 - DNA, 12 bp, Artificial Sequence
  Oligonucleotide primer for the detection of SNP TSC0046344
ccgttctaataa

SEQ ID NO: 349816 - DNA, 12 bp, Artificial Sequence
  Oligonucleotide primer for the detection of SNP TSC0046344
gattgtgttagt

SEQ ID NO: 349817 - DNA, 12 bp, Artificial Sequence
  Oligonucleotide primer for the detection of SNP TSC0046344
gattgcgttagt

SEQ ID NO: 349818 - DNA, 12 bp, Artificial Sequence
  Oligonucleotide primer for the detection of SNP TSC0046344
aaactacattaa

SEQ ID NO: 349819 - DNA, 12 bp, Artificial Sequence
  Oligonucleotide primer for the detection of SNP TSC0046344
aaactacgttaa

SEQ ID NO: 349820 - DNA, 12 bp, Artificial Sequence
  Oligonucleotide primer for the detection of SNP TSC0046345
aaaccaaatttt

SEQ ID NO: 349821 - DNA, 12 bp, Artificial Sequence
  Oligonucleotide primer for the detection of SNP TSC0046346
aaaactcttttt

SEQ ID NO: 349822 - DNA, 12 bp, Artificial Sequence
  Oligonucleotide primer for the detection of SNP TSC0046347
ctctaattaaaa

SEQ ID NO: 349823 - DNA, 12 bp, Artificial Sequence
  Oligonucleotide primer for the detection of SNP TSC0046347
agattaatagaa

SEQ ID NO: 349824 - DNA, 12 bp, Artificial Sequence
  Oligonucleotide primer for the detection of SNP TSC0046347
aaatcaacaaaa

SEQ ID NO: 349825 - DNA, 12 bp, Artificial Sequence
  Oligonucleotide primer for the detection of SNP TSC0046347
ttttgattgggg

SEQ ID NO: 349826 - DNA, 12 bp, Artificial Sequence
  Oligonucleotide primer for the detection of SNP TSC0046348
ctataattaatt

SEQ ID NO: 349827 - DNA, 12 bp, Artificial Sequence
  Oligonucleotide primer for the detection of SNP TSC0046348
agataaatttga

SEQ ID NO: 349828 - DNA, 12 bp, Artificial Sequence
  Oligonucleotide primer for the detection of SNP TSC0046349
atgtaattagat

SEQ ID NO: 349829 - DNA, 12 bp, Artificial Sequence
  Oligonucleotide primer for the detection of SNP TSC0046349
tataactaaata

SEQ ID NO: 349830 - DNA, 12 bp, Artificial Sequence
  Oligonucleotide primer for the detection of SNP TSC0046349
ttaggtatatag

SEQ ID NO: 349831 - DNA, 12 bp, Artificial Sequence
  Oligonucleotide primer for the detection of SNP TSC0046350
atactatcaaac

SEQ ID NO: 349832 - DNA, 12 bp, Artificial Sequence
  Oligonucleotide primer for the detection of SNP TSC0046350
tattgttaggtt

SEQ ID NO: 349833 - DNA, 12 bp, Artificial Sequence
  Oligonucleotide primer for the detection of SNP TSC0046353
cctaataaaaac

SEQ ID NO: 349834 - DNA, 12 bp, Artificial Sequence
  Oligonucleotide primer for the detection of SNP TSC0046353
gaggtgttagtt

SEQ ID NO: 349835 - DNA, 12 bp, Artificial Sequence
  Oligonucleotide primer for the detection of SNP TSC0046353
gaggtgttagtc

SEQ ID NO: 349836 - DNA, 12 bp, Artificial Sequence
  Oligonucleotide primer for the detection of SNP TSC0046353
tttagtaggggt

SEQ ID NO: 349837 - DNA, 12 bp, Artificial Sequence
  Oligonucleotide primer for the detection of SNP TSC0046354
ctcaaaaataaa

SEQ ID NO: 349838 - DNA, 12 bp, Artificial Sequence
  Oligonucleotide primer for the detection of SNP TSC0046354
gtggagtggtat

SEQ ID NO: 349839 - DNA, 12 bp, Artificial Sequence
  Oligonucleotide primer for the detection of SNP TSC0046354
ataaaataatat

SEQ ID NO: 349840 - DNA, 12 bp, Artificial Sequence
  Oligonucleotide primer for the detection of SNP TSC0046354
tttagaaataaa

SEQ ID NO: 349841 - DNA, 12 bp, Artificial Sequence
  Oligonucleotide primer for the detection of SNP TSC0046355
cttcccaaaaat

SEQ ID NO: 349842 - DNA, 12 bp, Artificial Sequence
  Oligonucleotide primer for the detection of SNP TSC0046355
tttatgttgtat

SEQ ID NO: 349843 - DNA, 12 bp, Artificial Sequence
  Oligonucleotide primer for the detection of SNP TSC0046355
tcatattatata

SEQ ID NO: 349844 - DNA, 12 bp, Artificial Sequence
  Oligonucleotide primer for the detection of SNP TSC0046356
atggaaatagag

SEQ ID NO: 349845 - DNA, 12 bp, Artificial Sequence
  Oligonucleotide primer for the detection of SNP TSC0046357
ttatattctcta

SEQ ID NO: 349846 - DNA, 12 bp, Artificial Sequence
  Oligonucleotide primer for the detection of SNP TSC0046358
tcaaaattcaac

SEQ ID NO: 349847 - DNA, 12 bp, Artificial Sequence
  Oligonucleotide primer for the detection of SNP TSC0046358
atattaatgtgg

SEQ ID NO: 349848 - DNA, 12 bp, Artificial Sequence
  Oligonucleotide primer for the detection of SNP TSC0046360
aaacctacatat

SEQ ID NO: 349849 - DNA, 12 bp, Artificial Sequence
  Oligonucleotide primer for the detection of SNP TSC0046360
aaacctacgtat

SEQ ID NO: 349850 - DNA, 12 bp, Artificial Sequence
  Oligonucleotide primer for the detection of SNP TSC0046360
tgaggtatgaaa

SEQ ID NO: 349851 - DNA, 12 bp, Artificial Sequence
  Oligonucleotide primer for the detection of SNP TSC0046360
cgaggtatgaaa

SEQ ID NO: 349852 - DNA, 12 bp, Artificial Sequence
  Oligonucleotide primer for the detection of SNP TSC0046362
taaaactctaat

SEQ ID NO: 349853 - DNA, 12 bp, Artificial Sequence
  Oligonucleotide primer for the detection of SNP TSC0046363
ttaaacccacat

SEQ ID NO: 349854 - DNA, 12 bp, Artificial Sequence
  Oligonucleotide primer for the detection of SNP TSC0046363
tagagttttaga

SEQ ID NO: 349855 - DNA, 12 bp, Artificial Sequence
  Oligonucleotide primer for the detection of SNP TSC0046364
aagagttttgaa

SEQ ID NO: 349856 - DNA, 12 bp, Artificial Sequence
  Oligonucleotide primer for the detection of SNP TSC0046364
gtgaaatagtat

SEQ ID NO: 349857 - DNA, 12 bp, Artificial Sequence
  Oligonucleotide primer for the detection of SNP TSC0046367
attataacaata

SEQ ID NO: 349858 - DNA, 12 bp, Artificial Sequence
  Oligonucleotide primer for the detection of SNP TSC0046367
gggatggggaat

SEQ ID NO: 349859 - DNA, 12 bp, Artificial Sequence
  Oligonucleotide primer for the detection of SNP TSC0046367
attatgatagtg

SEQ ID NO: 349860 - DNA, 12 bp, Artificial Sequence
  Oligonucleotide primer for the detection of SNP TSC0046374
taaatactaata

SEQ ID NO: 349861 - DNA, 12 bp, Artificial Sequence
  Oligonucleotide primer for the detection of SNP TSC0046374
atatagttaaat

SEQ ID NO: 349862 - DNA, 12 bp, Artificial Sequence
  Oligonucleotide primer for the detection of SNP TSC0046374
atatagttaaac

SEQ ID NO: 349863 - DNA, 12 bp, Artificial Sequence
  Oligonucleotide primer for the detection of SNP TSC0046374
cacaaccaaaca

SEQ ID NO: 349864 - DNA, 12 bp, Artificial Sequence
  Oligonucleotide primer for the detection of SNP TSC0046374
cacaaccaaacg

SEQ ID NO: 349865 - DNA, 12 bp, Artificial Sequence
  Oligonucleotide primer for the detection of SNP TSC0046374
gtgggtattgat

SEQ ID NO: 349866 - DNA, 12 bp, Artificial Sequence
  Oligonucleotide primer for the detection of SNP TSC0046375
tttttatattct

SEQ ID NO: 349867 - DNA, 12 bp, Artificial Sequence
  Oligonucleotide primer for the detection of SNP TSC0046375
attttggttttg

SEQ ID NO: 349868 - DNA, 12 bp, Artificial Sequence
  Oligonucleotide primer for the detection of SNP TSC0046376
aaccaataaaca

SEQ ID NO: 349869 - DNA, 12 bp, Artificial Sequence
  Oligonucleotide primer for the detection of SNP TSC0046376
atggttgtttta

SEQ ID NO: 349870 - DNA, 12 bp, Artificial Sequence
  Oligonucleotide primer for the detection of SNP TSC0046377
tttttgaaatgg

SEQ ID NO: 349871 - DNA, 12 bp, Artificial Sequence
  Oligonucleotide primer for the detection of SNP TSC0046383
aaattattttta

SEQ ID NO: 349872 - DNA, 12 bp, Artificial Sequence
  Oligonucleotide primer for the detection of SNP TSC0046390
cattatctattc

SEQ ID NO: 349873 - DNA, 12 bp, Artificial Sequence
  Oligonukleotid-Primer
cgttatctattc

SEQ ID NO: 349874 - DNA, 12 bp, Artificial Sequence
  Oligonucleotide primer for the detection of SNP TSC0046391
gtggtttgggaa

SEQ ID NO: 349875 - DNA, 12 bp, Artificial Sequence
  Oligonucleotide primer for the detection of SNP TSC0046392
tgttttatagta

SEQ ID NO: 349876 - DNA, 12 bp, Artificial Sequence
  Oligonucleotide primer for the detection of SNP TSC0046392
tatttcacaata

SEQ ID NO: 349877 - DNA, 12 bp, Artificial Sequence
  Oligonukleotid-Primer
tgtagtgtgatt

SEQ ID NO: 349878 - DNA, 12 bp, Artificial Sequence
  Oligonucleotide primer for the detection of SNP TSC0046393
cttaaaataaaa

SEQ ID NO: 349879 - DNA, 12 bp, Artificial Sequence
  Oligonucleotide primer for the detection of SNP TSC0046393
attgagttagag

SEQ ID NO: 349880 - DNA, 12 bp, Artificial Sequence
  Oligonucleotide primer for the detection of SNP TSC0046393
attaaaccaaaa

SEQ ID NO: 349881 - DNA, 12 bp, Artificial Sequence
  Oligonucleotide primer for the detection of SNP TSC0046393
ttagaataaggt

SEQ ID NO: 349882 - DNA, 12 bp, Artificial Sequence
  Oligonucleotide primer for the detection of SNP TSC0046395
tctattttcaat

SEQ ID NO: 349883 - DNA, 12 bp, Artificial Sequence
  Oligonucleotide primer for the detection of SNP TSC0046395
ttaaaggttgta

SEQ ID NO: 349884 - DNA, 12 bp, Artificial Sequence
  Oligonucleotide primer for the detection of SNP TSC0046395
ttaaaggtcgta

SEQ ID NO: 349885 - DNA, 12 bp, Artificial Sequence
  Oligonucleotide primer for the detection of SNP TSC0046395
tcaaaaaccaca

SEQ ID NO: 349886 - DNA, 12 bp, Artificial Sequence
  Oligonucleotide primer for the detection of SNP TSC0046395
tcaaaaaccgca

SEQ ID NO: 349887 - DNA, 12 bp, Artificial Sequence
  Oligonucleotide primer for the detection of SNP TSC0046396
aatattttctcc

SEQ ID NO: 349888 - DNA, 12 bp, Artificial Sequence
  Oligonucleotide primer for the detection of SNP TSC0046396
tataatgtttag

SEQ ID NO: 349889 - DNA, 12 bp, Artificial Sequence
  Oligonucleotide primer for the detection of SNP TSC0046399
cttaaattaata

SEQ ID NO: 349890 - DNA, 12 bp, Artificial Sequence
  Oligonucleotide primer for the detection of SNP TSC0046399
actatttattac

SEQ ID NO: 349891 - DNA, 12 bp, Artificial Sequence
  Oligonucleotide primer for the detection of SNP TSC0046399
ttttgagttggt

SEQ ID NO: 349892 - DNA, 12 bp, Artificial Sequence
  Oligonucleotide primer for the detection of SNP TSC0046400
tgttttttttgt

SEQ ID NO: 349893 - DNA, 12 bp, Artificial Sequence
  Oligonucleotide primer for the detection of SNP TSC0046400
tgttttttttgc

SEQ ID NO: 349894 - DNA, 12 bp, Artificial Sequence
  Oligonucleotide primer for the detection of SNP TSC0046400
tacccctcctac

SEQ ID NO: 349895 - DNA, 12 bp, Artificial Sequence
  Oligonucleotide primer for the detection of SNP TSC0046400
aaggttgtggtg

SEQ ID NO: 349896 - DNA, 12 bp, Artificial Sequence
  Oligonucleotide primer for the detection of SNP TSC0046404
atttattctacc

SEQ ID NO: 349897 - DNA, 12 bp, Artificial Sequence
  Oligonucleotide primer for the detection of SNP TSC0046404
tcatcccaaatt

SEQ ID NO: 349898 - DNA, 12 bp, Artificial Sequence
  Oligonucleotide primer for the detection of SNP TSC0046405
gggttaaagagg

SEQ ID NO: 349899 - DNA, 12 bp, Artificial Sequence
  Oligonucleotide primer for the detection of SNP TSC0046405
gtttaggaaagt

SEQ ID NO: 349900 - DNA, 12 bp, Artificial Sequence
  Oligonucleotide primer for the detection of SNP TSC0046406
cacaaaactaat

SEQ ID NO: 349901 - DNA, 12 bp, Artificial Sequence
  Oligonucleotide primer for the detection of SNP TSC0046406
ttattatgttga

SEQ ID NO: 349902 - DNA, 12 bp, Artificial Sequence
  Oligonucleotide primer for the detection of SNP TSC0046406
tcatcatactaa

SEQ ID NO: 349903 - DNA, 12 bp, Artificial Sequence
  Oligonucleotide primer for the detection of SNP TSC0046406
tataagattaat

SEQ ID NO: 349904 - DNA, 12 bp, Artificial Sequence
  Oligonucleotide primer for the detection of SNP TSC0046407
tagaatttaagt

SEQ ID NO: 349905 - DNA, 12 bp, Artificial Sequence
  Oligonucleotide primer for the detection of SNP TSC0046407
agtatgatgatg

SEQ ID NO: 349906 - DNA, 12 bp, Artificial Sequence
  Oligonucleotide primer for the detection of SNP TSC0046410
tctaacatctac

SEQ ID NO: 349907 - DNA, 12 bp, Artificial Sequence
  Oligonucleotide primer for the detection of SNP TSC0046410
tttgttggtttg

SEQ ID NO: 349908 - DNA, 12 bp, Artificial Sequence
  Oligonucleotide primer for the detection of SNP TSC0046410
tttgttggttcg

SEQ ID NO: 349909 - DNA, 12 bp, Artificial Sequence
  Oligonucleotide primer for the detection of SNP TSC0046410
cctattaaccca

SEQ ID NO: 349910 - DNA, 12 bp, Artificial Sequence
  Oligonucleotide primer for the detection of SNP TSC0046410
cctattaacccg

SEQ ID NO: 349911 - DNA, 12 bp, Artificial Sequence
  Oligonucleotide primer for the detection of SNP TSC0046410
tttgatatttgt

SEQ ID NO: 349912 - DNA, 12 bp, Artificial Sequence
  Oligonucleotide primer for the detection of SNP TSC0046411
atataaataaat

SEQ ID NO: 349913 - DNA, 12 bp, Artificial Sequence
  Oligonucleotide primer for the detection of SNP TSC0046411
gttttatttcga

SEQ ID NO: 349914 - DNA, 12 bp, Artificial Sequence
  Oligonucleotide primer for the detection of SNP TSC0046413
aagttatatgtt

SEQ ID NO: 349915 - DNA, 12 bp, Artificial Sequence
  Oligonucleotide primer for the detection of SNP TSC0046413
aaaccatatatt

SEQ ID NO: 349916 - DNA, 12 bp, Artificial Sequence
  Oligonucleotide primer for the detection of SNP TSC0046413
taattggaaaaa

SEQ ID NO: 349917 - DNA, 12 bp, Artificial Sequence
  Oligonucleotide primer for the detection of SNP TSC0046417
aattagttatga

SEQ ID NO: 349918 - DNA, 12 bp, Artificial Sequence
  Oligonucleotide primer for the detection of SNP TSC0046418
caacaaaaatca

SEQ ID NO: 349919 - DNA, 12 bp, Artificial Sequence
  Oligonucleotide primer for the detection of SNP TSC0046418
caacaaaaatcg

SEQ ID NO: 349920 - DNA, 12 bp, Artificial Sequence
  Oligonucleotide primer for the detection of SNP TSC0046418
ttttgaaaaaat

SEQ ID NO: 349921 - DNA, 12 bp, Artificial Sequence
  Oligonucleotide primer for the detection of SNP TSC0046418
ttttgaaaaaac

SEQ ID NO: 349922 - DNA, 12 bp, Artificial Sequence
  Oligonucleotide primer for the detection of SNP TSC0046418
ataaaaattgtt

SEQ ID NO: 349923 - DNA, 12 bp, Artificial Sequence
  Oligonucleotide primer for the detection of SNP TSC0046418
ataaaaatcgtt

SEQ ID NO: 349924 - DNA, 12 bp, Artificial Sequence
  Oligonucleotide primer for the detection of SNP TSC0046419
tactaaatttct

SEQ ID NO: 349925 - DNA, 12 bp, Artificial Sequence
  Oligonucleotide primer for the detection of SNP TSC0046419
gttattaatgat

SEQ ID NO: 349926 - DNA, 12 bp, Artificial Sequence
  Oligonucleotide primer for the detection of SNP TSC0046419
ttattaataata

SEQ ID NO: 349927 - DNA, 12 bp, Artificial Sequence
  Oligonucleotide primer for the detection of SNP TSC0046419
gttaaatttttt

SEQ ID NO: 349928 - DNA, 12 bp, Artificial Sequence
  Oligonucleotide primer for the detection of SNP TSC0046420
aaatataaaccc

SEQ ID NO: 349929 - DNA, 12 bp, Artificial Sequence
  Oligonucleotide primer for the detection of SNP TSC0046420
taaggttttggg

SEQ ID NO: 349930 - DNA, 12 bp, Artificial Sequence
  Oligonucleotide primer for the detection of SNP TSC0006061
tccttacaaaaa

SEQ ID NO: 349931 - DNA, 12 bp, Artificial Sequence
  Oligonucleotide primer for the detection of SNP TSC0006061
aaccattcctcc

SEQ ID NO: 349932 - DNA, 12 bp, Artificial Sequence
  Oligonucleotide primer for the detection of SNP TSC0006061
tttttatagagg

SEQ ID NO: 349933 - DNA, 12 bp, Artificial Sequence
  Oligonucleotide primer for the detection of SNP TSC0046421
taataattattt

SEQ ID NO: 349934 - DNA, 12 bp, Artificial Sequence
  Oligonucleotide primer for the detection of SNP TSC0046421
ataattattcaa

SEQ ID NO: 349935 - DNA, 12 bp, Artificial Sequence
  Oligonucleotide primer for the detection of SNP TSC0046421
attgtttgaagg

SEQ ID NO: 349936 - DNA, 12 bp, Artificial Sequence
  Oligonucleotide primer for the detection of SNP TSC0046422
acactcaaaact

SEQ ID NO: 349937 - DNA, 12 bp, Artificial Sequence
  Oligonucleotide primer for the detection of SNP TSC0046422
gggataggattt

SEQ ID NO: 349938 - DNA, 12 bp, Artificial Sequence
  Oligonucleotide primer for the detection of SNP TSC0046423
tcatacacaaat

SEQ ID NO: 349939 - DNA, 12 bp, Artificial Sequence
  Oligonucleotide primer for the detection of SNP TSC0046424
aaccaaattcca

SEQ ID NO: 349940 - DNA, 12 bp, Artificial Sequence
  Oligonucleotide primer for the detection of SNP TSC0046424
gtttattagttt

SEQ ID NO: 349941 - DNA, 12 bp, Artificial Sequence
  Oligonucleotide primer for the detection of SNP TSC0046424
acttatcaattc

SEQ ID NO: 349942 - DNA, 12 bp, Artificial Sequence
  Oligonucleotide primer for the detection of SNP TSC0046425
cgaaaacttccc

SEQ ID NO: 349943 - DNA, 12 bp, Artificial Sequence
  Oligonucleotide primer for the detection of SNP TSC0046425
ggaggaagttta

SEQ ID NO: 349944 - DNA, 12 bp, Artificial Sequence
  Oligonucleotide primer for the detection of SNP TSC0046425
tgagggtttttt

SEQ ID NO: 349945 - DNA, 12 bp, Artificial Sequence
  Oligonucleotide primer for the detection of SNP TSC0046425
cgagggtttttt

SEQ ID NO: 349946 - DNA, 12 bp, Artificial Sequence
  Oligonucleotide primer for the detection of SNP TSC0046426
aacttctaaccc

SEQ ID NO: 349947 - DNA, 12 bp, Artificial Sequence
  Oligonucleotide primer for the detection of SNP TSC0046426
aggatagtagta

SEQ ID NO: 349948 - DNA, 12 bp, Artificial Sequence
  Oligonucleotide primer for the detection of SNP TSC0046426
aaaacaacaata

SEQ ID NO: 349949 - DNA, 12 bp, Artificial Sequence
  Oligonucleotide primer for the detection of SNP TSC0046427
gtttaaaaagat

SEQ ID NO: 349950 - DNA, 12 bp, Artificial Sequence
  Oligonucleotide primer for the detection of SNP TSC0046428
aataacttcccc

SEQ ID NO: 349951 - DNA, 12 bp, Artificial Sequence
  Oligonucleotide primer for the detection of SNP TSC0046428
aatttagatatg

SEQ ID NO: 349952 - DNA, 12 bp, Artificial Sequence
  Oligonucleotide primer for the detection of SNP TSC0046428
aattcaaacata

SEQ ID NO: 349953 - DNA, 12 bp, Artificial Sequence
  Oligonucleotide primer for the detection of SNP TSC0046429
gttaagattata

SEQ ID NO: 349954 - DNA, 12 bp, Artificial Sequence
  Oligonucleotide primer for the detection of SNP TSC0046430
acctctacctac

SEQ ID NO: 349955 - DNA, 12 bp, Artificial Sequence
  Oligonucleotide primer for the detection of SNP TSC0046430
aaattgttggaa

SEQ ID NO: 349956 - DNA, 12 bp, Artificial Sequence
  Oligonucleotide primer for the detection of SNP TSC0046430
aaatcgttggaa

SEQ ID NO: 349957 - DNA, 12 bp, Artificial Sequence
  Oligonucleotide primer for the detection of SNP TSC0046430
aaatcgctaaaa

SEQ ID NO: 349958 - DNA, 12 bp, Artificial Sequence
  Oligonucleotide primer for the detection of SNP TSC0046430
atttttgtttat

SEQ ID NO: 349959 - DNA, 12 bp, Artificial Sequence
  Oligonucleotide primer for the detection of SNP TSC0008435
aactaatcaatc

SEQ ID NO: 349960 - DNA, 12 bp, Artificial Sequence
  Oligonucleotide primer for the detection of SNP TSC0008435
gatgggatttag

SEQ ID NO: 349961 - DNA, 12 bp, Artificial Sequence
  Oligonucleotide primer for the detection of SNP TSC0046431
tagggtttagga

SEQ ID NO: 349962 - DNA, 12 bp, Artificial Sequence
  Oligonucleotide primer for the detection of SNP TSC0010549
aaaattaacaaa

SEQ ID NO: 349963 - DNA, 12 bp, Artificial Sequence
  Oligonucleotide primer for the detection of SNP TSC0010549
agaattaataaa

SEQ ID NO: 349964 - DNA, 12 bp, Artificial Sequence
  Oligonucleotide primer for the detection of SNP TSC0046432
ttatccaaccta

SEQ ID NO: 349965 - DNA, 12 bp, Artificial Sequence
  Oligonucleotide primer for the detection of SNP TSC0046432
attattattgtt

SEQ ID NO: 349966 - DNA, 12 bp, Artificial Sequence
  Oligonucleotide primer for the detection of SNP TSC0046433
tgtattattgta

SEQ ID NO: 349967 - DNA, 12 bp, Artificial Sequence
  Oligonucleotide primer for the detection of SNP TSC0046433
tacaccactaca

SEQ ID NO: 349968 - DNA, 12 bp, Artificial Sequence
  Oligonucleotide primer for the detection of SNP TSC0046433
gttatttagatt

SEQ ID NO: 349969 - DNA, 12 bp, Artificial Sequence
  Oligonucleotide primer for the detection of SNP TSC0046434
tgtttaagggat

SEQ ID NO: 349970 - DNA, 12 bp, Artificial Sequence
  Oligonucleotide primer for the detection of SNP TSC0046434
gatgtaaattag

SEQ ID NO: 349971 - DNA, 12 bp, Artificial Sequence
  Oligonucleotide primer for the detection of SNP TSC0046436
ctatatattttt

SEQ ID NO: 349972 - DNA, 12 bp, Artificial Sequence
  Oligonucleotide primer for the detection of SNP TSC0046436
tggatattattt

SEQ ID NO: 349973 - DNA, 12 bp, Artificial Sequence
  Oligonucleotide primer for the detection of SNP TSC0046436
taaatatcattt

SEQ ID NO: 349974 - DNA, 12 bp, Artificial Sequence
  Oligonucleotide primer for the detection of SNP TSC0046436
ttatatgttttt

SEQ ID NO: 349975 - DNA, 12 bp, Artificial Sequence
  Oligonucleotide primer for the detection of SNP TSC0046437
tattaatagtag

SEQ ID NO: 349976 - DNA, 12 bp, Artificial Sequence
  Oligonucleotide primer for the detection of SNP TSC0046437
actaacaacaaa

SEQ ID NO: 349977 - DNA, 12 bp, Artificial Sequence
  Oligonucleotide primer for the detection of SNP TSC0046438
tccaaatatctt

SEQ ID NO: 349978 - DNA, 12 bp, Artificial Sequence
  Oligonucleotide primer for the detection of SNP TSC0046438
agtttttattta

SEQ ID NO: 349979 - DNA, 12 bp, Artificial Sequence
  Oligonucleotide primer for the detection of SNP TSC0046440
tataaccctaaa

SEQ ID NO: 349980 - DNA, 12 bp, Artificial Sequence
  Oligonucleotide primer for the detection of SNP TSC0046440
agggtgatggtt

SEQ ID NO: 349981 - DNA, 12 bp, Artificial Sequence
  Oligonucleotide primer for the detection of SNP TSC0046440
tgtgattttggg

SEQ ID NO: 349982 - DNA, 12 bp, Artificial Sequence
  Oligonucleotide primer for the detection of SNP TSC0046441
aaataaattatc

SEQ ID NO: 349983 - DNA, 12 bp, Artificial Sequence
  Oligonucleotide primer for the detection of SNP TSC0046441
gttaaatattgt

SEQ ID NO: 349984 - DNA, 12 bp, Artificial Sequence
  Oligonucleotide primer for the detection of SNP TSC0046441
aaatattacaaa

SEQ ID NO: 349985 - DNA, 12 bp, Artificial Sequence
  Oligonucleotide primer for the detection of SNP TSC0046441
agatagattatt

SEQ ID NO: 349986 - DNA, 12 bp, Artificial Sequence
  Oligonucleotide primer for the detection of SNP TSC0046442
attgatttattt

SEQ ID NO: 349987 - DNA, 12 bp, Artificial Sequence
  Oligonucleotide primer for the detection of SNP TSC0046442
ttaatttaccta

SEQ ID NO: 349988 - DNA, 12 bp, Artificial Sequence
  Oligonucleotide primer for the detection of SNP TSC0046442
aagggaagtgta

SEQ ID NO: 349989 - DNA, 12 bp, Artificial Sequence
  Oligonucleotide primer for the detection of SNP TSC0007983
agtgagtaagaa

SEQ ID NO: 349990 - DNA, 12 bp, Artificial Sequence
  Oligonucleotide primer for the detection of SNP TSC0046444
accctttttatt

SEQ ID NO: 349991 - DNA, 12 bp, Artificial Sequence
  Oligonucleotide primer for the detection of SNP TSC0046444
ttgattgagaga

SEQ ID NO: 349992 - DNA, 12 bp, Artificial Sequence
  Oligonucleotide primer for the detection of SNP TSC0046445
tcaaaatttaac

SEQ ID NO: 349993 - DNA, 12 bp, Artificial Sequence
  Oligonucleotide primer for the detection of SNP TSC0046446
tactacattctc

SEQ ID NO: 349994 - DNA, 12 bp, Artificial Sequence
  Oligonucleotide primer for the detection of SNP TSC0046446
ttgtaaaataag

SEQ ID NO: 349995 - DNA, 12 bp, Artificial Sequence
  Oligonucleotide primer for the detection of SNP TSC0046446
tcgtaaaataag

SEQ ID NO: 349996 - DNA, 12 bp, Artificial Sequence
  Oligonucleotide primer for the detection of SNP TSC0046446
tgttatattttt

SEQ ID NO: 349997 - DNA, 12 bp, Artificial Sequence
  Oligonucleotide primer for the detection of SNP TSC0046448
gaaaaagggttt

SEQ ID NO: 349998 - DNA, 12 bp, Artificial Sequence
  Oligonucleotide primer for the detection of SNP TSC0046449
ttccataaattt

SEQ ID NO: 349999 - DNA, 12 bp, Artificial Sequence
  Oligonucleotide primer for the detection of SNP TSC0009217
aaatacacaacc

SEQ ID NO: 350000 - DNA, 12 bp, Artificial Sequence
  Oligonucleotide primer for the detection of SNP TSC0009217
ttagattttatg

SEQ ID NO: 350001 - DNA, 12 bp, Artificial Sequence
  Oligonucleotide primer for the detection of SNP TSC0009218
actcacaattcc

SEQ ID NO: 350002 - DNA, 12 bp, Artificial Sequence
  Oligonucleotide primer for the detection of SNP TSC0009218
cctccccaacca

SEQ ID NO: 350003 - DNA, 12 bp, Artificial Sequence
  Oligonucleotide primer for the detection of SNP TSC0046451
aactacctcttc

SEQ ID NO: 350004 - DNA, 12 bp, Artificial Sequence
  Oligonucleotide primer for the detection of SNP TSC0046451
ggatgagtttta

SEQ ID NO: 350005 - DNA, 12 bp, Artificial Sequence
  Oligonucleotide primer for the detection of SNP TSC0046452
taaaatttaaaa

SEQ ID NO: 350006 - DNA, 12 bp, Artificial Sequence
  Oligonucleotide primer for the detection of SNP TSC0046452
taaggtttgagg

SEQ ID NO: 350007 - DNA, 12 bp, Artificial Sequence
  Oligonucleotide primer for the detection of SNP TSC0046453
cttctaaaccat

SEQ ID NO: 350008 - DNA, 12 bp, Artificial Sequence
  Oligonucleotide primer for the detection of SNP TSC0046453
tatgagaaagga

SEQ ID NO: 350009 - DNA, 12 bp, Artificial Sequence
  Oligonucleotide primer for the detection of SNP TSC0046454
atttacacacac

SEQ ID NO: 350010 - DNA, 12 bp, Artificial Sequence
  Oligonucleotide primer for the detection of SNP TSC0046455
aaactccatctc

SEQ ID NO: 350011 - DNA, 12 bp, Artificial Sequence
  Oligonucleotide primer for the detection of SNP TSC0046455
aaactccgtctc

SEQ ID NO: 350012 - DNA, 12 bp, Artificial Sequence
  Oligonucleotide primer for the detection of SNP TSC0046455
ggtgtgaatttg

SEQ ID NO: 350013 - DNA, 12 bp, Artificial Sequence
  Oligonucleotide primer for the detection of SNP TSC0046456
aaacctacattc

SEQ ID NO: 350014 - DNA, 12 bp, Artificial Sequence
  Oligonucleotide primer for the detection of SNP TSC0046457
taacccaaaatt

SEQ ID NO: 350015 - DNA, 12 bp, Artificial Sequence
  Oligonucleotide primer for the detection of SNP TSC0046457
ttgttggatatg

SEQ ID NO: 350016 - DNA, 12 bp, Artificial Sequence
  Oligonucleotide primer for the detection of SNP TSC0046458
ttatacccttct

SEQ ID NO: 350017 - DNA, 12 bp, Artificial Sequence
  Oligonucleotide primer for the detection of SNP TSC0046458
tataaagtaaaa

SEQ ID NO: 350018 - DNA, 12 bp, Artificial Sequence
  Oligonucleotide primer for the detection of SNP TSC0046459
aggttattattt

SEQ ID NO: 350019 - DNA, 12 bp, Artificial Sequence
  Oligonucleotide primer for the detection of SNP TSC0046459
aggttattattc

SEQ ID NO: 350020 - DNA, 12 bp, Artificial Sequence
  Oligonucleotide primer for the detection of SNP TSC0046459
aaattattaccc

SEQ ID NO: 350021 - DNA, 12 bp, Artificial Sequence
  Oligonucleotide primer for the detection of SNP TSC0046459
aatgttaaaaat

SEQ ID NO: 350022 - DNA, 12 bp, Artificial Sequence
  Oligonucleotide primer for the detection of SNP TSC0046463
taaccaaacaaa

SEQ ID NO: 350023 - DNA, 12 bp, Artificial Sequence
  Oligonucleotide primer for the detection of SNP TSC0046463
taaccgaacaaa

SEQ ID NO: 350024 - DNA, 12 bp, Artificial Sequence
  Oligonucleotide primer for the detection of SNP TSC0046463
tagttgggtagg

SEQ ID NO: 350025 - DNA, 12 bp, Artificial Sequence
  Oligonucleotide primer for the detection of SNP TSC0046463
tagtcgggtagg

SEQ ID NO: 350026 - DNA, 12 bp, Artificial Sequence
  Oligonucleotide primer for the detection of SNP TSC0046464
aaccataaaaaa

SEQ ID NO: 350027 - DNA, 12 bp, Artificial Sequence
  Oligonucleotide primer for the detection of SNP TSC0046464
ggttatgggggt

SEQ ID NO: 350028 - DNA, 12 bp, Artificial Sequence
  Oligonucleotide primer for the detection of SNP TSC0046464
gttatgaaggat

SEQ ID NO: 350029 - DNA, 12 bp, Artificial Sequence
  Oligonucleotide primer for the detection of SNP TSC0046466
tatagataaagg

SEQ ID NO: 350030 - DNA, 12 bp, Artificial Sequence
  Oligonucleotide primer for the detection of SNP TSC0046467
ctctctaaacct

SEQ ID NO: 350031 - DNA, 12 bp, Artificial Sequence
  Oligonucleotide primer for the detection of SNP TSC0046467
taaatgaagaaa

SEQ ID NO: 350032 - DNA, 12 bp, Artificial Sequence
  Oligonucleotide primer for the detection of SNP TSC0046468
tttagaatatta

SEQ ID NO: 350033 - DNA, 12 bp, Artificial Sequence
  Oligonucleotide primer for the detection of SNP TSC0046470
ttggatttaata

SEQ ID NO: 350034 - DNA, 12 bp, Artificial Sequence
  Oligonucleotide primer for the detection of SNP TSC0046471
tgatttgtaaat

SEQ ID NO: 350035 - DNA, 12 bp, Artificial Sequence
  Oligonucleotide primer for the detection of SNP TSC0046473
atctccttcctt

SEQ ID NO: 350036 - DNA, 12 bp, Artificial Sequence
  Oligonucleotide primer for the detection of SNP TSC0046474
ggtagtaggaag

SEQ ID NO: 350037 - DNA, 12 bp, Artificial Sequence
  Oligonucleotide primer for the detection of SNP TSC0046475
cataccaaaaaa

SEQ ID NO: 350038 - DNA, 12 bp, Artificial Sequence
  Oligonucleotide primer for the detection of SNP TSC0046475
caacaaaataat

SEQ ID NO: 350039 - DNA, 12 bp, Artificial Sequence
  Oligonucleotide primer for the detection of SNP TSC0046475
tatgttagagaa

SEQ ID NO: 350040 - DNA, 12 bp, Artificial Sequence
  Oligonucleotide primer for the detection of SNP TSC0046476
agaaataagtag

SEQ ID NO: 350041 - DNA, 12 bp, Artificial Sequence
  Oligonucleotide primer for the detection of SNP TSC0010542
aacaaaacttca

SEQ ID NO: 350042 - DNA, 12 bp, Artificial Sequence
  Oligonucleotide primer for the detection of SNP TSC0010543
gggtatgatggt

SEQ ID NO: 350043 - DNA, 12 bp, Artificial Sequence
  Oligonucleotide primer for the detection of SNP TSC0046478
tctaccccccac

SEQ ID NO: 350044 - DNA, 12 bp, Artificial Sequence
  Oligonucleotide primer for the detection of SNP TSC0046478
ttaagagattaa

SEQ ID NO: 350045 - DNA, 12 bp, Artificial Sequence
  Oligonucleotide primer for the detection of SNP TSC0046480
atcaactaccct

SEQ ID NO: 350046 - DNA, 12 bp, Artificial Sequence
  Oligonucleotide primer for the detection of SNP TSC0046480
taaggtttgaga

SEQ ID NO: 350047 - DNA, 12 bp, Artificial Sequence
  Oligonucleotide primer for the detection of SNP TSC0046481
ccttacccaatc

SEQ ID NO: 350048 - DNA, 12 bp, Artificial Sequence
  Oligonucleotide primer for the detection of SNP TSC0046481
tatttgaattgg

SEQ ID NO: 350049 - DNA, 12 bp, Artificial Sequence
  Oligonucleotide primer for the detection of SNP TSC0046482
aagggaatagtt

SEQ ID NO: 350050 - DNA, 12 bp, Artificial Sequence
  Oligonucleotide primer for the detection of SNP TSC0046482
gagattgattag

SEQ ID NO: 350051 - DNA, 12 bp, Artificial Sequence
  Oligonucleotide primer for the detection of SNP TSC0046483
atattgtaaggg

SEQ ID NO: 350052 - DNA, 12 bp, Artificial Sequence
  Oligonucleotide primer for the detection of SNP TSC0046484
ctaacctccctt

SEQ ID NO: 350053 - DNA, 12 bp, Artificial Sequence
  Oligonucleotide primer for the detection of SNP TSC0046484
tagtttatgatg

SEQ ID NO: 350054 - DNA, 12 bp, Artificial Sequence
  Oligonucleotide primer for the detection of SNP TSC0046484
caattcataata

SEQ ID NO: 350055 - DNA, 12 bp, Artificial Sequence
  Oligonucleotide primer for the detection of SNP TSC0046485
aaaaatacctct

SEQ ID NO: 350056 - DNA, 12 bp, Artificial Sequence
  Oligonucleotide primer for the detection of SNP TSC0046485
aaatgttttgaa

SEQ ID NO: 350057 - DNA, 12 bp, Artificial Sequence
  Oligonucleotide primer for the detection of SNP TSC0046485
aaacgttttgaa

SEQ ID NO: 350058 - DNA, 12 bp, Artificial Sequence
  Oligonucleotide primer for the detection of SNP TSC0046486
attttgtatagt

SEQ ID NO: 350059 - DNA, 12 bp, Artificial Sequence
  Oligonucleotide primer for the detection of SNP TSC0046486
ttctatacaata

SEQ ID NO: 350060 - DNA, 12 bp, Artificial Sequence
  Oligonucleotide primer for the detection of SNP TSC0046486
taaaaatagtat

SEQ ID NO: 350061 - DNA, 12 bp, Artificial Sequence
  Oligonucleotide primer for the detection of SNP TSC0046486
taaaaatagtac

SEQ ID NO: 350062 - DNA, 12 bp, Artificial Sequence
  Oligonucleotide primer for the detection of SNP TSC0046487
tgttgtatgtta

SEQ ID NO: 350063 - DNA, 12 bp, Artificial Sequence
  Oligonucleotide primer for the detection of SNP TSC0046487
tattacatatta

SEQ ID NO: 350064 - DNA, 12 bp, Artificial Sequence
  Oligonucleotide primer for the detection of SNP TSC0046487
agtaaatgagat

SEQ ID NO: 350065 - DNA, 12 bp, Artificial Sequence
  Oligonucleotide primer for the detection of SNP TSC0046489
actttcctttat

SEQ ID NO: 350066 - DNA, 12 bp, Artificial Sequence
  unsure (3): Oligonucleotide primer for the detection of SNP TSC0046489
ttnttgttagta

SEQ ID NO: 350067 - DNA, 12 bp, Artificial Sequence
  Oligonucleotide primer for the detection of SNP TSC0046493
ctttttactttc

SEQ ID NO: 350068 - DNA, 12 bp, Artificial Sequence
  Oligonucleotide primer for the detection of SNP TSC0046493
tgtagatgggta

SEQ ID NO: 350069 - DNA, 12 bp, Artificial Sequence
  Oligonucleotide primer for the detection of SNP TSC0046494
aattttactatc

SEQ ID NO: 350070 - DNA, 12 bp, Artificial Sequence
  Oligonucleotide primer for the detection of SNP TSC0046494
aattaggttatt

SEQ ID NO: 350071 - DNA, 12 bp, Artificial Sequence
  Oligonucleotide primer for the detection of SNP TSC0046495
ataatattaact

SEQ ID NO: 350072 - DNA, 12 bp, Artificial Sequence
  Oligonucleotide primer for the detection of SNP TSC0046495
taaattttatag

SEQ ID NO: 350073 - DNA, 12 bp, Artificial Sequence
  Oligonucleotide primer for the detection of SNP TSC0046496
ttgttgagaaga

SEQ ID NO: 350074 - DNA, 12 bp, Artificial Sequence
  Oligonucleotide primer for the detection of SNP TSC0046497
aacttcttcaac

SEQ ID NO: 350075 - DNA, 12 bp, Artificial Sequence
  Oligonucleotide primer for the detection of SNP TSC0046497
gaatagtagagg

SEQ ID NO: 350076 - DNA, 12 bp, Artificial Sequence
  Oligonucleotide primer for the detection of SNP TSC0046498
aacaataaataa

SEQ ID NO: 350077 - DNA, 12 bp, Artificial Sequence
  Oligonucleotide primer for the detection of SNP TSC0046498
ttaaggtgtgtt

SEQ ID NO: 350078 - DNA, 12 bp, Artificial Sequence
  Oligonucleotide primer for the detection of SNP TSC0046498
agtaatagatag

SEQ ID NO: 350079 - DNA, 12 bp, Artificial Sequence
  Oligonucleotide primer for the detection of SNP TSC0046499
tcacccaaaaac

SEQ ID NO: 350080 - DNA, 12 bp, Artificial Sequence
  Oligonucleotide primer for the detection of SNP TSC0046499
gttgttaagtta

SEQ ID NO: 350081 - DNA, 12 bp, Artificial Sequence
  Oligonucleotide primer for the detection of SNP TSC0046500
atctttttatca

SEQ ID NO: 350082 - DNA, 12 bp, Artificial Sequence
  Oligonucleotide primer for the detection of SNP TSC0046502
actaattctaca

SEQ ID NO: 350083 - DNA, 12 bp, Artificial Sequence
  Oligonucleotide primer for the detection of SNP TSC0046502
ttttggaagaat

SEQ ID NO: 350084 - DNA, 12 bp, Artificial Sequence
  Oligonucleotide primer for the detection of SNP TSC0046504
actacaaaatcc

SEQ ID NO: 350085 - DNA, 12 bp, Artificial Sequence
  Oligonucleotide primer for the detection of SNP TSC0046504
taggataaataa

SEQ ID NO: 350086 - DNA, 12 bp, Artificial Sequence
  Oligonucleotide primer for the detection of SNP TSC0046505
acatcacaacac

SEQ ID NO: 350087 - DNA, 12 bp, Artificial Sequence
  Oligonucleotide primer for the detection of SNP TSC0046505
acatcacgacac

SEQ ID NO: 350088 - DNA, 12 bp, Artificial Sequence
  Oligonucleotide primer for the detection of SNP TSC0046505
aactcactcttt

SEQ ID NO: 350089 - DNA, 12 bp, Artificial Sequence
  Oligonucleotide primer for the detection of SNP TSC0046505
atattatggtat

SEQ ID NO: 350090 - DNA, 12 bp, Artificial Sequence
  Oligonucleotide primer for the detection of SNP TSC0046505
atattacggtat

SEQ ID NO: 350091 - DNA, 12 bp, Artificial Sequence
  Oligonucleotide primer for the detection of SNP TSC0046506
gtgttggtaagt

SEQ ID NO: 350092 - DNA, 12 bp, Artificial Sequence
  Oligonucleotide primer for the detection of SNP TSC0046506
gtgtcggtaagt

SEQ ID NO: 350093 - DNA, 12 bp, Artificial Sequence
  Oligonucleotide primer for the detection of SNP TSC0046506
taccgacaaaca

SEQ ID NO: 350094 - DNA, 12 bp, Artificial Sequence
  Oligonucleotide primer for the detection of SNP TSC0046506
gggttttaaggt

SEQ ID NO: 350095 - DNA, 12 bp, Artificial Sequence
  Oligonucleotide primer for the detection of SNP TSC0046507
caataacctacc

SEQ ID NO: 350096 - DNA, 12 bp, Artificial Sequence
  Oligonucleotide primer for the detection of SNP TSC0046507
attttggtttta

SEQ ID NO: 350097 - DNA, 12 bp, Artificial Sequence
  Oligonucleotide primer for the detection of SNP TSC0046509
ctaacaaccaac

SEQ ID NO: 350098 - DNA, 12 bp, Artificial Sequence
  Oligonucleotide primer for the detection of SNP TSC0046509
gtaaatgttttg

SEQ ID NO: 350099 - DNA, 12 bp, Artificial Sequence
  Oligonucleotide primer for the detection of SNP TSC0046509
ataaatatccta

SEQ ID NO: 350100 - DNA, 12 bp, Artificial Sequence
  Oligonucleotide primer for the detection of SNP TSC0046509
ttagtaattagt

SEQ ID NO: 350101 - DNA, 12 bp, Artificial Sequence
  Oligonucleotide primer for the detection of SNP TSC0046510
ttggaatggata

SEQ ID NO: 350102 - DNA, 12 bp, Artificial Sequence
  Oligonucleotide primer for the detection of SNP TSC0046510
tcggaatggata

SEQ ID NO: 350103 - DNA, 12 bp, Artificial Sequence
  Oligonucleotide primer for the detection of SNP TSC0046513
aacctctttaac

SEQ ID NO: 350104 - DNA, 12 bp, Artificial Sequence
  Oligonucleotide primer for the detection of SNP TSC0046514
ttttctaatatc

SEQ ID NO: 350105 - DNA, 12 bp, Artificial Sequence
  Oligonucleotide primer for the detection of SNP TSC0046514
aatgtagagtaa

SEQ ID NO: 350106 - DNA, 12 bp, Artificial Sequence
  Oligonucleotide primer for the detection of SNP TSC0046515
actaactttact

SEQ ID NO: 350107 - DNA, 12 bp, Artificial Sequence
  Oligonucleotide primer for the detection of SNP TSC0046515
tatatgttgtgg

SEQ ID NO: 350108 - DNA, 12 bp, Artificial Sequence
  Oligonucleotide primer for the detection of SNP TSC0046515
tatacgttgtgg

SEQ ID NO: 350109 - DNA, 12 bp, Artificial Sequence
  Oligonucleotide primer for the detection of SNP TSC0046516
ataatccaaaca

SEQ ID NO: 350110 - DNA, 12 bp, Artificial Sequence
  Oligonucleotide primer for the detection of SNP TSC0046516
tttgtgatttgt

SEQ ID NO: 350111 - DNA, 12 bp, Artificial Sequence
  Oligonucleotide primer for the detection of SNP TSC0046516
ttcgtgatttgt

SEQ ID NO: 350112 - DNA, 12 bp, Artificial Sequence
  Oligonucleotide primer for the detection of SNP TSC0046516
tttgtgattcgt

SEQ ID NO: 350113 - DNA, 12 bp, Artificial Sequence
  Oligonucleotide primer for the detection of SNP TSC0046516
ttcgtgattcgt

SEQ ID NO: 350114 - DNA, 12 bp, Artificial Sequence
  Oligonucleotide primer for the detection of SNP TSC0046516
tttgtgatttgc

SEQ ID NO: 350115 - DNA, 12 bp, Artificial Sequence
  Oligonucleotide primer for the detection of SNP TSC0046516
ttcgtgatttgc

SEQ ID NO: 350116 - DNA, 12 bp, Artificial Sequence
  Oligonucleotide primer for the detection of SNP TSC0046516
tttgtgattcgc

SEQ ID NO: 350117 - DNA, 12 bp, Artificial Sequence
  Oligonucleotide primer for the detection of SNP TSC0046516
ttcgtgattcgc

SEQ ID NO: 350118 - DNA, 12 bp, Artificial Sequence
  Oligonukleotid-Primer
ttcataatccac

SEQ ID NO: 350119 - DNA, 12 bp, Artificial Sequence
  Oligonucleotide primer for the detection of SNP TSC0046516
ttcataatccgc

SEQ ID NO: 350120 - DNA, 12 bp, Artificial Sequence
  Oligonucleotide primer for the detection of SNP TSC0046516
ttcgtaatccac

SEQ ID NO: 350121 - DNA, 12 bp, Artificial Sequence
  Oligonucleotide primer for the detection of SNP TSC0046516
ttcgtaatccgc

SEQ ID NO: 350122 - DNA, 12 bp, Artificial Sequence
  Oligonucleotide primer for the detection of SNP TSC0046516
gatagtttaggt

SEQ ID NO: 350123 - DNA, 12 bp, Artificial Sequence
  Oligonucleotide primer for the detection of SNP TSC0046517
cgaaacaaaaaa

SEQ ID NO: 350124 - DNA, 12 bp, Artificial Sequence
  Oligonucleotide primer for the detection of SNP TSC0046517
attttgagttgt

SEQ ID NO: 350125 - DNA, 12 bp, Artificial Sequence
  Oligonucleotide primer for the detection of SNP TSC0046517
ccctaaactaca

SEQ ID NO: 350126 - DNA, 12 bp, Artificial Sequence
  Oligonucleotide primer for the detection of SNP TSC0046518
tttctcatctac

SEQ ID NO: 350127 - DNA, 12 bp, Artificial Sequence
  Oligonucleotide primer for the detection of SNP TSC0046518
tttctcgtctac

SEQ ID NO: 350128 - DNA, 12 bp, Artificial Sequence
  Oligonucleotide primer for the detection of SNP TSC0046519
tcgtgatttatt

SEQ ID NO: 350129 - DNA, 12 bp, Artificial Sequence
  Oligonucleotide primer for the detection of SNP TSC0046519
tcataatccacc

SEQ ID NO: 350130 - DNA, 12 bp, Artificial Sequence
  Oligonucleotide primer for the detection of SNP TSC0046519
tcgtaatccacc

SEQ ID NO: 350131 - DNA, 12 bp, Artificial Sequence
  Oligonucleotide primer for the detection of SNP TSC0046519
gggaagttaagg

SEQ ID NO: 350132 - DNA, 12 bp, Artificial Sequence
  Oligonucleotide primer for the detection of SNP TSC0046520
atctatacaata

SEQ ID NO: 350133 - DNA, 12 bp, Artificial Sequence
  Oligonucleotide primer for the detection of SNP TSC0046520
aaagaaatatgg

SEQ ID NO: 350134 - DNA, 12 bp, Artificial Sequence
  Oligonucleotide primer for the detection of SNP TSC0004545
ttggattttaag

SEQ ID NO: 350135 - DNA, 12 bp, Artificial Sequence
  Oligonucleotide primer for the detection of SNP TSC0004545
ttaaactccaaa

SEQ ID NO: 350136 - DNA, 12 bp, Artificial Sequence
  Oligonucleotide primer for the detection of SNP TSC0004545
aaatagagagaa

SEQ ID NO: 350137 - DNA, 12 bp, Artificial Sequence
  Oligonucleotide primer for the detection of SNP TSC0046525
ttctccccaatt

SEQ ID NO: 350138 - DNA, 12 bp, Artificial Sequence
  Oligonucleotide primer for the detection of SNP TSC0046525
agtggttgttta

SEQ ID NO: 350139 - DNA, 12 bp, Artificial Sequence
  Oligonucleotide primer for the detection of SNP TSC0046526
aattaaaattca

SEQ ID NO: 350140 - DNA, 12 bp, Artificial Sequence
  Oligonucleotide primer for the detection of SNP TSC0046526
ccataaactata

SEQ ID NO: 350141 - DNA, 12 bp, Artificial Sequence
  Oligonucleotide primer for the detection of SNP TSC0046526
gaattagggttt

SEQ ID NO: 350142 - DNA, 12 bp, Artificial Sequence
  Oligonucleotide primer for the detection of SNP TSC0046527
cacctaaaataa

SEQ ID NO: 350143 - DNA, 12 bp, Artificial Sequence
  Oligonucleotide primer for the detection of SNP TSC0046527
tttttgttggga

SEQ ID NO: 350144 - DNA, 12 bp, Artificial Sequence
  Oligonucleotide primer for the detection of SNP TSC0046527
ttttcgttggga

SEQ ID NO: 350145 - DNA, 12 bp, Artificial Sequence
  Oligonucleotide primer for the detection of SNP TSC0046527
cccccactaaaa

SEQ ID NO: 350146 - DNA, 12 bp, Artificial Sequence
  Oligonucleotide primer for the detection of SNP TSC0046527
cccccgctaaaa

SEQ ID NO: 350147 - DNA, 12 bp, Artificial Sequence
  Oligonucleotide primer for the detection of SNP TSC0046527
atatttgaagtg

SEQ ID NO: 350148 - DNA, 12 bp, Artificial Sequence
  Oligonucleotide primer for the detection of SNP TSC0046528
actaaaccaact

SEQ ID NO: 350149 - DNA, 12 bp, Artificial Sequence
  Oligonucleotide primer for the detection of SNP TSC0046528
gctaaaccaact

SEQ ID NO: 350150 - DNA, 12 bp, Artificial Sequence
  Oligonucleotide primer for the detection of SNP TSC0046529
ttctattaaaac

SEQ ID NO: 350151 - DNA, 12 bp, Artificial Sequence
  Oligonucleotide primer for the detection of SNP TSC0046529
tagttggtttag

SEQ ID NO: 350152 - DNA, 12 bp, Artificial Sequence
  Oligonucleotide primer for the detection of SNP TSC0046529
ttttgttaaggt

SEQ ID NO: 350153 - DNA, 12 bp, Artificial Sequence
  Oligonucleotide primer for the detection of SNP TSC0046530
tagatagttttt

SEQ ID NO: 350154 - DNA, 12 bp, Artificial Sequence
  Oligonucleotide primer for the detection of SNP TSC0046530
caaacaactttt

SEQ ID NO: 350155 - DNA, 12 bp, Artificial Sequence
  Oligonucleotide primer for the detection of SNP TSC0046531
cctcaacttcat

SEQ ID NO: 350156 - DNA, 12 bp, Artificial Sequence
  Oligonucleotide primer for the detection of SNP TSC0046531
cctcaacttcgt

SEQ ID NO: 350157 - DNA, 12 bp, Artificial Sequence
  Oligonucleotide primer for the detection of SNP TSC0046531
gaattatttgag

SEQ ID NO: 350158 - DNA, 12 bp, Artificial Sequence
  Oligonucleotide primer for the detection of SNP TSC0046532
tttgttttagaa

SEQ ID NO: 350159 - DNA, 12 bp, Artificial Sequence
  Oligonucleotide primer for the detection of SNP TSC0046533
tcaaaaacataa

SEQ ID NO: 350160 - DNA, 12 bp, Artificial Sequence
  Oligonucleotide primer for the detection of SNP TSC0046533
cctttcacctcc

SEQ ID NO: 350161 - DNA, 12 bp, Artificial Sequence
  Oligonucleotide primer for the detection of SNP TSC0046534
tagggttaagaa

SEQ ID NO: 350162 - DNA, 12 bp, Artificial Sequence
  Oligonucleotide primer for the detection of SNP TSC0046534
ggttataaattt

SEQ ID NO: 350163 - DNA, 12 bp, Artificial Sequence
  Oligonucleotide primer for the detection of SNP TSC0046535
acttatttaatc

SEQ ID NO: 350164 - DNA, 12 bp, Artificial Sequence
  Oligonucleotide primer for the detection of SNP TSC0046535
aataaaaaagag

SEQ ID NO: 350165 - DNA, 12 bp, Artificial Sequence
  Oligonucleotide primer for the detection of SNP TSC0046536
tattagttaaaa

SEQ ID NO: 350166 - DNA, 12 bp, Artificial Sequence
  Oligonucleotide primer for the detection of SNP TSC0046536
cactaattaaaa

SEQ ID NO: 350167 - DNA, 12 bp, Artificial Sequence
  Oligonucleotide primer for the detection of SNP TSC0009884
cccacacctaaa

SEQ ID NO: 350168 - DNA, 12 bp, Artificial Sequence
  Oligonucleotide primer for the detection of SNP TSC0009884
atgaagagtatt

SEQ ID NO: 350169 - DNA, 12 bp, Artificial Sequence
  Oligonucleotide primer for the detection of SNP TSC0006743
taatccaatcac

SEQ ID NO: 350170 - DNA, 12 bp, Artificial Sequence
  Oligonucleotide primer for the detection of SNP TSC0006743
aatttggtggga

SEQ ID NO: 350171 - DNA, 12 bp, Artificial Sequence
  Oligonucleotide primer for the detection of SNP TSC0006744
tgggggaaattg

SEQ ID NO: 350172 - DNA, 12 bp, Artificial Sequence
  Oligonucleotide primer for the detection of SNP TSC0006744
tggattatgggg

SEQ ID NO: 350173 - DNA, 12 bp, Artificial Sequence
  Oligonucleotide primer for the detection of SNP TSC0046541
aaatataaatac

SEQ ID NO: 350174 - DNA, 12 bp, Artificial Sequence
  Oligonucleotide primer for the detection of SNP TSC0046541
gaggtttgttag

SEQ ID NO: 350175 - DNA, 12 bp, Artificial Sequence
  Oligonucleotide primer for the detection of SNP TSC0046541
gaggttcgttag

SEQ ID NO: 350176 - DNA, 12 bp, Artificial Sequence
  Oligonucleotide primer for the detection of SNP TSC0046541
aaactcattaaa

SEQ ID NO: 350177 - DNA, 12 bp, Artificial Sequence
  Oligonucleotide primer for the detection of SNP TSC0046541
aaactcgttaaa

SEQ ID NO: 350178 - DNA, 12 bp, Artificial Sequence
  Oligonucleotide primer for the detection of SNP TSC0046541
gaatgtgaatat

SEQ ID NO: 350179 - DNA, 12 bp, Artificial Sequence
  Oligonucleotide primer for the detection of SNP TSC0046541
gaatgtgaatac

SEQ ID NO: 350180 - DNA, 12 bp, Artificial Sequence
  Oligonucleotide primer for the detection of SNP TSC0046542
cttatctaccat

SEQ ID NO: 350181 - DNA, 12 bp, Artificial Sequence
  Oligonucleotide primer for the detection of SNP TSC0046542
tatagattatgg

SEQ ID NO: 350182 - DNA, 12 bp, Artificial Sequence
  Oligonucleotide primer for the detection of SNP TSC0046542
tacaaattataa

SEQ ID NO: 350183 - DNA, 12 bp, Artificial Sequence
  Oligonucleotide primer for the detection of SNP TSC0046542
tttatttgttat

SEQ ID NO: 350184 - DNA, 12 bp, Artificial Sequence
  Oligonucleotide primer for the detection of SNP TSC0046543
attattccaaca

SEQ ID NO: 350185 - DNA, 12 bp, Artificial Sequence
  Oligonucleotide primer for the detection of SNP TSC0046543
tagaggatataa

SEQ ID NO: 350186 - DNA, 12 bp, Artificial Sequence
  Oligonucleotide primer for the detection of SNP TSC0046544
atatctaatatc

SEQ ID NO: 350187 - DNA, 12 bp, Artificial Sequence
  Oligonucleotide primer for the detection of SNP TSC0046544
ttaggtaatatt

SEQ ID NO: 350188 - DNA, 12 bp, Artificial Sequence
  Oligonucleotide primer for the detection of SNP TSC0046544
ttcaaataatac

SEQ ID NO: 350189 - DNA, 12 bp, Artificial Sequence
  Oligonucleotide primer for the detection of SNP TSC0046544
gtgtttggtatt

SEQ ID NO: 350190 - DNA, 12 bp, Artificial Sequence
  Oligonucleotide primer for the detection of SNP TSC0046544
gtgtttggtatc

SEQ ID NO: 350191 - DNA, 12 bp, Artificial Sequence
  Oligonucleotide primer for the detection of SNP TSC0046547
tgttttgaggta

SEQ ID NO: 350192 - DNA, 12 bp, Artificial Sequence
  Oligonucleotide primer for the detection of SNP TSC0046548
aatcccttaatt

SEQ ID NO: 350193 - DNA, 12 bp, Artificial Sequence
  Oligonucleotide primer for the detection of SNP TSC0046548
ggaatggaagta

SEQ ID NO: 350194 - DNA, 12 bp, Artificial Sequence
  Oligonucleotide primer for the detection of SNP TSC0046549
cctttcctcaat

SEQ ID NO: 350195 - DNA, 12 bp, Artificial Sequence
  Oligonucleotide primer for the detection of SNP TSC0046554
caaatctattct

SEQ ID NO: 350196 - DNA, 12 bp, Artificial Sequence
  Oligonucleotide primer for the detection of SNP TSC0001266
ctatttcatact

SEQ ID NO: 350197 - DNA, 12 bp, Artificial Sequence
  Oligonucleotide primer for the detection of SNP TSC0009578
cttcccaaaaac

SEQ ID NO: 350198 - DNA, 12 bp, Artificial Sequence
  Oligonucleotide primer for the detection of SNP TSC0009578
aatgttggtata

SEQ ID NO: 350199 - DNA, 12 bp, Artificial Sequence
  Oligonucleotide primer for the detection of SNP TSC0046561
gtttggtttttt

SEQ ID NO: 350200 - DNA, 12 bp, Artificial Sequence
  Oligonucleotide primer for the detection of SNP TSC0046561
acctaacctccc

SEQ ID NO: 350201 - DNA, 12 bp, Artificial Sequence
  Oligonucleotide primer for the detection of SNP TSC0046561
tgattagggagg

SEQ ID NO: 350202 - DNA, 12 bp, Artificial Sequence
  Oligonucleotide primer for the detection of SNP TSC0046562
aaaacataatta

SEQ ID NO: 350203 - DNA, 12 bp, Artificial Sequence
  Oligonucleotide primer for the detection of SNP TSC0046562
ttttgtagaggg

SEQ ID NO: 350204 - DNA, 12 bp, Artificial Sequence
  Oligonucleotide primer for the detection of SNP TSC0000498
ccatatttatat

SEQ ID NO: 350205 - DNA, 12 bp, Artificial Sequence
  Oligonucleotide primer for the detection of SNP TSC0000498
agttggaatgta

SEQ ID NO: 350206 - DNA, 12 bp, Artificial Sequence
  Oligonucleotide primer for the detection of SNP TSC0000498
tatgtttgtgtt

SEQ ID NO: 350207 - DNA, 12 bp, Artificial Sequence
  Oligonucleotide primer for the detection of SNP TSC0046564
ttacttatttat

SEQ ID NO: 350208 - DNA, 12 bp, Artificial Sequence
  Oligonucleotide primer for the detection of SNP TSC0046565
aaaaaatctact

SEQ ID NO: 350209 - DNA, 12 bp, Artificial Sequence
  Oligonucleotide primer for the detection of SNP TSC0046565
agttataatata

SEQ ID NO: 350210 - DNA, 12 bp, Artificial Sequence
  Oligonucleotide primer for the detection of SNP TSC0046566
aataaataatgg

SEQ ID NO: 350211 - DNA, 12 bp, Artificial Sequence
  Oligonucleotide primer for the detection of SNP TSC0046567
tacccaaaccaa

SEQ ID NO: 350212 - DNA, 12 bp, Artificial Sequence
  Oligonucleotide primer for the detection of SNP TSC0046567
gtgtgttttgtg

SEQ ID NO: 350213 - DNA, 12 bp, Artificial Sequence
  Oligonucleotide primer for the detection of SNP TSC0046567
tataccctataa

SEQ ID NO: 350214 - DNA, 12 bp, Artificial Sequence
  Oligonucleotide primer for the detection of SNP TSC0046567
atgtttagatta

SEQ ID NO: 350215 - DNA, 12 bp, Artificial Sequence
  Oligonucleotide primer for the detection of SNP TSC0046568
aaaaaacatatt

SEQ ID NO: 350216 - DNA, 12 bp, Artificial Sequence
  Oligonucleotide primer for the detection of SNP TSC0046569
aaaataacatta

SEQ ID NO: 350217 - DNA, 12 bp, Artificial Sequence
  Oligonucleotide primer for the detection of SNP TSC0046569
aaaataacgtta

SEQ ID NO: 350218 - DNA, 12 bp, Artificial Sequence
  Oligonucleotide primer for the detection of SNP TSC0046569
gtgtatgagtat

SEQ ID NO: 350219 - DNA, 12 bp, Artificial Sequence
  Oligonucleotide primer for the detection of SNP TSC0046569
ggaatggtgtta

SEQ ID NO: 350220 - DNA, 12 bp, Artificial Sequence
  Oligonucleotide primer for the detection of SNP TSC0046569
ggaatggcgtta

SEQ ID NO: 350221 - DNA, 12 bp, Artificial Sequence
  Oligonucleotide primer for the detection of SNP TSC0000267
ctccttcactac

SEQ ID NO: 350222 - DNA, 12 bp, Artificial Sequence
  Oligonucleotide primer for the detection of SNP TSC0000267
ggtgtagatgtg

SEQ ID NO: 350223 - DNA, 12 bp, Artificial Sequence
  Oligonucleotide primer for the detection of SNP TSC0000267
ggtgtagatgcg

SEQ ID NO: 350224 - DNA, 12 bp, Artificial Sequence
  Oligonucleotide primer for the detection of SNP TSC0008275
aaaaactcgata

SEQ ID NO: 350225 - DNA, 12 bp, Artificial Sequence
  Oligonucleotide primer for the detection of SNP TSC0008275
tggaggttttgt

SEQ ID NO: 350226 - DNA, 12 bp, Artificial Sequence
  Oligonucleotide primer for the detection of SNP TSC0008275
taaaaatcctac

SEQ ID NO: 350227 - DNA, 12 bp, Artificial Sequence
  Oligonucleotide primer for the detection of SNP TSC0008275
gaaagtttggta

SEQ ID NO: 350228 - DNA, 12 bp, Artificial Sequence
  Oligonucleotide primer for the detection of SNP TSC0008275
gaaagttcggta

SEQ ID NO: 350229 - DNA, 12 bp, Artificial Sequence
  Oligonucleotide primer for the detection of SNP TSC0008276
taatctatatat

SEQ ID NO: 350230 - DNA, 12 bp, Artificial Sequence
  Oligonucleotide primer for the detection of SNP TSC0008276
tccttccccaca

SEQ ID NO: 350231 - DNA, 12 bp, Artificial Sequence
  Oligonucleotide primer for the detection of SNP TSC0008276
tccttccccgca

SEQ ID NO: 350232 - DNA, 12 bp, Artificial Sequence
  Oligonucleotide primer for the detection of SNP TSC0046570
aacttttaatat

SEQ ID NO: 350233 - DNA, 12 bp, Artificial Sequence
  Oligonucleotide primer for the detection of SNP TSC0046570
ttatgatagagt

SEQ ID NO: 350234 - DNA, 12 bp, Artificial Sequence
  Oligonucleotide primer for the detection of SNP TSC0046570
cttataataaaa

SEQ ID NO: 350235 - DNA, 12 bp, Artificial Sequence
  Oligonucleotide primer for the detection of SNP TSC0046570
aatttttgatat

SEQ ID NO: 350236 - DNA, 12 bp, Artificial Sequence
  Oligonucleotide primer for the detection of SNP TSC0046571
cttcacatatta

SEQ ID NO: 350237 - DNA, 12 bp, Artificial Sequence
  Oligonucleotide primer for the detection of SNP TSC0046571
aaattagtgttt

SEQ ID NO: 350238 - DNA, 12 bp, Artificial Sequence
  Oligonucleotide primer for the detection of SNP TSC0046571
aaattagcgttt

SEQ ID NO: 350239 - DNA, 12 bp, Artificial Sequence
  Oligonucleotide primer for the detection of SNP TSC0046571
aattaacactta

SEQ ID NO: 350240 - DNA, 12 bp, Artificial Sequence
  Oligonucleotide primer for the detection of SNP TSC0046571
aattaacgctta

SEQ ID NO: 350241 - DNA, 12 bp, Artificial Sequence
  Oligonucleotide primer for the detection of SNP TSC0046572
cccctaaatacc

SEQ ID NO: 350242 - DNA, 12 bp, Artificial Sequence
  Oligonucleotide primer for the detection of SNP TSC0046572
gggtgaagtttt

SEQ ID NO: 350243 - DNA, 12 bp, Artificial Sequence
  Oligonucleotide primer for the detection of SNP TSC0046572
gggtgaagtttc

SEQ ID NO: 350244 - DNA, 12 bp, Artificial Sequence
  Oligonucleotide primer for the detection of SNP TSC0046572
taaataaaacct

SEQ ID NO: 350245 - DNA, 12 bp, Artificial Sequence
  Oligonucleotide primer for the detection of SNP TSC0046573
ccctcaccccca

SEQ ID NO: 350246 - DNA, 12 bp, Artificial Sequence
  Oligonucleotide primer for the detection of SNP TSC0046573
taggttattgag

SEQ ID NO: 350247 - DNA, 12 bp, Artificial Sequence
  Oligonucleotide primer for the detection of SNP TSC0046574
tcacccaattaa

SEQ ID NO: 350248 - DNA, 12 bp, Artificial Sequence
  Oligonucleotide primer for the detection of SNP TSC0046574
gttttagagttt

SEQ ID NO: 350249 - DNA, 12 bp, Artificial Sequence
  Oligonucleotide primer for the detection of SNP TSC0046574
ttatttagttag

SEQ ID NO: 350250 - DNA, 12 bp, Artificial Sequence
  Oligonucleotide primer for the detection of SNP TSC0046575
ccctacacctca

SEQ ID NO: 350251 - DNA, 12 bp, Artificial Sequence
  Oligonukleotid-Primer
ccctacacctcg

SEQ ID NO: 350252 - DNA, 12 bp, Artificial Sequence
  Oligonucleotide primer for the detection of SNP TSC0046575
ccctacgcctca

SEQ ID NO: 350253 - DNA, 12 bp, Artificial Sequence
  Oligonucleotide primer for the detection of SNP TSC0046575
ccctacgcctcg

SEQ ID NO: 350254 - DNA, 12 bp, Artificial Sequence
  Oligonucleotide primer for the detection of SNP TSC0046575
ggtggggttggg

SEQ ID NO: 350255 - DNA, 12 bp, Artificial Sequence
  Oligonucleotide primer for the detection of SNP TSC0046575
ggcggggttggg

SEQ ID NO: 350256 - DNA, 12 bp, Artificial Sequence
  Oligonucleotide primer for the detection of SNP TSC0046575
ggtggggtcggg

SEQ ID NO: 350257 - DNA, 12 bp, Artificial Sequence
  Oligonucleotide primer for the detection of SNP TSC0046575
ggcggggtcggg

SEQ ID NO: 350258 - DNA, 12 bp, Artificial Sequence
  Oligonucleotide primer for the detection of SNP TSC0046575
acaaaaccgaaa

SEQ ID NO: 350259 - DNA, 12 bp, Artificial Sequence
  Oligonucleotide primer for the detection of SNP TSC0046575
acgaaaccgaaa

SEQ ID NO: 350260 - DNA, 12 bp, Artificial Sequence
  Oligonucleotide primer for the detection of SNP TSC0046575
ttttacgttttg

SEQ ID NO: 350261 - DNA, 12 bp, Artificial Sequence
  Oligonucleotide primer for the detection of SNP TSC0046575
ttttatgtttcg

SEQ ID NO: 350262 - DNA, 12 bp, Artificial Sequence
  Oligonucleotide primer for the detection of SNP TSC0046575
ttttacgtttcg

SEQ ID NO: 350263 - DNA, 12 bp, Artificial Sequence
  Oligonucleotide primer for the detection of SNP TSC0046576
attttttaattg

SEQ ID NO: 350264 - DNA, 12 bp, Artificial Sequence
  Oligonucleotide primer for the detection of SNP TSC0046576
attttctaatta

SEQ ID NO: 350265 - DNA, 12 bp, Artificial Sequence
  Oligonucleotide primer for the detection of SNP TSC0046577
ttattatatcca

SEQ ID NO: 350266 - DNA, 12 bp, Artificial Sequence
  Oligonucleotide primer for the detection of SNP TSC0046577
atatttattaga

SEQ ID NO: 350267 - DNA, 12 bp, Artificial Sequence
  Oligonucleotide primer for the detection of SNP TSC0046578
caaataccttct

SEQ ID NO: 350268 - DNA, 12 bp, Artificial Sequence
  Oligonucleotide primer for the detection of SNP TSC0046578
tgtaaggatata

SEQ ID NO: 350269 - DNA, 12 bp, Artificial Sequence
  Oligonucleotide primer for the detection of SNP TSC0046578
ataaaaacacaa

SEQ ID NO: 350270 - DNA, 12 bp, Artificial Sequence
  Oligonucleotide primer for the detection of SNP TSC0046578
agatgttttttc

SEQ ID NO: 350271 - DNA, 12 bp, Artificial Sequence
  Oligonucleotide primer for the detection of SNP TSC0000797
tatttaaaaatt

SEQ ID NO: 350272 - DNA, 12 bp, Artificial Sequence
  Oligonucleotide primer for the detection of SNP TSC0000797
tagaggaggaag

SEQ ID NO: 350273 - DNA, 12 bp, Artificial Sequence
  Oligonucleotide primer for the detection of SNP TSC0000915
ttataaaaactc

SEQ ID NO: 350274 - DNA, 12 bp, Artificial Sequence
  Oligonucleotide primer for the detection of SNP TSC0000916
ataaccatccaa

SEQ ID NO: 350275 - DNA, 12 bp, Artificial Sequence
  Oligonucleotide primer for the detection of SNP TSC0000916
cacccaaatctc

SEQ ID NO: 350276 - DNA, 12 bp, Artificial Sequence
  Oligonucleotide primer for the detection of SNP TSC0046580
attaaaactctc

SEQ ID NO: 350277 - DNA, 12 bp, Artificial Sequence
  Oligonucleotide primer for the detection of SNP TSC0046580
ttgtgtaaataa

SEQ ID NO: 350278 - DNA, 12 bp, Artificial Sequence
  Oligonucleotide primer for the detection of SNP TSC0000848
atattttaatac

SEQ ID NO: 350279 - DNA, 12 bp, Artificial Sequence
  Oligonucleotide primer for the detection of SNP TSC0000848
tattatatatta

SEQ ID NO: 350280 - DNA, 12 bp, Artificial Sequence
  Oligonucleotide primer for the detection of SNP TSC0046583
ctctaactcccc

SEQ ID NO: 350281 - DNA, 12 bp, Artificial Sequence
  Oligonucleotide primer for the detection of SNP TSC0046584
aaaacataaaat

SEQ ID NO: 350282 - DNA, 12 bp, Artificial Sequence
  Oligonucleotide primer for the detection of SNP TSC0046584
aaggagagtatg

SEQ ID NO: 350283 - DNA, 12 bp, Artificial Sequence
  Oligonucleotide primer for the detection of SNP TSC0046584
aaggagagtacg

SEQ ID NO: 350284 - DNA, 12 bp, Artificial Sequence
  Oligonucleotide primer for the detection of SNP TSC0046584
aaaaaaaacacg

SEQ ID NO: 350285 - DNA, 12 bp, Artificial Sequence
  Oligonucleotide primer for the detection of SNP TSC0046584
ggggtatgaggt

SEQ ID NO: 350286 - DNA, 12 bp, Artificial Sequence
  Oligonucleotide primer for the detection of SNP TSC0046585
aacccgaaaaac

SEQ ID NO: 350287 - DNA, 12 bp, Artificial Sequence
  Oligonucleotide primer for the detection of SNP TSC0046585
agtagggttttt

SEQ ID NO: 350288 - DNA, 12 bp, Artificial Sequence
  Oligonucleotide primer for the detection of SNP TSC0046585
acaaaaccccca

SEQ ID NO: 350289 - DNA, 12 bp, Artificial Sequence
  Oligonucleotide primer for the detection of SNP TSC0046585
ggtttgaagaat

SEQ ID NO: 350290 - DNA, 12 bp, Artificial Sequence
  Oligonucleotide primer for the detection of SNP TSC0046585
ggttcgaagaat

SEQ ID NO: 350291 - DNA, 12 bp, Artificial Sequence
  Oligonucleotide primer for the detection of SNP TSC0046588
tccccacccaca

SEQ ID NO: 350292 - DNA, 12 bp, Artificial Sequence
  Oligonucleotide primer for the detection of SNP TSC0046592
cataaaactaat

SEQ ID NO: 350293 - DNA, 12 bp, Artificial Sequence
  Oligonucleotide primer for the detection of SNP TSC0046592
gtgataagttag

SEQ ID NO: 350294 - DNA, 12 bp, Artificial Sequence
  Oligonucleotide primer for the detection of SNP TSC0046593
tcaactttatac

SEQ ID NO: 350295 - DNA, 12 bp, Artificial Sequence
  Oligonucleotide primer for the detection of SNP TSC0046594
attctacactaa

SEQ ID NO: 350296 - DNA, 12 bp, Artificial Sequence
  Oligonucleotide primer for the detection of SNP TSC0046594
tttgtagttgta

SEQ ID NO: 350297 - DNA, 12 bp, Artificial Sequence
  Oligonucleotide primer for the detection of SNP TSC0046594
cttataactata

SEQ ID NO: 350298 - DNA, 12 bp, Artificial Sequence
  Oligonucleotide primer for the detection of SNP TSC0046594
attttatattgg

SEQ ID NO: 350299 - DNA, 12 bp, Artificial Sequence
  Oligonucleotide primer for the detection of SNP TSC0046595
taactactaaaa

SEQ ID NO: 350300 - DNA, 12 bp, Artificial Sequence
  Oligonucleotide primer for the detection of SNP TSC0046595
attatattgttt

SEQ ID NO: 350301 - DNA, 12 bp, Artificial Sequence
  Oligonucleotide primer for the detection of SNP TSC0046595
tatcatactatt

SEQ ID NO: 350302 - DNA, 12 bp, Artificial Sequence
  Oligonucleotide primer for the detection of SNP TSC0046595
tagttattgaaa

SEQ ID NO: 350303 - DNA, 12 bp, Artificial Sequence
  Oligonucleotide primer for the detection of SNP TSC0046596
taaaatctataa

SEQ ID NO: 350304 - DNA, 12 bp, Artificial Sequence
  Oligonucleotide primer for the detection of SNP TSC0046596
ggttatggttaa

SEQ ID NO: 350305 - DNA, 12 bp, Artificial Sequence
  Oligonucleotide primer for the detection of SNP TSC0046596
ccataattaaaa

SEQ ID NO: 350306 - DNA, 12 bp, Artificial Sequence
  Oligonucleotide primer for the detection of SNP TSC0046596
taaaatttatag

SEQ ID NO: 350307 - DNA, 12 bp, Artificial Sequence
  Oligonucleotide primer for the detection of SNP TSC0000731
aaggaggaagaa

SEQ ID NO: 350308 - DNA, 12 bp, Artificial Sequence
  Oligonucleotide primer for the detection of SNP TSC0046599
ttcaattactac

SEQ ID NO: 350309 - DNA, 12 bp, Artificial Sequence
  Oligonucleotide primer for the detection of SNP TSC0046599
gaagtaggagag

SEQ ID NO: 350310 - DNA, 12 bp, Artificial Sequence
  Oligonucleotide primer for the detection of SNP TSC0046601
aaaataaaccct

SEQ ID NO: 350311 - DNA, 12 bp, Artificial Sequence
  Oligonucleotide primer for the detection of SNP TSC0046601
tggttggattat

SEQ ID NO: 350312 - DNA, 12 bp, Artificial Sequence
  Oligonucleotide primer for the detection of SNP TSC0046601
attaaattataa

SEQ ID NO: 350313 - DNA, 12 bp, Artificial Sequence
  Oligonucleotide primer for the detection of SNP TSC0046601
aaatgagttttt

SEQ ID NO: 350314 - DNA, 12 bp, Artificial Sequence
  Oligonucleotide primer for the detection of SNP TSC0046602
gtgtggttatgg

SEQ ID NO: 350315 - DNA, 12 bp, Artificial Sequence
  Oligonucleotide primer for the detection of SNP TSC0046603
tgtatagagatg

SEQ ID NO: 350316 - DNA, 12 bp, Artificial Sequence
  Oligonucleotide primer for the detection of SNP TSC0046604
atttacttaccc

SEQ ID NO: 350317 - DNA, 12 bp, Artificial Sequence
  Oligonucleotide primer for the detection of SNP TSC0046607
ttacctaaacca

SEQ ID NO: 350318 - DNA, 12 bp, Artificial Sequence
  Oligonucleotide primer for the detection of SNP TSC0046607
agaggttgggga

SEQ ID NO: 350319 - DNA, 12 bp, Artificial Sequence
  Oligonucleotide primer for the detection of SNP TSC0046608
aattagtagggt

SEQ ID NO: 350320 - DNA, 12 bp, Artificial Sequence
  Oligonucleotide primer for the detection of SNP TSC0046608
aaccaacaaaat

SEQ ID NO: 350321 - DNA, 12 bp, Artificial Sequence
  Oligonucleotide primer for the detection of SNP TSC0046608
gtagagatagtg

SEQ ID NO: 350322 - DNA, 12 bp, Artificial Sequence
  Oligonucleotide primer for the detection of SNP TSC0046609
ctaaatcaaaaa

SEQ ID NO: 350323 - DNA, 12 bp, Artificial Sequence
  Oligonucleotide primer for the detection of SNP TSC0046609
ctaaatcgaaaa

SEQ ID NO: 350324 - DNA, 12 bp, Artificial Sequence
  Oligonucleotide primer for the detection of SNP TSC0046609
tggttatgattt

SEQ ID NO: 350325 - DNA, 12 bp, Artificial Sequence
  Oligonucleotide primer for the detection of SNP TSC0046609
ttgaattgggga

SEQ ID NO: 350326 - DNA, 12 bp, Artificial Sequence
  Oligonucleotide primer for the detection of SNP TSC0046609
ttgaatcgggga

SEQ ID NO: 350327 - DNA, 12 bp, Artificial Sequence
  Oligonucleotide primer for the detection of SNP TSC0046610
tgattttaaaat

SEQ ID NO: 350328 - DNA, 12 bp, Artificial Sequence
  Oligonucleotide primer for the detection of SNP TSC0046610
taattccaaaac

SEQ ID NO: 350329 - DNA, 12 bp, Artificial Sequence
  Oligonucleotide primer for the detection of SNP TSC0046610
atttaaaaagta

SEQ ID NO: 350330 - DNA, 12 bp, Artificial Sequence
  Oligonucleotide primer for the detection of SNP TSC0046617
aactttaatctt

SEQ ID NO: 350331 - DNA, 12 bp, Artificial Sequence
  Oligonucleotide primer for the detection of SNP TSC0046617
ggaagtaggagg

SEQ ID NO: 350332 - DNA, 12 bp, Artificial Sequence
  Oligonucleotide primer for the detection of SNP TSC0046618
aaccctcctaaa

SEQ ID NO: 350333 - DNA, 12 bp, Artificial Sequence
  Oligonucleotide primer for the detection of SNP TSC0046618
gataatattatt

SEQ ID NO: 350334 - DNA, 12 bp, Artificial Sequence
  Oligonucleotide primer for the detection of SNP TSC0046618
gataatattatc

SEQ ID NO: 350335 - DNA, 12 bp, Artificial Sequence
  Oligonucleotide primer for the detection of SNP TSC0046619
actaccaaaaca

SEQ ID NO: 350336 - DNA, 12 bp, Artificial Sequence
  Oligonucleotide primer for the detection of SNP TSC0046619
tgtattggattt

SEQ ID NO: 350337 - DNA, 12 bp, Artificial Sequence
  Oligonucleotide primer for the detection of SNP TSC0046619
gttgttagagta

SEQ ID NO: 350338 - DNA, 12 bp, Artificial Sequence
  Oligonucleotide primer for the detection of SNP TSC0046622
aaacaccatttc

SEQ ID NO: 350339 - DNA, 12 bp, Artificial Sequence
  Oligonucleotide primer for the detection of SNP TSC0046622
ggtaagttattt

SEQ ID NO: 350340 - DNA, 12 bp, Artificial Sequence
  Oligonucleotide primer for the detection of SNP TSC0046624
tttaaacaaaca

SEQ ID NO: 350341 - DNA, 12 bp, Artificial Sequence
  Oligonucleotide primer for the detection of SNP TSC0046624
tatctttttaca

SEQ ID NO: 350342 - DNA, 12 bp, Artificial Sequence
  Oligonucleotide primer for the detection of SNP TSC0046626
aacatcataact

SEQ ID NO: 350343 - DNA, 12 bp, Artificial Sequence
  Oligonucleotide primer for the detection of SNP TSC0046626
aatatttgtatt

SEQ ID NO: 350344 - DNA, 12 bp, Artificial Sequence
  Oligonucleotide primer for the detection of SNP TSC0046626
aatacctatatc

SEQ ID NO: 350345 - DNA, 12 bp, Artificial Sequence
  Oligonucleotide primer for the detection of SNP TSC0046626
gatattatgatt

SEQ ID NO: 350346 - DNA, 12 bp, Artificial Sequence
  Oligonucleotide primer for the detection of SNP TSC0046630
tataataataat

SEQ ID NO: 350347 - DNA, 12 bp, Artificial Sequence
  Oligonucleotide primer for the detection of SNP TSC0046630
aatcgttttata

SEQ ID NO: 350348 - DNA, 12 bp, Artificial Sequence
  Oligonucleotide primer for the detection of SNP TSC0046630
aatcacttcata

SEQ ID NO: 350349 - DNA, 12 bp, Artificial Sequence
  Oligonucleotide primer for the detection of SNP TSC0046630
aatcgcttcata

SEQ ID NO: 350350 - DNA, 12 bp, Artificial Sequence
  Oligonucleotide primer for the detection of SNP TSC0046632
ataaatattaac

SEQ ID NO: 350351 - DNA, 12 bp, Artificial Sequence
  Oligonucleotide primer for the detection of SNP TSC0046632
tttattaattag

SEQ ID NO: 350352 - DNA, 12 bp, Artificial Sequence
  Oligonucleotide primer for the detection of SNP TSC0046632
atgaatattaat

SEQ ID NO: 350353 - DNA, 12 bp, Artificial Sequence
  Oligonucleotide primer for the detection of SNP TSC0046634
tttattattact

SEQ ID NO: 350354 - DNA, 12 bp, Artificial Sequence
  Oligonucleotide primer for the detection of SNP TSC0046634
taggaattagaa

SEQ ID NO: 350355 - DNA, 12 bp, Artificial Sequence
  Oligonucleotide primer for the detection of SNP TSC0046635
cacctccacaaa

SEQ ID NO: 350356 - DNA, 12 bp, Artificial Sequence
  Oligonucleotide primer for the detection of SNP TSC0046635
gtaatatttatg

SEQ ID NO: 350357 - DNA, 12 bp, Artificial Sequence
  Oligonucleotide primer for the detection of SNP TSC0046635
gtaatatttacg

SEQ ID NO: 350358 - DNA, 12 bp, Artificial Sequence
  Oligonucleotide primer for the detection of SNP TSC0046635
ataacatctaca

SEQ ID NO: 350359 - DNA, 12 bp, Artificial Sequence
  Oligonucleotide primer for the detection of SNP TSC0046635
ataacatctacg

SEQ ID NO: 350360 - DNA, 12 bp, Artificial Sequence
  Oligonucleotide primer for the detection of SNP TSC0046636
cctcactataaa

SEQ ID NO: 350361 - DNA, 12 bp, Artificial Sequence
  Oligonucleotide primer for the detection of SNP TSC0046636
atgttggttgtt

SEQ ID NO: 350362 - DNA, 12 bp, Artificial Sequence
  Oligonucleotide primer for the detection of SNP TSC0046636
atactaactact

SEQ ID NO: 350363 - DNA, 12 bp, Artificial Sequence
  Oligonucleotide primer for the detection of SNP TSC0046636
ttttattgtggg

SEQ ID NO: 350364 - DNA, 12 bp, Artificial Sequence
  Oligonucleotide primer for the detection of SNP TSC0046640
tatctcaaataa

SEQ ID NO: 350365 - DNA, 12 bp, Artificial Sequence
  Oligonucleotide primer for the detection of SNP TSC0046640
acttaatctaat

SEQ ID NO: 350366 - DNA, 12 bp, Artificial Sequence
  Oligonucleotide primer for the detection of SNP TSC0046643
aacctaaattta

SEQ ID NO: 350367 - DNA, 12 bp, Artificial Sequence
  Oligonucleotide primer for the detection of SNP TSC0046643
gattttaaattt

SEQ ID NO: 350368 - DNA, 12 bp, Artificial Sequence
  Oligonucleotide primer for the detection of SNP TSC0046644
tcttataaaatc

SEQ ID NO: 350369 - DNA, 12 bp, Artificial Sequence
  Oligonucleotide primer for the detection of SNP TSC0046644
tagtttaaaaaa

SEQ ID NO: 350370 - DNA, 12 bp, Artificial Sequence
  Oligonucleotide primer for the detection of SNP TSC0046645
acacaaatatac

SEQ ID NO: 350371 - DNA, 12 bp, Artificial Sequence
  Oligonucleotide primer for the detection of SNP TSC0046645
tgataattaatg

SEQ ID NO: 350372 - DNA, 12 bp, Artificial Sequence
  Oligonucleotide primer for the detection of SNP TSC0046645
taacaatcaata

SEQ ID NO: 350373 - DNA, 12 bp, Artificial Sequence
  Oligonucleotide primer for the detection of SNP TSC0046645
tataaatgtatt

SEQ ID NO: 350374 - DNA, 12 bp, Artificial Sequence
  Oligonucleotide primer for the detection of SNP TSC0046646
tttagtggttag

SEQ ID NO: 350375 - DNA, 12 bp, Artificial Sequence
  Oligonucleotide primer for the detection of SNP TSC0046647
atttttactctt

SEQ ID NO: 350376 - DNA, 12 bp, Artificial Sequence
  Oligonucleotide primer for the detection of SNP TSC0046647
atttaattgttt

SEQ ID NO: 350377 - DNA, 12 bp, Artificial Sequence
  Oligonucleotide primer for the detection of SNP TSC0046647
caaattcaatta

SEQ ID NO: 350378 - DNA, 12 bp, Artificial Sequence
  Oligonucleotide primer for the detection of SNP TSC0046648
agtgtgttatat

SEQ ID NO: 350379 - DNA, 12 bp, Artificial Sequence
  Oligonucleotide primer for the detection of SNP TSC0046651
ttctaaaactaa

SEQ ID NO: 350380 - DNA, 12 bp, Artificial Sequence
  Oligonucleotide primer for the detection of SNP TSC0046651
ttaagtttgttt

SEQ ID NO: 350381 - DNA, 12 bp, Artificial Sequence
  Oligonucleotide primer for the detection of SNP TSC0046651
ttaagtttgttc

SEQ ID NO: 350382 - DNA, 12 bp, Artificial Sequence
  Oligonucleotide primer for the detection of SNP TSC0046651
ctaaatttattc

SEQ ID NO: 350383 - DNA, 12 bp, Artificial Sequence
  Oligonucleotide primer for the detection of SNP TSC0046652
aaccttccatct

SEQ ID NO: 350384 - DNA, 12 bp, Artificial Sequence
  Oligonucleotide primer for the detection of SNP TSC0046654
taaaacaataca

SEQ ID NO: 350385 - DNA, 12 bp, Artificial Sequence
  Oligonucleotide primer for the detection of SNP TSC0046654
cctatatattcc

SEQ ID NO: 350386 - DNA, 12 bp, Artificial Sequence
  Oligonucleotide primer for the detection of SNP TSC0046654
ttagggtagtgt

SEQ ID NO: 350387 - DNA, 12 bp, Artificial Sequence
  Oligonucleotide primer for the detection of SNP TSC0046655
attttaataaaa

SEQ ID NO: 350388 - DNA, 12 bp, Artificial Sequence
  Oligonukleotid-Primer
aaattataagtt

SEQ ID NO: 350389 - DNA, 12 bp, Artificial Sequence
  Oligonucleotide primer for the detection of SNP TSC0046655
attttaatgaag

SEQ ID NO: 350390 - DNA, 12 bp, Artificial Sequence
  Oligonucleotide primer for the detection of SNP TSC0046656
atttgttttgat

SEQ ID NO: 350391 - DNA, 12 bp, Artificial Sequence
  Oligonucleotide primer for the detection of SNP TSC0046656
atctatcctaat

SEQ ID NO: 350392 - DNA, 12 bp, Artificial Sequence
  Oligonucleotide primer for the detection of SNP TSC0046656
tagaaattttga

SEQ ID NO: 350393 - DNA, 12 bp, Artificial Sequence
  Oligonucleotide primer for the detection of SNP TSC0046657
ttctttctaatt

SEQ ID NO: 350394 - DNA, 12 bp, Artificial Sequence
  Oligonucleotide primer for the detection of SNP TSC0046657
ataaatttaatt

SEQ ID NO: 350395 - DNA, 12 bp, Artificial Sequence
  Oligonucleotide primer for the detection of SNP TSC0046657
ataaacccaatc

SEQ ID NO: 350396 - DNA, 12 bp, Artificial Sequence
  Oligonucleotide primer for the detection of SNP TSC0046658
tcctataaaaaa

SEQ ID NO: 350397 - DNA, 12 bp, Artificial Sequence
  Oligonucleotide primer for the detection of SNP TSC0046658
ttggagaatagt

SEQ ID NO: 350398 - DNA, 12 bp, Artificial Sequence
  Oligonucleotide primer for the detection of SNP TSC0046658
ggtagttttatg

SEQ ID NO: 350399 - DNA, 12 bp, Artificial Sequence
  Oligonucleotide primer for the detection of SNP TSC0046659
tcaaaaaacttt

SEQ ID NO: 350400 - DNA, 12 bp, Artificial Sequence
  Oligonucleotide primer for the detection of SNP TSC0046659
atatgtgtttta

SEQ ID NO: 350401 - DNA, 12 bp, Artificial Sequence
  Oligonucleotide primer for the detection of SNP TSC0046662
aattaactacat

SEQ ID NO: 350402 - DNA, 12 bp, Artificial Sequence
  Oligonucleotide primer for the detection of SNP TSC0046662
tattaatattaa

SEQ ID NO: 350403 - DNA, 12 bp, Artificial Sequence
  Oligonucleotide primer for the detection of SNP TSC0046663
ttttaacaaaaa

SEQ ID NO: 350404 - DNA, 12 bp, Artificial Sequence
  Oligonucleotide primer for the detection of SNP TSC0046663
gttgggagtttt

SEQ ID NO: 350405 - DNA, 12 bp, Artificial Sequence
  Oligonucleotide primer for the detection of SNP TSC0046663
gttaaaaactcc

SEQ ID NO: 350406 - DNA, 12 bp, Artificial Sequence
  Oligonucleotide primer for the detection of SNP TSC0046665
ttaccaataaca

SEQ ID NO: 350407 - DNA, 12 bp, Artificial Sequence
  Oligonucleotide primer for the detection of SNP TSC0046665
aaaatatagttg

SEQ ID NO: 350408 - DNA, 12 bp, Artificial Sequence
  Oligonucleotide primer for the detection of SNP TSC0046665
tttattaataat

SEQ ID NO: 350409 - DNA, 12 bp, Artificial Sequence
  Oligonucleotide primer for the detection of SNP TSC0046667
cctaaaaaacac

SEQ ID NO: 350410 - DNA, 12 bp, Artificial Sequence
  Oligonucleotide primer for the detection of SNP TSC0046667
atattttatgga

SEQ ID NO: 350411 - DNA, 12 bp, Artificial Sequence
  Oligonucleotide primer for the detection of SNP TSC0046668
gttaagtttttt

SEQ ID NO: 350412 - DNA, 12 bp, Artificial Sequence
  Oligonucleotide primer for the detection of SNP TSC0046668
tattaaattttc

SEQ ID NO: 350413 - DNA, 12 bp, Artificial Sequence
  Oligonucleotide primer for the detection of SNP TSC0046668
gtttttaaagat

SEQ ID NO: 350414 - DNA, 12 bp, Artificial Sequence
  Oligonucleotide primer for the detection of SNP TSC0046670
tttccacatatt

SEQ ID NO: 350415 - DNA, 12 bp, Artificial Sequence
  Oligonucleotide primer for the detection of SNP TSC0046670
agaattagtaaa

SEQ ID NO: 350416 - DNA, 12 bp, Artificial Sequence
  Oligonucleotide primer for the detection of SNP TSC0046671
ttatacctatta

SEQ ID NO: 350417 - DNA, 12 bp, Artificial Sequence
  Oligonucleotide primer for the detection of SNP TSC0046671
ggtagaggggaa

SEQ ID NO: 350418 - DNA, 12 bp, Artificial Sequence
  Oligonucleotide primer for the detection of SNP TSC0046674
aaacgtaataat

SEQ ID NO: 350419 - DNA, 12 bp, Artificial Sequence
  Oligonucleotide primer for the detection of SNP TSC0046674
gaacataataat

SEQ ID NO: 350420 - DNA, 12 bp, Artificial Sequence
  Oligonucleotide primer for the detection of SNP TSC0046674
gaacgtaataat

SEQ ID NO: 350421 - DNA, 12 bp, Artificial Sequence
  Oligonucleotide primer for the detection of SNP TSC0046674
gggcgtggtggt

SEQ ID NO: 350422 - DNA, 12 bp, Artificial Sequence
  Oligonucleotide primer for the detection of SNP TSC0046675
ttttatatcata

SEQ ID NO: 350423 - DNA, 12 bp, Artificial Sequence
  Oligonucleotide primer for the detection of SNP TSC0046675
aagaagttattt

SEQ ID NO: 350424 - DNA, 12 bp, Artificial Sequence
  Oligonucleotide primer for the detection of SNP TSC0046675
ttttatgttatg

SEQ ID NO: 350425 - DNA, 12 bp, Artificial Sequence
  Oligonucleotide primer for the detection of SNP TSC0046676
aatacctaattt

SEQ ID NO: 350426 - DNA, 12 bp, Artificial Sequence
  Oligonucleotide primer for the detection of SNP TSC0046676
tgttttgtgaag

SEQ ID NO: 350427 - DNA, 12 bp, Artificial Sequence
  Oligonucleotide primer for the detection of SNP TSC0046677
atatcctctcat

SEQ ID NO: 350428 - DNA, 12 bp, Artificial Sequence
  Oligonucleotide primer for the detection of SNP TSC0046677
atatcctctcgt

SEQ ID NO: 350429 - DNA, 12 bp, Artificial Sequence
  Oligonucleotide primer for the detection of SNP TSC0046679
tttttccttatt

SEQ ID NO: 350430 - DNA, 12 bp, Artificial Sequence
  Oligonucleotide primer for the detection of SNP TSC0046680
aatttaagttta

SEQ ID NO: 350431 - DNA, 12 bp, Artificial Sequence
  Oligonucleotide primer for the detection of SNP TSC0046680
aatttaaaccta

SEQ ID NO: 350432 - DNA, 12 bp, Artificial Sequence
  Oligonucleotide primer for the detection of SNP TSC0046680
tattgtataagt

SEQ ID NO: 350433 - DNA, 12 bp, Artificial Sequence
  Oligonucleotide primer for the detection of SNP TSC0046681
acctacatactt

SEQ ID NO: 350434 - DNA, 12 bp, Artificial Sequence
  Oligonucleotide primer for the detection of SNP TSC0046681
gtgtgtgtattg

SEQ ID NO: 350435 - DNA, 12 bp, Artificial Sequence
  Oligonucleotide primer for the detection of SNP TSC0046682
tgggtttaaatg

SEQ ID NO: 350436 - DNA, 12 bp, Artificial Sequence
  Oligonucleotide primer for the detection of SNP TSC0046682
cgggtttaaatg

SEQ ID NO: 350437 - DNA, 12 bp, Artificial Sequence
  Oligonucleotide primer for the detection of SNP TSC0046682
tgggtttaaacg

SEQ ID NO: 350438 - DNA, 12 bp, Artificial Sequence
  Oligonucleotide primer for the detection of SNP TSC0046682
cgggtttaaacg

SEQ ID NO: 350439 - DNA, 12 bp, Artificial Sequence
  Oligonucleotide primer for the detection of SNP TSC0046683
cttctcaaacta

SEQ ID NO: 350440 - DNA, 12 bp, Artificial Sequence
  Oligonucleotide primer for the detection of SNP TSC0046683
tcaaacatccct

SEQ ID NO: 350441 - DNA, 12 bp, Artificial Sequence
  Oligonucleotide primer for the detection of SNP TSC0046688
aataaattccct

SEQ ID NO: 350442 - DNA, 12 bp, Artificial Sequence
  Oligonucleotide primer for the detection of SNP TSC0046688
tatgggttataa

SEQ ID NO: 350443 - DNA, 12 bp, Artificial Sequence
  Oligonucleotide primer for the detection of SNP TSC0046688
tacgggttataa

SEQ ID NO: 350444 - DNA, 12 bp, Artificial Sequence
  Oligonucleotide primer for the detection of SNP TSC0046690
tataaataattt

SEQ ID NO: 350445 - DNA, 12 bp, Artificial Sequence
  Oligonucleotide primer for the detection of SNP TSC0046690
tttttgttaata

SEQ ID NO: 350446 - DNA, 12 bp, Artificial Sequence
  Oligonucleotide primer for the detection of SNP TSC0046694
ttatatctactt

SEQ ID NO: 350447 - DNA, 12 bp, Artificial Sequence
  Oligonucleotide primer for the detection of SNP TSC0046696
acctacacctct

SEQ ID NO: 350448 - DNA, 12 bp, Artificial Sequence
  Oligonucleotide primer for the detection of SNP TSC0046696
tggtggtggtgt

SEQ ID NO: 350449 - DNA, 12 bp, Artificial Sequence
  Oligonucleotide primer for the detection of SNP TSC0046698
cctaaataaaat

SEQ ID NO: 350450 - DNA, 12 bp, Artificial Sequence
  Oligonucleotide primer for the detection of SNP TSC0046698
gaaattagaaaa

SEQ ID NO: 350451 - DNA, 12 bp, Artificial Sequence
  Oligonucleotide primer for the detection of SNP TSC0046699
cttatacttttt

SEQ ID NO: 350452 - DNA, 12 bp, Artificial Sequence
  Oligonucleotide primer for the detection of SNP TSC0046699
gaaaattatttt

SEQ ID NO: 350453 - DNA, 12 bp, Artificial Sequence
  Oligonucleotide primer for the detection of SNP TSC0046701
ttctataaaatt

SEQ ID NO: 350454 - DNA, 12 bp, Artificial Sequence
  Oligonucleotide primer for the detection of SNP TSC0046701
gtatggttttag

SEQ ID NO: 350455 - DNA, 12 bp, Artificial Sequence
  Oligonucleotide primer for the detection of SNP TSC0046702
tatatcccctat

SEQ ID NO: 350456 - DNA, 12 bp, Artificial Sequence
  Oligonucleotide primer for the detection of SNP TSC0046703
atcaaacaacaa

SEQ ID NO: 350457 - DNA, 12 bp, Artificial Sequence
  Oligonucleotide primer for the detection of SNP TSC0046703
atcaaacaacga

SEQ ID NO: 350458 - DNA, 12 bp, Artificial Sequence
  Oligonucleotide primer for the detection of SNP TSC0046703
ggaaggatgaga

SEQ ID NO: 350459 - DNA, 12 bp, Artificial Sequence
  Oligonucleotide primer for the detection of SNP TSC0046703
tagttaaataat

SEQ ID NO: 350460 - DNA, 12 bp, Artificial Sequence
  Oligonucleotide primer for the detection of SNP TSC0046703
tagttaaataac

SEQ ID NO: 350461 - DNA, 12 bp, Artificial Sequence
  Oligonucleotide primer for the detection of SNP TSC0046704
tctctacacaat

SEQ ID NO: 350462 - DNA, 12 bp, Artificial Sequence
  Oligonucleotide primer for the detection of SNP TSC0046704
ttaatatgtgga

SEQ ID NO: 350463 - DNA, 12 bp, Artificial Sequence
  Oligonucleotide primer for the detection of SNP TSC0046704
ttaatacgtgga

SEQ ID NO: 350464 - DNA, 12 bp, Artificial Sequence
  Oligonucleotide primer for the detection of SNP TSC0046705
acttccccatca

SEQ ID NO: 350465 - DNA, 12 bp, Artificial Sequence
  Oligonucleotide primer for the detection of SNP TSC0046705
gaatatgttttt

SEQ ID NO: 350466 - DNA, 12 bp, Artificial Sequence
  Oligonucleotide primer for the detection of SNP TSC0046706
ctcttccaaacc

SEQ ID NO: 350467 - DNA, 12 bp, Artificial Sequence
  Oligonucleotide primer for the detection of SNP TSC0046707
cacaaaatcacc

SEQ ID NO: 350468 - DNA, 12 bp, Artificial Sequence
  Oligonucleotide primer for the detection of SNP TSC0046707
ggttatgaataa

SEQ ID NO: 350469 - DNA, 12 bp, Artificial Sequence
  Oligonucleotide primer for the detection of SNP TSC0046709
tatatatatcct

SEQ ID NO: 350470 - DNA, 12 bp, Artificial Sequence
  Oligonucleotide primer for the detection of SNP TSC0005608
taactcacattc

SEQ ID NO: 350471 - DNA, 12 bp, Artificial Sequence
  Oligonucleotide primer for the detection of SNP TSC0005608
aaatattgggaa

SEQ ID NO: 350472 - DNA, 12 bp, Artificial Sequence
  Oligonucleotide primer for the detection of SNP TSC0046715
cctctcattatc

SEQ ID NO: 350473 - DNA, 12 bp, Artificial Sequence
  Oligonucleotide primer for the detection of SNP TSC0046715
gtagtaaggtta

SEQ ID NO: 350474 - DNA, 12 bp, Artificial Sequence
  Oligonucleotide primer for the detection of SNP TSC0046716
ttaattattatt

SEQ ID NO: 350475 - DNA, 12 bp, Artificial Sequence
  Oligonucleotide primer for the detection of SNP TSC0046716
taactatcacta

SEQ ID NO: 350476 - DNA, 12 bp, Artificial Sequence
  Oligonucleotide primer for the detection of SNP TSC0046716
gtggaaagtatt

SEQ ID NO: 350477 - DNA, 12 bp, Artificial Sequence
  Oligonucleotide primer for the detection of SNP TSC0046718
tgaaatagttaa

SEQ ID NO: 350478 - DNA, 12 bp, Artificial Sequence
  Oligonucleotide primer for the detection of SNP TSC0046718
taaaacaattaa

SEQ ID NO: 350479 - DNA, 12 bp, Artificial Sequence
  Oligonucleotide primer for the detection of SNP TSC0046718
gaagaggaaaaa

SEQ ID NO: 350480 - DNA, 12 bp, Artificial Sequence
  Oligonucleotide primer for the detection of SNP TSC0046719
tttattttctat

SEQ ID NO: 350481 - DNA, 12 bp, Artificial Sequence
  Oligonucleotide primer for the detection of SNP TSC0046720
ttctacccataa

SEQ ID NO: 350482 - DNA, 12 bp, Artificial Sequence
  Oligonucleotide primer for the detection of SNP TSC0046720
ttctatacttta

SEQ ID NO: 350483 - DNA, 12 bp, Artificial Sequence
  Oligonucleotide primer for the detection of SNP TSC0046720
ttttgtttatgg

SEQ ID NO: 350484 - DNA, 12 bp, Artificial Sequence
  Oligonucleotide primer for the detection of SNP TSC0046722
ctcacccactat

SEQ ID NO: 350485 - DNA, 12 bp, Artificial Sequence
  Oligonucleotide primer for the detection of SNP TSC0046722
atggtgtttgtt

SEQ ID NO: 350486 - DNA, 12 bp, Artificial Sequence
  Oligonucleotide primer for the detection of SNP TSC0046722
ataatacctacc

SEQ ID NO: 350487 - DNA, 12 bp, Artificial Sequence
  Oligonucleotide primer for the detection of SNP TSC0046722
tttatttattgt

SEQ ID NO: 350488 - DNA, 12 bp, Artificial Sequence
  Oligonucleotide primer for the detection of SNP TSC0046723
ctaaatacaatc

SEQ ID NO: 350489 - DNA, 12 bp, Artificial Sequence
  Oligonucleotide primer for the detection of SNP TSC0046723
ctaaatacgatc

SEQ ID NO: 350490 - DNA, 12 bp, Artificial Sequence
  Oligonucleotide primer for the detection of SNP TSC0046723
aaatgtagtgtg

SEQ ID NO: 350491 - DNA, 12 bp, Artificial Sequence
  Oligonucleotide primer for the detection of SNP TSC0046723
aaatgtagtgcg

SEQ ID NO: 350492 - DNA, 12 bp, Artificial Sequence
  Oligonucleotide primer for the detection of SNP TSC0046723
aaatacaataca

SEQ ID NO: 350493 - DNA, 12 bp, Artificial Sequence
  Oligonucleotide primer for the detection of SNP TSC0046723
aaatacaatacg

SEQ ID NO: 350494 - DNA, 12 bp, Artificial Sequence
  Oligonucleotide primer for the detection of SNP TSC0046723
ttaaatatggtt

SEQ ID NO: 350495 - DNA, 12 bp, Artificial Sequence
  Oligonucleotide primer for the detection of SNP TSC0046723
ttaaatacggtt

SEQ ID NO: 350496 - DNA, 12 bp, Artificial Sequence
  Oligonucleotide primer for the detection of SNP TSC0046725
tcaatcataaaa

SEQ ID NO: 350497 - DNA, 12 bp, Artificial Sequence
  Oligonucleotide primer for the detection of SNP TSC0046725
ttaggagaggtt

SEQ ID NO: 350498 - DNA, 12 bp, Artificial Sequence
  Oligonucleotide primer for the detection of SNP TSC0046725
ccaaaaaaaacc

SEQ ID NO: 350499 - DNA, 12 bp, Artificial Sequence
  Oligonucleotide primer for the detection of SNP TSC0046725
tagttatgaggt

SEQ ID NO: 350500 - DNA, 12 bp, Artificial Sequence
  Oligonucleotide primer for the detection of SNP TSC0046725
tagttatgaggc

SEQ ID NO: 350501 - DNA, 12 bp, Artificial Sequence
  Oligonucleotide primer for the detection of SNP TSC0046726
ataaataatcct

SEQ ID NO: 350502 - DNA, 12 bp, Artificial Sequence
  Oligonucleotide primer for the detection of SNP TSC0046726
atagatagtttt

SEQ ID NO: 350503 - DNA, 12 bp, Artificial Sequence
  Oligonucleotide primer for the detection of SNP TSC0046727
ttccaaattcta

SEQ ID NO: 350504 - DNA, 12 bp, Artificial Sequence
  Oligonucleotide primer for the detection of SNP TSC0046727
aagttatggaat

SEQ ID NO: 350505 - DNA, 12 bp, Artificial Sequence
  Oligonucleotide primer for the detection of SNP TSC0046727
aaaatcataaaa

SEQ ID NO: 350506 - DNA, 12 bp, Artificial Sequence
  Oligonucleotide primer for the detection of SNP TSC0008506
acaaaaattttc

SEQ ID NO: 350507 - DNA, 12 bp, Artificial Sequence
  Oligonucleotide primer for the detection of SNP TSC0008506
tagaatttaaaa

SEQ ID NO: 350508 - DNA, 12 bp, Artificial Sequence
  Oligonucleotide primer for the detection of SNP TSC0010679
catctattatta

SEQ ID NO: 350509 - DNA, 12 bp, Artificial Sequence
  Oligonucleotide primer for the detection of SNP TSC0010679
tatcaaaaatac

SEQ ID NO: 350510 - DNA, 12 bp, Artificial Sequence
  Oligonucleotide primer for the detection of SNP TSC0010679
tttgttattgtt

SEQ ID NO: 350511 - DNA, 12 bp, Artificial Sequence
  Oligonucleotide primer for the detection of SNP TSC0010679
tttgttattgtc

SEQ ID NO: 350512 - DNA, 12 bp, Artificial Sequence
  Oligonucleotide primer for the detection of SNP TSC0046728
atcctctaattt

SEQ ID NO: 350513 - DNA, 12 bp, Artificial Sequence
  Oligonucleotide primer for the detection of SNP TSC0046728
taataatgtgga

SEQ ID NO: 350514 - DNA, 12 bp, Artificial Sequence
  Oligonucleotide primer for the detection of SNP TSC0046728
taataacgtgga

SEQ ID NO: 350515 - DNA, 12 bp, Artificial Sequence
  Oligonucleotide primer for the detection of SNP TSC0046728
caacaacataaa

SEQ ID NO: 350516 - DNA, 12 bp, Artificial Sequence
  Oligonucleotide primer for the detection of SNP TSC0046728
caacaacgtaaa

SEQ ID NO: 350517 - DNA, 12 bp, Artificial Sequence
  Oligonucleotide primer for the detection of SNP TSC0046729
atttcttacaac

SEQ ID NO: 350518 - DNA, 12 bp, Artificial Sequence
  Oligonucleotide primer for the detection of SNP TSC0046729
ggaaaatgtata

SEQ ID NO: 350519 - DNA, 12 bp, Artificial Sequence
  Oligonucleotide primer for the detection of SNP TSC0046730
attatacaattt

SEQ ID NO: 350520 - DNA, 12 bp, Artificial Sequence
  Oligonucleotide primer for the detection of SNP TSC0046730
aggttaggaata

SEQ ID NO: 350521 - DNA, 12 bp, Artificial Sequence
  Oligonucleotide primer for the detection of SNP TSC0046731
ctcaaaaaaccc

SEQ ID NO: 350522 - DNA, 12 bp, Artificial Sequence
  Oligonucleotide primer for the detection of SNP TSC0046731
tgagattttgtt

SEQ ID NO: 350523 - DNA, 12 bp, Artificial Sequence
  Oligonucleotide primer for the detection of SNP TSC0046731
tgagattttgtc

SEQ ID NO: 350524 - DNA, 12 bp, Artificial Sequence
  Oligonucleotide primer for the detection of SNP TSC0046731
tttaaaattcta

SEQ ID NO: 350525 - DNA, 12 bp, Artificial Sequence
  Oligonucleotide primer for the detection of SNP TSC0046732
ataaaaaccatc

SEQ ID NO: 350526 - DNA, 12 bp, Artificial Sequence
  Oligonucleotide primer for the detection of SNP TSC0046732
ggataattgagg

SEQ ID NO: 350527 - DNA, 12 bp, Artificial Sequence
  Oligonucleotide primer for the detection of SNP TSC0046732
gtgaaaattatt

SEQ ID NO: 350528 - DNA, 12 bp, Artificial Sequence
  Oligonucleotide primer for the detection of SNP TSC0046735
tgaggtttattg

SEQ ID NO: 350529 - DNA, 12 bp, Artificial Sequence
  Oligonucleotide primer for the detection of SNP TSC0046735
tgaaaaatataa

SEQ ID NO: 350530 - DNA, 12 bp, Artificial Sequence
  Oligonucleotide primer for the detection of SNP TSC0046736
tttcactactcc

SEQ ID NO: 350531 - DNA, 12 bp, Artificial Sequence
  Oligonucleotide primer for the detection of SNP TSC0008953
ggagattattat

SEQ ID NO: 350532 - DNA, 12 bp, Artificial Sequence
  Oligonucleotide primer for the detection of SNP TSC0008953
aaaaattattat

SEQ ID NO: 350533 - DNA, 12 bp, Artificial Sequence
  Oligonucleotide primer for the detection of SNP TSC0008953
ggaagtttttaa

SEQ ID NO: 350534 - DNA, 12 bp, Artificial Sequence
  Oligonucleotide primer for the detection of SNP TSC0008954
caaccataaaat

SEQ ID NO: 350535 - DNA, 12 bp, Artificial Sequence
  Oligonucleotide primer for the detection of SNP TSC0008954
tagagtttgaaa

SEQ ID NO: 350536 - DNA, 12 bp, Artificial Sequence
  Oligonucleotide primer for the detection of SNP TSC0046739
ttttcaataaat

SEQ ID NO: 350537 - DNA, 12 bp, Artificial Sequence
  Oligonucleotide primer for the detection of SNP TSC0046739
gtagggtataga

SEQ ID NO: 350538 - DNA, 12 bp, Artificial Sequence
  Oligonucleotide primer for the detection of SNP TSC0007656
ttaattgaaaaa

SEQ ID NO: 350539 - DNA, 12 bp, Artificial Sequence
  Oligonucleotide primer for the detection of SNP TSC0046740
atggttaaaatt

SEQ ID NO: 350540 - DNA, 12 bp, Artificial Sequence
  Oligonucleotide primer for the detection of SNP TSC0046740
aaataattaaaa

SEQ ID NO: 350541 - DNA, 12 bp, Artificial Sequence
  Oligonucleotide primer for the detection of SNP TSC0046740
aagatgtggttt

SEQ ID NO: 350542 - DNA, 12 bp, Artificial Sequence
  Oligonucleotide primer for the detection of SNP TSC0046741
tatattctaaac

SEQ ID NO: 350543 - DNA, 12 bp, Artificial Sequence
  Oligonucleotide primer for the detection of SNP TSC0046741
tttggaaggtag

SEQ ID NO: 350544 - DNA, 12 bp, Artificial Sequence
  Oligonucleotide primer for the detection of SNP TSC0046742
ttccttcctata

SEQ ID NO: 350545 - DNA, 12 bp, Artificial Sequence
  Oligonucleotide primer for the detection of SNP TSC0046742
aaggtagagttt

SEQ ID NO: 350546 - DNA, 12 bp, Artificial Sequence
  Oligonucleotide primer for the detection of SNP TSC0046743
caaaaaacacct

SEQ ID NO: 350547 - DNA, 12 bp, Artificial Sequence
  Oligonucleotide primer for the detection of SNP TSC0046743
atttaataaaga

SEQ ID NO: 350548 - DNA, 12 bp, Artificial Sequence
  Oligonucleotide primer for the detection of SNP TSC0046744
gtatatttattg

SEQ ID NO: 350549 - DNA, 12 bp, Artificial Sequence
  Oligonucleotide primer for the detection of SNP TSC0046746
aatcatcaaata

SEQ ID NO: 350550 - DNA, 12 bp, Artificial Sequence
  Oligonucleotide primer for the detection of SNP TSC0046746
aatcgtcaaata

SEQ ID NO: 350551 - DNA, 12 bp, Artificial Sequence
  Oligonucleotide primer for the detection of SNP TSC0046746
ataagagtttgt

SEQ ID NO: 350552 - DNA, 12 bp, Artificial Sequence
  Oligonucleotide primer for the detection of SNP TSC0046746
gttgttaggtgt

SEQ ID NO: 350553 - DNA, 12 bp, Artificial Sequence
  Oligonucleotide primer for the detection of SNP TSC0046746
gtcgttaggtgt

SEQ ID NO: 350554 - DNA, 12 bp, Artificial Sequence
  Oligonucleotide primer for the detection of SNP TSC0009718
ttacattcaaat

SEQ ID NO: 350555 - DNA, 12 bp, Artificial Sequence
  Oligonucleotide primer for the detection of SNP TSC0046747
taaataattatt

SEQ ID NO: 350556 - DNA, 12 bp, Artificial Sequence
  Oligonucleotide primer for the detection of SNP TSC0046747
ttaaggagatag

SEQ ID NO: 350557 - DNA, 12 bp, Artificial Sequence
  Oligonucleotide primer for the detection of SNP TSC0046748
ttaattaaaata

SEQ ID NO: 350558 - DNA, 12 bp, Artificial Sequence
  Oligonucleotide primer for the detection of SNP TSC0046748
acttttaatttc

SEQ ID NO: 350559 - DNA, 12 bp, Artificial Sequence
  Oligonucleotide primer for the detection of SNP TSC0046748
ttggttagaata

SEQ ID NO: 350560 - DNA, 12 bp, Artificial Sequence
  Oligonucleotide primer for the detection of SNP TSC0046750
aaaaccccttct

SEQ ID NO: 350561 - DNA, 12 bp, Artificial Sequence
  Oligonucleotide primer for the detection of SNP TSC0046752
ttatggtatttt

SEQ ID NO: 350562 - DNA, 12 bp, Artificial Sequence
  Oligonucleotide primer for the detection of SNP TSC0046752
cataacatttta

SEQ ID NO: 350563 - DNA, 12 bp, Artificial Sequence
  Oligonucleotide primer for the detection of SNP TSC0046752
agtaataggaaa

SEQ ID NO: 350564 - DNA, 12 bp, Artificial Sequence
  Oligonucleotide primer for the detection of SNP TSC0046753
agggggaagagt

SEQ ID NO: 350565 - DNA, 12 bp, Artificial Sequence
  Oligonucleotide primer for the detection of SNP TSC0046754
attacaaaaact

SEQ ID NO: 350566 - DNA, 12 bp, Artificial Sequence
  Oligonucleotide primer for the detection of SNP TSC0046754
agaaggagggtg

SEQ ID NO: 350567 - DNA, 12 bp, Artificial Sequence
  Oligonucleotide primer for the detection of SNP TSC0046756
ctctacctcctc

SEQ ID NO: 350568 - DNA, 12 bp, Artificial Sequence
  Oligonucleotide primer for the detection of SNP TSC0046757
cccctaacaatc

SEQ ID NO: 350569 - DNA, 12 bp, Artificial Sequence
  Oligonucleotide primer for the detection of SNP TSC0046757
tgaaaatattag

SEQ ID NO: 350570 - DNA, 12 bp, Artificial Sequence
  Oligonucleotide primer for the detection of SNP TSC0046757
taaaaacatcaa

SEQ ID NO: 350571 - DNA, 12 bp, Artificial Sequence
  Oligonucleotide primer for the detection of SNP TSC0046758
aaggtgggttat

SEQ ID NO: 350572 - DNA, 12 bp, Artificial Sequence
  Oligonucleotide primer for the detection of SNP TSC0046758
gtttggaagttt

SEQ ID NO: 350573 - DNA, 12 bp, Artificial Sequence
  Oligonucleotide primer for the detection of SNP TSC0046759
attaatatacat

SEQ ID NO: 350574 - DNA, 12 bp, Artificial Sequence
  Oligonucleotide primer for the detection of SNP TSC0046759
gttaatatacat

SEQ ID NO: 350575 - DNA, 12 bp, Artificial Sequence
  Oligonucleotide primer for the detection of SNP TSC0046759
gggagatgagag

SEQ ID NO: 350576 - DNA, 12 bp, Artificial Sequence
  Oligonucleotide primer for the detection of SNP TSC0046760
atatataccaac

SEQ ID NO: 350577 - DNA, 12 bp, Artificial Sequence
  Oligonucleotide primer for the detection of SNP TSC0046760
aggaaagagatg

SEQ ID NO: 350578 - DNA, 12 bp, Artificial Sequence
  Oligonucleotide primer for the detection of SNP TSC0046761
cttctcatctac

SEQ ID NO: 350579 - DNA, 12 bp, Artificial Sequence
  Oligonucleotide primer for the detection of SNP TSC0046761
agggagtgggaa

SEQ ID NO: 350580 - DNA, 12 bp, Artificial Sequence
  Oligonucleotide primer for the detection of SNP TSC0046762
ctatcattcctt

SEQ ID NO: 350581 - DNA, 12 bp, Artificial Sequence
  Oligonucleotide primer for the detection of SNP TSC0046762
gaaggtgattgt

SEQ ID NO: 350582 - DNA, 12 bp, Artificial Sequence
  Oligonucleotide primer for the detection of SNP TSC0046763
tttaaattcttt

SEQ ID NO: 350583 - DNA, 12 bp, Artificial Sequence
  Oligonucleotide primer for the detection of SNP TSC0046764
tgaaagaattta

SEQ ID NO: 350584 - DNA, 12 bp, Artificial Sequence
  Oligonucleotide primer for the detection of SNP TSC0046764
cgaaagaattta

SEQ ID NO: 350585 - DNA, 12 bp, Artificial Sequence
  Oligonucleotide primer for the detection of SNP TSC0046765
tgtagtatgttt

SEQ ID NO: 350586 - DNA, 12 bp, Artificial Sequence
  Oligonucleotide primer for the detection of SNP TSC0046765
tataacatacct

SEQ ID NO: 350587 - DNA, 12 bp, Artificial Sequence
  Oligonucleotide primer for the detection of SNP TSC0046765
agaagaaaatgg

SEQ ID NO: 350588 - DNA, 12 bp, Artificial Sequence
  Oligonucleotide primer for the detection of SNP TSC0046770
acattcaaaatc

SEQ ID NO: 350589 - DNA, 12 bp, Artificial Sequence
  Oligonucleotide primer for the detection of SNP TSC0046770
ttttgatttgat

SEQ ID NO: 350590 - DNA, 12 bp, Artificial Sequence
  Oligonucleotide primer for the detection of SNP TSC0046770
tttcgatttgat

SEQ ID NO: 350591 - DNA, 12 bp, Artificial Sequence
  Oligonucleotide primer for the detection of SNP TSC0046770
acttcaatttaa

SEQ ID NO: 350592 - DNA, 12 bp, Artificial Sequence
  Oligonucleotide primer for the detection of SNP TSC0046770
acttcgatttaa

SEQ ID NO: 350593 - DNA, 12 bp, Artificial Sequence
  Oligonucleotide primer for the detection of SNP TSC0046770
gcttcaatttaa

SEQ ID NO: 350594 - DNA, 12 bp, Artificial Sequence
  Oligonucleotide primer for the detection of SNP TSC0046770
gcttcgatttaa

SEQ ID NO: 350595 - DNA, 12 bp, Artificial Sequence
  Oligonucleotide primer for the detection of SNP TSC0046771
aggagaggggga

SEQ ID NO: 350596 - DNA, 12 bp, Artificial Sequence
  Oligonucleotide primer for the detection of SNP TSC0046772
ttcttaccacta

SEQ ID NO: 350597 - DNA, 12 bp, Artificial Sequence
  Oligonucleotide primer for the detection of SNP TSC0046772
tagataagggtt

SEQ ID NO: 350598 - DNA, 12 bp, Artificial Sequence
  Oligonucleotide primer for the detection of SNP TSC0046772
caaacaaaaatt

SEQ ID NO: 350599 - DNA, 12 bp, Artificial Sequence
  Oligonucleotide primer for the detection of SNP TSC0046773
aacttaaattac

SEQ ID NO: 350600 - DNA, 12 bp, Artificial Sequence
  Oligonucleotide primer for the detection of SNP TSC0046773
ggtgatttgttc

SEQ ID NO: 350601 - DNA, 12 bp, Artificial Sequence
  Oligonucleotide primer for the detection of SNP TSC0046773
aataacttaccc

SEQ ID NO: 350602 - DNA, 12 bp, Artificial Sequence
  Oligonucleotide primer for the detection of SNP TSC0046773
ggtttggattat

SEQ ID NO: 350603 - DNA, 12 bp, Artificial Sequence
  Oligonucleotide primer for the detection of SNP TSC0046773
ggtttggattac

SEQ ID NO: 350604 - DNA, 12 bp, Artificial Sequence
  Oligonucleotide primer for the detection of SNP TSC0046774
cactctaaattc

SEQ ID NO: 350605 - DNA, 12 bp, Artificial Sequence
  Oligonucleotide primer for the detection of SNP TSC0010551
tccttcactctc

SEQ ID NO: 350606 - DNA, 12 bp, Artificial Sequence
  Oligonucleotide primer for the detection of SNP TSC0010551
aaagttatatta

SEQ ID NO: 350607 - DNA, 12 bp, Artificial Sequence
  Oligonucleotide primer for the detection of SNP TSC0010552
aataatatactt

SEQ ID NO: 350608 - DNA, 12 bp, Artificial Sequence
  Oligonucleotide primer for the detection of SNP TSC0010552
ttagtttagata

SEQ ID NO: 350609 - DNA, 12 bp, Artificial Sequence
  Oligonukleotid-Primer
ctaatttaaata

SEQ ID NO: 350610 - DNA, 12 bp, Artificial Sequence
  Oligonucleotide primer for the detection of SNP TSC0010552
aataatgtattt

SEQ ID NO: 350611 - DNA, 12 bp, Artificial Sequence
  Oligonucleotide primer for the detection of SNP TSC0046777
aatctcttcaat

SEQ ID NO: 350612 - DNA, 12 bp, Artificial Sequence
  Oligonucleotide primer for the detection of SNP TSC0046777
attttgtaggtt

SEQ ID NO: 350613 - DNA, 12 bp, Artificial Sequence
  Oligonukleotid-Primer
ggttggatttgg

SEQ ID NO: 350614 - DNA, 12 bp, Artificial Sequence
  Oligonucleotide primer for the detection of SNP TSC0046778
aattaaatctaa

SEQ ID NO: 350615 - DNA, 12 bp, Artificial Sequence
  Oligonucleotide primer for the detection of SNP TSC0046778
aaggagaatata

SEQ ID NO: 350616 - DNA, 12 bp, Artificial Sequence
  Oligonucleotide primer for the detection of SNP TSC0046779
taaaattacacc

SEQ ID NO: 350617 - DNA, 12 bp, Artificial Sequence
  Oligonucleotide primer for the detection of SNP TSC0046779
taaaattacgcc

SEQ ID NO: 350618 - DNA, 12 bp, Artificial Sequence
  Oligonucleotide primer for the detection of SNP TSC0046780
atcaattttttc

SEQ ID NO: 350619 - DNA, 12 bp, Artificial Sequence
  Oligonucleotide primer for the detection of SNP TSC0046780
atcgattttttc

SEQ ID NO: 350620 - DNA, 12 bp, Artificial Sequence
  Oligonucleotide primer for the detection of SNP TSC0046781
gttaaggtagga

SEQ ID NO: 350621 - DNA, 12 bp, Artificial Sequence
  Oligonucleotide primer for the detection of SNP TSC0046785
taaacctattat

SEQ ID NO: 350622 - DNA, 12 bp, Artificial Sequence
  Oligonucleotide primer for the detection of SNP TSC0046785
gagtagtgttta

SEQ ID NO: 350623 - DNA, 12 bp, Artificial Sequence
  Oligonucleotide primer for the detection of SNP TSC0046785
aaacaatatcta

SEQ ID NO: 350624 - DNA, 12 bp, Artificial Sequence
  Oligonucleotide primer for the detection of SNP TSC0046785
taagtttattgt

SEQ ID NO: 350625 - DNA, 12 bp, Artificial Sequence
  Oligonukleotid-Primer
taccaaacccta

SEQ ID NO: 350626 - DNA, 12 bp, Artificial Sequence
  Oligonucleotide primer for the detection of SNP TSC0046786
cacaacccctaa

SEQ ID NO: 350627 - DNA, 12 bp, Artificial Sequence
  Oligonucleotide primer for the detection of SNP TSC0046787
aatcaataatta

SEQ ID NO: 350628 - DNA, 12 bp, Artificial Sequence
  Oligonucleotide primer for the detection of SNP TSC0046787
actatcattact

SEQ ID NO: 350629 - DNA, 12 bp, Artificial Sequence
  Oligonucleotide primer for the detection of SNP TSC0046787
ggttaatggtta

SEQ ID NO: 350630 - DNA, 12 bp, Artificial Sequence
  Oligonucleotide primer for the detection of SNP TSC0046788
aaatcatttacc

SEQ ID NO: 350631 - DNA, 12 bp, Artificial Sequence
  Oligonucleotide primer for the detection of SNP TSC0046788
gggaggtcgggg

SEQ ID NO: 350632 - DNA, 12 bp, Artificial Sequence
  Oligonucleotide primer for the detection of SNP TSC0046788
aagttatttgtt

SEQ ID NO: 350633 - DNA, 12 bp, Artificial Sequence
  Oligonucleotide primer for the detection of SNP TSC0046789
aacatccaccac

SEQ ID NO: 350634 - DNA, 12 bp, Artificial Sequence
  Oligonucleotide primer for the detection of SNP TSC0046789
gacatccaccac

SEQ ID NO: 350635 - DNA, 12 bp, Artificial Sequence
  Oligonucleotide primer for the detection of SNP TSC0046789
ggtatttattat

SEQ ID NO: 350636 - DNA, 12 bp, Artificial Sequence
  Oligonucleotide primer for the detection of SNP TSC0046789
ggtatttattac

SEQ ID NO: 350637 - DNA, 12 bp, Artificial Sequence
  Oligonucleotide primer for the detection of SNP TSC0046790
actttaccaccc

SEQ ID NO: 350638 - DNA, 12 bp, Artificial Sequence
  Oligonucleotide primer for the detection of SNP TSC0046790
attatgttttag

SEQ ID NO: 350639 - DNA, 12 bp, Artificial Sequence
  Oligonucleotide primer for the detection of SNP TSC0046790
attacgttttag

SEQ ID NO: 350640 - DNA, 12 bp, Artificial Sequence
  Oligonucleotide primer for the detection of SNP TSC0046790
actacgctccaa

SEQ ID NO: 350641 - DNA, 12 bp, Artificial Sequence
  Oligonucleotide primer for the detection of SNP TSC0046791
tttgatgggttt

SEQ ID NO: 350642 - DNA, 12 bp, Artificial Sequence
  Oligonucleotide primer for the detection of SNP TSC0046791
tatagagagggt

SEQ ID NO: 350643 - DNA, 12 bp, Artificial Sequence
  Oligonucleotide primer for the detection of SNP TSC0046797
aatatcaaacca

SEQ ID NO: 350644 - DNA, 12 bp, Artificial Sequence
  Oligonucleotide primer for the detection of SNP TSC0046797
tgattattattt

SEQ ID NO: 350645 - DNA, 12 bp, Artificial Sequence
  Oligonucleotide primer for the detection of SNP TSC0046797
taaccatcacct

SEQ ID NO: 350646 - DNA, 12 bp, Artificial Sequence
  Oligonucleotide primer for the detection of SNP TSC0046797
aatattaggtta

SEQ ID NO: 350647 - DNA, 12 bp, Artificial Sequence
  Oligonucleotide primer for the detection of SNP TSC0046798
taactaaacaaa

SEQ ID NO: 350648 - DNA, 12 bp, Artificial Sequence
  Oligonucleotide primer for the detection of SNP TSC0046798
ccttccctactc

SEQ ID NO: 350649 - DNA, 12 bp, Artificial Sequence
  Oligonucleotide primer for the detection of SNP TSC0046798
tagttaggtaga

SEQ ID NO: 350650 - DNA, 12 bp, Artificial Sequence
  Oligonucleotide primer for the detection of SNP TSC0046799
ttccactaacaa

SEQ ID NO: 350651 - DNA, 12 bp, Artificial Sequence
  Oligonucleotide primer for the detection of SNP TSC0046799
tgatgtattttt

SEQ ID NO: 350652 - DNA, 12 bp, Artificial Sequence
  Oligonucleotide primer for the detection of SNP TSC0046799
taatatatctcc

SEQ ID NO: 350653 - DNA, 12 bp, Artificial Sequence
  Oligonucleotide primer for the detection of SNP TSC0008814
taattttaaatt

SEQ ID NO: 350654 - DNA, 12 bp, Artificial Sequence
  Oligonucleotide primer for the detection of SNP TSC0008814
ttttttattgga

SEQ ID NO: 350655 - DNA, 12 bp, Artificial Sequence
  Oligonucleotide primer for the detection of SNP TSC0008815
gatatttattgg

SEQ ID NO: 350656 - DNA, 12 bp, Artificial Sequence
  Oligonucleotide primer for the detection of SNP TSC0046804
cctataatcaaa

SEQ ID NO: 350657 - DNA, 12 bp, Artificial Sequence
  Oligonucleotide primer for the detection of SNP TSC0046804
aagagtgggaag

SEQ ID NO: 350658 - DNA, 12 bp, Artificial Sequence
  Oligonucleotide primer for the detection of SNP TSC0046804
tttataattaag

SEQ ID NO: 350659 - DNA, 12 bp, Artificial Sequence
  Oligonucleotide primer for the detection of SNP TSC0046808
cattaactactt

SEQ ID NO: 350660 - DNA, 12 bp, Artificial Sequence
  Oligonucleotide primer for the detection of SNP TSC0046808
atttatggtagg

SEQ ID NO: 350661 - DNA, 12 bp, Artificial Sequence
  Oligonucleotide primer for the detection of SNP TSC0046808
atttacggtagg

SEQ ID NO: 350662 - DNA, 12 bp, Artificial Sequence
  Oligonucleotide primer for the detection of SNP TSC0046808
atctacaataaa

SEQ ID NO: 350663 - DNA, 12 bp, Artificial Sequence
  Oligonucleotide primer for the detection of SNP TSC0046808
atctacgataaa

SEQ ID NO: 350664 - DNA, 12 bp, Artificial Sequence
  Oligonucleotide primer for the detection of SNP TSC0046809
caaaccacctat

SEQ ID NO: 350665 - DNA, 12 bp, Artificial Sequence
  Oligonucleotide primer for the detection of SNP TSC0046809
caaaccgcctat

SEQ ID NO: 350666 - DNA, 12 bp, Artificial Sequence
  Oligonucleotide primer for the detection of SNP TSC0046809
agtaggttgata

SEQ ID NO: 350667 - DNA, 12 bp, Artificial Sequence
  Oligonucleotide primer for the detection of SNP TSC0046809
agtaggtcgata

SEQ ID NO: 350668 - DNA, 12 bp, Artificial Sequence
  Oligonucleotide primer for the detection of SNP TSC0046810
aaactttccata

SEQ ID NO: 350669 - DNA, 12 bp, Artificial Sequence
  Oligonucleotide primer for the detection of SNP TSC0046810
agggttagaaat

SEQ ID NO: 350670 - DNA, 12 bp, Artificial Sequence
  Oligonucleotide primer for the detection of SNP TSC0046812
aaatccaaaatc

SEQ ID NO: 350671 - DNA, 12 bp, Artificial Sequence
  Oligonucleotide primer for the detection of SNP TSC0046812
gaatttgttgtg

SEQ ID NO: 350672 - DNA, 12 bp, Artificial Sequence
  Oligonucleotide primer for the detection of SNP TSC0046813
aaaacaaaccct

SEQ ID NO: 350673 - DNA, 12 bp, Artificial Sequence
  Oligonucleotide primer for the detection of SNP TSC0046813
gatttagtgttt

SEQ ID NO: 350674 - DNA, 12 bp, Artificial Sequence
  Oligonucleotide primer for the detection of SNP TSC0046813
ttcaatatctaa

SEQ ID NO: 350675 - DNA, 12 bp, Artificial Sequence
  Oligonucleotide primer for the detection of SNP TSC0046813
aaataggttttc

SEQ ID NO: 350676 - DNA, 12 bp, Artificial Sequence
  Oligonucleotide primer for the detection of SNP TSC0046815
aaataatacaat

SEQ ID NO: 350677 - DNA, 12 bp, Artificial Sequence
  Oligonucleotide primer for the detection of SNP TSC0046815
gtttttattgga

SEQ ID NO: 350678 - DNA, 12 bp, Artificial Sequence
  Oligonucleotide primer for the detection of SNP TSC0046816
aaacttttcaaa

SEQ ID NO: 350679 - DNA, 12 bp, Artificial Sequence
  Oligonucleotide primer for the detection of SNP TSC0046816
ccactctatcat

SEQ ID NO: 350680 - DNA, 12 bp, Artificial Sequence
  Oligonucleotide primer for the detection of SNP TSC0046816
aaaattttttaa

SEQ ID NO: 350681 - DNA, 12 bp, Artificial Sequence
  Oligonucleotide primer for the detection of SNP TSC0046817
taaagttataga

SEQ ID NO: 350682 - DNA, 12 bp, Artificial Sequence
  Oligonucleotide primer for the detection of SNP TSC0046817
ttgtattgtttt

SEQ ID NO: 350683 - DNA, 12 bp, Artificial Sequence
  Oligonucleotide primer for the detection of SNP TSC0046818
aattaataacac

SEQ ID NO: 350684 - DNA, 12 bp, Artificial Sequence
  Oligonucleotide primer for the detection of SNP TSC0046818
ttttgtgaatta

SEQ ID NO: 350685 - DNA, 12 bp, Artificial Sequence
  Oligonucleotide primer for the detection of SNP TSC0046820
gagtttttgggg

SEQ ID NO: 350686 - DNA, 12 bp, Artificial Sequence
  Oligonucleotide primer for the detection of SNP TSC0046821
aaaaatcattct

SEQ ID NO: 350687 - DNA, 12 bp, Artificial Sequence
  Oligonucleotide primer for the detection of SNP TSC0046821
agttgtgtaatg

SEQ ID NO: 350688 - DNA, 12 bp, Artificial Sequence
  Oligonucleotide primer for the detection of SNP TSC0046824
ctaactacaatt

SEQ ID NO: 350689 - DNA, 12 bp, Artificial Sequence
  Oligonucleotide primer for the detection of SNP TSC0046824
taatttgttgga

SEQ ID NO: 350690 - DNA, 12 bp, Artificial Sequence
  Oligonucleotide primer for the detection of SNP TSC0046825
aaaagaaagtaa

SEQ ID NO: 350691 - DNA, 12 bp, Artificial Sequence
  Oligonucleotide primer for the detection of SNP TSC0046826
ctctcaaatcta

SEQ ID NO: 350692 - DNA, 12 bp, Artificial Sequence
  Oligonucleotide primer for the detection of SNP TSC0046826
gaaagtagagtt

SEQ ID NO: 350693 - DNA, 12 bp, Artificial Sequence
  Oligonucleotide primer for the detection of SNP TSC0046826
tttttaggttta

SEQ ID NO: 350694 - DNA, 12 bp, Artificial Sequence
  Oligonucleotide primer for the detection of SNP TSC0046827
acatactaatta

SEQ ID NO: 350695 - DNA, 12 bp, Artificial Sequence
  Oligonucleotide primer for the detection of SNP TSC0046827
gtaagtgatttt

SEQ ID NO: 350696 - DNA, 12 bp, Artificial Sequence
  Oligonucleotide primer for the detection of SNP TSC0046827
taaataatccca

SEQ ID NO: 350697 - DNA, 12 bp, Artificial Sequence
  Oligonucleotide primer for the detection of SNP TSC0046827
tatgttaattgt

SEQ ID NO: 350698 - DNA, 12 bp, Artificial Sequence
  Oligonucleotide primer for the detection of SNP TSC0046828
tctaataaccac

SEQ ID NO: 350699 - DNA, 12 bp, Artificial Sequence
  Oligonucleotide primer for the detection of SNP TSC0046828
tagagaatagaa

SEQ ID NO: 350700 - DNA, 12 bp, Artificial Sequence
  Oligonucleotide primer for the detection of SNP TSC0046831
attttcatactt

SEQ ID NO: 350701 - DNA, 12 bp, Artificial Sequence
  Oligonucleotide primer for the detection of SNP TSC0046831
tgtagttttata

SEQ ID NO: 350702 - DNA, 12 bp, Artificial Sequence
  Oligonucleotide primer for the detection of SNP TSC0046832
cacaatacttaa

SEQ ID NO: 350703 - DNA, 12 bp, Artificial Sequence
  Oligonucleotide primer for the detection of SNP TSC0046832
agtttatatgat

SEQ ID NO: 350704 - DNA, 12 bp, Artificial Sequence
  Oligonucleotide primer for the detection of SNP TSC0046832
aactcatataat

SEQ ID NO: 350705 - DNA, 12 bp, Artificial Sequence
  Oligonucleotide primer for the detection of SNP TSC0046832
tataatgtttgg

SEQ ID NO: 350706 - DNA, 12 bp, Artificial Sequence
  Oligonucleotide primer for the detection of SNP TSC0009678
gaatatagttga

SEQ ID NO: 350707 - DNA, 12 bp, Artificial Sequence
  Oligonucleotide primer for the detection of SNP TSC0046836
ttttaaaaaagt

SEQ ID NO: 350708 - DNA, 12 bp, Artificial Sequence
  Oligonucleotide primer for the detection of SNP TSC0046836
agtatattaatt

SEQ ID NO: 350709 - DNA, 12 bp, Artificial Sequence
  Oligonucleotide primer for the detection of SNP TSC0046837
tcttcataaaaa

SEQ ID NO: 350710 - DNA, 12 bp, Artificial Sequence
  Oligonucleotide primer for the detection of SNP TSC0046837
tcttcgtaaaaa

SEQ ID NO: 350711 - DNA, 12 bp, Artificial Sequence
  Oligonucleotide primer for the detection of SNP TSC0046837
tcccatacactt

SEQ ID NO: 350712 - DNA, 12 bp, Artificial Sequence
  Oligonucleotide primer for the detection of SNP TSC0046837
tttttgtggaaa

SEQ ID NO: 350713 - DNA, 12 bp, Artificial Sequence
  Oligonucleotide primer for the detection of SNP TSC0046837
ttttcgtggaaa

SEQ ID NO: 350714 - DNA, 12 bp, Artificial Sequence
  Oligonucleotide primer for the detection of SNP TSC0046838
aaacctaacctt

SEQ ID NO: 350715 - DNA, 12 bp, Artificial Sequence
  Oligonucleotide primer for the detection of SNP TSC0046838
aaattgtatagg

SEQ ID NO: 350716 - DNA, 12 bp, Artificial Sequence
  Oligonucleotide primer for the detection of SNP TSC0000398
atgttggtgaga

SEQ ID NO: 350717 - DNA, 12 bp, Artificial Sequence
  Oligonucleotide primer for the detection of SNP TSC0000399
caaaccaacaat

SEQ ID NO: 350718 - DNA, 12 bp, Artificial Sequence
  Oligonucleotide primer for the detection of SNP TSC0000399
tatatagtagta

SEQ ID NO: 350719 - DNA, 12 bp, Artificial Sequence
  Oligonucleotide primer for the detection of SNP TSC0046843
ctacctctccta

SEQ ID NO: 350720 - DNA, 12 bp, Artificial Sequence
  Oligonucleotide primer for the detection of SNP TSC0046843
ggttgtgaaatt

SEQ ID NO: 350721 - DNA, 12 bp, Artificial Sequence
  Oligonucleotide primer for the detection of SNP TSC0046844
aattctccacac

SEQ ID NO: 350722 - DNA, 12 bp, Artificial Sequence
  Oligonucleotide primer for the detection of SNP TSC0046844
agagagaggtga

SEQ ID NO: 350723 - DNA, 12 bp, Artificial Sequence
  Oligonucleotide primer for the detection of SNP TSC0046845
tccatttaaaac

SEQ ID NO: 350724 - DNA, 12 bp, Artificial Sequence
  Oligonucleotide primer for the detection of SNP TSC0046845
ggaaatagatta

SEQ ID NO: 350725 - DNA, 12 bp, Artificial Sequence
  Oligonucleotide primer for the detection of SNP TSC0046846
taccaataccat

SEQ ID NO: 350726 - DNA, 12 bp, Artificial Sequence
  Oligonucleotide primer for the detection of SNP TSC0046846
gtaatttaaata

SEQ ID NO: 350727 - DNA, 12 bp, Artificial Sequence
  Oligonucleotide primer for the detection of SNP TSC0046847
atgttttgaagt

SEQ ID NO: 350728 - DNA, 12 bp, Artificial Sequence
  Oligonucleotide primer for the detection of SNP TSC0046847
aaaatatagggg

SEQ ID NO: 350729 - DNA, 12 bp, Artificial Sequence
  Oligonucleotide primer for the detection of SNP TSC0046848
attattttaatt

SEQ ID NO: 350730 - DNA, 12 bp, Artificial Sequence
  Oligonucleotide primer for the detection of SNP TSC0046849
tatatataatta

SEQ ID NO: 350731 - DNA, 12 bp, Artificial Sequence
  Oligonucleotide primer for the detection of SNP TSC0046850
ttcaacttttct

SEQ ID NO: 350732 - DNA, 12 bp, Artificial Sequence
  Oligonucleotide primer for the detection of SNP TSC0046850
ctactatatacc

SEQ ID NO: 350733 - DNA, 12 bp, Artificial Sequence
  Oligonucleotide primer for the detection of SNP TSC0046851
attataatgttg

SEQ ID NO: 350734 - DNA, 12 bp, Artificial Sequence
  Oligonucleotide primer for the detection of SNP TSC0046851
actataatatta

SEQ ID NO: 350735 - DNA, 12 bp, Artificial Sequence
  Oligonucleotide primer for the detection of SNP TSC0046851
aaaatgggaaat

SEQ ID NO: 350736 - DNA, 12 bp, Artificial Sequence
  Oligonucleotide primer for the detection of SNP TSC0010733
tctctattatac

SEQ ID NO: 350737 - DNA, 12 bp, Artificial Sequence
  Oligonucleotide primer for the detection of SNP TSC0010733
tgaaatttgtta

SEQ ID NO: 350738 - DNA, 12 bp, Artificial Sequence
  Oligonucleotide primer for the detection of SNP TSC0046852
atatattaatat

SEQ ID NO: 350739 - DNA, 12 bp, Artificial Sequence
  Oligonucleotide primer for the detection of SNP TSC0046852
tatacactaata

SEQ ID NO: 350740 - DNA, 12 bp, Artificial Sequence
  Oligonucleotide primer for the detection of SNP TSC0046853
tttttaccttct

SEQ ID NO: 350741 - DNA, 12 bp, Artificial Sequence
  Oligonucleotide primer for the detection of SNP TSC0046853
atagttatttaa

SEQ ID NO: 350742 - DNA, 12 bp, Artificial Sequence
  Oligonucleotide primer for the detection of SNP TSC0046854
taataatttata

SEQ ID NO: 350743 - DNA, 12 bp, Artificial Sequence
  Oligonucleotide primer for the detection of SNP TSC0046854
tttcttttcaaa

SEQ ID NO: 350744 - DNA, 12 bp, Artificial Sequence
  Oligonucleotide primer for the detection of SNP TSC0046855
ttaatttcttca

SEQ ID NO: 350745 - DNA, 12 bp, Artificial Sequence
  Oligonucleotide primer for the detection of SNP TSC0046855
agtgagttaaag

SEQ ID NO: 350746 - DNA, 12 bp, Artificial Sequence
  Oligonucleotide primer for the detection of SNP TSC0046856
ttatctattata

SEQ ID NO: 350747 - DNA, 12 bp, Artificial Sequence
  Oligonucleotide primer for the detection of SNP TSC0046856
ttatatttagta

SEQ ID NO: 350748 - DNA, 12 bp, Artificial Sequence
  Oligonucleotide primer for the detection of SNP TSC0046856
ttatattcaaca

SEQ ID NO: 350749 - DNA, 12 bp, Artificial Sequence
  Oligonucleotide primer for the detection of SNP TSC0046859
ttacaaacaatc

SEQ ID NO: 350750 - DNA, 12 bp, Artificial Sequence
  Oligonucleotide primer for the detection of SNP TSC0046859
ttacaaacgatc

SEQ ID NO: 350751 - DNA, 12 bp, Artificial Sequence
  Oligonucleotide primer for the detection of SNP TSC0046859
aaaaatataact

SEQ ID NO: 350752 - DNA, 12 bp, Artificial Sequence
  Oligonucleotide primer for the detection of SNP TSC0046859
ttataaacgatt

SEQ ID NO: 350753 - DNA, 12 bp, Artificial Sequence
  Oligonucleotide primer for the detection of SNP TSC0046860
tttagatggaaa

SEQ ID NO: 350754 - DNA, 12 bp, Artificial Sequence
  Oligonucleotide primer for the detection of SNP TSC0046861
tgtttaatagtg

SEQ ID NO: 350755 - DNA, 12 bp, Artificial Sequence
  Oligonucleotide primer for the detection of SNP TSC0046862
tttaatatgagt

SEQ ID NO: 350756 - DNA, 12 bp, Artificial Sequence
  Oligonucleotide primer for the detection of SNP TSC0046862
ctcaacataaac

SEQ ID NO: 350757 - DNA, 12 bp, Artificial Sequence
  Oligonucleotide primer for the detection of SNP TSC0046862
agttagtagaga

SEQ ID NO: 350758 - DNA, 12 bp, Artificial Sequence
  Oligonucleotide primer for the detection of SNP TSC0046863
cacaccattctc

SEQ ID NO: 350759 - DNA, 12 bp, Artificial Sequence
  Oligonucleotide primer for the detection of SNP TSC0046864
cacctcaacccc

SEQ ID NO: 350760 - DNA, 12 bp, Artificial Sequence
  Oligonucleotide primer for the detection of SNP TSC0046864
cacctcgacccc

SEQ ID NO: 350761 - DNA, 12 bp, Artificial Sequence
  Oligonucleotide primer for the detection of SNP TSC0046864
cgcctcaacccc

SEQ ID NO: 350762 - DNA, 12 bp, Artificial Sequence
  Oligonucleotide primer for the detection of SNP TSC0046864
cgcctcgacccc

SEQ ID NO: 350763 - DNA, 12 bp, Artificial Sequence
  Oligonucleotide primer for the detection of SNP TSC0046864
tttagtaatttg

SEQ ID NO: 350764 - DNA, 12 bp, Artificial Sequence
  Oligonucleotide primer for the detection of SNP TSC0000356
atctacctccca

SEQ ID NO: 350765 - DNA, 12 bp, Artificial Sequence
  Oligonucleotide primer for the detection of SNP TSC0000356
gaagaagttaat

SEQ ID NO: 350766 - DNA, 12 bp, Artificial Sequence
  Oligonucleotide primer for the detection of SNP TSC0000356
aaaaaaattaat

SEQ ID NO: 350767 - DNA, 12 bp, Artificial Sequence
  Oligonucleotide primer for the detection of SNP TSC0046867
aaaattaatatt

SEQ ID NO: 350768 - DNA, 12 bp, Artificial Sequence
  Oligonucleotide primer for the detection of SNP TSC0046868
ctaaatctccac

SEQ ID NO: 350769 - DNA, 12 bp, Artificial Sequence
  Oligonucleotide primer for the detection of SNP TSC0046868
ctaaatctccgc

SEQ ID NO: 350770 - DNA, 12 bp, Artificial Sequence
  Oligonucleotide primer for the detection of SNP TSC0046869
atactacaaaac

SEQ ID NO: 350771 - DNA, 12 bp, Artificial Sequence
  Oligonucleotide primer for the detection of SNP TSC0046869
atactacgaaac

SEQ ID NO: 350772 - DNA, 12 bp, Artificial Sequence
  Oligonucleotide primer for the detection of SNP TSC0046869
acttctttacta

SEQ ID NO: 350773 - DNA, 12 bp, Artificial Sequence
  Oligonucleotide primer for the detection of SNP TSC0046869
atgttgtgaagt

SEQ ID NO: 350774 - DNA, 12 bp, Artificial Sequence
  Oligonucleotide primer for the detection of SNP TSC0046869
atgttgcgaagt

SEQ ID NO: 350775 - DNA, 12 bp, Artificial Sequence
  Oligonucleotide primer for the detection of SNP TSC0046870
catacacatatc

SEQ ID NO: 350776 - DNA, 12 bp, Artificial Sequence
  Oligonucleotide primer for the detection of SNP TSC0046870
gtatttttgggg

SEQ ID NO: 350777 - DNA, 12 bp, Artificial Sequence
  Oligonucleotide primer for the detection of SNP TSC0046872
agtatgttttat

SEQ ID NO: 350778 - DNA, 12 bp, Artificial Sequence
  Oligonucleotide primer for the detection of SNP TSC0046872
aacatattttac

SEQ ID NO: 350779 - DNA, 12 bp, Artificial Sequence
  Oligonucleotide primer for the detection of SNP TSC0046872
tgattataaaaa

SEQ ID NO: 350780 - DNA, 12 bp, Artificial Sequence
  Oligonucleotide primer for the detection of SNP TSC0046874
ctctccaacaac

SEQ ID NO: 350781 - DNA, 12 bp, Artificial Sequence
  Oligonucleotide primer for the detection of SNP TSC0046874
gattagagtagg

SEQ ID NO: 350782 - DNA, 12 bp, Artificial Sequence
  Oligonucleotide primer for the detection of SNP TSC0046874
aattaaaacaaa

SEQ ID NO: 350783 - DNA, 12 bp, Artificial Sequence
  Oligonucleotide primer for the detection of SNP TSC0046875
tcttacttaaat

SEQ ID NO: 350784 - DNA, 12 bp, Artificial Sequence
  Oligonucleotide primer for the detection of SNP TSC0046876
aaattctcccct

SEQ ID NO: 350785 - DNA, 12 bp, Artificial Sequence
  Oligonucleotide primer for the detection of SNP TSC0046876
ggagagatgtta

SEQ ID NO: 350786 - DNA, 12 bp, Artificial Sequence
  Oligonucleotide primer for the detection of SNP TSC0046877
ataactactcaa

SEQ ID NO: 350787 - DNA, 12 bp, Artificial Sequence
  Oligonucleotide primer for the detection of SNP TSC0046877
aaacattcccaa

SEQ ID NO: 350788 - DNA, 12 bp, Artificial Sequence
  Oligonucleotide primer for the detection of SNP TSC0046877
tggttgtttagt

SEQ ID NO: 350789 - DNA, 12 bp, Artificial Sequence
  Oligonucleotide primer for the detection of SNP TSC0046877
tggttgtttagc

SEQ ID NO: 350790 - DNA, 12 bp, Artificial Sequence
  Oligonucleotide primer for the detection of SNP TSC0046878
ataaatatcaac

SEQ ID NO: 350791 - DNA, 12 bp, Artificial Sequence
  Oligonucleotide primer for the detection of SNP TSC0046878
ttttatttgaga

SEQ ID NO: 350792 - DNA, 12 bp, Artificial Sequence
  Oligonucleotide primer for the detection of SNP TSC0046879
tattcctatttt

SEQ ID NO: 350793 - DNA, 12 bp, Artificial Sequence
  Oligonucleotide primer for the detection of SNP TSC0046879
ataaagagagga

SEQ ID NO: 350794 - DNA, 12 bp, Artificial Sequence
  Oligonucleotide primer for the detection of SNP TSC0046883
taataaaaaatc

SEQ ID NO: 350795 - DNA, 12 bp, Artificial Sequence
  Oligonucleotide primer for the detection of SNP TSC0046883
aaaaaaagttaa

SEQ ID NO: 350796 - DNA, 12 bp, Artificial Sequence
  Oligonucleotide primer for the detection of SNP TSC0046884
aactccatcccc

SEQ ID NO: 350797 - DNA, 12 bp, Artificial Sequence
  Oligonucleotide primer for the detection of SNP TSC0046884
aactccgtcccc

SEQ ID NO: 350798 - DNA, 12 bp, Artificial Sequence
  Oligonucleotide primer for the detection of SNP TSC0046884
aatttcgttttt

SEQ ID NO: 350799 - DNA, 12 bp, Artificial Sequence
  Oligonucleotide primer for the detection of SNP TSC0046885
gagtgtaatggt

SEQ ID NO: 350800 - DNA, 12 bp, Artificial Sequence
  Oligonucleotide primer for the detection of SNP TSC0046885
gagtgtaatggc

SEQ ID NO: 350801 - DNA, 12 bp, Artificial Sequence
  Oligonucleotide primer for the detection of SNP TSC0046891
ttatttcaaacc

SEQ ID NO: 350802 - DNA, 12 bp, Artificial Sequence
  Oligonucleotide primer for the detection of SNP TSC0046891
ttatttcgaacc

SEQ ID NO: 350803 - DNA, 12 bp, Artificial Sequence
  Oligonucleotide primer for the detection of SNP TSC0046891
aagatttaagtg

SEQ ID NO: 350804 - DNA, 12 bp, Artificial Sequence
  Oligonucleotide primer for the detection of SNP TSC0046891
aagatttaagcg

SEQ ID NO: 350805 - DNA, 12 bp, Artificial Sequence
  Oligonucleotide primer for the detection of SNP TSC0046892
ctcaatattatt

SEQ ID NO: 350806 - DNA, 12 bp, Artificial Sequence
  Oligonucleotide primer for the detection of SNP TSC0046892
ctcgatattatt

SEQ ID NO: 350807 - DNA, 12 bp, Artificial Sequence
  Oligonucleotide primer for the detection of SNP TSC0046893
cctttacccacc

SEQ ID NO: 350808 - DNA, 12 bp, Artificial Sequence
  Oligonucleotide primer for the detection of SNP TSC0046894
agaatataatta

SEQ ID NO: 350809 - DNA, 12 bp, Artificial Sequence
  Oligonucleotide primer for the detection of SNP TSC0046896
tgtttttgagtt

SEQ ID NO: 350810 - DNA, 12 bp, Artificial Sequence
  Oligonucleotide primer for the detection of SNP TSC0046896
tatttttaaacc

SEQ ID NO: 350811 - DNA, 12 bp, Artificial Sequence
  Oligonucleotide primer for the detection of SNP TSC0046896
aggtatgtggtt

SEQ ID NO: 350812 - DNA, 12 bp, Artificial Sequence
  Oligonucleotide primer for the detection of SNP TSC0046897
aaaatagaaatt

SEQ ID NO: 350813 - DNA, 12 bp, Artificial Sequence
  Oligonucleotide primer for the detection of SNP TSC0046897
ttgaaaagtata

SEQ ID NO: 350814 - DNA, 12 bp, Artificial Sequence
  Oligonucleotide primer for the detection of SNP TSC0046898
aaatggaaataa

SEQ ID NO: 350815 - DNA, 12 bp, Artificial Sequence
  Oligonucleotide primer for the detection of SNP TSC0046898
gtgaaagttttt

SEQ ID NO: 350816 - DNA, 12 bp, Artificial Sequence
  Oligonucleotide primer for the detection of SNP TSC0046899
taactcttaaaa

SEQ ID NO: 350817 - DNA, 12 bp, Artificial Sequence
  Oligonucleotide primer for the detection of SNP TSC0046899
tgaagtattatt

SEQ ID NO: 350818 - DNA, 12 bp, Artificial Sequence
  Oligonucleotide primer for the detection of SNP TSC0046899
cgaagtattatt

SEQ ID NO: 350819 - DNA, 12 bp, Artificial Sequence
  Oligonucleotide primer for the detection of SNP TSC0046899
caaaacattatt

SEQ ID NO: 350820 - DNA, 12 bp, Artificial Sequence
  Oligonucleotide primer for the detection of SNP TSC0046899
cgaaacattatt

SEQ ID NO: 350821 - DNA, 12 bp, Artificial Sequence
  Oligonucleotide primer for the detection of SNP TSC0046900
ttatatttatat

SEQ ID NO: 350822 - DNA, 12 bp, Artificial Sequence
  Oligonucleotide primer for the detection of SNP TSC0046900
gtgaataaattt

SEQ ID NO: 350823 - DNA, 12 bp, Artificial Sequence
  Oligonucleotide primer for the detection of SNP TSC0046900
ataaataaattc

SEQ ID NO: 350824 - DNA, 12 bp, Artificial Sequence
  Oligonucleotide primer for the detection of SNP TSC0046901
attttaaattta

SEQ ID NO: 350825 - DNA, 12 bp, Artificial Sequence
  Oligonucleotide primer for the detection of SNP TSC0046901
ccacataaatac

SEQ ID NO: 350826 - DNA, 12 bp, Artificial Sequence
  Oligonucleotide primer for the detection of SNP TSC0046901
gttttggatttg

SEQ ID NO: 350827 - DNA, 12 bp, Artificial Sequence
  Oligonucleotide primer for the detection of SNP TSC0046902
ttttattatttc

SEQ ID NO: 350828 - DNA, 12 bp, Artificial Sequence
  Oligonucleotide primer for the detection of SNP TSC0046902
tatgttattgta

SEQ ID NO: 350829 - DNA, 12 bp, Artificial Sequence
  Oligonucleotide primer for the detection of SNP TSC0046903
tatttcaaacac

SEQ ID NO: 350830 - DNA, 12 bp, Artificial Sequence
  Oligonucleotide primer for the detection of SNP TSC0046903
tttatctatcca

SEQ ID NO: 350831 - DNA, 12 bp, Artificial Sequence
  Oligonucleotide primer for the detection of SNP TSC0046903
tgttttaaatat

SEQ ID NO: 350832 - DNA, 12 bp, Artificial Sequence
  Oligonucleotide primer for the detection of SNP TSC0046903
tgttttaaatac

SEQ ID NO: 350833 - DNA, 12 bp, Artificial Sequence
  Oligonucleotide primer for the detection of SNP TSC0046907
catcaatctaac

SEQ ID NO: 350834 - DNA, 12 bp, Artificial Sequence
  Oligonucleotide primer for the detection of SNP TSC0046907
catcgatctaac

SEQ ID NO: 350835 - DNA, 12 bp, Artificial Sequence
  Oligonucleotide primer for the detection of SNP TSC0046907
aggattatgttg

SEQ ID NO: 350836 - DNA, 12 bp, Artificial Sequence
  Oligonucleotide primer for the detection of SNP TSC0046908
aatcctaataaa

SEQ ID NO: 350837 - DNA, 12 bp, Artificial Sequence
  Oligonucleotide primer for the detection of SNP TSC0046908
ggatattaattt

SEQ ID NO: 350838 - DNA, 12 bp, Artificial Sequence
  Oligonukleotid-Primer
aaacactaatcc

SEQ ID NO: 350839 - DNA, 12 bp, Artificial Sequence
  Oligonucleotide primer for the detection of SNP TSC0046908
aattttgatgaa

SEQ ID NO: 350840 - DNA, 12 bp, Artificial Sequence
  Oligonucleotide primer for the detection of SNP TSC0046910
catcatatttac

SEQ ID NO: 350841 - DNA, 12 bp, Artificial Sequence
  Oligonucleotide primer for the detection of SNP TSC0046910
ttatttagtttg

SEQ ID NO: 350842 - DNA, 12 bp, Artificial Sequence
  Oligonukleotid-Primer
tttcgtaatata

SEQ ID NO: 350843 - DNA, 12 bp, Artificial Sequence
  Oligonucleotide primer for the detection of SNP TSC0046911
tctcataacaca

SEQ ID NO: 350844 - DNA, 12 bp, Artificial Sequence
  Oligonucleotide primer for the detection of SNP TSC0046911
tctcgtaacaca

SEQ ID NO: 350845 - DNA, 12 bp, Artificial Sequence
  Oligonucleotide primer for the detection of SNP TSC0046912
tggtgattatag

SEQ ID NO: 350846 - DNA, 12 bp, Artificial Sequence
  Oligonukleotid-Primer
atgttttataaa

SEQ ID NO: 350847 - DNA, 12 bp, Artificial Sequence
  Oligonucleotide primer for the detection of SNP TSC0046915
acgttttataaa

SEQ ID NO: 350848 - DNA, 12 bp, Artificial Sequence
  Oligonucleotide primer for the detection of SNP TSC0046918
aatatttataaa

SEQ ID NO: 350849 - DNA, 12 bp, Artificial Sequence
  Oligonucleotide primer for the detection of SNP TSC0046918
tttgtatatatg

SEQ ID NO: 350850 - DNA, 12 bp, Artificial Sequence
  Oligonucleotide primer for the detection of SNP TSC0046918
gaaaatatttgt

SEQ ID NO: 350851 - DNA, 12 bp, Artificial Sequence
  Oligonucleotide primer for the detection of SNP TSC0046919
aaataacctaca

SEQ ID NO: 350852 - DNA, 12 bp, Artificial Sequence
  Oligonucleotide primer for the detection of SNP TSC0046919
taacaatatact

SEQ ID NO: 350853 - DNA, 12 bp, Artificial Sequence
  Oligonucleotide primer for the detection of SNP TSC0046919
agatagtttgta

SEQ ID NO: 350854 - DNA, 12 bp, Artificial Sequence
  Oligonucleotide primer for the detection of SNP TSC0046920
aaaattattata

SEQ ID NO: 350855 - DNA, 12 bp, Artificial Sequence
  Oligonucleotide primer for the detection of SNP TSC0046920
atgtttgatatt

SEQ ID NO: 350856 - DNA, 12 bp, Artificial Sequence
  Oligonucleotide primer for the detection of SNP TSC0046920
atatctaatact

SEQ ID NO: 350857 - DNA, 12 bp, Artificial Sequence
  Oligonucleotide primer for the detection of SNP TSC0046920
agaattgttgta

SEQ ID NO: 350858 - DNA, 12 bp, Artificial Sequence
  Oligonucleotide primer for the detection of SNP TSC0046921
ttattaactctc

SEQ ID NO: 350859 - DNA, 12 bp, Artificial Sequence
  Oligonucleotide primer for the detection of SNP TSC0046921
tagatgaatata

SEQ ID NO: 350860 - DNA, 12 bp, Artificial Sequence
  Oligonucleotide primer for the detection of SNP TSC0046922
cccaacaaattc

SEQ ID NO: 350861 - DNA, 12 bp, Artificial Sequence
  Oligonucleotide primer for the detection of SNP TSC0046922
aggaatgtaaga

SEQ ID NO: 350862 - DNA, 12 bp, Artificial Sequence
  Oligonucleotide primer for the detection of SNP TSC0046931
gatttttttgta

SEQ ID NO: 350863 - DNA, 12 bp, Artificial Sequence
  Oligonucleotide primer for the detection of SNP TSC0046934
tatatcacccct

SEQ ID NO: 350864 - DNA, 12 bp, Artificial Sequence
  Oligonucleotide primer for the detection of SNP TSC0046934
ttttaatgggga

SEQ ID NO: 350865 - DNA, 12 bp, Artificial Sequence
  Oligonucleotide primer for the detection of SNP TSC0046937
aagtagatttag

SEQ ID NO: 350866 - DNA, 12 bp, Artificial Sequence
  Oligonukleotid-Primer
tgtgtttaagta

SEQ ID NO: 350867 - DNA, 12 bp, Artificial Sequence
  Oligonucleotide primer for the detection of SNP TSC0046944
ataactaataac

SEQ ID NO: 350868 - DNA, 12 bp, Artificial Sequence
  Oligonucleotide primer for the detection of SNP TSC0046944
taaggaaattaa

SEQ ID NO: 350869 - DNA, 12 bp, Artificial Sequence
  Oligonucleotide primer for the detection of SNP TSC0046944
gtagttaatagt

SEQ ID NO: 350870 - DNA, 12 bp, Artificial Sequence
  Oligonukleotid-Primer
ttcacatctaat

SEQ ID NO: 350871 - DNA, 12 bp, Artificial Sequence
  Oligonucleotide primer for the detection of SNP TSC0046945
ggttaagaatta

SEQ ID NO: 350872 - DNA, 12 bp, Artificial Sequence
  Oligonucleotide primer for the detection of SNP TSC0046946
atctaataaact

SEQ ID NO: 350873 - DNA, 12 bp, Artificial Sequence
  Oligonucleotide primer for the detection of SNP TSC0046946
tcttcttataac

SEQ ID NO: 350874 - DNA, 12 bp, Artificial Sequence
  Oligonucleotide primer for the detection of SNP TSC0046946
gtttaatggatt

SEQ ID NO: 350875 - DNA, 12 bp, Artificial Sequence
  Oligonucleotide primer for the detection of SNP TSC0046947
attttacctttt

SEQ ID NO: 350876 - DNA, 12 bp, Artificial Sequence
  Oligonucleotide primer for the detection of SNP TSC0046947
tcactctaccaa

SEQ ID NO: 350877 - DNA, 12 bp, Artificial Sequence
  Oligonucleotide primer for the detection of SNP TSC0046949
aaaaactacccc

SEQ ID NO: 350878 - DNA, 12 bp, Artificial Sequence
  Oligonucleotide primer for the detection of SNP TSC0046949
aagggaaatatg

SEQ ID NO: 350879 - DNA, 12 bp, Artificial Sequence
  Oligonucleotide primer for the detection of SNP TSC0046950
ctttactttcat

SEQ ID NO: 350880 - DNA, 12 bp, Artificial Sequence
  Oligonucleotide primer for the detection of SNP TSC0046950
gattatgatata

SEQ ID NO: 350881 - DNA, 12 bp, Artificial Sequence
  Oligonucleotide primer for the detection of SNP TSC0007930
ttgtatttgtaa

SEQ ID NO: 350882 - DNA, 12 bp, Artificial Sequence
  Oligonucleotide primer for the detection of SNP TSC0007930
ctatatctataa

SEQ ID NO: 350883 - DNA, 12 bp, Artificial Sequence
  Oligonucleotide primer for the detection of SNP TSC0046952
tcgatattatta

SEQ ID NO: 350884 - DNA, 12 bp, Artificial Sequence
  Oligonucleotide primer for the detection of SNP TSC0046952
agttagaatatt

SEQ ID NO: 350885 - DNA, 12 bp, Artificial Sequence
  Oligonucleotide primer for the detection of SNP TSC0046952
atcaaaacatca

SEQ ID NO: 350886 - DNA, 12 bp, Artificial Sequence
  Oligonucleotide primer for the detection of SNP TSC0046952
tttgatgttgtt

SEQ ID NO: 350887 - DNA, 12 bp, Artificial Sequence
  Oligonucleotide primer for the detection of SNP TSC0046952
ttcgatgttgtt

SEQ ID NO: 350888 - DNA, 12 bp, Artificial Sequence
  Oligonucleotide primer for the detection of SNP TSC0046954
ctaactccatac

SEQ ID NO: 350889 - DNA, 12 bp, Artificial Sequence
  Oligonucleotide primer for the detection of SNP TSC0046954
aggttaataata

SEQ ID NO: 350890 - DNA, 12 bp, Artificial Sequence
  Oligonucleotide primer for the detection of SNP TSC0046955
aaaaacattatc

SEQ ID NO: 350891 - DNA, 12 bp, Artificial Sequence
  Oligonucleotide primer for the detection of SNP TSC0046955
attttatgggtg

SEQ ID NO: 350892 - DNA, 12 bp, Artificial Sequence
  Oligonucleotide primer for the detection of SNP TSC0046956
atgttagttttt

SEQ ID NO: 350893 - DNA, 12 bp, Artificial Sequence
  Oligonucleotide primer for the detection of SNP TSC0046956
tatatcaactct

SEQ ID NO: 350894 - DNA, 12 bp, Artificial Sequence
  Oligonucleotide primer for the detection of SNP TSC0046956
tatatggtggta

SEQ ID NO: 350895 - DNA, 12 bp, Artificial Sequence
  Oligonucleotide primer for the detection of SNP TSC0046961
agtttaatgtga

SEQ ID NO: 350896 - DNA, 12 bp, Artificial Sequence
  Oligonucleotide primer for the detection of SNP TSC0046962
aatcaccacaca

SEQ ID NO: 350897 - DNA, 12 bp, Artificial Sequence
  Oligonucleotide primer for the detection of SNP TSC0046962
aatcaccacacg

SEQ ID NO: 350898 - DNA, 12 bp, Artificial Sequence
  Oligonucleotide primer for the detection of SNP TSC0046962
actaaactatcc

SEQ ID NO: 350899 - DNA, 12 bp, Artificial Sequence
  Oligonucleotide primer for the detection of SNP TSC0046962
aattattatatg

SEQ ID NO: 350900 - DNA, 12 bp, Artificial Sequence
  Oligonucleotide primer for the detection of SNP TSC0046962
aattattatacg

SEQ ID NO: 350901 - DNA, 12 bp, Artificial Sequence
  Oligonucleotide primer for the detection of SNP TSC0046964
tctaataaatat

SEQ ID NO: 350902 - DNA, 12 bp, Artificial Sequence
  Oligonucleotide primer for the detection of SNP TSC0046964
gagttttgttaa

SEQ ID NO: 350903 - DNA, 12 bp, Artificial Sequence
  Oligonucleotide primer for the detection of SNP TSC0046964
aaaccctactaa

SEQ ID NO: 350904 - DNA, 12 bp, Artificial Sequence
  Oligonucleotide primer for the detection of SNP TSC0046964
tttaatgaatgt

SEQ ID NO: 350905 - DNA, 12 bp, Artificial Sequence
  Oligonucleotide primer for the detection of SNP TSC0046974
tcaaatacaact

SEQ ID NO: 350906 - DNA, 12 bp, Artificial Sequence
  Oligonucleotide primer for the detection of SNP TSC0046974
tagtagattgtg

SEQ ID NO: 350907 - DNA, 12 bp, Artificial Sequence
  Oligonucleotide primer for the detection of SNP TSC0046975
tatatcttacta

SEQ ID NO: 350908 - DNA, 12 bp, Artificial Sequence
  Oligonucleotide primer for the detection of SNP TSC0046975
gtaagattgaag

SEQ ID NO: 350909 - DNA, 12 bp, Artificial Sequence
  Oligonucleotide primer for the detection of SNP TSC0046976
actaataaaact

SEQ ID NO: 350910 - DNA, 12 bp, Artificial Sequence
  Oligonucleotide primer for the detection of SNP TSC0046976
aaatttttttcg

SEQ ID NO: 350911 - DNA, 12 bp, Artificial Sequence
  Oligonucleotide primer for the detection of SNP TSC0046977
tttaattttcac

SEQ ID NO: 350912 - DNA, 12 bp, Artificial Sequence
  Oligonucleotide primer for the detection of SNP TSC0046979
tcactacaaact

SEQ ID NO: 350913 - DNA, 12 bp, Artificial Sequence
  Oligonucleotide primer for the detection of SNP TSC0046979
gtgtgggaggtg

SEQ ID NO: 350914 - DNA, 12 bp, Artificial Sequence
  Oligonucleotide primer for the detection of SNP TSC0046979
gtgtgggaggcg

SEQ ID NO: 350915 - DNA, 12 bp, Artificial Sequence
  Oligonucleotide primer for the detection of SNP TSC0046980
tctttcatcatt

SEQ ID NO: 350916 - DNA, 12 bp, Artificial Sequence
  Oligonucleotide primer for the detection of SNP TSC0046980
aaaagtatgata

SEQ ID NO: 350917 - DNA, 12 bp, Artificial Sequence
  Oligonucleotide primer for the detection of SNP TSC0046980
aaaaacataata

SEQ ID NO: 350918 - DNA, 12 bp, Artificial Sequence
  Oligonucleotide primer for the detection of SNP TSC0046985
aattaaacaatc

SEQ ID NO: 350919 - DNA, 12 bp, Artificial Sequence
  Oligonucleotide primer for the detection of SNP TSC0046989
aactcccaacac

SEQ ID NO: 350920 - DNA, 12 bp, Artificial Sequence
  Oligonucleotide primer for the detection of SNP TSC0046989
aatactccctat

SEQ ID NO: 350921 - DNA, 12 bp, Artificial Sequence
  Oligonucleotide primer for the detection of SNP TSC0046989
gatttttagtat

SEQ ID NO: 350922 - DNA, 12 bp, Artificial Sequence
  Oligonucleotide primer for the detection of SNP TSC0046990
attcaaaaaaaa

SEQ ID NO: 350923 - DNA, 12 bp, Artificial Sequence
  Oligonucleotide primer for the detection of SNP TSC0046990
agaggttaattg

SEQ ID NO: 350924 - DNA, 12 bp, Artificial Sequence
  Oligonucleotide primer for the detection of SNP TSC0046990
aaaattaattaa

SEQ ID NO: 350925 - DNA, 12 bp, Artificial Sequence
  Oligonucleotide primer for the detection of SNP TSC0046990
tttgtatttagg

SEQ ID NO: 350926 - DNA, 12 bp, Artificial Sequence
  Oligonucleotide primer for the detection of SNP TSC0046991
tcattataaaaa

SEQ ID NO: 350927 - DNA, 12 bp, Artificial Sequence
  Oligonucleotide primer for the detection of SNP TSC0046991
ttattaagttat

SEQ ID NO: 350928 - DNA, 12 bp, Artificial Sequence
  Oligonucleotide primer for the detection of SNP TSC0046991
ttattaagttac

SEQ ID NO: 350929 - DNA, 12 bp, Artificial Sequence
  Oligonucleotide primer for the detection of SNP TSC0046991
tcatcaaattac

SEQ ID NO: 350930 - DNA, 12 bp, Artificial Sequence
  Oligonucleotide primer for the detection of SNP TSC0046992
tacctatctaac

SEQ ID NO: 350931 - DNA, 12 bp, Artificial Sequence
  Oligonucleotide primer for the detection of SNP TSC0046992
agttatattata

SEQ ID NO: 350932 - DNA, 12 bp, Artificial Sequence
  Oligonucleotide primer for the detection of SNP TSC0046993
caaacttaccac

SEQ ID NO: 350933 - DNA, 12 bp, Artificial Sequence
  Oligonucleotide primer for the detection of SNP TSC0046993
gttgggttttgg

SEQ ID NO: 350934 - DNA, 12 bp, Artificial Sequence
  Oligonucleotide primer for the detection of SNP TSC0046993
gtcgggttttgg

SEQ ID NO: 350935 - DNA, 12 bp, Artificial Sequence
  Oligonucleotide primer for the detection of SNP TSC0046995
agttttaggtag

SEQ ID NO: 350936 - DNA, 12 bp, Artificial Sequence
  Oligonucleotide primer for the detection of SNP TSC0046995
aatctcaaacaa

SEQ ID NO: 350937 - DNA, 12 bp, Artificial Sequence
  Oligonucleotide primer for the detection of SNP TSC0046995
agtgaggaaaga

SEQ ID NO: 350938 - DNA, 12 bp, Artificial Sequence
  Oligonucleotide primer for the detection of SNP TSC0046996
ttgttttgttgt

SEQ ID NO: 350939 - DNA, 12 bp, Artificial Sequence
  Oligonucleotide primer for the detection of SNP TSC0046996
ttgttttgttgc

SEQ ID NO: 350940 - DNA, 12 bp, Artificial Sequence
  Oligonucleotide primer for the detection of SNP TSC0046996
ttactctattac

SEQ ID NO: 350941 - DNA, 12 bp, Artificial Sequence
  Oligonucleotide primer for the detection of SNP TSC0047000
aaacatatatta

SEQ ID NO: 350942 - DNA, 12 bp, Artificial Sequence
  Oligonucleotide primer for the detection of SNP TSC0047000
ttataacacaaa

SEQ ID NO: 350943 - DNA, 12 bp, Artificial Sequence
  Oligonucleotide primer for the detection of SNP TSC0047000
gtatgtattgtt

SEQ ID NO: 350944 - DNA, 12 bp, Artificial Sequence
  Oligonucleotide primer for the detection of SNP TSC0047001
ccctctctcacc

SEQ ID NO: 350945 - DNA, 12 bp, Artificial Sequence
  Oligonucleotide primer for the detection of SNP TSC0047001
tgttgaatagga

SEQ ID NO: 350946 - DNA, 12 bp, Artificial Sequence
  Oligonucleotide primer for the detection of SNP TSC0047002
tattcattctac

SEQ ID NO: 350947 - DNA, 12 bp, Artificial Sequence
  Oligonucleotide primer for the detection of SNP TSC0047002
tgttaaatgggt

SEQ ID NO: 350948 - DNA, 12 bp, Artificial Sequence
  Oligonucleotide primer for the detection of SNP TSC0047002
tactaaataaat

SEQ ID NO: 350949 - DNA, 12 bp, Artificial Sequence
  Oligonucleotide primer for the detection of SNP TSC0047003
aaactataaatt

SEQ ID NO: 350950 - DNA, 12 bp, Artificial Sequence
  Oligonucleotide primer for the detection of SNP TSC0047003
tgttggtgtgga

SEQ ID NO: 350951 - DNA, 12 bp, Artificial Sequence
  Oligonucleotide primer for the detection of SNP TSC0047004
atatttatacca

SEQ ID NO: 350952 - DNA, 12 bp, Artificial Sequence
  Oligonucleotide primer for the detection of SNP TSC0047004
tttcctcccttc

SEQ ID NO: 350953 - DNA, 12 bp, Artificial Sequence
  Oligonucleotide primer for the detection of SNP TSC0047004
atgtttatgtta

SEQ ID NO: 350954 - DNA, 12 bp, Artificial Sequence
  Oligonucleotide primer for the detection of SNP TSC0047015
attaactaaaaa

SEQ ID NO: 350955 - DNA, 12 bp, Artificial Sequence
  Oligonucleotide primer for the detection of SNP TSC0047015
ttgattggaaat

SEQ ID NO: 350956 - DNA, 12 bp, Artificial Sequence
  Oligonucleotide primer for the detection of SNP TSC0047016
acaatccaaata

SEQ ID NO: 350957 - DNA, 12 bp, Artificial Sequence
  Oligonucleotide primer for the detection of SNP TSC0047016
taatttccaatc

SEQ ID NO: 350958 - DNA, 12 bp, Artificial Sequence
  Oligonucleotide primer for the detection of SNP TSC0047016
ataatttaaatg

SEQ ID NO: 350959 - DNA, 12 bp, Artificial Sequence
  Oligonucleotide primer for the detection of SNP TSC0047017
cacatatataac

SEQ ID NO: 350960 - DNA, 12 bp, Artificial Sequence
  Oligonucleotide primer for the detection of SNP TSC0047017
taatatattatc

SEQ ID NO: 350961 - DNA, 12 bp, Artificial Sequence
  Oligonucleotide primer for the detection of SNP TSC0047017
ttaatatattat

SEQ ID NO: 350962 - DNA, 12 bp, Artificial Sequence
  Oligonucleotide primer for the detection of SNP TSC0047019
attccatactta

SEQ ID NO: 350963 - DNA, 12 bp, Artificial Sequence
  Oligonucleotide primer for the detection of SNP TSC0047019
atttgagtaatt

SEQ ID NO: 350964 - DNA, 12 bp, Artificial Sequence
  Oligonucleotide primer for the detection of SNP TSC0047021
tatactaaatta

SEQ ID NO: 350965 - DNA, 12 bp, Artificial Sequence
  Oligonucleotide primer for the detection of SNP TSC0047021
gtgtgtgttaat

SEQ ID NO: 350966 - DNA, 12 bp, Artificial Sequence
  Oligonucleotide primer for the detection of SNP TSC0047021
gtgtgcgttaat

SEQ ID NO: 350967 - DNA, 12 bp, Artificial Sequence
  Oligonucleotide primer for the detection of SNP TSC0047021
atatacattaac

SEQ ID NO: 350968 - DNA, 12 bp, Artificial Sequence
  Oligonucleotide primer for the detection of SNP TSC0047021
atatacgttaac

SEQ ID NO: 350969 - DNA, 12 bp, Artificial Sequence
  Oligonucleotide primer for the detection of SNP TSC0047022
ctaaaacaatca

SEQ ID NO: 350970 - DNA, 12 bp, Artificial Sequence
  Oligonucleotide primer for the detection of SNP TSC0047022
gatgaatttttg

SEQ ID NO: 350971 - DNA, 12 bp, Artificial Sequence
  Oligonucleotide primer for the detection of SNP TSC0047022
ataaactcctaa

SEQ ID NO: 350972 - DNA, 12 bp, Artificial Sequence
  Oligonucleotide primer for the detection of SNP TSC0047022
ttgaggtaatta

SEQ ID NO: 350973 - DNA, 12 bp, Artificial Sequence
  Oligonucleotide primer for the detection of SNP TSC0047023
cctctaaaaatc

SEQ ID NO: 350974 - DNA, 12 bp, Artificial Sequence
  Oligonucleotide primer for the detection of SNP TSC0047023
tttaatatttgg

SEQ ID NO: 350975 - DNA, 12 bp, Artificial Sequence
  Oligonucleotide primer for the detection of SNP TSC0047025
caaatatatttt

SEQ ID NO: 350976 - DNA, 12 bp, Artificial Sequence
  Oligonucleotide primer for the detection of SNP TSC0047025
tagaatattttg

SEQ ID NO: 350977 - DNA, 12 bp, Artificial Sequence
  Oligonucleotide primer for the detection of SNP TSC0047029
aattagtaagaa

SEQ ID NO: 350978 - DNA, 12 bp, Artificial Sequence
  Oligonucleotide primer for the detection of SNP TSC0047030
ataccaattcct

SEQ ID NO: 350979 - DNA, 12 bp, Artificial Sequence
  Oligonucleotide primer for the detection of SNP TSC0047030
ataccgattcct

SEQ ID NO: 350980 - DNA, 12 bp, Artificial Sequence
  Oligonucleotide primer for the detection of SNP TSC0047030
ggagaatgaaat

SEQ ID NO: 350981 - DNA, 12 bp, Artificial Sequence
  Oligonucleotide primer for the detection of SNP TSC0047030
gtattgattttt

SEQ ID NO: 350982 - DNA, 12 bp, Artificial Sequence
  Oligonucleotide primer for the detection of SNP TSC0047030
gtatcgattttt

SEQ ID NO: 350983 - DNA, 12 bp, Artificial Sequence
  Oligonucleotide primer for the detection of SNP TSC0047031
ttcatcttttct

SEQ ID NO: 350984 - DNA, 12 bp, Artificial Sequence
  Oligonucleotide primer for the detection of SNP TSC0047031
ttatttaaatta

SEQ ID NO: 350985 - DNA, 12 bp, Artificial Sequence
  Oligonucleotide primer for the detection of SNP TSC0047032
accaaaaaaata

SEQ ID NO: 350986 - DNA, 12 bp, Artificial Sequence
  Oligonucleotide primer for the detection of SNP TSC0047032
gaaattaggaat

SEQ ID NO: 350987 - DNA, 12 bp, Artificial Sequence
  Oligonucleotide primer for the detection of SNP TSC0047032
gttaggaaagta

SEQ ID NO: 350988 - DNA, 12 bp, Artificial Sequence
  Oligonucleotide primer for the detection of SNP TSC0047033
ttattttaaaag

SEQ ID NO: 350989 - DNA, 12 bp, Artificial Sequence
  Oligonucleotide primer for the detection of SNP TSC0047034
ttttttggtgaa

SEQ ID NO: 350990 - DNA, 12 bp, Artificial Sequence
  Oligonucleotide primer for the detection of SNP TSC0047034
tcccttaataaa

SEQ ID NO: 350991 - DNA, 12 bp, Artificial Sequence
  Oligonucleotide primer for the detection of SNP TSC0047034
atgaggtgagtt

SEQ ID NO: 350992 - DNA, 12 bp, Artificial Sequence
  Oligonucleotide primer for the detection of SNP TSC0047037
gtgtttgatgat

SEQ ID NO: 350993 - DNA, 12 bp, Artificial Sequence
  Oligonucleotide primer for the detection of SNP TSC0047037
gtgttcgatgat

SEQ ID NO: 350994 - DNA, 12 bp, Artificial Sequence
  Oligonucleotide primer for the detection of SNP TSC0047037
aatattcaataa

SEQ ID NO: 350995 - DNA, 12 bp, Artificial Sequence
  Oligonucleotide primer for the detection of SNP TSC0047037
aatattcgataa

SEQ ID NO: 350996 - DNA, 12 bp, Artificial Sequence
  Oligonucleotide primer for the detection of SNP TSC0047037
ttaaaagaatat

SEQ ID NO: 350997 - DNA, 12 bp, Artificial Sequence
  Oligonucleotide primer for the detection of SNP TSC0047039
caacctaatttc

SEQ ID NO: 350998 - DNA, 12 bp, Artificial Sequence
  Oligonucleotide primer for the detection of SNP TSC0047039
tatttgatattt

SEQ ID NO: 350999 - DNA, 12 bp, Artificial Sequence
  Oligonucleotide primer for the detection of SNP TSC0047039
tacttaacattt

SEQ ID NO: 351000 - DNA, 12 bp, Artificial Sequence
  Oligonucleotide primer for the detection of SNP TSC0047040
tcgaaaaacata

SEQ ID NO: 351001 - DNA, 12 bp, Artificial Sequence
  Oligonucleotide primer for the detection of SNP TSC0047040
agaagggtagaa

SEQ ID NO: 351002 - DNA, 12 bp, Artificial Sequence
  Oligonucleotide primer for the detection of SNP TSC0047040
ttgaggggtata

SEQ ID NO: 351003 - DNA, 12 bp, Artificial Sequence
  Oligonucleotide primer for the detection of SNP TSC0047040
tcgaggggtata

SEQ ID NO: 351004 - DNA, 12 bp, Artificial Sequence
  Oligonucleotide primer for the detection of SNP TSC0047041
aaccacacaaaa

SEQ ID NO: 351005 - DNA, 12 bp, Artificial Sequence
  Oligonucleotide primer for the detection of SNP TSC0047041
aaccacgcaaaa

SEQ ID NO: 351006 - DNA, 12 bp, Artificial Sequence
  Oligonucleotide primer for the detection of SNP TSC0047041
gtttcgtggtag

SEQ ID NO: 351007 - DNA, 12 bp, Artificial Sequence
  Oligonucleotide primer for the detection of SNP TSC0047041
gttttgcggtag

SEQ ID NO: 351008 - DNA, 12 bp, Artificial Sequence
  Oligonucleotide primer for the detection of SNP TSC0047041
gtttcgcggtag

SEQ ID NO: 351009 - DNA, 12 bp, Artificial Sequence
  Oligonucleotide primer for the detection of SNP TSC0047041
acctcacaacaa

SEQ ID NO: 351010 - DNA, 12 bp, Artificial Sequence
  Oligonucleotide primer for the detection of SNP TSC0047041
acctcacgacaa

SEQ ID NO: 351011 - DNA, 12 bp, Artificial Sequence
  Oligonukleotid-Primer
acctcgcaacaa

SEQ ID NO: 351012 - DNA, 12 bp, Artificial Sequence
  Oligonucleotide primer for the detection of SNP TSC0047041
acctcgcgacaa

SEQ ID NO: 351013 - DNA, 12 bp, Artificial Sequence
  Oligonucleotide primer for the detection of SNP TSC0047041
gattatgtagaa

SEQ ID NO: 351014 - DNA, 12 bp, Artificial Sequence
  Oligonucleotide primer for the detection of SNP TSC0047041
gattacgtagaa

SEQ ID NO: 351015 - DNA, 12 bp, Artificial Sequence
  Oligonucleotide primer for the detection of SNP TSC0047042
aaaactacgacc

SEQ ID NO: 351016 - DNA, 12 bp, Artificial Sequence
  Oligonucleotide primer for the detection of SNP TSC0047042
ttgggtttggaa

SEQ ID NO: 351017 - DNA, 12 bp, Artificial Sequence
  Oligonucleotide primer for the detection of SNP TSC0047042
ctaaacctaaaa

SEQ ID NO: 351018 - DNA, 12 bp, Artificial Sequence
  Oligonucleotide primer for the detection of SNP TSC0047042
ggggttgtggtt

SEQ ID NO: 351019 - DNA, 12 bp, Artificial Sequence
  Oligonucleotide primer for the detection of SNP TSC0047042
ggggttgcggtt

SEQ ID NO: 351020 - DNA, 12 bp, Artificial Sequence
  Oligonucleotide primer for the detection of SNP TSC0047043
atctcataaccc

SEQ ID NO: 351021 - DNA, 12 bp, Artificial Sequence
  Oligonucleotide primer for the detection of SNP TSC0047043
atctcgtaaccc

SEQ ID NO: 351022 - DNA, 12 bp, Artificial Sequence
  Oligonucleotide primer for the detection of SNP TSC0047043
ggtggaggattt

SEQ ID NO: 351023 - DNA, 12 bp, Artificial Sequence
  Oligonucleotide primer for the detection of SNP TSC0047043
ggcggaggattt

SEQ ID NO: 351024 - DNA, 12 bp, Artificial Sequence
  Oligonucleotide primer for the detection of SNP TSC0047043
ggtggaggattc

SEQ ID NO: 351025 - DNA, 12 bp, Artificial Sequence
  Oligonucleotide primer for the detection of SNP TSC0047043
ggcggaggattc

SEQ ID NO: 351026 - DNA, 12 bp, Artificial Sequence
  Oligonucleotide primer for the detection of SNP TSC0047043
aaacgaaaaact

SEQ ID NO: 351027 - DNA, 12 bp, Artificial Sequence
  Oligonucleotide primer for the detection of SNP TSC0047043
gttttgtgattt

SEQ ID NO: 351028 - DNA, 12 bp, Artificial Sequence
  Oligonucleotide primer for the detection of SNP TSC0047043
gtttcgtgattt

SEQ ID NO: 351029 - DNA, 12 bp, Artificial Sequence
  Oligonucleotide primer for the detection of SNP TSC0047044
actacaacctaa

SEQ ID NO: 351030 - DNA, 12 bp, Artificial Sequence
  Oligonucleotide primer for the detection of SNP TSC0047044
actacgacctaa

SEQ ID NO: 351031 - DNA, 12 bp, Artificial Sequence
  Oligonucleotide primer for the detection of SNP TSC0047044
cacctaaaccta

SEQ ID NO: 351032 - DNA, 12 bp, Artificial Sequence
  Oligonucleotide primer for the detection of SNP TSC0047044
tgtggtttggtt

SEQ ID NO: 351033 - DNA, 12 bp, Artificial Sequence
  Oligonucleotide primer for the detection of SNP TSC0047044
tgcggtttggtt

SEQ ID NO: 351034 - DNA, 12 bp, Artificial Sequence
  Oligonucleotide primer for the detection of SNP TSC0047045
ccatttacttat

SEQ ID NO: 351035 - DNA, 12 bp, Artificial Sequence
  Oligonucleotide primer for the detection of SNP TSC0047045
tataatttattg

SEQ ID NO: 351036 - DNA, 12 bp, Artificial Sequence
  Oligonucleotide primer for the detection of SNP TSC0047045
tataatttatcg

SEQ ID NO: 351037 - DNA, 12 bp, Artificial Sequence
  Oligonucleotide primer for the detection of SNP TSC0047046
ctacccttccct

SEQ ID NO: 351038 - DNA, 12 bp, Artificial Sequence
  Oligonucleotide primer for the detection of SNP TSC0047046
attagatttttg

SEQ ID NO: 351039 - DNA, 12 bp, Artificial Sequence
  Oligonucleotide primer for the detection of SNP TSC0047046
attaaatttcta

SEQ ID NO: 351040 - DNA, 12 bp, Artificial Sequence
  Oligonucleotide primer for the detection of SNP TSC0047047
gggttggagtgt

SEQ ID NO: 351041 - DNA, 12 bp, Artificial Sequence
  Oligonucleotide primer for the detection of SNP TSC0047049
acttaaacaaat

SEQ ID NO: 351042 - DNA, 12 bp, Artificial Sequence
  Oligonucleotide primer for the detection of SNP TSC0047049
attttttttgaa

SEQ ID NO: 351043 - DNA, 12 bp, Artificial Sequence
  Oligonucleotide primer for the detection of SNP TSC0047053
taattatacatt

SEQ ID NO: 351044 - DNA, 12 bp, Artificial Sequence
  Oligonucleotide primer for the detection of SNP TSC0047053
ataaatattata

SEQ ID NO: 351045 - DNA, 12 bp, Artificial Sequence
  Oligonucleotide primer for the detection of SNP TSC0047053
taattatgtatt

SEQ ID NO: 351046 - DNA, 12 bp, Artificial Sequence
  Oligonucleotide primer for the detection of SNP TSC0047054
tttctattacat

SEQ ID NO: 351047 - DNA, 12 bp, Artificial Sequence
  Oligonucleotide primer for the detection of SNP TSC0047054
taatgtataata

SEQ ID NO: 351048 - DNA, 12 bp, Artificial Sequence
  Oligonucleotide primer for the detection of SNP TSC0047055
aacaccaaaaaa

SEQ ID NO: 351049 - DNA, 12 bp, Artificial Sequence
  Oligonucleotide primer for the detection of SNP TSC0047055
aacaccgaaaaa

SEQ ID NO: 351050 - DNA, 12 bp, Artificial Sequence
  Oligonucleotide primer for the detection of SNP TSC0047055
cctataacttta

SEQ ID NO: 351051 - DNA, 12 bp, Artificial Sequence
  Oligonucleotide primer for the detection of SNP TSC0047055
atattgagagat

SEQ ID NO: 351052 - DNA, 12 bp, Artificial Sequence
  Oligonucleotide primer for the detection of SNP TSC0047055
atatcgagagat

SEQ ID NO: 351053 - DNA, 12 bp, Artificial Sequence
  Oligonucleotide primer for the detection of SNP TSC0005656
aaggtatgagtg

SEQ ID NO: 351054 - DNA, 12 bp, Artificial Sequence
  Oligonucleotide primer for the detection of SNP TSC0005656
aaacataaataa

SEQ ID NO: 351055 - DNA, 12 bp, Artificial Sequence
  Oligonucleotide primer for the detection of SNP TSC0005656
gggagtggggat

SEQ ID NO: 351056 - DNA, 12 bp, Artificial Sequence
  Oligonucleotide primer for the detection of SNP TSC0047056
cacacaaaaacc

SEQ ID NO: 351057 - DNA, 12 bp, Artificial Sequence
  Oligonucleotide primer for the detection of SNP TSC0047056
cacacgaaaacc

SEQ ID NO: 351058 - DNA, 12 bp, Artificial Sequence
  Oligonucleotide primer for the detection of SNP TSC0047056
aatagaaggaag

SEQ ID NO: 351059 - DNA, 12 bp, Artificial Sequence
  Oligonucleotide primer for the detection of SNP TSC0047057
accatcttcctt

SEQ ID NO: 351060 - DNA, 12 bp, Artificial Sequence
  Oligonucleotide primer for the detection of SNP TSC0047057
tgtttgggaata

SEQ ID NO: 351061 - DNA, 12 bp, Artificial Sequence
  Oligonucleotide primer for the detection of SNP TSC0047058
aaaaacatctct

SEQ ID NO: 351062 - DNA, 12 bp, Artificial Sequence
  Oligonucleotide primer for the detection of SNP TSC0047058
attaatattata

SEQ ID NO: 351063 - DNA, 12 bp, Artificial Sequence
  Oligonucleotide primer for the detection of SNP TSC0047059
tccctaaaatat

SEQ ID NO: 351064 - DNA, 12 bp, Artificial Sequence
  Oligonucleotide primer for the detection of SNP TSC0047059
ggattttaaata

SEQ ID NO: 351065 - DNA, 12 bp, Artificial Sequence
  Oligonucleotide primer for the detection of SNP TSC0047060
caaaaataacac

SEQ ID NO: 351066 - DNA, 12 bp, Artificial Sequence
  Oligonucleotide primer for the detection of SNP TSC0047061
ttctccactccc

SEQ ID NO: 351067 - DNA, 12 bp, Artificial Sequence
  Oligonucleotide primer for the detection of SNP TSC0047070
cctccctccaat

SEQ ID NO: 351068 - DNA, 12 bp, Artificial Sequence
  Oligonucleotide primer for the detection of SNP TSC0047070
aagatattttat

SEQ ID NO: 351069 - DNA, 12 bp, Artificial Sequence
  Oligonucleotide primer for the detection of SNP TSC0047070
aaaacattttac

SEQ ID NO: 351070 - DNA, 12 bp, Artificial Sequence
  Oligonucleotide primer for the detection of SNP TSC0047077
aaaaatatctaa

SEQ ID NO: 351071 - DNA, 12 bp, Artificial Sequence
  Oligonucleotide primer for the detection of SNP TSC0047077
aaatgtataaat

SEQ ID NO: 351072 - DNA, 12 bp, Artificial Sequence
  Oligonucleotide primer for the detection of SNP TSC0047077
aaacgtataaat

SEQ ID NO: 351073 - DNA, 12 bp, Artificial Sequence
  Oligonucleotide primer for the detection of SNP TSC0047077
acgtataaataa

SEQ ID NO: 351074 - DNA, 12 bp, Artificial Sequence
  Oligonucleotide primer for the detection of SNP TSC0047077
aaagatatttgg

SEQ ID NO: 351075 - DNA, 12 bp, Artificial Sequence
  Oligonucleotide primer for the detection of SNP TSC0047079
acaccaaatcat

SEQ ID NO: 351076 - DNA, 12 bp, Artificial Sequence
  Oligonucleotide primer for the detection of SNP TSC0047079
ccaaatccatta

SEQ ID NO: 351077 - DNA, 12 bp, Artificial Sequence
  Oligonucleotide primer for the detection of SNP TSC0047079
atattaggttat

SEQ ID NO: 351078 - DNA, 12 bp, Artificial Sequence
  Oligonucleotide primer for the detection of SNP TSC0047080
tacttatttact

SEQ ID NO: 351079 - DNA, 12 bp, Artificial Sequence
  Oligonucleotide primer for the detection of SNP TSC0047080
ggaagggaagtt

SEQ ID NO: 351080 - DNA, 12 bp, Artificial Sequence
  Oligonucleotide primer for the detection of SNP TSC0047085
ggatttattttt

SEQ ID NO: 351081 - DNA, 12 bp, Artificial Sequence
  Oligonucleotide primer for the detection of SNP TSC0047085
ggatttattttc

SEQ ID NO: 351082 - DNA, 12 bp, Artificial Sequence
  Oligonucleotide primer for the detection of SNP TSC0047085
tgtagtgagtgt

SEQ ID NO: 351083 - DNA, 12 bp, Artificial Sequence
  Oligonucleotide primer for the detection of SNP TSC0047086
ttaaacatattc

SEQ ID NO: 351084 - DNA, 12 bp, Artificial Sequence
  Oligonucleotide primer for the detection of SNP TSC0047086
tggagtgttggg

SEQ ID NO: 351085 - DNA, 12 bp, Artificial Sequence
  Oligonucleotide primer for the detection of SNP TSC0047087
tttactcactat

SEQ ID NO: 351086 - DNA, 12 bp, Artificial Sequence
  Oligonucleotide primer for the detection of SNP TSC0047087
tttattgtttaa

SEQ ID NO: 351087 - DNA, 12 bp, Artificial Sequence
  Oligonucleotide primer for the detection of SNP TSC0047087
tccactactcaa

SEQ ID NO: 351088 - DNA, 12 bp, Artificial Sequence
  Oligonucleotide primer for the detection of SNP TSC0047088
actaaaatctcc

SEQ ID NO: 351089 - DNA, 12 bp, Artificial Sequence
  Oligonucleotide primer for the detection of SNP TSC0047089
atccctccatca

SEQ ID NO: 351090 - DNA, 12 bp, Artificial Sequence
  Oligonucleotide primer for the detection of SNP TSC0047089
gtttagagagat

SEQ ID NO: 351091 - DNA, 12 bp, Artificial Sequence
  Oligonucleotide primer for the detection of SNP TSC0047089
acctaaaaaaat

SEQ ID NO: 351092 - DNA, 12 bp, Artificial Sequence
  Oligonucleotide primer for the detection of SNP TSC0047090
ttatcactacat

SEQ ID NO: 351093 - DNA, 12 bp, Artificial Sequence
  Oligonucleotide primer for the detection of SNP TSC0047090
tagtgttggggg

SEQ ID NO: 351094 - DNA, 12 bp, Artificial Sequence
  Oligonucleotide primer for the detection of SNP TSC0047091
acatataataat

SEQ ID NO: 351095 - DNA, 12 bp, Artificial Sequence
  Oligonucleotide primer for the detection of SNP TSC0047091
agttattttatg

SEQ ID NO: 351096 - DNA, 12 bp, Artificial Sequence
  Oligonucleotide primer for the detection of SNP TSC0047092
caaaaatccaac

SEQ ID NO: 351097 - DNA, 12 bp, Artificial Sequence
  Oligonucleotide primer for the detection of SNP TSC0047092
tataggggttta

SEQ ID NO: 351098 - DNA, 12 bp, Artificial Sequence
  Oligonucleotide primer for the detection of SNP TSC0047093
actatactcaac

SEQ ID NO: 351099 - DNA, 12 bp, Artificial Sequence
  Oligonucleotide primer for the detection of SNP TSC0047093
ttggggaagaaa

SEQ ID NO: 351100 - DNA, 12 bp, Artificial Sequence
  Oligonucleotide primer for the detection of SNP TSC0047094
aaataacttttt

SEQ ID NO: 351101 - DNA, 12 bp, Artificial Sequence
  Oligonucleotide primer for the detection of SNP TSC0047094
aggtagtttttt

SEQ ID NO: 351102 - DNA, 12 bp, Artificial Sequence
  Oligonucleotide primer for the detection of SNP TSC0047097
actttattatac

SEQ ID NO: 351103 - DNA, 12 bp, Artificial Sequence
  Oligonucleotide primer for the detection of SNP TSC0047097
gctttattatac

SEQ ID NO: 351104 - DNA, 12 bp, Artificial Sequence
  Oligonucleotide primer for the detection of SNP TSC0047097
aaatatagtaag

SEQ ID NO: 351105 - DNA, 12 bp, Artificial Sequence
  Oligonucleotide primer for the detection of SNP TSC0047097
gttttgttgtgt

SEQ ID NO: 351106 - DNA, 12 bp, Artificial Sequence
  Oligonucleotide primer for the detection of SNP TSC0047098
atatacttaaat

SEQ ID NO: 351107 - DNA, 12 bp, Artificial Sequence
  Oligonucleotide primer for the detection of SNP TSC0047098
attatataaata

SEQ ID NO: 351108 - DNA, 12 bp, Artificial Sequence
  Oligonucleotide primer for the detection of SNP TSC0047098
accacataaaca

SEQ ID NO: 351109 - DNA, 12 bp, Artificial Sequence
  Oligonucleotide primer for the detection of SNP TSC0047098
atgtgtttaagt

SEQ ID NO: 351110 - DNA, 12 bp, Artificial Sequence
  Oligonucleotide primer for the detection of SNP TSC0007743
aaccactatata

SEQ ID NO: 351111 - DNA, 12 bp, Artificial Sequence
  Oligonucleotide primer for the detection of SNP TSC0007743
tatttcttcaca

SEQ ID NO: 351112 - DNA, 12 bp, Artificial Sequence
  Oligonucleotide primer for the detection of SNP TSC0007743
attattatgtat

SEQ ID NO: 351113 - DNA, 12 bp, Artificial Sequence
  Oligonucleotide primer for the detection of SNP TSC0047102
aatttataatta

SEQ ID NO: 351114 - DNA, 12 bp, Artificial Sequence
  Oligonucleotide primer for the detection of SNP TSC0047102
accacaaacaaa

SEQ ID NO: 351115 - DNA, 12 bp, Artificial Sequence
  Oligonucleotide primer for the detection of SNP TSC0047102
atttgtgattat

SEQ ID NO: 351116 - DNA, 12 bp, Artificial Sequence
  Oligonucleotide primer for the detection of SNP TSC0047103
ttcattattact

SEQ ID NO: 351117 - DNA, 12 bp, Artificial Sequence
  Oligonucleotide primer for the detection of SNP TSC0047104
tttatagaaaag

SEQ ID NO: 351118 - DNA, 12 bp, Artificial Sequence
  Oligonucleotide primer for the detection of SNP TSC0047106
ttggtattttga

SEQ ID NO: 351119 - DNA, 12 bp, Artificial Sequence
  Oligonucleotide primer for the detection of SNP TSC0047106
ttggtatttcga

SEQ ID NO: 351120 - DNA, 12 bp, Artificial Sequence
  Oligonucleotide primer for the detection of SNP TSC0047106
taacacctcaaa

SEQ ID NO: 351121 - DNA, 12 bp, Artificial Sequence
  Oligonucleotide primer for the detection of SNP TSC0047106
taacacctcgaa

SEQ ID NO: 351122 - DNA, 12 bp, Artificial Sequence
  Oligonucleotide primer for the detection of SNP TSC0047106
aggaggggaaaa

SEQ ID NO: 351123 - DNA, 12 bp, Artificial Sequence
  Oligonucleotide primer for the detection of SNP TSC0047107
actcaattttat

SEQ ID NO: 351124 - DNA, 12 bp, Artificial Sequence
  Oligonucleotide primer for the detection of SNP TSC0047108
tatatttccctc

SEQ ID NO: 351125 - DNA, 12 bp, Artificial Sequence
  Oligonucleotide primer for the detection of SNP TSC0047108
gatagatagtag

SEQ ID NO: 351126 - DNA, 12 bp, Artificial Sequence
  Oligonucleotide primer for the detection of SNP TSC0047109
acatcttccaaa

SEQ ID NO: 351127 - DNA, 12 bp, Artificial Sequence
  Oligonucleotide primer for the detection of SNP TSC0047109
aaatgaaaatag

SEQ ID NO: 351128 - DNA, 12 bp, Artificial Sequence
  Oligonucleotide primer for the detection of SNP TSC0047110
caaatcaaaatt

SEQ ID NO: 351129 - DNA, 12 bp, Artificial Sequence
  Oligonucleotide primer for the detection of SNP TSC0047110
aatactttccaa

SEQ ID NO: 351130 - DNA, 12 bp, Artificial Sequence
  Oligonucleotide primer for the detection of SNP TSC0047111
ccaaatcaaaat

SEQ ID NO: 351131 - DNA, 12 bp, Artificial Sequence
  Oligonucleotide primer for the detection of SNP TSC0047111
tactttccaaca

SEQ ID NO: 351132 - DNA, 12 bp, Artificial Sequence
  Oligonucleotide primer for the detection of SNP TSC0047116
tatcatcaacca

SEQ ID NO: 351133 - DNA, 12 bp, Artificial Sequence
  Oligonucleotide primer for the detection of SNP TSC0047116
ttgagagttatt

SEQ ID NO: 351134 - DNA, 12 bp, Artificial Sequence
  Oligonucleotide primer for the detection of SNP TSC0047116
ttgagagttatc

SEQ ID NO: 351135 - DNA, 12 bp, Artificial Sequence
  Oligonucleotide primer for the detection of SNP TSC0047116
cctaaaaaccat

SEQ ID NO: 351136 - DNA, 12 bp, Artificial Sequence
  Oligonucleotide primer for the detection of SNP TSC0047116
tgttattaatta

SEQ ID NO: 351137 - DNA, 12 bp, Artificial Sequence
  Oligonucleotide primer for the detection of SNP TSC0047117
tttggtatttat

SEQ ID NO: 351138 - DNA, 12 bp, Artificial Sequence
  Oligonucleotide primer for the detection of SNP TSC0047117
aaaagtagtaat

SEQ ID NO: 351139 - DNA, 12 bp, Artificial Sequence
  Oligonucleotide primer for the detection of SNP TSC0047118
taatacaatata

SEQ ID NO: 351140 - DNA, 12 bp, Artificial Sequence
  Oligonucleotide primer for the detection of SNP TSC0047118
tttagtattaat

SEQ ID NO: 351141 - DNA, 12 bp, Artificial Sequence
  Oligonucleotide primer for the detection of SNP TSC0047118
cttaatattaat

SEQ ID NO: 351142 - DNA, 12 bp, Artificial Sequence
  Oligonucleotide primer for the detection of SNP TSC0047118
tggtataatgta

SEQ ID NO: 351143 - DNA, 12 bp, Artificial Sequence
  Oligonucleotide primer for the detection of SNP TSC0047119
atacaattccca

SEQ ID NO: 351144 - DNA, 12 bp, Artificial Sequence
  Oligonucleotide primer for the detection of SNP TSC0047120
atataaatcttt

SEQ ID NO: 351145 - DNA, 12 bp, Artificial Sequence
  Oligonucleotide primer for the detection of SNP TSC0047120
ttaattaagaag

SEQ ID NO: 351146 - DNA, 12 bp, Artificial Sequence
  Oligonucleotide primer for the detection of SNP TSC0047122
ctcctcaccccc

SEQ ID NO: 351147 - DNA, 12 bp, Artificial Sequence
  Oligonucleotide primer for the detection of SNP TSC0047122
ctcctcgccccc

SEQ ID NO: 351148 - DNA, 12 bp, Artificial Sequence
  Oligonucleotide primer for the detection of SNP TSC0047122
tttttgtggggt

SEQ ID NO: 351149 - DNA, 12 bp, Artificial Sequence
  Oligonucleotide primer for the detection of SNP TSC0047123
tcataataaaat

SEQ ID NO: 351150 - DNA, 12 bp, Artificial Sequence
  Oligonucleotide primer for the detection of SNP TSC0047123
tatatttaaata

SEQ ID NO: 351151 - DNA, 12 bp, Artificial Sequence
  Oligonucleotide primer for the detection of SNP TSC0047123
tatacctaaata

SEQ ID NO: 351152 - DNA, 12 bp, Artificial Sequence
  Oligonukleotid-Primer
ttatggtaagat

SEQ ID NO: 351153 - DNA, 12 bp, Artificial Sequence
  Oligonucleotide primer for the detection of SNP TSC0047129
cattctataatt

SEQ ID NO: 351154 - DNA, 12 bp, Artificial Sequence
  Oligonucleotide primer for the detection of SNP TSC0047129
ttttattttgga

SEQ ID NO: 351155 - DNA, 12 bp, Artificial Sequence
  Oligonucleotide primer for the detection of SNP TSC0047130
ttttatctcccc

SEQ ID NO: 351156 - DNA, 12 bp, Artificial Sequence
  Oligonukleotid-Primer
taatgggatttt

SEQ ID NO: 351157 - DNA, 12 bp, Artificial Sequence
  Oligonucleotide primer for the detection of SNP TSC0047130
aataaaacttca

SEQ ID NO: 351158 - DNA, 12 bp, Artificial Sequence
  Oligonucleotide primer for the detection of SNP TSC0047131
aaataaaacatc

SEQ ID NO: 351159 - DNA, 12 bp, Artificial Sequence
  Oligonucleotide primer for the detection of SNP TSC0047131
aaataaaacgtc

SEQ ID NO: 351160 - DNA, 12 bp, Artificial Sequence
  Oligonukleotid-Primer
ttaaactaaact

SEQ ID NO: 351161 - DNA, 12 bp, Artificial Sequence
  Oligonucleotide primer for the detection of SNP TSC0047132
atgattatgtta

SEQ ID NO: 351162 - DNA, 12 bp, Artificial Sequence
  Oligonucleotide primer for the detection of SNP TSC0047135
atgtatttgtta

SEQ ID NO: 351163 - DNA, 12 bp, Artificial Sequence
  Oligonucleotide primer for the detection of SNP TSC0047135
atatatttatta

SEQ ID NO: 351164 - DNA, 12 bp, Artificial Sequence
  Oligonucleotide primer for the detection of SNP TSC0047135
gttgttaaaatt

SEQ ID NO: 351165 - DNA, 12 bp, Artificial Sequence
  Oligonucleotide primer for the detection of SNP TSC0047136
acattctatata

SEQ ID NO: 351166 - DNA, 12 bp, Artificial Sequence
  Oligonucleotide primer for the detection of SNP TSC0047136
tttgtagagtgt

SEQ ID NO: 351167 - DNA, 12 bp, Artificial Sequence
  Oligonucleotide primer for the detection of SNP TSC0047136
ttacaaaataca

SEQ ID NO: 351168 - DNA, 12 bp, Artificial Sequence
  Oligonucleotide primer for the detection of SNP TSC0047136
atattttgtgta

SEQ ID NO: 351169 - DNA, 12 bp, Artificial Sequence
  Oligonucleotide primer for the detection of SNP TSC0047139
atatatagtggg

SEQ ID NO: 351170 - DNA, 12 bp, Artificial Sequence
  Oligonucleotide primer for the detection of SNP TSC0047140
catataataaac

SEQ ID NO: 351171 - DNA, 12 bp, Artificial Sequence
  Oligonucleotide primer for the detection of SNP TSC0047140
tttgaattattt

SEQ ID NO: 351172 - DNA, 12 bp, Artificial Sequence
  Oligonucleotide primer for the detection of SNP TSC0047140
ttaaatcattta

SEQ ID NO: 351173 - DNA, 12 bp, Artificial Sequence
  Oligonucleotide primer for the detection of SNP TSC0047140
atatagtaaatt

SEQ ID NO: 351174 - DNA, 12 bp, Artificial Sequence
  Oligonucleotide primer for the detection of SNP TSC0047141
aaaaactatcat

SEQ ID NO: 351175 - DNA, 12 bp, Artificial Sequence
  Oligonucleotide primer for the detection of SNP TSC0047141
aactaattttca

SEQ ID NO: 351176 - DNA, 12 bp, Artificial Sequence
  Oligonucleotide primer for the detection of SNP TSC0047142
gtgtatgtgtat

SEQ ID NO: 351177 - DNA, 12 bp, Artificial Sequence
  Oligonucleotide primer for the detection of SNP TSC0000546
atttcaaacttt

SEQ ID NO: 351178 - DNA, 12 bp, Artificial Sequence
  Oligonucleotide primer for the detection of SNP TSC0000546
agaaaaatgtgg

SEQ ID NO: 351179 - DNA, 12 bp, Artificial Sequence
  Oligonucleotide primer for the detection of SNP TSC0009652
ccaacaccctct

SEQ ID NO: 351180 - DNA, 12 bp, Artificial Sequence
  Oligonucleotide primer for the detection of SNP TSC0009652
agtgttgatttg

SEQ ID NO: 351181 - DNA, 12 bp, Artificial Sequence
  Oligonucleotide primer for the detection of SNP TSC0047143
taatgttattgt

SEQ ID NO: 351182 - DNA, 12 bp, Artificial Sequence
  Oligonucleotide primer for the detection of SNP TSC0047143
ttaatattacta

SEQ ID NO: 351183 - DNA, 12 bp, Artificial Sequence
  Oligonucleotide primer for the detection of SNP TSC0047143
gtaaataatata

SEQ ID NO: 351184 - DNA, 12 bp, Artificial Sequence
  Oligonucleotide primer for the detection of SNP TSC0000200
tataacccacat

SEQ ID NO: 351185 - DNA, 12 bp, Artificial Sequence
  Oligonucleotide primer for the detection of SNP TSC0000200
gttttattttag
